United States Patent Application Publication US 2015/0232836 A1 - sequence listing, part 8

SEQ ID NO: 176655 - DNA, 15 bp, Homo sapiens
ccaggggaactcatt

SEQ ID NO: 176656 - DNA, 15 bp, Homo sapiens
cccaggggaactcat

SEQ ID NO: 176657 - DNA, 15 bp, Homo sapiens
tcccaggggaactca

SEQ ID NO: 176658 - DNA, 15 bp, Homo sapiens
ttcccaggggaactc

SEQ ID NO: 176659 - DNA, 15 bp, Homo sapiens
tttcccaggggaact

SEQ ID NO: 176660 - DNA, 15 bp, Homo sapiens
ctttcccaggggaac

SEQ ID NO: 176661 - DNA, 15 bp, Homo sapiens
tctttcccaggggaa

SEQ ID NO: 176662 - DNA, 15 bp, Homo sapiens
ttctttcccagggga

SEQ ID NO: 176663 - DNA, 15 bp, Homo sapiens
tttctttcccagggg

SEQ ID NO: 176664 - DNA, 15 bp, Homo sapiens
ttttctttcccaggg

SEQ ID NO: 176665 - DNA, 15 bp, Homo sapiens
attttctttcccagg

SEQ ID NO: 176666 - DNA, 15 bp, Homo sapiens
gattttctttcccag

SEQ ID NO: 176667 - DNA, 15 bp, Homo sapiens
cgattttctttccca

SEQ ID NO: 176668 - DNA, 15 bp, Homo sapiens
gcgattttctttccc

SEQ ID NO: 176669 - DNA, 15 bp, Homo sapiens
ggcgattttctttcc

SEQ ID NO: 176670 - DNA, 15 bp, Homo sapiens
gggcgattttctttc

SEQ ID NO: 176671 - DNA, 15 bp, Homo sapiens
tgggcgattttcttt

SEQ ID NO: 176672 - DNA, 15 bp, Homo sapiens
ttgggcgattttctt

SEQ ID NO: 176673 - DNA, 15 bp, Homo sapiens
cttgggcgattttct

SEQ ID NO: 176674 - DNA, 15 bp, Homo sapiens
acttgggcgattttc

SEQ ID NO: 176675 - DNA, 15 bp, Homo sapiens
cacttgggcgatttt

SEQ ID NO: 176676 - DNA, 15 bp, Homo sapiens
tcacttgggcgattt

SEQ ID NO: 176677 - DNA, 15 bp, Homo sapiens
ctcacttgggcgatt

SEQ ID NO: 176678 - DNA, 15 bp, Homo sapiens
tctcacttgggcgat

SEQ ID NO: 176679 - DNA, 15 bp, Homo sapiens
ttctcacttgggcga

SEQ ID NO: 176680 - DNA, 15 bp, Homo sapiens
tttctcacttgggcg

SEQ ID NO: 176681 - DNA, 15 bp, Homo sapiens
gtttctcacttgggc

SEQ ID NO: 176682 - DNA, 15 bp, Homo sapiens
agtttctcacttggg

SEQ ID NO: 176683 - DNA, 15 bp, Homo sapiens
aagtttctcacttgg

SEQ ID NO: 176684 - DNA, 15 bp, Homo sapiens
taagtttctcacttg

SEQ ID NO: 176685 - DNA, 15 bp, Homo sapiens
ataagtttctcactt

SEQ ID NO: 176686 - DNA, 15 bp, Homo sapiens
cataagtttctcact

SEQ ID NO: 176687 - DNA, 15 bp, Homo sapiens
gcataagtttctcac

SEQ ID NO: 176688 - DNA, 15 bp, Homo sapiens
ggcataagtttctca

SEQ ID NO: 176689 - DNA, 15 bp, Homo sapiens
tggcataagtttctc

SEQ ID NO: 176690 - DNA, 15 bp, Homo sapiens
ttggcataagtttct

SEQ ID NO: 176691 - DNA, 15 bp, Homo sapiens
gttggcataagtttc

SEQ ID NO: 176692 - DNA, 15 bp, Homo sapiens
ggttggcataagttt

SEQ ID NO: 176693 - DNA, 15 bp, Homo sapiens
tggttggcataagtt

SEQ ID NO: 176694 - DNA, 15 bp, Homo sapiens
gtggttggcataagt

SEQ ID NO: 176695 - DNA, 15 bp, Homo sapiens
tgtggttggcataag

SEQ ID NO: 176696 - DNA, 15 bp, Homo sapiens
atgtggttggcataa

SEQ ID NO: 176697 - DNA, 15 bp, Homo sapiens
aatgtggttggcata

SEQ ID NO: 176698 - DNA, 15 bp, Homo sapiens
gaatgtggttggcat

SEQ ID NO: 176699 - DNA, 15 bp, Homo sapiens
ggaatgtggttggca

SEQ ID NO: 176700 - DNA, 15 bp, Homo sapiens
gggaatgtggttggc

SEQ ID NO: 176701 - DNA, 15 bp, Homo sapiens
tgggaatgtggttgg

SEQ ID NO: 176702 - DNA, 15 bp, Homo sapiens
atgggaatgtggttg

SEQ ID NO: 176703 - DNA, 15 bp, Homo sapiens
catgggaatgtggtt

SEQ ID NO: 176704 - DNA, 15 bp, Homo sapiens
gcatgggaatgtggt

SEQ ID NO: 176705 - DNA, 15 bp, Homo sapiens
ggcatgggaatgtgg

SEQ ID NO: 176706 - DNA, 15 bp, Homo sapiens
gggcatgggaatgtg

SEQ ID NO: 176707 - DNA, 15 bp, Homo sapiens
ggggcatgggaatgt

SEQ ID NO: 176708 - DNA, 15 bp, Homo sapiens
aggggcatgggaatg

SEQ ID NO: 176709 - DNA, 15 bp, Homo sapiens
taggggcatgggaat

SEQ ID NO: 176710 - DNA, 15 bp, Homo sapiens
gtaggggcatgggaa

SEQ ID NO: 176711 - DNA, 15 bp, Homo sapiens
tgtaggggcatggga

SEQ ID NO: 176712 - DNA, 15 bp, Homo sapiens
ctgtaggggcatggg

SEQ ID NO: 176713 - DNA, 15 bp, Homo sapiens
actgtaggggcatgg

SEQ ID NO: 176714 - DNA, 15 bp, Homo sapiens
aactgtaggggcatg

SEQ ID NO: 176715 - DNA, 15 bp, Homo sapiens
taactgtaggggcat

SEQ ID NO: 176716 - DNA, 15 bp, Homo sapiens
gtaactgtaggggca

SEQ ID NO: 176717 - DNA, 15 bp, Homo sapiens
ggtaactgtaggggc

SEQ ID NO: 176718 - DNA, 15 bp, Homo sapiens
aggtaactgtagggg

SEQ ID NO: 176719 - DNA, 15 bp, Homo sapiens
caggtaactgtaggg

SEQ ID NO: 176720 - DNA, 15 bp, Homo sapiens
gcaggtaactgtagg

SEQ ID NO: 176721 - DNA, 15 bp, Homo sapiens
agcaggtaactgtag

SEQ ID NO: 176722 - DNA, 15 bp, Homo sapiens
cagcaggtaactgta

SEQ ID NO: 176723 - DNA, 15 bp, Homo sapiens
ccagcaggtaactgt

SEQ ID NO: 176724 - DNA, 15 bp, Homo sapiens
gccagcaggtaactg

SEQ ID NO: 176725 - DNA, 15 bp, Homo sapiens
ggccagcaggtaact

SEQ ID NO: 176726 - DNA, 15 bp, Homo sapiens
gggccagcaggtaac

SEQ ID NO: 176727 - DNA, 15 bp, Homo sapiens
tgggccagcaggtaa

SEQ ID NO: 176728 - DNA, 15 bp, Homo sapiens
ctgggccagcaggta

SEQ ID NO: 176729 - DNA, 15 bp, Homo sapiens
tctgggccagcaggt

SEQ ID NO: 176730 - DNA, 15 bp, Homo sapiens
atctgggccagcagg

SEQ ID NO: 176731 - DNA, 15 bp, Homo sapiens
gatctgggccagcag

SEQ ID NO: 176732 - DNA, 15 bp, Homo sapiens
tgatctgggccagca

SEQ ID NO: 176733 - DNA, 15 bp, Homo sapiens
ctgatctgggccagc

SEQ ID NO: 176734 - DNA, 15 bp, Homo sapiens
gctgatctgggccag

SEQ ID NO: 176735 - DNA, 15 bp, Homo sapiens
agctgatctgggcca

SEQ ID NO: 176736 - DNA, 15 bp, Homo sapiens
gagctgatctgggcc

SEQ ID NO: 176737 - DNA, 15 bp, Homo sapiens
agagctgatctgggc

SEQ ID NO: 176738 - DNA, 15 bp, Homo sapiens
gagagctgatctggg

SEQ ID NO: 176739 - DNA, 15 bp, Homo sapiens
agagagctgatctgg

SEQ ID NO: 176740 - DNA, 15 bp, Homo sapiens
cagagagctgatctg

SEQ ID NO: 176741 - DNA, 15 bp, Homo sapiens
ccagagagctgatct

SEQ ID NO: 176742 - DNA, 15 bp, Homo sapiens
cccagagagctgatc

SEQ ID NO: 176743 - DNA, 15 bp, Homo sapiens
acccagagagctgat

SEQ ID NO: 176744 - DNA, 15 bp, Homo sapiens
gacccagagagctga

SEQ ID NO: 176745 - DNA, 15 bp, Homo sapiens
agacccagagagctg

SEQ ID NO: 176746 - DNA, 15 bp, Homo sapiens
cagacccagagagct

SEQ ID NO: 176747 - DNA, 15 bp, Homo sapiens
gcagacccagagagc

SEQ ID NO: 176748 - DNA, 15 bp, Homo sapiens
tgcagacccagagag

SEQ ID NO: 176749 - DNA, 15 bp, Homo sapiens
ctgcagacccagaga

SEQ ID NO: 176750 - DNA, 15 bp, Homo sapiens
tctgcagacccagag

SEQ ID NO: 176751 - DNA, 15 bp, Homo sapiens
ctctgcagacccaga

SEQ ID NO: 176752 - DNA, 15 bp, Homo sapiens
cctctgcagacccag

SEQ ID NO: 176753 - DNA, 15 bp, Homo sapiens
ccctctgcagaccca

SEQ ID NO: 176754 - DNA, 15 bp, Homo sapiens
gccctctgcagaccc

SEQ ID NO: 176755 - DNA, 15 bp, Homo sapiens
ggccctctgcagacc

SEQ ID NO: 176756 - DNA, 15 bp, Homo sapiens
cggccctctgcagac

SEQ ID NO: 176757 - DNA, 15 bp, Homo sapiens
tcggccctctgcaga

SEQ ID NO: 176758 - DNA, 15 bp, Homo sapiens
ctcggccctctgcag

SEQ ID NO: 176759 - DNA, 15 bp, Homo sapiens
tctcggccctctgca

SEQ ID NO: 176760 - DNA, 15 bp, Homo sapiens
gtctcggccctctgc

SEQ ID NO: 176761 - DNA, 15 bp, Homo sapiens
tgtctcggccctctg

SEQ ID NO: 176762 - DNA, 15 bp, Homo sapiens
ctgtctcggccctct

SEQ ID NO: 176763 - DNA, 15 bp, Homo sapiens
cctgtctcggccctc

SEQ ID NO: 176764 - DNA, 15 bp, Homo sapiens
tcctgtctcggccct

SEQ ID NO: 176765 - DNA, 15 bp, Homo sapiens
ttcctgtctcggccc

SEQ ID NO: 176766 - DNA, 15 bp, Homo sapiens
cttcctgtctcggcc

SEQ ID NO: 176767 - DNA, 15 bp, Homo sapiens
gcttcctgtctcggc

SEQ ID NO: 176768 - DNA, 15 bp, Homo sapiens
tgcttcctgtctcgg

SEQ ID NO: 176769 - DNA, 15 bp, Homo sapiens
atgcttcctgtctcg

SEQ ID NO: 176770 - DNA, 15 bp, Homo sapiens
aatgcttcctgtctc

SEQ ID NO: 176771 - DNA, 15 bp, Homo sapiens
taatgcttcctgtct

SEQ ID NO: 176772 - DNA, 15 bp, Homo sapiens
ataatgcttcctgtc

SEQ ID NO: 176773 - DNA, 15 bp, Homo sapiens
aataatgcttcctgt

SEQ ID NO: 176774 - DNA, 15 bp, Homo sapiens
taataatgcttcctg

SEQ ID NO: 176775 - DNA, 15 bp, Homo sapiens
ttaataatgcttcct

SEQ ID NO: 176776 - DNA, 15 bp, Homo sapiens
cttaataatgcttcc

SEQ ID NO: 176777 - DNA, 15 bp, Homo sapiens
gcttaataatgcttc

SEQ ID NO: 176778 - DNA, 15 bp, Homo sapiens
tgcttaataatgctt

SEQ ID NO: 176779 - DNA, 15 bp, Homo sapiens
ctgcttaataatgct

SEQ ID NO: 176780 - DNA, 15 bp, Homo sapiens
actgcttaataatgc

SEQ ID NO: 176781 - DNA, 15 bp, Homo sapiens
tactgcttaataatg

SEQ ID NO: 176782 - DNA, 15 bp, Homo sapiens
atactgcttaataat

SEQ ID NO: 176783 - DNA, 15 bp, Homo sapiens
tatactgcttaataa

SEQ ID NO: 176784 - DNA, 15 bp, Homo sapiens
ttatactgcttaata

SEQ ID NO: 176785 - DNA, 15 bp, Homo sapiens
attatactgcttaat

SEQ ID NO: 176786 - DNA, 15 bp, Homo sapiens
aattatactgcttaa

SEQ ID NO: 176787 - DNA, 15 bp, Homo sapiens
aaattatactgctta

SEQ ID NO: 176788 - DNA, 15 bp, Homo sapiens
gaaattatactgctt

SEQ ID NO: 176789 - DNA, 15 bp, Homo sapiens
tgaaattatactgct

SEQ ID NO: 176790 - DNA, 15 bp, Homo sapiens
ttgaaattatactgc

SEQ ID NO: 176791 - DNA, 15 bp, Homo sapiens
tttgaaattatactg

SEQ ID NO: 176792 - DNA, 15 bp, Homo sapiens
gtttgaaattatact

SEQ ID NO: 176793 - DNA, 15 bp, Homo sapiens
tgtttgaaattatac

SEQ ID NO: 176794 - DNA, 15 bp, Homo sapiens
gtgtttgaaattata

SEQ ID NO: 176795 - DNA, 15 bp, Homo sapiens
agtgtttgaaattat

SEQ ID NO: 176796 - DNA, 15 bp, Homo sapiens
aagtgtttgaaatta

SEQ ID NO: 176797 - DNA, 15 bp, Homo sapiens
aaagtgtttgaaatt

SEQ ID NO: 176798 - DNA, 15 bp, Homo sapiens
taaagtgtttgaaat

SEQ ID NO: 176799 - DNA, 15 bp, Homo sapiens
gtaaagtgtttgaaa

SEQ ID NO: 176800 - DNA, 15 bp, Homo sapiens
agtaaagtgtttgaa

SEQ ID NO: 176801 - DNA, 15 bp, Homo sapiens
aagtaaagtgtttga

SEQ ID NO: 176802 - DNA, 15 bp, Homo sapiens
taagtaaagtgtttg

SEQ ID NO: 176803 - DNA, 15 bp, Homo sapiens
ctaagtaaagtgttt

SEQ ID NO: 176804 - DNA, 15 bp, Homo sapiens
actaagtaaagtgtt

SEQ ID NO: 176805 - DNA, 15 bp, Homo sapiens
cactaagtaaagtgt

SEQ ID NO: 176806 - DNA, 15 bp, Homo sapiens
gcactaagtaaagtg

SEQ ID NO: 176807 - DNA, 15 bp, Homo sapiens
ggcactaagtaaagt

SEQ ID NO: 176808 - DNA, 15 bp, Homo sapiens
tggcactaagtaaag

SEQ ID NO: 176809 - DNA, 15 bp, Homo sapiens
gtggcactaagtaaa

SEQ ID NO: 176810 - DNA, 15 bp, Homo sapiens
tgtggcactaagtaa

SEQ ID NO: 176811 - DNA, 15 bp, Homo sapiens
ctgtggcactaagta

SEQ ID NO: 176812 - DNA, 15 bp, Homo sapiens
actgtggcactaagt

SEQ ID NO: 176813 - DNA, 15 bp, Homo sapiens
cactgtggcactaag

SEQ ID NO: 176814 - DNA, 15 bp, Homo sapiens
acactgtggcactaa

SEQ ID NO: 176815 - DNA, 15 bp, Homo sapiens
cacactgtggcacta

SEQ ID NO: 176816 - DNA, 15 bp, Homo sapiens
acacactgtggcact

SEQ ID NO: 176817 - DNA, 15 bp, Homo sapiens
gacacactgtggcac

SEQ ID NO: 176818 - DNA, 15 bp, Homo sapiens
agacacactgtggca

SEQ ID NO: 176819 - DNA, 15 bp, Homo sapiens
cagacacactgtggc

SEQ ID NO: 176820 - DNA, 15 bp, Homo sapiens
gcagacacactgtgg

SEQ ID NO: 176821 - DNA, 15 bp, Homo sapiens
tgcagacacactgtg

SEQ ID NO: 176822 - DNA, 15 bp, Homo sapiens
ctgcagacacactgt

SEQ ID NO: 176823 - DNA, 15 bp, Homo sapiens
actgcagacacactg

SEQ ID NO: 176824 - DNA, 15 bp, Homo sapiens
tactgcagacacact

SEQ ID NO: 176825 - DNA, 15 bp, Homo sapiens
atactgcagacacac

SEQ ID NO: 176826 - DNA, 15 bp, Homo sapiens
gatactgcagacaca

SEQ ID NO: 176827 - DNA, 15 bp, Homo sapiens
agatactgcagacac

SEQ ID NO: 176828 - DNA, 15 bp, Homo sapiens
tagatactgcagaca

SEQ ID NO: 176829 - DNA, 15 bp, Homo sapiens
atagatactgcagac

SEQ ID NO: 176830 - DNA, 15 bp, Homo sapiens
tatagatactgcaga

SEQ ID NO: 176831 - DNA, 15 bp, Homo sapiens
ttatagatactgcag

SEQ ID NO: 176832 - DNA, 15 bp, Homo sapiens
cttatagatactgca

SEQ ID NO: 176833 - DNA, 15 bp, Homo sapiens
acttatagatactgc

SEQ ID NO: 176834 - DNA, 15 bp, Homo sapiens
tacttatagatactg

SEQ ID NO: 176835 - DNA, 15 bp, Homo sapiens
gtacttatagatact

SEQ ID NO: 176836 - DNA, 15 bp, Homo sapiens
agtacttatagatac

SEQ ID NO: 176837 - DNA, 15 bp, Homo sapiens
aagtacttatagata

SEQ ID NO: 176838 - DNA, 15 bp, Homo sapiens
gaagtacttatagat

SEQ ID NO: 176839 - DNA, 15 bp, Homo sapiens
ggaagtacttataga

SEQ ID NO: 176840 - DNA, 15 bp, Homo sapiens
cggaagtacttatag

SEQ ID NO: 176841 - DNA, 15 bp, Homo sapiens
gcggaagtacttata

SEQ ID NO: 176842 - DNA, 15 bp, Homo sapiens
agcggaagtacttat

SEQ ID NO: 176843 - DNA, 15 bp, Homo sapiens
gagcggaagtactta

SEQ ID NO: 176844 - DNA, 15 bp, Homo sapiens
agagcggaagtactt

SEQ ID NO: 176845 - DNA, 15 bp, Homo sapiens
cagagcggaagtact

SEQ ID NO: 176846 - DNA, 15 bp, Homo sapiens
acagagcggaagtac

SEQ ID NO: 176847 - DNA, 15 bp, Homo sapiens
gacagagcggaagta

SEQ ID NO: 176848 - DNA, 15 bp, Homo sapiens
tgacagagcggaagt

SEQ ID NO: 176849 - DNA, 15 bp, Homo sapiens
ttgacagagcggaag

SEQ ID NO: 176850 - DNA, 15 bp, Homo sapiens
cttgacagagcggaa

SEQ ID NO: 176851 - DNA, 15 bp, Homo sapiens
ccttgacagagcgga

SEQ ID NO: 176852 - DNA, 15 bp, Homo sapiens
tccttgacagagcgg

SEQ ID NO: 176853 - DNA, 15 bp, Homo sapiens
ttccttgacagagcg

SEQ ID NO: 176854 - DNA, 15 bp, Homo sapiens
attccttgacagagc

SEQ ID NO: 176855 - DNA, 15 bp, Homo sapiens
tattccttgacagag

SEQ ID NO: 176856 - DNA, 15 bp, Homo sapiens
gtattccttgacaga

SEQ ID NO: 176857 - DNA, 15 bp, Homo sapiens
tgtattccttgacag

SEQ ID NO: 176858 - DNA, 15 bp, Homo sapiens
ctgtattccttgaca

SEQ ID NO: 176859 - DNA, 15 bp, Homo sapiens
tctgtattccttgac

SEQ ID NO: 176860 - DNA, 15 bp, Homo sapiens
gtctgtattccttga

SEQ ID NO: 176861 - DNA, 15 bp, Homo sapiens
agtctgtattccttg

SEQ ID NO: 176862 - DNA, 15 bp, Homo sapiens
cagtctgtattcctt

SEQ ID NO: 176863 - DNA, 15 bp, Homo sapiens
ccagtctgtattcct

SEQ ID NO: 176864 - DNA, 15 bp, Homo sapiens
gccagtctgtattcc

SEQ ID NO: 176865 - DNA, 15 bp, Homo sapiens
tgccagtctgtattc

SEQ ID NO: 176866 - DNA, 15 bp, Homo sapiens
ctgccagtctgtatt

SEQ ID NO: 176867 - DNA, 15 bp, Homo sapiens
cctgccagtctgtat

SEQ ID NO: 176868 - DNA, 15 bp, Homo sapiens
tcctgccagtctgta

SEQ ID NO: 176869 - DNA, 15 bp, Homo sapiens
ttcctgccagtctgt

SEQ ID NO: 176870 - DNA, 15 bp, Homo sapiens
cttcctgccagtctg

SEQ ID NO: 176871 - DNA, 15 bp, Homo sapiens
gcttcctgccagtct

SEQ ID NO: 176872 - DNA, 15 bp, Homo sapiens
tgcttcctgccagtc

SEQ ID NO: 176873 - DNA, 15 bp, Homo sapiens
ctgcttcctgccagt

SEQ ID NO: 176874 - DNA, 15 bp, Homo sapiens
tctgcttcctgccag

SEQ ID NO: 176875 - DNA, 15 bp, Homo sapiens
atctgcttcctgcca

SEQ ID NO: 176876 - DNA, 15 bp, Homo sapiens
tatctgcttcctgcc

SEQ ID NO: 176877 - DNA, 15 bp, Homo sapiens
ttatctgcttcctgc

SEQ ID NO: 176878 - DNA, 15 bp, Homo sapiens
cttatctgcttcctg

SEQ ID NO: 176879 - DNA, 15 bp, Homo sapiens
gcttatctgcttcct

SEQ ID NO: 176880 - DNA, 15 bp, Homo sapiens
tgcttatctgcttcc

SEQ ID NO: 176881 - DNA, 15 bp, Homo sapiens
atgcttatctgcttc

SEQ ID NO: 176882 - DNA, 15 bp, Homo sapiens
tatgcttatctgctt

SEQ ID NO: 176883 - DNA, 15 bp, Homo sapiens
ttatgcttatctgct

SEQ ID NO: 176884 - DNA, 15 bp, Homo sapiens
attatgcttatctgc

SEQ ID NO: 176885 - DNA, 15 bp, Homo sapiens
aattatgcttatctg

SEQ ID NO: 176886 - DNA, 15 bp, Homo sapiens
caattatgcttatct

SEQ ID NO: 176887 - DNA, 15 bp, Homo sapiens
acaattatgcttatc

SEQ ID NO: 176888 - DNA, 15 bp, Homo sapiens
aacaattatgcttat

SEQ ID NO: 176889 - DNA, 15 bp, Homo sapiens
aaacaattatgctta

SEQ ID NO: 176890 - DNA, 15 bp, Homo sapiens
aaaacaattatgctt

SEQ ID NO: 176891 - DNA, 15 bp, Homo sapiens
gaaaacaattatgct

SEQ ID NO: 176892 - DNA, 15 bp, Homo sapiens
ggaaaacaattatgc

SEQ ID NO: 176893 - DNA, 15 bp, Homo sapiens
tggaaaacaattatg

SEQ ID NO: 176894 - DNA, 15 bp, Homo sapiens
ttggaaaacaattat

SEQ ID NO: 176895 - DNA, 15 bp, Homo sapiens
attggaaaacaatta

SEQ ID NO: 176896 - DNA, 15 bp, Homo sapiens
tattggaaaacaatt

SEQ ID NO: 176897 - DNA, 15 bp, Homo sapiens
ttattggaaaacaat

SEQ ID NO: 176898 - DNA, 15 bp, Homo sapiens
gttattggaaaacaa

SEQ ID NO: 176899 - DNA, 15 bp, Homo sapiens
agttattggaaaaca

SEQ ID NO: 176900 - DNA, 15 bp, Homo sapiens
gagttattggaaaac

SEQ ID NO: 176901 - DNA, 15 bp, Homo sapiens
ggagttattggaaaa

SEQ ID NO: 176902 - DNA, 15 bp, Homo sapiens
gggagttattggaaa

SEQ ID NO: 176903 - DNA, 15 bp, Homo sapiens
ggggagttattggaa

SEQ ID NO: 176904 - DNA, 15 bp, Homo sapiens
tggggagttattgga

SEQ ID NO: 176905 - DNA, 15 bp, Homo sapiens
ttggggagttattgg

SEQ ID NO: 176906 - DNA, 15 bp, Homo sapiens
cttggggagttattg

SEQ ID NO: 176907 - DNA, 15 bp, Homo sapiens
acttggggagttatt

SEQ ID NO: 176908 - DNA, 15 bp, Homo sapiens
gacttggggagttat

SEQ ID NO: 176909 - DNA, 15 bp, Homo sapiens
agacttggggagtta

SEQ ID NO: 176910 - DNA, 15 bp, Homo sapiens
gagacttggggagtt

SEQ ID NO: 176911 - DNA, 15 bp, Homo sapiens
agagacttggggagt

SEQ ID NO: 176912 - DNA, 15 bp, Homo sapiens
aagagacttggggag

SEQ ID NO: 176913 - DNA, 15 bp, Homo sapiens
caagagacttgggga

SEQ ID NO: 176914 - DNA, 15 bp, Homo sapiens
ccaagagacttgggg

SEQ ID NO: 176915 - DNA, 15 bp, Homo sapiens
tccaagagacttggg

SEQ ID NO: 176916 - DNA, 15 bp, Homo sapiens
ttccaagagacttgg

SEQ ID NO: 176917 - DNA, 15 bp, Homo sapiens
attccaagagacttg

SEQ ID NO: 176918 - DNA, 15 bp, Homo sapiens
tattccaagagactt

SEQ ID NO: 176919 - DNA, 15 bp, Homo sapiens
atattccaagagact

SEQ ID NO: 176920 - DNA, 15 bp, Homo sapiens
tatattccaagagac

SEQ ID NO: 176921 - DNA, 15 bp, Homo sapiens
atatattccaagaga

SEQ ID NO: 176922 - DNA, 15 bp, Homo sapiens
tatatattccaagag

SEQ ID NO: 176923 - DNA, 15 bp, Homo sapiens
atatatattccaaga

SEQ ID NO: 176924 - DNA, 15 bp, Homo sapiens
catatatattccaag

SEQ ID NO: 176925 - DNA, 15 bp, Homo sapiens
acatatatattccaa

SEQ ID NO: 176926 - DNA, 15 bp, Homo sapiens
tacatatatattcca

SEQ ID NO: 176927 - DNA, 15 bp, Homo sapiens
atacatatatattcc

SEQ ID NO: 176928 - DNA, 15 bp, Homo sapiens
gatacatatatattc

SEQ ID NO: 176929 - DNA, 15 bp, Homo sapiens
agatacatatatatt

SEQ ID NO: 176930 - DNA, 15 bp, Homo sapiens
cagatacatatatat

SEQ ID NO: 176931 - DNA, 15 bp, Homo sapiens
tcagatacatatata

SEQ ID NO: 176932 - DNA, 15 bp, Homo sapiens
ttcagatacatatat

SEQ ID NO: 176933 - DNA, 15 bp, Homo sapiens
attcagatacatata

SEQ ID NO: 176934 - DNA, 15 bp, Homo sapiens
gattcagatacatat

SEQ ID NO: 176935 - DNA, 15 bp, Homo sapiens
agattcagatacata

SEQ ID NO: 176936 - DNA, 15 bp, Homo sapiens
gagattcagatacat

SEQ ID NO: 176937 - DNA, 15 bp, Homo sapiens
agagattcagataca

SEQ ID NO: 176938 - DNA, 15 bp, Homo sapiens
gagagattcagatac

SEQ ID NO: 176939 - DNA, 15 bp, Homo sapiens
tgagagattcagata

SEQ ID NO: 176940 - DNA, 15 bp, Homo sapiens
ctgagagattcagat

SEQ ID NO: 176941 - DNA, 15 bp, Homo sapiens
tctgagagattcaga

SEQ ID NO: 176942 - DNA, 15 bp, Homo sapiens
ctctgagagattcag

SEQ ID NO: 176943 - DNA, 15 bp, Homo sapiens
cctctgagagattca

SEQ ID NO: 176944 - DNA, 15 bp, Homo sapiens
tcctctgagagattc

SEQ ID NO: 176945 - DNA, 15 bp, Homo sapiens
ctcctctgagagatt

SEQ ID NO: 176946 - DNA, 15 bp, Homo sapiens
tctcctctgagagat

SEQ ID NO: 176947 - DNA, 15 bp, Homo sapiens
ctctcctctgagaga

SEQ ID NO: 176948 - DNA, 15 bp, Homo sapiens
tctctcctctgagag

SEQ ID NO: 176949 - DNA, 15 bp, Homo sapiens
ctctctcctctgaga

SEQ ID NO: 176950 - DNA, 15 bp, Homo sapiens
actctctcctctgag

SEQ ID NO: 176951 - DNA, 15 bp, Homo sapiens
aactctctcctctga

SEQ ID NO: 176952 - DNA, 15 bp, Homo sapiens
aaactctctcctctg

SEQ ID NO: 176953 - DNA, 15 bp, Homo sapiens
aaaactctctcctct

SEQ ID NO: 176954 - DNA, 15 bp, Homo sapiens
gaaaactctctcctc

SEQ ID NO: 176955 - DNA, 15 bp, Homo sapiens
agaaaactctctcct

SEQ ID NO: 176956 - DNA, 15 bp, Homo sapiens
gagaaaactctctcc

SEQ ID NO: 176957 - DNA, 15 bp, Homo sapiens
agagaaaactctctc

SEQ ID NO: 176958 - DNA, 15 bp, Homo sapiens
gagagaaaactctct

SEQ ID NO: 176959 - DNA, 15 bp, Homo sapiens
agagagaaaactctc

SEQ ID NO: 176960 - DNA, 15 bp, Homo sapiens
aagagagaaaactct

SEQ ID NO: 176961 - DNA, 15 bp, Homo sapiens
gaagagagaaaactc

SEQ ID NO: 176962 - DNA, 15 bp, Homo sapiens
agaagagagaaaact

SEQ ID NO: 176963 - DNA, 15 bp, Homo sapiens
aagaagagagaaaac

SEQ ID NO: 176964 - DNA, 15 bp, Homo sapiens
aaagaagagagaaaa

SEQ ID NO: 176965 - DNA, 15 bp, Homo sapiens
caaagaagagagaaa

SEQ ID NO: 176966 - DNA, 15 bp, Homo sapiens
ccaaagaagagagaa

SEQ ID NO: 176967 - DNA, 15 bp, Homo sapiens
gccaaagaagagaga

SEQ ID NO: 176968 - DNA, 15 bp, Homo sapiens
ggccaaagaagagag

SEQ ID NO: 176969 - DNA, 15 bp, Homo sapiens
tggccaaagaagaga

SEQ ID NO: 176970 - DNA, 15 bp, Homo sapiens
atggccaaagaagag

SEQ ID NO: 176971 - DNA, 15 bp, Homo sapiens
aatggccaaagaaga

SEQ ID NO: 176972 - DNA, 15 bp, Homo sapiens
aaatggccaaagaag

SEQ ID NO: 176973 - DNA, 15 bp, Homo sapiens
aaaatggccaaagaa

SEQ ID NO: 176974 - DNA, 15 bp, Homo sapiens
taaaatggccaaaga

SEQ ID NO: 176975 - DNA, 15 bp, Homo sapiens
ctaaaatggccaaag

SEQ ID NO: 176976 - DNA, 15 bp, Homo sapiens
gctaaaatggccaaa

SEQ ID NO: 176977 - DNA, 15 bp, Homo sapiens
ggctaaaatggccaa

SEQ ID NO: 176978 - DNA, 15 bp, Homo sapiens
aggctaaaatggcca

SEQ ID NO: 176979 - DNA, 15 bp, Homo sapiens
taggctaaaatggcc

SEQ ID NO: 176980 - DNA, 15 bp, Homo sapiens
ataggctaaaatggc

SEQ ID NO: 176981 - DNA, 15 bp, Homo sapiens
aataggctaaaatgg

SEQ ID NO: 176982 - DNA, 15 bp, Homo sapiens
aaataggctaaaatg

SEQ ID NO: 176983 - DNA, 15 bp, Homo sapiens
aaaataggctaaaat

SEQ ID NO: 176984 - DNA, 15 bp, Homo sapiens
gaaaataggctaaaa

SEQ ID NO: 176985 - DNA, 15 bp, Homo sapiens
ggaaaataggctaaa

SEQ ID NO: 176986 - DNA, 15 bp, Homo sapiens
tggaaaataggctaa

SEQ ID NO: 176987 - DNA, 15 bp, Homo sapiens
ctggaaaataggcta

SEQ ID NO: 176988 - DNA, 15 bp, Homo sapiens
cctggaaaataggct

SEQ ID NO: 176989 - DNA, 15 bp, Homo sapiens
tcctggaaaataggc

SEQ ID NO: 176990 - DNA, 15 bp, Homo sapiens
gtcctggaaaatagg

SEQ ID NO: 176991 - DNA, 15 bp, Homo sapiens
ggtcctggaaaatag

SEQ ID NO: 176992 - DNA, 15 bp, Homo sapiens
aggtcctggaaaata

SEQ ID NO: 176993 - DNA, 15 bp, Homo sapiens
aaggtcctggaaaat

SEQ ID NO: 176994 - DNA, 15 bp, Homo sapiens
caaggtcctggaaaa

SEQ ID NO: 176995 - DNA, 15 bp, Homo sapiens
acaaggtcctggaaa

SEQ ID NO: 176996 - DNA, 15 bp, Homo sapiens
gacaaggtcctggaa

SEQ ID NO: 176997 - DNA, 15 bp, Homo sapiens
agacaaggtcctgga

SEQ ID NO: 176998 - DNA, 15 bp, Homo sapiens
tagacaaggtcctgg

SEQ ID NO: 176999 - DNA, 15 bp, Homo sapiens
ctagacaaggtcctg

SEQ ID NO: 177000 - DNA, 15 bp, Homo sapiens
gctagacaaggtcct

SEQ ID NO: 177001 - DNA, 15 bp, Homo sapiens
tgctagacaaggtcc

SEQ ID NO: 177002 - DNA, 15 bp, Homo sapiens
ctgctagacaaggtc

SEQ ID NO: 177003 - DNA, 15 bp, Homo sapiens
actgctagacaaggt

SEQ ID NO: 177004 - DNA, 15 bp, Homo sapiens
cactgctagacaagg

SEQ ID NO: 177005 - DNA, 15 bp, Homo sapiens
ccactgctagacaag

SEQ ID NO: 177006 - DNA, 15 bp, Homo sapiens
gccactgctagacaa

SEQ ID NO: 177007 - DNA, 15 bp, Homo sapiens
agccactgctagaca

SEQ ID NO: 177008 - DNA, 15 bp, Homo sapiens
gagccactgctagac

SEQ ID NO: 177009 - DNA, 15 bp, Homo sapiens
ggagccactgctaga

SEQ ID NO: 177010 - DNA, 15 bp, Homo sapiens
tggagccactgctag

SEQ ID NO: 177011 - DNA, 15 bp, Homo sapiens
atggagccactgcta

SEQ ID NO: 177012 - DNA, 15 bp, Homo sapiens
aatggagccactgct

SEQ ID NO: 177013 - DNA, 15 bp, Homo sapiens
aaatggagccactgc

SEQ ID NO: 177014 - DNA, 15 bp, Homo sapiens
aaaatggagccactg

SEQ ID NO: 177015 - DNA, 15 bp, Homo sapiens
aaaaatggagccact

SEQ ID NO: 177016 - DNA, 15 bp, Homo sapiens
gaaaaatggagccac

SEQ ID NO: 177017 - DNA, 15 bp, Homo sapiens
ggaaaaatggagcca

SEQ ID NO: 177018 - DNA, 15 bp, Homo sapiens
gggaaaaatggagcc

SEQ ID NO: 177019 - DNA, 15 bp, Homo sapiens
ggggaaaaatggagc

SEQ ID NO: 177020 - DNA, 15 bp, Homo sapiens
cggggaaaaatggag

SEQ ID NO: 177021 - DNA, 15 bp, Homo sapiens
tcggggaaaaatgga

SEQ ID NO: 177022 - DNA, 15 bp, Homo sapiens
atcggggaaaaatgg

SEQ ID NO: 177023 - DNA, 15 bp, Homo sapiens
catcggggaaaaatg

SEQ ID NO: 177024 - DNA, 15 bp, Homo sapiens
gcatcggggaaaaat

SEQ ID NO: 177025 - DNA, 15 bp, Homo sapiens
tgcatcggggaaaaa

SEQ ID NO: 177026 - DNA, 15 bp, Homo sapiens
atgcatcggggaaaa

SEQ ID NO: 177027 - DNA, 15 bp, Homo sapiens
gatgcatcggggaaa

SEQ ID NO: 177028 - DNA, 15 bp, Homo sapiens
ggatgcatcggggaa

SEQ ID NO: 177029 - DNA, 15 bp, Homo sapiens
tggatgcatcgggga

SEQ ID NO: 177030 - DNA, 15 bp, Homo sapiens
ttggatgcatcgggg

SEQ ID NO: 177031 - DNA, 15 bp, Homo sapiens
gttggatgcatcggg

SEQ ID NO: 177032 - DNA, 15 bp, Homo sapiens
agttggatgcatcgg

SEQ ID NO: 177033 - DNA, 15 bp, Homo sapiens
aagttggatgcatcg

SEQ ID NO: 177034 - DNA, 15 bp, Homo sapiens
gaagttggatgcatc

SEQ ID NO: 177035 - DNA, 15 bp, Homo sapiens
ggaagttggatgcat

SEQ ID NO: 177036 - DNA, 15 bp, Homo sapiens
gggaagttggatgca

SEQ ID NO: 177037 - DNA, 15 bp, Homo sapiens
agggaagttggatgc

SEQ ID NO: 177038 - DNA, 15 bp, Homo sapiens
gagggaagttggatg

SEQ ID NO: 177039 - DNA, 15 bp, Homo sapiens
ggagggaagttggat

SEQ ID NO: 177040 - DNA, 15 bp, Homo sapiens
gggagggaagttgga

SEQ ID NO: 177041 - DNA, 15 bp, Homo sapiens
agggagggaagttgg

SEQ ID NO: 177042 - DNA, 15 bp, Homo sapiens
cagggagggaagttg

SEQ ID NO: 177043 - DNA, 15 bp, Homo sapiens
gcagggagggaagtt

SEQ ID NO: 177044 - DNA, 15 bp, Homo sapiens
tgcagggagggaagt

SEQ ID NO: 177045 - DNA, 15 bp, Homo sapiens
gtgcagggagggaag

SEQ ID NO: 177046 - DNA, 15 bp, Homo sapiens
agtgcagggagggaa

SEQ ID NO: 177047 - DNA, 15 bp, Homo sapiens
gagtgcagggaggga

SEQ ID NO: 177048 - DNA, 15 bp, Homo sapiens
ggagtgcagggaggg

SEQ ID NO: 177049 - DNA, 15 bp, Homo sapiens
aggagtgcagggagg

SEQ ID NO: 177050 - DNA, 15 bp, Homo sapiens
gaggagtgcagggag

SEQ ID NO: 177051 - DNA, 15 bp, Homo sapiens
ggaggagtgcaggga

SEQ ID NO: 177052 - DNA, 15 bp, Homo sapiens
aggaggagtgcaggg

SEQ ID NO: 177053 - DNA, 15 bp, Homo sapiens
gaggaggagtgcagg

SEQ ID NO: 177054 - DNA, 15 bp, Homo sapiens
ggaggaggagtgcag

SEQ ID NO: 177055 - DNA, 15 bp, Homo sapiens
gggaggaggagtgca

SEQ ID NO: 177056 - DNA, 15 bp, Homo sapiens
ggggaggaggagtgc

SEQ ID NO: 177057 - DNA, 15 bp, Homo sapiens
cggggaggaggagtg

SEQ ID NO: 177058 - DNA, 15 bp, Homo sapiens
tcggggaggaggagt

SEQ ID NO: 177059 - DNA, 15 bp, Homo sapiens
gtcggggaggaggag

SEQ ID NO: 177060 - DNA, 15 bp, Homo sapiens
tgtcggggaggagga

SEQ ID NO: 177061 - DNA, 15 bp, Homo sapiens
ctgtcggggaggagg

SEQ ID NO: 177062 - DNA, 15 bp, Homo sapiens
gctgtcggggaggag

SEQ ID NO: 177063 - DNA, 15 bp, Homo sapiens
agctgtcggggagga

SEQ ID NO: 177064 - DNA, 15 bp, Homo sapiens
cagctgtcggggagg

SEQ ID NO: 177065 - DNA, 15 bp, Homo sapiens
gcagctgtcggggag

SEQ ID NO: 177066 - DNA, 15 bp, Homo sapiens
ggcagctgtcgggga

SEQ ID NO: 177067 - DNA, 15 bp, Homo sapiens
aggcagctgtcgggg

SEQ ID NO: 177068 - DNA, 15 bp, Homo sapiens
gaggcagctgtcggg

SEQ ID NO: 177069 - DNA, 15 bp, Homo sapiens
tgaggcagctgtcgg

SEQ ID NO: 177070 - DNA, 15 bp, Homo sapiens
ctgaggcagctgtcg

SEQ ID NO: 177071 - DNA, 15 bp, Homo sapiens
cctgaggcagctgtc

SEQ ID NO: 177072 - DNA, 15 bp, Homo sapiens
tcctgaggcagctgt

SEQ ID NO: 177073 - DNA, 15 bp, Homo sapiens
ttcctgaggcagctg

SEQ ID NO: 177074 - DNA, 15 bp, Homo sapiens
attcctgaggcagct

SEQ ID NO: 177075 - DNA, 15 bp, Homo sapiens
tattcctgaggcagc

SEQ ID NO: 177076 - DNA, 15 bp, Homo sapiens
ctattcctgaggcag

SEQ ID NO: 177077 - DNA, 15 bp, Homo sapiens
cctattcctgaggca

SEQ ID NO: 177078 - DNA, 15 bp, Homo sapiens
acctattcctgaggc

SEQ ID NO: 177079 - DNA, 15 bp, Homo sapiens
cacctattcctgagg

SEQ ID NO: 177080 - DNA, 15 bp, Homo sapiens
tcacctattcctgag

SEQ ID NO: 177081 - DNA, 15 bp, Homo sapiens
gtcacctattcctga

SEQ ID NO: 177082 - DNA, 15 bp, Homo sapiens
ggtcacctattcctg

SEQ ID NO: 177083 - DNA, 15 bp, Homo sapiens
gggtcacctattcct

SEQ ID NO: 177084 - DNA, 15 bp, Homo sapiens
agggtcacctattcc

SEQ ID NO: 177085 - DNA, 15 bp, Homo sapiens
cagggtcacctattc

SEQ ID NO: 177086 - DNA, 15 bp, Homo sapiens
gcagggtcacctatt

SEQ ID NO: 177087 - DNA, 15 bp, Homo sapiens
agcagggtcacctat

SEQ ID NO: 177088 - DNA, 15 bp, Homo sapiens
cagcagggtcaccta

SEQ ID NO: 177089 - DNA, 15 bp, Homo sapiens
ccagcagggtcacct

SEQ ID NO: 177090 - DNA, 15 bp, Homo sapiens
gccagcagggtcacc

SEQ ID NO: 177091 - DNA, 15 bp, Homo sapiens
ggccagcagggtcac

SEQ ID NO: 177092 - DNA, 15 bp, Homo sapiens
tggccagcagggtca

SEQ ID NO: 177093 - DNA, 15 bp, Homo sapiens
atggccagcagggtc

SEQ ID NO: 177094 - DNA, 15 bp, Homo sapiens
tatggccagcagggt

SEQ ID NO: 177095 - DNA, 15 bp, Homo sapiens
gtatggccagcaggg

SEQ ID NO: 177096 - DNA, 15 bp, Homo sapiens
agtatggccagcagg

SEQ ID NO: 177097 - DNA, 15 bp, Homo sapiens
cagtatggccagcag

SEQ ID NO: 177098 - DNA, 15 bp, Homo sapiens
acagtatggccagca

SEQ ID NO: 177099 - DNA, 15 bp, Homo sapiens
cacagtatggccagc

SEQ ID NO: 177100 - DNA, 15 bp, Homo sapiens
tcacagtatggccag

SEQ ID NO: 177101 - DNA, 15 bp, Homo sapiens
ttcacagtatggcca

SEQ ID NO: 177102 - DNA, 15 bp, Homo sapiens
attcacagtatggcc

SEQ ID NO: 177103 - DNA, 15 bp, Homo sapiens
cattcacagtatggc

SEQ ID NO: 177104 - DNA, 15 bp, Homo sapiens
gcattcacagtatgg

SEQ ID NO: 177105 - DNA, 15 bp, Homo sapiens
agcattcacagtatg

SEQ ID NO: 177106 - DNA, 15 bp, Homo sapiens
cagcattcacagtat

SEQ ID NO: 177107 - DNA, 15 bp, Homo sapiens
acagcattcacagta

SEQ ID NO: 177108 - DNA, 15 bp, Homo sapiens
aacagcattcacagt

SEQ ID NO: 177109 - DNA, 15 bp, Homo sapiens
gaacagcattcacag

SEQ ID NO: 177110 - DNA, 15 bp, Homo sapiens
agaacagcattcaca

SEQ ID NO: 177111 - DNA, 15 bp, Homo sapiens
aagaacagcattcac

SEQ ID NO: 177112 - DNA, 15 bp, Homo sapiens
aaagaacagcattca

SEQ ID NO: 177113 - DNA, 15 bp, Homo sapiens
gaaagaacagcattc

SEQ ID NO: 177114 - DNA, 15 bp, Homo sapiens
tgaaagaacagcatt

SEQ ID NO: 177115 - DNA, 15 bp, Homo sapiens
ctgaaagaacagcat

SEQ ID NO: 177116 - DNA, 15 bp, Homo sapiens
gctgaaagaacagca

SEQ ID NO: 177117 - DNA, 15 bp, Homo sapiens
agctgaaagaacagc

SEQ ID NO: 177118 - DNA, 15 bp, Homo sapiens
cagctgaaagaacag

SEQ ID NO: 177119 - DNA, 15 bp, Homo sapiens
acagctgaaagaaca

SEQ ID NO: 177120 - DNA, 15 bp, Homo sapiens
cacagctgaaagaac

SEQ ID NO: 177121 - DNA, 15 bp, Homo sapiens
tcacagctgaaagaa

SEQ ID NO: 177122 - DNA, 15 bp, Homo sapiens
gtcacagctgaaaga

SEQ ID NO: 177123 - DNA, 15 bp, Homo sapiens
ggtcacagctgaaag

SEQ ID NO: 177124 - DNA, 15 bp, Homo sapiens
tggtcacagctgaaa

SEQ ID NO: 177125 - DNA, 15 bp, Homo sapiens
ttggtcacagctgaa

SEQ ID NO: 177126 - DNA, 15 bp, Homo sapiens
attggtcacagctga

SEQ ID NO: 177127 - DNA, 15 bp, Homo sapiens
aattggtcacagctg

SEQ ID NO: 177128 - DNA, 15 bp, Homo sapiens
aaattggtcacagct

SEQ ID NO: 177129 - DNA, 15 bp, Homo sapiens
caaattggtcacagc

SEQ ID NO: 177130 - DNA, 15 bp, Homo sapiens
ccaaattggtcacag

SEQ ID NO: 177131 - DNA, 15 bp, Homo sapiens
cccaaattggtcaca

SEQ ID NO: 177132 - DNA, 15 bp, Homo sapiens
ccccaaattggtcac

SEQ ID NO: 177133 - DNA, 15 bp, Homo sapiens
cccccaaattggtca

SEQ ID NO: 177134 - DNA, 15 bp, Homo sapiens
acccccaaattggtc

SEQ ID NO: 177135 - DNA, 15 bp, Homo sapiens
cacccccaaattggt

SEQ ID NO: 177136 - DNA, 15 bp, Homo sapiens
gcacccccaaattgg

SEQ ID NO: 177137 - DNA, 15 bp, Homo sapiens
tgcacccccaaattg

SEQ ID NO: 177138 - DNA, 15 bp, Homo sapiens
ctgcacccccaaatt

SEQ ID NO: 177139 - DNA, 15 bp, Homo sapiens
gctgcacccccaaat

SEQ ID NO: 177140 - DNA, 15 bp, Homo sapiens
agctgcacccccaaa

SEQ ID NO: 177141 - DNA, 15 bp, Homo sapiens
cagctgcacccccaa

SEQ ID NO: 177142 - DNA, 15 bp, Homo sapiens
tcagctgcaccccca

SEQ ID NO: 177143 - DNA, 15 bp, Homo sapiens
ctcagctgcaccccc

SEQ ID NO: 177144 - DNA, 15 bp, Homo sapiens
tctcagctgcacccc

SEQ ID NO: 177145 - DNA, 15 bp, Homo sapiens
ctctcagctgcaccc

SEQ ID NO: 177146 - DNA, 15 bp, Homo sapiens
actctcagctgcacc

SEQ ID NO: 177147 - DNA, 15 bp, Homo sapiens
cactctcagctgcac

SEQ ID NO: 177148 - DNA, 15 bp, Homo sapiens
tcactctcagctgca

SEQ ID NO: 177149 - DNA, 15 bp, Homo sapiens
ctcactctcagctgc

SEQ ID NO: 177150 - DNA, 15 bp, Homo sapiens
cctcactctcagctg

SEQ ID NO: 177151 - DNA, 15 bp, Homo sapiens
acctcactctcagct

SEQ ID NO: 177152 - DNA, 15 bp, Homo sapiens
cacctcactctcagc

SEQ ID NO: 177153 - DNA, 15 bp, Homo sapiens
gcacctcactctcag

SEQ ID NO: 177154 - DNA, 15 bp, Homo sapiens
agcacctcactctca

SEQ ID NO: 177155 - DNA, 15 bp, Homo sapiens
cagcacctcactctc

SEQ ID NO: 177156 - DNA, 15 bp, Homo sapiens
acagcacctcactct

SEQ ID NO: 177157 - DNA, 15 bp, Homo sapiens
gacagcacctcactc

SEQ ID NO: 177158 - DNA, 15 bp, Homo sapiens
tgacagcacctcact

SEQ ID NO: 177159 - DNA, 15 bp, Homo sapiens
ctgacagcacctcac

SEQ ID NO: 177160 - DNA, 15 bp, Homo sapiens
cctgacagcacctca

SEQ ID NO: 177161 - DNA, 15 bp, Homo sapiens
ccctgacagcacctc

SEQ ID NO: 177162 - DNA, 15 bp, Homo sapiens
gccctgacagcacct

SEQ ID NO: 177163 - DNA, 15 bp, Homo sapiens
agccctgacagcacc

SEQ ID NO: 177164 - DNA, 15 bp, Homo sapiens
cagccctgacagcac

SEQ ID NO: 177165 - DNA, 15 bp, Homo sapiens
tcagccctgacagca

SEQ ID NO: 177166 - DNA, 15 bp, Homo sapiens
ttcagccctgacagc

SEQ ID NO: 177167 - DNA, 15 bp, Homo sapiens
tttcagccctgacag

SEQ ID NO: 177168 - DNA, 15 bp, Homo sapiens
ttttcagccctgaca

SEQ ID NO: 177169 - DNA, 15 bp, Homo sapiens
cttttcagccctgac

SEQ ID NO: 177170 - DNA, 15 bp, Homo sapiens
ccttttcagccctga

SEQ ID NO: 177171 - DNA, 15 bp, Homo sapiens
tccttttcagccctg

SEQ ID NO: 177172 - DNA, 15 bp, Homo sapiens
gtccttttcagccct

SEQ ID NO: 177173 - DNA, 15 bp, Homo sapiens
cgtccttttcagccc

SEQ ID NO: 177174 - DNA, 15 bp, Homo sapiens
gcgtccttttcagcc

SEQ ID NO: 177175 - DNA, 15 bp, Homo sapiens
tgcgtccttttcagc

SEQ ID NO: 177176 - DNA, 15 bp, Homo sapiens
gtgcgtccttttcag

SEQ ID NO: 177177 - DNA, 15 bp, Homo sapiens
ggtgcgtccttttca

SEQ ID NO: 177178 - DNA, 15 bp, Homo sapiens
aggtgcgtccttttc

SEQ ID NO: 177179 - DNA, 15 bp, Homo sapiens
gaggtgcgtcctttt

SEQ ID NO: 177180 - DNA, 15 bp, Homo sapiens
tgaggtgcgtccttt

SEQ ID NO: 177181 - DNA, 15 bp, Homo sapiens
atgaggtgcgtcctt

SEQ ID NO: 177182 - DNA, 15 bp, Homo sapiens
aatgaggtgcgtcct

SEQ ID NO: 177183 - DNA, 15 bp, Homo sapiens
gaatgaggtgcgtcc

SEQ ID NO: 177184 - DNA, 15 bp, Homo sapiens
agaatgaggtgcgtc

SEQ ID NO: 177185 - DNA, 15 bp, Homo sapiens
tagaatgaggtgcgt

SEQ ID NO: 177186 - DNA, 15 bp, Homo sapiens
gtagaatgaggtgcg

SEQ ID NO: 177187 - DNA, 15 bp, Homo sapiens
tgtagaatgaggtgc

SEQ ID NO: 177188 - DNA, 15 bp, Homo sapiens
atgtagaatgaggtg

SEQ ID NO: 177189 - DNA, 15 bp, Homo sapiens
aatgtagaatgaggt

SEQ ID NO: 177190 - DNA, 15 bp, Homo sapiens
aaatgtagaatgagg

SEQ ID NO: 177191 - DNA, 15 bp, Homo sapiens
caaatgtagaatgag

SEQ ID NO: 177192 - DNA, 15 bp, Homo sapiens
ccaaatgtagaatga

SEQ ID NO: 177193 - DNA, 15 bp, Homo sapiens
tccaaatgtagaatg

SEQ ID NO: 177194 - DNA, 15 bp, Homo sapiens
atccaaatgtagaat

SEQ ID NO: 177195 - DNA, 15 bp, Homo sapiens
catccaaatgtagaa

SEQ ID NO: 177196 - DNA, 15 bp, Homo sapiens
acatccaaatgtaga

SEQ ID NO: 177197 - DNA, 15 bp, Homo sapiens
cacatccaaatgtag

SEQ ID NO: 177198 - DNA, 15 bp, Homo sapiens
tcacatccaaatgta

SEQ ID NO: 177199 - DNA, 15 bp, Homo sapiens
atcacatccaaatgt

SEQ ID NO: 177200 - DNA, 15 bp, Homo sapiens
catcacatccaaatg

SEQ ID NO: 177201 - DNA, 15 bp, Homo sapiens
tcatcacatccaaat

SEQ ID NO: 177202 - DNA, 15 bp, Homo sapiens
ctcatcacatccaaa

SEQ ID NO: 177203 - DNA, 15 bp, Homo sapiens
cctcatcacatccaa

SEQ ID NO: 177204 - DNA, 15 bp, Homo sapiens
tcctcatcacatcca

SEQ ID NO: 177205 - DNA, 15 bp, Homo sapiens
ctcctcatcacatcc

SEQ ID NO: 177206 - DNA, 15 bp, Homo sapiens
gctcctcatcacatc

SEQ ID NO: 177207 - DNA, 15 bp, Homo sapiens
tgctcctcatcacat

SEQ ID NO: 177208 - DNA, 15 bp, Homo sapiens
ctgctcctcatcaca

SEQ ID NO: 177209 - DNA, 15 bp, Homo sapiens
cctgctcctcatcac

SEQ ID NO: 177210 - DNA, 15 bp, Homo sapiens
ccctgctcctcatca

SEQ ID NO: 177211 - DNA, 15 bp, Homo sapiens
gccctgctcctcatc

SEQ ID NO: 177212 - DNA, 15 bp, Homo sapiens
tgccctgctcctcat

SEQ ID NO: 177213 - DNA, 15 bp, Homo sapiens
ctgccctgctcctca

SEQ ID NO: 177214 - DNA, 15 bp, Homo sapiens
gctgccctgctcctc

SEQ ID NO: 177215 - DNA, 15 bp, Homo sapiens
ggctgccctgctcct

SEQ ID NO: 177216 - DNA, 15 bp, Homo sapiens
tggctgccctgctcc

SEQ ID NO: 177217 - DNA, 15 bp, Homo sapiens
gtggctgccctgctc

SEQ ID NO: 177218 - DNA, 15 bp, Homo sapiens
ggtggctgccctgct

SEQ ID NO: 177219 - DNA, 15 bp, Homo sapiens
tggtggctgccctgc

SEQ ID NO: 177220 - DNA, 15 bp, Homo sapiens
ctggtggctgccctg

SEQ ID NO: 177221 - DNA, 15 bp, Homo sapiens
gctggtggctgccct

SEQ ID NO: 177222 - DNA, 15 bp, Homo sapiens
agctggtggctgccc

SEQ ID NO: 177223 - DNA, 15 bp, Homo sapiens
aagctggtggctgcc

SEQ ID NO: 177224 - DNA, 15 bp, Homo sapiens
caagctggtggctgc

SEQ ID NO: 177225 - DNA, 15 bp, Homo sapiens
ccaagctggtggctg

SEQ ID NO: 177226 - DNA, 15 bp, Homo sapiens
tccaagctggtggct

SEQ ID NO: 177227 - DNA, 15 bp, Homo sapiens
atccaagctggtggc

SEQ ID NO: 177228 - DNA, 15 bp, Homo sapiens
gatccaagctggtgg

SEQ ID NO: 177229 - DNA, 15 bp, Homo sapiens
ggatccaagctggtg

SEQ ID NO: 177230 - DNA, 15 bp, Homo sapiens
aggatccaagctggt

SEQ ID NO: 177231 - DNA, 15 bp, Homo sapiens
taggatccaagctgg

SEQ ID NO: 177232 - DNA, 15 bp, Homo sapiens
ttaggatccaagctg

SEQ ID NO: 177233 - DNA, 15 bp, Homo sapiens
gttaggatccaagct

SEQ ID NO: 177234 - DNA, 15 bp, Homo sapiens
agttaggatccaagc

SEQ ID NO: 177235 - DNA, 15 bp, Homo sapiens
aagttaggatccaag

SEQ ID NO: 177236 - DNA, 15 bp, Homo sapiens
taagttaggatccaa

SEQ ID NO: 177237 - DNA, 15 bp, Homo sapiens
gtaagttaggatcca

SEQ ID NO: 177238 - DNA, 15 bp, Homo sapiens
tgtaagttaggatcc

SEQ ID NO: 177239 - DNA, 15 bp, Homo sapiens
atgtaagttaggatc

SEQ ID NO: 177240 - DNA, 15 bp, Homo sapiens
aatgtaagttaggat

SEQ ID NO: 177241 - DNA, 15 bp, Homo sapiens
caatgtaagttagga

SEQ ID NO: 177242 - DNA, 15 bp, Homo sapiens
ccaatgtaagttagg

SEQ ID NO: 177243 - DNA, 15 bp, Homo sapiens
cccaatgtaagttag

SEQ ID NO: 177244 - DNA, 15 bp, Homo sapiens
acccaatgtaagtta

SEQ ID NO: 177245 - DNA, 15 bp, Homo sapiens
cacccaatgtaagtt

SEQ ID NO: 177246 - DNA, 15 bp, Homo sapiens
ccacccaatgtaagt

SEQ ID NO: 177247 - DNA, 15 bp, Homo sapiens
accacccaatgtaag

SEQ ID NO: 177248 - DNA, 15 bp, Homo sapiens
caccacccaatgtaa

SEQ ID NO: 177249 - DNA, 15 bp, Homo sapiens
gcaccacccaatgta

SEQ ID NO: 177250 - DNA, 15 bp, Homo sapiens
tgcaccacccaatgt

SEQ ID NO: 177251 - DNA, 15 bp, Homo sapiens
ttgcaccacccaatg

SEQ ID NO: 177252 - DNA, 15 bp, Homo sapiens
gttgcaccacccaat

SEQ ID NO: 177253 - DNA, 15 bp, Homo sapiens
ggttgcaccacccaa

SEQ ID NO: 177254 - DNA, 15 bp, Homo sapiens
aggttgcaccaccca

SEQ ID NO: 177255 - DNA, 15 bp, Homo sapiens
aaggttgcaccaccc

SEQ ID NO: 177256 - DNA, 15 bp, Homo sapiens
aaaggttgcaccacc

SEQ ID NO: 177257 - DNA, 15 bp, Homo sapiens
gaaaggttgcaccac

SEQ ID NO: 177258 - DNA, 15 bp, Homo sapiens
agaaaggttgcacca

SEQ ID NO: 177259 - DNA, 15 bp, Homo sapiens
cagaaaggttgcacc

SEQ ID NO: 177260 - DNA, 15 bp, Homo sapiens
tcagaaaggttgcac

SEQ ID NO: 177261 - DNA, 15 bp, Homo sapiens
gtcagaaaggttgca

SEQ ID NO: 177262 - DNA, 15 bp, Homo sapiens
cgtcagaaaggttgc

SEQ ID NO: 177263 - DNA, 15 bp, Homo sapiens
ccgtcagaaaggttg

SEQ ID NO: 177264 - DNA, 15 bp, Homo sapiens
cccgtcagaaaggtt

SEQ ID NO: 177265 - DNA, 15 bp, Homo sapiens
ccccgtcagaaaggt

SEQ ID NO: 177266 - DNA, 15 bp, Homo sapiens
gccccgtcagaaagg

SEQ ID NO: 177267 - DNA, 15 bp, Homo sapiens
ggccccgtcagaaag

SEQ ID NO: 177268 - DNA, 15 bp, Homo sapiens
aggccccgtcagaaa

SEQ ID NO: 177269 - DNA, 15 bp, Homo sapiens
caggccccgtcagaa

SEQ ID NO: 177270 - DNA, 15 bp, Homo sapiens
gcaggccccgtcaga

SEQ ID NO: 177271 - DNA, 15 bp, Homo sapiens
ggcaggccccgtcag

SEQ ID NO: 177272 - DNA, 15 bp, Homo sapiens
tggcaggccccgtca

SEQ ID NO: 177273 - DNA, 15 bp, Homo sapiens
ttggcaggccccgtc

SEQ ID NO: 177274 - DNA, 15 bp, Homo sapiens
tttggcaggccccgt

SEQ ID NO: 177275 - DNA, 15 bp, Homo sapiens
gtttggcaggccccg

SEQ ID NO: 177276 - DNA, 15 bp, Homo sapiens
agtttggcaggcccc

SEQ ID NO: 177277 - DNA, 15 bp, Homo sapiens
tagtttggcaggccc

SEQ ID NO: 177278 - DNA, 15 bp, Homo sapiens
atagtttggcaggcc

SEQ ID NO: 177279 - DNA, 15 bp, Homo sapiens
gatagtttggcaggc

SEQ ID NO: 177280 - DNA, 15 bp, Homo sapiens
tgatagtttggcagg

SEQ ID NO: 177281 - DNA, 15 bp, Homo sapiens
ctgatagtttggcag

SEQ ID NO: 177282 - DNA, 15 bp, Homo sapiens
actgatagtttggca

SEQ ID NO: 177283 - DNA, 15 bp, Homo sapiens
tactgatagtttggc

SEQ ID NO: 177284 - DNA, 15 bp, Homo sapiens
ttactgatagtttgg

SEQ ID NO: 177285 - DNA, 15 bp, Homo sapiens
attactgatagtttg

SEQ ID NO: 177286 - DNA, 15 bp, Homo sapiens
aattactgatagttt

SEQ ID NO: 177287 - DNA, 15 bp, Homo sapiens
taattactgatagtt

SEQ ID NO: 177288 - DNA, 15 bp, Homo sapiens
ctaattactgatagt

SEQ ID NO: 177289 - DNA, 15 bp, Homo sapiens
gctaattactgatag

SEQ ID NO: 177290 - DNA, 15 bp, Homo sapiens
ggctaattactgata

SEQ ID NO: 177291 - DNA, 15 bp, Homo sapiens
tggctaattactgat

SEQ ID NO: 177292 - DNA, 15 bp, Homo sapiens
ctggctaattactga

SEQ ID NO: 177293 - DNA, 15 bp, Homo sapiens
gctggctaattactg

SEQ ID NO: 177294 - DNA, 15 bp, Homo sapiens
ggctggctaattact

SEQ ID NO: 177295 - DNA, 15 bp, Homo sapiens
aggctggctaattac

SEQ ID NO: 177296 - DNA, 15 bp, Homo sapiens
taggctggctaatta

SEQ ID NO: 177297 - DNA, 15 bp, Homo sapiens
ctaggctggctaatt

SEQ ID NO: 177298 - DNA, 15 bp, Homo sapiens
tctaggctggctaat

SEQ ID NO: 177299 - DNA, 15 bp, Homo sapiens
gtctaggctggctaa

SEQ ID NO: 177300 - DNA, 15 bp, Homo sapiens
tgtctaggctggcta

SEQ ID NO: 177301 - DNA, 15 bp, Homo sapiens
ttgtctaggctggct

SEQ ID NO: 177302 - DNA, 15 bp, Homo sapiens
attgtctaggctggc

SEQ ID NO: 177303 - DNA, 15 bp, Homo sapiens
cattgtctaggctgg

SEQ ID NO: 177304 - DNA, 15 bp, Homo sapiens
acattgtctaggctg

SEQ ID NO: 177305 - DNA, 15 bp, Homo sapiens
tacattgtctaggct

SEQ ID NO: 177306 - DNA, 15 bp, Homo sapiens
ctacattgtctaggc

SEQ ID NO: 177307 - DNA, 15 bp, Homo sapiens
gctacattgtctagg

SEQ ID NO: 177308 - DNA, 15 bp, Homo sapiens
tgctacattgtctag

SEQ ID NO: 177309 - DNA, 15 bp, Homo sapiens
gctggctccagcccc

SEQ ID NO: 177310 - DNA, 15 bp, Homo sapiens
agctggctccagccc

SEQ ID NO: 177311 - DNA, 15 bp, Homo sapiens
aagctggctccagcc

SEQ ID NO: 177312 - DNA, 15 bp, Homo sapiens
caagctggctccagc

SEQ ID NO: 177313 - DNA, 15 bp, Homo sapiens
ccaagctggctccag

SEQ ID NO: 177314 - DNA, 15 bp, Homo sapiens
gccaagctggctcca

SEQ ID NO: 177315 - DNA, 15 bp, Homo sapiens
agccaagctggctcc

SEQ ID NO: 177316 - DNA, 15 bp, Homo sapiens
cagccaagctggctc

SEQ ID NO: 177317 - DNA, 15 bp, Homo sapiens
acagccaagctggct

SEQ ID NO: 177318 - DNA, 15 bp, Homo sapiens
cacagccaagctggc

SEQ ID NO: 177319 - DNA, 15 bp, Homo sapiens
acacagccaagctgg

SEQ ID NO: 177320 - DNA, 15 bp, Homo sapiens
cacacagccaagctg

SEQ ID NO: 177321 - DNA, 15 bp, Homo sapiens
gcacacagccaagct

SEQ ID NO: 177322 - DNA, 15 bp, Homo sapiens
ggcacacagccaagc

SEQ ID NO: 177323 - DNA, 15 bp, Homo sapiens
gggcacacagccaag

SEQ ID NO: 177324 - DNA, 15 bp, Homo sapiens
ggggcacacagccaa

SEQ ID NO: 177325 - DNA, 15 bp, Homo sapiens
gggggcacacagcca

SEQ ID NO: 177326 - DNA, 15 bp, Homo sapiens
tgggggcacacagcc

SEQ ID NO: 177327 - DNA, 15 bp, Homo sapiens
ctgggggcacacagc

SEQ ID NO: 177328 - DNA, 15 bp, Homo sapiens
gctgggggcacacag

SEQ ID NO: 177329 - DNA, 15 bp, Homo sapiens
ggctgggggcacaca

SEQ ID NO: 177330 - DNA, 15 bp, Homo sapiens
tggctgggggcacac

SEQ ID NO: 177331 - DNA, 15 bp, Homo sapiens
gtggctgggggcaca

SEQ ID NO: 177332 - DNA, 15 bp, Homo sapiens
ggtggctgggggcac

SEQ ID NO: 177333 - DNA, 15 bp, Homo sapiens
aggtggctgggggca

SEQ ID NO: 177334 - DNA, 15 bp, Homo sapiens
caggtggctgggggc

SEQ ID NO: 177335 - DNA, 15 bp, Homo sapiens
ccaggtggctggggg

SEQ ID NO: 177336 - DNA, 15 bp, Homo sapiens
gccaggtggctgggg

SEQ ID NO: 177337 - DNA, 15 bp, Homo sapiens
ggccaggtggctggg

SEQ ID NO: 177338 - DNA, 15 bp, Homo sapiens
gggccaggtggctgg

SEQ ID NO: 177339 - DNA, 15 bp, Homo sapiens
agggccaggtggctg

SEQ ID NO: 177340 - DNA, 15 bp, Homo sapiens
cagggccaggtggct

SEQ ID NO: 177341 - DNA, 15 bp, Homo sapiens
tcagggccaggtggc

SEQ ID NO: 177342 - DNA, 15 bp, Homo sapiens
gtcagggccaggtgg

SEQ ID NO: 177343 - DNA, 15 bp, Homo sapiens
tgtcagggccaggtg

SEQ ID NO: 177344 - DNA, 15 bp, Homo sapiens
gtgtcagggccaggt

SEQ ID NO: 177345 - DNA, 15 bp, Homo sapiens
cgtgtcagggccagg

SEQ ID NO: 177346 - DNA, 15 bp, Homo sapiens
gcgtgtcagggccag

SEQ ID NO: 177347 - DNA, 15 bp, Homo sapiens
tgcgtgtcagggcca

SEQ ID NO: 177348 - DNA, 15 bp, Homo sapiens
gtgcgtgtcagggcc

SEQ ID NO: 177349 - DNA, 15 bp, Homo sapiens
ggtgcgtgtcagggc

SEQ ID NO: 177350 - DNA, 15 bp, Homo sapiens
aggtgcgtgtcaggg

SEQ ID NO: 177351 - DNA, 15 bp, Homo sapiens
aaggtgcgtgtcagg

SEQ ID NO: 177352 - DNA, 15 bp, Homo sapiens
taaggtgcgtgtcag

SEQ ID NO: 177353 - DNA, 15 bp, Homo sapiens
gtaaggtgcgtgtca

SEQ ID NO: 177354 - DNA, 15 bp, Homo sapiens
tgtaaggtgcgtgtc

SEQ ID NO: 177355 - DNA, 15 bp, Homo sapiens
ctgtaaggtgcgtgt

SEQ ID NO: 177356 - DNA, 15 bp, Homo sapiens
cctgtaaggtgcgtg

SEQ ID NO: 177357 - DNA, 15 bp, Homo sapiens
ccctgtaaggtgcgt

SEQ ID NO: 177358 - DNA, 15 bp, Homo sapiens
cccctgtaaggtgcg

SEQ ID NO: 177359 - DNA, 15 bp, Homo sapiens
gcccctgtaaggtgc

SEQ ID NO: 177360 - DNA, 15 bp, Homo sapiens
agcccctgtaaggtg

SEQ ID NO: 177361 - DNA, 15 bp, Homo sapiens
gagcccctgtaaggt

SEQ ID NO: 177362 - DNA, 15 bp, Homo sapiens
agagcccctgtaagg

SEQ ID NO: 177363 - DNA, 15 bp, Homo sapiens
cagagcccctgtaag

SEQ ID NO: 177364 - DNA, 15 bp, Homo sapiens
acagagcccctgtaa

SEQ ID NO: 177365 - DNA, 15 bp, Homo sapiens
cacagagcccctgta

SEQ ID NO: 177366 - DNA, 15 bp, Homo sapiens
ccacagagcccctgt

SEQ ID NO: 177367 - DNA, 15 bp, Homo sapiens
gccacagagcccctg

SEQ ID NO: 177368 - DNA, 15 bp, Homo sapiens
tgccacagagcccct

SEQ ID NO: 177369 - DNA, 15 bp, Homo sapiens
atgccacagagcccc

SEQ ID NO: 177370 - DNA, 15 bp, Homo sapiens
catgccacagagccc

SEQ ID NO: 177371 - DNA, 15 bp, Homo sapiens
ccatgccacagagcc

SEQ ID NO: 177372 - DNA, 15 bp, Homo sapiens
cccatgccacagagc

SEQ ID NO: 177373 - DNA, 15 bp, Homo sapiens
ccccatgccacagag

SEQ ID NO: 177374 - DNA, 15 bp, Homo sapiens
gccccatgccacaga

SEQ ID NO: 177375 - DNA, 15 bp, Homo sapiens
agccccatgccacag

SEQ ID NO: 177376 - DNA, 15 bp, Homo sapiens
cagccccatgccaca

SEQ ID NO: 177377 - DNA, 15 bp, Homo sapiens
ccagccccatgccac

SEQ ID NO: 177378 - DNA, 15 bp, Homo sapiens
gccagccccatgcca

SEQ ID NO: 177379 - DNA, 15 bp, Homo sapiens
agccagccccatgcc

SEQ ID NO: 177380 - DNA, 15 bp, Homo sapiens
cagccagccccatgc

SEQ ID NO: 177381 - DNA, 15 bp, Homo sapiens
ccagccagccccatg

SEQ ID NO: 177382 - DNA, 15 bp, Homo sapiens
gccagccagccccat

SEQ ID NO: 177383 - DNA, 15 bp, Homo sapiens
agccagccagcccca

SEQ ID NO: 177384 - DNA, 15 bp, Homo sapiens
cagccagccagcccc

SEQ ID NO: 177385 - DNA, 15 bp, Homo sapiens
gcagccagccagccc

SEQ ID NO: 177386 - DNA, 15 bp, Homo sapiens
agcagccagccagcc

SEQ ID NO: 177387 - DNA, 15 bp, Homo sapiens
aagcagccagccagc

SEQ ID NO: 177388 - DNA, 15 bp, Homo sapiens
caagcagccagccag

SEQ ID NO: 177389 - DNA, 15 bp, Homo sapiens
gcaagcagccagcca

SEQ ID NO: 177390 - DNA, 15 bp, Homo sapiens
agcaagcagccagcc

SEQ ID NO: 177391 - DNA, 15 bp, Homo sapiens
cagcaagcagccagc

SEQ ID NO: 177392 - DNA, 15 bp, Homo sapiens
ccagcaagcagccag

SEQ ID NO: 177393 - DNA, 15 bp, Homo sapiens
cccagcaagcagcca

SEQ ID NO: 177394 - DNA, 15 bp, Homo sapiens
tcccagcaagcagcc

SEQ ID NO: 177395 - DNA, 15 bp, Homo sapiens
ctcccagcaagcagc

SEQ ID NO: 177396 - DNA, 15 bp, Homo sapiens
gctcccagcaagcag

SEQ ID NO: 177397 - DNA, 15 bp, Homo sapiens
ggctcccagcaagca

SEQ ID NO: 177398 - DNA, 15 bp, Homo sapiens
aggctcccagcaagc

SEQ ID NO: 177399 - DNA, 15 bp, Homo sapiens
caggctcccagcaag

SEQ ID NO: 177400 - DNA, 15 bp, Homo sapiens
ccaggctcccagcaa

SEQ ID NO: 177401 - DNA, 15 bp, Homo sapiens
gccaggctcccagca

SEQ ID NO: 177402 - DNA, 15 bp, Homo sapiens
agccaggctcccagc

SEQ ID NO: 177403 - DNA, 15 bp, Homo sapiens
cagccaggctcccag

SEQ ID NO: 177404 - DNA, 15 bp, Homo sapiens
tcagccaggctccca

SEQ ID NO: 177405 - DNA, 15 bp, Homo sapiens
atcagccaggctccc

SEQ ID NO: 177406 - DNA, 15 bp, Homo sapiens
catcagccaggctcc

SEQ ID NO: 177407 - DNA, 15 bp, Homo sapiens
gcatcagccaggctc

SEQ ID NO: 177408 - DNA, 15 bp, Homo sapiens
tgcatcagccaggct

SEQ ID NO: 177409 - DNA, 15 bp, Homo sapiens
ctgcatcagccaggc

SEQ ID NO: 177410 - DNA, 15 bp, Homo sapiens
cctgcatcagccagg

SEQ ID NO: 177411 - DNA, 15 bp, Homo sapiens
ccctgcatcagccag

SEQ ID NO: 177412 - DNA, 15 bp, Homo sapiens
accctgcatcagcca

SEQ ID NO: 177413 - DNA, 15 bp, Homo sapiens
aaccctgcatcagcc

SEQ ID NO: 177414 - DNA, 15 bp, Homo sapiens
gaaccctgcatcagc

SEQ ID NO: 177415 - DNA, 15 bp, Homo sapiens
tgaaccctgcatcag

SEQ ID NO: 177416 - DNA, 15 bp, Homo sapiens
atgaaccctgcatca

SEQ ID NO: 177417 - DNA, 15 bp, Homo sapiens
catgaaccctgcatc

SEQ ID NO: 177418 - DNA, 15 bp, Homo sapiens
gcatgaaccctgcat

SEQ ID NO: 177419 - DNA, 15 bp, Homo sapiens
agcatgaaccctgca

SEQ ID NO: 177420 - DNA, 15 bp, Homo sapiens
tagcatgaaccctgc

SEQ ID NO: 177421 - DNA, 15 bp, Homo sapiens
gtagcatgaaccctg

SEQ ID NO: 177422 - DNA, 15 bp, Homo sapiens
ggtagcatgaaccct

SEQ ID NO: 177423 - DNA, 15 bp, Homo sapiens
gggtagcatgaaccc

SEQ ID NO: 177424 - DNA, 15 bp, Homo sapiens
ggggtagcatgaacc

SEQ ID NO: 177425 - DNA, 15 bp, Homo sapiens
gggggtagcatgaac

SEQ ID NO: 177426 - DNA, 15 bp, Homo sapiens
agggggtagcatgaa

SEQ ID NO: 177427 - DNA, 15 bp, Homo sapiens
tagggggtagcatga

SEQ ID NO: 177428 - DNA, 15 bp, Homo sapiens
ctagggggtagcatg

SEQ ID NO: 177429 - DNA, 15 bp, Homo sapiens
actagggggtagcat

SEQ ID NO: 177430 - DNA, 15 bp, Homo sapiens
cactagggggtagca

SEQ ID NO: 177431 - DNA, 15 bp, Homo sapiens
ccactagggggtagc

SEQ ID NO: 177432 - DNA, 15 bp, Homo sapiens
cccactagggggtag

SEQ ID NO: 177433 - DNA, 15 bp, Homo sapiens
ccccactagggggta

SEQ ID NO: 177434 - DNA, 15 bp, Homo sapiens
cccccactagggggt

SEQ ID NO: 177435 - DNA, 15 bp, Homo sapiens
tcccccactaggggg

SEQ ID NO: 177436 - DNA, 15 bp, Homo sapiens
atcccccactagggg

SEQ ID NO: 177437 - DNA, 15 bp, Homo sapiens
aatcccccactaggg

SEQ ID NO: 177438 - DNA, 15 bp, Homo sapiens
caatcccccactagg

SEQ ID NO: 177439 - DNA, 15 bp, Homo sapiens
ccaatcccccactag

SEQ ID NO: 177440 - DNA, 15 bp, Homo sapiens
cccaatcccccacta

SEQ ID NO: 177441 - DNA, 15 bp, Homo sapiens
ccccaatcccccact

SEQ ID NO: 177442 - DNA, 15 bp, Homo sapiens
gccccaatcccccac

SEQ ID NO: 177443 - DNA, 15 bp, Homo sapiens
tgccccaatccccca

SEQ ID NO: 177444 - DNA, 15 bp, Homo sapiens
ctgccccaatccccc

SEQ ID NO: 177445 - DNA, 15 bp, Homo sapiens
actgccccaatcccc

SEQ ID NO: 177446 - DNA, 15 bp, Homo sapiens
cactgccccaatccc

SEQ ID NO: 177447 - DNA, 15 bp, Homo sapiens
gcactgccccaatcc

SEQ ID NO: 177448 - DNA, 15 bp, Homo sapiens
ggcactgccccaatc

SEQ ID NO: 177449 - DNA, 15 bp, Homo sapiens
tggcactgccccaat

SEQ ID NO: 177450 - DNA, 15 bp, Homo sapiens
ctggcactgccccaa

SEQ ID NO: 177451 - DNA, 15 bp, Homo sapiens
gctggcactgcccca

SEQ ID NO: 177452 - DNA, 15 bp, Homo sapiens
ggctggcactgcccc

SEQ ID NO: 177453 - DNA, 15 bp, Homo sapiens
tggctggcactgccc

SEQ ID NO: 177454 - DNA, 15 bp, Homo sapiens
atggctggcactgcc

SEQ ID NO: 177455 - DNA, 15 bp, Homo sapiens
gatggctggcactgc

SEQ ID NO: 177456 - DNA, 15 bp, Homo sapiens
tgatggctggcactg

SEQ ID NO: 177457 - DNA, 15 bp, Homo sapiens
ctgatggctggcact

SEQ ID NO: 177458 - DNA, 15 bp, Homo sapiens
gctgatggctggcac

SEQ ID NO: 177459 - DNA, 15 bp, Homo sapiens
ggctgatggctggca

SEQ ID NO: 177460 - DNA, 15 bp, Homo sapiens
aggctgatggctggc

SEQ ID NO: 177461 - DNA, 15 bp, Homo sapiens
caggctgatggctgg

SEQ ID NO: 177462 - DNA, 15 bp, Homo sapiens
ccaggctgatggctg

SEQ ID NO: 177463 - DNA, 15 bp, Homo sapiens
gccaggctgatggct

SEQ ID NO: 177464 - DNA, 15 bp, Homo sapiens
agccaggctgatggc

SEQ ID NO: 177465 - DNA, 15 bp, Homo sapiens
cagccaggctgatgg

SEQ ID NO: 177466 - DNA, 15 bp, Homo sapiens
gcagccaggctgatg

SEQ ID NO: 177467 - DNA, 15 bp, Homo sapiens
agcagccaggctgat

SEQ ID NO: 177468 - DNA, 15 bp, Homo sapiens
gagcagccaggctga

SEQ ID NO: 177469 - DNA, 15 bp, Homo sapiens
ggagcagccaggctg

SEQ ID NO: 177470 - DNA, 15 bp, Homo sapiens
gggagcagccaggct

SEQ ID NO: 177471 - DNA, 15 bp, Homo sapiens
agggagcagccaggc

SEQ ID NO: 177472 - DNA, 15 bp, Homo sapiens
cagggagcagccagg

SEQ ID NO: 177473 - DNA, 15 bp, Homo sapiens
acagggagcagccag

SEQ ID NO: 177474 - DNA, 15 bp, Homo sapiens
cacagggagcagcca

SEQ ID NO: 177475 - DNA, 15 bp, Homo sapiens
acacagggagcagcc

SEQ ID NO: 177476 - DNA, 15 bp, Homo sapiens
cacacagggagcagc

SEQ ID NO: 177477 - DNA, 15 bp, Homo sapiens
gcacacagggagcag

SEQ ID NO: 177478 - DNA, 15 bp, Homo sapiens
agcacacagggagca

SEQ ID NO: 177479 - DNA, 15 bp, Homo sapiens
tagcacacagggagc

SEQ ID NO: 177480 - DNA, 15 bp, Homo sapiens
gtagcacacagggag

SEQ ID NO: 177481 - DNA, 15 bp, Homo sapiens
agtagcacacaggga

SEQ ID NO: 177482 - DNA, 15 bp, Homo sapiens
cagtagcacacaggg

SEQ ID NO: 177483 - DNA, 15 bp, Homo sapiens
tcagtagcacacagg

SEQ ID NO: 177484 - DNA, 15 bp, Homo sapiens
ctcagtagcacacag

SEQ ID NO: 177485 - DNA, 15 bp, Homo sapiens
gctcagtagcacaca

SEQ ID NO: 177486 - DNA, 15 bp, Homo sapiens
ggctcagtagcacac

SEQ ID NO: 177487 - DNA, 15 bp, Homo sapiens
aggctcagtagcaca

SEQ ID NO: 177488 - DNA, 15 bp, Homo sapiens
caggctcagtagcac

SEQ ID NO: 177489 - DNA, 15 bp, Homo sapiens
ccaggctcagtagca

SEQ ID NO: 177490 - DNA, 15 bp, Homo sapiens
tccaggctcagtagc

SEQ ID NO: 177491 - DNA, 15 bp, Homo sapiens
ttccaggctcagtag

SEQ ID NO: 177492 - DNA, 15 bp, Homo sapiens
cttccaggctcagta

SEQ ID NO: 177493 - DNA, 15 bp, Homo sapiens
acttccaggctcagt

SEQ ID NO: 177494 - DNA, 15 bp, Homo sapiens
cacttccaggctcag

SEQ ID NO: 177495 - DNA, 15 bp, Homo sapiens
tcacttccaggctca

SEQ ID NO: 177496 - DNA, 15 bp, Homo sapiens
gtcacttccaggctc

SEQ ID NO: 177497 - DNA, 15 bp, Homo sapiens
tgtcacttccaggct

SEQ ID NO: 177498 - DNA, 15 bp, Homo sapiens
ttgtcacttccaggc

SEQ ID NO: 177499 - DNA, 15 bp, Homo sapiens
tttgtcacttccagg

SEQ ID NO: 177500 - DNA, 15 bp, Homo sapiens
ctttgtcacttccag

SEQ ID NO: 177501 - DNA, 15 bp, Homo sapiens
tctttgtcacttcca

SEQ ID NO: 177502 - DNA, 15 bp, Homo sapiens
gtctttgtcacttcc

SEQ ID NO: 177503 - DNA, 15 bp, Homo sapiens
ggtctttgtcacttc

SEQ ID NO: 177504 - DNA, 15 bp, Homo sapiens
gggtctttgtcactt

SEQ ID NO: 177505 - DNA, 15 bp, Homo sapiens
tgggtctttgtcact

SEQ ID NO: 177506 - DNA, 15 bp, Homo sapiens
gtgggtctttgtcac

SEQ ID NO: 177507 - DNA, 15 bp, Homo sapiens
ggtgggtctttgtca

SEQ ID NO: 177508 - DNA, 15 bp, Homo sapiens
gggtgggtctttgtc

SEQ ID NO: 177509 - DNA, 15 bp, Homo sapiens
ggggtgggtctttgt

SEQ ID NO: 177510 - DNA, 15 bp, Homo sapiens
aggggtgggtctttg

SEQ ID NO: 177511 - DNA, 15 bp, Homo sapiens
caggggtgggtcttt

SEQ ID NO: 177512 - DNA, 15 bp, Homo sapiens
acaggggtgggtctt

SEQ ID NO: 177513 - DNA, 15 bp, Homo sapiens
gacaggggtgggtct

SEQ ID NO: 177514 - DNA, 15 bp, Homo sapiens
ggacaggggtgggtc

SEQ ID NO: 177515 - DNA, 15 bp, Homo sapiens
gggacaggggtgggt

SEQ ID NO: 177516 - DNA, 15 bp, Homo sapiens
ggggacaggggtggg

SEQ ID NO: 177517 - DNA, 15 bp, Homo sapiens
tggggacaggggtgg

SEQ ID NO: 177518 - DNA, 15 bp, Homo sapiens
gtggggacaggggtg

SEQ ID NO: 177519 - DNA, 15 bp, Homo sapiens
agtggggacaggggt

SEQ ID NO: 177520 - DNA, 15 bp, Homo sapiens
gagtggggacagggg

SEQ ID NO: 177521 - DNA, 15 bp, Homo sapiens
tgagtggggacaggg

SEQ ID NO: 177522 - DNA, 15 bp, Homo sapiens
ctgagtggggacagg

SEQ ID NO: 177523 - DNA, 15 bp, Homo sapiens
cctgagtggggacag

SEQ ID NO: 177524 - DNA, 15 bp, Homo sapiens
gcctgagtggggaca

SEQ ID NO: 177525 - DNA, 15 bp, Homo sapiens
ggcctgagtggggac

SEQ ID NO: 177526 - DNA, 15 bp, Homo sapiens
tggcctgagtgggga

SEQ ID NO: 177527 - DNA, 15 bp, Homo sapiens
gtggcctgagtgggg

SEQ ID NO: 177528 - DNA, 15 bp, Homo sapiens
ggtggcctgagtggg

SEQ ID NO: 177529 - DNA, 15 bp, Homo sapiens
aggtggcctgagtgg

SEQ ID NO: 177530 - DNA, 15 bp, Homo sapiens
caggtggcctgagtg

SEQ ID NO: 177531 - DNA, 15 bp, Homo sapiens
gcaggtggcctgagt

SEQ ID NO: 177532 - DNA, 15 bp, Homo sapiens
agcaggtggcctgag

SEQ ID NO: 177533 - DNA, 15 bp, Homo sapiens
cagcaggtggcctga

SEQ ID NO: 177534 - DNA, 15 bp, Homo sapiens
gcagcaggtggcctg

SEQ ID NO: 177535 - DNA, 15 bp, Homo sapiens
agcagcaggtggcct

SEQ ID NO: 177536 - DNA, 15 bp, Homo sapiens
gagcagcaggtggcc

SEQ ID NO: 177537 - DNA, 15 bp, Homo sapiens
ggagcagcaggtggc

SEQ ID NO: 177538 - DNA, 15 bp, Homo sapiens
cggagcagcaggtgg

SEQ ID NO: 177539 - DNA, 15 bp, Homo sapiens
tcggagcagcaggtg

SEQ ID NO: 177540 - DNA, 15 bp, Homo sapiens
atcggagcagcaggt

SEQ ID NO: 177541 - DNA, 15 bp, Homo sapiens
gatcggagcagcagg

SEQ ID NO: 177542 - DNA, 15 bp, Homo sapiens
tgatcggagcagcag

SEQ ID NO: 177543 - DNA, 15 bp, Homo sapiens
gtgatcggagcagca

SEQ ID NO: 177544 - DNA, 15 bp, Homo sapiens
ggtgatcggagcagc

SEQ ID NO: 177545 - DNA, 15 bp, Homo sapiens
aggtgatcggagcag

SEQ ID NO: 177546 - DNA, 15 bp, Homo sapiens
caggtgatcggagca

SEQ ID NO: 177547 - DNA, 15 bp, Homo sapiens
gcaggtgatcggagc

SEQ ID NO: 177548 - DNA, 15 bp, Homo sapiens
tgcaggtgatcggag

SEQ ID NO: 177549 - DNA, 15 bp, Homo sapiens
gtgcaggtgatcgga

SEQ ID NO: 177550 - DNA, 15 bp, Homo sapiens
agtgcaggtgatcgg

SEQ ID NO: 177551 - DNA, 15 bp, Homo sapiens
cagtgcaggtgatcg

SEQ ID NO: 177552 - DNA, 15 bp, Homo sapiens
gcagtgcaggtgatc

SEQ ID NO: 177553 - DNA, 15 bp, Homo sapiens
agcagtgcaggtgat

SEQ ID NO: 177554 - DNA, 15 bp, Homo sapiens
cagcagtgcaggtga

SEQ ID NO: 177555 - DNA, 15 bp, Homo sapiens
gcagcagtgcaggtg

SEQ ID NO: 177556 - DNA, 15 bp, Homo sapiens
ggcagcagtgcaggt

SEQ ID NO: 177557 - DNA, 15 bp, Homo sapiens
gggcagcagtgcagg

SEQ ID NO: 177558 - DNA, 15 bp, Homo sapiens
ggggcagcagtgcag

SEQ ID NO: 177559 - DNA, 15 bp, Homo sapiens
gggggcagcagtgca

SEQ ID NO: 177560 - DNA, 15 bp, Homo sapiens
tgggggcagcagtgc

SEQ ID NO: 177561 - DNA, 15 bp, Homo sapiens
ttgggggcagcagtg

SEQ ID NO: 177562 - DNA, 15 bp, Homo sapiens
cttgggggcagcagt

SEQ ID NO: 177563 - DNA, 15 bp, Homo sapiens
tcttgggggcagcag

SEQ ID NO: 177564 - DNA, 15 bp, Homo sapiens
gtcttgggggcagca

SEQ ID NO: 177565 - DNA, 15 bp, Homo sapiens
tgtcttgggggcagc

SEQ ID NO: 177566 - DNA, 15 bp, Homo sapiens
gtgtcttgggggcag

SEQ ID NO: 177567 - DNA, 15 bp, Homo sapiens
agtgtcttgggggca

SEQ ID NO: 177568 - DNA, 15 bp, Homo sapiens
cagtgtcttgggggc

SEQ ID NO: 177569 - DNA, 15 bp, Homo sapiens
acagtgtcttggggg

SEQ ID NO: 177570 - DNA, 15 bp, Homo sapiens
cacagtgtcttgggg

SEQ ID NO: 177571 - DNA, 15 bp, Homo sapiens
acacagtgtcttggg

SEQ ID NO: 177572 - DNA, 15 bp, Homo sapiens
cacacagtgtcttgg

SEQ ID NO: 177573 - DNA, 15 bp, Homo sapiens
acacacagtgtcttg

SEQ ID NO: 177574 - DNA, 15 bp, Homo sapiens
cacacacagtgtctt

SEQ ID NO: 177575 - DNA, 15 bp, Homo sapiens
tcacacacagtgtct

SEQ ID NO: 177576 - DNA, 15 bp, Homo sapiens
gtcacacacagtgtc

SEQ ID NO: 177577 - DNA, 15 bp, Homo sapiens
ggtcacacacagtgt

SEQ ID NO: 177578 - DNA, 15 bp, Homo sapiens
aggtcacacacagtg

SEQ ID NO: 177579 - DNA, 15 bp, Homo sapiens
caggtcacacacagt

SEQ ID NO: 177580 - DNA, 15 bp, Homo sapiens
tcaggtcacacacag

SEQ ID NO: 177581 - DNA, 15 bp, Homo sapiens
atcaggtcacacaca

SEQ ID NO: 177582 - DNA, 15 bp, Homo sapiens
gatcaggtcacacac

SEQ ID NO: 177583 - DNA, 15 bp, Homo sapiens
ggatcaggtcacaca

SEQ ID NO: 177584 - DNA, 15 bp, Homo sapiens
tggatcaggtcacac

SEQ ID NO: 177585 - DNA, 15 bp, Homo sapiens
ctggatcaggtcaca

SEQ ID NO: 177586 - DNA, 15 bp, Homo sapiens
tctggatcaggtcac

SEQ ID NO: 177587 - DNA, 15 bp, Homo sapiens
ctctggatcaggtca

SEQ ID NO: 177588 - DNA, 15 bp, Homo sapiens
actctggatcaggtc

SEQ ID NO: 177589 - DNA, 15 bp, Homo sapiens
tactctggatcaggt

SEQ ID NO: 177590 - DNA, 15 bp, Homo sapiens
ttactctggatcagg

SEQ ID NO: 177591 - DNA, 15 bp, Homo sapiens
cttactctggatcag

SEQ ID NO: 177592 - DNA, 15 bp, Homo sapiens
acttactctggatca

SEQ ID NO: 177593 - DNA, 15 bp, Homo sapiens
cacttactctggatc

SEQ ID NO: 177594 - DNA, 15 bp, Homo sapiens
gcacttactctggat

SEQ ID NO: 177595 - DNA, 15 bp, Homo sapiens
ggcacttactctgga

SEQ ID NO: 177596 - DNA, 15 bp, Homo sapiens
aggcacttactctgg

SEQ ID NO: 177597 - DNA, 15 bp, Homo sapiens
gaggcacttactctg

SEQ ID NO: 177598 - DNA, 15 bp, Homo sapiens
agaggcacttactct

SEQ ID NO: 177599 - DNA, 15 bp, Homo sapiens
gagaggcacttactc

SEQ ID NO: 177600 - DNA, 15 bp, Homo sapiens
ggagaggcacttact

SEQ ID NO: 177601 - DNA, 15 bp, Homo sapiens
tggagaggcacttac

SEQ ID NO: 177602 - DNA, 15 bp, Homo sapiens
ttggagaggcactta

SEQ ID NO: 177603 - DNA, 15 bp, Homo sapiens
cttggagaggcactt

SEQ ID NO: 177604 - DNA, 15 bp, Homo sapiens
ccttggagaggcact

SEQ ID NO: 177605 - DNA, 15 bp, Homo sapiens
tccttggagaggcac

SEQ ID NO: 177606 - DNA, 15 bp, Homo sapiens
ctccttggagaggca

SEQ ID NO: 177607 - DNA, 15 bp, Homo sapiens
tctccttggagaggc

SEQ ID NO: 177608 - DNA, 15 bp, Homo sapiens
ttctccttggagagg

SEQ ID NO: 177609 - DNA, 15 bp, Homo sapiens
gttctccttggagag

SEQ ID NO: 177610 - DNA, 15 bp, Homo sapiens
cgttctccttggaga

SEQ ID NO: 177611 - DNA, 15 bp, Homo sapiens
gcgttctccttggag

SEQ ID NO: 177612 - DNA, 15 bp, Homo sapiens
agcgttctccttgga

SEQ ID NO: 177613 - DNA, 15 bp, Homo sapiens
tagcgttctccttgg

SEQ ID NO: 177614 - DNA, 15 bp, Homo sapiens
gtagcgttctccttg

SEQ ID NO: 177615 - DNA, 15 bp, Homo sapiens
ggtagcgttctcctt

SEQ ID NO: 177616 - DNA, 15 bp, Homo sapiens
tggtagcgttctcct

SEQ ID NO: 177617 - DNA, 15 bp, Homo sapiens
gtggtagcgttctcc

SEQ ID NO: 177618 - DNA, 15 bp, Homo sapiens
cgtggtagcgttctc

SEQ ID NO: 177619 - DNA, 15 bp, Homo sapiens
ccgtggtagcgttct

SEQ ID NO: 177620 - DNA, 15 bp, Homo sapiens
tccgtggtagcgttc

SEQ ID NO: 177621 - DNA, 15 bp, Homo sapiens
gtccgtggtagcgtt

SEQ ID NO: 177622 - DNA, 15 bp, Homo sapiens
ggtccgtggtagcgt

SEQ ID NO: 177623 - DNA, 15 bp, Homo sapiens
aggtccgtggtagcg

SEQ ID NO: 177624 - DNA, 15 bp, Homo sapiens
gaggtccgtggtagc

SEQ ID NO: 177625 - DNA, 15 bp, Homo sapiens
ggaggtccgtggtag

SEQ ID NO: 177626 - DNA, 15 bp, Homo sapiens
aggaggtccgtggta

SEQ ID NO: 177627 - DNA, 15 bp, Homo sapiens
gaggaggtccgtggt

SEQ ID NO: 177628 - DNA, 15 bp, Homo sapiens
tgaggaggtccgtgg

SEQ ID NO: 177629 - DNA, 15 bp, Homo sapiens
gtgaggaggtccgtg

SEQ ID NO: 177630 - DNA, 15 bp, Homo sapiens
agtgaggaggtccgt

SEQ ID NO: 177631 - DNA, 15 bp, Homo sapiens
tagtgaggaggtccg

SEQ ID NO: 177632 - DNA, 15 bp, Homo sapiens
ttagtgaggaggtcc

SEQ ID NO: 177633 - DNA, 15 bp, Homo sapiens
cttagtgaggaggtc

SEQ ID NO: 177634 - DNA, 15 bp, Homo sapiens
gcttagtgaggaggt

SEQ ID NO: 177635 - DNA, 15 bp, Homo sapiens
agcttagtgaggagg

SEQ ID NO: 177636 - DNA, 15 bp, Homo sapiens
cagcttagtgaggag

SEQ ID NO: 177637 - DNA, 15 bp, Homo sapiens
gcagcttagtgagga

SEQ ID NO: 177638 - DNA, 15 bp, Homo sapiens
ggcagcttagtgagg

SEQ ID NO: 177639 - DNA, 15 bp, Homo sapiens
aggcagcttagtgag

SEQ ID NO: 177640 - DNA, 15 bp, Homo sapiens
caggcagcttagtga

SEQ ID NO: 177641 - DNA, 15 bp, Homo sapiens
gcaggcagcttagtg

SEQ ID NO: 177642 - DNA, 15 bp, Homo sapiens
cgcaggcagcttagt

SEQ ID NO: 177643 - DNA, 15 bp, Homo sapiens
gcgcaggcagcttag

SEQ ID NO: 177644 - DNA, 15 bp, Homo sapiens
tgcgcaggcagctta

SEQ ID NO: 177645 - DNA, 15 bp, Homo sapiens
gtgcgcaggcagctt

SEQ ID NO: 177646 - DNA, 15 bp, Homo sapiens
tgtgcgcaggcagct

SEQ ID NO: 177647 - DNA, 15 bp, Homo sapiens
gtgtgcgcaggcagc

SEQ ID NO: 177648 - DNA, 15 bp, Homo sapiens
tgtgtgcgcaggcag

SEQ ID NO: 177649 - DNA, 15 bp, Homo sapiens
ctgtgtgcgcaggca

SEQ ID NO: 177650 - DNA, 15 bp, Homo sapiens
cctgtgtgcgcaggc

SEQ ID NO: 177651 - DNA, 15 bp, Homo sapiens
acctgtgtgcgcagg

SEQ ID NO: 177652 - DNA, 15 bp, Homo sapiens
tacctgtgtgcgcag

SEQ ID NO: 177653 - DNA, 15 bp, Homo sapiens
gtacctgtgtgcgca

SEQ ID NO: 177654 - DNA, 15 bp, Homo sapiens
ggtacctgtgtgcgc

SEQ ID NO: 177655 - DNA, 15 bp, Homo sapiens
tggtacctgtgtgcg

SEQ ID NO: 177656 - DNA, 15 bp, Homo sapiens
ctggtacctgtgtgc

SEQ ID NO: 177657 - DNA, 15 bp, Homo sapiens
tctggtacctgtgtg

SEQ ID NO: 177658 - DNA, 15 bp, Homo sapiens
ctctggtacctgtgt

SEQ ID NO: 177659 - DNA, 15 bp, Homo sapiens
cctctggtacctgtg

SEQ ID NO: 177660 - DNA, 15 bp, Homo sapiens
gcctctggtacctgt

SEQ ID NO: 177661 - DNA, 15 bp, Homo sapiens
tgcctctggtacctg

SEQ ID NO: 177662 - DNA, 15 bp, Homo sapiens
ctgcctctggtacct

SEQ ID NO: 177663 - DNA, 15 bp, Homo sapiens
cctgcctctggtacc

SEQ ID NO: 177664 - DNA, 15 bp, Homo sapiens
ccctgcctctggtac

SEQ ID NO: 177665 - DNA, 15 bp, Homo sapiens
accctgcctctggta

SEQ ID NO: 177666 - DNA, 15 bp, Homo sapiens
caccctgcctctggt

SEQ ID NO: 177667 - DNA, 15 bp, Homo sapiens
gcaccctgcctctgg

SEQ ID NO: 177668 - DNA, 15 bp, Homo sapiens
tgcaccctgcctctg

SEQ ID NO: 177669 - DNA, 15 bp, Homo sapiens
ctgcaccctgcctct

SEQ ID NO: 177670 - DNA, 15 bp, Homo sapiens
tctgcaccctgcctc

SEQ ID NO: 177671 - DNA, 15 bp, Homo sapiens
atctgcaccctgcct

SEQ ID NO: 177672 - DNA, 15 bp, Homo sapiens
tatctgcaccctgcc

SEQ ID NO: 177673 - DNA, 15 bp, Homo sapiens
gtatctgcaccctgc

SEQ ID NO: 177674 - DNA, 15 bp, Homo sapiens
tgtatctgcaccctg

SEQ ID NO: 177675 - DNA, 15 bp, Homo sapiens
ctgtatctgcaccct

SEQ ID NO: 177676 - DNA, 15 bp, Homo sapiens
cctgtatctgcaccc

SEQ ID NO: 177677 - DNA, 15 bp, Homo sapiens
ccctgtatctgcacc

SEQ ID NO: 177678 - DNA, 15 bp, Homo sapiens
cccctgtatctgcac

SEQ ID NO: 177679 - DNA, 15 bp, Homo sapiens
acccctgtatctgca

SEQ ID NO: 177680 - DNA, 15 bp, Homo sapiens
cacccctgtatctgc

SEQ ID NO: 177681 - DNA, 15 bp, Homo sapiens
ccacccctgtatctg

SEQ ID NO: 177682 - DNA, 15 bp, Homo sapiens
gtacctgggtaaaag

SEQ ID NO: 177683 - DNA, 15 bp, Homo sapiens
ggtacctgggtaaaa

SEQ ID NO: 177684 - DNA, 15 bp, Homo sapiens
gggtacctgggtaaa

SEQ ID NO: 177685 - DNA, 15 bp, Homo sapiens
tgggtacctgggtaa

SEQ ID NO: 177686 - DNA, 15 bp, Homo sapiens
ctgggtacctgggta

SEQ ID NO: 177687 - DNA, 15 bp, Homo sapiens
cctgggtacctgggt

SEQ ID NO: 177688 - DNA, 15 bp, Homo sapiens
ccctgggtacctggg

SEQ ID NO: 177689 - DNA, 15 bp, Homo sapiens
cccctgggtacctgg

SEQ ID NO: 177690 - DNA, 15 bp, Homo sapiens
acccctgggtacctg

SEQ ID NO: 177691 - DNA, 15 bp, Homo sapiens
cacccctgggtacct

SEQ ID NO: 177692 - DNA, 15 bp, Homo sapiens
ccacccctgggtacc

SEQ ID NO: 177693 - DNA, 15 bp, Homo sapiens
gccacccctgggtac

SEQ ID NO: 177694 - DNA, 15 bp, Homo sapiens
cgccacccctgggta

SEQ ID NO: 177695 - DNA, 15 bp, Homo sapiens
ccgccacccctgggt

SEQ ID NO: 177696 - DNA, 15 bp, Homo sapiens
cccgccacccctggg

SEQ ID NO: 177697 - DNA, 15 bp, Homo sapiens
acccgccacccctgg

SEQ ID NO: 177698 - DNA, 15 bp, Homo sapiens
cacccgccacccctg

SEQ ID NO: 177699 - DNA, 15 bp, Homo sapiens
ccacccgccacccct

SEQ ID NO: 177700 - DNA, 15 bp, Homo sapiens
cccacccgccacccc

SEQ ID NO: 177701 - DNA, 15 bp, Homo sapiens
acccacccgccaccc

SEQ ID NO: 177702 - DNA, 15 bp, Homo sapiens
cacccacccgccacc

SEQ ID NO: 177703 - DNA, 15 bp, Homo sapiens
ccacccacccgccac

SEQ ID NO: 177704 - DNA, 15 bp, Homo sapiens
cccacccacccgcca

SEQ ID NO: 177705 - DNA, 15 bp, Homo sapiens
gcccacccacccgcc

SEQ ID NO: 177706 - DNA, 15 bp, Homo sapiens
agcccacccacccgc

SEQ ID NO: 177707 - DNA, 15 bp, Homo sapiens
cagcccacccacccg

SEQ ID NO: 177708 - DNA, 15 bp, Homo sapiens
tcagcccacccaccc

SEQ ID NO: 177709 - DNA, 15 bp, Homo sapiens
ctcagcccacccacc

SEQ ID NO: 177710 - DNA, 15 bp, Homo sapiens
gctcagcccacccac

SEQ ID NO: 177711 - DNA, 15 bp, Homo sapiens
tgctcagcccaccca

SEQ ID NO: 177712 - DNA, 15 bp, Homo sapiens
gtgctcagcccaccc

SEQ ID NO: 177713 - DNA, 15 bp, Homo sapiens
tgtgctcagcccacc

SEQ ID NO: 177714 - DNA, 15 bp, Homo sapiens
ctgtgctcagcccac

SEQ ID NO: 177715 - DNA, 15 bp, Homo sapiens
actgtgctcagccca

SEQ ID NO: 177716 - DNA, 15 bp, Homo sapiens
cactgtgctcagccc

SEQ ID NO: 177717 - DNA, 15 bp, Homo sapiens
acactgtgctcagcc

SEQ ID NO: 177718 - DNA, 15 bp, Homo sapiens
cacactgtgctcagc

SEQ ID NO: 177719 - DNA, 15 bp, Homo sapiens
ccacactgtgctcag

SEQ ID NO: 177720 - DNA, 15 bp, Homo sapiens
gccacactgtgctca

SEQ ID NO: 177721 - DNA, 15 bp, Homo sapiens
tgccacactgtgctc

SEQ ID NO: 177722 - DNA, 15 bp, Homo sapiens
ctgccacactgtgct

SEQ ID NO: 177723 - DNA, 15 bp, Homo sapiens
cctgccacactgtgc

SEQ ID NO: 177724 - DNA, 15 bp, Homo sapiens
gcctgccacactgtg

SEQ ID NO: 177725 - DNA, 15 bp, Homo sapiens
tgcctgccacactgt

SEQ ID NO: 177726 - DNA, 15 bp, Homo sapiens
ctgcctgccacactg

SEQ ID NO: 177727 - DNA, 15 bp, Homo sapiens
gctgcctgccacact

SEQ ID NO: 177728 - DNA, 15 bp, Homo sapiens
ggctgcctgccacac

SEQ ID NO: 177729 - DNA, 15 bp, Homo sapiens
cggctgcctgccaca

SEQ ID NO: 177730 - DNA, 15 bp, Homo sapiens
ccggctgcctgccac

SEQ ID NO: 177731 - DNA, 15 bp, Homo sapiens
cccggctgcctgcca

SEQ ID NO: 177732 - DNA, 15 bp, Homo sapiens
gcccggctgcctgcc

SEQ ID NO: 177733 - DNA, 15 bp, Homo sapiens
ggcccggctgcctgc

SEQ ID NO: 177734 - DNA, 15 bp, Homo sapiens
gggcccggctgcctg

SEQ ID NO: 177735 - DNA, 15 bp, Homo sapiens
ggggcccggctgcct

SEQ ID NO: 177736 - DNA, 15 bp, Homo sapiens
tggggcccggctgcc

SEQ ID NO: 177737 - DNA, 15 bp, Homo sapiens
ctggggcccggctgc

SEQ ID NO: 177738 - DNA, 15 bp, Homo sapiens
actggggcccggctg

SEQ ID NO: 177739 - DNA, 15 bp, Homo sapiens
cactggggcccggct

SEQ ID NO: 177740 - DNA, 15 bp, Homo sapiens
gcactggggcccggc

SEQ ID NO: 177741 - DNA, 15 bp, Homo sapiens
ggcactggggcccgg

SEQ ID NO: 177742 - DNA, 15 bp, Homo sapiens
gggcactggggcccg

SEQ ID NO: 177743 - DNA, 15 bp, Homo sapiens
tgggcactggggccc

SEQ ID NO: 177744 - DNA, 15 bp, Homo sapiens
gtgggcactggggcc

SEQ ID NO: 177745 - DNA, 15 bp, Homo sapiens
ggtgggcactggggc

SEQ ID NO: 177746 - DNA, 15 bp, Homo sapiens
aggtgggcactgggg

SEQ ID NO: 177747 - DNA, 15 bp, Homo sapiens
caggtgggcactggg

SEQ ID NO: 177748 - DNA, 15 bp, Homo sapiens
gcaggtgggcactgg

SEQ ID NO: 177749 - DNA, 15 bp, Homo sapiens
ggcaggtgggcactg

SEQ ID NO: 177750 - DNA, 15 bp, Homo sapiens
gggcaggtgggcact

SEQ ID NO: 177751 - DNA, 15 bp, Homo sapiens
agggcaggtgggcac

SEQ ID NO: 177752 - DNA, 15 bp, Homo sapiens
aagggcaggtgggca

SEQ ID NO: 177753 - DNA, 15 bp, Homo sapiens
gaagggcaggtgggc

SEQ ID NO: 177754 - DNA, 15 bp, Homo sapiens
agaagggcaggtggg

SEQ ID NO: 177755 - DNA, 15 bp, Homo sapiens
aagaagggcaggtgg

SEQ ID NO: 177756 - DNA, 15 bp, Homo sapiens
gaagaagggcaggtg

SEQ ID NO: 177757 - DNA, 15 bp, Homo sapiens
tgaagaagggcaggt

SEQ ID NO: 177758 - DNA, 15 bp, Homo sapiens
atgaagaagggcagg

SEQ ID NO: 177759 - DNA, 15 bp, Homo sapiens
gatgaagaagggcag

SEQ ID NO: 177760 - DNA, 15 bp, Homo sapiens
agatgaagaagggca

SEQ ID NO: 177761 - DNA, 15 bp, Homo sapiens
cagatgaagaagggc

SEQ ID NO: 177762 - DNA, 15 bp, Homo sapiens
gcagatgaagaaggg

SEQ ID NO: 177763 - DNA, 15 bp, Homo sapiens
ggcagatgaagaagg

SEQ ID NO: 177764 - DNA, 15 bp, Homo sapiens
gggcagatgaagaag

SEQ ID NO: 177765 - DNA, 15 bp, Homo sapiens
agggcagatgaagaa

SEQ ID NO: 177766 - DNA, 15 bp, Homo sapiens
tagggcagatgaaga

SEQ ID NO: 177767 - DNA, 15 bp, Homo sapiens
ctagggcagatgaag

SEQ ID NO: 177768 - DNA, 15 bp, Homo sapiens
cctagggcagatgaa

SEQ ID NO: 177769 - DNA, 15 bp, Homo sapiens
gcctagggcagatga

SEQ ID NO: 177770 - DNA, 15 bp, Homo sapiens
agcctagggcagatg

SEQ ID NO: 177771 - DNA, 15 bp, Homo sapiens
cagcctagggcagat

SEQ ID NO: 177772 - DNA, 15 bp, Homo sapiens
acagcctagggcaga

SEQ ID NO: 177773 - DNA, 15 bp, Homo sapiens
cacagcctagggcag

SEQ ID NO: 177774 - DNA, 15 bp, Homo sapiens
acacagcctagggca

SEQ ID NO: 177775 - DNA, 15 bp, Homo sapiens
cacacagcctagggc

SEQ ID NO: 177776 - DNA, 15 bp, Homo sapiens
gcacacagcctaggg

SEQ ID NO: 177777 - DNA, 15 bp, Homo sapiens
agcacacagcctagg

SEQ ID NO: 177778 - DNA, 15 bp, Homo sapiens
cagcacacagcctag

SEQ ID NO: 177779 - DNA, 15 bp, Homo sapiens
acagcacacagccta

SEQ ID NO: 177780 - DNA, 15 bp, Homo sapiens
cacagcacacagcct

SEQ ID NO: 177781 - DNA, 15 bp, Homo sapiens
tcacagcacacagcc

SEQ ID NO: 177782 - DNA, 15 bp, Homo sapiens
ctcacagcacacagc

SEQ ID NO: 177783 - DNA, 15 bp, Homo sapiens
cctcacagcacacag

SEQ ID NO: 177784 - DNA, 15 bp, Homo sapiens
tcctcacagcacaca

SEQ ID NO: 177785 - DNA, 15 bp, Homo sapiens
gtcctcacagcacac

SEQ ID NO: 177786 - DNA, 15 bp, Homo sapiens
ggtcctcacagcaca

SEQ ID NO: 177787 - DNA, 15 bp, Homo sapiens
tggtcctcacagcac

SEQ ID NO: 177788 - DNA, 15 bp, Homo sapiens
gtggtcctcacagca

SEQ ID NO: 177789 - DNA, 15 bp, Homo sapiens
tgtggtcctcacagc

SEQ ID NO: 177790 - DNA, 15 bp, Homo sapiens
atgtggtcctcacag

SEQ ID NO: 177791 - DNA, 15 bp, Homo sapiens
tatgtggtcctcaca

SEQ ID NO: 177792 - DNA, 15 bp, Homo sapiens
gtatgtggtcctcac

SEQ ID NO: 177793 - DNA, 15 bp, Homo sapiens
tgtatgtggtcctca

SEQ ID NO: 177794 - DNA, 15 bp, Homo sapiens
gtgtatgtggtcctc

SEQ ID NO: 177795 - DNA, 15 bp, Homo sapiens
agtgtatgtggtcct

SEQ ID NO: 177796 - DNA, 15 bp, Homo sapiens
cagtgtatgtggtcc

SEQ ID NO: 177797 - DNA, 15 bp, Homo sapiens
gcagtgtatgtggtc

SEQ ID NO: 177798 - DNA, 15 bp, Homo sapiens
agcagtgtatgtggt

SEQ ID NO: 177799 - DNA, 15 bp, Homo sapiens
cagcagtgtatgtgg

SEQ ID NO: 177800 - DNA, 15 bp, Homo sapiens
acagcagtgtatgtg

SEQ ID NO: 177801 - DNA, 15 bp, Homo sapiens
gacagcagtgtatgt

SEQ ID NO: 177802 - DNA, 15 bp, Homo sapiens
ggacagcagtgtatg

SEQ ID NO: 177803 - DNA, 15 bp, Homo sapiens
gggacagcagtgtat

SEQ ID NO: 177804 - DNA, 15 bp, Homo sapiens
cgggacagcagtgta

SEQ ID NO: 177805 - DNA, 15 bp, Homo sapiens
gcgggacagcagtgt

SEQ ID NO: 177806 - DNA, 15 bp, Homo sapiens
cgcgggacagcagtg

SEQ ID NO: 177807 - DNA, 15 bp, Homo sapiens
ccgcgggacagcagt

SEQ ID NO: 177808 - DNA, 15 bp, Homo sapiens
cccgcgggacagcag

SEQ ID NO: 177809 - DNA, 15 bp, Homo sapiens
ccccgcgggacagca

SEQ ID NO: 177810 - DNA, 15 bp, Homo sapiens
accccgcgggacagc

SEQ ID NO: 177811 - DNA, 15 bp, Homo sapiens
aaccccgcgggacag

SEQ ID NO: 177812 - DNA, 15 bp, Homo sapiens
aaaccccgcgggaca

SEQ ID NO: 177813 - DNA, 15 bp, Homo sapiens
taaaccccgcgggac

SEQ ID NO: 177814 - DNA, 15 bp, Homo sapiens
gtaaaccccgcggga

SEQ ID NO: 177815 - DNA, 15 bp, Homo sapiens
cgtaaaccccgcggg

SEQ ID NO: 177816 - DNA, 15 bp, Homo sapiens
acgtaaaccccgcgg

SEQ ID NO: 177817 - DNA, 15 bp, Homo sapiens
cacgtaaaccccgcg

SEQ ID NO: 177818 - DNA, 15 bp, Homo sapiens
acacgtaaaccccgc

SEQ ID NO: 177819 - DNA, 15 bp, Homo sapiens
cacacgtaaaccccg

SEQ ID NO: 177820 - DNA, 15 bp, Homo sapiens
tcacacgtaaacccc

SEQ ID NO: 177821 - DNA, 15 bp, Homo sapiens
gtcacacgtaaaccc

SEQ ID NO: 177822 - DNA, 15 bp, Homo sapiens
tgtcacacgtaaacc

SEQ ID NO: 177823 - DNA, 15 bp, Homo sapiens
gtgtcacacgtaaac

SEQ ID NO: 177824 - DNA, 15 bp, Homo sapiens
cgtgtcacacgtaaa

SEQ ID NO: 177825 - DNA, 15 bp, Homo sapiens
gcgtgtcacacgtaa

SEQ ID NO: 177826 - DNA, 15 bp, Homo sapiens
tgcgtgtcacacgta

SEQ ID NO: 177827 - DNA, 15 bp, Homo sapiens
ctgcgtgtcacacgt

SEQ ID NO: 177828 - DNA, 15 bp, Homo sapiens
tctgcgtgtcacacg

SEQ ID NO: 177829 - DNA, 15 bp, Homo sapiens
ttctgcgtgtcacac

SEQ ID NO: 177830 - DNA, 15 bp, Homo sapiens
cttctgcgtgtcaca

SEQ ID NO: 177831 - DNA, 15 bp, Homo sapiens
ccttctgcgtgtcac

SEQ ID NO: 177832 - DNA, 15 bp, Homo sapiens
cccttctgcgtgtca

SEQ ID NO: 177833 - DNA, 15 bp, Homo sapiens
acccttctgcgtgtc

SEQ ID NO: 177834 - DNA, 15 bp, Homo sapiens
tacccttctgcgtgt

SEQ ID NO: 177835 - DNA, 15 bp, Homo sapiens
gtacccttctgcgtg

SEQ ID NO: 177836 - DNA, 15 bp, Homo sapiens
ggtacccttctgcgt

SEQ ID NO: 177837 - DNA, 15 bp, Homo sapiens
aggtacccttctgcg

SEQ ID NO: 177838 - DNA, 15 bp, Homo sapiens
caggtacccttctgc

SEQ ID NO: 177839 - DNA, 15 bp, Homo sapiens
acaggtacccttctg

SEQ ID NO: 177840 - DNA, 15 bp, Homo sapiens
cacaggtacccttct

SEQ ID NO: 177841 - DNA, 15 bp, Homo sapiens
tcacaggtacccttc

SEQ ID NO: 177842 - DNA, 15 bp, Homo sapiens
ttcacaggtaccctt

SEQ ID NO: 177843 - DNA, 15 bp, Homo sapiens
gttcacaggtaccct

SEQ ID NO: 177844 - DNA, 15 bp, Homo sapiens
tgttcacaggtaccc

SEQ ID NO: 177845 - DNA, 15 bp, Homo sapiens
ctgttcacaggtacc

SEQ ID NO: 177846 - DNA, 15 bp, Homo sapiens
cctgttcacaggtac

SEQ ID NO: 177847 - DNA, 15 bp, Homo sapiens
ccctgttcacaggta

SEQ ID NO: 177848 - DNA, 15 bp, Homo sapiens
cccctgttcacaggt

SEQ ID NO: 177849 - DNA, 15 bp, Homo sapiens
gcccctgttcacagg

SEQ ID NO: 177850 - DNA, 15 bp, Homo sapiens
ggcccctgttcacag

SEQ ID NO: 177851 - DNA, 15 bp, Homo sapiens
gggcccctgttcaca

SEQ ID NO: 177852 - DNA, 15 bp, Homo sapiens
ggggcccctgttcac

SEQ ID NO: 177853 - DNA, 15 bp, Homo sapiens
tggggcccctgttca

SEQ ID NO: 177854 - DNA, 15 bp, Homo sapiens
gtggggcccctgttc

SEQ ID NO: 177855 - DNA, 15 bp, Homo sapiens
ggtggggcccctgtt

SEQ ID NO: 177856 - DNA, 15 bp, Homo sapiens
tggtggggcccctgt

SEQ ID NO: 177857 - DNA, 15 bp, Homo sapiens
ctggtggggcccctg

SEQ ID NO: 177858 - DNA, 15 bp, Homo sapiens
cctggtggggcccct

SEQ ID NO: 177859 - DNA, 15 bp, Homo sapiens
acctggtggggcccc

SEQ ID NO: 177860 - DNA, 15 bp, Homo sapiens
cacctggtggggccc

SEQ ID NO: 177861 - DNA, 15 bp, Homo sapiens
gcacctggtggggcc

SEQ ID NO: 177862 - DNA, 15 bp, Homo sapiens
ggcacctggtggggc

SEQ ID NO: 177863 - DNA, 15 bp, Homo sapiens
gggcacctggtgggg

SEQ ID NO: 177864 - DNA, 15 bp, Homo sapiens
agggcacctggtggg

SEQ ID NO: 177865 - DNA, 15 bp, Homo sapiens
cagggcacctggtgg

SEQ ID NO: 177866 - DNA, 15 bp, Homo sapiens
ccagggcacctggtg

SEQ ID NO: 177867 - DNA, 15 bp, Homo sapiens
tccagggcacctggt

SEQ ID NO: 177868 - DNA, 15 bp, Homo sapiens
atccagggcacctgg

SEQ ID NO: 177869 - DNA, 15 bp, Homo sapiens
catccagggcacctg

SEQ ID NO: 177870 - DNA, 15 bp, Homo sapiens
ccatccagggcacct

SEQ ID NO: 177871 - DNA, 15 bp, Homo sapiens
tccatccagggcacc

SEQ ID NO: 177872 - DNA, 15 bp, Homo sapiens
ctccatccagggcac

SEQ ID NO: 177873 - DNA, 15 bp, Homo sapiens
tctccatccagggca

SEQ ID NO: 177874 - DNA, 15 bp, Homo sapiens
ttctccatccagggc

SEQ ID NO: 177875 - DNA, 15 bp, Homo sapiens
cttctccatccaggg

SEQ ID NO: 177876 - DNA, 15 bp, Homo sapiens
ccttctccatccagg

SEQ ID NO: 177877 - DNA, 15 bp, Homo sapiens
gccttctccatccag

SEQ ID NO: 177878 - DNA, 15 bp, Homo sapiens
ggccttctccatcca

SEQ ID NO: 177879 - DNA, 15 bp, Homo sapiens
gggccttctccatcc

SEQ ID NO: 177880 - DNA, 15 bp, Homo sapiens
ggggccttctccatc

SEQ ID NO: 177881 - DNA, 15 bp, Homo sapiens
tggggccttctccat

SEQ ID NO: 177882 - DNA, 15 bp, Homo sapiens
ctggggccttctcca

SEQ ID NO: 177883 - DNA, 15 bp, Homo sapiens
gctggggccttctcc

SEQ ID NO: 177884 - DNA, 15 bp, Homo sapiens
agctggggccttctc

SEQ ID NO: 177885 - DNA, 15 bp, Homo sapiens
gagctggggccttct

SEQ ID NO: 177886 - DNA, 15 bp, Homo sapiens
tgagctggggccttc

SEQ ID NO: 177887 - DNA, 15 bp, Homo sapiens
gtgagctggggcctt

SEQ ID NO: 177888 - DNA, 15 bp, Homo sapiens
ggtgagctggggcct

SEQ ID NO: 177889 - DNA, 15 bp, Homo sapiens
aggtgagctggggcc

SEQ ID NO: 177890 - DNA, 15 bp, Homo sapiens
gaggtgagctggggc

SEQ ID NO: 177891 - DNA, 15 bp, Homo sapiens
tgaggtgagctgggg

SEQ ID NO: 177892 - DNA, 15 bp, Homo sapiens
ctgaggtgagctggg

SEQ ID NO: 177893 - DNA, 15 bp, Homo sapiens
gctgaggtgagctgg

SEQ ID NO: 177894 - DNA, 15 bp, Homo sapiens
ggctgaggtgagctg

SEQ ID NO: 177895 - DNA, 15 bp, Homo sapiens
aggctgaggtgagct

SEQ ID NO: 177896 - DNA, 15 bp, Homo sapiens
caggctgaggtgagc

SEQ ID NO: 177897 - DNA, 15 bp, Homo sapiens
gcaggctgaggtgag

SEQ ID NO: 177898 - DNA, 15 bp, Homo sapiens
ggcaggctgaggtga

SEQ ID NO: 177899 - DNA, 15 bp, Homo sapiens
tggcaggctgaggtg

SEQ ID NO: 177900 - DNA, 15 bp, Homo sapiens
ctggcaggctgaggt

SEQ ID NO: 177901 - DNA, 15 bp, Homo sapiens
tctggcaggctgagg

SEQ ID NO: 177902 - DNA, 15 bp, Homo sapiens
gtctggcaggctgag

SEQ ID NO: 177903 - DNA, 15 bp, Homo sapiens
ggtctggcaggctga

SEQ ID NO: 177904 - DNA, 15 bp, Homo sapiens
gggtctggcaggctg

SEQ ID NO: 177905 - DNA, 15 bp, Homo sapiens
tgggtctggcaggct

SEQ ID NO: 177906 - DNA, 15 bp, Homo sapiens
gtgggtctggcaggc

SEQ ID NO: 177907 - DNA, 15 bp, Homo sapiens
tgtgggtctggcagg

SEQ ID NO: 177908 - DNA, 15 bp, Homo sapiens
ttgtgggtctggcag

SEQ ID NO: 177909 - DNA, 15 bp, Homo sapiens
cttgtgggtctggca

SEQ ID NO: 177910 - DNA, 15 bp, Homo sapiens
gcttgtgggtctggc

SEQ ID NO: 177911 - DNA, 15 bp, Homo sapiens
ggcttgtgggtctgg

SEQ ID NO: 177912 - DNA, 15 bp, Homo sapiens
aggcttgtgggtctg

SEQ ID NO: 177913 - DNA, 15 bp, Homo sapiens
aaggcttgtgggtct

SEQ ID NO: 177914 - DNA, 15 bp, Homo sapiens
caaggcttgtgggtc

SEQ ID NO: 177915 - DNA, 15 bp, Homo sapiens
tcaaggcttgtgggt

SEQ ID NO: 177916 - DNA, 15 bp, Homo sapiens
ttcaaggcttgtggg

SEQ ID NO: 177917 - DNA, 15 bp, Homo sapiens
cttcaaggcttgtgg

SEQ ID NO: 177918 - DNA, 15 bp, Homo sapiens
tcttcaaggcttgtg

SEQ ID NO: 177919 - DNA, 15 bp, Homo sapiens
ctcttcaaggcttgt

SEQ ID NO: 177920 - DNA, 15 bp, Homo sapiens
tctcttcaaggcttg

SEQ ID NO: 177921 - DNA, 15 bp, Homo sapiens
ctctcttcaaggctt

SEQ ID NO: 177922 - DNA, 15 bp, Homo sapiens
tctctcttcaaggct

SEQ ID NO: 177923 - DNA, 15 bp, Homo sapiens
atctctcttcaaggc

SEQ ID NO: 177924 - DNA, 15 bp, Homo sapiens
catctctcttcaagg

SEQ ID NO: 177925 - DNA, 15 bp, Homo sapiens
acatctctcttcaag

SEQ ID NO: 177926 - DNA, 15 bp, Homo sapiens
gacatctctcttcaa

SEQ ID NO: 177927 - DNA, 15 bp, Homo sapiens
ggacatctctcttca

SEQ ID NO: 177928 - DNA, 15 bp, Homo sapiens
gggacatctctcttc

SEQ ID NO: 177929 - DNA, 15 bp, Homo sapiens
ggggacatctctctt

SEQ ID NO: 177930 - DNA, 15 bp, Homo sapiens
aggggacatctctct

SEQ ID NO: 177931 - DNA, 15 bp, Homo sapiens
caggggacatctctc

SEQ ID NO: 177932 - DNA, 15 bp, Homo sapiens
acaggggacatctct

SEQ ID NO: 177933 - DNA, 15 bp, Homo sapiens
cacaggggacatctc

SEQ ID NO: 177934 - DNA, 15 bp, Homo sapiens
tcacaggggacatct

SEQ ID NO: 177935 - DNA, 15 bp, Homo sapiens
atcacaggggacatc

SEQ ID NO: 177936 - DNA, 15 bp, Homo sapiens
tatcacaggggacat

SEQ ID NO: 177937 - DNA, 15 bp, Homo sapiens
ttatcacaggggaca

SEQ ID NO: 177938 - DNA, 15 bp, Homo sapiens
attatcacaggggac

SEQ ID NO: 177939 - DNA, 15 bp, Homo sapiens
cattatcacagggga

SEQ ID NO: 177940 - DNA, 15 bp, Homo sapiens
acattatcacagggg

SEQ ID NO: 177941 - DNA, 15 bp, Homo sapiens
gacattatcacaggg

SEQ ID NO: 177942 - DNA, 15 bp, Homo sapiens
tgacattatcacagg

SEQ ID NO: 177943 - DNA, 15 bp, Homo sapiens
ctgacattatcacag

SEQ ID NO: 177944 - DNA, 15 bp, Homo sapiens
gctgacattatcaca

SEQ ID NO: 177945 - DNA, 15 bp, Homo sapiens
tgctgacattatcac

SEQ ID NO: 177946 - DNA, 15 bp, Homo sapiens
ctgctgacattatca

SEQ ID NO: 177947 - DNA, 15 bp, Homo sapiens
gctgctgacattatc

SEQ ID NO: 177948 - DNA, 15 bp, Homo sapiens
agctgctgacattat

SEQ ID NO: 177949 - DNA, 15 bp, Homo sapiens
cagctgctgacatta

SEQ ID NO: 177950 - DNA, 15 bp, Homo sapiens
acagctgctgacatt

SEQ ID NO: 177951 - DNA, 15 bp, Homo sapiens
gacagctgctgacat

SEQ ID NO: 177952 - DNA, 15 bp, Homo sapiens
ggacagctgctgaca

SEQ ID NO: 177953 - DNA, 15 bp, Homo sapiens
gggacagctgctgac

SEQ ID NO: 177954 - DNA, 15 bp, Homo sapiens
agggacagctgctga

SEQ ID NO: 177955 - DNA, 15 bp, Homo sapiens
gagggacagctgctg

SEQ ID NO: 177956 - DNA, 15 bp, Homo sapiens
ggagggacagctgct

SEQ ID NO: 177957 - DNA, 15 bp, Homo sapiens
aggagggacagctgc

SEQ ID NO: 177958 - DNA, 15 bp, Homo sapiens
gaggagggacagctg

SEQ ID NO: 177959 - DNA, 15 bp, Homo sapiens
ggaggagggacagct

SEQ ID NO: 177960 - DNA, 15 bp, Homo sapiens
cggaggagggacagc

SEQ ID NO: 177961 - DNA, 15 bp, Homo sapiens
tcggaggagggacag

SEQ ID NO: 177962 - DNA, 15 bp, Homo sapiens
atcggaggagggaca

SEQ ID NO: 177963 - DNA, 15 bp, Homo sapiens
tatcggaggagggac

SEQ ID NO: 177964 - DNA, 15 bp, Homo sapiens
gtatcggaggaggga

SEQ ID NO: 177965 - DNA, 15 bp, Homo sapiens
ggtatcggaggaggg

SEQ ID NO: 177966 - DNA, 15 bp, Homo sapiens
aggtatcggaggagg

SEQ ID NO: 177967 - DNA, 15 bp, Homo sapiens
caggtatcggaggag

SEQ ID NO: 177968 - DNA, 15 bp, Homo sapiens
gcaggtatcggagga

SEQ ID NO: 177969 - DNA, 15 bp, Homo sapiens
agcaggtatcggagg

SEQ ID NO: 177970 - DNA, 15 bp, Homo sapiens
cagcaggtatcggag

SEQ ID NO: 177971 - DNA, 15 bp, Homo sapiens
gcagcaggtatcgga

SEQ ID NO: 177972 - DNA, 15 bp, Homo sapiens
ggcagcaggtatcgg

SEQ ID NO: 177973 - DNA, 15 bp, Homo sapiens
tggcagcaggtatcg

SEQ ID NO: 177974 - DNA, 15 bp, Homo sapiens
ttggcagcaggtatc

SEQ ID NO: 177975 - DNA, 15 bp, Homo sapiens
gttggcagcaggtat

SEQ ID NO: 177976 - DNA, 15 bp, Homo sapiens
agttggcagcaggta

SEQ ID NO: 177977 - DNA, 15 bp, Homo sapiens
gagttggcagcaggt

SEQ ID NO: 177978 - DNA, 15 bp, Homo sapiens
tgagttggcagcagg

SEQ ID NO: 177979 - DNA, 15 bp, Homo sapiens
gtgagttggcagcag

SEQ ID NO: 177980 - DNA, 15 bp, Homo sapiens
cgtgagttggcagca

SEQ ID NO: 177981 - DNA, 15 bp, Homo sapiens
acgtgagttggcagc

SEQ ID NO: 177982 - DNA, 15 bp, Homo sapiens
gacgtgagttggcag

SEQ ID NO: 177983 - DNA, 15 bp, Homo sapiens
agacgtgagttggca

SEQ ID NO: 177984 - DNA, 15 bp, Homo sapiens
cagacgtgagttggc

SEQ ID NO: 177985 - DNA, 15 bp, Homo sapiens
ccagacgtgagttgg

SEQ ID NO: 177986 - DNA, 15 bp, Homo sapiens
cccagacgtgagttg

SEQ ID NO: 177987 - DNA, 15 bp, Homo sapiens
ccccagacgtgagtt

SEQ ID NO: 177988 - DNA, 15 bp, Homo sapiens
tccccagacgtgagt

SEQ ID NO: 177989 - DNA, 15 bp, Homo sapiens
ctccccagacgtgag

SEQ ID NO: 177990 - DNA, 15 bp, Homo sapiens
actccccagacgtga

SEQ ID NO: 177991 - DNA, 15 bp, Homo sapiens
cactccccagacgtg

SEQ ID NO: 177992 - DNA, 15 bp, Homo sapiens
ccactccccagacgt

SEQ ID NO: 177993 - DNA, 15 bp, Homo sapiens
cccactccccagacg

SEQ ID NO: 177994 - DNA, 15 bp, Homo sapiens
ccccactccccagac

SEQ ID NO: 177995 - DNA, 15 bp, Homo sapiens
gccccactccccaga

SEQ ID NO: 177996 - DNA, 15 bp, Homo sapiens
agccccactccccag

SEQ ID NO: 177997 - DNA, 15 bp, Homo sapiens
cagccccactcccca

SEQ ID NO: 177998 - DNA, 15 bp, Homo sapiens
gcagccccactcccc

SEQ ID NO: 177999 - DNA, 15 bp, Homo sapiens
agcagccccactccc

SEQ ID NO: 178000 - DNA, 15 bp, Homo sapiens
cagcagccccactcc

SEQ ID NO: 178001 - DNA, 15 bp, Homo sapiens
acagcagccccactc

SEQ ID NO: 178002 - DNA, 15 bp, Homo sapiens
gacagcagccccact

SEQ ID NO: 178003 - DNA, 15 bp, Homo sapiens
ggacagcagccccac

SEQ ID NO: 178004 - DNA, 15 bp, Homo sapiens
tggacagcagcccca

SEQ ID NO: 178005 - DNA, 15 bp, Homo sapiens
ttggacagcagcccc

SEQ ID NO: 178006 - DNA, 15 bp, Homo sapiens
attggacagcagccc

SEQ ID NO: 178007 - DNA, 15 bp, Homo sapiens
gattggacagcagcc

SEQ ID NO: 178008 - DNA, 15 bp, Homo sapiens
ggattggacagcagc

SEQ ID NO: 178009 - DNA, 15 bp, Homo sapiens
gggattggacagcag

SEQ ID NO: 178010 - DNA, 15 bp, Homo sapiens
tgggattggacagca

SEQ ID NO: 178011 - DNA, 15 bp, Homo sapiens
ctgggattggacagc

SEQ ID NO: 178012 - DNA, 15 bp, Homo sapiens
tctgggattggacag

SEQ ID NO: 178013 - DNA, 15 bp, Homo sapiens
ctctgggattggaca

SEQ ID NO: 178014 - DNA, 15 bp, Homo sapiens
cctctgggattggac

SEQ ID NO: 178015 - DNA, 15 bp, Homo sapiens
acctctgggattgga

SEQ ID NO: 178016 - DNA, 15 bp, Homo sapiens
tacctctgggattgg

SEQ ID NO: 178017 - DNA, 15 bp, Homo sapiens
atacctctgggattg

SEQ ID NO: 178018 - DNA, 15 bp, Homo sapiens
tatacctctgggatt

SEQ ID NO: 178019 - DNA, 15 bp, Homo sapiens
atatacctctgggat

SEQ ID NO: 178020 - DNA, 15 bp, Homo sapiens
catatacctctggga

SEQ ID NO: 178021 - DNA, 15 bp, Homo sapiens
ccatatacctctggg

SEQ ID NO: 178022 - DNA, 15 bp, Homo sapiens
cccatatacctctgg

SEQ ID NO: 178023 - DNA, 15 bp, Homo sapiens
tcccatatacctctg

SEQ ID NO: 178024 - DNA, 15 bp, Homo sapiens
ctcccatatacctct

SEQ ID NO: 178025 - DNA, 15 bp, Homo sapiens
cctcccatatacctc

SEQ ID NO: 178026 - DNA, 15 bp, Homo sapiens
ccctcccatatacct

SEQ ID NO: 178027 - DNA, 15 bp, Homo sapiens
cccctcccatatacc

SEQ ID NO: 178028 - DNA, 15 bp, Homo sapiens
tcccctcccatatac

SEQ ID NO: 178029 - DNA, 15 bp, Homo sapiens
gtcccctcccatata

SEQ ID NO: 178030 - DNA, 15 bp, Homo sapiens
tgtcccctcccatat

SEQ ID NO: 178031 - DNA, 15 bp, Homo sapiens
ctgtcccctcccata

SEQ ID NO: 178032 - DNA, 15 bp, Homo sapiens
gctgtcccctcccat

SEQ ID NO: 178033 - DNA, 15 bp, Homo sapiens
tgctgtcccctccca

SEQ ID NO: 178034 - DNA, 15 bp, Homo sapiens
atgctgtcccctccc

SEQ ID NO: 178035 - DNA, 15 bp, Homo sapiens
gatgctgtcccctcc

SEQ ID NO: 178036 - DNA, 15 bp, Homo sapiens
agatgctgtcccctc

SEQ ID NO: 178037 - DNA, 15 bp, Homo sapiens
aagatgctgtcccct

SEQ ID NO: 178038 - DNA, 15 bp, Homo sapiens
caagatgctgtcccc

SEQ ID NO: 178039 - DNA, 15 bp, Homo sapiens
ccaagatgctgtccc

SEQ ID NO: 178040 - DNA, 15 bp, Homo sapiens
gccaagatgctgtcc

SEQ ID NO: 178041 - DNA, 15 bp, Homo sapiens
ggccaagatgctgtc

SEQ ID NO: 178042 - DNA, 15 bp, Homo sapiens
aggccaagatgctgt

SEQ ID NO: 178043 - DNA, 15 bp, Homo sapiens
caggccaagatgctg

SEQ ID NO: 178044 - DNA, 15 bp, Homo sapiens
ccaggccaagatgct

SEQ ID NO: 178045 - DNA, 15 bp, Homo sapiens
cccaggccaagatgc

SEQ ID NO: 178046 - DNA, 15 bp, Homo sapiens
gcccaggccaagatg

SEQ ID NO: 178047 - DNA, 15 bp, Homo sapiens
tgcccaggccaagat

SEQ ID NO: 178048 - DNA, 15 bp, Homo sapiens
ctgcccaggccaaga

SEQ ID NO: 178049 - DNA, 15 bp, Homo sapiens
cctgcccaggccaag

SEQ ID NO: 178050 - DNA, 15 bp, Homo sapiens
acctgcccaggccaa

SEQ ID NO: 178051 - DNA, 15 bp, Homo sapiens
cacctgcccaggcca

SEQ ID NO: 178052 - DNA, 15 bp, Homo sapiens
ccacctgcccaggcc

SEQ ID NO: 178053 - DNA, 15 bp, Homo sapiens
cccacctgcccaggc

SEQ ID NO: 178054 - DNA, 15 bp, Homo sapiens
acccacctgcccagg

SEQ ID NO: 178055 - DNA, 15 bp, Homo sapiens
cacccacctgcccag

SEQ ID NO: 178056 - DNA, 15 bp, Homo sapiens
ccacccacctgccca

SEQ ID NO: 178057 - DNA, 15 bp, Homo sapiens
gccacccacctgccc

SEQ ID NO: 178058 - DNA, 15 bp, Homo sapiens
ggccacccacctgcc

SEQ ID NO: 178059 - DNA, 15 bp, Homo sapiens
tggccacccacctgc

SEQ ID NO: 178060 - DNA, 15 bp, Homo sapiens
ttggccacccacctg

SEQ ID NO: 178061 - DNA, 15 bp, Homo sapiens
cttggccacccacct

SEQ ID NO: 178062 - DNA, 15 bp, Homo sapiens
gcttggccacccacc

SEQ ID NO: 178063 - DNA, 15 bp, Homo sapiens
agcttggccacccac

SEQ ID NO: 178064 - DNA, 15 bp, Homo sapiens
gagcttggccaccca

SEQ ID NO: 178065 - DNA, 15 bp, Homo sapiens
ggagcttggccaccc

SEQ ID NO: 178066 - DNA, 15 bp, Homo sapiens
aggagcttggccacc

SEQ ID NO: 178067 - DNA, 15 bp, Homo sapiens
taggagcttggccac

SEQ ID NO: 178068 - DNA, 15 bp, Homo sapiens
ataggagcttggcca

SEQ ID NO: 178069 - DNA, 15 bp, Homo sapiens
aataggagcttggcc

SEQ ID NO: 178070 - DNA, 15 bp, Homo sapiens
caataggagcttggc

SEQ ID NO: 178071 - DNA, 15 bp, Homo sapiens
gcaataggagcttgg

SEQ ID NO: 178072 - DNA, 15 bp, Homo sapiens
agcaataggagcttg

SEQ ID NO: 178073 - DNA, 15 bp, Homo sapiens
aagcaataggagctt

SEQ ID NO: 178074 - DNA, 15 bp, Homo sapiens
aaagcaataggagct

SEQ ID NO: 178075 - DNA, 15 bp, Homo sapiens
gaaagcaataggagc

SEQ ID NO: 178076 - DNA, 15 bp, Homo sapiens
agaaagcaataggag

SEQ ID NO: 178077 - DNA, 15 bp, Homo sapiens
cagaaagcaatagga

SEQ ID NO: 178078 - DNA, 15 bp, Homo sapiens
gcagaaagcaatagg

SEQ ID NO: 178079 - DNA, 15 bp, Homo sapiens
ggcagaaagcaatag

SEQ ID NO: 178080 - DNA, 15 bp, Homo sapiens
gggcagaaagcaata

SEQ ID NO: 178081 - DNA, 15 bp, Homo sapiens
agggcagaaagcaat

SEQ ID NO: 178082 - DNA, 15 bp, Homo sapiens
gagggcagaaagcaa

SEQ ID NO: 178083 - DNA, 15 bp, Homo sapiens
ggagggcagaaagca

SEQ ID NO: 178084 - DNA, 15 bp, Homo sapiens
cggagggcagaaagc

SEQ ID NO: 178085 - DNA, 15 bp, Homo sapiens
gcggagggcagaaag

SEQ ID NO: 178086 - DNA, 15 bp, Homo sapiens
tgcggagggcagaaa

SEQ ID NO: 178087 - DNA, 15 bp, Homo sapiens
atgcggagggcagaa

SEQ ID NO: 178088 - DNA, 15 bp, Homo sapiens
tatgcggagggcaga

SEQ ID NO: 178089 - DNA, 15 bp, Homo sapiens
ctatgcggagggcag

SEQ ID NO: 178090 - DNA, 15 bp, Homo sapiens
gctatgcggagggca

SEQ ID NO: 178091 - DNA, 15 bp, Homo sapiens
ggctatgcggagggc

SEQ ID NO: 178092 - DNA, 15 bp, Homo sapiens
gggctatgcggaggg

SEQ ID NO: 178093 - DNA, 15 bp, Homo sapiens
tgggctatgcggagg

SEQ ID NO: 178094 - DNA, 15 bp, Homo sapiens
atgggctatgcggag

SEQ ID NO: 178095 - DNA, 15 bp, Homo sapiens
tatgggctatgcgga

SEQ ID NO: 178096 - DNA, 15 bp, Homo sapiens
ctatgggctatgcgg

SEQ ID NO: 178097 - DNA, 15 bp, Homo sapiens
cctatgggctatgcg

SEQ ID NO: 178098 - DNA, 15 bp, Homo sapiens
acctatgggctatgc

SEQ ID NO: 178099 - DNA, 15 bp, Homo sapiens
cacctatgggctatg

SEQ ID NO: 178100 - DNA, 15 bp, Homo sapiens
tcacctatgggctat

SEQ ID NO: 178101 - DNA, 15 bp, Homo sapiens
atcacctatgggcta

SEQ ID NO: 178102 - DNA, 15 bp, Homo sapiens
tatcacctatgggct

SEQ ID NO: 178103 - DNA, 15 bp, Homo sapiens
gtatcacctatgggc

SEQ ID NO: 178104 - DNA, 15 bp, Homo sapiens
ggtatcacctatggg

SEQ ID NO: 178105 - DNA, 15 bp, Homo sapiens
gggtatcacctatgg

SEQ ID NO: 178106 - DNA, 15 bp, Homo sapiens
tgggtatcacctatg

SEQ ID NO: 178107 - DNA, 15 bp, Homo sapiens
ctgggtatcacctat

SEQ ID NO: 178108 - DNA, 15 bp, Homo sapiens
gctgggtatcaccta

SEQ ID NO: 178109 - DNA, 15 bp, Homo sapiens
agctgggtatcacct

SEQ ID NO: 178110 - DNA, 15 bp, Homo sapiens
gagctgggtatcacc

SEQ ID NO: 178111 - DNA, 15 bp, Homo sapiens
agagctgggtatcac

SEQ ID NO: 178112 - DNA, 15 bp, Homo sapiens
cagagctgggtatca

SEQ ID NO: 178113 - DNA, 15 bp, Homo sapiens
tcagagctgggtatc

SEQ ID NO: 178114 - DNA, 15 bp, Homo sapiens
gtcagagctgggtat

SEQ ID NO: 178115 - DNA, 15 bp, Homo sapiens
tgtcagagctgggta

SEQ ID NO: 178116 - DNA, 15 bp, Homo sapiens
ctgtcagagctgggt

SEQ ID NO: 178117 - DNA, 15 bp, Homo sapiens
tctgtcagagctggg

SEQ ID NO: 178118 - DNA, 15 bp, Homo sapiens
atctgtcagagctgg

SEQ ID NO: 178119 - DNA, 15 bp, Homo sapiens
aatctgtcagagctg

SEQ ID NO: 178120 - DNA, 15 bp, Homo sapiens
gaatctgtcagagct

SEQ ID NO: 178121 - DNA, 15 bp, Homo sapiens
cgaatctgtcagagc

SEQ ID NO: 178122 - DNA, 15 bp, Homo sapiens
acgaatctgtcagag

SEQ ID NO: 178123 - DNA, 15 bp, Homo sapiens
gacgaatctgtcaga

SEQ ID NO: 178124 - DNA, 15 bp, Homo sapiens
ggacgaatctgtcag

SEQ ID NO: 178125 - DNA, 15 bp, Homo sapiens
gggacgaatctgtca

SEQ ID NO: 178126 - DNA, 15 bp, Homo sapiens
ggggacgaatctgtc

SEQ ID NO: 178127 - DNA, 15 bp, Homo sapiens
tggggacgaatctgt

SEQ ID NO: 178128 - DNA, 15 bp, Homo sapiens
ctggggacgaatctg

SEQ ID NO: 178129 - DNA, 15 bp, Homo sapiens
gctggggacgaatct

SEQ ID NO: 178130 - DNA, 15 bp, Homo sapiens
agctggggacgaatc

SEQ ID NO: 178131 - DNA, 15 bp, Homo sapiens
cagctggggacgaat

SEQ ID NO: 178132 - DNA, 15 bp, Homo sapiens
ccagctggggacgaa

SEQ ID NO: 178133 - DNA, 15 bp, Homo sapiens
tccagctggggacga

SEQ ID NO: 178134 - DNA, 15 bp, Homo sapiens
ctccagctggggacg

SEQ ID NO: 178135 - DNA, 15 bp, Homo sapiens
cctccagctggggac

SEQ ID NO: 178136 - DNA, 15 bp, Homo sapiens
acctccagctgggga

SEQ ID NO: 178137 - DNA, 15 bp, Homo sapiens
cacctccagctgggg

SEQ ID NO: 178138 - DNA, 15 bp, Homo sapiens
gcacctccagctggg

SEQ ID NO: 178139 - DNA, 15 bp, Homo sapiens
agcacctccagctgg

SEQ ID NO: 178140 - DNA, 15 bp, Homo sapiens
cagcacctccagctg

SEQ ID NO: 178141 - DNA, 15 bp, Homo sapiens
acagcacctccagct

SEQ ID NO: 178142 - DNA, 15 bp, Homo sapiens
tacagcacctccagc

SEQ ID NO: 178143 - DNA, 15 bp, Homo sapiens
ttacagcacctccag

SEQ ID NO: 178144 - DNA, 15 bp, Homo sapiens
cttacagcacctcca

SEQ ID NO: 178145 - DNA, 15 bp, Homo sapiens
gcttacagcacctcc

SEQ ID NO: 178146 - DNA, 15 bp, Homo sapiens
tgcttacagcacctc

SEQ ID NO: 178147 - DNA, 15 bp, Homo sapiens
ctgcttacagcacct

SEQ ID NO: 178148 - DNA, 15 bp, Homo sapiens
cctgcttacagcacc

SEQ ID NO: 178149 - DNA, 15 bp, Homo sapiens
tcctgcttacagcac

SEQ ID NO: 178150 - DNA, 15 bp, Homo sapiens
ctcctgcttacagca

SEQ ID NO: 178151 - DNA, 15 bp, Homo sapiens
tctcctgcttacagc

SEQ ID NO: 178152 - DNA, 15 bp, Homo sapiens
ctctcctgcttacag

SEQ ID NO: 178153 - DNA, 15 bp, Homo sapiens
cctctcctgcttaca

SEQ ID NO: 178154 - DNA, 15 bp, Homo sapiens
gcctctcctgcttac

SEQ ID NO: 178155 - DNA, 15 bp, Homo sapiens
cgcctctcctgctta

SEQ ID NO: 178156 - DNA, 15 bp, Homo sapiens
ccgcctctcctgctt

SEQ ID NO: 178157 - DNA, 15 bp, Homo sapiens
cccgcctctcctgct

SEQ ID NO: 178158 - DNA, 15 bp, Homo sapiens
gcccgcctctcctgc

SEQ ID NO: 178159 - DNA, 15 bp, Homo sapiens
agcccgcctctcctg

SEQ ID NO: 178160 - DNA, 15 bp, Homo sapiens
cagcccgcctctcct

SEQ ID NO: 178161 - DNA, 15 bp, Homo sapiens
ccagcccgcctctcc

SEQ ID NO: 178162 - DNA, 15 bp, Homo sapiens
tccagcccgcctctc

SEQ ID NO: 178163 - DNA, 15 bp, Homo sapiens
ctccagcccgcctct

SEQ ID NO: 178164 - DNA, 15 bp, Homo sapiens
actccagcccgcctc

SEQ ID NO: 178165 - DNA, 15 bp, Homo sapiens
tactccagcccgcct

SEQ ID NO: 178166 - DNA, 15 bp, Homo sapiens
ctactccagcccgcc

SEQ ID NO: 178167 - DNA, 15 bp, Homo sapiens
cctactccagcccgc

SEQ ID NO: 178168 - DNA, 15 bp, Homo sapiens
acctactccagcccg

SEQ ID NO: 178169 - DNA, 15 bp, Homo sapiens
tacctactccagccc

SEQ ID NO: 178170 - DNA, 15 bp, Homo sapiens
ctacctactccagcc

SEQ ID NO: 178171 - DNA, 15 bp, Homo sapiens
cctacctactccagc

SEQ ID NO: 178172 - DNA, 15 bp, Homo sapiens
ccctacctactccag

SEQ ID NO: 178173 - DNA, 15 bp, Homo sapiens
cccctacctactcca

SEQ ID NO: 178174 - DNA, 15 bp, Homo sapiens
gcccctacctactcc

SEQ ID NO: 178175 - DNA, 15 bp, Homo sapiens
agcccctacctactc

SEQ ID NO: 178176 - DNA, 15 bp, Homo sapiens
gagcccctacctact

SEQ ID NO: 178177 - DNA, 15 bp, Homo sapiens
cgagcccctacctac

SEQ ID NO: 178178 - DNA, 15 bp, Homo sapiens
ccgagcccctaccta

SEQ ID NO: 178179 - DNA, 15 bp, Homo sapiens
gccgagcccctacct

SEQ ID NO: 178180 - DNA, 15 bp, Homo sapiens
tgccgagcccctacc

SEQ ID NO: 178181 - DNA, 15 bp, Homo sapiens
gtgccgagcccctac

SEQ ID NO: 178182 - DNA, 15 bp, Homo sapiens
agtgccgagccccta

SEQ ID NO: 178183 - DNA, 15 bp, Homo sapiens
cagtgccgagcccct

SEQ ID NO: 178184 - DNA, 15 bp, Homo sapiens
gcagtgccgagcccc

SEQ ID NO: 178185 - DNA, 15 bp, Homo sapiens
cgcagtgccgagccc

SEQ ID NO: 178186 - DNA, 15 bp, Homo sapiens
gcgcagtgccgagcc

SEQ ID NO: 178187 - DNA, 15 bp, Homo sapiens
ggcgcagtgccgagc

SEQ ID NO: 178188 - DNA, 15 bp, Homo sapiens
gggcgcagtgccgag

SEQ ID NO: 178189 - DNA, 15 bp, Homo sapiens
ggggcgcagtgccga

SEQ ID NO: 178190 - DNA, 15 bp, Homo sapiens
tggggcgcagtgccg

SEQ ID NO: 178191 - DNA, 15 bp, Homo sapiens
gtggggcgcagtgcc

SEQ ID NO: 178192 - DNA, 15 bp, Homo sapiens
tgtggggcgcagtgc

SEQ ID NO: 178193 - DNA, 15 bp, Homo sapiens
atgtggggcgcagtg

SEQ ID NO: 178194 - DNA, 15 bp, Homo sapiens
tatgtggggcgcagt

SEQ ID NO: 178195 - DNA, 15 bp, Homo sapiens
ctatgtggggcgcag

SEQ ID NO: 178196 - DNA, 15 bp, Homo sapiens
actatgtggggcgca

SEQ ID NO: 178197 - DNA, 15 bp, Homo sapiens
cactatgtggggcgc

SEQ ID NO: 178198 - DNA, 15 bp, Homo sapiens
ccactatgtggggcg

SEQ ID NO: 178199 - DNA, 15 bp, Homo sapiens
gccactatgtggggc

SEQ ID NO: 178200 - DNA, 15 bp, Homo sapiens
agccactatgtgggg

SEQ ID NO: 178201 - DNA, 15 bp, Homo sapiens
tagccactatgtggg

SEQ ID NO: 178202 - DNA, 15 bp, Homo sapiens
gtagccactatgtgg

SEQ ID NO: 178203 - DNA, 15 bp, Homo sapiens
ggtagccactatgtg

SEQ ID NO: 178204 - DNA, 15 bp, Homo sapiens
aggtagccactatgt

SEQ ID NO: 178205 - DNA, 15 bp, Homo sapiens
taggtagccactatg

SEQ ID NO: 178206 - DNA, 15 bp, Homo sapiens
gtaggtagccactat

SEQ ID NO: 178207 - DNA, 15 bp, Homo sapiens
tgtaggtagccacta

SEQ ID NO: 178208 - DNA, 15 bp, Homo sapiens
ttgtaggtagccact

SEQ ID NO: 178209 - DNA, 15 bp, Homo sapiens
gttgtaggtagccac

SEQ ID NO: 178210 - DNA, 15 bp, Homo sapiens
cgttgtaggtagcca

SEQ ID NO: 178211 - DNA, 15 bp, Homo sapiens
gcgttgtaggtagcc

SEQ ID NO: 178212 - DNA, 15 bp, Homo sapiens
ggcgttgtaggtagc

SEQ ID NO: 178213 - DNA, 15 bp, Homo sapiens
gggcgttgtaggtag

SEQ ID NO: 178214 - DNA, 15 bp, Homo sapiens
agggcgttgtaggta

SEQ ID NO: 178215 - DNA, 15 bp, Homo sapiens
aagggcgttgtaggt

SEQ ID NO: 178216 - DNA, 15 bp, Homo sapiens
aaagggcgttgtagg

SEQ ID NO: 178217 - DNA, 15 bp, Homo sapiens
gaaagggcgttgtag

SEQ ID NO: 178218 - DNA, 15 bp, Homo sapiens
ggaaagggcgttgta

SEQ ID NO: 178219 - DNA, 15 bp, Homo sapiens
aggaaagggcgttgt

SEQ ID NO: 178220 - DNA, 15 bp, Homo sapiens
caggaaagggcgttg

SEQ ID NO: 178221 - DNA, 15 bp, Homo sapiens
gcaggaaagggcgtt

SEQ ID NO: 178222 - DNA, 15 bp, Homo sapiens
ggcaggaaagggcgt

SEQ ID NO: 178223 - DNA, 15 bp, Homo sapiens
gggcaggaaagggcg

SEQ ID NO: 178224 - DNA, 15 bp, Homo sapiens
tgggcaggaaagggc

SEQ ID NO: 178225 - DNA, 15 bp, Homo sapiens
gtgggcaggaaaggg

SEQ ID NO: 178226 - DNA, 15 bp, Homo sapiens
ggtgggcaggaaagg

SEQ ID NO: 178227 - DNA, 15 bp, Homo sapiens
gggtgggcaggaaag

SEQ ID NO: 178228 - DNA, 15 bp, Homo sapiens
ggggtgggcaggaaa

SEQ ID NO: 178229 - DNA, 15 bp, Homo sapiens
gggggtgggcaggaa

SEQ ID NO: 178230 - DNA, 15 bp, Homo sapiens
ggggggtgggcagga

SEQ ID NO: 178231 - DNA, 15 bp, Homo sapiens
tggggggtgggcagg

SEQ ID NO: 178232 - DNA, 15 bp, Homo sapiens
ctggggggtgggcag

SEQ ID NO: 178233 - DNA, 15 bp, Homo sapiens
cctggggggtgggca

SEQ ID NO: 178234 - DNA, 15 bp, Homo sapiens
gcctggggggtgggc

SEQ ID NO: 178235 - DNA, 15 bp, Homo sapiens
agcctggggggtggg

SEQ ID NO: 178236 - DNA, 15 bp, Homo sapiens
cagcctggggggtgg

SEQ ID NO: 178237 - DNA, 15 bp, Homo sapiens
acagcctggggggtg

SEQ ID NO: 178238 - DNA, 15 bp, Homo sapiens
gacagcctggggggt

SEQ ID NO: 178239 - DNA, 15 bp, Homo sapiens
agacagcctgggggg

SEQ ID NO: 178240 - DNA, 15 bp, Homo sapiens
cagacagcctggggg

SEQ ID NO: 178241 - DNA, 15 bp, Homo sapiens
gcagacagcctgggg

SEQ ID NO: 178242 - DNA, 15 bp, Homo sapiens
agcagacagcctggg

SEQ ID NO: 178243 - DNA, 15 bp, Homo sapiens
cagcagacagcctgg

SEQ ID NO: 178244 - DNA, 15 bp, Homo sapiens
gcagcagacagcctg

SEQ ID NO: 178245 - DNA, 15 bp, Homo sapiens
agcagcagacagcct

SEQ ID NO: 178246 - DNA, 15 bp, Homo sapiens
gagcagcagacagcc

SEQ ID NO: 178247 - DNA, 15 bp, Homo sapiens
cgagcagcagacagc

SEQ ID NO: 178248 - DNA, 15 bp, Homo sapiens
ccgagcagcagacag

SEQ ID NO: 178249 - DNA, 15 bp, Homo sapiens
tccgagcagcagaca

SEQ ID NO: 178250 - DNA, 15 bp, Homo sapiens
gtccgagcagcagac

SEQ ID NO: 178251 - DNA, 15 bp, Homo sapiens
ggtccgagcagcaga

SEQ ID NO: 178252 - DNA, 15 bp, Homo sapiens
tggtccgagcagcag

SEQ ID NO: 178253 - DNA, 15 bp, Homo sapiens
gtggtccgagcagca

SEQ ID NO: 178254 - DNA, 15 bp, Homo sapiens
ggtggtccgagcagc

SEQ ID NO: 178255 - DNA, 15 bp, Homo sapiens
tggtggtccgagcag

SEQ ID NO: 178256 - DNA, 15 bp, Homo sapiens
ctggtggtccgagca

SEQ ID NO: 178257 - DNA, 15 bp, Homo sapiens
gctggtggtccgagc

SEQ ID NO: 178258 - DNA, 15 bp, Homo sapiens
tgctggtggtccgag

SEQ ID NO: 178259 - DNA, 15 bp, Homo sapiens
gtgctggtggtccga

SEQ ID NO: 178260 - DNA, 15 bp, Homo sapiens
agtgctggtggtccg

SEQ ID NO: 178261 - DNA, 15 bp, Homo sapiens
cagtgctggtggtcc

SEQ ID NO: 178262 - DNA, 15 bp, Homo sapiens
gcagtgctggtggtc

SEQ ID NO: 178263 - DNA, 15 bp, Homo sapiens
agcagtgctggtggt

SEQ ID NO: 178264 - DNA, 15 bp, Homo sapiens
cagcagtgctggtgg

SEQ ID NO: 178265 - DNA, 15 bp, Homo sapiens
gcagcagtgctggtg

SEQ ID NO: 178266 - DNA, 15 bp, Homo sapiens
ggcagcagtgctggt

SEQ ID NO: 178267 - DNA, 15 bp, Homo sapiens
gggcagcagtgctgg

SEQ ID NO: 178268 - DNA, 15 bp, Homo sapiens
ggggcagcagtgctg

SEQ ID NO: 178269 - DNA, 15 bp, Homo sapiens
gggggcagcagtgct

SEQ ID NO: 178270 - DNA, 15 bp, Homo sapiens
ctgggggcagcagtg

SEQ ID NO: 178271 - DNA, 15 bp, Homo sapiens
cctgggggcagcagt

SEQ ID NO: 178272 - DNA, 15 bp, Homo sapiens
ccctgggggcagcag

SEQ ID NO: 178273 - DNA, 15 bp, Homo sapiens
gccctgggggcagca

SEQ ID NO: 178274 - DNA, 15 bp, Homo sapiens
agccctgggggcagc

SEQ ID NO: 178275 - DNA, 15 bp, Homo sapiens
tagccctgggggcag

SEQ ID NO: 178276 - DNA, 15 bp, Homo sapiens
gtagccctgggggca

SEQ ID NO: 178277 - DNA, 15 bp, Homo sapiens
tgtagccctgggggc

SEQ ID NO: 178278 - DNA, 15 bp, Homo sapiens
gtgtagccctggggg

SEQ ID NO: 178279 - DNA, 15 bp, Homo sapiens
cgtgtagccctgggg

SEQ ID NO: 178280 - DNA, 15 bp, Homo sapiens
acgtgtagccctggg

SEQ ID NO: 178281 - DNA, 15 bp, Homo sapiens
cacgtgtagccctgg

SEQ ID NO: 178282 - DNA, 15 bp, Homo sapiens
acacgtgtagccctg

SEQ ID NO: 178283 - DNA, 15 bp, Homo sapiens
cacacgtgtagccct

SEQ ID NO: 178284 - DNA, 15 bp, Homo sapiens
acacacgtgtagccc

SEQ ID NO: 178285 - DNA, 15 bp, Homo sapiens
tacacacgtgtagcc

SEQ ID NO: 178286 - DNA, 15 bp, Homo sapiens
ctacacacgtgtagc

SEQ ID NO: 178287 - DNA, 15 bp, Homo sapiens
gctacacacgtgtag

SEQ ID NO: 178288 - DNA, 15 bp, Homo sapiens
agctacacacgtgta

SEQ ID NO: 178289 - DNA, 15 bp, Homo sapiens
cagctacacacgtgt

SEQ ID NO: 178290 - DNA, 15 bp, Homo sapiens
tcagctacacacgtg

SEQ ID NO: 178291 - DNA, 15 bp, Homo sapiens
ctcagctacacacgt

SEQ ID NO: 178292 - DNA, 15 bp, Homo sapiens
cctcagctacacacg

SEQ ID NO: 178293 - DNA, 15 bp, Homo sapiens
ccctcagctacacac

SEQ ID NO: 178294 - DNA, 15 bp, Homo sapiens
cccctcagctacaca

SEQ ID NO: 178295 - DNA, 15 bp, Homo sapiens
gcccctcagctacac

SEQ ID NO: 178296 - DNA, 15 bp, Homo sapiens
tgcccctcagctaca

SEQ ID NO: 178297 - DNA, 15 bp, Homo sapiens
ctgcccctcagctac

SEQ ID NO: 178298 - DNA, 15 bp, Homo sapiens
actgcccctcagcta

SEQ ID NO: 178299 - DNA, 15 bp, Homo sapiens
cactgcccctcagct

SEQ ID NO: 178300 - DNA, 15 bp, Homo sapiens
acactgcccctcagc

SEQ ID NO: 178301 - DNA, 15 bp, Homo sapiens
gacactgcccctcag

SEQ ID NO: 178302 - DNA, 15 bp, Homo sapiens
tgacactgcccctca

SEQ ID NO: 178303 - DNA, 15 bp, Homo sapiens
ctgacactgcccctc

SEQ ID NO: 178304 - DNA, 15 bp, Homo sapiens
gctgacactgcccct

SEQ ID NO: 178305 - DNA, 15 bp, Homo sapiens
cgctgacactgcccc

SEQ ID NO: 178306 - DNA, 15 bp, Homo sapiens
tcgctgacactgccc

SEQ ID NO: 178307 - DNA, 15 bp, Homo sapiens
ctcgctgacactgcc

SEQ ID NO: 178308 - DNA, 15 bp, Homo sapiens
cctcgctgacactgc

SEQ ID NO: 178309 - DNA, 15 bp, Homo sapiens
tcctcgctgacactg

SEQ ID NO: 178310 - DNA, 15 bp, Homo sapiens
ttcctcgctgacact

SEQ ID NO: 178311 - DNA, 15 bp, Homo sapiens
cttcctcgctgacac

SEQ ID NO: 178312 - DNA, 15 bp, Homo sapiens
gcttcctcgctgaca

SEQ ID NO: 178313 - DNA, 15 bp, Homo sapiens
cgcttcctcgctgac

SEQ ID NO: 178314 - DNA, 15 bp, Homo sapiens
tcgcttcctcgctga

SEQ ID NO: 178315 - DNA, 15 bp, Homo sapiens
ctcgcttcctcgctg

SEQ ID NO: 178316 - DNA, 15 bp, Homo sapiens
tctcgcttcctcgct

SEQ ID NO: 178317 - DNA, 15 bp, Homo sapiens
atctcgcttcctcgc

SEQ ID NO: 178318 - DNA, 15 bp, Homo sapiens
gatctcgcttcctcg

SEQ ID NO: 178319 - DNA, 15 bp, Homo sapiens
cgatctcgcttcctc

SEQ ID NO: 178320 - DNA, 15 bp, Homo sapiens
acgatctcgcttcct

SEQ ID NO: 178321 - DNA, 15 bp, Homo sapiens
cacgatctcgcttcc

SEQ ID NO: 178322 - DNA, 15 bp, Homo sapiens
ccacgatctcgcttc

SEQ ID NO: 178323 - DNA, 15 bp, Homo sapiens
gccacgatctcgctt

SEQ ID NO: 178324 - DNA, 15 bp, Homo sapiens
agccacgatctcgct

SEQ ID NO: 178325 - DNA, 15 bp, Homo sapiens
cagccacgatctcgc

SEQ ID NO: 178326 - DNA, 15 bp, Homo sapiens
ccagccacgatctcg

SEQ ID NO: 178327 - DNA, 15 bp, Homo sapiens
tccagccacgatctc

SEQ ID NO: 178328 - DNA, 15 bp, Homo sapiens
gtccagccacgatct

SEQ ID NO: 178329 - DNA, 15 bp, Homo sapiens
agtccagccacgatc

SEQ ID NO: 178330 - DNA, 15 bp, Homo sapiens
cagtccagccacgat

SEQ ID NO: 178331 - DNA, 15 bp, Homo sapiens
ccagtccagccacga

SEQ ID NO: 178332 - DNA, 15 bp, Homo sapiens
tccagtccagccacg

SEQ ID NO: 178333 - DNA, 15 bp, Homo sapiens
ctccagtccagccac

SEQ ID NO: 178334 - DNA, 15 bp, Homo sapiens
tctccagtccagcca

SEQ ID NO: 178335 - DNA, 15 bp, Homo sapiens
ttctccagtccagcc

SEQ ID NO: 178336 - DNA, 15 bp, Homo sapiens
cttctccagtccagc

SEQ ID NO: 178337 - DNA, 15 bp, Homo sapiens
tcttctccagtccag

SEQ ID NO: 178338 - DNA, 15 bp, Homo sapiens
atcttctccagtcca

SEQ ID NO: 178339 - DNA, 15 bp, Homo sapiens
catcttctccagtcc

SEQ ID NO: 178340 - DNA, 15 bp, Homo sapiens
gcatcttctccagtc

SEQ ID NO: 178341 - DNA, 15 bp, Homo sapiens
ggcatcttctccagt

SEQ ID NO: 178342 - DNA, 15 bp, Homo sapiens
aggcatcttctccag

SEQ ID NO: 178343 - DNA, 15 bp, Homo sapiens
caggcatcttctcca

SEQ ID NO: 178344 - DNA, 15 bp, Homo sapiens
gcaggcatcttctcc

SEQ ID NO: 178345 - DNA, 15 bp, Homo sapiens
ggcaggcatcttctc

SEQ ID NO: 178346 - DNA, 15 bp, Homo sapiens
gggcaggcatcttct

SEQ ID NO: 178347 - DNA, 15 bp, Homo sapiens
cgggcaggcatcttc

SEQ ID NO: 178348 - DNA, 15 bp, Homo sapiens
gcgggcaggcatctt

SEQ ID NO: 178349 - DNA, 15 bp, Homo sapiens
ggcgggcaggcatct

SEQ ID NO: 178350 - DNA, 15 bp, Homo sapiens
cggcgggcaggcatc

SEQ ID NO: 178351 - DNA, 15 bp, Homo sapiens
ccggcgggcaggcat

SEQ ID NO: 178352 - DNA, 15 bp, Homo sapiens
cccggcgggcaggca

SEQ ID NO: 178353 - DNA, 15 bp, Homo sapiens
gcccggcgggcaggc

SEQ ID NO: 178354 - DNA, 15 bp, Homo sapiens
agcccggcgggcagg

SEQ ID NO: 178355 - DNA, 15 bp, Homo sapiens
aagcccggcgggcag

SEQ ID NO: 178356 - DNA, 15 bp, Homo sapiens
gaagcccggcgggca

SEQ ID NO: 178357 - DNA, 15 bp, Homo sapiens
ggaagcccggcgggc

SEQ ID NO: 178358 - DNA, 15 bp, Homo sapiens
aggaagcccggcggg

SEQ ID NO: 178359 - DNA, 15 bp, Homo sapiens
aaggaagcccggcgg

SEQ ID NO: 178360 - DNA, 15 bp, Homo sapiens
taaggaagcccggcg

SEQ ID NO: 178361 - DNA, 15 bp, Homo sapiens
ataaggaagcccggc

SEQ ID NO: 178362 - DNA, 15 bp, Homo sapiens
gataaggaagcccgg

SEQ ID NO: 178363 - DNA, 15 bp, Homo sapiens
ggataaggaagcccg

SEQ ID NO: 178364 - DNA, 15 bp, Homo sapiens
gggataaggaagccc

SEQ ID NO: 178365 - DNA, 15 bp, Homo sapiens
tgggataaggaagcc

SEQ ID NO: 178366 - DNA, 15 bp, Homo sapiens
gtgggataaggaagc

SEQ ID NO: 178367 - DNA, 15 bp, Homo sapiens
ggtgggataaggaag

SEQ ID NO: 178368 - DNA, 15 bp, Homo sapiens
gggtgggataaggaa

SEQ ID NO: 178369 - DNA, 15 bp, Homo sapiens
ggggtgggataagga

SEQ ID NO: 178370 - DNA, 15 bp, Homo sapiens
tggggtgggataagg

SEQ ID NO: 178371 - DNA, 15 bp, Homo sapiens
ctggggtgggataag

SEQ ID NO: 178372 - DNA, 15 bp, Homo sapiens
tctggggtgggataa

SEQ ID NO: 178373 - DNA, 15 bp, Homo sapiens
ctctggggtgggata

SEQ ID NO: 178374 - DNA, 15 bp, Homo sapiens
tctctggggtgggat

SEQ ID NO: 178375 - DNA, 15 bp, Homo sapiens
gtctctggggtggga

SEQ ID NO: 178376 - DNA, 15 bp, Homo sapiens
tgtctctggggtggg

SEQ ID NO: 178377 - DNA, 15 bp, Homo sapiens
atgtctctggggtgg

SEQ ID NO: 178378 - DNA, 15 bp, Homo sapiens
gatgtctctggggtg

SEQ ID NO: 178379 - DNA, 15 bp, Homo sapiens
cgatgtctctggggt

SEQ ID NO: 178380 - DNA, 15 bp, Homo sapiens
ccgatgtctctgggg

SEQ ID NO: 178381 - DNA, 15 bp, Homo sapiens
gccgatgtctctggg

SEQ ID NO: 178382 - DNA, 15 bp, Homo sapiens
agccgatgtctctgg

SEQ ID NO: 178383 - DNA, 15 bp, Homo sapiens
cagccgatgtctctg

SEQ ID NO: 178384 - DNA, 15 bp, Homo sapiens
acagccgatgtctct

SEQ ID NO: 178385 - DNA, 15 bp, Homo sapiens
cacagccgatgtctc

SEQ ID NO: 178386 - DNA, 15 bp, Homo sapiens
tcacagccgatgtct

SEQ ID NO: 178387 - DNA, 15 bp, Homo sapiens
gtcacagccgatgtc

SEQ ID NO: 178388 - DNA, 15 bp, Homo sapiens
ggtcacagccgatgt

SEQ ID NO: 178389 - DNA, 15 bp, Homo sapiens
tggtcacagccgatg

SEQ ID NO: 178390 - DNA, 15 bp, Homo sapiens
ctggtcacagccgat

SEQ ID NO: 178391 - DNA, 15 bp, Homo sapiens
gctggtcacagccga

SEQ ID NO: 178392 - DNA, 15 bp, Homo sapiens
tgctggtcacagccg

SEQ ID NO: 178393 - DNA, 15 bp, Homo sapiens
gtgctggtcacagcc

SEQ ID NO: 178394 - DNA, 15 bp, Homo sapiens
tgtgctggtcacagc

SEQ ID NO: 178395 - DNA, 15 bp, Homo sapiens
gtgtgctggtcacag

SEQ ID NO: 178396 - DNA, 15 bp, Homo sapiens
ggtgtgctggtcaca

SEQ ID NO: 178397 - DNA, 15 bp, Homo sapiens
tggtgtgctggtcac

SEQ ID NO: 178398 - DNA, 15 bp, Homo sapiens
ctggtgtgctggtca

SEQ ID NO: 178399 - DNA, 15 bp, Homo sapiens
gctggtgtgctggtc

SEQ ID NO: 178400 - DNA, 15 bp, Homo sapiens
agctggtgtgctggt

SEQ ID NO: 178401 - DNA, 15 bp, Homo sapiens
cagctggtgtgctgg

SEQ ID NO: 178402 - DNA, 15 bp, Homo sapiens
gcagctggtgtgctg

SEQ ID NO: 178403 - DNA, 15 bp, Homo sapiens
ggcagctggtgtgct

SEQ ID NO: 178404 - DNA, 15 bp, Homo sapiens
gggcagctggtgtgc

SEQ ID NO: 178405 - DNA, 15 bp, Homo sapiens
cgggcagctggtgtg

SEQ ID NO: 178406 - DNA, 15 bp, Homo sapiens
ccgggcagctggtgt

SEQ ID NO: 178407 - DNA, 15 bp, Homo sapiens
accgggcagctggtg

SEQ ID NO: 178408 - DNA, 15 bp, Homo sapiens
caccgggcagctggt

SEQ ID NO: 178409 - DNA, 15 bp, Homo sapiens
ccaccgggcagctgg

SEQ ID NO: 178410 - DNA, 15 bp, Homo sapiens
cccaccgggcagctg

SEQ ID NO: 178411 - DNA, 15 bp, Homo sapiens
ccccaccgggcagct

SEQ ID NO: 178412 - DNA, 15 bp, Homo sapiens
gccccaccgggcagc

SEQ ID NO: 178413 - DNA, 15 bp, Homo sapiens
tgccccaccgggcag

SEQ ID NO: 178414 - DNA, 15 bp, Homo sapiens
ctgccccaccgggca

SEQ ID NO: 178415 - DNA, 15 bp, Homo sapiens
tctgccccaccgggc

SEQ ID NO: 178416 - DNA, 15 bp, Homo sapiens
gtctgccccaccggg

SEQ ID NO: 178417 - DNA, 15 bp, Homo sapiens
ggtctgccccaccgg

SEQ ID NO: 178418 - DNA, 15 bp, Homo sapiens
aggtctgccccaccg

SEQ ID NO: 178419 - DNA, 15 bp, Homo sapiens
caggtctgccccacc

SEQ ID NO: 178420 - DNA, 15 bp, Homo sapiens
gcaggtctgccccac

SEQ ID NO: 178421 - DNA, 15 bp, Homo sapiens
agcaggtctgcccca

SEQ ID NO: 178422 - DNA, 15 bp, Homo sapiens
cagcaggtctgcccc

SEQ ID NO: 178423 - DNA, 15 bp, Homo sapiens
gcagcaggtctgccc

SEQ ID NO: 178424 - DNA, 15 bp, Homo sapiens
ggcagcaggtctgcc

SEQ ID NO: 178425 - DNA, 15 bp, Homo sapiens
gggcagcaggtctgc

SEQ ID NO: 178426 - DNA, 15 bp, Homo sapiens
cgggcagcaggtctg

SEQ ID NO: 178427 - DNA, 15 bp, Homo sapiens
tcgggcagcaggtct

SEQ ID NO: 178428 - DNA, 15 bp, Homo sapiens
ctcgggcagcaggtc

SEQ ID NO: 178429 - DNA, 15 bp, Homo sapiens
gctcgggcagcaggt

SEQ ID NO: 178430 - DNA, 15 bp, Homo sapiens
ggctcgggcagcagg

SEQ ID NO: 178431 - DNA, 15 bp, Homo sapiens
aggctcgggcagcag

SEQ ID NO: 178432 - DNA, 15 bp, Homo sapiens
caggctcgggcagca

SEQ ID NO: 178433 - DNA, 15 bp, Homo sapiens
ccaggctcgggcagc

SEQ ID NO: 178434 - DNA, 15 bp, Homo sapiens
cccaggctcgggcag

SEQ ID NO: 178435 - DNA, 15 bp, Homo sapiens
acccaggctcgggca

SEQ ID NO: 178436 - DNA, 15 bp, Homo sapiens
cacccaggctcgggc

SEQ ID NO: 178437 - DNA, 15 bp, Homo sapiens
ccacccaggctcggg

SEQ ID NO: 178438 - DNA, 15 bp, Homo sapiens
cccacccaggctcgg

SEQ ID NO: 178439 - DNA, 15 bp, Homo sapiens
tcccacccaggctcg

SEQ ID NO: 178440 - DNA, 15 bp, Homo sapiens
ctcccacccaggctc

SEQ ID NO: 178441 - DNA, 15 bp, Homo sapiens
gctcccacccaggct

SEQ ID NO: 178442 - DNA, 15 bp, Homo sapiens
agctcccacccaggc

SEQ ID NO: 178443 - DNA, 15 bp, Homo sapiens
cagctcccacccagg

SEQ ID NO: 178444 - DNA, 15 bp, Homo sapiens
ccagctcccacccag

SEQ ID NO: 178445 - DNA, 15 bp, Homo sapiens
cccagctcccaccca

SEQ ID NO: 178446 - DNA, 15 bp, Homo sapiens
gcccagctcccaccc

SEQ ID NO: 178447 - DNA, 15 bp, Homo sapiens
ggcccagctcccacc

SEQ ID NO: 178448 - DNA, 15 bp, Homo sapiens
aggcccagctcccac

SEQ ID NO: 178449 - DNA, 15 bp, Homo sapiens
caggcccagctccca

SEQ ID NO: 178450 - DNA, 15 bp, Homo sapiens
gcaggcccagctccc

SEQ ID NO: 178451 - DNA, 15 bp, Homo sapiens
agcaggcccagctcc

SEQ ID NO: 178452 - DNA, 15 bp, Homo sapiens
cagcaggcccagctc

SEQ ID NO: 178453 - DNA, 15 bp, Homo sapiens
gcagcaggcccagct

SEQ ID NO: 178454 - DNA, 15 bp, Homo sapiens
ggcagcaggcccagc

SEQ ID NO: 178455 - DNA, 15 bp, Homo sapiens
tggcagcaggcccag

SEQ ID NO: 178456 - DNA, 15 bp, Homo sapiens
ctggcagcaggccca

SEQ ID NO: 178457 - DNA, 15 bp, Homo sapiens
actggcagcaggccc

SEQ ID NO: 178458 - DNA, 15 bp, Homo sapiens
aactggcagcaggcc

SEQ ID NO: 178459 - DNA, 15 bp, Homo sapiens
caactggcagcaggc

SEQ ID NO: 178460 - DNA, 15 bp, Homo sapiens
gcaactggcagcagg

SEQ ID NO: 178461 - DNA, 15 bp, Homo sapiens
ggcaactggcagcag

SEQ ID NO: 178462 - DNA, 15 bp, Homo sapiens
gggcaactggcagca

SEQ ID NO: 178463 - DNA, 15 bp, Homo sapiens
ggggcaactggcagc

SEQ ID NO: 178464 - DNA, 15 bp, Homo sapiens
tggggcaactggcag

SEQ ID NO: 178465 - DNA, 15 bp, Homo sapiens
atggggcaactggca

SEQ ID NO: 178466 - DNA, 15 bp, Homo sapiens
catggggcaactggc

SEQ ID NO: 178467 - DNA, 15 bp, Homo sapiens
acatggggcaactgg

SEQ ID NO: 178468 - DNA, 15 bp, Homo sapiens
cacatggggcaactg

SEQ ID NO: 178469 - DNA, 15 bp, Homo sapiens
tcacatggggcaact

SEQ ID NO: 178470 - DNA, 15 bp, Homo sapiens
ctcacatggggcaac

SEQ ID NO: 178471 - DNA, 15 bp, Homo sapiens
actcacatggggcaa

SEQ ID NO: 178472 - DNA, 15 bp, Homo sapiens
cactcacatggggca

SEQ ID NO: 178473 - DNA, 15 bp, Homo sapiens
gcactcacatggggc

SEQ ID NO: 178474 - DNA, 15 bp, Homo sapiens
ggcactcacatgggg

SEQ ID NO: 178475 - DNA, 15 bp, Homo sapiens
aggcactcacatggg

SEQ ID NO: 178476 - DNA, 15 bp, Homo sapiens
gaggcactcacatgg

SEQ ID NO: 178477 - DNA, 15 bp, Homo sapiens
ggaggcactcacatg

SEQ ID NO: 178478 - DNA, 15 bp, Homo sapiens
gggaggcactcacat

SEQ ID NO: 178479 - DNA, 15 bp, Homo sapiens
agggaggcactcaca

SEQ ID NO: 178480 - DNA, 15 bp, Homo sapiens
cagggaggcactcac

SEQ ID NO: 178481 - DNA, 15 bp, Homo sapiens
gcagggaggcactca

SEQ ID NO: 178482 - DNA, 15 bp, Homo sapiens
ggcagggaggcactc

SEQ ID NO: 178483 - DNA, 15 bp, Homo sapiens
aggcagggaggcact

SEQ ID NO: 178484 - DNA, 15 bp, Homo sapiens
caggcagggaggcac

SEQ ID NO: 178485 - DNA, 15 bp, Homo sapiens
gcaggcagggaggca

SEQ ID NO: 178486 - DNA, 15 bp, Homo sapiens
ggcaggcagggaggc

SEQ ID NO: 178487 - DNA, 15 bp, Homo sapiens
gggcaggcagggagg

SEQ ID NO: 178488 - DNA, 15 bp, Homo sapiens
ggggcaggcagggag

SEQ ID NO: 178489 - DNA, 15 bp, Homo sapiens
aggggcaggcaggga

SEQ ID NO: 178490 - DNA, 15 bp, Homo sapiens
caggggcaggcaggg

SEQ ID NO: 178491 - DNA, 15 bp, Homo sapiens
ccaggggcaggcagg

SEQ ID NO: 178492 - DNA, 15 bp, Homo sapiens
tccaggggcaggcag

SEQ ID NO: 178493 - DNA, 15 bp, Homo sapiens
atccaggggcaggca

SEQ ID NO: 178494 - DNA, 15 bp, Homo sapiens
tatccaggggcaggc

SEQ ID NO: 178495 - DNA, 15 bp, Homo sapiens
ctatccaggggcagg

SEQ ID NO: 178496 - DNA, 15 bp, Homo sapiens
cctatccaggggcag

SEQ ID NO: 178497 - DNA, 15 bp, Homo sapiens
ccctatccaggggca

SEQ ID NO: 178498 - DNA, 15 bp, Homo sapiens
cccctatccaggggc

SEQ ID NO: 178499 - DNA, 15 bp, Homo sapiens
tcccctatccagggg

SEQ ID NO: 178500 - DNA, 15 bp, Homo sapiens
ctcccctatccaggg

SEQ ID NO: 178501 - DNA, 15 bp, Homo sapiens
gctcccctatccagg

SEQ ID NO: 178502 - DNA, 15 bp, Homo sapiens
agctcccctatccag

SEQ ID NO: 178503 - DNA, 15 bp, Homo sapiens
tagctcccctatcca

SEQ ID NO: 178504 - DNA, 15 bp, Homo sapiens
ttagctcccctatcc

SEQ ID NO: 178505 - DNA, 15 bp, Homo sapiens
cttagctcccctatc

SEQ ID NO: 178506 - DNA, 15 bp, Homo sapiens
gcttagctcccctat

SEQ ID NO: 178507 - DNA, 15 bp, Homo sapiens
ggcttagctccccta

SEQ ID NO: 178508 - DNA, 15 bp, Homo sapiens
gggcttagctcccct

SEQ ID NO: 178509 - DNA, 15 bp, Homo sapiens
tgggcttagctcccc

SEQ ID NO: 178510 - DNA, 15 bp, Homo sapiens
ctgggcttagctccc

SEQ ID NO: 178511 - DNA, 15 bp, Homo sapiens
actgggcttagctcc

SEQ ID NO: 178512 - DNA, 15 bp, Homo sapiens
cactgggcttagctc

SEQ ID NO: 178513 - DNA, 15 bp, Homo sapiens
tcactgggcttagct

SEQ ID NO: 178514 - DNA, 15 bp, Homo sapiens
ctcactgggcttagc

SEQ ID NO: 178515 - DNA, 15 bp, Homo sapiens
cctcactgggcttag

SEQ ID NO: 178516 - DNA, 15 bp, Homo sapiens
ccctcactgggctta

SEQ ID NO: 178517 - DNA, 15 bp, Homo sapiens
cccctcactgggctt

SEQ ID NO: 178518 - DNA, 15 bp, Homo sapiens
tcccctcactgggct

SEQ ID NO: 178519 - DNA, 15 bp, Homo sapiens
gtcccctcactgggc

SEQ ID NO: 178520 - DNA, 15 bp, Homo sapiens
tgtcccctcactggg

SEQ ID NO: 178521 - DNA, 15 bp, Homo sapiens
ctgtcccctcactgg

SEQ ID NO: 178522 - DNA, 15 bp, Homo sapiens
cctgtcccctcactg

SEQ ID NO: 178523 - DNA, 15 bp, Homo sapiens
tcctgtcccctcact

SEQ ID NO: 178524 - DNA, 15 bp, Homo sapiens
ttcctgtcccctcac

SEQ ID NO: 178525 - DNA, 15 bp, Homo sapiens
gttcctgtcccctca

SEQ ID NO: 178526 - DNA, 15 bp, Homo sapiens
tgttcctgtcccctc

SEQ ID NO: 178527 - DNA, 15 bp, Homo sapiens
atgttcctgtcccct

SEQ ID NO: 178528 - DNA, 15 bp, Homo sapiens
tatgttcctgtcccc

SEQ ID NO: 178529 - DNA, 15 bp, Homo sapiens
ttatgttcctgtccc

SEQ ID NO: 178530 - DNA, 15 bp, Homo sapiens
attatgttcctgtcc

SEQ ID NO: 178531 - DNA, 15 bp, Homo sapiens
cattatgttcctgtc

SEQ ID NO: 178532 - DNA, 15 bp, Homo sapiens
gcattatgttcctgt

SEQ ID NO: 178533 - DNA, 15 bp, Homo sapiens
ggcattatgttcctg

SEQ ID NO: 178534 - DNA, 15 bp, Homo sapiens
tggcattatgttcct

SEQ ID NO: 178535 - DNA, 15 bp, Homo sapiens
atggcattatgttcc

SEQ ID NO: 178536 - DNA, 15 bp, Homo sapiens
aatggcattatgttc

SEQ ID NO: 178537 - DNA, 15 bp, Homo sapiens
gaatggcattatgtt

SEQ ID NO: 178538 - DNA, 15 bp, Homo sapiens
agaatggcattatgt

SEQ ID NO: 178539 - DNA, 15 bp, Homo sapiens
cagaatggcattatg

SEQ ID NO: 178540 - DNA, 15 bp, Homo sapiens
acagaatggcattat

SEQ ID NO: 178541 - DNA, 15 bp, Homo sapiens
cacagaatggcatta

SEQ ID NO: 178542 - DNA, 15 bp, Homo sapiens
gcacagaatggcatt

SEQ ID NO: 178543 - DNA, 15 bp, Homo sapiens
agcacagaatggcat

SEQ ID NO: 178544 - DNA, 15 bp, Homo sapiens
gagcacagaatggca

SEQ ID NO: 178545 - DNA, 15 bp, Homo sapiens
ggagcacagaatggc

SEQ ID NO: 178546 - DNA, 15 bp, Homo sapiens
gggagcacagaatgg

SEQ ID NO: 178547 - DNA, 15 bp, Homo sapiens
agggagcacagaatg

SEQ ID NO: 178548 - DNA, 15 bp, Homo sapiens
aagggagcacagaat

SEQ ID NO: 178549 - DNA, 15 bp, Homo sapiens
gaagggagcacagaa

SEQ ID NO: 178550 - DNA, 15 bp, Homo sapiens
ggaagggagcacaga

SEQ ID NO: 178551 - DNA, 15 bp, Homo sapiens
gggaagggagcacag

SEQ ID NO: 178552 - DNA, 15 bp, Homo sapiens
ggggaagggagcaca

SEQ ID NO: 178553 - DNA, 15 bp, Homo sapiens
cggggaagggagcac

SEQ ID NO: 178554 - DNA, 15 bp, Homo sapiens
gcggggaagggagca

SEQ ID NO: 178555 - DNA, 15 bp, Homo sapiens
ggcggggaagggagc

SEQ ID NO: 178556 - DNA, 15 bp, Homo sapiens
tggcggggaagggag

SEQ ID NO: 178557 - DNA, 15 bp, Homo sapiens
ctggcggggaaggga

SEQ ID NO: 178558 - DNA, 15 bp, Homo sapiens
cctggcggggaaggg

SEQ ID NO: 178559 - DNA, 15 bp, Homo sapiens
gcctggcggggaagg

SEQ ID NO: 178560 - DNA, 15 bp, Homo sapiens
agcctggcggggaag

SEQ ID NO: 178561 - DNA, 15 bp, Homo sapiens
cagcctggcggggaa

SEQ ID NO: 178562 - DNA, 15 bp, Homo sapiens
acagcctggcgggga

SEQ ID NO: 178563 - DNA, 15 bp, Homo sapiens
cacagcctggcgggg

SEQ ID NO: 178564 - DNA, 15 bp, Homo sapiens
acacagcctggcggg

SEQ ID NO: 178565 - DNA, 15 bp, Homo sapiens
cacacagcctggcgg

SEQ ID NO: 178566 - DNA, 15 bp, Homo sapiens
gcacacagcctggcg

SEQ ID NO: 178567 - DNA, 15 bp, Homo sapiens
agcacacagcctggc

SEQ ID NO: 178568 - DNA, 15 bp, Homo sapiens
cagcacacagcctgg

SEQ ID NO: 178569 - DNA, 15 bp, Homo sapiens
gcagcacacagcctg

SEQ ID NO: 178570 - DNA, 15 bp, Homo sapiens
cgcagcacacagcct

SEQ ID NO: 178571 - DNA, 15 bp, Homo sapiens
tcgcagcacacagcc

SEQ ID NO: 178572 - DNA, 15 bp, Homo sapiens
ctcgcagcacacagc

SEQ ID NO: 178573 - DNA, 15 bp, Homo sapiens
cctcgcagcacacag

SEQ ID NO: 178574 - DNA, 15 bp, Homo sapiens
tcctcgcagcacaca

SEQ ID NO: 178575 - DNA, 15 bp, Homo sapiens
atcctcgcagcacac

SEQ ID NO: 178576 - DNA, 15 bp, Homo sapiens
gatcctcgcagcaca

SEQ ID NO: 178577 - DNA, 15 bp, Homo sapiens
cgatcctcgcagcac

SEQ ID NO: 178578 - DNA, 15 bp, Homo sapiens
gcgatcctcgcagca

SEQ ID NO: 178579 - DNA, 15 bp, Homo sapiens
ggcgatcctcgcagc

SEQ ID NO: 178580 - DNA, 15 bp, Homo sapiens
tggcgatcctcgcag

SEQ ID NO: 178581 - DNA, 15 bp, Homo sapiens
ctggcgatcctcgca

SEQ ID NO: 178582 - DNA, 15 bp, Homo sapiens
gctggcgatcctcgc

SEQ ID NO: 178583 - DNA, 15 bp, Homo sapiens
tgctggcgatcctcg

SEQ ID NO: 178584 - DNA, 15 bp, Homo sapiens
gtgctggcgatcctc

SEQ ID NO: 178585 - DNA, 15 bp, Homo sapiens
agtgctggcgatcct

SEQ ID NO: 178586 - DNA, 15 bp, Homo sapiens
cagtgctggcgatcc

SEQ ID NO: 178587 - DNA, 15 bp, Homo sapiens
gcagtgctggcgatc

SEQ ID NO: 178588 - DNA, 15 bp, Homo sapiens
agcagtgctggcgat

SEQ ID NO: 178589 - DNA, 15 bp, Homo sapiens
cagcagtgctggcga

SEQ ID NO: 178590 - DNA, 15 bp, Homo sapiens
gcagcagtgctggcg

SEQ ID NO: 178591 - DNA, 15 bp, Homo sapiens
ggcagcagtgctggc

SEQ ID NO: 178592 - DNA, 15 bp, Homo sapiens
cgggcagcagtgctg

SEQ ID NO: 178593 - DNA, 15 bp, Homo sapiens
ccgggcagcagtgct

SEQ ID NO: 178594 - DNA, 15 bp, Homo sapiens
gccgggcagcagtgc

SEQ ID NO: 178595 - DNA, 15 bp, Homo sapiens
agccgggcagcagtg

SEQ ID NO: 178596 - DNA, 15 bp, Homo sapiens
cagccgggcagcagt

SEQ ID NO: 178597 - DNA, 15 bp, Homo sapiens
ccagccgggcagcag

SEQ ID NO: 178598 - DNA, 15 bp, Homo sapiens
gccagccgggcagca

SEQ ID NO: 178599 - DNA, 15 bp, Homo sapiens
agccagccgggcagc

SEQ ID NO: 178600 - DNA, 15 bp, Homo sapiens
tagccagccgggcag

SEQ ID NO: 178601 - DNA, 15 bp, Homo sapiens
gtagccagccgggca

SEQ ID NO: 178602 - DNA, 15 bp, Homo sapiens
tgtagccagccgggc

SEQ ID NO: 178603 - DNA, 15 bp, Homo sapiens
gtgtagccagccggg

SEQ ID NO: 178604 - DNA, 15 bp, Homo sapiens
ggtgtagccagccgg

SEQ ID NO: 178605 - DNA, 15 bp, Homo sapiens
aggtgtagccagccg

SEQ ID NO: 178606 - DNA, 15 bp, Homo sapiens
caggtgtagccagcc

SEQ ID NO: 178607 - DNA, 15 bp, Homo sapiens
gcaggtgtagccagc

SEQ ID NO: 178608 - DNA, 15 bp, Homo sapiens
tgcaggtgtagccag

SEQ ID NO: 178609 - DNA, 15 bp, Homo sapiens
ttgcaggtgtagcca

SEQ ID NO: 178610 - DNA, 15 bp, Homo sapiens
gttgcaggtgtagcc

SEQ ID NO: 178611 - DNA, 15 bp, Homo sapiens
cgttgcaggtgtagc

SEQ ID NO: 178612 - DNA, 15 bp, Homo sapiens
acgttgcaggtgtag

SEQ ID NO: 178613 - DNA, 15 bp, Homo sapiens
cacgttgcaggtgta

SEQ ID NO: 178614 - DNA, 15 bp, Homo sapiens
tcacgttgcaggtgt

SEQ ID NO: 178615 - DNA, 15 bp, Homo sapiens
ttcacgttgcaggtg

SEQ ID NO: 178616 - DNA, 15 bp, Homo sapiens
cttcacgttgcaggt

SEQ ID NO: 178617 - DNA, 15 bp, Homo sapiens
ccttcacgttgcagg

SEQ ID NO: 178618 - DNA, 15 bp, Homo sapiens
gccttcacgttgcag

SEQ ID NO: 178619 - DNA, 15 bp, Homo sapiens
agccttcacgttgca

SEQ ID NO: 178620 - DNA, 15 bp, Homo sapiens
gagccttcacgttgc

SEQ ID NO: 178621 - DNA, 15 bp, Homo sapiens
cgagccttcacgttg

SEQ ID NO: 178622 - DNA, 15 bp, Homo sapiens
tcgagccttcacgtt

SEQ ID NO: 178623 - DNA, 15 bp, Homo sapiens
atcgagccttcacgt

SEQ ID NO: 178624 - DNA, 15 bp, Homo sapiens
gatcgagccttcacg

SEQ ID NO: 178625 - DNA, 15 bp, Homo sapiens
ggatcgagccttcac

SEQ ID NO: 178626 - DNA, 15 bp, Homo sapiens
aggatcgagccttca

SEQ ID NO: 178627 - DNA, 15 bp, Homo sapiens
caggatcgagccttc

SEQ ID NO: 178628 - DNA, 15 bp, Homo sapiens
gcaggatcgagcctt

SEQ ID NO: 178629 - DNA, 15 bp, Homo sapiens
cgcaggatcgagcct

SEQ ID NO: 178630 - DNA, 15 bp, Homo sapiens
tcgcaggatcgagcc

SEQ ID NO: 178631 - DNA, 15 bp, Homo sapiens
ctcgcaggatcgagc

SEQ ID NO: 178632 - DNA, 15 bp, Homo sapiens
tctcgcaggatcgag

SEQ ID NO: 178633 - DNA, 15 bp, Homo sapiens
ttctcgcaggatcga

SEQ ID NO: 178634 - DNA, 15 bp, Homo sapiens
cttctcgcaggatcg

SEQ ID NO: 178635 - DNA, 15 bp, Homo sapiens
ccttctcgcaggatc

SEQ ID NO: 178636 - DNA, 15 bp, Homo sapiens
tccttctcgcaggat

SEQ ID NO: 178637 - DNA, 15 bp, Homo sapiens
ttccttctcgcagga

SEQ ID NO: 178638 - DNA, 15 bp, Homo sapiens
cttccttctcgcagg

SEQ ID NO: 178639 - DNA, 15 bp, Homo sapiens
acttccttctcgcag

SEQ ID NO: 178640 - DNA, 15 bp, Homo sapiens
cacttccttctcgca

SEQ ID NO: 178641 - DNA, 15 bp, Homo sapiens
ccacttccttctcgc

SEQ ID NO: 178642 - DNA, 15 bp, Homo sapiens
accacttccttctcg

SEQ ID NO: 178643 - DNA, 15 bp, Homo sapiens
gaccacttccttctc

SEQ ID NO: 178644 - DNA, 15 bp, Homo sapiens
agaccacttccttct

SEQ ID NO: 178645 - DNA, 15 bp, Homo sapiens
gagaccacttccttc

SEQ ID NO: 178646 - DNA, 15 bp, Homo sapiens
agagaccacttcctt

SEQ ID NO: 178647 - DNA, 15 bp, Homo sapiens
cagagaccacttcct

SEQ ID NO: 178648 - DNA, 15 bp, Homo sapiens
gcagagaccacttcc

SEQ ID NO: 178649 - DNA, 15 bp, Homo sapiens
ggcagagaccacttc

SEQ ID NO: 178650 - DNA, 15 bp, Homo sapiens
gggcagagaccactt

SEQ ID NO: 178651 - DNA, 15 bp, Homo sapiens
tgggcagagaccact

SEQ ID NO: 178652 - DNA, 15 bp, Homo sapiens
ctgggcagagaccac

SEQ ID NO: 178653 - DNA, 15 bp, Homo sapiens
gctgggcagagacca

SEQ ID NO: 178654 - DNA, 15 bp, Homo sapiens
ggctgggcagagacc

SEQ ID NO: 178655 - DNA, 15 bp, Homo sapiens
aggctgggcagagac

SEQ ID NO: 178656 - DNA, 15 bp, Homo sapiens
caggctgggcagaga

SEQ ID NO: 178657 - DNA, 15 bp, Homo sapiens
gcaggctgggcagag

SEQ ID NO: 178658 - DNA, 15 bp, Homo sapiens
ggcaggctgggcaga

SEQ ID NO: 178659 - DNA, 15 bp, Homo sapiens
tggcaggctgggcag

SEQ ID NO: 178660 - DNA, 15 bp, Homo sapiens
gtggcaggctgggca

SEQ ID NO: 178661 - DNA, 15 bp, Homo sapiens
ggtggcaggctgggc

SEQ ID NO: 178662 - DNA, 15 bp, Homo sapiens
aggtggcaggctggg

SEQ ID NO: 178663 - DNA, 15 bp, Homo sapiens
aaggtggcaggctgg

SEQ ID NO: 178664 - DNA, 15 bp, Homo sapiens
gaaggtggcaggctg

SEQ ID NO: 178665 - DNA, 15 bp, Homo sapiens
ggaaggtggcaggct

SEQ ID NO: 178666 - DNA, 15 bp, Homo sapiens
aggaaggtggcaggc

SEQ ID NO: 178667 - DNA, 15 bp, Homo sapiens
caggaaggtggcagg

SEQ ID NO: 178668 - DNA, 15 bp, Homo sapiens
ccaggaaggtggcag

SEQ ID NO: 178669 - DNA, 15 bp, Homo sapiens
gccaggaaggtggca

SEQ ID NO: 178670 - DNA, 15 bp, Homo sapiens
ggccaggaaggtggc

SEQ ID NO: 178671 - DNA, 15 bp, Homo sapiens
gggccaggaaggtgg

SEQ ID NO: 178672 - DNA, 15 bp, Homo sapiens
cgggccaggaaggtg

SEQ ID NO: 178673 - DNA, 15 bp, Homo sapiens
acgggccaggaaggt

SEQ ID NO: 178674 - DNA, 15 bp, Homo sapiens
tacgggccaggaagg

SEQ ID NO: 178675 - DNA, 15 bp, Homo sapiens
ctacgggccaggaag

SEQ ID NO: 178676 - DNA, 15 bp, Homo sapiens
gctacgggccaggaa

SEQ ID NO: 178677 - DNA, 15 bp, Homo sapiens
ggctacgggccagga

SEQ ID NO: 178678 - DNA, 15 bp, Homo sapiens
gggctacgggccagg

SEQ ID NO: 178679 - DNA, 15 bp, Homo sapiens
agggctacgggccag

SEQ ID NO: 178680 - DNA, 15 bp, Homo sapiens
gagggctacgggcca

SEQ ID NO: 178681 - DNA, 15 bp, Homo sapiens
tgagggctacgggcc

SEQ ID NO: 178682 - DNA, 15 bp, Homo sapiens
gtgagggctacgggc

SEQ ID NO: 178683 - DNA, 15 bp, Homo sapiens
cgtgagggctacggg

SEQ ID NO: 178684 - DNA, 15 bp, Homo sapiens
acgtgagggctacgg

SEQ ID NO: 178685 - DNA, 15 bp, Homo sapiens
cacgtgagggctacg

SEQ ID NO: 178686 - DNA, 15 bp, Homo sapiens
ccacgtgagggctac

SEQ ID NO: 178687 - DNA, 15 bp, Homo sapiens
cccacgtgagggcta

SEQ ID NO: 178688 - DNA, 15 bp, Homo sapiens
acccacgtgagggct

SEQ ID NO: 178689 - DNA, 15 bp, Homo sapiens
cacccacgtgagggc

SEQ ID NO: 178690 - DNA, 15 bp, Homo sapiens
acacccacgtgaggg

SEQ ID NO: 178691 - DNA, 15 bp, Homo sapiens
cacacccacgtgagg

SEQ ID NO: 178692 - DNA, 15 bp, Homo sapiens
tcacacccacgtgag

SEQ ID NO: 178693 - DNA, 15 bp, Homo sapiens
ttcacacccacgtga

SEQ ID NO: 178694 - DNA, 15 bp, Homo sapiens
cttcacacccacgtg

SEQ ID NO: 178695 - DNA, 15 bp, Homo sapiens
ccttcacacccacgt

SEQ ID NO: 178696 - DNA, 15 bp, Homo sapiens
tccttcacacccacg

SEQ ID NO: 178697 - DNA, 15 bp, Homo sapiens
gtccttcacacccac

SEQ ID NO: 178698 - DNA, 15 bp, Homo sapiens
cgtccttcacaccca

SEQ ID NO: 178699 - DNA, 15 bp, Homo sapiens
acgtccttcacaccc

SEQ ID NO: 178700 - DNA, 15 bp, Homo sapiens
cacgtccttcacacc

SEQ ID NO: 178701 - DNA, 15 bp, Homo sapiens
ccacgtccttcacac

SEQ ID NO: 178702 - DNA, 15 bp, Homo sapiens
tccacgtccttcaca

SEQ ID NO: 178703 - DNA, 15 bp, Homo sapiens
ctccacgtccttcac

SEQ ID NO: 178704 - DNA, 15 bp, Homo sapiens
actccacgtccttca

SEQ ID NO: 178705 - DNA, 15 bp, Homo sapiens
cactccacgtccttc

SEQ ID NO: 178706 - DNA, 15 bp, Homo sapiens
acactccacgtcctt

SEQ ID NO: 178707 - DNA, 15 bp, Homo sapiens
cacactccacgtcct

SEQ ID NO: 178708 - DNA, 15 bp, Homo sapiens
ccacactccacgtcc

SEQ ID NO: 178709 - DNA, 15 bp, Homo sapiens
cccacactccacgtc

SEQ ID NO: 178710 - DNA, 15 bp, Homo sapiens
ccccacactccacgt

SEQ ID NO: 178711 - DNA, 15 bp, Homo sapiens
tccccacactccacg

SEQ ID NO: 178712 - DNA, 15 bp, Homo sapiens
ttccccacactccac

SEQ ID NO: 178713 - DNA, 15 bp, Homo sapiens
cttccccacactcca

SEQ ID NO: 178714 - DNA, 15 bp, Homo sapiens
ccttccccacactcc

SEQ ID NO: 178715 - DNA, 15 bp, Homo sapiens
tccttccccacactc

SEQ ID NO: 178716 - DNA, 15 bp, Homo sapiens
gtccttccccacact

SEQ ID NO: 178717 - DNA, 15 bp, Homo sapiens
tgtccttccccacac

SEQ ID NO: 178718 - DNA, 15 bp, Homo sapiens
gtgtccttccccaca

SEQ ID NO: 178719 - DNA, 15 bp, Homo sapiens
agtgtccttccccac

SEQ ID NO: 178720 - DNA, 15 bp, Homo sapiens
aagtgtccttcccca

SEQ ID NO: 178721 - DNA, 15 bp, Homo sapiens
gaagtgtccttcccc

SEQ ID NO: 178722 - DNA, 15 bp, Homo sapiens
agaagtgtccttccc

SEQ ID NO: 178723 - DNA, 15 bp, Homo sapiens
cagaagtgtccttcc

SEQ ID NO: 178724 - DNA, 15 bp, Homo sapiens
gcagaagtgtccttc

SEQ ID NO: 178725 - DNA, 15 bp, Homo sapiens
ggcagaagtgtcctt

SEQ ID NO: 178726 - DNA, 15 bp, Homo sapiens
tggcagaagtgtcct

SEQ ID NO: 178727 - DNA, 15 bp, Homo sapiens
atggcagaagtgtcc

SEQ ID NO: 178728 - DNA, 15 bp, Homo sapiens
catggcagaagtgtc

SEQ ID NO: 178729 - DNA, 15 bp, Homo sapiens
tcatggcagaagtgt

SEQ ID NO: 178730 - DNA, 15 bp, Homo sapiens
atcatggcagaagtg

SEQ ID NO: 178731 - DNA, 15 bp, Homo sapiens
tatcatggcagaagt

SEQ ID NO: 178732 - DNA, 15 bp, Homo sapiens
ttatcatggcagaag

SEQ ID NO: 178733 - DNA, 15 bp, Homo sapiens
gttatcatggcagaa

SEQ ID NO: 178734 - DNA, 15 bp, Homo sapiens
ggttatcatggcaga

SEQ ID NO: 178735 - DNA, 15 bp, Homo sapiens
tggttatcatggcag

SEQ ID NO: 178736 - DNA, 15 bp, Homo sapiens
ctggttatcatggca

SEQ ID NO: 178737 - DNA, 15 bp, Homo sapiens
tctggttatcatggc

SEQ ID NO: 178738 - DNA, 15 bp, Homo sapiens
gtctggttatcatgg

SEQ ID NO: 178739 - DNA, 15 bp, Homo sapiens
ggtctggttatcatg

SEQ ID NO: 178740 - DNA, 15 bp, Homo sapiens
aggtctggttatcat

SEQ ID NO: 178741 - DNA, 15 bp, Homo sapiens
caggtctggttatca

SEQ ID NO: 178742 - DNA, 15 bp, Homo sapiens
gcaggtctggttatc

SEQ ID NO: 178743 - DNA, 15 bp, Homo sapiens
agcaggtctggttat

SEQ ID NO: 178744 - DNA, 15 bp, Homo sapiens
cagcaggtctggtta

SEQ ID NO: 178745 - DNA, 15 bp, Homo sapiens
gcagcaggtctggtt

SEQ ID NO: 178746 - DNA, 15 bp, Homo sapiens
ggcagcaggtctggt

SEQ ID NO: 178747 - DNA, 15 bp, Homo sapiens
cggcagcaggtctgg

SEQ ID NO: 178748 - DNA, 15 bp, Homo sapiens
tcggcagcaggtctg

SEQ ID NO: 178749 - DNA, 15 bp, Homo sapiens
ctcggcagcaggtct

SEQ ID NO: 178750 - DNA, 15 bp, Homo sapiens
tctcggcagcaggtc

SEQ ID NO: 178751 - DNA, 15 bp, Homo sapiens
gtctcggcagcaggt

SEQ ID NO: 178752 - DNA, 15 bp, Homo sapiens
tgtctcggcagcagg

SEQ ID NO: 178753 - DNA, 15 bp, Homo sapiens
ttgtctcggcagcag

SEQ ID NO: 178754 - DNA, 15 bp, Homo sapiens
gttgtctcggcagca

SEQ ID NO: 178755 - DNA, 15 bp, Homo sapiens
ggttgtctcggcagc

SEQ ID NO: 178756 - DNA, 15 bp, Homo sapiens
cggttgtctcggcag

SEQ ID NO: 178757 - DNA, 15 bp, Homo sapiens
tcggttgtctcggca

SEQ ID NO: 178758 - DNA, 15 bp, Homo sapiens
gtcggttgtctcggc

SEQ ID NO: 178759 - DNA, 15 bp, Homo sapiens
tgtcggttgtctcgg

SEQ ID NO: 178760 - DNA, 15 bp, Homo sapiens
ctgtcggttgtctcg

SEQ ID NO: 178761 - DNA, 15 bp, Homo sapiens
cctgtcggttgtctc

SEQ ID NO: 178762 - DNA, 15 bp, Homo sapiens
ccctgtcggttgtct

SEQ ID NO: 178763 - DNA, 15 bp, Homo sapiens
gccctgtcggttgtc

SEQ ID NO: 178764 - DNA, 15 bp, Homo sapiens
agccctgtcggttgt

SEQ ID NO: 178765 - DNA, 15 bp, Homo sapiens
cagccctgtcggttg

SEQ ID NO: 178766 - DNA, 15 bp, Homo sapiens
ccagccctgtcggtt

SEQ ID NO: 178767 - DNA, 15 bp, Homo sapiens
cccagccctgtcggt

SEQ ID NO: 178768 - DNA, 15 bp, Homo sapiens
gcccagccctgtcgg

SEQ ID NO: 178769 - DNA, 15 bp, Homo sapiens
ggcccagccctgtcg

SEQ ID NO: 178770 - DNA, 15 bp, Homo sapiens
aggcccagccctgtc

SEQ ID NO: 178771 - DNA, 15 bp, Homo sapiens
caggcccagccctgt

SEQ ID NO: 178772 - DNA, 15 bp, Homo sapiens
gcaggcccagccctg

SEQ ID NO: 178773 - DNA, 15 bp, Homo sapiens
agcaggcccagccct

SEQ ID NO: 178774 - DNA, 15 bp, Homo sapiens
cagcaggcccagccc

SEQ ID NO: 178775 - DNA, 15 bp, Homo sapiens
acagcaggcccagcc

SEQ ID NO: 178776 - DNA, 15 bp, Homo sapiens
gacagcaggcccagc

SEQ ID NO: 178777 - DNA, 15 bp, Homo sapiens
ggacagcaggcccag

SEQ ID NO: 178778 - DNA, 15 bp, Homo sapiens
gggacagcaggccca

SEQ ID NO: 178779 - DNA, 15 bp, Homo sapiens
agggacagcaggccc

SEQ ID NO: 178780 - DNA, 15 bp, Homo sapiens
tagggacagcaggcc

SEQ ID NO: 178781 - DNA, 15 bp, Homo sapiens
gtagggacagcaggc

SEQ ID NO: 178782 - DNA, 15 bp, Homo sapiens
ggtagggacagcagg

SEQ ID NO: 178783 - DNA, 15 bp, Homo sapiens
cggtagggacagcag

SEQ ID NO: 178784 - DNA, 15 bp, Homo sapiens
gcggtagggacagca

SEQ ID NO: 178785 - DNA, 15 bp, Homo sapiens
ggcggtagggacagc

SEQ ID NO: 178786 - DNA, 15 bp, Homo sapiens
tggcggtagggacag

SEQ ID NO: 178787 - DNA, 15 bp, Homo sapiens
ctggcggtagggaca

SEQ ID NO: 178788 - DNA, 15 bp, Homo sapiens
cctggcggtagggac

SEQ ID NO: 178789 - DNA, 15 bp, Homo sapiens
acctggcggtaggga

SEQ ID NO: 178790 - DNA, 15 bp, Homo sapiens
gacctggcggtaggg

SEQ ID NO: 178791 - DNA, 15 bp, Homo sapiens
tgacctggcggtagg

SEQ ID NO: 178792 - DNA, 15 bp, Homo sapiens
ctgacctggcggtag

SEQ ID NO: 178793 - DNA, 15 bp, Homo sapiens
actgacctggcggta

SEQ ID NO: 178794 - DNA, 15 bp, Homo sapiens
cactgacctggcggt

SEQ ID NO: 178795 - DNA, 15 bp, Homo sapiens
gcactgacctggcgg

SEQ ID NO: 178796 - DNA, 15 bp, Homo sapiens
ggcactgacctggcg

SEQ ID NO: 178797 - DNA, 15 bp, Homo sapiens
tggcactgacctggc

SEQ ID NO: 178798 - DNA, 15 bp, Homo sapiens
ttggcactgacctgg

SEQ ID NO: 178799 - DNA, 15 bp, Homo sapiens
gttggcactgacctg

SEQ ID NO: 178800 - DNA, 15 bp, Homo sapiens
ggttggcactgacct

SEQ ID NO: 178801 - DNA, 15 bp, Homo sapiens
gggttggcactgacc

SEQ ID NO: 178802 - DNA, 15 bp, Homo sapiens
ggggttggcactgac

SEQ ID NO: 178803 - DNA, 15 bp, Homo sapiens
gggggttggcactga

SEQ ID NO: 178804 - DNA, 15 bp, Homo sapiens
tgggggttggcactg

SEQ ID NO: 178805 - DNA, 15 bp, Homo sapiens
atgggggttggcact

SEQ ID NO: 178806 - DNA, 15 bp, Homo sapiens
gatgggggttggcac

SEQ ID NO: 178807 - DNA, 15 bp, Homo sapiens
ggatgggggttggca

SEQ ID NO: 178808 - DNA, 15 bp, Homo sapiens
aggatgggggttggc

SEQ ID NO: 178809 - DNA, 15 bp, Homo sapiens
caggatgggggttgg

SEQ ID NO: 178810 - DNA, 15 bp, Homo sapiens
ccaggatgggggttg

SEQ ID NO: 178811 - DNA, 15 bp, Homo sapiens
cccaggatgggggtt

SEQ ID NO: 178812 - DNA, 15 bp, Homo sapiens
ccccaggatgggggt

SEQ ID NO: 178813 - DNA, 15 bp, Homo sapiens
gccccaggatggggg

SEQ ID NO: 178814 - DNA, 15 bp, Homo sapiens
agccccaggatgggg

SEQ ID NO: 178815 - DNA, 15 bp, Homo sapiens
cagccccaggatggg

SEQ ID NO: 178816 - DNA, 15 bp, Homo sapiens
ccagccccaggatgg

SEQ ID NO: 178817 - DNA, 15 bp, Homo sapiens
cccagccccaggatg

SEQ ID NO: 178818 - DNA, 15 bp, Homo sapiens
acccagccccaggat

SEQ ID NO: 178819 - DNA, 15 bp, Homo sapiens
tacccagccccagga

SEQ ID NO: 178820 - DNA, 15 bp, Homo sapiens
atacccagccccagg

SEQ ID NO: 178821 - DNA, 15 bp, Homo sapiens
catacccagccccag

SEQ ID NO: 178822 - DNA, 15 bp, Homo sapiens
ccatacccagcccca

SEQ ID NO: 178823 - DNA, 15 bp, Homo sapiens
gccatacccagcccc

SEQ ID NO: 178824 - DNA, 15 bp, Homo sapiens
ggccatacccagccc

SEQ ID NO: 178825 - DNA, 15 bp, Homo sapiens
tggccatacccagcc

SEQ ID NO: 178826 - DNA, 15 bp, Homo sapiens
ctggccatacccagc

SEQ ID NO: 178827 - DNA, 15 bp, Homo sapiens
cctggccatacccag

SEQ ID NO: 178828 - DNA, 15 bp, Homo sapiens
ccctggccataccca

SEQ ID NO: 178829 - DNA, 15 bp, Homo sapiens
tccctggccataccc

SEQ ID NO: 178830 - DNA, 15 bp, Homo sapiens
gtccctggccatacc

SEQ ID NO: 178831 - DNA, 15 bp, Homo sapiens
ggtccctggccatac

SEQ ID NO: 178832 - DNA, 15 bp, Homo sapiens
tggtccctggccata

SEQ ID NO: 178833 - DNA, 15 bp, Homo sapiens
ctggtccctggccat

SEQ ID NO: 178834 - DNA, 15 bp, Homo sapiens
cctggtccctggcca

SEQ ID NO: 178835 - DNA, 15 bp, Homo sapiens
acctggtccctggcc

SEQ ID NO: 178836 - DNA, 15 bp, Homo sapiens
gacctggtccctggc

SEQ ID NO: 178837 - DNA, 15 bp, Homo sapiens
ggacctggtccctgg

SEQ ID NO: 178838 - DNA, 15 bp, Homo sapiens
gggacctggtccctg

SEQ ID NO: 178839 - DNA, 15 bp, Homo sapiens
tgggacctggtccct

SEQ ID NO: 178840 - DNA, 15 bp, Homo sapiens
gtgggacctggtccc

SEQ ID NO: 178841 - DNA, 15 bp, Homo sapiens
ggtgggacctggtcc

SEQ ID NO: 178842 - DNA, 15 bp, Homo sapiens
aggtgggacctggtc

SEQ ID NO: 178843 - DNA, 15 bp, Homo sapiens
gaggtgggacctggt

SEQ ID NO: 178844 - DNA, 15 bp, Homo sapiens
cgaggtgggacctgg

SEQ ID NO: 178845 - DNA, 15 bp, Homo sapiens
acgaggtgggacctg

SEQ ID NO: 178846 - DNA, 15 bp, Homo sapiens
gacgaggtgggacct

SEQ ID NO: 178847 - DNA, 15 bp, Homo sapiens
ggacgaggtgggacc

SEQ ID NO: 178848 - DNA, 15 bp, Homo sapiens
tggacgaggtgggac

SEQ ID NO: 178849 - DNA, 15 bp, Homo sapiens
ttggacgaggtggga

SEQ ID NO: 178850 - DNA, 15 bp, Homo sapiens
gttggacgaggtggg

SEQ ID NO: 178851 - DNA, 15 bp, Homo sapiens
ggttggacgaggtgg

SEQ ID NO: 178852 - DNA, 15 bp, Homo sapiens
gggttggacgaggtg

SEQ ID NO: 178853 - DNA, 15 bp, Homo sapiens
agggttggacgaggt

SEQ ID NO: 178854 - DNA, 15 bp, Homo sapiens
gagggttggacgagg

SEQ ID NO: 178855 - DNA, 15 bp, Homo sapiens
agagggttggacgag

SEQ ID NO: 178856 - DNA, 15 bp, Homo sapiens
gagagggttggacga

SEQ ID NO: 178857 - DNA, 15 bp, Homo sapiens
cgagagggttggacg

SEQ ID NO: 178858 - DNA, 15 bp, Homo sapiens
gcgagagggttggac

SEQ ID NO: 178859 - DNA, 15 bp, Homo sapiens
ggcgagagggttgga

SEQ ID NO: 178860 - DNA, 15 bp, Homo sapiens
gggcgagagggttgg

SEQ ID NO: 178861 - DNA, 15 bp, Homo sapiens
ggggcgagagggttg

SEQ ID NO: 178862 - DNA, 15 bp, Homo sapiens
gggggcgagagggtt

SEQ ID NO: 178863 - DNA, 15 bp, Homo sapiens
ggggggcgagagggt

SEQ ID NO: 178864 - DNA, 15 bp, Homo sapiens
aggggggcgagaggg

SEQ ID NO: 178865 - DNA, 15 bp, Homo sapiens
gaggggggcgagagg

SEQ ID NO: 178866 - DNA, 15 bp, Homo sapiens
agaggggggcgagag

SEQ ID NO: 178867 - DNA, 15 bp, Homo sapiens
cagaggggggcgaga

SEQ ID NO: 178868 - DNA, 15 bp, Homo sapiens
tcagaggggggcgag

SEQ ID NO: 178869 - DNA, 15 bp, Homo sapiens
gtcagaggggggcga

SEQ ID NO: 178870 - DNA, 15 bp, Homo sapiens
ggtcagaggggggcg

SEQ ID NO: 178871 - DNA, 15 bp, Homo sapiens
tggtcagaggggggc

SEQ ID NO: 178872 - DNA, 15 bp, Homo sapiens
atggtcagagggggg

SEQ ID NO: 178873 - DNA, 15 bp, Homo sapiens
gatggtcagaggggg

SEQ ID NO: 178874 - DNA, 15 bp, Homo sapiens
ggatggtcagagggg

SEQ ID NO: 178875 - DNA, 15 bp, Homo sapiens
tggatggtcagaggg

SEQ ID NO: 178876 - DNA, 15 bp, Homo sapiens
ctggatggtcagagg

SEQ ID NO: 178877 - DNA, 15 bp, Homo sapiens
cctggatggtcagag

SEQ ID NO: 178878 - DNA, 15 bp, Homo sapiens
ccctggatggtcaga

SEQ ID NO: 178879 - DNA, 15 bp, Homo sapiens
gccctggatggtcag

SEQ ID NO: 178880 - DNA, 15 bp, Homo sapiens
cgccctggatggtca

SEQ ID NO: 178881 - DNA, 15 bp, Homo sapiens
acgccctggatggtc

SEQ ID NO: 178882 - DNA, 15 bp, Homo sapiens
gacgccctggatggt

SEQ ID NO: 178883 - DNA, 15 bp, Homo sapiens
agacgccctggatgg

SEQ ID NO: 178884 - DNA, 15 bp, Homo sapiens
cagacgccctggatg

SEQ ID NO: 178885 - DNA, 15 bp, Homo sapiens
acagacgccctggat

SEQ ID NO: 178886 - DNA, 15 bp, Homo sapiens
aacagacgccctgga

SEQ ID NO: 178887 - DNA, 15 bp, Homo sapiens
caacagacgccctgg

SEQ ID NO: 178888 - DNA, 15 bp, Homo sapiens
acaacagacgccctg

SEQ ID NO: 178889 - DNA, 15 bp, Homo sapiens
cacaacagacgccct

SEQ ID NO: 178890 - DNA, 15 bp, Homo sapiens
gcacaacagacgccc

SEQ ID NO: 178891 - DNA, 15 bp, Homo sapiens
agcacaacagacgcc

SEQ ID NO: 178892 - DNA, 15 bp, Homo sapiens
cagcacaacagacgc

SEQ ID NO: 178893 - DNA, 15 bp, Homo sapiens
tcagcacaacagacg

SEQ ID NO: 178894 - DNA, 15 bp, Homo sapiens
atcagcacaacagac

SEQ ID NO: 178895 - DNA, 15 bp, Homo sapiens
gatcagcacaacaga

SEQ ID NO: 178896 - DNA, 15 bp, Homo sapiens
cgatcagcacaacag

SEQ ID NO: 178897 - DNA, 15 bp, Homo sapiens
ccgatcagcacaaca

SEQ ID NO: 178898 - DNA, 15 bp, Homo sapiens
gccgatcagcacaac

SEQ ID NO: 178899 - DNA, 15 bp, Homo sapiens
cgccgatcagcacaa

SEQ ID NO: 178900 - DNA, 15 bp, Homo sapiens
gcgccgatcagcaca

SEQ ID NO: 178901 - DNA, 15 bp, Homo sapiens
ggcgccgatcagcac

SEQ ID NO: 178902 - DNA, 15 bp, Homo sapiens
tggcgccgatcagca

SEQ ID NO: 178903 - DNA, 15 bp, Homo sapiens
gtggcgccgatcagc

SEQ ID NO: 178904 - DNA, 15 bp, Homo sapiens
agtggcgccgatcag

SEQ ID NO: 178905 - DNA, 15 bp, Homo sapiens
cagtggcgccgatca

SEQ ID NO: 178906 - DNA, 15 bp, Homo sapiens
gcagtggcgccgatc

SEQ ID NO: 178907 - DNA, 15 bp, Homo sapiens
agcagtggcgccgat

SEQ ID NO: 178908 - DNA, 15 bp, Homo sapiens
cagcagtggcgccga

SEQ ID NO: 178909 - DNA, 15 bp, Homo sapiens
acagcagtggcgccg

SEQ ID NO: 178910 - DNA, 15 bp, Homo sapiens
gacagcagtggcgcc

SEQ ID NO: 178911 - DNA, 15 bp, Homo sapiens
ggacagcagtggcgc

SEQ ID NO: 178912 - DNA, 15 bp, Homo sapiens
aggacagcagtggcg

SEQ ID NO: 178913 - DNA, 15 bp, Homo sapiens
caggacagcagtggc

SEQ ID NO: 178914 - DNA, 15 bp, Homo sapiens
gcaggacagcagtgg

SEQ ID NO: 178915 - DNA, 15 bp, Homo sapiens
agcaggacagcagtg

SEQ ID NO: 178916 - DNA, 15 bp, Homo sapiens
cagcaggacagcagt

SEQ ID NO: 178917 - DNA, 15 bp, Homo sapiens
ccagcaggacagcag

SEQ ID NO: 178918 - DNA, 15 bp, Homo sapiens
gccagcaggacagca

SEQ ID NO: 178919 - DNA, 15 bp, Homo sapiens
agccagcaggacagc

SEQ ID NO: 178920 - DNA, 15 bp, Homo sapiens
aagccagcaggacag

SEQ ID NO: 178921 - DNA, 15 bp, Homo sapiens
gaagccagcaggaca

SEQ ID NO: 178922 - DNA, 15 bp, Homo sapiens
ggaagccagcaggac

SEQ ID NO: 178923 - DNA, 15 bp, Homo sapiens
cggaagccagcagga

SEQ ID NO: 178924 - DNA, 15 bp, Homo sapiens
gcggaagccagcagg

SEQ ID NO: 178925 - DNA, 15 bp, Homo sapiens
agcggaagccagcag

SEQ ID NO: 178926 - DNA, 15 bp, Homo sapiens
cagcggaagccagca

SEQ ID NO: 178927 - DNA, 15 bp, Homo sapiens
gcagcggaagccagc

SEQ ID NO: 178928 - DNA, 15 bp, Homo sapiens
cgcagcggaagccag

SEQ ID NO: 178929 - DNA, 15 bp, Homo sapiens
gcgcagcggaagcca

SEQ ID NO: 178930 - DNA, 15 bp, Homo sapiens
tgcgcagcggaagcc

SEQ ID NO: 178931 - DNA, 15 bp, Homo sapiens
ctgcgcagcggaagc

SEQ ID NO: 178932 - DNA, 15 bp, Homo sapiens
gctgcgcagcggaag

SEQ ID NO: 178933 - DNA, 15 bp, Homo sapiens
ggctgcgcagcggaa

SEQ ID NO: 178934 - DNA, 15 bp, Homo sapiens
tggctgcgcagcgga

SEQ ID NO: 178935 - DNA, 15 bp, Homo sapiens
ctggctgcgcagcgg

SEQ ID NO: 178936 - DNA, 15 bp, Homo sapiens
cctggctgcgcagcg

SEQ ID NO: 178937 - DNA, 15 bp, Homo sapiens
ccctggctgcgcagc

SEQ ID NO: 178938 - DNA, 15 bp, Homo sapiens
cccctggctgcgcag

SEQ ID NO: 178939 - DNA, 15 bp, Homo sapiens
acccctggctgcgca

SEQ ID NO: 178940 - DNA, 15 bp, Homo sapiens
tacccctggctgcgc

SEQ ID NO: 178941 - DNA, 15 bp, Homo sapiens
gtacccctggctgcg

SEQ ID NO: 178942 - DNA, 15 bp, Homo sapiens
ggtacccctggctgc

SEQ ID NO: 178943 - DNA, 15 bp, Homo sapiens
tggtacccctggctg

SEQ ID NO: 178944 - DNA, 15 bp, Homo sapiens
ttggtacccctggct

SEQ ID NO: 178945 - DNA, 15 bp, Homo sapiens
cttggtacccctggc

SEQ ID NO: 178946 - DNA, 15 bp, Homo sapiens
acttggtacccctgg

SEQ ID NO: 178947 - DNA, 15 bp, Homo sapiens
cacttggtacccctg

SEQ ID NO: 178948 - DNA, 15 bp, Homo sapiens
acacttggtacccct

SEQ ID NO: 178949 - DNA, 15 bp, Homo sapiens
aacacttggtacccc

SEQ ID NO: 178950 - DNA, 15 bp, Homo sapiens
aaacacttggtaccc

SEQ ID NO: 178951 - DNA, 15 bp, Homo sapiens
caaacacttggtacc

SEQ ID NO: 178952 - DNA, 15 bp, Homo sapiens
gcaaacacttggtac

SEQ ID NO: 178953 - DNA, 15 bp, Homo sapiens
cgcaaacacttggta

SEQ ID NO: 178954 - DNA, 15 bp, Homo sapiens
gcgcaaacacttggt

SEQ ID NO: 178955 - DNA, 15 bp, Homo sapiens
tgcgcaaacacttgg

SEQ ID NO: 178956 - DNA, 15 bp, Homo sapiens
ctgcgcaaacacttg

SEQ ID NO: 178957 - DNA, 15 bp, Homo sapiens
cctgcgcaaacactt

SEQ ID NO: 178958 - DNA, 15 bp, Homo sapiens
ccctgcgcaaacact

SEQ ID NO: 178959 - DNA, 15 bp, Homo sapiens
tccctgcgcaaacac

SEQ ID NO: 178960 - DNA, 15 bp, Homo sapiens
ctccctgcgcaaaca

SEQ ID NO: 178961 - DNA, 15 bp, Homo sapiens
cctccctgcgcaaac

SEQ ID NO: 178962 - DNA, 15 bp, Homo sapiens
gcctccctgcgcaaa

SEQ ID NO: 178963 - DNA, 15 bp, Homo sapiens
ggcctccctgcgcaa

SEQ ID NO: 178964 - DNA, 15 bp, Homo sapiens
gggcctccctgcgca

SEQ ID NO: 178965 - DNA, 15 bp, Homo sapiens
ggggcctccctgcgc

SEQ ID NO: 178966 - DNA, 15 bp, Homo sapiens
cggggcctccctgcg

SEQ ID NO: 178967 - DNA, 15 bp, Homo sapiens
gcggggcctccctgc

SEQ ID NO: 178968 - DNA, 15 bp, Homo sapiens
cgcggggcctccctg

SEQ ID NO: 178969 - DNA, 15 bp, Homo sapiens
gcgcggggcctccct

SEQ ID NO: 178970 - DNA, 15 bp, Homo sapiens
agcgcggggcctccc

SEQ ID NO: 178971 - DNA, 15 bp, Homo sapiens
cagcgcggggcctcc

SEQ ID NO: 178972 - DNA, 15 bp, Homo sapiens
ccagcgcggggcctc

SEQ ID NO: 178973 - DNA, 15 bp, Homo sapiens
cccagcgcggggcct

SEQ ID NO: 178974 - DNA, 15 bp, Homo sapiens
tcccagcgcggggcc

SEQ ID NO: 178975 - DNA, 15 bp, Homo sapiens
gtcccagcgcggggc

SEQ ID NO: 178976 - DNA, 15 bp, Homo sapiens
cgtcccagcgcgggg

SEQ ID NO: 178977 - DNA, 15 bp, Homo sapiens
gcgtcccagcgcggg

SEQ ID NO: 178978 - DNA, 15 bp, Homo sapiens
ggcgtcccagcgcgg

SEQ ID NO: 178979 - DNA, 15 bp, Homo sapiens
gggcgtcccagcgcg

SEQ ID NO: 178980 - DNA, 15 bp, Homo sapiens
ggggcgtcccagcgc

SEQ ID NO: 178981 - DNA, 15 bp, Homo sapiens
aggggcgtcccagcg

SEQ ID NO: 178982 - DNA, 15 bp, Homo sapiens
aaggggcgtcccagc

SEQ ID NO: 178983 - DNA, 15 bp, Homo sapiens
aaaggggcgtcccag

SEQ ID NO: 178984 - DNA, 15 bp, Homo sapiens
caaaggggcgtccca

SEQ ID NO: 178985 - DNA, 15 bp, Homo sapiens
tcaaaggggcgtccc

SEQ ID NO: 178986 - DNA, 15 bp, Homo sapiens
ctcaaaggggcgtcc

SEQ ID NO: 178987 - DNA, 15 bp, Homo sapiens
cctcaaaggggcgtc

SEQ ID NO: 178988 - DNA, 15 bp, Homo sapiens
ccctcaaaggggcgt

SEQ ID NO: 178989 - DNA, 15 bp, Homo sapiens
tccctcaaaggggcg

SEQ ID NO: 178990 - DNA, 15 bp, Homo sapiens
gtccctcaaaggggc

SEQ ID NO: 178991 - DNA, 15 bp, Homo sapiens
ggtccctcaaagggg

SEQ ID NO: 178992 - DNA, 15 bp, Homo sapiens
gggtccctcaaaggg

SEQ ID NO: 178993 - DNA, 15 bp, Homo sapiens
tgggtccctcaaagg

SEQ ID NO: 178994 - DNA, 15 bp, Homo sapiens
ctgggtccctcaaag

SEQ ID NO: 178995 - DNA, 15 bp, Homo sapiens
gctgggtccctcaaa

SEQ ID NO: 178996 - DNA, 15 bp, Homo sapiens
ggctgggtccctcaa

SEQ ID NO: 178997 - DNA, 15 bp, Homo sapiens
aggctgggtccctca

SEQ ID NO: 178998 - DNA, 15 bp, Homo sapiens
aaggctgggtccctc

SEQ ID NO: 178999 - DNA, 15 bp, Homo sapiens
caaggctgggtccct

SEQ ID NO: 179000 - DNA, 15 bp, Homo sapiens
tcaaggctgggtccc

SEQ ID NO: 179001 - DNA, 15 bp, Homo sapiens
ctcaaggctgggtcc

SEQ ID NO: 179002 - DNA, 15 bp, Homo sapiens
tctcaaggctgggtc

SEQ ID NO: 179003 - DNA, 15 bp, Homo sapiens
gtctcaaggctgggt

SEQ ID NO: 179004 - DNA, 15 bp, Homo sapiens
tgtctcaaggctggg

SEQ ID NO: 179005 - DNA, 15 bp, Homo sapiens
ctgtctcaaggctgg

SEQ ID NO: 179006 - DNA, 15 bp, Homo sapiens
gctgtctcaaggctg

SEQ ID NO: 179007 - DNA, 15 bp, Homo sapiens
agctgtctcaaggct

SEQ ID NO: 179008 - DNA, 15 bp, Homo sapiens
cagctgtctcaaggc

SEQ ID NO: 179009 - DNA, 15 bp, Homo sapiens
gcagctgtctcaagg

SEQ ID NO: 179010 - DNA, 15 bp, Homo sapiens
agcagctgtctcaag

SEQ ID NO: 179011 - DNA, 15 bp, Homo sapiens
cagcagctgtctcaa

SEQ ID NO: 179012 - DNA, 15 bp, Homo sapiens
acagcagctgtctca

SEQ ID NO: 179013 - DNA, 15 bp, Homo sapiens
cacagcagctgtctc

SEQ ID NO: 179014 - DNA, 15 bp, Homo sapiens
tcacagcagctgtct

SEQ ID NO: 179015 - DNA, 15 bp, Homo sapiens
ctcacagcagctgtc

SEQ ID NO: 179016 - DNA, 15 bp, Homo sapiens
cctcacagcagctgt

SEQ ID NO: 179017 - DNA, 15 bp, Homo sapiens
ccctcacagcagctg

SEQ ID NO: 179018 - DNA, 15 bp, Homo sapiens
tccctcacagcagct

SEQ ID NO: 179019 - DNA, 15 bp, Homo sapiens
gtccctcacagcagc

SEQ ID NO: 179020 - DNA, 15 bp, Homo sapiens
tgtccctcacagcag

SEQ ID NO: 179021 - DNA, 15 bp, Homo sapiens
ctgtccctcacagca

SEQ ID NO: 179022 - DNA, 15 bp, Homo sapiens
actgtccctcacagc

SEQ ID NO: 179023 - DNA, 15 bp, Homo sapiens
tactgtccctcacag

SEQ ID NO: 179024 - DNA, 15 bp, Homo sapiens
gtactgtccctcaca

SEQ ID NO: 179025 - DNA, 15 bp, Homo sapiens
agtactgtccctcac

SEQ ID NO: 179026 - DNA, 15 bp, Homo sapiens
cagtactgtccctca

SEQ ID NO: 179027 - DNA, 15 bp, Homo sapiens
tcagtactgtccctc

SEQ ID NO: 179028 - DNA, 15 bp, Homo sapiens
ttcagtactgtccct

SEQ ID NO: 179029 - DNA, 15 bp, Homo sapiens
cttcagtactgtccc

SEQ ID NO: 179030 - DNA, 15 bp, Homo sapiens
tcttcagtactgtcc

SEQ ID NO: 179031 - DNA, 15 bp, Homo sapiens
gtcttcagtactgtc

SEQ ID NO: 179032 - DNA, 15 bp, Homo sapiens
agtcttcagtactgt

SEQ ID NO: 179033 - DNA, 15 bp, Homo sapiens
gagtcttcagtactg

SEQ ID NO: 179034 - DNA, 15 bp, Homo sapiens
agagtcttcagtact

SEQ ID NO: 179035 - DNA, 15 bp, Homo sapiens
cagagtcttcagtac

SEQ ID NO: 179036 - DNA, 15 bp, Homo sapiens
gcagagtcttcagta

SEQ ID NO: 179037 - DNA, 15 bp, Homo sapiens
tgcagagtcttcagt

SEQ ID NO: 179038 - DNA, 15 bp, Homo sapiens
ctgcagagtcttcag

SEQ ID NO: 179039 - DNA, 15 bp, Homo sapiens
gctgcagagtcttca

SEQ ID NO: 179040 - DNA, 15 bp, Homo sapiens
ggctgcagagtcttc

SEQ ID NO: 179041 - DNA, 15 bp, Homo sapiens
gggctgcagagtctt

SEQ ID NO: 179042 - DNA, 15 bp, Homo sapiens
agggctgcagagtct

SEQ ID NO: 179043 - DNA, 15 bp, Homo sapiens
gagggctgcagagtc

SEQ ID NO: 179044 - DNA, 15 bp, Homo sapiens
cgagggctgcagagt

SEQ ID NO: 179045 - DNA, 15 bp, Homo sapiens
ccgagggctgcagag

SEQ ID NO: 179046 - DNA, 15 bp, Homo sapiens
cccgagggctgcaga

SEQ ID NO: 179047 - DNA, 15 bp, Homo sapiens
tcccgagggctgcag

SEQ ID NO: 179048 - DNA, 15 bp, Homo sapiens
gtcccgagggctgca

SEQ ID NO: 179049 - DNA, 15 bp, Homo sapiens
ggtcccgagggctgc

SEQ ID NO: 179050 - DNA, 15 bp, Homo sapiens
gggtcccgagggctg

SEQ ID NO: 179051 - DNA, 15 bp, Homo sapiens
ggggtcccgagggct

SEQ ID NO: 179052 - DNA, 15 bp, Homo sapiens
tggggtcccgagggc

SEQ ID NO: 179053 - DNA, 15 bp, Homo sapiens
gtggggtcccgaggg

SEQ ID NO: 179054 - DNA, 15 bp, Homo sapiens
agtggggtcccgagg

SEQ ID NO: 179055 - DNA, 15 bp, Homo sapiens
gagtggggtcccgag

SEQ ID NO: 179056 - DNA, 15 bp, Homo sapiens
cgagtggggtcccga

SEQ ID NO: 179057 - DNA, 15 bp, Homo sapiens
ccgagtggggtcccg

SEQ ID NO: 179058 - DNA, 15 bp, Homo sapiens
tccgagtggggtccc

SEQ ID NO: 179059 - DNA, 15 bp, Homo sapiens
ctccgagtggggtcc

SEQ ID NO: 179060 - DNA, 15 bp, Homo sapiens
cctccgagtggggtc

SEQ ID NO: 179061 - DNA, 15 bp, Homo sapiens
ccctccgagtggggt

SEQ ID NO: 179062 - DNA, 15 bp, Homo sapiens
accctccgagtgggg

SEQ ID NO: 179063 - DNA, 15 bp, Homo sapiens
caccctccgagtggg

SEQ ID NO: 179064 - DNA, 15 bp, Homo sapiens
gcaccctccgagtgg

SEQ ID NO: 179065 - DNA, 15 bp, Homo sapiens
ggcaccctccgagtg

SEQ ID NO: 179066 - DNA, 15 bp, Homo sapiens
gggcaccctccgagt

SEQ ID NO: 179067 - DNA, 15 bp, Homo sapiens
agggcaccctccgag

SEQ ID NO: 179068 - DNA, 15 bp, Homo sapiens
gagggcaccctccga

SEQ ID NO: 179069 - DNA, 15 bp, Homo sapiens
agagggcaccctccg

SEQ ID NO: 179070 - DNA, 15 bp, Homo sapiens
cagagggcaccctcc

SEQ ID NO: 179071 - DNA, 15 bp, Homo sapiens
gcagagggcaccctc

SEQ ID NO: 179072 - DNA, 15 bp, Homo sapiens
agcagagggcaccct

SEQ ID NO: 179073 - DNA, 15 bp, Homo sapiens
gagcagagggcaccc

SEQ ID NO: 179074 - DNA, 15 bp, Homo sapiens
tgagcagagggcacc

SEQ ID NO: 179075 - DNA, 15 bp, Homo sapiens
ctgagcagagggcac

SEQ ID NO: 179076 - DNA, 15 bp, Homo sapiens
cctgagcagagggca

SEQ ID NO: 179077 - DNA, 15 bp, Homo sapiens
gcctgagcagagggc

SEQ ID NO: 179078 - DNA, 15 bp, Homo sapiens
ggcctgagcagaggg

SEQ ID NO: 179079 - DNA, 15 bp, Homo sapiens
aggcctgagcagagg

SEQ ID NO: 179080 - DNA, 15 bp, Homo sapiens
gaggcctgagcagag

SEQ ID NO: 179081 - DNA, 15 bp, Homo sapiens
ggaggcctgagcaga

SEQ ID NO: 179082 - DNA, 15 bp, Homo sapiens
gggaggcctgagcag

SEQ ID NO: 179083 - DNA, 15 bp, Homo sapiens
agggaggcctgagca

SEQ ID NO: 179084 - DNA, 15 bp, Homo sapiens
tagggaggcctgagc

SEQ ID NO: 179085 - DNA, 15 bp, Homo sapiens
ctagggaggcctgag

SEQ ID NO: 179086 - DNA, 15 bp, Homo sapiens
gctagggaggcctga

SEQ ID NO: 179087 - DNA, 15 bp, Homo sapiens
tgctagggaggcctg

SEQ ID NO: 179088 - DNA, 15 bp, Homo sapiens
gtgctagggaggcct

SEQ ID NO: 179089 - DNA, 15 bp, Homo sapiens
ggtgctagggaggcc

SEQ ID NO: 179090 - DNA, 15 bp, Homo sapiens
aggtgctagggaggc

SEQ ID NO: 179091 - DNA, 15 bp, Homo sapiens
gaggtgctagggagg

SEQ ID NO: 179092 - DNA, 15 bp, Homo sapiens
ggaggtgctagggag

SEQ ID NO: 179093 - DNA, 15 bp, Homo sapiens
gggaggtgctaggga

SEQ ID NO: 179094 - DNA, 15 bp, Homo sapiens
ggggaggtgctaggg

SEQ ID NO: 179095 - DNA, 15 bp, Homo sapiens
gggggaggtgctagg

SEQ ID NO: 179096 - DNA, 15 bp, Homo sapiens
agggggaggtgctag

SEQ ID NO: 179097 - DNA, 15 bp, Homo sapiens
tagggggaggtgcta

SEQ ID NO: 179098 - DNA, 15 bp, Homo sapiens
ttagggggaggtgct

SEQ ID NO: 179099 - DNA, 15 bp, Homo sapiens
gttagggggaggtgc

SEQ ID NO: 179100 - DNA, 15 bp, Homo sapiens
ggttagggggaggtg

SEQ ID NO: 179101 - DNA, 15 bp, Homo sapiens
tggttagggggaggt

SEQ ID NO: 179102 - DNA, 15 bp, Homo sapiens
ttggttagggggagg

SEQ ID NO: 179103 - DNA, 15 bp, Homo sapiens
tttggttagggggag

SEQ ID NO: 179104 - DNA, 15 bp, Homo sapiens
atttggttaggggga

SEQ ID NO: 179105 - DNA, 15 bp, Homo sapiens
aatttggttaggggg

SEQ ID NO: 179106 - DNA, 15 bp, Homo sapiens
gaatttggttagggg

SEQ ID NO: 179107 - DNA, 15 bp, Homo sapiens
agaatttggttaggg

SEQ ID NO: 179108 - DNA, 15 bp, Homo sapiens
gagaatttggttagg

SEQ ID NO: 179109 - DNA, 15 bp, Homo sapiens
ggagaatttggttag

SEQ ID NO: 179110 - DNA, 15 bp, Homo sapiens
gggagaatttggtta

SEQ ID NO: 179111 - DNA, 15 bp, Homo sapiens
agggagaatttggtt

SEQ ID NO: 179112 - DNA, 15 bp, Homo sapiens
cagggagaatttggt

SEQ ID NO: 179113 - DNA, 15 bp, Homo sapiens
ccagggagaatttgg

SEQ ID NO: 179114 - DNA, 15 bp, Homo sapiens
tccagggagaatttg

SEQ ID NO: 179115 - DNA, 15 bp, Homo sapiens
gtccagggagaattt

SEQ ID NO: 179116 - DNA, 15 bp, Homo sapiens
ggtccagggagaatt

SEQ ID NO: 179117 - DNA, 15 bp, Homo sapiens
gggtccagggagaat

SEQ ID NO: 179118 - DNA, 15 bp, Homo sapiens
ggggtccagggagaa

SEQ ID NO: 179119 - DNA, 15 bp, Homo sapiens
tggggtccagggaga

SEQ ID NO: 179120 - DNA, 15 bp, Homo sapiens
atggggtccagggag

SEQ ID NO: 179121 - DNA, 15 bp, Homo sapiens
aatggggtccaggga

SEQ ID NO: 179122 - DNA, 15 bp, Homo sapiens
gaatggggtccaggg

SEQ ID NO: 179123 - DNA, 15 bp, Homo sapiens
agaatggggtccagg

SEQ ID NO: 179124 - DNA, 15 bp, Homo sapiens
cagaatggggtccag

SEQ ID NO: 179125 - DNA, 15 bp, Homo sapiens
tcagaatggggtcca

SEQ ID NO: 179126 - DNA, 15 bp, Homo sapiens
ctcagaatggggtcc

SEQ ID NO: 179127 - DNA, 15 bp, Homo sapiens
gctcagaatggggtc

SEQ ID NO: 179128 - DNA, 15 bp, Homo sapiens
agctcagaatggggt

SEQ ID NO: 179129 - DNA, 15 bp, Homo sapiens
gagctcagaatgggg

SEQ ID NO: 179130 - DNA, 15 bp, Homo sapiens
ggagctcagaatggg

SEQ ID NO: 179131 - DNA, 15 bp, Homo sapiens
gggagctcagaatgg

SEQ ID NO: 179132 - DNA, 15 bp, Homo sapiens
ggggagctcagaatg

SEQ ID NO: 179133 - DNA, 15 bp, Homo sapiens
tggggagctcagaat

SEQ ID NO: 179134 - DNA, 15 bp, Homo sapiens
atggggagctcagaa

SEQ ID NO: 179135 - DNA, 15 bp, Homo sapiens
gatggggagctcaga

SEQ ID NO: 179136 - DNA, 15 bp, Homo sapiens
tgatggggagctcag

SEQ ID NO: 179137 - DNA, 15 bp, Homo sapiens
gtgatggggagctca

SEQ ID NO: 179138 - DNA, 15 bp, Homo sapiens
ggtgatggggagctc

SEQ ID NO: 179139 - DNA, 15 bp, Homo sapiens
tggtgatggggagct

SEQ ID NO: 179140 - DNA, 15 bp, Homo sapiens
atggtgatggggagc

SEQ ID NO: 179141 - DNA, 15 bp, Homo sapiens
catggtgatggggag

SEQ ID NO: 179142 - DNA, 15 bp, Homo sapiens
ccatggtgatgggga

SEQ ID NO: 179143 - DNA, 15 bp, Homo sapiens
cccatggtgatgggg

SEQ ID NO: 179144 - DNA, 15 bp, Homo sapiens
tcccatggtgatggg

SEQ ID NO: 179145 - DNA, 15 bp, Homo sapiens
ctcccatggtgatgg

SEQ ID NO: 179146 - DNA, 15 bp, Homo sapiens
cctcccatggtgatg

SEQ ID NO: 179147 - DNA, 15 bp, Homo sapiens
acctcccatggtgat

SEQ ID NO: 179148 - DNA, 15 bp, Homo sapiens
cacctcccatggtga

SEQ ID NO: 179149 - DNA, 15 bp, Homo sapiens
ccacctcccatggtg

SEQ ID NO: 179150 - DNA, 15 bp, Homo sapiens
cccacctcccatggt

SEQ ID NO: 179151 - DNA, 15 bp, Homo sapiens
ccccacctcccatgg

SEQ ID NO: 179152 - DNA, 15 bp, Homo sapiens
gccccacctcccatg

SEQ ID NO: 179153 - DNA, 15 bp, Homo sapiens
ggccccacctcccat

SEQ ID NO: 179154 - DNA, 15 bp, Homo sapiens
aggccccacctccca

SEQ ID NO: 179155 - DNA, 15 bp, Homo sapiens
gaggccccacctccc

SEQ ID NO: 179156 - DNA, 15 bp, Homo sapiens
tgaggccccacctcc

SEQ ID NO: 179157 - DNA, 15 bp, Homo sapiens
ttgaggccccacctc

SEQ ID NO: 179158 - DNA, 15 bp, Homo sapiens
attgaggccccacct

SEQ ID NO: 179159 - DNA, 15 bp, Homo sapiens
gattgaggccccacc

SEQ ID NO: 179160 - DNA, 15 bp, Homo sapiens
agattgaggccccac

SEQ ID NO: 179161 - DNA, 15 bp, Homo sapiens
tagattgaggcccca

SEQ ID NO: 179162 - DNA, 15 bp, Homo sapiens
ttagattgaggcccc

SEQ ID NO: 179163 - DNA, 15 bp, Homo sapiens
cttagattgaggccc

SEQ ID NO: 179164 - DNA, 15 bp, Homo sapiens
ccttagattgaggcc

SEQ ID NO: 179165 - DNA, 15 bp, Homo sapiens
gccttagattgaggc

SEQ ID NO: 179166 - DNA, 15 bp, Homo sapiens
ggccttagattgagg

SEQ ID NO: 179167 - DNA, 15 bp, Homo sapiens
aggccttagattgag

SEQ ID NO: 179168 - DNA, 15 bp, Homo sapiens
aaggccttagattga

SEQ ID NO: 179169 - DNA, 15 bp, Homo sapiens
gaaggccttagattg

SEQ ID NO: 179170 - DNA, 15 bp, Homo sapiens
ggaaggccttagatt

SEQ ID NO: 179171 - DNA, 15 bp, Homo sapiens
gggaaggccttagat

SEQ ID NO: 179172 - DNA, 15 bp, Homo sapiens
agggaaggccttaga

SEQ ID NO: 179173 - DNA, 15 bp, Homo sapiens
cagggaaggccttag

SEQ ID NO: 179174 - DNA, 15 bp, Homo sapiens
acagggaaggcctta

SEQ ID NO: 179175 - DNA, 15 bp, Homo sapiens
gacagggaaggcctt

SEQ ID NO: 179176 - DNA, 15 bp, Homo sapiens
tgacagggaaggcct

SEQ ID NO: 179177 - DNA, 15 bp, Homo sapiens
ctgacagggaaggcc

SEQ ID NO: 179178 - DNA, 15 bp, Homo sapiens
tctgacagggaaggc

SEQ ID NO: 179179 - DNA, 15 bp, Homo sapiens
ttctgacagggaagg

SEQ ID NO: 179180 - DNA, 15 bp, Homo sapiens
cttctgacagggaag

SEQ ID NO: 179181 - DNA, 15 bp, Homo sapiens
ccttctgacagggaa

SEQ ID NO: 179182 - DNA, 15 bp, Homo sapiens
cccttctgacaggga

SEQ ID NO: 179183 - DNA, 15 bp, Homo sapiens
ccccttctgacaggg

SEQ ID NO: 179184 - DNA, 15 bp, Homo sapiens
cccccttctgacagg

SEQ ID NO: 179185 - DNA, 15 bp, Homo sapiens
acccccttctgacag

SEQ ID NO: 179186 - DNA, 15 bp, Homo sapiens
aacccccttctgaca

SEQ ID NO: 179187 - DNA, 15 bp, Homo sapiens
caacccccttctgac

SEQ ID NO: 179188 - DNA, 15 bp, Homo sapiens
acaacccccttctga

SEQ ID NO: 179189 - DNA, 15 bp, Homo sapiens
cacaacccccttctg

SEQ ID NO: 179190 - DNA, 15 bp, Homo sapiens
ccacaacccccttct

SEQ ID NO: 179191 - DNA, 15 bp, Homo sapiens
gccacaacccccttc

SEQ ID NO: 179192 - DNA, 15 bp, Homo sapiens
tgccacaaccccctt

SEQ ID NO: 179193 - DNA, 15 bp, Homo sapiens
ttgccacaaccccct

SEQ ID NO: 179194 - DNA, 15 bp, Homo sapiens
tttgccacaaccccc

SEQ ID NO: 179195 - DNA, 15 bp, Homo sapiens
ttttgccacaacccc

SEQ ID NO: 179196 - DNA, 15 bp, Homo sapiens
cttttgccacaaccc

SEQ ID NO: 179197 - DNA, 15 bp, Homo sapiens
gcttttgccacaacc

SEQ ID NO: 179198 - DNA, 15 bp, Homo sapiens
ggcttttgccacaac

SEQ ID NO: 179199 - DNA, 15 bp, Homo sapiens
tggcttttgccacaa

SEQ ID NO: 179200 - DNA, 15 bp, Homo sapiens
gtggcttttgccaca

SEQ ID NO: 179201 - DNA, 15 bp, Homo sapiens
tgtggcttttgccac

SEQ ID NO: 179202 - DNA, 15 bp, Homo sapiens
atgtggcttttgcca

SEQ ID NO: 179203 - DNA, 15 bp, Homo sapiens
aatgtggcttttgcc

SEQ ID NO: 179204 - DNA, 15 bp, Homo sapiens
taatgtggcttttgc

SEQ ID NO: 179205 - DNA, 15 bp, Homo sapiens
gtaatgtggcttttg

SEQ ID NO: 179206 - DNA, 15 bp, Homo sapiens
tgtaatgtggctttt

SEQ ID NO: 179207 - DNA, 15 bp, Homo sapiens
ttgtaatgtggcttt

SEQ ID NO: 179208 - DNA, 15 bp, Homo sapiens
cttgtaatgtggctt

SEQ ID NO: 179209 - DNA, 15 bp, Homo sapiens
gcttgtaatgtggct

SEQ ID NO: 179210 - DNA, 15 bp, Homo sapiens
agcttgtaatgtggc

SEQ ID NO: 179211 - DNA, 15 bp, Homo sapiens
cagcttgtaatgtgg

SEQ ID NO: 179212 - DNA, 15 bp, Homo sapiens
gcagcttgtaatgtg

SEQ ID NO: 179213 - DNA, 15 bp, Homo sapiens
ggcagcttgtaatgt

SEQ ID NO: 179214 - DNA, 15 bp, Homo sapiens
tggcagcttgtaatg

SEQ ID NO: 179215 - DNA, 15 bp, Homo sapiens
atggcagcttgtaat

SEQ ID NO: 179216 - DNA, 15 bp, Homo sapiens
gatggcagcttgtaa

SEQ ID NO: 179217 - DNA, 15 bp, Homo sapiens
ggatggcagcttgta

SEQ ID NO: 179218 - DNA, 15 bp, Homo sapiens
gggatggcagcttgt

SEQ ID NO: 179219 - DNA, 15 bp, Homo sapiens
ggggatggcagcttg

SEQ ID NO: 179220 - DNA, 15 bp, Homo sapiens
aggggatggcagctt

SEQ ID NO: 179221 - DNA, 15 bp, Homo sapiens
gaggggatggcagct

SEQ ID NO: 179222 - DNA, 15 bp, Homo sapiens
ggaggggatggcagc

SEQ ID NO: 179223 - DNA, 15 bp, Homo sapiens
gggaggggatggcag

SEQ ID NO: 179224 - DNA, 15 bp, Homo sapiens
ggggaggggatggca

SEQ ID NO: 179225 - DNA, 15 bp, Homo sapiens
cggggaggggatggc

SEQ ID NO: 179226 - DNA, 15 bp, Homo sapiens
acggggaggggatgg

SEQ ID NO: 179227 - DNA, 15 bp, Homo sapiens
aacggggaggggatg

SEQ ID NO: 179228 - DNA, 15 bp, Homo sapiens
aaacggggaggggat

SEQ ID NO: 179229 - DNA, 15 bp, Homo sapiens
gaaacggggagggga

SEQ ID NO: 179230 - DNA, 15 bp, Homo sapiens
tgaaacggggagggg

SEQ ID NO: 179231 - DNA, 15 bp, Homo sapiens
ctgaaacggggaggg

SEQ ID NO: 179232 - DNA, 15 bp, Homo sapiens
actgaaacggggagg

SEQ ID NO: 179233 - DNA, 15 bp, Homo sapiens
cactgaaacggggag

SEQ ID NO: 179234 - DNA, 15 bp, Homo sapiens
ccactgaaacgggga

SEQ ID NO: 179235 - DNA, 15 bp, Homo sapiens
tccactgaaacgggg

SEQ ID NO: 179236 - DNA, 15 bp, Homo sapiens
gtccactgaaacggg

SEQ ID NO: 179237 - DNA, 15 bp, Homo sapiens
ggtccactgaaacgg

SEQ ID NO: 179238 - DNA, 15 bp, Homo sapiens
gggtccactgaaacg

SEQ ID NO: 179239 - DNA, 15 bp, Homo sapiens
agggtccactgaaac

SEQ ID NO: 179240 - DNA, 15 bp, Homo sapiens
cagggtccactgaaa

SEQ ID NO: 179241 - DNA, 15 bp, Homo sapiens
acagggtccactgaa

SEQ ID NO: 179242 - DNA, 15 bp, Homo sapiens
cacagggtccactga

SEQ ID NO: 179243 - DNA, 15 bp, Homo sapiens
ccacagggtccactg

SEQ ID NO: 179244 - DNA, 15 bp, Homo sapiens
gccacagggtccact

SEQ ID NO: 179245 - DNA, 15 bp, Homo sapiens
ggccacagggtccac

SEQ ID NO: 179246 - DNA, 15 bp, Homo sapiens
tggccacagggtcca

SEQ ID NO: 179247 - DNA, 15 bp, Homo sapiens
ctggccacagggtcc

SEQ ID NO: 179248 - DNA, 15 bp, Homo sapiens
cctggccacagggtc

SEQ ID NO: 179249 - DNA, 15 bp, Homo sapiens
acctggccacagggt

SEQ ID NO: 179250 - DNA, 15 bp, Homo sapiens
cacctggccacaggg

SEQ ID NO: 179251 - DNA, 15 bp, Homo sapiens
gcacctggccacagg

SEQ ID NO: 179252 - DNA, 15 bp, Homo sapiens
agcacctggccacag

SEQ ID NO: 179253 - DNA, 15 bp, Homo sapiens
aagcacctggccaca

SEQ ID NO: 179254 - DNA, 15 bp, Homo sapiens
aaagcacctggccac

SEQ ID NO: 179255 - DNA, 15 bp, Homo sapiens
aaaagcacctggcca

SEQ ID NO: 179256 - DNA, 15 bp, Homo sapiens
gaaaagcacctggcc

SEQ ID NO: 179257 - DNA, 15 bp, Homo sapiens
ggaaaagcacctggc

SEQ ID NO: 179258 - DNA, 15 bp, Homo sapiens
gggaaaagcacctgg

SEQ ID NO: 179259 - DNA, 15 bp, Homo sapiens
agggaaaagcacctg

SEQ ID NO: 179260 - DNA, 15 bp, Homo sapiens
tagggaaaagcacct

SEQ ID NO: 179261 - DNA, 15 bp, Homo sapiens
atagggaaaagcacc

SEQ ID NO: 179262 - DNA, 15 bp, Homo sapiens
gatagggaaaagcac

SEQ ID NO: 179263 - DNA, 15 bp, Homo sapiens
ggatagggaaaagca

SEQ ID NO: 179264 - DNA, 15 bp, Homo sapiens
tggatagggaaaagc

SEQ ID NO: 179265 - DNA, 15 bp, Homo sapiens
gtggatagggaaaag

SEQ ID NO: 179266 - DNA, 15 bp, Homo sapiens
tgtggatagggaaaa

SEQ ID NO: 179267 - DNA, 15 bp, Homo sapiens
ctgtggatagggaaa

SEQ ID NO: 179268 - DNA, 15 bp, Homo sapiens
cctgtggatagggaa

SEQ ID NO: 179269 - DNA, 15 bp, Homo sapiens
ccctgtggataggga

SEQ ID NO: 179270 - DNA, 15 bp, Homo sapiens
cccctgtggataggg

SEQ ID NO: 179271 - DNA, 15 bp, Homo sapiens
acccctgtggatagg

SEQ ID NO: 179272 - DNA, 15 bp, Homo sapiens
cacccctgtggatag

SEQ ID NO: 179273 - DNA, 15 bp, Homo sapiens
acacccctgtggata

SEQ ID NO: 179274 - DNA, 15 bp, Homo sapiens
aacacccctgtggat

SEQ ID NO: 179275 - DNA, 15 bp, Homo sapiens
aaacacccctgtgga

SEQ ID NO: 179276 - DNA, 15 bp, Homo sapiens
caaacacccctgtgg

SEQ ID NO: 179277 - DNA, 15 bp, Homo sapiens
acaaacacccctgtg

SEQ ID NO: 179278 - DNA, 15 bp, Homo sapiens
cacaaacacccctgt

SEQ ID NO: 179279 - DNA, 15 bp, Homo sapiens
acacaaacacccctg

SEQ ID NO: 179280 - DNA, 15 bp, Homo sapiens
cacacaaacacccct

SEQ ID NO: 179281 - DNA, 15 bp, Homo sapiens
acacacaaacacccc

SEQ ID NO: 179282 - DNA, 15 bp, Homo sapiens
cacacacaaacaccc

SEQ ID NO: 179283 - DNA, 15 bp, Homo sapiens
acacacacaaacacc

SEQ ID NO: 179284 - DNA, 15 bp, Homo sapiens
cacacacacaaacac

SEQ ID NO: 179285 - DNA, 15 bp, Homo sapiens
gcacacacacaaaca

SEQ ID NO: 179286 - DNA, 15 bp, Homo sapiens
cgcacacacacaaac

SEQ ID NO: 179287 - DNA, 15 bp, Homo sapiens
gcgcacacacacaaa

SEQ ID NO: 179288 - DNA, 15 bp, Homo sapiens
cgcgcacacacacaa

SEQ ID NO: 179289 - DNA, 15 bp, Homo sapiens
acgcgcacacacaca

SEQ ID NO: 179290 - DNA, 15 bp, Homo sapiens
cacgcgcacacacac

SEQ ID NO: 179291 - DNA, 15 bp, Homo sapiens
acacgcgcacacaca

SEQ ID NO: 179292 - DNA, 15 bp, Homo sapiens
cacacgcgcacacac

SEQ ID NO: 179293 - DNA, 15 bp, Homo sapiens
gcacacgcgcacaca

SEQ ID NO: 179294 - DNA, 15 bp, Homo sapiens
cgcacacgcgcacac

SEQ ID NO: 179295 - DNA, 15 bp, Homo sapiens
acgcacacgcgcaca

SEQ ID NO: 179296 - DNA, 15 bp, Homo sapiens
aacgcacacgcgcac

SEQ ID NO: 179297 - DNA, 15 bp, Homo sapiens
aaacgcacacgcgca

SEQ ID NO: 179298 - DNA, 15 bp, Homo sapiens
gaaacgcacacgcgc

SEQ ID NO: 179299 - DNA, 15 bp, Homo sapiens
tgaaacgcacacgcg

SEQ ID NO: 179300 - DNA, 15 bp, Homo sapiens
ttgaaacgcacacgc

SEQ ID NO: 179301 - DNA, 15 bp, Homo sapiens
attgaaacgcacacg

SEQ ID NO: 179302 - DNA, 15 bp, Homo sapiens
tattgaaacgcacac

SEQ ID NO: 179303 - DNA, 15 bp, Homo sapiens
ttattgaaacgcaca

SEQ ID NO: 179304 - DNA, 15 bp, Homo sapiens
tttattgaaacgcac

SEQ ID NO: 179305 - DNA, 15 bp, Homo sapiens
ctttattgaaacgca

SEQ ID NO: 179306 - DNA, 15 bp, Homo sapiens
actttattgaaacgc

SEQ ID NO: 179307 - DNA, 15 bp, Homo sapiens
aactttattgaaacg

SEQ ID NO: 179308 - DNA, 15 bp, Homo sapiens
aaactttattgaaac

SEQ ID NO: 179309 - DNA, 15 bp, Homo sapiens
caaactttattgaaa

SEQ ID NO: 179310 - DNA, 15 bp, Homo sapiens
acaaactttattgaa

SEQ ID NO: 179311 - DNA, 15 bp, Homo sapiens
tacaaactttattga

SEQ ID NO: 179312 - DNA, 15 bp, Homo sapiens
gtacaaactttattg

SEQ ID NO: 179313 - DNA, 15 bp, Homo sapiens
tgtacaaactttatt

SEQ ID NO: 179314 - DNA, 15 bp, Homo sapiens
gtgtacaaactttat

SEQ ID NO: 179315 - DNA, 15 bp, Homo sapiens
agtgtacaaacttta

SEQ ID NO: 179316 - DNA, 15 bp, Homo sapiens
aagtgtacaaacttt

SEQ ID NO: 179317 - DNA, 15 bp, Homo sapiens
aaagtgtacaaactt

SEQ ID NO: 179318 - DNA, 15 bp, Homo sapiens
gaaagtgtacaaact

SEQ ID NO: 179319 - DNA, 15 bp, Homo sapiens
agaaagtgtacaaac

SEQ ID NO: 179320 - DNA, 15 bp, Homo sapiens
aagaaagtgtacaaa

SEQ ID NO: 179321 - DNA, 15 bp, Homo sapiens
taagaaagtgtacaa

SEQ ID NO: 179322 - DNA, 15 bp, Homo sapiens
ttaagaaagtgtaca

SEQ ID NO: 179323 - DNA, 15 bp, Homo sapiens
gttaagaaagtgtac

SEQ ID NO: 179324 - DNA, 15 bp, Homo sapiens
tgttaagaaagtgta

SEQ ID NO: 179325 - DNA, 15 bp, Homo sapiens
ctgttaagaaagtgt

SEQ ID NO: 179326 - DNA, 15 bp, Homo sapiens
actgttaagaaagtg

SEQ ID NO: 179327 - DNA, 15 bp, Homo sapiens
cactgttaagaaagt

SEQ ID NO: 179328 - DNA, 15 bp, Homo sapiens
acactgttaagaaag

SEQ ID NO: 179329 - DNA, 15 bp, Homo sapiens
gacactgttaagaaa

SEQ ID NO: 179330 - DNA, 15 bp, Homo sapiens
agacactgttaagaa

SEQ ID NO: 179331 - DNA, 15 bp, Homo sapiens
cagacactgttaaga

SEQ ID NO: 179332 - DNA, 15 bp, Homo sapiens
tcagacactgttaag

SEQ ID NO: 179333 - DNA, 15 bp, Homo sapiens
atcagacactgttaa

SEQ ID NO: 179334 - DNA, 15 bp, Homo sapiens
aatcagacactgtta

SEQ ID NO: 179335 - DNA, 15 bp, Homo sapiens
aaatcagacactgtt

SEQ ID NO: 179336 - DNA, 15 bp, Homo sapiens
caaatcagacactgt

SEQ ID NO: 179337 - DNA, 15 bp, Homo sapiens
gcaaatcagacactg

SEQ ID NO: 179338 - DNA, 15 bp, Homo sapiens
ggcaaatcagacact

SEQ ID NO: 179339 - DNA, 15 bp, Homo sapiens
cggcaaatcagacac

SEQ ID NO: 179340 - DNA, 15 bp, Homo sapiens
gcggcaaatcagaca

SEQ ID NO: 179341 - DNA, 15 bp, Homo sapiens
ggcggcaaatcagac

SEQ ID NO: 179342 - DNA, 15 bp, Homo sapiens
gggcggcaaatcaga

SEQ ID NO: 179343 - DNA, 15 bp, Homo sapiens
agggcggcaaatcag

SEQ ID NO: 179344 - DNA, 15 bp, Homo sapiens
cagggcggcaaatca

SEQ ID NO: 179345 - DNA, 15 bp, Homo sapiens
gcagggcggcaaatc

SEQ ID NO: 179346 - DNA, 15 bp, Homo sapiens
ggcagggcggcaaat

SEQ ID NO: 179347 - DNA, 15 bp, Homo sapiens
aggcagggcggcaaa

SEQ ID NO: 179348 - DNA, 15 bp, Homo sapiens
caggcagggcggcaa

SEQ ID NO: 179349 - DNA, 15 bp, Homo sapiens
gcaggcagggcggca

SEQ ID NO: 179350 - DNA, 15 bp, Homo sapiens
ggcaggcagggcggc

SEQ ID NO: 179351 - DNA, 15 bp, Homo sapiens
gggcaggcagggcgg

SEQ ID NO: 179352 - DNA, 15 bp, Homo sapiens
agggcaggcagggcg

SEQ ID NO: 179353 - DNA, 15 bp, Homo sapiens
gagggcaggcagggc

SEQ ID NO: 179354 - DNA, 15 bp, Homo sapiens
ggagggcaggcaggg

SEQ ID NO: 179355 - DNA, 15 bp, Homo sapiens
gggagggcaggcagg

SEQ ID NO: 179356 - DNA, 15 bp, Homo sapiens
ggggagggcaggcag

SEQ ID NO: 179357 - DNA, 15 bp, Homo sapiens
tggggagggcaggca

SEQ ID NO: 179358 - DNA, 15 bp, Homo sapiens
ctggggagggcaggc

SEQ ID NO: 179359 - DNA, 15 bp, Homo sapiens
cctggggagggcagg

SEQ ID NO: 179360 - DNA, 15 bp, Homo sapiens
ccctggggagggcag

SEQ ID NO: 179361 - DNA, 15 bp, Homo sapiens
gccctggggagggca

SEQ ID NO: 179362 - DNA, 15 bp, Homo sapiens
ggccctggggagggc

SEQ ID NO: 179363 - DNA, 15 bp, Homo sapiens
gggccctggggaggg

SEQ ID NO: 179364 - DNA, 15 bp, Homo sapiens
ggggccctggggagg

SEQ ID NO: 179365 - DNA, 15 bp, Homo sapiens
tggggccctggggag

SEQ ID NO: 179366 - DNA, 15 bp, Homo sapiens
ctggggccctgggga

SEQ ID NO: 179367 - DNA, 15 bp, Homo sapiens
tctggggccctgggg

SEQ ID NO: 179368 - DNA, 15 bp, Homo sapiens
ttctggggccctggg

SEQ ID NO: 179369 - DNA, 15 bp, Homo sapiens
gttctggggccctgg

SEQ ID NO: 179370 - DNA, 15 bp, Homo sapiens
tgttctggggccctg

SEQ ID NO: 179371 - DNA, 15 bp, Homo sapiens
ctgttctggggccct

SEQ ID NO: 179372 - DNA, 15 bp, Homo sapiens
cctgttctggggccc

SEQ ID NO: 179373 - DNA, 15 bp, Homo sapiens
ccctgttctggggcc

SEQ ID NO: 179374 - DNA, 15 bp, Homo sapiens
cccctgttctggggc

SEQ ID NO: 179375 - DNA, 15 bp, Homo sapiens
acccctgttctgggg

SEQ ID NO: 179376 - DNA, 15 bp, Homo sapiens
aacccctgttctggg

SEQ ID NO: 179377 - DNA, 15 bp, Homo sapiens
gaacccctgttctgg

SEQ ID NO: 179378 - DNA, 15 bp, Homo sapiens
tgaacccctgttctg

SEQ ID NO: 179379 - DNA, 15 bp, Homo sapiens
gtgaacccctgttct

SEQ ID NO: 179380 - DNA, 15 bp, Homo sapiens
cgtgaacccctgttc

SEQ ID NO: 179381 - DNA, 15 bp, Homo sapiens
acgtgaacccctgtt

SEQ ID NO: 179382 - DNA, 15 bp, Homo sapiens
gacgtgaacccctgt

SEQ ID NO: 179383 - DNA, 15 bp, Homo sapiens
ggacgtgaacccctg

SEQ ID NO: 179384 - DNA, 15 bp, Homo sapiens
tggacgtgaacccct

SEQ ID NO: 179385 - DNA, 15 bp, Homo sapiens
gtggacgtgaacccc

SEQ ID NO: 179386 - DNA, 15 bp, Homo sapiens
agtggacgtgaaccc

SEQ ID NO: 179387 - DNA, 15 bp, Homo sapiens
cagtggacgtgaacc

SEQ ID NO: 179388 - DNA, 15 bp, Homo sapiens
gcagtggacgtgaac

SEQ ID NO: 179389 - DNA, 15 bp, Homo sapiens
ggcagtggacgtgaa

SEQ ID NO: 179390 - DNA, 15 bp, Homo sapiens
tggcagtggacgtga

SEQ ID NO: 179391 - DNA, 15 bp, Homo sapiens
ttggcagtggacgtg

SEQ ID NO: 179392 - DNA, 15 bp, Homo sapiens
gttggcagtggacgt

SEQ ID NO: 179393 - DNA, 15 bp, Homo sapiens
tgttggcagtggacg

SEQ ID NO: 179394 - DNA, 15 bp, Homo sapiens
gtgttggcagtggac

SEQ ID NO: 179395 - DNA, 15 bp, Homo sapiens
agtgttggcagtgga

SEQ ID NO: 179396 - DNA, 15 bp, Homo sapiens
gagtgttggcagtgg

SEQ ID NO: 179397 - DNA, 15 bp, Homo sapiens
ggagtgttggcagtg

SEQ ID NO: 179398 - DNA, 15 bp, Homo sapiens
gggagtgttggcagt

SEQ ID NO: 179399 - DNA, 15 bp, Homo sapiens
ggggagtgttggcag

SEQ ID NO: 179400 - DNA, 15 bp, Homo sapiens
aggggagtgttggca

SEQ ID NO: 179401 - DNA, 15 bp, Homo sapiens
gaggggagtgttggc

SEQ ID NO: 179402 - DNA, 15 bp, Homo sapiens
ggaggggagtgttgg

SEQ ID NO: 179403 - DNA, 15 bp, Homo sapiens
gggaggggagtgttg

SEQ ID NO: 179404 - DNA, 15 bp, Homo sapiens
ggggaggggagtgtt

SEQ ID NO: 179405 - DNA, 15 bp, Homo sapiens
aggggaggggagtgt

SEQ ID NO: 179406 - DNA, 15 bp, Homo sapiens
taggggaggggagtg

SEQ ID NO: 179407 - DNA, 15 bp, Homo sapiens
gtaggggaggggagt

SEQ ID NO: 179408 - DNA, 15 bp, Homo sapiens
cccagggtgcgcgcc

SEQ ID NO: 179409 - DNA, 15 bp, Homo sapiens
acccagggtgcgcgc

SEQ ID NO: 179410 - DNA, 15 bp, Homo sapiens
cacccagggtgcgcg

SEQ ID NO: 179411 - DNA, 15 bp, Homo sapiens
gcacccagggtgcgc

SEQ ID NO: 179412 - DNA, 15 bp, Homo sapiens
cgcacccagggtgcg

SEQ ID NO: 179413 - DNA, 15 bp, Homo sapiens
ccgcacccagggtgc

SEQ ID NO: 179414 - DNA, 15 bp, Homo sapiens
cccgcacccagggtg

SEQ ID NO: 179415 - DNA, 15 bp, Homo sapiens
gcccgcacccagggt

SEQ ID NO: 179416 - DNA, 15 bp, Homo sapiens
ggcccgcacccaggg

SEQ ID NO: 179417 - DNA, 15 bp, Homo sapiens
gggcccgcacccagg

SEQ ID NO: 179418 - DNA, 15 bp, Homo sapiens
cgggcccgcacccag

SEQ ID NO: 179419 - DNA, 15 bp, Homo sapiens
gcgggcccgcaccca

SEQ ID NO: 179420 - DNA, 15 bp, Homo sapiens
cgcgggcccgcaccc

SEQ ID NO: 179421 - DNA, 15 bp, Homo sapiens
gcgcgggcccgcacc

SEQ ID NO: 179422 - DNA, 15 bp, Homo sapiens
cgcgcgggcccgcac

SEQ ID NO: 179423 - DNA, 15 bp, Homo sapiens
ccgcgcgggcccgca

SEQ ID NO: 179424 - DNA, 15 bp, Homo sapiens
cccgcgcgggcccgc

SEQ ID NO: 179425 - DNA, 15 bp, Homo sapiens
tcccgcgcgggcccg

SEQ ID NO: 179426 - DNA, 15 bp, Homo sapiens
ctcccgcgcgggccc

SEQ ID NO: 179427 - DNA, 15 bp, Homo sapiens
cctcccgcgcgggcc

SEQ ID NO: 179428 - DNA, 15 bp, Homo sapiens
ccctcccgcgcgggc

SEQ ID NO: 179429 - DNA, 15 bp, Homo sapiens
cccctcccgcgcggg

SEQ ID NO: 179430 - DNA, 15 bp, Homo sapiens
gcccctcccgcgcgg

SEQ ID NO: 179431 - DNA, 15 bp, Homo sapiens
cgcccctcccgcgcg

SEQ ID NO: 179432 - DNA, 15 bp, Homo sapiens
ccgcccctcccgcgc

SEQ ID NO: 179433 - DNA, 15 bp, Homo sapiens
accgcccctcccgcg

SEQ ID NO: 179434 - DNA, 15 bp, Homo sapiens
caccgcccctcccgc

SEQ ID NO: 179435 - DNA, 15 bp, Homo sapiens
gcaccgcccctcccg

SEQ ID NO: 179436 - DNA, 15 bp, Homo sapiens
ggcaccgcccctccc

SEQ ID NO: 179437 - DNA, 15 bp, Homo sapiens
tggcaccgcccctcc

SEQ ID NO: 179438 - DNA, 15 bp, Homo sapiens
ctggcaccgcccctc

SEQ ID NO: 179439 - DNA, 15 bp, Homo sapiens
cctggcaccgcccct

SEQ ID NO: 179440 - DNA, 15 bp, Homo sapiens
gcctggcaccgcccc

SEQ ID NO: 179441 - DNA, 15 bp, Homo sapiens
ggcctggcaccgccc

SEQ ID NO: 179442 - DNA, 15 bp, Homo sapiens
gggcctggcaccgcc

SEQ ID NO: 179443 - DNA, 15 bp, Homo sapiens
agggcctggcaccgc

SEQ ID NO: 179444 - DNA, 15 bp, Homo sapiens
cagggcctggcaccg

SEQ ID NO: 179445 - DNA, 15 bp, Homo sapiens
gcagggcctggcacc

SEQ ID NO: 179446 - DNA, 15 bp, Homo sapiens
cgcagggcctggcac

SEQ ID NO: 179447 - DNA, 15 bp, Homo sapiens
gcgcagggcctggca

SEQ ID NO: 179448 - DNA, 15 bp, Homo sapiens
cgcgcagggcctggc

SEQ ID NO: 179449 - DNA, 15 bp, Homo sapiens
ccgcgcagggcctgg

SEQ ID NO: 179450 - DNA, 15 bp, Homo sapiens
cccgcgcagggcctg

SEQ ID NO: 179451 - DNA, 15 bp, Homo sapiens
gcccgcgcagggcct

SEQ ID NO: 179452 - DNA, 15 bp, Homo sapiens
cgcccgcgcagggcc

SEQ ID NO: 179453 - DNA, 15 bp, Homo sapiens
gcgcccgcgcagggc

SEQ ID NO: 179454 - DNA, 15 bp, Homo sapiens
agcgcccgcgcaggg

SEQ ID NO: 179455 - DNA, 15 bp, Homo sapiens
tagcgcccgcgcagg

SEQ ID NO: 179456 - DNA, 15 bp, Homo sapiens
gtagcgcccgcgcag

SEQ ID NO: 179457 - DNA, 15 bp, Homo sapiens
agtagcgcccgcgca

SEQ ID NO: 179458 - DNA, 15 bp, Homo sapiens
aagtagcgcccgcgc

SEQ ID NO: 179459 - DNA, 15 bp, Homo sapiens
caagtagcgcccgcg

SEQ ID NO: 179460 - DNA, 15 bp, Homo sapiens
tcaagtagcgcccgc

SEQ ID NO: 179461 - DNA, 15 bp, Homo sapiens
gtcaagtagcgcccg

SEQ ID NO: 179462 - DNA, 15 bp, Homo sapiens
cgtcaagtagcgccc

SEQ ID NO: 179463 - DNA, 15 bp, Homo sapiens
acgtcaagtagcgcc

SEQ ID NO: 179464 - DNA, 15 bp, Homo sapiens
aacgtcaagtagcgc

SEQ ID NO: 179465 - DNA, 15 bp, Homo sapiens
caacgtcaagtagcg

SEQ ID NO: 179466 - DNA, 15 bp, Homo sapiens
tcaacgtcaagtagc

SEQ ID NO: 179467 - DNA, 15 bp, Homo sapiens
ttcaacgtcaagtag

SEQ ID NO: 179468 - DNA, 15 bp, Homo sapiens
gttcaacgtcaagta

SEQ ID NO: 179469 - DNA, 15 bp, Homo sapiens
tgttcaacgtcaagt

SEQ ID NO: 179470 - DNA, 15 bp, Homo sapiens
gtgttcaacgtcaag

SEQ ID NO: 179471 - DNA, 15 bp, Homo sapiens
ggtgttcaacgtcaa

SEQ ID NO: 179472 - DNA, 15 bp, Homo sapiens
tggtgttcaacgtca

SEQ ID NO: 179473 - DNA, 15 bp, Homo sapiens
atggtgttcaacgtc

SEQ ID NO: 179474 - DNA, 15 bp, Homo sapiens
gatggtgttcaacgt

SEQ ID NO: 179475 - DNA, 15 bp, Homo sapiens
tgatggtgttcaacg

SEQ ID NO: 179476 - DNA, 15 bp, Homo sapiens
ctgatggtgttcaac

SEQ ID NO: 179477 - DNA, 15 bp, Homo sapiens
gctgatggtgttcaa

SEQ ID NO: 179478 - DNA, 15 bp, Homo sapiens
cgctgatggtgttca

SEQ ID NO: 179479 - DNA, 15 bp, Homo sapiens
ccgctgatggtgttc

SEQ ID NO: 179480 - DNA, 15 bp, Homo sapiens
gccgctgatggtgtt

SEQ ID NO: 179481 - DNA, 15 bp, Homo sapiens
ggccgctgatggtgt

SEQ ID NO: 179482 - DNA, 15 bp, Homo sapiens
cggccgctgatggtg

SEQ ID NO: 179483 - DNA, 15 bp, Homo sapiens
gcggccgctgatggt

SEQ ID NO: 179484 - DNA, 15 bp, Homo sapiens
agcggccgctgatgg

SEQ ID NO: 179485 - DNA, 15 bp, Homo sapiens
gagcggccgctgatg

SEQ ID NO: 179486 - DNA, 15 bp, Homo sapiens
ggagcggccgctgat

SEQ ID NO: 179487 - DNA, 15 bp, Homo sapiens
aggagcggccgctga

SEQ ID NO: 179488 - DNA, 15 bp, Homo sapiens
gaggagcggccgctg

SEQ ID NO: 179489 - DNA, 15 bp, Homo sapiens
ggaggagcggccgct

SEQ ID NO: 179490 - DNA, 15 bp, Homo sapiens
gggaggagcggccgc

SEQ ID NO: 179491 - DNA, 15 bp, Homo sapiens
cgggaggagcggccg

SEQ ID NO: 179492 - DNA, 15 bp, Homo sapiens
gcgggaggagcggcc

SEQ ID NO: 179493 - DNA, 15 bp, Homo sapiens
ggcgggaggagcggc

SEQ ID NO: 179494 - DNA, 15 bp, Homo sapiens
cggcgggaggagcgg

SEQ ID NO: 179495 - DNA, 15 bp, Homo sapiens
gcggcgggaggagcg

SEQ ID NO: 179496 - DNA, 15 bp, Homo sapiens
agcggcgggaggagc

SEQ ID NO: 179497 - DNA, 15 bp, Homo sapiens
cagcggcgggaggag

SEQ ID NO: 179498 - DNA, 15 bp, Homo sapiens
gcagcggcgggagga

SEQ ID NO: 179499 - DNA, 15 bp, Homo sapiens
ggcagcggcgggagg

SEQ ID NO: 179500 - DNA, 15 bp, Homo sapiens
tggcagcggcgggag

SEQ ID NO: 179501 - DNA, 15 bp, Homo sapiens
gtggcagcggcggga

SEQ ID NO: 179502 - DNA, 15 bp, Homo sapiens
cgtggcagcggcggg

SEQ ID NO: 179503 - DNA, 15 bp, Homo sapiens
ccgtggcagcggcgg

SEQ ID NO: 179504 - DNA, 15 bp, Homo sapiens
cccgtggcagcggcg

SEQ ID NO: 179505 - DNA, 15 bp, Homo sapiens
gcccgtggcagcggc

SEQ ID NO: 179506 - DNA, 15 bp, Homo sapiens
agcccgtggcagcgg

SEQ ID NO: 179507 - DNA, 15 bp, Homo sapiens
gagcccgtggcagcg

SEQ ID NO: 179508 - DNA, 15 bp, Homo sapiens
agagcccgtggcagc

SEQ ID NO: 179509 - DNA, 15 bp, Homo sapiens
aagagcccgtggcag

SEQ ID NO: 179510 - DNA, 15 bp, Homo sapiens
gaagagcccgtggca

SEQ ID NO: 179511 - DNA, 15 bp, Homo sapiens
agaagagcccgtggc

SEQ ID NO: 179512 - DNA, 15 bp, Homo sapiens
aagaagagcccgtgg

SEQ ID NO: 179513 - DNA, 15 bp, Homo sapiens
caagaagagcccgtg

SEQ ID NO: 179514 - DNA, 15 bp, Homo sapiens
acaagaagagcccgt

SEQ ID NO: 179515 - DNA, 15 bp, Homo sapiens
gacaagaagagcccg

SEQ ID NO: 179516 - DNA, 15 bp, Homo sapiens
agacaagaagagccc

SEQ ID NO: 179517 - DNA, 15 bp, Homo sapiens
gagacaagaagagcc

SEQ ID NO: 179518 - DNA, 15 bp, Homo sapiens
ggagacaagaagagc

SEQ ID NO: 179519 - DNA, 15 bp, Homo sapiens
gggagacaagaagag

SEQ ID NO: 179520 - DNA, 15 bp, Homo sapiens
cgggagacaagaaga

SEQ ID NO: 179521 - DNA, 15 bp, Homo sapiens
gcgggagacaagaag

SEQ ID NO: 179522 - DNA, 15 bp, Homo sapiens
ggcgggagacaagaa

SEQ ID NO: 179523 - DNA, 15 bp, Homo sapiens
aggcgggagacaaga

SEQ ID NO: 179524 - DNA, 15 bp, Homo sapiens
gaggcgggagacaag

SEQ ID NO: 179525 - DNA, 15 bp, Homo sapiens
cgaggcgggagacaa

SEQ ID NO: 179526 - DNA, 15 bp, Homo sapiens
acgaggcgggagaca

SEQ ID NO: 179527 - DNA, 15 bp, Homo sapiens
gacgaggcgggagac

SEQ ID NO: 179528 - DNA, 15 bp, Homo sapiens
cgacgaggcgggaga

SEQ ID NO: 179529 - DNA, 15 bp, Homo sapiens
gcgacgaggcgggag

SEQ ID NO: 179530 - DNA, 15 bp, Homo sapiens
ggcgacgaggcggga

SEQ ID NO: 179531 - DNA, 15 bp, Homo sapiens
gggcgacgaggcggg

SEQ ID NO: 179532 - DNA, 15 bp, Homo sapiens
tgggcgacgaggcgg

SEQ ID NO: 179533 - DNA, 15 bp, Homo sapiens
gtgggcgacgaggcg

SEQ ID NO: 179534 - DNA, 15 bp, Homo sapiens
ggtgggcgacgaggc

SEQ ID NO: 179535 - DNA, 15 bp, Homo sapiens
aggtgggcgacgagg

SEQ ID NO: 179536 - DNA, 15 bp, Homo sapiens
gaggtgggcgacgag

SEQ ID NO: 179537 - DNA, 15 bp, Homo sapiens
ggaggtgggcgacga

SEQ ID NO: 179538 - DNA, 15 bp, Homo sapiens
cggaggtgggcgacg

SEQ ID NO: 179539 - DNA, 15 bp, Homo sapiens
gcggaggtgggcgac

SEQ ID NO: 179540 - DNA, 15 bp, Homo sapiens
ggcggaggtgggcga

SEQ ID NO: 179541 - DNA, 15 bp, Homo sapiens
gggcggaggtgggcg

SEQ ID NO: 179542 - DNA, 15 bp, Homo sapiens
ggggcggaggtgggc

SEQ ID NO: 179543 - DNA, 15 bp, Homo sapiens
gggggcggaggtggg

SEQ ID NO: 179544 - DNA, 15 bp, Homo sapiens
tgggggcggaggtgg

SEQ ID NO: 179545 - DNA, 15 bp, Homo sapiens
ctgggggcggaggtg

SEQ ID NO: 179546 - DNA, 15 bp, Homo sapiens
gctgggggcggaggt

SEQ ID NO: 179547 - DNA, 15 bp, Homo sapiens
agctgggggcggagg

SEQ ID NO: 179548 - DNA, 15 bp, Homo sapiens
gagctgggggcggag

SEQ ID NO: 179549 - DNA, 15 bp, Homo sapiens
cgagctgggggcgga

SEQ ID NO: 179550 - DNA, 15 bp, Homo sapiens
acgagctgggggcgg

SEQ ID NO: 179551 - DNA, 15 bp, Homo sapiens
gacgagctgggggcg

SEQ ID NO: 179552 - DNA, 15 bp, Homo sapiens
ggacgagctgggggc

SEQ ID NO: 179553 - DNA, 15 bp, Homo sapiens
aggacgagctggggg

SEQ ID NO: 179554 - DNA, 15 bp, Homo sapiens
gaggacgagctgggg

SEQ ID NO: 179555 - DNA, 15 bp, Homo sapiens
ggaggacgagctggg

SEQ ID NO: 179556 - DNA, 15 bp, Homo sapiens
cggaggacgagctgg

SEQ ID NO: 179557 - DNA, 15 bp, Homo sapiens
ccggaggacgagctg

SEQ ID NO: 179558 - DNA, 15 bp, Homo sapiens
cccggaggacgagct

SEQ ID NO: 179559 - DNA, 15 bp, Homo sapiens
gcccggaggacgagc

SEQ ID NO: 179560 - DNA, 15 bp, Homo sapiens
agcccggaggacgag

SEQ ID NO: 179561 - DNA, 15 bp, Homo sapiens
cagcccggaggacga

SEQ ID NO: 179562 - DNA, 15 bp, Homo sapiens
ccagcccggaggacg

SEQ ID NO: 179563 - DNA, 15 bp, Homo sapiens
accagcccggaggac

SEQ ID NO: 179564 - DNA, 15 bp, Homo sapiens
caccagcccggagga

SEQ ID NO: 179565 - DNA, 15 bp, Homo sapiens
tcaccagcccggagg

SEQ ID NO: 179566 - DNA, 15 bp, Homo sapiens
ctcaccagcccggag

SEQ ID NO: 179567 - DNA, 15 bp, Homo sapiens
gctcaccagcccgga

SEQ ID NO: 179568 - DNA, 15 bp, Homo sapiens
cgctcaccagcccgg

SEQ ID NO: 179569 - DNA, 15 bp, Homo sapiens
tcgctcaccagcccg

SEQ ID NO: 179570 - DNA, 15 bp, Homo sapiens
ctcgctcaccagccc

SEQ ID NO: 179571 - DNA, 15 bp, Homo sapiens
actcgctcaccagcc

SEQ ID NO: 179572 - DNA, 15 bp, Homo sapiens
gactcgctcaccagc

SEQ ID NO: 179573 - DNA, 15 bp, Homo sapiens
cgactcgctcaccag

SEQ ID NO: 179574 - DNA, 15 bp, Homo sapiens
gcgactcgctcacca

SEQ ID NO: 179575 - DNA, 15 bp, Homo sapiens
cgcgactcgctcacc

SEQ ID NO: 179576 - DNA, 15 bp, Homo sapiens
gcgcgactcgctcac

SEQ ID NO: 179577 - DNA, 15 bp, Homo sapiens
ggcgcgactcgctca

SEQ ID NO: 179578 - DNA, 15 bp, Homo sapiens
cggcgcgactcgctc

SEQ ID NO: 179579 - DNA, 15 bp, Homo sapiens
gcggcgcgactcgct

SEQ ID NO: 179580 - DNA, 15 bp, Homo sapiens
tgcggcgcgactcgc

SEQ ID NO: 179581 - DNA, 15 bp, Homo sapiens
ctgcggcgcgactcg

SEQ ID NO: 179582 - DNA, 15 bp, Homo sapiens
gctgcggcgcgactc

SEQ ID NO: 179583 - DNA, 15 bp, Homo sapiens
agctgcggcgcgact

SEQ ID NO: 179584 - DNA, 15 bp, Homo sapiens
gagctgcggcgcgac

SEQ ID NO: 179585 - DNA, 15 bp, Homo sapiens
cgagctgcggcgcga

SEQ ID NO: 179586 - DNA, 15 bp, Homo sapiens
gcgagctgcggcgcg

SEQ ID NO: 179587 - DNA, 15 bp, Homo sapiens
agcgagctgcggcgc

SEQ ID NO: 179588 - DNA, 15 bp, Homo sapiens
cagcgagctgcggcg

SEQ ID NO: 179589 - DNA, 15 bp, Homo sapiens
ccagcgagctgcggc

SEQ ID NO: 179590 - DNA, 15 bp, Homo sapiens
gccagcgagctgcgg

SEQ ID NO: 179591 - DNA, 15 bp, Homo sapiens
cgccagcgagctgcg

SEQ ID NO: 179592 - DNA, 15 bp, Homo sapiens
gcgccagcgagctgc

SEQ ID NO: 179593 - DNA, 15 bp, Homo sapiens
agcgccagcgagctg

SEQ ID NO: 179594 - DNA, 15 bp, Homo sapiens
cagcgccagcgagct

SEQ ID NO: 179595 - DNA, 15 bp, Homo sapiens
gcagcgccagcgagc

SEQ ID NO: 179596 - DNA, 15 bp, Homo sapiens
agcagcgccagcgag

SEQ ID NO: 179597 - DNA, 15 bp, Homo sapiens
cagcagcgccagcga

SEQ ID NO: 179598 - DNA, 15 bp, Homo sapiens
gcagcagcgccagcg

SEQ ID NO: 179599 - DNA, 15 bp, Homo sapiens
cgcagcagcgccagc

SEQ ID NO: 179600 - DNA, 15 bp, Homo sapiens
ccgcagcagcgccag

SEQ ID NO: 179601 - DNA, 15 bp, Homo sapiens
cccgcagcagcgcca

SEQ ID NO: 179602 - DNA, 15 bp, Homo sapiens
tcccgcagcagcgcc

SEQ ID NO: 179603 - DNA, 15 bp, Homo sapiens
ctcccgcagcagcgc

SEQ ID NO: 179604 - DNA, 15 bp, Homo sapiens
gctcccgcagcagcg

SEQ ID NO: 179605 - DNA, 15 bp, Homo sapiens
agctcccgcagcagc

SEQ ID NO: 179606 - DNA, 15 bp, Homo sapiens
cagctcccgcagcag

SEQ ID NO: 179607 - DNA, 15 bp, Homo sapiens
acagctcccgcagca

SEQ ID NO: 179608 - DNA, 15 bp, Homo sapiens
gacagctcccgcagc

SEQ ID NO: 179609 - DNA, 15 bp, Homo sapiens
ggacagctcccgcag

SEQ ID NO: 179610 - DNA, 15 bp, Homo sapiens
gggacagctcccgca

SEQ ID NO: 179611 - DNA, 15 bp, Homo sapiens
ggggacagctcccgc

SEQ ID NO: 179612 - DNA, 15 bp, Homo sapiens
cggggacagctcccg

SEQ ID NO: 179613 - DNA, 15 bp, Homo sapiens
gcggggacagctccc

SEQ ID NO: 179614 - DNA, 15 bp, Homo sapiens
cgcggggacagctcc

SEQ ID NO: 179615 - DNA, 15 bp, Homo sapiens
ccgcggggacagctc

SEQ ID NO: 179616 - DNA, 15 bp, Homo sapiens
gccgcggggacagct

SEQ ID NO: 179617 - DNA, 15 bp, Homo sapiens
agccgcggggacagc

SEQ ID NO: 179618 - DNA, 15 bp, Homo sapiens
cagccgcggggacag

SEQ ID NO: 179619 - DNA, 15 bp, Homo sapiens
gcagccgcggggaca

SEQ ID NO: 179620 - DNA, 15 bp, Homo sapiens
cgcagccgcggggac

SEQ ID NO: 179621 - DNA, 15 bp, Homo sapiens
ccgcagccgcgggga

SEQ ID NO: 179622 - DNA, 15 bp, Homo sapiens
gccgcagccgcgggg

SEQ ID NO: 179623 - DNA, 15 bp, Homo sapiens
ggccgcagccgcggg

SEQ ID NO: 179624 - DNA, 15 bp, Homo sapiens
gggccgcagccgcgg

SEQ ID NO: 179625 - DNA, 15 bp, Homo sapiens
ggggccgcagccgcg

SEQ ID NO: 179626 - DNA, 15 bp, Homo sapiens
cggggccgcagccgc

SEQ ID NO: 179627 - DNA, 15 bp, Homo sapiens
gcggggccgcagccg

SEQ ID NO: 179628 - DNA, 15 bp, Homo sapiens
ggcggggccgcagcc

SEQ ID NO: 179629 - DNA, 15 bp, Homo sapiens
gggcggggccgcagc

SEQ ID NO: 179630 - DNA, 15 bp, Homo sapiens
ggggcggggccgcag

SEQ ID NO: 179631 - DNA, 15 bp, Homo sapiens
gggggcggggccgca

SEQ ID NO: 179632 - DNA, 15 bp, Homo sapiens
cgggggcggggccgc

SEQ ID NO: 179633 - DNA, 15 bp, Homo sapiens
ccgggggcggggccg

SEQ ID NO: 179634 - DNA, 15 bp, Homo sapiens
cccgggggcggggcc

SEQ ID NO: 179635 - DNA, 15 bp, Homo sapiens
ccccgggggcggggc

SEQ ID NO: 179636 - DNA, 15 bp, Homo sapiens
accccgggggcgggg

SEQ ID NO: 179637 - DNA, 15 bp, Homo sapiens
taccccgggggcggg

SEQ ID NO: 179638 - DNA, 15 bp, Homo sapiens
gtaccccgggggcgg

SEQ ID NO: 179639 - DNA, 15 bp, Homo sapiens
ggtaccccgggggcg

SEQ ID NO: 179640 - DNA, 15 bp, Homo sapiens
cggtaccccgggggc

SEQ ID NO: 179641 - DNA, 15 bp, Homo sapiens
acggtaccccggggg

SEQ ID NO: 179642 - DNA, 15 bp, Homo sapiens
cacggtaccccgggg

SEQ ID NO: 179643 - DNA, 15 bp, Homo sapiens
ccacggtaccccggg

SEQ ID NO: 179644 - DNA, 15 bp, Homo sapiens
gccacggtaccccgg

SEQ ID NO: 179645 - DNA, 15 bp, Homo sapiens
ggccacggtaccccg

SEQ ID NO: 179646 - DNA, 15 bp, Homo sapiens
cggccacggtacccc

SEQ ID NO: 179647 - DNA, 15 bp, Homo sapiens
gcggccacggtaccc

SEQ ID NO: 179648 - DNA, 15 bp, Homo sapiens
ggcggccacggtacc

SEQ ID NO: 179649 - DNA, 15 bp, Homo sapiens
gggcggccacggtac

SEQ ID NO: 179650 - DNA, 15 bp, Homo sapiens
cgggcggccacggta

SEQ ID NO: 179651 - DNA, 15 bp, Homo sapiens
ccgggcggccacggt

SEQ ID NO: 179652 - DNA, 15 bp, Homo sapiens
gccgggcggccacgg

SEQ ID NO: 179653 - DNA, 15 bp, Homo sapiens
ggccgggcggccacg

SEQ ID NO: 179654 - DNA, 15 bp, Homo sapiens
gggccgggcggccac

SEQ ID NO: 179655 - DNA, 15 bp, Homo sapiens
agggccgggcggcca

SEQ ID NO: 179656 - DNA, 15 bp, Homo sapiens
gagggccgggcggcc

SEQ ID NO: 179657 - DNA, 15 bp, Homo sapiens
cgagggccgggcggc

SEQ ID NO: 179658 - DNA, 15 bp, Homo sapiens
ccgagggccgggcgg

SEQ ID NO: 179659 - DNA, 15 bp, Homo sapiens
cccgagggccgggcg

SEQ ID NO: 179660 - DNA, 15 bp, Homo sapiens
gcccgagggccgggc

SEQ ID NO: 179661 - DNA, 15 bp, Homo sapiens
cgcccgagggccggg

SEQ ID NO: 179662 - DNA, 15 bp, Homo sapiens
gcgcccgagggccgg

SEQ ID NO: 179663 - DNA, 15 bp, Homo sapiens
ggcgcccgagggccg

SEQ ID NO: 179664 - DNA, 15 bp, Homo sapiens
cggcgcccgagggcc

SEQ ID NO: 179665 - DNA, 15 bp, Homo sapiens
gcggcgcccgagggc

SEQ ID NO: 179666 - DNA, 15 bp, Homo sapiens
ggcggcgcccgaggg

SEQ ID NO: 179667 - DNA, 15 bp, Homo sapiens
tggcggcgcccgagg

SEQ ID NO: 179668 - DNA, 15 bp, Homo sapiens
gtggcggcgcccgag

SEQ ID NO: 179669 - DNA, 15 bp, Homo sapiens
ggtggcggcgcccga

SEQ ID NO: 179670 - DNA, 15 bp, Homo sapiens
aggtggcggcgcccg

SEQ ID NO: 179671 - DNA, 15 bp, Homo sapiens
gaggtggcggcgccc

SEQ ID NO: 179672 - DNA, 15 bp, Homo sapiens
cgaggtggcggcgcc

SEQ ID NO: 179673 - DNA, 15 bp, Homo sapiens
acgaggtggcggcgc

SEQ ID NO: 179674 - DNA, 15 bp, Homo sapiens
gacgaggtggcggcg

SEQ ID NO: 179675 - DNA, 15 bp, Homo sapiens
ggacgaggtggcggc

SEQ ID NO: 179676 - DNA, 15 bp, Homo sapiens
tggacgaggtggcgg

SEQ ID NO: 179677 - DNA, 15 bp, Homo sapiens
ctggacgaggtggcg

SEQ ID NO: 179678 - DNA, 15 bp, Homo sapiens
gctggacgaggtggc

SEQ ID NO: 179679 - DNA, 15 bp, Homo sapiens
tgctggacgaggtgg

SEQ ID NO: 179680 - DNA, 15 bp, Homo sapiens
ctgctggacgaggtg

SEQ ID NO: 179681 - DNA, 15 bp, Homo sapiens
gctgctggacgaggt

SEQ ID NO: 179682 - DNA, 15 bp, Homo sapiens
cgctgctggacgagg

SEQ ID NO: 179683 - DNA, 15 bp, Homo sapiens
ccgctgctggacgag

SEQ ID NO: 179684 - DNA, 15 bp, Homo sapiens
gccgctgctggacga

SEQ ID NO: 179685 - DNA, 15 bp, Homo sapiens
cgccgctgctggacg

SEQ ID NO: 179686 - DNA, 15 bp, Homo sapiens
acgccgctgctggac

SEQ ID NO: 179687 - DNA, 15 bp, Homo sapiens
gacgccgctgctgga

SEQ ID NO: 179688 - DNA, 15 bp, Homo sapiens
tgacgccgctgctgg

SEQ ID NO: 179689 - DNA, 15 bp, Homo sapiens
ctgacgccgctgctg

SEQ ID NO: 179690 - DNA, 15 bp, Homo sapiens
gctgacgccgctgct

SEQ ID NO: 179691 - DNA, 15 bp, Homo sapiens
cgctgacgccgctgc

SEQ ID NO: 179692 - DNA, 15 bp, Homo sapiens
tcgctgacgccgctg

SEQ ID NO: 179693 - DNA, 15 bp, Homo sapiens
ctcgctgacgccgct

SEQ ID NO: 179694 - DNA, 15 bp, Homo sapiens
actcgctgacgccgc

SEQ ID NO: 179695 - DNA, 15 bp, Homo sapiens
aactcgctgacgccg

SEQ ID NO: 179696 - DNA, 15 bp, Homo sapiens
caactcgctgacgcc

SEQ ID NO: 179697 - DNA, 15 bp, Homo sapiens
acaactcgctgacgc

SEQ ID NO: 179698 - DNA, 15 bp, Homo sapiens
gacaactcgctgacg

SEQ ID NO: 179699 - DNA, 15 bp, Homo sapiens
ggacaactcgctgac

SEQ ID NO: 179700 - DNA, 15 bp, Homo sapiens
aggacaactcgctga

SEQ ID NO: 179701 - DNA, 15 bp, Homo sapiens
gaggacaactcgctg

SEQ ID NO: 179702 - DNA, 15 bp, Homo sapiens
ggaggacaactcgct

SEQ ID NO: 179703 - DNA, 15 bp, Homo sapiens
cggaggacaactcgc

SEQ ID NO: 179704 - DNA, 15 bp, Homo sapiens
ccggaggacaactcg

SEQ ID NO: 179705 - DNA, 15 bp, Homo sapiens
tccggaggacaactc

SEQ ID NO: 179706 - DNA, 15 bp, Homo sapiens
ctccggaggacaact

SEQ ID NO: 179707 - DNA, 15 bp, Homo sapiens
tctccggaggacaac

SEQ ID NO: 179708 - DNA, 15 bp, Homo sapiens
ctctccggaggacaa

SEQ ID NO: 179709 - DNA, 15 bp, Homo sapiens
gctctccggaggaca

SEQ ID NO: 179710 - DNA, 15 bp, Homo sapiens
tgctctccggaggac

SEQ ID NO: 179711 - DNA, 15 bp, Homo sapiens
ctgctctccggagga

SEQ ID NO: 179712 - DNA, 15 bp, Homo sapiens
tctgctctccggagg

SEQ ID NO: 179713 - DNA, 15 bp, Homo sapiens
ctctgctctccggag

SEQ ID NO: 179714 - DNA, 15 bp, Homo sapiens
cctctgctctccgga

SEQ ID NO: 179715 - DNA, 15 bp, Homo sapiens
gcctctgctctccgg

SEQ ID NO: 179716 - DNA, 15 bp, Homo sapiens
ggcctctgctctccg

SEQ ID NO: 179717 - DNA, 15 bp, Homo sapiens
gggcctctgctctcc

SEQ ID NO: 179718 - DNA, 15 bp, Homo sapiens
cgggcctctgctctc

SEQ ID NO: 179719 - DNA, 15 bp, Homo sapiens
acgggcctctgctct

SEQ ID NO: 179720 - DNA, 15 bp, Homo sapiens
cacgggcctctgctc

SEQ ID NO: 179721 - DNA, 15 bp, Homo sapiens
gcacgggcctctgct

SEQ ID NO: 179722 - DNA, 15 bp, Homo sapiens
cgcacgggcctctgc

SEQ ID NO: 179723 - DNA, 15 bp, Homo sapiens
ccgcacgggcctctg

SEQ ID NO: 179724 - DNA, 15 bp, Homo sapiens
gccgcacgggcctct

SEQ ID NO: 179725 - DNA, 15 bp, Homo sapiens
agccgcacgggcctc

SEQ ID NO: 179726 - DNA, 15 bp, Homo sapiens
gagccgcacgggcct

SEQ ID NO: 179727 - DNA, 15 bp, Homo sapiens
agagccgcacgggcc

SEQ ID NO: 179728 - DNA, 15 bp, Homo sapiens
gagagccgcacgggc

SEQ ID NO: 179729 - DNA, 15 bp, Homo sapiens
cgagagccgcacggg

SEQ ID NO: 179730 - DNA, 15 bp, Homo sapiens
gcgagagccgcacgg

SEQ ID NO: 179731 - DNA, 15 bp, Homo sapiens
agcgagagccgcacg

SEQ ID NO: 179732 - DNA, 15 bp, Homo sapiens
cagcgagagccgcac

SEQ ID NO: 179733 - DNA, 15 bp, Homo sapiens
gcagcgagagccgca

SEQ ID NO: 179734 - DNA, 15 bp, Homo sapiens
agcagcgagagccgc

SEQ ID NO: 179735 - DNA, 15 bp, Homo sapiens
cagcagcgagagccg

SEQ ID NO: 179736 - DNA, 15 bp, Homo sapiens
gcagcagcgagagcc

SEQ ID NO: 179737 - DNA, 15 bp, Homo sapiens
agcagcagcgagagc

SEQ ID NO: 179738 - DNA, 15 bp, Homo sapiens
cagcagcagcgagag

SEQ ID NO: 179739 - DNA, 15 bp, Homo sapiens
ccagcagcagcgaga

SEQ ID NO: 179740 - DNA, 15 bp, Homo sapiens
cccagcagcagcgag

SEQ ID NO: 179741 - DNA, 15 bp, Homo sapiens
gcccagcagcagcga

SEQ ID NO: 179742 - DNA, 15 bp, Homo sapiens
agcccagcagcagcg

SEQ ID NO: 179743 - DNA, 15 bp, Homo sapiens
gagcccagcagcagc

SEQ ID NO: 179744 - DNA, 15 bp, Homo sapiens
ggagcccagcagcag

SEQ ID NO: 179745 - DNA, 15 bp, Homo sapiens
cggagcccagcagca

SEQ ID NO: 179746 - DNA, 15 bp, Homo sapiens
acggagcccagcagc

SEQ ID NO: 179747 - DNA, 15 bp, Homo sapiens
cacggagcccagcag

SEQ ID NO: 179748 - DNA, 15 bp, Homo sapiens
acacggagcccagca

SEQ ID NO: 179749 - DNA, 15 bp, Homo sapiens
gacacggagcccagc

SEQ ID NO: 179750 - DNA, 15 bp, Homo sapiens
ggacacggagcccag

SEQ ID NO: 179751 - DNA, 15 bp, Homo sapiens
aggacacggagccca

SEQ ID NO: 179752 - DNA, 15 bp, Homo sapiens
gaggacacggagccc

SEQ ID NO: 179753 - DNA, 15 bp, Homo sapiens
cgaggacacggagcc

SEQ ID NO: 179754 - DNA, 15 bp, Homo sapiens
gcgaggacacggagc

SEQ ID NO: 179755 - DNA, 15 bp, Homo sapiens
agcgaggacacggag

SEQ ID NO: 179756 - DNA, 15 bp, Homo sapiens
cagcgaggacacgga

SEQ ID NO: 179757 - DNA, 15 bp, Homo sapiens
tcagcgaggacacgg

SEQ ID NO: 179758 - DNA, 15 bp, Homo sapiens
ctcagcgaggacacg

SEQ ID NO: 179759 - DNA, 15 bp, Homo sapiens
gctcagcgaggacac

SEQ ID NO: 179760 - DNA, 15 bp, Homo sapiens
cgctcagcgaggaca

SEQ ID NO: 179761 - DNA, 15 bp, Homo sapiens
gcgctcagcgaggac

SEQ ID NO: 179762 - DNA, 15 bp, Homo sapiens
ggcgctcagcgagga

SEQ ID NO: 179763 - DNA, 15 bp, Homo sapiens
tggcgctcagcgagg

SEQ ID NO: 179764 - DNA, 15 bp, Homo sapiens
ctggcgctcagcgag

SEQ ID NO: 179765 - DNA, 15 bp, Homo sapiens
cctggcgctcagcga

SEQ ID NO: 179766 - DNA, 15 bp, Homo sapiens
gcctggcgctcagcg

SEQ ID NO: 179767 - DNA, 15 bp, Homo sapiens
cgcctggcgctcagc

SEQ ID NO: 179768 - DNA, 15 bp, Homo sapiens
gcgcctggcgctcag

SEQ ID NO: 179769 - DNA, 15 bp, Homo sapiens
cgcgcctggcgctca

SEQ ID NO: 179770 - DNA, 15 bp, Homo sapiens
ccgcgcctggcgctc

SEQ ID NO: 179771 - DNA, 15 bp, Homo sapiens
cccgcgcctggcgct

SEQ ID NO: 179772 - DNA, 15 bp, Homo sapiens
ccccgcgcctggcgc

SEQ ID NO: 179773 - DNA, 15 bp, Homo sapiens
cccccgcgcctggcg

SEQ ID NO: 179774 - DNA, 15 bp, Homo sapiens
gcccccgcgcctggc

SEQ ID NO: 179775 - DNA, 15 bp, Homo sapiens
cgcccccgcgcctgg

SEQ ID NO: 179776 - DNA, 15 bp, Homo sapiens
gcgcccccgcgcctg

SEQ ID NO: 179777 - DNA, 15 bp, Homo sapiens
cgcgcccccgcgcct

SEQ ID NO: 179778 - DNA, 15 bp, Homo sapiens
ccgcgcccccgcgcc

SEQ ID NO: 179779 - DNA, 15 bp, Homo sapiens
cccgcgcccccgcgc

SEQ ID NO: 179780 - DNA, 15 bp, Homo sapiens
gcccgcgcccccgcg

SEQ ID NO: 179781 - DNA, 15 bp, Homo sapiens
cgcccgcgcccccgc

SEQ ID NO: 179782 - DNA, 15 bp, Homo sapiens
ccgcccgcgcccccg

SEQ ID NO: 179783 - DNA, 15 bp, Homo sapiens
gccgcccgcgccccc

SEQ ID NO: 179784 - DNA, 15 bp, Homo sapiens
cgccgcccgcgcccc

SEQ ID NO: 179785 - DNA, 15 bp, Homo sapiens
ccgccgcccgcgccc

SEQ ID NO: 179786 - DNA, 15 bp, Homo sapiens
gccgccgcccgcgcc

SEQ ID NO: 179787 - DNA, 15 bp, Homo sapiens
cgccgccgcccgcgc

SEQ ID NO: 179788 - DNA, 15 bp, Homo sapiens
ccgccgccgcccgcg

SEQ ID NO: 179789 - DNA, 15 bp, Homo sapiens
gccgccgccgcccgc

SEQ ID NO: 179790 - DNA, 15 bp, Homo sapiens
cgccgccgccgcccg

SEQ ID NO: 179791 - DNA, 15 bp, Homo sapiens
ccgccgccgccgccc

SEQ ID NO: 179792 - DNA, 15 bp, Homo sapiens
gccgccgccgccgcc

SEQ ID NO: 179793 - DNA, 15 bp, Homo sapiens
cgccgccgccgccgc

SEQ ID NO: 179794 - DNA, 15 bp, Homo sapiens
gcgccgccgccgccg

SEQ ID NO: 179795 - DNA, 15 bp, Homo sapiens
cgcgccgccgccgcc

SEQ ID NO: 179796 - DNA, 15 bp, Homo sapiens
ccgcgccgccgccgc

SEQ ID NO: 179797 - DNA, 15 bp, Homo sapiens
gccgcgccgccgccg

SEQ ID NO: 179798 - DNA, 15 bp, Homo sapiens
tgccgcgccgccgcc

SEQ ID NO: 179799 - DNA, 15 bp, Homo sapiens
ctgccgcgccgccgc

SEQ ID NO: 179800 - DNA, 15 bp, Homo sapiens
cctgccgcgccgccg

SEQ ID NO: 179801 - DNA, 15 bp, Homo sapiens
gcctgccgcgccgcc

SEQ ID NO: 179802 - DNA, 15 bp, Homo sapiens
cgcctgccgcgccgc

SEQ ID NO: 179803 - DNA, 15 bp, Homo sapiens
ccgcctgccgcgccg

SEQ ID NO: 179804 - DNA, 15 bp, Homo sapiens
cccgcctgccgcgcc

SEQ ID NO: 179805 - DNA, 15 bp, Homo sapiens
ccccgcctgccgcgc

SEQ ID NO: 179806 - DNA, 15 bp, Homo sapiens
gccccgcctgccgcg

SEQ ID NO: 179807 - DNA, 15 bp, Homo sapiens
cgccccgcctgccgc

SEQ ID NO: 179808 - DNA, 15 bp, Homo sapiens
gcgccccgcctgccg

SEQ ID NO: 179809 - DNA, 15 bp, Homo sapiens
cgcgccccgcctgcc

SEQ ID NO: 179810 - DNA, 15 bp, Homo sapiens
gcgcgccccgcctgc

SEQ ID NO: 179811 - DNA, 15 bp, Homo sapiens
agcgcgccccgcctg

SEQ ID NO: 179812 - DNA, 15 bp, Homo sapiens
gagcgcgccccgcct

SEQ ID NO: 179813 - DNA, 15 bp, Homo sapiens
ggagcgcgccccgcc

SEQ ID NO: 179814 - DNA, 15 bp, Homo sapiens
gggagcgcgccccgc

SEQ ID NO: 179815 - DNA, 15 bp, Homo sapiens
cgggagcgcgccccg

SEQ ID NO: 179816 - DNA, 15 bp, Homo sapiens
gcgggagcgcgcccc

SEQ ID NO: 179817 - DNA, 15 bp, Homo sapiens
agcgggagcgcgccc

SEQ ID NO: 179818 - DNA, 15 bp, Homo sapiens
gagcgggagcgcgcc

SEQ ID NO: 179819 - DNA, 15 bp, Homo sapiens
ggagcgggagcgcgc

SEQ ID NO: 179820 - DNA, 15 bp, Homo sapiens
aggagcgggagcgcg

SEQ ID NO: 179821 - DNA, 15 bp, Homo sapiens
gaggagcgggagcgc

SEQ ID NO: 179822 - DNA, 15 bp, Homo sapiens
ggaggagcgggagcg

SEQ ID NO: 179823 - DNA, 15 bp, Homo sapiens
gggaggagcgggagc

SEQ ID NO: 179824 - DNA, 15 bp, Homo sapiens
agggaggagcgggag

SEQ ID NO: 179825 - DNA, 15 bp, Homo sapiens
gagggaggagcggga

SEQ ID NO: 179826 - DNA, 15 bp, Homo sapiens
cgagggaggagcggg

SEQ ID NO: 179827 - DNA, 15 bp, Homo sapiens
gcgagggaggagcgg

SEQ ID NO: 179828 - DNA, 15 bp, Homo sapiens
cgcgagggaggagcg

SEQ ID NO: 179829 - DNA, 15 bp, Homo sapiens
ccgcgagggaggagc

SEQ ID NO: 179830 - DNA, 15 bp, Homo sapiens
cccgcgagggaggag

SEQ ID NO: 179831 - DNA, 15 bp, Homo sapiens
gcccgcgagggagga

SEQ ID NO: 179832 - DNA, 15 bp, Homo sapiens
ggcccgcgagggagg

SEQ ID NO: 179833 - DNA, 15 bp, Homo sapiens
cggcccgcgagggag

SEQ ID NO: 179834 - DNA, 15 bp, Homo sapiens
ccggcccgcgaggga

SEQ ID NO: 179835 - DNA, 15 bp, Homo sapiens
gccggcccgcgaggg

SEQ ID NO: 179836 - DNA, 15 bp, Homo sapiens
cgccggcccgcgagg

SEQ ID NO: 179837 - DNA, 15 bp, Homo sapiens
ccgccggcccgcgag

SEQ ID NO: 179838 - DNA, 15 bp, Homo sapiens
gccgccggcccgcga

SEQ ID NO: 179839 - DNA, 15 bp, Homo sapiens
cgccgccggcccgcg

SEQ ID NO: 179840 - DNA, 15 bp, Homo sapiens
gcgccgccggcccgc

SEQ ID NO: 179841 - DNA, 15 bp, Homo sapiens
cgcgccgccggcccg

SEQ ID NO: 179842 - DNA, 15 bp, Homo sapiens
gcgcgccgccggccc

SEQ ID NO: 179843 - DNA, 15 bp, Homo sapiens
cgcgcgccgccggcc

SEQ ID NO: 179844 - DNA, 15 bp, Homo sapiens
ccgcgcgccgccggc

SEQ ID NO: 179845 - DNA, 15 bp, Homo sapiens
cccgcgcgccgccgg

SEQ ID NO: 179846 - DNA, 15 bp, Homo sapiens
gcccgcgcgccgccg

SEQ ID NO: 179847 - DNA, 15 bp, Homo sapiens
ggcccgcgcgccgcc

SEQ ID NO: 179848 - DNA, 15 bp, Homo sapiens
cggcccgcgcgccgc

SEQ ID NO: 179849 - DNA, 15 bp, Homo sapiens
gcggcccgcgcgccg

SEQ ID NO: 179850 - DNA, 15 bp, Homo sapiens
cgcggcccgcgcgcc

SEQ ID NO: 179851 - DNA, 15 bp, Homo sapiens
gcgcggcccgcgcgc

SEQ ID NO: 179852 - DNA, 15 bp, Homo sapiens
ggcgcggcccgcgcg

SEQ ID NO: 179853 - DNA, 15 bp, Homo sapiens
aggcgcggcccgcgc

SEQ ID NO: 179854 - DNA, 15 bp, Homo sapiens
gaggcgcggcccgcg

SEQ ID NO: 179855 - DNA, 15 bp, Homo sapiens
cgaggcgcggcccgc

SEQ ID NO: 179856 - DNA, 15 bp, Homo sapiens
acgaggcgcggcccg

SEQ ID NO: 179857 - DNA, 15 bp, Homo sapiens
cacgaggcgcggccc

SEQ ID NO: 179858 - DNA, 15 bp, Homo sapiens
ccacgaggcgcggcc

SEQ ID NO: 179859 - DNA, 15 bp, Homo sapiens
tccacgaggcgcggc

SEQ ID NO: 179860 - DNA, 15 bp, Homo sapiens
gtccacgaggcgcgg

SEQ ID NO: 179861 - DNA, 15 bp, Homo sapiens
tgtccacgaggcgcg

SEQ ID NO: 179862 - DNA, 15 bp, Homo sapiens
atgtccacgaggcgc

SEQ ID NO: 179863 - DNA, 15 bp, Homo sapiens
gatgtccacgaggcg

SEQ ID NO: 179864 - DNA, 15 bp, Homo sapiens
agatgtccacgaggc

SEQ ID NO: 179865 - DNA, 15 bp, Homo sapiens
tagatgtccacgagg

SEQ ID NO: 179866 - DNA, 15 bp, Homo sapiens
gtagatgtccacgag

SEQ ID NO: 179867 - DNA, 15 bp, Homo sapiens
cgtagatgtccacga

SEQ ID NO: 179868 - DNA, 15 bp, Homo sapiens
gcgtagatgtccacg

SEQ ID NO: 179869 - DNA, 15 bp, Homo sapiens
ggcgtagatgtccac

SEQ ID NO: 179870 - DNA, 15 bp, Homo sapiens
gggcgtagatgtcca

SEQ ID NO: 179871 - DNA, 15 bp, Homo sapiens
cgggcgtagatgtcc

SEQ ID NO: 179872 - DNA, 15 bp, Homo sapiens
tcgggcgtagatgtc

SEQ ID NO: 179873 - DNA, 15 bp, Homo sapiens
ctcgggcgtagatgt

SEQ ID NO: 179874 - DNA, 15 bp, Homo sapiens
actcgggcgtagatg

SEQ ID NO: 179875 - DNA, 15 bp, Homo sapiens
gactcgggcgtagat

SEQ ID NO: 179876 - DNA, 15 bp, Homo sapiens
ggactcgggcgtaga

SEQ ID NO: 179877 - DNA, 15 bp, Homo sapiens
tggactcgggcgtag

SEQ ID NO: 179878 - DNA, 15 bp, Homo sapiens
ctggactcgggcgta

SEQ ID NO: 179879 - DNA, 15 bp, Homo sapiens
cctggactcgggcgt

SEQ ID NO: 179880 - DNA, 15 bp, Homo sapiens
gcctggactcgggcg

SEQ ID NO: 179881 - DNA, 15 bp, Homo sapiens
agcctggactcgggc

SEQ ID NO: 179882 - DNA, 15 bp, Homo sapiens
cagcctggactcggg

SEQ ID NO: 179883 - DNA, 15 bp, Homo sapiens
ccagcctggactcgg

SEQ ID NO: 179884 - DNA, 15 bp, Homo sapiens
gccagcctggactcg

SEQ ID NO: 179885 - DNA, 15 bp, Homo sapiens
cgccagcctggactc

SEQ ID NO: 179886 - DNA, 15 bp, Homo sapiens
acgccagcctggact

SEQ ID NO: 179887 - DNA, 15 bp, Homo sapiens
gacgccagcctggac

SEQ ID NO: 179888 - DNA, 15 bp, Homo sapiens
cgacgccagcctgga

SEQ ID NO: 179889 - DNA, 15 bp, Homo sapiens
ccgacgccagcctgg

SEQ ID NO: 179890 - DNA, 15 bp, Homo sapiens
accgacgccagcctg

SEQ ID NO: 179891 - DNA, 15 bp, Homo sapiens
caccgacgccagcct

SEQ ID NO: 179892 - DNA, 15 bp, Homo sapiens
gcaccgacgccagcc

SEQ ID NO: 179893 - DNA, 15 bp, Homo sapiens
agcaccgacgccagc

SEQ ID NO: 179894 - DNA, 15 bp, Homo sapiens
cagcaccgacgccag

SEQ ID NO: 179895 - DNA, 15 bp, Homo sapiens
gcagcaccgacgcca

SEQ ID NO: 179896 - DNA, 15 bp, Homo sapiens
cgcagcaccgacgcc

SEQ ID NO: 179897 - DNA, 15 bp, Homo sapiens
acgcagcaccgacgc

SEQ ID NO: 179898 - DNA, 15 bp, Homo sapiens
cacgcagcaccgacg

SEQ ID NO: 179899 - DNA, 15 bp, Homo sapiens
gcacgcagcaccgac

SEQ ID NO: 179900 - DNA, 15 bp, Homo sapiens
ggcacgcagcaccga

SEQ ID NO: 179901 - DNA, 15 bp, Homo sapiens
gggcacgcagcaccg

SEQ ID NO: 179902 - DNA, 15 bp, Homo sapiens
ggggcacgcagcacc

SEQ ID NO: 179903 - DNA, 15 bp, Homo sapiens
cggggcacgcagcac

SEQ ID NO: 179904 - DNA, 15 bp, Homo sapiens
gcggggcacgcagca

SEQ ID NO: 179905 - DNA, 15 bp, Homo sapiens
ggcggggcacgcagc

SEQ ID NO: 179906 - DNA, 15 bp, Homo sapiens
cggcggggcacgcag

SEQ ID NO: 179907 - DNA, 15 bp, Homo sapiens
gcggcggggcacgca

SEQ ID NO: 179908 - DNA, 15 bp, Homo sapiens
ggcggcggggcacgc

SEQ ID NO: 179909 - DNA, 15 bp, Homo sapiens
gggcggcggggcacg

SEQ ID NO: 179910 - DNA, 15 bp, Homo sapiens
cgggcggcggggcac

SEQ ID NO: 179911 - DNA, 15 bp, Homo sapiens
gcgggcggcggggca

SEQ ID NO: 179912 - DNA, 15 bp, Homo sapiens
ggcgggcggcggggc

SEQ ID NO: 179913 - DNA, 15 bp, Homo sapiens
aggcgggcggcgggg

SEQ ID NO: 179914 - DNA, 15 bp, Homo sapiens
caggcgggcggcggg

SEQ ID NO: 179915 - DNA, 15 bp, Homo sapiens
gcaggcgggcggcgg

SEQ ID NO: 179916 - DNA, 15 bp, Homo sapiens
tgcaggcgggcggcg

SEQ ID NO: 179917 - DNA, 15 bp, Homo sapiens
ctgcaggcgggcggc

SEQ ID NO: 179918 - DNA, 15 bp, Homo sapiens
cctgcaggcgggcgg

SEQ ID NO: 179919 - DNA, 15 bp, Homo sapiens
acctgcaggcgggcg

SEQ ID NO: 179920 - DNA, 15 bp, Homo sapiens
gacctgcaggcgggc

SEQ ID NO: 179921 - DNA, 15 bp, Homo sapiens
cgacctgcaggcggg

SEQ ID NO: 179922 - DNA, 15 bp, Homo sapiens
tcgacctgcaggcgg

SEQ ID NO: 179923 - DNA, 15 bp, Homo sapiens
atcgacctgcaggcg

SEQ ID NO: 179924 - DNA, 15 bp, Homo sapiens
catcgacctgcaggc

SEQ ID NO: 179925 - DNA, 15 bp, Homo sapiens
acatcgacctgcagg

SEQ ID NO: 179926 - DNA, 15 bp, Homo sapiens
tacatcgacctgcag

SEQ ID NO: 179927 - DNA, 15 bp, Homo sapiens
ttacatcgacctgca

SEQ ID NO: 179928 - DNA, 15 bp, Homo sapiens
cttacatcgacctgc

SEQ ID NO: 179929 - DNA, 15 bp, Homo sapiens
tcttacatcgacctg

SEQ ID NO: 179930 - DNA, 15 bp, Homo sapiens
ctcttacatcgacct

SEQ ID NO: 179931 - DNA, 15 bp, Homo sapiens
actcttacatcgacc

SEQ ID NO: 179932 - DNA, 15 bp, Homo sapiens
cactcttacatcgac

SEQ ID NO: 179933 - DNA, 15 bp, Homo sapiens
ccactcttacatcga

SEQ ID NO: 179934 - DNA, 15 bp, Homo sapiens
gccactcttacatcg

SEQ ID NO: 179935 - DNA, 15 bp, Homo sapiens
cgccactcttacatc

SEQ ID NO: 179936 - DNA, 15 bp, Homo sapiens
gcgccactcttacat

SEQ ID NO: 179937 - DNA, 15 bp, Homo sapiens
tgcgccactcttaca

SEQ ID NO: 179938 - DNA, 15 bp, Homo sapiens
gtgcgccactcttac

SEQ ID NO: 179939 - DNA, 15 bp, Homo sapiens
agtgcgccactctta

SEQ ID NO: 179940 - DNA, 15 bp, Homo sapiens
aagtgcgccactctt

SEQ ID NO: 179941 - DNA, 15 bp, Homo sapiens
caagtgcgccactct

SEQ ID NO: 179942 - DNA, 15 bp, Homo sapiens
gcaagtgcgccactc

SEQ ID NO: 179943 - DNA, 15 bp, Homo sapiens
cgcaagtgcgccact

SEQ ID NO: 179944 - DNA, 15 bp, Homo sapiens
tcgcaagtgcgccac

SEQ ID NO: 179945 - DNA, 15 bp, Homo sapiens
ctcgcaagtgcgcca

SEQ ID NO: 179946 - DNA, 15 bp, Homo sapiens
actcgcaagtgcgcc

SEQ ID NO: 179947 - DNA, 15 bp, Homo sapiens
aactcgcaagtgcgc

SEQ ID NO: 179948 - DNA, 15 bp, Homo sapiens
caactcgcaagtgcg

SEQ ID NO: 179949 - DNA, 15 bp, Homo sapiens
ccaactcgcaagtgc

SEQ ID NO: 179950 - DNA, 15 bp, Homo sapiens
tccaactcgcaagtg

SEQ ID NO: 179951 - DNA, 15 bp, Homo sapiens
ctccaactcgcaagt

SEQ ID NO: 179952 - DNA, 15 bp, Homo sapiens
gctccaactcgcaag

SEQ ID NO: 179953 - DNA, 15 bp, Homo sapiens
cgctccaactcgcaa

SEQ ID NO: 179954 - DNA, 15 bp, Homo sapiens
gcgctccaactcgca

SEQ ID NO: 179955 - DNA, 15 bp, Homo sapiens
ggcgctccaactcgc

SEQ ID NO: 179956 - DNA, 15 bp, Homo sapiens
gggcgctccaactcg

SEQ ID NO: 179957 - DNA, 15 bp, Homo sapiens
cgggcgctccaactc

SEQ ID NO: 179958 - DNA, 15 bp, Homo sapiens
acgggcgctccaact

SEQ ID NO: 179959 - DNA, 15 bp, Homo sapiens
gacgggcgctccaac

SEQ ID NO: 179960 - DNA, 15 bp, Homo sapiens
cgacgggcgctccaa

SEQ ID NO: 179961 - DNA, 15 bp, Homo sapiens
tcgacgggcgctcca

SEQ ID NO: 179962 - DNA, 15 bp, Homo sapiens
ctcgacgggcgctcc

SEQ ID NO: 179963 - DNA, 15 bp, Homo sapiens
cctcgacgggcgctc

SEQ ID NO: 179964 - DNA, 15 bp, Homo sapiens
ccctcgacgggcgct

SEQ ID NO: 179965 - DNA, 15 bp, Homo sapiens
tccctcgacgggcgc

SEQ ID NO: 179966 - DNA, 15 bp, Homo sapiens
gtccctcgacgggcg

SEQ ID NO: 179967 - DNA, 15 bp, Homo sapiens
tgtccctcgacgggc

SEQ ID NO: 179968 - DNA, 15 bp, Homo sapiens
gtgtccctcgacggg

SEQ ID NO: 179969 - DNA, 15 bp, Homo sapiens
cgtgtccctcgacgg

SEQ ID NO: 179970 - DNA, 15 bp, Homo sapiens
tcgtgtccctcgacg

SEQ ID NO: 179971 - DNA, 15 bp, Homo sapiens
ttcgtgtccctcgac

SEQ ID NO: 179972 - DNA, 15 bp, Homo sapiens
gttcgtgtccctcga

SEQ ID NO: 179973 - DNA, 15 bp, Homo sapiens
ggttcgtgtccctcg

SEQ ID NO: 179974 - DNA, 15 bp, Homo sapiens
tggttcgtgtccctc

SEQ ID NO: 179975 - DNA, 15 bp, Homo sapiens
ctggttcgtgtccct

SEQ ID NO: 179976 - DNA, 15 bp, Homo sapiens
cctggttcgtgtccc

SEQ ID NO: 179977 - DNA, 15 bp, Homo sapiens
gcctggttcgtgtcc

SEQ ID NO: 179978 - DNA, 15 bp, Homo sapiens
cgcctggttcgtgtc

SEQ ID NO: 179979 - DNA, 15 bp, Homo sapiens
gcgcctggttcgtgt

SEQ ID NO: 179980 - DNA, 15 bp, Homo sapiens
cgcgcctggttcgtg

SEQ ID NO: 179981 - DNA, 15 bp, Homo sapiens
gcgcgcctggttcgt

SEQ ID NO: 179982 - DNA, 15 bp, Homo sapiens
cgcgcgcctggttcg

SEQ ID NO: 179983 - DNA, 15 bp, Homo sapiens
ccgcgcgcctggttc

SEQ ID NO: 179984 - DNA, 15 bp, Homo sapiens
cccgcgcgcctggtt

SEQ ID NO: 179985 - DNA, 15 bp, Homo sapiens
acccgcgcgcctggt

SEQ ID NO: 179986 - DNA, 15 bp, Homo sapiens
cacccgcgcgcctgg

SEQ ID NO: 179987 - DNA, 15 bp, Homo sapiens
gcacccgcgcgcctg

SEQ ID NO: 179988 - DNA, 15 bp, Homo sapiens
cgcacccgcgcgcct

SEQ ID NO: 179989 - DNA, 15 bp, Homo sapiens
ccgcacccgcgcgcc

SEQ ID NO: 179990 - DNA, 15 bp, Homo sapiens
gccgcacccgcgcgc

SEQ ID NO: 179991 - DNA, 15 bp, Homo sapiens
agccgcacccgcgcg

SEQ ID NO: 179992 - DNA, 15 bp, Homo sapiens
aagccgcacccgcgc

SEQ ID NO: 179993 - DNA, 15 bp, Homo sapiens
gaagccgcacccgcg

SEQ ID NO: 179994 - DNA, 15 bp, Homo sapiens
tgaagccgcacccgc

SEQ ID NO: 179995 - DNA, 15 bp, Homo sapiens
gtgaagccgcacccg

SEQ ID NO: 179996 - DNA, 15 bp, Homo sapiens
cgtgaagccgcaccc

SEQ ID NO: 179997 - DNA, 15 bp, Homo sapiens
gcgtgaagccgcacc

SEQ ID NO: 179998 - DNA, 15 bp, Homo sapiens
ggcgtgaagccgcac

SEQ ID NO: 179999 - DNA, 15 bp, Homo sapiens
gggcgtgaagccgca

SEQ ID NO: 180000 - DNA, 15 bp, Homo sapiens
tgggcgtgaagccgc

SEQ ID NO: 180001 - DNA, 15 bp, Homo sapiens
ctgggcgtgaagccg

SEQ ID NO: 180002 - DNA, 15 bp, Homo sapiens
actgggcgtgaagcc

SEQ ID NO: 180003 - DNA, 15 bp, Homo sapiens
aactgggcgtgaagc

SEQ ID NO: 180004 - DNA, 15 bp, Homo sapiens
gaactgggcgtgaag

SEQ ID NO: 180005 - DNA, 15 bp, Homo sapiens
ggaactgggcgtgaa

SEQ ID NO: 180006 - DNA, 15 bp, Homo sapiens
tggaactgggcgtga

SEQ ID NO: 180007 - DNA, 15 bp, Homo sapiens
ctggaactgggcgtg

SEQ ID NO: 180008 - DNA, 15 bp, Homo sapiens
gctggaactgggcgt

SEQ ID NO: 180009 - DNA, 15 bp, Homo sapiens
tgctggaactgggcg

SEQ ID NO: 180010 - DNA, 15 bp, Homo sapiens
ctgctggaactgggc

SEQ ID NO: 180011 - DNA, 15 bp, Homo sapiens
gctgctggaactggg

SEQ ID NO: 180012 - DNA, 15 bp, Homo sapiens
agctgctggaactgg

SEQ ID NO: 180013 - DNA, 15 bp, Homo sapiens
aagctgctggaactg

SEQ ID NO: 180014 - DNA, 15 bp, Homo sapiens
gaagctgctggaact

SEQ ID NO: 180015 - DNA, 15 bp, Homo sapiens
agaagctgctggaac

SEQ ID NO: 180016 - DNA, 15 bp, Homo sapiens
aagaagctgctggaa

SEQ ID NO: 180017 - DNA, 15 bp, Homo sapiens
gaagaagctgctgga

SEQ ID NO: 180018 - DNA, 15 bp, Homo sapiens
agaagaagctgctgg

SEQ ID NO: 180019 - DNA, 15 bp, Homo sapiens
gagaagaagctgctg

SEQ ID NO: 180020 - DNA, 15 bp, Homo sapiens
cgagaagaagctgct

SEQ ID NO: 180021 - DNA, 15 bp, Homo sapiens
ccgagaagaagctgc

SEQ ID NO: 180022 - DNA, 15 bp, Homo sapiens
accgagaagaagctg

SEQ ID NO: 180023 - DNA, 15 bp, Homo sapiens
gaccgagaagaagct

SEQ ID NO: 180024 - DNA, 15 bp, Homo sapiens
tgaccgagaagaagc

SEQ ID NO: 180025 - DNA, 15 bp, Homo sapiens
ctgaccgagaagaag

SEQ ID NO: 180026 - DNA, 15 bp, Homo sapiens
cctgaccgagaagaa

SEQ ID NO: 180027 - DNA, 15 bp, Homo sapiens
ccctgaccgagaaga

SEQ ID NO: 180028 - DNA, 15 bp, Homo sapiens
gccctgaccgagaag

SEQ ID NO: 180029 - DNA, 15 bp, Homo sapiens
ggccctgaccgagaa

SEQ ID NO: 180030 - DNA, 15 bp, Homo sapiens
aggccctgaccgaga

SEQ ID NO: 180031 - DNA, 15 bp, Homo sapiens
caggccctgaccgag

SEQ ID NO: 180032 - DNA, 15 bp, Homo sapiens
gcaggccctgaccga

SEQ ID NO: 180033 - DNA, 15 bp, Homo sapiens
tgcaggccctgaccg

SEQ ID NO: 180034 - DNA, 15 bp, Homo sapiens
ctgcaggccctgacc

SEQ ID NO: 180035 - DNA, 15 bp, Homo sapiens
gctgcaggccctgac

SEQ ID NO: 180036 - DNA, 15 bp, Homo sapiens
agctgcaggccctga

SEQ ID NO: 180037 - DNA, 15 bp, Homo sapiens
gagctgcaggccctg

SEQ ID NO: 180038 - DNA, 15 bp, Homo sapiens
ggagctgcaggccct

SEQ ID NO: 180039 - DNA, 15 bp, Homo sapiens
gggagctgcaggccc

SEQ ID NO: 180040 - DNA, 15 bp, Homo sapiens
ggggagctgcaggcc

SEQ ID NO: 180041 - DNA, 15 bp, Homo sapiens
cggggagctgcaggc

SEQ ID NO: 180042 - DNA, 15 bp, Homo sapiens
acggggagctgcagg

SEQ ID NO: 180043 - DNA, 15 bp, Homo sapiens
aacggggagctgcag

SEQ ID NO: 180044 - DNA, 15 bp, Homo sapiens
caacggggagctgca

SEQ ID NO: 180045 - DNA, 15 bp, Homo sapiens
tcaacggggagctgc

SEQ ID NO: 180046 - DNA, 15 bp, Homo sapiens
ctcaacggggagctg

SEQ ID NO: 180047 - DNA, 15 bp, Homo sapiens
gctcaacggggagct

SEQ ID NO: 180048 - DNA, 15 bp, Homo sapiens
agctcaacggggagc

SEQ ID NO: 180049 - DNA, 15 bp, Homo sapiens
cagctcaacggggag

SEQ ID NO: 180050 - DNA, 15 bp, Homo sapiens
gcagctcaacgggga

SEQ ID NO: 180051 - DNA, 15 bp, Homo sapiens
cgcagctcaacgggg

SEQ ID NO: 180052 - DNA, 15 bp, Homo sapiens
gcgcagctcaacggg

SEQ ID NO: 180053 - DNA, 15 bp, Homo sapiens
ggcgcagctcaacgg

SEQ ID NO: 180054 - DNA, 15 bp, Homo sapiens
tggcgcagctcaacg

SEQ ID NO: 180055 - DNA, 15 bp, Homo sapiens
atggcgcagctcaac

SEQ ID NO: 180056 - DNA, 15 bp, Homo sapiens
catggcgcagctcaa

SEQ ID NO: 180057 - DNA, 15 bp, Homo sapiens
ccatggcgcagctca

SEQ ID NO: 180058 - DNA, 15 bp, Homo sapiens
accatggcgcagctc

SEQ ID NO: 180059 - DNA, 15 bp, Homo sapiens
caccatggcgcagct

SEQ ID NO: 180060 - DNA, 15 bp, Homo sapiens
ccaccatggcgcagc

SEQ ID NO: 180061 - DNA, 15 bp, Homo sapiens
tccaccatggcgcag

SEQ ID NO: 180062 - DNA, 15 bp, Homo sapiens
gtccaccatggcgca

SEQ ID NO: 180063 - DNA, 15 bp, Homo sapiens
agtccaccatggcgc

SEQ ID NO: 180064 - DNA, 15 bp, Homo sapiens
gagtccaccatggcg

SEQ ID NO: 180065 - DNA, 15 bp, Homo sapiens
cgagtccaccatggc

SEQ ID NO: 180066 - DNA, 15 bp, Homo sapiens
acgagtccaccatgg

SEQ ID NO: 180067 - DNA, 15 bp, Homo sapiens
aacgagtccaccatg

SEQ ID NO: 180068 - DNA, 15 bp, Homo sapiens
caacgagtccaccat

SEQ ID NO: 180069 - DNA, 15 bp, Homo sapiens
tcaacgagtccacca

SEQ ID NO: 180070 - DNA, 15 bp, Homo sapiens
ttcaacgagtccacc

SEQ ID NO: 180071 - DNA, 15 bp, Homo sapiens
attcaacgagtccac

SEQ ID NO: 180072 - DNA, 15 bp, Homo sapiens
tattcaacgagtcca

SEQ ID NO: 180073 - DNA, 15 bp, Homo sapiens
ctattcaacgagtcc

SEQ ID NO: 180074 - DNA, 15 bp, Homo sapiens
gctattcaacgagtc

SEQ ID NO: 180075 - DNA, 15 bp, Homo sapiens
tgctattcaacgagt

SEQ ID NO: 180076 - DNA, 15 bp, Homo sapiens
gtgctattcaacgag

SEQ ID NO: 180077 - DNA, 15 bp, Homo sapiens
tgtgctattcaacga

SEQ ID NO: 180078 - DNA, 15 bp, Homo sapiens
ctgtgctattcaacg

SEQ ID NO: 180079 - DNA, 15 bp, Homo sapiens
cctgtgctattcaac

SEQ ID NO: 180080 - DNA, 15 bp, Homo sapiens
ccctgtgctattcaa

SEQ ID NO: 180081 - DNA, 15 bp, Homo sapiens
tccctgtgctattca

SEQ ID NO: 180082 - DNA, 15 bp, Homo sapiens
atccctgtgctattc

SEQ ID NO: 180083 - DNA, 15 bp, Homo sapiens
catccctgtgctatt

SEQ ID NO: 180084 - DNA, 15 bp, Homo sapiens
ccatccctgtgctat

SEQ ID NO: 180085 - DNA, 15 bp, Homo sapiens
accatccctgtgcta

SEQ ID NO: 180086 - DNA, 15 bp, Homo sapiens
caccatccctgtgct

SEQ ID NO: 180087 - DNA, 15 bp, Homo sapiens
tcaccatccctgtgc

SEQ ID NO: 180088 - DNA, 15 bp, Homo sapiens
gtcaccatccctgtg

SEQ ID NO: 180089 - DNA, 15 bp, Homo sapiens
agtcaccatccctgt

SEQ ID NO: 180090 - DNA, 15 bp, Homo sapiens
cagtcaccatccctg

SEQ ID NO: 180091 - DNA, 15 bp, Homo sapiens
tcagtcaccatccct

SEQ ID NO: 180092 - DNA, 15 bp, Homo sapiens
ctcagtcaccatccc

SEQ ID NO: 180093 - DNA, 15 bp, Homo sapiens
gctcagtcaccatcc

SEQ ID NO: 180094 - DNA, 15 bp, Homo sapiens
ggctcagtcaccatc

SEQ ID NO: 180095 - DNA, 15 bp, Homo sapiens
tggctcagtcaccat

SEQ ID NO: 180096 - DNA, 15 bp, Homo sapiens
gtggctcagtcacca

SEQ ID NO: 180097 - DNA, 15 bp, Homo sapiens
agtggctcagtcacc

SEQ ID NO: 180098 - DNA, 15 bp, Homo sapiens
cagtggctcagtcac

SEQ ID NO: 180099 - DNA, 15 bp, Homo sapiens
tcagtggctcagtca

SEQ ID NO: 180100 - DNA, 15 bp, Homo sapiens
gtcagtggctcagtc

SEQ ID NO: 180101 - DNA, 15 bp, Homo sapiens
cgtcagtggctcagt

SEQ ID NO: 180102 - DNA, 15 bp, Homo sapiens
ccgtcagtggctcag

SEQ ID NO: 180103 - DNA, 15 bp, Homo sapiens
cccgtcagtggctca

SEQ ID NO: 180104 - DNA, 15 bp, Homo sapiens
gcccgtcagtggctc

SEQ ID NO: 180105 - DNA, 15 bp, Homo sapiens
cgcccgtcagtggct

SEQ ID NO: 180106 - DNA, 15 bp, Homo sapiens
gcgcccgtcagtggc

SEQ ID NO: 180107 - DNA, 15 bp, Homo sapiens
ggcgcccgtcagtgg

SEQ ID NO: 180108 - DNA, 15 bp, Homo sapiens
cggcgcccgtcagtg

SEQ ID NO: 180109 - DNA, 15 bp, Homo sapiens
gcggcgcccgtcagt

SEQ ID NO: 180110 - DNA, 15 bp, Homo sapiens
cgcggcgcccgtcag

SEQ ID NO: 180111 - DNA, 15 bp, Homo sapiens
gcgcggcgcccgtca

SEQ ID NO: 180112 - DNA, 15 bp, Homo sapiens
cgcgcggcgcccgtc

SEQ ID NO: 180113 - DNA, 15 bp, Homo sapiens
gcgcgcggcgcccgt

SEQ ID NO: 180114 - DNA, 15 bp, Homo sapiens
ggcgcgcggcgcccg

SEQ ID NO: 180115 - DNA, 15 bp, Homo sapiens
gggcgcgcggcgccc

SEQ ID NO: 180116 - DNA, 15 bp, Homo sapiens
cgggcgcgcggcgcc

SEQ ID NO: 180117 - DNA, 15 bp, Homo sapiens
ccgggcgcgcggcgc

SEQ ID NO: 180118 - DNA, 15 bp, Homo sapiens
gccgggcgcgcggcg

SEQ ID NO: 180119 - DNA, 15 bp, Homo sapiens
ggccgggcgcgcggc

SEQ ID NO: 180120 - DNA, 15 bp, Homo sapiens
gggccgggcgcgcgg

SEQ ID NO: 180121 - DNA, 15 bp, Homo sapiens
ggggccgggcgcgcg

SEQ ID NO: 180122 - DNA, 15 bp, Homo sapiens
gggggccgggcgcgc

SEQ ID NO: 180123 - DNA, 15 bp, Homo sapiens
ggggggccgggcgcg

SEQ ID NO: 180124 - DNA, 15 bp, Homo sapiens
tggggggccgggcgc

SEQ ID NO: 180125 - DNA, 15 bp, Homo sapiens
ctggggggccgggcg

SEQ ID NO: 180126 - DNA, 15 bp, Homo sapiens
gctggggggccgggc

SEQ ID NO: 180127 - DNA, 15 bp, Homo sapiens
ggctggggggccggg

SEQ ID NO: 180128 - DNA, 15 bp, Homo sapiens
gggctggggggccgg

SEQ ID NO: 180129 - DNA, 15 bp, Homo sapiens
agggctggggggccg

SEQ ID NO: 180130 - DNA, 15 bp, Homo sapiens
gagggctggggggcc

SEQ ID NO: 180131 - DNA, 15 bp, Homo sapiens
cgagggctggggggc

SEQ ID NO: 180132 - DNA, 15 bp, Homo sapiens
gcgagggctgggggg

SEQ ID NO: 180133 - DNA, 15 bp, Homo sapiens
ggcgagggctggggg

SEQ ID NO: 180134 - DNA, 15 bp, Homo sapiens
cggcgagggctgggg

SEQ ID NO: 180135 - DNA, 15 bp, Homo sapiens
gcggcgagggctggg

SEQ ID NO: 180136 - DNA, 15 bp, Homo sapiens
ggcggcgagggctgg

SEQ ID NO: 180137 - DNA, 15 bp, Homo sapiens
cggcggcgagggctg

SEQ ID NO: 180138 - DNA, 15 bp, Homo sapiens
gcggcggcgagggct

SEQ ID NO: 180139 - DNA, 15 bp, Homo sapiens
ggcggcggcgagggc

SEQ ID NO: 180140 - DNA, 15 bp, Homo sapiens
gggcggcggcgaggg

SEQ ID NO: 180141 - DNA, 15 bp, Homo sapiens
ggggcggcggcgagg

SEQ ID NO: 180142 - DNA, 15 bp, Homo sapiens
gggggcggcggcgag

SEQ ID NO: 180143 - DNA, 15 bp, Homo sapiens
cgggggcggcggcga

SEQ ID NO: 180144 - DNA, 15 bp, Homo sapiens
gcgggggcggcggcg

SEQ ID NO: 180145 - DNA, 15 bp, Homo sapiens
ggcgggggcggcggc

SEQ ID NO: 180146 - DNA, 15 bp, Homo sapiens
cggcgggggcggcgg

SEQ ID NO: 180147 - DNA, 15 bp, Homo sapiens
gcggcgggggcggcg

SEQ ID NO: 180148 - DNA, 15 bp, Homo sapiens
ggcggcgggggcggc

SEQ ID NO: 180149 - DNA, 15 bp, Homo sapiens
gggcggcgggggcgg

SEQ ID NO: 180150 - DNA, 15 bp, Homo sapiens
agggcggcgggggcg

SEQ ID NO: 180151 - DNA, 15 bp, Homo sapiens
gagggcggcgggggc

SEQ ID NO: 180152 - DNA, 15 bp, Homo sapiens
cgagggcggcggggg

SEQ ID NO: 180153 - DNA, 15 bp, Homo sapiens
gcgagggcggcgggg

SEQ ID NO: 180154 - DNA, 15 bp, Homo sapiens
ggcgagggcggcggg

SEQ ID NO: 180155 - DNA, 15 bp, Homo sapiens
gggcgagggcggcgg

SEQ ID NO: 180156 - DNA, 15 bp, Homo sapiens
ggggcgagggcggcg

SEQ ID NO: 180157 - DNA, 15 bp, Homo sapiens
gggggcgagggcggc

SEQ ID NO: 180158 - DNA, 15 bp, Homo sapiens
ggggggcgagggcgg

SEQ ID NO: 180159 - DNA, 15 bp, Homo sapiens
cggggggcgagggcg

SEQ ID NO: 180160 - DNA, 15 bp, Homo sapiens
ccggggggcgagggc

SEQ ID NO: 180161 - DNA, 15 bp, Homo sapiens
cccggggggcgaggg

SEQ ID NO: 180162 - DNA, 15 bp, Homo sapiens
gcccggggggcgagg

SEQ ID NO: 180163 - DNA, 15 bp, Homo sapiens
ggcccggggggcgag

SEQ ID NO: 180164 - DNA, 15 bp, Homo sapiens
gggcccggggggcga

SEQ ID NO: 180165 - DNA, 15 bp, Homo sapiens
cgggcccggggggcg

SEQ ID NO: 180166 - DNA, 15 bp, Homo sapiens
tcgggcccggggggc

SEQ ID NO: 180167 - DNA, 15 bp, Homo sapiens
ctcgggcccgggggg

SEQ ID NO: 180168 - DNA, 15 bp, Homo sapiens
actcgggcccggggg

SEQ ID NO: 180169 - DNA, 15 bp, Homo sapiens
cactcgggcccgggg

SEQ ID NO: 180170 - DNA, 15 bp, Homo sapiens
ccactcgggcccggg

SEQ ID NO: 180171 - DNA, 15 bp, Homo sapiens
gccactcgggcccgg

SEQ ID NO: 180172 - DNA, 15 bp, Homo sapiens
ggccactcgggcccg

SEQ ID NO: 180173 - DNA, 15 bp, Homo sapiens
gggccactcgggccc

SEQ ID NO: 180174 - DNA, 15 bp, Homo sapiens
cgggccactcgggcc

SEQ ID NO: 180175 - DNA, 15 bp, Homo sapiens
ccgggccactcgggc

SEQ ID NO: 180176 - DNA, 15 bp, Homo sapiens
gccgggccactcggg

SEQ ID NO: 180177 - DNA, 15 bp, Homo sapiens
tgccgggccactcgg

SEQ ID NO: 180178 - DNA, 15 bp, Homo sapiens
atgccgggccactcg

SEQ ID NO: 180179 - DNA, 15 bp, Homo sapiens
gatgccgggccactc

SEQ ID NO: 180180 - DNA, 15 bp, Homo sapiens
agatgccgggccact

SEQ ID NO: 180181 - DNA, 15 bp, Homo sapiens
cagatgccgggccac

SEQ ID NO: 180182 - DNA, 15 bp, Homo sapiens
gcagatgccgggcca

SEQ ID NO: 180183 - DNA, 15 bp, Homo sapiens
cgcagatgccgggcc

SEQ ID NO: 180184 - DNA, 15 bp, Homo sapiens
ccgcagatgccgggc

SEQ ID NO: 180185 - DNA, 15 bp, Homo sapiens
cccgcagatgccggg

SEQ ID NO: 180186 - DNA, 15 bp, Homo sapiens
gcccgcagatgccgg

SEQ ID NO: 180187 - DNA, 15 bp, Homo sapiens
cgcccgcagatgccg

SEQ ID NO: 180188 - DNA, 15 bp, Homo sapiens
gcgcccgcagatgcc

SEQ ID NO: 180189 - DNA, 15 bp, Homo sapiens
agcgcccgcagatgc

SEQ ID NO: 180190 - DNA, 15 bp, Homo sapiens
cagcgcccgcagatg

SEQ ID NO: 180191 - DNA, 15 bp, Homo sapiens
ccagcgcccgcagat

SEQ ID NO: 180192 - DNA, 15 bp, Homo sapiens
cccagcgcccgcaga

SEQ ID NO: 180193 - DNA, 15 bp, Homo sapiens
ccccagcgcccgcag

SEQ ID NO: 180194 - DNA, 15 bp, Homo sapiens
cccccagcgcccgca

SEQ ID NO: 180195 - DNA, 15 bp, Homo sapiens
acccccagcgcccgc

SEQ ID NO: 180196 - DNA, 15 bp, Homo sapiens
gacccccagcgcccg

SEQ ID NO: 180197 - DNA, 15 bp, Homo sapiens
cgacccccagcgccc

SEQ ID NO: 180198 - DNA, 15 bp, Homo sapiens
ccgacccccagcgcc

SEQ ID NO: 180199 - DNA, 15 bp, Homo sapiens
cccgacccccagcgc

SEQ ID NO: 180200 - DNA, 15 bp, Homo sapiens
gcccgacccccagcg

SEQ ID NO: 180201 - DNA, 15 bp, Homo sapiens
agcccgacccccagc

SEQ ID NO: 180202 - DNA, 15 bp, Homo sapiens
cagcccgacccccag

SEQ ID NO: 180203 - DNA, 15 bp, Homo sapiens
ccagcccgaccccca

SEQ ID NO: 180204 - DNA, 15 bp, Homo sapiens
cccagcccgaccccc

SEQ ID NO: 180205 - DNA, 15 bp, Homo sapiens
ccccagcccgacccc

SEQ ID NO: 180206 - DNA, 15 bp, Homo sapiens
tccccagcccgaccc

SEQ ID NO: 180207 - DNA, 15 bp, Homo sapiens
ttccccagcccgacc

SEQ ID NO: 180208 - DNA, 15 bp, Homo sapiens
tttccccagcccgac

SEQ ID NO: 180209 - DNA, 15 bp, Homo sapiens
ttttccccagcccga

SEQ ID NO: 180210 - DNA, 15 bp, Homo sapiens
cttttccccagcccg

SEQ ID NO: 180211 - DNA, 15 bp, Homo sapiens
gcttttccccagccc

SEQ ID NO: 180212 - DNA, 15 bp, Homo sapiens
cgcttttccccagcc

SEQ ID NO: 180213 - DNA, 15 bp, Homo sapiens
gcgcttttccccagc

SEQ ID NO: 180214 - DNA, 15 bp, Homo sapiens
cgcgcttttccccag

SEQ ID NO: 180215 - DNA, 15 bp, Homo sapiens
gcgcgcttttcccca

SEQ ID NO: 180216 - DNA, 15 bp, Homo sapiens
cgcgcgcttttcccc

SEQ ID NO: 180217 - DNA, 15 bp, Homo sapiens
gcgcgcgcttttccc

SEQ ID NO: 180218 - DNA, 15 bp, Homo sapiens
ggcgcgcgcttttcc

SEQ ID NO: 180219 - DNA, 15 bp, Homo sapiens
cggcgcgcgcttttc

SEQ ID NO: 180220 - DNA, 15 bp, Homo sapiens
ccggcgcgcgctttt

SEQ ID NO: 180221 - DNA, 15 bp, Homo sapiens
cccggcgcgcgcttt

SEQ ID NO: 180222 - DNA, 15 bp, Homo sapiens
gcccggcgcgcgctt

SEQ ID NO: 180223 - DNA, 15 bp, Homo sapiens
ggcccggcgcgcgct

SEQ ID NO: 180224 - DNA, 15 bp, Homo sapiens
cggcccggcgcgcgc

SEQ ID NO: 180225 - DNA, 15 bp, Homo sapiens
ccggcccggcgcgcg

SEQ ID NO: 180226 - DNA, 15 bp, Homo sapiens
cccggcccggcgcgc

SEQ ID NO: 180227 - DNA, 15 bp, Homo sapiens
acccggcccggcgcg

SEQ ID NO: 180228 - DNA, 15 bp, Homo sapiens
cacccggcccggcgc

SEQ ID NO: 180229 - DNA, 15 bp, Homo sapiens
gcacccggcccggcg

SEQ ID NO: 180230 - DNA, 15 bp, Homo sapiens
ggcacccggcccggc

SEQ ID NO: 180231 - DNA, 15 bp, Homo sapiens
cggcacccggcccgg

SEQ ID NO: 180232 - DNA, 15 bp, Homo sapiens
acggcacccggcccg

SEQ ID NO: 180233 - DNA, 15 bp, Homo sapiens
cacggcacccggccc

SEQ ID NO: 180234 - DNA, 15 bp, Homo sapiens
gcacggcacccggcc

SEQ ID NO: 180235 - DNA, 15 bp, Homo sapiens
ggcacggcacccggc

SEQ ID NO: 180236 - DNA, 15 bp, Homo sapiens
gggcacggcacccgg

SEQ ID NO: 180237 - DNA, 15 bp, Homo sapiens
agggcacggcacccg

SEQ ID NO: 180238 - DNA, 15 bp, Homo sapiens
gagggcacggcaccc

SEQ ID NO: 180239 - DNA, 15 bp, Homo sapiens
ggagggcacggcacc

SEQ ID NO: 180240 - DNA, 15 bp, Homo sapiens
cggagggcacggcac

SEQ ID NO: 180241 - DNA, 15 bp, Homo sapiens
ccggagggcacggca

SEQ ID NO: 180242 - DNA, 15 bp, Homo sapiens
gccggagggcacggc

SEQ ID NO: 180243 - DNA, 15 bp, Homo sapiens
cgccggagggcacgg

SEQ ID NO: 180244 - DNA, 15 bp, Homo sapiens
ccgccggagggcacg

SEQ ID NO: 180245 - DNA, 15 bp, Homo sapiens
cccgccggagggcac

SEQ ID NO: 180246 - DNA, 15 bp, Homo sapiens
ccccgccggagggca

SEQ ID NO: 180247 - DNA, 15 bp, Homo sapiens
gccccgccggagggc

SEQ ID NO: 180248 - DNA, 15 bp, Homo sapiens
ggccccgccggaggg

SEQ ID NO: 180249 - DNA, 15 bp, Homo sapiens
cggccccgccggagg

SEQ ID NO: 180250 - DNA, 15 bp, Homo sapiens
ccggccccgccggag

SEQ ID NO: 180251 - DNA, 15 bp, Homo sapiens
gccggccccgccgga

SEQ ID NO: 180252 - DNA, 15 bp, Homo sapiens
agccggccccgccgg

SEQ ID NO: 180253 - DNA, 15 bp, Homo sapiens
gagccggccccgccg

SEQ ID NO: 180254 - DNA, 15 bp, Homo sapiens
cgagccggccccgcc

SEQ ID NO: 180255 - DNA, 15 bp, Homo sapiens
acgagccggccccgc

SEQ ID NO: 180256 - DNA, 15 bp, Homo sapiens
gacgagccggccccg

SEQ ID NO: 180257 - DNA, 15 bp, Homo sapiens
cgacgagccggcccc

SEQ ID NO: 180258 - DNA, 15 bp, Homo sapiens
gcgacgagccggccc

SEQ ID NO: 180259 - DNA, 15 bp, Homo sapiens
ggcgacgagccggcc

SEQ ID NO: 180260 - DNA, 15 bp, Homo sapiens
gggcgacgagccggc

SEQ ID NO: 180261 - DNA, 15 bp, Homo sapiens
tgggcgacgagccgg

SEQ ID NO: 180262 - DNA, 15 bp, Homo sapiens
gtgggcgacgagccg

SEQ ID NO: 180263 - DNA, 15 bp, Homo sapiens
cgtgggcgacgagcc

SEQ ID NO: 180264 - DNA, 15 bp, Homo sapiens
gcgtgggcgacgagc

SEQ ID NO: 180265 - DNA, 15 bp, Homo sapiens
ggcgtgggcgacgag

SEQ ID NO: 180266 - DNA, 15 bp, Homo sapiens
cggcgtgggcgacga

SEQ ID NO: 180267 - DNA, 15 bp, Homo sapiens
ccggcgtgggcgacg

SEQ ID NO: 180268 - DNA, 15 bp, Homo sapiens
gccggcgtgggcgac

SEQ ID NO: 180269 - DNA, 15 bp, Homo sapiens
cgccggcgtgggcga

SEQ ID NO: 180270 - DNA, 15 bp, Homo sapiens
ccgccggcgtgggcg

SEQ ID NO: 180271 - DNA, 15 bp, Homo sapiens
gccgccggcgtgggc

SEQ ID NO: 180272 - DNA, 15 bp, Homo sapiens
cgccgccggcgtggg

SEQ ID NO: 180273 - DNA, 15 bp, Homo sapiens
gcgccgccggcgtgg

SEQ ID NO: 180274 - DNA, 15 bp, Homo sapiens
ggcgccgccggcgtg

SEQ ID NO: 180275 - DNA, 15 bp, Homo sapiens
gggcgccgccggcgt

SEQ ID NO: 180276 - DNA, 15 bp, Homo sapiens
cgggcgccgccggcg

SEQ ID NO: 180277 - DNA, 15 bp, Homo sapiens
gcgggcgccgccggc

SEQ ID NO: 180278 - DNA, 15 bp, Homo sapiens
ggcgggcgccgccgg

SEQ ID NO: 180279 - DNA, 15 bp, Homo sapiens
aggcgggcgccgccg

SEQ ID NO: 180280 - DNA, 15 bp, Homo sapiens
gaggcgggcgccgcc

SEQ ID NO: 180281 - DNA, 15 bp, Homo sapiens
cgaggcgggcgccgc

SEQ ID NO: 180282 - DNA, 15 bp, Homo sapiens
gcgaggcgggcgccg

SEQ ID NO: 180283 - DNA, 15 bp, Homo sapiens
ggcgaggcgggcgcc

SEQ ID NO: 180284 - DNA, 15 bp, Homo sapiens
cggcgaggcgggcgc

SEQ ID NO: 180285 - DNA, 15 bp, Homo sapiens
gcggcgaggcgggcg

SEQ ID NO: 180286 - DNA, 15 bp, Homo sapiens
ggcggcgaggcgggc

SEQ ID NO: 180287 - DNA, 15 bp, Homo sapiens
cggcggcgaggcggg

SEQ ID NO: 180288 - DNA, 15 bp, Homo sapiens
tcggcggcgaggcgg

SEQ ID NO: 180289 - DNA, 15 bp, Homo sapiens
ctcggcggcgaggcg

SEQ ID NO: 180290 - DNA, 15 bp, Homo sapiens
cctcggcggcgaggc

SEQ ID NO: 180291 - DNA, 15 bp, Homo sapiens
gcctcggcggcgagg

SEQ ID NO: 180292 - DNA, 15 bp, Homo sapiens
cgcctcggcggcgag

SEQ ID NO: 180293 - DNA, 15 bp, Homo sapiens
gcgcctcggcggcga

SEQ ID NO: 180294 - DNA, 15 bp, Homo sapiens
tgcgcctcggcggcg

SEQ ID NO: 180295 - DNA, 15 bp, Homo sapiens
gtgcgcctcggcggc

SEQ ID NO: 180296 - DNA, 15 bp, Homo sapiens
cgtgcgcctcggcgg

SEQ ID NO: 180297 - DNA, 15 bp, Homo sapiens
acgtgcgcctcggcg

SEQ ID NO: 180298 - DNA, 15 bp, Homo sapiens
tacgtgcgcctcggc

SEQ ID NO: 180299 - DNA, 15 bp, Homo sapiens
ctacgtgcgcctcgg

SEQ ID NO: 180300 - DNA, 15 bp, Homo sapiens
actacgtgcgcctcg

SEQ ID NO: 180301 - DNA, 15 bp, Homo sapiens
cactacgtgcgcctc

SEQ ID NO: 180302 - DNA, 15 bp, Homo sapiens
gcactacgtgcgcct

SEQ ID NO: 180303 - DNA, 15 bp, Homo sapiens
cgcactacgtgcgcc

SEQ ID NO: 180304 - DNA, 15 bp, Homo sapiens
gcgcactacgtgcgc

SEQ ID NO: 180305 - DNA, 15 bp, Homo sapiens
cgcgcactacgtgcg

SEQ ID NO: 180306 - DNA, 15 bp, Homo sapiens
ccgcgcactacgtgc

SEQ ID NO: 180307 - DNA, 15 bp, Homo sapiens
cccgcgcactacgtg

SEQ ID NO: 180308 - DNA, 15 bp, Homo sapiens
ccccgcgcactacgt

SEQ ID NO: 180309 - DNA, 15 bp, Homo sapiens
tccccgcgcactacg

SEQ ID NO: 180310 - DNA, 15 bp, Homo sapiens
atccccgcgcactac

SEQ ID NO: 180311 - DNA, 15 bp, Homo sapiens
gatccccgcgcacta

SEQ ID NO: 180312 - DNA, 15 bp, Homo sapiens
tgatccccgcgcact

SEQ ID NO: 180313 - DNA, 15 bp, Homo sapiens
gtgatccccgcgcac

SEQ ID NO: 180314 - DNA, 15 bp, Homo sapiens
ggtgatccccgcgca

SEQ ID NO: 180315 - DNA, 15 bp, Homo sapiens
tggtgatccccgcgc

SEQ ID NO: 180316 - DNA, 15 bp, Homo sapiens
ctggtgatccccgcg

SEQ ID NO: 180317 - DNA, 15 bp, Homo sapiens
cctggtgatccccgc

SEQ ID NO: 180318 - DNA, 15 bp, Homo sapiens
ccctggtgatccccg

SEQ ID NO: 180319 - DNA, 15 bp, Homo sapiens
accctggtgatcccc

SEQ ID NO: 180320 - DNA, 15 bp, Homo sapiens
caccctggtgatccc

SEQ ID NO: 180321 - DNA, 15 bp, Homo sapiens
ccaccctggtgatcc

SEQ ID NO: 180322 - DNA, 15 bp, Homo sapiens
cccaccctggtgatc

SEQ ID NO: 180323 - DNA, 15 bp, Homo sapiens
gcccaccctggtgat

SEQ ID NO: 180324 - DNA, 15 bp, Homo sapiens
tgcccaccctggtga

SEQ ID NO: 180325 - DNA, 15 bp, Homo sapiens
atgcccaccctggtg

SEQ ID NO: 180326 - DNA, 15 bp, Homo sapiens
catgcccaccctggt

SEQ ID NO: 180327 - DNA, 15 bp, Homo sapiens
tcatgcccaccctgg

SEQ ID NO: 180328 - DNA, 15 bp, Homo sapiens
gtcatgcccaccctg

SEQ ID NO: 180329 - DNA, 15 bp, Homo sapiens
cgtcatgcccaccct

SEQ ID NO: 180330 - DNA, 15 bp, Homo sapiens
acgtcatgcccaccc

SEQ ID NO: 180331 - DNA, 15 bp, Homo sapiens
aacgtcatgcccacc

SEQ ID NO: 180332 - DNA, 15 bp, Homo sapiens
caacgtcatgcccac

SEQ ID NO: 180333 - DNA, 15 bp, Homo sapiens
gcaacgtcatgccca

SEQ ID NO: 180334 - DNA, 15 bp, Homo sapiens
cgcaacgtcatgccc

SEQ ID NO: 180335 - DNA, 15 bp, Homo sapiens
ccgcaacgtcatgcc

SEQ ID NO: 180336 - DNA, 15 bp, Homo sapiens
accgcaacgtcatgc

SEQ ID NO: 180337 - DNA, 15 bp, Homo sapiens
taccgcaacgtcatg

SEQ ID NO: 180338 - DNA, 15 bp, Homo sapiens
ctaccgcaacgtcat

SEQ ID NO: 180339 - DNA, 15 bp, Homo sapiens
tctaccgcaacgtca

SEQ ID NO: 180340 - DNA, 15 bp, Homo sapiens
gtctaccgcaacgtc

SEQ ID NO: 180341 - DNA, 15 bp, Homo sapiens
cgtctaccgcaacgt

SEQ ID NO: 180342 - DNA, 15 bp, Homo sapiens
acgtctaccgcaacg

SEQ ID NO: 180343 - DNA, 15 bp, Homo sapiens
aacgtctaccgcaac

SEQ ID NO: 180344 - DNA, 15 bp, Homo sapiens
caacgtctaccgcaa

SEQ ID NO: 180345 - DNA, 15 bp, Homo sapiens
acaacgtctaccgca

SEQ ID NO: 180346 - DNA, 15 bp, Homo sapiens
gacaacgtctaccgc

SEQ ID NO: 180347 - DNA, 15 bp, Homo sapiens
ggacaacgtctaccg

SEQ ID NO: 180348 - DNA, 15 bp, Homo sapiens
aggacaacgtctacc

SEQ ID NO: 180349 - DNA, 15 bp, Homo sapiens
aaggacaacgtctac

SEQ ID NO: 180350 - DNA, 15 bp, Homo sapiens
caaggacaacgtcta

SEQ ID NO: 180351 - DNA, 15 bp, Homo sapiens
tcaaggacaacgtct

SEQ ID NO: 180352 - DNA, 15 bp, Homo sapiens
ctcaaggacaacgtc

SEQ ID NO: 180353 - DNA, 15 bp, Homo sapiens
cctcaaggacaacgt

SEQ ID NO: 180354 - DNA, 15 bp, Homo sapiens
acctcaaggacaacg

SEQ ID NO: 180355 - DNA, 15 bp, Homo sapiens
cacctcaaggacaac

SEQ ID NO: 180356 - DNA, 15 bp, Homo sapiens
ccacctcaaggacaa

SEQ ID NO: 180357 - DNA, 15 bp, Homo sapiens
accacctcaaggaca

SEQ ID NO: 180358 - DNA, 15 bp, Homo sapiens
gaccacctcaaggac

SEQ ID NO: 180359 - DNA, 15 bp, Homo sapiens
cgaccacctcaagga

SEQ ID NO: 180360 - DNA, 15 bp, Homo sapiens
tcgaccacctcaagg

SEQ ID NO: 180361 - DNA, 15 bp, Homo sapiens
atcgaccacctcaag

SEQ ID NO: 180362 - DNA, 15 bp, Homo sapiens
catcgaccacctcaa

SEQ ID NO: 180363 - DNA, 15 bp, Homo sapiens
ccatcgaccacctca

SEQ ID NO: 180364 - DNA, 15 bp, Homo sapiens
tccatcgaccacctc

SEQ ID NO: 180365 - DNA, 15 bp, Homo sapiens
ctccatcgaccacct

SEQ ID NO: 180366 - DNA, 15 bp, Homo sapiens
gctccatcgaccacc

SEQ ID NO: 180367 - DNA, 15 bp, Homo sapiens
ggctccatcgaccac

SEQ ID NO: 180368 - DNA, 15 bp, Homo sapiens
cggctccatcgacca

SEQ ID NO: 180369 - DNA, 15 bp, Homo sapiens
gcggctccatcgacc

SEQ ID NO: 180370 - DNA, 15 bp, Homo sapiens
tgcggctccatcgac

SEQ ID NO: 180371 - DNA, 15 bp, Homo sapiens
ctgcggctccatcga

SEQ ID NO: 180372 - DNA, 15 bp, Homo sapiens
tctgcggctccatcg

SEQ ID NO: 180373 - DNA, 15 bp, Homo sapiens
ttctgcggctccatc

SEQ ID NO: 180374 - DNA, 15 bp, Homo sapiens
cttctgcggctccat

SEQ ID NO: 180375 - DNA, 15 bp, Homo sapiens
tcttctgcggctcca

SEQ ID NO: 180376 - DNA, 15 bp, Homo sapiens
atcttctgcggctcc

SEQ ID NO: 180377 - DNA, 15 bp, Homo sapiens
catcttctgcggctc

SEQ ID NO: 180378 - DNA, 15 bp, Homo sapiens
tcatcttctgcggct

SEQ ID NO: 180379 - DNA, 15 bp, Homo sapiens
ctcatcttctgcggc

SEQ ID NO: 180380 - DNA, 15 bp, Homo sapiens
gctcatcttctgcgg

SEQ ID NO: 180381 - DNA, 15 bp, Homo sapiens
agctcatcttctgcg

SEQ ID NO: 180382 - DNA, 15 bp, Homo sapiens
cagctcatcttctgc

SEQ ID NO: 180383 - DNA, 15 bp, Homo sapiens
gcagctcatcttctg

SEQ ID NO: 180384 - DNA, 15 bp, Homo sapiens
ggcagctcatcttct

SEQ ID NO: 180385 - DNA, 15 bp, Homo sapiens
gggcagctcatcttc

SEQ ID NO: 180386 - DNA, 15 bp, Homo sapiens
ggggcagctcatctt

SEQ ID NO: 180387 - DNA, 15 bp, Homo sapiens
cggggcagctcatct

SEQ ID NO: 180388 - DNA, 15 bp, Homo sapiens
gcggggcagctcatc

SEQ ID NO: 180389 - DNA, 15 bp, Homo sapiens
ggcggggcagctcat

SEQ ID NO: 180390 - DNA, 15 bp, Homo sapiens
aggcggggcagctca

SEQ ID NO: 180391 - DNA, 15 bp, Homo sapiens
caggcggggcagctc

SEQ ID NO: 180392 - DNA, 15 bp, Homo sapiens
ccaggcggggcagct

SEQ ID NO: 180393 - DNA, 15 bp, Homo sapiens
gccaggcggggcagc

SEQ ID NO: 180394 - DNA, 15 bp, Homo sapiens
ggccaggcggggcag

SEQ ID NO: 180395 - DNA, 15 bp, Homo sapiens
gggccaggcggggca

SEQ ID NO: 180396 - DNA, 15 bp, Homo sapiens
tgggccaggcggggc

SEQ ID NO: 180397 - DNA, 15 bp, Homo sapiens
ctgggccaggcgggg

SEQ ID NO: 180398 - DNA, 15 bp, Homo sapiens
gctgggccaggcggg

SEQ ID NO: 180399 - DNA, 15 bp, Homo sapiens
cgctgggccaggcgg

SEQ ID NO: 180400 - DNA, 15 bp, Homo sapiens
tcgctgggccaggcg

SEQ ID NO: 180401 - DNA, 15 bp, Homo sapiens
gtcgctgggccaggc

SEQ ID NO: 180402 - DNA, 15 bp, Homo sapiens
cgtcgctgggccagg

SEQ ID NO: 180403 - DNA, 15 bp, Homo sapiens
ccgtcgctgggccag

SEQ ID NO: 180404 - DNA, 15 bp, Homo sapiens
gccgtcgctgggcca

SEQ ID NO: 180405 - DNA, 15 bp, Homo sapiens
cgccgtcgctgggcc

SEQ ID NO: 180406 - DNA, 15 bp, Homo sapiens
ccgccgtcgctgggc

SEQ ID NO: 180407 - DNA, 15 bp, Homo sapiens
gccgccgtcgctggg

SEQ ID NO: 180408 - DNA, 15 bp, Homo sapiens
ggccgccgtcgctgg

SEQ ID NO: 180409 - DNA, 15 bp, Homo sapiens
cggccgccgtcgctg

SEQ ID NO: 180410 - DNA, 15 bp, Homo sapiens
gcggccgccgtcgct

SEQ ID NO: 180411 - DNA, 15 bp, Homo sapiens
cgcggccgccgtcgc

SEQ ID NO: 180412 - DNA, 15 bp, Homo sapiens
gcgcggccgccgtcg

SEQ ID NO: 180413 - DNA, 15 bp, Homo sapiens
ggcgcggccgccgtc

SEQ ID NO: 180414 - DNA, 15 bp, Homo sapiens
tggcgcggccgccgt

SEQ ID NO: 180415 - DNA, 15 bp, Homo sapiens
ctggcgcggccgccg

SEQ ID NO: 180416 - DNA, 15 bp, Homo sapiens
gctggcgcggccgcc

SEQ ID NO: 180417 - DNA, 15 bp, Homo sapiens
agctggcgcggccgc

SEQ ID NO: 180418 - DNA, 15 bp, Homo sapiens
cagctggcgcggccg

SEQ ID NO: 180419 - DNA, 15 bp, Homo sapiens
ccagctggcgcggcc

SEQ ID NO: 180420 - DNA, 15 bp, Homo sapiens
accagctggcgcggc

SEQ ID NO: 180421 - DNA, 15 bp, Homo sapiens
gaccagctggcgcgg

SEQ ID NO: 180422 - DNA, 15 bp, Homo sapiens
ggaccagctggcgcg

SEQ ID NO: 180423 - DNA, 15 bp, Homo sapiens
tggaccagctggcgc

SEQ ID NO: 180424 - DNA, 15 bp, Homo sapiens
gtggaccagctggcg

SEQ ID NO: 180425 - DNA, 15 bp, Homo sapiens
ggtggaccagctggc

SEQ ID NO: 180426 - DNA, 15 bp, Homo sapiens
cggtggaccagctgg

SEQ ID NO: 180427 - DNA, 15 bp, Homo sapiens
tcggtggaccagctg

SEQ ID NO: 180428 - DNA, 15 bp, Homo sapiens
gtcggtggaccagct

SEQ ID NO: 180429 - DNA, 15 bp, Homo sapiens
agtcggtggaccagc

SEQ ID NO: 180430 - DNA, 15 bp, Homo sapiens
cagtcggtggaccag

SEQ ID NO: 180431 - DNA, 15 bp, Homo sapiens
gcagtcggtggacca

SEQ ID NO: 180432 - DNA, 15 bp, Homo sapiens
cgcagtcggtggacc

SEQ ID NO: 180433 - DNA, 15 bp, Homo sapiens
tcgcagtcggtggac

SEQ ID NO: 180434 - DNA, 15 bp, Homo sapiens
gtcgcagtcggtgga

SEQ ID NO: 180435 - DNA, 15 bp, Homo sapiens
tgtcgcagtcggtgg

SEQ ID NO: 180436 - DNA, 15 bp, Homo sapiens
ctgtcgcagtcggtg

SEQ ID NO: 180437 - DNA, 15 bp, Homo sapiens
gctgtcgcagtcggt

SEQ ID NO: 180438 - DNA, 15 bp, Homo sapiens
tgctgtcgcagtcgg

SEQ ID NO: 180439 - DNA, 15 bp, Homo sapiens
ctgctgtcgcagtcg

SEQ ID NO: 180440 - DNA, 15 bp, Homo sapiens
cctgctgtcgcagtc

SEQ ID NO: 180441 - DNA, 15 bp, Homo sapiens
tcctgctgtcgcagt

SEQ ID NO: 180442 - DNA, 15 bp, Homo sapiens
ttcctgctgtcgcag

SEQ ID NO: 180443 - DNA, 15 bp, Homo sapiens
cttcctgctgtcgca

SEQ ID NO: 180444 - DNA, 15 bp, Homo sapiens
acttcctgctgtcgc

SEQ ID NO: 180445 - DNA, 15 bp, Homo sapiens
gacttcctgctgtcg

SEQ ID NO: 180446 - DNA, 15 bp, Homo sapiens
cgacttcctgctgtc

SEQ ID NO: 180447 - DNA, 15 bp, Homo sapiens
ccgacttcctgctgt

SEQ ID NO: 180448 - DNA, 15 bp, Homo sapiens
cccgacttcctgctg

SEQ ID NO: 180449 - DNA, 15 bp, Homo sapiens
ccccgacttcctgct

SEQ ID NO: 180450 - DNA, 15 bp, Homo sapiens
cccccgacttcctgc

SEQ ID NO: 180451 - DNA, 15 bp, Homo sapiens
acccccgacttcctg

SEQ ID NO: 180452 - DNA, 15 bp, Homo sapiens
gacccccgacttcct

SEQ ID NO: 180453 - DNA, 15 bp, Homo sapiens
agacccccgacttcc

SEQ ID NO: 180454 - DNA, 15 bp, Homo sapiens
aagacccccgacttc

SEQ ID NO: 180455 - DNA, 15 bp, Homo sapiens
caagacccccgactt

SEQ ID NO: 180456 - DNA, 15 bp, Homo sapiens
gcaagacccccgact

SEQ ID NO: 180457 - DNA, 15 bp, Homo sapiens
ggcaagacccccgac

SEQ ID NO: 180458 - DNA, 15 bp, Homo sapiens
gggcaagacccccga

SEQ ID NO: 180459 - DNA, 15 bp, Homo sapiens
agggcaagacccccg

SEQ ID NO: 180460 - DNA, 15 bp, Homo sapiens
gagggcaagaccccc

SEQ ID NO: 180461 - DNA, 15 bp, Homo sapiens
cgagggcaagacccc

SEQ ID NO: 180462 - DNA, 15 bp, Homo sapiens
ccgagggcaagaccc

SEQ ID NO: 180463 - DNA, 15 bp, Homo sapiens
gccgagggcaagacc

SEQ ID NO: 180464 - DNA, 15 bp, Homo sapiens
ggccgagggcaagac

SEQ ID NO: 180465 - DNA, 15 bp, Homo sapiens
cggccgagggcaaga

SEQ ID NO: 180466 - DNA, 15 bp, Homo sapiens
gcggccgagggcaag

SEQ ID NO: 180467 - DNA, 15 bp, Homo sapiens
ggcggccgagggcaa

SEQ ID NO: 180468 - DNA, 15 bp, Homo sapiens
gggcggccgagggca

SEQ ID NO: 180469 - DNA, 15 bp, Homo sapiens
ggggcggccgagggc

SEQ ID NO: 180470 - DNA, 15 bp, Homo sapiens
gggggcggccgaggg

SEQ ID NO: 180471 - DNA, 15 bp, Homo sapiens
agggggcggccgagg

SEQ ID NO: 180472 - DNA, 15 bp, Homo sapiens
aagggggcggccgag

SEQ ID NO: 180473 - DNA, 15 bp, Homo sapiens
caagggggcggccga

SEQ ID NO: 180474 - DNA, 15 bp, Homo sapiens
acaagggggcggccg

SEQ ID NO: 180475 - DNA, 15 bp, Homo sapiens
cacaagggggcggcc

SEQ ID NO: 180476 - DNA, 15 bp, Homo sapiens
ccacaagggggcggc

SEQ ID NO: 180477 - DNA, 15 bp, Homo sapiens
gccacaagggggcgg

SEQ ID NO: 180478 - DNA, 15 bp, Homo sapiens
ggccacaagggggcg

SEQ ID NO: 180479 - DNA, 15 bp, Homo sapiens
gggccacaagggggc

SEQ ID NO: 180480 - DNA, 15 bp, Homo sapiens
tgggccacaaggggg

SEQ ID NO: 180481 - DNA, 15 bp, Homo sapiens
ctgggccacaagggg

SEQ ID NO: 180482 - DNA, 15 bp, Homo sapiens
cctgggccacaaggg

SEQ ID NO: 180483 - DNA, 15 bp, Homo sapiens
acctgggccacaagg

SEQ ID NO: 180484 - DNA, 15 bp, Homo sapiens
tacctgggccacaag

SEQ ID NO: 180485 - DNA, 15 bp, Homo sapiens
ctacctgggccacaa

SEQ ID NO: 180486 - DNA, 15 bp, Homo sapiens
actacctgggccaca

SEQ ID NO: 180487 - DNA, 15 bp, Homo sapiens
cactacctgggccac

SEQ ID NO: 180488 - DNA, 15 bp, Homo sapiens
ccactacctgggcca

SEQ ID NO: 180489 - DNA, 15 bp, Homo sapiens
accactacctgggcc

SEQ ID NO: 180490 - DNA, 15 bp, Homo sapiens
gaccactacctgggc

SEQ ID NO: 180491 - DNA, 15 bp, Homo sapiens
cgaccactacctggg

SEQ ID NO: 180492 - DNA, 15 bp, Homo sapiens
tcgaccactacctgg

SEQ ID NO: 180493 - DNA, 15 bp, Homo sapiens
ttcgaccactacctg

SEQ ID NO: 180494 - DNA, 15 bp, Homo sapiens
cttcgaccactacct

SEQ ID NO: 180495 - DNA, 15 bp, Homo sapiens
ccttcgaccactacc

SEQ ID NO: 180496 - DNA, 15 bp, Homo sapiens
cccttcgaccactac

SEQ ID NO: 180497 - DNA, 15 bp, Homo sapiens
gcccttcgaccacta

SEQ ID NO: 180498 - DNA, 15 bp, Homo sapiens
cgcccttcgaccact

SEQ ID NO: 180499 - DNA, 15 bp, Homo sapiens
ccgcccttcgaccac

SEQ ID NO: 180500 - DNA, 15 bp, Homo sapiens
gccgcccttcgacca

SEQ ID NO: 180501 - DNA, 15 bp, Homo sapiens
cgccgcccttcgacc

SEQ ID NO: 180502 - DNA, 15 bp, Homo sapiens
ccgccgcccttcgac

SEQ ID NO: 180503 - DNA, 15 bp, Homo sapiens
gccgccgcccttcga

SEQ ID NO: 180504 - DNA, 15 bp, Homo sapiens
cgccgccgcccttcg

SEQ ID NO: 180505 - DNA, 15 bp, Homo sapiens
ccgccgccgcccttc

SEQ ID NO: 180506 - DNA, 15 bp, Homo sapiens
gccgccgccgccctt

SEQ ID NO: 180507 - DNA, 15 bp, Homo sapiens
cgccgccgccgccct

SEQ ID NO: 180508 - DNA, 15 bp, Homo sapiens
tcgccgccgccgccc

SEQ ID NO: 180509 - DNA, 15 bp, Homo sapiens
ctcgccgccgccgcc

SEQ ID NO: 180510 - DNA, 15 bp, Homo sapiens
cctcgccgccgccgc

SEQ ID NO: 180511 - DNA, 15 bp, Homo sapiens
ccctcgccgccgccg

SEQ ID NO: 180512 - DNA, 15 bp, Homo sapiens
gccctcgccgccgcc

SEQ ID NO: 180513 - DNA, 15 bp, Homo sapiens
cgccctcgccgccgc

SEQ ID NO: 180514 - DNA, 15 bp, Homo sapiens
ccgccctcgccgccg

SEQ ID NO: 180515 - DNA, 15 bp, Homo sapiens
gccgccctcgccgcc

SEQ ID NO: 180516 - DNA, 15 bp, Homo sapiens
agccgccctcgccgc

SEQ ID NO: 180517 - DNA, 15 bp, Homo sapiens
gagccgccctcgccg

SEQ ID NO: 180518 - DNA, 15 bp, Homo sapiens
cgagccgccctcgcc

SEQ ID NO: 180519 - DNA, 15 bp, Homo sapiens
acgagccgccctcgc

SEQ ID NO: 180520 - DNA, 15 bp, Homo sapiens
cacgagccgccctcg

SEQ ID NO: 180521 - DNA, 15 bp, Homo sapiens
gcacgagccgccctc

SEQ ID NO: 180522 - DNA, 15 bp, Homo sapiens
tgcacgagccgccct

SEQ ID NO: 180523 - DNA, 15 bp, Homo sapiens
ctgcacgagccgccc

SEQ ID NO: 180524 - DNA, 15 bp, Homo sapiens
cctgcacgagccgcc

SEQ ID NO: 180525 - DNA, 15 bp, Homo sapiens
tcctgcacgagccgc

SEQ ID NO: 180526 - DNA, 15 bp, Homo sapiens
ttcctgcacgagccg

SEQ ID NO: 180527 - DNA, 15 bp, Homo sapiens
cttcctgcacgagcc

SEQ ID NO: 180528 - DNA, 15 bp, Homo sapiens
ccttcctgcacgagc

SEQ ID NO: 180529 - DNA, 15 bp, Homo sapiens
gccttcctgcacgag

SEQ ID NO: 180530 - DNA, 15 bp, Homo sapiens
ggccttcctgcacga

SEQ ID NO: 180531 - DNA, 15 bp, Homo sapiens
cggccttcctgcacg

SEQ ID NO: 180532 - DNA, 15 bp, Homo sapiens
gcggccttcctgcac

SEQ ID NO: 180533 - DNA, 15 bp, Homo sapiens
tgcggccttcctgca

SEQ ID NO: 180534 - DNA, 15 bp, Homo sapiens
ctgcggccttcctgc

SEQ ID NO: 180535 - DNA, 15 bp, Homo sapiens
gctgcggccttcctg

SEQ ID NO: 180536 - DNA, 15 bp, Homo sapiens
ggctgcggccttcct

SEQ ID NO: 180537 - DNA, 15 bp, Homo sapiens
gggctgcggccttcc

SEQ ID NO: 180538 - DNA, 15 bp, Homo sapiens
ggggctgcggccttc

SEQ ID NO: 180539 - DNA, 15 bp, Homo sapiens
gggggctgcggcctt

SEQ ID NO: 180540 - DNA, 15 bp, Homo sapiens
cgggggctgcggcct

SEQ ID NO: 180541 - DNA, 15 bp, Homo sapiens
tcgggggctgcggcc

SEQ ID NO: 180542 - DNA, 15 bp, Homo sapiens
ctcgggggctgcggc

SEQ ID NO: 180543 - DNA, 15 bp, Homo sapiens
cctcgggggctgcgg

SEQ ID NO: 180544 - DNA, 15 bp, Homo sapiens
ccctcgggggctgcg

SEQ ID NO: 180545 - DNA, 15 bp, Homo sapiens
gccctcgggggctgc

SEQ ID NO: 180546 - DNA, 15 bp, Homo sapiens
ggccctcgggggctg

SEQ ID NO: 180547 - DNA, 15 bp, Homo sapiens
gggccctcgggggct

SEQ ID NO: 180548 - DNA, 15 bp, Homo sapiens
ggggccctcgggggc

SEQ ID NO: 180549 - DNA, 15 bp, Homo sapiens
gggggccctcggggg

SEQ ID NO: 180550 - DNA, 15 bp, Homo sapiens
cgggggccctcgggg

SEQ ID NO: 180551 - DNA, 15 bp, Homo sapiens
gcgggggccctcggg

SEQ ID NO: 180552 - DNA, 15 bp, Homo sapiens
ggcgggggccctcgg

SEQ ID NO: 180553 - DNA, 15 bp, Homo sapiens
cggcgggggccctcg

SEQ ID NO: 180554 - DNA, 15 bp, Homo sapiens
ccggcgggggccctc

SEQ ID NO: 180555 - DNA, 15 bp, Homo sapiens
accggcgggggccct

SEQ ID NO: 180556 - DNA, 15 bp, Homo sapiens
caccggcgggggccc

SEQ ID NO: 180557 - DNA, 15 bp, Homo sapiens
gcaccggcgggggcc

SEQ ID NO: 180558 - DNA, 15 bp, Homo sapiens
agcaccggcgggggc

SEQ ID NO: 180559 - DNA, 15 bp, Homo sapiens
gagcaccggcggggg

SEQ ID NO: 180560 - DNA, 15 bp, Homo sapiens
ggagcaccggcgggg

SEQ ID NO: 180561 - DNA, 15 bp, Homo sapiens
aggagcaccggcggg

SEQ ID NO: 180562 - DNA, 15 bp, Homo sapiens
gaggagcaccggcgg

SEQ ID NO: 180563 - DNA, 15 bp, Homo sapiens
agaggagcaccggcg

SEQ ID NO: 180564 - DNA, 15 bp, Homo sapiens
tagaggagcaccggc

SEQ ID NO: 180565 - DNA, 15 bp, Homo sapiens
ctagaggagcaccgg

SEQ ID NO: 180566 - DNA, 15 bp, Homo sapiens
cctagaggagcaccg

SEQ ID NO: 180567 - DNA, 15 bp, Homo sapiens
gcctagaggagcacc

SEQ ID NO: 180568 - DNA, 15 bp, Homo sapiens
ggcctagaggagcac

SEQ ID NO: 180569 - DNA, 15 bp, Homo sapiens
cggcctagaggagca

SEQ ID NO: 180570 - DNA, 15 bp, Homo sapiens
ccggcctagaggagc

SEQ ID NO: 180571 - DNA, 15 bp, Homo sapiens
cccggcctagaggag

SEQ ID NO: 180572 - DNA, 15 bp, Homo sapiens
gcccggcctagagga

SEQ ID NO: 180573 - DNA, 15 bp, Homo sapiens
agcccggcctagagg

SEQ ID NO: 180574 - DNA, 15 bp, Homo sapiens
gagcccggcctagag

SEQ ID NO: 180575 - DNA, 15 bp, Homo sapiens
ggagcccggcctaga

SEQ ID NO: 180576 - DNA, 15 bp, Homo sapiens
tggagcccggcctag

SEQ ID NO: 180577 - DNA, 15 bp, Homo sapiens
ctggagcccggccta

SEQ ID NO: 180578 - DNA, 15 bp, Homo sapiens
gctggagcccggcct

SEQ ID NO: 180579 - DNA, 15 bp, Homo sapiens
ggctggagcccggcc

SEQ ID NO: 180580 - DNA, 15 bp, Homo sapiens
gggctggagcccggc

SEQ ID NO: 180581 - DNA, 15 bp, Homo sapiens
cgggctggagcccgg

SEQ ID NO: 180582 - DNA, 15 bp, Homo sapiens
gcgggctggagcccg

SEQ ID NO: 180583 - DNA, 15 bp, Homo sapiens
ggcgggctggagccc

SEQ ID NO: 180584 - DNA, 15 bp, Homo sapiens
cggcgggctggagcc

SEQ ID NO: 180585 - DNA, 15 bp, Homo sapiens
ccggcgggctggagc

SEQ ID NO: 180586 - DNA, 15 bp, Homo sapiens
cccggcgggctggag

SEQ ID NO: 180587 - DNA, 15 bp, Homo sapiens
ccccggcgggctgga

SEQ ID NO: 180588 - DNA, 15 bp, Homo sapiens
gccccggcgggctgg

SEQ ID NO: 180589 - DNA, 15 bp, Homo sapiens
ggccccggcgggctg

SEQ ID NO: 180590 - DNA, 15 bp, Homo sapiens
gggccccggcgggct

SEQ ID NO: 180591 - DNA, 15 bp, Homo sapiens
agggccccggcgggc

SEQ ID NO: 180592 - DNA, 15 bp, Homo sapiens
gagggccccggcggg

SEQ ID NO: 180593 - DNA, 15 bp, Homo sapiens
cgagggccccggcgg

SEQ ID NO: 180594 - DNA, 15 bp, Homo sapiens
ccgagggccccggcg

SEQ ID NO: 180595 - DNA, 15 bp, Homo sapiens
gccgagggccccggc

SEQ ID NO: 180596 - DNA, 15 bp, Homo sapiens
ggccgagggccccgg

SEQ ID NO: 180597 - DNA, 15 bp, Homo sapiens
cggccgagggccccg

SEQ ID NO: 180598 - DNA, 15 bp, Homo sapiens
tcggccgagggcccc

SEQ ID NO: 180599 - DNA, 15 bp, Homo sapiens
ctcggccgagggccc

SEQ ID NO: 180600 - DNA, 15 bp, Homo sapiens
gctcggccgagggcc

SEQ ID NO: 180601 - DNA, 15 bp, Homo sapiens
cgctcggccgagggc

SEQ ID NO: 180602 - DNA, 15 bp, Homo sapiens
tcgctcggccgaggg

SEQ ID NO: 180603 - DNA, 15 bp, Homo sapiens
ctcgctcggccgagg

SEQ ID NO: 180604 - DNA, 15 bp, Homo sapiens
gctcgctcggccgag

SEQ ID NO: 180605 - DNA, 15 bp, Homo sapiens
cgctcgctcggccga

SEQ ID NO: 180606 - DNA, 15 bp, Homo sapiens
gcgctcgctcggccg

SEQ ID NO: 180607 - DNA, 15 bp, Homo sapiens
ggcgctcgctcggcc

SEQ ID NO: 180608 - DNA, 15 bp, Homo sapiens
gggcgctcgctcggc

SEQ ID NO: 180609 - DNA, 15 bp, Homo sapiens
agggcgctcgctcgg

SEQ ID NO: 180610 - DNA, 15 bp, Homo sapiens
aagggcgctcgctcg

SEQ ID NO: 180611 - DNA, 15 bp, Homo sapiens
caagggcgctcgctc

SEQ ID NO: 180612 - DNA, 15 bp, Homo sapiens
tcaagggcgctcgct

SEQ ID NO: 180613 - DNA, 15 bp, Homo sapiens
ctcaagggcgctcgc

SEQ ID NO: 180614 - DNA, 15 bp, Homo sapiens
gctcaagggcgctcg

SEQ ID NO: 180615 - DNA, 15 bp, Homo sapiens
ggctcaagggcgctc

SEQ ID NO: 180616 - DNA, 15 bp, Homo sapiens
gggctcaagggcgct

SEQ ID NO: 180617 - DNA, 15 bp, Homo sapiens
cgggctcaagggcgc

SEQ ID NO: 180618 - DNA, 15 bp, Homo sapiens
ccgggctcaagggcg

SEQ ID NO: 180619 - DNA, 15 bp, Homo sapiens
gccgggctcaagggc

SEQ ID NO: 180620 - DNA, 15 bp, Homo sapiens
cgccgggctcaaggg

SEQ ID NO: 180621 - DNA, 15 bp, Homo sapiens
gcgccgggctcaagg

SEQ ID NO: 180622 - DNA, 15 bp, Homo sapiens
agcgccgggctcaag

SEQ ID NO: 180623 - DNA, 15 bp, Homo sapiens
gagcgccgggctcaa

SEQ ID NO: 180624 - DNA, 15 bp, Homo sapiens
agagcgccgggctca

SEQ ID NO: 180625 - DNA, 15 bp, Homo sapiens
gagagcgccgggctc

SEQ ID NO: 180626 - DNA, 15 bp, Homo sapiens
cgagagcgccgggct

SEQ ID NO: 180627 - DNA, 15 bp, Homo sapiens
gcgagagcgccgggc

SEQ ID NO: 180628 - DNA, 15 bp, Homo sapiens
ggcgagagcgccggg

SEQ ID NO: 180629 - DNA, 15 bp, Homo sapiens
gggcgagagcgccgg

SEQ ID NO: 180630 - DNA, 15 bp, Homo sapiens
ggggcgagagcgccg

SEQ ID NO: 180631 - DNA, 15 bp, Homo sapiens
gggggcgagagcgcc

SEQ ID NO: 180632 - DNA, 15 bp, Homo sapiens
cgggggcgagagcgc

SEQ ID NO: 180633 - DNA, 15 bp, Homo sapiens
gcgggggcgagagcg

SEQ ID NO: 180634 - DNA, 15 bp, Homo sapiens
cgcgggggcgagagc

SEQ ID NO: 180635 - DNA, 15 bp, Homo sapiens
ccgcgggggcgagag

SEQ ID NO: 180636 - DNA, 15 bp, Homo sapiens
cccgcgggggcgaga

SEQ ID NO: 180637 - DNA, 15 bp, Homo sapiens
gcccgcgggggcgag

SEQ ID NO: 180638 - DNA, 15 bp, Homo sapiens
tgcccgcgggggcga

SEQ ID NO: 180639 - DNA, 15 bp, Homo sapiens
gtgcccgcgggggcg

SEQ ID NO: 180640 - DNA, 15 bp, Homo sapiens
ggtgcccgcgggggc

SEQ ID NO: 180641 - DNA, 15 bp, Homo sapiens
gggtgcccgcggggg

SEQ ID NO: 180642 - DNA, 15 bp, Homo sapiens
cgggtgcccgcgggg

SEQ ID NO: 180643 - DNA, 15 bp, Homo sapiens
tcgggtgcccgcggg

SEQ ID NO: 180644 - DNA, 15 bp, Homo sapiens
ttcgggtgcccgcgg

SEQ ID NO: 180645 - DNA, 15 bp, Homo sapiens
cttcgggtgcccgcg

SEQ ID NO: 180646 - DNA, 15 bp, Homo sapiens
ccttcgggtgcccgc

SEQ ID NO: 180647 - DNA, 15 bp, Homo sapiens
gccttcgggtgcccg

SEQ ID NO: 180648 - DNA, 15 bp, Homo sapiens
agccttcgggtgccc

SEQ ID NO: 180649 - DNA, 15 bp, Homo sapiens
gagccttcgggtgcc

SEQ ID NO: 180650 - DNA, 15 bp, Homo sapiens
cgagccttcgggtgc

SEQ ID NO: 180651 - DNA, 15 bp, Homo sapiens
ccgagccttcgggtg

SEQ ID NO: 180652 - DNA, 15 bp, Homo sapiens
gccgagccttcgggt

SEQ ID NO: 180653 - DNA, 15 bp, Homo sapiens
cgccgagccttcggg

SEQ ID NO: 180654 - DNA, 15 bp, Homo sapiens
ccgccgagccttcgg

SEQ ID NO: 180655 - DNA, 15 bp, Homo sapiens
gccgccgagccttcg

SEQ ID NO: 180656 - DNA, 15 bp, Homo sapiens
ggccgccgagccttc

SEQ ID NO: 180657 - DNA, 15 bp, Homo sapiens
cggccgccgagcctt

SEQ ID NO: 180658 - DNA, 15 bp, Homo sapiens
ccggccgccgagcct

SEQ ID NO: 180659 - DNA, 15 bp, Homo sapiens
cccggccgccgagcc

SEQ ID NO: 180660 - DNA, 15 bp, Homo sapiens
gcccggccgccgagc

SEQ ID NO: 180661 - DNA, 15 bp, Homo sapiens
cgcccggccgccgag

SEQ ID NO: 180662 - DNA, 15 bp, Homo sapiens
ccgcccggccgccga

SEQ ID NO: 180663 - DNA, 15 bp, Homo sapiens
gccgcccggccgccg

SEQ ID NO: 180664 - DNA, 15 bp, Homo sapiens
agccgcccggccgcc

SEQ ID NO: 180665 - DNA, 15 bp, Homo sapiens
cagccgcccggccgc

SEQ ID NO: 180666 - DNA, 15 bp, Homo sapiens
ccagccgcccggccg

SEQ ID NO: 180667 - DNA, 15 bp, Homo sapiens
gccagccgcccggcc

SEQ ID NO: 180668 - DNA, 15 bp, Homo sapiens
tgccagccgcccggc

SEQ ID NO: 180669 - DNA, 15 bp, Homo sapiens
ctgccagccgcccgg

SEQ ID NO: 180670 - DNA, 15 bp, Homo sapiens
tctgccagccgcccg

SEQ ID NO: 180671 - DNA, 15 bp, Homo sapiens
ctctgccagccgccc

SEQ ID NO: 180672 - DNA, 15 bp, Homo sapiens
gctctgccagccgcc

SEQ ID NO: 180673 - DNA, 15 bp, Homo sapiens
cgctctgccagccgc

SEQ ID NO: 180674 - DNA, 15 bp, Homo sapiens
gcgctctgccagccg

SEQ ID NO: 180675 - DNA, 15 bp, Homo sapiens
cgcgctctgccagcc

SEQ ID NO: 180676 - DNA, 15 bp, Homo sapiens
ccgcgctctgccagc

SEQ ID NO: 180677 - DNA, 15 bp, Homo sapiens
gccgcgctctgccag

SEQ ID NO: 180678 - DNA, 15 bp, Homo sapiens
agccgcgctctgcca

SEQ ID NO: 180679 - DNA, 15 bp, Homo sapiens
aagccgcgctctgcc

SEQ ID NO: 180680 - DNA, 15 bp, Homo sapiens
caagccgcgctctgc

SEQ ID NO: 180681 - DNA, 15 bp, Homo sapiens
ccaagccgcgctctg

SEQ ID NO: 180682 - DNA, 15 bp, Homo sapiens
accaagccgcgctct

SEQ ID NO: 180683 - DNA, 15 bp, Homo sapiens
caccaagccgcgctc

SEQ ID NO: 180684 - DNA, 15 bp, Homo sapiens
gcaccaagccgcgct

SEQ ID NO: 180685 - DNA, 15 bp, Homo sapiens
cgcaccaagccgcgc

SEQ ID NO: 180686 - DNA, 15 bp, Homo sapiens
ccgcaccaagccgcg

SEQ ID NO: 180687 - DNA, 15 bp, Homo sapiens
tccgcaccaagccgc

SEQ ID NO: 180688 - DNA, 15 bp, Homo sapiens
ttccgcaccaagccg

SEQ ID NO: 180689 - DNA, 15 bp, Homo sapiens
cttccgcaccaagcc

SEQ ID NO: 180690 - DNA, 15 bp, Homo sapiens
tcttccgcaccaagc

SEQ ID NO: 180691 - DNA, 15 bp, Homo sapiens
ttcttccgcaccaag

SEQ ID NO: 180692 - DNA, 15 bp, Homo sapiens
cttcttccgcaccaa

SEQ ID NO: 180693 - DNA, 15 bp, Homo sapiens
acttcttccgcacca

SEQ ID NO: 180694 - DNA, 15 bp, Homo sapiens
gacttcttccgcacc

SEQ ID NO: 180695 - DNA, 15 bp, Homo sapiens
tgacttcttccgcac

SEQ ID NO: 180696 - DNA, 15 bp, Homo sapiens
atgacttcttccgca

SEQ ID NO: 180697 - DNA, 15 bp, Homo sapiens
gatgacttcttccgc

SEQ ID NO: 180698 - DNA, 15 bp, Homo sapiens
ggatgacttcttccg

SEQ ID NO: 180699 - DNA, 15 bp, Homo sapiens
gggatgacttcttcc

SEQ ID NO: 180700 - DNA, 15 bp, Homo sapiens
cgggatgacttcttc

SEQ ID NO: 180701 - DNA, 15 bp, Homo sapiens
ccgggatgacttctt

SEQ ID NO: 180702 - DNA, 15 bp, Homo sapiens
cccgggatgacttct

SEQ ID NO: 180703 - DNA, 15 bp, Homo sapiens
tcccgggatgacttc

SEQ ID NO: 180704 - DNA, 15 bp, Homo sapiens
ctcccgggatgactt

SEQ ID NO: 180705 - DNA, 15 bp, Homo sapiens
cctcccgggatgact

SEQ ID NO: 180706 - DNA, 15 bp, Homo sapiens
tcctcccgggatgac

SEQ ID NO: 180707 - DNA, 15 bp, Homo sapiens
ctcctcccgggatga

SEQ ID NO: 180708 - DNA, 15 bp, Homo sapiens
cctcctcccgggatg

SEQ ID NO: 180709 - DNA, 15 bp, Homo sapiens
gcctcctcccgggat

SEQ ID NO: 180710 - DNA, 15 bp, Homo sapiens
ggcctcctcccggga

SEQ ID NO: 180711 - DNA, 15 bp, Homo sapiens
tggcctcctcccggg

SEQ ID NO: 180712 - DNA, 15 bp, Homo sapiens
ttggcctcctcccgg

SEQ ID NO: 180713 - DNA, 15 bp, Homo sapiens
cttggcctcctcccg

SEQ ID NO: 180714 - DNA, 15 bp, Homo sapiens
acttggcctcctccc

SEQ ID NO: 180715 - DNA, 15 bp, Homo sapiens
gacttggcctcctcc

SEQ ID NO: 180716 - DNA, 15 bp, Homo sapiens
ggacttggcctcctc

SEQ ID NO: 180717 - DNA, 15 bp, Homo sapiens
gggacttggcctcct

SEQ ID NO: 180718 - DNA, 15 bp, Homo sapiens
cgggacttggcctcc

SEQ ID NO: 180719 - DNA, 15 bp, Homo sapiens
ccgggacttggcctc

SEQ ID NO: 180720 - DNA, 15 bp, Homo sapiens
cccgggacttggcct

SEQ ID NO: 180721 - DNA, 15 bp, Homo sapiens
tcccgggacttggcc

SEQ ID NO: 180722 - DNA, 15 bp, Homo sapiens
ctcccgggacttggc

SEQ ID NO: 180723 - DNA, 15 bp, Homo sapiens
gctcccgggacttgg

SEQ ID NO: 180724 - DNA, 15 bp, Homo sapiens
agctcccgggacttg

SEQ ID NO: 180725 - DNA, 15 bp, Homo sapiens
cagctcccgggactt

SEQ ID NO: 180726 - DNA, 15 bp, Homo sapiens
ccagctcccgggact

SEQ ID NO: 180727 - DNA, 15 bp, Homo sapiens
tccagctcccgggac

SEQ ID NO: 180728 - DNA, 15 bp, Homo sapiens
ctccagctcccggga

SEQ ID NO: 180729 - DNA, 15 bp, Homo sapiens
tctccagctcccggg

SEQ ID NO: 180730 - DNA, 15 bp, Homo sapiens
ttctccagctcccgg

SEQ ID NO: 180731 - DNA, 15 bp, Homo sapiens
cttctccagctcccg

SEQ ID NO: 180732 - DNA, 15 bp, Homo sapiens
ccttctccagctccc

SEQ ID NO: 180733 - DNA, 15 bp, Homo sapiens
gccttctccagctcc

SEQ ID NO: 180734 - DNA, 15 bp, Homo sapiens
ggccttctccagctc

SEQ ID NO: 180735 - DNA, 15 bp, Homo sapiens
cggccttctccagct

SEQ ID NO: 180736 - DNA, 15 bp, Homo sapiens
tcggccttctccagc

SEQ ID NO: 180737 - DNA, 15 bp, Homo sapiens
ctcggccttctccag

SEQ ID NO: 180738 - DNA, 15 bp, Homo sapiens
actcggccttctcca

SEQ ID NO: 180739 - DNA, 15 bp, Homo sapiens
cactcggccttctcc

SEQ ID NO: 180740 - DNA, 15 bp, Homo sapiens
ccactcggccttctc

SEQ ID NO: 180741 - DNA, 15 bp, Homo sapiens
tccactcggccttct

SEQ ID NO: 180742 - DNA, 15 bp, Homo sapiens
ctccactcggccttc

SEQ ID NO: 180743 - DNA, 15 bp, Homo sapiens
cctccactcggcctt

SEQ ID NO: 180744 - DNA, 15 bp, Homo sapiens
ccctccactcggcct

SEQ ID NO: 180745 - DNA, 15 bp, Homo sapiens
cccctccactcggcc

SEQ ID NO: 180746 - DNA, 15 bp, Homo sapiens
ccccctccactcggc

SEQ ID NO: 180747 - DNA, 15 bp, Homo sapiens
gccccctccactcgg

SEQ ID NO: 180748 - DNA, 15 bp, Homo sapiens
ggccccctccactcg

SEQ ID NO: 180749 - DNA, 15 bp, Homo sapiens
aggccccctccactc

SEQ ID NO: 180750 - DNA, 15 bp, Homo sapiens
caggccccctccact

SEQ ID NO: 180751 - DNA, 15 bp, Homo sapiens
ccaggccccctccac

SEQ ID NO: 180752 - DNA, 15 bp, Homo sapiens
tccaggccccctcca

SEQ ID NO: 180753 - DNA, 15 bp, Homo sapiens
ctccaggccccctcc

SEQ ID NO: 180754 - DNA, 15 bp, Homo sapiens
cctccaggccccctc

SEQ ID NO: 180755 - DNA, 15 bp, Homo sapiens
gcctccaggccccct

SEQ ID NO: 180756 - DNA, 15 bp, Homo sapiens
cgcctccaggccccc

SEQ ID NO: 180757 - DNA, 15 bp, Homo sapiens
ccgcctccaggcccc

SEQ ID NO: 180758 - DNA, 15 bp, Homo sapiens
tccgcctccaggccc

SEQ ID NO: 180759 - DNA, 15 bp, Homo sapiens
ctccgcctccaggcc

SEQ ID NO: 180760 - DNA, 15 bp, Homo sapiens
gctccgcctccaggc

SEQ ID NO: 180761 - DNA, 15 bp, Homo sapiens
ggctccgcctccagg

SEQ ID NO: 180762 - DNA, 15 bp, Homo sapiens
aggctccgcctccag

SEQ ID NO: 180763 - DNA, 15 bp, Homo sapiens
gaggctccgcctcca

SEQ ID NO: 180764 - DNA, 15 bp, Homo sapiens
cgaggctccgcctcc

SEQ ID NO: 180765 - DNA, 15 bp, Homo sapiens
ccgaggctccgcctc

SEQ ID NO: 180766 - DNA, 15 bp, Homo sapiens
cccgaggctccgcct

SEQ ID NO: 180767 - DNA, 15 bp, Homo sapiens
ccccgaggctccgcc

SEQ ID NO: 180768 - DNA, 15 bp, Homo sapiens
accccgaggctccgc

SEQ ID NO: 180769 - DNA, 15 bp, Homo sapiens
gaccccgaggctccg

SEQ ID NO: 180770 - DNA, 15 bp, Homo sapiens
ggaccccgaggctcc

SEQ ID NO: 180771 - DNA, 15 bp, Homo sapiens
gggaccccgaggctc

SEQ ID NO: 180772 - DNA, 15 bp, Homo sapiens
ggggaccccgaggct

SEQ ID NO: 180773 - DNA, 15 bp, Homo sapiens
gggggaccccgaggc

SEQ ID NO: 180774 - DNA, 15 bp, Homo sapiens
cgggggaccccgagg

SEQ ID NO: 180775 - DNA, 15 bp, Homo sapiens
tcgggggaccccgag

SEQ ID NO: 180776 - DNA, 15 bp, Homo sapiens
gtcgggggaccccga

SEQ ID NO: 180777 - DNA, 15 bp, Homo sapiens
cgtcgggggaccccg

SEQ ID NO: 180778 - DNA, 15 bp, Homo sapiens
ccgtcgggggacccc

SEQ ID NO: 180779 - DNA, 15 bp, Homo sapiens
cccgtcgggggaccc

SEQ ID NO: 180780 - DNA, 15 bp, Homo sapiens
ccccgtcgggggacc

SEQ ID NO: 180781 - DNA, 15 bp, Homo sapiens
gccccgtcgggggac

SEQ ID NO: 180782 - DNA, 15 bp, Homo sapiens
cgccccgtcggggga

SEQ ID NO: 180783 - DNA, 15 bp, Homo sapiens
ccgccccgtcggggg

SEQ ID NO: 180784 - DNA, 15 bp, Homo sapiens
cccgccccgtcgggg

SEQ ID NO: 180785 - DNA, 15 bp, Homo sapiens
acccgccccgtcggg

SEQ ID NO: 180786 - DNA, 15 bp, Homo sapiens
aacccgccccgtcgg

SEQ ID NO: 180787 - DNA, 15 bp, Homo sapiens
gaacccgccccgtcg

SEQ ID NO: 180788 - DNA, 15 bp, Homo sapiens
ggaacccgccccgtc

SEQ ID NO: 180789 - DNA, 15 bp, Homo sapiens
tggaacccgccccgt

SEQ ID NO: 180790 - DNA, 15 bp, Homo sapiens
ctggaacccgccccg

SEQ ID NO: 180791 - DNA, 15 bp, Homo sapiens
cctggaacccgcccc

SEQ ID NO: 180792 - DNA, 15 bp, Homo sapiens
ccctggaacccgccc

SEQ ID NO: 180793 - DNA, 15 bp, Homo sapiens
cccctggaacccgcc

SEQ ID NO: 180794 - DNA, 15 bp, Homo sapiens
acccctggaacccgc

SEQ ID NO: 180795 - DNA, 15 bp, Homo sapiens
gacccctggaacccg

SEQ ID NO: 180796 - DNA, 15 bp, Homo sapiens
ggacccctggaaccc

SEQ ID NO: 180797 - DNA, 15 bp, Homo sapiens
gggacccctggaacc

SEQ ID NO: 180798 - DNA, 15 bp, Homo sapiens
ggggacccctggaac

SEQ ID NO: 180799 - DNA, 15 bp, Homo sapiens
gggggacccctggaa

SEQ ID NO: 180800 - DNA, 15 bp, Homo sapiens
tgggggacccctgga

SEQ ID NO: 180801 - DNA, 15 bp, Homo sapiens
gtgggggacccctgg

SEQ ID NO: 180802 - DNA, 15 bp, Homo sapiens
tgtgggggacccctg

SEQ ID NO: 180803 - DNA, 15 bp, Homo sapiens
ctgtgggggacccct

SEQ ID NO: 180804 - DNA, 15 bp, Homo sapiens
tctgtgggggacccc

SEQ ID NO: 180805 - DNA, 15 bp, Homo sapiens
atctgtgggggaccc

SEQ ID NO: 180806 - DNA, 15 bp, Homo sapiens
catctgtgggggacc

SEQ ID NO: 180807 - DNA, 15 bp, Homo sapiens
tcatctgtgggggac

SEQ ID NO: 180808 - DNA, 15 bp, Homo sapiens
ctcatctgtggggga

SEQ ID NO: 180809 - DNA, 15 bp, Homo sapiens
cctcatctgtggggg

SEQ ID NO: 180810 - DNA, 15 bp, Homo sapiens
acctcatctgtgggg

SEQ ID NO: 180811 - DNA, 15 bp, Homo sapiens
cacctcatctgtggg

SEQ ID NO: 180812 - DNA, 15 bp, Homo sapiens
ccacctcatctgtgg

SEQ ID NO: 180813 - DNA, 15 bp, Homo sapiens
tccacctcatctgtg

SEQ ID NO: 180814 - DNA, 15 bp, Homo sapiens
ctccacctcatctgt

SEQ ID NO: 180815 - DNA, 15 bp, Homo sapiens
gctccacctcatctg

SEQ ID NO: 180816 - DNA, 15 bp, Homo sapiens
agctccacctcatct

SEQ ID NO: 180817 - DNA, 15 bp, Homo sapiens
cagctccacctcatc

SEQ ID NO: 180818 - DNA, 15 bp, Homo sapiens
ccagctccacctcat

SEQ ID NO: 180819 - DNA, 15 bp, Homo sapiens
cccagctccacctca

SEQ ID NO: 180820 - DNA, 15 bp, Homo sapiens
tcccagctccacctc

SEQ ID NO: 180821 - DNA, 15 bp, Homo sapiens
gtcccagctccacct

SEQ ID NO: 180822 - DNA, 15 bp, Homo sapiens
tgtcccagctccacc

SEQ ID NO: 180823 - DNA, 15 bp, Homo sapiens
atgtcccagctccac

SEQ ID NO: 180824 - DNA, 15 bp, Homo sapiens
gatgtcccagctcca

SEQ ID NO: 180825 - DNA, 15 bp, Homo sapiens
cgatgtcccagctcc

SEQ ID NO: 180826 - DNA, 15 bp, Homo sapiens
tcgatgtcccagctc

SEQ ID NO: 180827 - DNA, 15 bp, Homo sapiens
ctcgatgtcccagct

SEQ ID NO: 180828 - DNA, 15 bp, Homo sapiens
cctcgatgtcccagc

SEQ ID NO: 180829 - DNA, 15 bp, Homo sapiens
acctcgatgtcccag

SEQ ID NO: 180830 - DNA, 15 bp, Homo sapiens
cacctcgatgtccca

SEQ ID NO: 180831 - DNA, 15 bp, Homo sapiens
ccacctcgatgtccc

SEQ ID NO: 180832 - DNA, 15 bp, Homo sapiens
gccacctcgatgtcc

SEQ ID NO: 180833 - DNA, 15 bp, Homo sapiens
ggccacctcgatgtc

SEQ ID NO: 180834 - DNA, 15 bp, Homo sapiens
aggccacctcgatgt

SEQ ID NO: 180835 - DNA, 15 bp, Homo sapiens
caggccacctcgatg

SEQ ID NO: 180836 - DNA, 15 bp, Homo sapiens
ccaggccacctcgat

SEQ ID NO: 180837 - DNA, 15 bp, Homo sapiens
accaggccacctcga

SEQ ID NO: 180838 - DNA, 15 bp, Homo sapiens
gaccaggccacctcg

SEQ ID NO: 180839 - DNA, 15 bp, Homo sapiens
agaccaggccacctc

SEQ ID NO: 180840 - DNA, 15 bp, Homo sapiens
gagaccaggccacct

SEQ ID NO: 180841 - DNA, 15 bp, Homo sapiens
cgagaccaggccacc

SEQ ID NO: 180842 - DNA, 15 bp, Homo sapiens
acgagaccaggccac

SEQ ID NO: 180843 - DNA, 15 bp, Homo sapiens
aacgagaccaggcca

SEQ ID NO: 180844 - DNA, 15 bp, Homo sapiens
aaacgagaccaggcc

SEQ ID NO: 180845 - DNA, 15 bp, Homo sapiens
caaacgagaccaggc

SEQ ID NO: 180846 - DNA, 15 bp, Homo sapiens
acaaacgagaccagg

SEQ ID NO: 180847 - DNA, 15 bp, Homo sapiens
aacaaacgagaccag

SEQ ID NO: 180848 - DNA, 15 bp, Homo sapiens
taacaaacgagacca

SEQ ID NO: 180849 - DNA, 15 bp, Homo sapiens
gtaacaaacgagacc

SEQ ID NO: 180850 - DNA, 15 bp, Homo sapiens
ggtaacaaacgagac

SEQ ID NO: 180851 - DNA, 15 bp, Homo sapiens
cggtaacaaacgaga

SEQ ID NO: 180852 - DNA, 15 bp, Homo sapiens
acggtaacaaacgag

SEQ ID NO: 180853 - DNA, 15 bp, Homo sapiens
gacggtaacaaacga

SEQ ID NO: 180854 - DNA, 15 bp, Homo sapiens
tgacggtaacaaacg

SEQ ID NO: 180855 - DNA, 15 bp, Homo sapiens
ctgacggtaacaaac

SEQ ID NO: 180856 - DNA, 15 bp, Homo sapiens
tctgacggtaacaaa

SEQ ID NO: 180857 - DNA, 15 bp, Homo sapiens
ctctgacggtaacaa

SEQ ID NO: 180858 - DNA, 15 bp, Homo sapiens
cctctgacggtaaca

SEQ ID NO: 180859 - DNA, 15 bp, Homo sapiens
ccctctgacggtaac

SEQ ID NO: 180860 - DNA, 15 bp, Homo sapiens
gccctctgacggtaa

SEQ ID NO: 180861 - DNA, 15 bp, Homo sapiens
ggccctctgacggta

SEQ ID NO: 180862 - DNA, 15 bp, Homo sapiens
gggccctctgacggt

SEQ ID NO: 180863 - DNA, 15 bp, Homo sapiens
ggggccctctgacgg

SEQ ID NO: 180864 - DNA, 15 bp, Homo sapiens
cggggccctctgacg

SEQ ID NO: 180865 - DNA, 15 bp, Homo sapiens
tcggggccctctgac

SEQ ID NO: 180866 - DNA, 15 bp, Homo sapiens
ctcggggccctctga

SEQ ID NO: 180867 - DNA, 15 bp, Homo sapiens
tctcggggccctctg

SEQ ID NO: 180868 - DNA, 15 bp, Homo sapiens
ctctcggggccctct

SEQ ID NO: 180869 - DNA, 15 bp, Homo sapiens
gctctcggggccctc

SEQ ID NO: 180870 - DNA, 15 bp, Homo sapiens
agctctcggggccct

SEQ ID NO: 180871 - DNA, 15 bp, Homo sapiens
cagctctcggggccc

SEQ ID NO: 180872 - DNA, 15 bp, Homo sapiens
gcagctctcggggcc

SEQ ID NO: 180873 - DNA, 15 bp, Homo sapiens
tgcagctctcggggc

SEQ ID NO: 180874 - DNA, 15 bp, Homo sapiens
ctgcagctctcgggg

SEQ ID NO: 180875 - DNA, 15 bp, Homo sapiens
gctgcagctctcggg

SEQ ID NO: 180876 - DNA, 15 bp, Homo sapiens
agctgcagctctcgg

SEQ ID NO: 180877 - DNA, 15 bp, Homo sapiens
aagctgcagctctcg

SEQ ID NO: 180878 - DNA, 15 bp, Homo sapiens
caagctgcagctctc

SEQ ID NO: 180879 - DNA, 15 bp, Homo sapiens
gcaagctgcagctct

SEQ ID NO: 180880 - DNA, 15 bp, Homo sapiens
cgcaagctgcagctc

SEQ ID NO: 180881 - DNA, 15 bp, Homo sapiens
ccgcaagctgcagct

SEQ ID NO: 180882 - DNA, 15 bp, Homo sapiens
accgcaagctgcagc

SEQ ID NO: 180883 - DNA, 15 bp, Homo sapiens
caccgcaagctgcag

SEQ ID NO: 180884 - DNA, 15 bp, Homo sapiens
gcaccgcaagctgca

SEQ ID NO: 180885 - DNA, 15 bp, Homo sapiens
agcaccgcaagctgc

SEQ ID NO: 180886 - DNA, 15 bp, Homo sapiens
cagcaccgcaagctg

SEQ ID NO: 180887 - DNA, 15 bp, Homo sapiens
acagcaccgcaagct

SEQ ID NO: 180888 - DNA, 15 bp, Homo sapiens
aacagcaccgcaagc

SEQ ID NO: 180889 - DNA, 15 bp, Homo sapiens
caacagcaccgcaag

SEQ ID NO: 180890 - DNA, 15 bp, Homo sapiens
gcaacagcaccgcaa

SEQ ID NO: 180891 - DNA, 15 bp, Homo sapiens
ggcaacagcaccgca

SEQ ID NO: 180892 - DNA, 15 bp, Homo sapiens
aggcaacagcaccgc

SEQ ID NO: 180893 - DNA, 15 bp, Homo sapiens
gaggcaacagcaccg

SEQ ID NO: 180894 - DNA, 15 bp, Homo sapiens
cgaggcaacagcacc

SEQ ID NO: 180895 - DNA, 15 bp, Homo sapiens
ccgaggcaacagcac

SEQ ID NO: 180896 - DNA, 15 bp, Homo sapiens
gccgaggcaacagca

SEQ ID NO: 180897 - DNA, 15 bp, Homo sapiens
agccgaggcaacagc

SEQ ID NO: 180898 - DNA, 15 bp, Homo sapiens
aagccgaggcaacag

SEQ ID NO: 180899 - DNA, 15 bp, Homo sapiens
gaagccgaggcaaca

SEQ ID NO: 180900 - DNA, 15 bp, Homo sapiens
tgaagccgaggcaac

SEQ ID NO: 180901 - DNA, 15 bp, Homo sapiens
ctgaagccgaggcaa

SEQ ID NO: 180902 - DNA, 15 bp, Homo sapiens
cctgaagccgaggca

SEQ ID NO: 180903 - DNA, 15 bp, Homo sapiens
gcctgaagccgaggc

SEQ ID NO: 180904 - DNA, 15 bp, Homo sapiens
tgcctgaagccgagg

SEQ ID NO: 180905 - DNA, 15 bp, Homo sapiens
ctgcctgaagccgag

SEQ ID NO: 180906 - DNA, 15 bp, Homo sapiens
gctgcctgaagccga

SEQ ID NO: 180907 - DNA, 15 bp, Homo sapiens
cgctgcctgaagccg

SEQ ID NO: 180908 - DNA, 15 bp, Homo sapiens
gcgctgcctgaagcc

SEQ ID NO: 180909 - DNA, 15 bp, Homo sapiens
ggcgctgcctgaagc

SEQ ID NO: 180910 - DNA, 15 bp, Homo sapiens
aggcgctgcctgaag

SEQ ID NO: 180911 - DNA, 15 bp, Homo sapiens
gaggcgctgcctgaa

SEQ ID NO: 180912 - DNA, 15 bp, Homo sapiens
ggaggcgctgcctga

SEQ ID NO: 180913 - DNA, 15 bp, Homo sapiens
aggaggcgctgcctg

SEQ ID NO: 180914 - DNA, 15 bp, Homo sapiens
caggaggcgctgcct

SEQ ID NO: 180915 - DNA, 15 bp, Homo sapiens
ccaggaggcgctgcc

SEQ ID NO: 180916 - DNA, 15 bp, Homo sapiens
tccaggaggcgctgc

SEQ ID NO: 180917 - DNA, 15 bp, Homo sapiens
ttccaggaggcgctg

SEQ ID NO: 180918 - DNA, 15 bp, Homo sapiens
cttccaggaggcgct

SEQ ID NO: 180919 - DNA, 15 bp, Homo sapiens
ccttccaggaggcgc

SEQ ID NO: 180920 - DNA, 15 bp, Homo sapiens
cccttccaggaggcg

SEQ ID NO: 180921 - DNA, 15 bp, Homo sapiens
tcccttccaggaggc

SEQ ID NO: 180922 - DNA, 15 bp, Homo sapiens
ctcccttccaggagg

SEQ ID NO: 180923 - DNA, 15 bp, Homo sapiens
cctcccttccaggag

SEQ ID NO: 180924 - DNA, 15 bp, Homo sapiens
ccctcccttccagga

SEQ ID NO: 180925 - DNA, 15 bp, Homo sapiens
tccctcccttccagg

SEQ ID NO: 180926 - DNA, 15 bp, Homo sapiens
ctccctcccttccag

SEQ ID NO: 180927 - DNA, 15 bp, Homo sapiens
gctccctcccttcca

SEQ ID NO: 180928 - DNA, 15 bp, Homo sapiens
tgctccctcccttcc

SEQ ID NO: 180929 - DNA, 15 bp, Homo sapiens
ctgctccctcccttc

SEQ ID NO: 180930 - DNA, 15 bp, Homo sapiens
tctgctccctccctt

SEQ ID NO: 180931 - DNA, 15 bp, Homo sapiens
ttctgctccctccct

SEQ ID NO: 180932 - DNA, 15 bp, Homo sapiens
cttctgctccctccc

SEQ ID NO: 180933 - DNA, 15 bp, Homo sapiens
ccttctgctccctcc

SEQ ID NO: 180934 - DNA, 15 bp, Homo sapiens
cccttctgctccctc

SEQ ID NO: 180935 - DNA, 15 bp, Homo sapiens
ccccttctgctccct

SEQ ID NO: 180936 - DNA, 15 bp, Homo sapiens
gccccttctgctccc

SEQ ID NO: 180937 - DNA, 15 bp, Homo sapiens
ggccccttctgctcc

SEQ ID NO: 180938 - DNA, 15 bp, Homo sapiens
cggccccttctgctc

SEQ ID NO: 180939 - DNA, 15 bp, Homo sapiens
gcggccccttctgct

SEQ ID NO: 180940 - DNA, 15 bp, Homo sapiens
agcggccccttctgc

SEQ ID NO: 180941 - DNA, 15 bp, Homo sapiens
gagcggccccttctg

SEQ ID NO: 180942 - DNA, 15 bp, Homo sapiens
tgagcggccccttct

SEQ ID NO: 180943 - DNA, 15 bp, Homo sapiens
ctgagcggccccttc

SEQ ID NO: 180944 - DNA, 15 bp, Homo sapiens
cctgagcggcccctt

SEQ ID NO: 180945 - DNA, 15 bp, Homo sapiens
tcctgagcggcccct

SEQ ID NO: 180946 - DNA, 15 bp, Homo sapiens
ttcctgagcggcccc

SEQ ID NO: 180947 - DNA, 15 bp, Homo sapiens
tttcctgagcggccc

SEQ ID NO: 180948 - DNA, 15 bp, Homo sapiens
ctttcctgagcggcc

SEQ ID NO: 180949 - DNA, 15 bp, Homo sapiens
cctttcctgagcggc

SEQ ID NO: 180950 - DNA, 15 bp, Homo sapiens
ccctttcctgagcgg

SEQ ID NO: 180951 - DNA, 15 bp, Homo sapiens
accctttcctgagcg

SEQ ID NO: 180952 - DNA, 15 bp, Homo sapiens
caccctttcctgagc

SEQ ID NO: 180953 - DNA, 15 bp, Homo sapiens
tcaccctttcctgag

SEQ ID NO: 180954 - DNA, 15 bp, Homo sapiens
ctcaccctttcctga

SEQ ID NO: 180955 - DNA, 15 bp, Homo sapiens
cctcaccctttcctg

SEQ ID NO: 180956 - DNA, 15 bp, Homo sapiens
ccctcaccctttcct

SEQ ID NO: 180957 - DNA, 15 bp, Homo sapiens
gccctcaccctttcc

SEQ ID NO: 180958 - DNA, 15 bp, Homo sapiens
ggccctcaccctttc

SEQ ID NO: 180959 - DNA, 15 bp, Homo sapiens
tggccctcacccttt

SEQ ID NO: 180960 - DNA, 15 bp, Homo sapiens
ttggccctcaccctt

SEQ ID NO: 180961 - DNA, 15 bp, Homo sapiens
tttggccctcaccct

SEQ ID NO: 180962 - DNA, 15 bp, Homo sapiens
ctttggccctcaccc

SEQ ID NO: 180963 - DNA, 15 bp, Homo sapiens
actttggccctcacc

SEQ ID NO: 180964 - DNA, 15 bp, Homo sapiens
tactttggccctcac

SEQ ID NO: 180965 - DNA, 15 bp, Homo sapiens
ctactttggccctca

SEQ ID NO: 180966 - DNA, 15 bp, Homo sapiens
cctactttggccctc

SEQ ID NO: 180967 - DNA, 15 bp, Homo sapiens
gcctactttggccct

SEQ ID NO: 180968 - DNA, 15 bp, Homo sapiens
ggcctactttggccc

SEQ ID NO: 180969 - DNA, 15 bp, Homo sapiens
gggcctactttggcc

SEQ ID NO: 180970 - DNA, 15 bp, Homo sapiens
ggggcctactttggc

SEQ ID NO: 180971 - DNA, 15 bp, Homo sapiens
cggggcctactttgg

SEQ ID NO: 180972 - DNA, 15 bp, Homo sapiens
tcggggcctactttg

SEQ ID NO: 180973 - DNA, 15 bp, Homo sapiens
ttcggggcctacttt

SEQ ID NO: 180974 - DNA, 15 bp, Homo sapiens
gttcggggcctactt

SEQ ID NO: 180975 - DNA, 15 bp, Homo sapiens
ggttcggggcctact

SEQ ID NO: 180976 - DNA, 15 bp, Homo sapiens
gggttcggggcctac

SEQ ID NO: 180977 - DNA, 15 bp, Homo sapiens
ggggttcggggccta

SEQ ID NO: 180978 - DNA, 15 bp, Homo sapiens
gggggttcggggcct

SEQ ID NO: 180979 - DNA, 15 bp, Homo sapiens
agggggttcggggcc

SEQ ID NO: 180980 - DNA, 15 bp, Homo sapiens
aagggggttcggggc

SEQ ID NO: 180981 - DNA, 15 bp, Homo sapiens
taagggggttcgggg

SEQ ID NO: 180982 - DNA, 15 bp, Homo sapiens
ctaagggggttcggg

SEQ ID NO: 180983 - DNA, 15 bp, Homo sapiens
tctaagggggttcgg

SEQ ID NO: 180984 - DNA, 15 bp, Homo sapiens
atctaagggggttcg

SEQ ID NO: 180985 - DNA, 15 bp, Homo sapiens
catctaagggggttc

SEQ ID NO: 180986 - DNA, 15 bp, Homo sapiens
gcatctaagggggtt

SEQ ID NO: 180987 - DNA, 15 bp, Homo sapiens
tgcatctaagggggt

SEQ ID NO: 180988 - DNA, 15 bp, Homo sapiens
ttgcatctaaggggg

SEQ ID NO: 180989 - DNA, 15 bp, Homo sapiens
cttgcatctaagggg

SEQ ID NO: 180990 - DNA, 15 bp, Homo sapiens
tcttgcatctaaggg

SEQ ID NO: 180991 - DNA, 15 bp, Homo sapiens
gtcttgcatctaagg

SEQ ID NO: 180992 - DNA, 15 bp, Homo sapiens
tgtcttgcatctaag

SEQ ID NO: 180993 - DNA, 15 bp, Homo sapiens
ttgtcttgcatctaa

SEQ ID NO: 180994 - DNA, 15 bp, Homo sapiens
cttgtcttgcatcta

SEQ ID NO: 180995 - DNA, 15 bp, Homo sapiens
tcttgtcttgcatct

SEQ ID NO: 180996 - DNA, 15 bp, Homo sapiens
ctcttgtcttgcatc

SEQ ID NO: 180997 - DNA, 15 bp, Homo sapiens
tctcttgtcttgcat

SEQ ID NO: 180998 - DNA, 15 bp, Homo sapiens
gtctcttgtcttgca

SEQ ID NO: 180999 - DNA, 15 bp, Homo sapiens
cgtctcttgtcttgc

SEQ ID NO: 181000 - DNA, 15 bp, Homo sapiens
tcgtctcttgtcttg

SEQ ID NO: 181001 - DNA, 15 bp, Homo sapiens
ttcgtctcttgtctt

SEQ ID NO: 181002 - DNA, 15 bp, Homo sapiens
attcgtctcttgtct

SEQ ID NO: 181003 - DNA, 15 bp, Homo sapiens
tattcgtctcttgtc

SEQ ID NO: 181004 - DNA, 15 bp, Homo sapiens
atattcgtctcttgt

SEQ ID NO: 181005 - DNA, 15 bp, Homo sapiens
tatattcgtctcttg

SEQ ID NO: 181006 - DNA, 15 bp, Homo sapiens
ctatattcgtctctt

SEQ ID NO: 181007 - DNA, 15 bp, Homo sapiens
actatattcgtctct

SEQ ID NO: 181008 - DNA, 15 bp, Homo sapiens
cactatattcgtctc

SEQ ID NO: 181009 - DNA, 15 bp, Homo sapiens
ccactatattcgtct

SEQ ID NO: 181010 - DNA, 15 bp, Homo sapiens
tccactatattcgtc

SEQ ID NO: 181011 - DNA, 15 bp, Homo sapiens
ttccactatattcgt

SEQ ID NO: 181012 - DNA, 15 bp, Homo sapiens
cttccactatattcg

SEQ ID NO: 181013 - DNA, 15 bp, Homo sapiens
tcttccactatattc

SEQ ID NO: 181014 - DNA, 15 bp, Homo sapiens
ctcttccactatatt

SEQ ID NO: 181015 - DNA, 15 bp, Homo sapiens
cctcttccactatat

SEQ ID NO: 181016 - DNA, 15 bp, Homo sapiens
acctcttccactata

SEQ ID NO: 181017 - DNA, 15 bp, Homo sapiens
cacctcttccactat

SEQ ID NO: 181018 - DNA, 15 bp, Homo sapiens
ccacctcttccacta

SEQ ID NO: 181019 - DNA, 15 bp, Homo sapiens
cccacctcttccact

SEQ ID NO: 181020 - DNA, 15 bp, Homo sapiens
ccccacctcttccac

SEQ ID NO: 181021 - DNA, 15 bp, Homo sapiens
tccccacctcttcca

SEQ ID NO: 181022 - DNA, 15 bp, Homo sapiens
ctccccacctcttcc

SEQ ID NO: 181023 - DNA, 15 bp, Homo sapiens
tctccccacctcttc

SEQ ID NO: 181024 - DNA, 15 bp, Homo sapiens
ttctccccacctctt

SEQ ID NO: 181025 - DNA, 15 bp, Homo sapiens
attctccccacctct

SEQ ID NO: 181026 - DNA, 15 bp, Homo sapiens
cattctccccacctc

SEQ ID NO: 181027 - DNA, 15 bp, Homo sapiens
gcattctccccacct

SEQ ID NO: 181028 - DNA, 15 bp, Homo sapiens
ggcattctccccacc

SEQ ID NO: 181029 - DNA, 15 bp, Homo sapiens
aggcattctccccac

SEQ ID NO: 181030 - DNA, 15 bp, Homo sapiens
caggcattctcccca

SEQ ID NO: 181031 - DNA, 15 bp, Homo sapiens
ccaggcattctcccc

SEQ ID NO: 181032 - DNA, 15 bp, Homo sapiens
cccaggcattctccc

SEQ ID NO: 181033 - DNA, 15 bp, Homo sapiens
ccccaggcattctcc

SEQ ID NO: 181034 - DNA, 15 bp, Homo sapiens
gccccaggcattctc

SEQ ID NO: 181035 - DNA, 15 bp, Homo sapiens
cgccccaggcattct

SEQ ID NO: 181036 - DNA, 15 bp, Homo sapiens
gcgccccaggcattc

SEQ ID NO: 181037 - DNA, 15 bp, Homo sapiens
agcgccccaggcatt

SEQ ID NO: 181038 - DNA, 15 bp, Homo sapiens
gagcgccccaggcat

SEQ ID NO: 181039 - DNA, 15 bp, Homo sapiens
tgagcgccccaggca

SEQ ID NO: 181040 - DNA, 15 bp, Homo sapiens
ctgagcgccccaggc

SEQ ID NO: 181041 - DNA, 15 bp, Homo sapiens
cctgagcgccccagg

SEQ ID NO: 181042 - DNA, 15 bp, Homo sapiens
tcctgagcgccccag

SEQ ID NO: 181043 - DNA, 15 bp, Homo sapiens
ctcctgagcgcccca

SEQ ID NO: 181044 - DNA, 15 bp, Homo sapiens
tctcctgagcgcccc

SEQ ID NO: 181045 - DNA, 15 bp, Homo sapiens
ctctcctgagcgccc

SEQ ID NO: 181046 - DNA, 15 bp, Homo sapiens
tctctcctgagcgcc

SEQ ID NO: 181047 - DNA, 15 bp, Homo sapiens
atctctcctgagcgc

SEQ ID NO: 181048 - DNA, 15 bp, Homo sapiens
catctctcctgagcg

SEQ ID NO: 181049 - DNA, 15 bp, Homo sapiens
ccatctctcctgagc

SEQ ID NO: 181050 - DNA, 15 bp, Homo sapiens
gccatctctcctgag

SEQ ID NO: 181051 - DNA, 15 bp, Homo sapiens
cgccatctctcctga

SEQ ID NO: 181052 - DNA, 15 bp, Homo sapiens
ccgccatctctcctg

SEQ ID NO: 181053 - DNA, 15 bp, Homo sapiens
cccgccatctctcct

SEQ ID NO: 181054 - DNA, 15 bp, Homo sapiens
ccccgccatctctcc

SEQ ID NO: 181055 - DNA, 15 bp, Homo sapiens
tccccgccatctctc

SEQ ID NO: 181056 - DNA, 15 bp, Homo sapiens
ctccccgccatctct

SEQ ID NO: 181057 - DNA, 15 bp, Homo sapiens
gctccccgccatctc

SEQ ID NO: 181058 - DNA, 15 bp, Homo sapiens
ggctccccgccatct

SEQ ID NO: 181059 - DNA, 15 bp, Homo sapiens
cggctccccgccatc

SEQ ID NO: 181060 - DNA, 15 bp, Homo sapiens
gcggctccccgccat

SEQ ID NO: 181061 - DNA, 15 bp, Homo sapiens
ggcggctccccgcca

SEQ ID NO: 181062 - DNA, 15 bp, Homo sapiens
cggcggctccccgcc

SEQ ID NO: 181063 - DNA, 15 bp, Homo sapiens
acggcggctccccgc

SEQ ID NO: 181064 - DNA, 15 bp, Homo sapiens
cacggcggctccccg

SEQ ID NO: 181065 - DNA, 15 bp, Homo sapiens
acacggcggctcccc

SEQ ID NO: 181066 - DNA, 15 bp, Homo sapiens
gacacggcggctccc

SEQ ID NO: 181067 - DNA, 15 bp, Homo sapiens
ggacacggcggctcc

SEQ ID NO: 181068 - DNA, 15 bp, Homo sapiens
cggacacggcggctc

SEQ ID NO: 181069 - DNA, 15 bp, Homo sapiens
acggacacggcggct

SEQ ID NO: 181070 - DNA, 15 bp, Homo sapiens
aacggacacggcggc

SEQ ID NO: 181071 - DNA, 15 bp, Homo sapiens
aaacggacacggcgg

SEQ ID NO: 181072 - DNA, 15 bp, Homo sapiens
caaacggacacggcg

SEQ ID NO: 181073 - DNA, 15 bp, Homo sapiens
ccaaacggacacggc

SEQ ID NO: 181074 - DNA, 15 bp, Homo sapiens
gccaaacggacacgg

SEQ ID NO: 181075 - DNA, 15 bp, Homo sapiens
cgccaaacggacacg

SEQ ID NO: 181076 - DNA, 15 bp, Homo sapiens
tcgccaaacggacac

SEQ ID NO: 181077 - DNA, 15 bp, Homo sapiens
atcgccaaacggaca

SEQ ID NO: 181078 - DNA, 15 bp, Homo sapiens
gatcgccaaacggac

SEQ ID NO: 181079 - DNA, 15 bp, Homo sapiens
ggatcgccaaacgga

SEQ ID NO: 181080 - DNA, 15 bp, Homo sapiens
gggatcgccaaacgg

SEQ ID NO: 181081 - DNA, 15 bp, Homo sapiens
ggggatcgccaaacg

SEQ ID NO: 181082 - DNA, 15 bp, Homo sapiens
aggggatcgccaaac

SEQ ID NO: 181083 - DNA, 15 bp, Homo sapiens
gaggggatcgccaaa

SEQ ID NO: 181084 - DNA, 15 bp, Homo sapiens
tgaggggatcgccaa

SEQ ID NO: 181085 - DNA, 15 bp, Homo sapiens
ctgaggggatcgcca

SEQ ID NO: 181086 - DNA, 15 bp, Homo sapiens
cctgaggggatcgcc

SEQ ID NO: 181087 - DNA, 15 bp, Homo sapiens
ccctgaggggatcgc

SEQ ID NO: 181088 - DNA, 15 bp, Homo sapiens
accctgaggggatcg

SEQ ID NO: 181089 - DNA, 15 bp, Homo sapiens
gaccctgaggggatc

SEQ ID NO: 181090 - DNA, 15 bp, Homo sapiens
tgaccctgaggggat

SEQ ID NO: 181091 - DNA, 15 bp, Homo sapiens
ttgaccctgagggga

SEQ ID NO: 181092 - DNA, 15 bp, Homo sapiens
gttgaccctgagggg

SEQ ID NO: 181093 - DNA, 15 bp, Homo sapiens
agttgaccctgaggg

SEQ ID NO: 181094 - DNA, 15 bp, Homo sapiens
gagttgaccctgagg

SEQ ID NO: 181095 - DNA, 15 bp, Homo sapiens
agagttgaccctgag

SEQ ID NO: 181096 - DNA, 15 bp, Homo sapiens
cagagttgaccctga

SEQ ID NO: 181097 - DNA, 15 bp, Homo sapiens
gcagagttgaccctg

SEQ ID NO: 181098 - DNA, 15 bp, Homo sapiens
tgcagagttgaccct

SEQ ID NO: 181099 - DNA, 15 bp, Homo sapiens
gtgcagagttgaccc

SEQ ID NO: 181100 - DNA, 15 bp, Homo sapiens
agtgcagagttgacc

SEQ ID NO: 181101 - DNA, 15 bp, Homo sapiens
gagtgcagagttgac

SEQ ID NO: 181102 - DNA, 15 bp, Homo sapiens
ggagtgcagagttga

SEQ ID NO: 181103 - DNA, 15 bp, Homo sapiens
aggagtgcagagttg

SEQ ID NO: 181104 - DNA, 15 bp, Homo sapiens
gaggagtgcagagtt

SEQ ID NO: 181105 - DNA, 15 bp, Homo sapiens
agaggagtgcagagt

SEQ ID NO: 181106 - DNA, 15 bp, Homo sapiens
cagaggagtgcagag

SEQ ID NO: 181107 - DNA, 15 bp, Homo sapiens
gcagaggagtgcaga

SEQ ID NO: 181108 - DNA, 15 bp, Homo sapiens
tgcagaggagtgcag

SEQ ID NO: 181109 - DNA, 15 bp, Homo sapiens
atgcagaggagtgca

SEQ ID NO: 181110 - DNA, 15 bp, Homo sapiens
catgcagaggagtgc

SEQ ID NO: 181111 - DNA, 15 bp, Homo sapiens
acatgcagaggagtg

SEQ ID NO: 181112 - DNA, 15 bp, Homo sapiens
tacatgcagaggagt

SEQ ID NO: 181113 - DNA, 15 bp, Homo sapiens
ctacatgcagaggag

SEQ ID NO: 181114 - DNA, 15 bp, Homo sapiens
cctacatgcagagga

SEQ ID NO: 181115 - DNA, 15 bp, Homo sapiens
tcctacatgcagagg

SEQ ID NO: 181116 - DNA, 15 bp, Homo sapiens
atcctacatgcagag

SEQ ID NO: 181117 - DNA, 15 bp, Homo sapiens
catcctacatgcaga

SEQ ID NO: 181118 - DNA, 15 bp, Homo sapiens
acatcctacatgcag

SEQ ID NO: 181119 - DNA, 15 bp, Homo sapiens
cacatcctacatgca

SEQ ID NO: 181120 - DNA, 15 bp, Homo sapiens
gcacatcctacatgc

SEQ ID NO: 181121 - DNA, 15 bp, Homo sapiens
agcacatcctacatg

SEQ ID NO: 181122 - DNA, 15 bp, Homo sapiens
cagcacatcctacat

SEQ ID NO: 181123 - DNA, 15 bp, Homo sapiens
gcagcacatcctaca

SEQ ID NO: 181124 - DNA, 15 bp, Homo sapiens
cgcagcacatcctac

SEQ ID NO: 181125 - DNA, 15 bp, Homo sapiens
tcgcagcacatccta

SEQ ID NO: 181126 - DNA, 15 bp, Homo sapiens
ctcgcagcacatcct

SEQ ID NO: 181127 - DNA, 15 bp, Homo sapiens
tctcgcagcacatcc

SEQ ID NO: 181128 - DNA, 15 bp, Homo sapiens
ttctcgcagcacatc

SEQ ID NO: 181129 - DNA, 15 bp, Homo sapiens
gttctcgcagcacat

SEQ ID NO: 181130 - DNA, 15 bp, Homo sapiens
ggttctcgcagcaca

SEQ ID NO: 181131 - DNA, 15 bp, Homo sapiens
tggttctcgcagcac

SEQ ID NO: 181132 - DNA, 15 bp, Homo sapiens
ctggttctcgcagca

SEQ ID NO: 181133 - DNA, 15 bp, Homo sapiens
cctggttctcgcagc

SEQ ID NO: 181134 - DNA, 15 bp, Homo sapiens
ccctggttctcgcag

SEQ ID NO: 181135 - DNA, 15 bp, Homo sapiens
tccctggttctcgca

SEQ ID NO: 181136 - DNA, 15 bp, Homo sapiens
atccctggttctcgc

SEQ ID NO: 181137 - DNA, 15 bp, Homo sapiens
catccctggttctcg

SEQ ID NO: 181138 - DNA, 15 bp, Homo sapiens
tcatccctggttctc

SEQ ID NO: 181139 - DNA, 15 bp, Homo sapiens
ctcatccctggttct

SEQ ID NO: 181140 - DNA, 15 bp, Homo sapiens
gctcatccctggttc

SEQ ID NO: 181141 - DNA, 15 bp, Homo sapiens
tgctcatccctggtt

SEQ ID NO: 181142 - DNA, 15 bp, Homo sapiens
atgctcatccctggt

SEQ ID NO: 181143 - DNA, 15 bp, Homo sapiens
gatgctcatccctgg

SEQ ID NO: 181144 - DNA, 15 bp, Homo sapiens
agatgctcatccctg

SEQ ID NO: 181145 - DNA, 15 bp, Homo sapiens
tagatgctcatccct

SEQ ID NO: 181146 - DNA, 15 bp, Homo sapiens
ttagatgctcatccc

SEQ ID NO: 181147 - DNA, 15 bp, Homo sapiens
cttagatgctcatcc

SEQ ID NO: 181148 - DNA, 15 bp, Homo sapiens
gcttagatgctcatc

SEQ ID NO: 181149 - DNA, 15 bp, Homo sapiens
agcttagatgctcat

SEQ ID NO: 181150 - DNA, 15 bp, Homo sapiens
cagcttagatgctca

SEQ ID NO: 181151 - DNA, 15 bp, Homo sapiens
acagcttagatgctc

SEQ ID NO: 181152 - DNA, 15 bp, Homo sapiens
gacagcttagatgct

SEQ ID NO: 181153 - DNA, 15 bp, Homo sapiens
agacagcttagatgc

SEQ ID NO: 181154 - DNA, 15 bp, Homo sapiens
tagacagcttagatg

SEQ ID NO: 181155 - DNA, 15 bp, Homo sapiens
atagacagcttagat

SEQ ID NO: 181156 - DNA, 15 bp, Homo sapiens
catagacagcttaga

SEQ ID NO: 181157 - DNA, 15 bp, Homo sapiens
ccatagacagcttag

SEQ ID NO: 181158 - DNA, 15 bp, Homo sapiens
cccatagacagctta

SEQ ID NO: 181159 - DNA, 15 bp, Homo sapiens
acccatagacagctt

SEQ ID NO: 181160 - DNA, 15 bp, Homo sapiens
cacccatagacagct

SEQ ID NO: 181161 - DNA, 15 bp, Homo sapiens
acacccatagacagc

SEQ ID NO: 181162 - DNA, 15 bp, Homo sapiens
cacacccatagacag

SEQ ID NO: 181163 - DNA, 15 bp, Homo sapiens
acacacccatagaca

SEQ ID NO: 181164 - DNA, 15 bp, Homo sapiens
gacacacccatagac

SEQ ID NO: 181165 - DNA, 15 bp, Homo sapiens
ggacacacccataga

SEQ ID NO: 181166 - DNA, 15 bp, Homo sapiens
cggacacacccatag

SEQ ID NO: 181167 - DNA, 15 bp, Homo sapiens
ccggacacacccata

SEQ ID NO: 181168 - DNA, 15 bp, Homo sapiens
gccggacacacccat

SEQ ID NO: 181169 - DNA, 15 bp, Homo sapiens
ggccggacacaccca

SEQ ID NO: 181170 - DNA, 15 bp, Homo sapiens
aggccggacacaccc

SEQ ID NO: 181171 - DNA, 15 bp, Homo sapiens
caggccggacacacc

SEQ ID NO: 181172 - DNA, 15 bp, Homo sapiens
ccaggccggacacac

SEQ ID NO: 181173 - DNA, 15 bp, Homo sapiens
tccaggccggacaca

SEQ ID NO: 181174 - DNA, 15 bp, Homo sapiens
ctccaggccggacac

SEQ ID NO: 181175 - DNA, 15 bp, Homo sapiens
actccaggccggaca

SEQ ID NO: 181176 - DNA, 15 bp, Homo sapiens
gactccaggccggac

SEQ ID NO: 181177 - DNA, 15 bp, Homo sapiens
ggactccaggccgga

SEQ ID NO: 181178 - DNA, 15 bp, Homo sapiens
aggactccaggccgg

SEQ ID NO: 181179 - DNA, 15 bp, Homo sapiens
gaggactccaggccg

SEQ ID NO: 181180 - DNA, 15 bp, Homo sapiens
agaggactccaggcc

SEQ ID NO: 181181 - DNA, 15 bp, Homo sapiens
cagaggactccaggc

SEQ ID NO: 181182 - DNA, 15 bp, Homo sapiens
ccagaggactccagg

SEQ ID NO: 181183 - DNA, 15 bp, Homo sapiens
cccagaggactccag

SEQ ID NO: 181184 - DNA, 15 bp, Homo sapiens
tcccagaggactcca

SEQ ID NO: 181185 - DNA, 15 bp, Homo sapiens
ctcccagaggactcc

SEQ ID NO: 181186 - DNA, 15 bp, Homo sapiens
tctcccagaggactc

SEQ ID NO: 181187 - DNA, 15 bp, Homo sapiens
ctctcccagaggact

SEQ ID NO: 181188 - DNA, 15 bp, Homo sapiens
tctctcccagaggac

SEQ ID NO: 181189 - DNA, 15 bp, Homo sapiens
ctctctcccagagga

SEQ ID NO: 181190 - DNA, 15 bp, Homo sapiens
tctctctcccagagg

SEQ ID NO: 181191 - DNA, 15 bp, Homo sapiens
ctctctctcccagag

SEQ ID NO: 181192 - DNA, 15 bp, Homo sapiens
gctctctctcccaga

SEQ ID NO: 181193 - DNA, 15 bp, Homo sapiens
agctctctctcccag

SEQ ID NO: 181194 - DNA, 15 bp, Homo sapiens
cagctctctctccca

SEQ ID NO: 181195 - DNA, 15 bp, Homo sapiens
ccagctctctctccc

SEQ ID NO: 181196 - DNA, 15 bp, Homo sapiens
cccagctctctctcc

SEQ ID NO: 181197 - DNA, 15 bp, Homo sapiens
gcccagctctctctc

SEQ ID NO: 181198 - DNA, 15 bp, Homo sapiens
agcccagctctctct

SEQ ID NO: 181199 - DNA, 15 bp, Homo sapiens
cagcccagctctctc

SEQ ID NO: 181200 - DNA, 15 bp, Homo sapiens
ccagcccagctctct

SEQ ID NO: 181201 - DNA, 15 bp, Homo sapiens
accagcccagctctc

SEQ ID NO: 181202 - DNA, 15 bp, Homo sapiens
taccagcccagctct

SEQ ID NO: 181203 - DNA, 15 bp, Homo sapiens
ctaccagcccagctc

SEQ ID NO: 181204 - DNA, 15 bp, Homo sapiens
cctaccagcccagct

SEQ ID NO: 181205 - DNA, 15 bp, Homo sapiens
ccctaccagcccagc

SEQ ID NO: 181206 - DNA, 15 bp, Homo sapiens
cccctaccagcccag

SEQ ID NO: 181207 - DNA, 15 bp, Homo sapiens
gcccctaccagccca

SEQ ID NO: 181208 - DNA, 15 bp, Homo sapiens
tgcccctaccagccc

SEQ ID NO: 181209 - DNA, 15 bp, Homo sapiens
ctgcccctaccagcc

SEQ ID NO: 181210 - DNA, 15 bp, Homo sapiens
actgcccctaccagc

SEQ ID NO: 181211 - DNA, 15 bp, Homo sapiens
cactgcccctaccag

SEQ ID NO: 181212 - DNA, 15 bp, Homo sapiens
ccactgcccctacca

SEQ ID NO: 181213 - DNA, 15 bp, Homo sapiens
gccactgcccctacc

SEQ ID NO: 181214 - DNA, 15 bp, Homo sapiens
tgccactgcccctac

SEQ ID NO: 181215 - DNA, 15 bp, Homo sapiens
ctgccactgccccta

SEQ ID NO: 181216 - DNA, 15 bp, Homo sapiens
tctgccactgcccct

SEQ ID NO: 181217 - DNA, 15 bp, Homo sapiens
atctgccactgcccc

SEQ ID NO: 181218 - DNA, 15 bp, Homo sapiens
gatctgccactgccc

SEQ ID NO: 181219 - DNA, 15 bp, Homo sapiens
agatctgccactgcc

SEQ ID NO: 181220 - DNA, 15 bp, Homo sapiens
gagatctgccactgc

SEQ ID NO: 181221 - DNA, 15 bp, Homo sapiens
agagatctgccactg

SEQ ID NO: 181222 - DNA, 15 bp, Homo sapiens
gagagatctgccact

SEQ ID NO: 181223 - DNA, 15 bp, Homo sapiens
agagagatctgccac

SEQ ID NO: 181224 - DNA, 15 bp, Homo sapiens
cagagagatctgcca

SEQ ID NO: 181225 - DNA, 15 bp, Homo sapiens
ccagagagatctgcc

SEQ ID NO: 181226 - DNA, 15 bp, Homo sapiens
tccagagagatctgc

SEQ ID NO: 181227 - DNA, 15 bp, Homo sapiens
ctccagagagatctg

SEQ ID NO: 181228 - DNA, 15 bp, Homo sapiens
cctccagagagatct

SEQ ID NO: 181229 - DNA, 15 bp, Homo sapiens
ccctccagagagatc

SEQ ID NO: 181230 - DNA, 15 bp, Homo sapiens
cccctccagagagat

SEQ ID NO: 181231 - DNA, 15 bp, Homo sapiens
gcccctccagagaga

SEQ ID NO: 181232 - DNA, 15 bp, Homo sapiens
ggcccctccagagag

SEQ ID NO: 181233 - DNA, 15 bp, Homo sapiens
cggcccctccagaga

SEQ ID NO: 181234 - DNA, 15 bp, Homo sapiens
ccggcccctccagag

SEQ ID NO: 181235 - DNA, 15 bp, Homo sapiens
cccggcccctccaga

SEQ ID NO: 181236 - DNA, 15 bp, Homo sapiens
gcccggcccctccag

SEQ ID NO: 181237 - DNA, 15 bp, Homo sapiens
agcccggcccctcca

SEQ ID NO: 181238 - DNA, 15 bp, Homo sapiens
cagcccggcccctcc

SEQ ID NO: 181239 - DNA, 15 bp, Homo sapiens
gcagcccggcccctc

SEQ ID NO: 181240 - DNA, 15 bp, Homo sapiens
tgcagcccggcccct

SEQ ID NO: 181241 - DNA, 15 bp, Homo sapiens
ttgcagcccggcccc

SEQ ID NO: 181242 - DNA, 15 bp, Homo sapiens
cttgcagcccggccc

SEQ ID NO: 181243 - DNA, 15 bp, Homo sapiens
acttgcagcccggcc

SEQ ID NO: 181244 - DNA, 15 bp, Homo sapiens
gacttgcagcccggc

SEQ ID NO: 181245 - DNA, 15 bp, Homo sapiens
ggacttgcagcccgg

SEQ ID NO: 181246 - DNA, 15 bp, Homo sapiens
aggacttgcagcccg

SEQ ID NO: 181247 - DNA, 15 bp, Homo sapiens
aaggacttgcagccc

SEQ ID NO: 181248 - DNA, 15 bp, Homo sapiens
taaggacttgcagcc

SEQ ID NO: 181249 - DNA, 15 bp, Homo sapiens
ttaaggacttgcagc

SEQ ID NO: 181250 - DNA, 15 bp, Homo sapiens
cttaaggacttgcag

SEQ ID NO: 181251 - DNA, 15 bp, Homo sapiens
gcttaaggacttgca

SEQ ID NO: 181252 - DNA, 15 bp, Homo sapiens
ggcttaaggacttgc

SEQ ID NO: 181253 - DNA, 15 bp, Homo sapiens
gggcttaaggacttg

SEQ ID NO: 181254 - DNA, 15 bp, Homo sapiens
agggcttaaggactt

SEQ ID NO: 181255 - DNA, 15 bp, Homo sapiens
cagggcttaaggact

SEQ ID NO: 181256 - DNA, 15 bp, Homo sapiens
gcagggcttaaggac

SEQ ID NO: 181257 - DNA, 15 bp, Homo sapiens
ggcagggcttaagga

SEQ ID NO: 181258 - DNA, 15 bp, Homo sapiens
aggcagggcttaagg

SEQ ID NO: 181259 - DNA, 15 bp, Homo sapiens
gaggcagggcttaag

SEQ ID NO: 181260 - DNA, 15 bp, Homo sapiens
ggaggcagggcttaa

SEQ ID NO: 181261 - DNA, 15 bp, Homo sapiens
gggaggcagggctta

SEQ ID NO: 181262 - DNA, 15 bp, Homo sapiens
ggggaggcagggctt

SEQ ID NO: 181263 - DNA, 15 bp, Homo sapiens
aggggaggcagggct

SEQ ID NO: 181264 - DNA, 15 bp, Homo sapiens
gaggggaggcagggc

SEQ ID NO: 181265 - DNA, 15 bp, Homo sapiens
ggaggggaggcaggg

SEQ ID NO: 181266 - DNA, 15 bp, Homo sapiens
gggaggggaggcagg

SEQ ID NO: 181267 - DNA, 15 bp, Homo sapiens
tgggaggggaggcag

SEQ ID NO: 181268 - DNA, 15 bp, Homo sapiens
gtgggaggggaggca

SEQ ID NO: 181269 - DNA, 15 bp, Homo sapiens
ggtgggaggggaggc

SEQ ID NO: 181270 - DNA, 15 bp, Homo sapiens
aggtgggaggggagg

SEQ ID NO: 181271 - DNA, 15 bp, Homo sapiens
gaggtgggaggggag

SEQ ID NO: 181272 - DNA, 15 bp, Homo sapiens
ggaggtgggagggga

SEQ ID NO: 181273 - DNA, 15 bp, Homo sapiens
gggaggtgggagggg

SEQ ID NO: 181274 - DNA, 15 bp, Homo sapiens
ggggaggtgggaggg

SEQ ID NO: 181275 - DNA, 15 bp, Homo sapiens
cggggaggtgggagg

SEQ ID NO: 181276 - DNA, 15 bp, Homo sapiens
gcggggaggtgggag

SEQ ID NO: 181277 - DNA, 15 bp, Homo sapiens
agcggggaggtggga

SEQ ID NO: 181278 - DNA, 15 bp, Homo sapiens
cagcggggaggtggg

SEQ ID NO: 181279 - DNA, 15 bp, Homo sapiens
acagcggggaggtgg

SEQ ID NO: 181280 - DNA, 15 bp, Homo sapiens
gacagcggggaggtg

SEQ ID NO: 181281 - DNA, 15 bp, Homo sapiens
agacagcggggaggt

SEQ ID NO: 181282 - DNA, 15 bp, Homo sapiens
aagacagcggggagg

SEQ ID NO: 181283 - DNA, 15 bp, Homo sapiens
gaagacagcggggag

SEQ ID NO: 181284 - DNA, 15 bp, Homo sapiens
tgaagacagcgggga

SEQ ID NO: 181285 - DNA, 15 bp, Homo sapiens
ttgaagacagcgggg

SEQ ID NO: 181286 - DNA, 15 bp, Homo sapiens
gttgaagacagcggg

SEQ ID NO: 181287 - DNA, 15 bp, Homo sapiens
ggttgaagacagcgg

SEQ ID NO: 181288 - DNA, 15 bp, Homo sapiens
tggttgaagacagcg

SEQ ID NO: 181289 - DNA, 15 bp, Homo sapiens
gtggttgaagacagc

SEQ ID NO: 181290 - DNA, 15 bp, Homo sapiens
ggtggttgaagacag

SEQ ID NO: 181291 - DNA, 15 bp, Homo sapiens
tggtggttgaagaca

SEQ ID NO: 181292 - DNA, 15 bp, Homo sapiens
ctggtggttgaagac

SEQ ID NO: 181293 - DNA, 15 bp, Homo sapiens
gctggtggttgaaga

SEQ ID NO: 181294 - DNA, 15 bp, Homo sapiens
tgctggtggttgaag

SEQ ID NO: 181295 - DNA, 15 bp, Homo sapiens
gtgctggtggttgaa

SEQ ID NO: 181296 - DNA, 15 bp, Homo sapiens
ggtgctggtggttga

SEQ ID NO: 181297 - DNA, 15 bp, Homo sapiens
tggtgctggtggttg

SEQ ID NO: 181298 - DNA, 15 bp, Homo sapiens
ctggtgctggtggtt

SEQ ID NO: 181299 - DNA, 15 bp, Homo sapiens
gctggtgctggtggt

SEQ ID NO: 181300 - DNA, 15 bp, Homo sapiens
ggctggtgctggtgg

SEQ ID NO: 181301 - DNA, 15 bp, Homo sapiens
gggctggtgctggtg

SEQ ID NO: 181302 - DNA, 15 bp, Homo sapiens
agggctggtgctggt

SEQ ID NO: 181303 - DNA, 15 bp, Homo sapiens
aagggctggtgctgg

SEQ ID NO: 181304 - DNA, 15 bp, Homo sapiens
gaagggctggtgctg

SEQ ID NO: 181305 - DNA, 15 bp, Homo sapiens
tgaagggctggtgct

SEQ ID NO: 181306 - DNA, 15 bp, Homo sapiens
ctgaagggctggtgc

SEQ ID NO: 181307 - DNA, 15 bp, Homo sapiens
cctgaagggctggtg

SEQ ID NO: 181308 - DNA, 15 bp, Homo sapiens
acctgaagggctggt

SEQ ID NO: 181309 - DNA, 15 bp, Homo sapiens
gacctgaagggctgg

SEQ ID NO: 181310 - DNA, 15 bp, Homo sapiens
agacctgaagggctg

SEQ ID NO: 181311 - DNA, 15 bp, Homo sapiens
aagacctgaagggct

SEQ ID NO: 181312 - DNA, 15 bp, Homo sapiens
taagacctgaagggc

SEQ ID NO: 181313 - DNA, 15 bp, Homo sapiens
ctaagacctgaaggg

SEQ ID NO: 181314 - DNA, 15 bp, Homo sapiens
gctaagacctgaagg

SEQ ID NO: 181315 - DNA, 15 bp, Homo sapiens
tgctaagacctgaag

SEQ ID NO: 181316 - DNA, 15 bp, Homo sapiens
atgctaagacctgaa

SEQ ID NO: 181317 - DNA, 15 bp, Homo sapiens
catgctaagacctga

SEQ ID NO: 181318 - DNA, 15 bp, Homo sapiens
acatgctaagacctg

SEQ ID NO: 181319 - DNA, 15 bp, Homo sapiens
aacatgctaagacct

SEQ ID NO: 181320 - DNA, 15 bp, Homo sapiens
aaacatgctaagacc

SEQ ID NO: 181321 - DNA, 15 bp, Homo sapiens
caaacatgctaagac

SEQ ID NO: 181322 - DNA, 15 bp, Homo sapiens
gcaaacatgctaaga

SEQ ID NO: 181323 - DNA, 15 bp, Homo sapiens
tgcaaacatgctaag

SEQ ID NO: 181324 - DNA, 15 bp, Homo sapiens
ctgcaaacatgctaa

SEQ ID NO: 181325 - DNA, 15 bp, Homo sapiens
cctgcaaacatgcta

SEQ ID NO: 181326 - DNA, 15 bp, Homo sapiens
tcctgcaaacatgct

SEQ ID NO: 181327 - DNA, 15 bp, Homo sapiens
ttcctgcaaacatgc

SEQ ID NO: 181328 - DNA, 15 bp, Homo sapiens
cttcctgcaaacatg

SEQ ID NO: 181329 - DNA, 15 bp, Homo sapiens
acttcctgcaaacat

SEQ ID NO: 181330 - DNA, 15 bp, Homo sapiens
gacttcctgcaaaca

SEQ ID NO: 181331 - DNA, 15 bp, Homo sapiens
agacttcctgcaaac

SEQ ID NO: 181332 - DNA, 15 bp, Homo sapiens
aagacttcctgcaaa

SEQ ID NO: 181333 - DNA, 15 bp, Homo sapiens
aaagacttcctgcaa

SEQ ID NO: 181334 - DNA, 15 bp, Homo sapiens
aaaagacttcctgca

SEQ ID NO: 181335 - DNA, 15 bp, Homo sapiens
gaaaagacttcctgc

SEQ ID NO: 181336 - DNA, 15 bp, Homo sapiens
ggaaaagacttcctg

SEQ ID NO: 181337 - DNA, 15 bp, Homo sapiens
aggaaaagacttcct

SEQ ID NO: 181338 - DNA, 15 bp, Homo sapiens
caggaaaagacttcc

SEQ ID NO: 181339 - DNA, 15 bp, Homo sapiens
acaggaaaagacttc

SEQ ID NO: 181340 - DNA, 15 bp, Homo sapiens
gacaggaaaagactt

SEQ ID NO: 181341 - DNA, 15 bp, Homo sapiens
agacaggaaaagact

SEQ ID NO: 181342 - DNA, 15 bp, Homo sapiens
cagacaggaaaagac

SEQ ID NO: 181343 - DNA, 15 bp, Homo sapiens
gcagacaggaaaaga

SEQ ID NO: 181344 - DNA, 15 bp, Homo sapiens
ggcagacaggaaaag

SEQ ID NO: 181345 - DNA, 15 bp, Homo sapiens
gggcagacaggaaaa

SEQ ID NO: 181346 - DNA, 15 bp, Homo sapiens
ggggcagacaggaaa

SEQ ID NO: 181347 - DNA, 15 bp, Homo sapiens
aggggcagacaggaa

SEQ ID NO: 181348 - DNA, 15 bp, Homo sapiens
aaggggcagacagga

SEQ ID NO: 181349 - DNA, 15 bp, Homo sapiens
caaggggcagacagg

SEQ ID NO: 181350 - DNA, 15 bp, Homo sapiens
tcaaggggcagacag

SEQ ID NO: 181351 - DNA, 15 bp, Homo sapiens
ctcaaggggcagaca

SEQ ID NO: 181352 - DNA, 15 bp, Homo sapiens
cctcaaggggcagac

SEQ ID NO: 181353 - DNA, 15 bp, Homo sapiens
tcctcaaggggcaga

SEQ ID NO: 181354 - DNA, 15 bp, Homo sapiens
gtcctcaaggggcag

SEQ ID NO: 181355 - DNA, 15 bp, Homo sapiens
ggtcctcaaggggca

SEQ ID NO: 181356 - DNA, 15 bp, Homo sapiens
tggtcctcaaggggc

SEQ ID NO: 181357 - DNA, 15 bp, Homo sapiens
ctggtcctcaagggg

SEQ ID NO: 181358 - DNA, 15 bp, Homo sapiens
tctggtcctcaaggg

SEQ ID NO: 181359 - DNA, 15 bp, Homo sapiens
ttctggtcctcaagg

SEQ ID NO: 181360 - DNA, 15 bp, Homo sapiens
cttctggtcctcaag

SEQ ID NO: 181361 - DNA, 15 bp, Homo sapiens
acttctggtcctcaa

SEQ ID NO: 181362 - DNA, 15 bp, Homo sapiens
cacttctggtcctca

SEQ ID NO: 181363 - DNA, 15 bp, Homo sapiens
ccacttctggtcctc

SEQ ID NO: 181364 - DNA, 15 bp, Homo sapiens
tccacttctggtcct

SEQ ID NO: 181365 - DNA, 15 bp, Homo sapiens
atccacttctggtcc

SEQ ID NO: 181366 - DNA, 15 bp, Homo sapiens
aatccacttctggtc

SEQ ID NO: 181367 - DNA, 15 bp, Homo sapiens
aaatccacttctggt

SEQ ID NO: 181368 - DNA, 15 bp, Homo sapiens
aaaatccacttctgg

SEQ ID NO: 181369 - DNA, 15 bp, Homo sapiens
taaaatccacttctg

SEQ ID NO: 181370 - DNA, 15 bp, Homo sapiens
ataaaatccacttct

SEQ ID NO: 181371 - DNA, 15 bp, Homo sapiens
cataaaatccacttc

SEQ ID NO: 181372 - DNA, 15 bp, Homo sapiens
gcataaaatccactt

SEQ ID NO: 181373 - DNA, 15 bp, Homo sapiens
tgcataaaatccact

SEQ ID NO: 181374 - DNA, 15 bp, Homo sapiens
atgcataaaatccac

SEQ ID NO: 181375 - DNA, 15 bp, Homo sapiens
gatgcataaaatcca

SEQ ID NO: 181376 - DNA, 15 bp, Homo sapiens
agatgcataaaatcc

SEQ ID NO: 181377 - DNA, 15 bp, Homo sapiens
aagatgcataaaatc

SEQ ID NO: 181378 - DNA, 15 bp, Homo sapiens
aaagatgcataaaat

SEQ ID NO: 181379 - DNA, 15 bp, Homo sapiens
caaagatgcataaaa

SEQ ID NO: 181380 - DNA, 15 bp, Homo sapiens
ccaaagatgcataaa

SEQ ID NO: 181381 - DNA, 15 bp, Homo sapiens
cccaaagatgcataa

SEQ ID NO: 181382 - DNA, 15 bp, Homo sapiens
ccccaaagatgcata

SEQ ID NO: 181383 - DNA, 15 bp, Homo sapiens
gccccaaagatgcat

SEQ ID NO: 181384 - DNA, 15 bp, Homo sapiens
ggccccaaagatgca

SEQ ID NO: 181385 - DNA, 15 bp, Homo sapiens
gggccccaaagatgc

SEQ ID NO: 181386 - DNA, 15 bp, Homo sapiens
ggggccccaaagatg

SEQ ID NO: 181387 - DNA, 15 bp, Homo sapiens
tggggccccaaagat

SEQ ID NO: 181388 - DNA, 15 bp, Homo sapiens
ctggggccccaaaga

SEQ ID NO: 181389 - DNA, 15 bp, Homo sapiens
cctggggccccaaag

SEQ ID NO: 181390 - DNA, 15 bp, Homo sapiens
ccctggggccccaaa

SEQ ID NO: 181391 - DNA, 15 bp, Homo sapiens
gccctggggccccaa

SEQ ID NO: 181392 - DNA, 15 bp, Homo sapiens
ggccctggggcccca

SEQ ID NO: 181393 - DNA, 15 bp, Homo sapiens
gggccctggggcccc

SEQ ID NO: 181394 - DNA, 15 bp, Homo sapiens
cgggccctggggccc

SEQ ID NO: 181395 - DNA, 15 bp, Homo sapiens
ccgggccctggggcc

SEQ ID NO: 181396 - DNA, 15 bp, Homo sapiens
accgggccctggggc

SEQ ID NO: 181397 - DNA, 15 bp, Homo sapiens
taccgggccctgggg

SEQ ID NO: 181398 - DNA, 15 bp, Homo sapiens
gtaccgggccctggg

SEQ ID NO: 181399 - DNA, 15 bp, Homo sapiens
tgtaccgggccctgg

SEQ ID NO: 181400 - DNA, 15 bp, Homo sapiens
ttgtaccgggccctg

SEQ ID NO: 181401 - DNA, 15 bp, Homo sapiens
cttgtaccgggccct

SEQ ID NO: 181402 - DNA, 15 bp, Homo sapiens
acttgtaccgggccc

SEQ ID NO: 181403 - DNA, 15 bp, Homo sapiens
cacttgtaccgggcc

SEQ ID NO: 181404 - DNA, 15 bp, Homo sapiens
gcacttgtaccgggc

SEQ ID NO: 181405 - DNA, 15 bp, Homo sapiens
tgcacttgtaccggg

SEQ ID NO: 181406 - DNA, 15 bp, Homo sapiens
ctgcacttgtaccgg

SEQ ID NO: 181407 - DNA, 15 bp, Homo sapiens
cctgcacttgtaccg

SEQ ID NO: 181408 - DNA, 15 bp, Homo sapiens
ccctgcacttgtacc

SEQ ID NO: 181409 - DNA, 15 bp, Homo sapiens
cccctgcacttgtac

SEQ ID NO: 181410 - DNA, 15 bp, Homo sapiens
tcccctgcacttgta

SEQ ID NO: 181411 - DNA, 15 bp, Homo sapiens
ctcccctgcacttgt

SEQ ID NO: 181412 - DNA, 15 bp, Homo sapiens
cctcccctgcacttg

SEQ ID NO: 181413 - DNA, 15 bp, Homo sapiens
ccctcccctgcactt

SEQ ID NO: 181414 - DNA, 15 bp, Homo sapiens
accctcccctgcact

SEQ ID NO: 181415 - DNA, 15 bp, Homo sapiens
caccctcccctgcac

SEQ ID NO: 181416 - DNA, 15 bp, Homo sapiens
tcaccctcccctgca

SEQ ID NO: 181417 - DNA, 15 bp, Homo sapiens
ctcaccctcccctgc

SEQ ID NO: 181418 - DNA, 15 bp, Homo sapiens
cctcaccctcccctg

SEQ ID NO: 181419 - DNA, 15 bp, Homo sapiens
ccctcaccctcccct

SEQ ID NO: 181420 - DNA, 15 bp, Homo sapiens
tccctcaccctcccc

SEQ ID NO: 181421 - DNA, 15 bp, Homo sapiens
ttccctcaccctccc

SEQ ID NO: 181422 - DNA, 15 bp, Homo sapiens
cttccctcaccctcc

SEQ ID NO: 181423 - DNA, 15 bp, Homo sapiens
gcttccctcaccctc

SEQ ID NO: 181424 - DNA, 15 bp, Homo sapiens
ggcttccctcaccct

SEQ ID NO: 181425 - DNA, 15 bp, Homo sapiens
gggcttccctcaccc

SEQ ID NO: 181426 - DNA, 15 bp, Homo sapiens
ggggcttccctcacc

SEQ ID NO: 181427 - DNA, 15 bp, Homo sapiens
cggggcttccctcac

SEQ ID NO: 181428 - DNA, 15 bp, Homo sapiens
acggggcttccctca

SEQ ID NO: 181429 - DNA, 15 bp, Homo sapiens
cacggggcttccctc

SEQ ID NO: 181430 - DNA, 15 bp, Homo sapiens
gcacggggcttccct

SEQ ID NO: 181431 - DNA, 15 bp, Homo sapiens
agcacggggcttccc

SEQ ID NO: 181432 - DNA, 15 bp, Homo sapiens
gagcacggggcttcc

SEQ ID NO: 181433 - DNA, 15 bp, Homo sapiens
tgagcacggggcttc

SEQ ID NO: 181434 - DNA, 15 bp, Homo sapiens
gtgagcacggggctt

SEQ ID NO: 181435 - DNA, 15 bp, Homo sapiens
ggtgagcacggggct

SEQ ID NO: 181436 - DNA, 15 bp, Homo sapiens
cggtgagcacggggc

SEQ ID NO: 181437 - DNA, 15 bp, Homo sapiens
ccggtgagcacgggg

SEQ ID NO: 181438 - DNA, 15 bp, Homo sapiens
gccggtgagcacggg

SEQ ID NO: 181439 - DNA, 15 bp, Homo sapiens
tgccggtgagcacgg

SEQ ID NO: 181440 - DNA, 15 bp, Homo sapiens
ctgccggtgagcacg

SEQ ID NO: 181441 - DNA, 15 bp, Homo sapiens
actgccggtgagcac

SEQ ID NO: 181442 - DNA, 15 bp, Homo sapiens
tactgccggtgagca

SEQ ID NO: 181443 - DNA, 15 bp, Homo sapiens
ctactgccggtgagc

SEQ ID NO: 181444 - DNA, 15 bp, Homo sapiens
actactgccggtgag

SEQ ID NO: 181445 - DNA, 15 bp, Homo sapiens
tactactgccggtga

SEQ ID NO: 181446 - DNA, 15 bp, Homo sapiens
ctactactgccggtg

SEQ ID NO: 181447 - DNA, 15 bp, Homo sapiens
tctactactgccggt

SEQ ID NO: 181448 - DNA, 15 bp, Homo sapiens
atctactactgccgg

SEQ ID NO: 181449 - DNA, 15 bp, Homo sapiens
catctactactgccg

SEQ ID NO: 181450 - DNA, 15 bp, Homo sapiens
tcatctactactgcc

SEQ ID NO: 181451 - DNA, 15 bp, Homo sapiens
ctcatctactactgc

SEQ ID NO: 181452 - DNA, 15 bp, Homo sapiens
gctcatctactactg

SEQ ID NO: 181453 - DNA, 15 bp, Homo sapiens
tgctcatctactact

SEQ ID NO: 181454 - DNA, 15 bp, Homo sapiens
ctgctcatctactac

SEQ ID NO: 181455 - DNA, 15 bp, Homo sapiens
tctgctcatctacta

SEQ ID NO: 181456 - DNA, 15 bp, Homo sapiens
gtctgctcatctact

SEQ ID NO: 181457 - DNA, 15 bp, Homo sapiens
tgtctgctcatctac

SEQ ID NO: 181458 - DNA, 15 bp, Homo sapiens
gtgtctgctcatcta

SEQ ID NO: 181459 - DNA, 15 bp, Homo sapiens
tgtgtctgctcatct

SEQ ID NO: 181460 - DNA, 15 bp, Homo sapiens
ctgtgtctgctcatc

SEQ ID NO: 181461 - DNA, 15 bp, Homo sapiens
gctgtgtctgctcat

SEQ ID NO: 181462 - DNA, 15 bp, Homo sapiens
tgctgtgtctgctca

SEQ ID NO: 181463 - DNA, 15 bp, Homo sapiens
ctgctgtgtctgctc

SEQ ID NO: 181464 - DNA, 15 bp, Homo sapiens
cctgctgtgtctgct

SEQ ID NO: 181465 - DNA, 15 bp, Homo sapiens
tcctgctgtgtctgc

SEQ ID NO: 181466 - DNA, 15 bp, Homo sapiens
atcctgctgtgtctg

SEQ ID NO: 181467 - DNA, 15 bp, Homo sapiens
tatcctgctgtgtct

SEQ ID NO: 181468 - DNA, 15 bp, Homo sapiens
ttatcctgctgtgtc

SEQ ID NO: 181469 - DNA, 15 bp, Homo sapiens
cttatcctgctgtgt

SEQ ID NO: 181470 - DNA, 15 bp, Homo sapiens
gcttatcctgctgtg

SEQ ID NO: 181471 - DNA, 15 bp, Homo sapiens
tgcttatcctgctgt

SEQ ID NO: 181472 - DNA, 15 bp, Homo sapiens
gtgcttatcctgctg

SEQ ID NO: 181473 - DNA, 15 bp, Homo sapiens
ggtgcttatcctgct

SEQ ID NO: 181474 - DNA, 15 bp, Homo sapiens
tggtgcttatcctgc

SEQ ID NO: 181475 - DNA, 15 bp, Homo sapiens
ctggtgcttatcctg

SEQ ID NO: 181476 - DNA, 15 bp, Homo sapiens
gctggtgcttatcct

SEQ ID NO: 181477 - DNA, 15 bp, Homo sapiens
tgctggtgcttatcc

SEQ ID NO: 181478 - DNA, 15 bp, Homo sapiens
ctgctggtgcttatc

SEQ ID NO: 181479 - DNA, 15 bp, Homo sapiens
cctgctggtgcttat

SEQ ID NO: 181480 - DNA, 15 bp, Homo sapiens
ccctgctggtgctta

SEQ ID NO: 181481 - DNA, 15 bp, Homo sapiens
gccctgctggtgctt

SEQ ID NO: 181482 - DNA, 15 bp, Homo sapiens
ggccctgctggtgct

SEQ ID NO: 181483 - DNA, 15 bp, Homo sapiens
tggccctgctggtgc

SEQ ID NO: 181484 - DNA, 15 bp, Homo sapiens
ctggccctgctggtg

SEQ ID NO: 181485 - DNA, 15 bp, Homo sapiens
cctggccctgctggt

SEQ ID NO: 181486 - DNA, 15 bp, Homo sapiens
ccctggccctgctgg

SEQ ID NO: 181487 - DNA, 15 bp, Homo sapiens
gccctggccctgctg

SEQ ID NO: 181488 - DNA, 15 bp, Homo sapiens
agccctggccctgct

SEQ ID NO: 181489 - DNA, 15 bp, Homo sapiens
cagccctggccctgc

SEQ ID NO: 181490 - DNA, 15 bp, Homo sapiens
gcagccctggccctg

SEQ ID NO: 181491 - DNA, 15 bp, Homo sapiens
ggcagccctggccct

SEQ ID NO: 181492 - DNA, 15 bp, Homo sapiens
tggcagccctggccc

SEQ ID NO: 181493 - DNA, 15 bp, Homo sapiens
ctggcagccctggcc

SEQ ID NO: 181494 - DNA, 15 bp, Homo sapiens
cctggcagccctggc

SEQ ID NO: 181495 - DNA, 15 bp, Homo sapiens
tcctggcagccctgg

SEQ ID NO: 181496 - DNA, 15 bp, Homo sapiens
atcctggcagccctg

SEQ ID NO: 181497 - DNA, 15 bp, Homo sapiens
catcctggcagccct

SEQ ID NO: 181498 - DNA, 15 bp, Homo sapiens
ccatcctggcagccc

SEQ ID NO: 181499 - DNA, 15 bp, Homo sapiens
accatcctggcagcc

SEQ ID NO: 181500 - DNA, 15 bp, Homo sapiens
caccatcctggcagc

SEQ ID NO: 181501 - DNA, 15 bp, Homo sapiens
tcaccatcctggcag

SEQ ID NO: 181502 - DNA, 15 bp, Homo sapiens
ctcaccatcctggca

SEQ ID NO: 181503 - DNA, 15 bp, Homo sapiens
gctcaccatcctggc

SEQ ID NO: 181504 - DNA, 15 bp, Homo sapiens
tgctcaccatcctgg

SEQ ID NO: 181505 - DNA, 15 bp, Homo sapiens
ttgctcaccatcctg

SEQ ID NO: 181506 - DNA, 15 bp, Homo sapiens
cttgctcaccatcct

SEQ ID NO: 181507 - DNA, 15 bp, Homo sapiens
tcttgctcaccatcc

SEQ ID NO: 181508 - DNA, 15 bp, Homo sapiens
ttcttgctcaccatc

SEQ ID NO: 181509 - DNA, 15 bp, Homo sapiens
cttcttgctcaccat

SEQ ID NO: 181510 - DNA, 15 bp, Homo sapiens
tcttcttgctcacca

SEQ ID NO: 181511 - DNA, 15 bp, Homo sapiens
atcttcttgctcacc

SEQ ID NO: 181512 - DNA, 15 bp, Homo sapiens
catcttcttgctcac

SEQ ID NO: 181513 - DNA, 15 bp, Homo sapiens
ccatcttcttgctca

SEQ ID NO: 181514 - DNA, 15 bp, Homo sapiens
accatcttcttgctc

SEQ ID NO: 181515 - DNA, 15 bp, Homo sapiens
caccatcttcttgct

SEQ ID NO: 181516 - DNA, 15 bp, Homo sapiens
acaccatcttcttgc

SEQ ID NO: 181517 - DNA, 15 bp, Homo sapiens
cacaccatcttcttg

SEQ ID NO: 181518 - DNA, 15 bp, Homo sapiens
ccacaccatcttctt

SEQ ID NO: 181519 - DNA, 15 bp, Homo sapiens
accacaccatcttct

SEQ ID NO: 181520 - DNA, 15 bp, Homo sapiens
taccacaccatcttc

SEQ ID NO: 181521 - DNA, 15 bp, Homo sapiens
ctaccacaccatctt

SEQ ID NO: 181522 - DNA, 15 bp, Homo sapiens
cctaccacaccatct

SEQ ID NO: 181523 - DNA, 15 bp, Homo sapiens
acctaccacaccatc

SEQ ID NO: 181524 - DNA, 15 bp, Homo sapiens
cacctaccacaccat

SEQ ID NO: 181525 - DNA, 15 bp, Homo sapiens
gcacctaccacacca

SEQ ID NO: 181526 - DNA, 15 bp, Homo sapiens
ggcacctaccacacc

SEQ ID NO: 181527 - DNA, 15 bp, Homo sapiens
cggcacctaccacac

SEQ ID NO: 181528 - DNA, 15 bp, Homo sapiens
tcggcacctaccaca

SEQ ID NO: 181529 - DNA, 15 bp, Homo sapiens
atcggcacctaccac

SEQ ID NO: 181530 - DNA, 15 bp, Homo sapiens
catcggcacctacca

SEQ ID NO: 181531 - DNA, 15 bp, Homo sapiens
acatcggcacctacc

SEQ ID NO: 181532 - DNA, 15 bp, Homo sapiens
gacatcggcacctac

SEQ ID NO: 181533 - DNA, 15 bp, Homo sapiens
ggacatcggcaccta

SEQ ID NO: 181534 - DNA, 15 bp, Homo sapiens
aggacatcggcacct

SEQ ID NO: 181535 - DNA, 15 bp, Homo sapiens
caggacatcggcacc

SEQ ID NO: 181536 - DNA, 15 bp, Homo sapiens
ccaggacatcggcac

SEQ ID NO: 181537 - DNA, 15 bp, Homo sapiens
tccaggacatcggca

SEQ ID NO: 181538 - DNA, 15 bp, Homo sapiens
atccaggacatcggc

SEQ ID NO: 181539 - DNA, 15 bp, Homo sapiens
catccaggacatcgg

SEQ ID NO: 181540 - DNA, 15 bp, Homo sapiens
gcatccaggacatcg

SEQ ID NO: 181541 - DNA, 15 bp, Homo sapiens
ggcatccaggacatc

SEQ ID NO: 181542 - DNA, 15 bp, Homo sapiens
gggcatccaggacat

SEQ ID NO: 181543 - DNA, 15 bp, Homo sapiens
cgggcatccaggaca

SEQ ID NO: 181544 - DNA, 15 bp, Homo sapiens
tcgggcatccaggac

SEQ ID NO: 181545 - DNA, 15 bp, Homo sapiens
gtcgggcatccagga

SEQ ID NO: 181546 - DNA, 15 bp, Homo sapiens
cgtcgggcatccagg

SEQ ID NO: 181547 - DNA, 15 bp, Homo sapiens
acgtcgggcatccag

SEQ ID NO: 181548 - DNA, 15 bp, Homo sapiens
cacgtcgggcatcca

SEQ ID NO: 181549 - DNA, 15 bp, Homo sapiens
tcacgtcgggcatcc

SEQ ID NO: 181550 - DNA, 15 bp, Homo sapiens
atcacgtcgggcatc

SEQ ID NO: 181551 - DNA, 15 bp, Homo sapiens
catcacgtcgggcat

SEQ ID NO: 181552 - DNA, 15 bp, Homo sapiens
ccatcacgtcgggca

SEQ ID NO: 181553 - DNA, 15 bp, Homo sapiens
accatcacgtcgggc

SEQ ID NO: 181554 - DNA, 15 bp, Homo sapiens
caccatcacgtcggg

SEQ ID NO: 181555 - DNA, 15 bp, Homo sapiens
tcaccatcacgtcgg

SEQ ID NO: 181556 - DNA, 15 bp, Homo sapiens
gtcaccatcacgtcg

SEQ ID NO: 181557 - DNA, 15 bp, Homo sapiens
ggtcaccatcacgtc

SEQ ID NO: 181558 - DNA, 15 bp, Homo sapiens
tggtcaccatcacgt

SEQ ID NO: 181559 - DNA, 15 bp, Homo sapiens
ctggtcaccatcacg

SEQ ID NO: 181560 - DNA, 15 bp, Homo sapiens
gctggtcaccatcac

SEQ ID NO: 181561 - DNA, 15 bp, Homo sapiens
ggctggtcaccatca

SEQ ID NO: 181562 - DNA, 15 bp, Homo sapiens
gggctggtcaccatc

SEQ ID NO: 181563 - DNA, 15 bp, Homo sapiens
agggctggtcaccat

SEQ ID NO: 181564 - DNA, 15 bp, Homo sapiens
cagggctggtcacca

SEQ ID NO: 181565 - DNA, 15 bp, Homo sapiens
acagggctggtcacc

SEQ ID NO: 181566 - DNA, 15 bp, Homo sapiens
cacagggctggtcac

SEQ ID NO: 181567 - DNA, 15 bp, Homo sapiens
gcacagggctggtca

SEQ ID NO: 181568 - DNA, 15 bp, Homo sapiens
ggcacagggctggtc

SEQ ID NO: 181569 - DNA, 15 bp, Homo sapiens
tggcacagggctggt

SEQ ID NO: 181570 - DNA, 15 bp, Homo sapiens
ctggcacagggctgg

SEQ ID NO: 181571 - DNA, 15 bp, Homo sapiens
cctggcacagggctg

SEQ ID NO: 181572 - DNA, 15 bp, Homo sapiens
gcctggcacagggct

SEQ ID NO: 181573 - DNA, 15 bp, Homo sapiens
cgcctggcacagggc

SEQ ID NO: 181574 - DNA, 15 bp, Homo sapiens
tcgcctggcacaggg

SEQ ID NO: 181575 - DNA, 15 bp, Homo sapiens
ctcgcctggcacagg

SEQ ID NO: 181576 - DNA, 15 bp, Homo sapiens
cctcgcctggcacag

SEQ ID NO: 181577 - DNA, 15 bp, Homo sapiens
ccctcgcctggcaca

SEQ ID NO: 181578 - DNA, 15 bp, Homo sapiens
gccctcgcctggcac

SEQ ID NO: 181579 - DNA, 15 bp, Homo sapiens
agccctcgcctggca

SEQ ID NO: 181580 - DNA, 15 bp, Homo sapiens
aagccctcgcctggc

SEQ ID NO: 181581 - DNA, 15 bp, Homo sapiens
taagccctcgcctgg

SEQ ID NO: 181582 - DNA, 15 bp, Homo sapiens
ctaagccctcgcctg

SEQ ID NO: 181583 - DNA, 15 bp, Homo sapiens
gctaagccctcgcct

SEQ ID NO: 181584 - DNA, 15 bp, Homo sapiens
cgctaagccctcgcc

SEQ ID NO: 181585 - DNA, 15 bp, Homo sapiens
acgctaagccctcgc

SEQ ID NO: 181586 - DNA, 15 bp, Homo sapiens
aacgctaagccctcg

SEQ ID NO: 181587 - DNA, 15 bp, Homo sapiens
gaacgctaagccctc

SEQ ID NO: 181588 - DNA, 15 bp, Homo sapiens
tgaacgctaagccct

SEQ ID NO: 181589 - DNA, 15 bp, Homo sapiens
ctgaacgctaagccc

SEQ ID NO: 181590 - DNA, 15 bp, Homo sapiens
cctgaacgctaagcc

SEQ ID NO: 181591 - DNA, 15 bp, Homo sapiens
acctgaacgctaagc

SEQ ID NO: 181592 - DNA, 15 bp, Homo sapiens
cacctgaacgctaag

SEQ ID NO: 181593 - DNA, 15 bp, Homo sapiens
acacctgaacgctaa

SEQ ID NO: 181594 - DNA, 15 bp, Homo sapiens
tacacctgaacgcta

SEQ ID NO: 181595 - DNA, 15 bp, Homo sapiens
ctacacctgaacgct

SEQ ID NO: 181596 - DNA, 15 bp, Homo sapiens
tctacacctgaacgc

SEQ ID NO: 181597 - DNA, 15 bp, Homo sapiens
gtctacacctgaacg

SEQ ID NO: 181598 - DNA, 15 bp, Homo sapiens
tgtctacacctgaac

SEQ ID NO: 181599 - DNA, 15 bp, Homo sapiens
gtgtctacacctgaa

SEQ ID NO: 181600 - DNA, 15 bp, Homo sapiens
ggtgtctacacctga

SEQ ID NO: 181601 - DNA, 15 bp, Homo sapiens
gggtgtctacacctg

SEQ ID NO: 181602 - DNA, 15 bp, Homo sapiens
agggtgtctacacct

SEQ ID NO: 181603 - DNA, 15 bp, Homo sapiens
aagggtgtctacacc

SEQ ID NO: 181604 - DNA, 15 bp, Homo sapiens
gaagggtgtctacac

SEQ ID NO: 181605 - DNA, 15 bp, Homo sapiens
ggaagggtgtctaca

SEQ ID NO: 181606 - DNA, 15 bp, Homo sapiens
aggaagggtgtctac

SEQ ID NO: 181607 - DNA, 15 bp, Homo sapiens
caggaagggtgtcta

SEQ ID NO: 181608 - DNA, 15 bp, Homo sapiens
gcaggaagggtgtct

SEQ ID NO: 181609 - DNA, 15 bp, Homo sapiens
ggcaggaagggtgtc

SEQ ID NO: 181610 - DNA, 15 bp, Homo sapiens
aggcaggaagggtgt

SEQ ID NO: 181611 - DNA, 15 bp, Homo sapiens
aaggcaggaagggtg

SEQ ID NO: 181612 - DNA, 15 bp, Homo sapiens
aaaggcaggaagggt

SEQ ID NO: 181613 - DNA, 15 bp, Homo sapiens
gaaaggcaggaaggg

SEQ ID NO: 181614 - DNA, 15 bp, Homo sapiens
tgaaaggcaggaagg

SEQ ID NO: 181615 - DNA, 15 bp, Homo sapiens
ctgaaaggcaggaag

SEQ ID NO: 181616 - DNA, 15 bp, Homo sapiens
tctgaaaggcaggaa

SEQ ID NO: 181617 - DNA, 15 bp, Homo sapiens
ttctgaaaggcagga

SEQ ID NO: 181618 - DNA, 15 bp, Homo sapiens
cttctgaaaggcagg

SEQ ID NO: 181619 - DNA, 15 bp, Homo sapiens
acttctgaaaggcag

SEQ ID NO: 181620 - DNA, 15 bp, Homo sapiens
gacttctgaaaggca

SEQ ID NO: 181621 - DNA, 15 bp, Homo sapiens
agacttctgaaaggc

SEQ ID NO: 181622 - DNA, 15 bp, Homo sapiens
cagacttctgaaagg

SEQ ID NO: 181623 - DNA, 15 bp, Homo sapiens
gcagacttctgaaag

SEQ ID NO: 181624 - DNA, 15 bp, Homo sapiens
agcagacttctgaaa

SEQ ID NO: 181625 - DNA, 15 bp, Homo sapiens
gagcagacttctgaa

SEQ ID NO: 181626 - DNA, 15 bp, Homo sapiens
agagcagacttctga

SEQ ID NO: 181627 - DNA, 15 bp, Homo sapiens
gagagcagacttctg

SEQ ID NO: 181628 - DNA, 15 bp, Homo sapiens
ggagagcagacttct

SEQ ID NO: 181629 - DNA, 15 bp, Homo sapiens
gggagagcagacttc

SEQ ID NO: 181630 - DNA, 15 bp, Homo sapiens
tgggagagcagactt

SEQ ID NO: 181631 - DNA, 15 bp, Homo sapiens
ctgggagagcagact

SEQ ID NO: 181632 - DNA, 15 bp, Homo sapiens
gctgggagagcagac

SEQ ID NO: 181633 - DNA, 15 bp, Homo sapiens
agctgggagagcaga

SEQ ID NO: 181634 - DNA, 15 bp, Homo sapiens
gagctgggagagcag

SEQ ID NO: 181635 - DNA, 15 bp, Homo sapiens
ggagctgggagagca

SEQ ID NO: 181636 - DNA, 15 bp, Homo sapiens
gggagctgggagagc

SEQ ID NO: 181637 - DNA, 15 bp, Homo sapiens
ggggagctgggagag

SEQ ID NO: 181638 - DNA, 15 bp, Homo sapiens
aggggagctgggaga

SEQ ID NO: 181639 - DNA, 15 bp, Homo sapiens
gaggggagctgggag

SEQ ID NO: 181640 - DNA, 15 bp, Homo sapiens
ggaggggagctggga

SEQ ID NO: 181641 - DNA, 15 bp, Homo sapiens
aggaggggagctggg

SEQ ID NO: 181642 - DNA, 15 bp, Homo sapiens
gaggaggggagctgg

SEQ ID NO: 181643 - DNA, 15 bp, Homo sapiens
ggaggaggggagctg

SEQ ID NO: 181644 - DNA, 15 bp, Homo sapiens
cggaggaggggagct

SEQ ID NO: 181645 - DNA, 15 bp, Homo sapiens
gcggaggaggggagc

SEQ ID NO: 181646 - DNA, 15 bp, Homo sapiens
cgcggaggaggggag

SEQ ID NO: 181647 - DNA, 15 bp, Homo sapiens
ccgcggaggagggga

SEQ ID NO: 181648 - DNA, 15 bp, Homo sapiens
gccgcggaggagggg

SEQ ID NO: 181649 - DNA, 15 bp, Homo sapiens
ggccgcggaggaggg

SEQ ID NO: 181650 - DNA, 15 bp, Homo sapiens
aggccgcggaggagg

SEQ ID NO: 181651 - DNA, 15 bp, Homo sapiens
gaggccgcggaggag

SEQ ID NO: 181652 - DNA, 15 bp, Homo sapiens
agaggccgcggagga

SEQ ID NO: 181653 - DNA, 15 bp, Homo sapiens
tagaggccgcggagg

SEQ ID NO: 181654 - DNA, 15 bp, Homo sapiens
gtagaggccgcggag

SEQ ID NO: 181655 - DNA, 15 bp, Homo sapiens
cgtagaggccgcgga

SEQ ID NO: 181656 - DNA, 15 bp, Homo sapiens
gcgtagaggccgcgg

SEQ ID NO: 181657 - DNA, 15 bp, Homo sapiens
ggcgtagaggccgcg

SEQ ID NO: 181658 - DNA, 15 bp, Homo sapiens
gggcgtagaggccgc

SEQ ID NO: 181659 - DNA, 15 bp, Homo sapiens
tgggcgtagaggccg

SEQ ID NO: 181660 - DNA, 15 bp, Homo sapiens
gtgggcgtagaggcc

SEQ ID NO: 181661 - DNA, 15 bp, Homo sapiens
agtgggcgtagaggc

SEQ ID NO: 181662 - DNA, 15 bp, Homo sapiens
cagtgggcgtagagg

SEQ ID NO: 181663 - DNA, 15 bp, Homo sapiens
gcagtgggcgtagag

SEQ ID NO: 181664 - DNA, 15 bp, Homo sapiens
ggcagtgggcgtaga

SEQ ID NO: 181665 - DNA, 15 bp, Homo sapiens
gggcagtgggcgtag

SEQ ID NO: 181666 - DNA, 15 bp, Homo sapiens
ggggcagtgggcgta

SEQ ID NO: 181667 - DNA, 15 bp, Homo sapiens
tggggcagtgggcgt

SEQ ID NO: 181668 - DNA, 15 bp, Homo sapiens
gtggggcagtgggcg

SEQ ID NO: 181669 - DNA, 15 bp, Homo sapiens
agtggggcagtgggc

SEQ ID NO: 181670 - DNA, 15 bp, Homo sapiens
tagtggggcagtggg

SEQ ID NO: 181671 - DNA, 15 bp, Homo sapiens
gtagtggggcagtgg

SEQ ID NO: 181672 - DNA, 15 bp, Homo sapiens
agtagtggggcagtg

SEQ ID NO: 181673 - DNA, 15 bp, Homo sapiens
gagtagtggggcagt

SEQ ID NO: 181674 - DNA, 15 bp, Homo sapiens
agagtagtggggcag

SEQ ID NO: 181675 - DNA, 15 bp, Homo sapiens
aagagtagtggggca

SEQ ID NO: 181676 - DNA, 15 bp, Homo sapiens
taagagtagtggggc

SEQ ID NO: 181677 - DNA, 15 bp, Homo sapiens
gtaagagtagtgggg

SEQ ID NO: 181678 - DNA, 15 bp, Homo sapiens
ggtaagagtagtggg

SEQ ID NO: 181679 - DNA, 15 bp, Homo sapiens
tggtaagagtagtgg

SEQ ID NO: 181680 - DNA, 15 bp, Homo sapiens
ctggtaagagtagtg

SEQ ID NO: 181681 - DNA, 15 bp, Homo sapiens
gctggtaagagtagt

SEQ ID NO: 181682 - DNA, 15 bp, Homo sapiens
ggctggtaagagtag

SEQ ID NO: 181683 - DNA, 15 bp, Homo sapiens
cggctggtaagagta

SEQ ID NO: 181684 - DNA, 15 bp, Homo sapiens
acggctggtaagagt

SEQ ID NO: 181685 - DNA, 15 bp, Homo sapiens
cacggctggtaagag

SEQ ID NO: 181686 - DNA, 15 bp, Homo sapiens
ccacggctggtaaga

SEQ ID NO: 181687 - DNA, 15 bp, Homo sapiens
cccacggctggtaag

SEQ ID NO: 181688 - DNA, 15 bp, Homo sapiens
ccccacggctggtaa

SEQ ID NO: 181689 - DNA, 15 bp, Homo sapiens
cccccacggctggta

SEQ ID NO: 181690 - DNA, 15 bp, Homo sapiens
tcccccacggctggt

SEQ ID NO: 181691 - DNA, 15 bp, Homo sapiens
ctcccccacggctgg

SEQ ID NO: 181692 - DNA, 15 bp, Homo sapiens
cctcccccacggctg

SEQ ID NO: 181693 - DNA, 15 bp, Homo sapiens
gcctcccccacggct

SEQ ID NO: 181694 - DNA, 15 bp, Homo sapiens
ggcctcccccacggc

SEQ ID NO: 181695 - DNA, 15 bp, Homo sapiens
tggcctcccccacgg

SEQ ID NO: 181696 - DNA, 15 bp, Homo sapiens
atggcctcccccacg

SEQ ID NO: 181697 - DNA, 15 bp, Homo sapiens
catggcctcccccac

SEQ ID NO: 181698 - DNA, 15 bp, Homo sapiens
ccatggcctccccca

SEQ ID NO: 181699 - DNA, 15 bp, Homo sapiens
gccatggcctccccc

SEQ ID NO: 181700 - DNA, 15 bp, Homo sapiens
cgccatggcctcccc

SEQ ID NO: 181701 - DNA, 15 bp, Homo sapiens
ccgccatggcctccc

SEQ ID NO: 181702 - DNA, 15 bp, Homo sapiens
gccgccatggcctcc

SEQ ID NO: 181703 - DNA, 15 bp, Homo sapiens
ggccgccatggcctc

SEQ ID NO: 181704 - DNA, 15 bp, Homo sapiens
tggccgccatggcct

SEQ ID NO: 181705 - DNA, 15 bp, Homo sapiens
gtggccgccatggcc

SEQ ID NO: 181706 - DNA, 15 bp, Homo sapiens
ggtggccgccatggc

SEQ ID NO: 181707 - DNA, 15 bp, Homo sapiens
gggtggccgccatgg

SEQ ID NO: 181708 - DNA, 15 bp, Homo sapiens
tgggtggccgccatg

SEQ ID NO: 181709 - DNA, 15 bp, Homo sapiens
ctgggtggccgccat

SEQ ID NO: 181710 - DNA, 15 bp, Homo sapiens
actgggtggccgcca

SEQ ID NO: 181711 - DNA, 15 bp, Homo sapiens
tactgggtggccgcc

SEQ ID NO: 181712 - DNA, 15 bp, Homo sapiens
gtactgggtggccgc

SEQ ID NO: 181713 - DNA, 15 bp, Homo sapiens
ggtactgggtggccg

SEQ ID NO: 181714 - DNA, 15 bp, Homo sapiens
gggtactgggtggcc

SEQ ID NO: 181715 - DNA, 15 bp, Homo sapiens
ggggtactgggtggc

SEQ ID NO: 181716 - DNA, 15 bp, Homo sapiens
tggggtactgggtgg

SEQ ID NO: 181717 - DNA, 15 bp, Homo sapiens
ctggggtactgggtg

SEQ ID NO: 181718 - DNA, 15 bp, Homo sapiens
gctggggtactgggt

SEQ ID NO: 181719 - DNA, 15 bp, Homo sapiens
agctggggtactggg

SEQ ID NO: 181720 - DNA, 15 bp, Homo sapiens
cagctggggtactgg

SEQ ID NO: 181721 - DNA, 15 bp, Homo sapiens
ccagctggggtactg

SEQ ID NO: 181722 - DNA, 15 bp, Homo sapiens
cccagctggggtact

SEQ ID NO: 181723 - DNA, 15 bp, Homo sapiens
ccccagctggggtac

SEQ ID NO: 181724 - DNA, 15 bp, Homo sapiens
cccccagctggggta

SEQ ID NO: 181725 - DNA, 15 bp, Homo sapiens
ccccccagctggggt

SEQ ID NO: 181726 - DNA, 15 bp, Homo sapiens
tccccccagctgggg

SEQ ID NO: 181727 - DNA, 15 bp, Homo sapiens
ctccccccagctggg

SEQ ID NO: 181728 - DNA, 15 bp, Homo sapiens
tctccccccagctgg

SEQ ID NO: 181729 - DNA, 15 bp, Homo sapiens
gtctccccccagctg

SEQ ID NO: 181730 - DNA, 15 bp, Homo sapiens
cgtctccccccagct

SEQ ID NO: 181731 - DNA, 15 bp, Homo sapiens
tcgtctccccccagc

SEQ ID NO: 181732 - DNA, 15 bp, Homo sapiens
ttcgtctccccccag

SEQ ID NO: 181733 - DNA, 15 bp, Homo sapiens
cttcgtctcccccca

SEQ ID NO: 181734 - DNA, 15 bp, Homo sapiens
ccttcgtctcccccc

SEQ ID NO: 181735 - DNA, 15 bp, Homo sapiens
accttcgtctccccc

SEQ ID NO: 181736 - DNA, 15 bp, Homo sapiens
gaccttcgtctcccc

SEQ ID NO: 181737 - DNA, 15 bp, Homo sapiens
ggaccttcgtctccc

SEQ ID NO: 181738 - DNA, 15 bp, Homo sapiens
tggaccttcgtctcc

SEQ ID NO: 181739 - DNA, 15 bp, Homo sapiens
ctggaccttcgtctc

SEQ ID NO: 181740 - DNA, 15 bp, Homo sapiens
actggaccttcgtct

SEQ ID NO: 181741 - DNA, 15 bp, Homo sapiens
tactggaccttcgtc

SEQ ID NO: 181742 - DNA, 15 bp, Homo sapiens
ctactggaccttcgt

SEQ ID NO: 181743 - DNA, 15 bp, Homo sapiens
tctactggaccttcg

SEQ ID NO: 181744 - DNA, 15 bp, Homo sapiens
ctctactggaccttc

SEQ ID NO: 181745 - DNA, 15 bp, Homo sapiens
gctctactggacctt

SEQ ID NO: 181746 - DNA, 15 bp, Homo sapiens
agctctactggacct

SEQ ID NO: 181747 - DNA, 15 bp, Homo sapiens
cagctctactggacc

SEQ ID NO: 181748 - DNA, 15 bp, Homo sapiens
gcagctctactggac

SEQ ID NO: 181749 - DNA, 15 bp, Homo sapiens
ggcagctctactgga

SEQ ID NO: 181750 - DNA, 15 bp, Homo sapiens
cggcagctctactgg

SEQ ID NO: 181751 - DNA, 15 bp, Homo sapiens
ccggcagctctactg

SEQ ID NO: 181752 - DNA, 15 bp, Homo sapiens
gccggcagctctact

SEQ ID NO: 181753 - DNA, 15 bp, Homo sapiens
ggccggcagctctac

SEQ ID NO: 181754 - DNA, 15 bp, Homo sapiens
aggccggcagctcta

SEQ ID NO: 181755 - DNA, 15 bp, Homo sapiens
aaggccggcagctct

SEQ ID NO: 181756 - DNA, 15 bp, Homo sapiens
gaaggccggcagctc

SEQ ID NO: 181757 - DNA, 15 bp, Homo sapiens
ggaaggccggcagct

SEQ ID NO: 181758 - DNA, 15 bp, Homo sapiens
aggaaggccggcagc

SEQ ID NO: 181759 - DNA, 15 bp, Homo sapiens
aaggaaggccggcag

SEQ ID NO: 181760 - DNA, 15 bp, Homo sapiens
gaaggaaggccggca

SEQ ID NO: 181761 - DNA, 15 bp, Homo sapiens
ggaaggaaggccggc

SEQ ID NO: 181762 - DNA, 15 bp, Homo sapiens
cggaaggaaggccgg

SEQ ID NO: 181763 - DNA, 15 bp, Homo sapiens
ccggaaggaaggccg

SEQ ID NO: 181764 - DNA, 15 bp, Homo sapiens
tccggaaggaaggcc

SEQ ID NO: 181765 - DNA, 15 bp, Homo sapiens
atccggaaggaaggc

SEQ ID NO: 181766 - DNA, 15 bp, Homo sapiens
aatccggaaggaagg

SEQ ID NO: 181767 - DNA, 15 bp, Homo sapiens
taatccggaaggaag

SEQ ID NO: 181768 - DNA, 15 bp, Homo sapiens
gtaatccggaaggaa

SEQ ID NO: 181769 - DNA, 15 bp, Homo sapiens
tgtaatccggaagga

SEQ ID NO: 181770 - DNA, 15 bp, Homo sapiens
gtgtaatccggaagg

SEQ ID NO: 181771 - DNA, 15 bp, Homo sapiens
ggtgtaatccggaag

SEQ ID NO: 181772 - DNA, 15 bp, Homo sapiens
tggtgtaatccggaa

SEQ ID NO: 181773 - DNA, 15 bp, Homo sapiens
ctggtgtaatccgga

SEQ ID NO: 181774 - DNA, 15 bp, Homo sapiens
actggtgtaatccgg

SEQ ID NO: 181775 - DNA, 15 bp, Homo sapiens
cactggtgtaatccg

SEQ ID NO: 181776 - DNA, 15 bp, Homo sapiens
gcactggtgtaatcc

SEQ ID NO: 181777 - DNA, 15 bp, Homo sapiens
ggcactggtgtaatc

SEQ ID NO: 181778 - DNA, 15 bp, Homo sapiens
tggcactggtgtaat

SEQ ID NO: 181779 - DNA, 15 bp, Homo sapiens
atggcactggtgtaa

SEQ ID NO: 181780 - DNA, 15 bp, Homo sapiens
aatggcactggtgta

SEQ ID NO: 181781 - DNA, 15 bp, Homo sapiens
caatggcactggtgt

SEQ ID NO: 181782 - DNA, 15 bp, Homo sapiens
gcaatggcactggtg

SEQ ID NO: 181783 - DNA, 15 bp, Homo sapiens
cgcaatggcactggt

SEQ ID NO: 181784 - DNA, 15 bp, Homo sapiens
gcgcaatggcactgg

SEQ ID NO: 181785 - DNA, 15 bp, Homo sapiens
tgcgcaatggcactg

SEQ ID NO: 181786 - DNA, 15 bp, Homo sapiens
gtgcgcaatggcact

SEQ ID NO: 181787 - DNA, 15 bp, Homo sapiens
ggtgcgcaatggcac

SEQ ID NO: 181788 - DNA, 15 bp, Homo sapiens
gggtgcgcaatggca

SEQ ID NO: 181789 - DNA, 15 bp, Homo sapiens
tgggtgcgcaatggc

SEQ ID NO: 181790 - DNA, 15 bp, Homo sapiens
gtgggtgcgcaatgg

SEQ ID NO: 181791 - DNA, 15 bp, Homo sapiens
tgtgggtgcgcaatg

SEQ ID NO: 181792 - DNA, 15 bp, Homo sapiens
ctgtgggtgcgcaat

SEQ ID NO: 181793 - DNA, 15 bp, Homo sapiens
gctgtgggtgcgcaa

SEQ ID NO: 181794 - DNA, 15 bp, Homo sapiens
ggctgtgggtgcgca

SEQ ID NO: 181795 - DNA, 15 bp, Homo sapiens
gggctgtgggtgcgc

SEQ ID NO: 181796 - DNA, 15 bp, Homo sapiens
agggctgtgggtgcg

SEQ ID NO: 181797 - DNA, 15 bp, Homo sapiens
cagggctgtgggtgc

SEQ ID NO: 181798 - DNA, 15 bp, Homo sapiens
ccagggctgtgggtg

SEQ ID NO: 181799 - DNA, 15 bp, Homo sapiens
cccagggctgtgggt

SEQ ID NO: 181800 - DNA, 15 bp, Homo sapiens
tcccagggctgtggg

SEQ ID NO: 181801 - DNA, 15 bp, Homo sapiens
ctcccagggctgtgg

SEQ ID NO: 181802 - DNA, 15 bp, Homo sapiens
tctcccagggctgtg

SEQ ID NO: 181803 - DNA, 15 bp, Homo sapiens
ctctcccagggctgt

SEQ ID NO: 181804 - DNA, 15 bp, Homo sapiens
cctctcccagggctg

SEQ ID NO: 181805 - DNA, 15 bp, Homo sapiens
gcctctcccagggct

SEQ ID NO: 181806 - DNA, 15 bp, Homo sapiens
tgcctctcccagggc

SEQ ID NO: 181807 - DNA, 15 bp, Homo sapiens
ctgcctctcccaggg

SEQ ID NO: 181808 - DNA, 15 bp, Homo sapiens
cctgcctctcccagg

SEQ ID NO: 181809 - DNA, 15 bp, Homo sapiens
ccctgcctctcccag

SEQ ID NO: 181810 - DNA, 15 bp, Homo sapiens
cccctgcctctccca

SEQ ID NO: 181811 - DNA, 15 bp, Homo sapiens
acccctgcctctccc

SEQ ID NO: 181812 - DNA, 15 bp, Homo sapiens
aacccctgcctctcc

SEQ ID NO: 181813 - DNA, 15 bp, Homo sapiens
aaacccctgcctctc

SEQ ID NO: 181814 - DNA, 15 bp, Homo sapiens
aaaacccctgcctct

SEQ ID NO: 181815 - DNA, 15 bp, Homo sapiens
caaaacccctgcctc

SEQ ID NO: 181816 - DNA, 15 bp, Homo sapiens
acaaaacccctgcct

SEQ ID NO: 181817 - DNA, 15 bp, Homo sapiens
gacaaaacccctgcc

SEQ ID NO: 181818 - DNA, 15 bp, Homo sapiens
tgacaaaacccctgc

SEQ ID NO: 181819 - DNA, 15 bp, Homo sapiens
gtgacaaaacccctg

SEQ ID NO: 181820 - DNA, 15 bp, Homo sapiens
tgtgacaaaacccct

SEQ ID NO: 181821 - DNA, 15 bp, Homo sapiens
gtgtgacaaaacccc

SEQ ID NO: 181822 - DNA, 15 bp, Homo sapiens
agtgtgacaaaaccc

SEQ ID NO: 181823 - DNA, 15 bp, Homo sapiens
aagtgtgacaaaacc

SEQ ID NO: 181824 - DNA, 15 bp, Homo sapiens
caagtgtgacaaaac

SEQ ID NO: 181825 - DNA, 15 bp, Homo sapiens
tcaagtgtgacaaaa

SEQ ID NO: 181826 - DNA, 15 bp, Homo sapiens
ctcaagtgtgacaaa

SEQ ID NO: 181827 - DNA, 15 bp, Homo sapiens
actcaagtgtgacaa

SEQ ID NO: 181828 - DNA, 15 bp, Homo sapiens
gactcaagtgtgaca

SEQ ID NO: 181829 - DNA, 15 bp, Homo sapiens
cgactcaagtgtgac

SEQ ID NO: 181830 - DNA, 15 bp, Homo sapiens
gcgactcaagtgtga

SEQ ID NO: 181831 - DNA, 15 bp, Homo sapiens
agcgactcaagtgtg

SEQ ID NO: 181832 - DNA, 15 bp, Homo sapiens
gagcgactcaagtgt

SEQ ID NO: 181833 - DNA, 15 bp, Homo sapiens
ggagcgactcaagtg

SEQ ID NO: 181834 - DNA, 15 bp, Homo sapiens
gggagcgactcaagt

SEQ ID NO: 181835 - DNA, 15 bp, Homo sapiens
tgggagcgactcaag

SEQ ID NO: 181836 - DNA, 15 bp, Homo sapiens
gtgggagcgactcaa

SEQ ID NO: 181837 - DNA, 15 bp, Homo sapiens
agtgggagcgactca

SEQ ID NO: 181838 - DNA, 15 bp, Homo sapiens
gagtgggagcgactc

SEQ ID NO: 181839 - DNA, 15 bp, Homo sapiens
tgagtgggagcgact

SEQ ID NO: 181840 - DNA, 15 bp, Homo sapiens
ttgagtgggagcgac

SEQ ID NO: 181841 - DNA, 15 bp, Homo sapiens
cttgagtgggagcga

SEQ ID NO: 181842 - DNA, 15 bp, Homo sapiens
acttgagtgggagcg

SEQ ID NO: 181843 - DNA, 15 bp, Homo sapiens
gacttgagtgggagc

SEQ ID NO: 181844 - DNA, 15 bp, Homo sapiens
ggacttgagtgggag

SEQ ID NO: 181845 - DNA, 15 bp, Homo sapiens
gggacttgagtggga

SEQ ID NO: 181846 - DNA, 15 bp, Homo sapiens
tgggacttgagtggg

SEQ ID NO: 181847 - DNA, 15 bp, Homo sapiens
gtgggacttgagtgg

SEQ ID NO: 181848 - DNA, 15 bp, Homo sapiens
agtgggacttgagtg

SEQ ID NO: 181849 - DNA, 15 bp, Homo sapiens
aagtgggacttgagt

SEQ ID NO: 181850 - DNA, 15 bp, Homo sapiens
aaagtgggacttgag

SEQ ID NO: 181851 - DNA, 15 bp, Homo sapiens
gaaagtgggacttga

SEQ ID NO: 181852 - DNA, 15 bp, Homo sapiens
agaaagtgggacttg

SEQ ID NO: 181853 - DNA, 15 bp, Homo sapiens
aagaaagtgggactt

SEQ ID NO: 181854 - DNA, 15 bp, Homo sapiens
gaagaaagtgggact

SEQ ID NO: 181855 - DNA, 15 bp, Homo sapiens
agaagaaagtgggac

SEQ ID NO: 181856 - DNA, 15 bp, Homo sapiens
gagaagaaagtggga

SEQ ID NO: 181857 - DNA, 15 bp, Homo sapiens
agagaagaaagtggg

SEQ ID NO: 181858 - DNA, 15 bp, Homo sapiens
gagagaagaaagtgg

SEQ ID NO: 181859 - DNA, 15 bp, Homo sapiens
tgagagaagaaagtg

SEQ ID NO: 181860 - DNA, 15 bp, Homo sapiens
ttgagagaagaaagt

SEQ ID NO: 181861 - DNA, 15 bp, Homo sapiens
gttgagagaagaaag

SEQ ID NO: 181862 - DNA, 15 bp, Homo sapiens
agttgagagaagaaa

SEQ ID NO: 181863 - DNA, 15 bp, Homo sapiens
gagttgagagaagaa

SEQ ID NO: 181864 - DNA, 15 bp, Homo sapiens
tgagttgagagaaga

SEQ ID NO: 181865 - DNA, 15 bp, Homo sapiens
ttgagttgagagaag

SEQ ID NO: 181866 - DNA, 15 bp, Homo sapiens
cttgagttgagagaa

SEQ ID NO: 181867 - DNA, 15 bp, Homo sapiens
gcttgagttgagaga

SEQ ID NO: 181868 - DNA, 15 bp, Homo sapiens
tgcttgagttgagag

SEQ ID NO: 181869 - DNA, 15 bp, Homo sapiens
gtgcttgagttgaga

SEQ ID NO: 181870 - DNA, 15 bp, Homo sapiens
ggtgcttgagttgag

SEQ ID NO: 181871 - DNA, 15 bp, Homo sapiens
aggtgcttgagttga

SEQ ID NO: 181872 - DNA, 15 bp, Homo sapiens
caggtgcttgagttg

SEQ ID NO: 181873 - DNA, 15 bp, Homo sapiens
gcaggtgcttgagtt

SEQ ID NO: 181874 - DNA, 15 bp, Homo sapiens
tgcaggtgcttgagt

SEQ ID NO: 181875 - DNA, 15 bp, Homo sapiens
ctgcaggtgcttgag

SEQ ID NO: 181876 - DNA, 15 bp, Homo sapiens
gctgcaggtgcttga

SEQ ID NO: 181877 - DNA, 15 bp, Homo sapiens
ggctgcaggtgcttg

SEQ ID NO: 181878 - DNA, 15 bp, Homo sapiens
gggctgcaggtgctt

SEQ ID NO: 181879 - DNA, 15 bp, Homo sapiens
ggggctgcaggtgct

SEQ ID NO: 181880 - DNA, 15 bp, Homo sapiens
gggggctgcaggtgc

SEQ ID NO: 181881 - DNA, 15 bp, Homo sapiens
agggggctgcaggtg

SEQ ID NO: 181882 - DNA, 15 bp, Homo sapiens
cagggggctgcaggt

SEQ ID NO: 181883 - DNA, 15 bp, Homo sapiens
tcagggggctgcagg

SEQ ID NO: 181884 - DNA, 15 bp, Homo sapiens
ctcagggggctgcag

SEQ ID NO: 181885 - DNA, 15 bp, Homo sapiens
cctcagggggctgca

SEQ ID NO: 181886 - DNA, 15 bp, Homo sapiens
gcctcagggggctgc

SEQ ID NO: 181887 - DNA, 15 bp, Homo sapiens
tgcctcagggggctg

SEQ ID NO: 181888 - DNA, 15 bp, Homo sapiens
gtgcctcagggggct

SEQ ID NO: 181889 - DNA, 15 bp, Homo sapiens
agtgcctcagggggc

SEQ ID NO: 181890 - DNA, 15 bp, Homo sapiens
aagtgcctcaggggg

SEQ ID NO: 181891 - DNA, 15 bp, Homo sapiens
taagtgcctcagggg

SEQ ID NO: 181892 - DNA, 15 bp, Homo sapiens
gtaagtgcctcaggg

SEQ ID NO: 181893 - DNA, 15 bp, Homo sapiens
ggtaagtgcctcagg

SEQ ID NO: 181894 - DNA, 15 bp, Homo sapiens
tggtaagtgcctcag

SEQ ID NO: 181895 - DNA, 15 bp, Homo sapiens
gtggtaagtgcctca

SEQ ID NO: 181896 - DNA, 15 bp, Homo sapiens
agtggtaagtgcctc

SEQ ID NO: 181897 - DNA, 15 bp, Homo sapiens
gagtggtaagtgcct

SEQ ID NO: 181898 - DNA, 15 bp, Homo sapiens
agagtggtaagtgcc

SEQ ID NO: 181899 - DNA, 15 bp, Homo sapiens
aagagtggtaagtgc

SEQ ID NO: 181900 - DNA, 15 bp, Homo sapiens
caagagtggtaagtg

SEQ ID NO: 181901 - DNA, 15 bp, Homo sapiens
ccaagagtggtaagt

SEQ ID NO: 181902 - DNA, 15 bp, Homo sapiens
cccaagagtggtaag

SEQ ID NO: 181903 - DNA, 15 bp, Homo sapiens
ccccaagagtggtaa

SEQ ID NO: 181904 - DNA, 15 bp, Homo sapiens
accccaagagtggta

SEQ ID NO: 181905 - DNA, 15 bp, Homo sapiens
gaccccaagagtggt

SEQ ID NO: 181906 - DNA, 15 bp, Homo sapiens
tgaccccaagagtgg

SEQ ID NO: 181907 - DNA, 15 bp, Homo sapiens
ttgaccccaagagtg

SEQ ID NO: 181908 - DNA, 15 bp, Homo sapiens
tttgaccccaagagt

SEQ ID NO: 181909 - DNA, 15 bp, Homo sapiens
atttgaccccaagag

SEQ ID NO: 181910 - DNA, 15 bp, Homo sapiens
gatttgaccccaaga

SEQ ID NO: 181911 - DNA, 15 bp, Homo sapiens
agatttgaccccaag

SEQ ID NO: 181912 - DNA, 15 bp, Homo sapiens
gagatttgaccccaa

SEQ ID NO: 181913 - DNA, 15 bp, Homo sapiens
ggagatttgacccca

SEQ ID NO: 181914 - DNA, 15 bp, Homo sapiens
tggagatttgacccc

SEQ ID NO: 181915 - DNA, 15 bp, Homo sapiens
ctggagatttgaccc

SEQ ID NO: 181916 - DNA, 15 bp, Homo sapiens
cctggagatttgacc

SEQ ID NO: 181917 - DNA, 15 bp, Homo sapiens
gcctggagatttgac

SEQ ID NO: 181918 - DNA, 15 bp, Homo sapiens
agcctggagatttga

SEQ ID NO: 181919 - DNA, 15 bp, Homo sapiens
cagcctggagatttg

SEQ ID NO: 181920 - DNA, 15 bp, Homo sapiens
ccagcctggagattt

SEQ ID NO: 181921 - DNA, 15 bp, Homo sapiens
tccagcctggagatt

SEQ ID NO: 181922 - DNA, 15 bp, Homo sapiens
ttccagcctggagat

SEQ ID NO: 181923 - DNA, 15 bp, Homo sapiens
attccagcctggaga

SEQ ID NO: 181924 - DNA, 15 bp, Homo sapiens
cattccagcctggag

SEQ ID NO: 181925 - DNA, 15 bp, Homo sapiens
agcattccagcctgg

SEQ ID NO: 181926 - DNA, 15 bp, Homo sapiens
cagcattccagcctg

SEQ ID NO: 181927 - DNA, 15 bp, Homo sapiens
ccagcattccagcct

SEQ ID NO: 181928 - DNA, 15 bp, Homo sapiens
accagcattccagcc

SEQ ID NO: 181929 - DNA, 15 bp, Homo sapiens
caccagcattccagc

SEQ ID NO: 181930 - DNA, 15 bp, Homo sapiens
gcaccagcattccag

SEQ ID NO: 181931 - DNA, 15 bp, Homo sapiens
ggcaccagcattcca

SEQ ID NO: 181932 - DNA, 15 bp, Homo sapiens
gggcaccagcattcc

SEQ ID NO: 181933 - DNA, 15 bp, Homo sapiens
tgggcaccagcattc

SEQ ID NO: 181934 - DNA, 15 bp, Homo sapiens
gtgggcaccagcatt

SEQ ID NO: 181935 - DNA, 15 bp, Homo sapiens
cgtgggcaccagcat

SEQ ID NO: 181936 - DNA, 15 bp, Homo sapiens
ccgtgggcaccagca

SEQ ID NO: 181937 - DNA, 15 bp, Homo sapiens
accgtgggcaccagc

SEQ ID NO: 181938 - DNA, 15 bp, Homo sapiens
caccgtgggcaccag

SEQ ID NO: 181939 - DNA, 15 bp, Homo sapiens
tcaccgtgggcacca

SEQ ID NO: 181940 - DNA, 15 bp, Homo sapiens
ctcaccgtgggcacc

SEQ ID NO: 181941 - DNA, 15 bp, Homo sapiens
cctcaccgtgggcac

SEQ ID NO: 181942 - DNA, 15 bp, Homo sapiens
ccctcaccgtgggca

SEQ ID NO: 181943 - DNA, 15 bp, Homo sapiens
gccctcaccgtgggc

SEQ ID NO: 181944 - DNA, 15 bp, Homo sapiens
tgccctcaccgtggg

SEQ ID NO: 181945 - DNA, 15 bp, Homo sapiens
gtgccctcaccgtgg

SEQ ID NO: 181946 - DNA, 15 bp, Homo sapiens
cgtgccctcaccgtg

SEQ ID NO: 181947 - DNA, 15 bp, Homo sapiens
tcgtgccctcaccgt

SEQ ID NO: 181948 - DNA, 15 bp, Homo sapiens
ctcgtgccctcaccg

SEQ ID NO: 181949 - DNA, 15 bp, Homo sapiens
actcgtgccctcacc

SEQ ID NO: 181950 - DNA, 15 bp, Homo sapiens
gactcgtgccctcac

SEQ ID NO: 181951 - DNA, 15 bp, Homo sapiens
agactcgtgccctca

SEQ ID NO: 181952 - DNA, 15 bp, Homo sapiens
gagactcgtgccctc

SEQ ID NO: 181953 - DNA, 15 bp, Homo sapiens
cgagactcgtgccct

SEQ ID NO: 181954 - DNA, 15 bp, Homo sapiens
ccgagactcgtgccc

SEQ ID NO: 181955 - DNA, 15 bp, Homo sapiens
tccgagactcgtgcc

SEQ ID NO: 181956 - DNA, 15 bp, Homo sapiens
ctccgagactcgtgc

SEQ ID NO: 181957 - DNA, 15 bp, Homo sapiens
cctccgagactcgtg

SEQ ID NO: 181958 - DNA, 15 bp, Homo sapiens
ccctccgagactcgt

SEQ ID NO: 181959 - DNA, 15 bp, Homo sapiens
gccctccgagactcg

SEQ ID NO: 181960 - DNA, 15 bp, Homo sapiens
tgccctccgagactc

SEQ ID NO: 181961 - DNA, 15 bp, Homo sapiens
gtgccctccgagact

SEQ ID NO: 181962 - DNA, 15 bp, Homo sapiens
cgtgccctccgagac

SEQ ID NO: 181963 - DNA, 15 bp, Homo sapiens
ccgtgccctccgaga

SEQ ID NO: 181964 - DNA, 15 bp, Homo sapiens
cccgtgccctccgag

SEQ ID NO: 181965 - DNA, 15 bp, Homo sapiens
gcccgtgccctccga

SEQ ID NO: 181966 - DNA, 15 bp, Homo sapiens
tgcccgtgccctccg

SEQ ID NO: 181967 - DNA, 15 bp, Homo sapiens
ctgcccgtgccctcc

SEQ ID NO: 181968 - DNA, 15 bp, Homo sapiens
cctgcccgtgccctc

SEQ ID NO: 181969 - DNA, 15 bp, Homo sapiens
ccctgcccgtgccct

SEQ ID NO: 181970 - DNA, 15 bp, Homo sapiens
tccctgcccgtgccc

SEQ ID NO: 181971 - DNA, 15 bp, Homo sapiens
gtccctgcccgtgcc

SEQ ID NO: 181972 - DNA, 15 bp, Homo sapiens
tgtccctgcccgtgc

SEQ ID NO: 181973 - DNA, 15 bp, Homo sapiens
ctgtccctgcccgtg

SEQ ID NO: 181974 - DNA, 15 bp, Homo sapiens
cctgtccctgcccgt

SEQ ID NO: 181975 - DNA, 15 bp, Homo sapiens
acctgtccctgcccg

SEQ ID NO: 181976 - DNA, 15 bp, Homo sapiens
cacctgtccctgccc

SEQ ID NO: 181977 - DNA, 15 bp, Homo sapiens
tcacctgtccctgcc

SEQ ID NO: 181978 - DNA, 15 bp, Homo sapiens
ttcacctgtccctgc

SEQ ID NO: 181979 - DNA, 15 bp, Homo sapiens
attcacctgtccctg

SEQ ID NO: 181980 - DNA, 15 bp, Homo sapiens
cattcacctgtccct

SEQ ID NO: 181981 - DNA, 15 bp, Homo sapiens
ccattcacctgtccc

SEQ ID NO: 181982 - DNA, 15 bp, Homo sapiens
cccattcacctgtcc

SEQ ID NO: 181983 - DNA, 15 bp, Homo sapiens
ccccattcacctgtc

SEQ ID NO: 181984 - DNA, 15 bp, Homo sapiens
gccccattcacctgt

SEQ ID NO: 181985 - DNA, 15 bp, Homo sapiens
ggccccattcacctg

SEQ ID NO: 181986 - DNA, 15 bp, Homo sapiens
aggccccattcacct

SEQ ID NO: 181987 - DNA, 15 bp, Homo sapiens
caggccccattcacc

SEQ ID NO: 181988 - DNA, 15 bp, Homo sapiens
tcaggccccattcac

SEQ ID NO: 181989 - DNA, 15 bp, Homo sapiens
ctcaggccccattca

SEQ ID NO: 181990 - DNA, 15 bp, Homo sapiens
tctcaggccccattc

SEQ ID NO: 181991 - DNA, 15 bp, Homo sapiens
ctctcaggccccatt

SEQ ID NO: 181992 - DNA, 15 bp, Homo sapiens
gctctcaggccccat

SEQ ID NO: 181993 - DNA, 15 bp, Homo sapiens
cgctctcaggcccca

SEQ ID NO: 181994 - DNA, 15 bp, Homo sapiens
ccgctctcaggcccc

SEQ ID NO: 181995 - DNA, 15 bp, Homo sapiens
gccgctctcaggccc

SEQ ID NO: 181996 - DNA, 15 bp, Homo sapiens
tgccgctctcaggcc

SEQ ID NO: 181997 - DNA, 15 bp, Homo sapiens
gtgccgctctcaggc

SEQ ID NO: 181998 - DNA, 15 bp, Homo sapiens
ggtgccgctctcagg

SEQ ID NO: 181999 - DNA, 15 bp, Homo sapiens
aggtgccgctctcag

SEQ ID NO: 182000 - DNA, 15 bp, Homo sapiens
gaggtgccgctctca

SEQ ID NO: 182001 - DNA, 15 bp, Homo sapiens
agaggtgccgctctc

SEQ ID NO: 182002 - DNA, 15 bp, Homo sapiens
cagaggtgccgctct

SEQ ID NO: 182003 - DNA, 15 bp, Homo sapiens
acagaggtgccgctc

SEQ ID NO: 182004 - DNA, 15 bp, Homo sapiens
gacagaggtgccgct

SEQ ID NO: 182005 - DNA, 15 bp, Homo sapiens
ggacagaggtgccgc

SEQ ID NO: 182006 - DNA, 15 bp, Homo sapiens
gggacagaggtgccg

SEQ ID NO: 182007 - DNA, 15 bp, Homo sapiens
tgggacagaggtgcc

SEQ ID NO: 182008 - DNA, 15 bp, Homo sapiens
atgggacagaggtgc

SEQ ID NO: 182009 - DNA, 15 bp, Homo sapiens
aatgggacagaggtg

SEQ ID NO: 182010 - DNA, 15 bp, Homo sapiens
taatgggacagaggt

SEQ ID NO: 182011 - DNA, 15 bp, Homo sapiens
gtaatgggacagagg

SEQ ID NO: 182012 - DNA, 15 bp, Homo sapiens
ggtaatgggacagag

SEQ ID NO: 182013 - DNA, 15 bp, Homo sapiens
aggtaatgggacaga

SEQ ID NO: 182014 - DNA, 15 bp, Homo sapiens
caggtaatgggacag

SEQ ID NO: 182015 - DNA, 15 bp, Homo sapiens
acaggtaatgggaca

SEQ ID NO: 182016 - DNA, 15 bp, Homo sapiens
gacaggtaatgggac

SEQ ID NO: 182017 - DNA, 15 bp, Homo sapiens
tgacaggtaatggga

SEQ ID NO: 182018 - DNA, 15 bp, Homo sapiens
ctgacaggtaatggg

SEQ ID NO: 182019 - DNA, 15 bp, Homo sapiens
gctgacaggtaatgg

SEQ ID NO: 182020 - DNA, 15 bp, Homo sapiens
tgctgacaggtaatg

SEQ ID NO: 182021 - DNA, 15 bp, Homo sapiens
ctgctgacaggtaat

SEQ ID NO: 182022 - DNA, 15 bp, Homo sapiens
cctgctgacaggtaa

SEQ ID NO: 182023 - DNA, 15 bp, Homo sapiens
acctgctgacaggta

SEQ ID NO: 182024 - DNA, 15 bp, Homo sapiens
cacctgctgacaggt

SEQ ID NO: 182025 - DNA, 15 bp, Homo sapiens
gcacctgctgacagg

SEQ ID NO: 182026 - DNA, 15 bp, Homo sapiens
tgcacctgctgacag

SEQ ID NO: 182027 - DNA, 15 bp, Homo sapiens
gtgcacctgctgaca

SEQ ID NO: 182028 - DNA, 15 bp, Homo sapiens
cgtgcacctgctgac

SEQ ID NO: 182029 - DNA, 15 bp, Homo sapiens
gcgtgcacctgctga

SEQ ID NO: 182030 - DNA, 15 bp, Homo sapiens
agcgtgcacctgctg

SEQ ID NO: 182031 - DNA, 15 bp, Homo sapiens
gagcgtgcacctgct

SEQ ID NO: 182032 - DNA, 15 bp, Homo sapiens
tgagcgtgcacctgc

SEQ ID NO: 182033 - DNA, 15 bp, Homo sapiens
gtgagcgtgcacctg

SEQ ID NO: 182034 - DNA, 15 bp, Homo sapiens
tgtgagcgtgcacct

SEQ ID NO: 182035 - DNA, 15 bp, Homo sapiens
ctgtgagcgtgcacc

SEQ ID NO: 182036 - DNA, 15 bp, Homo sapiens
gctgtgagcgtgcac

SEQ ID NO: 182037 - DNA, 15 bp, Homo sapiens
tgctgtgagcgtgca

SEQ ID NO: 182038 - DNA, 15 bp, Homo sapiens
ctgctgtgagcgtgc

SEQ ID NO: 182039 - DNA, 15 bp, Homo sapiens
actgctgtgagcgtg

SEQ ID NO: 182040 - DNA, 15 bp, Homo sapiens
gactgctgtgagcgt

SEQ ID NO: 182041 - DNA, 15 bp, Homo sapiens
tgactgctgtgagcg

SEQ ID NO: 182042 - DNA, 15 bp, Homo sapiens
ctgactgctgtgagc

SEQ ID NO: 182043 - DNA, 15 bp, Homo sapiens
cctgactgctgtgag

SEQ ID NO: 182044 - DNA, 15 bp, Homo sapiens
ccctgactgctgtga

SEQ ID NO: 182045 - DNA, 15 bp, Homo sapiens
cccctgactgctgtg

SEQ ID NO: 182046 - DNA, 15 bp, Homo sapiens
gcccctgactgctgt

SEQ ID NO: 182047 - DNA, 15 bp, Homo sapiens
tgcccctgactgctg

SEQ ID NO: 182048 - DNA, 15 bp, Homo sapiens
atgcccctgactgct

SEQ ID NO: 182049 - DNA, 15 bp, Homo sapiens
gatgcccctgactgc

SEQ ID NO: 182050 - DNA, 15 bp, Homo sapiens
tgatgcccctgactg

SEQ ID NO: 182051 - DNA, 15 bp, Homo sapiens
ctgatgcccctgact

SEQ ID NO: 182052 - DNA, 15 bp, Homo sapiens
gctgatgcccctgac

SEQ ID NO: 182053 - DNA, 15 bp, Homo sapiens
agctgatgcccctga

SEQ ID NO: 182054 - DNA, 15 bp, Homo sapiens
gagctgatgcccctg

SEQ ID NO: 182055 - DNA, 15 bp, Homo sapiens
ggagctgatgcccct

SEQ ID NO: 182056 - DNA, 15 bp, Homo sapiens
tggagctgatgcccc

SEQ ID NO: 182057 - DNA, 15 bp, Homo sapiens
ctggagctgatgccc

SEQ ID NO: 182058 - DNA, 15 bp, Homo sapiens
gctggagctgatgcc

SEQ ID NO: 182059 - DNA, 15 bp, Homo sapiens
ggctggagctgatgc

SEQ ID NO: 182060 - DNA, 15 bp, Homo sapiens
tggctggagctgatg

SEQ ID NO: 182061 - DNA, 15 bp, Homo sapiens
ctggctggagctgat

SEQ ID NO: 182062 - DNA, 15 bp, Homo sapiens
cctggctggagctga

SEQ ID NO: 182063 - DNA, 15 bp, Homo sapiens
tcctggctggagctg

SEQ ID NO: 182064 - DNA, 15 bp, Homo sapiens
ctcctggctggagct

SEQ ID NO: 182065 - DNA, 15 bp, Homo sapiens
gctcctggctggagc

SEQ ID NO: 182066 - DNA, 15 bp, Homo sapiens
ggctcctggctggag

SEQ ID NO: 182067 - DNA, 15 bp, Homo sapiens
tggctcctggctgga

SEQ ID NO: 182068 - DNA, 15 bp, Homo sapiens
atggctcctggctgg

SEQ ID NO: 182069 - DNA, 15 bp, Homo sapiens
aatggctcctggctg

SEQ ID NO: 182070 - DNA, 15 bp, Homo sapiens
caatggctcctggct

SEQ ID NO: 182071 - DNA, 15 bp, Homo sapiens
gcaatggctcctggc

SEQ ID NO: 182072 - DNA, 15 bp, Homo sapiens
ggcaatggctcctgg

SEQ ID NO: 182073 - DNA, 15 bp, Homo sapiens
aggcaatggctcctg

SEQ ID NO: 182074 - DNA, 15 bp, Homo sapiens
caggcaatggctcct

SEQ ID NO: 182075 - DNA, 15 bp, Homo sapiens
tcaggcaatggctcc

SEQ ID NO: 182076 - DNA, 15 bp, Homo sapiens
ctcaggcaatggctc

SEQ ID NO: 182077 - DNA, 15 bp, Homo sapiens
cctcaggcaatggct

SEQ ID NO: 182078 - DNA, 15 bp, Homo sapiens
ccctcaggcaatggc

SEQ ID NO: 182079 - DNA, 15 bp, Homo sapiens
tccctcaggcaatgg

SEQ ID NO: 182080 - DNA, 15 bp, Homo sapiens
ttccctcaggcaatg

SEQ ID NO: 182081 - DNA, 15 bp, Homo sapiens
cttccctcaggcaat

SEQ ID NO: 182082 - DNA, 15 bp, Homo sapiens
tcttccctcaggcaa

SEQ ID NO: 182083 - DNA, 15 bp, Homo sapiens
ctcttccctcaggca

SEQ ID NO: 182084 - DNA, 15 bp, Homo sapiens
cctcttccctcaggc

SEQ ID NO: 182085 - DNA, 15 bp, Homo sapiens
ccctcttccctcagg

SEQ ID NO: 182086 - DNA, 15 bp, Homo sapiens
accctcttccctcag

SEQ ID NO: 182087 - DNA, 15 bp, Homo sapiens
taccctcttccctca

SEQ ID NO: 182088 - DNA, 15 bp, Homo sapiens
gtaccctcttccctc

SEQ ID NO: 182089 - DNA, 15 bp, Homo sapiens
tgtaccctcttccct

SEQ ID NO: 182090 - DNA, 15 bp, Homo sapiens
ctgtaccctcttccc

SEQ ID NO: 182091 - DNA, 15 bp, Homo sapiens
cctgtaccctcttcc

SEQ ID NO: 182092 - DNA, 15 bp, Homo sapiens
ccctgtaccctcttc

SEQ ID NO: 182093 - DNA, 15 bp, Homo sapiens
gccctgtaccctctt

SEQ ID NO: 182094 - DNA, 15 bp, Homo sapiens
agccctgtaccctct

SEQ ID NO: 182095 - DNA, 15 bp, Homo sapiens
cagccctgtaccctc

SEQ ID NO: 182096 - DNA, 15 bp, Homo sapiens
tcagccctgtaccct

SEQ ID NO: 182097 - DNA, 15 bp, Homo sapiens
ctcagccctgtaccc

SEQ ID NO: 182098 - DNA, 15 bp, Homo sapiens
cctcagccctgtacc

SEQ ID NO: 182099 - DNA, 15 bp, Homo sapiens
ccctcagccctgtac

SEQ ID NO: 182100 - DNA, 15 bp, Homo sapiens
gccctcagccctgta

SEQ ID NO: 182101 - DNA, 15 bp, Homo sapiens
agccctcagccctgt

SEQ ID NO: 182102 - DNA, 15 bp, Homo sapiens
cagccctcagccctg

SEQ ID NO: 182103 - DNA, 15 bp, Homo sapiens
tcagccctcagccct

SEQ ID NO: 182104 - DNA, 15 bp, Homo sapiens
atcagccctcagccc

SEQ ID NO: 182105 - DNA, 15 bp, Homo sapiens
gatcagccctcagcc

SEQ ID NO: 182106 - DNA, 15 bp, Homo sapiens
ggatcagccctcagc

SEQ ID NO: 182107 - DNA, 15 bp, Homo sapiens
aggatcagccctcag

SEQ ID NO: 182108 - DNA, 15 bp, Homo sapiens
caggatcagccctca

SEQ ID NO: 182109 - DNA, 15 bp, Homo sapiens
tcaggatcagccctc

SEQ ID NO: 182110 - DNA, 15 bp, Homo sapiens
ctcaggatcagccct

SEQ ID NO: 182111 - DNA, 15 bp, Homo sapiens
gctcaggatcagccc

SEQ ID NO: 182112 - DNA, 15 bp, Homo sapiens
ggctcaggatcagcc

SEQ ID NO: 182113 - DNA, 15 bp, Homo sapiens
aggctcaggatcagc

SEQ ID NO: 182114 - DNA, 15 bp, Homo sapiens
caggctcaggatcag

SEQ ID NO: 182115 - DNA, 15 bp, Homo sapiens
ccaggctcaggatca

SEQ ID NO: 182116 - DNA, 15 bp, Homo sapiens
cccaggctcaggatc

SEQ ID NO: 182117 - DNA, 15 bp, Homo sapiens
ccccaggctcaggat

SEQ ID NO: 182118 - DNA, 15 bp, Homo sapiens
tccccaggctcagga

SEQ ID NO: 182119 - DNA, 15 bp, Homo sapiens
ctccccaggctcagg

SEQ ID NO: 182120 - DNA, 15 bp, Homo sapiens
tctccccaggctcag

SEQ ID NO: 182121 - DNA, 15 bp, Homo sapiens
gtctccccaggctca

SEQ ID NO: 182122 - DNA, 15 bp, Homo sapiens
ggtctccccaggctc

SEQ ID NO: 182123 - DNA, 15 bp, Homo sapiens
gggtctccccaggct

SEQ ID NO: 182124 - DNA, 15 bp, Homo sapiens
ggggtctccccaggc

SEQ ID NO: 182125 - DNA, 15 bp, Homo sapiens
tggggtctccccagg

SEQ ID NO: 182126 - DNA, 15 bp, Homo sapiens
atggggtctccccag

SEQ ID NO: 182127 - DNA, 15 bp, Homo sapiens
gatggggtctcccca

SEQ ID NO: 182128 - DNA, 15 bp, Homo sapiens
ggatggggtctcccc

SEQ ID NO: 182129 - DNA, 15 bp, Homo sapiens
cggatggggtctccc

SEQ ID NO: 182130 - DNA, 15 bp, Homo sapiens
acggatggggtctcc

SEQ ID NO: 182131 - DNA, 15 bp, Homo sapiens
cacggatggggtctc

SEQ ID NO: 182132 - DNA, 15 bp, Homo sapiens
gcacggatggggtct

SEQ ID NO: 182133 - DNA, 15 bp, Homo sapiens
agcacggatggggtc

SEQ ID NO: 182134 - DNA, 15 bp, Homo sapiens
cagcacggatggggt

SEQ ID NO: 182135 - DNA, 15 bp, Homo sapiens
ccagcacggatgggg

SEQ ID NO: 182136 - DNA, 15 bp, Homo sapiens
cccagcacggatggg

SEQ ID NO: 182137 - DNA, 15 bp, Homo sapiens
gcccagcacggatgg

SEQ ID NO: 182138 - DNA, 15 bp, Homo sapiens
tgcccagcacggatg

SEQ ID NO: 182139 - DNA, 15 bp, Homo sapiens
gtgcccagcacggat

SEQ ID NO: 182140 - DNA, 15 bp, Homo sapiens
ggtgcccagcacgga

SEQ ID NO: 182141 - DNA, 15 bp, Homo sapiens
gggtgcccagcacgg

SEQ ID NO: 182142 - DNA, 15 bp, Homo sapiens
tgggtgcccagcacg

SEQ ID NO: 182143 - DNA, 15 bp, Homo sapiens
ctgggtgcccagcac

SEQ ID NO: 182144 - DNA, 15 bp, Homo sapiens
gctgggtgcccagca

SEQ ID NO: 182145 - DNA, 15 bp, Homo sapiens
ggctgggtgcccagc

SEQ ID NO: 182146 - DNA, 15 bp, Homo sapiens
aggctgggtgcccag

SEQ ID NO: 182147 - DNA, 15 bp, Homo sapiens
taggctgggtgccca

SEQ ID NO: 182148 - DNA, 15 bp, Homo sapiens
gtaggctgggtgccc

SEQ ID NO: 182149 - DNA, 15 bp, Homo sapiens
ggtaggctgggtgcc

SEQ ID NO: 182150 - DNA, 15 bp, Homo sapiens
aggtaggctgggtgc

SEQ ID NO: 182151 - DNA, 15 bp, Homo sapiens
caggtaggctgggtg

SEQ ID NO: 182152 - DNA, 15 bp, Homo sapiens
tcaggtaggctgggt

SEQ ID NO: 182153 - DNA, 15 bp, Homo sapiens
ctcaggtaggctggg

SEQ ID NO: 182154 - DNA, 15 bp, Homo sapiens
gctcaggtaggctgg

SEQ ID NO: 182155 - DNA, 15 bp, Homo sapiens
agctcaggtaggctg

SEQ ID NO: 182156 - DNA, 15 bp, Homo sapiens
cagctcaggtaggct

SEQ ID NO: 182157 - DNA, 15 bp, Homo sapiens
ccagctcaggtaggc

SEQ ID NO: 182158 - DNA, 15 bp, Homo sapiens
tccagctcaggtagg

SEQ ID NO: 182159 - DNA, 15 bp, Homo sapiens
ctccagctcaggtag

SEQ ID NO: 182160 - DNA, 15 bp, Homo sapiens
cctccagctcaggta

SEQ ID NO: 182161 - DNA, 15 bp, Homo sapiens
gcctccagctcaggt

SEQ ID NO: 182162 - DNA, 15 bp, Homo sapiens
ggcctccagctcagg

SEQ ID NO: 182163 - DNA, 15 bp, Homo sapiens
aggcctccagctcag

SEQ ID NO: 182164 - DNA, 15 bp, Homo sapiens
gaggcctccagctca

SEQ ID NO: 182165 - DNA, 15 bp, Homo sapiens
tgaggcctccagctc

SEQ ID NO: 182166 - DNA, 15 bp, Homo sapiens
ctgaggcctccagct

SEQ ID NO: 182167 - DNA, 15 bp, Homo sapiens
actgaggcctccagc

SEQ ID NO: 182168 - DNA, 15 bp, Homo sapiens
cactgaggcctccag

SEQ ID NO: 182169 - DNA, 15 bp, Homo sapiens
gcactgaggcctcca

SEQ ID NO: 182170 - DNA, 15 bp, Homo sapiens
ggcactgaggcctcc

SEQ ID NO: 182171 - DNA, 15 bp, Homo sapiens
gggcactgaggcctc

SEQ ID NO: 182172 - DNA, 15 bp, Homo sapiens
tgggcactgaggcct

SEQ ID NO: 182173 - DNA, 15 bp, Homo sapiens
ctgggcactgaggcc

SEQ ID NO: 182174 - DNA, 15 bp, Homo sapiens
cctgggcactgaggc

SEQ ID NO: 182175 - DNA, 15 bp, Homo sapiens
tcctgggcactgagg

SEQ ID NO: 182176 - DNA, 15 bp, Homo sapiens
ttcctgggcactgag

SEQ ID NO: 182177 - DNA, 15 bp, Homo sapiens
cttcctgggcactga

SEQ ID NO: 182178 - DNA, 15 bp, Homo sapiens
ccttcctgggcactg

SEQ ID NO: 182179 - DNA, 15 bp, Homo sapiens
gccttcctgggcact

SEQ ID NO: 182180 - DNA, 15 bp, Homo sapiens
tgccttcctgggcac

SEQ ID NO: 182181 - DNA, 15 bp, Homo sapiens
ctgccttcctgggca

SEQ ID NO: 182182 - DNA, 15 bp, Homo sapiens
cctgccttcctgggc

SEQ ID NO: 182183 - DNA, 15 bp, Homo sapiens
ccctgccttcctggg

SEQ ID NO: 182184 - DNA, 15 bp, Homo sapiens
tccctgccttcctgg

SEQ ID NO: 182185 - DNA, 15 bp, Homo sapiens
ttccctgccttcctg

SEQ ID NO: 182186 - DNA, 15 bp, Homo sapiens
tttccctgccttcct

SEQ ID NO: 182187 - DNA, 15 bp, Homo sapiens
ctttccctgccttcc

SEQ ID NO: 182188 - DNA, 15 bp, Homo sapiens
gctttccctgccttc

SEQ ID NO: 182189 - DNA, 15 bp, Homo sapiens
ggctttccctgcctt

SEQ ID NO: 182190 - DNA, 15 bp, Homo sapiens
gggctttccctgcct

SEQ ID NO: 182191 - DNA, 15 bp, Homo sapiens
cgggctttccctgcc

SEQ ID NO: 182192 - DNA, 15 bp, Homo sapiens
gcgggctttccctgc

SEQ ID NO: 182193 - DNA, 15 bp, Homo sapiens
tgcgggctttccctg

SEQ ID NO: 182194 - DNA, 15 bp, Homo sapiens
atgcgggctttccct

SEQ ID NO: 182195 - DNA, 15 bp, Homo sapiens
aatgcgggctttccc

SEQ ID NO: 182196 - DNA, 15 bp, Homo sapiens
aaatgcgggctttcc

SEQ ID NO: 182197 - DNA, 15 bp, Homo sapiens
gaaatgcgggctttc

SEQ ID NO: 182198 - DNA, 15 bp, Homo sapiens
ggaaatgcgggcttt

SEQ ID NO: 182199 - DNA, 15 bp, Homo sapiens
aggaaatgcgggctt

SEQ ID NO: 182200 - DNA, 15 bp, Homo sapiens
caggaaatgcgggct

SEQ ID NO: 182201 - DNA, 15 bp, Homo sapiens
gcaggaaatgcgggc

SEQ ID NO: 182202 - DNA, 15 bp, Homo sapiens
agcaggaaatgcggg

SEQ ID NO: 182203 - DNA, 15 bp, Homo sapiens
cagcaggaaatgcgg

SEQ ID NO: 182204 - DNA, 15 bp, Homo sapiens
ccagcaggaaatgcg

SEQ ID NO: 182205 - DNA, 15 bp, Homo sapiens
cccagcaggaaatgc

SEQ ID NO: 182206 - DNA, 15 bp, Homo sapiens
acccagcaggaaatg

SEQ ID NO: 182207 - DNA, 15 bp, Homo sapiens
cacccagcaggaaat

SEQ ID NO: 182208 - DNA, 15 bp, Homo sapiens
gcacccagcaggaaa

SEQ ID NO: 182209 - DNA, 15 bp, Homo sapiens
agcacccagcaggaa

SEQ ID NO: 182210 - DNA, 15 bp, Homo sapiens
cagcacccagcagga

SEQ ID NO: 182211 - DNA, 15 bp, Homo sapiens
ccagcacccagcagg

SEQ ID NO: 182212 - DNA, 15 bp, Homo sapiens
gccagcacccagcag

SEQ ID NO: 182213 - DNA, 15 bp, Homo sapiens
tgccagcacccagca

SEQ ID NO: 182214 - DNA, 15 bp, Homo sapiens
ctgccagcacccagc

SEQ ID NO: 182215 - DNA, 15 bp, Homo sapiens
cctgccagcacccag

SEQ ID NO: 182216 - DNA, 15 bp, Homo sapiens
gcctgccagcaccca

SEQ ID NO: 182217 - DNA, 15 bp, Homo sapiens
cgcctgccagcaccc

SEQ ID NO: 182218 - DNA, 15 bp, Homo sapiens
acgcctgccagcacc

SEQ ID NO: 182219 - DNA, 15 bp, Homo sapiens
tacgcctgccagcac

SEQ ID NO: 182220 - DNA, 15 bp, Homo sapiens
ttacgcctgccagca

SEQ ID NO: 182221 - DNA, 15 bp, Homo sapiens
cttacgcctgccagc

SEQ ID NO: 182222 - DNA, 15 bp, Homo sapiens
acttacgcctgccag

SEQ ID NO: 182223 - DNA, 15 bp, Homo sapiens
cacttacgcctgcca

SEQ ID NO: 182224 - DNA, 15 bp, Homo sapiens
tcacttacgcctgcc

SEQ ID NO: 182225 - DNA, 15 bp, Homo sapiens
gtcacttacgcctgc

SEQ ID NO: 182226 - DNA, 15 bp, Homo sapiens
cgtcacttacgcctg

SEQ ID NO: 182227 - DNA, 15 bp, Homo sapiens
gcgtcacttacgcct

SEQ ID NO: 182228 - DNA, 15 bp, Homo sapiens
ggcgtcacttacgcc

SEQ ID NO: 182229 - DNA, 15 bp, Homo sapiens
gggcgtcacttacgc

SEQ ID NO: 182230 - DNA, 15 bp, Homo sapiens
tgggcgtcacttacg

SEQ ID NO: 182231 - DNA, 15 bp, Homo sapiens
ctgggcgtcacttac

SEQ ID NO: 182232 - DNA, 15 bp, Homo sapiens
tctgggcgtcactta

SEQ ID NO: 182233 - DNA, 15 bp, Homo sapiens
ctctgggcgtcactt

SEQ ID NO: 182234 - DNA, 15 bp, Homo sapiens
gctctgggcgtcact

SEQ ID NO: 182235 - DNA, 15 bp, Homo sapiens
agctctgggcgtcac

SEQ ID NO: 182236 - DNA, 15 bp, Homo sapiens
cagctctgggcgtca

SEQ ID NO: 182237 - DNA, 15 bp, Homo sapiens
ccagctctgggcgtc

SEQ ID NO: 182238 - DNA, 15 bp, Homo sapiens
gccagctctgggcgt

SEQ ID NO: 182239 - DNA, 15 bp, Homo sapiens
agccagctctgggcg

SEQ ID NO: 182240 - DNA, 15 bp, Homo sapiens
cagccagctctgggc

SEQ ID NO: 182241 - DNA, 15 bp, Homo sapiens
acagccagctctggg

SEQ ID NO: 182242 - DNA, 15 bp, Homo sapiens
tacagccagctctgg

SEQ ID NO: 182243 - DNA, 15 bp, Homo sapiens
ctacagccagctctg

SEQ ID NO: 182244 - DNA, 15 bp, Homo sapiens
cctacagccagctct

SEQ ID NO: 182245 - DNA, 15 bp, Homo sapiens
acctacagccagctc

SEQ ID NO: 182246 - DNA, 15 bp, Homo sapiens
cacctacagccagct

SEQ ID NO: 182247 - DNA, 15 bp, Homo sapiens
ccacctacagccagc

SEQ ID NO: 182248 - DNA, 15 bp, Homo sapiens
tccacctacagccag

SEQ ID NO: 182249 - DNA, 15 bp, Homo sapiens
ctccacctacagcca

SEQ ID NO: 182250 - DNA, 15 bp, Homo sapiens
gctccacctacagcc

SEQ ID NO: 182251 - DNA, 15 bp, Homo sapiens
agctccacctacagc

SEQ ID NO: 182252 - DNA, 15 bp, Homo sapiens
cagctccacctacag

SEQ ID NO: 182253 - DNA, 15 bp, Homo sapiens
tcagctccacctaca

SEQ ID NO: 182254 - DNA, 15 bp, Homo sapiens
gtcagctccacctac

SEQ ID NO: 182255 - DNA, 15 bp, Homo sapiens
tgtcagctccaccta

SEQ ID NO: 182256 - DNA, 15 bp, Homo sapiens
ctgtcagctccacct

SEQ ID NO: 182257 - DNA, 15 bp, Homo sapiens
cctgtcagctccacc

SEQ ID NO: 182258 - DNA, 15 bp, Homo sapiens
gcctgtcagctccac

SEQ ID NO: 182259 - DNA, 15 bp, Homo sapiens
tgcctgtcagctcca

SEQ ID NO: 182260 - DNA, 15 bp, Homo sapiens
ctgcctgtcagctcc

SEQ ID NO: 182261 - DNA, 15 bp, Homo sapiens
cctgcctgtcagctc

SEQ ID NO: 182262 - DNA, 15 bp, Homo sapiens
gcctgcctgtcagct

SEQ ID NO: 182263 - DNA, 15 bp, Homo sapiens
cgcctgcctgtcagc

SEQ ID NO: 182264 - DNA, 15 bp, Homo sapiens
ccgcctgcctgtcag

SEQ ID NO: 182265 - DNA, 15 bp, Homo sapiens
cccgcctgcctgtca

SEQ ID NO: 182266 - DNA, 15 bp, Homo sapiens
gcccgcctgcctgtc

SEQ ID NO: 182267 - DNA, 15 bp, Homo sapiens
tgcccgcctgcctgt

SEQ ID NO: 182268 - DNA, 15 bp, Homo sapiens
ctgcccgcctgcctg

SEQ ID NO: 182269 - DNA, 15 bp, Homo sapiens
gctgcccgcctgcct

SEQ ID NO: 182270 - DNA, 15 bp, Homo sapiens
ggctgcccgcctgcc

SEQ ID NO: 182271 - DNA, 15 bp, Homo sapiens
gggctgcccgcctgc

SEQ ID NO: 182272 - DNA, 15 bp, Homo sapiens
cgggctgcccgcctg

SEQ ID NO: 182273 - DNA, 15 bp, Homo sapiens
ccgggctgcccgcct

SEQ ID NO: 182274 - DNA, 15 bp, Homo sapiens
gccgggctgcccgcc

SEQ ID NO: 182275 - DNA, 15 bp, Homo sapiens
cgccgggctgcccgc

SEQ ID NO: 182276 - DNA, 15 bp, Homo sapiens
gcgccgggctgcccg

SEQ ID NO: 182277 - DNA, 15 bp, Homo sapiens
agcgccgggctgccc

SEQ ID NO: 182278 - DNA, 15 bp, Homo sapiens
cagcgccgggctgcc

SEQ ID NO: 182279 - DNA, 15 bp, Homo sapiens
ccagcgccgggctgc

SEQ ID NO: 182280 - DNA, 15 bp, Homo sapiens
tccagcgccgggctg

SEQ ID NO: 182281 - DNA, 15 bp, Homo sapiens
ttccagcgccgggct

SEQ ID NO: 182282 - DNA, 15 bp, Homo sapiens
gttccagcgccgggc

SEQ ID NO: 182283 - DNA, 15 bp, Homo sapiens
agttccagcgccggg

SEQ ID NO: 182284 - DNA, 15 bp, Homo sapiens
cagttccagcgccgg

SEQ ID NO: 182285 - DNA, 15 bp, Homo sapiens
gcagttccagcgccg

SEQ ID NO: 182286 - DNA, 15 bp, Homo sapiens
tgcagttccagcgcc

SEQ ID NO: 182287 - DNA, 15 bp, Homo sapiens
gtgcagttccagcgc

SEQ ID NO: 182288 - DNA, 15 bp, Homo sapiens
ggtgcagttccagcg

SEQ ID NO: 182289 - DNA, 15 bp, Homo sapiens
tggtgcagttccagc

SEQ ID NO: 182290 - DNA, 15 bp, Homo sapiens
ttggtgcagttccag

SEQ ID NO: 182291 - DNA, 15 bp, Homo sapiens
cttggtgcagttcca

SEQ ID NO: 182292 - DNA, 15 bp, Homo sapiens
ccttggtgcagttcc

SEQ ID NO: 182293 - DNA, 15 bp, Homo sapiens
cccttggtgcagttc

SEQ ID NO: 182294 - DNA, 15 bp, Homo sapiens
gcccttggtgcagtt

SEQ ID NO: 182295 - DNA, 15 bp, Homo sapiens
agcccttggtgcagt

SEQ ID NO: 182296 - DNA, 15 bp, Homo sapiens
cagcccttggtgcag

SEQ ID NO: 182297 - DNA, 15 bp, Homo sapiens
ccagcccttggtgca

SEQ ID NO: 182298 - DNA, 15 bp, Homo sapiens
cccagcccttggtgc

SEQ ID NO: 182299 - DNA, 15 bp, Homo sapiens
tcccagcccttggtg

SEQ ID NO: 182300 - DNA, 15 bp, Homo sapiens
ctcccagcccttggt

SEQ ID NO: 182301 - DNA, 15 bp, Homo sapiens
gctcccagcccttgg

SEQ ID NO: 182302 - DNA, 15 bp, Homo sapiens
cgctcccagcccttg

SEQ ID NO: 182303 - DNA, 15 bp, Homo sapiens
ccgctcccagccctt

SEQ ID NO: 182304 - DNA, 15 bp, Homo sapiens
cccgctcccagccct

SEQ ID NO: 182305 - DNA, 15 bp, Homo sapiens
gcccgctcccagccc

SEQ ID NO: 182306 - DNA, 15 bp, Homo sapiens
tgcccgctcccagcc

SEQ ID NO: 182307 - DNA, 15 bp, Homo sapiens
gtgcccgctcccagc

SEQ ID NO: 182308 - DNA, 15 bp, Homo sapiens
ggtgcccgctcccag

SEQ ID NO: 182309 - DNA, 15 bp, Homo sapiens
aggtgcccgctccca

SEQ ID NO: 182310 - DNA, 15 bp, Homo sapiens
caggtgcccgctccc

SEQ ID NO: 182311 - DNA, 15 bp, Homo sapiens
ccaggtgcccgctcc

SEQ ID NO: 182312 - DNA, 15 bp, Homo sapiens
tccaggtgcccgctc

SEQ ID NO: 182313 - DNA, 15 bp, Homo sapiens
ctccaggtgcccgct

SEQ ID NO: 182314 - DNA, 15 bp, Homo sapiens
cctccaggtgcccgc

SEQ ID NO: 182315 - DNA, 15 bp, Homo sapiens
ccctccaggtgcccg

SEQ ID NO: 182316 - DNA, 15 bp, Homo sapiens
tccctccaggtgccc

SEQ ID NO: 182317 - DNA, 15 bp, Homo sapiens
ttccctccaggtgcc

SEQ ID NO: 182318 - DNA, 15 bp, Homo sapiens
tttccctccaggtgc

SEQ ID NO: 182319 - DNA, 15 bp, Homo sapiens
ctttccctccaggtg

SEQ ID NO: 182320 - DNA, 15 bp, Homo sapiens
tctttccctccaggt

SEQ ID NO: 182321 - DNA, 15 bp, Homo sapiens
ctctttccctccagg

SEQ ID NO: 182322 - DNA, 15 bp, Homo sapiens
cctctttccctccag

SEQ ID NO: 182323 - DNA, 15 bp, Homo sapiens
ccctctttccctcca

SEQ ID NO: 182324 - DNA, 15 bp, Homo sapiens
cccctctttccctcc

SEQ ID NO: 182325 - DNA, 15 bp, Homo sapiens
gcccctctttccctc

SEQ ID NO: 182326 - DNA, 15 bp, Homo sapiens
agcccctctttccct

SEQ ID NO: 182327 - DNA, 15 bp, Homo sapiens
cagcccctctttccc

SEQ ID NO: 182328 - DNA, 15 bp, Homo sapiens
gcagcccctctttcc

SEQ ID NO: 182329 - DNA, 15 bp, Homo sapiens
tgcagcccctctttc

SEQ ID NO: 182330 - DNA, 15 bp, Homo sapiens
ctgcagcccctcttt

SEQ ID NO: 182331 - DNA, 15 bp, Homo sapiens
actgcagcccctctt

SEQ ID NO: 182332 - DNA, 15 bp, Homo sapiens
cactgcagcccctct

SEQ ID NO: 182333 - DNA, 15 bp, Homo sapiens
ccactgcagcccctc

SEQ ID NO: 182334 - DNA, 15 bp, Homo sapiens
gccactgcagcccct

SEQ ID NO: 182335 - DNA, 15 bp, Homo sapiens
agccactgcagcccc

SEQ ID NO: 182336 - DNA, 15 bp, Homo sapiens
aagccactgcagccc

SEQ ID NO: 182337 - DNA, 15 bp, Homo sapiens
caagccactgcagcc

SEQ ID NO: 182338 - DNA, 15 bp, Homo sapiens
tcaagccactgcagc

SEQ ID NO: 182339 - DNA, 15 bp, Homo sapiens
gtcaagccactgcag

SEQ ID NO: 182340 - DNA, 15 bp, Homo sapiens
ggtcaagccactgca

SEQ ID NO: 182341 - DNA, 15 bp, Homo sapiens
tggtcaagccactgc

SEQ ID NO: 182342 - DNA, 15 bp, Homo sapiens
atggtcaagccactg

SEQ ID NO: 182343 - DNA, 15 bp, Homo sapiens
catggtcaagccact

SEQ ID NO: 182344 - DNA, 15 bp, Homo sapiens
ccatggtcaagccac

SEQ ID NO: 182345 - DNA, 15 bp, Homo sapiens
tccatggtcaagcca

SEQ ID NO: 182346 - DNA, 15 bp, Homo sapiens
gtccatggtcaagcc

SEQ ID NO: 182347 - DNA, 15 bp, Homo sapiens
tgtccatggtcaagc

SEQ ID NO: 182348 - DNA, 15 bp, Homo sapiens
ctgtccatggtcaag

SEQ ID NO: 182349 - DNA, 15 bp, Homo sapiens
cctgtccatggtcaa

SEQ ID NO: 182350 - DNA, 15 bp, Homo sapiens
ccctgtccatggtca

SEQ ID NO: 182351 - DNA, 15 bp, Homo sapiens
tccctgtccatggtc

SEQ ID NO: 182352 - DNA, 15 bp, Homo sapiens
atccctgtccatggt

SEQ ID NO: 182353 - DNA, 15 bp, Homo sapiens
gatccctgtccatgg

SEQ ID NO: 182354 - DNA, 15 bp, Homo sapiens
ggatccctgtccatg

SEQ ID NO: 182355 - DNA, 15 bp, Homo sapiens
gggatccctgtccat

SEQ ID NO: 182356 - DNA, 15 bp, Homo sapiens
ggggatccctgtcca

SEQ ID NO: 182357 - DNA, 15 bp, Homo sapiens
tggggatccctgtcc

SEQ ID NO: 182358 - DNA, 15 bp, Homo sapiens
ctggggatccctgtc

SEQ ID NO: 182359 - DNA, 15 bp, Homo sapiens
cctggggatccctgt

SEQ ID NO: 182360 - DNA, 15 bp, Homo sapiens
ccctggggatccctg

SEQ ID NO: 182361 - DNA, 15 bp, Homo sapiens
tccctggggatccct

SEQ ID NO: 182362 - DNA, 15 bp, Homo sapiens
gtccctggggatccc

SEQ ID NO: 182363 - DNA, 15 bp, Homo sapiens
ggtccctggggatcc

SEQ ID NO: 182364 - DNA, 15 bp, Homo sapiens
tggtccctggggatc

SEQ ID NO: 182365 - DNA, 15 bp, Homo sapiens
ctggtccctggggat

SEQ ID NO: 182366 - DNA, 15 bp, Homo sapiens
tctggtccctgggga

SEQ ID NO: 182367 - DNA, 15 bp, Homo sapiens
ctctggtccctgggg

SEQ ID NO: 182368 - DNA, 15 bp, Homo sapiens
gctctggtccctggg

SEQ ID NO: 182369 - DNA, 15 bp, Homo sapiens
tgctctggtccctgg

SEQ ID NO: 182370 - DNA, 15 bp, Homo sapiens
ctgctctggtccctg

SEQ ID NO: 182371 - DNA, 15 bp, Homo sapiens
tctgctctggtccct

SEQ ID NO: 182372 - DNA, 15 bp, Homo sapiens
ttctgctctggtccc

SEQ ID NO: 182373 - DNA, 15 bp, Homo sapiens
tttctgctctggtcc

SEQ ID NO: 182374 - DNA, 15 bp, Homo sapiens
gtttctgctctggtc

SEQ ID NO: 182375 - DNA, 15 bp, Homo sapiens
ggtttctgctctggt

SEQ ID NO: 182376 - DNA, 15 bp, Homo sapiens
gggtttctgctctgg

SEQ ID NO: 182377 - DNA, 15 bp, Homo sapiens
tgggtttctgctctg

SEQ ID NO: 182378 - DNA, 15 bp, Homo sapiens
atgggtttctgctct

SEQ ID NO: 182379 - DNA, 15 bp, Homo sapiens
aatgggtttctgctc

SEQ ID NO: 182380 - DNA, 15 bp, Homo sapiens
taatgggtttctgct

SEQ ID NO: 182381 - DNA, 15 bp, Homo sapiens
ataatgggtttctgc

SEQ ID NO: 182382 - DNA, 15 bp, Homo sapiens
gataatgggtttctg

SEQ ID NO: 182383 - DNA, 15 bp, Homo sapiens
agataatgggtttct

SEQ ID NO: 182384 - DNA, 15 bp, Homo sapiens
tagataatgggtttc

SEQ ID NO: 182385 - DNA, 15 bp, Homo sapiens
ttagataatgggttt

SEQ ID NO: 182386 - DNA, 15 bp, Homo sapiens
cttagataatgggtt

SEQ ID NO: 182387 - DNA, 15 bp, Homo sapiens
ccttagataatgggt

SEQ ID NO: 182388 - DNA, 15 bp, Homo sapiens
tccttagataatggg

SEQ ID NO: 182389 - DNA, 15 bp, Homo sapiens
ttccttagataatgg

SEQ ID NO: 182390 - DNA, 15 bp, Homo sapiens
tttccttagataatg

SEQ ID NO: 182391 - DNA, 15 bp, Homo sapiens
ttttccttagataat

SEQ ID NO: 182392 - DNA, 15 bp, Homo sapiens
cttttccttagataa

SEQ ID NO: 182393 - DNA, 15 bp, Homo sapiens
ccttttccttagata

SEQ ID NO: 182394 - DNA, 15 bp, Homo sapiens
cccttttccttagat

SEQ ID NO: 182395 - DNA, 15 bp, Homo sapiens
ccccttttccttaga

SEQ ID NO: 182396 - DNA, 15 bp, Homo sapiens
cccccttttccttag

SEQ ID NO: 182397 - DNA, 15 bp, Homo sapiens
tcccccttttcctta

SEQ ID NO: 182398 - DNA, 15 bp, Homo sapiens
gtcccccttttcctt

SEQ ID NO: 182399 - DNA, 15 bp, Homo sapiens
tgtcccccttttcct

SEQ ID NO: 182400 - DNA, 15 bp, Homo sapiens
atgtcccccttttcc

SEQ ID NO: 182401 - DNA, 15 bp, Homo sapiens
catgtcccccttttc

SEQ ID NO: 182402 - DNA, 15 bp, Homo sapiens
tcatgtccccctttt

SEQ ID NO: 182403 - DNA, 15 bp, Homo sapiens
ctcatgtcccccttt

SEQ ID NO: 182404 - DNA, 15 bp, Homo sapiens
cctcatgtccccctt

SEQ ID NO: 182405 - DNA, 15 bp, Homo sapiens
acctcatgtccccct

SEQ ID NO: 182406 - DNA, 15 bp, Homo sapiens
gacctcatgtccccc

SEQ ID NO: 182407 - DNA, 15 bp, Homo sapiens
tgacctcatgtcccc

SEQ ID NO: 182408 - DNA, 15 bp, Homo sapiens
ctgacctcatgtccc

SEQ ID NO: 182409 - DNA, 15 bp, Homo sapiens
cctgacctcatgtcc

SEQ ID NO: 182410 - DNA, 15 bp, Homo sapiens
gcctgacctcatgtc

SEQ ID NO: 182411 - DNA, 15 bp, Homo sapiens
ggcctgacctcatgt

SEQ ID NO: 182412 - DNA, 15 bp, Homo sapiens
tggcctgacctcatg

SEQ ID NO: 182413 - DNA, 15 bp, Homo sapiens
gtggcctgacctcat

SEQ ID NO: 182414 - DNA, 15 bp, Homo sapiens
agtggcctgacctca

SEQ ID NO: 182415 - DNA, 15 bp, Homo sapiens
aagtggcctgacctc

SEQ ID NO: 182416 - DNA, 15 bp, Homo sapiens
aaagtggcctgacct

SEQ ID NO: 182417 - DNA, 15 bp, Homo sapiens
caaagtggcctgacc

SEQ ID NO: 182418 - DNA, 15 bp, Homo sapiens
ccaaagtggcctgac

SEQ ID NO: 182419 - DNA, 15 bp, Homo sapiens
tccaaagtggcctga

SEQ ID NO: 182420 - DNA, 15 bp, Homo sapiens
ttccaaagtggcctg

SEQ ID NO: 182421 - DNA, 15 bp, Homo sapiens
cttccaaagtggcct

SEQ ID NO: 182422 - DNA, 15 bp, Homo sapiens
ccttccaaagtggcc

SEQ ID NO: 182423 - DNA, 15 bp, Homo sapiens
gccttccaaagtggc

SEQ ID NO: 182424 - DNA, 15 bp, Homo sapiens
ggccttccaaagtgg

SEQ ID NO: 182425 - DNA, 15 bp, Homo sapiens
tggccttccaaagtg

SEQ ID NO: 182426 - DNA, 15 bp, Homo sapiens
ctggccttccaaagt

SEQ ID NO: 182427 - DNA, 15 bp, Homo sapiens
cctggccttccaaag

SEQ ID NO: 182428 - DNA, 15 bp, Homo sapiens
ccctggccttccaaa

SEQ ID NO: 182429 - DNA, 15 bp, Homo sapiens
tccctggccttccaa

SEQ ID NO: 182430 - DNA, 15 bp, Homo sapiens
ctccctggccttcca

SEQ ID NO: 182431 - DNA, 15 bp, Homo sapiens
cctccctggccttcc

SEQ ID NO: 182432 - DNA, 15 bp, Homo sapiens
ccctccctggccttc

SEQ ID NO: 182433 - DNA, 15 bp, Homo sapiens
accctccctggcctt

SEQ ID NO: 182434 - DNA, 15 bp, Homo sapiens
caccctccctggcct

SEQ ID NO: 182435 - DNA, 15 bp, Homo sapiens
tcaccctccctggcc

SEQ ID NO: 182436 - DNA, 15 bp, Homo sapiens
atcaccctccctggc

SEQ ID NO: 182437 - DNA, 15 bp, Homo sapiens
catcaccctccctgg

SEQ ID NO: 182438 - DNA, 15 bp, Homo sapiens
gcatcaccctccctg

SEQ ID NO: 182439 - DNA, 15 bp, Homo sapiens
ggcatcaccctccct

SEQ ID NO: 182440 - DNA, 15 bp, Homo sapiens
aggcatcaccctccc

SEQ ID NO: 182441 - DNA, 15 bp, Homo sapiens
aaggcatcaccctcc

SEQ ID NO: 182442 - DNA, 15 bp, Homo sapiens
caaggcatcaccctc

SEQ ID NO: 182443 - DNA, 15 bp, Homo sapiens
ccaaggcatcaccct

SEQ ID NO: 182444 - DNA, 15 bp, Homo sapiens
cccaaggcatcaccc

SEQ ID NO: 182445 - DNA, 15 bp, Homo sapiens
ccccaaggcatcacc

SEQ ID NO: 182446 - DNA, 15 bp, Homo sapiens
tccccaaggcatcac

SEQ ID NO: 182447 - DNA, 15 bp, Homo sapiens
ctccccaaggcatca

SEQ ID NO: 182448 - DNA, 15 bp, Homo sapiens
tctccccaaggcatc

SEQ ID NO: 182449 - DNA, 15 bp, Homo sapiens
ttctccccaaggcat

SEQ ID NO: 182450 - DNA, 15 bp, Homo sapiens
tttctccccaaggca

SEQ ID NO: 182451 - DNA, 15 bp, Homo sapiens
ctttctccccaaggc

SEQ ID NO: 182452 - DNA, 15 bp, Homo sapiens
gctttctccccaagg

SEQ ID NO: 182453 - DNA, 15 bp, Homo sapiens
agctttctccccaag

SEQ ID NO: 182454 - DNA, 15 bp, Homo sapiens
cagctttctccccaa

SEQ ID NO: 182455 - DNA, 15 bp, Homo sapiens
ccagctttctcccca

SEQ ID NO: 182456 - DNA, 15 bp, Homo sapiens
cccagctttctcccc

SEQ ID NO: 182457 - DNA, 15 bp, Homo sapiens
gcccagctttctccc

SEQ ID NO: 182458 - DNA, 15 bp, Homo sapiens
tgcccagctttctcc

SEQ ID NO: 182459 - DNA, 15 bp, Homo sapiens
ctgcccagctttctc

SEQ ID NO: 182460 - DNA, 15 bp, Homo sapiens
actgcccagctttct

SEQ ID NO: 182461 - DNA, 15 bp, Homo sapiens
gactgcccagctttc

SEQ ID NO: 182462 - DNA, 15 bp, Homo sapiens
tgactgcccagcttt

SEQ ID NO: 182463 - DNA, 15 bp, Homo sapiens
atgactgcccagctt

SEQ ID NO: 182464 - DNA, 15 bp, Homo sapiens
catgactgcccagct

SEQ ID NO: 182465 - DNA, 15 bp, Homo sapiens
ccatgactgcccagc

SEQ ID NO: 182466 - DNA, 15 bp, Homo sapiens
tccatgactgcccag

SEQ ID NO: 182467 - DNA, 15 bp, Homo sapiens
ttccatgactgccca

SEQ ID NO: 182468 - DNA, 15 bp, Homo sapiens
attccatgactgccc

SEQ ID NO: 182469 - DNA, 15 bp, Homo sapiens
cattccatgactgcc

SEQ ID NO: 182470 - DNA, 15 bp, Homo sapiens
acattccatgactgc

SEQ ID NO: 182471 - DNA, 15 bp, Homo sapiens
aacattccatgactg

SEQ ID NO: 182472 - DNA, 15 bp, Homo sapiens
taacattccatgact

SEQ ID NO: 182473 - DNA, 15 bp, Homo sapiens
ttaacattccatgac

SEQ ID NO: 182474 - DNA, 15 bp, Homo sapiens
gttaacattccatga

SEQ ID NO: 182475 - DNA, 15 bp, Homo sapiens
ggttaacattccatg

SEQ ID NO: 182476 - DNA, 15 bp, Homo sapiens
aggttaacattccat

SEQ ID NO: 182477 - DNA, 15 bp, Homo sapiens
caggttaacattcca

SEQ ID NO: 182478 - DNA, 15 bp, Homo sapiens
ccaggttaacattcc

SEQ ID NO: 182479 - DNA, 15 bp, Homo sapiens
tccaggttaacattc

SEQ ID NO: 182480 - DNA, 15 bp, Homo sapiens
ttccaggttaacatt

SEQ ID NO: 182481 - DNA, 15 bp, Homo sapiens
cttccaggttaacat

SEQ ID NO: 182482 - DNA, 15 bp, Homo sapiens
ccttccaggttaaca

SEQ ID NO: 182483 - DNA, 15 bp, Homo sapiens
cccttccaggttaac

SEQ ID NO: 182484 - DNA, 15 bp, Homo sapiens
tcccttccaggttaa

SEQ ID NO: 182485 - DNA, 15 bp, Homo sapiens
gtcccttccaggtta

SEQ ID NO: 182486 - DNA, 15 bp, Homo sapiens
tgtcccttccaggtt

SEQ ID NO: 182487 - DNA, 15 bp, Homo sapiens
atgtcccttccaggt

SEQ ID NO: 182488 - DNA, 15 bp, Homo sapiens
catgtcccttccagg

SEQ ID NO: 182489 - DNA, 15 bp, Homo sapiens
ccatgtcccttccag

SEQ ID NO: 182490 - DNA, 15 bp, Homo sapiens
tccatgtcccttcca

SEQ ID NO: 182491 - DNA, 15 bp, Homo sapiens
gtccatgtcccttcc

SEQ ID NO: 182492 - DNA, 15 bp, Homo sapiens
ggtccatgtcccttc

SEQ ID NO: 182493 - DNA, 15 bp, Homo sapiens
aggtccatgtccctt

SEQ ID NO: 182494 - DNA, 15 bp, Homo sapiens
caggtccatgtccct

SEQ ID NO: 182495 - DNA, 15 bp, Homo sapiens
tcaggtccatgtccc

SEQ ID NO: 182496 - DNA, 15 bp, Homo sapiens
ttcaggtccatgtcc

SEQ ID NO: 182497 - DNA, 15 bp, Homo sapiens
tttcaggtccatgtc

SEQ ID NO: 182498 - DNA, 15 bp, Homo sapiens
atttcaggtccatgt

SEQ ID NO: 182499 - DNA, 15 bp, Homo sapiens
gatttcaggtccatg

SEQ ID NO: 182500 - DNA, 15 bp, Homo sapiens
agatttcaggtccat

SEQ ID NO: 182501 - DNA, 15 bp, Homo sapiens
gagatttcaggtcca

SEQ ID NO: 182502 - DNA, 15 bp, Homo sapiens
agagatttcaggtcc

SEQ ID NO: 182503 - DNA, 15 bp, Homo sapiens
cagagatttcaggtc

SEQ ID NO: 182504 - DNA, 15 bp, Homo sapiens
acagagatttcaggt

SEQ ID NO: 182505 - DNA, 15 bp, Homo sapiens
cacagagatttcagg

SEQ ID NO: 182506 - DNA, 15 bp, Homo sapiens
acacagagatttcag

SEQ ID NO: 182507 - DNA, 15 bp, Homo sapiens
cacacagagatttca

SEQ ID NO: 182508 - DNA, 15 bp, Homo sapiens
tcacacagagatttc

SEQ ID NO: 182509 - DNA, 15 bp, Homo sapiens
gtcacacagagattt

SEQ ID NO: 182510 - DNA, 15 bp, Homo sapiens
ggtcacacagagatt

SEQ ID NO: 182511 - DNA, 15 bp, Homo sapiens
gggtcacacagagat

SEQ ID NO: 182512 - DNA, 15 bp, Homo sapiens
agggtcacacagaga

SEQ ID NO: 182513 - DNA, 15 bp, Homo sapiens
gagggtcacacagag

SEQ ID NO: 182514 - DNA, 15 bp, Homo sapiens
tgagggtcacacaga

SEQ ID NO: 182515 - DNA, 15 bp, Homo sapiens
ctgagggtcacacag

SEQ ID NO: 182516 - DNA, 15 bp, Homo sapiens
gctgagggtcacaca

SEQ ID NO: 182517 - DNA, 15 bp, Homo sapiens
tgctgagggtcacac

SEQ ID NO: 182518 - DNA, 15 bp, Homo sapiens
ttgctgagggtcaca

SEQ ID NO: 182519 - DNA, 15 bp, Homo sapiens
attgctgagggtcac

SEQ ID NO: 182520 - DNA, 15 bp, Homo sapiens
aattgctgagggtca

SEQ ID NO: 182521 - DNA, 15 bp, Homo sapiens
aaattgctgagggtc

SEQ ID NO: 182522 - DNA, 15 bp, Homo sapiens
taaattgctgagggt

SEQ ID NO: 182523 - DNA, 15 bp, Homo sapiens
gtaaattgctgaggg

SEQ ID NO: 182524 - DNA, 15 bp, Homo sapiens
agtaaattgctgagg

SEQ ID NO: 182525 - DNA, 15 bp, Homo sapiens
aagtaaattgctgag

SEQ ID NO: 182526 - DNA, 15 bp, Homo sapiens
caagtaaattgctga

SEQ ID NO: 182527 - DNA, 15 bp, Homo sapiens
acaagtaaattgctg

SEQ ID NO: 182528 - DNA, 15 bp, Homo sapiens
aacaagtaaattgct

SEQ ID NO: 182529 - DNA, 15 bp, Homo sapiens
aaacaagtaaattgc

SEQ ID NO: 182530 - DNA, 15 bp, Homo sapiens
aaaacaagtaaattg

SEQ ID NO: 182531 - DNA, 15 bp, Homo sapiens
taaaacaagtaaatt

SEQ ID NO: 182532 - DNA, 15 bp, Homo sapiens
ctaaaacaagtaaat

SEQ ID NO: 182533 - DNA, 15 bp, Homo sapiens
actaaaacaagtaaa

SEQ ID NO: 182534 - DNA, 15 bp, Homo sapiens
tactaaaacaagtaa

SEQ ID NO: 182535 - DNA, 15 bp, Homo sapiens
ctactaaaacaagta

SEQ ID NO: 182536 - DNA, 15 bp, Homo sapiens
tctactaaaacaagt

SEQ ID NO: 182537 - DNA, 15 bp, Homo sapiens
ttctactaaaacaag

SEQ ID NO: 182538 - DNA, 15 bp, Homo sapiens
tttctactaaaacaa

SEQ ID NO: 182539 - DNA, 15 bp, Homo sapiens
ctttctactaaaaca

SEQ ID NO: 182540 - DNA, 15 bp, Homo sapiens
actttctactaaaac

SEQ ID NO: 182541 - DNA, 15 bp, Homo sapiens
aactttctactaaaa

SEQ ID NO: 182542 - DNA, 15 bp, Homo sapiens
aaactttctactaaa

SEQ ID NO: 182543 - DNA, 15 bp, Homo sapiens
gaaactttctactaa

SEQ ID NO: 182544 - DNA, 15 bp, Homo sapiens
ggaaactttctacta

SEQ ID NO: 182545 - DNA, 15 bp, Homo sapiens
aggaaactttctact

SEQ ID NO: 182546 - DNA, 15 bp, Homo sapiens
aaggaaactttctac

SEQ ID NO: 182547 - DNA, 15 bp, Homo sapiens
taaggaaactttcta

SEQ ID NO: 182548 - DNA, 15 bp, Homo sapiens
ataaggaaactttct

SEQ ID NO: 182549 - DNA, 15 bp, Homo sapiens
tataaggaaactttc

SEQ ID NO: 182550 - DNA, 15 bp, Homo sapiens
ctataaggaaacttt

SEQ ID NO: 182551 - DNA, 15 bp, Homo sapiens
tctataaggaaactt

SEQ ID NO: 182552 - DNA, 15 bp, Homo sapiens
ttctataaggaaact

SEQ ID NO: 182553 - DNA, 15 bp, Homo sapiens
gttctataaggaaac

SEQ ID NO: 182554 - DNA, 15 bp, Homo sapiens
ggttctataaggaaa

SEQ ID NO: 182555 - DNA, 15 bp, Homo sapiens
aggttctataaggaa

SEQ ID NO: 182556 - DNA, 15 bp, Homo sapiens
taggttctataagga

SEQ ID NO: 182557 - DNA, 15 bp, Homo sapiens
ataggttctataagg

SEQ ID NO: 182558 - DNA, 15 bp, Homo sapiens
tataggttctataag

SEQ ID NO: 182559 - DNA, 15 bp, Homo sapiens
ttataggttctataa

SEQ ID NO: 182560 - DNA, 15 bp, Homo sapiens
tttataggttctata

SEQ ID NO: 182561 - DNA, 15 bp, Homo sapiens
ttttataggttctat

SEQ ID NO: 182562 - DNA, 15 bp, Homo sapiens
attttataggttcta

SEQ ID NO: 182563 - DNA, 15 bp, Homo sapiens
cattttataggttct

SEQ ID NO: 182564 - DNA, 15 bp, Homo sapiens
acattttataggttc

SEQ ID NO: 182565 - DNA, 15 bp, Homo sapiens
aacattttataggtt

SEQ ID NO: 182566 - DNA, 15 bp, Homo sapiens
caacattttataggt

SEQ ID NO: 182567 - DNA, 15 bp, Homo sapiens
gcaacattttatagg

SEQ ID NO: 182568 - DNA, 15 bp, Homo sapiens
cgcaacattttatag

SEQ ID NO: 182569 - DNA, 15 bp, Homo sapiens
tcgcaacattttata

SEQ ID NO: 182570 - DNA, 15 bp, Homo sapiens
atcgcaacattttat

SEQ ID NO: 182571 - DNA, 15 bp, Homo sapiens
gatcgcaacatttta

SEQ ID NO: 182572 - DNA, 15 bp, Homo sapiens
ggatcgcaacatttt

SEQ ID NO: 182573 - DNA, 15 bp, Homo sapiens
tggatcgcaacattt

SEQ ID NO: 182574 - DNA, 15 bp, Homo sapiens
ctggatcgcaacatt

SEQ ID NO: 182575 - DNA, 15 bp, Homo sapiens
tctggatcgcaacat

SEQ ID NO: 182576 - DNA, 15 bp, Homo sapiens
atctggatcgcaaca

SEQ ID NO: 182577 - DNA, 15 bp, Homo sapiens
gatctggatcgcaac

SEQ ID NO: 182578 - DNA, 15 bp, Homo sapiens
ggatctggatcgcaa

SEQ ID NO: 182579 - DNA, 15 bp, Homo sapiens
aggatctggatcgca

SEQ ID NO: 182580 - DNA, 15 bp, Homo sapiens
gaggatctggatcgc

SEQ ID NO: 182581 - DNA, 15 bp, Homo sapiens
tgaggatctggatcg

SEQ ID NO: 182582 - DNA, 15 bp, Homo sapiens
ttgaggatctggatc

SEQ ID NO: 182583 - DNA, 15 bp, Homo sapiens
tttgaggatctggat

SEQ ID NO: 182584 - DNA, 15 bp, Homo sapiens
gtttgaggatctgga

SEQ ID NO: 182585 - DNA, 15 bp, Homo sapiens
tgtttgaggatctgg

SEQ ID NO: 182586 - DNA, 15 bp, Homo sapiens
ctgtttgaggatctg

SEQ ID NO: 182587 - DNA, 15 bp, Homo sapiens
actgtttgaggatct

SEQ ID NO: 182588 - DNA, 15 bp, Homo sapiens
tactgtttgaggatc

SEQ ID NO: 182589 - DNA, 15 bp, Homo sapiens
atactgtttgaggat

SEQ ID NO: 182590 - DNA, 15 bp, Homo sapiens
aatactgtttgagga

SEQ ID NO: 182591 - DNA, 15 bp, Homo sapiens
caatactgtttgagg

SEQ ID NO: 182592 - DNA, 15 bp, Homo sapiens
acaatactgtttgag

SEQ ID NO: 182593 - DNA, 15 bp, Homo sapiens
gacaatactgtttga

SEQ ID NO: 182594 - DNA, 15 bp, Homo sapiens
agacaatactgtttg

SEQ ID NO: 182595 - DNA, 15 bp, Homo sapiens
tagacaatactgttt

SEQ ID NO: 182596 - DNA, 15 bp, Homo sapiens
gtagacaatactgtt

SEQ ID NO: 182597 - DNA, 15 bp, Homo sapiens
agtagacaatactgt

SEQ ID NO: 182598 - DNA, 15 bp, Homo sapiens
tagtagacaatactg

SEQ ID NO: 182599 - DNA, 15 bp, Homo sapiens
atagtagacaatact

SEQ ID NO: 182600 - DNA, 15 bp, Homo sapiens
catagtagacaatac

SEQ ID NO: 182601 - DNA, 15 bp, Homo sapiens
acatagtagacaata

SEQ ID NO: 182602 - DNA, 15 bp, Homo sapiens
cacatagtagacaat

SEQ ID NO: 182603 - DNA, 15 bp, Homo sapiens
ccacatagtagacaa

SEQ ID NO: 182604 - DNA, 15 bp, Homo sapiens
gccacatagtagaca

SEQ ID NO: 182605 - DNA, 15 bp, Homo sapiens
tgccacatagtagac

SEQ ID NO: 182606 - DNA, 15 bp, Homo sapiens
ctgccacatagtaga

SEQ ID NO: 182607 - DNA, 15 bp, Homo sapiens
cctgccacatagtag

SEQ ID NO: 182608 - DNA, 15 bp, Homo sapiens
gcctgccacatagta

SEQ ID NO: 182609 - DNA, 15 bp, Homo sapiens
tgcctgccacatagt

SEQ ID NO: 182610 - DNA, 15 bp, Homo sapiens
gtgcctgccacatag

SEQ ID NO: 182611 - DNA, 15 bp, Homo sapiens
ggtgcctgccacata

SEQ ID NO: 182612 - DNA, 15 bp, Homo sapiens
tggtgcctgccacat

SEQ ID NO: 182613 - DNA, 15 bp, Homo sapiens
ctggtgcctgccaca

SEQ ID NO: 182614 - DNA, 15 bp, Homo sapiens
cctggtgcctgccac

SEQ ID NO: 182615 - DNA, 15 bp, Homo sapiens
acctggtgcctgcca

SEQ ID NO: 182616 - DNA, 15 bp, Homo sapiens
aacctggtgcctgcc

SEQ ID NO: 182617 - DNA, 15 bp, Homo sapiens
taacctggtgcctgc

SEQ ID NO: 182618 - DNA, 15 bp, Homo sapiens
ctaacctggtgcctg

SEQ ID NO: 182619 - DNA, 15 bp, Homo sapiens
tctaacctggtgcct

SEQ ID NO: 182620 - DNA, 15 bp, Homo sapiens
gtctaacctggtgcc

SEQ ID NO: 182621 - DNA, 15 bp, Homo sapiens
tgtctaacctggtgc

SEQ ID NO: 182622 - DNA, 15 bp, Homo sapiens
gtgtctaacctggtg

SEQ ID NO: 182623 - DNA, 15 bp, Homo sapiens
agtgtctaacctggt

SEQ ID NO: 182624 - DNA, 15 bp, Homo sapiens
cagtgtctaacctgg

SEQ ID NO: 182625 - DNA, 15 bp, Homo sapiens
ccagtgtctaacctg

SEQ ID NO: 182626 - DNA, 15 bp, Homo sapiens
cccagtgtctaacct

SEQ ID NO: 182627 - DNA, 15 bp, Homo sapiens
ccccagtgtctaacc

SEQ ID NO: 182628 - DNA, 15 bp, Homo sapiens
cccccagtgtctaac

SEQ ID NO: 182629 - DNA, 15 bp, Homo sapiens
gcccccagtgtctaa

SEQ ID NO: 182630 - DNA, 15 bp, Homo sapiens
ggcccccagtgtcta

SEQ ID NO: 182631 - DNA, 15 bp, Homo sapiens
gggcccccagtgtct

SEQ ID NO: 182632 - DNA, 15 bp, Homo sapiens
tgggcccccagtgtc

SEQ ID NO: 182633 - DNA, 15 bp, Homo sapiens
ttgggcccccagtgt

SEQ ID NO: 182634 - DNA, 15 bp, Homo sapiens
tttgggcccccagtg

SEQ ID NO: 182635 - DNA, 15 bp, Homo sapiens
ctttgggcccccagt

SEQ ID NO: 182636 - DNA, 15 bp, Homo sapiens
tctttgggcccccag

SEQ ID NO: 182637 - DNA, 15 bp, Homo sapiens
atctttgggccccca

SEQ ID NO: 182638 - DNA, 15 bp, Homo sapiens
catctttgggccccc

SEQ ID NO: 182639 - DNA, 15 bp, Homo sapiens
tcatctttgggcccc

SEQ ID NO: 182640 - DNA, 15 bp, Homo sapiens
ttcatctttgggccc

SEQ ID NO: 182641 - DNA, 15 bp, Homo sapiens
gttcatctttgggcc

SEQ ID NO: 182642 - DNA, 15 bp, Homo sapiens
cgttcatctttgggc

SEQ ID NO: 182643 - DNA, 15 bp, Homo sapiens
acgttcatctttggg

SEQ ID NO: 182644 - DNA, 15 bp, Homo sapiens
gacgttcatctttgg

SEQ ID NO: 182645 - DNA, 15 bp, Homo sapiens
agacgttcatctttg

SEQ ID NO: 182646 - DNA, 15 bp, Homo sapiens
cagacgttcatcttt

SEQ ID NO: 182647 - DNA, 15 bp, Homo sapiens
gcagacgttcatctt

SEQ ID NO: 182648 - DNA, 15 bp, Homo sapiens
agcagacgttcatct

SEQ ID NO: 182649 - DNA, 15 bp, Homo sapiens
cagcagacgttcatc

SEQ ID NO: 182650 - DNA, 15 bp, Homo sapiens
acagcagacgttcat

SEQ ID NO: 182651 - DNA, 15 bp, Homo sapiens
cacagcagacgttca

SEQ ID NO: 182652 - DNA, 15 bp, Homo sapiens
tcacagcagacgttc

SEQ ID NO: 182653 - DNA, 15 bp, Homo sapiens
atcacagcagacgtt

SEQ ID NO: 182654 - DNA, 15 bp, Homo sapiens
catcacagcagacgt

SEQ ID NO: 182655 - DNA, 15 bp, Homo sapiens
ccatcacagcagacg

SEQ ID NO: 182656 - DNA, 15 bp, Homo sapiens
cccatcacagcagac

SEQ ID NO: 182657 - DNA, 15 bp, Homo sapiens
tcccatcacagcaga

SEQ ID NO: 182658 - DNA, 15 bp, Homo sapiens
ttcccatcacagcag

SEQ ID NO: 182659 - DNA, 15 bp, Homo sapiens
attcccatcacagca

SEQ ID NO: 182660 - DNA, 15 bp, Homo sapiens
cattcccatcacagc

SEQ ID NO: 182661 - DNA, 15 bp, Homo sapiens
acattcccatcacag

SEQ ID NO: 182662 - DNA, 15 bp, Homo sapiens
aacattcccatcaca

SEQ ID NO: 182663 - DNA, 15 bp, Homo sapiens
aaacattcccatcac

SEQ ID NO: 182664 - DNA, 15 bp, Homo sapiens
aaaacattcccatca

SEQ ID NO: 182665 - DNA, 15 bp, Homo sapiens
gaaaacattcccatc

SEQ ID NO: 182666 - DNA, 15 bp, Homo sapiens
agaaaacattcccat

SEQ ID NO: 182667 - DNA, 15 bp, Homo sapiens
tagaaaacattccca

SEQ ID NO: 182668 - DNA, 15 bp, Homo sapiens
ctagaaaacattccc

SEQ ID NO: 182669 - DNA, 15 bp, Homo sapiens
cctagaaaacattcc

SEQ ID NO: 182670 - DNA, 15 bp, Homo sapiens
acctagaaaacattc

SEQ ID NO: 182671 - DNA, 15 bp, Homo sapiens
cacctagaaaacatt

SEQ ID NO: 182672 - DNA, 15 bp, Homo sapiens
acacctagaaaacat

SEQ ID NO: 182673 - DNA, 15 bp, Homo sapiens
cacacctagaaaaca

SEQ ID NO: 182674 - DNA, 15 bp, Homo sapiens
gcacacctagaaaac

SEQ ID NO: 182675 - DNA, 15 bp, Homo sapiens
agcacacctagaaaa

SEQ ID NO: 182676 - DNA, 15 bp, Homo sapiens
cagcacacctagaaa

SEQ ID NO: 182677 - DNA, 15 bp, Homo sapiens
gcagcacacctagaa

SEQ ID NO: 182678 - DNA, 15 bp, Homo sapiens
ggcagcacacctaga

SEQ ID NO: 182679 - DNA, 15 bp, Homo sapiens
gggcagcacacctag

SEQ ID NO: 182680 - DNA, 15 bp, Homo sapiens
tgggcagcacaccta

SEQ ID NO: 182681 - DNA, 15 bp, Homo sapiens
atgggcagcacacct

SEQ ID NO: 182682 - DNA, 15 bp, Homo sapiens
aatgggcagcacacc

SEQ ID NO: 182683 - DNA, 15 bp, Homo sapiens
taatgggcagcacac

SEQ ID NO: 182684 - DNA, 15 bp, Homo sapiens
ataatgggcagcaca

SEQ ID NO: 182685 - DNA, 15 bp, Homo sapiens
cataatgggcagcac

SEQ ID NO: 182686 - DNA, 15 bp, Homo sapiens
ccataatgggcagca

SEQ ID NO: 182687 - DNA, 15 bp, Homo sapiens
accataatgggcagc

SEQ ID NO: 182688 - DNA, 15 bp, Homo sapiens
taccataatgggcag

SEQ ID NO: 182689 - DNA, 15 bp, Homo sapiens
gtaccataatgggca

SEQ ID NO: 182690 - DNA, 15 bp, Homo sapiens
ggtaccataatgggc

SEQ ID NO: 182691 - DNA, 15 bp, Homo sapiens
gggtaccataatggg

SEQ ID NO: 182692 - DNA, 15 bp, Homo sapiens
tgggtaccataatgg

SEQ ID NO: 182693 - DNA, 15 bp, Homo sapiens
gtgggtaccataatg

SEQ ID NO: 182694 - DNA, 15 bp, Homo sapiens
agtgggtaccataat

SEQ ID NO: 182695 - DNA, 15 bp, Homo sapiens
cagtgggtaccataa

SEQ ID NO: 182696 - DNA, 15 bp, Homo sapiens
ccagtgggtaccata

SEQ ID NO: 182697 - DNA, 15 bp, Homo sapiens
tccagtgggtaccat

SEQ ID NO: 182698 - DNA, 15 bp, Homo sapiens
gtccagtgggtacca

SEQ ID NO: 182699 - DNA, 15 bp, Homo sapiens
tgtccagtgggtacc

SEQ ID NO: 182700 - DNA, 15 bp, Homo sapiens
gtgtccagtgggtac

SEQ ID NO: 182701 - DNA, 15 bp, Homo sapiens
tgtgtccagtgggta

SEQ ID NO: 182702 - DNA, 15 bp, Homo sapiens
gtgtgtccagtgggt

SEQ ID NO: 182703 - DNA, 15 bp, Homo sapiens
cgtgtgtccagtggg

SEQ ID NO: 182704 - DNA, 15 bp, Homo sapiens
acgtgtgtccagtgg

SEQ ID NO: 182705 - DNA, 15 bp, Homo sapiens
cacgtgtgtccagtg

SEQ ID NO: 182706 - DNA, 15 bp, Homo sapiens
ccacgtgtgtccagt

SEQ ID NO: 182707 - DNA, 15 bp, Homo sapiens
gccacgtgtgtccag

SEQ ID NO: 182708 - DNA, 15 bp, Homo sapiens
agccacgtgtgtcca

SEQ ID NO: 182709 - DNA, 15 bp, Homo sapiens
cagccacgtgtgtcc

SEQ ID NO: 182710 - DNA, 15 bp, Homo sapiens
acagccacgtgtgtc

SEQ ID NO: 182711 - DNA, 15 bp, Homo sapiens
aacagccacgtgtgt

SEQ ID NO: 182712 - DNA, 15 bp, Homo sapiens
taacagccacgtgtg

SEQ ID NO: 182713 - DNA, 15 bp, Homo sapiens
ttaacagccacgtgt

SEQ ID NO: 182714 - DNA, 15 bp, Homo sapiens
cttaacagccacgtg

SEQ ID NO: 182715 - DNA, 15 bp, Homo sapiens
gcttaacagccacgt

SEQ ID NO: 182716 - DNA, 15 bp, Homo sapiens
tgcttaacagccacg

SEQ ID NO: 182717 - DNA, 15 bp, Homo sapiens
atgcttaacagccac

SEQ ID NO: 182718 - DNA, 15 bp, Homo sapiens
aatgcttaacagcca

SEQ ID NO: 182719 - DNA, 15 bp, Homo sapiens
aaatgcttaacagcc

SEQ ID NO: 182720 - DNA, 15 bp, Homo sapiens
caaatgcttaacagc

SEQ ID NO: 182721 - DNA, 15 bp, Homo sapiens
tcaaatgcttaacag

SEQ ID NO: 182722 - DNA, 15 bp, Homo sapiens
ttcaaatgcttaaca

SEQ ID NO: 182723 - DNA, 15 bp, Homo sapiens
tttcaaatgcttaac

SEQ ID NO: 182724 - DNA, 15 bp, Homo sapiens
atttcaaatgcttaa

SEQ ID NO: 182725 - DNA, 15 bp, Homo sapiens
catttcaaatgctta

SEQ ID NO: 182726 - DNA, 15 bp, Homo sapiens
acatttcaaatgctt

SEQ ID NO: 182727 - DNA, 15 bp, Homo sapiens
cacatttcaaatgct

SEQ ID NO: 182728 - DNA, 15 bp, Homo sapiens
ccacatttcaaatgc

SEQ ID NO: 182729 - DNA, 15 bp, Homo sapiens
gccacatttcaaatg

SEQ ID NO: 182730 - DNA, 15 bp, Homo sapiens
agccacatttcaaat

SEQ ID NO: 182731 - DNA, 15 bp, Homo sapiens
tagccacatttcaaa

SEQ ID NO: 182732 - DNA, 15 bp, Homo sapiens
ctagccacatttcaa

SEQ ID NO: 182733 - DNA, 15 bp, Homo sapiens
actagccacatttca

SEQ ID NO: 182734 - DNA, 15 bp, Homo sapiens
cactagccacatttc

SEQ ID NO: 182735 - DNA, 15 bp, Homo sapiens
acactagccacattt

SEQ ID NO: 182736 - DNA, 15 bp, Homo sapiens
cacactagccacatt

SEQ ID NO: 182737 - DNA, 15 bp, Homo sapiens
tcacactagccacat

SEQ ID NO: 182738 - DNA, 15 bp, Homo sapiens
gtcacactagccaca

SEQ ID NO: 182739 - DNA, 15 bp, Homo sapiens
agtcacactagccac

SEQ ID NO: 182740 - DNA, 15 bp, Homo sapiens
cagtcacactagcca

SEQ ID NO: 182741 - DNA, 15 bp, Homo sapiens
tcagtcacactagcc

SEQ ID NO: 182742 - DNA, 15 bp, Homo sapiens
ctcagtcacactagc

SEQ ID NO: 182743 - DNA, 15 bp, Homo sapiens
cctcagtcacactag

SEQ ID NO: 182744 - DNA, 15 bp, Homo sapiens
tcctcagtcacacta

SEQ ID NO: 182745 - DNA, 15 bp, Homo sapiens
ttcctcagtcacact

SEQ ID NO: 182746 - DNA, 15 bp, Homo sapiens
gttcctcagtcacac

SEQ ID NO: 182747 - DNA, 15 bp, Homo sapiens
agttcctcagtcaca

SEQ ID NO: 182748 - DNA, 15 bp, Homo sapiens
cagttcctcagtcac

SEQ ID NO: 182749 - DNA, 15 bp, Homo sapiens
ccagttcctcagtca

SEQ ID NO: 182750 - DNA, 15 bp, Homo sapiens
tccagttcctcagtc

SEQ ID NO: 182751 - DNA, 15 bp, Homo sapiens
atccagttcctcagt

SEQ ID NO: 182752 - DNA, 15 bp, Homo sapiens
aatccagttcctcag

SEQ ID NO: 182753 - DNA, 15 bp, Homo sapiens
aaatccagttcctca

SEQ ID NO: 182754 - DNA, 15 bp, Homo sapiens
aaaatccagttcctc

SEQ ID NO: 182755 - DNA, 15 bp, Homo sapiens
aaaaatccagttcct

SEQ ID NO: 182756 - DNA, 15 bp, Homo sapiens
taaaaatccagttcc

SEQ ID NO: 182757 - DNA, 15 bp, Homo sapiens
ttaaaaatccagttc

SEQ ID NO: 182758 - DNA, 15 bp, Homo sapiens
attaaaaatccagtt

SEQ ID NO: 182759 - DNA, 15 bp, Homo sapiens
aattaaaaatccagt

SEQ ID NO: 182760 - DNA, 15 bp, Homo sapiens
aaattaaaaatccag

SEQ ID NO: 182761 - DNA, 15 bp, Homo sapiens
aaaattaaaaatcca

SEQ ID NO: 182762 - DNA, 15 bp, Homo sapiens
aaaaattaaaaatcc

SEQ ID NO: 182763 - DNA, 15 bp, Homo sapiens
taaaaattaaaaatc

SEQ ID NO: 182764 - DNA, 15 bp, Homo sapiens
ttaaaaattaaaaat

SEQ ID NO: 182765 - DNA, 15 bp, Homo sapiens
tttaaaaattaaaaa

SEQ ID NO: 182766 - DNA, 15 bp, Homo sapiens
ttttaaaaattaaaa

SEQ ID NO: 182767 - DNA, 15 bp, Homo sapiens
tttttaaaaattaaa

SEQ ID NO: 182768 - DNA, 15 bp, Homo sapiens
atttttaaaaattaa

SEQ ID NO: 182769 - DNA, 15 bp, Homo sapiens
catttttaaaaatta

SEQ ID NO: 182770 - DNA, 15 bp, Homo sapiens
acatttttaaaaatt

SEQ ID NO: 182771 - DNA, 15 bp, Homo sapiens
tacatttttaaaaat

SEQ ID NO: 182772 - DNA, 15 bp, Homo sapiens
ttacatttttaaaaa

SEQ ID NO: 182773 - DNA, 15 bp, Homo sapiens
attacatttttaaaa

SEQ ID NO: 182774 - DNA, 15 bp, Homo sapiens
cattacatttttaaa

SEQ ID NO: 182775 - DNA, 15 bp, Homo sapiens
tcattacatttttaa

SEQ ID NO: 182776 - DNA, 15 bp, Homo sapiens
atcattacattttta

SEQ ID NO: 182777 - DNA, 15 bp, Homo sapiens
aatcattacattttt

SEQ ID NO: 182778 - DNA, 15 bp, Homo sapiens
aaatcattacatttt

SEQ ID NO: 182779 - DNA, 15 bp, Homo sapiens
aaaatcattacattt

SEQ ID NO: 182780 - DNA, 15 bp, Homo sapiens
aaaaatcattacatt

SEQ ID NO: 182781 - DNA, 15 bp, Homo sapiens
aaaaaatcattacat

SEQ ID NO: 182782 - DNA, 15 bp, Homo sapiens
aaaaaaatcattaca

SEQ ID NO: 182783 - DNA, 15 bp, Homo sapiens
gaaaaaaatcattac

SEQ ID NO: 182784 - DNA, 15 bp, Homo sapiens
agaaaaaaatcatta

SEQ ID NO: 182785 - DNA, 15 bp, Homo sapiens
tagaaaaaaatcatt

SEQ ID NO: 182786 - DNA, 15 bp, Homo sapiens
ctagaaaaaaatcat

SEQ ID NO: 182787 - DNA, 15 bp, Homo sapiens
cctagaaaaaaatca

SEQ ID NO: 182788 - DNA, 15 bp, Homo sapiens
acctagaaaaaaatc

SEQ ID NO: 182789 - DNA, 15 bp, Homo sapiens
cacctagaaaaaaat

SEQ ID NO: 182790 - DNA, 15 bp, Homo sapiens
ccacctagaaaaaaa

SEQ ID NO: 182791 - DNA, 15 bp, Homo sapiens
cccacctagaaaaaa

SEQ ID NO: 182792 - DNA, 15 bp, Homo sapiens
acccacctagaaaaa

SEQ ID NO: 182793 - DNA, 15 bp, Homo sapiens
cacccacctagaaaa

SEQ ID NO: 182794 - DNA, 15 bp, Homo sapiens
gcacccacctagaaa

SEQ ID NO: 182795 - DNA, 15 bp, Homo sapiens
tgcacccacctagaa

SEQ ID NO: 182796 - DNA, 15 bp, Homo sapiens
ctgcacccacctaga

SEQ ID NO: 182797 - DNA, 15 bp, Homo sapiens
actgcacccacctag

SEQ ID NO: 182798 - DNA, 15 bp, Homo sapiens
cactgcacccaccta

SEQ ID NO: 182799 - DNA, 15 bp, Homo sapiens
ccactgcacccacct

SEQ ID NO: 182800 - DNA, 15 bp, Homo sapiens
gccactgcacccacc

SEQ ID NO: 182801 - DNA, 15 bp, Homo sapiens
agccactgcacccac

SEQ ID NO: 182802 - DNA, 15 bp, Homo sapiens
gagccactgcaccca

SEQ ID NO: 182803 - DNA, 15 bp, Homo sapiens
tgagccactgcaccc

SEQ ID NO: 182804 - DNA, 15 bp, Homo sapiens
atgagccactgcacc

SEQ ID NO: 182805 - DNA, 15 bp, Homo sapiens
catgagccactgcac

SEQ ID NO: 182806 - DNA, 15 bp, Homo sapiens
gcatgagccactgca

SEQ ID NO: 182807 - DNA, 15 bp, Homo sapiens
ggcatgagccactgc

SEQ ID NO: 182808 - DNA, 15 bp, Homo sapiens
aggcatgagccactg

SEQ ID NO: 182809 - DNA, 15 bp, Homo sapiens
taggcatgagccact

SEQ ID NO: 182810 - DNA, 15 bp, Homo sapiens
ataggcatgagccac

SEQ ID NO: 182811 - DNA, 15 bp, Homo sapiens
tataggcatgagcca

SEQ ID NO: 182812 - DNA, 15 bp, Homo sapiens
ttataggcatgagcc

SEQ ID NO: 182813 - DNA, 15 bp, Homo sapiens
attataggcatgagc

SEQ ID NO: 182814 - DNA, 15 bp, Homo sapiens
gattataggcatgag

SEQ ID NO: 182815 - DNA, 15 bp, Homo sapiens
ggattataggcatga

SEQ ID NO: 182816 - DNA, 15 bp, Homo sapiens
gggattataggcatg

SEQ ID NO: 182817 - DNA, 15 bp, Homo sapiens
tgggattataggcat

SEQ ID NO: 182818 - DNA, 15 bp, Homo sapiens
ctgggattataggca

SEQ ID NO: 182819 - DNA, 15 bp, Homo sapiens
ttcccaaagtgctgg

SEQ ID NO: 182820 - DNA, 15 bp, Homo sapiens
cttcccaaagtgctg

SEQ ID NO: 182821 - DNA, 15 bp, Homo sapiens
gcttcccaaagtgct

SEQ ID NO: 182822 - DNA, 15 bp, Homo sapiens
ggcttcccaaagtgc

SEQ ID NO: 182823 - DNA, 15 bp, Homo sapiens
tggcttcccaaagtg

SEQ ID NO: 182824 - DNA, 15 bp, Homo sapiens
ttggcttcccaaagt

SEQ ID NO: 182825 - DNA, 15 bp, Homo sapiens
cttggcttcccaaag

SEQ ID NO: 182826 - DNA, 15 bp, Homo sapiens
ccttggcttcccaaa

SEQ ID NO: 182827 - DNA, 15 bp, Homo sapiens
accttggcttcccaa

SEQ ID NO: 182828 - DNA, 15 bp, Homo sapiens
caccttggcttccca

SEQ ID NO: 182829 - DNA, 15 bp, Homo sapiens
ccaccttggcttccc

SEQ ID NO: 182830 - DNA, 15 bp, Homo sapiens
cccaccttggcttcc

SEQ ID NO: 182831 - DNA, 15 bp, Homo sapiens
acccaccttggcttc

SEQ ID NO: 182832 - DNA, 15 bp, Homo sapiens
cacccaccttggctt

SEQ ID NO: 182833 - DNA, 15 bp, Homo sapiens
ccacccaccttggct

SEQ ID NO: 182834 - DNA, 15 bp, Homo sapiens
tccacccaccttggc

SEQ ID NO: 182835 - DNA, 15 bp, Homo sapiens
atccacccaccttgg

SEQ ID NO: 182836 - DNA, 15 bp, Homo sapiens
gatccacccaccttg

SEQ ID NO: 182837 - DNA, 15 bp, Homo sapiens
tgatccacccacctt

SEQ ID NO: 182838 - DNA, 15 bp, Homo sapiens
ggtgatccacccacc

SEQ ID NO: 182839 - DNA, 15 bp, Homo sapiens
aggtgatccacccac

SEQ ID NO: 182840 - DNA, 15 bp, Homo sapiens
caggtgatccaccca

SEQ ID NO: 182841 - DNA, 15 bp, Homo sapiens
tcaggtgatccaccc

SEQ ID NO: 182842 - DNA, 15 bp, Homo sapiens
tgacctcaggtgatc

SEQ ID NO: 182843 - DNA, 15 bp, Homo sapiens
ctgacctcaggtgat

SEQ ID NO: 182844 - DNA, 15 bp, Homo sapiens
cctgacctcaggtga

SEQ ID NO: 182845 - DNA, 15 bp, Homo sapiens
tcctgacctcaggtg

SEQ ID NO: 182846 - DNA, 15 bp, Homo sapiens
ctcctgacctcaggt

SEQ ID NO: 182847 - DNA, 15 bp, Homo sapiens
actcctgacctcagg

SEQ ID NO: 182848 - DNA, 15 bp, Homo sapiens
caactcctgacctca

SEQ ID NO: 182849 - DNA, 15 bp, Homo sapiens
ccaactcctgacctc

SEQ ID NO: 182850 - DNA, 15 bp, Homo sapiens
tccaactcctgacct

SEQ ID NO: 182851 - DNA, 15 bp, Homo sapiens
ctccaactcctgacc

SEQ ID NO: 182852 - DNA, 15 bp, Homo sapiens
tctccaactcctgac

SEQ ID NO: 182853 - DNA, 15 bp, Homo sapiens
gtctccaactcctga

SEQ ID NO: 182854 - DNA, 15 bp, Homo sapiens
ggtctccaactcctg

SEQ ID NO: 182855 - DNA, 15 bp, Homo sapiens
tggtctccaactcct

SEQ ID NO: 182856 - DNA, 15 bp, Homo sapiens
ctggtctccaactcc

SEQ ID NO: 182857 - DNA, 15 bp, Homo sapiens
gctggtctccaactc

SEQ ID NO: 182858 - DNA, 15 bp, Homo sapiens
ggctggtctccaact

SEQ ID NO: 182859 - DNA, 15 bp, Homo sapiens
aggctggtctccaac

SEQ ID NO: 182860 - DNA, 15 bp, Homo sapiens
caggctggtctccaa

SEQ ID NO: 182861 - DNA, 15 bp, Homo sapiens
tcaggctggtctcca

SEQ ID NO: 182862 - DNA, 15 bp, Homo sapiens
gtcaggctggtctcc

SEQ ID NO: 182863 - DNA, 15 bp, Homo sapiens
tccatgttggtcagg

SEQ ID NO: 182864 - DNA, 15 bp, Homo sapiens
ctccatgttggtcag

SEQ ID NO: 182865 - DNA, 15 bp, Homo sapiens
tctccatgttggtca

SEQ ID NO: 182866 - DNA, 15 bp, Homo sapiens
ttctccatgttggtc

SEQ ID NO: 182867 - DNA, 15 bp, Homo sapiens
tttctccatgttggt

SEQ ID NO: 182868 - DNA, 15 bp, Homo sapiens
gtttctccatgttgg

SEQ ID NO: 182869 - DNA, 15 bp, Homo sapiens
ggtttctccatgttg

SEQ ID NO: 182870 - DNA, 15 bp, Homo sapiens
gggtttctccatgtt

SEQ ID NO: 182871 - DNA, 15 bp, Homo sapiens
agggtttctccatgt

SEQ ID NO: 182872 - DNA, 15 bp, Homo sapiens
cagggtttctccatg

SEQ ID NO: 182873 - DNA, 15 bp, Homo sapiens
tcagggtttctccat

SEQ ID NO: 182874 - DNA, 15 bp, Homo sapiens
gtcagggtttctcca

SEQ ID NO: 182875 - DNA, 15 bp, Homo sapiens
agtcagggtttctcc

SEQ ID NO: 182876 - DNA, 15 bp, Homo sapiens
gagtcagggtttctc

SEQ ID NO: 182877 - DNA, 15 bp, Homo sapiens
agagtcagggtttct

SEQ ID NO: 182878 - DNA, 15 bp, Homo sapiens
gagagtcagggtttc

SEQ ID NO: 182879 - DNA, 15 bp, Homo sapiens
agagagtcagggttt

SEQ ID NO: 182880 - DNA, 15 bp, Homo sapiens
aagagagtcagggtt

SEQ ID NO: 182881 - DNA, 15 bp, Homo sapiens
taagagagtcagggt

SEQ ID NO: 182882 - DNA, 15 bp, Homo sapiens
ttaagagagtcaggg

SEQ ID NO: 182883 - DNA, 15 bp, Homo sapiens
tttaagagagtcagg

SEQ ID NO: 182884 - DNA, 15 bp, Homo sapiens
ttttaagagagtcag

SEQ ID NO: 182885 - DNA, 15 bp, Homo sapiens
tttttaagagagtca

SEQ ID NO: 182886 - DNA, 15 bp, Homo sapiens
atttttaagagagtc

SEQ ID NO: 182887 - DNA, 15 bp, Homo sapiens
tatttttaagagagt

SEQ ID NO: 182888 - DNA, 15 bp, Homo sapiens
gtatttttaagagag

SEQ ID NO: 182889 - DNA, 15 bp, Homo sapiens
tgtatttttaagaga

SEQ ID NO: 182890 - DNA, 15 bp, Homo sapiens
ttgtatttttaagag

SEQ ID NO: 182891 - DNA, 15 bp, Homo sapiens
tttgtatttttaaga

SEQ ID NO: 182892 - DNA, 15 bp, Homo sapiens
ttttgtatttttaag

SEQ ID NO: 182893 - DNA, 15 bp, Homo sapiens
attttgtatttttaa

SEQ ID NO: 182894 - DNA, 15 bp, Homo sapiens
aattttgtattttta

SEQ ID NO: 182895 - DNA, 15 bp, Homo sapiens
taattttgtattttt

SEQ ID NO: 182896 - DNA, 15 bp, Homo sapiens
ctaattttgtatttt

SEQ ID NO: 182897 - DNA, 15 bp, Homo sapiens
gctaattttgtattt

SEQ ID NO: 182898 - DNA, 15 bp, Homo sapiens
agctaattttgtatt

SEQ ID NO: 182899 - DNA, 15 bp, Homo sapiens
cagctaattttgtat

SEQ ID NO: 182900 - DNA, 15 bp, Homo sapiens
ccagctaattttgta

SEQ ID NO: 182901 - DNA, 15 bp, Homo sapiens
cccagctaattttgt

SEQ ID NO: 182902 - DNA, 15 bp, Homo sapiens
acccagctaattttg

SEQ ID NO: 182903 - DNA, 15 bp, Homo sapiens
cacccagctaatttt

SEQ ID NO: 182904 - DNA, 15 bp, Homo sapiens
acacccagctaattt

SEQ ID NO: 182905 - DNA, 15 bp, Homo sapiens
cacacccagctaatt

SEQ ID NO: 182906 - DNA, 15 bp, Homo sapiens
ccacacccagctaat

SEQ ID NO: 182907 - DNA, 15 bp, Homo sapiens
accacacccagctaa

SEQ ID NO: 182908 - DNA, 15 bp, Homo sapiens
caccacacccagcta

SEQ ID NO: 182909 - DNA, 15 bp, Homo sapiens
ccaccacacccagct

SEQ ID NO: 182910 - DNA, 15 bp, Homo sapiens
caccaccacacccag

SEQ ID NO: 182911 - DNA, 15 bp, Homo sapiens
gcaccaccacaccca

SEQ ID NO: 182912 - DNA, 15 bp, Homo sapiens
tgcaccaccacaccc

SEQ ID NO: 182913 - DNA, 15 bp, Homo sapiens
atgcaccaccacacc

SEQ ID NO: 182914 - DNA, 15 bp, Homo sapiens
aatgcaccaccacac

SEQ ID NO: 182915 - DNA, 15 bp, Homo sapiens
gaatgcaccaccaca

SEQ ID NO: 182916 - DNA, 15 bp, Homo sapiens
ggaatgcaccaccac

SEQ ID NO: 182917 - DNA, 15 bp, Homo sapiens
aggaatgcaccacca

SEQ ID NO: 182918 - DNA, 15 bp, Homo sapiens
caggaatgcaccacc

SEQ ID NO: 182919 - DNA, 15 bp, Homo sapiens
acaggaatgcaccac

SEQ ID NO: 182920 - DNA, 15 bp, Homo sapiens
tacaggaatgcacca

SEQ ID NO: 182921 - DNA, 15 bp, Homo sapiens
ttacaggaatgcacc

SEQ ID NO: 182922 - DNA, 15 bp, Homo sapiens
attacaggaatgcac

SEQ ID NO: 182923 - DNA, 15 bp, Homo sapiens
gattacaggaatgca

SEQ ID NO: 182924 - DNA, 15 bp, Homo sapiens
ggattacaggaatgc

SEQ ID NO: 182925 - DNA, 15 bp, Homo sapiens
gggattacaggaatg

SEQ ID NO: 182926 - DNA, 15 bp, Homo sapiens
tgggattacaggaat

SEQ ID NO: 182927 - DNA, 15 bp, Homo sapiens
ctgggattacaggaa

SEQ ID NO: 182928 - DNA, 15 bp, Homo sapiens
cagctgggattacag

SEQ ID NO: 182929 - DNA, 15 bp, Homo sapiens
gcagctgggattaca

SEQ ID NO: 182930 - DNA, 15 bp, Homo sapiens
agcagctgggattac

SEQ ID NO: 182931 - DNA, 15 bp, Homo sapiens
gagcagctgggatta

SEQ ID NO: 182932 - DNA, 15 bp, Homo sapiens
cgagcagctgggatt

SEQ ID NO: 182933 - DNA, 15 bp, Homo sapiens
acgagcagctgggat

SEQ ID NO: 182934 - DNA, 15 bp, Homo sapiens
cacgagcagctggga

SEQ ID NO: 182935 - DNA, 15 bp, Homo sapiens
tcacgagcagctggg

SEQ ID NO: 182936 - DNA, 15 bp, Homo sapiens
ctcacgagcagctgg

SEQ ID NO: 182937 - DNA, 15 bp, Homo sapiens
cctcacgagcagctg

SEQ ID NO: 182938 - DNA, 15 bp, Homo sapiens
gcctcacgagcagct

SEQ ID NO: 182939 - DNA, 15 bp, Homo sapiens
agcctcacgagcagc

SEQ ID NO: 182940 - DNA, 15 bp, Homo sapiens
cagcctcacgagcag

SEQ ID NO: 182941 - DNA, 15 bp, Homo sapiens
tcagcctcacgagca

SEQ ID NO: 182942 - DNA, 15 bp, Homo sapiens
ctcagcctcacgagc

SEQ ID NO: 182943 - DNA, 15 bp, Homo sapiens
cctcagcctcacgag

SEQ ID NO: 182944 - DNA, 15 bp, Homo sapiens
gcctcagcctcacga

SEQ ID NO: 182945 - DNA, 15 bp, Homo sapiens
tgcctcagcctcacg

SEQ ID NO: 182946 - DNA, 15 bp, Homo sapiens
ctgcctcagcctcac

SEQ ID NO: 182947 - DNA, 15 bp, Homo sapiens
cctgcctcagcctca

SEQ ID NO: 182948 - DNA, 15 bp, Homo sapiens
tgattctcctgcctc

SEQ ID NO: 182949 - DNA, 15 bp, Homo sapiens
gtgattctcctgcct

SEQ ID NO: 182950 - DNA, 15 bp, Homo sapiens
agtgattctcctgcc

SEQ ID NO: 182951 - DNA, 15 bp, Homo sapiens
aagtgattctcctgc

SEQ ID NO: 182952 - DNA, 15 bp, Homo sapiens
caagtgattctcctg

SEQ ID NO: 182953 - DNA, 15 bp, Homo sapiens
tcaagtgattctcct

SEQ ID NO: 182954 - DNA, 15 bp, Homo sapiens
ttcaagtgattctcc

SEQ ID NO: 182955 - DNA, 15 bp, Homo sapiens
tttcaagtgattctc

SEQ ID NO: 182956 - DNA, 15 bp, Homo sapiens
gtttcaagtgattct

SEQ ID NO: 182957 - DNA, 15 bp, Homo sapiens
agtttcaagtgattc

SEQ ID NO: 182958 - DNA, 15 bp, Homo sapiens
cagtttcaagtgatt

SEQ ID NO: 182959 - DNA, 15 bp, Homo sapiens
ccagtttcaagtgat

SEQ ID NO: 182960 - DNA, 15 bp, Homo sapiens
cccagtttcaagtga

SEQ ID NO: 182961 - DNA, 15 bp, Homo sapiens
tcccagtttcaagtg

SEQ ID NO: 182962 - DNA, 15 bp, Homo sapiens
ctcccagtttcaagt

SEQ ID NO: 182963 - DNA, 15 bp, Homo sapiens
cctcccagtttcaag

SEQ ID NO: 182964 - DNA, 15 bp, Homo sapiens
ccctcccagtttcaa

SEQ ID NO: 182965 - DNA, 15 bp, Homo sapiens
cccctcccagtttca

SEQ ID NO: 182966 - DNA, 15 bp, Homo sapiens
ccccctcccagtttc

SEQ ID NO: 182967 - DNA, 15 bp, Homo sapiens
tccccctcccagttt

SEQ ID NO: 182968 - DNA, 15 bp, Homo sapiens
ctccccctcccagtt

SEQ ID NO: 182969 - DNA, 15 bp, Homo sapiens
cctccccctcccagt

SEQ ID NO: 182970 - DNA, 15 bp, Homo sapiens
acctccccctcccag

SEQ ID NO: 182971 - DNA, 15 bp, Homo sapiens
aacctccccctccca

SEQ ID NO: 182972 - DNA, 15 bp, Homo sapiens
caacctccccctccc

SEQ ID NO: 182973 - DNA, 15 bp, Homo sapiens
gcaacctccccctcc

SEQ ID NO: 182974 - DNA, 15 bp, Homo sapiens
cgcaacctccccctc

SEQ ID NO: 182975 - DNA, 15 bp, Homo sapiens
ccgcaacctccccct

SEQ ID NO: 182976 - DNA, 15 bp, Homo sapiens
accgcaacctccccc

SEQ ID NO: 182977 - DNA, 15 bp, Homo sapiens
caccgcaacctcccc

SEQ ID NO: 182978 - DNA, 15 bp, Homo sapiens
tcaccgcaacctccc

SEQ ID NO: 182979 - DNA, 15 bp, Homo sapiens
ctcaccgcaacctcc

SEQ ID NO: 182980 - DNA, 15 bp, Homo sapiens
gctcaccgcaacctc

SEQ ID NO: 182981 - DNA, 15 bp, Homo sapiens
agctcaccgcaacct

SEQ ID NO: 182982 - DNA, 15 bp, Homo sapiens
cagctcaccgcaacc

SEQ ID NO: 182983 - DNA, 15 bp, Homo sapiens
tcagctcaccgcaac

SEQ ID NO: 182984 - DNA, 15 bp, Homo sapiens
ctcagctcaccgcaa

SEQ ID NO: 182985 - DNA, 15 bp, Homo sapiens
tctcagctcaccgca

SEQ ID NO: 182986 - DNA, 15 bp, Homo sapiens
atctcagctcaccgc

SEQ ID NO: 182987 - DNA, 15 bp, Homo sapiens
aatctcagctcaccg

SEQ ID NO: 182988 - DNA, 15 bp, Homo sapiens
caatctcagctcacc

SEQ ID NO: 182989 - DNA, 15 bp, Homo sapiens
acaatctcagctcac

SEQ ID NO: 182990 - DNA, 15 bp, Homo sapiens
cacaatctcagctca

SEQ ID NO: 182991 - DNA, 15 bp, Homo sapiens
gcacaatctcagctc

SEQ ID NO: 182992 - DNA, 15 bp, Homo sapiens
ggcacaatctcagct

SEQ ID NO: 182993 - DNA, 15 bp, Homo sapiens
tggcacaatctcagc

SEQ ID NO: 182994 - DNA, 15 bp, Homo sapiens
atggcacaatctcag

SEQ ID NO: 182995 - DNA, 15 bp, Homo sapiens
aatggcacaatctca

SEQ ID NO: 182996 - DNA, 15 bp, Homo sapiens
caatggcacaatctc

SEQ ID NO: 182997 - DNA, 15 bp, Homo sapiens
gcaatggcacaatct

SEQ ID NO: 182998 - DNA, 15 bp, Homo sapiens
tgcaatggcacaatc

SEQ ID NO: 182999 - DNA, 15 bp, Homo sapiens
gtgcaatggcacaat

SEQ ID NO: 183000 - DNA, 15 bp, Homo sapiens
agtgcaatggcacaa

SEQ ID NO: 183001 - DNA, 15 bp, Homo sapiens
gagtgcaatggcaca

SEQ ID NO: 183002 - DNA, 15 bp, Homo sapiens
ggagtgcaatggcac

SEQ ID NO: 183003 - DNA, 15 bp, Homo sapiens
aggagtgcaatggca

SEQ ID NO: 183004 - DNA, 15 bp, Homo sapiens
caggagtgcaatggc

SEQ ID NO: 183005 - DNA, 15 bp, Homo sapiens
acaggagtgcaatgg

SEQ ID NO: 183006 - DNA, 15 bp, Homo sapiens
gacaggagtgcaatg

SEQ ID NO: 183007 - DNA, 15 bp, Homo sapiens
agacaggagtgcaat

SEQ ID NO: 183008 - DNA, 15 bp, Homo sapiens
cagacaggagtgcaa

SEQ ID NO: 183009 - DNA, 15 bp, Homo sapiens
ccagacaggagtgca

SEQ ID NO: 183010 - DNA, 15 bp, Homo sapiens
cccagacaggagtgc

SEQ ID NO: 183011 - DNA, 15 bp, Homo sapiens
gcccagacaggagtg

SEQ ID NO: 183012 - DNA, 15 bp, Homo sapiens
tgcccagacaggagt

SEQ ID NO: 183013 - DNA, 15 bp, Homo sapiens
atgcccagacaggag

SEQ ID NO: 183014 - DNA, 15 bp, Homo sapiens
gatgcccagacagga

SEQ ID NO: 183015 - DNA, 15 bp, Homo sapiens
tgatgcccagacagg

SEQ ID NO: 183016 - DNA, 15 bp, Homo sapiens
ttgatgcccagacag

SEQ ID NO: 183017 - DNA, 15 bp, Homo sapiens
cttgatgcccagaca

SEQ ID NO: 183018 - DNA, 15 bp, Homo sapiens
tcttgatgcccagac

SEQ ID NO: 183019 - DNA, 15 bp, Homo sapiens
ctcttgatgcccaga

SEQ ID NO: 183020 - DNA, 15 bp, Homo sapiens
gctcttgatgcccag

SEQ ID NO: 183021 - DNA, 15 bp, Homo sapiens
cgctcttgatgccca

SEQ ID NO: 183022 - DNA, 15 bp, Homo sapiens
tcgctcttgatgccc

SEQ ID NO: 183023 - DNA, 15 bp, Homo sapiens
ttcgctcttgatgcc

SEQ ID NO: 183024 - DNA, 15 bp, Homo sapiens
tttcgctcttgatgc

SEQ ID NO: 183025 - DNA, 15 bp, Homo sapiens
gtttcgctcttgatg

SEQ ID NO: 183026 - DNA, 15 bp, Homo sapiens
agtttcgctcttgat

SEQ ID NO: 183027 - DNA, 15 bp, Homo sapiens
gagtttcgctcttga

SEQ ID NO: 183028 - DNA, 15 bp, Homo sapiens
ggagtttcgctcttg

SEQ ID NO: 183029 - DNA, 15 bp, Homo sapiens
tggagtttcgctctt

SEQ ID NO: 183030 - DNA, 15 bp, Homo sapiens
atggagtttcgctct

SEQ ID NO: 183031 - DNA, 15 bp, Homo sapiens
gatggagtttcgctc

SEQ ID NO: 183032 - DNA, 15 bp, Homo sapiens
agatggagtttcgct

SEQ ID NO: 183033 - DNA, 15 bp, Homo sapiens
gagatggagtttcgc

SEQ ID NO: 183034 - DNA, 15 bp, Homo sapiens
tgagatggagtttcg

SEQ ID NO: 183035 - DNA, 15 bp, Homo sapiens
ttgagatggagtttc

SEQ ID NO: 183036 - DNA, 15 bp, Homo sapiens
tttgagatggagttt

SEQ ID NO: 183037 - DNA, 15 bp, Homo sapiens
ttttgagatggagtt

SEQ ID NO: 183038 - DNA, 15 bp, Homo sapiens
cttttgagatggagt

SEQ ID NO: 183039 - DNA, 15 bp, Homo sapiens
tcttttgagatggag

SEQ ID NO: 183040 - DNA, 15 bp, Homo sapiens
ttcttttgagatgga

SEQ ID NO: 183041 - DNA, 15 bp, Homo sapiens
tttcttttgagatgg

SEQ ID NO: 183042 - DNA, 15 bp, Homo sapiens
ttttcttttgagatg

SEQ ID NO: 183043 - DNA, 15 bp, Homo sapiens
tttttcttttgagat

SEQ ID NO: 183044 - DNA, 15 bp, Homo sapiens
ttttttcttttgaga

SEQ ID NO: 183045 - DNA, 15 bp, Homo sapiens
tttttttcttttgag

SEQ ID NO: 183046 - DNA, 15 bp, Homo sapiens
ttttttttcttttga

SEQ ID NO: 183047 - DNA, 15 bp, Homo sapiens
tttttttttcttttg

SEQ ID NO: 183048 - DNA, 15 bp, Homo sapiens
ttttttttttctttt

SEQ ID NO: 183049 - DNA, 15 bp, Homo sapiens
tttttttttttcttt

SEQ ID NO: 183050 - DNA, 15 bp, Homo sapiens
ttttttttttttctt

SEQ ID NO: 183051 - DNA, 15 bp, Homo sapiens
tttttttttttttct

SEQ ID NO: 183052 - DNA, 15 bp, Homo sapiens
ttttttttttttttc

SEQ ID NO: 183053 - DNA, 15 bp, Homo sapiens
gcctttttttttttt

SEQ ID NO: 183054 - DNA, 15 bp, Homo sapiens
ggccttttttttttt

SEQ ID NO: 183055 - DNA, 15 bp, Homo sapiens
cggcctttttttttt

SEQ ID NO: 183056 - DNA, 15 bp, Homo sapiens
tcggccttttttttt

SEQ ID NO: 183057 - DNA, 15 bp, Homo sapiens
ctcggcctttttttt

SEQ ID NO: 183058 - DNA, 15 bp, Homo sapiens
gctcggccttttttt

SEQ ID NO: 183059 - DNA, 15 bp, Homo sapiens
cgctcggcctttttt

SEQ ID NO: 183060 - DNA, 15 bp, Homo sapiens
gcgctcggccttttt

SEQ ID NO: 183061 - DNA, 15 bp, Homo sapiens
cgcgctcggcctttt

SEQ ID NO: 183062 - DNA, 15 bp, Homo sapiens
ccgcgctcggccttt

SEQ ID NO: 183063 - DNA, 15 bp, Homo sapiens
accgcgctcggcctt

SEQ ID NO: 183064 - DNA, 15 bp, Homo sapiens
caccgcgctcggcct

SEQ ID NO: 183065 - DNA, 15 bp, Homo sapiens
ccaccgcgctcggcc

SEQ ID NO: 183066 - DNA, 15 bp, Homo sapiens
gccaccgcgctcggc

SEQ ID NO: 183067 - DNA, 15 bp, Homo sapiens
agccaccgcgctcgg

SEQ ID NO: 183068 - DNA, 15 bp, Homo sapiens
gagccaccgcgctcg

SEQ ID NO: 183069 - DNA, 15 bp, Homo sapiens
tgagccaccgcgctc

SEQ ID NO: 183070 - DNA, 15 bp, Homo sapiens
gtgagccaccgcgct

SEQ ID NO: 183071 - DNA, 15 bp, Homo sapiens
cgtgagccaccgcgc

SEQ ID NO: 183072 - DNA, 15 bp, Homo sapiens
gcgtgagccaccgcg

SEQ ID NO: 183073 - DNA, 15 bp, Homo sapiens
ggcgtgagccaccgc

SEQ ID NO: 183074 - DNA, 15 bp, Homo sapiens
aggcgtgagccaccg

SEQ ID NO: 183075 - DNA, 15 bp, Homo sapiens
atcccaaagtgctgg

SEQ ID NO: 183076 - DNA, 15 bp, Homo sapiens
aatcccaaagtgctg

SEQ ID NO: 183077 - DNA, 15 bp, Homo sapiens
gaatcccaaagtgct

SEQ ID NO: 183078 - DNA, 15 bp, Homo sapiens
ggaatcccaaagtgc

SEQ ID NO: 183079 - DNA, 15 bp, Homo sapiens
tggaatcccaaagtg

SEQ ID NO: 183080 - DNA, 15 bp, Homo sapiens
ttggaatcccaaagt

SEQ ID NO: 183081 - DNA, 15 bp, Homo sapiens
cttggaatcccaaag

SEQ ID NO: 183082 - DNA, 15 bp, Homo sapiens
ccttggaatcccaaa

SEQ ID NO: 183083 - DNA, 15 bp, Homo sapiens
gccttggaatcccaa

SEQ ID NO: 183084 - DNA, 15 bp, Homo sapiens
tgccttggaatccca

SEQ ID NO: 183085 - DNA, 15 bp, Homo sapiens
ctgccttggaatccc

SEQ ID NO: 183086 - DNA, 15 bp, Homo sapiens
cctgccttggaatcc

SEQ ID NO: 183087 - DNA, 15 bp, Homo sapiens
acctgccttggaatc

SEQ ID NO: 183088 - DNA, 15 bp, Homo sapiens
cacctgccttggaat

SEQ ID NO: 183089 - DNA, 15 bp, Homo sapiens
ccacctgccttggaa

SEQ ID NO: 183090 - DNA, 15 bp, Homo sapiens
tccacctgccttgga

SEQ ID NO: 183091 - DNA, 15 bp, Homo sapiens
atccacctgccttgg

SEQ ID NO: 183092 - DNA, 15 bp, Homo sapiens
gatccacctgccttg

SEQ ID NO: 183093 - DNA, 15 bp, Homo sapiens
tgatccacctgcctt

SEQ ID NO: 183094 - DNA, 15 bp, Homo sapiens
gtgatccacctgcct

SEQ ID NO: 183095 - DNA, 15 bp, Homo sapiens
cgtgatccacctgcc

SEQ ID NO: 183096 - DNA, 15 bp, Homo sapiens
tcgtgatccacctgc

SEQ ID NO: 183097 - DNA, 15 bp, Homo sapiens
ctcgtgatccacctg

SEQ ID NO: 183098 - DNA, 15 bp, Homo sapiens
cctcgtgatccacct

SEQ ID NO: 183099 - DNA, 15 bp, Homo sapiens
acctcgtgatccacc

SEQ ID NO: 183100 - DNA, 15 bp, Homo sapiens
gacctcgtgatccac

SEQ ID NO: 183101 - DNA, 15 bp, Homo sapiens
tgacctcgtgatcca

SEQ ID NO: 183102 - DNA, 15 bp, Homo sapiens
ctgacctcgtgatcc

SEQ ID NO: 183103 - DNA, 15 bp, Homo sapiens
cctgacctcgtgatc

SEQ ID NO: 183104 - DNA, 15 bp, Homo sapiens
tcctgacctcgtgat

SEQ ID NO: 183105 - DNA, 15 bp, Homo sapiens
ctcctgacctcgtga

SEQ ID NO: 183106 - DNA, 15 bp, Homo sapiens
actcctgacctcgtg

SEQ ID NO: 183107 - DNA, 15 bp, Homo sapiens
aactcctgacctcgt

SEQ ID NO: 183108 - DNA, 15 bp, Homo sapiens
gaactcctgacctcg

SEQ ID NO: 183109 - DNA, 15 bp, Homo sapiens
ccaggctggtcttga

SEQ ID NO: 183110 - DNA, 15 bp, Homo sapiens
gccaggctggtcttg

SEQ ID NO: 183111 - DNA, 15 bp, Homo sapiens
ggccaggctggtctt

SEQ ID NO: 183112 - DNA, 15 bp, Homo sapiens
cttggccaggctggt

SEQ ID NO: 183113 - DNA, 15 bp, Homo sapiens
tcttggccaggctgg

SEQ ID NO: 183114 - DNA, 15 bp, Homo sapiens
atcttggccaggctg

SEQ ID NO: 183115 - DNA, 15 bp, Homo sapiens
catcttggccaggct

SEQ ID NO: 183116 - DNA, 15 bp, Homo sapiens
ccatcttggccaggc

SEQ ID NO: 183117 - DNA, 15 bp, Homo sapiens
accatcttggccagg

SEQ ID NO: 183118 - DNA, 15 bp, Homo sapiens
caccatcttggccag

SEQ ID NO: 183119 - DNA, 15 bp, Homo sapiens
tcaccatcttggcca

SEQ ID NO: 183120 - DNA, 15 bp, Homo sapiens
ttcaccatcttggcc

SEQ ID NO: 183121 - DNA, 15 bp, Homo sapiens
tttcaccatcttggc

SEQ ID NO: 183122 - DNA, 15 bp, Homo sapiens
gtttcaccatcttgg

SEQ ID NO: 183123 - DNA, 15 bp, Homo sapiens
ggtttcaccatcttg

SEQ ID NO: 183124 - DNA, 15 bp, Homo sapiens
gggtttcaccatctt

SEQ ID NO: 183125 - DNA, 15 bp, Homo sapiens
ggggtttcaccatct

SEQ ID NO: 183126 - DNA, 15 bp, Homo sapiens
tggggtttcaccatc

SEQ ID NO: 183127 - DNA, 15 bp, Homo sapiens
gttttagtagagatg

SEQ ID NO: 183128 - DNA, 15 bp, Homo sapiens
agttttagtagagat

SEQ ID NO: 183129 - DNA, 15 bp, Homo sapiens
tagttttagtagaga

SEQ ID NO: 183130 - DNA, 15 bp, Homo sapiens
gtagttttagtagag

SEQ ID NO: 183131 - DNA, 15 bp, Homo sapiens
tgtagttttagtaga

SEQ ID NO: 183132 - DNA, 15 bp, Homo sapiens
ttgtagttttagtag

SEQ ID NO: 183133 - DNA, 15 bp, Homo sapiens
tttgtagttttagta

SEQ ID NO: 183134 - DNA, 15 bp, Homo sapiens
ttttgtagttttagt

SEQ ID NO: 183135 - DNA, 15 bp, Homo sapiens
tttttgtagttttag

SEQ ID NO: 183136 - DNA, 15 bp, Homo sapiens
atttttgtagtttta

SEQ ID NO: 183137 - DNA, 15 bp, Homo sapiens
aatttttgtagtttt

SEQ ID NO: 183138 - DNA, 15 bp, Homo sapiens
taatttttgtagttt

SEQ ID NO: 183139 - DNA, 15 bp, Homo sapiens
ctaatttttgtagtt

SEQ ID NO: 183140 - DNA, 15 bp, Homo sapiens
gctaatttttgtagt

SEQ ID NO: 183141 - DNA, 15 bp, Homo sapiens
ggctaatttttgtag

SEQ ID NO: 183142 - DNA, 15 bp, Homo sapiens
gcacctggctaattt

SEQ ID NO: 183143 - DNA, 15 bp, Homo sapiens
cgcacctggctaatt

SEQ ID NO: 183144 - DNA, 15 bp, Homo sapiens
ccgcacctggctaat

SEQ ID NO: 183145 - DNA, 15 bp, Homo sapiens
accgcacctggctaa

SEQ ID NO: 183146 - DNA, 15 bp, Homo sapiens
caccgcacctggcta

SEQ ID NO: 183147 - DNA, 15 bp, Homo sapiens
ccaccgcacctggct

SEQ ID NO: 183148 - DNA, 15 bp, Homo sapiens
gccaccgcacctggc

SEQ ID NO: 183149 - DNA, 15 bp, Homo sapiens
tgccaccgcacctgg

SEQ ID NO: 183150 - DNA, 15 bp, Homo sapiens
ctgccaccgcacctg

SEQ ID NO: 183151 - DNA, 15 bp, Homo sapiens
cctgccaccgcacct

SEQ ID NO: 183152 - DNA, 15 bp, Homo sapiens
gcctgccaccgcacc

SEQ ID NO: 183153 - DNA, 15 bp, Homo sapiens
cgcctgccaccgcac

SEQ ID NO: 183154 - DNA, 15 bp, Homo sapiens
gcgcctgccaccgca

SEQ ID NO: 183155 - DNA, 15 bp, Homo sapiens
ggcgcctgccaccgc

SEQ ID NO: 183156 - DNA, 15 bp, Homo sapiens
aggcgcctgccaccg

SEQ ID NO: 183157 - DNA, 15 bp, Homo sapiens
caggcgcctgccacc

SEQ ID NO: 183158 - DNA, 15 bp, Homo sapiens
acaggcgcctgccac

SEQ ID NO: 183159 - DNA, 15 bp, Homo sapiens
tacaggcgcctgcca

SEQ ID NO: 183160 - DNA, 15 bp, Homo sapiens
ttacaggcgcctgcc

SEQ ID NO: 183161 - DNA, 15 bp, Homo sapiens
attacaggcgcctgc

SEQ ID NO: 183162 - DNA, 15 bp, Homo sapiens
gattacaggcgcctg

SEQ ID NO: 183163 - DNA, 15 bp, Homo sapiens
ggattacaggcgcct

SEQ ID NO: 183164 - DNA, 15 bp, Homo sapiens
gggattacaggcgcc

SEQ ID NO: 183165 - DNA, 15 bp, Homo sapiens
tgggattacaggcgc

SEQ ID NO: 183166 - DNA, 15 bp, Homo sapiens
gagtagctgggatta

SEQ ID NO: 183167 - DNA, 15 bp, Homo sapiens
cgagtagctgggatt

SEQ ID NO: 183168 - DNA, 15 bp, Homo sapiens
ccgagtagctgggat

SEQ ID NO: 183169 - DNA, 15 bp, Homo sapiens
tgggttcaagcgatt

SEQ ID NO: 183170 - DNA, 15 bp, Homo sapiens
ctgggttcaagcgat

SEQ ID NO: 183171 - DNA, 15 bp, Homo sapiens
cctgggttcaagcga

SEQ ID NO: 183172 - DNA, 15 bp, Homo sapiens
gcctgggttcaagcg

SEQ ID NO: 183173 - DNA, 15 bp, Homo sapiens
tgcctgggttcaagc

SEQ ID NO: 183174 - DNA, 15 bp, Homo sapiens
ctgcctgggttcaag

SEQ ID NO: 183175 - DNA, 15 bp, Homo sapiens
gctgcctgggttcaa

SEQ ID NO: 183176 - DNA, 15 bp, Homo sapiens
tgctgcctgggttca

SEQ ID NO: 183177 - DNA, 15 bp, Homo sapiens
ctgctgcctgggttc

SEQ ID NO: 183178 - DNA, 15 bp, Homo sapiens
tctgctgcctgggtt

SEQ ID NO: 183179 - DNA, 15 bp, Homo sapiens
ctctgctgcctgggt

SEQ ID NO: 183180 - DNA, 15 bp, Homo sapiens
cctctgctgcctggg

SEQ ID NO: 183181 - DNA, 15 bp, Homo sapiens
acctctgctgcctgg

SEQ ID NO: 183182 - DNA, 15 bp, Homo sapiens
aacctctgctgcctg

SEQ ID NO: 183183 - DNA, 15 bp, Homo sapiens
caacctctgctgcct

SEQ ID NO: 183184 - DNA, 15 bp, Homo sapiens
gcaacctctgctgcc

SEQ ID NO: 183185 - DNA, 15 bp, Homo sapiens
tgcaacctctgctgc

SEQ ID NO: 183186 - DNA, 15 bp, Homo sapiens
ctgcaacctctgctg

SEQ ID NO: 183187 - DNA, 15 bp, Homo sapiens
actgcaacctctgct

SEQ ID NO: 183188 - DNA, 15 bp, Homo sapiens
tgatcttggctcact

SEQ ID NO: 183189 - DNA, 15 bp, Homo sapiens
atgatcttggctcac

SEQ ID NO: 183190 - DNA, 15 bp, Homo sapiens
catgatcttggctca

SEQ ID NO: 183191 - DNA, 15 bp, Homo sapiens
gcatgatcttggctc

SEQ ID NO: 183192 - DNA, 15 bp, Homo sapiens
ggcatgatcttggct

SEQ ID NO: 183193 - DNA, 15 bp, Homo sapiens
tggcatgatcttggc

SEQ ID NO: 183194 - DNA, 15 bp, Homo sapiens
atggcatgatcttgg

SEQ ID NO: 183195 - DNA, 15 bp, Homo sapiens
aatggcatgatcttg

SEQ ID NO: 183196 - DNA, 15 bp, Homo sapiens
caatggcatgatctt

SEQ ID NO: 183197 - DNA, 15 bp, Homo sapiens
acaatggcatgatct

SEQ ID NO: 183198 - DNA, 15 bp, Homo sapiens
tacaatggcatgatc

SEQ ID NO: 183199 - DNA, 15 bp, Homo sapiens
gtacaatggcatgat

SEQ ID NO: 183200 - DNA, 15 bp, Homo sapiens
agtacaatggcatga

SEQ ID NO: 183201 - DNA, 15 bp, Homo sapiens
gagtacaatggcatg

SEQ ID NO: 183202 - DNA, 15 bp, Homo sapiens
ggagtacaatggcat

SEQ ID NO: 183203 - DNA, 15 bp, Homo sapiens
tggagtacaatggca

SEQ ID NO: 183204 - DNA, 15 bp, Homo sapiens
ctggagtacaatggc

SEQ ID NO: 183205 - DNA, 15 bp, Homo sapiens
gctggagtacaatgg

SEQ ID NO: 183206 - DNA, 15 bp, Homo sapiens
ggctggagtacaatg

SEQ ID NO: 183207 - DNA, 15 bp, Homo sapiens
aggctggagtacaat

SEQ ID NO: 183208 - DNA, 15 bp, Homo sapiens
caggctggagtacaa

SEQ ID NO: 183209 - DNA, 15 bp, Homo sapiens
ccaggctggagtaca

SEQ ID NO: 183210 - DNA, 15 bp, Homo sapiens
cccaggctggagtac

SEQ ID NO: 183211 - DNA, 15 bp, Homo sapiens
gcccaggctggagta

SEQ ID NO: 183212 - DNA, 15 bp, Homo sapiens
tgcccaggctggagt

SEQ ID NO: 183213 - DNA, 15 bp, Homo sapiens
ttgcccaggctggag

SEQ ID NO: 183214 - DNA, 15 bp, Homo sapiens
ctgttgcccaggctg

SEQ ID NO: 183215 - DNA, 15 bp, Homo sapiens
tctgttgcccaggct

SEQ ID NO: 183216 - DNA, 15 bp, Homo sapiens
ctctgttgcccaggc

SEQ ID NO: 183217 - DNA, 15 bp, Homo sapiens
actctgttgcccagg

SEQ ID NO: 183218 - DNA, 15 bp, Homo sapiens
cactctgttgcccag

SEQ ID NO: 183219 - DNA, 15 bp, Homo sapiens
tcactctgttgccca

SEQ ID NO: 183220 - DNA, 15 bp, Homo sapiens
ctcactctgttgccc

SEQ ID NO: 183221 - DNA, 15 bp, Homo sapiens
tctcactctgttgcc

SEQ ID NO: 183222 - DNA, 15 bp, Homo sapiens
ttctcactctgttgc

SEQ ID NO: 183223 - DNA, 15 bp, Homo sapiens
attctcactctgttg

SEQ ID NO: 183224 - DNA, 15 bp, Homo sapiens
gattctcactctgtt

SEQ ID NO: 183225 - DNA, 15 bp, Homo sapiens
ggattctcactctgt

SEQ ID NO: 183226 - DNA, 15 bp, Homo sapiens
tggattctcactctg

SEQ ID NO: 183227 - DNA, 15 bp, Homo sapiens
atggattctcactct

SEQ ID NO: 183228 - DNA, 15 bp, Homo sapiens
gatggattctcactc

SEQ ID NO: 183229 - DNA, 15 bp, Homo sapiens
agatggattctcact

SEQ ID NO: 183230 - DNA, 15 bp, Homo sapiens
gagatggattctcac

SEQ ID NO: 183231 - DNA, 15 bp, Homo sapiens
tgagatggattctca

SEQ ID NO: 183232 - DNA, 15 bp, Homo sapiens
ttgagatggattctc

SEQ ID NO: 183233 - DNA, 15 bp, Homo sapiens
tttgagatggattct

SEQ ID NO: 183234 - DNA, 15 bp, Homo sapiens
ttttgagatggattc

SEQ ID NO: 183235 - DNA, 15 bp, Homo sapiens
tttttgagatggatt

SEQ ID NO: 183236 - DNA, 15 bp, Homo sapiens
ttttttgagatggat

SEQ ID NO: 183237 - DNA, 15 bp, Homo sapiens
atttttttttttgag

SEQ ID NO: 183238 - DNA, 15 bp, Homo sapiens
aatttttttttttga

SEQ ID NO: 183239 - DNA, 15 bp, Homo sapiens
taatttttttttttg

SEQ ID NO: 183240 - DNA, 15 bp, Homo sapiens
attaatttttttttt

SEQ ID NO: 183241 - DNA, 15 bp, Homo sapiens
cattaattttttttt

SEQ ID NO: 183242 - DNA, 15 bp, Homo sapiens
tcattaatttttttt

SEQ ID NO: 183243 - DNA, 15 bp, Homo sapiens
ttcattaattttttt

SEQ ID NO: 183244 - DNA, 15 bp, Homo sapiens
attcattaatttttt

SEQ ID NO: 183245 - DNA, 15 bp, Homo sapiens
aattcattaattttt

SEQ ID NO: 183246 - DNA, 15 bp, Homo sapiens
aaattcattaatttt

SEQ ID NO: 183247 - DNA, 15 bp, Homo sapiens
aaaattcattaattt

SEQ ID NO: 183248 - DNA, 15 bp, Homo sapiens
aaaaattcattaatt

SEQ ID NO: 183249 - DNA, 15 bp, Homo sapiens
taaaaattcattaat

SEQ ID NO: 183250 - DNA, 15 bp, Homo sapiens
ttaaaaattcattaa

SEQ ID NO: 183251 - DNA, 15 bp, Homo sapiens
attaaaaattcatta

SEQ ID NO: 183252 - DNA, 15 bp, Homo sapiens
aattaaaaattcatt

SEQ ID NO: 183253 - DNA, 15 bp, Homo sapiens
aaattaaaaattcat

SEQ ID NO: 183254 - DNA, 15 bp, Homo sapiens
taaattaaaaattca

SEQ ID NO: 183255 - DNA, 15 bp, Homo sapiens
ttaaattaaaaattc

SEQ ID NO: 183256 - DNA, 15 bp, Homo sapiens
attaaattaaaaatt

SEQ ID NO: 183257 - DNA, 15 bp, Homo sapiens
aattaaattaaaaat

SEQ ID NO: 183258 - DNA, 15 bp, Homo sapiens
aaattaaattaaaaa

SEQ ID NO: 183259 - DNA, 15 bp, Homo sapiens
taaattaaattaaaa

SEQ ID NO: 183260 - DNA, 15 bp, Homo sapiens
gtaaattaaattaaa

SEQ ID NO: 183261 - DNA, 15 bp, Homo sapiens
agtaaattaaattaa

SEQ ID NO: 183262 - DNA, 15 bp, Homo sapiens
aagtaaattaaatta

SEQ ID NO: 183263 - DNA, 15 bp, Homo sapiens
gaagtaaattaaatt

SEQ ID NO: 183264 - DNA, 15 bp, Homo sapiens
tgaagtaaattaaat

SEQ ID NO: 183265 - DNA, 15 bp, Homo sapiens
ttgaagtaaattaaa

SEQ ID NO: 183266 - DNA, 15 bp, Homo sapiens
attgaagtaaattaa

SEQ ID NO: 183267 - DNA, 15 bp, Homo sapiens
aattgaagtaaatta

SEQ ID NO: 183268 - DNA, 15 bp, Homo sapiens
aaattgaagtaaatt

SEQ ID NO: 183269 - DNA, 15 bp, Homo sapiens
taaattgaagtaaat

SEQ ID NO: 183270 - DNA, 15 bp, Homo sapiens
ttaaattgaagtaaa

SEQ ID NO: 183271 - DNA, 15 bp, Homo sapiens
attaaattgaagtaa

SEQ ID NO: 183272 - DNA, 15 bp, Homo sapiens
tattaaattgaagta

SEQ ID NO: 183273 - DNA, 15 bp, Homo sapiens
atattaaattgaagt

SEQ ID NO: 183274 - DNA, 15 bp, Homo sapiens
catattaaattgaag

SEQ ID NO: 183275 - DNA, 15 bp, Homo sapiens
acatattaaattgaa

SEQ ID NO: 183276 - DNA, 15 bp, Homo sapiens
tacatattaaattga

SEQ ID NO: 183277 - DNA, 15 bp, Homo sapiens
ctacatattaaattg

SEQ ID NO: 183278 - DNA, 15 bp, Homo sapiens
gctacatattaaatt

SEQ ID NO: 183279 - DNA, 15 bp, Homo sapiens
agctacatattaaat

SEQ ID NO: 183280 - DNA, 15 bp, Homo sapiens
tagctacatattaaa

SEQ ID NO: 183281 - DNA, 15 bp, Homo sapiens
ctagctacatattaa

SEQ ID NO: 183282 - DNA, 15 bp, Homo sapiens
actagctacatatta

SEQ ID NO: 183283 - DNA, 15 bp, Homo sapiens
cactagctacatatt

SEQ ID NO: 183284 - DNA, 15 bp, Homo sapiens
ccactagctacatat

SEQ ID NO: 183285 - DNA, 15 bp, Homo sapiens
gccactagctacata

SEQ ID NO: 183286 - DNA, 15 bp, Homo sapiens
agccactagctacat

SEQ ID NO: 183287 - DNA, 15 bp, Homo sapiens
tagccactagctaca

SEQ ID NO: 183288 - DNA, 15 bp, Homo sapiens
gtagccactagctac

SEQ ID NO: 183289 - DNA, 15 bp, Homo sapiens
agtagccactagcta

SEQ ID NO: 183290 - DNA, 15 bp, Homo sapiens
cagtagccactagct

SEQ ID NO: 183291 - DNA, 15 bp, Homo sapiens
gcagtagccactagc

SEQ ID NO: 183292 - DNA, 15 bp, Homo sapiens
tgcagtagccactag

SEQ ID NO: 183293 - DNA, 15 bp, Homo sapiens
atgcagtagccacta

SEQ ID NO: 183294 - DNA, 15 bp, Homo sapiens
aatgcagtagccact

SEQ ID NO: 183295 - DNA, 15 bp, Homo sapiens
taatgcagtagccac

SEQ ID NO: 183296 - DNA, 15 bp, Homo sapiens
ctaatgcagtagcca

SEQ ID NO: 183297 - DNA, 15 bp, Homo sapiens
tctaatgcagtagcc

SEQ ID NO: 183298 - DNA, 15 bp, Homo sapiens
gtctaatgcagtagc

SEQ ID NO: 183299 - DNA, 15 bp, Homo sapiens
tgtctaatgcagtag

SEQ ID NO: 183300 - DNA, 15 bp, Homo sapiens
ctgtctaatgcagta

SEQ ID NO: 183301 - DNA, 15 bp, Homo sapiens
actgtctaatgcagt

SEQ ID NO: 183302 - DNA, 15 bp, Homo sapiens
aactgtctaatgcag

SEQ ID NO: 183303 - DNA, 15 bp, Homo sapiens
aaactgtctaatgca

SEQ ID NO: 183304 - DNA, 15 bp, Homo sapiens
taaactgtctaatgc

SEQ ID NO: 183305 - DNA, 15 bp, Homo sapiens
ctaaactgtctaatg

SEQ ID NO: 183306 - DNA, 15 bp, Homo sapiens
cctaaactgtctaat

SEQ ID NO: 183307 - DNA, 15 bp, Homo sapiens
acctaaactgtctaa

SEQ ID NO: 183308 - DNA, 15 bp, Homo sapiens
gacctaaactgtcta

SEQ ID NO: 183309 - DNA, 15 bp, Homo sapiens
cgacctaaactgtct

SEQ ID NO: 183310 - DNA, 15 bp, Homo sapiens
acgacctaaactgtc

SEQ ID NO: 183311 - DNA, 15 bp, Homo sapiens
cacgacctaaactgt

SEQ ID NO: 183312 - DNA, 15 bp, Homo sapiens
acacgacctaaactg

SEQ ID NO: 183313 - DNA, 15 bp, Homo sapiens
cacacgacctaaact

SEQ ID NO: 183314 - DNA, 15 bp, Homo sapiens
acacacgacctaaac

SEQ ID NO: 183315 - DNA, 15 bp, Homo sapiens
cacacacgacctaaa

SEQ ID NO: 183316 - DNA, 15 bp, Homo sapiens
acacacacgacctaa

SEQ ID NO: 183317 - DNA, 15 bp, Homo sapiens
cacacacacgaccta

SEQ ID NO: 183318 - DNA, 15 bp, Homo sapiens
acacacacacgacct

SEQ ID NO: 183319 - DNA, 15 bp, Homo sapiens
cacacacacacgacc

SEQ ID NO: 183320 - DNA, 15 bp, Homo sapiens
acacacacacacgac

SEQ ID NO: 183321 - DNA, 15 bp, Homo sapiens
cacacacacacacga

SEQ ID NO: 183322 - DNA, 15 bp, Homo sapiens
acacacacacacacg

SEQ ID NO: 183323 - DNA, 15 bp, Homo sapiens
cacacacacacacac

SEQ ID NO: 183324 - DNA, 15 bp, Homo sapiens
acacacacacacaca

SEQ ID NO: 183325 - DNA, 15 bp, Homo sapiens
aacacacacacacac

SEQ ID NO: 183326 - DNA, 15 bp, Homo sapiens
caacacacacacaca

SEQ ID NO: 183327 - DNA, 15 bp, Homo sapiens
ccaacacacacacac

SEQ ID NO: 183328 - DNA, 15 bp, Homo sapiens
cccaacacacacaca

SEQ ID NO: 183329 - DNA, 15 bp, Homo sapiens
ccccaacacacacac

SEQ ID NO: 183330 - DNA, 15 bp, Homo sapiens
accccaacacacaca

SEQ ID NO: 183331 - DNA, 15 bp, Homo sapiens
caccccaacacacac

SEQ ID NO: 183332 - DNA, 15 bp, Homo sapiens
ccaccccaacacaca

SEQ ID NO: 183333 - DNA, 15 bp, Homo sapiens
tccaccccaacacac

SEQ ID NO: 183334 - DNA, 15 bp, Homo sapiens
ctccaccccaacaca

SEQ ID NO: 183335 - DNA, 15 bp, Homo sapiens
cctccaccccaacac

SEQ ID NO: 183336 - DNA, 15 bp, Homo sapiens
ccctccaccccaaca

SEQ ID NO: 183337 - DNA, 15 bp, Homo sapiens
cccctccaccccaac

SEQ ID NO: 183338 - DNA, 15 bp, Homo sapiens
tcccctccaccccaa

SEQ ID NO: 183339 - DNA, 15 bp, Homo sapiens
gtcccctccacccca

SEQ ID NO: 183340 - DNA, 15 bp, Homo sapiens
tgtcccctccacccc

SEQ ID NO: 183341 - DNA, 15 bp, Homo sapiens
ctgtcccctccaccc

SEQ ID NO: 183342 - DNA, 15 bp, Homo sapiens
tctgtcccctccacc

SEQ ID NO: 183343 - DNA, 15 bp, Homo sapiens
gtctgtcccctccac

SEQ ID NO: 183344 - DNA, 15 bp, Homo sapiens
tgtctgtcccctcca

SEQ ID NO: 183345 - DNA, 15 bp, Homo sapiens
atgtctgtcccctcc

SEQ ID NO: 183346 - DNA, 15 bp, Homo sapiens
tatgtctgtcccctc

SEQ ID NO: 183347 - DNA, 15 bp, Homo sapiens
gtatgtctgtcccct

SEQ ID NO: 183348 - DNA, 15 bp, Homo sapiens
tgtatgtctgtcccc

SEQ ID NO: 183349 - DNA, 15 bp, Homo sapiens
ttgtatgtctgtccc

SEQ ID NO: 183350 - DNA, 15 bp, Homo sapiens
tttgtatgtctgtcc

SEQ ID NO: 183351 - DNA, 15 bp, Homo sapiens
gtttgtatgtctgtc

SEQ ID NO: 183352 - DNA, 15 bp, Homo sapiens
tgtttgtatgtctgt

SEQ ID NO: 183353 - DNA, 15 bp, Homo sapiens
ttgtttgtatgtctg

SEQ ID NO: 183354 - DNA, 15 bp, Homo sapiens
attgtttgtatgtct

SEQ ID NO: 183355 - DNA, 15 bp, Homo sapiens
aattgtttgtatgtc

SEQ ID NO: 183356 - DNA, 15 bp, Homo sapiens
gaattgtttgtatgt

SEQ ID NO: 183357 - DNA, 15 bp, Homo sapiens
ggaattgtttgtatg

SEQ ID NO: 183358 - DNA, 15 bp, Homo sapiens
tggaattgtttgtat

SEQ ID NO: 183359 - DNA, 15 bp, Homo sapiens
ttggaattgtttgta

SEQ ID NO: 183360 - DNA, 15 bp, Homo sapiens
attggaattgtttgt

SEQ ID NO: 183361 - DNA, 15 bp, Homo sapiens
tattggaattgtttg

SEQ ID NO: 183362 - DNA, 15 bp, Homo sapiens
gtattggaattgttt

SEQ ID NO: 183363 - DNA, 15 bp, Homo sapiens
tgtattggaattgtt

SEQ ID NO: 183364 - DNA, 15 bp, Homo sapiens
ttgtattggaattgt

SEQ ID NO: 183365 - DNA, 15 bp, Homo sapiens
attgtattggaattg

SEQ ID NO: 183366 - DNA, 15 bp, Homo sapiens
tattgtattggaatt

SEQ ID NO: 183367 - DNA, 15 bp, Homo sapiens
atattgtattggaat

SEQ ID NO: 183368 - DNA, 15 bp, Homo sapiens
catattgtattggaa

SEQ ID NO: 183369 - DNA, 15 bp, Homo sapiens
ccatattgtattgga

SEQ ID NO: 183370 - DNA, 15 bp, Homo sapiens
accatattgtattgg

SEQ ID NO: 183371 - DNA, 15 bp, Homo sapiens
gaccatattgtattg

SEQ ID NO: 183372 - DNA, 15 bp, Homo sapiens
tgaccatattgtatt

SEQ ID NO: 183373 - DNA, 15 bp, Homo sapiens
gtgaccatattgtat

SEQ ID NO: 183374 - DNA, 15 bp, Homo sapiens
tgtgaccatattgta

SEQ ID NO: 183375 - DNA, 15 bp, Homo sapiens
ctgtgaccatattgt

SEQ ID NO: 183376 - DNA, 15 bp, Homo sapiens
gctgtgaccatattg

SEQ ID NO: 183377 - DNA, 15 bp, Homo sapiens
agctgtgaccatatt

SEQ ID NO: 183378 - DNA, 15 bp, Homo sapiens
tagctgtgaccatat

SEQ ID NO: 183379 - DNA, 15 bp, Homo sapiens
ttagctgtgaccata

SEQ ID NO: 183380 - DNA, 15 bp, Homo sapiens
gttagctgtgaccat

SEQ ID NO: 183381 - DNA, 15 bp, Homo sapiens
tgttagctgtgacca

SEQ ID NO: 183382 - DNA, 15 bp, Homo sapiens
atgttagctgtgacc

SEQ ID NO: 183383 - DNA, 15 bp, Homo sapiens
aatgttagctgtgac

SEQ ID NO: 183384 - DNA, 15 bp, Homo sapiens
aaatgttagctgtga

SEQ ID NO: 183385 - DNA, 15 bp, Homo sapiens
taaatgttagctgtg

SEQ ID NO: 183386 - DNA, 15 bp, Homo sapiens
ataaatgttagctgt

SEQ ID NO: 183387 - DNA, 15 bp, Homo sapiens
aataaatgttagctg

SEQ ID NO: 183388 - DNA, 15 bp, Homo sapiens
taataaatgttagct

SEQ ID NO: 183389 - DNA, 15 bp, Homo sapiens
ttaataaatgttagc

SEQ ID NO: 183390 - DNA, 15 bp, Homo sapiens
attaataaatgttag

SEQ ID NO: 183391 - DNA, 15 bp, Homo sapiens
gattaataaatgtta

SEQ ID NO: 183392 - DNA, 15 bp, Homo sapiens
agattaataaatgtt

SEQ ID NO: 183393 - DNA, 15 bp, Homo sapiens
aagattaataaatgt

SEQ ID NO: 183394 - DNA, 15 bp, Homo sapiens
aaagattaataaatg

SEQ ID NO: 183395 - DNA, 15 bp, Homo sapiens
taaagattaataaat

SEQ ID NO: 183396 - DNA, 15 bp, Homo sapiens
ttaaagattaataaa

SEQ ID NO: 183397 - DNA, 15 bp, Homo sapiens
cttaaagattaataa

SEQ ID NO: 183398 - DNA, 15 bp, Homo sapiens
gcttaaagattaata

SEQ ID NO: 183399 - DNA, 15 bp, Homo sapiens
agcttaaagattaat

SEQ ID NO: 183400 - DNA, 15 bp, Homo sapiens
tagcttaaagattaa

SEQ ID NO: 183401 - DNA, 15 bp, Homo sapiens
atagcttaaagatta

SEQ ID NO: 183402 - DNA, 15 bp, Homo sapiens
catagcttaaagatt

SEQ ID NO: 183403 - DNA, 15 bp, Homo sapiens
gcatagcttaaagat

SEQ ID NO: 183404 - DNA, 15 bp, Homo sapiens
agcatagcttaaaga

SEQ ID NO: 183405 - DNA, 15 bp, Homo sapiens
cagcatagcttaaag

SEQ ID NO: 183406 - DNA, 15 bp, Homo sapiens
ccagcatagcttaaa

SEQ ID NO: 183407 - DNA, 15 bp, Homo sapiens
cccagcatagcttaa

SEQ ID NO: 183408 - DNA, 15 bp, Homo sapiens
gcccagcatagctta

SEQ ID NO: 183409 - DNA, 15 bp, Homo sapiens
tgcccagcatagctt

SEQ ID NO: 183410 - DNA, 15 bp, Homo sapiens
gtgcccagcatagct

SEQ ID NO: 183411 - DNA, 15 bp, Homo sapiens
agtgcccagcatagc

SEQ ID NO: 183412 - DNA, 15 bp, Homo sapiens
cagtgcccagcatag

SEQ ID NO: 183413 - DNA, 15 bp, Homo sapiens
acagtgcccagcata

SEQ ID NO: 183414 - DNA, 15 bp, Homo sapiens
aacagtgcccagcat

SEQ ID NO: 183415 - DNA, 15 bp, Homo sapiens
gaacagtgcccagca

SEQ ID NO: 183416 - DNA, 15 bp, Homo sapiens
agaacagtgcccagc

SEQ ID NO: 183417 - DNA, 15 bp, Homo sapiens
tagaacagtgcccag

SEQ ID NO: 183418 - DNA, 15 bp, Homo sapiens
ttagaacagtgccca

SEQ ID NO: 183419 - DNA, 15 bp, Homo sapiens
cttagaacagtgccc

SEQ ID NO: 183420 - DNA, 15 bp, Homo sapiens
gcttagaacagtgcc

SEQ ID NO: 183421 - DNA, 15 bp, Homo sapiens
tgcttagaacagtgc

SEQ ID NO: 183422 - DNA, 15 bp, Homo sapiens
ctgcttagaacagtg

SEQ ID NO: 183423 - DNA, 15 bp, Homo sapiens
cctgcttagaacagt

SEQ ID NO: 183424 - DNA, 15 bp, Homo sapiens
acctgcttagaacag

SEQ ID NO: 183425 - DNA, 15 bp, Homo sapiens
aacctgcttagaaca

SEQ ID NO: 183426 - DNA, 15 bp, Homo sapiens
taacctgcttagaac

SEQ ID NO: 183427 - DNA, 15 bp, Homo sapiens
gtaacctgcttagaa

SEQ ID NO: 183428 - DNA, 15 bp, Homo sapiens
ggtaacctgcttaga

SEQ ID NO: 183429 - DNA, 15 bp, Homo sapiens
aggtaacctgcttag

SEQ ID NO: 183430 - DNA, 15 bp, Homo sapiens
taggtaacctgctta

SEQ ID NO: 183431 - DNA, 15 bp, Homo sapiens
ataggtaacctgctt

SEQ ID NO: 183432 - DNA, 15 bp, Homo sapiens
tataggtaacctgct

SEQ ID NO: 183433 - DNA, 15 bp, Homo sapiens
atataggtaacctgc

SEQ ID NO: 183434 - DNA, 15 bp, Homo sapiens
aatataggtaacctg

SEQ ID NO: 183435 - DNA, 15 bp, Homo sapiens
taatataggtaacct

SEQ ID NO: 183436 - DNA, 15 bp, Homo sapiens
ttaatataggtaacc

SEQ ID NO: 183437 - DNA, 15 bp, Homo sapiens
gttaatataggtaac

SEQ ID NO: 183438 - DNA, 15 bp, Homo sapiens
ggttaatataggtaa

SEQ ID NO: 183439 - DNA, 15 bp, Homo sapiens
gggttaatataggta

SEQ ID NO: 183440 - DNA, 15 bp, Homo sapiens
ggggttaatataggt

SEQ ID NO: 183441 - DNA, 15 bp, Homo sapiens
aggggttaatatagg

SEQ ID NO: 183442 - DNA, 15 bp, Homo sapiens
caggggttaatatag

SEQ ID NO: 183443 - DNA, 15 bp, Homo sapiens
gcaggggttaatata

SEQ ID NO: 183444 - DNA, 15 bp, Homo sapiens
tgcaggggttaatat

SEQ ID NO: 183445 - DNA, 15 bp, Homo sapiens
ttgcaggggttaata

SEQ ID NO: 183446 - DNA, 15 bp, Homo sapiens
attgcaggggttaat

SEQ ID NO: 183447 - DNA, 15 bp, Homo sapiens
aattgcaggggttaa

SEQ ID NO: 183448 - DNA, 15 bp, Homo sapiens
taattgcaggggtta

SEQ ID NO: 183449 - DNA, 15 bp, Homo sapiens
ctaattgcaggggtt

SEQ ID NO: 183450 - DNA, 15 bp, Homo sapiens
cctaattgcaggggt

SEQ ID NO: 183451 - DNA, 15 bp, Homo sapiens
tcctaattgcagggg

SEQ ID NO: 183452 - DNA, 15 bp, Homo sapiens
ttcctaattgcaggg

SEQ ID NO: 183453 - DNA, 15 bp, Homo sapiens
tttcctaattgcagg

SEQ ID NO: 183454 - DNA, 15 bp, Homo sapiens
ttttcctaattgcag

SEQ ID NO: 183455 - DNA, 15 bp, Homo sapiens
attttcctaattgca

SEQ ID NO: 183456 - DNA, 15 bp, Homo sapiens
tattttcctaattgc

SEQ ID NO: 183457 - DNA, 15 bp, Homo sapiens
ctattttcctaattg

SEQ ID NO: 183458 - DNA, 15 bp, Homo sapiens
gctattttcctaatt

SEQ ID NO: 183459 - DNA, 15 bp, Homo sapiens
ggctattttcctaat

SEQ ID NO: 183460 - DNA, 15 bp, Homo sapiens
gggctattttcctaa

SEQ ID NO: 183461 - DNA, 15 bp, Homo sapiens
ggggctattttccta

SEQ ID NO: 183462 - DNA, 15 bp, Homo sapiens
aggggctattttcct

SEQ ID NO: 183463 - DNA, 15 bp, Homo sapiens
caggggctattttcc

SEQ ID NO: 183464 - DNA, 15 bp, Homo sapiens
tcaggggctattttc

SEQ ID NO: 183465 - DNA, 15 bp, Homo sapiens
ctcaggggctatttt

SEQ ID NO: 183466 - DNA, 15 bp, Homo sapiens
gctcaggggctattt

SEQ ID NO: 183467 - DNA, 15 bp, Homo sapiens
agctcaggggctatt

SEQ ID NO: 183468 - DNA, 15 bp, Homo sapiens
tagctcaggggctat

SEQ ID NO: 183469 - DNA, 15 bp, Homo sapiens
ctagctcaggggcta

SEQ ID NO: 183470 - DNA, 15 bp, Homo sapiens
cctagctcaggggct

SEQ ID NO: 183471 - DNA, 15 bp, Homo sapiens
acctagctcaggggc

SEQ ID NO: 183472 - DNA, 15 bp, Homo sapiens
tacctagctcagggg

SEQ ID NO: 183473 - DNA, 15 bp, Homo sapiens
atacctagctcaggg

SEQ ID NO: 183474 - DNA, 15 bp, Homo sapiens
gatacctagctcagg

SEQ ID NO: 183475 - DNA, 15 bp, Homo sapiens
agatacctagctcag

SEQ ID NO: 183476 - DNA, 15 bp, Homo sapiens
tagatacctagctca

SEQ ID NO: 183477 - DNA, 15 bp, Homo sapiens
atagatacctagctc

SEQ ID NO: 183478 - DNA, 15 bp, Homo sapiens
aatagatacctagct

SEQ ID NO: 183479 - DNA, 15 bp, Homo sapiens
taatagatacctagc

SEQ ID NO: 183480 - DNA, 15 bp, Homo sapiens
ataatagatacctag

SEQ ID NO: 183481 - DNA, 15 bp, Homo sapiens
gataatagataccta

SEQ ID NO: 183482 - DNA, 15 bp, Homo sapiens
tgataatagatacct

SEQ ID NO: 183483 - DNA, 15 bp, Homo sapiens
ttgataatagatacc

SEQ ID NO: 183484 - DNA, 15 bp, Homo sapiens
gttgataatagatac

SEQ ID NO: 183485 - DNA, 15 bp, Homo sapiens
ggttgataatagata

SEQ ID NO: 183486 - DNA, 15 bp, Homo sapiens
aggttgataatagat

SEQ ID NO: 183487 - DNA, 15 bp, Homo sapiens
gaggttgataataga

SEQ ID NO: 183488 - DNA, 15 bp, Homo sapiens
tgaggttgataatag

SEQ ID NO: 183489 - DNA, 15 bp, Homo sapiens
atgaggttgataata

SEQ ID NO: 183490 - DNA, 15 bp, Homo sapiens
aatgaggttgataat

SEQ ID NO: 183491 - DNA, 15 bp, Homo sapiens
aaatgaggttgataa

SEQ ID NO: 183492 - DNA, 15 bp, Homo sapiens
aaaatgaggttgata

SEQ ID NO: 183493 - DNA, 15 bp, Homo sapiens
taaaatgaggttgat

SEQ ID NO: 183494 - DNA, 15 bp, Homo sapiens
ctaaaatgaggttga

SEQ ID NO: 183495 - DNA, 15 bp, Homo sapiens
tctaaaatgaggttg

SEQ ID NO: 183496 - DNA, 15 bp, Homo sapiens
ctctaaaatgaggtt

SEQ ID NO: 183497 - DNA, 15 bp, Homo sapiens
cctctaaaatgaggt

SEQ ID NO: 183498 - DNA, 15 bp, Homo sapiens
acctctaaaatgagg

SEQ ID NO: 183499 - DNA, 15 bp, Homo sapiens
cacctctaaaatgag

SEQ ID NO: 183500 - DNA, 15 bp, Homo sapiens
gcacctctaaaatga

SEQ ID NO: 183501 - DNA, 15 bp, Homo sapiens
tgcacctctaaaatg

SEQ ID NO: 183502 - DNA, 15 bp, Homo sapiens
ctgcacctctaaaat

SEQ ID NO: 183503 - DNA, 15 bp, Homo sapiens
tctgcacctctaaaa

SEQ ID NO: 183504 - DNA, 15 bp, Homo sapiens
ttctgcacctctaaa

SEQ ID NO: 183505 - DNA, 15 bp, Homo sapiens
tttctgcacctctaa

SEQ ID NO: 183506 - DNA, 15 bp, Homo sapiens
atttctgcacctcta

SEQ ID NO: 183507 - DNA, 15 bp, Homo sapiens
catttctgcacctct

SEQ ID NO: 183508 - DNA, 15 bp, Homo sapiens
ccatttctgcacctc

SEQ ID NO: 183509 - DNA, 15 bp, Homo sapiens
tccatttctgcacct

SEQ ID NO: 183510 - DNA, 15 bp, Homo sapiens
ctccatttctgcacc

SEQ ID NO: 183511 - DNA, 15 bp, Homo sapiens
cctccatttctgcac

SEQ ID NO: 183512 - DNA, 15 bp, Homo sapiens
gcctccatttctgca

SEQ ID NO: 183513 - DNA, 15 bp, Homo sapiens
tgcctccatttctgc

SEQ ID NO: 183514 - DNA, 15 bp, Homo sapiens
gtgcctccatttctg

SEQ ID NO: 183515 - DNA, 15 bp, Homo sapiens
tgtgcctccatttct

SEQ ID NO: 183516 - DNA, 15 bp, Homo sapiens
ctgtgcctccatttc

SEQ ID NO: 183517 - DNA, 15 bp, Homo sapiens
cctgtgcctccattt

SEQ ID NO: 183518 - DNA, 15 bp, Homo sapiens
ccctgtgcctccatt

SEQ ID NO: 183519 - DNA, 15 bp, Homo sapiens
cccctgtgcctccat

SEQ ID NO: 183520 - DNA, 15 bp, Homo sapiens
acccctgtgcctcca

SEQ ID NO: 183521 - DNA, 15 bp, Homo sapiens
aacccctgtgcctcc

SEQ ID NO: 183522 - DNA, 15 bp, Homo sapiens
gaacccctgtgcctc

SEQ ID NO: 183523 - DNA, 15 bp, Homo sapiens
tgaacccctgtgcct

SEQ ID NO: 183524 - DNA, 15 bp, Homo sapiens
ctgaacccctgtgcc

SEQ ID NO: 183525 - DNA, 15 bp, Homo sapiens
actgaacccctgtgc

SEQ ID NO: 183526 - DNA, 15 bp, Homo sapiens
tactgaacccctgtg

SEQ ID NO: 183527 - DNA, 15 bp, Homo sapiens
ttactgaacccctgt

SEQ ID NO: 183528 - DNA, 15 bp, Homo sapiens
gttactgaacccctg

SEQ ID NO: 183529 - DNA, 15 bp, Homo sapiens
agttactgaacccct

SEQ ID NO: 183530 - DNA, 15 bp, Homo sapiens
aagttactgaacccc

SEQ ID NO: 183531 - DNA, 15 bp, Homo sapiens
caagttactgaaccc

SEQ ID NO: 183532 - DNA, 15 bp, Homo sapiens
gcaagttactgaacc

SEQ ID NO: 183533 - DNA, 15 bp, Homo sapiens
tgcaagttactgaac

SEQ ID NO: 183534 - DNA, 15 bp, Homo sapiens
gtgcaagttactgaa

SEQ ID NO: 183535 - DNA, 15 bp, Homo sapiens
cgtgcaagttactga

SEQ ID NO: 183536 - DNA, 15 bp, Homo sapiens
tcgtgcaagttactg

SEQ ID NO: 183537 - DNA, 15 bp, Homo sapiens
ctcgtgcaagttact

SEQ ID NO: 183538 - DNA, 15 bp, Homo sapiens
cctcgtgcaagttac

SEQ ID NO: 183539 - DNA, 15 bp, Homo sapiens
acctcgtgcaagtta

SEQ ID NO: 183540 - DNA, 15 bp, Homo sapiens
gacctcgtgcaagtt

SEQ ID NO: 183541 - DNA, 15 bp, Homo sapiens
tgacctcgtgcaagt

SEQ ID NO: 183542 - DNA, 15 bp, Homo sapiens
gtgacctcgtgcaag

SEQ ID NO: 183543 - DNA, 15 bp, Homo sapiens
tgtgacctcgtgcaa

SEQ ID NO: 183544 - DNA, 15 bp, Homo sapiens
ttgtgacctcgtgca

SEQ ID NO: 183545 - DNA, 15 bp, Homo sapiens
attgtgacctcgtgc

SEQ ID NO: 183546 - DNA, 15 bp, Homo sapiens
gattgtgacctcgtg

SEQ ID NO: 183547 - DNA, 15 bp, Homo sapiens
ggattgtgacctcgt

SEQ ID NO: 183548 - DNA, 15 bp, Homo sapiens
aggattgtgacctcg

SEQ ID NO: 183549 - DNA, 15 bp, Homo sapiens
gaggattgtgacctc

SEQ ID NO: 183550 - DNA, 15 bp, Homo sapiens
cgaggattgtgacct

SEQ ID NO: 183551 - DNA, 15 bp, Homo sapiens
tcgaggattgtgacc

SEQ ID NO: 183552 - DNA, 15 bp, Homo sapiens
ctcgaggattgtgac

SEQ ID NO: 183553 - DNA, 15 bp, Homo sapiens
gctcgaggattgtga

SEQ ID NO: 183554 - DNA, 15 bp, Homo sapiens
ggctcgaggattgtg

SEQ ID NO: 183555 - DNA, 15 bp, Homo sapiens
gggctcgaggattgt

SEQ ID NO: 183556 - DNA, 15 bp, Homo sapiens
cgggctcgaggattg

SEQ ID NO: 183557 - DNA, 15 bp, Homo sapiens
ccgggctcgaggatt

SEQ ID NO: 183558 - DNA, 15 bp, Homo sapiens
tccgggctcgaggat

SEQ ID NO: 183559 - DNA, 15 bp, Homo sapiens
atccgggctcgagga

SEQ ID NO: 183560 - DNA, 15 bp, Homo sapiens
tatccgggctcgagg

SEQ ID NO: 183561 - DNA, 15 bp, Homo sapiens
ctatccgggctcgag

SEQ ID NO: 183562 - DNA, 15 bp, Homo sapiens
tctatccgggctcga

SEQ ID NO: 183563 - DNA, 15 bp, Homo sapiens
ttctatccgggctcg

SEQ ID NO: 183564 - DNA, 15 bp, Homo sapiens
cttctatccgggctc

SEQ ID NO: 183565 - DNA, 15 bp, Homo sapiens
gcttctatccgggct

SEQ ID NO: 183566 - DNA, 15 bp, Homo sapiens
ggcttctatccgggc

SEQ ID NO: 183567 - DNA, 15 bp, Homo sapiens
gggcttctatccggg

SEQ ID NO: 183568 - DNA, 15 bp, Homo sapiens
tgggcttctatccgg

SEQ ID NO: 183569 - DNA, 15 bp, Homo sapiens
ctgggcttctatccg

SEQ ID NO: 183570 - DNA, 15 bp, Homo sapiens
cctgggcttctatcc

SEQ ID NO: 183571 - DNA, 15 bp, Homo sapiens
gcctgggcttctatc

SEQ ID NO: 183572 - DNA, 15 bp, Homo sapiens
ggcctgggcttctat

SEQ ID NO: 183573 - DNA, 15 bp, Homo sapiens
tggcctgggcttcta

SEQ ID NO: 183574 - DNA, 15 bp, Homo sapiens
atggcctgggcttct

SEQ ID NO: 183575 - DNA, 15 bp, Homo sapiens
gatggcctgggcttc

SEQ ID NO: 183576 - DNA, 15 bp, Homo sapiens
cgatggcctgggctt

SEQ ID NO: 183577 - DNA, 15 bp, Homo sapiens
ccgatggcctgggct

SEQ ID NO: 183578 - DNA, 15 bp, Homo sapiens
cccgatggcctgggc

SEQ ID NO: 183579 - DNA, 15 bp, Homo sapiens
gcccgatggcctggg

SEQ ID NO: 183580 - DNA, 15 bp, Homo sapiens
agcccgatggcctgg

SEQ ID NO: 183581 - DNA, 15 bp, Homo sapiens
gagcccgatggcctg

SEQ ID NO: 183582 - DNA, 15 bp, Homo sapiens
ggagcccgatggcct

SEQ ID NO: 183583 - DNA, 15 bp, Homo sapiens
tggagcccgatggcc

SEQ ID NO: 183584 - DNA, 15 bp, Homo sapiens
ctggagcccgatggc

SEQ ID NO: 183585 - DNA, 15 bp, Homo sapiens
cctggagcccgatgg

SEQ ID NO: 183586 - DNA, 15 bp, Homo sapiens
gcctggagcccgatg

SEQ ID NO: 183587 - DNA, 15 bp, Homo sapiens
ggcctggagcccgat

SEQ ID NO: 183588 - DNA, 15 bp, Homo sapiens
gggcctggagcccga

SEQ ID NO: 183589 - DNA, 15 bp, Homo sapiens
tgggcctggagcccg

SEQ ID NO: 183590 - DNA, 15 bp, Homo sapiens
atgggcctggagccc

SEQ ID NO: 183591 - DNA, 15 bp, Homo sapiens
gatgggcctggagcc

SEQ ID NO: 183592 - DNA, 15 bp, Homo sapiens
ggatgggcctggagc

SEQ ID NO: 183593 - DNA, 15 bp, Homo sapiens
aggatgggcctggag

SEQ ID NO: 183594 - DNA, 15 bp, Homo sapiens
gaggatgggcctgga

SEQ ID NO: 183595 - DNA, 15 bp, Homo sapiens
agaggatgggcctgg

SEQ ID NO: 183596 - DNA, 15 bp, Homo sapiens
cagaggatgggcctg

SEQ ID NO: 183597 - DNA, 15 bp, Homo sapiens
gcagaggatgggcct

SEQ ID NO: 183598 - DNA, 15 bp, Homo sapiens
ggcagaggatgggcc

SEQ ID NO: 183599 - DNA, 15 bp, Homo sapiens
tggcagaggatgggc

SEQ ID NO: 183600 - DNA, 15 bp, Homo sapiens
atggcagaggatggg

SEQ ID NO: 183601 - DNA, 15 bp, Homo sapiens
catggcagaggatgg

SEQ ID NO: 183602 - DNA, 15 bp, Homo sapiens
gcatggcagaggatg

SEQ ID NO: 183603 - DNA, 15 bp, Homo sapiens
ggcatggcagaggat

SEQ ID NO: 183604 - DNA, 15 bp, Homo sapiens
tggcatggcagagga

SEQ ID NO: 183605 - DNA, 15 bp, Homo sapiens
atggcatggcagagg

SEQ ID NO: 183606 - DNA, 15 bp, Homo sapiens
aatggcatggcagag

SEQ ID NO: 183607 - DNA, 15 bp, Homo sapiens
gaatggcatggcaga

SEQ ID NO: 183608 - DNA, 15 bp, Homo sapiens
ggaatggcatggcag

SEQ ID NO: 183609 - DNA, 15 bp, Homo sapiens
aggaatggcatggca

SEQ ID NO: 183610 - DNA, 15 bp, Homo sapiens
gaggaatggcatggc

SEQ ID NO: 183611 - DNA, 15 bp, Homo sapiens
ggaggaatggcatgg

SEQ ID NO: 183612 - DNA, 15 bp, Homo sapiens
aggaggaatggcatg

SEQ ID NO: 183613 - DNA, 15 bp, Homo sapiens
caggaggaatggcat

SEQ ID NO: 183614 - DNA, 15 bp, Homo sapiens
gcaggaggaatggca

SEQ ID NO: 183615 - DNA, 15 bp, Homo sapiens
ggcaggaggaatggc

SEQ ID NO: 183616 - DNA, 15 bp, Homo sapiens
aggcaggaggaatgg

SEQ ID NO: 183617 - DNA, 15 bp, Homo sapiens
aaggcaggaggaatg

SEQ ID NO: 183618 - DNA, 15 bp, Homo sapiens
caaggcaggaggaat

SEQ ID NO: 183619 - DNA, 15 bp, Homo sapiens
gcaaggcaggaggaa

SEQ ID NO: 183620 - DNA, 15 bp, Homo sapiens
agcaaggcaggagga

SEQ ID NO: 183621 - DNA, 15 bp, Homo sapiens
tagcaaggcaggagg

SEQ ID NO: 183622 - DNA, 15 bp, Homo sapiens
atagcaaggcaggag

SEQ ID NO: 183623 - DNA, 15 bp, Homo sapiens
gatagcaaggcagga

SEQ ID NO: 183624 - DNA, 15 bp, Homo sapiens
ggatagcaaggcagg

SEQ ID NO: 183625 - DNA, 15 bp, Homo sapiens
tggatagcaaggcag

SEQ ID NO: 183626 - DNA, 15 bp, Homo sapiens
ttggatagcaaggca

SEQ ID NO: 183627 - DNA, 15 bp, Homo sapiens
tttggatagcaaggc

SEQ ID NO: 183628 - DNA, 15 bp, Homo sapiens
atttggatagcaagg

SEQ ID NO: 183629 - DNA, 15 bp, Homo sapiens
tatttggatagcaag

SEQ ID NO: 183630 - DNA, 15 bp, Homo sapiens
ctatttggatagcaa

SEQ ID NO: 183631 - DNA, 15 bp, Homo sapiens
tctatttggatagca

SEQ ID NO: 183632 - DNA, 15 bp, Homo sapiens
ctctatttggatagc

SEQ ID NO: 183633 - DNA, 15 bp, Homo sapiens
cctctatttggatag

SEQ ID NO: 183634 - DNA, 15 bp, Homo sapiens
ccctctatttggata

SEQ ID NO: 183635 - DNA, 15 bp, Homo sapiens
tccctctatttggat

SEQ ID NO: 183636 - DNA, 15 bp, Homo sapiens
atccctctatttgga

SEQ ID NO: 183637 - DNA, 15 bp, Homo sapiens
catccctctatttgg

SEQ ID NO: 183638 - DNA, 15 bp, Homo sapiens
gcatccctctatttg

SEQ ID NO: 183639 - DNA, 15 bp, Homo sapiens
tgcatccctctattt

SEQ ID NO: 183640 - DNA, 15 bp, Homo sapiens
ctgcatccctctatt

SEQ ID NO: 183641 - DNA, 15 bp, Homo sapiens
tctgcatccctctat

SEQ ID NO: 183642 - DNA, 15 bp, Homo sapiens
ctctgcatccctcta

SEQ ID NO: 183643 - DNA, 15 bp, Homo sapiens
cctctgcatccctct

SEQ ID NO: 183644 - DNA, 15 bp, Homo sapiens
tcctctgcatccctc

SEQ ID NO: 183645 - DNA, 15 bp, Homo sapiens
gtcctctgcatccct

SEQ ID NO: 183646 - DNA, 15 bp, Homo sapiens
agtcctctgcatccc

SEQ ID NO: 183647 - DNA, 15 bp, Homo sapiens
tagtcctctgcatcc

SEQ ID NO: 183648 - DNA, 15 bp, Homo sapiens
ctagtcctctgcatc

SEQ ID NO: 183649 - DNA, 15 bp, Homo sapiens
cctagtcctctgcat

SEQ ID NO: 183650 - DNA, 15 bp, Homo sapiens
ccctagtcctctgca

SEQ ID NO: 183651 - DNA, 15 bp, Homo sapiens
cccctagtcctctgc

SEQ ID NO: 183652 - DNA, 15 bp, Homo sapiens
tcccctagtcctctg

SEQ ID NO: 183653 - DNA, 15 bp, Homo sapiens
ctcccctagtcctct

SEQ ID NO: 183654 - DNA, 15 bp, Homo sapiens
gctcccctagtcctc

SEQ ID NO: 183655 - DNA, 15 bp, Homo sapiens
agctcccctagtcct

SEQ ID NO: 183656 - DNA, 15 bp, Homo sapiens
cagctcccctagtcc

SEQ ID NO: 183657 - DNA, 15 bp, Homo sapiens
ccagctcccctagtc

SEQ ID NO: 183658 - DNA, 15 bp, Homo sapiens
accagctcccctagt

SEQ ID NO: 183659 - DNA, 15 bp, Homo sapiens
gaccagctcccctag

SEQ ID NO: 183660 - DNA, 15 bp, Homo sapiens
agaccagctccccta

SEQ ID NO: 183661 - DNA, 15 bp, Homo sapiens
gagaccagctcccct

SEQ ID NO: 183662 - DNA, 15 bp, Homo sapiens
tgagaccagctcccc

SEQ ID NO: 183663 - DNA, 15 bp, Homo sapiens
gtgagaccagctccc

SEQ ID NO: 183664 - DNA, 15 bp, Homo sapiens
agtgagaccagctcc

SEQ ID NO: 183665 - DNA, 15 bp, Homo sapiens
gagtgagaccagctc

SEQ ID NO: 183666 - DNA, 15 bp, Homo sapiens
tgagtgagaccagct

SEQ ID NO: 183667 - DNA, 15 bp, Homo sapiens
ctgagtgagaccagc

SEQ ID NO: 183668 - DNA, 15 bp, Homo sapiens
gctgagtgagaccag

SEQ ID NO: 183669 - DNA, 15 bp, Homo sapiens
agctgagtgagacca

SEQ ID NO: 183670 - DNA, 15 bp, Homo sapiens
gagctgagtgagacc

SEQ ID NO: 183671 - DNA, 15 bp, Homo sapiens
tgagctgagtgagac

SEQ ID NO: 183672 - DNA, 15 bp, Homo sapiens
ctgagctgagtgaga

SEQ ID NO: 183673 - DNA, 15 bp, Homo sapiens
cctgagctgagtgag

SEQ ID NO: 183674 - DNA, 15 bp, Homo sapiens
ccctgagctgagtga

SEQ ID NO: 183675 - DNA, 15 bp, Homo sapiens
cccctgagctgagtg

SEQ ID NO: 183676 - DNA, 15 bp, Homo sapiens
tcccctgagctgagt

SEQ ID NO: 183677 - DNA, 15 bp, Homo sapiens
ctcccctgagctgag

SEQ ID NO: 183678 - DNA, 15 bp, Homo sapiens
cctcccctgagctga

SEQ ID NO: 183679 - DNA, 15 bp, Homo sapiens
gcctcccctgagctg

SEQ ID NO: 183680 - DNA, 15 bp, Homo sapiens
ggcctcccctgagct

SEQ ID NO: 183681 - DNA, 15 bp, Homo sapiens
gggcctcccctgagc

SEQ ID NO: 183682 - DNA, 15 bp, Homo sapiens
agggcctcccctgag

SEQ ID NO: 183683 - DNA, 15 bp, Homo sapiens
cagggcctcccctga

SEQ ID NO: 183684 - DNA, 15 bp, Homo sapiens
acagggcctcccctg

SEQ ID NO: 183685 - DNA, 15 bp, Homo sapiens
cacagggcctcccct

SEQ ID NO: 183686 - DNA, 15 bp, Homo sapiens
ccacagggcctcccc

SEQ ID NO: 183687 - DNA, 15 bp, Homo sapiens
tccacagggcctccc

SEQ ID NO: 183688 - DNA, 15 bp, Homo sapiens
ctccacagggcctcc

SEQ ID NO: 183689 - DNA, 15 bp, Homo sapiens
actccacagggcctc

SEQ ID NO: 183690 - DNA, 15 bp, Homo sapiens
gactccacagggcct

SEQ ID NO: 183691 - DNA, 15 bp, Homo sapiens
agactccacagggcc

SEQ ID NO: 183692 - DNA, 15 bp, Homo sapiens
aagactccacagggc

SEQ ID NO: 183693 - DNA, 15 bp, Homo sapiens
caagactccacaggg

SEQ ID NO: 183694 - DNA, 15 bp, Homo sapiens
ccaagactccacagg

SEQ ID NO: 183695 - DNA, 15 bp, Homo sapiens
tccaagactccacag

SEQ ID NO: 183696 - DNA, 15 bp, Homo sapiens
ctccaagactccaca

SEQ ID NO: 183697 - DNA, 15 bp, Homo sapiens
cctccaagactccac

SEQ ID NO: 183698 - DNA, 15 bp, Homo sapiens
tcctccaagactcca

SEQ ID NO: 183699 - DNA, 15 bp, Homo sapiens
atcctccaagactcc

SEQ ID NO: 183700 - DNA, 15 bp, Homo sapiens
catcctccaagactc

SEQ ID NO: 183701 - DNA, 15 bp, Homo sapiens
acatcctccaagact

SEQ ID NO: 183702 - DNA, 15 bp, Homo sapiens
cacatcctccaagac

SEQ ID NO: 183703 - DNA, 15 bp, Homo sapiens
ccacatcctccaaga

SEQ ID NO: 183704 - DNA, 15 bp, Homo sapiens
tccacatcctccaag

SEQ ID NO: 183705 - DNA, 15 bp, Homo sapiens
ttccacatcctccaa

SEQ ID NO: 183706 - DNA, 15 bp, Homo sapiens
cttccacatcctcca

SEQ ID NO: 183707 - DNA, 15 bp, Homo sapiens
tcttccacatcctcc

SEQ ID NO: 183708 - DNA, 15 bp, Homo sapiens
gtcttccacatcctc

SEQ ID NO: 183709 - DNA, 15 bp, Homo sapiens
agtcttccacatcct

SEQ ID NO: 183710 - DNA, 15 bp, Homo sapiens
gagtcttccacatcc

SEQ ID NO: 183711 - DNA, 15 bp, Homo sapiens
tgagtcttccacatc

SEQ ID NO: 183712 - DNA, 15 bp, Homo sapiens
ctgagtcttccacat

SEQ ID NO: 183713 - DNA, 15 bp, Homo sapiens
gctgagtcttccaca

SEQ ID NO: 183714 - DNA, 15 bp, Homo sapiens
ggctgagtcttccac

SEQ ID NO: 183715 - DNA, 15 bp, Homo sapiens
tggctgagtcttcca

SEQ ID NO: 183716 - DNA, 15 bp, Homo sapiens
ctggctgagtcttcc

SEQ ID NO: 183717 - DNA, 15 bp, Homo sapiens
cctggctgagtcttc

SEQ ID NO: 183718 - DNA, 15 bp, Homo sapiens
tcctggctgagtctt

SEQ ID NO: 183719 - DNA, 15 bp, Homo sapiens
ttcctggctgagtct

SEQ ID NO: 183720 - DNA, 15 bp, Homo sapiens
tttcctggctgagtc

SEQ ID NO: 183721 - DNA, 15 bp, Homo sapiens
ctttcctggctgagt

SEQ ID NO: 183722 - DNA, 15 bp, Homo sapiens
tctttcctggctgag

SEQ ID NO: 183723 - DNA, 15 bp, Homo sapiens
ttctttcctggctga

SEQ ID NO: 183724 - DNA, 15 bp, Homo sapiens
tttctttcctggctg

SEQ ID NO: 183725 - DNA, 15 bp, Homo sapiens
ctttctttcctggct

SEQ ID NO: 183726 - DNA, 15 bp, Homo sapiens
tctttctttcctggc

SEQ ID NO: 183727 - DNA, 15 bp, Homo sapiens
ctctttctttcctgg

SEQ ID NO: 183728 - DNA, 15 bp, Homo sapiens
cctctttctttcctg

SEQ ID NO: 183729 - DNA, 15 bp, Homo sapiens
ccctctttctttcct

SEQ ID NO: 183730 - DNA, 15 bp, Homo sapiens
tccctctttctttcc

SEQ ID NO: 183731 - DNA, 15 bp, Homo sapiens
ttccctctttctttc

SEQ ID NO: 183732 - DNA, 15 bp, Homo sapiens
tttccctctttcttt

SEQ ID NO: 183733 - DNA, 15 bp, Homo sapiens
ctttccctctttctt

SEQ ID NO: 183734 - DNA, 15 bp, Homo sapiens
cctttccctctttct

SEQ ID NO: 183735 - DNA, 15 bp, Homo sapiens
tcctttccctctttc

SEQ ID NO: 183736 - DNA, 15 bp, Homo sapiens
gtcctttccctcttt

SEQ ID NO: 183737 - DNA, 15 bp, Homo sapiens
tgtcctttccctctt

SEQ ID NO: 183738 - DNA, 15 bp, Homo sapiens
atgtcctttccctct

SEQ ID NO: 183739 - DNA, 15 bp, Homo sapiens
gatgtcctttccctc

SEQ ID NO: 183740 - DNA, 15 bp, Homo sapiens
ggatgtcctttccct

SEQ ID NO: 183741 - DNA, 15 bp, Homo sapiens
tggatgtcctttccc

SEQ ID NO: 183742 - DNA, 15 bp, Homo sapiens
ctggatgtcctttcc

SEQ ID NO: 183743 - DNA, 15 bp, Homo sapiens
cctggatgtcctttc

SEQ ID NO: 183744 - DNA, 15 bp, Homo sapiens
tcctggatgtccttt

SEQ ID NO: 183745 - DNA, 15 bp, Homo sapiens
ctcctggatgtcctt

SEQ ID NO: 183746 - DNA, 15 bp, Homo sapiens
cctcctggatgtcct

SEQ ID NO: 183747 - DNA, 15 bp, Homo sapiens
gcctcctggatgtcc

SEQ ID NO: 183748 - DNA, 15 bp, Homo sapiens
ggcctcctggatgtc

SEQ ID NO: 183749 - DNA, 15 bp, Homo sapiens
aggcctcctggatgt

SEQ ID NO: 183750 - DNA, 15 bp, Homo sapiens
caggcctcctggatg

SEQ ID NO: 183751 - DNA, 15 bp, Homo sapiens
ccaggcctcctggat

SEQ ID NO: 183752 - DNA, 15 bp, Homo sapiens
gccaggcctcctgga

SEQ ID NO: 183753 - DNA, 15 bp, Homo sapiens
tgccaggcctcctgg

SEQ ID NO: 183754 - DNA, 15 bp, Homo sapiens
atgccaggcctcctg

SEQ ID NO: 183755 - DNA, 15 bp, Homo sapiens
catgccaggcctcct

SEQ ID NO: 183756 - DNA, 15 bp, Homo sapiens
tcatgccaggcctcc

SEQ ID NO: 183757 - DNA, 15 bp, Homo sapiens
ctcatgccaggcctc

SEQ ID NO: 183758 - DNA, 15 bp, Homo sapiens
tctcatgccaggcct

SEQ ID NO: 183759 - DNA, 15 bp, Homo sapiens
ttctcatgccaggcc

SEQ ID NO: 183760 - DNA, 15 bp, Homo sapiens
tttctcatgccaggc

SEQ ID NO: 183761 - DNA, 15 bp, Homo sapiens
ctttctcatgccagg

SEQ ID NO: 183762 - DNA, 15 bp, Homo sapiens
cctttctcatgccag

SEQ ID NO: 183763 - DNA, 15 bp, Homo sapiens
gcctttctcatgcca

SEQ ID NO: 183764 - DNA, 15 bp, Homo sapiens
ggcctttctcatgcc

SEQ ID NO: 183765 - DNA, 15 bp, Homo sapiens
gggcctttctcatgc

SEQ ID NO: 183766 - DNA, 15 bp, Homo sapiens
tgggcctttctcatg

SEQ ID NO: 183767 - DNA, 15 bp, Homo sapiens
ctgggcctttctcat

SEQ ID NO: 183768 - DNA, 15 bp, Homo sapiens
tctgggcctttctca

SEQ ID NO: 183769 - DNA, 15 bp, Homo sapiens
ctctgggcctttctc

SEQ ID NO: 183770 - DNA, 15 bp, Homo sapiens
cctctgggcctttct

SEQ ID NO: 183771 - DNA, 15 bp, Homo sapiens
gcctctgggcctttc

SEQ ID NO: 183772 - DNA, 15 bp, Homo sapiens
cgcctctgggccttt

SEQ ID NO: 183773 - DNA, 15 bp, Homo sapiens
acgcctctgggcctt

SEQ ID NO: 183774 - DNA, 15 bp, Homo sapiens
cacgcctctgggcct

SEQ ID NO: 183775 - DNA, 15 bp, Homo sapiens
ccacgcctctgggcc

SEQ ID NO: 183776 - DNA, 15 bp, Homo sapiens
cccacgcctctgggc

SEQ ID NO: 183777 - DNA, 15 bp, Homo sapiens
ccccacgcctctggg

SEQ ID NO: 183778 - DNA, 15 bp, Homo sapiens
gccccacgcctctgg

SEQ ID NO: 183779 - DNA, 15 bp, Homo sapiens
tgccccacgcctctg

SEQ ID NO: 183780 - DNA, 15 bp, Homo sapiens
ctgccccacgcctct

SEQ ID NO: 183781 - DNA, 15 bp, Homo sapiens
tctgccccacgcctc

SEQ ID NO: 183782 - DNA, 15 bp, Homo sapiens
ctctgccccacgcct

SEQ ID NO: 183783 - DNA, 15 bp, Homo sapiens
cctctgccccacgcc

SEQ ID NO: 183784 - DNA, 15 bp, Homo sapiens
ccctctgccccacgc

SEQ ID NO: 183785 - DNA, 15 bp, Homo sapiens
gccctctgccccacg

SEQ ID NO: 183786 - DNA, 15 bp, Homo sapiens
cgccctctgccccac

SEQ ID NO: 183787 - DNA, 15 bp, Homo sapiens
ccgccctctgcccca

SEQ ID NO: 183788 - DNA, 15 bp, Homo sapiens
gccgccctctgcccc

SEQ ID NO: 183789 - DNA, 15 bp, Homo sapiens
ggccgccctctgccc

SEQ ID NO: 183790 - DNA, 15 bp, Homo sapiens
gggccgccctctgcc

SEQ ID NO: 183791 - DNA, 15 bp, Homo sapiens
cgggccgccctctgc

SEQ ID NO: 183792 - DNA, 15 bp, Homo sapiens
ccgggccgccctctg

SEQ ID NO: 183793 - DNA, 15 bp, Homo sapiens
cccgggccgccctct

SEQ ID NO: 183794 - DNA, 15 bp, Homo sapiens
gcccgggccgccctc

SEQ ID NO: 183795 - DNA, 15 bp, Homo sapiens
agcccgggccgccct

SEQ ID NO: 183796 - DNA, 15 bp, Homo sapiens
gagcccgggccgccc

SEQ ID NO: 183797 - DNA, 15 bp, Homo sapiens
agagcccgggccgcc

SEQ ID NO: 183798 - DNA, 15 bp, Homo sapiens
cagagcccgggccgc

SEQ ID NO: 183799 - DNA, 15 bp, Homo sapiens
ccagagcccgggccg

SEQ ID NO: 183800 - DNA, 15 bp, Homo sapiens
tccagagcccgggcc

SEQ ID NO: 183801 - DNA, 15 bp, Homo sapiens
ctccagagcccgggc

SEQ ID NO: 183802 - DNA, 15 bp, Homo sapiens
cctccagagcccggg

SEQ ID NO: 183803 - DNA, 15 bp, Homo sapiens
ccctccagagcccgg

SEQ ID NO: 183804 - DNA, 15 bp, Homo sapiens
accctccagagcccg

SEQ ID NO: 183805 - DNA, 15 bp, Homo sapiens
caccctccagagccc

SEQ ID NO: 183806 - DNA, 15 bp, Homo sapiens
gcaccctccagagcc

SEQ ID NO: 183807 - DNA, 15 bp, Homo sapiens
tgcaccctccagagc

SEQ ID NO: 183808 - DNA, 15 bp, Homo sapiens
ctgcaccctccagag

SEQ ID NO: 183809 - DNA, 15 bp, Homo sapiens
actgcaccctccaga

SEQ ID NO: 183810 - DNA, 15 bp, Homo sapiens
gactgcaccctccag

SEQ ID NO: 183811 - DNA, 15 bp, Homo sapiens
tgactgcaccctcca

SEQ ID NO: 183812 - DNA, 15 bp, Homo sapiens
ctgactgcaccctcc

SEQ ID NO: 183813 - DNA, 15 bp, Homo sapiens
gctgactgcaccctc

SEQ ID NO: 183814 - DNA, 15 bp, Homo sapiens
agctgactgcaccct

SEQ ID NO: 183815 - DNA, 15 bp, Homo sapiens
gagctgactgcaccc

SEQ ID NO: 183816 - DNA, 15 bp, Homo sapiens
agagctgactgcacc

SEQ ID NO: 183817 - DNA, 15 bp, Homo sapiens
cagagctgactgcac

SEQ ID NO: 183818 - DNA, 15 bp, Homo sapiens
tcagagctgactgca

SEQ ID NO: 183819 - DNA, 15 bp, Homo sapiens
ctcagagctgactgc

SEQ ID NO: 183820 - DNA, 15 bp, Homo sapiens
tctcagagctgactg

SEQ ID NO: 183821 - DNA, 15 bp, Homo sapiens
atctcagagctgact

SEQ ID NO: 183822 - DNA, 15 bp, Homo sapiens
catctcagagctgac

SEQ ID NO: 183823 - DNA, 15 bp, Homo sapiens
ccatctcagagctga

SEQ ID NO: 183824 - DNA, 15 bp, Homo sapiens
gccatctcagagctg

SEQ ID NO: 183825 - DNA, 15 bp, Homo sapiens
tgccatctcagagct

SEQ ID NO: 183826 - DNA, 15 bp, Homo sapiens
gtgccatctcagagc

SEQ ID NO: 183827 - DNA, 15 bp, Homo sapiens
ggtgccatctcagag

SEQ ID NO: 183828 - DNA, 15 bp, Homo sapiens
aggtgccatctcaga

SEQ ID NO: 183829 - DNA, 15 bp, Homo sapiens
caggtgccatctcag

SEQ ID NO: 183830 - DNA, 15 bp, Homo sapiens
ccaggtgccatctca

SEQ ID NO: 183831 - DNA, 15 bp, Homo sapiens
cccaggtgccatctc

SEQ ID NO: 183832 - DNA, 15 bp, Homo sapiens
gcccaggtgccatct

SEQ ID NO: 183833 - DNA, 15 bp, Homo sapiens
agcccaggtgccatc

SEQ ID NO: 183834 - DNA, 15 bp, Homo sapiens
aagcccaggtgccat

SEQ ID NO: 183835 - DNA, 15 bp, Homo sapiens
caagcccaggtgcca

SEQ ID NO: 183836 - DNA, 15 bp, Homo sapiens
ccaagcccaggtgcc

SEQ ID NO: 183837 - DNA, 15 bp, Homo sapiens
accaagcccaggtgc

SEQ ID NO: 183838 - DNA, 15 bp, Homo sapiens
taccaagcccaggtg

SEQ ID NO: 183839 - DNA, 15 bp, Homo sapiens
gtaccaagcccaggt

SEQ ID NO: 183840 - DNA, 15 bp, Homo sapiens
agtaccaagcccagg

SEQ ID NO: 183841 - DNA, 15 bp, Homo sapiens
cagtaccaagcccag

SEQ ID NO: 183842 - DNA, 15 bp, Homo sapiens
tcagtaccaagccca

SEQ ID NO: 183843 - DNA, 15 bp, Homo sapiens
ttcagtaccaagccc

SEQ ID NO: 183844 - DNA, 15 bp, Homo sapiens
tttcagtaccaagcc

SEQ ID NO: 183845 - DNA, 15 bp, Homo sapiens
ctttcagtaccaagc

SEQ ID NO: 183846 - DNA, 15 bp, Homo sapiens
gctttcagtaccaag

SEQ ID NO: 183847 - DNA, 15 bp, Homo sapiens
tgctttcagtaccaa

SEQ ID NO: 183848 - DNA, 15 bp, Homo sapiens
ctgctttcagtacca

SEQ ID NO: 183849 - DNA, 15 bp, Homo sapiens
actgctttcagtacc

SEQ ID NO: 183850 - DNA, 15 bp, Homo sapiens
tactgctttcagtac

SEQ ID NO: 183851 - DNA, 15 bp, Homo sapiens
ctactgctttcagta

SEQ ID NO: 183852 - DNA, 15 bp, Homo sapiens
cctactgctttcagt

SEQ ID NO: 183853 - DNA, 15 bp, Homo sapiens
gcctactgctttcag

SEQ ID NO: 183854 - DNA, 15 bp, Homo sapiens
cgcctactgctttca

SEQ ID NO: 183855 - DNA, 15 bp, Homo sapiens
gcgcctactgctttc

SEQ ID NO: 183856 - DNA, 15 bp, Homo sapiens
ggcgcctactgcttt

SEQ ID NO: 183857 - DNA, 15 bp, Homo sapiens
tggcgcctactgctt

SEQ ID NO: 183858 - DNA, 15 bp, Homo sapiens
atggcgcctactgct

SEQ ID NO: 183859 - DNA, 15 bp, Homo sapiens
catggcgcctactgc

SEQ ID NO: 183860 - DNA, 15 bp, Homo sapiens
gcatggcgcctactg

SEQ ID NO: 183861 - DNA, 15 bp, Homo sapiens
tgcatggcgcctact

SEQ ID NO: 183862 - DNA, 15 bp, Homo sapiens
ctgcatggcgcctac

SEQ ID NO: 183863 - DNA, 15 bp, Homo sapiens
cctgcatggcgccta

SEQ ID NO: 183864 - DNA, 15 bp, Homo sapiens
ccctgcatggcgcct

SEQ ID NO: 183865 - DNA, 15 bp, Homo sapiens
cccctgcatggcgcc

SEQ ID NO: 183866 - DNA, 15 bp, Homo sapiens
gcccctgcatggcgc

SEQ ID NO: 183867 - DNA, 15 bp, Homo sapiens
agcccctgcatggcg

SEQ ID NO: 183868 - DNA, 15 bp, Homo sapiens
aagcccctgcatggc

SEQ ID NO: 183869 - DNA, 15 bp, Homo sapiens
gaagcccctgcatgg

SEQ ID NO: 183870 - DNA, 15 bp, Homo sapiens
tgaagcccctgcatg

SEQ ID NO: 183871 - DNA, 15 bp, Homo sapiens
ttgaagcccctgcat

SEQ ID NO: 183872 - DNA, 15 bp, Homo sapiens
cttgaagcccctgca

SEQ ID NO: 183873 - DNA, 15 bp, Homo sapiens
gcttgaagcccctgc

SEQ ID NO: 183874 - DNA, 15 bp, Homo sapiens
agcttgaagcccctg

SEQ ID NO: 183875 - DNA, 15 bp, Homo sapiens
tagcttgaagcccct

SEQ ID NO: 183876 - DNA, 15 bp, Homo sapiens
ctagcttgaagcccc

SEQ ID NO: 183877 - DNA, 15 bp, Homo sapiens
cctagcttgaagccc

SEQ ID NO: 183878 - DNA, 15 bp, Homo sapiens
ccctagcttgaagcc

SEQ ID NO: 183879 - DNA, 15 bp, Homo sapiens
cccctagcttgaagc

SEQ ID NO: 183880 - DNA, 15 bp, Homo sapiens
ccccctagcttgaag

SEQ ID NO: 183881 - DNA, 15 bp, Homo sapiens
gccccctagcttgaa

SEQ ID NO: 183882 - DNA, 15 bp, Homo sapiens
ggccccctagcttga

SEQ ID NO: 183883 - DNA, 15 bp, Homo sapiens
tggccccctagcttg

SEQ ID NO: 183884 - DNA, 15 bp, Homo sapiens
gtggccccctagctt

SEQ ID NO: 183885 - DNA, 15 bp, Homo sapiens
tgtggccccctagct

SEQ ID NO: 183886 - DNA, 15 bp, Homo sapiens
ttgtggccccctagc

SEQ ID NO: 183887 - DNA, 15 bp, Homo sapiens
tttgtggccccctag

SEQ ID NO: 183888 - DNA, 15 bp, Homo sapiens
ctttgtggcccccta

SEQ ID NO: 183889 - DNA, 15 bp, Homo sapiens
cctttgtggccccct

SEQ ID NO: 183890 - DNA, 15 bp, Homo sapiens
ccctttgtggccccc

SEQ ID NO: 183891 - DNA, 15 bp, Homo sapiens
accctttgtggcccc

SEQ ID NO: 183892 - DNA, 15 bp, Homo sapiens
gaccctttgtggccc

SEQ ID NO: 183893 - DNA, 15 bp, Homo sapiens
ggaccctttgtggcc

SEQ ID NO: 183894 - DNA, 15 bp, Homo sapiens
tggaccctttgtggc

SEQ ID NO: 183895 - DNA, 15 bp, Homo sapiens
gtggaccctttgtgg

SEQ ID NO: 183896 - DNA, 15 bp, Homo sapiens
agtggaccctttgtg

SEQ ID NO: 183897 - DNA, 15 bp, Homo sapiens
cagtggaccctttgt

SEQ ID NO: 183898 - DNA, 15 bp, Homo sapiens
ccagtggaccctttg

SEQ ID NO: 183899 - DNA, 15 bp, Homo sapiens
accagtggacccttt

SEQ ID NO: 183900 - DNA, 15 bp, Homo sapiens
taccagtggaccctt

SEQ ID NO: 183901 - DNA, 15 bp, Homo sapiens
ataccagtggaccct

SEQ ID NO: 183902 - DNA, 15 bp, Homo sapiens
aataccagtggaccc

SEQ ID NO: 183903 - DNA, 15 bp, Homo sapiens
aaataccagtggacc

SEQ ID NO: 183904 - DNA, 15 bp, Homo sapiens
aaaataccagtggac

SEQ ID NO: 183905 - DNA, 15 bp, Homo sapiens
taaaataccagtgga

SEQ ID NO: 183906 - DNA, 15 bp, Homo sapiens
ctaaaataccagtgg

SEQ ID NO: 183907 - DNA, 15 bp, Homo sapiens
tctaaaataccagtg

SEQ ID NO: 183908 - DNA, 15 bp, Homo sapiens
ttctaaaataccagt

SEQ ID NO: 183909 - DNA, 15 bp, Homo sapiens
tttctaaaataccag

SEQ ID NO: 183910 - DNA, 15 bp, Homo sapiens
gtttctaaaatacca

SEQ ID NO: 183911 - DNA, 15 bp, Homo sapiens
ggtttctaaaatacc

SEQ ID NO: 183912 - DNA, 15 bp, Homo sapiens
aggtttctaaaatac

SEQ ID NO: 183913 - DNA, 15 bp, Homo sapiens
caggtttctaaaata

SEQ ID NO: 183914 - DNA, 15 bp, Homo sapiens
gcaggtttctaaaat

SEQ ID NO: 183915 - DNA, 15 bp, Homo sapiens
tgcaggtttctaaaa

SEQ ID NO: 183916 - DNA, 15 bp, Homo sapiens
ctgcaggtttctaaa

SEQ ID NO: 183917 - DNA, 15 bp, Homo sapiens
cctgcaggtttctaa

SEQ ID NO: 183918 - DNA, 15 bp, Homo sapiens
ccctgcaggtttcta

SEQ ID NO: 183919 - DNA, 15 bp, Homo sapiens
cccctgcaggtttct

SEQ ID NO: 183920 - DNA, 15 bp, Homo sapiens
gcccctgcaggtttc

SEQ ID NO: 183921 - DNA, 15 bp, Homo sapiens
tgcccctgcaggttt

SEQ ID NO: 183922 - DNA, 15 bp, Homo sapiens
gtgcccctgcaggtt

SEQ ID NO: 183923 - DNA, 15 bp, Homo sapiens
agtgcccctgcaggt

SEQ ID NO: 183924 - DNA, 15 bp, Homo sapiens
aagtgcccctgcagg

SEQ ID NO: 183925 - DNA, 15 bp, Homo sapiens
taagtgcccctgcag

SEQ ID NO: 183926 - DNA, 15 bp, Homo sapiens
ctaagtgcccctgca

SEQ ID NO: 183927 - DNA, 15 bp, Homo sapiens
tctaagtgcccctgc

SEQ ID NO: 183928 - DNA, 15 bp, Homo sapiens
ttctaagtgcccctg

SEQ ID NO: 183929 - DNA, 15 bp, Homo sapiens
cttctaagtgcccct

SEQ ID NO: 183930 - DNA, 15 bp, Homo sapiens
gcttctaagtgcccc

SEQ ID NO: 183931 - DNA, 15 bp, Homo sapiens
agcttctaagtgccc

SEQ ID NO: 183932 - DNA, 15 bp, Homo sapiens
aagcttctaagtgcc

SEQ ID NO: 183933 - DNA, 15 bp, Homo sapiens
caagcttctaagtgc

SEQ ID NO: 183934 - DNA, 15 bp, Homo sapiens
ccaagcttctaagtg

SEQ ID NO: 183935 - DNA, 15 bp, Homo sapiens
cccaagcttctaagt

SEQ ID NO: 183936 - DNA, 15 bp, Homo sapiens
tcccaagcttctaag

SEQ ID NO: 183937 - DNA, 15 bp, Homo sapiens
atcccaagcttctaa

SEQ ID NO: 183938 - DNA, 15 bp, Homo sapiens
gatcccaagcttcta

SEQ ID NO: 183939 - DNA, 15 bp, Homo sapiens
tgatcccaagcttct

SEQ ID NO: 183940 - DNA, 15 bp, Homo sapiens
ctgatcccaagcttc

SEQ ID NO: 183941 - DNA, 15 bp, Homo sapiens
tctgatcccaagctt

SEQ ID NO: 183942 - DNA, 15 bp, Homo sapiens
ctctgatcccaagct

SEQ ID NO: 183943 - DNA, 15 bp, Homo sapiens
actctgatcccaagc

SEQ ID NO: 183944 - DNA, 15 bp, Homo sapiens
cactctgatcccaag

SEQ ID NO: 183945 - DNA, 15 bp, Homo sapiens
tcactctgatcccaa

SEQ ID NO: 183946 - DNA, 15 bp, Homo sapiens
gtcactctgatccca

SEQ ID NO: 183947 - DNA, 15 bp, Homo sapiens
cgtcactctgatccc

SEQ ID NO: 183948 - DNA, 15 bp, Homo sapiens
tcgtcactctgatcc

SEQ ID NO: 183949 - DNA, 15 bp, Homo sapiens
ttcgtcactctgatc

SEQ ID NO: 183950 - DNA, 15 bp, Homo sapiens
cttcgtcactctgat

SEQ ID NO: 183951 - DNA, 15 bp, Homo sapiens
ccttcgtcactctga

SEQ ID NO: 183952 - DNA, 15 bp, Homo sapiens
accttcgtcactctg

SEQ ID NO: 183953 - DNA, 15 bp, Homo sapiens
caccttcgtcactct

SEQ ID NO: 183954 - DNA, 15 bp, Homo sapiens
tcaccttcgtcactc

SEQ ID NO: 183955 - DNA, 15 bp, Homo sapiens
ctcaccttcgtcact

SEQ ID NO: 183956 - DNA, 15 bp, Homo sapiens
gctcaccttcgtcac

SEQ ID NO: 183957 - DNA, 15 bp, Homo sapiens
tgctcaccttcgtca

SEQ ID NO: 183958 - DNA, 15 bp, Homo sapiens
ttgctcaccttcgtc

SEQ ID NO: 183959 - DNA, 15 bp, Homo sapiens
tttgctcaccttcgt

SEQ ID NO: 183960 - DNA, 15 bp, Homo sapiens
gtttgctcaccttcg

SEQ ID NO: 183961 - DNA, 15 bp, Homo sapiens
tgtttgctcaccttc

SEQ ID NO: 183962 - DNA, 15 bp, Homo sapiens
ttgtttgctcacctt

SEQ ID NO: 183963 - DNA, 15 bp, Homo sapiens
cttgtttgctcacct

SEQ ID NO: 183964 - DNA, 15 bp, Homo sapiens
tcttgtttgctcacc

SEQ ID NO: 183965 - DNA, 15 bp, Homo sapiens
ctcttgtttgctcac

SEQ ID NO: 183966 - DNA, 15 bp, Homo sapiens
gctcttgtttgctca

SEQ ID NO: 183967 - DNA, 15 bp, Homo sapiens
tgctcttgtttgctc

SEQ ID NO: 183968 - DNA, 15 bp, Homo sapiens
ctgctcttgtttgct

SEQ ID NO: 183969 - DNA, 15 bp, Homo sapiens
gctgctcttgtttgc

SEQ ID NO: 183970 - DNA, 15 bp, Homo sapiens
agctgctcttgtttg

SEQ ID NO: 183971 - DNA, 15 bp, Homo sapiens
aagctgctcttgttt

SEQ ID NO: 183972 - DNA, 15 bp, Homo sapiens
caagctgctcttgtt

SEQ ID NO: 183973 - DNA, 15 bp, Homo sapiens
ccaagctgctcttgt

SEQ ID NO: 183974 - DNA, 15 bp, Homo sapiens
accaagctgctcttg

SEQ ID NO: 183975 - DNA, 15 bp, Homo sapiens
caccaagctgctctt

SEQ ID NO: 183976 - DNA, 15 bp, Homo sapiens
tcaccaagctgctct

SEQ ID NO: 183977 - DNA, 15 bp, Homo sapiens
ctcaccaagctgctc

SEQ ID NO: 183978 - DNA, 15 bp, Homo sapiens
cctcaccaagctgct

SEQ ID NO: 183979 - DNA, 15 bp, Homo sapiens
gcctcaccaagctgc

SEQ ID NO: 183980 - DNA, 15 bp, Homo sapiens
ggcctcaccaagctg

SEQ ID NO: 183981 - DNA, 15 bp, Homo sapiens
cggcctcaccaagct

SEQ ID NO: 183982 - DNA, 15 bp, Homo sapiens
ccggcctcaccaagc

SEQ ID NO: 183983 - DNA, 15 bp, Homo sapiens
cccggcctcaccaag

SEQ ID NO: 183984 - DNA, 15 bp, Homo sapiens
acccggcctcaccaa

SEQ ID NO: 183985 - DNA, 15 bp, Homo sapiens
cacccggcctcacca

SEQ ID NO: 183986 - DNA, 15 bp, Homo sapiens
tcacccggcctcacc

SEQ ID NO: 183987 - DNA, 15 bp, Homo sapiens
ttcacccggcctcac

SEQ ID NO: 183988 - DNA, 15 bp, Homo sapiens
cttcacccggcctca

SEQ ID NO: 183989 - DNA, 15 bp, Homo sapiens
acttcacccggcctc

SEQ ID NO: 183990 - DNA, 15 bp, Homo sapiens
cacttcacccggcct

SEQ ID NO: 183991 - DNA, 15 bp, Homo sapiens
tcacttcacccggcc

SEQ ID NO: 183992 - DNA, 15 bp, Homo sapiens
gtcacttcacccggc

SEQ ID NO: 183993 - DNA, 15 bp, Homo sapiens
agtcacttcacccgg

SEQ ID NO: 183994 - DNA, 15 bp, Homo sapiens
gagtcacttcacccg

SEQ ID NO: 183995 - DNA, 15 bp, Homo sapiens
cgagtcacttcaccc

SEQ ID NO: 183996 - DNA, 15 bp, Homo sapiens
gcgagtcacttcacc

SEQ ID NO: 183997 - DNA, 15 bp, Homo sapiens
cgcgagtcacttcac

SEQ ID NO: 183998 - DNA, 15 bp, Homo sapiens
gcgcgagtcacttca

SEQ ID NO: 183999 - DNA, 15 bp, Homo sapiens
ggcgcgagtcacttc

SEQ ID NO: 184000 - DNA, 15 bp, Homo sapiens
aggcgcgagtcactt

SEQ ID NO: 184001 - DNA, 15 bp, Homo sapiens
caggcgcgagtcact

SEQ ID NO: 184002 - DNA, 15 bp, Homo sapiens
acaggcgcgagtcac

SEQ ID NO: 184003 - DNA, 15 bp, Homo sapiens
tacaggcgcgagtca

SEQ ID NO: 184004 - DNA, 15 bp, Homo sapiens
ttacaggcgcgagtc

SEQ ID NO: 184005 - DNA, 15 bp, Homo sapiens
attacaggcgcgagt

SEQ ID NO: 184006 - DNA, 15 bp, Homo sapiens
gattacaggcgcgag

SEQ ID NO: 184007 - DNA, 15 bp, Homo sapiens
ggattacaggcgcga

SEQ ID NO: 184008 - DNA, 15 bp, Homo sapiens
gggattacaggcgcg

SEQ ID NO: 184009 - DNA, 15 bp, Homo sapiens
tcaaagtgctgggat

SEQ ID NO: 184010 - DNA, 15 bp, Homo sapiens
ctcaaagtgctggga

SEQ ID NO: 184011 - DNA, 15 bp, Homo sapiens
tctcaaagtgctggg

SEQ ID NO: 184012 - DNA, 15 bp, Homo sapiens
ctctcaaagtgctgg

SEQ ID NO: 184013 - DNA, 15 bp, Homo sapiens
cctctcaaagtgctg

SEQ ID NO: 184014 - DNA, 15 bp, Homo sapiens
gcctctcaaagtgct

SEQ ID NO: 184015 - DNA, 15 bp, Homo sapiens
tgcctctcaaagtgc

SEQ ID NO: 184016 - DNA, 15 bp, Homo sapiens
ctgcctctcaaagtg

SEQ ID NO: 184017 - DNA, 15 bp, Homo sapiens
tctgcctctcaaagt

SEQ ID NO: 184018 - DNA, 15 bp, Homo sapiens
ctctgcctctcaaag

SEQ ID NO: 184019 - DNA, 15 bp, Homo sapiens
cctctgcctctcaaa

SEQ ID NO: 184020 - DNA, 15 bp, Homo sapiens
gcctctgcctctcaa

SEQ ID NO: 184021 - DNA, 15 bp, Homo sapiens
cgcctctgcctctca

SEQ ID NO: 184022 - DNA, 15 bp, Homo sapiens
ccgcctctgcctctc

SEQ ID NO: 184023 - DNA, 15 bp, Homo sapiens
cccgcctctgcctct

SEQ ID NO: 184024 - DNA, 15 bp, Homo sapiens
acccgcctctgcctc

SEQ ID NO: 184025 - DNA, 15 bp, Homo sapiens
cacccgcctctgcct

SEQ ID NO: 184026 - DNA, 15 bp, Homo sapiens
ccacccgcctctgcc

SEQ ID NO: 184027 - DNA, 15 bp, Homo sapiens
tccacccgcctctgc

SEQ ID NO: 184028 - DNA, 15 bp, Homo sapiens
atccacccgcctctg

SEQ ID NO: 184029 - DNA, 15 bp, Homo sapiens
gatccacccgcctct

SEQ ID NO: 184030 - DNA, 15 bp, Homo sapiens
tgatccacccgcctc

SEQ ID NO: 184031 - DNA, 15 bp, Homo sapiens
gtgatccacccgcct

SEQ ID NO: 184032 - DNA, 15 bp, Homo sapiens
ggtgatccacccgcc

SEQ ID NO: 184033 - DNA, 15 bp, Homo sapiens
aggtgatccacccgc

SEQ ID NO: 184034 - DNA, 15 bp, Homo sapiens
caggtgatccacccg

SEQ ID NO: 184035 - DNA, 15 bp, Homo sapiens
agtctcgaactcctg

SEQ ID NO: 184036 - DNA, 15 bp, Homo sapiens
tagtctcgaactcct

SEQ ID NO: 184037 - DNA, 15 bp, Homo sapiens
ctagtctcgaactcc

SEQ ID NO: 184038 - DNA, 15 bp, Homo sapiens
gctagtctcgaactc

SEQ ID NO: 184039 - DNA, 15 bp, Homo sapiens
ggctagtctcgaact

SEQ ID NO: 184040 - DNA, 15 bp, Homo sapiens
aggctagtctcgaac

SEQ ID NO: 184041 - DNA, 15 bp, Homo sapiens
caggctagtctcgaa

SEQ ID NO: 184042 - DNA, 15 bp, Homo sapiens
ccaggctagtctcga

SEQ ID NO: 184043 - DNA, 15 bp, Homo sapiens
gccaggctagtctcg

SEQ ID NO: 184044 - DNA, 15 bp, Homo sapiens
ggccaggctagtctc

SEQ ID NO: 184045 - DNA, 15 bp, Homo sapiens
tggccaggctagtct

SEQ ID NO: 184046 - DNA, 15 bp, Homo sapiens
ttggccaggctagtc

SEQ ID NO: 184047 - DNA, 15 bp, Homo sapiens
gttggccaggctagt

SEQ ID NO: 184048 - DNA, 15 bp, Homo sapiens
tgttggccaggctag

SEQ ID NO: 184049 - DNA, 15 bp, Homo sapiens
atgttggccaggcta

SEQ ID NO: 184050 - DNA, 15 bp, Homo sapiens
catgttggccaggct

SEQ ID NO: 184051 - DNA, 15 bp, Homo sapiens
ccatgttggccaggc

SEQ ID NO: 184052 - DNA, 15 bp, Homo sapiens
gccatgttggccagg

SEQ ID NO: 184053 - DNA, 15 bp, Homo sapiens
tgccatgttggccag

SEQ ID NO: 184054 - DNA, 15 bp, Homo sapiens
ttgccatgttggcca

SEQ ID NO: 184055 - DNA, 15 bp, Homo sapiens
tttgccatgttggcc

SEQ ID NO: 184056 - DNA, 15 bp, Homo sapiens
ttttgccatgttggc

SEQ ID NO: 184057 - DNA, 15 bp, Homo sapiens
gttttgccatgttgg

SEQ ID NO: 184058 - DNA, 15 bp, Homo sapiens
ggttttgccatgttg

SEQ ID NO: 184059 - DNA, 15 bp, Homo sapiens
cggttttgccatgtt

SEQ ID NO: 184060 - DNA, 15 bp, Homo sapiens
acggttttgccatgt

SEQ ID NO: 184061 - DNA, 15 bp, Homo sapiens
gacggttttgccatg

SEQ ID NO: 184062 - DNA, 15 bp, Homo sapiens
agacggttttgccat

SEQ ID NO: 184063 - DNA, 15 bp, Homo sapiens
gagacggttttgcca

SEQ ID NO: 184064 - DNA, 15 bp, Homo sapiens
agagacggttttgcc

SEQ ID NO: 184065 - DNA, 15 bp, Homo sapiens
tagagacggttttgc

SEQ ID NO: 184066 - DNA, 15 bp, Homo sapiens
gtagagacggttttg

SEQ ID NO: 184067 - DNA, 15 bp, Homo sapiens
agtagagacggtttt

SEQ ID NO: 184068 - DNA, 15 bp, Homo sapiens
tagtagagacggttt

SEQ ID NO: 184069 - DNA, 15 bp, Homo sapiens
ttagtagagacggtt

SEQ ID NO: 184070 - DNA, 15 bp, Homo sapiens
tttagtagagacggt

SEQ ID NO: 184071 - DNA, 15 bp, Homo sapiens
actaatttttgtatt

SEQ ID NO: 184072 - DNA, 15 bp, Homo sapiens
gactaatttttgtat

SEQ ID NO: 184073 - DNA, 15 bp, Homo sapiens
agactaatttttgta

SEQ ID NO: 184074 - DNA, 15 bp, Homo sapiens
cagactaatttttgt

SEQ ID NO: 184075 - DNA, 15 bp, Homo sapiens
ccagactaatttttg

SEQ ID NO: 184076 - DNA, 15 bp, Homo sapiens
gccagactaattttt

SEQ ID NO: 184077 - DNA, 15 bp, Homo sapiens
cgccagactaatttt

SEQ ID NO: 184078 - DNA, 15 bp, Homo sapiens
acgccagactaattt

SEQ ID NO: 184079 - DNA, 15 bp, Homo sapiens
cacgccagactaatt

SEQ ID NO: 184080 - DNA, 15 bp, Homo sapiens
ccacgccagactaat

SEQ ID NO: 184081 - DNA, 15 bp, Homo sapiens
accacgccagactaa

SEQ ID NO: 184082 - DNA, 15 bp, Homo sapiens
caccacgccagacta

SEQ ID NO: 184083 - DNA, 15 bp, Homo sapiens
tcaccacgccagact

SEQ ID NO: 184084 - DNA, 15 bp, Homo sapiens
atcaccacgccagac

SEQ ID NO: 184085 - DNA, 15 bp, Homo sapiens
catcaccacgccaga

SEQ ID NO: 184086 - DNA, 15 bp, Homo sapiens
ccatcaccacgccag

SEQ ID NO: 184087 - DNA, 15 bp, Homo sapiens
cccatcaccacgcca

SEQ ID NO: 184088 - DNA, 15 bp, Homo sapiens
acccatcaccacgcc

SEQ ID NO: 184089 - DNA, 15 bp, Homo sapiens
cacccatcaccacgc

SEQ ID NO: 184090 - DNA, 15 bp, Homo sapiens
gcacccatcaccacg

SEQ ID NO: 184091 - DNA, 15 bp, Homo sapiens
ggcacccatcaccac

SEQ ID NO: 184092 - DNA, 15 bp, Homo sapiens
aggcacccatcacca

SEQ ID NO: 184093 - DNA, 15 bp, Homo sapiens
caggcacccatcacc

SEQ ID NO: 184094 - DNA, 15 bp, Homo sapiens
acaggcacccatcac

SEQ ID NO: 184095 - DNA, 15 bp, Homo sapiens
tacaggcacccatca

SEQ ID NO: 184096 - DNA, 15 bp, Homo sapiens
ttacaggcacccatc

SEQ ID NO: 184097 - DNA, 15 bp, Homo sapiens
attacaggcacccat

SEQ ID NO: 184098 - DNA, 15 bp, Homo sapiens
gattacaggcaccca

SEQ ID NO: 184099 - DNA, 15 bp, Homo sapiens
ggattacaggcaccc

SEQ ID NO: 184100 - DNA, 15 bp, Homo sapiens
gggattacaggcacc

SEQ ID NO: 184101 - DNA, 15 bp, Homo sapiens
tgggattacaggcac

SEQ ID NO: 184102 - DNA, 15 bp, Homo sapiens
ctgggattacaggca

SEQ ID NO: 184103 - DNA, 15 bp, Homo sapiens
tgagtagctgggatt

SEQ ID NO: 184104 - DNA, 15 bp, Homo sapiens
ctgagtagctgggat

SEQ ID NO: 184105 - DNA, 15 bp, Homo sapiens
tctcctgagtagctg

SEQ ID NO: 184106 - DNA, 15 bp, Homo sapiens
gtctcctgagtagct

SEQ ID NO: 184107 - DNA, 15 bp, Homo sapiens
agtctcctgagtagc

SEQ ID NO: 184108 - DNA, 15 bp, Homo sapiens
tagtctcctgagtag

SEQ ID NO: 184109 - DNA, 15 bp, Homo sapiens
ttagtctcctgagta

SEQ ID NO: 184110 - DNA, 15 bp, Homo sapiens
cttagtctcctgagt

SEQ ID NO: 184111 - DNA, 15 bp, Homo sapiens
ccttagtctcctgag

SEQ ID NO: 184112 - DNA, 15 bp, Homo sapiens
gccttagtctcctga

SEQ ID NO: 184113 - DNA, 15 bp, Homo sapiens
tgccttagtctcctg

SEQ ID NO: 184114 - DNA, 15 bp, Homo sapiens
ctgccttagtctcct

SEQ ID NO: 184115 - DNA, 15 bp, Homo sapiens
cctgccttagtctcc

SEQ ID NO: 184116 - DNA, 15 bp, Homo sapiens
tcctgccttagtctc

SEQ ID NO: 184117 - DNA, 15 bp, Homo sapiens
ctcctgccttagtct

SEQ ID NO: 184118 - DNA, 15 bp, Homo sapiens
tctcctgccttagtc

SEQ ID NO: 184119 - DNA, 15 bp, Homo sapiens
ttctcctgccttagt

SEQ ID NO: 184120 - DNA, 15 bp, Homo sapiens
attctcctgccttag

SEQ ID NO: 184121 - DNA, 15 bp, Homo sapiens
gattctcctgcctta

SEQ ID NO: 184122 - DNA, 15 bp, Homo sapiens
ggattctcctgcctt

SEQ ID NO: 184123 - DNA, 15 bp, Homo sapiens
gggattctcctgcct

SEQ ID NO: 184124 - DNA, 15 bp, Homo sapiens
agggattctcctgcc

SEQ ID NO: 184125 - DNA, 15 bp, Homo sapiens
aagggattctcctgc

SEQ ID NO: 184126 - DNA, 15 bp, Homo sapiens
caagggattctcctg

SEQ ID NO: 184127 - DNA, 15 bp, Homo sapiens
tcaagggattctcct

SEQ ID NO: 184128 - DNA, 15 bp, Homo sapiens
ttcaagggattctcc

SEQ ID NO: 184129 - DNA, 15 bp, Homo sapiens
gttcaagggattctc

SEQ ID NO: 184130 - DNA, 15 bp, Homo sapiens
ggttcaagggattct

SEQ ID NO: 184131 - DNA, 15 bp, Homo sapiens
gggttcaagggattc

SEQ ID NO: 184132 - DNA, 15 bp, Homo sapiens
tgggttcaagggatt

SEQ ID NO: 184133 - DNA, 15 bp, Homo sapiens
ctgggttcaagggat

SEQ ID NO: 184134 - DNA, 15 bp, Homo sapiens
tctgggttcaaggga

SEQ ID NO: 184135 - DNA, 15 bp, Homo sapiens
ttctgggttcaaggg

SEQ ID NO: 184136 - DNA, 15 bp, Homo sapiens
tttctgggttcaagg

SEQ ID NO: 184137 - DNA, 15 bp, Homo sapiens
ctttctgggttcaag

SEQ ID NO: 184138 - DNA, 15 bp, Homo sapiens
gctttctgggttcaa

SEQ ID NO: 184139 - DNA, 15 bp, Homo sapiens
tgctttctgggttca

SEQ ID NO: 184140 - DNA, 15 bp, Homo sapiens
ttgctttctgggttc

SEQ ID NO: 184141 - DNA, 15 bp, Homo sapiens
tttgctttctgggtt

SEQ ID NO: 184142 - DNA, 15 bp, Homo sapiens
ctttgctttctgggt

SEQ ID NO: 184143 - DNA, 15 bp, Homo sapiens
cctttgctttctggg

SEQ ID NO: 184144 - DNA, 15 bp, Homo sapiens
acctttgctttctgg

SEQ ID NO: 184145 - DNA, 15 bp, Homo sapiens
aacctttgctttctg

SEQ ID NO: 184146 - DNA, 15 bp, Homo sapiens
caacctttgctttct

SEQ ID NO: 184147 - DNA, 15 bp, Homo sapiens
gcaacctttgctttc

SEQ ID NO: 184148 - DNA, 15 bp, Homo sapiens
tgcaacctttgcttt

SEQ ID NO: 184149 - DNA, 15 bp, Homo sapiens
ctgcaacctttgctt

SEQ ID NO: 184150 - DNA, 15 bp, Homo sapiens
actgcaacctttgct

SEQ ID NO: 184151 - DNA, 15 bp, Homo sapiens
cactgcaacctttgc

SEQ ID NO: 184152 - DNA, 15 bp, Homo sapiens
tcactgcaacctttg

SEQ ID NO: 184153 - DNA, 15 bp, Homo sapiens
ctcactgcaaccttt

SEQ ID NO: 184154 - DNA, 15 bp, Homo sapiens
gctcactgcaacctt

SEQ ID NO: 184155 - DNA, 15 bp, Homo sapiens
cctcggctcactgca

SEQ ID NO: 184156 - DNA, 15 bp, Homo sapiens
acctcggctcactgc

SEQ ID NO: 184157 - DNA, 15 bp, Homo sapiens
aacctcggctcactg

SEQ ID NO: 184158 - DNA, 15 bp, Homo sapiens
taacctcggctcact

SEQ ID NO: 184159 - DNA, 15 bp, Homo sapiens
ataacctcggctcac

SEQ ID NO: 184160 - DNA, 15 bp, Homo sapiens
tataacctcggctca

SEQ ID NO: 184161 - DNA, 15 bp, Homo sapiens
gtataacctcggctc

SEQ ID NO: 184162 - DNA, 15 bp, Homo sapiens
ggtataacctcggct

SEQ ID NO: 184163 - DNA, 15 bp, Homo sapiens
tggtataacctcggc

SEQ ID NO: 184164 - DNA, 15 bp, Homo sapiens
gtggtataacctcgg

SEQ ID NO: 184165 - DNA, 15 bp, Homo sapiens
agtggtataacctcg

SEQ ID NO: 184166 - DNA, 15 bp, Homo sapiens
aagtggtataacctc

SEQ ID NO: 184167 - DNA, 15 bp, Homo sapiens
gaagtggtataacct

SEQ ID NO: 184168 - DNA, 15 bp, Homo sapiens
tgaagtggtataacc

SEQ ID NO: 184169 - DNA, 15 bp, Homo sapiens
ctgaagtggtataac

SEQ ID NO: 184170 - DNA, 15 bp, Homo sapiens
gctgaagtggtataa

SEQ ID NO: 184171 - DNA, 15 bp, Homo sapiens
ggctgaagtggtata

SEQ ID NO: 184172 - DNA, 15 bp, Homo sapiens
aggctgaagtggtat

SEQ ID NO: 184173 - DNA, 15 bp, Homo sapiens
caggctgaagtggta

SEQ ID NO: 184174 - DNA, 15 bp, Homo sapiens
ccaggctgaagtggt

SEQ ID NO: 184175 - DNA, 15 bp, Homo sapiens
cccaggctgaagtgg

SEQ ID NO: 184176 - DNA, 15 bp, Homo sapiens
gcccaggctgaagtg

SEQ ID NO: 184177 - DNA, 15 bp, Homo sapiens
tgcccaggctgaagt

SEQ ID NO: 184178 - DNA, 15 bp, Homo sapiens
ttgcccaggctgaag

SEQ ID NO: 184179 - DNA, 15 bp, Homo sapiens
gttgcccaggctgaa

SEQ ID NO: 184180 - DNA, 15 bp, Homo sapiens
tgttgcccaggctga

SEQ ID NO: 184181 - DNA, 15 bp, Homo sapiens
tgctctgttgcccag

SEQ ID NO: 184182 - DNA, 15 bp, Homo sapiens
attgctctgttgccc

SEQ ID NO: 184183 - DNA, 15 bp, Homo sapiens
tattgctctgttgcc

SEQ ID NO: 184184 - DNA, 15 bp, Homo sapiens
gtattgctctgttgc

SEQ ID NO: 184185 - DNA, 15 bp, Homo sapiens
agtattgctctgttg

SEQ ID NO: 184186 - DNA, 15 bp, Homo sapiens
gagtattgctctgtt

SEQ ID NO: 184187 - DNA, 15 bp, Homo sapiens
ggagtattgctctgt

SEQ ID NO: 184188 - DNA, 15 bp, Homo sapiens
tggagtattgctctg

SEQ ID NO: 184189 - DNA, 15 bp, Homo sapiens
atggagtattgctct

SEQ ID NO: 184190 - DNA, 15 bp, Homo sapiens
gatggagtattgctc

SEQ ID NO: 184191 - DNA, 15 bp, Homo sapiens
agatggagtattgct

SEQ ID NO: 184192 - DNA, 15 bp, Homo sapiens
gagatggagtattgc

SEQ ID NO: 184193 - DNA, 15 bp, Homo sapiens
tgagatggagtattg

SEQ ID NO: 184194 - DNA, 15 bp, Homo sapiens
ttgagatggagtatt

SEQ ID NO: 184195 - DNA, 15 bp, Homo sapiens
tttgagatggagtat

SEQ ID NO: 184196 - DNA, 15 bp, Homo sapiens
ttttgagatggagta

SEQ ID NO: 184197 - DNA, 15 bp, Homo sapiens
gtttttttttgagat

SEQ ID NO: 184198 - DNA, 15 bp, Homo sapiens
ggtttttttttgaga

SEQ ID NO: 184199 - DNA, 15 bp, Homo sapiens
gggtttttttttgag

SEQ ID NO: 184200 - DNA, 15 bp, Homo sapiens
tgggtttttttttga

SEQ ID NO: 184201 - DNA, 15 bp, Homo sapiens
ttgggtttttttttg

SEQ ID NO: 184202 - DNA, 15 bp, Homo sapiens
gttgggttttttttt

SEQ ID NO: 184203 - DNA, 15 bp, Homo sapiens
tgttgggtttttttt

SEQ ID NO: 184204 - DNA, 15 bp, Homo sapiens
ttgttgggttttttt

SEQ ID NO: 184205 - DNA, 15 bp, Homo sapiens
gttgttgggtttttt

SEQ ID NO: 184206 - DNA, 15 bp, Homo sapiens
tgttgttgggttttt

SEQ ID NO: 184207 - DNA, 15 bp, Homo sapiens
ttgttgttgggtttt

SEQ ID NO: 184208 - DNA, 15 bp, Homo sapiens
gttgttgttgggttt

SEQ ID NO: 184209 - DNA, 15 bp, Homo sapiens
tgttgttgttgggtt

SEQ ID NO: 184210 - DNA, 15 bp, Homo sapiens
ttgttgttgttgggt

SEQ ID NO: 184211 - DNA, 15 bp, Homo sapiens
gttgttgttgttggg

SEQ ID NO: 184212 - DNA, 15 bp, Homo sapiens
tgttgttgttgttgg

SEQ ID NO: 184213 - DNA, 15 bp, Homo sapiens
ttgttgttgttgttg

SEQ ID NO: 184214 - DNA, 15 bp, Homo sapiens
gttgttgttgttgtt

SEQ ID NO: 184215 - DNA, 15 bp, Homo sapiens
tgttgttgttgttgt

SEQ ID NO: 184216 - DNA, 15 bp, Homo sapiens
tttgttgttgttgtt

SEQ ID NO: 184217 - DNA, 15 bp, Homo sapiens
ttttgttgttgttgt

SEQ ID NO: 184218 - DNA, 15 bp, Homo sapiens
tttttgttgttgttg

SEQ ID NO: 184219 - DNA, 15 bp, Homo sapiens
gtttttgttgttgtt

SEQ ID NO: 184220 - DNA, 15 bp, Homo sapiens
agtttttgttgttgt

SEQ ID NO: 184221 - DNA, 15 bp, Homo sapiens
tagtttttgttgttg

SEQ ID NO: 184222 - DNA, 15 bp, Homo sapiens
ctagtttttgttgtt

SEQ ID NO: 184223 - DNA, 15 bp, Homo sapiens
gctagtttttgttgt

SEQ ID NO: 184224 - DNA, 15 bp, Homo sapiens
agctagtttttgttg

SEQ ID NO: 184225 - DNA, 15 bp, Homo sapiens
gagctagtttttgtt

SEQ ID NO: 184226 - DNA, 15 bp, Homo sapiens
ggagctagtttttgt

SEQ ID NO: 184227 - DNA, 15 bp, Homo sapiens
tggagctagtttttg

SEQ ID NO: 184228 - DNA, 15 bp, Homo sapiens
atggagctagttttt

SEQ ID NO: 184229 - DNA, 15 bp, Homo sapiens
catggagctagtttt

SEQ ID NO: 184230 - DNA, 15 bp, Homo sapiens
tcatggagctagttt

SEQ ID NO: 184231 - DNA, 15 bp, Homo sapiens
gtcatggagctagtt

SEQ ID NO: 184232 - DNA, 15 bp, Homo sapiens
tgtcatggagctagt

SEQ ID NO: 184233 - DNA, 15 bp, Homo sapiens
ttgtcatggagctag

SEQ ID NO: 184234 - DNA, 15 bp, Homo sapiens
cttgtcatggagcta

SEQ ID NO: 184235 - DNA, 15 bp, Homo sapiens
ccttgtcatggagct

SEQ ID NO: 184236 - DNA, 15 bp, Homo sapiens
cccttgtcatggagc

SEQ ID NO: 184237 - DNA, 15 bp, Homo sapiens
gcccttgtcatggag

SEQ ID NO: 184238 - DNA, 15 bp, Homo sapiens
agcccttgtcatgga

SEQ ID NO: 184239 - DNA, 15 bp, Homo sapiens
gagcccttgtcatgg

SEQ ID NO: 184240 - DNA, 15 bp, Homo sapiens
tgagcccttgtcatg

SEQ ID NO: 184241 - DNA, 15 bp, Homo sapiens
ttgagcccttgtcat

SEQ ID NO: 184242 - DNA, 15 bp, Homo sapiens
cttgagcccttgtca

SEQ ID NO: 184243 - DNA, 15 bp, Homo sapiens
gcttgagcccttgtc

SEQ ID NO: 184244 - DNA, 15 bp, Homo sapiens
agcttgagcccttgt

SEQ ID NO: 184245 - DNA, 15 bp, Homo sapiens
cagcttgagcccttg

SEQ ID NO: 184246 - DNA, 15 bp, Homo sapiens
tcagcttgagccctt

SEQ ID NO: 184247 - DNA, 15 bp, Homo sapiens
ctcagcttgagccct

SEQ ID NO: 184248 - DNA, 15 bp, Homo sapiens
tctcagcttgagccc

SEQ ID NO: 184249 - DNA, 15 bp, Homo sapiens
gtctcagcttgagcc

SEQ ID NO: 184250 - DNA, 15 bp, Homo sapiens
agtctcagcttgagc

SEQ ID NO: 184251 - DNA, 15 bp, Homo sapiens
tagtctcagcttgag

SEQ ID NO: 184252 - DNA, 15 bp, Homo sapiens
gtagtctcagcttga

SEQ ID NO: 184253 - DNA, 15 bp, Homo sapiens
tgtagtctcagcttg

SEQ ID NO: 184254 - DNA, 15 bp, Homo sapiens
ttgtagtctcagctt

SEQ ID NO: 184255 - DNA, 15 bp, Homo sapiens
tttgtagtctcagct

SEQ ID NO: 184256 - DNA, 15 bp, Homo sapiens
gtttgtagtctcagc

SEQ ID NO: 184257 - DNA, 15 bp, Homo sapiens
agtttgtagtctcag

SEQ ID NO: 184258 - DNA, 15 bp, Homo sapiens
cagtttgtagtctca

SEQ ID NO: 184259 - DNA, 15 bp, Homo sapiens
ccagtttgtagtctc

SEQ ID NO: 184260 - DNA, 15 bp, Homo sapiens
cccagtttgtagtct

SEQ ID NO: 184261 - DNA, 15 bp, Homo sapiens
tcccagtttgtagtc

SEQ ID NO: 184262 - DNA, 15 bp, Homo sapiens
atcccagtttgtagt

SEQ ID NO: 184263 - DNA, 15 bp, Homo sapiens
catcccagtttgtag

SEQ ID NO: 184264 - DNA, 15 bp, Homo sapiens
ccatcccagtttgta

SEQ ID NO: 184265 - DNA, 15 bp, Homo sapiens
cccatcccagtttgt

SEQ ID NO: 184266 - DNA, 15 bp, Homo sapiens
ccccatcccagtttg

SEQ ID NO: 184267 - DNA, 15 bp, Homo sapiens
accccatcccagttt

SEQ ID NO: 184268 - DNA, 15 bp, Homo sapiens
aaccccatcccagtt

SEQ ID NO: 184269 - DNA, 15 bp, Homo sapiens
gaaccccatcccagt

SEQ ID NO: 184270 - DNA, 15 bp, Homo sapiens
ggaaccccatcccag

SEQ ID NO: 184271 - DNA, 15 bp, Homo sapiens
aggaaccccatccca

SEQ ID NO: 184272 - DNA, 15 bp, Homo sapiens
gaggaaccccatccc

SEQ ID NO: 184273 - DNA, 15 bp, Homo sapiens
tgaggaaccccatcc

SEQ ID NO: 184274 - DNA, 15 bp, Homo sapiens
ttgaggaaccccatc

SEQ ID NO: 184275 - DNA, 15 bp, Homo sapiens
tttgaggaaccccat

SEQ ID NO: 184276 - DNA, 15 bp, Homo sapiens
gtttgaggaacccca

SEQ ID NO: 184277 - DNA, 15 bp, Homo sapiens
agtttgaggaacccc

SEQ ID NO: 184278 - DNA, 15 bp, Homo sapiens
gagtttgaggaaccc

SEQ ID NO: 184279 - DNA, 15 bp, Homo sapiens
ggagtttgaggaacc

SEQ ID NO: 184280 - DNA, 15 bp, Homo sapiens
cggagtttgaggaac

SEQ ID NO: 184281 - DNA, 15 bp, Homo sapiens
tcggagtttgaggaa

SEQ ID NO: 184282 - DNA, 15 bp, Homo sapiens
ttcggagtttgagga

SEQ ID NO: 184283 - DNA, 15 bp, Homo sapiens
tttcggagtttgagg

SEQ ID NO: 184284 - DNA, 15 bp, Homo sapiens
gtttcggagtttgag

SEQ ID NO: 184285 - DNA, 15 bp, Homo sapiens
ggtttcggagtttga

SEQ ID NO: 184286 - DNA, 15 bp, Homo sapiens
gggtttcggagtttg

SEQ ID NO: 184287 - DNA, 15 bp, Homo sapiens
tgggtttcggagttt

SEQ ID NO: 184288 - DNA, 15 bp, Homo sapiens
gtgggtttcggagtt

SEQ ID NO: 184289 - DNA, 15 bp, Homo sapiens
ggtgggtttcggagt

SEQ ID NO: 184290 - DNA, 15 bp, Homo sapiens
tggtgggtttcggag

SEQ ID NO: 184291 - DNA, 15 bp, Homo sapiens
atggtgggtttcgga

SEQ ID NO: 184292 - DNA, 15 bp, Homo sapiens
catggtgggtttcgg

SEQ ID NO: 184293 - DNA, 15 bp, Homo sapiens
ccatggtgggtttcg

SEQ ID NO: 184294 - DNA, 15 bp, Homo sapiens
gccatggtgggtttc

SEQ ID NO: 184295 - DNA, 15 bp, Homo sapiens
ggccatggtgggttt

SEQ ID NO: 184296 - DNA, 15 bp, Homo sapiens
gggccatggtgggtt

SEQ ID NO: 184297 - DNA, 15 bp, Homo sapiens
agggccatggtgggt

SEQ ID NO: 184298 - DNA, 15 bp, Homo sapiens
gagggccatggtggg

SEQ ID NO: 184299 - DNA, 15 bp, Homo sapiens
agagggccatggtgg

SEQ ID NO: 184300 - DNA, 15 bp, Homo sapiens
tagagggccatggtg

SEQ ID NO: 184301 - DNA, 15 bp, Homo sapiens
ttagagggccatggt

SEQ ID NO: 184302 - DNA, 15 bp, Homo sapiens
cttagagggccatgg

SEQ ID NO: 184303 - DNA, 15 bp, Homo sapiens
gcttagagggccatg

SEQ ID NO: 184304 - DNA, 15 bp, Homo sapiens
cgcttagagggccat

SEQ ID NO: 184305 - DNA, 15 bp, Homo sapiens
ccgcttagagggcca

SEQ ID NO: 184306 - DNA, 15 bp, Homo sapiens
tccgcttagagggcc

SEQ ID NO: 184307 - DNA, 15 bp, Homo sapiens
ttccgcttagagggc

SEQ ID NO: 184308 - DNA, 15 bp, Homo sapiens
attccgcttagaggg

SEQ ID NO: 184309 - DNA, 15 bp, Homo sapiens
cattccgcttagagg

SEQ ID NO: 184310 - DNA, 15 bp, Homo sapiens
ccattccgcttagag

SEQ ID NO: 184311 - DNA, 15 bp, Homo sapiens
tccattccgcttaga

SEQ ID NO: 184312 - DNA, 15 bp, Homo sapiens
ctccattccgcttag

SEQ ID NO: 184313 - DNA, 15 bp, Homo sapiens
gctccattccgctta

SEQ ID NO: 184314 - DNA, 15 bp, Homo sapiens
ggctccattccgctt

SEQ ID NO: 184315 - DNA, 15 bp, Homo sapiens
gggctccattccgct

SEQ ID NO: 184316 - DNA, 15 bp, Homo sapiens
ggggctccattccgc

SEQ ID NO: 184317 - DNA, 15 bp, Homo sapiens
gggggctccattccg

SEQ ID NO: 184318 - DNA, 15 bp, Homo sapiens
tgggggctccattcc

SEQ ID NO: 184319 - DNA, 15 bp, Homo sapiens
ttgggggctccattc

SEQ ID NO: 184320 - DNA, 15 bp, Homo sapiens
tttgggggctccatt

SEQ ID NO: 184321 - DNA, 15 bp, Homo sapiens
gtttgggggctccat

SEQ ID NO: 184322 - DNA, 15 bp, Homo sapiens
ggtttgggggctcca

SEQ ID NO: 184323 - DNA, 15 bp, Homo sapiens
gggtttgggggctcc

SEQ ID NO: 184324 - DNA, 15 bp, Homo sapiens
agggtttgggggctc

SEQ ID NO: 184325 - DNA, 15 bp, Homo sapiens
gagggtttgggggct

SEQ ID NO: 184326 - DNA, 15 bp, Homo sapiens
tgagggtttgggggc

SEQ ID NO: 184327 - DNA, 15 bp, Homo sapiens
gtgagggtttggggg

SEQ ID NO: 184328 - DNA, 15 bp, Homo sapiens
agtgagggtttgggg

SEQ ID NO: 184329 - DNA, 15 bp, Homo sapiens
cagtgagggtttggg

SEQ ID NO: 184330 - DNA, 15 bp, Homo sapiens
acagtgagggtttgg

SEQ ID NO: 184331 - DNA, 15 bp, Homo sapiens
gacagtgagggtttg

SEQ ID NO: 184332 - DNA, 15 bp, Homo sapiens
ggacagtgagggttt

SEQ ID NO: 184333 - DNA, 15 bp, Homo sapiens
aggacagtgagggtt

SEQ ID NO: 184334 - DNA, 15 bp, Homo sapiens
gaggacagtgagggt

SEQ ID NO: 184335 - DNA, 15 bp, Homo sapiens
agaggacagtgaggg

SEQ ID NO: 184336 - DNA, 15 bp, Homo sapiens
tagaggacagtgagg

SEQ ID NO: 184337 - DNA, 15 bp, Homo sapiens
gtagaggacagtgag

SEQ ID NO: 184338 - DNA, 15 bp, Homo sapiens
agtagaggacagtga

SEQ ID NO: 184339 - DNA, 15 bp, Homo sapiens
tagtagaggacagtg

SEQ ID NO: 184340 - DNA, 15 bp, Homo sapiens
gtagtagaggacagt

SEQ ID NO: 184341 - DNA, 15 bp, Homo sapiens
ggtagtagaggacag

SEQ ID NO: 184342 - DNA, 15 bp, Homo sapiens
gggtagtagaggaca

SEQ ID NO: 184343 - DNA, 15 bp, Homo sapiens
agggtagtagaggac

SEQ ID NO: 184344 - DNA, 15 bp, Homo sapiens
gagggtagtagagga

SEQ ID NO: 184345 - DNA, 15 bp, Homo sapiens
ggagggtagtagagg

SEQ ID NO: 184346 - DNA, 15 bp, Homo sapiens
tggagggtagtagag

SEQ ID NO: 184347 - DNA, 15 bp, Homo sapiens
gtggagggtagtaga

SEQ ID NO: 184348 - DNA, 15 bp, Homo sapiens
ggtggagggtagtag

SEQ ID NO: 184349 - DNA, 15 bp, Homo sapiens
aggtggagggtagta

SEQ ID NO: 184350 - DNA, 15 bp, Homo sapiens
caggtggagggtagt

SEQ ID NO: 184351 - DNA, 15 bp, Homo sapiens
tcaggtggagggtag

SEQ ID NO: 184352 - DNA, 15 bp, Homo sapiens
atcaggtggagggta

SEQ ID NO: 184353 - DNA, 15 bp, Homo sapiens
catcaggtggagggt

SEQ ID NO: 184354 - DNA, 15 bp, Homo sapiens
acatcaggtggaggg

SEQ ID NO: 184355 - DNA, 15 bp, Homo sapiens
gacatcaggtggagg

SEQ ID NO: 184356 - DNA, 15 bp, Homo sapiens
agacatcaggtggag

SEQ ID NO: 184357 - DNA, 15 bp, Homo sapiens
gagacatcaggtgga

SEQ ID NO: 184358 - DNA, 15 bp, Homo sapiens
ggagacatcaggtgg

SEQ ID NO: 184359 - DNA, 15 bp, Homo sapiens
gggagacatcaggtg

SEQ ID NO: 184360 - DNA, 15 bp, Homo sapiens
ggggagacatcaggt

SEQ ID NO: 184361 - DNA, 15 bp, Homo sapiens
gggggagacatcagg

SEQ ID NO: 184362 - DNA, 15 bp, Homo sapiens
agggggagacatcag

SEQ ID NO: 184363 - DNA, 15 bp, Homo sapiens
cagggggagacatca

SEQ ID NO: 184364 - DNA, 15 bp, Homo sapiens
ccagggggagacatc

SEQ ID NO: 184365 - DNA, 15 bp, Homo sapiens
gccagggggagacat

SEQ ID NO: 184366 - DNA, 15 bp, Homo sapiens
ggccagggggagaca

SEQ ID NO: 184367 - DNA, 15 bp, Homo sapiens
aggccagggggagac

SEQ ID NO: 184368 - DNA, 15 bp, Homo sapiens
aaggccagggggaga

SEQ ID NO: 184369 - DNA, 15 bp, Homo sapiens
gaaggccagggggag

SEQ ID NO: 184370 - DNA, 15 bp, Homo sapiens
ggaaggccaggggga

SEQ ID NO: 184371 - DNA, 15 bp, Homo sapiens
aggaaggccaggggg

SEQ ID NO: 184372 - DNA, 15 bp, Homo sapiens
gaggaaggccagggg

SEQ ID NO: 184373 - DNA, 15 bp, Homo sapiens
agaggaaggccaggg

SEQ ID NO: 184374 - DNA, 15 bp, Homo sapiens
gagaggaaggccagg

SEQ ID NO: 184375 - DNA, 15 bp, Homo sapiens
ggagaggaaggccag

SEQ ID NO: 184376 - DNA, 15 bp, Homo sapiens
tggagaggaaggcca

SEQ ID NO: 184377 - DNA, 15 bp, Homo sapiens
ctggagaggaaggcc

SEQ ID NO: 184378 - DNA, 15 bp, Homo sapiens
actggagaggaaggc

SEQ ID NO: 184379 - DNA, 15 bp, Homo sapiens
cactggagaggaagg

SEQ ID NO: 184380 - DNA, 15 bp, Homo sapiens
ccactggagaggaag

SEQ ID NO: 184381 - DNA, 15 bp, Homo sapiens
tccactggagaggaa

SEQ ID NO: 184382 - DNA, 15 bp, Homo sapiens
ctccactggagagga

SEQ ID NO: 184383 - DNA, 15 bp, Homo sapiens
cctccactggagagg

SEQ ID NO: 184384 - DNA, 15 bp, Homo sapiens
acctccactggagag

SEQ ID NO: 184385 - DNA, 15 bp, Homo sapiens
cacctccactggaga

SEQ ID NO: 184386 - DNA, 15 bp, Homo sapiens
gcacctccactggag

SEQ ID NO: 184387 - DNA, 15 bp, Homo sapiens
ggcacctccactgga

SEQ ID NO: 184388 - DNA, 15 bp, Homo sapiens
aggcacctccactgg

SEQ ID NO: 184389 - DNA, 15 bp, Homo sapiens
gaggcacctccactg

SEQ ID NO: 184390 - DNA, 15 bp, Homo sapiens
agaggcacctccact

SEQ ID NO: 184391 - DNA, 15 bp, Homo sapiens
cagaggcacctccac

SEQ ID NO: 184392 - DNA, 15 bp, Homo sapiens
gcagaggcacctcca

SEQ ID NO: 184393 - DNA, 15 bp, Homo sapiens
agcagaggcacctcc

SEQ ID NO: 184394 - DNA, 15 bp, Homo sapiens
aagcagaggcacctc

SEQ ID NO: 184395 - DNA, 15 bp, Homo sapiens
gaagcagaggcacct

SEQ ID NO: 184396 - DNA, 15 bp, Homo sapiens
ggaagcagaggcacc

SEQ ID NO: 184397 - DNA, 15 bp, Homo sapiens
gggaagcagaggcac

SEQ ID NO: 184398 - DNA, 15 bp, Homo sapiens
ggggaagcagaggca

SEQ ID NO: 184399 - DNA, 15 bp, Homo sapiens
aggggaagcagaggc

SEQ ID NO: 184400 - DNA, 15 bp, Homo sapiens
aaggggaagcagagg

SEQ ID NO: 184401 - DNA, 15 bp, Homo sapiens
gaaggggaagcagag

SEQ ID NO: 184402 - DNA, 15 bp, Homo sapiens
tgaaggggaagcaga

SEQ ID NO: 184403 - DNA, 15 bp, Homo sapiens
gtgaaggggaagcag

SEQ ID NO: 184404 - DNA, 15 bp, Homo sapiens
agtgaaggggaagca

SEQ ID NO: 184405 - DNA, 15 bp, Homo sapiens
gagtgaaggggaagc

SEQ ID NO: 184406 - DNA, 15 bp, Homo sapiens
ggagtgaaggggaag

SEQ ID NO: 184407 - DNA, 15 bp, Homo sapiens
aggagtgaaggggaa

SEQ ID NO: 184408 - DNA, 15 bp, Homo sapiens
caggagtgaagggga

SEQ ID NO: 184409 - DNA, 15 bp, Homo sapiens
tcaggagtgaagggg

SEQ ID NO: 184410 - DNA, 15 bp, Homo sapiens
ctcaggagtgaaggg

SEQ ID NO: 184411 - DNA, 15 bp, Homo sapiens
actcaggagtgaagg

SEQ ID NO: 184412 - DNA, 15 bp, Homo sapiens
gactcaggagtgaag

SEQ ID NO: 184413 - DNA, 15 bp, Homo sapiens
cgactcaggagtgaa

SEQ ID NO: 184414 - DNA, 15 bp, Homo sapiens
tcgactcaggagtga

SEQ ID NO: 184415 - DNA, 15 bp, Homo sapiens
ctcgactcaggagtg

SEQ ID NO: 184416 - DNA, 15 bp, Homo sapiens
cctcgactcaggagt

SEQ ID NO: 184417 - DNA, 15 bp, Homo sapiens
ccctcgactcaggag

SEQ ID NO: 184418 - DNA, 15 bp, Homo sapiens
gccctcgactcagga

SEQ ID NO: 184419 - DNA, 15 bp, Homo sapiens
agccctcgactcagg

SEQ ID NO: 184420 - DNA, 15 bp, Homo sapiens
cagccctcgactcag

SEQ ID NO: 184421 - DNA, 15 bp, Homo sapiens
tcagccctcgactca

SEQ ID NO: 184422 - DNA, 15 bp, Homo sapiens
gtcagccctcgactc

SEQ ID NO: 184423 - DNA, 15 bp, Homo sapiens
agtcagccctcgact

SEQ ID NO: 184424 - DNA, 15 bp, Homo sapiens
cagtcagccctcgac

SEQ ID NO: 184425 - DNA, 15 bp, Homo sapiens
gcagtcagccctcga

SEQ ID NO: 184426 - DNA, 15 bp, Homo sapiens
agcagtcagccctcg

SEQ ID NO: 184427 - DNA, 15 bp, Homo sapiens
gagcagtcagccctc

SEQ ID NO: 184428 - DNA, 15 bp, Homo sapiens
ggagcagtcagccct

SEQ ID NO: 184429 - DNA, 15 bp, Homo sapiens
cggagcagtcagccc

SEQ ID NO: 184430 - DNA, 15 bp, Homo sapiens
acggagcagtcagcc

SEQ ID NO: 184431 - DNA, 15 bp, Homo sapiens
aacggagcagtcagc

SEQ ID NO: 184432 - DNA, 15 bp, Homo sapiens
gaacggagcagtcag

SEQ ID NO: 184433 - DNA, 15 bp, Homo sapiens
cgaacggagcagtca

SEQ ID NO: 184434 - DNA, 15 bp, Homo sapiens
tcgaacggagcagtc

SEQ ID NO: 184435 - DNA, 15 bp, Homo sapiens
gtcgaacggagcagt

SEQ ID NO: 184436 - DNA, 15 bp, Homo sapiens
tgtcgaacggagcag

SEQ ID NO: 184437 - DNA, 15 bp, Homo sapiens
ttgtcgaacggagca

SEQ ID NO: 184438 - DNA, 15 bp, Homo sapiens
cttgtcgaacggagc

SEQ ID NO: 184439 - DNA, 15 bp, Homo sapiens
gcttgtcgaacggag

SEQ ID NO: 184440 - DNA, 15 bp, Homo sapiens
agcttgtcgaacgga

SEQ ID NO: 184441 - DNA, 15 bp, Homo sapiens
gagcttgtcgaacgg

SEQ ID NO: 184442 - DNA, 15 bp, Homo sapiens
agagcttgtcgaacg

SEQ ID NO: 184443 - DNA, 15 bp, Homo sapiens
gagagcttgtcgaac

SEQ ID NO: 184444 - DNA, 15 bp, Homo sapiens
tgagagcttgtcgaa

SEQ ID NO: 184445 - DNA, 15 bp, Homo sapiens
gtgagagcttgtcga

SEQ ID NO: 184446 - DNA, 15 bp, Homo sapiens
ggtgagagcttgtcg

SEQ ID NO: 184447 - DNA, 15 bp, Homo sapiens
gggtgagagcttgtc

SEQ ID NO: 184448 - DNA, 15 bp, Homo sapiens
tgggtgagagcttgt

SEQ ID NO: 184449 - DNA, 15 bp, Homo sapiens
ctgggtgagagcttg

SEQ ID NO: 184450 - DNA, 15 bp, Homo sapiens
gctgggtgagagctt

SEQ ID NO: 184451 - DNA, 15 bp, Homo sapiens
ggctgggtgagagct

SEQ ID NO: 184452 - DNA, 15 bp, Homo sapiens
tggctgggtgagagc

SEQ ID NO: 184453 - DNA, 15 bp, Homo sapiens
ctggctgggtgagag

SEQ ID NO: 184454 - DNA, 15 bp, Homo sapiens
cctggctgggtgaga

SEQ ID NO: 184455 - DNA, 15 bp, Homo sapiens
acctggctgggtgag

SEQ ID NO: 184456 - DNA, 15 bp, Homo sapiens
gacctggctgggtga

SEQ ID NO: 184457 - DNA, 15 bp, Homo sapiens
ggacctggctgggtg

SEQ ID NO: 184458 - DNA, 15 bp, Homo sapiens
gggacctggctgggt

SEQ ID NO: 184459 - DNA, 15 bp, Homo sapiens
ggggacctggctggg

SEQ ID NO: 184460 - DNA, 15 bp, Homo sapiens
aggggacctggctgg

SEQ ID NO: 184461 - DNA, 15 bp, Homo sapiens
gaggggacctggctg

SEQ ID NO: 184462 - DNA, 15 bp, Homo sapiens
cgaggggacctggct

SEQ ID NO: 184463 - DNA, 15 bp, Homo sapiens
gcgaggggacctggc

SEQ ID NO: 184464 - DNA, 15 bp, Homo sapiens
tgcgaggggacctgg

SEQ ID NO: 184465 - DNA, 15 bp, Homo sapiens
ctgcgaggggacctg

SEQ ID NO: 184466 - DNA, 15 bp, Homo sapiens
cctgcgaggggacct

SEQ ID NO: 184467 - DNA, 15 bp, Homo sapiens
acctgcgaggggacc

SEQ ID NO: 184468 - DNA, 15 bp, Homo sapiens
aacctgcgaggggac

SEQ ID NO: 184469 - DNA, 15 bp, Homo sapiens
taacctgcgagggga

SEQ ID NO: 184470 - DNA, 15 bp, Homo sapiens
ctaacctgcgagggg

SEQ ID NO: 184471 - DNA, 15 bp, Homo sapiens
cctaacctgcgaggg

SEQ ID NO: 184472 - DNA, 15 bp, Homo sapiens
ccctaacctgcgagg

SEQ ID NO: 184473 - DNA, 15 bp, Homo sapiens
gccctaacctgcgag

SEQ ID NO: 184474 - DNA, 15 bp, Homo sapiens
ggccctaacctgcga

SEQ ID NO: 184475 - DNA, 15 bp, Homo sapiens
cggccctaacctgcg

SEQ ID NO: 184476 - DNA, 15 bp, Homo sapiens
acggccctaacctgc

SEQ ID NO: 184477 - DNA, 15 bp, Homo sapiens
gacggccctaacctg

SEQ ID NO: 184478 - DNA, 15 bp, Homo sapiens
agacggccctaacct

SEQ ID NO: 184479 - DNA, 15 bp, Homo sapiens
gagacggccctaacc

SEQ ID NO: 184480 - DNA, 15 bp, Homo sapiens
tgagacggccctaac

SEQ ID NO: 184481 - DNA, 15 bp, Homo sapiens
ctgagacggccctaa

SEQ ID NO: 184482 - DNA, 15 bp, Homo sapiens
gctgagacggcccta

SEQ ID NO: 184483 - DNA, 15 bp, Homo sapiens
tgctgagacggccct

SEQ ID NO: 184484 - DNA, 15 bp, Homo sapiens
gtgctgagacggccc

SEQ ID NO: 184485 - DNA, 15 bp, Homo sapiens
agtgctgagacggcc

SEQ ID NO: 184486 - DNA, 15 bp, Homo sapiens
cagtgctgagacggc

SEQ ID NO: 184487 - DNA, 15 bp, Homo sapiens
tcagtgctgagacgg

SEQ ID NO: 184488 - DNA, 15 bp, Homo sapiens
ttcagtgctgagacg

SEQ ID NO: 184489 - DNA, 15 bp, Homo sapiens
tttcagtgctgagac

SEQ ID NO: 184490 - DNA, 15 bp, Homo sapiens
ctttcagtgctgaga

SEQ ID NO: 184491 - DNA, 15 bp, Homo sapiens
gctttcagtgctgag

SEQ ID NO: 184492 - DNA, 15 bp, Homo sapiens
tgctttcagtgctga

SEQ ID NO: 184493 - DNA, 15 bp, Homo sapiens
ctgctttcagtgctg

SEQ ID NO: 184494 - DNA, 15 bp, Homo sapiens
gctgctttcagtgct

SEQ ID NO: 184495 - DNA, 15 bp, Homo sapiens
agctgctttcagtgc

SEQ ID NO: 184496 - DNA, 15 bp, Homo sapiens
cagctgctttcagtg

SEQ ID NO: 184497 - DNA, 15 bp, Homo sapiens
gcagctgctttcagt

SEQ ID NO: 184498 - DNA, 15 bp, Homo sapiens
ggcagctgctttcag

SEQ ID NO: 184499 - DNA, 15 bp, Homo sapiens
gggcagctgctttca

SEQ ID NO: 184500 - DNA, 15 bp, Homo sapiens
agggcagctgctttc

SEQ ID NO: 184501 - DNA, 15 bp, Homo sapiens
gagggcagctgcttt

SEQ ID NO: 184502 - DNA, 15 bp, Homo sapiens
ggagggcagctgctt

SEQ ID NO: 184503 - DNA, 15 bp, Homo sapiens
tggagggcagctgct

SEQ ID NO: 184504 - DNA, 15 bp, Homo sapiens
gtggagggcagctgc

SEQ ID NO: 184505 - DNA, 15 bp, Homo sapiens
agtggagggcagctg

SEQ ID NO: 184506 - DNA, 15 bp, Homo sapiens
gagtggagggcagct

SEQ ID NO: 184507 - DNA, 15 bp, Homo sapiens
ggagtggagggcagc

SEQ ID NO: 184508 - DNA, 15 bp, Homo sapiens
tggagtggagggcag

SEQ ID NO: 184509 - DNA, 15 bp, Homo sapiens
gtggagtggagggca

SEQ ID NO: 184510 - DNA, 15 bp, Homo sapiens
agtggagtggagggc

SEQ ID NO: 184511 - DNA, 15 bp, Homo sapiens
cagtggagtggaggg

SEQ ID NO: 184512 - DNA, 15 bp, Homo sapiens
gcagtggagtggagg

SEQ ID NO: 184513 - DNA, 15 bp, Homo sapiens
ggcagtggagtggag

SEQ ID NO: 184514 - DNA, 15 bp, Homo sapiens
gggcagtggagtgga

SEQ ID NO: 184515 - DNA, 15 bp, Homo sapiens
agggcagtggagtgg

SEQ ID NO: 184516 - DNA, 15 bp, Homo sapiens
cagggcagtggagtg

SEQ ID NO: 184517 - DNA, 15 bp, Homo sapiens
gcagggcagtggagt

SEQ ID NO: 184518 - DNA, 15 bp, Homo sapiens
ggcagggcagtggag

SEQ ID NO: 184519 - DNA, 15 bp, Homo sapiens
aggcagggcagtgga

SEQ ID NO: 184520 - DNA, 15 bp, Homo sapiens
caggcagggcagtgg

SEQ ID NO: 184521 - DNA, 15 bp, Homo sapiens
gcaggcagggcagtg

SEQ ID NO: 184522 - DNA, 15 bp, Homo sapiens
agcaggcagggcagt

SEQ ID NO: 184523 - DNA, 15 bp, Homo sapiens
gagcaggcagggcag

SEQ ID NO: 184524 - DNA, 15 bp, Homo sapiens
agagcaggcagggca

SEQ ID NO: 184525 - DNA, 15 bp, Homo sapiens
cagagcaggcagggc

SEQ ID NO: 184526 - DNA, 15 bp, Homo sapiens
ccagagcaggcaggg

SEQ ID NO: 184527 - DNA, 15 bp, Homo sapiens
tccagagcaggcagg

SEQ ID NO: 184528 - DNA, 15 bp, Homo sapiens
ttccagagcaggcag

SEQ ID NO: 184529 - DNA, 15 bp, Homo sapiens
gttccagagcaggca

SEQ ID NO: 184530 - DNA, 15 bp, Homo sapiens
agttccagagcaggc

SEQ ID NO: 184531 - DNA, 15 bp, Homo sapiens
tagttccagagcagg

SEQ ID NO: 184532 - DNA, 15 bp, Homo sapiens
atagttccagagcag

SEQ ID NO: 184533 - DNA, 15 bp, Homo sapiens
aatagttccagagca

SEQ ID NO: 184534 - DNA, 15 bp, Homo sapiens
aaatagttccagagc

SEQ ID NO: 184535 - DNA, 15 bp, Homo sapiens
gaaatagttccagag

SEQ ID NO: 184536 - DNA, 15 bp, Homo sapiens
tgaaatagttccaga

SEQ ID NO: 184537 - DNA, 15 bp, Homo sapiens
ctgaaatagttccag

SEQ ID NO: 184538 - DNA, 15 bp, Homo sapiens
cctgaaatagttcca

SEQ ID NO: 184539 - DNA, 15 bp, Homo sapiens
ccctgaaatagttcc

SEQ ID NO: 184540 - DNA, 15 bp, Homo sapiens
gccctgaaatagttc

SEQ ID NO: 184541 - DNA, 15 bp, Homo sapiens
agccctgaaatagtt

SEQ ID NO: 184542 - DNA, 15 bp, Homo sapiens
aagccctgaaatagt

SEQ ID NO: 184543 - DNA, 15 bp, Homo sapiens
caagccctgaaatag

SEQ ID NO: 184544 - DNA, 15 bp, Homo sapiens
gcaagccctgaaata

SEQ ID NO: 184545 - DNA, 15 bp, Homo sapiens
tgcaagccctgaaat

SEQ ID NO: 184546 - DNA, 15 bp, Homo sapiens
ttgcaagccctgaaa

SEQ ID NO: 184547 - DNA, 15 bp, Homo sapiens
attgcaagccctgaa

SEQ ID NO: 184548 - DNA, 15 bp, Homo sapiens
cattgcaagccctga

SEQ ID NO: 184549 - DNA, 15 bp, Homo sapiens
tcattgcaagccctg

SEQ ID NO: 184550 - DNA, 15 bp, Homo sapiens
atcattgcaagccct

SEQ ID NO: 184551 - DNA, 15 bp, Homo sapiens
gatcattgcaagccc

SEQ ID NO: 184552 - DNA, 15 bp, Homo sapiens
agatcattgcaagcc

SEQ ID NO: 184553 - DNA, 15 bp, Homo sapiens
cagatcattgcaagc

SEQ ID NO: 184554 - DNA, 15 bp, Homo sapiens
acagatcattgcaag

SEQ ID NO: 184555 - DNA, 15 bp, Homo sapiens
gacagatcattgcaa

SEQ ID NO: 184556 - DNA, 15 bp, Homo sapiens
agacagatcattgca

SEQ ID NO: 184557 - DNA, 15 bp, Homo sapiens
aagacagatcattgc

SEQ ID NO: 184558 - DNA, 15 bp, Homo sapiens
gaagacagatcattg

SEQ ID NO: 184559 - DNA, 15 bp, Homo sapiens
ggaagacagatcatt

SEQ ID NO: 184560 - DNA, 15 bp, Homo sapiens
aggaagacagatcat

SEQ ID NO: 184561 - DNA, 15 bp, Homo sapiens
taggaagacagatca

SEQ ID NO: 184562 - DNA, 15 bp, Homo sapiens
gtaggaagacagatc

SEQ ID NO: 184563 - DNA, 15 bp, Homo sapiens
agtaggaagacagat

SEQ ID NO: 184564 - DNA, 15 bp, Homo sapiens
aagtaggaagacaga

SEQ ID NO: 184565 - DNA, 15 bp, Homo sapiens
caagtaggaagacag

SEQ ID NO: 184566 - DNA, 15 bp, Homo sapiens
acaagtaggaagaca

SEQ ID NO: 184567 - DNA, 15 bp, Homo sapiens
gacaagtaggaagac

SEQ ID NO: 184568 - DNA, 15 bp, Homo sapiens
agacaagtaggaaga

SEQ ID NO: 184569 - DNA, 15 bp, Homo sapiens
cagacaagtaggaag

SEQ ID NO: 184570 - DNA, 15 bp, Homo sapiens
acagacaagtaggaa

SEQ ID NO: 184571 - DNA, 15 bp, Homo sapiens
cacagacaagtagga

SEQ ID NO: 184572 - DNA, 15 bp, Homo sapiens
tcacagacaagtagg

SEQ ID NO: 184573 - DNA, 15 bp, Homo sapiens
ttcacagacaagtag

SEQ ID NO: 184574 - DNA, 15 bp, Homo sapiens
gttcacagacaagta

SEQ ID NO: 184575 - DNA, 15 bp, Homo sapiens
cgttcacagacaagt

SEQ ID NO: 184576 - DNA, 15 bp, Homo sapiens
acgttcacagacaag

SEQ ID NO: 184577 - DNA, 15 bp, Homo sapiens
gacgttcacagacaa

SEQ ID NO: 184578 - DNA, 15 bp, Homo sapiens
ggacgttcacagaca

SEQ ID NO: 184579 - DNA, 15 bp, Homo sapiens
tggacgttcacagac

SEQ ID NO: 184580 - DNA, 15 bp, Homo sapiens
ttggacgttcacaga

SEQ ID NO: 184581 - DNA, 15 bp, Homo sapiens
tttggacgttcacag

SEQ ID NO: 184582 - DNA, 15 bp, Homo sapiens
ctttggacgttcaca

SEQ ID NO: 184583 - DNA, 15 bp, Homo sapiens
cctttggacgttcac

SEQ ID NO: 184584 - DNA, 15 bp, Homo sapiens
gcctttggacgttca

SEQ ID NO: 184585 - DNA, 15 bp, Homo sapiens
tgcctttggacgttc

SEQ ID NO: 184586 - DNA, 15 bp, Homo sapiens
ttgcctttggacgtt

SEQ ID NO: 184587 - DNA, 15 bp, Homo sapiens
tttgcctttggacgt

SEQ ID NO: 184588 - DNA, 15 bp, Homo sapiens
ctttgcctttggacg

SEQ ID NO: 184589 - DNA, 15 bp, Homo sapiens
tctttgcctttggac

SEQ ID NO: 184590 - DNA, 15 bp, Homo sapiens
ctctttgcctttgga

SEQ ID NO: 184591 - DNA, 15 bp, Homo sapiens
gctctttgcctttgg

SEQ ID NO: 184592 - DNA, 15 bp, Homo sapiens
cgctctttgcctttg

SEQ ID NO: 184593 - DNA, 15 bp, Homo sapiens
ccgctctttgccttt

SEQ ID NO: 184594 - DNA, 15 bp, Homo sapiens
cccgctctttgcctt

SEQ ID NO: 184595 - DNA, 15 bp, Homo sapiens
acccgctctttgcct

SEQ ID NO: 184596 - DNA, 15 bp, Homo sapiens
gacccgctctttgcc

SEQ ID NO: 184597 - DNA, 15 bp, Homo sapiens
agacccgctctttgc

SEQ ID NO: 184598 - DNA, 15 bp, Homo sapiens
aagacccgctctttg

SEQ ID NO: 184599 - DNA, 15 bp, Homo sapiens
gaagacccgctcttt

SEQ ID NO: 184600 - DNA, 15 bp, Homo sapiens
agaagacccgctctt

SEQ ID NO: 184601 - DNA, 15 bp, Homo sapiens
aagaagacccgctct

SEQ ID NO: 184602 - DNA, 15 bp, Homo sapiens
gaagaagacccgctc

SEQ ID NO: 184603 - DNA, 15 bp, Homo sapiens
ggaagaagacccgct

SEQ ID NO: 184604 - DNA, 15 bp, Homo sapiens
aggaagaagacccgc

SEQ ID NO: 184605 - DNA, 15 bp, Homo sapiens
gaggaagaagacccg

SEQ ID NO: 184606 - DNA, 15 bp, Homo sapiens
tgaggaagaagaccc

SEQ ID NO: 184607 - DNA, 15 bp, Homo sapiens
gtgaggaagaagacc

SEQ ID NO: 184608 - DNA, 15 bp, Homo sapiens
ggtgaggaagaagac

SEQ ID NO: 184609 - DNA, 15 bp, Homo sapiens
cggtgaggaagaaga

SEQ ID NO: 184610 - DNA, 15 bp, Homo sapiens
acggtgaggaagaag

SEQ ID NO: 184611 - DNA, 15 bp, Homo sapiens
cacggtgaggaagaa

SEQ ID NO: 184612 - DNA, 15 bp, Homo sapiens
ccacggtgaggaaga

SEQ ID NO: 184613 - DNA, 15 bp, Homo sapiens
accacggtgaggaag

SEQ ID NO: 184614 - DNA, 15 bp, Homo sapiens
aaccacggtgaggaa

SEQ ID NO: 184615 - DNA, 15 bp, Homo sapiens
gaaccacggtgagga

SEQ ID NO: 184616 - DNA, 15 bp, Homo sapiens
ggaaccacggtgagg

SEQ ID NO: 184617 - DNA, 15 bp, Homo sapiens
gggaaccacggtgag

SEQ ID NO: 184618 - DNA, 15 bp, Homo sapiens
tgggaaccacggtga

SEQ ID NO: 184619 - DNA, 15 bp, Homo sapiens
ctgggaaccacggtg

SEQ ID NO: 184620 - DNA, 15 bp, Homo sapiens
gctgggaaccacggt

SEQ ID NO: 184621 - DNA, 15 bp, Homo sapiens
tgctgggaaccacgg

SEQ ID NO: 184622 - DNA, 15 bp, Homo sapiens
gtgctgggaaccacg

SEQ ID NO: 184623 - DNA, 15 bp, Homo sapiens
ggtgctgggaaccac

SEQ ID NO: 184624 - DNA, 15 bp, Homo sapiens
tggtgctgggaacca

SEQ ID NO: 184625 - DNA, 15 bp, Homo sapiens
ctggtgctgggaacc

SEQ ID NO: 184626 - DNA, 15 bp, Homo sapiens
gctggtgctgggaac

SEQ ID NO: 184627 - DNA, 15 bp, Homo sapiens
ggctggtgctgggaa

SEQ ID NO: 184628 - DNA, 15 bp, Homo sapiens
tggctggtgctggga

SEQ ID NO: 184629 - DNA, 15 bp, Homo sapiens
gtggctggtgctggg

SEQ ID NO: 184630 - DNA, 15 bp, Homo sapiens
tgtggctggtgctgg

SEQ ID NO: 184631 - DNA, 15 bp, Homo sapiens
ttgtggctggtgctg

SEQ ID NO: 184632 - DNA, 15 bp, Homo sapiens
attgtggctggtgct

SEQ ID NO: 184633 - DNA, 15 bp, Homo sapiens
cattgtggctggtgc

SEQ ID NO: 184634 - DNA, 15 bp, Homo sapiens
gcattgtggctggtg

SEQ ID NO: 184635 - DNA, 15 bp, Homo sapiens
ggcattgtggctggt

SEQ ID NO: 184636 - DNA, 15 bp, Homo sapiens
aggcattgtggctgg

SEQ ID NO: 184637 - DNA, 15 bp, Homo sapiens
caggcattgtggctg

SEQ ID NO: 184638 - DNA, 15 bp, Homo sapiens
ccaggcattgtggct

SEQ ID NO: 184639 - DNA, 15 bp, Homo sapiens
gccaggcattgtggc

SEQ ID NO: 184640 - DNA, 15 bp, Homo sapiens
tgccaggcattgtgg

SEQ ID NO: 184641 - DNA, 15 bp, Homo sapiens
gtgccaggcattgtg

SEQ ID NO: 184642 - DNA, 15 bp, Homo sapiens
tgtgccaggcattgt

SEQ ID NO: 184643 - DNA, 15 bp, Homo sapiens
ctgtgccaggcattg

SEQ ID NO: 184644 - DNA, 15 bp, Homo sapiens
gctgtgccaggcatt

SEQ ID NO: 184645 - DNA, 15 bp, Homo sapiens
ggctgtgccaggcat

SEQ ID NO: 184646 - DNA, 15 bp, Homo sapiens
aggctgtgccaggca

SEQ ID NO: 184647 - DNA, 15 bp, Homo sapiens
taggctgtgccaggc

SEQ ID NO: 184648 - DNA, 15 bp, Homo sapiens
ctaggctgtgccagg

SEQ ID NO: 184649 - DNA, 15 bp, Homo sapiens
cctaggctgtgccag

SEQ ID NO: 184650 - DNA, 15 bp, Homo sapiens
tcctaggctgtgcca

SEQ ID NO: 184651 - DNA, 15 bp, Homo sapiens
ctcctaggctgtgcc

SEQ ID NO: 184652 - DNA, 15 bp, Homo sapiens
actcctaggctgtgc

SEQ ID NO: 184653 - DNA, 15 bp, Homo sapiens
aactcctaggctgtg

SEQ ID NO: 184654 - DNA, 15 bp, Homo sapiens
caactcctaggctgt

SEQ ID NO: 184655 - DNA, 15 bp, Homo sapiens
tcaactcctaggctg

SEQ ID NO: 184656 - DNA, 15 bp, Homo sapiens
ttcaactcctaggct

SEQ ID NO: 184657 - DNA, 15 bp, Homo sapiens
cttcaactcctaggc

SEQ ID NO: 184658 - DNA, 15 bp, Homo sapiens
acttcaactcctagg

SEQ ID NO: 184659 - DNA, 15 bp, Homo sapiens
tacttcaactcctag

SEQ ID NO: 184660 - DNA, 15 bp, Homo sapiens
ttacttcaactccta

SEQ ID NO: 184661 - DNA, 15 bp, Homo sapiens
cttacttcaactcct

SEQ ID NO: 184662 - DNA, 15 bp, Homo sapiens
acttacttcaactcc

SEQ ID NO: 184663 - DNA, 15 bp, Homo sapiens
tacttacttcaactc

SEQ ID NO: 184664 - DNA, 15 bp, Homo sapiens
gtacttacttcaact

SEQ ID NO: 184665 - DNA, 15 bp, Homo sapiens
agtacttacttcaac

SEQ ID NO: 184666 - DNA, 15 bp, Homo sapiens
tagtacttacttcaa

SEQ ID NO: 184667 - DNA, 15 bp, Homo sapiens
ctagtacttacttca

SEQ ID NO: 184668 - DNA, 15 bp, Homo sapiens
gctagtacttacttc

SEQ ID NO: 184669 - DNA, 15 bp, Homo sapiens
agctagtacttactt

SEQ ID NO: 184670 - DNA, 15 bp, Homo sapiens
cagctagtacttact

SEQ ID NO: 184671 - DNA, 15 bp, Homo sapiens
tcagctagtacttac

SEQ ID NO: 184672 - DNA, 15 bp, Homo sapiens
ctcagctagtactta

SEQ ID NO: 184673 - DNA, 15 bp, Homo sapiens
gctcagctagtactt

SEQ ID NO: 184674 - DNA, 15 bp, Homo sapiens
cgctcagctagtact

SEQ ID NO: 184675 - DNA, 15 bp, Homo sapiens
tcgctcagctagtac

SEQ ID NO: 184676 - DNA, 15 bp, Homo sapiens
ctcgctcagctagta

SEQ ID NO: 184677 - DNA, 15 bp, Homo sapiens
tctcgctcagctagt

SEQ ID NO: 184678 - DNA, 15 bp, Homo sapiens
gtctcgctcagctag

SEQ ID NO: 184679 - DNA, 15 bp, Homo sapiens
ggtctcgctcagcta

SEQ ID NO: 184680 - DNA, 15 bp, Homo sapiens
tggtctcgctcagct

SEQ ID NO: 184681 - DNA, 15 bp, Homo sapiens
ttggtctcgctcagc

SEQ ID NO: 184682 - DNA, 15 bp, Homo sapiens
tttggtctcgctcag

SEQ ID NO: 184683 - DNA, 15 bp, Homo sapiens
ttttggtctcgctca

SEQ ID NO: 184684 - DNA, 15 bp, Homo sapiens
cttttggtctcgctc

SEQ ID NO: 184685 - DNA, 15 bp, Homo sapiens
gcttttggtctcgct

SEQ ID NO: 184686 - DNA, 15 bp, Homo sapiens
ggcttttggtctcgc

SEQ ID NO: 184687 - DNA, 15 bp, Homo sapiens
aggcttttggtctcg

SEQ ID NO: 184688 - DNA, 15 bp, Homo sapiens
caggcttttggtctc

SEQ ID NO: 184689 - DNA, 15 bp, Homo sapiens
ccaggcttttggtct

SEQ ID NO: 184690 - DNA, 15 bp, Homo sapiens
cccaggcttttggtc

SEQ ID NO: 184691 - DNA, 15 bp, Homo sapiens
ccccaggcttttggt

SEQ ID NO: 184692 - DNA, 15 bp, Homo sapiens
cccccaggcttttgg

SEQ ID NO: 184693 - DNA, 15 bp, Homo sapiens
acccccaggcttttg

SEQ ID NO: 184694 - DNA, 15 bp, Homo sapiens
tacccccaggctttt

SEQ ID NO: 184695 - DNA, 15 bp, Homo sapiens
ctacccccaggcttt

SEQ ID NO: 184696 - DNA, 15 bp, Homo sapiens
tctacccccaggctt

SEQ ID NO: 184697 - DNA, 15 bp, Homo sapiens
gtctacccccaggct

SEQ ID NO: 184698 - DNA, 15 bp, Homo sapiens
ggtctacccccaggc

SEQ ID NO: 184699 - DNA, 15 bp, Homo sapiens
tggtctacccccagg

SEQ ID NO: 184700 - DNA, 15 bp, Homo sapiens
ctggtctacccccag

SEQ ID NO: 184701 - DNA, 15 bp, Homo sapiens
cctggtctaccccca

SEQ ID NO: 184702 - DNA, 15 bp, Homo sapiens
tcctggtctaccccc

SEQ ID NO: 184703 - DNA, 15 bp, Homo sapiens
ttcctggtctacccc

SEQ ID NO: 184704 - DNA, 15 bp, Homo sapiens
gttcctggtctaccc

SEQ ID NO: 184705 - DNA, 15 bp, Homo sapiens
agttcctggtctacc

SEQ ID NO: 184706 - DNA, 15 bp, Homo sapiens
cagttcctggtctac

SEQ ID NO: 184707 - DNA, 15 bp, Homo sapiens
gcagttcctggtcta

SEQ ID NO: 184708 - DNA, 15 bp, Homo sapiens
tgcagttcctggtct

SEQ ID NO: 184709 - DNA, 15 bp, Homo sapiens
ctgcagttcctggtc

SEQ ID NO: 184710 - DNA, 15 bp, Homo sapiens
cctgcagttcctggt

SEQ ID NO: 184711 - DNA, 15 bp, Homo sapiens
gcctgcagttcctgg

SEQ ID NO: 184712 - DNA, 15 bp, Homo sapiens
agcctgcagttcctg

SEQ ID NO: 184713 - DNA, 15 bp, Homo sapiens
aagcctgcagttcct

SEQ ID NO: 184714 - DNA, 15 bp, Homo sapiens
caagcctgcagttcc

SEQ ID NO: 184715 - DNA, 15 bp, Homo sapiens
gcaagcctgcagttc

SEQ ID NO: 184716 - DNA, 15 bp, Homo sapiens
agcaagcctgcagtt

SEQ ID NO: 184717 - DNA, 15 bp, Homo sapiens
gagcaagcctgcagt

SEQ ID NO: 184718 - DNA, 15 bp, Homo sapiens
agagcaagcctgcag

SEQ ID NO: 184719 - DNA, 15 bp, Homo sapiens
cagagcaagcctgca

SEQ ID NO: 184720 - DNA, 15 bp, Homo sapiens
ccagagcaagcctgc

SEQ ID NO: 184721 - DNA, 15 bp, Homo sapiens
cccagagcaagcctg

SEQ ID NO: 184722 - DNA, 15 bp, Homo sapiens
gcccagagcaagcct

SEQ ID NO: 184723 - DNA, 15 bp, Homo sapiens
ggcccagagcaagcc

SEQ ID NO: 184724 - DNA, 15 bp, Homo sapiens
aggcccagagcaagc

SEQ ID NO: 184725 - DNA, 15 bp, Homo sapiens
aaggcccagagcaag

SEQ ID NO: 184726 - DNA, 15 bp, Homo sapiens
caaggcccagagcaa

SEQ ID NO: 184727 - DNA, 15 bp, Homo sapiens
gcaaggcccagagca

SEQ ID NO: 184728 - DNA, 15 bp, Homo sapiens
tgcaaggcccagagc

SEQ ID NO: 184729 - DNA, 15 bp, Homo sapiens
gtgcaaggcccagag

SEQ ID NO: 184730 - DNA, 15 bp, Homo sapiens
agtgcaaggcccaga

SEQ ID NO: 184731 - DNA, 15 bp, Homo sapiens
aagtgcaaggcccag

SEQ ID NO: 184732 - DNA, 15 bp, Homo sapiens
gaagtgcaaggccca

SEQ ID NO: 184733 - DNA, 15 bp, Homo sapiens
ggaagtgcaaggccc

SEQ ID NO: 184734 - DNA, 15 bp, Homo sapiens
aggaagtgcaaggcc

SEQ ID NO: 184735 - DNA, 15 bp, Homo sapiens
caggaagtgcaaggc

SEQ ID NO: 184736 - DNA, 15 bp, Homo sapiens
acaggaagtgcaagg

SEQ ID NO: 184737 - DNA, 15 bp, Homo sapiens
cacaggaagtgcaag

SEQ ID NO: 184738 - DNA, 15 bp, Homo sapiens
gcacaggaagtgcaa

SEQ ID NO: 184739 - DNA, 15 bp, Homo sapiens
tgcacaggaagtgca

SEQ ID NO: 184740 - DNA, 15 bp, Homo sapiens
gtgcacaggaagtgc

SEQ ID NO: 184741 - DNA, 15 bp, Homo sapiens
ggtgcacaggaagtg

SEQ ID NO: 184742 - DNA, 15 bp, Homo sapiens
aggtgcacaggaagt

SEQ ID NO: 184743 - DNA, 15 bp, Homo sapiens
caggtgcacaggaag

SEQ ID NO: 184744 - DNA, 15 bp, Homo sapiens
acaggtgcacaggaa

SEQ ID NO: 184745 - DNA, 15 bp, Homo sapiens
cacaggtgcacagga

SEQ ID NO: 184746 - DNA, 15 bp, Homo sapiens
gcacaggtgcacagg

SEQ ID NO: 184747 - DNA, 15 bp, Homo sapiens
tgcacaggtgcacag

SEQ ID NO: 184748 - DNA, 15 bp, Homo sapiens
atgcacaggtgcaca

SEQ ID NO: 184749 - DNA, 15 bp, Homo sapiens
gatgcacaggtgcac

SEQ ID NO: 184750 - DNA, 15 bp, Homo sapiens
ggatgcacaggtgca

SEQ ID NO: 184751 - DNA, 15 bp, Homo sapiens
tggatgcacaggtgc

SEQ ID NO: 184752 - DNA, 15 bp, Homo sapiens
ctggatgcacaggtg

SEQ ID NO: 184753 - DNA, 15 bp, Homo sapiens
gctggatgcacaggt

SEQ ID NO: 184754 - DNA, 15 bp, Homo sapiens
tgctggatgcacagg

SEQ ID NO: 184755 - DNA, 15 bp, Homo sapiens
ctgctggatgcacag

SEQ ID NO: 184756 - DNA, 15 bp, Homo sapiens
cctgctggatgcaca

SEQ ID NO: 184757 - DNA, 15 bp, Homo sapiens
acctgctggatgcac

SEQ ID NO: 184758 - DNA, 15 bp, Homo sapiens
cacctgctggatgca

SEQ ID NO: 184759 - DNA, 15 bp, Homo sapiens
gcacctgctggatgc

SEQ ID NO: 184760 - DNA, 15 bp, Homo sapiens
tgcacctgctggatg

SEQ ID NO: 184761 - DNA, 15 bp, Homo sapiens
gtgcacctgctggat

SEQ ID NO: 184762 - DNA, 15 bp, Homo sapiens
tgtgcacctgctgga

SEQ ID NO: 184763 - DNA, 15 bp, Homo sapiens
ttgtgcacctgctgg

SEQ ID NO: 184764 - DNA, 15 bp, Homo sapiens
gttgtgcacctgctg

SEQ ID NO: 184765 - DNA, 15 bp, Homo sapiens
tgttgtgcacctgct

SEQ ID NO: 184766 - DNA, 15 bp, Homo sapiens
ttgttgtgcacctgc

SEQ ID NO: 184767 - DNA, 15 bp, Homo sapiens
tttgttgtgcacctg

SEQ ID NO: 184768 - DNA, 15 bp, Homo sapiens
atttgttgtgcacct

SEQ ID NO: 184769 - DNA, 15 bp, Homo sapiens
gatttgttgtgcacc

SEQ ID NO: 184770 - DNA, 15 bp, Homo sapiens
agatttgttgtgcac

SEQ ID NO: 184771 - DNA, 15 bp, Homo sapiens
cagatttgttgtgca

SEQ ID NO: 184772 - DNA, 15 bp, Homo sapiens
acagatttgttgtgc

SEQ ID NO: 184773 - DNA, 15 bp, Homo sapiens
cacagatttgttgtg

SEQ ID NO: 184774 - DNA, 15 bp, Homo sapiens
acacagatttgttgt

SEQ ID NO: 184775 - DNA, 15 bp, Homo sapiens
tacacagatttgttg

SEQ ID NO: 184776 - DNA, 15 bp, Homo sapiens
ctacacagatttgtt

SEQ ID NO: 184777 - DNA, 15 bp, Homo sapiens
tctacacagatttgt

SEQ ID NO: 184778 - DNA, 15 bp, Homo sapiens
gtctacacagatttg

SEQ ID NO: 184779 - DNA, 15 bp, Homo sapiens
ggtctacacagattt

SEQ ID NO: 184780 - DNA, 15 bp, Homo sapiens
gggtctacacagatt

SEQ ID NO: 184781 - DNA, 15 bp, Homo sapiens
tgggtctacacagat

SEQ ID NO: 184782 - DNA, 15 bp, Homo sapiens
atgggtctacacaga

SEQ ID NO: 184783 - DNA, 15 bp, Homo sapiens
aatgggtctacacag

SEQ ID NO: 184784 - DNA, 15 bp, Homo sapiens
caatgggtctacaca

SEQ ID NO: 184785 - DNA, 15 bp, Homo sapiens
tcaatgggtctacac

SEQ ID NO: 184786 - DNA, 15 bp, Homo sapiens
ttcaatgggtctaca

SEQ ID NO: 184787 - DNA, 15 bp, Homo sapiens
cttcaatgggtctac

SEQ ID NO: 184788 - DNA, 15 bp, Homo sapiens
tcttcaatgggtcta

SEQ ID NO: 184789 - DNA, 15 bp, Homo sapiens
atcttcaatgggtct

SEQ ID NO: 184790 - DNA, 15 bp, Homo sapiens
tatcttcaatgggtc

SEQ ID NO: 184791 - DNA, 15 bp, Homo sapiens
ttatcttcaatgggt

SEQ ID NO: 184792 - DNA, 15 bp, Homo sapiens
tttatcttcaatggg

SEQ ID NO: 184793 - DNA, 15 bp, Homo sapiens
ctttatcttcaatgg

SEQ ID NO: 184794 - DNA, 15 bp, Homo sapiens
cctttatcttcaatg

SEQ ID NO: 184795 - DNA, 15 bp, Homo sapiens
acctttatcttcaat

SEQ ID NO: 184796 - DNA, 15 bp, Homo sapiens
cacctttatcttcaa

SEQ ID NO: 184797 - DNA, 15 bp, Homo sapiens
ccacctttatcttca

SEQ ID NO: 184798 - DNA, 15 bp, Homo sapiens
gccacctttatcttc

SEQ ID NO: 184799 - DNA, 15 bp, Homo sapiens
tgccacctttatctt

SEQ ID NO: 184800 - DNA, 15 bp, Homo sapiens
ctgccacctttatct

SEQ ID NO: 184801 - DNA, 15 bp, Homo sapiens
cctgccacctttatc

SEQ ID NO: 184802 - DNA, 15 bp, Homo sapiens
ccctgccacctttat

SEQ ID NO: 184803 - DNA, 15 bp, Homo sapiens
tccctgccaccttta

SEQ ID NO: 184804 - DNA, 15 bp, Homo sapiens
ttccctgccaccttt

SEQ ID NO: 184805 - DNA, 15 bp, Homo sapiens
cttccctgccacctt

SEQ ID NO: 184806 - DNA, 15 bp, Homo sapiens
ccttccctgccacct

SEQ ID NO: 184807 - DNA, 15 bp, Homo sapiens
accttccctgccacc

SEQ ID NO: 184808 - DNA, 15 bp, Homo sapiens
taccttccctgccac

SEQ ID NO: 184809 - DNA, 15 bp, Homo sapiens
ctaccttccctgcca

SEQ ID NO: 184810 - DNA, 15 bp, Homo sapiens
cctaccttccctgcc

SEQ ID NO: 184811 - DNA, 15 bp, Homo sapiens
tcctaccttccctgc

SEQ ID NO: 184812 - DNA, 15 bp, Homo sapiens
ttcctaccttccctg

SEQ ID NO: 184813 - DNA, 15 bp, Homo sapiens
attcctaccttccct

SEQ ID NO: 184814 - DNA, 15 bp, Homo sapiens
tattcctaccttccc

SEQ ID NO: 184815 - DNA, 15 bp, Homo sapiens
ctattcctaccttcc

SEQ ID NO: 184816 - DNA, 15 bp, Homo sapiens
tctattcctaccttc

SEQ ID NO: 184817 - DNA, 15 bp, Homo sapiens
atctattcctacctt

SEQ ID NO: 184818 - DNA, 15 bp, Homo sapiens
catctattcctacct

SEQ ID NO: 184819 - DNA, 15 bp, Homo sapiens
ccatctattcctacc

SEQ ID NO: 184820 - DNA, 15 bp, Homo sapiens
tccatctattcctac

SEQ ID NO: 184821 - DNA, 15 bp, Homo sapiens
ctccatctattccta

SEQ ID NO: 184822 - DNA, 15 bp, Homo sapiens
tctccatctattcct

SEQ ID NO: 184823 - DNA, 15 bp, Homo sapiens
ttctccatctattcc

SEQ ID NO: 184824 - DNA, 15 bp, Homo sapiens
attctccatctattc

SEQ ID NO: 184825 - DNA, 15 bp, Homo sapiens
tattctccatctatt

SEQ ID NO: 184826 - DNA, 15 bp, Homo sapiens
ctattctccatctat

SEQ ID NO: 184827 - DNA, 15 bp, Homo sapiens
tctattctccatcta

SEQ ID NO: 184828 - DNA, 15 bp, Homo sapiens
ttctattctccatct

SEQ ID NO: 184829 - DNA, 15 bp, Homo sapiens
tttctattctccatc

SEQ ID NO: 184830 - DNA, 15 bp, Homo sapiens
gtttctattctccat

SEQ ID NO: 184831 - DNA, 15 bp, Homo sapiens
ggtttctattctcca

SEQ ID NO: 184832 - DNA, 15 bp, Homo sapiens
tggtttctattctcc

SEQ ID NO: 184833 - DNA, 15 bp, Homo sapiens
gtggtttctattctc

SEQ ID NO: 184834 - DNA, 15 bp, Homo sapiens
cgtggtttctattct

SEQ ID NO: 184835 - DNA, 15 bp, Homo sapiens
tcgtggtttctattc

SEQ ID NO: 184836 - DNA, 15 bp, Homo sapiens
ctcgtggtttctatt

SEQ ID NO: 184837 - DNA, 15 bp, Homo sapiens
tctcgtggtttctat

SEQ ID NO: 184838 - DNA, 15 bp, Homo sapiens
ttctcgtggtttcta

SEQ ID NO: 184839 - DNA, 15 bp, Homo sapiens
cttctcgtggtttct

SEQ ID NO: 184840 - DNA, 15 bp, Homo sapiens
gcttctcgtggtttc

SEQ ID NO: 184841 - DNA, 15 bp, Homo sapiens
ggcttctcgtggttt

SEQ ID NO: 184842 - DNA, 15 bp, Homo sapiens
gggcttctcgtggtt

SEQ ID NO: 184843 - DNA, 15 bp, Homo sapiens
ggggcttctcgtggt

SEQ ID NO: 184844 - DNA, 15 bp, Homo sapiens
cggggcttctcgtgg

SEQ ID NO: 184845 - DNA, 15 bp, Homo sapiens
tcggggcttctcgtg

SEQ ID NO: 184846 - DNA, 15 bp, Homo sapiens
atcggggcttctcgt

SEQ ID NO: 184847 - DNA, 15 bp, Homo sapiens
tatcggggcttctcg

SEQ ID NO: 184848 - DNA, 15 bp, Homo sapiens
ttatcggggcttctc

SEQ ID NO: 184849 - DNA, 15 bp, Homo sapiens
gttatcggggcttct

SEQ ID NO: 184850 - DNA, 15 bp, Homo sapiens
agttatcggggcttc

SEQ ID NO: 184851 - DNA, 15 bp, Homo sapiens
cagttatcggggctt

SEQ ID NO: 184852 - DNA, 15 bp, Homo sapiens
acagttatcggggct

SEQ ID NO: 184853 - DNA, 15 bp, Homo sapiens
tacagttatcggggc

SEQ ID NO: 184854 - DNA, 15 bp, Homo sapiens
ttacagttatcgggg

SEQ ID NO: 184855 - DNA, 15 bp, Homo sapiens
tttacagttatcggg

SEQ ID NO: 184856 - DNA, 15 bp, Homo sapiens
gtttacagttatcgg

SEQ ID NO: 184857 - DNA, 15 bp, Homo sapiens
tgtttacagttatcg

SEQ ID NO: 184858 - DNA, 15 bp, Homo sapiens
atgtttacagttatc

SEQ ID NO: 184859 - DNA, 15 bp, Homo sapiens
aatgtttacagttat

SEQ ID NO: 184860 - DNA, 15 bp, Homo sapiens
aaatgtttacagtta

SEQ ID NO: 184861 - DNA, 15 bp, Homo sapiens
taaatgtttacagtt

SEQ ID NO: 184862 - DNA, 15 bp, Homo sapiens
ataaatgtttacagt

SEQ ID NO: 184863 - DNA, 15 bp, Homo sapiens
aataaatgtttacag

SEQ ID NO: 184864 - DNA, 15 bp, Homo sapiens
caataaatgtttaca

SEQ ID NO: 184865 - DNA, 15 bp, Homo sapiens
tcaataaatgtttac

SEQ ID NO: 184866 - DNA, 15 bp, Homo sapiens
ttcaataaatgttta

SEQ ID NO: 184867 - DNA, 15 bp, Homo sapiens
gttcaataaatgttt

SEQ ID NO: 184868 - DNA, 15 bp, Homo sapiens
tgttcaataaatgtt

SEQ ID NO: 184869 - DNA, 15 bp, Homo sapiens
gtgttcaataaatgt

SEQ ID NO: 184870 - DNA, 15 bp, Homo sapiens
ggtgttcaataaatg

SEQ ID NO: 184871 - DNA, 15 bp, Homo sapiens
aggtgttcaataaat

SEQ ID NO: 184872 - DNA, 15 bp, Homo sapiens
aaggtgttcaataaa

SEQ ID NO: 184873 - DNA, 15 bp, Homo sapiens
gaaggtgttcaataa

SEQ ID NO: 184874 - DNA, 15 bp, Homo sapiens
agaaggtgttcaata

SEQ ID NO: 184875 - DNA, 15 bp, Homo sapiens
cagaaggtgttcaat

SEQ ID NO: 184876 - DNA, 15 bp, Homo sapiens
acagaaggtgttcaa

SEQ ID NO: 184877 - DNA, 15 bp, Homo sapiens
tacagaaggtgttca

SEQ ID NO: 184878 - DNA, 15 bp, Homo sapiens
gtacagaaggtgttc

SEQ ID NO: 184879 - DNA, 15 bp, Homo sapiens
agtacagaaggtgtt

SEQ ID NO: 184880 - DNA, 15 bp, Homo sapiens
cagtacagaaggtgt

SEQ ID NO: 184881 - DNA, 15 bp, Homo sapiens
acagtacagaaggtg

SEQ ID NO: 184882 - DNA, 15 bp, Homo sapiens
cacagtacagaaggt

SEQ ID NO: 184883 - DNA, 15 bp, Homo sapiens
acacagtacagaagg

SEQ ID NO: 184884 - DNA, 15 bp, Homo sapiens
aacacagtacagaag

SEQ ID NO: 184885 - DNA, 15 bp, Homo sapiens
aaacacagtacagaa

SEQ ID NO: 184886 - DNA, 15 bp, Homo sapiens
aaaacacagtacaga

SEQ ID NO: 184887 - DNA, 15 bp, Homo sapiens
aaaaacacagtacag

SEQ ID NO: 184888 - DNA, 15 bp, Homo sapiens
aaaaaacacagtaca

SEQ ID NO: 184889 - DNA, 15 bp, Homo sapiens
gaaaaaacacagtac

SEQ ID NO: 184890 - DNA, 15 bp, Homo sapiens
tgaaaaaacacagta

SEQ ID NO: 184891 - DNA, 15 bp, Homo sapiens
gtgaaaaaacacagt

SEQ ID NO: 184892 - DNA, 15 bp, Homo sapiens
agtgaaaaaacacag

SEQ ID NO: 184893 - DNA, 15 bp, Homo sapiens
aagtgaaaaaacaca

SEQ ID NO: 184894 - DNA, 15 bp, Homo sapiens
aaagtgaaaaaacac

SEQ ID NO: 184895 - DNA, 15 bp, Homo sapiens
caaagtgaaaaaaca

SEQ ID NO: 184896 - DNA, 15 bp, Homo sapiens
acaaagtgaaaaaac

SEQ ID NO: 184897 - DNA, 15 bp, Homo sapiens
cacaaagtgaaaaaa

SEQ ID NO: 184898 - DNA, 15 bp, Homo sapiens
tcacaaagtgaaaaa

SEQ ID NO: 184899 - DNA, 15 bp, Homo sapiens
atcacaaagtgaaaa

SEQ ID NO: 184900 - DNA, 15 bp, Homo sapiens
aatcacaaagtgaaa

SEQ ID NO: 184901 - DNA, 15 bp, Homo sapiens
aaatcacaaagtgaa

SEQ ID NO: 184902 - DNA, 15 bp, Homo sapiens
gaaatcacaaagtga

SEQ ID NO: 184903 - DNA, 15 bp, Homo sapiens
agaaatcacaaagtg

SEQ ID NO: 184904 - DNA, 15 bp, Homo sapiens
aagaaatcacaaagt

SEQ ID NO: 184905 - DNA, 15 bp, Homo sapiens
taagaaatcacaaag

SEQ ID NO: 184906 - DNA, 15 bp, Homo sapiens
gtaagaaatcacaaa

SEQ ID NO: 184907 - DNA, 15 bp, Homo sapiens
agtaagaaatcacaa

SEQ ID NO: 184908 - DNA, 15 bp, Homo sapiens
gagtaagaaatcaca

SEQ ID NO: 184909 - DNA, 15 bp, Homo sapiens
ggagtaagaaatcac

SEQ ID NO: 184910 - DNA, 15 bp, Homo sapiens
tggagtaagaaatca

SEQ ID NO: 184911 - DNA, 15 bp, Homo sapiens
ttggagtaagaaatc

SEQ ID NO: 184912 - DNA, 15 bp, Homo sapiens
attggagtaagaaat

SEQ ID NO: 184913 - DNA, 15 bp, Homo sapiens
aattggagtaagaaa

SEQ ID NO: 184914 - DNA, 15 bp, Homo sapiens
aaattggagtaagaa

SEQ ID NO: 184915 - DNA, 15 bp, Homo sapiens
caaattggagtaaga

SEQ ID NO: 184916 - DNA, 15 bp, Homo sapiens
tcaaattggagtaag

SEQ ID NO: 184917 - DNA, 15 bp, Homo sapiens
atcaaattggagtaa

SEQ ID NO: 184918 - DNA, 15 bp, Homo sapiens
catcaaattggagta

SEQ ID NO: 184919 - DNA, 15 bp, Homo sapiens
tcatcaaattggagt

SEQ ID NO: 184920 - DNA, 15 bp, Homo sapiens
atcatcaaattggag

SEQ ID NO: 184921 - DNA, 15 bp, Homo sapiens
catcatcaaattgga

SEQ ID NO: 184922 - DNA, 15 bp, Homo sapiens
acatcatcaaattgg

SEQ ID NO: 184923 - DNA, 15 bp, Homo sapiens
tacatcatcaaattg

SEQ ID NO: 184924 - DNA, 15 bp, Homo sapiens
ctacatcatcaaatt

SEQ ID NO: 184925 - DNA, 15 bp, Homo sapiens
cctacatcatcaaat

SEQ ID NO: 184926 - DNA, 15 bp, Homo sapiens
gcctacatcatcaaa

SEQ ID NO: 184927 - DNA, 15 bp, Homo sapiens
tgcctacatcatcaa

SEQ ID NO: 184928 - DNA, 15 bp, Homo sapiens
gtgcctacatcatca

SEQ ID NO: 184929 - DNA, 15 bp, Homo sapiens
agtgcctacatcatc

SEQ ID NO: 184930 - DNA, 15 bp, Homo sapiens
tagtgcctacatcat

SEQ ID NO: 184931 - DNA, 15 bp, Homo sapiens
ttagtgcctacatca

SEQ ID NO: 184932 - DNA, 15 bp, Homo sapiens
gttagtgcctacatc

SEQ ID NO: 184933 - DNA, 15 bp, Homo sapiens
ggttagtgcctacat

SEQ ID NO: 184934 - DNA, 15 bp, Homo sapiens
aggttagtgcctaca

SEQ ID NO: 184935 - DNA, 15 bp, Homo sapiens
aaggttagtgcctac

SEQ ID NO: 184936 - DNA, 15 bp, Homo sapiens
gaaggttagtgccta

SEQ ID NO: 184937 - DNA, 15 bp, Homo sapiens
ggaaggttagtgcct

SEQ ID NO: 184938 - DNA, 15 bp, Homo sapiens
tggaaggttagtgcc

SEQ ID NO: 184939 - DNA, 15 bp, Homo sapiens
gtggaaggttagtgc

SEQ ID NO: 184940 - DNA, 15 bp, Homo sapiens
cgtggaaggttagtg

SEQ ID NO: 184941 - DNA, 15 bp, Homo sapiens
acgtggaaggttagt

SEQ ID NO: 184942 - DNA, 15 bp, Homo sapiens
gacgtggaaggttag

SEQ ID NO: 184943 - DNA, 15 bp, Homo sapiens
agacgtggaaggtta

SEQ ID NO: 184944 - DNA, 15 bp, Homo sapiens
aagacgtggaaggtt

SEQ ID NO: 184945 - DNA, 15 bp, Homo sapiens
taagacgtggaaggt

SEQ ID NO: 184946 - DNA, 15 bp, Homo sapiens
gtaagacgtggaagg

SEQ ID NO: 184947 - DNA, 15 bp, Homo sapiens
tgtaagacgtggaag

SEQ ID NO: 184948 - DNA, 15 bp, Homo sapiens
ttgtaagacgtggaa

SEQ ID NO: 184949 - DNA, 15 bp, Homo sapiens
tttgtaagacgtgga

SEQ ID NO: 184950 - DNA, 15 bp, Homo sapiens
atttgtaagacgtgg

SEQ ID NO: 184951 - DNA, 15 bp, Homo sapiens
catttgtaagacgtg

SEQ ID NO: 184952 - DNA, 15 bp, Homo sapiens
tcatttgtaagacgt

SEQ ID NO: 184953 - DNA, 15 bp, Homo sapiens
ctcatttgtaagacg

SEQ ID NO: 184954 - DNA, 15 bp, Homo sapiens
gctcatttgtaagac

SEQ ID NO: 184955 - DNA, 15 bp, Homo sapiens
tgctcatttgtaaga

SEQ ID NO: 184956 - DNA, 15 bp, Homo sapiens
ttgctcatttgtaag

SEQ ID NO: 184957 - DNA, 15 bp, Homo sapiens
tttgctcatttgtaa

SEQ ID NO: 184958 - DNA, 15 bp, Homo sapiens
atttgctcatttgta

SEQ ID NO: 184959 - DNA, 15 bp, Homo sapiens
aatttgctcatttgt

SEQ ID NO: 184960 - DNA, 15 bp, Homo sapiens
taatttgctcatttg

SEQ ID NO: 184961 - DNA, 15 bp, Homo sapiens
ataatttgctcattt

SEQ ID NO: 184962 - DNA, 15 bp, Homo sapiens
cataatttgctcatt

SEQ ID NO: 184963 - DNA, 15 bp, Homo sapiens
ccataatttgctcat

SEQ ID NO: 184964 - DNA, 15 bp, Homo sapiens
gccataatttgctca

SEQ ID NO: 184965 - DNA, 15 bp, Homo sapiens
agccataatttgctc

SEQ ID NO: 184966 - DNA, 15 bp, Homo sapiens
gagccataatttgct

SEQ ID NO: 184967 - DNA, 15 bp, Homo sapiens
tgagccataatttgc

SEQ ID NO: 184968 - DNA, 15 bp, Homo sapiens
ctgagccataatttg

SEQ ID NO: 184969 - DNA, 15 bp, Homo sapiens
tctgagccataattt

SEQ ID NO: 184970 - DNA, 15 bp, Homo sapiens
ctctgagccataatt

SEQ ID NO: 184971 - DNA, 15 bp, Homo sapiens
tctctgagccataat

SEQ ID NO: 184972 - DNA, 15 bp, Homo sapiens
ctctctgagccataa

SEQ ID NO: 184973 - DNA, 15 bp, Homo sapiens
cctctctgagccata

SEQ ID NO: 184974 - DNA, 15 bp, Homo sapiens
acctctctgagccat

SEQ ID NO: 184975 - DNA, 15 bp, Homo sapiens
cacctctctgagcca

SEQ ID NO: 184976 - DNA, 15 bp, Homo sapiens
tcacctctctgagcc

SEQ ID NO: 184977 - DNA, 15 bp, Homo sapiens
ttcacctctctgagc

SEQ ID NO: 184978 - DNA, 15 bp, Homo sapiens
cttcacctctctgag

SEQ ID NO: 184979 - DNA, 15 bp, Homo sapiens
acttcacctctctga

SEQ ID NO: 184980 - DNA, 15 bp, Homo sapiens
cacttcacctctctg

SEQ ID NO: 184981 - DNA, 15 bp, Homo sapiens
tcacttcacctctct

SEQ ID NO: 184982 - DNA, 15 bp, Homo sapiens
gtcacttcacctctc

SEQ ID NO: 184983 - DNA, 15 bp, Homo sapiens
agtcacttcacctct

SEQ ID NO: 184984 - DNA, 15 bp, Homo sapiens
aagtcacttcacctc

SEQ ID NO: 184985 - DNA, 15 bp, Homo sapiens
caagtcacttcacct

SEQ ID NO: 184986 - DNA, 15 bp, Homo sapiens
gcaagtcacttcacc

SEQ ID NO: 184987 - DNA, 15 bp, Homo sapiens
ggcaagtcacttcac

SEQ ID NO: 184988 - DNA, 15 bp, Homo sapiens
gggcaagtcacttca

SEQ ID NO: 184989 - DNA, 15 bp, Homo sapiens
tgggcaagtcacttc

SEQ ID NO: 184990 - DNA, 15 bp, Homo sapiens
ttgggcaagtcactt

SEQ ID NO: 184991 - DNA, 15 bp, Homo sapiens
cttgggcaagtcact

SEQ ID NO: 184992 - DNA, 15 bp, Homo sapiens
ccttgggcaagtcac

SEQ ID NO: 184993 - DNA, 15 bp, Homo sapiens
tccttgggcaagtca

SEQ ID NO: 184994 - DNA, 15 bp, Homo sapiens
gtccttgggcaagtc

SEQ ID NO: 184995 - DNA, 15 bp, Homo sapiens
tgtccttgggcaagt

SEQ ID NO: 184996 - DNA, 15 bp, Homo sapiens
gtgtccttgggcaag

SEQ ID NO: 184997 - DNA, 15 bp, Homo sapiens
ggtgtccttgggcaa

SEQ ID NO: 184998 - DNA, 15 bp, Homo sapiens
gggtgtccttgggca

SEQ ID NO: 184999 - DNA, 15 bp, Homo sapiens
tgggtgtccttgggc

SEQ ID NO: 185000 - DNA, 15 bp, Homo sapiens
ctgggtgtccttggg

SEQ ID NO: 185001 - DNA, 15 bp, Homo sapiens
gctgggtgtccttgg

SEQ ID NO: 185002 - DNA, 15 bp, Homo sapiens
agctgggtgtccttg

SEQ ID NO: 185003 - DNA, 15 bp, Homo sapiens
tagctgggtgtcctt

SEQ ID NO: 185004 - DNA, 15 bp, Homo sapiens
ttagctgggtgtcct

SEQ ID NO: 185005 - DNA, 15 bp, Homo sapiens
attagctgggtgtcc

SEQ ID NO: 185006 - DNA, 15 bp, Homo sapiens
tattagctgggtgtc

SEQ ID NO: 185007 - DNA, 15 bp, Homo sapiens
atattagctgggtgt

SEQ ID NO: 185008 - DNA, 15 bp, Homo sapiens
tatattagctgggtg

SEQ ID NO: 185009 - DNA, 15 bp, Homo sapiens
ctatattagctgggt

SEQ ID NO: 185010 - DNA, 15 bp, Homo sapiens
cctatattagctggg

SEQ ID NO: 185011 - DNA, 15 bp, Homo sapiens
tcctatattagctgg

SEQ ID NO: 185012 - DNA, 15 bp, Homo sapiens
gtcctatattagctg

SEQ ID NO: 185013 - DNA, 15 bp, Homo sapiens
tgtcctatattagct

SEQ ID NO: 185014 - DNA, 15 bp, Homo sapiens
ctgtcctatattagc

SEQ ID NO: 185015 - DNA, 15 bp, Homo sapiens
actgtcctatattag

SEQ ID NO: 185016 - DNA, 15 bp, Homo sapiens
cactgtcctatatta

SEQ ID NO: 185017 - DNA, 15 bp, Homo sapiens
ccactgtcctatatt

SEQ ID NO: 185018 - DNA, 15 bp, Homo sapiens
tccactgtcctatat

SEQ ID NO: 185019 - DNA, 15 bp, Homo sapiens
ctccactgtcctata

SEQ ID NO: 185020 - DNA, 15 bp, Homo sapiens
cctccactgtcctat

SEQ ID NO: 185021 - DNA, 15 bp, Homo sapiens
acctccactgtccta

SEQ ID NO: 185022 - DNA, 15 bp, Homo sapiens
gacctccactgtcct

SEQ ID NO: 185023 - DNA, 15 bp, Homo sapiens
agacctccactgtcc

SEQ ID NO: 185024 - DNA, 15 bp, Homo sapiens
gagacctccactgtc

SEQ ID NO: 185025 - DNA, 15 bp, Homo sapiens
agagacctccactgt

SEQ ID NO: 185026 - DNA, 15 bp, Homo sapiens
tagagacctccactg

SEQ ID NO: 185027 - DNA, 15 bp, Homo sapiens
gtagagacctccact

SEQ ID NO: 185028 - DNA, 15 bp, Homo sapiens
tgtagagacctccac

SEQ ID NO: 185029 - DNA, 15 bp, Homo sapiens
gtgtagagacctcca

SEQ ID NO: 185030 - DNA, 15 bp, Homo sapiens
ggtgtagagacctcc

SEQ ID NO: 185031 - DNA, 15 bp, Homo sapiens
aggtgtagagacctc

SEQ ID NO: 185032 - DNA, 15 bp, Homo sapiens
taggtgtagagacct

SEQ ID NO: 185033 - DNA, 15 bp, Homo sapiens
ctaggtgtagagacc

SEQ ID NO: 185034 - DNA, 15 bp, Homo sapiens
cctaggtgtagagac

SEQ ID NO: 185035 - DNA, 15 bp, Homo sapiens
acctaggtgtagaga

SEQ ID NO: 185036 - DNA, 15 bp, Homo sapiens
gacctaggtgtagag

SEQ ID NO: 185037 - DNA, 15 bp, Homo sapiens
tgacctaggtgtaga

SEQ ID NO: 185038 - DNA, 15 bp, Homo sapiens
ctgacctaggtgtag

SEQ ID NO: 185039 - DNA, 15 bp, Homo sapiens
cctgacctaggtgta

SEQ ID NO: 185040 - DNA, 15 bp, Homo sapiens
ccctgacctaggtgt

SEQ ID NO: 185041 - DNA, 15 bp, Homo sapiens
cccctgacctaggtg

SEQ ID NO: 185042 - DNA, 15 bp, Homo sapiens
tcccctgacctaggt

SEQ ID NO: 185043 - DNA, 15 bp, Homo sapiens
ttcccctgacctagg

SEQ ID NO: 185044 - DNA, 15 bp, Homo sapiens
cttcccctgacctag

SEQ ID NO: 185045 - DNA, 15 bp, Homo sapiens
ccttcccctgaccta

SEQ ID NO: 185046 - DNA, 15 bp, Homo sapiens
tccttcccctgacct

SEQ ID NO: 185047 - DNA, 15 bp, Homo sapiens
ttccttcccctgacc

SEQ ID NO: 185048 - DNA, 15 bp, Homo sapiens
cttccttcccctgac

SEQ ID NO: 185049 - DNA, 15 bp, Homo sapiens
tcttccttcccctga

SEQ ID NO: 185050 - DNA, 15 bp, Homo sapiens
ttcttccttcccctg

SEQ ID NO: 185051 - DNA, 15 bp, Homo sapiens
cttcttccttcccct

SEQ ID NO: 185052 - DNA, 15 bp, Homo sapiens
tcttcttccttcccc

SEQ ID NO: 185053 - DNA, 15 bp, Homo sapiens
ctcttcttccttccc

SEQ ID NO: 185054 - DNA, 15 bp, Homo sapiens
actcttcttccttcc

SEQ ID NO: 185055 - DNA, 15 bp, Homo sapiens
aactcttcttccttc

SEQ ID NO: 185056 - DNA, 15 bp, Homo sapiens
caactcttcttcctt

SEQ ID NO: 185057 - DNA, 15 bp, Homo sapiens
ccaactcttcttcct

SEQ ID NO: 185058 - DNA, 15 bp, Homo sapiens
gccaactcttcttcc

SEQ ID NO: 185059 - DNA, 15 bp, Homo sapiens
cgccaactcttcttc

SEQ ID NO: 185060 - DNA, 15 bp, Homo sapiens
acgccaactcttctt

SEQ ID NO: 185061 - DNA, 15 bp, Homo sapiens
cacgccaactcttct

SEQ ID NO: 185062 - DNA, 15 bp, Homo sapiens
ccacgccaactcttc

SEQ ID NO: 185063 - DNA, 15 bp, Homo sapiens
cccacgccaactctt

SEQ ID NO: 185064 - DNA, 15 bp, Homo sapiens
acccacgccaactct

SEQ ID NO: 185065 - DNA, 15 bp, Homo sapiens
cacccacgccaactc

SEQ ID NO: 185066 - DNA, 15 bp, Homo sapiens
tcacccacgccaact

SEQ ID NO: 185067 - DNA, 15 bp, Homo sapiens
ctcacccacgccaac

SEQ ID NO: 185068 - DNA, 15 bp, Homo sapiens
cctcacccacgccaa

SEQ ID NO: 185069 - DNA, 15 bp, Homo sapiens
ccctcacccacgcca

SEQ ID NO: 185070 - DNA, 15 bp, Homo sapiens
cccctcacccacgcc

SEQ ID NO: 185071 - DNA, 15 bp, Homo sapiens
ccccctcacccacgc

SEQ ID NO: 185072 - DNA, 15 bp, Homo sapiens
tccccctcacccacg

SEQ ID NO: 185073 - DNA, 15 bp, Homo sapiens
ctccccctcacccac

SEQ ID NO: 185074 - DNA, 15 bp, Homo sapiens
gctccccctcaccca

SEQ ID NO: 185075 - DNA, 15 bp, Homo sapiens
ggctccccctcaccc

SEQ ID NO: 185076 - DNA, 15 bp, Homo sapiens
aggctccccctcacc

SEQ ID NO: 185077 - DNA, 15 bp, Homo sapiens
aaggctccccctcac

SEQ ID NO: 185078 - DNA, 15 bp, Homo sapiens
taaggctccccctca

SEQ ID NO: 185079 - DNA, 15 bp, Homo sapiens
gtaaggctccccctc

SEQ ID NO: 185080 - DNA, 15 bp, Homo sapiens
ggtaaggctccccct

SEQ ID NO: 185081 - DNA, 15 bp, Homo sapiens
cggtaaggctccccc

SEQ ID NO: 185082 - DNA, 15 bp, Homo sapiens
ccggtaaggctcccc

SEQ ID NO: 185083 - DNA, 15 bp, Homo sapiens
cccggtaaggctccc

SEQ ID NO: 185084 - DNA, 15 bp, Homo sapiens
tcccggtaaggctcc

SEQ ID NO: 185085 - DNA, 15 bp, Homo sapiens
ctcccggtaaggctc

SEQ ID NO: 185086 - DNA, 15 bp, Homo sapiens
tctcccggtaaggct

SEQ ID NO: 185087 - DNA, 15 bp, Homo sapiens
ctctcccggtaaggc

SEQ ID NO: 185088 - DNA, 15 bp, Homo sapiens
gctctcccggtaagg

SEQ ID NO: 185089 - DNA, 15 bp, Homo sapiens
ggctctcccggtaag

SEQ ID NO: 185090 - DNA, 15 bp, Homo sapiens
aggctctcccggtaa

SEQ ID NO: 185091 - DNA, 15 bp, Homo sapiens
taggctctcccggta

SEQ ID NO: 185092 - DNA, 15 bp, Homo sapiens
ctaggctctcccggt

SEQ ID NO: 185093 - DNA, 15 bp, Homo sapiens
cctaggctctcccgg

SEQ ID NO: 185094 - DNA, 15 bp, Homo sapiens
tcctaggctctcccg

SEQ ID NO: 185095 - DNA, 15 bp, Homo sapiens
ctcctaggctctccc

SEQ ID NO: 185096 - DNA, 15 bp, Homo sapiens
tctcctaggctctcc

SEQ ID NO: 185097 - DNA, 15 bp, Homo sapiens
ttctcctaggctctc

SEQ ID NO: 185098 - DNA, 15 bp, Homo sapiens
attctcctaggctct

SEQ ID NO: 185099 - DNA, 15 bp, Homo sapiens
cattctcctaggctc

SEQ ID NO: 185100 - DNA, 15 bp, Homo sapiens
acattctcctaggct

SEQ ID NO: 185101 - DNA, 15 bp, Homo sapiens
cacattctcctaggc

SEQ ID NO: 185102 - DNA, 15 bp, Homo sapiens
gcacattctcctagg

SEQ ID NO: 185103 - DNA, 15 bp, Homo sapiens
tgcacattctcctag

SEQ ID NO: 185104 - DNA, 15 bp, Homo sapiens
gtgcacattctccta

SEQ ID NO: 185105 - DNA, 15 bp, Homo sapiens
ggtgcacattctcct

SEQ ID NO: 185106 - DNA, 15 bp, Homo sapiens
tggtgcacattctcc

SEQ ID NO: 185107 - DNA, 15 bp, Homo sapiens
ctggtgcacattctc

SEQ ID NO: 185108 - DNA, 15 bp, Homo sapiens
cctggtgcacattct

SEQ ID NO: 185109 - DNA, 15 bp, Homo sapiens
acctggtgcacattc

SEQ ID NO: 185110 - DNA, 15 bp, Homo sapiens
gacctggtgcacatt

SEQ ID NO: 185111 - DNA, 15 bp, Homo sapiens
ggacctggtgcacat

SEQ ID NO: 185112 - DNA, 15 bp, Homo sapiens
aggacctggtgcaca

SEQ ID NO: 185113 - DNA, 15 bp, Homo sapiens
gaggacctggtgcac

SEQ ID NO: 185114 - DNA, 15 bp, Homo sapiens
tgaggacctggtgca

SEQ ID NO: 185115 - DNA, 15 bp, Homo sapiens
atgaggacctggtgc

SEQ ID NO: 185116 - DNA, 15 bp, Homo sapiens
tatgaggacctggtg

SEQ ID NO: 185117 - DNA, 15 bp, Homo sapiens
ctatgaggacctggt

SEQ ID NO: 185118 - DNA, 15 bp, Homo sapiens
tctatgaggacctgg

SEQ ID NO: 185119 - DNA, 15 bp, Homo sapiens
ctctatgaggacctg

SEQ ID NO: 185120 - DNA, 15 bp, Homo sapiens
cctctatgaggacct

SEQ ID NO: 185121 - DNA, 15 bp, Homo sapiens
tcctctatgaggacc

SEQ ID NO: 185122 - DNA, 15 bp, Homo sapiens
atcctctatgaggac

SEQ ID NO: 185123 - DNA, 15 bp, Homo sapiens
catcctctatgagga

SEQ ID NO: 185124 - DNA, 15 bp, Homo sapiens
tcatcctctatgagg

SEQ ID NO: 185125 - DNA, 15 bp, Homo sapiens
ctcatcctctatgag

SEQ ID NO: 185126 - DNA, 15 bp, Homo sapiens
gctcatcctctatga

SEQ ID NO: 185127 - DNA, 15 bp, Homo sapiens
cgctcatcctctatg

SEQ ID NO: 185128 - DNA, 15 bp, Homo sapiens
acgctcatcctctat

SEQ ID NO: 185129 - DNA, 15 bp, Homo sapiens
cacgctcatcctcta

SEQ ID NO: 185130 - DNA, 15 bp, Homo sapiens
ccacgctcatcctct

SEQ ID NO: 185131 - DNA, 15 bp, Homo sapiens
gccacgctcatcctc

SEQ ID NO: 185132 - DNA, 15 bp, Homo sapiens
ggccacgctcatcct

SEQ ID NO: 185133 - DNA, 15 bp, Homo sapiens
cggccacgctcatcc

SEQ ID NO: 185134 - DNA, 15 bp, Homo sapiens
ccggccacgctcatc

SEQ ID NO: 185135 - DNA, 15 bp, Homo sapiens
gccggccacgctcat

SEQ ID NO: 185136 - DNA, 15 bp, Homo sapiens
ggccggccacgctca

SEQ ID NO: 185137 - DNA, 15 bp, Homo sapiens
cggccggccacgctc

SEQ ID NO: 185138 - DNA, 15 bp, Homo sapiens
gcggccggccacgct

SEQ ID NO: 185139 - DNA, 15 bp, Homo sapiens
agcggccggccacgc

SEQ ID NO: 185140 - DNA, 15 bp, Homo sapiens
gagcggccggccacg

SEQ ID NO: 185141 - DNA, 15 bp, Homo sapiens
tgagcggccggccac

SEQ ID NO: 185142 - DNA, 15 bp, Homo sapiens
ctgagcggccggcca

SEQ ID NO: 185143 - DNA, 15 bp, Homo sapiens
cctgagcggccggcc

SEQ ID NO: 185144 - DNA, 15 bp, Homo sapiens
ccctgagcggccggc

SEQ ID NO: 185145 - DNA, 15 bp, Homo sapiens
tccctgagcggccgg

SEQ ID NO: 185146 - DNA, 15 bp, Homo sapiens
ctccctgagcggccg

SEQ ID NO: 185147 - DNA, 15 bp, Homo sapiens
gctccctgagcggcc

SEQ ID NO: 185148 - DNA, 15 bp, Homo sapiens
tgctccctgagcggc

SEQ ID NO: 185149 - DNA, 15 bp, Homo sapiens
ctgctccctgagcgg

SEQ ID NO: 185150 - DNA, 15 bp, Homo sapiens
cctgctccctgagcg

SEQ ID NO: 185151 - DNA, 15 bp, Homo sapiens
acctgctccctgagc

SEQ ID NO: 185152 - DNA, 15 bp, Homo sapiens
tacctgctccctgag

SEQ ID NO: 185153 - DNA, 15 bp, Homo sapiens
ctacctgctccctga

SEQ ID NO: 185154 - DNA, 15 bp, Homo sapiens
tctacctgctccctg

SEQ ID NO: 185155 - DNA, 15 bp, Homo sapiens
ctctacctgctccct

SEQ ID NO: 185156 - DNA, 15 bp, Homo sapiens
cctctacctgctccc

SEQ ID NO: 185157 - DNA, 15 bp, Homo sapiens
gcctctacctgctcc

SEQ ID NO: 185158 - DNA, 15 bp, Homo sapiens
agcctctacctgctc

SEQ ID NO: 185159 - DNA, 15 bp, Homo sapiens
cagcctctacctgct

SEQ ID NO: 185160 - DNA, 15 bp, Homo sapiens
tcagcctctacctgc

SEQ ID NO: 185161 - DNA, 15 bp, Homo sapiens
gtcagcctctacctg

SEQ ID NO: 185162 - DNA, 15 bp, Homo sapiens
tgtcagcctctacct

SEQ ID NO: 185163 - DNA, 15 bp, Homo sapiens
ctgtcagcctctacc

SEQ ID NO: 185164 - DNA, 15 bp, Homo sapiens
tctgtcagcctctac

SEQ ID NO: 185165 - DNA, 15 bp, Homo sapiens
gtctgtcagcctcta

SEQ ID NO: 185166 - DNA, 15 bp, Homo sapiens
cgtctgtcagcctct

SEQ ID NO: 185167 - DNA, 15 bp, Homo sapiens
gcgtctgtcagcctc

SEQ ID NO: 185168 - DNA, 15 bp, Homo sapiens
tgcgtctgtcagcct

SEQ ID NO: 185169 - DNA, 15 bp, Homo sapiens
atgcgtctgtcagcc

SEQ ID NO: 185170 - DNA, 15 bp, Homo sapiens
tatgcgtctgtcagc

SEQ ID NO: 185171 - DNA, 15 bp, Homo sapiens
gtatgcgtctgtcag

SEQ ID NO: 185172 - DNA, 15 bp, Homo sapiens
tgtatgcgtctgtca

SEQ ID NO: 185173 - DNA, 15 bp, Homo sapiens
gtgtatgcgtctgtc

SEQ ID NO: 185174 - DNA, 15 bp, Homo sapiens
agtgtatgcgtctgt

SEQ ID NO: 185175 - DNA, 15 bp, Homo sapiens
cagtgtatgcgtctg

SEQ ID NO: 185176 - DNA, 15 bp, Homo sapiens
gcagtgtatgcgtct

SEQ ID NO: 185177 - DNA, 15 bp, Homo sapiens
cgcagtgtatgcgtc

SEQ ID NO: 185178 - DNA, 15 bp, Homo sapiens
ccgcagtgtatgcgt

SEQ ID NO: 185179 - DNA, 15 bp, Homo sapiens
cccgcagtgtatgcg

SEQ ID NO: 185180 - DNA, 15 bp, Homo sapiens
tcccgcagtgtatgc

SEQ ID NO: 185181 - DNA, 15 bp, Homo sapiens
ctcccgcagtgtatg

SEQ ID NO: 185182 - DNA, 15 bp, Homo sapiens
cctcccgcagtgtat

SEQ ID NO: 185183 - DNA, 15 bp, Homo sapiens
ccctcccgcagtgta

SEQ ID NO: 185184 - DNA, 15 bp, Homo sapiens
tccctcccgcagtgt

SEQ ID NO: 185185 - DNA, 15 bp, Homo sapiens
atccctcccgcagtg

SEQ ID NO: 185186 - DNA, 15 bp, Homo sapiens
catccctcccgcagt

SEQ ID NO: 185187 - DNA, 15 bp, Homo sapiens
ccatccctcccgcag

SEQ ID NO: 185188 - DNA, 15 bp, Homo sapiens
gccatccctcccgca

SEQ ID NO: 185189 - DNA, 15 bp, Homo sapiens
ggccatccctcccgc

SEQ ID NO: 185190 - DNA, 15 bp, Homo sapiens
cggccatccctcccg

SEQ ID NO: 185191 - DNA, 15 bp, Homo sapiens
ccggccatccctccc

SEQ ID NO: 185192 - DNA, 15 bp, Homo sapiens
accggccatccctcc

SEQ ID NO: 185193 - DNA, 15 bp, Homo sapiens
gaccggccatccctc

SEQ ID NO: 185194 - DNA, 15 bp, Homo sapiens
tgaccggccatccct

SEQ ID NO: 185195 - DNA, 15 bp, Homo sapiens
ctgaccggccatccc

SEQ ID NO: 185196 - DNA, 15 bp, Homo sapiens
gctgaccggccatcc

SEQ ID NO: 185197 - DNA, 15 bp, Homo sapiens
agctgaccggccatc

SEQ ID NO: 185198 - DNA, 15 bp, Homo sapiens
gagctgaccggccat

SEQ ID NO: 185199 - DNA, 15 bp, Homo sapiens
ggagctgaccggcca

SEQ ID NO: 185200 - DNA, 15 bp, Homo sapiens
tggagctgaccggcc

SEQ ID NO: 185201 - DNA, 15 bp, Homo sapiens
ctggagctgaccggc

SEQ ID NO: 185202 - DNA, 15 bp, Homo sapiens
cctggagctgaccgg

SEQ ID NO: 185203 - DNA, 15 bp, Homo sapiens
tcctggagctgaccg

SEQ ID NO: 185204 - DNA, 15 bp, Homo sapiens
ttcctggagctgacc

SEQ ID NO: 185205 - DNA, 15 bp, Homo sapiens
tttcctggagctgac

SEQ ID NO: 185206 - DNA, 15 bp, Homo sapiens
ttttcctggagctga

SEQ ID NO: 185207 - DNA, 15 bp, Homo sapiens
gttttcctggagctg

SEQ ID NO: 185208 - DNA, 15 bp, Homo sapiens
ggttttcctggagct

SEQ ID NO: 185209 - DNA, 15 bp, Homo sapiens
gggttttcctggagc

SEQ ID NO: 185210 - DNA, 15 bp, Homo sapiens
tgggttttcctggag

SEQ ID NO: 185211 - DNA, 15 bp, Homo sapiens
gtgggttttcctgga

SEQ ID NO: 185212 - DNA, 15 bp, Homo sapiens
ggtgggttttcctgg

SEQ ID NO: 185213 - DNA, 15 bp, Homo sapiens
gggtgggttttcctg

SEQ ID NO: 185214 - DNA, 15 bp, Homo sapiens
ggggtgggttttcct

SEQ ID NO: 185215 - DNA, 15 bp, Homo sapiens
gggggtgggttttcc

SEQ ID NO: 185216 - DNA, 15 bp, Homo sapiens
agggggtgggttttc

SEQ ID NO: 185217 - DNA, 15 bp, Homo sapiens
tagggggtgggtttt

SEQ ID NO: 185218 - DNA, 15 bp, Homo sapiens
gtagggggtgggttt

SEQ ID NO: 185219 - DNA, 15 bp, Homo sapiens
ggtagggggtgggtt

SEQ ID NO: 185220 - DNA, 15 bp, Homo sapiens
gggtagggggtgggt

SEQ ID NO: 185221 - DNA, 15 bp, Homo sapiens
ggggtagggggtggg

SEQ ID NO: 185222 - DNA, 15 bp, Homo sapiens
gggggtagggggtgg

SEQ ID NO: 185223 - DNA, 15 bp, Homo sapiens
ggggggtagggggtg

SEQ ID NO: 185224 - DNA, 15 bp, Homo sapiens
tggggggtagggggt

SEQ ID NO: 185225 - DNA, 15 bp, Homo sapiens
ctggggggtaggggg

SEQ ID NO: 185226 - DNA, 15 bp, Homo sapiens
gctggggggtagggg

SEQ ID NO: 185227 - DNA, 15 bp, Homo sapiens
ggctggggggtaggg

SEQ ID NO: 185228 - DNA, 15 bp, Homo sapiens
tggctggggggtagg

SEQ ID NO: 185229 - DNA, 15 bp, Homo sapiens
ctggctggggggtag

SEQ ID NO: 185230 - DNA, 15 bp, Homo sapiens
cctggctggggggta

SEQ ID NO: 185231 - DNA, 15 bp, Homo sapiens
gcctggctggggggt

SEQ ID NO: 185232 - DNA, 15 bp, Homo sapiens
tgcctggctgggggg

SEQ ID NO: 185233 - DNA, 15 bp, Homo sapiens
gtgcctggctggggg

SEQ ID NO: 185234 - DNA, 15 bp, Homo sapiens
ggtgcctggctgggg

SEQ ID NO: 185235 - DNA, 15 bp, Homo sapiens
gggtgcctggctggg

SEQ ID NO: 185236 - DNA, 15 bp, Homo sapiens
ggggtgcctggctgg

SEQ ID NO: 185237 - DNA, 15 bp, Homo sapiens
gggggtgcctggctg

SEQ ID NO: 185238 - DNA, 15 bp, Homo sapiens
agggggtgcctggct

SEQ ID NO: 185239 - DNA, 15 bp, Homo sapiens
gagggggtgcctggc

SEQ ID NO: 185240 - DNA, 15 bp, Homo sapiens
ggagggggtgcctgg

SEQ ID NO: 185241 - DNA, 15 bp, Homo sapiens
tggagggggtgcctg

SEQ ID NO: 185242 - DNA, 15 bp, Homo sapiens
atggagggggtgcct

SEQ ID NO: 185243 - DNA, 15 bp, Homo sapiens
gatggagggggtgcc

SEQ ID NO: 185244 - DNA, 15 bp, Homo sapiens
agatggagggggtgc

SEQ ID NO: 185245 - DNA, 15 bp, Homo sapiens
cagatggagggggtg

SEQ ID NO: 185246 - DNA, 15 bp, Homo sapiens
tcagatggagggggt

SEQ ID NO: 185247 - DNA, 15 bp, Homo sapiens
ctcagatggaggggg

SEQ ID NO: 185248 - DNA, 15 bp, Homo sapiens
actcagatggagggg

SEQ ID NO: 185249 - DNA, 15 bp, Homo sapiens
gactcagatggaggg

SEQ ID NO: 185250 - DNA, 15 bp, Homo sapiens
ggactcagatggagg

SEQ ID NO: 185251 - DNA, 15 bp, Homo sapiens
gggactcagatggag

SEQ ID NO: 185252 - DNA, 15 bp, Homo sapiens
tgggactcagatgga

SEQ ID NO: 185253 - DNA, 15 bp, Homo sapiens
ctgggactcagatgg

SEQ ID NO: 185254 - DNA, 15 bp, Homo sapiens
tctgggactcagatg

SEQ ID NO: 185255 - DNA, 15 bp, Homo sapiens
ctctgggactcagat

SEQ ID NO: 185256 - DNA, 15 bp, Homo sapiens
cctctgggactcaga

SEQ ID NO: 185257 - DNA, 15 bp, Homo sapiens
gcctctgggactcag

SEQ ID NO: 185258 - DNA, 15 bp, Homo sapiens
agcctctgggactca

SEQ ID NO: 185259 - DNA, 15 bp, Homo sapiens
aagcctctgggactc

SEQ ID NO: 185260 - DNA, 15 bp, Homo sapiens
gaagcctctgggact

SEQ ID NO: 185261 - DNA, 15 bp, Homo sapiens
tgaagcctctgggac

SEQ ID NO: 185262 - DNA, 15 bp, Homo sapiens
gtgaagcctctggga

SEQ ID NO: 185263 - DNA, 15 bp, Homo sapiens
ggtgaagcctctggg

SEQ ID NO: 185264 - DNA, 15 bp, Homo sapiens
gggtgaagcctctgg

SEQ ID NO: 185265 - DNA, 15 bp, Homo sapiens
agggtgaagcctctg

SEQ ID NO: 185266 - DNA, 15 bp, Homo sapiens
gagggtgaagcctct

SEQ ID NO: 185267 - DNA, 15 bp, Homo sapiens
ggagggtgaagcctc

SEQ ID NO: 185268 - DNA, 15 bp, Homo sapiens
gggagggtgaagcct

SEQ ID NO: 185269 - DNA, 15 bp, Homo sapiens
agggagggtgaagcc

SEQ ID NO: 185270 - DNA, 15 bp, Homo sapiens
gagggagggtgaagc

SEQ ID NO: 185271 - DNA, 15 bp, Homo sapiens
tgagggagggtgaag

SEQ ID NO: 185272 - DNA, 15 bp, Homo sapiens
ctgagggagggtgaa

SEQ ID NO: 185273 - DNA, 15 bp, Homo sapiens
gctgagggagggtga

SEQ ID NO: 185274 - DNA, 15 bp, Homo sapiens
ggctgagggagggtg

SEQ ID NO: 185275 - DNA, 15 bp, Homo sapiens
gggctgagggagggt

SEQ ID NO: 185276 - DNA, 15 bp, Homo sapiens
ggggctgagggaggg

SEQ ID NO: 185277 - DNA, 15 bp, Homo sapiens
ccaatctgacttcta

SEQ ID NO: 185278 - DNA, 15 bp, Homo sapiens
gccaatctgacttct

SEQ ID NO: 185279 - DNA, 15 bp, Homo sapiens
tgccaatctgacttc

SEQ ID NO: 185280 - DNA, 15 bp, Homo sapiens
ctgccaatctgactt

SEQ ID NO: 185281 - DNA, 15 bp, Homo sapiens
cctgccaatctgact

SEQ ID NO: 185282 - DNA, 15 bp, Homo sapiens
acctgccaatctgac

SEQ ID NO: 185283 - DNA, 15 bp, Homo sapiens
cacctgccaatctga

SEQ ID NO: 185284 - DNA, 15 bp, Homo sapiens
ccacctgccaatctg

SEQ ID NO: 185285 - DNA, 15 bp, Homo sapiens
cccacctgccaatct

SEQ ID NO: 185286 - DNA, 15 bp, Homo sapiens
ccccacctgccaatc

SEQ ID NO: 185287 - DNA, 15 bp, Homo sapiens
cccccacctgccaat

SEQ ID NO: 185288 - DNA, 15 bp, Homo sapiens
tcccccacctgccaa

SEQ ID NO: 185289 - DNA, 15 bp, Homo sapiens
ctcccccacctgcca

SEQ ID NO: 185290 - DNA, 15 bp, Homo sapiens
cctcccccacctgcc

SEQ ID NO: 185291 - DNA, 15 bp, Homo sapiens
gcctcccccacctgc

SEQ ID NO: 185292 - DNA, 15 bp, Homo sapiens
tgcctcccccacctg

SEQ ID NO: 185293 - DNA, 15 bp, Homo sapiens
ttgcctcccccacct

SEQ ID NO: 185294 - DNA, 15 bp, Homo sapiens
gttgcctcccccacc

SEQ ID NO: 185295 - DNA, 15 bp, Homo sapiens
cgttgcctcccccac

SEQ ID NO: 185296 - DNA, 15 bp, Homo sapiens
ccgttgcctccccca

SEQ ID NO: 185297 - DNA, 15 bp, Homo sapiens
cccgttgcctccccc

SEQ ID NO: 185298 - DNA, 15 bp, Homo sapiens
gcccgttgcctcccc

SEQ ID NO: 185299 - DNA, 15 bp, Homo sapiens
ggcccgttgcctccc

SEQ ID NO: 185300 - DNA, 15 bp, Homo sapiens
gggcccgttgcctcc

SEQ ID NO: 185301 - DNA, 15 bp, Homo sapiens
tgggcccgttgcctc

SEQ ID NO: 185302 - DNA, 15 bp, Homo sapiens
ctgggcccgttgcct

SEQ ID NO: 185303 - DNA, 15 bp, Homo sapiens
gctgggcccgttgcc

SEQ ID NO: 185304 - DNA, 15 bp, Homo sapiens
tgctgggcccgttgc

SEQ ID NO: 185305 - DNA, 15 bp, Homo sapiens
ctgctgggcccgttg

SEQ ID NO: 185306 - DNA, 15 bp, Homo sapiens
cctgctgggcccgtt

SEQ ID NO: 185307 - DNA, 15 bp, Homo sapiens
ccctgctgggcccgt

SEQ ID NO: 185308 - DNA, 15 bp, Homo sapiens
tccctgctgggcccg

SEQ ID NO: 185309 - DNA, 15 bp, Homo sapiens
ctccctgctgggccc

SEQ ID NO: 185310 - DNA, 15 bp, Homo sapiens
cctccctgctgggcc

SEQ ID NO: 185311 - DNA, 15 bp, Homo sapiens
ccctccctgctgggc

SEQ ID NO: 185312 - DNA, 15 bp, Homo sapiens
tccctccctgctggg

SEQ ID NO: 185313 - DNA, 15 bp, Homo sapiens
ttccctccctgctgg

SEQ ID NO: 185314 - DNA, 15 bp, Homo sapiens
cttccctccctgctg

SEQ ID NO: 185315 - DNA, 15 bp, Homo sapiens
gcttccctccctgct

SEQ ID NO: 185316 - DNA, 15 bp, Homo sapiens
ggcttccctccctgc

SEQ ID NO: 185317 - DNA, 15 bp, Homo sapiens
gggcttccctccctg

SEQ ID NO: 185318 - DNA, 15 bp, Homo sapiens
ggggcttccctccct

SEQ ID NO: 185319 - DNA, 15 bp, Homo sapiens
gggggcttccctccc

SEQ ID NO: 185320 - DNA, 15 bp, Homo sapiens
ggggggcttccctcc

SEQ ID NO: 185321 - DNA, 15 bp, Homo sapiens
gggggggcttccctc

SEQ ID NO: 185322 - DNA, 15 bp, Homo sapiens
tgggggggcttccct

SEQ ID NO: 185323 - DNA, 15 bp, Homo sapiens
ctgggggggcttccc

SEQ ID NO: 185324 - DNA, 15 bp, Homo sapiens
gctgggggggcttcc

SEQ ID NO: 185325 - DNA, 15 bp, Homo sapiens
ggctgggggggcttc

SEQ ID NO: 185326 - DNA, 15 bp, Homo sapiens
tggctgggggggctt

SEQ ID NO: 185327 - DNA, 15 bp, Homo sapiens
ctggctgggggggct

SEQ ID NO: 185328 - DNA, 15 bp, Homo sapiens
actggctgggggggc

SEQ ID NO: 185329 - DNA, 15 bp, Homo sapiens
aactggctggggggg

SEQ ID NO: 185330 - DNA, 15 bp, Homo sapiens
gaactggctgggggg

SEQ ID NO: 185331 - DNA, 15 bp, Homo sapiens
agaactggctggggg

SEQ ID NO: 185332 - DNA, 15 bp, Homo sapiens
cagaactggctgggg

SEQ ID NO: 185333 - DNA, 15 bp, Homo sapiens
tcagaactggctggg

SEQ ID NO: 185334 - DNA, 15 bp, Homo sapiens
gtcagaactggctgg

SEQ ID NO: 185335 - DNA, 15 bp, Homo sapiens
agtcagaactggctg

SEQ ID NO: 185336 - DNA, 15 bp, Homo sapiens
aagtcagaactggct

SEQ ID NO: 185337 - DNA, 15 bp, Homo sapiens
gaagtcagaactggc

SEQ ID NO: 185338 - DNA, 15 bp, Homo sapiens
tgaagtcagaactgg

SEQ ID NO: 185339 - DNA, 15 bp, Homo sapiens
gtgaagtcagaactg

SEQ ID NO: 185340 - DNA, 15 bp, Homo sapiens
ggtgaagtcagaact

SEQ ID NO: 185341 - DNA, 15 bp, Homo sapiens
gggtgaagtcagaac

SEQ ID NO: 185342 - DNA, 15 bp, Homo sapiens
agggtgaagtcagaa

SEQ ID NO: 185343 - DNA, 15 bp, Homo sapiens
cagggtgaagtcaga

SEQ ID NO: 185344 - DNA, 15 bp, Homo sapiens
gcagggtgaagtcag

SEQ ID NO: 185345 - DNA, 15 bp, Homo sapiens
ggcagggtgaagtca

SEQ ID NO: 185346 - DNA, 15 bp, Homo sapiens
aggcagggtgaagtc

SEQ ID NO: 185347 - DNA, 15 bp, Homo sapiens
aaggcagggtgaagt

SEQ ID NO: 185348 - DNA, 15 bp, Homo sapiens
caaggcagggtgaag

SEQ ID NO: 185349 - DNA, 15 bp, Homo sapiens
gcaaggcagggtgaa

SEQ ID NO: 185350 - DNA, 15 bp, Homo sapiens
ggcaaggcagggtga

SEQ ID NO: 185351 - DNA, 15 bp, Homo sapiens
tggcaaggcagggtg

SEQ ID NO: 185352 - DNA, 15 bp, Homo sapiens
gtggcaaggcagggt

SEQ ID NO: 185353 - DNA, 15 bp, Homo sapiens
agtggcaaggcaggg

SEQ ID NO: 185354 - DNA, 15 bp, Homo sapiens
tagtggcaaggcagg

SEQ ID NO: 185355 - DNA, 15 bp, Homo sapiens
ttagtggcaaggcag

SEQ ID NO: 185356 - DNA, 15 bp, Homo sapiens
gttagtggcaaggca

SEQ ID NO: 185357 - DNA, 15 bp, Homo sapiens
ggttagtggcaaggc

SEQ ID NO: 185358 - DNA, 15 bp, Homo sapiens
gggttagtggcaagg

SEQ ID NO: 185359 - DNA, 15 bp, Homo sapiens
ggggttagtggcaag

SEQ ID NO: 185360 - DNA, 15 bp, Homo sapiens
gggggttagtggcaa

SEQ ID NO: 185361 - DNA, 15 bp, Homo sapiens
ggggggttagtggca

SEQ ID NO: 185362 - DNA, 15 bp, Homo sapiens
tggggggttagtggc

SEQ ID NO: 185363 - DNA, 15 bp, Homo sapiens
gtggggggttagtgg

SEQ ID NO: 185364 - DNA, 15 bp, Homo sapiens
agtggggggttagtg

SEQ ID NO: 185365 - DNA, 15 bp, Homo sapiens
gagtggggggttagt

SEQ ID NO: 185366 - DNA, 15 bp, Homo sapiens
agagtggggggttag

SEQ ID NO: 185367 - DNA, 15 bp, Homo sapiens
gagagtggggggtta

SEQ ID NO: 185368 - DNA, 15 bp, Homo sapiens
ggagagtggggggtt

SEQ ID NO: 185369 - DNA, 15 bp, Homo sapiens
gggagagtggggggt

SEQ ID NO: 185370 - DNA, 15 bp, Homo sapiens
agggagagtgggggg

SEQ ID NO: 185371 - DNA, 15 bp, Homo sapiens
cagggagagtggggg

SEQ ID NO: 185372 - DNA, 15 bp, Homo sapiens
gcagggagagtgggg

SEQ ID NO: 185373 - DNA, 15 bp, Homo sapiens
tgcagggagagtggg

SEQ ID NO: 185374 - DNA, 15 bp, Homo sapiens
ctgcagggagagtgg

SEQ ID NO: 185375 - DNA, 15 bp, Homo sapiens
cctgcagggagagtg

SEQ ID NO: 185376 - DNA, 15 bp, Homo sapiens
gcctgcagggagagt

SEQ ID NO: 185377 - DNA, 15 bp, Homo sapiens
ggcctgcagggagag

SEQ ID NO: 185378 - DNA, 15 bp, Homo sapiens
tggcctgcagggaga

SEQ ID NO: 185379 - DNA, 15 bp, Homo sapiens
ctggcctgcagggag

SEQ ID NO: 185380 - DNA, 15 bp, Homo sapiens
actggcctgcaggga

SEQ ID NO: 185381 - DNA, 15 bp, Homo sapiens
aactggcctgcaggg

SEQ ID NO: 185382 - DNA, 15 bp, Homo sapiens
gaactggcctgcagg

SEQ ID NO: 185383 - DNA, 15 bp, Homo sapiens
agaactggcctgcag

SEQ ID NO: 185384 - DNA, 15 bp, Homo sapiens
tagaactggcctgca

SEQ ID NO: 185385 - DNA, 15 bp, Homo sapiens
gtagaactggcctgc

SEQ ID NO: 185386 - DNA, 15 bp, Homo sapiens
cgtagaactggcctg

SEQ ID NO: 185387 - DNA, 15 bp, Homo sapiens
acgtagaactggcct

SEQ ID NO: 185388 - DNA, 15 bp, Homo sapiens
gacgtagaactggcc

SEQ ID NO: 185389 - DNA, 15 bp, Homo sapiens
tgacgtagaactggc

SEQ ID NO: 185390 - DNA, 15 bp, Homo sapiens
atgacgtagaactgg

SEQ ID NO: 185391 - DNA, 15 bp, Homo sapiens
catgacgtagaactg

SEQ ID NO: 185392 - DNA, 15 bp, Homo sapiens
tcatgacgtagaact

SEQ ID NO: 185393 - DNA, 15 bp, Homo sapiens
atcatgacgtagaac

SEQ ID NO: 185394 - DNA, 15 bp, Homo sapiens
catcatgacgtagaa

SEQ ID NO: 185395 - DNA, 15 bp, Homo sapiens
tcatcatgacgtaga

SEQ ID NO: 185396 - DNA, 15 bp, Homo sapiens
gtcatcatgacgtag

SEQ ID NO: 185397 - DNA, 15 bp, Homo sapiens
cgtcatcatgacgta

SEQ ID NO: 185398 - DNA, 15 bp, Homo sapiens
gcgtcatcatgacgt

SEQ ID NO: 185399 - DNA, 15 bp, Homo sapiens
ggcgtcatcatgacg

SEQ ID NO: 185400 - DNA, 15 bp, Homo sapiens
gggcgtcatcatgac

SEQ ID NO: 185401 - DNA, 15 bp, Homo sapiens
ggggcgtcatcatga

SEQ ID NO: 185402 - DNA, 15 bp, Homo sapiens
tggggcgtcatcatg

SEQ ID NO: 185403 - DNA, 15 bp, Homo sapiens
ctggggcgtcatcat

SEQ ID NO: 185404 - DNA, 15 bp, Homo sapiens
cctggggcgtcatca

SEQ ID NO: 185405 - DNA, 15 bp, Homo sapiens
tcctggggcgtcatc

SEQ ID NO: 185406 - DNA, 15 bp, Homo sapiens
atcctggggcgtcat

SEQ ID NO: 185407 - DNA, 15 bp, Homo sapiens
catcctggggcgtca

SEQ ID NO: 185408 - DNA, 15 bp, Homo sapiens
acatcctggggcgtc

SEQ ID NO: 185409 - DNA, 15 bp, Homo sapiens
cacatcctggggcgt

SEQ ID NO: 185410 - DNA, 15 bp, Homo sapiens
gcacatcctggggcg

SEQ ID NO: 185411 - DNA, 15 bp, Homo sapiens
agcacatcctggggc

SEQ ID NO: 185412 - DNA, 15 bp, Homo sapiens
aagcacatcctgggg

SEQ ID NO: 185413 - DNA, 15 bp, Homo sapiens
gaagcacatcctggg

SEQ ID NO: 185414 - DNA, 15 bp, Homo sapiens
tgaagcacatcctgg

SEQ ID NO: 185415 - DNA, 15 bp, Homo sapiens
ctgaagcacatcctg

SEQ ID NO: 185416 - DNA, 15 bp, Homo sapiens
tctgaagcacatcct

SEQ ID NO: 185417 - DNA, 15 bp, Homo sapiens
gtctgaagcacatcc

SEQ ID NO: 185418 - DNA, 15 bp, Homo sapiens
tgtctgaagcacatc

SEQ ID NO: 185419 - DNA, 15 bp, Homo sapiens
ctgtctgaagcacat

SEQ ID NO: 185420 - DNA, 15 bp, Homo sapiens
cctgtctgaagcaca

SEQ ID NO: 185421 - DNA, 15 bp, Homo sapiens
tcctgtctgaagcac

SEQ ID NO: 185422 - DNA, 15 bp, Homo sapiens
ttcctgtctgaagca

SEQ ID NO: 185423 - DNA, 15 bp, Homo sapiens
gttcctgtctgaagc

SEQ ID NO: 185424 - DNA, 15 bp, Homo sapiens
tgttcctgtctgaag

SEQ ID NO: 185425 - DNA, 15 bp, Homo sapiens
gtgttcctgtctgaa

SEQ ID NO: 185426 - DNA, 15 bp, Homo sapiens
tgtgttcctgtctga

SEQ ID NO: 185427 - DNA, 15 bp, Homo sapiens
ctgtgttcctgtctg

SEQ ID NO: 185428 - DNA, 15 bp, Homo sapiens
tctgtgttcctgtct

SEQ ID NO: 185429 - DNA, 15 bp, Homo sapiens
ctctgtgttcctgtc

SEQ ID NO: 185430 - DNA, 15 bp, Homo sapiens
cctctgtgttcctgt

SEQ ID NO: 185431 - DNA, 15 bp, Homo sapiens
tcctctgtgttcctg

SEQ ID NO: 185432 - DNA, 15 bp, Homo sapiens
gtcctctgtgttcct

SEQ ID NO: 185433 - DNA, 15 bp, Homo sapiens
cgtcctctgtgttcc

SEQ ID NO: 185434 - DNA, 15 bp, Homo sapiens
tcgtcctctgtgttc

SEQ ID NO: 185435 - DNA, 15 bp, Homo sapiens
atcgtcctctgtgtt

SEQ ID NO: 185436 - DNA, 15 bp, Homo sapiens
gatcgtcctctgtgt

SEQ ID NO: 185437 - DNA, 15 bp, Homo sapiens
cgatcgtcctctgtg

SEQ ID NO: 185438 - DNA, 15 bp, Homo sapiens
gcgatcgtcctctgt

SEQ ID NO: 185439 - DNA, 15 bp, Homo sapiens
ggcgatcgtcctctg

SEQ ID NO: 185440 - DNA, 15 bp, Homo sapiens
gggcgatcgtcctct

SEQ ID NO: 185441 - DNA, 15 bp, Homo sapiens
ggggcgatcgtcctc

SEQ ID NO: 185442 - DNA, 15 bp, Homo sapiens
gggggcgatcgtcct

SEQ ID NO: 185443 - DNA, 15 bp, Homo sapiens
ggggggcgatcgtcc

SEQ ID NO: 185444 - DNA, 15 bp, Homo sapiens
cggggggcgatcgtc

SEQ ID NO: 185445 - DNA, 15 bp, Homo sapiens
ccggggggcgatcgt

SEQ ID NO: 185446 - DNA, 15 bp, Homo sapiens
tccggggggcgatcg

SEQ ID NO: 185447 - DNA, 15 bp, Homo sapiens
gtccggggggcgatc

SEQ ID NO: 185448 - DNA, 15 bp, Homo sapiens
tgtccggggggcgat

SEQ ID NO: 185449 - DNA, 15 bp, Homo sapiens
gtgtccggggggcga

SEQ ID NO: 185450 - DNA, 15 bp, Homo sapiens
tgtgtccggggggcg

SEQ ID NO: 185451 - DNA, 15 bp, Homo sapiens
gtgtgtccggggggc

SEQ ID NO: 185452 - DNA, 15 bp, Homo sapiens
ggtgtgtccgggggg

SEQ ID NO: 185453 - DNA, 15 bp, Homo sapiens
gggtgtgtccggggg

SEQ ID NO: 185454 - DNA, 15 bp, Homo sapiens
agggtgtgtccgggg

SEQ ID NO: 185455 - DNA, 15 bp, Homo sapiens
aagggtgtgtccggg

SEQ ID NO: 185456 - DNA, 15 bp, Homo sapiens
taagggtgtgtccgg

SEQ ID NO: 185457 - DNA, 15 bp, Homo sapiens
gtaagggtgtgtccg

SEQ ID NO: 185458 - DNA, 15 bp, Homo sapiens
agtaagggtgtgtcc

SEQ ID NO: 185459 - DNA, 15 bp, Homo sapiens
gagtaagggtgtgtc

SEQ ID NO: 185460 - DNA, 15 bp, Homo sapiens
agagtaagggtgtgt

SEQ ID NO: 185461 - DNA, 15 bp, Homo sapiens
gagagtaagggtgtg

SEQ ID NO: 185462 - DNA, 15 bp, Homo sapiens
ggagagtaagggtgt

SEQ ID NO: 185463 - DNA, 15 bp, Homo sapiens
cggagagtaagggtg

SEQ ID NO: 185464 - DNA, 15 bp, Homo sapiens
acggagagtaagggt

SEQ ID NO: 185465 - DNA, 15 bp, Homo sapiens
tacggagagtaaggg

SEQ ID NO: 185466 - DNA, 15 bp, Homo sapiens
atacggagagtaagg

SEQ ID NO: 185467 - DNA, 15 bp, Homo sapiens
catacggagagtaag

SEQ ID NO: 185468 - DNA, 15 bp, Homo sapiens
acatacggagagtaa

SEQ ID NO: 185469 - DNA, 15 bp, Homo sapiens
cacatacggagagta

SEQ ID NO: 185470 - DNA, 15 bp, Homo sapiens
gcacatacggagagt

SEQ ID NO: 185471 - DNA, 15 bp, Homo sapiens
tgcacatacggagag

SEQ ID NO: 185472 - DNA, 15 bp, Homo sapiens
ctgcacatacggaga

SEQ ID NO: 185473 - DNA, 15 bp, Homo sapiens
cctgcacatacggag

SEQ ID NO: 185474 - DNA, 15 bp, Homo sapiens
ccctgcacatacgga

SEQ ID NO: 185475 - DNA, 15 bp, Homo sapiens
cccctgcacatacgg

SEQ ID NO: 185476 - DNA, 15 bp, Homo sapiens
tcccctgcacatacg

SEQ ID NO: 185477 - DNA, 15 bp, Homo sapiens
gtcccctgcacatac

SEQ ID NO: 185478 - DNA, 15 bp, Homo sapiens
tgtcccctgcacata

SEQ ID NO: 185479 - DNA, 15 bp, Homo sapiens
gtgtcccctgcacat

SEQ ID NO: 185480 - DNA, 15 bp, Homo sapiens
ggtgtcccctgcaca

SEQ ID NO: 185481 - DNA, 15 bp, Homo sapiens
aggtgtcccctgcac

SEQ ID NO: 185482 - DNA, 15 bp, Homo sapiens
caggtgtcccctgca

SEQ ID NO: 185483 - DNA, 15 bp, Homo sapiens
ccaggtgtcccctgc

SEQ ID NO: 185484 - DNA, 15 bp, Homo sapiens
tccaggtgtcccctg

SEQ ID NO: 185485 - DNA, 15 bp, Homo sapiens
ctccaggtgtcccct

SEQ ID NO: 185486 - DNA, 15 bp, Homo sapiens
cctccaggtgtcccc

SEQ ID NO: 185487 - DNA, 15 bp, Homo sapiens
ccctccaggtgtccc

SEQ ID NO: 185488 - DNA, 15 bp, Homo sapiens
gccctccaggtgtcc

SEQ ID NO: 185489 - DNA, 15 bp, Homo sapiens
ggccctccaggtgtc

SEQ ID NO: 185490 - DNA, 15 bp, Homo sapiens
aggccctccaggtgt

SEQ ID NO: 185491 - DNA, 15 bp, Homo sapiens
caggccctccaggtg

SEQ ID NO: 185492 - DNA, 15 bp, Homo sapiens
ccaggccctccaggt

SEQ ID NO: 185493 - DNA, 15 bp, Homo sapiens
accaggccctccagg

SEQ ID NO: 185494 - DNA, 15 bp, Homo sapiens
caccaggccctccag

SEQ ID NO: 185495 - DNA, 15 bp, Homo sapiens
acaccaggccctcca

SEQ ID NO: 185496 - DNA, 15 bp, Homo sapiens
aacaccaggccctcc

SEQ ID NO: 185497 - DNA, 15 bp, Homo sapiens
caacaccaggccctc

SEQ ID NO: 185498 - DNA, 15 bp, Homo sapiens
tcaacaccaggccct

SEQ ID NO: 185499 - DNA, 15 bp, Homo sapiens
ttcaacaccaggccc

SEQ ID NO: 185500 - DNA, 15 bp, Homo sapiens
tttcaacaccaggcc

SEQ ID NO: 185501 - DNA, 15 bp, Homo sapiens
atttcaacaccaggc

SEQ ID NO: 185502 - DNA, 15 bp, Homo sapiens
catttcaacaccagg

SEQ ID NO: 185503 - DNA, 15 bp, Homo sapiens
ccatttcaacaccag

SEQ ID NO: 185504 - DNA, 15 bp, Homo sapiens
tccatttcaacacca

SEQ ID NO: 185505 - DNA, 15 bp, Homo sapiens
ttccatttcaacacc

SEQ ID NO: 185506 - DNA, 15 bp, Homo sapiens
cttccatttcaacac

SEQ ID NO: 185507 - DNA, 15 bp, Homo sapiens
ccttccatttcaaca

SEQ ID NO: 185508 - DNA, 15 bp, Homo sapiens
tccttccatttcaac

SEQ ID NO: 185509 - DNA, 15 bp, Homo sapiens
ttccttccatttcaa

SEQ ID NO: 185510 - DNA, 15 bp, Homo sapiens
cttccttccatttca

SEQ ID NO: 185511 - DNA, 15 bp, Homo sapiens
tcttccttccatttc

SEQ ID NO: 185512 - DNA, 15 bp, Homo sapiens
ctcttccttccattt

SEQ ID NO: 185513 - DNA, 15 bp, Homo sapiens
cctcttccttccatt

SEQ ID NO: 185514 - DNA, 15 bp, Homo sapiens
ccctcttccttccat

SEQ ID NO: 185515 - DNA, 15 bp, Homo sapiens
cccctcttccttcca

SEQ ID NO: 185516 - DNA, 15 bp, Homo sapiens
acccctcttccttcc

SEQ ID NO: 185517 - DNA, 15 bp, Homo sapiens
aacccctcttccttc

SEQ ID NO: 185518 - DNA, 15 bp, Homo sapiens
aaacccctcttcctt

SEQ ID NO: 185519 - DNA, 15 bp, Homo sapiens
gaaacccctcttcct

SEQ ID NO: 185520 - DNA, 15 bp, Homo sapiens
agaaacccctcttcc

SEQ ID NO: 185521 - DNA, 15 bp, Homo sapiens
cagaaacccctcttc

SEQ ID NO: 185522 - DNA, 15 bp, Homo sapiens
ccagaaacccctctt

SEQ ID NO: 185523 - DNA, 15 bp, Homo sapiens
tccagaaacccctct

SEQ ID NO: 185524 - DNA, 15 bp, Homo sapiens
ctccagaaacccctc

SEQ ID NO: 185525 - DNA, 15 bp, Homo sapiens
actccagaaacccct

SEQ ID NO: 185526 - DNA, 15 bp, Homo sapiens
tactccagaaacccc

SEQ ID NO: 185527 - DNA, 15 bp, Homo sapiens
ctactccagaaaccc

SEQ ID NO: 185528 - DNA, 15 bp, Homo sapiens
tctactccagaaacc

SEQ ID NO: 185529 - DNA, 15 bp, Homo sapiens
ttctactccagaaac

SEQ ID NO: 185530 - DNA, 15 bp, Homo sapiens
cttctactccagaaa

SEQ ID NO: 185531 - DNA, 15 bp, Homo sapiens
gcttctactccagaa

SEQ ID NO: 185532 - DNA, 15 bp, Homo sapiens
agcttctactccaga

SEQ ID NO: 185533 - DNA, 15 bp, Homo sapiens
cagcttctactccag

SEQ ID NO: 185534 - DNA, 15 bp, Homo sapiens
ccagcttctactcca

SEQ ID NO: 185535 - DNA, 15 bp, Homo sapiens
cccagcttctactcc

SEQ ID NO: 185536 - DNA, 15 bp, Homo sapiens
gcccagcttctactc

SEQ ID NO: 185537 - DNA, 15 bp, Homo sapiens
tgcccagcttctact

SEQ ID NO: 185538 - DNA, 15 bp, Homo sapiens
ctgcccagcttctac

SEQ ID NO: 185539 - DNA, 15 bp, Homo sapiens
actgcccagcttcta

SEQ ID NO: 185540 - DNA, 15 bp, Homo sapiens
aactgcccagcttct

SEQ ID NO: 185541 - DNA, 15 bp, Homo sapiens
taactgcccagcttc

SEQ ID NO: 185542 - DNA, 15 bp, Homo sapiens
ctaactgcccagctt

SEQ ID NO: 185543 - DNA, 15 bp, Homo sapiens
gctaactgcccagct

SEQ ID NO: 185544 - DNA, 15 bp, Homo sapiens
tgctaactgcccagc

SEQ ID NO: 185545 - DNA, 15 bp, Homo sapiens
atgctaactgcccag

SEQ ID NO: 185546 - DNA, 15 bp, Homo sapiens
catgctaactgccca

SEQ ID NO: 185547 - DNA, 15 bp, Homo sapiens
tcatgctaactgccc

SEQ ID NO: 185548 - DNA, 15 bp, Homo sapiens
ttcatgctaactgcc

SEQ ID NO: 185549 - DNA, 15 bp, Homo sapiens
cttcatgctaactgc

SEQ ID NO: 185550 - DNA, 15 bp, Homo sapiens
acttcatgctaactg

SEQ ID NO: 185551 - DNA, 15 bp, Homo sapiens
cacttcatgctaact

SEQ ID NO: 185552 - DNA, 15 bp, Homo sapiens
ccacttcatgctaac

SEQ ID NO: 185553 - DNA, 15 bp, Homo sapiens
cccacttcatgctaa

SEQ ID NO: 185554 - DNA, 15 bp, Homo sapiens
gcccacttcatgcta

SEQ ID NO: 185555 - DNA, 15 bp, Homo sapiens
tgcccacttcatgct

SEQ ID NO: 185556 - DNA, 15 bp, Homo sapiens
gtgcccacttcatgc

SEQ ID NO: 185557 - DNA, 15 bp, Homo sapiens
tgtgcccacttcatg

SEQ ID NO: 185558 - DNA, 15 bp, Homo sapiens
atgtgcccacttcat

SEQ ID NO: 185559 - DNA, 15 bp, Homo sapiens
catgtgcccacttca

SEQ ID NO: 185560 - DNA, 15 bp, Homo sapiens
ccatgtgcccacttc

SEQ ID NO: 185561 - DNA, 15 bp, Homo sapiens
accatgtgcccactt

SEQ ID NO: 185562 - DNA, 15 bp, Homo sapiens
caccatgtgcccact

SEQ ID NO: 185563 - DNA, 15 bp, Homo sapiens
acaccatgtgcccac

SEQ ID NO: 185564 - DNA, 15 bp, Homo sapiens
tacaccatgtgccca

SEQ ID NO: 185565 - DNA, 15 bp, Homo sapiens
ttacaccatgtgccc

SEQ ID NO: 185566 - DNA, 15 bp, Homo sapiens
attacaccatgtgcc

SEQ ID NO: 185567 - DNA, 15 bp, Homo sapiens
cattacaccatgtgc

SEQ ID NO: 185568 - DNA, 15 bp, Homo sapiens
acattacaccatgtg

SEQ ID NO: 185569 - DNA, 15 bp, Homo sapiens
aacattacaccatgt

SEQ ID NO: 185570 - DNA, 15 bp, Homo sapiens
aaacattacaccatg

SEQ ID NO: 185571 - DNA, 15 bp, Homo sapiens
aaaacattacaccat

SEQ ID NO: 185572 - DNA, 15 bp, Homo sapiens
aaaaacattacacca

SEQ ID NO: 185573 - DNA, 15 bp, Homo sapiens
aaaaaacattacacc

SEQ ID NO: 185574 - DNA, 15 bp, Homo sapiens
aaaaaaacattacac

SEQ ID NO: 185575 - DNA, 15 bp, Homo sapiens
aaaaaaaacattaca

SEQ ID NO: 185576 - DNA, 15 bp, Homo sapiens
gaaaaaaaacattac

SEQ ID NO: 185577 - DNA, 15 bp, Homo sapiens
agaaaaaaaacatta

SEQ ID NO: 185578 - DNA, 15 bp, Homo sapiens
aagaaaaaaaacatt

SEQ ID NO: 185579 - DNA, 15 bp, Homo sapiens
aaagaaaaaaaacat

SEQ ID NO: 185580 - DNA, 15 bp, Homo sapiens
caaagaaaaaaaaca

SEQ ID NO: 185581 - DNA, 15 bp, Homo sapiens
gcaaagaaaaaaaac

SEQ ID NO: 185582 - DNA, 15 bp, Homo sapiens
ggcaaagaaaaaaaa

SEQ ID NO: 185583 - DNA, 15 bp, Homo sapiens
aggcaaagaaaaaaa

SEQ ID NO: 185584 - DNA, 15 bp, Homo sapiens
caggcaaagaaaaaa

SEQ ID NO: 185585 - DNA, 15 bp, Homo sapiens
acaggcaaagaaaaa

SEQ ID NO: 185586 - DNA, 15 bp, Homo sapiens
aacaggcaaagaaaa

SEQ ID NO: 185587 - DNA, 15 bp, Homo sapiens
aaacaggcaaagaaa

SEQ ID NO: 185588 - DNA, 15 bp, Homo sapiens
gaaacaggcaaagaa

SEQ ID NO: 185589 - DNA, 15 bp, Homo sapiens
agaaacaggcaaaga

SEQ ID NO: 185590 - DNA, 15 bp, Homo sapiens
cagaaacaggcaaag

SEQ ID NO: 185591 - DNA, 15 bp, Homo sapiens
gcagaaacaggcaaa

SEQ ID NO: 185592 - DNA, 15 bp, Homo sapiens
agcagaaacaggcaa

SEQ ID NO: 185593 - DNA, 15 bp, Homo sapiens
cagcagaaacaggca

SEQ ID NO: 185594 - DNA, 15 bp, Homo sapiens
gcagcagaaacaggc

SEQ ID NO: 185595 - DNA, 15 bp, Homo sapiens
agcagcagaaacagg

SEQ ID NO: 185596 - DNA, 15 bp, Homo sapiens
gagcagcagaaacag

SEQ ID NO: 185597 - DNA, 15 bp, Homo sapiens
agagcagcagaaaca

SEQ ID NO: 185598 - DNA, 15 bp, Homo sapiens
tagagcagcagaaac

SEQ ID NO: 185599 - DNA, 15 bp, Homo sapiens
ctagagcagcagaaa

SEQ ID NO: 185600 - DNA, 15 bp, Homo sapiens
actagagcagcagaa

SEQ ID NO: 185601 - DNA, 15 bp, Homo sapiens
cactagagcagcaga

SEQ ID NO: 185602 - DNA, 15 bp, Homo sapiens
gcactagagcagcag

SEQ ID NO: 185603 - DNA, 15 bp, Homo sapiens
tgcactagagcagca

SEQ ID NO: 185604 - DNA, 15 bp, Homo sapiens
gtgcactagagcagc

SEQ ID NO: 185605 - DNA, 15 bp, Homo sapiens
tgtgcactagagcag

SEQ ID NO: 185606 - DNA, 15 bp, Homo sapiens
atgtgcactagagca

SEQ ID NO: 185607 - DNA, 15 bp, Homo sapiens
tatgtgcactagagc

SEQ ID NO: 185608 - DNA, 15 bp, Homo sapiens
ttatgtgcactagag

SEQ ID NO: 185609 - DNA, 15 bp, Homo sapiens
tttatgtgcactaga

SEQ ID NO: 185610 - DNA, 15 bp, Homo sapiens
ctttatgtgcactag

SEQ ID NO: 185611 - DNA, 15 bp, Homo sapiens
actttatgtgcacta

SEQ ID NO: 185612 - DNA, 15 bp, Homo sapiens
tactttatgtgcact

SEQ ID NO: 185613 - DNA, 15 bp, Homo sapiens
atactttatgtgcac

SEQ ID NO: 185614 - DNA, 15 bp, Homo sapiens
gatactttatgtgca

SEQ ID NO: 185615 - DNA, 15 bp, Homo sapiens
tgatactttatgtgc

SEQ ID NO: 185616 - DNA, 15 bp, Homo sapiens
atgatactttatgtg

SEQ ID NO: 185617 - DNA, 15 bp, Homo sapiens
catgatactttatgt

SEQ ID NO: 185618 - DNA, 15 bp, Homo sapiens
acatgatactttatg

SEQ ID NO: 185619 - DNA, 15 bp, Homo sapiens
gacatgatactttat

SEQ ID NO: 185620 - DNA, 15 bp, Homo sapiens
agacatgatacttta

SEQ ID NO: 185621 - DNA, 15 bp, Homo sapiens
aagacatgatacttt

SEQ ID NO: 185622 - DNA, 15 bp, Homo sapiens
aaagacatgatactt

SEQ ID NO: 185623 - DNA, 15 bp, Homo sapiens
aaaagacatgatact

SEQ ID NO: 185624 - DNA, 15 bp, Homo sapiens
caaaagacatgatac

SEQ ID NO: 185625 - DNA, 15 bp, Homo sapiens
acaaaagacatgata

SEQ ID NO: 185626 - DNA, 15 bp, Homo sapiens
aacaaaagacatgat

SEQ ID NO: 185627 - DNA, 15 bp, Homo sapiens
aaacaaaagacatga

SEQ ID NO: 185628 - DNA, 15 bp, Homo sapiens
aaaacaaaagacatg

SEQ ID NO: 185629 - DNA, 15 bp, Homo sapiens
aaaaacaaaagacat

SEQ ID NO: 185630 - DNA, 15 bp, Homo sapiens
caaaaacaaaagaca

SEQ ID NO: 185631 - DNA, 15 bp, Homo sapiens
gcaaaaacaaaagac

SEQ ID NO: 185632 - DNA, 15 bp, Homo sapiens
tgcaaaaacaaaaga

SEQ ID NO: 185633 - DNA, 15 bp, Homo sapiens
ctgcaaaaacaaaag

SEQ ID NO: 185634 - DNA, 15 bp, Homo sapiens
tctgcaaaaacaaaa

SEQ ID NO: 185635 - DNA, 15 bp, Homo sapiens
atctgcaaaaacaaa

SEQ ID NO: 185636 - DNA, 15 bp, Homo sapiens
catctgcaaaaacaa

SEQ ID NO: 185637 - DNA, 15 bp, Homo sapiens
ccatctgcaaaaaca

SEQ ID NO: 185638 - DNA, 15 bp, Homo sapiens
tccatctgcaaaaac

SEQ ID NO: 185639 - DNA, 15 bp, Homo sapiens
atccatctgcaaaaa

SEQ ID NO: 185640 - DNA, 15 bp, Homo sapiens
aatccatctgcaaaa

SEQ ID NO: 185641 - DNA, 15 bp, Homo sapiens
aaatccatctgcaaa

SEQ ID NO: 185642 - DNA, 15 bp, Homo sapiens
taaatccatctgcaa

SEQ ID NO: 185643 - DNA, 15 bp, Homo sapiens
gtaaatccatctgca

SEQ ID NO: 185644 - DNA, 15 bp, Homo sapiens
ggtaaatccatctgc

SEQ ID NO: 185645 - DNA, 15 bp, Homo sapiens
aggtaaatccatctg

SEQ ID NO: 185646 - DNA, 15 bp, Homo sapiens
aaggtaaatccatct

SEQ ID NO: 185647 - DNA, 15 bp, Homo sapiens
caaggtaaatccatc

SEQ ID NO: 185648 - DNA, 15 bp, Homo sapiens
gcaaggtaaatccat

SEQ ID NO: 185649 - DNA, 15 bp, Homo sapiens
tgcaaggtaaatcca

SEQ ID NO: 185650 - DNA, 15 bp, Homo sapiens
ttgcaaggtaaatcc

SEQ ID NO: 185651 - DNA, 15 bp, Homo sapiens
tttgcaaggtaaatc

SEQ ID NO: 185652 - DNA, 15 bp, Homo sapiens
ctttgcaaggtaaat

SEQ ID NO: 185653 - DNA, 15 bp, Homo sapiens
tctttgcaaggtaaa

SEQ ID NO: 185654 - DNA, 15 bp, Homo sapiens
atctttgcaaggtaa

SEQ ID NO: 185655 - DNA, 15 bp, Homo sapiens
tatctttgcaaggta

SEQ ID NO: 185656 - DNA, 15 bp, Homo sapiens
ttatctttgcaaggt

SEQ ID NO: 185657 - DNA, 15 bp, Homo sapiens
attatctttgcaagg

SEQ ID NO: 185658 - DNA, 15 bp, Homo sapiens
aattatctttgcaag

SEQ ID NO: 185659 - DNA, 15 bp, Homo sapiens
aaattatctttgcaa

SEQ ID NO: 185660 - DNA, 15 bp, Homo sapiens
aaaattatctttgca

SEQ ID NO: 185661 - DNA, 15 bp, Homo sapiens
gaaaattatctttgc

SEQ ID NO: 185662 - DNA, 15 bp, Homo sapiens
tgaaaattatctttg

SEQ ID NO: 185663 - DNA, 15 bp, Homo sapiens
ttgaaaattatcttt

SEQ ID NO: 185664 - DNA, 15 bp, Homo sapiens
tttgaaaattatctt

SEQ ID NO: 185665 - DNA, 15 bp, Homo sapiens
atttgaaaattatct

SEQ ID NO: 185666 - DNA, 15 bp, Homo sapiens
gatttgaaaattatc

SEQ ID NO: 185667 - DNA, 15 bp, Homo sapiens
agatttgaaaattat

SEQ ID NO: 185668 - DNA, 15 bp, Homo sapiens
tagatttgaaaatta

SEQ ID NO: 185669 - DNA, 15 bp, Homo sapiens
ttagatttgaaaatt

SEQ ID NO: 185670 - DNA, 15 bp, Homo sapiens
attagatttgaaaat

SEQ ID NO: 185671 - DNA, 15 bp, Homo sapiens
tattagatttgaaaa

SEQ ID NO: 185672 - DNA, 15 bp, Homo sapiens
gtattagatttgaaa

SEQ ID NO: 185673 - DNA, 15 bp, Homo sapiens
agtattagatttgaa

SEQ ID NO: 185674 - DNA, 15 bp, Homo sapiens
aagtattagatttga

SEQ ID NO: 185675 - DNA, 15 bp, Homo sapiens
taagtattagatttg

SEQ ID NO: 185676 - DNA, 15 bp, Homo sapiens
ctaagtattagattt

SEQ ID NO: 185677 - DNA, 15 bp, Homo sapiens
gctaagtattagatt

SEQ ID NO: 185678 - DNA, 15 bp, Homo sapiens
tgctaagtattagat

SEQ ID NO: 185679 - DNA, 15 bp, Homo sapiens
ctgctaagtattaga

SEQ ID NO: 185680 - DNA, 15 bp, Homo sapiens
tctgctaagtattag

SEQ ID NO: 185681 - DNA, 15 bp, Homo sapiens
atctgctaagtatta

SEQ ID NO: 185682 - DNA, 15 bp, Homo sapiens
catctgctaagtatt

SEQ ID NO: 185683 - DNA, 15 bp, Homo sapiens
gcatctgctaagtat

SEQ ID NO: 185684 - DNA, 15 bp, Homo sapiens
agcatctgctaagta

SEQ ID NO: 185685 - DNA, 15 bp, Homo sapiens
aagcatctgctaagt

SEQ ID NO: 185686 - DNA, 15 bp, Homo sapiens
caagcatctgctaag

SEQ ID NO: 185687 - DNA, 15 bp, Homo sapiens
ccaagcatctgctaa

SEQ ID NO: 185688 - DNA, 15 bp, Homo sapiens
cccaagcatctgcta

SEQ ID NO: 185689 - DNA, 15 bp, Homo sapiens
gcccaagcatctgct

SEQ ID NO: 185690 - DNA, 15 bp, Homo sapiens
tgcccaagcatctgc

SEQ ID NO: 185691 - DNA, 15 bp, Homo sapiens
ttgcccaagcatctg

SEQ ID NO: 185692 - DNA, 15 bp, Homo sapiens
tttgcccaagcatct

SEQ ID NO: 185693 - DNA, 15 bp, Homo sapiens
gtttgcccaagcatc

SEQ ID NO: 185694 - DNA, 15 bp, Homo sapiens
tgtttgcccaagcat

SEQ ID NO: 185695 - DNA, 15 bp, Homo sapiens
ctgtttgcccaagca

SEQ ID NO: 185696 - DNA, 15 bp, Homo sapiens
gctgtttgcccaagc

SEQ ID NO: 185697 - DNA, 15 bp, Homo sapiens
agctgtttgcccaag

SEQ ID NO: 185698 - DNA, 15 bp, Homo sapiens
gagctgtttgcccaa

SEQ ID NO: 185699 - DNA, 15 bp, Homo sapiens
agagctgtttgccca

SEQ ID NO: 185700 - DNA, 15 bp, Homo sapiens
cagagctgtttgccc

SEQ ID NO: 185701 - DNA, 15 bp, Homo sapiens
gcagagctgtttgcc

SEQ ID NO: 185702 - DNA, 15 bp, Homo sapiens
cgcagagctgtttgc

SEQ ID NO: 185703 - DNA, 15 bp, Homo sapiens
tcgcagagctgtttg

SEQ ID NO: 185704 - DNA, 15 bp, Homo sapiens
atcgcagagctgttt

SEQ ID NO: 185705 - DNA, 15 bp, Homo sapiens
tatcgcagagctgtt

SEQ ID NO: 185706 - DNA, 15 bp, Homo sapiens
ttatcgcagagctgt

SEQ ID NO: 185707 - DNA, 15 bp, Homo sapiens
attatcgcagagctg

SEQ ID NO: 185708 - DNA, 15 bp, Homo sapiens
tattatcgcagagct

SEQ ID NO: 185709 - DNA, 15 bp, Homo sapiens
gtattatcgcagagc

SEQ ID NO: 185710 - DNA, 15 bp, Homo sapiens
tgtattatcgcagag

SEQ ID NO: 185711 - DNA, 15 bp, Homo sapiens
atgtattatcgcaga

SEQ ID NO: 185712 - DNA, 15 bp, Homo sapiens
catgtattatcgcag

SEQ ID NO: 185713 - DNA, 15 bp, Homo sapiens
gcatgtattatcgca

SEQ ID NO: 185714 - DNA, 15 bp, Homo sapiens
ggcatgtattatcgc

SEQ ID NO: 185715 - DNA, 15 bp, Homo sapiens
gggcatgtattatcg

SEQ ID NO: 185716 - DNA, 15 bp, Homo sapiens
ggggcatgtattatc

SEQ ID NO: 185717 - DNA, 15 bp, Homo sapiens
gggggcatgtattat

SEQ ID NO: 185718 - DNA, 15 bp, Homo sapiens
agggggcatgtatta

SEQ ID NO: 185719 - DNA, 15 bp, Homo sapiens
aagggggcatgtatt

SEQ ID NO: 185720 - DNA, 15 bp, Homo sapiens
aaagggggcatgtat

SEQ ID NO: 185721 - DNA, 15 bp, Homo sapiens
aaaagggggcatgta

SEQ ID NO: 185722 - DNA, 15 bp, Homo sapiens
aaaaagggggcatgt

SEQ ID NO: 185723 - DNA, 15 bp, Homo sapiens
aaaaaagggggcatg

SEQ ID NO: 185724 - DNA, 15 bp, Homo sapiens
aaaaaaagggggcat

SEQ ID NO: 185725 - DNA, 15 bp, Homo sapiens
aaaaaaaagggggca

SEQ ID NO: 185726 - DNA, 15 bp, Homo sapiens
aaaaaaaaagggggc

SEQ ID NO: 185727 - DNA, 15 bp, Homo sapiens
gaaaaaaaaaggggg

SEQ ID NO: 185728 - DNA, 15 bp, Homo sapiens
ggaaaaaaaaagggg

SEQ ID NO: 185729 - DNA, 15 bp, Homo sapiens
aggaaaaaaaaaggg

SEQ ID NO: 185730 - DNA, 15 bp, Homo sapiens
gaggaaaaaaaaagg

SEQ ID NO: 185731 - DNA, 15 bp, Homo sapiens
ggaggaaaaaaaaag

SEQ ID NO: 185732 - DNA, 15 bp, Homo sapiens
aggaggaaaaaaaaa

SEQ ID NO: 185733 - DNA, 15 bp, Homo sapiens
gaggaggaaaaaaaa

SEQ ID NO: 185734 - DNA, 15 bp, Homo sapiens
agaggaggaaaaaaa

SEQ ID NO: 185735 - DNA, 15 bp, Homo sapiens
aagaggaggaaaaaa

SEQ ID NO: 185736 - DNA, 15 bp, Homo sapiens
caagaggaggaaaaa

SEQ ID NO: 185737 - DNA, 15 bp, Homo sapiens
acaagaggaggaaaa

SEQ ID NO: 185738 - DNA, 15 bp, Homo sapiens
tacaagaggaggaaa

SEQ ID NO: 185739 - DNA, 15 bp, Homo sapiens
ctacaagaggaggaa

SEQ ID NO: 185740 - DNA, 15 bp, Homo sapiens
tctacaagaggagga

SEQ ID NO: 185741 - DNA, 15 bp, Homo sapiens
ttctacaagaggagg

SEQ ID NO: 185742 - DNA, 15 bp, Homo sapiens
tttctacaagaggag

SEQ ID NO: 185743 - DNA, 15 bp, Homo sapiens
ttttctacaagagga

SEQ ID NO: 185744 - DNA, 15 bp, Homo sapiens
tttttctacaagagg

SEQ ID NO: 185745 - DNA, 15 bp, Homo sapiens
atttttctacaagag

SEQ ID NO: 185746 - DNA, 15 bp, Homo sapiens
aatttttctacaaga

SEQ ID NO: 185747 - DNA, 15 bp, Homo sapiens
caatttttctacaag

SEQ ID NO: 185748 - DNA, 15 bp, Homo sapiens
tcaatttttctacaa

SEQ ID NO: 185749 - DNA, 15 bp, Homo sapiens
atcaatttttctaca

SEQ ID NO: 185750 - DNA, 15 bp, Homo sapiens
catcaatttttctac

SEQ ID NO: 185751 - DNA, 15 bp, Homo sapiens
ccatcaatttttcta

SEQ ID NO: 185752 - DNA, 15 bp, Homo sapiens
tccatcaatttttct

SEQ ID NO: 185753 - DNA, 15 bp, Homo sapiens
ttccatcaatttttc

SEQ ID NO: 185754 - DNA, 15 bp, Homo sapiens
gttccatcaattttt

SEQ ID NO: 185755 - DNA, 15 bp, Homo sapiens
ggttccatcaatttt

SEQ ID NO: 185756 - DNA, 15 bp, Homo sapiens
tggttccatcaattt

SEQ ID NO: 185757 - DNA, 15 bp, Homo sapiens
ctggttccatcaatt

SEQ ID NO: 185758 - DNA, 15 bp, Homo sapiens
tctggttccatcaat

SEQ ID NO: 185759 - DNA, 15 bp, Homo sapiens
ttctggttccatcaa

SEQ ID NO: 185760 - DNA, 15 bp, Homo sapiens
gttctggttccatca

SEQ ID NO: 185761 - DNA, 15 bp, Homo sapiens
tgttctggttccatc

SEQ ID NO: 185762 - DNA, 15 bp, Homo sapiens
gtgttctggttccat

SEQ ID NO: 185763 - DNA, 15 bp, Homo sapiens
ggtgttctggttcca

SEQ ID NO: 185764 - DNA, 15 bp, Homo sapiens
gggtgttctggttcc

SEQ ID NO: 185765 - DNA, 15 bp, Homo sapiens
ggggtgttctggttc

SEQ ID NO: 185766 - DNA, 15 bp, Homo sapiens
cggggtgttctggtt

SEQ ID NO: 185767 - DNA, 15 bp, Homo sapiens
tcggggtgttctggt

SEQ ID NO: 185768 - DNA, 15 bp, Homo sapiens
ctcggggtgttctgg

SEQ ID NO: 185769 - DNA, 15 bp, Homo sapiens
tctcggggtgttctg

SEQ ID NO: 185770 - DNA, 15 bp, Homo sapiens
atctcggggtgttct

SEQ ID NO: 185771 - DNA, 15 bp, Homo sapiens
catctcggggtgttc

SEQ ID NO: 185772 - DNA, 15 bp, Homo sapiens
tcatctcggggtgtt

SEQ ID NO: 185773 - DNA, 15 bp, Homo sapiens
ctcatctcggggtgt

SEQ ID NO: 185774 - DNA, 15 bp, Homo sapiens
tctcatctcggggtg

SEQ ID NO: 185775 - DNA, 15 bp, Homo sapiens
ctctcatctcggggt

SEQ ID NO: 185776 - DNA, 15 bp, Homo sapiens
cctctcatctcgggg

SEQ ID NO: 185777 - DNA, 15 bp, Homo sapiens
tcctctcatctcggg

SEQ ID NO: 185778 - DNA, 15 bp, Homo sapiens
ctcctctcatctcgg

SEQ ID NO: 185779 - DNA, 15 bp, Homo sapiens
tctcctctcatctcg

SEQ ID NO: 185780 - DNA, 15 bp, Homo sapiens
ttctcctctcatctc

SEQ ID NO: 185781 - DNA, 15 bp, Homo sapiens
cttctcctctcatct

SEQ ID NO: 185782 - DNA, 15 bp, Homo sapiens
tcttctcctctcatc

SEQ ID NO: 185783 - DNA, 15 bp, Homo sapiens
ctcttctcctctcat

SEQ ID NO: 185784 - DNA, 15 bp, Homo sapiens
gctcttctcctctca

SEQ ID NO: 185785 - DNA, 15 bp, Homo sapiens
ggctcttctcctctc

SEQ ID NO: 185786 - DNA, 15 bp, Homo sapiens
gggctcttctcctct

SEQ ID NO: 185787 - DNA, 15 bp, Homo sapiens
tgggctcttctcctc

SEQ ID NO: 185788 - DNA, 15 bp, Homo sapiens
ctgggctcttctcct

SEQ ID NO: 185789 - DNA, 15 bp, Homo sapiens
gctgggctcttctcc

SEQ ID NO: 185790 - DNA, 15 bp, Homo sapiens
tgctgggctcttctc

SEQ ID NO: 185791 - DNA, 15 bp, Homo sapiens
gtgctgggctcttct

SEQ ID NO: 185792 - DNA, 15 bp, Homo sapiens
tgtgctgggctcttc

SEQ ID NO: 185793 - DNA, 15 bp, Homo sapiens
ttgtgctgggctctt

SEQ ID NO: 185794 - DNA, 15 bp, Homo sapiens
gttgtgctgggctct

SEQ ID NO: 185795 - DNA, 15 bp, Homo sapiens
cgttgtgctgggctc

SEQ ID NO: 185796 - DNA, 15 bp, Homo sapiens
tcgttgtgctgggct

SEQ ID NO: 185797 - DNA, 15 bp, Homo sapiens
ttcgttgtgctgggc

SEQ ID NO: 185798 - DNA, 15 bp, Homo sapiens
cttcgttgtgctggg

SEQ ID NO: 185799 - DNA, 15 bp, Homo sapiens
ccttcgttgtgctgg

SEQ ID NO: 185800 - DNA, 15 bp, Homo sapiens
accttcgttgtgctg

SEQ ID NO: 185801 - DNA, 15 bp, Homo sapiens
caccttcgttgtgct

SEQ ID NO: 185802 - DNA, 15 bp, Homo sapiens
tcaccttcgttgtgc

SEQ ID NO: 185803 - DNA, 15 bp, Homo sapiens
ctcaccttcgttgtg

SEQ ID NO: 185804 - DNA, 15 bp, Homo sapiens
cctcaccttcgttgt

SEQ ID NO: 185805 - DNA, 15 bp, Homo sapiens
tcctcaccttcgttg

SEQ ID NO: 185806 - DNA, 15 bp, Homo sapiens
gtcctcaccttcgtt

SEQ ID NO: 185807 - DNA, 15 bp, Homo sapiens
tgtcctcaccttcgt

SEQ ID NO: 185808 - DNA, 15 bp, Homo sapiens
ttgtcctcaccttcg

SEQ ID NO: 185809 - DNA, 15 bp, Homo sapiens
cttgtcctcaccttc

SEQ ID NO: 185810 - DNA, 15 bp, Homo sapiens
ccttgtcctcacctt

SEQ ID NO: 185811 - DNA, 15 bp, Homo sapiens
accttgtcctcacct

SEQ ID NO: 185812 - DNA, 15 bp, Homo sapiens
caccttgtcctcacc

SEQ ID NO: 185813 - DNA, 15 bp, Homo sapiens
acaccttgtcctcac

SEQ ID NO: 185814 - DNA, 15 bp, Homo sapiens
cacaccttgtcctca

SEQ ID NO: 185815 - DNA, 15 bp, Homo sapiens
ccacaccttgtcctc

SEQ ID NO: 185816 - DNA, 15 bp, Homo sapiens
gccacaccttgtcct

SEQ ID NO: 185817 - DNA, 15 bp, Homo sapiens
agccacaccttgtcc

SEQ ID NO: 185818 - DNA, 15 bp, Homo sapiens
gagccacaccttgtc

SEQ ID NO: 185819 - DNA, 15 bp, Homo sapiens
ggagccacaccttgt

SEQ ID NO: 185820 - DNA, 15 bp, Homo sapiens
cggagccacaccttg

SEQ ID NO: 185821 - DNA, 15 bp, Homo sapiens
ccggagccacacctt

SEQ ID NO: 185822 - DNA, 15 bp, Homo sapiens
cccggagccacacct

SEQ ID NO: 185823 - DNA, 15 bp, Homo sapiens
acccggagccacacc

SEQ ID NO: 185824 - DNA, 15 bp, Homo sapiens
gacccggagccacac

SEQ ID NO: 185825 - DNA, 15 bp, Homo sapiens
ggacccggagccaca

SEQ ID NO: 185826 - DNA, 15 bp, Homo sapiens
gggacccggagccac

SEQ ID NO: 185827 - DNA, 15 bp, Homo sapiens
ggggacccggagcca

SEQ ID NO: 185828 - DNA, 15 bp, Homo sapiens
gggggacccggagcc

SEQ ID NO: 185829 - DNA, 15 bp, Homo sapiens
agggggacccggagc

SEQ ID NO: 185830 - DNA, 15 bp, Homo sapiens
cagggggacccggag

SEQ ID NO: 185831 - DNA, 15 bp, Homo sapiens
tcagggggacccgga

SEQ ID NO: 185832 - DNA, 15 bp, Homo sapiens
gtcagggggacccgg

SEQ ID NO: 185833 - DNA, 15 bp, Homo sapiens
ggtcagggggacccg

SEQ ID NO: 185834 - DNA, 15 bp, Homo sapiens
tggtcagggggaccc

SEQ ID NO: 185835 - DNA, 15 bp, Homo sapiens
gtggtcagggggacc

SEQ ID NO: 185836 - DNA, 15 bp, Homo sapiens
ggtggtcagggggac

SEQ ID NO: 185837 - DNA, 15 bp, Homo sapiens
tggtggtcaggggga

SEQ ID NO: 185838 - DNA, 15 bp, Homo sapiens
gtggtggtcaggggg

SEQ ID NO: 185839 - DNA, 15 bp, Homo sapiens
ggtggtggtcagggg

SEQ ID NO: 185840 - DNA, 15 bp, Homo sapiens
gggtggtggtcaggg

SEQ ID NO: 185841 - DNA, 15 bp, Homo sapiens
agggtggtggtcagg

SEQ ID NO: 185842 - DNA, 15 bp, Homo sapiens
gagggtggtggtcag

SEQ ID NO: 185843 - DNA, 15 bp, Homo sapiens
tgagggtggtggtca

SEQ ID NO: 185844 - DNA, 15 bp, Homo sapiens
gtgagggtggtggtc

SEQ ID NO: 185845 - DNA, 15 bp, Homo sapiens
tgtgagggtggtggt

SEQ ID NO: 185846 - DNA, 15 bp, Homo sapiens
ctgtgagggtggtgg

SEQ ID NO: 185847 - DNA, 15 bp, Homo sapiens
cctgtgagggtggtg

SEQ ID NO: 185848 - DNA, 15 bp, Homo sapiens
gcctgtgagggtggt

SEQ ID NO: 185849 - DNA, 15 bp, Homo sapiens
agcctgtgagggtgg

SEQ ID NO: 185850 - DNA, 15 bp, Homo sapiens
gagcctgtgagggtg

SEQ ID NO: 185851 - DNA, 15 bp, Homo sapiens
tgagcctgtgagggt

SEQ ID NO: 185852 - DNA, 15 bp, Homo sapiens
ctgagcctgtgaggg

SEQ ID NO: 185853 - DNA, 15 bp, Homo sapiens
gctgagcctgtgagg

SEQ ID NO: 185854 - DNA, 15 bp, Homo sapiens
ggctgagcctgtgag

SEQ ID NO: 185855 - DNA, 15 bp, Homo sapiens
tggctgagcctgtga

SEQ ID NO: 185856 - DNA, 15 bp, Homo sapiens
ctggctgagcctgtg

SEQ ID NO: 185857 - DNA, 15 bp, Homo sapiens
gctggctgagcctgt

SEQ ID NO: 185858 - DNA, 15 bp, Homo sapiens
ggctggctgagcctg

SEQ ID NO: 185859 - DNA, 15 bp, Homo sapiens
gggctggctgagcct

SEQ ID NO: 185860 - DNA, 15 bp, Homo sapiens
agggctggctgagcc

SEQ ID NO: 185861 - DNA, 15 bp, Homo sapiens
cagggctggctgagc

SEQ ID NO: 185862 - DNA, 15 bp, Homo sapiens
ccagggctggctgag

SEQ ID NO: 185863 - DNA, 15 bp, Homo sapiens
tccagggctggctga

SEQ ID NO: 185864 - DNA, 15 bp, Homo sapiens
ctccagggctggctg

SEQ ID NO: 185865 - DNA, 15 bp, Homo sapiens
actccagggctggct

SEQ ID NO: 185866 - DNA, 15 bp, Homo sapiens
cactccagggctggc

SEQ ID NO: 185867 - DNA, 15 bp, Homo sapiens
acactccagggctgg

SEQ ID NO: 185868 - DNA, 15 bp, Homo sapiens
cacactccagggctg

SEQ ID NO: 185869 - DNA, 15 bp, Homo sapiens
ccacactccagggct

SEQ ID NO: 185870 - DNA, 15 bp, Homo sapiens
tccacactccagggc

SEQ ID NO: 185871 - DNA, 15 bp, Homo sapiens
ctccacactccaggg

SEQ ID NO: 185872 - DNA, 15 bp, Homo sapiens
actccacactccagg

SEQ ID NO: 185873 - DNA, 15 bp, Homo sapiens
cactccacactccag

SEQ ID NO: 185874 - DNA, 15 bp, Homo sapiens
tcactccacactcca

SEQ ID NO: 185875 - DNA, 15 bp, Homo sapiens
gtcactccacactcc

SEQ ID NO: 185876 - DNA, 15 bp, Homo sapiens
tgtcactccacactc

SEQ ID NO: 185877 - DNA, 15 bp, Homo sapiens
ctgtcactccacact

SEQ ID NO: 185878 - DNA, 15 bp, Homo sapiens
tctgtcactccacac

SEQ ID NO: 185879 - DNA, 15 bp, Homo sapiens
ctctgtcactccaca

SEQ ID NO: 185880 - DNA, 15 bp, Homo sapiens
tctctgtcactccac

SEQ ID NO: 185881 - DNA, 15 bp, Homo sapiens
ctctctgtcactcca

SEQ ID NO: 185882 - DNA, 15 bp, Homo sapiens
tctctctgtcactcc

SEQ ID NO: 185883 - DNA, 15 bp, Homo sapiens
ctctctctgtcactc

SEQ ID NO: 185884 - DNA, 15 bp, Homo sapiens
tctctctctgtcact

SEQ ID NO: 185885 - DNA, 15 bp, Homo sapiens
ttctctctctgtcac

SEQ ID NO: 185886 - DNA, 15 bp, Homo sapiens
cttctctctctgtca

SEQ ID NO: 185887 - DNA, 15 bp, Homo sapiens
gcttctctctctgtc

SEQ ID NO: 185888 - DNA, 15 bp, Homo sapiens
ggcttctctctctgt

SEQ ID NO: 185889 - DNA, 15 bp, Homo sapiens
tggcttctctctctg

SEQ ID NO: 185890 - DNA, 15 bp, Homo sapiens
gtggcttctctctct

SEQ ID NO: 185891 - DNA, 15 bp, Homo sapiens
agtggcttctctctc

SEQ ID NO: 185892 - DNA, 15 bp, Homo sapiens
gagtggcttctctct

SEQ ID NO: 185893 - DNA, 15 bp, Homo sapiens
ggagtggcttctctc

SEQ ID NO: 185894 - DNA, 15 bp, Homo sapiens
aggagtggcttctct

SEQ ID NO: 185895 - DNA, 15 bp, Homo sapiens
caggagtggcttctc

SEQ ID NO: 185896 - DNA, 15 bp, Homo sapiens
ccaggagtggcttct

SEQ ID NO: 185897 - DNA, 15 bp, Homo sapiens
cccaggagtggcttc

SEQ ID NO: 185898 - DNA, 15 bp, Homo sapiens
gcccaggagtggctt

SEQ ID NO: 185899 - DNA, 15 bp, Homo sapiens
tgcccaggagtggct

SEQ ID NO: 185900 - DNA, 15 bp, Homo sapiens
ctgcccaggagtggc

SEQ ID NO: 185901 - DNA, 15 bp, Homo sapiens
cctgcccaggagtgg

SEQ ID NO: 185902 - DNA, 15 bp, Homo sapiens
gcctgcccaggagtg

SEQ ID NO: 185903 - DNA, 15 bp, Homo sapiens
ggcctgcccaggagt

SEQ ID NO: 185904 - DNA, 15 bp, Homo sapiens
tggcctgcccaggag

SEQ ID NO: 185905 - DNA, 15 bp, Homo sapiens
gtggcctgcccagga

SEQ ID NO: 185906 - DNA, 15 bp, Homo sapiens
tgtggcctgcccagg

SEQ ID NO: 185907 - DNA, 15 bp, Homo sapiens
ttgtggcctgcccag

SEQ ID NO: 185908 - DNA, 15 bp, Homo sapiens
cttgtggcctgccca

SEQ ID NO: 185909 - DNA, 15 bp, Homo sapiens
acttgtggcctgccc

SEQ ID NO: 185910 - DNA, 15 bp, Homo sapiens
cacttgtggcctgcc

SEQ ID NO: 185911 - DNA, 15 bp, Homo sapiens
gcacttgtggcctgc

SEQ ID NO: 185912 - DNA, 15 bp, Homo sapiens
agcacttgtggcctg

SEQ ID NO: 185913 - DNA, 15 bp, Homo sapiens
gagcacttgtggcct

SEQ ID NO: 185914 - DNA, 15 bp, Homo sapiens
ggagcacttgtggcc

SEQ ID NO: 185915 - DNA, 15 bp, Homo sapiens
tggagcacttgtggc

SEQ ID NO: 185916 - DNA, 15 bp, Homo sapiens
ctggagcacttgtgg

SEQ ID NO: 185917 - DNA, 15 bp, Homo sapiens
tctggagcacttgtg

SEQ ID NO: 185918 - DNA, 15 bp, Homo sapiens
ctctggagcacttgt

SEQ ID NO: 185919 - DNA, 15 bp, Homo sapiens
cctctggagcacttg

SEQ ID NO: 185920 - DNA, 15 bp, Homo sapiens
ccctctggagcactt

SEQ ID NO: 185921 - DNA, 15 bp, Homo sapiens
gccctctggagcact

SEQ ID NO: 185922 - DNA, 15 bp, Homo sapiens
agccctctggagcac

SEQ ID NO: 185923 - DNA, 15 bp, Homo sapiens
aagccctctggagca

SEQ ID NO: 185924 - DNA, 15 bp, Homo sapiens
aaagccctctggagc

SEQ ID NO: 185925 - DNA, 15 bp, Homo sapiens
caaagccctctggag

SEQ ID NO: 185926 - DNA, 15 bp, Homo sapiens
gcaaagccctctgga

SEQ ID NO: 185927 - DNA, 15 bp, Homo sapiens
agcaaagccctctgg

SEQ ID NO: 185928 - DNA, 15 bp, Homo sapiens
cagcaaagccctctg

SEQ ID NO: 185929 - DNA, 15 bp, Homo sapiens
ccagcaaagccctct

SEQ ID NO: 185930 - DNA, 15 bp, Homo sapiens
tccagcaaagccctc

SEQ ID NO: 185931 - DNA, 15 bp, Homo sapiens
gtccagcaaagccct

SEQ ID NO: 185932 - DNA, 15 bp, Homo sapiens
cgtccagcaaagccc

SEQ ID NO: 185933 - DNA, 15 bp, Homo sapiens
gcgtccagcaaagcc

SEQ ID NO: 185934 - DNA, 15 bp, Homo sapiens
agcgtccagcaaagc

SEQ ID NO: 185935 - DNA, 15 bp, Homo sapiens
cagcgtccagcaaag

SEQ ID NO: 185936 - DNA, 15 bp, Homo sapiens
acagcgtccagcaaa

SEQ ID NO: 185937 - DNA, 15 bp, Homo sapiens
tacagcgtccagcaa

SEQ ID NO: 185938 - DNA, 15 bp, Homo sapiens
ttacagcgtccagca

SEQ ID NO: 185939 - DNA, 15 bp, Homo sapiens
tttacagcgtccagc

SEQ ID NO: 185940 - DNA, 15 bp, Homo sapiens
ctttacagcgtccag

SEQ ID NO: 185941 - DNA, 15 bp, Homo sapiens
cctttacagcgtcca

SEQ ID NO: 185942 - DNA, 15 bp, Homo sapiens
acctttacagcgtcc

SEQ ID NO: 185943 - DNA, 15 bp, Homo sapiens
tacctttacagcgtc

SEQ ID NO: 185944 - DNA, 15 bp, Homo sapiens
ctacctttacagcgt

SEQ ID NO: 185945 - DNA, 15 bp, Homo sapiens
tctacctttacagcg

SEQ ID NO: 185946 - DNA, 15 bp, Homo sapiens
ttctacctttacagc

SEQ ID NO: 185947 - DNA, 15 bp, Homo sapiens
tttctacctttacag

SEQ ID NO: 185948 - DNA, 15 bp, Homo sapiens
ctttctacctttaca

SEQ ID NO: 185949 - DNA, 15 bp, Homo sapiens
actttctacctttac

SEQ ID NO: 185950 - DNA, 15 bp, Homo sapiens
cactttctaccttta

SEQ ID NO: 185951 - DNA, 15 bp, Homo sapiens
tcactttctaccttt

SEQ ID NO: 185952 - DNA, 15 bp, Homo sapiens
ctcactttctacctt

SEQ ID NO: 185953 - DNA, 15 bp, Homo sapiens
gctcactttctacct

SEQ ID NO: 185954 - DNA, 15 bp, Homo sapiens
tgctcactttctacc

SEQ ID NO: 185955 - DNA, 15 bp, Homo sapiens
ttgctcactttctac

SEQ ID NO: 185956 - DNA, 15 bp, Homo sapiens
gttgctcactttcta

SEQ ID NO: 185957 - DNA, 15 bp, Homo sapiens
cgttgctcactttct

SEQ ID NO: 185958 - DNA, 15 bp, Homo sapiens
tcgttgctcactttc

SEQ ID NO: 185959 - DNA, 15 bp, Homo sapiens
ctcgttgctcacttt

SEQ ID NO: 185960 - DNA, 15 bp, Homo sapiens
cctcgttgctcactt

SEQ ID NO: 185961 - DNA, 15 bp, Homo sapiens
ccctcgttgctcact

SEQ ID NO: 185962 - DNA, 15 bp, Homo sapiens
cccctcgttgctcac

SEQ ID NO: 185963 - DNA, 15 bp, Homo sapiens
tcccctcgttgctca

SEQ ID NO: 185964 - DNA, 15 bp, Homo sapiens
ctcccctcgttgctc

SEQ ID NO: 185965 - DNA, 15 bp, Homo sapiens
tctcccctcgttgct

SEQ ID NO: 185966 - DNA, 15 bp, Homo sapiens
ctctcccctcgttgc

SEQ ID NO: 185967 - DNA, 15 bp, Homo sapiens
actctcccctcgttg

SEQ ID NO: 185968 - DNA, 15 bp, Homo sapiens
tactctcccctcgtt

SEQ ID NO: 185969 - DNA, 15 bp, Homo sapiens
gtactctcccctcgt

SEQ ID NO: 185970 - DNA, 15 bp, Homo sapiens
tgtactctcccctcg

SEQ ID NO: 185971 - DNA, 15 bp, Homo sapiens
ctgtactctcccctc

SEQ ID NO: 185972 - DNA, 15 bp, Homo sapiens
actgtactctcccct

SEQ ID NO: 185973 - DNA, 15 bp, Homo sapiens
cactgtactctcccc

SEQ ID NO: 185974 - DNA, 15 bp, Homo sapiens
acactgtactctccc

SEQ ID NO: 185975 - DNA, 15 bp, Homo sapiens
gacactgtactctcc

SEQ ID NO: 185976 - DNA, 15 bp, Homo sapiens
tgacactgtactctc

SEQ ID NO: 185977 - DNA, 15 bp, Homo sapiens
ctgacactgtactct

SEQ ID NO: 185978 - DNA, 15 bp, Homo sapiens
tctgacactgtactc

SEQ ID NO: 185979 - DNA, 15 bp, Homo sapiens
ttctgacactgtact

SEQ ID NO: 185980 - DNA, 15 bp, Homo sapiens
cttctgacactgtac

SEQ ID NO: 185981 - DNA, 15 bp, Homo sapiens
acttctgacactgta

SEQ ID NO: 185982 - DNA, 15 bp, Homo sapiens
tacttctgacactgt

SEQ ID NO: 185983 - DNA, 15 bp, Homo sapiens
ctacttctgacactg

SEQ ID NO: 185984 - DNA, 15 bp, Homo sapiens
tctacttctgacact

SEQ ID NO: 185985 - DNA, 15 bp, Homo sapiens
ctctacttctgacac

SEQ ID NO: 185986 - DNA, 15 bp, Homo sapiens
cctctacttctgaca

SEQ ID NO: 185987 - DNA, 15 bp, Homo sapiens
ccctctacttctgac

SEQ ID NO: 185988 - DNA, 15 bp, Homo sapiens
tccctctacttctga

SEQ ID NO: 185989 - DNA, 15 bp, Homo sapiens
gtccctctacttctg

SEQ ID NO: 185990 - DNA, 15 bp, Homo sapiens
tgtccctctacttct

SEQ ID NO: 185991 - DNA, 15 bp, Homo sapiens
ctgtccctctacttc

SEQ ID NO: 185992 - DNA, 15 bp, Homo sapiens
cctgtccctctactt

SEQ ID NO: 185993 - DNA, 15 bp, Homo sapiens
ccctgtccctctact

SEQ ID NO: 185994 - DNA, 15 bp, Homo sapiens
tccctgtccctctac

SEQ ID NO: 185995 - DNA, 15 bp, Homo sapiens
ctccctgtccctcta

SEQ ID NO: 185996 - DNA, 15 bp, Homo sapiens
actccctgtccctct

SEQ ID NO: 185997 - DNA, 15 bp, Homo sapiens
cactccctgtccctc

SEQ ID NO: 185998 - DNA, 15 bp, Homo sapiens
acactccctgtccct

SEQ ID NO: 185999 - DNA, 15 bp, Homo sapiens
cacactccctgtccc

SEQ ID NO: 186000 - DNA, 15 bp, Homo sapiens
tcacactccctgtcc

SEQ ID NO: 186001 - DNA, 15 bp, Homo sapiens
ttcacactccctgtc

SEQ ID NO: 186002 - DNA, 15 bp, Homo sapiens
attcacactccctgt

SEQ ID NO: 186003 - DNA, 15 bp, Homo sapiens
aattcacactccctg

SEQ ID NO: 186004 - DNA, 15 bp, Homo sapiens
caattcacactccct

SEQ ID NO: 186005 - DNA, 15 bp, Homo sapiens
ccaattcacactccc

SEQ ID NO: 186006 - DNA, 15 bp, Homo sapiens
tccaattcacactcc

SEQ ID NO: 186007 - DNA, 15 bp, Homo sapiens
ttccaattcacactc

SEQ ID NO: 186008 - DNA, 15 bp, Homo sapiens
gttccaattcacact

SEQ ID NO: 186009 - DNA, 15 bp, Homo sapiens
agttccaattcacac

SEQ ID NO: 186010 - DNA, 15 bp, Homo sapiens
cagttccaattcaca

SEQ ID NO: 186011 - DNA, 15 bp, Homo sapiens
ccagttccaattcac

SEQ ID NO: 186012 - DNA, 15 bp, Homo sapiens
gccagttccaattca

SEQ ID NO: 186013 - DNA, 15 bp, Homo sapiens
ggccagttccaattc

SEQ ID NO: 186014 - DNA, 15 bp, Homo sapiens
tggccagttccaatt

SEQ ID NO: 186015 - DNA, 15 bp, Homo sapiens
atggccagttccaat

SEQ ID NO: 186016 - DNA, 15 bp, Homo sapiens
aatggccagttccaa

SEQ ID NO: 186017 - DNA, 15 bp, Homo sapiens
aaatggccagttcca

SEQ ID NO: 186018 - DNA, 15 bp, Homo sapiens
caaatggccagttcc

SEQ ID NO: 186019 - DNA, 15 bp, Homo sapiens
acaaatggccagttc

SEQ ID NO: 186020 - DNA, 15 bp, Homo sapiens
aacaaatggccagtt

SEQ ID NO: 186021 - DNA, 15 bp, Homo sapiens
caacaaatggccagt

SEQ ID NO: 186022 - DNA, 15 bp, Homo sapiens
tcaacaaatggccag

SEQ ID NO: 186023 - DNA, 15 bp, Homo sapiens
gtcaacaaatggcca

SEQ ID NO: 186024 - DNA, 15 bp, Homo sapiens
ggtcaacaaatggcc

SEQ ID NO: 186025 - DNA, 15 bp, Homo sapiens
gggtcaacaaatggc

SEQ ID NO: 186026 - DNA, 15 bp, Homo sapiens
cgggtcaacaaatgg

SEQ ID NO: 186027 - DNA, 15 bp, Homo sapiens
ccgggtcaacaaatg

SEQ ID NO: 186028 - DNA, 15 bp, Homo sapiens
gccgggtcaacaaat

SEQ ID NO: 186029 - DNA, 15 bp, Homo sapiens
agccgggtcaacaaa

SEQ ID NO: 186030 - DNA, 15 bp, Homo sapiens
cagccgggtcaacaa

SEQ ID NO: 186031 - DNA, 15 bp, Homo sapiens
ccagccgggtcaaca

SEQ ID NO: 186032 - DNA, 15 bp, Homo sapiens
accagccgggtcaac

SEQ ID NO: 186033 - DNA, 15 bp, Homo sapiens
caccagccgggtcaa

SEQ ID NO: 186034 - DNA, 15 bp, Homo sapiens
tcaccagccgggtca

SEQ ID NO: 186035 - DNA, 15 bp, Homo sapiens
atcaccagccgggtc

SEQ ID NO: 186036 - DNA, 15 bp, Homo sapiens
gatcaccagccgggt

SEQ ID NO: 186037 - DNA, 15 bp, Homo sapiens
agatcaccagccggg

SEQ ID NO: 186038 - DNA, 15 bp, Homo sapiens
aagatcaccagccgg

SEQ ID NO: 186039 - DNA, 15 bp, Homo sapiens
caagatcaccagccg

SEQ ID NO: 186040 - DNA, 15 bp, Homo sapiens
tcaagatcaccagcc

SEQ ID NO: 186041 - DNA, 15 bp, Homo sapiens
ttcaagatcaccagc

SEQ ID NO: 186042 - DNA, 15 bp, Homo sapiens
attcaagatcaccag

SEQ ID NO: 186043 - DNA, 15 bp, Homo sapiens
aattcaagatcacca

SEQ ID NO: 186044 - DNA, 15 bp, Homo sapiens
gaattcaagatcacc

SEQ ID NO: 186045 - DNA, 15 bp, Homo sapiens
tgaattcaagatcac

SEQ ID NO: 186046 - DNA, 15 bp, Homo sapiens
atgaattcaagatca

SEQ ID NO: 186047 - DNA, 15 bp, Homo sapiens
catgaattcaagatc

SEQ ID NO: 186048 - DNA, 15 bp, Homo sapiens
ccatgaattcaagat

SEQ ID NO: 186049 - DNA, 15 bp, Homo sapiens
gccatgaattcaaga

SEQ ID NO: 186050 - DNA, 15 bp, Homo sapiens
ggccatgaattcaag

SEQ ID NO: 186051 - DNA, 15 bp, Homo sapiens
gggccatgaattcaa

SEQ ID NO: 186052 - DNA, 15 bp, Homo sapiens
tgggccatgaattca

SEQ ID NO: 186053 - DNA, 15 bp, Homo sapiens
gtgggccatgaattc

SEQ ID NO: 186054 - DNA, 15 bp, Homo sapiens
tgtgggccatgaatt

SEQ ID NO: 186055 - DNA, 15 bp, Homo sapiens
atgtgggccatgaat

SEQ ID NO: 186056 - DNA, 15 bp, Homo sapiens
gatgtgggccatgaa

SEQ ID NO: 186057 - DNA, 15 bp, Homo sapiens
agatgtgggccatga

SEQ ID NO: 186058 - DNA, 15 bp, Homo sapiens
tagatgtgggccatg

SEQ ID NO: 186059 - DNA, 15 bp, Homo sapiens
ttagatgtgggccat

SEQ ID NO: 186060 - DNA, 15 bp, Homo sapiens
cttagatgtgggcca

SEQ ID NO: 186061 - DNA, 15 bp, Homo sapiens
tcttagatgtgggcc

SEQ ID NO: 186062 - DNA, 15 bp, Homo sapiens
atcttagatgtgggc

SEQ ID NO: 186063 - DNA, 15 bp, Homo sapiens
catcttagatgtggg

SEQ ID NO: 186064 - DNA, 15 bp, Homo sapiens
ccatcttagatgtgg

SEQ ID NO: 186065 - DNA, 15 bp, Homo sapiens
accatcttagatgtg

SEQ ID NO: 186066 - DNA, 15 bp, Homo sapiens
caccatcttagatgt

SEQ ID NO: 186067 - DNA, 15 bp, Homo sapiens
ccaccatcttagatg

SEQ ID NO: 186068 - DNA, 15 bp, Homo sapiens
tccaccatcttagat

SEQ ID NO: 186069 - DNA, 15 bp, Homo sapiens
gtccaccatcttaga

SEQ ID NO: 186070 - DNA, 15 bp, Homo sapiens
agtccaccatcttag

SEQ ID NO: 186071 - DNA, 15 bp, Homo sapiens
aagtccaccatctta

SEQ ID NO: 186072 - DNA, 15 bp, Homo sapiens
gaagtccaccatctt

SEQ ID NO: 186073 - DNA, 15 bp, Homo sapiens
tgaagtccaccatct

SEQ ID NO: 186074 - DNA, 15 bp, Homo sapiens
gtgaagtccaccatc

SEQ ID NO: 186075 - DNA, 15 bp, Homo sapiens
tgtgaagtccaccat

SEQ ID NO: 186076 - DNA, 15 bp, Homo sapiens
gtgtgaagtccacca

SEQ ID NO: 186077 - DNA, 15 bp, Homo sapiens
agtgtgaagtccacc

SEQ ID NO: 186078 - DNA, 15 bp, Homo sapiens
gagtgtgaagtccac

SEQ ID NO: 186079 - DNA, 15 bp, Homo sapiens
ggagtgtgaagtcca

SEQ ID NO: 186080 - DNA, 15 bp, Homo sapiens
gggagtgtgaagtcc

SEQ ID NO: 186081 - DNA, 15 bp, Homo sapiens
tgggagtgtgaagtc

SEQ ID NO: 186082 - DNA, 15 bp, Homo sapiens
atgggagtgtgaagt

SEQ ID NO: 186083 - DNA, 15 bp, Homo sapiens
tatgggagtgtgaag

SEQ ID NO: 186084 - DNA, 15 bp, Homo sapiens
gtatgggagtgtgaa

SEQ ID NO: 186085 - DNA, 15 bp, Homo sapiens
cgtatgggagtgtga

SEQ ID NO: 186086 - DNA, 15 bp, Homo sapiens
ccgtatgggagtgtg

SEQ ID NO: 186087 - DNA, 15 bp, Homo sapiens
tccgtatgggagtgt

SEQ ID NO: 186088 - DNA, 15 bp, Homo sapiens
atccgtatgggagtg

SEQ ID NO: 186089 - DNA, 15 bp, Homo sapiens
aatccgtatgggagt

SEQ ID NO: 186090 - DNA, 15 bp, Homo sapiens
caatccgtatgggag

SEQ ID NO: 186091 - DNA, 15 bp, Homo sapiens
gcaatccgtatggga

SEQ ID NO: 186092 - DNA, 15 bp, Homo sapiens
ggcaatccgtatggg

SEQ ID NO: 186093 - DNA, 15 bp, Homo sapiens
aggcaatccgtatgg

SEQ ID NO: 186094 - DNA, 15 bp, Homo sapiens
caggcaatccgtatg

SEQ ID NO: 186095 - DNA, 15 bp, Homo sapiens
gcaggcaatccgtat

SEQ ID NO: 186096 - DNA, 15 bp, Homo sapiens
ggcaggcaatccgta

SEQ ID NO: 186097 - DNA, 15 bp, Homo sapiens
gggcaggcaatccgt

SEQ ID NO: 186098 - DNA, 15 bp, Homo sapiens
ggggcaggcaatccg

SEQ ID NO: 186099 - DNA, 15 bp, Homo sapiens
tggggcaggcaatcc

SEQ ID NO: 186100 - DNA, 15 bp, Homo sapiens
gtggggcaggcaatc

SEQ ID NO: 186101 - DNA, 15 bp, Homo sapiens
agtggggcaggcaat

SEQ ID NO: 186102 - DNA, 15 bp, Homo sapiens
aagtggggcaggcaa

SEQ ID NO: 186103 - DNA, 15 bp, Homo sapiens
caagtggggcaggca

SEQ ID NO: 186104 - DNA, 15 bp, Homo sapiens
tcaagtggggcaggc

SEQ ID NO: 186105 - DNA, 15 bp, Homo sapiens
ttcaagtggggcagg

SEQ ID NO: 186106 - DNA, 15 bp, Homo sapiens
tttcaagtggggcag

SEQ ID NO: 186107 - DNA, 15 bp, Homo sapiens
ttttcaagtggggca

SEQ ID NO: 186108 - DNA, 15 bp, Homo sapiens
tttttcaagtggggc

SEQ ID NO: 186109 - DNA, 15 bp, Homo sapiens
atttttcaagtgggg

SEQ ID NO: 186110 - DNA, 15 bp, Homo sapiens
catttttcaagtggg

SEQ ID NO: 186111 - DNA, 15 bp, Homo sapiens
ccatttttcaagtgg

SEQ ID NO: 186112 - DNA, 15 bp, Homo sapiens
cccatttttcaagtg

SEQ ID NO: 186113 - DNA, 15 bp, Homo sapiens
ccccatttttcaagt

SEQ ID NO: 186114 - DNA, 15 bp, Homo sapiens
gccccatttttcaag

SEQ ID NO: 186115 - DNA, 15 bp, Homo sapiens
agccccatttttcaa

SEQ ID NO: 186116 - DNA, 15 bp, Homo sapiens
cagccccatttttca

SEQ ID NO: 186117 - DNA, 15 bp, Homo sapiens
tcagccccatttttc

SEQ ID NO: 186118 - DNA, 15 bp, Homo sapiens
gtcagccccattttt

SEQ ID NO: 186119 - DNA, 15 bp, Homo sapiens
ggtcagccccatttt

SEQ ID NO: 186120 - DNA, 15 bp, Homo sapiens
cggtcagccccattt

SEQ ID NO: 186121 - DNA, 15 bp, Homo sapiens
ccggtcagccccatt

SEQ ID NO: 186122 - DNA, 15 bp, Homo sapiens
cccggtcagccccat

SEQ ID NO: 186123 - DNA, 15 bp, Homo sapiens
gcccggtcagcccca

SEQ ID NO: 186124 - DNA, 15 bp, Homo sapiens
agcccggtcagcccc

SEQ ID NO: 186125 - DNA, 15 bp, Homo sapiens
gagcccggtcagccc

SEQ ID NO: 186126 - DNA, 15 bp, Homo sapiens
tgagcccggtcagcc

SEQ ID NO: 186127 - DNA, 15 bp, Homo sapiens
gtgagcccggtcagc

SEQ ID NO: 186128 - DNA, 15 bp, Homo sapiens
cgtgagcccggtcag

SEQ ID NO: 186129 - DNA, 15 bp, Homo sapiens
acgtgagcccggtca

SEQ ID NO: 186130 - DNA, 15 bp, Homo sapiens
cacgtgagcccggtc

SEQ ID NO: 186131 - DNA, 15 bp, Homo sapiens
ccacgtgagcccggt

SEQ ID NO: 186132 - DNA, 15 bp, Homo sapiens
cccacgtgagcccgg

SEQ ID NO: 186133 - DNA, 15 bp, Homo sapiens
gcccacgtgagcccg

SEQ ID NO: 186134 - DNA, 15 bp, Homo sapiens
agcccacgtgagccc

SEQ ID NO: 186135 - DNA, 15 bp, Homo sapiens
cagcccacgtgagcc

SEQ ID NO: 186136 - DNA, 15 bp, Homo sapiens
tcagcccacgtgagc

SEQ ID NO: 186137 - DNA, 15 bp, Homo sapiens
gtcagcccacgtgag

SEQ ID NO: 186138 - DNA, 15 bp, Homo sapiens
ggtcagcccacgtga

SEQ ID NO: 186139 - DNA, 15 bp, Homo sapiens
aggtcagcccacgtg

SEQ ID NO: 186140 - DNA, 15 bp, Homo sapiens
aaggtcagcccacgt

SEQ ID NO: 186141 - DNA, 15 bp, Homo sapiens
aaaggtcagcccacg

SEQ ID NO: 186142 - DNA, 15 bp, Homo sapiens
gaaaggtcagcccac

SEQ ID NO: 186143 - DNA, 15 bp, Homo sapiens
ggaaaggtcagccca

SEQ ID NO: 186144 - DNA, 15 bp, Homo sapiens
tggaaaggtcagccc

SEQ ID NO: 186145 - DNA, 15 bp, Homo sapiens
gtggaaaggtcagcc

SEQ ID NO: 186146 - DNA, 15 bp, Homo sapiens
cgtggaaaggtcagc

SEQ ID NO: 186147 - DNA, 15 bp, Homo sapiens
acgtggaaaggtcag

SEQ ID NO: 186148 - DNA, 15 bp, Homo sapiens
cacgtggaaaggtca

SEQ ID NO: 186149 - DNA, 15 bp, Homo sapiens
ccacgtggaaaggtc

SEQ ID NO: 186150 - DNA, 15 bp, Homo sapiens
gccacgtggaaaggt

SEQ ID NO: 186151 - DNA, 15 bp, Homo sapiens
tgccacgtggaaagg

SEQ ID NO: 186152 - DNA, 15 bp, Homo sapiens
ctgccacgtggaaag

SEQ ID NO: 186153 - DNA, 15 bp, Homo sapiens
gctgccacgtggaaa

SEQ ID NO: 186154 - DNA, 15 bp, Homo sapiens
agctgccacgtggaa

SEQ ID NO: 186155 - DNA, 15 bp, Homo sapiens
cagctgccacgtgga

SEQ ID NO: 186156 - DNA, 15 bp, Homo sapiens
acagctgccacgtgg

SEQ ID NO: 186157 - DNA, 15 bp, Homo sapiens
gacagctgccacgtg

SEQ ID NO: 186158 - DNA, 15 bp, Homo sapiens
tgacagctgccacgt

SEQ ID NO: 186159 - DNA, 15 bp, Homo sapiens
atgacagctgccacg

SEQ ID NO: 186160 - DNA, 15 bp, Homo sapiens
catgacagctgccac

SEQ ID NO: 186161 - DNA, 15 bp, Homo sapiens
gcatgacagctgcca

SEQ ID NO: 186162 - DNA, 15 bp, Homo sapiens
agcatgacagctgcc

SEQ ID NO: 186163 - DNA, 15 bp, Homo sapiens
gagcatgacagctgc

SEQ ID NO: 186164 - DNA, 15 bp, Homo sapiens
tgagcatgacagctg

SEQ ID NO: 186165 - DNA, 15 bp, Homo sapiens
gtgagcatgacagct

SEQ ID NO: 186166 - DNA, 15 bp, Homo sapiens
tgtgagcatgacagc

SEQ ID NO: 186167 - DNA, 15 bp, Homo sapiens
atgtgagcatgacag

SEQ ID NO: 186168 - DNA, 15 bp, Homo sapiens
gatgtgagcatgaca

SEQ ID NO: 186169 - DNA, 15 bp, Homo sapiens
ggatgtgagcatgac

SEQ ID NO: 186170 - DNA, 15 bp, Homo sapiens
gggatgtgagcatga

SEQ ID NO: 186171 - DNA, 15 bp, Homo sapiens
cgggatgtgagcatg

SEQ ID NO: 186172 - DNA, 15 bp, Homo sapiens
gcgggatgtgagcat

SEQ ID NO: 186173 - DNA, 15 bp, Homo sapiens
tgcgggatgtgagca

SEQ ID NO: 186174 - DNA, 15 bp, Homo sapiens
gtgcgggatgtgagc

SEQ ID NO: 186175 - DNA, 15 bp, Homo sapiens
agtgcgggatgtgag

SEQ ID NO: 186176 - DNA, 15 bp, Homo sapiens
gagtgcgggatgtga

SEQ ID NO: 186177 - DNA, 15 bp, Homo sapiens
ggagtgcgggatgtg

SEQ ID NO: 186178 - DNA, 15 bp, Homo sapiens
gggagtgcgggatgt

SEQ ID NO: 186179 - DNA, 15 bp, Homo sapiens
tgggagtgcgggatg

SEQ ID NO: 186180 - DNA, 15 bp, Homo sapiens
atgggagtgcgggat

SEQ ID NO: 186181 - DNA, 15 bp, Homo sapiens
catgggagtgcggga

SEQ ID NO: 186182 - DNA, 15 bp, Homo sapiens
gcatgggagtgcggg

SEQ ID NO: 186183 - DNA, 15 bp, Homo sapiens
ggcatgggagtgcgg

SEQ ID NO: 186184 - DNA, 15 bp, Homo sapiens
aggcatgggagtgcg

SEQ ID NO: 186185 - DNA, 15 bp, Homo sapiens
caggcatgggagtgc

SEQ ID NO: 186186 - DNA, 15 bp, Homo sapiens
gcaggcatgggagtg

SEQ ID NO: 186187 - DNA, 15 bp, Homo sapiens
ggcaggcatgggagt

SEQ ID NO: 186188 - DNA, 15 bp, Homo sapiens
aggcaggcatgggag

SEQ ID NO: 186189 - DNA, 15 bp, Homo sapiens
caggcaggcatggga

SEQ ID NO: 186190 - DNA, 15 bp, Homo sapiens
ccaggcaggcatggg

SEQ ID NO: 186191 - DNA, 15 bp, Homo sapiens
gccaggcaggcatgg

SEQ ID NO: 186192 - DNA, 15 bp, Homo sapiens
ggccaggcaggcatg

SEQ ID NO: 186193 - DNA, 15 bp, Homo sapiens
aggccaggcaggcat

SEQ ID NO: 186194 - DNA, 15 bp, Homo sapiens
gaggccaggcaggca

SEQ ID NO: 186195 - DNA, 15 bp, Homo sapiens
ggaggccaggcaggc

SEQ ID NO: 186196 - DNA, 15 bp, Homo sapiens
tggaggccaggcagg

SEQ ID NO: 186197 - DNA, 15 bp, Homo sapiens
ctggaggccaggcag

SEQ ID NO: 186198 - DNA, 15 bp, Homo sapiens
tctggaggccaggca

SEQ ID NO: 186199 - DNA, 15 bp, Homo sapiens
ttctggaggccaggc

SEQ ID NO: 186200 - DNA, 15 bp, Homo sapiens
cttctggaggccagg

SEQ ID NO: 186201 - DNA, 15 bp, Homo sapiens
acttctggaggccag

SEQ ID NO: 186202 - DNA, 15 bp, Homo sapiens
tacttctggaggcca

SEQ ID NO: 186203 - DNA, 15 bp, Homo sapiens
ctacttctggaggcc

SEQ ID NO: 186204 - DNA, 15 bp, Homo sapiens
cctacttctggaggc

SEQ ID NO: 186205 - DNA, 15 bp, Homo sapiens
acctacttctggagg

SEQ ID NO: 186206 - DNA, 15 bp, Homo sapiens
gacctacttctggag

SEQ ID NO: 186207 - DNA, 15 bp, Homo sapiens
agacctacttctgga

SEQ ID NO: 186208 - DNA, 15 bp, Homo sapiens
cagacctacttctgg

SEQ ID NO: 186209 - DNA, 15 bp, Homo sapiens
acagacctacttctg

SEQ ID NO: 186210 - DNA, 15 bp, Homo sapiens
aacagacctacttct

SEQ ID NO: 186211 - DNA, 15 bp, Homo sapiens
gaacagacctacttc

SEQ ID NO: 186212 - DNA, 15 bp, Homo sapiens
ggaacagacctactt

SEQ ID NO: 186213 - DNA, 15 bp, Homo sapiens
gggaacagacctact

SEQ ID NO: 186214 - DNA, 15 bp, Homo sapiens
ggggaacagacctac

SEQ ID NO: 186215 - DNA, 15 bp, Homo sapiens
gggggaacagaccta

SEQ ID NO: 186216 - DNA, 15 bp, Homo sapiens
tgggggaacagacct

SEQ ID NO: 186217 - DNA, 15 bp, Homo sapiens
ctgggggaacagacc

SEQ ID NO: 186218 - DNA, 15 bp, Homo sapiens
cctgggggaacagac

SEQ ID NO: 186219 - DNA, 15 bp, Homo sapiens
ccctgggggaacaga

SEQ ID NO: 186220 - DNA, 15 bp, Homo sapiens
tccctgggggaacag

SEQ ID NO: 186221 - DNA, 15 bp, Homo sapiens
ctccctgggggaaca

SEQ ID NO: 186222 - DNA, 15 bp, Homo sapiens
gctccctgggggaac

SEQ ID NO: 186223 - DNA, 15 bp, Homo sapiens
tgctccctgggggaa

SEQ ID NO: 186224 - DNA, 15 bp, Homo sapiens
gtgctccctggggga

SEQ ID NO: 186225 - DNA, 15 bp, Homo sapiens
tgtgctccctggggg

SEQ ID NO: 186226 - DNA, 15 bp, Homo sapiens
atgtgctccctgggg

SEQ ID NO: 186227 - DNA, 15 bp, Homo sapiens
gatgtgctccctggg

SEQ ID NO: 186228 - DNA, 15 bp, Homo sapiens
agatgtgctccctgg

SEQ ID NO: 186229 - DNA, 15 bp, Homo sapiens
cagatgtgctccctg

SEQ ID NO: 186230 - DNA, 15 bp, Homo sapiens
tcagatgtgctccct

SEQ ID NO: 186231 - DNA, 15 bp, Homo sapiens
ctcagatgtgctccc

SEQ ID NO: 186232 - DNA, 15 bp, Homo sapiens
cctcagatgtgctcc

SEQ ID NO: 186233 - DNA, 15 bp, Homo sapiens
ccctcagatgtgctc

SEQ ID NO: 186234 - DNA, 15 bp, Homo sapiens
tccctcagatgtgct

SEQ ID NO: 186235 - DNA, 15 bp, Homo sapiens
ctccctcagatgtgc

SEQ ID NO: 186236 - DNA, 15 bp, Homo sapiens
tctccctcagatgtg

SEQ ID NO: 186237 - DNA, 15 bp, Homo sapiens
ttctccctcagatgt

SEQ ID NO: 186238 - DNA, 15 bp, Homo sapiens
tttctccctcagatg

SEQ ID NO: 186239 - DNA, 15 bp, Homo sapiens
gtttctccctcagat

SEQ ID NO: 186240 - DNA, 15 bp, Homo sapiens
agtttctccctcaga

SEQ ID NO: 186241 - DNA, 15 bp, Homo sapiens
cagtttctccctcag

SEQ ID NO: 186242 - DNA, 15 bp, Homo sapiens
gcagtttctccctca

SEQ ID NO: 186243 - DNA, 15 bp, Homo sapiens
tgcagtttctccctc

SEQ ID NO: 186244 - DNA, 15 bp, Homo sapiens
atgcagtttctccct

SEQ ID NO: 186245 - DNA, 15 bp, Homo sapiens
catgcagtttctccc

SEQ ID NO: 186246 - DNA, 15 bp, Homo sapiens
tcatgcagtttctcc

SEQ ID NO: 186247 - DNA, 15 bp, Homo sapiens
ttcatgcagtttctc

SEQ ID NO: 186248 - DNA, 15 bp, Homo sapiens
cttcatgcagtttct

SEQ ID NO: 186249 - DNA, 15 bp, Homo sapiens
acttcatgcagtttc

SEQ ID NO: 186250 - DNA, 15 bp, Homo sapiens
aacttcatgcagttt

SEQ ID NO: 186251 - DNA, 15 bp, Homo sapiens
gaacttcatgcagtt

SEQ ID NO: 186252 - DNA, 15 bp, Homo sapiens
agaacttcatgcagt

SEQ ID NO: 186253 - DNA, 15 bp, Homo sapiens
cagaacttcatgcag

SEQ ID NO: 186254 - DNA, 15 bp, Homo sapiens
gcagaacttcatgca

SEQ ID NO: 186255 - DNA, 15 bp, Homo sapiens
ggcagaacttcatgc

SEQ ID NO: 186256 - DNA, 15 bp, Homo sapiens
aggcagaacttcatg

SEQ ID NO: 186257 - DNA, 15 bp, Homo sapiens
gaggcagaacttcat

SEQ ID NO: 186258 - DNA, 15 bp, Homo sapiens
agaggcagaacttca

SEQ ID NO: 186259 - DNA, 15 bp, Homo sapiens
cagaggcagaacttc

SEQ ID NO: 186260 - DNA, 15 bp, Homo sapiens
ccagaggcagaactt

SEQ ID NO: 186261 - DNA, 15 bp, Homo sapiens
gccagaggcagaact

SEQ ID NO: 186262 - DNA, 15 bp, Homo sapiens
agccagaggcagaac

SEQ ID NO: 186263 - DNA, 15 bp, Homo sapiens
tagccagaggcagaa

SEQ ID NO: 186264 - DNA, 15 bp, Homo sapiens
gtagccagaggcaga

SEQ ID NO: 186265 - DNA, 15 bp, Homo sapiens
ggtagccagaggcag

SEQ ID NO: 186266 - DNA, 15 bp, Homo sapiens
aggtagccagaggca

SEQ ID NO: 186267 - DNA, 15 bp, Homo sapiens
taggtagccagaggc

SEQ ID NO: 186268 - DNA, 15 bp, Homo sapiens
ttaggtagccagagg

SEQ ID NO: 186269 - DNA, 15 bp, Homo sapiens
cttaggtagccagag

SEQ ID NO: 186270 - DNA, 15 bp, Homo sapiens
ccttaggtagccaga

SEQ ID NO: 186271 - DNA, 15 bp, Homo sapiens
gccttaggtagccag

SEQ ID NO: 186272 - DNA, 15 bp, Homo sapiens
ggccttaggtagcca

SEQ ID NO: 186273 - DNA, 15 bp, Homo sapiens
cggccttaggtagcc

SEQ ID NO: 186274 - DNA, 15 bp, Homo sapiens
ccggccttaggtagc

SEQ ID NO: 186275 - DNA, 15 bp, Homo sapiens
tccggccttaggtag

SEQ ID NO: 186276 - DNA, 15 bp, Homo sapiens
ctccggccttaggta

SEQ ID NO: 186277 - DNA, 15 bp, Homo sapiens
gctccggccttaggt

SEQ ID NO: 186278 - DNA, 15 bp, Homo sapiens
tgctccggccttagg

SEQ ID NO: 186279 - DNA, 15 bp, Homo sapiens
atgctccggccttag

SEQ ID NO: 186280 - DNA, 15 bp, Homo sapiens
gatgctccggcctta

SEQ ID NO: 186281 - DNA, 15 bp, Homo sapiens
ggatgctccggcctt

SEQ ID NO: 186282 - DNA, 15 bp, Homo sapiens
aggatgctccggcct

SEQ ID NO: 186283 - DNA, 15 bp, Homo sapiens
caggatgctccggcc

SEQ ID NO: 186284 - DNA, 15 bp, Homo sapiens
gcaggatgctccggc

SEQ ID NO: 186285 - DNA, 15 bp, Homo sapiens
ggcaggatgctccgg

SEQ ID NO: 186286 - DNA, 15 bp, Homo sapiens
gggcaggatgctccg

SEQ ID NO: 186287 - DNA, 15 bp, Homo sapiens
agggcaggatgctcc

SEQ ID NO: 186288 - DNA, 15 bp, Homo sapiens
aagggcaggatgctc

SEQ ID NO: 186289 - DNA, 15 bp, Homo sapiens
aaagggcaggatgct

SEQ ID NO: 186290 - DNA, 15 bp, Homo sapiens
gaaagggcaggatgc

SEQ ID NO: 186291 - DNA, 15 bp, Homo sapiens
ggaaagggcaggatg

SEQ ID NO: 186292 - DNA, 15 bp, Homo sapiens
tggaaagggcaggat

SEQ ID NO: 186293 - DNA, 15 bp, Homo sapiens
ctggaaagggcagga

SEQ ID NO: 186294 - DNA, 15 bp, Homo sapiens
tctggaaagggcagg

SEQ ID NO: 186295 - DNA, 15 bp, Homo sapiens
ttctggaaagggcag

SEQ ID NO: 186296 - DNA, 15 bp, Homo sapiens
tttctggaaagggca

SEQ ID NO: 186297 - DNA, 15 bp, Homo sapiens
gtttctggaaagggc

SEQ ID NO: 186298 - DNA, 15 bp, Homo sapiens
tgtttctggaaaggg

SEQ ID NO: 186299 - DNA, 15 bp, Homo sapiens
gtgtttctggaaagg

SEQ ID NO: 186300 - DNA, 15 bp, Homo sapiens
ggtgtttctggaaag

SEQ ID NO: 186301 - DNA, 15 bp, Homo sapiens
tggtgtttctggaaa

SEQ ID NO: 186302 - DNA, 15 bp, Homo sapiens
ctggtgtttctggaa

SEQ ID NO: 186303 - DNA, 15 bp, Homo sapiens
cctggtgtttctgga

SEQ ID NO: 186304 - DNA, 15 bp, Homo sapiens
acctggtgtttctgg

SEQ ID NO: 186305 - DNA, 15 bp, Homo sapiens
gacctggtgtttctg

SEQ ID NO: 186306 - DNA, 15 bp, Homo sapiens
agacctggtgtttct

SEQ ID NO: 186307 - DNA, 15 bp, Homo sapiens
gagacctggtgtttc

SEQ ID NO: 186308 - DNA, 15 bp, Homo sapiens
tgagacctggtgttt

SEQ ID NO: 186309 - DNA, 15 bp, Homo sapiens
gtgagacctggtgtt

SEQ ID NO: 186310 - DNA, 15 bp, Homo sapiens
ggtgagacctggtgt

SEQ ID NO: 186311 - DNA, 15 bp, Homo sapiens
aggtgagacctggtg

SEQ ID NO: 186312 - DNA, 15 bp, Homo sapiens
gaggtgagacctggt

SEQ ID NO: 186313 - DNA, 15 bp, Homo sapiens
tgaggtgagacctgg

SEQ ID NO: 186314 - DNA, 15 bp, Homo sapiens
ctgaggtgagacctg

SEQ ID NO: 186315 - DNA, 15 bp, Homo sapiens
cctgaggtgagacct

SEQ ID NO: 186316 - DNA, 15 bp, Homo sapiens
acctgaggtgagacc

SEQ ID NO: 186317 - DNA, 15 bp, Homo sapiens
gacctgaggtgagac

SEQ ID NO: 186318 - DNA, 15 bp, Homo sapiens
tgacctgaggtgaga

SEQ ID NO: 186319 - DNA, 15 bp, Homo sapiens
atgacctgaggtgag

SEQ ID NO: 186320 - DNA, 15 bp, Homo sapiens
aatgacctgaggtga

SEQ ID NO: 186321 - DNA, 15 bp, Homo sapiens
aaatgacctgaggtg

SEQ ID NO: 186322 - DNA, 15 bp, Homo sapiens
caaatgacctgaggt

SEQ ID NO: 186323 - DNA, 15 bp, Homo sapiens
ccaaatgacctgagg

SEQ ID NO: 186324 - DNA, 15 bp, Homo sapiens
gccaaatgacctgag

SEQ ID NO: 186325 - DNA, 15 bp, Homo sapiens
ggccaaatgacctga

SEQ ID NO: 186326 - DNA, 15 bp, Homo sapiens
aggccaaatgacctg

SEQ ID NO: 186327 - DNA, 15 bp, Homo sapiens
aaggccaaatgacct

SEQ ID NO: 186328 - DNA, 15 bp, Homo sapiens
gaaggccaaatgacc

SEQ ID NO: 186329 - DNA, 15 bp, Homo sapiens
tgaaggccaaatgac

SEQ ID NO: 186330 - DNA, 15 bp, Homo sapiens
ctgaaggccaaatga

SEQ ID NO: 186331 - DNA, 15 bp, Homo sapiens
gctgaaggccaaatg

SEQ ID NO: 186332 - DNA, 15 bp, Homo sapiens
tgctgaaggccaaat

SEQ ID NO: 186333 - DNA, 15 bp, Homo sapiens
gtgctgaaggccaaa

SEQ ID NO: 186334 - DNA, 15 bp, Homo sapiens
agtgctgaaggccaa

SEQ ID NO: 186335 - DNA, 15 bp, Homo sapiens
cagtgctgaaggcca

SEQ ID NO: 186336 - DNA, 15 bp, Homo sapiens
acagtgctgaaggcc

SEQ ID NO: 186337 - DNA, 15 bp, Homo sapiens
gacagtgctgaaggc

SEQ ID NO: 186338 - DNA, 15 bp, Homo sapiens
ggacagtgctgaagg

SEQ ID NO: 186339 - DNA, 15 bp, Homo sapiens
gggacagtgctgaag

SEQ ID NO: 186340 - DNA, 15 bp, Homo sapiens
cgggacagtgctgaa

SEQ ID NO: 186341 - DNA, 15 bp, Homo sapiens
gcgggacagtgctga

SEQ ID NO: 186342 - DNA, 15 bp, Homo sapiens
ggcgggacagtgctg

SEQ ID NO: 186343 - DNA, 15 bp, Homo sapiens
gggcgggacagtgct

SEQ ID NO: 186344 - DNA, 15 bp, Homo sapiens
ggggcgggacagtgc

SEQ ID NO: 186345 - DNA, 15 bp, Homo sapiens
cggggcgggacagtg

SEQ ID NO: 186346 - DNA, 15 bp, Homo sapiens
gcggggcgggacagt

SEQ ID NO: 186347 - DNA, 15 bp, Homo sapiens
ggcggggcgggacag

SEQ ID NO: 186348 - DNA, 15 bp, Homo sapiens
aggcggggcgggaca

SEQ ID NO: 186349 - DNA, 15 bp, Homo sapiens
caggcggggcgggac

SEQ ID NO: 186350 - DNA, 15 bp, Homo sapiens
acaggcggggcggga

SEQ ID NO: 186351 - DNA, 15 bp, Homo sapiens
gacaggcggggcggg

SEQ ID NO: 186352 - DNA, 15 bp, Homo sapiens
tgacaggcggggcgg

SEQ ID NO: 186353 - DNA, 15 bp, Homo sapiens
ctgacaggcggggcg

SEQ ID NO: 186354 - DNA, 15 bp, Homo sapiens
actgacaggcggggc

SEQ ID NO: 186355 - DNA, 15 bp, Homo sapiens
tactgacaggcgggg

SEQ ID NO: 186356 - DNA, 15 bp, Homo sapiens
ctactgacaggcggg

SEQ ID NO: 186357 - DNA, 15 bp, Homo sapiens
gctactgacaggcgg

SEQ ID NO: 186358 - DNA, 15 bp, Homo sapiens
ggctactgacaggcg

SEQ ID NO: 186359 - DNA, 15 bp, Homo sapiens
tggctactgacaggc

SEQ ID NO: 186360 - DNA, 15 bp, Homo sapiens
gtggctactgacagg

SEQ ID NO: 186361 - DNA, 15 bp, Homo sapiens
agtggctactgacag

SEQ ID NO: 186362 - DNA, 15 bp, Homo sapiens
cagtggctactgaca

SEQ ID NO: 186363 - DNA, 15 bp, Homo sapiens
gcagtggctactgac

SEQ ID NO: 186364 - DNA, 15 bp, Homo sapiens
tgcagtggctactga

SEQ ID NO: 186365 - DNA, 15 bp, Homo sapiens
ctgcagtggctactg

SEQ ID NO: 186366 - DNA, 15 bp, Homo sapiens
actgcagtggctact

SEQ ID NO: 186367 - DNA, 15 bp, Homo sapiens
cactgcagtggctac

SEQ ID NO: 186368 - DNA, 15 bp, Homo sapiens
ccactgcagtggcta

SEQ ID NO: 186369 - DNA, 15 bp, Homo sapiens
cccactgcagtggct

SEQ ID NO: 186370 - DNA, 15 bp, Homo sapiens
gcccactgcagtggc

SEQ ID NO: 186371 - DNA, 15 bp, Homo sapiens
tgcccactgcagtgg

SEQ ID NO: 186372 - DNA, 15 bp, Homo sapiens
gtgcccactgcagtg

SEQ ID NO: 186373 - DNA, 15 bp, Homo sapiens
tgtgcccactgcagt

SEQ ID NO: 186374 - DNA, 15 bp, Homo sapiens
ctgtgcccactgcag

SEQ ID NO: 186375 - DNA, 15 bp, Homo sapiens
gctgtgcccactgca

SEQ ID NO: 186376 - DNA, 15 bp, Homo sapiens
tgctgtgcccactgc

SEQ ID NO: 186377 - DNA, 15 bp, Homo sapiens
gtgctgtgcccactg

SEQ ID NO: 186378 - DNA, 15 bp, Homo sapiens
agtgctgtgcccact

SEQ ID NO: 186379 - DNA, 15 bp, Homo sapiens
cagtgctgtgcccac

SEQ ID NO: 186380 - DNA, 15 bp, Homo sapiens
acagtgctgtgccca

SEQ ID NO: 186381 - DNA, 15 bp, Homo sapiens
cacagtgctgtgccc

SEQ ID NO: 186382 - DNA, 15 bp, Homo sapiens
gcacagtgctgtgcc

SEQ ID NO: 186383 - DNA, 15 bp, Homo sapiens
tgcacagtgctgtgc

SEQ ID NO: 186384 - DNA, 15 bp, Homo sapiens
ttgcacagtgctgtg

SEQ ID NO: 186385 - DNA, 15 bp, Homo sapiens
cttgcacagtgctgt

SEQ ID NO: 186386 - DNA, 15 bp, Homo sapiens
acttgcacagtgctg

SEQ ID NO: 186387 - DNA, 15 bp, Homo sapiens
cacttgcacagtgct

SEQ ID NO: 186388 - DNA, 15 bp, Homo sapiens
gcacttgcacagtgc

SEQ ID NO: 186389 - DNA, 15 bp, Homo sapiens
ggcacttgcacagtg

SEQ ID NO: 186390 - DNA, 15 bp, Homo sapiens
tggcacttgcacagt

SEQ ID NO: 186391 - DNA, 15 bp, Homo sapiens
ctggcacttgcacag

SEQ ID NO: 186392 - DNA, 15 bp, Homo sapiens
cctggcacttgcaca

SEQ ID NO: 186393 - DNA, 15 bp, Homo sapiens
tcctggcacttgcac

SEQ ID NO: 186394 - DNA, 15 bp, Homo sapiens
ctcctggcacttgca

SEQ ID NO: 186395 - DNA, 15 bp, Homo sapiens
tctcctggcacttgc

SEQ ID NO: 186396 - DNA, 15 bp, Homo sapiens
ctctcctggcacttg

SEQ ID NO: 186397 - DNA, 15 bp, Homo sapiens
actctcctggcactt

SEQ ID NO: 186398 - DNA, 15 bp, Homo sapiens
cactctcctggcact

SEQ ID NO: 186399 - DNA, 15 bp, Homo sapiens
gcactctcctggcac

SEQ ID NO: 186400 - DNA, 15 bp, Homo sapiens
agcactctcctggca

SEQ ID NO: 186401 - DNA, 15 bp, Homo sapiens
aagcactctcctggc

SEQ ID NO: 186402 - DNA, 15 bp, Homo sapiens
taagcactctcctgg

SEQ ID NO: 186403 - DNA, 15 bp, Homo sapiens
gtaagcactctcctg

SEQ ID NO: 186404 - DNA, 15 bp, Homo sapiens
tgtaagcactctcct

SEQ ID NO: 186405 - DNA, 15 bp, Homo sapiens
gtgtaagcactctcc

SEQ ID NO: 186406 - DNA, 15 bp, Homo sapiens
ggtgtaagcactctc

SEQ ID NO: 186407 - DNA, 15 bp, Homo sapiens
gggtgtaagcactct

SEQ ID NO: 186408 - DNA, 15 bp, Homo sapiens
tgggtgtaagcactc

SEQ ID NO: 186409 - DNA, 15 bp, Homo sapiens
ttgggtgtaagcact

SEQ ID NO: 186410 - DNA, 15 bp, Homo sapiens
tttgggtgtaagcac

SEQ ID NO: 186411 - DNA, 15 bp, Homo sapiens
gtttgggtgtaagca

SEQ ID NO: 186412 - DNA, 15 bp, Homo sapiens
tgtttgggtgtaagc

SEQ ID NO: 186413 - DNA, 15 bp, Homo sapiens
ttgtttgggtgtaag

SEQ ID NO: 186414 - DNA, 15 bp, Homo sapiens
gttgtttgggtgtaa

SEQ ID NO: 186415 - DNA, 15 bp, Homo sapiens
ggttgtttgggtgta

SEQ ID NO: 186416 - DNA, 15 bp, Homo sapiens
tggttgtttgggtgt

SEQ ID NO: 186417 - DNA, 15 bp, Homo sapiens
atggttgtttgggtg

SEQ ID NO: 186418 - DNA, 15 bp, Homo sapiens
gatggttgtttgggt

SEQ ID NO: 186419 - DNA, 15 bp, Homo sapiens
tgatggttgtttggg

SEQ ID NO: 186420 - DNA, 15 bp, Homo sapiens
atgatggttgtttgg

SEQ ID NO: 186421 - DNA, 15 bp, Homo sapiens
aatgatggttgtttg

SEQ ID NO: 186422 - DNA, 15 bp, Homo sapiens
gaatgatggttgttt

SEQ ID NO: 186423 - DNA, 15 bp, Homo sapiens
tgaatgatggttgtt

SEQ ID NO: 186424 - DNA, 15 bp, Homo sapiens
ttgaatgatggttgt

SEQ ID NO: 186425 - DNA, 15 bp, Homo sapiens
gttgaatgatggttg

SEQ ID NO: 186426 - DNA, 15 bp, Homo sapiens
tgttgaatgatggtt

SEQ ID NO: 186427 - DNA, 15 bp, Homo sapiens
ttgttgaatgatggt

SEQ ID NO: 186428 - DNA, 15 bp, Homo sapiens
tttgttgaatgatgg

SEQ ID NO: 186429 - DNA, 15 bp, Homo sapiens
atttgttgaatgatg

SEQ ID NO: 186430 - DNA, 15 bp, Homo sapiens
tatttgttgaatgat

SEQ ID NO: 186431 - DNA, 15 bp, Homo sapiens
atatttgttgaatga

SEQ ID NO: 186432 - DNA, 15 bp, Homo sapiens
aatatttgttgaatg

SEQ ID NO: 186433 - DNA, 15 bp, Homo sapiens
aaatatttgttgaat

SEQ ID NO: 186434 - DNA, 15 bp, Homo sapiens
taaatatttgttgaa

SEQ ID NO: 186435 - DNA, 15 bp, Homo sapiens
gtaaatatttgttga

SEQ ID NO: 186436 - DNA, 15 bp, Homo sapiens
agtaaatatttgttg

SEQ ID NO: 186437 - DNA, 15 bp, Homo sapiens
cagtaaatatttgtt

SEQ ID NO: 186438 - DNA, 15 bp, Homo sapiens
gcagtaaatatttgt

SEQ ID NO: 186439 - DNA, 15 bp, Homo sapiens
ggcagtaaatatttg

SEQ ID NO: 186440 - DNA, 15 bp, Homo sapiens
gggcagtaaatattt

SEQ ID NO: 186441 - DNA, 15 bp, Homo sapiens
cgggcagtaaatatt

SEQ ID NO: 186442 - DNA, 15 bp, Homo sapiens
acgggcagtaaatat

SEQ ID NO: 186443 - DNA, 15 bp, Homo sapiens
cacgggcagtaaata

SEQ ID NO: 186444 - DNA, 15 bp, Homo sapiens
ccacgggcagtaaat

SEQ ID NO: 186445 - DNA, 15 bp, Homo sapiens
cccacgggcagtaaa

SEQ ID NO: 186446 - DNA, 15 bp, Homo sapiens
acccacgggcagtaa

SEQ ID NO: 186447 - DNA, 15 bp, Homo sapiens
aacccacgggcagta

SEQ ID NO: 186448 - DNA, 15 bp, Homo sapiens
gaacccacgggcagt

SEQ ID NO: 186449 - DNA, 15 bp, Homo sapiens
agaacccacgggcag

SEQ ID NO: 186450 - DNA, 15 bp, Homo sapiens
cagaacccacgggca

SEQ ID NO: 186451 - DNA, 15 bp, Homo sapiens
ccagaacccacgggc

SEQ ID NO: 186452 - DNA, 15 bp, Homo sapiens
cccagaacccacggg

SEQ ID NO: 186453 - DNA, 15 bp, Homo sapiens
gcccagaacccacgg

SEQ ID NO: 186454 - DNA, 15 bp, Homo sapiens
agcccagaacccacg

SEQ ID NO: 186455 - DNA, 15 bp, Homo sapiens
cagcccagaacccac

SEQ ID NO: 186456 - DNA, 15 bp, Homo sapiens
tcagcccagaaccca

SEQ ID NO: 186457 - DNA, 15 bp, Homo sapiens
ctcagcccagaaccc

SEQ ID NO: 186458 - DNA, 15 bp, Homo sapiens
gctcagcccagaacc

SEQ ID NO: 186459 - DNA, 15 bp, Homo sapiens
cgctcagcccagaac

SEQ ID NO: 186460 - DNA, 15 bp, Homo sapiens
ccgctcagcccagaa

SEQ ID NO: 186461 - DNA, 15 bp, Homo sapiens
gccgctcagcccaga

SEQ ID NO: 186462 - DNA, 15 bp, Homo sapiens
tgccgctcagcccag

SEQ ID NO: 186463 - DNA, 15 bp, Homo sapiens
gtgccgctcagccca

SEQ ID NO: 186464 - DNA, 15 bp, Homo sapiens
tgtgccgctcagccc

SEQ ID NO: 186465 - DNA, 15 bp, Homo sapiens
ctgtgccgctcagcc

SEQ ID NO: 186466 - DNA, 15 bp, Homo sapiens
cctgtgccgctcagc

SEQ ID NO: 186467 - DNA, 15 bp, Homo sapiens
gcctgtgccgctcag

SEQ ID NO: 186468 - DNA, 15 bp, Homo sapiens
ggcctgtgccgctca

SEQ ID NO: 186469 - DNA, 15 bp, Homo sapiens
gggcctgtgccgctc

SEQ ID NO: 186470 - DNA, 15 bp, Homo sapiens
agggcctgtgccgct

SEQ ID NO: 186471 - DNA, 15 bp, Homo sapiens
cagggcctgtgccgc

SEQ ID NO: 186472 - DNA, 15 bp, Homo sapiens
acagggcctgtgccg

SEQ ID NO: 186473 - DNA, 15 bp, Homo sapiens
cacagggcctgtgcc

SEQ ID NO: 186474 - DNA, 15 bp, Homo sapiens
gcacagggcctgtgc

SEQ ID NO: 186475 - DNA, 15 bp, Homo sapiens
ggcacagggcctgtg

SEQ ID NO: 186476 - DNA, 15 bp, Homo sapiens
tggcacagggcctgt

SEQ ID NO: 186477 - DNA, 15 bp, Homo sapiens
ctggcacagggcctg

SEQ ID NO: 186478 - DNA, 15 bp, Homo sapiens
cctggcacagggcct

SEQ ID NO: 186479 - DNA, 15 bp, Homo sapiens
acctggcacagggcc

SEQ ID NO: 186480 - DNA, 15 bp, Homo sapiens
gacctggcacagggc

SEQ ID NO: 186481 - DNA, 15 bp, Homo sapiens
agacctggcacaggg

SEQ ID NO: 186482 - DNA, 15 bp, Homo sapiens
cagacctggcacagg

SEQ ID NO: 186483 - DNA, 15 bp, Homo sapiens
ccagacctggcacag

SEQ ID NO: 186484 - DNA, 15 bp, Homo sapiens
tccagacctggcaca

SEQ ID NO: 186485 - DNA, 15 bp, Homo sapiens
ctccagacctggcac

SEQ ID NO: 186486 - DNA, 15 bp, Homo sapiens
actccagacctggca

SEQ ID NO: 186487 - DNA, 15 bp, Homo sapiens
gactccagacctggc

SEQ ID NO: 186488 - DNA, 15 bp, Homo sapiens
agactccagacctgg

SEQ ID NO: 186489 - DNA, 15 bp, Homo sapiens
cagactccagacctg

SEQ ID NO: 186490 - DNA, 15 bp, Homo sapiens
ccagactccagacct

SEQ ID NO: 186491 - DNA, 15 bp, Homo sapiens
gccagactccagacc

SEQ ID NO: 186492 - DNA, 15 bp, Homo sapiens
ggccagactccagac

SEQ ID NO: 186493 - DNA, 15 bp, Homo sapiens
aggccagactccaga

SEQ ID NO: 186494 - DNA, 15 bp, Homo sapiens
caggccagactccag

SEQ ID NO: 186495 - DNA, 15 bp, Homo sapiens
ccaggccagactcca

SEQ ID NO: 186496 - DNA, 15 bp, Homo sapiens
tccaggccagactcc

SEQ ID NO: 186497 - DNA, 15 bp, Homo sapiens
ctccaggccagactc

SEQ ID NO: 186498 - DNA, 15 bp, Homo sapiens
gctccaggccagact

SEQ ID NO: 186499 - DNA, 15 bp, Homo sapiens
cgctccaggccagac

SEQ ID NO: 186500 - DNA, 15 bp, Homo sapiens
acgctccaggccaga

SEQ ID NO: 186501 - DNA, 15 bp, Homo sapiens
gacgctccaggccag

SEQ ID NO: 186502 - DNA, 15 bp, Homo sapiens
tgacgctccaggcca

SEQ ID NO: 186503 - DNA, 15 bp, Homo sapiens
ctgacgctccaggcc

SEQ ID NO: 186504 - DNA, 15 bp, Homo sapiens
cctgacgctccaggc

SEQ ID NO: 186505 - DNA, 15 bp, Homo sapiens
ccctgacgctccagg

SEQ ID NO: 186506 - DNA, 15 bp, Homo sapiens
tccctgacgctccag

SEQ ID NO: 186507 - DNA, 15 bp, Homo sapiens
ctccctgacgctcca

SEQ ID NO: 186508 - DNA, 15 bp, Homo sapiens
cctccctgacgctcc

SEQ ID NO: 186509 - DNA, 15 bp, Homo sapiens
gcctccctgacgctc

SEQ ID NO: 186510 - DNA, 15 bp, Homo sapiens
agcctccctgacgct

SEQ ID NO: 186511 - DNA, 15 bp, Homo sapiens
gagcctccctgacgc

SEQ ID NO: 186512 - DNA, 15 bp, Homo sapiens
tgagcctccctgacg

SEQ ID NO: 186513 - DNA, 15 bp, Homo sapiens
ttgagcctccctgac

SEQ ID NO: 186514 - DNA, 15 bp, Homo sapiens
tttgagcctccctga

SEQ ID NO: 186515 - DNA, 15 bp, Homo sapiens
ctttgagcctccctg

SEQ ID NO: 186516 - DNA, 15 bp, Homo sapiens
cctttgagcctccct

SEQ ID NO: 186517 - DNA, 15 bp, Homo sapiens
gcctttgagcctccc

SEQ ID NO: 186518 - DNA, 15 bp, Homo sapiens
ggcctttgagcctcc

SEQ ID NO: 186519 - DNA, 15 bp, Homo sapiens
aggcctttgagcctc

SEQ ID NO: 186520 - DNA, 15 bp, Homo sapiens
caggcctttgagcct

SEQ ID NO: 186521 - DNA, 15 bp, Homo sapiens
tcaggcctttgagcc

SEQ ID NO: 186522 - DNA, 15 bp, Homo sapiens
ctcaggcctttgagc

SEQ ID NO: 186523 - DNA, 15 bp, Homo sapiens
cctcaggcctttgag

SEQ ID NO: 186524 - DNA, 15 bp, Homo sapiens
ccctcaggcctttga

SEQ ID NO: 186525 - DNA, 15 bp, Homo sapiens
gccctcaggcctttg

SEQ ID NO: 186526 - DNA, 15 bp, Homo sapiens
agccctcaggccttt

SEQ ID NO: 186527 - DNA, 15 bp, Homo sapiens
aagccctcaggcctt

SEQ ID NO: 186528 - DNA, 15 bp, Homo sapiens
taagccctcaggcct

SEQ ID NO: 186529 - DNA, 15 bp, Homo sapiens
ataagccctcaggcc

SEQ ID NO: 186530 - DNA, 15 bp, Homo sapiens
cataagccctcaggc

SEQ ID NO: 186531 - DNA, 15 bp, Homo sapiens
acataagccctcagg

SEQ ID NO: 186532 - DNA, 15 bp, Homo sapiens
gacataagccctcag

SEQ ID NO: 186533 - DNA, 15 bp, Homo sapiens
agacataagccctca

SEQ ID NO: 186534 - DNA, 15 bp, Homo sapiens
gagacataagccctc

SEQ ID NO: 186535 - DNA, 15 bp, Homo sapiens
tgagacataagccct

SEQ ID NO: 186536 - DNA, 15 bp, Homo sapiens
atgagacataagccc

SEQ ID NO: 186537 - DNA, 15 bp, Homo sapiens
catgagacataagcc

SEQ ID NO: 186538 - DNA, 15 bp, Homo sapiens
ccatgagacataagc

SEQ ID NO: 186539 - DNA, 15 bp, Homo sapiens
cccatgagacataag

SEQ ID NO: 186540 - DNA, 15 bp, Homo sapiens
acccatgagacataa

SEQ ID NO: 186541 - DNA, 15 bp, Homo sapiens
gacccatgagacata

SEQ ID NO: 186542 - DNA, 15 bp, Homo sapiens
agacccatgagacat

SEQ ID NO: 186543 - DNA, 15 bp, Homo sapiens
gagacccatgagaca

SEQ ID NO: 186544 - DNA, 15 bp, Homo sapiens
tgagacccatgagac

SEQ ID NO: 186545 - DNA, 15 bp, Homo sapiens
atgagacccatgaga

SEQ ID NO: 186546 - DNA, 15 bp, Homo sapiens
catgagacccatgag

SEQ ID NO: 186547 - DNA, 15 bp, Homo sapiens
ccatgagacccatga

SEQ ID NO: 186548 - DNA, 15 bp, Homo sapiens
cccatgagacccatg

SEQ ID NO: 186549 - DNA, 15 bp, Homo sapiens
tcccatgagacccat

SEQ ID NO: 186550 - DNA, 15 bp, Homo sapiens
gtcccatgagaccca

SEQ ID NO: 186551 - DNA, 15 bp, Homo sapiens
tgtcccatgagaccc

SEQ ID NO: 186552 - DNA, 15 bp, Homo sapiens
atgtcccatgagacc

SEQ ID NO: 186553 - DNA, 15 bp, Homo sapiens
aatgtcccatgagac

SEQ ID NO: 186554 - DNA, 15 bp, Homo sapiens
caatgtcccatgaga

SEQ ID NO: 186555 - DNA, 15 bp, Homo sapiens
tcaatgtcccatgag

SEQ ID NO: 186556 - DNA, 15 bp, Homo sapiens
atcaatgtcccatga

SEQ ID NO: 186557 - DNA, 15 bp, Homo sapiens
catcaatgtcccatg

SEQ ID NO: 186558 - DNA, 15 bp, Homo sapiens
ccatcaatgtcccat

SEQ ID NO: 186559 - DNA, 15 bp, Homo sapiens
cccatcaatgtccca

SEQ ID NO: 186560 - DNA, 15 bp, Homo sapiens
ccccatcaatgtccc

SEQ ID NO: 186561 - DNA, 15 bp, Homo sapiens
cccccatcaatgtcc

SEQ ID NO: 186562 - DNA, 15 bp, Homo sapiens
ccccccatcaatgtc

SEQ ID NO: 186563 - DNA, 15 bp, Homo sapiens
accccccatcaatgt

SEQ ID NO: 186564 - DNA, 15 bp, Homo sapiens
caccccccatcaatg

SEQ ID NO: 186565 - DNA, 15 bp, Homo sapiens
ccaccccccatcaat

SEQ ID NO: 186566 - DNA, 15 bp, Homo sapiens
cccaccccccatcaa

SEQ ID NO: 186567 - DNA, 15 bp, Homo sapiens
gcccaccccccatca

SEQ ID NO: 186568 - DNA, 15 bp, Homo sapiens
agcccaccccccatc

SEQ ID NO: 186569 - DNA, 15 bp, Homo sapiens
cagcccaccccccat

SEQ ID NO: 186570 - DNA, 15 bp, Homo sapiens
ccagcccacccccca

SEQ ID NO: 186571 - DNA, 15 bp, Homo sapiens
cccagcccacccccc

SEQ ID NO: 186572 - DNA, 15 bp, Homo sapiens
ccccagcccaccccc

SEQ ID NO: 186573 - DNA, 15 bp, Homo sapiens
accccagcccacccc

SEQ ID NO: 186574 - DNA, 15 bp, Homo sapiens
caccccagcccaccc

SEQ ID NO: 186575 - DNA, 15 bp, Homo sapiens
tcaccccagcccacc

SEQ ID NO: 186576 - DNA, 15 bp, Homo sapiens
gtcaccccagcccac

SEQ ID NO: 186577 - DNA, 15 bp, Homo sapiens
cgtcaccccagccca

SEQ ID NO: 186578 - DNA, 15 bp, Homo sapiens
gcgtcaccccagccc

SEQ ID NO: 186579 - DNA, 15 bp, Homo sapiens
agcgtcaccccagcc

SEQ ID NO: 186580 - DNA, 15 bp, Homo sapiens
aagcgtcaccccagc

SEQ ID NO: 186581 - DNA, 15 bp, Homo sapiens
gaagcgtcaccccag

SEQ ID NO: 186582 - DNA, 15 bp, Homo sapiens
ggaagcgtcacccca

SEQ ID NO: 186583 - DNA, 15 bp, Homo sapiens
gggaagcgtcacccc

SEQ ID NO: 186584 - DNA, 15 bp, Homo sapiens
agggaagcgtcaccc

SEQ ID NO: 186585 - DNA, 15 bp, Homo sapiens
tagggaagcgtcacc

SEQ ID NO: 186586 - DNA, 15 bp, Homo sapiens
ctagggaagcgtcac

SEQ ID NO: 186587 - DNA, 15 bp, Homo sapiens
cctagggaagcgtca

SEQ ID NO: 186588 - DNA, 15 bp, Homo sapiens
ccctagggaagcgtc

SEQ ID NO: 186589 - DNA, 15 bp, Homo sapiens
tccctagggaagcgt

SEQ ID NO: 186590 - DNA, 15 bp, Homo sapiens
ctccctagggaagcg

SEQ ID NO: 186591 - DNA, 15 bp, Homo sapiens
tctccctagggaagc

SEQ ID NO: 186592 - DNA, 15 bp, Homo sapiens
ctctccctagggaag

SEQ ID NO: 186593 - DNA, 15 bp, Homo sapiens
cctctccctagggaa

SEQ ID NO: 186594 - DNA, 15 bp, Homo sapiens
ccctctccctaggga

SEQ ID NO: 186595 - DNA, 15 bp, Homo sapiens
cccctctccctaggg

SEQ ID NO: 186596 - DNA, 15 bp, Homo sapiens
tcccctctccctagg

SEQ ID NO: 186597 - DNA, 15 bp, Homo sapiens
ctcccctctccctag

SEQ ID NO: 186598 - DNA, 15 bp, Homo sapiens
actcccctctcccta

SEQ ID NO: 186599 - DNA, 15 bp, Homo sapiens
cactcccctctccct

SEQ ID NO: 186600 - DNA, 15 bp, Homo sapiens
acactcccctctccc

SEQ ID NO: 186601 - DNA, 15 bp, Homo sapiens
cacactcccctctcc

SEQ ID NO: 186602 - DNA, 15 bp, Homo sapiens
ccacactcccctctc

SEQ ID NO: 186603 - DNA, 15 bp, Homo sapiens
cccacactcccctct

SEQ ID NO: 186604 - DNA, 15 bp, Homo sapiens
acccacactcccctc

SEQ ID NO: 186605 - DNA, 15 bp, Homo sapiens
gacccacactcccct

SEQ ID NO: 186606 - DNA, 15 bp, Homo sapiens
tgacccacactcccc

SEQ ID NO: 186607 - DNA, 15 bp, Homo sapiens
ctgacccacactccc

SEQ ID NO: 186608 - DNA, 15 bp, Homo sapiens
cctgacccacactcc

SEQ ID NO: 186609 - DNA, 15 bp, Homo sapiens
acctgacccacactc

SEQ ID NO: 186610 - DNA, 15 bp, Homo sapiens
aacctgacccacact

SEQ ID NO: 186611 - DNA, 15 bp, Homo sapiens
taacctgacccacac

SEQ ID NO: 186612 - DNA, 15 bp, Homo sapiens
gtaacctgacccaca

SEQ ID NO: 186613 - DNA, 15 bp, Homo sapiens
agtaacctgacccac

SEQ ID NO: 186614 - DNA, 15 bp, Homo sapiens
aagtaacctgaccca

SEQ ID NO: 186615 - DNA, 15 bp, Homo sapiens
aaagtaacctgaccc

SEQ ID NO: 186616 - DNA, 15 bp, Homo sapiens
caaagtaacctgacc

SEQ ID NO: 186617 - DNA, 15 bp, Homo sapiens
acaaagtaacctgac

SEQ ID NO: 186618 - DNA, 15 bp, Homo sapiens
cacaaagtaacctga

SEQ ID NO: 186619 - DNA, 15 bp, Homo sapiens
ccacaaagtaacctg

SEQ ID NO: 186620 - DNA, 15 bp, Homo sapiens
cccacaaagtaacct

SEQ ID NO: 186621 - DNA, 15 bp, Homo sapiens
ccccacaaagtaacc

SEQ ID NO: 186622 - DNA, 15 bp, Homo sapiens
accccacaaagtaac

SEQ ID NO: 186623 - DNA, 15 bp, Homo sapiens
caccccacaaagtaa

SEQ ID NO: 186624 - DNA, 15 bp, Homo sapiens
gcaccccacaaagta

SEQ ID NO: 186625 - DNA, 15 bp, Homo sapiens
agcaccccacaaagt

SEQ ID NO: 186626 - DNA, 15 bp, Homo sapiens
cagcaccccacaaag

SEQ ID NO: 186627 - DNA, 15 bp, Homo sapiens
ccagcaccccacaaa

SEQ ID NO: 186628 - DNA, 15 bp, Homo sapiens
accagcaccccacaa

SEQ ID NO: 186629 - DNA, 15 bp, Homo sapiens
aaccagcaccccaca

SEQ ID NO: 186630 - DNA, 15 bp, Homo sapiens
aaaccagcaccccac

SEQ ID NO: 186631 - DNA, 15 bp, Homo sapiens
caaaccagcacccca

SEQ ID NO: 186632 - DNA, 15 bp, Homo sapiens
ccaaaccagcacccc

SEQ ID NO: 186633 - DNA, 15 bp, Homo sapiens
accaaaccagcaccc

SEQ ID NO: 186634 - DNA, 15 bp, Homo sapiens
aaccaaaccagcacc

SEQ ID NO: 186635 - DNA, 15 bp, Homo sapiens
caaccaaaccagcac

SEQ ID NO: 186636 - DNA, 15 bp, Homo sapiens
acaaccaaaccagca

SEQ ID NO: 186637 - DNA, 15 bp, Homo sapiens
cacaaccaaaccagc

SEQ ID NO: 186638 - DNA, 15 bp, Homo sapiens
ccacaaccaaaccag

SEQ ID NO: 186639 - DNA, 15 bp, Homo sapiens
cccacaaccaaacca

SEQ ID NO: 186640 - DNA, 15 bp, Homo sapiens
tcccacaaccaaacc

SEQ ID NO: 186641 - DNA, 15 bp, Homo sapiens
ctcccacaaccaaac

SEQ ID NO: 186642 - DNA, 15 bp, Homo sapiens
tctcccacaaccaaa

SEQ ID NO: 186643 - DNA, 15 bp, Homo sapiens
ttctcccacaaccaa

SEQ ID NO: 186644 - DNA, 15 bp, Homo sapiens
cttctcccacaacca

SEQ ID NO: 186645 - DNA, 15 bp, Homo sapiens
acttctcccacaacc

SEQ ID NO: 186646 - DNA, 15 bp, Homo sapiens
aacttctcccacaac

SEQ ID NO: 186647 - DNA, 15 bp, Homo sapiens
gaacttctcccacaa

SEQ ID NO: 186648 - DNA, 15 bp, Homo sapiens
ggaacttctcccaca

SEQ ID NO: 186649 - DNA, 15 bp, Homo sapiens
tggaacttctcccac

SEQ ID NO: 186650 - DNA, 15 bp, Homo sapiens
atggaacttctccca

SEQ ID NO: 186651 - DNA, 15 bp, Homo sapiens
aatggaacttctccc

SEQ ID NO: 186652 - DNA, 15 bp, Homo sapiens
aaatggaacttctcc

SEQ ID NO: 186653 - DNA, 15 bp, Homo sapiens
taaatggaacttctc

SEQ ID NO: 186654 - DNA, 15 bp, Homo sapiens
ctaaatggaacttct

SEQ ID NO: 186655 - DNA, 15 bp, Homo sapiens
tctaaatggaacttc

SEQ ID NO: 186656 - DNA, 15 bp, Homo sapiens
ttctaaatggaactt

SEQ ID NO: 186657 - DNA, 15 bp, Homo sapiens
attctaaatggaact

SEQ ID NO: 186658 - DNA, 15 bp, Homo sapiens
cattctaaatggaac

SEQ ID NO: 186659 - DNA, 15 bp, Homo sapiens
gcattctaaatggaa

SEQ ID NO: 186660 - DNA, 15 bp, Homo sapiens
ggcattctaaatgga

SEQ ID NO: 186661 - DNA, 15 bp, Homo sapiens
aggcattctaaatgg

SEQ ID NO: 186662 - DNA, 15 bp, Homo sapiens
gaggcattctaaatg

SEQ ID NO: 186663 - DNA, 15 bp, Homo sapiens
tgaggcattctaaat

SEQ ID NO: 186664 - DNA, 15 bp, Homo sapiens
ctgaggcattctaaa

SEQ ID NO: 186665 - DNA, 15 bp, Homo sapiens
cctgaggcattctaa

SEQ ID NO: 186666 - DNA, 15 bp, Homo sapiens
tcctgaggcattcta

SEQ ID NO: 186667 - DNA, 15 bp, Homo sapiens
ctcctgaggcattct

SEQ ID NO: 186668 - DNA, 15 bp, Homo sapiens
cctcctgaggcattc

SEQ ID NO: 186669 - DNA, 15 bp, Homo sapiens
ccctcctgaggcatt

SEQ ID NO: 186670 - DNA, 15 bp, Homo sapiens
tccctcctgaggcat

SEQ ID NO: 186671 - DNA, 15 bp, Homo sapiens
ttccctcctgaggca

SEQ ID NO: 186672 - DNA, 15 bp, Homo sapiens
cttccctcctgaggc

SEQ ID NO: 186673 - DNA, 15 bp, Homo sapiens
tcttccctcctgagg

SEQ ID NO: 186674 - DNA, 15 bp, Homo sapiens
atcttccctcctgag

SEQ ID NO: 186675 - DNA, 15 bp, Homo sapiens
gatcttccctcctga

SEQ ID NO: 186676 - DNA, 15 bp, Homo sapiens
cgatcttccctcctg

SEQ ID NO: 186677 - DNA, 15 bp, Homo sapiens
ccgatcttccctcct

SEQ ID NO: 186678 - DNA, 15 bp, Homo sapiens
cccgatcttccctcc

SEQ ID NO: 186679 - DNA, 15 bp, Homo sapiens
tcccgatcttccctc

SEQ ID NO: 186680 - DNA, 15 bp, Homo sapiens
ttcccgatcttccct

SEQ ID NO: 186681 - DNA, 15 bp, Homo sapiens
cttcccgatcttccc

SEQ ID NO: 186682 - DNA, 15 bp, Homo sapiens
ccttcccgatcttcc

SEQ ID NO: 186683 - DNA, 15 bp, Homo sapiens
gccttcccgatcttc

SEQ ID NO: 186684 - DNA, 15 bp, Homo sapiens
ggccttcccgatctt

SEQ ID NO: 186685 - DNA, 15 bp, Homo sapiens
aggccttcccgatct

SEQ ID NO: 186686 - DNA, 15 bp, Homo sapiens
gaggccttcccgatc

SEQ ID NO: 186687 - DNA, 15 bp, Homo sapiens
cgaggccttcccgat

SEQ ID NO: 186688 - DNA, 15 bp, Homo sapiens
tcgaggccttcccga

SEQ ID NO: 186689 - DNA, 15 bp, Homo sapiens
ttcgaggccttcccg

SEQ ID NO: 186690 - DNA, 15 bp, Homo sapiens
attcgaggccttccc

SEQ ID NO: 186691 - DNA, 15 bp, Homo sapiens
cattcgaggccttcc

SEQ ID NO: 186692 - DNA, 15 bp, Homo sapiens
gcattcgaggccttc

SEQ ID NO: 186693 - DNA, 15 bp, Homo sapiens
ggcattcgaggcctt

SEQ ID NO: 186694 - DNA, 15 bp, Homo sapiens
gggcattcgaggcct

SEQ ID NO: 186695 - DNA, 15 bp, Homo sapiens
cgggcattcgaggcc

SEQ ID NO: 186696 - DNA, 15 bp, Homo sapiens
tcgggcattcgaggc

SEQ ID NO: 186697 - DNA, 15 bp, Homo sapiens
ctcgggcattcgagg

SEQ ID NO: 186698 - DNA, 15 bp, Homo sapiens
actcgggcattcgag

SEQ ID NO: 186699 - DNA, 15 bp, Homo sapiens
cactcgggcattcga

SEQ ID NO: 186700 - DNA, 15 bp, Homo sapiens
tcactcgggcattcg

SEQ ID NO: 186701 - DNA, 15 bp, Homo sapiens
ctcactcgggcattc

SEQ ID NO: 186702 - DNA, 15 bp, Homo sapiens
cctcactcgggcatt

SEQ ID NO: 186703 - DNA, 15 bp, Homo sapiens
ccctcactcgggcat

SEQ ID NO: 186704 - DNA, 15 bp, Homo sapiens
cccctcactcgggca

SEQ ID NO: 186705 - DNA, 15 bp, Homo sapiens
gcccctcactcgggc

SEQ ID NO: 186706 - DNA, 15 bp, Homo sapiens
agcccctcactcggg

SEQ ID NO: 186707 - DNA, 15 bp, Homo sapiens
cagcccctcactcgg

SEQ ID NO: 186708 - DNA, 15 bp, Homo sapiens
tcagcccctcactcg

SEQ ID NO: 186709 - DNA, 15 bp, Homo sapiens
ttcagcccctcactc

SEQ ID NO: 186710 - DNA, 15 bp, Homo sapiens
attcagcccctcact

SEQ ID NO: 186711 - DNA, 15 bp, Homo sapiens
cattcagcccctcac

SEQ ID NO: 186712 - DNA, 15 bp, Homo sapiens
gcattcagcccctca

SEQ ID NO: 186713 - DNA, 15 bp, Homo sapiens
agcattcagcccctc

SEQ ID NO: 186714 - DNA, 15 bp, Homo sapiens
cagcattcagcccct

SEQ ID NO: 186715 - DNA, 15 bp, Homo sapiens
tcagcattcagcccc

SEQ ID NO: 186716 - DNA, 15 bp, Homo sapiens
ctcagcattcagccc

SEQ ID NO: 186717 - DNA, 15 bp, Homo sapiens
actcagcattcagcc

SEQ ID NO: 186718 - DNA, 15 bp, Homo sapiens
gactcagcattcagc

SEQ ID NO: 186719 - DNA, 15 bp, Homo sapiens
ggactcagcattcag

SEQ ID NO: 186720 - DNA, 15 bp, Homo sapiens
aggactcagcattca

SEQ ID NO: 186721 - DNA, 15 bp, Homo sapiens
taggactcagcattc

SEQ ID NO: 186722 - DNA, 15 bp, Homo sapiens
ttaggactcagcatt

SEQ ID NO: 186723 - DNA, 15 bp, Homo sapiens
tttaggactcagcat

SEQ ID NO: 186724 - DNA, 15 bp, Homo sapiens
ctttaggactcagca

SEQ ID NO: 186725 - DNA, 15 bp, Homo sapiens
cctttaggactcagc

SEQ ID NO: 186726 - DNA, 15 bp, Homo sapiens
acctttaggactcag

SEQ ID NO: 186727 - DNA, 15 bp, Homo sapiens
cacctttaggactca

SEQ ID NO: 186728 - DNA, 15 bp, Homo sapiens
ccacctttaggactc

SEQ ID NO: 186729 - DNA, 15 bp, Homo sapiens
accacctttaggact

SEQ ID NO: 186730 - DNA, 15 bp, Homo sapiens
caccacctttaggac

SEQ ID NO: 186731 - DNA, 15 bp, Homo sapiens
tcaccacctttagga

SEQ ID NO: 186732 - DNA, 15 bp, Homo sapiens
atcaccacctttagg

SEQ ID NO: 186733 - DNA, 15 bp, Homo sapiens
catcaccacctttag

SEQ ID NO: 186734 - DNA, 15 bp, Homo sapiens
ccatcaccaccttta

SEQ ID NO: 186735 - DNA, 15 bp, Homo sapiens
cccatcaccaccttt

SEQ ID NO: 186736 - DNA, 15 bp, Homo sapiens
tcccatcaccacctt

SEQ ID NO: 186737 - DNA, 15 bp, Homo sapiens
gtcccatcaccacct

SEQ ID NO: 186738 - DNA, 15 bp, Homo sapiens
agtcccatcaccacc

SEQ ID NO: 186739 - DNA, 15 bp, Homo sapiens
cagtcccatcaccac

SEQ ID NO: 186740 - DNA, 15 bp, Homo sapiens
ccagtcccatcacca

SEQ ID NO: 186741 - DNA, 15 bp, Homo sapiens
cccagtcccatcacc

SEQ ID NO: 186742 - DNA, 15 bp, Homo sapiens
ccccagtcccatcac

SEQ ID NO: 186743 - DNA, 15 bp, Homo sapiens
accccagtcccatca

SEQ ID NO: 186744 - DNA, 15 bp, Homo sapiens
gaccccagtcccatc

SEQ ID NO: 186745 - DNA, 15 bp, Homo sapiens
agaccccagtcccat

SEQ ID NO: 186746 - DNA, 15 bp, Homo sapiens
cagaccccagtccca

SEQ ID NO: 186747 - DNA, 15 bp, Homo sapiens
acagaccccagtccc

SEQ ID NO: 186748 - DNA, 15 bp, Homo sapiens
cacagaccccagtcc

SEQ ID NO: 186749 - DNA, 15 bp, Homo sapiens
ccacagaccccagtc

SEQ ID NO: 186750 - DNA, 15 bp, Homo sapiens
gccacagaccccagt

SEQ ID NO: 186751 - DNA, 15 bp, Homo sapiens
ggccacagaccccag

SEQ ID NO: 186752 - DNA, 15 bp, Homo sapiens
gggccacagacccca

SEQ ID NO: 186753 - DNA, 15 bp, Homo sapiens
tgggccacagacccc

SEQ ID NO: 186754 - DNA, 15 bp, Homo sapiens
ctgggccacagaccc

SEQ ID NO: 186755 - DNA, 15 bp, Homo sapiens
cctgggccacagacc

SEQ ID NO: 186756 - DNA, 15 bp, Homo sapiens
acctgggccacagac

SEQ ID NO: 186757 - DNA, 15 bp, Homo sapiens
tacctgggccacaga

SEQ ID NO: 186758 - DNA, 15 bp, Homo sapiens
ctacctgggccacag

SEQ ID NO: 186759 - DNA, 15 bp, Homo sapiens
actacctgggccaca

SEQ ID NO: 186760 - DNA, 15 bp, Homo sapiens
aactacctgggccac

SEQ ID NO: 186761 - DNA, 15 bp, Homo sapiens
caactacctgggcca

SEQ ID NO: 186762 - DNA, 15 bp, Homo sapiens
acaactacctgggcc

SEQ ID NO: 186763 - DNA, 15 bp, Homo sapiens
cacaactacctgggc

SEQ ID NO: 186764 - DNA, 15 bp, Homo sapiens
acacaactacctggg

SEQ ID NO: 186765 - DNA, 15 bp, Homo sapiens
aacacaactacctgg

SEQ ID NO: 186766 - DNA, 15 bp, Homo sapiens
gaacacaactacctg

SEQ ID NO: 186767 - DNA, 15 bp, Homo sapiens
agaacacaactacct

SEQ ID NO: 186768 - DNA, 15 bp, Homo sapiens
cagaacacaactacc

SEQ ID NO: 186769 - DNA, 15 bp, Homo sapiens
tcagaacacaactac

SEQ ID NO: 186770 - DNA, 15 bp, Homo sapiens
ctcagaacacaacta

SEQ ID NO: 186771 - DNA, 15 bp, Homo sapiens
gctcagaacacaact

SEQ ID NO: 186772 - DNA, 15 bp, Homo sapiens
tgctcagaacacaac

SEQ ID NO: 186773 - DNA, 15 bp, Homo sapiens
ctgctcagaacacaa

SEQ ID NO: 186774 - DNA, 15 bp, Homo sapiens
gctgctcagaacaca

SEQ ID NO: 186775 - DNA, 15 bp, Homo sapiens
agctgctcagaacac

SEQ ID NO: 186776 - DNA, 15 bp, Homo sapiens
gagctgctcagaaca

SEQ ID NO: 186777 - DNA, 15 bp, Homo sapiens
ggagctgctcagaac

SEQ ID NO: 186778 - DNA, 15 bp, Homo sapiens
aggagctgctcagaa

SEQ ID NO: 186779 - DNA, 15 bp, Homo sapiens
gaggagctgctcaga

SEQ ID NO: 186780 - DNA, 15 bp, Homo sapiens
ggaggagctgctcag

SEQ ID NO: 186781 - DNA, 15 bp, Homo sapiens
gggaggagctgctca

SEQ ID NO: 186782 - DNA, 15 bp, Homo sapiens
agggaggagctgctc

SEQ ID NO: 186783 - DNA, 15 bp, Homo sapiens
cagggaggagctgct

SEQ ID NO: 186784 - DNA, 15 bp, Homo sapiens
tcagggaggagctgc

SEQ ID NO: 186785 - DNA, 15 bp, Homo sapiens
ctcagggaggagctg

SEQ ID NO: 186786 - DNA, 15 bp, Homo sapiens
actcagggaggagct

SEQ ID NO: 186787 - DNA, 15 bp, Homo sapiens
aactcagggaggagc

SEQ ID NO: 186788 - DNA, 15 bp, Homo sapiens
gaactcagggaggag

SEQ ID NO: 186789 - DNA, 15 bp, Homo sapiens
tgaactcagggagga

SEQ ID NO: 186790 - DNA, 15 bp, Homo sapiens
ctgaactcagggagg

SEQ ID NO: 186791 - DNA, 15 bp, Homo sapiens
cctgaactcagggag

SEQ ID NO: 186792 - DNA, 15 bp, Homo sapiens
gcctgaactcaggga

SEQ ID NO: 186793 - DNA, 15 bp, Homo sapiens
cgcctgaactcaggg

SEQ ID NO: 186794 - DNA, 15 bp, Homo sapiens
acgcctgaactcagg

SEQ ID NO: 186795 - DNA, 15 bp, Homo sapiens
aacgcctgaactcag

SEQ ID NO: 186796 - DNA, 15 bp, Homo sapiens
gaacgcctgaactca

SEQ ID NO: 186797 - DNA, 15 bp, Homo sapiens
tgaacgcctgaactc

SEQ ID NO: 186798 - DNA, 15 bp, Homo sapiens
atgaacgcctgaact

SEQ ID NO: 186799 - DNA, 15 bp, Homo sapiens
aatgaacgcctgaac

SEQ ID NO: 186800 - DNA, 15 bp, Homo sapiens
gaatgaacgcctgaa

SEQ ID NO: 186801 - DNA, 15 bp, Homo sapiens
tgaatgaacgcctga

SEQ ID NO: 186802 - DNA, 15 bp, Homo sapiens
ctgaatgaacgcctg

SEQ ID NO: 186803 - DNA, 15 bp, Homo sapiens
gctgaatgaacgcct

SEQ ID NO: 186804 - DNA, 15 bp, Homo sapiens
cgctgaatgaacgcc

SEQ ID NO: 186805 - DNA, 15 bp, Homo sapiens
gcgctgaatgaacgc

SEQ ID NO: 186806 - DNA, 15 bp, Homo sapiens
cgcgctgaatgaacg

SEQ ID NO: 186807 - DNA, 15 bp, Homo sapiens
acgcgctgaatgaac

SEQ ID NO: 186808 - DNA, 15 bp, Homo sapiens
cacgcgctgaatgaa

SEQ ID NO: 186809 - DNA, 15 bp, Homo sapiens
gcacgcgctgaatga

SEQ ID NO: 186810 - DNA, 15 bp, Homo sapiens
tgcacgcgctgaatg

SEQ ID NO: 186811 - DNA, 15 bp, Homo sapiens
atgcacgcgctgaat

SEQ ID NO: 186812 - DNA, 15 bp, Homo sapiens
tatgcacgcgctgaa

SEQ ID NO: 186813 - DNA, 15 bp, Homo sapiens
gtatgcacgcgctga

SEQ ID NO: 186814 - DNA, 15 bp, Homo sapiens
agtatgcacgcgctg

SEQ ID NO: 186815 - DNA, 15 bp, Homo sapiens
tagtatgcacgcgct

SEQ ID NO: 186816 - DNA, 15 bp, Homo sapiens
gtagtatgcacgcgc

SEQ ID NO: 186817 - DNA, 15 bp, Homo sapiens
cgtagtatgcacgcg

SEQ ID NO: 186818 - DNA, 15 bp, Homo sapiens
tcgtagtatgcacgc

SEQ ID NO: 186819 - DNA, 15 bp, Homo sapiens
gtcgtagtatgcacg

SEQ ID NO: 186820 - DNA, 15 bp, Homo sapiens
ggtcgtagtatgcac

SEQ ID NO: 186821 - DNA, 15 bp, Homo sapiens
tggtcgtagtatgca

SEQ ID NO: 186822 - DNA, 15 bp, Homo sapiens
ctggtcgtagtatgc

SEQ ID NO: 186823 - DNA, 15 bp, Homo sapiens
gctggtcgtagtatg

SEQ ID NO: 186824 - DNA, 15 bp, Homo sapiens
ggctggtcgtagtat

SEQ ID NO: 186825 - DNA, 15 bp, Homo sapiens
gggctggtcgtagta

SEQ ID NO: 186826 - DNA, 15 bp, Homo sapiens
ggggctggtcgtagt

SEQ ID NO: 186827 - DNA, 15 bp, Homo sapiens
gggggctggtcgtag

SEQ ID NO: 186828 - DNA, 15 bp, Homo sapiens
ggggggctggtcgta

SEQ ID NO: 186829 - DNA, 15 bp, Homo sapiens
aggggggctggtcgt

SEQ ID NO: 186830 - DNA, 15 bp, Homo sapiens
aaggggggctggtcg

SEQ ID NO: 186831 - DNA, 15 bp, Homo sapiens
aaaggggggctggtc

SEQ ID NO: 186832 - DNA, 15 bp, Homo sapiens
aaaaggggggctggt

SEQ ID NO: 186833 - DNA, 15 bp, Homo sapiens
caaaaggggggctgg

SEQ ID NO: 186834 - DNA, 15 bp, Homo sapiens
gcaaaaggggggctg

SEQ ID NO: 186835 - DNA, 15 bp, Homo sapiens
cgcaaaaggggggct

SEQ ID NO: 186836 - DNA, 15 bp, Homo sapiens
acgcaaaaggggggc

SEQ ID NO: 186837 - DNA, 15 bp, Homo sapiens
gacgcaaaagggggg

SEQ ID NO: 186838 - DNA, 15 bp, Homo sapiens
ggacgcaaaaggggg

SEQ ID NO: 186839 - DNA, 15 bp, Homo sapiens
aggacgcaaaagggg

SEQ ID NO: 186840 - DNA, 15 bp, Homo sapiens
gaggacgcaaaaggg

SEQ ID NO: 186841 - DNA, 15 bp, Homo sapiens
tgaggacgcaaaagg

SEQ ID NO: 186842 - DNA, 15 bp, Homo sapiens
ctgaggacgcaaaag

SEQ ID NO: 186843 - DNA, 15 bp, Homo sapiens
tctgaggacgcaaaa

SEQ ID NO: 186844 - DNA, 15 bp, Homo sapiens
atctgaggacgcaaa

SEQ ID NO: 186845 - DNA, 15 bp, Homo sapiens
tatctgaggacgcaa

SEQ ID NO: 186846 - DNA, 15 bp, Homo sapiens
atatctgaggacgca

SEQ ID NO: 186847 - DNA, 15 bp, Homo sapiens
catatctgaggacgc

SEQ ID NO: 186848 - DNA, 15 bp, Homo sapiens
ccatatctgaggacg

SEQ ID NO: 186849 - DNA, 15 bp, Homo sapiens
gccatatctgaggac

SEQ ID NO: 186850 - DNA, 15 bp, Homo sapiens
tgccatatctgagga

SEQ ID NO: 186851 - DNA, 15 bp, Homo sapiens
ttgccatatctgagg

SEQ ID NO: 186852 - DNA, 15 bp, Homo sapiens
attgccatatctgag

SEQ ID NO: 186853 - DNA, 15 bp, Homo sapiens
cattgccatatctga

SEQ ID NO: 186854 - DNA, 15 bp, Homo sapiens
gcattgccatatctg

SEQ ID NO: 186855 - DNA, 15 bp, Homo sapiens
tgcattgccatatct

SEQ ID NO: 186856 - DNA, 15 bp, Homo sapiens
ctgcattgccatatc

SEQ ID NO: 186857 - DNA, 15 bp, Homo sapiens
gctgcattgccatat

SEQ ID NO: 186858 - DNA, 15 bp, Homo sapiens
tgctgcattgccata

SEQ ID NO: 186859 - DNA, 15 bp, Homo sapiens
ctgctgcattgccat

SEQ ID NO: 186860 - DNA, 15 bp, Homo sapiens
tctgctgcattgcca

SEQ ID NO: 186861 - DNA, 15 bp, Homo sapiens
atctgctgcattgcc

SEQ ID NO: 186862 - DNA, 15 bp, Homo sapiens
catctgctgcattgc

SEQ ID NO: 186863 - DNA, 15 bp, Homo sapiens
tcatctgctgcattg

SEQ ID NO: 186864 - DNA, 15 bp, Homo sapiens
atcatctgctgcatt

SEQ ID NO: 186865 - DNA, 15 bp, Homo sapiens
tatcatctgctgcat

SEQ ID NO: 186866 - DNA, 15 bp, Homo sapiens
ctatcatctgctgca

SEQ ID NO: 186867 - DNA, 15 bp, Homo sapiens
cctatcatctgctgc

SEQ ID NO: 186868 - DNA, 15 bp, Homo sapiens
tcctatcatctgctg

SEQ ID NO: 186869 - DNA, 15 bp, Homo sapiens
gtcctatcatctgct

SEQ ID NO: 186870 - DNA, 15 bp, Homo sapiens
tgtcctatcatctgc

SEQ ID NO: 186871 - DNA, 15 bp, Homo sapiens
ctgtcctatcatctg

SEQ ID NO: 186872 - DNA, 15 bp, Homo sapiens
tctgtcctatcatct

SEQ ID NO: 186873 - DNA, 15 bp, Homo sapiens
gtctgtcctatcatc

SEQ ID NO: 186874 - DNA, 15 bp, Homo sapiens
tgtctgtcctatcat

SEQ ID NO: 186875 - DNA, 15 bp, Homo sapiens
ttgtctgtcctatca

SEQ ID NO: 186876 - DNA, 15 bp, Homo sapiens
cttgtctgtcctatc

SEQ ID NO: 186877 - DNA, 15 bp, Homo sapiens
ccttgtctgtcctat

SEQ ID NO: 186878 - DNA, 15 bp, Homo sapiens
accttgtctgtccta

SEQ ID NO: 186879 - DNA, 15 bp, Homo sapiens
gaccttgtctgtcct

SEQ ID NO: 186880 - DNA, 15 bp, Homo sapiens
agaccttgtctgtcc

SEQ ID NO: 186881 - DNA, 15 bp, Homo sapiens
gagaccttgtctgtc

SEQ ID NO: 186882 - DNA, 15 bp, Homo sapiens
tgagaccttgtctgt

SEQ ID NO: 186883 - DNA, 15 bp, Homo sapiens
ctgagaccttgtctg

SEQ ID NO: 186884 - DNA, 15 bp, Homo sapiens
gctgagaccttgtct

SEQ ID NO: 186885 - DNA, 15 bp, Homo sapiens
agctgagaccttgtc

SEQ ID NO: 186886 - DNA, 15 bp, Homo sapiens
gagctgagaccttgt

SEQ ID NO: 186887 - DNA, 15 bp, Homo sapiens
agagctgagaccttg

SEQ ID NO: 186888 - DNA, 15 bp, Homo sapiens
gagagctgagacctt

SEQ ID NO: 186889 - DNA, 15 bp, Homo sapiens
agagagctgagacct

SEQ ID NO: 186890 - DNA, 15 bp, Homo sapiens
cagagagctgagacc

SEQ ID NO: 186891 - DNA, 15 bp, Homo sapiens
acagagagctgagac

SEQ ID NO: 186892 - DNA, 15 bp, Homo sapiens
cacagagagctgaga

SEQ ID NO: 186893 - DNA, 15 bp, Homo sapiens
gcacagagagctgag

SEQ ID NO: 186894 - DNA, 15 bp, Homo sapiens
cgcacagagagctga

SEQ ID NO: 186895 - DNA, 15 bp, Homo sapiens
gcgcacagagagctg

SEQ ID NO: 186896 - DNA, 15 bp, Homo sapiens
cgcgcacagagagct

SEQ ID NO: 186897 - DNA, 15 bp, Homo sapiens
acgcgcacagagagc

SEQ ID NO: 186898 - DNA, 15 bp, Homo sapiens
aacgcgcacagagag

SEQ ID NO: 186899 - DNA, 15 bp, Homo sapiens
gaacgcgcacagaga

SEQ ID NO: 186900 - DNA, 15 bp, Homo sapiens
agaacgcgcacagag

SEQ ID NO: 186901 - DNA, 15 bp, Homo sapiens
cagaacgcgcacaga

SEQ ID NO: 186902 - DNA, 15 bp, Homo sapiens
ccagaacgcgcacag

SEQ ID NO: 186903 - DNA, 15 bp, Homo sapiens
accagaacgcgcaca

SEQ ID NO: 186904 - DNA, 15 bp, Homo sapiens
caccagaacgcgcac

SEQ ID NO: 186905 - DNA, 15 bp, Homo sapiens
ccaccagaacgcgca

SEQ ID NO: 186906 - DNA, 15 bp, Homo sapiens
cccaccagaacgcgc

SEQ ID NO: 186907 - DNA, 15 bp, Homo sapiens
tcccaccagaacgcg

SEQ ID NO: 186908 - DNA, 15 bp, Homo sapiens
ctcccaccagaacgc

SEQ ID NO: 186909 - DNA, 15 bp, Homo sapiens
tctcccaccagaacg

SEQ ID NO: 186910 - DNA, 15 bp, Homo sapiens
ctctcccaccagaac

SEQ ID NO: 186911 - DNA, 15 bp, Homo sapiens
tctctcccaccagaa

SEQ ID NO: 186912 - DNA, 15 bp, Homo sapiens
atctctcccaccaga

SEQ ID NO: 186913 - DNA, 15 bp, Homo sapiens
catctctcccaccag

SEQ ID NO: 186914 - DNA, 15 bp, Homo sapiens
ccatctctcccacca

SEQ ID NO: 186915 - DNA, 15 bp, Homo sapiens
cccatctctcccacc

SEQ ID NO: 186916 - DNA, 15 bp, Homo sapiens
tcccatctctcccac

SEQ ID NO: 186917 - DNA, 15 bp, Homo sapiens
ctcccatctctccca

SEQ ID NO: 186918 - DNA, 15 bp, Homo sapiens
actcccatctctccc

SEQ ID NO: 186919 - DNA, 15 bp, Homo sapiens
gactcccatctctcc

SEQ ID NO: 186920 - DNA, 15 bp, Homo sapiens
tgactcccatctctc

SEQ ID NO: 186921 - DNA, 15 bp, Homo sapiens
gtgactcccatctct

SEQ ID NO: 186922 - DNA, 15 bp, Homo sapiens
tgtgactcccatctc

SEQ ID NO: 186923 - DNA, 15 bp, Homo sapiens
gtgtgactcccatct

SEQ ID NO: 186924 - DNA, 15 bp, Homo sapiens
tgtgtgactcccatc

SEQ ID NO: 186925 - DNA, 15 bp, Homo sapiens
ctgtgtgactcccat

SEQ ID NO: 186926 - DNA, 15 bp, Homo sapiens
gctgtgtgactccca

SEQ ID NO: 186927 - DNA, 15 bp, Homo sapiens
ggctgtgtgactccc

SEQ ID NO: 186928 - DNA, 15 bp, Homo sapiens
cggctgtgtgactcc

SEQ ID NO: 186929 - DNA, 15 bp, Homo sapiens
gcggctgtgtgactc

SEQ ID NO: 186930 - DNA, 15 bp, Homo sapiens
tgcggctgtgtgact

SEQ ID NO: 186931 - DNA, 15 bp, Homo sapiens
atgcggctgtgtgac

SEQ ID NO: 186932 - DNA, 15 bp, Homo sapiens
gatgcggctgtgtga

SEQ ID NO: 186933 - DNA, 15 bp, Homo sapiens
tgatgcggctgtgtg

SEQ ID NO: 186934 - DNA, 15 bp, Homo sapiens
ctgatgcggctgtgt

SEQ ID NO: 186935 - DNA, 15 bp, Homo sapiens
cctgatgcggctgtg

SEQ ID NO: 186936 - DNA, 15 bp, Homo sapiens
gcctgatgcggctgt

SEQ ID NO: 186937 - DNA, 15 bp, Homo sapiens
tgcctgatgcggctg

SEQ ID NO: 186938 - DNA, 15 bp, Homo sapiens
ctgcctgatgcggct

SEQ ID NO: 186939 - DNA, 15 bp, Homo sapiens
actgcctgatgcggc

SEQ ID NO: 186940 - DNA, 15 bp, Homo sapiens
cactgcctgatgcgg

SEQ ID NO: 186941 - DNA, 15 bp, Homo sapiens
gcactgcctgatgcg

SEQ ID NO: 186942 - DNA, 15 bp, Homo sapiens
tgcactgcctgatgc

SEQ ID NO: 186943 - DNA, 15 bp, Homo sapiens
ctgcactgcctgatg

SEQ ID NO: 186944 - DNA, 15 bp, Homo sapiens
cctgcactgcctgat

SEQ ID NO: 186945 - DNA, 15 bp, Homo sapiens
gcctgcactgcctga

SEQ ID NO: 186946 - DNA, 15 bp, Homo sapiens
tgcctgcactgcctg

SEQ ID NO: 186947 - DNA, 15 bp, Homo sapiens
ctgcctgcactgcct

SEQ ID NO: 186948 - DNA, 15 bp, Homo sapiens
actgcctgcactgcc

SEQ ID NO: 186949 - DNA, 15 bp, Homo sapiens
gactgcctgcactgc

SEQ ID NO: 186950 - DNA, 15 bp, Homo sapiens
tgactgcctgcactg

SEQ ID NO: 186951 - DNA, 15 bp, Homo sapiens
gtgactgcctgcact

SEQ ID NO: 186952 - DNA, 15 bp, Homo sapiens
tgtgactgcctgcac

SEQ ID NO: 186953 - DNA, 15 bp, Homo sapiens
ctgtgactgcctgca

SEQ ID NO: 186954 - DNA, 15 bp, Homo sapiens
cctgtgactgcctgc

SEQ ID NO: 186955 - DNA, 15 bp, Homo sapiens
gcctgtgactgcctg

SEQ ID NO: 186956 - DNA, 15 bp, Homo sapiens
tgcctgtgactgcct

SEQ ID NO: 186957 - DNA, 15 bp, Homo sapiens
ctgcctgtgactgcc

SEQ ID NO: 186958 - DNA, 15 bp, Homo sapiens
cctgcctgtgactgc

SEQ ID NO: 186959 - DNA, 15 bp, Homo sapiens
tcctgcctgtgactg

SEQ ID NO: 186960 - DNA, 15 bp, Homo sapiens
ctcctgcctgtgact

SEQ ID NO: 186961 - DNA, 15 bp, Homo sapiens
tctcctgcctgtgac

SEQ ID NO: 186962 - DNA, 15 bp, Homo sapiens
ctctcctgcctgtga

SEQ ID NO: 186963 - DNA, 15 bp, Homo sapiens
cctctcctgcctgtg

SEQ ID NO: 186964 - DNA, 15 bp, Homo sapiens
tcctctcctgcctgt

SEQ ID NO: 186965 - DNA, 15 bp, Homo sapiens
ttcctctcctgcctg

SEQ ID NO: 186966 - DNA, 15 bp, Homo sapiens
tttcctctcctgcct

SEQ ID NO: 186967 - DNA, 15 bp, Homo sapiens
ctttcctctcctgcc

SEQ ID NO: 186968 - DNA, 15 bp, Homo sapiens
gctttcctctcctgc

SEQ ID NO: 186969 - DNA, 15 bp, Homo sapiens
agctttcctctcctg

SEQ ID NO: 186970 - DNA, 15 bp, Homo sapiens
cagctttcctctcct

SEQ ID NO: 186971 - DNA, 15 bp, Homo sapiens
ccagctttcctctcc

SEQ ID NO: 186972 - DNA, 15 bp, Homo sapiens
cccagctttcctctc

SEQ ID NO: 186973 - DNA, 15 bp, Homo sapiens
ccccagctttcctct

SEQ ID NO: 186974 - DNA, 15 bp, Homo sapiens
tccccagctttcctc

SEQ ID NO: 186975 - DNA, 15 bp, Homo sapiens
ttccccagctttcct

SEQ ID NO: 186976 - DNA, 15 bp, Homo sapiens
cttccccagctttcc

SEQ ID NO: 186977 - DNA, 15 bp, Homo sapiens
tcttccccagctttc

SEQ ID NO: 186978 - DNA, 15 bp, Homo sapiens
ttcttccccagcttt

SEQ ID NO: 186979 - DNA, 15 bp, Homo sapiens
cttcttccccagctt

SEQ ID NO: 186980 - DNA, 15 bp, Homo sapiens
ccttcttccccagct

SEQ ID NO: 186981 - DNA, 15 bp, Homo sapiens
accttcttccccagc

SEQ ID NO: 186982 - DNA, 15 bp, Homo sapiens
caccttcttccccag

SEQ ID NO: 186983 - DNA, 15 bp, Homo sapiens
ccaccttcttcccca

SEQ ID NO: 186984 - DNA, 15 bp, Homo sapiens
gccaccttcttcccc

SEQ ID NO: 186985 - DNA, 15 bp, Homo sapiens
cgccaccttcttccc

SEQ ID NO: 186986 - DNA, 15 bp, Homo sapiens
ccgccaccttcttcc

SEQ ID NO: 186987 - DNA, 15 bp, Homo sapiens
cccgccaccttcttc

SEQ ID NO: 186988 - DNA, 15 bp, Homo sapiens
acccgccaccttctt

SEQ ID NO: 186989 - DNA, 15 bp, Homo sapiens
cacccgccaccttct

SEQ ID NO: 186990 - DNA, 15 bp, Homo sapiens
tcacccgccaccttc

SEQ ID NO: 186991 - DNA, 15 bp, Homo sapiens
atcacccgccacctt

SEQ ID NO: 186992 - DNA, 15 bp, Homo sapiens
catcacccgccacct

SEQ ID NO: 186993 - DNA, 15 bp, Homo sapiens
ccatcacccgccacc

SEQ ID NO: 186994 - DNA, 15 bp, Homo sapiens
gccatcacccgccac

SEQ ID NO: 186995 - DNA, 15 bp, Homo sapiens
cgccatcacccgcca

SEQ ID NO: 186996 - DNA, 15 bp, Homo sapiens
ccgccatcacccgcc

SEQ ID NO: 186997 - DNA, 15 bp, Homo sapiens
gccgccatcacccgc

SEQ ID NO: 186998 - DNA, 15 bp, Homo sapiens
tgccgccatcacccg

SEQ ID NO: 186999 - DNA, 15 bp, Homo sapiens
atgccgccatcaccc

SEQ ID NO: 187000 - DNA, 15 bp, Homo sapiens
catgccgccatcacc

SEQ ID NO: 187001 - DNA, 15 bp, Homo sapiens
ccatgccgccatcac

SEQ ID NO: 187002 - DNA, 15 bp, Homo sapiens
accatgccgccatca

SEQ ID NO: 187003 - DNA, 15 bp, Homo sapiens
taccatgccgccatc

SEQ ID NO: 187004 - DNA, 15 bp, Homo sapiens
ctaccatgccgccat

SEQ ID NO: 187005 - DNA, 15 bp, Homo sapiens
actaccatgccgcca

SEQ ID NO: 187006 - DNA, 15 bp, Homo sapiens
cactaccatgccgcc

SEQ ID NO: 187007 - DNA, 15 bp, Homo sapiens
acactaccatgccgc

SEQ ID NO: 187008 - DNA, 15 bp, Homo sapiens
cacactaccatgccg

SEQ ID NO: 187009 - DNA, 15 bp, Homo sapiens
gcacactaccatgcc

SEQ ID NO: 187010 - DNA, 15 bp, Homo sapiens
agcacactaccatgc

SEQ ID NO: 187011 - DNA, 15 bp, Homo sapiens
gagcacactaccatg

SEQ ID NO: 187012 - DNA, 15 bp, Homo sapiens
agagcacactaccat

SEQ ID NO: 187013 - DNA, 15 bp, Homo sapiens
cagagcacactacca

SEQ ID NO: 187014 - DNA, 15 bp, Homo sapiens
tcagagcacactacc

SEQ ID NO: 187015 - DNA, 15 bp, Homo sapiens
ttcagagcacactac

SEQ ID NO: 187016 - DNA, 15 bp, Homo sapiens
cttcagagcacacta

SEQ ID NO: 187017 - DNA, 15 bp, Homo sapiens
ccttcagagcacact

SEQ ID NO: 187018 - DNA, 15 bp, Homo sapiens
cccttcagagcacac

SEQ ID NO: 187019 - DNA, 15 bp, Homo sapiens
gcccttcagagcaca

SEQ ID NO: 187020 - DNA, 15 bp, Homo sapiens
agcccttcagagcac

SEQ ID NO: 187021 - DNA, 15 bp, Homo sapiens
gagcccttcagagca

SEQ ID NO: 187022 - DNA, 15 bp, Homo sapiens
agagcccttcagagc

SEQ ID NO: 187023 - DNA, 15 bp, Homo sapiens
aagagcccttcagag

SEQ ID NO: 187024 - DNA, 15 bp, Homo sapiens
gaagagcccttcaga

SEQ ID NO: 187025 - DNA, 15 bp, Homo sapiens
cgaagagcccttcag

SEQ ID NO: 187026 - DNA, 15 bp, Homo sapiens
tcgaagagcccttca

SEQ ID NO: 187027 - DNA, 15 bp, Homo sapiens
ctcgaagagcccttc

SEQ ID NO: 187028 - DNA, 15 bp, Homo sapiens
tctcgaagagccctt

SEQ ID NO: 187029 - DNA, 15 bp, Homo sapiens
ctctcgaagagccct

SEQ ID NO: 187030 - DNA, 15 bp, Homo sapiens
cctctcgaagagccc

SEQ ID NO: 187031 - DNA, 15 bp, Homo sapiens
acctctcgaagagcc

SEQ ID NO: 187032 - DNA, 15 bp, Homo sapiens
cacctctcgaagagc

SEQ ID NO: 187033 - DNA, 15 bp, Homo sapiens
tcacctctcgaagag

SEQ ID NO: 187034 - DNA, 15 bp, Homo sapiens
gtcacctctcgaaga

SEQ ID NO: 187035 - DNA, 15 bp, Homo sapiens
tgtcacctctcgaag

SEQ ID NO: 187036 - DNA, 15 bp, Homo sapiens
atgtcacctctcgaa

SEQ ID NO: 187037 - DNA, 15 bp, Homo sapiens
aatgtcacctctcga

SEQ ID NO: 187038 - DNA, 15 bp, Homo sapiens
caatgtcacctctcg

SEQ ID NO: 187039 - DNA, 15 bp, Homo sapiens
tcaatgtcacctctc

SEQ ID NO: 187040 - DNA, 15 bp, Homo sapiens
ttcaatgtcacctct

SEQ ID NO: 187041 - DNA, 15 bp, Homo sapiens
cttcaatgtcacctc

SEQ ID NO: 187042 - DNA, 15 bp, Homo sapiens
gcttcaatgtcacct

SEQ ID NO: 187043 - DNA, 15 bp, Homo sapiens
tgcttcaatgtcacc

SEQ ID NO: 187044 - DNA, 15 bp, Homo sapiens
ctgcttcaatgtcac

SEQ ID NO: 187045 - DNA, 15 bp, Homo sapiens
tctgcttcaatgtca

SEQ ID NO: 187046 - DNA, 15 bp, Homo sapiens
atctgcttcaatgtc

SEQ ID NO: 187047 - DNA, 15 bp, Homo sapiens
gatctgcttcaatgt

SEQ ID NO: 187048 - DNA, 15 bp, Homo sapiens
ggatctgcttcaatg

SEQ ID NO: 187049 - DNA, 15 bp, Homo sapiens
gggatctgcttcaat

SEQ ID NO: 187050 - DNA, 15 bp, Homo sapiens
agggatctgcttcaa

SEQ ID NO: 187051 - DNA, 15 bp, Homo sapiens
cagggatctgcttca

SEQ ID NO: 187052 - DNA, 15 bp, Homo sapiens
tcagggatctgcttc

SEQ ID NO: 187053 - DNA, 15 bp, Homo sapiens
ttcagggatctgctt

SEQ ID NO: 187054 - DNA, 15 bp, Homo sapiens
cttcagggatctgct

SEQ ID NO: 187055 - DNA, 15 bp, Homo sapiens
gcttcagggatctgc

SEQ ID NO: 187056 - DNA, 15 bp, Homo sapiens
cgcttcagggatctg

SEQ ID NO: 187057 - DNA, 15 bp, Homo sapiens
tcgcttcagggatct

SEQ ID NO: 187058 - DNA, 15 bp, Homo sapiens
gtcgcttcagggatc

SEQ ID NO: 187059 - DNA, 15 bp, Homo sapiens
ggtcgcttcagggat

SEQ ID NO: 187060 - DNA, 15 bp, Homo sapiens
aggtcgcttcaggga

SEQ ID NO: 187061 - DNA, 15 bp, Homo sapiens
caggtcgcttcaggg

SEQ ID NO: 187062 - DNA, 15 bp, Homo sapiens
tcaggtcgcttcagg

SEQ ID NO: 187063 - DNA, 15 bp, Homo sapiens
ctcaggtcgcttcag

SEQ ID NO: 187064 - DNA, 15 bp, Homo sapiens
cctcaggtcgcttca

SEQ ID NO: 187065 - DNA, 15 bp, Homo sapiens
ccctcaggtcgcttc

SEQ ID NO: 187066 - DNA, 15 bp, Homo sapiens
tccctcaggtcgctt

SEQ ID NO: 187067 - DNA, 15 bp, Homo sapiens
ttccctcaggtcgct

SEQ ID NO: 187068 - DNA, 15 bp, Homo sapiens
cttccctcaggtcgc

SEQ ID NO: 187069 - DNA, 15 bp, Homo sapiens
ccttccctcaggtcg

SEQ ID NO: 187070 - DNA, 15 bp, Homo sapiens
cccttccctcaggtc

SEQ ID NO: 187071 - DNA, 15 bp, Homo sapiens
ccccttccctcaggt

SEQ ID NO: 187072 - DNA, 15 bp, Homo sapiens
gccccttccctcagg

SEQ ID NO: 187073 - DNA, 15 bp, Homo sapiens
ggccccttccctcag

SEQ ID NO: 187074 - DNA, 15 bp, Homo sapiens
aggccccttccctca

SEQ ID NO: 187075 - DNA, 15 bp, Homo sapiens
caggccccttccctc

SEQ ID NO: 187076 - DNA, 15 bp, Homo sapiens
acaggccccttccct

SEQ ID NO: 187077 - DNA, 15 bp, Homo sapiens
aacaggccccttccc

SEQ ID NO: 187078 - DNA, 15 bp, Homo sapiens
caacaggccccttcc

SEQ ID NO: 187079 - DNA, 15 bp, Homo sapiens
tcaacaggccccttc

SEQ ID NO: 187080 - DNA, 15 bp, Homo sapiens
ctcaacaggcccctt

SEQ ID NO: 187081 - DNA, 15 bp, Homo sapiens
tctcaacaggcccct

SEQ ID NO: 187082 - DNA, 15 bp, Homo sapiens
ttctcaacaggcccc

SEQ ID NO: 187083 - DNA, 15 bp, Homo sapiens
gttctcaacaggccc

SEQ ID NO: 187084 - DNA, 15 bp, Homo sapiens
ggttctcaacaggcc

SEQ ID NO: 187085 - DNA, 15 bp, Homo sapiens
aggttctcaacaggc

SEQ ID NO: 187086 - DNA, 15 bp, Homo sapiens
gaggttctcaacagg

SEQ ID NO: 187087 - DNA, 15 bp, Homo sapiens
tgaggttctcaacag

SEQ ID NO: 187088 - DNA, 15 bp, Homo sapiens
ctgaggttctcaaca

SEQ ID NO: 187089 - DNA, 15 bp, Homo sapiens
cctgaggttctcaac

SEQ ID NO: 187090 - DNA, 15 bp, Homo sapiens
tcctgaggttctcaa

SEQ ID NO: 187091 - DNA, 15 bp, Homo sapiens
ctcctgaggttctca

SEQ ID NO: 187092 - DNA, 15 bp, Homo sapiens
tctcctgaggttctc

SEQ ID NO: 187093 - DNA, 15 bp, Homo sapiens
ctctcctgaggttct

SEQ ID NO: 187094 - DNA, 15 bp, Homo sapiens
actctcctgaggttc

SEQ ID NO: 187095 - DNA, 15 bp, Homo sapiens
gactctcctgaggtt

SEQ ID NO: 187096 - DNA, 15 bp, Homo sapiens
ggactctcctgaggt

SEQ ID NO: 187097 - DNA, 15 bp, Homo sapiens
gggactctcctgagg

SEQ ID NO: 187098 - DNA, 15 bp, Homo sapiens
cgggactctcctgag

SEQ ID NO: 187099 - DNA, 15 bp, Homo sapiens
ccgggactctcctga

SEQ ID NO: 187100 - DNA, 15 bp, Homo sapiens
cccgggactctcctg

SEQ ID NO: 187101 - DNA, 15 bp, Homo sapiens
gcccgggactctcct

SEQ ID NO: 187102 - DNA, 15 bp, Homo sapiens
tgcccgggactctcc

SEQ ID NO: 187103 - DNA, 15 bp, Homo sapiens
ctgcccgggactctc

SEQ ID NO: 187104 - DNA, 15 bp, Homo sapiens
tctgcccgggactct

SEQ ID NO: 187105 - DNA, 15 bp, Homo sapiens
ctctgcccgggactc

SEQ ID NO: 187106 - DNA, 15 bp, Homo sapiens
cctctgcccgggact

SEQ ID NO: 187107 - DNA, 15 bp, Homo sapiens
ccctctgcccgggac

SEQ ID NO: 187108 - DNA, 15 bp, Homo sapiens
tccctctgcccggga

SEQ ID NO: 187109 - DNA, 15 bp, Homo sapiens
ttccctctgcccggg

SEQ ID NO: 187110 - DNA, 15 bp, Homo sapiens
cttccctctgcccgg

SEQ ID NO: 187111 - DNA, 15 bp, Homo sapiens
tcttccctctgcccg

SEQ ID NO: 187112 - DNA, 15 bp, Homo sapiens
ctcttccctctgccc

SEQ ID NO: 187113 - DNA, 15 bp, Homo sapiens
gctcttccctctgcc

SEQ ID NO: 187114 - DNA, 15 bp, Homo sapiens
agctcttccctctgc

SEQ ID NO: 187115 - DNA, 15 bp, Homo sapiens
tagctcttccctctg

SEQ ID NO: 187116 - DNA, 15 bp, Homo sapiens
ctagctcttccctct

SEQ ID NO: 187117 - DNA, 15 bp, Homo sapiens
tctagctcttccctc

SEQ ID NO: 187118 - DNA, 15 bp, Homo sapiens
ttctagctcttccct

SEQ ID NO: 187119 - DNA, 15 bp, Homo sapiens
gttctagctcttccc

SEQ ID NO: 187120 - DNA, 15 bp, Homo sapiens
tgttctagctcttcc

SEQ ID NO: 187121 - DNA, 15 bp, Homo sapiens
gtgttctagctcttc

SEQ ID NO: 187122 - DNA, 15 bp, Homo sapiens
tgtgttctagctctt

SEQ ID NO: 187123 - DNA, 15 bp, Homo sapiens
ctgtgttctagctct

SEQ ID NO: 187124 - DNA, 15 bp, Homo sapiens
cctgtgttctagctc

SEQ ID NO: 187125 - DNA, 15 bp, Homo sapiens
gcctgtgttctagct

SEQ ID NO: 187126 - DNA, 15 bp, Homo sapiens
ggcctgtgttctagc

SEQ ID NO: 187127 - DNA, 15 bp, Homo sapiens
tggcctgtgttctag

SEQ ID NO: 187128 - DNA, 15 bp, Homo sapiens
ctggcctgtgttcta

SEQ ID NO: 187129 - DNA, 15 bp, Homo sapiens
cctggcctgtgttct

SEQ ID NO: 187130 - DNA, 15 bp, Homo sapiens
gcctggcctgtgttc

SEQ ID NO: 187131 - DNA, 15 bp, Homo sapiens
ggcctggcctgtgtt

SEQ ID NO: 187132 - DNA, 15 bp, Homo sapiens
gggcctggcctgtgt

SEQ ID NO: 187133 - DNA, 15 bp, Homo sapiens
agggcctggcctgtg

SEQ ID NO: 187134 - DNA, 15 bp, Homo sapiens
cagggcctggcctgt

SEQ ID NO: 187135 - DNA, 15 bp, Homo sapiens
tcagggcctggcctg

SEQ ID NO: 187136 - DNA, 15 bp, Homo sapiens
ctcagggcctggcct

SEQ ID NO: 187137 - DNA, 15 bp, Homo sapiens
gctcagggcctggcc

SEQ ID NO: 187138 - DNA, 15 bp, Homo sapiens
ggctcagggcctggc

SEQ ID NO: 187139 - DNA, 15 bp, Homo sapiens
tggctcagggcctgg

SEQ ID NO: 187140 - DNA, 15 bp, Homo sapiens
ctggctcagggcctg

SEQ ID NO: 187141 - DNA, 15 bp, Homo sapiens
cctggctcagggcct

SEQ ID NO: 187142 - DNA, 15 bp, Homo sapiens
ccctggctcagggcc

SEQ ID NO: 187143 - DNA, 15 bp, Homo sapiens
gccctggctcagggc

SEQ ID NO: 187144 - DNA, 15 bp, Homo sapiens
ggccctggctcaggg

SEQ ID NO: 187145 - DNA, 15 bp, Homo sapiens
cggccctggctcagg

SEQ ID NO: 187146 - DNA, 15 bp, Homo sapiens
gcggccctggctcag

SEQ ID NO: 187147 - DNA, 15 bp, Homo sapiens
ggcggccctggctca

SEQ ID NO: 187148 - DNA, 15 bp, Homo sapiens
tggcggccctggctc

SEQ ID NO: 187149 - DNA, 15 bp, Homo sapiens
atggcggccctggct

SEQ ID NO: 187150 - DNA, 15 bp, Homo sapiens
catggcggccctggc

SEQ ID NO: 187151 - DNA, 15 bp, Homo sapiens
ccatggcggccctgg

SEQ ID NO: 187152 - DNA, 15 bp, Homo sapiens
accatggcggccctg

SEQ ID NO: 187153 - DNA, 15 bp, Homo sapiens
caccatggcggccct

SEQ ID NO: 187154 - DNA, 15 bp, Homo sapiens
acaccatggcggccc

SEQ ID NO: 187155 - DNA, 15 bp, Homo sapiens
cacaccatggcggcc

SEQ ID NO: 187156 - DNA, 15 bp, Homo sapiens
acacaccatggcggc

SEQ ID NO: 187157 - DNA, 15 bp, Homo sapiens
gacacaccatggcgg

SEQ ID NO: 187158 - DNA, 15 bp, Homo sapiens
agacacaccatggcg

SEQ ID NO: 187159 - DNA, 15 bp, Homo sapiens
cagacacaccatggc

SEQ ID NO: 187160 - DNA, 15 bp, Homo sapiens
gcagacacaccatgg

SEQ ID NO: 187161 - DNA, 15 bp, Homo sapiens
tgcagacacaccatg

SEQ ID NO: 187162 - DNA, 15 bp, Homo sapiens
ctgcagacacaccat

SEQ ID NO: 187163 - DNA, 15 bp, Homo sapiens
tctgcagacacacca

SEQ ID NO: 187164 - DNA, 15 bp, Homo sapiens
ttctgcagacacacc

SEQ ID NO: 187165 - DNA, 15 bp, Homo sapiens
cttctgcagacacac

SEQ ID NO: 187166 - DNA, 15 bp, Homo sapiens
tcttctgcagacaca

SEQ ID NO: 187167 - DNA, 15 bp, Homo sapiens
ctcttctgcagacac

SEQ ID NO: 187168 - DNA, 15 bp, Homo sapiens
gctcttctgcagaca

SEQ ID NO: 187169 - DNA, 15 bp, Homo sapiens
tgctcttctgcagac

SEQ ID NO: 187170 - DNA, 15 bp, Homo sapiens
ctgctcttctgcaga

SEQ ID NO: 187171 - DNA, 15 bp, Homo sapiens
tctgctcttctgcag

SEQ ID NO: 187172 - DNA, 15 bp, Homo sapiens
ttctgctcttctgca

SEQ ID NO: 187173 - DNA, 15 bp, Homo sapiens
attctgctcttctgc

SEQ ID NO: 187174 - DNA, 15 bp, Homo sapiens
aattctgctcttctg

SEQ ID NO: 187175 - DNA, 15 bp, Homo sapiens
gaattctgctcttct

SEQ ID NO: 187176 - DNA, 15 bp, Homo sapiens
tgaattctgctcttc

SEQ ID NO: 187177 - DNA, 15 bp, Homo sapiens
ctgaattctgctctt

SEQ ID NO: 187178 - DNA, 15 bp, Homo sapiens
cctgaattctgctct

SEQ ID NO: 187179 - DNA, 15 bp, Homo sapiens
tcctgaattctgctc

SEQ ID NO: 187180 - DNA, 15 bp, Homo sapiens
ttcctgaattctgct

SEQ ID NO: 187181 - DNA, 15 bp, Homo sapiens
tttcctgaattctgc

SEQ ID NO: 187182 - DNA, 15 bp, Homo sapiens
ctttcctgaattctg

SEQ ID NO: 187183 - DNA, 15 bp, Homo sapiens
cctttcctgaattct

SEQ ID NO: 187184 - DNA, 15 bp, Homo sapiens
tcctttcctgaattc

SEQ ID NO: 187185 - DNA, 15 bp, Homo sapiens
ttcctttcctgaatt

SEQ ID NO: 187186 - DNA, 15 bp, Homo sapiens
tttcctttcctgaat

SEQ ID NO: 187187 - DNA, 15 bp, Homo sapiens
ctttcctttcctgaa

SEQ ID NO: 187188 - DNA, 15 bp, Homo sapiens
tctttcctttcctga

SEQ ID NO: 187189 - DNA, 15 bp, Homo sapiens
ctctttcctttcctg

SEQ ID NO: 187190 - DNA, 15 bp, Homo sapiens
cctctttcctttcct

SEQ ID NO: 187191 - DNA, 15 bp, Homo sapiens
tcctctttcctttcc

SEQ ID NO: 187192 - DNA, 15 bp, Homo sapiens
ttcctctttcctttc

SEQ ID NO: 187193 - DNA, 15 bp, Homo sapiens
cttcctctttccttt

SEQ ID NO: 187194 - DNA, 15 bp, Homo sapiens
acttcctctttcctt

SEQ ID NO: 187195 - DNA, 15 bp, Homo sapiens
aacttcctctttcct

SEQ ID NO: 187196 - DNA, 15 bp, Homo sapiens
caacttcctctttcc

SEQ ID NO: 187197 - DNA, 15 bp, Homo sapiens
ccaacttcctctttc

SEQ ID NO: 187198 - DNA, 15 bp, Homo sapiens
gccaacttcctcttt

SEQ ID NO: 187199 - DNA, 15 bp, Homo sapiens
cgccaacttcctctt

SEQ ID NO: 187200 - DNA, 15 bp, Homo sapiens
gcgccaacttcctct

SEQ ID NO: 187201 - DNA, 15 bp, Homo sapiens
tgcgccaacttcctc

SEQ ID NO: 187202 - DNA, 15 bp, Homo sapiens
ctgcgccaacttcct

SEQ ID NO: 187203 - DNA, 15 bp, Homo sapiens
actgcgccaacttcc

SEQ ID NO: 187204 - DNA, 15 bp, Homo sapiens
cactgcgccaacttc

SEQ ID NO: 187205 - DNA, 15 bp, Homo sapiens
ccactgcgccaactt

SEQ ID NO: 187206 - DNA, 15 bp, Homo sapiens
tccactgcgccaact

SEQ ID NO: 187207 - DNA, 15 bp, Homo sapiens
ctccactgcgccaac

SEQ ID NO: 187208 - DNA, 15 bp, Homo sapiens
cctccactgcgccaa

SEQ ID NO: 187209 - DNA, 15 bp, Homo sapiens
ccctccactgcgcca

SEQ ID NO: 187210 - DNA, 15 bp, Homo sapiens
cccctccactgcgcc

SEQ ID NO: 187211 - DNA, 15 bp, Homo sapiens
ccccctccactgcgc

SEQ ID NO: 187212 - DNA, 15 bp, Homo sapiens
gccccctccactgcg

SEQ ID NO: 187213 - DNA, 15 bp, Homo sapiens
agccccctccactgc

SEQ ID NO: 187214 - DNA, 15 bp, Homo sapiens
cagccccctccactg

SEQ ID NO: 187215 - DNA, 15 bp, Homo sapiens
gcagccccctccact

SEQ ID NO: 187216 - DNA, 15 bp, Homo sapiens
ggcagccccctccac

SEQ ID NO: 187217 - DNA, 15 bp, Homo sapiens
gggcagccccctcca

SEQ ID NO: 187218 - DNA, 15 bp, Homo sapiens
tgggcagccccctcc

SEQ ID NO: 187219 - DNA, 15 bp, Homo sapiens
ctgggcagccccctc

SEQ ID NO: 187220 - DNA, 15 bp, Homo sapiens
cctgggcagccccct

SEQ ID NO: 187221 - DNA, 15 bp, Homo sapiens
gcctgggcagccccc

SEQ ID NO: 187222 - DNA, 15 bp, Homo sapiens
ggcctgggcagcccc

SEQ ID NO: 187223 - DNA, 15 bp, Homo sapiens
tggcctgggcagccc

SEQ ID NO: 187224 - DNA, 15 bp, Homo sapiens
ctggcctgggcagcc

SEQ ID NO: 187225 - DNA, 15 bp, Homo sapiens
tctggcctgggcagc

SEQ ID NO: 187226 - DNA, 15 bp, Homo sapiens
atctggcctgggcag

SEQ ID NO: 187227 - DNA, 15 bp, Homo sapiens
catctggcctgggca

SEQ ID NO: 187228 - DNA, 15 bp, Homo sapiens
ccatctggcctgggc

SEQ ID NO: 187229 - DNA, 15 bp, Homo sapiens
accatctggcctggg

SEQ ID NO: 187230 - DNA, 15 bp, Homo sapiens
caccatctggcctgg

SEQ ID NO: 187231 - DNA, 15 bp, Homo sapiens
ccaccatctggcctg

SEQ ID NO: 187232 - DNA, 15 bp, Homo sapiens
tccaccatctggcct

SEQ ID NO: 187233 - DNA, 15 bp, Homo sapiens
ctccaccatctggcc

SEQ ID NO: 187234 - DNA, 15 bp, Homo sapiens
cctccaccatctggc

SEQ ID NO: 187235 - DNA, 15 bp, Homo sapiens
tcctccaccatctgg

SEQ ID NO: 187236 - DNA, 15 bp, Homo sapiens
gtcctccaccatctg

SEQ ID NO: 187237 - DNA, 15 bp, Homo sapiens
ggtcctccaccatct

SEQ ID NO: 187238 - DNA, 15 bp, Homo sapiens
aggtcctccaccatc

SEQ ID NO: 187239 - DNA, 15 bp, Homo sapiens
aaggtcctccaccat

SEQ ID NO: 187240 - DNA, 15 bp, Homo sapiens
caaggtcctccacca

SEQ ID NO: 187241 - DNA, 15 bp, Homo sapiens
ccaaggtcctccacc

SEQ ID NO: 187242 - DNA, 15 bp, Homo sapiens
tccaaggtcctccac

SEQ ID NO: 187243 - DNA, 15 bp, Homo sapiens
ttccaaggtcctcca

SEQ ID NO: 187244 - DNA, 15 bp, Homo sapiens
cttccaaggtcctcc

SEQ ID NO: 187245 - DNA, 15 bp, Homo sapiens
tcttccaaggtcctc

SEQ ID NO: 187246 - DNA, 15 bp, Homo sapiens
ttcttccaaggtcct

SEQ ID NO: 187247 - DNA, 15 bp, Homo sapiens
cttcttccaaggtcc

SEQ ID NO: 187248 - DNA, 15 bp, Homo sapiens
acttcttccaaggtc

SEQ ID NO: 187249 - DNA, 15 bp, Homo sapiens
gacttcttccaaggt

SEQ ID NO: 187250 - DNA, 15 bp, Homo sapiens
ggacttcttccaagg

SEQ ID NO: 187251 - DNA, 15 bp, Homo sapiens
gggacttcttccaag

SEQ ID NO: 187252 - DNA, 15 bp, Homo sapiens
ggggacttcttccaa

SEQ ID NO: 187253 - DNA, 15 bp, Homo sapiens
tggggacttcttcca

SEQ ID NO: 187254 - DNA, 15 bp, Homo sapiens
ctggggacttcttcc

SEQ ID NO: 187255 - DNA, 15 bp, Homo sapiens
actggggacttcttc

SEQ ID NO: 187256 - DNA, 15 bp, Homo sapiens
cactggggacttctt

SEQ ID NO: 187257 - DNA, 15 bp, Homo sapiens
acactggggacttct

SEQ ID NO: 187258 - DNA, 15 bp, Homo sapiens
cacactggggacttc

SEQ ID NO: 187259 - DNA, 15 bp, Homo sapiens
ccacactggggactt

SEQ ID NO: 187260 - DNA, 15 bp, Homo sapiens
gccacactggggact

SEQ ID NO: 187261 - DNA, 15 bp, Homo sapiens
agccacactggggac

SEQ ID NO: 187262 - DNA, 15 bp, Homo sapiens
cagccacactgggga

SEQ ID NO: 187263 - DNA, 15 bp, Homo sapiens
acagccacactgggg

SEQ ID NO: 187264 - DNA, 15 bp, Homo sapiens
gacagccacactggg

SEQ ID NO: 187265 - DNA, 15 bp, Homo sapiens
agacagccacactgg

SEQ ID NO: 187266 - DNA, 15 bp, Homo sapiens
cagacagccacactg

SEQ ID NO: 187267 - DNA, 15 bp, Homo sapiens
ccagacagccacact

SEQ ID NO: 187268 - DNA, 15 bp, Homo sapiens
cccagacagccacac

SEQ ID NO: 187269 - DNA, 15 bp, Homo sapiens
gcccagacagccaca

SEQ ID NO: 187270 - DNA, 15 bp, Homo sapiens
agcccagacagccac

SEQ ID NO: 187271 - DNA, 15 bp, Homo sapiens
gagcccagacagcca

SEQ ID NO: 187272 - DNA, 15 bp, Homo sapiens
ggagcccagacagcc

SEQ ID NO: 187273 - DNA, 15 bp, Homo sapiens
aggagcccagacagc

SEQ ID NO: 187274 - DNA, 15 bp, Homo sapiens
caggagcccagacag

SEQ ID NO: 187275 - DNA, 15 bp, Homo sapiens
acaggagcccagaca

SEQ ID NO: 187276 - DNA, 15 bp, Homo sapiens
cacaggagcccagac

SEQ ID NO: 187277 - DNA, 15 bp, Homo sapiens
ccacaggagcccaga

SEQ ID NO: 187278 - DNA, 15 bp, Homo sapiens
accacaggagcccag

SEQ ID NO: 187279 - DNA, 15 bp, Homo sapiens
aaccacaggagccca

SEQ ID NO: 187280 - DNA, 15 bp, Homo sapiens
aaaccacaggagccc

SEQ ID NO: 187281 - DNA, 15 bp, Homo sapiens
aaaaccacaggagcc

SEQ ID NO: 187282 - DNA, 15 bp, Homo sapiens
taaaaccacaggagc

SEQ ID NO: 187283 - DNA, 15 bp, Homo sapiens
ataaaaccacaggag

SEQ ID NO: 187284 - DNA, 15 bp, Homo sapiens
aataaaaccacagga

SEQ ID NO: 187285 - DNA, 15 bp, Homo sapiens
gaataaaaccacagg

SEQ ID NO: 187286 - DNA, 15 bp, Homo sapiens
ggaataaaaccacag

SEQ ID NO: 187287 - DNA, 15 bp, Homo sapiens
tggaataaaaccaca

SEQ ID NO: 187288 - DNA, 15 bp, Homo sapiens
ctggaataaaaccac

SEQ ID NO: 187289 - DNA, 15 bp, Homo sapiens
cctggaataaaacca

SEQ ID NO: 187290 - DNA, 15 bp, Homo sapiens
ccctggaataaaacc

SEQ ID NO: 187291 - DNA, 15 bp, Homo sapiens
accctggaataaaac

SEQ ID NO: 187292 - DNA, 15 bp, Homo sapiens
caccctggaataaaa

SEQ ID NO: 187293 - DNA, 15 bp, Homo sapiens
tcaccctggaataaa

SEQ ID NO: 187294 - DNA, 15 bp, Homo sapiens
atcaccctggaataa

SEQ ID NO: 187295 - DNA, 15 bp, Homo sapiens
catcaccctggaata

SEQ ID NO: 187296 - DNA, 15 bp, Homo sapiens
tcatcaccctggaat

SEQ ID NO: 187297 - DNA, 15 bp, Homo sapiens
ctcatcaccctggaa

SEQ ID NO: 187298 - DNA, 15 bp, Homo sapiens
tctcatcaccctgga

SEQ ID NO: 187299 - DNA, 15 bp, Homo sapiens
ttctcatcaccctgg

SEQ ID NO: 187300 - DNA, 15 bp, Homo sapiens
cttctcatcaccctg

SEQ ID NO: 187301 - DNA, 15 bp, Homo sapiens
gcttctcatcaccct

SEQ ID NO: 187302 - DNA, 15 bp, Homo sapiens
ggcttctcatcaccc

SEQ ID NO: 187303 - DNA, 15 bp, Homo sapiens
tggcttctcatcacc

SEQ ID NO: 187304 - DNA, 15 bp, Homo sapiens
ctggcttctcatcac

SEQ ID NO: 187305 - DNA, 15 bp, Homo sapiens
gctggcttctcatca

SEQ ID NO: 187306 - DNA, 15 bp, Homo sapiens
tgctggcttctcatc

SEQ ID NO: 187307 - DNA, 15 bp, Homo sapiens
ctgctggcttctcat

SEQ ID NO: 187308 - DNA, 15 bp, Homo sapiens
tctgctggcttctca

SEQ ID NO: 187309 - DNA, 15 bp, Homo sapiens
ctctgctggcttctc

SEQ ID NO: 187310 - DNA, 15 bp, Homo sapiens
cctctgctggcttct

SEQ ID NO: 187311 - DNA, 15 bp, Homo sapiens
ccctctgctggcttc

SEQ ID NO: 187312 - DNA, 15 bp, Homo sapiens
cccctctgctggctt

SEQ ID NO: 187313 - DNA, 15 bp, Homo sapiens
acccctctgctggct

SEQ ID NO: 187314 - DNA, 15 bp, Homo sapiens
aacccctctgctggc

SEQ ID NO: 187315 - DNA, 15 bp, Homo sapiens
aaacccctctgctgg

SEQ ID NO: 187316 - DNA, 15 bp, Homo sapiens
caaacccctctgctg

SEQ ID NO: 187317 - DNA, 15 bp, Homo sapiens
ccaaacccctctgct

SEQ ID NO: 187318 - DNA, 15 bp, Homo sapiens
cccaaacccctctgc

SEQ ID NO: 187319 - DNA, 15 bp, Homo sapiens
acccaaacccctctg

SEQ ID NO: 187320 - DNA, 15 bp, Homo sapiens
aacccaaacccctct

SEQ ID NO: 187321 - DNA, 15 bp, Homo sapiens
caacccaaacccctc

SEQ ID NO: 187322 - DNA, 15 bp, Homo sapiens
acaacccaaacccct

SEQ ID NO: 187323 - DNA, 15 bp, Homo sapiens
cacaacccaaacccc

SEQ ID NO: 187324 - DNA, 15 bp, Homo sapiens
ccacaacccaaaccc

SEQ ID NO: 187325 - DNA, 15 bp, Homo sapiens
tccacaacccaaacc

SEQ ID NO: 187326 - DNA, 15 bp, Homo sapiens
ctccacaacccaaac

SEQ ID NO: 187327 - DNA, 15 bp, Homo sapiens
cctccacaacccaaa

SEQ ID NO: 187328 - DNA, 15 bp, Homo sapiens
gcctccacaacccaa

SEQ ID NO: 187329 - DNA, 15 bp, Homo sapiens
agcctccacaaccca

SEQ ID NO: 187330 - DNA, 15 bp, Homo sapiens
cagcctccacaaccc

SEQ ID NO: 187331 - DNA, 15 bp, Homo sapiens
acagcctccacaacc

SEQ ID NO: 187332 - DNA, 15 bp, Homo sapiens
aacagcctccacaac

SEQ ID NO: 187333 - DNA, 15 bp, Homo sapiens
caacagcctccacaa

SEQ ID NO: 187334 - DNA, 15 bp, Homo sapiens
ccaacagcctccaca

SEQ ID NO: 187335 - DNA, 15 bp, Homo sapiens
gccaacagcctccac

SEQ ID NO: 187336 - DNA, 15 bp, Homo sapiens
tgccaacagcctcca

SEQ ID NO: 187337 - DNA, 15 bp, Homo sapiens
ttgccaacagcctcc

SEQ ID NO: 187338 - DNA, 15 bp, Homo sapiens
cttgccaacagcctc

SEQ ID NO: 187339 - DNA, 15 bp, Homo sapiens
tcttgccaacagcct

SEQ ID NO: 187340 - DNA, 15 bp, Homo sapiens
ctcttgccaacagcc

SEQ ID NO: 187341 - DNA, 15 bp, Homo sapiens
actcttgccaacagc

SEQ ID NO: 187342 - DNA, 15 bp, Homo sapiens
cactcttgccaacag

SEQ ID NO: 187343 - DNA, 15 bp, Homo sapiens
ccactcttgccaaca

SEQ ID NO: 187344 - DNA, 15 bp, Homo sapiens
accactcttgccaac

SEQ ID NO: 187345 - DNA, 15 bp, Homo sapiens
caccactcttgccaa

SEQ ID NO: 187346 - DNA, 15 bp, Homo sapiens
ccaccactcttgcca

SEQ ID NO: 187347 - DNA, 15 bp, Homo sapiens
cccaccactcttgcc

SEQ ID NO: 187348 - DNA, 15 bp, Homo sapiens
tcccaccactcttgc

SEQ ID NO: 187349 - DNA, 15 bp, Homo sapiens
ttcccaccactcttg

SEQ ID NO: 187350 - DNA, 15 bp, Homo sapiens
cttcccaccactctt

SEQ ID NO: 187351 - DNA, 15 bp, Homo sapiens
ccttcccaccactct

SEQ ID NO: 187352 - DNA, 15 bp, Homo sapiens
cccttcccaccactc

SEQ ID NO: 187353 - DNA, 15 bp, Homo sapiens
ccccttcccaccact

SEQ ID NO: 187354 - DNA, 15 bp, Homo sapiens
gccccttcccaccac

SEQ ID NO: 187355 - DNA, 15 bp, Homo sapiens
agccccttcccacca

SEQ ID NO: 187356 - DNA, 15 bp, Homo sapiens
cagccccttcccacc

SEQ ID NO: 187357 - DNA, 15 bp, Homo sapiens
ccagccccttcccac

SEQ ID NO: 187358 - DNA, 15 bp, Homo sapiens
cccagccccttccca

SEQ ID NO: 187359 - DNA, 15 bp, Homo sapiens
tcccagccccttccc

SEQ ID NO: 187360 - DNA, 15 bp, Homo sapiens
ctcccagccccttcc

SEQ ID NO: 187361 - DNA, 15 bp, Homo sapiens
cctcccagccccttc

SEQ ID NO: 187362 - DNA, 15 bp, Homo sapiens
acctcccagcccctt

SEQ ID NO: 187363 - DNA, 15 bp, Homo sapiens
tacctcccagcccct

SEQ ID NO: 187364 - DNA, 15 bp, Homo sapiens
ctacctcccagcccc

SEQ ID NO: 187365 - DNA, 15 bp, Homo sapiens
cctacctcccagccc

SEQ ID NO: 187366 - DNA, 15 bp, Homo sapiens
tcctacctcccagcc

SEQ ID NO: 187367 - DNA, 15 bp, Homo sapiens
ctcctacctcccagc

SEQ ID NO: 187368 - DNA, 15 bp, Homo sapiens
tctcctacctcccag

SEQ ID NO: 187369 - DNA, 15 bp, Homo sapiens
gtctcctacctccca

SEQ ID NO: 187370 - DNA, 15 bp, Homo sapiens
ggtctcctacctccc

SEQ ID NO: 187371 - DNA, 15 bp, Homo sapiens
tggtctcctacctcc

SEQ ID NO: 187372 - DNA, 15 bp, Homo sapiens
atggtctcctacctc

SEQ ID NO: 187373 - DNA, 15 bp, Homo sapiens
tatggtctcctacct

SEQ ID NO: 187374 - DNA, 15 bp, Homo sapiens
gtatggtctcctacc

SEQ ID NO: 187375 - DNA, 15 bp, Homo sapiens
cgtatggtctcctac

SEQ ID NO: 187376 - DNA, 15 bp, Homo sapiens
tcgtatggtctccta

SEQ ID NO: 187377 - DNA, 15 bp, Homo sapiens
gtcgtatggtctcct

SEQ ID NO: 187378 - DNA, 15 bp, Homo sapiens
agtcgtatggtctcc

SEQ ID NO: 187379 - DNA, 15 bp, Homo sapiens
cagtcgtatggtctc

SEQ ID NO: 187380 - DNA, 15 bp, Homo sapiens
acagtcgtatggtct

SEQ ID NO: 187381 - DNA, 15 bp, Homo sapiens
gacagtcgtatggtc

SEQ ID NO: 187382 - DNA, 15 bp, Homo sapiens
tgacagtcgtatggt

SEQ ID NO: 187383 - DNA, 15 bp, Homo sapiens
ctgacagtcgtatgg

SEQ ID NO: 187384 - DNA, 15 bp, Homo sapiens
cctgacagtcgtatg

SEQ ID NO: 187385 - DNA, 15 bp, Homo sapiens
gcctgacagtcgtat

SEQ ID NO: 187386 - DNA, 15 bp, Homo sapiens
ggcctgacagtcgta

SEQ ID NO: 187387 - DNA, 15 bp, Homo sapiens
aggcctgacagtcgt

SEQ ID NO: 187388 - DNA, 15 bp, Homo sapiens
caggcctgacagtcg

SEQ ID NO: 187389 - DNA, 15 bp, Homo sapiens
tcaggcctgacagtc

SEQ ID NO: 187390 - DNA, 15 bp, Homo sapiens
ctcaggcctgacagt

SEQ ID NO: 187391 - DNA, 15 bp, Homo sapiens
tctcaggcctgacag

SEQ ID NO: 187392 - DNA, 15 bp, Homo sapiens
gtctcaggcctgaca

SEQ ID NO: 187393 - DNA, 15 bp, Homo sapiens
tgtctcaggcctgac

SEQ ID NO: 187394 - DNA, 15 bp, Homo sapiens
ctgtctcaggcctga

SEQ ID NO: 187395 - DNA, 15 bp, Homo sapiens
cctgtctcaggcctg

SEQ ID NO: 187396 - DNA, 15 bp, Homo sapiens
ccctgtctcaggcct

SEQ ID NO: 187397 - DNA, 15 bp, Homo sapiens
gccctgtctcaggcc

SEQ ID NO: 187398 - DNA, 15 bp, Homo sapiens
tgccctgtctcaggc

SEQ ID NO: 187399 - DNA, 15 bp, Homo sapiens
ctgccctgtctcagg

SEQ ID NO: 187400 - DNA, 15 bp, Homo sapiens
cctgccctgtctcag

SEQ ID NO: 187401 - DNA, 15 bp, Homo sapiens
ccctgccctgtctca

SEQ ID NO: 187402 - DNA, 15 bp, Homo sapiens
cccctgccctgtctc

SEQ ID NO: 187403 - DNA, 15 bp, Homo sapiens
acccctgccctgtct

SEQ ID NO: 187404 - DNA, 15 bp, Homo sapiens
aacccctgccctgtc

SEQ ID NO: 187405 - DNA, 15 bp, Homo sapiens
caacccctgccctgt

SEQ ID NO: 187406 - DNA, 15 bp, Homo sapiens
ccaacccctgccctg

SEQ ID NO: 187407 - DNA, 15 bp, Homo sapiens
cccaacccctgccct

SEQ ID NO: 187408 - DNA, 15 bp, Homo sapiens
ccccaacccctgccc

SEQ ID NO: 187409 - DNA, 15 bp, Homo sapiens
cccccaacccctgcc

SEQ ID NO: 187410 - DNA, 15 bp, Homo sapiens
tcccccaacccctgc

SEQ ID NO: 187411 - DNA, 15 bp, Homo sapiens
ttcccccaacccctg

SEQ ID NO: 187412 - DNA, 15 bp, Homo sapiens
tttcccccaacccct

SEQ ID NO: 187413 - DNA, 15 bp, Homo sapiens
atttcccccaacccc

SEQ ID NO: 187414 - DNA, 15 bp, Homo sapiens
catttcccccaaccc

SEQ ID NO: 187415 - DNA, 15 bp, Homo sapiens
acatttcccccaacc

SEQ ID NO: 187416 - DNA, 15 bp, Homo sapiens
cacatttcccccaac

SEQ ID NO: 187417 - DNA, 15 bp, Homo sapiens
ccacatttcccccaa

SEQ ID NO: 187418 - DNA, 15 bp, Homo sapiens
cccacatttccccca

SEQ ID NO: 187419 - DNA, 15 bp, Homo sapiens
ccccacatttccccc

SEQ ID NO: 187420 - DNA, 15 bp, Homo sapiens
tccccacatttcccc

SEQ ID NO: 187421 - DNA, 15 bp, Homo sapiens
ctccccacatttccc

SEQ ID NO: 187422 - DNA, 15 bp, Homo sapiens
cctccccacatttcc

SEQ ID NO: 187423 - DNA, 15 bp, Homo sapiens
tcctccccacatttc

SEQ ID NO: 187424 - DNA, 15 bp, Homo sapiens
gtcctccccacattt

SEQ ID NO: 187425 - DNA, 15 bp, Homo sapiens
agtcctccccacatt

SEQ ID NO: 187426 - DNA, 15 bp, Homo sapiens
gagtcctccccacat

SEQ ID NO: 187427 - DNA, 15 bp, Homo sapiens
ggagtcctccccaca

SEQ ID NO: 187428 - DNA, 15 bp, Homo sapiens
tggagtcctccccac

SEQ ID NO: 187429 - DNA, 15 bp, Homo sapiens
ttggagtcctcccca

SEQ ID NO: 187430 - DNA, 15 bp, Homo sapiens
cttggagtcctcccc

SEQ ID NO: 187431 - DNA, 15 bp, Homo sapiens
ccttggagtcctccc

SEQ ID NO: 187432 - DNA, 15 bp, Homo sapiens
gccttggagtcctcc

SEQ ID NO: 187433 - DNA, 15 bp, Homo sapiens
agccttggagtcctc

SEQ ID NO: 187434 - DNA, 15 bp, Homo sapiens
cagccttggagtcct

SEQ ID NO: 187435 - DNA, 15 bp, Homo sapiens
ccagccttggagtcc

SEQ ID NO: 187436 - DNA, 15 bp, Homo sapiens
tccagccttggagtc

SEQ ID NO: 187437 - DNA, 15 bp, Homo sapiens
ctccagccttggagt

SEQ ID NO: 187438 - DNA, 15 bp, Homo sapiens
tctccagccttggag

SEQ ID NO: 187439 - DNA, 15 bp, Homo sapiens
ttctccagccttgga

SEQ ID NO: 187440 - DNA, 15 bp, Homo sapiens
attctccagccttgg

SEQ ID NO: 187441 - DNA, 15 bp, Homo sapiens
tattctccagccttg

SEQ ID NO: 187442 - DNA, 15 bp, Homo sapiens
ttattctccagcctt

SEQ ID NO: 187443 - DNA, 15 bp, Homo sapiens
cttattctccagcct

SEQ ID NO: 187444 - DNA, 15 bp, Homo sapiens
ccttattctccagcc

SEQ ID NO: 187445 - DNA, 15 bp, Homo sapiens
cccttattctccagc

SEQ ID NO: 187446 - DNA, 15 bp, Homo sapiens
acccttattctccag

SEQ ID NO: 187447 - DNA, 15 bp, Homo sapiens
aacccttattctcca

SEQ ID NO: 187448 - DNA, 15 bp, Homo sapiens
aaacccttattctcc

SEQ ID NO: 187449 - DNA, 15 bp, Homo sapiens
gaaacccttattctc

SEQ ID NO: 187450 - DNA, 15 bp, Homo sapiens
cgaaacccttattct

SEQ ID NO: 187451 - DNA, 15 bp, Homo sapiens
acgaaacccttattc

SEQ ID NO: 187452 - DNA, 15 bp, Homo sapiens
cacgaaacccttatt

SEQ ID NO: 187453 - DNA, 15 bp, Homo sapiens
gcacgaaacccttat

SEQ ID NO: 187454 - DNA, 15 bp, Homo sapiens
agcacgaaaccctta

SEQ ID NO: 187455 - DNA, 15 bp, Homo sapiens
cagcacgaaaccctt

SEQ ID NO: 187456 - DNA, 15 bp, Homo sapiens
tcagcacgaaaccct

SEQ ID NO: 187457 - DNA, 15 bp, Homo sapiens
ttcagcacgaaaccc

SEQ ID NO: 187458 - DNA, 15 bp, Homo sapiens
gttcagcacgaaacc

SEQ ID NO: 187459 - DNA, 15 bp, Homo sapiens
agttcagcacgaaac

SEQ ID NO: 187460 - DNA, 15 bp, Homo sapiens
gagttcagcacgaaa

SEQ ID NO: 187461 - DNA, 15 bp, Homo sapiens
ggagttcagcacgaa

SEQ ID NO: 187462 - DNA, 15 bp, Homo sapiens
gggagttcagcacga

SEQ ID NO: 187463 - DNA, 15 bp, Homo sapiens
ggggagttcagcacg

SEQ ID NO: 187464 - DNA, 15 bp, Homo sapiens
aggggagttcagcac

SEQ ID NO: 187465 - DNA, 15 bp, Homo sapiens
gaggggagttcagca

SEQ ID NO: 187466 - DNA, 15 bp, Homo sapiens
ggaggggagttcagc

SEQ ID NO: 187467 - DNA, 15 bp, Homo sapiens
tggaggggagttcag

SEQ ID NO: 187468 - DNA, 15 bp, Homo sapiens
atggaggggagttca

SEQ ID NO: 187469 - DNA, 15 bp, Homo sapiens
catggaggggagttc

SEQ ID NO: 187470 - DNA, 15 bp, Homo sapiens
gcatggaggggagtt

SEQ ID NO: 187471 - DNA, 15 bp, Homo sapiens
agcatggaggggagt

SEQ ID NO: 187472 - DNA, 15 bp, Homo sapiens
aagcatggaggggag

SEQ ID NO: 187473 - DNA, 15 bp, Homo sapiens
caagcatggagggga

SEQ ID NO: 187474 - DNA, 15 bp, Homo sapiens
ccaagcatggagggg

SEQ ID NO: 187475 - DNA, 15 bp, Homo sapiens
tccaagcatggaggg

SEQ ID NO: 187476 - DNA, 15 bp, Homo sapiens
ttccaagcatggagg

SEQ ID NO: 187477 - DNA, 15 bp, Homo sapiens
cttccaagcatggag

SEQ ID NO: 187478 - DNA, 15 bp, Homo sapiens
ccttccaagcatgga

SEQ ID NO: 187479 - DNA, 15 bp, Homo sapiens
cccttccaagcatgg

SEQ ID NO: 187480 - DNA, 15 bp, Homo sapiens
tcccttccaagcatg

SEQ ID NO: 187481 - DNA, 15 bp, Homo sapiens
ttcccttccaagcat

SEQ ID NO: 187482 - DNA, 15 bp, Homo sapiens
cttcccttccaagca

SEQ ID NO: 187483 - DNA, 15 bp, Homo sapiens
ccttcccttccaagc

SEQ ID NO: 187484 - DNA, 15 bp, Homo sapiens
cccttcccttccaag

SEQ ID NO: 187485 - DNA, 15 bp, Homo sapiens
ccccttcccttccaa

SEQ ID NO: 187486 - DNA, 15 bp, Homo sapiens
accccttcccttcca

SEQ ID NO: 187487 - DNA, 15 bp, Homo sapiens
caccccttcccttcc

SEQ ID NO: 187488 - DNA, 15 bp, Homo sapiens
gcaccccttcccttc

SEQ ID NO: 187489 - DNA, 15 bp, Homo sapiens
tgcaccccttccctt

SEQ ID NO: 187490 - DNA, 15 bp, Homo sapiens
atgcaccccttccct

SEQ ID NO: 187491 - DNA, 15 bp, Homo sapiens
gatgcaccccttccc

SEQ ID NO: 187492 - DNA, 15 bp, Homo sapiens
agatgcaccccttcc

SEQ ID NO: 187493 - DNA, 15 bp, Homo sapiens
cagatgcaccccttc

SEQ ID NO: 187494 - DNA, 15 bp, Homo sapiens
tcagatgcacccctt

SEQ ID NO: 187495 - DNA, 15 bp, Homo sapiens
ctcagatgcacccct

SEQ ID NO: 187496 - DNA, 15 bp, Homo sapiens
gctcagatgcacccc

SEQ ID NO: 187497 - DNA, 15 bp, Homo sapiens
agctcagatgcaccc

SEQ ID NO: 187498 - DNA, 15 bp, Homo sapiens
aagctcagatgcacc

SEQ ID NO: 187499 - DNA, 15 bp, Homo sapiens
caagctcagatgcac

SEQ ID NO: 187500 - DNA, 15 bp, Homo sapiens
ccaagctcagatgca

SEQ ID NO: 187501 - DNA, 15 bp, Homo sapiens
accaagctcagatgc

SEQ ID NO: 187502 - DNA, 15 bp, Homo sapiens
aaccaagctcagatg

SEQ ID NO: 187503 - DNA, 15 bp, Homo sapiens
aaaccaagctcagat

SEQ ID NO: 187504 - DNA, 15 bp, Homo sapiens
aaaaccaagctcaga

SEQ ID NO: 187505 - DNA, 15 bp, Homo sapiens
caaaaccaagctcag

SEQ ID NO: 187506 - DNA, 15 bp, Homo sapiens
tcaaaaccaagctca

SEQ ID NO: 187507 - DNA, 15 bp, Homo sapiens
ctcaaaaccaagctc

SEQ ID NO: 187508 - DNA, 15 bp, Homo sapiens
tctcaaaaccaagct

SEQ ID NO: 187509 - DNA, 15 bp, Homo sapiens
atctcaaaaccaagc

SEQ ID NO: 187510 - DNA, 15 bp, Homo sapiens
catctcaaaaccaag

SEQ ID NO: 187511 - DNA, 15 bp, Homo sapiens
gcatctcaaaaccaa

SEQ ID NO: 187512 - DNA, 15 bp, Homo sapiens
tgcatctcaaaacca

SEQ ID NO: 187513 - DNA, 15 bp, Homo sapiens
ctgcatctcaaaacc

SEQ ID NO: 187514 - DNA, 15 bp, Homo sapiens
actgcatctcaaaac

SEQ ID NO: 187515 - DNA, 15 bp, Homo sapiens
cactgcatctcaaaa

SEQ ID NO: 187516 - DNA, 15 bp, Homo sapiens
tcactgcatctcaaa

SEQ ID NO: 187517 - DNA, 15 bp, Homo sapiens
ctcactgcatctcaa

SEQ ID NO: 187518 - DNA, 15 bp, Homo sapiens
actcactgcatctca

SEQ ID NO: 187519 - DNA, 15 bp, Homo sapiens
aactcactgcatctc

SEQ ID NO: 187520 - DNA, 15 bp, Homo sapiens
aaactcactgcatct

SEQ ID NO: 187521 - DNA, 15 bp, Homo sapiens
caaactcactgcatc

SEQ ID NO: 187522 - DNA, 15 bp, Homo sapiens
tcaaactcactgcat

SEQ ID NO: 187523 - DNA, 15 bp, Homo sapiens
ctcaaactcactgca

SEQ ID NO: 187524 - DNA, 15 bp, Homo sapiens
cctcaaactcactgc

SEQ ID NO: 187525 - DNA, 15 bp, Homo sapiens
ccctcaaactcactg

SEQ ID NO: 187526 - DNA, 15 bp, Homo sapiens
cccctcaaactcact

SEQ ID NO: 187527 - DNA, 15 bp, Homo sapiens
gcccctcaaactcac

SEQ ID NO: 187528 - DNA, 15 bp, Homo sapiens
ggcccctcaaactca

SEQ ID NO: 187529 - DNA, 15 bp, Homo sapiens
gggcccctcaaactc

SEQ ID NO: 187530 - DNA, 15 bp, Homo sapiens
ggggcccctcaaact

SEQ ID NO: 187531 - DNA, 15 bp, Homo sapiens
gggggcccctcaaac

SEQ ID NO: 187532 - DNA, 15 bp, Homo sapiens
tgggggcccctcaaa

SEQ ID NO: 187533 - DNA, 15 bp, Homo sapiens
ctgggggcccctcaa

SEQ ID NO: 187534 - DNA, 15 bp, Homo sapiens
tctgggggcccctca

SEQ ID NO: 187535 - DNA, 15 bp, Homo sapiens
ctctgggggcccctc

SEQ ID NO: 187536 - DNA, 15 bp, Homo sapiens
gctctgggggcccct

SEQ ID NO: 187537 - DNA, 15 bp, Homo sapiens
tgctctgggggcccc

SEQ ID NO: 187538 - DNA, 15 bp, Homo sapiens
ctgctctgggggccc

SEQ ID NO: 187539 - DNA, 15 bp, Homo sapiens
gctgctctgggggcc

SEQ ID NO: 187540 - DNA, 15 bp, Homo sapiens
ggctgctctgggggc

SEQ ID NO: 187541 - DNA, 15 bp, Homo sapiens
gggctgctctggggg

SEQ ID NO: 187542 - DNA, 15 bp, Homo sapiens
ggggctgctctgggg

SEQ ID NO: 187543 - DNA, 15 bp, Homo sapiens
tggggctgctctggg

SEQ ID NO: 187544 - DNA, 15 bp, Homo sapiens
ctggggctgctctgg

SEQ ID NO: 187545 - DNA, 15 bp, Homo sapiens
gctggggctgctctg

SEQ ID NO: 187546 - DNA, 15 bp, Homo sapiens
ggctggggctgctct

SEQ ID NO: 187547 - DNA, 15 bp, Homo sapiens
gggctggggctgctc

SEQ ID NO: 187548 - DNA, 15 bp, Homo sapiens
ggggctggggctgct

SEQ ID NO: 187549 - DNA, 15 bp, Homo sapiens
tggggctggggctgc

SEQ ID NO: 187550 - DNA, 15 bp, Homo sapiens
gtggggctggggctg

SEQ ID NO: 187551 - DNA, 15 bp, Homo sapiens
cgtggggctggggct

SEQ ID NO: 187552 - DNA, 15 bp, Homo sapiens
tcgtggggctggggc

SEQ ID NO: 187553 - DNA, 15 bp, Homo sapiens
gtcgtggggctgggg

SEQ ID NO: 187554 - DNA, 15 bp, Homo sapiens
agtcgtggggctggg

SEQ ID NO: 187555 - DNA, 15 bp, Homo sapiens
aagtcgtggggctgg

SEQ ID NO: 187556 - DNA, 15 bp, Homo sapiens
taagtcgtggggctg

SEQ ID NO: 187557 - DNA, 15 bp, Homo sapiens
gtaagtcgtggggct

SEQ ID NO: 187558 - DNA, 15 bp, Homo sapiens
ggtaagtcgtggggc

SEQ ID NO: 187559 - DNA, 15 bp, Homo sapiens
aggtaagtcgtgggg

SEQ ID NO: 187560 - DNA, 15 bp, Homo sapiens
caggtaagtcgtggg

SEQ ID NO: 187561 - DNA, 15 bp, Homo sapiens
acaggtaagtcgtgg

SEQ ID NO: 187562 - DNA, 15 bp, Homo sapiens
cacaggtaagtcgtg

SEQ ID NO: 187563 - DNA, 15 bp, Homo sapiens
ccacaggtaagtcgt

SEQ ID NO: 187564 - DNA, 15 bp, Homo sapiens
accacaggtaagtcg

SEQ ID NO: 187565 - DNA, 15 bp, Homo sapiens
caccacaggtaagtc

SEQ ID NO: 187566 - DNA, 15 bp, Homo sapiens
ccaccacaggtaagt

SEQ ID NO: 187567 - DNA, 15 bp, Homo sapiens
cccaccacaggtaag

SEQ ID NO: 187568 - DNA, 15 bp, Homo sapiens
ccccaccacaggtaa

SEQ ID NO: 187569 - DNA, 15 bp, Homo sapiens
gccccaccacaggta

SEQ ID NO: 187570 - DNA, 15 bp, Homo sapiens
cgccccaccacaggt

SEQ ID NO: 187571 - DNA, 15 bp, Homo sapiens
acgccccaccacagg

SEQ ID NO: 187572 - DNA, 15 bp, Homo sapiens
gacgccccaccacag

SEQ ID NO: 187573 - DNA, 15 bp, Homo sapiens
tgacgccccaccaca

SEQ ID NO: 187574 - DNA, 15 bp, Homo sapiens
ctgacgccccaccac

SEQ ID NO: 187575 - DNA, 15 bp, Homo sapiens
cctgacgccccacca

SEQ ID NO: 187576 - DNA, 15 bp, Homo sapiens
ccctgacgccccacc

SEQ ID NO: 187577 - DNA, 15 bp, Homo sapiens
accctgacgccccac

SEQ ID NO: 187578 - DNA, 15 bp, Homo sapiens
caccctgacgcccca

SEQ ID NO: 187579 - DNA, 15 bp, Homo sapiens
ccaccctgacgcccc

SEQ ID NO: 187580 - DNA, 15 bp, Homo sapiens
accaccctgacgccc

SEQ ID NO: 187581 - DNA, 15 bp, Homo sapiens
aaccaccctgacgcc

SEQ ID NO: 187582 - DNA, 15 bp, Homo sapiens
gaaccaccctgacgc

SEQ ID NO: 187583 - DNA, 15 bp, Homo sapiens
agaaccaccctgacg

SEQ ID NO: 187584 - DNA, 15 bp, Homo sapiens
aagaaccaccctgac

SEQ ID NO: 187585 - DNA, 15 bp, Homo sapiens
taagaaccaccctga

SEQ ID NO: 187586 - DNA, 15 bp, Homo sapiens
ttaagaaccaccctg

SEQ ID NO: 187587 - DNA, 15 bp, Homo sapiens
attaagaaccaccct

SEQ ID NO: 187588 - DNA, 15 bp, Homo sapiens
gattaagaaccaccc

SEQ ID NO: 187589 - DNA, 15 bp, Homo sapiens
agattaagaaccacc

SEQ ID NO: 187590 - DNA, 15 bp, Homo sapiens
gagattaagaaccac

SEQ ID NO: 187591 - DNA, 15 bp, Homo sapiens
ggagattaagaacca

SEQ ID NO: 187592 - DNA, 15 bp, Homo sapiens
cggagattaagaacc

SEQ ID NO: 187593 - DNA, 15 bp, Homo sapiens
acggagattaagaac

SEQ ID NO: 187594 - DNA, 15 bp, Homo sapiens
tacggagattaagaa

SEQ ID NO: 187595 - DNA, 15 bp, Homo sapiens
gtacggagattaaga

SEQ ID NO: 187596 - DNA, 15 bp, Homo sapiens
ggtacggagattaag

SEQ ID NO: 187597 - DNA, 15 bp, Homo sapiens
aggtacggagattaa

SEQ ID NO: 187598 - DNA, 15 bp, Homo sapiens
caggtacggagatta

SEQ ID NO: 187599 - DNA, 15 bp, Homo sapiens
acaggtacggagatt

SEQ ID NO: 187600 - DNA, 15 bp, Homo sapiens
gacaggtacggagat

SEQ ID NO: 187601 - DNA, 15 bp, Homo sapiens
agacaggtacggaga

SEQ ID NO: 187602 - DNA, 15 bp, Homo sapiens
aagacaggtacggag

SEQ ID NO: 187603 - DNA, 15 bp, Homo sapiens
gaagacaggtacgga

SEQ ID NO: 187604 - DNA, 15 bp, Homo sapiens
ggaagacaggtacgg

SEQ ID NO: 187605 - DNA, 15 bp, Homo sapiens
gggaagacaggtacg

SEQ ID NO: 187606 - DNA, 15 bp, Homo sapiens
agggaagacaggtac

SEQ ID NO: 187607 - DNA, 15 bp, Homo sapiens
gagggaagacaggta

SEQ ID NO: 187608 - DNA, 15 bp, Homo sapiens
agagggaagacaggt

SEQ ID NO: 187609 - DNA, 15 bp, Homo sapiens
cagagggaagacagg

SEQ ID NO: 187610 - DNA, 15 bp, Homo sapiens
acagagggaagacag

SEQ ID NO: 187611 - DNA, 15 bp, Homo sapiens
cacagagggaagaca

SEQ ID NO: 187612 - DNA, 15 bp, Homo sapiens
tcacagagggaagac

SEQ ID NO: 187613 - DNA, 15 bp, Homo sapiens
ttcacagagggaaga

SEQ ID NO: 187614 - DNA, 15 bp, Homo sapiens
tttcacagagggaag

SEQ ID NO: 187615 - DNA, 15 bp, Homo sapiens
atttcacagagggaa

SEQ ID NO: 187616 - DNA, 15 bp, Homo sapiens
catttcacagaggga

SEQ ID NO: 187617 - DNA, 15 bp, Homo sapiens
ccatttcacagaggg

SEQ ID NO: 187618 - DNA, 15 bp, Homo sapiens
accatttcacagagg

SEQ ID NO: 187619 - DNA, 15 bp, Homo sapiens
caccatttcacagag

SEQ ID NO: 187620 - DNA, 15 bp, Homo sapiens
ccaccatttcacaga

SEQ ID NO: 187621 - DNA, 15 bp, Homo sapiens
tccaccatttcacag

SEQ ID NO: 187622 - DNA, 15 bp, Homo sapiens
ttccaccatttcaca

SEQ ID NO: 187623 - DNA, 15 bp, Homo sapiens
cttccaccatttcac

SEQ ID NO: 187624 - DNA, 15 bp, Homo sapiens
gcttccaccatttca

SEQ ID NO: 187625 - DNA, 15 bp, Homo sapiens
tgcttccaccatttc

SEQ ID NO: 187626 - DNA, 15 bp, Homo sapiens
gtgcttccaccattt

SEQ ID NO: 187627 - DNA, 15 bp, Homo sapiens
tgtgcttccaccatt

SEQ ID NO: 187628 - DNA, 15 bp, Homo sapiens
ctgtgcttccaccat

SEQ ID NO: 187629 - DNA, 15 bp, Homo sapiens
gctgtgcttccacca

SEQ ID NO: 187630 - DNA, 15 bp, Homo sapiens
ggctgtgcttccacc

SEQ ID NO: 187631 - DNA, 15 bp, Homo sapiens
cggctgtgcttccac

SEQ ID NO: 187632 - DNA, 15 bp, Homo sapiens
gcggctgtgcttcca

SEQ ID NO: 187633 - DNA, 15 bp, Homo sapiens
ggcggctgtgcttcc

SEQ ID NO: 187634 - DNA, 15 bp, Homo sapiens
gggcggctgtgcttc

SEQ ID NO: 187635 - DNA, 15 bp, Homo sapiens
ggggcggctgtgctt

SEQ ID NO: 187636 - DNA, 15 bp, Homo sapiens
cggggcggctgtgct

SEQ ID NO: 187637 - DNA, 15 bp, Homo sapiens
ccggggcggctgtgc

SEQ ID NO: 187638 - DNA, 15 bp, Homo sapiens
cccggggcggctgtg

SEQ ID NO: 187639 - DNA, 15 bp, Homo sapiens
gcccggggcggctgt

SEQ ID NO: 187640 - DNA, 15 bp, Homo sapiens
tgcccggggcggctg

SEQ ID NO: 187641 - DNA, 15 bp, Homo sapiens
gtgcccggggcggct

SEQ ID NO: 187642 - DNA, 15 bp, Homo sapiens
ggtgcccggggcggc

SEQ ID NO: 187643 - DNA, 15 bp, Homo sapiens
aggtgcccggggcgg

SEQ ID NO: 187644 - DNA, 15 bp, Homo sapiens
caggtgcccggggcg

SEQ ID NO: 187645 - DNA, 15 bp, Homo sapiens
ccaggtgcccggggc

SEQ ID NO: 187646 - DNA, 15 bp, Homo sapiens
accaggtgcccgggg

SEQ ID NO: 187647 - DNA, 15 bp, Homo sapiens
caccaggtgcccggg

SEQ ID NO: 187648 - DNA, 15 bp, Homo sapiens
ccaccaggtgcccgg

SEQ ID NO: 187649 - DNA, 15 bp, Homo sapiens
cccaccaggtgcccg

SEQ ID NO: 187650 - DNA, 15 bp, Homo sapiens
ccccaccaggtgccc

SEQ ID NO: 187651 - DNA, 15 bp, Homo sapiens
tccccaccaggtgcc

SEQ ID NO: 187652 - DNA, 15 bp, Homo sapiens
atccccaccaggtgc

SEQ ID NO: 187653 - DNA, 15 bp, Homo sapiens
catccccaccaggtg

SEQ ID NO: 187654 - DNA, 15 bp, Homo sapiens
gcatccccaccaggt

SEQ ID NO: 187655 - DNA, 15 bp, Homo sapiens
tgcatccccaccagg

SEQ ID NO: 187656 - DNA, 15 bp, Homo sapiens
ctgcatccccaccag

SEQ ID NO: 187657 - DNA, 15 bp, Homo sapiens
actgcatccccacca

SEQ ID NO: 187658 - DNA, 15 bp, Homo sapiens
cactgcatccccacc

SEQ ID NO: 187659 - DNA, 15 bp, Homo sapiens
tcactgcatccccac

SEQ ID NO: 187660 - DNA, 15 bp, Homo sapiens
ctcactgcatcccca

SEQ ID NO: 187661 - DNA, 15 bp, Homo sapiens
actcactgcatcccc

SEQ ID NO: 187662 - DNA, 15 bp, Homo sapiens
gactcactgcatccc

SEQ ID NO: 187663 - DNA, 15 bp, Homo sapiens
agactcactgcatcc

SEQ ID NO: 187664 - DNA, 15 bp, Homo sapiens
aagactcactgcatc

SEQ ID NO: 187665 - DNA, 15 bp, Homo sapiens
caagactcactgcat

SEQ ID NO: 187666 - DNA, 15 bp, Homo sapiens
ccaagactcactgca

SEQ ID NO: 187667 - DNA, 15 bp, Homo sapiens
accaagactcactgc

SEQ ID NO: 187668 - DNA, 15 bp, Homo sapiens
caccaagactcactg

SEQ ID NO: 187669 - DNA, 15 bp, Homo sapiens
ccaccaagactcact

SEQ ID NO: 187670 - DNA, 15 bp, Homo sapiens
gccaccaagactcac

SEQ ID NO: 187671 - DNA, 15 bp, Homo sapiens
ggccaccaagactca

SEQ ID NO: 187672 - DNA, 15 bp, Homo sapiens
tggccaccaagactc

SEQ ID NO: 187673 - DNA, 15 bp, Homo sapiens
gtggccaccaagact

SEQ ID NO: 187674 - DNA, 15 bp, Homo sapiens
tgtggccaccaagac

SEQ ID NO: 187675 - DNA, 15 bp, Homo sapiens
gtgtggccaccaaga

SEQ ID NO: 187676 - DNA, 15 bp, Homo sapiens
tgtgtggccaccaag

SEQ ID NO: 187677 - DNA, 15 bp, Homo sapiens
ctgtgtggccaccaa

SEQ ID NO: 187678 - DNA, 15 bp, Homo sapiens
actgtgtggccacca

SEQ ID NO: 187679 - DNA, 15 bp, Homo sapiens
tactgtgtggccacc

SEQ ID NO: 187680 - DNA, 15 bp, Homo sapiens
ttactgtgtggccac

SEQ ID NO: 187681 - DNA, 15 bp, Homo sapiens
cttactgtgtggcca

SEQ ID NO: 187682 - DNA, 15 bp, Homo sapiens
ccttactgtgtggcc

SEQ ID NO: 187683 - DNA, 15 bp, Homo sapiens
gccttactgtgtggc

SEQ ID NO: 187684 - DNA, 15 bp, Homo sapiens
cgccttactgtgtgg

SEQ ID NO: 187685 - DNA, 15 bp, Homo sapiens
tcgccttactgtgtg

SEQ ID NO: 187686 - DNA, 15 bp, Homo sapiens
ttcgccttactgtgt

SEQ ID NO: 187687 - DNA, 15 bp, Homo sapiens
cttcgccttactgtg

SEQ ID NO: 187688 - DNA, 15 bp, Homo sapiens
tcttcgccttactgt

SEQ ID NO: 187689 - DNA, 15 bp, Homo sapiens
ctcttcgccttactg

SEQ ID NO: 187690 - DNA, 15 bp, Homo sapiens
tctcttcgccttact

SEQ ID NO: 187691 - DNA, 15 bp, Homo sapiens
ctctcttcgccttac

SEQ ID NO: 187692 - DNA, 15 bp, Homo sapiens
cctctcttcgcctta

SEQ ID NO: 187693 - DNA, 15 bp, Homo sapiens
tcctctcttcgcctt

SEQ ID NO: 187694 - DNA, 15 bp, Homo sapiens
gtcctctcttcgcct

SEQ ID NO: 187695 - DNA, 15 bp, Homo sapiens
agtcctctcttcgcc

SEQ ID NO: 187696 - DNA, 15 bp, Homo sapiens
gagtcctctcttcgc

SEQ ID NO: 187697 - DNA, 15 bp, Homo sapiens
tgagtcctctcttcg

SEQ ID NO: 187698 - DNA, 15 bp, Homo sapiens
ctgagtcctctcttc

SEQ ID NO: 187699 - DNA, 15 bp, Homo sapiens
tctgagtcctctctt

SEQ ID NO: 187700 - DNA, 15 bp, Homo sapiens
ttctgagtcctctct

SEQ ID NO: 187701 - DNA, 15 bp, Homo sapiens
gttctgagtcctctc

SEQ ID NO: 187702 - DNA, 15 bp, Homo sapiens
ggttctgagtcctct

SEQ ID NO: 187703 - DNA, 15 bp, Homo sapiens
gggttctgagtcctc

SEQ ID NO: 187704 - DNA, 15 bp, Homo sapiens
agggttctgagtcct

SEQ ID NO: 187705 - DNA, 15 bp, Homo sapiens
gagggttctgagtcc

SEQ ID NO: 187706 - DNA, 15 bp, Homo sapiens
ggagggttctgagtc

SEQ ID NO: 187707 - DNA, 15 bp, Homo sapiens
gggagggttctgagt

SEQ ID NO: 187708 - DNA, 15 bp, Homo sapiens
tgggagggttctgag

SEQ ID NO: 187709 - DNA, 15 bp, Homo sapiens
gtgggagggttctga

SEQ ID NO: 187710 - DNA, 15 bp, Homo sapiens
ggtgggagggttctg

SEQ ID NO: 187711 - DNA, 15 bp, Homo sapiens
gggtgggagggttct

SEQ ID NO: 187712 - DNA, 15 bp, Homo sapiens
ggggtgggagggttc

SEQ ID NO: 187713 - DNA, 15 bp, Homo sapiens
tggggtgggagggtt

SEQ ID NO: 187714 - DNA, 15 bp, Homo sapiens
gtggggtgggagggt

SEQ ID NO: 187715 - DNA, 15 bp, Homo sapiens
agtggggtgggaggg

SEQ ID NO: 187716 - DNA, 15 bp, Homo sapiens
gagtggggtgggagg

SEQ ID NO: 187717 - DNA, 15 bp, Homo sapiens
agagtggggtgggag

SEQ ID NO: 187718 - DNA, 15 bp, Homo sapiens
gagagtggggtggga

SEQ ID NO: 187719 - DNA, 15 bp, Homo sapiens
tgagagtggggtggg

SEQ ID NO: 187720 - DNA, 15 bp, Homo sapiens
gtgagagtggggtgg

SEQ ID NO: 187721 - DNA, 15 bp, Homo sapiens
ggtgagagtggggtg

SEQ ID NO: 187722 - DNA, 15 bp, Homo sapiens
gggtgagagtggggt

SEQ ID NO: 187723 - DNA, 15 bp, Homo sapiens
ggggtgagagtgggg

SEQ ID NO: 187724 - DNA, 15 bp, Homo sapiens
gggggtgagagtggg

SEQ ID NO: 187725 - DNA, 15 bp, Homo sapiens
cgggggtgagagtgg

SEQ ID NO: 187726 - DNA, 15 bp, Homo sapiens
ggatgtggcaatggg

SEQ ID NO: 187727 - DNA, 15 bp, Homo sapiens
tggatgtggcaatgg

SEQ ID NO: 187728 - DNA, 15 bp, Homo sapiens
gtggatgtggcaatg

SEQ ID NO: 187729 - DNA, 15 bp, Homo sapiens
agtggatgtggcaat

SEQ ID NO: 187730 - DNA, 15 bp, Homo sapiens
cagtggatgtggcaa

SEQ ID NO: 187731 - DNA, 15 bp, Homo sapiens
ccagtggatgtggca

SEQ ID NO: 187732 - DNA, 15 bp, Homo sapiens
gccagtggatgtggc

SEQ ID NO: 187733 - DNA, 15 bp, Homo sapiens
ggccagtggatgtgg

SEQ ID NO: 187734 - DNA, 15 bp, Homo sapiens
aggccagtggatgtg

SEQ ID NO: 187735 - DNA, 15 bp, Homo sapiens
gaggccagtggatgt

SEQ ID NO: 187736 - DNA, 15 bp, Homo sapiens
ggaggccagtggatg

SEQ ID NO: 187737 - DNA, 15 bp, Homo sapiens
aggaggccagtggat

SEQ ID NO: 187738 - DNA, 15 bp, Homo sapiens
aaggaggccagtgga

SEQ ID NO: 187739 - DNA, 15 bp, Homo sapiens
aaaggaggccagtgg

SEQ ID NO: 187740 - DNA, 15 bp, Homo sapiens
caaaggaggccagtg

SEQ ID NO: 187741 - DNA, 15 bp, Homo sapiens
gcaaaggaggccagt

SEQ ID NO: 187742 - DNA, 15 bp, Homo sapiens
agcaaaggaggccag

SEQ ID NO: 187743 - DNA, 15 bp, Homo sapiens
cagcaaaggaggcca

SEQ ID NO: 187744 - DNA, 15 bp, Homo sapiens
acagcaaaggaggcc

SEQ ID NO: 187745 - DNA, 15 bp, Homo sapiens
gacagcaaaggaggc

SEQ ID NO: 187746 - DNA, 15 bp, Homo sapiens
agacagcaaaggagg

SEQ ID NO: 187747 - DNA, 15 bp, Homo sapiens
cagacagcaaaggag

SEQ ID NO: 187748 - DNA, 15 bp, Homo sapiens
ccagacagcaaagga

SEQ ID NO: 187749 - DNA, 15 bp, Homo sapiens
cccagacagcaaagg

SEQ ID NO: 187750 - DNA, 15 bp, Homo sapiens
gcccagacagcaaag

SEQ ID NO: 187751 - DNA, 15 bp, Homo sapiens
agcccagacagcaaa

SEQ ID NO: 187752 - DNA, 15 bp, Homo sapiens
gagcccagacagcaa

SEQ ID NO: 187753 - DNA, 15 bp, Homo sapiens
ggagcccagacagca

SEQ ID NO: 187754 - DNA, 15 bp, Homo sapiens
tggagcccagacagc

SEQ ID NO: 187755 - DNA, 15 bp, Homo sapiens
ttggagcccagacag

SEQ ID NO: 187756 - DNA, 15 bp, Homo sapiens
cttggagcccagaca

SEQ ID NO: 187757 - DNA, 15 bp, Homo sapiens
gcttggagcccagac

SEQ ID NO: 187758 - DNA, 15 bp, Homo sapiens
tgcttggagcccaga

SEQ ID NO: 187759 - DNA, 15 bp, Homo sapiens
atgcttggagcccag

SEQ ID NO: 187760 - DNA, 15 bp, Homo sapiens
gatgcttggagccca

SEQ ID NO: 187761 - DNA, 15 bp, Homo sapiens
agatgcttggagccc

SEQ ID NO: 187762 - DNA, 15 bp, Homo sapiens
cagatgcttggagcc

SEQ ID NO: 187763 - DNA, 15 bp, Homo sapiens
tcagatgcttggagc

SEQ ID NO: 187764 - DNA, 15 bp, Homo sapiens
atcagatgcttggag

SEQ ID NO: 187765 - DNA, 15 bp, Homo sapiens
catcagatgcttgga

SEQ ID NO: 187766 - DNA, 15 bp, Homo sapiens
gcatcagatgcttgg

SEQ ID NO: 187767 - DNA, 15 bp, Homo sapiens
agcatcagatgcttg

SEQ ID NO: 187768 - DNA, 15 bp, Homo sapiens
cagcatcagatgctt

SEQ ID NO: 187769 - DNA, 15 bp, Homo sapiens
gcagcatcagatgct

SEQ ID NO: 187770 - DNA, 15 bp, Homo sapiens
ggcagcatcagatgc

SEQ ID NO: 187771 - DNA, 15 bp, Homo sapiens
aggcagcatcagatg

SEQ ID NO: 187772 - DNA, 15 bp, Homo sapiens
caggcagcatcagat

SEQ ID NO: 187773 - DNA, 15 bp, Homo sapiens
acaggcagcatcaga

SEQ ID NO: 187774 - DNA, 15 bp, Homo sapiens
aacaggcagcatcag

SEQ ID NO: 187775 - DNA, 15 bp, Homo sapiens
aaacaggcagcatca

SEQ ID NO: 187776 - DNA, 15 bp, Homo sapiens
gaaacaggcagcatc

SEQ ID NO: 187777 - DNA, 15 bp, Homo sapiens
ggaaacaggcagcat

SEQ ID NO: 187778 - DNA, 15 bp, Homo sapiens
gggaaacaggcagca

SEQ ID NO: 187779 - DNA, 15 bp, Homo sapiens
agggaaacaggcagc

SEQ ID NO: 187780 - DNA, 15 bp, Homo sapiens
gagggaaacaggcag

SEQ ID NO: 187781 - DNA, 15 bp, Homo sapiens
agagggaaacaggca

SEQ ID NO: 187782 - DNA, 15 bp, Homo sapiens
cagagggaaacaggc

SEQ ID NO: 187783 - DNA, 15 bp, Homo sapiens
acagagggaaacagg

SEQ ID NO: 187784 - DNA, 15 bp, Homo sapiens
aacagagggaaacag

SEQ ID NO: 187785 - DNA, 15 bp, Homo sapiens
gaacagagggaaaca

SEQ ID NO: 187786 - DNA, 15 bp, Homo sapiens
ggaacagagggaaac

SEQ ID NO: 187787 - DNA, 15 bp, Homo sapiens
aggaacagagggaaa

SEQ ID NO: 187788 - DNA, 15 bp, Homo sapiens
aaggaacagagggaa

SEQ ID NO: 187789 - DNA, 15 bp, Homo sapiens
aaaggaacagaggga

SEQ ID NO: 187790 - DNA, 15 bp, Homo sapiens
gaaaggaacagaggg

SEQ ID NO: 187791 - DNA, 15 bp, Homo sapiens
agaaaggaacagagg

SEQ ID NO: 187792 - DNA, 15 bp, Homo sapiens
cagaaaggaacagag

SEQ ID NO: 187793 - DNA, 15 bp, Homo sapiens
ccagaaaggaacaga

SEQ ID NO: 187794 - DNA, 15 bp, Homo sapiens
tccagaaaggaacag

SEQ ID NO: 187795 - DNA, 15 bp, Homo sapiens
ttccagaaaggaaca

SEQ ID NO: 187796 - DNA, 15 bp, Homo sapiens
attccagaaaggaac

SEQ ID NO: 187797 - DNA, 15 bp, Homo sapiens
gattccagaaaggaa

SEQ ID NO: 187798 - DNA, 15 bp, Homo sapiens
agattccagaaagga

SEQ ID NO: 187799 - DNA, 15 bp, Homo sapiens
aagattccagaaagg

SEQ ID NO: 187800 - DNA, 15 bp, Homo sapiens
gaagattccagaaag

SEQ ID NO: 187801 - DNA, 15 bp, Homo sapiens
ggaagattccagaaa

SEQ ID NO: 187802 - DNA, 15 bp, Homo sapiens
aggaagattccagaa

SEQ ID NO: 187803 - DNA, 15 bp, Homo sapiens
aaggaagattccaga

SEQ ID NO: 187804 - DNA, 15 bp, Homo sapiens
aaaggaagattccag

SEQ ID NO: 187805 - DNA, 15 bp, Homo sapiens
gaaaggaagattcca

SEQ ID NO: 187806 - DNA, 15 bp, Homo sapiens
agaaaggaagattcc

SEQ ID NO: 187807 - DNA, 15 bp, Homo sapiens
gagaaaggaagattc

SEQ ID NO: 187808 - DNA, 15 bp, Homo sapiens
ggagaaaggaagatt

SEQ ID NO: 187809 - DNA, 15 bp, Homo sapiens
aggagaaaggaagat

SEQ ID NO: 187810 - DNA, 15 bp, Homo sapiens
gaggagaaaggaaga

SEQ ID NO: 187811 - DNA, 15 bp, Homo sapiens
ggaggagaaaggaag

SEQ ID NO: 187812 - DNA, 15 bp, Homo sapiens
tggaggagaaaggaa

SEQ ID NO: 187813 - DNA, 15 bp, Homo sapiens
atggaggagaaagga

SEQ ID NO: 187814 - DNA, 15 bp, Homo sapiens
gatggaggagaaagg

SEQ ID NO: 187815 - DNA, 15 bp, Homo sapiens
ggatggaggagaaag

SEQ ID NO: 187816 - DNA, 15 bp, Homo sapiens
aggatggaggagaaa

SEQ ID NO: 187817 - DNA, 15 bp, Homo sapiens
gaggatggaggagaa

SEQ ID NO: 187818 - DNA, 15 bp, Homo sapiens
agaggatggaggaga

SEQ ID NO: 187819 - DNA, 15 bp, Homo sapiens
gagaggatggaggag

SEQ ID NO: 187820 - DNA, 15 bp, Homo sapiens
agagaggatggagga

SEQ ID NO: 187821 - DNA, 15 bp, Homo sapiens
cagagaggatggagg

SEQ ID NO: 187822 - DNA, 15 bp, Homo sapiens
tcagagaggatggag

SEQ ID NO: 187823 - DNA, 15 bp, Homo sapiens
atcagagaggatgga

SEQ ID NO: 187824 - DNA, 15 bp, Homo sapiens
aatcagagaggatgg

SEQ ID NO: 187825 - DNA, 15 bp, Homo sapiens
gaatcagagaggatg

SEQ ID NO: 187826 - DNA, 15 bp, Homo sapiens
agaatcagagaggat

SEQ ID NO: 187827 - DNA, 15 bp, Homo sapiens
gagaatcagagagga

SEQ ID NO: 187828 - DNA, 15 bp, Homo sapiens
ggagaatcagagagg

SEQ ID NO: 187829 - DNA, 15 bp, Homo sapiens
aggagaatcagagag

SEQ ID NO: 187830 - DNA, 15 bp, Homo sapiens
caggagaatcagaga

SEQ ID NO: 187831 - DNA, 15 bp, Homo sapiens
acaggagaatcagag

SEQ ID NO: 187832 - DNA, 15 bp, Homo sapiens
cacaggagaatcaga

SEQ ID NO: 187833 - DNA, 15 bp, Homo sapiens
tcacaggagaatcag

SEQ ID NO: 187834 - DNA, 15 bp, Homo sapiens
atcacaggagaatca

SEQ ID NO: 187835 - DNA, 15 bp, Homo sapiens
gatcacaggagaatc

SEQ ID NO: 187836 - DNA, 15 bp, Homo sapiens
agatcacaggagaat

SEQ ID NO: 187837 - DNA, 15 bp, Homo sapiens
aagatcacaggagaa

SEQ ID NO: 187838 - DNA, 15 bp, Homo sapiens
aaagatcacaggaga

SEQ ID NO: 187839 - DNA, 15 bp, Homo sapiens
caaagatcacaggag

SEQ ID NO: 187840 - DNA, 15 bp, Homo sapiens
gcaaagatcacagga

SEQ ID NO: 187841 - DNA, 15 bp, Homo sapiens
ggcaaagatcacagg

SEQ ID NO: 187842 - DNA, 15 bp, Homo sapiens
aggcaaagatcacag

SEQ ID NO: 187843 - DNA, 15 bp, Homo sapiens
aaggcaaagatcaca

SEQ ID NO: 187844 - DNA, 15 bp, Homo sapiens
aaaggcaaagatcac

SEQ ID NO: 187845 - DNA, 15 bp, Homo sapiens
gaaaggcaaagatca

SEQ ID NO: 187846 - DNA, 15 bp, Homo sapiens
ggaaaggcaaagatc

SEQ ID NO: 187847 - DNA, 15 bp, Homo sapiens
aggaaaggcaaagat

SEQ ID NO: 187848 - DNA, 15 bp, Homo sapiens
taggaaaggcaaaga

SEQ ID NO: 187849 - DNA, 15 bp, Homo sapiens
gtaggaaaggcaaag

SEQ ID NO: 187850 - DNA, 15 bp, Homo sapiens
ggtaggaaaggcaaa

SEQ ID NO: 187851 - DNA, 15 bp, Homo sapiens
gggtaggaaaggcaa

SEQ ID NO: 187852 - DNA, 15 bp, Homo sapiens
ggggtaggaaaggca

SEQ ID NO: 187853 - DNA, 15 bp, Homo sapiens
tggggtaggaaaggc

SEQ ID NO: 187854 - DNA, 15 bp, Homo sapiens
gtggggtaggaaagg

SEQ ID NO: 187855 - DNA, 15 bp, Homo sapiens
agtggggtaggaaag

SEQ ID NO: 187856 - DNA, 15 bp, Homo sapiens
cagtggggtaggaaa

SEQ ID NO: 187857 - DNA, 15 bp, Homo sapiens
acagtggggtaggaa

SEQ ID NO: 187858 - DNA, 15 bp, Homo sapiens
aacagtggggtagga

SEQ ID NO: 187859 - DNA, 15 bp, Homo sapiens
taacagtggggtagg

SEQ ID NO: 187860 - DNA, 15 bp, Homo sapiens
ttaacagtggggtag

SEQ ID NO: 187861 - DNA, 15 bp, Homo sapiens
gttaacagtggggta

SEQ ID NO: 187862 - DNA, 15 bp, Homo sapiens
tgttaacagtggggt

SEQ ID NO: 187863 - DNA, 15 bp, Homo sapiens
ctgttaacagtgggg

SEQ ID NO: 187864 - DNA, 15 bp, Homo sapiens
actgttaacagtggg

SEQ ID NO: 187865 - DNA, 15 bp, Homo sapiens
cactgttaacagtgg

SEQ ID NO: 187866 - DNA, 15 bp, Homo sapiens
tcactgttaacagtg

SEQ ID NO: 187867 - DNA, 15 bp, Homo sapiens
ttcactgttaacagt

SEQ ID NO: 187868 - DNA, 15 bp, Homo sapiens
tttcactgttaacag

SEQ ID NO: 187869 - DNA, 15 bp, Homo sapiens
atttcactgttaaca

SEQ ID NO: 187870 - DNA, 15 bp, Homo sapiens
aatttcactgttaac

SEQ ID NO: 187871 - DNA, 15 bp, Homo sapiens
aaatttcactgttaa

SEQ ID NO: 187872 - DNA, 15 bp, Homo sapiens
gaaatttcactgtta

SEQ ID NO: 187873 - DNA, 15 bp, Homo sapiens
ggaaatttcactgtt

SEQ ID NO: 187874 - DNA, 15 bp, Homo sapiens
tggaaatttcactgt

SEQ ID NO: 187875 - DNA, 15 bp, Homo sapiens
ctggaaatttcactg

SEQ ID NO: 187876 - DNA, 15 bp, Homo sapiens
cctggaaatttcact

SEQ ID NO: 187877 - DNA, 15 bp, Homo sapiens
ccctggaaatttcac

SEQ ID NO: 187878 - DNA, 15 bp, Homo sapiens
gccctggaaatttca

SEQ ID NO: 187879 - DNA, 15 bp, Homo sapiens
agccctggaaatttc

SEQ ID NO: 187880 - DNA, 15 bp, Homo sapiens
cagccctggaaattt

SEQ ID NO: 187881 - DNA, 15 bp, Homo sapiens
acagccctggaaatt

SEQ ID NO: 187882 - DNA, 15 bp, Homo sapiens
gacagccctggaaat

SEQ ID NO: 187883 - DNA, 15 bp, Homo sapiens
ggacagccctggaaa

SEQ ID NO: 187884 - DNA, 15 bp, Homo sapiens
gggacagccctggaa

SEQ ID NO: 187885 - DNA, 15 bp, Homo sapiens
tgggacagccctgga

SEQ ID NO: 187886 - DNA, 15 bp, Homo sapiens
ctgggacagccctgg

SEQ ID NO: 187887 - DNA, 15 bp, Homo sapiens
actgggacagccctg

SEQ ID NO: 187888 - DNA, 15 bp, Homo sapiens
aactgggacagccct

SEQ ID NO: 187889 - DNA, 15 bp, Homo sapiens
gaactgggacagccc

SEQ ID NO: 187890 - DNA, 15 bp, Homo sapiens
ggaactgggacagcc

SEQ ID NO: 187891 - DNA, 15 bp, Homo sapiens
tggaactgggacagc

SEQ ID NO: 187892 - DNA, 15 bp, Homo sapiens
ttggaactgggacag

SEQ ID NO: 187893 - DNA, 15 bp, Homo sapiens
cttggaactgggaca

SEQ ID NO: 187894 - DNA, 15 bp, Homo sapiens
acttggaactgggac

SEQ ID NO: 187895 - DNA, 15 bp, Homo sapiens
cacttggaactggga

SEQ ID NO: 187896 - DNA, 15 bp, Homo sapiens
tcacttggaactggg

SEQ ID NO: 187897 - DNA, 15 bp, Homo sapiens
ctcacttggaactgg

SEQ ID NO: 187898 - DNA, 15 bp, Homo sapiens
actcacttggaactg

SEQ ID NO: 187899 - DNA, 15 bp, Homo sapiens
tactcacttggaact

SEQ ID NO: 187900 - DNA, 15 bp, Homo sapiens
ctactcacttggaac

SEQ ID NO: 187901 - DNA, 15 bp, Homo sapiens
tctactcacttggaa

SEQ ID NO: 187902 - DNA, 15 bp, Homo sapiens
atctactcacttgga

SEQ ID NO: 187903 - DNA, 15 bp, Homo sapiens
catctactcacttgg

SEQ ID NO: 187904 - DNA, 15 bp, Homo sapiens
ccatctactcacttg

SEQ ID NO: 187905 - DNA, 15 bp, Homo sapiens
cccatctactcactt

SEQ ID NO: 187906 - DNA, 15 bp, Homo sapiens
ccccatctactcact

SEQ ID NO: 187907 - DNA, 15 bp, Homo sapiens
cccccatctactcac

SEQ ID NO: 187908 - DNA, 15 bp, Homo sapiens
acccccatctactca

SEQ ID NO: 187909 - DNA, 15 bp, Homo sapiens
cacccccatctactc

SEQ ID NO: 187910 - DNA, 15 bp, Homo sapiens
gcacccccatctact

SEQ ID NO: 187911 - DNA, 15 bp, Homo sapiens
ggcacccccatctac

SEQ ID NO: 187912 - DNA, 15 bp, Homo sapiens
cggcacccccatcta

SEQ ID NO: 187913 - DNA, 15 bp, Homo sapiens
ccggcacccccatct

SEQ ID NO: 187914 - DNA, 15 bp, Homo sapiens
cccggcacccccatc

SEQ ID NO: 187915 - DNA, 15 bp, Homo sapiens
ccccggcacccccat

SEQ ID NO: 187916 - DNA, 15 bp, Homo sapiens
tccccggcaccccca

SEQ ID NO: 187917 - DNA, 15 bp, Homo sapiens
ttccccggcaccccc

SEQ ID NO: 187918 - DNA, 15 bp, Homo sapiens
attccccggcacccc

SEQ ID NO: 187919 - DNA, 15 bp, Homo sapiens
gattccccggcaccc

SEQ ID NO: 187920 - DNA, 15 bp, Homo sapiens
agattccccggcacc

SEQ ID NO: 187921 - DNA, 15 bp, Homo sapiens
cagattccccggcac

SEQ ID NO: 187922 - DNA, 15 bp, Homo sapiens
acagattccccggca

SEQ ID NO: 187923 - DNA, 15 bp, Homo sapiens
cacagattccccggc

SEQ ID NO: 187924 - DNA, 15 bp, Homo sapiens
acacagattccccgg

SEQ ID NO: 187925 - DNA, 15 bp, Homo sapiens
aacacagattccccg

SEQ ID NO: 187926 - DNA, 15 bp, Homo sapiens
aaacacagattcccc

SEQ ID NO: 187927 - DNA, 15 bp, Homo sapiens
aaaacacagattccc

SEQ ID NO: 187928 - DNA, 15 bp, Homo sapiens
gaaaacacagattcc

SEQ ID NO: 187929 - DNA, 15 bp, Homo sapiens
ggaaaacacagattc

SEQ ID NO: 187930 - DNA, 15 bp, Homo sapiens
tggaaaacacagatt

SEQ ID NO: 187931 - DNA, 15 bp, Homo sapiens
atggaaaacacagat

SEQ ID NO: 187932 - DNA, 15 bp, Homo sapiens
gatggaaaacacaga

SEQ ID NO: 187933 - DNA, 15 bp, Homo sapiens
tgatggaaaacacag

SEQ ID NO: 187934 - DNA, 15 bp, Homo sapiens
ctgatggaaaacaca

SEQ ID NO: 187935 - DNA, 15 bp, Homo sapiens
gctgatggaaaacac

SEQ ID NO: 187936 - DNA, 15 bp, Homo sapiens
agctgatggaaaaca

SEQ ID NO: 187937 - DNA, 15 bp, Homo sapiens
gagctgatggaaaac

SEQ ID NO: 187938 - DNA, 15 bp, Homo sapiens
agagctgatggaaaa

SEQ ID NO: 187939 - DNA, 15 bp, Homo sapiens
aagagctgatggaaa

SEQ ID NO: 187940 - DNA, 15 bp, Homo sapiens
gaagagctgatggaa

SEQ ID NO: 187941 - DNA, 15 bp, Homo sapiens
tgaagagctgatgga

SEQ ID NO: 187942 - DNA, 15 bp, Homo sapiens
ctgaagagctgatgg

SEQ ID NO: 187943 - DNA, 15 bp, Homo sapiens
cctgaagagctgatg

SEQ ID NO: 187944 - DNA, 15 bp, Homo sapiens
acctgaagagctgat

SEQ ID NO: 187945 - DNA, 15 bp, Homo sapiens
cacctgaagagctga

SEQ ID NO: 187946 - DNA, 15 bp, Homo sapiens
tcacctgaagagctg

SEQ ID NO: 187947 - DNA, 15 bp, Homo sapiens
atcacctgaagagct

SEQ ID NO: 187948 - DNA, 15 bp, Homo sapiens
aatcacctgaagagc

SEQ ID NO: 187949 - DNA, 15 bp, Homo sapiens
aaatcacctgaagag

SEQ ID NO: 187950 - DNA, 15 bp, Homo sapiens
caaatcacctgaaga

SEQ ID NO: 187951 - DNA, 15 bp, Homo sapiens
acaaatcacctgaag

SEQ ID NO: 187952 - DNA, 15 bp, Homo sapiens
gacaaatcacctgaa

SEQ ID NO: 187953 - DNA, 15 bp, Homo sapiens
tgacaaatcacctga

SEQ ID NO: 187954 - DNA, 15 bp, Homo sapiens
atgacaaatcacctg

SEQ ID NO: 187955 - DNA, 15 bp, Homo sapiens
tatgacaaatcacct

SEQ ID NO: 187956 - DNA, 15 bp, Homo sapiens
ctatgacaaatcacc

SEQ ID NO: 187957 - DNA, 15 bp, Homo sapiens
actatgacaaatcac

SEQ ID NO: 187958 - DNA, 15 bp, Homo sapiens
cactatgacaaatca

SEQ ID NO: 187959 - DNA, 15 bp, Homo sapiens
ccactatgacaaatc

SEQ ID NO: 187960 - DNA, 15 bp, Homo sapiens
tccactatgacaaat

SEQ ID NO: 187961 - DNA, 15 bp, Homo sapiens
gtccactatgacaaa

SEQ ID NO: 187962 - DNA, 15 bp, Homo sapiens
tgtccactatgacaa

SEQ ID NO: 187963 - DNA, 15 bp, Homo sapiens
ttgtccactatgaca

SEQ ID NO: 187964 - DNA, 15 bp, Homo sapiens
cttgtccactatgac

SEQ ID NO: 187965 - DNA, 15 bp, Homo sapiens
gcttgtccactatga

SEQ ID NO: 187966 - DNA, 15 bp, Homo sapiens
agcttgtccactatg

SEQ ID NO: 187967 - DNA, 15 bp, Homo sapiens
aagcttgtccactat

SEQ ID NO: 187968 - DNA, 15 bp, Homo sapiens
caagcttgtccacta

SEQ ID NO: 187969 - DNA, 15 bp, Homo sapiens
tcaagcttgtccact

SEQ ID NO: 187970 - DNA, 15 bp, Homo sapiens
ctcaagcttgtccac

SEQ ID NO: 187971 - DNA, 15 bp, Homo sapiens
tctcaagcttgtcca

SEQ ID NO: 187972 - DNA, 15 bp, Homo sapiens
ttctcaagcttgtcc

SEQ ID NO: 187973 - DNA, 15 bp, Homo sapiens
tttctcaagcttgtc

SEQ ID NO: 187974 - DNA, 15 bp, Homo sapiens
gtttctcaagcttgt

SEQ ID NO: 187975 - DNA, 15 bp, Homo sapiens
agtttctcaagcttg

SEQ ID NO: 187976 - DNA, 15 bp, Homo sapiens
cagtttctcaagctt

SEQ ID NO: 187977 - DNA, 15 bp, Homo sapiens
gcagtttctcaagct

SEQ ID NO: 187978 - DNA, 15 bp, Homo sapiens
agcagtttctcaagc

SEQ ID NO: 187979 - DNA, 15 bp, Homo sapiens
aagcagtttctcaag

SEQ ID NO: 187980 - DNA, 15 bp, Homo sapiens
aaagcagtttctcaa

SEQ ID NO: 187981 - DNA, 15 bp, Homo sapiens
caaagcagtttctca

SEQ ID NO: 187982 - DNA, 15 bp, Homo sapiens
ccaaagcagtttctc

SEQ ID NO: 187983 - DNA, 15 bp, Homo sapiens
gccaaagcagtttct

SEQ ID NO: 187984 - DNA, 15 bp, Homo sapiens
agccaaagcagtttc

SEQ ID NO: 187985 - DNA, 15 bp, Homo sapiens
cagccaaagcagttt

SEQ ID NO: 187986 - DNA, 15 bp, Homo sapiens
gcagccaaagcagtt

SEQ ID NO: 187987 - DNA, 15 bp, Homo sapiens
cgcagccaaagcagt

SEQ ID NO: 187988 - DNA, 15 bp, Homo sapiens
tcgcagccaaagcag

SEQ ID NO: 187989 - DNA, 15 bp, Homo sapiens
ctcgcagccaaagca

SEQ ID NO: 187990 - DNA, 15 bp, Homo sapiens
actcgcagccaaagc

SEQ ID NO: 187991 - DNA, 15 bp, Homo sapiens
cactcgcagccaaag

SEQ ID NO: 187992 - DNA, 15 bp, Homo sapiens
acactcgcagccaaa

SEQ ID NO: 187993 - DNA, 15 bp, Homo sapiens
aacactcgcagccaa

SEQ ID NO: 187994 - DNA, 15 bp, Homo sapiens
aaacactcgcagcca

SEQ ID NO: 187995 - DNA, 15 bp, Homo sapiens
gaaacactcgcagcc

SEQ ID NO: 187996 - DNA, 15 bp, Homo sapiens
agaaacactcgcagc

SEQ ID NO: 187997 - DNA, 15 bp, Homo sapiens
aagaaacactcgcag

SEQ ID NO: 187998 - DNA, 15 bp, Homo sapiens
aaagaaacactcgca

SEQ ID NO: 187999 - DNA, 15 bp, Homo sapiens
aaaagaaacactcgc

SEQ ID NO: 188000 - DNA, 15 bp, Homo sapiens
aaaaagaaacactcg

SEQ ID NO: 188001 - DNA, 15 bp, Homo sapiens
aaaaaagaaacactc

SEQ ID NO: 188002 - DNA, 15 bp, Homo sapiens
aaaaaaagaaacact

SEQ ID NO: 188003 - DNA, 15 bp, Homo sapiens
aaaaaaaagaaacac

SEQ ID NO: 188004 - DNA, 15 bp, Homo sapiens
aaaaaaaaagaaaca

SEQ ID NO: 188005 - DNA, 15 bp, Homo sapiens
caaaaaaaaagaaac

SEQ ID NO: 188006 - DNA, 15 bp, Homo sapiens
tcaaaaaaaaagaaa

SEQ ID NO: 188007 - DNA, 15 bp, Homo sapiens
ctcaaaaaaaaagaa

SEQ ID NO: 188008 - DNA, 15 bp, Homo sapiens
tctcaaaaaaaaaga

SEQ ID NO: 188009 - DNA, 15 bp, Homo sapiens
ttctcaaaaaaaaag

SEQ ID NO: 188010 - DNA, 15 bp, Homo sapiens
cttctcaaaaaaaaa

SEQ ID NO: 188011 - DNA, 15 bp, Homo sapiens
ccttctcaaaaaaaa

SEQ ID NO: 188012 - DNA, 15 bp, Homo sapiens
cccttctcaaaaaaa

SEQ ID NO: 188013 - DNA, 15 bp, Homo sapiens
ccccttctcaaaaaa

SEQ ID NO: 188014 - DNA, 15 bp, Homo sapiens
cccccttctcaaaaa

SEQ ID NO: 188015 - DNA, 15 bp, Homo sapiens
acccccttctcaaaa

SEQ ID NO: 188016 - DNA, 15 bp, Homo sapiens
gacccccttctcaaa

SEQ ID NO: 188017 - DNA, 15 bp, Homo sapiens
agacccccttctcaa

SEQ ID NO: 188018 - DNA, 15 bp, Homo sapiens
gagacccccttctca

SEQ ID NO: 188019 - DNA, 15 bp, Homo sapiens
tgagacccccttctc

SEQ ID NO: 188020 - DNA, 15 bp, Homo sapiens
gtgagacccccttct

SEQ ID NO: 188021 - DNA, 15 bp, Homo sapiens
agtgagacccccttc

SEQ ID NO: 188022 - DNA, 15 bp, Homo sapiens
gagtgagaccccctt

SEQ ID NO: 188023 - DNA, 15 bp, Homo sapiens
agagtgagaccccct

SEQ ID NO: 188024 - DNA, 15 bp, Homo sapiens
cagagtgagaccccc

SEQ ID NO: 188025 - DNA, 15 bp, Homo sapiens
acagagtgagacccc

SEQ ID NO: 188026 - DNA, 15 bp, Homo sapiens
gacagagtgagaccc

SEQ ID NO: 188027 - DNA, 15 bp, Homo sapiens
tgacagagtgagacc

SEQ ID NO: 188028 - DNA, 15 bp, Homo sapiens
gtgacagagtgagac

SEQ ID NO: 188029 - DNA, 15 bp, Homo sapiens
ggtgacagagtgaga

SEQ ID NO: 188030 - DNA, 15 bp, Homo sapiens
gggtgacagagtgag

SEQ ID NO: 188031 - DNA, 15 bp, Homo sapiens
tgggtgacagagtga

SEQ ID NO: 188032 - DNA, 15 bp, Homo sapiens
ctgggtgacagagtg

SEQ ID NO: 188033 - DNA, 15 bp, Homo sapiens
cctgggtgacagagt

SEQ ID NO: 188034 - DNA, 15 bp, Homo sapiens
gcctgggtgacagag

SEQ ID NO: 188035 - DNA, 15 bp, Homo sapiens
agcctgggtgacaga

SEQ ID NO: 188036 - DNA, 15 bp, Homo sapiens
cagcctgggtgacag

SEQ ID NO: 188037 - DNA, 15 bp, Homo sapiens
ccagcctgggtgaca

SEQ ID NO: 188038 - DNA, 15 bp, Homo sapiens
tccagcctgggtgac

SEQ ID NO: 188039 - DNA, 15 bp, Homo sapiens
ctccagcctgggtga

SEQ ID NO: 188040 - DNA, 15 bp, Homo sapiens
actccagcctgggtg

SEQ ID NO: 188041 - DNA, 15 bp, Homo sapiens
tactccagcctgggt

SEQ ID NO: 188042 - DNA, 15 bp, Homo sapiens
gtactccagcctggg

SEQ ID NO: 188043 - DNA, 15 bp, Homo sapiens
tgtactccagcctgg

SEQ ID NO: 188044 - DNA, 15 bp, Homo sapiens
ctgtactccagcctg

SEQ ID NO: 188045 - DNA, 15 bp, Homo sapiens
actgtactccagcct

SEQ ID NO: 188046 - DNA, 15 bp, Homo sapiens
cactgtactccagcc

SEQ ID NO: 188047 - DNA, 15 bp, Homo sapiens
ccactgtactccagc

SEQ ID NO: 188048 - DNA, 15 bp, Homo sapiens
gccactgtactccag

SEQ ID NO: 188049 - DNA, 15 bp, Homo sapiens
tgccactgtactcca

SEQ ID NO: 188050 - DNA, 15 bp, Homo sapiens
gtgccactgtactcc

SEQ ID NO: 188051 - DNA, 15 bp, Homo sapiens
tgtgccactgtactc

SEQ ID NO: 188052 - DNA, 15 bp, Homo sapiens
ttgtgccactgtact

SEQ ID NO: 188053 - DNA, 15 bp, Homo sapiens
attgtgccactgtac

SEQ ID NO: 188054 - DNA, 15 bp, Homo sapiens
gattgtgccactgta

SEQ ID NO: 188055 - DNA, 15 bp, Homo sapiens
tgattgtgccactgt

SEQ ID NO: 188056 - DNA, 15 bp, Homo sapiens
gtgattgtgccactg

SEQ ID NO: 188057 - DNA, 15 bp, Homo sapiens
tgtgattgtgccact

SEQ ID NO: 188058 - DNA, 15 bp, Homo sapiens
ctgtgattgtgccac

SEQ ID NO: 188059 - DNA, 15 bp, Homo sapiens
gctgtgattgtgcca

SEQ ID NO: 188060 - DNA, 15 bp, Homo sapiens
agctgtgattgtgcc

SEQ ID NO: 188061 - DNA, 15 bp, Homo sapiens
gagctgtgattgtgc

SEQ ID NO: 188062 - DNA, 15 bp, Homo sapiens
tgagctgtgattgtg

SEQ ID NO: 188063 - DNA, 15 bp, Homo sapiens
gtgagctgtgattgt

SEQ ID NO: 188064 - DNA, 15 bp, Homo sapiens
agtgagctgtgattg

SEQ ID NO: 188065 - DNA, 15 bp, Homo sapiens
cagtgagctgtgatt

SEQ ID NO: 188066 - DNA, 15 bp, Homo sapiens
gcagtgagctgtgat

SEQ ID NO: 188067 - DNA, 15 bp, Homo sapiens
tgcagtgagctgtga

SEQ ID NO: 188068 - DNA, 15 bp, Homo sapiens
ctgcagtgagctgtg

SEQ ID NO: 188069 - DNA, 15 bp, Homo sapiens
gctgcagtgagctgt

SEQ ID NO: 188070 - DNA, 15 bp, Homo sapiens
ggctgcagtgagctg

SEQ ID NO: 188071 - DNA, 15 bp, Homo sapiens
aggctgcagtgagct

SEQ ID NO: 188072 - DNA, 15 bp, Homo sapiens
aaggctgcagtgagc

SEQ ID NO: 188073 - DNA, 15 bp, Homo sapiens
caaggctgcagtgag

SEQ ID NO: 188074 - DNA, 15 bp, Homo sapiens
tcaaggctgcagtga

SEQ ID NO: 188075 - DNA, 15 bp, Homo sapiens
gtcaaggctgcagtg

SEQ ID NO: 188076 - DNA, 15 bp, Homo sapiens
ggtcaaggctgcagt

SEQ ID NO: 188077 - DNA, 15 bp, Homo sapiens
aggtcaaggctgcag

SEQ ID NO: 188078 - DNA, 15 bp, Homo sapiens
gaggtcaaggctgca

SEQ ID NO: 188079 - DNA, 15 bp, Homo sapiens
ggaggtcaaggctgc

SEQ ID NO: 188080 - DNA, 15 bp, Homo sapiens
gggaggtcaaggctg

SEQ ID NO: 188081 - DNA, 15 bp, Homo sapiens
tgggaggtcaaggct

SEQ ID NO: 188082 - DNA, 15 bp, Homo sapiens
ctgggaggtcaaggc

SEQ ID NO: 188083 - DNA, 15 bp, Homo sapiens
cctgggaggtcaagg

SEQ ID NO: 188084 - DNA, 15 bp, Homo sapiens
gcctgggaggtcaag

SEQ ID NO: 188085 - DNA, 15 bp, Homo sapiens
agcctgggaggtcaa

SEQ ID NO: 188086 - DNA, 15 bp, Homo sapiens
gagcctgggaggtca

SEQ ID NO: 188087 - DNA, 15 bp, Homo sapiens
tgagcctgggaggtc

SEQ ID NO: 188088 - DNA, 15 bp, Homo sapiens
ttgagcctgggaggt

SEQ ID NO: 188089 - DNA, 15 bp, Homo sapiens
cttgagcctgggagg

SEQ ID NO: 188090 - DNA, 15 bp, Homo sapiens
gcttgagcctgggag

SEQ ID NO: 188091 - DNA, 15 bp, Homo sapiens
cgcttgagcctggga

SEQ ID NO: 188092 - DNA, 15 bp, Homo sapiens
tcgcttgagcctggg

SEQ ID NO: 188093 - DNA, 15 bp, Homo sapiens
atcgcttgagcctgg

SEQ ID NO: 188094 - DNA, 15 bp, Homo sapiens
gatcgcttgagcctg

SEQ ID NO: 188095 - DNA, 15 bp, Homo sapiens
ggatcgcttgagcct

SEQ ID NO: 188096 - DNA, 15 bp, Homo sapiens
aggatcgcttgagcc

SEQ ID NO: 188097 - DNA, 15 bp, Homo sapiens
gaggatcgcttgagc

SEQ ID NO: 188098 - DNA, 15 bp, Homo sapiens
tgaggatcgcttgag

SEQ ID NO: 188099 - DNA, 15 bp, Homo sapiens
gtgaggatcgcttga

SEQ ID NO: 188100 - DNA, 15 bp, Homo sapiens
tgtgaggatcgcttg

SEQ ID NO: 188101 - DNA, 15 bp, Homo sapiens
gtgtgaggatcgctt

SEQ ID NO: 188102 - DNA, 15 bp, Homo sapiens
ggtgtgaggatcgct

SEQ ID NO: 188103 - DNA, 15 bp, Homo sapiens
aggtgtgaggatcgc

SEQ ID NO: 188104 - DNA, 15 bp, Homo sapiens
gaggtgtgaggatcg

SEQ ID NO: 188105 - DNA, 15 bp, Homo sapiens
tgaggtgtgaggatc

SEQ ID NO: 188106 - DNA, 15 bp, Homo sapiens
ctgaggtgtgaggat

SEQ ID NO: 188107 - DNA, 15 bp, Homo sapiens
cctgaggtgtgagga

SEQ ID NO: 188108 - DNA, 15 bp, Homo sapiens
gcctgaggtgtgagg

SEQ ID NO: 188109 - DNA, 15 bp, Homo sapiens
agcctgaggtgtgag

SEQ ID NO: 188110 - DNA, 15 bp, Homo sapiens
aagcctgaggtgtga

SEQ ID NO: 188111 - DNA, 15 bp, Homo sapiens
gaagcctgaggtgtg

SEQ ID NO: 188112 - DNA, 15 bp, Homo sapiens
agaagcctgaggtgt

SEQ ID NO: 188113 - DNA, 15 bp, Homo sapiens
cagaagcctgaggtg

SEQ ID NO: 188114 - DNA, 15 bp, Homo sapiens
tcagaagcctgaggt

SEQ ID NO: 188115 - DNA, 15 bp, Homo sapiens
ctcagaagcctgagg

SEQ ID NO: 188116 - DNA, 15 bp, Homo sapiens
actcagaagcctgag

SEQ ID NO: 188117 - DNA, 15 bp, Homo sapiens
cactcagaagcctga

SEQ ID NO: 188118 - DNA, 15 bp, Homo sapiens
ccactcagaagcctg

SEQ ID NO: 188119 - DNA, 15 bp, Homo sapiens
gccactcagaagcct

SEQ ID NO: 188120 - DNA, 15 bp, Homo sapiens
agccactcagaagcc

SEQ ID NO: 188121 - DNA, 15 bp, Homo sapiens
cagccactcagaagc

SEQ ID NO: 188122 - DNA, 15 bp, Homo sapiens
ccagccactcagaag

SEQ ID NO: 188123 - DNA, 15 bp, Homo sapiens
cccagccactcagaa

SEQ ID NO: 188124 - DNA, 15 bp, Homo sapiens
tcccagccactcaga

SEQ ID NO: 188125 - DNA, 15 bp, Homo sapiens
gtcccagccactcag

SEQ ID NO: 188126 - DNA, 15 bp, Homo sapiens
ggtcccagccactca

SEQ ID NO: 188127 - DNA, 15 bp, Homo sapiens
tggtcccagccactc

SEQ ID NO: 188128 - DNA, 15 bp, Homo sapiens
gtggtcccagccact

SEQ ID NO: 188129 - DNA, 15 bp, Homo sapiens
tgtggtcccagccac

SEQ ID NO: 188130 - DNA, 15 bp, Homo sapiens
ctgtggtcccagcca

SEQ ID NO: 188131 - DNA, 15 bp, Homo sapiens
cctgtggtcccagcc

SEQ ID NO: 188132 - DNA, 15 bp, Homo sapiens
gcctgtggtcccagc

SEQ ID NO: 188133 - DNA, 15 bp, Homo sapiens
tgcctgtggtcccag

SEQ ID NO: 188134 - DNA, 15 bp, Homo sapiens
ctgcctgtggtccca

SEQ ID NO: 188135 - DNA, 15 bp, Homo sapiens
cctgcctgtggtccc

SEQ ID NO: 188136 - DNA, 15 bp, Homo sapiens
gcctgcctgtggtcc

SEQ ID NO: 188137 - DNA, 15 bp, Homo sapiens
cgcctgcctgtggtc

SEQ ID NO: 188138 - DNA, 15 bp, Homo sapiens
acgcctgcctgtggt

SEQ ID NO: 188139 - DNA, 15 bp, Homo sapiens
gacgcctgcctgtgg

SEQ ID NO: 188140 - DNA, 15 bp, Homo sapiens
tgacgcctgcctgtg

SEQ ID NO: 188141 - DNA, 15 bp, Homo sapiens
atgacgcctgcctgt

SEQ ID NO: 188142 - DNA, 15 bp, Homo sapiens
gatgacgcctgcctg

SEQ ID NO: 188143 - DNA, 15 bp, Homo sapiens
tgatgacgcctgcct

SEQ ID NO: 188144 - DNA, 15 bp, Homo sapiens
gtgatgacgcctgcc

SEQ ID NO: 188145 - DNA, 15 bp, Homo sapiens
tgtgatgacgcctgc

SEQ ID NO: 188146 - DNA, 15 bp, Homo sapiens
atgtgatgacgcctg

SEQ ID NO: 188147 - DNA, 15 bp, Homo sapiens
catgtgatgacgcct

SEQ ID NO: 188148 - DNA, 15 bp, Homo sapiens
ccatgtgatgacgcc

SEQ ID NO: 188149 - DNA, 15 bp, Homo sapiens
cccatgtgatgacgc

SEQ ID NO: 188150 - DNA, 15 bp, Homo sapiens
ccccatgtgatgacg

SEQ ID NO: 188151 - DNA, 15 bp, Homo sapiens
accccatgtgatgac

SEQ ID NO: 188152 - DNA, 15 bp, Homo sapiens
taccccatgtgatga

SEQ ID NO: 188153 - DNA, 15 bp, Homo sapiens
ttaccccatgtgatg

SEQ ID NO: 188154 - DNA, 15 bp, Homo sapiens
attaccccatgtgat

SEQ ID NO: 188155 - DNA, 15 bp, Homo sapiens
aattaccccatgtga

SEQ ID NO: 188156 - DNA, 15 bp, Homo sapiens
aaattaccccatgtg

SEQ ID NO: 188157 - DNA, 15 bp, Homo sapiens
aaaattaccccatgt

SEQ ID NO: 188158 - DNA, 15 bp, Homo sapiens
aaaaattaccccatg

SEQ ID NO: 188159 - DNA, 15 bp, Homo sapiens
aaaaaattaccccat

SEQ ID NO: 188160 - DNA, 15 bp, Homo sapiens
aaaaaaattacccca

SEQ ID NO: 188161 - DNA, 15 bp, Homo sapiens
aaaaaaaattacccc

SEQ ID NO: 188162 - DNA, 15 bp, Homo sapiens
aaaaaaaaattaccc

SEQ ID NO: 188163 - DNA, 15 bp, Homo sapiens
taaaaaaaaattacc

SEQ ID NO: 188164 - DNA, 15 bp, Homo sapiens
ataaaaaaaaattac

SEQ ID NO: 188165 - DNA, 15 bp, Homo sapiens
gataaaaaaaaatta

SEQ ID NO: 188166 - DNA, 15 bp, Homo sapiens
agataaaaaaaaatt

SEQ ID NO: 188167 - DNA, 15 bp, Homo sapiens
cagataaaaaaaaat

SEQ ID NO: 188168 - DNA, 15 bp, Homo sapiens
acagataaaaaaaaa

SEQ ID NO: 188169 - DNA, 15 bp, Homo sapiens
tacagataaaaaaaa

SEQ ID NO: 188170 - DNA, 15 bp, Homo sapiens
ctacagataaaaaaa

SEQ ID NO: 188171 - DNA, 15 bp, Homo sapiens
tctacagataaaaaa

SEQ ID NO: 188172 - DNA, 15 bp, Homo sapiens
ctctacagataaaaa

SEQ ID NO: 188173 - DNA, 15 bp, Homo sapiens
actctacagataaaa

SEQ ID NO: 188174 - DNA, 15 bp, Homo sapiens
cactctacagataaa

SEQ ID NO: 188175 - DNA, 15 bp, Homo sapiens
ccactctacagataa

SEQ ID NO: 188176 - DNA, 15 bp, Homo sapiens
tccactctacagata

SEQ ID NO: 188177 - DNA, 15 bp, Homo sapiens
ctccactctacagat

SEQ ID NO: 188178 - DNA, 15 bp, Homo sapiens
cctccactctacaga

SEQ ID NO: 188179 - DNA, 15 bp, Homo sapiens
acctccactctacag

SEQ ID NO: 188180 - DNA, 15 bp, Homo sapiens
gacctccactctaca

SEQ ID NO: 188181 - DNA, 15 bp, Homo sapiens
agacctccactctac

SEQ ID NO: 188182 - DNA, 15 bp, Homo sapiens
aagacctccactcta

SEQ ID NO: 188183 - DNA, 15 bp, Homo sapiens
caagacctccactct

SEQ ID NO: 188184 - DNA, 15 bp, Homo sapiens
gcaagacctccactc

SEQ ID NO: 188185 - DNA, 15 bp, Homo sapiens
agcaagacctccact

SEQ ID NO: 188186 - DNA, 15 bp, Homo sapiens
tagcaagacctccac

SEQ ID NO: 188187 - DNA, 15 bp, Homo sapiens
atagcaagacctcca

SEQ ID NO: 188188 - DNA, 15 bp, Homo sapiens
catagcaagacctcc

SEQ ID NO: 188189 - DNA, 15 bp, Homo sapiens
gcatagcaagacctc

SEQ ID NO: 188190 - DNA, 15 bp, Homo sapiens
agcatagcaagacct

SEQ ID NO: 188191 - DNA, 15 bp, Homo sapiens
cagcatagcaagacc

SEQ ID NO: 188192 - DNA, 15 bp, Homo sapiens
gcagcatagcaagac

SEQ ID NO: 188193 - DNA, 15 bp, Homo sapiens
ggcagcatagcaaga

SEQ ID NO: 188194 - DNA, 15 bp, Homo sapiens
gggcagcatagcaag

SEQ ID NO: 188195 - DNA, 15 bp, Homo sapiens
tgggcagcatagcaa

SEQ ID NO: 188196 - DNA, 15 bp, Homo sapiens
ctgggcagcatagca

SEQ ID NO: 188197 - DNA, 15 bp, Homo sapiens
cctgggcagcatagc

SEQ ID NO: 188198 - DNA, 15 bp, Homo sapiens
gcctgggcagcatag

SEQ ID NO: 188199 - DNA, 15 bp, Homo sapiens
agcctgggcagcata

SEQ ID NO: 188200 - DNA, 15 bp, Homo sapiens
gagcctgggcagcat

SEQ ID NO: 188201 - DNA, 15 bp, Homo sapiens
cgagcctgggcagca

SEQ ID NO: 188202 - DNA, 15 bp, Homo sapiens
acgagcctgggcagc

SEQ ID NO: 188203 - DNA, 15 bp, Homo sapiens
gacgagcctgggcag

SEQ ID NO: 188204 - DNA, 15 bp, Homo sapiens
agacgagcctgggca

SEQ ID NO: 188205 - DNA, 15 bp, Homo sapiens
aagacgagcctgggc

SEQ ID NO: 188206 - DNA, 15 bp, Homo sapiens
caagacgagcctggg

SEQ ID NO: 188207 - DNA, 15 bp, Homo sapiens
tcaagacgagcctgg

SEQ ID NO: 188208 - DNA, 15 bp, Homo sapiens
ttcaagacgagcctg

SEQ ID NO: 188209 - DNA, 15 bp, Homo sapiens
gttcaagacgagcct

SEQ ID NO: 188210 - DNA, 15 bp, Homo sapiens
agttcaagacgagcc

SEQ ID NO: 188211 - DNA, 15 bp, Homo sapiens
aagttcaagacgagc

SEQ ID NO: 188212 - DNA, 15 bp, Homo sapiens
gaagttcaagacgag

SEQ ID NO: 188213 - DNA, 15 bp, Homo sapiens
agaagttcaagacga

SEQ ID NO: 188214 - DNA, 15 bp, Homo sapiens
cagaagttcaagacg

SEQ ID NO: 188215 - DNA, 15 bp, Homo sapiens
ccagaagttcaagac

SEQ ID NO: 188216 - DNA, 15 bp, Homo sapiens
gccagaagttcaaga

SEQ ID NO: 188217 - DNA, 15 bp, Homo sapiens
ggccagaagttcaag

SEQ ID NO: 188218 - DNA, 15 bp, Homo sapiens
aggccagaagttcaa

SEQ ID NO: 188219 - DNA, 15 bp, Homo sapiens
gaggccagaagttca

SEQ ID NO: 188220 - DNA, 15 bp, Homo sapiens
tgaggccagaagttc

SEQ ID NO: 188221 - DNA, 15 bp, Homo sapiens
ctgaggccagaagtt

SEQ ID NO: 188222 - DNA, 15 bp, Homo sapiens
cctgaggccagaagt

SEQ ID NO: 188223 - DNA, 15 bp, Homo sapiens
gcctgaggccagaag

SEQ ID NO: 188224 - DNA, 15 bp, Homo sapiens
tgcctgaggccagaa

SEQ ID NO: 188225 - DNA, 15 bp, Homo sapiens
ctgcctgaggccaga

SEQ ID NO: 188226 - DNA, 15 bp, Homo sapiens
actgcctgaggccag

SEQ ID NO: 188227 - DNA, 15 bp, Homo sapiens
gactgcctgaggcca

SEQ ID NO: 188228 - DNA, 15 bp, Homo sapiens
ggactgcctgaggcc

SEQ ID NO: 188229 - DNA, 15 bp, Homo sapiens
aggactgcctgaggc

SEQ ID NO: 188230 - DNA, 15 bp, Homo sapiens
gaggactgcctgagg

SEQ ID NO: 188231 - DNA, 15 bp, Homo sapiens
ggaggactgcctgag

SEQ ID NO: 188232 - DNA, 15 bp, Homo sapiens
cggaggactgcctga

SEQ ID NO: 188233 - DNA, 15 bp, Homo sapiens
ccggaggactgcctg

SEQ ID NO: 188234 - DNA, 15 bp, Homo sapiens
gccggaggactgcct

SEQ ID NO: 188235 - DNA, 15 bp, Homo sapiens
ggccggaggactgcc

SEQ ID NO: 188236 - DNA, 15 bp, Homo sapiens
aggccggaggactgc

SEQ ID NO: 188237 - DNA, 15 bp, Homo sapiens
gaggccggaggactg

SEQ ID NO: 188238 - DNA, 15 bp, Homo sapiens
cgaggccggaggact

SEQ ID NO: 188239 - DNA, 15 bp, Homo sapiens
ccgaggccggaggac

SEQ ID NO: 188240 - DNA, 15 bp, Homo sapiens
gccgaggccggagga

SEQ ID NO: 188241 - DNA, 15 bp, Homo sapiens
agccgaggccggagg

SEQ ID NO: 188242 - DNA, 15 bp, Homo sapiens
tagccgaggccggag

SEQ ID NO: 188243 - DNA, 15 bp, Homo sapiens
gtagccgaggccgga

SEQ ID NO: 188244 - DNA, 15 bp, Homo sapiens
tgtagccgaggccgg

SEQ ID NO: 188245 - DNA, 15 bp, Homo sapiens
ctgtagccgaggccg

SEQ ID NO: 188246 - DNA, 15 bp, Homo sapiens
cctgtagccgaggcc

SEQ ID NO: 188247 - DNA, 15 bp, Homo sapiens
gcctgtagccgaggc

SEQ ID NO: 188248 - DNA, 15 bp, Homo sapiens
ggcctgtagccgagg

SEQ ID NO: 188249 - DNA, 15 bp, Homo sapiens
aggcctgtagccgag

SEQ ID NO: 188250 - DNA, 15 bp, Homo sapiens
caggcctgtagccga

SEQ ID NO: 188251 - DNA, 15 bp, Homo sapiens
tcaggcctgtagccg

SEQ ID NO: 188252 - DNA, 15 bp, Homo sapiens
ctcaggcctgtagcc

SEQ ID NO: 188253 - DNA, 15 bp, Homo sapiens
gctcaggcctgtagc

SEQ ID NO: 188254 - DNA, 15 bp, Homo sapiens
agctcaggcctgtag

SEQ ID NO: 188255 - DNA, 15 bp, Homo sapiens
cagctcaggcctgta

SEQ ID NO: 188256 - DNA, 15 bp, Homo sapiens
gcagctcaggcctgt

SEQ ID NO: 188257 - DNA, 15 bp, Homo sapiens
ggcagctcaggcctg

SEQ ID NO: 188258 - DNA, 15 bp, Homo sapiens
tggcagctcaggcct

SEQ ID NO: 188259 - DNA, 15 bp, Homo sapiens
gtggcagctcaggcc

SEQ ID NO: 188260 - DNA, 15 bp, Homo sapiens
tgtggcagctcaggc

SEQ ID NO: 188261 - DNA, 15 bp, Homo sapiens
gtgtggcagctcagg

SEQ ID NO: 188262 - DNA, 15 bp, Homo sapiens
ggtgtggcagctcag

SEQ ID NO: 188263 - DNA, 15 bp, Homo sapiens
gggtgtggcagctca

SEQ ID NO: 188264 - DNA, 15 bp, Homo sapiens
tgggtgtggcagctc

SEQ ID NO: 188265 - DNA, 15 bp, Homo sapiens
ctgggtgtggcagct

SEQ ID NO: 188266 - DNA, 15 bp, Homo sapiens
actgggtgtggcagc

SEQ ID NO: 188267 - DNA, 15 bp, Homo sapiens
gactgggtgtggcag

SEQ ID NO: 188268 - DNA, 15 bp, Homo sapiens
agactgggtgtggca

SEQ ID NO: 188269 - DNA, 15 bp, Homo sapiens
aagactgggtgtggc

SEQ ID NO: 188270 - DNA, 15 bp, Homo sapiens
caagactgggtgtgg

SEQ ID NO: 188271 - DNA, 15 bp, Homo sapiens
gcaagactgggtgtg

SEQ ID NO: 188272 - DNA, 15 bp, Homo sapiens
agcaagactgggtgt

SEQ ID NO: 188273 - DNA, 15 bp, Homo sapiens
cagcaagactgggtg

SEQ ID NO: 188274 - DNA, 15 bp, Homo sapiens
ccagcaagactgggt

SEQ ID NO: 188275 - DNA, 15 bp, Homo sapiens
accagcaagactggg

SEQ ID NO: 188276 - DNA, 15 bp, Homo sapiens
caccagcaagactgg

SEQ ID NO: 188277 - DNA, 15 bp, Homo sapiens
acaccagcaagactg

SEQ ID NO: 188278 - DNA, 15 bp, Homo sapiens
aacaccagcaagact

SEQ ID NO: 188279 - DNA, 15 bp, Homo sapiens
aaacaccagcaagac

SEQ ID NO: 188280 - DNA, 15 bp, Homo sapiens
gaaacaccagcaaga

SEQ ID NO: 188281 - DNA, 15 bp, Homo sapiens
tgaaacaccagcaag

SEQ ID NO: 188282 - DNA, 15 bp, Homo sapiens
atgaaacaccagcaa

SEQ ID NO: 188283 - DNA, 15 bp, Homo sapiens
tatgaaacaccagca

SEQ ID NO: 188284 - DNA, 15 bp, Homo sapiens
ttatgaaacaccagc

SEQ ID NO: 188285 - DNA, 15 bp, Homo sapiens
cttatgaaacaccag

SEQ ID NO: 188286 - DNA, 15 bp, Homo sapiens
ccttatgaaacacca

SEQ ID NO: 188287 - DNA, 15 bp, Homo sapiens
accttatgaaacacc

SEQ ID NO: 188288 - DNA, 15 bp, Homo sapiens
gaccttatgaaacac

SEQ ID NO: 188289 - DNA, 15 bp, Homo sapiens
ggaccttatgaaaca

SEQ ID NO: 188290 - DNA, 15 bp, Homo sapiens
cggaccttatgaaac

SEQ ID NO: 188291 - DNA, 15 bp, Homo sapiens
ccggaccttatgaaa

SEQ ID NO: 188292 - DNA, 15 bp, Homo sapiens
gccggaccttatgaa

SEQ ID NO: 188293 - DNA, 15 bp, Homo sapiens
ggccggaccttatga

SEQ ID NO: 188294 - DNA, 15 bp, Homo sapiens
gggccggaccttatg

SEQ ID NO: 188295 - DNA, 15 bp, Homo sapiens
ggggccggaccttat

SEQ ID NO: 188296 - DNA, 15 bp, Homo sapiens
aggggccggacctta

SEQ ID NO: 188297 - DNA, 15 bp, Homo sapiens
gaggggccggacctt

SEQ ID NO: 188298 - DNA, 15 bp, Homo sapiens
ggaggggccggacct

SEQ ID NO: 188299 - DNA, 15 bp, Homo sapiens
gggaggggccggacc

SEQ ID NO: 188300 - DNA, 15 bp, Homo sapiens
cgggaggggccggac

SEQ ID NO: 188301 - DNA, 15 bp, Homo sapiens
acgggaggggccgga

SEQ ID NO: 188302 - DNA, 15 bp, Homo sapiens
gacgggaggggccgg

SEQ ID NO: 188303 - DNA, 15 bp, Homo sapiens
cgacgggaggggccg

SEQ ID NO: 188304 - DNA, 15 bp, Homo sapiens
ccgacgggaggggcc

SEQ ID NO: 188305 - DNA, 15 bp, Homo sapiens
gccgacgggaggggc

SEQ ID NO: 188306 - DNA, 15 bp, Homo sapiens
ggccgacgggagggg

SEQ ID NO: 188307 - DNA, 15 bp, Homo sapiens
aggccgacgggaggg

SEQ ID NO: 188308 - DNA, 15 bp, Homo sapiens
gaggccgacgggagg

SEQ ID NO: 188309 - DNA, 15 bp, Homo sapiens
tgaggccgacgggag

SEQ ID NO: 188310 - DNA, 15 bp, Homo sapiens
ctgaggccgacggga

SEQ ID NO: 188311 - DNA, 15 bp, Homo sapiens
cctgaggccgacggg

SEQ ID NO: 188312 - DNA, 15 bp, Homo sapiens
acctgaggccgacgg

SEQ ID NO: 188313 - DNA, 15 bp, Homo sapiens
cacctgaggccgacg

SEQ ID NO: 188314 - DNA, 15 bp, Homo sapiens
acacctgaggccgac

SEQ ID NO: 188315 - DNA, 15 bp, Homo sapiens
tacacctgaggccga

SEQ ID NO: 188316 - DNA, 15 bp, Homo sapiens
atacacctgaggccg

SEQ ID NO: 188317 - DNA, 15 bp, Homo sapiens
catacacctgaggcc

SEQ ID NO: 188318 - DNA, 15 bp, Homo sapiens
tcatacacctgaggc

SEQ ID NO: 188319 - DNA, 15 bp, Homo sapiens
gtcatacacctgagg

SEQ ID NO: 188320 - DNA, 15 bp, Homo sapiens
agtcatacacctgag

SEQ ID NO: 188321 - DNA, 15 bp, Homo sapiens
aagtcatacacctga

SEQ ID NO: 188322 - DNA, 15 bp, Homo sapiens
caagtcatacacctg

SEQ ID NO: 188323 - DNA, 15 bp, Homo sapiens
acaagtcatacacct

SEQ ID NO: 188324 - DNA, 15 bp, Homo sapiens
cacaagtcatacacc

SEQ ID NO: 188325 - DNA, 15 bp, Homo sapiens
tcacaagtcatacac

SEQ ID NO: 188326 - DNA, 15 bp, Homo sapiens
ctcacaagtcataca

SEQ ID NO: 188327 - DNA, 15 bp, Homo sapiens
cctcacaagtcatac

SEQ ID NO: 188328 - DNA, 15 bp, Homo sapiens
gcctcacaagtcata

SEQ ID NO: 188329 - DNA, 15 bp, Homo sapiens
ggcctcacaagtcat

SEQ ID NO: 188330 - DNA, 15 bp, Homo sapiens
gggcctcacaagtca

SEQ ID NO: 188331 - DNA, 15 bp, Homo sapiens
tgggcctcacaagtc

SEQ ID NO: 188332 - DNA, 15 bp, Homo sapiens
ctgggcctcacaagt

SEQ ID NO: 188333 - DNA, 15 bp, Homo sapiens
gctgggcctcacaag

SEQ ID NO: 188334 - DNA, 15 bp, Homo sapiens
cgctgggcctcacaa

SEQ ID NO: 188335 - DNA, 15 bp, Homo sapiens
tcgctgggcctcaca

SEQ ID NO: 188336 - DNA, 15 bp, Homo sapiens
atcgctgggcctcac

SEQ ID NO: 188337 - DNA, 15 bp, Homo sapiens
catcgctgggcctca

SEQ ID NO: 188338 - DNA, 15 bp, Homo sapiens
ccatcgctgggcctc

SEQ ID NO: 188339 - DNA, 15 bp, Homo sapiens
cccatcgctgggcct

SEQ ID NO: 188340 - DNA, 15 bp, Homo sapiens
gcccatcgctgggcc

SEQ ID NO: 188341 - DNA, 15 bp, Homo sapiens
agcccatcgctgggc

SEQ ID NO: 188342 - DNA, 15 bp, Homo sapiens
gagcccatcgctggg

SEQ ID NO: 188343 - DNA, 15 bp, Homo sapiens
cgagcccatcgctgg

SEQ ID NO: 188344 - DNA, 15 bp, Homo sapiens
ccgagcccatcgctg

SEQ ID NO: 188345 - DNA, 15 bp, Homo sapiens
tccgagcccatcgct

SEQ ID NO: 188346 - DNA, 15 bp, Homo sapiens
ttccgagcccatcgc

SEQ ID NO: 188347 - DNA, 15 bp, Homo sapiens
cttccgagcccatcg

SEQ ID NO: 188348 - DNA, 15 bp, Homo sapiens
gcttccgagcccatc

SEQ ID NO: 188349 - DNA, 15 bp, Homo sapiens
agcttccgagcccat

SEQ ID NO: 188350 - DNA, 15 bp, Homo sapiens
gagcttccgagccca

SEQ ID NO: 188351 - DNA, 15 bp, Homo sapiens
agagcttccgagccc

SEQ ID NO: 188352 - DNA, 15 bp, Homo sapiens
aagagcttccgagcc

SEQ ID NO: 188353 - DNA, 15 bp, Homo sapiens
caagagcttccgagc

SEQ ID NO: 188354 - DNA, 15 bp, Homo sapiens
ccaagagcttccgag

SEQ ID NO: 188355 - DNA, 15 bp, Homo sapiens
accaagagcttccga

SEQ ID NO: 188356 - DNA, 15 bp, Homo sapiens
gaccaagagcttccg

SEQ ID NO: 188357 - DNA, 15 bp, Homo sapiens
tgaccaagagcttcc

SEQ ID NO: 188358 - DNA, 15 bp, Homo sapiens
ctgaccaagagcttc

SEQ ID NO: 188359 - DNA, 15 bp, Homo sapiens
actgaccaagagctt

SEQ ID NO: 188360 - DNA, 15 bp, Homo sapiens
tactgaccaagagct

SEQ ID NO: 188361 - DNA, 15 bp, Homo sapiens
atactgaccaagagc

SEQ ID NO: 188362 - DNA, 15 bp, Homo sapiens
gatactgaccaagag

SEQ ID NO: 188363 - DNA, 15 bp, Homo sapiens
ggatactgaccaaga

SEQ ID NO: 188364 - DNA, 15 bp, Homo sapiens
gggatactgaccaag

SEQ ID NO: 188365 - DNA, 15 bp, Homo sapiens
ggggatactgaccaa

SEQ ID NO: 188366 - DNA, 15 bp, Homo sapiens
gggggatactgacca

SEQ ID NO: 188367 - DNA, 15 bp, Homo sapiens
tgggggatactgacc

SEQ ID NO: 188368 - DNA, 15 bp, Homo sapiens
ttgggggatactgac

SEQ ID NO: 188369 - DNA, 15 bp, Homo sapiens
tttgggggatactga

SEQ ID NO: 188370 - DNA, 15 bp, Homo sapiens
gtttgggggatactg

SEQ ID NO: 188371 - DNA, 15 bp, Homo sapiens
agtttgggggatact

SEQ ID NO: 188372 - DNA, 15 bp, Homo sapiens
gagtttgggggatac

SEQ ID NO: 188373 - DNA, 15 bp, Homo sapiens
agagtttgggggata

SEQ ID NO: 188374 - DNA, 15 bp, Homo sapiens
cagagtttgggggat

SEQ ID NO: 188375 - DNA, 15 bp, Homo sapiens
acagagtttggggga

SEQ ID NO: 188376 - DNA, 15 bp, Homo sapiens
aacagagtttggggg

SEQ ID NO: 188377 - DNA, 15 bp, Homo sapiens
gaacagagtttgggg

SEQ ID NO: 188378 - DNA, 15 bp, Homo sapiens
ggaacagagtttggg

SEQ ID NO: 188379 - DNA, 15 bp, Homo sapiens
gggaacagagtttgg

SEQ ID NO: 188380 - DNA, 15 bp, Homo sapiens
ggggaacagagtttg

SEQ ID NO: 188381 - DNA, 15 bp, Homo sapiens
gggggaacagagttt

SEQ ID NO: 188382 - DNA, 15 bp, Homo sapiens
agggggaacagagtt

SEQ ID NO: 188383 - DNA, 15 bp, Homo sapiens
aagggggaacagagt

SEQ ID NO: 188384 - DNA, 15 bp, Homo sapiens
caagggggaacagag

SEQ ID NO: 188385 - DNA, 15 bp, Homo sapiens
acaagggggaacaga

SEQ ID NO: 188386 - DNA, 15 bp, Homo sapiens
tacaagggggaacag

SEQ ID NO: 188387 - DNA, 15 bp, Homo sapiens
ctacaagggggaaca

SEQ ID NO: 188388 - DNA, 15 bp, Homo sapiens
cctacaagggggaac

SEQ ID NO: 188389 - DNA, 15 bp, Homo sapiens
acctacaagggggaa

SEQ ID NO: 188390 - DNA, 15 bp, Homo sapiens
cacctacaaggggga

SEQ ID NO: 188391 - DNA, 15 bp, Homo sapiens
acacctacaaggggg

SEQ ID NO: 188392 - DNA, 15 bp, Homo sapiens
aacacctacaagggg

SEQ ID NO: 188393 - DNA, 15 bp, Homo sapiens
gaacacctacaaggg

SEQ ID NO: 188394 - DNA, 15 bp, Homo sapiens
ggaacacctacaagg

SEQ ID NO: 188395 - DNA, 15 bp, Homo sapiens
aggaacacctacaag

SEQ ID NO: 188396 - DNA, 15 bp, Homo sapiens
gaggaacacctacaa

SEQ ID NO: 188397 - DNA, 15 bp, Homo sapiens
agaggaacacctaca

SEQ ID NO: 188398 - DNA, 15 bp, Homo sapiens
aagaggaacacctac

SEQ ID NO: 188399 - DNA, 15 bp, Homo sapiens
aaagaggaacaccta

SEQ ID NO: 188400 - DNA, 15 bp, Homo sapiens
aaaagaggaacacct

SEQ ID NO: 188401 - DNA, 15 bp, Homo sapiens
aaaaagaggaacacc

SEQ ID NO: 188402 - DNA, 15 bp, Homo sapiens
aaaaaagaggaacac

SEQ ID NO: 188403 - DNA, 15 bp, Homo sapiens
gaaaaaagaggaaca

SEQ ID NO: 188404 - DNA, 15 bp, Homo sapiens
agaaaaaagaggaac

SEQ ID NO: 188405 - DNA, 15 bp, Homo sapiens
aagaaaaaagaggaa

SEQ ID NO: 188406 - DNA, 15 bp, Homo sapiens
aaagaaaaaagagga

SEQ ID NO: 188407 - DNA, 15 bp, Homo sapiens
caaagaaaaaagagg

SEQ ID NO: 188408 - DNA, 15 bp, Homo sapiens
gcaaagaaaaaagag

SEQ ID NO: 188409 - DNA, 15 bp, Homo sapiens
agcaaagaaaaaaga

SEQ ID NO: 188410 - DNA, 15 bp, Homo sapiens
cagcaaagaaaaaag

SEQ ID NO: 188411 - DNA, 15 bp, Homo sapiens
gcagcaaagaaaaaa

SEQ ID NO: 188412 - DNA, 15 bp, Homo sapiens
tgcagcaaagaaaaa

SEQ ID NO: 188413 - DNA, 15 bp, Homo sapiens
ctgcagcaaagaaaa

SEQ ID NO: 188414 - DNA, 15 bp, Homo sapiens
tctgcagcaaagaaa

SEQ ID NO: 188415 - DNA, 15 bp, Homo sapiens
ttctgcagcaaagaa

SEQ ID NO: 188416 - DNA, 15 bp, Homo sapiens
cttctgcagcaaaga

SEQ ID NO: 188417 - DNA, 15 bp, Homo sapiens
tcttctgcagcaaag

SEQ ID NO: 188418 - DNA, 15 bp, Homo sapiens
ctcttctgcagcaaa

SEQ ID NO: 188419 - DNA, 15 bp, Homo sapiens
actcttctgcagcaa

SEQ ID NO: 188420 - DNA, 15 bp, Homo sapiens
cactcttctgcagca

SEQ ID NO: 188421 - DNA, 15 bp, Homo sapiens
acactcttctgcagc

SEQ ID NO: 188422 - DNA, 15 bp, Homo sapiens
cacactcttctgcag

SEQ ID NO: 188423 - DNA, 15 bp, Homo sapiens
acacactcttctgca

SEQ ID NO: 188424 - DNA, 15 bp, Homo sapiens
cacacactcttctgc

SEQ ID NO: 188425 - DNA, 15 bp, Homo sapiens
tcacacactcttctg

SEQ ID NO: 188426 - DNA, 15 bp, Homo sapiens
gtcacacactcttct

SEQ ID NO: 188427 - DNA, 15 bp, Homo sapiens
agtcacacactcttc

SEQ ID NO: 188428 - DNA, 15 bp, Homo sapiens
gagtcacacactctt

SEQ ID NO: 188429 - DNA, 15 bp, Homo sapiens
tgagtcacacactct

SEQ ID NO: 188430 - DNA, 15 bp, Homo sapiens
gtgagtcacacactc

SEQ ID NO: 188431 - DNA, 15 bp, Homo sapiens
tgtgagtcacacact

SEQ ID NO: 188432 - DNA, 15 bp, Homo sapiens
ttgtgagtcacacac

SEQ ID NO: 188433 - DNA, 15 bp, Homo sapiens
tttgtgagtcacaca

SEQ ID NO: 188434 - DNA, 15 bp, Homo sapiens
ttttgtgagtcacac

SEQ ID NO: 188435 - DNA, 15 bp, Homo sapiens
tttttgtgagtcaca

SEQ ID NO: 188436 - DNA, 15 bp, Homo sapiens
ctttttgtgagtcac

SEQ ID NO: 188437 - DNA, 15 bp, Homo sapiens
actttttgtgagtca

SEQ ID NO: 188438 - DNA, 15 bp, Homo sapiens
aactttttgtgagtc

SEQ ID NO: 188439 - DNA, 15 bp, Homo sapiens
caactttttgtgagt

SEQ ID NO: 188440 - DNA, 15 bp, Homo sapiens
tcaactttttgtgag

SEQ ID NO: 188441 - DNA, 15 bp, Homo sapiens
ctcaactttttgtga

SEQ ID NO: 188442 - DNA, 15 bp, Homo sapiens
cctcaactttttgtg

SEQ ID NO: 188443 - DNA, 15 bp, Homo sapiens
tcctcaactttttgt

SEQ ID NO: 188444 - DNA, 15 bp, Homo sapiens
gtcctcaactttttg

SEQ ID NO: 188445 - DNA, 15 bp, Homo sapiens
agtcctcaacttttt

SEQ ID NO: 188446 - DNA, 15 bp, Homo sapiens
cagtcctcaactttt

SEQ ID NO: 188447 - DNA, 15 bp, Homo sapiens
acagtcctcaacttt

SEQ ID NO: 188448 - DNA, 15 bp, Homo sapiens
aacagtcctcaactt

SEQ ID NO: 188449 - DNA, 15 bp, Homo sapiens
gaacagtcctcaact

SEQ ID NO: 188450 - DNA, 15 bp, Homo sapiens
ggaacagtcctcaac

SEQ ID NO: 188451 - DNA, 15 bp, Homo sapiens
aggaacagtcctcaa

SEQ ID NO: 188452 - DNA, 15 bp, Homo sapiens
aaggaacagtcctca

SEQ ID NO: 188453 - DNA, 15 bp, Homo sapiens
caaggaacagtcctc

SEQ ID NO: 188454 - DNA, 15 bp, Homo sapiens
tcaaggaacagtcct

SEQ ID NO: 188455 - DNA, 15 bp, Homo sapiens
atcaaggaacagtcc

SEQ ID NO: 188456 - DNA, 15 bp, Homo sapiens
catcaaggaacagtc

SEQ ID NO: 188457 - DNA, 15 bp, Homo sapiens
acatcaaggaacagt

SEQ ID NO: 188458 - DNA, 15 bp, Homo sapiens
gacatcaaggaacag

SEQ ID NO: 188459 - DNA, 15 bp, Homo sapiens
ggacatcaaggaaca

SEQ ID NO: 188460 - DNA, 15 bp, Homo sapiens
aggacatcaaggaac

SEQ ID NO: 188461 - DNA, 15 bp, Homo sapiens
gaggacatcaaggaa

SEQ ID NO: 188462 - DNA, 15 bp, Homo sapiens
ggaggacatcaagga

SEQ ID NO: 188463 - DNA, 15 bp, Homo sapiens
gggaggacatcaagg

SEQ ID NO: 188464 - DNA, 15 bp, Homo sapiens
tgggaggacatcaag

SEQ ID NO: 188465 - DNA, 15 bp, Homo sapiens
ctgggaggacatcaa

SEQ ID NO: 188466 - DNA, 15 bp, Homo sapiens
cctgggaggacatca

SEQ ID NO: 188467 - DNA, 15 bp, Homo sapiens
gcctgggaggacatc

SEQ ID NO: 188468 - DNA, 15 bp, Homo sapiens
agcctgggaggacat

SEQ ID NO: 188469 - DNA, 15 bp, Homo sapiens
aagcctgggaggaca

SEQ ID NO: 188470 - DNA, 15 bp, Homo sapiens
gaagcctgggaggac

SEQ ID NO: 188471 - DNA, 15 bp, Homo sapiens
cgaagcctgggagga

SEQ ID NO: 188472 - DNA, 15 bp, Homo sapiens
gcgaagcctgggagg

SEQ ID NO: 188473 - DNA, 15 bp, Homo sapiens
ggcgaagcctgggag

SEQ ID NO: 188474 - DNA, 15 bp, Homo sapiens
gggcgaagcctggga

SEQ ID NO: 188475 - DNA, 15 bp, Homo sapiens
tgggcgaagcctggg

SEQ ID NO: 188476 - DNA, 15 bp, Homo sapiens
gtgggcgaagcctgg

SEQ ID NO: 188477 - DNA, 15 bp, Homo sapiens
ggtgggcgaagcctg

SEQ ID NO: 188478 - DNA, 15 bp, Homo sapiens
tggtgggcgaagcct

SEQ ID NO: 188479 - DNA, 15 bp, Homo sapiens
gtggtgggcgaagcc

SEQ ID NO: 188480 - DNA, 15 bp, Homo sapiens
ggtggtgggcgaagc

SEQ ID NO: 188481 - DNA, 15 bp, Homo sapiens
aggtggtgggcgaag

SEQ ID NO: 188482 - DNA, 15 bp, Homo sapiens
caggtggtgggcgaa

SEQ ID NO: 188483 - DNA, 15 bp, Homo sapiens
ccaggtggtgggcga

SEQ ID NO: 188484 - DNA, 15 bp, Homo sapiens
gccaggtggtgggcg

SEQ ID NO: 188485 - DNA, 15 bp, Homo sapiens
agccaggtggtgggc

SEQ ID NO: 188486 - DNA, 15 bp, Homo sapiens
gagccaggtggtggg

SEQ ID NO: 188487 - DNA, 15 bp, Homo sapiens
ggagccaggtggtgg

SEQ ID NO: 188488 - DNA, 15 bp, Homo sapiens
aggagccaggtggtg

SEQ ID NO: 188489 - DNA, 15 bp, Homo sapiens
caggagccaggtggt

SEQ ID NO: 188490 - DNA, 15 bp, Homo sapiens
ccaggagccaggtgg

SEQ ID NO: 188491 - DNA, 15 bp, Homo sapiens
accaggagccaggtg

SEQ ID NO: 188492 - DNA, 15 bp, Homo sapiens
taccaggagccaggt

SEQ ID NO: 188493 - DNA, 15 bp, Homo sapiens
ttaccaggagccagg

SEQ ID NO: 188494 - DNA, 15 bp, Homo sapiens
attaccaggagccag

SEQ ID NO: 188495 - DNA, 15 bp, Homo sapiens
cattaccaggagcca

SEQ ID NO: 188496 - DNA, 15 bp, Homo sapiens
gcattaccaggagcc

SEQ ID NO: 188497 - DNA, 15 bp, Homo sapiens
tgcattaccaggagc

SEQ ID NO: 188498 - DNA, 15 bp, Homo sapiens
ttgcattaccaggag

SEQ ID NO: 188499 - DNA, 15 bp, Homo sapiens
cttgcattaccagga

SEQ ID NO: 188500 - DNA, 15 bp, Homo sapiens
ccttgcattaccagg

SEQ ID NO: 188501 - DNA, 15 bp, Homo sapiens
tccttgcattaccag

SEQ ID NO: 188502 - DNA, 15 bp, Homo sapiens
ttccttgcattacca

SEQ ID NO: 188503 - DNA, 15 bp, Homo sapiens
gttccttgcattacc

SEQ ID NO: 188504 - DNA, 15 bp, Homo sapiens
agttccttgcattac

SEQ ID NO: 188505 - DNA, 15 bp, Homo sapiens
cagttccttgcatta

SEQ ID NO: 188506 - DNA, 15 bp, Homo sapiens
acagttccttgcatt

SEQ ID NO: 188507 - DNA, 15 bp, Homo sapiens
cacagttccttgcat

SEQ ID NO: 188508 - DNA, 15 bp, Homo sapiens
acacagttccttgca

SEQ ID NO: 188509 - DNA, 15 bp, Homo sapiens
aacacagttccttgc

SEQ ID NO: 188510 - DNA, 15 bp, Homo sapiens
aaacacagttccttg

SEQ ID NO: 188511 - DNA, 15 bp, Homo sapiens
gaaacacagttcctt

SEQ ID NO: 188512 - DNA, 15 bp, Homo sapiens
ggaaacacagttcct

SEQ ID NO: 188513 - DNA, 15 bp, Homo sapiens
tggaaacacagttcc

SEQ ID NO: 188514 - DNA, 15 bp, Homo sapiens
atggaaacacagttc

SEQ ID NO: 188515 - DNA, 15 bp, Homo sapiens
gatggaaacacagtt

SEQ ID NO: 188516 - DNA, 15 bp, Homo sapiens
ggatggaaacacagt

SEQ ID NO: 188517 - DNA, 15 bp, Homo sapiens
tggatggaaacacag

SEQ ID NO: 188518 - DNA, 15 bp, Homo sapiens
atggatggaaacaca

SEQ ID NO: 188519 - DNA, 15 bp, Homo sapiens
aatggatggaaacac

SEQ ID NO: 188520 - DNA, 15 bp, Homo sapiens
gaatggatggaaaca

SEQ ID NO: 188521 - DNA, 15 bp, Homo sapiens
ggaatggatggaaac

SEQ ID NO: 188522 - DNA, 15 bp, Homo sapiens
gggaatggatggaaa

SEQ ID NO: 188523 - DNA, 15 bp, Homo sapiens
agggaatggatggaa

SEQ ID NO: 188524 - DNA, 15 bp, Homo sapiens
aagggaatggatgga

SEQ ID NO: 188525 - DNA, 15 bp, Homo sapiens
gaagggaatggatgg

SEQ ID NO: 188526 - DNA, 15 bp, Homo sapiens
ggaagggaatggatg

SEQ ID NO: 188527 - DNA, 15 bp, Homo sapiens
aggaagggaatggat

SEQ ID NO: 188528 - DNA, 15 bp, Homo sapiens
aaggaagggaatgga

SEQ ID NO: 188529 - DNA, 15 bp, Homo sapiens
aaaggaagggaatgg

SEQ ID NO: 188530 - DNA, 15 bp, Homo sapiens
gaaaggaagggaatg

SEQ ID NO: 188531 - DNA, 15 bp, Homo sapiens
tgaaaggaagggaat

SEQ ID NO: 188532 - DNA, 15 bp, Homo sapiens
gtgaaaggaagggaa

SEQ ID NO: 188533 - DNA, 15 bp, Homo sapiens
agtgaaaggaaggga

SEQ ID NO: 188534 - DNA, 15 bp, Homo sapiens
cagtgaaaggaaggg

SEQ ID NO: 188535 - DNA, 15 bp, Homo sapiens
gcagtgaaaggaagg

SEQ ID NO: 188536 - DNA, 15 bp, Homo sapiens
tgcagtgaaaggaag

SEQ ID NO: 188537 - DNA, 15 bp, Homo sapiens
ttgcagtgaaaggaa

SEQ ID NO: 188538 - DNA, 15 bp, Homo sapiens
gttgcagtgaaagga

SEQ ID NO: 188539 - DNA, 15 bp, Homo sapiens
agttgcagtgaaagg

SEQ ID NO: 188540 - DNA, 15 bp, Homo sapiens
gagttgcagtgaaag

SEQ ID NO: 188541 - DNA, 15 bp, Homo sapiens
ggagttgcagtgaaa

SEQ ID NO: 188542 - DNA, 15 bp, Homo sapiens
tggagttgcagtgaa

SEQ ID NO: 188543 - DNA, 15 bp, Homo sapiens
ctggagttgcagtga

SEQ ID NO: 188544 - DNA, 15 bp, Homo sapiens
gctggagttgcagtg

SEQ ID NO: 188545 - DNA, 15 bp, Homo sapiens
ggctggagttgcagt

SEQ ID NO: 188546 - DNA, 15 bp, Homo sapiens
gggctggagttgcag

SEQ ID NO: 188547 - DNA, 15 bp, Homo sapiens
ggggctggagttgca

SEQ ID NO: 188548 - DNA, 15 bp, Homo sapiens
tggggctggagttgc

SEQ ID NO: 188549 - DNA, 15 bp, Homo sapiens
gtggggctggagttg

SEQ ID NO: 188550 - DNA, 15 bp, Homo sapiens
cgtggggctggagtt

SEQ ID NO: 188551 - DNA, 15 bp, Homo sapiens
acgtggggctggagt

SEQ ID NO: 188552 - DNA, 15 bp, Homo sapiens
aacgtggggctggag

SEQ ID NO: 188553 - DNA, 15 bp, Homo sapiens
aaacgtggggctgga

SEQ ID NO: 188554 - DNA, 15 bp, Homo sapiens
aaaacgtggggctgg

SEQ ID NO: 188555 - DNA, 15 bp, Homo sapiens
caaaacgtggggctg

SEQ ID NO: 188556 - DNA, 15 bp, Homo sapiens
tcaaaacgtggggct

SEQ ID NO: 188557 - DNA, 15 bp, Homo sapiens
ttcaaaacgtggggc

SEQ ID NO: 188558 - DNA, 15 bp, Homo sapiens
gttcaaaacgtgggg

SEQ ID NO: 188559 - DNA, 15 bp, Homo sapiens
agttcaaaacgtggg

SEQ ID NO: 188560 - DNA, 15 bp, Homo sapiens
tagttcaaaacgtgg

SEQ ID NO: 188561 - DNA, 15 bp, Homo sapiens
gtagttcaaaacgtg

SEQ ID NO: 188562 - DNA, 15 bp, Homo sapiens
ggtagttcaaaacgt

SEQ ID NO: 188563 - DNA, 15 bp, Homo sapiens
aggtagttcaaaacg

SEQ ID NO: 188564 - DNA, 15 bp, Homo sapiens
taggtagttcaaaac

SEQ ID NO: 188565 - DNA, 15 bp, Homo sapiens
ataggtagttcaaaa

SEQ ID NO: 188566 - DNA, 15 bp, Homo sapiens
aataggtagttcaaa

SEQ ID NO: 188567 - DNA, 15 bp, Homo sapiens
gaataggtagttcaa

SEQ ID NO: 188568 - DNA, 15 bp, Homo sapiens
cgaataggtagttca

SEQ ID NO: 188569 - DNA, 15 bp, Homo sapiens
tcgaataggtagttc

SEQ ID NO: 188570 - DNA, 15 bp, Homo sapiens
ctcgaataggtagtt

SEQ ID NO: 188571 - DNA, 15 bp, Homo sapiens
tctcgaataggtagt

SEQ ID NO: 188572 - DNA, 15 bp, Homo sapiens
atctcgaataggtag

SEQ ID NO: 188573 - DNA, 15 bp, Homo sapiens
aatctcgaataggta

SEQ ID NO: 188574 - DNA, 15 bp, Homo sapiens
aaatctcgaataggt

SEQ ID NO: 188575 - DNA, 15 bp, Homo sapiens
gaaatctcgaatagg

SEQ ID NO: 188576 - DNA, 15 bp, Homo sapiens
agaaatctcgaatag

SEQ ID NO: 188577 - DNA, 15 bp, Homo sapiens
cagaaatctcgaata

SEQ ID NO: 188578 - DNA, 15 bp, Homo sapiens
acagaaatctcgaat

SEQ ID NO: 188579 - DNA, 15 bp, Homo sapiens
gacagaaatctcgaa

SEQ ID NO: 188580 - DNA, 15 bp, Homo sapiens
agacagaaatctcga

SEQ ID NO: 188581 - DNA, 15 bp, Homo sapiens
gagacagaaatctcg

SEQ ID NO: 188582 - DNA, 15 bp, Homo sapiens
agagacagaaatctc

SEQ ID NO: 188583 - DNA, 15 bp, Homo sapiens
cagagacagaaatct

SEQ ID NO: 188584 - DNA, 15 bp, Homo sapiens
ccagagacagaaatc

SEQ ID NO: 188585 - DNA, 15 bp, Homo sapiens
tccagagacagaaat

SEQ ID NO: 188586 - DNA, 15 bp, Homo sapiens
gtccagagacagaaa

SEQ ID NO: 188587 - DNA, 15 bp, Homo sapiens
tgtccagagacagaa

SEQ ID NO: 188588 - DNA, 15 bp, Homo sapiens
atgtccagagacaga

SEQ ID NO: 188589 - DNA, 15 bp, Homo sapiens
gatgtccagagacag

SEQ ID NO: 188590 - DNA, 15 bp, Homo sapiens
ggatgtccagagaca

SEQ ID NO: 188591 - DNA, 15 bp, Homo sapiens
gggatgtccagagac

SEQ ID NO: 188592 - DNA, 15 bp, Homo sapiens
agggatgtccagaga

SEQ ID NO: 188593 - DNA, 15 bp, Homo sapiens
cagggatgtccagag

SEQ ID NO: 188594 - DNA, 15 bp, Homo sapiens
acagggatgtccaga

SEQ ID NO: 188595 - DNA, 15 bp, Homo sapiens
tacagggatgtccag

SEQ ID NO: 188596 - DNA, 15 bp, Homo sapiens
ttacagggatgtcca

SEQ ID NO: 188597 - DNA, 15 bp, Homo sapiens
attacagggatgtcc

SEQ ID NO: 188598 - DNA, 15 bp, Homo sapiens
cattacagggatgtc

SEQ ID NO: 188599 - DNA, 15 bp, Homo sapiens
gcattacagggatgt

SEQ ID NO: 188600 - DNA, 15 bp, Homo sapiens
ggcattacagggatg

SEQ ID NO: 188601 - DNA, 15 bp, Homo sapiens
aggcattacagggat

SEQ ID NO: 188602 - DNA, 15 bp, Homo sapiens
gaggcattacaggga

SEQ ID NO: 188603 - DNA, 15 bp, Homo sapiens
tgaggcattacaggg

SEQ ID NO: 188604 - DNA, 15 bp, Homo sapiens
ttgaggcattacagg

SEQ ID NO: 188605 - DNA, 15 bp, Homo sapiens
tttgaggcattacag

SEQ ID NO: 188606 - DNA, 15 bp, Homo sapiens
gtttgaggcattaca

SEQ ID NO: 188607 - DNA, 15 bp, Homo sapiens
agtttgaggcattac

SEQ ID NO: 188608 - DNA, 15 bp, Homo sapiens
gagtttgaggcatta

SEQ ID NO: 188609 - DNA, 15 bp, Homo sapiens
tgagtttgaggcatt

SEQ ID NO: 188610 - DNA, 15 bp, Homo sapiens
ttgagtttgaggcat

SEQ ID NO: 188611 - DNA, 15 bp, Homo sapiens
gttgagtttgaggca

SEQ ID NO: 188612 - DNA, 15 bp, Homo sapiens
agttgagtttgaggc

SEQ ID NO: 188613 - DNA, 15 bp, Homo sapiens
gagttgagtttgagg

SEQ ID NO: 188614 - DNA, 15 bp, Homo sapiens
cgagttgagtttgag

SEQ ID NO: 188615 - DNA, 15 bp, Homo sapiens
gcgagttgagtttga

SEQ ID NO: 188616 - DNA, 15 bp, Homo sapiens
ggcgagttgagtttg

SEQ ID NO: 188617 - DNA, 15 bp, Homo sapiens
gggcgagttgagttt

SEQ ID NO: 188618 - DNA, 15 bp, Homo sapiens
tgggcgagttgagtt

SEQ ID NO: 188619 - DNA, 15 bp, Homo sapiens
ttgggcgagttgagt

SEQ ID NO: 188620 - DNA, 15 bp, Homo sapiens
tttgggcgagttgag

SEQ ID NO: 188621 - DNA, 15 bp, Homo sapiens
ttttgggcgagttga

SEQ ID NO: 188622 - DNA, 15 bp, Homo sapiens
cttttgggcgagttg

SEQ ID NO: 188623 - DNA, 15 bp, Homo sapiens
tcttttgggcgagtt

SEQ ID NO: 188624 - DNA, 15 bp, Homo sapiens
ctcttttgggcgagt

SEQ ID NO: 188625 - DNA, 15 bp, Homo sapiens
tctcttttgggcgag

SEQ ID NO: 188626 - DNA, 15 bp, Homo sapiens
ttctcttttgggcga

SEQ ID NO: 188627 - DNA, 15 bp, Homo sapiens
attctcttttgggcg

SEQ ID NO: 188628 - DNA, 15 bp, Homo sapiens
cattctcttttgggc

SEQ ID NO: 188629 - DNA, 15 bp, Homo sapiens
acattctcttttggg

SEQ ID NO: 188630 - DNA, 15 bp, Homo sapiens
cacattctcttttgg

SEQ ID NO: 188631 - DNA, 15 bp, Homo sapiens
gcacattctcttttg

SEQ ID NO: 188632 - DNA, 15 bp, Homo sapiens
ggcacattctctttt

SEQ ID NO: 188633 - DNA, 15 bp, Homo sapiens
tggcacattctcttt

SEQ ID NO: 188634 - DNA, 15 bp, Homo sapiens
atggcacattctctt

SEQ ID NO: 188635 - DNA, 15 bp, Homo sapiens
gatggcacattctct

SEQ ID NO: 188636 - DNA, 15 bp, Homo sapiens
agatggcacattctc

SEQ ID NO: 188637 - DNA, 15 bp, Homo sapiens
gagatggcacattct

SEQ ID NO: 188638 - DNA, 15 bp, Homo sapiens
ggagatggcacattc

SEQ ID NO: 188639 - DNA, 15 bp, Homo sapiens
gggagatggcacatt

SEQ ID NO: 188640 - DNA, 15 bp, Homo sapiens
cgggagatggcacat

SEQ ID NO: 188641 - DNA, 15 bp, Homo sapiens
acgggagatggcaca

SEQ ID NO: 188642 - DNA, 15 bp, Homo sapiens
gacgggagatggcac

SEQ ID NO: 188643 - DNA, 15 bp, Homo sapiens
agacgggagatggca

SEQ ID NO: 188644 - DNA, 15 bp, Homo sapiens
gagacgggagatggc

SEQ ID NO: 188645 - DNA, 15 bp, Homo sapiens
ggagacgggagatgg

SEQ ID NO: 188646 - DNA, 15 bp, Homo sapiens
tggagacgggagatg

SEQ ID NO: 188647 - DNA, 15 bp, Homo sapiens
ttggagacgggagat

SEQ ID NO: 188648 - DNA, 15 bp, Homo sapiens
tttggagacgggaga

SEQ ID NO: 188649 - DNA, 15 bp, Homo sapiens
ctttggagacgggag

SEQ ID NO: 188650 - DNA, 15 bp, Homo sapiens
cctttggagacggga

SEQ ID NO: 188651 - DNA, 15 bp, Homo sapiens
gcctttggagacggg

SEQ ID NO: 188652 - DNA, 15 bp, Homo sapiens
agcctttggagacgg

SEQ ID NO: 188653 - DNA, 15 bp, Homo sapiens
aagcctttggagacg

SEQ ID NO: 188654 - DNA, 15 bp, Homo sapiens
aaagcctttggagac

SEQ ID NO: 188655 - DNA, 15 bp, Homo sapiens
gaaagcctttggaga

SEQ ID NO: 188656 - DNA, 15 bp, Homo sapiens
tgaaagcctttggag

SEQ ID NO: 188657 - DNA, 15 bp, Homo sapiens
atgaaagcctttgga

SEQ ID NO: 188658 - DNA, 15 bp, Homo sapiens
catgaaagcctttgg

SEQ ID NO: 188659 - DNA, 15 bp, Homo sapiens
gcatgaaagcctttg

SEQ ID NO: 188660 - DNA, 15 bp, Homo sapiens
tgcatgaaagccttt

SEQ ID NO: 188661 - DNA, 15 bp, Homo sapiens
ttgcatgaaagcctt

SEQ ID NO: 188662 - DNA, 15 bp, Homo sapiens
gttgcatgaaagcct

SEQ ID NO: 188663 - DNA, 15 bp, Homo sapiens
ggttgcatgaaagcc

SEQ ID NO: 188664 - DNA, 15 bp, Homo sapiens
aggttgcatgaaagc

SEQ ID NO: 188665 - DNA, 15 bp, Homo sapiens
aaggttgcatgaaag

SEQ ID NO: 188666 - DNA, 15 bp, Homo sapiens
gaaggttgcatgaaa

SEQ ID NO: 188667 - DNA, 15 bp, Homo sapiens
agaaggttgcatgaa

SEQ ID NO: 188668 - DNA, 15 bp, Homo sapiens
aagaaggttgcatga

SEQ ID NO: 188669 - DNA, 15 bp, Homo sapiens
gaagaaggttgcatg

SEQ ID NO: 188670 - DNA, 15 bp, Homo sapiens
agaagaaggttgcat

SEQ ID NO: 188671 - DNA, 15 bp, Homo sapiens
aagaagaaggttgca

SEQ ID NO: 188672 - DNA, 15 bp, Homo sapiens
aaagaagaaggttgc

SEQ ID NO: 188673 - DNA, 15 bp, Homo sapiens
caaagaagaaggttg

SEQ ID NO: 188674 - DNA, 15 bp, Homo sapiens
gcaaagaagaaggtt

SEQ ID NO: 188675 - DNA, 15 bp, Homo sapiens
tgcaaagaagaaggt

SEQ ID NO: 188676 - DNA, 15 bp, Homo sapiens
ctgcaaagaagaagg

SEQ ID NO: 188677 - DNA, 15 bp, Homo sapiens
tctgcaaagaagaag

SEQ ID NO: 188678 - DNA, 15 bp, Homo sapiens
ctctgcaaagaagaa

SEQ ID NO: 188679 - DNA, 15 bp, Homo sapiens
gctctgcaaagaaga

SEQ ID NO: 188680 - DNA, 15 bp, Homo sapiens
tgctctgcaaagaag

SEQ ID NO: 188681 - DNA, 15 bp, Homo sapiens
ctgctctgcaaagaa

SEQ ID NO: 188682 - DNA, 15 bp, Homo sapiens
gctgctctgcaaaga

SEQ ID NO: 188683 - DNA, 15 bp, Homo sapiens
tgctgctctgcaaag

SEQ ID NO: 188684 - DNA, 15 bp, Homo sapiens
ttgctgctctgcaaa

SEQ ID NO: 188685 - DNA, 15 bp, Homo sapiens
tttgctgctctgcaa

SEQ ID NO: 188686 - DNA, 15 bp, Homo sapiens
ttttgctgctctgca

SEQ ID NO: 188687 - DNA, 15 bp, Homo sapiens
cttttgctgctctgc

SEQ ID NO: 188688 - DNA, 15 bp, Homo sapiens
gcttttgctgctctg

SEQ ID NO: 188689 - DNA, 15 bp, Homo sapiens
agcttttgctgctct

SEQ ID NO: 188690 - DNA, 15 bp, Homo sapiens
tagcttttgctgctc

SEQ ID NO: 188691 - DNA, 15 bp, Homo sapiens
gtagcttttgctgct

SEQ ID NO: 188692 - DNA, 15 bp, Homo sapiens
ggtagcttttgctgc

SEQ ID NO: 188693 - DNA, 15 bp, Homo sapiens
gggtagcttttgctg

SEQ ID NO: 188694 - DNA, 15 bp, Homo sapiens
ggggtagcttttgct

SEQ ID NO: 188695 - DNA, 15 bp, Homo sapiens
aggggtagcttttgc

SEQ ID NO: 188696 - DNA, 15 bp, Homo sapiens
caggggtagcttttg

SEQ ID NO: 188697 - DNA, 15 bp, Homo sapiens
acaggggtagctttt

SEQ ID NO: 188698 - DNA, 15 bp, Homo sapiens
gacaggggtagcttt

SEQ ID NO: 188699 - DNA, 15 bp, Homo sapiens
tgacaggggtagctt

SEQ ID NO: 188700 - DNA, 15 bp, Homo sapiens
gtgacaggggtagct

SEQ ID NO: 188701 - DNA, 15 bp, Homo sapiens
tgtgacaggggtagc

SEQ ID NO: 188702 - DNA, 15 bp, Homo sapiens
ctgtgacaggggtag

SEQ ID NO: 188703 - DNA, 15 bp, Homo sapiens
gctgtgacaggggta

SEQ ID NO: 188704 - DNA, 15 bp, Homo sapiens
agctgtgacaggggt

SEQ ID NO: 188705 - DNA, 15 bp, Homo sapiens
cagctgtgacagggg

SEQ ID NO: 188706 - DNA, 15 bp, Homo sapiens
gcagctgtgacaggg

SEQ ID NO: 188707 - DNA, 15 bp, Homo sapiens
ggcagctgtgacagg

SEQ ID NO: 188708 - DNA, 15 bp, Homo sapiens
gggcagctgtgacag

SEQ ID NO: 188709 - DNA, 15 bp, Homo sapiens
tgggcagctgtgaca

SEQ ID NO: 188710 - DNA, 15 bp, Homo sapiens
ttgggcagctgtgac

SEQ ID NO: 188711 - DNA, 15 bp, Homo sapiens
cttgggcagctgtga

SEQ ID NO: 188712 - DNA, 15 bp, Homo sapiens
gcttgggcagctgtg

SEQ ID NO: 188713 - DNA, 15 bp, Homo sapiens
ggcttgggcagctgt

SEQ ID NO: 188714 - DNA, 15 bp, Homo sapiens
tggcttgggcagctg

SEQ ID NO: 188715 - DNA, 15 bp, Homo sapiens
ctggcttgggcagct

SEQ ID NO: 188716 - DNA, 15 bp, Homo sapiens
tctggcttgggcagc

SEQ ID NO: 188717 - DNA, 15 bp, Homo sapiens
ttctggcttgggcag

SEQ ID NO: 188718 - DNA, 15 bp, Homo sapiens
tttctggcttgggca

SEQ ID NO: 188719 - DNA, 15 bp, Homo sapiens
gtttctggcttgggc

SEQ ID NO: 188720 - DNA, 15 bp, Homo sapiens
agtttctggcttggg

SEQ ID NO: 188721 - DNA, 15 bp, Homo sapiens
tagtttctggcttgg

SEQ ID NO: 188722 - DNA, 15 bp, Homo sapiens
ttagtttctggcttg

SEQ ID NO: 188723 - DNA, 15 bp, Homo sapiens
cttagtttctggctt

SEQ ID NO: 188724 - DNA, 15 bp, Homo sapiens
tcttagtttctggct

SEQ ID NO: 188725 - DNA, 15 bp, Homo sapiens
gtcttagtttctggc

SEQ ID NO: 188726 - DNA, 15 bp, Homo sapiens
ggtcttagtttctgg

SEQ ID NO: 188727 - DNA, 15 bp, Homo sapiens
tggtcttagtttctg

SEQ ID NO: 188728 - DNA, 15 bp, Homo sapiens
ctggtcttagtttct

SEQ ID NO: 188729 - DNA, 15 bp, Homo sapiens
tctggtcttagtttc

SEQ ID NO: 188730 - DNA, 15 bp, Homo sapiens
ctctggtcttagttt

SEQ ID NO: 188731 - DNA, 15 bp, Homo sapiens
gctctggtcttagtt

SEQ ID NO: 188732 - DNA, 15 bp, Homo sapiens
ggctctggtcttagt

SEQ ID NO: 188733 - DNA, 15 bp, Homo sapiens
cggctctggtcttag

SEQ ID NO: 188734 - DNA, 15 bp, Homo sapiens
gcggctctggtctta

SEQ ID NO: 188735 - DNA, 15 bp, Homo sapiens
agcggctctggtctt

SEQ ID NO: 188736 - DNA, 15 bp, Homo sapiens
aagcggctctggtct

SEQ ID NO: 188737 - DNA, 15 bp, Homo sapiens
aaagcggctctggtc

SEQ ID NO: 188738 - DNA, 15 bp, Homo sapiens
gaaagcggctctggt

SEQ ID NO: 188739 - DNA, 15 bp, Homo sapiens
tgaaagcggctctgg

SEQ ID NO: 188740 - DNA, 15 bp, Homo sapiens
ttgaaagcggctctg

SEQ ID NO: 188741 - DNA, 15 bp, Homo sapiens
gttgaaagcggctct

SEQ ID NO: 188742 - DNA, 15 bp, Homo sapiens
agttgaaagcggctc

SEQ ID NO: 188743 - DNA, 15 bp, Homo sapiens
gagttgaaagcggct

SEQ ID NO: 188744 - DNA, 15 bp, Homo sapiens
agagttgaaagcggc

SEQ ID NO: 188745 - DNA, 15 bp, Homo sapiens
cagagttgaaagcgg

SEQ ID NO: 188746 - DNA, 15 bp, Homo sapiens
gcagagttgaaagcg

SEQ ID NO: 188747 - DNA, 15 bp, Homo sapiens
ggcagagttgaaagc

SEQ ID NO: 188748 - DNA, 15 bp, Homo sapiens
gggcagagttgaaag

SEQ ID NO: 188749 - DNA, 15 bp, Homo sapiens
agggcagagttgaaa

SEQ ID NO: 188750 - DNA, 15 bp, Homo sapiens
gagggcagagttgaa

SEQ ID NO: 188751 - DNA, 15 bp, Homo sapiens
agagggcagagttga

SEQ ID NO: 188752 - DNA, 15 bp, Homo sapiens
aagagggcagagttg

SEQ ID NO: 188753 - DNA, 15 bp, Homo sapiens
gaagagggcagagtt

SEQ ID NO: 188754 - DNA, 15 bp, Homo sapiens
agaagagggcagagt

SEQ ID NO: 188755 - DNA, 15 bp, Homo sapiens
aagaagagggcagag

SEQ ID NO: 188756 - DNA, 15 bp, Homo sapiens
gaagaagagggcaga

SEQ ID NO: 188757 - DNA, 15 bp, Homo sapiens
ggaagaagagggcag

SEQ ID NO: 188758 - DNA, 15 bp, Homo sapiens
gggaagaagagggca

SEQ ID NO: 188759 - DNA, 15 bp, Homo sapiens
agggaagaagagggc

SEQ ID NO: 188760 - DNA, 15 bp, Homo sapiens
aagggaagaagaggg

SEQ ID NO: 188761 - DNA, 15 bp, Homo sapiens
taagggaagaagagg

SEQ ID NO: 188762 - DNA, 15 bp, Homo sapiens
ataagggaagaagag

SEQ ID NO: 188763 - DNA, 15 bp, Homo sapiens
cataagggaagaaga

SEQ ID NO: 188764 - DNA, 15 bp, Homo sapiens
ccataagggaagaag

SEQ ID NO: 188765 - DNA, 15 bp, Homo sapiens
gccataagggaagaa

SEQ ID NO: 188766 - DNA, 15 bp, Homo sapiens
ggccataagggaaga

SEQ ID NO: 188767 - DNA, 15 bp, Homo sapiens
tggccataagggaag

SEQ ID NO: 188768 - DNA, 15 bp, Homo sapiens
gtggccataagggaa

SEQ ID NO: 188769 - DNA, 15 bp, Homo sapiens
tgtggccataaggga

SEQ ID NO: 188770 - DNA, 15 bp, Homo sapiens
ttgtggccataaggg

SEQ ID NO: 188771 - DNA, 15 bp, Homo sapiens
tttgtggccataagg

SEQ ID NO: 188772 - DNA, 15 bp, Homo sapiens
gtttgtggccataag

SEQ ID NO: 188773 - DNA, 15 bp, Homo sapiens
ggtttgtggccataa

SEQ ID NO: 188774 - DNA, 15 bp, Homo sapiens
gggtttgtggccata

SEQ ID NO: 188775 - DNA, 15 bp, Homo sapiens
ggggtttgtggccat

SEQ ID NO: 188776 - DNA, 15 bp, Homo sapiens
tggggtttgtggcca

SEQ ID NO: 188777 - DNA, 15 bp, Homo sapiens
ttggggtttgtggcc

SEQ ID NO: 188778 - DNA, 15 bp, Homo sapiens
cttggggtttgtggc

SEQ ID NO: 188779 - DNA, 15 bp, Homo sapiens
acttggggtttgtgg

SEQ ID NO: 188780 - DNA, 15 bp, Homo sapiens
aacttggggtttgtg

SEQ ID NO: 188781 - DNA, 15 bp, Homo sapiens
aaacttggggtttgt

SEQ ID NO: 188782 - DNA, 15 bp, Homo sapiens
gaaacttggggtttg

SEQ ID NO: 188783 - DNA, 15 bp, Homo sapiens
agaaacttggggttt

SEQ ID NO: 188784 - DNA, 15 bp, Homo sapiens
gagaaacttggggtt

SEQ ID NO: 188785 - DNA, 15 bp, Homo sapiens
agagaaacttggggt

SEQ ID NO: 188786 - DNA, 15 bp, Homo sapiens
aagagaaacttgggg

SEQ ID NO: 188787 - DNA, 15 bp, Homo sapiens
gaagagaaacttggg

SEQ ID NO: 188788 - DNA, 15 bp, Homo sapiens
agaagagaaacttgg

SEQ ID NO: 188789 - DNA, 15 bp, Homo sapiens
cagaagagaaacttg

SEQ ID NO: 188790 - DNA, 15 bp, Homo sapiens
acagaagagaaactt

SEQ ID NO: 188791 - DNA, 15 bp, Homo sapiens
cacagaagagaaact

SEQ ID NO: 188792 - DNA, 15 bp, Homo sapiens
ccacagaagagaaac

SEQ ID NO: 188793 - DNA, 15 bp, Homo sapiens
accacagaagagaaa

SEQ ID NO: 188794 - DNA, 15 bp, Homo sapiens
caccacagaagagaa

SEQ ID NO: 188795 - DNA, 15 bp, Homo sapiens
tcaccacagaagaga

SEQ ID NO: 188796 - DNA, 15 bp, Homo sapiens
atcaccacagaagag

SEQ ID NO: 188797 - DNA, 15 bp, Homo sapiens
aatcaccacagaaga

SEQ ID NO: 188798 - DNA, 15 bp, Homo sapiens
aaatcaccacagaag

SEQ ID NO: 188799 - DNA, 15 bp, Homo sapiens
gaaatcaccacagaa

SEQ ID NO: 188800 - DNA, 15 bp, Homo sapiens
tgaaatcaccacaga

SEQ ID NO: 188801 - DNA, 15 bp, Homo sapiens
ctgaaatcaccacag

SEQ ID NO: 188802 - DNA, 15 bp, Homo sapiens
tctgaaatcaccaca

SEQ ID NO: 188803 - DNA, 15 bp, Homo sapiens
atctgaaatcaccac

SEQ ID NO: 188804 - DNA, 15 bp, Homo sapiens
gatctgaaatcacca

SEQ ID NO: 188805 - DNA, 15 bp, Homo sapiens
ggatctgaaatcacc

SEQ ID NO: 188806 - DNA, 15 bp, Homo sapiens
cggatctgaaatcac

SEQ ID NO: 188807 - DNA, 15 bp, Homo sapiens
gcggatctgaaatca

SEQ ID NO: 188808 - DNA, 15 bp, Homo sapiens
agcggatctgaaatc

SEQ ID NO: 188809 - DNA, 15 bp, Homo sapiens
aagcggatctgaaat

SEQ ID NO: 188810 - DNA, 15 bp, Homo sapiens
gaagcggatctgaaa

SEQ ID NO: 188811 - DNA, 15 bp, Homo sapiens
agaagcggatctgaa

SEQ ID NO: 188812 - DNA, 15 bp, Homo sapiens
gagaagcggatctga

SEQ ID NO: 188813 - DNA, 15 bp, Homo sapiens
agagaagcggatctg

SEQ ID NO: 188814 - DNA, 15 bp, Homo sapiens
gagagaagcggatct

SEQ ID NO: 188815 - DNA, 15 bp, Homo sapiens
tgagagaagcggatc

SEQ ID NO: 188816 - DNA, 15 bp, Homo sapiens
gtgagagaagcggat

SEQ ID NO: 188817 - DNA, 15 bp, Homo sapiens
agtgagagaagcgga

SEQ ID NO: 188818 - DNA, 15 bp, Homo sapiens
aagtgagagaagcgg

SEQ ID NO: 188819 - DNA, 15 bp, Homo sapiens
gaagtgagagaagcg

SEQ ID NO: 188820 - DNA, 15 bp, Homo sapiens
agaagtgagagaagc

SEQ ID NO: 188821 - DNA, 15 bp, Homo sapiens
aagaagtgagagaag

SEQ ID NO: 188822 - DNA, 15 bp, Homo sapiens
aaagaagtgagagaa

SEQ ID NO: 188823 - DNA, 15 bp, Homo sapiens
aaaagaagtgagaga

SEQ ID NO: 188824 - DNA, 15 bp, Homo sapiens
aaaaagaagtgagag

SEQ ID NO: 188825 - DNA, 15 bp, Homo sapiens
gaaaaagaagtgaga

SEQ ID NO: 188826 - DNA, 15 bp, Homo sapiens
ggaaaaagaagtgag

SEQ ID NO: 188827 - DNA, 15 bp, Homo sapiens
gggaaaaagaagtga

SEQ ID NO: 188828 - DNA, 15 bp, Homo sapiens
agggaaaaagaagtg

SEQ ID NO: 188829 - DNA, 15 bp, Homo sapiens
gagggaaaaagaagt

SEQ ID NO: 188830 - DNA, 15 bp, Homo sapiens
ggagggaaaaagaag

SEQ ID NO: 188831 - DNA, 15 bp, Homo sapiens
aggagggaaaaagaa

SEQ ID NO: 188832 - DNA, 15 bp, Homo sapiens
aaggagggaaaaaga

SEQ ID NO: 188833 - DNA, 15 bp, Homo sapiens
gaaggagggaaaaag

SEQ ID NO: 188834 - DNA, 15 bp, Homo sapiens
ggaaggagggaaaaa

SEQ ID NO: 188835 - DNA, 15 bp, Homo sapiens
gggaaggagggaaaa

SEQ ID NO: 188836 - DNA, 15 bp, Homo sapiens
tgggaaggagggaaa

SEQ ID NO: 188837 - DNA, 15 bp, Homo sapiens
gtgggaaggagggaa

SEQ ID NO: 188838 - DNA, 15 bp, Homo sapiens
ggtgggaaggaggga

SEQ ID NO: 188839 - DNA, 15 bp, Homo sapiens
tggtgggaaggaggg

SEQ ID NO: 188840 - DNA, 15 bp, Homo sapiens
gtggtgggaaggagg

SEQ ID NO: 188841 - DNA, 15 bp, Homo sapiens
agtggtgggaaggag

SEQ ID NO: 188842 - DNA, 15 bp, Homo sapiens
aagtggtgggaagga

SEQ ID NO: 188843 - DNA, 15 bp, Homo sapiens
gaagtggtgggaagg

SEQ ID NO: 188844 - DNA, 15 bp, Homo sapiens
agaagtggtgggaag

SEQ ID NO: 188845 - DNA, 15 bp, Homo sapiens
aagaagtggtgggaa

SEQ ID NO: 188846 - DNA, 15 bp, Homo sapiens
caagaagtggtggga

SEQ ID NO: 188847 - DNA, 15 bp, Homo sapiens
ccaagaagtggtggg

SEQ ID NO: 188848 - DNA, 15 bp, Homo sapiens
accaagaagtggtgg

SEQ ID NO: 188849 - DNA, 15 bp, Homo sapiens
taccaagaagtggtg

SEQ ID NO: 188850 - DNA, 15 bp, Homo sapiens
gtaccaagaagtggt

SEQ ID NO: 188851 - DNA, 15 bp, Homo sapiens
agtaccaagaagtgg

SEQ ID NO: 188852 - DNA, 15 bp, Homo sapiens
cagtaccaagaagtg

SEQ ID NO: 188853 - DNA, 15 bp, Homo sapiens
gcagtaccaagaagt

SEQ ID NO: 188854 - DNA, 15 bp, Homo sapiens
tgcagtaccaagaag

SEQ ID NO: 188855 - DNA, 15 bp, Homo sapiens
ctgcagtaccaagaa

SEQ ID NO: 188856 - DNA, 15 bp, Homo sapiens
cctgcagtaccaaga

SEQ ID NO: 188857 - DNA, 15 bp, Homo sapiens
tcctgcagtaccaag

SEQ ID NO: 188858 - DNA, 15 bp, Homo sapiens
ctcctgcagtaccaa

SEQ ID NO: 188859 - DNA, 15 bp, Homo sapiens
gctcctgcagtacca

SEQ ID NO: 188860 - DNA, 15 bp, Homo sapiens
agctcctgcagtacc

SEQ ID NO: 188861 - DNA, 15 bp, Homo sapiens
aagctcctgcagtac

SEQ ID NO: 188862 - DNA, 15 bp, Homo sapiens
taagctcctgcagta

SEQ ID NO: 188863 - DNA, 15 bp, Homo sapiens
ataagctcctgcagt

SEQ ID NO: 188864 - DNA, 15 bp, Homo sapiens
gataagctcctgcag

SEQ ID NO: 188865 - DNA, 15 bp, Homo sapiens
ggataagctcctgca

SEQ ID NO: 188866 - DNA, 15 bp, Homo sapiens
gggataagctcctgc

SEQ ID NO: 188867 - DNA, 15 bp, Homo sapiens
tgggataagctcctg

SEQ ID NO: 188868 - DNA, 15 bp, Homo sapiens
ctgggataagctcct

SEQ ID NO: 188869 - DNA, 15 bp, Homo sapiens
tctgggataagctcc

SEQ ID NO: 188870 - DNA, 15 bp, Homo sapiens
ctctgggataagctc

SEQ ID NO: 188871 - DNA, 15 bp, Homo sapiens
actctgggataagct

SEQ ID NO: 188872 - DNA, 15 bp, Homo sapiens
gactctgggataagc

SEQ ID NO: 188873 - DNA, 15 bp, Homo sapiens
tgactctgggataag

SEQ ID NO: 188874 - DNA, 15 bp, Homo sapiens
gtgactctgggataa

SEQ ID NO: 188875 - DNA, 15 bp, Homo sapiens
tgtgactctgggata

SEQ ID NO: 188876 - DNA, 15 bp, Homo sapiens
ctgtgactctgggat

SEQ ID NO: 188877 - DNA, 15 bp, Homo sapiens
tctgtgactctggga

SEQ ID NO: 188878 - DNA, 15 bp, Homo sapiens
gtctgtgactctggg

SEQ ID NO: 188879 - DNA, 15 bp, Homo sapiens
agtctgtgactctgg

SEQ ID NO: 188880 - DNA, 15 bp, Homo sapiens
gagtctgtgactctg

SEQ ID NO: 188881 - DNA, 15 bp, Homo sapiens
tgagtctgtgactct

SEQ ID NO: 188882 - DNA, 15 bp, Homo sapiens
ttgagtctgtgactc

SEQ ID NO: 188883 - DNA, 15 bp, Homo sapiens
tttgagtctgtgact

SEQ ID NO: 188884 - DNA, 15 bp, Homo sapiens
atttgagtctgtgac

SEQ ID NO: 188885 - DNA, 15 bp, Homo sapiens
catttgagtctgtga

SEQ ID NO: 188886 - DNA, 15 bp, Homo sapiens
gcatttgagtctgtg

SEQ ID NO: 188887 - DNA, 15 bp, Homo sapiens
ggcatttgagtctgt

SEQ ID NO: 188888 - DNA, 15 bp, Homo sapiens
aggcatttgagtctg

SEQ ID NO: 188889 - DNA, 15 bp, Homo sapiens
caggcatttgagtct

SEQ ID NO: 188890 - DNA, 15 bp, Homo sapiens
gcaggcatttgagtc

SEQ ID NO: 188891 - DNA, 15 bp, Homo sapiens
tgcaggcatttgagt

SEQ ID NO: 188892 - DNA, 15 bp, Homo sapiens
ctgcaggcatttgag

SEQ ID NO: 188893 - DNA, 15 bp, Homo sapiens
cctgcaggcatttga

SEQ ID NO: 188894 - DNA, 15 bp, Homo sapiens
ccctgcaggcatttg

SEQ ID NO: 188895 - DNA, 15 bp, Homo sapiens
cccctgcaggcattt

SEQ ID NO: 188896 - DNA, 15 bp, Homo sapiens
gcccctgcaggcatt

SEQ ID NO: 188897 - DNA, 15 bp, Homo sapiens
ggcccctgcaggcat

SEQ ID NO: 188898 - DNA, 15 bp, Homo sapiens
aggcccctgcaggca

SEQ ID NO: 188899 - DNA, 15 bp, Homo sapiens
caggcccctgcaggc

SEQ ID NO: 188900 - DNA, 15 bp, Homo sapiens
tcaggcccctgcagg

SEQ ID NO: 188901 - DNA, 15 bp, Homo sapiens
ctcaggcccctgcag

SEQ ID NO: 188902 - DNA, 15 bp, Homo sapiens
cctcaggcccctgca

SEQ ID NO: 188903 - DNA, 15 bp, Homo sapiens
ccctcaggcccctgc

SEQ ID NO: 188904 - DNA, 15 bp, Homo sapiens
tccctcaggcccctg

SEQ ID NO: 188905 - DNA, 15 bp, Homo sapiens
ctccctcaggcccct

SEQ ID NO: 188906 - DNA, 15 bp, Homo sapiens
cctccctcaggcccc

SEQ ID NO: 188907 - DNA, 15 bp, Homo sapiens
ccctccctcaggccc

SEQ ID NO: 188908 - DNA, 15 bp, Homo sapiens
tccctccctcaggcc

SEQ ID NO: 188909 - DNA, 15 bp, Homo sapiens
ctccctccctcaggc

SEQ ID NO: 188910 - DNA, 15 bp, Homo sapiens
cctccctccctcagg

SEQ ID NO: 188911 - DNA, 15 bp, Homo sapiens
acctccctccctcag

SEQ ID NO: 188912 - DNA, 15 bp, Homo sapiens
cacctccctccctca

SEQ ID NO: 188913 - DNA, 15 bp, Homo sapiens
gcacctccctccctc

SEQ ID NO: 188914 - DNA, 15 bp, Homo sapiens
tgcacctccctccct

SEQ ID NO: 188915 - DNA, 15 bp, Homo sapiens
gtgcacctccctccc

SEQ ID NO: 188916 - DNA, 15 bp, Homo sapiens
agtgcacctccctcc

SEQ ID NO: 188917 - DNA, 15 bp, Homo sapiens
aagtgcacctccctc

SEQ ID NO: 188918 - DNA, 15 bp, Homo sapiens
caagtgcacctccct

SEQ ID NO: 188919 - DNA, 15 bp, Homo sapiens
ccaagtgcacctccc

SEQ ID NO: 188920 - DNA, 15 bp, Homo sapiens
gccaagtgcacctcc

SEQ ID NO: 188921 - DNA, 15 bp, Homo sapiens
tgccaagtgcacctc

SEQ ID NO: 188922 - DNA, 15 bp, Homo sapiens
atgccaagtgcacct

SEQ ID NO: 188923 - DNA, 15 bp, Homo sapiens
gatgccaagtgcacc

SEQ ID NO: 188924 - DNA, 15 bp, Homo sapiens
agatgccaagtgcac

SEQ ID NO: 188925 - DNA, 15 bp, Homo sapiens
gagatgccaagtgca

SEQ ID NO: 188926 - DNA, 15 bp, Homo sapiens
tgagatgccaagtgc

SEQ ID NO: 188927 - DNA, 15 bp, Homo sapiens
ctgagatgccaagtg

SEQ ID NO: 188928 - DNA, 15 bp, Homo sapiens
cctgagatgccaagt

SEQ ID NO: 188929 - DNA, 15 bp, Homo sapiens
tcctgagatgccaag

SEQ ID NO: 188930 - DNA, 15 bp, Homo sapiens
ttcctgagatgccaa

SEQ ID NO: 188931 - DNA, 15 bp, Homo sapiens
cttcctgagatgcca

SEQ ID NO: 188932 - DNA, 15 bp, Homo sapiens
ccttcctgagatgcc

SEQ ID NO: 188933 - DNA, 15 bp, Homo sapiens
cccttcctgagatgc

SEQ ID NO: 188934 - DNA, 15 bp, Homo sapiens
ccccttcctgagatg

SEQ ID NO: 188935 - DNA, 15 bp, Homo sapiens
accccttcctgagat

SEQ ID NO: 188936 - DNA, 15 bp, Homo sapiens
caccccttcctgaga

SEQ ID NO: 188937 - DNA, 15 bp, Homo sapiens
acaccccttcctgag

SEQ ID NO: 188938 - DNA, 15 bp, Homo sapiens
cacaccccttcctga

SEQ ID NO: 188939 - DNA, 15 bp, Homo sapiens
acacaccccttcctg

SEQ ID NO: 188940 - DNA, 15 bp, Homo sapiens
cacacaccccttcct

SEQ ID NO: 188941 - DNA, 15 bp, Homo sapiens
ccacacaccccttcc

SEQ ID NO: 188942 - DNA, 15 bp, Homo sapiens
gccacacaccccttc

SEQ ID NO: 188943 - DNA, 15 bp, Homo sapiens
agccacacacccctt

SEQ ID NO: 188944 - DNA, 15 bp, Homo sapiens
cagccacacacccct

SEQ ID NO: 188945 - DNA, 15 bp, Homo sapiens
ccagccacacacccc

SEQ ID NO: 188946 - DNA, 15 bp, Homo sapiens
cccagccacacaccc

SEQ ID NO: 188947 - DNA, 15 bp, Homo sapiens
acccagccacacacc

SEQ ID NO: 188948 - DNA, 15 bp, Homo sapiens
cacccagccacacac

SEQ ID NO: 188949 - DNA, 15 bp, Homo sapiens
acacccagccacaca

SEQ ID NO: 188950 - DNA, 15 bp, Homo sapiens
cacacccagccacac

SEQ ID NO: 188951 - DNA, 15 bp, Homo sapiens
ccacacccagccaca

SEQ ID NO: 188952 - DNA, 15 bp, Homo sapiens
accacacccagccac

SEQ ID NO: 188953 - DNA, 15 bp, Homo sapiens
caccacacccagcca

SEQ ID NO: 188954 - DNA, 15 bp, Homo sapiens
ccaccacacccagcc

SEQ ID NO: 188955 - DNA, 15 bp, Homo sapiens
gccaccacacccagc

SEQ ID NO: 188956 - DNA, 15 bp, Homo sapiens
agccaccacacccag

SEQ ID NO: 188957 - DNA, 15 bp, Homo sapiens
gagccaccacaccca

SEQ ID NO: 188958 - DNA, 15 bp, Homo sapiens
ggagccaccacaccc

SEQ ID NO: 188959 - DNA, 15 bp, Homo sapiens
gggagccaccacacc

SEQ ID NO: 188960 - DNA, 15 bp, Homo sapiens
cgggagccaccacac

SEQ ID NO: 188961 - DNA, 15 bp, Homo sapiens
gcgggagccaccaca

SEQ ID NO: 188962 - DNA, 15 bp, Homo sapiens
ggcgggagccaccac

SEQ ID NO: 188963 - DNA, 15 bp, Homo sapiens
gggcgggagccacca

SEQ ID NO: 188964 - DNA, 15 bp, Homo sapiens
cgggcgggagccacc

SEQ ID NO: 188965 - DNA, 15 bp, Homo sapiens
ccgggcgggagccac

SEQ ID NO: 188966 - DNA, 15 bp, Homo sapiens
tccgggcgggagcca

SEQ ID NO: 188967 - DNA, 15 bp, Homo sapiens
ttccgggcgggagcc

SEQ ID NO: 188968 - DNA, 15 bp, Homo sapiens
attccgggcgggagc

SEQ ID NO: 188969 - DNA, 15 bp, Homo sapiens
gattccgggcgggag

SEQ ID NO: 188970 - DNA, 15 bp, Homo sapiens
ggattccgggcggga

SEQ ID NO: 188971 - DNA, 15 bp, Homo sapiens
gggattccgggcggg

SEQ ID NO: 188972 - DNA, 15 bp, Homo sapiens
tgggattccgggcgg

SEQ ID NO: 188973 - DNA, 15 bp, Homo sapiens
ctgggattccgggcg

SEQ ID NO: 188974 - DNA, 15 bp, Homo sapiens
gctgggattccgggc

SEQ ID NO: 188975 - DNA, 15 bp, Homo sapiens
tgctgggattccggg

SEQ ID NO: 188976 - DNA, 15 bp, Homo sapiens
gtgctgggattccgg

SEQ ID NO: 188977 - DNA, 15 bp, Homo sapiens
agtgctgggattccg

SEQ ID NO: 188978 - DNA, 15 bp, Homo sapiens
aagtgctgggattcc

SEQ ID NO: 188979 - DNA, 15 bp, Homo sapiens
aaagtgctgggattc

SEQ ID NO: 188980 - DNA, 15 bp, Homo sapiens
aaaagtgctgggatt

SEQ ID NO: 188981 - DNA, 15 bp, Homo sapiens
caaaagtgctgggat

SEQ ID NO: 188982 - DNA, 15 bp, Homo sapiens
ccaaaagtgctggga

SEQ ID NO: 188983 - DNA, 15 bp, Homo sapiens
cccaaaagtgctggg

SEQ ID NO: 188984 - DNA, 15 bp, Homo sapiens
tcccaaaagtgctgg

SEQ ID NO: 188985 - DNA, 15 bp, Homo sapiens
atcccaaaagtgctg

SEQ ID NO: 188986 - DNA, 15 bp, Homo sapiens
aatcccaaaagtgct

SEQ ID NO: 188987 - DNA, 15 bp, Homo sapiens
taatcccaaaagtgc

SEQ ID NO: 188988 - DNA, 15 bp, Homo sapiens
gtaatcccaaaagtg

SEQ ID NO: 188989 - DNA, 15 bp, Homo sapiens
tgtaatcccaaaagt

SEQ ID NO: 188990 - DNA, 15 bp, Homo sapiens
atgtaatcccaaaag

SEQ ID NO: 188991 - DNA, 15 bp, Homo sapiens
aatgtaatcccaaaa

SEQ ID NO: 188992 - DNA, 15 bp, Homo sapiens
aaatgtaatcccaaa

SEQ ID NO: 188993 - DNA, 15 bp, Homo sapiens
aaaatgtaatcccaa

SEQ ID NO: 188994 - DNA, 15 bp, Homo sapiens
caaaatgtaatccca

SEQ ID NO: 188995 - DNA, 15 bp, Homo sapiens
ccaaaatgtaatccc

SEQ ID NO: 188996 - DNA, 15 bp, Homo sapiens
gccaaaatgtaatcc

SEQ ID NO: 188997 - DNA, 15 bp, Homo sapiens
ggccaaaatgtaatc

SEQ ID NO: 188998 - DNA, 15 bp, Homo sapiens
tggccaaaatgtaat

SEQ ID NO: 188999 - DNA, 15 bp, Homo sapiens
ttggccaaaatgtaa

SEQ ID NO: 189000 - DNA, 15 bp, Homo sapiens
cttggccaaaatgta

SEQ ID NO: 189001 - DNA, 15 bp, Homo sapiens
tcttggccaaaatgt

SEQ ID NO: 189002 - DNA, 15 bp, Homo sapiens
gtcttggccaaaatg

SEQ ID NO: 189003 - DNA, 15 bp, Homo sapiens
cgtcttggccaaaat

SEQ ID NO: 189004 - DNA, 15 bp, Homo sapiens
ccgtcttggccaaaa

SEQ ID NO: 189005 - DNA, 15 bp, Homo sapiens
tccgtcttggccaaa

SEQ ID NO: 189006 - DNA, 15 bp, Homo sapiens
gtccgtcttggccaa

SEQ ID NO: 189007 - DNA, 15 bp, Homo sapiens
cgtccgtcttggcca

SEQ ID NO: 189008 - DNA, 15 bp, Homo sapiens
ccgtccgtcttggcc

SEQ ID NO: 189009 - DNA, 15 bp, Homo sapiens
tccgtccgtcttggc

SEQ ID NO: 189010 - DNA, 15 bp, Homo sapiens
atccgtccgtcttgg

SEQ ID NO: 189011 - DNA, 15 bp, Homo sapiens
gatccgtccgtcttg

SEQ ID NO: 189012 - DNA, 15 bp, Homo sapiens
tgatccgtccgtctt

SEQ ID NO: 189013 - DNA, 15 bp, Homo sapiens
gtgatccgtccgtct

SEQ ID NO: 189014 - DNA, 15 bp, Homo sapiens
agtgatccgtccgtc

SEQ ID NO: 189015 - DNA, 15 bp, Homo sapiens
aagtgatccgtccgt

SEQ ID NO: 189016 - DNA, 15 bp, Homo sapiens
caagtgatccgtccg

SEQ ID NO: 189017 - DNA, 15 bp, Homo sapiens
tcaagtgatccgtcc

SEQ ID NO: 189018 - DNA, 15 bp, Homo sapiens
ctcaagtgatccgtc

SEQ ID NO: 189019 - DNA, 15 bp, Homo sapiens
gctcaagtgatccgt

SEQ ID NO: 189020 - DNA, 15 bp, Homo sapiens
ggctcaagtgatccg

SEQ ID NO: 189021 - DNA, 15 bp, Homo sapiens
gggctcaagtgatcc

SEQ ID NO: 189022 - DNA, 15 bp, Homo sapiens
tgggctcaagtgatc

SEQ ID NO: 189023 - DNA, 15 bp, Homo sapiens
ctgggctcaagtgat

SEQ ID NO: 189024 - DNA, 15 bp, Homo sapiens
cctgggctcaagtga

SEQ ID NO: 189025 - DNA, 15 bp, Homo sapiens
tcctgggctcaagtg

SEQ ID NO: 189026 - DNA, 15 bp, Homo sapiens
ctcctgggctcaagt

SEQ ID NO: 189027 - DNA, 15 bp, Homo sapiens
actcctgggctcaag

SEQ ID NO: 189028 - DNA, 15 bp, Homo sapiens
aactcctgggctcaa

SEQ ID NO: 189029 - DNA, 15 bp, Homo sapiens
aaactcctgggctca

SEQ ID NO: 189030 - DNA, 15 bp, Homo sapiens
caaactcctgggctc

SEQ ID NO: 189031 - DNA, 15 bp, Homo sapiens
tcaaactcctgggct

SEQ ID NO: 189032 - DNA, 15 bp, Homo sapiens
ctcaaactcctgggc

SEQ ID NO: 189033 - DNA, 15 bp, Homo sapiens
tctcaaactcctggg

SEQ ID NO: 189034 - DNA, 15 bp, Homo sapiens
gtctcaaactcctgg

SEQ ID NO: 189035 - DNA, 15 bp, Homo sapiens
ggtctcaaactcctg

SEQ ID NO: 189036 - DNA, 15 bp, Homo sapiens
tggtctcaaactcct

SEQ ID NO: 189037 - DNA, 15 bp, Homo sapiens
atggtctcaaactcc

SEQ ID NO: 189038 - DNA, 15 bp, Homo sapiens
gatggtctcaaactc

SEQ ID NO: 189039 - DNA, 15 bp, Homo sapiens
ggatggtctcaaact

SEQ ID NO: 189040 - DNA, 15 bp, Homo sapiens
aggatggtctcaaac

SEQ ID NO: 189041 - DNA, 15 bp, Homo sapiens
taggatggtctcaaa

SEQ ID NO: 189042 - DNA, 15 bp, Homo sapiens
ctaggatggtctcaa

SEQ ID NO: 189043 - DNA, 15 bp, Homo sapiens
cctaggatggtctca

SEQ ID NO: 189044 - DNA, 15 bp, Homo sapiens
gcctaggatggtctc

SEQ ID NO: 189045 - DNA, 15 bp, Homo sapiens
tgcctaggatggtct

SEQ ID NO: 189046 - DNA, 15 bp, Homo sapiens
ttgcctaggatggtc

SEQ ID NO: 189047 - DNA, 15 bp, Homo sapiens
attgcctaggatggt

SEQ ID NO: 189048 - DNA, 15 bp, Homo sapiens
cattgcctaggatgg

SEQ ID NO: 189049 - DNA, 15 bp, Homo sapiens
acattgcctaggatg

SEQ ID NO: 189050 - DNA, 15 bp, Homo sapiens
cacattgcctaggat

SEQ ID NO: 189051 - DNA, 15 bp, Homo sapiens
tcacattgcctagga

SEQ ID NO: 189052 - DNA, 15 bp, Homo sapiens
gtcacattgcctagg

SEQ ID NO: 189053 - DNA, 15 bp, Homo sapiens
tgtcacattgcctag

SEQ ID NO: 189054 - DNA, 15 bp, Homo sapiens
ttgtcacattgccta

SEQ ID NO: 189055 - DNA, 15 bp, Homo sapiens
tttgtcacattgcct

SEQ ID NO: 189056 - DNA, 15 bp, Homo sapiens
ttttgtcacattgcc

SEQ ID NO: 189057 - DNA, 15 bp, Homo sapiens
gttttgtcacattgc

SEQ ID NO: 189058 - DNA, 15 bp, Homo sapiens
ggttttgtcacattg

SEQ ID NO: 189059 - DNA, 15 bp, Homo sapiens
gggttttgtcacatt

SEQ ID NO: 189060 - DNA, 15 bp, Homo sapiens
agggttttgtcacat

SEQ ID NO: 189061 - DNA, 15 bp, Homo sapiens
cagggttttgtcaca

SEQ ID NO: 189062 - DNA, 15 bp, Homo sapiens
acagggttttgtcac

SEQ ID NO: 189063 - DNA, 15 bp, Homo sapiens
gacagggttttgtca

SEQ ID NO: 189064 - DNA, 15 bp, Homo sapiens
agacagggttttgtc

SEQ ID NO: 189065 - DNA, 15 bp, Homo sapiens
gagacagggttttgt

SEQ ID NO: 189066 - DNA, 15 bp, Homo sapiens
agagacagggttttg

SEQ ID NO: 189067 - DNA, 15 bp, Homo sapiens
tagagacagggtttt

SEQ ID NO: 189068 - DNA, 15 bp, Homo sapiens
gtagagacagggttt

SEQ ID NO: 189069 - DNA, 15 bp, Homo sapiens
ggtagagacagggtt

SEQ ID NO: 189070 - DNA, 15 bp, Homo sapiens
tggtagagacagggt

SEQ ID NO: 189071 - DNA, 15 bp, Homo sapiens
ttggtagagacaggg

SEQ ID NO: 189072 - DNA, 15 bp, Homo sapiens
tttggtagagacagg

SEQ ID NO: 189073 - DNA, 15 bp, Homo sapiens
ttttggtagagacag

SEQ ID NO: 189074 - DNA, 15 bp, Homo sapiens
tttttggtagagaca

SEQ ID NO: 189075 - DNA, 15 bp, Homo sapiens
ttttttggtagagac

SEQ ID NO: 189076 - DNA, 15 bp, Homo sapiens
tttttttggtagaga

SEQ ID NO: 189077 - DNA, 15 bp, Homo sapiens
atttttttggtagag

SEQ ID NO: 189078 - DNA, 15 bp, Homo sapiens
aatttttttggtaga

SEQ ID NO: 189079 - DNA, 15 bp, Homo sapiens
taatttttttggtag

SEQ ID NO: 189080 - DNA, 15 bp, Homo sapiens
ttaatttttttggta

SEQ ID NO: 189081 - DNA, 15 bp, Homo sapiens
tttaatttttttggt

SEQ ID NO: 189082 - DNA, 15 bp, Homo sapiens
ttttaatttttttgg

SEQ ID NO: 189083 - DNA, 15 bp, Homo sapiens
tttttaatttttttg

SEQ ID NO: 189084 - DNA, 15 bp, Homo sapiens
atttttaattttttt

SEQ ID NO: 189085 - DNA, 15 bp, Homo sapiens
aatttttaatttttt

SEQ ID NO: 189086 - DNA, 15 bp, Homo sapiens
taatttttaattttt

SEQ ID NO: 189087 - DNA, 15 bp, Homo sapiens
ctaatttttaatttt

SEQ ID NO: 189088 - DNA, 15 bp, Homo sapiens
gctaatttttaattt

SEQ ID NO: 189089 - DNA, 15 bp, Homo sapiens
ggctaatttttaatt

SEQ ID NO: 189090 - DNA, 15 bp, Homo sapiens
tggctaatttttaat

SEQ ID NO: 189091 - DNA, 15 bp, Homo sapiens
ctggctaatttttaa

SEQ ID NO: 189092 - DNA, 15 bp, Homo sapiens
cctggctaattttta

SEQ ID NO: 189093 - DNA, 15 bp, Homo sapiens
gcctggctaattttt

SEQ ID NO: 189094 - DNA, 15 bp, Homo sapiens
ggcctggctaatttt

SEQ ID NO: 189095 - DNA, 15 bp, Homo sapiens
aggcctggctaattt

SEQ ID NO: 189096 - DNA, 15 bp, Homo sapiens
caggcctggctaatt

SEQ ID NO: 189097 - DNA, 15 bp, Homo sapiens
ccaggcctggctaat

SEQ ID NO: 189098 - DNA, 15 bp, Homo sapiens
accaggcctggctaa

SEQ ID NO: 189099 - DNA, 15 bp, Homo sapiens
caccaggcctggcta

SEQ ID NO: 189100 - DNA, 15 bp, Homo sapiens
ccaccaggcctggct

SEQ ID NO: 189101 - DNA, 15 bp, Homo sapiens
accaccaggcctggc

SEQ ID NO: 189102 - DNA, 15 bp, Homo sapiens
taccaccaggcctgg

SEQ ID NO: 189103 - DNA, 15 bp, Homo sapiens
gtaccaccaggcctg

SEQ ID NO: 189104 - DNA, 15 bp, Homo sapiens
tgtaccaccaggcct

SEQ ID NO: 189105 - DNA, 15 bp, Homo sapiens
atgtaccaccaggcc

SEQ ID NO: 189106 - DNA, 15 bp, Homo sapiens
catgtaccaccaggc

SEQ ID NO: 189107 - DNA, 15 bp, Homo sapiens
gcatgtaccaccagg

SEQ ID NO: 189108 - DNA, 15 bp, Homo sapiens
ggcatgtaccaccag

SEQ ID NO: 189109 - DNA, 15 bp, Homo sapiens
aggcatgtaccacca

SEQ ID NO: 189110 - DNA, 15 bp, Homo sapiens
caggcatgtaccacc

SEQ ID NO: 189111 - DNA, 15 bp, Homo sapiens
acaggcatgtaccac

SEQ ID NO: 189112 - DNA, 15 bp, Homo sapiens
tacaggcatgtacca

SEQ ID NO: 189113 - DNA, 15 bp, Homo sapiens
ttacaggcatgtacc

SEQ ID NO: 189114 - DNA, 15 bp, Homo sapiens
gttacaggcatgtac

SEQ ID NO: 189115 - DNA, 15 bp, Homo sapiens
tgttacaggcatgta

SEQ ID NO: 189116 - DNA, 15 bp, Homo sapiens
ctgttacaggcatgt

SEQ ID NO: 189117 - DNA, 15 bp, Homo sapiens
actgttacaggcatg

SEQ ID NO: 189118 - DNA, 15 bp, Homo sapiens
gactgttacaggcat

SEQ ID NO: 189119 - DNA, 15 bp, Homo sapiens
ggactgttacaggca

SEQ ID NO: 189120 - DNA, 15 bp, Homo sapiens
gggactgttacaggc

SEQ ID NO: 189121 - DNA, 15 bp, Homo sapiens
tgggactgttacagg

SEQ ID NO: 189122 - DNA, 15 bp, Homo sapiens
ctgggactgttacag

SEQ ID NO: 189123 - DNA, 15 bp, Homo sapiens
gctgggactgttaca

SEQ ID NO: 189124 - DNA, 15 bp, Homo sapiens
agctgggactgttac

SEQ ID NO: 189125 - DNA, 15 bp, Homo sapiens
tagctgggactgtta

SEQ ID NO: 189126 - DNA, 15 bp, Homo sapiens
gtagctgggactgtt

SEQ ID NO: 189127 - DNA, 15 bp, Homo sapiens
agtagctgggactgt

SEQ ID NO: 189128 - DNA, 15 bp, Homo sapiens
aagtagctgggactg

SEQ ID NO: 189129 - DNA, 15 bp, Homo sapiens
caagtagctgggact

SEQ ID NO: 189130 - DNA, 15 bp, Homo sapiens
ccaagtagctgggac

SEQ ID NO: 189131 - DNA, 15 bp, Homo sapiens
cccaagtagctggga

SEQ ID NO: 189132 - DNA, 15 bp, Homo sapiens
tcccaagtagctggg

SEQ ID NO: 189133 - DNA, 15 bp, Homo sapiens
ttcccaagtagctgg

SEQ ID NO: 189134 - DNA, 15 bp, Homo sapiens
gttcccaagtagctg

SEQ ID NO: 189135 - DNA, 15 bp, Homo sapiens
ggttcccaagtagct

SEQ ID NO: 189136 - DNA, 15 bp, Homo sapiens
aggttcccaagtagc

SEQ ID NO: 189137 - DNA, 15 bp, Homo sapiens
caggttcccaagtag

SEQ ID NO: 189138 - DNA, 15 bp, Homo sapiens
acaggttcccaagta

SEQ ID NO: 189139 - DNA, 15 bp, Homo sapiens
cacaggttcccaagt

SEQ ID NO: 189140 - DNA, 15 bp, Homo sapiens
ccacaggttcccaag

SEQ ID NO: 189141 - DNA, 15 bp, Homo sapiens
accacaggttcccaa

SEQ ID NO: 189142 - DNA, 15 bp, Homo sapiens
caccacaggttccca

SEQ ID NO: 189143 - DNA, 15 bp, Homo sapiens
ccaccacaggttccc

SEQ ID NO: 189144 - DNA, 15 bp, Homo sapiens
cccaccacaggttcc

SEQ ID NO: 189145 - DNA, 15 bp, Homo sapiens
tcccaccacaggttc

SEQ ID NO: 189146 - DNA, 15 bp, Homo sapiens
ttcccaccacaggtt

SEQ ID NO: 189147 - DNA, 15 bp, Homo sapiens
cttcccaccacaggt

SEQ ID NO: 189148 - DNA, 15 bp, Homo sapiens
tcttcccaccacagg

SEQ ID NO: 189149 - DNA, 15 bp, Homo sapiens
atcttcccaccacag

SEQ ID NO: 189150 - DNA, 15 bp, Homo sapiens
catcttcccaccaca

SEQ ID NO: 189151 - DNA, 15 bp, Homo sapiens
ccatcttcccaccac

SEQ ID NO: 189152 - DNA, 15 bp, Homo sapiens
gccatcttcccacca

SEQ ID NO: 189153 - DNA, 15 bp, Homo sapiens
agccatcttcccacc

SEQ ID NO: 189154 - DNA, 15 bp, Homo sapiens
aagccatcttcccac

SEQ ID NO: 189155 - DNA, 15 bp, Homo sapiens
caagccatcttccca

SEQ ID NO: 189156 - DNA, 15 bp, Homo sapiens
tcaagccatcttccc

SEQ ID NO: 189157 - DNA, 15 bp, Homo sapiens
ctcaagccatcttcc

SEQ ID NO: 189158 - DNA, 15 bp, Homo sapiens
actcaagccatcttc

SEQ ID NO: 189159 - DNA, 15 bp, Homo sapiens
gactcaagccatctt

SEQ ID NO: 189160 - DNA, 15 bp, Homo sapiens
ggactcaagccatct

SEQ ID NO: 189161 - DNA, 15 bp, Homo sapiens
cggactcaagccatc

SEQ ID NO: 189162 - DNA, 15 bp, Homo sapiens
ccggactcaagccat

SEQ ID NO: 189163 - DNA, 15 bp, Homo sapiens
cccggactcaagcca

SEQ ID NO: 189164 - DNA, 15 bp, Homo sapiens
tcccggactcaagcc

SEQ ID NO: 189165 - DNA, 15 bp, Homo sapiens
ctcccggactcaagc

SEQ ID NO: 189166 - DNA, 15 bp, Homo sapiens
tctcccggactcaag

SEQ ID NO: 189167 - DNA, 15 bp, Homo sapiens
gtctcccggactcaa

SEQ ID NO: 189168 - DNA, 15 bp, Homo sapiens
tgtctcccggactca

SEQ ID NO: 189169 - DNA, 15 bp, Homo sapiens
ctgtctcccggactc

SEQ ID NO: 189170 - DNA, 15 bp, Homo sapiens
tctgtctcccggact

SEQ ID NO: 189171 - DNA, 15 bp, Homo sapiens
ctctgtctcccggac

SEQ ID NO: 189172 - DNA, 15 bp, Homo sapiens
cctctgtctcccgga

SEQ ID NO: 189173 - DNA, 15 bp, Homo sapiens
acctctgtctcccgg

SEQ ID NO: 189174 - DNA, 15 bp, Homo sapiens
aacctctgtctcccg

SEQ ID NO: 189175 - DNA, 15 bp, Homo sapiens
caacctctgtctccc

SEQ ID NO: 189176 - DNA, 15 bp, Homo sapiens
gcaacctctgtctcc

SEQ ID NO: 189177 - DNA, 15 bp, Homo sapiens
tgcaacctctgtctc

SEQ ID NO: 189178 - DNA, 15 bp, Homo sapiens
ctgcaacctctgtct

SEQ ID NO: 189179 - DNA, 15 bp, Homo sapiens
actgcaacctctgtc

SEQ ID NO: 189180 - DNA, 15 bp, Homo sapiens
cactgcaacctctgt

SEQ ID NO: 189181 - DNA, 15 bp, Homo sapiens
tcactgcaacctctg

SEQ ID NO: 189182 - DNA, 15 bp, Homo sapiens
ctcactgcaacctct

SEQ ID NO: 189183 - DNA, 15 bp, Homo sapiens
gctcactgcaacctc

SEQ ID NO: 189184 - DNA, 15 bp, Homo sapiens
agctcactgcaacct

SEQ ID NO: 189185 - DNA, 15 bp, Homo sapiens
cagctcactgcaacc

SEQ ID NO: 189186 - DNA, 15 bp, Homo sapiens
tcagctcactgcaac

SEQ ID NO: 189187 - DNA, 15 bp, Homo sapiens
ctcagctcactgcaa

SEQ ID NO: 189188 - DNA, 15 bp, Homo sapiens
tctcagctcactgca

SEQ ID NO: 189189 - DNA, 15 bp, Homo sapiens
atctcagctcactgc

SEQ ID NO: 189190 - DNA, 15 bp, Homo sapiens
aatctcagctcactg

SEQ ID NO: 189191 - DNA, 15 bp, Homo sapiens
taatctcagctcact

SEQ ID NO: 189192 - DNA, 15 bp, Homo sapiens
gtaatctcagctcac

SEQ ID NO: 189193 - DNA, 15 bp, Homo sapiens
ggtaatctcagctca

SEQ ID NO: 189194 - DNA, 15 bp, Homo sapiens
gggtaatctcagctc

SEQ ID NO: 189195 - DNA, 15 bp, Homo sapiens
agggtaatctcagct

SEQ ID NO: 189196 - DNA, 15 bp, Homo sapiens
gagggtaatctcagc

SEQ ID NO: 189197 - DNA, 15 bp, Homo sapiens
ggagggtaatctcag

SEQ ID NO: 189198 - DNA, 15 bp, Homo sapiens
tggagggtaatctca

SEQ ID NO: 189199 - DNA, 15 bp, Homo sapiens
ctggagggtaatctc

SEQ ID NO: 189200 - DNA, 15 bp, Homo sapiens
gctggagggtaatct

SEQ ID NO: 189201 - DNA, 15 bp, Homo sapiens
ggctggagggtaatc

SEQ ID NO: 189202 - DNA, 15 bp, Homo sapiens
aggctggagggtaat

SEQ ID NO: 189203 - DNA, 15 bp, Homo sapiens
caggctggagggtaa

SEQ ID NO: 189204 - DNA, 15 bp, Homo sapiens
tcaggctggagggta

SEQ ID NO: 189205 - DNA, 15 bp, Homo sapiens
ctcaggctggagggt

SEQ ID NO: 189206 - DNA, 15 bp, Homo sapiens
gctcaggctggaggg

SEQ ID NO: 189207 - DNA, 15 bp, Homo sapiens
tgctcaggctggagg

SEQ ID NO: 189208 - DNA, 15 bp, Homo sapiens
ttgctcaggctggag

SEQ ID NO: 189209 - DNA, 15 bp, Homo sapiens
gttgctcaggctgga

SEQ ID NO: 189210 - DNA, 15 bp, Homo sapiens
tgttgctcaggctgg

SEQ ID NO: 189211 - DNA, 15 bp, Homo sapiens
ctgttgctcaggctg

SEQ ID NO: 189212 - DNA, 15 bp, Homo sapiens
tctgttgctcaggct

SEQ ID NO: 189213 - DNA, 15 bp, Homo sapiens
gtctgttgctcaggc

SEQ ID NO: 189214 - DNA, 15 bp, Homo sapiens
ggtctgttgctcagg

SEQ ID NO: 189215 - DNA, 15 bp, Homo sapiens
gggtctgttgctcag

SEQ ID NO: 189216 - DNA, 15 bp, Homo sapiens
tgggtctgttgctca

SEQ ID NO: 189217 - DNA, 15 bp, Homo sapiens
ctgggtctgttgctc

SEQ ID NO: 189218 - DNA, 15 bp, Homo sapiens
tctgggtctgttgct

SEQ ID NO: 189219 - DNA, 15 bp, Homo sapiens
gtctgggtctgttgc

SEQ ID NO: 189220 - DNA, 15 bp, Homo sapiens
ggtctgggtctgttg

SEQ ID NO: 189221 - DNA, 15 bp, Homo sapiens
aggtctgggtctgtt

SEQ ID NO: 189222 - DNA, 15 bp, Homo sapiens
aaggtctgggtctgt

SEQ ID NO: 189223 - DNA, 15 bp, Homo sapiens
caaggtctgggtctg

SEQ ID NO: 189224 - DNA, 15 bp, Homo sapiens
acaaggtctgggtct

SEQ ID NO: 189225 - DNA, 15 bp, Homo sapiens
cacaaggtctgggtc

SEQ ID NO: 189226 - DNA, 15 bp, Homo sapiens
acacaaggtctgggt

SEQ ID NO: 189227 - DNA, 15 bp, Homo sapiens
gacacaaggtctggg

SEQ ID NO: 189228 - DNA, 15 bp, Homo sapiens
tgacacaaggtctgg

SEQ ID NO: 189229 - DNA, 15 bp, Homo sapiens
ctgacacaaggtctg

SEQ ID NO: 189230 - DNA, 15 bp, Homo sapiens
tctgacacaaggtct

SEQ ID NO: 189231 - DNA, 15 bp, Homo sapiens
ttctgacacaaggtc

SEQ ID NO: 189232 - DNA, 15 bp, Homo sapiens
tttctgacacaaggt

SEQ ID NO: 189233 - DNA, 15 bp, Homo sapiens
ttttctgacacaagg

SEQ ID NO: 189234 - DNA, 15 bp, Homo sapiens
tttttctgacacaag

SEQ ID NO: 189235 - DNA, 15 bp, Homo sapiens
ctttttctgacacaa

SEQ ID NO: 189236 - DNA, 15 bp, Homo sapiens
tctttttctgacaca

SEQ ID NO: 189237 - DNA, 15 bp, Homo sapiens
atctttttctgacac

SEQ ID NO: 189238 - DNA, 15 bp, Homo sapiens
tatctttttctgaca

SEQ ID NO: 189239 - DNA, 15 bp, Homo sapiens
ctatctttttctgac

SEQ ID NO: 189240 - DNA, 15 bp, Homo sapiens
cctatctttttctga

SEQ ID NO: 189241 - DNA, 15 bp, Homo sapiens
tcctatctttttctg

SEQ ID NO: 189242 - DNA, 15 bp, Homo sapiens
ttcctatctttttct

SEQ ID NO: 189243 - DNA, 15 bp, Homo sapiens
tttcctatctttttc

SEQ ID NO: 189244 - DNA, 15 bp, Homo sapiens
ctttcctatcttttt

SEQ ID NO: 189245 - DNA, 15 bp, Homo sapiens
cctttcctatctttt

SEQ ID NO: 189246 - DNA, 15 bp, Homo sapiens
acctttcctatcttt

SEQ ID NO: 189247 - DNA, 15 bp, Homo sapiens
aacctttcctatctt

SEQ ID NO: 189248 - DNA, 15 bp, Homo sapiens
caacctttcctatct

SEQ ID NO: 189249 - DNA, 15 bp, Homo sapiens
acaacctttcctatc

SEQ ID NO: 189250 - DNA, 15 bp, Homo sapiens
cacaacctttcctat

SEQ ID NO: 189251 - DNA, 15 bp, Homo sapiens
ccacaacctttccta

SEQ ID NO: 189252 - DNA, 15 bp, Homo sapiens
cccacaacctttcct

SEQ ID NO: 189253 - DNA, 15 bp, Homo sapiens
ccccacaacctttcc

SEQ ID NO: 189254 - DNA, 15 bp, Homo sapiens
cccccacaacctttc

SEQ ID NO: 189255 - DNA, 15 bp, Homo sapiens
ccccccacaaccttt

SEQ ID NO: 189256 - DNA, 15 bp, Homo sapiens
gccccccacaacctt

SEQ ID NO: 189257 - DNA, 15 bp, Homo sapiens
ggccccccacaacct

SEQ ID NO: 189258 - DNA, 15 bp, Homo sapiens
gggccccccacaacc

SEQ ID NO: 189259 - DNA, 15 bp, Homo sapiens
ggggccccccacaac

SEQ ID NO: 189260 - DNA, 15 bp, Homo sapiens
gggggccccccacaa

SEQ ID NO: 189261 - DNA, 15 bp, Homo sapiens
tgggggccccccaca

SEQ ID NO: 189262 - DNA, 15 bp, Homo sapiens
ctgggggccccccac

SEQ ID NO: 189263 - DNA, 15 bp, Homo sapiens
actgggggcccccca

SEQ ID NO: 189264 - DNA, 15 bp, Homo sapiens
cactgggggcccccc

SEQ ID NO: 189265 - DNA, 15 bp, Homo sapiens
tcactgggggccccc

SEQ ID NO: 189266 - DNA, 15 bp, Homo sapiens
atcactgggggcccc

SEQ ID NO: 189267 - DNA, 15 bp, Homo sapiens
gatcactgggggccc

SEQ ID NO: 189268 - DNA, 15 bp, Homo sapiens
agatcactgggggcc

SEQ ID NO: 189269 - DNA, 15 bp, Homo sapiens
cagatcactgggggc

SEQ ID NO: 189270 - DNA, 15 bp, Homo sapiens
ccagatcactggggg

SEQ ID NO: 189271 - DNA, 15 bp, Homo sapiens
cccagatcactgggg

SEQ ID NO: 189272 - DNA, 15 bp, Homo sapiens
ccccagatcactggg

SEQ ID NO: 189273 - DNA, 15 bp, Homo sapiens
gccccagatcactgg

SEQ ID NO: 189274 - DNA, 15 bp, Homo sapiens
tgccccagatcactg

SEQ ID NO: 189275 - DNA, 15 bp, Homo sapiens
atgccccagatcact

SEQ ID NO: 189276 - DNA, 15 bp, Homo sapiens
catgccccagatcac

SEQ ID NO: 189277 - DNA, 15 bp, Homo sapiens
acatgccccagatca

SEQ ID NO: 189278 - DNA, 15 bp, Homo sapiens
cacatgccccagatc

SEQ ID NO: 189279 - DNA, 15 bp, Homo sapiens
acacatgccccagat

SEQ ID NO: 189280 - DNA, 15 bp, Homo sapiens
cacacatgccccaga

SEQ ID NO: 189281 - DNA, 15 bp, Homo sapiens
gcacacatgccccag

SEQ ID NO: 189282 - DNA, 15 bp, Homo sapiens
cgcacacatgcccca

SEQ ID NO: 189283 - DNA, 15 bp, Homo sapiens
gcgcacacatgcccc

SEQ ID NO: 189284 - DNA, 15 bp, Homo sapiens
agcgcacacatgccc

SEQ ID NO: 189285 - DNA, 15 bp, Homo sapiens
cagcgcacacatgcc

SEQ ID NO: 189286 - DNA, 15 bp, Homo sapiens
gcagcgcacacatgc

SEQ ID NO: 189287 - DNA, 15 bp, Homo sapiens
ggcagcgcacacatg

SEQ ID NO: 189288 - DNA, 15 bp, Homo sapiens
aggcagcgcacacat

SEQ ID NO: 189289 - DNA, 15 bp, Homo sapiens
caggcagcgcacaca

SEQ ID NO: 189290 - DNA, 15 bp, Homo sapiens
tcaggcagcgcacac

SEQ ID NO: 189291 - DNA, 15 bp, Homo sapiens
ttcaggcagcgcaca

SEQ ID NO: 189292 - DNA, 15 bp, Homo sapiens
cttcaggcagcgcac

SEQ ID NO: 189293 - DNA, 15 bp, Homo sapiens
ccttcaggcagcgca

SEQ ID NO: 189294 - DNA, 15 bp, Homo sapiens
cccttcaggcagcgc

SEQ ID NO: 189295 - DNA, 15 bp, Homo sapiens
acccttcaggcagcg

SEQ ID NO: 189296 - DNA, 15 bp, Homo sapiens
cacccttcaggcagc

SEQ ID NO: 189297 - DNA, 15 bp, Homo sapiens
ccacccttcaggcag

SEQ ID NO: 189298 - DNA, 15 bp, Homo sapiens
gccacccttcaggca

SEQ ID NO: 189299 - DNA, 15 bp, Homo sapiens
ggccacccttcaggc

SEQ ID NO: 189300 - DNA, 15 bp, Homo sapiens
gggccacccttcagg

SEQ ID NO: 189301 - DNA, 15 bp, Homo sapiens
agggccacccttcag

SEQ ID NO: 189302 - DNA, 15 bp, Homo sapiens
aagggccacccttca

SEQ ID NO: 189303 - DNA, 15 bp, Homo sapiens
caagggccacccttc

SEQ ID NO: 189304 - DNA, 15 bp, Homo sapiens
gcaagggccaccctt

SEQ ID NO: 189305 - DNA, 15 bp, Homo sapiens
ggcaagggccaccct

SEQ ID NO: 189306 - DNA, 15 bp, Homo sapiens
gggcaagggccaccc

SEQ ID NO: 189307 - DNA, 15 bp, Homo sapiens
tgggcaagggccacc

SEQ ID NO: 189308 - DNA, 15 bp, Homo sapiens
ctgggcaagggccac

SEQ ID NO: 189309 - DNA, 15 bp, Homo sapiens
actgggcaagggcca

SEQ ID NO: 189310 - DNA, 15 bp, Homo sapiens
cactgggcaagggcc

SEQ ID NO: 189311 - DNA, 15 bp, Homo sapiens
gcactgggcaagggc

SEQ ID NO: 189312 - DNA, 15 bp, Homo sapiens
ggcactgggcaaggg

SEQ ID NO: 189313 - DNA, 15 bp, Homo sapiens
aggcactgggcaagg

SEQ ID NO: 189314 - DNA, 15 bp, Homo sapiens
aaggcactgggcaag

SEQ ID NO: 189315 - DNA, 15 bp, Homo sapiens
gaaggcactgggcaa

SEQ ID NO: 189316 - DNA, 15 bp, Homo sapiens
ggaaggcactgggca

SEQ ID NO: 189317 - DNA, 15 bp, Homo sapiens
gggaaggcactgggc

SEQ ID NO: 189318 - DNA, 15 bp, Homo sapiens
ggggaaggcactggg

SEQ ID NO: 189319 - DNA, 15 bp, Homo sapiens
aggggaaggcactgg

SEQ ID NO: 189320 - DNA, 15 bp, Homo sapiens
aaggggaaggcactg

SEQ ID NO: 189321 - DNA, 15 bp, Homo sapiens
caaggggaaggcact

SEQ ID NO: 189322 - DNA, 15 bp, Homo sapiens
gcaaggggaaggcac

SEQ ID NO: 189323 - DNA, 15 bp, Homo sapiens
agcaaggggaaggca

SEQ ID NO: 189324 - DNA, 15 bp, Homo sapiens
cagcaaggggaaggc

SEQ ID NO: 189325 - DNA, 15 bp, Homo sapiens
gcagcaaggggaagg

SEQ ID NO: 189326 - DNA, 15 bp, Homo sapiens
ggcagcaaggggaag

SEQ ID NO: 189327 - DNA, 15 bp, Homo sapiens
gggcagcaaggggaa

SEQ ID NO: 189328 - DNA, 15 bp, Homo sapiens
agggcagcaagggga

SEQ ID NO: 189329 - DNA, 15 bp, Homo sapiens
cagggcagcaagggg

SEQ ID NO: 189330 - DNA, 15 bp, Homo sapiens
acagggcagcaaggg

SEQ ID NO: 189331 - DNA, 15 bp, Homo sapiens
gacagggcagcaagg

SEQ ID NO: 189332 - DNA, 15 bp, Homo sapiens
tgacagggcagcaag

SEQ ID NO: 189333 - DNA, 15 bp, Homo sapiens
ctgacagggcagcaa

SEQ ID NO: 189334 - DNA, 15 bp, Homo sapiens
tctgacagggcagca

SEQ ID NO: 189335 - DNA, 15 bp, Homo sapiens
ttctgacagggcagc

SEQ ID NO: 189336 - DNA, 15 bp, Homo sapiens
attctgacagggcag

SEQ ID NO: 189337 - DNA, 15 bp, Homo sapiens
gattctgacagggca

SEQ ID NO: 189338 - DNA, 15 bp, Homo sapiens
agattctgacagggc

SEQ ID NO: 189339 - DNA, 15 bp, Homo sapiens
tagattctgacaggg

SEQ ID NO: 189340 - DNA, 15 bp, Homo sapiens
ctagattctgacagg

SEQ ID NO: 189341 - DNA, 15 bp, Homo sapiens
cctagattctgacag

SEQ ID NO: 189342 - DNA, 15 bp, Homo sapiens
ccctagattctgaca

SEQ ID NO: 189343 - DNA, 15 bp, Homo sapiens
gccctagattctgac

SEQ ID NO: 189344 - DNA, 15 bp, Homo sapiens
ggccctagattctga

SEQ ID NO: 189345 - DNA, 15 bp, Homo sapiens
tggccctagattctg

SEQ ID NO: 189346 - DNA, 15 bp, Homo sapiens
gtggccctagattct

SEQ ID NO: 189347 - DNA, 15 bp, Homo sapiens
agtggccctagattc

SEQ ID NO: 189348 - DNA, 15 bp, Homo sapiens
cagtggccctagatt

SEQ ID NO: 189349 - DNA, 15 bp, Homo sapiens
acagtggccctagat

SEQ ID NO: 189350 - DNA, 15 bp, Homo sapiens
aacagtggccctaga

SEQ ID NO: 189351 - DNA, 15 bp, Homo sapiens
caacagtggccctag

SEQ ID NO: 189352 - DNA, 15 bp, Homo sapiens
gcaacagtggcccta

SEQ ID NO: 189353 - DNA, 15 bp, Homo sapiens
ggcaacagtggccct

SEQ ID NO: 189354 - DNA, 15 bp, Homo sapiens
tggcaacagtggccc

SEQ ID NO: 189355 - DNA, 15 bp, Homo sapiens
ctggcaacagtggcc

SEQ ID NO: 189356 - DNA, 15 bp, Homo sapiens
tctggcaacagtggc

SEQ ID NO: 189357 - DNA, 15 bp, Homo sapiens
ttctggcaacagtgg

SEQ ID NO: 189358 - DNA, 15 bp, Homo sapiens
tttctggcaacagtg

SEQ ID NO: 189359 - DNA, 15 bp, Homo sapiens
gtttctggcaacagt

SEQ ID NO: 189360 - DNA, 15 bp, Homo sapiens
agtttctggcaacag

SEQ ID NO: 189361 - DNA, 15 bp, Homo sapiens
gagtttctggcaaca

SEQ ID NO: 189362 - DNA, 15 bp, Homo sapiens
agagtttctggcaac

SEQ ID NO: 189363 - DNA, 15 bp, Homo sapiens
cagagtttctggcaa

SEQ ID NO: 189364 - DNA, 15 bp, Homo sapiens
tcagagtttctggca

SEQ ID NO: 189365 - DNA, 15 bp, Homo sapiens
ctcagagtttctggc

SEQ ID NO: 189366 - DNA, 15 bp, Homo sapiens
tctcagagtttctgg

SEQ ID NO: 189367 - DNA, 15 bp, Homo sapiens
ttctcagagtttctg

SEQ ID NO: 189368 - DNA, 15 bp, Homo sapiens
cttctcagagtttct

SEQ ID NO: 189369 - DNA, 15 bp, Homo sapiens
gcttctcagagtttc

SEQ ID NO: 189370 - DNA, 15 bp, Homo sapiens
agcttctcagagttt

SEQ ID NO: 189371 - DNA, 15 bp, Homo sapiens
tagcttctcagagtt

SEQ ID NO: 189372 - DNA, 15 bp, Homo sapiens
ctagcttctcagagt

SEQ ID NO: 189373 - DNA, 15 bp, Homo sapiens
tctagcttctcagag

SEQ ID NO: 189374 - DNA, 15 bp, Homo sapiens
ttctagcttctcaga

SEQ ID NO: 189375 - DNA, 15 bp, Homo sapiens
tttctagcttctcag

SEQ ID NO: 189376 - DNA, 15 bp, Homo sapiens
atttctagcttctca

SEQ ID NO: 189377 - DNA, 15 bp, Homo sapiens
gatttctagcttctc

SEQ ID NO: 189378 - DNA, 15 bp, Homo sapiens
cgatttctagcttct

SEQ ID NO: 189379 - DNA, 15 bp, Homo sapiens
tcgatttctagcttc

SEQ ID NO: 189380 - DNA, 15 bp, Homo sapiens
ctcgatttctagctt

SEQ ID NO: 189381 - DNA, 15 bp, Homo sapiens
tctcgatttctagct

SEQ ID NO: 189382 - DNA, 15 bp, Homo sapiens
gtctcgatttctagc

SEQ ID NO: 189383 - DNA, 15 bp, Homo sapiens
agtctcgatttctag

SEQ ID NO: 189384 - DNA, 15 bp, Homo sapiens
aagtctcgatttcta

SEQ ID NO: 189385 - DNA, 15 bp, Homo sapiens
taagtctcgatttct

SEQ ID NO: 189386 - DNA, 15 bp, Homo sapiens
ataagtctcgatttc

SEQ ID NO: 189387 - DNA, 15 bp, Homo sapiens
cataagtctcgattt

SEQ ID NO: 189388 - DNA, 15 bp, Homo sapiens
acataagtctcgatt

SEQ ID NO: 189389 - DNA, 15 bp, Homo sapiens
cacataagtctcgat

SEQ ID NO: 189390 - DNA, 15 bp, Homo sapiens
tcacataagtctcga

SEQ ID NO: 189391 - DNA, 15 bp, Homo sapiens
ttcacataagtctcg

SEQ ID NO: 189392 - DNA, 15 bp, Homo sapiens
tttcacataagtctc

SEQ ID NO: 189393 - DNA, 15 bp, Homo sapiens
atttcacataagtct

SEQ ID NO: 189394 - DNA, 15 bp, Homo sapiens
gatttcacataagtc

SEQ ID NO: 189395 - DNA, 15 bp, Homo sapiens
agatttcacataagt

SEQ ID NO: 189396 - DNA, 15 bp, Homo sapiens
cagatttcacataag

SEQ ID NO: 189397 - DNA, 15 bp, Homo sapiens
tcagatttcacataa

SEQ ID NO: 189398 - DNA, 15 bp, Homo sapiens
atcagatttcacata

SEQ ID NO: 189399 - DNA, 15 bp, Homo sapiens
aatcagatttcacat

SEQ ID NO: 189400 - DNA, 15 bp, Homo sapiens
aaatcagatttcaca

SEQ ID NO: 189401 - DNA, 15 bp, Homo sapiens
aaaatcagatttcac

SEQ ID NO: 189402 - DNA, 15 bp, Homo sapiens
aaaaatcagatttca

SEQ ID NO: 189403 - DNA, 15 bp, Homo sapiens
taaaaatcagatttc

SEQ ID NO: 189404 - DNA, 15 bp, Homo sapiens
ctaaaaatcagattt

SEQ ID NO: 189405 - DNA, 15 bp, Homo sapiens
cctaaaaatcagatt

SEQ ID NO: 189406 - DNA, 15 bp, Homo sapiens
acctaaaaatcagat

SEQ ID NO: 189407 - DNA, 15 bp, Homo sapiens
cacctaaaaatcaga

SEQ ID NO: 189408 - DNA, 15 bp, Homo sapiens
gcacctaaaaatcag

SEQ ID NO: 189409 - DNA, 15 bp, Homo sapiens
ggcacctaaaaatca

SEQ ID NO: 189410 - DNA, 15 bp, Homo sapiens
tggcacctaaaaatc

SEQ ID NO: 189411 - DNA, 15 bp, Homo sapiens
ctggcacctaaaaat

SEQ ID NO: 189412 - DNA, 15 bp, Homo sapiens
tctggcacctaaaaa

SEQ ID NO: 189413 - DNA, 15 bp, Homo sapiens
atctggcacctaaaa

SEQ ID NO: 189414 - DNA, 15 bp, Homo sapiens
aatctggcacctaaa

SEQ ID NO: 189415 - DNA, 15 bp, Homo sapiens
taatctggcacctaa

SEQ ID NO: 189416 - DNA, 15 bp, Homo sapiens
ctaatctggcaccta

SEQ ID NO: 189417 - DNA, 15 bp, Homo sapiens
tctaatctggcacct

SEQ ID NO: 189418 - DNA, 15 bp, Homo sapiens
atctaatctggcacc

SEQ ID NO: 189419 - DNA, 15 bp, Homo sapiens
aatctaatctggcac

SEQ ID NO: 189420 - DNA, 15 bp, Homo sapiens
caatctaatctggca

SEQ ID NO: 189421 - DNA, 15 bp, Homo sapiens
gcaatctaatctggc

SEQ ID NO: 189422 - DNA, 15 bp, Homo sapiens
agcaatctaatctgg

SEQ ID NO: 189423 - DNA, 15 bp, Homo sapiens
aagcaatctaatctg

SEQ ID NO: 189424 - DNA, 15 bp, Homo sapiens
aaagcaatctaatct

SEQ ID NO: 189425 - DNA, 15 bp, Homo sapiens
aaaagcaatctaatc

SEQ ID NO: 189426 - DNA, 15 bp, Homo sapiens
aaaaagcaatctaat

SEQ ID NO: 189427 - DNA, 15 bp, Homo sapiens
gaaaaagcaatctaa

SEQ ID NO: 189428 - DNA, 15 bp, Homo sapiens
ggaaaaagcaatcta

SEQ ID NO: 189429 - DNA, 15 bp, Homo sapiens
cggaaaaagcaatct

SEQ ID NO: 189430 - DNA, 15 bp, Homo sapiens
acggaaaaagcaatc

SEQ ID NO: 189431 - DNA, 15 bp, Homo sapiens
aacggaaaaagcaat

SEQ ID NO: 189432 - DNA, 15 bp, Homo sapiens
aaacggaaaaagcaa

SEQ ID NO: 189433 - DNA, 15 bp, Homo sapiens
gaaacggaaaaagca

SEQ ID NO: 189434 - DNA, 15 bp, Homo sapiens
tgaaacggaaaaagc

SEQ ID NO: 189435 - DNA, 15 bp, Homo sapiens
atgaaacggaaaaag

SEQ ID NO: 189436 - DNA, 15 bp, Homo sapiens
aatgaaacggaaaaa

SEQ ID NO: 189437 - DNA, 15 bp, Homo sapiens
caatgaaacggaaaa

SEQ ID NO: 189438 - DNA, 15 bp, Homo sapiens
tcaatgaaacggaaa

SEQ ID NO: 189439 - DNA, 15 bp, Homo sapiens
atcaatgaaacggaa

SEQ ID NO: 189440 - DNA, 15 bp, Homo sapiens
aatcaatgaaacgga

SEQ ID NO: 189441 - DNA, 15 bp, Homo sapiens
aaatcaatgaaacgg

SEQ ID NO: 189442 - DNA, 15 bp, Homo sapiens
gaaatcaatgaaacg

SEQ ID NO: 189443 - DNA, 15 bp, Homo sapiens
agaaatcaatgaaac

SEQ ID NO: 189444 - DNA, 15 bp, Homo sapiens
tagaaatcaatgaaa

SEQ ID NO: 189445 - DNA, 15 bp, Homo sapiens
gtagaaatcaatgaa

SEQ ID NO: 189446 - DNA, 15 bp, Homo sapiens
agtagaaatcaatga

SEQ ID NO: 189447 - DNA, 15 bp, Homo sapiens
gagtagaaatcaatg

SEQ ID NO: 189448 - DNA, 15 bp, Homo sapiens
agagtagaaatcaat

SEQ ID NO: 189449 - DNA, 15 bp, Homo sapiens
aagagtagaaatcaa

SEQ ID NO: 189450 - DNA, 15 bp, Homo sapiens
taagagtagaaatca

SEQ ID NO: 189451 - DNA, 15 bp, Homo sapiens
ttaagagtagaaatc

SEQ ID NO: 189452 - DNA, 15 bp, Homo sapiens
attaagagtagaaat

SEQ ID NO: 189453 - DNA, 15 bp, Homo sapiens
cattaagagtagaaa

SEQ ID NO: 189454 - DNA, 15 bp, Homo sapiens
acattaagagtagaa

SEQ ID NO: 189455 - DNA, 15 bp, Homo sapiens
aacattaagagtaga

SEQ ID NO: 189456 - DNA, 15 bp, Homo sapiens
taacattaagagtag

SEQ ID NO: 189457 - DNA, 15 bp, Homo sapiens
gtaacattaagagta

SEQ ID NO: 189458 - DNA, 15 bp, Homo sapiens
agtaacattaagagt

SEQ ID NO: 189459 - DNA, 15 bp, Homo sapiens
tagtaacattaagag

SEQ ID NO: 189460 - DNA, 15 bp, Homo sapiens
ttagtaacattaaga

SEQ ID NO: 189461 - DNA, 15 bp, Homo sapiens
attagtaacattaag

SEQ ID NO: 189462 - DNA, 15 bp, Homo sapiens
aattagtaacattaa

SEQ ID NO: 189463 - DNA, 15 bp, Homo sapiens
gaattagtaacatta

SEQ ID NO: 189464 - DNA, 15 bp, Homo sapiens
tgaattagtaacatt

SEQ ID NO: 189465 - DNA, 15 bp, Homo sapiens
atgaattagtaacat

SEQ ID NO: 189466 - DNA, 15 bp, Homo sapiens
catgaattagtaaca

SEQ ID NO: 189467 - DNA, 15 bp, Homo sapiens
gcatgaattagtaac

SEQ ID NO: 189468 - DNA, 15 bp, Homo sapiens
agcatgaattagtaa

SEQ ID NO: 189469 - DNA, 15 bp, Homo sapiens
aagcatgaattagta

SEQ ID NO: 189470 - DNA, 15 bp, Homo sapiens
gaagcatgaattagt

SEQ ID NO: 189471 - DNA, 15 bp, Homo sapiens
agaagcatgaattag

SEQ ID NO: 189472 - DNA, 15 bp, Homo sapiens
tagaagcatgaatta

SEQ ID NO: 189473 - DNA, 15 bp, Homo sapiens
gtagaagcatgaatt

SEQ ID NO: 189474 - DNA, 15 bp, Homo sapiens
agtagaagcatgaat

SEQ ID NO: 189475 - DNA, 15 bp, Homo sapiens
gagtagaagcatgaa

SEQ ID NO: 189476 - DNA, 15 bp, Homo sapiens
tgagtagaagcatga

SEQ ID NO: 189477 - DNA, 15 bp, Homo sapiens
gtgagtagaagcatg

SEQ ID NO: 189478 - DNA, 15 bp, Homo sapiens
agtgagtagaagcat

SEQ ID NO: 189479 - DNA, 15 bp, Homo sapiens
aagtgagtagaagca

SEQ ID NO: 189480 - DNA, 15 bp, Homo sapiens
caagtgagtagaagc

SEQ ID NO: 189481 - DNA, 15 bp, Homo sapiens
ccaagtgagtagaag

SEQ ID NO: 189482 - DNA, 15 bp, Homo sapiens
accaagtgagtagaa

SEQ ID NO: 189483 - DNA, 15 bp, Homo sapiens
aaccaagtgagtaga

SEQ ID NO: 189484 - DNA, 15 bp, Homo sapiens
aaaccaagtgagtag

SEQ ID NO: 189485 - DNA, 15 bp, Homo sapiens
aaaaccaagtgagta

SEQ ID NO: 189486 - DNA, 15 bp, Homo sapiens
aaaaaccaagtgagt

SEQ ID NO: 189487 - DNA, 15 bp, Homo sapiens
aaaaaaccaagtgag

SEQ ID NO: 189488 - DNA, 15 bp, Homo sapiens
caaaaaaccaagtga

SEQ ID NO: 189489 - DNA, 15 bp, Homo sapiens
acaaaaaaccaagtg

SEQ ID NO: 189490 - DNA, 15 bp, Homo sapiens
aacaaaaaaccaagt

SEQ ID NO: 189491 - DNA, 15 bp, Homo sapiens
aaacaaaaaaccaag

SEQ ID NO: 189492 - DNA, 15 bp, Homo sapiens
caaacaaaaaaccaa

SEQ ID NO: 189493 - DNA, 15 bp, Homo sapiens
acaaacaaaaaacca

SEQ ID NO: 189494 - DNA, 15 bp, Homo sapiens
aacaaacaaaaaacc

SEQ ID NO: 189495 - DNA, 15 bp, Homo sapiens
aaacaaacaaaaaac

SEQ ID NO: 189496 - DNA, 15 bp, Homo sapiens
caaacaaacaaaaaa

SEQ ID NO: 189497 - DNA, 15 bp, Homo sapiens
acaaacaaacaaaaa

SEQ ID NO: 189498 - DNA, 15 bp, Homo sapiens
aacaaacaaacaaaa

SEQ ID NO: 189499 - DNA, 15 bp, Homo sapiens
caacaaacaaacaaa

SEQ ID NO: 189500 - DNA, 15 bp, Homo sapiens
acaacaaacaaacaa

SEQ ID NO: 189501 - DNA, 15 bp, Homo sapiens
aacaacaaacaaaca

SEQ ID NO: 189502 - DNA, 15 bp, Homo sapiens
aaacaacaaacaaac

SEQ ID NO: 189503 - DNA, 15 bp, Homo sapiens
aaaacaacaaacaaa

SEQ ID NO: 189504 - DNA, 15 bp, Homo sapiens
caaaacaacaaacaa

SEQ ID NO: 189505 - DNA, 15 bp, Homo sapiens
acaaaacaacaaaca

SEQ ID NO: 189506 - DNA, 15 bp, Homo sapiens
aacaaaacaacaaac

SEQ ID NO: 189507 - DNA, 15 bp, Homo sapiens
aaacaaaacaacaaa

SEQ ID NO: 189508 - DNA, 15 bp, Homo sapiens
aaaacaaaacaacaa

SEQ ID NO: 189509 - DNA, 15 bp, Homo sapiens
caaaacaaaacaaca

SEQ ID NO: 189510 - DNA, 15 bp, Homo sapiens
tcaaaacaaaacaac

SEQ ID NO: 189511 - DNA, 15 bp, Homo sapiens
ctcaaaacaaaacaa

SEQ ID NO: 189512 - DNA, 15 bp, Homo sapiens
tctcaaaacaaaaca

SEQ ID NO: 189513 - DNA, 15 bp, Homo sapiens
atctcaaaacaaaac

SEQ ID NO: 189514 - DNA, 15 bp, Homo sapiens
catctcaaaacaaaa

SEQ ID NO: 189515 - DNA, 15 bp, Homo sapiens
ccatctcaaaacaaa

SEQ ID NO: 189516 - DNA, 15 bp, Homo sapiens
tccatctcaaaacaa

SEQ ID NO: 189517 - DNA, 15 bp, Homo sapiens
ttccatctcaaaaca

SEQ ID NO: 189518 - DNA, 15 bp, Homo sapiens
attccatctcaaaac

SEQ ID NO: 189519 - DNA, 15 bp, Homo sapiens
gattccatctcaaaa

SEQ ID NO: 189520 - DNA, 15 bp, Homo sapiens
agattccatctcaaa

SEQ ID NO: 189521 - DNA, 15 bp, Homo sapiens
gagattccatctcaa

SEQ ID NO: 189522 - DNA, 15 bp, Homo sapiens
cgagattccatctca

SEQ ID NO: 189523 - DNA, 15 bp, Homo sapiens
gcgagattccatctc

SEQ ID NO: 189524 - DNA, 15 bp, Homo sapiens
agcgagattccatct

SEQ ID NO: 189525 - DNA, 15 bp, Homo sapiens
gagcgagattccatc

SEQ ID NO: 189526 - DNA, 15 bp, Homo sapiens
agagcgagattccat

SEQ ID NO: 189527 - DNA, 15 bp, Homo sapiens
cagagcgagattcca

SEQ ID NO: 189528 - DNA, 15 bp, Homo sapiens
acagagcgagattcc

SEQ ID NO: 189529 - DNA, 15 bp, Homo sapiens
gacagagcgagattc

SEQ ID NO: 189530 - DNA, 15 bp, Homo sapiens
tgacagagcgagatt

SEQ ID NO: 189531 - DNA, 15 bp, Homo sapiens
gtgacagagcgagat

SEQ ID NO: 189532 - DNA, 15 bp, Homo sapiens
tgtgacagagcgaga

SEQ ID NO: 189533 - DNA, 15 bp, Homo sapiens
ctgtgacagagcgag

SEQ ID NO: 189534 - DNA, 15 bp, Homo sapiens
actgtgacagagcga

SEQ ID NO: 189535 - DNA, 15 bp, Homo sapiens
cactgtgacagagcg

SEQ ID NO: 189536 - DNA, 15 bp, Homo sapiens
ccactgtgacagagc

SEQ ID NO: 189537 - DNA, 15 bp, Homo sapiens
gccactgtgacagag

SEQ ID NO: 189538 - DNA, 15 bp, Homo sapiens
cgccactgtgacaga

SEQ ID NO: 189539 - DNA, 15 bp, Homo sapiens
gcgccactgtgacag

SEQ ID NO: 189540 - DNA, 15 bp, Homo sapiens
tgcgccactgtgaca

SEQ ID NO: 189541 - DNA, 15 bp, Homo sapiens
ttgcgccactgtgac

SEQ ID NO: 189542 - DNA, 15 bp, Homo sapiens
attgcgccactgtga

SEQ ID NO: 189543 - DNA, 15 bp, Homo sapiens
gattgcgccactgtg

SEQ ID NO: 189544 - DNA, 15 bp, Homo sapiens
agattgcgccactgt

SEQ ID NO: 189545 - DNA, 15 bp, Homo sapiens
gagattgcgccactg

SEQ ID NO: 189546 - DNA, 15 bp, Homo sapiens
tgagattgcgccact

SEQ ID NO: 189547 - DNA, 15 bp, Homo sapiens
ctgagattgcgccac

SEQ ID NO: 189548 - DNA, 15 bp, Homo sapiens
gctgagattgcgcca

SEQ ID NO: 189549 - DNA, 15 bp, Homo sapiens
agctgagattgcgcc

SEQ ID NO: 189550 - DNA, 15 bp, Homo sapiens
aagctgagattgcgc

SEQ ID NO: 189551 - DNA, 15 bp, Homo sapiens
taagctgagattgcg

SEQ ID NO: 189552 - DNA, 15 bp, Homo sapiens
gtaagctgagattgc

SEQ ID NO: 189553 - DNA, 15 bp, Homo sapiens
agtaagctgagattg

SEQ ID NO: 189554 - DNA, 15 bp, Homo sapiens
tagtaagctgagatt

SEQ ID NO: 189555 - DNA, 15 bp, Homo sapiens
gtagtaagctgagat

SEQ ID NO: 189556 - DNA, 15 bp, Homo sapiens
tgtagtaagctgaga

SEQ ID NO: 189557 - DNA, 15 bp, Homo sapiens
ttgtagtaagctgag

SEQ ID NO: 189558 - DNA, 15 bp, Homo sapiens
gttgtagtaagctga

SEQ ID NO: 189559 - DNA, 15 bp, Homo sapiens
ggttgtagtaagctg

SEQ ID NO: 189560 - DNA, 15 bp, Homo sapiens
aggttgtagtaagct

SEQ ID NO: 189561 - DNA, 15 bp, Homo sapiens
gaggttgtagtaagc

SEQ ID NO: 189562 - DNA, 15 bp, Homo sapiens
agaggttgtagtaag

SEQ ID NO: 189563 - DNA, 15 bp, Homo sapiens
cagaggttgtagtaa

SEQ ID NO: 189564 - DNA, 15 bp, Homo sapiens
gcagaggttgtagta

SEQ ID NO: 189565 - DNA, 15 bp, Homo sapiens
ggcagaggttgtagt

SEQ ID NO: 189566 - DNA, 15 bp, Homo sapiens
aggcagaggttgtag

SEQ ID NO: 189567 - DNA, 15 bp, Homo sapiens
gaggcagaggttgta

SEQ ID NO: 189568 - DNA, 15 bp, Homo sapiens
ggaggcagaggttgt

SEQ ID NO: 189569 - DNA, 15 bp, Homo sapiens
gggaggcagaggttg

SEQ ID NO: 189570 - DNA, 15 bp, Homo sapiens
ggggaggcagaggtt

SEQ ID NO: 189571 - DNA, 15 bp, Homo sapiens
cggggaggcagaggt

SEQ ID NO: 189572 - DNA, 15 bp, Homo sapiens
ccggggaggcagagg

SEQ ID NO: 189573 - DNA, 15 bp, Homo sapiens
accggggaggcagag

SEQ ID NO: 189574 - DNA, 15 bp, Homo sapiens
aaccggggaggcaga

SEQ ID NO: 189575 - DNA, 15 bp, Homo sapiens
gaaccggggaggcag

SEQ ID NO: 189576 - DNA, 15 bp, Homo sapiens
tgaaccggggaggca

SEQ ID NO: 189577 - DNA, 15 bp, Homo sapiens
ttgaaccggggaggc

SEQ ID NO: 189578 - DNA, 15 bp, Homo sapiens
cttgaaccggggagg

SEQ ID NO: 189579 - DNA, 15 bp, Homo sapiens
acttgaaccggggag

SEQ ID NO: 189580 - DNA, 15 bp, Homo sapiens
cacttgaaccgggga

SEQ ID NO: 189581 - DNA, 15 bp, Homo sapiens
tcacttgaaccgggg

SEQ ID NO: 189582 - DNA, 15 bp, Homo sapiens
atcacttgaaccggg

SEQ ID NO: 189583 - DNA, 15 bp, Homo sapiens
aatcacttgaaccgg

SEQ ID NO: 189584 - DNA, 15 bp, Homo sapiens
gaatcacttgaaccg

SEQ ID NO: 189585 - DNA, 15 bp, Homo sapiens
agaatcacttgaacc

SEQ ID NO: 189586 - DNA, 15 bp, Homo sapiens
gagaatcacttgaac

SEQ ID NO: 189587 - DNA, 15 bp, Homo sapiens
ggagaatcacttgaa

SEQ ID NO: 189588 - DNA, 15 bp, Homo sapiens
aggagaatcacttga

SEQ ID NO: 189589 - DNA, 15 bp, Homo sapiens
caggagaatcacttg

SEQ ID NO: 189590 - DNA, 15 bp, Homo sapiens
gcaggagaatcactt

SEQ ID NO: 189591 - DNA, 15 bp, Homo sapiens
ggcaggagaatcact

SEQ ID NO: 189592 - DNA, 15 bp, Homo sapiens
aggcaggagaatcac

SEQ ID NO: 189593 - DNA, 15 bp, Homo sapiens
gaggcaggagaatca

SEQ ID NO: 189594 - DNA, 15 bp, Homo sapiens
tgaggcaggagaatc

SEQ ID NO: 189595 - DNA, 15 bp, Homo sapiens
ctgaggcaggagaat

SEQ ID NO: 189596 - DNA, 15 bp, Homo sapiens
actgaggcaggagaa

SEQ ID NO: 189597 - DNA, 15 bp, Homo sapiens
gactgaggcaggaga

SEQ ID NO: 189598 - DNA, 15 bp, Homo sapiens
agactgaggcaggag

SEQ ID NO: 189599 - DNA, 15 bp, Homo sapiens
gagactgaggcagga

SEQ ID NO: 189600 - DNA, 15 bp, Homo sapiens
ggagactgaggcagg

SEQ ID NO: 189601 - DNA, 15 bp, Homo sapiens
gggagactgaggcag

SEQ ID NO: 189602 - DNA, 15 bp, Homo sapiens
tgggagactgaggca

SEQ ID NO: 189603 - DNA, 15 bp, Homo sapiens
ttgggagactgaggc

SEQ ID NO: 189604 - DNA, 15 bp, Homo sapiens
cttgggagactgagg

SEQ ID NO: 189605 - DNA, 15 bp, Homo sapiens
acttgggagactgag

SEQ ID NO: 189606 - DNA, 15 bp, Homo sapiens
tacttgggagactga

SEQ ID NO: 189607 - DNA, 15 bp, Homo sapiens
ctacttgggagactg

SEQ ID NO: 189608 - DNA, 15 bp, Homo sapiens
gctacttgggagact

SEQ ID NO: 189609 - DNA, 15 bp, Homo sapiens
agctacttgggagac

SEQ ID NO: 189610 - DNA, 15 bp, Homo sapiens
cagctacttgggaga

SEQ ID NO: 189611 - DNA, 15 bp, Homo sapiens
ccagctacttgggag

SEQ ID NO: 189612 - DNA, 15 bp, Homo sapiens
cccagctacttggga

SEQ ID NO: 189613 - DNA, 15 bp, Homo sapiens
tcccagctacttggg

SEQ ID NO: 189614 - DNA, 15 bp, Homo sapiens
gtcccagctacttgg

SEQ ID NO: 189615 - DNA, 15 bp, Homo sapiens
agtcccagctacttg

SEQ ID NO: 189616 - DNA, 15 bp, Homo sapiens
tagtcccagctactt

SEQ ID NO: 189617 - DNA, 15 bp, Homo sapiens
gtagtcccagctact

SEQ ID NO: 189618 - DNA, 15 bp, Homo sapiens
tgtagtcccagctac

SEQ ID NO: 189619 - DNA, 15 bp, Homo sapiens
ctgtagtcccagcta

SEQ ID NO: 189620 - DNA, 15 bp, Homo sapiens
cctgtagtcccagct

SEQ ID NO: 189621 - DNA, 15 bp, Homo sapiens
acctgtagtcccagc

SEQ ID NO: 189622 - DNA, 15 bp, Homo sapiens
cacctgtagtcccag

SEQ ID NO: 189623 - DNA, 15 bp, Homo sapiens
gcacctgtagtccca

SEQ ID NO: 189624 - DNA, 15 bp, Homo sapiens
ggcacctgtagtccc

SEQ ID NO: 189625 - DNA, 15 bp, Homo sapiens
gggcacctgtagtcc

SEQ ID NO: 189626 - DNA, 15 bp, Homo sapiens
cgggcacctgtagtc

SEQ ID NO: 189627 - DNA, 15 bp, Homo sapiens
gcgggcacctgtagt

SEQ ID NO: 189628 - DNA, 15 bp, Homo sapiens
agcgggcacctgtag

SEQ ID NO: 189629 - DNA, 15 bp, Homo sapiens
cagcgggcacctgta

SEQ ID NO: 189630 - DNA, 15 bp, Homo sapiens
gcagcgggcacctgt

SEQ ID NO: 189631 - DNA, 15 bp, Homo sapiens
ggcagcgggcacctg

SEQ ID NO: 189632 - DNA, 15 bp, Homo sapiens
tggcagcgggcacct

SEQ ID NO: 189633 - DNA, 15 bp, Homo sapiens
gtggcagcgggcacc

SEQ ID NO: 189634 - DNA, 15 bp, Homo sapiens
tgtggcagcgggcac

SEQ ID NO: 189635 - DNA, 15 bp, Homo sapiens
gtgtggcagcgggca

SEQ ID NO: 189636 - DNA, 15 bp, Homo sapiens
ggtgtggcagcgggc

SEQ ID NO: 189637 - DNA, 15 bp, Homo sapiens
aggtgtggcagcggg

SEQ ID NO: 189638 - DNA, 15 bp, Homo sapiens
taggtgtggcagcgg

SEQ ID NO: 189639 - DNA, 15 bp, Homo sapiens
ctaggtgtggcagcg

SEQ ID NO: 189640 - DNA, 15 bp, Homo sapiens
gctaggtgtggcagc

SEQ ID NO: 189641 - DNA, 15 bp, Homo sapiens
agctaggtgtggcag

SEQ ID NO: 189642 - DNA, 15 bp, Homo sapiens
tagctaggtgtggca

SEQ ID NO: 189643 - DNA, 15 bp, Homo sapiens
ctagctaggtgtggc

SEQ ID NO: 189644 - DNA, 15 bp, Homo sapiens
actagctaggtgtgg

SEQ ID NO: 189645 - DNA, 15 bp, Homo sapiens
aactagctaggtgtg

SEQ ID NO: 189646 - DNA, 15 bp, Homo sapiens
aaactagctaggtgt

SEQ ID NO: 189647 - DNA, 15 bp, Homo sapiens
aaaactagctaggtg

SEQ ID NO: 189648 - DNA, 15 bp, Homo sapiens
aaaaactagctaggt

SEQ ID NO: 189649 - DNA, 15 bp, Homo sapiens
caaaaactagctagg

SEQ ID NO: 189650 - DNA, 15 bp, Homo sapiens
acaaaaactagctag

SEQ ID NO: 189651 - DNA, 15 bp, Homo sapiens
tacaaaaactagcta

SEQ ID NO: 189652 - DNA, 15 bp, Homo sapiens
atacaaaaactagct

SEQ ID NO: 189653 - DNA, 15 bp, Homo sapiens
aatacaaaaactagc

SEQ ID NO: 189654 - DNA, 15 bp, Homo sapiens
aaatacaaaaactag

SEQ ID NO: 189655 - DNA, 15 bp, Homo sapiens
aaaatacaaaaacta

SEQ ID NO: 189656 - DNA, 15 bp, Homo sapiens
aaaaatacaaaaact

SEQ ID NO: 189657 - DNA, 15 bp, Homo sapiens
caaaaatacaaaaac

SEQ ID NO: 189658 - DNA, 15 bp, Homo sapiens
ccaaaaatacaaaaa

SEQ ID NO: 189659 - DNA, 15 bp, Homo sapiens
accaaaaatacaaaa

SEQ ID NO: 189660 - DNA, 15 bp, Homo sapiens
taccaaaaatacaaa

SEQ ID NO: 189661 - DNA, 15 bp, Homo sapiens
ctaccaaaaatacaa

SEQ ID NO: 189662 - DNA, 15 bp, Homo sapiens
tctaccaaaaataca

SEQ ID NO: 189663 - DNA, 15 bp, Homo sapiens
ctctaccaaaaatac

SEQ ID NO: 189664 - DNA, 15 bp, Homo sapiens
tctctaccaaaaata

SEQ ID NO: 189665 - DNA, 15 bp, Homo sapiens
gtctctaccaaaaat

SEQ ID NO: 189666 - DNA, 15 bp, Homo sapiens
cgtctctaccaaaaa

SEQ ID NO: 189667 - DNA, 15 bp, Homo sapiens
ccgtctctaccaaaa

SEQ ID NO: 189668 - DNA, 15 bp, Homo sapiens
cccgtctctaccaaa

SEQ ID NO: 189669 - DNA, 15 bp, Homo sapiens
ccccgtctctaccaa

SEQ ID NO: 189670 - DNA, 15 bp, Homo sapiens
accccgtctctacca

SEQ ID NO: 189671 - DNA, 15 bp, Homo sapiens
aaccccgtctctacc

SEQ ID NO: 189672 - DNA, 15 bp, Homo sapiens
aaaccccgtctctac

SEQ ID NO: 189673 - DNA, 15 bp, Homo sapiens
gaaaccccgtctcta

SEQ ID NO: 189674 - DNA, 15 bp, Homo sapiens
tgaaaccccgtctct

SEQ ID NO: 189675 - DNA, 15 bp, Homo sapiens
gtgaaaccccgtctc

SEQ ID NO: 189676 - DNA, 15 bp, Homo sapiens
ggtgaaaccccgtct

SEQ ID NO: 189677 - DNA, 15 bp, Homo sapiens
tggtgaaaccccgtc

SEQ ID NO: 189678 - DNA, 15 bp, Homo sapiens
atggtgaaaccccgt

SEQ ID NO: 189679 - DNA, 15 bp, Homo sapiens
catggtgaaaccccg

SEQ ID NO: 189680 - DNA, 15 bp, Homo sapiens
acatggtgaaacccc

SEQ ID NO: 189681 - DNA, 15 bp, Homo sapiens
aacatggtgaaaccc

SEQ ID NO: 189682 - DNA, 15 bp, Homo sapiens
caacatggtgaaacc

SEQ ID NO: 189683 - DNA, 15 bp, Homo sapiens
ccaacatggtgaaac

SEQ ID NO: 189684 - DNA, 15 bp, Homo sapiens
gccaacatggtgaaa

SEQ ID NO: 189685 - DNA, 15 bp, Homo sapiens
ggccaacatggtgaa

SEQ ID NO: 189686 - DNA, 15 bp, Homo sapiens
tggccaacatggtga

SEQ ID NO: 189687 - DNA, 15 bp, Homo sapiens
ctggccaacatggtg

SEQ ID NO: 189688 - DNA, 15 bp, Homo sapiens
cctggccaacatggt

SEQ ID NO: 189689 - DNA, 15 bp, Homo sapiens
gcctggccaacatgg

SEQ ID NO: 189690 - DNA, 15 bp, Homo sapiens
agcctggccaacatg

SEQ ID NO: 189691 - DNA, 15 bp, Homo sapiens
cagcctggccaacat

SEQ ID NO: 189692 - DNA, 15 bp, Homo sapiens
ccagcctggccaaca

SEQ ID NO: 189693 - DNA, 15 bp, Homo sapiens
accagcctggccaac

SEQ ID NO: 189694 - DNA, 15 bp, Homo sapiens
gaccagcctggccaa

SEQ ID NO: 189695 - DNA, 15 bp, Homo sapiens
agaccagcctggcca

SEQ ID NO: 189696 - DNA, 15 bp, Homo sapiens
gagaccagcctggcc

SEQ ID NO: 189697 - DNA, 15 bp, Homo sapiens
cgagaccagcctggc

SEQ ID NO: 189698 - DNA, 15 bp, Homo sapiens
tcgagaccagcctgg

SEQ ID NO: 189699 - DNA, 15 bp, Homo sapiens
ttcgagaccagcctg

SEQ ID NO: 189700 - DNA, 15 bp, Homo sapiens
gttcgagaccagcct

SEQ ID NO: 189701 - DNA, 15 bp, Homo sapiens
agttcgagaccagcc

SEQ ID NO: 189702 - DNA, 15 bp, Homo sapiens
gagttcgagaccagc

SEQ ID NO: 189703 - DNA, 15 bp, Homo sapiens
ggagttcgagaccag

SEQ ID NO: 189704 - DNA, 15 bp, Homo sapiens
aggagttcgagacca

SEQ ID NO: 189705 - DNA, 15 bp, Homo sapiens
caggagttcgagacc

SEQ ID NO: 189706 - DNA, 15 bp, Homo sapiens
ccaggagttcgagac

SEQ ID NO: 189707 - DNA, 15 bp, Homo sapiens
gccaggagttcgaga

SEQ ID NO: 189708 - DNA, 15 bp, Homo sapiens
ggccaggagttcgag

SEQ ID NO: 189709 - DNA, 15 bp, Homo sapiens
aggccaggagttcga

SEQ ID NO: 189710 - DNA, 15 bp, Homo sapiens
gaggccaggagttcg

SEQ ID NO: 189711 - DNA, 15 bp, Homo sapiens
tgaggccaggagttc

SEQ ID NO: 189712 - DNA, 15 bp, Homo sapiens
ctgaggccaggagtt

SEQ ID NO: 189713 - DNA, 15 bp, Homo sapiens
cctgaggccaggagt

SEQ ID NO: 189714 - DNA, 15 bp, Homo sapiens
acctgaggccaggag

SEQ ID NO: 189715 - DNA, 15 bp, Homo sapiens
aacctgaggccagga

SEQ ID NO: 189716 - DNA, 15 bp, Homo sapiens
taacctgaggccagg

SEQ ID NO: 189717 - DNA, 15 bp, Homo sapiens
ataacctgaggccag

SEQ ID NO: 189718 - DNA, 15 bp, Homo sapiens
gataacctgaggcca

SEQ ID NO: 189719 - DNA, 15 bp, Homo sapiens
ggataacctgaggcc

SEQ ID NO: 189720 - DNA, 15 bp, Homo sapiens
tggataacctgaggc

SEQ ID NO: 189721 - DNA, 15 bp, Homo sapiens
gtggataacctgagg

SEQ ID NO: 189722 - DNA, 15 bp, Homo sapiens
ggtggataacctgag

SEQ ID NO: 189723 - DNA, 15 bp, Homo sapiens
aggtggataacctga

SEQ ID NO: 189724 - DNA, 15 bp, Homo sapiens
caggtggataacctg

SEQ ID NO: 189725 - DNA, 15 bp, Homo sapiens
gcaggtggataacct

SEQ ID NO: 189726 - DNA, 15 bp, Homo sapiens
ggcaggtggataacc

SEQ ID NO: 189727 - DNA, 15 bp, Homo sapiens
aggcaggtggataac

SEQ ID NO: 189728 - DNA, 15 bp, Homo sapiens
gaggcaggtggataa

SEQ ID NO: 189729 - DNA, 15 bp, Homo sapiens
tgaggcaggtggata

SEQ ID NO: 189730 - DNA, 15 bp, Homo sapiens
ctgaggcaggtggat

SEQ ID NO: 189731 - DNA, 15 bp, Homo sapiens
gctgaggcaggtgga

SEQ ID NO: 189732 - DNA, 15 bp, Homo sapiens
ggctgaggcaggtgg

SEQ ID NO: 189733 - DNA, 15 bp, Homo sapiens
aggctgaggcaggtg

SEQ ID NO: 189734 - DNA, 15 bp, Homo sapiens
gaggctgaggcaggt

SEQ ID NO: 189735 - DNA, 15 bp, Homo sapiens
ggaggctgaggcagg

SEQ ID NO: 189736 - DNA, 15 bp, Homo sapiens
gggaggctgaggcag

SEQ ID NO: 189737 - DNA, 15 bp, Homo sapiens
tgggaggctgaggca

SEQ ID NO: 189738 - DNA, 15 bp, Homo sapiens
ttgggaggctgaggc

SEQ ID NO: 189739 - DNA, 15 bp, Homo sapiens
tttgggaggctgagg

SEQ ID NO: 189740 - DNA, 15 bp, Homo sapiens
ctttgggaggctgag

SEQ ID NO: 189741 - DNA, 15 bp, Homo sapiens
actttgggaggctga

SEQ ID NO: 189742 - DNA, 15 bp, Homo sapiens
cactttgggaggctg

SEQ ID NO: 189743 - DNA, 15 bp, Homo sapiens
gcactttgggaggct

SEQ ID NO: 189744 - DNA, 15 bp, Homo sapiens
agcactttgggaggc

SEQ ID NO: 189745 - DNA, 15 bp, Homo sapiens
cagcactttgggagg

SEQ ID NO: 189746 - DNA, 15 bp, Homo sapiens
ccagcactttgggag

SEQ ID NO: 189747 - DNA, 15 bp, Homo sapiens
cccagcactttggga

SEQ ID NO: 189748 - DNA, 15 bp, Homo sapiens
tcccagcactttggg

SEQ ID NO: 189749 - DNA, 15 bp, Homo sapiens
atcccagcactttgg

SEQ ID NO: 189750 - DNA, 15 bp, Homo sapiens
aatcccagcactttg

SEQ ID NO: 189751 - DNA, 15 bp, Homo sapiens
taatcccagcacttt

SEQ ID NO: 189752 - DNA, 15 bp, Homo sapiens
gtaatcccagcactt

SEQ ID NO: 189753 - DNA, 15 bp, Homo sapiens
tgtaatcccagcact

SEQ ID NO: 189754 - DNA, 15 bp, Homo sapiens
ctgtaatcccagcac

SEQ ID NO: 189755 - DNA, 15 bp, Homo sapiens
cctgtaatcccagca

SEQ ID NO: 189756 - DNA, 15 bp, Homo sapiens
tcctgtaatcccagc

SEQ ID NO: 189757 - DNA, 15 bp, Homo sapiens
ctcctgtaatcccag

SEQ ID NO: 189758 - DNA, 15 bp, Homo sapiens
actcctgtaatccca

SEQ ID NO: 189759 - DNA, 15 bp, Homo sapiens
cactcctgtaatccc

SEQ ID NO: 189760 - DNA, 15 bp, Homo sapiens
tcactcctgtaatcc

SEQ ID NO: 189761 - DNA, 15 bp, Homo sapiens
ctcactcctgtaatc

SEQ ID NO: 189762 - DNA, 15 bp, Homo sapiens
gctcactcctgtaat

SEQ ID NO: 189763 - DNA, 15 bp, Homo sapiens
ggctcactcctgtaa

SEQ ID NO: 189764 - DNA, 15 bp, Homo sapiens
tggctcactcctgta

SEQ ID NO: 189765 - DNA, 15 bp, Homo sapiens
gtggctcactcctgt

SEQ ID NO: 189766 - DNA, 15 bp, Homo sapiens
agtggctcactcctg

SEQ ID NO: 189767 - DNA, 15 bp, Homo sapiens
cagtggctcactcct

SEQ ID NO: 189768 - DNA, 15 bp, Homo sapiens
gcagtggctcactcc

SEQ ID NO: 189769 - DNA, 15 bp, Homo sapiens
tgcagtggctcactc

SEQ ID NO: 189770 - DNA, 15 bp, Homo sapiens
gtgcagtggctcact

SEQ ID NO: 189771 - DNA, 15 bp, Homo sapiens
ggtgcagtggctcac

SEQ ID NO: 189772 - DNA, 15 bp, Homo sapiens
gggtgcagtggctca

SEQ ID NO: 189773 - DNA, 15 bp, Homo sapiens
cgggtgcagtggctc

SEQ ID NO: 189774 - DNA, 15 bp, Homo sapiens
ccgggtgcagtggct

SEQ ID NO: 189775 - DNA, 15 bp, Homo sapiens
gccgggtgcagtggc

SEQ ID NO: 189776 - DNA, 15 bp, Homo sapiens
ggccgggtgcagtgg

SEQ ID NO: 189777 - DNA, 15 bp, Homo sapiens
gggccgggtgcagtg

SEQ ID NO: 189778 - DNA, 15 bp, Homo sapiens
ggggccgggtgcagt

SEQ ID NO: 189779 - DNA, 15 bp, Homo sapiens
aggggccgggtgcag

SEQ ID NO: 189780 - DNA, 15 bp, Homo sapiens
aaggggccgggtgca

SEQ ID NO: 189781 - DNA, 15 bp, Homo sapiens
gaaggggccgggtgc

SEQ ID NO: 189782 - DNA, 15 bp, Homo sapiens
agaaggggccgggtg

SEQ ID NO: 189783 - DNA, 15 bp, Homo sapiens
tagaaggggccgggt

SEQ ID NO: 189784 - DNA, 15 bp, Homo sapiens
gtagaaggggccggg

SEQ ID NO: 189785 - DNA, 15 bp, Homo sapiens
agtagaaggggccgg

SEQ ID NO: 189786 - DNA, 15 bp, Homo sapiens
gagtagaaggggccg

SEQ ID NO: 189787 - DNA, 15 bp, Homo sapiens
tgagtagaaggggcc

SEQ ID NO: 189788 - DNA, 15 bp, Homo sapiens
gtgagtagaaggggc

SEQ ID NO: 189789 - DNA, 15 bp, Homo sapiens
agtgagtagaagggg

SEQ ID NO: 189790 - DNA, 15 bp, Homo sapiens
aagtgagtagaaggg

SEQ ID NO: 189791 - DNA, 15 bp, Homo sapiens
aaagtgagtagaagg

SEQ ID NO: 189792 - DNA, 15 bp, Homo sapiens
caaagtgagtagaag

SEQ ID NO: 189793 - DNA, 15 bp, Homo sapiens
ccaaagtgagtagaa

SEQ ID NO: 189794 - DNA, 15 bp, Homo sapiens
tccaaagtgagtaga

SEQ ID NO: 189795 - DNA, 15 bp, Homo sapiens
atccaaagtgagtag

SEQ ID NO: 189796 - DNA, 15 bp, Homo sapiens
aatccaaagtgagta

SEQ ID NO: 189797 - DNA, 15 bp, Homo sapiens
gaatccaaagtgagt

SEQ ID NO: 189798 - DNA, 15 bp, Homo sapiens
tgaatccaaagtgag

SEQ ID NO: 189799 - DNA, 15 bp, Homo sapiens
ttgaatccaaagtga

SEQ ID NO: 189800 - DNA, 15 bp, Homo sapiens
attgaatccaaagtg

SEQ ID NO: 189801 - DNA, 15 bp, Homo sapiens
aattgaatccaaagt

SEQ ID NO: 189802 - DNA, 15 bp, Homo sapiens
aaattgaatccaaag

SEQ ID NO: 189803 - DNA, 15 bp, Homo sapiens
caaattgaatccaaa

SEQ ID NO: 189804 - DNA, 15 bp, Homo sapiens
gcaaattgaatccaa

SEQ ID NO: 189805 - DNA, 15 bp, Homo sapiens
agcaaattgaatcca

SEQ ID NO: 189806 - DNA, 15 bp, Homo sapiens
tagcaaattgaatcc

SEQ ID NO: 189807 - DNA, 15 bp, Homo sapiens
ctagcaaattgaatc

SEQ ID NO: 189808 - DNA, 15 bp, Homo sapiens
cctagcaaattgaat

SEQ ID NO: 189809 - DNA, 15 bp, Homo sapiens
acctagcaaattgaa

SEQ ID NO: 189810 - DNA, 15 bp, Homo sapiens
aacctagcaaattga

SEQ ID NO: 189811 - DNA, 15 bp, Homo sapiens
aaacctagcaaattg

SEQ ID NO: 189812 - DNA, 15 bp, Homo sapiens
gaaacctagcaaatt

SEQ ID NO: 189813 - DNA, 15 bp, Homo sapiens
tgaaacctagcaaat

SEQ ID NO: 189814 - DNA, 15 bp, Homo sapiens
atgaaacctagcaaa

SEQ ID NO: 189815 - DNA, 15 bp, Homo sapiens
catgaaacctagcaa

SEQ ID NO: 189816 - DNA, 15 bp, Homo sapiens
gcatgaaacctagca

SEQ ID NO: 189817 - DNA, 15 bp, Homo sapiens
agcatgaaacctagc

SEQ ID NO: 189818 - DNA, 15 bp, Homo sapiens
aagcatgaaacctag

SEQ ID NO: 189819 - DNA, 15 bp, Homo sapiens
aaagcatgaaaccta

SEQ ID NO: 189820 - DNA, 15 bp, Homo sapiens
taaagcatgaaacct

SEQ ID NO: 189821 - DNA, 15 bp, Homo sapiens
ctaaagcatgaaacc

SEQ ID NO: 189822 - DNA, 15 bp, Homo sapiens
gctaaagcatgaaac

SEQ ID NO: 189823 - DNA, 15 bp, Homo sapiens
agctaaagcatgaaa

SEQ ID NO: 189824 - DNA, 15 bp, Homo sapiens
aagctaaagcatgaa

SEQ ID NO: 189825 - DNA, 15 bp, Homo sapiens
cggtgcgccccatgg

SEQ ID NO: 189826 - DNA, 15 bp, Homo sapiens
ccggtgcgccccatg

SEQ ID NO: 189827 - DNA, 15 bp, Homo sapiens
cccggtgcgccccat

SEQ ID NO: 189828 - DNA, 15 bp, Homo sapiens
ccccggtgcgcccca

SEQ ID NO: 189829 - DNA, 15 bp, Homo sapiens
gccccggtgcgcccc

SEQ ID NO: 189830 - DNA, 15 bp, Homo sapiens
agccccggtgcgccc

SEQ ID NO: 189831 - DNA, 15 bp, Homo sapiens
cagccccggtgcgcc

SEQ ID NO: 189832 - DNA, 15 bp, Homo sapiens
gcagccccggtgcgc

SEQ ID NO: 189833 - DNA, 15 bp, Homo sapiens
agcagccccggtgcg

SEQ ID NO: 189834 - DNA, 15 bp, Homo sapiens
aagcagccccggtgc

SEQ ID NO: 189835 - DNA, 15 bp, Homo sapiens
gaagcagccccggtg

SEQ ID NO: 189836 - DNA, 15 bp, Homo sapiens
ggaagcagccccggt

SEQ ID NO: 189837 - DNA, 15 bp, Homo sapiens
tggaagcagccccgg

SEQ ID NO: 189838 - DNA, 15 bp, Homo sapiens
gtggaagcagccccg

SEQ ID NO: 189839 - DNA, 15 bp, Homo sapiens
ggtggaagcagcccc

SEQ ID NO: 189840 - DNA, 15 bp, Homo sapiens
gggtggaagcagccc

SEQ ID NO: 189841 - DNA, 15 bp, Homo sapiens
agggtggaagcagcc

SEQ ID NO: 189842 - DNA, 15 bp, Homo sapiens
cagggtggaagcagc

SEQ ID NO: 189843 - DNA, 15 bp, Homo sapiens
ccagggtggaagcag

SEQ ID NO: 189844 - DNA, 15 bp, Homo sapiens
tccagggtggaagca

SEQ ID NO: 189845 - DNA, 15 bp, Homo sapiens
gtccagggtggaagc

SEQ ID NO: 189846 - DNA, 15 bp, Homo sapiens
ggtccagggtggaag

SEQ ID NO: 189847 - DNA, 15 bp, Homo sapiens
gggtccagggtggaa

SEQ ID NO: 189848 - DNA, 15 bp, Homo sapiens
ggggtccagggtgga

SEQ ID NO: 189849 - DNA, 15 bp, Homo sapiens
tggggtccagggtgg

SEQ ID NO: 189850 - DNA, 15 bp, Homo sapiens
ctggggtccagggtg

SEQ ID NO: 189851 - DNA, 15 bp, Homo sapiens
gctggggtccagggt

SEQ ID NO: 189852 - DNA, 15 bp, Homo sapiens
ggctggggtccaggg

SEQ ID NO: 189853 - DNA, 15 bp, Homo sapiens
aggctggggtccagg

SEQ ID NO: 189854 - DNA, 15 bp, Homo sapiens
caggctggggtccag

SEQ ID NO: 189855 - DNA, 15 bp, Homo sapiens
ccaggctggggtcca

SEQ ID NO: 189856 - DNA, 15 bp, Homo sapiens
gccaggctggggtcc

SEQ ID NO: 189857 - DNA, 15 bp, Homo sapiens
cgccaggctggggtc

SEQ ID NO: 189858 - DNA, 15 bp, Homo sapiens
ccgccaggctggggt

SEQ ID NO: 189859 - DNA, 15 bp, Homo sapiens
tccgccaggctgggg

SEQ ID NO: 189860 - DNA, 15 bp, Homo sapiens
ctccgccaggctggg

SEQ ID NO: 189861 - DNA, 15 bp, Homo sapiens
cctccgccaggctgg

SEQ ID NO: 189862 - DNA, 15 bp, Homo sapiens
ccctccgccaggctg

SEQ ID NO: 189863 - DNA, 15 bp, Homo sapiens
gccctccgccaggct

SEQ ID NO: 189864 - DNA, 15 bp, Homo sapiens
ggccctccgccaggc

SEQ ID NO: 189865 - DNA, 15 bp, Homo sapiens
aggccctccgccagg

SEQ ID NO: 189866 - DNA, 15 bp, Homo sapiens
caggccctccgccag

SEQ ID NO: 189867 - DNA, 15 bp, Homo sapiens
ccaggccctccgcca

SEQ ID NO: 189868 - DNA, 15 bp, Homo sapiens
gccaggccctccgcc

SEQ ID NO: 189869 - DNA, 15 bp, Homo sapiens
tgccaggccctccgc

SEQ ID NO: 189870 - DNA, 15 bp, Homo sapiens
gtgccaggccctccg

SEQ ID NO: 189871 - DNA, 15 bp, Homo sapiens
tgtgccaggccctcc

SEQ ID NO: 189872 - DNA, 15 bp, Homo sapiens
atgtgccaggccctc

SEQ ID NO: 189873 - DNA, 15 bp, Homo sapiens
tatgtgccaggccct

SEQ ID NO: 189874 - DNA, 15 bp, Homo sapiens
ctatgtgccaggccc

SEQ ID NO: 189875 - DNA, 15 bp, Homo sapiens
actatgtgccaggcc

SEQ ID NO: 189876 - DNA, 15 bp, Homo sapiens
tactatgtgccaggc

SEQ ID NO: 189877 - DNA, 15 bp, Homo sapiens
ctactatgtgccagg

SEQ ID NO: 189878 - DNA, 15 bp, Homo sapiens
cctactatgtgccag

SEQ ID NO: 189879 - DNA, 15 bp, Homo sapiens
ccctactatgtgcca

SEQ ID NO: 189880 - DNA, 15 bp, Homo sapiens
gccctactatgtgcc

SEQ ID NO: 189881 - DNA, 15 bp, Homo sapiens
cgccctactatgtgc

SEQ ID NO: 189882 - DNA, 15 bp, Homo sapiens
ccgccctactatgtg

SEQ ID NO: 189883 - DNA, 15 bp, Homo sapiens
cccgccctactatgt

SEQ ID NO: 189884 - DNA, 15 bp, Homo sapiens
ccccgccctactatg

SEQ ID NO: 189885 - DNA, 15 bp, Homo sapiens
tccccgccctactat

SEQ ID NO: 189886 - DNA, 15 bp, Homo sapiens
ctccccgccctacta

SEQ ID NO: 189887 - DNA, 15 bp, Homo sapiens
actccccgccctact

SEQ ID NO: 189888 - DNA, 15 bp, Homo sapiens
tactccccgccctac

SEQ ID NO: 189889 - DNA, 15 bp, Homo sapiens
ctactccccgcccta

SEQ ID NO: 189890 - DNA, 15 bp, Homo sapiens
cctactccccgccct

SEQ ID NO: 189891 - DNA, 15 bp, Homo sapiens
acctactccccgccc

SEQ ID NO: 189892 - DNA, 15 bp, Homo sapiens
cacctactccccgcc

SEQ ID NO: 189893 - DNA, 15 bp, Homo sapiens
acacctactccccgc

SEQ ID NO: 189894 - DNA, 15 bp, Homo sapiens
cacacctactccccg

SEQ ID NO: 189895 - DNA, 15 bp, Homo sapiens
acacacctactcccc

SEQ ID NO: 189896 - DNA, 15 bp, Homo sapiens
tacacacctactccc

SEQ ID NO: 189897 - DNA, 15 bp, Homo sapiens
ttacacacctactcc

SEQ ID NO: 189898 - DNA, 15 bp, Homo sapiens
cttacacacctactc

SEQ ID NO: 189899 - DNA, 15 bp, Homo sapiens
tcttacacacctact

SEQ ID NO: 189900 - DNA, 15 bp, Homo sapiens
ttcttacacacctac

SEQ ID NO: 189901 - DNA, 15 bp, Homo sapiens
cttcttacacaccta

SEQ ID NO: 189902 - DNA, 15 bp, Homo sapiens
acttcttacacacct

SEQ ID NO: 189903 - DNA, 15 bp, Homo sapiens
tacttcttacacacc

SEQ ID NO: 189904 - DNA, 15 bp, Homo sapiens
ttacttcttacacac

SEQ ID NO: 189905 - DNA, 15 bp, Homo sapiens
cttacttcttacaca

SEQ ID NO: 189906 - DNA, 15 bp, Homo sapiens
gcttacttcttacac

SEQ ID NO: 189907 - DNA, 15 bp, Homo sapiens
agcttacttcttaca

SEQ ID NO: 189908 - DNA, 15 bp, Homo sapiens
aagcttacttcttac

SEQ ID NO: 189909 - DNA, 15 bp, Homo sapiens
caagcttacttctta

SEQ ID NO: 189910 - DNA, 15 bp, Homo sapiens
gcaagcttacttctt

SEQ ID NO: 189911 - DNA, 15 bp, Homo sapiens
agcaagcttacttct

SEQ ID NO: 189912 - DNA, 15 bp, Homo sapiens
gagcaagcttacttc

SEQ ID NO: 189913 - DNA, 15 bp, Homo sapiens
agagcaagcttactt

SEQ ID NO: 189914 - DNA, 15 bp, Homo sapiens
cagagcaagcttact

SEQ ID NO: 189915 - DNA, 15 bp, Homo sapiens
ccagagcaagcttac

SEQ ID NO: 189916 - DNA, 15 bp, Homo sapiens
tccagagcaagctta

SEQ ID NO: 189917 - DNA, 15 bp, Homo sapiens
ctccagagcaagctt

SEQ ID NO: 189918 - DNA, 15 bp, Homo sapiens
tctccagagcaagct

SEQ ID NO: 189919 - DNA, 15 bp, Homo sapiens
ctctccagagcaagc

SEQ ID NO: 189920 - DNA, 15 bp, Homo sapiens
cctctccagagcaag

SEQ ID NO: 189921 - DNA, 15 bp, Homo sapiens
tcctctccagagcaa

SEQ ID NO: 189922 - DNA, 15 bp, Homo sapiens
atcctctccagagca

SEQ ID NO: 189923 - DNA, 15 bp, Homo sapiens
catcctctccagagc

SEQ ID NO: 189924 - DNA, 15 bp, Homo sapiens
acatcctctccagag

SEQ ID NO: 189925 - DNA, 15 bp, Homo sapiens
tacatcctctccaga

SEQ ID NO: 189926 - DNA, 15 bp, Homo sapiens
gtacatcctctccag

SEQ ID NO: 189927 - DNA, 15 bp, Homo sapiens
ggtacatcctctcca

SEQ ID NO: 189928 - DNA, 15 bp, Homo sapiens
aggtacatcctctcc

SEQ ID NO: 189929 - DNA, 15 bp, Homo sapiens
caggtacatcctctc

SEQ ID NO: 189930 - DNA, 15 bp, Homo sapiens
gcaggtacatcctct

SEQ ID NO: 189931 - DNA, 15 bp, Homo sapiens
tgcaggtacatcctc

SEQ ID NO: 189932 - DNA, 15 bp, Homo sapiens
ctgcaggtacatcct

SEQ ID NO: 189933 - DNA, 15 bp, Homo sapiens
gctgcaggtacatcc

SEQ ID NO: 189934 - DNA, 15 bp, Homo sapiens
ggctgcaggtacatc

SEQ ID NO: 189935 - DNA, 15 bp, Homo sapiens
cggctgcaggtacat

SEQ ID NO: 189936 - DNA, 15 bp, Homo sapiens
ccggctgcaggtaca

SEQ ID NO: 189937 - DNA, 15 bp, Homo sapiens
gccggctgcaggtac

SEQ ID NO: 189938 - DNA, 15 bp, Homo sapiens
cgccggctgcaggta

SEQ ID NO: 189939 - DNA, 15 bp, Homo sapiens
gcgccggctgcaggt

SEQ ID NO: 189940 - DNA, 15 bp, Homo sapiens
ggcgccggctgcagg

SEQ ID NO: 189941 - DNA, 15 bp, Homo sapiens
gggcgccggctgcag

SEQ ID NO: 189942 - DNA, 15 bp, Homo sapiens
tgggcgccggctgca

SEQ ID NO: 189943 - DNA, 15 bp, Homo sapiens
ctgggcgccggctgc

SEQ ID NO: 189944 - DNA, 15 bp, Homo sapiens
gctgggcgccggctg

SEQ ID NO: 189945 - DNA, 15 bp, Homo sapiens
agctgggcgccggct

SEQ ID NO: 189946 - DNA, 15 bp, Homo sapiens
gagctgggcgccggc

SEQ ID NO: 189947 - DNA, 15 bp, Homo sapiens
agagctgggcgccgg

SEQ ID NO: 189948 - DNA, 15 bp, Homo sapiens
gagagctgggcgccg

SEQ ID NO: 189949 - DNA, 15 bp, Homo sapiens
cgagagctgggcgcc

SEQ ID NO: 189950 - DNA, 15 bp, Homo sapiens
tcgagagctgggcgc

SEQ ID NO: 189951 - DNA, 15 bp, Homo sapiens
ctcgagagctgggcg

SEQ ID NO: 189952 - DNA, 15 bp, Homo sapiens
tctcgagagctgggc

SEQ ID NO: 189953 - DNA, 15 bp, Homo sapiens
ctctcgagagctggg

SEQ ID NO: 189954 - DNA, 15 bp, Homo sapiens
cctctcgagagctgg

SEQ ID NO: 189955 - DNA, 15 bp, Homo sapiens
tcctctcgagagctg

SEQ ID NO: 189956 - DNA, 15 bp, Homo sapiens
gtcctctcgagagct

SEQ ID NO: 189957 - DNA, 15 bp, Homo sapiens
agtcctctcgagagc

SEQ ID NO: 189958 - DNA, 15 bp, Homo sapiens
cagtcctctcgagag

SEQ ID NO: 189959 - DNA, 15 bp, Homo sapiens
acagtcctctcgaga

SEQ ID NO: 189960 - DNA, 15 bp, Homo sapiens
cacagtcctctcgag

SEQ ID NO: 189961 - DNA, 15 bp, Homo sapiens
ccacagtcctctcga

SEQ ID NO: 189962 - DNA, 15 bp, Homo sapiens
cccacagtcctctcg

SEQ ID NO: 189963 - DNA, 15 bp, Homo sapiens
tcccacagtcctctc

SEQ ID NO: 189964 - DNA, 15 bp, Homo sapiens
ctcccacagtcctct

SEQ ID NO: 189965 - DNA, 15 bp, Homo sapiens
cctcccacagtcctc

SEQ ID NO: 189966 - DNA, 15 bp, Homo sapiens
ccctcccacagtcct

SEQ ID NO: 189967 - DNA, 15 bp, Homo sapiens
gccctcccacagtcc

SEQ ID NO: 189968 - DNA, 15 bp, Homo sapiens
tgccctcccacagtc

SEQ ID NO: 189969 - DNA, 15 bp, Homo sapiens
ctgccctcccacagt

SEQ ID NO: 189970 - DNA, 15 bp, Homo sapiens
tctgccctcccacag

SEQ ID NO: 189971 - DNA, 15 bp, Homo sapiens
ctctgccctcccaca

SEQ ID NO: 189972 - DNA, 15 bp, Homo sapiens
cctctgccctcccac

SEQ ID NO: 189973 - DNA, 15 bp, Homo sapiens
gcctctgccctccca

SEQ ID NO: 189974 - DNA, 15 bp, Homo sapiens
agcctctgccctccc

SEQ ID NO: 189975 - DNA, 15 bp, Homo sapiens
cagcctctgccctcc

SEQ ID NO: 189976 - DNA, 15 bp, Homo sapiens
tcagcctctgccctc

SEQ ID NO: 189977 - DNA, 15 bp, Homo sapiens
ttcagcctctgccct

SEQ ID NO: 189978 - DNA, 15 bp, Homo sapiens
tttcagcctctgccc

SEQ ID NO: 189979 - DNA, 15 bp, Homo sapiens
gtttcagcctctgcc

SEQ ID NO: 189980 - DNA, 15 bp, Homo sapiens
cgtttcagcctctgc

SEQ ID NO: 189981 - DNA, 15 bp, Homo sapiens
tcgtttcagcctctg

SEQ ID NO: 189982 - DNA, 15 bp, Homo sapiens
ctcgtttcagcctct

SEQ ID NO: 189983 - DNA, 15 bp, Homo sapiens
cctcgtttcagcctc

SEQ ID NO: 189984 - DNA, 15 bp, Homo sapiens
gcctcgtttcagcct

SEQ ID NO: 189985 - DNA, 15 bp, Homo sapiens
ggcctcgtttcagcc

SEQ ID NO: 189986 - DNA, 15 bp, Homo sapiens
cggcctcgtttcagc

SEQ ID NO: 189987 - DNA, 15 bp, Homo sapiens
gcggcctcgtttcag

SEQ ID NO: 189988 - DNA, 15 bp, Homo sapiens
ggcggcctcgtttca

SEQ ID NO: 189989 - DNA, 15 bp, Homo sapiens
aggcggcctcgtttc

SEQ ID NO: 189990 - DNA, 15 bp, Homo sapiens
caggcggcctcgttt

SEQ ID NO: 189991 - DNA, 15 bp, Homo sapiens
gcaggcggcctcgtt

SEQ ID NO: 189992 - DNA, 15 bp, Homo sapiens
ggcaggcggcctcgt

SEQ ID NO: 189993 - DNA, 15 bp, Homo sapiens
cggcaggcggcctcg

SEQ ID NO: 189994 - DNA, 15 bp, Homo sapiens
tcggcaggcggcctc

SEQ ID NO: 189995 - DNA, 15 bp, Homo sapiens
ctcggcaggcggcct

SEQ ID NO: 189996 - DNA, 15 bp, Homo sapiens
actcggcaggcggcc

SEQ ID NO: 189997 - DNA, 15 bp, Homo sapiens
aactcggcaggcggc

SEQ ID NO: 189998 - DNA, 15 bp, Homo sapiens
gaactcggcaggcgg

SEQ ID NO: 189999 - DNA, 15 bp, Homo sapiens
ggaactcggcaggcg

SEQ ID NO: 190000 - DNA, 15 bp, Homo sapiens
aggaactcggcaggc

SEQ ID NO: 190001 - DNA, 15 bp, Homo sapiens
gaggaactcggcagg

SEQ ID NO: 190002 - DNA, 15 bp, Homo sapiens
ggaggaactcggcag

SEQ ID NO: 190003 - DNA, 15 bp, Homo sapiens
tggaggaactcggca

SEQ ID NO: 190004 - DNA, 15 bp, Homo sapiens
gtggaggaactcggc

SEQ ID NO: 190005 - DNA, 15 bp, Homo sapiens
tgtggaggaactcgg

SEQ ID NO: 190006 - DNA, 15 bp, Homo sapiens
ctgtggaggaactcg

SEQ ID NO: 190007 - DNA, 15 bp, Homo sapiens
tctgtggaggaactc

SEQ ID NO: 190008 - DNA, 15 bp, Homo sapiens
gtctgtggaggaact

SEQ ID NO: 190009 - DNA, 15 bp, Homo sapiens
ggtctgtggaggaac

SEQ ID NO: 190010 - DNA, 15 bp, Homo sapiens
gggtctgtggaggaa

SEQ ID NO: 190011 - DNA, 15 bp, Homo sapiens
ggggtctgtggagga

SEQ ID NO: 190012 - DNA, 15 bp, Homo sapiens
aggggtctgtggagg

SEQ ID NO: 190013 - DNA, 15 bp, Homo sapiens
caggggtctgtggag

SEQ ID NO: 190014 - DNA, 15 bp, Homo sapiens
ccaggggtctgtgga

SEQ ID NO: 190015 - DNA, 15 bp, Homo sapiens
cccaggggtctgtgg

SEQ ID NO: 190016 - DNA, 15 bp, Homo sapiens
gcccaggggtctgtg

SEQ ID NO: 190017 - DNA, 15 bp, Homo sapiens
cgcccaggggtctgt

SEQ ID NO: 190018 - DNA, 15 bp, Homo sapiens
tcgcccaggggtctg

SEQ ID NO: 190019 - DNA, 15 bp, Homo sapiens
ctcgcccaggggtct

SEQ ID NO: 190020 - DNA, 15 bp, Homo sapiens
cctcgcccaggggtc

SEQ ID NO: 190021 - DNA, 15 bp, Homo sapiens
tcctcgcccaggggt

SEQ ID NO: 190022 - DNA, 15 bp, Homo sapiens
ctcctcgcccagggg

SEQ ID NO: 190023 - DNA, 15 bp, Homo sapiens
gctcctcgcccaggg

SEQ ID NO: 190024 - DNA, 15 bp, Homo sapiens
cgctcctcgcccagg

SEQ ID NO: 190025 - DNA, 15 bp, Homo sapiens
gcgctcctcgcccag

SEQ ID NO: 190026 - DNA, 15 bp, Homo sapiens
agcgctcctcgccca

SEQ ID NO: 190027 - DNA, 15 bp, Homo sapiens
gagcgctcctcgccc

SEQ ID NO: 190028 - DNA, 15 bp, Homo sapiens
agagcgctcctcgcc

SEQ ID NO: 190029 - DNA, 15 bp, Homo sapiens
cagagcgctcctcgc

SEQ ID NO: 190030 - DNA, 15 bp, Homo sapiens
gcagagcgctcctcg

SEQ ID NO: 190031 - DNA, 15 bp, Homo sapiens
agcagagcgctcctc

SEQ ID NO: 190032 - DNA, 15 bp, Homo sapiens
cagcagagcgctcct

SEQ ID NO: 190033 - DNA, 15 bp, Homo sapiens
ccagcagagcgctcc

SEQ ID NO: 190034 - DNA, 15 bp, Homo sapiens
cccagcagagcgctc

SEQ ID NO: 190035 - DNA, 15 bp, Homo sapiens
ccccagcagagcgct

SEQ ID NO: 190036 - DNA, 15 bp, Homo sapiens
tccccagcagagcgc

SEQ ID NO: 190037 - DNA, 15 bp, Homo sapiens
gtccccagcagagcg

SEQ ID NO: 190038 - DNA, 15 bp, Homo sapiens
agtccccagcagagc

SEQ ID NO: 190039 - DNA, 15 bp, Homo sapiens
cagtccccagcagag

SEQ ID NO: 190040 - DNA, 15 bp, Homo sapiens
gcagtccccagcaga

SEQ ID NO: 190041 - DNA, 15 bp, Homo sapiens
cgcagtccccagcag

SEQ ID NO: 190042 - DNA, 15 bp, Homo sapiens
gcgcagtccccagca

SEQ ID NO: 190043 - DNA, 15 bp, Homo sapiens
ggcgcagtccccagc

SEQ ID NO: 190044 - DNA, 15 bp, Homo sapiens
tggcgcagtccccag

SEQ ID NO: 190045 - DNA, 15 bp, Homo sapiens
ctggcgcagtcccca

SEQ ID NO: 190046 - DNA, 15 bp, Homo sapiens
gctggcgcagtcccc

SEQ ID NO: 190047 - DNA, 15 bp, Homo sapiens
cgctggcgcagtccc

SEQ ID NO: 190048 - DNA, 15 bp, Homo sapiens
ccgctggcgcagtcc

SEQ ID NO: 190049 - DNA, 15 bp, Homo sapiens
accgctggcgcagtc

SEQ ID NO: 190050 - DNA, 15 bp, Homo sapiens
caccgctggcgcagt

SEQ ID NO: 190051 - DNA, 15 bp, Homo sapiens
gcaccgctggcgcag

SEQ ID NO: 190052 - DNA, 15 bp, Homo sapiens
ggcaccgctggcgca

SEQ ID NO: 190053 - DNA, 15 bp, Homo sapiens
aggcaccgctggcgc

SEQ ID NO: 190054 - DNA, 15 bp, Homo sapiens
gaggcaccgctggcg

SEQ ID NO: 190055 - DNA, 15 bp, Homo sapiens
ggaggcaccgctggc

SEQ ID NO: 190056 - DNA, 15 bp, Homo sapiens
tggaggcaccgctgg

SEQ ID NO: 190057 - DNA, 15 bp, Homo sapiens
ctggaggcaccgctg

SEQ ID NO: 190058 - DNA, 15 bp, Homo sapiens
cctggaggcaccgct

SEQ ID NO: 190059 - DNA, 15 bp, Homo sapiens
gcctggaggcaccgc

SEQ ID NO: 190060 - DNA, 15 bp, Homo sapiens
ggcctggaggcaccg

SEQ ID NO: 190061 - DNA, 15 bp, Homo sapiens
aggcctggaggcacc

SEQ ID NO: 190062 - DNA, 15 bp, Homo sapiens
caggcctggaggcac

SEQ ID NO: 190063 - DNA, 15 bp, Homo sapiens
ccaggcctggaggca

SEQ ID NO: 190064 - DNA, 15 bp, Homo sapiens
tccaggcctggaggc

SEQ ID NO: 190065 - DNA, 15 bp, Homo sapiens
gtccaggcctggagg

SEQ ID NO: 190066 - DNA, 15 bp, Homo sapiens
agtccaggcctggag

SEQ ID NO: 190067 - DNA, 15 bp, Homo sapiens
gagtccaggcctgga

SEQ ID NO: 190068 - DNA, 15 bp, Homo sapiens
agagtccaggcctgg

SEQ ID NO: 190069 - DNA, 15 bp, Homo sapiens
gagagtccaggcctg

SEQ ID NO: 190070 - DNA, 15 bp, Homo sapiens
tgagagtccaggcct

SEQ ID NO: 190071 - DNA, 15 bp, Homo sapiens
ctgagagtccaggcc

SEQ ID NO: 190072 - DNA, 15 bp, Homo sapiens
gctgagagtccaggc

SEQ ID NO: 190073 - DNA, 15 bp, Homo sapiens
agctgagagtccagg

SEQ ID NO: 190074 - DNA, 15 bp, Homo sapiens
gagctgagagtccag

SEQ ID NO: 190075 - DNA, 15 bp, Homo sapiens
ggagctgagagtcca

SEQ ID NO: 190076 - DNA, 15 bp, Homo sapiens
cggagctgagagtcc

SEQ ID NO: 190077 - DNA, 15 bp, Homo sapiens
gcggagctgagagtc

SEQ ID NO: 190078 - DNA, 15 bp, Homo sapiens
agcggagctgagagt

SEQ ID NO: 190079 - DNA, 15 bp, Homo sapiens
cagcggagctgagag

SEQ ID NO: 190080 - DNA, 15 bp, Homo sapiens
gcagcggagctgaga

SEQ ID NO: 190081 - DNA, 15 bp, Homo sapiens
agcagcggagctgag

SEQ ID NO: 190082 - DNA, 15 bp, Homo sapiens
cagcagcggagctga

SEQ ID NO: 190083 - DNA, 15 bp, Homo sapiens
gcagcagcggagctg

SEQ ID NO: 190084 - DNA, 15 bp, Homo sapiens
agcagcagcggagct

SEQ ID NO: 190085 - DNA, 15 bp, Homo sapiens
aagcagcagcggagc

SEQ ID NO: 190086 - DNA, 15 bp, Homo sapiens
aaagcagcagcggag

SEQ ID NO: 190087 - DNA, 15 bp, Homo sapiens
aaaagcagcagcgga

SEQ ID NO: 190088 - DNA, 15 bp, Homo sapiens
caaaagcagcagcgg

SEQ ID NO: 190089 - DNA, 15 bp, Homo sapiens
ccaaaagcagcagcg

SEQ ID NO: 190090 - DNA, 15 bp, Homo sapiens
gccaaaagcagcagc

SEQ ID NO: 190091 - DNA, 15 bp, Homo sapiens
ggccaaaagcagcag

SEQ ID NO: 190092 - DNA, 15 bp, Homo sapiens
tggccaaaagcagca

SEQ ID NO: 190093 - DNA, 15 bp, Homo sapiens
ctggccaaaagcagc

SEQ ID NO: 190094 - DNA, 15 bp, Homo sapiens
tctggccaaaagcag

SEQ ID NO: 190095 - DNA, 15 bp, Homo sapiens
ctctggccaaaagca

SEQ ID NO: 190096 - DNA, 15 bp, Homo sapiens
actctggccaaaagc

SEQ ID NO: 190097 - DNA, 15 bp, Homo sapiens
aactctggccaaaag

SEQ ID NO: 190098 - DNA, 15 bp, Homo sapiens
gaactctggccaaaa

SEQ ID NO: 190099 - DNA, 15 bp, Homo sapiens
ggaactctggccaaa

SEQ ID NO: 190100 - DNA, 15 bp, Homo sapiens
gggaactctggccaa

SEQ ID NO: 190101 - DNA, 15 bp, Homo sapiens
tgggaactctggcca

SEQ ID NO: 190102 - DNA, 15 bp, Homo sapiens
ttgggaactctggcc

SEQ ID NO: 190103 - DNA, 15 bp, Homo sapiens
tttgggaactctggc

SEQ ID NO: 190104 - DNA, 15 bp, Homo sapiens
ctttgggaactctgg

SEQ ID NO: 190105 - DNA, 15 bp, Homo sapiens
cctttgggaactctg

SEQ ID NO: 190106 - DNA, 15 bp, Homo sapiens
gcctttgggaactct

SEQ ID NO: 190107 - DNA, 15 bp, Homo sapiens
cgcctttgggaactc

SEQ ID NO: 190108 - DNA, 15 bp, Homo sapiens
ccgcctttgggaact

SEQ ID NO: 190109 - DNA, 15 bp, Homo sapiens
cccgcctttgggaac

SEQ ID NO: 190110 - DNA, 15 bp, Homo sapiens
acccgcctttgggaa

SEQ ID NO: 190111 - DNA, 15 bp, Homo sapiens
cacccgcctttggga

SEQ ID NO: 190112 - DNA, 15 bp, Homo sapiens
acacccgcctttggg

SEQ ID NO: 190113 - DNA, 15 bp, Homo sapiens
cacacccgcctttgg

SEQ ID NO: 190114 - DNA, 15 bp, Homo sapiens
ccacacccgcctttg

SEQ ID NO: 190115 - DNA, 15 bp, Homo sapiens
accacacccgccttt

SEQ ID NO: 190116 - DNA, 15 bp, Homo sapiens
aaccacacccgcctt

SEQ ID NO: 190117 - DNA, 15 bp, Homo sapiens
caaccacacccgcct

SEQ ID NO: 190118 - DNA, 15 bp, Homo sapiens
acaaccacacccgcc

SEQ ID NO: 190119 - DNA, 15 bp, Homo sapiens
gacaaccacacccgc

SEQ ID NO: 190120 - DNA, 15 bp, Homo sapiens
agacaaccacacccg

SEQ ID NO: 190121 - DNA, 15 bp, Homo sapiens
aagacaaccacaccc

SEQ ID NO: 190122 - DNA, 15 bp, Homo sapiens
aaagacaaccacacc

SEQ ID NO: 190123 - DNA, 15 bp, Homo sapiens
caaagacaaccacac

SEQ ID NO: 190124 - DNA, 15 bp, Homo sapiens
ccaaagacaaccaca

SEQ ID NO: 190125 - DNA, 15 bp, Homo sapiens
accaaagacaaccac

SEQ ID NO: 190126 - DNA, 15 bp, Homo sapiens
caccaaagacaacca

SEQ ID NO: 190127 - DNA, 15 bp, Homo sapiens
ccaccaaagacaacc

SEQ ID NO: 190128 - DNA, 15 bp, Homo sapiens
cccaccaaagacaac

SEQ ID NO: 190129 - DNA, 15 bp, Homo sapiens
tcccaccaaagacaa

SEQ ID NO: 190130 - DNA, 15 bp, Homo sapiens
ttcccaccaaagaca

SEQ ID NO: 190131 - DNA, 15 bp, Homo sapiens
cttcccaccaaagac

SEQ ID NO: 190132 - DNA, 15 bp, Homo sapiens
ccttcccaccaaaga

SEQ ID NO: 190133 - DNA, 15 bp, Homo sapiens
accttcccaccaaag

SEQ ID NO: 190134 - DNA, 15 bp, Homo sapiens
aaccttcccaccaaa

SEQ ID NO: 190135 - DNA, 15 bp, Homo sapiens
gaaccttcccaccaa

SEQ ID NO: 190136 - DNA, 15 bp, Homo sapiens
tgaaccttcccacca

SEQ ID NO: 190137 - DNA, 15 bp, Homo sapiens
ctgaaccttcccacc

SEQ ID NO: 190138 - DNA, 15 bp, Homo sapiens
gctgaaccttcccac

SEQ ID NO: 190139 - DNA, 15 bp, Homo sapiens
cgctgaaccttccca

SEQ ID NO: 190140 - DNA, 15 bp, Homo sapiens
gcgctgaaccttccc

SEQ ID NO: 190141 - DNA, 15 bp, Homo sapiens
tgcgctgaaccttcc

SEQ ID NO: 190142 - DNA, 15 bp, Homo sapiens
gtgcgctgaaccttc

SEQ ID NO: 190143 - DNA, 15 bp, Homo sapiens
ggtgcgctgaacctt

SEQ ID NO: 190144 - DNA, 15 bp, Homo sapiens
cggtgcgctgaacct

SEQ ID NO: 190145 - DNA, 15 bp, Homo sapiens
gcggtgcgctgaacc

SEQ ID NO: 190146 - DNA, 15 bp, Homo sapiens
cgcggtgcgctgaac

SEQ ID NO: 190147 - DNA, 15 bp, Homo sapiens
tcgcggtgcgctgaa

SEQ ID NO: 190148 - DNA, 15 bp, Homo sapiens
atcgcggtgcgctga

SEQ ID NO: 190149 - DNA, 15 bp, Homo sapiens
tatcgcggtgcgctg

SEQ ID NO: 190150 - DNA, 15 bp, Homo sapiens
ctatcgcggtgcgct

SEQ ID NO: 190151 - DNA, 15 bp, Homo sapiens
actatcgcggtgcgc

SEQ ID NO: 190152 - DNA, 15 bp, Homo sapiens
tactatcgcggtgcg

SEQ ID NO: 190153 - DNA, 15 bp, Homo sapiens
ttactatcgcggtgc

SEQ ID NO: 190154 - DNA, 15 bp, Homo sapiens
attactatcgcggtg

SEQ ID NO: 190155 - DNA, 15 bp, Homo sapiens
tattactatcgcggt

SEQ ID NO: 190156 - DNA, 15 bp, Homo sapiens
ctattactatcgcgg

SEQ ID NO: 190157 - DNA, 15 bp, Homo sapiens
cctattactatcgcg

SEQ ID NO: 190158 - DNA, 15 bp, Homo sapiens
ccctattactatcgc

SEQ ID NO: 190159 - DNA, 15 bp, Homo sapiens
cccctattactatcg

SEQ ID NO: 190160 - DNA, 15 bp, Homo sapiens
tcccctattactatc

SEQ ID NO: 190161 - DNA, 15 bp, Homo sapiens
ctcccctattactat

SEQ ID NO: 190162 - DNA, 15 bp, Homo sapiens
gctcccctattacta

SEQ ID NO: 190163 - DNA, 15 bp, Homo sapiens
tgctcccctattact

SEQ ID NO: 190164 - DNA, 15 bp, Homo sapiens
ttgctcccctattac

SEQ ID NO: 190165 - DNA, 15 bp, Homo sapiens
cttgctcccctatta

SEQ ID NO: 190166 - DNA, 15 bp, Homo sapiens
gcttgctcccctatt

SEQ ID NO: 190167 - DNA, 15 bp, Homo sapiens
tgcttgctcccctat

SEQ ID NO: 190168 - DNA, 15 bp, Homo sapiens
gtgcttgctccccta

SEQ ID NO: 190169 - DNA, 15 bp, Homo sapiens
agtgcttgctcccct

SEQ ID NO: 190170 - DNA, 15 bp, Homo sapiens
gagtgcttgctcccc

SEQ ID NO: 190171 - DNA, 15 bp, Homo sapiens
cgagtgcttgctccc

SEQ ID NO: 190172 - DNA, 15 bp, Homo sapiens
gcgagtgcttgctcc

SEQ ID NO: 190173 - DNA, 15 bp, Homo sapiens
agcgagtgcttgctc

SEQ ID NO: 190174 - DNA, 15 bp, Homo sapiens
cagcgagtgcttgct

SEQ ID NO: 190175 - DNA, 15 bp, Homo sapiens
tcagcgagtgcttgc

SEQ ID NO: 190176 - DNA, 15 bp, Homo sapiens
ctcagcgagtgcttg

SEQ ID NO: 190177 - DNA, 15 bp, Homo sapiens
gctcagcgagtgctt

SEQ ID NO: 190178 - DNA, 15 bp, Homo sapiens
ggctcagcgagtgct

SEQ ID NO: 190179 - DNA, 15 bp, Homo sapiens
gggctcagcgagtgc

SEQ ID NO: 190180 - DNA, 15 bp, Homo sapiens
tgggctcagcgagtg

SEQ ID NO: 190181 - DNA, 15 bp, Homo sapiens
ctgggctcagcgagt

SEQ ID NO: 190182 - DNA, 15 bp, Homo sapiens
actgggctcagcgag

SEQ ID NO: 190183 - DNA, 15 bp, Homo sapiens
cactgggctcagcga

SEQ ID NO: 190184 - DNA, 15 bp, Homo sapiens
gcactgggctcagcg

SEQ ID NO: 190185 - DNA, 15 bp, Homo sapiens
tgcactgggctcagc

SEQ ID NO: 190186 - DNA, 15 bp, Homo sapiens
ctgcactgggctcag

SEQ ID NO: 190187 - DNA, 15 bp, Homo sapiens
cctgcactgggctca

SEQ ID NO: 190188 - DNA, 15 bp, Homo sapiens
ccctgcactgggctc

SEQ ID NO: 190189 - DNA, 15 bp, Homo sapiens
gccctgcactgggct

SEQ ID NO: 190190 - DNA, 15 bp, Homo sapiens
ggccctgcactgggc

SEQ ID NO: 190191 - DNA, 15 bp, Homo sapiens
aggccctgcactggg

SEQ ID NO: 190192 - DNA, 15 bp, Homo sapiens
caggccctgcactgg

SEQ ID NO: 190193 - DNA, 15 bp, Homo sapiens
ccaggccctgcactg

SEQ ID NO: 190194 - DNA, 15 bp, Homo sapiens
tccaggccctgcact

SEQ ID NO: 190195 - DNA, 15 bp, Homo sapiens
gtccaggccctgcac

SEQ ID NO: 190196 - DNA, 15 bp, Homo sapiens
ggtccaggccctgca

SEQ ID NO: 190197 - DNA, 15 bp, Homo sapiens
cggtccaggccctgc

SEQ ID NO: 190198 - DNA, 15 bp, Homo sapiens
acggtccaggccctg

SEQ ID NO: 190199 - DNA, 15 bp, Homo sapiens
cacggtccaggccct

SEQ ID NO: 190200 - DNA, 15 bp, Homo sapiens
gcacggtccaggccc

SEQ ID NO: 190201 - DNA, 15 bp, Homo sapiens
agcacggtccaggcc

SEQ ID NO: 190202 - DNA, 15 bp, Homo sapiens
gagcacggtccaggc

SEQ ID NO: 190203 - DNA, 15 bp, Homo sapiens
ggagcacggtccagg

SEQ ID NO: 190204 - DNA, 15 bp, Homo sapiens
tggagcacggtccag

SEQ ID NO: 190205 - DNA, 15 bp, Homo sapiens
atggagcacggtcca

SEQ ID NO: 190206 - DNA, 15 bp, Homo sapiens
tatggagcacggtcc

SEQ ID NO: 190207 - DNA, 15 bp, Homo sapiens
ctatggagcacggtc

SEQ ID NO: 190208 - DNA, 15 bp, Homo sapiens
gctatggagcacggt

SEQ ID NO: 190209 - DNA, 15 bp, Homo sapiens
tgctatggagcacgg

SEQ ID NO: 190210 - DNA, 15 bp, Homo sapiens
ttgctatggagcacg

SEQ ID NO: 190211 - DNA, 15 bp, Homo sapiens
cttgctatggagcac

SEQ ID NO: 190212 - DNA, 15 bp, Homo sapiens
gcttgctatggagca

SEQ ID NO: 190213 - DNA, 15 bp, Homo sapiens
tgcttgctatggagc

SEQ ID NO: 190214 - DNA, 15 bp, Homo sapiens
gtgcttgctatggag

SEQ ID NO: 190215 - DNA, 15 bp, Homo sapiens
agtgcttgctatgga

SEQ ID NO: 190216 - DNA, 15 bp, Homo sapiens
cagtgcttgctatgg

SEQ ID NO: 190217 - DNA, 15 bp, Homo sapiens
tcagtgcttgctatg

SEQ ID NO: 190218 - DNA, 15 bp, Homo sapiens
atcagtgcttgctat

SEQ ID NO: 190219 - DNA, 15 bp, Homo sapiens
gatcagtgcttgcta

SEQ ID NO: 190220 - DNA, 15 bp, Homo sapiens
agatcagtgcttgct

SEQ ID NO: 190221 - DNA, 15 bp, Homo sapiens
aagatcagtgcttgc

SEQ ID NO: 190222 - DNA, 15 bp, Homo sapiens
caagatcagtgcttg

SEQ ID NO: 190223 - DNA, 15 bp, Homo sapiens
ccaagatcagtgctt

SEQ ID NO: 190224 - DNA, 15 bp, Homo sapiens
cccaagatcagtgct

SEQ ID NO: 190225 - DNA, 15 bp, Homo sapiens
gcccaagatcagtgc

SEQ ID NO: 190226 - DNA, 15 bp, Homo sapiens
agcccaagatcagtg

SEQ ID NO: 190227 - DNA, 15 bp, Homo sapiens
tagcccaagatcagt

SEQ ID NO: 190228 - DNA, 15 bp, Homo sapiens
atagcccaagatcag

SEQ ID NO: 190229 - DNA, 15 bp, Homo sapiens
aatagcccaagatca

SEQ ID NO: 190230 - DNA, 15 bp, Homo sapiens
caatagcccaagatc

SEQ ID NO: 190231 - DNA, 15 bp, Homo sapiens
ccaatagcccaagat

SEQ ID NO: 190232 - DNA, 15 bp, Homo sapiens
accaatagcccaaga

SEQ ID NO: 190233 - DNA, 15 bp, Homo sapiens
aaccaatagcccaag

SEQ ID NO: 190234 - DNA, 15 bp, Homo sapiens
aaaccaatagcccaa

SEQ ID NO: 190235 - DNA, 15 bp, Homo sapiens
aaaaccaatagccca

SEQ ID NO: 190236 - DNA, 15 bp, Homo sapiens
caaaaccaatagccc

SEQ ID NO: 190237 - DNA, 15 bp, Homo sapiens
ccaaaaccaatagcc

SEQ ID NO: 190238 - DNA, 15 bp, Homo sapiens
tccaaaaccaatagc

SEQ ID NO: 190239 - DNA, 15 bp, Homo sapiens
ctccaaaaccaatag

SEQ ID NO: 190240 - DNA, 15 bp, Homo sapiens
cctccaaaaccaata

SEQ ID NO: 190241 - DNA, 15 bp, Homo sapiens
tcctccaaaaccaat

SEQ ID NO: 190242 - DNA, 15 bp, Homo sapiens
ttcctccaaaaccaa

SEQ ID NO: 190243 - DNA, 15 bp, Homo sapiens
tttcctccaaaacca

SEQ ID NO: 190244 - DNA, 15 bp, Homo sapiens
ctttcctccaaaacc

SEQ ID NO: 190245 - DNA, 15 bp, Homo sapiens
tctttcctccaaaac

SEQ ID NO: 190246 - DNA, 15 bp, Homo sapiens
ctctttcctccaaaa

SEQ ID NO: 190247 - DNA, 15 bp, Homo sapiens
cctctttcctccaaa

SEQ ID NO: 190248 - DNA, 15 bp, Homo sapiens
ccctctttcctccaa

SEQ ID NO: 190249 - DNA, 15 bp, Homo sapiens
tccctctttcctcca

SEQ ID NO: 190250 - DNA, 15 bp, Homo sapiens
ctccctctttcctcc

SEQ ID NO: 190251 - DNA, 15 bp, Homo sapiens
gctccctctttcctc

SEQ ID NO: 190252 - DNA, 15 bp, Homo sapiens
tgctccctctttcct

SEQ ID NO: 190253 - DNA, 15 bp, Homo sapiens
gtgctccctctttcc

SEQ ID NO: 190254 - DNA, 15 bp, Homo sapiens
tgtgctccctctttc

SEQ ID NO: 190255 - DNA, 15 bp, Homo sapiens
ttgtgctccctcttt

SEQ ID NO: 190256 - DNA, 15 bp, Homo sapiens
cttgtgctccctctt

SEQ ID NO: 190257 - DNA, 15 bp, Homo sapiens
ccttgtgctccctct

SEQ ID NO: 190258 - DNA, 15 bp, Homo sapiens
tccttgtgctccctc

SEQ ID NO: 190259 - DNA, 15 bp, Homo sapiens
atccttgtgctccct

SEQ ID NO: 190260 - DNA, 15 bp, Homo sapiens
catccttgtgctccc

SEQ ID NO: 190261 - DNA, 15 bp, Homo sapiens
ccatccttgtgctcc

SEQ ID NO: 190262 - DNA, 15 bp, Homo sapiens
tccatccttgtgctc

SEQ ID NO: 190263 - DNA, 15 bp, Homo sapiens
ttccatccttgtgct

SEQ ID NO: 190264 - DNA, 15 bp, Homo sapiens
cttccatccttgtgc

SEQ ID NO: 190265 - DNA, 15 bp, Homo sapiens
ccttccatccttgtg

SEQ ID NO: 190266 - DNA, 15 bp, Homo sapiens
cccttccatccttgt

SEQ ID NO: 190267 - DNA, 15 bp, Homo sapiens
ccccttccatccttg

SEQ ID NO: 190268 - DNA, 15 bp, Homo sapiens
gccccttccatcctt

SEQ ID NO: 190269 - DNA, 15 bp, Homo sapiens
ggccccttccatcct

SEQ ID NO: 190270 - DNA, 15 bp, Homo sapiens
tggccccttccatcc

SEQ ID NO: 190271 - DNA, 15 bp, Homo sapiens
ctggccccttccatc

SEQ ID NO: 190272 - DNA, 15 bp, Homo sapiens
cctggccccttccat

SEQ ID NO: 190273 - DNA, 15 bp, Homo sapiens
ccctggccccttcca

SEQ ID NO: 190274 - DNA, 15 bp, Homo sapiens
tccctggccccttcc

SEQ ID NO: 190275 - DNA, 15 bp, Homo sapiens
ttccctggccccttc

SEQ ID NO: 190276 - DNA, 15 bp, Homo sapiens
cttccctggcccctt

SEQ ID NO: 190277 - DNA, 15 bp, Homo sapiens
tcttccctggcccct

SEQ ID NO: 190278 - DNA, 15 bp, Homo sapiens
ctcttccctggcccc

SEQ ID NO: 190279 - DNA, 15 bp, Homo sapiens
tctcttccctggccc

SEQ ID NO: 190280 - DNA, 15 bp, Homo sapiens
ctctcttccctggcc

SEQ ID NO: 190281 - DNA, 15 bp, Homo sapiens
cctctcttccctggc

SEQ ID NO: 190282 - DNA, 15 bp, Homo sapiens
acctctcttccctgg

SEQ ID NO: 190283 - DNA, 15 bp, Homo sapiens
gacctctcttccctg

SEQ ID NO: 190284 - DNA, 15 bp, Homo sapiens
tgacctctcttccct

SEQ ID NO: 190285 - DNA, 15 bp, Homo sapiens
gtgacctctcttccc

SEQ ID NO: 190286 - DNA, 15 bp, Homo sapiens
cgtgacctctcttcc

SEQ ID NO: 190287 - DNA, 15 bp, Homo sapiens
ccgtgacctctcttc

SEQ ID NO: 190288 - DNA, 15 bp, Homo sapiens
accgtgacctctctt

SEQ ID NO: 190289 - DNA, 15 bp, Homo sapiens
caccgtgacctctct

SEQ ID NO: 190290 - DNA, 15 bp, Homo sapiens
ccaccgtgacctctc

SEQ ID NO: 190291 - DNA, 15 bp, Homo sapiens
cccaccgtgacctct

SEQ ID NO: 190292 - DNA, 15 bp, Homo sapiens
tcccaccgtgacctc

SEQ ID NO: 190293 - DNA, 15 bp, Homo sapiens
ctcccaccgtgacct

SEQ ID NO: 190294 - DNA, 15 bp, Homo sapiens
tctcccaccgtgacc

SEQ ID NO: 190295 - DNA, 15 bp, Homo sapiens
ttctcccaccgtgac

SEQ ID NO: 190296 - DNA, 15 bp, Homo sapiens
cttctcccaccgtga

SEQ ID NO: 190297 - DNA, 15 bp, Homo sapiens
ccttctcccaccgtg

SEQ ID NO: 190298 - DNA, 15 bp, Homo sapiens
tccttctcccaccgt

SEQ ID NO: 190299 - DNA, 15 bp, Homo sapiens
ctccttctcccaccg

SEQ ID NO: 190300 - DNA, 15 bp, Homo sapiens
tctccttctcccacc

SEQ ID NO: 190301 - DNA, 15 bp, Homo sapiens
ctctccttctcccac

SEQ ID NO: 190302 - DNA, 15 bp, Homo sapiens
actctccttctccca

SEQ ID NO: 190303 - DNA, 15 bp, Homo sapiens
gactctccttctccc

SEQ ID NO: 190304 - DNA, 15 bp, Homo sapiens
ggactctccttctcc

SEQ ID NO: 190305 - DNA, 15 bp, Homo sapiens
cggactctccttctc

SEQ ID NO: 190306 - DNA, 15 bp, Homo sapiens
gcggactctccttct

SEQ ID NO: 190307 - DNA, 15 bp, Homo sapiens
tgcggactctccttc

SEQ ID NO: 190308 - DNA, 15 bp, Homo sapiens
atgcggactctcctt

SEQ ID NO: 190309 - DNA, 15 bp, Homo sapiens
gatgcggactctcct

SEQ ID NO: 190310 - DNA, 15 bp, Homo sapiens
ggatgcggactctcc

SEQ ID NO: 190311 - DNA, 15 bp, Homo sapiens
tggatgcggactctc

SEQ ID NO: 190312 - DNA, 15 bp, Homo sapiens
atggatgcggactct

SEQ ID NO: 190313 - DNA, 15 bp, Homo sapiens
gatggatgcggactc

SEQ ID NO: 190314 - DNA, 15 bp, Homo sapiens
cgatggatgcggact

SEQ ID NO: 190315 - DNA, 15 bp, Homo sapiens
ccgatggatgcggac

SEQ ID NO: 190316 - DNA, 15 bp, Homo sapiens
tccgatggatgcgga

SEQ ID NO: 190317 - DNA, 15 bp, Homo sapiens
ctccgatggatgcgg

SEQ ID NO: 190318 - DNA, 15 bp, Homo sapiens
cctccgatggatgcg

SEQ ID NO: 190319 - DNA, 15 bp, Homo sapiens
ccctccgatggatgc

SEQ ID NO: 190320 - DNA, 15 bp, Homo sapiens
accctccgatggatg

SEQ ID NO: 190321 - DNA, 15 bp, Homo sapiens
aaccctccgatggat

SEQ ID NO: 190322 - DNA, 15 bp, Homo sapiens
aaaccctccgatgga

SEQ ID NO: 190323 - DNA, 15 bp, Homo sapiens
caaaccctccgatgg

SEQ ID NO: 190324 - DNA, 15 bp, Homo sapiens
acaaaccctccgatg

SEQ ID NO: 190325 - DNA, 15 bp, Homo sapiens
gacaaaccctccgat

SEQ ID NO: 190326 - DNA, 15 bp, Homo sapiens
tgacaaaccctccga

SEQ ID NO: 190327 - DNA, 15 bp, Homo sapiens
gtgacaaaccctccg

SEQ ID NO: 190328 - DNA, 15 bp, Homo sapiens
agtgacaaaccctcc

SEQ ID NO: 190329 - DNA, 15 bp, Homo sapiens
gagtgacaaaccctc

SEQ ID NO: 190330 - DNA, 15 bp, Homo sapiens
tgagtgacaaaccct

SEQ ID NO: 190331 - DNA, 15 bp, Homo sapiens
ctgagtgacaaaccc

SEQ ID NO: 190332 - DNA, 15 bp, Homo sapiens
cctgagtgacaaacc

SEQ ID NO: 190333 - DNA, 15 bp, Homo sapiens
gcctgagtgacaaac

SEQ ID NO: 190334 - DNA, 15 bp, Homo sapiens
ggcctgagtgacaaa

SEQ ID NO: 190335 - DNA, 15 bp, Homo sapiens
aggcctgagtgacaa

SEQ ID NO: 190336 - DNA, 15 bp, Homo sapiens
caggcctgagtgaca

SEQ ID NO: 190337 - DNA, 15 bp, Homo sapiens
tcaggcctgagtgac

SEQ ID NO: 190338 - DNA, 15 bp, Homo sapiens
ctcaggcctgagtga

SEQ ID NO: 190339 - DNA, 15 bp, Homo sapiens
actcaggcctgagtg

SEQ ID NO: 190340 - DNA, 15 bp, Homo sapiens
cactcaggcctgagt

SEQ ID NO: 190341 - DNA, 15 bp, Homo sapiens
ccactcaggcctgag

SEQ ID NO: 190342 - DNA, 15 bp, Homo sapiens
cccactcaggcctga

SEQ ID NO: 190343 - DNA, 15 bp, Homo sapiens
tcccactcaggcctg

SEQ ID NO: 190344 - DNA, 15 bp, Homo sapiens
ctcccactcaggcct

SEQ ID NO: 190345 - DNA, 15 bp, Homo sapiens
cctcccactcaggcc

SEQ ID NO: 190346 - DNA, 15 bp, Homo sapiens
gcctcccactcaggc

SEQ ID NO: 190347 - DNA, 15 bp, Homo sapiens
tgcctcccactcagg

SEQ ID NO: 190348 - DNA, 15 bp, Homo sapiens
gtgcctcccactcag

SEQ ID NO: 190349 - DNA, 15 bp, Homo sapiens
agtgcctcccactca

SEQ ID NO: 190350 - DNA, 15 bp, Homo sapiens
cagtgcctcccactc

SEQ ID NO: 190351 - DNA, 15 bp, Homo sapiens
ccagtgcctcccact

SEQ ID NO: 190352 - DNA, 15 bp, Homo sapiens
tccagtgcctcccac

SEQ ID NO: 190353 - DNA, 15 bp, Homo sapiens
ctccagtgcctccca

SEQ ID NO: 190354 - DNA, 15 bp, Homo sapiens
cctccagtgcctccc

SEQ ID NO: 190355 - DNA, 15 bp, Homo sapiens
gcctccagtgcctcc

SEQ ID NO: 190356 - DNA, 15 bp, Homo sapiens
tgcctccagtgcctc

SEQ ID NO: 190357 - DNA, 15 bp, Homo sapiens
ctgcctccagtgcct

SEQ ID NO: 190358 - DNA, 15 bp, Homo sapiens
cctgcctccagtgcc

SEQ ID NO: 190359 - DNA, 15 bp, Homo sapiens
ccctgcctccagtgc

SEQ ID NO: 190360 - DNA, 15 bp, Homo sapiens
tccctgcctccagtg

SEQ ID NO: 190361 - DNA, 15 bp, Homo sapiens
ctccctgcctccagt

SEQ ID NO: 190362 - DNA, 15 bp, Homo sapiens
tctccctgcctccag

SEQ ID NO: 190363 - DNA, 15 bp, Homo sapiens
ctctccctgcctcca

SEQ ID NO: 190364 - DNA, 15 bp, Homo sapiens
cctctccctgcctcc

SEQ ID NO: 190365 - DNA, 15 bp, Homo sapiens
gcctctccctgcctc

SEQ ID NO: 190366 - DNA, 15 bp, Homo sapiens
ggcctctccctgcct

SEQ ID NO: 190367 - DNA, 15 bp, Homo sapiens
tggcctctccctgcc

SEQ ID NO: 190368 - DNA, 15 bp, Homo sapiens
ctggcctctccctgc

SEQ ID NO: 190369 - DNA, 15 bp, Homo sapiens
actggcctctccctg

SEQ ID NO: 190370 - DNA, 15 bp, Homo sapiens
gactggcctctccct

SEQ ID NO: 190371 - DNA, 15 bp, Homo sapiens
tgactggcctctccc

SEQ ID NO: 190372 - DNA, 15 bp, Homo sapiens
ctgactggcctctcc

SEQ ID NO: 190373 - DNA, 15 bp, Homo sapiens
gctgactggcctctc

SEQ ID NO: 190374 - DNA, 15 bp, Homo sapiens
tgctgactggcctct

SEQ ID NO: 190375 - DNA, 15 bp, Homo sapiens
ctgctgactggcctc

SEQ ID NO: 190376 - DNA, 15 bp, Homo sapiens
gctgctgactggcct

SEQ ID NO: 190377 - DNA, 15 bp, Homo sapiens
tgctgctgactggcc

SEQ ID NO: 190378 - DNA, 15 bp, Homo sapiens
atgctgctgactggc

SEQ ID NO: 190379 - DNA, 15 bp, Homo sapiens
catgctgctgactgg

SEQ ID NO: 190380 - DNA, 15 bp, Homo sapiens
gcatgctgctgactg

SEQ ID NO: 190381 - DNA, 15 bp, Homo sapiens
cgcatgctgctgact

SEQ ID NO: 190382 - DNA, 15 bp, Homo sapiens
ccgcatgctgctgac

SEQ ID NO: 190383 - DNA, 15 bp, Homo sapiens
gccgcatgctgctga

SEQ ID NO: 190384 - DNA, 15 bp, Homo sapiens
ggccgcatgctgctg

SEQ ID NO: 190385 - DNA, 15 bp, Homo sapiens
tggccgcatgctgct

SEQ ID NO: 190386 - DNA, 15 bp, Homo sapiens
gtggccgcatgctgc

SEQ ID NO: 190387 - DNA, 15 bp, Homo sapiens
tgtggccgcatgctg

SEQ ID NO: 190388 - DNA, 15 bp, Homo sapiens
ctgtggccgcatgct

SEQ ID NO: 190389 - DNA, 15 bp, Homo sapiens
gctgtggccgcatgc

SEQ ID NO: 190390 - DNA, 15 bp, Homo sapiens
ggctgtggccgcatg

SEQ ID NO: 190391 - DNA, 15 bp, Homo sapiens
gggctgtggccgcat

SEQ ID NO: 190392 - DNA, 15 bp, Homo sapiens
tgggctgtggccgca

SEQ ID NO: 190393 - DNA, 15 bp, Homo sapiens
ctgggctgtggccgc

SEQ ID NO: 190394 - DNA, 15 bp, Homo sapiens
tctgggctgtggccg

SEQ ID NO: 190395 - DNA, 15 bp, Homo sapiens
ctctgggctgtggcc

SEQ ID NO: 190396 - DNA, 15 bp, Homo sapiens
tctctgggctgtggc

SEQ ID NO: 190397 - DNA, 15 bp, Homo sapiens
ttctctgggctgtgg

SEQ ID NO: 190398 - DNA, 15 bp, Homo sapiens
cttctctgggctgtg

SEQ ID NO: 190399 - DNA, 15 bp, Homo sapiens
gcttctctgggctgt

SEQ ID NO: 190400 - DNA, 15 bp, Homo sapiens
ggcttctctgggctg

SEQ ID NO: 190401 - DNA, 15 bp, Homo sapiens
tggcttctctgggct

SEQ ID NO: 190402 - DNA, 15 bp, Homo sapiens
ctggcttctctgggc

SEQ ID NO: 190403 - DNA, 15 bp, Homo sapiens
tctggcttctctggg

SEQ ID NO: 190404 - DNA, 15 bp, Homo sapiens
ctctggcttctctgg

SEQ ID NO: 190405 - DNA, 15 bp, Homo sapiens
cctctggcttctctg

SEQ ID NO: 190406 - DNA, 15 bp, Homo sapiens
ccctctggcttctct

SEQ ID NO: 190407 - DNA, 15 bp, Homo sapiens
cccctctggcttctc

SEQ ID NO: 190408 - DNA, 15 bp, Homo sapiens
acccctctggcttct

SEQ ID NO: 190409 - DNA, 15 bp, Homo sapiens
aacccctctggcttc

SEQ ID NO: 190410 - DNA, 15 bp, Homo sapiens
aaacccctctggctt

SEQ ID NO: 190411 - DNA, 15 bp, Homo sapiens
caaacccctctggct

SEQ ID NO: 190412 - DNA, 15 bp, Homo sapiens
gcaaacccctctggc

SEQ ID NO: 190413 - DNA, 15 bp, Homo sapiens
agcaaacccctctgg

SEQ ID NO: 190414 - DNA, 15 bp, Homo sapiens
cagcaaacccctctg

SEQ ID NO: 190415 - DNA, 15 bp, Homo sapiens
ccagcaaacccctct

SEQ ID NO: 190416 - DNA, 15 bp, Homo sapiens
accagcaaacccctc

SEQ ID NO: 190417 - DNA, 15 bp, Homo sapiens
caccagcaaacccct

SEQ ID NO: 190418 - DNA, 15 bp, Homo sapiens
ccaccagcaaacccc

SEQ ID NO: 190419 - DNA, 15 bp, Homo sapiens
cccaccagcaaaccc

SEQ ID NO: 190420 - DNA, 15 bp, Homo sapiens
acccaccagcaaacc

SEQ ID NO: 190421 - DNA, 15 bp, Homo sapiens
cacccaccagcaaac

SEQ ID NO: 190422 - DNA, 15 bp, Homo sapiens
ccacccaccagcaaa

SEQ ID NO: 190423 - DNA, 15 bp, Homo sapiens
cccacccaccagcaa

SEQ ID NO: 190424 - DNA, 15 bp, Homo sapiens
gcccacccaccagca

SEQ ID NO: 190425 - DNA, 15 bp, Homo sapiens
ggcccacccaccagc

SEQ ID NO: 190426 - DNA, 15 bp, Homo sapiens
gggcccacccaccag

SEQ ID NO: 190427 - DNA, 15 bp, Homo sapiens
ggggcccacccacca

SEQ ID NO: 190428 - DNA, 15 bp, Homo sapiens
tggggcccacccacc

SEQ ID NO: 190429 - DNA, 15 bp, Homo sapiens
ctggggcccacccac

SEQ ID NO: 190430 - DNA, 15 bp, Homo sapiens
gctggggcccaccca

SEQ ID NO: 190431 - DNA, 15 bp, Homo sapiens
ggctggggcccaccc

SEQ ID NO: 190432 - DNA, 15 bp, Homo sapiens
aggctggggcccacc

SEQ ID NO: 190433 - DNA, 15 bp, Homo sapiens
aaggctggggcccac

SEQ ID NO: 190434 - DNA, 15 bp, Homo sapiens
aaaggctggggccca

SEQ ID NO: 190435 - DNA, 15 bp, Homo sapiens
aaaaggctggggccc

SEQ ID NO: 190436 - DNA, 15 bp, Homo sapiens
gaaaaggctggggcc

SEQ ID NO: 190437 - DNA, 15 bp, Homo sapiens
tgaaaaggctggggc

SEQ ID NO: 190438 - DNA, 15 bp, Homo sapiens
ttgaaaaggctgggg

SEQ ID NO: 190439 - DNA, 15 bp, Homo sapiens
cttgaaaaggctggg

SEQ ID NO: 190440 - DNA, 15 bp, Homo sapiens
ccttgaaaaggctgg

SEQ ID NO: 190441 - DNA, 15 bp, Homo sapiens
cccttgaaaaggctg

SEQ ID NO: 190442 - DNA, 15 bp, Homo sapiens
tcccttgaaaaggct

SEQ ID NO: 190443 - DNA, 15 bp, Homo sapiens
ttcccttgaaaaggc

SEQ ID NO: 190444 - DNA, 15 bp, Homo sapiens
gttcccttgaaaagg

SEQ ID NO: 190445 - DNA, 15 bp, Homo sapiens
cgttcccttgaaaag

SEQ ID NO: 190446 - DNA, 15 bp, Homo sapiens
ccgttcccttgaaaa

SEQ ID NO: 190447 - DNA, 15 bp, Homo sapiens
gccgttcccttgaaa

SEQ ID NO: 190448 - DNA, 15 bp, Homo sapiens
tgccgttcccttgaa

SEQ ID NO: 190449 - DNA, 15 bp, Homo sapiens
ctgccgttcccttga

SEQ ID NO: 190450 - DNA, 15 bp, Homo sapiens
cctgccgttcccttg

SEQ ID NO: 190451 - DNA, 15 bp, Homo sapiens
acctgccgttccctt

SEQ ID NO: 190452 - DNA, 15 bp, Homo sapiens
gacctgccgttccct

SEQ ID NO: 190453 - DNA, 15 bp, Homo sapiens
agacctgccgttccc

SEQ ID NO: 190454 - DNA, 15 bp, Homo sapiens
cagacctgccgttcc

SEQ ID NO: 190455 - DNA, 15 bp, Homo sapiens
ccagacctgccgttc

SEQ ID NO: 190456 - DNA, 15 bp, Homo sapiens
cccagacctgccgtt

SEQ ID NO: 190457 - DNA, 15 bp, Homo sapiens
ccccagacctgccgt

SEQ ID NO: 190458 - DNA, 15 bp, Homo sapiens
tccccagacctgccg

SEQ ID NO: 190459 - DNA, 15 bp, Homo sapiens
ctccccagacctgcc

SEQ ID NO: 190460 - DNA, 15 bp, Homo sapiens
gctccccagacctgc

SEQ ID NO: 190461 - DNA, 15 bp, Homo sapiens
agctccccagacctg

SEQ ID NO: 190462 - DNA, 15 bp, Homo sapiens
cagctccccagacct

SEQ ID NO: 190463 - DNA, 15 bp, Homo sapiens
gcagctccccagacc

SEQ ID NO: 190464 - DNA, 15 bp, Homo sapiens
ggcagctccccagac

SEQ ID NO: 190465 - DNA, 15 bp, Homo sapiens
cggcagctccccaga

SEQ ID NO: 190466 - DNA, 15 bp, Homo sapiens
tcggcagctccccag

SEQ ID NO: 190467 - DNA, 15 bp, Homo sapiens
atcggcagctcccca

SEQ ID NO: 190468 - DNA, 15 bp, Homo sapiens
gatcggcagctcccc

SEQ ID NO: 190469 - DNA, 15 bp, Homo sapiens
agatcggcagctccc

SEQ ID NO: 190470 - DNA, 15 bp, Homo sapiens
gagatcggcagctcc

SEQ ID NO: 190471 - DNA, 15 bp, Homo sapiens
cgagatcggcagctc

SEQ ID NO: 190472 - DNA, 15 bp, Homo sapiens
ccgagatcggcagct

SEQ ID NO: 190473 - DNA, 15 bp, Homo sapiens
cccgagatcggcagc

SEQ ID NO: 190474 - DNA, 15 bp, Homo sapiens
ccccgagatcggcag

SEQ ID NO: 190475 - DNA, 15 bp, Homo sapiens
accccgagatcggca

SEQ ID NO: 190476 - DNA, 15 bp, Homo sapiens
caccccgagatcggc

SEQ ID NO: 190477 - DNA, 15 bp, Homo sapiens
acaccccgagatcgg

SEQ ID NO: 190478 - DNA, 15 bp, Homo sapiens
cacaccccgagatcg

SEQ ID NO: 190479 - DNA, 15 bp, Homo sapiens
tcacaccccgagatc

SEQ ID NO: 190480 - DNA, 15 bp, Homo sapiens
ctcacaccccgagat

SEQ ID NO: 190481 - DNA, 15 bp, Homo sapiens
cctcacaccccgaga

SEQ ID NO: 190482 - DNA, 15 bp, Homo sapiens
ccctcacaccccgag

SEQ ID NO: 190483 - DNA, 15 bp, Homo sapiens
accctcacaccccga

SEQ ID NO: 190484 - DNA, 15 bp, Homo sapiens
taccctcacaccccg

SEQ ID NO: 190485 - DNA, 15 bp, Homo sapiens
ttaccctcacacccc

SEQ ID NO: 190486 - DNA, 15 bp, Homo sapiens
gttaccctcacaccc

SEQ ID NO: 190487 - DNA, 15 bp, Homo sapiens
cgttaccctcacacc

SEQ ID NO: 190488 - DNA, 15 bp, Homo sapiens
ccgttaccctcacac

SEQ ID NO: 190489 - DNA, 15 bp, Homo sapiens
cccgttaccctcaca

SEQ ID NO: 190490 - DNA, 15 bp, Homo sapiens
gcccgttaccctcac

SEQ ID NO: 190491 - DNA, 15 bp, Homo sapiens
tgcccgttaccctca

SEQ ID NO: 190492 - DNA, 15 bp, Homo sapiens
ctgcccgttaccctc

SEQ ID NO: 190493 - DNA, 15 bp, Homo sapiens
cctgcccgttaccct

SEQ ID NO: 190494 - DNA, 15 bp, Homo sapiens
gcctgcccgttaccc

SEQ ID NO: 190495 - DNA, 15 bp, Homo sapiens
agcctgcccgttacc

SEQ ID NO: 190496 - DNA, 15 bp, Homo sapiens
cagcctgcccgttac

SEQ ID NO: 190497 - DNA, 15 bp, Homo sapiens
acagcctgcccgtta

SEQ ID NO: 190498 - DNA, 15 bp, Homo sapiens
cacagcctgcccgtt

SEQ ID NO: 190499 - DNA, 15 bp, Homo sapiens
ccacagcctgcccgt

SEQ ID NO: 190500 - DNA, 15 bp, Homo sapiens
gccacagcctgcccg

SEQ ID NO: 190501 - DNA, 15 bp, Homo sapiens
ggccacagcctgccc

SEQ ID NO: 190502 - DNA, 15 bp, Homo sapiens
gggccacagcctgcc

SEQ ID NO: 190503 - DNA, 15 bp, Homo sapiens
tgggccacagcctgc

SEQ ID NO: 190504 - DNA, 15 bp, Homo sapiens
gtgggccacagcctg

SEQ ID NO: 190505 - DNA, 15 bp, Homo sapiens
ggtgggccacagcct

SEQ ID NO: 190506 - DNA, 15 bp, Homo sapiens
gggtgggccacagcc

SEQ ID NO: 190507 - DNA, 15 bp, Homo sapiens
ggggtgggccacagc

SEQ ID NO: 190508 - DNA, 15 bp, Homo sapiens
aggggtgggccacag

SEQ ID NO: 190509 - DNA, 15 bp, Homo sapiens
gaggggtgggccaca

SEQ ID NO: 190510 - DNA, 15 bp, Homo sapiens
ggaggggtgggccac

SEQ ID NO: 190511 - DNA, 15 bp, Homo sapiens
aggaggggtgggcca

SEQ ID NO: 190512 - DNA, 15 bp, Homo sapiens
aaggaggggtgggcc

SEQ ID NO: 190513 - DNA, 15 bp, Homo sapiens
gaaggaggggtgggc

SEQ ID NO: 190514 - DNA, 15 bp, Homo sapiens
agaaggaggggtggg

SEQ ID NO: 190515 - DNA, 15 bp, Homo sapiens
gagaaggaggggtgg

SEQ ID NO: 190516 - DNA, 15 bp, Homo sapiens
tgagaaggaggggtg

SEQ ID NO: 190517 - DNA, 15 bp, Homo sapiens
ctgagaaggaggggt

SEQ ID NO: 190518 - DNA, 15 bp, Homo sapiens
cctgagaaggagggg

SEQ ID NO: 190519 - DNA, 15 bp, Homo sapiens
gcctgagaaggaggg

SEQ ID NO: 190520 - DNA, 15 bp, Homo sapiens
agcctgagaaggagg

SEQ ID NO: 190521 - DNA, 15 bp, Homo sapiens
gagcctgagaaggag

SEQ ID NO: 190522 - DNA, 15 bp, Homo sapiens
tgagcctgagaagga

SEQ ID NO: 190523 - DNA, 15 bp, Homo sapiens
gtgagcctgagaagg

SEQ ID NO: 190524 - DNA, 15 bp, Homo sapiens
agtgagcctgagaag

SEQ ID NO: 190525 - DNA, 15 bp, Homo sapiens
cagtgagcctgagaa

SEQ ID NO: 190526 - DNA, 15 bp, Homo sapiens
ccagtgagcctgaga

SEQ ID NO: 190527 - DNA, 15 bp, Homo sapiens
tccagtgagcctgag

SEQ ID NO: 190528 - DNA, 15 bp, Homo sapiens
gtccagtgagcctga

SEQ ID NO: 190529 - DNA, 15 bp, Homo sapiens
ggtccagtgagcctg

SEQ ID NO: 190530 - DNA, 15 bp, Homo sapiens
gggtccagtgagcct

SEQ ID NO: 190531 - DNA, 15 bp, Homo sapiens
ggggtccagtgagcc

SEQ ID NO: 190532 - DNA, 15 bp, Homo sapiens
aggggtccagtgagc

SEQ ID NO: 190533 - DNA, 15 bp, Homo sapiens
caggggtccagtgag

SEQ ID NO: 190534 - DNA, 15 bp, Homo sapiens
tcaggggtccagtga

SEQ ID NO: 190535 - DNA, 15 bp, Homo sapiens
gtcaggggtccagtg

SEQ ID NO: 190536 - DNA, 15 bp, Homo sapiens
ggtcaggggtccagt

SEQ ID NO: 190537 - DNA, 15 bp, Homo sapiens
cggtcaggggtccag

SEQ ID NO: 190538 - DNA, 15 bp, Homo sapiens
ccggtcaggggtcca

SEQ ID NO: 190539 - DNA, 15 bp, Homo sapiens
accggtcaggggtcc

SEQ ID NO: 190540 - DNA, 15 bp, Homo sapiens
aaccggtcaggggtc

SEQ ID NO: 190541 - DNA, 15 bp, Homo sapiens
aaaccggtcaggggt

SEQ ID NO: 190542 - DNA, 15 bp, Homo sapiens
gaaaccggtcagggg

SEQ ID NO: 190543 - DNA, 15 bp, Homo sapiens
tgaaaccggtcaggg

SEQ ID NO: 190544 - DNA, 15 bp, Homo sapiens
atgaaaccggtcagg

SEQ ID NO: 190545 - DNA, 15 bp, Homo sapiens
gatgaaaccggtcag

SEQ ID NO: 190546 - DNA, 15 bp, Homo sapiens
tgatgaaaccggtca

SEQ ID NO: 190547 - DNA, 15 bp, Homo sapiens
gtgatgaaaccggtc

SEQ ID NO: 190548 - DNA, 15 bp, Homo sapiens
ggtgatgaaaccggt

SEQ ID NO: 190549 - DNA, 15 bp, Homo sapiens
tggtgatgaaaccgg

SEQ ID NO: 190550 - DNA, 15 bp, Homo sapiens
atggtgatgaaaccg

SEQ ID NO: 190551 - DNA, 15 bp, Homo sapiens
aatggtgatgaaacc

SEQ ID NO: 190552 - DNA, 15 bp, Homo sapiens
taatggtgatgaaac

SEQ ID NO: 190553 - DNA, 15 bp, Homo sapiens
ataatggtgatgaaa

SEQ ID NO: 190554 - DNA, 15 bp, Homo sapiens
gataatggtgatgaa

SEQ ID NO: 190555 - DNA, 15 bp, Homo sapiens
ggataatggtgatga

SEQ ID NO: 190556 - DNA, 15 bp, Homo sapiens
tggataatggtgatg

SEQ ID NO: 190557 - DNA, 15 bp, Homo sapiens
ttggataatggtgat

SEQ ID NO: 190558 - DNA, 15 bp, Homo sapiens
cttggataatggtga

SEQ ID NO: 190559 - DNA, 15 bp, Homo sapiens
ccttggataatggtg

SEQ ID NO: 190560 - DNA, 15 bp, Homo sapiens
gccttggataatggt

SEQ ID NO: 190561 - DNA, 15 bp, Homo sapiens
agccttggataatgg

SEQ ID NO: 190562 - DNA, 15 bp, Homo sapiens
aagccttggataatg

SEQ ID NO: 190563 - DNA, 15 bp, Homo sapiens
aaagccttggataat

SEQ ID NO: 190564 - DNA, 15 bp, Homo sapiens
caaagccttggataa

SEQ ID NO: 190565 - DNA, 15 bp, Homo sapiens
tcaaagccttggata

SEQ ID NO: 190566 - DNA, 15 bp, Homo sapiens
ttcaaagccttggat

SEQ ID NO: 190567 - DNA, 15 bp, Homo sapiens
tttcaaagccttgga

SEQ ID NO: 190568 - DNA, 15 bp, Homo sapiens
ttttcaaagccttgg

SEQ ID NO: 190569 - DNA, 15 bp, Homo sapiens
cttttcaaagccttg

SEQ ID NO: 190570 - DNA, 15 bp, Homo sapiens
tcttttcaaagcctt

SEQ ID NO: 190571 - DNA, 15 bp, Homo sapiens
gtcttttcaaagcct

SEQ ID NO: 190572 - DNA, 15 bp, Homo sapiens
ggtcttttcaaagcc

SEQ ID NO: 190573 - DNA, 15 bp, Homo sapiens
gggtcttttcaaagc

SEQ ID NO: 190574 - DNA, 15 bp, Homo sapiens
ggggtcttttcaaag

SEQ ID NO: 190575 - DNA, 15 bp, Homo sapiens
gggggtcttttcaaa

SEQ ID NO: 190576 - DNA, 15 bp, Homo sapiens
agggggtcttttcaa

SEQ ID NO: 190577 - DNA, 15 bp, Homo sapiens
cagggggtcttttca

SEQ ID NO: 190578 - DNA, 15 bp, Homo sapiens
ccagggggtcttttc

SEQ ID NO: 190579 - DNA, 15 bp, Homo sapiens
gccagggggtctttt

SEQ ID NO: 190580 - DNA, 15 bp, Homo sapiens
ggccagggggtcttt

SEQ ID NO: 190581 - DNA, 15 bp, Homo sapiens
aggccagggggtctt

SEQ ID NO: 190582 - DNA, 15 bp, Homo sapiens
aaggccagggggtct

SEQ ID NO: 190583 - DNA, 15 bp, Homo sapiens
gaaggccagggggtc

SEQ ID NO: 190584 - DNA, 15 bp, Homo sapiens
ggaaggccagggggt

SEQ ID NO: 190585 - DNA, 15 bp, Homo sapiens
aggaaggccaggggg

SEQ ID NO: 190586 - DNA, 15 bp, Homo sapiens
caggaaggccagggg

SEQ ID NO: 190587 - DNA, 15 bp, Homo sapiens
gcaggaaggccaggg

SEQ ID NO: 190588 - DNA, 15 bp, Homo sapiens
ggcaggaaggccagg

SEQ ID NO: 190589 - DNA, 15 bp, Homo sapiens
tggcaggaaggccag

SEQ ID NO: 190590 - DNA, 15 bp, Homo sapiens
gtggcaggaaggcca

SEQ ID NO: 190591 - DNA, 15 bp, Homo sapiens
tgtggcaggaaggcc

SEQ ID NO: 190592 - DNA, 15 bp, Homo sapiens
atgtggcaggaaggc

SEQ ID NO: 190593 - DNA, 15 bp, Homo sapiens
catgtggcaggaagg

SEQ ID NO: 190594 - DNA, 15 bp, Homo sapiens
acatgtggcaggaag

SEQ ID NO: 190595 - DNA, 15 bp, Homo sapiens
cacatgtggcaggaa

SEQ ID NO: 190596 - DNA, 15 bp, Homo sapiens
gcacatgtggcagga

SEQ ID NO: 190597 - DNA, 15 bp, Homo sapiens
ggcacatgtggcagg

SEQ ID NO: 190598 - DNA, 15 bp, Homo sapiens
gggcacatgtggcag

SEQ ID NO: 190599 - DNA, 15 bp, Homo sapiens
agggcacatgtggca

SEQ ID NO: 190600 - DNA, 15 bp, Homo sapiens
tagggcacatgtggc

SEQ ID NO: 190601 - DNA, 15 bp, Homo sapiens
ctagggcacatgtgg

SEQ ID NO: 190602 - DNA, 15 bp, Homo sapiens
gctagggcacatgtg

SEQ ID NO: 190603 - DNA, 15 bp, Homo sapiens
agctagggcacatgt

SEQ ID NO: 190604 - DNA, 15 bp, Homo sapiens
tagctagggcacatg

SEQ ID NO: 190605 - DNA, 15 bp, Homo sapiens
atagctagggcacat

SEQ ID NO: 190606 - DNA, 15 bp, Homo sapiens
tatagctagggcaca

SEQ ID NO: 190607 - DNA, 15 bp, Homo sapiens
ctatagctagggcac

SEQ ID NO: 190608 - DNA, 15 bp, Homo sapiens
cctatagctagggca

SEQ ID NO: 190609 - DNA, 15 bp, Homo sapiens
ccctatagctagggc

SEQ ID NO: 190610 - DNA, 15 bp, Homo sapiens
gccctatagctaggg

SEQ ID NO: 190611 - DNA, 15 bp, Homo sapiens
agccctatagctagg

SEQ ID NO: 190612 - DNA, 15 bp, Homo sapiens
aagccctatagctag

SEQ ID NO: 190613 - DNA, 15 bp, Homo sapiens
gaagccctatagcta

SEQ ID NO: 190614 - DNA, 15 bp, Homo sapiens
cgaagccctatagct

SEQ ID NO: 190615 - DNA, 15 bp, Homo sapiens
acgaagccctatagc

SEQ ID NO: 190616 - DNA, 15 bp, Homo sapiens
aacgaagccctatag

SEQ ID NO: 190617 - DNA, 15 bp, Homo sapiens
gaacgaagccctata

SEQ ID NO: 190618 - DNA, 15 bp, Homo sapiens
ggaacgaagccctat

SEQ ID NO: 190619 - DNA, 15 bp, Homo sapiens
gggaacgaagcccta

SEQ ID NO: 190620 - DNA, 15 bp, Homo sapiens
ggggaacgaagccct

SEQ ID NO: 190621 - DNA, 15 bp, Homo sapiens
aggggaacgaagccc

SEQ ID NO: 190622 - DNA, 15 bp, Homo sapiens
gaggggaacgaagcc

SEQ ID NO: 190623 - DNA, 15 bp, Homo sapiens
ggaggggaacgaagc

SEQ ID NO: 190624 - DNA, 15 bp, Homo sapiens
tggaggggaacgaag

SEQ ID NO: 190625 - DNA, 15 bp, Homo sapiens
gtggaggggaacgaa

SEQ ID NO: 190626 - DNA, 15 bp, Homo sapiens
tgtggaggggaacga

SEQ ID NO: 190627 - DNA, 15 bp, Homo sapiens
ttgtggaggggaacg

SEQ ID NO: 190628 - DNA, 15 bp, Homo sapiens
tttgtggaggggaac

SEQ ID NO: 190629 - DNA, 15 bp, Homo sapiens
atttgtggaggggaa

SEQ ID NO: 190630 - DNA, 15 bp, Homo sapiens
catttgtggagggga

SEQ ID NO: 190631 - DNA, 15 bp, Homo sapiens
ccatttgtggagggg

SEQ ID NO: 190632 - DNA, 15 bp, Homo sapiens
accatttgtggaggg

SEQ ID NO: 190633 - DNA, 15 bp, Homo sapiens
caccatttgtggagg

SEQ ID NO: 190634 - DNA, 15 bp, Homo sapiens
gcaccatttgtggag

SEQ ID NO: 190635 - DNA, 15 bp, Homo sapiens
tgcaccatttgtgga

SEQ ID NO: 190636 - DNA, 15 bp, Homo sapiens
ctgcaccatttgtgg

SEQ ID NO: 190637 - DNA, 15 bp, Homo sapiens
tctgcaccatttgtg

SEQ ID NO: 190638 - DNA, 15 bp, Homo sapiens
gtctgcaccatttgt

SEQ ID NO: 190639 - DNA, 15 bp, Homo sapiens
tgtctgcaccatttg

SEQ ID NO: 190640 - DNA, 15 bp, Homo sapiens
ctgtctgcaccattt

SEQ ID NO: 190641 - DNA, 15 bp, Homo sapiens
gctgtctgcaccatt

SEQ ID NO: 190642 - DNA, 15 bp, Homo sapiens
tgctgtctgcaccat

SEQ ID NO: 190643 - DNA, 15 bp, Homo sapiens
atgctgtctgcacca

SEQ ID NO: 190644 - DNA, 15 bp, Homo sapiens
catgctgtctgcacc

SEQ ID NO: 190645 - DNA, 15 bp, Homo sapiens
tcatgctgtctgcac

SEQ ID NO: 190646 - DNA, 15 bp, Homo sapiens
ctcatgctgtctgca

SEQ ID NO: 190647 - DNA, 15 bp, Homo sapiens
gctcatgctgtctgc

SEQ ID NO: 190648 - DNA, 15 bp, Homo sapiens
ggctcatgctgtctg

SEQ ID NO: 190649 - DNA, 15 bp, Homo sapiens
tggctcatgctgtct

SEQ ID NO: 190650 - DNA, 15 bp, Homo sapiens
gtggctcatgctgtc

SEQ ID NO: 190651 - DNA, 15 bp, Homo sapiens
ggtggctcatgctgt

SEQ ID NO: 190652 - DNA, 15 bp, Homo sapiens
gggtggctcatgctg

SEQ ID NO: 190653 - DNA, 15 bp, Homo sapiens
agggtggctcatgct

SEQ ID NO: 190654 - DNA, 15 bp, Homo sapiens
cagggtggctcatgc

SEQ ID NO: 190655 - DNA, 15 bp, Homo sapiens
ccagggtggctcatg

SEQ ID NO: 190656 - DNA, 15 bp, Homo sapiens
gccagggtggctcat

SEQ ID NO: 190657 - DNA, 15 bp, Homo sapiens
tgccagggtggctca

SEQ ID NO: 190658 - DNA, 15 bp, Homo sapiens
ctgccagggtggctc

SEQ ID NO: 190659 - DNA, 15 bp, Homo sapiens
cctgccagggtggct

SEQ ID NO: 190660 - DNA, 15 bp, Homo sapiens
ccctgccagggtggc

SEQ ID NO: 190661 - DNA, 15 bp, Homo sapiens
cccctgccagggtgg

SEQ ID NO: 190662 - DNA, 15 bp, Homo sapiens
ccccctgccagggtg

SEQ ID NO: 190663 - DNA, 15 bp, Homo sapiens
gccccctgccagggt

SEQ ID NO: 190664 - DNA, 15 bp, Homo sapiens
agccccctgccaggg

SEQ ID NO: 190665 - DNA, 15 bp, Homo sapiens
cagccccctgccagg

SEQ ID NO: 190666 - DNA, 15 bp, Homo sapiens
ccagccccctgccag

SEQ ID NO: 190667 - DNA, 15 bp, Homo sapiens
cccagccccctgcca

SEQ ID NO: 190668 - DNA, 15 bp, Homo sapiens
ccccagccccctgcc

SEQ ID NO: 190669 - DNA, 15 bp, Homo sapiens
cccccagccccctgc

SEQ ID NO: 190670 - DNA, 15 bp, Homo sapiens
acccccagccccctg

SEQ ID NO: 190671 - DNA, 15 bp, Homo sapiens
gacccccagccccct

SEQ ID NO: 190672 - DNA, 15 bp, Homo sapiens
ggacccccagccccc

SEQ ID NO: 190673 - DNA, 15 bp, Homo sapiens
cggacccccagcccc

SEQ ID NO: 190674 - DNA, 15 bp, Homo sapiens
acggacccccagccc

SEQ ID NO: 190675 - DNA, 15 bp, Homo sapiens
cacggacccccagcc

SEQ ID NO: 190676 - DNA, 15 bp, Homo sapiens
ccacggacccccagc

SEQ ID NO: 190677 - DNA, 15 bp, Homo sapiens
cccacggacccccag

SEQ ID NO: 190678 - DNA, 15 bp, Homo sapiens
ccccacggaccccca

SEQ ID NO: 190679 - DNA, 15 bp, Homo sapiens
accccacggaccccc

SEQ ID NO: 190680 - DNA, 15 bp, Homo sapiens
taccccacggacccc

SEQ ID NO: 190681 - DNA, 15 bp, Homo sapiens
ctaccccacggaccc

SEQ ID NO: 190682 - DNA, 15 bp, Homo sapiens
cctaccccacggacc

SEQ ID NO: 190683 - DNA, 15 bp, Homo sapiens
tcctaccccacggac

SEQ ID NO: 190684 - DNA, 15 bp, Homo sapiens
ctcctaccccacgga

SEQ ID NO: 190685 - DNA, 15 bp, Homo sapiens
actcctaccccacgg

SEQ ID NO: 190686 - DNA, 15 bp, Homo sapiens
aactcctaccccacg

SEQ ID NO: 190687 - DNA, 15 bp, Homo sapiens
caactcctaccccac

SEQ ID NO: 190688 - DNA, 15 bp, Homo sapiens
ccaactcctacccca

SEQ ID NO: 190689 - DNA, 15 bp, Homo sapiens
cccaactcctacccc

SEQ ID NO: 190690 - DNA, 15 bp, Homo sapiens
ccccaactcctaccc

SEQ ID NO: 190691 - DNA, 15 bp, Homo sapiens
cccccaactcctacc

SEQ ID NO: 190692 - DNA, 15 bp, Homo sapiens
acccccaactcctac

SEQ ID NO: 190693 - DNA, 15 bp, Homo sapiens
tacccccaactccta

SEQ ID NO: 190694 - DNA, 15 bp, Homo sapiens
ctacccccaactcct

SEQ ID NO: 190695 - DNA, 15 bp, Homo sapiens
gctacccccaactcc

SEQ ID NO: 190696 - DNA, 15 bp, Homo sapiens
agctacccccaactc

SEQ ID NO: 190697 - DNA, 15 bp, Homo sapiens
cagctacccccaact

SEQ ID NO: 190698 - DNA, 15 bp, Homo sapiens
tcagctacccccaac

SEQ ID NO: 190699 - DNA, 15 bp, Homo sapiens
ctcagctacccccaa

SEQ ID NO: 190700 - DNA, 15 bp, Homo sapiens
gctcagctaccccca

SEQ ID NO: 190701 - DNA, 15 bp, Homo sapiens
cgctcagctaccccc

SEQ ID NO: 190702 - DNA, 15 bp, Homo sapiens
acgctcagctacccc

SEQ ID NO: 190703 - DNA, 15 bp, Homo sapiens
aacgctcagctaccc

SEQ ID NO: 190704 - DNA, 15 bp, Homo sapiens
gaacgctcagctacc

SEQ ID NO: 190705 - DNA, 15 bp, Homo sapiens
agaacgctcagctac

SEQ ID NO: 190706 - DNA, 15 bp, Homo sapiens
aagaacgctcagcta

SEQ ID NO: 190707 - DNA, 15 bp, Homo sapiens
aaagaacgctcagct

SEQ ID NO: 190708 - DNA, 15 bp, Homo sapiens
gaaagaacgctcagc

SEQ ID NO: 190709 - DNA, 15 bp, Homo sapiens
ggaaagaacgctcag

SEQ ID NO: 190710 - DNA, 15 bp, Homo sapiens
aggaaagaacgctca

SEQ ID NO: 190711 - DNA, 15 bp, Homo sapiens
caggaaagaacgctc

SEQ ID NO: 190712 - DNA, 15 bp, Homo sapiens
acaggaaagaacgct

SEQ ID NO: 190713 - DNA, 15 bp, Homo sapiens
gacaggaaagaacgc

SEQ ID NO: 190714 - DNA, 15 bp, Homo sapiens
ggacaggaaagaacg

SEQ ID NO: 190715 - DNA, 15 bp, Homo sapiens
gggacaggaaagaac

SEQ ID NO: 190716 - DNA, 15 bp, Homo sapiens
ggggacaggaaagaa

SEQ ID NO: 190717 - DNA, 15 bp, Homo sapiens
tggggacaggaaaga

SEQ ID NO: 190718 - DNA, 15 bp, Homo sapiens
gtggggacaggaaag

SEQ ID NO: 190719 - DNA, 15 bp, Homo sapiens
cgtggggacaggaaa

SEQ ID NO: 190720 - DNA, 15 bp, Homo sapiens
ccgtggggacaggaa

SEQ ID NO: 190721 - DNA, 15 bp, Homo sapiens
accgtggggacagga

SEQ ID NO: 190722 - DNA, 15 bp, Homo sapiens
caccgtggggacagg

SEQ ID NO: 190723 - DNA, 15 bp, Homo sapiens
gcaccgtggggacag

SEQ ID NO: 190724 - DNA, 15 bp, Homo sapiens
ggcaccgtggggaca

SEQ ID NO: 190725 - DNA, 15 bp, Homo sapiens
aggcaccgtggggac

SEQ ID NO: 190726 - DNA, 15 bp, Homo sapiens
caggcaccgtgggga

SEQ ID NO: 190727 - DNA, 15 bp, Homo sapiens
ccaggcaccgtgggg

SEQ ID NO: 190728 - DNA, 15 bp, Homo sapiens
accaggcaccgtggg

SEQ ID NO: 190729 - DNA, 15 bp, Homo sapiens
caccaggcaccgtgg

SEQ ID NO: 190730 - DNA, 15 bp, Homo sapiens
gcaccaggcaccgtg

SEQ ID NO: 190731 - DNA, 15 bp, Homo sapiens
agcaccaggcaccgt

SEQ ID NO: 190732 - DNA, 15 bp, Homo sapiens
cagcaccaggcaccg

SEQ ID NO: 190733 - DNA, 15 bp, Homo sapiens
ccagcaccaggcacc

SEQ ID NO: 190734 - DNA, 15 bp, Homo sapiens
cccagcaccaggcac

SEQ ID NO: 190735 - DNA, 15 bp, Homo sapiens
ccccagcaccaggca

SEQ ID NO: 190736 - DNA, 15 bp, Homo sapiens
gccccagcaccaggc

SEQ ID NO: 190737 - DNA, 15 bp, Homo sapiens
agccccagcaccagg

SEQ ID NO: 190738 - DNA, 15 bp, Homo sapiens
aagccccagcaccag

SEQ ID NO: 190739 - DNA, 15 bp, Homo sapiens
caagccccagcacca

SEQ ID NO: 190740 - DNA, 15 bp, Homo sapiens
ccaagccccagcacc

SEQ ID NO: 190741 - DNA, 15 bp, Homo sapiens
gccaagccccagcac

SEQ ID NO: 190742 - DNA, 15 bp, Homo sapiens
tgccaagccccagca

SEQ ID NO: 190743 - DNA, 15 bp, Homo sapiens
ctgccaagccccagc

SEQ ID NO: 190744 - DNA, 15 bp, Homo sapiens
gctgccaagccccag

SEQ ID NO: 190745 - DNA, 15 bp, Homo sapiens
ggctgccaagcccca

SEQ ID NO: 190746 - DNA, 15 bp, Homo sapiens
tggctgccaagcccc

SEQ ID NO: 190747 - DNA, 15 bp, Homo sapiens
ctggctgccaagccc

SEQ ID NO: 190748 - DNA, 15 bp, Homo sapiens
cctggctgccaagcc

SEQ ID NO: 190749 - DNA, 15 bp, Homo sapiens
ccctggctgccaagc

SEQ ID NO: 190750 - DNA, 15 bp, Homo sapiens
accctggctgccaag

SEQ ID NO: 190751 - DNA, 15 bp, Homo sapiens
aaccctggctgccaa

SEQ ID NO: 190752 - DNA, 15 bp, Homo sapiens
caaccctggctgcca

SEQ ID NO: 190753 - DNA, 15 bp, Homo sapiens
ccaaccctggctgcc

SEQ ID NO: 190754 - DNA, 15 bp, Homo sapiens
cccaaccctggctgc

SEQ ID NO: 190755 - DNA, 15 bp, Homo sapiens
tcccaaccctggctg

SEQ ID NO: 190756 - DNA, 15 bp, Homo sapiens
gtcccaaccctggct

SEQ ID NO: 190757 - DNA, 15 bp, Homo sapiens
tgtcccaaccctggc

SEQ ID NO: 190758 - DNA, 15 bp, Homo sapiens
ctgtcccaaccctgg

SEQ ID NO: 190759 - DNA, 15 bp, Homo sapiens
gctgtcccaaccctg

SEQ ID NO: 190760 - DNA, 15 bp, Homo sapiens
ggctgtcccaaccct

SEQ ID NO: 190761 - DNA, 15 bp, Homo sapiens
aggctgtcccaaccc

SEQ ID NO: 190762 - DNA, 15 bp, Homo sapiens
caggctgtcccaacc

SEQ ID NO: 190763 - DNA, 15 bp, Homo sapiens
ccaggctgtcccaac

SEQ ID NO: 190764 - DNA, 15 bp, Homo sapiens
gccaggctgtcccaa

SEQ ID NO: 190765 - DNA, 15 bp, Homo sapiens
agccaggctgtccca

SEQ ID NO: 190766 - DNA, 15 bp, Homo sapiens
aagccaggctgtccc

SEQ ID NO: 190767 - DNA, 15 bp, Homo sapiens
aaagccaggctgtcc

SEQ ID NO: 190768 - DNA, 15 bp, Homo sapiens
taaagccaggctgtc

SEQ ID NO: 190769 - DNA, 15 bp, Homo sapiens
ctaaagccaggctgt

SEQ ID NO: 190770 - DNA, 15 bp, Homo sapiens
gctaaagccaggctg

SEQ ID NO: 190771 - DNA, 15 bp, Homo sapiens
tgctaaagccaggct

SEQ ID NO: 190772 - DNA, 15 bp, Homo sapiens
ctgctaaagccaggc

SEQ ID NO: 190773 - DNA, 15 bp, Homo sapiens
cctgctaaagccagg

SEQ ID NO: 190774 - DNA, 15 bp, Homo sapiens
acctgctaaagccag

SEQ ID NO: 190775 - DNA, 15 bp, Homo sapiens
gacctgctaaagcca

SEQ ID NO: 190776 - DNA, 15 bp, Homo sapiens
ggacctgctaaagcc

SEQ ID NO: 190777 - DNA, 15 bp, Homo sapiens
aggacctgctaaagc

SEQ ID NO: 190778 - DNA, 15 bp, Homo sapiens
caggacctgctaaag

SEQ ID NO: 190779 - DNA, 15 bp, Homo sapiens
tcaggacctgctaaa

SEQ ID NO: 190780 - DNA, 15 bp, Homo sapiens
ctcaggacctgctaa

SEQ ID NO: 190781 - DNA, 15 bp, Homo sapiens
actcaggacctgcta

SEQ ID NO: 190782 - DNA, 15 bp, Homo sapiens
gactcaggacctgct

SEQ ID NO: 190783 - DNA, 15 bp, Homo sapiens
tgactcaggacctgc

SEQ ID NO: 190784 - DNA, 15 bp, Homo sapiens
ctgactcaggacctg

SEQ ID NO: 190785 - DNA, 15 bp, Homo sapiens
cctgactcaggacct

SEQ ID NO: 190786 - DNA, 15 bp, Homo sapiens
ccctgactcaggacc

SEQ ID NO: 190787 - DNA, 15 bp, Homo sapiens
cccctgactcaggac

SEQ ID NO: 190788 - DNA, 15 bp, Homo sapiens
acccctgactcagga

SEQ ID NO: 190789 - DNA, 15 bp, Homo sapiens
gacccctgactcagg

SEQ ID NO: 190790 - DNA, 15 bp, Homo sapiens
agacccctgactcag

SEQ ID NO: 190791 - DNA, 15 bp, Homo sapiens
gagacccctgactca

SEQ ID NO: 190792 - DNA, 15 bp, Homo sapiens
tgagacccctgactc

SEQ ID NO: 190793 - DNA, 15 bp, Homo sapiens
ctgagacccctgact

SEQ ID NO: 190794 - DNA, 15 bp, Homo sapiens
cctgagacccctgac

SEQ ID NO: 190795 - DNA, 15 bp, Homo sapiens
gcctgagacccctga

SEQ ID NO: 190796 - DNA, 15 bp, Homo sapiens
agcctgagacccctg

SEQ ID NO: 190797 - DNA, 15 bp, Homo sapiens
gagcctgagacccct

SEQ ID NO: 190798 - DNA, 15 bp, Homo sapiens
ggagcctgagacccc

SEQ ID NO: 190799 - DNA, 15 bp, Homo sapiens
cggagcctgagaccc

SEQ ID NO: 190800 - DNA, 15 bp, Homo sapiens
gcggagcctgagacc

SEQ ID NO: 190801 - DNA, 15 bp, Homo sapiens
tgcggagcctgagac

SEQ ID NO: 190802 - DNA, 15 bp, Homo sapiens
ctgcggagcctgaga

SEQ ID NO: 190803 - DNA, 15 bp, Homo sapiens
gctgcggagcctgag

SEQ ID NO: 190804 - DNA, 15 bp, Homo sapiens
tgctgcggagcctga

SEQ ID NO: 190805 - DNA, 15 bp, Homo sapiens
gtgctgcggagcctg

SEQ ID NO: 190806 - DNA, 15 bp, Homo sapiens
tgtgctgcggagcct

SEQ ID NO: 190807 - DNA, 15 bp, Homo sapiens
gtgtgctgcggagcc

SEQ ID NO: 190808 - DNA, 15 bp, Homo sapiens
tgtgtgctgcggagc

SEQ ID NO: 190809 - DNA, 15 bp, Homo sapiens
ctgtgtgctgcggag

SEQ ID NO: 190810 - DNA, 15 bp, Homo sapiens
actgtgtgctgcgga

SEQ ID NO: 190811 - DNA, 15 bp, Homo sapiens
gactgtgtgctgcgg

SEQ ID NO: 190812 - DNA, 15 bp, Homo sapiens
ggactgtgtgctgcg

SEQ ID NO: 190813 - DNA, 15 bp, Homo sapiens
gggactgtgtgctgc

SEQ ID NO: 190814 - DNA, 15 bp, Homo sapiens
ggggactgtgtgctg

SEQ ID NO: 190815 - DNA, 15 bp, Homo sapiens
tggggactgtgtgct

SEQ ID NO: 190816 - DNA, 15 bp, Homo sapiens
ctggggactgtgtgc

SEQ ID NO: 190817 - DNA, 15 bp, Homo sapiens
cctggggactgtgtg

SEQ ID NO: 190818 - DNA, 15 bp, Homo sapiens
gcctggggactgtgt

SEQ ID NO: 190819 - DNA, 15 bp, Homo sapiens
tgcctggggactgtg

SEQ ID NO: 190820 - DNA, 15 bp, Homo sapiens
ctgcctggggactgt

SEQ ID NO: 190821 - DNA, 15 bp, Homo sapiens
cctgcctggggactg

SEQ ID NO: 190822 - DNA, 15 bp, Homo sapiens
acctgcctggggact

SEQ ID NO: 190823 - DNA, 15 bp, Homo sapiens
cacctgcctggggac

SEQ ID NO: 190824 - DNA, 15 bp, Homo sapiens
acacctgcctgggga

SEQ ID NO: 190825 - DNA, 15 bp, Homo sapiens
gacacctgcctgggg

SEQ ID NO: 190826 - DNA, 15 bp, Homo sapiens
tgacacctgcctggg

SEQ ID NO: 190827 - DNA, 15 bp, Homo sapiens
ctgacacctgcctgg

SEQ ID NO: 190828 - DNA, 15 bp, Homo sapiens
cctgacacctgcctg

SEQ ID NO: 190829 - DNA, 15 bp, Homo sapiens
tcctgacacctgcct

SEQ ID NO: 190830 - DNA, 15 bp, Homo sapiens
atcctgacacctgcc

SEQ ID NO: 190831 - DNA, 15 bp, Homo sapiens
catcctgacacctgc

SEQ ID NO: 190832 - DNA, 15 bp, Homo sapiens
ccatcctgacacctg

SEQ ID NO: 190833 - DNA, 15 bp, Homo sapiens
cccatcctgacacct

SEQ ID NO: 190834 - DNA, 15 bp, Homo sapiens
tcccatcctgacacc

SEQ ID NO: 190835 - DNA, 15 bp, Homo sapiens
atcccatcctgacac

SEQ ID NO: 190836 - DNA, 15 bp, Homo sapiens
catcccatcctgaca

SEQ ID NO: 190837 - DNA, 15 bp, Homo sapiens
acatcccatcctgac

SEQ ID NO: 190838 - DNA, 15 bp, Homo sapiens
cacatcccatcctga

SEQ ID NO: 190839 - DNA, 15 bp, Homo sapiens
ccacatcccatcctg

SEQ ID NO: 190840 - DNA, 15 bp, Homo sapiens
gccacatcccatcct

SEQ ID NO: 190841 - DNA, 15 bp, Homo sapiens
ggccacatcccatcc

SEQ ID NO: 190842 - DNA, 15 bp, Homo sapiens
tggccacatcccatc

SEQ ID NO: 190843 - DNA, 15 bp, Homo sapiens
ctggccacatcccat

SEQ ID NO: 190844 - DNA, 15 bp, Homo sapiens
tctggccacatccca

SEQ ID NO: 190845 - DNA, 15 bp, Homo sapiens
ctctggccacatccc

SEQ ID NO: 190846 - DNA, 15 bp, Homo sapiens
tctctggccacatcc

SEQ ID NO: 190847 - DNA, 15 bp, Homo sapiens
ttctctggccacatc

SEQ ID NO: 190848 - DNA, 15 bp, Homo sapiens
tttctctggccacat

SEQ ID NO: 190849 - DNA, 15 bp, Homo sapiens
ctttctctggccaca

SEQ ID NO: 190850 - DNA, 15 bp, Homo sapiens
cctttctctggccac

SEQ ID NO: 190851 - DNA, 15 bp, Homo sapiens
gcctttctctggcca

SEQ ID NO: 190852 - DNA, 15 bp, Homo sapiens
tgcctttctctggcc

SEQ ID NO: 190853 - DNA, 15 bp, Homo sapiens
atgcctttctctggc

SEQ ID NO: 190854 - DNA, 15 bp, Homo sapiens
catgcctttctctgg

SEQ ID NO: 190855 - DNA, 15 bp, Homo sapiens
acatgcctttctctg

SEQ ID NO: 190856 - DNA, 15 bp, Homo sapiens
cacatgcctttctct

SEQ ID NO: 190857 - DNA, 15 bp, Homo sapiens
gcacatgcctttctc

SEQ ID NO: 190858 - DNA, 15 bp, Homo sapiens
agcacatgcctttct

SEQ ID NO: 190859 - DNA, 15 bp, Homo sapiens
gagcacatgcctttc

SEQ ID NO: 190860 - DNA, 15 bp, Homo sapiens
agagcacatgccttt

SEQ ID NO: 190861 - DNA, 15 bp, Homo sapiens
cagagcacatgcctt

SEQ ID NO: 190862 - DNA, 15 bp, Homo sapiens
acagagcacatgcct

SEQ ID NO: 190863 - DNA, 15 bp, Homo sapiens
gacagagcacatgcc

SEQ ID NO: 190864 - DNA, 15 bp, Homo sapiens
agacagagcacatgc

SEQ ID NO: 190865 - DNA, 15 bp, Homo sapiens
cagacagagcacatg

SEQ ID NO: 190866 - DNA, 15 bp, Homo sapiens
ccagacagagcacat

SEQ ID NO: 190867 - DNA, 15 bp, Homo sapiens
cccagacagagcaca

SEQ ID NO: 190868 - DNA, 15 bp, Homo sapiens
ccccagacagagcac

SEQ ID NO: 190869 - DNA, 15 bp, Homo sapiens
tccccagacagagca

SEQ ID NO: 190870 - DNA, 15 bp, Homo sapiens
atccccagacagagc

SEQ ID NO: 190871 - DNA, 15 bp, Homo sapiens
tatccccagacagag

SEQ ID NO: 190872 - DNA, 15 bp, Homo sapiens
ctatccccagacaga

SEQ ID NO: 190873 - DNA, 15 bp, Homo sapiens
gctatccccagacag

SEQ ID NO: 190874 - DNA, 15 bp, Homo sapiens
agctatccccagaca

SEQ ID NO: 190875 - DNA, 15 bp, Homo sapiens
cagctatccccagac

SEQ ID NO: 190876 - DNA, 15 bp, Homo sapiens
gcagctatccccaga

SEQ ID NO: 190877 - DNA, 15 bp, Homo sapiens
ggcagctatccccag

SEQ ID NO: 190878 - DNA, 15 bp, Homo sapiens
tggcagctatcccca

SEQ ID NO: 190879 - DNA, 15 bp, Homo sapiens
gtggcagctatcccc

SEQ ID NO: 190880 - DNA, 15 bp, Homo sapiens
ggtggcagctatccc

SEQ ID NO: 190881 - DNA, 15 bp, Homo sapiens
gggtggcagctatcc

SEQ ID NO: 190882 - DNA, 15 bp, Homo sapiens
tgggtggcagctatc

SEQ ID NO: 190883 - DNA, 15 bp, Homo sapiens
ctgggtggcagctat

SEQ ID NO: 190884 - DNA, 15 bp, Homo sapiens
gctgggtggcagcta

SEQ ID NO: 190885 - DNA, 15 bp, Homo sapiens
agctgggtggcagct

SEQ ID NO: 190886 - DNA, 15 bp, Homo sapiens
cagctgggtggcagc

SEQ ID NO: 190887 - DNA, 15 bp, Homo sapiens
tcagctgggtggcag

SEQ ID NO: 190888 - DNA, 15 bp, Homo sapiens
gtcagctgggtggca

SEQ ID NO: 190889 - DNA, 15 bp, Homo sapiens
tgtcagctgggtggc

SEQ ID NO: 190890 - DNA, 15 bp, Homo sapiens
gtgtcagctgggtgg

SEQ ID NO: 190891 - DNA, 15 bp, Homo sapiens
tgtgtcagctgggtg

SEQ ID NO: 190892 - DNA, 15 bp, Homo sapiens
ctgtgtcagctgggt

SEQ ID NO: 190893 - DNA, 15 bp, Homo sapiens
actgtgtcagctggg

SEQ ID NO: 190894 - DNA, 15 bp, Homo sapiens
aactgtgtcagctgg

SEQ ID NO: 190895 - DNA, 15 bp, Homo sapiens
caactgtgtcagctg

SEQ ID NO: 190896 - DNA, 15 bp, Homo sapiens
ccaactgtgtcagct

SEQ ID NO: 190897 - DNA, 15 bp, Homo sapiens
gccaactgtgtcagc

SEQ ID NO: 190898 - DNA, 15 bp, Homo sapiens
tgccaactgtgtcag

SEQ ID NO: 190899 - DNA, 15 bp, Homo sapiens
atgccaactgtgtca

SEQ ID NO: 190900 - DNA, 15 bp, Homo sapiens
catgccaactgtgtc

SEQ ID NO: 190901 - DNA, 15 bp, Homo sapiens
tcatgccaactgtgt

SEQ ID NO: 190902 - DNA, 15 bp, Homo sapiens
ctcatgccaactgtg

SEQ ID NO: 190903 - DNA, 15 bp, Homo sapiens
tctcatgccaactgt

SEQ ID NO: 190904 - DNA, 15 bp, Homo sapiens
atctcatgccaactg

SEQ ID NO: 190905 - DNA, 15 bp, Homo sapiens
aatctcatgccaact

SEQ ID NO: 190906 - DNA, 15 bp, Homo sapiens
caatctcatgccaac

SEQ ID NO: 190907 - DNA, 15 bp, Homo sapiens
acaatctcatgccaa

SEQ ID NO: 190908 - DNA, 15 bp, Homo sapiens
cacaatctcatgcca

SEQ ID NO: 190909 - DNA, 15 bp, Homo sapiens
ccacaatctcatgcc

SEQ ID NO: 190910 - DNA, 15 bp, Homo sapiens
tccacaatctcatgc

SEQ ID NO: 190911 - DNA, 15 bp, Homo sapiens
ctccacaatctcatg

SEQ ID NO: 190912 - DNA, 15 bp, Homo sapiens
actccacaatctcat

SEQ ID NO: 190913 - DNA, 15 bp, Homo sapiens
aactccacaatctca

SEQ ID NO: 190914 - DNA, 15 bp, Homo sapiens
aaactccacaatctc

SEQ ID NO: 190915 - DNA, 15 bp, Homo sapiens
aaaactccacaatct

SEQ ID NO: 190916 - DNA, 15 bp, Homo sapiens
taaaactccacaatc

SEQ ID NO: 190917 - DNA, 15 bp, Homo sapiens
ataaaactccacaat

SEQ ID NO: 190918 - DNA, 15 bp, Homo sapiens
cataaaactccacaa

SEQ ID NO: 190919 - DNA, 15 bp, Homo sapiens
ccataaaactccaca

SEQ ID NO: 190920 - DNA, 15 bp, Homo sapiens
tccataaaactccac

SEQ ID NO: 190921 - DNA, 15 bp, Homo sapiens
ctccataaaactcca

SEQ ID NO: 190922 - DNA, 15 bp, Homo sapiens
actccataaaactcc

SEQ ID NO: 190923 - DNA, 15 bp, Homo sapiens
tactccataaaactc

SEQ ID NO: 190924 - DNA, 15 bp, Homo sapiens
ttactccataaaact

SEQ ID NO: 190925 - DNA, 15 bp, Homo sapiens
tttactccataaaac

SEQ ID NO: 190926 - DNA, 15 bp, Homo sapiens
ttttactccataaaa

SEQ ID NO: 190927 - DNA, 15 bp, Homo sapiens
attttactccataaa

SEQ ID NO: 190928 - DNA, 15 bp, Homo sapiens
gattttactccataa

SEQ ID NO: 190929 - DNA, 15 bp, Homo sapiens
tgattttactccata

SEQ ID NO: 190930 - DNA, 15 bp, Homo sapiens
gtgattttactccat

SEQ ID NO: 190931 - DNA, 15 bp, Homo sapiens
tgtgattttactcca

SEQ ID NO: 190932 - DNA, 15 bp, Homo sapiens
ttgtgattttactcc

SEQ ID NO: 190933 - DNA, 15 bp, Homo sapiens
tttgtgattttactc

SEQ ID NO: 190934 - DNA, 15 bp, Homo sapiens
atttgtgattttact

SEQ ID NO: 190935 - DNA, 15 bp, Homo sapiens
gatttgtgattttac

SEQ ID NO: 190936 - DNA, 15 bp, Homo sapiens
agatttgtgatttta

SEQ ID NO: 190937 - DNA, 15 bp, Homo sapiens
cagatttgtgatttt

SEQ ID NO: 190938 - DNA, 15 bp, Homo sapiens
ccagatttgtgattt

SEQ ID NO: 190939 - DNA, 15 bp, Homo sapiens
cccagatttgtgatt

SEQ ID NO: 190940 - DNA, 15 bp, Homo sapiens
acccagatttgtgat

SEQ ID NO: 190941 - DNA, 15 bp, Homo sapiens
aacccagatttgtga

SEQ ID NO: 190942 - DNA, 15 bp, Homo sapiens
aaacccagatttgtg

SEQ ID NO: 190943 - DNA, 15 bp, Homo sapiens
aaaacccagatttgt

SEQ ID NO: 190944 - DNA, 15 bp, Homo sapiens
aaaaacccagatttg

SEQ ID NO: 190945 - DNA, 15 bp, Homo sapiens
aaaaaacccagattt

SEQ ID NO: 190946 - DNA, 15 bp, Homo sapiens
taaaaaacccagatt

SEQ ID NO: 190947 - DNA, 15 bp, Homo sapiens
ttaaaaaacccagat

SEQ ID NO: 190948 - DNA, 15 bp, Homo sapiens
cttaaaaaacccaga

SEQ ID NO: 190949 - DNA, 15 bp, Homo sapiens
acttaaaaaacccag

SEQ ID NO: 190950 - DNA, 15 bp, Homo sapiens
tacttaaaaaaccca

SEQ ID NO: 190951 - DNA, 15 bp, Homo sapiens
ttacttaaaaaaccc

SEQ ID NO: 190952 - DNA, 15 bp, Homo sapiens
tttacttaaaaaacc

SEQ ID NO: 190953 - DNA, 15 bp, Homo sapiens
ttttacttaaaaaac

SEQ ID NO: 190954 - DNA, 15 bp, Homo sapiens
gttttacttaaaaaa

SEQ ID NO: 190955 - DNA, 15 bp, Homo sapiens
ggttttacttaaaaa

SEQ ID NO: 190956 - DNA, 15 bp, Homo sapiens
aggttttacttaaaa

SEQ ID NO: 190957 - DNA, 15 bp, Homo sapiens
aaggttttacttaaa

SEQ ID NO: 190958 - DNA, 15 bp, Homo sapiens
gaaggttttacttaa

SEQ ID NO: 190959 - DNA, 15 bp, Homo sapiens
agaaggttttactta

SEQ ID NO: 190960 - DNA, 15 bp, Homo sapiens
tagaaggttttactt

SEQ ID NO: 190961 - DNA, 15 bp, Homo sapiens
atagaaggttttact

SEQ ID NO: 190962 - DNA, 15 bp, Homo sapiens
catagaaggttttac

SEQ ID NO: 190963 - DNA, 15 bp, Homo sapiens
tcatagaaggtttta

SEQ ID NO: 190964 - DNA, 15 bp, Homo sapiens
ctcatagaaggtttt

SEQ ID NO: 190965 - DNA, 15 bp, Homo sapiens
actcatagaaggttt

SEQ ID NO: 190966 - DNA, 15 bp, Homo sapiens
aactcatagaaggtt

SEQ ID NO: 190967 - DNA, 15 bp, Homo sapiens
caactcatagaaggt

SEQ ID NO: 190968 - DNA, 15 bp, Homo sapiens
gcaactcatagaagg

SEQ ID NO: 190969 - DNA, 15 bp, Homo sapiens
ggcaactcatagaag

SEQ ID NO: 190970 - DNA, 15 bp, Homo sapiens
tggcaactcatagaa

SEQ ID NO: 190971 - DNA, 15 bp, Homo sapiens
atggcaactcataga

SEQ ID NO: 190972 - DNA, 15 bp, Homo sapiens
gatggcaactcatag

SEQ ID NO: 190973 - DNA, 15 bp, Homo sapiens
agatggcaactcata

SEQ ID NO: 190974 - DNA, 15 bp, Homo sapiens
gagatggcaactcat

SEQ ID NO: 190975 - DNA, 15 bp, Homo sapiens
agagatggcaactca

SEQ ID NO: 190976 - DNA, 15 bp, Homo sapiens
cagagatggcaactc

SEQ ID NO: 190977 - DNA, 15 bp, Homo sapiens
ccagagatggcaact

SEQ ID NO: 190978 - DNA, 15 bp, Homo sapiens
gccagagatggcaac

SEQ ID NO: 190979 - DNA, 15 bp, Homo sapiens
ggccagagatggcaa

SEQ ID NO: 190980 - DNA, 15 bp, Homo sapiens
aggccagagatggca

SEQ ID NO: 190981 - DNA, 15 bp, Homo sapiens
aaggccagagatggc

SEQ ID NO: 190982 - DNA, 15 bp, Homo sapiens
gaaggccagagatgg

SEQ ID NO: 190983 - DNA, 15 bp, Homo sapiens
tgaaggccagagatg

SEQ ID NO: 190984 - DNA, 15 bp, Homo sapiens
ttgaaggccagagat

SEQ ID NO: 190985 - DNA, 15 bp, Homo sapiens
gttgaaggccagaga

SEQ ID NO: 190986 - DNA, 15 bp, Homo sapiens
tgttgaaggccagag

SEQ ID NO: 190987 - DNA, 15 bp, Homo sapiens
atgttgaaggccaga

SEQ ID NO: 190988 - DNA, 15 bp, Homo sapiens
tatgttgaaggccag

SEQ ID NO: 190989 - DNA, 15 bp, Homo sapiens
ctatgttgaaggcca

SEQ ID NO: 190990 - DNA, 15 bp, Homo sapiens
cctatgttgaaggcc

SEQ ID NO: 190991 - DNA, 15 bp, Homo sapiens
tcctatgttgaaggc

SEQ ID NO: 190992 - DNA, 15 bp, Homo sapiens
atcctatgttgaagg

SEQ ID NO: 190993 - DNA, 15 bp, Homo sapiens
aatcctatgttgaag

SEQ ID NO: 190994 - DNA, 15 bp, Homo sapiens
aaatcctatgttgaa

SEQ ID NO: 190995 - DNA, 15 bp, Homo sapiens
caaatcctatgttga

SEQ ID NO: 190996 - DNA, 15 bp, Homo sapiens
ccaaatcctatgttg

SEQ ID NO: 190997 - DNA, 15 bp, Homo sapiens
cccaaatcctatgtt

SEQ ID NO: 190998 - DNA, 15 bp, Homo sapiens
acccaaatcctatgt

SEQ ID NO: 190999 - DNA, 15 bp, Homo sapiens
gacccaaatcctatg

SEQ ID NO: 191000 - DNA, 15 bp, Homo sapiens
agacccaaatcctat

SEQ ID NO: 191001 - DNA, 15 bp, Homo sapiens
aagacccaaatccta

SEQ ID NO: 191002 - DNA, 15 bp, Homo sapiens
aaagacccaaatcct

SEQ ID NO: 191003 - DNA, 15 bp, Homo sapiens
gaaagacccaaatcc

SEQ ID NO: 191004 - DNA, 15 bp, Homo sapiens
ggaaagacccaaatc

SEQ ID NO: 191005 - DNA, 15 bp, Homo sapiens
aggaaagacccaaat

SEQ ID NO: 191006 - DNA, 15 bp, Homo sapiens
caggaaagacccaaa

SEQ ID NO: 191007 - DNA, 15 bp, Homo sapiens
ccaggaaagacccaa

SEQ ID NO: 191008 - DNA, 15 bp, Homo sapiens
cccaggaaagaccca

SEQ ID NO: 191009 - DNA, 15 bp, Homo sapiens
acccaggaaagaccc

SEQ ID NO: 191010 - DNA, 15 bp, Homo sapiens
cacccaggaaagacc

SEQ ID NO: 191011 - DNA, 15 bp, Homo sapiens
tcacccaggaaagac

SEQ ID NO: 191012 - DNA, 15 bp, Homo sapiens
ctcacccaggaaaga

SEQ ID NO: 191013 - DNA, 15 bp, Homo sapiens
gctcacccaggaaag

SEQ ID NO: 191014 - DNA, 15 bp, Homo sapiens
agctcacccaggaaa

SEQ ID NO: 191015 - DNA, 15 bp, Homo sapiens
cagctcacccaggaa

SEQ ID NO: 191016 - DNA, 15 bp, Homo sapiens
ccagctcacccagga

SEQ ID NO: 191017 - DNA, 15 bp, Homo sapiens
accagctcacccagg

SEQ ID NO: 191018 - DNA, 15 bp, Homo sapiens
caccagctcacccag

SEQ ID NO: 191019 - DNA, 15 bp, Homo sapiens
gcaccagctcaccca

SEQ ID NO: 191020 - DNA, 15 bp, Homo sapiens
agcaccagctcaccc

SEQ ID NO: 191021 - DNA, 15 bp, Homo sapiens
aagcaccagctcacc

SEQ ID NO: 191022 - DNA, 15 bp, Homo sapiens
aaagcaccagctcac

SEQ ID NO: 191023 - DNA, 15 bp, Homo sapiens
caaagcaccagctca

SEQ ID NO: 191024 - DNA, 15 bp, Homo sapiens
acaaagcaccagctc

SEQ ID NO: 191025 - DNA, 15 bp, Homo sapiens
cacaaagcaccagct

SEQ ID NO: 191026 - DNA, 15 bp, Homo sapiens
ccacaaagcaccagc

SEQ ID NO: 191027 - DNA, 15 bp, Homo sapiens
cccacaaagcaccag

SEQ ID NO: 191028 - DNA, 15 bp, Homo sapiens
gcccacaaagcacca

SEQ ID NO: 191029 - DNA, 15 bp, Homo sapiens
ggcccacaaagcacc

SEQ ID NO: 191030 - DNA, 15 bp, Homo sapiens
tggcccacaaagcac

SEQ ID NO: 191031 - DNA, 15 bp, Homo sapiens
ctggcccacaaagca

SEQ ID NO: 191032 - DNA, 15 bp, Homo sapiens
cctggcccacaaagc

SEQ ID NO: 191033 - DNA, 15 bp, Homo sapiens
gcctggcccacaaag

SEQ ID NO: 191034 - DNA, 15 bp, Homo sapiens
ggcctggcccacaaa

SEQ ID NO: 191035 - DNA, 15 bp, Homo sapiens
gggcctggcccacaa

SEQ ID NO: 191036 - DNA, 15 bp, Homo sapiens
agggcctggcccaca

SEQ ID NO: 191037 - DNA, 15 bp, Homo sapiens
cagggcctggcccac

SEQ ID NO: 191038 - DNA, 15 bp, Homo sapiens
ccagggcctggccca

SEQ ID NO: 191039 - DNA, 15 bp, Homo sapiens
cccagggcctggccc

SEQ ID NO: 191040 - DNA, 15 bp, Homo sapiens
tcccagggcctggcc

SEQ ID NO: 191041 - DNA, 15 bp, Homo sapiens
ctcccagggcctggc

SEQ ID NO: 191042 - DNA, 15 bp, Homo sapiens
gctcccagggcctgg

SEQ ID NO: 191043 - DNA, 15 bp, Homo sapiens
agctcccagggcctg

SEQ ID NO: 191044 - DNA, 15 bp, Homo sapiens
cagctcccagggcct

SEQ ID NO: 191045 - DNA, 15 bp, Homo sapiens
gcagctcccagggcc

SEQ ID NO: 191046 - DNA, 15 bp, Homo sapiens
tgcagctcccagggc

SEQ ID NO: 191047 - DNA, 15 bp, Homo sapiens
ttgcagctcccaggg

SEQ ID NO: 191048 - DNA, 15 bp, Homo sapiens
cttgcagctcccagg

SEQ ID NO: 191049 - DNA, 15 bp, Homo sapiens
acttgcagctcccag

SEQ ID NO: 191050 - DNA, 15 bp, Homo sapiens
tacttgcagctccca

SEQ ID NO: 191051 - DNA, 15 bp, Homo sapiens
gtacttgcagctccc

SEQ ID NO: 191052 - DNA, 15 bp, Homo sapiens
ggtacttgcagctcc

SEQ ID NO: 191053 - DNA, 15 bp, Homo sapiens
tggtacttgcagctc

SEQ ID NO: 191054 - DNA, 15 bp, Homo sapiens
ctggtacttgcagct

SEQ ID NO: 191055 - DNA, 15 bp, Homo sapiens
actggtacttgcagc

SEQ ID NO: 191056 - DNA, 15 bp, Homo sapiens
aactggtacttgcag

SEQ ID NO: 191057 - DNA, 15 bp, Homo sapiens
caactggtacttgca

SEQ ID NO: 191058 - DNA, 15 bp, Homo sapiens
ccaactggtacttgc

SEQ ID NO: 191059 - DNA, 15 bp, Homo sapiens
cccaactggtacttg

SEQ ID NO: 191060 - DNA, 15 bp, Homo sapiens
tcccaactggtactt

SEQ ID NO: 191061 - DNA, 15 bp, Homo sapiens
atcccaactggtact

SEQ ID NO: 191062 - DNA, 15 bp, Homo sapiens
gatcccaactggtac

SEQ ID NO: 191063 - DNA, 15 bp, Homo sapiens
agatcccaactggta

SEQ ID NO: 191064 - DNA, 15 bp, Homo sapiens
cagatcccaactggt

SEQ ID NO: 191065 - DNA, 15 bp, Homo sapiens
gcagatcccaactgg

SEQ ID NO: 191066 - DNA, 15 bp, Homo sapiens
ggcagatcccaactg

SEQ ID NO: 191067 - DNA, 15 bp, Homo sapiens
tggcagatcccaact

SEQ ID NO: 191068 - DNA, 15 bp, Homo sapiens
atggcagatcccaac

SEQ ID NO: 191069 - DNA, 15 bp, Homo sapiens
aatggcagatcccaa

SEQ ID NO: 191070 - DNA, 15 bp, Homo sapiens
caatggcagatccca

SEQ ID NO: 191071 - DNA, 15 bp, Homo sapiens
gcaatggcagatccc

SEQ ID NO: 191072 - DNA, 15 bp, Homo sapiens
ggcaatggcagatcc

SEQ ID NO: 191073 - DNA, 15 bp, Homo sapiens
gggcaatggcagatc

SEQ ID NO: 191074 - DNA, 15 bp, Homo sapiens
agggcaatggcagat

SEQ ID NO: 191075 - DNA, 15 bp, Homo sapiens
cagggcaatggcaga

SEQ ID NO: 191076 - DNA, 15 bp, Homo sapiens
acagggcaatggcag

SEQ ID NO: 191077 - DNA, 15 bp, Homo sapiens
cacagggcaatggca

SEQ ID NO: 191078 - DNA, 15 bp, Homo sapiens
ccacagggcaatggc

SEQ ID NO: 191079 - DNA, 15 bp, Homo sapiens
tccacagggcaatgg

SEQ ID NO: 191080 - DNA, 15 bp, Homo sapiens
ttccacagggcaatg

SEQ ID NO: 191081 - DNA, 15 bp, Homo sapiens
cttccacagggcaat

SEQ ID NO: 191082 - DNA, 15 bp, Homo sapiens
ccttccacagggcaa

SEQ ID NO: 191083 - DNA, 15 bp, Homo sapiens
tccttccacagggca

SEQ ID NO: 191084 - DNA, 15 bp, Homo sapiens
atccttccacagggc

SEQ ID NO: 191085 - DNA, 15 bp, Homo sapiens
aatccttccacaggg

SEQ ID NO: 191086 - DNA, 15 bp, Homo sapiens
aaatccttccacagg

SEQ ID NO: 191087 - DNA, 15 bp, Homo sapiens
aaaatccttccacag

SEQ ID NO: 191088 - DNA, 15 bp, Homo sapiens
taaaatccttccaca

SEQ ID NO: 191089 - DNA, 15 bp, Homo sapiens
ttaaaatccttccac

SEQ ID NO: 191090 - DNA, 15 bp, Homo sapiens
cttaaaatccttcca

SEQ ID NO: 191091 - DNA, 15 bp, Homo sapiens
gcttaaaatccttcc

SEQ ID NO: 191092 - DNA, 15 bp, Homo sapiens
tgcttaaaatccttc

SEQ ID NO: 191093 - DNA, 15 bp, Homo sapiens
ctgcttaaaatcctt

SEQ ID NO: 191094 - DNA, 15 bp, Homo sapiens
cctgcttaaaatcct

SEQ ID NO: 191095 - DNA, 15 bp, Homo sapiens
ccctgcttaaaatcc

SEQ ID NO: 191096 - DNA, 15 bp, Homo sapiens
cccctgcttaaaatc

SEQ ID NO: 191097 - DNA, 15 bp, Homo sapiens
acccctgcttaaaat

SEQ ID NO: 191098 - DNA, 15 bp, Homo sapiens
cacccctgcttaaaa

SEQ ID NO: 191099 - DNA, 15 bp, Homo sapiens
tcacccctgcttaaa

SEQ ID NO: 191100 - DNA, 15 bp, Homo sapiens
ttcacccctgcttaa

SEQ ID NO: 191101 - DNA, 15 bp, Homo sapiens
tttcacccctgctta

SEQ ID NO: 191102 - DNA, 15 bp, Homo sapiens
gtttcacccctgctt

SEQ ID NO: 191103 - DNA, 15 bp, Homo sapiens
tgtttcacccctgct

SEQ ID NO: 191104 - DNA, 15 bp, Homo sapiens
atgtttcacccctgc

SEQ ID NO: 191105 - DNA, 15 bp, Homo sapiens
catgtttcacccctg

SEQ ID NO: 191106 - DNA, 15 bp, Homo sapiens
ccatgtttcacccct

SEQ ID NO: 191107 - DNA, 15 bp, Homo sapiens
accatgtttcacccc

SEQ ID NO: 191108 - DNA, 15 bp, Homo sapiens
gaccatgtttcaccc

SEQ ID NO: 191109 - DNA, 15 bp, Homo sapiens
tgaccatgtttcacc

SEQ ID NO: 191110 - DNA, 15 bp, Homo sapiens
ctgaccatgtttcac

SEQ ID NO: 191111 - DNA, 15 bp, Homo sapiens
tctgaccatgtttca

SEQ ID NO: 191112 - DNA, 15 bp, Homo sapiens
gtctgaccatgtttc

SEQ ID NO: 191113 - DNA, 15 bp, Homo sapiens
agtctgaccatgttt

SEQ ID NO: 191114 - DNA, 15 bp, Homo sapiens
aagtctgaccatgtt

SEQ ID NO: 191115 - DNA, 15 bp, Homo sapiens
caagtctgaccatgt

SEQ ID NO: 191116 - DNA, 15 bp, Homo sapiens
ccaagtctgaccatg

SEQ ID NO: 191117 - DNA, 15 bp, Homo sapiens
tccaagtctgaccat

SEQ ID NO: 191118 - DNA, 15 bp, Homo sapiens
atccaagtctgacca

SEQ ID NO: 191119 - DNA, 15 bp, Homo sapiens
aatccaagtctgacc

SEQ ID NO: 191120 - DNA, 15 bp, Homo sapiens
aaatccaagtctgac

SEQ ID NO: 191121 - DNA, 15 bp, Homo sapiens
taaatccaagtctga

SEQ ID NO: 191122 - DNA, 15 bp, Homo sapiens
ctaaatccaagtctg

SEQ ID NO: 191123 - DNA, 15 bp, Homo sapiens
tctaaatccaagtct

SEQ ID NO: 191124 - DNA, 15 bp, Homo sapiens
ctctaaatccaagtc

SEQ ID NO: 191125 - DNA, 15 bp, Homo sapiens
tctctaaatccaagt

SEQ ID NO: 191126 - DNA, 15 bp, Homo sapiens
atctctaaatccaag

SEQ ID NO: 191127 - DNA, 15 bp, Homo sapiens
catctctaaatccaa

SEQ ID NO: 191128 - DNA, 15 bp, Homo sapiens
tcatctctaaatcca

SEQ ID NO: 191129 - DNA, 15 bp, Homo sapiens
ctcatctctaaatcc

SEQ ID NO: 191130 - DNA, 15 bp, Homo sapiens
cctcatctctaaatc

SEQ ID NO: 191131 - DNA, 15 bp, Homo sapiens
tcctcatctctaaat

SEQ ID NO: 191132 - DNA, 15 bp, Homo sapiens
ttcctcatctctaaa

SEQ ID NO: 191133 - DNA, 15 bp, Homo sapiens
tttcctcatctctaa

SEQ ID NO: 191134 - DNA, 15 bp, Homo sapiens
ttttcctcatctcta

SEQ ID NO: 191135 - DNA, 15 bp, Homo sapiens
tttttcctcatctct

SEQ ID NO: 191136 - DNA, 15 bp, Homo sapiens
ttttttcctcatctc

SEQ ID NO: 191137 - DNA, 15 bp, Homo sapiens
tttttttcctcatct

SEQ ID NO: 191138 - DNA, 15 bp, Homo sapiens
ttttttttcctcatc

SEQ ID NO: 191139 - DNA, 15 bp, Homo sapiens
gttttttttcctcat

SEQ ID NO: 191140 - DNA, 15 bp, Homo sapiens
tgttttttttcctca

SEQ ID NO: 191141 - DNA, 15 bp, Homo sapiens
ttgttttttttcctc

SEQ ID NO: 191142 - DNA, 15 bp, Homo sapiens
tttgttttttttcct

SEQ ID NO: 191143 - DNA, 15 bp, Homo sapiens
ttttgttttttttcc

SEQ ID NO: 191144 - DNA, 15 bp, Homo sapiens
attttgttttttttc

SEQ ID NO: 191145 - DNA, 15 bp, Homo sapiens
gattttgtttttttt

SEQ ID NO: 191146 - DNA, 15 bp, Homo sapiens
tgattttgttttttt

SEQ ID NO: 191147 - DNA, 15 bp, Homo sapiens
gtgattttgtttttt

SEQ ID NO: 191148 - DNA, 15 bp, Homo sapiens
cgtgattttgttttt

SEQ ID NO: 191149 - DNA, 15 bp, Homo sapiens
ccgtgattttgtttt

SEQ ID NO: 191150 - DNA, 15 bp, Homo sapiens
accgtgattttgttt

SEQ ID NO: 191151 - DNA, 15 bp, Homo sapiens
caccgtgattttgtt

SEQ ID NO: 191152 - DNA, 15 bp, Homo sapiens
gcaccgtgattttgt

SEQ ID NO: 191153 - DNA, 15 bp, Homo sapiens
ggcaccgtgattttg

SEQ ID NO: 191154 - DNA, 15 bp, Homo sapiens
tggcaccgtgatttt

SEQ ID NO: 191155 - DNA, 15 bp, Homo sapiens
ctggcaccgtgattt

SEQ ID NO: 191156 - DNA, 15 bp, Homo sapiens
tctggcaccgtgatt

SEQ ID NO: 191157 - DNA, 15 bp, Homo sapiens
ctctggcaccgtgat

SEQ ID NO: 191158 - DNA, 15 bp, Homo sapiens
actctggcaccgtga

SEQ ID NO: 191159 - DNA, 15 bp, Homo sapiens
gactctggcaccgtg

SEQ ID NO: 191160 - DNA, 15 bp, Homo sapiens
agactctggcaccgt

SEQ ID NO: 191161 - DNA, 15 bp, Homo sapiens
gagactctggcaccg

SEQ ID NO: 191162 - DNA, 15 bp, Homo sapiens
agagactctggcacc

SEQ ID NO: 191163 - DNA, 15 bp, Homo sapiens
cagagactctggcac

SEQ ID NO: 191164 - DNA, 15 bp, Homo sapiens
ccagagactctggca

SEQ ID NO: 191165 - DNA, 15 bp, Homo sapiens
cccagagactctggc

SEQ ID NO: 191166 - DNA, 15 bp, Homo sapiens
ccccagagactctgg

SEQ ID NO: 191167 - DNA, 15 bp, Homo sapiens
tccccagagactctg

SEQ ID NO: 191168 - DNA, 15 bp, Homo sapiens
ctccccagagactct

SEQ ID NO: 191169 - DNA, 15 bp, Homo sapiens
tctccccagagactc

SEQ ID NO: 191170 - DNA, 15 bp, Homo sapiens
gtctccccagagact

SEQ ID NO: 191171 - DNA, 15 bp, Homo sapiens
agtctccccagagac

SEQ ID NO: 191172 - DNA, 15 bp, Homo sapiens
cagtctccccagaga

SEQ ID NO: 191173 - DNA, 15 bp, Homo sapiens
ccagtctccccagag

SEQ ID NO: 191174 - DNA, 15 bp, Homo sapiens
tccagtctccccaga

SEQ ID NO: 191175 - DNA, 15 bp, Homo sapiens
ctccagtctccccag

SEQ ID NO: 191176 - DNA, 15 bp, Homo sapiens
tctccagtctcccca

SEQ ID NO: 191177 - DNA, 15 bp, Homo sapiens
ttctccagtctcccc

SEQ ID NO: 191178 - DNA, 15 bp, Homo sapiens
attctccagtctccc

SEQ ID NO: 191179 - DNA, 15 bp, Homo sapiens
cattctccagtctcc

SEQ ID NO: 191180 - DNA, 15 bp, Homo sapiens
gcattctccagtctc

SEQ ID NO: 191181 - DNA, 15 bp, Homo sapiens
tgcattctccagtct

SEQ ID NO: 191182 - DNA, 15 bp, Homo sapiens
ctgcattctccagtc

SEQ ID NO: 191183 - DNA, 15 bp, Homo sapiens
actgcattctccagt

SEQ ID NO: 191184 - DNA, 15 bp, Homo sapiens
cactgcattctccag

SEQ ID NO: 191185 - DNA, 15 bp, Homo sapiens
gcactgcattctcca

SEQ ID NO: 191186 - DNA, 15 bp, Homo sapiens
tgcactgcattctcc

SEQ ID NO: 191187 - DNA, 15 bp, Homo sapiens
ctgcactgcattctc

SEQ ID NO: 191188 - DNA, 15 bp, Homo sapiens
cctgcactgcattct

SEQ ID NO: 191189 - DNA, 15 bp, Homo sapiens
ccctgcactgcattc

SEQ ID NO: 191190 - DNA, 15 bp, Homo sapiens
cccctgcactgcatt

SEQ ID NO: 191191 - DNA, 15 bp, Homo sapiens
gcccctgcactgcat

SEQ ID NO: 191192 - DNA, 15 bp, Homo sapiens
ggcccctgcactgca

SEQ ID NO: 191193 - DNA, 15 bp, Homo sapiens
cggcccctgcactgc

SEQ ID NO: 191194 - DNA, 15 bp, Homo sapiens
gcggcccctgcactg

SEQ ID NO: 191195 - DNA, 15 bp, Homo sapiens
tgcggcccctgcact

SEQ ID NO: 191196 - DNA, 15 bp, Homo sapiens
ctgcggcccctgcac

SEQ ID NO: 191197 - DNA, 15 bp, Homo sapiens
cctgcggcccctgca

SEQ ID NO: 191198 - DNA, 15 bp, Homo sapiens
tcctgcggcccctgc

SEQ ID NO: 191199 - DNA, 15 bp, Homo sapiens
ctcctgcggcccctg

SEQ ID NO: 191200 - DNA, 15 bp, Homo sapiens
gctcctgcggcccct

SEQ ID NO: 191201 - DNA, 15 bp, Homo sapiens
ggctcctgcggcccc

SEQ ID NO: 191202 - DNA, 15 bp, Homo sapiens
tggctcctgcggccc

SEQ ID NO: 191203 - DNA, 15 bp, Homo sapiens
ttggctcctgcggcc

SEQ ID NO: 191204 - DNA, 15 bp, Homo sapiens
tttggctcctgcggc

SEQ ID NO: 191205 - DNA, 15 bp, Homo sapiens
ttttggctcctgcgg

SEQ ID NO: 191206 - DNA, 15 bp, Homo sapiens
tttttggctcctgcg

SEQ ID NO: 191207 - DNA, 15 bp, Homo sapiens
ctttttggctcctgc

SEQ ID NO: 191208 - DNA, 15 bp, Homo sapiens
cctttttggctcctg

SEQ ID NO: 191209 - DNA, 15 bp, Homo sapiens
ccctttttggctcct

SEQ ID NO: 191210 - DNA, 15 bp, Homo sapiens
cccctttttggctcc

SEQ ID NO: 191211 - DNA, 15 bp, Homo sapiens
gcccctttttggctc

SEQ ID NO: 191212 - DNA, 15 bp, Homo sapiens
tgcccctttttggct

SEQ ID NO: 191213 - DNA, 15 bp, Homo sapiens
gtgcccctttttggc

SEQ ID NO: 191214 - DNA, 15 bp, Homo sapiens
agtgcccctttttgg

SEQ ID NO: 191215 - DNA, 15 bp, Homo sapiens
cagtgcccctttttg

SEQ ID NO: 191216 - DNA, 15 bp, Homo sapiens
ccagtgccccttttt

SEQ ID NO: 191217 - DNA, 15 bp, Homo sapiens
accagtgcccctttt

SEQ ID NO: 191218 - DNA, 15 bp, Homo sapiens
gaccagtgccccttt

SEQ ID NO: 191219 - DNA, 15 bp, Homo sapiens
ggaccagtgcccctt

SEQ ID NO: 191220 - DNA, 15 bp, Homo sapiens
aggaccagtgcccct

SEQ ID NO: 191221 - DNA, 15 bp, Homo sapiens
caggaccagtgcccc

SEQ ID NO: 191222 - DNA, 15 bp, Homo sapiens
gcaggaccagtgccc

SEQ ID NO: 191223 - DNA, 15 bp, Homo sapiens
cgcaggaccagtgcc

SEQ ID NO: 191224 - DNA, 15 bp, Homo sapiens
tcgcaggaccagtgc

SEQ ID NO: 191225 - DNA, 15 bp, Homo sapiens
ttcgcaggaccagtg

SEQ ID NO: 191226 - DNA, 15 bp, Homo sapiens
cttcgcaggaccagt

SEQ ID NO: 191227 - DNA, 15 bp, Homo sapiens
tcttcgcaggaccag

SEQ ID NO: 191228 - DNA, 15 bp, Homo sapiens
ctcttcgcaggacca

SEQ ID NO: 191229 - DNA, 15 bp, Homo sapiens
actcttcgcaggacc

SEQ ID NO: 191230 - DNA, 15 bp, Homo sapiens
cactcttcgcaggac

SEQ ID NO: 191231 - DNA, 15 bp, Homo sapiens
ccactcttcgcagga

SEQ ID NO: 191232 - DNA, 15 bp, Homo sapiens
gccactcttcgcagg

SEQ ID NO: 191233 - DNA, 15 bp, Homo sapiens
agccactcttcgcag

SEQ ID NO: 191234 - DNA, 15 bp, Homo sapiens
gagccactcttcgca

SEQ ID NO: 191235 - DNA, 15 bp, Homo sapiens
agagccactcttcgc

SEQ ID NO: 191236 - DNA, 15 bp, Homo sapiens
cagagccactcttcg

SEQ ID NO: 191237 - DNA, 15 bp, Homo sapiens
acagagccactcttc

SEQ ID NO: 191238 - DNA, 15 bp, Homo sapiens
gacagagccactctt

SEQ ID NO: 191239 - DNA, 15 bp, Homo sapiens
ggacagagccactct

SEQ ID NO: 191240 - DNA, 15 bp, Homo sapiens
tggacagagccactc

SEQ ID NO: 191241 - DNA, 15 bp, Homo sapiens
atggacagagccact

SEQ ID NO: 191242 - DNA, 15 bp, Homo sapiens
gatggacagagccac

SEQ ID NO: 191243 - DNA, 15 bp, Homo sapiens
ggatggacagagcca

SEQ ID NO: 191244 - DNA, 15 bp, Homo sapiens
gggatggacagagcc

SEQ ID NO: 191245 - DNA, 15 bp, Homo sapiens
agggatggacagagc

SEQ ID NO: 191246 - DNA, 15 bp, Homo sapiens
cagggatggacagag

SEQ ID NO: 191247 - DNA, 15 bp, Homo sapiens
gcagggatggacaga

SEQ ID NO: 191248 - DNA, 15 bp, Homo sapiens
ggcagggatggacag

SEQ ID NO: 191249 - DNA, 15 bp, Homo sapiens
aggcagggatggaca

SEQ ID NO: 191250 - DNA, 15 bp, Homo sapiens
aaggcagggatggac

SEQ ID NO: 191251 - DNA, 15 bp, Homo sapiens
gaaggcagggatgga

SEQ ID NO: 191252 - DNA, 15 bp, Homo sapiens
ggaaggcagggatgg

SEQ ID NO: 191253 - DNA, 15 bp, Homo sapiens
tggaaggcagggatg

SEQ ID NO: 191254 - DNA, 15 bp, Homo sapiens
ctggaaggcagggat

SEQ ID NO: 191255 - DNA, 15 bp, Homo sapiens
actggaaggcaggga

SEQ ID NO: 191256 - DNA, 15 bp, Homo sapiens
tactggaaggcaggg

SEQ ID NO: 191257 - DNA, 15 bp, Homo sapiens
atactggaaggcagg

SEQ ID NO: 191258 - DNA, 15 bp, Homo sapiens
catactggaaggcag

SEQ ID NO: 191259 - DNA, 15 bp, Homo sapiens
acatactggaaggca

SEQ ID NO: 191260 - DNA, 15 bp, Homo sapiens
cacatactggaaggc

SEQ ID NO: 191261 - DNA, 15 bp, Homo sapiens
gcacatactggaagg

SEQ ID NO: 191262 - DNA, 15 bp, Homo sapiens
ggcacatactggaag

SEQ ID NO: 191263 - DNA, 15 bp, Homo sapiens
gggcacatactggaa

SEQ ID NO: 191264 - DNA, 15 bp, Homo sapiens
tgggcacatactgga

SEQ ID NO: 191265 - DNA, 15 bp, Homo sapiens
gtgggcacatactgg

SEQ ID NO: 191266 - DNA, 15 bp, Homo sapiens
agtgggcacatactg

SEQ ID NO: 191267 - DNA, 15 bp, Homo sapiens
cagtgggcacatact

SEQ ID NO: 191268 - DNA, 15 bp, Homo sapiens
acagtgggcacatac

SEQ ID NO: 191269 - DNA, 15 bp, Homo sapiens
cacagtgggcacata

SEQ ID NO: 191270 - DNA, 15 bp, Homo sapiens
tcacagtgggcacat

SEQ ID NO: 191271 - DNA, 15 bp, Homo sapiens
gtcacagtgggcaca

SEQ ID NO: 191272 - DNA, 15 bp, Homo sapiens
ggtcacagtgggcac

SEQ ID NO: 191273 - DNA, 15 bp, Homo sapiens
tggtcacagtgggca

SEQ ID NO: 191274 - DNA, 15 bp, Homo sapiens
ctggtcacagtgggc

SEQ ID NO: 191275 - DNA, 15 bp, Homo sapiens
tctggtcacagtggg

SEQ ID NO: 191276 - DNA, 15 bp, Homo sapiens
ctctggtcacagtgg

SEQ ID NO: 191277 - DNA, 15 bp, Homo sapiens
gctctggtcacagtg

SEQ ID NO: 191278 - DNA, 15 bp, Homo sapiens
agctctggtcacagt

SEQ ID NO: 191279 - DNA, 15 bp, Homo sapiens
gagctctggtcacag

SEQ ID NO: 191280 - DNA, 15 bp, Homo sapiens
ggagctctggtcaca

SEQ ID NO: 191281 - DNA, 15 bp, Homo sapiens
tggagctctggtcac

SEQ ID NO: 191282 - DNA, 15 bp, Homo sapiens
atggagctctggtca

SEQ ID NO: 191283 - DNA, 15 bp, Homo sapiens
aatggagctctggtc

SEQ ID NO: 191284 - DNA, 15 bp, Homo sapiens
aaatggagctctggt

SEQ ID NO: 191285 - DNA, 15 bp, Homo sapiens
gaaatggagctctgg

SEQ ID NO: 191286 - DNA, 15 bp, Homo sapiens
agaaatggagctctg

SEQ ID NO: 191287 - DNA, 15 bp, Homo sapiens
gagaaatggagctct

SEQ ID NO: 191288 - DNA, 15 bp, Homo sapiens
tgagaaatggagctc

SEQ ID NO: 191289 - DNA, 15 bp, Homo sapiens
ttgagaaatggagct

SEQ ID NO: 191290 - DNA, 15 bp, Homo sapiens
tttgagaaatggagc

SEQ ID NO: 191291 - DNA, 15 bp, Homo sapiens
ttttgagaaatggag

SEQ ID NO: 191292 - DNA, 15 bp, Homo sapiens
cttttgagaaatgga

SEQ ID NO: 191293 - DNA, 15 bp, Homo sapiens
tcttttgagaaatgg

SEQ ID NO: 191294 - DNA, 15 bp, Homo sapiens
ttcttttgagaaatg

SEQ ID NO: 191295 - DNA, 15 bp, Homo sapiens
cttcttttgagaaat

SEQ ID NO: 191296 - DNA, 15 bp, Homo sapiens
gcttcttttgagaaa

SEQ ID NO: 191297 - DNA, 15 bp, Homo sapiens
ggcttcttttgagaa

SEQ ID NO: 191298 - DNA, 15 bp, Homo sapiens
tggcttcttttgaga

SEQ ID NO: 191299 - DNA, 15 bp, Homo sapiens
ctggcttcttttgag

SEQ ID NO: 191300 - DNA, 15 bp, Homo sapiens
actggcttcttttga

SEQ ID NO: 191301 - DNA, 15 bp, Homo sapiens
cactggcttcttttg

SEQ ID NO: 191302 - DNA, 15 bp, Homo sapiens
tcactggcttctttt

SEQ ID NO: 191303 - DNA, 15 bp, Homo sapiens
atcactggcttcttt

SEQ ID NO: 191304 - DNA, 15 bp, Homo sapiens
catcactggcttctt

SEQ ID NO: 191305 - DNA, 15 bp, Homo sapiens
gcatcactggcttct

SEQ ID NO: 191306 - DNA, 15 bp, Homo sapiens
ggcatcactggcttc

SEQ ID NO: 191307 - DNA, 15 bp, Homo sapiens
tggcatcactggctt

SEQ ID NO: 191308 - DNA, 15 bp, Homo sapiens
ttggcatcactggct

SEQ ID NO: 191309 - DNA, 15 bp, Homo sapiens
attggcatcactggc

SEQ ID NO: 191310 - DNA, 15 bp, Homo sapiens
aattggcatcactgg

SEQ ID NO: 191311 - DNA, 15 bp, Homo sapiens
taattggcatcactg

SEQ ID NO: 191312 - DNA, 15 bp, Homo sapiens
gtaattggcatcact

SEQ ID NO: 191313 - DNA, 15 bp, Homo sapiens
ggtaattggcatcac

SEQ ID NO: 191314 - DNA, 15 bp, Homo sapiens
tggtaattggcatca

SEQ ID NO: 191315 - DNA, 15 bp, Homo sapiens
atggtaattggcatc

SEQ ID NO: 191316 - DNA, 15 bp, Homo sapiens
catggtaattggcat

SEQ ID NO: 191317 - DNA, 15 bp, Homo sapiens
tcatggtaattggca

SEQ ID NO: 191318 - DNA, 15 bp, Homo sapiens
ctcatggtaattggc

SEQ ID NO: 191319 - DNA, 15 bp, Homo sapiens
tctcatggtaattgg

SEQ ID NO: 191320 - DNA, 15 bp, Homo sapiens
ttctcatggtaattg

SEQ ID NO: 191321 - DNA, 15 bp, Homo sapiens
tttctcatggtaatt

SEQ ID NO: 191322 - DNA, 15 bp, Homo sapiens
atttctcatggtaat

SEQ ID NO: 191323 - DNA, 15 bp, Homo sapiens
aatttctcatggtaa

SEQ ID NO: 191324 - DNA, 15 bp, Homo sapiens
aaatttctcatggta

SEQ ID NO: 191325 - DNA, 15 bp, Homo sapiens
gaaatttctcatggt

SEQ ID NO: 191326 - DNA, 15 bp, Homo sapiens
ggaaatttctcatgg

SEQ ID NO: 191327 - DNA, 15 bp, Homo sapiens
aggaaatttctcatg

SEQ ID NO: 191328 - DNA, 15 bp, Homo sapiens
aaggaaatttctcat

SEQ ID NO: 191329 - DNA, 15 bp, Homo sapiens
taaggaaatttctca

SEQ ID NO: 191330 - DNA, 15 bp, Homo sapiens
ataaggaaatttctc

SEQ ID NO: 191331 - DNA, 15 bp, Homo sapiens
aataaggaaatttct

SEQ ID NO: 191332 - DNA, 15 bp, Homo sapiens
aaataaggaaatttc

SEQ ID NO: 191333 - DNA, 15 bp, Homo sapiens
aaaataaggaaattt

SEQ ID NO: 191334 - DNA, 15 bp, Homo sapiens
aaaaataaggaaatt

SEQ ID NO: 191335 - DNA, 15 bp, Homo sapiens
taaaaataaggaaat

SEQ ID NO: 191336 - DNA, 15 bp, Homo sapiens
ttaaaaataaggaaa

SEQ ID NO: 191337 - DNA, 15 bp, Homo sapiens
gttaaaaataaggaa

SEQ ID NO: 191338 - DNA, 15 bp, Homo sapiens
agttaaaaataagga

SEQ ID NO: 191339 - DNA, 15 bp, Homo sapiens
cagttaaaaataagg

SEQ ID NO: 191340 - DNA, 15 bp, Homo sapiens
acagttaaaaataag

SEQ ID NO: 191341 - DNA, 15 bp, Homo sapiens
gacagttaaaaataa

SEQ ID NO: 191342 - DNA, 15 bp, Homo sapiens
cgacagttaaaaata

SEQ ID NO: 191343 - DNA, 15 bp, Homo sapiens
tcgacagttaaaaat

SEQ ID NO: 191344 - DNA, 15 bp, Homo sapiens
atcgacagttaaaaa

SEQ ID NO: 191345 - DNA, 15 bp, Homo sapiens
aatcgacagttaaaa

SEQ ID NO: 191346 - DNA, 15 bp, Homo sapiens
taatcgacagttaaa

SEQ ID NO: 191347 - DNA, 15 bp, Homo sapiens
ttaatcgacagttaa

SEQ ID NO: 191348 - DNA, 15 bp, Homo sapiens
tttaatcgacagtta

SEQ ID NO: 191349 - DNA, 15 bp, Homo sapiens
ttttaatcgacagtt

SEQ ID NO: 191350 - DNA, 15 bp, Homo sapiens
attttaatcgacagt

SEQ ID NO: 191351 - DNA, 15 bp, Homo sapiens
aattttaatcgacag

SEQ ID NO: 191352 - DNA, 15 bp, Homo sapiens
aaattttaatcgaca

SEQ ID NO: 191353 - DNA, 15 bp, Homo sapiens
caaattttaatcgac

SEQ ID NO: 191354 - DNA, 15 bp, Homo sapiens
acaaattttaatcga

SEQ ID NO: 191355 - DNA, 15 bp, Homo sapiens
tacaaattttaatcg

SEQ ID NO: 191356 - DNA, 15 bp, Homo sapiens
gtacaaattttaatc

SEQ ID NO: 191357 - DNA, 15 bp, Homo sapiens
tgtacaaattttaat

SEQ ID NO: 191358 - DNA, 15 bp, Homo sapiens
ttgtacaaattttaa

SEQ ID NO: 191359 - DNA, 15 bp, Homo sapiens
cttgtacaaatttta

SEQ ID NO: 191360 - DNA, 15 bp, Homo sapiens
acttgtacaaatttt

SEQ ID NO: 191361 - DNA, 15 bp, Homo sapiens
tacttgtacaaattt

SEQ ID NO: 191362 - DNA, 15 bp, Homo sapiens
atacttgtacaaatt

SEQ ID NO: 191363 - DNA, 15 bp, Homo sapiens
catacttgtacaaat

SEQ ID NO: 191364 - DNA, 15 bp, Homo sapiens
ccatacttgtacaaa

SEQ ID NO: 191365 - DNA, 15 bp, Homo sapiens
accatacttgtacaa

SEQ ID NO: 191366 - DNA, 15 bp, Homo sapiens
caccatacttgtaca

SEQ ID NO: 191367 - DNA, 15 bp, Homo sapiens
ccaccatacttgtac

SEQ ID NO: 191368 - DNA, 15 bp, Homo sapiens
cccaccatacttgta

SEQ ID NO: 191369 - DNA, 15 bp, Homo sapiens
ccccaccatacttgt

SEQ ID NO: 191370 - DNA, 15 bp, Homo sapiens
gccccaccatacttg

SEQ ID NO: 191371 - DNA, 15 bp, Homo sapiens
tgccccaccatactt

SEQ ID NO: 191372 - DNA, 15 bp, Homo sapiens
ctgccccaccatact

SEQ ID NO: 191373 - DNA, 15 bp, Homo sapiens
cctgccccaccatac

SEQ ID NO: 191374 - DNA, 15 bp, Homo sapiens
gcctgccccaccata

SEQ ID NO: 191375 - DNA, 15 bp, Homo sapiens
ggcctgccccaccat

SEQ ID NO: 191376 - DNA, 15 bp, Homo sapiens
aggcctgccccacca

SEQ ID NO: 191377 - DNA, 15 bp, Homo sapiens
caggcctgccccacc

SEQ ID NO: 191378 - DNA, 15 bp, Homo sapiens
gcaggcctgccccac

SEQ ID NO: 191379 - DNA, 15 bp, Homo sapiens
tgcaggcctgcccca

SEQ ID NO: 191380 - DNA, 15 bp, Homo sapiens
ttgcaggcctgcccc

SEQ ID NO: 191381 - DNA, 15 bp, Homo sapiens
tttgcaggcctgccc

SEQ ID NO: 191382 - DNA, 15 bp, Homo sapiens
ttttgcaggcctgcc

SEQ ID NO: 191383 - DNA, 15 bp, Homo sapiens
attttgcaggcctgc

SEQ ID NO: 191384 - DNA, 15 bp, Homo sapiens
cattttgcaggcctg

SEQ ID NO: 191385 - DNA, 15 bp, Homo sapiens
tcattttgcaggcct

SEQ ID NO: 191386 - DNA, 15 bp, Homo sapiens
atcattttgcaggcc

SEQ ID NO: 191387 - DNA, 15 bp, Homo sapiens
gatcattttgcaggc

SEQ ID NO: 191388 - DNA, 15 bp, Homo sapiens
agatcattttgcagg

SEQ ID NO: 191389 - DNA, 15 bp, Homo sapiens
gagatcattttgcag

SEQ ID NO: 191390 - DNA, 15 bp, Homo sapiens
ggagatcattttgca

SEQ ID NO: 191391 - DNA, 15 bp, Homo sapiens
tggagatcattttgc

SEQ ID NO: 191392 - DNA, 15 bp, Homo sapiens
ttggagatcattttg

SEQ ID NO: 191393 - DNA, 15 bp, Homo sapiens
cttggagatcatttt

SEQ ID NO: 191394 - DNA, 15 bp, Homo sapiens
acttggagatcattt

SEQ ID NO: 191395 - DNA, 15 bp, Homo sapiens
cacttggagatcatt

SEQ ID NO: 191396 - DNA, 15 bp, Homo sapiens
gcacttggagatcat

SEQ ID NO: 191397 - DNA, 15 bp, Homo sapiens
ggcacttggagatca

SEQ ID NO: 191398 - DNA, 15 bp, Homo sapiens
aggcacttggagatc

SEQ ID NO: 191399 - DNA, 15 bp, Homo sapiens
caggcacttggagat

SEQ ID NO: 191400 - DNA, 15 bp, Homo sapiens
ccaggcacttggaga

SEQ ID NO: 191401 - DNA, 15 bp, Homo sapiens
gccaggcacttggag

SEQ ID NO: 191402 - DNA, 15 bp, Homo sapiens
ggccaggcacttgga

SEQ ID NO: 191403 - DNA, 15 bp, Homo sapiens
aggccaggcacttgg

SEQ ID NO: 191404 - DNA, 15 bp, Homo sapiens
aaggccaggcacttg

SEQ ID NO: 191405 - DNA, 15 bp, Homo sapiens
aaaggccaggcactt

SEQ ID NO: 191406 - DNA, 15 bp, Homo sapiens
caaaggccaggcact

SEQ ID NO: 191407 - DNA, 15 bp, Homo sapiens
tcaaaggccaggcac

SEQ ID NO: 191408 - DNA, 15 bp, Homo sapiens
atcaaaggccaggca

SEQ ID NO: 191409 - DNA, 15 bp, Homo sapiens
catcaaaggccaggc

SEQ ID NO: 191410 - DNA, 15 bp, Homo sapiens
gcatcaaaggccagg

SEQ ID NO: 191411 - DNA, 15 bp, Homo sapiens
ggcatcaaaggccag

SEQ ID NO: 191412 - DNA, 15 bp, Homo sapiens
gggcatcaaaggcca

SEQ ID NO: 191413 - DNA, 15 bp, Homo sapiens
cgggcatcaaaggcc

SEQ ID NO: 191414 - DNA, 15 bp, Homo sapiens
acgggcatcaaaggc

SEQ ID NO: 191415 - DNA, 15 bp, Homo sapiens
gacgggcatcaaagg

SEQ ID NO: 191416 - DNA, 15 bp, Homo sapiens
ggacgggcatcaaag

SEQ ID NO: 191417 - DNA, 15 bp, Homo sapiens
aggacgggcatcaaa

SEQ ID NO: 191418 - DNA, 15 bp, Homo sapiens
taggacgggcatcaa

SEQ ID NO: 191419 - DNA, 15 bp, Homo sapiens
ttaggacgggcatca

SEQ ID NO: 191420 - DNA, 15 bp, Homo sapiens
tttaggacgggcatc

SEQ ID NO: 191421 - DNA, 15 bp, Homo sapiens
ttttaggacgggcat

SEQ ID NO: 191422 - DNA, 15 bp, Homo sapiens
cttttaggacgggca

SEQ ID NO: 191423 - DNA, 15 bp, Homo sapiens
gcttttaggacgggc

SEQ ID NO: 191424 - DNA, 15 bp, Homo sapiens
tgcttttaggacggg

SEQ ID NO: 191425 - DNA, 15 bp, Homo sapiens
atgcttttaggacgg

SEQ ID NO: 191426 - DNA, 15 bp, Homo sapiens
catgcttttaggacg

SEQ ID NO: 191427 - DNA, 15 bp, Homo sapiens
acatgcttttaggac

SEQ ID NO: 191428 - DNA, 15 bp, Homo sapiens
cacatgcttttagga

SEQ ID NO: 191429 - DNA, 15 bp, Homo sapiens
acacatgcttttagg

SEQ ID NO: 191430 - DNA, 15 bp, Homo sapiens
cacacatgcttttag

SEQ ID NO: 191431 - DNA, 15 bp, Homo sapiens
ccacacatgctttta

SEQ ID NO: 191432 - DNA, 15 bp, Homo sapiens
gccacacatgctttt

SEQ ID NO: 191433 - DNA, 15 bp, Homo sapiens
tgccacacatgcttt

SEQ ID NO: 191434 - DNA, 15 bp, Homo sapiens
gtgccacacatgctt

SEQ ID NO: 191435 - DNA, 15 bp, Homo sapiens
agtgccacacatgct

SEQ ID NO: 191436 - DNA, 15 bp, Homo sapiens
cagtgccacacatgc

SEQ ID NO: 191437 - DNA, 15 bp, Homo sapiens
ccagtgccacacatg

SEQ ID NO: 191438 - DNA, 15 bp, Homo sapiens
tccagtgccacacat

SEQ ID NO: 191439 - DNA, 15 bp, Homo sapiens
ctccagtgccacaca

SEQ ID NO: 191440 - DNA, 15 bp, Homo sapiens
cctccagtgccacac

SEQ ID NO: 191441 - DNA, 15 bp, Homo sapiens
ccctccagtgccaca

SEQ ID NO: 191442 - DNA, 15 bp, Homo sapiens
gccctccagtgccac

SEQ ID NO: 191443 - DNA, 15 bp, Homo sapiens
ggccctccagtgcca

SEQ ID NO: 191444 - DNA, 15 bp, Homo sapiens
gggccctccagtgcc

SEQ ID NO: 191445 - DNA, 15 bp, Homo sapiens
tgggccctccagtgc

SEQ ID NO: 191446 - DNA, 15 bp, Homo sapiens
gtgggccctccagtg

SEQ ID NO: 191447 - DNA, 15 bp, Homo sapiens
cgtgggccctccagt

SEQ ID NO: 191448 - DNA, 15 bp, Homo sapiens
acgtgggccctccag

SEQ ID NO: 191449 - DNA, 15 bp, Homo sapiens
aacgtgggccctcca

SEQ ID NO: 191450 - DNA, 15 bp, Homo sapiens
aaacgtgggccctcc

SEQ ID NO: 191451 - DNA, 15 bp, Homo sapiens
gaaacgtgggccctc

SEQ ID NO: 191452 - DNA, 15 bp, Homo sapiens
agaaacgtgggccct

SEQ ID NO: 191453 - DNA, 15 bp, Homo sapiens
aagaaacgtgggccc

SEQ ID NO: 191454 - DNA, 15 bp, Homo sapiens
aaagaaacgtgggcc

SEQ ID NO: 191455 - DNA, 15 bp, Homo sapiens
caaagaaacgtgggc

SEQ ID NO: 191456 - DNA, 15 bp, Homo sapiens
acaaagaaacgtggg

SEQ ID NO: 191457 - DNA, 15 bp, Homo sapiens
aacaaagaaacgtgg

SEQ ID NO: 191458 - DNA, 15 bp, Homo sapiens
gaacaaagaaacgtg

SEQ ID NO: 191459 - DNA, 15 bp, Homo sapiens
ggaacaaagaaacgt

SEQ ID NO: 191460 - DNA, 15 bp, Homo sapiens
aggaacaaagaaacg

SEQ ID NO: 191461 - DNA, 15 bp, Homo sapiens
gaggaacaaagaaac

SEQ ID NO: 191462 - DNA, 15 bp, Homo sapiens
agaggaacaaagaaa

SEQ ID NO: 191463 - DNA, 15 bp, Homo sapiens
aagaggaacaaagaa

SEQ ID NO: 191464 - DNA, 15 bp, Homo sapiens
caagaggaacaaaga

SEQ ID NO: 191465 - DNA, 15 bp, Homo sapiens
tcaagaggaacaaag

SEQ ID NO: 191466 - DNA, 15 bp, Homo sapiens
ctcaagaggaacaaa

SEQ ID NO: 191467 - DNA, 15 bp, Homo sapiens
tctcaagaggaacaa

SEQ ID NO: 191468 - DNA, 15 bp, Homo sapiens
ttctcaagaggaaca

SEQ ID NO: 191469 - DNA, 15 bp, Homo sapiens
cttctcaagaggaac

SEQ ID NO: 191470 - DNA, 15 bp, Homo sapiens
gcttctcaagaggaa

SEQ ID NO: 191471 - DNA, 15 bp, Homo sapiens
agcttctcaagagga

SEQ ID NO: 191472 - DNA, 15 bp, Homo sapiens
cagcttctcaagagg

SEQ ID NO: 191473 - DNA, 15 bp, Homo sapiens
ccagcttctcaagag

SEQ ID NO: 191474 - DNA, 15 bp, Homo sapiens
cccagcttctcaaga

SEQ ID NO: 191475 - DNA, 15 bp, Homo sapiens
ccccagcttctcaag

SEQ ID NO: 191476 - DNA, 15 bp, Homo sapiens
accccagcttctcaa

SEQ ID NO: 191477 - DNA, 15 bp, Homo sapiens
caccccagcttctca

SEQ ID NO: 191478 - DNA, 15 bp, Homo sapiens
ccaccccagcttctc

SEQ ID NO: 191479 - DNA, 15 bp, Homo sapiens
cccaccccagcttct

SEQ ID NO: 191480 - DNA, 15 bp, Homo sapiens
ccccaccccagcttc

SEQ ID NO: 191481 - DNA, 15 bp, Homo sapiens
cccccaccccagctt

SEQ ID NO: 191482 - DNA, 15 bp, Homo sapiens
gcccccaccccagct

SEQ ID NO: 191483 - DNA, 15 bp, Homo sapiens
ggcccccaccccagc

SEQ ID NO: 191484 - DNA, 15 bp, Homo sapiens
cggcccccaccccag

SEQ ID NO: 191485 - DNA, 15 bp, Homo sapiens
ccggcccccacccca

SEQ ID NO: 191486 - DNA, 15 bp, Homo sapiens
gccggcccccacccc

SEQ ID NO: 191487 - DNA, 15 bp, Homo sapiens
agccggcccccaccc

SEQ ID NO: 191488 - DNA, 15 bp, Homo sapiens
cagccggcccccacc

SEQ ID NO: 191489 - DNA, 15 bp, Homo sapiens
ccagccggcccccac

SEQ ID NO: 191490 - DNA, 15 bp, Homo sapiens
cccagccggccccca

SEQ ID NO: 191491 - DNA, 15 bp, Homo sapiens
gcccagccggccccc

SEQ ID NO: 191492 - DNA, 15 bp, Homo sapiens
agcccagccggcccc

SEQ ID NO: 191493 - DNA, 15 bp, Homo sapiens
gagcccagccggccc

SEQ ID NO: 191494 - DNA, 15 bp, Homo sapiens
tgagcccagccggcc

SEQ ID NO: 191495 - DNA, 15 bp, Homo sapiens
ctgagcccagccggc

SEQ ID NO: 191496 - DNA, 15 bp, Homo sapiens
cctgagcccagccgg

SEQ ID NO: 191497 - DNA, 15 bp, Homo sapiens
ccctgagcccagccg

SEQ ID NO: 191498 - DNA, 15 bp, Homo sapiens
accctgagcccagcc

SEQ ID NO: 191499 - DNA, 15 bp, Homo sapiens
caccctgagcccagc

SEQ ID NO: 191500 - DNA, 15 bp, Homo sapiens
gcaccctgagcccag

SEQ ID NO: 191501 - DNA, 15 bp, Homo sapiens
cgcaccctgagccca

SEQ ID NO: 191502 - DNA, 15 bp, Homo sapiens
ccgcaccctgagccc

SEQ ID NO: 191503 - DNA, 15 bp, Homo sapiens
gccgcaccctgagcc

SEQ ID NO: 191504 - DNA, 15 bp, Homo sapiens
ggccgcaccctgagc

SEQ ID NO: 191505 - DNA, 15 bp, Homo sapiens
gggccgcaccctgag

SEQ ID NO: 191506 - DNA, 15 bp, Homo sapiens
ggggccgcaccctga

SEQ ID NO: 191507 - DNA, 15 bp, Homo sapiens
aggggccgcaccctg

SEQ ID NO: 191508 - DNA, 15 bp, Homo sapiens
gaggggccgcaccct

SEQ ID NO: 191509 - DNA, 15 bp, Homo sapiens
tgaggggccgcaccc

SEQ ID NO: 191510 - DNA, 15 bp, Homo sapiens
gtgaggggccgcacc

SEQ ID NO: 191511 - DNA, 15 bp, Homo sapiens
agtgaggggccgcac

SEQ ID NO: 191512 - DNA, 15 bp, Homo sapiens
aagtgaggggccgca

SEQ ID NO: 191513 - DNA, 15 bp, Homo sapiens
gaagtgaggggccgc

SEQ ID NO: 191514 - DNA, 15 bp, Homo sapiens
ggaagtgaggggccg

SEQ ID NO: 191515 - DNA, 15 bp, Homo sapiens
gggaagtgaggggcc

SEQ ID NO: 191516 - DNA, 15 bp, Homo sapiens
tgggaagtgaggggc

SEQ ID NO: 191517 - DNA, 15 bp, Homo sapiens
ctgggaagtgagggg

SEQ ID NO: 191518 - DNA, 15 bp, Homo sapiens
cctgggaagtgaggg

SEQ ID NO: 191519 - DNA, 15 bp, Homo sapiens
ccctgggaagtgagg

SEQ ID NO: 191520 - DNA, 15 bp, Homo sapiens
gccctgggaagtgag

SEQ ID NO: 191521 - DNA, 15 bp, Homo sapiens
agccctgggaagtga

SEQ ID NO: 191522 - DNA, 15 bp, Homo sapiens
cagccctgggaagtg

SEQ ID NO: 191523 - DNA, 15 bp, Homo sapiens
acagccctgggaagt

SEQ ID NO: 191524 - DNA, 15 bp, Homo sapiens
cacagccctgggaag

SEQ ID NO: 191525 - DNA, 15 bp, Homo sapiens
ccacagccctgggaa

SEQ ID NO: 191526 - DNA, 15 bp, Homo sapiens
accacagccctggga

SEQ ID NO: 191527 - DNA, 15 bp, Homo sapiens
gaccacagccctggg

SEQ ID NO: 191528 - DNA, 15 bp, Homo sapiens
agaccacagccctgg

SEQ ID NO: 191529 - DNA, 15 bp, Homo sapiens
gagaccacagccctg

SEQ ID NO: 191530 - DNA, 15 bp, Homo sapiens
cgagaccacagccct

SEQ ID NO: 191531 - DNA, 15 bp, Homo sapiens
ccgagaccacagccc

SEQ ID NO: 191532 - DNA, 15 bp, Homo sapiens
accgagaccacagcc

SEQ ID NO: 191533 - DNA, 15 bp, Homo sapiens
caccgagaccacagc

SEQ ID NO: 191534 - DNA, 15 bp, Homo sapiens
ccaccgagaccacag

SEQ ID NO: 191535 - DNA, 15 bp, Homo sapiens
cccaccgagaccaca

SEQ ID NO: 191536 - DNA, 15 bp, Homo sapiens
ccccaccgagaccac

SEQ ID NO: 191537 - DNA, 15 bp, Homo sapiens
gccccaccgagacca

SEQ ID NO: 191538 - DNA, 15 bp, Homo sapiens
ggccccaccgagacc

SEQ ID NO: 191539 - DNA, 15 bp, Homo sapiens
aggccccaccgagac

SEQ ID NO: 191540 - DNA, 15 bp, Homo sapiens
caggccccaccgaga

SEQ ID NO: 191541 - DNA, 15 bp, Homo sapiens
gcaggccccaccgag

SEQ ID NO: 191542 - DNA, 15 bp, Homo sapiens
tgcaggccccaccga

SEQ ID NO: 191543 - DNA, 15 bp, Homo sapiens
gtgcaggccccaccg

SEQ ID NO: 191544 - DNA, 15 bp, Homo sapiens
agtgcaggccccacc

SEQ ID NO: 191545 - DNA, 15 bp, Homo sapiens
cagtgcaggccccac

SEQ ID NO: 191546 - DNA, 15 bp, Homo sapiens
acagtgcaggcccca

SEQ ID NO: 191547 - DNA, 15 bp, Homo sapiens
aacagtgcaggcccc

SEQ ID NO: 191548 - DNA, 15 bp, Homo sapiens
gaacagtgcaggccc

SEQ ID NO: 191549 - DNA, 15 bp, Homo sapiens
ggaacagtgcaggcc

SEQ ID NO: 191550 - DNA, 15 bp, Homo sapiens
aggaacagtgcaggc

SEQ ID NO: 191551 - DNA, 15 bp, Homo sapiens
caggaacagtgcagg

SEQ ID NO: 191552 - DNA, 15 bp, Homo sapiens
ccaggaacagtgcag

SEQ ID NO: 191553 - DNA, 15 bp, Homo sapiens
cccaggaacagtgca

SEQ ID NO: 191554 - DNA, 15 bp, Homo sapiens
acccaggaacagtgc

SEQ ID NO: 191555 - DNA, 15 bp, Homo sapiens
cacccaggaacagtg

SEQ ID NO: 191556 - DNA, 15 bp, Homo sapiens
acacccaggaacagt

SEQ ID NO: 191557 - DNA, 15 bp, Homo sapiens
gacacccaggaacag

SEQ ID NO: 191558 - DNA, 15 bp, Homo sapiens
ggacacccaggaaca

SEQ ID NO: 191559 - DNA, 15 bp, Homo sapiens
aggacacccaggaac

SEQ ID NO: 191560 - DNA, 15 bp, Homo sapiens
aaggacacccaggaa

SEQ ID NO: 191561 - DNA, 15 bp, Homo sapiens
caaggacacccagga

SEQ ID NO: 191562 - DNA, 15 bp, Homo sapiens
ccaaggacacccagg

SEQ ID NO: 191563 - DNA, 15 bp, Homo sapiens
cccaaggacacccag

SEQ ID NO: 191564 - DNA, 15 bp, Homo sapiens
gcccaaggacaccca

SEQ ID NO: 191565 - DNA, 15 bp, Homo sapiens
agcccaaggacaccc

SEQ ID NO: 191566 - DNA, 15 bp, Homo sapiens
cagcccaaggacacc

SEQ ID NO: 191567 - DNA, 15 bp, Homo sapiens
tcagcccaaggacac

SEQ ID NO: 191568 - DNA, 15 bp, Homo sapiens
ctcagcccaaggaca

SEQ ID NO: 191569 - DNA, 15 bp, Homo sapiens
gctcagcccaaggac

SEQ ID NO: 191570 - DNA, 15 bp, Homo sapiens
ggctcagcccaagga

SEQ ID NO: 191571 - DNA, 15 bp, Homo sapiens
aggctcagcccaagg

SEQ ID NO: 191572 - DNA, 15 bp, Homo sapiens
gaggctcagcccaag

SEQ ID NO: 191573 - DNA, 15 bp, Homo sapiens
agaggctcagcccaa

SEQ ID NO: 191574 - DNA, 15 bp, Homo sapiens
cagaggctcagccca

SEQ ID NO: 191575 - DNA, 15 bp, Homo sapiens
gcagaggctcagccc

SEQ ID NO: 191576 - DNA, 15 bp, Homo sapiens
ggcagaggctcagcc

SEQ ID NO: 191577 - DNA, 15 bp, Homo sapiens
gggcagaggctcagc

SEQ ID NO: 191578 - DNA, 15 bp, Homo sapiens
agggcagaggctcag

SEQ ID NO: 191579 - DNA, 15 bp, Homo sapiens
cagggcagaggctca

SEQ ID NO: 191580 - DNA, 15 bp, Homo sapiens
acagggcagaggctc

SEQ ID NO: 191581 - DNA, 15 bp, Homo sapiens
cacagggcagaggct

SEQ ID NO: 191582 - DNA, 15 bp, Homo sapiens
tcacagggcagaggc

SEQ ID NO: 191583 - DNA, 15 bp, Homo sapiens
ctcacagggcagagg

SEQ ID NO: 191584 - DNA, 15 bp, Homo sapiens
cctcacagggcagag

SEQ ID NO: 191585 - DNA, 15 bp, Homo sapiens
tcctcacagggcaga

SEQ ID NO: 191586 - DNA, 15 bp, Homo sapiens
gtcctcacagggcag

SEQ ID NO: 191587 - DNA, 15 bp, Homo sapiens
cgtcctcacagggca

SEQ ID NO: 191588 - DNA, 15 bp, Homo sapiens
ccgtcctcacagggc

SEQ ID NO: 191589 - DNA, 15 bp, Homo sapiens
gccgtcctcacaggg

SEQ ID NO: 191590 - DNA, 15 bp, Homo sapiens
ggccgtcctcacagg

SEQ ID NO: 191591 - DNA, 15 bp, Homo sapiens
cggccgtcctcacag

SEQ ID NO: 191592 - DNA, 15 bp, Homo sapiens
gcggccgtcctcaca

SEQ ID NO: 191593 - DNA, 15 bp, Homo sapiens
agcggccgtcctcac

SEQ ID NO: 191594 - DNA, 15 bp, Homo sapiens
gagcggccgtcctca

SEQ ID NO: 191595 - DNA, 15 bp, Homo sapiens
tgagcggccgtcctc

SEQ ID NO: 191596 - DNA, 15 bp, Homo sapiens
ctgagcggccgtcct

SEQ ID NO: 191597 - DNA, 15 bp, Homo sapiens
cctgagcggccgtcc

SEQ ID NO: 191598 - DNA, 15 bp, Homo sapiens
gcctgagcggccgtc

SEQ ID NO: 191599 - DNA, 15 bp, Homo sapiens
tgcctgagcggccgt

SEQ ID NO: 191600 - DNA, 15 bp, Homo sapiens
atgcctgagcggccg

SEQ ID NO: 191601 - DNA, 15 bp, Homo sapiens
catgcctgagcggcc

SEQ ID NO: 191602 - DNA, 15 bp, Homo sapiens
tcatgcctgagcggc

SEQ ID NO: 191603 - DNA, 15 bp, Homo sapiens
atcatgcctgagcgg

SEQ ID NO: 191604 - DNA, 15 bp, Homo sapiens
gatcatgcctgagcg

SEQ ID NO: 191605 - DNA, 15 bp, Homo sapiens
ggatcatgcctgagc

SEQ ID NO: 191606 - DNA, 15 bp, Homo sapiens
cggatcatgcctgag

SEQ ID NO: 191607 - DNA, 15 bp, Homo sapiens
acggatcatgcctga

SEQ ID NO: 191608 - DNA, 15 bp, Homo sapiens
gacggatcatgcctg

SEQ ID NO: 191609 - DNA, 15 bp, Homo sapiens
tgacggatcatgcct

SEQ ID NO: 191610 - DNA, 15 bp, Homo sapiens
ctgacggatcatgcc

SEQ ID NO: 191611 - DNA, 15 bp, Homo sapiens
gctgacggatcatgc

SEQ ID NO: 191612 - DNA, 15 bp, Homo sapiens
cgctgacggatcatg

SEQ ID NO: 191613 - DNA, 15 bp, Homo sapiens
tcgctgacggatcat

SEQ ID NO: 191614 - DNA, 15 bp, Homo sapiens
ttcgctgacggatca

SEQ ID NO: 191615 - DNA, 15 bp, Homo sapiens
cttcgctgacggatc

SEQ ID NO: 191616 - DNA, 15 bp, Homo sapiens
gcttcgctgacggat

SEQ ID NO: 191617 - DNA, 15 bp, Homo sapiens
ggcttcgctgacgga

SEQ ID NO: 191618 - DNA, 15 bp, Homo sapiens
cggcttcgctgacgg

SEQ ID NO: 191619 - DNA, 15 bp, Homo sapiens
acggcttcgctgacg

SEQ ID NO: 191620 - DNA, 15 bp, Homo sapiens
cacggcttcgctgac

SEQ ID NO: 191621 - DNA, 15 bp, Homo sapiens
ccacggcttcgctga

SEQ ID NO: 191622 - DNA, 15 bp, Homo sapiens
gccacggcttcgctg

SEQ ID NO: 191623 - DNA, 15 bp, Homo sapiens
agccacggcttcgct

SEQ ID NO: 191624 - DNA, 15 bp, Homo sapiens
cagccacggcttcgc

SEQ ID NO: 191625 - DNA, 15 bp, Homo sapiens
acagccacggcttcg

SEQ ID NO: 191626 - DNA, 15 bp, Homo sapiens
cacagccacggcttc

SEQ ID NO: 191627 - DNA, 15 bp, Homo sapiens
tcacagccacggctt

SEQ ID NO: 191628 - DNA, 15 bp, Homo sapiens
gtcacagccacggct

SEQ ID NO: 191629 - DNA, 15 bp, Homo sapiens
agtcacagccacggc

SEQ ID NO: 191630 - DNA, 15 bp, Homo sapiens
gagtcacagccacgg

SEQ ID NO: 191631 - DNA, 15 bp, Homo sapiens
agagtcacagccacg

SEQ ID NO: 191632 - DNA, 15 bp, Homo sapiens
cagagtcacagccac

SEQ ID NO: 191633 - DNA, 15 bp, Homo sapiens
acagagtcacagcca

SEQ ID NO: 191634 - DNA, 15 bp, Homo sapiens
aacagagtcacagcc

SEQ ID NO: 191635 - DNA, 15 bp, Homo sapiens
aaacagagtcacagc

SEQ ID NO: 191636 - DNA, 15 bp, Homo sapiens
aaaacagagtcacag

SEQ ID NO: 191637 - DNA, 15 bp, Homo sapiens
gaaaacagagtcaca

SEQ ID NO: 191638 - DNA, 15 bp, Homo sapiens
ggaaaacagagtcac

SEQ ID NO: 191639 - DNA, 15 bp, Homo sapiens
cggaaaacagagtca

SEQ ID NO: 191640 - DNA, 15 bp, Homo sapiens
gcggaaaacagagtc

SEQ ID NO: 191641 - DNA, 15 bp, Homo sapiens
tgcggaaaacagagt

SEQ ID NO: 191642 - DNA, 15 bp, Homo sapiens
ctgcggaaaacagag

SEQ ID NO: 191643 - DNA, 15 bp, Homo sapiens
actgcggaaaacaga

SEQ ID NO: 191644 - DNA, 15 bp, Homo sapiens
cactgcggaaaacag

SEQ ID NO: 191645 - DNA, 15 bp, Homo sapiens
ccactgcggaaaaca

SEQ ID NO: 191646 - DNA, 15 bp, Homo sapiens
tccactgcggaaaac

SEQ ID NO: 191647 - DNA, 15 bp, Homo sapiens
ctccactgcggaaaa

SEQ ID NO: 191648 - DNA, 15 bp, Homo sapiens
gctccactgcggaaa

SEQ ID NO: 191649 - DNA, 15 bp, Homo sapiens
cgctccactgcggaa

SEQ ID NO: 191650 - DNA, 15 bp, Homo sapiens
ccgctccactgcgga

SEQ ID NO: 191651 - DNA, 15 bp, Homo sapiens
tccgctccactgcgg

SEQ ID NO: 191652 - DNA, 15 bp, Homo sapiens
ctccgctccactgcg

SEQ ID NO: 191653 - DNA, 15 bp, Homo sapiens
cctccgctccactgc

SEQ ID NO: 191654 - DNA, 15 bp, Homo sapiens
gcctccgctccactg

SEQ ID NO: 191655 - DNA, 15 bp, Homo sapiens
cgcctccgctccact

SEQ ID NO: 191656 - DNA, 15 bp, Homo sapiens
ccgcctccgctccac

SEQ ID NO: 191657 - DNA, 15 bp, Homo sapiens
tccgcctccgctcca

SEQ ID NO: 191658 - DNA, 15 bp, Homo sapiens
ctccgcctccgctcc

SEQ ID NO: 191659 - DNA, 15 bp, Homo sapiens
cctccgcctccgctc

SEQ ID NO: 191660 - DNA, 15 bp, Homo sapiens
ccctccgcctccgct

SEQ ID NO: 191661 - DNA, 15 bp, Homo sapiens
tccctccgcctccgc

SEQ ID NO: 191662 - DNA, 15 bp, Homo sapiens
gtccctccgcctccg

SEQ ID NO: 191663 - DNA, 15 bp, Homo sapiens
tgtccctccgcctcc

SEQ ID NO: 191664 - DNA, 15 bp, Homo sapiens
ttgtccctccgcctc

SEQ ID NO: 191665 - DNA, 15 bp, Homo sapiens
cttgtccctccgcct

SEQ ID NO: 191666 - DNA, 15 bp, Homo sapiens
tcttgtccctccgcc

SEQ ID NO: 191667 - DNA, 15 bp, Homo sapiens
atcttgtccctccgc

SEQ ID NO: 191668 - DNA, 15 bp, Homo sapiens
gatcttgtccctccg

SEQ ID NO: 191669 - DNA, 15 bp, Homo sapiens
tgatcttgtccctcc

SEQ ID NO: 191670 - DNA, 15 bp, Homo sapiens
ttgatcttgtccctc

SEQ ID NO: 191671 - DNA, 15 bp, Homo sapiens
gttgatcttgtccct

SEQ ID NO: 191672 - DNA, 15 bp, Homo sapiens
tgttgatcttgtccc

SEQ ID NO: 191673 - DNA, 15 bp, Homo sapiens
ttgttgatcttgtcc

SEQ ID NO: 191674 - DNA, 15 bp, Homo sapiens
gttgttgatcttgtc

SEQ ID NO: 191675 - DNA, 15 bp, Homo sapiens
agttgttgatcttgt

SEQ ID NO: 191676 - DNA, 15 bp, Homo sapiens
cagttgttgatcttg

SEQ ID NO: 191677 - DNA, 15 bp, Homo sapiens
ccagttgttgatctt

SEQ ID NO: 191678 - DNA, 15 bp, Homo sapiens
tccagttgttgatct

SEQ ID NO: 191679 - DNA, 15 bp, Homo sapiens
atccagttgttgatc

SEQ ID NO: 191680 - DNA, 15 bp, Homo sapiens
gatccagttgttgat

SEQ ID NO: 191681 - DNA, 15 bp, Homo sapiens
cgatccagttgttga

SEQ ID NO: 191682 - DNA, 15 bp, Homo sapiens
acgatccagttgttg

SEQ ID NO: 191683 - DNA, 15 bp, Homo sapiens
gacgatccagttgtt

SEQ ID NO: 191684 - DNA, 15 bp, Homo sapiens
ggacgatccagttgt

SEQ ID NO: 191685 - DNA, 15 bp, Homo sapiens
tggacgatccagttg

SEQ ID NO: 191686 - DNA, 15 bp, Homo sapiens
ctggacgatccagtt

SEQ ID NO: 191687 - DNA, 15 bp, Homo sapiens
gctggacgatccagt

SEQ ID NO: 191688 - DNA, 15 bp, Homo sapiens
agctggacgatccag

SEQ ID NO: 191689 - DNA, 15 bp, Homo sapiens
aagctggacgatcca

SEQ ID NO: 191690 - DNA, 15 bp, Homo sapiens
aaagctggacgatcc

SEQ ID NO: 191691 - DNA, 15 bp, Homo sapiens
gaaagctggacgatc

SEQ ID NO: 191692 - DNA, 15 bp, Homo sapiens
cgaaagctggacgat

SEQ ID NO: 191693 - DNA, 15 bp, Homo sapiens
tcgaaagctggacga

SEQ ID NO: 191694 - DNA, 15 bp, Homo sapiens
ttcgaaagctggacg

SEQ ID NO: 191695 - DNA, 15 bp, Homo sapiens
tttcgaaagctggac

SEQ ID NO: 191696 - DNA, 15 bp, Homo sapiens
ttttcgaaagctgga

SEQ ID NO: 191697 - DNA, 15 bp, Homo sapiens
attttcgaaagctgg

SEQ ID NO: 191698 - DNA, 15 bp, Homo sapiens
gattttcgaaagctg

SEQ ID NO: 191699 - DNA, 15 bp, Homo sapiens
tgattttcgaaagct

SEQ ID NO: 191700 - DNA, 15 bp, Homo sapiens
atgattttcgaaagc

SEQ ID NO: 191701 - DNA, 15 bp, Homo sapiens
aatgattttcgaaag

SEQ ID NO: 191702 - DNA, 15 bp, Homo sapiens
gaatgattttcgaaa

SEQ ID NO: 191703 - DNA, 15 bp, Homo sapiens
ggaatgattttcgaa

SEQ ID NO: 191704 - DNA, 15 bp, Homo sapiens
tggaatgattttcga

SEQ ID NO: 191705 - DNA, 15 bp, Homo sapiens
ctggaatgattttcg

SEQ ID NO: 191706 - DNA, 15 bp, Homo sapiens
tctggaatgattttc

SEQ ID NO: 191707 - DNA, 15 bp, Homo sapiens
gtctggaatgatttt

SEQ ID NO: 191708 - DNA, 15 bp, Homo sapiens
agtctggaatgattt

SEQ ID NO: 191709 - DNA, 15 bp, Homo sapiens
cagtctggaatgatt

SEQ ID NO: 191710 - DNA, 15 bp, Homo sapiens
acagtctggaatgat

SEQ ID NO: 191711 - DNA, 15 bp, Homo sapiens
tacagtctggaatga

SEQ ID NO: 191712 - DNA, 15 bp, Homo sapiens
ttacagtctggaatg

SEQ ID NO: 191713 - DNA, 15 bp, Homo sapiens
gttacagtctggaat

SEQ ID NO: 191714 - DNA, 15 bp, Homo sapiens
cgttacagtctggaa

SEQ ID NO: 191715 - DNA, 15 bp, Homo sapiens
gcgttacagtctgga

SEQ ID NO: 191716 - DNA, 15 bp, Homo sapiens
tgcgttacagtctgg

SEQ ID NO: 191717 - DNA, 15 bp, Homo sapiens
ctgcgttacagtctg

SEQ ID NO: 191718 - DNA, 15 bp, Homo sapiens
tctgcgttacagtct

SEQ ID NO: 191719 - DNA, 15 bp, Homo sapiens
gtctgcgttacagtc

SEQ ID NO: 191720 - DNA, 15 bp, Homo sapiens
tgtctgcgttacagt

SEQ ID NO: 191721 - DNA, 15 bp, Homo sapiens
ttgtctgcgttacag

SEQ ID NO: 191722 - DNA, 15 bp, Homo sapiens
gttgtctgcgttaca

SEQ ID NO: 191723 - DNA, 15 bp, Homo sapiens
tgttgtctgcgttac

SEQ ID NO: 191724 - DNA, 15 bp, Homo sapiens
ctgttgtctgcgtta

SEQ ID NO: 191725 - DNA, 15 bp, Homo sapiens
gctgttgtctgcgtt

SEQ ID NO: 191726 - DNA, 15 bp, Homo sapiens
tgctgttgtctgcgt

SEQ ID NO: 191727 - DNA, 15 bp, Homo sapiens
ttgctgttgtctgcg

SEQ ID NO: 191728 - DNA, 15 bp, Homo sapiens
cttgctgttgtctgc

SEQ ID NO: 191729 - DNA, 15 bp, Homo sapiens
tcttgctgttgtctg

SEQ ID NO: 191730 - DNA, 15 bp, Homo sapiens
gtcttgctgttgtct

SEQ ID NO: 191731 - DNA, 15 bp, Homo sapiens
cgtcttgctgttgtc

SEQ ID NO: 191732 - DNA, 15 bp, Homo sapiens
ccgtcttgctgttgt

SEQ ID NO: 191733 - DNA, 15 bp, Homo sapiens
cccgtcttgctgttg

SEQ ID NO: 191734 - DNA, 15 bp, Homo sapiens
tcccgtcttgctgtt

SEQ ID NO: 191735 - DNA, 15 bp, Homo sapiens
ctcccgtcttgctgt

SEQ ID NO: 191736 - DNA, 15 bp, Homo sapiens
gctcccgtcttgctg

SEQ ID NO: 191737 - DNA, 15 bp, Homo sapiens
cgctcccgtcttgct

SEQ ID NO: 191738 - DNA, 15 bp, Homo sapiens
ccgctcccgtcttgc

SEQ ID NO: 191739 - DNA, 15 bp, Homo sapiens
accgctcccgtcttg

SEQ ID NO: 191740 - DNA, 15 bp, Homo sapiens
caccgctcccgtctt

SEQ ID NO: 191741 - DNA, 15 bp, Homo sapiens
tcaccgctcccgtct

SEQ ID NO: 191742 - DNA, 15 bp, Homo sapiens
ctcaccgctcccgtc

SEQ ID NO: 191743 - DNA, 15 bp, Homo sapiens
gctcaccgctcccgt

SEQ ID NO: 191744 - DNA, 15 bp, Homo sapiens
tgctcaccgctcccg

SEQ ID NO: 191745 - DNA, 15 bp, Homo sapiens
gtgctcaccgctccc

SEQ ID NO: 191746 - DNA, 15 bp, Homo sapiens
ggtgctcaccgctcc

SEQ ID NO: 191747 - DNA, 15 bp, Homo sapiens
gggtgctcaccgctc

SEQ ID NO: 191748 - DNA, 15 bp, Homo sapiens
ggggtgctcaccgct

SEQ ID NO: 191749 - DNA, 15 bp, Homo sapiens
cggggtgctcaccgc

SEQ ID NO: 191750 - DNA, 15 bp, Homo sapiens
ccggggtgctcaccg

SEQ ID NO: 191751 - DNA, 15 bp, Homo sapiens
tccggggtgctcacc

SEQ ID NO: 191752 - DNA, 15 bp, Homo sapiens
gtccggggtgctcac

SEQ ID NO: 191753 - DNA, 15 bp, Homo sapiens
ggtccggggtgctca

SEQ ID NO: 191754 - DNA, 15 bp, Homo sapiens
gggtccggggtgctc

SEQ ID NO: 191755 - DNA, 15 bp, Homo sapiens
agggtccggggtgct

SEQ ID NO: 191756 - DNA, 15 bp, Homo sapiens
gagggtccggggtgc

SEQ ID NO: 191757 - DNA, 15 bp, Homo sapiens
tgagggtccggggtg

SEQ ID NO: 191758 - DNA, 15 bp, Homo sapiens
ctgagggtccggggt

SEQ ID NO: 191759 - DNA, 15 bp, Homo sapiens
actgagggtccgggg

SEQ ID NO: 191760 - DNA, 15 bp, Homo sapiens
cactgagggtccggg

SEQ ID NO: 191761 - DNA, 15 bp, Homo sapiens
acactgagggtccgg

SEQ ID NO: 191762 - DNA, 15 bp, Homo sapiens
gacactgagggtccg

SEQ ID NO: 191763 - DNA, 15 bp, Homo sapiens
agacactgagggtcc

SEQ ID NO: 191764 - DNA, 15 bp, Homo sapiens
cagacactgagggtc

SEQ ID NO: 191765 - DNA, 15 bp, Homo sapiens
gcagacactgagggt

SEQ ID NO: 191766 - DNA, 15 bp, Homo sapiens
cgcagacactgaggg

SEQ ID NO: 191767 - DNA, 15 bp, Homo sapiens
ccgcagacactgagg

SEQ ID NO: 191768 - DNA, 15 bp, Homo sapiens
accgcagacactgag

SEQ ID NO: 191769 - DNA, 15 bp, Homo sapiens
caccgcagacactga

SEQ ID NO: 191770 - DNA, 15 bp, Homo sapiens
ccaccgcagacactg

SEQ ID NO: 191771 - DNA, 15 bp, Homo sapiens
accaccgcagacact

SEQ ID NO: 191772 - DNA, 15 bp, Homo sapiens
gaccaccgcagacac

SEQ ID NO: 191773 - DNA, 15 bp, Homo sapiens
ggaccaccgcagaca

SEQ ID NO: 191774 - DNA, 15 bp, Homo sapiens
gggaccaccgcagac

SEQ ID NO: 191775 - DNA, 15 bp, Homo sapiens
cgggaccaccgcaga

SEQ ID NO: 191776 - DNA, 15 bp, Homo sapiens
ccgggaccaccgcag

SEQ ID NO: 191777 - DNA, 15 bp, Homo sapiens
gccgggaccaccgca

SEQ ID NO: 191778 - DNA, 15 bp, Homo sapiens
ggccgggaccaccgc

SEQ ID NO: 191779 - DNA, 15 bp, Homo sapiens
gggccgggaccaccg

SEQ ID NO: 191780 - DNA, 15 bp, Homo sapiens
ggggccgggaccacc

SEQ ID NO: 191781 - DNA, 15 bp, Homo sapiens
gggggccgggaccac

SEQ ID NO: 191782 - DNA, 15 bp, Homo sapiens
cgggggccgggacca

SEQ ID NO: 191783 - DNA, 15 bp, Homo sapiens
tcgggggccgggacc

SEQ ID NO: 191784 - DNA, 15 bp, Homo sapiens
gtcgggggccgggac

SEQ ID NO: 191785 - DNA, 15 bp, Homo sapiens
ggtcgggggccggga

SEQ ID NO: 191786 - DNA, 15 bp, Homo sapiens
gggtcgggggccggg

SEQ ID NO: 191787 - DNA, 15 bp, Homo sapiens
agggtcgggggccgg

SEQ ID NO: 191788 - DNA, 15 bp, Homo sapiens
aagggtcgggggccg

SEQ ID NO: 191789 - DNA, 15 bp, Homo sapiens
caagggtcgggggcc

SEQ ID NO: 191790 - DNA, 15 bp, Homo sapiens
gcaagggtcgggggc

SEQ ID NO: 191791 - DNA, 15 bp, Homo sapiens
tgcaagggtcggggg

SEQ ID NO: 191792 - DNA, 15 bp, Homo sapiens
atgcaagggtcgggg

SEQ ID NO: 191793 - DNA, 15 bp, Homo sapiens
catgcaagggtcggg

SEQ ID NO: 191794 - DNA, 15 bp, Homo sapiens
gcatgcaagggtcgg

SEQ ID NO: 191795 - DNA, 15 bp, Homo sapiens
tgcatgcaagggtcg

SEQ ID NO: 191796 - DNA, 15 bp, Homo sapiens
ctgcatgcaagggtc

SEQ ID NO: 191797 - DNA, 15 bp, Homo sapiens
tctgcatgcaagggt

SEQ ID NO: 191798 - DNA, 15 bp, Homo sapiens
ttctgcatgcaaggg

SEQ ID NO: 191799 - DNA, 15 bp, Homo sapiens
tttctgcatgcaagg

SEQ ID NO: 191800 - DNA, 15 bp, Homo sapiens
ctttctgcatgcaag

SEQ ID NO: 191801 - DNA, 15 bp, Homo sapiens
actttctgcatgcaa

SEQ ID NO: 191802 - DNA, 15 bp, Homo sapiens
gactttctgcatgca

SEQ ID NO: 191803 - DNA, 15 bp, Homo sapiens
ggactttctgcatgc

SEQ ID NO: 191804 - DNA, 15 bp, Homo sapiens
tggactttctgcatg

SEQ ID NO: 191805 - DNA, 15 bp, Homo sapiens
ttggactttctgcat

SEQ ID NO: 191806 - DNA, 15 bp, Homo sapiens
gttggactttctgca

SEQ ID NO: 191807 - DNA, 15 bp, Homo sapiens
tgttggactttctgc

SEQ ID NO: 191808 - DNA, 15 bp, Homo sapiens
ctgttggactttctg

SEQ ID NO: 191809 - DNA, 15 bp, Homo sapiens
gctgttggactttct

SEQ ID NO: 191810 - DNA, 15 bp, Homo sapiens
ggctgttggactttc

SEQ ID NO: 191811 - DNA, 15 bp, Homo sapiens
tggctgttggacttt

SEQ ID NO: 191812 - DNA, 15 bp, Homo sapiens
atggctgttggactt

SEQ ID NO: 191813 - DNA, 15 bp, Homo sapiens
catggctgttggact

SEQ ID NO: 191814 - DNA, 15 bp, Homo sapiens
ccatggctgttggac

SEQ ID NO: 191815 - DNA, 15 bp, Homo sapiens
cccatggctgttgga

SEQ ID NO: 191816 - DNA, 15 bp, Homo sapiens
ccccatggctgttgg

SEQ ID NO: 191817 - DNA, 15 bp, Homo sapiens
gccccatggctgttg

SEQ ID NO: 191818 - DNA, 15 bp, Homo sapiens
agccccatggctgtt

SEQ ID NO: 191819 - DNA, 15 bp, Homo sapiens
gagccccatggctgt

SEQ ID NO: 191820 - DNA, 15 bp, Homo sapiens
cgagccccatggctg

SEQ ID NO: 191821 - DNA, 15 bp, Homo sapiens
ccgagccccatggct

SEQ ID NO: 191822 - DNA, 15 bp, Homo sapiens
cccgagccccatggc

SEQ ID NO: 191823 - DNA, 15 bp, Homo sapiens
tcccgagccccatgg

SEQ ID NO: 191824 - DNA, 15 bp, Homo sapiens
ctcccgagccccatg

SEQ ID NO: 191825 - DNA, 15 bp, Homo sapiens
actcccgagccccat

SEQ ID NO: 191826 - DNA, 15 bp, Homo sapiens
gactcccgagcccca

SEQ ID NO: 191827 - DNA, 15 bp, Homo sapiens
tgactcccgagcccc

SEQ ID NO: 191828 - DNA, 15 bp, Homo sapiens
atgactcccgagccc

SEQ ID NO: 191829 - DNA, 15 bp, Homo sapiens
gatgactcccgagcc

SEQ ID NO: 191830 - DNA, 15 bp, Homo sapiens
ggatgactcccgagc

SEQ ID NO: 191831 - DNA, 15 bp, Homo sapiens
gggatgactcccgag

SEQ ID NO: 191832 - DNA, 15 bp, Homo sapiens
agggatgactcccga

SEQ ID NO: 191833 - DNA, 15 bp, Homo sapiens
cagggatgactcccg

SEQ ID NO: 191834 - DNA, 15 bp, Homo sapiens
ccagggatgactccc

SEQ ID NO: 191835 - DNA, 15 bp, Homo sapiens
cccagggatgactcc

SEQ ID NO: 191836 - DNA, 15 bp, Homo sapiens
ccccagggatgactc

SEQ ID NO: 191837 - DNA, 15 bp, Homo sapiens
accccagggatgact

SEQ ID NO: 191838 - DNA, 15 bp, Homo sapiens
caccccagggatgac

SEQ ID NO: 191839 - DNA, 15 bp, Homo sapiens
ccaccccagggatga

SEQ ID NO: 191840 - DNA, 15 bp, Homo sapiens
tccaccccagggatg

SEQ ID NO: 191841 - DNA, 15 bp, Homo sapiens
ctccaccccagggat

SEQ ID NO: 191842 - DNA, 15 bp, Homo sapiens
cctccaccccaggga

SEQ ID NO: 191843 - DNA, 15 bp, Homo sapiens
gcctccaccccaggg

SEQ ID NO: 191844 - DNA, 15 bp, Homo sapiens
ggcctccaccccagg

SEQ ID NO: 191845 - DNA, 15 bp, Homo sapiens
cggcctccaccccag

SEQ ID NO: 191846 - DNA, 15 bp, Homo sapiens
ccggcctccacccca

SEQ ID NO: 191847 - DNA, 15 bp, Homo sapiens
accggcctccacccc

SEQ ID NO: 191848 - DNA, 15 bp, Homo sapiens
caccggcctccaccc

SEQ ID NO: 191849 - DNA, 15 bp, Homo sapiens
ccaccggcctccacc

SEQ ID NO: 191850 - DNA, 15 bp, Homo sapiens
cccaccggcctccac

SEQ ID NO: 191851 - DNA, 15 bp, Homo sapiens
gcccaccggcctcca

SEQ ID NO: 191852 - DNA, 15 bp, Homo sapiens
cgcccaccggcctcc

SEQ ID NO: 191853 - DNA, 15 bp, Homo sapiens
ccgcccaccggcctc

SEQ ID NO: 191854 - DNA, 15 bp, Homo sapiens
accgcccaccggcct

SEQ ID NO: 191855 - DNA, 15 bp, Homo sapiens
caccgcccaccggcc

SEQ ID NO: 191856 - DNA, 15 bp, Homo sapiens
gcaccgcccaccggc

SEQ ID NO: 191857 - DNA, 15 bp, Homo sapiens
ggcaccgcccaccgg

SEQ ID NO: 191858 - DNA, 15 bp, Homo sapiens
aggcaccgcccaccg

SEQ ID NO: 191859 - DNA, 15 bp, Homo sapiens
caggcaccgcccacc

SEQ ID NO: 191860 - DNA, 15 bp, Homo sapiens
gcaggcaccgcccac

SEQ ID NO: 191861 - DNA, 15 bp, Homo sapiens
ggcaggcaccgccca

SEQ ID NO: 191862 - DNA, 15 bp, Homo sapiens
gggcaggcaccgccc

SEQ ID NO: 191863 - DNA, 15 bp, Homo sapiens
agggcaggcaccgcc

SEQ ID NO: 191864 - DNA, 15 bp, Homo sapiens
tagggcaggcaccgc

SEQ ID NO: 191865 - DNA, 15 bp, Homo sapiens
ttagggcaggcaccg

SEQ ID NO: 191866 - DNA, 15 bp, Homo sapiens
cttagggcaggcacc

SEQ ID NO: 191867 - DNA, 15 bp, Homo sapiens
ccttagggcaggcac

SEQ ID NO: 191868 - DNA, 15 bp, Homo sapiens
gccttagggcaggca

SEQ ID NO: 191869 - DNA, 15 bp, Homo sapiens
agccttagggcaggc

SEQ ID NO: 191870 - DNA, 15 bp, Homo sapiens
gagccttagggcagg

SEQ ID NO: 191871 - DNA, 15 bp, Homo sapiens
ggagccttagggcag

SEQ ID NO: 191872 - DNA, 15 bp, Homo sapiens
aggagccttagggca

SEQ ID NO: 191873 - DNA, 15 bp, Homo sapiens
caggagccttagggc

SEQ ID NO: 191874 - DNA, 15 bp, Homo sapiens
ccaggagccttaggg

SEQ ID NO: 191875 - DNA, 15 bp, Homo sapiens
accaggagccttagg

SEQ ID NO: 191876 - DNA, 15 bp, Homo sapiens
gaccaggagccttag

SEQ ID NO: 191877 - DNA, 15 bp, Homo sapiens
ggaccaggagcctta

SEQ ID NO: 191878 - DNA, 15 bp, Homo sapiens
gggaccaggagcctt

SEQ ID NO: 191879 - DNA, 15 bp, Homo sapiens
ggggaccaggagcct

SEQ ID NO: 191880 - DNA, 15 bp, Homo sapiens
aggggaccaggagcc

SEQ ID NO: 191881 - DNA, 15 bp, Homo sapiens
gaggggaccaggagc

SEQ ID NO: 191882 - DNA, 15 bp, Homo sapiens
cgaggggaccaggag

SEQ ID NO: 191883 - DNA, 15 bp, Homo sapiens
gcgaggggaccagga

SEQ ID NO: 191884 - DNA, 15 bp, Homo sapiens
ggcgaggggaccagg

SEQ ID NO: 191885 - DNA, 15 bp, Homo sapiens
gggcgaggggaccag

SEQ ID NO: 191886 - DNA, 15 bp, Homo sapiens
ggggcgaggggacca

SEQ ID NO: 191887 - DNA, 15 bp, Homo sapiens
gggggcgaggggacc

SEQ ID NO: 191888 - DNA, 15 bp, Homo sapiens
ggggggcgaggggac

SEQ ID NO: 191889 - DNA, 15 bp, Homo sapiens
tggggggcgagggga

SEQ ID NO: 191890 - DNA, 15 bp, Homo sapiens
ctggggggcgagggg

SEQ ID NO: 191891 - DNA, 15 bp, Homo sapiens
tctggggggcgaggg

SEQ ID NO: 191892 - DNA, 15 bp, Homo sapiens
ctctggggggcgagg

SEQ ID NO: 191893 - DNA, 15 bp, Homo sapiens
actctggggggcgag

SEQ ID NO: 191894 - DNA, 15 bp, Homo sapiens
tactctggggggcga

SEQ ID NO: 191895 - DNA, 15 bp, Homo sapiens
ttactctggggggcg

SEQ ID NO: 191896 - DNA, 15 bp, Homo sapiens
tttactctggggggc

SEQ ID NO: 191897 - DNA, 15 bp, Homo sapiens
ctttactctgggggg

SEQ ID NO: 191898 - DNA, 15 bp, Homo sapiens
cctttactctggggg

SEQ ID NO: 191899 - DNA, 15 bp, Homo sapiens
tcctttactctgggg

SEQ ID NO: 191900 - DNA, 15 bp, Homo sapiens
ctcctttactctggg

SEQ ID NO: 191901 - DNA, 15 bp, Homo sapiens
cctcctttactctgg

SEQ ID NO: 191902 - DNA, 15 bp, Homo sapiens
ccctcctttactctg

SEQ ID NO: 191903 - DNA, 15 bp, Homo sapiens
tccctcctttactct

SEQ ID NO: 191904 - DNA, 15 bp, Homo sapiens
atccctcctttactc

SEQ ID NO: 191905 - DNA, 15 bp, Homo sapiens
gatccctcctttact

SEQ ID NO: 191906 - DNA, 15 bp, Homo sapiens
ggatccctcctttac

SEQ ID NO: 191907 - DNA, 15 bp, Homo sapiens
aggatccctccttta

SEQ ID NO: 191908 - DNA, 15 bp, Homo sapiens
caggatccctccttt

SEQ ID NO: 191909 - DNA, 15 bp, Homo sapiens
acaggatccctcctt

SEQ ID NO: 191910 - DNA, 15 bp, Homo sapiens
gacaggatccctcct

SEQ ID NO: 191911 - DNA, 15 bp, Homo sapiens
ggacaggatccctcc

SEQ ID NO: 191912 - DNA, 15 bp, Homo sapiens
tggacaggatccctc

SEQ ID NO: 191913 - DNA, 15 bp, Homo sapiens
ttggacaggatccct

SEQ ID NO: 191914 - DNA, 15 bp, Homo sapiens
cttggacaggatccc

SEQ ID NO: 191915 - DNA, 15 bp, Homo sapiens
ccttggacaggatcc

SEQ ID NO: 191916 - DNA, 15 bp, Homo sapiens
gccttggacaggatc

SEQ ID NO: 191917 - DNA, 15 bp, Homo sapiens
ggccttggacaggat

SEQ ID NO: 191918 - DNA, 15 bp, Homo sapiens
aggccttggacagga

SEQ ID NO: 191919 - DNA, 15 bp, Homo sapiens
caggccttggacagg

SEQ ID NO: 191920 - DNA, 15 bp, Homo sapiens
gcaggccttggacag

SEQ ID NO: 191921 - DNA, 15 bp, Homo sapiens
cgcaggccttggaca

SEQ ID NO: 191922 - DNA, 15 bp, Homo sapiens
tcgcaggccttggac

SEQ ID NO: 191923 - DNA, 15 bp, Homo sapiens
atcgcaggccttgga

SEQ ID NO: 191924 - DNA, 15 bp, Homo sapiens
aatcgcaggccttgg

SEQ ID NO: 191925 - DNA, 15 bp, Homo sapiens
taatcgcaggccttg

SEQ ID NO: 191926 - DNA, 15 bp, Homo sapiens
gtaatcgcaggcctt

SEQ ID NO: 191927 - DNA, 15 bp, Homo sapiens
tgtaatcgcaggcct

SEQ ID NO: 191928 - DNA, 15 bp, Homo sapiens
atgtaatcgcaggcc

SEQ ID NO: 191929 - DNA, 15 bp, Homo sapiens
gatgtaatcgcaggc

SEQ ID NO: 191930 - DNA, 15 bp, Homo sapiens
ggatgtaatcgcagg

SEQ ID NO: 191931 - DNA, 15 bp, Homo sapiens
cggatgtaatcgcag

SEQ ID NO: 191932 - DNA, 15 bp, Homo sapiens
ccggatgtaatcgca

SEQ ID NO: 191933 - DNA, 15 bp, Homo sapiens
cccggatgtaatcgc

SEQ ID NO: 191934 - DNA, 15 bp, Homo sapiens
tcccggatgtaatcg

SEQ ID NO: 191935 - DNA, 15 bp, Homo sapiens
ctcccggatgtaatc

SEQ ID NO: 191936 - DNA, 15 bp, Homo sapiens
actcccggatgtaat

SEQ ID NO: 191937 - DNA, 15 bp, Homo sapiens
aactcccggatgtaa

SEQ ID NO: 191938 - DNA, 15 bp, Homo sapiens
caactcccggatgta

SEQ ID NO: 191939 - DNA, 15 bp, Homo sapiens
gcaactcccggatgt

SEQ ID NO: 191940 - DNA, 15 bp, Homo sapiens
cgcaactcccggatg

SEQ ID NO: 191941 - DNA, 15 bp, Homo sapiens
gcgcaactcccggat

SEQ ID NO: 191942 - DNA, 15 bp, Homo sapiens
ggcgcaactcccgga

SEQ ID NO: 191943 - DNA, 15 bp, Homo sapiens
tggcgcaactcccgg

SEQ ID NO: 191944 - DNA, 15 bp, Homo sapiens
ctggcgcaactcccg

SEQ ID NO: 191945 - DNA, 15 bp, Homo sapiens
tctggcgcaactccc

SEQ ID NO: 191946 - DNA, 15 bp, Homo sapiens
gtctggcgcaactcc

SEQ ID NO: 191947 - DNA, 15 bp, Homo sapiens
ggtctggcgcaactc

SEQ ID NO: 191948 - DNA, 15 bp, Homo sapiens
tggtctggcgcaact

SEQ ID NO: 191949 - DNA, 15 bp, Homo sapiens
ttggtctggcgcaac

SEQ ID NO: 191950 - DNA, 15 bp, Homo sapiens
gttggtctggcgcaa

SEQ ID NO: 191951 - DNA, 15 bp, Homo sapiens
ggttggtctggcgca

SEQ ID NO: 191952 - DNA, 15 bp, Homo sapiens
tggttggtctggcgc

SEQ ID NO: 191953 - DNA, 15 bp, Homo sapiens
ctggttggtctggcg

SEQ ID NO: 191954 - DNA, 15 bp, Homo sapiens
gctggttggtctggc

SEQ ID NO: 191955 - DNA, 15 bp, Homo sapiens
cgctggttggtctgg

SEQ ID NO: 191956 - DNA, 15 bp, Homo sapiens
gcgctggttggtctg

SEQ ID NO: 191957 - DNA, 15 bp, Homo sapiens
tgcgctggttggtct

SEQ ID NO: 191958 - DNA, 15 bp, Homo sapiens
atgcgctggttggtc

SEQ ID NO: 191959 - DNA, 15 bp, Homo sapiens
catgcgctggttggt

SEQ ID NO: 191960 - DNA, 15 bp, Homo sapiens
gcatgcgctggttgg

SEQ ID NO: 191961 - DNA, 15 bp, Homo sapiens
tgcatgcgctggttg

SEQ ID NO: 191962 - DNA, 15 bp, Homo sapiens
ctgcatgcgctggtt

SEQ ID NO: 191963 - DNA, 15 bp, Homo sapiens
cctgcatgcgctggt

SEQ ID NO: 191964 - DNA, 15 bp, Homo sapiens
tcctgcatgcgctgg

SEQ ID NO: 191965 - DNA, 15 bp, Homo sapiens
ctcctgcatgcgctg

SEQ ID NO: 191966 - DNA, 15 bp, Homo sapiens
tctcctgcatgcgct

SEQ ID NO: 191967 - DNA, 15 bp, Homo sapiens
gtctcctgcatgcgc

SEQ ID NO: 191968 - DNA, 15 bp, Homo sapiens
ggtctcctgcatgcg

SEQ ID NO: 191969 - DNA, 15 bp, Homo sapiens
aggtctcctgcatgc

SEQ ID NO: 191970 - DNA, 15 bp, Homo sapiens
aaggtctcctgcatg

SEQ ID NO: 191971 - DNA, 15 bp, Homo sapiens
gaaggtctcctgcat

SEQ ID NO: 191972 - DNA, 15 bp, Homo sapiens
tgaaggtctcctgca

SEQ ID NO: 191973 - DNA, 15 bp, Homo sapiens
ttgaaggtctcctgc

SEQ ID NO: 191974 - DNA, 15 bp, Homo sapiens
tttgaaggtctcctg

SEQ ID NO: 191975 - DNA, 15 bp, Homo sapiens
ctttgaaggtctcct

SEQ ID NO: 191976 - DNA, 15 bp, Homo sapiens
tctttgaaggtctcc

SEQ ID NO: 191977 - DNA, 15 bp, Homo sapiens
ctctttgaaggtctc

SEQ ID NO: 191978 - DNA, 15 bp, Homo sapiens
cctctttgaaggtct

SEQ ID NO: 191979 - DNA, 15 bp, Homo sapiens
gcctctttgaaggtc

SEQ ID NO: 191980 - DNA, 15 bp, Homo sapiens
ggcctctttgaaggt

SEQ ID NO: 191981 - DNA, 15 bp, Homo sapiens
cggcctctttgaagg

SEQ ID NO: 191982 - DNA, 15 bp, Homo sapiens
tcggcctctttgaag

SEQ ID NO: 191983 - DNA, 15 bp, Homo sapiens
ctcggcctctttgaa

SEQ ID NO: 191984 - DNA, 15 bp, Homo sapiens
gctcggcctctttga

SEQ ID NO: 191985 - DNA, 15 bp, Homo sapiens
cgctcggcctctttg

SEQ ID NO: 191986 - DNA, 15 bp, Homo sapiens
ccgctcggcctcttt

SEQ ID NO: 191987 - DNA, 15 bp, Homo sapiens
gccgctcggcctctt

SEQ ID NO: 191988 - DNA, 15 bp, Homo sapiens
agccgctcggcctct

SEQ ID NO: 191989 - DNA, 15 bp, Homo sapiens
cagccgctcggcctc

SEQ ID NO: 191990 - DNA, 15 bp, Homo sapiens
gcagccgctcggcct

SEQ ID NO: 191991 - DNA, 15 bp, Homo sapiens
tgcagccgctcggcc

SEQ ID NO: 191992 - DNA, 15 bp, Homo sapiens
ctgcagccgctcggc

SEQ ID NO: 191993 - DNA, 15 bp, Homo sapiens
tctgcagccgctcgg

SEQ ID NO: 191994 - DNA, 15 bp, Homo sapiens
atctgcagccgctcg

SEQ ID NO: 191995 - DNA, 15 bp, Homo sapiens
catctgcagccgctc

SEQ ID NO: 191996 - DNA, 15 bp, Homo sapiens
ccatctgcagccgct

SEQ ID NO: 191997 - DNA, 15 bp, Homo sapiens
tccatctgcagccgc

SEQ ID NO: 191998 - DNA, 15 bp, Homo sapiens
gtccatctgcagccg

SEQ ID NO: 191999 - DNA, 15 bp, Homo sapiens
tgtccatctgcagcc

SEQ ID NO: 192000 - DNA, 15 bp, Homo sapiens
ttgtccatctgcagc

SEQ ID NO: 192001 - DNA, 15 bp, Homo sapiens
gttgtccatctgcag

SEQ ID NO: 192002 - DNA, 15 bp, Homo sapiens
cgttgtccatctgca

SEQ ID NO: 192003 - DNA, 15 bp, Homo sapiens
tcgttgtccatctgc

SEQ ID NO: 192004 - DNA, 15 bp, Homo sapiens
ctcgttgtccatctg

SEQ ID NO: 192005 - DNA, 15 bp, Homo sapiens
gctcgttgtccatct

SEQ ID NO: 192006 - DNA, 15 bp, Homo sapiens
agctcgttgtccatc

SEQ ID NO: 192007 - DNA, 15 bp, Homo sapiens
gagctcgttgtccat

SEQ ID NO: 192008 - DNA, 15 bp, Homo sapiens
ggagctcgttgtcca

SEQ ID NO: 192009 - DNA, 15 bp, Homo sapiens
aggagctcgttgtcc

SEQ ID NO: 192010 - DNA, 15 bp, Homo sapiens
caggagctcgttgtc

SEQ ID NO: 192011 - DNA, 15 bp, Homo sapiens
tcaggagctcgttgt

SEQ ID NO: 192012 - DNA, 15 bp, Homo sapiens
ctcaggagctcgttg

SEQ ID NO: 192013 - DNA, 15 bp, Homo sapiens
cctcaggagctcgtt

SEQ ID NO: 192014 - DNA, 15 bp, Homo sapiens
gcctcaggagctcgt

SEQ ID NO: 192015 - DNA, 15 bp, Homo sapiens
tgcctcaggagctcg

SEQ ID NO: 192016 - DNA, 15 bp, Homo sapiens
ctgcctcaggagctc

SEQ ID NO: 192017 - DNA, 15 bp, Homo sapiens
gctgcctcaggagct

SEQ ID NO: 192018 - DNA, 15 bp, Homo sapiens
tgctgcctcaggagc

SEQ ID NO: 192019 - DNA, 15 bp, Homo sapiens
ctgctgcctcaggag

SEQ ID NO: 192020 - DNA, 15 bp, Homo sapiens
cctgctgcctcagga

SEQ ID NO: 192021 - DNA, 15 bp, Homo sapiens
acctgctgcctcagg

SEQ ID NO: 192022 - DNA, 15 bp, Homo sapiens
cacctgctgcctcag

SEQ ID NO: 192023 - DNA, 15 bp, Homo sapiens
ccacctgctgcctca

SEQ ID NO: 192024 - DNA, 15 bp, Homo sapiens
cccacctgctgcctc

SEQ ID NO: 192025 - DNA, 15 bp, Homo sapiens
acccacctgctgcct

SEQ ID NO: 192026 - DNA, 15 bp, Homo sapiens
cacccacctgctgcc

SEQ ID NO: 192027 - DNA, 15 bp, Homo sapiens
gcacccacctgctgc

SEQ ID NO: 192028 - DNA, 15 bp, Homo sapiens
cgcacccacctgctg

SEQ ID NO: 192029 - DNA, 15 bp, Homo sapiens
ccgcacccacctgct

SEQ ID NO: 192030 - DNA, 15 bp, Homo sapiens
cccgcacccacctgc

SEQ ID NO: 192031 - DNA, 15 bp, Homo sapiens
ccccgcacccacctg

SEQ ID NO: 192032 - DNA, 15 bp, Homo sapiens
gccccgcacccacct

SEQ ID NO: 192033 - DNA, 15 bp, Homo sapiens
ggccccgcacccacc

SEQ ID NO: 192034 - DNA, 15 bp, Homo sapiens
aggccccgcacccac

SEQ ID NO: 192035 - DNA, 15 bp, Homo sapiens
caggccccgcaccca

SEQ ID NO: 192036 - DNA, 15 bp, Homo sapiens
ccaggccccgcaccc

SEQ ID NO: 192037 - DNA, 15 bp, Homo sapiens
tccaggccccgcacc

SEQ ID NO: 192038 - DNA, 15 bp, Homo sapiens
ctccaggccccgcac

SEQ ID NO: 192039 - DNA, 15 bp, Homo sapiens
gctccaggccccgca

SEQ ID NO: 192040 - DNA, 15 bp, Homo sapiens
cgctccaggccccgc

SEQ ID NO: 192041 - DNA, 15 bp, Homo sapiens
ccgctccaggccccg

SEQ ID NO: 192042 - DNA, 15 bp, Homo sapiens
cccgctccaggcccc

SEQ ID NO: 192043 - DNA, 15 bp, Homo sapiens
acccgctccaggccc

SEQ ID NO: 192044 - DNA, 15 bp, Homo sapiens
gacccgctccaggcc

SEQ ID NO: 192045 - DNA, 15 bp, Homo sapiens
tgacccgctccaggc

SEQ ID NO: 192046 - DNA, 15 bp, Homo sapiens
ctgacccgctccagg

SEQ ID NO: 192047 - DNA, 15 bp, Homo sapiens
cctgacccgctccag

SEQ ID NO: 192048 - DNA, 15 bp, Homo sapiens
ccctgacccgctcca

SEQ ID NO: 192049 - DNA, 15 bp, Homo sapiens
gccctgacccgctcc

SEQ ID NO: 192050 - DNA, 15 bp, Homo sapiens
ggccctgacccgctc

SEQ ID NO: 192051 - DNA, 15 bp, Homo sapiens
gggccctgacccgct

SEQ ID NO: 192052 - DNA, 15 bp, Homo sapiens
tgggccctgacccgc

SEQ ID NO: 192053 - DNA, 15 bp, Homo sapiens
ctgggccctgacccg

SEQ ID NO: 192054 - DNA, 15 bp, Homo sapiens
cctgggccctgaccc

SEQ ID NO: 192055 - DNA, 15 bp, Homo sapiens
tcctgggccctgacc

SEQ ID NO: 192056 - DNA, 15 bp, Homo sapiens
ctcctgggccctgac

SEQ ID NO: 192057 - DNA, 15 bp, Homo sapiens
gctcctgggccctga

SEQ ID NO: 192058 - DNA, 15 bp, Homo sapiens
ggctcctgggccctg

SEQ ID NO: 192059 - DNA, 15 bp, Homo sapiens
gggctcctgggccct

SEQ ID NO: 192060 - DNA, 15 bp, Homo sapiens
ggggctcctgggccc

SEQ ID NO: 192061 - DNA, 15 bp, Homo sapiens
tggggctcctgggcc

SEQ ID NO: 192062 - DNA, 15 bp, Homo sapiens
ctggggctcctgggc

SEQ ID NO: 192063 - DNA, 15 bp, Homo sapiens
tctggggctcctggg

SEQ ID NO: 192064 - DNA, 15 bp, Homo sapiens
atctggggctcctgg

SEQ ID NO: 192065 - DNA, 15 bp, Homo sapiens
catctggggctcctg

SEQ ID NO: 192066 - DNA, 15 bp, Homo sapiens
gcatctggggctcct

SEQ ID NO: 192067 - DNA, 15 bp, Homo sapiens
tgcatctggggctcc

SEQ ID NO: 192068 - DNA, 15 bp, Homo sapiens
ttgcatctggggctc

SEQ ID NO: 192069 - DNA, 15 bp, Homo sapiens
cttgcatctggggct

SEQ ID NO: 192070 - DNA, 15 bp, Homo sapiens
ccttgcatctggggc

SEQ ID NO: 192071 - DNA, 15 bp, Homo sapiens
gccttgcatctgggg

SEQ ID NO: 192072 - DNA, 15 bp, Homo sapiens
cgccttgcatctggg

SEQ ID NO: 192073 - DNA, 15 bp, Homo sapiens
gcgccttgcatctgg

SEQ ID NO: 192074 - DNA, 15 bp, Homo sapiens
agcgccttgcatctg

SEQ ID NO: 192075 - DNA, 15 bp, Homo sapiens
cagcgccttgcatct

SEQ ID NO: 192076 - DNA, 15 bp, Homo sapiens
ccagcgccttgcatc

SEQ ID NO: 192077 - DNA, 15 bp, Homo sapiens
gccagcgccttgcat

SEQ ID NO: 192078 - DNA, 15 bp, Homo sapiens
ggccagcgccttgca

SEQ ID NO: 192079 - DNA, 15 bp, Homo sapiens
gggccagcgccttgc

SEQ ID NO: 192080 - DNA, 15 bp, Homo sapiens
agggccagcgccttg

SEQ ID NO: 192081 - DNA, 15 bp, Homo sapiens
gagggccagcgcctt

SEQ ID NO: 192082 - DNA, 15 bp, Homo sapiens
tgagggccagcgcct

SEQ ID NO: 192083 - DNA, 15 bp, Homo sapiens
ctgagggccagcgcc

SEQ ID NO: 192084 - DNA, 15 bp, Homo sapiens
gctgagggccagcgc

SEQ ID NO: 192085 - DNA, 15 bp, Homo sapiens
agctgagggccagcg

SEQ ID NO: 192086 - DNA, 15 bp, Homo sapiens
gagctgagggccagc

SEQ ID NO: 192087 - DNA, 15 bp, Homo sapiens
ggagctgagggccag

SEQ ID NO: 192088 - DNA, 15 bp, Homo sapiens
gggagctgagggcca

SEQ ID NO: 192089 - DNA, 15 bp, Homo sapiens
agggagctgagggcc

SEQ ID NO: 192090 - DNA, 15 bp, Homo sapiens
aagggagctgagggc

SEQ ID NO: 192091 - DNA, 15 bp, Homo sapiens
caagggagctgaggg

SEQ ID NO: 192092 - DNA, 15 bp, Homo sapiens
tcaagggagctgagg

SEQ ID NO: 192093 - DNA, 15 bp, Homo sapiens
gtcaagggagctgag

SEQ ID NO: 192094 - DNA, 15 bp, Homo sapiens
ggtcaagggagctga

SEQ ID NO: 192095 - DNA, 15 bp, Homo sapiens
aggtcaagggagctg

SEQ ID NO: 192096 - DNA, 15 bp, Homo sapiens
gaggtcaagggagct

SEQ ID NO: 192097 - DNA, 15 bp, Homo sapiens
ggaggtcaagggagc

SEQ ID NO: 192098 - DNA, 15 bp, Homo sapiens
cggaggtcaagggag

SEQ ID NO: 192099 - DNA, 15 bp, Homo sapiens
acggaggtcaaggga

SEQ ID NO: 192100 - DNA, 15 bp, Homo sapiens
gacggaggtcaaggg

SEQ ID NO: 192101 - DNA, 15 bp, Homo sapiens
cgacggaggtcaagg

SEQ ID NO: 192102 - DNA, 15 bp, Homo sapiens
acgacggaggtcaag

SEQ ID NO: 192103 - DNA, 15 bp, Homo sapiens
cacgacggaggtcaa

SEQ ID NO: 192104 - DNA, 15 bp, Homo sapiens
acacgacggaggtca

SEQ ID NO: 192105 - DNA, 15 bp, Homo sapiens
gacacgacggaggtc

SEQ ID NO: 192106 - DNA, 15 bp, Homo sapiens
ggacacgacggaggt

SEQ ID NO: 192107 - DNA, 15 bp, Homo sapiens
cggacacgacggagg

SEQ ID NO: 192108 - DNA, 15 bp, Homo sapiens
gcggacacgacggag

SEQ ID NO: 192109 - DNA, 15 bp, Homo sapiens
ggcggacacgacgga

SEQ ID NO: 192110 - DNA, 15 bp, Homo sapiens
tggcggacacgacgg

SEQ ID NO: 192111 - DNA, 15 bp, Homo sapiens
ctggcggacacgacg

SEQ ID NO: 192112 - DNA, 15 bp, Homo sapiens
tctggcggacacgac

SEQ ID NO: 192113 - DNA, 15 bp, Homo sapiens
atctggcggacacga

SEQ ID NO: 192114 - DNA, 15 bp, Homo sapiens
gatctggcggacacg

SEQ ID NO: 192115 - DNA, 15 bp, Homo sapiens
cgatctggcggacac

SEQ ID NO: 192116 - DNA, 15 bp, Homo sapiens
tcgatctggcggaca

SEQ ID NO: 192117 - DNA, 15 bp, Homo sapiens
ctcgatctggcggac

SEQ ID NO: 192118 - DNA, 15 bp, Homo sapiens
cctcgatctggcgga

SEQ ID NO: 192119 - DNA, 15 bp, Homo sapiens
tcctcgatctggcgg

SEQ ID NO: 192120 - DNA, 15 bp, Homo sapiens
ctcctcgatctggcg

SEQ ID NO: 192121 - DNA, 15 bp, Homo sapiens
gctcctcgatctggc

SEQ ID NO: 192122 - DNA, 15 bp, Homo sapiens
agctcctcgatctgg

SEQ ID NO: 192123 - DNA, 15 bp, Homo sapiens
cagctcctcgatctg

SEQ ID NO: 192124 - DNA, 15 bp, Homo sapiens
tcagctcctcgatct

SEQ ID NO: 192125 - DNA, 15 bp, Homo sapiens
ttcagctcctcgatc

SEQ ID NO: 192126 - DNA, 15 bp, Homo sapiens
cttcagctcctcgat

SEQ ID NO: 192127 - DNA, 15 bp, Homo sapiens
tcttcagctcctcga

SEQ ID NO: 192128 - DNA, 15 bp, Homo sapiens
ttcttcagctcctcg

SEQ ID NO: 192129 - DNA, 15 bp, Homo sapiens
attcttcagctcctc

SEQ ID NO: 192130 - DNA, 15 bp, Homo sapiens
cattcttcagctcct

SEQ ID NO: 192131 - DNA, 15 bp, Homo sapiens
tcattcttcagctcc

SEQ ID NO: 192132 - DNA, 15 bp, Homo sapiens
ctcattcttcagctc

SEQ ID NO: 192133 - DNA, 15 bp, Homo sapiens
tctcattcttcagct

SEQ ID NO: 192134 - DNA, 15 bp, Homo sapiens
ttctcattcttcagc

SEQ ID NO: 192135 - DNA, 15 bp, Homo sapiens
gttctcattcttcag

SEQ ID NO: 192136 - DNA, 15 bp, Homo sapiens
cgttctcattcttca

SEQ ID NO: 192137 - DNA, 15 bp, Homo sapiens
gcgttctcattcttc

SEQ ID NO: 192138 - DNA, 15 bp, Homo sapiens
ggcgttctcattctt

SEQ ID NO: 192139 - DNA, 15 bp, Homo sapiens
gggcgttctcattct

SEQ ID NO: 192140 - DNA, 15 bp, Homo sapiens
agggcgttctcattc

SEQ ID NO: 192141 - DNA, 15 bp, Homo sapiens
cagggcgttctcatt

SEQ ID NO: 192142 - DNA, 15 bp, Homo sapiens
gcagggcgttctcat

SEQ ID NO: 192143 - DNA, 15 bp, Homo sapiens
agcagggcgttctca

SEQ ID NO: 192144 - DNA, 15 bp, Homo sapiens
aagcagggcgttctc

SEQ ID NO: 192145 - DNA, 15 bp, Homo sapiens
gaagcagggcgttct

SEQ ID NO: 192146 - DNA, 15 bp, Homo sapiens
cgaagcagggcgttc

SEQ ID NO: 192147 - DNA, 15 bp, Homo sapiens
tcgaagcagggcgtt

SEQ ID NO: 192148 - DNA, 15 bp, Homo sapiens
ctcgaagcagggcgt

SEQ ID NO: 192149 - DNA, 15 bp, Homo sapiens
gctcgaagcagggcg

SEQ ID NO: 192150 - DNA, 15 bp, Homo sapiens
ggctcgaagcagggc

SEQ ID NO: 192151 - DNA, 15 bp, Homo sapiens
gggctcgaagcaggg

SEQ ID NO: 192152 - DNA, 15 bp, Homo sapiens
tgggctcgaagcagg

SEQ ID NO: 192153 - DNA, 15 bp, Homo sapiens
ctgggctcgaagcag

SEQ ID NO: 192154 - DNA, 15 bp, Homo sapiens
gctgggctcgaagca

SEQ ID NO: 192155 - DNA, 15 bp, Homo sapiens
agctgggctcgaagc

SEQ ID NO: 192156 - DNA, 15 bp, Homo sapiens
cagctgggctcgaag

SEQ ID NO: 192157 - DNA, 15 bp, Homo sapiens
gcagctgggctcgaa

SEQ ID NO: 192158 - DNA, 15 bp, Homo sapiens
tgcagctgggctcga

SEQ ID NO: 192159 - DNA, 15 bp, Homo sapiens
ctgcagctgggctcg

SEQ ID NO: 192160 - DNA, 15 bp, Homo sapiens
gctgcagctgggctc

SEQ ID NO: 192161 - DNA, 15 bp, Homo sapiens
tgctgcagctgggct

SEQ ID NO: 192162 - DNA, 15 bp, Homo sapiens
ctgctgcagctgggc

SEQ ID NO: 192163 - DNA, 15 bp, Homo sapiens
gctgctgcagctggg

SEQ ID NO: 192164 - DNA, 15 bp, Homo sapiens
tgctgctgcagctgg

SEQ ID NO: 192165 - DNA, 15 bp, Homo sapiens
gtgctgctgcagctg

SEQ ID NO: 192166 - DNA, 15 bp, Homo sapiens
tgtgctgctgcagct

SEQ ID NO: 192167 - DNA, 15 bp, Homo sapiens
ttgtgctgctgcagc

SEQ ID NO: 192168 - DNA, 15 bp, Homo sapiens
gttgtgctgctgcag

SEQ ID NO: 192169 - DNA, 15 bp, Homo sapiens
ggttgtgctgctgca

SEQ ID NO: 192170 - DNA, 15 bp, Homo sapiens
aggttgtgctgctgc

SEQ ID NO: 192171 - DNA, 15 bp, Homo sapiens
caggttgtgctgctg

SEQ ID NO: 192172 - DNA, 15 bp, Homo sapiens
ccaggttgtgctgct

SEQ ID NO: 192173 - DNA, 15 bp, Homo sapiens
tccaggttgtgctgc

SEQ ID NO: 192174 - DNA, 15 bp, Homo sapiens
ctccaggttgtgctg

SEQ ID NO: 192175 - DNA, 15 bp, Homo sapiens
tctccaggttgtgct

SEQ ID NO: 192176 - DNA, 15 bp, Homo sapiens
atctccaggttgtgc

SEQ ID NO: 192177 - DNA, 15 bp, Homo sapiens
catctccaggttgtg

SEQ ID NO: 192178 - DNA, 15 bp, Homo sapiens
ccatctccaggttgt

SEQ ID NO: 192179 - DNA, 15 bp, Homo sapiens
accatctccaggttg

SEQ ID NO: 192180 - DNA, 15 bp, Homo sapiens
caccatctccaggtt

SEQ ID NO: 192181 - DNA, 15 bp, Homo sapiens
ccaccatctccaggt

SEQ ID NO: 192182 - DNA, 15 bp, Homo sapiens
cccaccatctccagg

SEQ ID NO: 192183 - DNA, 15 bp, Homo sapiens
gcccaccatctccag

SEQ ID NO: 192184 - DNA, 15 bp, Homo sapiens
cgcccaccatctcca

SEQ ID NO: 192185 - DNA, 15 bp, Homo sapiens
tcgcccaccatctcc

SEQ ID NO: 192186 - DNA, 15 bp, Homo sapiens
ctcgcccaccatctc

SEQ ID NO: 192187 - DNA, 15 bp, Homo sapiens
cctcgcccaccatct

SEQ ID NO: 192188 - DNA, 15 bp, Homo sapiens
ccctcgcccaccatc

SEQ ID NO: 192189 - DNA, 15 bp, Homo sapiens
gccctcgcccaccat

SEQ ID NO: 192190 - DNA, 15 bp, Homo sapiens
tgccctcgcccacca

SEQ ID NO: 192191 - DNA, 15 bp, Homo sapiens
gtgccctcgcccacc

SEQ ID NO: 192192 - DNA, 15 bp, Homo sapiens
ggtgccctcgcccac

SEQ ID NO: 192193 - DNA, 15 bp, Homo sapiens
gggtgccctcgccca

SEQ ID NO: 192194 - DNA, 15 bp, Homo sapiens
cgggtgccctcgccc

SEQ ID NO: 192195 - DNA, 15 bp, Homo sapiens
ccgggtgccctcgcc

SEQ ID NO: 192196 - DNA, 15 bp, Homo sapiens
gccgggtgccctcgc

SEQ ID NO: 192197 - DNA, 15 bp, Homo sapiens
tgccgggtgccctcg

SEQ ID NO: 192198 - DNA, 15 bp, Homo sapiens
ctgccgggtgccctc

SEQ ID NO: 192199 - DNA, 15 bp, Homo sapiens
actgccgggtgccct

SEQ ID NO: 192200 - DNA, 15 bp, Homo sapiens
cactgccgggtgccc

SEQ ID NO: 192201 - DNA, 15 bp, Homo sapiens
tcactgccgggtgcc

SEQ ID NO: 192202 - DNA, 15 bp, Homo sapiens
gtcactgccgggtgc

SEQ ID NO: 192203 - DNA, 15 bp, Homo sapiens
cgtcactgccgggtg

SEQ ID NO: 192204 - DNA, 15 bp, Homo sapiens
gcgtcactgccgggt

SEQ ID NO: 192205 - DNA, 15 bp, Homo sapiens
ggcgtcactgccggg

SEQ ID NO: 192206 - DNA, 15 bp, Homo sapiens
gggcgtcactgccgg

SEQ ID NO: 192207 - DNA, 15 bp, Homo sapiens
cgggcgtcactgccg

SEQ ID NO: 192208 - DNA, 15 bp, Homo sapiens
gcgggcgtcactgcc

SEQ ID NO: 192209 - DNA, 15 bp, Homo sapiens
ggcgggcgtcactgc

SEQ ID NO: 192210 - DNA, 15 bp, Homo sapiens
tggcgggcgtcactg

SEQ ID NO: 192211 - DNA, 15 bp, Homo sapiens
gtggcgggcgtcact

SEQ ID NO: 192212 - DNA, 15 bp, Homo sapiens
ggtggcgggcgtcac

SEQ ID NO: 192213 - DNA, 15 bp, Homo sapiens
tggtggcgggcgtca

SEQ ID NO: 192214 - DNA, 15 bp, Homo sapiens
gtggtggcgggcgtc

SEQ ID NO: 192215 - DNA, 15 bp, Homo sapiens
ggtggtggcgggcgt

SEQ ID NO: 192216 - DNA, 15 bp, Homo sapiens
tggtggtggcgggcg

SEQ ID NO: 192217 - DNA, 15 bp, Homo sapiens
gtggtggtggcgggc

SEQ ID NO: 192218 - DNA, 15 bp, Homo sapiens
cgtggtggtggcggg

SEQ ID NO: 192219 - DNA, 15 bp, Homo sapiens
gcgtggtggtggcgg

SEQ ID NO: 192220 - DNA, 15 bp, Homo sapiens
tgcgtggtggtggcg

SEQ ID NO: 192221 - DNA, 15 bp, Homo sapiens
ctgcgtggtggtggc

SEQ ID NO: 192222 - DNA, 15 bp, Homo sapiens
gctgcgtggtggtgg

SEQ ID NO: 192223 - DNA, 15 bp, Homo sapiens
ggctgcgtggtggtg

SEQ ID NO: 192224 - DNA, 15 bp, Homo sapiens
cggctgcgtggtggt

SEQ ID NO: 192225 - DNA, 15 bp, Homo sapiens
gcggctgcgtggtgg

SEQ ID NO: 192226 - DNA, 15 bp, Homo sapiens
ggcggctgcgtggtg

SEQ ID NO: 192227 - DNA, 15 bp, Homo sapiens
cggcggctgcgtggt

SEQ ID NO: 192228 - DNA, 15 bp, Homo sapiens
gcggcggctgcgtgg

SEQ ID NO: 192229 - DNA, 15 bp, Homo sapiens
ggcggcggctgcgtg

SEQ ID NO: 192230 - DNA, 15 bp, Homo sapiens
cggcggcggctgcgt

SEQ ID NO: 192231 - DNA, 15 bp, Homo sapiens
gcggcggcggctgcg

SEQ ID NO: 192232 - DNA, 15 bp, Homo sapiens
ggcggcggcggctgc

SEQ ID NO: 192233 - DNA, 15 bp, Homo sapiens
gggcggcggcggctg

SEQ ID NO: 192234 - DNA, 15 bp, Homo sapiens
tgggcggcggcggct

SEQ ID NO: 192235 - DNA, 15 bp, Homo sapiens
gtgggcggcggcggc

SEQ ID NO: 192236 - DNA, 15 bp, Homo sapiens
cgtgggcggcggcgg

SEQ ID NO: 192237 - DNA, 15 bp, Homo sapiens
gcgtgggcggcggcg

SEQ ID NO: 192238 - DNA, 15 bp, Homo sapiens
ggcgtgggcggcggc

SEQ ID NO: 192239 - DNA, 15 bp, Homo sapiens
cggcgtgggcggcgg

SEQ ID NO: 192240 - DNA, 15 bp, Homo sapiens
ccggcgtgggcggcg

SEQ ID NO: 192241 - DNA, 15 bp, Homo sapiens
gccggcgtgggcggc

SEQ ID NO: 192242 - DNA, 15 bp, Homo sapiens
ggccggcgtgggcgg

SEQ ID NO: 192243 - DNA, 15 bp, Homo sapiens
aggccggcgtgggcg

SEQ ID NO: 192244 - DNA, 15 bp, Homo sapiens
gaggccggcgtgggc

SEQ ID NO: 192245 - DNA, 15 bp, Homo sapiens
agaggccggcgtggg

SEQ ID NO: 192246 - DNA, 15 bp, Homo sapiens
cagaggccggcgtgg

SEQ ID NO: 192247 - DNA, 15 bp, Homo sapiens
gcagaggccggcgtg

SEQ ID NO: 192248 - DNA, 15 bp, Homo sapiens
agcagaggccggcgt

SEQ ID NO: 192249 - DNA, 15 bp, Homo sapiens
cagcagaggccggcg

SEQ ID NO: 192250 - DNA, 15 bp, Homo sapiens
gcagcagaggccggc

SEQ ID NO: 192251 - DNA, 15 bp, Homo sapiens
ggcagcagaggccgg

SEQ ID NO: 192252 - DNA, 15 bp, Homo sapiens
gggcagcagaggccg

SEQ ID NO: 192253 - DNA, 15 bp, Homo sapiens
ggggcagcagaggcc

SEQ ID NO: 192254 - DNA, 15 bp, Homo sapiens
gggggcagcagaggc

SEQ ID NO: 192255 - DNA, 15 bp, Homo sapiens
agggggcagcagagg

SEQ ID NO: 192256 - DNA, 15 bp, Homo sapiens
aagggggcagcagag

SEQ ID NO: 192257 - DNA, 15 bp, Homo sapiens
gaagggggcagcaga

SEQ ID NO: 192258 - DNA, 15 bp, Homo sapiens
ggaagggggcagcag

SEQ ID NO: 192259 - DNA, 15 bp, Homo sapiens
gggaagggggcagca

SEQ ID NO: 192260 - DNA, 15 bp, Homo sapiens
ggggaagggggcagc

SEQ ID NO: 192261 - DNA, 15 bp, Homo sapiens
tggggaagggggcag

SEQ ID NO: 192262 - DNA, 15 bp, Homo sapiens
ctggggaagggggca

SEQ ID NO: 192263 - DNA, 15 bp, Homo sapiens
gctggggaagggggc

SEQ ID NO: 192264 - DNA, 15 bp, Homo sapiens
ggctggggaaggggg

SEQ ID NO: 192265 - DNA, 15 bp, Homo sapiens
gggctggggaagggg

SEQ ID NO: 192266 - DNA, 15 bp, Homo sapiens
agggctggggaaggg

SEQ ID NO: 192267 - DNA, 15 bp, Homo sapiens
aagggctggggaagg

SEQ ID NO: 192268 - DNA, 15 bp, Homo sapiens
taagggctggggaag

SEQ ID NO: 192269 - DNA, 15 bp, Homo sapiens
ctaagggctggggaa

SEQ ID NO: 192270 - DNA, 15 bp, Homo sapiens
gctaagggctgggga

SEQ ID NO: 192271 - DNA, 15 bp, Homo sapiens
tgctaagggctgggg

SEQ ID NO: 192272 - DNA, 15 bp, Homo sapiens
gtgctaagggctggg

SEQ ID NO: 192273 - DNA, 15 bp, Homo sapiens
tgtgctaagggctgg

SEQ ID NO: 192274 - DNA, 15 bp, Homo sapiens
ctgtgctaagggctg

SEQ ID NO: 192275 - DNA, 15 bp, Homo sapiens
tctgtgctaagggct

SEQ ID NO: 192276 - DNA, 15 bp, Homo sapiens
ctctgtgctaagggc

SEQ ID NO: 192277 - DNA, 15 bp, Homo sapiens
tctctgtgctaaggg

SEQ ID NO: 192278 - DNA, 15 bp, Homo sapiens
ctctctgtgctaagg

SEQ ID NO: 192279 - DNA, 15 bp, Homo sapiens
cctctctgtgctaag

SEQ ID NO: 192280 - DNA, 15 bp, Homo sapiens
ccctctctgtgctaa

SEQ ID NO: 192281 - DNA, 15 bp, Homo sapiens
tccctctctgtgcta

SEQ ID NO: 192282 - DNA, 15 bp, Homo sapiens
gtccctctctgtgct

SEQ ID NO: 192283 - DNA, 15 bp, Homo sapiens
tgtccctctctgtgc

SEQ ID NO: 192284 - DNA, 15 bp, Homo sapiens
gtgtccctctctgtg

SEQ ID NO: 192285 - DNA, 15 bp, Homo sapiens
tgtgtccctctctgt

SEQ ID NO: 192286 - DNA, 15 bp, Homo sapiens
atgtgtccctctctg

SEQ ID NO: 192287 - DNA, 15 bp, Homo sapiens
catgtgtccctctct

SEQ ID NO: 192288 - DNA, 15 bp, Homo sapiens
gcatgtgtccctctc

SEQ ID NO: 192289 - DNA, 15 bp, Homo sapiens
ggcatgtgtccctct

SEQ ID NO: 192290 - DNA, 15 bp, Homo sapiens
gggcatgtgtccctc

SEQ ID NO: 192291 - DNA, 15 bp, Homo sapiens
ggggcatgtgtccct

SEQ ID NO: 192292 - DNA, 15 bp, Homo sapiens
aggggcatgtgtccc

SEQ ID NO: 192293 - DNA, 15 bp, Homo sapiens
gaggggcatgtgtcc

SEQ ID NO: 192294 - DNA, 15 bp, Homo sapiens
ggaggggcatgtgtc

SEQ ID NO: 192295 - DNA, 15 bp, Homo sapiens
gggaggggcatgtgt

SEQ ID NO: 192296 - DNA, 15 bp, Homo sapiens
ggggaggggcatgtg

SEQ ID NO: 192297 - DNA, 15 bp, Homo sapiens
gggggaggggcatgt

SEQ ID NO: 192298 - DNA, 15 bp, Homo sapiens
tgggggaggggcatg

SEQ ID NO: 192299 - DNA, 15 bp, Homo sapiens
ctgggggaggggcat

SEQ ID NO: 192300 - DNA, 15 bp, Homo sapiens
gctgggggaggggca

SEQ ID NO: 192301 - DNA, 15 bp, Homo sapiens
agctgggggaggggc

SEQ ID NO: 192302 - DNA, 15 bp, Homo sapiens
cagctgggggagggg

SEQ ID NO: 192303 - DNA, 15 bp, Homo sapiens
gcagctgggggaggg

SEQ ID NO: 192304 - DNA, 15 bp, Homo sapiens
cgcagctgggggagg

SEQ ID NO: 192305 - DNA, 15 bp, Homo sapiens
acgcagctgggggag

SEQ ID NO: 192306 - DNA, 15 bp, Homo sapiens
aacgcagctggggga

SEQ ID NO: 192307 - DNA, 15 bp, Homo sapiens
aaacgcagctggggg

SEQ ID NO: 192308 - DNA, 15 bp, Homo sapiens
aaaacgcagctgggg

SEQ ID NO: 192309 - DNA, 15 bp, Homo sapiens
aaaaacgcagctggg

SEQ ID NO: 192310 - DNA, 15 bp, Homo sapiens
aaaaaacgcagctgg

SEQ ID NO: 192311 - DNA, 15 bp, Homo sapiens
aaaaaaacgcagctg

SEQ ID NO: 192312 - DNA, 15 bp, Homo sapiens
taaaaaaacgcagct

SEQ ID NO: 192313 - DNA, 15 bp, Homo sapiens
ataaaaaaacgcagc

SEQ ID NO: 192314 - DNA, 15 bp, Homo sapiens
tataaaaaaacgcag

SEQ ID NO: 192315 - DNA, 15 bp, Homo sapiens
ctataaaaaaacgca

SEQ ID NO: 192316 - DNA, 15 bp, Homo sapiens
actataaaaaaacgc

SEQ ID NO: 192317 - DNA, 15 bp, Homo sapiens
tactataaaaaaacg

SEQ ID NO: 192318 - DNA, 15 bp, Homo sapiens
ctactataaaaaaac

SEQ ID NO: 192319 - DNA, 15 bp, Homo sapiens
tctactataaaaaaa

SEQ ID NO: 192320 - DNA, 15 bp, Homo sapiens
atctactataaaaaa

SEQ ID NO: 192321 - DNA, 15 bp, Homo sapiens
aatctactataaaaa

SEQ ID NO: 192322 - DNA, 15 bp, Homo sapiens
aaatctactataaaa

SEQ ID NO: 192323 - DNA, 15 bp, Homo sapiens
aaaatctactataaa

SEQ ID NO: 192324 - DNA, 15 bp, Homo sapiens
aaaaatctactataa

SEQ ID NO: 192325 - DNA, 15 bp, Homo sapiens
taaaaatctactata

SEQ ID NO: 192326 - DNA, 15 bp, Homo sapiens
ttaaaaatctactat

SEQ ID NO: 192327 - DNA, 15 bp, Homo sapiens
gttaaaaatctacta

SEQ ID NO: 192328 - DNA, 15 bp, Homo sapiens
tgttaaaaatctact

SEQ ID NO: 192329 - DNA, 15 bp, Homo sapiens
ttgttaaaaatctac

SEQ ID NO: 192330 - DNA, 15 bp, Homo sapiens
tttgttaaaaatcta

SEQ ID NO: 192331 - DNA, 15 bp, Homo sapiens
ttttgttaaaaatct

SEQ ID NO: 192332 - DNA, 15 bp, Homo sapiens
tttttgttaaaaatc

SEQ ID NO: 192333 - DNA, 15 bp, Homo sapiens
ttttttgttaaaaat

SEQ ID NO: 192334 - DNA, 15 bp, Homo sapiens
gttttttgttaaaaa

SEQ ID NO: 192335 - DNA, 15 bp, Homo sapiens
cgttttttgttaaaa

SEQ ID NO: 192336 - DNA, 15 bp, Homo sapiens
ccgttttttgttaaa

SEQ ID NO: 192337 - DNA, 15 bp, Homo sapiens
cccgttttttgttaa

SEQ ID NO: 192338 - DNA, 15 bp, Homo sapiens
ccccgttttttgtta

SEQ ID NO: 192339 - DNA, 15 bp, Homo sapiens
tccccgttttttgtt

SEQ ID NO: 192340 - DNA, 15 bp, Homo sapiens
ctccccgttttttgt

SEQ ID NO: 192341 - DNA, 15 bp, Homo sapiens
tctccccgttttttg

SEQ ID NO: 192342 - DNA, 15 bp, Homo sapiens
ttctccccgtttttt

SEQ ID NO: 192343 - DNA, 15 bp, Homo sapiens
tttctccccgttttt

SEQ ID NO: 192344 - DNA, 15 bp, Homo sapiens
atttctccccgtttt

SEQ ID NO: 192345 - DNA, 15 bp, Homo sapiens
tatttctccccgttt

SEQ ID NO: 192346 - DNA, 15 bp, Homo sapiens
ttatttctccccgtt

SEQ ID NO: 192347 - DNA, 15 bp, Homo sapiens
attatttctccccgt

SEQ ID NO: 192348 - DNA, 15 bp, Homo sapiens
cattatttctccccg

SEQ ID NO: 192349 - DNA, 15 bp, Homo sapiens
gcattatttctcccc

SEQ ID NO: 192350 - DNA, 15 bp, Homo sapiens
tgcattatttctccc

SEQ ID NO: 192351 - DNA, 15 bp, Homo sapiens
atgcattatttctcc

SEQ ID NO: 192352 - DNA, 15 bp, Homo sapiens
aatgcattatttctc

SEQ ID NO: 192353 - DNA, 15 bp, Homo sapiens
aaatgcattatttct

SEQ ID NO: 192354 - DNA, 15 bp, Homo sapiens
gaaatgcattatttc

SEQ ID NO: 192355 - DNA, 15 bp, Homo sapiens
agaaatgcattattt

SEQ ID NO: 192356 - DNA, 15 bp, Homo sapiens
cagaaatgcattatt

SEQ ID NO: 192357 - DNA, 15 bp, Homo sapiens
acagaaatgcattat

SEQ ID NO: 192358 - DNA, 15 bp, Homo sapiens
cacagaaatgcatta

SEQ ID NO: 192359 - DNA, 15 bp, Homo sapiens
ccacagaaatgcatt

SEQ ID NO: 192360 - DNA, 15 bp, Homo sapiens
tccacagaaatgcat

SEQ ID NO: 192361 - DNA, 15 bp, Homo sapiens
atccacagaaatgca

SEQ ID NO: 192362 - DNA, 15 bp, Homo sapiens
tatccacagaaatgc

SEQ ID NO: 192363 - DNA, 15 bp, Homo sapiens
gtatccacagaaatg

SEQ ID NO: 192364 - DNA, 15 bp, Homo sapiens
tgtatccacagaaat

SEQ ID NO: 192365 - DNA, 15 bp, Homo sapiens
ctgtatccacagaaa

SEQ ID NO: 192366 - DNA, 15 bp, Homo sapiens
actgtatccacagaa

SEQ ID NO: 192367 - DNA, 15 bp, Homo sapiens
cactgtatccacaga

SEQ ID NO: 192368 - DNA, 15 bp, Homo sapiens
gcactgtatccacag

SEQ ID NO: 192369 - DNA, 15 bp, Homo sapiens
ggcactgtatccaca

SEQ ID NO: 192370 - DNA, 15 bp, Homo sapiens
gggcactgtatccac

SEQ ID NO: 192371 - DNA, 15 bp, Homo sapiens
tgggcactgtatcca

SEQ ID NO: 192372 - DNA, 15 bp, Homo sapiens
gtgggcactgtatcc

SEQ ID NO: 192373 - DNA, 15 bp, Homo sapiens
ggtgggcactgtatc

SEQ ID NO: 192374 - DNA, 15 bp, Homo sapiens
cggtgggcactgtat

SEQ ID NO: 192375 - DNA, 15 bp, Homo sapiens
gcggtgggcactgta

SEQ ID NO: 192376 - DNA, 15 bp, Homo sapiens
ggcggtgggcactgt

SEQ ID NO: 192377 - DNA, 15 bp, Homo sapiens
gggcggtgggcactg

SEQ ID NO: 192378 - DNA, 15 bp, Homo sapiens
agggcggtgggcact

SEQ ID NO: 192379 - DNA, 15 bp, Homo sapiens
gagggcggtgggcac

SEQ ID NO: 192380 - DNA, 15 bp, Homo sapiens
ggagggcggtgggca

SEQ ID NO: 192381 - DNA, 15 bp, Homo sapiens
aggagggcggtgggc

SEQ ID NO: 192382 - DNA, 15 bp, Homo sapiens
gaggagggcggtggg

SEQ ID NO: 192383 - DNA, 15 bp, Homo sapiens
ggaggagggcggtgg

SEQ ID NO: 192384 - DNA, 15 bp, Homo sapiens
tggaggagggcggtg

SEQ ID NO: 192385 - DNA, 15 bp, Homo sapiens
gtggaggagggcggt

SEQ ID NO: 192386 - DNA, 15 bp, Homo sapiens
agtggaggagggcgg

SEQ ID NO: 192387 - DNA, 15 bp, Homo sapiens
aagtggaggagggcg

SEQ ID NO: 192388 - DNA, 15 bp, Homo sapiens
caagtggaggagggc

SEQ ID NO: 192389 - DNA, 15 bp, Homo sapiens
ccaagtggaggaggg

SEQ ID NO: 192390 - DNA, 15 bp, Homo sapiens
tccaagtggaggagg

SEQ ID NO: 192391 - DNA, 15 bp, Homo sapiens
ttccaagtggaggag

SEQ ID NO: 192392 - DNA, 15 bp, Homo sapiens
tttccaagtggagga

SEQ ID NO: 192393 - DNA, 15 bp, Homo sapiens
gtttccaagtggagg

SEQ ID NO: 192394 - DNA, 15 bp, Homo sapiens
cgtttccaagtggag

SEQ ID NO: 192395 - DNA, 15 bp, Homo sapiens
ccgtttccaagtgga

SEQ ID NO: 192396 - DNA, 15 bp, Homo sapiens
accgtttccaagtgg

SEQ ID NO: 192397 - DNA, 15 bp, Homo sapiens
taccgtttccaagtg

SEQ ID NO: 192398 - DNA, 15 bp, Homo sapiens
ataccgtttccaagt

SEQ ID NO: 192399 - DNA, 15 bp, Homo sapiens
gataccgtttccaag

SEQ ID NO: 192400 - DNA, 15 bp, Homo sapiens
ggataccgtttccaa

SEQ ID NO: 192401 - DNA, 15 bp, Homo sapiens
aggataccgtttcca

SEQ ID NO: 192402 - DNA, 15 bp, Homo sapiens
gaggataccgtttcc

SEQ ID NO: 192403 - DNA, 15 bp, Homo sapiens
ggaggataccgtttc

SEQ ID NO: 192404 - DNA, 15 bp, Homo sapiens
gggaggataccgttt

SEQ ID NO: 192405 - DNA, 15 bp, Homo sapiens
agggaggataccgtt

SEQ ID NO: 192406 - DNA, 15 bp, Homo sapiens
cagggaggataccgt

SEQ ID NO: 192407 - DNA, 15 bp, Homo sapiens
gcagggaggataccg

SEQ ID NO: 192408 - DNA, 15 bp, Homo sapiens
ggcagggaggatacc

SEQ ID NO: 192409 - DNA, 15 bp, Homo sapiens
gggcagggaggatac

SEQ ID NO: 192410 - DNA, 15 bp, Homo sapiens
tgggcagggaggata

SEQ ID NO: 192411 - DNA, 15 bp, Homo sapiens
atgggcagggaggat

SEQ ID NO: 192412 - DNA, 15 bp, Homo sapiens
gatgggcagggagga

SEQ ID NO: 192413 - DNA, 15 bp, Homo sapiens
ggatgggcagggagg

SEQ ID NO: 192414 - DNA, 15 bp, Homo sapiens
cggatgggcagggag

SEQ ID NO: 192415 - DNA, 15 bp, Homo sapiens
acggatgggcaggga

SEQ ID NO: 192416 - DNA, 15 bp, Homo sapiens
gacggatgggcaggg

SEQ ID NO: 192417 - DNA, 15 bp, Homo sapiens
agacggatgggcagg

SEQ ID NO: 192418 - DNA, 15 bp, Homo sapiens
cagacggatgggcag

SEQ ID NO: 192419 - DNA, 15 bp, Homo sapiens
acagacggatgggca

SEQ ID NO: 192420 - DNA, 15 bp, Homo sapiens
gacagacggatgggc

SEQ ID NO: 192421 - DNA, 15 bp, Homo sapiens
agacagacggatggg

SEQ ID NO: 192422 - DNA, 15 bp, Homo sapiens
cagacagacggatgg

SEQ ID NO: 192423 - DNA, 15 bp, Homo sapiens
acagacagacggatg

SEQ ID NO: 192424 - DNA, 15 bp, Homo sapiens
gacagacagacggat

SEQ ID NO: 192425 - DNA, 15 bp, Homo sapiens
cgacagacagacgga

SEQ ID NO: 192426 - DNA, 15 bp, Homo sapiens
gcgacagacagacgg

SEQ ID NO: 192427 - DNA, 15 bp, Homo sapiens
ggcgacagacagacg

SEQ ID NO: 192428 - DNA, 15 bp, Homo sapiens
gggcgacagacagac

SEQ ID NO: 192429 - DNA, 15 bp, Homo sapiens
agggcgacagacaga

SEQ ID NO: 192430 - DNA, 15 bp, Homo sapiens
aagggcgacagacag

SEQ ID NO: 192431 - DNA, 15 bp, Homo sapiens
gaagggcgacagaca

SEQ ID NO: 192432 - DNA, 15 bp, Homo sapiens
agaagggcgacagac

SEQ ID NO: 192433 - DNA, 15 bp, Homo sapiens
gagaagggcgacaga

SEQ ID NO: 192434 - DNA, 15 bp, Homo sapiens
ggagaagggcgacag

SEQ ID NO: 192435 - DNA, 15 bp, Homo sapiens
gggagaagggcgaca

SEQ ID NO: 192436 - DNA, 15 bp, Homo sapiens
cgggagaagggcgac

SEQ ID NO: 192437 - DNA, 15 bp, Homo sapiens
ccgggagaagggcga

SEQ ID NO: 192438 - DNA, 15 bp, Homo sapiens
gccgggagaagggcg

SEQ ID NO: 192439 - DNA, 15 bp, Homo sapiens
ggccgggagaagggc

SEQ ID NO: 192440 - DNA, 15 bp, Homo sapiens
gggccgggagaaggg

SEQ ID NO: 192441 - DNA, 15 bp, Homo sapiens
agggccgggagaagg

SEQ ID NO: 192442 - DNA, 15 bp, Homo sapiens
gagggccgggagaag

SEQ ID NO: 192443 - DNA, 15 bp, Homo sapiens
tgagggccgggagaa

SEQ ID NO: 192444 - DNA, 15 bp, Homo sapiens
gtgagggccgggaga

SEQ ID NO: 192445 - DNA, 15 bp, Homo sapiens
agtgagggccgggag

SEQ ID NO: 192446 - DNA, 15 bp, Homo sapiens
tagtgagggccggga

SEQ ID NO: 192447 - DNA, 15 bp, Homo sapiens
ttagtgagggccggg

SEQ ID NO: 192448 - DNA, 15 bp, Homo sapiens
cttagtgagggccgg

SEQ ID NO: 192449 - DNA, 15 bp, Homo sapiens
gcttagtgagggccg

SEQ ID NO: 192450 - DNA, 15 bp, Homo sapiens
ggcttagtgagggcc

SEQ ID NO: 192451 - DNA, 15 bp, Homo sapiens
gggcttagtgagggc

SEQ ID NO: 192452 - DNA, 15 bp, Homo sapiens
ggggcttagtgaggg

SEQ ID NO: 192453 - DNA, 15 bp, Homo sapiens
cggggcttagtgagg

SEQ ID NO: 192454 - DNA, 15 bp, Homo sapiens
ccggggcttagtgag

SEQ ID NO: 192455 - DNA, 15 bp, Homo sapiens
gccggggcttagtga

SEQ ID NO: 192456 - DNA, 15 bp, Homo sapiens
tgccggggcttagtg

SEQ ID NO: 192457 - DNA, 15 bp, Homo sapiens
gtgccggggcttagt

SEQ ID NO: 192458 - DNA, 15 bp, Homo sapiens
agtgccggggcttag

SEQ ID NO: 192459 - DNA, 15 bp, Homo sapiens
aagtgccggggctta

SEQ ID NO: 192460 - DNA, 15 bp, Homo sapiens
gaagtgccggggctt

SEQ ID NO: 192461 - DNA, 15 bp, Homo sapiens
agaagtgccggggct

SEQ ID NO: 192462 - DNA, 15 bp, Homo sapiens
tagaagtgccggggc

SEQ ID NO: 192463 - DNA, 15 bp, Homo sapiens
ctagaagtgccgggg

SEQ ID NO: 192464 - DNA, 15 bp, Homo sapiens
actagaagtgccggg

SEQ ID NO: 192465 - DNA, 15 bp, Homo sapiens
cactagaagtgccgg

SEQ ID NO: 192466 - DNA, 15 bp, Homo sapiens
ccactagaagtgccg

SEQ ID NO: 192467 - DNA, 15 bp, Homo sapiens
accactagaagtgcc

SEQ ID NO: 192468 - DNA, 15 bp, Homo sapiens
gaccactagaagtgc

SEQ ID NO: 192469 - DNA, 15 bp, Homo sapiens
agaccactagaagtg

SEQ ID NO: 192470 - DNA, 15 bp, Homo sapiens
gagaccactagaagt

SEQ ID NO: 192471 - DNA, 15 bp, Homo sapiens
tgagaccactagaag

SEQ ID NO: 192472 - DNA, 15 bp, Homo sapiens
gtgagaccactagaa

SEQ ID NO: 192473 - DNA, 15 bp, Homo sapiens
ggtgagaccactaga

SEQ ID NO: 192474 - DNA, 15 bp, Homo sapiens
aggtgagaccactag

SEQ ID NO: 192475 - DNA, 15 bp, Homo sapiens
caggtgagaccacta

SEQ ID NO: 192476 - DNA, 15 bp, Homo sapiens
ccaggtgagaccact

SEQ ID NO: 192477 - DNA, 15 bp, Homo sapiens
tccaggtgagaccac

SEQ ID NO: 192478 - DNA, 15 bp, Homo sapiens
ctccaggtgagacca

SEQ ID NO: 192479 - DNA, 15 bp, Homo sapiens
cctccaggtgagacc

SEQ ID NO: 192480 - DNA, 15 bp, Homo sapiens
gcctccaggtgagac

SEQ ID NO: 192481 - DNA, 15 bp, Homo sapiens
tgcctccaggtgaga

SEQ ID NO: 192482 - DNA, 15 bp, Homo sapiens
ttgcctccaggtgag

SEQ ID NO: 192483 - DNA, 15 bp, Homo sapiens
cttgcctccaggtga

SEQ ID NO: 192484 - DNA, 15 bp, Homo sapiens
tcttgcctccaggtg

SEQ ID NO: 192485 - DNA, 15 bp, Homo sapiens
ctcttgcctccaggt

SEQ ID NO: 192486 - DNA, 15 bp, Homo sapiens
cctcttgcctccagg

SEQ ID NO: 192487 - DNA, 15 bp, Homo sapiens
ccctcttgcctccag

SEQ ID NO: 192488 - DNA, 15 bp, Homo sapiens
tccctcttgcctcca

SEQ ID NO: 192489 - DNA, 15 bp, Homo sapiens
ctccctcttgcctcc

SEQ ID NO: 192490 - DNA, 15 bp, Homo sapiens
cctccctcttgcctc

SEQ ID NO: 192491 - DNA, 15 bp, Homo sapiens
ccctccctcttgcct

SEQ ID NO: 192492 - DNA, 15 bp, Homo sapiens
cccctccctcttgcc

SEQ ID NO: 192493 - DNA, 15 bp, Homo sapiens
tcccctccctcttgc

SEQ ID NO: 192494 - DNA, 15 bp, Homo sapiens
gtcccctccctcttg

SEQ ID NO: 192495 - DNA, 15 bp, Homo sapiens
tgtcccctccctctt

SEQ ID NO: 192496 - DNA, 15 bp, Homo sapiens
ctgtcccctccctct

SEQ ID NO: 192497 - DNA, 15 bp, Homo sapiens
tctgtcccctccctc

SEQ ID NO: 192498 - DNA, 15 bp, Homo sapiens
ctctgtcccctccct

SEQ ID NO: 192499 - DNA, 15 bp, Homo sapiens
cctctgtcccctccc

SEQ ID NO: 192500 - DNA, 15 bp, Homo sapiens
gcctctgtcccctcc

SEQ ID NO: 192501 - DNA, 15 bp, Homo sapiens
ggcctctgtcccctc

SEQ ID NO: 192502 - DNA, 15 bp, Homo sapiens
gggcctctgtcccct

SEQ ID NO: 192503 - DNA, 15 bp, Homo sapiens
agggcctctgtcccc

SEQ ID NO: 192504 - DNA, 15 bp, Homo sapiens
cagggcctctgtccc

SEQ ID NO: 192505 - DNA, 15 bp, Homo sapiens
gcagggcctctgtcc

SEQ ID NO: 192506 - DNA, 15 bp, Homo sapiens
ggcagggcctctgtc

SEQ ID NO: 192507 - DNA, 15 bp, Homo sapiens
tggcagggcctctgt

SEQ ID NO: 192508 - DNA, 15 bp, Homo sapiens
gtggcagggcctctg

SEQ ID NO: 192509 - DNA, 15 bp, Homo sapiens
cgtggcagggcctct

SEQ ID NO: 192510 - DNA, 15 bp, Homo sapiens
acgtggcagggcctc

SEQ ID NO: 192511 - DNA, 15 bp, Homo sapiens
gacgtggcagggcct

SEQ ID NO: 192512 - DNA, 15 bp, Homo sapiens
ggacgtggcagggcc

SEQ ID NO: 192513 - DNA, 15 bp, Homo sapiens
gggacgtggcagggc

SEQ ID NO: 192514 - DNA, 15 bp, Homo sapiens
cgggacgtggcaggg

SEQ ID NO: 192515 - DNA, 15 bp, Homo sapiens
gcgggacgtggcagg

SEQ ID NO: 192516 - DNA, 15 bp, Homo sapiens
agcgggacgtggcag

SEQ ID NO: 192517 - DNA, 15 bp, Homo sapiens
cagcgggacgtggca

SEQ ID NO: 192518 - DNA, 15 bp, Homo sapiens
gcagcgggacgtggc

SEQ ID NO: 192519 - DNA, 15 bp, Homo sapiens
ggcagcgggacgtgg

SEQ ID NO: 192520 - DNA, 15 bp, Homo sapiens
aggcagcgggacgtg

SEQ ID NO: 192521 - DNA, 15 bp, Homo sapiens
gaggcagcgggacgt

SEQ ID NO: 192522 - DNA, 15 bp, Homo sapiens
ggaggcagcgggacg

SEQ ID NO: 192523 - DNA, 15 bp, Homo sapiens
aggaggcagcgggac

SEQ ID NO: 192524 - DNA, 15 bp, Homo sapiens
caggaggcagcggga

SEQ ID NO: 192525 - DNA, 15 bp, Homo sapiens
gcaggaggcagcggg

SEQ ID NO: 192526 - DNA, 15 bp, Homo sapiens
agcaggaggcagcgg

SEQ ID NO: 192527 - DNA, 15 bp, Homo sapiens
gagcaggaggcagcg

SEQ ID NO: 192528 - DNA, 15 bp, Homo sapiens
agagcaggaggcagc

SEQ ID NO: 192529 - DNA, 15 bp, Homo sapiens
gagagcaggaggcag

SEQ ID NO: 192530 - DNA, 15 bp, Homo sapiens
agagagcaggaggca

SEQ ID NO: 192531 - DNA, 15 bp, Homo sapiens
cagagagcaggaggc

SEQ ID NO: 192532 - DNA, 15 bp, Homo sapiens
ccagagagcaggagg

SEQ ID NO: 192533 - DNA, 15 bp, Homo sapiens
tccagagagcaggag

SEQ ID NO: 192534 - DNA, 15 bp, Homo sapiens
ctccagagagcagga

SEQ ID NO: 192535 - DNA, 15 bp, Homo sapiens
cctccagagagcagg

SEQ ID NO: 192536 - DNA, 15 bp, Homo sapiens
acctccagagagcag

SEQ ID NO: 192537 - DNA, 15 bp, Homo sapiens
tacctccagagagca

SEQ ID NO: 192538 - DNA, 15 bp, Homo sapiens
gtacctccagagagc

SEQ ID NO: 192539 - DNA, 15 bp, Homo sapiens
agtacctccagagag

SEQ ID NO: 192540 - DNA, 15 bp, Homo sapiens
cagtacctccagaga

SEQ ID NO: 192541 - DNA, 15 bp, Homo sapiens
tcagtacctccagag

SEQ ID NO: 192542 - DNA, 15 bp, Homo sapiens
ctcagtacctccaga

SEQ ID NO: 192543 - DNA, 15 bp, Homo sapiens
tctcagtacctccag

SEQ ID NO: 192544 - DNA, 15 bp, Homo sapiens
gtctcagtacctcca

SEQ ID NO: 192545 - DNA, 15 bp, Homo sapiens
tgtctcagtacctcc

SEQ ID NO: 192546 - DNA, 15 bp, Homo sapiens
ctgtctcagtacctc

SEQ ID NO: 192547 - DNA, 15 bp, Homo sapiens
cctgtctcagtacct

SEQ ID NO: 192548 - DNA, 15 bp, Homo sapiens
ccctgtctcagtacc

SEQ ID NO: 192549 - DNA, 15 bp, Homo sapiens
accctgtctcagtac

SEQ ID NO: 192550 - DNA, 15 bp, Homo sapiens
caccctgtctcagta

SEQ ID NO: 192551 - DNA, 15 bp, Homo sapiens
gcaccctgtctcagt

SEQ ID NO: 192552 - DNA, 15 bp, Homo sapiens
agcaccctgtctcag

SEQ ID NO: 192553 - DNA, 15 bp, Homo sapiens
cagcaccctgtctca

SEQ ID NO: 192554 - DNA, 15 bp, Homo sapiens
tcagcaccctgtctc

SEQ ID NO: 192555 - DNA, 15 bp, Homo sapiens
atcagcaccctgtct

SEQ ID NO: 192556 - DNA, 15 bp, Homo sapiens
catcagcaccctgtc

SEQ ID NO: 192557 - DNA, 15 bp, Homo sapiens
ccatcagcaccctgt

SEQ ID NO: 192558 - DNA, 15 bp, Homo sapiens
cccatcagcaccctg

SEQ ID NO: 192559 - DNA, 15 bp, Homo sapiens
tcccatcagcaccct

SEQ ID NO: 192560 - DNA, 15 bp, Homo sapiens
ttcccatcagcaccc

SEQ ID NO: 192561 - DNA, 15 bp, Homo sapiens
cttcccatcagcacc

SEQ ID NO: 192562 - DNA, 15 bp, Homo sapiens
ccttcccatcagcac

SEQ ID NO: 192563 - DNA, 15 bp, Homo sapiens
tccttcccatcagca

SEQ ID NO: 192564 - DNA, 15 bp, Homo sapiens
ctccttcccatcagc

SEQ ID NO: 192565 - DNA, 15 bp, Homo sapiens
cctccttcccatcag

SEQ ID NO: 192566 - DNA, 15 bp, Homo sapiens
ccctccttcccatca

SEQ ID NO: 192567 - DNA, 15 bp, Homo sapiens
cccctccttcccatc

SEQ ID NO: 192568 - DNA, 15 bp, Homo sapiens
tcccctccttcccat

SEQ ID NO: 192569 - DNA, 15 bp, Homo sapiens
ctcccctccttccca

SEQ ID NO: 192570 - DNA, 15 bp, Homo sapiens
gctcccctccttccc

SEQ ID NO: 192571 - DNA, 15 bp, Homo sapiens
ggctcccctccttcc

SEQ ID NO: 192572 - DNA, 15 bp, Homo sapiens
aggctcccctccttc

SEQ ID NO: 192573 - DNA, 15 bp, Homo sapiens
aaggctcccctcctt

SEQ ID NO: 192574 - DNA, 15 bp, Homo sapiens
aaaggctcccctcct

SEQ ID NO: 192575 - DNA, 15 bp, Homo sapiens
caaaggctcccctcc

SEQ ID NO: 192576 - DNA, 15 bp, Homo sapiens
ccaaaggctcccctc

SEQ ID NO: 192577 - DNA, 15 bp, Homo sapiens
cccaaaggctcccct

SEQ ID NO: 192578 - DNA, 15 bp, Homo sapiens
ccccaaaggctcccc

SEQ ID NO: 192579 - DNA, 15 bp, Homo sapiens
cccccaaaggctccc

SEQ ID NO: 192580 - DNA, 15 bp, Homo sapiens
ccccccaaaggctcc

SEQ ID NO: 192581 - DNA, 15 bp, Homo sapiens
gccccccaaaggctc

SEQ ID NO: 192582 - DNA, 15 bp, Homo sapiens
ggccccccaaaggct

SEQ ID NO: 192583 - DNA, 15 bp, Homo sapiens
tggccccccaaaggc

SEQ ID NO: 192584 - DNA, 15 bp, Homo sapiens
gtggccccccaaagg

SEQ ID NO: 192585 - DNA, 15 bp, Homo sapiens
ggtggccccccaaag

SEQ ID NO: 192586 - DNA, 15 bp, Homo sapiens
gggtggccccccaaa

SEQ ID NO: 192587 - DNA, 15 bp, Homo sapiens
cgggtggccccccaa

SEQ ID NO: 192588 - DNA, 15 bp, Homo sapiens
ccgggtggcccccca

SEQ ID NO: 192589 - DNA, 15 bp, Homo sapiens
cccgggtggcccccc

SEQ ID NO: 192590 - DNA, 15 bp, Homo sapiens
ccccgggtggccccc

SEQ ID NO: 192591 - DNA, 15 bp, Homo sapiens
gccccgggtggcccc

SEQ ID NO: 192592 - DNA, 15 bp, Homo sapiens
ggccccgggtggccc

SEQ ID NO: 192593 - DNA, 15 bp, Homo sapiens
aggccccgggtggcc

SEQ ID NO: 192594 - DNA, 15 bp, Homo sapiens
caggccccgggtggc

SEQ ID NO: 192595 - DNA, 15 bp, Homo sapiens
ccaggccccgggtgg

SEQ ID NO: 192596 - DNA, 15 bp, Homo sapiens
tccaggccccgggtg

SEQ ID NO: 192597 - DNA, 15 bp, Homo sapiens
gtccaggccccgggt

SEQ ID NO: 192598 - DNA, 15 bp, Homo sapiens
ggtccaggccccggg

SEQ ID NO: 192599 - DNA, 15 bp, Homo sapiens
aggtccaggccccgg

SEQ ID NO: 192600 - DNA, 15 bp, Homo sapiens
taggtccaggccccg

SEQ ID NO: 192601 - DNA, 15 bp, Homo sapiens
ataggtccaggcccc

SEQ ID NO: 192602 - DNA, 15 bp, Homo sapiens
cataggtccaggccc

SEQ ID NO: 192603 - DNA, 15 bp, Homo sapiens
gcataggtccaggcc

SEQ ID NO: 192604 - DNA, 15 bp, Homo sapiens
tgcataggtccaggc

SEQ ID NO: 192605 - DNA, 15 bp, Homo sapiens
ctgcataggtccagg

SEQ ID NO: 192606 - DNA, 15 bp, Homo sapiens
cctgcataggtccag

SEQ ID NO: 192607 - DNA, 15 bp, Homo sapiens
ccctgcataggtcca

SEQ ID NO: 192608 - DNA, 15 bp, Homo sapiens
tccctgcataggtcc

SEQ ID NO: 192609 - DNA, 15 bp, Homo sapiens
ctccctgcataggtc

SEQ ID NO: 192610 - DNA, 15 bp, Homo sapiens
cctccctgcataggt

SEQ ID NO: 192611 - DNA, 15 bp, Homo sapiens
gcctccctgcatagg

SEQ ID NO: 192612 - DNA, 15 bp, Homo sapiens
ggcctccctgcatag

SEQ ID NO: 192613 - DNA, 15 bp, Homo sapiens
tggcctccctgcata

SEQ ID NO: 192614 - DNA, 15 bp, Homo sapiens
gtggcctccctgcat

SEQ ID NO: 192615 - DNA, 15 bp, Homo sapiens
cgtggcctccctgca

SEQ ID NO: 192616 - DNA, 15 bp, Homo sapiens
acgtggcctccctgc

SEQ ID NO: 192617 - DNA, 15 bp, Homo sapiens
gacgtggcctccctg

SEQ ID NO: 192618 - DNA, 15 bp, Homo sapiens
ggacgtggcctccct

SEQ ID NO: 192619 - DNA, 15 bp, Homo sapiens
gggacgtggcctccc

SEQ ID NO: 192620 - DNA, 15 bp, Homo sapiens
tgggacgtggcctcc

SEQ ID NO: 192621 - DNA, 15 bp, Homo sapiens
gtgggacgtggcctc

SEQ ID NO: 192622 - DNA, 15 bp, Homo sapiens
ggtgggacgtggcct

SEQ ID NO: 192623 - DNA, 15 bp, Homo sapiens
gggtgggacgtggcc

SEQ ID NO: 192624 - DNA, 15 bp, Homo sapiens
ggggtgggacgtggc

SEQ ID NO: 192625 - DNA, 15 bp, Homo sapiens
tggggtgggacgtgg

SEQ ID NO: 192626 - DNA, 15 bp, Homo sapiens
gtggggtgggacgtg

SEQ ID NO: 192627 - DNA, 15 bp, Homo sapiens
ggtggggtgggacgt

SEQ ID NO: 192628 - DNA, 15 bp, Homo sapiens
aggtggggtgggacg

SEQ ID NO: 192629 - DNA, 15 bp, Homo sapiens
gaggtggggtgggac

SEQ ID NO: 192630 - DNA, 15 bp, Homo sapiens
agaggtggggtggga

SEQ ID NO: 192631 - DNA, 15 bp, Homo sapiens
aagaggtggggtggg

SEQ ID NO: 192632 - DNA, 15 bp, Homo sapiens
caagaggtggggtgg

SEQ ID NO: 192633 - DNA, 15 bp, Homo sapiens
acaagaggtggggtg

SEQ ID NO: 192634 - DNA, 15 bp, Homo sapiens
aacaagaggtggggt

SEQ ID NO: 192635 - DNA, 15 bp, Homo sapiens
aaacaagaggtgggg

SEQ ID NO: 192636 - DNA, 15 bp, Homo sapiens
gaaacaagaggtggg

SEQ ID NO: 192637 - DNA, 15 bp, Homo sapiens
agaaacaagaggtgg

SEQ ID NO: 192638 - DNA, 15 bp, Homo sapiens
cagaaacaagaggtg

SEQ ID NO: 192639 - DNA, 15 bp, Homo sapiens
ccagaaacaagaggt

SEQ ID NO: 192640 - DNA, 15 bp, Homo sapiens
cccagaaacaagagg

SEQ ID NO: 192641 - DNA, 15 bp, Homo sapiens
acccagaaacaagag

SEQ ID NO: 192642 - DNA, 15 bp, Homo sapiens
gacccagaaacaaga

SEQ ID NO: 192643 - DNA, 15 bp, Homo sapiens
ggacccagaaacaag

SEQ ID NO: 192644 - DNA, 15 bp, Homo sapiens
gggacccagaaacaa

SEQ ID NO: 192645 - DNA, 15 bp, Homo sapiens
agggacccagaaaca

SEQ ID NO: 192646 - DNA, 15 bp, Homo sapiens
cagggacccagaaac

SEQ ID NO: 192647 - DNA, 15 bp, Homo sapiens
gcagggacccagaaa

SEQ ID NO: 192648 - DNA, 15 bp, Homo sapiens
agcagggacccagaa

SEQ ID NO: 192649 - DNA, 15 bp, Homo sapiens
gagcagggacccaga

SEQ ID NO: 192650 - DNA, 15 bp, Homo sapiens
ggagcagggacccag

SEQ ID NO: 192651 - DNA, 15 bp, Homo sapiens
gggagcagggaccca

SEQ ID NO: 192652 - DNA, 15 bp, Homo sapiens
ggggagcagggaccc

SEQ ID NO: 192653 - DNA, 15 bp, Homo sapiens
aggggagcagggacc

SEQ ID NO: 192654 - DNA, 15 bp, Homo sapiens
aaggggagcagggac

SEQ ID NO: 192655 - DNA, 15 bp, Homo sapiens
aaaggggagcaggga

SEQ ID NO: 192656 - DNA, 15 bp, Homo sapiens
caaaggggagcaggg

SEQ ID NO: 192657 - DNA, 15 bp, Homo sapiens
ccaaaggggagcagg

SEQ ID NO: 192658 - DNA, 15 bp, Homo sapiens
cccaaaggggagcag

SEQ ID NO: 192659 - DNA, 15 bp, Homo sapiens
ccccaaaggggagca

SEQ ID NO: 192660 - DNA, 15 bp, Homo sapiens
cccccaaaggggagc

SEQ ID NO: 192661 - DNA, 15 bp, Homo sapiens
acccccaaaggggag

SEQ ID NO: 192662 - DNA, 15 bp, Homo sapiens
cacccccaaagggga

SEQ ID NO: 192663 - DNA, 15 bp, Homo sapiens
acacccccaaagggg

SEQ ID NO: 192664 - DNA, 15 bp, Homo sapiens
cacacccccaaaggg

SEQ ID NO: 192665 - DNA, 15 bp, Homo sapiens
acacacccccaaagg

SEQ ID NO: 192666 - DNA, 15 bp, Homo sapiens
cacacacccccaaag

SEQ ID NO: 192667 - DNA, 15 bp, Homo sapiens
acacacacccccaaa

SEQ ID NO: 192668 - DNA, 15 bp, Homo sapiens
cacacacacccccaa

SEQ ID NO: 192669 - DNA, 15 bp, Homo sapiens
acacacacaccccca

SEQ ID NO: 192670 - DNA, 15 bp, Homo sapiens
cacacacacaccccc

SEQ ID NO: 192671 - DNA, 15 bp, Homo sapiens
acacacacacacccc

SEQ ID NO: 192672 - DNA, 15 bp, Homo sapiens
cacacacacacaccc

SEQ ID NO: 192673 - DNA, 15 bp, Homo sapiens
acacacacacacacc

SEQ ID NO: 192674 - DNA, 15 bp, Homo sapiens
aacacacacacacac

SEQ ID NO: 192675 - DNA, 15 bp, Homo sapiens
aaacacacacacaca

SEQ ID NO: 192676 - DNA, 15 bp, Homo sapiens
aaaacacacacacac

SEQ ID NO: 192677 - DNA, 15 bp, Homo sapiens
taaaacacacacaca

SEQ ID NO: 192678 - DNA, 15 bp, Homo sapiens
ttaaaacacacacac

SEQ ID NO: 192679 - DNA, 15 bp, Homo sapiens
attaaaacacacaca

SEQ ID NO: 192680 - DNA, 15 bp, Homo sapiens
aattaaaacacacac

SEQ ID NO: 192681 - DNA, 15 bp, Homo sapiens
aaattaaaacacaca

SEQ ID NO: 192682 - DNA, 15 bp, Homo sapiens
aaaattaaaacacac

SEQ ID NO: 192683 - DNA, 15 bp, Homo sapiens
gaaaattaaaacaca

SEQ ID NO: 192684 - DNA, 15 bp, Homo sapiens
agaaaattaaaacac

SEQ ID NO: 192685 - DNA, 15 bp, Homo sapiens
aagaaaattaaaaca

SEQ ID NO: 192686 - DNA, 15 bp, Homo sapiens
aaagaaaattaaaac

SEQ ID NO: 192687 - DNA, 15 bp, Homo sapiens
taaagaaaattaaaa

SEQ ID NO: 192688 - DNA, 15 bp, Homo sapiens
ataaagaaaattaaa

SEQ ID NO: 192689 - DNA, 15 bp, Homo sapiens
cataaagaaaattaa

SEQ ID NO: 192690 - DNA, 15 bp, Homo sapiens
ccataaagaaaatta

SEQ ID NO: 192691 - DNA, 15 bp, Homo sapiens
tccataaagaaaatt

SEQ ID NO: 192692 - DNA, 15 bp, Homo sapiens
ttccataaagaaaat

SEQ ID NO: 192693 - DNA, 15 bp, Homo sapiens
tttccataaagaaaa

SEQ ID NO: 192694 - DNA, 15 bp, Homo sapiens
ttttccataaagaaa

SEQ ID NO: 192695 - DNA, 15 bp, Homo sapiens
tttttccataaagaa

SEQ ID NO: 192696 - DNA, 15 bp, Homo sapiens
atttttccataaaga

SEQ ID NO: 192697 - DNA, 15 bp, Homo sapiens
aatttttccataaag

SEQ ID NO: 192698 - DNA, 15 bp, Homo sapiens
caatttttccataaa

SEQ ID NO: 192699 - DNA, 15 bp, Homo sapiens
tcaatttttccataa

SEQ ID NO: 192700 - DNA, 15 bp, Homo sapiens
gtcaatttttccata

SEQ ID NO: 192701 - DNA, 15 bp, Homo sapiens
tgtcaatttttccat

SEQ ID NO: 192702 - DNA, 15 bp, Homo sapiens
ttgtcaatttttcca

SEQ ID NO: 192703 - DNA, 15 bp, Homo sapiens
tttgtcaatttttcc

SEQ ID NO: 192704 - DNA, 15 bp, Homo sapiens
ttttgtcaatttttc

SEQ ID NO: 192705 - DNA, 15 bp, Homo sapiens
tttttgtcaattttt

SEQ ID NO: 192706 - DNA, 15 bp, Homo sapiens
ttttttgtcaatttt

SEQ ID NO: 192707 - DNA, 15 bp, Homo sapiens
tttttttgtcaattt

SEQ ID NO: 192708 - DNA, 15 bp, Homo sapiens
ttttttttgtcaatt

SEQ ID NO: 192709 - DNA, 15 bp, Homo sapiens
tttttttttgtcaat

SEQ ID NO: 192710 - DNA, 15 bp, Homo sapiens
ttttttttttgtcaa

SEQ ID NO: 192711 - DNA, 15 bp, Homo sapiens
attttttttttgtca

SEQ ID NO: 192712 - DNA, 15 bp, Homo sapiens
tattttttttttgtc

SEQ ID NO: 192713 - DNA, 15 bp, Homo sapiens
ctattttttttttgt

SEQ ID NO: 192714 - DNA, 15 bp, Homo sapiens
tctattttttttttg

SEQ ID NO: 192715 - DNA, 15 bp, Homo sapiens
ctctatttttttttt

SEQ ID NO: 192716 - DNA, 15 bp, Homo sapiens
tctctattttttttt

SEQ ID NO: 192717 - DNA, 15 bp, Homo sapiens
ctctctatttttttt

SEQ ID NO: 192718 - DNA, 15 bp, Homo sapiens
tctctctattttttt

SEQ ID NO: 192719 - DNA, 15 bp, Homo sapiens
ctctctctatttttt

SEQ ID NO: 192720 - DNA, 15 bp, Homo sapiens
tctctctctattttt

SEQ ID NO: 192721 - DNA, 15 bp, Homo sapiens
ctctctctctatttt

SEQ ID NO: 192722 - DNA, 15 bp, Homo sapiens
cctctctctctattt

SEQ ID NO: 192723 - DNA, 15 bp, Homo sapiens
acctctctctctatt

SEQ ID NO: 192724 - DNA, 15 bp, Homo sapiens
tacctctctctctat

SEQ ID NO: 192725 - DNA, 15 bp, Homo sapiens
atacctctctctcta

SEQ ID NO: 192726 - DNA, 15 bp, Homo sapiens
aatacctctctctct

SEQ ID NO: 192727 - DNA, 15 bp, Homo sapiens
aaatacctctctctc

SEQ ID NO: 192728 - DNA, 15 bp, Homo sapiens
taaatacctctctct

SEQ ID NO: 192729 - DNA, 15 bp, Homo sapiens
ttaaatacctctctc

SEQ ID NO: 192730 - DNA, 15 bp, Homo sapiens
gttaaatacctctct

SEQ ID NO: 192731 - DNA, 15 bp, Homo sapiens
agttaaatacctctc

SEQ ID NO: 192732 - DNA, 15 bp, Homo sapiens
cagttaaatacctct

SEQ ID NO: 192733 - DNA, 15 bp, Homo sapiens
gcagttaaatacctc

SEQ ID NO: 192734 - DNA, 15 bp, Homo sapiens
tgcagttaaatacct

SEQ ID NO: 192735 - DNA, 15 bp, Homo sapiens
ttgcagttaaatacc

SEQ ID NO: 192736 - DNA, 15 bp, Homo sapiens
attgcagttaaatac

SEQ ID NO: 192737 - DNA, 15 bp, Homo sapiens
tattgcagttaaata

SEQ ID NO: 192738 - DNA, 15 bp, Homo sapiens
ttattgcagttaaat

SEQ ID NO: 192739 - DNA, 15 bp, Homo sapiens
tttattgcagttaaa

SEQ ID NO: 192740 - DNA, 15 bp, Homo sapiens
gtttattgcagttaa

SEQ ID NO: 192741 - DNA, 15 bp, Homo sapiens
agtttattgcagtta

SEQ ID NO: 192742 - DNA, 15 bp, Homo sapiens
cagtttattgcagtt

SEQ ID NO: 192743 - DNA, 15 bp, Homo sapiens
ccagtttattgcagt

SEQ ID NO: 192744 - DNA, 15 bp, Homo sapiens
gccagtttattgcag

SEQ ID NO: 192745 - DNA, 15 bp, Homo sapiens
ggccagtttattgca

SEQ ID NO: 192746 - DNA, 15 bp, Homo sapiens
gggccagtttattgc

SEQ ID NO: 192747 - DNA, 15 bp, Homo sapiens
ggggccagtttattg

SEQ ID NO: 192748 - DNA, 15 bp, Homo sapiens
tggggccagtttatt

SEQ ID NO: 192749 - DNA, 15 bp, Homo sapiens
atggggccagtttat

SEQ ID NO: 192750 - DNA, 15 bp, Homo sapiens
catggggccagttta

SEQ ID NO: 192751 - DNA, 15 bp, Homo sapiens
acatggggccagttt

SEQ ID NO: 192752 - DNA, 15 bp, Homo sapiens
cacatggggccagtt

SEQ ID NO: 192753 - DNA, 15 bp, Homo sapiens
ccacatggggccagt

SEQ ID NO: 192754 - DNA, 15 bp, Homo sapiens
gccacatggggccag

SEQ ID NO: 192755 - DNA, 15 bp, Homo sapiens
ggccacatggggcca

SEQ ID NO: 192756 - DNA, 15 bp, Homo sapiens
gggccacatggggcc

SEQ ID NO: 192757 - DNA, 15 bp, Homo sapiens
ggggccacatggggc

SEQ ID NO: 192758 - DNA, 15 bp, Homo sapiens
gggggccacatgggg

SEQ ID NO: 192759 - DNA, 15 bp, Homo sapiens
cgggggccacatggg

SEQ ID NO: 192760 - DNA, 15 bp, Homo sapiens
gcgggggccacatgg

SEQ ID NO: 192761 - DNA, 15 bp, Homo sapiens
ggcgggggccacatg

SEQ ID NO: 192762 - DNA, 15 bp, Homo sapiens
aggcgggggccacat

SEQ ID NO: 192763 - DNA, 15 bp, Homo sapiens
aaggcgggggccaca

SEQ ID NO: 192764 - DNA, 15 bp, Homo sapiens
caaggcgggggccac

SEQ ID NO: 192765 - DNA, 15 bp, Homo sapiens
acaaggcgggggcca

SEQ ID NO: 192766 - DNA, 15 bp, Homo sapiens
gacaaggcgggggcc

SEQ ID NO: 192767 - DNA, 15 bp, Homo sapiens
agacaaggcgggggc

SEQ ID NO: 192768 - DNA, 15 bp, Homo sapiens
cagacaaggcggggg

SEQ ID NO: 192769 - DNA, 15 bp, Homo sapiens
gcagacaaggcgggg

SEQ ID NO: 192770 - DNA, 15 bp, Homo sapiens
agcagacaaggcggg

SEQ ID NO: 192771 - DNA, 15 bp, Homo sapiens
aagcagacaaggcgg

SEQ ID NO: 192772 - DNA, 15 bp, Homo sapiens
caagcagacaaggcg

SEQ ID NO: 192773 - DNA, 15 bp, Homo sapiens
acaagcagacaaggc

SEQ ID NO: 192774 - DNA, 15 bp, Homo sapiens
cacaagcagacaagg

SEQ ID NO: 192775 - DNA, 15 bp, Homo sapiens
acacaagcagacaag

SEQ ID NO: 192776 - DNA, 15 bp, Homo sapiens
cacacaagcagacaa

SEQ ID NO: 192777 - DNA, 15 bp, Homo sapiens
acacacaagcagaca

SEQ ID NO: 192778 - DNA, 15 bp, Homo sapiens
aacacacaagcagac

SEQ ID NO: 192779 - DNA, 15 bp, Homo sapiens
aaacacacaagcaga

SEQ ID NO: 192780 - DNA, 15 bp, Homo sapiens
caaacacacaagcag

SEQ ID NO: 192781 - DNA, 15 bp, Homo sapiens
acaaacacacaagca

SEQ ID NO: 192782 - DNA, 15 bp, Homo sapiens
gacaaacacacaagc

SEQ ID NO: 192783 - DNA, 15 bp, Homo sapiens
ggacaaacacacaag

SEQ ID NO: 192784 - DNA, 15 bp, Homo sapiens
tggacaaacacacaa

SEQ ID NO: 192785 - DNA, 15 bp, Homo sapiens
atggacaaacacaca

SEQ ID NO: 192786 - DNA, 15 bp, Homo sapiens
gatggacaaacacac

SEQ ID NO: 192787 - DNA, 15 bp, Homo sapiens
agatggacaaacaca

SEQ ID NO: 192788 - DNA, 15 bp, Homo sapiens
gagatggacaaacac

SEQ ID NO: 192789 - DNA, 15 bp, Homo sapiens
tgagatggacaaaca

SEQ ID NO: 192790 - DNA, 15 bp, Homo sapiens
ctgagatggacaaac

SEQ ID NO: 192791 - DNA, 15 bp, Homo sapiens
cctgagatggacaaa

SEQ ID NO: 192792 - DNA, 15 bp, Homo sapiens
tcctgagatggacaa

SEQ ID NO: 192793 - DNA, 15 bp, Homo sapiens
ctcctgagatggaca

SEQ ID NO: 192794 - DNA, 15 bp, Homo sapiens
actcctgagatggac

SEQ ID NO: 192795 - DNA, 15 bp, Homo sapiens
cactcctgagatgga

SEQ ID NO: 192796 - DNA, 15 bp, Homo sapiens
ccactcctgagatgg

SEQ ID NO: 192797 - DNA, 15 bp, Homo sapiens
cccactcctgagatg

SEQ ID NO: 192798 - DNA, 15 bp, Homo sapiens
ccccactcctgagat

SEQ ID NO: 192799 - DNA, 15 bp, Homo sapiens
tccccactcctgaga

SEQ ID NO: 192800 - DNA, 15 bp, Homo sapiens
ctccccactcctgag

SEQ ID NO: 192801 - DNA, 15 bp, Homo sapiens
cctccccactcctga

SEQ ID NO: 192802 - DNA, 15 bp, Homo sapiens
ccctccccactcctg

SEQ ID NO: 192803 - DNA, 15 bp, Homo sapiens
cccctccccactcct

SEQ ID NO: 192804 - DNA, 15 bp, Homo sapiens
ccccctccccactcc

SEQ ID NO: 192805 - DNA, 15 bp, Homo sapiens
gccccctccccactc

SEQ ID NO: 192806 - DNA, 15 bp, Homo sapiens
ggccccctccccact

SEQ ID NO: 192807 - DNA, 15 bp, Homo sapiens
aggccccctccccac

SEQ ID NO: 192808 - DNA, 15 bp, Homo sapiens
caggccccctcccca

SEQ ID NO: 192809 - DNA, 15 bp, Homo sapiens
ccaggccccctcccc

SEQ ID NO: 192810 - DNA, 15 bp, Homo sapiens
cccaggccccctccc

SEQ ID NO: 192811 - DNA, 15 bp, Homo sapiens
ccccaggccccctcc

SEQ ID NO: 192812 - DNA, 15 bp, Homo sapiens
accccaggccccctc

SEQ ID NO: 192813 - DNA, 15 bp, Homo sapiens
gaccccaggccccct

SEQ ID NO: 192814 - DNA, 15 bp, Homo sapiens
agaccccaggccccc

SEQ ID NO: 192815 - DNA, 15 bp, Homo sapiens
cagaccccaggcccc

SEQ ID NO: 192816 - DNA, 15 bp, Homo sapiens
gcagaccccaggccc

SEQ ID NO: 192817 - DNA, 15 bp, Homo sapiens
tgcagaccccaggcc

SEQ ID NO: 192818 - DNA, 15 bp, Homo sapiens
ctgcagaccccaggc

SEQ ID NO: 192819 - DNA, 15 bp, Homo sapiens
tctgcagaccccagg

SEQ ID NO: 192820 - DNA, 15 bp, Homo sapiens
ctctgcagaccccag

SEQ ID NO: 192821 - DNA, 15 bp, Homo sapiens
gctctgcagacccca

SEQ ID NO: 192822 - DNA, 15 bp, Homo sapiens
agctctgcagacccc

SEQ ID NO: 192823 - DNA, 15 bp, Homo sapiens
gagctctgcagaccc

SEQ ID NO: 192824 - DNA, 15 bp, Homo sapiens
ggagctctgcagacc

SEQ ID NO: 192825 - DNA, 15 bp, Homo sapiens
tggagctctgcagac

SEQ ID NO: 192826 - DNA, 15 bp, Homo sapiens
gtggagctctgcaga

SEQ ID NO: 192827 - DNA, 15 bp, Homo sapiens
cgtggagctctgcag

SEQ ID NO: 192828 - DNA, 15 bp, Homo sapiens
tcgtggagctctgca

SEQ ID NO: 192829 - DNA, 15 bp, Homo sapiens
ctcgtggagctctgc

SEQ ID NO: 192830 - DNA, 15 bp, Homo sapiens
cctcgtggagctctg

SEQ ID NO: 192831 - DNA, 15 bp, Homo sapiens
gcctcgtggagctct

SEQ ID NO: 192832 - DNA, 15 bp, Homo sapiens
tgcctcgtggagctc

SEQ ID NO: 192833 - DNA, 15 bp, Homo sapiens
atgcctcgtggagct

SEQ ID NO: 192834 - DNA, 15 bp, Homo sapiens
catgcctcgtggagc

SEQ ID NO: 192835 - DNA, 15 bp, Homo sapiens
ccatgcctcgtggag

SEQ ID NO: 192836 - DNA, 15 bp, Homo sapiens
accatgcctcgtgga

SEQ ID NO: 192837 - DNA, 15 bp, Homo sapiens
aaccatgcctcgtgg

SEQ ID NO: 192838 - DNA, 15 bp, Homo sapiens
gaaccatgcctcgtg

SEQ ID NO: 192839 - DNA, 15 bp, Homo sapiens
agaaccatgcctcgt

SEQ ID NO: 192840 - DNA, 15 bp, Homo sapiens
cagaaccatgcctcg

SEQ ID NO: 192841 - DNA, 15 bp, Homo sapiens
gcagaaccatgcctc

SEQ ID NO: 192842 - DNA, 15 bp, Homo sapiens
agcagaaccatgcct

SEQ ID NO: 192843 - DNA, 15 bp, Homo sapiens
cagcagaaccatgcc

SEQ ID NO: 192844 - DNA, 15 bp, Homo sapiens
acagcagaaccatgc

SEQ ID NO: 192845 - DNA, 15 bp, Homo sapiens
aacagcagaaccatg

SEQ ID NO: 192846 - DNA, 15 bp, Homo sapiens
caacagcagaaccat

SEQ ID NO: 192847 - DNA, 15 bp, Homo sapiens
acaacagcagaacca

SEQ ID NO: 192848 - DNA, 15 bp, Homo sapiens
cacaacagcagaacc

SEQ ID NO: 192849 - DNA, 15 bp, Homo sapiens
gcacaacagcagaac

SEQ ID NO: 192850 - DNA, 15 bp, Homo sapiens
tgcacaacagcagaa

SEQ ID NO: 192851 - DNA, 15 bp, Homo sapiens
gtgcacaacagcaga

SEQ ID NO: 192852 - DNA, 15 bp, Homo sapiens
tgtgcacaacagcag

SEQ ID NO: 192853 - DNA, 15 bp, Homo sapiens
atgtgcacaacagca

SEQ ID NO: 192854 - DNA, 15 bp, Homo sapiens
catgtgcacaacagc

SEQ ID NO: 192855 - DNA, 15 bp, Homo sapiens
ccatgtgcacaacag

SEQ ID NO: 192856 - DNA, 15 bp, Homo sapiens
gccatgtgcacaaca

SEQ ID NO: 192857 - DNA, 15 bp, Homo sapiens
agccatgtgcacaac

SEQ ID NO: 192858 - DNA, 15 bp, Homo sapiens
cagccatgtgcacaa

SEQ ID NO: 192859 - DNA, 15 bp, Homo sapiens
acagccatgtgcaca

SEQ ID NO: 192860 - DNA, 15 bp, Homo sapiens
cacagccatgtgcac

SEQ ID NO: 192861 - DNA, 15 bp, Homo sapiens
gcacagccatgtgca

SEQ ID NO: 192862 - DNA, 15 bp, Homo sapiens
tgcacagccatgtgc

SEQ ID NO: 192863 - DNA, 15 bp, Homo sapiens
atgcacagccatgtg

SEQ ID NO: 192864 - DNA, 15 bp, Homo sapiens
catgcacagccatgt

SEQ ID NO: 192865 - DNA, 15 bp, Homo sapiens
ccatgcacagccatg

SEQ ID NO: 192866 - DNA, 15 bp, Homo sapiens
accatgcacagccat

SEQ ID NO: 192867 - DNA, 15 bp, Homo sapiens
gaccatgcacagcca

SEQ ID NO: 192868 - DNA, 15 bp, Homo sapiens
ggaccatgcacagcc

SEQ ID NO: 192869 - DNA, 15 bp, Homo sapiens
gggaccatgcacagc

SEQ ID NO: 192870 - DNA, 15 bp, Homo sapiens
agggaccatgcacag

SEQ ID NO: 192871 - DNA, 15 bp, Homo sapiens
cagggaccatgcaca

SEQ ID NO: 192872 - DNA, 15 bp, Homo sapiens
gcagggaccatgcac

SEQ ID NO: 192873 - DNA, 15 bp, Homo sapiens
ggcagggaccatgca

SEQ ID NO: 192874 - DNA, 15 bp, Homo sapiens
tggcagggaccatgc

SEQ ID NO: 192875 - DNA, 15 bp, Homo sapiens
ctggcagggaccatg

SEQ ID NO: 192876 - DNA, 15 bp, Homo sapiens
gctggcagggaccat

SEQ ID NO: 192877 - DNA, 15 bp, Homo sapiens
agctggcagggacca

SEQ ID NO: 192878 - DNA, 15 bp, Homo sapiens
cagctggcagggacc

SEQ ID NO: 192879 - DNA, 15 bp, Homo sapiens
gcagctggcagggac

SEQ ID NO: 192880 - DNA, 15 bp, Homo sapiens
tgcagctggcaggga

SEQ ID NO: 192881 - DNA, 15 bp, Homo sapiens
gtgcagctggcaggg

SEQ ID NO: 192882 - DNA, 15 bp, Homo sapiens
ggtgcagctggcagg

SEQ ID NO: 192883 - DNA, 15 bp, Homo sapiens
tggtgcagctggcag

SEQ ID NO: 192884 - DNA, 15 bp, Homo sapiens
gtggtgcagctggca

SEQ ID NO: 192885 - DNA, 15 bp, Homo sapiens
ggtggtgcagctggc

SEQ ID NO: 192886 - DNA, 15 bp, Homo sapiens
gggtggtgcagctgg

SEQ ID NO: 192887 - DNA, 15 bp, Homo sapiens
tgggtggtgcagctg

SEQ ID NO: 192888 - DNA, 15 bp, Homo sapiens
atgggtggtgcagct

SEQ ID NO: 192889 - DNA, 15 bp, Homo sapiens
aatgggtggtgcagc

SEQ ID NO: 192890 - DNA, 15 bp, Homo sapiens
taatgggtggtgcag

SEQ ID NO: 192891 - DNA, 15 bp, Homo sapiens
gtaatgggtggtgca

SEQ ID NO: 192892 - DNA, 15 bp, Homo sapiens
ggtaatgggtggtgc

SEQ ID NO: 192893 - DNA, 15 bp, Homo sapiens
gggtaatgggtggtg

SEQ ID NO: 192894 - DNA, 15 bp, Homo sapiens
tgggtaatgggtggt

SEQ ID NO: 192895 - DNA, 15 bp, Homo sapiens
ctgggtaatgggtgg

SEQ ID NO: 192896 - DNA, 15 bp, Homo sapiens
actgggtaatgggtg

SEQ ID NO: 192897 - DNA, 15 bp, Homo sapiens
cactgggtaatgggt

SEQ ID NO: 192898 - DNA, 15 bp, Homo sapiens
ccactgggtaatggg

SEQ ID NO: 192899 - DNA, 15 bp, Homo sapiens
accactgggtaatgg

SEQ ID NO: 192900 - DNA, 15 bp, Homo sapiens
aaccactgggtaatg

SEQ ID NO: 192901 - DNA, 15 bp, Homo sapiens
caaccactgggtaat

SEQ ID NO: 192902 - DNA, 15 bp, Homo sapiens
ccaaccactgggtaa

SEQ ID NO: 192903 - DNA, 15 bp, Homo sapiens
accaaccactgggta

SEQ ID NO: 192904 - DNA, 15 bp, Homo sapiens
aaccaaccactgggt

SEQ ID NO: 192905 - DNA, 15 bp, Homo sapiens
caaccaaccactggg

SEQ ID NO: 192906 - DNA, 15 bp, Homo sapiens
ccaaccaaccactgg

SEQ ID NO: 192907 - DNA, 15 bp, Homo sapiens
tccaaccaaccactg

SEQ ID NO: 192908 - DNA, 15 bp, Homo sapiens
atccaaccaaccact

SEQ ID NO: 192909 - DNA, 15 bp, Homo sapiens
catccaaccaaccac

SEQ ID NO: 192910 - DNA, 15 bp, Homo sapiens
ccatccaaccaacca

SEQ ID NO: 192911 - DNA, 15 bp, Homo sapiens
tccatccaaccaacc

SEQ ID NO: 192912 - DNA, 15 bp, Homo sapiens
atccatccaaccaac

SEQ ID NO: 192913 - DNA, 15 bp, Homo sapiens
catccatccaaccaa

SEQ ID NO: 192914 - DNA, 15 bp, Homo sapiens
ccatccatccaacca

SEQ ID NO: 192915 - DNA, 15 bp, Homo sapiens
tccatccatccaacc

SEQ ID NO: 192916 - DNA, 15 bp, Homo sapiens
ctccatccatccaac

SEQ ID NO: 192917 - DNA, 15 bp, Homo sapiens
cctccatccatccaa

SEQ ID NO: 192918 - DNA, 15 bp, Homo sapiens
tcctccatccatcca

SEQ ID NO: 192919 - DNA, 15 bp, Homo sapiens
ttcctccatccatcc

SEQ ID NO: 192920 - DNA, 15 bp, Homo sapiens
attcctccatccatc

SEQ ID NO: 192921 - DNA, 15 bp, Homo sapiens
aattcctccatccat

SEQ ID NO: 192922 - DNA, 15 bp, Homo sapiens
taattcctccatcca

SEQ ID NO: 192923 - DNA, 15 bp, Homo sapiens
ttaattcctccatcc

SEQ ID NO: 192924 - DNA, 15 bp, Homo sapiens
cttaattcctccatc

SEQ ID NO: 192925 - DNA, 15 bp, Homo sapiens
ccttaattcctccat

SEQ ID NO: 192926 - DNA, 15 bp, Homo sapiens
tccttaattcctcca

SEQ ID NO: 192927 - DNA, 15 bp, Homo sapiens
ttccttaattcctcc

SEQ ID NO: 192928 - DNA, 15 bp, Homo sapiens
attccttaattcctc

SEQ ID NO: 192929 - DNA, 15 bp, Homo sapiens
cattccttaattcct

SEQ ID NO: 192930 - DNA, 15 bp, Homo sapiens
tcattccttaattcc

SEQ ID NO: 192931 - DNA, 15 bp, Homo sapiens
ttcattccttaattc

SEQ ID NO: 192932 - DNA, 15 bp, Homo sapiens
attcattccttaatt

SEQ ID NO: 192933 - DNA, 15 bp, Homo sapiens
cattcattccttaat

SEQ ID NO: 192934 - DNA, 15 bp, Homo sapiens
acattcattccttaa

SEQ ID NO: 192935 - DNA, 15 bp, Homo sapiens
gacattcattcctta

SEQ ID NO: 192936 - DNA, 15 bp, Homo sapiens
ggacattcattcctt

SEQ ID NO: 192937 - DNA, 15 bp, Homo sapiens
gggacattcattcct

SEQ ID NO: 192938 - DNA, 15 bp, Homo sapiens
ggggacattcattcc

SEQ ID NO: 192939 - DNA, 15 bp, Homo sapiens
aggggacattcattc

SEQ ID NO: 192940 - DNA, 15 bp, Homo sapiens
aaggggacattcatt

SEQ ID NO: 192941 - DNA, 15 bp, Homo sapiens
aaaggggacattcat

SEQ ID NO: 192942 - DNA, 15 bp, Homo sapiens
caaaggggacattca

SEQ ID NO: 192943 - DNA, 15 bp, Homo sapiens
tcaaaggggacattc

SEQ ID NO: 192944 - DNA, 15 bp, Homo sapiens
ctcaaaggggacatt

SEQ ID NO: 192945 - DNA, 15 bp, Homo sapiens
cctcaaaggggacat

SEQ ID NO: 192946 - DNA, 15 bp, Homo sapiens
gcctcaaaggggaca

SEQ ID NO: 192947 - DNA, 15 bp, Homo sapiens
ggcctcaaaggggac

SEQ ID NO: 192948 - DNA, 15 bp, Homo sapiens
gggcctcaaagggga

SEQ ID NO: 192949 - DNA, 15 bp, Homo sapiens
agggcctcaaagggg

SEQ ID NO: 192950 - DNA, 15 bp, Homo sapiens
tagggcctcaaaggg

SEQ ID NO: 192951 - DNA, 15 bp, Homo sapiens
ctagggcctcaaagg

SEQ ID NO: 192952 - DNA, 15 bp, Homo sapiens
tctagggcctcaaag

SEQ ID NO: 192953 - DNA, 15 bp, Homo sapiens
gtctagggcctcaaa

SEQ ID NO: 192954 - DNA, 15 bp, Homo sapiens
cgtctagggcctcaa

SEQ ID NO: 192955 - DNA, 15 bp, Homo sapiens
acgtctagggcctca

SEQ ID NO: 192956 - DNA, 15 bp, Homo sapiens
cacgtctagggcctc

SEQ ID NO: 192957 - DNA, 15 bp, Homo sapiens
gcacgtctagggcct

SEQ ID NO: 192958 - DNA, 15 bp, Homo sapiens
tgcacgtctagggcc

SEQ ID NO: 192959 - DNA, 15 bp, Homo sapiens
atgcacgtctagggc

SEQ ID NO: 192960 - DNA, 15 bp, Homo sapiens
catgcacgtctaggg

SEQ ID NO: 192961 - DNA, 15 bp, Homo sapiens
tcatgcacgtctagg

SEQ ID NO: 192962 - DNA, 15 bp, Homo sapiens
ctcatgcacgtctag

SEQ ID NO: 192963 - DNA, 15 bp, Homo sapiens
cctcatgcacgtcta

SEQ ID NO: 192964 - DNA, 15 bp, Homo sapiens
ccctcatgcacgtct

SEQ ID NO: 192965 - DNA, 15 bp, Homo sapiens
accctcatgcacgtc

SEQ ID NO: 192966 - DNA, 15 bp, Homo sapiens
caccctcatgcacgt

SEQ ID NO: 192967 - DNA, 15 bp, Homo sapiens
acaccctcatgcacg

SEQ ID NO: 192968 - DNA, 15 bp, Homo sapiens
cacaccctcatgcac

SEQ ID NO: 192969 - DNA, 15 bp, Homo sapiens
ccacaccctcatgca

SEQ ID NO: 192970 - DNA, 15 bp, Homo sapiens
cccacaccctcatgc

SEQ ID NO: 192971 - DNA, 15 bp, Homo sapiens
ccccacaccctcatg

SEQ ID NO: 192972 - DNA, 15 bp, Homo sapiens
tccccacaccctcat

SEQ ID NO: 192973 - DNA, 15 bp, Homo sapiens
ctccccacaccctca

SEQ ID NO: 192974 - DNA, 15 bp, Homo sapiens
gctccccacaccctc

SEQ ID NO: 192975 - DNA, 15 bp, Homo sapiens
agctccccacaccct

SEQ ID NO: 192976 - DNA, 15 bp, Homo sapiens
cagctccccacaccc

SEQ ID NO: 192977 - DNA, 15 bp, Homo sapiens
ccagctccccacacc

SEQ ID NO: 192978 - DNA, 15 bp, Homo sapiens
cccagctccccacac

SEQ ID NO: 192979 - DNA, 15 bp, Homo sapiens
ccccagctccccaca

SEQ ID NO: 192980 - DNA, 15 bp, Homo sapiens
accccagctccccac

SEQ ID NO: 192981 - DNA, 15 bp, Homo sapiens
gaccccagctcccca

SEQ ID NO: 192982 - DNA, 15 bp, Homo sapiens
tgaccccagctcccc

SEQ ID NO: 192983 - DNA, 15 bp, Homo sapiens
ttgaccccagctccc

SEQ ID NO: 192984 - DNA, 15 bp, Homo sapiens
cttgaccccagctcc

SEQ ID NO: 192985 - DNA, 15 bp, Homo sapiens
ccttgaccccagctc

SEQ ID NO: 192986 - DNA, 15 bp, Homo sapiens
tccttgaccccagct

SEQ ID NO: 192987 - DNA, 15 bp, Homo sapiens
gtccttgaccccagc

SEQ ID NO: 192988 - DNA, 15 bp, Homo sapiens
tgtccttgaccccag

SEQ ID NO: 192989 - DNA, 15 bp, Homo sapiens
atgtccttgacccca

SEQ ID NO: 192990 - DNA, 15 bp, Homo sapiens
catgtccttgacccc

SEQ ID NO: 192991 - DNA, 15 bp, Homo sapiens
acatgtccttgaccc

SEQ ID NO: 192992 - DNA, 15 bp, Homo sapiens
gacatgtccttgacc

SEQ ID NO: 192993 - DNA, 15 bp, Homo sapiens
ggacatgtccttgac

SEQ ID NO: 192994 - DNA, 15 bp, Homo sapiens
gggacatgtccttga

SEQ ID NO: 192995 - DNA, 15 bp, Homo sapiens
tgggacatgtccttg

SEQ ID NO: 192996 - DNA, 15 bp, Homo sapiens
atgggacatgtcctt

SEQ ID NO: 192997 - DNA, 15 bp, Homo sapiens
catgggacatgtcct

SEQ ID NO: 192998 - DNA, 15 bp, Homo sapiens
acatgggacatgtcc

SEQ ID NO: 192999 - DNA, 15 bp, Homo sapiens
aacatgggacatgtc

SEQ ID NO: 193000 - DNA, 15 bp, Homo sapiens
caacatgggacatgt

SEQ ID NO: 193001 - DNA, 15 bp, Homo sapiens
ccaacatgggacatg

SEQ ID NO: 193002 - DNA, 15 bp, Homo sapiens
tccaacatgggacat

SEQ ID NO: 193003 - DNA, 15 bp, Homo sapiens
ctccaacatgggaca

SEQ ID NO: 193004 - DNA, 15 bp, Homo sapiens
cctccaacatgggac

SEQ ID NO: 193005 - DNA, 15 bp, Homo sapiens
tcctccaacatggga

SEQ ID NO: 193006 - DNA, 15 bp, Homo sapiens
ctcctccaacatggg

SEQ ID NO: 193007 - DNA, 15 bp, Homo sapiens
tctcctccaacatgg

SEQ ID NO: 193008 - DNA, 15 bp, Homo sapiens
ctctcctccaacatg

SEQ ID NO: 193009 - DNA, 15 bp, Homo sapiens
cctctcctccaacat

SEQ ID NO: 193010 - DNA, 15 bp, Homo sapiens
gcctctcctccaaca

SEQ ID NO: 193011 - DNA, 15 bp, Homo sapiens
tgcctctcctccaac

SEQ ID NO: 193012 - DNA, 15 bp, Homo sapiens
ctgcctctcctccaa

SEQ ID NO: 193013 - DNA, 15 bp, Homo sapiens
cctgcctctcctcca

SEQ ID NO: 193014 - DNA, 15 bp, Homo sapiens
ccctgcctctcctcc

SEQ ID NO: 193015 - DNA, 15 bp, Homo sapiens
cccctgcctctcctc

SEQ ID NO: 193016 - DNA, 15 bp, Homo sapiens
acccctgcctctcct

SEQ ID NO: 193017 - DNA, 15 bp, Homo sapiens
gacccctgcctctcc

SEQ ID NO: 193018 - DNA, 15 bp, Homo sapiens
agacccctgcctctc

SEQ ID NO: 193019 - DNA, 15 bp, Homo sapiens
gagacccctgcctct

SEQ ID NO: 193020 - DNA, 15 bp, Homo sapiens
ggagacccctgcctc

SEQ ID NO: 193021 - DNA, 15 bp, Homo sapiens
cggagacccctgcct

SEQ ID NO: 193022 - DNA, 15 bp, Homo sapiens
acggagacccctgcc

SEQ ID NO: 193023 - DNA, 15 bp, Homo sapiens
cacggagacccctgc

SEQ ID NO: 193024 - DNA, 15 bp, Homo sapiens
acacggagacccctg

SEQ ID NO: 193025 - DNA, 15 bp, Homo sapiens
gacacggagacccct

SEQ ID NO: 193026 - DNA, 15 bp, Homo sapiens
tgacacggagacccc

SEQ ID NO: 193027 - DNA, 15 bp, Homo sapiens
ttgacacggagaccc

SEQ ID NO: 193028 - DNA, 15 bp, Homo sapiens
gttgacacggagacc

SEQ ID NO: 193029 - DNA, 15 bp, Homo sapiens
tgttgacacggagac

SEQ ID NO: 193030 - DNA, 15 bp, Homo sapiens
ctgttgacacggaga

SEQ ID NO: 193031 - DNA, 15 bp, Homo sapiens
actgttgacacggag

SEQ ID NO: 193032 - DNA, 15 bp, Homo sapiens
aactgttgacacgga

SEQ ID NO: 193033 - DNA, 15 bp, Homo sapiens
gaactgttgacacgg

SEQ ID NO: 193034 - DNA, 15 bp, Homo sapiens
ggaactgttgacacg

SEQ ID NO: 193035 - DNA, 15 bp, Homo sapiens
aggaactgttgacac

SEQ ID NO: 193036 - DNA, 15 bp, Homo sapiens
caggaactgttgaca

SEQ ID NO: 193037 - DNA, 15 bp, Homo sapiens
tcaggaactgttgac

SEQ ID NO: 193038 - DNA, 15 bp, Homo sapiens
ttcaggaactgttga

SEQ ID NO: 193039 - DNA, 15 bp, Homo sapiens
tttcaggaactgttg

SEQ ID NO: 193040 - DNA, 15 bp, Homo sapiens
ttttcaggaactgtt

SEQ ID NO: 193041 - DNA, 15 bp, Homo sapiens
gttttcaggaactgt

SEQ ID NO: 193042 - DNA, 15 bp, Homo sapiens
tgttttcaggaactg

SEQ ID NO: 193043 - DNA, 15 bp, Homo sapiens
gtgttttcaggaact

SEQ ID NO: 193044 - DNA, 15 bp, Homo sapiens
tgtgttttcaggaac

SEQ ID NO: 193045 - DNA, 15 bp, Homo sapiens
ttgtgttttcaggaa

SEQ ID NO: 193046 - DNA, 15 bp, Homo sapiens
gttgtgttttcagga

SEQ ID NO: 193047 - DNA, 15 bp, Homo sapiens
ggttgtgttttcagg

SEQ ID NO: 193048 - DNA, 15 bp, Homo sapiens
tggttgtgttttcag

SEQ ID NO: 193049 - DNA, 15 bp, Homo sapiens
ctggttgtgttttca

SEQ ID NO: 193050 - DNA, 15 bp, Homo sapiens
gctggttgtgttttc

SEQ ID NO: 193051 - DNA, 15 bp, Homo sapiens
ggctggttgtgtttt

SEQ ID NO: 193052 - DNA, 15 bp, Homo sapiens
gggctggttgtgttt

SEQ ID NO: 193053 - DNA, 15 bp, Homo sapiens
ggggctggttgtgtt

SEQ ID NO: 193054 - DNA, 15 bp, Homo sapiens
aggggctggttgtgt

SEQ ID NO: 193055 - DNA, 15 bp, Homo sapiens
caggggctggttgtg

SEQ ID NO: 193056 - DNA, 15 bp, Homo sapiens
ccaggggctggttgt

SEQ ID NO: 193057 - DNA, 15 bp, Homo sapiens
gccaggggctggttg

SEQ ID NO: 193058 - DNA, 15 bp, Homo sapiens
ggccaggggctggtt

SEQ ID NO: 193059 - DNA, 15 bp, Homo sapiens
gggccaggggctggt

SEQ ID NO: 193060 - DNA, 15 bp, Homo sapiens
agggccaggggctgg

SEQ ID NO: 193061 - DNA, 15 bp, Homo sapiens
cagggccaggggctg

SEQ ID NO: 193062 - DNA, 15 bp, Homo sapiens
gcagggccaggggct

SEQ ID NO: 193063 - DNA, 15 bp, Homo sapiens
ggcagggccaggggc

SEQ ID NO: 193064 - DNA, 15 bp, Homo sapiens
gggcagggccagggg

SEQ ID NO: 193065 - DNA, 15 bp, Homo sapiens
agggcagggccaggg

SEQ ID NO: 193066 - DNA, 15 bp, Homo sapiens
cagggcagggccagg

SEQ ID NO: 193067 - DNA, 15 bp, Homo sapiens
gcagggcagggccag

SEQ ID NO: 193068 - DNA, 15 bp, Homo sapiens
agcagggcagggcca

SEQ ID NO: 193069 - DNA, 15 bp, Homo sapiens
cagcagggcagggcc

SEQ ID NO: 193070 - DNA, 15 bp, Homo sapiens
ccagcagggcagggc

SEQ ID NO: 193071 - DNA, 15 bp, Homo sapiens
cccagcagggcaggg

SEQ ID NO: 193072 - DNA, 15 bp, Homo sapiens
gcccagcagggcagg

SEQ ID NO: 193073 - DNA, 15 bp, Homo sapiens
ggcccagcagggcag

SEQ ID NO: 193074 - DNA, 15 bp, Homo sapiens
tggcccagcagggca

SEQ ID NO: 193075 - DNA, 15 bp, Homo sapiens
ttggcccagcagggc

SEQ ID NO: 193076 - DNA, 15 bp, Homo sapiens
tttggcccagcaggg

SEQ ID NO: 193077 - DNA, 15 bp, Homo sapiens
ctttggcccagcagg

SEQ ID NO: 193078 - DNA, 15 bp, Homo sapiens
gctttggcccagcag

SEQ ID NO: 193079 - DNA, 15 bp, Homo sapiens
ggctttggcccagca

SEQ ID NO: 193080 - DNA, 15 bp, Homo sapiens
gggctttggcccagc

SEQ ID NO: 193081 - DNA, 15 bp, Homo sapiens
agggctttggcccag

SEQ ID NO: 193082 - DNA, 15 bp, Homo sapiens
gagggctttggccca

SEQ ID NO: 193083 - DNA, 15 bp, Homo sapiens
ggagggctttggccc

SEQ ID NO: 193084 - DNA, 15 bp, Homo sapiens
gggagggctttggcc

SEQ ID NO: 193085 - DNA, 15 bp, Homo sapiens
ggggagggctttggc

SEQ ID NO: 193086 - DNA, 15 bp, Homo sapiens
aggggagggctttgg

SEQ ID NO: 193087 - DNA, 15 bp, Homo sapiens
gaggggagggctttg

SEQ ID NO: 193088 - DNA, 15 bp, Homo sapiens
agaggggagggcttt

SEQ ID NO: 193089 - DNA, 15 bp, Homo sapiens
cagaggggagggctt

SEQ ID NO: 193090 - DNA, 15 bp, Homo sapiens
gcagaggggagggct

SEQ ID NO: 193091 - DNA, 15 bp, Homo sapiens
tgcagaggggagggc

SEQ ID NO: 193092 - DNA, 15 bp, Homo sapiens
gtgcagaggggaggg

SEQ ID NO: 193093 - DNA, 15 bp, Homo sapiens
ggtgcagaggggagg

SEQ ID NO: 193094 - DNA, 15 bp, Homo sapiens
tggtgcagaggggag

SEQ ID NO: 193095 - DNA, 15 bp, Homo sapiens
ctggtgcagagggga

SEQ ID NO: 193096 - DNA, 15 bp, Homo sapiens
gctggtgcagagggg

SEQ ID NO: 193097 - DNA, 15 bp, Homo sapiens
ggctggtgcagaggg

SEQ ID NO: 193098 - DNA, 15 bp, Homo sapiens
tggctggtgcagagg

SEQ ID NO: 193099 - DNA, 15 bp, Homo sapiens
ttggctggtgcagag

SEQ ID NO: 193100 - DNA, 15 bp, Homo sapiens
attggctggtgcaga

SEQ ID NO: 193101 - DNA, 15 bp, Homo sapiens
tattggctggtgcag

SEQ ID NO: 193102 - DNA, 15 bp, Homo sapiens
ctattggctggtgca

SEQ ID NO: 193103 - DNA, 15 bp, Homo sapiens
actattggctggtgc

SEQ ID NO: 193104 - DNA, 15 bp, Homo sapiens
cactattggctggtg

SEQ ID NO: 193105 - DNA, 15 bp, Homo sapiens
ccactattggctggt

SEQ ID NO: 193106 - DNA, 15 bp, Homo sapiens
cccactattggctgg

SEQ ID NO: 193107 - DNA, 15 bp, Homo sapiens
ccccactattggctg

SEQ ID NO: 193108 - DNA, 15 bp, Homo sapiens
gccccactattggct

SEQ ID NO: 193109 - DNA, 15 bp, Homo sapiens
ggccccactattggc

SEQ ID NO: 193110 - DNA, 15 bp, Homo sapiens
aggccccactattgg

SEQ ID NO: 193111 - DNA, 15 bp, Homo sapiens
caggccccactattg

SEQ ID NO: 193112 - DNA, 15 bp, Homo sapiens
ccaggccccactatt

SEQ ID NO: 193113 - DNA, 15 bp, Homo sapiens
gccaggccccactat

SEQ ID NO: 193114 - DNA, 15 bp, Homo sapiens
ggccaggccccacta

SEQ ID NO: 193115 - DNA, 15 bp, Homo sapiens
aggccaggccccact

SEQ ID NO: 193116 - DNA, 15 bp, Homo sapiens
aaggccaggccccac

SEQ ID NO: 193117 - DNA, 15 bp, Homo sapiens
caaggccaggcccca

SEQ ID NO: 193118 - DNA, 15 bp, Homo sapiens
tcaaggccaggcccc

SEQ ID NO: 193119 - DNA, 15 bp, Homo sapiens
ctcaaggccaggccc

SEQ ID NO: 193120 - DNA, 15 bp, Homo sapiens
gctcaaggccaggcc

SEQ ID NO: 193121 - DNA, 15 bp, Homo sapiens
ggctcaaggccaggc

SEQ ID NO: 193122 - DNA, 15 bp, Homo sapiens
gggctcaaggccagg

SEQ ID NO: 193123 - DNA, 15 bp, Homo sapiens
ggggctcaaggccag

SEQ ID NO: 193124 - DNA, 15 bp, Homo sapiens
aggggctcaaggcca

SEQ ID NO: 193125 - DNA, 15 bp, Homo sapiens
gaggggctcaaggcc

SEQ ID NO: 193126 - DNA, 15 bp, Homo sapiens
tgaggggctcaaggc

SEQ ID NO: 193127 - DNA, 15 bp, Homo sapiens
gtgaggggctcaagg

SEQ ID NO: 193128 - DNA, 15 bp, Homo sapiens
ggtgaggggctcaag

SEQ ID NO: 193129 - DNA, 15 bp, Homo sapiens
gggtgaggggctcaa

SEQ ID NO: 193130 - DNA, 15 bp, Homo sapiens
ggggtgaggggctca

SEQ ID NO: 193131 - DNA, 15 bp, Homo sapiens
gggggtgaggggctc

SEQ ID NO: 193132 - DNA, 15 bp, Homo sapiens
tgggggtgaggggct

SEQ ID NO: 193133 - DNA, 15 bp, Homo sapiens
ctgggggtgaggggc

SEQ ID NO: 193134 - DNA, 15 bp, Homo sapiens
cctgggggtgagggg

SEQ ID NO: 193135 - DNA, 15 bp, Homo sapiens
ccctgggggtgaggg

SEQ ID NO: 193136 - DNA, 15 bp, Homo sapiens
tccctgggggtgagg

SEQ ID NO: 193137 - DNA, 15 bp, Homo sapiens
ctccctgggggtgag

SEQ ID NO: 193138 - DNA, 15 bp, Homo sapiens
cctccctgggggtga

SEQ ID NO: 193139 - DNA, 15 bp, Homo sapiens
ccctccctgggggtg

SEQ ID NO: 193140 - DNA, 15 bp, Homo sapiens
gccctccctgggggt

SEQ ID NO: 193141 - DNA, 15 bp, Homo sapiens
tgccctccctggggg

SEQ ID NO: 193142 - DNA, 15 bp, Homo sapiens
ctgccctccctgggg

SEQ ID NO: 193143 - DNA, 15 bp, Homo sapiens
tctgccctccctggg

SEQ ID NO: 193144 - DNA, 15 bp, Homo sapiens
atctgccctccctgg

SEQ ID NO: 193145 - DNA, 15 bp, Homo sapiens
catctgccctccctg

SEQ ID NO: 193146 - DNA, 15 bp, Homo sapiens
ccatctgccctccct

SEQ ID NO: 193147 - DNA, 15 bp, Homo sapiens
gccatctgccctccc

SEQ ID NO: 193148 - DNA, 15 bp, Homo sapiens
ggccatctgccctcc

SEQ ID NO: 193149 - DNA, 15 bp, Homo sapiens
tggccatctgccctc

SEQ ID NO: 193150 - DNA, 15 bp, Homo sapiens
ctggccatctgccct

SEQ ID NO: 193151 - DNA, 15 bp, Homo sapiens
cctggccatctgccc

SEQ ID NO: 193152 - DNA, 15 bp, Homo sapiens
ccctggccatctgcc

SEQ ID NO: 193153 - DNA, 15 bp, Homo sapiens
gccctggccatctgc

SEQ ID NO: 193154 - DNA, 15 bp, Homo sapiens
cgccctggccatctg

SEQ ID NO: 193155 - DNA, 15 bp, Homo sapiens
gcgccctggccatct

SEQ ID NO: 193156 - DNA, 15 bp, Homo sapiens
ggcgccctggccatc

SEQ ID NO: 193157 - DNA, 15 bp, Homo sapiens
tggcgccctggccat

SEQ ID NO: 193158 - DNA, 15 bp, Homo sapiens
ttggcgccctggcca

SEQ ID NO: 193159 - DNA, 15 bp, Homo sapiens
cttggcgccctggcc

SEQ ID NO: 193160 - DNA, 15 bp, Homo sapiens
gcttggcgccctggc

SEQ ID NO: 193161 - DNA, 15 bp, Homo sapiens
agcttggcgccctgg

SEQ ID NO: 193162 - DNA, 15 bp, Homo sapiens
aagcttggcgccctg

SEQ ID NO: 193163 - DNA, 15 bp, Homo sapiens
caagcttggcgccct

SEQ ID NO: 193164 - DNA, 15 bp, Homo sapiens
ccaagcttggcgccc

SEQ ID NO: 193165 - DNA, 15 bp, Homo sapiens
gccaagcttggcgcc

SEQ ID NO: 193166 - DNA, 15 bp, Homo sapiens
ggccaagcttggcgc

SEQ ID NO: 193167 - DNA, 15 bp, Homo sapiens
gggccaagcttggcg

SEQ ID NO: 193168 - DNA, 15 bp, Homo sapiens
cgggccaagcttggc

SEQ ID NO: 193169 - DNA, 15 bp, Homo sapiens
acgggccaagcttgg

SEQ ID NO: 193170 - DNA, 15 bp, Homo sapiens
gacgggccaagcttg

SEQ ID NO: 193171 - DNA, 15 bp, Homo sapiens
tgacgggccaagctt

SEQ ID NO: 193172 - DNA, 15 bp, Homo sapiens
ctgacgggccaagct

SEQ ID NO: 193173 - DNA, 15 bp, Homo sapiens
gctgacgggccaagc

SEQ ID NO: 193174 - DNA, 15 bp, Homo sapiens
ggctgacgggccaag

SEQ ID NO: 193175 - DNA, 15 bp, Homo sapiens
aggctgacgggccaa

SEQ ID NO: 193176 - DNA, 15 bp, Homo sapiens
caggctgacgggcca

SEQ ID NO: 193177 - DNA, 15 bp, Homo sapiens
acaggctgacgggcc

SEQ ID NO: 193178 - DNA, 15 bp, Homo sapiens
gacaggctgacgggc

SEQ ID NO: 193179 - DNA, 15 bp, Homo sapiens
cgacaggctgacggg

SEQ ID NO: 193180 - DNA, 15 bp, Homo sapiens
gcgacaggctgacgg

SEQ ID NO: 193181 - DNA, 15 bp, Homo sapiens
ggcgacaggctgacg

SEQ ID NO: 193182 - DNA, 15 bp, Homo sapiens
aggcgacaggctgac

SEQ ID NO: 193183 - DNA, 15 bp, Homo sapiens
aaggcgacaggctga

SEQ ID NO: 193184 - DNA, 15 bp, Homo sapiens
caaggcgacaggctg

SEQ ID NO: 193185 - DNA, 15 bp, Homo sapiens
gcaaggcgacaggct

SEQ ID NO: 193186 - DNA, 15 bp, Homo sapiens
tgcaaggcgacaggc

SEQ ID NO: 193187 - DNA, 15 bp, Homo sapiens
gtgcaaggcgacagg

SEQ ID NO: 193188 - DNA, 15 bp, Homo sapiens
ggtgcaaggcgacag

SEQ ID NO: 193189 - DNA, 15 bp, Homo sapiens
tggtgcaaggcgaca

SEQ ID NO: 193190 - DNA, 15 bp, Homo sapiens
ttggtgcaaggcgac

SEQ ID NO: 193191 - DNA, 15 bp, Homo sapiens
cttggtgcaaggcga

SEQ ID NO: 193192 - DNA, 15 bp, Homo sapiens
ccttggtgcaaggcg

SEQ ID NO: 193193 - DNA, 15 bp, Homo sapiens
gccttggtgcaaggc

SEQ ID NO: 193194 - DNA, 15 bp, Homo sapiens
agccttggtgcaagg

SEQ ID NO: 193195 - DNA, 15 bp, Homo sapiens
gagccttggtgcaag

SEQ ID NO: 193196 - DNA, 15 bp, Homo sapiens
agagccttggtgcaa

SEQ ID NO: 193197 - DNA, 15 bp, Homo sapiens
cagagccttggtgca

SEQ ID NO: 193198 - DNA, 15 bp, Homo sapiens
ccagagccttggtgc

SEQ ID NO: 193199 - DNA, 15 bp, Homo sapiens
gccagagccttggtg

SEQ ID NO: 193200 - DNA, 15 bp, Homo sapiens
cgccagagccttggt

SEQ ID NO: 193201 - DNA, 15 bp, Homo sapiens
gcgccagagccttgg

SEQ ID NO: 193202 - DNA, 15 bp, Homo sapiens
ggcgccagagccttg

SEQ ID NO: 193203 - DNA, 15 bp, Homo sapiens
aggcgccagagcctt

SEQ ID NO: 193204 - DNA, 15 bp, Homo sapiens
caggcgccagagcct

SEQ ID NO: 193205 - DNA, 15 bp, Homo sapiens
acaggcgccagagcc

SEQ ID NO: 193206 - DNA, 15 bp, Homo sapiens
cacaggcgccagagc

SEQ ID NO: 193207 - DNA, 15 bp, Homo sapiens
gcacaggcgccagag

SEQ ID NO: 193208 - DNA, 15 bp, Homo sapiens
agcacaggcgccaga

SEQ ID NO: 193209 - DNA, 15 bp, Homo sapiens
cagcacaggcgccag

SEQ ID NO: 193210 - DNA, 15 bp, Homo sapiens
acagcacaggcgcca

SEQ ID NO: 193211 - DNA, 15 bp, Homo sapiens
cacagcacaggcgcc

SEQ ID NO: 193212 - DNA, 15 bp, Homo sapiens
tcacagcacaggcgc

SEQ ID NO: 193213 - DNA, 15 bp, Homo sapiens
gtcacagcacaggcg

SEQ ID NO: 193214 - DNA, 15 bp, Homo sapiens
ggtcacagcacaggc

SEQ ID NO: 193215 - DNA, 15 bp, Homo sapiens
gggtcacagcacagg

SEQ ID NO: 193216 - DNA, 15 bp, Homo sapiens
ggggtcacagcacag

SEQ ID NO: 193217 - DNA, 15 bp, Homo sapiens
aggggtcacagcaca

SEQ ID NO: 193218 - DNA, 15 bp, Homo sapiens
caggggtcacagcac

SEQ ID NO: 193219 - DNA, 15 bp, Homo sapiens
gcaggggtcacagca

SEQ ID NO: 193220 - DNA, 15 bp, Homo sapiens
ggcaggggtcacagc

SEQ ID NO: 193221 - DNA, 15 bp, Homo sapiens
gggcaggggtcacag

SEQ ID NO: 193222 - DNA, 15 bp, Homo sapiens
ggggcaggggtcaca

SEQ ID NO: 193223 - DNA, 15 bp, Homo sapiens
aggggcaggggtcac

SEQ ID NO: 193224 - DNA, 15 bp, Homo sapiens
caggggcaggggtca

SEQ ID NO: 193225 - DNA, 15 bp, Homo sapiens
gcaggggcaggggtc

SEQ ID NO: 193226 - DNA, 15 bp, Homo sapiens
agcaggggcaggggt

SEQ ID NO: 193227 - DNA, 15 bp, Homo sapiens
cagcaggggcagggg

SEQ ID NO: 193228 - DNA, 15 bp, Homo sapiens
tcagcaggggcaggg

SEQ ID NO: 193229 - DNA, 15 bp, Homo sapiens
atcagcaggggcagg

SEQ ID NO: 193230 - DNA, 15 bp, Homo sapiens
catcagcaggggcag

SEQ ID NO: 193231 - DNA, 15 bp, Homo sapiens
tcatcagcaggggca

SEQ ID NO: 193232 - DNA, 15 bp, Homo sapiens
atcatcagcaggggc

SEQ ID NO: 193233 - DNA, 15 bp, Homo sapiens
catcatcagcagggg

SEQ ID NO: 193234 - DNA, 15 bp, Homo sapiens
tcatcatcagcaggg

SEQ ID NO: 193235 - DNA, 15 bp, Homo sapiens
ttcatcatcagcagg

SEQ ID NO: 193236 - DNA, 15 bp, Homo sapiens
tttcatcatcagcag

SEQ ID NO: 193237 - DNA, 15 bp, Homo sapiens
gtttcatcatcagca

SEQ ID NO: 193238 - DNA, 15 bp, Homo sapiens
ggtttcatcatcagc

SEQ ID NO: 193239 - DNA, 15 bp, Homo sapiens
aggtttcatcatcag

SEQ ID NO: 193240 - DNA, 15 bp, Homo sapiens
caggtttcatcatca

SEQ ID NO: 193241 - DNA, 15 bp, Homo sapiens
acaggtttcatcatc

SEQ ID NO: 193242 - DNA, 15 bp, Homo sapiens
gacaggtttcatcat

SEQ ID NO: 193243 - DNA, 15 bp, Homo sapiens
ggacaggtttcatca

SEQ ID NO: 193244 - DNA, 15 bp, Homo sapiens
aggacaggtttcatc

SEQ ID NO: 193245 - DNA, 15 bp, Homo sapiens
gaggacaggtttcat

SEQ ID NO: 193246 - DNA, 15 bp, Homo sapiens
tgaggacaggtttca

SEQ ID NO: 193247 - DNA, 15 bp, Homo sapiens
ctgaggacaggtttc

SEQ ID NO: 193248 - DNA, 15 bp, Homo sapiens
gctgaggacaggttt

SEQ ID NO: 193249 - DNA, 15 bp, Homo sapiens
agctgaggacaggtt

SEQ ID NO: 193250 - DNA, 15 bp, Homo sapiens
cagctgaggacaggt

SEQ ID NO: 193251 - DNA, 15 bp, Homo sapiens
tcagctgaggacagg

SEQ ID NO: 193252 - DNA, 15 bp, Homo sapiens
ctcagctgaggacag

SEQ ID NO: 193253 - DNA, 15 bp, Homo sapiens
tctcagctgaggaca

SEQ ID NO: 193254 - DNA, 15 bp, Homo sapiens
atctcagctgaggac

SEQ ID NO: 193255 - DNA, 15 bp, Homo sapiens
catctcagctgagga

SEQ ID NO: 193256 - DNA, 15 bp, Homo sapiens
gcatctcagctgagg

SEQ ID NO: 193257 - DNA, 15 bp, Homo sapiens
tgcatctcagctgag

SEQ ID NO: 193258 - DNA, 15 bp, Homo sapiens
ctgcatctcagctga

SEQ ID NO: 193259 - DNA, 15 bp, Homo sapiens
gctgcatctcagctg

SEQ ID NO: 193260 - DNA, 15 bp, Homo sapiens
cgctgcatctcagct

SEQ ID NO: 193261 - DNA, 15 bp, Homo sapiens
tcgctgcatctcagc

SEQ ID NO: 193262 - DNA, 15 bp, Homo sapiens
atcgctgcatctcag

SEQ ID NO: 193263 - DNA, 15 bp, Homo sapiens
catcgctgcatctca

SEQ ID NO: 193264 - DNA, 15 bp, Homo sapiens
gcatcgctgcatctc

SEQ ID NO: 193265 - DNA, 15 bp, Homo sapiens
ggcatcgctgcatct

SEQ ID NO: 193266 - DNA, 15 bp, Homo sapiens
aggcatcgctgcatc

SEQ ID NO: 193267 - DNA, 15 bp, Homo sapiens
caggcatcgctgcat

SEQ ID NO: 193268 - DNA, 15 bp, Homo sapiens
ccaggcatcgctgca

SEQ ID NO: 193269 - DNA, 15 bp, Homo sapiens
accaggcatcgctgc

SEQ ID NO: 193270 - DNA, 15 bp, Homo sapiens
taccaggcatcgctg

SEQ ID NO: 193271 - DNA, 15 bp, Homo sapiens
ctaccaggcatcgct

SEQ ID NO: 193272 - DNA, 15 bp, Homo sapiens
cctaccaggcatcgc

SEQ ID NO: 193273 - DNA, 15 bp, Homo sapiens
ccctaccaggcatcg

SEQ ID NO: 193274 - DNA, 15 bp, Homo sapiens
gccctaccaggcatc

SEQ ID NO: 193275 - DNA, 15 bp, Homo sapiens
agccctaccaggcat

SEQ ID NO: 193276 - DNA, 15 bp, Homo sapiens
cagccctaccaggca

SEQ ID NO: 193277 - DNA, 15 bp, Homo sapiens
ccagccctaccaggc

SEQ ID NO: 193278 - DNA, 15 bp, Homo sapiens
cccagccctaccagg

SEQ ID NO: 193279 - DNA, 15 bp, Homo sapiens
ccccagccctaccag

SEQ ID NO: 193280 - DNA, 15 bp, Homo sapiens
cccccagccctacca

SEQ ID NO: 193281 - DNA, 15 bp, Homo sapiens
gcccccagccctacc

SEQ ID NO: 193282 - DNA, 15 bp, Homo sapiens
agcccccagccctac

SEQ ID NO: 193283 - DNA, 15 bp, Homo sapiens
cagcccccagcccta

SEQ ID NO: 193284 - DNA, 15 bp, Homo sapiens
gcagcccccagccct

SEQ ID NO: 193285 - DNA, 15 bp, Homo sapiens
agcagcccccagccc

SEQ ID NO: 193286 - DNA, 15 bp, Homo sapiens
gagcagcccccagcc

SEQ ID NO: 193287 - DNA, 15 bp, Homo sapiens
ggagcagcccccagc

SEQ ID NO: 193288 - DNA, 15 bp, Homo sapiens
aggagcagcccccag

SEQ ID NO: 193289 - DNA, 15 bp, Homo sapiens
caggagcagccccca

SEQ ID NO: 193290 - DNA, 15 bp, Homo sapiens
acaggagcagccccc

SEQ ID NO: 193291 - DNA, 15 bp, Homo sapiens
cacaggagcagcccc

SEQ ID NO: 193292 - DNA, 15 bp, Homo sapiens
acacaggagcagccc

SEQ ID NO: 193293 - DNA, 15 bp, Homo sapiens
gacacaggagcagcc

SEQ ID NO: 193294 - DNA, 15 bp, Homo sapiens
agacacaggagcagc

SEQ ID NO: 193295 - DNA, 15 bp, Homo sapiens
gagacacaggagcag

SEQ ID NO: 193296 - DNA, 15 bp, Homo sapiens
ggagacacaggagca

SEQ ID NO: 193297 - DNA, 15 bp, Homo sapiens
gggagacacaggagc

SEQ ID NO: 193298 - DNA, 15 bp, Homo sapiens
ggggagacacaggag

SEQ ID NO: 193299 - DNA, 15 bp, Homo sapiens
tggggagacacagga

SEQ ID NO: 193300 - DNA, 15 bp, Homo sapiens
ctggggagacacagg

SEQ ID NO: 193301 - DNA, 15 bp, Homo sapiens
cctggggagacacag

SEQ ID NO: 193302 - DNA, 15 bp, Homo sapiens
acctggggagacaca

SEQ ID NO: 193303 - DNA, 15 bp, Homo sapiens
cacctggggagacac

SEQ ID NO: 193304 - DNA, 15 bp, Homo sapiens
tcacctggggagaca

SEQ ID NO: 193305 - DNA, 15 bp, Homo sapiens
ctcacctggggagac

SEQ ID NO: 193306 - DNA, 15 bp, Homo sapiens
gctcacctggggaga

SEQ ID NO: 193307 - DNA, 15 bp, Homo sapiens
tgctcacctggggag

SEQ ID NO: 193308 - DNA, 15 bp, Homo sapiens
gtgctcacctgggga

SEQ ID NO: 193309 - DNA, 15 bp, Homo sapiens
tgtgctcacctgggg

SEQ ID NO: 193310 - DNA, 15 bp, Homo sapiens
gtgtgctcacctggg

SEQ ID NO: 193311 - DNA, 15 bp, Homo sapiens
ggtgtgctcacctgg

SEQ ID NO: 193312 - DNA, 15 bp, Homo sapiens
gggtgtgctcacctg

SEQ ID NO: 193313 - DNA, 15 bp, Homo sapiens
ggggtgtgctcacct

SEQ ID NO: 193314 - DNA, 15 bp, Homo sapiens
aggggtgtgctcacc

SEQ ID NO: 193315 - DNA, 15 bp, Homo sapiens
taggggtgtgctcac

SEQ ID NO: 193316 - DNA, 15 bp, Homo sapiens
ataggggtgtgctca

SEQ ID NO: 193317 - DNA, 15 bp, Homo sapiens
aataggggtgtgctc

SEQ ID NO: 193318 - DNA, 15 bp, Homo sapiens
gaataggggtgtgct

SEQ ID NO: 193319 - DNA, 15 bp, Homo sapiens
tgaataggggtgtgc

SEQ ID NO: 193320 - DNA, 15 bp, Homo sapiens
gtgaataggggtgtg

SEQ ID NO: 193321 - DNA, 15 bp, Homo sapiens
agtgaataggggtgt

SEQ ID NO: 193322 - DNA, 15 bp, Homo sapiens
cagtgaataggggtg

SEQ ID NO: 193323 - DNA, 15 bp, Homo sapiens
ccagtgaataggggt

SEQ ID NO: 193324 - DNA, 15 bp, Homo sapiens
cccagtgaatagggg

SEQ ID NO: 193325 - DNA, 15 bp, Homo sapiens
gcccagtgaataggg

SEQ ID NO: 193326 - DNA, 15 bp, Homo sapiens
ggcccagtgaatagg

SEQ ID NO: 193327 - DNA, 15 bp, Homo sapiens
gggcccagtgaatag

SEQ ID NO: 193328 - DNA, 15 bp, Homo sapiens
agggcccagtgaata

SEQ ID NO: 193329 - DNA, 15 bp, Homo sapiens
cagggcccagtgaat

SEQ ID NO: 193330 - DNA, 15 bp, Homo sapiens
gcagggcccagtgaa

SEQ ID NO: 193331 - DNA, 15 bp, Homo sapiens
agcagggcccagtga

SEQ ID NO: 193332 - DNA, 15 bp, Homo sapiens
aagcagggcccagtg

SEQ ID NO: 193333 - DNA, 15 bp, Homo sapiens
gaagcagggcccagt

SEQ ID NO: 193334 - DNA, 15 bp, Homo sapiens
tgaagcagggcccag

SEQ ID NO: 193335 - DNA, 15 bp, Homo sapiens
ctgaagcagggccca

SEQ ID NO: 193336 - DNA, 15 bp, Homo sapiens
gctgaagcagggccc

SEQ ID NO: 193337 - DNA, 15 bp, Homo sapiens
ggctgaagcagggcc

SEQ ID NO: 193338 - DNA, 15 bp, Homo sapiens
aggctgaagcagggc

SEQ ID NO: 193339 - DNA, 15 bp, Homo sapiens
caggctgaagcaggg

SEQ ID NO: 193340 - DNA, 15 bp, Homo sapiens
gcaggctgaagcagg

SEQ ID NO: 193341 - DNA, 15 bp, Homo sapiens
tgcaggctgaagcag

SEQ ID NO: 193342 - DNA, 15 bp, Homo sapiens
ctgcaggctgaagca

SEQ ID NO: 193343 - DNA, 15 bp, Homo sapiens
gctgcaggctgaagc

SEQ ID NO: 193344 - DNA, 15 bp, Homo sapiens
tgctgcaggctgaag

SEQ ID NO: 193345 - DNA, 15 bp, Homo sapiens
gtgctgcaggctgaa

SEQ ID NO: 193346 - DNA, 15 bp, Homo sapiens
ggtgctgcaggctga

SEQ ID NO: 193347 - DNA, 15 bp, Homo sapiens
gggtgctgcaggctg

SEQ ID NO: 193348 - DNA, 15 bp, Homo sapiens
agggtgctgcaggct

SEQ ID NO: 193349 - DNA, 15 bp, Homo sapiens
aagggtgctgcaggc

SEQ ID NO: 193350 - DNA, 15 bp, Homo sapiens
gaagggtgctgcagg

SEQ ID NO: 193351 - DNA, 15 bp, Homo sapiens
tgaagggtgctgcag

SEQ ID NO: 193352 - DNA, 15 bp, Homo sapiens
ttgaagggtgctgca

SEQ ID NO: 193353 - DNA, 15 bp, Homo sapiens
gttgaagggtgctgc

SEQ ID NO: 193354 - DNA, 15 bp, Homo sapiens
agttgaagggtgctg

SEQ ID NO: 193355 - DNA, 15 bp, Homo sapiens
gagttgaagggtgct

SEQ ID NO: 193356 - DNA, 15 bp, Homo sapiens
ggagttgaagggtgc

SEQ ID NO: 193357 - DNA, 15 bp, Homo sapiens
gggagttgaagggtg

SEQ ID NO: 193358 - DNA, 15 bp, Homo sapiens
tgggagttgaagggt

SEQ ID NO: 193359 - DNA, 15 bp, Homo sapiens
ctgggagttgaaggg

SEQ ID NO: 193360 - DNA, 15 bp, Homo sapiens
cctgggagttgaagg

SEQ ID NO: 193361 - DNA, 15 bp, Homo sapiens
tcctgggagttgaag

SEQ ID NO: 193362 - DNA, 15 bp, Homo sapiens
ctcctgggagttgaa

SEQ ID NO: 193363 - DNA, 15 bp, Homo sapiens
gctcctgggagttga

SEQ ID NO: 193364 - DNA, 15 bp, Homo sapiens
agctcctgggagttg

SEQ ID NO: 193365 - DNA, 15 bp, Homo sapiens
cagctcctgggagtt

SEQ ID NO: 193366 - DNA, 15 bp, Homo sapiens
ccagctcctgggagt

SEQ ID NO: 193367 - DNA, 15 bp, Homo sapiens
cccagctcctgggag

SEQ ID NO: 193368 - DNA, 15 bp, Homo sapiens
gcccagctcctggga

SEQ ID NO: 193369 - DNA, 15 bp, Homo sapiens
agcccagctcctggg

SEQ ID NO: 193370 - DNA, 15 bp, Homo sapiens
aagcccagctcctgg

SEQ ID NO: 193371 - DNA, 15 bp, Homo sapiens
caagcccagctcctg

SEQ ID NO: 193372 - DNA, 15 bp, Homo sapiens
gcaagcccagctcct

SEQ ID NO: 193373 - DNA, 15 bp, Homo sapiens
ggcaagcccagctcc

SEQ ID NO: 193374 - DNA, 15 bp, Homo sapiens
tggcaagcccagctc

SEQ ID NO: 193375 - DNA, 15 bp, Homo sapiens
gtggcaagcccagct

SEQ ID NO: 193376 - DNA, 15 bp, Homo sapiens
agtggcaagcccagc

SEQ ID NO: 193377 - DNA, 15 bp, Homo sapiens
gagtggcaagcccag

SEQ ID NO: 193378 - DNA, 15 bp, Homo sapiens
agagtggcaagccca

SEQ ID NO: 193379 - DNA, 15 bp, Homo sapiens
cagagtggcaagccc

SEQ ID NO: 193380 - DNA, 15 bp, Homo sapiens
gcagagtggcaagcc

SEQ ID NO: 193381 - DNA, 15 bp, Homo sapiens
agcagagtggcaagc

SEQ ID NO: 193382 - DNA, 15 bp, Homo sapiens
gagcagagtggcaag

SEQ ID NO: 193383 - DNA, 15 bp, Homo sapiens
tgagcagagtggcaa

SEQ ID NO: 193384 - DNA, 15 bp, Homo sapiens
gtgagcagagtggca

SEQ ID NO: 193385 - DNA, 15 bp, Homo sapiens
ggtgagcagagtggc

SEQ ID NO: 193386 - DNA, 15 bp, Homo sapiens
aggtgagcagagtgg

SEQ ID NO: 193387 - DNA, 15 bp, Homo sapiens
aaggtgagcagagtg

SEQ ID NO: 193388 - DNA, 15 bp, Homo sapiens
caaggtgagcagagt

SEQ ID NO: 193389 - DNA, 15 bp, Homo sapiens
acaaggtgagcagag

SEQ ID NO: 193390 - DNA, 15 bp, Homo sapiens
cacaaggtgagcaga

SEQ ID NO: 193391 - DNA, 15 bp, Homo sapiens
ccacaaggtgagcag

SEQ ID NO: 193392 - DNA, 15 bp, Homo sapiens
tccacaaggtgagca

SEQ ID NO: 193393 - DNA, 15 bp, Homo sapiens
ctccacaaggtgagc

SEQ ID NO: 193394 - DNA, 15 bp, Homo sapiens
gctccacaaggtgag

SEQ ID NO: 193395 - DNA, 15 bp, Homo sapiens
agctccacaaggtga

SEQ ID NO: 193396 - DNA, 15 bp, Homo sapiens
gagctccacaaggtg

SEQ ID NO: 193397 - DNA, 15 bp, Homo sapiens
ggagctccacaaggt

SEQ ID NO: 193398 - DNA, 15 bp, Homo sapiens
tggagctccacaagg

SEQ ID NO: 193399 - DNA, 15 bp, Homo sapiens
atggagctccacaag

SEQ ID NO: 193400 - DNA, 15 bp, Homo sapiens
gatggagctccacaa

SEQ ID NO: 193401 - DNA, 15 bp, Homo sapiens
agatggagctccaca

SEQ ID NO: 193402 - DNA, 15 bp, Homo sapiens
cagatggagctccac

SEQ ID NO: 193403 - DNA, 15 bp, Homo sapiens
gcagatggagctcca

SEQ ID NO: 193404 - DNA, 15 bp, Homo sapiens
ggcagatggagctcc

SEQ ID NO: 193405 - DNA, 15 bp, Homo sapiens
aggcagatggagctc

SEQ ID NO: 193406 - DNA, 15 bp, Homo sapiens
aaggcagatggagct

SEQ ID NO: 193407 - DNA, 15 bp, Homo sapiens
aaaggcagatggagc

SEQ ID NO: 193408 - DNA, 15 bp, Homo sapiens
gaaaggcagatggag

SEQ ID NO: 193409 - DNA, 15 bp, Homo sapiens
ggaaaggcagatgga

SEQ ID NO: 193410 - DNA, 15 bp, Homo sapiens
aggaaaggcagatgg

SEQ ID NO: 193411 - DNA, 15 bp, Homo sapiens
gaggaaaggcagatg

SEQ ID NO: 193412 - DNA, 15 bp, Homo sapiens
ggaggaaaggcagat

SEQ ID NO: 193413 - DNA, 15 bp, Homo sapiens
gggaggaaaggcaga

SEQ ID NO: 193414 - DNA, 15 bp, Homo sapiens
ggggaggaaaggcag

SEQ ID NO: 193415 - DNA, 15 bp, Homo sapiens
tggggaggaaaggca

SEQ ID NO: 193416 - DNA, 15 bp, Homo sapiens
ttggggaggaaaggc

SEQ ID NO: 193417 - DNA, 15 bp, Homo sapiens
attggggaggaaagg

SEQ ID NO: 193418 - DNA, 15 bp, Homo sapiens
aattggggaggaaag

SEQ ID NO: 193419 - DNA, 15 bp, Homo sapiens
gaattggggaggaaa

SEQ ID NO: 193420 - DNA, 15 bp, Homo sapiens
ggaattggggaggaa

SEQ ID NO: 193421 - DNA, 15 bp, Homo sapiens
gggaattggggagga

SEQ ID NO: 193422 - DNA, 15 bp, Homo sapiens
ggggaattggggagg

SEQ ID NO: 193423 - DNA, 15 bp, Homo sapiens
gggggaattggggag

SEQ ID NO: 193424 - DNA, 15 bp, Homo sapiens
tgggggaattgggga

SEQ ID NO: 193425 - DNA, 15 bp, Homo sapiens
gtgggggaattgggg

SEQ ID NO: 193426 - DNA, 15 bp, Homo sapiens
agtgggggaattggg

SEQ ID NO: 193427 - DNA, 15 bp, Homo sapiens
gagtgggggaattgg

SEQ ID NO: 193428 - DNA, 15 bp, Homo sapiens
ggagtgggggaattg

SEQ ID NO: 193429 - DNA, 15 bp, Homo sapiens
gggagtgggggaatt

SEQ ID NO: 193430 - DNA, 15 bp, Homo sapiens
agggagtgggggaat

SEQ ID NO: 193431 - DNA, 15 bp, Homo sapiens
cagggagtgggggaa

SEQ ID NO: 193432 - DNA, 15 bp, Homo sapiens
gcagggagtggggga

SEQ ID NO: 193433 - DNA, 15 bp, Homo sapiens
tgcagggagtggggg

SEQ ID NO: 193434 - DNA, 15 bp, Homo sapiens
gtgcagggagtgggg

SEQ ID NO: 193435 - DNA, 15 bp, Homo sapiens
agtgcagggagtggg

SEQ ID NO: 193436 - DNA, 15 bp, Homo sapiens
gagtgcagggagtgg

SEQ ID NO: 193437 - DNA, 15 bp, Homo sapiens
cgagtgcagggagtg

SEQ ID NO: 193438 - DNA, 15 bp, Homo sapiens
acgagtgcagggagt

SEQ ID NO: 193439 - DNA, 15 bp, Homo sapiens
gacgagtgcagggag

SEQ ID NO: 193440 - DNA, 15 bp, Homo sapiens
agacgagtgcaggga

SEQ ID NO: 193441 - DNA, 15 bp, Homo sapiens
gagacgagtgcaggg

SEQ ID NO: 193442 - DNA, 15 bp, Homo sapiens
agagacgagtgcagg

SEQ ID NO: 193443 - DNA, 15 bp, Homo sapiens
aagagacgagtgcag

SEQ ID NO: 193444 - DNA, 15 bp, Homo sapiens
gaagagacgagtgca

SEQ ID NO: 193445 - DNA, 15 bp, Homo sapiens
ggaagagacgagtgc

SEQ ID NO: 193446 - DNA, 15 bp, Homo sapiens
gggaagagacgagtg

SEQ ID NO: 193447 - DNA, 15 bp, Homo sapiens
tgggaagagacgagt

SEQ ID NO: 193448 - DNA, 15 bp, Homo sapiens
gtgggaagagacgag

SEQ ID NO: 193449 - DNA, 15 bp, Homo sapiens
tgtgggaagagacga

SEQ ID NO: 193450 - DNA, 15 bp, Homo sapiens
ttgtgggaagagacg

SEQ ID NO: 193451 - DNA, 15 bp, Homo sapiens
cttgtgggaagagac

SEQ ID NO: 193452 - DNA, 15 bp, Homo sapiens
tcttgtgggaagaga

SEQ ID NO: 193453 - DNA, 15 bp, Homo sapiens
ctcttgtgggaagag

SEQ ID NO: 193454 - DNA, 15 bp, Homo sapiens
gctcttgtgggaaga

SEQ ID NO: 193455 - DNA, 15 bp, Homo sapiens
ggctcttgtgggaag

SEQ ID NO: 193456 - DNA, 15 bp, Homo sapiens
gggctcttgtgggaa

SEQ ID NO: 193457 - DNA, 15 bp, Homo sapiens
agggctcttgtggga

SEQ ID NO: 193458 - DNA, 15 bp, Homo sapiens
cagggctcttgtggg

SEQ ID NO: 193459 - DNA, 15 bp, Homo sapiens
acagggctcttgtgg

SEQ ID NO: 193460 - DNA, 15 bp, Homo sapiens
gacagggctcttgtg

SEQ ID NO: 193461 - DNA, 15 bp, Homo sapiens
agacagggctcttgt

SEQ ID NO: 193462 - DNA, 15 bp, Homo sapiens
gagacagggctcttg

SEQ ID NO: 193463 - DNA, 15 bp, Homo sapiens
ggagacagggctctt

SEQ ID NO: 193464 - DNA, 15 bp, Homo sapiens
aggagacagggctct

SEQ ID NO: 193465 - DNA, 15 bp, Homo sapiens
aaggagacagggctc

SEQ ID NO: 193466 - DNA, 15 bp, Homo sapiens
aaaggagacagggct

SEQ ID NO: 193467 - DNA, 15 bp, Homo sapiens
aaaaggagacagggc

SEQ ID NO: 193468 - DNA, 15 bp, Homo sapiens
gaaaaggagacaggg

SEQ ID NO: 193469 - DNA, 15 bp, Homo sapiens
ggaaaaggagacagg

SEQ ID NO: 193470 - DNA, 15 bp, Homo sapiens
aggaaaaggagacag

SEQ ID NO: 193471 - DNA, 15 bp, Homo sapiens
taggaaaaggagaca

SEQ ID NO: 193472 - DNA, 15 bp, Homo sapiens
ctaggaaaaggagac

SEQ ID NO: 193473 - DNA, 15 bp, Homo sapiens
gctaggaaaaggaga

SEQ ID NO: 193474 - DNA, 15 bp, Homo sapiens
agctaggaaaaggag

SEQ ID NO: 193475 - DNA, 15 bp, Homo sapiens
tagctaggaaaagga

SEQ ID NO: 193476 - DNA, 15 bp, Homo sapiens
atagctaggaaaagg

SEQ ID NO: 193477 - DNA, 15 bp, Homo sapiens
aatagctaggaaaag

SEQ ID NO: 193478 - DNA, 15 bp, Homo sapiens
gaatagctaggaaaa

SEQ ID NO: 193479 - DNA, 15 bp, Homo sapiens
ggaatagctaggaaa

SEQ ID NO: 193480 - DNA, 15 bp, Homo sapiens
gggaatagctaggaa

SEQ ID NO: 193481 - DNA, 15 bp, Homo sapiens
tgggaatagctagga

SEQ ID NO: 193482 - DNA, 15 bp, Homo sapiens
atgggaatagctagg

SEQ ID NO: 193483 - DNA, 15 bp, Homo sapiens
gatgggaatagctag

SEQ ID NO: 193484 - DNA, 15 bp, Homo sapiens
agatgggaatagcta

SEQ ID NO: 193485 - DNA, 15 bp, Homo sapiens
cagatgggaatagct

SEQ ID NO: 193486 - DNA, 15 bp, Homo sapiens
tcagatgggaatagc

SEQ ID NO: 193487 - DNA, 15 bp, Homo sapiens
ctcagatgggaatag

SEQ ID NO: 193488 - DNA, 15 bp, Homo sapiens
cctcagatgggaata

SEQ ID NO: 193489 - DNA, 15 bp, Homo sapiens
gcctcagatgggaat

SEQ ID NO: 193490 - DNA, 15 bp, Homo sapiens
ggcctcagatgggaa

SEQ ID NO: 193491 - DNA, 15 bp, Homo sapiens
tggcctcagatggga

SEQ ID NO: 193492 - DNA, 15 bp, Homo sapiens
atggcctcagatggg

SEQ ID NO: 193493 - DNA, 15 bp, Homo sapiens
gatggcctcagatgg

SEQ ID NO: 193494 - DNA, 15 bp, Homo sapiens
agatggcctcagatg

SEQ ID NO: 193495 - DNA, 15 bp, Homo sapiens
aagatggcctcagat

SEQ ID NO: 193496 - DNA, 15 bp, Homo sapiens
aaagatggcctcaga

SEQ ID NO: 193497 - DNA, 15 bp, Homo sapiens
taaagatggcctcag

SEQ ID NO: 193498 - DNA, 15 bp, Homo sapiens
ataaagatggcctca

SEQ ID NO: 193499 - DNA, 15 bp, Homo sapiens
aataaagatggcctc

SEQ ID NO: 193500 - DNA, 15 bp, Homo sapiens
gaataaagatggcct

SEQ ID NO: 193501 - DNA, 15 bp, Homo sapiens
tgaataaagatggcc

SEQ ID NO: 193502 - DNA, 15 bp, Homo sapiens
atgaataaagatggc

SEQ ID NO: 193503 - DNA, 15 bp, Homo sapiens
aatgaataaagatgg

SEQ ID NO: 193504 - DNA, 15 bp, Homo sapiens
aaatgaataaagatg

SEQ ID NO: 193505 - DNA, 15 bp, Homo sapiens
taaatgaataaagat

SEQ ID NO: 193506 - DNA, 15 bp, Homo sapiens
ctaaatgaataaaga

SEQ ID NO: 193507 - DNA, 15 bp, Homo sapiens
actaaatgaataaag

SEQ ID NO: 193508 - DNA, 15 bp, Homo sapiens
aactaaatgaataaa

SEQ ID NO: 193509 - DNA, 15 bp, Homo sapiens
aaactaaatgaataa

SEQ ID NO: 193510 - DNA, 15 bp, Homo sapiens
aaaactaaatgaata

SEQ ID NO: 193511 - DNA, 15 bp, Homo sapiens
aaaaactaaatgaat

SEQ ID NO: 193512 - DNA, 15 bp, Homo sapiens
taaaaactaaatgaa

SEQ ID NO: 193513 - DNA, 15 bp, Homo sapiens
ctaaaaactaaatga

SEQ ID NO: 193514 - DNA, 15 bp, Homo sapiens
tctaaaaactaaatg

SEQ ID NO: 193515 - DNA, 15 bp, Homo sapiens
ctctaaaaactaaat

SEQ ID NO: 193516 - DNA, 15 bp, Homo sapiens
tctctaaaaactaaa

SEQ ID NO: 193517 - DNA, 15 bp, Homo sapiens
gtctctaaaaactaa

SEQ ID NO: 193518 - DNA, 15 bp, Homo sapiens
tgtctctaaaaacta

SEQ ID NO: 193519 - DNA, 15 bp, Homo sapiens
ctgtctctaaaaact

SEQ ID NO: 193520 - DNA, 15 bp, Homo sapiens
cctgtctctaaaaac

SEQ ID NO: 193521 - DNA, 15 bp, Homo sapiens
ccctgtctctaaaaa

SEQ ID NO: 193522 - DNA, 15 bp, Homo sapiens
accctgtctctaaaa

SEQ ID NO: 193523 - DNA, 15 bp, Homo sapiens
aaccctgtctctaaa

SEQ ID NO: 193524 - DNA, 15 bp, Homo sapiens
aaaccctgtctctaa

SEQ ID NO: 193525 - DNA, 15 bp, Homo sapiens
gaaaccctgtctcta

SEQ ID NO: 193526 - DNA, 15 bp, Homo sapiens
tgaaaccctgtctct

SEQ ID NO: 193527 - DNA, 15 bp, Homo sapiens
gtgaaaccctgtctc

SEQ ID NO: 193528 - DNA, 15 bp, Homo sapiens
agtgaaaccctgtct

SEQ ID NO: 193529 - DNA, 15 bp, Homo sapiens
gagtgaaaccctgtc

SEQ ID NO: 193530 - DNA, 15 bp, Homo sapiens
agagtgaaaccctgt

SEQ ID NO: 193531 - DNA, 15 bp, Homo sapiens
gagagtgaaaccctg

SEQ ID NO: 193532 - DNA, 15 bp, Homo sapiens
tgagagtgaaaccct

SEQ ID NO: 193533 - DNA, 15 bp, Homo sapiens
gtgagagtgaaaccc

SEQ ID NO: 193534 - DNA, 15 bp, Homo sapiens
ggtgagagtgaaacc

SEQ ID NO: 193535 - DNA, 15 bp, Homo sapiens
gggtgagagtgaaac

SEQ ID NO: 193536 - DNA, 15 bp, Homo sapiens
tgggtgagagtgaaa

SEQ ID NO: 193537 - DNA, 15 bp, Homo sapiens
ctgggtgagagtgaa

SEQ ID NO: 193538 - DNA, 15 bp, Homo sapiens
cctgggtgagagtga

SEQ ID NO: 193539 - DNA, 15 bp, Homo sapiens
gcctgggtgagagtg

SEQ ID NO: 193540 - DNA, 15 bp, Homo sapiens
agcctgggtgagagt

SEQ ID NO: 193541 - DNA, 15 bp, Homo sapiens
cagcctgggtgagag

SEQ ID NO: 193542 - DNA, 15 bp, Homo sapiens
ccagcctgggtgaga

SEQ ID NO: 193543 - DNA, 15 bp, Homo sapiens
cccagcctgggtgag

SEQ ID NO: 193544 - DNA, 15 bp, Homo sapiens
ccccagcctgggtga

SEQ ID NO: 193545 - DNA, 15 bp, Homo sapiens
accccagcctgggtg

SEQ ID NO: 193546 - DNA, 15 bp, Homo sapiens
caccccagcctgggt

SEQ ID NO: 193547 - DNA, 15 bp, Homo sapiens
gcaccccagcctggg

SEQ ID NO: 193548 - DNA, 15 bp, Homo sapiens
tgcaccccagcctgg

SEQ ID NO: 193549 - DNA, 15 bp, Homo sapiens
ctgcaccccagcctg

SEQ ID NO: 193550 - DNA, 15 bp, Homo sapiens
actgcaccccagcct

SEQ ID NO: 193551 - DNA, 15 bp, Homo sapiens
cactgcaccccagcc

SEQ ID NO: 193552 - DNA, 15 bp, Homo sapiens
ccactgcaccccagc

SEQ ID NO: 193553 - DNA, 15 bp, Homo sapiens
gccactgcaccccag

SEQ ID NO: 193554 - DNA, 15 bp, Homo sapiens
tgccactgcacccca

SEQ ID NO: 193555 - DNA, 15 bp, Homo sapiens
gtgccactgcacccc

SEQ ID NO: 193556 - DNA, 15 bp, Homo sapiens
tgtgccactgcaccc

SEQ ID NO: 193557 - DNA, 15 bp, Homo sapiens
gtgtgccactgcacc

SEQ ID NO: 193558 - DNA, 15 bp, Homo sapiens
tgtgtgccactgcac

SEQ ID NO: 193559 - DNA, 15 bp, Homo sapiens
ttgtgtgccactgca

SEQ ID NO: 193560 - DNA, 15 bp, Homo sapiens
attgtgtgccactgc

SEQ ID NO: 193561 - DNA, 15 bp, Homo sapiens
gattgtgtgccactg

SEQ ID NO: 193562 - DNA, 15 bp, Homo sapiens
tgattgtgtgccact

SEQ ID NO: 193563 - DNA, 15 bp, Homo sapiens
gtgattgtgtgccac

SEQ ID NO: 193564 - DNA, 15 bp, Homo sapiens
cgtgattgtgtgcca

SEQ ID NO: 193565 - DNA, 15 bp, Homo sapiens
ccgtgattgtgtgcc

SEQ ID NO: 193566 - DNA, 15 bp, Homo sapiens
gccgtgattgtgtgc

SEQ ID NO: 193567 - DNA, 15 bp, Homo sapiens
agccgtgattgtgtg

SEQ ID NO: 193568 - DNA, 15 bp, Homo sapiens
gagccgtgattgtgt

SEQ ID NO: 193569 - DNA, 15 bp, Homo sapiens
tgagccgtgattgtg

SEQ ID NO: 193570 - DNA, 15 bp, Homo sapiens
gtgagccgtgattgt

SEQ ID NO: 193571 - DNA, 15 bp, Homo sapiens
agtgagccgtgattg

SEQ ID NO: 193572 - DNA, 15 bp, Homo sapiens
cagtgagccgtgatt

SEQ ID NO: 193573 - DNA, 15 bp, Homo sapiens
gcagtgagccgtgat

SEQ ID NO: 193574 - DNA, 15 bp, Homo sapiens
tgcagtgagccgtga

SEQ ID NO: 193575 - DNA, 15 bp, Homo sapiens
ctgcagtgagccgtg

SEQ ID NO: 193576 - DNA, 15 bp, Homo sapiens
gctgcagtgagccgt

SEQ ID NO: 193577 - DNA, 15 bp, Homo sapiens
ggctgcagtgagccg

SEQ ID NO: 193578 - DNA, 15 bp, Homo sapiens
aggctgcagtgagcc

SEQ ID NO: 193579 - DNA, 15 bp, Homo sapiens
tggtcaaggctgcag

SEQ ID NO: 193580 - DNA, 15 bp, Homo sapiens
ttggtcaaggctgca

SEQ ID NO: 193581 - DNA, 15 bp, Homo sapiens
gttggtcaaggctgc

SEQ ID NO: 193582 - DNA, 15 bp, Homo sapiens
agttggtcaaggctg

SEQ ID NO: 193583 - DNA, 15 bp, Homo sapiens
tagttggtcaaggct

SEQ ID NO: 193584 - DNA, 15 bp, Homo sapiens
gtagttggtcaaggc

SEQ ID NO: 193585 - DNA, 15 bp, Homo sapiens
tgtagttggtcaagg

SEQ ID NO: 193586 - DNA, 15 bp, Homo sapiens
ctgtagttggtcaag

SEQ ID NO: 193587 - DNA, 15 bp, Homo sapiens
cctgtagttggtcaa

SEQ ID NO: 193588 - DNA, 15 bp, Homo sapiens
acctgtagttggtca

SEQ ID NO: 193589 - DNA, 15 bp, Homo sapiens
cacctgtagttggtc

SEQ ID NO: 193590 - DNA, 15 bp, Homo sapiens
gcacctgtagttggt

SEQ ID NO: 193591 - DNA, 15 bp, Homo sapiens
cgcacctgtagttgg

SEQ ID NO: 193592 - DNA, 15 bp, Homo sapiens
acgcacctgtagttg

SEQ ID NO: 193593 - DNA, 15 bp, Homo sapiens
tacgcacctgtagtt

SEQ ID NO: 193594 - DNA, 15 bp, Homo sapiens
ctacgcacctgtagt

SEQ ID NO: 193595 - DNA, 15 bp, Homo sapiens
gctacgcacctgtag

SEQ ID NO: 193596 - DNA, 15 bp, Homo sapiens
tgctacgcacctgta

SEQ ID NO: 193597 - DNA, 15 bp, Homo sapiens
gtgctacgcacctgt

SEQ ID NO: 193598 - DNA, 15 bp, Homo sapiens
ggtgctacgcacctg

SEQ ID NO: 193599 - DNA, 15 bp, Homo sapiens
tggtgctacgcacct

SEQ ID NO: 193600 - DNA, 15 bp, Homo sapiens
gtggtgctacgcacc

SEQ ID NO: 193601 - DNA, 15 bp, Homo sapiens
tgtggtgctacgcac

SEQ ID NO: 193602 - DNA, 15 bp, Homo sapiens
ctgtggtgctacgca

SEQ ID NO: 193603 - DNA, 15 bp, Homo sapiens
gctgtggtgctacgc

SEQ ID NO: 193604 - DNA, 15 bp, Homo sapiens
ggctgtggtgctacg

SEQ ID NO: 193605 - DNA, 15 bp, Homo sapiens
tggctgtggtgctac

SEQ ID NO: 193606 - DNA, 15 bp, Homo sapiens
ttggctgtggtgcta

SEQ ID NO: 193607 - DNA, 15 bp, Homo sapiens
cttggctgtggtgct

SEQ ID NO: 193608 - DNA, 15 bp, Homo sapiens
acttggctgtggtgc

SEQ ID NO: 193609 - DNA, 15 bp, Homo sapiens
aacttggctgtggtg

SEQ ID NO: 193610 - DNA, 15 bp, Homo sapiens
aaacttggctgtggt

SEQ ID NO: 193611 - DNA, 15 bp, Homo sapiens
aaaacttggctgtgg

SEQ ID NO: 193612 - DNA, 15 bp, Homo sapiens
aaaaacttggctgtg

SEQ ID NO: 193613 - DNA, 15 bp, Homo sapiens
caaaaacttggctgt

SEQ ID NO: 193614 - DNA, 15 bp, Homo sapiens
acaaaaacttggctg

SEQ ID NO: 193615 - DNA, 15 bp, Homo sapiens
tacaaaaacttggct

SEQ ID NO: 193616 - DNA, 15 bp, Homo sapiens
atacaaaaacttggc

SEQ ID NO: 193617 - DNA, 15 bp, Homo sapiens
tatacaaaaacttgg

SEQ ID NO: 193618 - DNA, 15 bp, Homo sapiens
ctatacaaaaacttg

SEQ ID NO: 193619 - DNA, 15 bp, Homo sapiens
tctatacaaaaactt

SEQ ID NO: 193620 - DNA, 15 bp, Homo sapiens
atctatacaaaaact

SEQ ID NO: 193621 - DNA, 15 bp, Homo sapiens
catctatacaaaaac

SEQ ID NO: 193622 - DNA, 15 bp, Homo sapiens
ccatctatacaaaaa

SEQ ID NO: 193623 - DNA, 15 bp, Homo sapiens
cccatctatacaaaa

SEQ ID NO: 193624 - DNA, 15 bp, Homo sapiens
ccccatctatacaaa

SEQ ID NO: 193625 - DNA, 15 bp, Homo sapiens
accccatctatacaa

SEQ ID NO: 193626 - DNA, 15 bp, Homo sapiens
gaccccatctataca

SEQ ID NO: 193627 - DNA, 15 bp, Homo sapiens
agaccccatctatac

SEQ ID NO: 193628 - DNA, 15 bp, Homo sapiens
gagaccccatctata

SEQ ID NO: 193629 - DNA, 15 bp, Homo sapiens
cgagaccccatctat

SEQ ID NO: 193630 - DNA, 15 bp, Homo sapiens
gcgagaccccatcta

SEQ ID NO: 193631 - DNA, 15 bp, Homo sapiens
agcgagaccccatct

SEQ ID NO: 193632 - DNA, 15 bp, Homo sapiens
aagcgagaccccatc

SEQ ID NO: 193633 - DNA, 15 bp, Homo sapiens
aaagcgagaccccat

SEQ ID NO: 193634 - DNA, 15 bp, Homo sapiens
caaagcgagacccca

SEQ ID NO: 193635 - DNA, 15 bp, Homo sapiens
acaaagcgagacccc

SEQ ID NO: 193636 - DNA, 15 bp, Homo sapiens
aacaaagcgagaccc

SEQ ID NO: 193637 - DNA, 15 bp, Homo sapiens
taacaaagcgagacc

SEQ ID NO: 193638 - DNA, 15 bp, Homo sapiens
gtaacaaagcgagac

SEQ ID NO: 193639 - DNA, 15 bp, Homo sapiens
ggtaacaaagcgaga

SEQ ID NO: 193640 - DNA, 15 bp, Homo sapiens
gggtaacaaagcgag

SEQ ID NO: 193641 - DNA, 15 bp, Homo sapiens
tgggtaacaaagcga

SEQ ID NO: 193642 - DNA, 15 bp, Homo sapiens
ctgggtaacaaagcg

SEQ ID NO: 193643 - DNA, 15 bp, Homo sapiens
cctgggtaacaaagc

SEQ ID NO: 193644 - DNA, 15 bp, Homo sapiens
gcctgggtaacaaag

SEQ ID NO: 193645 - DNA, 15 bp, Homo sapiens
agcctgggtaacaaa

SEQ ID NO: 193646 - DNA, 15 bp, Homo sapiens
cagcctgggtaacaa

SEQ ID NO: 193647 - DNA, 15 bp, Homo sapiens
acagcctgggtaaca

SEQ ID NO: 193648 - DNA, 15 bp, Homo sapiens
cacagcctgggtaac

SEQ ID NO: 193649 - DNA, 15 bp, Homo sapiens
tcacagcctgggtaa

SEQ ID NO: 193650 - DNA, 15 bp, Homo sapiens
gtcacagcctgggta

SEQ ID NO: 193651 - DNA, 15 bp, Homo sapiens
tgtcacagcctgggt

SEQ ID NO: 193652 - DNA, 15 bp, Homo sapiens
ttgtcacagcctggg

SEQ ID NO: 193653 - DNA, 15 bp, Homo sapiens
cttgtcacagcctgg

SEQ ID NO: 193654 - DNA, 15 bp, Homo sapiens
tcttgtcacagcctg

SEQ ID NO: 193655 - DNA, 15 bp, Homo sapiens
ctcttgtcacagcct

SEQ ID NO: 193656 - DNA, 15 bp, Homo sapiens
cctcttgtcacagcc

SEQ ID NO: 193657 - DNA, 15 bp, Homo sapiens
tcctcttgtcacagc

SEQ ID NO: 193658 - DNA, 15 bp, Homo sapiens
ctcctcttgtcacag

SEQ ID NO: 193659 - DNA, 15 bp, Homo sapiens
gctcctcttgtcaca

SEQ ID NO: 193660 - DNA, 15 bp, Homo sapiens
ggctcctcttgtcac

SEQ ID NO: 193661 - DNA, 15 bp, Homo sapiens
aggctcctcttgtca

SEQ ID NO: 193662 - DNA, 15 bp, Homo sapiens
gaggctcctcttgtc

SEQ ID NO: 193663 - DNA, 15 bp, Homo sapiens
ggaggctcctcttgt

SEQ ID NO: 193664 - DNA, 15 bp, Homo sapiens
gggaggctcctcttg

SEQ ID NO: 193665 - DNA, 15 bp, Homo sapiens
tgggaggctcctctt

SEQ ID NO: 193666 - DNA, 15 bp, Homo sapiens
gtgggaggctcctct

SEQ ID NO: 193667 - DNA, 15 bp, Homo sapiens
cgtgggaggctcctc

SEQ ID NO: 193668 - DNA, 15 bp, Homo sapiens
acgtgggaggctcct

SEQ ID NO: 193669 - DNA, 15 bp, Homo sapiens
cacgtgggaggctcc

SEQ ID NO: 193670 - DNA, 15 bp, Homo sapiens
ccacgtgggaggctc

SEQ ID NO: 193671 - DNA, 15 bp, Homo sapiens
accacgtgggaggct

SEQ ID NO: 193672 - DNA, 15 bp, Homo sapiens
caccacgtgggaggc

SEQ ID NO: 193673 - DNA, 15 bp, Homo sapiens
acaccacgtgggagg

SEQ ID NO: 193674 - DNA, 15 bp, Homo sapiens
cacaccacgtgggag

SEQ ID NO: 193675 - DNA, 15 bp, Homo sapiens
ccacaccacgtggga

SEQ ID NO: 193676 - DNA, 15 bp, Homo sapiens
tccacaccacgtggg

SEQ ID NO: 193677 - DNA, 15 bp, Homo sapiens
atccacaccacgtgg

SEQ ID NO: 193678 - DNA, 15 bp, Homo sapiens
catccacaccacgtg

SEQ ID NO: 193679 - DNA, 15 bp, Homo sapiens
tcatccacaccacgt

SEQ ID NO: 193680 - DNA, 15 bp, Homo sapiens
ctcatccacaccacg

SEQ ID NO: 193681 - DNA, 15 bp, Homo sapiens
cctcatccacaccac

SEQ ID NO: 193682 - DNA, 15 bp, Homo sapiens
tcctcatccacacca

SEQ ID NO: 193683 - DNA, 15 bp, Homo sapiens
ctcctcatccacacc

SEQ ID NO: 193684 - DNA, 15 bp, Homo sapiens
cctcctcatccacac

SEQ ID NO: 193685 - DNA, 15 bp, Homo sapiens
gcctcctcatccaca

SEQ ID NO: 193686 - DNA, 15 bp, Homo sapiens
tgcctcctcatccac

SEQ ID NO: 193687 - DNA, 15 bp, Homo sapiens
ctgcctcctcatcca

SEQ ID NO: 193688 - DNA, 15 bp, Homo sapiens
tctgcctcctcatcc

SEQ ID NO: 193689 - DNA, 15 bp, Homo sapiens
atctgcctcctcatc

SEQ ID NO: 193690 - DNA, 15 bp, Homo sapiens
catctgcctcctcat

SEQ ID NO: 193691 - DNA, 15 bp, Homo sapiens
ccatctgcctcctca

SEQ ID NO: 193692 - DNA, 15 bp, Homo sapiens
gccatctgcctcctc

SEQ ID NO: 193693 - DNA, 15 bp, Homo sapiens
tgccatctgcctcct

SEQ ID NO: 193694 - DNA, 15 bp, Homo sapiens
ctgccatctgcctcc

SEQ ID NO: 193695 - DNA, 15 bp, Homo sapiens
cctgccatctgcctc

SEQ ID NO: 193696 - DNA, 15 bp, Homo sapiens
ccctgccatctgcct

SEQ ID NO: 193697 - DNA, 15 bp, Homo sapiens
gccctgccatctgcc

SEQ ID NO: 193698 - DNA, 15 bp, Homo sapiens
ggccctgccatctgc

SEQ ID NO: 193699 - DNA, 15 bp, Homo sapiens
aggccctgccatctg

SEQ ID NO: 193700 - DNA, 15 bp, Homo sapiens
caggccctgccatct

SEQ ID NO: 193701 - DNA, 15 bp, Homo sapiens
acaggccctgccatc

SEQ ID NO: 193702 - DNA, 15 bp, Homo sapiens
cacaggccctgccat

SEQ ID NO: 193703 - DNA, 15 bp, Homo sapiens
gcacaggccctgcca

SEQ ID NO: 193704 - DNA, 15 bp, Homo sapiens
tgcacaggccctgcc

SEQ ID NO: 193705 - DNA, 15 bp, Homo sapiens
atgcacaggccctgc

SEQ ID NO: 193706 - DNA, 15 bp, Homo sapiens
aatgcacaggccctg

SEQ ID NO: 193707 - DNA, 15 bp, Homo sapiens
aaatgcacaggccct

SEQ ID NO: 193708 - DNA, 15 bp, Homo sapiens
gaaatgcacaggccc

SEQ ID NO: 193709 - DNA, 15 bp, Homo sapiens
agaaatgcacaggcc

SEQ ID NO: 193710 - DNA, 15 bp, Homo sapiens
cagaaatgcacaggc

SEQ ID NO: 193711 - DNA, 15 bp, Homo sapiens
acagaaatgcacagg

SEQ ID NO: 193712 - DNA, 15 bp, Homo sapiens
cacagaaatgcacag

SEQ ID NO: 193713 - DNA, 15 bp, Homo sapiens
gcacagaaatgcaca

SEQ ID NO: 193714 - DNA, 15 bp, Homo sapiens
agcacagaaatgcac

SEQ ID NO: 193715 - DNA, 15 bp, Homo sapiens
aagcacagaaatgca

SEQ ID NO: 193716 - DNA, 15 bp, Homo sapiens
caagcacagaaatgc

SEQ ID NO: 193717 - DNA, 15 bp, Homo sapiens
tcaagcacagaaatg

SEQ ID NO: 193718 - DNA, 15 bp, Homo sapiens
ctcaagcacagaaat

SEQ ID NO: 193719 - DNA, 15 bp, Homo sapiens
actcaagcacagaaa

SEQ ID NO: 193720 - DNA, 15 bp, Homo sapiens
cactcaagcacagaa

SEQ ID NO: 193721 - DNA, 15 bp, Homo sapiens
ccactcaagcacaga

SEQ ID NO: 193722 - DNA, 15 bp, Homo sapiens
cccactcaagcacag

SEQ ID NO: 193723 - DNA, 15 bp, Homo sapiens
gcccactcaagcaca

SEQ ID NO: 193724 - DNA, 15 bp, Homo sapiens
ggcccactcaagcac

SEQ ID NO: 193725 - DNA, 15 bp, Homo sapiens
aggcccactcaagca

SEQ ID NO: 193726 - DNA, 15 bp, Homo sapiens
aaggcccactcaagc

SEQ ID NO: 193727 - DNA, 15 bp, Homo sapiens
caaggcccactcaag

SEQ ID NO: 193728 - DNA, 15 bp, Homo sapiens
tcaaggcccactcaa

SEQ ID NO: 193729 - DNA, 15 bp, Homo sapiens
ttcaaggcccactca

SEQ ID NO: 193730 - DNA, 15 bp, Homo sapiens
tttcaaggcccactc

SEQ ID NO: 193731 - DNA, 15 bp, Homo sapiens
ctttcaaggcccact

SEQ ID NO: 193732 - DNA, 15 bp, Homo sapiens
actttcaaggcccac

SEQ ID NO: 193733 - DNA, 15 bp, Homo sapiens
cactttcaaggccca

SEQ ID NO: 193734 - DNA, 15 bp, Homo sapiens
ccactttcaaggccc

SEQ ID NO: 193735 - DNA, 15 bp, Homo sapiens
accactttcaaggcc

SEQ ID NO: 193736 - DNA, 15 bp, Homo sapiens
aaccactttcaaggc

SEQ ID NO: 193737 - DNA, 15 bp, Homo sapiens
gaaccactttcaagg

SEQ ID NO: 193738 - DNA, 15 bp, Homo sapiens
tgaaccactttcaag

SEQ ID NO: 193739 - DNA, 15 bp, Homo sapiens
ctgaaccactttcaa

SEQ ID NO: 193740 - DNA, 15 bp, Homo sapiens
gctgaaccactttca

SEQ ID NO: 193741 - DNA, 15 bp, Homo sapiens
tgctgaaccactttc

SEQ ID NO: 193742 - DNA, 15 bp, Homo sapiens
ttgctgaaccacttt

SEQ ID NO: 193743 - DNA, 15 bp, Homo sapiens
gttgctgaaccactt

SEQ ID NO: 193744 - DNA, 15 bp, Homo sapiens
ggttgctgaaccact

SEQ ID NO: 193745 - DNA, 15 bp, Homo sapiens
tggttgctgaaccac

SEQ ID NO: 193746 - DNA, 15 bp, Homo sapiens
ctggttgctgaacca

SEQ ID NO: 193747 - DNA, 15 bp, Homo sapiens
cctggttgctgaacc

SEQ ID NO: 193748 - DNA, 15 bp, Homo sapiens
tcctggttgctgaac

SEQ ID NO: 193749 - DNA, 15 bp, Homo sapiens
ttcctggttgctgaa

SEQ ID NO: 193750 - DNA, 15 bp, Homo sapiens
cttcctggttgctga

SEQ ID NO: 193751 - DNA, 15 bp, Homo sapiens
tcttcctggttgctg

SEQ ID NO: 193752 - DNA, 15 bp, Homo sapiens
ttcttcctggttgct

SEQ ID NO: 193753 - DNA, 15 bp, Homo sapiens
cttcttcctggttgc

SEQ ID NO: 193754 - DNA, 15 bp, Homo sapiens
acttcttcctggttg

SEQ ID NO: 193755 - DNA, 15 bp, Homo sapiens
cacttcttcctggtt

SEQ ID NO: 193756 - DNA, 15 bp, Homo sapiens
acacttcttcctggt

SEQ ID NO: 193757 - DNA, 15 bp, Homo sapiens
aacacttcttcctgg

SEQ ID NO: 193758 - DNA, 15 bp, Homo sapiens
gaacacttcttcctg

SEQ ID NO: 193759 - DNA, 15 bp, Homo sapiens
tgaacacttcttcct

SEQ ID NO: 193760 - DNA, 15 bp, Homo sapiens
atgaacacttcttcc

SEQ ID NO: 193761 - DNA, 15 bp, Homo sapiens
aatgaacacttcttc

SEQ ID NO: 193762 - DNA, 15 bp, Homo sapiens
gaatgaacacttctt

SEQ ID NO: 193763 - DNA, 15 bp, Homo sapiens
ggaatgaacacttct

SEQ ID NO: 193764 - DNA, 15 bp, Homo sapiens
aggaatgaacacttc

SEQ ID NO: 193765 - DNA, 15 bp, Homo sapiens
gaggaatgaacactt

SEQ ID NO: 193766 - DNA, 15 bp, Homo sapiens
cgaggaatgaacact

SEQ ID NO: 193767 - DNA, 15 bp, Homo sapiens
tcgaggaatgaacac

SEQ ID NO: 193768 - DNA, 15 bp, Homo sapiens
gtcgaggaatgaaca

SEQ ID NO: 193769 - DNA, 15 bp, Homo sapiens
tgtcgaggaatgaac

SEQ ID NO: 193770 - DNA, 15 bp, Homo sapiens
ttgtcgaggaatgaa

SEQ ID NO: 193771 - DNA, 15 bp, Homo sapiens
gttgtcgaggaatga

SEQ ID NO: 193772 - DNA, 15 bp, Homo sapiens
tgttgtcgaggaatg

SEQ ID NO: 193773 - DNA, 15 bp, Homo sapiens
ttgttgtcgaggaat

SEQ ID NO: 193774 - DNA, 15 bp, Homo sapiens
gttgttgtcgaggaa

SEQ ID NO: 193775 - DNA, 15 bp, Homo sapiens
tgttgttgtcgagga

SEQ ID NO: 193776 - DNA, 15 bp, Homo sapiens
atgttgttgtcgagg

SEQ ID NO: 193777 - DNA, 15 bp, Homo sapiens
gatgttgttgtcgag

SEQ ID NO: 193778 - DNA, 15 bp, Homo sapiens
ggatgttgttgtcga

SEQ ID NO: 193779 - DNA, 15 bp, Homo sapiens
gggatgttgttgtcg

SEQ ID NO: 193780 - DNA, 15 bp, Homo sapiens
ggggatgttgttgtc

SEQ ID NO: 193781 - DNA, 15 bp, Homo sapiens
cggggatgttgttgt

SEQ ID NO: 193782 - DNA, 15 bp, Homo sapiens
ccggggatgttgttg

SEQ ID NO: 193783 - DNA, 15 bp, Homo sapiens
cccggggatgttgtt

SEQ ID NO: 193784 - DNA, 15 bp, Homo sapiens
gcccggggatgttgt

SEQ ID NO: 193785 - DNA, 15 bp, Homo sapiens
agcccggggatgttg

SEQ ID NO: 193786 - DNA, 15 bp, Homo sapiens
gagcccggggatgtt

SEQ ID NO: 193787 - DNA, 15 bp, Homo sapiens
agagcccggggatgt

SEQ ID NO: 193788 - DNA, 15 bp, Homo sapiens
cagagcccggggatg

SEQ ID NO: 193789 - DNA, 15 bp, Homo sapiens
ccagagcccggggat

SEQ ID NO: 193790 - DNA, 15 bp, Homo sapiens
accagagcccgggga

SEQ ID NO: 193791 - DNA, 15 bp, Homo sapiens
caccagagcccgggg

SEQ ID NO: 193792 - DNA, 15 bp, Homo sapiens
tcaccagagcccggg

SEQ ID NO: 193793 - DNA, 15 bp, Homo sapiens
gtcaccagagcccgg

SEQ ID NO: 193794 - DNA, 15 bp, Homo sapiens
agtcaccagagcccg

SEQ ID NO: 193795 - DNA, 15 bp, Homo sapiens
aagtcaccagagccc

SEQ ID NO: 193796 - DNA, 15 bp, Homo sapiens
caagtcaccagagcc

SEQ ID NO: 193797 - DNA, 15 bp, Homo sapiens
ccaagtcaccagagc

SEQ ID NO: 193798 - DNA, 15 bp, Homo sapiens
gccaagtcaccagag

SEQ ID NO: 193799 - DNA, 15 bp, Homo sapiens
agccaagtcaccaga

SEQ ID NO: 193800 - DNA, 15 bp, Homo sapiens
cagccaagtcaccag

SEQ ID NO: 193801 - DNA, 15 bp, Homo sapiens
tcagccaagtcacca

SEQ ID NO: 193802 - DNA, 15 bp, Homo sapiens
gtcagccaagtcacc

SEQ ID NO: 193803 - DNA, 15 bp, Homo sapiens
tgtcagccaagtcac

SEQ ID NO: 193804 - DNA, 15 bp, Homo sapiens
gtgtcagccaagtca

SEQ ID NO: 193805 - DNA, 15 bp, Homo sapiens
agtgtcagccaagtc

SEQ ID NO: 193806 - DNA, 15 bp, Homo sapiens
cagtgtcagccaagt

SEQ ID NO: 193807 - DNA, 15 bp, Homo sapiens
ccagtgtcagccaag

SEQ ID NO: 193808 - DNA, 15 bp, Homo sapiens
tccagtgtcagccaa

SEQ ID NO: 193809 - DNA, 15 bp, Homo sapiens
atccagtgtcagcca

SEQ ID NO: 193810 - DNA, 15 bp, Homo sapiens
catccagtgtcagcc

SEQ ID NO: 193811 - DNA, 15 bp, Homo sapiens
ccatccagtgtcagc

SEQ ID NO: 193812 - DNA, 15 bp, Homo sapiens
gccatccagtgtcag

SEQ ID NO: 193813 - DNA, 15 bp, Homo sapiens
ggccatccagtgtca

SEQ ID NO: 193814 - DNA, 15 bp, Homo sapiens
gggccatccagtgtc

SEQ ID NO: 193815 - DNA, 15 bp, Homo sapiens
agggccatccagtgt

SEQ ID NO: 193816 - DNA, 15 bp, Homo sapiens
cagggccatccagtg

SEQ ID NO: 193817 - DNA, 15 bp, Homo sapiens
ccagggccatccagt

SEQ ID NO: 193818 - DNA, 15 bp, Homo sapiens
tccagggccatccag

SEQ ID NO: 193819 - DNA, 15 bp, Homo sapiens
ttccagggccatcca

SEQ ID NO: 193820 - DNA, 15 bp, Homo sapiens
attccagggccatcc

SEQ ID NO: 193821 - DNA, 15 bp, Homo sapiens
cattccagggccatc

SEQ ID NO: 193822 - DNA, 15 bp, Homo sapiens
tcattccagggccat

SEQ ID NO: 193823 - DNA, 15 bp, Homo sapiens
ttcattccagggcca

SEQ ID NO: 193824 - DNA, 15 bp, Homo sapiens
tttcattccagggcc

SEQ ID NO: 193825 - DNA, 15 bp, Homo sapiens
ttttcattccagggc

SEQ ID NO: 193826 - DNA, 15 bp, Homo sapiens
tttttcattccaggg

SEQ ID NO: 193827 - DNA, 15 bp, Homo sapiens
ctttttcattccagg

SEQ ID NO: 193828 - DNA, 15 bp, Homo sapiens
cctttttcattccag

SEQ ID NO: 193829 - DNA, 15 bp, Homo sapiens
gcctttttcattcca

SEQ ID NO: 193830 - DNA, 15 bp, Homo sapiens
tgcctttttcattcc

SEQ ID NO: 193831 - DNA, 15 bp, Homo sapiens
ttgcctttttcattc

SEQ ID NO: 193832 - DNA, 15 bp, Homo sapiens
tttgcctttttcatt

SEQ ID NO: 193833 - DNA, 15 bp, Homo sapiens
ctttgcctttttcat

SEQ ID NO: 193834 - DNA, 15 bp, Homo sapiens
tctttgcctttttca

SEQ ID NO: 193835 - DNA, 15 bp, Homo sapiens
ctctttgcctttttc

SEQ ID NO: 193836 - DNA, 15 bp, Homo sapiens
cctctttgccttttt

SEQ ID NO: 193837 - DNA, 15 bp, Homo sapiens
gcctctttgcctttt

SEQ ID NO: 193838 - DNA, 15 bp, Homo sapiens
tgcctctttgccttt

SEQ ID NO: 193839 - DNA, 15 bp, Homo sapiens
ttgcctctttgcctt

SEQ ID NO: 193840 - DNA, 15 bp, Homo sapiens
tttgcctctttgcct

SEQ ID NO: 193841 - DNA, 15 bp, Homo sapiens
ttttgcctctttgcc

SEQ ID NO: 193842 - DNA, 15 bp, Homo sapiens
attttgcctctttgc

SEQ ID NO: 193843 - DNA, 15 bp, Homo sapiens
cattttgcctctttg

SEQ ID NO: 193844 - DNA, 15 bp, Homo sapiens
acattttgcctcttt

SEQ ID NO: 193845 - DNA, 15 bp, Homo sapiens
cacattttgcctctt

SEQ ID NO: 193846 - DNA, 15 bp, Homo sapiens
gcacattttgcctct

SEQ ID NO: 193847 - DNA, 15 bp, Homo sapiens
tgcacattttgcctc

SEQ ID NO: 193848 - DNA, 15 bp, Homo sapiens
ttgcacattttgcct

SEQ ID NO: 193849 - DNA, 15 bp, Homo sapiens
cttgcacattttgcc

SEQ ID NO: 193850 - DNA, 15 bp, Homo sapiens
ccttgcacattttgc

SEQ ID NO: 193851 - DNA, 15 bp, Homo sapiens
cccttgcacattttg

SEQ ID NO: 193852 - DNA, 15 bp, Homo sapiens
gcccttgcacatttt

SEQ ID NO: 193853 - DNA, 15 bp, Homo sapiens
ggcccttgcacattt

SEQ ID NO: 193854 - DNA, 15 bp, Homo sapiens
gggcccttgcacatt

SEQ ID NO: 193855 - DNA, 15 bp, Homo sapiens
tgggcccttgcacat

SEQ ID NO: 193856 - DNA, 15 bp, Homo sapiens
atgggcccttgcaca

SEQ ID NO: 193857 - DNA, 15 bp, Homo sapiens
gatgggcccttgcac

SEQ ID NO: 193858 - DNA, 15 bp, Homo sapiens
agatgggcccttgca

SEQ ID NO: 193859 - DNA, 15 bp, Homo sapiens
cagatgggcccttgc

SEQ ID NO: 193860 - DNA, 15 bp, Homo sapiens
ccagatgggcccttg

SEQ ID NO: 193861 - DNA, 15 bp, Homo sapiens
tccagatgggccctt

SEQ ID NO: 193862 - DNA, 15 bp, Homo sapiens
ttccagatgggccct

SEQ ID NO: 193863 - DNA, 15 bp, Homo sapiens
gttccagatgggccc

SEQ ID NO: 193864 - DNA, 15 bp, Homo sapiens
ggttccagatgggcc

SEQ ID NO: 193865 - DNA, 15 bp, Homo sapiens
tggttccagatgggc

SEQ ID NO: 193866 - DNA, 15 bp, Homo sapiens
ttggttccagatggg

SEQ ID NO: 193867 - DNA, 15 bp, Homo sapiens
cttggttccagatgg

SEQ ID NO: 193868 - DNA, 15 bp, Homo sapiens
ccttggttccagatg

SEQ ID NO: 193869 - DNA, 15 bp, Homo sapiens
accttggttccagat

SEQ ID NO: 193870 - DNA, 15 bp, Homo sapiens
aaccttggttccaga

SEQ ID NO: 193871 - DNA, 15 bp, Homo sapiens
aaaccttggttccag

SEQ ID NO: 193872 - DNA, 15 bp, Homo sapiens
caaaccttggttcca

SEQ ID NO: 193873 - DNA, 15 bp, Homo sapiens
acaaaccttggttcc

SEQ ID NO: 193874 - DNA, 15 bp, Homo sapiens
aacaaaccttggttc

SEQ ID NO: 193875 - DNA, 15 bp, Homo sapiens
caacaaaccttggtt

SEQ ID NO: 193876 - DNA, 15 bp, Homo sapiens
tcaacaaaccttggt

SEQ ID NO: 193877 - DNA, 15 bp, Homo sapiens
atcaacaaaccttgg

SEQ ID NO: 193878 - DNA, 15 bp, Homo sapiens
gatcaacaaaccttg

SEQ ID NO: 193879 - DNA, 15 bp, Homo sapiens
ggatcaacaaacctt

SEQ ID NO: 193880 - DNA, 15 bp, Homo sapiens
gggatcaacaaacct

SEQ ID NO: 193881 - DNA, 15 bp, Homo sapiens
ggggatcaacaaacc

SEQ ID NO: 193882 - DNA, 15 bp, Homo sapiens
aggggatcaacaaac

SEQ ID NO: 193883 - DNA, 15 bp, Homo sapiens
caggggatcaacaaa

SEQ ID NO: 193884 - DNA, 15 bp, Homo sapiens
ccaggggatcaacaa

SEQ ID NO: 193885 - DNA, 15 bp, Homo sapiens
cccaggggatcaaca

SEQ ID NO: 193886 - DNA, 15 bp, Homo sapiens
gcccaggggatcaac

SEQ ID NO: 193887 - DNA, 15 bp, Homo sapiens
ggcccaggggatcaa

SEQ ID NO: 193888 - DNA, 15 bp, Homo sapiens
cggcccaggggatca

SEQ ID NO: 193889 - DNA, 15 bp, Homo sapiens
acggcccaggggatc

SEQ ID NO: 193890 - DNA, 15 bp, Homo sapiens
cacggcccaggggat

SEQ ID NO: 193891 - DNA, 15 bp, Homo sapiens
acacggcccagggga

SEQ ID NO: 193892 - DNA, 15 bp, Homo sapiens
cacacggcccagggg

SEQ ID NO: 193893 - DNA, 15 bp, Homo sapiens
gcacacggcccaggg

SEQ ID NO: 193894 - DNA, 15 bp, Homo sapiens
tgcacacggcccagg

SEQ ID NO: 193895 - DNA, 15 bp, Homo sapiens
gtgcacacggcccag

SEQ ID NO: 193896 - DNA, 15 bp, Homo sapiens
ggtgcacacggccca

SEQ ID NO: 193897 - DNA, 15 bp, Homo sapiens
gggtgcacacggccc

SEQ ID NO: 193898 - DNA, 15 bp, Homo sapiens
agggtgcacacggcc

SEQ ID NO: 193899 - DNA, 15 bp, Homo sapiens
cagggtgcacacggc

SEQ ID NO: 193900 - DNA, 15 bp, Homo sapiens
tcagggtgcacacgg

SEQ ID NO: 193901 - DNA, 15 bp, Homo sapiens
ctcagggtgcacacg

SEQ ID NO: 193902 - DNA, 15 bp, Homo sapiens
gctcagggtgcacac

SEQ ID NO: 193903 - DNA, 15 bp, Homo sapiens
agctcagggtgcaca

SEQ ID NO: 193904 - DNA, 15 bp, Homo sapiens
cagctcagggtgcac

SEQ ID NO: 193905 - DNA, 15 bp, Homo sapiens
ccagctcagggtgca

SEQ ID NO: 193906 - DNA, 15 bp, Homo sapiens
cccagctcagggtgc

SEQ ID NO: 193907 - DNA, 15 bp, Homo sapiens
gcccagctcagggtg

SEQ ID NO: 193908 - DNA, 15 bp, Homo sapiens
ggcccagctcagggt

SEQ ID NO: 193909 - DNA, 15 bp, Homo sapiens
aggcccagctcaggg

SEQ ID NO: 193910 - DNA, 15 bp, Homo sapiens
caggcccagctcagg

SEQ ID NO: 193911 - DNA, 15 bp, Homo sapiens
ccaggcccagctcag

SEQ ID NO: 193912 - DNA, 15 bp, Homo sapiens
accaggcccagctca

SEQ ID NO: 193913 - DNA, 15 bp, Homo sapiens
taccaggcccagctc

SEQ ID NO: 193914 - DNA, 15 bp, Homo sapiens
ctaccaggcccagct

SEQ ID NO: 193915 - DNA, 15 bp, Homo sapiens
actaccaggcccagc

SEQ ID NO: 193916 - DNA, 15 bp, Homo sapiens
cactaccaggcccag

SEQ ID NO: 193917 - DNA, 15 bp, Homo sapiens
ccactaccaggccca

SEQ ID NO: 193918 - DNA, 15 bp, Homo sapiens
tccactaccaggccc

SEQ ID NO: 193919 - DNA, 15 bp, Homo sapiens
ttccactaccaggcc

SEQ ID NO: 193920 - DNA, 15 bp, Homo sapiens
tttccactaccaggc

SEQ ID NO: 193921 - DNA, 15 bp, Homo sapiens
ctttccactaccagg

SEQ ID NO: 193922 - DNA, 15 bp, Homo sapiens
cctttccactaccag

SEQ ID NO: 193923 - DNA, 15 bp, Homo sapiens
tcctttccactacca

SEQ ID NO: 193924 - DNA, 15 bp, Homo sapiens
ttcctttccactacc

SEQ ID NO: 193925 - DNA, 15 bp, Homo sapiens
attcctttccactac

SEQ ID NO: 193926 - DNA, 15 bp, Homo sapiens
cattcctttccacta

SEQ ID NO: 193927 - DNA, 15 bp, Homo sapiens
tcattcctttccact

SEQ ID NO: 193928 - DNA, 15 bp, Homo sapiens
ttcattcctttccac

SEQ ID NO: 193929 - DNA, 15 bp, Homo sapiens
cttcattcctttcca

SEQ ID NO: 193930 - DNA, 15 bp, Homo sapiens
ccttcattcctttcc

SEQ ID NO: 193931 - DNA, 15 bp, Homo sapiens
gccttcattcctttc

SEQ ID NO: 193932 - DNA, 15 bp, Homo sapiens
tgccttcattccttt

SEQ ID NO: 193933 - DNA, 15 bp, Homo sapiens
gtgccttcattcctt

SEQ ID NO: 193934 - DNA, 15 bp, Homo sapiens
agtgccttcattcct

SEQ ID NO: 193935 - DNA, 15 bp, Homo sapiens
cagtgccttcattcc

SEQ ID NO: 193936 - DNA, 15 bp, Homo sapiens
gcagtgccttcattc

SEQ ID NO: 193937 - DNA, 15 bp, Homo sapiens
tgcagtgccttcatt

SEQ ID NO: 193938 - DNA, 15 bp, Homo sapiens
ctgcagtgccttcat

SEQ ID NO: 193939 - DNA, 15 bp, Homo sapiens
actgcagtgccttca

SEQ ID NO: 193940 - DNA, 15 bp, Homo sapiens
gactgcagtgccttc

SEQ ID NO: 193941 - DNA, 15 bp, Homo sapiens
tgactgcagtgcctt

SEQ ID NO: 193942 - DNA, 15 bp, Homo sapiens
ctgactgcagtgcct

SEQ ID NO: 193943 - DNA, 15 bp, Homo sapiens
cctgactgcagtgcc

SEQ ID NO: 193944 - DNA, 15 bp, Homo sapiens
gcctgactgcagtgc

SEQ ID NO: 193945 - DNA, 15 bp, Homo sapiens
tgcctgactgcagtg

SEQ ID NO: 193946 - DNA, 15 bp, Homo sapiens
ctgcctgactgcagt

SEQ ID NO: 193947 - DNA, 15 bp, Homo sapiens
gctgcctgactgcag

SEQ ID NO: 193948 - DNA, 15 bp, Homo sapiens
ggctgcctgactgca

SEQ ID NO: 193949 - DNA, 15 bp, Homo sapiens
aggctgcctgactgc

SEQ ID NO: 193950 - DNA, 15 bp, Homo sapiens
caggctgcctgactg

SEQ ID NO: 193951 - DNA, 15 bp, Homo sapiens
ccaggctgcctgact

SEQ ID NO: 193952 - DNA, 15 bp, Homo sapiens
cccaggctgcctgac

SEQ ID NO: 193953 - DNA, 15 bp, Homo sapiens
acccaggctgcctga

SEQ ID NO: 193954 - DNA, 15 bp, Homo sapiens
aacccaggctgcctg

SEQ ID NO: 193955 - DNA, 15 bp, Homo sapiens
gaacccaggctgcct

SEQ ID NO: 193956 - DNA, 15 bp, Homo sapiens
tgaacccaggctgcc

SEQ ID NO: 193957 - DNA, 15 bp, Homo sapiens
atgaacccaggctgc

SEQ ID NO: 193958 - DNA, 15 bp, Homo sapiens
gatgaacccaggctg

SEQ ID NO: 193959 - DNA, 15 bp, Homo sapiens
ggatgaacccaggct

SEQ ID NO: 193960 - DNA, 15 bp, Homo sapiens
gggatgaacccaggc

SEQ ID NO: 193961 - DNA, 15 bp, Homo sapiens
ggggatgaacccagg

SEQ ID NO: 193962 - DNA, 15 bp, Homo sapiens
gggggatgaacccag

SEQ ID NO: 193963 - DNA, 15 bp, Homo sapiens
tgggggatgaaccca

SEQ ID NO: 193964 - DNA, 15 bp, Homo sapiens
ctgggggatgaaccc

SEQ ID NO: 193965 - DNA, 15 bp, Homo sapiens
gctgggggatgaacc

SEQ ID NO: 193966 - DNA, 15 bp, Homo sapiens
agctgggggatgaac

SEQ ID NO: 193967 - DNA, 15 bp, Homo sapiens
tagctgggggatgaa

SEQ ID NO: 193968 - DNA, 15 bp, Homo sapiens
ctagctgggggatga

SEQ ID NO: 193969 - DNA, 15 bp, Homo sapiens
actagctgggggatg

SEQ ID NO: 193970 - DNA, 15 bp, Homo sapiens
cactagctgggggat

SEQ ID NO: 193971 - DNA, 15 bp, Homo sapiens
ccactagctggggga

SEQ ID NO: 193972 - DNA, 15 bp, Homo sapiens
accactagctggggg

SEQ ID NO: 193973 - DNA, 15 bp, Homo sapiens
caccactagctgggg

SEQ ID NO: 193974 - DNA, 15 bp, Homo sapiens
acaccactagctggg

SEQ ID NO: 193975 - DNA, 15 bp, Homo sapiens
gacaccactagctgg

SEQ ID NO: 193976 - DNA, 15 bp, Homo sapiens
ggacaccactagctg

SEQ ID NO: 193977 - DNA, 15 bp, Homo sapiens
aggacaccactagct

SEQ ID NO: 193978 - DNA, 15 bp, Homo sapiens
taggacaccactagc

SEQ ID NO: 193979 - DNA, 15 bp, Homo sapiens
ttaggacaccactag

SEQ ID NO: 193980 - DNA, 15 bp, Homo sapiens
cttaggacaccacta

SEQ ID NO: 193981 - DNA, 15 bp, Homo sapiens
ccttaggacaccact

SEQ ID NO: 193982 - DNA, 15 bp, Homo sapiens
tccttaggacaccac

SEQ ID NO: 193983 - DNA, 15 bp, Homo sapiens
ttccttaggacacca

SEQ ID NO: 193984 - DNA, 15 bp, Homo sapiens
gttccttaggacacc

SEQ ID NO: 193985 - DNA, 15 bp, Homo sapiens
ggttccttaggacac

SEQ ID NO: 193986 - DNA, 15 bp, Homo sapiens
cggttccttaggaca

SEQ ID NO: 193987 - DNA, 15 bp, Homo sapiens
ccggttccttaggac

SEQ ID NO: 193988 - DNA, 15 bp, Homo sapiens
gccggttccttagga

SEQ ID NO: 193989 - DNA, 15 bp, Homo sapiens
agccggttccttagg

SEQ ID NO: 193990 - DNA, 15 bp, Homo sapiens
gagccggttccttag

SEQ ID NO: 193991 - DNA, 15 bp, Homo sapiens
ggagccggttcctta

SEQ ID NO: 193992 - DNA, 15 bp, Homo sapiens
gggagccggttcctt

SEQ ID NO: 193993 - DNA, 15 bp, Homo sapiens
ggggagccggttcct

SEQ ID NO: 193994 - DNA, 15 bp, Homo sapiens
tggggagccggttcc

SEQ ID NO: 193995 - DNA, 15 bp, Homo sapiens
ttggggagccggttc

SEQ ID NO: 193996 - DNA, 15 bp, Homo sapiens
tttggggagccggtt

SEQ ID NO: 193997 - DNA, 15 bp, Homo sapiens
ttttggggagccggt

SEQ ID NO: 193998 - DNA, 15 bp, Homo sapiens
tttttggggagccgg

SEQ ID NO: 193999 - DNA, 15 bp, Homo sapiens
gtttttggggagccg

SEQ ID NO: 194000 - DNA, 15 bp, Homo sapiens
tgtttttggggagcc

SEQ ID NO: 194001 - DNA, 15 bp, Homo sapiens
atgtttttggggagc

SEQ ID NO: 194002 - DNA, 15 bp, Homo sapiens
gatgtttttggggag

SEQ ID NO: 194003 - DNA, 15 bp, Homo sapiens
ggatgtttttgggga

SEQ ID NO: 194004 - DNA, 15 bp, Homo sapiens
gggatgtttttgggg

SEQ ID NO: 194005 - DNA, 15 bp, Homo sapiens
agggatgtttttggg

SEQ ID NO: 194006 - DNA, 15 bp, Homo sapiens
cagggatgtttttgg

SEQ ID NO: 194007 - DNA, 15 bp, Homo sapiens
ccagggatgtttttg

SEQ ID NO: 194008 - DNA, 15 bp, Homo sapiens
gccagggatgttttt

SEQ ID NO: 194009 - DNA, 15 bp, Homo sapiens
agccagggatgtttt

SEQ ID NO: 194010 - DNA, 15 bp, Homo sapiens
aagccagggatgttt

SEQ ID NO: 194011 - DNA, 15 bp, Homo sapiens
caagccagggatgtt

SEQ ID NO: 194012 - DNA, 15 bp, Homo sapiens
acaagccagggatgt

SEQ ID NO: 194013 - DNA, 15 bp, Homo sapiens
tacaagccagggatg

SEQ ID NO: 194014 - DNA, 15 bp, Homo sapiens
ctacaagccagggat

SEQ ID NO: 194015 - DNA, 15 bp, Homo sapiens
actacaagccaggga

SEQ ID NO: 194016 - DNA, 15 bp, Homo sapiens
cactacaagccaggg

SEQ ID NO: 194017 - DNA, 15 bp, Homo sapiens
gcactacaagccagg

SEQ ID NO: 194018 - DNA, 15 bp, Homo sapiens
agcactacaagccag

SEQ ID NO: 194019 - DNA, 15 bp, Homo sapiens
aagcactacaagcca

SEQ ID NO: 194020 - DNA, 15 bp, Homo sapiens
caagcactacaagcc

SEQ ID NO: 194021 - DNA, 15 bp, Homo sapiens
gcaagcactacaagc

SEQ ID NO: 194022 - DNA, 15 bp, Homo sapiens
ggcaagcactacaag

SEQ ID NO: 194023 - DNA, 15 bp, Homo sapiens
tggcaagcactacaa

SEQ ID NO: 194024 - DNA, 15 bp, Homo sapiens
ttggcaagcactaca

SEQ ID NO: 194025 - DNA, 15 bp, Homo sapiens
attggcaagcactac

SEQ ID NO: 194026 - DNA, 15 bp, Homo sapiens
aattggcaagcacta

SEQ ID NO: 194027 - DNA, 15 bp, Homo sapiens
aaattggcaagcact

SEQ ID NO: 194028 - DNA, 15 bp, Homo sapiens
gaaattggcaagcac

SEQ ID NO: 194029 - DNA, 15 bp, Homo sapiens
agaaattggcaagca

SEQ ID NO: 194030 - DNA, 15 bp, Homo sapiens
cagaaattggcaagc

SEQ ID NO: 194031 - DNA, 15 bp, Homo sapiens
ccagaaattggcaag

SEQ ID NO: 194032 - DNA, 15 bp, Homo sapiens
cccagaaattggcaa

SEQ ID NO: 194033 - DNA, 15 bp, Homo sapiens
acccagaaattggca

SEQ ID NO: 194034 - DNA, 15 bp, Homo sapiens
cacccagaaattggc

SEQ ID NO: 194035 - DNA, 15 bp, Homo sapiens
acacccagaaattgg

SEQ ID NO: 194036 - DNA, 15 bp, Homo sapiens
gacacccagaaattg

SEQ ID NO: 194037 - DNA, 15 bp, Homo sapiens
tgacacccagaaatt

SEQ ID NO: 194038 - DNA, 15 bp, Homo sapiens
ttgacacccagaaat

SEQ ID NO: 194039 - DNA, 15 bp, Homo sapiens
cttgacacccagaaa

SEQ ID NO: 194040 - DNA, 15 bp, Homo sapiens
tcttgacacccagaa

SEQ ID NO: 194041 - DNA, 15 bp, Homo sapiens
gtcttgacacccaga

SEQ ID NO: 194042 - DNA, 15 bp, Homo sapiens
agtcttgacacccag

SEQ ID NO: 194043 - DNA, 15 bp, Homo sapiens
gagtcttgacaccca

SEQ ID NO: 194044 - DNA, 15 bp, Homo sapiens
ggagtcttgacaccc

SEQ ID NO: 194045 - DNA, 15 bp, Homo sapiens
gggagtcttgacacc

SEQ ID NO: 194046 - DNA, 15 bp, Homo sapiens
tgggagtcttgacac

SEQ ID NO: 194047 - DNA, 15 bp, Homo sapiens
gtgggagtcttgaca

SEQ ID NO: 194048 - DNA, 15 bp, Homo sapiens
agtgggagtcttgac

SEQ ID NO: 194049 - DNA, 15 bp, Homo sapiens
cagtgggagtcttga

SEQ ID NO: 194050 - DNA, 15 bp, Homo sapiens
gcagtgggagtcttg

SEQ ID NO: 194051 - DNA, 15 bp, Homo sapiens
agcagtgggagtctt

SEQ ID NO: 194052 - DNA, 15 bp, Homo sapiens
cagcagtgggagtct

SEQ ID NO: 194053 - DNA, 15 bp, Homo sapiens
tttggctcacagaat

SEQ ID NO: 194054 - DNA, 15 bp, Homo sapiens
gtttggctcacagaa

SEQ ID NO: 194055 - DNA, 15 bp, Homo sapiens
cgtttggctcacaga

SEQ ID NO: 194056 - DNA, 15 bp, Homo sapiens
tcgtttggctcacag

SEQ ID NO: 194057 - DNA, 15 bp, Homo sapiens
ttcgtttggctcaca

SEQ ID NO: 194058 - DNA, 15 bp, Homo sapiens
cttcgtttggctcac

SEQ ID NO: 194059 - DNA, 15 bp, Homo sapiens
gcttcgtttggctca

SEQ ID NO: 194060 - DNA, 15 bp, Homo sapiens
ggcttcgtttggctc

SEQ ID NO: 194061 - DNA, 15 bp, Homo sapiens
gggcttcgtttggct

SEQ ID NO: 194062 - DNA, 15 bp, Homo sapiens
tgggcttcgtttggc

SEQ ID NO: 194063 - DNA, 15 bp, Homo sapiens
ctgggcttcgtttgg

SEQ ID NO: 194064 - DNA, 15 bp, Homo sapiens
gctgggcttcgtttg

SEQ ID NO: 194065 - DNA, 15 bp, Homo sapiens
agctgggcttcgttt

SEQ ID NO: 194066 - DNA, 15 bp, Homo sapiens
cagctgggcttcgtt

SEQ ID NO: 194067 - DNA, 15 bp, Homo sapiens
ccagctgggcttcgt

SEQ ID NO: 194068 - DNA, 15 bp, Homo sapiens
cccagctgggcttcg

SEQ ID NO: 194069 - DNA, 15 bp, Homo sapiens
gcccagctgggcttc

SEQ ID NO: 194070 - DNA, 15 bp, Homo sapiens
cgcccagctgggctt

SEQ ID NO: 194071 - DNA, 15 bp, Homo sapiens
gcgcccagctgggct

SEQ ID NO: 194072 - DNA, 15 bp, Homo sapiens
ggcgcccagctgggc

SEQ ID NO: 194073 - DNA, 15 bp, Homo sapiens
tggcgcccagctggg

SEQ ID NO: 194074 - DNA, 15 bp, Homo sapiens
ctggcgcccagctgg

SEQ ID NO: 194075 - DNA, 15 bp, Homo sapiens
tctggcgcccagctg

SEQ ID NO: 194076 - DNA, 15 bp, Homo sapiens
atctggcgcccagct

SEQ ID NO: 194077 - DNA, 15 bp, Homo sapiens
gatctggcgcccagc

SEQ ID NO: 194078 - DNA, 15 bp, Homo sapiens
tgatctggcgcccag

SEQ ID NO: 194079 - DNA, 15 bp, Homo sapiens
ctgatctggcgccca

SEQ ID NO: 194080 - DNA, 15 bp, Homo sapiens
actgatctggcgccc

SEQ ID NO: 194081 - DNA, 15 bp, Homo sapiens
gactgatctggcgcc

SEQ ID NO: 194082 - DNA, 15 bp, Homo sapiens
agactgatctggcgc

SEQ ID NO: 194083 - DNA, 15 bp, Homo sapiens
cagactgatctggcg

SEQ ID NO: 194084 - DNA, 15 bp, Homo sapiens
ccagactgatctggc

SEQ ID NO: 194085 - DNA, 15 bp, Homo sapiens
cccagactgatctgg

SEQ ID NO: 194086 - DNA, 15 bp, Homo sapiens
ccccagactgatctg

SEQ ID NO: 194087 - DNA, 15 bp, Homo sapiens
gccccagactgatct

SEQ ID NO: 194088 - DNA, 15 bp, Homo sapiens
tgccccagactgatc

SEQ ID NO: 194089 - DNA, 15 bp, Homo sapiens
gtgccccagactgat

SEQ ID NO: 194090 - DNA, 15 bp, Homo sapiens
ggtgccccagactga

SEQ ID NO: 194091 - DNA, 15 bp, Homo sapiens
tggtgccccagactg

SEQ ID NO: 194092 - DNA, 15 bp, Homo sapiens
atggtgccccagact

SEQ ID NO: 194093 - DNA, 15 bp, Homo sapiens
gatggtgccccagac

SEQ ID NO: 194094 - DNA, 15 bp, Homo sapiens
tgatggtgccccaga

SEQ ID NO: 194095 - DNA, 15 bp, Homo sapiens
ttgatggtgccccag

SEQ ID NO: 194096 - DNA, 15 bp, Homo sapiens
attgatggtgcccca

SEQ ID NO: 194097 - DNA, 15 bp, Homo sapiens
cattgatggtgcccc

SEQ ID NO: 194098 - DNA, 15 bp, Homo sapiens
acattgatggtgccc

SEQ ID NO: 194099 - DNA, 15 bp, Homo sapiens
gacattgatggtgcc

SEQ ID NO: 194100 - DNA, 15 bp, Homo sapiens
agacattgatggtgc

SEQ ID NO: 194101 - DNA, 15 bp, Homo sapiens
cagacattgatggtg

SEQ ID NO: 194102 - DNA, 15 bp, Homo sapiens
gcagacattgatggt

SEQ ID NO: 194103 - DNA, 15 bp, Homo sapiens
ggcagacattgatgg

SEQ ID NO: 194104 - DNA, 15 bp, Homo sapiens
aggcagacattgatg

SEQ ID NO: 194105 - DNA, 15 bp, Homo sapiens
aaggcagacattgat

SEQ ID NO: 194106 - DNA, 15 bp, Homo sapiens
gaaggcagacattga

SEQ ID NO: 194107 - DNA, 15 bp, Homo sapiens
cgaaggcagacattg

SEQ ID NO: 194108 - DNA, 15 bp, Homo sapiens
gcgaaggcagacatt

SEQ ID NO: 194109 - DNA, 15 bp, Homo sapiens
agcgaaggcagacat

SEQ ID NO: 194110 - DNA, 15 bp, Homo sapiens
aagcgaaggcagaca

SEQ ID NO: 194111 - DNA, 15 bp, Homo sapiens
aaagcgaaggcagac

SEQ ID NO: 194112 - DNA, 15 bp, Homo sapiens
caaagcgaaggcaga

SEQ ID NO: 194113 - DNA, 15 bp, Homo sapiens
ccaaagcgaaggcag

SEQ ID NO: 194114 - DNA, 15 bp, Homo sapiens
tccaaagcgaaggca

SEQ ID NO: 194115 - DNA, 15 bp, Homo sapiens
ttccaaagcgaaggc

SEQ ID NO: 194116 - DNA, 15 bp, Homo sapiens
attccaaagcgaagg

SEQ ID NO: 194117 - DNA, 15 bp, Homo sapiens
gattccaaagcgaag

SEQ ID NO: 194118 - DNA, 15 bp, Homo sapiens
ggattccaaagcgaa

SEQ ID NO: 194119 - DNA, 15 bp, Homo sapiens
tggattccaaagcga

SEQ ID NO: 194120 - DNA, 15 bp, Homo sapiens
gtggattccaaagcg

SEQ ID NO: 194121 - DNA, 15 bp, Homo sapiens
tgtggattccaaagc

SEQ ID NO: 194122 - DNA, 15 bp, Homo sapiens
ctgtggattccaaag

SEQ ID NO: 194123 - DNA, 15 bp, Homo sapiens
tctgtggattccaaa

SEQ ID NO: 194124 - DNA, 15 bp, Homo sapiens
ctctgtggattccaa

SEQ ID NO: 194125 - DNA, 15 bp, Homo sapiens
cctctgtggattcca

SEQ ID NO: 194126 - DNA, 15 bp, Homo sapiens
gcctctgtggattcc

SEQ ID NO: 194127 - DNA, 15 bp, Homo sapiens
agcctctgtggattc

SEQ ID NO: 194128 - DNA, 15 bp, Homo sapiens
aagcctctgtggatt

SEQ ID NO: 194129 - DNA, 15 bp, Homo sapiens
caagcctctgtggat

SEQ ID NO: 194130 - DNA, 15 bp, Homo sapiens
acaagcctctgtgga

SEQ ID NO: 194131 - DNA, 15 bp, Homo sapiens
gacaagcctctgtgg

SEQ ID NO: 194132 - DNA, 15 bp, Homo sapiens
ggacaagcctctgtg

SEQ ID NO: 194133 - DNA, 15 bp, Homo sapiens
aggacaagcctctgt

SEQ ID NO: 194134 - DNA, 15 bp, Homo sapiens
gaggacaagcctctg

SEQ ID NO: 194135 - DNA, 15 bp, Homo sapiens
agaggacaagcctct

SEQ ID NO: 194136 - DNA, 15 bp, Homo sapiens
cagaggacaagcctc

SEQ ID NO: 194137 - DNA, 15 bp, Homo sapiens
ccagaggacaagcct

SEQ ID NO: 194138 - DNA, 15 bp, Homo sapiens
cccagaggacaagcc

SEQ ID NO: 194139 - DNA, 15 bp, Homo sapiens
tcccagaggacaagc

SEQ ID NO: 194140 - DNA, 15 bp, Homo sapiens
ctcccagaggacaag

SEQ ID NO: 194141 - DNA, 15 bp, Homo sapiens
cctcccagaggacaa

SEQ ID NO: 194142 - DNA, 15 bp, Homo sapiens
ccctcccagaggaca

SEQ ID NO: 194143 - DNA, 15 bp, Homo sapiens
cccctcccagaggac

SEQ ID NO: 194144 - DNA, 15 bp, Homo sapiens
tcccctcccagagga

SEQ ID NO: 194145 - DNA, 15 bp, Homo sapiens
ctcccctcccagagg

SEQ ID NO: 194146 - DNA, 15 bp, Homo sapiens
cctcccctcccagag

SEQ ID NO: 194147 - DNA, 15 bp, Homo sapiens
acctcccctcccaga

SEQ ID NO: 194148 - DNA, 15 bp, Homo sapiens
aacctcccctcccag

SEQ ID NO: 194149 - DNA, 15 bp, Homo sapiens
aaacctcccctccca

SEQ ID NO: 194150 - DNA, 15 bp, Homo sapiens
gaaacctcccctccc

SEQ ID NO: 194151 - DNA, 15 bp, Homo sapiens
ggaaacctcccctcc

SEQ ID NO: 194152 - DNA, 15 bp, Homo sapiens
aggaaacctcccctc

SEQ ID NO: 194153 - DNA, 15 bp, Homo sapiens
caggaaacctcccct

SEQ ID NO: 194154 - DNA, 15 bp, Homo sapiens
tcaggaaacctcccc

SEQ ID NO: 194155 - DNA, 15 bp, Homo sapiens
ttcaggaaacctccc

SEQ ID NO: 194156 - DNA, 15 bp, Homo sapiens
attcaggaaacctcc

SEQ ID NO: 194157 - DNA, 15 bp, Homo sapiens
cattcaggaaacctc

SEQ ID NO: 194158 - DNA, 15 bp, Homo sapiens
tcattcaggaaacct

SEQ ID NO: 194159 - DNA, 15 bp, Homo sapiens
ttcattcaggaaacc

SEQ ID NO: 194160 - DNA, 15 bp, Homo sapiens
tttcattcaggaaac

SEQ ID NO: 194161 - DNA, 15 bp, Homo sapiens
ttttcattcaggaaa

SEQ ID NO: 194162 - DNA, 15 bp, Homo sapiens
gttttcattcaggaa

SEQ ID NO: 194163 - DNA, 15 bp, Homo sapiens
agttttcattcagga

SEQ ID NO: 194164 - DNA, 15 bp, Homo sapiens
cagttttcattcagg

SEQ ID NO: 194165 - DNA, 15 bp, Homo sapiens
tcagttttcattcag

SEQ ID NO: 194166 - DNA, 15 bp, Homo sapiens
ttcagttttcattca

SEQ ID NO: 194167 - DNA, 15 bp, Homo sapiens
cttcagttttcattc

SEQ ID NO: 194168 - DNA, 15 bp, Homo sapiens
ccttcagttttcatt

SEQ ID NO: 194169 - DNA, 15 bp, Homo sapiens
cccttcagttttcat

SEQ ID NO: 194170 - DNA, 15 bp, Homo sapiens
tcccttcagttttca

SEQ ID NO: 194171 - DNA, 15 bp, Homo sapiens
atcccttcagttttc

SEQ ID NO: 194172 - DNA, 15 bp, Homo sapiens
tatcccttcagtttt

SEQ ID NO: 194173 - DNA, 15 bp, Homo sapiens
ctatcccttcagttt

SEQ ID NO: 194174 - DNA, 15 bp, Homo sapiens
cctatcccttcagtt

SEQ ID NO: 194175 - DNA, 15 bp, Homo sapiens
ccctatcccttcagt

SEQ ID NO: 194176 - DNA, 15 bp, Homo sapiens
tccctatcccttcag

SEQ ID NO: 194177 - DNA, 15 bp, Homo sapiens
ctccctatcccttca

SEQ ID NO: 194178 - DNA, 15 bp, Homo sapiens
tctccctatcccttc

SEQ ID NO: 194179 - DNA, 15 bp, Homo sapiens
ctctccctatccctt

SEQ ID NO: 194180 - DNA, 15 bp, Homo sapiens
cctctccctatccct

SEQ ID NO: 194181 - DNA, 15 bp, Homo sapiens
ccctctccctatccc

SEQ ID NO: 194182 - DNA, 15 bp, Homo sapiens
cccctctccctatcc

SEQ ID NO: 194183 - DNA, 15 bp, Homo sapiens
tcccctctccctatc

SEQ ID NO: 194184 - DNA, 15 bp, Homo sapiens
ctcccctctccctat

SEQ ID NO: 194185 - DNA, 15 bp, Homo sapiens
aactcccctctccct

SEQ ID NO: 194186 - DNA, 15 bp, Homo sapiens
caactcccctctccc

SEQ ID NO: 194187 - DNA, 15 bp, Homo sapiens
acaactcccctctcc

SEQ ID NO: 194188 - DNA, 15 bp, Homo sapiens
cacaactcccctctc

SEQ ID NO: 194189 - DNA, 15 bp, Homo sapiens
ccacaactcccctct

SEQ ID NO: 194190 - DNA, 15 bp, Homo sapiens
accacaactcccctc

SEQ ID NO: 194191 - DNA, 15 bp, Homo sapiens
caccacaactcccct

SEQ ID NO: 194192 - DNA, 15 bp, Homo sapiens
tcaccacaactcccc

SEQ ID NO: 194193 - DNA, 15 bp, Homo sapiens
ctcaccacaactccc

SEQ ID NO: 194194 - DNA, 15 bp, Homo sapiens
gctcaccacaactcc

SEQ ID NO: 194195 - DNA, 15 bp, Homo sapiens
agctcaccacaactc

SEQ ID NO: 194196 - DNA, 15 bp, Homo sapiens
aagctcaccacaact

SEQ ID NO: 194197 - DNA, 15 bp, Homo sapiens
caagctcaccacaac

SEQ ID NO: 194198 - DNA, 15 bp, Homo sapiens
ccaagctcaccacaa

SEQ ID NO: 194199 - DNA, 15 bp, Homo sapiens
gccaagctcaccaca

SEQ ID NO: 194200 - DNA, 15 bp, Homo sapiens
ggccaagctcaccac

SEQ ID NO: 194201 - DNA, 15 bp, Homo sapiens
aggccaagctcacca

SEQ ID NO: 194202 - DNA, 15 bp, Homo sapiens
gaggccaagctcacc

SEQ ID NO: 194203 - DNA, 15 bp, Homo sapiens
agaggccaagctcac

SEQ ID NO: 194204 - DNA, 15 bp, Homo sapiens
aagaggccaagctca

SEQ ID NO: 194205 - DNA, 15 bp, Homo sapiens
taagaggccaagctc

SEQ ID NO: 194206 - DNA, 15 bp, Homo sapiens
ataagaggccaagct

SEQ ID NO: 194207 - DNA, 15 bp, Homo sapiens
aataagaggccaagc

SEQ ID NO: 194208 - DNA, 15 bp, Homo sapiens
taataagaggccaag

SEQ ID NO: 194209 - DNA, 15 bp, Homo sapiens
ctaataagaggccaa

SEQ ID NO: 194210 - DNA, 15 bp, Homo sapiens
gctaataagaggcca

SEQ ID NO: 194211 - DNA, 15 bp, Homo sapiens
agctaataagaggcc

SEQ ID NO: 194212 - DNA, 15 bp, Homo sapiens
cagctaataagaggc

SEQ ID NO: 194213 - DNA, 15 bp, Homo sapiens
acagctaataagagg

SEQ ID NO: 194214 - DNA, 15 bp, Homo sapiens
tacagctaataagag

SEQ ID NO: 194215 - DNA, 15 bp, Homo sapiens
ttacagctaataaga

SEQ ID NO: 194216 - DNA, 15 bp, Homo sapiens
gttacagctaataag

SEQ ID NO: 194217 - DNA, 15 bp, Homo sapiens
tgttacagctaataa

SEQ ID NO: 194218 - DNA, 15 bp, Homo sapiens
atgttacagctaata

SEQ ID NO: 194219 - DNA, 15 bp, Homo sapiens
gatgttacagctaat

SEQ ID NO: 194220 - DNA, 15 bp, Homo sapiens
agatgttacagctaa

SEQ ID NO: 194221 - DNA, 15 bp, Homo sapiens
aagatgttacagcta

SEQ ID NO: 194222 - DNA, 15 bp, Homo sapiens
caagatgttacagct

SEQ ID NO: 194223 - DNA, 15 bp, Homo sapiens
gcaagatgttacagc

SEQ ID NO: 194224 - DNA, 15 bp, Homo sapiens
tgcaagatgttacag

SEQ ID NO: 194225 - DNA, 15 bp, Homo sapiens
atgcaagatgttaca

SEQ ID NO: 194226 - DNA, 15 bp, Homo sapiens
catgcaagatgttac

SEQ ID NO: 194227 - DNA, 15 bp, Homo sapiens
gcatgcaagatgtta

SEQ ID NO: 194228 - DNA, 15 bp, Homo sapiens
tgcatgcaagatgtt

SEQ ID NO: 194229 - DNA, 15 bp, Homo sapiens
atgcatgcaagatgt

SEQ ID NO: 194230 - DNA, 15 bp, Homo sapiens
gatgcatgcaagatg

SEQ ID NO: 194231 - DNA, 15 bp, Homo sapiens
agatgcatgcaagat

SEQ ID NO: 194232 - DNA, 15 bp, Homo sapiens
aagatgcatgcaaga

SEQ ID NO: 194233 - DNA, 15 bp, Homo sapiens
gaagatgcatgcaag

SEQ ID NO: 194234 - DNA, 15 bp, Homo sapiens
agaagatgcatgcaa

SEQ ID NO: 194235 - DNA, 15 bp, Homo sapiens
aagaagatgcatgca

SEQ ID NO: 194236 - DNA, 15 bp, Homo sapiens
gaagaagatgcatgc

SEQ ID NO: 194237 - DNA, 15 bp, Homo sapiens
tgaagaagatgcatg

SEQ ID NO: 194238 - DNA, 15 bp, Homo sapiens
atgaagaagatgcat

SEQ ID NO: 194239 - DNA, 15 bp, Homo sapiens
tatgaagaagatgca

SEQ ID NO: 194240 - DNA, 15 bp, Homo sapiens
atatgaagaagatgc

SEQ ID NO: 194241 - DNA, 15 bp, Homo sapiens
gatatgaagaagatg

SEQ ID NO: 194242 - DNA, 15 bp, Homo sapiens
ggatatgaagaagat

SEQ ID NO: 194243 - DNA, 15 bp, Homo sapiens
cggatatgaagaaga

SEQ ID NO: 194244 - DNA, 15 bp, Homo sapiens
ccggatatgaagaag

SEQ ID NO: 194245 - DNA, 15 bp, Homo sapiens
tccggatatgaagaa

SEQ ID NO: 194246 - DNA, 15 bp, Homo sapiens
ctccggatatgaaga

SEQ ID NO: 194247 - DNA, 15 bp, Homo sapiens
gctccggatatgaag

SEQ ID NO: 194248 - DNA, 15 bp, Homo sapiens
agctccggatatgaa

SEQ ID NO: 194249 - DNA, 15 bp, Homo sapiens
gagctccggatatga

SEQ ID NO: 194250 - DNA, 15 bp, Homo sapiens
ggagctccggatatg

SEQ ID NO: 194251 - DNA, 15 bp, Homo sapiens
tggagctccggatat

SEQ ID NO: 194252 - DNA, 15 bp, Homo sapiens
gtggagctccggata

SEQ ID NO: 194253 - DNA, 15 bp, Homo sapiens
ggtggagctccggat

SEQ ID NO: 194254 - DNA, 15 bp, Homo sapiens
aggtggagctccgga

SEQ ID NO: 194255 - DNA, 15 bp, Homo sapiens
gaggtggagctccgg

SEQ ID NO: 194256 - DNA, 15 bp, Homo sapiens
ggaggtggagctccg

SEQ ID NO: 194257 - DNA, 15 bp, Homo sapiens
aggaggtggagctcc

SEQ ID NO: 194258 - DNA, 15 bp, Homo sapiens
gaggaggtggagctc

SEQ ID NO: 194259 - DNA, 15 bp, Homo sapiens
tgaggaggtggagct

SEQ ID NO: 194260 - DNA, 15 bp, Homo sapiens
atgaggaggtggagc

SEQ ID NO: 194261 - DNA, 15 bp, Homo sapiens
gatgaggaggtggag

SEQ ID NO: 194262 - DNA, 15 bp, Homo sapiens
agatgaggaggtgga

SEQ ID NO: 194263 - DNA, 15 bp, Homo sapiens
cagatgaggaggtgg

SEQ ID NO: 194264 - DNA, 15 bp, Homo sapiens
acagatgaggaggtg

SEQ ID NO: 194265 - DNA, 15 bp, Homo sapiens
tacagatgaggaggt

SEQ ID NO: 194266 - DNA, 15 bp, Homo sapiens
atacagatgaggagg

SEQ ID NO: 194267 - DNA, 15 bp, Homo sapiens
aatacagatgaggag

SEQ ID NO: 194268 - DNA, 15 bp, Homo sapiens
aaatacagatgagga

SEQ ID NO: 194269 - DNA, 15 bp, Homo sapiens
aaaatacagatgagg

SEQ ID NO: 194270 - DNA, 15 bp, Homo sapiens
aaaaatacagatgag

SEQ ID NO: 194271 - DNA, 15 bp, Homo sapiens
aaaaaatacagatga

SEQ ID NO: 194272 - DNA, 15 bp, Homo sapiens
taaaaaatacagatg

SEQ ID NO: 194273 - DNA, 15 bp, Homo sapiens
ataaaaaatacagat

SEQ ID NO: 194274 - DNA, 15 bp, Homo sapiens
aataaaaaatacaga

SEQ ID NO: 194275 - DNA, 15 bp, Homo sapiens
aaataaaaaatacag

SEQ ID NO: 194276 - DNA, 15 bp, Homo sapiens
aaaataaaaaataca

SEQ ID NO: 194277 - DNA, 15 bp, Homo sapiens
taaaataaaaaatac

SEQ ID NO: 194278 - DNA, 15 bp, Homo sapiens
ataaaataaaaaata

SEQ ID NO: 194279 - DNA, 15 bp, Homo sapiens
aataaaataaaaaat

SEQ ID NO: 194280 - DNA, 15 bp, Homo sapiens
aaataaaataaaaaa

SEQ ID NO: 194281 - DNA, 15 bp, Homo sapiens
aaaataaaataaaaa

SEQ ID NO: 194282 - DNA, 15 bp, Homo sapiens
aaaaataaaataaaa

SEQ ID NO: 194283 - DNA, 15 bp, Homo sapiens
aaaaaataaaataaa

SEQ ID NO: 194284 - DNA, 15 bp, Homo sapiens
aaaaaaataaaataa

SEQ ID NO: 194285 - DNA, 15 bp, Homo sapiens
taaaaaaataaaata

SEQ ID NO: 194286 - DNA, 15 bp, Homo sapiens
ctaaaaaaataaaat

SEQ ID NO: 194287 - DNA, 15 bp, Homo sapiens
actaaaaaaataaaa

SEQ ID NO: 194288 - DNA, 15 bp, Homo sapiens
gactaaaaaaataaa

SEQ ID NO: 194289 - DNA, 15 bp, Homo sapiens
agactaaaaaaataa

SEQ ID NO: 194290 - DNA, 15 bp, Homo sapiens
cagactaaaaaaata

SEQ ID NO: 194291 - DNA, 15 bp, Homo sapiens
ccagactaaaaaaat

SEQ ID NO: 194292 - DNA, 15 bp, Homo sapiens
cccagactaaaaaaa

SEQ ID NO: 194293 - DNA, 15 bp, Homo sapiens
acccagactaaaaaa

SEQ ID NO: 194294 - DNA, 15 bp, Homo sapiens
gacccagactaaaaa

SEQ ID NO: 194295 - DNA, 15 bp, Homo sapiens
agacccagactaaaa

SEQ ID NO: 194296 - DNA, 15 bp, Homo sapiens
aagacccagactaaa

SEQ ID NO: 194297 - DNA, 15 bp, Homo sapiens
caagacccagactaa

SEQ ID NO: 194298 - DNA, 15 bp, Homo sapiens
gcaagacccagacta

SEQ ID NO: 194299 - DNA, 15 bp, Homo sapiens
agcaagacccagact

SEQ ID NO: 194300 - DNA, 15 bp, Homo sapiens
gagcaagacccagac

SEQ ID NO: 194301 - DNA, 15 bp, Homo sapiens
ggagcaagacccaga

SEQ ID NO: 194302 - DNA, 15 bp, Homo sapiens
tggagcaagacccag

SEQ ID NO: 194303 - DNA, 15 bp, Homo sapiens
atggagcaagaccca

SEQ ID NO: 194304 - DNA, 15 bp, Homo sapiens
tatggagcaagaccc

SEQ ID NO: 194305 - DNA, 15 bp, Homo sapiens
ctatggagcaagacc

SEQ ID NO: 194306 - DNA, 15 bp, Homo sapiens
gctatggagcaagac

SEQ ID NO: 194307 - DNA, 15 bp, Homo sapiens
ggctatggagcaaga

SEQ ID NO: 194308 - DNA, 15 bp, Homo sapiens
gggctatggagcaag

SEQ ID NO: 194309 - DNA, 15 bp, Homo sapiens
tgggctatggagcaa

SEQ ID NO: 194310 - DNA, 15 bp, Homo sapiens
ctgggctatggagca

SEQ ID NO: 194311 - DNA, 15 bp, Homo sapiens
cctgggctatggagc

SEQ ID NO: 194312 - DNA, 15 bp, Homo sapiens
gcctgggctatggag

SEQ ID NO: 194313 - DNA, 15 bp, Homo sapiens
agcctgggctatgga

SEQ ID NO: 194314 - DNA, 15 bp, Homo sapiens
cagcctgggctatgg

SEQ ID NO: 194315 - DNA, 15 bp, Homo sapiens
tcagcctgggctatg

SEQ ID NO: 194316 - DNA, 15 bp, Homo sapiens
ttcagcctgggctat

SEQ ID NO: 194317 - DNA, 15 bp, Homo sapiens
cttcagcctgggcta

SEQ ID NO: 194318 - DNA, 15 bp, Homo sapiens
acttcagcctgggct

SEQ ID NO: 194319 - DNA, 15 bp, Homo sapiens
cacttcagcctgggc

SEQ ID NO: 194320 - DNA, 15 bp, Homo sapiens
gcacttcagcctggg

SEQ ID NO: 194321 - DNA, 15 bp, Homo sapiens
tgcacttcagcctgg

SEQ ID NO: 194322 - DNA, 15 bp, Homo sapiens
ctgcacttcagcctg

SEQ ID NO: 194323 - DNA, 15 bp, Homo sapiens
actgcacttcagcct

SEQ ID NO: 194324 - DNA, 15 bp, Homo sapiens
cactgcacttcagcc

SEQ ID NO: 194325 - DNA, 15 bp, Homo sapiens
ccactgcacttcagc

SEQ ID NO: 194326 - DNA, 15 bp, Homo sapiens
accactgcacttcag

SEQ ID NO: 194327 - DNA, 15 bp, Homo sapiens
caccactgcacttca

SEQ ID NO: 194328 - DNA, 15 bp, Homo sapiens
acaccactgcacttc

SEQ ID NO: 194329 - DNA, 15 bp, Homo sapiens
cacaccactgcactt

SEQ ID NO: 194330 - DNA, 15 bp, Homo sapiens
tcacaccactgcact

SEQ ID NO: 194331 - DNA, 15 bp, Homo sapiens
atcacaccactgcac

SEQ ID NO: 194332 - DNA, 15 bp, Homo sapiens
gatcacaccactgca

SEQ ID NO: 194333 - DNA, 15 bp, Homo sapiens
tgatcacaccactgc

SEQ ID NO: 194334 - DNA, 15 bp, Homo sapiens
atgatcacaccactg

SEQ ID NO: 194335 - DNA, 15 bp, Homo sapiens
catgatcacaccact

SEQ ID NO: 194336 - DNA, 15 bp, Homo sapiens
ccatgatcacaccac

SEQ ID NO: 194337 - DNA, 15 bp, Homo sapiens
gccatgatcacacca

SEQ ID NO: 194338 - DNA, 15 bp, Homo sapiens
agccatgatcacacc

SEQ ID NO: 194339 - DNA, 15 bp, Homo sapiens
gagccatgatcacac

SEQ ID NO: 194340 - DNA, 15 bp, Homo sapiens
tgagccatgatcaca

SEQ ID NO: 194341 - DNA, 15 bp, Homo sapiens
gtgagccatgatcac

SEQ ID NO: 194342 - DNA, 15 bp, Homo sapiens
agtgagccatgatca

SEQ ID NO: 194343 - DNA, 15 bp, Homo sapiens
cagtgagccatgatc

SEQ ID NO: 194344 - DNA, 15 bp, Homo sapiens
gcagtgagccatgat

SEQ ID NO: 194345 - DNA, 15 bp, Homo sapiens
tgcagtgagccatga

SEQ ID NO: 194346 - DNA, 15 bp, Homo sapiens
ctgcagtgagccatg

SEQ ID NO: 194347 - DNA, 15 bp, Homo sapiens
actgcagtgagccat

SEQ ID NO: 194348 - DNA, 15 bp, Homo sapiens
gactgcagtgagcca

SEQ ID NO: 194349 - DNA, 15 bp, Homo sapiens
agactgcagtgagcc

SEQ ID NO: 194350 - DNA, 15 bp, Homo sapiens
aagactgcagtgagc

SEQ ID NO: 194351 - DNA, 15 bp, Homo sapiens
caagactgcagtgag

SEQ ID NO: 194352 - DNA, 15 bp, Homo sapiens
tcaagactgcagtga

SEQ ID NO: 194353 - DNA, 15 bp, Homo sapiens
atcaagactgcagtg

SEQ ID NO: 194354 - DNA, 15 bp, Homo sapiens
gatcaagactgcagt

SEQ ID NO: 194355 - DNA, 15 bp, Homo sapiens
agatcaagactgcag

SEQ ID NO: 194356 - DNA, 15 bp, Homo sapiens
gagatcaagactgca

SEQ ID NO: 194357 - DNA, 15 bp, Homo sapiens
ggagatcaagactgc

SEQ ID NO: 194358 - DNA, 15 bp, Homo sapiens
gggagatcaagactg

SEQ ID NO: 194359 - DNA, 15 bp, Homo sapiens
cgggagatcaagact

SEQ ID NO: 194360 - DNA, 15 bp, Homo sapiens
ccgggagatcaagac

SEQ ID NO: 194361 - DNA, 15 bp, Homo sapiens
cccgggagatcaaga

SEQ ID NO: 194362 - DNA, 15 bp, Homo sapiens
gcccgggagatcaag

SEQ ID NO: 194363 - DNA, 15 bp, Homo sapiens
agcccgggagatcaa

SEQ ID NO: 194364 - DNA, 15 bp, Homo sapiens
gagcccgggagatca

SEQ ID NO: 194365 - DNA, 15 bp, Homo sapiens
tgagcccgggagatc

SEQ ID NO: 194366 - DNA, 15 bp, Homo sapiens
ttgagcccgggagat

SEQ ID NO: 194367 - DNA, 15 bp, Homo sapiens
cttgagcccgggaga

SEQ ID NO: 194368 - DNA, 15 bp, Homo sapiens
gcttgagcccgggag

SEQ ID NO: 194369 - DNA, 15 bp, Homo sapiens
cgcttgagcccggga

SEQ ID NO: 194370 - DNA, 15 bp, Homo sapiens
tcgcttgagcccggg

SEQ ID NO: 194371 - DNA, 15 bp, Homo sapiens
atcgcttgagcccgg

SEQ ID NO: 194372 - DNA, 15 bp, Homo sapiens
gatcgcttgagcccg

SEQ ID NO: 194373 - DNA, 15 bp, Homo sapiens
ggatcgcttgagccc

SEQ ID NO: 194374 - DNA, 15 bp, Homo sapiens
ggaggatcgcttgag

SEQ ID NO: 194375 - DNA, 15 bp, Homo sapiens
gggaggatcgcttga

SEQ ID NO: 194376 - DNA, 15 bp, Homo sapiens
tgggaggatcgcttg

SEQ ID NO: 194377 - DNA, 15 bp, Homo sapiens
gtgggaggatcgctt

SEQ ID NO: 194378 - DNA, 15 bp, Homo sapiens
ggtgggaggatcgct

SEQ ID NO: 194379 - DNA, 15 bp, Homo sapiens
aggtgggaggatcgc

SEQ ID NO: 194380 - DNA, 15 bp, Homo sapiens
gaggtgggaggatcg

SEQ ID NO: 194381 - DNA, 15 bp, Homo sapiens
agaggtgggaggatc

SEQ ID NO: 194382 - DNA, 15 bp, Homo sapiens
cagaggtgggaggat

SEQ ID NO: 194383 - DNA, 15 bp, Homo sapiens
gcagaggtgggagga

SEQ ID NO: 194384 - DNA, 15 bp, Homo sapiens
ggcagaggtgggagg

SEQ ID NO: 194385 - DNA, 15 bp, Homo sapiens
aggcagaggtgggag

SEQ ID NO: 194386 - DNA, 15 bp, Homo sapiens
gaggcagaggtggga

SEQ ID NO: 194387 - DNA, 15 bp, Homo sapiens
ggaggcagaggtggg

SEQ ID NO: 194388 - DNA, 15 bp, Homo sapiens
aggaggcagaggtgg

SEQ ID NO: 194389 - DNA, 15 bp, Homo sapiens
caggaggcagaggtg

SEQ ID NO: 194390 - DNA, 15 bp, Homo sapiens
tcaggaggcagaggt

SEQ ID NO: 194391 - DNA, 15 bp, Homo sapiens
ctcaggaggcagagg

SEQ ID NO: 194392 - DNA, 15 bp, Homo sapiens
actcaggaggcagag

SEQ ID NO: 194393 - DNA, 15 bp, Homo sapiens
tactcaggaggcaga

SEQ ID NO: 194394 - DNA, 15 bp, Homo sapiens
ctactcaggaggcag

SEQ ID NO: 194395 - DNA, 15 bp, Homo sapiens
gctactcaggaggca

SEQ ID NO: 194396 - DNA, 15 bp, Homo sapiens
cccagctactcagga

SEQ ID NO: 194397 - DNA, 15 bp, Homo sapiens
tcccagctactcagg

SEQ ID NO: 194398 - DNA, 15 bp, Homo sapiens
gtcccagctactcag

SEQ ID NO: 194399 - DNA, 15 bp, Homo sapiens
ggtcccagctactca

SEQ ID NO: 194400 - DNA, 15 bp, Homo sapiens
cggtcccagctactc

SEQ ID NO: 194401 - DNA, 15 bp, Homo sapiens
gcggtcccagctact

SEQ ID NO: 194402 - DNA, 15 bp, Homo sapiens
tgcggtcccagctac

SEQ ID NO: 194403 - DNA, 15 bp, Homo sapiens
ctgcggtcccagcta

SEQ ID NO: 194404 - DNA, 15 bp, Homo sapiens
cctgcggtcccagct

SEQ ID NO: 194405 - DNA, 15 bp, Homo sapiens
acctgcggtcccagc

SEQ ID NO: 194406 - DNA, 15 bp, Homo sapiens
cacctgcggtcccag

SEQ ID NO: 194407 - DNA, 15 bp, Homo sapiens
gcacctgcggtccca

SEQ ID NO: 194408 - DNA, 15 bp, Homo sapiens
ggcacctgcggtccc

SEQ ID NO: 194409 - DNA, 15 bp, Homo sapiens
aggcacctgcggtcc

SEQ ID NO: 194410 - DNA, 15 bp, Homo sapiens
taggcacctgcggtc

SEQ ID NO: 194411 - DNA, 15 bp, Homo sapiens
ataggcacctgcggt

SEQ ID NO: 194412 - DNA, 15 bp, Homo sapiens
gataggcacctgcgg

SEQ ID NO: 194413 - DNA, 15 bp, Homo sapiens
tgataggcacctgcg

SEQ ID NO: 194414 - DNA, 15 bp, Homo sapiens
gtgataggcacctgc

SEQ ID NO: 194415 - DNA, 15 bp, Homo sapiens
ggtgataggcacctg

SEQ ID NO: 194416 - DNA, 15 bp, Homo sapiens
tggtgataggcacct

SEQ ID NO: 194417 - DNA, 15 bp, Homo sapiens
gtggtgataggcacc

SEQ ID NO: 194418 - DNA, 15 bp, Homo sapiens
cgtggtgataggcac

SEQ ID NO: 194419 - DNA, 15 bp, Homo sapiens
gcgtggtgataggca

SEQ ID NO: 194420 - DNA, 15 bp, Homo sapiens
ggcgtggtgataggc

SEQ ID NO: 194421 - DNA, 15 bp, Homo sapiens
gggcgtggtgatagg

SEQ ID NO: 194422 - DNA, 15 bp, Homo sapiens
ggggcgtggtgatag

SEQ ID NO: 194423 - DNA, 15 bp, Homo sapiens
cggggcgtggtgata

SEQ ID NO: 194424 - DNA, 15 bp, Homo sapiens
gcggggcgtggtgat

SEQ ID NO: 194425 - DNA, 15 bp, Homo sapiens
agcggggcgtggtga

SEQ ID NO: 194426 - DNA, 15 bp, Homo sapiens
tagcggggcgtggtg

SEQ ID NO: 194427 - DNA, 15 bp, Homo sapiens
ttagcggggcgtggt

SEQ ID NO: 194428 - DNA, 15 bp, Homo sapiens
tttagcggggcgtgg

SEQ ID NO: 194429 - DNA, 15 bp, Homo sapiens
ctttagcggggcgtg

SEQ ID NO: 194430 - DNA, 15 bp, Homo sapiens
actttagcggggcgt

SEQ ID NO: 194431 - DNA, 15 bp, Homo sapiens
aactttagcggggcg

SEQ ID NO: 194432 - DNA, 15 bp, Homo sapiens
aaactttagcggggc

SEQ ID NO: 194433 - DNA, 15 bp, Homo sapiens
aaaactttagcgggg

SEQ ID NO: 194434 - DNA, 15 bp, Homo sapiens
caaaactttagcggg

SEQ ID NO: 194435 - DNA, 15 bp, Homo sapiens
acaaaactttagcgg

SEQ ID NO: 194436 - DNA, 15 bp, Homo sapiens
tacaaaactttagcg

SEQ ID NO: 194437 - DNA, 15 bp, Homo sapiens
atacaaaactttagc

SEQ ID NO: 194438 - DNA, 15 bp, Homo sapiens
aatacaaaactttag

SEQ ID NO: 194439 - DNA, 15 bp, Homo sapiens
aaatacaaaacttta

SEQ ID NO: 194440 - DNA, 15 bp, Homo sapiens
aaaatacaaaacttt

SEQ ID NO: 194441 - DNA, 15 bp, Homo sapiens
caaaatacaaaactt

SEQ ID NO: 194442 - DNA, 15 bp, Homo sapiens
acaaaatacaaaact

SEQ ID NO: 194443 - DNA, 15 bp, Homo sapiens
cacaaaatacaaaac

SEQ ID NO: 194444 - DNA, 15 bp, Homo sapiens
acacaaaatacaaaa

SEQ ID NO: 194445 - DNA, 15 bp, Homo sapiens
tacacaaaatacaaa

SEQ ID NO: 194446 - DNA, 15 bp, Homo sapiens
ctacacaaaatacaa

SEQ ID NO: 194447 - DNA, 15 bp, Homo sapiens
tctacacaaaataca

SEQ ID NO: 194448 - DNA, 15 bp, Homo sapiens
ctctacacaaaatac

SEQ ID NO: 194449 - DNA, 15 bp, Homo sapiens
tctctacacaaaata

SEQ ID NO: 194450 - DNA, 15 bp, Homo sapiens
gtctctacacaaaat

SEQ ID NO: 194451 - DNA, 15 bp, Homo sapiens
cgtctctacacaaaa

SEQ ID NO: 194452 - DNA, 15 bp, Homo sapiens
acgtctctacacaaa

SEQ ID NO: 194453 - DNA, 15 bp, Homo sapiens
cacgtctctacacaa

SEQ ID NO: 194454 - DNA, 15 bp, Homo sapiens
ccacgtctctacaca

SEQ ID NO: 194455 - DNA, 15 bp, Homo sapiens
tccacgtctctacac

SEQ ID NO: 194456 - DNA, 15 bp, Homo sapiens
atccacgtctctaca

SEQ ID NO: 194457 - DNA, 15 bp, Homo sapiens
gatccacgtctctac

SEQ ID NO: 194458 - DNA, 15 bp, Homo sapiens
agatccacgtctcta

SEQ ID NO: 194459 - DNA, 15 bp, Homo sapiens
cagatccacgtctct

SEQ ID NO: 194460 - DNA, 15 bp, Homo sapiens
ccagatccacgtctc

SEQ ID NO: 194461 - DNA, 15 bp, Homo sapiens
gccagatccacgtct

SEQ ID NO: 194462 - DNA, 15 bp, Homo sapiens
agccagatccacgtc

SEQ ID NO: 194463 - DNA, 15 bp, Homo sapiens
cagccagatccacgt

SEQ ID NO: 194464 - DNA, 15 bp, Homo sapiens
acagccagatccacg

SEQ ID NO: 194465 - DNA, 15 bp, Homo sapiens
cacagccagatccac

SEQ ID NO: 194466 - DNA, 15 bp, Homo sapiens
acacagccagatcca

SEQ ID NO: 194467 - DNA, 15 bp, Homo sapiens
aacacagccagatcc

SEQ ID NO: 194468 - DNA, 15 bp, Homo sapiens
caacacagccagatc

SEQ ID NO: 194469 - DNA, 15 bp, Homo sapiens
gcaacacagccagat

SEQ ID NO: 194470 - DNA, 15 bp, Homo sapiens
ggcaacacagccaga

SEQ ID NO: 194471 - DNA, 15 bp, Homo sapiens
gggcaacacagccag

SEQ ID NO: 194472 - DNA, 15 bp, Homo sapiens
tgggcaacacagcca

SEQ ID NO: 194473 - DNA, 15 bp, Homo sapiens
ctgggcaacacagcc

SEQ ID NO: 194474 - DNA, 15 bp, Homo sapiens
cctgggcaacacagc

SEQ ID NO: 194475 - DNA, 15 bp, Homo sapiens
gcctgggcaacacag

SEQ ID NO: 194476 - DNA, 15 bp, Homo sapiens
cgcctgggcaacaca

SEQ ID NO: 194477 - DNA, 15 bp, Homo sapiens
ccgcctgggcaacac

SEQ ID NO: 194478 - DNA, 15 bp, Homo sapiens
cccgcctgggcaaca

SEQ ID NO: 194479 - DNA, 15 bp, Homo sapiens
acccgcctgggcaac

SEQ ID NO: 194480 - DNA, 15 bp, Homo sapiens
gacccgcctgggcaa

SEQ ID NO: 194481 - DNA, 15 bp, Homo sapiens
agacccgcctgggca

SEQ ID NO: 194482 - DNA, 15 bp, Homo sapiens
gagacccgcctgggc

SEQ ID NO: 194483 - DNA, 15 bp, Homo sapiens
tgagacccgcctggg

SEQ ID NO: 194484 - DNA, 15 bp, Homo sapiens
ttgagacccgcctgg

SEQ ID NO: 194485 - DNA, 15 bp, Homo sapiens
tttgagacccgcctg

SEQ ID NO: 194486 - DNA, 15 bp, Homo sapiens
gtttgagacccgcct

SEQ ID NO: 194487 - DNA, 15 bp, Homo sapiens
agtttgagacccgcc

SEQ ID NO: 194488 - DNA, 15 bp, Homo sapiens
gagtttgagacccgc

SEQ ID NO: 194489 - DNA, 15 bp, Homo sapiens
tgagtttgagacccg

SEQ ID NO: 194490 - DNA, 15 bp, Homo sapiens
atgagtttgagaccc

SEQ ID NO: 194491 - DNA, 15 bp, Homo sapiens
catgagtttgagacc

SEQ ID NO: 194492 - DNA, 15 bp, Homo sapiens
ccatgagtttgagac

SEQ ID NO: 194493 - DNA, 15 bp, Homo sapiens
gccatgagtttgaga

SEQ ID NO: 194494 - DNA, 15 bp, Homo sapiens
agccatgagtttgag

SEQ ID NO: 194495 - DNA, 15 bp, Homo sapiens
aagccatgagtttga

SEQ ID NO: 194496 - DNA, 15 bp, Homo sapiens
gaagccatgagtttg

SEQ ID NO: 194497 - DNA, 15 bp, Homo sapiens
tgaagccatgagttt

SEQ ID NO: 194498 - DNA, 15 bp, Homo sapiens
ttgaagccatgagtt

SEQ ID NO: 194499 - DNA, 15 bp, Homo sapiens
tttgaagccatgagt

SEQ ID NO: 194500 - DNA, 15 bp, Homo sapiens
atttgaagccatgag

SEQ ID NO: 194501 - DNA, 15 bp, Homo sapiens
catttgaagccatga

SEQ ID NO: 194502 - DNA, 15 bp, Homo sapiens
tcatttgaagccatg

SEQ ID NO: 194503 - DNA, 15 bp, Homo sapiens
atcatttgaagccat

SEQ ID NO: 194504 - DNA, 15 bp, Homo sapiens
gatcatttgaagcca

SEQ ID NO: 194505 - DNA, 15 bp, Homo sapiens
ggatcatttgaagcc

SEQ ID NO: 194506 - DNA, 15 bp, Homo sapiens
aggatcatttgaagc

SEQ ID NO: 194507 - DNA, 15 bp, Homo sapiens
gaggatcatttgaag

SEQ ID NO: 194508 - DNA, 15 bp, Homo sapiens
ggaggatcatttgaa

SEQ ID NO: 194509 - DNA, 15 bp, Homo sapiens
gggaggatcatttga

SEQ ID NO: 194510 - DNA, 15 bp, Homo sapiens
tgggaggatcatttg

SEQ ID NO: 194511 - DNA, 15 bp, Homo sapiens
gtgggaggatcattt

SEQ ID NO: 194512 - DNA, 15 bp, Homo sapiens
agtgggaggatcatt

SEQ ID NO: 194513 - DNA, 15 bp, Homo sapiens
aagtgggaggatcat

SEQ ID NO: 194514 - DNA, 15 bp, Homo sapiens
gaagtgggaggatca

SEQ ID NO: 194515 - DNA, 15 bp, Homo sapiens
tgaagtgggaggatc

SEQ ID NO: 194516 - DNA, 15 bp, Homo sapiens
ctgaagtgggaggat

SEQ ID NO: 194517 - DNA, 15 bp, Homo sapiens
gctgaagtgggagga

SEQ ID NO: 194518 - DNA, 15 bp, Homo sapiens
ggctgaagtgggagg

SEQ ID NO: 194519 - DNA, 15 bp, Homo sapiens
aggctgaagtgggag

SEQ ID NO: 194520 - DNA, 15 bp, Homo sapiens
gaggctgaagtggga

SEQ ID NO: 194521 - DNA, 15 bp, Homo sapiens
ggaggctgaagtggg

SEQ ID NO: 194522 - DNA, 15 bp, Homo sapiens
gggaggctgaagtgg

SEQ ID NO: 194523 - DNA, 15 bp, Homo sapiens
tgggaggctgaagtg

SEQ ID NO: 194524 - DNA, 15 bp, Homo sapiens
ttgggaggctgaagt

SEQ ID NO: 194525 - DNA, 15 bp, Homo sapiens
tttgggaggctgaag

SEQ ID NO: 194526 - DNA, 15 bp, Homo sapiens
ttttgggaggctgaa

SEQ ID NO: 194527 - DNA, 15 bp, Homo sapiens
attttgggaggctga

SEQ ID NO: 194528 - DNA, 15 bp, Homo sapiens
cattttgggaggctg

SEQ ID NO: 194529 - DNA, 15 bp, Homo sapiens
gcattttgggaggct

SEQ ID NO: 194530 - DNA, 15 bp, Homo sapiens
agcattttgggaggc

SEQ ID NO: 194531 - DNA, 15 bp, Homo sapiens
cagcattttgggagg

SEQ ID NO: 194532 - DNA, 15 bp, Homo sapiens
ccagcattttgggag

SEQ ID NO: 194533 - DNA, 15 bp, Homo sapiens
cccagcattttggga

SEQ ID NO: 194534 - DNA, 15 bp, Homo sapiens
tcccagcattttggg

SEQ ID NO: 194535 - DNA, 15 bp, Homo sapiens
gtcccagcattttgg

SEQ ID NO: 194536 - DNA, 15 bp, Homo sapiens
agtcccagcattttg

SEQ ID NO: 194537 - DNA, 15 bp, Homo sapiens
tagtcccagcatttt

SEQ ID NO: 194538 - DNA, 15 bp, Homo sapiens
gtagtcccagcattt

SEQ ID NO: 194539 - DNA, 15 bp, Homo sapiens
tgtagtcccagcatt

SEQ ID NO: 194540 - DNA, 15 bp, Homo sapiens
ctgtagtcccagcat

SEQ ID NO: 194541 - DNA, 15 bp, Homo sapiens
actgtagtcccagca

SEQ ID NO: 194542 - DNA, 15 bp, Homo sapiens
aactgtagtcccagc

SEQ ID NO: 194543 - DNA, 15 bp, Homo sapiens
caactgtagtcccag

SEQ ID NO: 194544 - DNA, 15 bp, Homo sapiens
acaactgtagtccca

SEQ ID NO: 194545 - DNA, 15 bp, Homo sapiens
cacaactgtagtccc

SEQ ID NO: 194546 - DNA, 15 bp, Homo sapiens
tcacaactgtagtcc

SEQ ID NO: 194547 - DNA, 15 bp, Homo sapiens
ctcacaactgtagtc

SEQ ID NO: 194548 - DNA, 15 bp, Homo sapiens
gctcacaactgtagt

SEQ ID NO: 194549 - DNA, 15 bp, Homo sapiens
ggctcacaactgtag

SEQ ID NO: 194550 - DNA, 15 bp, Homo sapiens
tggctcacaactgta

SEQ ID NO: 194551 - DNA, 15 bp, Homo sapiens
gtggctcacaactgt

SEQ ID NO: 194552 - DNA, 15 bp, Homo sapiens
ggtggctcacaactg

SEQ ID NO: 194553 - DNA, 15 bp, Homo sapiens
tggtggctcacaact

SEQ ID NO: 194554 - DNA, 15 bp, Homo sapiens
atggtggctcacaac

SEQ ID NO: 194555 - DNA, 15 bp, Homo sapiens
catggtggctcacaa

SEQ ID NO: 194556 - DNA, 15 bp, Homo sapiens
gcatggtggctcaca

SEQ ID NO: 194557 - DNA, 15 bp, Homo sapiens
ggcatggtggctcac

SEQ ID NO: 194558 - DNA, 15 bp, Homo sapiens
aggcatggtggctca

SEQ ID NO: 194559 - DNA, 15 bp, Homo sapiens
caggcatggtggctc

SEQ ID NO: 194560 - DNA, 15 bp, Homo sapiens
ccaggcatggtggct

SEQ ID NO: 194561 - DNA, 15 bp, Homo sapiens
ggccaggcatggtgg

SEQ ID NO: 194562 - DNA, 15 bp, Homo sapiens
aggccaggcatggtg

SEQ ID NO: 194563 - DNA, 15 bp, Homo sapiens
gaggccaggcatggt

SEQ ID NO: 194564 - DNA, 15 bp, Homo sapiens
agaggccaggcatgg

SEQ ID NO: 194565 - DNA, 15 bp, Homo sapiens
gagaggccaggcatg

SEQ ID NO: 194566 - DNA, 15 bp, Homo sapiens
ggagaggccaggcat

SEQ ID NO: 194567 - DNA, 15 bp, Homo sapiens
aggagaggccaggca

SEQ ID NO: 194568 - DNA, 15 bp, Homo sapiens
aaggagaggccaggc

SEQ ID NO: 194569 - DNA, 15 bp, Homo sapiens
taaggagaggccagg

SEQ ID NO: 194570 - DNA, 15 bp, Homo sapiens
gtaaggagaggccag

SEQ ID NO: 194571 - DNA, 15 bp, Homo sapiens
ggtaaggagaggcca

SEQ ID NO: 194572 - DNA, 15 bp, Homo sapiens
aggtaaggagaggcc

SEQ ID NO: 194573 - DNA, 15 bp, Homo sapiens
aaggtaaggagaggc

SEQ ID NO: 194574 - DNA, 15 bp, Homo sapiens
aaaggtaaggagagg

SEQ ID NO: 194575 - DNA, 15 bp, Homo sapiens
taaaggtaaggagag

SEQ ID NO: 194576 - DNA, 15 bp, Homo sapiens
ttaaaggtaaggaga

SEQ ID NO: 194577 - DNA, 15 bp, Homo sapiens
tttaaaggtaaggag

SEQ ID NO: 194578 - DNA, 15 bp, Homo sapiens
ttttaaaggtaagga

SEQ ID NO: 194579 - DNA, 15 bp, Homo sapiens
cttttaaaggtaagg

SEQ ID NO: 194580 - DNA, 15 bp, Homo sapiens
tcttttaaaggtaag

SEQ ID NO: 194581 - DNA, 15 bp, Homo sapiens
ttcttttaaaggtaa

SEQ ID NO: 194582 - DNA, 15 bp, Homo sapiens
gttcttttaaaggta

SEQ ID NO: 194583 - DNA, 15 bp, Homo sapiens
tgttcttttaaaggt

SEQ ID NO: 194584 - DNA, 15 bp, Homo sapiens
ctgttcttttaaagg

SEQ ID NO: 194585 - DNA, 15 bp, Homo sapiens
tctgttcttttaaag

SEQ ID NO: 194586 - DNA, 15 bp, Homo sapiens
ctctgttcttttaaa

SEQ ID NO: 194587 - DNA, 15 bp, Homo sapiens
cctctgttcttttaa

SEQ ID NO: 194588 - DNA, 15 bp, Homo sapiens
gcctctgttctttta

SEQ ID NO: 194589 - DNA, 15 bp, Homo sapiens
tgcctctgttctttt

SEQ ID NO: 194590 - DNA, 15 bp, Homo sapiens
gtgcctctgttcttt

SEQ ID NO: 194591 - DNA, 15 bp, Homo sapiens
agtgcctctgttctt

SEQ ID NO: 194592 - DNA, 15 bp, Homo sapiens
cagtgcctctgttct

SEQ ID NO: 194593 - DNA, 15 bp, Homo sapiens
ccagtgcctctgttc

SEQ ID NO: 194594 - DNA, 15 bp, Homo sapiens
cccagtgcctctgtt

SEQ ID NO: 194595 - DNA, 15 bp, Homo sapiens
gcccagtgcctctgt

SEQ ID NO: 194596 - DNA, 15 bp, Homo sapiens
cgcccagtgcctctg

SEQ ID NO: 194597 - DNA, 15 bp, Homo sapiens
acgcccagtgcctct

SEQ ID NO: 194598 - DNA, 15 bp, Homo sapiens
cacgcccagtgcctc

SEQ ID NO: 194599 - DNA, 15 bp, Homo sapiens
ccacgcccagtgcct

SEQ ID NO: 194600 - DNA, 15 bp, Homo sapiens
accacgcccagtgcc

SEQ ID NO: 194601 - DNA, 15 bp, Homo sapiens
caccacgcccagtgc

SEQ ID NO: 194602 - DNA, 15 bp, Homo sapiens
ccaccacgcccagtg

SEQ ID NO: 194603 - DNA, 15 bp, Homo sapiens
gccaccacgcccagt

SEQ ID NO: 194604 - DNA, 15 bp, Homo sapiens
agccaccacgcccag

SEQ ID NO: 194605 - DNA, 15 bp, Homo sapiens
gagccaccacgccca

SEQ ID NO: 194606 - DNA, 15 bp, Homo sapiens
tgagccaccacgccc

SEQ ID NO: 194607 - DNA, 15 bp, Homo sapiens
gtgagccaccacgcc

SEQ ID NO: 194608 - DNA, 15 bp, Homo sapiens
cgtgagccaccacgc

SEQ ID NO: 194609 - DNA, 15 bp, Homo sapiens
gcgtgagccaccacg

SEQ ID NO: 194610 - DNA, 15 bp, Homo sapiens
agcgtgagccaccac

SEQ ID NO: 194611 - DNA, 15 bp, Homo sapiens
cagcgtgagccacca

SEQ ID NO: 194612 - DNA, 15 bp, Homo sapiens
acagcgtgagccacc

SEQ ID NO: 194613 - DNA, 15 bp, Homo sapiens
tacagcgtgagccac

SEQ ID NO: 194614 - DNA, 15 bp, Homo sapiens
ttacagcgtgagcca

SEQ ID NO: 194615 - DNA, 15 bp, Homo sapiens
attacagcgtgagcc

SEQ ID NO: 194616 - DNA, 15 bp, Homo sapiens
gattacagcgtgagc

SEQ ID NO: 194617 - DNA, 15 bp, Homo sapiens
ggattacagcgtgag

SEQ ID NO: 194618 - DNA, 15 bp, Homo sapiens
gggattacagcgtga

SEQ ID NO: 194619 - DNA, 15 bp, Homo sapiens
tgggattacagcgtg

SEQ ID NO: 194620 - DNA, 15 bp, Homo sapiens
ctgggattacagcgt

SEQ ID NO: 194621 - DNA, 15 bp, Homo sapiens
gctgggattacagcg

SEQ ID NO: 194622 - DNA, 15 bp, Homo sapiens
tgctgggattacagc

SEQ ID NO: 194623 - DNA, 15 bp, Homo sapiens
gcctcccaaagtgct

SEQ ID NO: 194624 - DNA, 15 bp, Homo sapiens
ggcctcccaaagtgc

SEQ ID NO: 194625 - DNA, 15 bp, Homo sapiens
tggcctcccaaagtg

SEQ ID NO: 194626 - DNA, 15 bp, Homo sapiens
ttggcctcccaaagt

SEQ ID NO: 194627 - DNA, 15 bp, Homo sapiens
cttggcctcccaaag

SEQ ID NO: 194628 - DNA, 15 bp, Homo sapiens
gccttggcctcccaa

SEQ ID NO: 194629 - DNA, 15 bp, Homo sapiens
cgccttggcctccca

SEQ ID NO: 194630 - DNA, 15 bp, Homo sapiens
ccgccttggcctccc

SEQ ID NO: 194631 - DNA, 15 bp, Homo sapiens
cccgccttggcctcc

SEQ ID NO: 194632 - DNA, 15 bp, Homo sapiens
acccgccttggcctc

SEQ ID NO: 194633 - DNA, 15 bp, Homo sapiens
cacccgccttggcct

SEQ ID NO: 194634 - DNA, 15 bp, Homo sapiens
ccacccgccttggcc

SEQ ID NO: 194635 - DNA, 15 bp, Homo sapiens
tccacccgccttggc

SEQ ID NO: 194636 - DNA, 15 bp, Homo sapiens
atccacccgccttgg

SEQ ID NO: 194637 - DNA, 15 bp, Homo sapiens
gatccacccgccttg

SEQ ID NO: 194638 - DNA, 15 bp, Homo sapiens
tgatccacccgcctt

SEQ ID NO: 194639 - DNA, 15 bp, Homo sapiens
gtgatccacccgcct

SEQ ID NO: 194640 - DNA, 15 bp, Homo sapiens
ggtgatccacccgcc

SEQ ID NO: 194641 - DNA, 15 bp, Homo sapiens
aggtgatccacccgc

SEQ ID NO: 194642 - DNA, 15 bp, Homo sapiens
caggtgatccacccg

SEQ ID NO: 194643 - DNA, 15 bp, Homo sapiens
tcaggtgatccaccc

SEQ ID NO: 194644 - DNA, 15 bp, Homo sapiens
ctcaggtgatccacc

SEQ ID NO: 194645 - DNA, 15 bp, Homo sapiens
cctcaggtgatccac

SEQ ID NO: 194646 - DNA, 15 bp, Homo sapiens
acctcaggtgatcca

SEQ ID NO: 194647 - DNA, 15 bp, Homo sapiens
gacctcaggtgatcc

SEQ ID NO: 194648 - DNA, 15 bp, Homo sapiens
tgacctcaggtgatc

SEQ ID NO: 194649 - DNA, 15 bp, Homo sapiens
ctgacctcaggtgat

SEQ ID NO: 194650 - DNA, 15 bp, Homo sapiens
cctgacctcaggtga

SEQ ID NO: 194651 - DNA, 15 bp, Homo sapiens
tcctgacctcaggtg

SEQ ID NO: 194652 - DNA, 15 bp, Homo sapiens
ctcctgacctcaggt

SEQ ID NO: 194653 - DNA, 15 bp, Homo sapiens
actcctgacctcagg

SEQ ID NO: 194654 - DNA, 15 bp, Homo sapiens
aactcctgacctcag

SEQ ID NO: 194655 - DNA, 15 bp, Homo sapiens
aaactcctgacctca

SEQ ID NO: 194656 - DNA, 15 bp, Homo sapiens
caaactcctgacctc

SEQ ID NO: 194657 - DNA, 15 bp, Homo sapiens
tcaaactcctgacct

SEQ ID NO: 194658 - DNA, 15 bp, Homo sapiens
ctcaaactcctgacc

SEQ ID NO: 194659 - DNA, 15 bp, Homo sapiens
tctcaaactcctgac

SEQ ID NO: 194660 - DNA, 15 bp, Homo sapiens
gtctcaaactcctga

SEQ ID NO: 194661 - DNA, 15 bp, Homo sapiens
ctggtctcaaactcc

SEQ ID NO: 194662 - DNA, 15 bp, Homo sapiens
gctggtctcaaactc

SEQ ID NO: 194663 - DNA, 15 bp, Homo sapiens
tcaggctggtctcaa

SEQ ID NO: 194664 - DNA, 15 bp, Homo sapiens
gtcaggctggtctca

SEQ ID NO: 194665 - DNA, 15 bp, Homo sapiens
ggtcaggctggtctc

SEQ ID NO: 194666 - DNA, 15 bp, Homo sapiens
tggtcaggctggtct

SEQ ID NO: 194667 - DNA, 15 bp, Homo sapiens
ttggtcaggctggtc

SEQ ID NO: 194668 - DNA, 15 bp, Homo sapiens
gttggtcaggctggt

SEQ ID NO: 194669 - DNA, 15 bp, Homo sapiens
tgttggtcaggctgg

SEQ ID NO: 194670 - DNA, 15 bp, Homo sapiens
atgttggtcaggctg

SEQ ID NO: 194671 - DNA, 15 bp, Homo sapiens
catgttggtcaggct

SEQ ID NO: 194672 - DNA, 15 bp, Homo sapiens
ccatgttggtcaggc

SEQ ID NO: 194673 - DNA, 15 bp, Homo sapiens
accatgttggtcagg

SEQ ID NO: 194674 - DNA, 15 bp, Homo sapiens
caccatgttggtcag

SEQ ID NO: 194675 - DNA, 15 bp, Homo sapiens
tcaccatgttggtca

SEQ ID NO: 194676 - DNA, 15 bp, Homo sapiens
ttcaccatgttggtc

SEQ ID NO: 194677 - DNA, 15 bp, Homo sapiens
tttcaccatgttggt

SEQ ID NO: 194678 - DNA, 15 bp, Homo sapiens
ggtttcaccatgttg

SEQ ID NO: 194679 - DNA, 15 bp, Homo sapiens
gggtttcaccatgtt

SEQ ID NO: 194680 - DNA, 15 bp, Homo sapiens
ggggtttcaccatgt

SEQ ID NO: 194681 - DNA, 15 bp, Homo sapiens
cggggtttcaccatg

SEQ ID NO: 194682 - DNA, 15 bp, Homo sapiens
acggggtttcaccat

SEQ ID NO: 194683 - DNA, 15 bp, Homo sapiens
gacggggtttcacca

SEQ ID NO: 194684 - DNA, 15 bp, Homo sapiens
agacggggtttcacc

SEQ ID NO: 194685 - DNA, 15 bp, Homo sapiens
gagacggggtttcac

SEQ ID NO: 194686 - DNA, 15 bp, Homo sapiens
agagacggggtttca

SEQ ID NO: 194687 - DNA, 15 bp, Homo sapiens
tagagacggggtttc

SEQ ID NO: 194688 - DNA, 15 bp, Homo sapiens
cagtagagacggggt

SEQ ID NO: 194689 - DNA, 15 bp, Homo sapiens
tcagtagagacgggg

SEQ ID NO: 194690 - DNA, 15 bp, Homo sapiens
ttcagtagagacggg

SEQ ID NO: 194691 - DNA, 15 bp, Homo sapiens
tttcagtagagacgg

SEQ ID NO: 194692 - DNA, 15 bp, Homo sapiens
ttttcagtagagacg

SEQ ID NO: 194693 - DNA, 15 bp, Homo sapiens
attttcagtagagac

SEQ ID NO: 194694 - DNA, 15 bp, Homo sapiens
tattttcagtagaga

SEQ ID NO: 194695 - DNA, 15 bp, Homo sapiens
gtattttcagtagag

SEQ ID NO: 194696 - DNA, 15 bp, Homo sapiens
tgtattttcagtaga

SEQ ID NO: 194697 - DNA, 15 bp, Homo sapiens
ttgtattttcagtag

SEQ ID NO: 194698 - DNA, 15 bp, Homo sapiens
tttgtattttcagta

SEQ ID NO: 194699 - DNA, 15 bp, Homo sapiens
ttttgtattttcagt

SEQ ID NO: 194700 - DNA, 15 bp, Homo sapiens
tttttgtattttcag

SEQ ID NO: 194701 - DNA, 15 bp, Homo sapiens
atttttgtattttca

SEQ ID NO: 194702 - DNA, 15 bp, Homo sapiens
aatttttgtattttc

SEQ ID NO: 194703 - DNA, 15 bp, Homo sapiens
taatttttgtatttt

SEQ ID NO: 194704 - DNA, 15 bp, Homo sapiens
ctaatttttgtattt

SEQ ID NO: 194705 - DNA, 15 bp, Homo sapiens
gctaatttttgtatt

SEQ ID NO: 194706 - DNA, 15 bp, Homo sapiens
ggctaatttttgtat

SEQ ID NO: 194707 - DNA, 15 bp, Homo sapiens
cgcctggctaatttt

SEQ ID NO: 194708 - DNA, 15 bp, Homo sapiens
acgcctggctaattt

SEQ ID NO: 194709 - DNA, 15 bp, Homo sapiens
cacgcctggctaatt

SEQ ID NO: 194710 - DNA, 15 bp, Homo sapiens
acacgcctggctaat

SEQ ID NO: 194711 - DNA, 15 bp, Homo sapiens
aacacgcctggctaa

SEQ ID NO: 194712 - DNA, 15 bp, Homo sapiens
caacacgcctggcta

SEQ ID NO: 194713 - DNA, 15 bp, Homo sapiens
ccaacacgcctggct

SEQ ID NO: 194714 - DNA, 15 bp, Homo sapiens
gccaacacgcctggc

SEQ ID NO: 194715 - DNA, 15 bp, Homo sapiens
cgccaacacgcctgg

SEQ ID NO: 194716 - DNA, 15 bp, Homo sapiens
gcgccaacacgcctg

SEQ ID NO: 194717 - DNA, 15 bp, Homo sapiens
tgcgccaacacgcct

SEQ ID NO: 194718 - DNA, 15 bp, Homo sapiens
gtgcgccaacacgcc

SEQ ID NO: 194719 - DNA, 15 bp, Homo sapiens
tgtgcgccaacacgc

SEQ ID NO: 194720 - DNA, 15 bp, Homo sapiens
gtgtgcgccaacacg

SEQ ID NO: 194721 - DNA, 15 bp, Homo sapiens
ggtgtgcgccaacac

SEQ ID NO: 194722 - DNA, 15 bp, Homo sapiens
aggtgtgcgccaaca

SEQ ID NO: 194723 - DNA, 15 bp, Homo sapiens
taggtgtgcgccaac

SEQ ID NO: 194724 - DNA, 15 bp, Homo sapiens
ataggtgtgcgccaa

SEQ ID NO: 194725 - DNA, 15 bp, Homo sapiens
tataggtgtgcgcca

SEQ ID NO: 194726 - DNA, 15 bp, Homo sapiens
ttataggtgtgcgcc

SEQ ID NO: 194727 - DNA, 15 bp, Homo sapiens
attataggtgtgcgc

SEQ ID NO: 194728 - DNA, 15 bp, Homo sapiens
gattataggtgtgcg

SEQ ID NO: 194729 - DNA, 15 bp, Homo sapiens
agattataggtgtgc

SEQ ID NO: 194730 - DNA, 15 bp, Homo sapiens
gagattataggtgtg

SEQ ID NO: 194731 - DNA, 15 bp, Homo sapiens
tgagattataggtgt

SEQ ID NO: 194732 - DNA, 15 bp, Homo sapiens
ctgagattataggtg

SEQ ID NO: 194733 - DNA, 15 bp, Homo sapiens
gctgagattataggt

SEQ ID NO: 194734 - DNA, 15 bp, Homo sapiens
agctgagattatagg

SEQ ID NO: 194735 - DNA, 15 bp, Homo sapiens
tagctgagattatag

SEQ ID NO: 194736 - DNA, 15 bp, Homo sapiens
gtagctgagattata

SEQ ID NO: 194737 - DNA, 15 bp, Homo sapiens
agtagctgagattat

SEQ ID NO: 194738 - DNA, 15 bp, Homo sapiens
gagtagctgagatta

SEQ ID NO: 194739 - DNA, 15 bp, Homo sapiens
agagtagctgagatt

SEQ ID NO: 194740 - DNA, 15 bp, Homo sapiens
cagagtagctgagat

SEQ ID NO: 194741 - DNA, 15 bp, Homo sapiens
ccagagtagctgaga

SEQ ID NO: 194742 - DNA, 15 bp, Homo sapiens
tccagagtagctgag

SEQ ID NO: 194743 - DNA, 15 bp, Homo sapiens
ctccagagtagctga

SEQ ID NO: 194744 - DNA, 15 bp, Homo sapiens
cctccagagtagctg

SEQ ID NO: 194745 - DNA, 15 bp, Homo sapiens
gcctccagagtagct

SEQ ID NO: 194746 - DNA, 15 bp, Homo sapiens
agcctccagagtagc

SEQ ID NO: 194747 - DNA, 15 bp, Homo sapiens
cagcctccagagtag

SEQ ID NO: 194748 - DNA, 15 bp, Homo sapiens
tcagcctccagagta

SEQ ID NO: 194749 - DNA, 15 bp, Homo sapiens
ctcagcctccagagt

SEQ ID NO: 194750 - DNA, 15 bp, Homo sapiens
cctcagcctccagag

SEQ ID NO: 194751 - DNA, 15 bp, Homo sapiens
gcctcagcctccaga

SEQ ID NO: 194752 - DNA, 15 bp, Homo sapiens
tgcctcagcctccag

SEQ ID NO: 194753 - DNA, 15 bp, Homo sapiens
ctgcctcagcctcca

SEQ ID NO: 194754 - DNA, 15 bp, Homo sapiens
tctcctgcctcagcc

SEQ ID NO: 194755 - DNA, 15 bp, Homo sapiens
ttctcctgcctcagc

SEQ ID NO: 194756 - DNA, 15 bp, Homo sapiens
gattctcctgcctca

SEQ ID NO: 194757 - DNA, 15 bp, Homo sapiens
cgattctcctgcctc

SEQ ID NO: 194758 - DNA, 15 bp, Homo sapiens
gcgattctcctgcct

SEQ ID NO: 194759 - DNA, 15 bp, Homo sapiens
agcgattctcctgcc

SEQ ID NO: 194760 - DNA, 15 bp, Homo sapiens
aagcgattctcctgc

SEQ ID NO: 194761 - DNA, 15 bp, Homo sapiens
caagcgattctcctg

SEQ ID NO: 194762 - DNA, 15 bp, Homo sapiens
tcaagcgattctcct

SEQ ID NO: 194763 - DNA, 15 bp, Homo sapiens
ttcaagcgattctcc

SEQ ID NO: 194764 - DNA, 15 bp, Homo sapiens
gttcaagcgattctc

SEQ ID NO: 194765 - DNA, 15 bp, Homo sapiens
ggttcaagcgattct

SEQ ID NO: 194766 - DNA, 15 bp, Homo sapiens
gggttcaagcgattc

SEQ ID NO: 194767 - DNA, 15 bp, Homo sapiens
tgggttcaagcgatt

SEQ ID NO: 194768 - DNA, 15 bp, Homo sapiens
ctgggttcaagcgat

SEQ ID NO: 194769 - DNA, 15 bp, Homo sapiens
cctgggttcaagcga

SEQ ID NO: 194770 - DNA, 15 bp, Homo sapiens
tcctgggttcaagcg

SEQ ID NO: 194771 - DNA, 15 bp, Homo sapiens
ttcctgggttcaagc

SEQ ID NO: 194772 - DNA, 15 bp, Homo sapiens
cttcctgggttcaag

SEQ ID NO: 194773 - DNA, 15 bp, Homo sapiens
gcttcctgggttcaa

SEQ ID NO: 194774 - DNA, 15 bp, Homo sapiens
tgcttcctgggttca

SEQ ID NO: 194775 - DNA, 15 bp, Homo sapiens
ctgcttcctgggttc

SEQ ID NO: 194776 - DNA, 15 bp, Homo sapiens
tctgcttcctgggtt

SEQ ID NO: 194777 - DNA, 15 bp, Homo sapiens
ctctgcttcctgggt

SEQ ID NO: 194778 - DNA, 15 bp, Homo sapiens
cctctgcttcctggg

SEQ ID NO: 194779 - DNA, 15 bp, Homo sapiens
acctctgcttcctgg

SEQ ID NO: 194780 - DNA, 15 bp, Homo sapiens
aacctctgcttcctg

SEQ ID NO: 194781 - DNA, 15 bp, Homo sapiens
caacctctgcttcct

SEQ ID NO: 194782 - DNA, 15 bp, Homo sapiens
gcaacctctgcttcc

SEQ ID NO: 194783 - DNA, 15 bp, Homo sapiens
tgcaacctctgcttc

SEQ ID NO: 194784 - DNA, 15 bp, Homo sapiens
ctgcaacctctgctt

SEQ ID NO: 194785 - DNA, 15 bp, Homo sapiens
actgcaacctctgct

SEQ ID NO: 194786 - DNA, 15 bp, Homo sapiens
cactgcaacctctgc

SEQ ID NO: 194787 - DNA, 15 bp, Homo sapiens
ttcactgcaacctct

SEQ ID NO: 194788 - DNA, 15 bp, Homo sapiens
gttcactgcaacctc

SEQ ID NO: 194789 - DNA, 15 bp, Homo sapiens
ggttcactgcaacct

SEQ ID NO: 194790 - DNA, 15 bp, Homo sapiens
tggttcactgcaacc

SEQ ID NO: 194791 - DNA, 15 bp, Homo sapiens
ttggttcactgcaac

SEQ ID NO: 194792 - DNA, 15 bp, Homo sapiens
cttggttcactgcaa

SEQ ID NO: 194793 - DNA, 15 bp, Homo sapiens
tcttggttcactgca

SEQ ID NO: 194794 - DNA, 15 bp, Homo sapiens
atcttggttcactgc

SEQ ID NO: 194795 - DNA, 15 bp, Homo sapiens
gatcttggttcactg

SEQ ID NO: 194796 - DNA, 15 bp, Homo sapiens
tgatcttggttcact

SEQ ID NO: 194797 - DNA, 15 bp, Homo sapiens
atgatcttggttcac

SEQ ID NO: 194798 - DNA, 15 bp, Homo sapiens
catgatcttggttca

SEQ ID NO: 194799 - DNA, 15 bp, Homo sapiens
gcatgatcttggttc

SEQ ID NO: 194800 - DNA, 15 bp, Homo sapiens
ggcatgatcttggtt

SEQ ID NO: 194801 - DNA, 15 bp, Homo sapiens
tggcatgatcttggt

SEQ ID NO: 194802 - DNA, 15 bp, Homo sapiens
gtggcatgatcttgg

SEQ ID NO: 194803 - DNA, 15 bp, Homo sapiens
agtggcatgatcttg

SEQ ID NO: 194804 - DNA, 15 bp, Homo sapiens
cagtggcatgatctt

SEQ ID NO: 194805 - DNA, 15 bp, Homo sapiens
gcagtggcatgatct

SEQ ID NO: 194806 - DNA, 15 bp, Homo sapiens
tgcagtggcatgatc

SEQ ID NO: 194807 - DNA, 15 bp, Homo sapiens
gtgcagtggcatgat

SEQ ID NO: 194808 - DNA, 15 bp, Homo sapiens
agtgcagtggcatga

SEQ ID NO: 194809 - DNA, 15 bp, Homo sapiens
gagtgcagtggcatg

SEQ ID NO: 194810 - DNA, 15 bp, Homo sapiens
ggagtgcagtggcat

SEQ ID NO: 194811 - DNA, 15 bp, Homo sapiens
tggagtgcagtggca

SEQ ID NO: 194812 - DNA, 15 bp, Homo sapiens
ctggagtgcagtggc

SEQ ID NO: 194813 - DNA, 15 bp, Homo sapiens
acccaggctggagtg

SEQ ID NO: 194814 - DNA, 15 bp, Homo sapiens
cacccaggctggagt

SEQ ID NO: 194815 - DNA, 15 bp, Homo sapiens
tcacccaggctggag

SEQ ID NO: 194816 - DNA, 15 bp, Homo sapiens
gtcacccaggctgga

SEQ ID NO: 194817 - DNA, 15 bp, Homo sapiens
tgtcacccaggctgg

SEQ ID NO: 194818 - DNA, 15 bp, Homo sapiens
ctgtcacccaggctg

SEQ ID NO: 194819 - DNA, 15 bp, Homo sapiens
tctgtcacccaggct

SEQ ID NO: 194820 - DNA, 15 bp, Homo sapiens
ttctgtcacccaggc

SEQ ID NO: 194821 - DNA, 15 bp, Homo sapiens
gttctgtcacccagg

SEQ ID NO: 194822 - DNA, 15 bp, Homo sapiens
tgttctgtcacccag

SEQ ID NO: 194823 - DNA, 15 bp, Homo sapiens
ttgttctgtcaccca

SEQ ID NO: 194824 - DNA, 15 bp, Homo sapiens
cttgttctgtcaccc

SEQ ID NO: 194825 - DNA, 15 bp, Homo sapiens
tcttgttctgtcacc

SEQ ID NO: 194826 - DNA, 15 bp, Homo sapiens
gtcttgttctgtcac

SEQ ID NO: 194827 - DNA, 15 bp, Homo sapiens
agtcttgttctgtca

SEQ ID NO: 194828 - DNA, 15 bp, Homo sapiens
gagtcttgttctgtc

SEQ ID NO: 194829 - DNA, 15 bp, Homo sapiens
ggagtcttgttctgt

SEQ ID NO: 194830 - DNA, 15 bp, Homo sapiens
tggagtcttgttctg

SEQ ID NO: 194831 - DNA, 15 bp, Homo sapiens
atggagtcttgttct

SEQ ID NO: 194832 - DNA, 15 bp, Homo sapiens
gatggagtcttgttc

SEQ ID NO: 194833 - DNA, 15 bp, Homo sapiens
agatggagtcttgtt

SEQ ID NO: 194834 - DNA, 15 bp, Homo sapiens
gagatggagtcttgt

SEQ ID NO: 194835 - DNA, 15 bp, Homo sapiens
tgagatggagtcttg

SEQ ID NO: 194836 - DNA, 15 bp, Homo sapiens
ttgagatggagtctt

SEQ ID NO: 194837 - DNA, 15 bp, Homo sapiens
tttgagatggagtct

SEQ ID NO: 194838 - DNA, 15 bp, Homo sapiens
ttttgagatggagtc

SEQ ID NO: 194839 - DNA, 15 bp, Homo sapiens
tttttgagatggagt

SEQ ID NO: 194840 - DNA, 15 bp, Homo sapiens
ttttttgagatggag

SEQ ID NO: 194841 - DNA, 15 bp, Homo sapiens
tttttttgagatgga

SEQ ID NO: 194842 - DNA, 15 bp, Homo sapiens
ttttttttgagatgg

SEQ ID NO: 194843 - DNA, 15 bp, Homo sapiens
tttttttttgagatg

SEQ ID NO: 194844 - DNA, 15 bp, Homo sapiens
ttttttttttgagat

SEQ ID NO: 194845 - DNA, 15 bp, Homo sapiens
tttttttttttgaga

SEQ ID NO: 194846 - DNA, 15 bp, Homo sapiens
ttttttttttttgag

SEQ ID NO: 194847 - DNA, 15 bp, Homo sapiens
ttttttttttttttt

SEQ ID NO: 194848 - DNA, 15 bp, Homo sapiens
gtttttttttttttt

SEQ ID NO: 194849 - DNA, 15 bp, Homo sapiens
tgttttttttttttt

SEQ ID NO: 194850 - DNA, 15 bp, Homo sapiens
ttgtttttttttttt

SEQ ID NO: 194851 - DNA, 15 bp, Homo sapiens
tttgttttttttttt

SEQ ID NO: 194852 - DNA, 15 bp, Homo sapiens
ttttgtttttttttt

SEQ ID NO: 194853 - DNA, 15 bp, Homo sapiens
tttttgttttttttt

SEQ ID NO: 194854 - DNA, 15 bp, Homo sapiens
ttttttgtttttttt

SEQ ID NO: 194855 - DNA, 15 bp, Homo sapiens
cttttttgttttttt

SEQ ID NO: 194856 - DNA, 15 bp, Homo sapiens
ccttttttgtttttt

SEQ ID NO: 194857 - DNA, 15 bp, Homo sapiens
tccttttttgttttt

SEQ ID NO: 194858 - DNA, 15 bp, Homo sapiens
ttccttttttgtttt

SEQ ID NO: 194859 - DNA, 15 bp, Homo sapiens
gttccttttttgttt

SEQ ID NO: 194860 - DNA, 15 bp, Homo sapiens
tgttccttttttgtt

SEQ ID NO: 194861 - DNA, 15 bp, Homo sapiens
ctgttccttttttgt

SEQ ID NO: 194862 - DNA, 15 bp, Homo sapiens
tctgttccttttttg

SEQ ID NO: 194863 - DNA, 15 bp, Homo sapiens
ttctgttcctttttt

SEQ ID NO: 194864 - DNA, 15 bp, Homo sapiens
cttctgttccttttt

SEQ ID NO: 194865 - DNA, 15 bp, Homo sapiens
gcttctgttcctttt

SEQ ID NO: 194866 - DNA, 15 bp, Homo sapiens
agcttctgttccttt

SEQ ID NO: 194867 - DNA, 15 bp, Homo sapiens
tagcttctgttcctt

SEQ ID NO: 194868 - DNA, 15 bp, Homo sapiens
ttagcttctgttcct

SEQ ID NO: 194869 - DNA, 15 bp, Homo sapiens
cttagcttctgttcc

SEQ ID NO: 194870 - DNA, 15 bp, Homo sapiens
acttagcttctgttc

SEQ ID NO: 194871 - DNA, 15 bp, Homo sapiens
gacttagcttctgtt

SEQ ID NO: 194872 - DNA, 15 bp, Homo sapiens
ggacttagcttctgt

SEQ ID NO: 194873 - DNA, 15 bp, Homo sapiens
tggacttagcttctg

SEQ ID NO: 194874 - DNA, 15 bp, Homo sapiens
atggacttagcttct

SEQ ID NO: 194875 - DNA, 15 bp, Homo sapiens
tatggacttagcttc

SEQ ID NO: 194876 - DNA, 15 bp, Homo sapiens
gtatggacttagctt

SEQ ID NO: 194877 - DNA, 15 bp, Homo sapiens
tgtatggacttagct

SEQ ID NO: 194878 - DNA, 15 bp, Homo sapiens
ctgtatggacttagc

SEQ ID NO: 194879 - DNA, 15 bp, Homo sapiens
cctgtatggacttag

SEQ ID NO: 194880 - DNA, 15 bp, Homo sapiens
tcctgtatggactta

SEQ ID NO: 194881 - DNA, 15 bp, Homo sapiens
gtcctgtatggactt

SEQ ID NO: 194882 - DNA, 15 bp, Homo sapiens
agtcctgtatggact

SEQ ID NO: 194883 - DNA, 15 bp, Homo sapiens
aagtcctgtatggac

SEQ ID NO: 194884 - DNA, 15 bp, Homo sapiens
taagtcctgtatgga

SEQ ID NO: 194885 - DNA, 15 bp, Homo sapiens
ctaagtcctgtatgg

SEQ ID NO: 194886 - DNA, 15 bp, Homo sapiens
gctaagtcctgtatg

SEQ ID NO: 194887 - DNA, 15 bp, Homo sapiens
agctaagtcctgtat

SEQ ID NO: 194888 - DNA, 15 bp, Homo sapiens
aagctaagtcctgta

SEQ ID NO: 194889 - DNA, 15 bp, Homo sapiens
taagctaagtcctgt

SEQ ID NO: 194890 - DNA, 15 bp, Homo sapiens
ttaagctaagtcctg

SEQ ID NO: 194891 - DNA, 15 bp, Homo sapiens
gttaagctaagtcct

SEQ ID NO: 194892 - DNA, 15 bp, Homo sapiens
agttaagctaagtcc

SEQ ID NO: 194893 - DNA, 15 bp, Homo sapiens
cagttaagctaagtc

SEQ ID NO: 194894 - DNA, 15 bp, Homo sapiens
ccagttaagctaagt

SEQ ID NO: 194895 - DNA, 15 bp, Homo sapiens
gccagttaagctaag

SEQ ID NO: 194896 - DNA, 15 bp, Homo sapiens
agccagttaagctaa

SEQ ID NO: 194897 - DNA, 15 bp, Homo sapiens
gagccagttaagcta

SEQ ID NO: 194898 - DNA, 15 bp, Homo sapiens
agagccagttaagct

SEQ ID NO: 194899 - DNA, 15 bp, Homo sapiens
tagagccagttaagc

SEQ ID NO: 194900 - DNA, 15 bp, Homo sapiens
ctagagccagttaag

SEQ ID NO: 194901 - DNA, 15 bp, Homo sapiens
tctagagccagttaa

SEQ ID NO: 194902 - DNA, 15 bp, Homo sapiens
ctctagagccagtta

SEQ ID NO: 194903 - DNA, 15 bp, Homo sapiens
gctctagagccagtt

SEQ ID NO: 194904 - DNA, 15 bp, Homo sapiens
agctctagagccagt

SEQ ID NO: 194905 - DNA, 15 bp, Homo sapiens
cagctctagagccag

SEQ ID NO: 194906 - DNA, 15 bp, Homo sapiens
gcagctctagagcca

SEQ ID NO: 194907 - DNA, 15 bp, Homo sapiens
agcagctctagagcc

SEQ ID NO: 194908 - DNA, 15 bp, Homo sapiens
gagcagctctagagc

SEQ ID NO: 194909 - DNA, 15 bp, Homo sapiens
tgagcagctctagag

SEQ ID NO: 194910 - DNA, 15 bp, Homo sapiens
ttgagcagctctaga

SEQ ID NO: 194911 - DNA, 15 bp, Homo sapiens
gttgagcagctctag

SEQ ID NO: 194912 - DNA, 15 bp, Homo sapiens
ggttgagcagctcta

SEQ ID NO: 194913 - DNA, 15 bp, Homo sapiens
tggttgagcagctct

SEQ ID NO: 194914 - DNA, 15 bp, Homo sapiens
ttggttgagcagctc

SEQ ID NO: 194915 - DNA, 15 bp, Homo sapiens
cttggttgagcagct

SEQ ID NO: 194916 - DNA, 15 bp, Homo sapiens
ccttggttgagcagc

SEQ ID NO: 194917 - DNA, 15 bp, Homo sapiens
cccttggttgagcag

SEQ ID NO: 194918 - DNA, 15 bp, Homo sapiens
tcccttggttgagca

SEQ ID NO: 194919 - DNA, 15 bp, Homo sapiens
ttcccttggttgagc

SEQ ID NO: 194920 - DNA, 15 bp, Homo sapiens
attcccttggttgag

SEQ ID NO: 194921 - DNA, 15 bp, Homo sapiens
cattcccttggttga

SEQ ID NO: 194922 - DNA, 15 bp, Homo sapiens
tcattcccttggttg

SEQ ID NO: 194923 - DNA, 15 bp, Homo sapiens
ctcattcccttggtt

SEQ ID NO: 194924 - DNA, 15 bp, Homo sapiens
actcattcccttggt

SEQ ID NO: 194925 - DNA, 15 bp, Homo sapiens
cactcattcccttgg

SEQ ID NO: 194926 - DNA, 15 bp, Homo sapiens
acactcattcccttg

SEQ ID NO: 194927 - DNA, 15 bp, Homo sapiens
cacactcattccctt

SEQ ID NO: 194928 - DNA, 15 bp, Homo sapiens
tcacactcattccct

SEQ ID NO: 194929 - DNA, 15 bp, Homo sapiens
ttcacactcattccc

SEQ ID NO: 194930 - DNA, 15 bp, Homo sapiens
tttcacactcattcc

SEQ ID NO: 194931 - DNA, 15 bp, Homo sapiens
atttcacactcattc

SEQ ID NO: 194932 - DNA, 15 bp, Homo sapiens
aatttcacactcatt

SEQ ID NO: 194933 - DNA, 15 bp, Homo sapiens
caatttcacactcat

SEQ ID NO: 194934 - DNA, 15 bp, Homo sapiens
gcaatttcacactca

SEQ ID NO: 194935 - DNA, 15 bp, Homo sapiens
agcaatttcacactc

SEQ ID NO: 194936 - DNA, 15 bp, Homo sapiens
aagcaatttcacact

SEQ ID NO: 194937 - DNA, 15 bp, Homo sapiens
aaagcaatttcacac

SEQ ID NO: 194938 - DNA, 15 bp, Homo sapiens
caaagcaatttcaca

SEQ ID NO: 194939 - DNA, 15 bp, Homo sapiens
ccaaagcaatttcac

SEQ ID NO: 194940 - DNA, 15 bp, Homo sapiens
tccaaagcaatttca

SEQ ID NO: 194941 - DNA, 15 bp, Homo sapiens
ttccaaagcaatttc

SEQ ID NO: 194942 - DNA, 15 bp, Homo sapiens
tttccaaagcaattt

SEQ ID NO: 194943 - DNA, 15 bp, Homo sapiens
gtttccaaagcaatt

SEQ ID NO: 194944 - DNA, 15 bp, Homo sapiens
agtttccaaagcaat

SEQ ID NO: 194945 - DNA, 15 bp, Homo sapiens
cagtttccaaagcaa

SEQ ID NO: 194946 - DNA, 15 bp, Homo sapiens
acagtttccaaagca

SEQ ID NO: 194947 - DNA, 15 bp, Homo sapiens
gacagtttccaaagc

SEQ ID NO: 194948 - DNA, 15 bp, Homo sapiens
ggacagtttccaaag

SEQ ID NO: 194949 - DNA, 15 bp, Homo sapiens
tggacagtttccaaa

SEQ ID NO: 194950 - DNA, 15 bp, Homo sapiens
ttggacagtttccaa

SEQ ID NO: 194951 - DNA, 15 bp, Homo sapiens
attggacagtttcca

SEQ ID NO: 194952 - DNA, 15 bp, Homo sapiens
cattggacagtttcc

SEQ ID NO: 194953 - DNA, 15 bp, Homo sapiens
gcattggacagtttc

SEQ ID NO: 194954 - DNA, 15 bp, Homo sapiens
agcattggacagttt

SEQ ID NO: 194955 - DNA, 15 bp, Homo sapiens
aagcattggacagtt

SEQ ID NO: 194956 - DNA, 15 bp, Homo sapiens
gaagcattggacagt

SEQ ID NO: 194957 - DNA, 15 bp, Homo sapiens
ggaagcattggacag

SEQ ID NO: 194958 - DNA, 15 bp, Homo sapiens
aggaagcattggaca

SEQ ID NO: 194959 - DNA, 15 bp, Homo sapiens
gaggaagcattggac

SEQ ID NO: 194960 - DNA, 15 bp, Homo sapiens
tgaggaagcattgga

SEQ ID NO: 194961 - DNA, 15 bp, Homo sapiens
ttgaggaagcattgg

SEQ ID NO: 194962 - DNA, 15 bp, Homo sapiens
attgaggaagcattg

SEQ ID NO: 194963 - DNA, 15 bp, Homo sapiens
cattgaggaagcatt

SEQ ID NO: 194964 - DNA, 15 bp, Homo sapiens
acattgaggaagcat

SEQ ID NO: 194965 - DNA, 15 bp, Homo sapiens
tacattgaggaagca

SEQ ID NO: 194966 - DNA, 15 bp, Homo sapiens
ttacattgaggaagc

SEQ ID NO: 194967 - DNA, 15 bp, Homo sapiens
tttacattgaggaag

SEQ ID NO: 194968 - DNA, 15 bp, Homo sapiens
ctttacattgaggaa

SEQ ID NO: 194969 - DNA, 15 bp, Homo sapiens
cctttacattgagga

SEQ ID NO: 194970 - DNA, 15 bp, Homo sapiens
tcctttacattgagg

SEQ ID NO: 194971 - DNA, 15 bp, Homo sapiens
atcctttacattgag

SEQ ID NO: 194972 - DNA, 15 bp, Homo sapiens
aatcctttacattga

SEQ ID NO: 194973 - DNA, 15 bp, Homo sapiens
gaatcctttacattg

SEQ ID NO: 194974 - DNA, 15 bp, Homo sapiens
tgaatcctttacatt

SEQ ID NO: 194975 - DNA, 15 bp, Homo sapiens
atgaatcctttacat

SEQ ID NO: 194976 - DNA, 15 bp, Homo sapiens
tatgaatcctttaca

SEQ ID NO: 194977 - DNA, 15 bp, Homo sapiens
atatgaatcctttac

SEQ ID NO: 194978 - DNA, 15 bp, Homo sapiens
aatatgaatccttta

SEQ ID NO: 194979 - DNA, 15 bp, Homo sapiens
caatatgaatccttt

SEQ ID NO: 194980 - DNA, 15 bp, Homo sapiens
tcaatatgaatcctt

SEQ ID NO: 194981 - DNA, 15 bp, Homo sapiens
gtcaatatgaatcct

SEQ ID NO: 194982 - DNA, 15 bp, Homo sapiens
tgtcaatatgaatcc

SEQ ID NO: 194983 - DNA, 15 bp, Homo sapiens
ctgtcaatatgaatc

SEQ ID NO: 194984 - DNA, 15 bp, Homo sapiens
cctgtcaatatgaat

SEQ ID NO: 194985 - DNA, 15 bp, Homo sapiens
tcctgtcaatatgaa

SEQ ID NO: 194986 - DNA, 15 bp, Homo sapiens
ctcctgtcaatatga

SEQ ID NO: 194987 - DNA, 15 bp, Homo sapiens
tctcctgtcaatatg

SEQ ID NO: 194988 - DNA, 15 bp, Homo sapiens
ctctcctgtcaatat

SEQ ID NO: 194989 - DNA, 15 bp, Homo sapiens
cctctcctgtcaata

SEQ ID NO: 194990 - DNA, 15 bp, Homo sapiens
ccctctcctgtcaat

SEQ ID NO: 194991 - DNA, 15 bp, Homo sapiens
accctctcctgtcaa

SEQ ID NO: 194992 - DNA, 15 bp, Homo sapiens
taccctctcctgtca

SEQ ID NO: 194993 - DNA, 15 bp, Homo sapiens
ctaccctctcctgtc

SEQ ID NO: 194994 - DNA, 15 bp, Homo sapiens
tctaccctctcctgt

SEQ ID NO: 194995 - DNA, 15 bp, Homo sapiens
ctctaccctctcctg

SEQ ID NO: 194996 - DNA, 15 bp, Homo sapiens
cctctaccctctcct

SEQ ID NO: 194997 - DNA, 15 bp, Homo sapiens
gcctctaccctctcc

SEQ ID NO: 194998 - DNA, 15 bp, Homo sapiens
ggcctctaccctctc

SEQ ID NO: 194999 - DNA, 15 bp, Homo sapiens
aggcctctaccctct

SEQ ID NO: 195000 - DNA, 15 bp, Homo sapiens
gaggcctctaccctc

SEQ ID NO: 195001 - DNA, 15 bp, Homo sapiens
ggaggcctctaccct

SEQ ID NO: 195002 - DNA, 15 bp, Homo sapiens
gggaggcctctaccc

SEQ ID NO: 195003 - DNA, 15 bp, Homo sapiens
agggaggcctctacc

SEQ ID NO: 195004 - DNA, 15 bp, Homo sapiens
gagggaggcctctac

SEQ ID NO: 195005 - DNA, 15 bp, Homo sapiens
ggagggaggcctcta

SEQ ID NO: 195006 - DNA, 15 bp, Homo sapiens
aggagggaggcctct

SEQ ID NO: 195007 - DNA, 15 bp, Homo sapiens
caggagggaggcctc

SEQ ID NO: 195008 - DNA, 15 bp, Homo sapiens
ccaggagggaggcct

SEQ ID NO: 195009 - DNA, 15 bp, Homo sapiens
gccaggagggaggcc

SEQ ID NO: 195010 - DNA, 15 bp, Homo sapiens
tgccaggagggaggc

SEQ ID NO: 195011 - DNA, 15 bp, Homo sapiens
ctgccaggagggagg

SEQ ID NO: 195012 - DNA, 15 bp, Homo sapiens
cctgccaggagggag

SEQ ID NO: 195013 - DNA, 15 bp, Homo sapiens
acctgccaggaggga

SEQ ID NO: 195014 - DNA, 15 bp, Homo sapiens
cacctgccaggaggg

SEQ ID NO: 195015 - DNA, 15 bp, Homo sapiens
ccacctgccaggagg

SEQ ID NO: 195016 - DNA, 15 bp, Homo sapiens
cccacctgccaggag

SEQ ID NO: 195017 - DNA, 15 bp, Homo sapiens
tcccacctgccagga

SEQ ID NO: 195018 - DNA, 15 bp, Homo sapiens
ttcccacctgccagg

SEQ ID NO: 195019 - DNA, 15 bp, Homo sapiens
tttcccacctgccag

SEQ ID NO: 195020 - DNA, 15 bp, Homo sapiens
gtttcccacctgcca

SEQ ID NO: 195021 - DNA, 15 bp, Homo sapiens
ggtttcccacctgcc

SEQ ID NO: 195022 - DNA, 15 bp, Homo sapiens
aggtttcccacctgc

SEQ ID NO: 195023 - DNA, 15 bp, Homo sapiens
caggtttcccacctg

SEQ ID NO: 195024 - DNA, 15 bp, Homo sapiens
tcaggtttcccacct

SEQ ID NO: 195025 - DNA, 15 bp, Homo sapiens
ttcaggtttcccacc

SEQ ID NO: 195026 - DNA, 15 bp, Homo sapiens
tttcaggtttcccac

SEQ ID NO: 195027 - DNA, 15 bp, Homo sapiens
atttcaggtttccca

SEQ ID NO: 195028 - DNA, 15 bp, Homo sapiens
gatttcaggtttccc

SEQ ID NO: 195029 - DNA, 15 bp, Homo sapiens
tgatttcaggtttcc

SEQ ID NO: 195030 - DNA, 15 bp, Homo sapiens
ctgatttcaggtttc

SEQ ID NO: 195031 - DNA, 15 bp, Homo sapiens
cctgatttcaggttt

SEQ ID NO: 195032 - DNA, 15 bp, Homo sapiens
tcctgatttcaggtt

SEQ ID NO: 195033 - DNA, 15 bp, Homo sapiens
ttcctgatttcaggt

SEQ ID NO: 195034 - DNA, 15 bp, Homo sapiens
attcctgatttcagg

SEQ ID NO: 195035 - DNA, 15 bp, Homo sapiens
aattcctgatttcag

SEQ ID NO: 195036 - DNA, 15 bp, Homo sapiens
taattcctgatttca

SEQ ID NO: 195037 - DNA, 15 bp, Homo sapiens
gtaattcctgatttc

SEQ ID NO: 195038 - DNA, 15 bp, Homo sapiens
tgtaattcctgattt

SEQ ID NO: 195039 - DNA, 15 bp, Homo sapiens
gtgtaattcctgatt

SEQ ID NO: 195040 - DNA, 15 bp, Homo sapiens
agtgtaattcctgat

SEQ ID NO: 195041 - DNA, 15 bp, Homo sapiens
aagtgtaattcctga

SEQ ID NO: 195042 - DNA, 15 bp, Homo sapiens
taagtgtaattcctg

SEQ ID NO: 195043 - DNA, 15 bp, Homo sapiens
ttaagtgtaattcct

SEQ ID NO: 195044 - DNA, 15 bp, Homo sapiens
attaagtgtaattcc

SEQ ID NO: 195045 - DNA, 15 bp, Homo sapiens
cattaagtgtaattc

SEQ ID NO: 195046 - DNA, 15 bp, Homo sapiens
tcattaagtgtaatt

SEQ ID NO: 195047 - DNA, 15 bp, Homo sapiens
gtcattaagtgtaat

SEQ ID NO: 195048 - DNA, 15 bp, Homo sapiens
tgtcattaagtgtaa

SEQ ID NO: 195049 - DNA, 15 bp, Homo sapiens
gtgtcattaagtgta

SEQ ID NO: 195050 - DNA, 15 bp, Homo sapiens
cgtgtcattaagtgt

SEQ ID NO: 195051 - DNA, 15 bp, Homo sapiens
ccgtgtcattaagtg

SEQ ID NO: 195052 - DNA, 15 bp, Homo sapiens
cccgtgtcattaagt

SEQ ID NO: 195053 - DNA, 15 bp, Homo sapiens
ccccgtgtcattaag

SEQ ID NO: 195054 - DNA, 15 bp, Homo sapiens
accccgtgtcattaa

SEQ ID NO: 195055 - DNA, 15 bp, Homo sapiens
caccccgtgtcatta

SEQ ID NO: 195056 - DNA, 15 bp, Homo sapiens
gcaccccgtgtcatt

SEQ ID NO: 195057 - DNA, 15 bp, Homo sapiens
agcaccccgtgtcat

SEQ ID NO: 195058 - DNA, 15 bp, Homo sapiens
gagcaccccgtgtca

SEQ ID NO: 195059 - DNA, 15 bp, Homo sapiens
agagcaccccgtgtc

SEQ ID NO: 195060 - DNA, 15 bp, Homo sapiens
aagagcaccccgtgt

SEQ ID NO: 195061 - DNA, 15 bp, Homo sapiens
gaagagcaccccgtg

SEQ ID NO: 195062 - DNA, 15 bp, Homo sapiens
agaagagcaccccgt

SEQ ID NO: 195063 - DNA, 15 bp, Homo sapiens
gagaagagcaccccg

SEQ ID NO: 195064 - DNA, 15 bp, Homo sapiens
agagaagagcacccc

SEQ ID NO: 195065 - DNA, 15 bp, Homo sapiens
gagagaagagcaccc

SEQ ID NO: 195066 - DNA, 15 bp, Homo sapiens
ggagagaagagcacc

SEQ ID NO: 195067 - DNA, 15 bp, Homo sapiens
aggagagaagagcac

SEQ ID NO: 195068 - DNA, 15 bp, Homo sapiens
caggagagaagagca

SEQ ID NO: 195069 - DNA, 15 bp, Homo sapiens
tcaggagagaagagc

SEQ ID NO: 195070 - DNA, 15 bp, Homo sapiens
ctcaggagagaagag

SEQ ID NO: 195071 - DNA, 15 bp, Homo sapiens
gctcaggagagaaga

SEQ ID NO: 195072 - DNA, 15 bp, Homo sapiens
tgctcaggagagaag

SEQ ID NO: 195073 - DNA, 15 bp, Homo sapiens
ttgctcaggagagaa

SEQ ID NO: 195074 - DNA, 15 bp, Homo sapiens
cttgctcaggagaga

SEQ ID NO: 195075 - DNA, 15 bp, Homo sapiens
gcttgctcaggagag

SEQ ID NO: 195076 - DNA, 15 bp, Homo sapiens
tgcttgctcaggaga

SEQ ID NO: 195077 - DNA, 15 bp, Homo sapiens
ctgcttgctcaggag

SEQ ID NO: 195078 - DNA, 15 bp, Homo sapiens
actgcttgctcagga

SEQ ID NO: 195079 - DNA, 15 bp, Homo sapiens
aactgcttgctcagg

SEQ ID NO: 195080 - DNA, 15 bp, Homo sapiens
gaactgcttgctcag

SEQ ID NO: 195081 - DNA, 15 bp, Homo sapiens
agaactgcttgctca

SEQ ID NO: 195082 - DNA, 15 bp, Homo sapiens
gagaactgcttgctc

SEQ ID NO: 195083 - DNA, 15 bp, Homo sapiens
agagaactgcttgct

SEQ ID NO: 195084 - DNA, 15 bp, Homo sapiens
cagagaactgcttgc

SEQ ID NO: 195085 - DNA, 15 bp, Homo sapiens
ccagagaactgcttg

SEQ ID NO: 195086 - DNA, 15 bp, Homo sapiens
cccagagaactgctt

SEQ ID NO: 195087 - DNA, 15 bp, Homo sapiens
ccccagagaactgct

SEQ ID NO: 195088 - DNA, 15 bp, Homo sapiens
accccagagaactgc

SEQ ID NO: 195089 - DNA, 15 bp, Homo sapiens
caccccagagaactg

SEQ ID NO: 195090 - DNA, 15 bp, Homo sapiens
ccaccccagagaact

SEQ ID NO: 195091 - DNA, 15 bp, Homo sapiens
accaccccagagaac

SEQ ID NO: 195092 - DNA, 15 bp, Homo sapiens
gaccaccccagagaa

SEQ ID NO: 195093 - DNA, 15 bp, Homo sapiens
ggaccaccccagaga

SEQ ID NO: 195094 - DNA, 15 bp, Homo sapiens
aggaccaccccagag

SEQ ID NO: 195095 - DNA, 15 bp, Homo sapiens
taggaccaccccaga

SEQ ID NO: 195096 - DNA, 15 bp, Homo sapiens
ctaggaccaccccag

SEQ ID NO: 195097 - DNA, 15 bp, Homo sapiens
tctaggaccacccca

SEQ ID NO: 195098 - DNA, 15 bp, Homo sapiens
ctctaggaccacccc

SEQ ID NO: 195099 - DNA, 15 bp, Homo sapiens
tctctaggaccaccc

SEQ ID NO: 195100 - DNA, 15 bp, Homo sapiens
ctctctaggaccacc

SEQ ID NO: 195101 - DNA, 15 bp, Homo sapiens
tctctctaggaccac

SEQ ID NO: 195102 - DNA, 15 bp, Homo sapiens
atctctctaggacca

SEQ ID NO: 195103 - DNA, 15 bp, Homo sapiens
catctctctaggacc

SEQ ID NO: 195104 - DNA, 15 bp, Homo sapiens
ccatctctctaggac

SEQ ID NO: 195105 - DNA, 15 bp, Homo sapiens
cccatctctctagga

SEQ ID NO: 195106 - DNA, 15 bp, Homo sapiens
tcccatctctctagg

SEQ ID NO: 195107 - DNA, 15 bp, Homo sapiens
ctcccatctctctag

SEQ ID NO: 195108 - DNA, 15 bp, Homo sapiens
tctcccatctctcta

SEQ ID NO: 195109 - DNA, 15 bp, Homo sapiens
ttctcccatctctct

SEQ ID NO: 195110 - DNA, 15 bp, Homo sapiens
gttctcccatctctc

SEQ ID NO: 195111 - DNA, 15 bp, Homo sapiens
tgttctcccatctct

SEQ ID NO: 195112 - DNA, 15 bp, Homo sapiens
atgttctcccatctc

SEQ ID NO: 195113 - DNA, 15 bp, Homo sapiens
catgttctcccatct

SEQ ID NO: 195114 - DNA, 15 bp, Homo sapiens
acatgttctcccatc

SEQ ID NO: 195115 - DNA, 15 bp, Homo sapiens
tacatgttctcccat

SEQ ID NO: 195116 - DNA, 15 bp, Homo sapiens
ttacatgttctccca

SEQ ID NO: 195117 - DNA, 15 bp, Homo sapiens
tttacatgttctccc

SEQ ID NO: 195118 - DNA, 15 bp, Homo sapiens
ctttacatgttctcc

SEQ ID NO: 195119 - DNA, 15 bp, Homo sapiens
gctttacatgttctc

SEQ ID NO: 195120 - DNA, 15 bp, Homo sapiens
tgctttacatgttct

SEQ ID NO: 195121 - DNA, 15 bp, Homo sapiens
ctgctttacatgttc

SEQ ID NO: 195122 - DNA, 15 bp, Homo sapiens
tctgctttacatgtt

SEQ ID NO: 195123 - DNA, 15 bp, Homo sapiens
ctctgctttacatgt

SEQ ID NO: 195124 - DNA, 15 bp, Homo sapiens
tctctgctttacatg

SEQ ID NO: 195125 - DNA, 15 bp, Homo sapiens
atctctgctttacat

SEQ ID NO: 195126 - DNA, 15 bp, Homo sapiens
tatctctgctttaca

SEQ ID NO: 195127 - DNA, 15 bp, Homo sapiens
gtatctctgctttac

SEQ ID NO: 195128 - DNA, 15 bp, Homo sapiens
agtatctctgcttta

SEQ ID NO: 195129 - DNA, 15 bp, Homo sapiens
gagtatctctgcttt

SEQ ID NO: 195130 - DNA, 15 bp, Homo sapiens
tgagtatctctgctt

SEQ ID NO: 195131 - DNA, 15 bp, Homo sapiens
ttgagtatctctgct

SEQ ID NO: 195132 - DNA, 15 bp, Homo sapiens
tttgagtatctctgc

SEQ ID NO: 195133 - DNA, 15 bp, Homo sapiens
atttgagtatctctg

SEQ ID NO: 195134 - DNA, 15 bp, Homo sapiens
aatttgagtatctct

SEQ ID NO: 195135 - DNA, 15 bp, Homo sapiens
aaatttgagtatctc

SEQ ID NO: 195136 - DNA, 15 bp, Homo sapiens
gaaatttgagtatct

SEQ ID NO: 195137 - DNA, 15 bp, Homo sapiens
tgaaatttgagtatc

SEQ ID NO: 195138 - DNA, 15 bp, Homo sapiens
ctgaaatttgagtat

SEQ ID NO: 195139 - DNA, 15 bp, Homo sapiens
gctgaaatttgagta

SEQ ID NO: 195140 - DNA, 15 bp, Homo sapiens
cgctgaaatttgagt

SEQ ID NO: 195141 - DNA, 15 bp, Homo sapiens
acgctgaaatttgag

SEQ ID NO: 195142 - DNA, 15 bp, Homo sapiens
cacgctgaaatttga

SEQ ID NO: 195143 - DNA, 15 bp, Homo sapiens
gcacgctgaaatttg

SEQ ID NO: 195144 - DNA, 15 bp, Homo sapiens
agcacgctgaaattt

SEQ ID NO: 195145 - DNA, 15 bp, Homo sapiens
gagcacgctgaaatt

SEQ ID NO: 195146 - DNA, 15 bp, Homo sapiens
tgagcacgctgaaat

SEQ ID NO: 195147 - DNA, 15 bp, Homo sapiens
ttgagcacgctgaaa

SEQ ID NO: 195148 - DNA, 15 bp, Homo sapiens
tttgagcacgctgaa

SEQ ID NO: 195149 - DNA, 15 bp, Homo sapiens
ttttgagcacgctga

SEQ ID NO: 195150 - DNA, 15 bp, Homo sapiens
attttgagcacgctg

SEQ ID NO: 195151 - DNA, 15 bp, Homo sapiens
gattttgagcacgct

SEQ ID NO: 195152 - DNA, 15 bp, Homo sapiens
agattttgagcacgc

SEQ ID NO: 195153 - DNA, 15 bp, Homo sapiens
gagattttgagcacg

SEQ ID NO: 195154 - DNA, 15 bp, Homo sapiens
ggagattttgagcac

SEQ ID NO: 195155 - DNA, 15 bp, Homo sapiens
aggagattttgagca

SEQ ID NO: 195156 - DNA, 15 bp, Homo sapiens
caggagattttgagc

SEQ ID NO: 195157 - DNA, 15 bp, Homo sapiens
ccaggagattttgag

SEQ ID NO: 195158 - DNA, 15 bp, Homo sapiens
tccaggagattttga

SEQ ID NO: 195159 - DNA, 15 bp, Homo sapiens
ctccaggagattttg

SEQ ID NO: 195160 - DNA, 15 bp, Homo sapiens
cctccaggagatttt

SEQ ID NO: 195161 - DNA, 15 bp, Homo sapiens
ccctccaggagattt

SEQ ID NO: 195162 - DNA, 15 bp, Homo sapiens
gccctccaggagatt

SEQ ID NO: 195163 - DNA, 15 bp, Homo sapiens
ggccctccaggagat

SEQ ID NO: 195164 - DNA, 15 bp, Homo sapiens
aggccctccaggaga

SEQ ID NO: 195165 - DNA, 15 bp, Homo sapiens
caggccctccaggag

SEQ ID NO: 195166 - DNA, 15 bp, Homo sapiens
gcaggccctccagga

SEQ ID NO: 195167 - DNA, 15 bp, Homo sapiens
tgcaggccctccagg

SEQ ID NO: 195168 - DNA, 15 bp, Homo sapiens
ttgcaggccctccag

SEQ ID NO: 195169 - DNA, 15 bp, Homo sapiens
tttgcaggccctcca

SEQ ID NO: 195170 - DNA, 15 bp, Homo sapiens
ttttgcaggccctcc

SEQ ID NO: 195171 - DNA, 15 bp, Homo sapiens
tttttgcaggccctc

SEQ ID NO: 195172 - DNA, 15 bp, Homo sapiens
atttttgcaggccct

SEQ ID NO: 195173 - DNA, 15 bp, Homo sapiens
catttttgcaggccc

SEQ ID NO: 195174 - DNA, 15 bp, Homo sapiens
gcatttttgcaggcc

SEQ ID NO: 195175 - DNA, 15 bp, Homo sapiens
tgcatttttgcaggc

SEQ ID NO: 195176 - DNA, 15 bp, Homo sapiens
ctgcatttttgcagg

SEQ ID NO: 195177 - DNA, 15 bp, Homo sapiens
tctgcatttttgcag

SEQ ID NO: 195178 - DNA, 15 bp, Homo sapiens
atctgcatttttgca

SEQ ID NO: 195179 - DNA, 15 bp, Homo sapiens
catctgcatttttgc

SEQ ID NO: 195180 - DNA, 15 bp, Homo sapiens
ccatctgcatttttg

SEQ ID NO: 195181 - DNA, 15 bp, Homo sapiens
cccatctgcattttt

SEQ ID NO: 195182 - DNA, 15 bp, Homo sapiens
acccatctgcatttt

SEQ ID NO: 195183 - DNA, 15 bp, Homo sapiens
gacccatctgcattt

SEQ ID NO: 195184 - DNA, 15 bp, Homo sapiens
ggacccatctgcatt

SEQ ID NO: 195185 - DNA, 15 bp, Homo sapiens
tggacccatctgcat

SEQ ID NO: 195186 - DNA, 15 bp, Homo sapiens
ctggacccatctgca

SEQ ID NO: 195187 - DNA, 15 bp, Homo sapiens
cctggacccatctgc

SEQ ID NO: 195188 - DNA, 15 bp, Homo sapiens
gcctggacccatctg

SEQ ID NO: 195189 - DNA, 15 bp, Homo sapiens
agcctggacccatct

SEQ ID NO: 195190 - DNA, 15 bp, Homo sapiens
gagcctggacccatc

SEQ ID NO: 195191 - DNA, 15 bp, Homo sapiens
tgagcctggacccat

SEQ ID NO: 195192 - DNA, 15 bp, Homo sapiens
ctgagcctggaccca

SEQ ID NO: 195193 - DNA, 15 bp, Homo sapiens
actgagcctggaccc

SEQ ID NO: 195194 - DNA, 15 bp, Homo sapiens
cactgagcctggacc

SEQ ID NO: 195195 - DNA, 15 bp, Homo sapiens
ccactgagcctggac

SEQ ID NO: 195196 - DNA, 15 bp, Homo sapiens
gccactgagcctgga

SEQ ID NO: 195197 - DNA, 15 bp, Homo sapiens
agccactgagcctgg

SEQ ID NO: 195198 - DNA, 15 bp, Homo sapiens
gagccactgagcctg

SEQ ID NO: 195199 - DNA, 15 bp, Homo sapiens
tgagccactgagcct

SEQ ID NO: 195200 - DNA, 15 bp, Homo sapiens
ttgagccactgagcc

SEQ ID NO: 195201 - DNA, 15 bp, Homo sapiens
cttgagccactgagc

SEQ ID NO: 195202 - DNA, 15 bp, Homo sapiens
gcttgagccactgag

SEQ ID NO: 195203 - DNA, 15 bp, Homo sapiens
ggcttgagccactga

SEQ ID NO: 195204 - DNA, 15 bp, Homo sapiens
aggcttgagccactg

SEQ ID NO: 195205 - DNA, 15 bp, Homo sapiens
caggcttgagccact

SEQ ID NO: 195206 - DNA, 15 bp, Homo sapiens
acaggcttgagccac

SEQ ID NO: 195207 - DNA, 15 bp, Homo sapiens
tacaggcttgagcca

SEQ ID NO: 195208 - DNA, 15 bp, Homo sapiens
ttacaggcttgagcc

SEQ ID NO: 195209 - DNA, 15 bp, Homo sapiens
attacaggcttgagc

SEQ ID NO: 195210 - DNA, 15 bp, Homo sapiens
gattacaggcttgag

SEQ ID NO: 195211 - DNA, 15 bp, Homo sapiens
ggattacaggcttga

SEQ ID NO: 195212 - DNA, 15 bp, Homo sapiens
gggattacaggcttg

SEQ ID NO: 195213 - DNA, 15 bp, Homo sapiens
tgggattacaggctt

SEQ ID NO: 195214 - DNA, 15 bp, Homo sapiens
ctgggattacaggct

SEQ ID NO: 195215 - DNA, 15 bp, Homo sapiens
taaagtgctgggatt

SEQ ID NO: 195216 - DNA, 15 bp, Homo sapiens
ctaaagtgctgggat

SEQ ID NO: 195217 - DNA, 15 bp, Homo sapiens
cctaaagtgctggga

SEQ ID NO: 195218 - DNA, 15 bp, Homo sapiens
tcctaaagtgctggg

SEQ ID NO: 195219 - DNA, 15 bp, Homo sapiens
ttcctaaagtgctgg

SEQ ID NO: 195220 - DNA, 15 bp, Homo sapiens
cttcctaaagtgctg

SEQ ID NO: 195221 - DNA, 15 bp, Homo sapiens
gcttcctaaagtgct

SEQ ID NO: 195222 - DNA, 15 bp, Homo sapiens
agcttcctaaagtgc

SEQ ID NO: 195223 - DNA, 15 bp, Homo sapiens
cagcttcctaaagtg

SEQ ID NO: 195224 - DNA, 15 bp, Homo sapiens
tcagcttcctaaagt

SEQ ID NO: 195225 - DNA, 15 bp, Homo sapiens
ctcagcttcctaaag

SEQ ID NO: 195226 - DNA, 15 bp, Homo sapiens
cctcagcttcctaaa

SEQ ID NO: 195227 - DNA, 15 bp, Homo sapiens
gcctcagcttcctaa

SEQ ID NO: 195228 - DNA, 15 bp, Homo sapiens
agcctcagcttccta

SEQ ID NO: 195229 - DNA, 15 bp, Homo sapiens
cagcctcagcttcct

SEQ ID NO: 195230 - DNA, 15 bp, Homo sapiens
ccagcctcagcttcc

SEQ ID NO: 195231 - DNA, 15 bp, Homo sapiens
tccagcctcagcttc

SEQ ID NO: 195232 - DNA, 15 bp, Homo sapiens
ctccagcctcagctt

SEQ ID NO: 195233 - DNA, 15 bp, Homo sapiens
cctccagcctcagct

SEQ ID NO: 195234 - DNA, 15 bp, Homo sapiens
tcctccagcctcagc

SEQ ID NO: 195235 - DNA, 15 bp, Homo sapiens
atcctccagcctcag

SEQ ID NO: 195236 - DNA, 15 bp, Homo sapiens
gatcctccagcctca

SEQ ID NO: 195237 - DNA, 15 bp, Homo sapiens
tgatcctccagcctc

SEQ ID NO: 195238 - DNA, 15 bp, Homo sapiens
gtgatcctccagcct

SEQ ID NO: 195239 - DNA, 15 bp, Homo sapiens
agtgatcctccagcc

SEQ ID NO: 195240 - DNA, 15 bp, Homo sapiens
aagtgatcctccagc

SEQ ID NO: 195241 - DNA, 15 bp, Homo sapiens
caagtgatcctccag

SEQ ID NO: 195242 - DNA, 15 bp, Homo sapiens
tcaagtgatcctcca

SEQ ID NO: 195243 - DNA, 15 bp, Homo sapiens
ttcaagtgatcctcc

SEQ ID NO: 195244 - DNA, 15 bp, Homo sapiens
cttcaagtgatcctc

SEQ ID NO: 195245 - DNA, 15 bp, Homo sapiens
gcttcaagtgatcct

SEQ ID NO: 195246 - DNA, 15 bp, Homo sapiens
ggcttcaagtgatcc

SEQ ID NO: 195247 - DNA, 15 bp, Homo sapiens
tggcttcaagtgatc

SEQ ID NO: 195248 - DNA, 15 bp, Homo sapiens
ctggcttcaagtgat

SEQ ID NO: 195249 - DNA, 15 bp, Homo sapiens
cctggcttcaagtga

SEQ ID NO: 195250 - DNA, 15 bp, Homo sapiens
tcctggcttcaagtg

SEQ ID NO: 195251 - DNA, 15 bp, Homo sapiens
ctcctggcttcaagt

SEQ ID NO: 195252 - DNA, 15 bp, Homo sapiens
actcctggcttcaag

SEQ ID NO: 195253 - DNA, 15 bp, Homo sapiens
aactcctggcttcaa

SEQ ID NO: 195254 - DNA, 15 bp, Homo sapiens
gaactcctggcttca

SEQ ID NO: 195255 - DNA, 15 bp, Homo sapiens
cgaactcctggcttc

SEQ ID NO: 195256 - DNA, 15 bp, Homo sapiens
tcgaactcctggctt

SEQ ID NO: 195257 - DNA, 15 bp, Homo sapiens
ctcgaactcctggct

SEQ ID NO: 195258 - DNA, 15 bp, Homo sapiens
tctcgaactcctggc

SEQ ID NO: 195259 - DNA, 15 bp, Homo sapiens
gtctcgaactcctgg

SEQ ID NO: 195260 - DNA, 15 bp, Homo sapiens
ggtctcgaactcctg

SEQ ID NO: 195261 - DNA, 15 bp, Homo sapiens
tggtctcgaactcct

SEQ ID NO: 195262 - DNA, 15 bp, Homo sapiens
ctggtctcgaactcc

SEQ ID NO: 195263 - DNA, 15 bp, Homo sapiens
gctggtctcgaactc

SEQ ID NO: 195264 - DNA, 15 bp, Homo sapiens
ggctggtctcgaact

SEQ ID NO: 195265 - DNA, 15 bp, Homo sapiens
aggctggtctcgaac

SEQ ID NO: 195266 - DNA, 15 bp, Homo sapiens
caggctggtctcgaa

SEQ ID NO: 195267 - DNA, 15 bp, Homo sapiens
ccaggctggtctcga

SEQ ID NO: 195268 - DNA, 15 bp, Homo sapiens
gccaggctggtctcg

SEQ ID NO: 195269 - DNA, 15 bp, Homo sapiens
ctttcaccatgttgg

SEQ ID NO: 195270 - DNA, 15 bp, Homo sapiens
gctttcaccatgttg

SEQ ID NO: 195271 - DNA, 15 bp, Homo sapiens
ggctttcaccatgtt

SEQ ID NO: 195272 - DNA, 15 bp, Homo sapiens
gggctttcaccatgt

SEQ ID NO: 195273 - DNA, 15 bp, Homo sapiens
cgggctttcaccatg

SEQ ID NO: 195274 - DNA, 15 bp, Homo sapiens
acgggctttcaccat

SEQ ID NO: 195275 - DNA, 15 bp, Homo sapiens
gacgggctttcacca

SEQ ID NO: 195276 - DNA, 15 bp, Homo sapiens
agacgggctttcacc

SEQ ID NO: 195277 - DNA, 15 bp, Homo sapiens
gagacgggctttcac

SEQ ID NO: 195278 - DNA, 15 bp, Homo sapiens
agagacgggctttca

SEQ ID NO: 195279 - DNA, 15 bp, Homo sapiens
tagagacgggctttc

SEQ ID NO: 195280 - DNA, 15 bp, Homo sapiens
gtagagacgggcttt

SEQ ID NO: 195281 - DNA, 15 bp, Homo sapiens
agtagagacgggctt

SEQ ID NO: 195282 - DNA, 15 bp, Homo sapiens
tagtagagacgggct

SEQ ID NO: 195283 - DNA, 15 bp, Homo sapiens
ttagtagagacgggc

SEQ ID NO: 195284 - DNA, 15 bp, Homo sapiens
tttttgtatttttag

SEQ ID NO: 195285 - DNA, 15 bp, Homo sapiens
atttttgtattttta

SEQ ID NO: 195286 - DNA, 15 bp, Homo sapiens
aatttttgtattttt

SEQ ID NO: 195287 - DNA, 15 bp, Homo sapiens
agctaatttttgtat

SEQ ID NO: 195288 - DNA, 15 bp, Homo sapiens
cagctaatttttgta

SEQ ID NO: 195289 - DNA, 15 bp, Homo sapiens
ccagctaatttttgt

SEQ ID NO: 195290 - DNA, 15 bp, Homo sapiens
cccagctaatttttg

SEQ ID NO: 195291 - DNA, 15 bp, Homo sapiens
acccagctaattttt

SEQ ID NO: 195292 - DNA, 15 bp, Homo sapiens
cacccagctaatttt

SEQ ID NO: 195293 - DNA, 15 bp, Homo sapiens
acacccagctaattt

SEQ ID NO: 195294 - DNA, 15 bp, Homo sapiens
cacacccagctaatt

SEQ ID NO: 195295 - DNA, 15 bp, Homo sapiens
ccacacccagctaat

SEQ ID NO: 195296 - DNA, 15 bp, Homo sapiens
accacacccagctaa

SEQ ID NO: 195297 - DNA, 15 bp, Homo sapiens
caccacacccagcta

SEQ ID NO: 195298 - DNA, 15 bp, Homo sapiens
ccaccacacccagct

SEQ ID NO: 195299 - DNA, 15 bp, Homo sapiens
accaccacacccagc

SEQ ID NO: 195300 - DNA, 15 bp, Homo sapiens
caccaccacacccag

SEQ ID NO: 195301 - DNA, 15 bp, Homo sapiens
gcaccaccacaccca

SEQ ID NO: 195302 - DNA, 15 bp, Homo sapiens
tgcaccaccacaccc

SEQ ID NO: 195303 - DNA, 15 bp, Homo sapiens
gtgcaccaccacacc

SEQ ID NO: 195304 - DNA, 15 bp, Homo sapiens
tgtgcaccaccacac

SEQ ID NO: 195305 - DNA, 15 bp, Homo sapiens
gtgtgcaccaccaca

SEQ ID NO: 195306 - DNA, 15 bp, Homo sapiens
cgtgtgcaccaccac

SEQ ID NO: 195307 - DNA, 15 bp, Homo sapiens
acgtgtgcaccacca

SEQ ID NO: 195308 - DNA, 15 bp, Homo sapiens
cacgtgtgcaccacc

SEQ ID NO: 195309 - DNA, 15 bp, Homo sapiens
acacgtgtgcaccac

SEQ ID NO: 195310 - DNA, 15 bp, Homo sapiens
tacacgtgtgcacca

SEQ ID NO: 195311 - DNA, 15 bp, Homo sapiens
ctacacgtgtgcacc

SEQ ID NO: 195312 - DNA, 15 bp, Homo sapiens
actacacgtgtgcac

SEQ ID NO: 195313 - DNA, 15 bp, Homo sapiens
gactacacgtgtgca

SEQ ID NO: 195314 - DNA, 15 bp, Homo sapiens
ggactacacgtgtgc

SEQ ID NO: 195315 - DNA, 15 bp, Homo sapiens
gggactacacgtgtg

SEQ ID NO: 195316 - DNA, 15 bp, Homo sapiens
tgggactacacgtgt

SEQ ID NO: 195317 - DNA, 15 bp, Homo sapiens
ctgggactacacgtg

SEQ ID NO: 195318 - DNA, 15 bp, Homo sapiens
gctgggactacacgt

SEQ ID NO: 195319 - DNA, 15 bp, Homo sapiens
agctgggactacacg

SEQ ID NO: 195320 - DNA, 15 bp, Homo sapiens
tagctgggactacac

SEQ ID NO: 195321 - DNA, 15 bp, Homo sapiens
gtagctgggactaca

SEQ ID NO: 195322 - DNA, 15 bp, Homo sapiens
agtagctgggactac

SEQ ID NO: 195323 - DNA, 15 bp, Homo sapiens
gagtagctgggacta

SEQ ID NO: 195324 - DNA, 15 bp, Homo sapiens
cgagtagctgggact

SEQ ID NO: 195325 - DNA, 15 bp, Homo sapiens
cctcccgagtagctg

SEQ ID NO: 195326 - DNA, 15 bp, Homo sapiens
acctcccgagtagct

SEQ ID NO: 195327 - DNA, 15 bp, Homo sapiens
aacctcccgagtagc

SEQ ID NO: 195328 - DNA, 15 bp, Homo sapiens
caacctcccgagtag

SEQ ID NO: 195329 - DNA, 15 bp, Homo sapiens
tcaacctcccgagta

SEQ ID NO: 195330 - DNA, 15 bp, Homo sapiens
ctcaacctcccgagt

SEQ ID NO: 195331 - DNA, 15 bp, Homo sapiens
cctcaacctcccgag

SEQ ID NO: 195332 - DNA, 15 bp, Homo sapiens
gcctcaacctcccga

SEQ ID NO: 195333 - DNA, 15 bp, Homo sapiens
tgcctcaacctcccg

SEQ ID NO: 195334 - DNA, 15 bp, Homo sapiens
gtgcctcaacctccc

SEQ ID NO: 195335 - DNA, 15 bp, Homo sapiens
cgtgcctcaacctcc

SEQ ID NO: 195336 - DNA, 15 bp, Homo sapiens
tcgtgcctcaacctc

SEQ ID NO: 195337 - DNA, 15 bp, Homo sapiens
ctcgtgcctcaacct

SEQ ID NO: 195338 - DNA, 15 bp, Homo sapiens
tctcgtgcctcaacc

SEQ ID NO: 195339 - DNA, 15 bp, Homo sapiens
ttctcgtgcctcaac

SEQ ID NO: 195340 - DNA, 15 bp, Homo sapiens
attctcgtgcctcaa

SEQ ID NO: 195341 - DNA, 15 bp, Homo sapiens
aattctcgtgcctca

SEQ ID NO: 195342 - DNA, 15 bp, Homo sapiens
caattctcgtgcctc

SEQ ID NO: 195343 - DNA, 15 bp, Homo sapiens
gcaattctcgtgcct

SEQ ID NO: 195344 - DNA, 15 bp, Homo sapiens
agcaattctcgtgcc

SEQ ID NO: 195345 - DNA, 15 bp, Homo sapiens
aagcaattctcgtgc

SEQ ID NO: 195346 - DNA, 15 bp, Homo sapiens
caagcaattctcgtg

SEQ ID NO: 195347 - DNA, 15 bp, Homo sapiens
tcaagcaattctcgt

SEQ ID NO: 195348 - DNA, 15 bp, Homo sapiens
ttcaagcaattctcg

SEQ ID NO: 195349 - DNA, 15 bp, Homo sapiens
aggttcaagcaattc

SEQ ID NO: 195350 - DNA, 15 bp, Homo sapiens
caggttcaagcaatt

SEQ ID NO: 195351 - DNA, 15 bp, Homo sapiens
ccaggttcaagcaat

SEQ ID NO: 195352 - DNA, 15 bp, Homo sapiens
cccaggttcaagcaa

SEQ ID NO: 195353 - DNA, 15 bp, Homo sapiens
tcccaggttcaagca

SEQ ID NO: 195354 - DNA, 15 bp, Homo sapiens
ctcccaggttcaagc

SEQ ID NO: 195355 - DNA, 15 bp, Homo sapiens
cctcccaggttcaag

SEQ ID NO: 195356 - DNA, 15 bp, Homo sapiens
gcctcccaggttcaa

SEQ ID NO: 195357 - DNA, 15 bp, Homo sapiens
tgcctcccaggttca

SEQ ID NO: 195358 - DNA, 15 bp, Homo sapiens
ctgcctcccaggttc

SEQ ID NO: 195359 - DNA, 15 bp, Homo sapiens
tctgcctcccaggtt

SEQ ID NO: 195360 - DNA, 15 bp, Homo sapiens
ttctgcctcccaggt

SEQ ID NO: 195361 - DNA, 15 bp, Homo sapiens
cttctgcctcccagg

SEQ ID NO: 195362 - DNA, 15 bp, Homo sapiens
gcttctgcctcccag

SEQ ID NO: 195363 - DNA, 15 bp, Homo sapiens
agcttctgcctccca

SEQ ID NO: 195364 - DNA, 15 bp, Homo sapiens
cagcttctgcctccc

SEQ ID NO: 195365 - DNA, 15 bp, Homo sapiens
tcagcttctgcctcc

SEQ ID NO: 195366 - DNA, 15 bp, Homo sapiens
ctcagcttctgcctc

SEQ ID NO: 195367 - DNA, 15 bp, Homo sapiens
cctcagcttctgcct

SEQ ID NO: 195368 - DNA, 15 bp, Homo sapiens
acctcagcttctgcc

SEQ ID NO: 195369 - DNA, 15 bp, Homo sapiens
cacctcagcttctgc

SEQ ID NO: 195370 - DNA, 15 bp, Homo sapiens
tcacctcagcttctg

SEQ ID NO: 195371 - DNA, 15 bp, Homo sapiens
ctcacctcagcttct

SEQ ID NO: 195372 - DNA, 15 bp, Homo sapiens
gctcacctcagcttc

SEQ ID NO: 195373 - DNA, 15 bp, Homo sapiens
agctcacctcagctt

SEQ ID NO: 195374 - DNA, 15 bp, Homo sapiens
cagctcacctcagct

SEQ ID NO: 195375 - DNA, 15 bp, Homo sapiens
tcagctcacctcagc

SEQ ID NO: 195376 - DNA, 15 bp, Homo sapiens
ctcagctcacctcag

SEQ ID NO: 195377 - DNA, 15 bp, Homo sapiens
tctcagctcacctca

SEQ ID NO: 195378 - DNA, 15 bp, Homo sapiens
gtctcagctcacctc

SEQ ID NO: 195379 - DNA, 15 bp, Homo sapiens
ggtctcagctcacct

SEQ ID NO: 195380 - DNA, 15 bp, Homo sapiens
aggtctcagctcacc

SEQ ID NO: 195381 - DNA, 15 bp, Homo sapiens
aaggtctcagctcac

SEQ ID NO: 195382 - DNA, 15 bp, Homo sapiens
caaggtctcagctca

SEQ ID NO: 195383 - DNA, 15 bp, Homo sapiens
gcaaggtctcagctc

SEQ ID NO: 195384 - DNA, 15 bp, Homo sapiens
ggcaaggtctcagct

SEQ ID NO: 195385 - DNA, 15 bp, Homo sapiens
tggcaaggtctcagc

SEQ ID NO: 195386 - DNA, 15 bp, Homo sapiens
gtggcaaggtctcag

SEQ ID NO: 195387 - DNA, 15 bp, Homo sapiens
agtggcaaggtctca

SEQ ID NO: 195388 - DNA, 15 bp, Homo sapiens
cagtggcaaggtctc

SEQ ID NO: 195389 - DNA, 15 bp, Homo sapiens
gcagtggcaaggtct

SEQ ID NO: 195390 - DNA, 15 bp, Homo sapiens
tgcagtggcaaggtc

SEQ ID NO: 195391 - DNA, 15 bp, Homo sapiens
gtgcagtggcaaggt

SEQ ID NO: 195392 - DNA, 15 bp, Homo sapiens
agtgcagtggcaagg

SEQ ID NO: 195393 - DNA, 15 bp, Homo sapiens
gagtgcagtggcaag

SEQ ID NO: 195394 - DNA, 15 bp, Homo sapiens
agagtgcagtggcaa

SEQ ID NO: 195395 - DNA, 15 bp, Homo sapiens
tagagtgcagtggca

SEQ ID NO: 195396 - DNA, 15 bp, Homo sapiens
ctagagtgcagtggc

SEQ ID NO: 195397 - DNA, 15 bp, Homo sapiens
gctagagtgcagtgg

SEQ ID NO: 195398 - DNA, 15 bp, Homo sapiens
ggctagagtgcagtg

SEQ ID NO: 195399 - DNA, 15 bp, Homo sapiens
aggctagagtgcagt

SEQ ID NO: 195400 - DNA, 15 bp, Homo sapiens
caggctagagtgcag

SEQ ID NO: 195401 - DNA, 15 bp, Homo sapiens
ccaggctagagtgca

SEQ ID NO: 195402 - DNA, 15 bp, Homo sapiens
cccaggctagagtgc

SEQ ID NO: 195403 - DNA, 15 bp, Homo sapiens
acccaggctagagtg

SEQ ID NO: 195404 - DNA, 15 bp, Homo sapiens
cacccaggctagagt

SEQ ID NO: 195405 - DNA, 15 bp, Homo sapiens
tcacccaggctagag

SEQ ID NO: 195406 - DNA, 15 bp, Homo sapiens
gtcacccaggctaga

SEQ ID NO: 195407 - DNA, 15 bp, Homo sapiens
tgtcacccaggctag

SEQ ID NO: 195408 - DNA, 15 bp, Homo sapiens
ctgtcacccaggcta

SEQ ID NO: 195409 - DNA, 15 bp, Homo sapiens
attctgtcacccagg

SEQ ID NO: 195410 - DNA, 15 bp, Homo sapiens
cattctgtcacccag

SEQ ID NO: 195411 - DNA, 15 bp, Homo sapiens
tcattctgtcaccca

SEQ ID NO: 195412 - DNA, 15 bp, Homo sapiens
ctcattctgtcaccc

SEQ ID NO: 195413 - DNA, 15 bp, Homo sapiens
tctcattctgtcacc

SEQ ID NO: 195414 - DNA, 15 bp, Homo sapiens
gtctcattctgtcac

SEQ ID NO: 195415 - DNA, 15 bp, Homo sapiens
agtctcattctgtca

SEQ ID NO: 195416 - DNA, 15 bp, Homo sapiens
gagtctcattctgtc

SEQ ID NO: 195417 - DNA, 15 bp, Homo sapiens
agagtctcattctgt

SEQ ID NO: 195418 - DNA, 15 bp, Homo sapiens
cagagtctcattctg

SEQ ID NO: 195419 - DNA, 15 bp, Homo sapiens
acagagtctcattct

SEQ ID NO: 195420 - DNA, 15 bp, Homo sapiens
gacagagtctcattc

SEQ ID NO: 195421 - DNA, 15 bp, Homo sapiens
agacagagtctcatt

SEQ ID NO: 195422 - DNA, 15 bp, Homo sapiens
gagacagagtctcat

SEQ ID NO: 195423 - DNA, 15 bp, Homo sapiens
tgagacagagtctca

SEQ ID NO: 195424 - DNA, 15 bp, Homo sapiens
ttgagacagagtctc

SEQ ID NO: 195425 - DNA, 15 bp, Homo sapiens
tttgagacagagtct

SEQ ID NO: 195426 - DNA, 15 bp, Homo sapiens
ttttgagacagagtc

SEQ ID NO: 195427 - DNA, 15 bp, Homo sapiens
tttttgagacagagt

SEQ ID NO: 195428 - DNA, 15 bp, Homo sapiens
ttttttgagacagag

SEQ ID NO: 195429 - DNA, 15 bp, Homo sapiens
tttttttgagacaga

SEQ ID NO: 195430 - DNA, 15 bp, Homo sapiens
ttttttttgagacag

SEQ ID NO: 195431 - DNA, 15 bp, Homo sapiens
attttttttgagaca

SEQ ID NO: 195432 - DNA, 15 bp, Homo sapiens
aattttttttgagac

SEQ ID NO: 195433 - DNA, 15 bp, Homo sapiens
taattttttttgaga

SEQ ID NO: 195434 - DNA, 15 bp, Homo sapiens
ttaattttttttgag

SEQ ID NO: 195435 - DNA, 15 bp, Homo sapiens
tttaattttttttga

SEQ ID NO: 195436 - DNA, 15 bp, Homo sapiens
atttaattttttttg

SEQ ID NO: 195437 - DNA, 15 bp, Homo sapiens
tatttaatttttttt

SEQ ID NO: 195438 - DNA, 15 bp, Homo sapiens
ttatttaattttttt

SEQ ID NO: 195439 - DNA, 15 bp, Homo sapiens
tttatttaatttttt

SEQ ID NO: 195440 - DNA, 15 bp, Homo sapiens
atttatttaattttt

SEQ ID NO: 195441 - DNA, 15 bp, Homo sapiens
tatttatttaatttt

SEQ ID NO: 195442 - DNA, 15 bp, Homo sapiens
ttatttatttaattt

SEQ ID NO: 195443 - DNA, 15 bp, Homo sapiens
tttatttatttaatt

SEQ ID NO: 195444 - DNA, 15 bp, Homo sapiens
ttttatttatttaat

SEQ ID NO: 195445 - DNA, 15 bp, Homo sapiens
tttttatttatttaa

SEQ ID NO: 195446 - DNA, 15 bp, Homo sapiens
atttttatttattta

SEQ ID NO: 195447 - DNA, 15 bp, Homo sapiens
tatttttatttattt

SEQ ID NO: 195448 - DNA, 15 bp, Homo sapiens
ttatttttatttatt

SEQ ID NO: 195449 - DNA, 15 bp, Homo sapiens
tttatttttatttat

SEQ ID NO: 195450 - DNA, 15 bp, Homo sapiens
ttttatttttattta

SEQ ID NO: 195451 - DNA, 15 bp, Homo sapiens
attttatttttattt

SEQ ID NO: 195452 - DNA, 15 bp, Homo sapiens
cattttatttttatt

SEQ ID NO: 195453 - DNA, 15 bp, Homo sapiens
gcattttatttttat

SEQ ID NO: 195454 - DNA, 15 bp, Homo sapiens
tgcattttattttta

SEQ ID NO: 195455 - DNA, 15 bp, Homo sapiens
ctgcattttattttt

SEQ ID NO: 195456 - DNA, 15 bp, Homo sapiens
tctgcattttatttt

SEQ ID NO: 195457 - DNA, 15 bp, Homo sapiens
atctgcattttattt

SEQ ID NO: 195458 - DNA, 15 bp, Homo sapiens
catctgcattttatt

SEQ ID NO: 195459 - DNA, 15 bp, Homo sapiens
tcatctgcattttat

SEQ ID NO: 195460 - DNA, 15 bp, Homo sapiens
ctcatctgcatttta

SEQ ID NO: 195461 - DNA, 15 bp, Homo sapiens
cctcatctgcatttt

SEQ ID NO: 195462 - DNA, 15 bp, Homo sapiens
gcctcatctgcattt

SEQ ID NO: 195463 - DNA, 15 bp, Homo sapiens
agcctcatctgcatt

SEQ ID NO: 195464 - DNA, 15 bp, Homo sapiens
cagcctcatctgcat

SEQ ID NO: 195465 - DNA, 15 bp, Homo sapiens
ccagcctcatctgca

SEQ ID NO: 195466 - DNA, 15 bp, Homo sapiens
cccagcctcatctgc

SEQ ID NO: 195467 - DNA, 15 bp, Homo sapiens
gcccagcctcatctg

SEQ ID NO: 195468 - DNA, 15 bp, Homo sapiens
cgcccagcctcatct

SEQ ID NO: 195469 - DNA, 15 bp, Homo sapiens
acgcccagcctcatc

SEQ ID NO: 195470 - DNA, 15 bp, Homo sapiens
cacgcccagcctcat

SEQ ID NO: 195471 - DNA, 15 bp, Homo sapiens
ccacgcccagcctca

SEQ ID NO: 195472 - DNA, 15 bp, Homo sapiens
accacgcccagcctc

SEQ ID NO: 195473 - DNA, 15 bp, Homo sapiens
caccacgcccagcct

SEQ ID NO: 195474 - DNA, 15 bp, Homo sapiens
ccaccacgcccagcc

SEQ ID NO: 195475 - DNA, 15 bp, Homo sapiens
tccaccacgcccagc

SEQ ID NO: 195476 - DNA, 15 bp, Homo sapiens
ctccaccacgcccag

SEQ ID NO: 195477 - DNA, 15 bp, Homo sapiens
gctccaccacgccca

SEQ ID NO: 195478 - DNA, 15 bp, Homo sapiens
tgctccaccacgccc

SEQ ID NO: 195479 - DNA, 15 bp, Homo sapiens
atgctccaccacgcc

SEQ ID NO: 195480 - DNA, 15 bp, Homo sapiens
catgctccaccacgc

SEQ ID NO: 195481 - DNA, 15 bp, Homo sapiens
gcatgctccaccacg

SEQ ID NO: 195482 - DNA, 15 bp, Homo sapiens
ggcatgctccaccac

SEQ ID NO: 195483 - DNA, 15 bp, Homo sapiens
aggcatgctccacca

SEQ ID NO: 195484 - DNA, 15 bp, Homo sapiens
taggcatgctccacc

SEQ ID NO: 195485 - DNA, 15 bp, Homo sapiens
ataggcatgctccac

SEQ ID NO: 195486 - DNA, 15 bp, Homo sapiens
tataggcatgctcca

SEQ ID NO: 195487 - DNA, 15 bp, Homo sapiens
ttataggcatgctcc

SEQ ID NO: 195488 - DNA, 15 bp, Homo sapiens
attataggcatgctc

SEQ ID NO: 195489 - DNA, 15 bp, Homo sapiens
gattataggcatgct

SEQ ID NO: 195490 - DNA, 15 bp, Homo sapiens
ggattataggcatgc

SEQ ID NO: 195491 - DNA, 15 bp, Homo sapiens
gggattataggcatg

SEQ ID NO: 195492 - DNA, 15 bp, Homo sapiens
tgggattataggcat

SEQ ID NO: 195493 - DNA, 15 bp, Homo sapiens
ctgggattataggca

SEQ ID NO: 195494 - DNA, 15 bp, Homo sapiens
actgggattataggc

SEQ ID NO: 195495 - DNA, 15 bp, Homo sapiens
cactgggattatagg

SEQ ID NO: 195496 - DNA, 15 bp, Homo sapiens
ccactgggattatag

SEQ ID NO: 195497 - DNA, 15 bp, Homo sapiens
accactgggattata

SEQ ID NO: 195498 - DNA, 15 bp, Homo sapiens
aaccactgggattat

SEQ ID NO: 195499 - DNA, 15 bp, Homo sapiens
aaaccactgggatta

SEQ ID NO: 195500 - DNA, 15 bp, Homo sapiens
taaaccactgggatt

SEQ ID NO: 195501 - DNA, 15 bp, Homo sapiens
gtaaaccactgggat

SEQ ID NO: 195502 - DNA, 15 bp, Homo sapiens
cgtaaaccactggga

SEQ ID NO: 195503 - DNA, 15 bp, Homo sapiens
tcgtaaaccactggg

SEQ ID NO: 195504 - DNA, 15 bp, Homo sapiens
ctcgtaaaccactgg

SEQ ID NO: 195505 - DNA, 15 bp, Homo sapiens
cctcgtaaaccactg

SEQ ID NO: 195506 - DNA, 15 bp, Homo sapiens
gcctcgtaaaccact

SEQ ID NO: 195507 - DNA, 15 bp, Homo sapiens
agcctcgtaaaccac

SEQ ID NO: 195508 - DNA, 15 bp, Homo sapiens
cagcctcgtaaacca

SEQ ID NO: 195509 - DNA, 15 bp, Homo sapiens
tcagcctcgtaaacc

SEQ ID NO: 195510 - DNA, 15 bp, Homo sapiens
ctcagcctcgtaaac

SEQ ID NO: 195511 - DNA, 15 bp, Homo sapiens
tctcagcctcgtaaa

SEQ ID NO: 195512 - DNA, 15 bp, Homo sapiens
gtctcagcctcgtaa

SEQ ID NO: 195513 - DNA, 15 bp, Homo sapiens
cgtctcagcctcgta

SEQ ID NO: 195514 - DNA, 15 bp, Homo sapiens
ccgtctcagcctcgt

SEQ ID NO: 195515 - DNA, 15 bp, Homo sapiens
cccgtctcagcctcg

SEQ ID NO: 195516 - DNA, 15 bp, Homo sapiens
tcccgtctcagcctc

SEQ ID NO: 195517 - DNA, 15 bp, Homo sapiens
ctcccgtctcagcct

SEQ ID NO: 195518 - DNA, 15 bp, Homo sapiens
cctcccgtctcagcc

SEQ ID NO: 195519 - DNA, 15 bp, Homo sapiens
tcctcccgtctcagc

SEQ ID NO: 195520 - DNA, 15 bp, Homo sapiens
atcctcccgtctcag

SEQ ID NO: 195521 - DNA, 15 bp, Homo sapiens
aatcctcccgtctca

SEQ ID NO: 195522 - DNA, 15 bp, Homo sapiens
taatcctcccgtctc

SEQ ID NO: 195523 - DNA, 15 bp, Homo sapiens
gtaatcctcccgtct

SEQ ID NO: 195524 - DNA, 15 bp, Homo sapiens
agtaatcctcccgtc

SEQ ID NO: 195525 - DNA, 15 bp, Homo sapiens
aagtaatcctcccgt

SEQ ID NO: 195526 - DNA, 15 bp, Homo sapiens
caagtaatcctcccg

SEQ ID NO: 195527 - DNA, 15 bp, Homo sapiens
tcaagtaatcctccc

SEQ ID NO: 195528 - DNA, 15 bp, Homo sapiens
ctcaagtaatcctcc

SEQ ID NO: 195529 - DNA, 15 bp, Homo sapiens
cctcaagtaatcctc

SEQ ID NO: 195530 - DNA, 15 bp, Homo sapiens
gcctcaagtaatcct

SEQ ID NO: 195531 - DNA, 15 bp, Homo sapiens
ggcctcaagtaatcc

SEQ ID NO: 195532 - DNA, 15 bp, Homo sapiens
tggcctcaagtaatc

SEQ ID NO: 195533 - DNA, 15 bp, Homo sapiens
ctggcctcaagtaat

SEQ ID NO: 195534 - DNA, 15 bp, Homo sapiens
cctggcctcaagtaa

SEQ ID NO: 195535 - DNA, 15 bp, Homo sapiens
tcctggcctcaagta

SEQ ID NO: 195536 - DNA, 15 bp, Homo sapiens
ttcctggcctcaagt

SEQ ID NO: 195537 - DNA, 15 bp, Homo sapiens
attcctggcctcaag

SEQ ID NO: 195538 - DNA, 15 bp, Homo sapiens
aattcctggcctcaa

SEQ ID NO: 195539 - DNA, 15 bp, Homo sapiens
gaattcctggcctca

SEQ ID NO: 195540 - DNA, 15 bp, Homo sapiens
tgaattcctggcctc

SEQ ID NO: 195541 - DNA, 15 bp, Homo sapiens
ttgaattcctggcct

SEQ ID NO: 195542 - DNA, 15 bp, Homo sapiens
cttgaattcctggcc

SEQ ID NO: 195543 - DNA, 15 bp, Homo sapiens
ccttgaattcctggc

SEQ ID NO: 195544 - DNA, 15 bp, Homo sapiens
gccttgaattcctgg

SEQ ID NO: 195545 - DNA, 15 bp, Homo sapiens
agccttgaattcctg

SEQ ID NO: 195546 - DNA, 15 bp, Homo sapiens
cagccttgaattcct

SEQ ID NO: 195547 - DNA, 15 bp, Homo sapiens
gcagccttgaattcc

SEQ ID NO: 195548 - DNA, 15 bp, Homo sapiens
tgcagccttgaattc

SEQ ID NO: 195549 - DNA, 15 bp, Homo sapiens
ctgcagccttgaatt

SEQ ID NO: 195550 - DNA, 15 bp, Homo sapiens
actgcagccttgaat

SEQ ID NO: 195551 - DNA, 15 bp, Homo sapiens
cactgcagccttgaa

SEQ ID NO: 195552 - DNA, 15 bp, Homo sapiens
tcactgcagccttga

SEQ ID NO: 195553 - DNA, 15 bp, Homo sapiens
gtcactgcagccttg

SEQ ID NO: 195554 - DNA, 15 bp, Homo sapiens
ggtcactgcagcctt

SEQ ID NO: 195555 - DNA, 15 bp, Homo sapiens
aggtcactgcagcct

SEQ ID NO: 195556 - DNA, 15 bp, Homo sapiens
taggtcactgcagcc

SEQ ID NO: 195557 - DNA, 15 bp, Homo sapiens
ataggtcactgcagc

SEQ ID NO: 195558 - DNA, 15 bp, Homo sapiens
cataggtcactgcag

SEQ ID NO: 195559 - DNA, 15 bp, Homo sapiens
tcataggtcactgca

SEQ ID NO: 195560 - DNA, 15 bp, Homo sapiens
atcataggtcactgc

SEQ ID NO: 195561 - DNA, 15 bp, Homo sapiens
catcataggtcactg

SEQ ID NO: 195562 - DNA, 15 bp, Homo sapiens
ccatcataggtcact

SEQ ID NO: 195563 - DNA, 15 bp, Homo sapiens
gccatcataggtcac

SEQ ID NO: 195564 - DNA, 15 bp, Homo sapiens
tgccatcataggtca

SEQ ID NO: 195565 - DNA, 15 bp, Homo sapiens
gtgccatcataggtc

SEQ ID NO: 195566 - DNA, 15 bp, Homo sapiens
ggtgccatcataggt

SEQ ID NO: 195567 - DNA, 15 bp, Homo sapiens
tggtgccatcatagg

SEQ ID NO: 195568 - DNA, 15 bp, Homo sapiens
gtggtgccatcatag

SEQ ID NO: 195569 - DNA, 15 bp, Homo sapiens
agtggtgccatcata

SEQ ID NO: 195570 - DNA, 15 bp, Homo sapiens
cagtggtgccatcat

SEQ ID NO: 195571 - DNA, 15 bp, Homo sapiens
gcagtggtgccatca

SEQ ID NO: 195572 - DNA, 15 bp, Homo sapiens
tgcagtggtgccatc

SEQ ID NO: 195573 - DNA, 15 bp, Homo sapiens
gtgcagtggtgccat

SEQ ID NO: 195574 - DNA, 15 bp, Homo sapiens
agtgcagtggtgcca

SEQ ID NO: 195575 - DNA, 15 bp, Homo sapiens
cagtgcagtggtgcc

SEQ ID NO: 195576 - DNA, 15 bp, Homo sapiens
gcagtgcagtggtgc

SEQ ID NO: 195577 - DNA, 15 bp, Homo sapiens
tgcagtgcagtggtg

SEQ ID NO: 195578 - DNA, 15 bp, Homo sapiens
ctgcagtgcagtggt

SEQ ID NO: 195579 - DNA, 15 bp, Homo sapiens
gctgcagtgcagtgg

SEQ ID NO: 195580 - DNA, 15 bp, Homo sapiens
ggctgcagtgcagtg

SEQ ID NO: 195581 - DNA, 15 bp, Homo sapiens
aggctgcagtgcagt

SEQ ID NO: 195582 - DNA, 15 bp, Homo sapiens
caggctgcagtgcag

SEQ ID NO: 195583 - DNA, 15 bp, Homo sapiens
ccaggctgcagtgca

SEQ ID NO: 195584 - DNA, 15 bp, Homo sapiens
cccaggctgcagtgc

SEQ ID NO: 195585 - DNA, 15 bp, Homo sapiens
acccaggctgcagtg

SEQ ID NO: 195586 - DNA, 15 bp, Homo sapiens
cacccaggctgcagt

SEQ ID NO: 195587 - DNA, 15 bp, Homo sapiens
tcacccaggctgcag

SEQ ID NO: 195588 - DNA, 15 bp, Homo sapiens
gtcacccaggctgca

SEQ ID NO: 195589 - DNA, 15 bp, Homo sapiens
tgtcacccaggctgc

SEQ ID NO: 195590 - DNA, 15 bp, Homo sapiens
gtgtcacccaggctg

SEQ ID NO: 195591 - DNA, 15 bp, Homo sapiens
tgtgtcacccaggct

SEQ ID NO: 195592 - DNA, 15 bp, Homo sapiens
ctgtgtcacccaggc

SEQ ID NO: 195593 - DNA, 15 bp, Homo sapiens
actgtgtcacccagg

SEQ ID NO: 195594 - DNA, 15 bp, Homo sapiens
cactgtgtcacccag

SEQ ID NO: 195595 - DNA, 15 bp, Homo sapiens
tcactgtgtcaccca

SEQ ID NO: 195596 - DNA, 15 bp, Homo sapiens
ctcactgtgtcaccc

SEQ ID NO: 195597 - DNA, 15 bp, Homo sapiens
tctcactgtgtcacc

SEQ ID NO: 195598 - DNA, 15 bp, Homo sapiens
gtctcactgtgtcac

SEQ ID NO: 195599 - DNA, 15 bp, Homo sapiens
cgtctcactgtgtca

SEQ ID NO: 195600 - DNA, 15 bp, Homo sapiens
tcgtctcactgtgtc

SEQ ID NO: 195601 - DNA, 15 bp, Homo sapiens
atcgtctcactgtgt

SEQ ID NO: 195602 - DNA, 15 bp, Homo sapiens
catcgtctcactgtg

SEQ ID NO: 195603 - DNA, 15 bp, Homo sapiens
acatcgtctcactgt

SEQ ID NO: 195604 - DNA, 15 bp, Homo sapiens
gacatcgtctcactg

SEQ ID NO: 195605 - DNA, 15 bp, Homo sapiens
agacatcgtctcact

SEQ ID NO: 195606 - DNA, 15 bp, Homo sapiens
cagacatcgtctcac

SEQ ID NO: 195607 - DNA, 15 bp, Homo sapiens
acagacatcgtctca

SEQ ID NO: 195608 - DNA, 15 bp, Homo sapiens
tacagacatcgtctc

SEQ ID NO: 195609 - DNA, 15 bp, Homo sapiens
ttacagacatcgtct

SEQ ID NO: 195610 - DNA, 15 bp, Homo sapiens
tttacagacatcgtc

SEQ ID NO: 195611 - DNA, 15 bp, Homo sapiens
ttttacagacatcgt

SEQ ID NO: 195612 - DNA, 15 bp, Homo sapiens
gttttacagacatcg

SEQ ID NO: 195613 - DNA, 15 bp, Homo sapiens
tgttttacagacatc

SEQ ID NO: 195614 - DNA, 15 bp, Homo sapiens
ttgttttacagacat

SEQ ID NO: 195615 - DNA, 15 bp, Homo sapiens
tttgttttacagaca

SEQ ID NO: 195616 - DNA, 15 bp, Homo sapiens
atttgttttacagac

SEQ ID NO: 195617 - DNA, 15 bp, Homo sapiens
tatttgttttacaga

SEQ ID NO: 195618 - DNA, 15 bp, Homo sapiens
ttatttgttttacag

SEQ ID NO: 195619 - DNA, 15 bp, Homo sapiens
tttatttgttttaca

SEQ ID NO: 195620 - DNA, 15 bp, Homo sapiens
gtttatttgttttac

SEQ ID NO: 195621 - DNA, 15 bp, Homo sapiens
tgtttatttgtttta

SEQ ID NO: 195622 - DNA, 15 bp, Homo sapiens
ttgtttatttgtttt

SEQ ID NO: 195623 - DNA, 15 bp, Homo sapiens
tttgtttatttgttt

SEQ ID NO: 195624 - DNA, 15 bp, Homo sapiens
atttgtttatttgtt

SEQ ID NO: 195625 - DNA, 15 bp, Homo sapiens
tatttgtttatttgt

SEQ ID NO: 195626 - DNA, 15 bp, Homo sapiens
ttatttgtttatttg

SEQ ID NO: 195627 - DNA, 15 bp, Homo sapiens
tttatttgtttattt

SEQ ID NO: 195628 - DNA, 15 bp, Homo sapiens
gtttatttgtttatt

SEQ ID NO: 195629 - DNA, 15 bp, Homo sapiens
agtttatttgtttat

SEQ ID NO: 195630 - DNA, 15 bp, Homo sapiens
cagtttatttgttta

SEQ ID NO: 195631 - DNA, 15 bp, Homo sapiens
gcagtttatttgttt

SEQ ID NO: 195632 - DNA, 15 bp, Homo sapiens
tgcagtttatttgtt

SEQ ID NO: 195633 - DNA, 15 bp, Homo sapiens
ctgcagtttatttgt

SEQ ID NO: 195634 - DNA, 15 bp, Homo sapiens
tctgcagtttatttg

SEQ ID NO: 195635 - DNA, 15 bp, Homo sapiens
atctgcagtttattt

SEQ ID NO: 195636 - DNA, 15 bp, Homo sapiens
tatctgcagtttatt

SEQ ID NO: 195637 - DNA, 15 bp, Homo sapiens
ctatctgcagtttat

SEQ ID NO: 195638 - DNA, 15 bp, Homo sapiens
gctatctgcagttta

SEQ ID NO: 195639 - DNA, 15 bp, Homo sapiens
agctatctgcagttt

SEQ ID NO: 195640 - DNA, 15 bp, Homo sapiens
cagctatctgcagtt

SEQ ID NO: 195641 - DNA, 15 bp, Homo sapiens
ccagctatctgcagt

SEQ ID NO: 195642 - DNA, 15 bp, Homo sapiens
cccagctatctgcag

SEQ ID NO: 195643 - DNA, 15 bp, Homo sapiens
gcccagctatctgca

SEQ ID NO: 195644 - DNA, 15 bp, Homo sapiens
ggcccagctatctgc

SEQ ID NO: 195645 - DNA, 15 bp, Homo sapiens
aggcccagctatctg

SEQ ID NO: 195646 - DNA, 15 bp, Homo sapiens
gaggcccagctatct

SEQ ID NO: 195647 - DNA, 15 bp, Homo sapiens
ggaggcccagctatc

SEQ ID NO: 195648 - DNA, 15 bp, Homo sapiens
tggaggcccagctat

SEQ ID NO: 195649 - DNA, 15 bp, Homo sapiens
ctggaggcccagcta

SEQ ID NO: 195650 - DNA, 15 bp, Homo sapiens
tctggaggcccagct

SEQ ID NO: 195651 - DNA, 15 bp, Homo sapiens
ttctggaggcccagc

SEQ ID NO: 195652 - DNA, 15 bp, Homo sapiens
attctggaggcccag

SEQ ID NO: 195653 - DNA, 15 bp, Homo sapiens
aattctggaggccca

SEQ ID NO: 195654 - DNA, 15 bp, Homo sapiens
aaattctggaggccc

SEQ ID NO: 195655 - DNA, 15 bp, Homo sapiens
gaaattctggaggcc

SEQ ID NO: 195656 - DNA, 15 bp, Homo sapiens
agaaattctggaggc

SEQ ID NO: 195657 - DNA, 15 bp, Homo sapiens
cagaaattctggagg

SEQ ID NO: 195658 - DNA, 15 bp, Homo sapiens
tcagaaattctggag

SEQ ID NO: 195659 - DNA, 15 bp, Homo sapiens
atcagaaattctgga

SEQ ID NO: 195660 - DNA, 15 bp, Homo sapiens
aatcagaaattctgg

SEQ ID NO: 195661 - DNA, 15 bp, Homo sapiens
gaatcagaaattctg

SEQ ID NO: 195662 - DNA, 15 bp, Homo sapiens
ggaatcagaaattct

SEQ ID NO: 195663 - DNA, 15 bp, Homo sapiens
tggaatcagaaattc

SEQ ID NO: 195664 - DNA, 15 bp, Homo sapiens
gtggaatcagaaatt

SEQ ID NO: 195665 - DNA, 15 bp, Homo sapiens
tgtggaatcagaaat

SEQ ID NO: 195666 - DNA, 15 bp, Homo sapiens
ctgtggaatcagaaa

SEQ ID NO: 195667 - DNA, 15 bp, Homo sapiens
cctgtggaatcagaa

SEQ ID NO: 195668 - DNA, 15 bp, Homo sapiens
acctgtggaatcaga

SEQ ID NO: 195669 - DNA, 15 bp, Homo sapiens
cacctgtggaatcag

SEQ ID NO: 195670 - DNA, 15 bp, Homo sapiens
gcacctgtggaatca

SEQ ID NO: 195671 - DNA, 15 bp, Homo sapiens
tgcacctgtggaatc

SEQ ID NO: 195672 - DNA, 15 bp, Homo sapiens
ttgcacctgtggaat

SEQ ID NO: 195673 - DNA, 15 bp, Homo sapiens
cttgcacctgtggaa

SEQ ID NO: 195674 - DNA, 15 bp, Homo sapiens
ccttgcacctgtgga

SEQ ID NO: 195675 - DNA, 15 bp, Homo sapiens
gccttgcacctgtgg

SEQ ID NO: 195676 - DNA, 15 bp, Homo sapiens
cgccttgcacctgtg

SEQ ID NO: 195677 - DNA, 15 bp, Homo sapiens
ccgccttgcacctgt

SEQ ID NO: 195678 - DNA, 15 bp, Homo sapiens
cccgccttgcacctg

SEQ ID NO: 195679 - DNA, 15 bp, Homo sapiens
ccccgccttgcacct

SEQ ID NO: 195680 - DNA, 15 bp, Homo sapiens
gccccgccttgcacc

SEQ ID NO: 195681 - DNA, 15 bp, Homo sapiens
ggccccgccttgcac

SEQ ID NO: 195682 - DNA, 15 bp, Homo sapiens
gggccccgccttgca

SEQ ID NO: 195683 - DNA, 15 bp, Homo sapiens
agggccccgccttgc

SEQ ID NO: 195684 - DNA, 15 bp, Homo sapiens
aagggccccgccttg

SEQ ID NO: 195685 - DNA, 15 bp, Homo sapiens
caagggccccgcctt

SEQ ID NO: 195686 - DNA, 15 bp, Homo sapiens
tcaagggccccgcct

SEQ ID NO: 195687 - DNA, 15 bp, Homo sapiens
gtcaagggccccgcc

SEQ ID NO: 195688 - DNA, 15 bp, Homo sapiens
ggtcaagggccccgc

SEQ ID NO: 195689 - DNA, 15 bp, Homo sapiens
aggtcaagggccccg

SEQ ID NO: 195690 - DNA, 15 bp, Homo sapiens
aaggtcaagggcccc

SEQ ID NO: 195691 - DNA, 15 bp, Homo sapiens
caaggtcaagggccc

SEQ ID NO: 195692 - DNA, 15 bp, Homo sapiens
gcaaggtcaagggcc

SEQ ID NO: 195693 - DNA, 15 bp, Homo sapiens
tgcaaggtcaagggc

SEQ ID NO: 195694 - DNA, 15 bp, Homo sapiens
atgcaaggtcaaggg

SEQ ID NO: 195695 - DNA, 15 bp, Homo sapiens
aatgcaaggtcaagg

SEQ ID NO: 195696 - DNA, 15 bp, Homo sapiens
aaatgcaaggtcaag

SEQ ID NO: 195697 - DNA, 15 bp, Homo sapiens
aaaatgcaaggtcaa

SEQ ID NO: 195698 - DNA, 15 bp, Homo sapiens
caaaatgcaaggtca

SEQ ID NO: 195699 - DNA, 15 bp, Homo sapiens
tcaaaatgcaaggtc

SEQ ID NO: 195700 - DNA, 15 bp, Homo sapiens
ctcaaaatgcaaggt

SEQ ID NO: 195701 - DNA, 15 bp, Homo sapiens
gctcaaaatgcaagg

SEQ ID NO: 195702 - DNA, 15 bp, Homo sapiens
tgctcaaaatgcaag

SEQ ID NO: 195703 - DNA, 15 bp, Homo sapiens
ttgctcaaaatgcaa

SEQ ID NO: 195704 - DNA, 15 bp, Homo sapiens
cttgctcaaaatgca

SEQ ID NO: 195705 - DNA, 15 bp, Homo sapiens
gcttgctcaaaatgc

SEQ ID NO: 195706 - DNA, 15 bp, Homo sapiens
agcttgctcaaaatg

SEQ ID NO: 195707 - DNA, 15 bp, Homo sapiens
cagcttgctcaaaat

SEQ ID NO: 195708 - DNA, 15 bp, Homo sapiens
gcagcttgctcaaaa

SEQ ID NO: 195709 - DNA, 15 bp, Homo sapiens
tgcagcttgctcaaa

SEQ ID NO: 195710 - DNA, 15 bp, Homo sapiens
ctgcagcttgctcaa

SEQ ID NO: 195711 - DNA, 15 bp, Homo sapiens
actgcagcttgctca

SEQ ID NO: 195712 - DNA, 15 bp, Homo sapiens
gactgcagcttgctc

SEQ ID NO: 195713 - DNA, 15 bp, Homo sapiens
ggactgcagcttgct

SEQ ID NO: 195714 - DNA, 15 bp, Homo sapiens
aggactgcagcttgc

SEQ ID NO: 195715 - DNA, 15 bp, Homo sapiens
caggactgcagcttg

SEQ ID NO: 195716 - DNA, 15 bp, Homo sapiens
acaggactgcagctt

SEQ ID NO: 195717 - DNA, 15 bp, Homo sapiens
cacaggactgcagct

SEQ ID NO: 195718 - DNA, 15 bp, Homo sapiens
ccacaggactgcagc

SEQ ID NO: 195719 - DNA, 15 bp, Homo sapiens
tccacaggactgcag

SEQ ID NO: 195720 - DNA, 15 bp, Homo sapiens
ctccacaggactgca

SEQ ID NO: 195721 - DNA, 15 bp, Homo sapiens
cctccacaggactgc

SEQ ID NO: 195722 - DNA, 15 bp, Homo sapiens
tcctccacaggactg

SEQ ID NO: 195723 - DNA, 15 bp, Homo sapiens
gtcctccacaggact

SEQ ID NO: 195724 - DNA, 15 bp, Homo sapiens
agtcctccacaggac

SEQ ID NO: 195725 - DNA, 15 bp, Homo sapiens
cagtcctccacagga

SEQ ID NO: 195726 - DNA, 15 bp, Homo sapiens
ccagtcctccacagg

SEQ ID NO: 195727 - DNA, 15 bp, Homo sapiens
accagtcctccacag

SEQ ID NO: 195728 - DNA, 15 bp, Homo sapiens
aaccagtcctccaca

SEQ ID NO: 195729 - DNA, 15 bp, Homo sapiens
caaccagtcctccac

SEQ ID NO: 195730 - DNA, 15 bp, Homo sapiens
acaaccagtcctcca

SEQ ID NO: 195731 - DNA, 15 bp, Homo sapiens
cacaaccagtcctcc

SEQ ID NO: 195732 - DNA, 15 bp, Homo sapiens
tcacaaccagtcctc

SEQ ID NO: 195733 - DNA, 15 bp, Homo sapiens
ttcacaaccagtcct

SEQ ID NO: 195734 - DNA, 15 bp, Homo sapiens
cttcacaaccagtcc

SEQ ID NO: 195735 - DNA, 15 bp, Homo sapiens
gcttcacaaccagtc

SEQ ID NO: 195736 - DNA, 15 bp, Homo sapiens
agcttcacaaccagt

SEQ ID NO: 195737 - DNA, 15 bp, Homo sapiens
cagcttcacaaccag

SEQ ID NO: 195738 - DNA, 15 bp, Homo sapiens
tcagcttcacaacca

SEQ ID NO: 195739 - DNA, 15 bp, Homo sapiens
gtcagcttcacaacc

SEQ ID NO: 195740 - DNA, 15 bp, Homo sapiens
tgtcagcttcacaac

SEQ ID NO: 195741 - DNA, 15 bp, Homo sapiens
gtgtcagcttcacaa

SEQ ID NO: 195742 - DNA, 15 bp, Homo sapiens
ggtgtcagcttcaca

SEQ ID NO: 195743 - DNA, 15 bp, Homo sapiens
tggtgtcagcttcac

SEQ ID NO: 195744 - DNA, 15 bp, Homo sapiens
atggtgtcagcttca

SEQ ID NO: 195745 - DNA, 15 bp, Homo sapiens
aatggtgtcagcttc

SEQ ID NO: 195746 - DNA, 15 bp, Homo sapiens
caatggtgtcagctt

SEQ ID NO: 195747 - DNA, 15 bp, Homo sapiens
acaatggtgtcagct

SEQ ID NO: 195748 - DNA, 15 bp, Homo sapiens
gacaatggtgtcagc

SEQ ID NO: 195749 - DNA, 15 bp, Homo sapiens
agacaatggtgtcag

SEQ ID NO: 195750 - DNA, 15 bp, Homo sapiens
cagacaatggtgtca

SEQ ID NO: 195751 - DNA, 15 bp, Homo sapiens
tcagacaatggtgtc

SEQ ID NO: 195752 - DNA, 15 bp, Homo sapiens
ctcagacaatggtgt

SEQ ID NO: 195753 - DNA, 15 bp, Homo sapiens
cctcagacaatggtg

SEQ ID NO: 195754 - DNA, 15 bp, Homo sapiens
ccctcagacaatggt

SEQ ID NO: 195755 - DNA, 15 bp, Homo sapiens
gccctcagacaatgg

SEQ ID NO: 195756 - DNA, 15 bp, Homo sapiens
tgccctcagacaatg

SEQ ID NO: 195757 - DNA, 15 bp, Homo sapiens
ctgccctcagacaat

SEQ ID NO: 195758 - DNA, 15 bp, Homo sapiens
gctgccctcagacaa

SEQ ID NO: 195759 - DNA, 15 bp, Homo sapiens
tgctgccctcagaca

SEQ ID NO: 195760 - DNA, 15 bp, Homo sapiens
ttgctgccctcagac

SEQ ID NO: 195761 - DNA, 15 bp, Homo sapiens
tttgctgccctcaga

SEQ ID NO: 195762 - DNA, 15 bp, Homo sapiens
ctttgctgccctcag

SEQ ID NO: 195763 - DNA, 15 bp, Homo sapiens
cctttgctgccctca

SEQ ID NO: 195764 - DNA, 15 bp, Homo sapiens
gcctttgctgccctc

SEQ ID NO: 195765 - DNA, 15 bp, Homo sapiens
agcctttgctgccct

SEQ ID NO: 195766 - DNA, 15 bp, Homo sapiens
gagcctttgctgccc

SEQ ID NO: 195767 - DNA, 15 bp, Homo sapiens
agagcctttgctgcc

SEQ ID NO: 195768 - DNA, 15 bp, Homo sapiens
aagagcctttgctgc

SEQ ID NO: 195769 - DNA, 15 bp, Homo sapiens
caagagcctttgctg

SEQ ID NO: 195770 - DNA, 15 bp, Homo sapiens
ccaagagcctttgct

SEQ ID NO: 195771 - DNA, 15 bp, Homo sapiens
tccaagagcctttgc

SEQ ID NO: 195772 - DNA, 15 bp, Homo sapiens
atccaagagcctttg

SEQ ID NO: 195773 - DNA, 15 bp, Homo sapiens
catccaagagccttt

SEQ ID NO: 195774 - DNA, 15 bp, Homo sapiens
ccatccaagagcctt

SEQ ID NO: 195775 - DNA, 15 bp, Homo sapiens
tccatccaagagcct

SEQ ID NO: 195776 - DNA, 15 bp, Homo sapiens
atccatccaagagcc

SEQ ID NO: 195777 - DNA, 15 bp, Homo sapiens
aatccatccaagagc

SEQ ID NO: 195778 - DNA, 15 bp, Homo sapiens
caatccatccaagag

SEQ ID NO: 195779 - DNA, 15 bp, Homo sapiens
tcaatccatccaaga

SEQ ID NO: 195780 - DNA, 15 bp, Homo sapiens
ctcaatccatccaag

SEQ ID NO: 195781 - DNA, 15 bp, Homo sapiens
gctcaatccatccaa

SEQ ID NO: 195782 - DNA, 15 bp, Homo sapiens
ggctcaatccatcca

SEQ ID NO: 195783 - DNA, 15 bp, Homo sapiens
aggctcaatccatcc

SEQ ID NO: 195784 - DNA, 15 bp, Homo sapiens
gaggctcaatccatc

SEQ ID NO: 195785 - DNA, 15 bp, Homo sapiens
tgaggctcaatccat

SEQ ID NO: 195786 - DNA, 15 bp, Homo sapiens
ctgaggctcaatcca

SEQ ID NO: 195787 - DNA, 15 bp, Homo sapiens
gctgaggctcaatcc

SEQ ID NO: 195788 - DNA, 15 bp, Homo sapiens
agctgaggctcaatc

SEQ ID NO: 195789 - DNA, 15 bp, Homo sapiens
gagctgaggctcaat

SEQ ID NO: 195790 - DNA, 15 bp, Homo sapiens
ggagctgaggctcaa

SEQ ID NO: 195791 - DNA, 15 bp, Homo sapiens
gggagctgaggctca

SEQ ID NO: 195792 - DNA, 15 bp, Homo sapiens
tgggagctgaggctc

SEQ ID NO: 195793 - DNA, 15 bp, Homo sapiens
atgggagctgaggct

SEQ ID NO: 195794 - DNA, 15 bp, Homo sapiens
gatgggagctgaggc

SEQ ID NO: 195795 - DNA, 15 bp, Homo sapiens
agatgggagctgagg

SEQ ID NO: 195796 - DNA, 15 bp, Homo sapiens
tagatgggagctgag

SEQ ID NO: 195797 - DNA, 15 bp, Homo sapiens
atagatgggagctga

SEQ ID NO: 195798 - DNA, 15 bp, Homo sapiens
catagatgggagctg

SEQ ID NO: 195799 - DNA, 15 bp, Homo sapiens
tcatagatgggagct

SEQ ID NO: 195800 - DNA, 15 bp, Homo sapiens
ctcatagatgggagc

SEQ ID NO: 195801 - DNA, 15 bp, Homo sapiens
tctcatagatgggag

SEQ ID NO: 195802 - DNA, 15 bp, Homo sapiens
ctctcatagatggga

SEQ ID NO: 195803 - DNA, 15 bp, Homo sapiens
gctctcatagatggg

SEQ ID NO: 195804 - DNA, 15 bp, Homo sapiens
agctctcatagatgg

SEQ ID NO: 195805 - DNA, 15 bp, Homo sapiens
aagctctcatagatg

SEQ ID NO: 195806 - DNA, 15 bp, Homo sapiens
aaagctctcatagat

SEQ ID NO: 195807 - DNA, 15 bp, Homo sapiens
taaagctctcataga

SEQ ID NO: 195808 - DNA, 15 bp, Homo sapiens
ttaaagctctcatag

SEQ ID NO: 195809 - DNA, 15 bp, Homo sapiens
cttaaagctctcata

SEQ ID NO: 195810 - DNA, 15 bp, Homo sapiens
gcttaaagctctcat

SEQ ID NO: 195811 - DNA, 15 bp, Homo sapiens
agcttaaagctctca

SEQ ID NO: 195812 - DNA, 15 bp, Homo sapiens
aagcttaaagctctc

SEQ ID NO: 195813 - DNA, 15 bp, Homo sapiens
aaagcttaaagctct

SEQ ID NO: 195814 - DNA, 15 bp, Homo sapiens
taaagcttaaagctc

SEQ ID NO: 195815 - DNA, 15 bp, Homo sapiens
ttaaagcttaaagct

SEQ ID NO: 195816 - DNA, 15 bp, Homo sapiens
cttaaagcttaaagc

SEQ ID NO: 195817 - DNA, 15 bp, Homo sapiens
acttaaagcttaaag

SEQ ID NO: 195818 - DNA, 15 bp, Homo sapiens
cacttaaagcttaaa

SEQ ID NO: 195819 - DNA, 15 bp, Homo sapiens
tcacttaaagcttaa

SEQ ID NO: 195820 - DNA, 15 bp, Homo sapiens
ctcacttaaagctta

SEQ ID NO: 195821 - DNA, 15 bp, Homo sapiens
tctcacttaaagctt

SEQ ID NO: 195822 - DNA, 15 bp, Homo sapiens
ctctcacttaaagct

SEQ ID NO: 195823 - DNA, 15 bp, Homo sapiens
gctctcacttaaagc

SEQ ID NO: 195824 - DNA, 15 bp, Homo sapiens
agctctcacttaaag

SEQ ID NO: 195825 - DNA, 15 bp, Homo sapiens
gagctctcacttaaa

SEQ ID NO: 195826 - DNA, 15 bp, Homo sapiens
ggagctctcacttaa

SEQ ID NO: 195827 - DNA, 15 bp, Homo sapiens
gggagctctcactta

SEQ ID NO: 195828 - DNA, 15 bp, Homo sapiens
ggggagctctcactt

SEQ ID NO: 195829 - DNA, 15 bp, Homo sapiens
tggggagctctcact

SEQ ID NO: 195830 - DNA, 15 bp, Homo sapiens
atggggagctctcac

SEQ ID NO: 195831 - DNA, 15 bp, Homo sapiens
catggggagctctca

SEQ ID NO: 195832 - DNA, 15 bp, Homo sapiens
ccatggggagctctc

SEQ ID NO: 195833 - DNA, 15 bp, Homo sapiens
gccatggggagctct

SEQ ID NO: 195834 - DNA, 15 bp, Homo sapiens
ggccatggggagctc

SEQ ID NO: 195835 - DNA, 15 bp, Homo sapiens
cggccatggggagct

SEQ ID NO: 195836 - DNA, 15 bp, Homo sapiens
tcggccatggggagc

SEQ ID NO: 195837 - DNA, 15 bp, Homo sapiens
ctcggccatggggag

SEQ ID NO: 195838 - DNA, 15 bp, Homo sapiens
tctcggccatgggga

SEQ ID NO: 195839 - DNA, 15 bp, Homo sapiens
ctctcggccatgggg

SEQ ID NO: 195840 - DNA, 15 bp, Homo sapiens
gctctcggccatggg

SEQ ID NO: 195841 - DNA, 15 bp, Homo sapiens
agctctcggccatgg

SEQ ID NO: 195842 - DNA, 15 bp, Homo sapiens
aagctctcggccatg

SEQ ID NO: 195843 - DNA, 15 bp, Homo sapiens
gaagctctcggccat

SEQ ID NO: 195844 - DNA, 15 bp, Homo sapiens
tgaagctctcggcca

SEQ ID NO: 195845 - DNA, 15 bp, Homo sapiens
atgaagctctcggcc

SEQ ID NO: 195846 - DNA, 15 bp, Homo sapiens
aatgaagctctcggc

SEQ ID NO: 195847 - DNA, 15 bp, Homo sapiens
gaatgaagctctcgg

SEQ ID NO: 195848 - DNA, 15 bp, Homo sapiens
agaatgaagctctcg

SEQ ID NO: 195849 - DNA, 15 bp, Homo sapiens
cagaatgaagctctc

SEQ ID NO: 195850 - DNA, 15 bp, Homo sapiens
tcagaatgaagctct

SEQ ID NO: 195851 - DNA, 15 bp, Homo sapiens
ttcagaatgaagctc

SEQ ID NO: 195852 - DNA, 15 bp, Homo sapiens
attcagaatgaagct

SEQ ID NO: 195853 - DNA, 15 bp, Homo sapiens
aattcagaatgaagc

SEQ ID NO: 195854 - DNA, 15 bp, Homo sapiens
gaattcagaatgaag

SEQ ID NO: 195855 - DNA, 15 bp, Homo sapiens
ggaattcagaatgaa

SEQ ID NO: 195856 - DNA, 15 bp, Homo sapiens
aggaattcagaatga

SEQ ID NO: 195857 - DNA, 15 bp, Homo sapiens
caggaattcagaatg

SEQ ID NO: 195858 - DNA, 15 bp, Homo sapiens
gcaggaattcagaat

SEQ ID NO: 195859 - DNA, 15 bp, Homo sapiens
agcaggaattcagaa

SEQ ID NO: 195860 - DNA, 15 bp, Homo sapiens
cagcaggaattcaga

SEQ ID NO: 195861 - DNA, 15 bp, Homo sapiens
gcagcaggaattcag

SEQ ID NO: 195862 - DNA, 15 bp, Homo sapiens
agcagcaggaattca

SEQ ID NO: 195863 - DNA, 15 bp, Homo sapiens
tagcagcaggaattc

SEQ ID NO: 195864 - DNA, 15 bp, Homo sapiens
ctagcagcaggaatt

SEQ ID NO: 195865 - DNA, 15 bp, Homo sapiens
cctagcagcaggaat

SEQ ID NO: 195866 - DNA, 15 bp, Homo sapiens
tcctagcagcaggaa

SEQ ID NO: 195867 - DNA, 15 bp, Homo sapiens
ttcctagcagcagga

SEQ ID NO: 195868 - DNA, 15 bp, Homo sapiens
attcctagcagcagg

SEQ ID NO: 195869 - DNA, 15 bp, Homo sapiens
aattcctagcagcag

SEQ ID NO: 195870 - DNA, 15 bp, Homo sapiens
gaattcctagcagca

SEQ ID NO: 195871 - DNA, 15 bp, Homo sapiens
tgaattcctagcagc

SEQ ID NO: 195872 - DNA, 15 bp, Homo sapiens
ttgaattcctagcag

SEQ ID NO: 195873 - DNA, 15 bp, Homo sapiens
tttgaattcctagca

SEQ ID NO: 195874 - DNA, 15 bp, Homo sapiens
ttttgaattcctagc

SEQ ID NO: 195875 - DNA, 15 bp, Homo sapiens
gttttgaattcctag

SEQ ID NO: 195876 - DNA, 15 bp, Homo sapiens
agttttgaattccta

SEQ ID NO: 195877 - DNA, 15 bp, Homo sapiens
gagttttgaattcct

SEQ ID NO: 195878 - DNA, 15 bp, Homo sapiens
tgagttttgaattcc

SEQ ID NO: 195879 - DNA, 15 bp, Homo sapiens
gtgagttttgaattc

SEQ ID NO: 195880 - DNA, 15 bp, Homo sapiens
tgtgagttttgaatt

SEQ ID NO: 195881 - DNA, 15 bp, Homo sapiens
atgtgagttttgaat

SEQ ID NO: 195882 - DNA, 15 bp, Homo sapiens
aatgtgagttttgaa

SEQ ID NO: 195883 - DNA, 15 bp, Homo sapiens
caatgtgagttttga

SEQ ID NO: 195884 - DNA, 15 bp, Homo sapiens
tcaatgtgagttttg

SEQ ID NO: 195885 - DNA, 15 bp, Homo sapiens
ttcaatgtgagtttt

SEQ ID NO: 195886 - DNA, 15 bp, Homo sapiens
cttcaatgtgagttt

SEQ ID NO: 195887 - DNA, 15 bp, Homo sapiens
acttcaatgtgagtt

SEQ ID NO: 195888 - DNA, 15 bp, Homo sapiens
gacttcaatgtgagt

SEQ ID NO: 195889 - DNA, 15 bp, Homo sapiens
ggacttcaatgtgag

SEQ ID NO: 195890 - DNA, 15 bp, Homo sapiens
aggacttcaatgtga

SEQ ID NO: 195891 - DNA, 15 bp, Homo sapiens
taggacttcaatgtg

SEQ ID NO: 195892 - DNA, 15 bp, Homo sapiens
ttaggacttcaatgt

SEQ ID NO: 195893 - DNA, 15 bp, Homo sapiens
gttaggacttcaatg

SEQ ID NO: 195894 - DNA, 15 bp, Homo sapiens
cgttaggacttcaat

SEQ ID NO: 195895 - DNA, 15 bp, Homo sapiens
gcgttaggacttcaa

SEQ ID NO: 195896 - DNA, 15 bp, Homo sapiens
ggcgttaggacttca

SEQ ID NO: 195897 - DNA, 15 bp, Homo sapiens
aggcgttaggacttc

SEQ ID NO: 195898 - DNA, 15 bp, Homo sapiens
taggcgttaggactt

SEQ ID NO: 195899 - DNA, 15 bp, Homo sapiens
ctaggcgttaggact

SEQ ID NO: 195900 - DNA, 15 bp, Homo sapiens
actaggcgttaggac

SEQ ID NO: 195901 - DNA, 15 bp, Homo sapiens
tactaggcgttagga

SEQ ID NO: 195902 - DNA, 15 bp, Homo sapiens
ctactaggcgttagg

SEQ ID NO: 195903 - DNA, 15 bp, Homo sapiens
gctactaggcgttag

SEQ ID NO: 195904 - DNA, 15 bp, Homo sapiens
agctactaggcgtta

SEQ ID NO: 195905 - DNA, 15 bp, Homo sapiens
gagctactaggcgtt

SEQ ID NO: 195906 - DNA, 15 bp, Homo sapiens
tgagctactaggcgt

SEQ ID NO: 195907 - DNA, 15 bp, Homo sapiens
ctgagctactaggcg

SEQ ID NO: 195908 - DNA, 15 bp, Homo sapiens
tctgagctactaggc

SEQ ID NO: 195909 - DNA, 15 bp, Homo sapiens
ttctgagctactagg

SEQ ID NO: 195910 - DNA, 15 bp, Homo sapiens
attctgagctactag

SEQ ID NO: 195911 - DNA, 15 bp, Homo sapiens
cattctgagctacta

SEQ ID NO: 195912 - DNA, 15 bp, Homo sapiens
acattctgagctact

SEQ ID NO: 195913 - DNA, 15 bp, Homo sapiens
cacattctgagctac

SEQ ID NO: 195914 - DNA, 15 bp, Homo sapiens
tcacattctgagcta

SEQ ID NO: 195915 - DNA, 15 bp, Homo sapiens
gtcacattctgagct

SEQ ID NO: 195916 - DNA, 15 bp, Homo sapiens
ggtcacattctgagc

SEQ ID NO: 195917 - DNA, 15 bp, Homo sapiens
aggtcacattctgag

SEQ ID NO: 195918 - DNA, 15 bp, Homo sapiens
aaggtcacattctga

SEQ ID NO: 195919 - DNA, 15 bp, Homo sapiens
taaggtcacattctg

SEQ ID NO: 195920 - DNA, 15 bp, Homo sapiens
ctaaggtcacattct

SEQ ID NO: 195921 - DNA, 15 bp, Homo sapiens
actaaggtcacattc

SEQ ID NO: 195922 - DNA, 15 bp, Homo sapiens
aactaaggtcacatt

SEQ ID NO: 195923 - DNA, 15 bp, Homo sapiens
caactaaggtcacat

SEQ ID NO: 195924 - DNA, 15 bp, Homo sapiens
ccaactaaggtcaca

SEQ ID NO: 195925 - DNA, 15 bp, Homo sapiens
tccaactaaggtcac

SEQ ID NO: 195926 - DNA, 15 bp, Homo sapiens
ctccaactaaggtca

SEQ ID NO: 195927 - DNA, 15 bp, Homo sapiens
cctccaactaaggtc

SEQ ID NO: 195928 - DNA, 15 bp, Homo sapiens
gcctccaactaaggt

SEQ ID NO: 195929 - DNA, 15 bp, Homo sapiens
tgcctccaactaagg

SEQ ID NO: 195930 - DNA, 15 bp, Homo sapiens
ctgcctccaactaag

SEQ ID NO: 195931 - DNA, 15 bp, Homo sapiens
cctgcctccaactaa

SEQ ID NO: 195932 - DNA, 15 bp, Homo sapiens
ccctgcctccaacta

SEQ ID NO: 195933 - DNA, 15 bp, Homo sapiens
accctgcctccaact

SEQ ID NO: 195934 - DNA, 15 bp, Homo sapiens
gaccctgcctccaac

SEQ ID NO: 195935 - DNA, 15 bp, Homo sapiens
agaccctgcctccaa

SEQ ID NO: 195936 - DNA, 15 bp, Homo sapiens
aagaccctgcctcca

SEQ ID NO: 195937 - DNA, 15 bp, Homo sapiens
gaagaccctgcctcc

SEQ ID NO: 195938 - DNA, 15 bp, Homo sapiens
tgaagaccctgcctc

SEQ ID NO: 195939 - DNA, 15 bp, Homo sapiens
gtgaagaccctgcct

SEQ ID NO: 195940 - DNA, 15 bp, Homo sapiens
tgtgaagaccctgcc

SEQ ID NO: 195941 - DNA, 15 bp, Homo sapiens
ctgtgaagaccctgc

SEQ ID NO: 195942 - DNA, 15 bp, Homo sapiens
tctgtgaagaccctg

SEQ ID NO: 195943 - DNA, 15 bp, Homo sapiens
ctctgtgaagaccct

SEQ ID NO: 195944 - DNA, 15 bp, Homo sapiens
cctctgtgaagaccc

SEQ ID NO: 195945 - DNA, 15 bp, Homo sapiens
acctctgtgaagacc

SEQ ID NO: 195946 - DNA, 15 bp, Homo sapiens
tacctctgtgaagac

SEQ ID NO: 195947 - DNA, 15 bp, Homo sapiens
ttacctctgtgaaga

SEQ ID NO: 195948 - DNA, 15 bp, Homo sapiens
attacctctgtgaag

SEQ ID NO: 195949 - DNA, 15 bp, Homo sapiens
gattacctctgtgaa

SEQ ID NO: 195950 - DNA, 15 bp, Homo sapiens
tgattacctctgtga

SEQ ID NO: 195951 - DNA, 15 bp, Homo sapiens
ttgattacctctgtg

SEQ ID NO: 195952 - DNA, 15 bp, Homo sapiens
cttgattacctctgt

SEQ ID NO: 195953 - DNA, 15 bp, Homo sapiens
acttgattacctctg

SEQ ID NO: 195954 - DNA, 15 bp, Homo sapiens
aacttgattacctct

SEQ ID NO: 195955 - DNA, 15 bp, Homo sapiens
taacttgattacctc

SEQ ID NO: 195956 - DNA, 15 bp, Homo sapiens
ttaacttgattacct

SEQ ID NO: 195957 - DNA, 15 bp, Homo sapiens
tttaacttgattacc

SEQ ID NO: 195958 - DNA, 15 bp, Homo sapiens
ttttaacttgattac

SEQ ID NO: 195959 - DNA, 15 bp, Homo sapiens
attttaacttgatta

SEQ ID NO: 195960 - DNA, 15 bp, Homo sapiens
cattttaacttgatt

SEQ ID NO: 195961 - DNA, 15 bp, Homo sapiens
tcattttaacttgat

SEQ ID NO: 195962 - DNA, 15 bp, Homo sapiens
ctcattttaacttga

SEQ ID NO: 195963 - DNA, 15 bp, Homo sapiens
tctcattttaacttg

SEQ ID NO: 195964 - DNA, 15 bp, Homo sapiens
gtctcattttaactt

SEQ ID NO: 195965 - DNA, 15 bp, Homo sapiens
cgtctcattttaact

SEQ ID NO: 195966 - DNA, 15 bp, Homo sapiens
ccgtctcattttaac

SEQ ID NO: 195967 - DNA, 15 bp, Homo sapiens
cccgtctcattttaa

SEQ ID NO: 195968 - DNA, 15 bp, Homo sapiens
tcccgtctcatttta

SEQ ID NO: 195969 - DNA, 15 bp, Homo sapiens
ctcccgtctcatttt

SEQ ID NO: 195970 - DNA, 15 bp, Homo sapiens
tctcccgtctcattt

SEQ ID NO: 195971 - DNA, 15 bp, Homo sapiens
ttctcccgtctcatt

SEQ ID NO: 195972 - DNA, 15 bp, Homo sapiens
attctcccgtctcat

SEQ ID NO: 195973 - DNA, 15 bp, Homo sapiens
gattctcccgtctca

SEQ ID NO: 195974 - DNA, 15 bp, Homo sapiens
ggattctcccgtctc

SEQ ID NO: 195975 - DNA, 15 bp, Homo sapiens
aggattctcccgtct

SEQ ID NO: 195976 - DNA, 15 bp, Homo sapiens
taggattctcccgtc

SEQ ID NO: 195977 - DNA, 15 bp, Homo sapiens
ttaggattctcccgt

SEQ ID NO: 195978 - DNA, 15 bp, Homo sapiens
attaggattctcccg

SEQ ID NO: 195979 - DNA, 15 bp, Homo sapiens
gattaggattctccc

SEQ ID NO: 195980 - DNA, 15 bp, Homo sapiens
ggattaggattctcc

SEQ ID NO: 195981 - DNA, 15 bp, Homo sapiens
tggattaggattctc

SEQ ID NO: 195982 - DNA, 15 bp, Homo sapiens
ttggattaggattct

SEQ ID NO: 195983 - DNA, 15 bp, Homo sapiens
attggattaggattc

SEQ ID NO: 195984 - DNA, 15 bp, Homo sapiens
tattggattaggatt

SEQ ID NO: 195985 - DNA, 15 bp, Homo sapiens
atattggattaggat

SEQ ID NO: 195986 - DNA, 15 bp, Homo sapiens
tatattggattagga

SEQ ID NO: 195987 - DNA, 15 bp, Homo sapiens
ttatattggattagg

SEQ ID NO: 195988 - DNA, 15 bp, Homo sapiens
gttatattggattag

SEQ ID NO: 195989 - DNA, 15 bp, Homo sapiens
agttatattggatta

SEQ ID NO: 195990 - DNA, 15 bp, Homo sapiens
cagttatattggatt

SEQ ID NO: 195991 - DNA, 15 bp, Homo sapiens
ccagttatattggat

SEQ ID NO: 195992 - DNA, 15 bp, Homo sapiens
accagttatattgga

SEQ ID NO: 195993 - DNA, 15 bp, Homo sapiens
aaccagttatattgg

SEQ ID NO: 195994 - DNA, 15 bp, Homo sapiens
aaaccagttatattg

SEQ ID NO: 195995 - DNA, 15 bp, Homo sapiens
gaaaccagttatatt

SEQ ID NO: 195996 - DNA, 15 bp, Homo sapiens
ggaaaccagttatat

SEQ ID NO: 195997 - DNA, 15 bp, Homo sapiens
aggaaaccagttata

SEQ ID NO: 195998 - DNA, 15 bp, Homo sapiens
taggaaaccagttat

SEQ ID NO: 195999 - DNA, 15 bp, Homo sapiens
ttaggaaaccagtta

SEQ ID NO: 196000 - DNA, 15 bp, Homo sapiens
tttaggaaaccagtt

SEQ ID NO: 196001 - DNA, 15 bp, Homo sapiens
atttaggaaaccagt

SEQ ID NO: 196002 - DNA, 15 bp, Homo sapiens
gatttaggaaaccag

SEQ ID NO: 196003 - DNA, 15 bp, Homo sapiens
agatttaggaaacca

SEQ ID NO: 196004 - DNA, 15 bp, Homo sapiens
cagatttaggaaacc

SEQ ID NO: 196005 - DNA, 15 bp, Homo sapiens
tcagatttaggaaac

SEQ ID NO: 196006 - DNA, 15 bp, Homo sapiens
gtcagatttaggaaa

SEQ ID NO: 196007 - DNA, 15 bp, Homo sapiens
tgtcagatttaggaa

SEQ ID NO: 196008 - DNA, 15 bp, Homo sapiens
ctgtcagatttagga

SEQ ID NO: 196009 - DNA, 15 bp, Homo sapiens
cctgtcagatttagg

SEQ ID NO: 196010 - DNA, 15 bp, Homo sapiens
ccctgtcagatttag

SEQ ID NO: 196011 - DNA, 15 bp, Homo sapiens
accctgtcagattta

SEQ ID NO: 196012 - DNA, 15 bp, Homo sapiens
taccctgtcagattt

SEQ ID NO: 196013 - DNA, 15 bp, Homo sapiens
gtaccctgtcagatt

SEQ ID NO: 196014 - DNA, 15 bp, Homo sapiens
tgtaccctgtcagat

SEQ ID NO: 196015 - DNA, 15 bp, Homo sapiens
ctgtaccctgtcaga

SEQ ID NO: 196016 - DNA, 15 bp, Homo sapiens
actgtaccctgtcag

SEQ ID NO: 196017 - DNA, 15 bp, Homo sapiens
cactgtaccctgtca

SEQ ID NO: 196018 - DNA, 15 bp, Homo sapiens
tcactgtaccctgtc

SEQ ID NO: 196019 - DNA, 15 bp, Homo sapiens
gtcactgtaccctgt

SEQ ID NO: 196020 - DNA, 15 bp, Homo sapiens
agtcactgtaccctg

SEQ ID NO: 196021 - DNA, 15 bp, Homo sapiens
gagtcactgtaccct

SEQ ID NO: 196022 - DNA, 15 bp, Homo sapiens
tgagtcactgtaccc

SEQ ID NO: 196023 - DNA, 15 bp, Homo sapiens
gtgagtcactgtacc

SEQ ID NO: 196024 - DNA, 15 bp, Homo sapiens
tgtgagtcactgtac

SEQ ID NO: 196025 - DNA, 15 bp, Homo sapiens
gtgtgagtcactgta

SEQ ID NO: 196026 - DNA, 15 bp, Homo sapiens
ggtgtgagtcactgt

SEQ ID NO: 196027 - DNA, 15 bp, Homo sapiens
aggtgtgagtcactg

SEQ ID NO: 196028 - DNA, 15 bp, Homo sapiens
caggtgtgagtcact

SEQ ID NO: 196029 - DNA, 15 bp, Homo sapiens
acaggtgtgagtcac

SEQ ID NO: 196030 - DNA, 15 bp, Homo sapiens
tacaggtgtgagtca

SEQ ID NO: 196031 - DNA, 15 bp, Homo sapiens
ttacaggtgtgagtc

SEQ ID NO: 196032 - DNA, 15 bp, Homo sapiens
attacaggtgtgagt

SEQ ID NO: 196033 - DNA, 15 bp, Homo sapiens
gctgggattacaggt

SEQ ID NO: 196034 - DNA, 15 bp, Homo sapiens
ctgctgggattacag

SEQ ID NO: 196035 - DNA, 15 bp, Homo sapiens
actgctgggattaca

SEQ ID NO: 196036 - DNA, 15 bp, Homo sapiens
aactgctgggattac

SEQ ID NO: 196037 - DNA, 15 bp, Homo sapiens
aaactgctgggatta

SEQ ID NO: 196038 - DNA, 15 bp, Homo sapiens
caaactgctgggatt

SEQ ID NO: 196039 - DNA, 15 bp, Homo sapiens
ccaaactgctgggat

SEQ ID NO: 196040 - DNA, 15 bp, Homo sapiens
cccaaactgctggga

SEQ ID NO: 196041 - DNA, 15 bp, Homo sapiens
tcccaaactgctggg

SEQ ID NO: 196042 - DNA, 15 bp, Homo sapiens
ctcccaaactgctgg

SEQ ID NO: 196043 - DNA, 15 bp, Homo sapiens
cctcccaaactgctg

SEQ ID NO: 196044 - DNA, 15 bp, Homo sapiens
gcctcccaaactgct

SEQ ID NO: 196045 - DNA, 15 bp, Homo sapiens
ggcctcccaaactgc

SEQ ID NO: 196046 - DNA, 15 bp, Homo sapiens
tggcctcccaaactg

SEQ ID NO: 196047 - DNA, 15 bp, Homo sapiens
ttggcctcccaaact

SEQ ID NO: 196048 - DNA, 15 bp, Homo sapiens
gttggcctcccaaac

SEQ ID NO: 196049 - DNA, 15 bp, Homo sapiens
tgttggcctcccaaa

SEQ ID NO: 196050 - DNA, 15 bp, Homo sapiens
gtgttggcctcccaa

SEQ ID NO: 196051 - DNA, 15 bp, Homo sapiens
tgtgttggcctccca

SEQ ID NO: 196052 - DNA, 15 bp, Homo sapiens
ctgtgttggcctccc

SEQ ID NO: 196053 - DNA, 15 bp, Homo sapiens
cctgtgttggcctcc

SEQ ID NO: 196054 - DNA, 15 bp, Homo sapiens
tcctgtgttggcctc

SEQ ID NO: 196055 - DNA, 15 bp, Homo sapiens
ctcctgtgttggcct

SEQ ID NO: 196056 - DNA, 15 bp, Homo sapiens
cctcctgtgttggcc

SEQ ID NO: 196057 - DNA, 15 bp, Homo sapiens
tcctcctgtgttggc

SEQ ID NO: 196058 - DNA, 15 bp, Homo sapiens
gtcctcctgtgttgg

SEQ ID NO: 196059 - DNA, 15 bp, Homo sapiens
agtcctcctgtgttg

SEQ ID NO: 196060 - DNA, 15 bp, Homo sapiens
cagtcctcctgtgtt

SEQ ID NO: 196061 - DNA, 15 bp, Homo sapiens
gcagtcctcctgtgt

SEQ ID NO: 196062 - DNA, 15 bp, Homo sapiens
agcagtcctcctgtg

SEQ ID NO: 196063 - DNA, 15 bp, Homo sapiens
aagcagtcctcctgt

SEQ ID NO: 196064 - DNA, 15 bp, Homo sapiens
caagcagtcctcctg

SEQ ID NO: 196065 - DNA, 15 bp, Homo sapiens
tcaagcagtcctcct

SEQ ID NO: 196066 - DNA, 15 bp, Homo sapiens
ctcaagcagtcctcc

SEQ ID NO: 196067 - DNA, 15 bp, Homo sapiens
tctcaagcagtcctc

SEQ ID NO: 196068 - DNA, 15 bp, Homo sapiens
atctcaagcagtcct

SEQ ID NO: 196069 - DNA, 15 bp, Homo sapiens
gatctcaagcagtcc

SEQ ID NO: 196070 - DNA, 15 bp, Homo sapiens
tgatctcaagcagtc

SEQ ID NO: 196071 - DNA, 15 bp, Homo sapiens
ctgatctcaagcagt

SEQ ID NO: 196072 - DNA, 15 bp, Homo sapiens
cctgatctcaagcag

SEQ ID NO: 196073 - DNA, 15 bp, Homo sapiens
tcctgatctcaagca

SEQ ID NO: 196074 - DNA, 15 bp, Homo sapiens
ttcctgatctcaagc

SEQ ID NO: 196075 - DNA, 15 bp, Homo sapiens
attcctgatctcaag

SEQ ID NO: 196076 - DNA, 15 bp, Homo sapiens
aattcctgatctcaa

SEQ ID NO: 196077 - DNA, 15 bp, Homo sapiens
gaattcctgatctca

SEQ ID NO: 196078 - DNA, 15 bp, Homo sapiens
tgaattcctgatctc

SEQ ID NO: 196079 - DNA, 15 bp, Homo sapiens
ttgaattcctgatct

SEQ ID NO: 196080 - DNA, 15 bp, Homo sapiens
cttgaattcctgatc

SEQ ID NO: 196081 - DNA, 15 bp, Homo sapiens
tcttgaattcctgat

SEQ ID NO: 196082 - DNA, 15 bp, Homo sapiens
gtcttgaattcctga

SEQ ID NO: 196083 - DNA, 15 bp, Homo sapiens
ggtcttgaattcctg

SEQ ID NO: 196084 - DNA, 15 bp, Homo sapiens
tggtcttgaattcct

SEQ ID NO: 196085 - DNA, 15 bp, Homo sapiens
ctggtcttgaattcc

SEQ ID NO: 196086 - DNA, 15 bp, Homo sapiens
gctggtcttgaattc

SEQ ID NO: 196087 - DNA, 15 bp, Homo sapiens
ggctggtcttgaatt

SEQ ID NO: 196088 - DNA, 15 bp, Homo sapiens
aggctggtcttgaat

SEQ ID NO: 196089 - DNA, 15 bp, Homo sapiens
cccaggctggtcttg

SEQ ID NO: 196090 - DNA, 15 bp, Homo sapiens
gcccaggctggtctt

SEQ ID NO: 196091 - DNA, 15 bp, Homo sapiens
tgcccaggctggtct

SEQ ID NO: 196092 - DNA, 15 bp, Homo sapiens
ttgcccaggctggtc

SEQ ID NO: 196093 - DNA, 15 bp, Homo sapiens
attgcccaggctggt

SEQ ID NO: 196094 - DNA, 15 bp, Homo sapiens
tattgcccaggctgg

SEQ ID NO: 196095 - DNA, 15 bp, Homo sapiens
atattgcccaggctg

SEQ ID NO: 196096 - DNA, 15 bp, Homo sapiens
tatattgcccaggct

SEQ ID NO: 196097 - DNA, 15 bp, Homo sapiens
ctatattgcccaggc

SEQ ID NO: 196098 - DNA, 15 bp, Homo sapiens
actatattgcccagg

SEQ ID NO: 196099 - DNA, 15 bp, Homo sapiens
cactatattgcccag

SEQ ID NO: 196100 - DNA, 15 bp, Homo sapiens
tcactatattgccca

SEQ ID NO: 196101 - DNA, 15 bp, Homo sapiens
ctcactatattgccc

SEQ ID NO: 196102 - DNA, 15 bp, Homo sapiens
tctcactatattgcc

SEQ ID NO: 196103 - DNA, 15 bp, Homo sapiens
gtctcactatattgc

SEQ ID NO: 196104 - DNA, 15 bp, Homo sapiens
ggtctcactatattg

SEQ ID NO: 196105 - DNA, 15 bp, Homo sapiens
gggtctcactatatt

SEQ ID NO: 196106 - DNA, 15 bp, Homo sapiens
agggtctcactatat

SEQ ID NO: 196107 - DNA, 15 bp, Homo sapiens
cagggtctcactata

SEQ ID NO: 196108 - DNA, 15 bp, Homo sapiens
acagggtctcactat

SEQ ID NO: 196109 - DNA, 15 bp, Homo sapiens
gacagggtctcacta

SEQ ID NO: 196110 - DNA, 15 bp, Homo sapiens
agagacagggtctca

SEQ ID NO: 196111 - DNA, 15 bp, Homo sapiens
tagagacagggtctc

SEQ ID NO: 196112 - DNA, 15 bp, Homo sapiens
ctagagacagggtct

SEQ ID NO: 196113 - DNA, 15 bp, Homo sapiens
gctagagacagggtc

SEQ ID NO: 196114 - DNA, 15 bp, Homo sapiens
tgctagagacagggt

SEQ ID NO: 196115 - DNA, 15 bp, Homo sapiens
ttgctagagacaggg

SEQ ID NO: 196116 - DNA, 15 bp, Homo sapiens
tttgctagagacagg

SEQ ID NO: 196117 - DNA, 15 bp, Homo sapiens
ttttgctagagacag

SEQ ID NO: 196118 - DNA, 15 bp, Homo sapiens
tttttgctagagaca

SEQ ID NO: 196119 - DNA, 15 bp, Homo sapiens
ttttttgctagagac

SEQ ID NO: 196120 - DNA, 15 bp, Homo sapiens
tttttttgctagaga

SEQ ID NO: 196121 - DNA, 15 bp, Homo sapiens
ttttttttgctagag

SEQ ID NO: 196122 - DNA, 15 bp, Homo sapiens
tttttttttgctaga

SEQ ID NO: 196123 - DNA, 15 bp, Homo sapiens
ttttttttttgctag

SEQ ID NO: 196124 - DNA, 15 bp, Homo sapiens
tttttttttttgcta

SEQ ID NO: 196125 - DNA, 15 bp, Homo sapiens
ttttttttttttgct

SEQ ID NO: 196126 - DNA, 15 bp, Homo sapiens
tttttttttttttgc

SEQ ID NO: 196127 - DNA, 15 bp, Homo sapiens
ctttttttttttttt

SEQ ID NO: 196128 - DNA, 15 bp, Homo sapiens
acttttttttttttt

SEQ ID NO: 196129 - DNA, 15 bp, Homo sapiens
cactttttttttttt

SEQ ID NO: 196130 - DNA, 15 bp, Homo sapiens
gcacttttttttttt

SEQ ID NO: 196131 - DNA, 15 bp, Homo sapiens
ggcactttttttttt

SEQ ID NO: 196132 - DNA, 15 bp, Homo sapiens
tggcacttttttttt

SEQ ID NO: 196133 - DNA, 15 bp, Homo sapiens
ctggcactttttttt

SEQ ID NO: 196134 - DNA, 15 bp, Homo sapiens
actggcacttttttt

SEQ ID NO: 196135 - DNA, 15 bp, Homo sapiens
tactggcactttttt

SEQ ID NO: 196136 - DNA, 15 bp, Homo sapiens
ctactggcacttttt

SEQ ID NO: 196137 - DNA, 15 bp, Homo sapiens
actactggcactttt

SEQ ID NO: 196138 - DNA, 15 bp, Homo sapiens
gactactggcacttt

SEQ ID NO: 196139 - DNA, 15 bp, Homo sapiens
ggactactggcactt

SEQ ID NO: 196140 - DNA, 15 bp, Homo sapiens
gggactactggcact

SEQ ID NO: 196141 - DNA, 15 bp, Homo sapiens
tgggactactggcac

SEQ ID NO: 196142 - DNA, 15 bp, Homo sapiens
ctgggactactggca

SEQ ID NO: 196143 - DNA, 15 bp, Homo sapiens
actgggactactggc

SEQ ID NO: 196144 - DNA, 15 bp, Homo sapiens
aactgggactactgg

SEQ ID NO: 196145 - DNA, 15 bp, Homo sapiens
taactgggactactg

SEQ ID NO: 196146 - DNA, 15 bp, Homo sapiens
gtaactgggactact

SEQ ID NO: 196147 - DNA, 15 bp, Homo sapiens
agtaactgggactac

SEQ ID NO: 196148 - DNA, 15 bp, Homo sapiens
tagtaactgggacta

SEQ ID NO: 196149 - DNA, 15 bp, Homo sapiens
atagtaactgggact

SEQ ID NO: 196150 - DNA, 15 bp, Homo sapiens
aatagtaactgggac

SEQ ID NO: 196151 - DNA, 15 bp, Homo sapiens
caatagtaactggga

SEQ ID NO: 196152 - DNA, 15 bp, Homo sapiens
tcaatagtaactggg

SEQ ID NO: 196153 - DNA, 15 bp, Homo sapiens
ctcaatagtaactgg

SEQ ID NO: 196154 - DNA, 15 bp, Homo sapiens
tctcaatagtaactg

SEQ ID NO: 196155 - DNA, 15 bp, Homo sapiens
ctctcaatagtaact

SEQ ID NO: 196156 - DNA, 15 bp, Homo sapiens
cctctcaatagtaac

SEQ ID NO: 196157 - DNA, 15 bp, Homo sapiens
gcctctcaatagtaa

SEQ ID NO: 196158 - DNA, 15 bp, Homo sapiens
agcctctcaatagta

SEQ ID NO: 196159 - DNA, 15 bp, Homo sapiens
cagcctctcaatagt

SEQ ID NO: 196160 - DNA, 15 bp, Homo sapiens
tcagcctctcaatag

SEQ ID NO: 196161 - DNA, 15 bp, Homo sapiens
ttcagcctctcaata

SEQ ID NO: 196162 - DNA, 15 bp, Homo sapiens
cttcagcctctcaat

SEQ ID NO: 196163 - DNA, 15 bp, Homo sapiens
gcttcagcctctcaa

SEQ ID NO: 196164 - DNA, 15 bp, Homo sapiens
tgcttcagcctctca

SEQ ID NO: 196165 - DNA, 15 bp, Homo sapiens
ttgcttcagcctctc

SEQ ID NO: 196166 - DNA, 15 bp, Homo sapiens
cttgcttcagcctct

SEQ ID NO: 196167 - DNA, 15 bp, Homo sapiens
tcttgcttcagcctc

SEQ ID NO: 196168 - DNA, 15 bp, Homo sapiens
ctcttgcttcagcct

SEQ ID NO: 196169 - DNA, 15 bp, Homo sapiens
tctcttgcttcagcc

SEQ ID NO: 196170 - DNA, 15 bp, Homo sapiens
ctctcttgcttcagc

SEQ ID NO: 196171 - DNA, 15 bp, Homo sapiens
actctcttgcttcag

SEQ ID NO: 196172 - DNA, 15 bp, Homo sapiens
gactctcttgcttca

SEQ ID NO: 196173 - DNA, 15 bp, Homo sapiens
cgactctcttgcttc

SEQ ID NO: 196174 - DNA, 15 bp, Homo sapiens
gcgactctcttgctt

SEQ ID NO: 196175 - DNA, 15 bp, Homo sapiens
agcgactctcttgct

SEQ ID NO: 196176 - DNA, 15 bp, Homo sapiens
aagcgactctcttgc

SEQ ID NO: 196177 - DNA, 15 bp, Homo sapiens
caagcgactctcttg

SEQ ID NO: 196178 - DNA, 15 bp, Homo sapiens
tcaagcgactctctt

SEQ ID NO: 196179 - DNA, 15 bp, Homo sapiens
ttcaagcgactctct

SEQ ID NO: 196180 - DNA, 15 bp, Homo sapiens
attcaagcgactctc

SEQ ID NO: 196181 - DNA, 15 bp, Homo sapiens
gattcaagcgactct

SEQ ID NO: 196182 - DNA, 15 bp, Homo sapiens
agattcaagcgactc

SEQ ID NO: 196183 - DNA, 15 bp, Homo sapiens
cagattcaagcgact

SEQ ID NO: 196184 - DNA, 15 bp, Homo sapiens
ccagattcaagcgac

SEQ ID NO: 196185 - DNA, 15 bp, Homo sapiens
tccagattcaagcga

SEQ ID NO: 196186 - DNA, 15 bp, Homo sapiens
ctccagattcaagcg

SEQ ID NO: 196187 - DNA, 15 bp, Homo sapiens
cctccagattcaagc

SEQ ID NO: 196188 - DNA, 15 bp, Homo sapiens
ccctccagattcaag

SEQ ID NO: 196189 - DNA, 15 bp, Homo sapiens
accctccagattcaa

SEQ ID NO: 196190 - DNA, 15 bp, Homo sapiens
caccctccagattca

SEQ ID NO: 196191 - DNA, 15 bp, Homo sapiens
ccaccctccagattc

SEQ ID NO: 196192 - DNA, 15 bp, Homo sapiens
tccaccctccagatt

SEQ ID NO: 196193 - DNA, 15 bp, Homo sapiens
ctccaccctccagat

SEQ ID NO: 196194 - DNA, 15 bp, Homo sapiens
cctccaccctccaga

SEQ ID NO: 196195 - DNA, 15 bp, Homo sapiens
acctccaccctccag

SEQ ID NO: 196196 - DNA, 15 bp, Homo sapiens
cacctccaccctcca

SEQ ID NO: 196197 - DNA, 15 bp, Homo sapiens
ccacctccaccctcc

SEQ ID NO: 196198 - DNA, 15 bp, Homo sapiens
gccacctccaccctc

SEQ ID NO: 196199 - DNA, 15 bp, Homo sapiens
tgccacctccaccct

SEQ ID NO: 196200 - DNA, 15 bp, Homo sapiens
ctgccacctccaccc

SEQ ID NO: 196201 - DNA, 15 bp, Homo sapiens
actgccacctccacc

SEQ ID NO: 196202 - DNA, 15 bp, Homo sapiens
tactgccacctccac

SEQ ID NO: 196203 - DNA, 15 bp, Homo sapiens
ttactgccacctcca

SEQ ID NO: 196204 - DNA, 15 bp, Homo sapiens
cttactgccacctcc

SEQ ID NO: 196205 - DNA, 15 bp, Homo sapiens
ccttactgccacctc

SEQ ID NO: 196206 - DNA, 15 bp, Homo sapiens
accttactgccacct

SEQ ID NO: 196207 - DNA, 15 bp, Homo sapiens
taccttactgccacc

SEQ ID NO: 196208 - DNA, 15 bp, Homo sapiens
ataccttactgccac

SEQ ID NO: 196209 - DNA, 15 bp, Homo sapiens
cataccttactgcca

SEQ ID NO: 196210 - DNA, 15 bp, Homo sapiens
tcataccttactgcc

SEQ ID NO: 196211 - DNA, 15 bp, Homo sapiens
atcataccttactgc

SEQ ID NO: 196212 - DNA, 15 bp, Homo sapiens
aatcataccttactg

SEQ ID NO: 196213 - DNA, 15 bp, Homo sapiens
caatcataccttact

SEQ ID NO: 196214 - DNA, 15 bp, Homo sapiens
gcaatcataccttac

SEQ ID NO: 196215 - DNA, 15 bp, Homo sapiens
tgcaatcatacctta

SEQ ID NO: 196216 - DNA, 15 bp, Homo sapiens
gtgcaatcatacctt

SEQ ID NO: 196217 - DNA, 15 bp, Homo sapiens
ggtgcaatcatacct

SEQ ID NO: 196218 - DNA, 15 bp, Homo sapiens
tggtgcaatcatacc

SEQ ID NO: 196219 - DNA, 15 bp, Homo sapiens
gtggtgcaatcatac

SEQ ID NO: 196220 - DNA, 15 bp, Homo sapiens
agtggtgcaatcata

SEQ ID NO: 196221 - DNA, 15 bp, Homo sapiens
cagtggtgcaatcat

SEQ ID NO: 196222 - DNA, 15 bp, Homo sapiens
gcagtggtgcaatca

SEQ ID NO: 196223 - DNA, 15 bp, Homo sapiens
atgcagtggtgcaat

SEQ ID NO: 196224 - DNA, 15 bp, Homo sapiens
aatgcagtggtgcaa

SEQ ID NO: 196225 - DNA, 15 bp, Homo sapiens
gaatgcagtggtgca

SEQ ID NO: 196226 - DNA, 15 bp, Homo sapiens
ggaatgcagtggtgc

SEQ ID NO: 196227 - DNA, 15 bp, Homo sapiens
tggaatgcagtggtg

SEQ ID NO: 196228 - DNA, 15 bp, Homo sapiens
ctggaatgcagtggt

SEQ ID NO: 196229 - DNA, 15 bp, Homo sapiens
gctggaatgcagtgg

SEQ ID NO: 196230 - DNA, 15 bp, Homo sapiens
ggctggaatgcagtg

SEQ ID NO: 196231 - DNA, 15 bp, Homo sapiens
aggctggaatgcagt

SEQ ID NO: 196232 - DNA, 15 bp, Homo sapiens
taggctggaatgcag

SEQ ID NO: 196233 - DNA, 15 bp, Homo sapiens
ttaggctggaatgca

SEQ ID NO: 196234 - DNA, 15 bp, Homo sapiens
tttaggctggaatgc

SEQ ID NO: 196235 - DNA, 15 bp, Homo sapiens
atttaggctggaatg

SEQ ID NO: 196236 - DNA, 15 bp, Homo sapiens
catttaggctggaat

SEQ ID NO: 196237 - DNA, 15 bp, Homo sapiens
tcatttaggctggaa

SEQ ID NO: 196238 - DNA, 15 bp, Homo sapiens
gtcatttaggctgga

SEQ ID NO: 196239 - DNA, 15 bp, Homo sapiens
tgtcatttaggctgg

SEQ ID NO: 196240 - DNA, 15 bp, Homo sapiens
ttgtcatttaggctg

SEQ ID NO: 196241 - DNA, 15 bp, Homo sapiens
tttgtcatttaggct

SEQ ID NO: 196242 - DNA, 15 bp, Homo sapiens
ctttgtcatttaggc

SEQ ID NO: 196243 - DNA, 15 bp, Homo sapiens
gctttgtcatttagg

SEQ ID NO: 196244 - DNA, 15 bp, Homo sapiens
tgctttgtcatttag

SEQ ID NO: 196245 - DNA, 15 bp, Homo sapiens
ttgctttgtcattta

SEQ ID NO: 196246 - DNA, 15 bp, Homo sapiens
attgctttgtcattt

SEQ ID NO: 196247 - DNA, 15 bp, Homo sapiens
tattgctttgtcatt

SEQ ID NO: 196248 - DNA, 15 bp, Homo sapiens
gtattgctttgtcat

SEQ ID NO: 196249 - DNA, 15 bp, Homo sapiens
agtattgctttgtca

SEQ ID NO: 196250 - DNA, 15 bp, Homo sapiens
tagtattgctttgtc

SEQ ID NO: 196251 - DNA, 15 bp, Homo sapiens
atagtattgctttgt

SEQ ID NO: 196252 - DNA, 15 bp, Homo sapiens
catagtattgctttg

SEQ ID NO: 196253 - DNA, 15 bp, Homo sapiens
acatagtattgcttt

SEQ ID NO: 196254 - DNA, 15 bp, Homo sapiens
gacatagtattgctt

SEQ ID NO: 196255 - DNA, 15 bp, Homo sapiens
agacatagtattgct

SEQ ID NO: 196256 - DNA, 15 bp, Homo sapiens
gagacatagtattgc

SEQ ID NO: 196257 - DNA, 15 bp, Homo sapiens
tgagacatagtattg

SEQ ID NO: 196258 - DNA, 15 bp, Homo sapiens
ttgagacatagtatt

SEQ ID NO: 196259 - DNA, 15 bp, Homo sapiens
tttgagacatagtat

SEQ ID NO: 196260 - DNA, 15 bp, Homo sapiens
gtttgagacatagta

SEQ ID NO: 196261 - DNA, 15 bp, Homo sapiens
tgtttgagacatagt

SEQ ID NO: 196262 - DNA, 15 bp, Homo sapiens
atgtttgagacatag

SEQ ID NO: 196263 - DNA, 15 bp, Homo sapiens
tatgtttgagacata

SEQ ID NO: 196264 - DNA, 15 bp, Homo sapiens
ttatgtttgagacat

SEQ ID NO: 196265 - DNA, 15 bp, Homo sapiens
tttatgtttgagaca

SEQ ID NO: 196266 - DNA, 15 bp, Homo sapiens
atttatgtttgagac

SEQ ID NO: 196267 - DNA, 15 bp, Homo sapiens
tatttatgtttgaga

SEQ ID NO: 196268 - DNA, 15 bp, Homo sapiens
ttatttatgtttgag

SEQ ID NO: 196269 - DNA, 15 bp, Homo sapiens
tttatttatgtttga

SEQ ID NO: 196270 - DNA, 15 bp, Homo sapiens
atttatttatgtttg

SEQ ID NO: 196271 - DNA, 15 bp, Homo sapiens
tatttatttatgttt

SEQ ID NO: 196272 - DNA, 15 bp, Homo sapiens
ttatttatttatgtt

SEQ ID NO: 196273 - DNA, 15 bp, Homo sapiens
tttatttatttatgt

SEQ ID NO: 196274 - DNA, 15 bp, Homo sapiens
atttatttatttatg

SEQ ID NO: 196275 - DNA, 15 bp, Homo sapiens
tatttatttatttat

SEQ ID NO: 196276 - DNA, 15 bp, Homo sapiens
ttatttatttattta

SEQ ID NO: 196277 - DNA, 15 bp, Homo sapiens
tttatttatttattt

SEQ ID NO: 196278 - DNA, 15 bp, Homo sapiens
atttatttatttatt

SEQ ID NO: 196279 - DNA, 15 bp, Homo sapiens
gtttatttatttatt

SEQ ID NO: 196280 - DNA, 15 bp, Homo sapiens
cgtttatttatttat

SEQ ID NO: 196281 - DNA, 15 bp, Homo sapiens
ccgtttatttattta

SEQ ID NO: 196282 - DNA, 15 bp, Homo sapiens
gccgtttatttattt

SEQ ID NO: 196283 - DNA, 15 bp, Homo sapiens
tgccgtttatttatt

SEQ ID NO: 196284 - DNA, 15 bp, Homo sapiens
ttgccgtttatttat

SEQ ID NO: 196285 - DNA, 15 bp, Homo sapiens
tttgccgtttattta

SEQ ID NO: 196286 - DNA, 15 bp, Homo sapiens
atttgccgtttattt

SEQ ID NO: 196287 - DNA, 15 bp, Homo sapiens
gatttgccgtttatt

SEQ ID NO: 196288 - DNA, 15 bp, Homo sapiens
agatttgccgtttat

SEQ ID NO: 196289 - DNA, 15 bp, Homo sapiens
cagatttgccgttta

SEQ ID NO: 196290 - DNA, 15 bp, Homo sapiens
ccagatttgccgttt

SEQ ID NO: 196291 - DNA, 15 bp, Homo sapiens
cccagatttgccgtt

SEQ ID NO: 196292 - DNA, 15 bp, Homo sapiens
gcccagatttgccgt

SEQ ID NO: 196293 - DNA, 15 bp, Homo sapiens
tgcccagatttgccg

SEQ ID NO: 196294 - DNA, 15 bp, Homo sapiens
ctgcccagatttgcc

SEQ ID NO: 196295 - DNA, 15 bp, Homo sapiens
cctgcccagatttgc

SEQ ID NO: 196296 - DNA, 15 bp, Homo sapiens
ccctgcccagatttg

SEQ ID NO: 196297 - DNA, 15 bp, Homo sapiens
cccctgcccagattt

SEQ ID NO: 196298 - DNA, 15 bp, Homo sapiens
acccctgcccagatt

SEQ ID NO: 196299 - DNA, 15 bp, Homo sapiens
cacccctgcccagat

SEQ ID NO: 196300 - DNA, 15 bp, Homo sapiens
tcacccctgcccaga

SEQ ID NO: 196301 - DNA, 15 bp, Homo sapiens
ttcacccctgcccag

SEQ ID NO: 196302 - DNA, 15 bp, Homo sapiens
attcacccctgccca

SEQ ID NO: 196303 - DNA, 15 bp, Homo sapiens
tattcacccctgccc

SEQ ID NO: 196304 - DNA, 15 bp, Homo sapiens
gtattcacccctgcc

SEQ ID NO: 196305 - DNA, 15 bp, Homo sapiens
tgtattcacccctgc

SEQ ID NO: 196306 - DNA, 15 bp, Homo sapiens
ctgtattcacccctg

SEQ ID NO: 196307 - DNA, 15 bp, Homo sapiens
cctgtattcacccct

SEQ ID NO: 196308 - DNA, 15 bp, Homo sapiens
ccctgtattcacccc

SEQ ID NO: 196309 - DNA, 15 bp, Homo sapiens
cccctgtattcaccc

SEQ ID NO: 196310 - DNA, 15 bp, Homo sapiens
ccccctgtattcacc

SEQ ID NO: 196311 - DNA, 15 bp, Homo sapiens
tccccctgtattcac

SEQ ID NO: 196312 - DNA, 15 bp, Homo sapiens
ttccccctgtattca

SEQ ID NO: 196313 - DNA, 15 bp, Homo sapiens
cttccccctgtattc

SEQ ID NO: 196314 - DNA, 15 bp, Homo sapiens
ccttccccctgtatt

SEQ ID NO: 196315 - DNA, 15 bp, Homo sapiens
cccttccccctgtat

SEQ ID NO: 196316 - DNA, 15 bp, Homo sapiens
tcccttccccctgta

SEQ ID NO: 196317 - DNA, 15 bp, Homo sapiens
ttcccttccccctgt

SEQ ID NO: 196318 - DNA, 15 bp, Homo sapiens
attcccttccccctg

SEQ ID NO: 196319 - DNA, 15 bp, Homo sapiens
cattcccttccccct

SEQ ID NO: 196320 - DNA, 15 bp, Homo sapiens
acattcccttccccc

SEQ ID NO: 196321 - DNA, 15 bp, Homo sapiens
cacattcccttcccc

SEQ ID NO: 196322 - DNA, 15 bp, Homo sapiens
tcacattcccttccc

SEQ ID NO: 196323 - DNA, 15 bp, Homo sapiens
ttcacattcccttcc

SEQ ID NO: 196324 - DNA, 15 bp, Homo sapiens
cttcacattcccttc

SEQ ID NO: 196325 - DNA, 15 bp, Homo sapiens
tcttcacattccctt

SEQ ID NO: 196326 - DNA, 15 bp, Homo sapiens
atcttcacattccct

SEQ ID NO: 196327 - DNA, 15 bp, Homo sapiens
catcttcacattccc

SEQ ID NO: 196328 - DNA, 15 bp, Homo sapiens
tcatcttcacattcc

SEQ ID NO: 196329 - DNA, 15 bp, Homo sapiens
ttcatcttcacattc

SEQ ID NO: 196330 - DNA, 15 bp, Homo sapiens
cttcatcttcacatt

SEQ ID NO: 196331 - DNA, 15 bp, Homo sapiens
tcttcatcttcacat

SEQ ID NO: 196332 - DNA, 15 bp, Homo sapiens
atcttcatcttcaca

SEQ ID NO: 196333 - DNA, 15 bp, Homo sapiens
catcttcatcttcac

SEQ ID NO: 196334 - DNA, 15 bp, Homo sapiens
gcatcttcatcttca

SEQ ID NO: 196335 - DNA, 15 bp, Homo sapiens
ggcatcttcatcttc

SEQ ID NO: 196336 - DNA, 15 bp, Homo sapiens
tggcatcttcatctt

SEQ ID NO: 196337 - DNA, 15 bp, Homo sapiens
atggcatcttcatct

SEQ ID NO: 196338 - DNA, 15 bp, Homo sapiens
tatggcatcttcatc

SEQ ID NO: 196339 - DNA, 15 bp, Homo sapiens
gtatggcatcttcat

SEQ ID NO: 196340 - DNA, 15 bp, Homo sapiens
tgtatggcatcttca

SEQ ID NO: 196341 - DNA, 15 bp, Homo sapiens
ctgtatggcatcttc

SEQ ID NO: 196342 - DNA, 15 bp, Homo sapiens
tctgtatggcatctt

SEQ ID NO: 196343 - DNA, 15 bp, Homo sapiens
ctctgtatggcatct

SEQ ID NO: 196344 - DNA, 15 bp, Homo sapiens
tctctgtatggcatc

SEQ ID NO: 196345 - DNA, 15 bp, Homo sapiens
ttctctgtatggcat

SEQ ID NO: 196346 - DNA, 15 bp, Homo sapiens
tttctctgtatggca

SEQ ID NO: 196347 - DNA, 15 bp, Homo sapiens
ctttctctgtatggc

SEQ ID NO: 196348 - DNA, 15 bp, Homo sapiens
cctttctctgtatgg

SEQ ID NO: 196349 - DNA, 15 bp, Homo sapiens
gcctttctctgtatg

SEQ ID NO: 196350 - DNA, 15 bp, Homo sapiens
ggcctttctctgtat

SEQ ID NO: 196351 - DNA, 15 bp, Homo sapiens
gggcctttctctgta

SEQ ID NO: 196352 - DNA, 15 bp, Homo sapiens
cgggcctttctctgt

SEQ ID NO: 196353 - DNA, 15 bp, Homo sapiens
ccgggcctttctctg

SEQ ID NO: 196354 - DNA, 15 bp, Homo sapiens
tccgggcctttctct

SEQ ID NO: 196355 - DNA, 15 bp, Homo sapiens
ttccgggcctttctc

SEQ ID NO: 196356 - DNA, 15 bp, Homo sapiens
gttccgggcctttct

SEQ ID NO: 196357 - DNA, 15 bp, Homo sapiens
tgttccgggcctttc

SEQ ID NO: 196358 - DNA, 15 bp, Homo sapiens
ctgttccgggccttt

SEQ ID NO: 196359 - DNA, 15 bp, Homo sapiens
tctgttccgggcctt

SEQ ID NO: 196360 - DNA, 15 bp, Homo sapiens
atctgttccgggcct

SEQ ID NO: 196361 - DNA, 15 bp, Homo sapiens
gatctgttccgggcc

SEQ ID NO: 196362 - DNA, 15 bp, Homo sapiens
ggatctgttccgggc

SEQ ID NO: 196363 - DNA, 15 bp, Homo sapiens
aggatctgttccggg

SEQ ID NO: 196364 - DNA, 15 bp, Homo sapiens
gaggatctgttccgg

SEQ ID NO: 196365 - DNA, 15 bp, Homo sapiens
tgaggatctgttccg

SEQ ID NO: 196366 - DNA, 15 bp, Homo sapiens
gtgaggatctgttcc

SEQ ID NO: 196367 - DNA, 15 bp, Homo sapiens
tgtgaggatctgttc

SEQ ID NO: 196368 - DNA, 15 bp, Homo sapiens
gtgtgaggatctgtt

SEQ ID NO: 196369 - DNA, 15 bp, Homo sapiens
ggtgtgaggatctgt

SEQ ID NO: 196370 - DNA, 15 bp, Homo sapiens
gggtgtgaggatctg

SEQ ID NO: 196371 - DNA, 15 bp, Homo sapiens
ggggtgtgaggatct

SEQ ID NO: 196372 - DNA, 15 bp, Homo sapiens
aggggtgtgaggatc

SEQ ID NO: 196373 - DNA, 15 bp, Homo sapiens
gaggggtgtgaggat

SEQ ID NO: 196374 - DNA, 15 bp, Homo sapiens
tgaggggtgtgagga

SEQ ID NO: 196375 - DNA, 15 bp, Homo sapiens
ctgaggggtgtgagg

SEQ ID NO: 196376 - DNA, 15 bp, Homo sapiens
tctgaggggtgtgag

SEQ ID NO: 196377 - DNA, 15 bp, Homo sapiens
ttctgaggggtgtga

SEQ ID NO: 196378 - DNA, 15 bp, Homo sapiens
cttctgaggggtgtg

SEQ ID NO: 196379 - DNA, 15 bp, Homo sapiens
ccttctgaggggtgt

SEQ ID NO: 196380 - DNA, 15 bp, Homo sapiens
tccttctgaggggtg

SEQ ID NO: 196381 - DNA, 15 bp, Homo sapiens
ttccttctgaggggt

SEQ ID NO: 196382 - DNA, 15 bp, Homo sapiens
gttccttctgagggg

SEQ ID NO: 196383 - DNA, 15 bp, Homo sapiens
ggttccttctgaggg

SEQ ID NO: 196384 - DNA, 15 bp, Homo sapiens
tggttccttctgagg

SEQ ID NO: 196385 - DNA, 15 bp, Homo sapiens
ttggttccttctgag

SEQ ID NO: 196386 - DNA, 15 bp, Homo sapiens
gttggttccttctga

SEQ ID NO: 196387 - DNA, 15 bp, Homo sapiens
tgttggttccttctg

SEQ ID NO: 196388 - DNA, 15 bp, Homo sapiens
gtgttggttccttct

SEQ ID NO: 196389 - DNA, 15 bp, Homo sapiens
agtgttggttccttc

SEQ ID NO: 196390 - DNA, 15 bp, Homo sapiens
cagtgttggttcctt

SEQ ID NO: 196391 - DNA, 15 bp, Homo sapiens
gcagtgttggttcct

SEQ ID NO: 196392 - DNA, 15 bp, Homo sapiens
ggcagtgttggttcc

SEQ ID NO: 196393 - DNA, 15 bp, Homo sapiens
tggcagtgttggttc

SEQ ID NO: 196394 - DNA, 15 bp, Homo sapiens
ctggcagtgttggtt

SEQ ID NO: 196395 - DNA, 15 bp, Homo sapiens
gctggcagtgttggt

SEQ ID NO: 196396 - DNA, 15 bp, Homo sapiens
tgctggcagtgttgg

SEQ ID NO: 196397 - DNA, 15 bp, Homo sapiens
gtgctggcagtgttg

SEQ ID NO: 196398 - DNA, 15 bp, Homo sapiens
agtgctggcagtgtt

SEQ ID NO: 196399 - DNA, 15 bp, Homo sapiens
aagtgctggcagtgt

SEQ ID NO: 196400 - DNA, 15 bp, Homo sapiens
caagtgctggcagtg

SEQ ID NO: 196401 - DNA, 15 bp, Homo sapiens
tcaagtgctggcagt

SEQ ID NO: 196402 - DNA, 15 bp, Homo sapiens
atcaagtgctggcag

SEQ ID NO: 196403 - DNA, 15 bp, Homo sapiens
gatcaagtgctggca

SEQ ID NO: 196404 - DNA, 15 bp, Homo sapiens
agatcaagtgctggc

SEQ ID NO: 196405 - DNA, 15 bp, Homo sapiens
aagatcaagtgctgg

SEQ ID NO: 196406 - DNA, 15 bp, Homo sapiens
caagatcaagtgctg

SEQ ID NO: 196407 - DNA, 15 bp, Homo sapiens
acaagatcaagtgct

SEQ ID NO: 196408 - DNA, 15 bp, Homo sapiens
aacaagatcaagtgc

SEQ ID NO: 196409 - DNA, 15 bp, Homo sapiens
caacaagatcaagtg

SEQ ID NO: 196410 - DNA, 15 bp, Homo sapiens
tcaacaagatcaagt

SEQ ID NO: 196411 - DNA, 15 bp, Homo sapiens
atcaacaagatcaag

SEQ ID NO: 196412 - DNA, 15 bp, Homo sapiens
gatcaacaagatcaa

SEQ ID NO: 196413 - DNA, 15 bp, Homo sapiens
agatcaacaagatca

SEQ ID NO: 196414 - DNA, 15 bp, Homo sapiens
aagatcaacaagatc

SEQ ID NO: 196415 - DNA, 15 bp, Homo sapiens
caagatcaacaagat

SEQ ID NO: 196416 - DNA, 15 bp, Homo sapiens
ccaagatcaacaaga

SEQ ID NO: 196417 - DNA, 15 bp, Homo sapiens
tccaagatcaacaag

SEQ ID NO: 196418 - DNA, 15 bp, Homo sapiens
ttccaagatcaacaa

SEQ ID NO: 196419 - DNA, 15 bp, Homo sapiens
attccaagatcaaca

SEQ ID NO: 196420 - DNA, 15 bp, Homo sapiens
aattccaagatcaac

SEQ ID NO: 196421 - DNA, 15 bp, Homo sapiens
gaattccaagatcaa

SEQ ID NO: 196422 - DNA, 15 bp, Homo sapiens
tgaattccaagatca

SEQ ID NO: 196423 - DNA, 15 bp, Homo sapiens
ttgaattccaagatc

SEQ ID NO: 196424 - DNA, 15 bp, Homo sapiens
cttgaattccaagat

SEQ ID NO: 196425 - DNA, 15 bp, Homo sapiens
gcttgaattccaaga

SEQ ID NO: 196426 - DNA, 15 bp, Homo sapiens
agcttgaattccaag

SEQ ID NO: 196427 - DNA, 15 bp, Homo sapiens
gagcttgaattccaa

SEQ ID NO: 196428 - DNA, 15 bp, Homo sapiens
tgagcttgaattcca

SEQ ID NO: 196429 - DNA, 15 bp, Homo sapiens
ttgagcttgaattcc

SEQ ID NO: 196430 - DNA, 15 bp, Homo sapiens
attgagcttgaattc

SEQ ID NO: 196431 - DNA, 15 bp, Homo sapiens
aattgagcttgaatt

SEQ ID NO: 196432 - DNA, 15 bp, Homo sapiens
gaattgagcttgaat

SEQ ID NO: 196433 - DNA, 15 bp, Homo sapiens
agaattgagcttgaa

SEQ ID NO: 196434 - DNA, 15 bp, Homo sapiens
cagaattgagcttga

SEQ ID NO: 196435 - DNA, 15 bp, Homo sapiens
ccagaattgagcttg

SEQ ID NO: 196436 - DNA, 15 bp, Homo sapiens
gccagaattgagctt

SEQ ID NO: 196437 - DNA, 15 bp, Homo sapiens
tgccagaattgagct

SEQ ID NO: 196438 - DNA, 15 bp, Homo sapiens
ctgccagaattgagc

SEQ ID NO: 196439 - DNA, 15 bp, Homo sapiens
cctgccagaattgag

SEQ ID NO: 196440 - DNA, 15 bp, Homo sapiens
ccctgccagaattga

SEQ ID NO: 196441 - DNA, 15 bp, Homo sapiens
accctgccagaattg

SEQ ID NO: 196442 - DNA, 15 bp, Homo sapiens
aaccctgccagaatt

SEQ ID NO: 196443 - DNA, 15 bp, Homo sapiens
aaaccctgccagaat

SEQ ID NO: 196444 - DNA, 15 bp, Homo sapiens
aaaaccctgccagaa

SEQ ID NO: 196445 - DNA, 15 bp, Homo sapiens
aaaaaccctgccaga

SEQ ID NO: 196446 - DNA, 15 bp, Homo sapiens
aaaaaaccctgccag

SEQ ID NO: 196447 - DNA, 15 bp, Homo sapiens
caaaaaaccctgcca

SEQ ID NO: 196448 - DNA, 15 bp, Homo sapiens
acaaaaaaccctgcc

SEQ ID NO: 196449 - DNA, 15 bp, Homo sapiens
aacaaaaaaccctgc

SEQ ID NO: 196450 - DNA, 15 bp, Homo sapiens
aaacaaaaaaccctg

SEQ ID NO: 196451 - DNA, 15 bp, Homo sapiens
caaacaaaaaaccct

SEQ ID NO: 196452 - DNA, 15 bp, Homo sapiens
acaaacaaaaaaccc

SEQ ID NO: 196453 - DNA, 15 bp, Homo sapiens
aaacaaacaaacaaa

SEQ ID NO: 196454 - DNA, 15 bp, Homo sapiens
caaacaaacaaacaa

SEQ ID NO: 196455 - DNA, 15 bp, Homo sapiens
acaaacaaacaaaca

SEQ ID NO: 196456 - DNA, 15 bp, Homo sapiens
aacaaacaaacaaac

SEQ ID NO: 196457 - DNA, 15 bp, Homo sapiens
tcaaacaaacaaaca

SEQ ID NO: 196458 - DNA, 15 bp, Homo sapiens
ctcaaacaaacaaac

SEQ ID NO: 196459 - DNA, 15 bp, Homo sapiens
actcaaacaaacaaa

SEQ ID NO: 196460 - DNA, 15 bp, Homo sapiens
gactcaaacaaacaa

SEQ ID NO: 196461 - DNA, 15 bp, Homo sapiens
cgactcaaacaaaca

SEQ ID NO: 196462 - DNA, 15 bp, Homo sapiens
ccgactcaaacaaac

SEQ ID NO: 196463 - DNA, 15 bp, Homo sapiens
tccgactcaaacaaa

SEQ ID NO: 196464 - DNA, 15 bp, Homo sapiens
ctccgactcaaacaa

SEQ ID NO: 196465 - DNA, 15 bp, Homo sapiens
actccgactcaaaca

SEQ ID NO: 196466 - DNA, 15 bp, Homo sapiens
gactccgactcaaac

SEQ ID NO: 196467 - DNA, 15 bp, Homo sapiens
agactccgactcaaa

SEQ ID NO: 196468 - DNA, 15 bp, Homo sapiens
aagactccgactcaa

SEQ ID NO: 196469 - DNA, 15 bp, Homo sapiens
caagactccgactca

SEQ ID NO: 196470 - DNA, 15 bp, Homo sapiens
gcaagactccgactc

SEQ ID NO: 196471 - DNA, 15 bp, Homo sapiens
agcaagactccgact

SEQ ID NO: 196472 - DNA, 15 bp, Homo sapiens
gagcaagactccgac

SEQ ID NO: 196473 - DNA, 15 bp, Homo sapiens
agagcaagactccga

SEQ ID NO: 196474 - DNA, 15 bp, Homo sapiens
cagagcaagactccg

SEQ ID NO: 196475 - DNA, 15 bp, Homo sapiens
acagagcaagactcc

SEQ ID NO: 196476 - DNA, 15 bp, Homo sapiens
aacagagcaagactc

SEQ ID NO: 196477 - DNA, 15 bp, Homo sapiens
caacagagcaagact

SEQ ID NO: 196478 - DNA, 15 bp, Homo sapiens
gcaacagagcaagac

SEQ ID NO: 196479 - DNA, 15 bp, Homo sapiens
ggcaacagagcaaga

SEQ ID NO: 196480 - DNA, 15 bp, Homo sapiens
gggcaacagagcaag

SEQ ID NO: 196481 - DNA, 15 bp, Homo sapiens
tgggcaacagagcaa

SEQ ID NO: 196482 - DNA, 15 bp, Homo sapiens
ctgggcaacagagca

SEQ ID NO: 196483 - DNA, 15 bp, Homo sapiens
gctgggcaacagagc

SEQ ID NO: 196484 - DNA, 15 bp, Homo sapiens
ggctgggcaacagag

SEQ ID NO: 196485 - DNA, 15 bp, Homo sapiens
aggctgggcaacaga

SEQ ID NO: 196486 - DNA, 15 bp, Homo sapiens
caggctgggcaacag

SEQ ID NO: 196487 - DNA, 15 bp, Homo sapiens
ccaggctgggcaaca

SEQ ID NO: 196488 - DNA, 15 bp, Homo sapiens
tccaggctgggcaac

SEQ ID NO: 196489 - DNA, 15 bp, Homo sapiens
ctccaggctgggcaa

SEQ ID NO: 196490 - DNA, 15 bp, Homo sapiens
actccaggctgggca

SEQ ID NO: 196491 - DNA, 15 bp, Homo sapiens
cactccaggctgggc

SEQ ID NO: 196492 - DNA, 15 bp, Homo sapiens
gcactccaggctggg

SEQ ID NO: 196493 - DNA, 15 bp, Homo sapiens
tgcactccaggctgg

SEQ ID NO: 196494 - DNA, 15 bp, Homo sapiens
ctgcactccaggctg

SEQ ID NO: 196495 - DNA, 15 bp, Homo sapiens
actgcactccaggct

SEQ ID NO: 196496 - DNA, 15 bp, Homo sapiens
cactgcactccaggc

SEQ ID NO: 196497 - DNA, 15 bp, Homo sapiens
ccactgcactccagg

SEQ ID NO: 196498 - DNA, 15 bp, Homo sapiens
tgcgccactgcactc

SEQ ID NO: 196499 - DNA, 15 bp, Homo sapiens
ttgcgccactgcact

SEQ ID NO: 196500 - DNA, 15 bp, Homo sapiens
attgcgccactgcac

SEQ ID NO: 196501 - DNA, 15 bp, Homo sapiens
gattgcgccactgca

SEQ ID NO: 196502 - DNA, 15 bp, Homo sapiens
agattgcgccactgc

SEQ ID NO: 196503 - DNA, 15 bp, Homo sapiens
ggagattgcgccact

SEQ ID NO: 196504 - DNA, 15 bp, Homo sapiens
cggagattgcgccac

SEQ ID NO: 196505 - DNA, 15 bp, Homo sapiens
gcggagattgcgcca

SEQ ID NO: 196506 - DNA, 15 bp, Homo sapiens
agcggagattgcgcc

SEQ ID NO: 196507 - DNA, 15 bp, Homo sapiens
gagcggagattgcgc

SEQ ID NO: 196508 - DNA, 15 bp, Homo sapiens
tgagcggagattgcg

SEQ ID NO: 196509 - DNA, 15 bp, Homo sapiens
gtgagcggagattgc

SEQ ID NO: 196510 - DNA, 15 bp, Homo sapiens
agtgagcggagattg

SEQ ID NO: 196511 - DNA, 15 bp, Homo sapiens
cagtgagcggagatt

SEQ ID NO: 196512 - DNA, 15 bp, Homo sapiens
gcagtgagcggagat

SEQ ID NO: 196513 - DNA, 15 bp, Homo sapiens
ggcagtgagcggaga

SEQ ID NO: 196514 - DNA, 15 bp, Homo sapiens
tggcagtgagcggag

SEQ ID NO: 196515 - DNA, 15 bp, Homo sapiens
ctggcagtgagcgga

SEQ ID NO: 196516 - DNA, 15 bp, Homo sapiens
gctggcagtgagcgg

SEQ ID NO: 196517 - DNA, 15 bp, Homo sapiens
ggctggcagtgagcg

SEQ ID NO: 196518 - DNA, 15 bp, Homo sapiens
gggctggcagtgagc

SEQ ID NO: 196519 - DNA, 15 bp, Homo sapiens
ggggctggcagtgag

SEQ ID NO: 196520 - DNA, 15 bp, Homo sapiens
cggggctggcagtga

SEQ ID NO: 196521 - DNA, 15 bp, Homo sapiens
gcggggctggcagtg

SEQ ID NO: 196522 - DNA, 15 bp, Homo sapiens
ggcggggctggcagt

SEQ ID NO: 196523 - DNA, 15 bp, Homo sapiens
aggcggggctggcag

SEQ ID NO: 196524 - DNA, 15 bp, Homo sapiens
gaggcggggctggca

SEQ ID NO: 196525 - DNA, 15 bp, Homo sapiens
ggaggcggggctggc

SEQ ID NO: 196526 - DNA, 15 bp, Homo sapiens
gggaggcggggctgg

SEQ ID NO: 196527 - DNA, 15 bp, Homo sapiens
cgggaggcggggctg

SEQ ID NO: 196528 - DNA, 15 bp, Homo sapiens
ccgggaggcggggct

SEQ ID NO: 196529 - DNA, 15 bp, Homo sapiens
cccgggaggcggggc

SEQ ID NO: 196530 - DNA, 15 bp, Homo sapiens
acccgggaggcgggg

SEQ ID NO: 196531 - DNA, 15 bp, Homo sapiens
aacccgggaggcggg

SEQ ID NO: 196532 - DNA, 15 bp, Homo sapiens
gtgaacccgggaggc

SEQ ID NO: 196533 - DNA, 15 bp, Homo sapiens
cgtgaacccgggagg

SEQ ID NO: 196534 - DNA, 15 bp, Homo sapiens
gcgtgaacccgggag

SEQ ID NO: 196535 - DNA, 15 bp, Homo sapiens
ggcgtgaacccggga

SEQ ID NO: 196536 - DNA, 15 bp, Homo sapiens
tggcgtgaacccggg

SEQ ID NO: 196537 - DNA, 15 bp, Homo sapiens
atggcgtgaacccgg

SEQ ID NO: 196538 - DNA, 15 bp, Homo sapiens
aatggcgtgaacccg

SEQ ID NO: 196539 - DNA, 15 bp, Homo sapiens
gaatggcgtgaaccc

SEQ ID NO: 196540 - DNA, 15 bp, Homo sapiens
agaatggcgtgaacc

SEQ ID NO: 196541 - DNA, 15 bp, Homo sapiens
gagaatggcgtgaac

SEQ ID NO: 196542 - DNA, 15 bp, Homo sapiens
ggagaatggcgtgaa

SEQ ID NO: 196543 - DNA, 15 bp, Homo sapiens
aggagaatggcgtga

SEQ ID NO: 196544 - DNA, 15 bp, Homo sapiens
caggagaatggcgtg

SEQ ID NO: 196545 - DNA, 15 bp, Homo sapiens
gcaggagaatggcgt

SEQ ID NO: 196546 - DNA, 15 bp, Homo sapiens
ggcaggagaatggcg

SEQ ID NO: 196547 - DNA, 15 bp, Homo sapiens
aggcaggagaatggc

SEQ ID NO: 196548 - DNA, 15 bp, Homo sapiens
gaggcaggagaatgg

SEQ ID NO: 196549 - DNA, 15 bp, Homo sapiens
tgaggcaggagaatg

SEQ ID NO: 196550 - DNA, 15 bp, Homo sapiens
ggctgaggcaggaga

SEQ ID NO: 196551 - DNA, 15 bp, Homo sapiens
aggctgaggcaggag

SEQ ID NO: 196552 - DNA, 15 bp, Homo sapiens
gaggctgaggcagga

SEQ ID NO: 196553 - DNA, 15 bp, Homo sapiens
ctcaggaggctgagg

SEQ ID NO: 196554 - DNA, 15 bp, Homo sapiens
actcaggaggctgag

SEQ ID NO: 196555 - DNA, 15 bp, Homo sapiens
tactcaggaggctga

SEQ ID NO: 196556 - DNA, 15 bp, Homo sapiens
ctactcaggaggctg

SEQ ID NO: 196557 - DNA, 15 bp, Homo sapiens
gctactcaggaggct

SEQ ID NO: 196558 - DNA, 15 bp, Homo sapiens
agtcccagctactca

SEQ ID NO: 196559 - DNA, 15 bp, Homo sapiens
tagtcccagctactc

SEQ ID NO: 196560 - DNA, 15 bp, Homo sapiens
cgcctgtagtcccag

SEQ ID NO: 196561 - DNA, 15 bp, Homo sapiens
gcgcctgtagtccca

SEQ ID NO: 196562 - DNA, 15 bp, Homo sapiens
ggcgcctgtagtccc

SEQ ID NO: 196563 - DNA, 15 bp, Homo sapiens
aggcgcctgtagtcc

SEQ ID NO: 196564 - DNA, 15 bp, Homo sapiens
caggcgcctgtagtc

SEQ ID NO: 196565 - DNA, 15 bp, Homo sapiens
gcaggcgcctgtagt

SEQ ID NO: 196566 - DNA, 15 bp, Homo sapiens
ggcaggcgcctgtag

SEQ ID NO: 196567 - DNA, 15 bp, Homo sapiens
tggcaggcgcctgta

SEQ ID NO: 196568 - DNA, 15 bp, Homo sapiens
gtggcaggcgcctgt

SEQ ID NO: 196569 - DNA, 15 bp, Homo sapiens
ggtggcaggcgcctg

SEQ ID NO: 196570 - DNA, 15 bp, Homo sapiens
tggtggcaggcgcct

SEQ ID NO: 196571 - DNA, 15 bp, Homo sapiens
atggtggcaggcgcc

SEQ ID NO: 196572 - DNA, 15 bp, Homo sapiens
catggtggcaggcgc

SEQ ID NO: 196573 - DNA, 15 bp, Homo sapiens
gcatggtggcaggcg

SEQ ID NO: 196574 - DNA, 15 bp, Homo sapiens
ggcatggtggcaggc

SEQ ID NO: 196575 - DNA, 15 bp, Homo sapiens
gggcatggtggcagg

SEQ ID NO: 196576 - DNA, 15 bp, Homo sapiens
cgggcatggtggcag

SEQ ID NO: 196577 - DNA, 15 bp, Homo sapiens
ccgggcatggtggca

SEQ ID NO: 196578 - DNA, 15 bp, Homo sapiens
gccgggcatggtggc

SEQ ID NO: 196579 - DNA, 15 bp, Homo sapiens
agccgggcatggtgg

SEQ ID NO: 196580 - DNA, 15 bp, Homo sapiens
tagccgggcatggtg

SEQ ID NO: 196581 - DNA, 15 bp, Homo sapiens
ttagccgggcatggt

SEQ ID NO: 196582 - DNA, 15 bp, Homo sapiens
attagccgggcatgg

SEQ ID NO: 196583 - DNA, 15 bp, Homo sapiens
aattagccgggcatg

SEQ ID NO: 196584 - DNA, 15 bp, Homo sapiens
aaattagccgggcat

SEQ ID NO: 196585 - DNA, 15 bp, Homo sapiens
aaaattagccgggca

SEQ ID NO: 196586 - DNA, 15 bp, Homo sapiens
aaaaaattagccggg

SEQ ID NO: 196587 - DNA, 15 bp, Homo sapiens
caaaaaattagccgg

SEQ ID NO: 196588 - DNA, 15 bp, Homo sapiens
acaaaaaattagccg

SEQ ID NO: 196589 - DNA, 15 bp, Homo sapiens
tacaaaaaattagcc

SEQ ID NO: 196590 - DNA, 15 bp, Homo sapiens
atacaaaaaattagc

SEQ ID NO: 196591 - DNA, 15 bp, Homo sapiens
aatacaaaaaattag

SEQ ID NO: 196592 - DNA, 15 bp, Homo sapiens
aaatacaaaaaatta

SEQ ID NO: 196593 - DNA, 15 bp, Homo sapiens
aaaatacaaaaaatt

SEQ ID NO: 196594 - DNA, 15 bp, Homo sapiens
aaaaatacaaaaaat

SEQ ID NO: 196595 - DNA, 15 bp, Homo sapiens
taaaaatacaaaaaa

SEQ ID NO: 196596 - DNA, 15 bp, Homo sapiens
taacacggtgaaacc

SEQ ID NO: 196597 - DNA, 15 bp, Homo sapiens
ctaacacggtgaaac

SEQ ID NO: 196598 - DNA, 15 bp, Homo sapiens
gctaacacggtgaaa

SEQ ID NO: 196599 - DNA, 15 bp, Homo sapiens
ggctaacacggtgaa

SEQ ID NO: 196600 - DNA, 15 bp, Homo sapiens
tggctaacacggtga

SEQ ID NO: 196601 - DNA, 15 bp, Homo sapiens
atggctaacacggtg

SEQ ID NO: 196602 - DNA, 15 bp, Homo sapiens
catggctaacacggt

SEQ ID NO: 196603 - DNA, 15 bp, Homo sapiens
tcatggctaacacgg

SEQ ID NO: 196604 - DNA, 15 bp, Homo sapiens
atcatggctaacacg

SEQ ID NO: 196605 - DNA, 15 bp, Homo sapiens
catcatggctaacac

SEQ ID NO: 196606 - DNA, 15 bp, Homo sapiens
ccatcatggctaaca

SEQ ID NO: 196607 - DNA, 15 bp, Homo sapiens
accatcatggctaac

SEQ ID NO: 196608 - DNA, 15 bp, Homo sapiens
gaccatcatggctaa

SEQ ID NO: 196609 - DNA, 15 bp, Homo sapiens
agaccatcatggcta

SEQ ID NO: 196610 - DNA, 15 bp, Homo sapiens
gagaccatcatggct

SEQ ID NO: 196611 - DNA, 15 bp, Homo sapiens
cgagaccatcatggc

SEQ ID NO: 196612 - DNA, 15 bp, Homo sapiens
tcgagaccatcatgg

SEQ ID NO: 196613 - DNA, 15 bp, Homo sapiens
atcgagaccatcatg

SEQ ID NO: 196614 - DNA, 15 bp, Homo sapiens
gatcgagaccatcat

SEQ ID NO: 196615 - DNA, 15 bp, Homo sapiens
agatcgagaccatca

SEQ ID NO: 196616 - DNA, 15 bp, Homo sapiens
gagatcgagaccatc

SEQ ID NO: 196617 - DNA, 15 bp, Homo sapiens
ggagatcgagaccat

SEQ ID NO: 196618 - DNA, 15 bp, Homo sapiens
aggagatcgagacca

SEQ ID NO: 196619 - DNA, 15 bp, Homo sapiens
caggagatcgagacc

SEQ ID NO: 196620 - DNA, 15 bp, Homo sapiens
tcaggagatcgagac

SEQ ID NO: 196621 - DNA, 15 bp, Homo sapiens
gtcaggagatcgaga

SEQ ID NO: 196622 - DNA, 15 bp, Homo sapiens
ggtcaggagatcgag

SEQ ID NO: 196623 - DNA, 15 bp, Homo sapiens
aggtcaggagatcga

SEQ ID NO: 196624 - DNA, 15 bp, Homo sapiens
gaggtcaggagatcg

SEQ ID NO: 196625 - DNA, 15 bp, Homo sapiens
cgaggtcaggagatc

SEQ ID NO: 196626 - DNA, 15 bp, Homo sapiens
acgaggtcaggagat

SEQ ID NO: 196627 - DNA, 15 bp, Homo sapiens
cacgaggtcaggaga

SEQ ID NO: 196628 - DNA, 15 bp, Homo sapiens
tcacgaggtcaggag

SEQ ID NO: 196629 - DNA, 15 bp, Homo sapiens
atcacgaggtcagga

SEQ ID NO: 196630 - DNA, 15 bp, Homo sapiens
gatcacgaggtcagg

SEQ ID NO: 196631 - DNA, 15 bp, Homo sapiens
agatcacgaggtcag

SEQ ID NO: 196632 - DNA, 15 bp, Homo sapiens
cagatcacgaggtca

SEQ ID NO: 196633 - DNA, 15 bp, Homo sapiens
gcagatcacgaggtc

SEQ ID NO: 196634 - DNA, 15 bp, Homo sapiens
ggcagatcacgaggt

SEQ ID NO: 196635 - DNA, 15 bp, Homo sapiens
gggcagatcacgagg

SEQ ID NO: 196636 - DNA, 15 bp, Homo sapiens
cgggcagatcacgag

SEQ ID NO: 196637 - DNA, 15 bp, Homo sapiens
gcgggcagatcacga

SEQ ID NO: 196638 - DNA, 15 bp, Homo sapiens
ggcgggcagatcacg

SEQ ID NO: 196639 - DNA, 15 bp, Homo sapiens
aggcgggcagatcac

SEQ ID NO: 196640 - DNA, 15 bp, Homo sapiens
aaggcgggcagatca

SEQ ID NO: 196641 - DNA, 15 bp, Homo sapiens
caaggcgggcagatc

SEQ ID NO: 196642 - DNA, 15 bp, Homo sapiens
ccaaggcgggcagat

SEQ ID NO: 196643 - DNA, 15 bp, Homo sapiens
gccaaggcgggcaga

SEQ ID NO: 196644 - DNA, 15 bp, Homo sapiens
ggccaaggcgggcag

SEQ ID NO: 196645 - DNA, 15 bp, Homo sapiens
aggccaaggcgggca

SEQ ID NO: 196646 - DNA, 15 bp, Homo sapiens
gaggccaaggcgggc

SEQ ID NO: 196647 - DNA, 15 bp, Homo sapiens
ggaggccaaggcggg

SEQ ID NO: 196648 - DNA, 15 bp, Homo sapiens
gggaggccaaggcgg

SEQ ID NO: 196649 - DNA, 15 bp, Homo sapiens
tgggaggccaaggcg

SEQ ID NO: 196650 - DNA, 15 bp, Homo sapiens
ctttgggaggccaag

SEQ ID NO: 196651 - DNA, 15 bp, Homo sapiens
gctttgggaggccaa

SEQ ID NO: 196652 - DNA, 15 bp, Homo sapiens
tgctttgggaggcca

SEQ ID NO: 196653 - DNA, 15 bp, Homo sapiens
gtgctttgggaggcc

SEQ ID NO: 196654 - DNA, 15 bp, Homo sapiens
agtgctttgggaggc

SEQ ID NO: 196655 - DNA, 15 bp, Homo sapiens
cagtgctttgggagg

SEQ ID NO: 196656 - DNA, 15 bp, Homo sapiens
ccagtgctttgggag

SEQ ID NO: 196657 - DNA, 15 bp, Homo sapiens
cccagtgctttggga

SEQ ID NO: 196658 - DNA, 15 bp, Homo sapiens
tcccagtgctttggg

SEQ ID NO: 196659 - DNA, 15 bp, Homo sapiens
ctcccagtgctttgg

SEQ ID NO: 196660 - DNA, 15 bp, Homo sapiens
actcccagtgctttg

SEQ ID NO: 196661 - DNA, 15 bp, Homo sapiens
tactcccagtgcttt

SEQ ID NO: 196662 - DNA, 15 bp, Homo sapiens
gtactcccagtgctt

SEQ ID NO: 196663 - DNA, 15 bp, Homo sapiens
tgtactcccagtgct

SEQ ID NO: 196664 - DNA, 15 bp, Homo sapiens
ctgtactcccagtgc

SEQ ID NO: 196665 - DNA, 15 bp, Homo sapiens
cctgtactcccagtg

SEQ ID NO: 196666 - DNA, 15 bp, Homo sapiens
acctgtactcccagt

SEQ ID NO: 196667 - DNA, 15 bp, Homo sapiens
cacctgtactcccag

SEQ ID NO: 196668 - DNA, 15 bp, Homo sapiens
acacctgtactccca

SEQ ID NO: 196669 - DNA, 15 bp, Homo sapiens
cacacctgtactccc

SEQ ID NO: 196670 - DNA, 15 bp, Homo sapiens
tcacacctgtactcc

SEQ ID NO: 196671 - DNA, 15 bp, Homo sapiens
ctcacacctgtactc

SEQ ID NO: 196672 - DNA, 15 bp, Homo sapiens
gctcacacctgtact

SEQ ID NO: 196673 - DNA, 15 bp, Homo sapiens
ggctcacacctgtac

SEQ ID NO: 196674 - DNA, 15 bp, Homo sapiens
cggtggctcacacct

SEQ ID NO: 196675 - DNA, 15 bp, Homo sapiens
acggtggctcacacc

SEQ ID NO: 196676 - DNA, 15 bp, Homo sapiens
cacggtggctcacac

SEQ ID NO: 196677 - DNA, 15 bp, Homo sapiens
gcacggtggctcaca

SEQ ID NO: 196678 - DNA, 15 bp, Homo sapiens
tgcacggtggctcac

SEQ ID NO: 196679 - DNA, 15 bp, Homo sapiens
atgcacggtggctca

SEQ ID NO: 196680 - DNA, 15 bp, Homo sapiens
catgcacggtggctc

SEQ ID NO: 196681 - DNA, 15 bp, Homo sapiens
ccatgcacggtggct

SEQ ID NO: 196682 - DNA, 15 bp, Homo sapiens
gccatgcacggtggc

SEQ ID NO: 196683 - DNA, 15 bp, Homo sapiens
ggccatgcacggtgg

SEQ ID NO: 196684 - DNA, 15 bp, Homo sapiens
aggccatgcacggtg

SEQ ID NO: 196685 - DNA, 15 bp, Homo sapiens
gaggccatgcacggt

SEQ ID NO: 196686 - DNA, 15 bp, Homo sapiens
tgaggccatgcacgg

SEQ ID NO: 196687 - DNA, 15 bp, Homo sapiens
ttgaggccatgcacg

SEQ ID NO: 196688 - DNA, 15 bp, Homo sapiens
attgaggccatgcac

SEQ ID NO: 196689 - DNA, 15 bp, Homo sapiens
aattgaggccatgca

SEQ ID NO: 196690 - DNA, 15 bp, Homo sapiens
gaattgaggccatgc

SEQ ID NO: 196691 - DNA, 15 bp, Homo sapiens
ggaattgaggccatg

SEQ ID NO: 196692 - DNA, 15 bp, Homo sapiens
cggaattgaggccat

SEQ ID NO: 196693 - DNA, 15 bp, Homo sapiens
ccggaattgaggcca

SEQ ID NO: 196694 - DNA, 15 bp, Homo sapiens
accggaattgaggcc

SEQ ID NO: 196695 - DNA, 15 bp, Homo sapiens
aaccggaattgaggc

SEQ ID NO: 196696 - DNA, 15 bp, Homo sapiens
aaaccggaattgagg

SEQ ID NO: 196697 - DNA, 15 bp, Homo sapiens
aaaaccggaattgag

SEQ ID NO: 196698 - DNA, 15 bp, Homo sapiens
aaaaaccggaattga

SEQ ID NO: 196699 - DNA, 15 bp, Homo sapiens
taaaaaccggaattg

SEQ ID NO: 196700 - DNA, 15 bp, Homo sapiens
ttaaaaaccggaatt

SEQ ID NO: 196701 - DNA, 15 bp, Homo sapiens
cttaaaaaccggaat

SEQ ID NO: 196702 - DNA, 15 bp, Homo sapiens
gcttaaaaaccggaa

SEQ ID NO: 196703 - DNA, 15 bp, Homo sapiens
ggcttaaaaaccgga

SEQ ID NO: 196704 - DNA, 15 bp, Homo sapiens
tggcttaaaaaccgg

SEQ ID NO: 196705 - DNA, 15 bp, Homo sapiens
gtggcttaaaaaccg

SEQ ID NO: 196706 - DNA, 15 bp, Homo sapiens
ggtggcttaaaaacc

SEQ ID NO: 196707 - DNA, 15 bp, Homo sapiens
gggtggcttaaaaac

SEQ ID NO: 196708 - DNA, 15 bp, Homo sapiens
tgggtggcttaaaaa

SEQ ID NO: 196709 - DNA, 15 bp, Homo sapiens
ctgggtggcttaaaa

SEQ ID NO: 196710 - DNA, 15 bp, Homo sapiens
actgggtggcttaaa

SEQ ID NO: 196711 - DNA, 15 bp, Homo sapiens
aactgggtggcttaa

SEQ ID NO: 196712 - DNA, 15 bp, Homo sapiens
aaactgggtggctta

SEQ ID NO: 196713 - DNA, 15 bp, Homo sapiens
caaactgggtggctt

SEQ ID NO: 196714 - DNA, 15 bp, Homo sapiens
acaaactgggtggct

SEQ ID NO: 196715 - DNA, 15 bp, Homo sapiens
cacaaactgggtggc

SEQ ID NO: 196716 - DNA, 15 bp, Homo sapiens
tcacaaactgggtgg

SEQ ID NO: 196717 - DNA, 15 bp, Homo sapiens
ttcacaaactgggtg

SEQ ID NO: 196718 - DNA, 15 bp, Homo sapiens
tttcacaaactgggt

SEQ ID NO: 196719 - DNA, 15 bp, Homo sapiens
gtttcacaaactggg

SEQ ID NO: 196720 - DNA, 15 bp, Homo sapiens
agtttcacaaactgg

SEQ ID NO: 196721 - DNA, 15 bp, Homo sapiens
aagtttcacaaactg

SEQ ID NO: 196722 - DNA, 15 bp, Homo sapiens
aaagtttcacaaact

SEQ ID NO: 196723 - DNA, 15 bp, Homo sapiens
caaagtttcacaaac

SEQ ID NO: 196724 - DNA, 15 bp, Homo sapiens
acaaagtttcacaaa

SEQ ID NO: 196725 - DNA, 15 bp, Homo sapiens
aacaaagtttcacaa

SEQ ID NO: 196726 - DNA, 15 bp, Homo sapiens
caacaaagtttcaca

SEQ ID NO: 196727 - DNA, 15 bp, Homo sapiens
acaacaaagtttcac

SEQ ID NO: 196728 - DNA, 15 bp, Homo sapiens
tacaacaaagtttca

SEQ ID NO: 196729 - DNA, 15 bp, Homo sapiens
ttacaacaaagtttc

SEQ ID NO: 196730 - DNA, 15 bp, Homo sapiens
gttacaacaaagttt

SEQ ID NO: 196731 - DNA, 15 bp, Homo sapiens
tgttacaacaaagtt

SEQ ID NO: 196732 - DNA, 15 bp, Homo sapiens
ctgttacaacaaagt

SEQ ID NO: 196733 - DNA, 15 bp, Homo sapiens
gctgttacaacaaag

SEQ ID NO: 196734 - DNA, 15 bp, Homo sapiens
ggctgttacaacaaa

SEQ ID NO: 196735 - DNA, 15 bp, Homo sapiens
gggctgttacaacaa

SEQ ID NO: 196736 - DNA, 15 bp, Homo sapiens
agggctgttacaaca

SEQ ID NO: 196737 - DNA, 15 bp, Homo sapiens
cagggctgttacaac

SEQ ID NO: 196738 - DNA, 15 bp, Homo sapiens
ccagggctgttacaa

SEQ ID NO: 196739 - DNA, 15 bp, Homo sapiens
tccagggctgttaca

SEQ ID NO: 196740 - DNA, 15 bp, Homo sapiens
ttccagggctgttac

SEQ ID NO: 196741 - DNA, 15 bp, Homo sapiens
tttccagggctgtta

SEQ ID NO: 196742 - DNA, 15 bp, Homo sapiens
ttttccagggctgtt

SEQ ID NO: 196743 - DNA, 15 bp, Homo sapiens
gttttccagggctgt

SEQ ID NO: 196744 - DNA, 15 bp, Homo sapiens
agttttccagggctg

SEQ ID NO: 196745 - DNA, 15 bp, Homo sapiens
cagttttccagggct

SEQ ID NO: 196746 - DNA, 15 bp, Homo sapiens
tcagttttccagggc

SEQ ID NO: 196747 - DNA, 15 bp, Homo sapiens
atcagttttccaggg

SEQ ID NO: 196748 - DNA, 15 bp, Homo sapiens
tatcagttttccagg

SEQ ID NO: 196749 - DNA, 15 bp, Homo sapiens
gtatcagttttccag

SEQ ID NO: 196750 - DNA, 15 bp, Homo sapiens
tgtatcagttttcca

SEQ ID NO: 196751 - DNA, 15 bp, Homo sapiens
gtgtatcagttttcc

SEQ ID NO: 196752 - DNA, 15 bp, Homo sapiens
ggtgtatcagttttc

SEQ ID NO: 196753 - DNA, 15 bp, Homo sapiens
aggtgtatcagtttt

SEQ ID NO: 196754 - DNA, 15 bp, Homo sapiens
caggtgtatcagttt

SEQ ID NO: 196755 - DNA, 15 bp, Homo sapiens
gcaggtgtatcagtt

SEQ ID NO: 196756 - DNA, 15 bp, Homo sapiens
agcaggtgtatcagt

SEQ ID NO: 196757 - DNA, 15 bp, Homo sapiens
gagcaggtgtatcag

SEQ ID NO: 196758 - DNA, 15 bp, Homo sapiens
agagcaggtgtatca

SEQ ID NO: 196759 - DNA, 15 bp, Homo sapiens
gagagcaggtgtatc

SEQ ID NO: 196760 - DNA, 15 bp, Homo sapiens
agagagcaggtgtat

SEQ ID NO: 196761 - DNA, 15 bp, Homo sapiens
gagagagcaggtgta

SEQ ID NO: 196762 - DNA, 15 bp, Homo sapiens
cgagagagcaggtgt

SEQ ID NO: 196763 - DNA, 15 bp, Homo sapiens
acgagagagcaggtg

SEQ ID NO: 196764 - DNA, 15 bp, Homo sapiens
tacgagagagcaggt

SEQ ID NO: 196765 - DNA, 15 bp, Homo sapiens
ttacgagagagcagg

SEQ ID NO: 196766 - DNA, 15 bp, Homo sapiens
tttacgagagagcag

SEQ ID NO: 196767 - DNA, 15 bp, Homo sapiens
ttttacgagagagca

SEQ ID NO: 196768 - DNA, 15 bp, Homo sapiens
cttttacgagagagc

SEQ ID NO: 196769 - DNA, 15 bp, Homo sapiens
tcttttacgagagag

SEQ ID NO: 196770 - DNA, 15 bp, Homo sapiens
atcttttacgagaga

SEQ ID NO: 196771 - DNA, 15 bp, Homo sapiens
gatcttttacgagag

SEQ ID NO: 196772 - DNA, 15 bp, Homo sapiens
tgatcttttacgaga

SEQ ID NO: 196773 - DNA, 15 bp, Homo sapiens
ctgatcttttacgag

SEQ ID NO: 196774 - DNA, 15 bp, Homo sapiens
gctgatcttttacga

SEQ ID NO: 196775 - DNA, 15 bp, Homo sapiens
agctgatcttttacg

SEQ ID NO: 196776 - DNA, 15 bp, Homo sapiens
cagctgatcttttac

SEQ ID NO: 196777 - DNA, 15 bp, Homo sapiens
tcagctgatctttta

SEQ ID NO: 196778 - DNA, 15 bp, Homo sapiens
atcagctgatctttt

SEQ ID NO: 196779 - DNA, 15 bp, Homo sapiens
tatcagctgatcttt

SEQ ID NO: 196780 - DNA, 15 bp, Homo sapiens
gtatcagctgatctt

SEQ ID NO: 196781 - DNA, 15 bp, Homo sapiens
cgtatcagctgatct

SEQ ID NO: 196782 - DNA, 15 bp, Homo sapiens
ccgtatcagctgatc

SEQ ID NO: 196783 - DNA, 15 bp, Homo sapiens
gccgtatcagctgat

SEQ ID NO: 196784 - DNA, 15 bp, Homo sapiens
tgccgtatcagctga

SEQ ID NO: 196785 - DNA, 15 bp, Homo sapiens
ctgccgtatcagctg

SEQ ID NO: 196786 - DNA, 15 bp, Homo sapiens
gctgccgtatcagct

SEQ ID NO: 196787 - DNA, 15 bp, Homo sapiens
tgctgccgtatcagc

SEQ ID NO: 196788 - DNA, 15 bp, Homo sapiens
gtgctgccgtatcag

SEQ ID NO: 196789 - DNA, 15 bp, Homo sapiens
ggtgctgccgtatca

SEQ ID NO: 196790 - DNA, 15 bp, Homo sapiens
cggtgctgccgtatc

SEQ ID NO: 196791 - DNA, 15 bp, Homo sapiens
ccggtgctgccgtat

SEQ ID NO: 196792 - DNA, 15 bp, Homo sapiens
gccggtgctgccgta

SEQ ID NO: 196793 - DNA, 15 bp, Homo sapiens
ggccggtgctgccgt

SEQ ID NO: 196794 - DNA, 15 bp, Homo sapiens
tggccggtgctgccg

SEQ ID NO: 196795 - DNA, 15 bp, Homo sapiens
gtggccggtgctgcc

SEQ ID NO: 196796 - DNA, 15 bp, Homo sapiens
agtggccggtgctgc

SEQ ID NO: 196797 - DNA, 15 bp, Homo sapiens
cagtggccggtgctg

SEQ ID NO: 196798 - DNA, 15 bp, Homo sapiens
ccagtggccggtgct

SEQ ID NO: 196799 - DNA, 15 bp, Homo sapiens
tccagtggccggtgc

SEQ ID NO: 196800 - DNA, 15 bp, Homo sapiens
atccagtggccggtg

SEQ ID NO: 196801 - DNA, 15 bp, Homo sapiens
gatccagtggccggt

SEQ ID NO: 196802 - DNA, 15 bp, Homo sapiens
agatccagtggccgg

SEQ ID NO: 196803 - DNA, 15 bp, Homo sapiens
cagatccagtggccg

SEQ ID NO: 196804 - DNA, 15 bp, Homo sapiens
gcagatccagtggcc

SEQ ID NO: 196805 - DNA, 15 bp, Homo sapiens
cgcagatccagtggc

SEQ ID NO: 196806 - DNA, 15 bp, Homo sapiens
ccgcagatccagtgg

SEQ ID NO: 196807 - DNA, 15 bp, Homo sapiens
cccgcagatccagtg

SEQ ID NO: 196808 - DNA, 15 bp, Homo sapiens
acccgcagatccagt

SEQ ID NO: 196809 - DNA, 15 bp, Homo sapiens
gacccgcagatccag

SEQ ID NO: 196810 - DNA, 15 bp, Homo sapiens
tgacccgcagatcca

SEQ ID NO: 196811 - DNA, 15 bp, Homo sapiens
ctgacccgcagatcc

SEQ ID NO: 196812 - DNA, 15 bp, Homo sapiens
actgacccgcagatc

SEQ ID NO: 196813 - DNA, 15 bp, Homo sapiens
aactgacccgcagat

SEQ ID NO: 196814 - DNA, 15 bp, Homo sapiens
caactgacccgcaga

SEQ ID NO: 196815 - DNA, 15 bp, Homo sapiens
acaactgacccgcag

SEQ ID NO: 196816 - DNA, 15 bp, Homo sapiens
gacaactgacccgca

SEQ ID NO: 196817 - DNA, 15 bp, Homo sapiens
ggacaactgacccgc

SEQ ID NO: 196818 - DNA, 15 bp, Homo sapiens
gggacaactgacccg

SEQ ID NO: 196819 - DNA, 15 bp, Homo sapiens
ggggacaactgaccc

SEQ ID NO: 196820 - DNA, 15 bp, Homo sapiens
aggggacaactgacc

SEQ ID NO: 196821 - DNA, 15 bp, Homo sapiens
aaggggacaactgac

SEQ ID NO: 196822 - DNA, 15 bp, Homo sapiens
taaggggacaactga

SEQ ID NO: 196823 - DNA, 15 bp, Homo sapiens
ctaaggggacaactg

SEQ ID NO: 196824 - DNA, 15 bp, Homo sapiens
tctaaggggacaact

SEQ ID NO: 196825 - DNA, 15 bp, Homo sapiens
gtctaaggggacaac

SEQ ID NO: 196826 - DNA, 15 bp, Homo sapiens
tgtctaaggggacaa

SEQ ID NO: 196827 - DNA, 15 bp, Homo sapiens
ctgtctaaggggaca

SEQ ID NO: 196828 - DNA, 15 bp, Homo sapiens
cctgtctaaggggac

SEQ ID NO: 196829 - DNA, 15 bp, Homo sapiens
ccctgtctaagggga

SEQ ID NO: 196830 - DNA, 15 bp, Homo sapiens
gccctgtctaagggg

SEQ ID NO: 196831 - DNA, 15 bp, Homo sapiens
tgccctgtctaaggg

SEQ ID NO: 196832 - DNA, 15 bp, Homo sapiens
gtgccctgtctaagg

SEQ ID NO: 196833 - DNA, 15 bp, Homo sapiens
ggtgccctgtctaag

SEQ ID NO: 196834 - DNA, 15 bp, Homo sapiens
aggtgccctgtctaa

SEQ ID NO: 196835 - DNA, 15 bp, Homo sapiens
caggtgccctgtcta

SEQ ID NO: 196836 - DNA, 15 bp, Homo sapiens
gcaggtgccctgtct

SEQ ID NO: 196837 - DNA, 15 bp, Homo sapiens
ggcaggtgccctgtc

SEQ ID NO: 196838 - DNA, 15 bp, Homo sapiens
gggcaggtgccctgt

SEQ ID NO: 196839 - DNA, 15 bp, Homo sapiens
cgggcaggtgccctg

SEQ ID NO: 196840 - DNA, 15 bp, Homo sapiens
gcgggcaggtgccct

SEQ ID NO: 196841 - DNA, 15 bp, Homo sapiens
ggcgggcaggtgccc

SEQ ID NO: 196842 - DNA, 15 bp, Homo sapiens
tggcgggcaggtgcc

SEQ ID NO: 196843 - DNA, 15 bp, Homo sapiens
ctggcgggcaggtgc

SEQ ID NO: 196844 - DNA, 15 bp, Homo sapiens
actggcgggcaggtg

SEQ ID NO: 196845 - DNA, 15 bp, Homo sapiens
gactggcgggcaggt

SEQ ID NO: 196846 - DNA, 15 bp, Homo sapiens
tgactggcgggcagg

SEQ ID NO: 196847 - DNA, 15 bp, Homo sapiens
gtgactggcgggcag

SEQ ID NO: 196848 - DNA, 15 bp, Homo sapiens
tgtgactggcgggca

SEQ ID NO: 196849 - DNA, 15 bp, Homo sapiens
ctgtgactggcgggc

SEQ ID NO: 196850 - DNA, 15 bp, Homo sapiens
cctgtgactggcggg

SEQ ID NO: 196851 - DNA, 15 bp, Homo sapiens
acctgtgactggcgg

SEQ ID NO: 196852 - DNA, 15 bp, Homo sapiens
gacctgtgactggcg

SEQ ID NO: 196853 - DNA, 15 bp, Homo sapiens
ggacctgtgactggc

SEQ ID NO: 196854 - DNA, 15 bp, Homo sapiens
aggacctgtgactgg

SEQ ID NO: 196855 - DNA, 15 bp, Homo sapiens
caggacctgtgactg

SEQ ID NO: 196856 - DNA, 15 bp, Homo sapiens
acaggacctgtgact

SEQ ID NO: 196857 - DNA, 15 bp, Homo sapiens
gacaggacctgtgac

SEQ ID NO: 196858 - DNA, 15 bp, Homo sapiens
tgacaggacctgtga

SEQ ID NO: 196859 - DNA, 15 bp, Homo sapiens
gtgacaggacctgtg

SEQ ID NO: 196860 - DNA, 15 bp, Homo sapiens
ggtgacaggacctgt

SEQ ID NO: 196861 - DNA, 15 bp, Homo sapiens
gggtgacaggacctg

SEQ ID NO: 196862 - DNA, 15 bp, Homo sapiens
tgggtgacaggacct

SEQ ID NO: 196863 - DNA, 15 bp, Homo sapiens
ctgggtgacaggacc

SEQ ID NO: 196864 - DNA, 15 bp, Homo sapiens
gctgggtgacaggac

SEQ ID NO: 196865 - DNA, 15 bp, Homo sapiens
ggctgggtgacagga

SEQ ID NO: 196866 - DNA, 15 bp, Homo sapiens
gggctgggtgacagg

SEQ ID NO: 196867 - DNA, 15 bp, Homo sapiens
ggggctgggtgacag

SEQ ID NO: 196868 - DNA, 15 bp, Homo sapiens
aggggctgggtgaca

SEQ ID NO: 196869 - DNA, 15 bp, Homo sapiens
aaggggctgggtgac

SEQ ID NO: 196870 - DNA, 15 bp, Homo sapiens
gaaggggctgggtga

SEQ ID NO: 196871 - DNA, 15 bp, Homo sapiens
ggaaggggctgggtg

SEQ ID NO: 196872 - DNA, 15 bp, Homo sapiens
aggaaggggctgggt

SEQ ID NO: 196873 - DNA, 15 bp, Homo sapiens
gaggaaggggctggg

SEQ ID NO: 196874 - DNA, 15 bp, Homo sapiens
agaggaaggggctgg

SEQ ID NO: 196875 - DNA, 15 bp, Homo sapiens
gagaggaaggggctg

SEQ ID NO: 196876 - DNA, 15 bp, Homo sapiens
tgagaggaaggggct

SEQ ID NO: 196877 - DNA, 15 bp, Homo sapiens
atgagaggaaggggc

SEQ ID NO: 196878 - DNA, 15 bp, Homo sapiens
catgagaggaagggg

SEQ ID NO: 196879 - DNA, 15 bp, Homo sapiens
ccatgagaggaaggg

SEQ ID NO: 196880 - DNA, 15 bp, Homo sapiens
cccatgagaggaagg

SEQ ID NO: 196881 - DNA, 15 bp, Homo sapiens
gcccatgagaggaag

SEQ ID NO: 196882 - DNA, 15 bp, Homo sapiens
agcccatgagaggaa

SEQ ID NO: 196883 - DNA, 15 bp, Homo sapiens
gagcccatgagagga

SEQ ID NO: 196884 - DNA, 15 bp, Homo sapiens
ggagcccatgagagg

SEQ ID NO: 196885 - DNA, 15 bp, Homo sapiens
tggagcccatgagag

SEQ ID NO: 196886 - DNA, 15 bp, Homo sapiens
ctggagcccatgaga

SEQ ID NO: 196887 - DNA, 15 bp, Homo sapiens
gctggagcccatgag

SEQ ID NO: 196888 - DNA, 15 bp, Homo sapiens
ggctggagcccatga

SEQ ID NO: 196889 - DNA, 15 bp, Homo sapiens
cggctggagcccatg

SEQ ID NO: 196890 - DNA, 15 bp, Homo sapiens
gcggctggagcccat

SEQ ID NO: 196891 - DNA, 15 bp, Homo sapiens
ggcggctggagccca

SEQ ID NO: 196892 - DNA, 15 bp, Homo sapiens
aggcggctggagccc

SEQ ID NO: 196893 - DNA, 15 bp, Homo sapiens
gaggcggctggagcc

SEQ ID NO: 196894 - DNA, 15 bp, Homo sapiens
cgaggcggctggagc

SEQ ID NO: 196895 - DNA, 15 bp, Homo sapiens
gcgaggcggctggag

SEQ ID NO: 196896 - DNA, 15 bp, Homo sapiens
agcgaggcggctgga

SEQ ID NO: 196897 - DNA, 15 bp, Homo sapiens
gagcgaggcggctgg

SEQ ID NO: 196898 - DNA, 15 bp, Homo sapiens
ggagcgaggcggctg

SEQ ID NO: 196899 - DNA, 15 bp, Homo sapiens
gggagcgaggcggct

SEQ ID NO: 196900 - DNA, 15 bp, Homo sapiens
tgggagcgaggcggc

SEQ ID NO: 196901 - DNA, 15 bp, Homo sapiens
gtgggagcgaggcgg

SEQ ID NO: 196902 - DNA, 15 bp, Homo sapiens
tgtgggagcgaggcg

SEQ ID NO: 196903 - DNA, 15 bp, Homo sapiens
ctgtgggagcgaggc

SEQ ID NO: 196904 - DNA, 15 bp, Homo sapiens
cctgtgggagcgagg

SEQ ID NO: 196905 - DNA, 15 bp, Homo sapiens
acctgtgggagcgag

SEQ ID NO: 196906 - DNA, 15 bp, Homo sapiens
gacctgtgggagcga

SEQ ID NO: 196907 - DNA, 15 bp, Homo sapiens
agacctgtgggagcg

SEQ ID NO: 196908 - DNA, 15 bp, Homo sapiens
gagacctgtgggagc

SEQ ID NO: 196909 - DNA, 15 bp, Homo sapiens
ggagacctgtgggag

SEQ ID NO: 196910 - DNA, 15 bp, Homo sapiens
aggagacctgtggga

SEQ ID NO: 196911 - DNA, 15 bp, Homo sapiens
caggagacctgtggg

SEQ ID NO: 196912 - DNA, 15 bp, Homo sapiens
ccaggagacctgtgg

SEQ ID NO: 196913 - DNA, 15 bp, Homo sapiens
tccaggagacctgtg

SEQ ID NO: 196914 - DNA, 15 bp, Homo sapiens
ctccaggagacctgt

SEQ ID NO: 196915 - DNA, 15 bp, Homo sapiens
tctccaggagacctg

SEQ ID NO: 196916 - DNA, 15 bp, Homo sapiens
gtctccaggagacct

SEQ ID NO: 196917 - DNA, 15 bp, Homo sapiens
ggtctccaggagacc

SEQ ID NO: 196918 - DNA, 15 bp, Homo sapiens
gggtctccaggagac

SEQ ID NO: 196919 - DNA, 15 bp, Homo sapiens
cgggtctccaggaga

SEQ ID NO: 196920 - DNA, 15 bp, Homo sapiens
tcgggtctccaggag

SEQ ID NO: 196921 - DNA, 15 bp, Homo sapiens
ctcgggtctccagga

SEQ ID NO: 196922 - DNA, 15 bp, Homo sapiens
actcgggtctccagg

SEQ ID NO: 196923 - DNA, 15 bp, Homo sapiens
aactcgggtctccag

SEQ ID NO: 196924 - DNA, 15 bp, Homo sapiens
caactcgggtctcca

SEQ ID NO: 196925 - DNA, 15 bp, Homo sapiens
gcaactcgggtctcc

SEQ ID NO: 196926 - DNA, 15 bp, Homo sapiens
agcaactcgggtctc

SEQ ID NO: 196927 - DNA, 15 bp, Homo sapiens
cagcaactcgggtct

SEQ ID NO: 196928 - DNA, 15 bp, Homo sapiens
tcagcaactcgggtc

SEQ ID NO: 196929 - DNA, 15 bp, Homo sapiens
atcagcaactcgggt

SEQ ID NO: 196930 - DNA, 15 bp, Homo sapiens
catcagcaactcggg

SEQ ID NO: 196931 - DNA, 15 bp, Homo sapiens
acatcagcaactcgg

SEQ ID NO: 196932 - DNA, 15 bp, Homo sapiens
gacatcagcaactcg

SEQ ID NO: 196933 - DNA, 15 bp, Homo sapiens
tgacatcagcaactc

SEQ ID NO: 196934 - DNA, 15 bp, Homo sapiens
ctgacatcagcaact

SEQ ID NO: 196935 - DNA, 15 bp, Homo sapiens
gctgacatcagcaac

SEQ ID NO: 196936 - DNA, 15 bp, Homo sapiens
cgctgacatcagcaa

SEQ ID NO: 196937 - DNA, 15 bp, Homo sapiens
tcgctgacatcagca

SEQ ID NO: 196938 - DNA, 15 bp, Homo sapiens
gtcgctgacatcagc

SEQ ID NO: 196939 - DNA, 15 bp, Homo sapiens
agtcgctgacatcag

SEQ ID NO: 196940 - DNA, 15 bp, Homo sapiens
tagtcgctgacatca

SEQ ID NO: 196941 - DNA, 15 bp, Homo sapiens
atagtcgctgacatc

SEQ ID NO: 196942 - DNA, 15 bp, Homo sapiens
aatagtcgctgacat

SEQ ID NO: 196943 - DNA, 15 bp, Homo sapiens
caatagtcgctgaca

SEQ ID NO: 196944 - DNA, 15 bp, Homo sapiens
gcaatagtcgctgac

SEQ ID NO: 196945 - DNA, 15 bp, Homo sapiens
cgcaatagtcgctga

SEQ ID NO: 196946 - DNA, 15 bp, Homo sapiens
tcgcaatagtcgctg

SEQ ID NO: 196947 - DNA, 15 bp, Homo sapiens
ctcgcaatagtcgct

SEQ ID NO: 196948 - DNA, 15 bp, Homo sapiens
actcgcaatagtcgc

SEQ ID NO: 196949 - DNA, 15 bp, Homo sapiens
cactcgcaatagtcg

SEQ ID NO: 196950 - DNA, 15 bp, Homo sapiens
gcactcgcaatagtc

SEQ ID NO: 196951 - DNA, 15 bp, Homo sapiens
agcactcgcaatagt

SEQ ID NO: 196952 - DNA, 15 bp, Homo sapiens
gagcactcgcaatag

SEQ ID NO: 196953 - DNA, 15 bp, Homo sapiens
ggagcactcgcaata

SEQ ID NO: 196954 - DNA, 15 bp, Homo sapiens
aggagcactcgcaat

SEQ ID NO: 196955 - DNA, 15 bp, Homo sapiens
caggagcactcgcaa

SEQ ID NO: 196956 - DNA, 15 bp, Homo sapiens
acaggagcactcgca

SEQ ID NO: 196957 - DNA, 15 bp, Homo sapiens
cacaggagcactcgc

SEQ ID NO: 196958 - DNA, 15 bp, Homo sapiens
ccacaggagcactcg

SEQ ID NO: 196959 - DNA, 15 bp, Homo sapiens
cccacaggagcactc

SEQ ID NO: 196960 - DNA, 15 bp, Homo sapiens
tcccacaggagcact

SEQ ID NO: 196961 - DNA, 15 bp, Homo sapiens
gtcccacaggagcac

SEQ ID NO: 196962 - DNA, 15 bp, Homo sapiens
tgtcccacaggagca

SEQ ID NO: 196963 - DNA, 15 bp, Homo sapiens
gtgtcccacaggagc

SEQ ID NO: 196964 - DNA, 15 bp, Homo sapiens
agtgtcccacaggag

SEQ ID NO: 196965 - DNA, 15 bp, Homo sapiens
cagtgtcccacagga

SEQ ID NO: 196966 - DNA, 15 bp, Homo sapiens
acagtgtcccacagg

SEQ ID NO: 196967 - DNA, 15 bp, Homo sapiens
gacagtgtcccacag

SEQ ID NO: 196968 - DNA, 15 bp, Homo sapiens
ggacagtgtcccaca

SEQ ID NO: 196969 - DNA, 15 bp, Homo sapiens
aggacagtgtcccac

SEQ ID NO: 196970 - DNA, 15 bp, Homo sapiens
gaggacagtgtccca

SEQ ID NO: 196971 - DNA, 15 bp, Homo sapiens
agaggacagtgtccc

SEQ ID NO: 196972 - DNA, 15 bp, Homo sapiens
gagaggacagtgtcc

SEQ ID NO: 196973 - DNA, 15 bp, Homo sapiens
ggagaggacagtgtc

SEQ ID NO: 196974 - DNA, 15 bp, Homo sapiens
gggagaggacagtgt

SEQ ID NO: 196975 - DNA, 15 bp, Homo sapiens
ggggagaggacagtg

SEQ ID NO: 196976 - DNA, 15 bp, Homo sapiens
tggggagaggacagt

SEQ ID NO: 196977 - DNA, 15 bp, Homo sapiens
ctggggagaggacag

SEQ ID NO: 196978 - DNA, 15 bp, Homo sapiens
gctggggagaggaca

SEQ ID NO: 196979 - DNA, 15 bp, Homo sapiens
tgctggggagaggac

SEQ ID NO: 196980 - DNA, 15 bp, Homo sapiens
ttgctggggagagga

SEQ ID NO: 196981 - DNA, 15 bp, Homo sapiens
gttgctggggagagg

SEQ ID NO: 196982 - DNA, 15 bp, Homo sapiens
tgttgctggggagag

SEQ ID NO: 196983 - DNA, 15 bp, Homo sapiens
ctgttgctggggaga

SEQ ID NO: 196984 - DNA, 15 bp, Homo sapiens
gctgttgctggggag

SEQ ID NO: 196985 - DNA, 15 bp, Homo sapiens
ggctgttgctgggga

SEQ ID NO: 196986 - DNA, 15 bp, Homo sapiens
aggctgttgctgggg

SEQ ID NO: 196987 - DNA, 15 bp, Homo sapiens
aaggctgttgctggg

SEQ ID NO: 196988 - DNA, 15 bp, Homo sapiens
gaaggctgttgctgg

SEQ ID NO: 196989 - DNA, 15 bp, Homo sapiens
tgaaggctgttgctg

SEQ ID NO: 196990 - DNA, 15 bp, Homo sapiens
ctgaaggctgttgct

SEQ ID NO: 196991 - DNA, 15 bp, Homo sapiens
actgaaggctgttgc

SEQ ID NO: 196992 - DNA, 15 bp, Homo sapiens
aactgaaggctgttg

SEQ ID NO: 196993 - DNA, 15 bp, Homo sapiens
gaactgaaggctgtt

SEQ ID NO: 196994 - DNA, 15 bp, Homo sapiens
tgaactgaaggctgt

SEQ ID NO: 196995 - DNA, 15 bp, Homo sapiens
gtgaactgaaggctg

SEQ ID NO: 196996 - DNA, 15 bp, Homo sapiens
tgtgaactgaaggct

SEQ ID NO: 196997 - DNA, 15 bp, Homo sapiens
gtgtgaactgaaggc

SEQ ID NO: 196998 - DNA, 15 bp, Homo sapiens
ggtgtgaactgaagg

SEQ ID NO: 196999 - DNA, 15 bp, Homo sapiens
gggtgtgaactgaag

SEQ ID NO: 197000 - DNA, 15 bp, Homo sapiens
tgggtgtgaactgaa

SEQ ID NO: 197001 - DNA, 15 bp, Homo sapiens
ctgggtgtgaactga

SEQ ID NO: 197002 - DNA, 15 bp, Homo sapiens
cctgggtgtgaactg

SEQ ID NO: 197003 - DNA, 15 bp, Homo sapiens
ccctgggtgtgaact

SEQ ID NO: 197004 - DNA, 15 bp, Homo sapiens
tccctgggtgtgaac

SEQ ID NO: 197005 - DNA, 15 bp, Homo sapiens
ctccctgggtgtgaa

SEQ ID NO: 197006 - DNA, 15 bp, Homo sapiens
cctccctgggtgtga

SEQ ID NO: 197007 - DNA, 15 bp, Homo sapiens
tcctccctgggtgtg

SEQ ID NO: 197008 - DNA, 15 bp, Homo sapiens
ctcctccctgggtgt

SEQ ID NO: 197009 - DNA, 15 bp, Homo sapiens
tctcctccctgggtg

SEQ ID NO: 197010 - DNA, 15 bp, Homo sapiens
atctcctccctgggt

SEQ ID NO: 197011 - DNA, 15 bp, Homo sapiens
catctcctccctggg

SEQ ID NO: 197012 - DNA, 15 bp, Homo sapiens
ccatctcctccctgg

SEQ ID NO: 197013 - DNA, 15 bp, Homo sapiens
tccatctcctccctg

SEQ ID NO: 197014 - DNA, 15 bp, Homo sapiens
ctccatctcctccct

SEQ ID NO: 197015 - DNA, 15 bp, Homo sapiens
gctccatctcctccc

SEQ ID NO: 197016 - DNA, 15 bp, Homo sapiens
ggctccatctcctcc

SEQ ID NO: 197017 - DNA, 15 bp, Homo sapiens
gggctccatctcctc

SEQ ID NO: 197018 - DNA, 15 bp, Homo sapiens
ggggctccatctcct

SEQ ID NO: 197019 - DNA, 15 bp, Homo sapiens
tggggctccatctcc

SEQ ID NO: 197020 - DNA, 15 bp, Homo sapiens
gtggggctccatctc

SEQ ID NO: 197021 - DNA, 15 bp, Homo sapiens
tgtggggctccatct

SEQ ID NO: 197022 - DNA, 15 bp, Homo sapiens
gtgtggggctccatc

SEQ ID NO: 197023 - DNA, 15 bp, Homo sapiens
agtgtggggctccat

SEQ ID NO: 197024 - DNA, 15 bp, Homo sapiens
cagtgtggggctcca

SEQ ID NO: 197025 - DNA, 15 bp, Homo sapiens
gcagtgtggggctcc

SEQ ID NO: 197026 - DNA, 15 bp, Homo sapiens
tgcagtgtggggctc

SEQ ID NO: 197027 - DNA, 15 bp, Homo sapiens
gtgcagtgtggggct

SEQ ID NO: 197028 - DNA, 15 bp, Homo sapiens
ggtgcagtgtggggc

SEQ ID NO: 197029 - DNA, 15 bp, Homo sapiens
tggtgcagtgtgggg

SEQ ID NO: 197030 - DNA, 15 bp, Homo sapiens
ctggtgcagtgtggg

SEQ ID NO: 197031 - DNA, 15 bp, Homo sapiens
gctggtgcagtgtgg

SEQ ID NO: 197032 - DNA, 15 bp, Homo sapiens
tgctggtgcagtgtg

SEQ ID NO: 197033 - DNA, 15 bp, Homo sapiens
gtgctggtgcagtgt

SEQ ID NO: 197034 - DNA, 15 bp, Homo sapiens
tgtgctggtgcagtg

SEQ ID NO: 197035 - DNA, 15 bp, Homo sapiens
gtgtgctggtgcagt

SEQ ID NO: 197036 - DNA, 15 bp, Homo sapiens
cgtgtgctggtgcag

SEQ ID NO: 197037 - DNA, 15 bp, Homo sapiens
tcgtgtgctggtgca

SEQ ID NO: 197038 - DNA, 15 bp, Homo sapiens
gtcgtgtgctggtgc

SEQ ID NO: 197039 - DNA, 15 bp, Homo sapiens
agtcgtgtgctggtg

SEQ ID NO: 197040 - DNA, 15 bp, Homo sapiens
gagtcgtgtgctggt

SEQ ID NO: 197041 - DNA, 15 bp, Homo sapiens
ggagtcgtgtgctgg

SEQ ID NO: 197042 - DNA, 15 bp, Homo sapiens
tggagtcgtgtgctg

SEQ ID NO: 197043 - DNA, 15 bp, Homo sapiens
ctggagtcgtgtgct

SEQ ID NO: 197044 - DNA, 15 bp, Homo sapiens
gctggagtcgtgtgc

SEQ ID NO: 197045 - DNA, 15 bp, Homo sapiens
agctggagtcgtgtg

SEQ ID NO: 197046 - DNA, 15 bp, Homo sapiens
gagctggagtcgtgt

SEQ ID NO: 197047 - DNA, 15 bp, Homo sapiens
ggagctggagtcgtg

SEQ ID NO: 197048 - DNA, 15 bp, Homo sapiens
tggagctggagtcgt

SEQ ID NO: 197049 - DNA, 15 bp, Homo sapiens
ttggagctggagtcg

SEQ ID NO: 197050 - DNA, 15 bp, Homo sapiens
gttggagctggagtc

SEQ ID NO: 197051 - DNA, 15 bp, Homo sapiens
agttggagctggagt

SEQ ID NO: 197052 - DNA, 15 bp, Homo sapiens
tagttggagctggag

SEQ ID NO: 197053 - DNA, 15 bp, Homo sapiens
ctagttggagctgga

SEQ ID NO: 197054 - DNA, 15 bp, Homo sapiens
cctagttggagctgg

SEQ ID NO: 197055 - DNA, 15 bp, Homo sapiens
acctagttggagctg

SEQ ID NO: 197056 - DNA, 15 bp, Homo sapiens
cacctagttggagct

SEQ ID NO: 197057 - DNA, 15 bp, Homo sapiens
ccacctagttggagc

SEQ ID NO: 197058 - DNA, 15 bp, Homo sapiens
cccacctagttggag

SEQ ID NO: 197059 - DNA, 15 bp, Homo sapiens
acccacctagttgga

SEQ ID NO: 197060 - DNA, 15 bp, Homo sapiens
cacccacctagttgg

SEQ ID NO: 197061 - DNA, 15 bp, Homo sapiens
acacccacctagttg

SEQ ID NO: 197062 - DNA, 15 bp, Homo sapiens
aacacccacctagtt

SEQ ID NO: 197063 - DNA, 15 bp, Homo sapiens
caacacccacctagt

SEQ ID NO: 197064 - DNA, 15 bp, Homo sapiens
tcaacacccacctag

SEQ ID NO: 197065 - DNA, 15 bp, Homo sapiens
atcaacacccaccta

SEQ ID NO: 197066 - DNA, 15 bp, Homo sapiens
catcaacacccacct

SEQ ID NO: 197067 - DNA, 15 bp, Homo sapiens
gcatcaacacccacc

SEQ ID NO: 197068 - DNA, 15 bp, Homo sapiens
agcatcaacacccac

SEQ ID NO: 197069 - DNA, 15 bp, Homo sapiens
cagcatcaacaccca

SEQ ID NO: 197070 - DNA, 15 bp, Homo sapiens
tcagcatcaacaccc

SEQ ID NO: 197071 - DNA, 15 bp, Homo sapiens
ttcagcatcaacacc

SEQ ID NO: 197072 - DNA, 15 bp, Homo sapiens
cttcagcatcaacac

SEQ ID NO: 197073 - DNA, 15 bp, Homo sapiens
ccttcagcatcaaca

SEQ ID NO: 197074 - DNA, 15 bp, Homo sapiens
gccttcagcatcaac

SEQ ID NO: 197075 - DNA, 15 bp, Homo sapiens
agccttcagcatcaa

SEQ ID NO: 197076 - DNA, 15 bp, Homo sapiens
cagccttcagcatca

SEQ ID NO: 197077 - DNA, 15 bp, Homo sapiens
acagccttcagcatc

SEQ ID NO: 197078 - DNA, 15 bp, Homo sapiens
cacagccttcagcat

SEQ ID NO: 197079 - DNA, 15 bp, Homo sapiens
tcacagccttcagca

SEQ ID NO: 197080 - DNA, 15 bp, Homo sapiens
gtcacagccttcagc

SEQ ID NO: 197081 - DNA, 15 bp, Homo sapiens
tgtcacagccttcag

SEQ ID NO: 197082 - DNA, 15 bp, Homo sapiens
atgtcacagccttca

SEQ ID NO: 197083 - DNA, 15 bp, Homo sapiens
catgtcacagccttc

SEQ ID NO: 197084 - DNA, 15 bp, Homo sapiens
gcatgtcacagcctt

SEQ ID NO: 197085 - DNA, 15 bp, Homo sapiens
tgcatgtcacagcct

SEQ ID NO: 197086 - DNA, 15 bp, Homo sapiens
ttgcatgtcacagcc

SEQ ID NO: 197087 - DNA, 15 bp, Homo sapiens
tttgcatgtcacagc

SEQ ID NO: 197088 - DNA, 15 bp, Homo sapiens
atttgcatgtcacag

SEQ ID NO: 197089 - DNA, 15 bp, Homo sapiens
tatttgcatgtcaca

SEQ ID NO: 197090 - DNA, 15 bp, Homo sapiens
gtatttgcatgtcac

SEQ ID NO: 197091 - DNA, 15 bp, Homo sapiens
ggtatttgcatgtca

SEQ ID NO: 197092 - DNA, 15 bp, Homo sapiens
gggtatttgcatgtc

SEQ ID NO: 197093 - DNA, 15 bp, Homo sapiens
ggggtatttgcatgt

SEQ ID NO: 197094 - DNA, 15 bp, Homo sapiens
gggggtatttgcatg

SEQ ID NO: 197095 - DNA, 15 bp, Homo sapiens
ggggggtatttgcat

SEQ ID NO: 197096 - DNA, 15 bp, Homo sapiens
tggggggtatttgca

SEQ ID NO: 197097 - DNA, 15 bp, Homo sapiens
ctggggggtatttgc

SEQ ID NO: 197098 - DNA, 15 bp, Homo sapiens
cctggggggtatttg

SEQ ID NO: 197099 - DNA, 15 bp, Homo sapiens
tcctggggggtattt

SEQ ID NO: 197100 - DNA, 15 bp, Homo sapiens
atcctggggggtatt

SEQ ID NO: 197101 - DNA, 15 bp, Homo sapiens
gatcctggggggtat

SEQ ID NO: 197102 - DNA, 15 bp, Homo sapiens
agatcctggggggta

SEQ ID NO: 197103 - DNA, 15 bp, Homo sapiens
gagatcctggggggt

SEQ ID NO: 197104 - DNA, 15 bp, Homo sapiens
ggagatcctgggggg

SEQ ID NO: 197105 - DNA, 15 bp, Homo sapiens
aggagatcctggggg

SEQ ID NO: 197106 - DNA, 15 bp, Homo sapiens
aaggagatcctgggg

SEQ ID NO: 197107 - DNA, 15 bp, Homo sapiens
caaggagatcctggg

SEQ ID NO: 197108 - DNA, 15 bp, Homo sapiens
acaaggagatcctgg

SEQ ID NO: 197109 - DNA, 15 bp, Homo sapiens
gacaaggagatcctg

SEQ ID NO: 197110 - DNA, 15 bp, Homo sapiens
tgacaaggagatcct

SEQ ID NO: 197111 - DNA, 15 bp, Homo sapiens
gtgacaaggagatcc

SEQ ID NO: 197112 - DNA, 15 bp, Homo sapiens
ggtgacaaggagatc

SEQ ID NO: 197113 - DNA, 15 bp, Homo sapiens
gggtgacaaggagat

SEQ ID NO: 197114 - DNA, 15 bp, Homo sapiens
ggggtgacaaggaga

SEQ ID NO: 197115 - DNA, 15 bp, Homo sapiens
cggggtgacaaggag

SEQ ID NO: 197116 - DNA, 15 bp, Homo sapiens
tcggggtgacaagga

SEQ ID NO: 197117 - DNA, 15 bp, Homo sapiens
gtcggggtgacaagg

SEQ ID NO: 197118 - DNA, 15 bp, Homo sapiens
ggtcggggtgacaag

SEQ ID NO: 197119 - DNA, 15 bp, Homo sapiens
tggtcggggtgacaa

SEQ ID NO: 197120 - DNA, 15 bp, Homo sapiens
gtggtcggggtgaca

SEQ ID NO: 197121 - DNA, 15 bp, Homo sapiens
ggtggtcggggtgac

SEQ ID NO: 197122 - DNA, 15 bp, Homo sapiens
tggtggtcggggtga

SEQ ID NO: 197123 - DNA, 15 bp, Homo sapiens
gtggtggtcggggtg

SEQ ID NO: 197124 - DNA, 15 bp, Homo sapiens
ggtggtggtcggggt

SEQ ID NO: 197125 - DNA, 15 bp, Homo sapiens
tggtggtggtcgggg

SEQ ID NO: 197126 - DNA, 15 bp, Homo sapiens
gtggtggtggtcggg

SEQ ID NO: 197127 - DNA, 15 bp, Homo sapiens
ggtggtggtggtcgg

SEQ ID NO: 197128 - DNA, 15 bp, Homo sapiens
tggtggtggtggtcg

SEQ ID NO: 197129 - DNA, 15 bp, Homo sapiens
ttggtggtggtggtc

SEQ ID NO: 197130 - DNA, 15 bp, Homo sapiens
tttggtggtggtggt

SEQ ID NO: 197131 - DNA, 15 bp, Homo sapiens
ctttggtggtggtgg

SEQ ID NO: 197132 - DNA, 15 bp, Homo sapiens
gctttggtggtggtg

SEQ ID NO: 197133 - DNA, 15 bp, Homo sapiens
ggctttggtggtggt

SEQ ID NO: 197134 - DNA, 15 bp, Homo sapiens
gggctttggtggtgg

SEQ ID NO: 197135 - DNA, 15 bp, Homo sapiens
tgggctttggtggtg

SEQ ID NO: 197136 - DNA, 15 bp, Homo sapiens
ctgggctttggtggt

SEQ ID NO: 197137 - DNA, 15 bp, Homo sapiens
cctgggctttggtgg

SEQ ID NO: 197138 - DNA, 15 bp, Homo sapiens
gcctgggctttggtg

SEQ ID NO: 197139 - DNA, 15 bp, Homo sapiens
tgcctgggctttggt

SEQ ID NO: 197140 - DNA, 15 bp, Homo sapiens
gtgcctgggctttgg

SEQ ID NO: 197141 - DNA, 15 bp, Homo sapiens
ggtgcctgggctttg

SEQ ID NO: 197142 - DNA, 15 bp, Homo sapiens
tggtgcctgggcttt

SEQ ID NO: 197143 - DNA, 15 bp, Homo sapiens
ctggtgcctgggctt

SEQ ID NO: 197144 - DNA, 15 bp, Homo sapiens
cctggtgcctgggct

SEQ ID NO: 197145 - DNA, 15 bp, Homo sapiens
gcctggtgcctgggc

SEQ ID NO: 197146 - DNA, 15 bp, Homo sapiens
ggcctggtgcctggg

SEQ ID NO: 197147 - DNA, 15 bp, Homo sapiens
gggcctggtgcctgg

SEQ ID NO: 197148 - DNA, 15 bp, Homo sapiens
ggggcctggtgcctg

SEQ ID NO: 197149 - DNA, 15 bp, Homo sapiens
aggggcctggtgcct

SEQ ID NO: 197150 - DNA, 15 bp, Homo sapiens
gaggggcctggtgcc

SEQ ID NO: 197151 - DNA, 15 bp, Homo sapiens
agaggggcctggtgc

SEQ ID NO: 197152 - DNA, 15 bp, Homo sapiens
gagaggggcctggtg

SEQ ID NO: 197153 - DNA, 15 bp, Homo sapiens
agagaggggcctggt

SEQ ID NO: 197154 - DNA, 15 bp, Homo sapiens
aagagaggggcctgg

SEQ ID NO: 197155 - DNA, 15 bp, Homo sapiens
gaagagaggggcctg

SEQ ID NO: 197156 - DNA, 15 bp, Homo sapiens
agaagagaggggcct

SEQ ID NO: 197157 - DNA, 15 bp, Homo sapiens
gagaagagaggggcc

SEQ ID NO: 197158 - DNA, 15 bp, Homo sapiens
ggagaagagaggggc

SEQ ID NO: 197159 - DNA, 15 bp, Homo sapiens
tggagaagagagggg

SEQ ID NO: 197160 - DNA, 15 bp, Homo sapiens
ctggagaagagaggg

SEQ ID NO: 197161 - DNA, 15 bp, Homo sapiens
cctggagaagagagg

SEQ ID NO: 197162 - DNA, 15 bp, Homo sapiens
tcctggagaagagag

SEQ ID NO: 197163 - DNA, 15 bp, Homo sapiens
gtcctggagaagaga

SEQ ID NO: 197164 - DNA, 15 bp, Homo sapiens
ggtcctggagaagag

SEQ ID NO: 197165 - DNA, 15 bp, Homo sapiens
gggtcctggagaaga

SEQ ID NO: 197166 - DNA, 15 bp, Homo sapiens
tgggtcctggagaag

SEQ ID NO: 197167 - DNA, 15 bp, Homo sapiens
ctgggtcctggagaa

SEQ ID NO: 197168 - DNA, 15 bp, Homo sapiens
cctgggtcctggaga

SEQ ID NO: 197169 - DNA, 15 bp, Homo sapiens
gcctgggtcctggag

SEQ ID NO: 197170 - DNA, 15 bp, Homo sapiens
tgcctgggtcctgga

SEQ ID NO: 197171 - DNA, 15 bp, Homo sapiens
atgcctgggtcctgg

SEQ ID NO: 197172 - DNA, 15 bp, Homo sapiens
aatgcctgggtcctg

SEQ ID NO: 197173 - DNA, 15 bp, Homo sapiens
gaatgcctgggtcct

SEQ ID NO: 197174 - DNA, 15 bp, Homo sapiens
tgaatgcctgggtcc

SEQ ID NO: 197175 - DNA, 15 bp, Homo sapiens
ttgaatgcctgggtc

SEQ ID NO: 197176 - DNA, 15 bp, Homo sapiens
cttgaatgcctgggt

SEQ ID NO: 197177 - DNA, 15 bp, Homo sapiens
gcttgaatgcctggg

SEQ ID NO: 197178 - DNA, 15 bp, Homo sapiens
ggcttgaatgcctgg

SEQ ID NO: 197179 - DNA, 15 bp, Homo sapiens
gggcttgaatgcctg

SEQ ID NO: 197180 - DNA, 15 bp, Homo sapiens
ggggcttgaatgcct

SEQ ID NO: 197181 - DNA, 15 bp, Homo sapiens
cggggcttgaatgcc

SEQ ID NO: 197182 - DNA, 15 bp, Homo sapiens
gcggggcttgaatgc

SEQ ID NO: 197183 - DNA, 15 bp, Homo sapiens
ggcggggcttgaatg

SEQ ID NO: 197184 - DNA, 15 bp, Homo sapiens
gggcggggcttgaat

SEQ ID NO: 197185 - DNA, 15 bp, Homo sapiens
cgggcggggcttgaa

SEQ ID NO: 197186 - DNA, 15 bp, Homo sapiens
tcgggcggggcttga

SEQ ID NO: 197187 - DNA, 15 bp, Homo sapiens
gtcgggcggggcttg

SEQ ID NO: 197188 - DNA, 15 bp, Homo sapiens
agtcgggcggggctt

SEQ ID NO: 197189 - DNA, 15 bp, Homo sapiens
gagtcgggcggggct

SEQ ID NO: 197190 - DNA, 15 bp, Homo sapiens
agagtcgggcggggc

SEQ ID NO: 197191 - DNA, 15 bp, Homo sapiens
gagagtcgggcgggg

SEQ ID NO: 197192 - DNA, 15 bp, Homo sapiens
tgagagtcgggcggg

SEQ ID NO: 197193 - DNA, 15 bp, Homo sapiens
ttgagagtcgggcgg

SEQ ID NO: 197194 - DNA, 15 bp, Homo sapiens
attgagagtcgggcg

SEQ ID NO: 197195 - DNA, 15 bp, Homo sapiens
cattgagagtcgggc

SEQ ID NO: 197196 - DNA, 15 bp, Homo sapiens
ccattgagagtcggg

SEQ ID NO: 197197 - DNA, 15 bp, Homo sapiens
accattgagagtcgg

SEQ ID NO: 197198 - DNA, 15 bp, Homo sapiens
gaccattgagagtcg

SEQ ID NO: 197199 - DNA, 15 bp, Homo sapiens
ggaccattgagagtc

SEQ ID NO: 197200 - DNA, 15 bp, Homo sapiens
aggaccattgagagt

SEQ ID NO: 197201 - DNA, 15 bp, Homo sapiens
aaggaccattgagag

SEQ ID NO: 197202 - DNA, 15 bp, Homo sapiens
aaaggaccattgaga

SEQ ID NO: 197203 - DNA, 15 bp, Homo sapiens
caaaggaccattgag

SEQ ID NO: 197204 - DNA, 15 bp, Homo sapiens
acaaaggaccattga

SEQ ID NO: 197205 - DNA, 15 bp, Homo sapiens
gacaaaggaccattg

SEQ ID NO: 197206 - DNA, 15 bp, Homo sapiens
ggacaaaggaccatt

SEQ ID NO: 197207 - DNA, 15 bp, Homo sapiens
gggacaaaggaccat

SEQ ID NO: 197208 - DNA, 15 bp, Homo sapiens
cgggacaaaggacca

SEQ ID NO: 197209 - DNA, 15 bp, Homo sapiens
ccgggacaaaggacc

SEQ ID NO: 197210 - DNA, 15 bp, Homo sapiens
tccgggacaaaggac

SEQ ID NO: 197211 - DNA, 15 bp, Homo sapiens
gtccgggacaaagga

SEQ ID NO: 197212 - DNA, 15 bp, Homo sapiens
agtccgggacaaagg

SEQ ID NO: 197213 - DNA, 15 bp, Homo sapiens
cagtccgggacaaag

SEQ ID NO: 197214 - DNA, 15 bp, Homo sapiens
ccagtccgggacaaa

SEQ ID NO: 197215 - DNA, 15 bp, Homo sapiens
cccagtccgggacaa

SEQ ID NO: 197216 - DNA, 15 bp, Homo sapiens
tcccagtccgggaca

SEQ ID NO: 197217 - DNA, 15 bp, Homo sapiens
ttcccagtccgggac

SEQ ID NO: 197218 - DNA, 15 bp, Homo sapiens
tttcccagtccggga

SEQ ID NO: 197219 - DNA, 15 bp, Homo sapiens
ctttcccagtccggg

SEQ ID NO: 197220 - DNA, 15 bp, Homo sapiens
cctttcccagtccgg

SEQ ID NO: 197221 - DNA, 15 bp, Homo sapiens
gcctttcccagtccg

SEQ ID NO: 197222 - DNA, 15 bp, Homo sapiens
tgcctttcccagtcc

SEQ ID NO: 197223 - DNA, 15 bp, Homo sapiens
gtgcctttcccagtc

SEQ ID NO: 197224 - DNA, 15 bp, Homo sapiens
cgtgcctttcccagt

SEQ ID NO: 197225 - DNA, 15 bp, Homo sapiens
ccgtgcctttcccag

SEQ ID NO: 197226 - DNA, 15 bp, Homo sapiens
cccgtgcctttccca

SEQ ID NO: 197227 - DNA, 15 bp, Homo sapiens
gcccgtgcctttccc

SEQ ID NO: 197228 - DNA, 15 bp, Homo sapiens
tgcccgtgcctttcc

SEQ ID NO: 197229 - DNA, 15 bp, Homo sapiens
ctgcccgtgcctttc

SEQ ID NO: 197230 - DNA, 15 bp, Homo sapiens
tctgcccgtgccttt

SEQ ID NO: 197231 - DNA, 15 bp, Homo sapiens
ctctgcccgtgcctt

SEQ ID NO: 197232 - DNA, 15 bp, Homo sapiens
actctgcccgtgcct

SEQ ID NO: 197233 - DNA, 15 bp, Homo sapiens
gactctgcccgtgcc

SEQ ID NO: 197234 - DNA, 15 bp, Homo sapiens
agactctgcccgtgc

SEQ ID NO: 197235 - DNA, 15 bp, Homo sapiens
cagactctgcccgtg

SEQ ID NO: 197236 - DNA, 15 bp, Homo sapiens
tcagactctgcccgt

SEQ ID NO: 197237 - DNA, 15 bp, Homo sapiens
gtcagactctgcccg

SEQ ID NO: 197238 - DNA, 15 bp, Homo sapiens
tgtcagactctgccc

SEQ ID NO: 197239 - DNA, 15 bp, Homo sapiens
atgtcagactctgcc

SEQ ID NO: 197240 - DNA, 15 bp, Homo sapiens
gatgtcagactctgc

SEQ ID NO: 197241 - DNA, 15 bp, Homo sapiens
tgatgtcagactctg

SEQ ID NO: 197242 - DNA, 15 bp, Homo sapiens
atgatgtcagactct

SEQ ID NO: 197243 - DNA, 15 bp, Homo sapiens
catgatgtcagactc

SEQ ID NO: 197244 - DNA, 15 bp, Homo sapiens
tcatgatgtcagact

SEQ ID NO: 197245 - DNA, 15 bp, Homo sapiens
ttcatgatgtcagac

SEQ ID NO: 197246 - DNA, 15 bp, Homo sapiens
cttcatgatgtcaga

SEQ ID NO: 197247 - DNA, 15 bp, Homo sapiens
gcttcatgatgtcag

SEQ ID NO: 197248 - DNA, 15 bp, Homo sapiens
ggcttcatgatgtca

SEQ ID NO: 197249 - DNA, 15 bp, Homo sapiens
aggcttcatgatgtc

SEQ ID NO: 197250 - DNA, 15 bp, Homo sapiens
caggcttcatgatgt

SEQ ID NO: 197251 - DNA, 15 bp, Homo sapiens
ccaggcttcatgatg

SEQ ID NO: 197252 - DNA, 15 bp, Homo sapiens
cccaggcttcatgat

SEQ ID NO: 197253 - DNA, 15 bp, Homo sapiens
ccccaggcttcatga

SEQ ID NO: 197254 - DNA, 15 bp, Homo sapiens
accccaggcttcatg

SEQ ID NO: 197255 - DNA, 15 bp, Homo sapiens
caccccaggcttcat

SEQ ID NO: 197256 - DNA, 15 bp, Homo sapiens
ccaccccaggcttca

SEQ ID NO: 197257 - DNA, 15 bp, Homo sapiens
cccaccccaggcttc

SEQ ID NO: 197258 - DNA, 15 bp, Homo sapiens
ccccaccccaggctt

SEQ ID NO: 197259 - DNA, 15 bp, Homo sapiens
cccccaccccaggct

SEQ ID NO: 197260 - DNA, 15 bp, Homo sapiens
acccccaccccaggc

SEQ ID NO: 197261 - DNA, 15 bp, Homo sapiens
cacccccaccccagg

SEQ ID NO: 197262 - DNA, 15 bp, Homo sapiens
ccacccccaccccag

SEQ ID NO: 197263 - DNA, 15 bp, Homo sapiens
cccacccccacccca

SEQ ID NO: 197264 - DNA, 15 bp, Homo sapiens
tcccacccccacccc

SEQ ID NO: 197265 - DNA, 15 bp, Homo sapiens
gtcccacccccaccc

SEQ ID NO: 197266 - DNA, 15 bp, Homo sapiens
agtcccacccccacc

SEQ ID NO: 197267 - DNA, 15 bp, Homo sapiens
gagtcccacccccac

SEQ ID NO: 197268 - DNA, 15 bp, Homo sapiens
ggagtcccaccccca

SEQ ID NO: 197269 - DNA, 15 bp, Homo sapiens
gggagtcccaccccc

SEQ ID NO: 197270 - DNA, 15 bp, Homo sapiens
ggggagtcccacccc

SEQ ID NO: 197271 - DNA, 15 bp, Homo sapiens
gggggagtcccaccc

SEQ ID NO: 197272 - DNA, 15 bp, Homo sapiens
agggggagtcccacc

SEQ ID NO: 197273 - DNA, 15 bp, Homo sapiens
gagggggagtcccac

SEQ ID NO: 197274 - DNA, 15 bp, Homo sapiens
ggagggggagtccca

SEQ ID NO: 197275 - DNA, 15 bp, Homo sapiens
gggagggggagtccc

SEQ ID NO: 197276 - DNA, 15 bp, Homo sapiens
ggggagggggagtcc

SEQ ID NO: 197277 - DNA, 15 bp, Homo sapiens
gggggagggggagtc

SEQ ID NO: 197278 - DNA, 15 bp, Homo sapiens
agggggagggggagt

SEQ ID NO: 197279 - DNA, 15 bp, Homo sapiens
gagggggagggggag

SEQ ID NO: 197280 - DNA, 15 bp, Homo sapiens
ggagggggaggggga

SEQ ID NO: 197281 - DNA, 15 bp, Homo sapiens
tggagggggaggggg

SEQ ID NO: 197282 - DNA, 15 bp, Homo sapiens
ttggagggggagggg

SEQ ID NO: 197283 - DNA, 15 bp, Homo sapiens
gttggagggggaggg

SEQ ID NO: 197284 - DNA, 15 bp, Homo sapiens
agttggagggggagg

SEQ ID NO: 197285 - DNA, 15 bp, Homo sapiens
gagttggagggggag

SEQ ID NO: 197286 - DNA, 15 bp, Homo sapiens
ggagttggaggggga

SEQ ID NO: 197287 - DNA, 15 bp, Homo sapiens
gggagttggaggggg

SEQ ID NO: 197288 - DNA, 15 bp, Homo sapiens
ggggagttggagggg

SEQ ID NO: 197289 - DNA, 15 bp, Homo sapiens
gggggagttggaggg

SEQ ID NO: 197290 - DNA, 15 bp, Homo sapiens
ggggggagttggagg

SEQ ID NO: 197291 - DNA, 15 bp, Homo sapiens
gggggggagttggag

SEQ ID NO: 197292 - DNA, 15 bp, Homo sapiens
tgggggggagttgga

SEQ ID NO: 197293 - DNA, 15 bp, Homo sapiens
ctgggggggagttgg

SEQ ID NO: 197294 - DNA, 15 bp, Homo sapiens
gctgggggggagttg

SEQ ID NO: 197295 - DNA, 15 bp, Homo sapiens
ggctgggggggagtt

SEQ ID NO: 197296 - DNA, 15 bp, Homo sapiens
gggctgggggggagt

SEQ ID NO: 197297 - DNA, 15 bp, Homo sapiens
ggggctgggggggag

SEQ ID NO: 197298 - DNA, 15 bp, Homo sapiens
tggggctggggggga

SEQ ID NO: 197299 - DNA, 15 bp, Homo sapiens
gtggggctggggggg

SEQ ID NO: 197300 - DNA, 15 bp, Homo sapiens
tgtggggctgggggg

SEQ ID NO: 197301 - DNA, 15 bp, Homo sapiens
ttgtggggctggggg

SEQ ID NO: 197302 - DNA, 15 bp, Homo sapiens
gttgtggggctgggg

SEQ ID NO: 197303 - DNA, 15 bp, Homo sapiens
cgttgtggggctggg

SEQ ID NO: 197304 - DNA, 15 bp, Homo sapiens
gcgttgtggggctgg

SEQ ID NO: 197305 - DNA, 15 bp, Homo sapiens
agcgttgtggggctg

SEQ ID NO: 197306 - DNA, 15 bp, Homo sapiens
aagcgttgtggggct

SEQ ID NO: 197307 - DNA, 15 bp, Homo sapiens
gaagcgttgtggggc

SEQ ID NO: 197308 - DNA, 15 bp, Homo sapiens
agaagcgttgtgggg

SEQ ID NO: 197309 - DNA, 15 bp, Homo sapiens
gagaagcgttgtggg

SEQ ID NO: 197310 - DNA, 15 bp, Homo sapiens
agagaagcgttgtgg

SEQ ID NO: 197311 - DNA, 15 bp, Homo sapiens
gagagaagcgttgtg

SEQ ID NO: 197312 - DNA, 15 bp, Homo sapiens
ggagagaagcgttgt

SEQ ID NO: 197313 - DNA, 15 bp, Homo sapiens
gggagagaagcgttg

SEQ ID NO: 197314 - DNA, 15 bp, Homo sapiens
agggagagaagcgtt

SEQ ID NO: 197315 - DNA, 15 bp, Homo sapiens
cagggagagaagcgt

SEQ ID NO: 197316 - DNA, 15 bp, Homo sapiens
ccagggagagaagcg

SEQ ID NO: 197317 - DNA, 15 bp, Homo sapiens
accagggagagaagc

SEQ ID NO: 197318 - DNA, 15 bp, Homo sapiens
gaccagggagagaag

SEQ ID NO: 197319 - DNA, 15 bp, Homo sapiens
agaccagggagagaa

SEQ ID NO: 197320 - DNA, 15 bp, Homo sapiens
cagaccagggagaga

SEQ ID NO: 197321 - DNA, 15 bp, Homo sapiens
tcagaccagggagag

SEQ ID NO: 197322 - DNA, 15 bp, Homo sapiens
ctcagaccagggaga

SEQ ID NO: 197323 - DNA, 15 bp, Homo sapiens
cctcagaccagggag

SEQ ID NO: 197324 - DNA, 15 bp, Homo sapiens
ccctcagaccaggga

SEQ ID NO: 197325 - DNA, 15 bp, Homo sapiens
tccctcagaccaggg

SEQ ID NO: 197326 - DNA, 15 bp, Homo sapiens
atccctcagaccagg

SEQ ID NO: 197327 - DNA, 15 bp, Homo sapiens
aatccctcagaccag

SEQ ID NO: 197328 - DNA, 15 bp, Homo sapiens
aaatccctcagacca

SEQ ID NO: 197329 - DNA, 15 bp, Homo sapiens
gaaatccctcagacc

SEQ ID NO: 197330 - DNA, 15 bp, Homo sapiens
ggaaatccctcagac

SEQ ID NO: 197331 - DNA, 15 bp, Homo sapiens
gggaaatccctcaga

SEQ ID NO: 197332 - DNA, 15 bp, Homo sapiens
ggggaaatccctcag

SEQ ID NO: 197333 - DNA, 15 bp, Homo sapiens
cggggaaatccctca

SEQ ID NO: 197334 - DNA, 15 bp, Homo sapiens
gcggggaaatccctc

SEQ ID NO: 197335 - DNA, 15 bp, Homo sapiens
ggcggggaaatccct

SEQ ID NO: 197336 - DNA, 15 bp, Homo sapiens
gggcggggaaatccc

SEQ ID NO: 197337 - DNA, 15 bp, Homo sapiens
ggggcggggaaatcc

SEQ ID NO: 197338 - DNA, 15 bp, Homo sapiens
aggggcggggaaatc

SEQ ID NO: 197339 - DNA, 15 bp, Homo sapiens
gaggggcggggaaat

SEQ ID NO: 197340 - DNA, 15 bp, Homo sapiens
tgaggggcggggaaa

SEQ ID NO: 197341 - DNA, 15 bp, Homo sapiens
gtgaggggcggggaa

SEQ ID NO: 197342 - DNA, 15 bp, Homo sapiens
ggtgaggggcgggga

SEQ ID NO: 197343 - DNA, 15 bp, Homo sapiens
gggtgaggggcgggg

SEQ ID NO: 197344 - DNA, 15 bp, Homo sapiens
ggggtgaggggcggg

SEQ ID NO: 197345 - DNA, 15 bp, Homo sapiens
gggggtgaggggcgg

SEQ ID NO: 197346 - DNA, 15 bp, Homo sapiens
agggggtgaggggcg

SEQ ID NO: 197347 - DNA, 15 bp, Homo sapiens
cagggggtgaggggc

SEQ ID NO: 197348 - DNA, 15 bp, Homo sapiens
ccagggggtgagggg

SEQ ID NO: 197349 - DNA, 15 bp, Homo sapiens
cccagggggtgaggg

SEQ ID NO: 197350 - DNA, 15 bp, Homo sapiens
acccagggggtgagg

SEQ ID NO: 197351 - DNA, 15 bp, Homo sapiens
aacccagggggtgag

SEQ ID NO: 197352 - DNA, 15 bp, Homo sapiens
gaacccagggggtga

SEQ ID NO: 197353 - DNA, 15 bp, Homo sapiens
agaacccagggggtg

SEQ ID NO: 197354 - DNA, 15 bp, Homo sapiens
gagaacccagggggt

SEQ ID NO: 197355 - DNA, 15 bp, Homo sapiens
ggagaacccaggggg

SEQ ID NO: 197356 - DNA, 15 bp, Homo sapiens
gggagaacccagggg

SEQ ID NO: 197357 - DNA, 15 bp, Homo sapiens
agggagaacccaggg

SEQ ID NO: 197358 - DNA, 15 bp, Homo sapiens
aagggagaacccagg

SEQ ID NO: 197359 - DNA, 15 bp, Homo sapiens
caagggagaacccag

SEQ ID NO: 197360 - DNA, 15 bp, Homo sapiens
tcaagggagaaccca

SEQ ID NO: 197361 - DNA, 15 bp, Homo sapiens
ctcaagggagaaccc

SEQ ID NO: 197362 - DNA, 15 bp, Homo sapiens
tctcaagggagaacc

SEQ ID NO: 197363 - DNA, 15 bp, Homo sapiens
ctctcaagggagaac

SEQ ID NO: 197364 - DNA, 15 bp, Homo sapiens
gctctcaagggagaa

SEQ ID NO: 197365 - DNA, 15 bp, Homo sapiens
cgctctcaagggaga

SEQ ID NO: 197366 - DNA, 15 bp, Homo sapiens
tcgctctcaagggag

SEQ ID NO: 197367 - DNA, 15 bp, Homo sapiens
ctcgctctcaaggga

SEQ ID NO: 197368 - DNA, 15 bp, Homo sapiens
cctcgctctcaaggg

SEQ ID NO: 197369 - DNA, 15 bp, Homo sapiens
tcctcgctctcaagg

SEQ ID NO: 197370 - DNA, 15 bp, Homo sapiens
gtcctcgctctcaag

SEQ ID NO: 197371 - DNA, 15 bp, Homo sapiens
ggtcctcgctctcaa

SEQ ID NO: 197372 - DNA, 15 bp, Homo sapiens
gggtcctcgctctca

SEQ ID NO: 197373 - DNA, 15 bp, Homo sapiens
ggggtcctcgctctc

SEQ ID NO: 197374 - DNA, 15 bp, Homo sapiens
gggggtcctcgctct

SEQ ID NO: 197375 - DNA, 15 bp, Homo sapiens
ggggggtcctcgctc

SEQ ID NO: 197376 - DNA, 15 bp, Homo sapiens
gggggggtcctcgct

SEQ ID NO: 197377 - DNA, 15 bp, Homo sapiens
agggggggtcctcgc

SEQ ID NO: 197378 - DNA, 15 bp, Homo sapiens
gagggggggtcctcg

SEQ ID NO: 197379 - DNA, 15 bp, Homo sapiens
ggagggggggtcctc

SEQ ID NO: 197380 - DNA, 15 bp, Homo sapiens
gggagggggggtcct

SEQ ID NO: 197381 - DNA, 15 bp, Homo sapiens
ggggagggggggtcc

SEQ ID NO: 197382 - DNA, 15 bp, Homo sapiens
tggggagggggggtc

SEQ ID NO: 197383 - DNA, 15 bp, Homo sapiens
gtggggagggggggt

SEQ ID NO: 197384 - DNA, 15 bp, Homo sapiens
agtggggaggggggg

SEQ ID NO: 197385 - DNA, 15 bp, Homo sapiens
cagtggggagggggg

SEQ ID NO: 197386 - DNA, 15 bp, Homo sapiens
gcagtggggaggggg

SEQ ID NO: 197387 - DNA, 15 bp, Homo sapiens
agcagtggggagggg

SEQ ID NO: 197388 - DNA, 15 bp, Homo sapiens
gagcagtggggaggg

SEQ ID NO: 197389 - DNA, 15 bp, Homo sapiens
agagcagtggggagg

SEQ ID NO: 197390 - DNA, 15 bp, Homo sapiens
cagagcagtggggag

SEQ ID NO: 197391 - DNA, 15 bp, Homo sapiens
ccagagcagtgggga

SEQ ID NO: 197392 - DNA, 15 bp, Homo sapiens
gccagagcagtgggg

SEQ ID NO: 197393 - DNA, 15 bp, Homo sapiens
ggccagagcagtggg

SEQ ID NO: 197394 - DNA, 15 bp, Homo sapiens
aggccagagcagtgg

SEQ ID NO: 197395 - DNA, 15 bp, Homo sapiens
caggccagagcagtg

SEQ ID NO: 197396 - DNA, 15 bp, Homo sapiens
tcaggccagagcagt

SEQ ID NO: 197397 - DNA, 15 bp, Homo sapiens
ttcaggccagagcag

SEQ ID NO: 197398 - DNA, 15 bp, Homo sapiens
cttcaggccagagca

SEQ ID NO: 197399 - DNA, 15 bp, Homo sapiens
ccttcaggccagagc

SEQ ID NO: 197400 - DNA, 15 bp, Homo sapiens
tccttcaggccagag

SEQ ID NO: 197401 - DNA, 15 bp, Homo sapiens
ctccttcaggccaga

SEQ ID NO: 197402 - DNA, 15 bp, Homo sapiens
cctccttcaggccag

SEQ ID NO: 197403 - DNA, 15 bp, Homo sapiens
tcctccttcaggcca

SEQ ID NO: 197404 - DNA, 15 bp, Homo sapiens
gtcctccttcaggcc

SEQ ID NO: 197405 - DNA, 15 bp, Homo sapiens
tgtcctccttcaggc

SEQ ID NO: 197406 - DNA, 15 bp, Homo sapiens
ctgtcctccttcagg

SEQ ID NO: 197407 - DNA, 15 bp, Homo sapiens
cctgtcctccttcag

SEQ ID NO: 197408 - DNA, 15 bp, Homo sapiens
tcctgtcctccttca

SEQ ID NO: 197409 - DNA, 15 bp, Homo sapiens
ctcctgtcctccttc

SEQ ID NO: 197410 - DNA, 15 bp, Homo sapiens
tctcctgtcctcctt

SEQ ID NO: 197411 - DNA, 15 bp, Homo sapiens
atctcctgtcctcct

SEQ ID NO: 197412 - DNA, 15 bp, Homo sapiens
catctcctgtcctcc

SEQ ID NO: 197413 - DNA, 15 bp, Homo sapiens
acatctcctgtcctc

SEQ ID NO: 197414 - DNA, 15 bp, Homo sapiens
gacatctcctgtcct

SEQ ID NO: 197415 - DNA, 15 bp, Homo sapiens
ggacatctcctgtcc

SEQ ID NO: 197416 - DNA, 15 bp, Homo sapiens
gggacatctcctgtc

SEQ ID NO: 197417 - DNA, 15 bp, Homo sapiens
tgggacatctcctgt

SEQ ID NO: 197418 - DNA, 15 bp, Homo sapiens
ctgggacatctcctg

SEQ ID NO: 197419 - DNA, 15 bp, Homo sapiens
actgggacatctcct

SEQ ID NO: 197420 - DNA, 15 bp, Homo sapiens
cactgggacatctcc

SEQ ID NO: 197421 - DNA, 15 bp, Homo sapiens
tcactgggacatctc

SEQ ID NO: 197422 - DNA, 15 bp, Homo sapiens
ctcactgggacatct

SEQ ID NO: 197423 - DNA, 15 bp, Homo sapiens
cctcactgggacatc

SEQ ID NO: 197424 - DNA, 15 bp, Homo sapiens
gcctcactgggacat

SEQ ID NO: 197425 - DNA, 15 bp, Homo sapiens
agcctcactgggaca

SEQ ID NO: 197426 - DNA, 15 bp, Homo sapiens
cagcctcactgggac

SEQ ID NO: 197427 - DNA, 15 bp, Homo sapiens
tcagcctcactggga

SEQ ID NO: 197428 - DNA, 15 bp, Homo sapiens
ttcagcctcactggg

SEQ ID NO: 197429 - DNA, 15 bp, Homo sapiens
gttcagcctcactgg

SEQ ID NO: 197430 - DNA, 15 bp, Homo sapiens
tgttcagcctcactg

SEQ ID NO: 197431 - DNA, 15 bp, Homo sapiens
ctgttcagcctcact

SEQ ID NO: 197432 - DNA, 15 bp, Homo sapiens
gctgttcagcctcac

SEQ ID NO: 197433 - DNA, 15 bp, Homo sapiens
agctgttcagcctca

SEQ ID NO: 197434 - DNA, 15 bp, Homo sapiens
gagctgttcagcctc

SEQ ID NO: 197435 - DNA, 15 bp, Homo sapiens
tgagctgttcagcct

SEQ ID NO: 197436 - DNA, 15 bp, Homo sapiens
atgagctgttcagcc

SEQ ID NO: 197437 - DNA, 15 bp, Homo sapiens
catgagctgttcagc

SEQ ID NO: 197438 - DNA, 15 bp, Homo sapiens
ccatgagctgttcag

SEQ ID NO: 197439 - DNA, 15 bp, Homo sapiens
accatgagctgttca

SEQ ID NO: 197440 - DNA, 15 bp, Homo sapiens
caccatgagctgttc

SEQ ID NO: 197441 - DNA, 15 bp, Homo sapiens
tcaccatgagctgtt

SEQ ID NO: 197442 - DNA, 15 bp, Homo sapiens
ttcaccatgagctgt

SEQ ID NO: 197443 - DNA, 15 bp, Homo sapiens
tttcaccatgagctg

SEQ ID NO: 197444 - DNA, 15 bp, Homo sapiens
atttcaccatgagct

SEQ ID NO: 197445 - DNA, 15 bp, Homo sapiens
gatttcaccatgagc

SEQ ID NO: 197446 - DNA, 15 bp, Homo sapiens
tgatttcaccatgag

SEQ ID NO: 197447 - DNA, 15 bp, Homo sapiens
gtgatttcaccatga

SEQ ID NO: 197448 - DNA, 15 bp, Homo sapiens
agtgatttcaccatg

SEQ ID NO: 197449 - DNA, 15 bp, Homo sapiens
cagtgatttcaccat

SEQ ID NO: 197450 - DNA, 15 bp, Homo sapiens
gcagtgatttcacca

SEQ ID NO: 197451 - DNA, 15 bp, Homo sapiens
agcagtgatttcacc

SEQ ID NO: 197452 - DNA, 15 bp, Homo sapiens
cagcagtgatttcac

SEQ ID NO: 197453 - DNA, 15 bp, Homo sapiens
gcagcagtgatttca

SEQ ID NO: 197454 - DNA, 15 bp, Homo sapiens
tgcagcagtgatttc

SEQ ID NO: 197455 - DNA, 15 bp, Homo sapiens
gtgcagcagtgattt

SEQ ID NO: 197456 - DNA, 15 bp, Homo sapiens
agtgcagcagtgatt

SEQ ID NO: 197457 - DNA, 15 bp, Homo sapiens
aagtgcagcagtgat

SEQ ID NO: 197458 - DNA, 15 bp, Homo sapiens
aaagtgcagcagtga

SEQ ID NO: 197459 - DNA, 15 bp, Homo sapiens
caaagtgcagcagtg

SEQ ID NO: 197460 - DNA, 15 bp, Homo sapiens
acaaagtgcagcagt

SEQ ID NO: 197461 - DNA, 15 bp, Homo sapiens
gacaaagtgcagcag

SEQ ID NO: 197462 - DNA, 15 bp, Homo sapiens
tgacaaagtgcagca

SEQ ID NO: 197463 - DNA, 15 bp, Homo sapiens
gtgacaaagtgcagc

SEQ ID NO: 197464 - DNA, 15 bp, Homo sapiens
cgtgacaaagtgcag

SEQ ID NO: 197465 - DNA, 15 bp, Homo sapiens
gcgtgacaaagtgca

SEQ ID NO: 197466 - DNA, 15 bp, Homo sapiens
ggcgtgacaaagtgc

SEQ ID NO: 197467 - DNA, 15 bp, Homo sapiens
tggcgtgacaaagtg

SEQ ID NO: 197468 - DNA, 15 bp, Homo sapiens
gtggcgtgacaaagt

SEQ ID NO: 197469 - DNA, 15 bp, Homo sapiens
ggtggcgtgacaaag

SEQ ID NO: 197470 - DNA, 15 bp, Homo sapiens
aggtggcgtgacaaa

SEQ ID NO: 197471 - DNA, 15 bp, Homo sapiens
gaggtggcgtgacaa

SEQ ID NO: 197472 - DNA, 15 bp, Homo sapiens
ggaggtggcgtgaca

SEQ ID NO: 197473 - DNA, 15 bp, Homo sapiens
tggaggtggcgtgac

SEQ ID NO: 197474 - DNA, 15 bp, Homo sapiens
ctggaggtggcgtga

SEQ ID NO: 197475 - DNA, 15 bp, Homo sapiens
gctggaggtggcgtg

SEQ ID NO: 197476 - DNA, 15 bp, Homo sapiens
agctggaggtggcgt

SEQ ID NO: 197477 - DNA, 15 bp, Homo sapiens
cagctggaggtggcg

SEQ ID NO: 197478 - DNA, 15 bp, Homo sapiens
gcagctggaggtggc

SEQ ID NO: 197479 - DNA, 15 bp, Homo sapiens
ggcagctggaggtgg

SEQ ID NO: 197480 - DNA, 15 bp, Homo sapiens
gggcagctggaggtg

SEQ ID NO: 197481 - DNA, 15 bp, Homo sapiens
ggggcagctggaggt

SEQ ID NO: 197482 - DNA, 15 bp, Homo sapiens
cggggcagctggagg

SEQ ID NO: 197483 - DNA, 15 bp, Homo sapiens
tcggggcagctggag

SEQ ID NO: 197484 - DNA, 15 bp, Homo sapiens
ctcggggcagctgga

SEQ ID NO: 197485 - DNA, 15 bp, Homo sapiens
gctcggggcagctgg

SEQ ID NO: 197486 - DNA, 15 bp, Homo sapiens
ggctcggggcagctg

SEQ ID NO: 197487 - DNA, 15 bp, Homo sapiens
gggctcggggcagct

SEQ ID NO: 197488 - DNA, 15 bp, Homo sapiens
ggggctcggggcagc

SEQ ID NO: 197489 - DNA, 15 bp, Homo sapiens
gggggctcggggcag

SEQ ID NO: 197490 - DNA, 15 bp, Homo sapiens
tgggggctcggggca

SEQ ID NO: 197491 - DNA, 15 bp, Homo sapiens
gtgggggctcggggc

SEQ ID NO: 197492 - DNA, 15 bp, Homo sapiens
ggtgggggctcgggg

SEQ ID NO: 197493 - DNA, 15 bp, Homo sapiens
gggtgggggctcggg

SEQ ID NO: 197494 - DNA, 15 bp, Homo sapiens
tgggtgggggctcgg

SEQ ID NO: 197495 - DNA, 15 bp, Homo sapiens
gtgggtgggggctcg

SEQ ID NO: 197496 - DNA, 15 bp, Homo sapiens
ggtgggtgggggctc

SEQ ID NO: 197497 - DNA, 15 bp, Homo sapiens
aggtgggtgggggct

SEQ ID NO: 197498 - DNA, 15 bp, Homo sapiens
aaggtgggtgggggc

SEQ ID NO: 197499 - DNA, 15 bp, Homo sapiens
caaggtgggtggggg

SEQ ID NO: 197500 - DNA, 15 bp, Homo sapiens
gcaaggtgggtgggg

SEQ ID NO: 197501 - DNA, 15 bp, Homo sapiens
tgcaaggtgggtggg

SEQ ID NO: 197502 - DNA, 15 bp, Homo sapiens
ttgcaaggtgggtgg

SEQ ID NO: 197503 - DNA, 15 bp, Homo sapiens
tttgcaaggtgggtg

SEQ ID NO: 197504 - DNA, 15 bp, Homo sapiens
ttttgcaaggtgggt

SEQ ID NO: 197505 - DNA, 15 bp, Homo sapiens
cttttgcaaggtggg

SEQ ID NO: 197506 - DNA, 15 bp, Homo sapiens
acttttgcaaggtgg

SEQ ID NO: 197507 - DNA, 15 bp, Homo sapiens
gacttttgcaaggtg

SEQ ID NO: 197508 - DNA, 15 bp, Homo sapiens
tgacttttgcaaggt

SEQ ID NO: 197509 - DNA, 15 bp, Homo sapiens
atgacttttgcaagg

SEQ ID NO: 197510 - DNA, 15 bp, Homo sapiens
catgacttttgcaag

SEQ ID NO: 197511 - DNA, 15 bp, Homo sapiens
tcatgacttttgcaa

SEQ ID NO: 197512 - DNA, 15 bp, Homo sapiens
gtcatgacttttgca

SEQ ID NO: 197513 - DNA, 15 bp, Homo sapiens
ggtcatgacttttgc

SEQ ID NO: 197514 - DNA, 15 bp, Homo sapiens
tggtcatgacttttg

SEQ ID NO: 197515 - DNA, 15 bp, Homo sapiens
ttggtcatgactttt

SEQ ID NO: 197516 - DNA, 15 bp, Homo sapiens
cttggtcatgacttt

SEQ ID NO: 197517 - DNA, 15 bp, Homo sapiens
ccttggtcatgactt

SEQ ID NO: 197518 - DNA, 15 bp, Homo sapiens
cccttggtcatgact

SEQ ID NO: 197519 - DNA, 15 bp, Homo sapiens
ccccttggtcatgac

SEQ ID NO: 197520 - DNA, 15 bp, Homo sapiens
accccttggtcatga

SEQ ID NO: 197521 - DNA, 15 bp, Homo sapiens
caccccttggtcatg

SEQ ID NO: 197522 - DNA, 15 bp, Homo sapiens
ccaccccttggtcat

SEQ ID NO: 197523 - DNA, 15 bp, Homo sapiens
tccaccccttggtca

SEQ ID NO: 197524 - DNA, 15 bp, Homo sapiens
ttccaccccttggtc

SEQ ID NO: 197525 - DNA, 15 bp, Homo sapiens
attccaccccttggt

SEQ ID NO: 197526 - DNA, 15 bp, Homo sapiens
gattccaccccttgg

SEQ ID NO: 197527 - DNA, 15 bp, Homo sapiens
agattccaccccttg

SEQ ID NO: 197528 - DNA, 15 bp, Homo sapiens
cagattccacccctt

SEQ ID NO: 197529 - DNA, 15 bp, Homo sapiens
gcagattccacccct

SEQ ID NO: 197530 - DNA, 15 bp, Homo sapiens
tgcagattccacccc

SEQ ID NO: 197531 - DNA, 15 bp, Homo sapiens
gtgcagattccaccc

SEQ ID NO: 197532 - DNA, 15 bp, Homo sapiens
agtgcagattccacc

SEQ ID NO: 197533 - DNA, 15 bp, Homo sapiens
gagtgcagattccac

SEQ ID NO: 197534 - DNA, 15 bp, Homo sapiens
tgagtgcagattcca

SEQ ID NO: 197535 - DNA, 15 bp, Homo sapiens
ctgagtgcagattcc

SEQ ID NO: 197536 - DNA, 15 bp, Homo sapiens
tctgagtgcagattc

SEQ ID NO: 197537 - DNA, 15 bp, Homo sapiens
ctctgagtgcagatt

SEQ ID NO: 197538 - DNA, 15 bp, Homo sapiens
cctctgagtgcagat

SEQ ID NO: 197539 - DNA, 15 bp, Homo sapiens
ccctctgagtgcaga

SEQ ID NO: 197540 - DNA, 15 bp, Homo sapiens
accctctgagtgcag

SEQ ID NO: 197541 - DNA, 15 bp, Homo sapiens
gaccctctgagtgca

SEQ ID NO: 197542 - DNA, 15 bp, Homo sapiens
ggaccctctgagtgc

SEQ ID NO: 197543 - DNA, 15 bp, Homo sapiens
aggaccctctgagtg

SEQ ID NO: 197544 - DNA, 15 bp, Homo sapiens
aaggaccctctgagt

SEQ ID NO: 197545 - DNA, 15 bp, Homo sapiens
caaggaccctctgag

SEQ ID NO: 197546 - DNA, 15 bp, Homo sapiens
gcaaggaccctctga

SEQ ID NO: 197547 - DNA, 15 bp, Homo sapiens
ggcaaggaccctctg

SEQ ID NO: 197548 - DNA, 15 bp, Homo sapiens
gggcaaggaccctct

SEQ ID NO: 197549 - DNA, 15 bp, Homo sapiens
tgggcaaggaccctc

SEQ ID NO: 197550 - DNA, 15 bp, Homo sapiens
ttgggcaaggaccct

SEQ ID NO: 197551 - DNA, 15 bp, Homo sapiens
gttgggcaaggaccc

SEQ ID NO: 197552 - DNA, 15 bp, Homo sapiens
agttgggcaaggacc

SEQ ID NO: 197553 - DNA, 15 bp, Homo sapiens
aagttgggcaaggac

SEQ ID NO: 197554 - DNA, 15 bp, Homo sapiens
caagttgggcaagga

SEQ ID NO: 197555 - DNA, 15 bp, Homo sapiens
ccaagttgggcaagg

SEQ ID NO: 197556 - DNA, 15 bp, Homo sapiens
accaagttgggcaag

SEQ ID NO: 197557 - DNA, 15 bp, Homo sapiens
gaccaagttgggcaa

SEQ ID NO: 197558 - DNA, 15 bp, Homo sapiens
tgaccaagttgggca

SEQ ID NO: 197559 - DNA, 15 bp, Homo sapiens
ctgaccaagttgggc

SEQ ID NO: 197560 - DNA, 15 bp, Homo sapiens
gctgaccaagttggg

SEQ ID NO: 197561 - DNA, 15 bp, Homo sapiens
tgctgaccaagttgg

SEQ ID NO: 197562 - DNA, 15 bp, Homo sapiens
gtgctgaccaagttg

SEQ ID NO: 197563 - DNA, 15 bp, Homo sapiens
tgtgctgaccaagtt

SEQ ID NO: 197564 - DNA, 15 bp, Homo sapiens
ctgtgctgaccaagt

SEQ ID NO: 197565 - DNA, 15 bp, Homo sapiens
actgtgctgaccaag

SEQ ID NO: 197566 - DNA, 15 bp, Homo sapiens
gactgtgctgaccaa

SEQ ID NO: 197567 - DNA, 15 bp, Homo sapiens
ggactgtgctgacca

SEQ ID NO: 197568 - DNA, 15 bp, Homo sapiens
aggactgtgctgacc

SEQ ID NO: 197569 - DNA, 15 bp, Homo sapiens
taggactgtgctgac

SEQ ID NO: 197570 - DNA, 15 bp, Homo sapiens
ataggactgtgctga

SEQ ID NO: 197571 - DNA, 15 bp, Homo sapiens
cataggactgtgctg

SEQ ID NO: 197572 - DNA, 15 bp, Homo sapiens
acataggactgtgct

SEQ ID NO: 197573 - DNA, 15 bp, Homo sapiens
cacataggactgtgc

SEQ ID NO: 197574 - DNA, 15 bp, Homo sapiens
gcacataggactgtg

SEQ ID NO: 197575 - DNA, 15 bp, Homo sapiens
tgcacataggactgt

SEQ ID NO: 197576 - DNA, 15 bp, Homo sapiens
gtgcacataggactg

SEQ ID NO: 197577 - DNA, 15 bp, Homo sapiens
ggtgcacataggact

SEQ ID NO: 197578 - DNA, 15 bp, Homo sapiens
tggtgcacataggac

SEQ ID NO: 197579 - DNA, 15 bp, Homo sapiens
ttggtgcacatagga

SEQ ID NO: 197580 - DNA, 15 bp, Homo sapiens
cttggtgcacatagg

SEQ ID NO: 197581 - DNA, 15 bp, Homo sapiens
gcttggtgcacatag

SEQ ID NO: 197582 - DNA, 15 bp, Homo sapiens
tgcttggtgcacata

SEQ ID NO: 197583 - DNA, 15 bp, Homo sapiens
gtgcttggtgcacat

SEQ ID NO: 197584 - DNA, 15 bp, Homo sapiens
agtgcttggtgcaca

SEQ ID NO: 197585 - DNA, 15 bp, Homo sapiens
cagtgcttggtgcac

SEQ ID NO: 197586 - DNA, 15 bp, Homo sapiens
gcagtgcttggtgca

SEQ ID NO: 197587 - DNA, 15 bp, Homo sapiens
ggcagtgcttggtgc

SEQ ID NO: 197588 - DNA, 15 bp, Homo sapiens
gggcagtgcttggtg

SEQ ID NO: 197589 - DNA, 15 bp, Homo sapiens
ggggcagtgcttggt

SEQ ID NO: 197590 - DNA, 15 bp, Homo sapiens
cggggcagtgcttgg

SEQ ID NO: 197591 - DNA, 15 bp, Homo sapiens
ccggggcagtgcttg

SEQ ID NO: 197592 - DNA, 15 bp, Homo sapiens
cccggggcagtgctt

SEQ ID NO: 197593 - DNA, 15 bp, Homo sapiens
ccccggggcagtgct

SEQ ID NO: 197594 - DNA, 15 bp, Homo sapiens
tccccggggcagtgc

SEQ ID NO: 197595 - DNA, 15 bp, Homo sapiens
gtccccggggcagtg

SEQ ID NO: 197596 - DNA, 15 bp, Homo sapiens
tgtccccggggcagt

SEQ ID NO: 197597 - DNA, 15 bp, Homo sapiens
ctgtccccggggcag

SEQ ID NO: 197598 - DNA, 15 bp, Homo sapiens
tctgtccccggggca

SEQ ID NO: 197599 - DNA, 15 bp, Homo sapiens
ttctgtccccggggc

SEQ ID NO: 197600 - DNA, 15 bp, Homo sapiens
cttctgtccccgggg

SEQ ID NO: 197601 - DNA, 15 bp, Homo sapiens
ccttctgtccccggg

SEQ ID NO: 197602 - DNA, 15 bp, Homo sapiens
cccttctgtccccgg

SEQ ID NO: 197603 - DNA, 15 bp, Homo sapiens
acccttctgtccccg

SEQ ID NO: 197604 - DNA, 15 bp, Homo sapiens
cacccttctgtcccc

SEQ ID NO: 197605 - DNA, 15 bp, Homo sapiens
gcacccttctgtccc

SEQ ID NO: 197606 - DNA, 15 bp, Homo sapiens
tgcacccttctgtcc

SEQ ID NO: 197607 - DNA, 15 bp, Homo sapiens
gtgcacccttctgtc

SEQ ID NO: 197608 - DNA, 15 bp, Homo sapiens
tgtgcacccttctgt

SEQ ID NO: 197609 - DNA, 15 bp, Homo sapiens
atgtgcacccttctg

SEQ ID NO: 197610 - DNA, 15 bp, Homo sapiens
catgtgcacccttct

SEQ ID NO: 197611 - DNA, 15 bp, Homo sapiens
tcatgtgcacccttc

SEQ ID NO: 197612 - DNA, 15 bp, Homo sapiens
gtcatgtgcaccctt

SEQ ID NO: 197613 - DNA, 15 bp, Homo sapiens
tgtcatgtgcaccct

SEQ ID NO: 197614 - DNA, 15 bp, Homo sapiens
ctgtcatgtgcaccc

SEQ ID NO: 197615 - DNA, 15 bp, Homo sapiens
tctgtcatgtgcacc

SEQ ID NO: 197616 - DNA, 15 bp, Homo sapiens
gtctgtcatgtgcac

SEQ ID NO: 197617 - DNA, 15 bp, Homo sapiens
tgtctgtcatgtgca

SEQ ID NO: 197618 - DNA, 15 bp, Homo sapiens
ctgtctgtcatgtgc

SEQ ID NO: 197619 - DNA, 15 bp, Homo sapiens
tctgtctgtcatgtg

SEQ ID NO: 197620 - DNA, 15 bp, Homo sapiens
ctctgtctgtcatgt

SEQ ID NO: 197621 - DNA, 15 bp, Homo sapiens
tctctgtctgtcatg

SEQ ID NO: 197622 - DNA, 15 bp, Homo sapiens
ctctctgtctgtcat

SEQ ID NO: 197623 - DNA, 15 bp, Homo sapiens
cctctctgtctgtca

SEQ ID NO: 197624 - DNA, 15 bp, Homo sapiens
gcctctctgtctgtc

SEQ ID NO: 197625 - DNA, 15 bp, Homo sapiens
tgcctctctgtctgt

SEQ ID NO: 197626 - DNA, 15 bp, Homo sapiens
ctgcctctctgtctg

SEQ ID NO: 197627 - DNA, 15 bp, Homo sapiens
tctgcctctctgtct

SEQ ID NO: 197628 - DNA, 15 bp, Homo sapiens
atctgcctctctgtc

SEQ ID NO: 197629 - DNA, 15 bp, Homo sapiens
tatctgcctctctgt

SEQ ID NO: 197630 - DNA, 15 bp, Homo sapiens
ctatctgcctctctg

SEQ ID NO: 197631 - DNA, 15 bp, Homo sapiens
cctatctgcctctct

SEQ ID NO: 197632 - DNA, 15 bp, Homo sapiens
acctatctgcctctc

SEQ ID NO: 197633 - DNA, 15 bp, Homo sapiens
aacctatctgcctct

SEQ ID NO: 197634 - DNA, 15 bp, Homo sapiens
aaacctatctgcctc

SEQ ID NO: 197635 - DNA, 15 bp, Homo sapiens
gaaacctatctgcct

SEQ ID NO: 197636 - DNA, 15 bp, Homo sapiens
agaaacctatctgcc

SEQ ID NO: 197637 - DNA, 15 bp, Homo sapiens
cagaaacctatctgc

SEQ ID NO: 197638 - DNA, 15 bp, Homo sapiens
ccagaaacctatctg

SEQ ID NO: 197639 - DNA, 15 bp, Homo sapiens
accagaaacctatct

SEQ ID NO: 197640 - DNA, 15 bp, Homo sapiens
caccagaaacctatc

SEQ ID NO: 197641 - DNA, 15 bp, Homo sapiens
tcaccagaaacctat

SEQ ID NO: 197642 - DNA, 15 bp, Homo sapiens
ctcaccagaaaccta

SEQ ID NO: 197643 - DNA, 15 bp, Homo sapiens
gctcaccagaaacct

SEQ ID NO: 197644 - DNA, 15 bp, Homo sapiens
ggctcaccagaaacc

SEQ ID NO: 197645 - DNA, 15 bp, Homo sapiens
gggctcaccagaaac

SEQ ID NO: 197646 - DNA, 15 bp, Homo sapiens
ggggctcaccagaaa

SEQ ID NO: 197647 - DNA, 15 bp, Homo sapiens
aggggctcaccagaa

SEQ ID NO: 197648 - DNA, 15 bp, Homo sapiens
caggggctcaccaga

SEQ ID NO: 197649 - DNA, 15 bp, Homo sapiens
gcaggggctcaccag

SEQ ID NO: 197650 - DNA, 15 bp, Homo sapiens
ggcaggggctcacca

SEQ ID NO: 197651 - DNA, 15 bp, Homo sapiens
aggcaggggctcacc

SEQ ID NO: 197652 - DNA, 15 bp, Homo sapiens
gaggcaggggctcac

SEQ ID NO: 197653 - DNA, 15 bp, Homo sapiens
agaggcaggggctca

SEQ ID NO: 197654 - DNA, 15 bp, Homo sapiens
cagaggcaggggctc

SEQ ID NO: 197655 - DNA, 15 bp, Homo sapiens
tcagaggcaggggct

SEQ ID NO: 197656 - DNA, 15 bp, Homo sapiens
ctcagaggcaggggc

SEQ ID NO: 197657 - DNA, 15 bp, Homo sapiens
tctcagaggcagggg

SEQ ID NO: 197658 - DNA, 15 bp, Homo sapiens
ctctcagaggcaggg

SEQ ID NO: 197659 - DNA, 15 bp, Homo sapiens
gctctcagaggcagg

SEQ ID NO: 197660 - DNA, 15 bp, Homo sapiens
agctctcagaggcag

SEQ ID NO: 197661 - DNA, 15 bp, Homo sapiens
gagctctcagaggca

SEQ ID NO: 197662 - DNA, 15 bp, Homo sapiens
ggagctctcagaggc

SEQ ID NO: 197663 - DNA, 15 bp, Homo sapiens
aggagctctcagagg

SEQ ID NO: 197664 - DNA, 15 bp, Homo sapiens
caggagctctcagag

SEQ ID NO: 197665 - DNA, 15 bp, Homo sapiens
ccaggagctctcaga

SEQ ID NO: 197666 - DNA, 15 bp, Homo sapiens
cccaggagctctcag

SEQ ID NO: 197667 - DNA, 15 bp, Homo sapiens
acccaggagctctca

SEQ ID NO: 197668 - DNA, 15 bp, Homo sapiens
aacccaggagctctc

SEQ ID NO: 197669 - DNA, 15 bp, Homo sapiens
taacccaggagctct

SEQ ID NO: 197670 - DNA, 15 bp, Homo sapiens
ctaacccaggagctc

SEQ ID NO: 197671 - DNA, 15 bp, Homo sapiens
actaacccaggagct

SEQ ID NO: 197672 - DNA, 15 bp, Homo sapiens
cactaacccaggagc

SEQ ID NO: 197673 - DNA, 15 bp, Homo sapiens
ccactaacccaggag

SEQ ID NO: 197674 - DNA, 15 bp, Homo sapiens
cccactaacccagga

SEQ ID NO: 197675 - DNA, 15 bp, Homo sapiens
tcccactaacccagg

SEQ ID NO: 197676 - DNA, 15 bp, Homo sapiens
ctcccactaacccag

SEQ ID NO: 197677 - DNA, 15 bp, Homo sapiens
cctcccactaaccca

SEQ ID NO: 197678 - DNA, 15 bp, Homo sapiens
gcctcccactaaccc

SEQ ID NO: 197679 - DNA, 15 bp, Homo sapiens
tgcctcccactaacc

SEQ ID NO: 197680 - DNA, 15 bp, Homo sapiens
ctgcctcccactaac

SEQ ID NO: 197681 - DNA, 15 bp, Homo sapiens
tctgcctcccactaa

SEQ ID NO: 197682 - DNA, 15 bp, Homo sapiens
ctctgcctcccacta

SEQ ID NO: 197683 - DNA, 15 bp, Homo sapiens
cctctgcctcccact

SEQ ID NO: 197684 - DNA, 15 bp, Homo sapiens
gcctctgcctcccac

SEQ ID NO: 197685 - DNA, 15 bp, Homo sapiens
cgcctctgcctccca

SEQ ID NO: 197686 - DNA, 15 bp, Homo sapiens
ccgcctctgcctccc

SEQ ID NO: 197687 - DNA, 15 bp, Homo sapiens
cccgcctctgcctcc

SEQ ID NO: 197688 - DNA, 15 bp, Homo sapiens
gcccgcctctgcctc

SEQ ID NO: 197689 - DNA, 15 bp, Homo sapiens
tgcccgcctctgcct

SEQ ID NO: 197690 - DNA, 15 bp, Homo sapiens
ctgcccgcctctgcc

SEQ ID NO: 197691 - DNA, 15 bp, Homo sapiens
tctgcccgcctctgc

SEQ ID NO: 197692 - DNA, 15 bp, Homo sapiens
gtctgcccgcctctg

SEQ ID NO: 197693 - DNA, 15 bp, Homo sapiens
ggtctgcccgcctct

SEQ ID NO: 197694 - DNA, 15 bp, Homo sapiens
aggtctgcccgcctc

SEQ ID NO: 197695 - DNA, 15 bp, Homo sapiens
taggtctgcccgcct

SEQ ID NO: 197696 - DNA, 15 bp, Homo sapiens
ctaggtctgcccgcc

SEQ ID NO: 197697 - DNA, 15 bp, Homo sapiens
cctaggtctgcccgc

SEQ ID NO: 197698 - DNA, 15 bp, Homo sapiens
ccctaggtctgcccg

SEQ ID NO: 197699 - DNA, 15 bp, Homo sapiens
accctaggtctgccc

SEQ ID NO: 197700 - DNA, 15 bp, Homo sapiens
caccctaggtctgcc

SEQ ID NO: 197701 - DNA, 15 bp, Homo sapiens
gcaccctaggtctgc

SEQ ID NO: 197702 - DNA, 15 bp, Homo sapiens
tgcaccctaggtctg

SEQ ID NO: 197703 - DNA, 15 bp, Homo sapiens
gtgcaccctaggtct

SEQ ID NO: 197704 - DNA, 15 bp, Homo sapiens
tgtgcaccctaggtc

SEQ ID NO: 197705 - DNA, 15 bp, Homo sapiens
gtgtgcaccctaggt

SEQ ID NO: 197706 - DNA, 15 bp, Homo sapiens
cgtgtgcaccctagg

SEQ ID NO: 197707 - DNA, 15 bp, Homo sapiens
ccgtgtgcaccctag

SEQ ID NO: 197708 - DNA, 15 bp, Homo sapiens
cccgtgtgcacccta

SEQ ID NO: 197709 - DNA, 15 bp, Homo sapiens
gcccgtgtgcaccct

SEQ ID NO: 197710 - DNA, 15 bp, Homo sapiens
ggcccgtgtgcaccc

SEQ ID NO: 197711 - DNA, 15 bp, Homo sapiens
tggcccgtgtgcacc

SEQ ID NO: 197712 - DNA, 15 bp, Homo sapiens
ctggcccgtgtgcac

SEQ ID NO: 197713 - DNA, 15 bp, Homo sapiens
gctggcccgtgtgca

SEQ ID NO: 197714 - DNA, 15 bp, Homo sapiens
ggctggcccgtgtgc

SEQ ID NO: 197715 - DNA, 15 bp, Homo sapiens
aggctggcccgtgtg

SEQ ID NO: 197716 - DNA, 15 bp, Homo sapiens
caggctggcccgtgt

SEQ ID NO: 197717 - DNA, 15 bp, Homo sapiens
gcaggctggcccgtg

SEQ ID NO: 197718 - DNA, 15 bp, Homo sapiens
ggcaggctggcccgt

SEQ ID NO: 197719 - DNA, 15 bp, Homo sapiens
tggcaggctggcccg

SEQ ID NO: 197720 - DNA, 15 bp, Homo sapiens
ttggcaggctggccc

SEQ ID NO: 197721 - DNA, 15 bp, Homo sapiens
cttggcaggctggcc

SEQ ID NO: 197722 - DNA, 15 bp, Homo sapiens
ccttggcaggctggc

SEQ ID NO: 197723 - DNA, 15 bp, Homo sapiens
gccttggcaggctgg

SEQ ID NO: 197724 - DNA, 15 bp, Homo sapiens
agccttggcaggctg

SEQ ID NO: 197725 - DNA, 15 bp, Homo sapiens
tagccttggcaggct

SEQ ID NO: 197726 - DNA, 15 bp, Homo sapiens
gtagccttggcaggc

SEQ ID NO: 197727 - DNA, 15 bp, Homo sapiens
tgtagccttggcagg

SEQ ID NO: 197728 - DNA, 15 bp, Homo sapiens
ctgtagccttggcag

SEQ ID NO: 197729 - DNA, 15 bp, Homo sapiens
tctgtagccttggca

SEQ ID NO: 197730 - DNA, 15 bp, Homo sapiens
ttctgtagccttggc

SEQ ID NO: 197731 - DNA, 15 bp, Homo sapiens
cttctgtagccttgg

SEQ ID NO: 197732 - DNA, 15 bp, Homo sapiens
ccttctgtagccttg

SEQ ID NO: 197733 - DNA, 15 bp, Homo sapiens
tccttctgtagcctt

SEQ ID NO: 197734 - DNA, 15 bp, Homo sapiens
ttccttctgtagcct

SEQ ID NO: 197735 - DNA, 15 bp, Homo sapiens
tttccttctgtagcc

SEQ ID NO: 197736 - DNA, 15 bp, Homo sapiens
ctttccttctgtagc

SEQ ID NO: 197737 - DNA, 15 bp, Homo sapiens
cctttccttctgtag

SEQ ID NO: 197738 - DNA, 15 bp, Homo sapiens
tcctttccttctgta

SEQ ID NO: 197739 - DNA, 15 bp, Homo sapiens
gtcctttccttctgt

SEQ ID NO: 197740 - DNA, 15 bp, Homo sapiens
tgtcctttccttctg

SEQ ID NO: 197741 - DNA, 15 bp, Homo sapiens
ctgtcctttccttct

SEQ ID NO: 197742 - DNA, 15 bp, Homo sapiens
gctgtcctttccttc

SEQ ID NO: 197743 - DNA, 15 bp, Homo sapiens
tgctgtcctttcctt

SEQ ID NO: 197744 - DNA, 15 bp, Homo sapiens
atgctgtcctttcct

SEQ ID NO: 197745 - DNA, 15 bp, Homo sapiens
aatgctgtcctttcc

SEQ ID NO: 197746 - DNA, 15 bp, Homo sapiens
caatgctgtcctttc

SEQ ID NO: 197747 - DNA, 15 bp, Homo sapiens
gcaatgctgtccttt

SEQ ID NO: 197748 - DNA, 15 bp, Homo sapiens
tgcaatgctgtcctt

SEQ ID NO: 197749 - DNA, 15 bp, Homo sapiens
ttgcaatgctgtcct

SEQ ID NO: 197750 - DNA, 15 bp, Homo sapiens
attgcaatgctgtcc

SEQ ID NO: 197751 - DNA, 15 bp, Homo sapiens
cattgcaatgctgtc

SEQ ID NO: 197752 - DNA, 15 bp, Homo sapiens
ccattgcaatgctgt

SEQ ID NO: 197753 - DNA, 15 bp, Homo sapiens
tccattgcaatgctg

SEQ ID NO: 197754 - DNA, 15 bp, Homo sapiens
ctccattgcaatgct

SEQ ID NO: 197755 - DNA, 15 bp, Homo sapiens
cctccattgcaatgc

SEQ ID NO: 197756 - DNA, 15 bp, Homo sapiens
ccctccattgcaatg

SEQ ID NO: 197757 - DNA, 15 bp, Homo sapiens
cccctccattgcaat

SEQ ID NO: 197758 - DNA, 15 bp, Homo sapiens
gcccctccattgcaa

SEQ ID NO: 197759 - DNA, 15 bp, Homo sapiens
ggcccctccattgca

SEQ ID NO: 197760 - DNA, 15 bp, Homo sapiens
aggcccctccattgc

SEQ ID NO: 197761 - DNA, 15 bp, Homo sapiens
caggcccctccattg

SEQ ID NO: 197762 - DNA, 15 bp, Homo sapiens
ccaggcccctccatt

SEQ ID NO: 197763 - DNA, 15 bp, Homo sapiens
gccaggcccctccat

SEQ ID NO: 197764 - DNA, 15 bp, Homo sapiens
agccaggcccctcca

SEQ ID NO: 197765 - DNA, 15 bp, Homo sapiens
cagccaggcccctcc

SEQ ID NO: 197766 - DNA, 15 bp, Homo sapiens
tcagccaggcccctc

SEQ ID NO: 197767 - DNA, 15 bp, Homo sapiens
atcagccaggcccct

SEQ ID NO: 197768 - DNA, 15 bp, Homo sapiens
catcagccaggcccc

SEQ ID NO: 197769 - DNA, 15 bp, Homo sapiens
ccatcagccaggccc

SEQ ID NO: 197770 - DNA, 15 bp, Homo sapiens
cccatcagccaggcc

SEQ ID NO: 197771 - DNA, 15 bp, Homo sapiens
gcccatcagccaggc

SEQ ID NO: 197772 - DNA, 15 bp, Homo sapiens
cgcccatcagccagg

SEQ ID NO: 197773 - DNA, 15 bp, Homo sapiens
tcgcccatcagccag

SEQ ID NO: 197774 - DNA, 15 bp, Homo sapiens
ttcgcccatcagcca

SEQ ID NO: 197775 - DNA, 15 bp, Homo sapiens
cttcgcccatcagcc

SEQ ID NO: 197776 - DNA, 15 bp, Homo sapiens
tcttcgcccatcagc

SEQ ID NO: 197777 - DNA, 15 bp, Homo sapiens
atcttcgcccatcag

SEQ ID NO: 197778 - DNA, 15 bp, Homo sapiens
catcttcgcccatca

SEQ ID NO: 197779 - DNA, 15 bp, Homo sapiens
ccatcttcgcccatc

SEQ ID NO: 197780 - DNA, 15 bp, Homo sapiens
cccatcttcgcccat

SEQ ID NO: 197781 - DNA, 15 bp, Homo sapiens
tcccatcttcgccca

SEQ ID NO: 197782 - DNA, 15 bp, Homo sapiens
ttcccatcttcgccc

SEQ ID NO: 197783 - DNA, 15 bp, Homo sapiens
tttcccatcttcgcc

SEQ ID NO: 197784 - DNA, 15 bp, Homo sapiens
ctttcccatcttcgc

SEQ ID NO: 197785 - DNA, 15 bp, Homo sapiens
gctttcccatcttcg

SEQ ID NO: 197786 - DNA, 15 bp, Homo sapiens
agctttcccatcttc

SEQ ID NO: 197787 - DNA, 15 bp, Homo sapiens
aagctttcccatctt

SEQ ID NO: 197788 - DNA, 15 bp, Homo sapiens
gaagctttcccatct

SEQ ID NO: 197789 - DNA, 15 bp, Homo sapiens
ggaagctttcccatc

SEQ ID NO: 197790 - DNA, 15 bp, Homo sapiens
gggaagctttcccat

SEQ ID NO: 197791 - DNA, 15 bp, Homo sapiens
tgggaagctttccca

SEQ ID NO: 197792 - DNA, 15 bp, Homo sapiens
ctgggaagctttccc

SEQ ID NO: 197793 - DNA, 15 bp, Homo sapiens
cctgggaagctttcc

SEQ ID NO: 197794 - DNA, 15 bp, Homo sapiens
ccctgggaagctttc

SEQ ID NO: 197795 - DNA, 15 bp, Homo sapiens
tccctgggaagcttt

SEQ ID NO: 197796 - DNA, 15 bp, Homo sapiens
ttccctgggaagctt

SEQ ID NO: 197797 - DNA, 15 bp, Homo sapiens
cttccctgggaagct

SEQ ID NO: 197798 - DNA, 15 bp, Homo sapiens
gcttccctgggaagc

SEQ ID NO: 197799 - DNA, 15 bp, Homo sapiens
cgcttccctgggaag

SEQ ID NO: 197800 - DNA, 15 bp, Homo sapiens
ccgcttccctgggaa

SEQ ID NO: 197801 - DNA, 15 bp, Homo sapiens
gccgcttccctggga

SEQ ID NO: 197802 - DNA, 15 bp, Homo sapiens
tgccgcttccctggg

SEQ ID NO: 197803 - DNA, 15 bp, Homo sapiens
gtgccgcttccctgg

SEQ ID NO: 197804 - DNA, 15 bp, Homo sapiens
ggtgccgcttccctg

SEQ ID NO: 197805 - DNA, 15 bp, Homo sapiens
gggtgccgcttccct

SEQ ID NO: 197806 - DNA, 15 bp, Homo sapiens
tgggtgccgcttccc

SEQ ID NO: 197807 - DNA, 15 bp, Homo sapiens
ctgggtgccgcttcc

SEQ ID NO: 197808 - DNA, 15 bp, Homo sapiens
cctgggtgccgcttc

SEQ ID NO: 197809 - DNA, 15 bp, Homo sapiens
gcctgggtgccgctt

SEQ ID NO: 197810 - DNA, 15 bp, Homo sapiens
agcctgggtgccgct

SEQ ID NO: 197811 - DNA, 15 bp, Homo sapiens
cagcctgggtgccgc

SEQ ID NO: 197812 - DNA, 15 bp, Homo sapiens
gcagcctgggtgccg

SEQ ID NO: 197813 - DNA, 15 bp, Homo sapiens
agcagcctgggtgcc

SEQ ID NO: 197814 - DNA, 15 bp, Homo sapiens
cagcagcctgggtgc

SEQ ID NO: 197815 - DNA, 15 bp, Homo sapiens
tcagcagcctgggtg

SEQ ID NO: 197816 - DNA, 15 bp, Homo sapiens
ctcagcagcctgggt

SEQ ID NO: 197817 - DNA, 15 bp, Homo sapiens
gctcagcagcctggg

SEQ ID NO: 197818 - DNA, 15 bp, Homo sapiens
ggctcagcagcctgg

SEQ ID NO: 197819 - DNA, 15 bp, Homo sapiens
aggctcagcagcctg

SEQ ID NO: 197820 - DNA, 15 bp, Homo sapiens
taggctcagcagcct

SEQ ID NO: 197821 - DNA, 15 bp, Homo sapiens
gtaggctcagcagcc

SEQ ID NO: 197822 - DNA, 15 bp, Homo sapiens
tgtaggctcagcagc

SEQ ID NO: 197823 - DNA, 15 bp, Homo sapiens
ctgtaggctcagcag

SEQ ID NO: 197824 - DNA, 15 bp, Homo sapiens
cctgtaggctcagca

SEQ ID NO: 197825 - DNA, 15 bp, Homo sapiens
tcctgtaggctcagc

SEQ ID NO: 197826 - DNA, 15 bp, Homo sapiens
atcctgtaggctcag

SEQ ID NO: 197827 - DNA, 15 bp, Homo sapiens
catcctgtaggctca

SEQ ID NO: 197828 - DNA, 15 bp, Homo sapiens
ccatcctgtaggctc

SEQ ID NO: 197829 - DNA, 15 bp, Homo sapiens
cccatcctgtaggct

SEQ ID NO: 197830 - DNA, 15 bp, Homo sapiens
acccatcctgtaggc

SEQ ID NO: 197831 - DNA, 15 bp, Homo sapiens
cacccatcctgtagg

SEQ ID NO: 197832 - DNA, 15 bp, Homo sapiens
tcacccatcctgtag

SEQ ID NO: 197833 - DNA, 15 bp, Homo sapiens
ttcacccatcctgta

SEQ ID NO: 197834 - DNA, 15 bp, Homo sapiens
gttcacccatcctgt

SEQ ID NO: 197835 - DNA, 15 bp, Homo sapiens
cgttcacccatcctg

SEQ ID NO: 197836 - DNA, 15 bp, Homo sapiens
ccgttcacccatcct

SEQ ID NO: 197837 - DNA, 15 bp, Homo sapiens
gccgttcacccatcc

SEQ ID NO: 197838 - DNA, 15 bp, Homo sapiens
tgccgttcacccatc

SEQ ID NO: 197839 - DNA, 15 bp, Homo sapiens
ctgccgttcacccat

SEQ ID NO: 197840 - DNA, 15 bp, Homo sapiens
gctgccgttcaccca

SEQ ID NO: 197841 - DNA, 15 bp, Homo sapiens
ggctgccgttcaccc

SEQ ID NO: 197842 - DNA, 15 bp, Homo sapiens
tggctgccgttcacc

SEQ ID NO: 197843 - DNA, 15 bp, Homo sapiens
ctggctgccgttcac

SEQ ID NO: 197844 - DNA, 15 bp, Homo sapiens
actggctgccgttca

SEQ ID NO: 197845 - DNA, 15 bp, Homo sapiens
cactggctgccgttc

SEQ ID NO: 197846 - DNA, 15 bp, Homo sapiens
gcactggctgccgtt

SEQ ID NO: 197847 - DNA, 15 bp, Homo sapiens
ggcactggctgccgt

SEQ ID NO: 197848 - DNA, 15 bp, Homo sapiens
tggcactggctgccg

SEQ ID NO: 197849 - DNA, 15 bp, Homo sapiens
ctggcactggctgcc

SEQ ID NO: 197850 - DNA, 15 bp, Homo sapiens
tctggcactggctgc

SEQ ID NO: 197851 - DNA, 15 bp, Homo sapiens
ctctggcactggctg

SEQ ID NO: 197852 - DNA, 15 bp, Homo sapiens
actctggcactggct

SEQ ID NO: 197853 - DNA, 15 bp, Homo sapiens
cactctggcactggc

SEQ ID NO: 197854 - DNA, 15 bp, Homo sapiens
ccactctggcactgg

SEQ ID NO: 197855 - DNA, 15 bp, Homo sapiens
cccactctggcactg

SEQ ID NO: 197856 - DNA, 15 bp, Homo sapiens
ccccactctggcact

SEQ ID NO: 197857 - DNA, 15 bp, Homo sapiens
tccccactctggcac

SEQ ID NO: 197858 - DNA, 15 bp, Homo sapiens
ctccccactctggca

SEQ ID NO: 197859 - DNA, 15 bp, Homo sapiens
actccccactctggc

SEQ ID NO: 197860 - DNA, 15 bp, Homo sapiens
cactccccactctgg

SEQ ID NO: 197861 - DNA, 15 bp, Homo sapiens
gcactccccactctg

SEQ ID NO: 197862 - DNA, 15 bp, Homo sapiens
agcactccccactct

SEQ ID NO: 197863 - DNA, 15 bp, Homo sapiens
tagcactccccactc

SEQ ID NO: 197864 - DNA, 15 bp, Homo sapiens
atagcactccccact

SEQ ID NO: 197865 - DNA, 15 bp, Homo sapiens
catagcactccccac

SEQ ID NO: 197866 - DNA, 15 bp, Homo sapiens
ccatagcactcccca

SEQ ID NO: 197867 - DNA, 15 bp, Homo sapiens
cccatagcactcccc

SEQ ID NO: 197868 - DNA, 15 bp, Homo sapiens
ccccatagcactccc

SEQ ID NO: 197869 - DNA, 15 bp, Homo sapiens
accccatagcactcc

SEQ ID NO: 197870 - DNA, 15 bp, Homo sapiens
caccccatagcactc

SEQ ID NO: 197871 - DNA, 15 bp, Homo sapiens
ccaccccatagcact

SEQ ID NO: 197872 - DNA, 15 bp, Homo sapiens
cccaccccatagcac

SEQ ID NO: 197873 - DNA, 15 bp, Homo sapiens
ccccaccccatagca

SEQ ID NO: 197874 - DNA, 15 bp, Homo sapiens
tccccaccccatagc

SEQ ID NO: 197875 - DNA, 15 bp, Homo sapiens
gtccccaccccatag

SEQ ID NO: 197876 - DNA, 15 bp, Homo sapiens
agtccccaccccata

SEQ ID NO: 197877 - DNA, 15 bp, Homo sapiens
cagtccccaccccat

SEQ ID NO: 197878 - DNA, 15 bp, Homo sapiens
gcagtccccacccca

SEQ ID NO: 197879 - DNA, 15 bp, Homo sapiens
agcagtccccacccc

SEQ ID NO: 197880 - DNA, 15 bp, Homo sapiens
aagcagtccccaccc

SEQ ID NO: 197881 - DNA, 15 bp, Homo sapiens
aaagcagtccccacc

SEQ ID NO: 197882 - DNA, 15 bp, Homo sapiens
gaaagcagtccccac

SEQ ID NO: 197883 - DNA, 15 bp, Homo sapiens
ggaaagcagtcccca

SEQ ID NO: 197884 - DNA, 15 bp, Homo sapiens
tggaaagcagtcccc

SEQ ID NO: 197885 - DNA, 15 bp, Homo sapiens
ctggaaagcagtccc

SEQ ID NO: 197886 - DNA, 15 bp, Homo sapiens
cctggaaagcagtcc

SEQ ID NO: 197887 - DNA, 15 bp, Homo sapiens
tcctggaaagcagtc

SEQ ID NO: 197888 - DNA, 15 bp, Homo sapiens
ttcctggaaagcagt

SEQ ID NO: 197889 - DNA, 15 bp, Homo sapiens
cttcctggaaagcag

SEQ ID NO: 197890 - DNA, 15 bp, Homo sapiens
tcttcctggaaagca

SEQ ID NO: 197891 - DNA, 15 bp, Homo sapiens
ttcttcctggaaagc

SEQ ID NO: 197892 - DNA, 15 bp, Homo sapiens
attcttcctggaaag

SEQ ID NO: 197893 - DNA, 15 bp, Homo sapiens
cattcttcctggaaa

SEQ ID NO: 197894 - DNA, 15 bp, Homo sapiens
tcattcttcctggaa

SEQ ID NO: 197895 - DNA, 15 bp, Homo sapiens
ctcattcttcctgga

SEQ ID NO: 197896 - DNA, 15 bp, Homo sapiens
gctcattcttcctgg

SEQ ID NO: 197897 - DNA, 15 bp, Homo sapiens
tgctcattcttcctg

SEQ ID NO: 197898 - DNA, 15 bp, Homo sapiens
ctgctcattcttcct

SEQ ID NO: 197899 - DNA, 15 bp, Homo sapiens
gctgctcattcttcc

SEQ ID NO: 197900 - DNA, 15 bp, Homo sapiens
tgctgctcattcttc

SEQ ID NO: 197901 - DNA, 15 bp, Homo sapiens
ctgctgctcattctt

SEQ ID NO: 197902 - DNA, 15 bp, Homo sapiens
cctgctgctcattct

SEQ ID NO: 197903 - DNA, 15 bp, Homo sapiens
gctagggcaggatta

SEQ ID NO: 197904 - DNA, 15 bp, Homo sapiens
ggctagggcaggatt

SEQ ID NO: 197905 - DNA, 15 bp, Homo sapiens
cggctagggcaggat

SEQ ID NO: 197906 - DNA, 15 bp, Homo sapiens
tcggctagggcagga

SEQ ID NO: 197907 - DNA, 15 bp, Homo sapiens
ctcggctagggcagg

SEQ ID NO: 197908 - DNA, 15 bp, Homo sapiens
gctcggctagggcag

SEQ ID NO: 197909 - DNA, 15 bp, Homo sapiens
agctcggctagggca

SEQ ID NO: 197910 - DNA, 15 bp, Homo sapiens
aagctcggctagggc

SEQ ID NO: 197911 - DNA, 15 bp, Homo sapiens
taagctcggctaggg

SEQ ID NO: 197912 - DNA, 15 bp, Homo sapiens
gtaagctcggctagg

SEQ ID NO: 197913 - DNA, 15 bp, Homo sapiens
ggtaagctcggctag

SEQ ID NO: 197914 - DNA, 15 bp, Homo sapiens
gggtaagctcggcta

SEQ ID NO: 197915 - DNA, 15 bp, Homo sapiens
agggtaagctcggct

SEQ ID NO: 197916 - DNA, 15 bp, Homo sapiens
cagggtaagctcggc

SEQ ID NO: 197917 - DNA, 15 bp, Homo sapiens
gcagggtaagctcgg

SEQ ID NO: 197918 - DNA, 15 bp, Homo sapiens
ggcagggtaagctcg

SEQ ID NO: 197919 - DNA, 15 bp, Homo sapiens
tggcagggtaagctc

SEQ ID NO: 197920 - DNA, 15 bp, Homo sapiens
ttggcagggtaagct

SEQ ID NO: 197921 - DNA, 15 bp, Homo sapiens
attggcagggtaagc

SEQ ID NO: 197922 - DNA, 15 bp, Homo sapiens
tattggcagggtaag

SEQ ID NO: 197923 - DNA, 15 bp, Homo sapiens
ttattggcagggtaa

SEQ ID NO: 197924 - DNA, 15 bp, Homo sapiens
attattggcagggta

SEQ ID NO: 197925 - DNA, 15 bp, Homo sapiens
aattattggcagggt

SEQ ID NO: 197926 - DNA, 15 bp, Homo sapiens
aaattattggcaggg

SEQ ID NO: 197927 - DNA, 15 bp, Homo sapiens
aaaattattggcagg

SEQ ID NO: 197928 - DNA, 15 bp, Homo sapiens
aaaaattattggcag

SEQ ID NO: 197929 - DNA, 15 bp, Homo sapiens
aaaaaattattggca

SEQ ID NO: 197930 - DNA, 15 bp, Homo sapiens
taaaaaattattggc

SEQ ID NO: 197931 - DNA, 15 bp, Homo sapiens
gtaaaaaattattgg

SEQ ID NO: 197932 - DNA, 15 bp, Homo sapiens
tgtaaaaaattattg

SEQ ID NO: 197933 - DNA, 15 bp, Homo sapiens
ctgtaaaaaattatt

SEQ ID NO: 197934 - DNA, 15 bp, Homo sapiens
tctgtaaaaaattat

SEQ ID NO: 197935 - DNA, 15 bp, Homo sapiens
ttctgtaaaaaatta

SEQ ID NO: 197936 - DNA, 15 bp, Homo sapiens
attctgtaaaaaatt

SEQ ID NO: 197937 - DNA, 15 bp, Homo sapiens
aattctgtaaaaaat

SEQ ID NO: 197938 - DNA, 15 bp, Homo sapiens
caattctgtaaaaaa

SEQ ID NO: 197939 - DNA, 15 bp, Homo sapiens
ccaattctgtaaaaa

SEQ ID NO: 197940 - DNA, 15 bp, Homo sapiens
accaattctgtaaaa

SEQ ID NO: 197941 - DNA, 15 bp, Homo sapiens
taccaattctgtaaa

SEQ ID NO: 197942 - DNA, 15 bp, Homo sapiens
ttaccaattctgtaa

SEQ ID NO: 197943 - DNA, 15 bp, Homo sapiens
tttaccaattctgta

SEQ ID NO: 197944 - DNA, 15 bp, Homo sapiens
ttttaccaattctgt

SEQ ID NO: 197945 - DNA, 15 bp, Homo sapiens
gttttaccaattctg

SEQ ID NO: 197946 - DNA, 15 bp, Homo sapiens
cgttttaccaattct

SEQ ID NO: 197947 - DNA, 15 bp, Homo sapiens
ccgttttaccaattc

SEQ ID NO: 197948 - DNA, 15 bp, Homo sapiens
tccgttttaccaatt

SEQ ID NO: 197949 - DNA, 15 bp, Homo sapiens
ctccgttttaccaat

SEQ ID NO: 197950 - DNA, 15 bp, Homo sapiens
gctccgttttaccaa

SEQ ID NO: 197951 - DNA, 15 bp, Homo sapiens
tgctccgttttacca

SEQ ID NO: 197952 - DNA, 15 bp, Homo sapiens
gtgctccgttttacc

SEQ ID NO: 197953 - DNA, 15 bp, Homo sapiens
ggtgctccgttttac

SEQ ID NO: 197954 - DNA, 15 bp, Homo sapiens
aggtgctccgtttta

SEQ ID NO: 197955 - DNA, 15 bp, Homo sapiens
aaggtgctccgtttt

SEQ ID NO: 197956 - DNA, 15 bp, Homo sapiens
aaaggtgctccgttt

SEQ ID NO: 197957 - DNA, 15 bp, Homo sapiens
aaaaggtgctccgtt

SEQ ID NO: 197958 - DNA, 15 bp, Homo sapiens
aaaaaggtgctccgt

SEQ ID NO: 197959 - DNA, 15 bp, Homo sapiens
aaaaaaggtgctccg

SEQ ID NO: 197960 - DNA, 15 bp, Homo sapiens
aaaaaaaggtgctcc

SEQ ID NO: 197961 - DNA, 15 bp, Homo sapiens
aaaaaaaaggtgctc

SEQ ID NO: 197962 - DNA, 15 bp, Homo sapiens
caaaaaaaaggtgct

SEQ ID NO: 197963 - DNA, 15 bp, Homo sapiens
acaaaaaaaaggtgc

SEQ ID NO: 197964 - DNA, 15 bp, Homo sapiens
gacaaaaaaaaggtg

SEQ ID NO: 197965 - DNA, 15 bp, Homo sapiens
ggacaaaaaaaaggt

SEQ ID NO: 197966 - DNA, 15 bp, Homo sapiens
aggacaaaaaaaagg

SEQ ID NO: 197967 - DNA, 15 bp, Homo sapiens
aaggacaaaaaaaag

SEQ ID NO: 197968 - DNA, 15 bp, Homo sapiens
caaggacaaaaaaaa

SEQ ID NO: 197969 - DNA, 15 bp, Homo sapiens
ccaaggacaaaaaaa

SEQ ID NO: 197970 - DNA, 15 bp, Homo sapiens
gccaaggacaaaaaa

SEQ ID NO: 197971 - DNA, 15 bp, Homo sapiens
ggccaaggacaaaaa

SEQ ID NO: 197972 - DNA, 15 bp, Homo sapiens
tggccaaggacaaaa

SEQ ID NO: 197973 - DNA, 15 bp, Homo sapiens
gtggccaaggacaaa

SEQ ID NO: 197974 - DNA, 15 bp, Homo sapiens
tgtggccaaggacaa

SEQ ID NO: 197975 - DNA, 15 bp, Homo sapiens
gtgtggccaaggaca

SEQ ID NO: 197976 - DNA, 15 bp, Homo sapiens
agtgtggccaaggac

SEQ ID NO: 197977 - DNA, 15 bp, Homo sapiens
cagtgtggccaagga

SEQ ID NO: 197978 - DNA, 15 bp, Homo sapiens
acagtgtggccaagg

SEQ ID NO: 197979 - DNA, 15 bp, Homo sapiens
aacagtgtggccaag

SEQ ID NO: 197980 - DNA, 15 bp, Homo sapiens
taacagtgtggccaa

SEQ ID NO: 197981 - DNA, 15 bp, Homo sapiens
ataacagtgtggcca

SEQ ID NO: 197982 - DNA, 15 bp, Homo sapiens
gataacagtgtggcc

SEQ ID NO: 197983 - DNA, 15 bp, Homo sapiens
tgataacagtgtggc

SEQ ID NO: 197984 - DNA, 15 bp, Homo sapiens
ttgataacagtgtgg

SEQ ID NO: 197985 - DNA, 15 bp, Homo sapiens
gttgataacagtgtg

SEQ ID NO: 197986 - DNA, 15 bp, Homo sapiens
tgttgataacagtgt

SEQ ID NO: 197987 - DNA, 15 bp, Homo sapiens
ctgttgataacagtg

SEQ ID NO: 197988 - DNA, 15 bp, Homo sapiens
cctgttgataacagt

SEQ ID NO: 197989 - DNA, 15 bp, Homo sapiens
ccctgttgataacag

SEQ ID NO: 197990 - DNA, 15 bp, Homo sapiens
accctgttgataaca

SEQ ID NO: 197991 - DNA, 15 bp, Homo sapiens
caccctgttgataac

SEQ ID NO: 197992 - DNA, 15 bp, Homo sapiens
acaccctgttgataa

SEQ ID NO: 197993 - DNA, 15 bp, Homo sapiens
tacaccctgttgata

SEQ ID NO: 197994 - DNA, 15 bp, Homo sapiens
ctacaccctgttgat

SEQ ID NO: 197995 - DNA, 15 bp, Homo sapiens
tctacaccctgttga

SEQ ID NO: 197996 - DNA, 15 bp, Homo sapiens
atctacaccctgttg

SEQ ID NO: 197997 - DNA, 15 bp, Homo sapiens
aatctacaccctgtt

SEQ ID NO: 197998 - DNA, 15 bp, Homo sapiens
caatctacaccctgt

SEQ ID NO: 197999 - DNA, 15 bp, Homo sapiens
tcaatctacaccctg

SEQ ID NO: 198000 - DNA, 15 bp, Homo sapiens
gtcaatctacaccct

SEQ ID NO: 198001 - DNA, 15 bp, Homo sapiens
tgtcaatctacaccc

SEQ ID NO: 198002 - DNA, 15 bp, Homo sapiens
atgtcaatctacacc

SEQ ID NO: 198003 - DNA, 15 bp, Homo sapiens
gatgtcaatctacac

SEQ ID NO: 198004 - DNA, 15 bp, Homo sapiens
tgatgtcaatctaca

SEQ ID NO: 198005 - DNA, 15 bp, Homo sapiens
ttgatgtcaatctac

SEQ ID NO: 198006 - DNA, 15 bp, Homo sapiens
attgatgtcaatcta

SEQ ID NO: 198007 - DNA, 15 bp, Homo sapiens
gattgatgtcaatct

SEQ ID NO: 198008 - DNA, 15 bp, Homo sapiens
agattgatgtcaatc

SEQ ID NO: 198009 - DNA, 15 bp, Homo sapiens
cagattgatgtcaat

SEQ ID NO: 198010 - DNA, 15 bp, Homo sapiens
acagattgatgtcaa

SEQ ID NO: 198011 - DNA, 15 bp, Homo sapiens
tacagattgatgtca

SEQ ID NO: 198012 - DNA, 15 bp, Homo sapiens
ctacagattgatgtc

SEQ ID NO: 198013 - DNA, 15 bp, Homo sapiens
cctacagattgatgt

SEQ ID NO: 198014 - DNA, 15 bp, Homo sapiens
acctacagattgatg

SEQ ID NO: 198015 - DNA, 15 bp, Homo sapiens
cacctacagattgat

SEQ ID NO: 198016 - DNA, 15 bp, Homo sapiens
acacctacagattga

SEQ ID NO: 198017 - DNA, 15 bp, Homo sapiens
tacacctacagattg

SEQ ID NO: 198018 - DNA, 15 bp, Homo sapiens
ttacacctacagatt

SEQ ID NO: 198019 - DNA, 15 bp, Homo sapiens
tttacacctacagat

SEQ ID NO: 198020 - DNA, 15 bp, Homo sapiens
gtttacacctacaga

SEQ ID NO: 198021 - DNA, 15 bp, Homo sapiens
ggtttacacctacag

SEQ ID NO: 198022 - DNA, 15 bp, Homo sapiens
tggtttacacctaca

SEQ ID NO: 198023 - DNA, 15 bp, Homo sapiens
ctggtttacacctac

SEQ ID NO: 198024 - DNA, 15 bp, Homo sapiens
tctggtttacaccta

SEQ ID NO: 198025 - DNA, 15 bp, Homo sapiens
ttctggtttacacct

SEQ ID NO: 198026 - DNA, 15 bp, Homo sapiens
attctggtttacacc

SEQ ID NO: 198027 - DNA, 15 bp, Homo sapiens
aattctggtttacac

SEQ ID NO: 198028 - DNA, 15 bp, Homo sapiens
taattctggtttaca

SEQ ID NO: 198029 - DNA, 15 bp, Homo sapiens
gtaattctggtttac

SEQ ID NO: 198030 - DNA, 15 bp, Homo sapiens
agtaattctggttta

SEQ ID NO: 198031 - DNA, 15 bp, Homo sapiens
gagtaattctggttt

SEQ ID NO: 198032 - DNA, 15 bp, Homo sapiens
agagtaattctggtt

SEQ ID NO: 198033 - DNA, 15 bp, Homo sapiens
aagagtaattctggt

SEQ ID NO: 198034 - DNA, 15 bp, Homo sapiens
aaagagtaattctgg

SEQ ID NO: 198035 - DNA, 15 bp, Homo sapiens
caaagagtaattctg

SEQ ID NO: 198036 - DNA, 15 bp, Homo sapiens
acaaagagtaattct

SEQ ID NO: 198037 - DNA, 15 bp, Homo sapiens
cacaaagagtaattc

SEQ ID NO: 198038 - DNA, 15 bp, Homo sapiens
tcacaaagagtaatt

SEQ ID NO: 198039 - DNA, 15 bp, Homo sapiens
gtcacaaagagtaat

SEQ ID NO: 198040 - DNA, 15 bp, Homo sapiens
ggtcacaaagagtaa

SEQ ID NO: 198041 - DNA, 15 bp, Homo sapiens
tggtcacaaagagta

SEQ ID NO: 198042 - DNA, 15 bp, Homo sapiens
gtggtcacaaagagt

SEQ ID NO: 198043 - DNA, 15 bp, Homo sapiens
ggtggtcacaaagag

SEQ ID NO: 198044 - DNA, 15 bp, Homo sapiens
tggtggtcacaaaga

SEQ ID NO: 198045 - DNA, 15 bp, Homo sapiens
ctggtggtcacaaag

SEQ ID NO: 198046 - DNA, 15 bp, Homo sapiens
cctggtggtcacaaa

SEQ ID NO: 198047 - DNA, 15 bp, Homo sapiens
tcctggtggtcacaa

SEQ ID NO: 198048 - DNA, 15 bp, Homo sapiens
ttcctggtggtcaca

SEQ ID NO: 198049 - DNA, 15 bp, Homo sapiens
tttcctggtggtcac

SEQ ID NO: 198050 - DNA, 15 bp, Homo sapiens
atttcctggtggtca

SEQ ID NO: 198051 - DNA, 15 bp, Homo sapiens
tatttcctggtggtc

SEQ ID NO: 198052 - DNA, 15 bp, Homo sapiens
ctatttcctggtggt

SEQ ID NO: 198053 - DNA, 15 bp, Homo sapiens
tctatttcctggtgg

SEQ ID NO: 198054 - DNA, 15 bp, Homo sapiens
ctctatttcctggtg

SEQ ID NO: 198055 - DNA, 15 bp, Homo sapiens
gctctatttcctggt

SEQ ID NO: 198056 - DNA, 15 bp, Homo sapiens
tgctctatttcctgg

SEQ ID NO: 198057 - DNA, 15 bp, Homo sapiens
ctgctctatttcctg

SEQ ID NO: 198058 - DNA, 15 bp, Homo sapiens
actgctctatttcct

SEQ ID NO: 198059 - DNA, 15 bp, Homo sapiens
aactgctctatttcc

SEQ ID NO: 198060 - DNA, 15 bp, Homo sapiens
gaactgctctatttc

SEQ ID NO: 198061 - DNA, 15 bp, Homo sapiens
tgaactgctctattt

SEQ ID NO: 198062 - DNA, 15 bp, Homo sapiens
ctgaactgctctatt

SEQ ID NO: 198063 - DNA, 15 bp, Homo sapiens
actgaactgctctat

SEQ ID NO: 198064 - DNA, 15 bp, Homo sapiens
aactgaactgctcta

SEQ ID NO: 198065 - DNA, 15 bp, Homo sapiens
gaactgaactgctct

SEQ ID NO: 198066 - DNA, 15 bp, Homo sapiens
tgaactgaactgctc

SEQ ID NO: 198067 - DNA, 15 bp, Homo sapiens
ctgaactgaactgct

SEQ ID NO: 198068 - DNA, 15 bp, Homo sapiens
cctgaactgaactgc

SEQ ID NO: 198069 - DNA, 15 bp, Homo sapiens
ccctgaactgaactg

SEQ ID NO: 198070 - DNA, 15 bp, Homo sapiens
cccctgaactgaact

SEQ ID NO: 198071 - DNA, 15 bp, Homo sapiens
acccctgaactgaac

SEQ ID NO: 198072 - DNA, 15 bp, Homo sapiens
aacccctgaactgaa

SEQ ID NO: 198073 - DNA, 15 bp, Homo sapiens
aaacccctgaactga

SEQ ID NO: 198074 - DNA, 15 bp, Homo sapiens
gaaacccctgaactg

SEQ ID NO: 198075 - DNA, 15 bp, Homo sapiens
agaaacccctgaact

SEQ ID NO: 198076 - DNA, 15 bp, Homo sapiens
aagaaacccctgaac

SEQ ID NO: 198077 - DNA, 15 bp, Homo sapiens
aaagaaacccctgaa

SEQ ID NO: 198078 - DNA, 15 bp, Homo sapiens
gaaagaaacccctga

SEQ ID NO: 198079 - DNA, 15 bp, Homo sapiens
agaaagaaacccctg

SEQ ID NO: 198080 - DNA, 15 bp, Homo sapiens
cagaaagaaacccct

SEQ ID NO: 198081 - DNA, 15 bp, Homo sapiens
acagaaagaaacccc

SEQ ID NO: 198082 - DNA, 15 bp, Homo sapiens
cacagaaagaaaccc

SEQ ID NO: 198083 - DNA, 15 bp, Homo sapiens
tcacagaaagaaacc

SEQ ID NO: 198084 - DNA, 15 bp, Homo sapiens
ttcacagaaagaaac

SEQ ID NO: 198085 - DNA, 15 bp, Homo sapiens
attcacagaaagaaa

SEQ ID NO: 198086 - DNA, 15 bp, Homo sapiens
aattcacagaaagaa

SEQ ID NO: 198087 - DNA, 15 bp, Homo sapiens
aaattcacagaaaga

SEQ ID NO: 198088 - DNA, 15 bp, Homo sapiens
taaattcacagaaag

SEQ ID NO: 198089 - DNA, 15 bp, Homo sapiens
ctaaattcacagaaa

SEQ ID NO: 198090 - DNA, 15 bp, Homo sapiens
gctaaattcacagaa

SEQ ID NO: 198091 - DNA, 15 bp, Homo sapiens
tgctaaattcacaga

SEQ ID NO: 198092 - DNA, 15 bp, Homo sapiens
gtgctaaattcacag

SEQ ID NO: 198093 - DNA, 15 bp, Homo sapiens
agtgctaaattcaca

SEQ ID NO: 198094 - DNA, 15 bp, Homo sapiens
cagtgctaaattcac

SEQ ID NO: 198095 - DNA, 15 bp, Homo sapiens
acagtgctaaattca

SEQ ID NO: 198096 - DNA, 15 bp, Homo sapiens
cacagtgctaaattc

SEQ ID NO: 198097 - DNA, 15 bp, Homo sapiens
tcacagtgctaaatt

SEQ ID NO: 198098 - DNA, 15 bp, Homo sapiens
gtcacagtgctaaat

SEQ ID NO: 198099 - DNA, 15 bp, Homo sapiens
ggtcacagtgctaaa

SEQ ID NO: 198100 - DNA, 15 bp, Homo sapiens
aggtcacagtgctaa

SEQ ID NO: 198101 - DNA, 15 bp, Homo sapiens
caggtcacagtgcta

SEQ ID NO: 198102 - DNA, 15 bp, Homo sapiens
gcaggtcacagtgct

SEQ ID NO: 198103 - DNA, 15 bp, Homo sapiens
tgcaggtcacagtgc

SEQ ID NO: 198104 - DNA, 15 bp, Homo sapiens
atgcaggtcacagtg

SEQ ID NO: 198105 - DNA, 15 bp, Homo sapiens
tatgcaggtcacagt

SEQ ID NO: 198106 - DNA, 15 bp, Homo sapiens
gtatgcaggtcacag

SEQ ID NO: 198107 - DNA, 15 bp, Homo sapiens
agtatgcaggtcaca

SEQ ID NO: 198108 - DNA, 15 bp, Homo sapiens
tagtatgcaggtcac

SEQ ID NO: 198109 - DNA, 15 bp, Homo sapiens
gtagtatgcaggtca

SEQ ID NO: 198110 - DNA, 15 bp, Homo sapiens
tgtagtatgcaggtc

SEQ ID NO: 198111 - DNA, 15 bp, Homo sapiens
ttgtagtatgcaggt

SEQ ID NO: 198112 - DNA, 15 bp, Homo sapiens
cttgtagtatgcagg

SEQ ID NO: 198113 - DNA, 15 bp, Homo sapiens
acttgtagtatgcag

SEQ ID NO: 198114 - DNA, 15 bp, Homo sapiens
gacttgtagtatgca

SEQ ID NO: 198115 - DNA, 15 bp, Homo sapiens
agacttgtagtatgc

SEQ ID NO: 198116 - DNA, 15 bp, Homo sapiens
tagacttgtagtatg

SEQ ID NO: 198117 - DNA, 15 bp, Homo sapiens
gtagacttgtagtat

SEQ ID NO: 198118 - DNA, 15 bp, Homo sapiens
agtagacttgtagta

SEQ ID NO: 198119 - DNA, 15 bp, Homo sapiens
aagtagacttgtagt

SEQ ID NO: 198120 - DNA, 15 bp, Homo sapiens
aaagtagacttgtag

SEQ ID NO: 198121 - DNA, 15 bp, Homo sapiens
caaagtagacttgta

SEQ ID NO: 198122 - DNA, 15 bp, Homo sapiens
acaaagtagacttgt

SEQ ID NO: 198123 - DNA, 15 bp, Homo sapiens
aacaaagtagacttg

SEQ ID NO: 198124 - DNA, 15 bp, Homo sapiens
aaacaaagtagactt

SEQ ID NO: 198125 - DNA, 15 bp, Homo sapiens
aaaacaaagtagact

SEQ ID NO: 198126 - DNA, 15 bp, Homo sapiens
gaaaacaaagtagac

SEQ ID NO: 198127 - DNA, 15 bp, Homo sapiens
agaaaacaaagtaga

SEQ ID NO: 198128 - DNA, 15 bp, Homo sapiens
tagaaaacaaagtag

SEQ ID NO: 198129 - DNA, 15 bp, Homo sapiens
atagaaaacaaagta

SEQ ID NO: 198130 - DNA, 15 bp, Homo sapiens
gatagaaaacaaagt

SEQ ID NO: 198131 - DNA, 15 bp, Homo sapiens
ggatagaaaacaaag

SEQ ID NO: 198132 - DNA, 15 bp, Homo sapiens
tggatagaaaacaaa

SEQ ID NO: 198133 - DNA, 15 bp, Homo sapiens
atggatagaaaacaa

SEQ ID NO: 198134 - DNA, 15 bp, Homo sapiens
aatggatagaaaaca

SEQ ID NO: 198135 - DNA, 15 bp, Homo sapiens
caatggatagaaaac

SEQ ID NO: 198136 - DNA, 15 bp, Homo sapiens
acaatggatagaaaa

SEQ ID NO: 198137 - DNA, 15 bp, Homo sapiens
aacaatggatagaaa

SEQ ID NO: 198138 - DNA, 15 bp, Homo sapiens
aaacaatggatagaa

SEQ ID NO: 198139 - DNA, 15 bp, Homo sapiens
caaacaatggataga

SEQ ID NO: 198140 - DNA, 15 bp, Homo sapiens
acaaacaatggatag

SEQ ID NO: 198141 - DNA, 15 bp, Homo sapiens
tacaaacaatggata

SEQ ID NO: 198142 - DNA, 15 bp, Homo sapiens
atacaaacaatggat

SEQ ID NO: 198143 - DNA, 15 bp, Homo sapiens
gatacaaacaatgga

SEQ ID NO: 198144 - DNA, 15 bp, Homo sapiens
agatacaaacaatgg

SEQ ID NO: 198145 - DNA, 15 bp, Homo sapiens
cagatacaaacaatg

SEQ ID NO: 198146 - DNA, 15 bp, Homo sapiens
ccagatacaaacaat

SEQ ID NO: 198147 - DNA, 15 bp, Homo sapiens
cccagatacaaacaa

SEQ ID NO: 198148 - DNA, 15 bp, Homo sapiens
acccagatacaaaca

SEQ ID NO: 198149 - DNA, 15 bp, Homo sapiens
tacccagatacaaac

SEQ ID NO: 198150 - DNA, 15 bp, Homo sapiens
atacccagatacaaa

SEQ ID NO: 198151 - DNA, 15 bp, Homo sapiens
aatacccagatacaa

SEQ ID NO: 198152 - DNA, 15 bp, Homo sapiens
caatacccagataca

SEQ ID NO: 198153 - DNA, 15 bp, Homo sapiens
gcaatacccagatac

SEQ ID NO: 198154 - DNA, 15 bp, Homo sapiens
tgcaatacccagata

SEQ ID NO: 198155 - DNA, 15 bp, Homo sapiens
ttgcaatacccagat

SEQ ID NO: 198156 - DNA, 15 bp, Homo sapiens
tttgcaatacccaga

SEQ ID NO: 198157 - DNA, 15 bp, Homo sapiens
ttttgcaatacccag

SEQ ID NO: 198158 - DNA, 15 bp, Homo sapiens
cttttgcaataccca

SEQ ID NO: 198159 - DNA, 15 bp, Homo sapiens
ccttttgcaataccc

SEQ ID NO: 198160 - DNA, 15 bp, Homo sapiens
accttttgcaatacc

SEQ ID NO: 198161 - DNA, 15 bp, Homo sapiens
taccttttgcaatac

SEQ ID NO: 198162 - DNA, 15 bp, Homo sapiens
ctaccttttgcaata

SEQ ID NO: 198163 - DNA, 15 bp, Homo sapiens
cctaccttttgcaat

SEQ ID NO: 198164 - DNA, 15 bp, Homo sapiens
tcctaccttttgcaa

SEQ ID NO: 198165 - DNA, 15 bp, Homo sapiens
ttcctaccttttgca

SEQ ID NO: 198166 - DNA, 15 bp, Homo sapiens
tttcctaccttttgc

SEQ ID NO: 198167 - DNA, 15 bp, Homo sapiens
ttttcctaccttttg

SEQ ID NO: 198168 - DNA, 15 bp, Homo sapiens
cttttcctacctttt

SEQ ID NO: 198169 - DNA, 15 bp, Homo sapiens
ccttttcctaccttt

SEQ ID NO: 198170 - DNA, 15 bp, Homo sapiens
tccttttcctacctt

SEQ ID NO: 198171 - DNA, 15 bp, Homo sapiens
gtccttttcctacct

SEQ ID NO: 198172 - DNA, 15 bp, Homo sapiens
ggtccttttcctacc

SEQ ID NO: 198173 - DNA, 15 bp, Homo sapiens
tggtccttttcctac

SEQ ID NO: 198174 - DNA, 15 bp, Homo sapiens
ttggtccttttccta

SEQ ID NO: 198175 - DNA, 15 bp, Homo sapiens
gttggtccttttcct

SEQ ID NO: 198176 - DNA, 15 bp, Homo sapiens
ggttggtccttttcc

SEQ ID NO: 198177 - DNA, 15 bp, Homo sapiens
tggttggtccttttc

SEQ ID NO: 198178 - DNA, 15 bp, Homo sapiens
ctggttggtcctttt

SEQ ID NO: 198179 - DNA, 15 bp, Homo sapiens
tctggttggtccttt

SEQ ID NO: 198180 - DNA, 15 bp, Homo sapiens
atctggttggtcctt

SEQ ID NO: 198181 - DNA, 15 bp, Homo sapiens
gatctggttggtcct

SEQ ID NO: 198182 - DNA, 15 bp, Homo sapiens
tgatctggttggtcc

SEQ ID NO: 198183 - DNA, 15 bp, Homo sapiens
ctgatctggttggtc

SEQ ID NO: 198184 - DNA, 15 bp, Homo sapiens
gctgatctggttggt

SEQ ID NO: 198185 - DNA, 15 bp, Homo sapiens
tgctgatctggttgg

SEQ ID NO: 198186 - DNA, 15 bp, Homo sapiens
ctgctgatctggttg

SEQ ID NO: 198187 - DNA, 15 bp, Homo sapiens
tctgctgatctggtt

SEQ ID NO: 198188 - DNA, 15 bp, Homo sapiens
ctctgctgatctggt

SEQ ID NO: 198189 - DNA, 15 bp, Homo sapiens
tctctgctgatctgg

SEQ ID NO: 198190 - DNA, 15 bp, Homo sapiens
ttctctgctgatctg

SEQ ID NO: 198191 - DNA, 15 bp, Homo sapiens
cttctctgctgatct

SEQ ID NO: 198192 - DNA, 15 bp, Homo sapiens
tcttctctgctgatc

SEQ ID NO: 198193 - DNA, 15 bp, Homo sapiens
ctcttctctgctgat

SEQ ID NO: 198194 - DNA, 15 bp, Homo sapiens
actcttctctgctga

SEQ ID NO: 198195 - DNA, 15 bp, Homo sapiens
aactcttctctgctg

SEQ ID NO: 198196 - DNA, 15 bp, Homo sapiens
caactcttctctgct

SEQ ID NO: 198197 - DNA, 15 bp, Homo sapiens
gcaactcttctctgc

SEQ ID NO: 198198 - DNA, 15 bp, Homo sapiens
ggcaactcttctctg

SEQ ID NO: 198199 - DNA, 15 bp, Homo sapiens
aggcaactcttctct

SEQ ID NO: 198200 - DNA, 15 bp, Homo sapiens
aaggcaactcttctc

SEQ ID NO: 198201 - DNA, 15 bp, Homo sapiens
caaggcaactcttct

SEQ ID NO: 198202 - DNA, 15 bp, Homo sapiens
ccaaggcaactcttc

SEQ ID NO: 198203 - DNA, 15 bp, Homo sapiens
tccaaggcaactctt

SEQ ID NO: 198204 - DNA, 15 bp, Homo sapiens
ctccaaggcaactct

SEQ ID NO: 198205 - DNA, 15 bp, Homo sapiens
actccaaggcaactc

SEQ ID NO: 198206 - DNA, 15 bp, Homo sapiens
aactccaaggcaact

SEQ ID NO: 198207 - DNA, 15 bp, Homo sapiens
aaactccaaggcaac

SEQ ID NO: 198208 - DNA, 15 bp, Homo sapiens
aaaactccaaggcaa

SEQ ID NO: 198209 - DNA, 15 bp, Homo sapiens
gaaaactccaaggca

SEQ ID NO: 198210 - DNA, 15 bp, Homo sapiens
agaaaactccaaggc

SEQ ID NO: 198211 - DNA, 15 bp, Homo sapiens
aagaaaactccaagg

SEQ ID NO: 198212 - DNA, 15 bp, Homo sapiens
aaagaaaactccaag

SEQ ID NO: 198213 - DNA, 15 bp, Homo sapiens
aaaagaaaactccaa

SEQ ID NO: 198214 - DNA, 15 bp, Homo sapiens
taaaagaaaactcca

SEQ ID NO: 198215 - DNA, 15 bp, Homo sapiens
ctaaaagaaaactcc

SEQ ID NO: 198216 - DNA, 15 bp, Homo sapiens
actaaaagaaaactc

SEQ ID NO: 198217 - DNA, 15 bp, Homo sapiens
aactaaaagaaaact

SEQ ID NO: 198218 - DNA, 15 bp, Homo sapiens
aaactaaaagaaaac

SEQ ID NO: 198219 - DNA, 15 bp, Homo sapiens
aaaactaaaagaaaa

SEQ ID NO: 198220 - DNA, 15 bp, Homo sapiens
gaaaactaaaagaaa

SEQ ID NO: 198221 - DNA, 15 bp, Homo sapiens
agaaaactaaaagaa

SEQ ID NO: 198222 - DNA, 15 bp, Homo sapiens
cagaaaactaaaaga

SEQ ID NO: 198223 - DNA, 15 bp, Homo sapiens
gcagaaaactaaaag

SEQ ID NO: 198224 - DNA, 15 bp, Homo sapiens
tgcagaaaactaaaa

SEQ ID NO: 198225 - DNA, 15 bp, Homo sapiens
ctgcagaaaactaaa

SEQ ID NO: 198226 - DNA, 15 bp, Homo sapiens
actgcagaaaactaa

SEQ ID NO: 198227 - DNA, 15 bp, Homo sapiens
aactgcagaaaacta

SEQ ID NO: 198228 - DNA, 15 bp, Homo sapiens
gaactgcagaaaact

SEQ ID NO: 198229 - DNA, 15 bp, Homo sapiens
tgaactgcagaaaac

SEQ ID NO: 198230 - DNA, 15 bp, Homo sapiens
atgaactgcagaaaa

SEQ ID NO: 198231 - DNA, 15 bp, Homo sapiens
aatgaactgcagaaa

SEQ ID NO: 198232 - DNA, 15 bp, Homo sapiens
taatgaactgcagaa

SEQ ID NO: 198233 - DNA, 15 bp, Homo sapiens
ctaatgaactgcaga

SEQ ID NO: 198234 - DNA, 15 bp, Homo sapiens
tctaatgaactgcag

SEQ ID NO: 198235 - DNA, 15 bp, Homo sapiens
atctaatgaactgca

SEQ ID NO: 198236 - DNA, 15 bp, Homo sapiens
tatctaatgaactgc

SEQ ID NO: 198237 - DNA, 15 bp, Homo sapiens
ctatctaatgaactg

SEQ ID NO: 198238 - DNA, 15 bp, Homo sapiens
actatctaatgaact

SEQ ID NO: 198239 - DNA, 15 bp, Homo sapiens
tactatctaatgaac

SEQ ID NO: 198240 - DNA, 15 bp, Homo sapiens
ttactatctaatgaa

SEQ ID NO: 198241 - DNA, 15 bp, Homo sapiens
gttactatctaatga

SEQ ID NO: 198242 - DNA, 15 bp, Homo sapiens
agttactatctaatg

SEQ ID NO: 198243 - DNA, 15 bp, Homo sapiens
tagttactatctaat

SEQ ID NO: 198244 - DNA, 15 bp, Homo sapiens
ctagttactatctaa

SEQ ID NO: 198245 - DNA, 15 bp, Homo sapiens
cctagttactatcta

SEQ ID NO: 198246 - DNA, 15 bp, Homo sapiens
gcctagttactatct

SEQ ID NO: 198247 - DNA, 15 bp, Homo sapiens
ggcctagttactatc

SEQ ID NO: 198248 - DNA, 15 bp, Homo sapiens
tggcctagttactat

SEQ ID NO: 198249 - DNA, 15 bp, Homo sapiens
atggcctagttacta

SEQ ID NO: 198250 - DNA, 15 bp, Homo sapiens
catggcctagttact

SEQ ID NO: 198251 - DNA, 15 bp, Homo sapiens
acatggcctagttac

SEQ ID NO: 198252 - DNA, 15 bp, Homo sapiens
gacatggcctagtta

SEQ ID NO: 198253 - DNA, 15 bp, Homo sapiens
tgacatggcctagtt

SEQ ID NO: 198254 - DNA, 15 bp, Homo sapiens
atgacatggcctagt

SEQ ID NO: 198255 - DNA, 15 bp, Homo sapiens
aatgacatggcctag

SEQ ID NO: 198256 - DNA, 15 bp, Homo sapiens
aaatgacatggccta

SEQ ID NO: 198257 - DNA, 15 bp, Homo sapiens
aaaatgacatggcct

SEQ ID NO: 198258 - DNA, 15 bp, Homo sapiens
taaaatgacatggcc

SEQ ID NO: 198259 - DNA, 15 bp, Homo sapiens
gtaaaatgacatggc

SEQ ID NO: 198260 - DNA, 15 bp, Homo sapiens
agtaaaatgacatgg

SEQ ID NO: 198261 - DNA, 15 bp, Homo sapiens
gagtaaaatgacatg

SEQ ID NO: 198262 - DNA, 15 bp, Homo sapiens
ggagtaaaatgacat

SEQ ID NO: 198263 - DNA, 15 bp, Homo sapiens
gggagtaaaatgaca

SEQ ID NO: 198264 - DNA, 15 bp, Homo sapiens
agggagtaaaatgac

SEQ ID NO: 198265 - DNA, 15 bp, Homo sapiens
aagggagtaaaatga

SEQ ID NO: 198266 - DNA, 15 bp, Homo sapiens
caagggagtaaaatg

SEQ ID NO: 198267 - DNA, 15 bp, Homo sapiens
acaagggagtaaaat

SEQ ID NO: 198268 - DNA, 15 bp, Homo sapiens
tacaagggagtaaaa

SEQ ID NO: 198269 - DNA, 15 bp, Homo sapiens
ctacaagggagtaaa

SEQ ID NO: 198270 - DNA, 15 bp, Homo sapiens
actacaagggagtaa

SEQ ID NO: 198271 - DNA, 15 bp, Homo sapiens
cactacaagggagta

SEQ ID NO: 198272 - DNA, 15 bp, Homo sapiens
tcactacaagggagt

SEQ ID NO: 198273 - DNA, 15 bp, Homo sapiens
ttcactacaagggag

SEQ ID NO: 198274 - DNA, 15 bp, Homo sapiens
cttcactacaaggga

SEQ ID NO: 198275 - DNA, 15 bp, Homo sapiens
tcttcactacaaggg

SEQ ID NO: 198276 - DNA, 15 bp, Homo sapiens
atcttcactacaagg

SEQ ID NO: 198277 - DNA, 15 bp, Homo sapiens
tatcttcactacaag

SEQ ID NO: 198278 - DNA, 15 bp, Homo sapiens
atatcttcactacaa

SEQ ID NO: 198279 - DNA, 15 bp, Homo sapiens
catatcttcactaca

SEQ ID NO: 198280 - DNA, 15 bp, Homo sapiens
acatatcttcactac

SEQ ID NO: 198281 - DNA, 15 bp, Homo sapiens
aacatatcttcacta

SEQ ID NO: 198282 - DNA, 15 bp, Homo sapiens
caacatatcttcact

SEQ ID NO: 198283 - DNA, 15 bp, Homo sapiens
tcaacatatcttcac

SEQ ID NO: 198284 - DNA, 15 bp, Homo sapiens
ttcaacatatcttca

SEQ ID NO: 198285 - DNA, 15 bp, Homo sapiens
cttcaacatatcttc

SEQ ID NO: 198286 - DNA, 15 bp, Homo sapiens
acttcaacatatctt

SEQ ID NO: 198287 - DNA, 15 bp, Homo sapiens
aacttcaacatatct

SEQ ID NO: 198288 - DNA, 15 bp, Homo sapiens
caacttcaacatatc

SEQ ID NO: 198289 - DNA, 15 bp, Homo sapiens
acaacttcaacatat

SEQ ID NO: 198290 - DNA, 15 bp, Homo sapiens
tacaacttcaacata

SEQ ID NO: 198291 - DNA, 15 bp, Homo sapiens
gtacaacttcaacat

SEQ ID NO: 198292 - DNA, 15 bp, Homo sapiens
agtacaacttcaaca

SEQ ID NO: 198293 - DNA, 15 bp, Homo sapiens
cagtacaacttcaac

SEQ ID NO: 198294 - DNA, 15 bp, Homo sapiens
ccagtacaacttcaa

SEQ ID NO: 198295 - DNA, 15 bp, Homo sapiens
accagtacaacttca

SEQ ID NO: 198296 - DNA, 15 bp, Homo sapiens
taccagtacaacttc

SEQ ID NO: 198297 - DNA, 15 bp, Homo sapiens
ataccagtacaactt

SEQ ID NO: 198298 - DNA, 15 bp, Homo sapiens
tataccagtacaact

SEQ ID NO: 198299 - DNA, 15 bp, Homo sapiens
gtataccagtacaac

SEQ ID NO: 198300 - DNA, 15 bp, Homo sapiens
agtataccagtacaa

SEQ ID NO: 198301 - DNA, 15 bp, Homo sapiens
gagtataccagtaca

SEQ ID NO: 198302 - DNA, 15 bp, Homo sapiens
agagtataccagtac

SEQ ID NO: 198303 - DNA, 15 bp, Homo sapiens
aagagtataccagta

SEQ ID NO: 198304 - DNA, 15 bp, Homo sapiens
gaagagtataccagt

SEQ ID NO: 198305 - DNA, 15 bp, Homo sapiens
agaagagtataccag

SEQ ID NO: 198306 - DNA, 15 bp, Homo sapiens
tagaagagtatacca

SEQ ID NO: 198307 - DNA, 15 bp, Homo sapiens
gtagaagagtatacc

SEQ ID NO: 198308 - DNA, 15 bp, Homo sapiens
ggtagaagagtatac

SEQ ID NO: 198309 - DNA, 15 bp, Homo sapiens
aggtagaagagtata

SEQ ID NO: 198310 - DNA, 15 bp, Homo sapiens
aaggtagaagagtat

SEQ ID NO: 198311 - DNA, 15 bp, Homo sapiens
aaaggtagaagagta

SEQ ID NO: 198312 - DNA, 15 bp, Homo sapiens
gaaaggtagaagagt

SEQ ID NO: 198313 - DNA, 15 bp, Homo sapiens
agaaaggtagaagag

SEQ ID NO: 198314 - DNA, 15 bp, Homo sapiens
cagaaaggtagaaga

SEQ ID NO: 198315 - DNA, 15 bp, Homo sapiens
acagaaaggtagaag

SEQ ID NO: 198316 - DNA, 15 bp, Homo sapiens
tacagaaaggtagaa

SEQ ID NO: 198317 - DNA, 15 bp, Homo sapiens
ttacagaaaggtaga

SEQ ID NO: 198318 - DNA, 15 bp, Homo sapiens
attacagaaaggtag

SEQ ID NO: 198319 - DNA, 15 bp, Homo sapiens
aattacagaaaggta

SEQ ID NO: 198320 - DNA, 15 bp, Homo sapiens
aaattacagaaaggt

SEQ ID NO: 198321 - DNA, 15 bp, Homo sapiens
aaaattacagaaagg

SEQ ID NO: 198322 - DNA, 15 bp, Homo sapiens
taaaattacagaaag

SEQ ID NO: 198323 - DNA, 15 bp, Homo sapiens
ataaaattacagaaa

SEQ ID NO: 198324 - DNA, 15 bp, Homo sapiens
tataaaattacagaa

SEQ ID NO: 198325 - DNA, 15 bp, Homo sapiens
atataaaattacaga

SEQ ID NO: 198326 - DNA, 15 bp, Homo sapiens
aatataaaattacag

SEQ ID NO: 198327 - DNA, 15 bp, Homo sapiens
caatataaaattaca

SEQ ID NO: 198328 - DNA, 15 bp, Homo sapiens
acaatataaaattac

SEQ ID NO: 198329 - DNA, 15 bp, Homo sapiens
cacaatataaaatta

SEQ ID NO: 198330 - DNA, 15 bp, Homo sapiens
acacaatataaaatt

SEQ ID NO: 198331 - DNA, 15 bp, Homo sapiens
tacacaatataaaat

SEQ ID NO: 198332 - DNA, 15 bp, Homo sapiens
ctacacaatataaaa

SEQ ID NO: 198333 - DNA, 15 bp, Homo sapiens
tctacacaatataaa

SEQ ID NO: 198334 - DNA, 15 bp, Homo sapiens
gtctacacaatataa

SEQ ID NO: 198335 - DNA, 15 bp, Homo sapiens
agtctacacaatata

SEQ ID NO: 198336 - DNA, 15 bp, Homo sapiens
aagtctacacaatat

SEQ ID NO: 198337 - DNA, 15 bp, Homo sapiens
caagtctacacaata

SEQ ID NO: 198338 - DNA, 15 bp, Homo sapiens
tcaagtctacacaat

SEQ ID NO: 198339 - DNA, 15 bp, Homo sapiens
atcaagtctacacaa

SEQ ID NO: 198340 - DNA, 15 bp, Homo sapiens
tatcaagtctacaca

SEQ ID NO: 198341 - DNA, 15 bp, Homo sapiens
ttatcaagtctacac

SEQ ID NO: 198342 - DNA, 15 bp, Homo sapiens
tttatcaagtctaca

SEQ ID NO: 198343 - DNA, 15 bp, Homo sapiens
ttttatcaagtctac

SEQ ID NO: 198344 - DNA, 15 bp, Homo sapiens
attttatcaagtcta

SEQ ID NO: 198345 - DNA, 15 bp, Homo sapiens
aattttatcaagtct

SEQ ID NO: 198346 - DNA, 15 bp, Homo sapiens
aaattttatcaagtc

SEQ ID NO: 198347 - DNA, 15 bp, Homo sapiens
taaattttatcaagt

SEQ ID NO: 198348 - DNA, 15 bp, Homo sapiens
ataaattttatcaag

SEQ ID NO: 198349 - DNA, 15 bp, Homo sapiens
cataaattttatcaa

SEQ ID NO: 198350 - DNA, 15 bp, Homo sapiens
acataaattttatca

SEQ ID NO: 198351 - DNA, 15 bp, Homo sapiens
cacataaattttatc

SEQ ID NO: 198352 - DNA, 15 bp, Homo sapiens
acacataaattttat

SEQ ID NO: 198353 - DNA, 15 bp, Homo sapiens
gacacataaatttta

SEQ ID NO: 198354 - DNA, 15 bp, Homo sapiens
tgacacataaatttt

SEQ ID NO: 198355 - DNA, 15 bp, Homo sapiens
ttgacacataaattt

SEQ ID NO: 198356 - DNA, 15 bp, Homo sapiens
attgacacataaatt

SEQ ID NO: 198357 - DNA, 15 bp, Homo sapiens
gattgacacataaat

SEQ ID NO: 198358 - DNA, 15 bp, Homo sapiens
tgattgacacataaa

SEQ ID NO: 198359 - DNA, 15 bp, Homo sapiens
gtgattgacacataa

SEQ ID NO: 198360 - DNA, 15 bp, Homo sapiens
ggtgattgacacata

SEQ ID NO: 198361 - DNA, 15 bp, Homo sapiens
tggtgattgacacat

SEQ ID NO: 198362 - DNA, 15 bp, Homo sapiens
gtggtgattgacaca

SEQ ID NO: 198363 - DNA, 15 bp, Homo sapiens
ggtggtgattgacac

SEQ ID NO: 198364 - DNA, 15 bp, Homo sapiens
tggtggtgattgaca

SEQ ID NO: 198365 - DNA, 15 bp, Homo sapiens
atggtggtgattgac

SEQ ID NO: 198366 - DNA, 15 bp, Homo sapiens
aatggtggtgattga

SEQ ID NO: 198367 - DNA, 15 bp, Homo sapiens
taatggtggtgattg

SEQ ID NO: 198368 - DNA, 15 bp, Homo sapiens
ttaatggtggtgatt

SEQ ID NO: 198369 - DNA, 15 bp, Homo sapiens
attaatggtggtgat

SEQ ID NO: 198370 - DNA, 15 bp, Homo sapiens
tattaatggtggtga

SEQ ID NO: 198371 - DNA, 15 bp, Homo sapiens
atattaatggtggtg

SEQ ID NO: 198372 - DNA, 15 bp, Homo sapiens
gatattaatggtggt

SEQ ID NO: 198373 - DNA, 15 bp, Homo sapiens
tgatattaatggtgg

SEQ ID NO: 198374 - DNA, 15 bp, Homo sapiens
ttgatattaatggtg

SEQ ID NO: 198375 - DNA, 15 bp, Homo sapiens
attgatattaatggt

SEQ ID NO: 198376 - DNA, 15 bp, Homo sapiens
tattgatattaatgg

SEQ ID NO: 198377 - DNA, 15 bp, Homo sapiens
atattgatattaatg

SEQ ID NO: 198378 - DNA, 15 bp, Homo sapiens
aatattgatattaat

SEQ ID NO: 198379 - DNA, 15 bp, Homo sapiens
caatattgatattaa

SEQ ID NO: 198380 - DNA, 15 bp, Homo sapiens
tcaatattgatatta

SEQ ID NO: 198381 - DNA, 15 bp, Homo sapiens
ctcaatattgatatt

SEQ ID NO: 198382 - DNA, 15 bp, Homo sapiens
gctcaatattgatat

SEQ ID NO: 198383 - DNA, 15 bp, Homo sapiens
ggctcaatattgata

SEQ ID NO: 198384 - DNA, 15 bp, Homo sapiens
aggctcaatattgat

SEQ ID NO: 198385 - DNA, 15 bp, Homo sapiens
gaggctcaatattga

SEQ ID NO: 198386 - DNA, 15 bp, Homo sapiens
tgaggctcaatattg

SEQ ID NO: 198387 - DNA, 15 bp, Homo sapiens
ttgaggctcaatatt

SEQ ID NO: 198388 - DNA, 15 bp, Homo sapiens
attgaggctcaatat

SEQ ID NO: 198389 - DNA, 15 bp, Homo sapiens
aattgaggctcaata

SEQ ID NO: 198390 - DNA, 15 bp, Homo sapiens
gaattgaggctcaat

SEQ ID NO: 198391 - DNA, 15 bp, Homo sapiens
agaattgaggctcaa

SEQ ID NO: 198392 - DNA, 15 bp, Homo sapiens
aagaattgaggctca

SEQ ID NO: 198393 - DNA, 15 bp, Homo sapiens
taagaattgaggctc

SEQ ID NO: 198394 - DNA, 15 bp, Homo sapiens
ataagaattgaggct

SEQ ID NO: 198395 - DNA, 15 bp, Homo sapiens
aataagaattgaggc

SEQ ID NO: 198396 - DNA, 15 bp, Homo sapiens
aaataagaattgagg

SEQ ID NO: 198397 - DNA, 15 bp, Homo sapiens
aaaataagaattgag

SEQ ID NO: 198398 - DNA, 15 bp, Homo sapiens
aaaaataagaattga

SEQ ID NO: 198399 - DNA, 15 bp, Homo sapiens
gaaaaataagaattg

SEQ ID NO: 198400 - DNA, 15 bp, Homo sapiens
agaaaaataagaatt

SEQ ID NO: 198401 - DNA, 15 bp, Homo sapiens
cagaaaaataagaat

SEQ ID NO: 198402 - DNA, 15 bp, Homo sapiens
gcagaaaaataagaa

SEQ ID NO: 198403 - DNA, 15 bp, Homo sapiens
ggcagaaaaataaga

SEQ ID NO: 198404 - DNA, 15 bp, Homo sapiens
gggcagaaaaataag

SEQ ID NO: 198405 - DNA, 15 bp, Homo sapiens
tgggcagaaaaataa

SEQ ID NO: 198406 - DNA, 15 bp, Homo sapiens
ctgggcagaaaaata

SEQ ID NO: 198407 - DNA, 15 bp, Homo sapiens
actgggcagaaaaat

SEQ ID NO: 198408 - DNA, 15 bp, Homo sapiens
cactgggcagaaaaa

SEQ ID NO: 198409 - DNA, 15 bp, Homo sapiens
ccactgggcagaaaa

SEQ ID NO: 198410 - DNA, 15 bp, Homo sapiens
gccactgggcagaaa

SEQ ID NO: 198411 - DNA, 15 bp, Homo sapiens
agccactgggcagaa

SEQ ID NO: 198412 - DNA, 15 bp, Homo sapiens
cagccactgggcaga

SEQ ID NO: 198413 - DNA, 15 bp, Homo sapiens
gcagccactgggcag

SEQ ID NO: 198414 - DNA, 15 bp, Homo sapiens
ggcagccactgggca

SEQ ID NO: 198415 - DNA, 15 bp, Homo sapiens
tggcagccactgggc

SEQ ID NO: 198416 - DNA, 15 bp, Homo sapiens
ttggcagccactggg

SEQ ID NO: 198417 - DNA, 15 bp, Homo sapiens
tttggcagccactgg

SEQ ID NO: 198418 - DNA, 15 bp, Homo sapiens
atttggcagccactg

SEQ ID NO: 198419 - DNA, 15 bp, Homo sapiens
aatttggcagccact

SEQ ID NO: 198420 - DNA, 15 bp, Homo sapiens
taatttggcagccac

SEQ ID NO: 198421 - DNA, 15 bp, Homo sapiens
gtaatttggcagcca

SEQ ID NO: 198422 - DNA, 15 bp, Homo sapiens
agtaatttggcagcc

SEQ ID NO: 198423 - DNA, 15 bp, Homo sapiens
tagtaatttggcagc

SEQ ID NO: 198424 - DNA, 15 bp, Homo sapiens
ttagtaatttggcag

SEQ ID NO: 198425 - DNA, 15 bp, Homo sapiens
gttagtaatttggca

SEQ ID NO: 198426 - DNA, 15 bp, Homo sapiens
tgttagtaatttggc

SEQ ID NO: 198427 - DNA, 15 bp, Homo sapiens
atgttagtaatttgg

SEQ ID NO: 198428 - DNA, 15 bp, Homo sapiens
aatgttagtaatttg

SEQ ID NO: 198429 - DNA, 15 bp, Homo sapiens
aaatgttagtaattt

SEQ ID NO: 198430 - DNA, 15 bp, Homo sapiens
taaatgttagtaatt

SEQ ID NO: 198431 - DNA, 15 bp, Homo sapiens
gtaaatgttagtaat

SEQ ID NO: 198432 - DNA, 15 bp, Homo sapiens
tgtaaatgttagtaa

SEQ ID NO: 198433 - DNA, 15 bp, Homo sapiens
ttgtaaatgttagta

SEQ ID NO: 198434 - DNA, 15 bp, Homo sapiens
attgtaaatgttagt

SEQ ID NO: 198435 - DNA, 15 bp, Homo sapiens
tattgtaaatgttag

SEQ ID NO: 198436 - DNA, 15 bp, Homo sapiens
ttattgtaaatgtta

SEQ ID NO: 198437 - DNA, 15 bp, Homo sapiens
attattgtaaatgtt

SEQ ID NO: 198438 - DNA, 15 bp, Homo sapiens
aattattgtaaatgt

SEQ ID NO: 198439 - DNA, 15 bp, Homo sapiens
gaattattgtaaatg

SEQ ID NO: 198440 - DNA, 15 bp, Homo sapiens
tgaattattgtaaat

SEQ ID NO: 198441 - DNA, 15 bp, Homo sapiens
gtgaattattgtaaa

SEQ ID NO: 198442 - DNA, 15 bp, Homo sapiens
agtgaattattgtaa

SEQ ID NO: 198443 - DNA, 15 bp, Homo sapiens
tagtgaattattgta

SEQ ID NO: 198444 - DNA, 15 bp, Homo sapiens
gtagtgaattattgt

SEQ ID NO: 198445 - DNA, 15 bp, Homo sapiens
agtagtgaattattg

SEQ ID NO: 198446 - DNA, 15 bp, Homo sapiens
tagtagtgaattatt

SEQ ID NO: 198447 - DNA, 15 bp, Homo sapiens
gtagtagtgaattat

SEQ ID NO: 198448 - DNA, 15 bp, Homo sapiens
agtagtagtgaatta

SEQ ID NO: 198449 - DNA, 15 bp, Homo sapiens
tagtagtagtgaatt

SEQ ID NO: 198450 - DNA, 15 bp, Homo sapiens
ttagtagtagtgaat

SEQ ID NO: 198451 - DNA, 15 bp, Homo sapiens
cttagtagtagtgaa

SEQ ID NO: 198452 - DNA, 15 bp, Homo sapiens
tcttagtagtagtga

SEQ ID NO: 198453 - DNA, 15 bp, Homo sapiens
atcttagtagtagtg

SEQ ID NO: 198454 - DNA, 15 bp, Homo sapiens
tatcttagtagtagt

SEQ ID NO: 198455 - DNA, 15 bp, Homo sapiens
ttatcttagtagtag

SEQ ID NO: 198456 - DNA, 15 bp, Homo sapiens
attatcttagtagta

SEQ ID NO: 198457 - DNA, 15 bp, Homo sapiens
gattatcttagtagt

SEQ ID NO: 198458 - DNA, 15 bp, Homo sapiens
agattatcttagtag

SEQ ID NO: 198459 - DNA, 15 bp, Homo sapiens
tagattatcttagta

SEQ ID NO: 198460 - DNA, 15 bp, Homo sapiens
gtagattatcttagt

SEQ ID NO: 198461 - DNA, 15 bp, Homo sapiens
agtagattatcttag

SEQ ID NO: 198462 - DNA, 15 bp, Homo sapiens
tagtagattatctta

SEQ ID NO: 198463 - DNA, 15 bp, Homo sapiens
ctagtagattatctt

SEQ ID NO: 198464 - DNA, 15 bp, Homo sapiens
actagtagattatct

SEQ ID NO: 198465 - DNA, 15 bp, Homo sapiens
aactagtagattatc

SEQ ID NO: 198466 - DNA, 15 bp, Homo sapiens
gaactagtagattat

SEQ ID NO: 198467 - DNA, 15 bp, Homo sapiens
cgaactagtagatta

SEQ ID NO: 198468 - DNA, 15 bp, Homo sapiens
tcgaactagtagatt

SEQ ID NO: 198469 - DNA, 15 bp, Homo sapiens
atcgaactagtagat

SEQ ID NO: 198470 - DNA, 15 bp, Homo sapiens
gatcgaactagtaga

SEQ ID NO: 198471 - DNA, 15 bp, Homo sapiens
tgatcgaactagtag

SEQ ID NO: 198472 - DNA, 15 bp, Homo sapiens
gtgatcgaactagta

SEQ ID NO: 198473 - DNA, 15 bp, Homo sapiens
tgtgatcgaactagt

SEQ ID NO: 198474 - DNA, 15 bp, Homo sapiens
atgtgatcgaactag

SEQ ID NO: 198475 - DNA, 15 bp, Homo sapiens
tatgtgatcgaacta

SEQ ID NO: 198476 - DNA, 15 bp, Homo sapiens
gtatgtgatcgaact

SEQ ID NO: 198477 - DNA, 15 bp, Homo sapiens
agtatgtgatcgaac

SEQ ID NO: 198478 - DNA, 15 bp, Homo sapiens
aagtatgtgatcgaa

SEQ ID NO: 198479 - DNA, 15 bp, Homo sapiens
gaagtatgtgatcga

SEQ ID NO: 198480 - DNA, 15 bp, Homo sapiens
tgaagtatgtgatcg

SEQ ID NO: 198481 - DNA, 15 bp, Homo sapiens
ttgaagtatgtgatc

SEQ ID NO: 198482 - DNA, 15 bp, Homo sapiens
tttgaagtatgtgat

SEQ ID NO: 198483 - DNA, 15 bp, Homo sapiens
atttgaagtatgtga

SEQ ID NO: 198484 - DNA, 15 bp, Homo sapiens
aatttgaagtatgtg

SEQ ID NO: 198485 - DNA, 15 bp, Homo sapiens
caatttgaagtatgt

SEQ ID NO: 198486 - DNA, 15 bp, Homo sapiens
acaatttgaagtatg

SEQ ID NO: 198487 - DNA, 15 bp, Homo sapiens
aacaatttgaagtat

SEQ ID NO: 198488 - DNA, 15 bp, Homo sapiens
taacaatttgaagta

SEQ ID NO: 198489 - DNA, 15 bp, Homo sapiens
ataacaatttgaagt

SEQ ID NO: 198490 - DNA, 15 bp, Homo sapiens
cataacaatttgaag

SEQ ID NO: 198491 - DNA, 15 bp, Homo sapiens
ccataacaatttgaa

SEQ ID NO: 198492 - DNA, 15 bp, Homo sapiens
tccataacaatttga

SEQ ID NO: 198493 - DNA, 15 bp, Homo sapiens
ttccataacaatttg

SEQ ID NO: 198494 - DNA, 15 bp, Homo sapiens
gttccataacaattt

SEQ ID NO: 198495 - DNA, 15 bp, Homo sapiens
agttccataacaatt

SEQ ID NO: 198496 - DNA, 15 bp, Homo sapiens
tagttccataacaat

SEQ ID NO: 198497 - DNA, 15 bp, Homo sapiens
gtagttccataacaa

SEQ ID NO: 198498 - DNA, 15 bp, Homo sapiens
agtagttccataaca

SEQ ID NO: 198499 - DNA, 15 bp, Homo sapiens
cagtagttccataac

SEQ ID NO: 198500 - DNA, 15 bp, Homo sapiens
acagtagttccataa

SEQ ID NO: 198501 - DNA, 15 bp, Homo sapiens
gacagtagttccata

SEQ ID NO: 198502 - DNA, 15 bp, Homo sapiens
agacagtagttccat

SEQ ID NO: 198503 - DNA, 15 bp, Homo sapiens
aagacagtagttcca

SEQ ID NO: 198504 - DNA, 15 bp, Homo sapiens
gaagacagtagttcc

SEQ ID NO: 198505 - DNA, 15 bp, Homo sapiens
tgaagacagtagttc

SEQ ID NO: 198506 - DNA, 15 bp, Homo sapiens
ctgaagacagtagtt

SEQ ID NO: 198507 - DNA, 15 bp, Homo sapiens
gctgaagacagtagt

SEQ ID NO: 198508 - DNA, 15 bp, Homo sapiens
tgctgaagacagtag

SEQ ID NO: 198509 - DNA, 15 bp, Homo sapiens
atgctgaagacagta

SEQ ID NO: 198510 - DNA, 15 bp, Homo sapiens
aatgctgaagacagt

SEQ ID NO: 198511 - DNA, 15 bp, Homo sapiens
caatgctgaagacag

SEQ ID NO: 198512 - DNA, 15 bp, Homo sapiens
acaatgctgaagaca

SEQ ID NO: 198513 - DNA, 15 bp, Homo sapiens
cacaatgctgaagac

SEQ ID NO: 198514 - DNA, 15 bp, Homo sapiens
gcacaatgctgaaga

SEQ ID NO: 198515 - DNA, 15 bp, Homo sapiens
agcacaatgctgaag

SEQ ID NO: 198516 - DNA, 15 bp, Homo sapiens
aagcacaatgctgaa

SEQ ID NO: 198517 - DNA, 15 bp, Homo sapiens
gaagcacaatgctga

SEQ ID NO: 198518 - DNA, 15 bp, Homo sapiens
agaagcacaatgctg

SEQ ID NO: 198519 - DNA, 15 bp, Homo sapiens
cagaagcacaatgct

SEQ ID NO: 198520 - DNA, 15 bp, Homo sapiens
tcagaagcacaatgc

SEQ ID NO: 198521 - DNA, 15 bp, Homo sapiens
atcagaagcacaatg

SEQ ID NO: 198522 - DNA, 15 bp, Homo sapiens
tatcagaagcacaat

SEQ ID NO: 198523 - DNA, 15 bp, Homo sapiens
ttatcagaagcacaa

SEQ ID NO: 198524 - DNA, 15 bp, Homo sapiens
gttatcagaagcaca

SEQ ID NO: 198525 - DNA, 15 bp, Homo sapiens
agttatcagaagcac

SEQ ID NO: 198526 - DNA, 15 bp, Homo sapiens
cagttatcagaagca

SEQ ID NO: 198527 - DNA, 15 bp, Homo sapiens
tcagttatcagaagc

SEQ ID NO: 198528 - DNA, 15 bp, Homo sapiens
atcagttatcagaag

SEQ ID NO: 198529 - DNA, 15 bp, Homo sapiens
tatcagttatcagaa

SEQ ID NO: 198530 - DNA, 15 bp, Homo sapiens
ttatcagttatcaga

SEQ ID NO: 198531 - DNA, 15 bp, Homo sapiens
cttatcagttatcag

SEQ ID NO: 198532 - DNA, 15 bp, Homo sapiens
acttatcagttatca

SEQ ID NO: 198533 - DNA, 15 bp, Homo sapiens
tacttatcagttatc

SEQ ID NO: 198534 - DNA, 15 bp, Homo sapiens
atacttatcagttat

SEQ ID NO: 198535 - DNA, 15 bp, Homo sapiens
tatacttatcagtta

SEQ ID NO: 198536 - DNA, 15 bp, Homo sapiens
ttatacttatcagtt

SEQ ID NO: 198537 - DNA, 15 bp, Homo sapiens
attatacttatcagt

SEQ ID NO: 198538 - DNA, 15 bp, Homo sapiens
aattatacttatcag

SEQ ID NO: 198539 - DNA, 15 bp, Homo sapiens
aaattatacttatca

SEQ ID NO: 198540 - DNA, 15 bp, Homo sapiens
aaaattatacttatc

SEQ ID NO: 198541 - DNA, 15 bp, Homo sapiens
aaaaattatacttat

SEQ ID NO: 198542 - DNA, 15 bp, Homo sapiens
aaaaaattatactta

SEQ ID NO: 198543 - DNA, 15 bp, Homo sapiens
aaaaaaattatactt

SEQ ID NO: 198544 - DNA, 15 bp, Homo sapiens
aaaaaaaattatact

SEQ ID NO: 198545 - DNA, 15 bp, Homo sapiens
aaaaaaaaattatac

SEQ ID NO: 198546 - DNA, 15 bp, Homo sapiens
caaaaaaaaaattat

SEQ ID NO: 198547 - DNA, 15 bp, Homo sapiens
acaaaaaaaaaatta

SEQ ID NO: 198548 - DNA, 15 bp, Homo sapiens
gacaaaaaaaaaatt

SEQ ID NO: 198549 - DNA, 15 bp, Homo sapiens
ggacaaaaaaaaaat

SEQ ID NO: 198550 - DNA, 15 bp, Homo sapiens
tggacaaaaaaaaaa

SEQ ID NO: 198551 - DNA, 15 bp, Homo sapiens
ctggacaaaaaaaaa

SEQ ID NO: 198552 - DNA, 15 bp, Homo sapiens
tctggacaaaaaaaa

SEQ ID NO: 198553 - DNA, 15 bp, Homo sapiens
ctctggacaaaaaaa

SEQ ID NO: 198554 - DNA, 15 bp, Homo sapiens
actctggacaaaaaa

SEQ ID NO: 198555 - DNA, 15 bp, Homo sapiens
cactctggacaaaaa

SEQ ID NO: 198556 - DNA, 15 bp, Homo sapiens
tcactctggacaaaa

SEQ ID NO: 198557 - DNA, 15 bp, Homo sapiens
ttcactctggacaaa

SEQ ID NO: 198558 - DNA, 15 bp, Homo sapiens
gttcactctggacaa

SEQ ID NO: 198559 - DNA, 15 bp, Homo sapiens
tgttcactctggaca

SEQ ID NO: 198560 - DNA, 15 bp, Homo sapiens
atgttcactctggac

SEQ ID NO: 198561 - DNA, 15 bp, Homo sapiens
catgttcactctgga

SEQ ID NO: 198562 - DNA, 15 bp, Homo sapiens
acatgttcactctgg

SEQ ID NO: 198563 - DNA, 15 bp, Homo sapiens
gacatgttcactctg

SEQ ID NO: 198564 - DNA, 15 bp, Homo sapiens
agacatgttcactct

SEQ ID NO: 198565 - DNA, 15 bp, Homo sapiens
tagacatgttcactc

SEQ ID NO: 198566 - DNA, 15 bp, Homo sapiens
atagacatgttcact

SEQ ID NO: 198567 - DNA, 15 bp, Homo sapiens
aatagacatgttcac

SEQ ID NO: 198568 - DNA, 15 bp, Homo sapiens
gaatagacatgttca

SEQ ID NO: 198569 - DNA, 15 bp, Homo sapiens
agaatagacatgttc

SEQ ID NO: 198570 - DNA, 15 bp, Homo sapiens
aagaatagacatgtt

SEQ ID NO: 198571 - DNA, 15 bp, Homo sapiens
gaagaatagacatgt

SEQ ID NO: 198572 - DNA, 15 bp, Homo sapiens
ggaagaatagacatg

SEQ ID NO: 198573 - DNA, 15 bp, Homo sapiens
tggaagaatagacat

SEQ ID NO: 198574 - DNA, 15 bp, Homo sapiens
gtggaagaatagaca

SEQ ID NO: 198575 - DNA, 15 bp, Homo sapiens
agtggaagaatagac

SEQ ID NO: 198576 - DNA, 15 bp, Homo sapiens
cagtggaagaataga

SEQ ID NO: 198577 - DNA, 15 bp, Homo sapiens
acagtggaagaatag

SEQ ID NO: 198578 - DNA, 15 bp, Homo sapiens
tacagtggaagaata

SEQ ID NO: 198579 - DNA, 15 bp, Homo sapiens
gtacagtggaagaat

SEQ ID NO: 198580 - DNA, 15 bp, Homo sapiens
tgtacagtggaagaa

SEQ ID NO: 198581 - DNA, 15 bp, Homo sapiens
gtgtacagtggaaga

SEQ ID NO: 198582 - DNA, 15 bp, Homo sapiens
tgtgtacagtggaag

SEQ ID NO: 198583 - DNA, 15 bp, Homo sapiens
gtgtgtacagtggaa

SEQ ID NO: 198584 - DNA, 15 bp, Homo sapiens
agtgtgtacagtgga

SEQ ID NO: 198585 - DNA, 15 bp, Homo sapiens
tagtgtgtacagtgg

SEQ ID NO: 198586 - DNA, 15 bp, Homo sapiens
ttagtgtgtacagtg

SEQ ID NO: 198587 - DNA, 15 bp, Homo sapiens
attagtgtgtacagt

SEQ ID NO: 198588 - DNA, 15 bp, Homo sapiens
tattagtgtgtacag

SEQ ID NO: 198589 - DNA, 15 bp, Homo sapiens
ttattagtgtgtaca

SEQ ID NO: 198590 - DNA, 15 bp, Homo sapiens
tttattagtgtgtac

SEQ ID NO: 198591 - DNA, 15 bp, Homo sapiens
ttttattagtgtgta

SEQ ID NO: 198592 - DNA, 15 bp, Homo sapiens
cttttattagtgtgt

SEQ ID NO: 198593 - DNA, 15 bp, Homo sapiens
ccttttattagtgtg

SEQ ID NO: 198594 - DNA, 15 bp, Homo sapiens
tccttttattagtgt

SEQ ID NO: 198595 - DNA, 15 bp, Homo sapiens
ttccttttattagtg

SEQ ID NO: 198596 - DNA, 15 bp, Homo sapiens
tttccttttattagt

SEQ ID NO: 198597 - DNA, 15 bp, Homo sapiens
ttttccttttattag

SEQ ID NO: 198598 - DNA, 15 bp, Homo sapiens
tttttccttttatta

SEQ ID NO: 198599 - DNA, 15 bp, Homo sapiens
atttttccttttatt

SEQ ID NO: 198600 - DNA, 15 bp, Homo sapiens
aatttttccttttat

SEQ ID NO: 198601 - DNA, 15 bp, Homo sapiens
caatttttcctttta

SEQ ID NO: 198602 - DNA, 15 bp, Homo sapiens
acaatttttcctttt

SEQ ID NO: 198603 - DNA, 15 bp, Homo sapiens
tacaatttttccttt

SEQ ID NO: 198604 - DNA, 15 bp, Homo sapiens
ttacaatttttcctt

SEQ ID NO: 198605 - DNA, 15 bp, Homo sapiens
attacaatttttcct

SEQ ID NO: 198606 - DNA, 15 bp, Homo sapiens
tattacaatttttcc

SEQ ID NO: 198607 - DNA, 15 bp, Homo sapiens
atattacaatttttc

SEQ ID NO: 198608 - DNA, 15 bp, Homo sapiens
aatattacaattttt

SEQ ID NO: 198609 - DNA, 15 bp, Homo sapiens
caatattacaatttt

SEQ ID NO: 198610 - DNA, 15 bp, Homo sapiens
ccaatattacaattt

SEQ ID NO: 198611 - DNA, 15 bp, Homo sapiens
cccaatattacaatt

SEQ ID NO: 198612 - DNA, 15 bp, Homo sapiens
acccaatattacaat

SEQ ID NO: 198613 - DNA, 15 bp, Homo sapiens
tacccaatattacaa

SEQ ID NO: 198614 - DNA, 15 bp, Homo sapiens
ttacccaatattaca

SEQ ID NO: 198615 - DNA, 15 bp, Homo sapiens
tttacccaatattac

SEQ ID NO: 198616 - DNA, 15 bp, Homo sapiens
atttacccaatatta

SEQ ID NO: 198617 - DNA, 15 bp, Homo sapiens
aatttacccaatatt

SEQ ID NO: 198618 - DNA, 15 bp, Homo sapiens
gaatttacccaatat

SEQ ID NO: 198619 - DNA, 15 bp, Homo sapiens
tgaatttacccaata

SEQ ID NO: 198620 - DNA, 15 bp, Homo sapiens
atgaatttacccaat

SEQ ID NO: 198621 - DNA, 15 bp, Homo sapiens
catgaatttacccaa

SEQ ID NO: 198622 - DNA, 15 bp, Homo sapiens
acatgaatttaccca

SEQ ID NO: 198623 - DNA, 15 bp, Homo sapiens
gacatgaatttaccc

SEQ ID NO: 198624 - DNA, 15 bp, Homo sapiens
ggacatgaatttacc

SEQ ID NO: 198625 - DNA, 15 bp, Homo sapiens
aggacatgaatttac

SEQ ID NO: 198626 - DNA, 15 bp, Homo sapiens
aaggacatgaattta

SEQ ID NO: 198627 - DNA, 15 bp, Homo sapiens
taaggacatgaattt

SEQ ID NO: 198628 - DNA, 15 bp, Homo sapiens
gtaaggacatgaatt

SEQ ID NO: 198629 - DNA, 15 bp, Homo sapiens
tgtaaggacatgaat

SEQ ID NO: 198630 - DNA, 15 bp, Homo sapiens
gtgtaaggacatgaa

SEQ ID NO: 198631 - DNA, 15 bp, Homo sapiens
tgtgtaaggacatga

SEQ ID NO: 198632 - DNA, 15 bp, Homo sapiens
atgtgtaaggacatg

SEQ ID NO: 198633 - DNA, 15 bp, Homo sapiens
catgtgtaaggacat

SEQ ID NO: 198634 - DNA, 15 bp, Homo sapiens
acatgtgtaaggaca

SEQ ID NO: 198635 - DNA, 15 bp, Homo sapiens
tacatgtgtaaggac

SEQ ID NO: 198636 - DNA, 15 bp, Homo sapiens
ctacatgtgtaagga

SEQ ID NO: 198637 - DNA, 15 bp, Homo sapiens
actacatgtgtaagg

SEQ ID NO: 198638 - DNA, 15 bp, Homo sapiens
tactacatgtgtaag

SEQ ID NO: 198639 - DNA, 15 bp, Homo sapiens
ctactacatgtgtaa

SEQ ID NO: 198640 - DNA, 15 bp, Homo sapiens
actactacatgtgta

SEQ ID NO: 198641 - DNA, 15 bp, Homo sapiens
aactactacatgtgt

SEQ ID NO: 198642 - DNA, 15 bp, Homo sapiens
taactactacatgtg

SEQ ID NO: 198643 - DNA, 15 bp, Homo sapiens
ataactactacatgt

SEQ ID NO: 198644 - DNA, 15 bp, Homo sapiens
cataactactacatg

SEQ ID NO: 198645 - DNA, 15 bp, Homo sapiens
tcataactactacat

SEQ ID NO: 198646 - DNA, 15 bp, Homo sapiens
ctcataactactaca

SEQ ID NO: 198647 - DNA, 15 bp, Homo sapiens
gctcataactactac

SEQ ID NO: 198648 - DNA, 15 bp, Homo sapiens
ggctcataactacta

SEQ ID NO: 198649 - DNA, 15 bp, Homo sapiens
gggctcataactact

SEQ ID NO: 198650 - DNA, 15 bp, Homo sapiens
tgggctcataactac

SEQ ID NO: 198651 - DNA, 15 bp, Homo sapiens
atgggctcataacta

SEQ ID NO: 198652 - DNA, 15 bp, Homo sapiens
catgggctcataact

SEQ ID NO: 198653 - DNA, 15 bp, Homo sapiens
acatgggctcataac

SEQ ID NO: 198654 - DNA, 15 bp, Homo sapiens
gacatgggctcataa

SEQ ID NO: 198655 - DNA, 15 bp, Homo sapiens
ggacatgggctcata

SEQ ID NO: 198656 - DNA, 15 bp, Homo sapiens
gggacatgggctcat

SEQ ID NO: 198657 - DNA, 15 bp, Homo sapiens
agggacatgggctca

SEQ ID NO: 198658 - DNA, 15 bp, Homo sapiens
tagggacatgggctc

SEQ ID NO: 198659 - DNA, 15 bp, Homo sapiens
ctagggacatgggct

SEQ ID NO: 198660 - DNA, 15 bp, Homo sapiens
tctagggacatgggc

SEQ ID NO: 198661 - DNA, 15 bp, Homo sapiens
ttctagggacatggg

SEQ ID NO: 198662 - DNA, 15 bp, Homo sapiens
attctagggacatgg

SEQ ID NO: 198663 - DNA, 15 bp, Homo sapiens
cattctagggacatg

SEQ ID NO: 198664 - DNA, 15 bp, Homo sapiens
tcattctagggacat

SEQ ID NO: 198665 - DNA, 15 bp, Homo sapiens
ctcattctagggaca

SEQ ID NO: 198666 - DNA, 15 bp, Homo sapiens
actcattctagggac

SEQ ID NO: 198667 - DNA, 15 bp, Homo sapiens
tactcattctaggga

SEQ ID NO: 198668 - DNA, 15 bp, Homo sapiens
ttactcattctaggg

SEQ ID NO: 198669 - DNA, 15 bp, Homo sapiens
attactcattctagg

SEQ ID NO: 198670 - DNA, 15 bp, Homo sapiens
tattactcattctag

SEQ ID NO: 198671 - DNA, 15 bp, Homo sapiens
ttattactcattcta

SEQ ID NO: 198672 - DNA, 15 bp, Homo sapiens
attattactcattct

SEQ ID NO: 198673 - DNA, 15 bp, Homo sapiens
aattattactcattc

SEQ ID NO: 198674 - DNA, 15 bp, Homo sapiens
aaattattactcatt

SEQ ID NO: 198675 - DNA, 15 bp, Homo sapiens
taaattattactcat

SEQ ID NO: 198676 - DNA, 15 bp, Homo sapiens
ataaattattactca

SEQ ID NO: 198677 - DNA, 15 bp, Homo sapiens
gataaattattactc

SEQ ID NO: 198678 - DNA, 15 bp, Homo sapiens
ggataaattattact

SEQ ID NO: 198679 - DNA, 15 bp, Homo sapiens
gggataaattattac

SEQ ID NO: 198680 - DNA, 15 bp, Homo sapiens
agggataaattatta

SEQ ID NO: 198681 - DNA, 15 bp, Homo sapiens
gagggataaattatt

SEQ ID NO: 198682 - DNA, 15 bp, Homo sapiens
ggagggataaattat

SEQ ID NO: 198683 - DNA, 15 bp, Homo sapiens
gggagggataaatta

SEQ ID NO: 198684 - DNA, 15 bp, Homo sapiens
agggagggataaatt

SEQ ID NO: 198685 - DNA, 15 bp, Homo sapiens
aagggagggataaat

SEQ ID NO: 198686 - DNA, 15 bp, Homo sapiens
caagggagggataaa

SEQ ID NO: 198687 - DNA, 15 bp, Homo sapiens
ccaagggagggataa

SEQ ID NO: 198688 - DNA, 15 bp, Homo sapiens
accaagggagggata

SEQ ID NO: 198689 - DNA, 15 bp, Homo sapiens
aaccaagggagggat

SEQ ID NO: 198690 - DNA, 15 bp, Homo sapiens
caaccaagggaggga

SEQ ID NO: 198691 - DNA, 15 bp, Homo sapiens
tcaaccaagggaggg

SEQ ID NO: 198692 - DNA, 15 bp, Homo sapiens
ttcaaccaagggagg

SEQ ID NO: 198693 - DNA, 15 bp, Homo sapiens
attcaaccaagggag

SEQ ID NO: 198694 - DNA, 15 bp, Homo sapiens
tattcaaccaaggga

SEQ ID NO: 198695 - DNA, 15 bp, Homo sapiens
ctattcaaccaaggg

SEQ ID NO: 198696 - DNA, 15 bp, Homo sapiens
actattcaaccaagg

SEQ ID NO: 198697 - DNA, 15 bp, Homo sapiens
gactattcaaccaag

SEQ ID NO: 198698 - DNA, 15 bp, Homo sapiens
tgactattcaaccaa

SEQ ID NO: 198699 - DNA, 15 bp, Homo sapiens
ttgactattcaacca

SEQ ID NO: 198700 - DNA, 15 bp, Homo sapiens
cttgactattcaacc

SEQ ID NO: 198701 - DNA, 15 bp, Homo sapiens
tcttgactattcaac

SEQ ID NO: 198702 - DNA, 15 bp, Homo sapiens
ttcttgactattcaa

SEQ ID NO: 198703 - DNA, 15 bp, Homo sapiens
attcttgactattca

SEQ ID NO: 198704 - DNA, 15 bp, Homo sapiens
cattcttgactattc

SEQ ID NO: 198705 - DNA, 15 bp, Homo sapiens
gcattcttgactatt

SEQ ID NO: 198706 - DNA, 15 bp, Homo sapiens
agcattcttgactat

SEQ ID NO: 198707 - DNA, 15 bp, Homo sapiens
cagcattcttgacta

SEQ ID NO: 198708 - DNA, 15 bp, Homo sapiens
tcagcattcttgact

SEQ ID NO: 198709 - DNA, 15 bp, Homo sapiens
atcagcattcttgac

SEQ ID NO: 198710 - DNA, 15 bp, Homo sapiens
aatcagcattcttga

SEQ ID NO: 198711 - DNA, 15 bp, Homo sapiens
aaatcagcattcttg

SEQ ID NO: 198712 - DNA, 15 bp, Homo sapiens
aaaatcagcattctt

SEQ ID NO: 198713 - DNA, 15 bp, Homo sapiens
taaaatcagcattct

SEQ ID NO: 198714 - DNA, 15 bp, Homo sapiens
ttaaaatcagcattc

SEQ ID NO: 198715 - DNA, 15 bp, Homo sapiens
attaaaatcagcatt

SEQ ID NO: 198716 - DNA, 15 bp, Homo sapiens
aattaaaatcagcat

SEQ ID NO: 198717 - DNA, 15 bp, Homo sapiens
gaattaaaatcagca

SEQ ID NO: 198718 - DNA, 15 bp, Homo sapiens
agaattaaaatcagc

SEQ ID NO: 198719 - DNA, 15 bp, Homo sapiens
aagaattaaaatcag

SEQ ID NO: 198720 - DNA, 15 bp, Homo sapiens
gaagaattaaaatca

SEQ ID NO: 198721 - DNA, 15 bp, Homo sapiens
agaagaattaaaatc

SEQ ID NO: 198722 - DNA, 15 bp, Homo sapiens
tagaagaattaaaat

SEQ ID NO: 198723 - DNA, 15 bp, Homo sapiens
ttagaagaattaaaa

SEQ ID NO: 198724 - DNA, 15 bp, Homo sapiens
gttagaagaattaaa

SEQ ID NO: 198725 - DNA, 15 bp, Homo sapiens
tgttagaagaattaa

SEQ ID NO: 198726 - DNA, 15 bp, Homo sapiens
ctgttagaagaatta

SEQ ID NO: 198727 - DNA, 15 bp, Homo sapiens
gctgttagaagaatt

SEQ ID NO: 198728 - DNA, 15 bp, Homo sapiens
agctgttagaagaat

SEQ ID NO: 198729 - DNA, 15 bp, Homo sapiens
aagctgttagaagaa

SEQ ID NO: 198730 - DNA, 15 bp, Homo sapiens
aaagctgttagaaga

SEQ ID NO: 198731 - DNA, 15 bp, Homo sapiens
taaagctgttagaag

SEQ ID NO: 198732 - DNA, 15 bp, Homo sapiens
ataaagctgttagaa

SEQ ID NO: 198733 - DNA, 15 bp, Homo sapiens
gataaagctgttaga

SEQ ID NO: 198734 - DNA, 15 bp, Homo sapiens
ggataaagctgttag

SEQ ID NO: 198735 - DNA, 15 bp, Homo sapiens
gggataaagctgtta

SEQ ID NO: 198736 - DNA, 15 bp, Homo sapiens
agggataaagctgtt

SEQ ID NO: 198737 - DNA, 15 bp, Homo sapiens
gagggataaagctgt

SEQ ID NO: 198738 - DNA, 15 bp, Homo sapiens
tgagggataaagctg

SEQ ID NO: 198739 - DNA, 15 bp, Homo sapiens
ctgagggataaagct

SEQ ID NO: 198740 - DNA, 15 bp, Homo sapiens
tctgagggataaagc

SEQ ID NO: 198741 - DNA, 15 bp, Homo sapiens
ttctgagggataaag

SEQ ID NO: 198742 - DNA, 15 bp, Homo sapiens
cttctgagggataaa

SEQ ID NO: 198743 - DNA, 15 bp, Homo sapiens
ccttctgagggataa

SEQ ID NO: 198744 - DNA, 15 bp, Homo sapiens
cccttctgagggata

SEQ ID NO: 198745 - DNA, 15 bp, Homo sapiens
tcccttctgagggat

SEQ ID NO: 198746 - DNA, 15 bp, Homo sapiens
ttcccttctgaggga

SEQ ID NO: 198747 - DNA, 15 bp, Homo sapiens
cttcccttctgaggg

SEQ ID NO: 198748 - DNA, 15 bp, Homo sapiens
ccttcccttctgagg

SEQ ID NO: 198749 - DNA, 15 bp, Homo sapiens
gccttcccttctgag

SEQ ID NO: 198750 - DNA, 15 bp, Homo sapiens
tgccttcccttctga

SEQ ID NO: 198751 - DNA, 15 bp, Homo sapiens
ttgccttcccttctg

SEQ ID NO: 198752 - DNA, 15 bp, Homo sapiens
cttgccttcccttct

SEQ ID NO: 198753 - DNA, 15 bp, Homo sapiens
gcttgccttcccttc

SEQ ID NO: 198754 - DNA, 15 bp, Homo sapiens
tgcttgccttccctt

SEQ ID NO: 198755 - DNA, 15 bp, Homo sapiens
ttgcttgccttccct

SEQ ID NO: 198756 - DNA, 15 bp, Homo sapiens
cttgcttgccttccc

SEQ ID NO: 198757 - DNA, 15 bp, Homo sapiens
acttgcttgccttcc

SEQ ID NO: 198758 - DNA, 15 bp, Homo sapiens
aacttgcttgccttc

SEQ ID NO: 198759 - DNA, 15 bp, Homo sapiens
taacttgcttgcctt

SEQ ID NO: 198760 - DNA, 15 bp, Homo sapiens
ataacttgcttgcct

SEQ ID NO: 198761 - DNA, 15 bp, Homo sapiens
tataacttgcttgcc

SEQ ID NO: 198762 - DNA, 15 bp, Homo sapiens
atataacttgcttgc

SEQ ID NO: 198763 - DNA, 15 bp, Homo sapiens
tatataacttgcttg

SEQ ID NO: 198764 - DNA, 15 bp, Homo sapiens
atatataacttgctt

SEQ ID NO: 198765 - DNA, 15 bp, Homo sapiens
catatataacttgct

SEQ ID NO: 198766 - DNA, 15 bp, Homo sapiens
acatatataacttgc

SEQ ID NO: 198767 - DNA, 15 bp, Homo sapiens
tacatatataacttg

SEQ ID NO: 198768 - DNA, 15 bp, Homo sapiens
ctacatatataactt

SEQ ID NO: 198769 - DNA, 15 bp, Homo sapiens
actacatatataact

SEQ ID NO: 198770 - DNA, 15 bp, Homo sapiens
aactacatatataac

SEQ ID NO: 198771 - DNA, 15 bp, Homo sapiens
aaactacatatataa

SEQ ID NO: 198772 - DNA, 15 bp, Homo sapiens
taaactacatatata

SEQ ID NO: 198773 - DNA, 15 bp, Homo sapiens
ataaactacatatat

SEQ ID NO: 198774 - DNA, 15 bp, Homo sapiens
aataaactacatata

SEQ ID NO: 198775 - DNA, 15 bp, Homo sapiens
aaataaactacatat

SEQ ID NO: 198776 - DNA, 15 bp, Homo sapiens
caaataaactacata

SEQ ID NO: 198777 - DNA, 15 bp, Homo sapiens
acaaataaactacat

SEQ ID NO: 198778 - DNA, 15 bp, Homo sapiens
tacaaataaactaca

SEQ ID NO: 198779 - DNA, 15 bp, Homo sapiens
ttacaaataaactac

SEQ ID NO: 198780 - DNA, 15 bp, Homo sapiens
cttacaaataaacta

SEQ ID NO: 198781 - DNA, 15 bp, Homo sapiens
tcttacaaataaact

SEQ ID NO: 198782 - DNA, 15 bp, Homo sapiens
gtcttacaaataaac

SEQ ID NO: 198783 - DNA, 15 bp, Homo sapiens
agtcttacaaataaa

SEQ ID NO: 198784 - DNA, 15 bp, Homo sapiens
cagtcttacaaataa

SEQ ID NO: 198785 - DNA, 15 bp, Homo sapiens
tcagtcttacaaata

SEQ ID NO: 198786 - DNA, 15 bp, Homo sapiens
atcagtcttacaaat

SEQ ID NO: 198787 - DNA, 15 bp, Homo sapiens
tatcagtcttacaaa

SEQ ID NO: 198788 - DNA, 15 bp, Homo sapiens
atatcagtcttacaa

SEQ ID NO: 198789 - DNA, 15 bp, Homo sapiens
catatcagtcttaca

SEQ ID NO: 198790 - DNA, 15 bp, Homo sapiens
tcatatcagtcttac

SEQ ID NO: 198791 - DNA, 15 bp, Homo sapiens
ttcatatcagtctta

SEQ ID NO: 198792 - DNA, 15 bp, Homo sapiens
tttcatatcagtctt

SEQ ID NO: 198793 - DNA, 15 bp, Homo sapiens
atttcatatcagtct

SEQ ID NO: 198794 - DNA, 15 bp, Homo sapiens
aatttcatatcagtc

SEQ ID NO: 198795 - DNA, 15 bp, Homo sapiens
caatttcatatcagt

SEQ ID NO: 198796 - DNA, 15 bp, Homo sapiens
ccaatttcatatcag

SEQ ID NO: 198797 - DNA, 15 bp, Homo sapiens
tccaatttcatatca

SEQ ID NO: 198798 - DNA, 15 bp, Homo sapiens
ttccaatttcatatc

SEQ ID NO: 198799 - DNA, 15 bp, Homo sapiens
cttccaatttcatat

SEQ ID NO: 198800 - DNA, 15 bp, Homo sapiens
tcttccaatttcata

SEQ ID NO: 198801 - DNA, 15 bp, Homo sapiens
atcttccaatttcat

SEQ ID NO: 198802 - DNA, 15 bp, Homo sapiens
catcttccaatttca

SEQ ID NO: 198803 - DNA, 15 bp, Homo sapiens
tcatcttccaatttc

SEQ ID NO: 198804 - DNA, 15 bp, Homo sapiens
ttcatcttccaattt

SEQ ID NO: 198805 - DNA, 15 bp, Homo sapiens
attcatcttccaatt

SEQ ID NO: 198806 - DNA, 15 bp, Homo sapiens
gattcatcttccaat

SEQ ID NO: 198807 - DNA, 15 bp, Homo sapiens
agattcatcttccaa

SEQ ID NO: 198808 - DNA, 15 bp, Homo sapiens
tagattcatcttcca

SEQ ID NO: 198809 - DNA, 15 bp, Homo sapiens
gtagattcatcttcc

SEQ ID NO: 198810 - DNA, 15 bp, Homo sapiens
agtagattcatcttc

SEQ ID NO: 198811 - DNA, 15 bp, Homo sapiens
tagtagattcatctt

SEQ ID NO: 198812 - DNA, 15 bp, Homo sapiens
atagtagattcatct

SEQ ID NO: 198813 - DNA, 15 bp, Homo sapiens
aatagtagattcatc

SEQ ID NO: 198814 - DNA, 15 bp, Homo sapiens
taatagtagattcat

SEQ ID NO: 198815 - DNA, 15 bp, Homo sapiens
ctaatagtagattca

SEQ ID NO: 198816 - DNA, 15 bp, Homo sapiens
gctaatagtagattc

SEQ ID NO: 198817 - DNA, 15 bp, Homo sapiens
agctaatagtagatt

SEQ ID NO: 198818 - DNA, 15 bp, Homo sapiens
aagctaatagtagat

SEQ ID NO: 198819 - DNA, 15 bp, Homo sapiens
aaagctaatagtaga

SEQ ID NO: 198820 - DNA, 15 bp, Homo sapiens
taaagctaatagtag

SEQ ID NO: 198821 - DNA, 15 bp, Homo sapiens
ttaaagctaatagta

SEQ ID NO: 198822 - DNA, 15 bp, Homo sapiens
attaaagctaatagt

SEQ ID NO: 198823 - DNA, 15 bp, Homo sapiens
aattaaagctaatag

SEQ ID NO: 198824 - DNA, 15 bp, Homo sapiens
taattaaagctaata

SEQ ID NO: 198825 - DNA, 15 bp, Homo sapiens
ataattaaagctaat

SEQ ID NO: 198826 - DNA, 15 bp, Homo sapiens
aataattaaagctaa

SEQ ID NO: 198827 - DNA, 15 bp, Homo sapiens
aaataattaaagcta

SEQ ID NO: 198828 - DNA, 15 bp, Homo sapiens
aaaataattaaagct

SEQ ID NO: 198829 - DNA, 15 bp, Homo sapiens
aaaaataattaaagc

SEQ ID NO: 198830 - DNA, 15 bp, Homo sapiens
taaaaataattaaag

SEQ ID NO: 198831 - DNA, 15 bp, Homo sapiens
gtaaaaataattaaa

SEQ ID NO: 198832 - DNA, 15 bp, Homo sapiens
tgtaaaaataattaa

SEQ ID NO: 198833 - DNA, 15 bp, Homo sapiens
atgtaaaaataatta

SEQ ID NO: 198834 - DNA, 15 bp, Homo sapiens
aatgtaaaaataatt

SEQ ID NO: 198835 - DNA, 15 bp, Homo sapiens
aaatgtaaaaataat

SEQ ID NO: 198836 - DNA, 15 bp, Homo sapiens
taaatgtaaaaataa

SEQ ID NO: 198837 - DNA, 15 bp, Homo sapiens
ctaaatgtaaaaata

SEQ ID NO: 198838 - DNA, 15 bp, Homo sapiens
cctaaatgtaaaaat

SEQ ID NO: 198839 - DNA, 15 bp, Homo sapiens
tcctaaatgtaaaaa

SEQ ID NO: 198840 - DNA, 15 bp, Homo sapiens
ttcctaaatgtaaaa

SEQ ID NO: 198841 - DNA, 15 bp, Homo sapiens
attcctaaatgtaaa

SEQ ID NO: 198842 - DNA, 15 bp, Homo sapiens
tattcctaaatgtaa

SEQ ID NO: 198843 - DNA, 15 bp, Homo sapiens
atattcctaaatgta

SEQ ID NO: 198844 - DNA, 15 bp, Homo sapiens
aatattcctaaatgt

SEQ ID NO: 198845 - DNA, 15 bp, Homo sapiens
caatattcctaaatg

SEQ ID NO: 198846 - DNA, 15 bp, Homo sapiens
gcaatattcctaaat

SEQ ID NO: 198847 - DNA, 15 bp, Homo sapiens
tgcaatattcctaaa

SEQ ID NO: 198848 - DNA, 15 bp, Homo sapiens
atgcaatattcctaa

SEQ ID NO: 198849 - DNA, 15 bp, Homo sapiens
gatgcaatattccta

SEQ ID NO: 198850 - DNA, 15 bp, Homo sapiens
tgatgcaatattcct

SEQ ID NO: 198851 - DNA, 15 bp, Homo sapiens
ctgatgcaatattcc

SEQ ID NO: 198852 - DNA, 15 bp, Homo sapiens
actgatgcaatattc

SEQ ID NO: 198853 - DNA, 15 bp, Homo sapiens
tactgatgcaatatt

SEQ ID NO: 198854 - DNA, 15 bp, Homo sapiens
ttactgatgcaatat

SEQ ID NO: 198855 - DNA, 15 bp, Homo sapiens
gttactgatgcaata

SEQ ID NO: 198856 - DNA, 15 bp, Homo sapiens
agttactgatgcaat

SEQ ID NO: 198857 - DNA, 15 bp, Homo sapiens
gagttactgatgcaa

SEQ ID NO: 198858 - DNA, 15 bp, Homo sapiens
tgagttactgatgca

SEQ ID NO: 198859 - DNA, 15 bp, Homo sapiens
atgagttactgatgc

SEQ ID NO: 198860 - DNA, 15 bp, Homo sapiens
tatgagttactgatg

SEQ ID NO: 198861 - DNA, 15 bp, Homo sapiens
ttatgagttactgat

SEQ ID NO: 198862 - DNA, 15 bp, Homo sapiens
attatgagttactga

SEQ ID NO: 198863 - DNA, 15 bp, Homo sapiens
aattatgagttactg

SEQ ID NO: 198864 - DNA, 15 bp, Homo sapiens
aaattatgagttact

SEQ ID NO: 198865 - DNA, 15 bp, Homo sapiens
aaaattatgagttac

SEQ ID NO: 198866 - DNA, 15 bp, Homo sapiens
caaaattatgagtta

SEQ ID NO: 198867 - DNA, 15 bp, Homo sapiens
ccaaaattatgagtt

SEQ ID NO: 198868 - DNA, 15 bp, Homo sapiens
accaaaattatgagt

SEQ ID NO: 198869 - DNA, 15 bp, Homo sapiens
aaccaaaattatgag

SEQ ID NO: 198870 - DNA, 15 bp, Homo sapiens
aaaccaaaattatga

SEQ ID NO: 198871 - DNA, 15 bp, Homo sapiens
aaaaccaaaattatg

SEQ ID NO: 198872 - DNA, 15 bp, Homo sapiens
gaaaaccaaaattat

SEQ ID NO: 198873 - DNA, 15 bp, Homo sapiens
agaaaaccaaaatta

SEQ ID NO: 198874 - DNA, 15 bp, Homo sapiens
cagaaaaccaaaatt

SEQ ID NO: 198875 - DNA, 15 bp, Homo sapiens
acagaaaaccaaaat

SEQ ID NO: 198876 - DNA, 15 bp, Homo sapiens
aacagaaaaccaaaa

SEQ ID NO: 198877 - DNA, 15 bp, Homo sapiens
taacagaaaaccaaa

SEQ ID NO: 198878 - DNA, 15 bp, Homo sapiens
ataacagaaaaccaa

SEQ ID NO: 198879 - DNA, 15 bp, Homo sapiens
gataacagaaaacca

SEQ ID NO: 198880 - DNA, 15 bp, Homo sapiens
ggataacagaaaacc

SEQ ID NO: 198881 - DNA, 15 bp, Homo sapiens
aggataacagaaaac

SEQ ID NO: 198882 - DNA, 15 bp, Homo sapiens
caggataacagaaaa

SEQ ID NO: 198883 - DNA, 15 bp, Homo sapiens
tcaggataacagaaa

SEQ ID NO: 198884 - DNA, 15 bp, Homo sapiens
ctcaggataacagaa

SEQ ID NO: 198885 - DNA, 15 bp, Homo sapiens
actcaggataacaga

SEQ ID NO: 198886 - DNA, 15 bp, Homo sapiens
aactcaggataacag

SEQ ID NO: 198887 - DNA, 15 bp, Homo sapiens
taactcaggataaca

SEQ ID NO: 198888 - DNA, 15 bp, Homo sapiens
ttaactcaggataac

SEQ ID NO: 198889 - DNA, 15 bp, Homo sapiens
gttaactcaggataa

SEQ ID NO: 198890 - DNA, 15 bp, Homo sapiens
tgttaactcaggata

SEQ ID NO: 198891 - DNA, 15 bp, Homo sapiens
gtgttaactcaggat

SEQ ID NO: 198892 - DNA, 15 bp, Homo sapiens
tgtgttaactcagga

SEQ ID NO: 198893 - DNA, 15 bp, Homo sapiens
ttgtgttaactcagg

SEQ ID NO: 198894 - DNA, 15 bp, Homo sapiens
tttgtgttaactcag

SEQ ID NO: 198895 - DNA, 15 bp, Homo sapiens
atttgtgttaactca

SEQ ID NO: 198896 - DNA, 15 bp, Homo sapiens
aatttgtgttaactc

SEQ ID NO: 198897 - DNA, 15 bp, Homo sapiens
taatttgtgttaact

SEQ ID NO: 198898 - DNA, 15 bp, Homo sapiens
ataatttgtgttaac

SEQ ID NO: 198899 - DNA, 15 bp, Homo sapiens
gataatttgtgttaa

SEQ ID NO: 198900 - DNA, 15 bp, Homo sapiens
ggataatttgtgtta

SEQ ID NO: 198901 - DNA, 15 bp, Homo sapiens
tggataatttgtgtt

SEQ ID NO: 198902 - DNA, 15 bp, Homo sapiens
ttggataatttgtgt

SEQ ID NO: 198903 - DNA, 15 bp, Homo sapiens
cttggataatttgtg

SEQ ID NO: 198904 - DNA, 15 bp, Homo sapiens
ccttggataatttgt

SEQ ID NO: 198905 - DNA, 15 bp, Homo sapiens
tccttggataatttg

SEQ ID NO: 198906 - DNA, 15 bp, Homo sapiens
ctccttggataattt

SEQ ID NO: 198907 - DNA, 15 bp, Homo sapiens
tctccttggataatt

SEQ ID NO: 198908 - DNA, 15 bp, Homo sapiens
atctccttggataat

SEQ ID NO: 198909 - DNA, 15 bp, Homo sapiens
catctccttggataa

SEQ ID NO: 198910 - DNA, 15 bp, Homo sapiens
ccatctccttggata

SEQ ID NO: 198911 - DNA, 15 bp, Homo sapiens
gccatctccttggat

SEQ ID NO: 198912 - DNA, 15 bp, Homo sapiens
cgccatctccttgga

SEQ ID NO: 198913 - DNA, 15 bp, Homo sapiens
ccgccatctccttgg

SEQ ID NO: 198914 - DNA, 15 bp, Homo sapiens
tccgccatctccttg

SEQ ID NO: 198915 - DNA, 15 bp, Homo sapiens
atccgccatctcctt

SEQ ID NO: 198916 - DNA, 15 bp, Homo sapiens
gatccgccatctcct

SEQ ID NO: 198917 - DNA, 15 bp, Homo sapiens
tgatccgccatctcc

SEQ ID NO: 198918 - DNA, 15 bp, Homo sapiens
atgatccgccatctc

SEQ ID NO: 198919 - DNA, 15 bp, Homo sapiens
gatgatccgccatct

SEQ ID NO: 198920 - DNA, 15 bp, Homo sapiens
agatgatccgccatc

SEQ ID NO: 198921 - DNA, 15 bp, Homo sapiens
cagatgatccgccat

SEQ ID NO: 198922 - DNA, 15 bp, Homo sapiens
gcagatgatccgcca

SEQ ID NO: 198923 - DNA, 15 bp, Homo sapiens
agcagatgatccgcc

SEQ ID NO: 198924 - DNA, 15 bp, Homo sapiens
aagcagatgatccgc

SEQ ID NO: 198925 - DNA, 15 bp, Homo sapiens
aaagcagatgatccg

SEQ ID NO: 198926 - DNA, 15 bp, Homo sapiens
caaagcagatgatcc

SEQ ID NO: 198927 - DNA, 15 bp, Homo sapiens
tcaaagcagatgatc

SEQ ID NO: 198928 - DNA, 15 bp, Homo sapiens
ctcaaagcagatgat

SEQ ID NO: 198929 - DNA, 15 bp, Homo sapiens
cctcaaagcagatga

SEQ ID NO: 198930 - DNA, 15 bp, Homo sapiens
acctcaaagcagatg

SEQ ID NO: 198931 - DNA, 15 bp, Homo sapiens
cacctcaaagcagat

SEQ ID NO: 198932 - DNA, 15 bp, Homo sapiens
acacctcaaagcaga

SEQ ID NO: 198933 - DNA, 15 bp, Homo sapiens
aacacctcaaagcag

SEQ ID NO: 198934 - DNA, 15 bp, Homo sapiens
aaacacctcaaagca

SEQ ID NO: 198935 - DNA, 15 bp, Homo sapiens
aaaacacctcaaagc

SEQ ID NO: 198936 - DNA, 15 bp, Homo sapiens
aaaaacacctcaaag

SEQ ID NO: 198937 - DNA, 15 bp, Homo sapiens
aaaaaacacctcaaa

SEQ ID NO: 198938 - DNA, 15 bp, Homo sapiens
aaaaaaacacctcaa

SEQ ID NO: 198939 - DNA, 15 bp, Homo sapiens
aaaaaaaacacctca

SEQ ID NO: 198940 - DNA, 15 bp, Homo sapiens
aaaaaaaaacacctc

SEQ ID NO: 198941 - DNA, 15 bp, Homo sapiens
caaaaaaaaacacct

SEQ ID NO: 198942 - DNA, 15 bp, Homo sapiens
tcaaaaaaaaacacc

SEQ ID NO: 198943 - DNA, 15 bp, Homo sapiens
ctcaaaaaaaaacac

SEQ ID NO: 198944 - DNA, 15 bp, Homo sapiens
tctcaaaaaaaaaca

SEQ ID NO: 198945 - DNA, 15 bp, Homo sapiens
ttctcaaaaaaaaac

SEQ ID NO: 198946 - DNA, 15 bp, Homo sapiens
attctcaaaaaaaaa

SEQ ID NO: 198947 - DNA, 15 bp, Homo sapiens
aattctcaaaaaaaa

SEQ ID NO: 198948 - DNA, 15 bp, Homo sapiens
aaattctcaaaaaaa

SEQ ID NO: 198949 - DNA, 15 bp, Homo sapiens
aaaattctcaaaaaa

SEQ ID NO: 198950 - DNA, 15 bp, Homo sapiens
taaaattctcaaaaa

SEQ ID NO: 198951 - DNA, 15 bp, Homo sapiens
ttaaaattctcaaaa

SEQ ID NO: 198952 - DNA, 15 bp, Homo sapiens
attaaaattctcaaa

SEQ ID NO: 198953 - DNA, 15 bp, Homo sapiens
cattaaaattctcaa

SEQ ID NO: 198954 - DNA, 15 bp, Homo sapiens
acattaaaattctca

SEQ ID NO: 198955 - DNA, 15 bp, Homo sapiens
tacattaaaattctc

SEQ ID NO: 198956 - DNA, 15 bp, Homo sapiens
atacattaaaattct

SEQ ID NO: 198957 - DNA, 15 bp, Homo sapiens
gatacattaaaattc

SEQ ID NO: 198958 - DNA, 15 bp, Homo sapiens
agatacattaaaatt

SEQ ID NO: 198959 - DNA, 15 bp, Homo sapiens
cagatacattaaaat

SEQ ID NO: 198960 - DNA, 15 bp, Homo sapiens
tcagatacattaaaa

SEQ ID NO: 198961 - DNA, 15 bp, Homo sapiens
ttcagatacattaaa

SEQ ID NO: 198962 - DNA, 15 bp, Homo sapiens
attcagatacattaa

SEQ ID NO: 198963 - DNA, 15 bp, Homo sapiens
tattcagatacatta

SEQ ID NO: 198964 - DNA, 15 bp, Homo sapiens
atattcagatacatt

SEQ ID NO: 198965 - DNA, 15 bp, Homo sapiens
tatattcagatacat

SEQ ID NO: 198966 - DNA, 15 bp, Homo sapiens
ttatattcagataca

SEQ ID NO: 198967 - DNA, 15 bp, Homo sapiens
tttatattcagatac

SEQ ID NO: 198968 - DNA, 15 bp, Homo sapiens
ttttatattcagata

SEQ ID NO: 198969 - DNA, 15 bp, Homo sapiens
cttttatattcagat

SEQ ID NO: 198970 - DNA, 15 bp, Homo sapiens
ccttttatattcaga

SEQ ID NO: 198971 - DNA, 15 bp, Homo sapiens
accttttatattcag

SEQ ID NO: 198972 - DNA, 15 bp, Homo sapiens
taccttttatattca

SEQ ID NO: 198973 - DNA, 15 bp, Homo sapiens
ttaccttttatattc

SEQ ID NO: 198974 - DNA, 15 bp, Homo sapiens
tttaccttttatatt

SEQ ID NO: 198975 - DNA, 15 bp, Homo sapiens
ttttaccttttatat

SEQ ID NO: 198976 - DNA, 15 bp, Homo sapiens
tttttaccttttata

SEQ ID NO: 198977 - DNA, 15 bp, Homo sapiens
atttttaccttttat

SEQ ID NO: 198978 - DNA, 15 bp, Homo sapiens
tatttttacctttta

SEQ ID NO: 198979 - DNA, 15 bp, Homo sapiens
atatttttacctttt

SEQ ID NO: 198980 - DNA, 15 bp, Homo sapiens
catatttttaccttt

SEQ ID NO: 198981 - DNA, 15 bp, Homo sapiens
gcatatttttacctt

SEQ ID NO: 198982 - DNA, 15 bp, Homo sapiens
ggcatatttttacct

SEQ ID NO: 198983 - DNA, 15 bp, Homo sapiens
tggcatatttttacc

SEQ ID NO: 198984 - DNA, 15 bp, Homo sapiens
ttggcatatttttac

SEQ ID NO: 198985 - DNA, 15 bp, Homo sapiens
gttggcatattttta

SEQ ID NO: 198986 - DNA, 15 bp, Homo sapiens
agttggcatattttt

SEQ ID NO: 198987 - DNA, 15 bp, Homo sapiens
tagttggcatatttt

SEQ ID NO: 198988 - DNA, 15 bp, Homo sapiens
ctagttggcatattt

SEQ ID NO: 198989 - DNA, 15 bp, Homo sapiens
gctagttggcatatt

SEQ ID NO: 198990 - DNA, 15 bp, Homo sapiens
tgctagttggcatat

SEQ ID NO: 198991 - DNA, 15 bp, Homo sapiens
ttgctagttggcata

SEQ ID NO: 198992 - DNA, 15 bp, Homo sapiens
attgctagttggcat

SEQ ID NO: 198993 - DNA, 15 bp, Homo sapiens
aattgctagttggca

SEQ ID NO: 198994 - DNA, 15 bp, Homo sapiens
aaattgctagttggc

SEQ ID NO: 198995 - DNA, 15 bp, Homo sapiens
gaaattgctagttgg

SEQ ID NO: 198996 - DNA, 15 bp, Homo sapiens
agaaattgctagttg

SEQ ID NO: 198997 - DNA, 15 bp, Homo sapiens
cagaaattgctagtt

SEQ ID NO: 198998 - DNA, 15 bp, Homo sapiens
gcagaaattgctagt

SEQ ID NO: 198999 - DNA, 15 bp, Homo sapiens
ggcagaaattgctag

SEQ ID NO: 199000 - DNA, 15 bp, Homo sapiens
gggcagaaattgcta

SEQ ID NO: 199001 - DNA, 15 bp, Homo sapiens
tgggcagaaattgct

SEQ ID NO: 199002 - DNA, 15 bp, Homo sapiens
atgggcagaaattgc

SEQ ID NO: 199003 - DNA, 15 bp, Homo sapiens
aatgggcagaaattg

SEQ ID NO: 199004 - DNA, 15 bp, Homo sapiens
gaatgggcagaaatt

SEQ ID NO: 199005 - DNA, 15 bp, Homo sapiens
ggaatgggcagaaat

SEQ ID NO: 199006 - DNA, 15 bp, Homo sapiens
tggaatgggcagaaa

SEQ ID NO: 199007 - DNA, 15 bp, Homo sapiens
ctggaatgggcagaa

SEQ ID NO: 199008 - DNA, 15 bp, Homo sapiens
tctggaatgggcaga

SEQ ID NO: 199009 - DNA, 15 bp, Homo sapiens
ttctggaatgggcag

SEQ ID NO: 199010 - DNA, 15 bp, Homo sapiens
cttctggaatgggca

SEQ ID NO: 199011 - DNA, 15 bp, Homo sapiens
acttctggaatgggc

SEQ ID NO: 199012 - DNA, 15 bp, Homo sapiens
aacttctggaatggg

SEQ ID NO: 199013 - DNA, 15 bp, Homo sapiens
aaacttctggaatgg

SEQ ID NO: 199014 - DNA, 15 bp, Homo sapiens
caaacttctggaatg

SEQ ID NO: 199015 - DNA, 15 bp, Homo sapiens
ccaaacttctggaat

SEQ ID NO: 199016 - DNA, 15 bp, Homo sapiens
tccaaacttctggaa

SEQ ID NO: 199017 - DNA, 15 bp, Homo sapiens
ttccaaacttctgga

SEQ ID NO: 199018 - DNA, 15 bp, Homo sapiens
tttccaaacttctgg

SEQ ID NO: 199019 - DNA, 15 bp, Homo sapiens
atttccaaacttctg

SEQ ID NO: 199020 - DNA, 15 bp, Homo sapiens
tatttccaaacttct

SEQ ID NO: 199021 - DNA, 15 bp, Homo sapiens
atatttccaaacttc

SEQ ID NO: 199022 - DNA, 15 bp, Homo sapiens
aatatttccaaactt

SEQ ID NO: 199023 - DNA, 15 bp, Homo sapiens
taatatttccaaact

SEQ ID NO: 199024 - DNA, 15 bp, Homo sapiens
gtaatatttccaaac

SEQ ID NO: 199025 - DNA, 15 bp, Homo sapiens
agtaatatttccaaa

SEQ ID NO: 199026 - DNA, 15 bp, Homo sapiens
gagtaatatttccaa

SEQ ID NO: 199027 - DNA, 15 bp, Homo sapiens
tgagtaatatttcca

SEQ ID NO: 199028 - DNA, 15 bp, Homo sapiens
atgagtaatatttcc

SEQ ID NO: 199029 - DNA, 15 bp, Homo sapiens
aatgagtaatatttc

SEQ ID NO: 199030 - DNA, 15 bp, Homo sapiens
taatgagtaatattt

SEQ ID NO: 199031 - DNA, 15 bp, Homo sapiens
gtaatgagtaatatt

SEQ ID NO: 199032 - DNA, 15 bp, Homo sapiens
agtaatgagtaatat

SEQ ID NO: 199033 - DNA, 15 bp, Homo sapiens
tagtaatgagtaata

SEQ ID NO: 199034 - DNA, 15 bp, Homo sapiens
ctagtaatgagtaat

SEQ ID NO: 199035 - DNA, 15 bp, Homo sapiens
cctagtaatgagtaa

SEQ ID NO: 199036 - DNA, 15 bp, Homo sapiens
tcctagtaatgagta

SEQ ID NO: 199037 - DNA, 15 bp, Homo sapiens
ttcctagtaatgagt

SEQ ID NO: 199038 - DNA, 15 bp, Homo sapiens
attcctagtaatgag

SEQ ID NO: 199039 - DNA, 15 bp, Homo sapiens
aattcctagtaatga

SEQ ID NO: 199040 - DNA, 15 bp, Homo sapiens
taattcctagtaatg

SEQ ID NO: 199041 - DNA, 15 bp, Homo sapiens
ttaattcctagtaat

SEQ ID NO: 199042 - DNA, 15 bp, Homo sapiens
tttaattcctagtaa

SEQ ID NO: 199043 - DNA, 15 bp, Homo sapiens
atttaattcctagta

SEQ ID NO: 199044 - DNA, 15 bp, Homo sapiens
tatttaattcctagt

SEQ ID NO: 199045 - DNA, 15 bp, Homo sapiens
ttatttaattcctag

SEQ ID NO: 199046 - DNA, 15 bp, Homo sapiens
tttatttaattccta

SEQ ID NO: 199047 - DNA, 15 bp, Homo sapiens
ttttatttaattcct

SEQ ID NO: 199048 - DNA, 15 bp, Homo sapiens
attttatttaattcc

SEQ ID NO: 199049 - DNA, 15 bp, Homo sapiens
tattttatttaattc

SEQ ID NO: 199050 - DNA, 15 bp, Homo sapiens
atattttatttaatt

SEQ ID NO: 199051 - DNA, 15 bp, Homo sapiens
catattttatttaat

SEQ ID NO: 199052 - DNA, 15 bp, Homo sapiens
ccatattttatttaa

SEQ ID NO: 199053 - DNA, 15 bp, Homo sapiens
accatattttattta

SEQ ID NO: 199054 - DNA, 15 bp, Homo sapiens
aaccatattttattt

SEQ ID NO: 199055 - DNA, 15 bp, Homo sapiens
aaaccatattttatt

SEQ ID NO: 199056 - DNA, 15 bp, Homo sapiens
taaaccatattttat

SEQ ID NO: 199057 - DNA, 15 bp, Homo sapiens
ataaaccatatttta

SEQ ID NO: 199058 - DNA, 15 bp, Homo sapiens
gataaaccatatttt

SEQ ID NO: 199059 - DNA, 15 bp, Homo sapiens
agataaaccatattt

SEQ ID NO: 199060 - DNA, 15 bp, Homo sapiens
tagataaaccatatt

SEQ ID NO: 199061 - DNA, 15 bp, Homo sapiens
atagataaaccatat

SEQ ID NO: 199062 - DNA, 15 bp, Homo sapiens
aatagataaaccata

SEQ ID NO: 199063 - DNA, 15 bp, Homo sapiens
caatagataaaccat

SEQ ID NO: 199064 - DNA, 15 bp, Homo sapiens
acaatagataaacca

SEQ ID NO: 199065 - DNA, 15 bp, Homo sapiens
aacaatagataaacc

SEQ ID NO: 199066 - DNA, 15 bp, Homo sapiens
taacaatagataaac

SEQ ID NO: 199067 - DNA, 15 bp, Homo sapiens
ataacaatagataaa

SEQ ID NO: 199068 - DNA, 15 bp, Homo sapiens
tataacaatagataa

SEQ ID NO: 199069 - DNA, 15 bp, Homo sapiens
gtataacaatagata

SEQ ID NO: 199070 - DNA, 15 bp, Homo sapiens
ggtataacaatagat

SEQ ID NO: 199071 - DNA, 15 bp, Homo sapiens
aggtataacaataga

SEQ ID NO: 199072 - DNA, 15 bp, Homo sapiens
gaggtataacaatag

SEQ ID NO: 199073 - DNA, 15 bp, Homo sapiens
agaggtataacaata

SEQ ID NO: 199074 - DNA, 15 bp, Homo sapiens
aagaggtataacaat

SEQ ID NO: 199075 - DNA, 15 bp, Homo sapiens
aaagaggtataacaa

SEQ ID NO: 199076 - DNA, 15 bp, Homo sapiens
aaaagaggtataaca

SEQ ID NO: 199077 - DNA, 15 bp, Homo sapiens
taaaagaggtataac

SEQ ID NO: 199078 - DNA, 15 bp, Homo sapiens
ttaaaagaggtataa

SEQ ID NO: 199079 - DNA, 15 bp, Homo sapiens
attaaaagaggtata

SEQ ID NO: 199080 - DNA, 15 bp, Homo sapiens
aattaaaagaggtat

SEQ ID NO: 199081 - DNA, 15 bp, Homo sapiens
gaattaaaagaggta

SEQ ID NO: 199082 - DNA, 15 bp, Homo sapiens
tgaattaaaagaggt

SEQ ID NO: 199083 - DNA, 15 bp, Homo sapiens
gtgaattaaaagagg

SEQ ID NO: 199084 - DNA, 15 bp, Homo sapiens
tgtgaattaaaagag

SEQ ID NO: 199085 - DNA, 15 bp, Homo sapiens
atgtgaattaaaaga

SEQ ID NO: 199086 - DNA, 15 bp, Homo sapiens
tatgtgaattaaaag

SEQ ID NO: 199087 - DNA, 15 bp, Homo sapiens
ctatgtgaattaaaa

SEQ ID NO: 199088 - DNA, 15 bp, Homo sapiens
gctatgtgaattaaa

SEQ ID NO: 199089 - DNA, 15 bp, Homo sapiens
agctatgtgaattaa

SEQ ID NO: 199090 - DNA, 15 bp, Homo sapiens
gagctatgtgaatta

SEQ ID NO: 199091 - DNA, 15 bp, Homo sapiens
tgagctatgtgaatt

SEQ ID NO: 199092 - DNA, 15 bp, Homo sapiens
atgagctatgtgaat

SEQ ID NO: 199093 - DNA, 15 bp, Homo sapiens
aatgagctatgtgaa

SEQ ID NO: 199094 - DNA, 15 bp, Homo sapiens
aaatgagctatgtga

SEQ ID NO: 199095 - DNA, 15 bp, Homo sapiens
aaaatgagctatgtg

SEQ ID NO: 199096 - DNA, 15 bp, Homo sapiens
aaaaatgagctatgt

SEQ ID NO: 199097 - DNA, 15 bp, Homo sapiens
taaaaatgagctatg

SEQ ID NO: 199098 - DNA, 15 bp, Homo sapiens
ataaaaatgagctat

SEQ ID NO: 199099 - DNA, 15 bp, Homo sapiens
gataaaaatgagcta

SEQ ID NO: 199100 - DNA, 15 bp, Homo sapiens
agataaaaatgagct

SEQ ID NO: 199101 - DNA, 15 bp, Homo sapiens
aagataaaaatgagc

SEQ ID NO: 199102 - DNA, 15 bp, Homo sapiens
aaagataaaaatgag

SEQ ID NO: 199103 - DNA, 15 bp, Homo sapiens
aaaagataaaaatga

SEQ ID NO: 199104 - DNA, 15 bp, Homo sapiens
taaaagataaaaatg

SEQ ID NO: 199105 - DNA, 15 bp, Homo sapiens
ataaaagataaaaat

SEQ ID NO: 199106 - DNA, 15 bp, Homo sapiens
aataaaagataaaaa

SEQ ID NO: 199107 - DNA, 15 bp, Homo sapiens
aaataaaagataaaa

SEQ ID NO: 199108 - DNA, 15 bp, Homo sapiens
aaaataaaagataaa

SEQ ID NO: 199109 - DNA, 15 bp, Homo sapiens
aaaaataaaagataa

SEQ ID NO: 199110 - DNA, 15 bp, Homo sapiens
caaaaataaaagata

SEQ ID NO: 199111 - DNA, 15 bp, Homo sapiens
acaaaaataaaagat

SEQ ID NO: 199112 - DNA, 15 bp, Homo sapiens
aacaaaaataaaaga

SEQ ID NO: 199113 - DNA, 15 bp, Homo sapiens
aaacaaaaataaaag

SEQ ID NO: 199114 - DNA, 15 bp, Homo sapiens
caaacaaaaataaaa

SEQ ID NO: 199115 - DNA, 15 bp, Homo sapiens
acaaacaaaaataaa

SEQ ID NO: 199116 - DNA, 15 bp, Homo sapiens
aacaaacaaaaataa

SEQ ID NO: 199117 - DNA, 15 bp, Homo sapiens
aaacaaacaaaaata

SEQ ID NO: 199118 - DNA, 15 bp, Homo sapiens
aaaacaaacaaaaat

SEQ ID NO: 199119 - DNA, 15 bp, Homo sapiens
aaaaacaaacaaaaa

SEQ ID NO: 199120 - DNA, 15 bp, Homo sapiens
aaaaaacaaacaaaa

SEQ ID NO: 199121 - DNA, 15 bp, Homo sapiens
aaaaaaacaaacaaa

SEQ ID NO: 199122 - DNA, 15 bp, Homo sapiens
aaaaaaaacaaacaa

SEQ ID NO: 199123 - DNA, 15 bp, Homo sapiens
caaaaaaaacaaaca

SEQ ID NO: 199124 - DNA, 15 bp, Homo sapiens
tcaaaaaaaacaaac

SEQ ID NO: 199125 - DNA, 15 bp, Homo sapiens
ctcaaaaaaaacaaa

SEQ ID NO: 199126 - DNA, 15 bp, Homo sapiens
tctcaaaaaaaacaa

SEQ ID NO: 199127 - DNA, 15 bp, Homo sapiens
atctcaaaaaaaaca

SEQ ID NO: 199128 - DNA, 15 bp, Homo sapiens
catctcaaaaaaaac

SEQ ID NO: 199129 - DNA, 15 bp, Homo sapiens
ccatctcaaaaaaaa

SEQ ID NO: 199130 - DNA, 15 bp, Homo sapiens
tccatctcaaaaaaa

SEQ ID NO: 199131 - DNA, 15 bp, Homo sapiens
gactccatctcaaaa

SEQ ID NO: 199132 - DNA, 15 bp, Homo sapiens
agactccatctcaaa

SEQ ID NO: 199133 - DNA, 15 bp, Homo sapiens
aagactccatctcaa

SEQ ID NO: 199134 - DNA, 15 bp, Homo sapiens
caagactccatctca

SEQ ID NO: 199135 - DNA, 15 bp, Homo sapiens
gcaagactccatctc

SEQ ID NO: 199136 - DNA, 15 bp, Homo sapiens
agcaagactccatct

SEQ ID NO: 199137 - DNA, 15 bp, Homo sapiens
gagcaagactccatc

SEQ ID NO: 199138 - DNA, 15 bp, Homo sapiens
agagcaagactccat

SEQ ID NO: 199139 - DNA, 15 bp, Homo sapiens
cagagcaagactcca

SEQ ID NO: 199140 - DNA, 15 bp, Homo sapiens
acagagcaagactcc

SEQ ID NO: 199141 - DNA, 15 bp, Homo sapiens
gacagagcaagactc

SEQ ID NO: 199142 - DNA, 15 bp, Homo sapiens
tgacagagcaagact

SEQ ID NO: 199143 - DNA, 15 bp, Homo sapiens
gtgacagagcaagac

SEQ ID NO: 199144 - DNA, 15 bp, Homo sapiens
ggtgacagagcaaga

SEQ ID NO: 199145 - DNA, 15 bp, Homo sapiens
tggtgacagagcaag

SEQ ID NO: 199146 - DNA, 15 bp, Homo sapiens
ctggtgacagagcaa

SEQ ID NO: 199147 - DNA, 15 bp, Homo sapiens
cctggtgacagagca

SEQ ID NO: 199148 - DNA, 15 bp, Homo sapiens
gcctggtgacagagc

SEQ ID NO: 199149 - DNA, 15 bp, Homo sapiens
tgcctggtgacagag

SEQ ID NO: 199150 - DNA, 15 bp, Homo sapiens
ctgcctggtgacaga

SEQ ID NO: 199151 - DNA, 15 bp, Homo sapiens
cctgcctggtgacag

SEQ ID NO: 199152 - DNA, 15 bp, Homo sapiens
tcctgcctggtgaca

SEQ ID NO: 199153 - DNA, 15 bp, Homo sapiens
ctcctgcctggtgac

SEQ ID NO: 199154 - DNA, 15 bp, Homo sapiens
actcctgcctggtga

SEQ ID NO: 199155 - DNA, 15 bp, Homo sapiens
cactcctgcctggtg

SEQ ID NO: 199156 - DNA, 15 bp, Homo sapiens
gcactcctgcctggt

SEQ ID NO: 199157 - DNA, 15 bp, Homo sapiens
tgcactcctgcctgg

SEQ ID NO: 199158 - DNA, 15 bp, Homo sapiens
ctgcactcctgcctg

SEQ ID NO: 199159 - DNA, 15 bp, Homo sapiens
actgcactcctgcct

SEQ ID NO: 199160 - DNA, 15 bp, Homo sapiens
cactgcactcctgcc

SEQ ID NO: 199161 - DNA, 15 bp, Homo sapiens
tcactgcactcctgc

SEQ ID NO: 199162 - DNA, 15 bp, Homo sapiens
atcactgcactcctg

SEQ ID NO: 199163 - DNA, 15 bp, Homo sapiens
catcactgcactcct

SEQ ID NO: 199164 - DNA, 15 bp, Homo sapiens
gcatcactgcactcc

SEQ ID NO: 199165 - DNA, 15 bp, Homo sapiens
tgcatcactgcactc

SEQ ID NO: 199166 - DNA, 15 bp, Homo sapiens
ttgcatcactgcact

SEQ ID NO: 199167 - DNA, 15 bp, Homo sapiens
attgcatcactgcac

SEQ ID NO: 199168 - DNA, 15 bp, Homo sapiens
gattgcatcactgca

SEQ ID NO: 199169 - DNA, 15 bp, Homo sapiens
agattgcatcactgc

SEQ ID NO: 199170 - DNA, 15 bp, Homo sapiens
gagattgcatcactg

SEQ ID NO: 199171 - DNA, 15 bp, Homo sapiens
cgagattgcatcact

SEQ ID NO: 199172 - DNA, 15 bp, Homo sapiens
ccgagattgcatcac

SEQ ID NO: 199173 - DNA, 15 bp, Homo sapiens
gccgagattgcatca

SEQ ID NO: 199174 - DNA, 15 bp, Homo sapiens
agccgagattgcatc

SEQ ID NO: 199175 - DNA, 15 bp, Homo sapiens
gagccgagattgcat

SEQ ID NO: 199176 - DNA, 15 bp, Homo sapiens
gagtgagccgagatt

SEQ ID NO: 199177 - DNA, 15 bp, Homo sapiens
agagtgagccgagat

SEQ ID NO: 199178 - DNA, 15 bp, Homo sapiens
tagagtgagccgaga

SEQ ID NO: 199179 - DNA, 15 bp, Homo sapiens
ctagagtgagccgag

SEQ ID NO: 199180 - DNA, 15 bp, Homo sapiens
gctagagtgagccga

SEQ ID NO: 199181 - DNA, 15 bp, Homo sapiens
ggctagagtgagccg

SEQ ID NO: 199182 - DNA, 15 bp, Homo sapiens
tggctagagtgagcc

SEQ ID NO: 199183 - DNA, 15 bp, Homo sapiens
gtggctagagtgagc

SEQ ID NO: 199184 - DNA, 15 bp, Homo sapiens
ggtggctagagtgag

SEQ ID NO: 199185 - DNA, 15 bp, Homo sapiens
cggtggctagagtga

SEQ ID NO: 199186 - DNA, 15 bp, Homo sapiens
tcggtggctagagtg

SEQ ID NO: 199187 - DNA, 15 bp, Homo sapiens
gtcggtggctagagt

SEQ ID NO: 199188 - DNA, 15 bp, Homo sapiens
agtcggtggctagag

SEQ ID NO: 199189 - DNA, 15 bp, Homo sapiens
gagtcggtggctaga

SEQ ID NO: 199190 - DNA, 15 bp, Homo sapiens
ggagtcggtggctag

SEQ ID NO: 199191 - DNA, 15 bp, Homo sapiens
gggagtcggtggcta

SEQ ID NO: 199192 - DNA, 15 bp, Homo sapiens
agggagtcggtggct

SEQ ID NO: 199193 - DNA, 15 bp, Homo sapiens
cagggagtcggtggc

SEQ ID NO: 199194 - DNA, 15 bp, Homo sapiens
ccagggagtcggtgg

SEQ ID NO: 199195 - DNA, 15 bp, Homo sapiens
accagggagtcggtg

SEQ ID NO: 199196 - DNA, 15 bp, Homo sapiens
aaccagggagtcggt

SEQ ID NO: 199197 - DNA, 15 bp, Homo sapiens
gaaccagggagtcgg

SEQ ID NO: 199198 - DNA, 15 bp, Homo sapiens
tgaaccagggagtcg

SEQ ID NO: 199199 - DNA, 15 bp, Homo sapiens
ttgaaccagggagtc

SEQ ID NO: 199200 - DNA, 15 bp, Homo sapiens
cttgaaccagggagt

SEQ ID NO: 199201 - DNA, 15 bp, Homo sapiens
gcttgaaccagggag

SEQ ID NO: 199202 - DNA, 15 bp, Homo sapiens
cgcttgaaccaggga

SEQ ID NO: 199203 - DNA, 15 bp, Homo sapiens
tcgcttgaaccaggg

SEQ ID NO: 199204 - DNA, 15 bp, Homo sapiens
atcgcttgaaccagg

SEQ ID NO: 199205 - DNA, 15 bp, Homo sapiens
aatcgcttgaaccag

SEQ ID NO: 199206 - DNA, 15 bp, Homo sapiens
gaatcgcttgaacca

SEQ ID NO: 199207 - DNA, 15 bp, Homo sapiens
caggcaggagaatcg

SEQ ID NO: 199208 - DNA, 15 bp, Homo sapiens
tcaggcaggagaatc

SEQ ID NO: 199209 - DNA, 15 bp, Homo sapiens
ctcaggcaggagaat

SEQ ID NO: 199210 - DNA, 15 bp, Homo sapiens
gctcaggcaggagaa

SEQ ID NO: 199211 - DNA, 15 bp, Homo sapiens
ggctcaggcaggaga

SEQ ID NO: 199212 - DNA, 15 bp, Homo sapiens
aggctcaggcaggag

SEQ ID NO: 199213 - DNA, 15 bp, Homo sapiens
aaggctcaggcagga

SEQ ID NO: 199214 - DNA, 15 bp, Homo sapiens
gaaggctcaggcagg

SEQ ID NO: 199215 - DNA, 15 bp, Homo sapiens
agaaggctcaggcag

SEQ ID NO: 199216 - DNA, 15 bp, Homo sapiens
cagaaggctcaggca

SEQ ID NO: 199217 - DNA, 15 bp, Homo sapiens
tcagaaggctcaggc

SEQ ID NO: 199218 - DNA, 15 bp, Homo sapiens
ctcagaaggctcagg

SEQ ID NO: 199219 - DNA, 15 bp, Homo sapiens
actcagaaggctcag

SEQ ID NO: 199220 - DNA, 15 bp, Homo sapiens
tactcagaaggctca

SEQ ID NO: 199221 - DNA, 15 bp, Homo sapiens
ctactcagaaggctc

SEQ ID NO: 199222 - DNA, 15 bp, Homo sapiens
gctactcagaaggct

SEQ ID NO: 199223 - DNA, 15 bp, Homo sapiens
agctactcagaaggc

SEQ ID NO: 199224 - DNA, 15 bp, Homo sapiens
cagctactcagaagg

SEQ ID NO: 199225 - DNA, 15 bp, Homo sapiens
ccagctactcagaag

SEQ ID NO: 199226 - DNA, 15 bp, Homo sapiens
cccagctactcagaa

SEQ ID NO: 199227 - DNA, 15 bp, Homo sapiens
tcccagctactcaga

SEQ ID NO: 199228 - DNA, 15 bp, Homo sapiens
ctgcctgtaatccca

SEQ ID NO: 199229 - DNA, 15 bp, Homo sapiens
cctgcctgtaatccc

SEQ ID NO: 199230 - DNA, 15 bp, Homo sapiens
gcctgcctgtaatcc

SEQ ID NO: 199231 - DNA, 15 bp, Homo sapiens
tgcctgcctgtaatc

SEQ ID NO: 199232 - DNA, 15 bp, Homo sapiens
gtgcctgcctgtaat

SEQ ID NO: 199233 - DNA, 15 bp, Homo sapiens
ggtgcctgcctgtaa

SEQ ID NO: 199234 - DNA, 15 bp, Homo sapiens
tggtgcctgcctgta

SEQ ID NO: 199235 - DNA, 15 bp, Homo sapiens
gtggtgcctgcctgt

SEQ ID NO: 199236 - DNA, 15 bp, Homo sapiens
ggtggtgcctgcctg

SEQ ID NO: 199237 - DNA, 15 bp, Homo sapiens
tggtggtgcctgcct

SEQ ID NO: 199238 - DNA, 15 bp, Homo sapiens
gtggtggtgcctgcc

SEQ ID NO: 199239 - DNA, 15 bp, Homo sapiens
cgtggtggtgcctgc

SEQ ID NO: 199240 - DNA, 15 bp, Homo sapiens
gcgtggtggtgcctg

SEQ ID NO: 199241 - DNA, 15 bp, Homo sapiens
ggcgtggtggtgcct

SEQ ID NO: 199242 - DNA, 15 bp, Homo sapiens
gggcgtggtggtgcc

SEQ ID NO: 199243 - DNA, 15 bp, Homo sapiens
tgggcgtggtggtgc

SEQ ID NO: 199244 - DNA, 15 bp, Homo sapiens
ctgggcgtggtggtg

SEQ ID NO: 199245 - DNA, 15 bp, Homo sapiens
gctgggcgtggtggt

SEQ ID NO: 199246 - DNA, 15 bp, Homo sapiens
ctacaaaaattagct

SEQ ID NO: 199247 - DNA, 15 bp, Homo sapiens
tctacaaaaattagc

SEQ ID NO: 199248 - DNA, 15 bp, Homo sapiens
ctctacaaaaattag

SEQ ID NO: 199249 - DNA, 15 bp, Homo sapiens
tctctacaaaaatta

SEQ ID NO: 199250 - DNA, 15 bp, Homo sapiens
gtctctacaaaaatt

SEQ ID NO: 199251 - DNA, 15 bp, Homo sapiens
tgtctctacaaaaat

SEQ ID NO: 199252 - DNA, 15 bp, Homo sapiens
ctgtctctacaaaaa

SEQ ID NO: 199253 - DNA, 15 bp, Homo sapiens
cctgtctctacaaaa

SEQ ID NO: 199254 - DNA, 15 bp, Homo sapiens
tcctgtctctacaaa

SEQ ID NO: 199255 - DNA, 15 bp, Homo sapiens
atcctgtctctacaa

SEQ ID NO: 199256 - DNA, 15 bp, Homo sapiens
aatcctgtctctaca

SEQ ID NO: 199257 - DNA, 15 bp, Homo sapiens
aaatcctgtctctac

SEQ ID NO: 199258 - DNA, 15 bp, Homo sapiens
gaaatcctgtctcta

SEQ ID NO: 199259 - DNA, 15 bp, Homo sapiens
tgaaatcctgtctct

SEQ ID NO: 199260 - DNA, 15 bp, Homo sapiens
gtgaaatcctgtctc

SEQ ID NO: 199261 - DNA, 15 bp, Homo sapiens
ggtgaaatcctgtct

SEQ ID NO: 199262 - DNA, 15 bp, Homo sapiens
cggtgaaatcctgtc

SEQ ID NO: 199263 - DNA, 15 bp, Homo sapiens
acggtgaaatcctgt

SEQ ID NO: 199264 - DNA, 15 bp, Homo sapiens
cacggtgaaatcctg

SEQ ID NO: 199265 - DNA, 15 bp, Homo sapiens
acacggtgaaatcct

SEQ ID NO: 199266 - DNA, 15 bp, Homo sapiens
aacacggtgaaatcc

SEQ ID NO: 199267 - DNA, 15 bp, Homo sapiens
caacacggtgaaatc

SEQ ID NO: 199268 - DNA, 15 bp, Homo sapiens
ccaacacggtgaaat

SEQ ID NO: 199269 - DNA, 15 bp, Homo sapiens
gccaacacggtgaaa

SEQ ID NO: 199270 - DNA, 15 bp, Homo sapiens
ggccaacacggtgaa

SEQ ID NO: 199271 - DNA, 15 bp, Homo sapiens
tggccaacacggtga

SEQ ID NO: 199272 - DNA, 15 bp, Homo sapiens
ctggccaacacggtg

SEQ ID NO: 199273 - DNA, 15 bp, Homo sapiens
cctggccaacacggt

SEQ ID NO: 199274 - DNA, 15 bp, Homo sapiens
tcctggccaacacgg

SEQ ID NO: 199275 - DNA, 15 bp, Homo sapiens
atcctggccaacacg

SEQ ID NO: 199276 - DNA, 15 bp, Homo sapiens
catcctggccaacac

SEQ ID NO: 199277 - DNA, 15 bp, Homo sapiens
ccatcctggccaaca

SEQ ID NO: 199278 - DNA, 15 bp, Homo sapiens
accatcctggccaac

SEQ ID NO: 199279 - DNA, 15 bp, Homo sapiens
gaccatcctggccaa

SEQ ID NO: 199280 - DNA, 15 bp, Homo sapiens
agaccatcctggcca

SEQ ID NO: 199281 - DNA, 15 bp, Homo sapiens
gagaccatcctggcc

SEQ ID NO: 199282 - DNA, 15 bp, Homo sapiens
ggagaccatcctggc

SEQ ID NO: 199283 - DNA, 15 bp, Homo sapiens
tggagaccatcctgg

SEQ ID NO: 199284 - DNA, 15 bp, Homo sapiens
atggagaccatcctg

SEQ ID NO: 199285 - DNA, 15 bp, Homo sapiens
gatggagaccatcct

SEQ ID NO: 199286 - DNA, 15 bp, Homo sapiens
agatggagaccatcc

SEQ ID NO: 199287 - DNA, 15 bp, Homo sapiens
gagatggagaccatc

SEQ ID NO: 199288 - DNA, 15 bp, Homo sapiens
ggagatggagaccat

SEQ ID NO: 199289 - DNA, 15 bp, Homo sapiens
aggagatggagacca

SEQ ID NO: 199290 - DNA, 15 bp, Homo sapiens
caggagatggagacc

SEQ ID NO: 199291 - DNA, 15 bp, Homo sapiens
tcaggagatggagac

SEQ ID NO: 199292 - DNA, 15 bp, Homo sapiens
gtcaggagatggaga

SEQ ID NO: 199293 - DNA, 15 bp, Homo sapiens
ggtcaggagatggag

SEQ ID NO: 199294 - DNA, 15 bp, Homo sapiens
aggtcaggagatgga

SEQ ID NO: 199295 - DNA, 15 bp, Homo sapiens
gaggtcaggagatgg

SEQ ID NO: 199296 - DNA, 15 bp, Homo sapiens
tgaggtcaggagatg

SEQ ID NO: 199297 - DNA, 15 bp, Homo sapiens
atgaggtcaggagat

SEQ ID NO: 199298 - DNA, 15 bp, Homo sapiens
catgaggtcaggaga

SEQ ID NO: 199299 - DNA, 15 bp, Homo sapiens
tcatgaggtcaggag

SEQ ID NO: 199300 - DNA, 15 bp, Homo sapiens
atcatgaggtcagga

SEQ ID NO: 199301 - DNA, 15 bp, Homo sapiens
gatcatgaggtcagg

SEQ ID NO: 199302 - DNA, 15 bp, Homo sapiens
agatcatgaggtcag

SEQ ID NO: 199303 - DNA, 15 bp, Homo sapiens
cagatcatgaggtca

SEQ ID NO: 199304 - DNA, 15 bp, Homo sapiens
gcagatcatgaggtc

SEQ ID NO: 199305 - DNA, 15 bp, Homo sapiens
ggcagatcatgaggt

SEQ ID NO: 199306 - DNA, 15 bp, Homo sapiens
aggcagatcatgagg

SEQ ID NO: 199307 - DNA, 15 bp, Homo sapiens
caggcagatcatgag

SEQ ID NO: 199308 - DNA, 15 bp, Homo sapiens
gcaggcagatcatga

SEQ ID NO: 199309 - DNA, 15 bp, Homo sapiens
agcaggcagatcatg

SEQ ID NO: 199310 - DNA, 15 bp, Homo sapiens
aagcaggcagatcat

SEQ ID NO: 199311 - DNA, 15 bp, Homo sapiens
gaagcaggcagatca

SEQ ID NO: 199312 - DNA, 15 bp, Homo sapiens
cgaagcaggcagatc

SEQ ID NO: 199313 - DNA, 15 bp, Homo sapiens
ccgaagcaggcagat

SEQ ID NO: 199314 - DNA, 15 bp, Homo sapiens
gccgaagcaggcaga

SEQ ID NO: 199315 - DNA, 15 bp, Homo sapiens
ggccgaagcaggcag

SEQ ID NO: 199316 - DNA, 15 bp, Homo sapiens
aggccgaagcaggca

SEQ ID NO: 199317 - DNA, 15 bp, Homo sapiens
gaggccgaagcaggc

SEQ ID NO: 199318 - DNA, 15 bp, Homo sapiens
ggaggccgaagcagg

SEQ ID NO: 199319 - DNA, 15 bp, Homo sapiens
gggaggccgaagcag

SEQ ID NO: 199320 - DNA, 15 bp, Homo sapiens
tgggaggccgaagca

SEQ ID NO: 199321 - DNA, 15 bp, Homo sapiens
ttgggaggccgaagc

SEQ ID NO: 199322 - DNA, 15 bp, Homo sapiens
tttgggaggccgaag

SEQ ID NO: 199323 - DNA, 15 bp, Homo sapiens
ctttgggaggccgaa

SEQ ID NO: 199324 - DNA, 15 bp, Homo sapiens
ccacctgtaatccca

SEQ ID NO: 199325 - DNA, 15 bp, Homo sapiens
cccacctgtaatccc

SEQ ID NO: 199326 - DNA, 15 bp, Homo sapiens
tcccacctgtaatcc

SEQ ID NO: 199327 - DNA, 15 bp, Homo sapiens
ctcccacctgtaatc

SEQ ID NO: 199328 - DNA, 15 bp, Homo sapiens
gctcccacctgtaat

SEQ ID NO: 199329 - DNA, 15 bp, Homo sapiens
ggctcccacctgtaa

SEQ ID NO: 199330 - DNA, 15 bp, Homo sapiens
tggctcccacctgta

SEQ ID NO: 199331 - DNA, 15 bp, Homo sapiens
gtggctcccacctgt

SEQ ID NO: 199332 - DNA, 15 bp, Homo sapiens
agtggctcccacctg

SEQ ID NO: 199333 - DNA, 15 bp, Homo sapiens
tagtggctcccacct

SEQ ID NO: 199334 - DNA, 15 bp, Homo sapiens
gtagtggctcccacc

SEQ ID NO: 199335 - DNA, 15 bp, Homo sapiens
cgtagtggctcccac

SEQ ID NO: 199336 - DNA, 15 bp, Homo sapiens
gcgtagtggctccca

SEQ ID NO: 199337 - DNA, 15 bp, Homo sapiens
ggcgtagtggctccc

SEQ ID NO: 199338 - DNA, 15 bp, Homo sapiens
aggcgtagtggctcc

SEQ ID NO: 199339 - DNA, 15 bp, Homo sapiens
caggcgtagtggctc

SEQ ID NO: 199340 - DNA, 15 bp, Homo sapiens
ccaggcgtagtggct

SEQ ID NO: 199341 - DNA, 15 bp, Homo sapiens
gccaggcgtagtggc

SEQ ID NO: 199342 - DNA, 15 bp, Homo sapiens
ggccaggcgtagtgg

SEQ ID NO: 199343 - DNA, 15 bp, Homo sapiens
gggccaggcgtagtg

SEQ ID NO: 199344 - DNA, 15 bp, Homo sapiens
tgggccaggcgtagt

SEQ ID NO: 199345 - DNA, 15 bp, Homo sapiens
gtgggccaggcgtag

SEQ ID NO: 199346 - DNA, 15 bp, Homo sapiens
tgtgggccaggcgta

SEQ ID NO: 199347 - DNA, 15 bp, Homo sapiens
atgtgggccaggcgt

SEQ ID NO: 199348 - DNA, 15 bp, Homo sapiens
tatgtgggccaggcg

SEQ ID NO: 199349 - DNA, 15 bp, Homo sapiens
ctatgtgggccaggc

SEQ ID NO: 199350 - DNA, 15 bp, Homo sapiens
gctatgtgggccagg

SEQ ID NO: 199351 - DNA, 15 bp, Homo sapiens
agctatgtgggccag

SEQ ID NO: 199352 - DNA, 15 bp, Homo sapiens
gagctatgtgggcca

SEQ ID NO: 199353 - DNA, 15 bp, Homo sapiens
tgagctatgtgggcc

SEQ ID NO: 199354 - DNA, 15 bp, Homo sapiens
atgagctatgtgggc

SEQ ID NO: 199355 - DNA, 15 bp, Homo sapiens
aatgagctatgtggg

SEQ ID NO: 199356 - DNA, 15 bp, Homo sapiens
aaatgagctatgtgg

SEQ ID NO: 199357 - DNA, 15 bp, Homo sapiens
ctaaaaatgagctat

SEQ ID NO: 199358 - DNA, 15 bp, Homo sapiens
tctaaaaatgagcta

SEQ ID NO: 199359 - DNA, 15 bp, Homo sapiens
gtctaaaaatgagct

SEQ ID NO: 199360 - DNA, 15 bp, Homo sapiens
agtctaaaaatgagc

SEQ ID NO: 199361 - DNA, 15 bp, Homo sapiens
gagtctaaaaatgag

SEQ ID NO: 199362 - DNA, 15 bp, Homo sapiens
tgagtctaaaaatga

SEQ ID NO: 199363 - DNA, 15 bp, Homo sapiens
gtgagtctaaaaatg

SEQ ID NO: 199364 - DNA, 15 bp, Homo sapiens
agtgagtctaaaaat

SEQ ID NO: 199365 - DNA, 15 bp, Homo sapiens
aagtgagtctaaaaa

SEQ ID NO: 199366 - DNA, 15 bp, Homo sapiens
gaagtgagtctaaaa

SEQ ID NO: 199367 - DNA, 15 bp, Homo sapiens
ggaagtgagtctaaa

SEQ ID NO: 199368 - DNA, 15 bp, Homo sapiens
tggaagtgagtctaa

SEQ ID NO: 199369 - DNA, 15 bp, Homo sapiens
atggaagtgagtcta

SEQ ID NO: 199370 - DNA, 15 bp, Homo sapiens
aatggaagtgagtct

SEQ ID NO: 199371 - DNA, 15 bp, Homo sapiens
taatggaagtgagtc

SEQ ID NO: 199372 - DNA, 15 bp, Homo sapiens
ttaatggaagtgagt

SEQ ID NO: 199373 - DNA, 15 bp, Homo sapiens
cttaatggaagtgag

SEQ ID NO: 199374 - DNA, 15 bp, Homo sapiens
acttaatggaagtga

SEQ ID NO: 199375 - DNA, 15 bp, Homo sapiens
gacttaatggaagtg

SEQ ID NO: 199376 - DNA, 15 bp, Homo sapiens
agacttaatggaagt

SEQ ID NO: 199377 - DNA, 15 bp, Homo sapiens
aagacttaatggaag

SEQ ID NO: 199378 - DNA, 15 bp, Homo sapiens
caagacttaatggaa

SEQ ID NO: 199379 - DNA, 15 bp, Homo sapiens
acaagacttaatgga

SEQ ID NO: 199380 - DNA, 15 bp, Homo sapiens
aacaagacttaatgg

SEQ ID NO: 199381 - DNA, 15 bp, Homo sapiens
aaacaagacttaatg

SEQ ID NO: 199382 - DNA, 15 bp, Homo sapiens
caaacaagacttaat

SEQ ID NO: 199383 - DNA, 15 bp, Homo sapiens
ccaaacaagacttaa

SEQ ID NO: 199384 - DNA, 15 bp, Homo sapiens
tccaaacaagactta

SEQ ID NO: 199385 - DNA, 15 bp, Homo sapiens
gtccaaacaagactt

SEQ ID NO: 199386 - DNA, 15 bp, Homo sapiens
ggtccaaacaagact

SEQ ID NO: 199387 - DNA, 15 bp, Homo sapiens
gggtccaaacaagac

SEQ ID NO: 199388 - DNA, 15 bp, Homo sapiens
tgggtccaaacaaga

SEQ ID NO: 199389 - DNA, 15 bp, Homo sapiens
gtgggtccaaacaag

SEQ ID NO: 199390 - DNA, 15 bp, Homo sapiens
cgtgggtccaaacaa

SEQ ID NO: 199391 - DNA, 15 bp, Homo sapiens
tcgtgggtccaaaca

SEQ ID NO: 199392 - DNA, 15 bp, Homo sapiens
ttcgtgggtccaaac

SEQ ID NO: 199393 - DNA, 15 bp, Homo sapiens
gttcgtgggtccaaa

SEQ ID NO: 199394 - DNA, 15 bp, Homo sapiens
tgttcgtgggtccaa

SEQ ID NO: 199395 - DNA, 15 bp, Homo sapiens
atgttcgtgggtcca

SEQ ID NO: 199396 - DNA, 15 bp, Homo sapiens
aatgttcgtgggtcc

SEQ ID NO: 199397 - DNA, 15 bp, Homo sapiens
caatgttcgtgggtc

SEQ ID NO: 199398 - DNA, 15 bp, Homo sapiens
acaatgttcgtgggt

SEQ ID NO: 199399 - DNA, 15 bp, Homo sapiens
gacaatgttcgtggg

SEQ ID NO: 199400 - DNA, 15 bp, Homo sapiens
agacaatgttcgtgg

SEQ ID NO: 199401 - DNA, 15 bp, Homo sapiens
aagacaatgttcgtg

SEQ ID NO: 199402 - DNA, 15 bp, Homo sapiens
aaagacaatgttcgt

SEQ ID NO: 199403 - DNA, 15 bp, Homo sapiens
aaaagacaatgttcg

SEQ ID NO: 199404 - DNA, 15 bp, Homo sapiens
aaaaagacaatgttc

SEQ ID NO: 199405 - DNA, 15 bp, Homo sapiens
aaaaaagacaatgtt

SEQ ID NO: 199406 - DNA, 15 bp, Homo sapiens
aaaaaaagacaatgt

SEQ ID NO: 199407 - DNA, 15 bp, Homo sapiens
aaaaaaaagacaatg

SEQ ID NO: 199408 - DNA, 15 bp, Homo sapiens
aaaaaaaaagacaat

SEQ ID NO: 199409 - DNA, 15 bp, Homo sapiens
aaaaaaaaaagacaa

SEQ ID NO: 199410 - DNA, 15 bp, Homo sapiens
aaaaaaaaaaagaca

SEQ ID NO: 199411 - DNA, 15 bp, Homo sapiens
taaaaaaaaaaagac

SEQ ID NO: 199412 - DNA, 15 bp, Homo sapiens
ttaaaaaaaaaaaga

SEQ ID NO: 199413 - DNA, 15 bp, Homo sapiens
cttaaaaaaaaaaag

SEQ ID NO: 199414 - DNA, 15 bp, Homo sapiens
tcttaaaaaaaaaaa

SEQ ID NO: 199415 - DNA, 15 bp, Homo sapiens
atcttaaaaaaaaaa

SEQ ID NO: 199416 - DNA, 15 bp, Homo sapiens
catcttaaaaaaaaa

SEQ ID NO: 199417 - DNA, 15 bp, Homo sapiens
ccatcttaaaaaaaa

SEQ ID NO: 199418 - DNA, 15 bp, Homo sapiens
tccatcttaaaaaaa

SEQ ID NO: 199419 - DNA, 15 bp, Homo sapiens
ctccatcttaaaaaa

SEQ ID NO: 199420 - DNA, 15 bp, Homo sapiens
actccatcttaaaaa

SEQ ID NO: 199421 - DNA, 15 bp, Homo sapiens
aactccatcttaaaa

SEQ ID NO: 199422 - DNA, 15 bp, Homo sapiens
aaactccatcttaaa

SEQ ID NO: 199423 - DNA, 15 bp, Homo sapiens
gaaactccatcttaa

SEQ ID NO: 199424 - DNA, 15 bp, Homo sapiens
tgaaactccatctta

SEQ ID NO: 199425 - DNA, 15 bp, Homo sapiens
gtgaaactccatctt

SEQ ID NO: 199426 - DNA, 15 bp, Homo sapiens
agtgaaactccatct

SEQ ID NO: 199427 - DNA, 15 bp, Homo sapiens
aagtgaaactccatc

SEQ ID NO: 199428 - DNA, 15 bp, Homo sapiens
aaagtgaaactccat

SEQ ID NO: 199429 - DNA, 15 bp, Homo sapiens
aaaagtgaaactcca

SEQ ID NO: 199430 - DNA, 15 bp, Homo sapiens
caaaagtgaaactcc

SEQ ID NO: 199431 - DNA, 15 bp, Homo sapiens
acaaaagtgaaactc

SEQ ID NO: 199432 - DNA, 15 bp, Homo sapiens
aacaaaagtgaaact

SEQ ID NO: 199433 - DNA, 15 bp, Homo sapiens
caacaaaagtgaaac

SEQ ID NO: 199434 - DNA, 15 bp, Homo sapiens
gcaacaaaagtgaaa

SEQ ID NO: 199435 - DNA, 15 bp, Homo sapiens
ggcaacaaaagtgaa

SEQ ID NO: 199436 - DNA, 15 bp, Homo sapiens
gggcaacaaaagtga

SEQ ID NO: 199437 - DNA, 15 bp, Homo sapiens
tgggcaacaaaagtg

SEQ ID NO: 199438 - DNA, 15 bp, Homo sapiens
ctgggcaacaaaagt

SEQ ID NO: 199439 - DNA, 15 bp, Homo sapiens
tctgggcaacaaaag

SEQ ID NO: 199440 - DNA, 15 bp, Homo sapiens
gtctgggcaacaaaa

SEQ ID NO: 199441 - DNA, 15 bp, Homo sapiens
agtctgggcaacaaa

SEQ ID NO: 199442 - DNA, 15 bp, Homo sapiens
cagtctgggcaacaa

SEQ ID NO: 199443 - DNA, 15 bp, Homo sapiens
acagtctgggcaaca

SEQ ID NO: 199444 - DNA, 15 bp, Homo sapiens
tacagtctgggcaac

SEQ ID NO: 199445 - DNA, 15 bp, Homo sapiens
ctacagtctgggcaa

SEQ ID NO: 199446 - DNA, 15 bp, Homo sapiens
actacagtctgggca

SEQ ID NO: 199447 - DNA, 15 bp, Homo sapiens
cactacagtctgggc

SEQ ID NO: 199448 - DNA, 15 bp, Homo sapiens
gcactacagtctggg

SEQ ID NO: 199449 - DNA, 15 bp, Homo sapiens
tgcactacagtctgg

SEQ ID NO: 199450 - DNA, 15 bp, Homo sapiens
ttgcactacagtctg

SEQ ID NO: 199451 - DNA, 15 bp, Homo sapiens
attgcactacagtct

SEQ ID NO: 199452 - DNA, 15 bp, Homo sapiens
cattgcactacagtc

SEQ ID NO: 199453 - DNA, 15 bp, Homo sapiens
ccattgcactacagt

SEQ ID NO: 199454 - DNA, 15 bp, Homo sapiens
accattgcactacag

SEQ ID NO: 199455 - DNA, 15 bp, Homo sapiens
caccattgcactaca

SEQ ID NO: 199456 - DNA, 15 bp, Homo sapiens
gcaccattgcactac

SEQ ID NO: 199457 - DNA, 15 bp, Homo sapiens
tgcaccattgcacta

SEQ ID NO: 199458 - DNA, 15 bp, Homo sapiens
tgagattgcaccatt

SEQ ID NO: 199459 - DNA, 15 bp, Homo sapiens
ctgagattgcaccat

SEQ ID NO: 199460 - DNA, 15 bp, Homo sapiens
gctgagattgcacca

SEQ ID NO: 199461 - DNA, 15 bp, Homo sapiens
agctgagattgcacc

SEQ ID NO: 199462 - DNA, 15 bp, Homo sapiens
gagctgagattgcac

SEQ ID NO: 199463 - DNA, 15 bp, Homo sapiens
tgagctgagattgca

SEQ ID NO: 199464 - DNA, 15 bp, Homo sapiens
gtgagctgagattgc

SEQ ID NO: 199465 - DNA, 15 bp, Homo sapiens
agtgagctgagattg

SEQ ID NO: 199466 - DNA, 15 bp, Homo sapiens
cagtgagctgagatt

SEQ ID NO: 199467 - DNA, 15 bp, Homo sapiens
gcagtgagctgagat

SEQ ID NO: 199468 - DNA, 15 bp, Homo sapiens
tgcagtgagctgaga

SEQ ID NO: 199469 - DNA, 15 bp, Homo sapiens
ttgcagtgagctgag

SEQ ID NO: 199470 - DNA, 15 bp, Homo sapiens
attgcagtgagctga

SEQ ID NO: 199471 - DNA, 15 bp, Homo sapiens
gattgcagtgagctg

SEQ ID NO: 199472 - DNA, 15 bp, Homo sapiens
agattgcagtgagct

SEQ ID NO: 199473 - DNA, 15 bp, Homo sapiens
gagattgcagtgagc

SEQ ID NO: 199474 - DNA, 15 bp, Homo sapiens
agagattgcagtgag

SEQ ID NO: 199475 - DNA, 15 bp, Homo sapiens
cagagattgcagtga

SEQ ID NO: 199476 - DNA, 15 bp, Homo sapiens
gcagagattgcagtg

SEQ ID NO: 199477 - DNA, 15 bp, Homo sapiens
ggcagagattgcagt

SEQ ID NO: 199478 - DNA, 15 bp, Homo sapiens
aggcagagattgcag

SEQ ID NO: 199479 - DNA, 15 bp, Homo sapiens
gaggcagagattgca

SEQ ID NO: 199480 - DNA, 15 bp, Homo sapiens
ggaggcagagattgc

SEQ ID NO: 199481 - DNA, 15 bp, Homo sapiens
aggaggcagagattg

SEQ ID NO: 199482 - DNA, 15 bp, Homo sapiens
caggaggcagagatt

SEQ ID NO: 199483 - DNA, 15 bp, Homo sapiens
ccaggaggcagagat

SEQ ID NO: 199484 - DNA, 15 bp, Homo sapiens
cccaggaggcagaga

SEQ ID NO: 199485 - DNA, 15 bp, Homo sapiens
agaacccaggaggca

SEQ ID NO: 199486 - DNA, 15 bp, Homo sapiens
tagaacccaggaggc

SEQ ID NO: 199487 - DNA, 15 bp, Homo sapiens
ctagaacccaggagg

SEQ ID NO: 199488 - DNA, 15 bp, Homo sapiens
gctagaacccaggag

SEQ ID NO: 199489 - DNA, 15 bp, Homo sapiens
tgctagaacccagga

SEQ ID NO: 199490 - DNA, 15 bp, Homo sapiens
ttgctagaacccagg

SEQ ID NO: 199491 - DNA, 15 bp, Homo sapiens
attgctagaacccag

SEQ ID NO: 199492 - DNA, 15 bp, Homo sapiens
aattgctagaaccca

SEQ ID NO: 199493 - DNA, 15 bp, Homo sapiens
gaattgctagaaccc

SEQ ID NO: 199494 - DNA, 15 bp, Homo sapiens
agaattgctagaacc

SEQ ID NO: 199495 - DNA, 15 bp, Homo sapiens
gagaattgctagaac

SEQ ID NO: 199496 - DNA, 15 bp, Homo sapiens
ggagaattgctagaa

SEQ ID NO: 199497 - DNA, 15 bp, Homo sapiens
aggagaattgctaga

SEQ ID NO: 199498 - DNA, 15 bp, Homo sapiens
caggagaattgctag

SEQ ID NO: 199499 - DNA, 15 bp, Homo sapiens
gcaggagaattgcta

SEQ ID NO: 199500 - DNA, 15 bp, Homo sapiens
tccagctactcggga

SEQ ID NO: 199501 - DNA, 15 bp, Homo sapiens
ttccagctactcggg

SEQ ID NO: 199502 - DNA, 15 bp, Homo sapiens
attccagctactcgg

SEQ ID NO: 199503 - DNA, 15 bp, Homo sapiens
aattccagctactcg

SEQ ID NO: 199504 - DNA, 15 bp, Homo sapiens
taattccagctactc

SEQ ID NO: 199505 - DNA, 15 bp, Homo sapiens
gtaattccagctact

SEQ ID NO: 199506 - DNA, 15 bp, Homo sapiens
tgtaattccagctac

SEQ ID NO: 199507 - DNA, 15 bp, Homo sapiens
ctgtaattccagcta

SEQ ID NO: 199508 - DNA, 15 bp, Homo sapiens
cctgtaattccagct

SEQ ID NO: 199509 - DNA, 15 bp, Homo sapiens
gcctgtaattccagc

SEQ ID NO: 199510 - DNA, 15 bp, Homo sapiens
cgcctgtaattccag

SEQ ID NO: 199511 - DNA, 15 bp, Homo sapiens
gcgcctgtaattcca

SEQ ID NO: 199512 - DNA, 15 bp, Homo sapiens
ggcgcctgtaattcc

SEQ ID NO: 199513 - DNA, 15 bp, Homo sapiens
gggcgcctgtaattc

SEQ ID NO: 199514 - DNA, 15 bp, Homo sapiens
cgggcgcctgtaatt

SEQ ID NO: 199515 - DNA, 15 bp, Homo sapiens
cacaaaaattagctg

SEQ ID NO: 199516 - DNA, 15 bp, Homo sapiens
acacaaaaattagct

SEQ ID NO: 199517 - DNA, 15 bp, Homo sapiens
aacacaaaaattagc

SEQ ID NO: 199518 - DNA, 15 bp, Homo sapiens
aaacacaaaaattag

SEQ ID NO: 199519 - DNA, 15 bp, Homo sapiens
aaaacacaaaaatta

SEQ ID NO: 199520 - DNA, 15 bp, Homo sapiens
aaaaacacaaaaatt

SEQ ID NO: 199521 - DNA, 15 bp, Homo sapiens
taaaaacacaaaaat

SEQ ID NO: 199522 - DNA, 15 bp, Homo sapiens
ctaaaaacacaaaaa

SEQ ID NO: 199523 - DNA, 15 bp, Homo sapiens
actaaaaacacaaaa

SEQ ID NO: 199524 - DNA, 15 bp, Homo sapiens
tactaaaaacacaaa

SEQ ID NO: 199525 - DNA, 15 bp, Homo sapiens
ctactaaaaacacaa

SEQ ID NO: 199526 - DNA, 15 bp, Homo sapiens
tctactaaaaacaca

SEQ ID NO: 199527 - DNA, 15 bp, Homo sapiens
ctctactaaaaacac

SEQ ID NO: 199528 - DNA, 15 bp, Homo sapiens
tctctactaaaaaca

SEQ ID NO: 199529 - DNA, 15 bp, Homo sapiens
gtctctactaaaaac

SEQ ID NO: 199530 - DNA, 15 bp, Homo sapiens
accccgtctctacta

SEQ ID NO: 199531 - DNA, 15 bp, Homo sapiens
aaccccgtctctact

SEQ ID NO: 199532 - DNA, 15 bp, Homo sapiens
aaaccccgtctctac

SEQ ID NO: 199533 - DNA, 15 bp, Homo sapiens
gaaaccccgtctcta

SEQ ID NO: 199534 - DNA, 15 bp, Homo sapiens
tgaaaccccgtctct

SEQ ID NO: 199535 - DNA, 15 bp, Homo sapiens
gtgaaaccccgtctc

SEQ ID NO: 199536 - DNA, 15 bp, Homo sapiens
ggtgaaaccccgtct

SEQ ID NO: 199537 - DNA, 15 bp, Homo sapiens
tggtgaaaccccgtc

SEQ ID NO: 199538 - DNA, 15 bp, Homo sapiens
atggtgaaaccccgt

SEQ ID NO: 199539 - DNA, 15 bp, Homo sapiens
catggtgaaaccccg

SEQ ID NO: 199540 - DNA, 15 bp, Homo sapiens
cccaacatggtgaaa

SEQ ID NO: 199541 - DNA, 15 bp, Homo sapiens
gcccaacatggtgaa

SEQ ID NO: 199542 - DNA, 15 bp, Homo sapiens
tgcccaacatggtga

SEQ ID NO: 199543 - DNA, 15 bp, Homo sapiens
ctgcccaacatggtg

SEQ ID NO: 199544 - DNA, 15 bp, Homo sapiens
cctgcccaacatggt

SEQ ID NO: 199545 - DNA, 15 bp, Homo sapiens
gcctgcccaacatgg

SEQ ID NO: 199546 - DNA, 15 bp, Homo sapiens
ggcctgcccaacatg

SEQ ID NO: 199547 - DNA, 15 bp, Homo sapiens
tggcctgcccaacat

SEQ ID NO: 199548 - DNA, 15 bp, Homo sapiens
ctggcctgcccaaca

SEQ ID NO: 199549 - DNA, 15 bp, Homo sapiens
cctggcctgcccaac

SEQ ID NO: 199550 - DNA, 15 bp, Homo sapiens
ccctggcctgcccaa

SEQ ID NO: 199551 - DNA, 15 bp, Homo sapiens
cccctggcctgccca

SEQ ID NO: 199552 - DNA, 15 bp, Homo sapiens
acccctggcctgccc

SEQ ID NO: 199553 - DNA, 15 bp, Homo sapiens
cacccctggcctgcc

SEQ ID NO: 199554 - DNA, 15 bp, Homo sapiens
tcacccctggcctgc

SEQ ID NO: 199555 - DNA, 15 bp, Homo sapiens
atcacccctggcctg

SEQ ID NO: 199556 - DNA, 15 bp, Homo sapiens
gatcacccctggcct

SEQ ID NO: 199557 - DNA, 15 bp, Homo sapiens
ggatcacccctggcc

SEQ ID NO: 199558 - DNA, 15 bp, Homo sapiens
cggatcacccctggc

SEQ ID NO: 199559 - DNA, 15 bp, Homo sapiens
gcggatcacccctgg

SEQ ID NO: 199560 - DNA, 15 bp, Homo sapiens
ggcggatcacccctg

SEQ ID NO: 199561 - DNA, 15 bp, Homo sapiens
gggcggatcacccct

SEQ ID NO: 199562 - DNA, 15 bp, Homo sapiens
tgggcggatcacccc

SEQ ID NO: 199563 - DNA, 15 bp, Homo sapiens
gtgggcggatcaccc

SEQ ID NO: 199564 - DNA, 15 bp, Homo sapiens
ggtgggcggatcacc

SEQ ID NO: 199565 - DNA, 15 bp, Homo sapiens
aggtgggcggatcac

SEQ ID NO: 199566 - DNA, 15 bp, Homo sapiens
gaggtgggcggatca

SEQ ID NO: 199567 - DNA, 15 bp, Homo sapiens
tgaggtgggcggatc

SEQ ID NO: 199568 - DNA, 15 bp, Homo sapiens
ctgaggtgggcggat

SEQ ID NO: 199569 - DNA, 15 bp, Homo sapiens
gctgaggtgggcgga

SEQ ID NO: 199570 - DNA, 15 bp, Homo sapiens
ggctgaggtgggcgg

SEQ ID NO: 199571 - DNA, 15 bp, Homo sapiens
aggctgaggtgggcg

SEQ ID NO: 199572 - DNA, 15 bp, Homo sapiens
gaggctgaggtgggc

SEQ ID NO: 199573 - DNA, 15 bp, Homo sapiens
tttgggaggctgagg

SEQ ID NO: 199574 - DNA, 15 bp, Homo sapiens
ctttgggaggctgag

SEQ ID NO: 199575 - DNA, 15 bp, Homo sapiens
actttgggaggctga

SEQ ID NO: 199576 - DNA, 15 bp, Homo sapiens
gcactttgggaggct

SEQ ID NO: 199577 - DNA, 15 bp, Homo sapiens
atgcggtggctcaca

SEQ ID NO: 199578 - DNA, 15 bp, Homo sapiens
gatgcggtggctcac

SEQ ID NO: 199579 - DNA, 15 bp, Homo sapiens
agatgcggtggctca

SEQ ID NO: 199580 - DNA, 15 bp, Homo sapiens
cagatgcggtggctc

SEQ ID NO: 199581 - DNA, 15 bp, Homo sapiens
ccagatgcggtggct

SEQ ID NO: 199582 - DNA, 15 bp, Homo sapiens
gccagatgcggtggc

SEQ ID NO: 199583 - DNA, 15 bp, Homo sapiens
ggccagatgcggtgg

SEQ ID NO: 199584 - DNA, 15 bp, Homo sapiens
tggccagatgcggtg

SEQ ID NO: 199585 - DNA, 15 bp, Homo sapiens
ttggccagatgcggt

SEQ ID NO: 199586 - DNA, 15 bp, Homo sapiens
gttggccagatgcgg

SEQ ID NO: 199587 - DNA, 15 bp, Homo sapiens
tgttggccagatgcg

SEQ ID NO: 199588 - DNA, 15 bp, Homo sapiens
atgttggccagatgc

SEQ ID NO: 199589 - DNA, 15 bp, Homo sapiens
catgttggccagatg

SEQ ID NO: 199590 - DNA, 15 bp, Homo sapiens
acatgttggccagat

SEQ ID NO: 199591 - DNA, 15 bp, Homo sapiens
gacatgttggccaga

SEQ ID NO: 199592 - DNA, 15 bp, Homo sapiens
agacatgttggccag

SEQ ID NO: 199593 - DNA, 15 bp, Homo sapiens
aagacatgttggcca

SEQ ID NO: 199594 - DNA, 15 bp, Homo sapiens
aaagacatgttggcc

SEQ ID NO: 199595 - DNA, 15 bp, Homo sapiens
aaaagacatgttggc

SEQ ID NO: 199596 - DNA, 15 bp, Homo sapiens
aaaaagacatgttgg

SEQ ID NO: 199597 - DNA, 15 bp, Homo sapiens
aaaaaagacatgttg

SEQ ID NO: 199598 - DNA, 15 bp, Homo sapiens
aaaaaaagacatgtt

SEQ ID NO: 199599 - DNA, 15 bp, Homo sapiens
aaaaaaaagacatgt

SEQ ID NO: 199600 - DNA, 15 bp, Homo sapiens
aaaaaaaaagacatg

SEQ ID NO: 199601 - DNA, 15 bp, Homo sapiens
aaaaaaaaaagacat

SEQ ID NO: 199602 - DNA, 15 bp, Homo sapiens
aaaaaaaaaaaagac

SEQ ID NO: 199603 - DNA, 15 bp, Homo sapiens
aaaaaaaaaaaaaga

SEQ ID NO: 199604 - DNA, 15 bp, Homo sapiens
aaaaaaaaaaaaaag

SEQ ID NO: 199605 - DNA, 15 bp, Homo sapiens
gaaaaaaaaaaaaaa

SEQ ID NO: 199606 - DNA, 15 bp, Homo sapiens
ggaaaaaaaaaaaaa

SEQ ID NO: 199607 - DNA, 15 bp, Homo sapiens
aggaaaaaaaaaaaa

SEQ ID NO: 199608 - DNA, 15 bp, Homo sapiens
aaggaaaaaaaaaaa

SEQ ID NO: 199609 - DNA, 15 bp, Homo sapiens
aaaggaaaaaaaaaa

SEQ ID NO: 199610 - DNA, 15 bp, Homo sapiens
aaaaggaaaaaaaaa

SEQ ID NO: 199611 - DNA, 15 bp, Homo sapiens
aaaaaggaaaaaaaa

SEQ ID NO: 199612 - DNA, 15 bp, Homo sapiens
taaaaaggaaaaaaa

SEQ ID NO: 199613 - DNA, 15 bp, Homo sapiens
ttaaaaaggaaaaaa

SEQ ID NO: 199614 - DNA, 15 bp, Homo sapiens
gttaaaaaggaaaaa

SEQ ID NO: 199615 - DNA, 15 bp, Homo sapiens
ggttaaaaaggaaaa

SEQ ID NO: 199616 - DNA, 15 bp, Homo sapiens
tggttaaaaaggaaa

SEQ ID NO: 199617 - DNA, 15 bp, Homo sapiens
gtggttaaaaaggaa

SEQ ID NO: 199618 - DNA, 15 bp, Homo sapiens
tgtggttaaaaagga

SEQ ID NO: 199619 - DNA, 15 bp, Homo sapiens
ttgtggttaaaaagg

SEQ ID NO: 199620 - DNA, 15 bp, Homo sapiens
tttgtggttaaaaag

SEQ ID NO: 199621 - DNA, 15 bp, Homo sapiens
ctttgtggttaaaaa

SEQ ID NO: 199622 - DNA, 15 bp, Homo sapiens
tctttgtggttaaaa

SEQ ID NO: 199623 - DNA, 15 bp, Homo sapiens
ctctttgtggttaaa

SEQ ID NO: 199624 - DNA, 15 bp, Homo sapiens
tctctttgtggttaa

SEQ ID NO: 199625 - DNA, 15 bp, Homo sapiens
gtctctttgtggtta

SEQ ID NO: 199626 - DNA, 15 bp, Homo sapiens
agtctctttgtggtt

SEQ ID NO: 199627 - DNA, 15 bp, Homo sapiens
aagtctctttgtggt

SEQ ID NO: 199628 - DNA, 15 bp, Homo sapiens
taagtctctttgtgg

SEQ ID NO: 199629 - DNA, 15 bp, Homo sapiens
ttaagtctctttgtg

SEQ ID NO: 199630 - DNA, 15 bp, Homo sapiens
cttaagtctctttgt

SEQ ID NO: 199631 - DNA, 15 bp, Homo sapiens
gcttaagtctctttg

SEQ ID NO: 199632 - DNA, 15 bp, Homo sapiens
tgcttaagtctcttt

SEQ ID NO: 199633 - DNA, 15 bp, Homo sapiens
ctgcttaagtctctt

SEQ ID NO: 199634 - DNA, 15 bp, Homo sapiens
actgcttaagtctct

SEQ ID NO: 199635 - DNA, 15 bp, Homo sapiens
gactgcttaagtctc

SEQ ID NO: 199636 - DNA, 15 bp, Homo sapiens
ggactgcttaagtct

SEQ ID NO: 199637 - DNA, 15 bp, Homo sapiens
aggactgcttaagtc

SEQ ID NO: 199638 - DNA, 15 bp, Homo sapiens
aaggactgcttaagt

SEQ ID NO: 199639 - DNA, 15 bp, Homo sapiens
caaggactgcttaag

SEQ ID NO: 199640 - DNA, 15 bp, Homo sapiens
acaaggactgcttaa

SEQ ID NO: 199641 - DNA, 15 bp, Homo sapiens
gacaaggactgctta

SEQ ID NO: 199642 - DNA, 15 bp, Homo sapiens
tgacaaggactgctt

SEQ ID NO: 199643 - DNA, 15 bp, Homo sapiens
gtgacaaggactgct

SEQ ID NO: 199644 - DNA, 15 bp, Homo sapiens
tgtgacaaggactgc

SEQ ID NO: 199645 - DNA, 15 bp, Homo sapiens
ctgtgacaaggactg

SEQ ID NO: 199646 - DNA, 15 bp, Homo sapiens
tctgtgacaaggact

SEQ ID NO: 199647 - DNA, 15 bp, Homo sapiens
atctgtgacaaggac

SEQ ID NO: 199648 - DNA, 15 bp, Homo sapiens
catctgtgacaagga

SEQ ID NO: 199649 - DNA, 15 bp, Homo sapiens
tcatctgtgacaagg

SEQ ID NO: 199650 - DNA, 15 bp, Homo sapiens
atcatctgtgacaag

SEQ ID NO: 199651 - DNA, 15 bp, Homo sapiens
catcatctgtgacaa

SEQ ID NO: 199652 - DNA, 15 bp, Homo sapiens
tcatcatctgtgaca

SEQ ID NO: 199653 - DNA, 15 bp, Homo sapiens
ttcatcatctgtgac

SEQ ID NO: 199654 - DNA, 15 bp, Homo sapiens
attcatcatctgtga

SEQ ID NO: 199655 - DNA, 15 bp, Homo sapiens
aattcatcatctgtg

SEQ ID NO: 199656 - DNA, 15 bp, Homo sapiens
caattcatcatctgt

SEQ ID NO: 199657 - DNA, 15 bp, Homo sapiens
tcaattcatcatctg

SEQ ID NO: 199658 - DNA, 15 bp, Homo sapiens
atcaattcatcatct

SEQ ID NO: 199659 - DNA, 15 bp, Homo sapiens
catcaattcatcatc

SEQ ID NO: 199660 - DNA, 15 bp, Homo sapiens
acatcaattcatcat

SEQ ID NO: 199661 - DNA, 15 bp, Homo sapiens
aacatcaattcatca

SEQ ID NO: 199662 - DNA, 15 bp, Homo sapiens
caacatcaattcatc

SEQ ID NO: 199663 - DNA, 15 bp, Homo sapiens
gcaacatcaattcat

SEQ ID NO: 199664 - DNA, 15 bp, Homo sapiens
tgcaacatcaattca

SEQ ID NO: 199665 - DNA, 15 bp, Homo sapiens
ttgcaacatcaattc

SEQ ID NO: 199666 - DNA, 15 bp, Homo sapiens
cttgcaacatcaatt

SEQ ID NO: 199667 - DNA, 15 bp, Homo sapiens
acttgcaacatcaat

SEQ ID NO: 199668 - DNA, 15 bp, Homo sapiens
tacttgcaacatcaa

SEQ ID NO: 199669 - DNA, 15 bp, Homo sapiens
atacttgcaacatca

SEQ ID NO: 199670 - DNA, 15 bp, Homo sapiens
aatacttgcaacatc

SEQ ID NO: 199671 - DNA, 15 bp, Homo sapiens
caatacttgcaacat

SEQ ID NO: 199672 - DNA, 15 bp, Homo sapiens
acaatacttgcaaca

SEQ ID NO: 199673 - DNA, 15 bp, Homo sapiens
gacaatacttgcaac

SEQ ID NO: 199674 - DNA, 15 bp, Homo sapiens
agacaatacttgcaa

SEQ ID NO: 199675 - DNA, 15 bp, Homo sapiens
aagacaatacttgca

SEQ ID NO: 199676 - DNA, 15 bp, Homo sapiens
taagacaatacttgc

SEQ ID NO: 199677 - DNA, 15 bp, Homo sapiens
ctaagacaatacttg

SEQ ID NO: 199678 - DNA, 15 bp, Homo sapiens
gctaagacaatactt

SEQ ID NO: 199679 - DNA, 15 bp, Homo sapiens
agctaagacaatact

SEQ ID NO: 199680 - DNA, 15 bp, Homo sapiens
aagctaagacaatac

SEQ ID NO: 199681 - DNA, 15 bp, Homo sapiens
caagctaagacaata

SEQ ID NO: 199682 - DNA, 15 bp, Homo sapiens
ccaagctaagacaat

SEQ ID NO: 199683 - DNA, 15 bp, Homo sapiens
tccaagctaagacaa

SEQ ID NO: 199684 - DNA, 15 bp, Homo sapiens
atccaagctaagaca

SEQ ID NO: 199685 - DNA, 15 bp, Homo sapiens
aatccaagctaagac

SEQ ID NO: 199686 - DNA, 15 bp, Homo sapiens
taatccaagctaaga

SEQ ID NO: 199687 - DNA, 15 bp, Homo sapiens
ttaatccaagctaag

SEQ ID NO: 199688 - DNA, 15 bp, Homo sapiens
attaatccaagctaa

SEQ ID NO: 199689 - DNA, 15 bp, Homo sapiens
aattaatccaagcta

SEQ ID NO: 199690 - DNA, 15 bp, Homo sapiens
aaattaatccaagct

SEQ ID NO: 199691 - DNA, 15 bp, Homo sapiens
aaaattaatccaagc

SEQ ID NO: 199692 - DNA, 15 bp, Homo sapiens
gaaaattaatccaag

SEQ ID NO: 199693 - DNA, 15 bp, Homo sapiens
agaaaattaatccaa

SEQ ID NO: 199694 - DNA, 15 bp, Homo sapiens
aagaaaattaatcca

SEQ ID NO: 199695 - DNA, 15 bp, Homo sapiens
caagaaaattaatcc

SEQ ID NO: 199696 - DNA, 15 bp, Homo sapiens
gcaagaaaattaatc

SEQ ID NO: 199697 - DNA, 15 bp, Homo sapiens
agcaagaaaattaat

SEQ ID NO: 199698 - DNA, 15 bp, Homo sapiens
aagcaagaaaattaa

SEQ ID NO: 199699 - DNA, 15 bp, Homo sapiens
taagcaagaaaatta

SEQ ID NO: 199700 - DNA, 15 bp, Homo sapiens
gtaagcaagaaaatt

SEQ ID NO: 199701 - DNA, 15 bp, Homo sapiens
agtaagcaagaaaat

SEQ ID NO: 199702 - DNA, 15 bp, Homo sapiens
cagtaagcaagaaaa

SEQ ID NO: 199703 - DNA, 15 bp, Homo sapiens
acagtaagcaagaaa

SEQ ID NO: 199704 - DNA, 15 bp, Homo sapiens
tacagtaagcaagaa

SEQ ID NO: 199705 - DNA, 15 bp, Homo sapiens
ttacagtaagcaaga

SEQ ID NO: 199706 - DNA, 15 bp, Homo sapiens
attacagtaagcaag

SEQ ID NO: 199707 - DNA, 15 bp, Homo sapiens
aattacagtaagcaa

SEQ ID NO: 199708 - DNA, 15 bp, Homo sapiens
aaattacagtaagca

SEQ ID NO: 199709 - DNA, 15 bp, Homo sapiens
aaaattacagtaagc

SEQ ID NO: 199710 - DNA, 15 bp, Homo sapiens
taaaattacagtaag

SEQ ID NO: 199711 - DNA, 15 bp, Homo sapiens
ctaaaattacagtaa

SEQ ID NO: 199712 - DNA, 15 bp, Homo sapiens
tctaaaattacagta

SEQ ID NO: 199713 - DNA, 15 bp, Homo sapiens
atctaaaattacagt

SEQ ID NO: 199714 - DNA, 15 bp, Homo sapiens
tatctaaaattacag

SEQ ID NO: 199715 - DNA, 15 bp, Homo sapiens
ttatctaaaattaca

SEQ ID NO: 199716 - DNA, 15 bp, Homo sapiens
attatctaaaattac

SEQ ID NO: 199717 - DNA, 15 bp, Homo sapiens
tattatctaaaatta

SEQ ID NO: 199718 - DNA, 15 bp, Homo sapiens
atattatctaaaatt

SEQ ID NO: 199719 - DNA, 15 bp, Homo sapiens
tatattatctaaaat

SEQ ID NO: 199720 - DNA, 15 bp, Homo sapiens
ctatattatctaaaa

SEQ ID NO: 199721 - DNA, 15 bp, Homo sapiens
gctatattatctaaa

SEQ ID NO: 199722 - DNA, 15 bp, Homo sapiens
agctatattatctaa

SEQ ID NO: 199723 - DNA, 15 bp, Homo sapiens
aagctatattatcta

SEQ ID NO: 199724 - DNA, 15 bp, Homo sapiens
aaagctatattatct

SEQ ID NO: 199725 - DNA, 15 bp, Homo sapiens
caaagctatattatc

SEQ ID NO: 199726 - DNA, 15 bp, Homo sapiens
acaaagctatattat

SEQ ID NO: 199727 - DNA, 15 bp, Homo sapiens
tacaaagctatatta

SEQ ID NO: 199728 - DNA, 15 bp, Homo sapiens
ttacaaagctatatt

SEQ ID NO: 199729 - DNA, 15 bp, Homo sapiens
attacaaagctatat

SEQ ID NO: 199730 - DNA, 15 bp, Homo sapiens
aattacaaagctata

SEQ ID NO: 199731 - DNA, 15 bp, Homo sapiens
taattacaaagctat

SEQ ID NO: 199732 - DNA, 15 bp, Homo sapiens
ctaattacaaagcta

SEQ ID NO: 199733 - DNA, 15 bp, Homo sapiens
tctaattacaaagct

SEQ ID NO: 199734 - DNA, 15 bp, Homo sapiens
ctctaattacaaagc

SEQ ID NO: 199735 - DNA, 15 bp, Homo sapiens
tctctaattacaaag

SEQ ID NO: 199736 - DNA, 15 bp, Homo sapiens
atctctaattacaaa

SEQ ID NO: 199737 - DNA, 15 bp, Homo sapiens
aatctctaattacaa

SEQ ID NO: 199738 - DNA, 15 bp, Homo sapiens
aaatctctaattaca

SEQ ID NO: 199739 - DNA, 15 bp, Homo sapiens
aaaatctctaattac

SEQ ID NO: 199740 - DNA, 15 bp, Homo sapiens
taaaatctctaatta

SEQ ID NO: 199741 - DNA, 15 bp, Homo sapiens
ataaaatctctaatt

SEQ ID NO: 199742 - DNA, 15 bp, Homo sapiens
cataaaatctctaat

SEQ ID NO: 199743 - DNA, 15 bp, Homo sapiens
acataaaatctctaa

SEQ ID NO: 199744 - DNA, 15 bp, Homo sapiens
cacataaaatctcta

SEQ ID NO: 199745 - DNA, 15 bp, Homo sapiens
acacataaaatctct

SEQ ID NO: 199746 - DNA, 15 bp, Homo sapiens
tacacataaaatctc

SEQ ID NO: 199747 - DNA, 15 bp, Homo sapiens
ttacacataaaatct

SEQ ID NO: 199748 - DNA, 15 bp, Homo sapiens
tttacacataaaatc

SEQ ID NO: 199749 - DNA, 15 bp, Homo sapiens
gtttacacataaaat

SEQ ID NO: 199750 - DNA, 15 bp, Homo sapiens
ggtttacacataaaa

SEQ ID NO: 199751 - DNA, 15 bp, Homo sapiens
tggtttacacataaa

SEQ ID NO: 199752 - DNA, 15 bp, Homo sapiens
gtggtttacacataa

SEQ ID NO: 199753 - DNA, 15 bp, Homo sapiens
tgtggtttacacata

SEQ ID NO: 199754 - DNA, 15 bp, Homo sapiens
ttgtggtttacacat

SEQ ID NO: 199755 - DNA, 15 bp, Homo sapiens
tttgtggtttacaca

SEQ ID NO: 199756 - DNA, 15 bp, Homo sapiens
ttttgtggtttacac

SEQ ID NO: 199757 - DNA, 15 bp, Homo sapiens
tttttgtggtttaca

SEQ ID NO: 199758 - DNA, 15 bp, Homo sapiens
atttttgtggtttac

SEQ ID NO: 199759 - DNA, 15 bp, Homo sapiens
catttttgtggttta

SEQ ID NO: 199760 - DNA, 15 bp, Homo sapiens
acatttttgtggttt

SEQ ID NO: 199761 - DNA, 15 bp, Homo sapiens
aacatttttgtggtt

SEQ ID NO: 199762 - DNA, 15 bp, Homo sapiens
aaacatttttgtggt

SEQ ID NO: 199763 - DNA, 15 bp, Homo sapiens
taaacatttttgtgg

SEQ ID NO: 199764 - DNA, 15 bp, Homo sapiens
gtaaacatttttgtg

SEQ ID NO: 199765 - DNA, 15 bp, Homo sapiens
tgtaaacatttttgt

SEQ ID NO: 199766 - DNA, 15 bp, Homo sapiens
atgtaaacatttttg

SEQ ID NO: 199767 - DNA, 15 bp, Homo sapiens
catgtaaacattttt

SEQ ID NO: 199768 - DNA, 15 bp, Homo sapiens
tcatgtaaacatttt

SEQ ID NO: 199769 - DNA, 15 bp, Homo sapiens
ttcatgtaaacattt

SEQ ID NO: 199770 - DNA, 15 bp, Homo sapiens
cttcatgtaaacatt

SEQ ID NO: 199771 - DNA, 15 bp, Homo sapiens
ccttcatgtaaacat

SEQ ID NO: 199772 - DNA, 15 bp, Homo sapiens
gccttcatgtaaaca

SEQ ID NO: 199773 - DNA, 15 bp, Homo sapiens
ggccttcatgtaaac

SEQ ID NO: 199774 - DNA, 15 bp, Homo sapiens
tggccttcatgtaaa

SEQ ID NO: 199775 - DNA, 15 bp, Homo sapiens
atggccttcatgtaa

SEQ ID NO: 199776 - DNA, 15 bp, Homo sapiens
aatggccttcatgta

SEQ ID NO: 199777 - DNA, 15 bp, Homo sapiens
taatggccttcatgt

SEQ ID NO: 199778 - DNA, 15 bp, Homo sapiens
ataatggccttcatg

SEQ ID NO: 199779 - DNA, 15 bp, Homo sapiens
aataatggccttcat

SEQ ID NO: 199780 - DNA, 15 bp, Homo sapiens
taataatggccttca

SEQ ID NO: 199781 - DNA, 15 bp, Homo sapiens
gtaataatggccttc

SEQ ID NO: 199782 - DNA, 15 bp, Homo sapiens
tgtaataatggcctt

SEQ ID NO: 199783 - DNA, 15 bp, Homo sapiens
ctgtaataatggcct

SEQ ID NO: 199784 - DNA, 15 bp, Homo sapiens
tctgtaataatggcc

SEQ ID NO: 199785 - DNA, 15 bp, Homo sapiens
atctgtaataatggc

SEQ ID NO: 199786 - DNA, 15 bp, Homo sapiens
catctgtaataatgg

SEQ ID NO: 199787 - DNA, 15 bp, Homo sapiens
acatctgtaataatg

SEQ ID NO: 199788 - DNA, 15 bp, Homo sapiens
cacatctgtaataat

SEQ ID NO: 199789 - DNA, 15 bp, Homo sapiens
tcacatctgtaataa

SEQ ID NO: 199790 - DNA, 15 bp, Homo sapiens
gtcacatctgtaata

SEQ ID NO: 199791 - DNA, 15 bp, Homo sapiens
cgtcacatctgtaat

SEQ ID NO: 199792 - DNA, 15 bp, Homo sapiens
acgtcacatctgtaa

SEQ ID NO: 199793 - DNA, 15 bp, Homo sapiens
cacgtcacatctgta

SEQ ID NO: 199794 - DNA, 15 bp, Homo sapiens
gcacgtcacatctgt

SEQ ID NO: 199795 - DNA, 15 bp, Homo sapiens
tgcacgtcacatctg

SEQ ID NO: 199796 - DNA, 15 bp, Homo sapiens
atgcacgtcacatct

SEQ ID NO: 199797 - DNA, 15 bp, Homo sapiens
tatgcacgtcacatc

SEQ ID NO: 199798 - DNA, 15 bp, Homo sapiens
ttatgcacgtcacat

SEQ ID NO: 199799 - DNA, 15 bp, Homo sapiens
attatgcacgtcaca

SEQ ID NO: 199800 - DNA, 15 bp, Homo sapiens
aattatgcacgtcac

SEQ ID NO: 199801 - DNA, 15 bp, Homo sapiens
taattatgcacgtca

SEQ ID NO: 199802 - DNA, 15 bp, Homo sapiens
ataattatgcacgtc

SEQ ID NO: 199803 - DNA, 15 bp, Homo sapiens
aataattatgcacgt

SEQ ID NO: 199804 - DNA, 15 bp, Homo sapiens
taataattatgcacg

SEQ ID NO: 199805 - DNA, 15 bp, Homo sapiens
ctaataattatgcac

SEQ ID NO: 199806 - DNA, 15 bp, Homo sapiens
actaataattatgca

SEQ ID NO: 199807 - DNA, 15 bp, Homo sapiens
tactaataattatgc

SEQ ID NO: 199808 - DNA, 15 bp, Homo sapiens
ttactaataattatg

SEQ ID NO: 199809 - DNA, 15 bp, Homo sapiens
attactaataattat

SEQ ID NO: 199810 - DNA, 15 bp, Homo sapiens
aattactaataatta

SEQ ID NO: 199811 - DNA, 15 bp, Homo sapiens
aaattactaataatt

SEQ ID NO: 199812 - DNA, 15 bp, Homo sapiens
caaattactaataat

SEQ ID NO: 199813 - DNA, 15 bp, Homo sapiens
acaaattactaataa

SEQ ID NO: 199814 - DNA, 15 bp, Homo sapiens
tacaaattactaata

SEQ ID NO: 199815 - DNA, 15 bp, Homo sapiens
atacaaattactaat

SEQ ID NO: 199816 - DNA, 15 bp, Homo sapiens
catacaaattactaa

SEQ ID NO: 199817 - DNA, 15 bp, Homo sapiens
acatacaaattacta

SEQ ID NO: 199818 - DNA, 15 bp, Homo sapiens
aacatacaaattact

SEQ ID NO: 199819 - DNA, 15 bp, Homo sapiens
aaacatacaaattac

SEQ ID NO: 199820 - DNA, 15 bp, Homo sapiens
taaacatacaaatta

SEQ ID NO: 199821 - DNA, 15 bp, Homo sapiens
gtaaacatacaaatt

SEQ ID NO: 199822 - DNA, 15 bp, Homo sapiens
tgtaaacatacaaat

SEQ ID NO: 199823 - DNA, 15 bp, Homo sapiens
atgtaaacatacaaa

SEQ ID NO: 199824 - DNA, 15 bp, Homo sapiens
catgtaaacatacaa

SEQ ID NO: 199825 - DNA, 15 bp, Homo sapiens
ccatgtaaacataca

SEQ ID NO: 199826 - DNA, 15 bp, Homo sapiens
cccatgtaaacatac

SEQ ID NO: 199827 - DNA, 15 bp, Homo sapiens
acccatgtaaacata

SEQ ID NO: 199828 - DNA, 15 bp, Homo sapiens
gacccatgtaaacat

SEQ ID NO: 199829 - DNA, 15 bp, Homo sapiens
tgacccatgtaaaca

SEQ ID NO: 199830 - DNA, 15 bp, Homo sapiens
ctgacccatgtaaac

SEQ ID NO: 199831 - DNA, 15 bp, Homo sapiens
actgacccatgtaaa

SEQ ID NO: 199832 - DNA, 15 bp, Homo sapiens
gactgacccatgtaa

SEQ ID NO: 199833 - DNA, 15 bp, Homo sapiens
agactgacccatgta

SEQ ID NO: 199834 - DNA, 15 bp, Homo sapiens
cagactgacccatgt

SEQ ID NO: 199835 - DNA, 15 bp, Homo sapiens
ccagactgacccatg

SEQ ID NO: 199836 - DNA, 15 bp, Homo sapiens
gccagactgacccat

SEQ ID NO: 199837 - DNA, 15 bp, Homo sapiens
tgccagactgaccca

SEQ ID NO: 199838 - DNA, 15 bp, Homo sapiens
ttgccagactgaccc

SEQ ID NO: 199839 - DNA, 15 bp, Homo sapiens
tttgccagactgacc

SEQ ID NO: 199840 - DNA, 15 bp, Homo sapiens
ttttgccagactgac

SEQ ID NO: 199841 - DNA, 15 bp, Homo sapiens
tttttgccagactga

SEQ ID NO: 199842 - DNA, 15 bp, Homo sapiens
ttttttgccagactg

SEQ ID NO: 199843 - DNA, 15 bp, Homo sapiens
attttttgccagact

SEQ ID NO: 199844 - DNA, 15 bp, Homo sapiens
aattttttgccagac

SEQ ID NO: 199845 - DNA, 15 bp, Homo sapiens
taattttttgccaga

SEQ ID NO: 199846 - DNA, 15 bp, Homo sapiens
ataattttttgccag

SEQ ID NO: 199847 - DNA, 15 bp, Homo sapiens
cataattttttgcca

SEQ ID NO: 199848 - DNA, 15 bp, Homo sapiens
tcataattttttgcc

SEQ ID NO: 199849 - DNA, 15 bp, Homo sapiens
ttcataattttttgc

SEQ ID NO: 199850 - DNA, 15 bp, Homo sapiens
cttcataattttttg

SEQ ID NO: 199851 - DNA, 15 bp, Homo sapiens
acttcataatttttt

SEQ ID NO: 199852 - DNA, 15 bp, Homo sapiens
aacttcataattttt

SEQ ID NO: 199853 - DNA, 15 bp, Homo sapiens
aaacttcataatttt

SEQ ID NO: 199854 - DNA, 15 bp, Homo sapiens
aaaacttcataattt

SEQ ID NO: 199855 - DNA, 15 bp, Homo sapiens
taaaacttcataatt

SEQ ID NO: 199856 - DNA, 15 bp, Homo sapiens
ttaaaacttcataat

SEQ ID NO: 199857 - DNA, 15 bp, Homo sapiens
tttaaaacttcataa

SEQ ID NO: 199858 - DNA, 15 bp, Homo sapiens
ttttaaaacttcata

SEQ ID NO: 199859 - DNA, 15 bp, Homo sapiens
tttttaaaacttcat

SEQ ID NO: 199860 - DNA, 15 bp, Homo sapiens
atttttaaaacttca

SEQ ID NO: 199861 - DNA, 15 bp, Homo sapiens
aatttttaaaacttc

SEQ ID NO: 199862 - DNA, 15 bp, Homo sapiens
taatttttaaaactt

SEQ ID NO: 199863 - DNA, 15 bp, Homo sapiens
ttaatttttaaaact

SEQ ID NO: 199864 - DNA, 15 bp, Homo sapiens
tttaatttttaaaac

SEQ ID NO: 199865 - DNA, 15 bp, Homo sapiens
ttttaatttttaaaa

SEQ ID NO: 199866 - DNA, 15 bp, Homo sapiens
tttttaatttttaaa

SEQ ID NO: 199867 - DNA, 15 bp, Homo sapiens
ttttttaatttttaa

SEQ ID NO: 199868 - DNA, 15 bp, Homo sapiens
tttttttaattttta

SEQ ID NO: 199869 - DNA, 15 bp, Homo sapiens
ttttttttaattttt

SEQ ID NO: 199870 - DNA, 15 bp, Homo sapiens
attttttttaatttt

SEQ ID NO: 199871 - DNA, 15 bp, Homo sapiens
aattttttttaattt

SEQ ID NO: 199872 - DNA, 15 bp, Homo sapiens
taattttttttaatt

SEQ ID NO: 199873 - DNA, 15 bp, Homo sapiens
ataattttttttaat

SEQ ID NO: 199874 - DNA, 15 bp, Homo sapiens
tataattttttttaa

SEQ ID NO: 199875 - DNA, 15 bp, Homo sapiens
ttataatttttttta

SEQ ID NO: 199876 - DNA, 15 bp, Homo sapiens
attataatttttttt

SEQ ID NO: 199877 - DNA, 15 bp, Homo sapiens
cattataattttttt

SEQ ID NO: 199878 - DNA, 15 bp, Homo sapiens
gcattataatttttt

SEQ ID NO: 199879 - DNA, 15 bp, Homo sapiens
ggcattataattttt

SEQ ID NO: 199880 - DNA, 15 bp, Homo sapiens
tggcattataatttt

SEQ ID NO: 199881 - DNA, 15 bp, Homo sapiens
ctggcattataattt

SEQ ID NO: 199882 - DNA, 15 bp, Homo sapiens
actggcattataatt

SEQ ID NO: 199883 - DNA, 15 bp, Homo sapiens
aactggcattataat

SEQ ID NO: 199884 - DNA, 15 bp, Homo sapiens
aaactggcattataa

SEQ ID NO: 199885 - DNA, 15 bp, Homo sapiens
aaaactggcattata

SEQ ID NO: 199886 - DNA, 15 bp, Homo sapiens
taaaactggcattat

SEQ ID NO: 199887 - DNA, 15 bp, Homo sapiens
gtaaaactggcatta

SEQ ID NO: 199888 - DNA, 15 bp, Homo sapiens
agtaaaactggcatt

SEQ ID NO: 199889 - DNA, 15 bp, Homo sapiens
cagtaaaactggcat

SEQ ID NO: 199890 - DNA, 15 bp, Homo sapiens
ccagtaaaactggca

SEQ ID NO: 199891 - DNA, 15 bp, Homo sapiens
tccagtaaaactggc

SEQ ID NO: 199892 - DNA, 15 bp, Homo sapiens
ttccagtaaaactgg

SEQ ID NO: 199893 - DNA, 15 bp, Homo sapiens
tttccagtaaaactg

SEQ ID NO: 199894 - DNA, 15 bp, Homo sapiens
ctttccagtaaaact

SEQ ID NO: 199895 - DNA, 15 bp, Homo sapiens
actttccagtaaaac

SEQ ID NO: 199896 - DNA, 15 bp, Homo sapiens
tactttccagtaaaa

SEQ ID NO: 199897 - DNA, 15 bp, Homo sapiens
ttactttccagtaaa

SEQ ID NO: 199898 - DNA, 15 bp, Homo sapiens
tttactttccagtaa

SEQ ID NO: 199899 - DNA, 15 bp, Homo sapiens
ttttactttccagta

SEQ ID NO: 199900 - DNA, 15 bp, Homo sapiens
attttactttccagt

SEQ ID NO: 199901 - DNA, 15 bp, Homo sapiens
aattttactttccag

SEQ ID NO: 199902 - DNA, 15 bp, Homo sapiens
taattttactttcca

SEQ ID NO: 199903 - DNA, 15 bp, Homo sapiens
ataattttactttcc

SEQ ID NO: 199904 - DNA, 15 bp, Homo sapiens
aataattttactttc

SEQ ID NO: 199905 - DNA, 15 bp, Homo sapiens
aaataattttacttt

SEQ ID NO: 199906 - DNA, 15 bp, Homo sapiens
gaaataattttactt

SEQ ID NO: 199907 - DNA, 15 bp, Homo sapiens
tgaaataattttact

SEQ ID NO: 199908 - DNA, 15 bp, Homo sapiens
ctgaaataattttac

SEQ ID NO: 199909 - DNA, 15 bp, Homo sapiens
actgaaataatttta

SEQ ID NO: 199910 - DNA, 15 bp, Homo sapiens
tactgaaataatttt

SEQ ID NO: 199911 - DNA, 15 bp, Homo sapiens
ttactgaaataattt

SEQ ID NO: 199912 - DNA, 15 bp, Homo sapiens
attactgaaataatt

SEQ ID NO: 199913 - DNA, 15 bp, Homo sapiens
gattactgaaataat

SEQ ID NO: 199914 - DNA, 15 bp, Homo sapiens
cgattactgaaataa

SEQ ID NO: 199915 - DNA, 15 bp, Homo sapiens
tcgattactgaaata

SEQ ID NO: 199916 - DNA, 15 bp, Homo sapiens
atcgattactgaaat

SEQ ID NO: 199917 - DNA, 15 bp, Homo sapiens
aatcgattactgaaa

SEQ ID NO: 199918 - DNA, 15 bp, Homo sapiens
taatcgattactgaa

SEQ ID NO: 199919 - DNA, 15 bp, Homo sapiens
ataatcgattactga

SEQ ID NO: 199920 - DNA, 15 bp, Homo sapiens
tataatcgattactg

SEQ ID NO: 199921 - DNA, 15 bp, Homo sapiens
ctataatcgattact

SEQ ID NO: 199922 - DNA, 15 bp, Homo sapiens
gctataatcgattac

SEQ ID NO: 199923 - DNA, 15 bp, Homo sapiens
tgctataatcgatta

SEQ ID NO: 199924 - DNA, 15 bp, Homo sapiens
ttgctataatcgatt

SEQ ID NO: 199925 - DNA, 15 bp, Homo sapiens
tttgctataatcgat

SEQ ID NO: 199926 - DNA, 15 bp, Homo sapiens
ttttgctataatcga

SEQ ID NO: 199927 - DNA, 15 bp, Homo sapiens
cttttgctataatcg

SEQ ID NO: 199928 - DNA, 15 bp, Homo sapiens
acttttgctataatc

SEQ ID NO: 199929 - DNA, 15 bp, Homo sapiens
tacttttgctataat

SEQ ID NO: 199930 - DNA, 15 bp, Homo sapiens
atacttttgctataa

SEQ ID NO: 199931 - DNA, 15 bp, Homo sapiens
aatacttttgctata

SEQ ID NO: 199932 - DNA, 15 bp, Homo sapiens
caatacttttgctat

SEQ ID NO: 199933 - DNA, 15 bp, Homo sapiens
tcaatacttttgcta

SEQ ID NO: 199934 - DNA, 15 bp, Homo sapiens
atcaatacttttgct

SEQ ID NO: 199935 - DNA, 15 bp, Homo sapiens
aatcaatacttttgc

SEQ ID NO: 199936 - DNA, 15 bp, Homo sapiens
aaatcaatacttttg

SEQ ID NO: 199937 - DNA, 15 bp, Homo sapiens
aaaatcaatactttt

SEQ ID NO: 199938 - DNA, 15 bp, Homo sapiens
gaaaatcaatacttt

SEQ ID NO: 199939 - DNA, 15 bp, Homo sapiens
tgaaaatcaatactt

SEQ ID NO: 199940 - DNA, 15 bp, Homo sapiens
atgaaaatcaatact

SEQ ID NO: 199941 - DNA, 15 bp, Homo sapiens
aatgaaaatcaatac

SEQ ID NO: 199942 - DNA, 15 bp, Homo sapiens
gaatgaaaatcaata

SEQ ID NO: 199943 - DNA, 15 bp, Homo sapiens
ggaatgaaaatcaat

SEQ ID NO: 199944 - DNA, 15 bp, Homo sapiens
tggaatgaaaatcaa

SEQ ID NO: 199945 - DNA, 15 bp, Homo sapiens
ctggaatgaaaatca

SEQ ID NO: 199946 - DNA, 15 bp, Homo sapiens
tctggaatgaaaatc

SEQ ID NO: 199947 - DNA, 15 bp, Homo sapiens
gtctggaatgaaaat

SEQ ID NO: 199948 - DNA, 15 bp, Homo sapiens
tgtctggaatgaaaa

SEQ ID NO: 199949 - DNA, 15 bp, Homo sapiens
ttgtctggaatgaaa

SEQ ID NO: 199950 - DNA, 15 bp, Homo sapiens
tttgtctggaatgaa

SEQ ID NO: 199951 - DNA, 15 bp, Homo sapiens
ttttgtctggaatga

SEQ ID NO: 199952 - DNA, 15 bp, Homo sapiens
cttttgtctggaatg

SEQ ID NO: 199953 - DNA, 15 bp, Homo sapiens
acttttgtctggaat

SEQ ID NO: 199954 - DNA, 15 bp, Homo sapiens
gacttttgtctggaa

SEQ ID NO: 199955 - DNA, 15 bp, Homo sapiens
tgacttttgtctgga

SEQ ID NO: 199956 - DNA, 15 bp, Homo sapiens
ctgacttttgtctgg

SEQ ID NO: 199957 - DNA, 15 bp, Homo sapiens
tctgacttttgtctg

SEQ ID NO: 199958 - DNA, 15 bp, Homo sapiens
ttctgacttttgtct

SEQ ID NO: 199959 - DNA, 15 bp, Homo sapiens
attctgacttttgtc

SEQ ID NO: 199960 - DNA, 15 bp, Homo sapiens
cattctgacttttgt

SEQ ID NO: 199961 - DNA, 15 bp, Homo sapiens
tcattctgacttttg

SEQ ID NO: 199962 - DNA, 15 bp, Homo sapiens
ttcattctgactttt

SEQ ID NO: 199963 - DNA, 15 bp, Homo sapiens
tttcattctgacttt

SEQ ID NO: 199964 - DNA, 15 bp, Homo sapiens
ctttcattctgactt

SEQ ID NO: 199965 - DNA, 15 bp, Homo sapiens
cctttcattctgact

SEQ ID NO: 199966 - DNA, 15 bp, Homo sapiens
acctttcattctgac

SEQ ID NO: 199967 - DNA, 15 bp, Homo sapiens
tacctttcattctga

SEQ ID NO: 199968 - DNA, 15 bp, Homo sapiens
ttacctttcattctg

SEQ ID NO: 199969 - DNA, 15 bp, Homo sapiens
attacctttcattct

SEQ ID NO: 199970 - DNA, 15 bp, Homo sapiens
aattacctttcattc

SEQ ID NO: 199971 - DNA, 15 bp, Homo sapiens
aaattacctttcatt

SEQ ID NO: 199972 - DNA, 15 bp, Homo sapiens
gaaattacctttcat

SEQ ID NO: 199973 - DNA, 15 bp, Homo sapiens
agaaattacctttca

SEQ ID NO: 199974 - DNA, 15 bp, Homo sapiens
gagaaattacctttc

SEQ ID NO: 199975 - DNA, 15 bp, Homo sapiens
tgagaaattaccttt

SEQ ID NO: 199976 - DNA, 15 bp, Homo sapiens
ttgagaaattacctt

SEQ ID NO: 199977 - DNA, 15 bp, Homo sapiens
attgagaaattacct

SEQ ID NO: 199978 - DNA, 15 bp, Homo sapiens
tattgagaaattacc

SEQ ID NO: 199979 - DNA, 15 bp, Homo sapiens
gtattgagaaattac

SEQ ID NO: 199980 - DNA, 15 bp, Homo sapiens
agtattgagaaatta

SEQ ID NO: 199981 - DNA, 15 bp, Homo sapiens
gagtattgagaaatt

SEQ ID NO: 199982 - DNA, 15 bp, Homo sapiens
agagtattgagaaat

SEQ ID NO: 199983 - DNA, 15 bp, Homo sapiens
aagagtattgagaaa

SEQ ID NO: 199984 - DNA, 15 bp, Homo sapiens
aaagagtattgagaa

SEQ ID NO: 199985 - DNA, 15 bp, Homo sapiens
gaaagagtattgaga

SEQ ID NO: 199986 - DNA, 15 bp, Homo sapiens
tgaaagagtattgag

SEQ ID NO: 199987 - DNA, 15 bp, Homo sapiens
ctgaaagagtattga

SEQ ID NO: 199988 - DNA, 15 bp, Homo sapiens
tctgaaagagtattg

SEQ ID NO: 199989 - DNA, 15 bp, Homo sapiens
atctgaaagagtatt

SEQ ID NO: 199990 - DNA, 15 bp, Homo sapiens
aatctgaaagagtat

SEQ ID NO: 199991 - DNA, 15 bp, Homo sapiens
taatctgaaagagta

SEQ ID NO: 199992 - DNA, 15 bp, Homo sapiens
ttaatctgaaagagt

SEQ ID NO: 199993 - DNA, 15 bp, Homo sapiens
attaatctgaaagag

SEQ ID NO: 199994 - DNA, 15 bp, Homo sapiens
tattaatctgaaaga

SEQ ID NO: 199995 - DNA, 15 bp, Homo sapiens
ttattaatctgaaag

SEQ ID NO: 199996 - DNA, 15 bp, Homo sapiens
tttattaatctgaaa

SEQ ID NO: 199997 - DNA, 15 bp, Homo sapiens
ttttattaatctgaa

SEQ ID NO: 199998 - DNA, 15 bp, Homo sapiens
cttttattaatctga

SEQ ID NO: 199999 - DNA, 15 bp, Homo sapiens
acttttattaatctg

SEQ ID NO: 200000 - DNA, 15 bp, Homo sapiens
tacttttattaatct

SEQ ID NO: 200001 - DNA, 15 bp, Homo sapiens
gtacttttattaatc

SEQ ID NO: 200002 - DNA, 15 bp, Homo sapiens
ggtacttttattaat

SEQ ID NO: 200003 - DNA, 15 bp, Homo sapiens
aggtacttttattaa

SEQ ID NO: 200004 - DNA, 15 bp, Homo sapiens
caggtacttttatta

SEQ ID NO: 200005 - DNA, 15 bp, Homo sapiens
acaggtacttttatt

SEQ ID NO: 200006 - DNA, 15 bp, Homo sapiens
tacaggtacttttat

SEQ ID NO: 200007 - DNA, 15 bp, Homo sapiens
ctacaggtactttta

SEQ ID NO: 200008 - DNA, 15 bp, Homo sapiens
gctacaggtactttt

SEQ ID NO: 200009 - DNA, 15 bp, Homo sapiens
cgctacaggtacttt

SEQ ID NO: 200010 - DNA, 15 bp, Homo sapiens
gaaaatttggcaata

SEQ ID NO: 200011 - DNA, 15 bp, Homo sapiens
ggaaaatttggcaat

SEQ ID NO: 200012 - DNA, 15 bp, Homo sapiens
aggaaaatttggcaa

SEQ ID NO: 200013 - DNA, 15 bp, Homo sapiens
gaggaaaatttggca

SEQ ID NO: 200014 - DNA, 15 bp, Homo sapiens
agaggaaaatttggc

SEQ ID NO: 200015 - DNA, 15 bp, Homo sapiens
tagaggaaaatttgg

SEQ ID NO: 200016 - DNA, 15 bp, Homo sapiens
ttagaggaaaatttg

SEQ ID NO: 200017 - DNA, 15 bp, Homo sapiens
cttagaggaaaattt

SEQ ID NO: 200018 - DNA, 15 bp, Homo sapiens
tcttagaggaaaatt

SEQ ID NO: 200019 - DNA, 15 bp, Homo sapiens
ttcttagaggaaaat

SEQ ID NO: 200020 - DNA, 15 bp, Homo sapiens
cttcttagaggaaaa

SEQ ID NO: 200021 - DNA, 15 bp, Homo sapiens
acttcttagaggaaa

SEQ ID NO: 200022 - DNA, 15 bp, Homo sapiens
aacttcttagaggaa

SEQ ID NO: 200023 - DNA, 15 bp, Homo sapiens
caacttcttagagga

SEQ ID NO: 200024 - DNA, 15 bp, Homo sapiens
tcaacttcttagagg

SEQ ID NO: 200025 - DNA, 15 bp, Homo sapiens
ttcaacttcttagag

SEQ ID NO: 200026 - DNA, 15 bp, Homo sapiens
attcaacttcttaga

SEQ ID NO: 200027 - DNA, 15 bp, Homo sapiens
gattcaacttcttag

SEQ ID NO: 200028 - DNA, 15 bp, Homo sapiens
tgattcaacttctta

SEQ ID NO: 200029 - DNA, 15 bp, Homo sapiens
atgattcaacttctt

SEQ ID NO: 200030 - DNA, 15 bp, Homo sapiens
aatgattcaacttct

SEQ ID NO: 200031 - DNA, 15 bp, Homo sapiens
aaatgattcaacttc

SEQ ID NO: 200032 - DNA, 15 bp, Homo sapiens
aaaatgattcaactt

SEQ ID NO: 200033 - DNA, 15 bp, Homo sapiens
taaaatgattcaact

SEQ ID NO: 200034 - DNA, 15 bp, Homo sapiens
ataaaatgattcaac

SEQ ID NO: 200035 - DNA, 15 bp, Homo sapiens
tataaaatgattcaa

SEQ ID NO: 200036 - DNA, 15 bp, Homo sapiens
gtataaaatgattca

SEQ ID NO: 200037 - DNA, 15 bp, Homo sapiens
agtataaaatgattc

SEQ ID NO: 200038 - DNA, 15 bp, Homo sapiens
gagtataaaatgatt

SEQ ID NO: 200039 - DNA, 15 bp, Homo sapiens
ggagtataaaatgat

SEQ ID NO: 200040 - DNA, 15 bp, Homo sapiens
aggagtataaaatga

SEQ ID NO: 200041 - DNA, 15 bp, Homo sapiens
caggagtataaaatg

SEQ ID NO: 200042 - DNA, 15 bp, Homo sapiens
tcaggagtataaaat

SEQ ID NO: 200043 - DNA, 15 bp, Homo sapiens
atcaggagtataaaa

SEQ ID NO: 200044 - DNA, 15 bp, Homo sapiens
catcaggagtataaa

SEQ ID NO: 200045 - DNA, 15 bp, Homo sapiens
acatcaggagtataa

SEQ ID NO: 200046 - DNA, 15 bp, Homo sapiens
aacatcaggagtata

SEQ ID NO: 200047 - DNA, 15 bp, Homo sapiens
taacatcaggagtat

SEQ ID NO: 200048 - DNA, 15 bp, Homo sapiens
ataacatcaggagta

SEQ ID NO: 200049 - DNA, 15 bp, Homo sapiens
tataacatcaggagt

SEQ ID NO: 200050 - DNA, 15 bp, Homo sapiens
atataacatcaggag

SEQ ID NO: 200051 - DNA, 15 bp, Homo sapiens
catataacatcagga

SEQ ID NO: 200052 - DNA, 15 bp, Homo sapiens
tcatataacatcagg

SEQ ID NO: 200053 - DNA, 15 bp, Homo sapiens
ctcatataacatcag

SEQ ID NO: 200054 - DNA, 15 bp, Homo sapiens
tctcatataacatca

SEQ ID NO: 200055 - DNA, 15 bp, Homo sapiens
ctctcatataacatc

SEQ ID NO: 200056 - DNA, 15 bp, Homo sapiens
actctcatataacat

SEQ ID NO: 200057 - DNA, 15 bp, Homo sapiens
tactctcatataaca

SEQ ID NO: 200058 - DNA, 15 bp, Homo sapiens
gtactctcatataac

SEQ ID NO: 200059 - DNA, 15 bp, Homo sapiens
ggtactctcatataa

SEQ ID NO: 200060 - DNA, 15 bp, Homo sapiens
aggtactctcatata

SEQ ID NO: 200061 - DNA, 15 bp, Homo sapiens
aaggtactctcatat

SEQ ID NO: 200062 - DNA, 15 bp, Homo sapiens
aaaggtactctcata

SEQ ID NO: 200063 - DNA, 15 bp, Homo sapiens
gaaaggtactctcat

SEQ ID NO: 200064 - DNA, 15 bp, Homo sapiens
agaaaggtactctca

SEQ ID NO: 200065 - DNA, 15 bp, Homo sapiens
gagaaaggtactctc

SEQ ID NO: 200066 - DNA, 15 bp, Homo sapiens
agagaaaggtactct

SEQ ID NO: 200067 - DNA, 15 bp, Homo sapiens
aagagaaaggtactc

SEQ ID NO: 200068 - DNA, 15 bp, Homo sapiens
gaagagaaaggtact

SEQ ID NO: 200069 - DNA, 15 bp, Homo sapiens
tgaagagaaaggtac

SEQ ID NO: 200070 - DNA, 15 bp, Homo sapiens
gtgaagagaaaggta

SEQ ID NO: 200071 - DNA, 15 bp, Homo sapiens
tgtgaagagaaaggt

SEQ ID NO: 200072 - DNA, 15 bp, Homo sapiens
ttgtgaagagaaagg

SEQ ID NO: 200073 - DNA, 15 bp, Homo sapiens
attgtgaagagaaag

SEQ ID NO: 200074 - DNA, 15 bp, Homo sapiens
aattgtgaagagaaa

SEQ ID NO: 200075 - DNA, 15 bp, Homo sapiens
aaattgtgaagagaa

SEQ ID NO: 200076 - DNA, 15 bp, Homo sapiens
caaattgtgaagaga

SEQ ID NO: 200077 - DNA, 15 bp, Homo sapiens
acaaattgtgaagag

SEQ ID NO: 200078 - DNA, 15 bp, Homo sapiens
gacaaattgtgaaga

SEQ ID NO: 200079 - DNA, 15 bp, Homo sapiens
agacaaattgtgaag

SEQ ID NO: 200080 - DNA, 15 bp, Homo sapiens
gagacaaattgtgaa

SEQ ID NO: 200081 - DNA, 15 bp, Homo sapiens
agagacaaattgtga

SEQ ID NO: 200082 - DNA, 15 bp, Homo sapiens
aagagacaaattgtg

SEQ ID NO: 200083 - DNA, 15 bp, Homo sapiens
aaagagacaaattgt

SEQ ID NO: 200084 - DNA, 15 bp, Homo sapiens
aaaagagacaaattg

SEQ ID NO: 200085 - DNA, 15 bp, Homo sapiens
aaaaagagacaaatt

SEQ ID NO: 200086 - DNA, 15 bp, Homo sapiens
aaaaaagagacaaat

SEQ ID NO: 200087 - DNA, 15 bp, Homo sapiens
aaaaaaagagacaaa

SEQ ID NO: 200088 - DNA, 15 bp, Homo sapiens
aaaaaaaagagacaa

SEQ ID NO: 200089 - DNA, 15 bp, Homo sapiens
aaaaaaaaagagaca

SEQ ID NO: 200090 - DNA, 15 bp, Homo sapiens
aaaaaaaaaagagac

SEQ ID NO: 200091 - DNA, 15 bp, Homo sapiens
aaaaaaaaaaagaga

SEQ ID NO: 200092 - DNA, 15 bp, Homo sapiens
aaaaaaaaaaaagag

SEQ ID NO: 200093 - DNA, 15 bp, Homo sapiens
tcaaaaaaaaaaaaa

SEQ ID NO: 200094 - DNA, 15 bp, Homo sapiens
ctcaaaaaaaaaaaa

SEQ ID NO: 200095 - DNA, 15 bp, Homo sapiens
tgtctcaaaaaaaaa

SEQ ID NO: 200096 - DNA, 15 bp, Homo sapiens
ttgtctcaaaaaaaa

SEQ ID NO: 200097 - DNA, 15 bp, Homo sapiens
cttgtctcaaaaaaa

SEQ ID NO: 200098 - DNA, 15 bp, Homo sapiens
ccttgtctcaaaaaa

SEQ ID NO: 200099 - DNA, 15 bp, Homo sapiens
accttgtctcaaaaa

SEQ ID NO: 200100 - DNA, 15 bp, Homo sapiens
gaccttgtctcaaaa

SEQ ID NO: 200101 - DNA, 15 bp, Homo sapiens
agaccttgtctcaaa

SEQ ID NO: 200102 - DNA, 15 bp, Homo sapiens
gagaccttgtctcaa

SEQ ID NO: 200103 - DNA, 15 bp, Homo sapiens
agagaccttgtctca

SEQ ID NO: 200104 - DNA, 15 bp, Homo sapiens
cagagaccttgtctc

SEQ ID NO: 200105 - DNA, 15 bp, Homo sapiens
acagagaccttgtct

SEQ ID NO: 200106 - DNA, 15 bp, Homo sapiens
aacagagaccttgtc

SEQ ID NO: 200107 - DNA, 15 bp, Homo sapiens
caacagagaccttgt

SEQ ID NO: 200108 - DNA, 15 bp, Homo sapiens
gcaacagagaccttg

SEQ ID NO: 200109 - DNA, 15 bp, Homo sapiens
ggcaacagagacctt

SEQ ID NO: 200110 - DNA, 15 bp, Homo sapiens
gggcaacagagacct

SEQ ID NO: 200111 - DNA, 15 bp, Homo sapiens
tgggcaacagagacc

SEQ ID NO: 200112 - DNA, 15 bp, Homo sapiens
ctgggcaacagagac

SEQ ID NO: 200113 - DNA, 15 bp, Homo sapiens
cccagcctgggcaac

SEQ ID NO: 200114 - DNA, 15 bp, Homo sapiens
ccccagcctgggcaa

SEQ ID NO: 200115 - DNA, 15 bp, Homo sapiens
accccagcctgggca

SEQ ID NO: 200116 - DNA, 15 bp, Homo sapiens
caccccagcctgggc

SEQ ID NO: 200117 - DNA, 15 bp, Homo sapiens
gcaccccagcctggg

SEQ ID NO: 200118 - DNA, 15 bp, Homo sapiens
tgcaccccagcctgg

SEQ ID NO: 200119 - DNA, 15 bp, Homo sapiens
ctgcaccccagcctg

SEQ ID NO: 200120 - DNA, 15 bp, Homo sapiens
actgcaccccagcct

SEQ ID NO: 200121 - DNA, 15 bp, Homo sapiens
cactgcaccccagcc

SEQ ID NO: 200122 - DNA, 15 bp, Homo sapiens
gcactgcaccccagc

SEQ ID NO: 200123 - DNA, 15 bp, Homo sapiens
tgcactgcaccccag

SEQ ID NO: 200124 - DNA, 15 bp, Homo sapiens
ctgcactgcacccca

SEQ ID NO: 200125 - DNA, 15 bp, Homo sapiens
gctgcactgcacccc

SEQ ID NO: 200126 - DNA, 15 bp, Homo sapiens
tgctgcactgcaccc

SEQ ID NO: 200127 - DNA, 15 bp, Homo sapiens
ctgctgcactgcacc

SEQ ID NO: 200128 - DNA, 15 bp, Homo sapiens
tctgctgcactgcac

SEQ ID NO: 200129 - DNA, 15 bp, Homo sapiens
ttctgctgcactgca

SEQ ID NO: 200130 - DNA, 15 bp, Homo sapiens
attctgctgcactgc

SEQ ID NO: 200131 - DNA, 15 bp, Homo sapiens
cattctgctgcactg

SEQ ID NO: 200132 - DNA, 15 bp, Homo sapiens
tcattctgctgcact

SEQ ID NO: 200133 - DNA, 15 bp, Homo sapiens
atcattctgctgcac

SEQ ID NO: 200134 - DNA, 15 bp, Homo sapiens
gatcattctgctgca

SEQ ID NO: 200135 - DNA, 15 bp, Homo sapiens
tgatcattctgctgc

SEQ ID NO: 200136 - DNA, 15 bp, Homo sapiens
gtgatcattctgctg

SEQ ID NO: 200137 - DNA, 15 bp, Homo sapiens
tgtgatcattctgct

SEQ ID NO: 200138 - DNA, 15 bp, Homo sapiens
ctgtgatcattctgc

SEQ ID NO: 200139 - DNA, 15 bp, Homo sapiens
actgtgatcattctg

SEQ ID NO: 200140 - DNA, 15 bp, Homo sapiens
aactgtgatcattct

SEQ ID NO: 200141 - DNA, 15 bp, Homo sapiens
gaactgtgatcattc

SEQ ID NO: 200142 - DNA, 15 bp, Homo sapiens
tgaactgtgatcatt

SEQ ID NO: 200143 - DNA, 15 bp, Homo sapiens
gtgaactgtgatcat

SEQ ID NO: 200144 - DNA, 15 bp, Homo sapiens
agtgaactgtgatca

SEQ ID NO: 200145 - DNA, 15 bp, Homo sapiens
cagtgaactgtgatc

SEQ ID NO: 200146 - DNA, 15 bp, Homo sapiens
gcagtgaactgtgat

SEQ ID NO: 200147 - DNA, 15 bp, Homo sapiens
tgcagtgaactgtga

SEQ ID NO: 200148 - DNA, 15 bp, Homo sapiens
ctgcagtgaactgtg

SEQ ID NO: 200149 - DNA, 15 bp, Homo sapiens
actgcagtgaactgt

SEQ ID NO: 200150 - DNA, 15 bp, Homo sapiens
gactgcagtgaactg

SEQ ID NO: 200151 - DNA, 15 bp, Homo sapiens
agactgcagtgaact

SEQ ID NO: 200152 - DNA, 15 bp, Homo sapiens
gagactgcagtgaac

SEQ ID NO: 200153 - DNA, 15 bp, Homo sapiens
tgagactgcagtgaa

SEQ ID NO: 200154 - DNA, 15 bp, Homo sapiens
ttgagactgcagtga

SEQ ID NO: 200155 - DNA, 15 bp, Homo sapiens
gttgagactgcagtg

SEQ ID NO: 200156 - DNA, 15 bp, Homo sapiens
ggttgagactgcagt

SEQ ID NO: 200157 - DNA, 15 bp, Homo sapiens
aggttgagactgcag

SEQ ID NO: 200158 - DNA, 15 bp, Homo sapiens
gaggttgagactgca

SEQ ID NO: 200159 - DNA, 15 bp, Homo sapiens
ggaggttgagactgc

SEQ ID NO: 200160 - DNA, 15 bp, Homo sapiens
aggaggttgagactg

SEQ ID NO: 200161 - DNA, 15 bp, Homo sapiens
caggaggttgagact

SEQ ID NO: 200162 - DNA, 15 bp, Homo sapiens
ccaggaggttgagac

SEQ ID NO: 200163 - DNA, 15 bp, Homo sapiens
cccaggaggttgaga

SEQ ID NO: 200164 - DNA, 15 bp, Homo sapiens
acccaggaggttgag

SEQ ID NO: 200165 - DNA, 15 bp, Homo sapiens
aacccaggaggttga

SEQ ID NO: 200166 - DNA, 15 bp, Homo sapiens
gaacccaggaggttg

SEQ ID NO: 200167 - DNA, 15 bp, Homo sapiens
tgaacccaggaggtt

SEQ ID NO: 200168 - DNA, 15 bp, Homo sapiens
ttgaacccaggaggt

SEQ ID NO: 200169 - DNA, 15 bp, Homo sapiens
cgcttgaacccagga

SEQ ID NO: 200170 - DNA, 15 bp, Homo sapiens
tcgcttgaacccagg

SEQ ID NO: 200171 - DNA, 15 bp, Homo sapiens
atcgcttgaacccag

SEQ ID NO: 200172 - DNA, 15 bp, Homo sapiens
gatcgcttgaaccca

SEQ ID NO: 200173 - DNA, 15 bp, Homo sapiens
ggatcgcttgaaccc

SEQ ID NO: 200174 - DNA, 15 bp, Homo sapiens
aggatcgcttgaacc

SEQ ID NO: 200175 - DNA, 15 bp, Homo sapiens
aaggatcgcttgaac

SEQ ID NO: 200176 - DNA, 15 bp, Homo sapiens
gaaggatcgcttgaa

SEQ ID NO: 200177 - DNA, 15 bp, Homo sapiens
ggaaggatcgcttga

SEQ ID NO: 200178 - DNA, 15 bp, Homo sapiens
tggaaggatcgcttg

SEQ ID NO: 200179 - DNA, 15 bp, Homo sapiens
gtggaaggatcgctt

SEQ ID NO: 200180 - DNA, 15 bp, Homo sapiens
ggtggaaggatcgct

SEQ ID NO: 200181 - DNA, 15 bp, Homo sapiens
aggtggaaggatcgc

SEQ ID NO: 200182 - DNA, 15 bp, Homo sapiens
gaggtggaaggatcg

SEQ ID NO: 200183 - DNA, 15 bp, Homo sapiens
tgaggtggaaggatc

SEQ ID NO: 200184 - DNA, 15 bp, Homo sapiens
ctgaggtggaaggat

SEQ ID NO: 200185 - DNA, 15 bp, Homo sapiens
gctgaggtggaagga

SEQ ID NO: 200186 - DNA, 15 bp, Homo sapiens
ggctgaggtggaagg

SEQ ID NO: 200187 - DNA, 15 bp, Homo sapiens
aggctgaggtggaag

SEQ ID NO: 200188 - DNA, 15 bp, Homo sapiens
gaggctgaggtggaa

SEQ ID NO: 200189 - DNA, 15 bp, Homo sapiens
ggaggctgaggtgga

SEQ ID NO: 200190 - DNA, 15 bp, Homo sapiens
aggaggctgaggtgg

SEQ ID NO: 200191 - DNA, 15 bp, Homo sapiens
caggaggctgaggtg

SEQ ID NO: 200192 - DNA, 15 bp, Homo sapiens
tcaggaggctgaggt

SEQ ID NO: 200193 - DNA, 15 bp, Homo sapiens
ctcaggaggctgagg

SEQ ID NO: 200194 - DNA, 15 bp, Homo sapiens
ccagctactcaggag

SEQ ID NO: 200195 - DNA, 15 bp, Homo sapiens
cccagctactcagga

SEQ ID NO: 200196 - DNA, 15 bp, Homo sapiens
gtcccagctactcag

SEQ ID NO: 200197 - DNA, 15 bp, Homo sapiens
agtcccagctactca

SEQ ID NO: 200198 - DNA, 15 bp, Homo sapiens
atagtcccagctact

SEQ ID NO: 200199 - DNA, 15 bp, Homo sapiens
tatagtcccagctac

SEQ ID NO: 200200 - DNA, 15 bp, Homo sapiens
ctatagtcccagcta

SEQ ID NO: 200201 - DNA, 15 bp, Homo sapiens
cctatagtcccagct

SEQ ID NO: 200202 - DNA, 15 bp, Homo sapiens
acctatagtcccagc

SEQ ID NO: 200203 - DNA, 15 bp, Homo sapiens
cacctatagtcccag

SEQ ID NO: 200204 - DNA, 15 bp, Homo sapiens
acacctatagtccca

SEQ ID NO: 200205 - DNA, 15 bp, Homo sapiens
cacacctatagtccc

SEQ ID NO: 200206 - DNA, 15 bp, Homo sapiens
gcacacctatagtcc

SEQ ID NO: 200207 - DNA, 15 bp, Homo sapiens
cgcacacctatagtc

SEQ ID NO: 200208 - DNA, 15 bp, Homo sapiens
gcgcacacctatagt

SEQ ID NO: 200209 - DNA, 15 bp, Homo sapiens
ggcgcacacctatag

SEQ ID NO: 200210 - DNA, 15 bp, Homo sapiens
tggcgcacacctata

SEQ ID NO: 200211 - DNA, 15 bp, Homo sapiens
gtggcgcacacctat

SEQ ID NO: 200212 - DNA, 15 bp, Homo sapiens
ggtggcgcacaccta

SEQ ID NO: 200213 - DNA, 15 bp, Homo sapiens
tggtggcgcacacct

SEQ ID NO: 200214 - DNA, 15 bp, Homo sapiens
gtggtggcgcacacc

SEQ ID NO: 200215 - DNA, 15 bp, Homo sapiens
agtggtggcgcacac

SEQ ID NO: 200216 - DNA, 15 bp, Homo sapiens
gagtggtggcgcaca

SEQ ID NO: 200217 - DNA, 15 bp, Homo sapiens
ggagtggtggcgcac

SEQ ID NO: 200218 - DNA, 15 bp, Homo sapiens
gggagtggtggcgca

SEQ ID NO: 200219 - DNA, 15 bp, Homo sapiens
tgggagtggtggcgc

SEQ ID NO: 200220 - DNA, 15 bp, Homo sapiens
ctgggagtggtggcg

SEQ ID NO: 200221 - DNA, 15 bp, Homo sapiens
gctgggagtggtggc

SEQ ID NO: 200222 - DNA, 15 bp, Homo sapiens
agctgggagtggtgg

SEQ ID NO: 200223 - DNA, 15 bp, Homo sapiens
tagctgggagtggtg

SEQ ID NO: 200224 - DNA, 15 bp, Homo sapiens
ttagctgggagtggt

SEQ ID NO: 200225 - DNA, 15 bp, Homo sapiens
attagctgggagtgg

SEQ ID NO: 200226 - DNA, 15 bp, Homo sapiens
tattagctgggagtg

SEQ ID NO: 200227 - DNA, 15 bp, Homo sapiens
atattagctgggagt

SEQ ID NO: 200228 - DNA, 15 bp, Homo sapiens
aatattagctgggag

SEQ ID NO: 200229 - DNA, 15 bp, Homo sapiens
aaatattagctggga

SEQ ID NO: 200230 - DNA, 15 bp, Homo sapiens
aaaatattagctggg

SEQ ID NO: 200231 - DNA, 15 bp, Homo sapiens
aaaaatattagctgg

SEQ ID NO: 200232 - DNA, 15 bp, Homo sapiens
taaaaatattagctg

SEQ ID NO: 200233 - DNA, 15 bp, Homo sapiens
ataaaaatattagct

SEQ ID NO: 200234 - DNA, 15 bp, Homo sapiens
aataaaaatattagc

SEQ ID NO: 200235 - DNA, 15 bp, Homo sapiens
aaataaaaatattag

SEQ ID NO: 200236 - DNA, 15 bp, Homo sapiens
aaaataaaaatatta

SEQ ID NO: 200237 - DNA, 15 bp, Homo sapiens
caaaataaaaatatt

SEQ ID NO: 200238 - DNA, 15 bp, Homo sapiens
acaaaataaaaatat

SEQ ID NO: 200239 - DNA, 15 bp, Homo sapiens
tacaaaataaaaata

SEQ ID NO: 200240 - DNA, 15 bp, Homo sapiens
ctacaaaataaaaat

SEQ ID NO: 200241 - DNA, 15 bp, Homo sapiens
tctacaaaataaaaa

SEQ ID NO: 200242 - DNA, 15 bp, Homo sapiens
ttctacaaaataaaa

SEQ ID NO: 200243 - DNA, 15 bp, Homo sapiens
tttctacaaaataaa

SEQ ID NO: 200244 - DNA, 15 bp, Homo sapiens
gtttctacaaaataa

SEQ ID NO: 200245 - DNA, 15 bp, Homo sapiens
tgtttctacaaaata

SEQ ID NO: 200246 - DNA, 15 bp, Homo sapiens
ctgtttctacaaaat

SEQ ID NO: 200247 - DNA, 15 bp, Homo sapiens
cctgtttctacaaaa

SEQ ID NO: 200248 - DNA, 15 bp, Homo sapiens
ccctgtttctacaaa

SEQ ID NO: 200249 - DNA, 15 bp, Homo sapiens
accctgtttctacaa

SEQ ID NO: 200250 - DNA, 15 bp, Homo sapiens
aaccctgtttctaca

SEQ ID NO: 200251 - DNA, 15 bp, Homo sapiens
gaaccctgtttctac

SEQ ID NO: 200252 - DNA, 15 bp, Homo sapiens
cgaaccctgtttcta

SEQ ID NO: 200253 - DNA, 15 bp, Homo sapiens
gcgaaccctgtttct

SEQ ID NO: 200254 - DNA, 15 bp, Homo sapiens
ggcgaaccctgtttc

SEQ ID NO: 200255 - DNA, 15 bp, Homo sapiens
tggcgaaccctgttt

SEQ ID NO: 200256 - DNA, 15 bp, Homo sapiens
atggcgaaccctgtt

SEQ ID NO: 200257 - DNA, 15 bp, Homo sapiens
catggcgaaccctgt

SEQ ID NO: 200258 - DNA, 15 bp, Homo sapiens
acatggcgaaccctg

SEQ ID NO: 200259 - DNA, 15 bp, Homo sapiens
aacatggcgaaccct

SEQ ID NO: 200260 - DNA, 15 bp, Homo sapiens
taacatggcgaaccc

SEQ ID NO: 200261 - DNA, 15 bp, Homo sapiens
gtaacatggcgaacc

SEQ ID NO: 200262 - DNA, 15 bp, Homo sapiens
ggtaacatggcgaac

SEQ ID NO: 200263 - DNA, 15 bp, Homo sapiens
gggtaacatggcgaa

SEQ ID NO: 200264 - DNA, 15 bp, Homo sapiens
tgggtaacatggcga

SEQ ID NO: 200265 - DNA, 15 bp, Homo sapiens
ctgggtaacatggcg

SEQ ID NO: 200266 - DNA, 15 bp, Homo sapiens
gctgggtaacatggc

SEQ ID NO: 200267 - DNA, 15 bp, Homo sapiens
ggctgggtaacatgg

SEQ ID NO: 200268 - DNA, 15 bp, Homo sapiens
aggctgggtaacatg

SEQ ID NO: 200269 - DNA, 15 bp, Homo sapiens
gaggctgggtaacat

SEQ ID NO: 200270 - DNA, 15 bp, Homo sapiens
ggaggctgggtaaca

SEQ ID NO: 200271 - DNA, 15 bp, Homo sapiens
gggaggctgggtaac

SEQ ID NO: 200272 - DNA, 15 bp, Homo sapiens
tgggaggctgggtaa

SEQ ID NO: 200273 - DNA, 15 bp, Homo sapiens
ttgggaggctgggta

SEQ ID NO: 200274 - DNA, 15 bp, Homo sapiens
tttgggaggctgggt

SEQ ID NO: 200275 - DNA, 15 bp, Homo sapiens
ctttgggaggctggg

SEQ ID NO: 200276 - DNA, 15 bp, Homo sapiens
actttgggaggctgg

SEQ ID NO: 200277 - DNA, 15 bp, Homo sapiens
ccagtggctcatgcc

SEQ ID NO: 200278 - DNA, 15 bp, Homo sapiens
gccagtggctcatgc

SEQ ID NO: 200279 - DNA, 15 bp, Homo sapiens
ggccagtggctcatg

SEQ ID NO: 200280 - DNA, 15 bp, Homo sapiens
gggccagtggctcat

SEQ ID NO: 200281 - DNA, 15 bp, Homo sapiens
tgggccagtggctca

SEQ ID NO: 200282 - DNA, 15 bp, Homo sapiens
ctgggccagtggctc

SEQ ID NO: 200283 - DNA, 15 bp, Homo sapiens
actgggccagtggct

SEQ ID NO: 200284 - DNA, 15 bp, Homo sapiens
aactgggccagtggc

SEQ ID NO: 200285 - DNA, 15 bp, Homo sapiens
aaactgggccagtgg

SEQ ID NO: 200286 - DNA, 15 bp, Homo sapiens
gaaactgggccagtg

SEQ ID NO: 200287 - DNA, 15 bp, Homo sapiens
agaaactgggccagt

SEQ ID NO: 200288 - DNA, 15 bp, Homo sapiens
tagaaactgggccag

SEQ ID NO: 200289 - DNA, 15 bp, Homo sapiens
gtagaaactgggcca

SEQ ID NO: 200290 - DNA, 15 bp, Homo sapiens
tgtagaaactgggcc

SEQ ID NO: 200291 - DNA, 15 bp, Homo sapiens
ctgtagaaactgggc

SEQ ID NO: 200292 - DNA, 15 bp, Homo sapiens
actgtagaaactggg

SEQ ID NO: 200293 - DNA, 15 bp, Homo sapiens
gactgtagaaactgg

SEQ ID NO: 200294 - DNA, 15 bp, Homo sapiens
agactgtagaaactg

SEQ ID NO: 200295 - DNA, 15 bp, Homo sapiens
gagactgtagaaact

SEQ ID NO: 200296 - DNA, 15 bp, Homo sapiens
agagactgtagaaac

SEQ ID NO: 200297 - DNA, 15 bp, Homo sapiens
gagagactgtagaaa

SEQ ID NO: 200298 - DNA, 15 bp, Homo sapiens
agagagactgtagaa

SEQ ID NO: 200299 - DNA, 15 bp, Homo sapiens
aagagagactgtaga

SEQ ID NO: 200300 - DNA, 15 bp, Homo sapiens
taagagagactgtag

SEQ ID NO: 200301 - DNA, 15 bp, Homo sapiens
ttaagagagactgta

SEQ ID NO: 200302 - DNA, 15 bp, Homo sapiens
attaagagagactgt

SEQ ID NO: 200303 - DNA, 15 bp, Homo sapiens
tattaagagagactg

SEQ ID NO: 200304 - DNA, 15 bp, Homo sapiens
atattaagagagact

SEQ ID NO: 200305 - DNA, 15 bp, Homo sapiens
aatattaagagagac

SEQ ID NO: 200306 - DNA, 15 bp, Homo sapiens
caatattaagagaga

SEQ ID NO: 200307 - DNA, 15 bp, Homo sapiens
acaatattaagagag

SEQ ID NO: 200308 - DNA, 15 bp, Homo sapiens
tacaatattaagaga

SEQ ID NO: 200309 - DNA, 15 bp, Homo sapiens
atacaatattaagag

SEQ ID NO: 200310 - DNA, 15 bp, Homo sapiens
tatacaatattaaga

SEQ ID NO: 200311 - DNA, 15 bp, Homo sapiens
atatacaatattaag

SEQ ID NO: 200312 - DNA, 15 bp, Homo sapiens
aatatacaatattaa

SEQ ID NO: 200313 - DNA, 15 bp, Homo sapiens
taatatacaatatta

SEQ ID NO: 200314 - DNA, 15 bp, Homo sapiens
ataatatacaatatt

SEQ ID NO: 200315 - DNA, 15 bp, Homo sapiens
gataatatacaatat

SEQ ID NO: 200316 - DNA, 15 bp, Homo sapiens
ggataatatacaata

SEQ ID NO: 200317 - DNA, 15 bp, Homo sapiens
tggataatatacaat

SEQ ID NO: 200318 - DNA, 15 bp, Homo sapiens
ttggataatatacaa

SEQ ID NO: 200319 - DNA, 15 bp, Homo sapiens
cttggataatataca

SEQ ID NO: 200320 - DNA, 15 bp, Homo sapiens
tcttggataatatac

SEQ ID NO: 200321 - DNA, 15 bp, Homo sapiens
ttcttggataatata

SEQ ID NO: 200322 - DNA, 15 bp, Homo sapiens
tttcttggataatat

SEQ ID NO: 200323 - DNA, 15 bp, Homo sapiens
atttcttggataata

SEQ ID NO: 200324 - DNA, 15 bp, Homo sapiens
aatttcttggataat

SEQ ID NO: 200325 - DNA, 15 bp, Homo sapiens
aaatttcttggataa

SEQ ID NO: 200326 - DNA, 15 bp, Homo sapiens
gaaatttcttggata

SEQ ID NO: 200327 - DNA, 15 bp, Homo sapiens
tgaaatttcttggat

SEQ ID NO: 200328 - DNA, 15 bp, Homo sapiens
atgaaatttcttgga

SEQ ID NO: 200329 - DNA, 15 bp, Homo sapiens
aatgaaatttcttgg

SEQ ID NO: 200330 - DNA, 15 bp, Homo sapiens
aaatgaaatttcttg

SEQ ID NO: 200331 - DNA, 15 bp, Homo sapiens
taaatgaaatttctt

SEQ ID NO: 200332 - DNA, 15 bp, Homo sapiens
ttaaatgaaatttct

SEQ ID NO: 200333 - DNA, 15 bp, Homo sapiens
attaaatgaaatttc

SEQ ID NO: 200334 - DNA, 15 bp, Homo sapiens
gattaaatgaaattt

SEQ ID NO: 200335 - DNA, 15 bp, Homo sapiens
tgattaaatgaaatt

SEQ ID NO: 200336 - DNA, 15 bp, Homo sapiens
ctgattaaatgaaat

SEQ ID NO: 200337 - DNA, 15 bp, Homo sapiens
tctgattaaatgaaa

SEQ ID NO: 200338 - DNA, 15 bp, Homo sapiens
ttctgattaaatgaa

SEQ ID NO: 200339 - DNA, 15 bp, Homo sapiens
gttctgattaaatga

SEQ ID NO: 200340 - DNA, 15 bp, Homo sapiens
ggttctgattaaatg

SEQ ID NO: 200341 - DNA, 15 bp, Homo sapiens
aggttctgattaaat

SEQ ID NO: 200342 - DNA, 15 bp, Homo sapiens
caggttctgattaaa

SEQ ID NO: 200343 - DNA, 15 bp, Homo sapiens
gcaggttctgattaa

SEQ ID NO: 200344 - DNA, 15 bp, Homo sapiens
ggcaggttctgatta

SEQ ID NO: 200345 - DNA, 15 bp, Homo sapiens
tggcaggttctgatt

SEQ ID NO: 200346 - DNA, 15 bp, Homo sapiens
ctggcaggttctgat

SEQ ID NO: 200347 - DNA, 15 bp, Homo sapiens
actggcaggttctga

SEQ ID NO: 200348 - DNA, 15 bp, Homo sapiens
gactggcaggttctg

SEQ ID NO: 200349 - DNA, 15 bp, Homo sapiens
agactggcaggttct

SEQ ID NO: 200350 - DNA, 15 bp, Homo sapiens
cagactggcaggttc

SEQ ID NO: 200351 - DNA, 15 bp, Homo sapiens
tcagactggcaggtt

SEQ ID NO: 200352 - DNA, 15 bp, Homo sapiens
atcagactggcaggt

SEQ ID NO: 200353 - DNA, 15 bp, Homo sapiens
tatcagactggcagg

SEQ ID NO: 200354 - DNA, 15 bp, Homo sapiens
ctatcagactggcag

SEQ ID NO: 200355 - DNA, 15 bp, Homo sapiens
cctatcagactggca

SEQ ID NO: 200356 - DNA, 15 bp, Homo sapiens
acctatcagactggc

SEQ ID NO: 200357 - DNA, 15 bp, Homo sapiens
cacctatcagactgg

SEQ ID NO: 200358 - DNA, 15 bp, Homo sapiens
tcacctatcagactg

SEQ ID NO: 200359 - DNA, 15 bp, Homo sapiens
ttcacctatcagact

SEQ ID NO: 200360 - DNA, 15 bp, Homo sapiens
tttcacctatcagac

SEQ ID NO: 200361 - DNA, 15 bp, Homo sapiens
ttttcacctatcaga

SEQ ID NO: 200362 - DNA, 15 bp, Homo sapiens
attttcacctatcag

SEQ ID NO: 200363 - DNA, 15 bp, Homo sapiens
cattttcacctatca

SEQ ID NO: 200364 - DNA, 15 bp, Homo sapiens
ccattttcacctatc

SEQ ID NO: 200365 - DNA, 15 bp, Homo sapiens
accattttcacctat

SEQ ID NO: 200366 - DNA, 15 bp, Homo sapiens
taccattttcaccta

SEQ ID NO: 200367 - DNA, 15 bp, Homo sapiens
ataccattttcacct

SEQ ID NO: 200368 - DNA, 15 bp, Homo sapiens
gataccattttcacc

SEQ ID NO: 200369 - DNA, 15 bp, Homo sapiens
agataccattttcac

SEQ ID NO: 200370 - DNA, 15 bp, Homo sapiens
aagataccattttca

SEQ ID NO: 200371 - DNA, 15 bp, Homo sapiens
caagataccattttc

SEQ ID NO: 200372 - DNA, 15 bp, Homo sapiens
acaagataccatttt

SEQ ID NO: 200373 - DNA, 15 bp, Homo sapiens
aacaagataccattt

SEQ ID NO: 200374 - DNA, 15 bp, Homo sapiens
aaacaagataccatt

SEQ ID NO: 200375 - DNA, 15 bp, Homo sapiens
aaaacaagataccat

SEQ ID NO: 200376 - DNA, 15 bp, Homo sapiens
aaaaacaagatacca

SEQ ID NO: 200377 - DNA, 15 bp, Homo sapiens
taaaaacaagatacc

SEQ ID NO: 200378 - DNA, 15 bp, Homo sapiens
ataaaaacaagatac

SEQ ID NO: 200379 - DNA, 15 bp, Homo sapiens
aataaaaacaagata

SEQ ID NO: 200380 - DNA, 15 bp, Homo sapiens
aaataaaaacaagat

SEQ ID NO: 200381 - DNA, 15 bp, Homo sapiens
caaataaaaacaaga

SEQ ID NO: 200382 - DNA, 15 bp, Homo sapiens
gcaaataaaaacaag

SEQ ID NO: 200383 - DNA, 15 bp, Homo sapiens
tgcaaataaaaacaa

SEQ ID NO: 200384 - DNA, 15 bp, Homo sapiens
atgcaaataaaaaca

SEQ ID NO: 200385 - DNA, 15 bp, Homo sapiens
aatgcaaataaaaac

SEQ ID NO: 200386 - DNA, 15 bp, Homo sapiens
aaatgcaaataaaaa

SEQ ID NO: 200387 - DNA, 15 bp, Homo sapiens
taaatgcaaataaaa

SEQ ID NO: 200388 - DNA, 15 bp, Homo sapiens
ttaaatgcaaataaa

SEQ ID NO: 200389 - DNA, 15 bp, Homo sapiens
tttaaatgcaaataa

SEQ ID NO: 200390 - DNA, 15 bp, Homo sapiens
ttttaaatgcaaata

SEQ ID NO: 200391 - DNA, 15 bp, Homo sapiens
tttttaaatgcaaat

SEQ ID NO: 200392 - DNA, 15 bp, Homo sapiens
ttttttaaatgcaaa

SEQ ID NO: 200393 - DNA, 15 bp, Homo sapiens
tttttttaaatgcaa

SEQ ID NO: 200394 - DNA, 15 bp, Homo sapiens
ttttttttaaatgca

SEQ ID NO: 200395 - DNA, 15 bp, Homo sapiens
attttttttaaatgc

SEQ ID NO: 200396 - DNA, 15 bp, Homo sapiens
aattttttttaaatg

SEQ ID NO: 200397 - DNA, 15 bp, Homo sapiens
taattttttttaaat

SEQ ID NO: 200398 - DNA, 15 bp, Homo sapiens
ataattttttttaaa

SEQ ID NO: 200399 - DNA, 15 bp, Homo sapiens
cataattttttttaa

SEQ ID NO: 200400 - DNA, 15 bp, Homo sapiens
tcataatttttttta

SEQ ID NO: 200401 - DNA, 15 bp, Homo sapiens
atcataatttttttt

SEQ ID NO: 200402 - DNA, 15 bp, Homo sapiens
tatcataattttttt

SEQ ID NO: 200403 - DNA, 15 bp, Homo sapiens
ctatcataatttttt

SEQ ID NO: 200404 - DNA, 15 bp, Homo sapiens
actatcataattttt

SEQ ID NO: 200405 - DNA, 15 bp, Homo sapiens
cactatcataatttt

SEQ ID NO: 200406 - DNA, 15 bp, Homo sapiens
ccactatcataattt

SEQ ID NO: 200407 - DNA, 15 bp, Homo sapiens
accactatcataatt

SEQ ID NO: 200408 - DNA, 15 bp, Homo sapiens
taccactatcataat

SEQ ID NO: 200409 - DNA, 15 bp, Homo sapiens
ataccactatcataa

SEQ ID NO: 200410 - DNA, 15 bp, Homo sapiens
cataccactatcata

SEQ ID NO: 200411 - DNA, 15 bp, Homo sapiens
gcataccactatcat

SEQ ID NO: 200412 - DNA, 15 bp, Homo sapiens
agcataccactatca

SEQ ID NO: 200413 - DNA, 15 bp, Homo sapiens
aagcataccactatc

SEQ ID NO: 200414 - DNA, 15 bp, Homo sapiens
caagcataccactat

SEQ ID NO: 200415 - DNA, 15 bp, Homo sapiens
ccaagcataccacta

SEQ ID NO: 200416 - DNA, 15 bp, Homo sapiens
accaagcataccact

SEQ ID NO: 200417 - DNA, 15 bp, Homo sapiens
aaccaagcataccac

SEQ ID NO: 200418 - DNA, 15 bp, Homo sapiens
aaaccaagcatacca

SEQ ID NO: 200419 - DNA, 15 bp, Homo sapiens
aaaaccaagcatacc

SEQ ID NO: 200420 - DNA, 15 bp, Homo sapiens
aaaaaccaagcatac

SEQ ID NO: 200421 - DNA, 15 bp, Homo sapiens
aaaaaaccaagcata

SEQ ID NO: 200422 - DNA, 15 bp, Homo sapiens
aaaaaaaccaagcat

SEQ ID NO: 200423 - DNA, 15 bp, Homo sapiens
caaaaaaaccaagca

SEQ ID NO: 200424 - DNA, 15 bp, Homo sapiens
tcaaaaaaaccaagc

SEQ ID NO: 200425 - DNA, 15 bp, Homo sapiens
ttcaaaaaaaccaag

SEQ ID NO: 200426 - DNA, 15 bp, Homo sapiens
cttcaaaaaaaccaa

SEQ ID NO: 200427 - DNA, 15 bp, Homo sapiens
ccttcaaaaaaacca

SEQ ID NO: 200428 - DNA, 15 bp, Homo sapiens
accttcaaaaaaacc

SEQ ID NO: 200429 - DNA, 15 bp, Homo sapiens
taccttcaaaaaaac

SEQ ID NO: 200430 - DNA, 15 bp, Homo sapiens
ataccttcaaaaaaa

SEQ ID NO: 200431 - DNA, 15 bp, Homo sapiens
gataccttcaaaaaa

SEQ ID NO: 200432 - DNA, 15 bp, Homo sapiens
tgataccttcaaaaa

SEQ ID NO: 200433 - DNA, 15 bp, Homo sapiens
ttgataccttcaaaa

SEQ ID NO: 200434 - DNA, 15 bp, Homo sapiens
tttgataccttcaaa

SEQ ID NO: 200435 - DNA, 15 bp, Homo sapiens
atttgataccttcaa

SEQ ID NO: 200436 - DNA, 15 bp, Homo sapiens
aatttgataccttca

SEQ ID NO: 200437 - DNA, 15 bp, Homo sapiens
aaatttgataccttc

SEQ ID NO: 200438 - DNA, 15 bp, Homo sapiens
aaaatttgatacctt

SEQ ID NO: 200439 - DNA, 15 bp, Homo sapiens
aaaaatttgatacct

SEQ ID NO: 200440 - DNA, 15 bp, Homo sapiens
aaaaaatttgatacc

SEQ ID NO: 200441 - DNA, 15 bp, Homo sapiens
taaaaaatttgatac

SEQ ID NO: 200442 - DNA, 15 bp, Homo sapiens
gtaaaaaatttgata

SEQ ID NO: 200443 - DNA, 15 bp, Homo sapiens
ggtaaaaaatttgat

SEQ ID NO: 200444 - DNA, 15 bp, Homo sapiens
aggtaaaaaatttga

SEQ ID NO: 200445 - DNA, 15 bp, Homo sapiens
aaggtaaaaaatttg

SEQ ID NO: 200446 - DNA, 15 bp, Homo sapiens
taaggtaaaaaattt

SEQ ID NO: 200447 - DNA, 15 bp, Homo sapiens
ataaggtaaaaaatt

SEQ ID NO: 200448 - DNA, 15 bp, Homo sapiens
cataaggtaaaaaat

SEQ ID NO: 200449 - DNA, 15 bp, Homo sapiens
tcataaggtaaaaaa

SEQ ID NO: 200450 - DNA, 15 bp, Homo sapiens
ttcataaggtaaaaa

SEQ ID NO: 200451 - DNA, 15 bp, Homo sapiens
tttcataaggtaaaa

SEQ ID NO: 200452 - DNA, 15 bp, Homo sapiens
gtttcataaggtaaa

SEQ ID NO: 200453 - DNA, 15 bp, Homo sapiens
tgtttcataaggtaa

SEQ ID NO: 200454 - DNA, 15 bp, Homo sapiens
atgtttcataaggta

SEQ ID NO: 200455 - DNA, 15 bp, Homo sapiens
catgtttcataaggt

SEQ ID NO: 200456 - DNA, 15 bp, Homo sapiens
tcatgtttcataagg

SEQ ID NO: 200457 - DNA, 15 bp, Homo sapiens
ctcatgtttcataag

SEQ ID NO: 200458 - DNA, 15 bp, Homo sapiens
cctcatgtttcataa

SEQ ID NO: 200459 - DNA, 15 bp, Homo sapiens
ccctcatgtttcata

SEQ ID NO: 200460 - DNA, 15 bp, Homo sapiens
gccctcatgtttcat

SEQ ID NO: 200461 - DNA, 15 bp, Homo sapiens
tgccctcatgtttca

SEQ ID NO: 200462 - DNA, 15 bp, Homo sapiens
ttgccctcatgtttc

SEQ ID NO: 200463 - DNA, 15 bp, Homo sapiens
tttgccctcatgttt

SEQ ID NO: 200464 - DNA, 15 bp, Homo sapiens
ctttgccctcatgtt

SEQ ID NO: 200465 - DNA, 15 bp, Homo sapiens
cctttgccctcatgt

SEQ ID NO: 200466 - DNA, 15 bp, Homo sapiens
tcctttgccctcatg

SEQ ID NO: 200467 - DNA, 15 bp, Homo sapiens
atcctttgccctcat

SEQ ID NO: 200468 - DNA, 15 bp, Homo sapiens
catcctttgccctca

SEQ ID NO: 200469 - DNA, 15 bp, Homo sapiens
acatcctttgccctc

SEQ ID NO: 200470 - DNA, 15 bp, Homo sapiens
cacatcctttgccct

SEQ ID NO: 200471 - DNA, 15 bp, Homo sapiens
acacatcctttgccc

SEQ ID NO: 200472 - DNA, 15 bp, Homo sapiens
aacacatcctttgcc

SEQ ID NO: 200473 - DNA, 15 bp, Homo sapiens
taacacatcctttgc

SEQ ID NO: 200474 - DNA, 15 bp, Homo sapiens
gtaacacatcctttg

SEQ ID NO: 200475 - DNA, 15 bp, Homo sapiens
cgtaacacatccttt

SEQ ID NO: 200476 - DNA, 15 bp, Homo sapiens
acgtaacacatcctt

SEQ ID NO: 200477 - DNA, 15 bp, Homo sapiens
cacgtaacacatcct

SEQ ID NO: 200478 - DNA, 15 bp, Homo sapiens
ccacgtaacacatcc

SEQ ID NO: 200479 - DNA, 15 bp, Homo sapiens
tccacgtaacacatc

SEQ ID NO: 200480 - DNA, 15 bp, Homo sapiens
ttccacgtaacacat

SEQ ID NO: 200481 - DNA, 15 bp, Homo sapiens
cttccacgtaacaca

SEQ ID NO: 200482 - DNA, 15 bp, Homo sapiens
tcttccacgtaacac

SEQ ID NO: 200483 - DNA, 15 bp, Homo sapiens
atcttccacgtaaca

SEQ ID NO: 200484 - DNA, 15 bp, Homo sapiens
aatcttccacgtaac

SEQ ID NO: 200485 - DNA, 15 bp, Homo sapiens
aaatcttccacgtaa

SEQ ID NO: 200486 - DNA, 15 bp, Homo sapiens
taaatcttccacgta

SEQ ID NO: 200487 - DNA, 15 bp, Homo sapiens
ttaaatcttccacgt

SEQ ID NO: 200488 - DNA, 15 bp, Homo sapiens
tttaaatcttccacg

SEQ ID NO: 200489 - DNA, 15 bp, Homo sapiens
ttttaaatcttccac

SEQ ID NO: 200490 - DNA, 15 bp, Homo sapiens
tttttaaatcttcca

SEQ ID NO: 200491 - DNA, 15 bp, Homo sapiens
ttttttaaatcttcc

SEQ ID NO: 200492 - DNA, 15 bp, Homo sapiens
tttttttaaatcttc

SEQ ID NO: 200493 - DNA, 15 bp, Homo sapiens
ttttttttaaatctt

SEQ ID NO: 200494 - DNA, 15 bp, Homo sapiens
attttttttaaatct

SEQ ID NO: 200495 - DNA, 15 bp, Homo sapiens
aattttttttaaatc

SEQ ID NO: 200496 - DNA, 15 bp, Homo sapiens
aaattttttttaaat

SEQ ID NO: 200497 - DNA, 15 bp, Homo sapiens
aaaattttttttaaa

SEQ ID NO: 200498 - DNA, 15 bp, Homo sapiens
aaaaattttttttaa

SEQ ID NO: 200499 - DNA, 15 bp, Homo sapiens
taaaaatttttttta

SEQ ID NO: 200500 - DNA, 15 bp, Homo sapiens
ttaaaaatttttttt

SEQ ID NO: 200501 - DNA, 15 bp, Homo sapiens
attaaaaattttttt

SEQ ID NO: 200502 - DNA, 15 bp, Homo sapiens
cattaaaaatttttt

SEQ ID NO: 200503 - DNA, 15 bp, Homo sapiens
gcattaaaaattttt

SEQ ID NO: 200504 - DNA, 15 bp, Homo sapiens
tgcattaaaaatttt

SEQ ID NO: 200505 - DNA, 15 bp, Homo sapiens
atgcattaaaaattt

SEQ ID NO: 200506 - DNA, 15 bp, Homo sapiens
aatgcattaaaaatt

SEQ ID NO: 200507 - DNA, 15 bp, Homo sapiens
aaatgcattaaaaat

SEQ ID NO: 200508 - DNA, 15 bp, Homo sapiens
aaaatgcattaaaaa

SEQ ID NO: 200509 - DNA, 15 bp, Homo sapiens
aaaaatgcattaaaa

SEQ ID NO: 200510 - DNA, 15 bp, Homo sapiens
aaaaaatgcattaaa

SEQ ID NO: 200511 - DNA, 15 bp, Homo sapiens
aaaaaaatgcattaa

SEQ ID NO: 200512 - DNA, 15 bp, Homo sapiens
caaaaaaatgcatta

SEQ ID NO: 200513 - DNA, 15 bp, Homo sapiens
tcaaaaaaatgcatt

SEQ ID NO: 200514 - DNA, 15 bp, Homo sapiens
ctcaaaaaaatgcat

SEQ ID NO: 200515 - DNA, 15 bp, Homo sapiens
tctcaaaaaaatgca

SEQ ID NO: 200516 - DNA, 15 bp, Homo sapiens
gtctcaaaaaaatgc

SEQ ID NO: 200517 - DNA, 15 bp, Homo sapiens
tgtctcaaaaaaatg

SEQ ID NO: 200518 - DNA, 15 bp, Homo sapiens
ttgtctcaaaaaaat

SEQ ID NO: 200519 - DNA, 15 bp, Homo sapiens
aagaccttgtctcaa

SEQ ID NO: 200520 - DNA, 15 bp, Homo sapiens
caagaccttgtctca

SEQ ID NO: 200521 - DNA, 15 bp, Homo sapiens
gcaagaccttgtctc

SEQ ID NO: 200522 - DNA, 15 bp, Homo sapiens
agcaagaccttgtct

SEQ ID NO: 200523 - DNA, 15 bp, Homo sapiens
gagcaagaccttgtc

SEQ ID NO: 200524 - DNA, 15 bp, Homo sapiens
agagcaagaccttgt

SEQ ID NO: 200525 - DNA, 15 bp, Homo sapiens
tagagcaagaccttg

SEQ ID NO: 200526 - DNA, 15 bp, Homo sapiens
atagagcaagacctt

SEQ ID NO: 200527 - DNA, 15 bp, Homo sapiens
aatagagcaagacct

SEQ ID NO: 200528 - DNA, 15 bp, Homo sapiens
caatagagcaagacc

SEQ ID NO: 200529 - DNA, 15 bp, Homo sapiens
acaatagagcaagac

SEQ ID NO: 200530 - DNA, 15 bp, Homo sapiens
gacaatagagcaaga

SEQ ID NO: 200531 - DNA, 15 bp, Homo sapiens
ggacaatagagcaag

SEQ ID NO: 200532 - DNA, 15 bp, Homo sapiens
tggacaatagagcaa

SEQ ID NO: 200533 - DNA, 15 bp, Homo sapiens
ctggacaatagagca

SEQ ID NO: 200534 - DNA, 15 bp, Homo sapiens
cctggacaatagagc

SEQ ID NO: 200535 - DNA, 15 bp, Homo sapiens
gcctggacaatagag

SEQ ID NO: 200536 - DNA, 15 bp, Homo sapiens
agcctggacaataga

SEQ ID NO: 200537 - DNA, 15 bp, Homo sapiens
cagcctggacaatag

SEQ ID NO: 200538 - DNA, 15 bp, Homo sapiens
ccagcctggacaata

SEQ ID NO: 200539 - DNA, 15 bp, Homo sapiens
tccagcctggacaat

SEQ ID NO: 200540 - DNA, 15 bp, Homo sapiens
ctccagcctggacaa

SEQ ID NO: 200541 - DNA, 15 bp, Homo sapiens
actccagcctggaca

SEQ ID NO: 200542 - DNA, 15 bp, Homo sapiens
cactccagcctggac

SEQ ID NO: 200543 - DNA, 15 bp, Homo sapiens
gcactccagcctgga

SEQ ID NO: 200544 - DNA, 15 bp, Homo sapiens
tgtgattgtgccact

SEQ ID NO: 200545 - DNA, 15 bp, Homo sapiens
ctgtgattgtgccac

SEQ ID NO: 200546 - DNA, 15 bp, Homo sapiens
actgtgattgtgcca

SEQ ID NO: 200547 - DNA, 15 bp, Homo sapiens
aactgtgattgtgcc

SEQ ID NO: 200548 - DNA, 15 bp, Homo sapiens
gaactgtgattgtgc

SEQ ID NO: 200549 - DNA, 15 bp, Homo sapiens
tgaactgtgattgtg

SEQ ID NO: 200550 - DNA, 15 bp, Homo sapiens
gtgaactgtgattgt

SEQ ID NO: 200551 - DNA, 15 bp, Homo sapiens
agtgaactgtgattg

SEQ ID NO: 200552 - DNA, 15 bp, Homo sapiens
gagtgaactgtgatt

SEQ ID NO: 200553 - DNA, 15 bp, Homo sapiens
ggagtgaactgtgat

SEQ ID NO: 200554 - DNA, 15 bp, Homo sapiens
tggagtgaactgtga

SEQ ID NO: 200555 - DNA, 15 bp, Homo sapiens
ctggagtgaactgtg

SEQ ID NO: 200556 - DNA, 15 bp, Homo sapiens
gctggagtgaactgt

SEQ ID NO: 200557 - DNA, 15 bp, Homo sapiens
ggctggagtgaactg

SEQ ID NO: 200558 - DNA, 15 bp, Homo sapiens
aggctggagtgaact

SEQ ID NO: 200559 - DNA, 15 bp, Homo sapiens
gaggctggagtgaac

SEQ ID NO: 200560 - DNA, 15 bp, Homo sapiens
tgaggctggagtgaa

SEQ ID NO: 200561 - DNA, 15 bp, Homo sapiens
ttgaggctggagtga

SEQ ID NO: 200562 - DNA, 15 bp, Homo sapiens
gttgaggctggagtg

SEQ ID NO: 200563 - DNA, 15 bp, Homo sapiens
tgttgaggctggagt

SEQ ID NO: 200564 - DNA, 15 bp, Homo sapiens
atgttgaggctggag

SEQ ID NO: 200565 - DNA, 15 bp, Homo sapiens
gatgttgaggctgga

SEQ ID NO: 200566 - DNA, 15 bp, Homo sapiens
ggatgttgaggctgg

SEQ ID NO: 200567 - DNA, 15 bp, Homo sapiens
aggatgttgaggctg

SEQ ID NO: 200568 - DNA, 15 bp, Homo sapiens
caggatgttgaggct

SEQ ID NO: 200569 - DNA, 15 bp, Homo sapiens
gcaggatgttgaggc

SEQ ID NO: 200570 - DNA, 15 bp, Homo sapiens
tgcaggatgttgagg

SEQ ID NO: 200571 - DNA, 15 bp, Homo sapiens
gtgcaggatgttgag

SEQ ID NO: 200572 - DNA, 15 bp, Homo sapiens
agtgcaggatgttga

SEQ ID NO: 200573 - DNA, 15 bp, Homo sapiens
tagtgcaggatgttg

SEQ ID NO: 200574 - DNA, 15 bp, Homo sapiens
ttagtgcaggatgtt

SEQ ID NO: 200575 - DNA, 15 bp, Homo sapiens
tttagtgcaggatgt

SEQ ID NO: 200576 - DNA, 15 bp, Homo sapiens
ctttagtgcaggatg

SEQ ID NO: 200577 - DNA, 15 bp, Homo sapiens
actttagtgcaggat

SEQ ID NO: 200578 - DNA, 15 bp, Homo sapiens
cactttagtgcagga

SEQ ID NO: 200579 - DNA, 15 bp, Homo sapiens
tcactttagtgcagg

SEQ ID NO: 200580 - DNA, 15 bp, Homo sapiens
atcactttagtgcag

SEQ ID NO: 200581 - DNA, 15 bp, Homo sapiens
aatcactttagtgca

SEQ ID NO: 200582 - DNA, 15 bp, Homo sapiens
aaatcactttagtgc

SEQ ID NO: 200583 - DNA, 15 bp, Homo sapiens
aaaatcactttagtg

SEQ ID NO: 200584 - DNA, 15 bp, Homo sapiens
gaaaatcactttagt

SEQ ID NO: 200585 - DNA, 15 bp, Homo sapiens
ggaaaatcactttag

SEQ ID NO: 200586 - DNA, 15 bp, Homo sapiens
gggaaaatcacttta

SEQ ID NO: 200587 - DNA, 15 bp, Homo sapiens
tgggaaaatcacttt

SEQ ID NO: 200588 - DNA, 15 bp, Homo sapiens
gtgggaaaatcactt

SEQ ID NO: 200589 - DNA, 15 bp, Homo sapiens
ggtgggaaaatcact

SEQ ID NO: 200590 - DNA, 15 bp, Homo sapiens
aggtgggaaaatcac

SEQ ID NO: 200591 - DNA, 15 bp, Homo sapiens
gaggtgggaaaatca

SEQ ID NO: 200592 - DNA, 15 bp, Homo sapiens
tgaggtgggaaaatc

SEQ ID NO: 200593 - DNA, 15 bp, Homo sapiens
gtgaggtgggaaaat

SEQ ID NO: 200594 - DNA, 15 bp, Homo sapiens
ggtgaggtgggaaaa

SEQ ID NO: 200595 - DNA, 15 bp, Homo sapiens
aggtgaggtgggaaa

SEQ ID NO: 200596 - DNA, 15 bp, Homo sapiens
gaggtgaggtgggaa

SEQ ID NO: 200597 - DNA, 15 bp, Homo sapiens
agaggtgaggtggga

SEQ ID NO: 200598 - DNA, 15 bp, Homo sapiens
gagaggtgaggtggg

SEQ ID NO: 200599 - DNA, 15 bp, Homo sapiens
tgagaggtgaggtgg

SEQ ID NO: 200600 - DNA, 15 bp, Homo sapiens
ttgagaggtgaggtg

SEQ ID NO: 200601 - DNA, 15 bp, Homo sapiens
cttgagaggtgaggt

SEQ ID NO: 200602 - DNA, 15 bp, Homo sapiens
acttgagaggtgagg

SEQ ID NO: 200603 - DNA, 15 bp, Homo sapiens
tacttgagaggtgag

SEQ ID NO: 200604 - DNA, 15 bp, Homo sapiens
ctacttgagaggtga

SEQ ID NO: 200605 - DNA, 15 bp, Homo sapiens
gctacttgagaggtg

SEQ ID NO: 200606 - DNA, 15 bp, Homo sapiens
agctacttgagaggt

SEQ ID NO: 200607 - DNA, 15 bp, Homo sapiens
cagctacttgagagg

SEQ ID NO: 200608 - DNA, 15 bp, Homo sapiens
ccagctacttgagag

SEQ ID NO: 200609 - DNA, 15 bp, Homo sapiens
cccagctacttgaga

SEQ ID NO: 200610 - DNA, 15 bp, Homo sapiens
tcccagctacttgag

SEQ ID NO: 200611 - DNA, 15 bp, Homo sapiens
gtcccagctacttga

SEQ ID NO: 200612 - DNA, 15 bp, Homo sapiens
gtacctgtagtccca

SEQ ID NO: 200613 - DNA, 15 bp, Homo sapiens
tgtacctgtagtccc

SEQ ID NO: 200614 - DNA, 15 bp, Homo sapiens
atgtacctgtagtcc

SEQ ID NO: 200615 - DNA, 15 bp, Homo sapiens
catgtacctgtagtc

SEQ ID NO: 200616 - DNA, 15 bp, Homo sapiens
gcatgtacctgtagt

SEQ ID NO: 200617 - DNA, 15 bp, Homo sapiens
agcatgtacctgtag

SEQ ID NO: 200618 - DNA, 15 bp, Homo sapiens
tagcatgtacctgta

SEQ ID NO: 200619 - DNA, 15 bp, Homo sapiens
gtagcatgtacctgt

SEQ ID NO: 200620 - DNA, 15 bp, Homo sapiens
ggtagcatgtacctg

SEQ ID NO: 200621 - DNA, 15 bp, Homo sapiens
tggtagcatgtacct

SEQ ID NO: 200622 - DNA, 15 bp, Homo sapiens
atggtagcatgtacc

SEQ ID NO: 200623 - DNA, 15 bp, Homo sapiens
catggtagcatgtac

SEQ ID NO: 200624 - DNA, 15 bp, Homo sapiens
gcatggtagcatgta

SEQ ID NO: 200625 - DNA, 15 bp, Homo sapiens
ggcatggtagcatgt

SEQ ID NO: 200626 - DNA, 15 bp, Homo sapiens
aggcatggtagcatg

SEQ ID NO: 200627 - DNA, 15 bp, Homo sapiens
caggcatggtagcat

SEQ ID NO: 200628 - DNA, 15 bp, Homo sapiens
ccaggcatggtagca

SEQ ID NO: 200629 - DNA, 15 bp, Homo sapiens
gccaggcatggtagc

SEQ ID NO: 200630 - DNA, 15 bp, Homo sapiens
agccaggcatggtag

SEQ ID NO: 200631 - DNA, 15 bp, Homo sapiens
tagccaggcatggta

SEQ ID NO: 200632 - DNA, 15 bp, Homo sapiens
aaaaaaaaaaattag

SEQ ID NO: 200633 - DNA, 15 bp, Homo sapiens
aaaaaaaaaaaatta

SEQ ID NO: 200634 - DNA, 15 bp, Homo sapiens
aaaaaaaaaaaaatt

SEQ ID NO: 200635 - DNA, 15 bp, Homo sapiens
caaaaaaaaaaaaat

SEQ ID NO: 200636 - DNA, 15 bp, Homo sapiens
gcaaaaaaaaaaaaa

SEQ ID NO: 200637 - DNA, 15 bp, Homo sapiens
tgcaaaaaaaaaaaa

SEQ ID NO: 200638 - DNA, 15 bp, Homo sapiens
ctgcaaaaaaaaaaa

SEQ ID NO: 200639 - DNA, 15 bp, Homo sapiens
cctgcaaaaaaaaaa

SEQ ID NO: 200640 - DNA, 15 bp, Homo sapiens
gcctgcaaaaaaaaa

SEQ ID NO: 200641 - DNA, 15 bp, Homo sapiens
tgcctgcaaaaaaaa

SEQ ID NO: 200642 - DNA, 15 bp, Homo sapiens
atgcctgcaaaaaaa

SEQ ID NO: 200643 - DNA, 15 bp, Homo sapiens
catgcctgcaaaaaa

SEQ ID NO: 200644 - DNA, 15 bp, Homo sapiens
ccatgcctgcaaaaa

SEQ ID NO: 200645 - DNA, 15 bp, Homo sapiens
cccatgcctgcaaaa

SEQ ID NO: 200646 - DNA, 15 bp, Homo sapiens
ccccatgcctgcaaa

SEQ ID NO: 200647 - DNA, 15 bp, Homo sapiens
accccatgcctgcaa

SEQ ID NO: 200648 - DNA, 15 bp, Homo sapiens
gaccccatgcctgca

SEQ ID NO: 200649 - DNA, 15 bp, Homo sapiens
agaccccatgcctgc

SEQ ID NO: 200650 - DNA, 15 bp, Homo sapiens
gagaccccatgcctg

SEQ ID NO: 200651 - DNA, 15 bp, Homo sapiens
tgagaccccatgcct

SEQ ID NO: 200652 - DNA, 15 bp, Homo sapiens
gtgagaccccatgcc

SEQ ID NO: 200653 - DNA, 15 bp, Homo sapiens
agtgagaccccatgc

SEQ ID NO: 200654 - DNA, 15 bp, Homo sapiens
cagtgagaccccatg

SEQ ID NO: 200655 - DNA, 15 bp, Homo sapiens
acagtgagaccccat

SEQ ID NO: 200656 - DNA, 15 bp, Homo sapiens
tacagtgagacccca

SEQ ID NO: 200657 - DNA, 15 bp, Homo sapiens
atacagtgagacccc

SEQ ID NO: 200658 - DNA, 15 bp, Homo sapiens
aatacagtgagaccc

SEQ ID NO: 200659 - DNA, 15 bp, Homo sapiens
caatacagtgagacc

SEQ ID NO: 200660 - DNA, 15 bp, Homo sapiens
gcaatacagtgagac

SEQ ID NO: 200661 - DNA, 15 bp, Homo sapiens
ggcaatacagtgaga

SEQ ID NO: 200662 - DNA, 15 bp, Homo sapiens
gggcaatacagtgag

SEQ ID NO: 200663 - DNA, 15 bp, Homo sapiens
tgggcaatacagtga

SEQ ID NO: 200664 - DNA, 15 bp, Homo sapiens
ctgggcaatacagtg

SEQ ID NO: 200665 - DNA, 15 bp, Homo sapiens
cctgggcaatacagt

SEQ ID NO: 200666 - DNA, 15 bp, Homo sapiens
acctgggcaatacag

SEQ ID NO: 200667 - DNA, 15 bp, Homo sapiens
aacctgggcaataca

SEQ ID NO: 200668 - DNA, 15 bp, Homo sapiens
caacctgggcaatac

SEQ ID NO: 200669 - DNA, 15 bp, Homo sapiens
ccaacctgggcaata

SEQ ID NO: 200670 - DNA, 15 bp, Homo sapiens
accaacctgggcaat

SEQ ID NO: 200671 - DNA, 15 bp, Homo sapiens
caccaacctgggcaa

SEQ ID NO: 200672 - DNA, 15 bp, Homo sapiens
acaccaacctgggca

SEQ ID NO: 200673 - DNA, 15 bp, Homo sapiens
cacaccaacctgggc

SEQ ID NO: 200674 - DNA, 15 bp, Homo sapiens
ccacaccaacctggg

SEQ ID NO: 200675 - DNA, 15 bp, Homo sapiens
tccacaccaacctgg

SEQ ID NO: 200676 - DNA, 15 bp, Homo sapiens
ttccacaccaacctg

SEQ ID NO: 200677 - DNA, 15 bp, Homo sapiens
cttccacaccaacct

SEQ ID NO: 200678 - DNA, 15 bp, Homo sapiens
acttccacaccaacc

SEQ ID NO: 200679 - DNA, 15 bp, Homo sapiens
aacttccacaccaac

SEQ ID NO: 200680 - DNA, 15 bp, Homo sapiens
aaacttccacaccaa

SEQ ID NO: 200681 - DNA, 15 bp, Homo sapiens
taaacttccacacca

SEQ ID NO: 200682 - DNA, 15 bp, Homo sapiens
ttaaacttccacacc

SEQ ID NO: 200683 - DNA, 15 bp, Homo sapiens
attaaacttccacac

SEQ ID NO: 200684 - DNA, 15 bp, Homo sapiens
cattaaacttccaca

SEQ ID NO: 200685 - DNA, 15 bp, Homo sapiens
tcattaaacttccac

SEQ ID NO: 200686 - DNA, 15 bp, Homo sapiens
gtcattaaacttcca

SEQ ID NO: 200687 - DNA, 15 bp, Homo sapiens
agtcattaaacttcc

SEQ ID NO: 200688 - DNA, 15 bp, Homo sapiens
tagtcattaaacttc

SEQ ID NO: 200689 - DNA, 15 bp, Homo sapiens
ttagtcattaaactt

SEQ ID NO: 200690 - DNA, 15 bp, Homo sapiens
cttagtcattaaact

SEQ ID NO: 200691 - DNA, 15 bp, Homo sapiens
tcttagtcattaaac

SEQ ID NO: 200692 - DNA, 15 bp, Homo sapiens
ctcttagtcattaaa

SEQ ID NO: 200693 - DNA, 15 bp, Homo sapiens
cctcttagtcattaa

SEQ ID NO: 200694 - DNA, 15 bp, Homo sapiens
acctcttagtcatta

SEQ ID NO: 200695 - DNA, 15 bp, Homo sapiens
cacctcttagtcatt

SEQ ID NO: 200696 - DNA, 15 bp, Homo sapiens
acacctcttagtcat

SEQ ID NO: 200697 - DNA, 15 bp, Homo sapiens
aacacctcttagtca

SEQ ID NO: 200698 - DNA, 15 bp, Homo sapiens
aaacacctcttagtc

SEQ ID NO: 200699 - DNA, 15 bp, Homo sapiens
caaacacctcttagt

SEQ ID NO: 200700 - DNA, 15 bp, Homo sapiens
acaaacacctcttag

SEQ ID NO: 200701 - DNA, 15 bp, Homo sapiens
aacaaacacctctta

SEQ ID NO: 200702 - DNA, 15 bp, Homo sapiens
taacaaacacctctt

SEQ ID NO: 200703 - DNA, 15 bp, Homo sapiens
ataacaaacacctct

SEQ ID NO: 200704 - DNA, 15 bp, Homo sapiens
tataacaaacacctc

SEQ ID NO: 200705 - DNA, 15 bp, Homo sapiens
ttataacaaacacct

SEQ ID NO: 200706 - DNA, 15 bp, Homo sapiens
tttataacaaacacc

SEQ ID NO: 200707 - DNA, 15 bp, Homo sapiens
ctttataacaaacac

SEQ ID NO: 200708 - DNA, 15 bp, Homo sapiens
actttataacaaaca

SEQ ID NO: 200709 - DNA, 15 bp, Homo sapiens
aactttataacaaac

SEQ ID NO: 200710 - DNA, 15 bp, Homo sapiens
aaactttataacaaa

SEQ ID NO: 200711 - DNA, 15 bp, Homo sapiens
taaactttataacaa

SEQ ID NO: 200712 - DNA, 15 bp, Homo sapiens
ttaaactttataaca

SEQ ID NO: 200713 - DNA, 15 bp, Homo sapiens
attaaactttataac

SEQ ID NO: 200714 - DNA, 15 bp, Homo sapiens
cattaaactttataa

SEQ ID NO: 200715 - DNA, 15 bp, Homo sapiens
acattaaactttata

SEQ ID NO: 200716 - DNA, 15 bp, Homo sapiens
tacattaaactttat

SEQ ID NO: 200717 - DNA, 15 bp, Homo sapiens
atacattaaacttta

SEQ ID NO: 200718 - DNA, 15 bp, Homo sapiens
catacattaaacttt

SEQ ID NO: 200719 - DNA, 15 bp, Homo sapiens
tcatacattaaactt

SEQ ID NO: 200720 - DNA, 15 bp, Homo sapiens
ttcatacattaaact

SEQ ID NO: 200721 - DNA, 15 bp, Homo sapiens
tttcatacattaaac

SEQ ID NO: 200722 - DNA, 15 bp, Homo sapiens
gtttcatacattaaa

SEQ ID NO: 200723 - DNA, 15 bp, Homo sapiens
agtttcatacattaa

SEQ ID NO: 200724 - DNA, 15 bp, Homo sapiens
aagtttcatacatta

SEQ ID NO: 200725 - DNA, 15 bp, Homo sapiens
aaagtttcatacatt

SEQ ID NO: 200726 - DNA, 15 bp, Homo sapiens
gaaagtttcatacat

SEQ ID NO: 200727 - DNA, 15 bp, Homo sapiens
agaaagtttcataca

SEQ ID NO: 200728 - DNA, 15 bp, Homo sapiens
tagaaagtttcatac

SEQ ID NO: 200729 - DNA, 15 bp, Homo sapiens
atagaaagtttcata

SEQ ID NO: 200730 - DNA, 15 bp, Homo sapiens
aatagaaagtttcat

SEQ ID NO: 200731 - DNA, 15 bp, Homo sapiens
taatagaaagtttca

SEQ ID NO: 200732 - DNA, 15 bp, Homo sapiens
ttaatagaaagtttc

SEQ ID NO: 200733 - DNA, 15 bp, Homo sapiens
tttaatagaaagttt

SEQ ID NO: 200734 - DNA, 15 bp, Homo sapiens
atttaatagaaagtt

SEQ ID NO: 200735 - DNA, 15 bp, Homo sapiens
aatttaatagaaagt

SEQ ID NO: 200736 - DNA, 15 bp, Homo sapiens
gaatttaatagaaag

SEQ ID NO: 200737 - DNA, 15 bp, Homo sapiens
ggaatttaatagaaa

SEQ ID NO: 200738 - DNA, 15 bp, Homo sapiens
aggaatttaatagaa

SEQ ID NO: 200739 - DNA, 15 bp, Homo sapiens
caggaatttaataga

SEQ ID NO: 200740 - DNA, 15 bp, Homo sapiens
tcaggaatttaatag

SEQ ID NO: 200741 - DNA, 15 bp, Homo sapiens
atcaggaatttaata

SEQ ID NO: 200742 - DNA, 15 bp, Homo sapiens
aatcaggaatttaat

SEQ ID NO: 200743 - DNA, 15 bp, Homo sapiens
aaatcaggaatttaa

SEQ ID NO: 200744 - DNA, 15 bp, Homo sapiens
aaaatcaggaattta

SEQ ID NO: 200745 - DNA, 15 bp, Homo sapiens
taaaatcaggaattt

SEQ ID NO: 200746 - DNA, 15 bp, Homo sapiens
ataaaatcaggaatt

SEQ ID NO: 200747 - DNA, 15 bp, Homo sapiens
aataaaatcaggaat

SEQ ID NO: 200748 - DNA, 15 bp, Homo sapiens
aaataaaatcaggaa

SEQ ID NO: 200749 - DNA, 15 bp, Homo sapiens
gaaataaaatcagga

SEQ ID NO: 200750 - DNA, 15 bp, Homo sapiens
agaaataaaatcagg

SEQ ID NO: 200751 - DNA, 15 bp, Homo sapiens
cagaaataaaatcag

SEQ ID NO: 200752 - DNA, 15 bp, Homo sapiens
acagaaataaaatca

SEQ ID NO: 200753 - DNA, 15 bp, Homo sapiens
tacagaaataaaatc

SEQ ID NO: 200754 - DNA, 15 bp, Homo sapiens
ctacagaaataaaat

SEQ ID NO: 200755 - DNA, 15 bp, Homo sapiens
cctacagaaataaaa

SEQ ID NO: 200756 - DNA, 15 bp, Homo sapiens
tcctacagaaataaa

SEQ ID NO: 200757 - DNA, 15 bp, Homo sapiens
gtcctacagaaataa

SEQ ID NO: 200758 - DNA, 15 bp, Homo sapiens
agtcctacagaaata

SEQ ID NO: 200759 - DNA, 15 bp, Homo sapiens
cagtcctacagaaat

SEQ ID NO: 200760 - DNA, 15 bp, Homo sapiens
tcagtcctacagaaa

SEQ ID NO: 200761 - DNA, 15 bp, Homo sapiens
ttcagtcctacagaa

SEQ ID NO: 200762 - DNA, 15 bp, Homo sapiens
gttcagtcctacaga

SEQ ID NO: 200763 - DNA, 15 bp, Homo sapiens
cgttcagtcctacag

SEQ ID NO: 200764 - DNA, 15 bp, Homo sapiens
acgttcagtcctaca

SEQ ID NO: 200765 - DNA, 15 bp, Homo sapiens
gacgttcagtcctac

SEQ ID NO: 200766 - DNA, 15 bp, Homo sapiens
agacgttcagtccta

SEQ ID NO: 200767 - DNA, 15 bp, Homo sapiens
aagacgttcagtcct

SEQ ID NO: 200768 - DNA, 15 bp, Homo sapiens
caagacgttcagtcc

SEQ ID NO: 200769 - DNA, 15 bp, Homo sapiens
gcaagacgttcagtc

SEQ ID NO: 200770 - DNA, 15 bp, Homo sapiens
agcaagacgttcagt

SEQ ID NO: 200771 - DNA, 15 bp, Homo sapiens
gagcaagacgttcag

SEQ ID NO: 200772 - DNA, 15 bp, Homo sapiens
cgagcaagacgttca

SEQ ID NO: 200773 - DNA, 15 bp, Homo sapiens
tcgagcaagacgttc

SEQ ID NO: 200774 - DNA, 15 bp, Homo sapiens
ctcgagcaagacgtt

SEQ ID NO: 200775 - DNA, 15 bp, Homo sapiens
tctcgagcaagacgt

SEQ ID NO: 200776 - DNA, 15 bp, Homo sapiens
atctcgagcaagacg

SEQ ID NO: 200777 - DNA, 15 bp, Homo sapiens
catctcgagcaagac

SEQ ID NO: 200778 - DNA, 15 bp, Homo sapiens
acatctcgagcaaga

SEQ ID NO: 200779 - DNA, 15 bp, Homo sapiens
cacatctcgagcaag

SEQ ID NO: 200780 - DNA, 15 bp, Homo sapiens
tcacatctcgagcaa

SEQ ID NO: 200781 - DNA, 15 bp, Homo sapiens
atcacatctcgagca

SEQ ID NO: 200782 - DNA, 15 bp, Homo sapiens
catcacatctcgagc

SEQ ID NO: 200783 - DNA, 15 bp, Homo sapiens
tcatcacatctcgag

SEQ ID NO: 200784 - DNA, 15 bp, Homo sapiens
ttcatcacatctcga

SEQ ID NO: 200785 - DNA, 15 bp, Homo sapiens
cttcatcacatctcg

SEQ ID NO: 200786 - DNA, 15 bp, Homo sapiens
ccttcatcacatctc

SEQ ID NO: 200787 - DNA, 15 bp, Homo sapiens
tccttcatcacatct

SEQ ID NO: 200788 - DNA, 15 bp, Homo sapiens
ctccttcatcacatc

SEQ ID NO: 200789 - DNA, 15 bp, Homo sapiens
tctccttcatcacat

SEQ ID NO: 200790 - DNA, 15 bp, Homo sapiens
atctccttcatcaca

SEQ ID NO: 200791 - DNA, 15 bp, Homo sapiens
catctccttcatcac

SEQ ID NO: 200792 - DNA, 15 bp, Homo sapiens
ccatctccttcatca

SEQ ID NO: 200793 - DNA, 15 bp, Homo sapiens
cccatctccttcatc

SEQ ID NO: 200794 - DNA, 15 bp, Homo sapiens
tcccatctccttcat

SEQ ID NO: 200795 - DNA, 15 bp, Homo sapiens
ctcccatctccttca

SEQ ID NO: 200796 - DNA, 15 bp, Homo sapiens
cctcccatctccttc

SEQ ID NO: 200797 - DNA, 15 bp, Homo sapiens
gcctcccatctcctt

SEQ ID NO: 200798 - DNA, 15 bp, Homo sapiens
ggcctcccatctcct

SEQ ID NO: 200799 - DNA, 15 bp, Homo sapiens
tggcctcccatctcc

SEQ ID NO: 200800 - DNA, 15 bp, Homo sapiens
atggcctcccatctc

SEQ ID NO: 200801 - DNA, 15 bp, Homo sapiens
gatggcctcccatct

SEQ ID NO: 200802 - DNA, 15 bp, Homo sapiens
tgatggcctcccatc

SEQ ID NO: 200803 - DNA, 15 bp, Homo sapiens
gtgatggcctcccat

SEQ ID NO: 200804 - DNA, 15 bp, Homo sapiens
tgtgatggcctccca

SEQ ID NO: 200805 - DNA, 15 bp, Homo sapiens
atgtgatggcctccc

SEQ ID NO: 200806 - DNA, 15 bp, Homo sapiens
aatgtgatggcctcc

SEQ ID NO: 200807 - DNA, 15 bp, Homo sapiens
caatgtgatggcctc

SEQ ID NO: 200808 - DNA, 15 bp, Homo sapiens
acaatgtgatggcct

SEQ ID NO: 200809 - DNA, 15 bp, Homo sapiens
tacaatgtgatggcc

SEQ ID NO: 200810 - DNA, 15 bp, Homo sapiens
ctacaatgtgatggc

SEQ ID NO: 200811 - DNA, 15 bp, Homo sapiens
gctacaatgtgatgg

SEQ ID NO: 200812 - DNA, 15 bp, Homo sapiens
ggctacaatgtgatg

SEQ ID NO: 200813 - DNA, 15 bp, Homo sapiens
gggctacaatgtgat

SEQ ID NO: 200814 - DNA, 15 bp, Homo sapiens
agggctacaatgtga

SEQ ID NO: 200815 - DNA, 15 bp, Homo sapiens
gagggctacaatgtg

SEQ ID NO: 200816 - DNA, 15 bp, Homo sapiens
agagggctacaatgt

SEQ ID NO: 200817 - DNA, 15 bp, Homo sapiens
cagagggctacaatg

SEQ ID NO: 200818 - DNA, 15 bp, Homo sapiens
acagagggctacaat

SEQ ID NO: 200819 - DNA, 15 bp, Homo sapiens
cacagagggctacaa

SEQ ID NO: 200820 - DNA, 15 bp, Homo sapiens
acacagagggctaca

SEQ ID NO: 200821 - DNA, 15 bp, Homo sapiens
cacacagagggctac

SEQ ID NO: 200822 - DNA, 15 bp, Homo sapiens
gcacacagagggcta

SEQ ID NO: 200823 - DNA, 15 bp, Homo sapiens
agcacacagagggct

SEQ ID NO: 200824 - DNA, 15 bp, Homo sapiens
gagcacacagagggc

SEQ ID NO: 200825 - DNA, 15 bp, Homo sapiens
tgagcacacagaggg

SEQ ID NO: 200826 - DNA, 15 bp, Homo sapiens
ttgagcacacagagg

SEQ ID NO: 200827 - DNA, 15 bp, Homo sapiens
cttgagcacacagag

SEQ ID NO: 200828 - DNA, 15 bp, Homo sapiens
ccttgagcacacaga

SEQ ID NO: 200829 - DNA, 15 bp, Homo sapiens
cccttgagcacacag

SEQ ID NO: 200830 - DNA, 15 bp, Homo sapiens
ccccttgagcacaca

SEQ ID NO: 200831 - DNA, 15 bp, Homo sapiens
cccccttgagcacac

SEQ ID NO: 200832 - DNA, 15 bp, Homo sapiens
ccccccttgagcaca

SEQ ID NO: 200833 - DNA, 15 bp, Homo sapiens
gccccccttgagcac

SEQ ID NO: 200834 - DNA, 15 bp, Homo sapiens
agccccccttgagca

SEQ ID NO: 200835 - DNA, 15 bp, Homo sapiens
tagccccccttgagc

SEQ ID NO: 200836 - DNA, 15 bp, Homo sapiens
atagccccccttgag

SEQ ID NO: 200837 - DNA, 15 bp, Homo sapiens
tatagccccccttga

SEQ ID NO: 200838 - DNA, 15 bp, Homo sapiens
ttatagccccccttg

SEQ ID NO: 200839 - DNA, 15 bp, Homo sapiens
tttatagcccccctt

SEQ ID NO: 200840 - DNA, 15 bp, Homo sapiens
atttatagcccccct

SEQ ID NO: 200841 - DNA, 15 bp, Homo sapiens
aatttatagcccccc

SEQ ID NO: 200842 - DNA, 15 bp, Homo sapiens
gaatttatagccccc

SEQ ID NO: 200843 - DNA, 15 bp, Homo sapiens
agaatttatagcccc

SEQ ID NO: 200844 - DNA, 15 bp, Homo sapiens
aagaatttatagccc

SEQ ID NO: 200845 - DNA, 15 bp, Homo sapiens
aaagaatttatagcc

SEQ ID NO: 200846 - DNA, 15 bp, Homo sapiens
caaagaatttatagc

SEQ ID NO: 200847 - DNA, 15 bp, Homo sapiens
gcaaagaatttatag

SEQ ID NO: 200848 - DNA, 15 bp, Homo sapiens
agcaaagaatttata

SEQ ID NO: 200849 - DNA, 15 bp, Homo sapiens
cagcaaagaatttat

SEQ ID NO: 200850 - DNA, 15 bp, Homo sapiens
tcagcaaagaattta

SEQ ID NO: 200851 - DNA, 15 bp, Homo sapiens
gtcagcaaagaattt

SEQ ID NO: 200852 - DNA, 15 bp, Homo sapiens
ggtcagcaaagaatt

SEQ ID NO: 200853 - DNA, 15 bp, Homo sapiens
aggtcagcaaagaat

SEQ ID NO: 200854 - DNA, 15 bp, Homo sapiens
caggtcagcaaagaa

SEQ ID NO: 200855 - DNA, 15 bp, Homo sapiens
gcaggtcagcaaaga

SEQ ID NO: 200856 - DNA, 15 bp, Homo sapiens
agcaggtcagcaaag

SEQ ID NO: 200857 - DNA, 15 bp, Homo sapiens
cagcaggtcagcaaa

SEQ ID NO: 200858 - DNA, 15 bp, Homo sapiens
ccagcaggtcagcaa

SEQ ID NO: 200859 - DNA, 15 bp, Homo sapiens
tccagcaggtcagca

SEQ ID NO: 200860 - DNA, 15 bp, Homo sapiens
atccagcaggtcagc

SEQ ID NO: 200861 - DNA, 15 bp, Homo sapiens
aatccagcaggtcag

SEQ ID NO: 200862 - DNA, 15 bp, Homo sapiens
taatccagcaggtca

SEQ ID NO: 200863 - DNA, 15 bp, Homo sapiens
gtaatccagcaggtc

SEQ ID NO: 200864 - DNA, 15 bp, Homo sapiens
tgtaatccagcaggt

SEQ ID NO: 200865 - DNA, 15 bp, Homo sapiens
atgtaatccagcagg

SEQ ID NO: 200866 - DNA, 15 bp, Homo sapiens
gatgtaatccagcag

SEQ ID NO: 200867 - DNA, 15 bp, Homo sapiens
tgatgtaatccagca

SEQ ID NO: 200868 - DNA, 15 bp, Homo sapiens
ttgatgtaatccagc

SEQ ID NO: 200869 - DNA, 15 bp, Homo sapiens
tttgatgtaatccag

SEQ ID NO: 200870 - DNA, 15 bp, Homo sapiens
ctttgatgtaatcca

SEQ ID NO: 200871 - DNA, 15 bp, Homo sapiens
gctttgatgtaatcc

SEQ ID NO: 200872 - DNA, 15 bp, Homo sapiens
tgctttgatgtaatc

SEQ ID NO: 200873 - DNA, 15 bp, Homo sapiens
gtgctttgatgtaat

SEQ ID NO: 200874 - DNA, 15 bp, Homo sapiens
agtgctttgatgtaa

SEQ ID NO: 200875 - DNA, 15 bp, Homo sapiens
cagtgctttgatgta

SEQ ID NO: 200876 - DNA, 15 bp, Homo sapiens
tcagtgctttgatgt

SEQ ID NO: 200877 - DNA, 15 bp, Homo sapiens
ttcagtgctttgatg

SEQ ID NO: 200878 - DNA, 15 bp, Homo sapiens
attcagtgctttgat

SEQ ID NO: 200879 - DNA, 15 bp, Homo sapiens
tattcagtgctttga

SEQ ID NO: 200880 - DNA, 15 bp, Homo sapiens
ctattcagtgctttg

SEQ ID NO: 200881 - DNA, 15 bp, Homo sapiens
tctattcagtgcttt

SEQ ID NO: 200882 - DNA, 15 bp, Homo sapiens
ttctattcagtgctt

SEQ ID NO: 200883 - DNA, 15 bp, Homo sapiens
tttctattcagtgct

SEQ ID NO: 200884 - DNA, 15 bp, Homo sapiens
atttctattcagtgc

SEQ ID NO: 200885 - DNA, 15 bp, Homo sapiens
tatttctattcagtg

SEQ ID NO: 200886 - DNA, 15 bp, Homo sapiens
ctatttctattcagt

SEQ ID NO: 200887 - DNA, 15 bp, Homo sapiens
actatttctattcag

SEQ ID NO: 200888 - DNA, 15 bp, Homo sapiens
cactatttctattca

SEQ ID NO: 200889 - DNA, 15 bp, Homo sapiens
tcactatttctattc

SEQ ID NO: 200890 - DNA, 15 bp, Homo sapiens
atcactatttctatt

SEQ ID NO: 200891 - DNA, 15 bp, Homo sapiens
tatcactatttctat

SEQ ID NO: 200892 - DNA, 15 bp, Homo sapiens
ctatcactatttcta

SEQ ID NO: 200893 - DNA, 15 bp, Homo sapiens
tctatcactatttct

SEQ ID NO: 200894 - DNA, 15 bp, Homo sapiens
atctatcactatttc

SEQ ID NO: 200895 - DNA, 15 bp, Homo sapiens
gatctatcactattt

SEQ ID NO: 200896 - DNA, 15 bp, Homo sapiens
ggatctatcactatt

SEQ ID NO: 200897 - DNA, 15 bp, Homo sapiens
tggatctatcactat

SEQ ID NO: 200898 - DNA, 15 bp, Homo sapiens
atggatctatcacta

SEQ ID NO: 200899 - DNA, 15 bp, Homo sapiens
aatggatctatcact

SEQ ID NO: 200900 - DNA, 15 bp, Homo sapiens
gaatggatctatcac

SEQ ID NO: 200901 - DNA, 15 bp, Homo sapiens
ggaatggatctatca

SEQ ID NO: 200902 - DNA, 15 bp, Homo sapiens
aggaatggatctatc

SEQ ID NO: 200903 - DNA, 15 bp, Homo sapiens
taggaatggatctat

SEQ ID NO: 200904 - DNA, 15 bp, Homo sapiens
ataggaatggatcta

SEQ ID NO: 200905 - DNA, 15 bp, Homo sapiens
cataggaatggatct

SEQ ID NO: 200906 - DNA, 15 bp, Homo sapiens
tcataggaatggatc

SEQ ID NO: 200907 - DNA, 15 bp, Homo sapiens
gtcataggaatggat

SEQ ID NO: 200908 - DNA, 15 bp, Homo sapiens
agtcataggaatgga

SEQ ID NO: 200909 - DNA, 15 bp, Homo sapiens
cagtcataggaatgg

SEQ ID NO: 200910 - DNA, 15 bp, Homo sapiens
acagtcataggaatg

SEQ ID NO: 200911 - DNA, 15 bp, Homo sapiens
tacagtcataggaat

SEQ ID NO: 200912 - DNA, 15 bp, Homo sapiens
ctacagtcataggaa

SEQ ID NO: 200913 - DNA, 15 bp, Homo sapiens
tctacagtcatagga

SEQ ID NO: 200914 - DNA, 15 bp, Homo sapiens
atctacagtcatagg

SEQ ID NO: 200915 - DNA, 15 bp, Homo sapiens
aatctacagtcatag

SEQ ID NO: 200916 - DNA, 15 bp, Homo sapiens
aaatctacagtcata

SEQ ID NO: 200917 - DNA, 15 bp, Homo sapiens
aaaatctacagtcat

SEQ ID NO: 200918 - DNA, 15 bp, Homo sapiens
taaaatctacagtca

SEQ ID NO: 200919 - DNA, 15 bp, Homo sapiens
ataaaatctacagtc

SEQ ID NO: 200920 - DNA, 15 bp, Homo sapiens
gataaaatctacagt

SEQ ID NO: 200921 - DNA, 15 bp, Homo sapiens
tgataaaatctacag

SEQ ID NO: 200922 - DNA, 15 bp, Homo sapiens
ctgataaaatctaca

SEQ ID NO: 200923 - DNA, 15 bp, Homo sapiens
tctgataaaatctac

SEQ ID NO: 200924 - DNA, 15 bp, Homo sapiens
gtctgataaaatcta

SEQ ID NO: 200925 - DNA, 15 bp, Homo sapiens
agtctgataaaatct

SEQ ID NO: 200926 - DNA, 15 bp, Homo sapiens
cagtctgataaaatc

SEQ ID NO: 200927 - DNA, 15 bp, Homo sapiens
tcagtctgataaaat

SEQ ID NO: 200928 - DNA, 15 bp, Homo sapiens
ttcagtctgataaaa

SEQ ID NO: 200929 - DNA, 15 bp, Homo sapiens
cttcagtctgataaa

SEQ ID NO: 200930 - DNA, 15 bp, Homo sapiens
tcttcagtctgataa

SEQ ID NO: 200931 - DNA, 15 bp, Homo sapiens
ctcttcagtctgata

SEQ ID NO: 200932 - DNA, 15 bp, Homo sapiens
gctcttcagtctgat

SEQ ID NO: 200933 - DNA, 15 bp, Homo sapiens
agctcttcagtctga

SEQ ID NO: 200934 - DNA, 15 bp, Homo sapiens
tagctcttcagtctg

SEQ ID NO: 200935 - DNA, 15 bp, Homo sapiens
atagctcttcagtct

SEQ ID NO: 200936 - DNA, 15 bp, Homo sapiens
aatagctcttcagtc

SEQ ID NO: 200937 - DNA, 15 bp, Homo sapiens
caatagctcttcagt

SEQ ID NO: 200938 - DNA, 15 bp, Homo sapiens
acaatagctcttcag

SEQ ID NO: 200939 - DNA, 15 bp, Homo sapiens
cacaatagctcttca

SEQ ID NO: 200940 - DNA, 15 bp, Homo sapiens
acacaatagctcttc

SEQ ID NO: 200941 - DNA, 15 bp, Homo sapiens
cacacaatagctctt

SEQ ID NO: 200942 - DNA, 15 bp, Homo sapiens
tcacacaatagctct

SEQ ID NO: 200943 - DNA, 15 bp, Homo sapiens
ctcacacaatagctc

SEQ ID NO: 200944 - DNA, 15 bp, Homo sapiens
actcacacaatagct

SEQ ID NO: 200945 - DNA, 15 bp, Homo sapiens
tactcacacaatagc

SEQ ID NO: 200946 - DNA, 15 bp, Homo sapiens
atactcacacaatag

SEQ ID NO: 200947 - DNA, 15 bp, Homo sapiens
tatactcacacaata

SEQ ID NO: 200948 - DNA, 15 bp, Homo sapiens
atatactcacacaat

SEQ ID NO: 200949 - DNA, 15 bp, Homo sapiens
aatatactcacacaa

SEQ ID NO: 200950 - DNA, 15 bp, Homo sapiens
aaatatactcacaca

SEQ ID NO: 200951 - DNA, 15 bp, Homo sapiens
taaatatactcacac

SEQ ID NO: 200952 - DNA, 15 bp, Homo sapiens
ttaaatatactcaca

SEQ ID NO: 200953 - DNA, 15 bp, Homo sapiens
attaaatatactcac

SEQ ID NO: 200954 - DNA, 15 bp, Homo sapiens
tattaaatatactca

SEQ ID NO: 200955 - DNA, 15 bp, Homo sapiens
atattaaatatactc

SEQ ID NO: 200956 - DNA, 15 bp, Homo sapiens
tatattaaatatact

SEQ ID NO: 200957 - DNA, 15 bp, Homo sapiens
atatattaaatatac

SEQ ID NO: 200958 - DNA, 15 bp, Homo sapiens
catatattaaatata

SEQ ID NO: 200959 - DNA, 15 bp, Homo sapiens
tcatatattaaatat

SEQ ID NO: 200960 - DNA, 15 bp, Homo sapiens
atcatatattaaata

SEQ ID NO: 200961 - DNA, 15 bp, Homo sapiens
aatcatatattaaat

SEQ ID NO: 200962 - DNA, 15 bp, Homo sapiens
gaatcatatattaaa

SEQ ID NO: 200963 - DNA, 15 bp, Homo sapiens
agaatcatatattaa

SEQ ID NO: 200964 - DNA, 15 bp, Homo sapiens
aagaatcatatatta

SEQ ID NO: 200965 - DNA, 15 bp, Homo sapiens
aaagaatcatatatt

SEQ ID NO: 200966 - DNA, 15 bp, Homo sapiens
aaaagaatcatatat

SEQ ID NO: 200967 - DNA, 15 bp, Homo sapiens
aaaaagaatcatata

SEQ ID NO: 200968 - DNA, 15 bp, Homo sapiens
taaaaagaatcatat

SEQ ID NO: 200969 - DNA, 15 bp, Homo sapiens
ctaaaaagaatcata

SEQ ID NO: 200970 - DNA, 15 bp, Homo sapiens
actaaaaagaatcat

SEQ ID NO: 200971 - DNA, 15 bp, Homo sapiens
cactaaaaagaatca

SEQ ID NO: 200972 - DNA, 15 bp, Homo sapiens
ccactaaaaagaatc

SEQ ID NO: 200973 - DNA, 15 bp, Homo sapiens
gccactaaaaagaat

SEQ ID NO: 200974 - DNA, 15 bp, Homo sapiens
tgccactaaaaagaa

SEQ ID NO: 200975 - DNA, 15 bp, Homo sapiens
ttgccactaaaaaga

SEQ ID NO: 200976 - DNA, 15 bp, Homo sapiens
gttgccactaaaaag

SEQ ID NO: 200977 - DNA, 15 bp, Homo sapiens
tgttgccactaaaaa

SEQ ID NO: 200978 - DNA, 15 bp, Homo sapiens
ctgttgccactaaaa

SEQ ID NO: 200979 - DNA, 15 bp, Homo sapiens
actgttgccactaaa

SEQ ID NO: 200980 - DNA, 15 bp, Homo sapiens
tactgttgccactaa

SEQ ID NO: 200981 - DNA, 15 bp, Homo sapiens
ctactgttgccacta

SEQ ID NO: 200982 - DNA, 15 bp, Homo sapiens
cctactgttgccact

SEQ ID NO: 200983 - DNA, 15 bp, Homo sapiens
acctactgttgccac

SEQ ID NO: 200984 - DNA, 15 bp, Homo sapiens
aacctactgttgcca

SEQ ID NO: 200985 - DNA, 15 bp, Homo sapiens
aaacctactgttgcc

SEQ ID NO: 200986 - DNA, 15 bp, Homo sapiens
aaaacctactgttgc

SEQ ID NO: 200987 - DNA, 15 bp, Homo sapiens
gaaaacctactgttg

SEQ ID NO: 200988 - DNA, 15 bp, Homo sapiens
agaaaacctactgtt

SEQ ID NO: 200989 - DNA, 15 bp, Homo sapiens
aagaaaacctactgt

SEQ ID NO: 200990 - DNA, 15 bp, Homo sapiens
taagaaaacctactg

SEQ ID NO: 200991 - DNA, 15 bp, Homo sapiens
ataagaaaacctact

SEQ ID NO: 200992 - DNA, 15 bp, Homo sapiens
tataagaaaacctac

SEQ ID NO: 200993 - DNA, 15 bp, Homo sapiens
atataagaaaaccta

SEQ ID NO: 200994 - DNA, 15 bp, Homo sapiens
aatataagaaaacct

SEQ ID NO: 200995 - DNA, 15 bp, Homo sapiens
aaatataagaaaacc

SEQ ID NO: 200996 - DNA, 15 bp, Homo sapiens
aaaatataagaaaac

SEQ ID NO: 200997 - DNA, 15 bp, Homo sapiens
gaaaatataagaaaa

SEQ ID NO: 200998 - DNA, 15 bp, Homo sapiens
agaaaatataagaaa

SEQ ID NO: 200999 - DNA, 15 bp, Homo sapiens
aagaaaatataagaa

SEQ ID NO: 201000 - DNA, 15 bp, Homo sapiens
aaagaaaatataaga

SEQ ID NO: 201001 - DNA, 15 bp, Homo sapiens
caaagaaaatataag

SEQ ID NO: 201002 - DNA, 15 bp, Homo sapiens
tcaaagaaaatataa

SEQ ID NO: 201003 - DNA, 15 bp, Homo sapiens
ttcaaagaaaatata

SEQ ID NO: 201004 - DNA, 15 bp, Homo sapiens
attcaaagaaaatat

SEQ ID NO: 201005 - DNA, 15 bp, Homo sapiens
gattcaaagaaaata

SEQ ID NO: 201006 - DNA, 15 bp, Homo sapiens
agattcaaagaaaat

SEQ ID NO: 201007 - DNA, 15 bp, Homo sapiens
gagattcaaagaaaa

SEQ ID NO: 201008 - DNA, 15 bp, Homo sapiens
agagattcaaagaaa

SEQ ID NO: 201009 - DNA, 15 bp, Homo sapiens
cagagattcaaagaa

SEQ ID NO: 201010 - DNA, 15 bp, Homo sapiens
gcagagattcaaaga

SEQ ID NO: 201011 - DNA, 15 bp, Homo sapiens
tgcagagattcaaag

SEQ ID NO: 201012 - DNA, 15 bp, Homo sapiens
ttgcagagattcaaa

SEQ ID NO: 201013 - DNA, 15 bp, Homo sapiens
tttgcagagattcaa

SEQ ID NO: 201014 - DNA, 15 bp, Homo sapiens
gtttgcagagattca

SEQ ID NO: 201015 - DNA, 15 bp, Homo sapiens
ggtttgcagagattc

SEQ ID NO: 201016 - DNA, 15 bp, Homo sapiens
tggtttgcagagatt

SEQ ID NO: 201017 - DNA, 15 bp, Homo sapiens
atggtttgcagagat

SEQ ID NO: 201018 - DNA, 15 bp, Homo sapiens
tatggtttgcagaga

SEQ ID NO: 201019 - DNA, 15 bp, Homo sapiens
gtatggtttgcagag

SEQ ID NO: 201020 - DNA, 15 bp, Homo sapiens
agtatggtttgcaga

SEQ ID NO: 201021 - DNA, 15 bp, Homo sapiens
aagtatggtttgcag

SEQ ID NO: 201022 - DNA, 15 bp, Homo sapiens
caagtatggtttgca

SEQ ID NO: 201023 - DNA, 15 bp, Homo sapiens
gcaagtatggtttgc

SEQ ID NO: 201024 - DNA, 15 bp, Homo sapiens
agcaagtatggtttg

SEQ ID NO: 201025 - DNA, 15 bp, Homo sapiens
aagcaagtatggttt

SEQ ID NO: 201026 - DNA, 15 bp, Homo sapiens
aaagcaagtatggtt

SEQ ID NO: 201027 - DNA, 15 bp, Homo sapiens
gaaagcaagtatggt

SEQ ID NO: 201028 - DNA, 15 bp, Homo sapiens
tgaaagcaagtatgg

SEQ ID NO: 201029 - DNA, 15 bp, Homo sapiens
atgaaagcaagtatg

SEQ ID NO: 201030 - DNA, 15 bp, Homo sapiens
aatgaaagcaagtat

SEQ ID NO: 201031 - DNA, 15 bp, Homo sapiens
aaatgaaagcaagta

SEQ ID NO: 201032 - DNA, 15 bp, Homo sapiens
gaaatgaaagcaagt

SEQ ID NO: 201033 - DNA, 15 bp, Homo sapiens
tgaaatgaaagcaag

SEQ ID NO: 201034 - DNA, 15 bp, Homo sapiens
gtgaaatgaaagcaa

SEQ ID NO: 201035 - DNA, 15 bp, Homo sapiens
agtgaaatgaaagca

SEQ ID NO: 201036 - DNA, 15 bp, Homo sapiens
aagtgaaatgaaagc

SEQ ID NO: 201037 - DNA, 15 bp, Homo sapiens
caagtgaaatgaaag

SEQ ID NO: 201038 - DNA, 15 bp, Homo sapiens
ccaagtgaaatgaaa

SEQ ID NO: 201039 - DNA, 15 bp, Homo sapiens
accaagtgaaatgaa

SEQ ID NO: 201040 - DNA, 15 bp, Homo sapiens
aaccaagtgaaatga

SEQ ID NO: 201041 - DNA, 15 bp, Homo sapiens
taaccaagtgaaatg

SEQ ID NO: 201042 - DNA, 15 bp, Homo sapiens
gtaaccaagtgaaat

SEQ ID NO: 201043 - DNA, 15 bp, Homo sapiens
tgtaaccaagtgaaa

SEQ ID NO: 201044 - DNA, 15 bp, Homo sapiens
ctgtaaccaagtgaa

SEQ ID NO: 201045 - DNA, 15 bp, Homo sapiens
actgtaaccaagtga

SEQ ID NO: 201046 - DNA, 15 bp, Homo sapiens
cactgtaaccaagtg

SEQ ID NO: 201047 - DNA, 15 bp, Homo sapiens
tcactgtaaccaagt

SEQ ID NO: 201048 - DNA, 15 bp, Homo sapiens
ctcactgtaaccaag

SEQ ID NO: 201049 - DNA, 15 bp, Homo sapiens
tctcactgtaaccaa

SEQ ID NO: 201050 - DNA, 15 bp, Homo sapiens
atctcactgtaacca

SEQ ID NO: 201051 - DNA, 15 bp, Homo sapiens
aatctcactgtaacc

SEQ ID NO: 201052 - DNA, 15 bp, Homo sapiens
aaatctcactgtaac

SEQ ID NO: 201053 - DNA, 15 bp, Homo sapiens
aaaatctcactgtaa

SEQ ID NO: 201054 - DNA, 15 bp, Homo sapiens
aaaaatctcactgta

SEQ ID NO: 201055 - DNA, 15 bp, Homo sapiens
gaaaaatctcactgt

SEQ ID NO: 201056 - DNA, 15 bp, Homo sapiens
agaaaaatctcactg

SEQ ID NO: 201057 - DNA, 15 bp, Homo sapiens
tagaaaaatctcact

SEQ ID NO: 201058 - DNA, 15 bp, Homo sapiens
ttagaaaaatctcac

SEQ ID NO: 201059 - DNA, 15 bp, Homo sapiens
gttagaaaaatctca

SEQ ID NO: 201060 - DNA, 15 bp, Homo sapiens
tgttagaaaaatctc

SEQ ID NO: 201061 - DNA, 15 bp, Homo sapiens
atgttagaaaaatct

SEQ ID NO: 201062 - DNA, 15 bp, Homo sapiens
tatgttagaaaaatc

SEQ ID NO: 201063 - DNA, 15 bp, Homo sapiens
atatgttagaaaaat

SEQ ID NO: 201064 - DNA, 15 bp, Homo sapiens
aatatgttagaaaaa

SEQ ID NO: 201065 - DNA, 15 bp, Homo sapiens
gaatatgttagaaaa

SEQ ID NO: 201066 - DNA, 15 bp, Homo sapiens
tgaatatgttagaaa

SEQ ID NO: 201067 - DNA, 15 bp, Homo sapiens
gtgaatatgttagaa

SEQ ID NO: 201068 - DNA, 15 bp, Homo sapiens
agtgaatatgttaga

SEQ ID NO: 201069 - DNA, 15 bp, Homo sapiens
tagtgaatatgttag

SEQ ID NO: 201070 - DNA, 15 bp, Homo sapiens
ctagtgaatatgtta

SEQ ID NO: 201071 - DNA, 15 bp, Homo sapiens
actagtgaatatgtt

SEQ ID NO: 201072 - DNA, 15 bp, Homo sapiens
tactagtgaatatgt

SEQ ID NO: 201073 - DNA, 15 bp, Homo sapiens
gtactagtgaatatg

SEQ ID NO: 201074 - DNA, 15 bp, Homo sapiens
agtactagtgaatat

SEQ ID NO: 201075 - DNA, 15 bp, Homo sapiens
aagtactagtgaata

SEQ ID NO: 201076 - DNA, 15 bp, Homo sapiens
aaagtactagtgaat

SEQ ID NO: 201077 - DNA, 15 bp, Homo sapiens
taaagtactagtgaa

SEQ ID NO: 201078 - DNA, 15 bp, Homo sapiens
gtaaagtactagtga

SEQ ID NO: 201079 - DNA, 15 bp, Homo sapiens
tgtaaagtactagtg

SEQ ID NO: 201080 - DNA, 15 bp, Homo sapiens
atgtaaagtactagt

SEQ ID NO: 201081 - DNA, 15 bp, Homo sapiens
gatgtaaagtactag

SEQ ID NO: 201082 - DNA, 15 bp, Homo sapiens
tgatgtaaagtacta

SEQ ID NO: 201083 - DNA, 15 bp, Homo sapiens
ttgatgtaaagtact

SEQ ID NO: 201084 - DNA, 15 bp, Homo sapiens
tttgatgtaaagtac

SEQ ID NO: 201085 - DNA, 15 bp, Homo sapiens
ctttgatgtaaagta

SEQ ID NO: 201086 - DNA, 15 bp, Homo sapiens
gctttgatgtaaagt

SEQ ID NO: 201087 - DNA, 15 bp, Homo sapiens
ggctttgatgtaaag

SEQ ID NO: 201088 - DNA, 15 bp, Homo sapiens
tggctttgatgtaaa

SEQ ID NO: 201089 - DNA, 15 bp, Homo sapiens
ttggctttgatgtaa

SEQ ID NO: 201090 - DNA, 15 bp, Homo sapiens
attggctttgatgta

SEQ ID NO: 201091 - DNA, 15 bp, Homo sapiens
tattggctttgatgt

SEQ ID NO: 201092 - DNA, 15 bp, Homo sapiens
gtattggctttgatg

SEQ ID NO: 201093 - DNA, 15 bp, Homo sapiens
agtattggctttgat

SEQ ID NO: 201094 - DNA, 15 bp, Homo sapiens
cagtattggctttga

SEQ ID NO: 201095 - DNA, 15 bp, Homo sapiens
acagtattggctttg

SEQ ID NO: 201096 - DNA, 15 bp, Homo sapiens
aacagtattggcttt

SEQ ID NO: 201097 - DNA, 15 bp, Homo sapiens
aaacagtattggctt

SEQ ID NO: 201098 - DNA, 15 bp, Homo sapiens
aaaacagtattggct

SEQ ID NO: 201099 - DNA, 15 bp, Homo sapiens
aaaaacagtattggc

SEQ ID NO: 201100 - DNA, 15 bp, Homo sapiens
aaaaaacagtattgg

SEQ ID NO: 201101 - DNA, 15 bp, Homo sapiens
aaaaaaacagtattg

SEQ ID NO: 201102 - DNA, 15 bp, Homo sapiens
taaaaaaacagtatt

SEQ ID NO: 201103 - DNA, 15 bp, Homo sapiens
ttaaaaaaacagtat

SEQ ID NO: 201104 - DNA, 15 bp, Homo sapiens
tttaaaaaaacagta

SEQ ID NO: 201105 - DNA, 15 bp, Homo sapiens
ttttaaaaaaacagt

SEQ ID NO: 201106 - DNA, 15 bp, Homo sapiens
gttttaaaaaaacag

SEQ ID NO: 201107 - DNA, 15 bp, Homo sapiens
agttttaaaaaaaca

SEQ ID NO: 201108 - DNA, 15 bp, Homo sapiens
tagttttaaaaaaac

SEQ ID NO: 201109 - DNA, 15 bp, Homo sapiens
ctagttttaaaaaaa

SEQ ID NO: 201110 - DNA, 15 bp, Homo sapiens
actagttttaaaaaa

SEQ ID NO: 201111 - DNA, 15 bp, Homo sapiens
gactagttttaaaaa

SEQ ID NO: 201112 - DNA, 15 bp, Homo sapiens
tgactagttttaaaa

SEQ ID NO: 201113 - DNA, 15 bp, Homo sapiens
gtgactagttttaaa

SEQ ID NO: 201114 - DNA, 15 bp, Homo sapiens
ggtgactagttttaa

SEQ ID NO: 201115 - DNA, 15 bp, Homo sapiens
aggtgactagtttta

SEQ ID NO: 201116 - DNA, 15 bp, Homo sapiens
aaggtgactagtttt

SEQ ID NO: 201117 - DNA, 15 bp, Homo sapiens
caaggtgactagttt

SEQ ID NO: 201118 - DNA, 15 bp, Homo sapiens
ccaaggtgactagtt

SEQ ID NO: 201119 - DNA, 15 bp, Homo sapiens
tccaaggtgactagt

SEQ ID NO: 201120 - DNA, 15 bp, Homo sapiens
ctccaaggtgactag

SEQ ID NO: 201121 - DNA, 15 bp, Homo sapiens
cctccaaggtgacta

SEQ ID NO: 201122 - DNA, 15 bp, Homo sapiens
tcctccaaggtgact

SEQ ID NO: 201123 - DNA, 15 bp, Homo sapiens
atcctccaaggtgac

SEQ ID NO: 201124 - DNA, 15 bp, Homo sapiens
tatcctccaaggtga

SEQ ID NO: 201125 - DNA, 15 bp, Homo sapiens
atatcctccaaggtg

SEQ ID NO: 201126 - DNA, 15 bp, Homo sapiens
tatatcctccaaggt

SEQ ID NO: 201127 - DNA, 15 bp, Homo sapiens
atatatcctccaagg

SEQ ID NO: 201128 - DNA, 15 bp, Homo sapiens
tatatatcctccaag

SEQ ID NO: 201129 - DNA, 15 bp, Homo sapiens
gtatatatcctccaa

SEQ ID NO: 201130 - DNA, 15 bp, Homo sapiens
agtatatatcctcca

SEQ ID NO: 201131 - DNA, 15 bp, Homo sapiens
aagtatatatcctcc

SEQ ID NO: 201132 - DNA, 15 bp, Homo sapiens
taagtatatatcctc

SEQ ID NO: 201133 - DNA, 15 bp, Homo sapiens
ataagtatatatcct

SEQ ID NO: 201134 - DNA, 15 bp, Homo sapiens
aataagtatatatcc

SEQ ID NO: 201135 - DNA, 15 bp, Homo sapiens
aaataagtatatatc

SEQ ID NO: 201136 - DNA, 15 bp, Homo sapiens
aaaataagtatatat

SEQ ID NO: 201137 - DNA, 15 bp, Homo sapiens
taaaataagtatata

SEQ ID NO: 201138 - DNA, 15 bp, Homo sapiens
gtaaaataagtatat

SEQ ID NO: 201139 - DNA, 15 bp, Homo sapiens
tgtaaaataagtata

SEQ ID NO: 201140 - DNA, 15 bp, Homo sapiens
ctgtaaaataagtat

SEQ ID NO: 201141 - DNA, 15 bp, Homo sapiens
cctgtaaaataagta

SEQ ID NO: 201142 - DNA, 15 bp, Homo sapiens
acctgtaaaataagt

SEQ ID NO: 201143 - DNA, 15 bp, Homo sapiens
cacctgtaaaataag

SEQ ID NO: 201144 - DNA, 15 bp, Homo sapiens
acacctgtaaaataa

SEQ ID NO: 201145 - DNA, 15 bp, Homo sapiens
cacacctgtaaaata

SEQ ID NO: 201146 - DNA, 15 bp, Homo sapiens
acacacctgtaaaat

SEQ ID NO: 201147 - DNA, 15 bp, Homo sapiens
cacacacctgtaaaa

SEQ ID NO: 201148 - DNA, 15 bp, Homo sapiens
acacacacctgtaaa

SEQ ID NO: 201149 - DNA, 15 bp, Homo sapiens
cacacacacctgtaa

SEQ ID NO: 201150 - DNA, 15 bp, Homo sapiens
ccacacacacctgta

SEQ ID NO: 201151 - DNA, 15 bp, Homo sapiens
accacacacacctgt

SEQ ID NO: 201152 - DNA, 15 bp, Homo sapiens
aaccacacacacctg

SEQ ID NO: 201153 - DNA, 15 bp, Homo sapiens
aaaccacacacacct

SEQ ID NO: 201154 - DNA, 15 bp, Homo sapiens
aaaaccacacacacc

SEQ ID NO: 201155 - DNA, 15 bp, Homo sapiens
aaaaaccacacacac

SEQ ID NO: 201156 - DNA, 15 bp, Homo sapiens
aaaaaaccacacaca

SEQ ID NO: 201157 - DNA, 15 bp, Homo sapiens
taaaaaaccacacac

SEQ ID NO: 201158 - DNA, 15 bp, Homo sapiens
ttaaaaaaccacaca

SEQ ID NO: 201159 - DNA, 15 bp, Homo sapiens
tttaaaaaaccacac

SEQ ID NO: 201160 - DNA, 15 bp, Homo sapiens
atttaaaaaaccaca

SEQ ID NO: 201161 - DNA, 15 bp, Homo sapiens
tatttaaaaaaccac

SEQ ID NO: 201162 - DNA, 15 bp, Homo sapiens
ttatttaaaaaacca

SEQ ID NO: 201163 - DNA, 15 bp, Homo sapiens
tttatttaaaaaacc

SEQ ID NO: 201164 - DNA, 15 bp, Homo sapiens
gtttatttaaaaaac

SEQ ID NO: 201165 - DNA, 15 bp, Homo sapiens
agtttatttaaaaaa

SEQ ID NO: 201166 - DNA, 15 bp, Homo sapiens
gagtttatttaaaaa

SEQ ID NO: 201167 - DNA, 15 bp, Homo sapiens
ggagtttatttaaaa

SEQ ID NO: 201168 - DNA, 15 bp, Homo sapiens
aggagtttatttaaa

SEQ ID NO: 201169 - DNA, 15 bp, Homo sapiens
aaggagtttatttaa

SEQ ID NO: 201170 - DNA, 15 bp, Homo sapiens
aaaggagtttattta

SEQ ID NO: 201171 - DNA, 15 bp, Homo sapiens
aaaaggagtttattt

SEQ ID NO: 201172 - DNA, 15 bp, Homo sapiens
taaaaggagtttatt

SEQ ID NO: 201173 - DNA, 15 bp, Homo sapiens
ctaaaaggagtttat

SEQ ID NO: 201174 - DNA, 15 bp, Homo sapiens
cctaaaaggagttta

SEQ ID NO: 201175 - DNA, 15 bp, Homo sapiens
tcctaaaaggagttt

SEQ ID NO: 201176 - DNA, 15 bp, Homo sapiens
ttcctaaaaggagtt

SEQ ID NO: 201177 - DNA, 15 bp, Homo sapiens
attcctaaaaggagt

SEQ ID NO: 201178 - DNA, 15 bp, Homo sapiens
aattcctaaaaggag

SEQ ID NO: 201179 - DNA, 15 bp, Homo sapiens
caattcctaaaagga

SEQ ID NO: 201180 - DNA, 15 bp, Homo sapiens
gcaattcctaaaagg

SEQ ID NO: 201181 - DNA, 15 bp, Homo sapiens
agcaattcctaaaag

SEQ ID NO: 201182 - DNA, 15 bp, Homo sapiens
cagcaattcctaaaa

SEQ ID NO: 201183 - DNA, 15 bp, Homo sapiens
acagcaattcctaaa

SEQ ID NO: 201184 - DNA, 15 bp, Homo sapiens
aacagcaattcctaa

SEQ ID NO: 201185 - DNA, 15 bp, Homo sapiens
caacagcaattccta

SEQ ID NO: 201186 - DNA, 15 bp, Homo sapiens
ccaacagcaattcct

SEQ ID NO: 201187 - DNA, 15 bp, Homo sapiens
cccaacagcaattcc

SEQ ID NO: 201188 - DNA, 15 bp, Homo sapiens
tcccaacagcaattc

SEQ ID NO: 201189 - DNA, 15 bp, Homo sapiens
gtcccaacagcaatt

SEQ ID NO: 201190 - DNA, 15 bp, Homo sapiens
agtcccaacagcaat

SEQ ID NO: 201191 - DNA, 15 bp, Homo sapiens
aagtcccaacagcaa

SEQ ID NO: 201192 - DNA, 15 bp, Homo sapiens
caagtcccaacagca

SEQ ID NO: 201193 - DNA, 15 bp, Homo sapiens
ccaagtcccaacagc

SEQ ID NO: 201194 - DNA, 15 bp, Homo sapiens
cccaagtcccaacag

SEQ ID NO: 201195 - DNA, 15 bp, Homo sapiens
tcccaagtcccaaca

SEQ ID NO: 201196 - DNA, 15 bp, Homo sapiens
atcccaagtcccaac

SEQ ID NO: 201197 - DNA, 15 bp, Homo sapiens
tatcccaagtcccaa

SEQ ID NO: 201198 - DNA, 15 bp, Homo sapiens
gtatcccaagtccca

SEQ ID NO: 201199 - DNA, 15 bp, Homo sapiens
agtatcccaagtccc

SEQ ID NO: 201200 - DNA, 15 bp, Homo sapiens
aagtatcccaagtcc

SEQ ID NO: 201201 - DNA, 15 bp, Homo sapiens
aaagtatcccaagtc

SEQ ID NO: 201202 - DNA, 15 bp, Homo sapiens
aaaagtatcccaagt

SEQ ID NO: 201203 - DNA, 15 bp, Homo sapiens
aaaaagtatcccaag

SEQ ID NO: 201204 - DNA, 15 bp, Homo sapiens
aaaaaagtatcccaa

SEQ ID NO: 201205 - DNA, 15 bp, Homo sapiens
gaaaaaagtatccca

SEQ ID NO: 201206 - DNA, 15 bp, Homo sapiens
tgaaaaaagtatccc

SEQ ID NO: 201207 - DNA, 15 bp, Homo sapiens
gtgaaaaaagtatcc

SEQ ID NO: 201208 - DNA, 15 bp, Homo sapiens
agtgaaaaaagtatc

SEQ ID NO: 201209 - DNA, 15 bp, Homo sapiens
tagtgaaaaaagtat

SEQ ID NO: 201210 - DNA, 15 bp, Homo sapiens
atagtgaaaaaagta

SEQ ID NO: 201211 - DNA, 15 bp, Homo sapiens
tatagtgaaaaaagt

SEQ ID NO: 201212 - DNA, 15 bp, Homo sapiens
gtatagtgaaaaaag

SEQ ID NO: 201213 - DNA, 15 bp, Homo sapiens
tgtatagtgaaaaaa

SEQ ID NO: 201214 - DNA, 15 bp, Homo sapiens
atgtatagtgaaaaa

SEQ ID NO: 201215 - DNA, 15 bp, Homo sapiens
tatgtatagtgaaaa

SEQ ID NO: 201216 - DNA, 15 bp, Homo sapiens
gtatgtatagtgaaa

SEQ ID NO: 201217 - DNA, 15 bp, Homo sapiens
agtatgtatagtgaa

SEQ ID NO: 201218 - DNA, 15 bp, Homo sapiens
cagtatgtatagtga

SEQ ID NO: 201219 - DNA, 15 bp, Homo sapiens
ccagtatgtatagtg

SEQ ID NO: 201220 - DNA, 15 bp, Homo sapiens
accagtatgtatagt

SEQ ID NO: 201221 - DNA, 15 bp, Homo sapiens
caccagtatgtatag

SEQ ID NO: 201222 - DNA, 15 bp, Homo sapiens
tcaccagtatgtata

SEQ ID NO: 201223 - DNA, 15 bp, Homo sapiens
gtcaccagtatgtat

SEQ ID NO: 201224 - DNA, 15 bp, Homo sapiens
tgtcaccagtatgta

SEQ ID NO: 201225 - DNA, 15 bp, Homo sapiens
ctgtcaccagtatgt

SEQ ID NO: 201226 - DNA, 15 bp, Homo sapiens
tctgtcaccagtatg

SEQ ID NO: 201227 - DNA, 15 bp, Homo sapiens
atctgtcaccagtat

SEQ ID NO: 201228 - DNA, 15 bp, Homo sapiens
tatctgtcaccagta

SEQ ID NO: 201229 - DNA, 15 bp, Homo sapiens
gtatctgtcaccagt

SEQ ID NO: 201230 - DNA, 15 bp, Homo sapiens
ggtatctgtcaccag

SEQ ID NO: 201231 - DNA, 15 bp, Homo sapiens
gggtatctgtcacca

SEQ ID NO: 201232 - DNA, 15 bp, Homo sapiens
agggtatctgtcacc

SEQ ID NO: 201233 - DNA, 15 bp, Homo sapiens
gagggtatctgtcac

SEQ ID NO: 201234 - DNA, 15 bp, Homo sapiens
agagggtatctgtca

SEQ ID NO: 201235 - DNA, 15 bp, Homo sapiens
gagagggtatctgtc

SEQ ID NO: 201236 - DNA, 15 bp, Homo sapiens
agagagggtatctgt

SEQ ID NO: 201237 - DNA, 15 bp, Homo sapiens
aagagagggtatctg

SEQ ID NO: 201238 - DNA, 15 bp, Homo sapiens
caagagagggtatct

SEQ ID NO: 201239 - DNA, 15 bp, Homo sapiens
tcaagagagggtatc

SEQ ID NO: 201240 - DNA, 15 bp, Homo sapiens
ctcaagagagggtat

SEQ ID NO: 201241 - DNA, 15 bp, Homo sapiens
gctcaagagagggta

SEQ ID NO: 201242 - DNA, 15 bp, Homo sapiens
agctcaagagagggt

SEQ ID NO: 201243 - DNA, 15 bp, Homo sapiens
tagctcaagagaggg

SEQ ID NO: 201244 - DNA, 15 bp, Homo sapiens
gtagctcaagagagg

SEQ ID NO: 201245 - DNA, 15 bp, Homo sapiens
tgtagctcaagagag

SEQ ID NO: 201246 - DNA, 15 bp, Homo sapiens
atgtagctcaagaga

SEQ ID NO: 201247 - DNA, 15 bp, Homo sapiens
gatgtagctcaagag

SEQ ID NO: 201248 - DNA, 15 bp, Homo sapiens
cgatgtagctcaaga

SEQ ID NO: 201249 - DNA, 15 bp, Homo sapiens
ccgatgtagctcaag

SEQ ID NO: 201250 - DNA, 15 bp, Homo sapiens
accgatgtagctcaa

SEQ ID NO: 201251 - DNA, 15 bp, Homo sapiens
aaccgatgtagctca

SEQ ID NO: 201252 - DNA, 15 bp, Homo sapiens
aaaccgatgtagctc

SEQ ID NO: 201253 - DNA, 15 bp, Homo sapiens
caaaccgatgtagct

SEQ ID NO: 201254 - DNA, 15 bp, Homo sapiens
acaaaccgatgtagc

SEQ ID NO: 201255 - DNA, 15 bp, Homo sapiens
cacaaaccgatgtag

SEQ ID NO: 201256 - DNA, 15 bp, Homo sapiens
ccacaaaccgatgta

SEQ ID NO: 201257 - DNA, 15 bp, Homo sapiens
cccacaaaccgatgt

SEQ ID NO: 201258 - DNA, 15 bp, Homo sapiens
ccccacaaaccgatg

SEQ ID NO: 201259 - DNA, 15 bp, Homo sapiens
tccccacaaaccgat

SEQ ID NO: 201260 - DNA, 15 bp, Homo sapiens
ctccccacaaaccga

SEQ ID NO: 201261 - DNA, 15 bp, Homo sapiens
actccccacaaaccg

SEQ ID NO: 201262 - DNA, 15 bp, Homo sapiens
gactccccacaaacc

SEQ ID NO: 201263 - DNA, 15 bp, Homo sapiens
tgactccccacaaac

SEQ ID NO: 201264 - DNA, 15 bp, Homo sapiens
ttgactccccacaaa

SEQ ID NO: 201265 - DNA, 15 bp, Homo sapiens
tttgactccccacaa

SEQ ID NO: 201266 - DNA, 15 bp, Homo sapiens
ttttgactccccaca

SEQ ID NO: 201267 - DNA, 15 bp, Homo sapiens
cttttgactccccac

SEQ ID NO: 201268 - DNA, 15 bp, Homo sapiens
acttttgactcccca

SEQ ID NO: 201269 - DNA, 15 bp, Homo sapiens
gacttttgactcccc

SEQ ID NO: 201270 - DNA, 15 bp, Homo sapiens
ggacttttgactccc

SEQ ID NO: 201271 - DNA, 15 bp, Homo sapiens
aggacttttgactcc

SEQ ID NO: 201272 - DNA, 15 bp, Homo sapiens
aaggacttttgactc

SEQ ID NO: 201273 - DNA, 15 bp, Homo sapiens
aaaggacttttgact

SEQ ID NO: 201274 - DNA, 15 bp, Homo sapiens
caaaggacttttgac

SEQ ID NO: 201275 - DNA, 15 bp, Homo sapiens
ccaaaggacttttga

SEQ ID NO: 201276 - DNA, 15 bp, Homo sapiens
tccaaaggacttttg

SEQ ID NO: 201277 - DNA, 15 bp, Homo sapiens
ctccaaaggactttt

SEQ ID NO: 201278 - DNA, 15 bp, Homo sapiens
gctccaaaggacttt

SEQ ID NO: 201279 - DNA, 15 bp, Homo sapiens
agctccaaaggactt

SEQ ID NO: 201280 - DNA, 15 bp, Homo sapiens
tagctccaaaggact

SEQ ID NO: 201281 - DNA, 15 bp, Homo sapiens
ctagctccaaaggac

SEQ ID NO: 201282 - DNA, 15 bp, Homo sapiens
cctagctccaaagga

SEQ ID NO: 201283 - DNA, 15 bp, Homo sapiens
acctagctccaaagg

SEQ ID NO: 201284 - DNA, 15 bp, Homo sapiens
aacctagctccaaag

SEQ ID NO: 201285 - DNA, 15 bp, Homo sapiens
aaacctagctccaaa

SEQ ID NO: 201286 - DNA, 15 bp, Homo sapiens
caaacctagctccaa

SEQ ID NO: 201287 - DNA, 15 bp, Homo sapiens
tcaaacctagctcca

SEQ ID NO: 201288 - DNA, 15 bp, Homo sapiens
gtcaaacctagctcc

SEQ ID NO: 201289 - DNA, 15 bp, Homo sapiens
tgtcaaacctagctc

SEQ ID NO: 201290 - DNA, 15 bp, Homo sapiens
ttgtcaaacctagct

SEQ ID NO: 201291 - DNA, 15 bp, Homo sapiens
tttgtcaaacctagc

SEQ ID NO: 201292 - DNA, 15 bp, Homo sapiens
atttgtcaaacctag

SEQ ID NO: 201293 - DNA, 15 bp, Homo sapiens
tatttgtcaaaccta

SEQ ID NO: 201294 - DNA, 15 bp, Homo sapiens
ttatttgtcaaacct

SEQ ID NO: 201295 - DNA, 15 bp, Homo sapiens
cttatttgtcaaacc

SEQ ID NO: 201296 - DNA, 15 bp, Homo sapiens
ccttatttgtcaaac

SEQ ID NO: 201297 - DNA, 15 bp, Homo sapiens
accttatttgtcaaa

SEQ ID NO: 201298 - DNA, 15 bp, Homo sapiens
caccttatttgtcaa

SEQ ID NO: 201299 - DNA, 15 bp, Homo sapiens
ccaccttatttgtca

SEQ ID NO: 201300 - DNA, 15 bp, Homo sapiens
cccaccttatttgtc

SEQ ID NO: 201301 - DNA, 15 bp, Homo sapiens
acccaccttatttgt

SEQ ID NO: 201302 - DNA, 15 bp, Homo sapiens
aacccaccttatttg

SEQ ID NO: 201303 - DNA, 15 bp, Homo sapiens
taacccaccttattt

SEQ ID NO: 201304 - DNA, 15 bp, Homo sapiens
ttaacccaccttatt

SEQ ID NO: 201305 - DNA, 15 bp, Homo sapiens
gttaacccaccttat

SEQ ID NO: 201306 - DNA, 15 bp, Homo sapiens
tgttaacccacctta

SEQ ID NO: 201307 - DNA, 15 bp, Homo sapiens
gtgttaacccacctt

SEQ ID NO: 201308 - DNA, 15 bp, Homo sapiens
agtgttaacccacct

SEQ ID NO: 201309 - DNA, 15 bp, Homo sapiens
aagtgttaacccacc

SEQ ID NO: 201310 - DNA, 15 bp, Homo sapiens
caagtgttaacccac

SEQ ID NO: 201311 - DNA, 15 bp, Homo sapiens
acaagtgttaaccca

SEQ ID NO: 201312 - DNA, 15 bp, Homo sapiens
aacaagtgttaaccc

SEQ ID NO: 201313 - DNA, 15 bp, Homo sapiens
aaacaagtgttaacc

SEQ ID NO: 201314 - DNA, 15 bp, Homo sapiens
gaaacaagtgttaac

SEQ ID NO: 201315 - DNA, 15 bp, Homo sapiens
ggaaacaagtgttaa

SEQ ID NO: 201316 - DNA, 15 bp, Homo sapiens
aggaaacaagtgtta

SEQ ID NO: 201317 - DNA, 15 bp, Homo sapiens
taggaaacaagtgtt

SEQ ID NO: 201318 - DNA, 15 bp, Homo sapiens
ctaggaaacaagtgt

SEQ ID NO: 201319 - DNA, 15 bp, Homo sapiens
tctaggaaacaagtg

SEQ ID NO: 201320 - DNA, 15 bp, Homo sapiens
ttctaggaaacaagt

SEQ ID NO: 201321 - DNA, 15 bp, Homo sapiens
tttctaggaaacaag

SEQ ID NO: 201322 - DNA, 15 bp, Homo sapiens
ctttctaggaaacaa

SEQ ID NO: 201323 - DNA, 15 bp, Homo sapiens
gctttctaggaaaca

SEQ ID NO: 201324 - DNA, 15 bp, Homo sapiens
tgctttctaggaaac

SEQ ID NO: 201325 - DNA, 15 bp, Homo sapiens
gtgctttctaggaaa

SEQ ID NO: 201326 - DNA, 15 bp, Homo sapiens
tgtgctttctaggaa

SEQ ID NO: 201327 - DNA, 15 bp, Homo sapiens
atgtgctttctagga

SEQ ID NO: 201328 - DNA, 15 bp, Homo sapiens
catgtgctttctagg

SEQ ID NO: 201329 - DNA, 15 bp, Homo sapiens
ccatgtgctttctag

SEQ ID NO: 201330 - DNA, 15 bp, Homo sapiens
tccatgtgctttcta

SEQ ID NO: 201331 - DNA, 15 bp, Homo sapiens
ctccatgtgctttct

SEQ ID NO: 201332 - DNA, 15 bp, Homo sapiens
tctccatgtgctttc

SEQ ID NO: 201333 - DNA, 15 bp, Homo sapiens
ctctccatgtgcttt

SEQ ID NO: 201334 - DNA, 15 bp, Homo sapiens
gctctccatgtgctt

SEQ ID NO: 201335 - DNA, 15 bp, Homo sapiens
agctctccatgtgct

SEQ ID NO: 201336 - DNA, 15 bp, Homo sapiens
tagctctccatgtgc

SEQ ID NO: 201337 - DNA, 15 bp, Homo sapiens
ctagctctccatgtg

SEQ ID NO: 201338 - DNA, 15 bp, Homo sapiens
tctagctctccatgt

SEQ ID NO: 201339 - DNA, 15 bp, Homo sapiens
ctctagctctccatg

SEQ ID NO: 201340 - DNA, 15 bp, Homo sapiens
actctagctctccat

SEQ ID NO: 201341 - DNA, 15 bp, Homo sapiens
tactctagctctcca

SEQ ID NO: 201342 - DNA, 15 bp, Homo sapiens
atactctagctctcc

SEQ ID NO: 201343 - DNA, 15 bp, Homo sapiens
aatactctagctctc

SEQ ID NO: 201344 - DNA, 15 bp, Homo sapiens
caatactctagctct

SEQ ID NO: 201345 - DNA, 15 bp, Homo sapiens
ccaatactctagctc

SEQ ID NO: 201346 - DNA, 15 bp, Homo sapiens
gccaatactctagct

SEQ ID NO: 201347 - DNA, 15 bp, Homo sapiens
cgccaatactctagc

SEQ ID NO: 201348 - DNA, 15 bp, Homo sapiens
tcgccaatactctag

SEQ ID NO: 201349 - DNA, 15 bp, Homo sapiens
ttcgccaatactcta

SEQ ID NO: 201350 - DNA, 15 bp, Homo sapiens
attcgccaatactct

SEQ ID NO: 201351 - DNA, 15 bp, Homo sapiens
aattcgccaatactc

SEQ ID NO: 201352 - DNA, 15 bp, Homo sapiens
caattcgccaatact

SEQ ID NO: 201353 - DNA, 15 bp, Homo sapiens
tcaattcgccaatac

SEQ ID NO: 201354 - DNA, 15 bp, Homo sapiens
ttcaattcgccaata

SEQ ID NO: 201355 - DNA, 15 bp, Homo sapiens
cttcaattcgccaat

SEQ ID NO: 201356 - DNA, 15 bp, Homo sapiens
tcttcaattcgccaa

SEQ ID NO: 201357 - DNA, 15 bp, Homo sapiens
ttcttcaattcgcca

SEQ ID NO: 201358 - DNA, 15 bp, Homo sapiens
tttcttcaattcgcc

SEQ ID NO: 201359 - DNA, 15 bp, Homo sapiens
atttcttcaattcgc

SEQ ID NO: 201360 - DNA, 15 bp, Homo sapiens
gatttcttcaattcg

SEQ ID NO: 201361 - DNA, 15 bp, Homo sapiens
ggatttcttcaattc

SEQ ID NO: 201362 - DNA, 15 bp, Homo sapiens
gggatttcttcaatt

SEQ ID NO: 201363 - DNA, 15 bp, Homo sapiens
ggggatttcttcaat

SEQ ID NO: 201364 - DNA, 15 bp, Homo sapiens
gggggatttcttcaa

SEQ ID NO: 201365 - DNA, 15 bp, Homo sapiens
agggggatttcttca

SEQ ID NO: 201366 - DNA, 15 bp, Homo sapiens
aagggggatttcttc

SEQ ID NO: 201367 - DNA, 15 bp, Homo sapiens
aaagggggatttctt

SEQ ID NO: 201368 - DNA, 15 bp, Homo sapiens
aaaagggggatttct

SEQ ID NO: 201369 - DNA, 15 bp, Homo sapiens
aaaaagggggatttc

SEQ ID NO: 201370 - DNA, 15 bp, Homo sapiens
aaaaaagggggattt

SEQ ID NO: 201371 - DNA, 15 bp, Homo sapiens
aaaaaaagggggatt

SEQ ID NO: 201372 - DNA, 15 bp, Homo sapiens
aaaaaaaagggggat

SEQ ID NO: 201373 - DNA, 15 bp, Homo sapiens
aaaaaaaaaggggga

SEQ ID NO: 201374 - DNA, 15 bp, Homo sapiens
taaaaaaaaaggggg

SEQ ID NO: 201375 - DNA, 15 bp, Homo sapiens
ttaaaaaaaaagggg

SEQ ID NO: 201376 - DNA, 15 bp, Homo sapiens
gttaaaaaaaaaggg

SEQ ID NO: 201377 - DNA, 15 bp, Homo sapiens
tgttaaaaaaaaagg

SEQ ID NO: 201378 - DNA, 15 bp, Homo sapiens
gtgttaaaaaaaaag

SEQ ID NO: 201379 - DNA, 15 bp, Homo sapiens
tgtgttaaaaaaaaa

SEQ ID NO: 201380 - DNA, 15 bp, Homo sapiens
gtgtgttaaaaaaaa

SEQ ID NO: 201381 - DNA, 15 bp, Homo sapiens
agtgtgttaaaaaaa

SEQ ID NO: 201382 - DNA, 15 bp, Homo sapiens
aagtgtgttaaaaaa

SEQ ID NO: 201383 - DNA, 15 bp, Homo sapiens
taagtgtgttaaaaa

SEQ ID NO: 201384 - DNA, 15 bp, Homo sapiens
ttaagtgtgttaaaa

SEQ ID NO: 201385 - DNA, 15 bp, Homo sapiens
cttaagtgtgttaaa

SEQ ID NO: 201386 - DNA, 15 bp, Homo sapiens
tcttaagtgtgttaa

SEQ ID NO: 201387 - DNA, 15 bp, Homo sapiens
ttcttaagtgtgtta

SEQ ID NO: 201388 - DNA, 15 bp, Homo sapiens
tttcttaagtgtgtt

SEQ ID NO: 201389 - DNA, 15 bp, Homo sapiens
ctttcttaagtgtgt

SEQ ID NO: 201390 - DNA, 15 bp, Homo sapiens
cctttcttaagtgtg

SEQ ID NO: 201391 - DNA, 15 bp, Homo sapiens
ccctttcttaagtgt

SEQ ID NO: 201392 - DNA, 15 bp, Homo sapiens
cccctttcttaagtg

SEQ ID NO: 201393 - DNA, 15 bp, Homo sapiens
tcccctttcttaagt

SEQ ID NO: 201394 - DNA, 15 bp, Homo sapiens
gtcccctttcttaag

SEQ ID NO: 201395 - DNA, 15 bp, Homo sapiens
agtcccctttcttaa

SEQ ID NO: 201396 - DNA, 15 bp, Homo sapiens
cagtcccctttctta

SEQ ID NO: 201397 - DNA, 15 bp, Homo sapiens
gcagtcccctttctt

SEQ ID NO: 201398 - DNA, 15 bp, Homo sapiens
tgcagtcccctttct

SEQ ID NO: 201399 - DNA, 15 bp, Homo sapiens
ctgcagtcccctttc

SEQ ID NO: 201400 - DNA, 15 bp, Homo sapiens
cctgcagtccccttt

SEQ ID NO: 201401 - DNA, 15 bp, Homo sapiens
acctgcagtcccctt

SEQ ID NO: 201402 - DNA, 15 bp, Homo sapiens
tacctgcagtcccct

SEQ ID NO: 201403 - DNA, 15 bp, Homo sapiens
atacctgcagtcccc

SEQ ID NO: 201404 - DNA, 15 bp, Homo sapiens
tatacctgcagtccc

SEQ ID NO: 201405 - DNA, 15 bp, Homo sapiens
gtatacctgcagtcc

SEQ ID NO: 201406 - DNA, 15 bp, Homo sapiens
agtatacctgcagtc

SEQ ID NO: 201407 - DNA, 15 bp, Homo sapiens
gagtatacctgcagt

SEQ ID NO: 201408 - DNA, 15 bp, Homo sapiens
tgagtatacctgcag

SEQ ID NO: 201409 - DNA, 15 bp, Homo sapiens
ttgagtatacctgca

SEQ ID NO: 201410 - DNA, 15 bp, Homo sapiens
cttgagtatacctgc

SEQ ID NO: 201411 - DNA, 15 bp, Homo sapiens
tcttgagtatacctg

SEQ ID NO: 201412 - DNA, 15 bp, Homo sapiens
ctcttgagtatacct

SEQ ID NO: 201413 - DNA, 15 bp, Homo sapiens
tctcttgagtatacc

SEQ ID NO: 201414 - DNA, 15 bp, Homo sapiens
ctctcttgagtatac

SEQ ID NO: 201415 - DNA, 15 bp, Homo sapiens
actctcttgagtata

SEQ ID NO: 201416 - DNA, 15 bp, Homo sapiens
tactctcttgagtat

SEQ ID NO: 201417 - DNA, 15 bp, Homo sapiens
ttactctcttgagta

SEQ ID NO: 201418 - DNA, 15 bp, Homo sapiens
cttactctcttgagt

SEQ ID NO: 201419 - DNA, 15 bp, Homo sapiens
acttactctcttgag

SEQ ID NO: 201420 - DNA, 15 bp, Homo sapiens
gacttactctcttga

SEQ ID NO: 201421 - DNA, 15 bp, Homo sapiens
cgacttactctcttg

SEQ ID NO: 201422 - DNA, 15 bp, Homo sapiens
gcgacttactctctt

SEQ ID NO: 201423 - DNA, 15 bp, Homo sapiens
tgcgacttactctct

SEQ ID NO: 201424 - DNA, 15 bp, Homo sapiens
gtgcgacttactctc

SEQ ID NO: 201425 - DNA, 15 bp, Homo sapiens
ggtgcgacttactct

SEQ ID NO: 201426 - DNA, 15 bp, Homo sapiens
tggtgcgacttactc

SEQ ID NO: 201427 - DNA, 15 bp, Homo sapiens
ctggtgcgacttact

SEQ ID NO: 201428 - DNA, 15 bp, Homo sapiens
tctggtgcgacttac

SEQ ID NO: 201429 - DNA, 15 bp, Homo sapiens
ttctggtgcgactta

SEQ ID NO: 201430 - DNA, 15 bp, Homo sapiens
tttctggtgcgactt

SEQ ID NO: 201431 - DNA, 15 bp, Homo sapiens
gtttctggtgcgact

SEQ ID NO: 201432 - DNA, 15 bp, Homo sapiens
ggtttctggtgcgac

SEQ ID NO: 201433 - DNA, 15 bp, Homo sapiens
tggtttctggtgcga

SEQ ID NO: 201434 - DNA, 15 bp, Homo sapiens
gtggtttctggtgcg

SEQ ID NO: 201435 - DNA, 15 bp, Homo sapiens
agtggtttctggtgc

SEQ ID NO: 201436 - DNA, 15 bp, Homo sapiens
aagtggtttctggtg

SEQ ID NO: 201437 - DNA, 15 bp, Homo sapiens
aaagtggtttctggt

SEQ ID NO: 201438 - DNA, 15 bp, Homo sapiens
aaaagtggtttctgg

SEQ ID NO: 201439 - DNA, 15 bp, Homo sapiens
caaaagtggtttctg

SEQ ID NO: 201440 - DNA, 15 bp, Homo sapiens
tcaaaagtggtttct

SEQ ID NO: 201441 - DNA, 15 bp, Homo sapiens
atcaaaagtggtttc

SEQ ID NO: 201442 - DNA, 15 bp, Homo sapiens
gatcaaaagtggttt

SEQ ID NO: 201443 - DNA, 15 bp, Homo sapiens
ggatcaaaagtggtt

SEQ ID NO: 201444 - DNA, 15 bp, Homo sapiens
tggatcaaaagtggt

SEQ ID NO: 201445 - DNA, 15 bp, Homo sapiens
gtggatcaaaagtgg

SEQ ID NO: 201446 - DNA, 15 bp, Homo sapiens
tgtggatcaaaagtg

SEQ ID NO: 201447 - DNA, 15 bp, Homo sapiens
ctgtggatcaaaagt

SEQ ID NO: 201448 - DNA, 15 bp, Homo sapiens
actgtggatcaaaag

SEQ ID NO: 201449 - DNA, 15 bp, Homo sapiens
gactgtggatcaaaa

SEQ ID NO: 201450 - DNA, 15 bp, Homo sapiens
agactgtggatcaaa

SEQ ID NO: 201451 - DNA, 15 bp, Homo sapiens
cagactgtggatcaa

SEQ ID NO: 201452 - DNA, 15 bp, Homo sapiens
gcagactgtggatca

SEQ ID NO: 201453 - DNA, 15 bp, Homo sapiens
ggcagactgtggatc

SEQ ID NO: 201454 - DNA, 15 bp, Homo sapiens
aggcagactgtggat

SEQ ID NO: 201455 - DNA, 15 bp, Homo sapiens
caggcagactgtgga

SEQ ID NO: 201456 - DNA, 15 bp, Homo sapiens
acaggcagactgtgg

SEQ ID NO: 201457 - DNA, 15 bp, Homo sapiens
cacaggcagactgtg

SEQ ID NO: 201458 - DNA, 15 bp, Homo sapiens
acacaggcagactgt

SEQ ID NO: 201459 - DNA, 15 bp, Homo sapiens
gacacaggcagactg

SEQ ID NO: 201460 - DNA, 15 bp, Homo sapiens
tgacacaggcagact

SEQ ID NO: 201461 - DNA, 15 bp, Homo sapiens
gtgacacaggcagac

SEQ ID NO: 201462 - DNA, 15 bp, Homo sapiens
tgtgacacaggcaga

SEQ ID NO: 201463 - DNA, 15 bp, Homo sapiens
gtgtgacacaggcag

SEQ ID NO: 201464 - DNA, 15 bp, Homo sapiens
tgtgtgacacaggca

SEQ ID NO: 201465 - DNA, 15 bp, Homo sapiens
ttgtgtgacacaggc

SEQ ID NO: 201466 - DNA, 15 bp, Homo sapiens
attgtgtgacacagg

SEQ ID NO: 201467 - DNA, 15 bp, Homo sapiens
aattgtgtgacacag

SEQ ID NO: 201468 - DNA, 15 bp, Homo sapiens
caattgtgtgacaca

SEQ ID NO: 201469 - DNA, 15 bp, Homo sapiens
tcaattgtgtgacac

SEQ ID NO: 201470 - DNA, 15 bp, Homo sapiens
ttcaattgtgtgaca

SEQ ID NO: 201471 - DNA, 15 bp, Homo sapiens
tttcaattgtgtgac

SEQ ID NO: 201472 - DNA, 15 bp, Homo sapiens
atttcaattgtgtga

SEQ ID NO: 201473 - DNA, 15 bp, Homo sapiens
catttcaattgtgtg

SEQ ID NO: 201474 - DNA, 15 bp, Homo sapiens
gcatttcaattgtgt

SEQ ID NO: 201475 - DNA, 15 bp, Homo sapiens
tgcatttcaattgtg

SEQ ID NO: 201476 - DNA, 15 bp, Homo sapiens
atgcatttcaattgt

SEQ ID NO: 201477 - DNA, 15 bp, Homo sapiens
gatgcatttcaattg

SEQ ID NO: 201478 - DNA, 15 bp, Homo sapiens
tgatgcatttcaatt

SEQ ID NO: 201479 - DNA, 15 bp, Homo sapiens
gtgatgcatttcaat

SEQ ID NO: 201480 - DNA, 15 bp, Homo sapiens
tgtgatgcatttcaa

SEQ ID NO: 201481 - DNA, 15 bp, Homo sapiens
ttgtgatgcatttca

SEQ ID NO: 201482 - DNA, 15 bp, Homo sapiens
gttgtgatgcatttc

SEQ ID NO: 201483 - DNA, 15 bp, Homo sapiens
tgttgtgatgcattt

SEQ ID NO: 201484 - DNA, 15 bp, Homo sapiens
atgttgtgatgcatt

SEQ ID NO: 201485 - DNA, 15 bp, Homo sapiens
aatgttgtgatgcat

SEQ ID NO: 201486 - DNA, 15 bp, Homo sapiens
caatgttgtgatgca

SEQ ID NO: 201487 - DNA, 15 bp, Homo sapiens
tcaatgttgtgatgc

SEQ ID NO: 201488 - DNA, 15 bp, Homo sapiens
gtcaatgttgtgatg

SEQ ID NO: 201489 - DNA, 15 bp, Homo sapiens
tgtcaatgttgtgat

SEQ ID NO: 201490 - DNA, 15 bp, Homo sapiens
gtgtcaatgttgtga

SEQ ID NO: 201491 - DNA, 15 bp, Homo sapiens
agtgtcaatgttgtg

SEQ ID NO: 201492 - DNA, 15 bp, Homo sapiens
cagtgtcaatgttgt

SEQ ID NO: 201493 - DNA, 15 bp, Homo sapiens
acagtgtcaatgttg

SEQ ID NO: 201494 - DNA, 15 bp, Homo sapiens
cacagtgtcaatgtt

SEQ ID NO: 201495 - DNA, 15 bp, Homo sapiens
ccacagtgtcaatgt

SEQ ID NO: 201496 - DNA, 15 bp, Homo sapiens
tccacagtgtcaatg

SEQ ID NO: 201497 - DNA, 15 bp, Homo sapiens
atccacagtgtcaat

SEQ ID NO: 201498 - DNA, 15 bp, Homo sapiens
catccacagtgtcaa

SEQ ID NO: 201499 - DNA, 15 bp, Homo sapiens
tcatccacagtgtca

SEQ ID NO: 201500 - DNA, 15 bp, Homo sapiens
ttcatccacagtgtc

SEQ ID NO: 201501 - DNA, 15 bp, Homo sapiens
tttcatccacagtgt

SEQ ID NO: 201502 - DNA, 15 bp, Homo sapiens
gtttcatccacagtg

SEQ ID NO: 201503 - DNA, 15 bp, Homo sapiens
tgtttcatccacagt

SEQ ID NO: 201504 - DNA, 15 bp, Homo sapiens
ttgtttcatccacag

SEQ ID NO: 201505 - DNA, 15 bp, Homo sapiens
tttgtttcatccaca

SEQ ID NO: 201506 - DNA, 15 bp, Homo sapiens
ttttgtttcatccac

SEQ ID NO: 201507 - DNA, 15 bp, Homo sapiens
attttgtttcatcca

SEQ ID NO: 201508 - DNA, 15 bp, Homo sapiens
gattttgtttcatcc

SEQ ID NO: 201509 - DNA, 15 bp, Homo sapiens
tgattttgtttcatc

SEQ ID NO: 201510 - DNA, 15 bp, Homo sapiens
ctgattttgtttcat

SEQ ID NO: 201511 - DNA, 15 bp, Homo sapiens
actgattttgtttca

SEQ ID NO: 201512 - DNA, 15 bp, Homo sapiens
cactgattttgtttc

SEQ ID NO: 201513 - DNA, 15 bp, Homo sapiens
acactgattttgttt

SEQ ID NO: 201514 - DNA, 15 bp, Homo sapiens
cacactgattttgtt

SEQ ID NO: 201515 - DNA, 15 bp, Homo sapiens
tcacactgattttgt

SEQ ID NO: 201516 - DNA, 15 bp, Homo sapiens
ttcacactgattttg

SEQ ID NO: 201517 - DNA, 15 bp, Homo sapiens
attcacactgatttt

SEQ ID NO: 201518 - DNA, 15 bp, Homo sapiens
aattcacactgattt

SEQ ID NO: 201519 - DNA, 15 bp, Homo sapiens
aaattcacactgatt

SEQ ID NO: 201520 - DNA, 15 bp, Homo sapiens
aaaattcacactgat

SEQ ID NO: 201521 - DNA, 15 bp, Homo sapiens
taaaattcacactga

SEQ ID NO: 201522 - DNA, 15 bp, Homo sapiens
ctaaaattcacactg

SEQ ID NO: 201523 - DNA, 15 bp, Homo sapiens
actaaaattcacact

SEQ ID NO: 201524 - DNA, 15 bp, Homo sapiens
tactaaaattcacac

SEQ ID NO: 201525 - DNA, 15 bp, Homo sapiens
ctactaaaattcaca

SEQ ID NO: 201526 - DNA, 15 bp, Homo sapiens
actactaaaattcac

SEQ ID NO: 201527 - DNA, 15 bp, Homo sapiens
cactactaaaattca

SEQ ID NO: 201528 - DNA, 15 bp, Homo sapiens
tcactactaaaattc

SEQ ID NO: 201529 - DNA, 15 bp, Homo sapiens
ttcactactaaaatt

SEQ ID NO: 201530 - DNA, 15 bp, Homo sapiens
attcactactaaaat

SEQ ID NO: 201531 - DNA, 15 bp, Homo sapiens
aattcactactaaaa

SEQ ID NO: 201532 - DNA, 15 bp, Homo sapiens
aaattcactactaaa

SEQ ID NO: 201533 - DNA, 15 bp, Homo sapiens
gaaattcactactaa

SEQ ID NO: 201534 - DNA, 15 bp, Homo sapiens
tgaaattcactacta

SEQ ID NO: 201535 - DNA, 15 bp, Homo sapiens
atgaaattcactact

SEQ ID NO: 201536 - DNA, 15 bp, Homo sapiens
aatgaaattcactac

SEQ ID NO: 201537 - DNA, 15 bp, Homo sapiens
gaatgaaattcacta

SEQ ID NO: 201538 - DNA, 15 bp, Homo sapiens
tgaatgaaattcact

SEQ ID NO: 201539 - DNA, 15 bp, Homo sapiens
atgaatgaaattcac

SEQ ID NO: 201540 - DNA, 15 bp, Homo sapiens
tatgaatgaaattca

SEQ ID NO: 201541 - DNA, 15 bp, Homo sapiens
ttatgaatgaaattc

SEQ ID NO: 201542 - DNA, 15 bp, Homo sapiens
attatgaatgaaatt

SEQ ID NO: 201543 - DNA, 15 bp, Homo sapiens
aattatgaatgaaat

SEQ ID NO: 201544 - DNA, 15 bp, Homo sapiens
aaattatgaatgaaa

SEQ ID NO: 201545 - DNA, 15 bp, Homo sapiens
caaattatgaatgaa

SEQ ID NO: 201546 - DNA, 15 bp, Homo sapiens
tcaaattatgaatga

SEQ ID NO: 201547 - DNA, 15 bp, Homo sapiens
atcaaattatgaatg

SEQ ID NO: 201548 - DNA, 15 bp, Homo sapiens
gatcaaattatgaat

SEQ ID NO: 201549 - DNA, 15 bp, Homo sapiens
cgatcaaattatgaa

SEQ ID NO: 201550 - DNA, 15 bp, Homo sapiens
acgatcaaattatga

SEQ ID NO: 201551 - DNA, 15 bp, Homo sapiens
cacgatcaaattatg

SEQ ID NO: 201552 - DNA, 15 bp, Homo sapiens
gcacgatcaaattat

SEQ ID NO: 201553 - DNA, 15 bp, Homo sapiens
tgcacgatcaaatta

SEQ ID NO: 201554 - DNA, 15 bp, Homo sapiens
ttgcacgatcaaatt

SEQ ID NO: 201555 - DNA, 15 bp, Homo sapiens
tttgcacgatcaaat

SEQ ID NO: 201556 - DNA, 15 bp, Homo sapiens
gtttgcacgatcaaa

SEQ ID NO: 201557 - DNA, 15 bp, Homo sapiens
cgtttgcacgatcaa

SEQ ID NO: 201558 - DNA, 15 bp, Homo sapiens
acgtttgcacgatca

SEQ ID NO: 201559 - DNA, 15 bp, Homo sapiens
aacgtttgcacgatc

SEQ ID NO: 201560 - DNA, 15 bp, Homo sapiens
aaacgtttgcacgat

SEQ ID NO: 201561 - DNA, 15 bp, Homo sapiens
caaacgtttgcacga

SEQ ID NO: 201562 - DNA, 15 bp, Homo sapiens
tcaaacgtttgcacg

SEQ ID NO: 201563 - DNA, 15 bp, Homo sapiens
atcaaacgtttgcac

SEQ ID NO: 201564 - DNA, 15 bp, Homo sapiens
aatcaaacgtttgca

SEQ ID NO: 201565 - DNA, 15 bp, Homo sapiens
aaatcaaacgtttgc

SEQ ID NO: 201566 - DNA, 15 bp, Homo sapiens
aaaatcaaacgtttg

SEQ ID NO: 201567 - DNA, 15 bp, Homo sapiens
aaaaatcaaacgttt

SEQ ID NO: 201568 - DNA, 15 bp, Homo sapiens
taaaaatcaaacgtt

SEQ ID NO: 201569 - DNA, 15 bp, Homo sapiens
ataaaaatcaaacgt

SEQ ID NO: 201570 - DNA, 15 bp, Homo sapiens
aataaaaatcaaacg

SEQ ID NO: 201571 - DNA, 15 bp, Homo sapiens
taataaaaatcaaac

SEQ ID NO: 201572 - DNA, 15 bp, Homo sapiens
gtaataaaaatcaaa

SEQ ID NO: 201573 - DNA, 15 bp, Homo sapiens
agtaataaaaatcaa

SEQ ID NO: 201574 - DNA, 15 bp, Homo sapiens
aagtaataaaaatca

SEQ ID NO: 201575 - DNA, 15 bp, Homo sapiens
aaagtaataaaaatc

SEQ ID NO: 201576 - DNA, 15 bp, Homo sapiens
taaagtaataaaaat

SEQ ID NO: 201577 - DNA, 15 bp, Homo sapiens
ctaaagtaataaaaa

SEQ ID NO: 201578 - DNA, 15 bp, Homo sapiens
tctaaagtaataaaa

SEQ ID NO: 201579 - DNA, 15 bp, Homo sapiens
gtctaaagtaataaa

SEQ ID NO: 201580 - DNA, 15 bp, Homo sapiens
agtctaaagtaataa

SEQ ID NO: 201581 - DNA, 15 bp, Homo sapiens
tagtctaaagtaata

SEQ ID NO: 201582 - DNA, 15 bp, Homo sapiens
atagtctaaagtaat

SEQ ID NO: 201583 - DNA, 15 bp, Homo sapiens
aatagtctaaagtaa

SEQ ID NO: 201584 - DNA, 15 bp, Homo sapiens
caatagtctaaagta

SEQ ID NO: 201585 - DNA, 15 bp, Homo sapiens
acaatagtctaaagt

SEQ ID NO: 201586 - DNA, 15 bp, Homo sapiens
aacaatagtctaaag

SEQ ID NO: 201587 - DNA, 15 bp, Homo sapiens
aaacaatagtctaaa

SEQ ID NO: 201588 - DNA, 15 bp, Homo sapiens
gaaacaatagtctaa

SEQ ID NO: 201589 - DNA, 15 bp, Homo sapiens
agaaacaatagtcta

SEQ ID NO: 201590 - DNA, 15 bp, Homo sapiens
cagaaacaatagtct

SEQ ID NO: 201591 - DNA, 15 bp, Homo sapiens
tcagaaacaatagtc

SEQ ID NO: 201592 - DNA, 15 bp, Homo sapiens
atcagaaacaatagt

SEQ ID NO: 201593 - DNA, 15 bp, Homo sapiens
aatcagaaacaatag

SEQ ID NO: 201594 - DNA, 15 bp, Homo sapiens
aaatcagaaacaata

SEQ ID NO: 201595 - DNA, 15 bp, Homo sapiens
aaaatcagaaacaat

SEQ ID NO: 201596 - DNA, 15 bp, Homo sapiens
taaaatcagaaacaa

SEQ ID NO: 201597 - DNA, 15 bp, Homo sapiens
ataaaatcagaaaca

SEQ ID NO: 201598 - DNA, 15 bp, Homo sapiens
cataaaatcagaaac

SEQ ID NO: 201599 - DNA, 15 bp, Homo sapiens
acataaaatcagaaa

SEQ ID NO: 201600 - DNA, 15 bp, Homo sapiens
aacataaaatcagaa

SEQ ID NO: 201601 - DNA, 15 bp, Homo sapiens
caacataaaatcaga

SEQ ID NO: 201602 - DNA, 15 bp, Homo sapiens
ccaacataaaatcag

SEQ ID NO: 201603 - DNA, 15 bp, Homo sapiens
cccaacataaaatca

SEQ ID NO: 201604 - DNA, 15 bp, Homo sapiens
acccaacataaaatc

SEQ ID NO: 201605 - DNA, 15 bp, Homo sapiens
aacccaacataaaat

SEQ ID NO: 201606 - DNA, 15 bp, Homo sapiens
caacccaacataaaa

SEQ ID NO: 201607 - DNA, 15 bp, Homo sapiens
ccaacccaacataaa

SEQ ID NO: 201608 - DNA, 15 bp, Homo sapiens
accaacccaacataa

SEQ ID NO: 201609 - DNA, 15 bp, Homo sapiens
taccaacccaacata

SEQ ID NO: 201610 - DNA, 15 bp, Homo sapiens
ataccaacccaacat

SEQ ID NO: 201611 - DNA, 15 bp, Homo sapiens
aataccaacccaaca

SEQ ID NO: 201612 - DNA, 15 bp, Homo sapiens
aaataccaacccaac

SEQ ID NO: 201613 - DNA, 15 bp, Homo sapiens
gaaataccaacccaa

SEQ ID NO: 201614 - DNA, 15 bp, Homo sapiens
ggaaataccaaccca

SEQ ID NO: 201615 - DNA, 15 bp, Homo sapiens
aggaaataccaaccc

SEQ ID NO: 201616 - DNA, 15 bp, Homo sapiens
caggaaataccaacc

SEQ ID NO: 201617 - DNA, 15 bp, Homo sapiens
acaggaaataccaac

SEQ ID NO: 201618 - DNA, 15 bp, Homo sapiens
cacaggaaataccaa

SEQ ID NO: 201619 - DNA, 15 bp, Homo sapiens
tcacaggaaatacca

SEQ ID NO: 201620 - DNA, 15 bp, Homo sapiens
ctcacaggaaatacc

SEQ ID NO: 201621 - DNA, 15 bp, Homo sapiens
actcacaggaaatac

SEQ ID NO: 201622 - DNA, 15 bp, Homo sapiens
aactcacaggaaata

SEQ ID NO: 201623 - DNA, 15 bp, Homo sapiens
taactcacaggaaat

SEQ ID NO: 201624 - DNA, 15 bp, Homo sapiens
gtaactcacaggaaa

SEQ ID NO: 201625 - DNA, 15 bp, Homo sapiens
agtaactcacaggaa

SEQ ID NO: 201626 - DNA, 15 bp, Homo sapiens
cagtaactcacagga

SEQ ID NO: 201627 - DNA, 15 bp, Homo sapiens
acagtaactcacagg

SEQ ID NO: 201628 - DNA, 15 bp, Homo sapiens
aacagtaactcacag

SEQ ID NO: 201629 - DNA, 15 bp, Homo sapiens
aaacagtaactcaca

SEQ ID NO: 201630 - DNA, 15 bp, Homo sapiens
aaaacagtaactcac

SEQ ID NO: 201631 - DNA, 15 bp, Homo sapiens
gaaaacagtaactca

SEQ ID NO: 201632 - DNA, 15 bp, Homo sapiens
ggaaaacagtaactc

SEQ ID NO: 201633 - DNA, 15 bp, Homo sapiens
aggaaaacagtaact

SEQ ID NO: 201634 - DNA, 15 bp, Homo sapiens
aaggaaaacagtaac

SEQ ID NO: 201635 - DNA, 15 bp, Homo sapiens
aaaggaaaacagtaa

SEQ ID NO: 201636 - DNA, 15 bp, Homo sapiens
taaaggaaaacagta

SEQ ID NO: 201637 - DNA, 15 bp, Homo sapiens
ttaaaggaaaacagt

SEQ ID NO: 201638 - DNA, 15 bp, Homo sapiens
tttaaaggaaaacag

SEQ ID NO: 201639 - DNA, 15 bp, Homo sapiens
ttttaaaggaaaaca

SEQ ID NO: 201640 - DNA, 15 bp, Homo sapiens
attttaaaggaaaac

SEQ ID NO: 201641 - DNA, 15 bp, Homo sapiens
tattttaaaggaaaa

SEQ ID NO: 201642 - DNA, 15 bp, Homo sapiens
ctattttaaaggaaa

SEQ ID NO: 201643 - DNA, 15 bp, Homo sapiens
cctattttaaaggaa

SEQ ID NO: 201644 - DNA, 15 bp, Homo sapiens
tcctattttaaagga

SEQ ID NO: 201645 - DNA, 15 bp, Homo sapiens
ttcctattttaaagg

SEQ ID NO: 201646 - DNA, 15 bp, Homo sapiens
attcctattttaaag

SEQ ID NO: 201647 - DNA, 15 bp, Homo sapiens
aattcctattttaaa

SEQ ID NO: 201648 - DNA, 15 bp, Homo sapiens
aaattcctattttaa

SEQ ID NO: 201649 - DNA, 15 bp, Homo sapiens
aaaattcctatttta

SEQ ID NO: 201650 - DNA, 15 bp, Homo sapiens
aaaaattcctatttt

SEQ ID NO: 201651 - DNA, 15 bp, Homo sapiens
gaaaaattcctattt

SEQ ID NO: 201652 - DNA, 15 bp, Homo sapiens
tgaaaaattcctatt

SEQ ID NO: 201653 - DNA, 15 bp, Homo sapiens
atgaaaaattcctat

SEQ ID NO: 201654 - DNA, 15 bp, Homo sapiens
tatgaaaaattccta

SEQ ID NO: 201655 - DNA, 15 bp, Homo sapiens
gtatgaaaaattcct

SEQ ID NO: 201656 - DNA, 15 bp, Homo sapiens
agtatgaaaaattcc

SEQ ID NO: 201657 - DNA, 15 bp, Homo sapiens
gagtatgaaaaattc

SEQ ID NO: 201658 - DNA, 15 bp, Homo sapiens
agagtatgaaaaatt

SEQ ID NO: 201659 - DNA, 15 bp, Homo sapiens
aagagtatgaaaaat

SEQ ID NO: 201660 - DNA, 15 bp, Homo sapiens
gaagagtatgaaaaa

SEQ ID NO: 201661 - DNA, 15 bp, Homo sapiens
tgaagagtatgaaaa

SEQ ID NO: 201662 - DNA, 15 bp, Homo sapiens
ttgaagagtatgaaa

SEQ ID NO: 201663 - DNA, 15 bp, Homo sapiens
tttgaagagtatgaa

SEQ ID NO: 201664 - DNA, 15 bp, Homo sapiens
ctttgaagagtatga

SEQ ID NO: 201665 - DNA, 15 bp, Homo sapiens
tctttgaagagtatg

SEQ ID NO: 201666 - DNA, 15 bp, Homo sapiens
atctttgaagagtat

SEQ ID NO: 201667 - DNA, 15 bp, Homo sapiens
aatctttgaagagta

SEQ ID NO: 201668 - DNA, 15 bp, Homo sapiens
taatctttgaagagt

SEQ ID NO: 201669 - DNA, 15 bp, Homo sapiens
ctaatctttgaagag

SEQ ID NO: 201670 - DNA, 15 bp, Homo sapiens
tctaatctttgaaga

SEQ ID NO: 201671 - DNA, 15 bp, Homo sapiens
ttctaatctttgaag

SEQ ID NO: 201672 - DNA, 15 bp, Homo sapiens
gttctaatctttgaa

SEQ ID NO: 201673 - DNA, 15 bp, Homo sapiens
tgttctaatctttga

SEQ ID NO: 201674 - DNA, 15 bp, Homo sapiens
ttgttctaatctttg

SEQ ID NO: 201675 - DNA, 15 bp, Homo sapiens
tttgttctaatcttt

SEQ ID NO: 201676 - DNA, 15 bp, Homo sapiens
atttgttctaatctt

SEQ ID NO: 201677 - DNA, 15 bp, Homo sapiens
catttgttctaatct

SEQ ID NO: 201678 - DNA, 15 bp, Homo sapiens
acatttgttctaatc

SEQ ID NO: 201679 - DNA, 15 bp, Homo sapiens
gacatttgttctaat

SEQ ID NO: 201680 - DNA, 15 bp, Homo sapiens
ggacatttgttctaa

SEQ ID NO: 201681 - DNA, 15 bp, Homo sapiens
tggacatttgttcta

SEQ ID NO: 201682 - DNA, 15 bp, Homo sapiens
ctggacatttgttct

SEQ ID NO: 201683 - DNA, 15 bp, Homo sapiens
actggacatttgttc

SEQ ID NO: 201684 - DNA, 15 bp, Homo sapiens
aactggacatttgtt

SEQ ID NO: 201685 - DNA, 15 bp, Homo sapiens
aaactggacatttgt

SEQ ID NO: 201686 - DNA, 15 bp, Homo sapiens
aaaactggacatttg

SEQ ID NO: 201687 - DNA, 15 bp, Homo sapiens
aaaaactggacattt

SEQ ID NO: 201688 - DNA, 15 bp, Homo sapiens
caaaaactggacatt

SEQ ID NO: 201689 - DNA, 15 bp, Homo sapiens
gcaaaaactggacat

SEQ ID NO: 201690 - DNA, 15 bp, Homo sapiens
agcaaaaactggaca

SEQ ID NO: 201691 - DNA, 15 bp, Homo sapiens
cagcaaaaactggac

SEQ ID NO: 201692 - DNA, 15 bp, Homo sapiens
acagcaaaaactgga

SEQ ID NO: 201693 - DNA, 15 bp, Homo sapiens
aacagcaaaaactgg

SEQ ID NO: 201694 - DNA, 15 bp, Homo sapiens
aaacagcaaaaactg

SEQ ID NO: 201695 - DNA, 15 bp, Homo sapiens
gaaacagcaaaaact

SEQ ID NO: 201696 - DNA, 15 bp, Homo sapiens
tgaaacagcaaaaac

SEQ ID NO: 201697 - DNA, 15 bp, Homo sapiens
atgaaacagcaaaaa

SEQ ID NO: 201698 - DNA, 15 bp, Homo sapiens
catgaaacagcaaaa

SEQ ID NO: 201699 - DNA, 15 bp, Homo sapiens
tcatgaaacagcaaa

SEQ ID NO: 201700 - DNA, 15 bp, Homo sapiens
ttcatgaaacagcaa

SEQ ID NO: 201701 - DNA, 15 bp, Homo sapiens
attcatgaaacagca

SEQ ID NO: 201702 - DNA, 15 bp, Homo sapiens
cattcatgaaacagc

SEQ ID NO: 201703 - DNA, 15 bp, Homo sapiens
tcattcatgaaacag

SEQ ID NO: 201704 - DNA, 15 bp, Homo sapiens
ctcattcatgaaaca

SEQ ID NO: 201705 - DNA, 15 bp, Homo sapiens
actcattcatgaaac

SEQ ID NO: 201706 - DNA, 15 bp, Homo sapiens
gactcattcatgaaa

SEQ ID NO: 201707 - DNA, 15 bp, Homo sapiens
ggactcattcatgaa

SEQ ID NO: 201708 - DNA, 15 bp, Homo sapiens
aggactcattcatga

SEQ ID NO: 201709 - DNA, 15 bp, Homo sapiens
caggactcattcatg

SEQ ID NO: 201710 - DNA, 15 bp, Homo sapiens
acaggactcattcat

SEQ ID NO: 201711 - DNA, 15 bp, Homo sapiens
gacaggactcattca

SEQ ID NO: 201712 - DNA, 15 bp, Homo sapiens
ggacaggactcattc

SEQ ID NO: 201713 - DNA, 15 bp, Homo sapiens
tggacaggactcatt

SEQ ID NO: 201714 - DNA, 15 bp, Homo sapiens
atggacaggactcat

SEQ ID NO: 201715 - DNA, 15 bp, Homo sapiens
gatggacaggactca

SEQ ID NO: 201716 - DNA, 15 bp, Homo sapiens
agatggacaggactc

SEQ ID NO: 201717 - DNA, 15 bp, Homo sapiens
aagatggacaggact

SEQ ID NO: 201718 - DNA, 15 bp, Homo sapiens
aaagatggacaggac

SEQ ID NO: 201719 - DNA, 15 bp, Homo sapiens
caaagatggacagga

SEQ ID NO: 201720 - DNA, 15 bp, Homo sapiens
acaaagatggacagg

SEQ ID NO: 201721 - DNA, 15 bp, Homo sapiens
tacaaagatggacag

SEQ ID NO: 201722 - DNA, 15 bp, Homo sapiens
ctacaaagatggaca

SEQ ID NO: 201723 - DNA, 15 bp, Homo sapiens
tctacaaagatggac

SEQ ID NO: 201724 - DNA, 15 bp, Homo sapiens
ttctacaaagatgga

SEQ ID NO: 201725 - DNA, 15 bp, Homo sapiens
tttctacaaagatgg

SEQ ID NO: 201726 - DNA, 15 bp, Homo sapiens
gtttctacaaagatg

SEQ ID NO: 201727 - DNA, 15 bp, Homo sapiens
agtttctacaaagat

SEQ ID NO: 201728 - DNA, 15 bp, Homo sapiens
gagtttctacaaaga

SEQ ID NO: 201729 - DNA, 15 bp, Homo sapiens
cgagtttctacaaag

SEQ ID NO: 201730 - DNA, 15 bp, Homo sapiens
gcgagtttctacaaa

SEQ ID NO: 201731 - DNA, 15 bp, Homo sapiens
ggcgagtttctacaa

SEQ ID NO: 201732 - DNA, 15 bp, Homo sapiens
aggcgagtttctaca

SEQ ID NO: 201733 - DNA, 15 bp, Homo sapiens
aaggcgagtttctac

SEQ ID NO: 201734 - DNA, 15 bp, Homo sapiens
taaggcgagtttcta

SEQ ID NO: 201735 - DNA, 15 bp, Homo sapiens
ataaggcgagtttct

SEQ ID NO: 201736 - DNA, 15 bp, Homo sapiens
cataaggcgagtttc

SEQ ID NO: 201737 - DNA, 15 bp, Homo sapiens
acataaggcgagttt

SEQ ID NO: 201738 - DNA, 15 bp, Homo sapiens
aacataaggcgagtt

SEQ ID NO: 201739 - DNA, 15 bp, Homo sapiens
gaacataaggcgagt

SEQ ID NO: 201740 - DNA, 15 bp, Homo sapiens
tgaacataaggcgag

SEQ ID NO: 201741 - DNA, 15 bp, Homo sapiens
gtgaacataaggcga

SEQ ID NO: 201742 - DNA, 15 bp, Homo sapiens
tgtgaacataaggcg

SEQ ID NO: 201743 - DNA, 15 bp, Homo sapiens
atgtgaacataaggc

SEQ ID NO: 201744 - DNA, 15 bp, Homo sapiens
aatgtgaacataagg

SEQ ID NO: 201745 - DNA, 15 bp, Homo sapiens
aaatgtgaacataag

SEQ ID NO: 201746 - DNA, 15 bp, Homo sapiens
aaaatgtgaacataa

SEQ ID NO: 201747 - DNA, 15 bp, Homo sapiens
aaaaatgtgaacata

SEQ ID NO: 201748 - DNA, 15 bp, Homo sapiens
taaaaatgtgaacat

SEQ ID NO: 201749 - DNA, 15 bp, Homo sapiens
ataaaaatgtgaaca

SEQ ID NO: 201750 - DNA, 15 bp, Homo sapiens
aataaaaatgtgaac

SEQ ID NO: 201751 - DNA, 15 bp, Homo sapiens
caataaaaatgtgaa

SEQ ID NO: 201752 - DNA, 15 bp, Homo sapiens
tcaataaaaatgtga

SEQ ID NO: 201753 - DNA, 15 bp, Homo sapiens
ctcaataaaaatgtg

SEQ ID NO: 201754 - DNA, 15 bp, Homo sapiens
tctcaataaaaatgt

SEQ ID NO: 201755 - DNA, 15 bp, Homo sapiens
ttctcaataaaaatg

SEQ ID NO: 201756 - DNA, 15 bp, Homo sapiens
attctcaataaaaat

SEQ ID NO: 201757 - DNA, 15 bp, Homo sapiens
tattctcaataaaaa

SEQ ID NO: 201758 - DNA, 15 bp, Homo sapiens
ttattctcaataaaa

SEQ ID NO: 201759 - DNA, 15 bp, Homo sapiens
cttattctcaataaa

SEQ ID NO: 201760 - DNA, 15 bp, Homo sapiens
tcttattctcaataa

SEQ ID NO: 201761 - DNA, 15 bp, Homo sapiens
gtcttattctcaata

SEQ ID NO: 201762 - DNA, 15 bp, Homo sapiens
ggtcttattctcaat

SEQ ID NO: 201763 - DNA, 15 bp, Homo sapiens
tggtcttattctcaa

SEQ ID NO: 201764 - DNA, 15 bp, Homo sapiens
gtggtcttattctca

SEQ ID NO: 201765 - DNA, 15 bp, Homo sapiens
agtggtcttattctc

SEQ ID NO: 201766 - DNA, 15 bp, Homo sapiens
aagtggtcttattct

SEQ ID NO: 201767 - DNA, 15 bp, Homo sapiens
taagtggtcttattc

SEQ ID NO: 201768 - DNA, 15 bp, Homo sapiens
ataagtggtcttatt

SEQ ID NO: 201769 - DNA, 15 bp, Homo sapiens
gataagtggtcttat

SEQ ID NO: 201770 - DNA, 15 bp, Homo sapiens
agataagtggtctta

SEQ ID NO: 201771 - DNA, 15 bp, Homo sapiens
tagataagtggtctt

SEQ ID NO: 201772 - DNA, 15 bp, Homo sapiens
gtagataagtggtct

SEQ ID NO: 201773 - DNA, 15 bp, Homo sapiens
tgtagataagtggtc

SEQ ID NO: 201774 - DNA, 15 bp, Homo sapiens
atgtagataagtggt

SEQ ID NO: 201775 - DNA, 15 bp, Homo sapiens
aatgtagataagtgg

SEQ ID NO: 201776 - DNA, 15 bp, Homo sapiens
aaatgtagataagtg

SEQ ID NO: 201777 - DNA, 15 bp, Homo sapiens
taaatgtagataagt

SEQ ID NO: 201778 - DNA, 15 bp, Homo sapiens
ttaaatgtagataag

SEQ ID NO: 201779 - DNA, 15 bp, Homo sapiens
gttaaatgtagataa

SEQ ID NO: 201780 - DNA, 15 bp, Homo sapiens
agttaaatgtagata

SEQ ID NO: 201781 - DNA, 15 bp, Homo sapiens
tagttaaatgtagat

SEQ ID NO: 201782 - DNA, 15 bp, Homo sapiens
atagttaaatgtaga

SEQ ID NO: 201783 - DNA, 15 bp, Homo sapiens
gatagttaaatgtag

SEQ ID NO: 201784 - DNA, 15 bp, Homo sapiens
tgatagttaaatgta

SEQ ID NO: 201785 - DNA, 15 bp, Homo sapiens
ttgatagttaaatgt

SEQ ID NO: 201786 - DNA, 15 bp, Homo sapiens
gttgatagttaaatg

SEQ ID NO: 201787 - DNA, 15 bp, Homo sapiens
ggttgatagttaaat

SEQ ID NO: 201788 - DNA, 15 bp, Homo sapiens
aggttgatagttaaa

SEQ ID NO: 201789 - DNA, 15 bp, Homo sapiens
gaggttgatagttaa

SEQ ID NO: 201790 - DNA, 15 bp, Homo sapiens
tgaggttgatagtta

SEQ ID NO: 201791 - DNA, 15 bp, Homo sapiens
atgaggttgatagtt

SEQ ID NO: 201792 - DNA, 15 bp, Homo sapiens
gatgaggttgatagt

SEQ ID NO: 201793 - DNA, 15 bp, Homo sapiens
ggatgaggttgatag

SEQ ID NO: 201794 - DNA, 15 bp, Homo sapiens
aggatgaggttgata

SEQ ID NO: 201795 - DNA, 15 bp, Homo sapiens
gaggatgaggttgat

SEQ ID NO: 201796 - DNA, 15 bp, Homo sapiens
agaggatgaggttga

SEQ ID NO: 201797 - DNA, 15 bp, Homo sapiens
gagaggatgaggttg

SEQ ID NO: 201798 - DNA, 15 bp, Homo sapiens
ggagaggatgaggtt

SEQ ID NO: 201799 - DNA, 15 bp, Homo sapiens
tggagaggatgaggt

SEQ ID NO: 201800 - DNA, 15 bp, Homo sapiens
atggagaggatgagg

SEQ ID NO: 201801 - DNA, 15 bp, Homo sapiens
aatggagaggatgag

SEQ ID NO: 201802 - DNA, 15 bp, Homo sapiens
taatggagaggatga

SEQ ID NO: 201803 - DNA, 15 bp, Homo sapiens
ttaatggagaggatg

SEQ ID NO: 201804 - DNA, 15 bp, Homo sapiens
attaatggagaggat

SEQ ID NO: 201805 - DNA, 15 bp, Homo sapiens
gattaatggagagga

SEQ ID NO: 201806 - DNA, 15 bp, Homo sapiens
tgattaatggagagg

SEQ ID NO: 201807 - DNA, 15 bp, Homo sapiens
atgattaatggagag

SEQ ID NO: 201808 - DNA, 15 bp, Homo sapiens
gatgattaatggaga

SEQ ID NO: 201809 - DNA, 15 bp, Homo sapiens
agatgattaatggag

SEQ ID NO: 201810 - DNA, 15 bp, Homo sapiens
tagatgattaatgga

SEQ ID NO: 201811 - DNA, 15 bp, Homo sapiens
atagatgattaatgg

SEQ ID NO: 201812 - DNA, 15 bp, Homo sapiens
aatagatgattaatg

SEQ ID NO: 201813 - DNA, 15 bp, Homo sapiens
aaatagatgattaat

SEQ ID NO: 201814 - DNA, 15 bp, Homo sapiens
aaaatagatgattaa

SEQ ID NO: 201815 - DNA, 15 bp, Homo sapiens
taaaatagatgatta

SEQ ID NO: 201816 - DNA, 15 bp, Homo sapiens
ctaaaatagatgatt

SEQ ID NO: 201817 - DNA, 15 bp, Homo sapiens
actaaaatagatgat

SEQ ID NO: 201818 - DNA, 15 bp, Homo sapiens
cactaaaatagatga

SEQ ID NO: 201819 - DNA, 15 bp, Homo sapiens
tcactaaaatagatg

SEQ ID NO: 201820 - DNA, 15 bp, Homo sapiens
gtcactaaaatagat

SEQ ID NO: 201821 - DNA, 15 bp, Homo sapiens
ggtcactaaaataga

SEQ ID NO: 201822 - DNA, 15 bp, Homo sapiens
gggtcactaaaatag

SEQ ID NO: 201823 - DNA, 15 bp, Homo sapiens
tgggtcactaaaata

SEQ ID NO: 201824 - DNA, 15 bp, Homo sapiens
ttgggtcactaaaat

SEQ ID NO: 201825 - DNA, 15 bp, Homo sapiens
cttgggtcactaaaa

SEQ ID NO: 201826 - DNA, 15 bp, Homo sapiens
acttgggtcactaaa

SEQ ID NO: 201827 - DNA, 15 bp, Homo sapiens
aacttgggtcactaa

SEQ ID NO: 201828 - DNA, 15 bp, Homo sapiens
aaacttgggtcacta

SEQ ID NO: 201829 - DNA, 15 bp, Homo sapiens
aaaacttgggtcact

SEQ ID NO: 201830 - DNA, 15 bp, Homo sapiens
aaaaacttgggtcac

SEQ ID NO: 201831 - DNA, 15 bp, Homo sapiens
caaaaacttgggtca

SEQ ID NO: 201832 - DNA, 15 bp, Homo sapiens
tcaaaaacttgggtc

SEQ ID NO: 201833 - DNA, 15 bp, Homo sapiens
gtcaaaaacttgggt

SEQ ID NO: 201834 - DNA, 15 bp, Homo sapiens
ggtcaaaaacttggg

SEQ ID NO: 201835 - DNA, 15 bp, Homo sapiens
aggtcaaaaacttgg

SEQ ID NO: 201836 - DNA, 15 bp, Homo sapiens
aaggtcaaaaacttg

SEQ ID NO: 201837 - DNA, 15 bp, Homo sapiens
aaaggtcaaaaactt

SEQ ID NO: 201838 - DNA, 15 bp, Homo sapiens
aaaaggtcaaaaact

SEQ ID NO: 201839 - DNA, 15 bp, Homo sapiens
gaaaaggtcaaaaac

SEQ ID NO: 201840 - DNA, 15 bp, Homo sapiens
ggaaaaggtcaaaaa

SEQ ID NO: 201841 - DNA, 15 bp, Homo sapiens
tggaaaaggtcaaaa

SEQ ID NO: 201842 - DNA, 15 bp, Homo sapiens
atggaaaaggtcaaa

SEQ ID NO: 201843 - DNA, 15 bp, Homo sapiens
catggaaaaggtcaa

SEQ ID NO: 201844 - DNA, 15 bp, Homo sapiens
acatggaaaaggtca

SEQ ID NO: 201845 - DNA, 15 bp, Homo sapiens
aacatggaaaaggtc

SEQ ID NO: 201846 - DNA, 15 bp, Homo sapiens
aaacatggaaaaggt

SEQ ID NO: 201847 - DNA, 15 bp, Homo sapiens
taaacatggaaaagg

SEQ ID NO: 201848 - DNA, 15 bp, Homo sapiens
gtaaacatggaaaag

SEQ ID NO: 201849 - DNA, 15 bp, Homo sapiens
tgtaaacatggaaaa

SEQ ID NO: 201850 - DNA, 15 bp, Homo sapiens
atgtaaacatggaaa

SEQ ID NO: 201851 - DNA, 15 bp, Homo sapiens
gatgtaaacatggaa

SEQ ID NO: 201852 - DNA, 15 bp, Homo sapiens
tgatgtaaacatgga

SEQ ID NO: 201853 - DNA, 15 bp, Homo sapiens
ttgatgtaaacatgg

SEQ ID NO: 201854 - DNA, 15 bp, Homo sapiens
attgatgtaaacatg

SEQ ID NO: 201855 - DNA, 15 bp, Homo sapiens
gattgatgtaaacat

SEQ ID NO: 201856 - DNA, 15 bp, Homo sapiens
ggattgatgtaaaca

SEQ ID NO: 201857 - DNA, 15 bp, Homo sapiens
aggattgatgtaaac

SEQ ID NO: 201858 - DNA, 15 bp, Homo sapiens
caggattgatgtaaa

SEQ ID NO: 201859 - DNA, 15 bp, Homo sapiens
acaggattgatgtaa

SEQ ID NO: 201860 - DNA, 15 bp, Homo sapiens
tacaggattgatgta

SEQ ID NO: 201861 - DNA, 15 bp, Homo sapiens
ctacaggattgatgt

SEQ ID NO: 201862 - DNA, 15 bp, Homo sapiens
cctacaggattgatg

SEQ ID NO: 201863 - DNA, 15 bp, Homo sapiens
acctacaggattgat

SEQ ID NO: 201864 - DNA, 15 bp, Homo sapiens
cacctacaggattga

SEQ ID NO: 201865 - DNA, 15 bp, Homo sapiens
tcacctacaggattg

SEQ ID NO: 201866 - DNA, 15 bp, Homo sapiens
atcacctacaggatt

SEQ ID NO: 201867 - DNA, 15 bp, Homo sapiens
aatcacctacaggat

SEQ ID NO: 201868 - DNA, 15 bp, Homo sapiens
caatcacctacagga

SEQ ID NO: 201869 - DNA, 15 bp, Homo sapiens
ccaatcacctacagg

SEQ ID NO: 201870 - DNA, 15 bp, Homo sapiens
cccaatcacctacag

SEQ ID NO: 201871 - DNA, 15 bp, Homo sapiens
gcccaatcacctaca

SEQ ID NO: 201872 - DNA, 15 bp, Homo sapiens
tgcccaatcacctac

SEQ ID NO: 201873 - DNA, 15 bp, Homo sapiens
ctgcccaatcaccta

SEQ ID NO: 201874 - DNA, 15 bp, Homo sapiens
gctgcccaatcacct

SEQ ID NO: 201875 - DNA, 15 bp, Homo sapiens
ggctgcccaatcacc

SEQ ID NO: 201876 - DNA, 15 bp, Homo sapiens
tggctgcccaatcac

SEQ ID NO: 201877 - DNA, 15 bp, Homo sapiens
atggctgcccaatca

SEQ ID NO: 201878 - DNA, 15 bp, Homo sapiens
aatggctgcccaatc

SEQ ID NO: 201879 - DNA, 15 bp, Homo sapiens
aaatggctgcccaat

SEQ ID NO: 201880 - DNA, 15 bp, Homo sapiens
taaatggctgcccaa

SEQ ID NO: 201881 - DNA, 15 bp, Homo sapiens
ttaaatggctgccca

SEQ ID NO: 201882 - DNA, 15 bp, Homo sapiens
cttaaatggctgccc

SEQ ID NO: 201883 - DNA, 15 bp, Homo sapiens
acttaaatggctgcc

SEQ ID NO: 201884 - DNA, 15 bp, Homo sapiens
tacttaaatggctgc

SEQ ID NO: 201885 - DNA, 15 bp, Homo sapiens
atacttaaatggctg

SEQ ID NO: 201886 - DNA, 15 bp, Homo sapiens
aatacttaaatggct

SEQ ID NO: 201887 - DNA, 15 bp, Homo sapiens
taatacttaaatggc

SEQ ID NO: 201888 - DNA, 15 bp, Homo sapiens
ataatacttaaatgg

SEQ ID NO: 201889 - DNA, 15 bp, Homo sapiens
aataatacttaaatg

SEQ ID NO: 201890 - DNA, 15 bp, Homo sapiens
taataatacttaaat

SEQ ID NO: 201891 - DNA, 15 bp, Homo sapiens
ataataatacttaaa

SEQ ID NO: 201892 - DNA, 15 bp, Homo sapiens
tataataatacttaa

SEQ ID NO: 201893 - DNA, 15 bp, Homo sapiens
ctataataatactta

SEQ ID NO: 201894 - DNA, 15 bp, Homo sapiens
tctataataatactt

SEQ ID NO: 201895 - DNA, 15 bp, Homo sapiens
gtctataataatact

SEQ ID NO: 201896 - DNA, 15 bp, Homo sapiens
tgtctataataatac

SEQ ID NO: 201897 - DNA, 15 bp, Homo sapiens
atgtctataataata

SEQ ID NO: 201898 - DNA, 15 bp, Homo sapiens
aatgtctataataat

SEQ ID NO: 201899 - DNA, 15 bp, Homo sapiens
aaatgtctataataa

SEQ ID NO: 201900 - DNA, 15 bp, Homo sapiens
aaaatgtctataata

SEQ ID NO: 201901 - DNA, 15 bp, Homo sapiens
gaaaatgtctataat

SEQ ID NO: 201902 - DNA, 15 bp, Homo sapiens
tgaaaatgtctataa

SEQ ID NO: 201903 - DNA, 15 bp, Homo sapiens
gtgaaaatgtctata

SEQ ID NO: 201904 - DNA, 15 bp, Homo sapiens
agtgaaaatgtctat

SEQ ID NO: 201905 - DNA, 15 bp, Homo sapiens
tagtgaaaatgtcta

SEQ ID NO: 201906 - DNA, 15 bp, Homo sapiens
atagtgaaaatgtct

SEQ ID NO: 201907 - DNA, 15 bp, Homo sapiens
gatagtgaaaatgtc

SEQ ID NO: 201908 - DNA, 15 bp, Homo sapiens
ggatagtgaaaatgt

SEQ ID NO: 201909 - DNA, 15 bp, Homo sapiens
gggatagtgaaaatg

SEQ ID NO: 201910 - DNA, 15 bp, Homo sapiens
tgggatagtgaaaat

SEQ ID NO: 201911 - DNA, 15 bp, Homo sapiens
atgggatagtgaaaa

SEQ ID NO: 201912 - DNA, 15 bp, Homo sapiens
aatgggatagtgaaa

SEQ ID NO: 201913 - DNA, 15 bp, Homo sapiens
taatgggatagtgaa

SEQ ID NO: 201914 - DNA, 15 bp, Homo sapiens
ttaatgggatagtga

SEQ ID NO: 201915 - DNA, 15 bp, Homo sapiens
tttaatgggatagtg

SEQ ID NO: 201916 - DNA, 15 bp, Homo sapiens
ttttaatgggatagt

SEQ ID NO: 201917 - DNA, 15 bp, Homo sapiens
gttttaatgggatag

SEQ ID NO: 201918 - DNA, 15 bp, Homo sapiens
ggttttaatgggata

SEQ ID NO: 201919 - DNA, 15 bp, Homo sapiens
gggttttaatgggat

SEQ ID NO: 201920 - DNA, 15 bp, Homo sapiens
agggttttaatggga

SEQ ID NO: 201921 - DNA, 15 bp, Homo sapiens
aagggttttaatggg

SEQ ID NO: 201922 - DNA, 15 bp, Homo sapiens
aaagggttttaatgg

SEQ ID NO: 201923 - DNA, 15 bp, Homo sapiens
taaagggttttaatg

SEQ ID NO: 201924 - DNA, 15 bp, Homo sapiens
ataaagggttttaat

SEQ ID NO: 201925 - DNA, 15 bp, Homo sapiens
cataaagggttttaa

SEQ ID NO: 201926 - DNA, 15 bp, Homo sapiens
gcataaagggtttta

SEQ ID NO: 201927 - DNA, 15 bp, Homo sapiens
ggcataaagggtttt

SEQ ID NO: 201928 - DNA, 15 bp, Homo sapiens
gggcataaagggttt

SEQ ID NO: 201929 - DNA, 15 bp, Homo sapiens
tgggcataaagggtt

SEQ ID NO: 201930 - DNA, 15 bp, Homo sapiens
atgggcataaagggt

SEQ ID NO: 201931 - DNA, 15 bp, Homo sapiens
tatgggcataaaggg

SEQ ID NO: 201932 - DNA, 15 bp, Homo sapiens
gtatgggcataaagg

SEQ ID NO: 201933 - DNA, 15 bp, Homo sapiens
tgtatgggcataaag

SEQ ID NO: 201934 - DNA, 15 bp, Homo sapiens
atgtatgggcataaa

SEQ ID NO: 201935 - DNA, 15 bp, Homo sapiens
gatgtatgggcataa

SEQ ID NO: 201936 - DNA, 15 bp, Homo sapiens
tgatgtatgggcata

SEQ ID NO: 201937 - DNA, 15 bp, Homo sapiens
atgatgtatgggcat

SEQ ID NO: 201938 - DNA, 15 bp, Homo sapiens
tatgatgtatgggca

SEQ ID NO: 201939 - DNA, 15 bp, Homo sapiens
ttatgatgtatgggc

SEQ ID NO: 201940 - DNA, 15 bp, Homo sapiens
gttatgatgtatggg

SEQ ID NO: 201941 - DNA, 15 bp, Homo sapiens
tgttatgatgtatgg

SEQ ID NO: 201942 - DNA, 15 bp, Homo sapiens
gtgttatgatgtatg

SEQ ID NO: 201943 - DNA, 15 bp, Homo sapiens
agtgttatgatgtat

SEQ ID NO: 201944 - DNA, 15 bp, Homo sapiens
tagtgttatgatgta

SEQ ID NO: 201945 - DNA, 15 bp, Homo sapiens
gtagtgttatgatgt

SEQ ID NO: 201946 - DNA, 15 bp, Homo sapiens
agtagtgttatgatg

SEQ ID NO: 201947 - DNA, 15 bp, Homo sapiens
aagtagtgttatgat

SEQ ID NO: 201948 - DNA, 15 bp, Homo sapiens
gaagtagtgttatga

SEQ ID NO: 201949 - DNA, 15 bp, Homo sapiens
ggaagtagtgttatg

SEQ ID NO: 201950 - DNA, 15 bp, Homo sapiens
aggaagtagtgttat

SEQ ID NO: 201951 - DNA, 15 bp, Homo sapiens
taggaagtagtgtta

SEQ ID NO: 201952 - DNA, 15 bp, Homo sapiens
gtaggaagtagtgtt

SEQ ID NO: 201953 - DNA, 15 bp, Homo sapiens
ggtaggaagtagtgt

SEQ ID NO: 201954 - DNA, 15 bp, Homo sapiens
gggtaggaagtagtg

SEQ ID NO: 201955 - DNA, 15 bp, Homo sapiens
tgggtaggaagtagt

SEQ ID NO: 201956 - DNA, 15 bp, Homo sapiens
atgggtaggaagtag

SEQ ID NO: 201957 - DNA, 15 bp, Homo sapiens
tatgggtaggaagta

SEQ ID NO: 201958 - DNA, 15 bp, Homo sapiens
ttatgggtaggaagt

SEQ ID NO: 201959 - DNA, 15 bp, Homo sapiens
cttatgggtaggaag

SEQ ID NO: 201960 - DNA, 15 bp, Homo sapiens
gcttatgggtaggaa

SEQ ID NO: 201961 - DNA, 15 bp, Homo sapiens
agcttatgggtagga

SEQ ID NO: 201962 - DNA, 15 bp, Homo sapiens
gagcttatgggtagg

SEQ ID NO: 201963 - DNA, 15 bp, Homo sapiens
ggagcttatgggtag

SEQ ID NO: 201964 - DNA, 15 bp, Homo sapiens
aggagcttatgggta

SEQ ID NO: 201965 - DNA, 15 bp, Homo sapiens
aaggagcttatgggt

SEQ ID NO: 201966 - DNA, 15 bp, Homo sapiens
aaaggagcttatggg

SEQ ID NO: 201967 - DNA, 15 bp, Homo sapiens
aaaaggagcttatgg

SEQ ID NO: 201968 - DNA, 15 bp, Homo sapiens
taaaaggagcttatg

SEQ ID NO: 201969 - DNA, 15 bp, Homo sapiens
ttaaaaggagcttat

SEQ ID NO: 201970 - DNA, 15 bp, Homo sapiens
gttaaaaggagctta

SEQ ID NO: 201971 - DNA, 15 bp, Homo sapiens
agttaaaaggagctt

SEQ ID NO: 201972 - DNA, 15 bp, Homo sapiens
aagttaaaaggagct

SEQ ID NO: 201973 - DNA, 15 bp, Homo sapiens
caagttaaaaggagc

SEQ ID NO: 201974 - DNA, 15 bp, Homo sapiens
acaagttaaaaggag

SEQ ID NO: 201975 - DNA, 15 bp, Homo sapiens
aacaagttaaaagga

SEQ ID NO: 201976 - DNA, 15 bp, Homo sapiens
taacaagttaaaagg

SEQ ID NO: 201977 - DNA, 15 bp, Homo sapiens
ttaacaagttaaaag

SEQ ID NO: 201978 - DNA, 15 bp, Homo sapiens
tttaacaagttaaaa

SEQ ID NO: 201979 - DNA, 15 bp, Homo sapiens
ctttaacaagttaaa

SEQ ID NO: 201980 - DNA, 15 bp, Homo sapiens
actttaacaagttaa

SEQ ID NO: 201981 - DNA, 15 bp, Homo sapiens
gactttaacaagtta

SEQ ID NO: 201982 - DNA, 15 bp, Homo sapiens
agactttaacaagtt

SEQ ID NO: 201983 - DNA, 15 bp, Homo sapiens
aagactttaacaagt

SEQ ID NO: 201984 - DNA, 15 bp, Homo sapiens
caagactttaacaag

SEQ ID NO: 201985 - DNA, 15 bp, Homo sapiens
gcaagactttaacaa

SEQ ID NO: 201986 - DNA, 15 bp, Homo sapiens
agcaagactttaaca

SEQ ID NO: 201987 - DNA, 15 bp, Homo sapiens
aagcaagactttaac

SEQ ID NO: 201988 - DNA, 15 bp, Homo sapiens
caagcaagactttaa

SEQ ID NO: 201989 - DNA, 15 bp, Homo sapiens
tcaagcaagacttta

SEQ ID NO: 201990 - DNA, 15 bp, Homo sapiens
ttcaagcaagacttt

SEQ ID NO: 201991 - DNA, 15 bp, Homo sapiens
attcaagcaagactt

SEQ ID NO: 201992 - DNA, 15 bp, Homo sapiens
aattcaagcaagact

SEQ ID NO: 201993 - DNA, 15 bp, Homo sapiens
taattcaagcaagac

SEQ ID NO: 201994 - DNA, 15 bp, Homo sapiens
ttaattcaagcaaga

SEQ ID NO: 201995 - DNA, 15 bp, Homo sapiens
tttaattcaagcaag

SEQ ID NO: 201996 - DNA, 15 bp, Homo sapiens
ctttaattcaagcaa

SEQ ID NO: 201997 - DNA, 15 bp, Homo sapiens
tctttaattcaagca

SEQ ID NO: 201998 - DNA, 15 bp, Homo sapiens
gtctttaattcaagc

SEQ ID NO: 201999 - DNA, 15 bp, Homo sapiens
agtctttaattcaag

SEQ ID NO: 202000 - DNA, 15 bp, Homo sapiens
aagtctttaattcaa

SEQ ID NO: 202001 - DNA, 15 bp, Homo sapiens
caagtctttaattca

SEQ ID NO: 202002 - DNA, 15 bp, Homo sapiens
acaagtctttaattc

SEQ ID NO: 202003 - DNA, 15 bp, Homo sapiens
aacaagtctttaatt

SEQ ID NO: 202004 - DNA, 15 bp, Homo sapiens
aaacaagtctttaat

SEQ ID NO: 202005 - DNA, 15 bp, Homo sapiens
taaacaagtctttaa

SEQ ID NO: 202006 - DNA, 15 bp, Homo sapiens
ttaaacaagtcttta

SEQ ID NO: 202007 - DNA, 15 bp, Homo sapiens
tttaaacaagtcttt

SEQ ID NO: 202008 - DNA, 15 bp, Homo sapiens
gtttaaacaagtctt

SEQ ID NO: 202009 - DNA, 15 bp, Homo sapiens
tgtttaaacaagtct

SEQ ID NO: 202010 - DNA, 15 bp, Homo sapiens
gtgtttaaacaagtc

SEQ ID NO: 202011 - DNA, 15 bp, Homo sapiens
tgtgtttaaacaagt

SEQ ID NO: 202012 - DNA, 15 bp, Homo sapiens
ttgtgtttaaacaag

SEQ ID NO: 202013 - DNA, 15 bp, Homo sapiens
tttgtgtttaaacaa

SEQ ID NO: 202014 - DNA, 15 bp, Homo sapiens
ttttgtgtttaaaca

SEQ ID NO: 202015 - DNA, 15 bp, Homo sapiens
attttgtgtttaaac

SEQ ID NO: 202016 - DNA, 15 bp, Homo sapiens
aattttgtgtttaaa

SEQ ID NO: 202017 - DNA, 15 bp, Homo sapiens
aaattttgtgtttaa

SEQ ID NO: 202018 - DNA, 15 bp, Homo sapiens
taaattttgtgttta

SEQ ID NO: 202019 - DNA, 15 bp, Homo sapiens
ctaaattttgtgttt

SEQ ID NO: 202020 - DNA, 15 bp, Homo sapiens
tctaaattttgtgtt

SEQ ID NO: 202021 - DNA, 15 bp, Homo sapiens
gtctaaattttgtgt

SEQ ID NO: 202022 - DNA, 15 bp, Homo sapiens
agtctaaattttgtg

SEQ ID NO: 202023 - DNA, 15 bp, Homo sapiens
aagtctaaattttgt

SEQ ID NO: 202024 - DNA, 15 bp, Homo sapiens
aaagtctaaattttg

SEQ ID NO: 202025 - DNA, 15 bp, Homo sapiens
aaaagtctaaatttt

SEQ ID NO: 202026 - DNA, 15 bp, Homo sapiens
taaaagtctaaattt

SEQ ID NO: 202027 - DNA, 15 bp, Homo sapiens
gtaaaagtctaaatt

SEQ ID NO: 202028 - DNA, 15 bp, Homo sapiens
agtaaaagtctaaat

SEQ ID NO: 202029 - DNA, 15 bp, Homo sapiens
gagtaaaagtctaaa

SEQ ID NO: 202030 - DNA, 15 bp, Homo sapiens
tgagtaaaagtctaa

SEQ ID NO: 202031 - DNA, 15 bp, Homo sapiens
ttgagtaaaagtcta

SEQ ID NO: 202032 - DNA, 15 bp, Homo sapiens
gttgagtaaaagtct

SEQ ID NO: 202033 - DNA, 15 bp, Homo sapiens
tgttgagtaaaagtc

SEQ ID NO: 202034 - DNA, 15 bp, Homo sapiens
ttgttgagtaaaagt

SEQ ID NO: 202035 - DNA, 15 bp, Homo sapiens
tttgttgagtaaaag

SEQ ID NO: 202036 - DNA, 15 bp, Homo sapiens
ttttgttgagtaaaa

SEQ ID NO: 202037 - DNA, 15 bp, Homo sapiens
cttttgttgagtaaa

SEQ ID NO: 202038 - DNA, 15 bp, Homo sapiens
acttttgttgagtaa

SEQ ID NO: 202039 - DNA, 15 bp, Homo sapiens
cacttttgttgagta

SEQ ID NO: 202040 - DNA, 15 bp, Homo sapiens
tcacttttgttgagt

SEQ ID NO: 202041 - DNA, 15 bp, Homo sapiens
atcacttttgttgag

SEQ ID NO: 202042 - DNA, 15 bp, Homo sapiens
aatcacttttgttga

SEQ ID NO: 202043 - DNA, 15 bp, Homo sapiens
caatcacttttgttg

SEQ ID NO: 202044 - DNA, 15 bp, Homo sapiens
tcaatcacttttgtt

SEQ ID NO: 202045 - DNA, 15 bp, Homo sapiens
atcaatcacttttgt

SEQ ID NO: 202046 - DNA, 15 bp, Homo sapiens
aatcaatcacttttg

SEQ ID NO: 202047 - DNA, 15 bp, Homo sapiens
caatcaatcactttt

SEQ ID NO: 202048 - DNA, 15 bp, Homo sapiens
tcaatcaatcacttt

SEQ ID NO: 202049 - DNA, 15 bp, Homo sapiens
atcaatcaatcactt

SEQ ID NO: 202050 - DNA, 15 bp, Homo sapiens
aatcaatcaatcact

SEQ ID NO: 202051 - DNA, 15 bp, Homo sapiens
caatcaatcaatcac

SEQ ID NO: 202052 - DNA, 15 bp, Homo sapiens
tcaatcaatcaatca

SEQ ID NO: 202053 - DNA, 15 bp, Homo sapiens
atcaatcaatcaatc

SEQ ID NO: 202054 - DNA, 15 bp, Homo sapiens
aatcaatcaatcaat

SEQ ID NO: 202055 - DNA, 15 bp, Homo sapiens
caatcaatcaatcaa

SEQ ID NO: 202056 - DNA, 15 bp, Homo sapiens
catcaatcaatcaat

SEQ ID NO: 202057 - DNA, 15 bp, Homo sapiens
ccatcaatcaatcaa

SEQ ID NO: 202058 - DNA, 15 bp, Homo sapiens
accatcaatcaatca

SEQ ID NO: 202059 - DNA, 15 bp, Homo sapiens
aaccatcaatcaatc

SEQ ID NO: 202060 - DNA, 15 bp, Homo sapiens
aaaccatcaatcaat

SEQ ID NO: 202061 - DNA, 15 bp, Homo sapiens
taaaccatcaatcaa

SEQ ID NO: 202062 - DNA, 15 bp, Homo sapiens
gtaaaccatcaatca

SEQ ID NO: 202063 - DNA, 15 bp, Homo sapiens
tgtaaaccatcaatc

SEQ ID NO: 202064 - DNA, 15 bp, Homo sapiens
ctgtaaaccatcaat

SEQ ID NO: 202065 - DNA, 15 bp, Homo sapiens
actgtaaaccatcaa

SEQ ID NO: 202066 - DNA, 15 bp, Homo sapiens
tactgtaaaccatca

SEQ ID NO: 202067 - DNA, 15 bp, Homo sapiens
ctactgtaaaccatc

SEQ ID NO: 202068 - DNA, 15 bp, Homo sapiens
cctactgtaaaccat

SEQ ID NO: 202069 - DNA, 15 bp, Homo sapiens
tcctactgtaaacca

SEQ ID NO: 202070 - DNA, 15 bp, Homo sapiens
gtcctactgtaaacc

SEQ ID NO: 202071 - DNA, 15 bp, Homo sapiens
agtcctactgtaaac

SEQ ID NO: 202072 - DNA, 15 bp, Homo sapiens
aagtcctactgtaaa

SEQ ID NO: 202073 - DNA, 15 bp, Homo sapiens
gaagtcctactgtaa

SEQ ID NO: 202074 - DNA, 15 bp, Homo sapiens
tgaagtcctactgta

SEQ ID NO: 202075 - DNA, 15 bp, Homo sapiens
atgaagtcctactgt

SEQ ID NO: 202076 - DNA, 15 bp, Homo sapiens
aatgaagtcctactg

SEQ ID NO: 202077 - DNA, 15 bp, Homo sapiens
gaatgaagtcctact

SEQ ID NO: 202078 - DNA, 15 bp, Homo sapiens
agaatgaagtcctac

SEQ ID NO: 202079 - DNA, 15 bp, Homo sapiens
tagaatgaagtccta

SEQ ID NO: 202080 - DNA, 15 bp, Homo sapiens
ctagaatgaagtcct

SEQ ID NO: 202081 - DNA, 15 bp, Homo sapiens
actagaatgaagtcc

SEQ ID NO: 202082 - DNA, 15 bp, Homo sapiens
gactagaatgaagtc

SEQ ID NO: 202083 - DNA, 15 bp, Homo sapiens
tgactagaatgaagt

SEQ ID NO: 202084 - DNA, 15 bp, Homo sapiens
atgactagaatgaag

SEQ ID NO: 202085 - DNA, 15 bp, Homo sapiens
aatgactagaatgaa

SEQ ID NO: 202086 - DNA, 15 bp, Homo sapiens
taatgactagaatga

SEQ ID NO: 202087 - DNA, 15 bp, Homo sapiens
ataatgactagaatg

SEQ ID NO: 202088 - DNA, 15 bp, Homo sapiens
tataatgactagaat

SEQ ID NO: 202089 - DNA, 15 bp, Homo sapiens
ctataatgactagaa

SEQ ID NO: 202090 - DNA, 15 bp, Homo sapiens
gctataatgactaga

SEQ ID NO: 202091 - DNA, 15 bp, Homo sapiens
agctataatgactag

SEQ ID NO: 202092 - DNA, 15 bp, Homo sapiens
cagctataatgacta

SEQ ID NO: 202093 - DNA, 15 bp, Homo sapiens
gcagctataatgact

SEQ ID NO: 202094 - DNA, 15 bp, Homo sapiens
agcagctataatgac

SEQ ID NO: 202095 - DNA, 15 bp, Homo sapiens
cagcagctataatga

SEQ ID NO: 202096 - DNA, 15 bp, Homo sapiens
ccagcagctataatg

SEQ ID NO: 202097 - DNA, 15 bp, Homo sapiens
gccagcagctataat

SEQ ID NO: 202098 - DNA, 15 bp, Homo sapiens
tgccagcagctataa

SEQ ID NO: 202099 - DNA, 15 bp, Homo sapiens
ctgccagcagctata

SEQ ID NO: 202100 - DNA, 15 bp, Homo sapiens
actgccagcagctat

SEQ ID NO: 202101 - DNA, 15 bp, Homo sapiens
tactgccagcagcta

SEQ ID NO: 202102 - DNA, 15 bp, Homo sapiens
atactgccagcagct

SEQ ID NO: 202103 - DNA, 15 bp, Homo sapiens
tatactgccagcagc

SEQ ID NO: 202104 - DNA, 15 bp, Homo sapiens
ttatactgccagcag

SEQ ID NO: 202105 - DNA, 15 bp, Homo sapiens
gttatactgccagca

SEQ ID NO: 202106 - DNA, 15 bp, Homo sapiens
agttatactgccagc

SEQ ID NO: 202107 - DNA, 15 bp, Homo sapiens
cagttatactgccag

SEQ ID NO: 202108 - DNA, 15 bp, Homo sapiens
ccagttatactgcca

SEQ ID NO: 202109 - DNA, 15 bp, Homo sapiens
gccagttatactgcc

SEQ ID NO: 202110 - DNA, 15 bp, Homo sapiens
ggccagttatactgc

SEQ ID NO: 202111 - DNA, 15 bp, Homo sapiens
tggccagttatactg

SEQ ID NO: 202112 - DNA, 15 bp, Homo sapiens
ctggccagttatact

SEQ ID NO: 202113 - DNA, 15 bp, Homo sapiens
gctggccagttatac

SEQ ID NO: 202114 - DNA, 15 bp, Homo sapiens
ggctggccagttata

SEQ ID NO: 202115 - DNA, 15 bp, Homo sapiens
aggctggccagttat

SEQ ID NO: 202116 - DNA, 15 bp, Homo sapiens
aaggctggccagtta

SEQ ID NO: 202117 - DNA, 15 bp, Homo sapiens
aaaggctggccagtt

SEQ ID NO: 202118 - DNA, 15 bp, Homo sapiens
taaaggctggccagt

SEQ ID NO: 202119 - DNA, 15 bp, Homo sapiens
ttaaaggctggccag

SEQ ID NO: 202120 - DNA, 15 bp, Homo sapiens
attaaaggctggcca

SEQ ID NO: 202121 - DNA, 15 bp, Homo sapiens
tattaaaggctggcc

SEQ ID NO: 202122 - DNA, 15 bp, Homo sapiens
gtattaaaggctggc

SEQ ID NO: 202123 - DNA, 15 bp, Homo sapiens
tgtattaaaggctgg

SEQ ID NO: 202124 - DNA, 15 bp, Homo sapiens
atgtattaaaggctg

SEQ ID NO: 202125 - DNA, 15 bp, Homo sapiens
aatgtattaaaggct

SEQ ID NO: 202126 - DNA, 15 bp, Homo sapiens
caatgtattaaaggc

SEQ ID NO: 202127 - DNA, 15 bp, Homo sapiens
gcaatgtattaaagg

SEQ ID NO: 202128 - DNA, 15 bp, Homo sapiens
agcaatgtattaaag

SEQ ID NO: 202129 - DNA, 15 bp, Homo sapiens
cagcaatgtattaaa

SEQ ID NO: 202130 - DNA, 15 bp, Homo sapiens
gcagcaatgtattaa

SEQ ID NO: 202131 - DNA, 15 bp, Homo sapiens
agcagcaatgtatta

SEQ ID NO: 202132 - DNA, 15 bp, Homo sapiens
aagcagcaatgtatt

SEQ ID NO: 202133 - DNA, 15 bp, Homo sapiens
taagcagcaatgtat

SEQ ID NO: 202134 - DNA, 15 bp, Homo sapiens
ctaagcagcaatgta

SEQ ID NO: 202135 - DNA, 15 bp, Homo sapiens
tctaagcagcaatgt

SEQ ID NO: 202136 - DNA, 15 bp, Homo sapiens
ctctaagcagcaatg

SEQ ID NO: 202137 - DNA, 15 bp, Homo sapiens
actctaagcagcaat

SEQ ID NO: 202138 - DNA, 15 bp, Homo sapiens
gactctaagcagcaa

SEQ ID NO: 202139 - DNA, 15 bp, Homo sapiens
tgactctaagcagca

SEQ ID NO: 202140 - DNA, 15 bp, Homo sapiens
ttgactctaagcagc

SEQ ID NO: 202141 - DNA, 15 bp, Homo sapiens
tttgactctaagcag

SEQ ID NO: 202142 - DNA, 15 bp, Homo sapiens
ctttgactctaagca

SEQ ID NO: 202143 - DNA, 15 bp, Homo sapiens
gctttgactctaagc

SEQ ID NO: 202144 - DNA, 15 bp, Homo sapiens
tgctttgactctaag

SEQ ID NO: 202145 - DNA, 15 bp, Homo sapiens
atgctttgactctaa

SEQ ID NO: 202146 - DNA, 15 bp, Homo sapiens
catgctttgactcta

SEQ ID NO: 202147 - DNA, 15 bp, Homo sapiens
acatgctttgactct

SEQ ID NO: 202148 - DNA, 15 bp, Homo sapiens
tacatgctttgactc

SEQ ID NO: 202149 - DNA, 15 bp, Homo sapiens
gtacatgctttgact

SEQ ID NO: 202150 - DNA, 15 bp, Homo sapiens
agtacatgctttgac

SEQ ID NO: 202151 - DNA, 15 bp, Homo sapiens
aagtacatgctttga

SEQ ID NO: 202152 - DNA, 15 bp, Homo sapiens
taagtacatgctttg

SEQ ID NO: 202153 - DNA, 15 bp, Homo sapiens
ctaagtacatgcttt

SEQ ID NO: 202154 - DNA, 15 bp, Homo sapiens
tctaagtacatgctt

SEQ ID NO: 202155 - DNA, 15 bp, Homo sapiens
ctctaagtacatgct

SEQ ID NO: 202156 - DNA, 15 bp, Homo sapiens
actctaagtacatgc

SEQ ID NO: 202157 - DNA, 15 bp, Homo sapiens
aactctaagtacatg

SEQ ID NO: 202158 - DNA, 15 bp, Homo sapiens
caactctaagtacat

SEQ ID NO: 202159 - DNA, 15 bp, Homo sapiens
ccaactctaagtaca

SEQ ID NO: 202160 - DNA, 15 bp, Homo sapiens
accaactctaagtac

SEQ ID NO: 202161 - DNA, 15 bp, Homo sapiens
taccaactctaagta

SEQ ID NO: 202162 - DNA, 15 bp, Homo sapiens
ataccaactctaagt

SEQ ID NO: 202163 - DNA, 15 bp, Homo sapiens
cataccaactctaag

SEQ ID NO: 202164 - DNA, 15 bp, Homo sapiens
tcataccaactctaa

SEQ ID NO: 202165 - DNA, 15 bp, Homo sapiens
atcataccaactcta

SEQ ID NO: 202166 - DNA, 15 bp, Homo sapiens
aatcataccaactct

SEQ ID NO: 202167 - DNA, 15 bp, Homo sapiens
aaatcataccaactc

SEQ ID NO: 202168 - DNA, 15 bp, Homo sapiens
taaatcataccaact

SEQ ID NO: 202169 - DNA, 15 bp, Homo sapiens
ataaatcataccaac

SEQ ID NO: 202170 - DNA, 15 bp, Homo sapiens
gataaatcataccaa

SEQ ID NO: 202171 - DNA, 15 bp, Homo sapiens
agataaatcatacca

SEQ ID NO: 202172 - DNA, 15 bp, Homo sapiens
aagataaatcatacc

SEQ ID NO: 202173 - DNA, 15 bp, Homo sapiens
aaagataaatcatac

SEQ ID NO: 202174 - DNA, 15 bp, Homo sapiens
aaaagataaatcata

SEQ ID NO: 202175 - DNA, 15 bp, Homo sapiens
aaaaagataaatcat

SEQ ID NO: 202176 - DNA, 15 bp, Homo sapiens
caaaaagataaatca

SEQ ID NO: 202177 - DNA, 15 bp, Homo sapiens
ccaaaaagataaatc

SEQ ID NO: 202178 - DNA, 15 bp, Homo sapiens
accaaaaagataaat

SEQ ID NO: 202179 - DNA, 15 bp, Homo sapiens
gaccaaaaagataaa

SEQ ID NO: 202180 - DNA, 15 bp, Homo sapiens
agaccaaaaagataa

SEQ ID NO: 202181 - DNA, 15 bp, Homo sapiens
aagaccaaaaagata

SEQ ID NO: 202182 - DNA, 15 bp, Homo sapiens
gaagaccaaaaagat

SEQ ID NO: 202183 - DNA, 15 bp, Homo sapiens
agaagaccaaaaaga

SEQ ID NO: 202184 - DNA, 15 bp, Homo sapiens
tagaagaccaaaaag

SEQ ID NO: 202185 - DNA, 15 bp, Homo sapiens
atagaagaccaaaaa

SEQ ID NO: 202186 - DNA, 15 bp, Homo sapiens
tatagaagaccaaaa

SEQ ID NO: 202187 - DNA, 15 bp, Homo sapiens
ctatagaagaccaaa

SEQ ID NO: 202188 - DNA, 15 bp, Homo sapiens
gctatagaagaccaa

SEQ ID NO: 202189 - DNA, 15 bp, Homo sapiens
ggctatagaagacca

SEQ ID NO: 202190 - DNA, 15 bp, Homo sapiens
aggctatagaagacc

SEQ ID NO: 202191 - DNA, 15 bp, Homo sapiens
gaggctatagaagac

SEQ ID NO: 202192 - DNA, 15 bp, Homo sapiens
ggaggctatagaaga

SEQ ID NO: 202193 - DNA, 15 bp, Homo sapiens
aggaggctatagaag

SEQ ID NO: 202194 - DNA, 15 bp, Homo sapiens
aaggaggctatagaa

SEQ ID NO: 202195 - DNA, 15 bp, Homo sapiens
gaaggaggctataga

SEQ ID NO: 202196 - DNA, 15 bp, Homo sapiens
ggaaggaggctatag

SEQ ID NO: 202197 - DNA, 15 bp, Homo sapiens
gggaaggaggctata

SEQ ID NO: 202198 - DNA, 15 bp, Homo sapiens
ggggaaggaggctat

SEQ ID NO: 202199 - DNA, 15 bp, Homo sapiens
tggggaaggaggcta

SEQ ID NO: 202200 - DNA, 15 bp, Homo sapiens
atggggaaggaggct

SEQ ID NO: 202201 - DNA, 15 bp, Homo sapiens
gatggggaaggaggc

SEQ ID NO: 202202 - DNA, 15 bp, Homo sapiens
ggatggggaaggagg

SEQ ID NO: 202203 - DNA, 15 bp, Homo sapiens
gggatggggaaggag

SEQ ID NO: 202204 - DNA, 15 bp, Homo sapiens
ggggatggggaagga

SEQ ID NO: 202205 - DNA, 15 bp, Homo sapiens
tggggatggggaagg

SEQ ID NO: 202206 - DNA, 15 bp, Homo sapiens
atggggatggggaag

SEQ ID NO: 202207 - DNA, 15 bp, Homo sapiens
gatggggatggggaa

SEQ ID NO: 202208 - DNA, 15 bp, Homo sapiens
tgatggggatgggga

SEQ ID NO: 202209 - DNA, 15 bp, Homo sapiens
ctgatggggatgggg

SEQ ID NO: 202210 - DNA, 15 bp, Homo sapiens
actgatggggatggg

SEQ ID NO: 202211 - DNA, 15 bp, Homo sapiens
gactgatggggatgg

SEQ ID NO: 202212 - DNA, 15 bp, Homo sapiens
agactgatggggatg

SEQ ID NO: 202213 - DNA, 15 bp, Homo sapiens
aagactgatggggat

SEQ ID NO: 202214 - DNA, 15 bp, Homo sapiens
taagactgatgggga

SEQ ID NO: 202215 - DNA, 15 bp, Homo sapiens
ttaagactgatgggg

SEQ ID NO: 202216 - DNA, 15 bp, Homo sapiens
attaagactgatggg

SEQ ID NO: 202217 - DNA, 15 bp, Homo sapiens
gattaagactgatgg

SEQ ID NO: 202218 - DNA, 15 bp, Homo sapiens
tgattaagactgatg

SEQ ID NO: 202219 - DNA, 15 bp, Homo sapiens
ctgattaagactgat

SEQ ID NO: 202220 - DNA, 15 bp, Homo sapiens
actgattaagactga

SEQ ID NO: 202221 - DNA, 15 bp, Homo sapiens
gactgattaagactg

SEQ ID NO: 202222 - DNA, 15 bp, Homo sapiens
agactgattaagact

SEQ ID NO: 202223 - DNA, 15 bp, Homo sapiens
aagactgattaagac

SEQ ID NO: 202224 - DNA, 15 bp, Homo sapiens
caagactgattaaga

SEQ ID NO: 202225 - DNA, 15 bp, Homo sapiens
acaagactgattaag

SEQ ID NO: 202226 - DNA, 15 bp, Homo sapiens
aacaagactgattaa

SEQ ID NO: 202227 - DNA, 15 bp, Homo sapiens
taacaagactgatta

SEQ ID NO: 202228 - DNA, 15 bp, Homo sapiens
gtaacaagactgatt

SEQ ID NO: 202229 - DNA, 15 bp, Homo sapiens
cgtaacaagactgat

SEQ ID NO: 202230 - DNA, 15 bp, Homo sapiens
acgtaacaagactga

SEQ ID NO: 202231 - DNA, 15 bp, Homo sapiens
aacgtaacaagactg

SEQ ID NO: 202232 - DNA, 15 bp, Homo sapiens
taacgtaacaagact

SEQ ID NO: 202233 - DNA, 15 bp, Homo sapiens
ataacgtaacaagac

SEQ ID NO: 202234 - DNA, 15 bp, Homo sapiens
cataacgtaacaaga

SEQ ID NO: 202235 - DNA, 15 bp, Homo sapiens
tcataacgtaacaag

SEQ ID NO: 202236 - DNA, 15 bp, Homo sapiens
gtcataacgtaacaa

SEQ ID NO: 202237 - DNA, 15 bp, Homo sapiens
agtcataacgtaaca

SEQ ID NO: 202238 - DNA, 15 bp, Homo sapiens
tagtcataacgtaac

SEQ ID NO: 202239 - DNA, 15 bp, Homo sapiens
ttagtcataacgtaa

SEQ ID NO: 202240 - DNA, 15 bp, Homo sapiens
attagtcataacgta

SEQ ID NO: 202241 - DNA, 15 bp, Homo sapiens
gattagtcataacgt

SEQ ID NO: 202242 - DNA, 15 bp, Homo sapiens
agattagtcataacg

SEQ ID NO: 202243 - DNA, 15 bp, Homo sapiens
aagattagtcataac

SEQ ID NO: 202244 - DNA, 15 bp, Homo sapiens
aaagattagtcataa

SEQ ID NO: 202245 - DNA, 15 bp, Homo sapiens
caaagattagtcata

SEQ ID NO: 202246 - DNA, 15 bp, Homo sapiens
ccaaagattagtcat

SEQ ID NO: 202247 - DNA, 15 bp, Homo sapiens
cccaaagattagtca

SEQ ID NO: 202248 - DNA, 15 bp, Homo sapiens
ccccaaagattagtc

SEQ ID NO: 202249 - DNA, 15 bp, Homo sapiens
tccccaaagattagt

SEQ ID NO: 202250 - DNA, 15 bp, Homo sapiens
atccccaaagattag

SEQ ID NO: 202251 - DNA, 15 bp, Homo sapiens
aatccccaaagatta

SEQ ID NO: 202252 - DNA, 15 bp, Homo sapiens
aaatccccaaagatt

SEQ ID NO: 202253 - DNA, 15 bp, Homo sapiens
caaatccccaaagat

SEQ ID NO: 202254 - DNA, 15 bp, Homo sapiens
acaaatccccaaaga

SEQ ID NO: 202255 - DNA, 15 bp, Homo sapiens
cacaaatccccaaag

SEQ ID NO: 202256 - DNA, 15 bp, Homo sapiens
gcacaaatccccaaa

SEQ ID NO: 202257 - DNA, 15 bp, Homo sapiens
tgcacaaatccccaa

SEQ ID NO: 202258 - DNA, 15 bp, Homo sapiens
ctgcacaaatcccca

SEQ ID NO: 202259 - DNA, 15 bp, Homo sapiens
tctgcacaaatcccc

SEQ ID NO: 202260 - DNA, 15 bp, Homo sapiens
ttctgcacaaatccc

SEQ ID NO: 202261 - DNA, 15 bp, Homo sapiens
attctgcacaaatcc

SEQ ID NO: 202262 - DNA, 15 bp, Homo sapiens
cattctgcacaaatc

SEQ ID NO: 202263 - DNA, 15 bp, Homo sapiens
acattctgcacaaat

SEQ ID NO: 202264 - DNA, 15 bp, Homo sapiens
aacattctgcacaaa

SEQ ID NO: 202265 - DNA, 15 bp, Homo sapiens
taacattctgcacaa

SEQ ID NO: 202266 - DNA, 15 bp, Homo sapiens
ataacattctgcaca

SEQ ID NO: 202267 - DNA, 15 bp, Homo sapiens
aataacattctgcac

SEQ ID NO: 202268 - DNA, 15 bp, Homo sapiens
aaataacattctgca

SEQ ID NO: 202269 - DNA, 15 bp, Homo sapiens
aaaataacattctgc

SEQ ID NO: 202270 - DNA, 15 bp, Homo sapiens
taaaataacattctg

SEQ ID NO: 202271 - DNA, 15 bp, Homo sapiens
ctaaaataacattct

SEQ ID NO: 202272 - DNA, 15 bp, Homo sapiens
tctaaaataacattc

SEQ ID NO: 202273 - DNA, 15 bp, Homo sapiens
atctaaaataacatt

SEQ ID NO: 202274 - DNA, 15 bp, Homo sapiens
tatctaaaataacat

SEQ ID NO: 202275 - DNA, 15 bp, Homo sapiens
ttatctaaaataaca

SEQ ID NO: 202276 - DNA, 15 bp, Homo sapiens
cttatctaaaataac

SEQ ID NO: 202277 - DNA, 15 bp, Homo sapiens
gcttatctaaaataa

SEQ ID NO: 202278 - DNA, 15 bp, Homo sapiens
tgcttatctaaaata

SEQ ID NO: 202279 - DNA, 15 bp, Homo sapiens
ttgcttatctaaaat

SEQ ID NO: 202280 - DNA, 15 bp, Homo sapiens
tttgcttatctaaaa

SEQ ID NO: 202281 - DNA, 15 bp, Homo sapiens
ttttgcttatctaaa

SEQ ID NO: 202282 - DNA, 15 bp, Homo sapiens
tttttgcttatctaa

SEQ ID NO: 202283 - DNA, 15 bp, Homo sapiens
gtttttgcttatcta

SEQ ID NO: 202284 - DNA, 15 bp, Homo sapiens
cgtttttgcttatct

SEQ ID NO: 202285 - DNA, 15 bp, Homo sapiens
tcgtttttgcttatc

SEQ ID NO: 202286 - DNA, 15 bp, Homo sapiens
ctcgtttttgcttat

SEQ ID NO: 202287 - DNA, 15 bp, Homo sapiens
gctcgtttttgctta

SEQ ID NO: 202288 - DNA, 15 bp, Homo sapiens
tgctcgtttttgctt

SEQ ID NO: 202289 - DNA, 15 bp, Homo sapiens
ttgctcgtttttgct

SEQ ID NO: 202290 - DNA, 15 bp, Homo sapiens
tttgctcgtttttgc

SEQ ID NO: 202291 - DNA, 15 bp, Homo sapiens
ttttgctcgtttttg

SEQ ID NO: 202292 - DNA, 15 bp, Homo sapiens
attttgctcgttttt

SEQ ID NO: 202293 - DNA, 15 bp, Homo sapiens
tattttgctcgtttt

SEQ ID NO: 202294 - DNA, 15 bp, Homo sapiens
ctattttgctcgttt

SEQ ID NO: 202295 - DNA, 15 bp, Homo sapiens
cctattttgctcgtt

SEQ ID NO: 202296 - DNA, 15 bp, Homo sapiens
ccctattttgctcgt

SEQ ID NO: 202297 - DNA, 15 bp, Homo sapiens
cccctattttgctcg

SEQ ID NO: 202298 - DNA, 15 bp, Homo sapiens
tcccctattttgctc

SEQ ID NO: 202299 - DNA, 15 bp, Homo sapiens
ctcccctattttgct

SEQ ID NO: 202300 - DNA, 15 bp, Homo sapiens
actcccctattttgc

SEQ ID NO: 202301 - DNA, 15 bp, Homo sapiens
aactcccctattttg

SEQ ID NO: 202302 - DNA, 15 bp, Homo sapiens
aaactcccctatttt

SEQ ID NO: 202303 - DNA, 15 bp, Homo sapiens
taaactcccctattt

SEQ ID NO: 202304 - DNA, 15 bp, Homo sapiens
ttaaactcccctatt

SEQ ID NO: 202305 - DNA, 15 bp, Homo sapiens
gttaaactcccctat

SEQ ID NO: 202306 - DNA, 15 bp, Homo sapiens
agttaaactccccta

SEQ ID NO: 202307 - DNA, 15 bp, Homo sapiens
aagttaaactcccct

SEQ ID NO: 202308 - DNA, 15 bp, Homo sapiens
aaagttaaactcccc

SEQ ID NO: 202309 - DNA, 15 bp, Homo sapiens
taaagttaaactccc

SEQ ID NO: 202310 - DNA, 15 bp, Homo sapiens
ttaaagttaaactcc

SEQ ID NO: 202311 - DNA, 15 bp, Homo sapiens
attaaagttaaactc

SEQ ID NO: 202312 - DNA, 15 bp, Homo sapiens
tattaaagttaaact

SEQ ID NO: 202313 - DNA, 15 bp, Homo sapiens
atattaaagttaaac

SEQ ID NO: 202314 - DNA, 15 bp, Homo sapiens
aatattaaagttaaa

SEQ ID NO: 202315 - DNA, 15 bp, Homo sapiens
aaatattaaagttaa

SEQ ID NO: 202316 - DNA, 15 bp, Homo sapiens
aaaatattaaagtta

SEQ ID NO: 202317 - DNA, 15 bp, Homo sapiens
gaaaatattaaagtt

SEQ ID NO: 202318 - DNA, 15 bp, Homo sapiens
agaaaatattaaagt

SEQ ID NO: 202319 - DNA, 15 bp, Homo sapiens
aagaaaatattaaag

SEQ ID NO: 202320 - DNA, 15 bp, Homo sapiens
aaagaaaatattaaa

SEQ ID NO: 202321 - DNA, 15 bp, Homo sapiens
aaaagaaaatattaa

SEQ ID NO: 202322 - DNA, 15 bp, Homo sapiens
taaaagaaaatatta

SEQ ID NO: 202323 - DNA, 15 bp, Homo sapiens
ttaaaagaaaatatt

SEQ ID NO: 202324 - DNA, 15 bp, Homo sapiens
tttaaaagaaaatat

SEQ ID NO: 202325 - DNA, 15 bp, Homo sapiens
ttttaaaagaaaata

SEQ ID NO: 202326 - DNA, 15 bp, Homo sapiens
tttttaaaagaaaat

SEQ ID NO: 202327 - DNA, 15 bp, Homo sapiens
ctttttaaaagaaaa

SEQ ID NO: 202328 - DNA, 15 bp, Homo sapiens
gctttttaaaagaaa

SEQ ID NO: 202329 - DNA, 15 bp, Homo sapiens
tgctttttaaaagaa

SEQ ID NO: 202330 - DNA, 15 bp, Homo sapiens
atgctttttaaaaga

SEQ ID NO: 202331 - DNA, 15 bp, Homo sapiens
aatgctttttaaaag

SEQ ID NO: 202332 - DNA, 15 bp, Homo sapiens
aaatgctttttaaaa

SEQ ID NO: 202333 - DNA, 15 bp, Homo sapiens
gaaatgctttttaaa

SEQ ID NO: 202334 - DNA, 15 bp, Homo sapiens
tgaaatgctttttaa

SEQ ID NO: 202335 - DNA, 15 bp, Homo sapiens
atgaaatgcttttta

SEQ ID NO: 202336 - DNA, 15 bp, Homo sapiens
catgaaatgcttttt

SEQ ID NO: 202337 - DNA, 15 bp, Homo sapiens
acatgaaatgctttt

SEQ ID NO: 202338 - DNA, 15 bp, Homo sapiens
aacatgaaatgcttt

SEQ ID NO: 202339 - DNA, 15 bp, Homo sapiens
taacatgaaatgctt

SEQ ID NO: 202340 - DNA, 15 bp, Homo sapiens
ataacatgaaatgct

SEQ ID NO: 202341 - DNA, 15 bp, Homo sapiens
tataacatgaaatgc

SEQ ID NO: 202342 - DNA, 15 bp, Homo sapiens
ttataacatgaaatg

SEQ ID NO: 202343 - DNA, 15 bp, Homo sapiens
cttataacatgaaat

SEQ ID NO: 202344 - DNA, 15 bp, Homo sapiens
tcttataacatgaaa

SEQ ID NO: 202345 - DNA, 15 bp, Homo sapiens
atcttataacatgaa

SEQ ID NO: 202346 - DNA, 15 bp, Homo sapiens
gatcttataacatga

SEQ ID NO: 202347 - DNA, 15 bp, Homo sapiens
tgatcttataacatg

SEQ ID NO: 202348 - DNA, 15 bp, Homo sapiens
ttgatcttataacat

SEQ ID NO: 202349 - DNA, 15 bp, Homo sapiens
attgatcttataaca

SEQ ID NO: 202350 - DNA, 15 bp, Homo sapiens
aattgatcttataac

SEQ ID NO: 202351 - DNA, 15 bp, Homo sapiens
gaattgatcttataa

SEQ ID NO: 202352 - DNA, 15 bp, Homo sapiens
agaattgatcttata

SEQ ID NO: 202353 - DNA, 15 bp, Homo sapiens
cagaattgatcttat

SEQ ID NO: 202354 - DNA, 15 bp, Homo sapiens
tcagaattgatctta

SEQ ID NO: 202355 - DNA, 15 bp, Homo sapiens
ctcagaattgatctt

SEQ ID NO: 202356 - DNA, 15 bp, Homo sapiens
actcagaattgatct

SEQ ID NO: 202357 - DNA, 15 bp, Homo sapiens
cactcagaattgatc

SEQ ID NO: 202358 - DNA, 15 bp, Homo sapiens
ccactcagaattgat

SEQ ID NO: 202359 - DNA, 15 bp, Homo sapiens
accactcagaattga

SEQ ID NO: 202360 - DNA, 15 bp, Homo sapiens
taccactcagaattg

SEQ ID NO: 202361 - DNA, 15 bp, Homo sapiens
ctaccactcagaatt

SEQ ID NO: 202362 - DNA, 15 bp, Homo sapiens
tctaccactcagaat

SEQ ID NO: 202363 - DNA, 15 bp, Homo sapiens
ttctaccactcagaa

SEQ ID NO: 202364 - DNA, 15 bp, Homo sapiens
tttctaccactcaga

SEQ ID NO: 202365 - DNA, 15 bp, Homo sapiens
atttctaccactcag

SEQ ID NO: 202366 - DNA, 15 bp, Homo sapiens
catttctaccactca

SEQ ID NO: 202367 - DNA, 15 bp, Homo sapiens
gcatttctaccactc

SEQ ID NO: 202368 - DNA, 15 bp, Homo sapiens
agcatttctaccact

SEQ ID NO: 202369 - DNA, 15 bp, Homo sapiens
aagcatttctaccac

SEQ ID NO: 202370 - DNA, 15 bp, Homo sapiens
aaagcatttctacca

SEQ ID NO: 202371 - DNA, 15 bp, Homo sapiens
caaagcatttctacc

SEQ ID NO: 202372 - DNA, 15 bp, Homo sapiens
tcaaagcatttctac

SEQ ID NO: 202373 - DNA, 15 bp, Homo sapiens
gtcaaagcatttcta

SEQ ID NO: 202374 - DNA, 15 bp, Homo sapiens
tgtcaaagcatttct

SEQ ID NO: 202375 - DNA, 15 bp, Homo sapiens
atgtcaaagcatttc

SEQ ID NO: 202376 - DNA, 15 bp, Homo sapiens
aatgtcaaagcattt

SEQ ID NO: 202377 - DNA, 15 bp, Homo sapiens
aaatgtcaaagcatt

SEQ ID NO: 202378 - DNA, 15 bp, Homo sapiens
aaaatgtcaaagcat

SEQ ID NO: 202379 - DNA, 15 bp, Homo sapiens
taaaatgtcaaagca

SEQ ID NO: 202380 - DNA, 15 bp, Homo sapiens
ataaaatgtcaaagc

SEQ ID NO: 202381 - DNA, 15 bp, Homo sapiens
aataaaatgtcaaag

SEQ ID NO: 202382 - DNA, 15 bp, Homo sapiens
aaataaaatgtcaaa

SEQ ID NO: 202383 - DNA, 15 bp, Homo sapiens
gaaataaaatgtcaa

SEQ ID NO: 202384 - DNA, 15 bp, Homo sapiens
ggaaataaaatgtca

SEQ ID NO: 202385 - DNA, 15 bp, Homo sapiens
tggaaataaaatgtc

SEQ ID NO: 202386 - DNA, 15 bp, Homo sapiens
atggaaataaaatgt

SEQ ID NO: 202387 - DNA, 15 bp, Homo sapiens
aatggaaataaaatg

SEQ ID NO: 202388 - DNA, 15 bp, Homo sapiens
aaatggaaataaaat

SEQ ID NO: 202389 - DNA, 15 bp, Homo sapiens
aaaatggaaataaaa

SEQ ID NO: 202390 - DNA, 15 bp, Homo sapiens
gaaaatggaaataaa

SEQ ID NO: 202391 - DNA, 15 bp, Homo sapiens
agaaaatggaaataa

SEQ ID NO: 202392 - DNA, 15 bp, Homo sapiens
tagaaaatggaaata

SEQ ID NO: 202393 - DNA, 15 bp, Homo sapiens
gtagaaaatggaaat

SEQ ID NO: 202394 - DNA, 15 bp, Homo sapiens
agtagaaaatggaaa

SEQ ID NO: 202395 - DNA, 15 bp, Homo sapiens
aagtagaaaatggaa

SEQ ID NO: 202396 - DNA, 15 bp, Homo sapiens
aaagtagaaaatgga

SEQ ID NO: 202397 - DNA, 15 bp, Homo sapiens
aaaagtagaaaatgg

SEQ ID NO: 202398 - DNA, 15 bp, Homo sapiens
taaaagtagaaaatg

SEQ ID NO: 202399 - DNA, 15 bp, Homo sapiens
ctaaaagtagaaaat

SEQ ID NO: 202400 - DNA, 15 bp, Homo sapiens
actaaaagtagaaaa

SEQ ID NO: 202401 - DNA, 15 bp, Homo sapiens
aactaaaagtagaaa

SEQ ID NO: 202402 - DNA, 15 bp, Homo sapiens
aaactaaaagtagaa

SEQ ID NO: 202403 - DNA, 15 bp, Homo sapiens
aaaactaaaagtaga

SEQ ID NO: 202404 - DNA, 15 bp, Homo sapiens
aaaaactaaaagtag

SEQ ID NO: 202405 - DNA, 15 bp, Homo sapiens
aaaaaactaaaagta

SEQ ID NO: 202406 - DNA, 15 bp, Homo sapiens
aaaaaaactaaaagt

SEQ ID NO: 202407 - DNA, 15 bp, Homo sapiens
gaaaaaaactaaaag

SEQ ID NO: 202408 - DNA, 15 bp, Homo sapiens
ggaaaaaaactaaaa

SEQ ID NO: 202409 - DNA, 15 bp, Homo sapiens
aggaaaaaaactaaa

SEQ ID NO: 202410 - DNA, 15 bp, Homo sapiens
taggaaaaaaactaa

SEQ ID NO: 202411 - DNA, 15 bp, Homo sapiens
ataggaaaaaaacta

SEQ ID NO: 202412 - DNA, 15 bp, Homo sapiens
aataggaaaaaaact

SEQ ID NO: 202413 - DNA, 15 bp, Homo sapiens
aaataggaaaaaaac

SEQ ID NO: 202414 - DNA, 15 bp, Homo sapiens
caaataggaaaaaaa

SEQ ID NO: 202415 - DNA, 15 bp, Homo sapiens
acaaataggaaaaaa

SEQ ID NO: 202416 - DNA, 15 bp, Homo sapiens
aacaaataggaaaaa

SEQ ID NO: 202417 - DNA, 15 bp, Homo sapiens
aaacaaataggaaaa

SEQ ID NO: 202418 - DNA, 15 bp, Homo sapiens
taaacaaataggaaa

SEQ ID NO: 202419 - DNA, 15 bp, Homo sapiens
ttaaacaaataggaa

SEQ ID NO: 202420 - DNA, 15 bp, Homo sapiens
cttaaacaaatagga

SEQ ID NO: 202421 - DNA, 15 bp, Homo sapiens
tcttaaacaaatagg

SEQ ID NO: 202422 - DNA, 15 bp, Homo sapiens
atcttaaacaaatag

SEQ ID NO: 202423 - DNA, 15 bp, Homo sapiens
gatcttaaacaaata

SEQ ID NO: 202424 - DNA, 15 bp, Homo sapiens
agatcttaaacaaat

SEQ ID NO: 202425 - DNA, 15 bp, Homo sapiens
aagatcttaaacaaa

SEQ ID NO: 202426 - DNA, 15 bp, Homo sapiens
taagatcttaaacaa

SEQ ID NO: 202427 - DNA, 15 bp, Homo sapiens
ctaagatcttaaaca

SEQ ID NO: 202428 - DNA, 15 bp, Homo sapiens
tctaagatcttaaac

SEQ ID NO: 202429 - DNA, 15 bp, Homo sapiens
ctctaagatcttaaa

SEQ ID NO: 202430 - DNA, 15 bp, Homo sapiens
cctctaagatcttaa

SEQ ID NO: 202431 - DNA, 15 bp, Homo sapiens
tcctctaagatctta

SEQ ID NO: 202432 - DNA, 15 bp, Homo sapiens
atcctctaagatctt

SEQ ID NO: 202433 - DNA, 15 bp, Homo sapiens
aatcctctaagatct

SEQ ID NO: 202434 - DNA, 15 bp, Homo sapiens
taatcctctaagatc

SEQ ID NO: 202435 - DNA, 15 bp, Homo sapiens
ataatcctctaagat

SEQ ID NO: 202436 - DNA, 15 bp, Homo sapiens
aataatcctctaaga

SEQ ID NO: 202437 - DNA, 15 bp, Homo sapiens
taataatcctctaag

SEQ ID NO: 202438 - DNA, 15 bp, Homo sapiens
ttaataatcctctaa

SEQ ID NO: 202439 - DNA, 15 bp, Homo sapiens
cttaataatcctcta

SEQ ID NO: 202440 - DNA, 15 bp, Homo sapiens
gcttaataatcctct

SEQ ID NO: 202441 - DNA, 15 bp, Homo sapiens
agcttaataatcctc

SEQ ID NO: 202442 - DNA, 15 bp, Homo sapiens
cagcttaataatcct

SEQ ID NO: 202443 - DNA, 15 bp, Homo sapiens
tcagcttaataatcc

SEQ ID NO: 202444 - DNA, 15 bp, Homo sapiens
ttcagcttaataatc

SEQ ID NO: 202445 - DNA, 15 bp, Homo sapiens
gttcagcttaataat

SEQ ID NO: 202446 - DNA, 15 bp, Homo sapiens
agttcagcttaataa

SEQ ID NO: 202447 - DNA, 15 bp, Homo sapiens
gagttcagcttaata

SEQ ID NO: 202448 - DNA, 15 bp, Homo sapiens
ggagttcagcttaat

SEQ ID NO: 202449 - DNA, 15 bp, Homo sapiens
aggagttcagcttaa

SEQ ID NO: 202450 - DNA, 15 bp, Homo sapiens
gaggagttcagctta

SEQ ID NO: 202451 - DNA, 15 bp, Homo sapiens
tgaggagttcagctt

SEQ ID NO: 202452 - DNA, 15 bp, Homo sapiens
ttgaggagttcagct

SEQ ID NO: 202453 - DNA, 15 bp, Homo sapiens
gttgaggagttcagc

SEQ ID NO: 202454 - DNA, 15 bp, Homo sapiens
agttgaggagttcag

SEQ ID NO: 202455 - DNA, 15 bp, Homo sapiens
cagttgaggagttca

SEQ ID NO: 202456 - DNA, 15 bp, Homo sapiens
tcagttgaggagttc

SEQ ID NO: 202457 - DNA, 15 bp, Homo sapiens
atcagttgaggagtt

SEQ ID NO: 202458 - DNA, 15 bp, Homo sapiens
tatcagttgaggagt

SEQ ID NO: 202459 - DNA, 15 bp, Homo sapiens
ttatcagttgaggag

SEQ ID NO: 202460 - DNA, 15 bp, Homo sapiens
tttatcagttgagga

SEQ ID NO: 202461 - DNA, 15 bp, Homo sapiens
ttttatcagttgagg

SEQ ID NO: 202462 - DNA, 15 bp, Homo sapiens
tttttatcagttgag

SEQ ID NO: 202463 - DNA, 15 bp, Homo sapiens
ctttttatcagttga

SEQ ID NO: 202464 - DNA, 15 bp, Homo sapiens
gctttttatcagttg

SEQ ID NO: 202465 - DNA, 15 bp, Homo sapiens
tgctttttatcagtt

SEQ ID NO: 202466 - DNA, 15 bp, Homo sapiens
atgctttttatcagt

SEQ ID NO: 202467 - DNA, 15 bp, Homo sapiens
catgctttttatcag

SEQ ID NO: 202468 - DNA, 15 bp, Homo sapiens
tcatgctttttatca

SEQ ID NO: 202469 - DNA, 15 bp, Homo sapiens
gtcatgctttttatc

SEQ ID NO: 202470 - DNA, 15 bp, Homo sapiens
tgtcatgctttttat

SEQ ID NO: 202471 - DNA, 15 bp, Homo sapiens
atgtcatgcttttta

SEQ ID NO: 202472 - DNA, 15 bp, Homo sapiens
gatgtcatgcttttt

SEQ ID NO: 202473 - DNA, 15 bp, Homo sapiens
agatgtcatgctttt

SEQ ID NO: 202474 - DNA, 15 bp, Homo sapiens
aagatgtcatgcttt

SEQ ID NO: 202475 - DNA, 15 bp, Homo sapiens
taagatgtcatgctt

SEQ ID NO: 202476 - DNA, 15 bp, Homo sapiens
ttaagatgtcatgct

SEQ ID NO: 202477 - DNA, 15 bp, Homo sapiens
tttaagatgtcatgc

SEQ ID NO: 202478 - DNA, 15 bp, Homo sapiens
gtttaagatgtcatg

SEQ ID NO: 202479 - DNA, 15 bp, Homo sapiens
tgtttaagatgtcat

SEQ ID NO: 202480 - DNA, 15 bp, Homo sapiens
atgtttaagatgtca

SEQ ID NO: 202481 - DNA, 15 bp, Homo sapiens
tatgtttaagatgtc

SEQ ID NO: 202482 - DNA, 15 bp, Homo sapiens
ttatgtttaagatgt

SEQ ID NO: 202483 - DNA, 15 bp, Homo sapiens
cttatgtttaagatg

SEQ ID NO: 202484 - DNA, 15 bp, Homo sapiens
gcttatgtttaagat

SEQ ID NO: 202485 - DNA, 15 bp, Homo sapiens
tgcttatgtttaaga

SEQ ID NO: 202486 - DNA, 15 bp, Homo sapiens
ttgcttatgtttaag

SEQ ID NO: 202487 - DNA, 15 bp, Homo sapiens
tttgcttatgtttaa

SEQ ID NO: 202488 - DNA, 15 bp, Homo sapiens
ctttgcttatgttta

SEQ ID NO: 202489 - DNA, 15 bp, Homo sapiens
gctttgcttatgttt

SEQ ID NO: 202490 - DNA, 15 bp, Homo sapiens
tgctttgcttatgtt

SEQ ID NO: 202491 - DNA, 15 bp, Homo sapiens
atgctttgcttatgt

SEQ ID NO: 202492 - DNA, 15 bp, Homo sapiens
tatgctttgcttatg

SEQ ID NO: 202493 - DNA, 15 bp, Homo sapiens
atatgctttgcttat

SEQ ID NO: 202494 - DNA, 15 bp, Homo sapiens
aatatgctttgctta

SEQ ID NO: 202495 - DNA, 15 bp, Homo sapiens
aaatatgctttgctt

SEQ ID NO: 202496 - DNA, 15 bp, Homo sapiens
aaaatatgctttgct

SEQ ID NO: 202497 - DNA, 15 bp, Homo sapiens
aaaaatatgctttgc

SEQ ID NO: 202498 - DNA, 15 bp, Homo sapiens
taaaaatatgctttg

SEQ ID NO: 202499 - DNA, 15 bp, Homo sapiens
ctaaaaatatgcttt

SEQ ID NO: 202500 - DNA, 15 bp, Homo sapiens
cctaaaaatatgctt

SEQ ID NO: 202501 - DNA, 15 bp, Homo sapiens
acctaaaaatatgct

SEQ ID NO: 202502 - DNA, 15 bp, Homo sapiens
aacctaaaaatatgc

SEQ ID NO: 202503 - DNA, 15 bp, Homo sapiens
taacctaaaaatatg

SEQ ID NO: 202504 - DNA, 15 bp, Homo sapiens
ttaacctaaaaatat

SEQ ID NO: 202505 - DNA, 15 bp, Homo sapiens
attaacctaaaaata

SEQ ID NO: 202506 - DNA, 15 bp, Homo sapiens
aattaacctaaaaat

SEQ ID NO: 202507 - DNA, 15 bp, Homo sapiens
aaattaacctaaaaa

SEQ ID NO: 202508 - DNA, 15 bp, Homo sapiens
aaaattaacctaaaa

SEQ ID NO: 202509 - DNA, 15 bp, Homo sapiens
gaaaattaacctaaa

SEQ ID NO: 202510 - DNA, 15 bp, Homo sapiens
tgaaaattaacctaa

SEQ ID NO: 202511 - DNA, 15 bp, Homo sapiens
gtgaaaattaaccta

SEQ ID NO: 202512 - DNA, 15 bp, Homo sapiens
tgtgaaaattaacct

SEQ ID NO: 202513 - DNA, 15 bp, Homo sapiens
atgtgaaaattaacc

SEQ ID NO: 202514 - DNA, 15 bp, Homo sapiens
tatgtgaaaattaac

SEQ ID NO: 202515 - DNA, 15 bp, Homo sapiens
ctatgtgaaaattaa

SEQ ID NO: 202516 - DNA, 15 bp, Homo sapiens
tctatgtgaaaatta

SEQ ID NO: 202517 - DNA, 15 bp, Homo sapiens
ttctatgtgaaaatt

SEQ ID NO: 202518 - DNA, 15 bp, Homo sapiens
tttctatgtgaaaat

SEQ ID NO: 202519 - DNA, 15 bp, Homo sapiens
ttttctatgtgaaaa

SEQ ID NO: 202520 - DNA, 15 bp, Homo sapiens
gttttctatgtgaaa

SEQ ID NO: 202521 - DNA, 15 bp, Homo sapiens
tgttttctatgtgaa

SEQ ID NO: 202522 - DNA, 15 bp, Homo sapiens
ctgttttctatgtga

SEQ ID NO: 202523 - DNA, 15 bp, Homo sapiens
actgttttctatgtg

SEQ ID NO: 202524 - DNA, 15 bp, Homo sapiens
aactgttttctatgt

SEQ ID NO: 202525 - DNA, 15 bp, Homo sapiens
aaactgttttctatg

SEQ ID NO: 202526 - DNA, 15 bp, Homo sapiens
taaactgttttctat

SEQ ID NO: 202527 - DNA, 15 bp, Homo sapiens
ataaactgttttcta

SEQ ID NO: 202528 - DNA, 15 bp, Homo sapiens
aataaactgttttct

SEQ ID NO: 202529 - DNA, 15 bp, Homo sapiens
aaataaactgttttc

SEQ ID NO: 202530 - DNA, 15 bp, Homo sapiens
aaaataaactgtttt

SEQ ID NO: 202531 - DNA, 15 bp, Homo sapiens
taaaataaactgttt

SEQ ID NO: 202532 - DNA, 15 bp, Homo sapiens
ataaaataaactgtt

SEQ ID NO: 202533 - DNA, 15 bp, Homo sapiens
cataaaataaactgt

SEQ ID NO: 202534 - DNA, 15 bp, Homo sapiens
acataaaataaactg

SEQ ID NO: 202535 - DNA, 15 bp, Homo sapiens
cacataaaataaact

SEQ ID NO: 202536 - DNA, 15 bp, Homo sapiens
tcacataaaataaac

SEQ ID NO: 202537 - DNA, 15 bp, Homo sapiens
ttcacataaaataaa

SEQ ID NO: 202538 - DNA, 15 bp, Homo sapiens
tttcacataaaataa

SEQ ID NO: 202539 - DNA, 15 bp, Homo sapiens
atttcacataaaata

SEQ ID NO: 202540 - DNA, 15 bp, Homo sapiens
aatttcacataaaat

SEQ ID NO: 202541 - DNA, 15 bp, Homo sapiens
gaatttcacataaaa

SEQ ID NO: 202542 - DNA, 15 bp, Homo sapiens
agaatttcacataaa

SEQ ID NO: 202543 - DNA, 15 bp, Homo sapiens
tagaatttcacataa

SEQ ID NO: 202544 - DNA, 15 bp, Homo sapiens
atagaatttcacata

SEQ ID NO: 202545 - DNA, 15 bp, Homo sapiens
catagaatttcacat

SEQ ID NO: 202546 - DNA, 15 bp, Homo sapiens
acatagaatttcaca

SEQ ID NO: 202547 - DNA, 15 bp, Homo sapiens
tacatagaatttcac

SEQ ID NO: 202548 - DNA, 15 bp, Homo sapiens
ctacatagaatttca

SEQ ID NO: 202549 - DNA, 15 bp, Homo sapiens
tctacatagaatttc

SEQ ID NO: 202550 - DNA, 15 bp, Homo sapiens
atctacatagaattt

SEQ ID NO: 202551 - DNA, 15 bp, Homo sapiens
tatctacatagaatt

SEQ ID NO: 202552 - DNA, 15 bp, Homo sapiens
atatctacatagaat

SEQ ID NO: 202553 - DNA, 15 bp, Homo sapiens
tatatctacatagaa

SEQ ID NO: 202554 - DNA, 15 bp, Homo sapiens
gtatatctacataga

SEQ ID NO: 202555 - DNA, 15 bp, Homo sapiens
agtatatctacatag

SEQ ID NO: 202556 - DNA, 15 bp, Homo sapiens
tagtatatctacata

SEQ ID NO: 202557 - DNA, 15 bp, Homo sapiens
atagtatatctacat

SEQ ID NO: 202558 - DNA, 15 bp, Homo sapiens
aatagtatatctaca

SEQ ID NO: 202559 - DNA, 15 bp, Homo sapiens
aaatagtatatctac

SEQ ID NO: 202560 - DNA, 15 bp, Homo sapiens
aaaatagtatatcta

SEQ ID NO: 202561 - DNA, 15 bp, Homo sapiens
aaaaatagtatatct

SEQ ID NO: 202562 - DNA, 15 bp, Homo sapiens
aaaaaatagtatatc

SEQ ID NO: 202563 - DNA, 15 bp, Homo sapiens
aaaaaaatagtatat

SEQ ID NO: 202564 - DNA, 15 bp, Homo sapiens
caaaaaaatagtata

SEQ ID NO: 202565 - DNA, 15 bp, Homo sapiens
ccaaaaaaatagtat

SEQ ID NO: 202566 - DNA, 15 bp, Homo sapiens
accaaaaaaatagta

SEQ ID NO: 202567 - DNA, 15 bp, Homo sapiens
taccaaaaaaatagt

SEQ ID NO: 202568 - DNA, 15 bp, Homo sapiens
ataccaaaaaaatag

SEQ ID NO: 202569 - DNA, 15 bp, Homo sapiens
aataccaaaaaaata

SEQ ID NO: 202570 - DNA, 15 bp, Homo sapiens
aaataccaaaaaaat

SEQ ID NO: 202571 - DNA, 15 bp, Homo sapiens
taaataccaaaaaaa

SEQ ID NO: 202572 - DNA, 15 bp, Homo sapiens
ataaataccaaaaaa

SEQ ID NO: 202573 - DNA, 15 bp, Homo sapiens
aataaataccaaaaa

SEQ ID NO: 202574 - DNA, 15 bp, Homo sapiens
caataaataccaaaa

SEQ ID NO: 202575 - DNA, 15 bp, Homo sapiens
tcaataaataccaaa

SEQ ID NO: 202576 - DNA, 15 bp, Homo sapiens
atcaataaataccaa

SEQ ID NO: 202577 - DNA, 15 bp, Homo sapiens
tatcaataaatacca

SEQ ID NO: 202578 - DNA, 15 bp, Homo sapiens
atatcaataaatacc

SEQ ID NO: 202579 - DNA, 15 bp, Homo sapiens
catatcaataaatac

SEQ ID NO: 202580 - DNA, 15 bp, Homo sapiens
acatatcaataaata

SEQ ID NO: 202581 - DNA, 15 bp, Homo sapiens
aacatatcaataaat

SEQ ID NO: 202582 - DNA, 15 bp, Homo sapiens
aaacatatcaataaa

SEQ ID NO: 202583 - DNA, 15 bp, Homo sapiens
taaacatatcaataa

SEQ ID NO: 202584 - DNA, 15 bp, Homo sapiens
ataaacatatcaata

SEQ ID NO: 202585 - DNA, 15 bp, Homo sapiens
aataaacatatcaat

SEQ ID NO: 202586 - DNA, 15 bp, Homo sapiens
aaataaacatatcaa

SEQ ID NO: 202587 - DNA, 15 bp, Homo sapiens
aaaataaacatatca

SEQ ID NO: 202588 - DNA, 15 bp, Homo sapiens
taaaataaacatatc

SEQ ID NO: 202589 - DNA, 15 bp, Homo sapiens
ataaaataaacatat

SEQ ID NO: 202590 - DNA, 15 bp, Homo sapiens
aataaaataaacata

SEQ ID NO: 202591 - DNA, 15 bp, Homo sapiens
aaataaaataaacat

SEQ ID NO: 202592 - DNA, 15 bp, Homo sapiens
aaaataaaataaaca

SEQ ID NO: 202593 - DNA, 15 bp, Homo sapiens
taaaataaaataaac

SEQ ID NO: 202594 - DNA, 15 bp, Homo sapiens
ataaaataaaataaa

SEQ ID NO: 202595 - DNA, 15 bp, Homo sapiens
aataaaataaaataa

SEQ ID NO: 202596 - DNA, 15 bp, Homo sapiens
aaataaaataaaata

SEQ ID NO: 202597 - DNA, 15 bp, Homo sapiens
aaaataaaataaaat

SEQ ID NO: 202598 - DNA, 15 bp, Homo sapiens
taaaataaaataaaa

SEQ ID NO: 202599 - DNA, 15 bp, Homo sapiens
taaataaaataaaat

SEQ ID NO: 202600 - DNA, 15 bp, Homo sapiens
ataaataaaataaaa

SEQ ID NO: 202601 - DNA, 15 bp, Homo sapiens
aaaaaaataaataaa

SEQ ID NO: 202602 - DNA, 15 bp, Homo sapiens
aaaaaaaataaataa

SEQ ID NO: 202603 - DNA, 15 bp, Homo sapiens
aaaaaaaaataaata

SEQ ID NO: 202604 - DNA, 15 bp, Homo sapiens
aaaaaaaaaataaat

SEQ ID NO: 202605 - DNA, 15 bp, Homo sapiens
aaaaaaaaaaataaa

SEQ ID NO: 202606 - DNA, 15 bp, Homo sapiens
caaaaaaaaaaataa

SEQ ID NO: 202607 - DNA, 15 bp, Homo sapiens
tcaaaaaaaaaaata

SEQ ID NO: 202608 - DNA, 15 bp, Homo sapiens
tgagactctgtctca

SEQ ID NO: 202609 - DNA, 15 bp, Homo sapiens
gtgagactctgtctc

SEQ ID NO: 202610 - DNA, 15 bp, Homo sapiens
atgccactgcactcc

SEQ ID NO: 202611 - DNA, 15 bp, Homo sapiens
catgccactgcactc

SEQ ID NO: 202612 - DNA, 15 bp, Homo sapiens
tcatgccactgcact

SEQ ID NO: 202613 - DNA, 15 bp, Homo sapiens
atcatgccactgcac

SEQ ID NO: 202614 - DNA, 15 bp, Homo sapiens
gatcatgccactgca

SEQ ID NO: 202615 - DNA, 15 bp, Homo sapiens
cgatcatgccactgc

SEQ ID NO: 202616 - DNA, 15 bp, Homo sapiens
acgatcatgccactg

SEQ ID NO: 202617 - DNA, 15 bp, Homo sapiens
tacgatcatgccact

SEQ ID NO: 202618 - DNA, 15 bp, Homo sapiens
ctacgatcatgccac

SEQ ID NO: 202619 - DNA, 15 bp, Homo sapiens
gctacgatcatgcca

SEQ ID NO: 202620 - DNA, 15 bp, Homo sapiens
agctacgatcatgcc

SEQ ID NO: 202621 - DNA, 15 bp, Homo sapiens
gagctacgatcatgc

SEQ ID NO: 202622 - DNA, 15 bp, Homo sapiens
tgagctacgatcatg

SEQ ID NO: 202623 - DNA, 15 bp, Homo sapiens
ttgcagtgagctacg

SEQ ID NO: 202624 - DNA, 15 bp, Homo sapiens
gttgcagtgagctac

SEQ ID NO: 202625 - DNA, 15 bp, Homo sapiens
ggttgcagtgagcta

SEQ ID NO: 202626 - DNA, 15 bp, Homo sapiens
acccgggaggtggag

SEQ ID NO: 202627 - DNA, 15 bp, Homo sapiens
aacccgggaggtgga

SEQ ID NO: 202628 - DNA, 15 bp, Homo sapiens
gaacccgggaggtgg

SEQ ID NO: 202629 - DNA, 15 bp, Homo sapiens
tgaacccgggaggtg

SEQ ID NO: 202630 - DNA, 15 bp, Homo sapiens
ttgaacccgggaggt

SEQ ID NO: 202631 - DNA, 15 bp, Homo sapiens
aagaattgcttgaac

SEQ ID NO: 202632 - DNA, 15 bp, Homo sapiens
gaagaattgcttgaa

SEQ ID NO: 202633 - DNA, 15 bp, Homo sapiens
agaagaattgcttga

SEQ ID NO: 202634 - DNA, 15 bp, Homo sapiens
cagaagaattgcttg

SEQ ID NO: 202635 - DNA, 15 bp, Homo sapiens
acagaagaattgctt

SEQ ID NO: 202636 - DNA, 15 bp, Homo sapiens
gacagaagaattgct

SEQ ID NO: 202637 - DNA, 15 bp, Homo sapiens
agacagaagaattgc

SEQ ID NO: 202638 - DNA, 15 bp, Homo sapiens
gagacagaagaattg

SEQ ID NO: 202639 - DNA, 15 bp, Homo sapiens
tgagacagaagaatt

SEQ ID NO: 202640 - DNA, 15 bp, Homo sapiens
ctgagacagaagaat

SEQ ID NO: 202641 - DNA, 15 bp, Homo sapiens
gctgagacagaagaa

SEQ ID NO: 202642 - DNA, 15 bp, Homo sapiens
ggctgagacagaaga

SEQ ID NO: 202643 - DNA, 15 bp, Homo sapiens
aggctgagacagaag

SEQ ID NO: 202644 - DNA, 15 bp, Homo sapiens
gaggctgagacagaa

SEQ ID NO: 202645 - DNA, 15 bp, Homo sapiens
ggaggctgagacaga

SEQ ID NO: 202646 - DNA, 15 bp, Homo sapiens
cgggaggctgagaca

SEQ ID NO: 202647 - DNA, 15 bp, Homo sapiens
tcgggaggctgagac

SEQ ID NO: 202648 - DNA, 15 bp, Homo sapiens
ctcgggaggctgaga

SEQ ID NO: 202649 - DNA, 15 bp, Homo sapiens
ggcacctgtagtccc

SEQ ID NO: 202650 - DNA, 15 bp, Homo sapiens
aggcacctgtagtcc

SEQ ID NO: 202651 - DNA, 15 bp, Homo sapiens
caggcacctgtagtc

SEQ ID NO: 202652 - DNA, 15 bp, Homo sapiens
gcaggcacctgtagt

SEQ ID NO: 202653 - DNA, 15 bp, Homo sapiens
ggcaggcacctgtag

SEQ ID NO: 202654 - DNA, 15 bp, Homo sapiens
tggcaggcacctgta

SEQ ID NO: 202655 - DNA, 15 bp, Homo sapiens
gtggcaggcacctgt

SEQ ID NO: 202656 - DNA, 15 bp, Homo sapiens
agtggcaggcacctg

SEQ ID NO: 202657 - DNA, 15 bp, Homo sapiens
tagtggcaggcacct

SEQ ID NO: 202658 - DNA, 15 bp, Homo sapiens
atagtggcaggcacc

SEQ ID NO: 202659 - DNA, 15 bp, Homo sapiens
catagtggcaggcac

SEQ ID NO: 202660 - DNA, 15 bp, Homo sapiens
gcatagtggcaggca

SEQ ID NO: 202661 - DNA, 15 bp, Homo sapiens
ggcatagtggcaggc

SEQ ID NO: 202662 - DNA, 15 bp, Homo sapiens
gggcatagtggcagg

SEQ ID NO: 202663 - DNA, 15 bp, Homo sapiens
cgggcatagtggcag

SEQ ID NO: 202664 - DNA, 15 bp, Homo sapiens
ccgggcatagtggca

SEQ ID NO: 202665 - DNA, 15 bp, Homo sapiens
gccgggcatagtggc

SEQ ID NO: 202666 - DNA, 15 bp, Homo sapiens
agccgggcatagtgg

SEQ ID NO: 202667 - DNA, 15 bp, Homo sapiens
tagccgggcatagtg

SEQ ID NO: 202668 - DNA, 15 bp, Homo sapiens
ttagccgggcatagt

SEQ ID NO: 202669 - DNA, 15 bp, Homo sapiens
attagccgggcatag

SEQ ID NO: 202670 - DNA, 15 bp, Homo sapiens
aattagccgggcata

SEQ ID NO: 202671 - DNA, 15 bp, Homo sapiens
aaattagccgggcat

SEQ ID NO: 202672 - DNA, 15 bp, Homo sapiens
aaaattagccgggca

SEQ ID NO: 202673 - DNA, 15 bp, Homo sapiens
aaaaattagccgggc

SEQ ID NO: 202674 - DNA, 15 bp, Homo sapiens
cacaaaaattagccg

SEQ ID NO: 202675 - DNA, 15 bp, Homo sapiens
acacaaaaattagcc

SEQ ID NO: 202676 - DNA, 15 bp, Homo sapiens
atctctactaaaaac

SEQ ID NO: 202677 - DNA, 15 bp, Homo sapiens
aggtgaaaccccatc

SEQ ID NO: 202678 - DNA, 15 bp, Homo sapiens
aaggtgaaaccccat

SEQ ID NO: 202679 - DNA, 15 bp, Homo sapiens
caaggtgaaacccca

SEQ ID NO: 202680 - DNA, 15 bp, Homo sapiens
acaaggtgaaacccc

SEQ ID NO: 202681 - DNA, 15 bp, Homo sapiens
aacaaggtgaaaccc

SEQ ID NO: 202682 - DNA, 15 bp, Homo sapiens
caacaaggtgaaacc

SEQ ID NO: 202683 - DNA, 15 bp, Homo sapiens
ccaacaaggtgaaac

SEQ ID NO: 202684 - DNA, 15 bp, Homo sapiens
accaacaaggtgaaa

SEQ ID NO: 202685 - DNA, 15 bp, Homo sapiens
gaccaacaaggtgaa

SEQ ID NO: 202686 - DNA, 15 bp, Homo sapiens
tgaccaacaaggtga

SEQ ID NO: 202687 - DNA, 15 bp, Homo sapiens
ctgaccaacaaggtg

SEQ ID NO: 202688 - DNA, 15 bp, Homo sapiens
cctgaccaacaaggt

SEQ ID NO: 202689 - DNA, 15 bp, Homo sapiens
gcctgaccaacaagg

SEQ ID NO: 202690 - DNA, 15 bp, Homo sapiens
agcctgaccaacaag

SEQ ID NO: 202691 - DNA, 15 bp, Homo sapiens
cagcctgaccaacaa

SEQ ID NO: 202692 - DNA, 15 bp, Homo sapiens
ccagcctgaccaaca

SEQ ID NO: 202693 - DNA, 15 bp, Homo sapiens
accagcctgaccaac

SEQ ID NO: 202694 - DNA, 15 bp, Homo sapiens
gaccagcctgaccaa

SEQ ID NO: 202695 - DNA, 15 bp, Homo sapiens
agaccagcctgacca

SEQ ID NO: 202696 - DNA, 15 bp, Homo sapiens
gagaccagcctgacc

SEQ ID NO: 202697 - DNA, 15 bp, Homo sapiens
cgagaccagcctgac

SEQ ID NO: 202698 - DNA, 15 bp, Homo sapiens
tcgagaccagcctga

SEQ ID NO: 202699 - DNA, 15 bp, Homo sapiens
ggttcgagaccagcc

SEQ ID NO: 202700 - DNA, 15 bp, Homo sapiens
gggttcgagaccagc

SEQ ID NO: 202701 - DNA, 15 bp, Homo sapiens
ggggttcgagaccag

SEQ ID NO: 202702 - DNA, 15 bp, Homo sapiens
aggggttcgagacca

SEQ ID NO: 202703 - DNA, 15 bp, Homo sapiens
caggggttcgagacc

SEQ ID NO: 202704 - DNA, 15 bp, Homo sapiens
tcaggggttcgagac

SEQ ID NO: 202705 - DNA, 15 bp, Homo sapiens
gtcaggggttcgaga

SEQ ID NO: 202706 - DNA, 15 bp, Homo sapiens
ggtcaggggttcgag

SEQ ID NO: 202707 - DNA, 15 bp, Homo sapiens
aggtcaggggttcga

SEQ ID NO: 202708 - DNA, 15 bp, Homo sapiens
gaggtcaggggttcg

SEQ ID NO: 202709 - DNA, 15 bp, Homo sapiens
tgaggtcaggggttc

SEQ ID NO: 202710 - DNA, 15 bp, Homo sapiens
ctgaggtcaggggtt

SEQ ID NO: 202711 - DNA, 15 bp, Homo sapiens
cctgaggtcaggggt

SEQ ID NO: 202712 - DNA, 15 bp, Homo sapiens
acctgaggtcagggg

SEQ ID NO: 202713 - DNA, 15 bp, Homo sapiens
cacctgaggtcaggg

SEQ ID NO: 202714 - DNA, 15 bp, Homo sapiens
tgggtggatcacctg

SEQ ID NO: 202715 - DNA, 15 bp, Homo sapiens
gtgggtggatcacct

SEQ ID NO: 202716 - DNA, 15 bp, Homo sapiens
ggtgggtggatcacc

SEQ ID NO: 202717 - DNA, 15 bp, Homo sapiens
aggtgggtggatcac

SEQ ID NO: 202718 - DNA, 15 bp, Homo sapiens
tgaggtgggtggatc

SEQ ID NO: 202719 - DNA, 15 bp, Homo sapiens
ctgaggtgggtggat

SEQ ID NO: 202720 - DNA, 15 bp, Homo sapiens
gctgaggtgggtgga

SEQ ID NO: 202721 - DNA, 15 bp, Homo sapiens
ggctgaggtgggtgg

SEQ ID NO: 202722 - DNA, 15 bp, Homo sapiens
aggctgaggtgggtg

SEQ ID NO: 202723 - DNA, 15 bp, Homo sapiens
gaggctgaggtgggt

SEQ ID NO: 202724 - DNA, 15 bp, Homo sapiens
gcctataatcccagc

SEQ ID NO: 202725 - DNA, 15 bp, Homo sapiens
tgcctataatcccag

SEQ ID NO: 202726 - DNA, 15 bp, Homo sapiens
atgcctataatccca

SEQ ID NO: 202727 - DNA, 15 bp, Homo sapiens
catgcctataatccc

SEQ ID NO: 202728 - DNA, 15 bp, Homo sapiens
tcatgcctataatcc

SEQ ID NO: 202729 - DNA, 15 bp, Homo sapiens
ctcatgcctataatc

SEQ ID NO: 202730 - DNA, 15 bp, Homo sapiens
gctcatgcctataat

SEQ ID NO: 202731 - DNA, 15 bp, Homo sapiens
ggctcatgcctataa

SEQ ID NO: 202732 - DNA, 15 bp, Homo sapiens
tggctcatgcctata

SEQ ID NO: 202733 - DNA, 15 bp, Homo sapiens
gtggctcatgcctat

SEQ ID NO: 202734 - DNA, 15 bp, Homo sapiens
ggtggctcatgccta

SEQ ID NO: 202735 - DNA, 15 bp, Homo sapiens
gggcacggtggctca

SEQ ID NO: 202736 - DNA, 15 bp, Homo sapiens
cgggcacggtggctc

SEQ ID NO: 202737 - DNA, 15 bp, Homo sapiens
ccgggcacggtggct

SEQ ID NO: 202738 - DNA, 15 bp, Homo sapiens
gccgggcacggtggc

SEQ ID NO: 202739 - DNA, 15 bp, Homo sapiens
ggccgggcacggtgg

SEQ ID NO: 202740 - DNA, 15 bp, Homo sapiens
cggccgggcacggtg

SEQ ID NO: 202741 - DNA, 15 bp, Homo sapiens
tcggccgggcacggt

SEQ ID NO: 202742 - DNA, 15 bp, Homo sapiens
aaatgtaaaaaataa

SEQ ID NO: 202743 - DNA, 15 bp, Homo sapiens
taaatgtaaaaaata

SEQ ID NO: 202744 - DNA, 15 bp, Homo sapiens
ctaaatgtaaaaaat

SEQ ID NO: 202745 - DNA, 15 bp, Homo sapiens
tctaaatgtaaaaaa

SEQ ID NO: 202746 - DNA, 15 bp, Homo sapiens
atctaaatgtaaaaa

SEQ ID NO: 202747 - DNA, 15 bp, Homo sapiens
aatctaaatgtaaaa

SEQ ID NO: 202748 - DNA, 15 bp, Homo sapiens
aaatctaaatgtaaa

SEQ ID NO: 202749 - DNA, 15 bp, Homo sapiens
aaaatctaaatgtaa

SEQ ID NO: 202750 - DNA, 15 bp, Homo sapiens
taaaatctaaatgta

SEQ ID NO: 202751 - DNA, 15 bp, Homo sapiens
ttaaaatctaaatgt

SEQ ID NO: 202752 - DNA, 15 bp, Homo sapiens
attaaaatctaaatg

SEQ ID NO: 202753 - DNA, 15 bp, Homo sapiens
gattaaaatctaaat

SEQ ID NO: 202754 - DNA, 15 bp, Homo sapiens
ggattaaaatctaaa

SEQ ID NO: 202755 - DNA, 15 bp, Homo sapiens
cggattaaaatctaa

SEQ ID NO: 202756 - DNA, 15 bp, Homo sapiens
acggattaaaatcta

SEQ ID NO: 202757 - DNA, 15 bp, Homo sapiens
gacggattaaaatct

SEQ ID NO: 202758 - DNA, 15 bp, Homo sapiens
agacggattaaaatc

SEQ ID NO: 202759 - DNA, 15 bp, Homo sapiens
cagacggattaaaat

SEQ ID NO: 202760 - DNA, 15 bp, Homo sapiens
ccagacggattaaaa

SEQ ID NO: 202761 - DNA, 15 bp, Homo sapiens
tccagacggattaaa

SEQ ID NO: 202762 - DNA, 15 bp, Homo sapiens
ttccagacggattaa

SEQ ID NO: 202763 - DNA, 15 bp, Homo sapiens
attccagacggatta

SEQ ID NO: 202764 - DNA, 15 bp, Homo sapiens
aattccagacggatt

SEQ ID NO: 202765 - DNA, 15 bp, Homo sapiens
aaattccagacggat

SEQ ID NO: 202766 - DNA, 15 bp, Homo sapiens
taaattccagacgga

SEQ ID NO: 202767 - DNA, 15 bp, Homo sapiens
ataaattccagacgg

SEQ ID NO: 202768 - DNA, 15 bp, Homo sapiens
aataaattccagacg

SEQ ID NO: 202769 - DNA, 15 bp, Homo sapiens
aaataaattccagac

SEQ ID NO: 202770 - DNA, 15 bp, Homo sapiens
aaaataaattccaga

SEQ ID NO: 202771 - DNA, 15 bp, Homo sapiens
aaaaataaattccag

SEQ ID NO: 202772 - DNA, 15 bp, Homo sapiens
caaaaataaattcca

SEQ ID NO: 202773 - DNA, 15 bp, Homo sapiens
acaaaaataaattcc

SEQ ID NO: 202774 - DNA, 15 bp, Homo sapiens
cacaaaaataaattc

SEQ ID NO: 202775 - DNA, 15 bp, Homo sapiens
acacaaaaataaatt

SEQ ID NO: 202776 - DNA, 15 bp, Homo sapiens
tacacaaaaataaat

SEQ ID NO: 202777 - DNA, 15 bp, Homo sapiens
atacacaaaaataaa

SEQ ID NO: 202778 - DNA, 15 bp, Homo sapiens
catacacaaaaataa

SEQ ID NO: 202779 - DNA, 15 bp, Homo sapiens
gcatacacaaaaata

SEQ ID NO: 202780 - DNA, 15 bp, Homo sapiens
agcatacacaaaaat

SEQ ID NO: 202781 - DNA, 15 bp, Homo sapiens
cagcatacacaaaaa

SEQ ID NO: 202782 - DNA, 15 bp, Homo sapiens
acagcatacacaaaa

SEQ ID NO: 202783 - DNA, 15 bp, Homo sapiens
cacagcatacacaaa

SEQ ID NO: 202784 - DNA, 15 bp, Homo sapiens
tcacagcatacacaa

SEQ ID NO: 202785 - DNA, 15 bp, Homo sapiens
ctcacagcatacaca

SEQ ID NO: 202786 - DNA, 15 bp, Homo sapiens
cctcacagcatacac

SEQ ID NO: 202787 - DNA, 15 bp, Homo sapiens
acctcacagcataca

SEQ ID NO: 202788 - DNA, 15 bp, Homo sapiens
tacctcacagcatac

SEQ ID NO: 202789 - DNA, 15 bp, Homo sapiens
ctacctcacagcata

SEQ ID NO: 202790 - DNA, 15 bp, Homo sapiens
cctacctcacagcat

SEQ ID NO: 202791 - DNA, 15 bp, Homo sapiens
ccctacctcacagca

SEQ ID NO: 202792 - DNA, 15 bp, Homo sapiens
tccctacctcacagc

SEQ ID NO: 202793 - DNA, 15 bp, Homo sapiens
gtccctacctcacag

SEQ ID NO: 202794 - DNA, 15 bp, Homo sapiens
ggtccctacctcaca

SEQ ID NO: 202795 - DNA, 15 bp, Homo sapiens
tggtccctacctcac

SEQ ID NO: 202796 - DNA, 15 bp, Homo sapiens
atggtccctacctca

SEQ ID NO: 202797 - DNA, 15 bp, Homo sapiens
tatggtccctacctc

SEQ ID NO: 202798 - DNA, 15 bp, Homo sapiens
gtatggtccctacct

SEQ ID NO: 202799 - DNA, 15 bp, Homo sapiens
agtatggtccctacc

SEQ ID NO: 202800 - DNA, 15 bp, Homo sapiens
aagtatggtccctac

SEQ ID NO: 202801 - DNA, 15 bp, Homo sapiens
aaagtatggtcccta

SEQ ID NO: 202802 - DNA, 15 bp, Homo sapiens
aaaagtatggtccct

SEQ ID NO: 202803 - DNA, 15 bp, Homo sapiens
taaaagtatggtccc

SEQ ID NO: 202804 - DNA, 15 bp, Homo sapiens
ataaaagtatggtcc

SEQ ID NO: 202805 - DNA, 15 bp, Homo sapiens
aataaaagtatggtc

SEQ ID NO: 202806 - DNA, 15 bp, Homo sapiens
aaataaaagtatggt

SEQ ID NO: 202807 - DNA, 15 bp, Homo sapiens
aaaataaaagtatgg

SEQ ID NO: 202808 - DNA, 15 bp, Homo sapiens
aaaaataaaagtatg

SEQ ID NO: 202809 - DNA, 15 bp, Homo sapiens
aaaaaataaaagtat

SEQ ID NO: 202810 - DNA, 15 bp, Homo sapiens
gaaaaaataaaagta

SEQ ID NO: 202811 - DNA, 15 bp, Homo sapiens
ggaaaaaataaaagt

SEQ ID NO: 202812 - DNA, 15 bp, Homo sapiens
gggaaaaaataaaag

SEQ ID NO: 202813 - DNA, 15 bp, Homo sapiens
tgggaaaaaataaaa

SEQ ID NO: 202814 - DNA, 15 bp, Homo sapiens
ttgggaaaaaataaa

SEQ ID NO: 202815 - DNA, 15 bp, Homo sapiens
tttgggaaaaaataa

SEQ ID NO: 202816 - DNA, 15 bp, Homo sapiens
atttgggaaaaaata

SEQ ID NO: 202817 - DNA, 15 bp, Homo sapiens
catttgggaaaaaat

SEQ ID NO: 202818 - DNA, 15 bp, Homo sapiens
ccatttgggaaaaaa

SEQ ID NO: 202819 - DNA, 15 bp, Homo sapiens
cccatttgggaaaaa

SEQ ID NO: 202820 - DNA, 15 bp, Homo sapiens
acccatttgggaaaa

SEQ ID NO: 202821 - DNA, 15 bp, Homo sapiens
aacccatttgggaaa

SEQ ID NO: 202822 - DNA, 15 bp, Homo sapiens
taacccatttgggaa

SEQ ID NO: 202823 - DNA, 15 bp, Homo sapiens
gtaacccatttggga

SEQ ID NO: 202824 - DNA, 15 bp, Homo sapiens
agtaacccatttggg

SEQ ID NO: 202825 - DNA, 15 bp, Homo sapiens
tagtaacccatttgg

SEQ ID NO: 202826 - DNA, 15 bp, Homo sapiens
ctagtaacccatttg

SEQ ID NO: 202827 - DNA, 15 bp, Homo sapiens
actagtaacccattt

SEQ ID NO: 202828 - DNA, 15 bp, Homo sapiens
aactagtaacccatt

SEQ ID NO: 202829 - DNA, 15 bp, Homo sapiens
caactagtaacccat

SEQ ID NO: 202830 - DNA, 15 bp, Homo sapiens
ccaactagtaaccca

SEQ ID NO: 202831 - DNA, 15 bp, Homo sapiens
gccaactagtaaccc

SEQ ID NO: 202832 - DNA, 15 bp, Homo sapiens
ggccaactagtaacc

SEQ ID NO: 202833 - DNA, 15 bp, Homo sapiens
tggccaactagtaac

SEQ ID NO: 202834 - DNA, 15 bp, Homo sapiens
ttggccaactagtaa

SEQ ID NO: 202835 - DNA, 15 bp, Homo sapiens
tttggccaactagta

SEQ ID NO: 202836 - DNA, 15 bp, Homo sapiens
gtttggccaactagt

SEQ ID NO: 202837 - DNA, 15 bp, Homo sapiens
tgtttggccaactag

SEQ ID NO: 202838 - DNA, 15 bp, Homo sapiens
atgtttggccaacta

SEQ ID NO: 202839 - DNA, 15 bp, Homo sapiens
gatgtttggccaact

SEQ ID NO: 202840 - DNA, 15 bp, Homo sapiens
tgatgtttggccaac

SEQ ID NO: 202841 - DNA, 15 bp, Homo sapiens
atgatgtttggccaa

SEQ ID NO: 202842 - DNA, 15 bp, Homo sapiens
aatgatgtttggcca

SEQ ID NO: 202843 - DNA, 15 bp, Homo sapiens
aaatgatgtttggcc

SEQ ID NO: 202844 - DNA, 15 bp, Homo sapiens
taaatgatgtttggc

SEQ ID NO: 202845 - DNA, 15 bp, Homo sapiens
ataaatgatgtttgg

SEQ ID NO: 202846 - DNA, 15 bp, Homo sapiens
aataaatgatgtttg

SEQ ID NO: 202847 - DNA, 15 bp, Homo sapiens
caataaatgatgttt

SEQ ID NO: 202848 - DNA, 15 bp, Homo sapiens
tcaataaatgatgtt

SEQ ID NO: 202849 - DNA, 15 bp, Homo sapiens
ttcaataaatgatgt

SEQ ID NO: 202850 - DNA, 15 bp, Homo sapiens
attcaataaatgatg

SEQ ID NO: 202851 - DNA, 15 bp, Homo sapiens
tattcaataaatgat

SEQ ID NO: 202852 - DNA, 15 bp, Homo sapiens
ttattcaataaatga

SEQ ID NO: 202853 - DNA, 15 bp, Homo sapiens
attattcaataaatg

SEQ ID NO: 202854 - DNA, 15 bp, Homo sapiens
aattattcaataaat

SEQ ID NO: 202855 - DNA, 15 bp, Homo sapiens
gaattattcaataaa

SEQ ID NO: 202856 - DNA, 15 bp, Homo sapiens
tgaattattcaataa

SEQ ID NO: 202857 - DNA, 15 bp, Homo sapiens
atgaattattcaata

SEQ ID NO: 202858 - DNA, 15 bp, Homo sapiens
gatgaattattcaat

SEQ ID NO: 202859 - DNA, 15 bp, Homo sapiens
agatgaattattcaa

SEQ ID NO: 202860 - DNA, 15 bp, Homo sapiens
aagatgaattattca

SEQ ID NO: 202861 - DNA, 15 bp, Homo sapiens
aaagatgaattattc

SEQ ID NO: 202862 - DNA, 15 bp, Homo sapiens
aaaagatgaattatt

SEQ ID NO: 202863 - DNA, 15 bp, Homo sapiens
gaaaagatgaattat

SEQ ID NO: 202864 - DNA, 15 bp, Homo sapiens
ggaaaagatgaatta

SEQ ID NO: 202865 - DNA, 15 bp, Homo sapiens
gggaaaagatgaatt

SEQ ID NO: 202866 - DNA, 15 bp, Homo sapiens
agggaaaagatgaat

SEQ ID NO: 202867 - DNA, 15 bp, Homo sapiens
tagggaaaagatgaa

SEQ ID NO: 202868 - DNA, 15 bp, Homo sapiens
gtagggaaaagatga

SEQ ID NO: 202869 - DNA, 15 bp, Homo sapiens
agtagggaaaagatg

SEQ ID NO: 202870 - DNA, 15 bp, Homo sapiens
cagtagggaaaagat

SEQ ID NO: 202871 - DNA, 15 bp, Homo sapiens
tcagtagggaaaaga

SEQ ID NO: 202872 - DNA, 15 bp, Homo sapiens
gtcagtagggaaaag

SEQ ID NO: 202873 - DNA, 15 bp, Homo sapiens
agtcagtagggaaaa

SEQ ID NO: 202874 - DNA, 15 bp, Homo sapiens
gagtcagtagggaaa

SEQ ID NO: 202875 - DNA, 15 bp, Homo sapiens
cgagtcagtagggaa

SEQ ID NO: 202876 - DNA, 15 bp, Homo sapiens
tcgagtcagtaggga

SEQ ID NO: 202877 - DNA, 15 bp, Homo sapiens
ttcgagtcagtaggg

SEQ ID NO: 202878 - DNA, 15 bp, Homo sapiens
tttcgagtcagtagg

SEQ ID NO: 202879 - DNA, 15 bp, Homo sapiens
atttcgagtcagtag

SEQ ID NO: 202880 - DNA, 15 bp, Homo sapiens
tatttcgagtcagta

SEQ ID NO: 202881 - DNA, 15 bp, Homo sapiens
gtatttcgagtcagt

SEQ ID NO: 202882 - DNA, 15 bp, Homo sapiens
ggtatttcgagtcag

SEQ ID NO: 202883 - DNA, 15 bp, Homo sapiens
tggtatttcgagtca

SEQ ID NO: 202884 - DNA, 15 bp, Homo sapiens
atggtatttcgagtc

SEQ ID NO: 202885 - DNA, 15 bp, Homo sapiens
gatggtatttcgagt

SEQ ID NO: 202886 - DNA, 15 bp, Homo sapiens
agatggtatttcgag

SEQ ID NO: 202887 - DNA, 15 bp, Homo sapiens
aagatggtatttcga

SEQ ID NO: 202888 - DNA, 15 bp, Homo sapiens
aaagatggtatttcg

SEQ ID NO: 202889 - DNA, 15 bp, Homo sapiens
taaagatggtatttc

SEQ ID NO: 202890 - DNA, 15 bp, Homo sapiens
ataaagatggtattt

SEQ ID NO: 202891 - DNA, 15 bp, Homo sapiens
aataaagatggtatt

SEQ ID NO: 202892 - DNA, 15 bp, Homo sapiens
caataaagatggtat

SEQ ID NO: 202893 - DNA, 15 bp, Homo sapiens
acaataaagatggta

SEQ ID NO: 202894 - DNA, 15 bp, Homo sapiens
tacaataaagatggt

SEQ ID NO: 202895 - DNA, 15 bp, Homo sapiens
atacaataaagatgg

SEQ ID NO: 202896 - DNA, 15 bp, Homo sapiens
tatacaataaagatg

SEQ ID NO: 202897 - DNA, 15 bp, Homo sapiens
gtatacaataaagat

SEQ ID NO: 202898 - DNA, 15 bp, Homo sapiens
agtatacaataaaga

SEQ ID NO: 202899 - DNA, 15 bp, Homo sapiens
tagtatacaataaag

SEQ ID NO: 202900 - DNA, 15 bp, Homo sapiens
ttagtatacaataaa

SEQ ID NO: 202901 - DNA, 15 bp, Homo sapiens
tttagtatacaataa

SEQ ID NO: 202902 - DNA, 15 bp, Homo sapiens
atttagtatacaata

SEQ ID NO: 202903 - DNA, 15 bp, Homo sapiens
gatttagtatacaat

SEQ ID NO: 202904 - DNA, 15 bp, Homo sapiens
ggatttagtatacaa

SEQ ID NO: 202905 - DNA, 15 bp, Homo sapiens
aggatttagtataca

SEQ ID NO: 202906 - DNA, 15 bp, Homo sapiens
gaggatttagtatac

SEQ ID NO: 202907 - DNA, 15 bp, Homo sapiens
tgaggatttagtata

SEQ ID NO: 202908 - DNA, 15 bp, Homo sapiens
atgaggatttagtat

SEQ ID NO: 202909 - DNA, 15 bp, Homo sapiens
tatgaggatttagta

SEQ ID NO: 202910 - DNA, 15 bp, Homo sapiens
atatgaggatttagt

SEQ ID NO: 202911 - DNA, 15 bp, Homo sapiens
tatatgaggatttag

SEQ ID NO: 202912 - DNA, 15 bp, Homo sapiens
ctatatgaggattta

SEQ ID NO: 202913 - DNA, 15 bp, Homo sapiens
actatatgaggattt

SEQ ID NO: 202914 - DNA, 15 bp, Homo sapiens
aactatatgaggatt

SEQ ID NO: 202915 - DNA, 15 bp, Homo sapiens
gaactatatgaggat

SEQ ID NO: 202916 - DNA, 15 bp, Homo sapiens
agaactatatgagga

SEQ ID NO: 202917 - DNA, 15 bp, Homo sapiens
cagaactatatgagg

SEQ ID NO: 202918 - DNA, 15 bp, Homo sapiens
ccagaactatatgag

SEQ ID NO: 202919 - DNA, 15 bp, Homo sapiens
cccagaactatatga

SEQ ID NO: 202920 - DNA, 15 bp, Homo sapiens
acccagaactatatg

SEQ ID NO: 202921 - DNA, 15 bp, Homo sapiens
gacccagaactatat

SEQ ID NO: 202922 - DNA, 15 bp, Homo sapiens
agacccagaactata

SEQ ID NO: 202923 - DNA, 15 bp, Homo sapiens
cagacccagaactat

SEQ ID NO: 202924 - DNA, 15 bp, Homo sapiens
acagacccagaacta

SEQ ID NO: 202925 - DNA, 15 bp, Homo sapiens
aacagacccagaact

SEQ ID NO: 202926 - DNA, 15 bp, Homo sapiens
aaacagacccagaac

SEQ ID NO: 202927 - DNA, 15 bp, Homo sapiens
gaaacagacccagaa

SEQ ID NO: 202928 - DNA, 15 bp, Homo sapiens
agaaacagacccaga

SEQ ID NO: 202929 - DNA, 15 bp, Homo sapiens
cagaaacagacccag

SEQ ID NO: 202930 - DNA, 15 bp, Homo sapiens
ccagaaacagaccca

SEQ ID NO: 202931 - DNA, 15 bp, Homo sapiens
cccagaaacagaccc

SEQ ID NO: 202932 - DNA, 15 bp, Homo sapiens
gcccagaaacagacc

SEQ ID NO: 202933 - DNA, 15 bp, Homo sapiens
agcccagaaacagac

SEQ ID NO: 202934 - DNA, 15 bp, Homo sapiens
gagcccagaaacaga

SEQ ID NO: 202935 - DNA, 15 bp, Homo sapiens
agagcccagaaacag

SEQ ID NO: 202936 - DNA, 15 bp, Homo sapiens
tagagcccagaaaca

SEQ ID NO: 202937 - DNA, 15 bp, Homo sapiens
gtagagcccagaaac

SEQ ID NO: 202938 - DNA, 15 bp, Homo sapiens
agtagagcccagaaa

SEQ ID NO: 202939 - DNA, 15 bp, Homo sapiens
aagtagagcccagaa

SEQ ID NO: 202940 - DNA, 15 bp, Homo sapiens
aaagtagagcccaga

SEQ ID NO: 202941 - DNA, 15 bp, Homo sapiens
caaagtagagcccag

SEQ ID NO: 202942 - DNA, 15 bp, Homo sapiens
acaaagtagagccca

SEQ ID NO: 202943 - DNA, 15 bp, Homo sapiens
aacaaagtagagccc

SEQ ID NO: 202944 - DNA, 15 bp, Homo sapiens
gaacaaagtagagcc

SEQ ID NO: 202945 - DNA, 15 bp, Homo sapiens
tgaacaaagtagagc

SEQ ID NO: 202946 - DNA, 15 bp, Homo sapiens
atgaacaaagtagag

SEQ ID NO: 202947 - DNA, 15 bp, Homo sapiens
aatgaacaaagtaga

SEQ ID NO: 202948 - DNA, 15 bp, Homo sapiens
aaatgaacaaagtag

SEQ ID NO: 202949 - DNA, 15 bp, Homo sapiens
taaatgaacaaagta

SEQ ID NO: 202950 - DNA, 15 bp, Homo sapiens
gtaaatgaacaaagt

SEQ ID NO: 202951 - DNA, 15 bp, Homo sapiens
agtaaatgaacaaag

SEQ ID NO: 202952 - DNA, 15 bp, Homo sapiens
cagtaaatgaacaaa

SEQ ID NO: 202953 - DNA, 15 bp, Homo sapiens
acagtaaatgaacaa

SEQ ID NO: 202954 - DNA, 15 bp, Homo sapiens
cacagtaaatgaaca

SEQ ID NO: 202955 - DNA, 15 bp, Homo sapiens
gcacagtaaatgaac

SEQ ID NO: 202956 - DNA, 15 bp, Homo sapiens
agcacagtaaatgaa

SEQ ID NO: 202957 - DNA, 15 bp, Homo sapiens
cagcacagtaaatga

SEQ ID NO: 202958 - DNA, 15 bp, Homo sapiens
ccagcacagtaaatg

SEQ ID NO: 202959 - DNA, 15 bp, Homo sapiens
accagcacagtaaat

SEQ ID NO: 202960 - DNA, 15 bp, Homo sapiens
taccagcacagtaaa

SEQ ID NO: 202961 - DNA, 15 bp, Homo sapiens
gtaccagcacagtaa

SEQ ID NO: 202962 - DNA, 15 bp, Homo sapiens
agtaccagcacagta

SEQ ID NO: 202963 - DNA, 15 bp, Homo sapiens
cagtaccagcacagt

SEQ ID NO: 202964 - DNA, 15 bp, Homo sapiens
gcagtaccagcacag

SEQ ID NO: 202965 - DNA, 15 bp, Homo sapiens
tgcagtaccagcaca

SEQ ID NO: 202966 - DNA, 15 bp, Homo sapiens
gtgcagtaccagcac

SEQ ID NO: 202967 - DNA, 15 bp, Homo sapiens
ggtgcagtaccagca

SEQ ID NO: 202968 - DNA, 15 bp, Homo sapiens
cggtgcagtaccagc

SEQ ID NO: 202969 - DNA, 15 bp, Homo sapiens
acggtgcagtaccag

SEQ ID NO: 202970 - DNA, 15 bp, Homo sapiens
aacggtgcagtacca

SEQ ID NO: 202971 - DNA, 15 bp, Homo sapiens
caacggtgcagtacc

SEQ ID NO: 202972 - DNA, 15 bp, Homo sapiens
acaacggtgcagtac

SEQ ID NO: 202973 - DNA, 15 bp, Homo sapiens
tacaacggtgcagta

SEQ ID NO: 202974 - DNA, 15 bp, Homo sapiens
ttacaacggtgcagt

SEQ ID NO: 202975 - DNA, 15 bp, Homo sapiens
attacaacggtgcag

SEQ ID NO: 202976 - DNA, 15 bp, Homo sapiens
aattacaacggtgca

SEQ ID NO: 202977 - DNA, 15 bp, Homo sapiens
caattacaacggtgc

SEQ ID NO: 202978 - DNA, 15 bp, Homo sapiens
gcaattacaacggtg

SEQ ID NO: 202979 - DNA, 15 bp, Homo sapiens
agcaattacaacggt

SEQ ID NO: 202980 - DNA, 15 bp, Homo sapiens
cagcaattacaacgg

SEQ ID NO: 202981 - DNA, 15 bp, Homo sapiens
acagcaattacaacg

SEQ ID NO: 202982 - DNA, 15 bp, Homo sapiens
cacagcaattacaac

SEQ ID NO: 202983 - DNA, 15 bp, Homo sapiens
ccacagcaattacaa

SEQ ID NO: 202984 - DNA, 15 bp, Homo sapiens
gccacagcaattaca

SEQ ID NO: 202985 - DNA, 15 bp, Homo sapiens
agccacagcaattac

SEQ ID NO: 202986 - DNA, 15 bp, Homo sapiens
aagccacagcaatta

SEQ ID NO: 202987 - DNA, 15 bp, Homo sapiens
aaagccacagcaatt

SEQ ID NO: 202988 - DNA, 15 bp, Homo sapiens
caaagccacagcaat

SEQ ID NO: 202989 - DNA, 15 bp, Homo sapiens
acaaagccacagcaa

SEQ ID NO: 202990 - DNA, 15 bp, Homo sapiens
cacaaagccacagca

SEQ ID NO: 202991 - DNA, 15 bp, Homo sapiens
ccacaaagccacagc

SEQ ID NO: 202992 - DNA, 15 bp, Homo sapiens
accacaaagccacag

SEQ ID NO: 202993 - DNA, 15 bp, Homo sapiens
taccacaaagccaca

SEQ ID NO: 202994 - DNA, 15 bp, Homo sapiens
ataccacaaagccac

SEQ ID NO: 202995 - DNA, 15 bp, Homo sapiens
cataccacaaagcca

SEQ ID NO: 202996 - DNA, 15 bp, Homo sapiens
ccataccacaaagcc

SEQ ID NO: 202997 - DNA, 15 bp, Homo sapiens
accataccacaaagc

SEQ ID NO: 202998 - DNA, 15 bp, Homo sapiens
taccataccacaaag

SEQ ID NO: 202999 - DNA, 15 bp, Homo sapiens
ataccataccacaaa

SEQ ID NO: 203000 - DNA, 15 bp, Homo sapiens
cataccataccacaa

SEQ ID NO: 203001 - DNA, 15 bp, Homo sapiens
ccataccataccaca

SEQ ID NO: 203002 - DNA, 15 bp, Homo sapiens
gccataccataccac

SEQ ID NO: 203003 - DNA, 15 bp, Homo sapiens
agccataccatacca

SEQ ID NO: 203004 - DNA, 15 bp, Homo sapiens
aagccataccatacc

SEQ ID NO: 203005 - DNA, 15 bp, Homo sapiens
caagccataccatac

SEQ ID NO: 203006 - DNA, 15 bp, Homo sapiens
gcaagccataccata

SEQ ID NO: 203007 - DNA, 15 bp, Homo sapiens
agcaagccataccat

SEQ ID NO: 203008 - DNA, 15 bp, Homo sapiens
gagcaagccatacca

SEQ ID NO: 203009 - DNA, 15 bp, Homo sapiens
agagcaagccatacc

SEQ ID NO: 203010 - DNA, 15 bp, Homo sapiens
gagagcaagccatac

SEQ ID NO: 203011 - DNA, 15 bp, Homo sapiens
agagagcaagccata

SEQ ID NO: 203012 - DNA, 15 bp, Homo sapiens
cagagagcaagccat

SEQ ID NO: 203013 - DNA, 15 bp, Homo sapiens
gcagagagcaagcca

SEQ ID NO: 203014 - DNA, 15 bp, Homo sapiens
agcagagagcaagcc

SEQ ID NO: 203015 - DNA, 15 bp, Homo sapiens
tagcagagagcaagc

SEQ ID NO: 203016 - DNA, 15 bp, Homo sapiens
ctagcagagagcaag

SEQ ID NO: 203017 - DNA, 15 bp, Homo sapiens
cctagcagagagcaa

SEQ ID NO: 203018 - DNA, 15 bp, Homo sapiens
ccctagcagagagca

SEQ ID NO: 203019 - DNA, 15 bp, Homo sapiens
gccctagcagagagc

SEQ ID NO: 203020 - DNA, 15 bp, Homo sapiens
tgccctagcagagag

SEQ ID NO: 203021 - DNA, 15 bp, Homo sapiens
ttgccctagcagaga

SEQ ID NO: 203022 - DNA, 15 bp, Homo sapiens
cttgccctagcagag

SEQ ID NO: 203023 - DNA, 15 bp, Homo sapiens
acttgccctagcaga

SEQ ID NO: 203024 - DNA, 15 bp, Homo sapiens
gacttgccctagcag

SEQ ID NO: 203025 - DNA, 15 bp, Homo sapiens
cgacttgccctagca

SEQ ID NO: 203026 - DNA, 15 bp, Homo sapiens
tcgacttgccctagc

SEQ ID NO: 203027 - DNA, 15 bp, Homo sapiens
ttcgacttgccctag

SEQ ID NO: 203028 - DNA, 15 bp, Homo sapiens
cttcgacttgcccta

SEQ ID NO: 203029 - DNA, 15 bp, Homo sapiens
gcttcgacttgccct

SEQ ID NO: 203030 - DNA, 15 bp, Homo sapiens
agcttcgacttgccc

SEQ ID NO: 203031 - DNA, 15 bp, Homo sapiens
gagcttcgacttgcc

SEQ ID NO: 203032 - DNA, 15 bp, Homo sapiens
agagcttcgacttgc

SEQ ID NO: 203033 - DNA, 15 bp, Homo sapiens
aagagcttcgacttg

SEQ ID NO: 203034 - DNA, 15 bp, Homo sapiens
aaagagcttcgactt

SEQ ID NO: 203035 - DNA, 15 bp, Homo sapiens
aaaagagcttcgact

SEQ ID NO: 203036 - DNA, 15 bp, Homo sapiens
caaaagagcttcgac

SEQ ID NO: 203037 - DNA, 15 bp, Homo sapiens
acaaaagagcttcga

SEQ ID NO: 203038 - DNA, 15 bp, Homo sapiens
aacaaaagagcttcg

SEQ ID NO: 203039 - DNA, 15 bp, Homo sapiens
gaacaaaagagcttc

SEQ ID NO: 203040 - DNA, 15 bp, Homo sapiens
tgaacaaaagagctt

SEQ ID NO: 203041 - DNA, 15 bp, Homo sapiens
gtgaacaaaagagct

SEQ ID NO: 203042 - DNA, 15 bp, Homo sapiens
ggtgaacaaaagagc

SEQ ID NO: 203043 - DNA, 15 bp, Homo sapiens
aggtgaacaaaagag

SEQ ID NO: 203044 - DNA, 15 bp, Homo sapiens
caggtgaacaaaaga

SEQ ID NO: 203045 - DNA, 15 bp, Homo sapiens
gcaggtgaacaaaag

SEQ ID NO: 203046 - DNA, 15 bp, Homo sapiens
agcaggtgaacaaaa

SEQ ID NO: 203047 - DNA, 15 bp, Homo sapiens
gagcaggtgaacaaa

SEQ ID NO: 203048 - DNA, 15 bp, Homo sapiens
agagcaggtgaacaa

SEQ ID NO: 203049 - DNA, 15 bp, Homo sapiens
aagagcaggtgaaca

SEQ ID NO: 203050 - DNA, 15 bp, Homo sapiens
aaagagcaggtgaac

SEQ ID NO: 203051 - DNA, 15 bp, Homo sapiens
gaaagagcaggtgaa

SEQ ID NO: 203052 - DNA, 15 bp, Homo sapiens
tgaaagagcaggtga

SEQ ID NO: 203053 - DNA, 15 bp, Homo sapiens
gtgaaagagcaggtg

SEQ ID NO: 203054 - DNA, 15 bp, Homo sapiens
ggtgaaagagcaggt

SEQ ID NO: 203055 - DNA, 15 bp, Homo sapiens
gggtgaaagagcagg

SEQ ID NO: 203056 - DNA, 15 bp, Homo sapiens
tgggtgaaagagcag

SEQ ID NO: 203057 - DNA, 15 bp, Homo sapiens
ttgggtgaaagagca

SEQ ID NO: 203058 - DNA, 15 bp, Homo sapiens
tttgggtgaaagagc

SEQ ID NO: 203059 - DNA, 15 bp, Homo sapiens
atttgggtgaaagag

SEQ ID NO: 203060 - DNA, 15 bp, Homo sapiens
aatttgggtgaaaga

SEQ ID NO: 203061 - DNA, 15 bp, Homo sapiens
aaatttgggtgaaag

SEQ ID NO: 203062 - DNA, 15 bp, Homo sapiens
aaaatttgggtgaaa

SEQ ID NO: 203063 - DNA, 15 bp, Homo sapiens
gaaaatttgggtgaa

SEQ ID NO: 203064 - DNA, 15 bp, Homo sapiens
agaaaatttgggtga

SEQ ID NO: 203065 - DNA, 15 bp, Homo sapiens
cagaaaatttgggtg

SEQ ID NO: 203066 - DNA, 15 bp, Homo sapiens
acagaaaatttgggt

SEQ ID NO: 203067 - DNA, 15 bp, Homo sapiens
gacagaaaatttggg

SEQ ID NO: 203068 - DNA, 15 bp, Homo sapiens
ggacagaaaatttgg

SEQ ID NO: 203069 - DNA, 15 bp, Homo sapiens
aggacagaaaatttg

SEQ ID NO: 203070 - DNA, 15 bp, Homo sapiens
caggacagaaaattt

SEQ ID NO: 203071 - DNA, 15 bp, Homo sapiens
tcaggacagaaaatt

SEQ ID NO: 203072 - DNA, 15 bp, Homo sapiens
ttcaggacagaaaat

SEQ ID NO: 203073 - DNA, 15 bp, Homo sapiens
attcaggacagaaaa

SEQ ID NO: 203074 - DNA, 15 bp, Homo sapiens
gattcaggacagaaa

SEQ ID NO: 203075 - DNA, 15 bp, Homo sapiens
ggattcaggacagaa

SEQ ID NO: 203076 - DNA, 15 bp, Homo sapiens
tggattcaggacaga

SEQ ID NO: 203077 - DNA, 15 bp, Homo sapiens
ctggattcaggacag

SEQ ID NO: 203078 - DNA, 15 bp, Homo sapiens
gctggattcaggaca

SEQ ID NO: 203079 - DNA, 15 bp, Homo sapiens
tgctggattcaggac

SEQ ID NO: 203080 - DNA, 15 bp, Homo sapiens
gtgctggattcagga

SEQ ID NO: 203081 - DNA, 15 bp, Homo sapiens
tgtgctggattcagg

SEQ ID NO: 203082 - DNA, 15 bp, Homo sapiens
ctgtgctggattcag

SEQ ID NO: 203083 - DNA, 15 bp, Homo sapiens
gctgtgctggattca

SEQ ID NO: 203084 - DNA, 15 bp, Homo sapiens
ggctgtgctggattc

SEQ ID NO: 203085 - DNA, 15 bp, Homo sapiens
tggctgtgctggatt

SEQ ID NO: 203086 - DNA, 15 bp, Homo sapiens
ttggctgtgctggat

SEQ ID NO: 203087 - DNA, 15 bp, Homo sapiens
tttggctgtgctgga

SEQ ID NO: 203088 - DNA, 15 bp, Homo sapiens
atttggctgtgctgg

SEQ ID NO: 203089 - DNA, 15 bp, Homo sapiens
aatttggctgtgctg

SEQ ID NO: 203090 - DNA, 15 bp, Homo sapiens
taatttggctgtgct

SEQ ID NO: 203091 - DNA, 15 bp, Homo sapiens
ataatttggctgtgc

SEQ ID NO: 203092 - DNA, 15 bp, Homo sapiens
cataatttggctgtg

SEQ ID NO: 203093 - DNA, 15 bp, Homo sapiens
ccataatttggctgt

SEQ ID NO: 203094 - DNA, 15 bp, Homo sapiens
accataatttggctg

SEQ ID NO: 203095 - DNA, 15 bp, Homo sapiens
gaccataatttggct

SEQ ID NO: 203096 - DNA, 15 bp, Homo sapiens
tgaccataatttggc

SEQ ID NO: 203097 - DNA, 15 bp, Homo sapiens
atgaccataatttgg

SEQ ID NO: 203098 - DNA, 15 bp, Homo sapiens
aatgaccataatttg

SEQ ID NO: 203099 - DNA, 15 bp, Homo sapiens
caatgaccataattt

SEQ ID NO: 203100 - DNA, 15 bp, Homo sapiens
acaatgaccataatt

SEQ ID NO: 203101 - DNA, 15 bp, Homo sapiens
gacaatgaccataat

SEQ ID NO: 203102 - DNA, 15 bp, Homo sapiens
tgacaatgaccataa

SEQ ID NO: 203103 - DNA, 15 bp, Homo sapiens
gtgacaatgaccata

SEQ ID NO: 203104 - DNA, 15 bp, Homo sapiens
ggtgacaatgaccat

SEQ ID NO: 203105 - DNA, 15 bp, Homo sapiens
tggtgacaatgacca

SEQ ID NO: 203106 - DNA, 15 bp, Homo sapiens
gtggtgacaatgacc

SEQ ID NO: 203107 - DNA, 15 bp, Homo sapiens
ggtggtgacaatgac

SEQ ID NO: 203108 - DNA, 15 bp, Homo sapiens
tggtggtgacaatga

SEQ ID NO: 203109 - DNA, 15 bp, Homo sapiens
ttggtggtgacaatg

SEQ ID NO: 203110 - DNA, 15 bp, Homo sapiens
gttggtggtgacaat

SEQ ID NO: 203111 - DNA, 15 bp, Homo sapiens
agttggtggtgacaa

SEQ ID NO: 203112 - DNA, 15 bp, Homo sapiens
tagttggtggtgaca

SEQ ID NO: 203113 - DNA, 15 bp, Homo sapiens
gtagttggtggtgac

SEQ ID NO: 203114 - DNA, 15 bp, Homo sapiens
tgtagttggtggtga

SEQ ID NO: 203115 - DNA, 15 bp, Homo sapiens
ctgtagttggtggtg

SEQ ID NO: 203116 - DNA, 15 bp, Homo sapiens
actgtagttggtggt

SEQ ID NO: 203117 - DNA, 15 bp, Homo sapiens
cactgtagttggtgg

SEQ ID NO: 203118 - DNA, 15 bp, Homo sapiens
ccactgtagttggtg

SEQ ID NO: 203119 - DNA, 15 bp, Homo sapiens
cccactgtagttggt

SEQ ID NO: 203120 - DNA, 15 bp, Homo sapiens
acccactgtagttgg

SEQ ID NO: 203121 - DNA, 15 bp, Homo sapiens
cacccactgtagttg

SEQ ID NO: 203122 - DNA, 15 bp, Homo sapiens
acacccactgtagtt

SEQ ID NO: 203123 - DNA, 15 bp, Homo sapiens
aacacccactgtagt

SEQ ID NO: 203124 - DNA, 15 bp, Homo sapiens
caacacccactgtag

SEQ ID NO: 203125 - DNA, 15 bp, Homo sapiens
tcaacacccactgta

SEQ ID NO: 203126 - DNA, 15 bp, Homo sapiens
ctcaacacccactgt

SEQ ID NO: 203127 - DNA, 15 bp, Homo sapiens
gctcaacacccactg

SEQ ID NO: 203128 - DNA, 15 bp, Homo sapiens
tgctcaacacccact

SEQ ID NO: 203129 - DNA, 15 bp, Homo sapiens
atgctcaacacccac

SEQ ID NO: 203130 - DNA, 15 bp, Homo sapiens
aatgctcaacaccca

SEQ ID NO: 203131 - DNA, 15 bp, Homo sapiens
aaatgctcaacaccc

SEQ ID NO: 203132 - DNA, 15 bp, Homo sapiens
gaaatgctcaacacc

SEQ ID NO: 203133 - DNA, 15 bp, Homo sapiens
ggaaatgctcaacac

SEQ ID NO: 203134 - DNA, 15 bp, Homo sapiens
gggaaatgctcaaca

SEQ ID NO: 203135 - DNA, 15 bp, Homo sapiens
tgggaaatgctcaac

SEQ ID NO: 203136 - DNA, 15 bp, Homo sapiens
atgggaaatgctcaa

SEQ ID NO: 203137 - DNA, 15 bp, Homo sapiens
aatgggaaatgctca

SEQ ID NO: 203138 - DNA, 15 bp, Homo sapiens
caatgggaaatgctc

SEQ ID NO: 203139 - DNA, 15 bp, Homo sapiens
tcaatgggaaatgct

SEQ ID NO: 203140 - DNA, 15 bp, Homo sapiens
ttcaatgggaaatgc

SEQ ID NO: 203141 - DNA, 15 bp, Homo sapiens
attcaatgggaaatg

SEQ ID NO: 203142 - DNA, 15 bp, Homo sapiens
gattcaatgggaaat

SEQ ID NO: 203143 - DNA, 15 bp, Homo sapiens
agattcaatgggaaa

SEQ ID NO: 203144 - DNA, 15 bp, Homo sapiens
gagattcaatgggaa

SEQ ID NO: 203145 - DNA, 15 bp, Homo sapiens
ggagattcaatggga

SEQ ID NO: 203146 - DNA, 15 bp, Homo sapiens
aggagattcaatggg

SEQ ID NO: 203147 - DNA, 15 bp, Homo sapiens
caggagattcaatgg

SEQ ID NO: 203148 - DNA, 15 bp, Homo sapiens
acaggagattcaatg

SEQ ID NO: 203149 - DNA, 15 bp, Homo sapiens
tacaggagattcaat

SEQ ID NO: 203150 - DNA, 15 bp, Homo sapiens
ttacaggagattcaa

SEQ ID NO: 203151 - DNA, 15 bp, Homo sapiens
cttacaggagattca

SEQ ID NO: 203152 - DNA, 15 bp, Homo sapiens
ccttacaggagattc

SEQ ID NO: 203153 - DNA, 15 bp, Homo sapiens
cccttacaggagatt

SEQ ID NO: 203154 - DNA, 15 bp, Homo sapiens
acccttacaggagat

SEQ ID NO: 203155 - DNA, 15 bp, Homo sapiens
aacccttacaggaga

SEQ ID NO: 203156 - DNA, 15 bp, Homo sapiens
aaacccttacaggag

SEQ ID NO: 203157 - DNA, 15 bp, Homo sapiens
aaaacccttacagga

SEQ ID NO: 203158 - DNA, 15 bp, Homo sapiens
taaaacccttacagg

SEQ ID NO: 203159 - DNA, 15 bp, Homo sapiens
ataaaacccttacag

SEQ ID NO: 203160 - DNA, 15 bp, Homo sapiens
aataaaacccttaca

SEQ ID NO: 203161 - DNA, 15 bp, Homo sapiens
caataaaacccttac

SEQ ID NO: 203162 - DNA, 15 bp, Homo sapiens
ccaataaaaccctta

SEQ ID NO: 203163 - DNA, 15 bp, Homo sapiens
tccaataaaaccctt

SEQ ID NO: 203164 - DNA, 15 bp, Homo sapiens
atccaataaaaccct

SEQ ID NO: 203165 - DNA, 15 bp, Homo sapiens
aatccaataaaaccc

SEQ ID NO: 203166 - DNA, 15 bp, Homo sapiens
gaatccaataaaacc

SEQ ID NO: 203167 - DNA, 15 bp, Homo sapiens
agaatccaataaaac

SEQ ID NO: 203168 - DNA, 15 bp, Homo sapiens
cagaatccaataaaa

SEQ ID NO: 203169 - DNA, 15 bp, Homo sapiens
acagaatccaataaa

SEQ ID NO: 203170 - DNA, 15 bp, Homo sapiens
cacagaatccaataa

SEQ ID NO: 203171 - DNA, 15 bp, Homo sapiens
tcacagaatccaata

SEQ ID NO: 203172 - DNA, 15 bp, Homo sapiens
atcacagaatccaat

SEQ ID NO: 203173 - DNA, 15 bp, Homo sapiens
tatcacagaatccaa

SEQ ID NO: 203174 - DNA, 15 bp, Homo sapiens
ctatcacagaatcca

SEQ ID NO: 203175 - DNA, 15 bp, Homo sapiens
gctatcacagaatcc

SEQ ID NO: 203176 - DNA, 15 bp, Homo sapiens
tgctatcacagaatc

SEQ ID NO: 203177 - DNA, 15 bp, Homo sapiens
ctgctatcacagaat

SEQ ID NO: 203178 - DNA, 15 bp, Homo sapiens
actgctatcacagaa

SEQ ID NO: 203179 - DNA, 15 bp, Homo sapiens
tactgctatcacaga

SEQ ID NO: 203180 - DNA, 15 bp, Homo sapiens
ttactgctatcacag

SEQ ID NO: 203181 - DNA, 15 bp, Homo sapiens
tttactgctatcaca

SEQ ID NO: 203182 - DNA, 15 bp, Homo sapiens
ttttactgctatcac

SEQ ID NO: 203183 - DNA, 15 bp, Homo sapiens
attttactgctatca

SEQ ID NO: 203184 - DNA, 15 bp, Homo sapiens
cattttactgctatc

SEQ ID NO: 203185 - DNA, 15 bp, Homo sapiens
ccattttactgctat

SEQ ID NO: 203186 - DNA, 15 bp, Homo sapiens
cccattttactgcta

SEQ ID NO: 203187 - DNA, 15 bp, Homo sapiens
tcccattttactgct

SEQ ID NO: 203188 - DNA, 15 bp, Homo sapiens
ctcccattttactgc

SEQ ID NO: 203189 - DNA, 15 bp, Homo sapiens
gctcccattttactg

SEQ ID NO: 203190 - DNA, 15 bp, Homo sapiens
ggctcccattttact

SEQ ID NO: 203191 - DNA, 15 bp, Homo sapiens
aggctcccattttac

SEQ ID NO: 203192 - DNA, 15 bp, Homo sapiens
taggctcccatttta

SEQ ID NO: 203193 - DNA, 15 bp, Homo sapiens
ttaggctcccatttt

SEQ ID NO: 203194 - DNA, 15 bp, Homo sapiens
cttaggctcccattt

SEQ ID NO: 203195 - DNA, 15 bp, Homo sapiens
tcttaggctcccatt

SEQ ID NO: 203196 - DNA, 15 bp, Homo sapiens
ctcttaggctcccat

SEQ ID NO: 203197 - DNA, 15 bp, Homo sapiens
cctcttaggctccca

SEQ ID NO: 203198 - DNA, 15 bp, Homo sapiens
acctcttaggctccc

SEQ ID NO: 203199 - DNA, 15 bp, Homo sapiens
tacctcttaggctcc

SEQ ID NO: 203200 - DNA, 15 bp, Homo sapiens
atacctcttaggctc

SEQ ID NO: 203201 - DNA, 15 bp, Homo sapiens
aatacctcttaggct

SEQ ID NO: 203202 - DNA, 15 bp, Homo sapiens
gaatacctcttaggc

SEQ ID NO: 203203 - DNA, 15 bp, Homo sapiens
ggaatacctcttagg

SEQ ID NO: 203204 - DNA, 15 bp, Homo sapiens
aggaatacctcttag

SEQ ID NO: 203205 - DNA, 15 bp, Homo sapiens
aaggaatacctctta

SEQ ID NO: 203206 - DNA, 15 bp, Homo sapiens
taaggaatacctctt

SEQ ID NO: 203207 - DNA, 15 bp, Homo sapiens
ttaaggaatacctct

SEQ ID NO: 203208 - DNA, 15 bp, Homo sapiens
tttaaggaatacctc

SEQ ID NO: 203209 - DNA, 15 bp, Homo sapiens
ctttaaggaatacct

SEQ ID NO: 203210 - DNA, 15 bp, Homo sapiens
cctttaaggaatacc

SEQ ID NO: 203211 - DNA, 15 bp, Homo sapiens
tcctttaaggaatac

SEQ ID NO: 203212 - DNA, 15 bp, Homo sapiens
gtcctttaaggaata

SEQ ID NO: 203213 - DNA, 15 bp, Homo sapiens
agtcctttaaggaat

SEQ ID NO: 203214 - DNA, 15 bp, Homo sapiens
tagtcctttaaggaa

SEQ ID NO: 203215 - DNA, 15 bp, Homo sapiens
gtagtcctttaagga

SEQ ID NO: 203216 - DNA, 15 bp, Homo sapiens
agtagtcctttaagg

SEQ ID NO: 203217 - DNA, 15 bp, Homo sapiens
tagtagtcctttaag

SEQ ID NO: 203218 - DNA, 15 bp, Homo sapiens
ttagtagtcctttaa

SEQ ID NO: 203219 - DNA, 15 bp, Homo sapiens
attagtagtccttta

SEQ ID NO: 203220 - DNA, 15 bp, Homo sapiens
gattagtagtccttt

SEQ ID NO: 203221 - DNA, 15 bp, Homo sapiens
tgattagtagtcctt

SEQ ID NO: 203222 - DNA, 15 bp, Homo sapiens
ctgattagtagtcct

SEQ ID NO: 203223 - DNA, 15 bp, Homo sapiens
tctgattagtagtcc

SEQ ID NO: 203224 - DNA, 15 bp, Homo sapiens
gtctgattagtagtc

SEQ ID NO: 203225 - DNA, 15 bp, Homo sapiens
ggtctgattagtagt

SEQ ID NO: 203226 - DNA, 15 bp, Homo sapiens
aggtctgattagtag

SEQ ID NO: 203227 - DNA, 15 bp, Homo sapiens
caggtctgattagta

SEQ ID NO: 203228 - DNA, 15 bp, Homo sapiens
ccaggtctgattagt

SEQ ID NO: 203229 - DNA, 15 bp, Homo sapiens
accaggtctgattag

SEQ ID NO: 203230 - DNA, 15 bp, Homo sapiens
aaccaggtctgatta

SEQ ID NO: 203231 - DNA, 15 bp, Homo sapiens
aaaccaggtctgatt

SEQ ID NO: 203232 - DNA, 15 bp, Homo sapiens
gaaaccaggtctgat

SEQ ID NO: 203233 - DNA, 15 bp, Homo sapiens
ggaaaccaggtctga

SEQ ID NO: 203234 - DNA, 15 bp, Homo sapiens
gggaaaccaggtctg

SEQ ID NO: 203235 - DNA, 15 bp, Homo sapiens
tgggaaaccaggtct

SEQ ID NO: 203236 - DNA, 15 bp, Homo sapiens
ctgggaaaccaggtc

SEQ ID NO: 203237 - DNA, 15 bp, Homo sapiens
tctgggaaaccaggt

SEQ ID NO: 203238 - DNA, 15 bp, Homo sapiens
atctgggaaaccagg

SEQ ID NO: 203239 - DNA, 15 bp, Homo sapiens
catctgggaaaccag

SEQ ID NO: 203240 - DNA, 15 bp, Homo sapiens
tcatctgggaaacca

SEQ ID NO: 203241 - DNA, 15 bp, Homo sapiens
atcatctgggaaacc

SEQ ID NO: 203242 - DNA, 15 bp, Homo sapiens
catcatctgggaaac

SEQ ID NO: 203243 - DNA, 15 bp, Homo sapiens
gcatcatctgggaaa

SEQ ID NO: 203244 - DNA, 15 bp, Homo sapiens
agcatcatctgggaa

SEQ ID NO: 203245 - DNA, 15 bp, Homo sapiens
cagcatcatctggga

SEQ ID NO: 203246 - DNA, 15 bp, Homo sapiens
tcagcatcatctggg

SEQ ID NO: 203247 - DNA, 15 bp, Homo sapiens
ttcagcatcatctgg

SEQ ID NO: 203248 - DNA, 15 bp, Homo sapiens
cttcagcatcatctg

SEQ ID NO: 203249 - DNA, 15 bp, Homo sapiens
tcttcagcatcatct

SEQ ID NO: 203250 - DNA, 15 bp, Homo sapiens
atcttcagcatcatc

SEQ ID NO: 203251 - DNA, 15 bp, Homo sapiens
catcttcagcatcat

SEQ ID NO: 203252 - DNA, 15 bp, Homo sapiens
tcatcttcagcatca

SEQ ID NO: 203253 - DNA, 15 bp, Homo sapiens
gtcatcttcagcatc

SEQ ID NO: 203254 - DNA, 15 bp, Homo sapiens
cgtcatcttcagcat

SEQ ID NO: 203255 - DNA, 15 bp, Homo sapiens
ccgtcatcttcagca

SEQ ID NO: 203256 - DNA, 15 bp, Homo sapiens
cccgtcatcttcagc

SEQ ID NO: 203257 - DNA, 15 bp, Homo sapiens
ccccgtcatcttcag

SEQ ID NO: 203258 - DNA, 15 bp, Homo sapiens
gccccgtcatcttca

SEQ ID NO: 203259 - DNA, 15 bp, Homo sapiens
ggccccgtcatcttc

SEQ ID NO: 203260 - DNA, 15 bp, Homo sapiens
aggccccgtcatctt

SEQ ID NO: 203261 - DNA, 15 bp, Homo sapiens
caggccccgtcatct

SEQ ID NO: 203262 - DNA, 15 bp, Homo sapiens
ccaggccccgtcatc

SEQ ID NO: 203263 - DNA, 15 bp, Homo sapiens
cccaggccccgtcat

SEQ ID NO: 203264 - DNA, 15 bp, Homo sapiens
gcccaggccccgtca

SEQ ID NO: 203265 - DNA, 15 bp, Homo sapiens
agcccaggccccgtc

SEQ ID NO: 203266 - DNA, 15 bp, Homo sapiens
tagcccaggccccgt

SEQ ID NO: 203267 - DNA, 15 bp, Homo sapiens
ctagcccaggccccg

SEQ ID NO: 203268 - DNA, 15 bp, Homo sapiens
tctagcccaggcccc

SEQ ID NO: 203269 - DNA, 15 bp, Homo sapiens
gtctagcccaggccc

SEQ ID NO: 203270 - DNA, 15 bp, Homo sapiens
agtctagcccaggcc

SEQ ID NO: 203271 - DNA, 15 bp, Homo sapiens
aagtctagcccaggc

SEQ ID NO: 203272 - DNA, 15 bp, Homo sapiens
aaagtctagcccagg

SEQ ID NO: 203273 - DNA, 15 bp, Homo sapiens
aaaagtctagcccag

SEQ ID NO: 203274 - DNA, 15 bp, Homo sapiens
caaaagtctagccca

SEQ ID NO: 203275 - DNA, 15 bp, Homo sapiens
tcaaaagtctagccc

SEQ ID NO: 203276 - DNA, 15 bp, Homo sapiens
ctcaaaagtctagcc

SEQ ID NO: 203277 - DNA, 15 bp, Homo sapiens
cctcaaaagtctagc

SEQ ID NO: 203278 - DNA, 15 bp, Homo sapiens
ccctcaaaagtctag

SEQ ID NO: 203279 - DNA, 15 bp, Homo sapiens
tccctcaaaagtcta

SEQ ID NO: 203280 - DNA, 15 bp, Homo sapiens
gtccctcaaaagtct

SEQ ID NO: 203281 - DNA, 15 bp, Homo sapiens
tgtccctcaaaagtc

SEQ ID NO: 203282 - DNA, 15 bp, Homo sapiens
atgtccctcaaaagt

SEQ ID NO: 203283 - DNA, 15 bp, Homo sapiens
tatgtccctcaaaag

SEQ ID NO: 203284 - DNA, 15 bp, Homo sapiens
atatgtccctcaaaa

SEQ ID NO: 203285 - DNA, 15 bp, Homo sapiens
gatatgtccctcaaa

SEQ ID NO: 203286 - DNA, 15 bp, Homo sapiens
ggatatgtccctcaa

SEQ ID NO: 203287 - DNA, 15 bp, Homo sapiens
aggatatgtccctca

SEQ ID NO: 203288 - DNA, 15 bp, Homo sapiens
aaggatatgtccctc

SEQ ID NO: 203289 - DNA, 15 bp, Homo sapiens
caaggatatgtccct

SEQ ID NO: 203290 - DNA, 15 bp, Homo sapiens
ccaaggatatgtccc

SEQ ID NO: 203291 - DNA, 15 bp, Homo sapiens
cccaaggatatgtcc

SEQ ID NO: 203292 - DNA, 15 bp, Homo sapiens
ccccaaggatatgtc

SEQ ID NO: 203293 - DNA, 15 bp, Homo sapiens
accccaaggatatgt

SEQ ID NO: 203294 - DNA, 15 bp, Homo sapiens
aaccccaaggatatg

SEQ ID NO: 203295 - DNA, 15 bp, Homo sapiens
caaccccaaggatat

SEQ ID NO: 203296 - DNA, 15 bp, Homo sapiens
ccaaccccaaggata

SEQ ID NO: 203297 - DNA, 15 bp, Homo sapiens
cccaaccccaaggat

SEQ ID NO: 203298 - DNA, 15 bp, Homo sapiens
acccaaccccaagga

SEQ ID NO: 203299 - DNA, 15 bp, Homo sapiens
cacccaaccccaagg

SEQ ID NO: 203300 - DNA, 15 bp, Homo sapiens
acacccaaccccaag

SEQ ID NO: 203301 - DNA, 15 bp, Homo sapiens
cacacccaaccccaa

SEQ ID NO: 203302 - DNA, 15 bp, Homo sapiens
tcacacccaacccca

SEQ ID NO: 203303 - DNA, 15 bp, Homo sapiens
atcacacccaacccc

SEQ ID NO: 203304 - DNA, 15 bp, Homo sapiens
tatcacacccaaccc

SEQ ID NO: 203305 - DNA, 15 bp, Homo sapiens
atatcacacccaacc

SEQ ID NO: 203306 - DNA, 15 bp, Homo sapiens
tatatcacacccaac

SEQ ID NO: 203307 - DNA, 15 bp, Homo sapiens
ctatatcacacccaa

SEQ ID NO: 203308 - DNA, 15 bp, Homo sapiens
tctatatcacaccca

SEQ ID NO: 203309 - DNA, 15 bp, Homo sapiens
gtctatatcacaccc

SEQ ID NO: 203310 - DNA, 15 bp, Homo sapiens
ggtctatatcacacc

SEQ ID NO: 203311 - DNA, 15 bp, Homo sapiens
tggtctatatcacac

SEQ ID NO: 203312 - DNA, 15 bp, Homo sapiens
ctggtctatatcaca

SEQ ID NO: 203313 - DNA, 15 bp, Homo sapiens
gctggtctatatcac

SEQ ID NO: 203314 - DNA, 15 bp, Homo sapiens
ggctggtctatatca

SEQ ID NO: 203315 - DNA, 15 bp, Homo sapiens
gggctggtctatatc

SEQ ID NO: 203316 - DNA, 15 bp, Homo sapiens
agggctggtctatat

SEQ ID NO: 203317 - DNA, 15 bp, Homo sapiens
aagggctggtctata

SEQ ID NO: 203318 - DNA, 15 bp, Homo sapiens
taagggctggtctat

SEQ ID NO: 203319 - DNA, 15 bp, Homo sapiens
gtaagggctggtcta

SEQ ID NO: 203320 - DNA, 15 bp, Homo sapiens
tgtaagggctggtct

SEQ ID NO: 203321 - DNA, 15 bp, Homo sapiens
ttgtaagggctggtc

SEQ ID NO: 203322 - DNA, 15 bp, Homo sapiens
attgtaagggctggt

SEQ ID NO: 203323 - DNA, 15 bp, Homo sapiens
aattgtaagggctgg

SEQ ID NO: 203324 - DNA, 15 bp, Homo sapiens
aaattgtaagggctg

SEQ ID NO: 203325 - DNA, 15 bp, Homo sapiens
caaattgtaagggct

SEQ ID NO: 203326 - DNA, 15 bp, Homo sapiens
gcaaattgtaagggc

SEQ ID NO: 203327 - DNA, 15 bp, Homo sapiens
agcaaattgtaaggg

SEQ ID NO: 203328 - DNA, 15 bp, Homo sapiens
aagcaaattgtaagg

SEQ ID NO: 203329 - DNA, 15 bp, Homo sapiens
caagcaaattgtaag

SEQ ID NO: 203330 - DNA, 15 bp, Homo sapiens
tcaagcaaattgtaa

SEQ ID NO: 203331 - DNA, 15 bp, Homo sapiens
gtcaagcaaattgta

SEQ ID NO: 203332 - DNA, 15 bp, Homo sapiens
agtcaagcaaattgt

SEQ ID NO: 203333 - DNA, 15 bp, Homo sapiens
gagtcaagcaaattg

SEQ ID NO: 203334 - DNA, 15 bp, Homo sapiens
tgagtcaagcaaatt

SEQ ID NO: 203335 - DNA, 15 bp, Homo sapiens
atgagtcaagcaaat

SEQ ID NO: 203336 - DNA, 15 bp, Homo sapiens
catgagtcaagcaaa

SEQ ID NO: 203337 - DNA, 15 bp, Homo sapiens
ccatgagtcaagcaa

SEQ ID NO: 203338 - DNA, 15 bp, Homo sapiens
cccatgagtcaagca

SEQ ID NO: 203339 - DNA, 15 bp, Homo sapiens
tcccatgagtcaagc

SEQ ID NO: 203340 - DNA, 15 bp, Homo sapiens
ttcccatgagtcaag

SEQ ID NO: 203341 - DNA, 15 bp, Homo sapiens
attcccatgagtcaa

SEQ ID NO: 203342 - DNA, 15 bp, Homo sapiens
gattcccatgagtca

SEQ ID NO: 203343 - DNA, 15 bp, Homo sapiens
cgattcccatgagtc

SEQ ID NO: 203344 - DNA, 15 bp, Homo sapiens
acgattcccatgagt

SEQ ID NO: 203345 - DNA, 15 bp, Homo sapiens
tacgattcccatgag

SEQ ID NO: 203346 - DNA, 15 bp, Homo sapiens
gtacgattcccatga

SEQ ID NO: 203347 - DNA, 15 bp, Homo sapiens
tgtacgattcccatg

SEQ ID NO: 203348 - DNA, 15 bp, Homo sapiens
ctgtacgattcccat

SEQ ID NO: 203349 - DNA, 15 bp, Homo sapiens
cctgtacgattccca

SEQ ID NO: 203350 - DNA, 15 bp, Homo sapiens
ccctgtacgattccc

SEQ ID NO: 203351 - DNA, 15 bp, Homo sapiens
gccctgtacgattcc

SEQ ID NO: 203352 - DNA, 15 bp, Homo sapiens
ggccctgtacgattc

SEQ ID NO: 203353 - DNA, 15 bp, Homo sapiens
tggccctgtacgatt

SEQ ID NO: 203354 - DNA, 15 bp, Homo sapiens
ctggccctgtacgat

SEQ ID NO: 203355 - DNA, 15 bp, Homo sapiens
tctggccctgtacga

SEQ ID NO: 203356 - DNA, 15 bp, Homo sapiens
ttctggccctgtacg

SEQ ID NO: 203357 - DNA, 15 bp, Homo sapiens
gttctggccctgtac

SEQ ID NO: 203358 - DNA, 15 bp, Homo sapiens
ggttctggccctgta

SEQ ID NO: 203359 - DNA, 15 bp, Homo sapiens
tggttctggccctgt

SEQ ID NO: 203360 - DNA, 15 bp, Homo sapiens
ctggttctggccctg

SEQ ID NO: 203361 - DNA, 15 bp, Homo sapiens
tctggttctggccct

SEQ ID NO: 203362 - DNA, 15 bp, Homo sapiens
gtctggttctggccc

SEQ ID NO: 203363 - DNA, 15 bp, Homo sapiens
tgtctggttctggcc

SEQ ID NO: 203364 - DNA, 15 bp, Homo sapiens
gtgtctggttctggc

SEQ ID NO: 203365 - DNA, 15 bp, Homo sapiens
ggtgtctggttctgg

SEQ ID NO: 203366 - DNA, 15 bp, Homo sapiens
aggtgtctggttctg

SEQ ID NO: 203367 - DNA, 15 bp, Homo sapiens
caggtgtctggttct

SEQ ID NO: 203368 - DNA, 15 bp, Homo sapiens
acaggtgtctggttc

SEQ ID NO: 203369 - DNA, 15 bp, Homo sapiens
gacaggtgtctggtt

SEQ ID NO: 203370 - DNA, 15 bp, Homo sapiens
tgacaggtgtctggt

SEQ ID NO: 203371 - DNA, 15 bp, Homo sapiens
atgacaggtgtctgg

SEQ ID NO: 203372 - DNA, 15 bp, Homo sapiens
catgacaggtgtctg

SEQ ID NO: 203373 - DNA, 15 bp, Homo sapiens
gcatgacaggtgtct

SEQ ID NO: 203374 - DNA, 15 bp, Homo sapiens
agcatgacaggtgtc

SEQ ID NO: 203375 - DNA, 15 bp, Homo sapiens
tagcatgacaggtgt

SEQ ID NO: 203376 - DNA, 15 bp, Homo sapiens
ttagcatgacaggtg

SEQ ID NO: 203377 - DNA, 15 bp, Homo sapiens
attagcatgacaggt

SEQ ID NO: 203378 - DNA, 15 bp, Homo sapiens
tattagcatgacagg

SEQ ID NO: 203379 - DNA, 15 bp, Homo sapiens
ttattagcatgacag

SEQ ID NO: 203380 - DNA, 15 bp, Homo sapiens
gttattagcatgaca

SEQ ID NO: 203381 - DNA, 15 bp, Homo sapiens
agttattagcatgac

SEQ ID NO: 203382 - DNA, 15 bp, Homo sapiens
aagttattagcatga

SEQ ID NO: 203383 - DNA, 15 bp, Homo sapiens
gaagttattagcatg

SEQ ID NO: 203384 - DNA, 15 bp, Homo sapiens
ggaagttattagcat

SEQ ID NO: 203385 - DNA, 15 bp, Homo sapiens
gggaagttattagca

SEQ ID NO: 203386 - DNA, 15 bp, Homo sapiens
agggaagttattagc

SEQ ID NO: 203387 - DNA, 15 bp, Homo sapiens
gagggaagttattag

SEQ ID NO: 203388 - DNA, 15 bp, Homo sapiens
tgagggaagttatta

SEQ ID NO: 203389 - DNA, 15 bp, Homo sapiens
gtgagggaagttatt

SEQ ID NO: 203390 - DNA, 15 bp, Homo sapiens
tgtgagggaagttat

SEQ ID NO: 203391 - DNA, 15 bp, Homo sapiens
ttgtgagggaagtta

SEQ ID NO: 203392 - DNA, 15 bp, Homo sapiens
attgtgagggaagtt

SEQ ID NO: 203393 - DNA, 15 bp, Homo sapiens
aattgtgagggaagt

SEQ ID NO: 203394 - DNA, 15 bp, Homo sapiens
gaattgtgagggaag

SEQ ID NO: 203395 - DNA, 15 bp, Homo sapiens
tgaattgtgagggaa

SEQ ID NO: 203396 - DNA, 15 bp, Homo sapiens
ctgaattgtgaggga

SEQ ID NO: 203397 - DNA, 15 bp, Homo sapiens
tctgaattgtgaggg

SEQ ID NO: 203398 - DNA, 15 bp, Homo sapiens
ttctgaattgtgagg

SEQ ID NO: 203399 - DNA, 15 bp, Homo sapiens
tttctgaattgtgag

SEQ ID NO: 203400 - DNA, 15 bp, Homo sapiens
atttctgaattgtga

SEQ ID NO: 203401 - DNA, 15 bp, Homo sapiens
gatttctgaattgtg

SEQ ID NO: 203402 - DNA, 15 bp, Homo sapiens
tgatttctgaattgt

SEQ ID NO: 203403 - DNA, 15 bp, Homo sapiens
gtgatttctgaattg

SEQ ID NO: 203404 - DNA, 15 bp, Homo sapiens
agtgatttctgaatt

SEQ ID NO: 203405 - DNA, 15 bp, Homo sapiens
cagtgatttctgaat

SEQ ID NO: 203406 - DNA, 15 bp, Homo sapiens
acagtgatttctgaa

SEQ ID NO: 203407 - DNA, 15 bp, Homo sapiens
cacagtgatttctga

SEQ ID NO: 203408 - DNA, 15 bp, Homo sapiens
tcacagtgatttctg

SEQ ID NO: 203409 - DNA, 15 bp, Homo sapiens
atcacagtgatttct

SEQ ID NO: 203410 - DNA, 15 bp, Homo sapiens
aatcacagtgatttc

SEQ ID NO: 203411 - DNA, 15 bp, Homo sapiens
caatcacagtgattt

SEQ ID NO: 203412 - DNA, 15 bp, Homo sapiens
tcaatcacagtgatt

SEQ ID NO: 203413 - DNA, 15 bp, Homo sapiens
ttcaatcacagtgat

SEQ ID NO: 203414 - DNA, 15 bp, Homo sapiens
cttcaatcacagtga

SEQ ID NO: 203415 - DNA, 15 bp, Homo sapiens
tcttcaatcacagtg

SEQ ID NO: 203416 - DNA, 15 bp, Homo sapiens
atcttcaatcacagt

SEQ ID NO: 203417 - DNA, 15 bp, Homo sapiens
catcttcaatcacag

SEQ ID NO: 203418 - DNA, 15 bp, Homo sapiens
ccatcttcaatcaca

SEQ ID NO: 203419 - DNA, 15 bp, Homo sapiens
cccatcttcaatcac

SEQ ID NO: 203420 - DNA, 15 bp, Homo sapiens
acccatcttcaatca

SEQ ID NO: 203421 - DNA, 15 bp, Homo sapiens
cacccatcttcaatc

SEQ ID NO: 203422 - DNA, 15 bp, Homo sapiens
ccacccatcttcaat

SEQ ID NO: 203423 - DNA, 15 bp, Homo sapiens
gccacccatcttcaa

SEQ ID NO: 203424 - DNA, 15 bp, Homo sapiens
agccacccatcttca

SEQ ID NO: 203425 - DNA, 15 bp, Homo sapiens
cagccacccatcttc

SEQ ID NO: 203426 - DNA, 15 bp, Homo sapiens
acagccacccatctt

SEQ ID NO: 203427 - DNA, 15 bp, Homo sapiens
aacagccacccatct

SEQ ID NO: 203428 - DNA, 15 bp, Homo sapiens
taacagccacccatc

SEQ ID NO: 203429 - DNA, 15 bp, Homo sapiens
ataacagccacccat

SEQ ID NO: 203430 - DNA, 15 bp, Homo sapiens
tataacagccaccca

SEQ ID NO: 203431 - DNA, 15 bp, Homo sapiens
ttataacagccaccc

SEQ ID NO: 203432 - DNA, 15 bp, Homo sapiens
attataacagccacc

SEQ ID NO: 203433 - DNA, 15 bp, Homo sapiens
tattataacagccac

SEQ ID NO: 203434 - DNA, 15 bp, Homo sapiens
gtattataacagcca

SEQ ID NO: 203435 - DNA, 15 bp, Homo sapiens
agtattataacagcc

SEQ ID NO: 203436 - DNA, 15 bp, Homo sapiens
tagtattataacagc

SEQ ID NO: 203437 - DNA, 15 bp, Homo sapiens
gtagtattataacag

SEQ ID NO: 203438 - DNA, 15 bp, Homo sapiens
ggtagtattataaca

SEQ ID NO: 203439 - DNA, 15 bp, Homo sapiens
gggtagtattataac

SEQ ID NO: 203440 - DNA, 15 bp, Homo sapiens
tgggtagtattataa

SEQ ID NO: 203441 - DNA, 15 bp, Homo sapiens
gtgggtagtattata

SEQ ID NO: 203442 - DNA, 15 bp, Homo sapiens
agtgggtagtattat

SEQ ID NO: 203443 - DNA, 15 bp, Homo sapiens
aagtgggtagtatta

SEQ ID NO: 203444 - DNA, 15 bp, Homo sapiens
taagtgggtagtatt

SEQ ID NO: 203445 - DNA, 15 bp, Homo sapiens
ttaagtgggtagtat

SEQ ID NO: 203446 - DNA, 15 bp, Homo sapiens
tttaagtgggtagta

SEQ ID NO: 203447 - DNA, 15 bp, Homo sapiens
ttttaagtgggtagt

SEQ ID NO: 203448 - DNA, 15 bp, Homo sapiens
tttttaagtgggtag

SEQ ID NO: 203449 - DNA, 15 bp, Homo sapiens
atttttaagtgggta

SEQ ID NO: 203450 - DNA, 15 bp, Homo sapiens
catttttaagtgggt

SEQ ID NO: 203451 - DNA, 15 bp, Homo sapiens
ccatttttaagtggg

SEQ ID NO: 203452 - DNA, 15 bp, Homo sapiens
tccatttttaagtgg

SEQ ID NO: 203453 - DNA, 15 bp, Homo sapiens
atccatttttaagtg

SEQ ID NO: 203454 - DNA, 15 bp, Homo sapiens
catccatttttaagt

SEQ ID NO: 203455 - DNA, 15 bp, Homo sapiens
acatccatttttaag

SEQ ID NO: 203456 - DNA, 15 bp, Homo sapiens
tacatccatttttaa

SEQ ID NO: 203457 - DNA, 15 bp, Homo sapiens
ttacatccattttta

SEQ ID NO: 203458 - DNA, 15 bp, Homo sapiens
gttacatccattttt

SEQ ID NO: 203459 - DNA, 15 bp, Homo sapiens
ggttacatccatttt

SEQ ID NO: 203460 - DNA, 15 bp, Homo sapiens
gggttacatccattt

SEQ ID NO: 203461 - DNA, 15 bp, Homo sapiens
tgggttacatccatt

SEQ ID NO: 203462 - DNA, 15 bp, Homo sapiens
atgggttacatccat

SEQ ID NO: 203463 - DNA, 15 bp, Homo sapiens
aatgggttacatcca

SEQ ID NO: 203464 - DNA, 15 bp, Homo sapiens
aaatgggttacatcc

SEQ ID NO: 203465 - DNA, 15 bp, Homo sapiens
aaaatgggttacatc

SEQ ID NO: 203466 - DNA, 15 bp, Homo sapiens
aaaaatgggttacat

SEQ ID NO: 203467 - DNA, 15 bp, Homo sapiens
aaaaaatgggttaca

SEQ ID NO: 203468 - DNA, 15 bp, Homo sapiens
taaaaaatgggttac

SEQ ID NO: 203469 - DNA, 15 bp, Homo sapiens
ctaaaaaatgggtta

SEQ ID NO: 203470 - DNA, 15 bp, Homo sapiens
cctaaaaaatgggtt

SEQ ID NO: 203471 - DNA, 15 bp, Homo sapiens
tcctaaaaaatgggt

SEQ ID NO: 203472 - DNA, 15 bp, Homo sapiens
gtcctaaaaaatggg

SEQ ID NO: 203473 - DNA, 15 bp, Homo sapiens
agtcctaaaaaatgg

SEQ ID NO: 203474 - DNA, 15 bp, Homo sapiens
gagtcctaaaaaatg

SEQ ID NO: 203475 - DNA, 15 bp, Homo sapiens
agagtcctaaaaaat

SEQ ID NO: 203476 - DNA, 15 bp, Homo sapiens
aagagtcctaaaaaa

SEQ ID NO: 203477 - DNA, 15 bp, Homo sapiens
taagagtcctaaaaa

SEQ ID NO: 203478 - DNA, 15 bp, Homo sapiens
ttaagagtcctaaaa

SEQ ID NO: 203479 - DNA, 15 bp, Homo sapiens
tttaagagtcctaaa

SEQ ID NO: 203480 - DNA, 15 bp, Homo sapiens
ttttaagagtcctaa

SEQ ID NO: 203481 - DNA, 15 bp, Homo sapiens
tttttaagagtccta

SEQ ID NO: 203482 - DNA, 15 bp, Homo sapiens
gtttttaagagtcct

SEQ ID NO: 203483 - DNA, 15 bp, Homo sapiens
tgtttttaagagtcc

SEQ ID NO: 203484 - DNA, 15 bp, Homo sapiens
atgtttttaagagtc

SEQ ID NO: 203485 - DNA, 15 bp, Homo sapiens
gatgtttttaagagt

SEQ ID NO: 203486 - DNA, 15 bp, Homo sapiens
tgatgtttttaagag

SEQ ID NO: 203487 - DNA, 15 bp, Homo sapiens
ttgatgtttttaaga

SEQ ID NO: 203488 - DNA, 15 bp, Homo sapiens
tttgatgtttttaag

SEQ ID NO: 203489 - DNA, 15 bp, Homo sapiens
atttgatgtttttaa

SEQ ID NO: 203490 - DNA, 15 bp, Homo sapiens
gatttgatgttttta

SEQ ID NO: 203491 - DNA, 15 bp, Homo sapiens
tgatttgatgttttt

SEQ ID NO: 203492 - DNA, 15 bp, Homo sapiens
ctgatttgatgtttt

SEQ ID NO: 203493 - DNA, 15 bp, Homo sapiens
actgatttgatgttt

SEQ ID NO: 203494 - DNA, 15 bp, Homo sapiens
tactgatttgatgtt

SEQ ID NO: 203495 - DNA, 15 bp, Homo sapiens
ttactgatttgatgt

SEQ ID NO: 203496 - DNA, 15 bp, Homo sapiens
attactgatttgatg

SEQ ID NO: 203497 - DNA, 15 bp, Homo sapiens
cattactgatttgat

SEQ ID NO: 203498 - DNA, 15 bp, Homo sapiens
ccattactgatttga

SEQ ID NO: 203499 - DNA, 15 bp, Homo sapiens
gccattactgatttg

SEQ ID NO: 203500 - DNA, 15 bp, Homo sapiens
ggccattactgattt

SEQ ID NO: 203501 - DNA, 15 bp, Homo sapiens
cggccattactgatt

SEQ ID NO: 203502 - DNA, 15 bp, Homo sapiens
tcggccattactgat

SEQ ID NO: 203503 - DNA, 15 bp, Homo sapiens
atcggccattactga

SEQ ID NO: 203504 - DNA, 15 bp, Homo sapiens
aatcggccattactg

SEQ ID NO: 203505 - DNA, 15 bp, Homo sapiens
taatcggccattact

SEQ ID NO: 203506 - DNA, 15 bp, Homo sapiens
ctaatcggccattac

SEQ ID NO: 203507 - DNA, 15 bp, Homo sapiens
cctaatcggccatta

SEQ ID NO: 203508 - DNA, 15 bp, Homo sapiens
tcctaatcggccatt

SEQ ID NO: 203509 - DNA, 15 bp, Homo sapiens
gtcctaatcggccat

SEQ ID NO: 203510 - DNA, 15 bp, Homo sapiens
agtcctaatcggcca

SEQ ID NO: 203511 - DNA, 15 bp, Homo sapiens
aagtcctaatcggcc

SEQ ID NO: 203512 - DNA, 15 bp, Homo sapiens
aaagtcctaatcggc

SEQ ID NO: 203513 - DNA, 15 bp, Homo sapiens
aaaagtcctaatcgg

SEQ ID NO: 203514 - DNA, 15 bp, Homo sapiens
aaaaagtcctaatcg

SEQ ID NO: 203515 - DNA, 15 bp, Homo sapiens
taaaaagtcctaatc

SEQ ID NO: 203516 - DNA, 15 bp, Homo sapiens
ttaaaaagtcctaat

SEQ ID NO: 203517 - DNA, 15 bp, Homo sapiens
attaaaaagtcctaa

SEQ ID NO: 203518 - DNA, 15 bp, Homo sapiens
aattaaaaagtccta

SEQ ID NO: 203519 - DNA, 15 bp, Homo sapiens
aaattaaaaagtcct

SEQ ID NO: 203520 - DNA, 15 bp, Homo sapiens
aaaattaaaaagtcc

SEQ ID NO: 203521 - DNA, 15 bp, Homo sapiens
aaaaattaaaaagtc

SEQ ID NO: 203522 - DNA, 15 bp, Homo sapiens
taaaaattaaaaagt

SEQ ID NO: 203523 - DNA, 15 bp, Homo sapiens
gtaaaaattaaaaag

SEQ ID NO: 203524 - DNA, 15 bp, Homo sapiens
agtaaaaattaaaaa

SEQ ID NO: 203525 - DNA, 15 bp, Homo sapiens
tagtaaaaattaaaa

SEQ ID NO: 203526 - DNA, 15 bp, Homo sapiens
ttagtaaaaattaaa

SEQ ID NO: 203527 - DNA, 15 bp, Homo sapiens
attagtaaaaattaa

SEQ ID NO: 203528 - DNA, 15 bp, Homo sapiens
gattagtaaaaatta

SEQ ID NO: 203529 - DNA, 15 bp, Homo sapiens
agattagtaaaaatt

SEQ ID NO: 203530 - DNA, 15 bp, Homo sapiens
gagattagtaaaaat

SEQ ID NO: 203531 - DNA, 15 bp, Homo sapiens
agagattagtaaaaa

SEQ ID NO: 203532 - DNA, 15 bp, Homo sapiens
tagagattagtaaaa

SEQ ID NO: 203533 - DNA, 15 bp, Homo sapiens
gtagagattagtaaa

SEQ ID NO: 203534 - DNA, 15 bp, Homo sapiens
agtagagattagtaa

SEQ ID NO: 203535 - DNA, 15 bp, Homo sapiens
aagtagagattagta

SEQ ID NO: 203536 - DNA, 15 bp, Homo sapiens
caagtagagattagt

SEQ ID NO: 203537 - DNA, 15 bp, Homo sapiens
tcaagtagagattag

SEQ ID NO: 203538 - DNA, 15 bp, Homo sapiens
ttcaagtagagatta

SEQ ID NO: 203539 - DNA, 15 bp, Homo sapiens
tttcaagtagagatt

SEQ ID NO: 203540 - DNA, 15 bp, Homo sapiens
ctttcaagtagagat

SEQ ID NO: 203541 - DNA, 15 bp, Homo sapiens
actttcaagtagaga

SEQ ID NO: 203542 - DNA, 15 bp, Homo sapiens
aactttcaagtagag

SEQ ID NO: 203543 - DNA, 15 bp, Homo sapiens
aaactttcaagtaga

SEQ ID NO: 203544 - DNA, 15 bp, Homo sapiens
aaaactttcaagtag

SEQ ID NO: 203545 - DNA, 15 bp, Homo sapiens
gaaaactttcaagta

SEQ ID NO: 203546 - DNA, 15 bp, Homo sapiens
agaaaactttcaagt

SEQ ID NO: 203547 - DNA, 15 bp, Homo sapiens
tagaaaactttcaag

SEQ ID NO: 203548 - DNA, 15 bp, Homo sapiens
ctagaaaactttcaa

SEQ ID NO: 203549 - DNA, 15 bp, Homo sapiens
actagaaaactttca

SEQ ID NO: 203550 - DNA, 15 bp, Homo sapiens
gactagaaaactttc

SEQ ID NO: 203551 - DNA, 15 bp, Homo sapiens
tgactagaaaacttt

SEQ ID NO: 203552 - DNA, 15 bp, Homo sapiens
atgactagaaaactt

SEQ ID NO: 203553 - DNA, 15 bp, Homo sapiens
aatgactagaaaact

SEQ ID NO: 203554 - DNA, 15 bp, Homo sapiens
gaatgactagaaaac

SEQ ID NO: 203555 - DNA, 15 bp, Homo sapiens
tgaatgactagaaaa

SEQ ID NO: 203556 - DNA, 15 bp, Homo sapiens
atgaatgactagaaa

SEQ ID NO: 203557 - DNA, 15 bp, Homo sapiens
aatgaatgactagaa

SEQ ID NO: 203558 - DNA, 15 bp, Homo sapiens
aaatgaatgactaga

SEQ ID NO: 203559 - DNA, 15 bp, Homo sapiens
gaaatgaatgactag

SEQ ID NO: 203560 - DNA, 15 bp, Homo sapiens
tgaaatgaatgacta

SEQ ID NO: 203561 - DNA, 15 bp, Homo sapiens
ctgaaatgaatgact

SEQ ID NO: 203562 - DNA, 15 bp, Homo sapiens
cctgaaatgaatgac

SEQ ID NO: 203563 - DNA, 15 bp, Homo sapiens
tcctgaaatgaatga

SEQ ID NO: 203564 - DNA, 15 bp, Homo sapiens
ttcctgaaatgaatg

SEQ ID NO: 203565 - DNA, 15 bp, Homo sapiens
tttcctgaaatgaat

SEQ ID NO: 203566 - DNA, 15 bp, Homo sapiens
gtttcctgaaatgaa

SEQ ID NO: 203567 - DNA, 15 bp, Homo sapiens
ggtttcctgaaatga

SEQ ID NO: 203568 - DNA, 15 bp, Homo sapiens
aggtttcctgaaatg

SEQ ID NO: 203569 - DNA, 15 bp, Homo sapiens
taggtttcctgaaat

SEQ ID NO: 203570 - DNA, 15 bp, Homo sapiens
ttaggtttcctgaaa

SEQ ID NO: 203571 - DNA, 15 bp, Homo sapiens
attaggtttcctgaa

SEQ ID NO: 203572 - DNA, 15 bp, Homo sapiens
aattaggtttcctga

SEQ ID NO: 203573 - DNA, 15 bp, Homo sapiens
gaattaggtttcctg

SEQ ID NO: 203574 - DNA, 15 bp, Homo sapiens
agaattaggtttcct

SEQ ID NO: 203575 - DNA, 15 bp, Homo sapiens
aagaattaggtttcc

SEQ ID NO: 203576 - DNA, 15 bp, Homo sapiens
taagaattaggtttc

SEQ ID NO: 203577 - DNA, 15 bp, Homo sapiens
ataagaattaggttt

SEQ ID NO: 203578 - DNA, 15 bp, Homo sapiens
tataagaattaggtt

SEQ ID NO: 203579 - DNA, 15 bp, Homo sapiens
ttataagaattaggt

SEQ ID NO: 203580 - DNA, 15 bp, Homo sapiens
attataagaattagg

SEQ ID NO: 203581 - DNA, 15 bp, Homo sapiens
aattataagaattag

SEQ ID NO: 203582 - DNA, 15 bp, Homo sapiens
gaattataagaatta

SEQ ID NO: 203583 - DNA, 15 bp, Homo sapiens
tgaattataagaatt

SEQ ID NO: 203584 - DNA, 15 bp, Homo sapiens
atgaattataagaat

SEQ ID NO: 203585 - DNA, 15 bp, Homo sapiens
tatgaattataagaa

SEQ ID NO: 203586 - DNA, 15 bp, Homo sapiens
atatgaattataaga

SEQ ID NO: 203587 - DNA, 15 bp, Homo sapiens
gatatgaattataag

SEQ ID NO: 203588 - DNA, 15 bp, Homo sapiens
tgatatgaattataa

SEQ ID NO: 203589 - DNA, 15 bp, Homo sapiens
atgatatgaattata

SEQ ID NO: 203590 - DNA, 15 bp, Homo sapiens
aatgatatgaattat

SEQ ID NO: 203591 - DNA, 15 bp, Homo sapiens
aaatgatatgaatta

SEQ ID NO: 203592 - DNA, 15 bp, Homo sapiens
taaatgatatgaatt

SEQ ID NO: 203593 - DNA, 15 bp, Homo sapiens
ctaaatgatatgaat

SEQ ID NO: 203594 - DNA, 15 bp, Homo sapiens
tctaaatgatatgaa

SEQ ID NO: 203595 - DNA, 15 bp, Homo sapiens
ttctaaatgatatga

SEQ ID NO: 203596 - DNA, 15 bp, Homo sapiens
attctaaatgatatg

SEQ ID NO: 203597 - DNA, 15 bp, Homo sapiens
tattctaaatgatat

SEQ ID NO: 203598 - DNA, 15 bp, Homo sapiens
atattctaaatgata

SEQ ID NO: 203599 - DNA, 15 bp, Homo sapiens
gatattctaaatgat

SEQ ID NO: 203600 - DNA, 15 bp, Homo sapiens
tgatattctaaatga

SEQ ID NO: 203601 - DNA, 15 bp, Homo sapiens
atgatattctaaatg

SEQ ID NO: 203602 - DNA, 15 bp, Homo sapiens
tatgatattctaaat

SEQ ID NO: 203603 - DNA, 15 bp, Homo sapiens
ttatgatattctaaa

SEQ ID NO: 203604 - DNA, 15 bp, Homo sapiens
attatgatattctaa

SEQ ID NO: 203605 - DNA, 15 bp, Homo sapiens
cattatgatattcta

SEQ ID NO: 203606 - DNA, 15 bp, Homo sapiens
gcattatgatattct

SEQ ID NO: 203607 - DNA, 15 bp, Homo sapiens
agcattatgatattc

SEQ ID NO: 203608 - DNA, 15 bp, Homo sapiens
tagcattatgatatt

SEQ ID NO: 203609 - DNA, 15 bp, Homo sapiens
atagcattatgatat

SEQ ID NO: 203610 - DNA, 15 bp, Homo sapiens
catagcattatgata

SEQ ID NO: 203611 - DNA, 15 bp, Homo sapiens
ccatagcattatgat

SEQ ID NO: 203612 - DNA, 15 bp, Homo sapiens
tccatagcattatga

SEQ ID NO: 203613 - DNA, 15 bp, Homo sapiens
atccatagcattatg

SEQ ID NO: 203614 - DNA, 15 bp, Homo sapiens
tatccatagcattat

SEQ ID NO: 203615 - DNA, 15 bp, Homo sapiens
atatccatagcatta

SEQ ID NO: 203616 - DNA, 15 bp, Homo sapiens
aatatccatagcatt

SEQ ID NO: 203617 - DNA, 15 bp, Homo sapiens
taatatccatagcat

SEQ ID NO: 203618 - DNA, 15 bp, Homo sapiens
ctaatatccatagca

SEQ ID NO: 203619 - DNA, 15 bp, Homo sapiens
gctaatatccatagc

SEQ ID NO: 203620 - DNA, 15 bp, Homo sapiens
agctaatatccatag

SEQ ID NO: 203621 - DNA, 15 bp, Homo sapiens
tagctaatatccata

SEQ ID NO: 203622 - DNA, 15 bp, Homo sapiens
ctagctaatatccat

SEQ ID NO: 203623 - DNA, 15 bp, Homo sapiens
gctagctaatatcca

SEQ ID NO: 203624 - DNA, 15 bp, Homo sapiens
agctagctaatatcc

SEQ ID NO: 203625 - DNA, 15 bp, Homo sapiens
tagctagctaatatc

SEQ ID NO: 203626 - DNA, 15 bp, Homo sapiens
ttagctagctaatat

SEQ ID NO: 203627 - DNA, 15 bp, Homo sapiens
gttagctagctaata

SEQ ID NO: 203628 - DNA, 15 bp, Homo sapiens
agttagctagctaat

SEQ ID NO: 203629 - DNA, 15 bp, Homo sapiens
aagttagctagctaa

SEQ ID NO: 203630 - DNA, 15 bp, Homo sapiens
gaagttagctagcta

SEQ ID NO: 203631 - DNA, 15 bp, Homo sapiens
agaagttagctagct

SEQ ID NO: 203632 - DNA, 15 bp, Homo sapiens
gagaagttagctagc

SEQ ID NO: 203633 - DNA, 15 bp, Homo sapiens
tgagaagttagctag

SEQ ID NO: 203634 - DNA, 15 bp, Homo sapiens
ttgagaagttagcta

SEQ ID NO: 203635 - DNA, 15 bp, Homo sapiens
tttgagaagttagct

SEQ ID NO: 203636 - DNA, 15 bp, Homo sapiens
atttgagaagttagc

SEQ ID NO: 203637 - DNA, 15 bp, Homo sapiens
gatttgagaagttag

SEQ ID NO: 203638 - DNA, 15 bp, Homo sapiens
agatttgagaagtta

SEQ ID NO: 203639 - DNA, 15 bp, Homo sapiens
aagatttgagaagtt

SEQ ID NO: 203640 - DNA, 15 bp, Homo sapiens
gaagatttgagaagt

SEQ ID NO: 203641 - DNA, 15 bp, Homo sapiens
agaagatttgagaag

SEQ ID NO: 203642 - DNA, 15 bp, Homo sapiens
tagaagatttgagaa

SEQ ID NO: 203643 - DNA, 15 bp, Homo sapiens
ctagaagatttgaga

SEQ ID NO: 203644 - DNA, 15 bp, Homo sapiens
actagaagatttgag

SEQ ID NO: 203645 - DNA, 15 bp, Homo sapiens
aactagaagatttga

SEQ ID NO: 203646 - DNA, 15 bp, Homo sapiens
gaactagaagatttg

SEQ ID NO: 203647 - DNA, 15 bp, Homo sapiens
agaactagaagattt

SEQ ID NO: 203648 - DNA, 15 bp, Homo sapiens
gagaactagaagatt

SEQ ID NO: 203649 - DNA, 15 bp, Homo sapiens
tgagaactagaagat

SEQ ID NO: 203650 - DNA, 15 bp, Homo sapiens
atgagaactagaaga

SEQ ID NO: 203651 - DNA, 15 bp, Homo sapiens
aatgagaactagaag

SEQ ID NO: 203652 - DNA, 15 bp, Homo sapiens
aaatgagaactagaa

SEQ ID NO: 203653 - DNA, 15 bp, Homo sapiens
taaatgagaactaga

SEQ ID NO: 203654 - DNA, 15 bp, Homo sapiens
ttaaatgagaactag

SEQ ID NO: 203655 - DNA, 15 bp, Homo sapiens
attaaatgagaacta

SEQ ID NO: 203656 - DNA, 15 bp, Homo sapiens
aattaaatgagaact

SEQ ID NO: 203657 - DNA, 15 bp, Homo sapiens
aaattaaatgagaac

SEQ ID NO: 203658 - DNA, 15 bp, Homo sapiens
caaattaaatgagaa

SEQ ID NO: 203659 - DNA, 15 bp, Homo sapiens
tcaaattaaatgaga

SEQ ID NO: 203660 - DNA, 15 bp, Homo sapiens
ttcaaattaaatgag

SEQ ID NO: 203661 - DNA, 15 bp, Homo sapiens
cttcaaattaaatga

SEQ ID NO: 203662 - DNA, 15 bp, Homo sapiens
acttcaaattaaatg

SEQ ID NO: 203663 - DNA, 15 bp, Homo sapiens
aacttcaaattaaat

SEQ ID NO: 203664 - DNA, 15 bp, Homo sapiens
aaacttcaaattaaa

SEQ ID NO: 203665 - DNA, 15 bp, Homo sapiens
caaacttcaaattaa

SEQ ID NO: 203666 - DNA, 15 bp, Homo sapiens
acaaacttcaaatta

SEQ ID NO: 203667 - DNA, 15 bp, Homo sapiens
cacaaacttcaaatt

SEQ ID NO: 203668 - DNA, 15 bp, Homo sapiens
acacaaacttcaaat

SEQ ID NO: 203669 - DNA, 15 bp, Homo sapiens
cacacaaacttcaaa

SEQ ID NO: 203670 - DNA, 15 bp, Homo sapiens
acacacaaacttcaa

SEQ ID NO: 203671 - DNA, 15 bp, Homo sapiens
cacacacaaacttca

SEQ ID NO: 203672 - DNA, 15 bp, Homo sapiens
acacacacaaacttc

SEQ ID NO: 203673 - DNA, 15 bp, Homo sapiens
tacacacacaaactt

SEQ ID NO: 203674 - DNA, 15 bp, Homo sapiens
gtacacacacaaact

SEQ ID NO: 203675 - DNA, 15 bp, Homo sapiens
tgtacacacacaaac

SEQ ID NO: 203676 - DNA, 15 bp, Homo sapiens
atgtacacacacaaa

SEQ ID NO: 203677 - DNA, 15 bp, Homo sapiens
tatgtacacacacaa

SEQ ID NO: 203678 - DNA, 15 bp, Homo sapiens
ttatgtacacacaca

SEQ ID NO: 203679 - DNA, 15 bp, Homo sapiens
cttatgtacacacac

SEQ ID NO: 203680 - DNA, 15 bp, Homo sapiens
ccttatgtacacaca

SEQ ID NO: 203681 - DNA, 15 bp, Homo sapiens
tccttatgtacacac

SEQ ID NO: 203682 - DNA, 15 bp, Homo sapiens
atccttatgtacaca

SEQ ID NO: 203683 - DNA, 15 bp, Homo sapiens
tatccttatgtacac

SEQ ID NO: 203684 - DNA, 15 bp, Homo sapiens
atatccttatgtaca

SEQ ID NO: 203685 - DNA, 15 bp, Homo sapiens
tatatccttatgtac

SEQ ID NO: 203686 - DNA, 15 bp, Homo sapiens
gtatatccttatgta

SEQ ID NO: 203687 - DNA, 15 bp, Homo sapiens
tgtatatccttatgt

SEQ ID NO: 203688 - DNA, 15 bp, Homo sapiens
atgtatatccttatg

SEQ ID NO: 203689 - DNA, 15 bp, Homo sapiens
tatgtatatccttat

SEQ ID NO: 203690 - DNA, 15 bp, Homo sapiens
atatgtatatcctta

SEQ ID NO: 203691 - DNA, 15 bp, Homo sapiens
tatatgtatatcctt

SEQ ID NO: 203692 - DNA, 15 bp, Homo sapiens
gtatatgtatatcct

SEQ ID NO: 203693 - DNA, 15 bp, Homo sapiens
tgtatatgtatatcc

SEQ ID NO: 203694 - DNA, 15 bp, Homo sapiens
atgtatatgtatatc

SEQ ID NO: 203695 - DNA, 15 bp, Homo sapiens
tatgtatatgtatat

SEQ ID NO: 203696 - DNA, 15 bp, Homo sapiens
atatgtatatgtata

SEQ ID NO: 203697 - DNA, 15 bp, Homo sapiens
catatgtatatgtat

SEQ ID NO: 203698 - DNA, 15 bp, Homo sapiens
acatatgtatatgta

SEQ ID NO: 203699 - DNA, 15 bp, Homo sapiens
cacatatgtatatgt

SEQ ID NO: 203700 - DNA, 15 bp, Homo sapiens
acacatatgtatatg

SEQ ID NO: 203701 - DNA, 15 bp, Homo sapiens
cacacatatgtatat

SEQ ID NO: 203702 - DNA, 15 bp, Homo sapiens
acacacatatgtata

SEQ ID NO: 203703 - DNA, 15 bp, Homo sapiens
cacacacatatgtat

SEQ ID NO: 203704 - DNA, 15 bp, Homo sapiens
acacacacatatgta

SEQ ID NO: 203705 - DNA, 15 bp, Homo sapiens
tacacacacatatgt

SEQ ID NO: 203706 - DNA, 15 bp, Homo sapiens
ctacacacacatatg

SEQ ID NO: 203707 - DNA, 15 bp, Homo sapiens
tctacacacacatat

SEQ ID NO: 203708 - DNA, 15 bp, Homo sapiens
atctacacacacata

SEQ ID NO: 203709 - DNA, 15 bp, Homo sapiens
tatctacacacacat

SEQ ID NO: 203710 - DNA, 15 bp, Homo sapiens
atatctacacacaca

SEQ ID NO: 203711 - DNA, 15 bp, Homo sapiens
tatatctacacacac

SEQ ID NO: 203712 - DNA, 15 bp, Homo sapiens
atatatctacacaca

SEQ ID NO: 203713 - DNA, 15 bp, Homo sapiens
tatatatctacacac

SEQ ID NO: 203714 - DNA, 15 bp, Homo sapiens
atatatatctacaca

SEQ ID NO: 203715 - DNA, 15 bp, Homo sapiens
tatatatatctacac

SEQ ID NO: 203716 - DNA, 15 bp, Homo sapiens
atatatatatctaca

SEQ ID NO: 203717 - DNA, 15 bp, Homo sapiens
tatatatatatctac

SEQ ID NO: 203718 - DNA, 15 bp, Homo sapiens
atatatatatatcta

SEQ ID NO: 203719 - DNA, 15 bp, Homo sapiens
tatatatatatatct

SEQ ID NO: 203720 - DNA, 15 bp, Homo sapiens
atatatatatatatc

SEQ ID NO: 203721 - DNA, 15 bp, Homo sapiens
tatatatatatatat

SEQ ID NO: 203722 - DNA, 15 bp, Homo sapiens
ctatatatatatata

SEQ ID NO: 203723 - DNA, 15 bp, Homo sapiens
actatatatatatat

SEQ ID NO: 203724 - DNA, 15 bp, Homo sapiens
aactatatatatata

SEQ ID NO: 203725 - DNA, 15 bp, Homo sapiens
aaactatatatatat

SEQ ID NO: 203726 - DNA, 15 bp, Homo sapiens
aaaactatatatata

SEQ ID NO: 203727 - DNA, 15 bp, Homo sapiens
aaaaactatatatat

SEQ ID NO: 203728 - DNA, 15 bp, Homo sapiens
aaaaaactatatata

SEQ ID NO: 203729 - DNA, 15 bp, Homo sapiens
aaaaaaactatatat

SEQ ID NO: 203730 - DNA, 15 bp, Homo sapiens
aaaaaaaactatata

SEQ ID NO: 203731 - DNA, 15 bp, Homo sapiens
aaaaaaaaactatat

SEQ ID NO: 203732 - DNA, 15 bp, Homo sapiens
aaaaaaaaaactata

SEQ ID NO: 203733 - DNA, 15 bp, Homo sapiens
aaaaaaaaaaactat

SEQ ID NO: 203734 - DNA, 15 bp, Homo sapiens
aaaaaaaaaaaacta

SEQ ID NO: 203735 - DNA, 15 bp, Homo sapiens
aaaaaaaaaaaaact

SEQ ID NO: 203736 - DNA, 15 bp, Homo sapiens
aaaaaaaaaaaaaac

SEQ ID NO: 203737 - DNA, 15 bp, Homo sapiens
ttaaaaaaaaaaaaa

SEQ ID NO: 203738 - DNA, 15 bp, Homo sapiens
gttaaaaaaaaaaaa

SEQ ID NO: 203739 - DNA, 15 bp, Homo sapiens
agttaaaaaaaaaaa

SEQ ID NO: 203740 - DNA, 15 bp, Homo sapiens
tagttaaaaaaaaaa

SEQ ID NO: 203741 - DNA, 15 bp, Homo sapiens
ctagttaaaaaaaaa

SEQ ID NO: 203742 - DNA, 15 bp, Homo sapiens
tctagttaaaaaaaa

SEQ ID NO: 203743 - DNA, 15 bp, Homo sapiens
ttctagttaaaaaaa

SEQ ID NO: 203744 - DNA, 15 bp, Homo sapiens
attctagttaaaaaa

SEQ ID NO: 203745 - DNA, 15 bp, Homo sapiens
cattctagttaaaaa

SEQ ID NO: 203746 - DNA, 15 bp, Homo sapiens
tcattctagttaaaa

SEQ ID NO: 203747 - DNA, 15 bp, Homo sapiens
gtcattctagttaaa

SEQ ID NO: 203748 - DNA, 15 bp, Homo sapiens
ggtcattctagttaa

SEQ ID NO: 203749 - DNA, 15 bp, Homo sapiens
tggtcattctagtta

SEQ ID NO: 203750 - DNA, 15 bp, Homo sapiens
ctggtcattctagtt

SEQ ID NO: 203751 - DNA, 15 bp, Homo sapiens
actggtcattctagt

SEQ ID NO: 203752 - DNA, 15 bp, Homo sapiens
gactggtcattctag

SEQ ID NO: 203753 - DNA, 15 bp, Homo sapiens
tgactggtcattcta

SEQ ID NO: 203754 - DNA, 15 bp, Homo sapiens
ttgactggtcattct

SEQ ID NO: 203755 - DNA, 15 bp, Homo sapiens
gttgactggtcattc

SEQ ID NO: 203756 - DNA, 15 bp, Homo sapiens
tgttgactggtcatt

SEQ ID NO: 203757 - DNA, 15 bp, Homo sapiens
ctgttgactggtcat

SEQ ID NO: 203758 - DNA, 15 bp, Homo sapiens
cctgttgactggtca

SEQ ID NO: 203759 - DNA, 15 bp, Homo sapiens
ccctgttgactggtc

SEQ ID NO: 203760 - DNA, 15 bp, Homo sapiens
cccctgttgactggt

SEQ ID NO: 203761 - DNA, 15 bp, Homo sapiens
tcccctgttgactgg

SEQ ID NO: 203762 - DNA, 15 bp, Homo sapiens
gtcccctgttgactg

SEQ ID NO: 203763 - DNA, 15 bp, Homo sapiens
tgtcccctgttgact

SEQ ID NO: 203764 - DNA, 15 bp, Homo sapiens
atgtcccctgttgac

SEQ ID NO: 203765 - DNA, 15 bp, Homo sapiens
tatgtcccctgttga

SEQ ID NO: 203766 - DNA, 15 bp, Homo sapiens
ttatgtcccctgttg

SEQ ID NO: 203767 - DNA, 15 bp, Homo sapiens
tttatgtcccctgtt

SEQ ID NO: 203768 - DNA, 15 bp, Homo sapiens
ttttatgtcccctgt

SEQ ID NO: 203769 - DNA, 15 bp, Homo sapiens
cttttatgtcccctg

SEQ ID NO: 203770 - DNA, 15 bp, Homo sapiens
acttttatgtcccct

SEQ ID NO: 203771 - DNA, 15 bp, Homo sapiens
tacttttatgtcccc

SEQ ID NO: 203772 - DNA, 15 bp, Homo sapiens
ttacttttatgtccc

SEQ ID NO: 203773 - DNA, 15 bp, Homo sapiens
attacttttatgtcc

SEQ ID NO: 203774 - DNA, 15 bp, Homo sapiens
aattacttttatgtc

SEQ ID NO: 203775 - DNA, 15 bp, Homo sapiens
caattacttttatgt

SEQ ID NO: 203776 - DNA, 15 bp, Homo sapiens
ccaattacttttatg

SEQ ID NO: 203777 - DNA, 15 bp, Homo sapiens
accaattacttttat

SEQ ID NO: 203778 - DNA, 15 bp, Homo sapiens
caccaattactttta

SEQ ID NO: 203779 - DNA, 15 bp, Homo sapiens
ccaccaattactttt

SEQ ID NO: 203780 - DNA, 15 bp, Homo sapiens
tccaccaattacttt

SEQ ID NO: 203781 - DNA, 15 bp, Homo sapiens
ctccaccaattactt

SEQ ID NO: 203782 - DNA, 15 bp, Homo sapiens
tctccaccaattact

SEQ ID NO: 203783 - DNA, 15 bp, Homo sapiens
atctccaccaattac

SEQ ID NO: 203784 - DNA, 15 bp, Homo sapiens
catctccaccaatta

SEQ ID NO: 203785 - DNA, 15 bp, Homo sapiens
tcatctccaccaatt

SEQ ID NO: 203786 - DNA, 15 bp, Homo sapiens
atcatctccaccaat

SEQ ID NO: 203787 - DNA, 15 bp, Homo sapiens
gatcatctccaccaa

SEQ ID NO: 203788 - DNA, 15 bp, Homo sapiens
agatcatctccacca

SEQ ID NO: 203789 - DNA, 15 bp, Homo sapiens
gagatcatctccacc

SEQ ID NO: 203790 - DNA, 15 bp, Homo sapiens
agagatcatctccac

SEQ ID NO: 203791 - DNA, 15 bp, Homo sapiens
gagagatcatctcca

SEQ ID NO: 203792 - DNA, 15 bp, Homo sapiens
tgagagatcatctcc

SEQ ID NO: 203793 - DNA, 15 bp, Homo sapiens
ttgagagatcatctc

SEQ ID NO: 203794 - DNA, 15 bp, Homo sapiens
gttgagagatcatct

SEQ ID NO: 203795 - DNA, 15 bp, Homo sapiens
agttgagagatcatc

SEQ ID NO: 203796 - DNA, 15 bp, Homo sapiens
aagttgagagatcat

SEQ ID NO: 203797 - DNA, 15 bp, Homo sapiens
aaagttgagagatca

SEQ ID NO: 203798 - DNA, 15 bp, Homo sapiens
taaagttgagagatc

SEQ ID NO: 203799 - DNA, 15 bp, Homo sapiens
ttaaagttgagagat

SEQ ID NO: 203800 - DNA, 15 bp, Homo sapiens
gttaaagttgagaga

SEQ ID NO: 203801 - DNA, 15 bp, Homo sapiens
agttaaagttgagag

SEQ ID NO: 203802 - DNA, 15 bp, Homo sapiens
cagttaaagttgaga

SEQ ID NO: 203803 - DNA, 15 bp, Homo sapiens
ccagttaaagttgag

SEQ ID NO: 203804 - DNA, 15 bp, Homo sapiens
tccagttaaagttga

SEQ ID NO: 203805 - DNA, 15 bp, Homo sapiens
ttccagttaaagttg

SEQ ID NO: 203806 - DNA, 15 bp, Homo sapiens
tttccagttaaagtt

SEQ ID NO: 203807 - DNA, 15 bp, Homo sapiens
ctttccagttaaagt

SEQ ID NO: 203808 - DNA, 15 bp, Homo sapiens
cctttccagttaaag

SEQ ID NO: 203809 - DNA, 15 bp, Homo sapiens
acctttccagttaaa

SEQ ID NO: 203810 - DNA, 15 bp, Homo sapiens
tacctttccagttaa

SEQ ID NO: 203811 - DNA, 15 bp, Homo sapiens
atacctttccagtta

SEQ ID NO: 203812 - DNA, 15 bp, Homo sapiens
catacctttccagtt

SEQ ID NO: 203813 - DNA, 15 bp, Homo sapiens
acatacctttccagt

SEQ ID NO: 203814 - DNA, 15 bp, Homo sapiens
tacatacctttccag

SEQ ID NO: 203815 - DNA, 15 bp, Homo sapiens
atacatacctttcca

SEQ ID NO: 203816 - DNA, 15 bp, Homo sapiens
gatacatacctttcc

SEQ ID NO: 203817 - DNA, 15 bp, Homo sapiens
agatacatacctttc

SEQ ID NO: 203818 - DNA, 15 bp, Homo sapiens
aagatacataccttt

SEQ ID NO: 203819 - DNA, 15 bp, Homo sapiens
caagatacatacctt

SEQ ID NO: 203820 - DNA, 15 bp, Homo sapiens
tcaagatacatacct

SEQ ID NO: 203821 - DNA, 15 bp, Homo sapiens
ttcaagatacatacc

SEQ ID NO: 203822 - DNA, 15 bp, Homo sapiens
tttcaagatacatac

SEQ ID NO: 203823 - DNA, 15 bp, Homo sapiens
ctttcaagatacata

SEQ ID NO: 203824 - DNA, 15 bp, Homo sapiens
cctttcaagatacat

SEQ ID NO: 203825 - DNA, 15 bp, Homo sapiens
ccctttcaagataca

SEQ ID NO: 203826 - DNA, 15 bp, Homo sapiens
tccctttcaagatac

SEQ ID NO: 203827 - DNA, 15 bp, Homo sapiens
ttccctttcaagata

SEQ ID NO: 203828 - DNA, 15 bp, Homo sapiens
cttccctttcaagat

SEQ ID NO: 203829 - DNA, 15 bp, Homo sapiens
tcttccctttcaaga

SEQ ID NO: 203830 - DNA, 15 bp, Homo sapiens
ttcttccctttcaag

SEQ ID NO: 203831 - DNA, 15 bp, Homo sapiens
tttcttccctttcaa

SEQ ID NO: 203832 - DNA, 15 bp, Homo sapiens
ttttcttccctttca

SEQ ID NO: 203833 - DNA, 15 bp, Homo sapiens
tttttcttccctttc

SEQ ID NO: 203834 - DNA, 15 bp, Homo sapiens
ttttttcttcccttt

SEQ ID NO: 203835 - DNA, 15 bp, Homo sapiens
tttttttcttccctt

SEQ ID NO: 203836 - DNA, 15 bp, Homo sapiens
ttttttttcttccct

SEQ ID NO: 203837 - DNA, 15 bp, Homo sapiens
cttttttttcttccc

SEQ ID NO: 203838 - DNA, 15 bp, Homo sapiens
gcttttttttcttcc

SEQ ID NO: 203839 - DNA, 15 bp, Homo sapiens
tgcttttttttcttc

SEQ ID NO: 203840 - DNA, 15 bp, Homo sapiens
gtgcttttttttctt

SEQ ID NO: 203841 - DNA, 15 bp, Homo sapiens
agtgcttttttttct

SEQ ID NO: 203842 - DNA, 15 bp, Homo sapiens
aagtgcttttttttc

SEQ ID NO: 203843 - DNA, 15 bp, Homo sapiens
gaagtgctttttttt

SEQ ID NO: 203844 - DNA, 15 bp, Homo sapiens
tgaagtgcttttttt

SEQ ID NO: 203845 - DNA, 15 bp, Homo sapiens
atgaagtgctttttt

SEQ ID NO: 203846 - DNA, 15 bp, Homo sapiens
tatgaagtgcttttt

SEQ ID NO: 203847 - DNA, 15 bp, Homo sapiens
gtatgaagtgctttt

SEQ ID NO: 203848 - DNA, 15 bp, Homo sapiens
ggtatgaagtgcttt

SEQ ID NO: 203849 - DNA, 15 bp, Homo sapiens
cggtatgaagtgctt

SEQ ID NO: 203850 - DNA, 15 bp, Homo sapiens
tcggtatgaagtgct

SEQ ID NO: 203851 - DNA, 15 bp, Homo sapiens
ctcggtatgaagtgc

SEQ ID NO: 203852 - DNA, 15 bp, Homo sapiens
actcggtatgaagtg

SEQ ID NO: 203853 - DNA, 15 bp, Homo sapiens
gactcggtatgaagt

SEQ ID NO: 203854 - DNA, 15 bp, Homo sapiens
tgactcggtatgaag

SEQ ID NO: 203855 - DNA, 15 bp, Homo sapiens
ttgactcggtatgaa

SEQ ID NO: 203856 - DNA, 15 bp, Homo sapiens
attgactcggtatga

SEQ ID NO: 203857 - DNA, 15 bp, Homo sapiens
aattgactcggtatg

SEQ ID NO: 203858 - DNA, 15 bp, Homo sapiens
taattgactcggtat

SEQ ID NO: 203859 - DNA, 15 bp, Homo sapiens
ctaattgactcggta

SEQ ID NO: 203860 - DNA, 15 bp, Homo sapiens
actaattgactcggt

SEQ ID NO: 203861 - DNA, 15 bp, Homo sapiens
tactaattgactcgg

SEQ ID NO: 203862 - DNA, 15 bp, Homo sapiens
ttactaattgactcg

SEQ ID NO: 203863 - DNA, 15 bp, Homo sapiens
gttactaattgactc

SEQ ID NO: 203864 - DNA, 15 bp, Homo sapiens
tgttactaattgact

SEQ ID NO: 203865 - DNA, 15 bp, Homo sapiens
ctgttactaattgac

SEQ ID NO: 203866 - DNA, 15 bp, Homo sapiens
actgttactaattga

SEQ ID NO: 203867 - DNA, 15 bp, Homo sapiens
cactgttactaattg

SEQ ID NO: 203868 - DNA, 15 bp, Homo sapiens
acactgttactaatt

SEQ ID NO: 203869 - DNA, 15 bp, Homo sapiens
cacactgttactaat

SEQ ID NO: 203870 - DNA, 15 bp, Homo sapiens
gcacactgttactaa

SEQ ID NO: 203871 - DNA, 15 bp, Homo sapiens
agcacactgttacta

SEQ ID NO: 203872 - DNA, 15 bp, Homo sapiens
aagcacactgttact

SEQ ID NO: 203873 - DNA, 15 bp, Homo sapiens
aaagcacactgttac

SEQ ID NO: 203874 - DNA, 15 bp, Homo sapiens
gaaagcacactgtta

SEQ ID NO: 203875 - DNA, 15 bp, Homo sapiens
tgaaagcacactgtt

SEQ ID NO: 203876 - DNA, 15 bp, Homo sapiens
ttgaaagcacactgt

SEQ ID NO: 203877 - DNA, 15 bp, Homo sapiens
attgaaagcacactg

SEQ ID NO: 203878 - DNA, 15 bp, Homo sapiens
gattgaaagcacact

SEQ ID NO: 203879 - DNA, 15 bp, Homo sapiens
tgattgaaagcacac

SEQ ID NO: 203880 - DNA, 15 bp, Homo sapiens
ttgattgaaagcaca

SEQ ID NO: 203881 - DNA, 15 bp, Homo sapiens
attgattgaaagcac

SEQ ID NO: 203882 - DNA, 15 bp, Homo sapiens
gattgattgaaagca

SEQ ID NO: 203883 - DNA, 15 bp, Homo sapiens
tgattgattgaaagc

SEQ ID NO: 203884 - DNA, 15 bp, Homo sapiens
gtgattgattgaaag

SEQ ID NO: 203885 - DNA, 15 bp, Homo sapiens
agtgattgattgaaa

SEQ ID NO: 203886 - DNA, 15 bp, Homo sapiens
tagtgattgattgaa

SEQ ID NO: 203887 - DNA, 15 bp, Homo sapiens
ttagtgattgattga

SEQ ID NO: 203888 - DNA, 15 bp, Homo sapiens
cttagtgattgattg

SEQ ID NO: 203889 - DNA, 15 bp, Homo sapiens
tcttagtgattgatt

SEQ ID NO: 203890 - DNA, 15 bp, Homo sapiens
ctcttagtgattgat

SEQ ID NO: 203891 - DNA, 15 bp, Homo sapiens
tctcttagtgattga

SEQ ID NO: 203892 - DNA, 15 bp, Homo sapiens
atctcttagtgattg

SEQ ID NO: 203893 - DNA, 15 bp, Homo sapiens
tatctcttagtgatt

SEQ ID NO: 203894 - DNA, 15 bp, Homo sapiens
ttatctcttagtgat

SEQ ID NO: 203895 - DNA, 15 bp, Homo sapiens
attatctcttagtga

SEQ ID NO: 203896 - DNA, 15 bp, Homo sapiens
aattatctcttagtg

SEQ ID NO: 203897 - DNA, 15 bp, Homo sapiens
aaattatctcttagt

SEQ ID NO: 203898 - DNA, 15 bp, Homo sapiens
taaattatctcttag

SEQ ID NO: 203899 - DNA, 15 bp, Homo sapiens
gtaaattatctctta

SEQ ID NO: 203900 - DNA, 15 bp, Homo sapiens
tgtaaattatctctt

SEQ ID NO: 203901 - DNA, 15 bp, Homo sapiens
atgtaaattatctct

SEQ ID NO: 203902 - DNA, 15 bp, Homo sapiens
tatgtaaattatctc

SEQ ID NO: 203903 - DNA, 15 bp, Homo sapiens
ctatgtaaattatct

SEQ ID NO: 203904 - DNA, 15 bp, Homo sapiens
actatgtaaattatc

SEQ ID NO: 203905 - DNA, 15 bp, Homo sapiens
tactatgtaaattat

SEQ ID NO: 203906 - DNA, 15 bp, Homo sapiens
atactatgtaaatta

SEQ ID NO: 203907 - DNA, 15 bp, Homo sapiens
tatactatgtaaatt

SEQ ID NO: 203908 - DNA, 15 bp, Homo sapiens
ttatactatgtaaat

SEQ ID NO: 203909 - DNA, 15 bp, Homo sapiens
gttatactatgtaaa

SEQ ID NO: 203910 - DNA, 15 bp, Homo sapiens
agttatactatgtaa

SEQ ID NO: 203911 - DNA, 15 bp, Homo sapiens
tagttatactatgta

SEQ ID NO: 203912 - DNA, 15 bp, Homo sapiens
ttagttatactatgt

SEQ ID NO: 203913 - DNA, 15 bp, Homo sapiens
tttagttatactatg

SEQ ID NO: 203914 - DNA, 15 bp, Homo sapiens
atttagttatactat

SEQ ID NO: 203915 - DNA, 15 bp, Homo sapiens
catttagttatacta

SEQ ID NO: 203916 - DNA, 15 bp, Homo sapiens
ccatttagttatact

SEQ ID NO: 203917 - DNA, 15 bp, Homo sapiens
cccatttagttatac

SEQ ID NO: 203918 - DNA, 15 bp, Homo sapiens
acccatttagttata

SEQ ID NO: 203919 - DNA, 15 bp, Homo sapiens
aacccatttagttat

SEQ ID NO: 203920 - DNA, 15 bp, Homo sapiens
taacccatttagtta

SEQ ID NO: 203921 - DNA, 15 bp, Homo sapiens
ataacccatttagtt

SEQ ID NO: 203922 - DNA, 15 bp, Homo sapiens
aataacccatttagt

SEQ ID NO: 203923 - DNA, 15 bp, Homo sapiens
aaataacccatttag

SEQ ID NO: 203924 - DNA, 15 bp, Homo sapiens
taaataacccattta

SEQ ID NO: 203925 - DNA, 15 bp, Homo sapiens
ttaaataacccattt

SEQ ID NO: 203926 - DNA, 15 bp, Homo sapiens
gttaaataacccatt

SEQ ID NO: 203927 - DNA, 15 bp, Homo sapiens
ggttaaataacccat

SEQ ID NO: 203928 - DNA, 15 bp, Homo sapiens
gggttaaataaccca

SEQ ID NO: 203929 - DNA, 15 bp, Homo sapiens
agggttaaataaccc

SEQ ID NO: 203930 - DNA, 15 bp, Homo sapiens
aagggttaaataacc

SEQ ID NO: 203931 - DNA, 15 bp, Homo sapiens
caagggttaaataac

SEQ ID NO: 203932 - DNA, 15 bp, Homo sapiens
ccaagggttaaataa

SEQ ID NO: 203933 - DNA, 15 bp, Homo sapiens
tccaagggttaaata

SEQ ID NO: 203934 - DNA, 15 bp, Homo sapiens
ttccaagggttaaat

SEQ ID NO: 203935 - DNA, 15 bp, Homo sapiens
cttccaagggttaaa

SEQ ID NO: 203936 - DNA, 15 bp, Homo sapiens
gcttccaagggttaa

SEQ ID NO: 203937 - DNA, 15 bp, Homo sapiens
tgcttccaagggtta

SEQ ID NO: 203938 - DNA, 15 bp, Homo sapiens
ctgcttccaagggtt

SEQ ID NO: 203939 - DNA, 15 bp, Homo sapiens
actgcttccaagggt

SEQ ID NO: 203940 - DNA, 15 bp, Homo sapiens
gactgcttccaaggg

SEQ ID NO: 203941 - DNA, 15 bp, Homo sapiens
agactgcttccaagg

SEQ ID NO: 203942 - DNA, 15 bp, Homo sapiens
tagactgcttccaag

SEQ ID NO: 203943 - DNA, 15 bp, Homo sapiens
ctagactgcttccaa

SEQ ID NO: 203944 - DNA, 15 bp, Homo sapiens
cctagactgcttcca

SEQ ID NO: 203945 - DNA, 15 bp, Homo sapiens
acctagactgcttcc

SEQ ID NO: 203946 - DNA, 15 bp, Homo sapiens
aacctagactgcttc

SEQ ID NO: 203947 - DNA, 15 bp, Homo sapiens
taacctagactgctt

SEQ ID NO: 203948 - DNA, 15 bp, Homo sapiens
ttaacctagactgct

SEQ ID NO: 203949 - DNA, 15 bp, Homo sapiens
attaacctagactgc

SEQ ID NO: 203950 - DNA, 15 bp, Homo sapiens
aattaacctagactg

SEQ ID NO: 203951 - DNA, 15 bp, Homo sapiens
taattaacctagact

SEQ ID NO: 203952 - DNA, 15 bp, Homo sapiens
ataattaacctagac

SEQ ID NO: 203953 - DNA, 15 bp, Homo sapiens
gataattaacctaga

SEQ ID NO: 203954 - DNA, 15 bp, Homo sapiens
cgataattaacctag

SEQ ID NO: 203955 - DNA, 15 bp, Homo sapiens
acgataattaaccta

SEQ ID NO: 203956 - DNA, 15 bp, Homo sapiens
aacgataattaacct

SEQ ID NO: 203957 - DNA, 15 bp, Homo sapiens
gaacgataattaacc

SEQ ID NO: 203958 - DNA, 15 bp, Homo sapiens
ggaacgataattaac

SEQ ID NO: 203959 - DNA, 15 bp, Homo sapiens
gggaacgataattaa

SEQ ID NO: 203960 - DNA, 15 bp, Homo sapiens
agggaacgataatta

SEQ ID NO: 203961 - DNA, 15 bp, Homo sapiens
tagggaacgataatt

SEQ ID NO: 203962 - DNA, 15 bp, Homo sapiens
ctagggaacgataat

SEQ ID NO: 203963 - DNA, 15 bp, Homo sapiens
cctagggaacgataa

SEQ ID NO: 203964 - DNA, 15 bp, Homo sapiens
acctagggaacgata

SEQ ID NO: 203965 - DNA, 15 bp, Homo sapiens
gacctagggaacgat

SEQ ID NO: 203966 - DNA, 15 bp, Homo sapiens
tgacctagggaacga

SEQ ID NO: 203967 - DNA, 15 bp, Homo sapiens
atgacctagggaacg

SEQ ID NO: 203968 - DNA, 15 bp, Homo sapiens
catgacctagggaac

SEQ ID NO: 203969 - DNA, 15 bp, Homo sapiens
acatgacctagggaa

SEQ ID NO: 203970 - DNA, 15 bp, Homo sapiens
tacatgacctaggga

SEQ ID NO: 203971 - DNA, 15 bp, Homo sapiens
ctacatgacctaggg

SEQ ID NO: 203972 - DNA, 15 bp, Homo sapiens
actacatgacctagg

SEQ ID NO: 203973 - DNA, 15 bp, Homo sapiens
tactacatgacctag

SEQ ID NO: 203974 - DNA, 15 bp, Homo sapiens
ttactacatgaccta

SEQ ID NO: 203975 - DNA, 15 bp, Homo sapiens
tttactacatgacct

SEQ ID NO: 203976 - DNA, 15 bp, Homo sapiens
ttttactacatgacc

SEQ ID NO: 203977 - DNA, 15 bp, Homo sapiens
tttttactacatgac

SEQ ID NO: 203978 - DNA, 15 bp, Homo sapiens
ctttttactacatga

SEQ ID NO: 203979 - DNA, 15 bp, Homo sapiens
tctttttactacatg

SEQ ID NO: 203980 - DNA, 15 bp, Homo sapiens
gtctttttactacat

SEQ ID NO: 203981 - DNA, 15 bp, Homo sapiens
tgtctttttactaca

SEQ ID NO: 203982 - DNA, 15 bp, Homo sapiens
ctgtctttttactac

SEQ ID NO: 203983 - DNA, 15 bp, Homo sapiens
actgtctttttacta

SEQ ID NO: 203984 - DNA, 15 bp, Homo sapiens
tactgtctttttact

SEQ ID NO: 203985 - DNA, 15 bp, Homo sapiens
ctactgtctttttac

SEQ ID NO: 203986 - DNA, 15 bp, Homo sapiens
tctactgtcttttta

SEQ ID NO: 203987 - DNA, 15 bp, Homo sapiens
ttctactgtcttttt

SEQ ID NO: 203988 - DNA, 15 bp, Homo sapiens
attctactgtctttt

SEQ ID NO: 203989 - DNA, 15 bp, Homo sapiens
gattctactgtcttt

SEQ ID NO: 203990 - DNA, 15 bp, Homo sapiens
ggattctactgtctt

SEQ ID NO: 203991 - DNA, 15 bp, Homo sapiens
tggattctactgtct

SEQ ID NO: 203992 - DNA, 15 bp, Homo sapiens
ttggattctactgtc

SEQ ID NO: 203993 - DNA, 15 bp, Homo sapiens
gttggattctactgt

SEQ ID NO: 203994 - DNA, 15 bp, Homo sapiens
tgttggattctactg

SEQ ID NO: 203995 - DNA, 15 bp, Homo sapiens
atgttggattctact

SEQ ID NO: 203996 - DNA, 15 bp, Homo sapiens
aatgttggattctac

SEQ ID NO: 203997 - DNA, 15 bp, Homo sapiens
taatgttggattcta

SEQ ID NO: 203998 - DNA, 15 bp, Homo sapiens
ttaatgttggattct

SEQ ID NO: 203999 - DNA, 15 bp, Homo sapiens
gttaatgttggattc

SEQ ID NO: 204000 - DNA, 15 bp, Homo sapiens
ggttaatgttggatt

SEQ ID NO: 204001 - DNA, 15 bp, Homo sapiens
aggttaatgttggat

SEQ ID NO: 204002 - DNA, 15 bp, Homo sapiens
aaggttaatgttgga

SEQ ID NO: 204003 - DNA, 15 bp, Homo sapiens
taaggttaatgttgg

SEQ ID NO: 204004 - DNA, 15 bp, Homo sapiens
ttaaggttaatgttg

SEQ ID NO: 204005 - DNA, 15 bp, Homo sapiens
tttaaggttaatgtt

SEQ ID NO: 204006 - DNA, 15 bp, Homo sapiens
atttaaggttaatgt

SEQ ID NO: 204007 - DNA, 15 bp, Homo sapiens
catttaaggttaatg

SEQ ID NO: 204008 - DNA, 15 bp, Homo sapiens
acatttaaggttaat

SEQ ID NO: 204009 - DNA, 15 bp, Homo sapiens
gacatttaaggttaa

SEQ ID NO: 204010 - DNA, 15 bp, Homo sapiens
ggacatttaaggtta

SEQ ID NO: 204011 - DNA, 15 bp, Homo sapiens
tggacatttaaggtt

SEQ ID NO: 204012 - DNA, 15 bp, Homo sapiens
atggacatttaaggt

SEQ ID NO: 204013 - DNA, 15 bp, Homo sapiens
tatggacatttaagg

SEQ ID NO: 204014 - DNA, 15 bp, Homo sapiens
atatggacatttaag

SEQ ID NO: 204015 - DNA, 15 bp, Homo sapiens
aatatggacatttaa

SEQ ID NO: 204016 - DNA, 15 bp, Homo sapiens
caatatggacattta

SEQ ID NO: 204017 - DNA, 15 bp, Homo sapiens
acaatatggacattt

SEQ ID NO: 204018 - DNA, 15 bp, Homo sapiens
gacaatatggacatt

SEQ ID NO: 204019 - DNA, 15 bp, Homo sapiens
tgacaatatggacat

SEQ ID NO: 204020 - DNA, 15 bp, Homo sapiens
ttgacaatatggaca

SEQ ID NO: 204021 - DNA, 15 bp, Homo sapiens
cttgacaatatggac

SEQ ID NO: 204022 - DNA, 15 bp, Homo sapiens
acttgacaatatgga

SEQ ID NO: 204023 - DNA, 15 bp, Homo sapiens
tacttgacaatatgg

SEQ ID NO: 204024 - DNA, 15 bp, Homo sapiens
gtacttgacaatatg

SEQ ID NO: 204025 - DNA, 15 bp, Homo sapiens
agtacttgacaatat

SEQ ID NO: 204026 - DNA, 15 bp, Homo sapiens
cagtacttgacaata

SEQ ID NO: 204027 - DNA, 15 bp, Homo sapiens
gcagtacttgacaat

SEQ ID NO: 204028 - DNA, 15 bp, Homo sapiens
agcagtacttgacaa

SEQ ID NO: 204029 - DNA, 15 bp, Homo sapiens
cagcagtacttgaca

SEQ ID NO: 204030 - DNA, 15 bp, Homo sapiens
acagcagtacttgac

SEQ ID NO: 204031 - DNA, 15 bp, Homo sapiens
gacagcagtacttga

SEQ ID NO: 204032 - DNA, 15 bp, Homo sapiens
agacagcagtacttg

SEQ ID NO: 204033 - DNA, 15 bp, Homo sapiens
cagacagcagtactt

SEQ ID NO: 204034 - DNA, 15 bp, Homo sapiens
gcagacagcagtact

SEQ ID NO: 204035 - DNA, 15 bp, Homo sapiens
ggcagacagcagtac

SEQ ID NO: 204036 - DNA, 15 bp, Homo sapiens
aggcagacagcagta

SEQ ID NO: 204037 - DNA, 15 bp, Homo sapiens
gaggcagacagcagt

SEQ ID NO: 204038 - DNA, 15 bp, Homo sapiens
agaggcagacagcag

SEQ ID NO: 204039 - DNA, 15 bp, Homo sapiens
cagaggcagacagca

SEQ ID NO: 204040 - DNA, 15 bp, Homo sapiens
acagaggcagacagc

SEQ ID NO: 204041 - DNA, 15 bp, Homo sapiens
cacagaggcagacag

SEQ ID NO: 204042 - DNA, 15 bp, Homo sapiens
ccacagaggcagaca

SEQ ID NO: 204043 - DNA, 15 bp, Homo sapiens
cccacagaggcagac

SEQ ID NO: 204044 - DNA, 15 bp, Homo sapiens
tcccacagaggcaga

SEQ ID NO: 204045 - DNA, 15 bp, Homo sapiens
gtcccacagaggcag

SEQ ID NO: 204046 - DNA, 15 bp, Homo sapiens
agtcccacagaggca

SEQ ID NO: 204047 - DNA, 15 bp, Homo sapiens
gagtcccacagaggc

SEQ ID NO: 204048 - DNA, 15 bp, Homo sapiens
agagtcccacagagg

SEQ ID NO: 204049 - DNA, 15 bp, Homo sapiens
tagagtcccacagag

SEQ ID NO: 204050 - DNA, 15 bp, Homo sapiens
ttagagtcccacaga

SEQ ID NO: 204051 - DNA, 15 bp, Homo sapiens
attagagtcccacag

SEQ ID NO: 204052 - DNA, 15 bp, Homo sapiens
aattagagtcccaca

SEQ ID NO: 204053 - DNA, 15 bp, Homo sapiens
aaattagagtcccac

SEQ ID NO: 204054 - DNA, 15 bp, Homo sapiens
caaattagagtccca

SEQ ID NO: 204055 - DNA, 15 bp, Homo sapiens
ccaaattagagtccc

SEQ ID NO: 204056 - DNA, 15 bp, Homo sapiens
cccaaattagagtcc

SEQ ID NO: 204057 - DNA, 15 bp, Homo sapiens
tcccaaattagagtc

SEQ ID NO: 204058 - DNA, 15 bp, Homo sapiens
atcccaaattagagt

SEQ ID NO: 204059 - DNA, 15 bp, Homo sapiens
gatcccaaattagag

SEQ ID NO: 204060 - DNA, 15 bp, Homo sapiens
ggatcccaaattaga

SEQ ID NO: 204061 - DNA, 15 bp, Homo sapiens
aggatcccaaattag

SEQ ID NO: 204062 - DNA, 15 bp, Homo sapiens
aaggatcccaaatta

SEQ ID NO: 204063 - DNA, 15 bp, Homo sapiens
gaaggatcccaaatt

SEQ ID NO: 204064 - DNA, 15 bp, Homo sapiens
tgaaggatcccaaat

SEQ ID NO: 204065 - DNA, 15 bp, Homo sapiens
ttgaaggatcccaaa

SEQ ID NO: 204066 - DNA, 15 bp, Homo sapiens
tttgaaggatcccaa

SEQ ID NO: 204067 - DNA, 15 bp, Homo sapiens
ttttgaaggatccca

SEQ ID NO: 204068 - DNA, 15 bp, Homo sapiens
tttttgaaggatccc

SEQ ID NO: 204069 - DNA, 15 bp, Homo sapiens
ttttttgaaggatcc

SEQ ID NO: 204070 - DNA, 15 bp, Homo sapiens
gttttttgaaggatc

SEQ ID NO: 204071 - DNA, 15 bp, Homo sapiens
tgttttttgaaggat

SEQ ID NO: 204072 - DNA, 15 bp, Homo sapiens
atgttttttgaagga

SEQ ID NO: 204073 - DNA, 15 bp, Homo sapiens
aatgttttttgaagg

SEQ ID NO: 204074 - DNA, 15 bp, Homo sapiens
caatgttttttgaag

SEQ ID NO: 204075 - DNA, 15 bp, Homo sapiens
tcaatgttttttgaa

SEQ ID NO: 204076 - DNA, 15 bp, Homo sapiens
atcaatgttttttga

SEQ ID NO: 204077 - DNA, 15 bp, Homo sapiens
catcaatgttttttg

SEQ ID NO: 204078 - DNA, 15 bp, Homo sapiens
ccatcaatgtttttt

SEQ ID NO: 204079 - DNA, 15 bp, Homo sapiens
cccatcaatgttttt

SEQ ID NO: 204080 - DNA, 15 bp, Homo sapiens
ccccatcaatgtttt

SEQ ID NO: 204081 - DNA, 15 bp, Homo sapiens
cccccatcaatgttt

SEQ ID NO: 204082 - DNA, 15 bp, Homo sapiens
tcccccatcaatgtt

SEQ ID NO: 204083 - DNA, 15 bp, Homo sapiens
ttcccccatcaatgt

SEQ ID NO: 204084 - DNA, 15 bp, Homo sapiens
tttcccccatcaatg

SEQ ID NO: 204085 - DNA, 15 bp, Homo sapiens
ttttcccccatcaat

SEQ ID NO: 204086 - DNA, 15 bp, Homo sapiens
cttttcccccatcaa

SEQ ID NO: 204087 - DNA, 15 bp, Homo sapiens
tcttttcccccatca

SEQ ID NO: 204088 - DNA, 15 bp, Homo sapiens
atcttttcccccatc

SEQ ID NO: 204089 - DNA, 15 bp, Homo sapiens
tatcttttcccccat

SEQ ID NO: 204090 - DNA, 15 bp, Homo sapiens
ctatcttttccccca

SEQ ID NO: 204091 - DNA, 15 bp, Homo sapiens
gctatcttttccccc

SEQ ID NO: 204092 - DNA, 15 bp, Homo sapiens
ggctatcttttcccc

SEQ ID NO: 204093 - DNA, 15 bp, Homo sapiens
aggctatcttttccc

SEQ ID NO: 204094 - DNA, 15 bp, Homo sapiens
aaggctatcttttcc

SEQ ID NO: 204095 - DNA, 15 bp, Homo sapiens
aaaggctatcttttc

SEQ ID NO: 204096 - DNA, 15 bp, Homo sapiens
taaaggctatctttt

SEQ ID NO: 204097 - DNA, 15 bp, Homo sapiens
ttaaaggctatcttt

SEQ ID NO: 204098 - DNA, 15 bp, Homo sapiens
tttaaaggctatctt

SEQ ID NO: 204099 - DNA, 15 bp, Homo sapiens
ttttaaaggctatct

SEQ ID NO: 204100 - DNA, 15 bp, Homo sapiens
tttttaaaggctatc

SEQ ID NO: 204101 - DNA, 15 bp, Homo sapiens
ttttttaaaggctat

SEQ ID NO: 204102 - DNA, 15 bp, Homo sapiens
tttttttaaaggcta

SEQ ID NO: 204103 - DNA, 15 bp, Homo sapiens
ttttttttaaaggct

SEQ ID NO: 204104 - DNA, 15 bp, Homo sapiens
tttttttttaaaggc

SEQ ID NO: 204105 - DNA, 15 bp, Homo sapiens
ttttttttttaaagg

SEQ ID NO: 204106 - DNA, 15 bp, Homo sapiens
tttttttttttaaag

SEQ ID NO: 204107 - DNA, 15 bp, Homo sapiens
gtttttttttttttt

SEQ ID NO: 204108 - DNA, 15 bp, Homo sapiens
tgttttttttttttt

SEQ ID NO: 204109 - DNA, 15 bp, Homo sapiens
ttgtttttttttttt

SEQ ID NO: 204110 - DNA, 15 bp, Homo sapiens
tttgttttttttttt

SEQ ID NO: 204111 - DNA, 15 bp, Homo sapiens
gtttgtttttttttt

SEQ ID NO: 204112 - DNA, 15 bp, Homo sapiens
ggtttgttttttttt

SEQ ID NO: 204113 - DNA, 15 bp, Homo sapiens
aggtttgtttttttt

SEQ ID NO: 204114 - DNA, 15 bp, Homo sapiens
taggtttgttttttt

SEQ ID NO: 204115 - DNA, 15 bp, Homo sapiens
ataggtttgtttttt

SEQ ID NO: 204116 - DNA, 15 bp, Homo sapiens
cataggtttgttttt

SEQ ID NO: 204117 - DNA, 15 bp, Homo sapiens
acataggtttgtttt

SEQ ID NO: 204118 - DNA, 15 bp, Homo sapiens
cacataggtttgttt

SEQ ID NO: 204119 - DNA, 15 bp, Homo sapiens
tcacataggtttgtt

SEQ ID NO: 204120 - DNA, 15 bp, Homo sapiens
ctcacataggtttgt

SEQ ID NO: 204121 - DNA, 15 bp, Homo sapiens
actcacataggtttg

SEQ ID NO: 204122 - DNA, 15 bp, Homo sapiens
gactcacataggttt

SEQ ID NO: 204123 - DNA, 15 bp, Homo sapiens
agactcacataggtt

SEQ ID NO: 204124 - DNA, 15 bp, Homo sapiens
tagactcacataggt

SEQ ID NO: 204125 - DNA, 15 bp, Homo sapiens
atagactcacatagg

SEQ ID NO: 204126 - DNA, 15 bp, Homo sapiens
catagactcacatag

SEQ ID NO: 204127 - DNA, 15 bp, Homo sapiens
acatagactcacata

SEQ ID NO: 204128 - DNA, 15 bp, Homo sapiens
cacatagactcacat

SEQ ID NO: 204129 - DNA, 15 bp, Homo sapiens
tcacatagactcaca

SEQ ID NO: 204130 - DNA, 15 bp, Homo sapiens
ctcacatagactcac

SEQ ID NO: 204131 - DNA, 15 bp, Homo sapiens
cctcacatagactca

SEQ ID NO: 204132 - DNA, 15 bp, Homo sapiens
acctcacatagactc

SEQ ID NO: 204133 - DNA, 15 bp, Homo sapiens
tacctcacatagact

SEQ ID NO: 204134 - DNA, 15 bp, Homo sapiens
ctacctcacatagac

SEQ ID NO: 204135 - DNA, 15 bp, Homo sapiens
tctacctcacataga

SEQ ID NO: 204136 - DNA, 15 bp, Homo sapiens
gtctacctcacatag

SEQ ID NO: 204137 - DNA, 15 bp, Homo sapiens
agtctacctcacata

SEQ ID NO: 204138 - DNA, 15 bp, Homo sapiens
gagtctacctcacat

SEQ ID NO: 204139 - DNA, 15 bp, Homo sapiens
tgagtctacctcaca

SEQ ID NO: 204140 - DNA, 15 bp, Homo sapiens
gtgagtctacctcac

SEQ ID NO: 204141 - DNA, 15 bp, Homo sapiens
tgtgagtctacctca

SEQ ID NO: 204142 - DNA, 15 bp, Homo sapiens
atgtgagtctacctc

SEQ ID NO: 204143 - DNA, 15 bp, Homo sapiens
tatgtgagtctacct

SEQ ID NO: 204144 - DNA, 15 bp, Homo sapiens
ctatgtgagtctacc

SEQ ID NO: 204145 - DNA, 15 bp, Homo sapiens
actatgtgagtctac

SEQ ID NO: 204146 - DNA, 15 bp, Homo sapiens
aactatgtgagtcta

SEQ ID NO: 204147 - DNA, 15 bp, Homo sapiens
aaactatgtgagtct

SEQ ID NO: 204148 - DNA, 15 bp, Homo sapiens
gaaactatgtgagtc

SEQ ID NO: 204149 - DNA, 15 bp, Homo sapiens
ggaaactatgtgagt

SEQ ID NO: 204150 - DNA, 15 bp, Homo sapiens
aggaaactatgtgag

SEQ ID NO: 204151 - DNA, 15 bp, Homo sapiens
taggaaactatgtga

SEQ ID NO: 204152 - DNA, 15 bp, Homo sapiens
ttaggaaactatgtg

SEQ ID NO: 204153 - DNA, 15 bp, Homo sapiens
tttaggaaactatgt

SEQ ID NO: 204154 - DNA, 15 bp, Homo sapiens
ttttaggaaactatg

SEQ ID NO: 204155 - DNA, 15 bp, Homo sapiens
cttttaggaaactat

SEQ ID NO: 204156 - DNA, 15 bp, Homo sapiens
tcttttaggaaacta

SEQ ID NO: 204157 - DNA, 15 bp, Homo sapiens
atcttttaggaaact

SEQ ID NO: 204158 - DNA, 15 bp, Homo sapiens
tatcttttaggaaac

SEQ ID NO: 204159 - DNA, 15 bp, Homo sapiens
ctatcttttaggaaa

SEQ ID NO: 204160 - DNA, 15 bp, Homo sapiens
gctatcttttaggaa

SEQ ID NO: 204161 - DNA, 15 bp, Homo sapiens
tgctatcttttagga

SEQ ID NO: 204162 - DNA, 15 bp, Homo sapiens
ttgctatcttttagg

SEQ ID NO: 204163 - DNA, 15 bp, Homo sapiens
tttgctatcttttag

SEQ ID NO: 204164 - DNA, 15 bp, Homo sapiens
ctttgctatctttta

SEQ ID NO: 204165 - DNA, 15 bp, Homo sapiens
gctttgctatctttt

SEQ ID NO: 204166 - DNA, 15 bp, Homo sapiens
tgctttgctatcttt

SEQ ID NO: 204167 - DNA, 15 bp, Homo sapiens
ctgctttgctatctt

SEQ ID NO: 204168 - DNA, 15 bp, Homo sapiens
actgctttgctatct

SEQ ID NO: 204169 - DNA, 15 bp, Homo sapiens
tactgctttgctatc

SEQ ID NO: 204170 - DNA, 15 bp, Homo sapiens
atactgctttgctat

SEQ ID NO: 204171 - DNA, 15 bp, Homo sapiens
aatactgctttgcta

SEQ ID NO: 204172 - DNA, 15 bp, Homo sapiens
taatactgctttgct

SEQ ID NO: 204173 - DNA, 15 bp, Homo sapiens
ataatactgctttgc

SEQ ID NO: 204174 - DNA, 15 bp, Homo sapiens
cataatactgctttg

SEQ ID NO: 204175 - DNA, 15 bp, Homo sapiens
acataatactgcttt

SEQ ID NO: 204176 - DNA, 15 bp, Homo sapiens
tacataatactgctt

SEQ ID NO: 204177 - DNA, 15 bp, Homo sapiens
ctacataatactgct

SEQ ID NO: 204178 - DNA, 15 bp, Homo sapiens
actacataatactgc

SEQ ID NO: 204179 - DNA, 15 bp, Homo sapiens
cactacataatactg

SEQ ID NO: 204180 - DNA, 15 bp, Homo sapiens
ccactacataatact

SEQ ID NO: 204181 - DNA, 15 bp, Homo sapiens
gccactacataatac

SEQ ID NO: 204182 - DNA, 15 bp, Homo sapiens
agccactacataata

SEQ ID NO: 204183 - DNA, 15 bp, Homo sapiens
cagccactacataat

SEQ ID NO: 204184 - DNA, 15 bp, Homo sapiens
tcagccactacataa

SEQ ID NO: 204185 - DNA, 15 bp, Homo sapiens
ttcagccactacata

SEQ ID NO: 204186 - DNA, 15 bp, Homo sapiens
tttcagccactacat

SEQ ID NO: 204187 - DNA, 15 bp, Homo sapiens
ctttcagccactaca

SEQ ID NO: 204188 - DNA, 15 bp, Homo sapiens
actttcagccactac

SEQ ID NO: 204189 - DNA, 15 bp, Homo sapiens
cactttcagccacta

SEQ ID NO: 204190 - DNA, 15 bp, Homo sapiens
acactttcagccact

SEQ ID NO: 204191 - DNA, 15 bp, Homo sapiens
cacactttcagccac

SEQ ID NO: 204192 - DNA, 15 bp, Homo sapiens
tcacactttcagcca

SEQ ID NO: 204193 - DNA, 15 bp, Homo sapiens
ctcacactttcagcc

SEQ ID NO: 204194 - DNA, 15 bp, Homo sapiens
actcacactttcagc

SEQ ID NO: 204195 - DNA, 15 bp, Homo sapiens
aactcacactttcag

SEQ ID NO: 204196 - DNA, 15 bp, Homo sapiens
gaactcacactttca

SEQ ID NO: 204197 - DNA, 15 bp, Homo sapiens
ggaactcacactttc

SEQ ID NO: 204198 - DNA, 15 bp, Homo sapiens
cggaactcacacttt

SEQ ID NO: 204199 - DNA, 15 bp, Homo sapiens
ccggaactcacactt

SEQ ID NO: 204200 - DNA, 15 bp, Homo sapiens
tccggaactcacact

SEQ ID NO: 204201 - DNA, 15 bp, Homo sapiens
ctccggaactcacac

SEQ ID NO: 204202 - DNA, 15 bp, Homo sapiens
gctccggaactcaca

SEQ ID NO: 204203 - DNA, 15 bp, Homo sapiens
ggctccggaactcac

SEQ ID NO: 204204 - DNA, 15 bp, Homo sapiens
aggctccggaactca

SEQ ID NO: 204205 - DNA, 15 bp, Homo sapiens
caggctccggaactc

SEQ ID NO: 204206 - DNA, 15 bp, Homo sapiens
tcaggctccggaact

SEQ ID NO: 204207 - DNA, 15 bp, Homo sapiens
gtcaggctccggaac

SEQ ID NO: 204208 - DNA, 15 bp, Homo sapiens
tgtcaggctccggaa

SEQ ID NO: 204209 - DNA, 15 bp, Homo sapiens
ttgtcaggctccgga

SEQ ID NO: 204210 - DNA, 15 bp, Homo sapiens
gttgtcaggctccgg

SEQ ID NO: 204211 - DNA, 15 bp, Homo sapiens
agttgtcaggctccg

SEQ ID NO: 204212 - DNA, 15 bp, Homo sapiens
cagttgtcaggctcc

SEQ ID NO: 204213 - DNA, 15 bp, Homo sapiens
tcagttgtcaggctc

SEQ ID NO: 204214 - DNA, 15 bp, Homo sapiens
atcagttgtcaggct

SEQ ID NO: 204215 - DNA, 15 bp, Homo sapiens
aatcagttgtcaggc

SEQ ID NO: 204216 - DNA, 15 bp, Homo sapiens
gaatcagttgtcagg

SEQ ID NO: 204217 - DNA, 15 bp, Homo sapiens
tgaatcagttgtcag

SEQ ID NO: 204218 - DNA, 15 bp, Homo sapiens
ttgaatcagttgtca

SEQ ID NO: 204219 - DNA, 15 bp, Homo sapiens
tttgaatcagttgtc

SEQ ID NO: 204220 - DNA, 15 bp, Homo sapiens
ctttgaatcagttgt

SEQ ID NO: 204221 - DNA, 15 bp, Homo sapiens
gctttgaatcagttg

SEQ ID NO: 204222 - DNA, 15 bp, Homo sapiens
tgctttgaatcagtt

SEQ ID NO: 204223 - DNA, 15 bp, Homo sapiens
atgctttgaatcagt

SEQ ID NO: 204224 - DNA, 15 bp, Homo sapiens
catgctttgaatcag

SEQ ID NO: 204225 - DNA, 15 bp, Homo sapiens
ccatgctttgaatca

SEQ ID NO: 204226 - DNA, 15 bp, Homo sapiens
gccatgctttgaatc

SEQ ID NO: 204227 - DNA, 15 bp, Homo sapiens
agccatgctttgaat

SEQ ID NO: 204228 - DNA, 15 bp, Homo sapiens
aagccatgctttgaa

SEQ ID NO: 204229 - DNA, 15 bp, Homo sapiens
taagccatgctttga

SEQ ID NO: 204230 - DNA, 15 bp, Homo sapiens
ctaagccatgctttg

SEQ ID NO: 204231 - DNA, 15 bp, Homo sapiens
actaagccatgcttt

SEQ ID NO: 204232 - DNA, 15 bp, Homo sapiens
tactaagccatgctt

SEQ ID NO: 204233 - DNA, 15 bp, Homo sapiens
gtactaagccatgct

SEQ ID NO: 204234 - DNA, 15 bp, Homo sapiens
agtactaagccatgc

SEQ ID NO: 204235 - DNA, 15 bp, Homo sapiens
aagtactaagccatg

SEQ ID NO: 204236 - DNA, 15 bp, Homo sapiens
gaagtactaagccat

SEQ ID NO: 204237 - DNA, 15 bp, Homo sapiens
ggaagtactaagcca

SEQ ID NO: 204238 - DNA, 15 bp, Homo sapiens
aggaagtactaagcc

SEQ ID NO: 204239 - DNA, 15 bp, Homo sapiens
taggaagtactaagc

SEQ ID NO: 204240 - DNA, 15 bp, Homo sapiens
ttaggaagtactaag

SEQ ID NO: 204241 - DNA, 15 bp, Homo sapiens
gttaggaagtactaa

SEQ ID NO: 204242 - DNA, 15 bp, Homo sapiens
agttaggaagtacta

SEQ ID NO: 204243 - DNA, 15 bp, Homo sapiens
gagttaggaagtact

SEQ ID NO: 204244 - DNA, 15 bp, Homo sapiens
agagttaggaagtac

SEQ ID NO: 204245 - DNA, 15 bp, Homo sapiens
cagagttaggaagta

SEQ ID NO: 204246 - DNA, 15 bp, Homo sapiens
tcagagttaggaagt

SEQ ID NO: 204247 - DNA, 15 bp, Homo sapiens
gtcagagttaggaag

SEQ ID NO: 204248 - DNA, 15 bp, Homo sapiens
ggtcagagttaggaa

SEQ ID NO: 204249 - DNA, 15 bp, Homo sapiens
aggtcagagttagga

SEQ ID NO: 204250 - DNA, 15 bp, Homo sapiens
aaggtcagagttagg

SEQ ID NO: 204251 - DNA, 15 bp, Homo sapiens
caaggtcagagttag

SEQ ID NO: 204252 - DNA, 15 bp, Homo sapiens
ccaaggtcagagtta

SEQ ID NO: 204253 - DNA, 15 bp, Homo sapiens
cccaaggtcagagtt

SEQ ID NO: 204254 - DNA, 15 bp, Homo sapiens
gcccaaggtcagagt

SEQ ID NO: 204255 - DNA, 15 bp, Homo sapiens
tgcccaaggtcagag

SEQ ID NO: 204256 - DNA, 15 bp, Homo sapiens
ttgcccaaggtcaga

SEQ ID NO: 204257 - DNA, 15 bp, Homo sapiens
cttgcccaaggtcag

SEQ ID NO: 204258 - DNA, 15 bp, Homo sapiens
acttgcccaaggtca

SEQ ID NO: 204259 - DNA, 15 bp, Homo sapiens
aacttgcccaaggtc

SEQ ID NO: 204260 - DNA, 15 bp, Homo sapiens
taacttgcccaaggt

SEQ ID NO: 204261 - DNA, 15 bp, Homo sapiens
gtaacttgcccaagg

SEQ ID NO: 204262 - DNA, 15 bp, Homo sapiens
agtaacttgcccaag

SEQ ID NO: 204263 - DNA, 15 bp, Homo sapiens
aagtaacttgcccaa

SEQ ID NO: 204264 - DNA, 15 bp, Homo sapiens
taagtaacttgccca

SEQ ID NO: 204265 - DNA, 15 bp, Homo sapiens
ttaagtaacttgccc

SEQ ID NO: 204266 - DNA, 15 bp, Homo sapiens
gttaagtaacttgcc

SEQ ID NO: 204267 - DNA, 15 bp, Homo sapiens
ggttaagtaacttgc

SEQ ID NO: 204268 - DNA, 15 bp, Homo sapiens
aggttaagtaacttg

SEQ ID NO: 204269 - DNA, 15 bp, Homo sapiens
gaggttaagtaactt

SEQ ID NO: 204270 - DNA, 15 bp, Homo sapiens
agaggttaagtaact

SEQ ID NO: 204271 - DNA, 15 bp, Homo sapiens
gagaggttaagtaac

SEQ ID NO: 204272 - DNA, 15 bp, Homo sapiens
agagaggttaagtaa

SEQ ID NO: 204273 - DNA, 15 bp, Homo sapiens
cagagaggttaagta

SEQ ID NO: 204274 - DNA, 15 bp, Homo sapiens
acagagaggttaagt

SEQ ID NO: 204275 - DNA, 15 bp, Homo sapiens
cacagagaggttaag

SEQ ID NO: 204276 - DNA, 15 bp, Homo sapiens
acacagagaggttaa

SEQ ID NO: 204277 - DNA, 15 bp, Homo sapiens
gacacagagaggtta

SEQ ID NO: 204278 - DNA, 15 bp, Homo sapiens
ggacacagagaggtt

SEQ ID NO: 204279 - DNA, 15 bp, Homo sapiens
gggacacagagaggt

SEQ ID NO: 204280 - DNA, 15 bp, Homo sapiens
tgggacacagagagg

SEQ ID NO: 204281 - DNA, 15 bp, Homo sapiens
atgggacacagagag

SEQ ID NO: 204282 - DNA, 15 bp, Homo sapiens
tatgggacacagaga

SEQ ID NO: 204283 - DNA, 15 bp, Homo sapiens
atatgggacacagag

SEQ ID NO: 204284 - DNA, 15 bp, Homo sapiens
catatgggacacaga

SEQ ID NO: 204285 - DNA, 15 bp, Homo sapiens
acatatgggacacag

SEQ ID NO: 204286 - DNA, 15 bp, Homo sapiens
cacatatgggacaca

SEQ ID NO: 204287 - DNA, 15 bp, Homo sapiens
tcacatatgggacac

SEQ ID NO: 204288 - DNA, 15 bp, Homo sapiens
atcacatatgggaca

SEQ ID NO: 204289 - DNA, 15 bp, Homo sapiens
aatcacatatgggac

SEQ ID NO: 204290 - DNA, 15 bp, Homo sapiens
taatcacatatggga

SEQ ID NO: 204291 - DNA, 15 bp, Homo sapiens
ctaatcacatatggg

SEQ ID NO: 204292 - DNA, 15 bp, Homo sapiens
cctaatcacatatgg

SEQ ID NO: 204293 - DNA, 15 bp, Homo sapiens
ccctaatcacatatg

SEQ ID NO: 204294 - DNA, 15 bp, Homo sapiens
accctaatcacatat

SEQ ID NO: 204295 - DNA, 15 bp, Homo sapiens
caccctaatcacata

SEQ ID NO: 204296 - DNA, 15 bp, Homo sapiens
tcaccctaatcacat

SEQ ID NO: 204297 - DNA, 15 bp, Homo sapiens
ctcaccctaatcaca

SEQ ID NO: 204298 - DNA, 15 bp, Homo sapiens
cctcaccctaatcac

SEQ ID NO: 204299 - DNA, 15 bp, Homo sapiens
acctcaccctaatca

SEQ ID NO: 204300 - DNA, 15 bp, Homo sapiens
aacctcaccctaatc

SEQ ID NO: 204301 - DNA, 15 bp, Homo sapiens
caacctcaccctaat

SEQ ID NO: 204302 - DNA, 15 bp, Homo sapiens
tcaacctcaccctaa

SEQ ID NO: 204303 - DNA, 15 bp, Homo sapiens
atcaacctcacccta

SEQ ID NO: 204304 - DNA, 15 bp, Homo sapiens
tatcaacctcaccct

SEQ ID NO: 204305 - DNA, 15 bp, Homo sapiens
ttatcaacctcaccc

SEQ ID NO: 204306 - DNA, 15 bp, Homo sapiens
attatcaacctcacc

SEQ ID NO: 204307 - DNA, 15 bp, Homo sapiens
tattatcaacctcac

SEQ ID NO: 204308 - DNA, 15 bp, Homo sapiens
ctattatcaacctca

SEQ ID NO: 204309 - DNA, 15 bp, Homo sapiens
gctattatcaacctc

SEQ ID NO: 204310 - DNA, 15 bp, Homo sapiens
tgctattatcaacct

SEQ ID NO: 204311 - DNA, 15 bp, Homo sapiens
ctgctattatcaacc

SEQ ID NO: 204312 - DNA, 15 bp, Homo sapiens
gctgctattatcaac

SEQ ID NO: 204313 - DNA, 15 bp, Homo sapiens
ggctgctattatcaa

SEQ ID NO: 204314 - DNA, 15 bp, Homo sapiens
tggctgctattatca

SEQ ID NO: 204315 - DNA, 15 bp, Homo sapiens
atggctgctattatc

SEQ ID NO: 204316 - DNA, 15 bp, Homo sapiens
tatggctgctattat

SEQ ID NO: 204317 - DNA, 15 bp, Homo sapiens
ctatggctgctatta

SEQ ID NO: 204318 - DNA, 15 bp, Homo sapiens
tctatggctgctatt

SEQ ID NO: 204319 - DNA, 15 bp, Homo sapiens
ctctatggctgctat

SEQ ID NO: 204320 - DNA, 15 bp, Homo sapiens
actctatggctgcta

SEQ ID NO: 204321 - DNA, 15 bp, Homo sapiens
aactctatggctgct

SEQ ID NO: 204322 - DNA, 15 bp, Homo sapiens
taactctatggctgc

SEQ ID NO: 204323 - DNA, 15 bp, Homo sapiens
ttaactctatggctg

SEQ ID NO: 204324 - DNA, 15 bp, Homo sapiens
cttaactctatggct

SEQ ID NO: 204325 - DNA, 15 bp, Homo sapiens
tcttaactctatggc

SEQ ID NO: 204326 - DNA, 15 bp, Homo sapiens
ctcttaactctatgg

SEQ ID NO: 204327 - DNA, 15 bp, Homo sapiens
cctcttaactctatg

SEQ ID NO: 204328 - DNA, 15 bp, Homo sapiens
tcctcttaactctat

SEQ ID NO: 204329 - DNA, 15 bp, Homo sapiens
atcctcttaactcta

SEQ ID NO: 204330 - DNA, 15 bp, Homo sapiens
aatcctcttaactct

SEQ ID NO: 204331 - DNA, 15 bp, Homo sapiens
taatcctcttaactc

SEQ ID NO: 204332 - DNA, 15 bp, Homo sapiens
ttaatcctcttaact

SEQ ID NO: 204333 - DNA, 15 bp, Homo sapiens
cttaatcctcttaac

SEQ ID NO: 204334 - DNA, 15 bp, Homo sapiens
acttaatcctcttaa

SEQ ID NO: 204335 - DNA, 15 bp, Homo sapiens
cacttaatcctctta

SEQ ID NO: 204336 - DNA, 15 bp, Homo sapiens
gcacttaatcctctt

SEQ ID NO: 204337 - DNA, 15 bp, Homo sapiens
agcacttaatcctct

SEQ ID NO: 204338 - DNA, 15 bp, Homo sapiens
tagcacttaatcctc

SEQ ID NO: 204339 - DNA, 15 bp, Homo sapiens
atagcacttaatcct

SEQ ID NO: 204340 - DNA, 15 bp, Homo sapiens
tatagcacttaatcc

SEQ ID NO: 204341 - DNA, 15 bp, Homo sapiens
ttatagcacttaatc

SEQ ID NO: 204342 - DNA, 15 bp, Homo sapiens
attatagcacttaat

SEQ ID NO: 204343 - DNA, 15 bp, Homo sapiens
cattatagcacttaa

SEQ ID NO: 204344 - DNA, 15 bp, Homo sapiens
gcattatagcactta

SEQ ID NO: 204345 - DNA, 15 bp, Homo sapiens
tgcattatagcactt

SEQ ID NO: 204346 - DNA, 15 bp, Homo sapiens
ttgcattatagcact

SEQ ID NO: 204347 - DNA, 15 bp, Homo sapiens
cttgcattatagcac

SEQ ID NO: 204348 - DNA, 15 bp, Homo sapiens
acttgcattatagca

SEQ ID NO: 204349 - DNA, 15 bp, Homo sapiens
tacttgcattatagc

SEQ ID NO: 204350 - DNA, 15 bp, Homo sapiens
ctacttgcattatag

SEQ ID NO: 204351 - DNA, 15 bp, Homo sapiens
tctacttgcattata

SEQ ID NO: 204352 - DNA, 15 bp, Homo sapiens
ctctacttgcattat

SEQ ID NO: 204353 - DNA, 15 bp, Homo sapiens
gctctacttgcatta

SEQ ID NO: 204354 - DNA, 15 bp, Homo sapiens
agctctacttgcatt

SEQ ID NO: 204355 - DNA, 15 bp, Homo sapiens
gagctctacttgcat

SEQ ID NO: 204356 - DNA, 15 bp, Homo sapiens
agagctctacttgca

SEQ ID NO: 204357 - DNA, 15 bp, Homo sapiens
aagagctctacttgc

SEQ ID NO: 204358 - DNA, 15 bp, Homo sapiens
taagagctctacttg

SEQ ID NO: 204359 - DNA, 15 bp, Homo sapiens
gtaagagctctactt

SEQ ID NO: 204360 - DNA, 15 bp, Homo sapiens
tgtaagagctctact

SEQ ID NO: 204361 - DNA, 15 bp, Homo sapiens
ttgtaagagctctac

SEQ ID NO: 204362 - DNA, 15 bp, Homo sapiens
gttgtaagagctcta

SEQ ID NO: 204363 - DNA, 15 bp, Homo sapiens
tgttgtaagagctct

SEQ ID NO: 204364 - DNA, 15 bp, Homo sapiens
ctgttgtaagagctc

SEQ ID NO: 204365 - DNA, 15 bp, Homo sapiens
actgttgtaagagct

SEQ ID NO: 204366 - DNA, 15 bp, Homo sapiens
aactgttgtaagagc

SEQ ID NO: 204367 - DNA, 15 bp, Homo sapiens
aaactgttgtaagag

SEQ ID NO: 204368 - DNA, 15 bp, Homo sapiens
gaaactgttgtaaga

SEQ ID NO: 204369 - DNA, 15 bp, Homo sapiens
agaaactgttgtaag

SEQ ID NO: 204370 - DNA, 15 bp, Homo sapiens
cagaaactgttgtaa

SEQ ID NO: 204371 - DNA, 15 bp, Homo sapiens
ccagaaactgttgta

SEQ ID NO: 204372 - DNA, 15 bp, Homo sapiens
accagaaactgttgt

SEQ ID NO: 204373 - DNA, 15 bp, Homo sapiens
taccagaaactgttg

SEQ ID NO: 204374 - DNA, 15 bp, Homo sapiens
ttaccagaaactgtt

SEQ ID NO: 204375 - DNA, 15 bp, Homo sapiens
tttaccagaaactgt

SEQ ID NO: 204376 - DNA, 15 bp, Homo sapiens
atttaccagaaactg

SEQ ID NO: 204377 - DNA, 15 bp, Homo sapiens
gatttaccagaaact

SEQ ID NO: 204378 - DNA, 15 bp, Homo sapiens
tgatttaccagaaac

SEQ ID NO: 204379 - DNA, 15 bp, Homo sapiens
gtgatttaccagaaa

SEQ ID NO: 204380 - DNA, 15 bp, Homo sapiens
agtgatttaccagaa

SEQ ID NO: 204381 - DNA, 15 bp, Homo sapiens
gagtgatttaccaga

SEQ ID NO: 204382 - DNA, 15 bp, Homo sapiens
tgagtgatttaccag

SEQ ID NO: 204383 - DNA, 15 bp, Homo sapiens
ttgagtgatttacca

SEQ ID NO: 204384 - DNA, 15 bp, Homo sapiens
attgagtgatttacc

SEQ ID NO: 204385 - DNA, 15 bp, Homo sapiens
tattgagtgatttac

SEQ ID NO: 204386 - DNA, 15 bp, Homo sapiens
ttattgagtgattta

SEQ ID NO: 204387 - DNA, 15 bp, Homo sapiens
tttattgagtgattt

SEQ ID NO: 204388 - DNA, 15 bp, Homo sapiens
atttattgagtgatt

SEQ ID NO: 204389 - DNA, 15 bp, Homo sapiens
aatttattgagtgat

SEQ ID NO: 204390 - DNA, 15 bp, Homo sapiens
gaatttattgagtga

SEQ ID NO: 204391 - DNA, 15 bp, Homo sapiens
tgaatttattgagtg

SEQ ID NO: 204392 - DNA, 15 bp, Homo sapiens
ctgaatttattgagt

SEQ ID NO: 204393 - DNA, 15 bp, Homo sapiens
tctgaatttattgag

SEQ ID NO: 204394 - DNA, 15 bp, Homo sapiens
gtctgaatttattga

SEQ ID NO: 204395 - DNA, 15 bp, Homo sapiens
tgtctgaatttattg

SEQ ID NO: 204396 - DNA, 15 bp, Homo sapiens
atgtctgaatttatt

SEQ ID NO: 204397 - DNA, 15 bp, Homo sapiens
tatgtctgaatttat

SEQ ID NO: 204398 - DNA, 15 bp, Homo sapiens
gtatgtctgaattta

SEQ ID NO: 204399 - DNA, 15 bp, Homo sapiens
agtatgtctgaattt

SEQ ID NO: 204400 - DNA, 15 bp, Homo sapiens
tagtatgtctgaatt

SEQ ID NO: 204401 - DNA, 15 bp, Homo sapiens
atagtatgtctgaat

SEQ ID NO: 204402 - DNA, 15 bp, Homo sapiens
aatagtatgtctgaa

SEQ ID NO: 204403 - DNA, 15 bp, Homo sapiens
taatagtatgtctga

SEQ ID NO: 204404 - DNA, 15 bp, Homo sapiens
ataatagtatgtctg

SEQ ID NO: 204405 - DNA, 15 bp, Homo sapiens
aataatagtatgtct

SEQ ID NO: 204406 - DNA, 15 bp, Homo sapiens
aaataatagtatgtc

SEQ ID NO: 204407 - DNA, 15 bp, Homo sapiens
aaaataatagtatgt

SEQ ID NO: 204408 - DNA, 15 bp, Homo sapiens
taaaataatagtatg

SEQ ID NO: 204409 - DNA, 15 bp, Homo sapiens
ttaaaataatagtat

SEQ ID NO: 204410 - DNA, 15 bp, Homo sapiens
cttaaaataatagta

SEQ ID NO: 204411 - DNA, 15 bp, Homo sapiens
tcttaaaataatagt

SEQ ID NO: 204412 - DNA, 15 bp, Homo sapiens
ttcttaaaataatag

SEQ ID NO: 204413 - DNA, 15 bp, Homo sapiens
tttcttaaaataata

SEQ ID NO: 204414 - DNA, 15 bp, Homo sapiens
atttcttaaaataat

SEQ ID NO: 204415 - DNA, 15 bp, Homo sapiens
gatttcttaaaataa

SEQ ID NO: 204416 - DNA, 15 bp, Homo sapiens
agatttcttaaaata

SEQ ID NO: 204417 - DNA, 15 bp, Homo sapiens
gagatttcttaaaat

SEQ ID NO: 204418 - DNA, 15 bp, Homo sapiens
tgagatttcttaaaa

SEQ ID NO: 204419 - DNA, 15 bp, Homo sapiens
ttgagatttcttaaa

SEQ ID NO: 204420 - DNA, 15 bp, Homo sapiens
tttgagatttcttaa

SEQ ID NO: 204421 - DNA, 15 bp, Homo sapiens
ctttgagatttctta

SEQ ID NO: 204422 - DNA, 15 bp, Homo sapiens
tctttgagatttctt

SEQ ID NO: 204423 - DNA, 15 bp, Homo sapiens
ctctttgagatttct

SEQ ID NO: 204424 - DNA, 15 bp, Homo sapiens
actctttgagatttc

SEQ ID NO: 204425 - DNA, 15 bp, Homo sapiens
aactctttgagattt

SEQ ID NO: 204426 - DNA, 15 bp, Homo sapiens
aaactctttgagatt

SEQ ID NO: 204427 - DNA, 15 bp, Homo sapiens
aaaactctttgagat

SEQ ID NO: 204428 - DNA, 15 bp, Homo sapiens
gaaaactctttgaga

SEQ ID NO: 204429 - DNA, 15 bp, Homo sapiens
agaaaactctttgag

SEQ ID NO: 204430 - DNA, 15 bp, Homo sapiens
aagaaaactctttga

SEQ ID NO: 204431 - DNA, 15 bp, Homo sapiens
caagaaaactctttg

SEQ ID NO: 204432 - DNA, 15 bp, Homo sapiens
acaagaaaactcttt

SEQ ID NO: 204433 - DNA, 15 bp, Homo sapiens
tacaagaaaactctt

SEQ ID NO: 204434 - DNA, 15 bp, Homo sapiens
gtacaagaaaactct

SEQ ID NO: 204435 - DNA, 15 bp, Homo sapiens
ggtacaagaaaactc

SEQ ID NO: 204436 - DNA, 15 bp, Homo sapiens
aggtacaagaaaact

SEQ ID NO: 204437 - DNA, 15 bp, Homo sapiens
aaggtacaagaaaac

SEQ ID NO: 204438 - DNA, 15 bp, Homo sapiens
taaggtacaagaaaa

SEQ ID NO: 204439 - DNA, 15 bp, Homo sapiens
ttaaggtacaagaaa

SEQ ID NO: 204440 - DNA, 15 bp, Homo sapiens
tttaaggtacaagaa

SEQ ID NO: 204441 - DNA, 15 bp, Homo sapiens
ttttaaggtacaaga

SEQ ID NO: 204442 - DNA, 15 bp, Homo sapiens
attttaaggtacaag

SEQ ID NO: 204443 - DNA, 15 bp, Homo sapiens
aattttaaggtacaa

SEQ ID NO: 204444 - DNA, 15 bp, Homo sapiens
gaattttaaggtaca

SEQ ID NO: 204445 - DNA, 15 bp, Homo sapiens
agaattttaaggtac

SEQ ID NO: 204446 - DNA, 15 bp, Homo sapiens
gagaattttaaggta

SEQ ID NO: 204447 - DNA, 15 bp, Homo sapiens
ggagaattttaaggt

SEQ ID NO: 204448 - DNA, 15 bp, Homo sapiens
aggagaattttaagg

SEQ ID NO: 204449 - DNA, 15 bp, Homo sapiens
taggagaattttaag

SEQ ID NO: 204450 - DNA, 15 bp, Homo sapiens
ctaggagaattttaa

SEQ ID NO: 204451 - DNA, 15 bp, Homo sapiens
actaggagaatttta

SEQ ID NO: 204452 - DNA, 15 bp, Homo sapiens
cactaggagaatttt

SEQ ID NO: 204453 - DNA, 15 bp, Homo sapiens
acactaggagaattt

SEQ ID NO: 204454 - DNA, 15 bp, Homo sapiens
cacactaggagaatt

SEQ ID NO: 204455 - DNA, 15 bp, Homo sapiens
tcacactaggagaat

SEQ ID NO: 204456 - DNA, 15 bp, Homo sapiens
ttcacactaggagaa

SEQ ID NO: 204457 - DNA, 15 bp, Homo sapiens
gttcacactaggaga

SEQ ID NO: 204458 - DNA, 15 bp, Homo sapiens
ggttcacactaggag

SEQ ID NO: 204459 - DNA, 15 bp, Homo sapiens
tggttcacactagga

SEQ ID NO: 204460 - DNA, 15 bp, Homo sapiens
atggttcacactagg

SEQ ID NO: 204461 - DNA, 15 bp, Homo sapiens
aatggttcacactag

SEQ ID NO: 204462 - DNA, 15 bp, Homo sapiens
caatggttcacacta

SEQ ID NO: 204463 - DNA, 15 bp, Homo sapiens
ccaatggttcacact

SEQ ID NO: 204464 - DNA, 15 bp, Homo sapiens
accaatggttcacac

SEQ ID NO: 204465 - DNA, 15 bp, Homo sapiens
aaccaatggttcaca

SEQ ID NO: 204466 - DNA, 15 bp, Homo sapiens
aaaccaatggttcac

SEQ ID NO: 204467 - DNA, 15 bp, Homo sapiens
aaaaccaatggttca

SEQ ID NO: 204468 - DNA, 15 bp, Homo sapiens
caaaaccaatggttc

SEQ ID NO: 204469 - DNA, 15 bp, Homo sapiens
ccaaaaccaatggtt

SEQ ID NO: 204470 - DNA, 15 bp, Homo sapiens
accaaaaccaatggt

SEQ ID NO: 204471 - DNA, 15 bp, Homo sapiens
taccaaaaccaatgg

SEQ ID NO: 204472 - DNA, 15 bp, Homo sapiens
ataccaaaaccaatg

SEQ ID NO: 204473 - DNA, 15 bp, Homo sapiens
tataccaaaaccaat

SEQ ID NO: 204474 - DNA, 15 bp, Homo sapiens
atataccaaaaccaa

SEQ ID NO: 204475 - DNA, 15 bp, Homo sapiens
aatataccaaaacca

SEQ ID NO: 204476 - DNA, 15 bp, Homo sapiens
caatataccaaaacc

SEQ ID NO: 204477 - DNA, 15 bp, Homo sapiens
acaatataccaaaac

SEQ ID NO: 204478 - DNA, 15 bp, Homo sapiens
cacaatataccaaaa

SEQ ID NO: 204479 - DNA, 15 bp, Homo sapiens
gcacaatataccaaa

SEQ ID NO: 204480 - DNA, 15 bp, Homo sapiens
agcacaatataccaa

SEQ ID NO: 204481 - DNA, 15 bp, Homo sapiens
aagcacaatatacca

SEQ ID NO: 204482 - DNA, 15 bp, Homo sapiens
gaagcacaatatacc

SEQ ID NO: 204483 - DNA, 15 bp, Homo sapiens
ggaagcacaatatac

SEQ ID NO: 204484 - DNA, 15 bp, Homo sapiens
tggaagcacaatata

SEQ ID NO: 204485 - DNA, 15 bp, Homo sapiens
atggaagcacaatat

SEQ ID NO: 204486 - DNA, 15 bp, Homo sapiens
catggaagcacaata

SEQ ID NO: 204487 - DNA, 15 bp, Homo sapiens
acatggaagcacaat

SEQ ID NO: 204488 - DNA, 15 bp, Homo sapiens
tacatggaagcacaa

SEQ ID NO: 204489 - DNA, 15 bp, Homo sapiens
ctacatggaagcaca

SEQ ID NO: 204490 - DNA, 15 bp, Homo sapiens
actacatggaagcac

SEQ ID NO: 204491 - DNA, 15 bp, Homo sapiens
aactacatggaagca

SEQ ID NO: 204492 - DNA, 15 bp, Homo sapiens
aaactacatggaagc

SEQ ID NO: 204493 - DNA, 15 bp, Homo sapiens
taaactacatggaag

SEQ ID NO: 204494 - DNA, 15 bp, Homo sapiens
ttaaactacatggaa

SEQ ID NO: 204495 - DNA, 15 bp, Homo sapiens
attaaactacatgga

SEQ ID NO: 204496 - DNA, 15 bp, Homo sapiens
tattaaactacatgg

SEQ ID NO: 204497 - DNA, 15 bp, Homo sapiens
atattaaactacatg

SEQ ID NO: 204498 - DNA, 15 bp, Homo sapiens
gatattaaactacat

SEQ ID NO: 204499 - DNA, 15 bp, Homo sapiens
tgatattaaactaca

SEQ ID NO: 204500 - DNA, 15 bp, Homo sapiens
ttgatattaaactac

SEQ ID NO: 204501 - DNA, 15 bp, Homo sapiens
cttgatattaaacta

SEQ ID NO: 204502 - DNA, 15 bp, Homo sapiens
tcttgatattaaact

SEQ ID NO: 204503 - DNA, 15 bp, Homo sapiens
atcttgatattaaac

SEQ ID NO: 204504 - DNA, 15 bp, Homo sapiens
catcttgatattaaa

SEQ ID NO: 204505 - DNA, 15 bp, Homo sapiens
acatcttgatattaa

SEQ ID NO: 204506 - DNA, 15 bp, Homo sapiens
aacatcttgatatta

SEQ ID NO: 204507 - DNA, 15 bp, Homo sapiens
aaacatcttgatatt

SEQ ID NO: 204508 - DNA, 15 bp, Homo sapiens
aaaacatcttgatat

SEQ ID NO: 204509 - DNA, 15 bp, Homo sapiens
aaaaacatcttgata

SEQ ID NO: 204510 - DNA, 15 bp, Homo sapiens
taaaaacatcttgat

SEQ ID NO: 204511 - DNA, 15 bp, Homo sapiens
ctaaaaacatcttga

SEQ ID NO: 204512 - DNA, 15 bp, Homo sapiens
tctaaaaacatcttg

SEQ ID NO: 204513 - DNA, 15 bp, Homo sapiens
atctaaaaacatctt

SEQ ID NO: 204514 - DNA, 15 bp, Homo sapiens
aatctaaaaacatct

SEQ ID NO: 204515 - DNA, 15 bp, Homo sapiens
aaatctaaaaacatc

SEQ ID NO: 204516 - DNA, 15 bp, Homo sapiens
gaaatctaaaaacat

SEQ ID NO: 204517 - DNA, 15 bp, Homo sapiens
ggaaatctaaaaaca

SEQ ID NO: 204518 - DNA, 15 bp, Homo sapiens
gggaaatctaaaaac

SEQ ID NO: 204519 - DNA, 15 bp, Homo sapiens
agggaaatctaaaaa

SEQ ID NO: 204520 - DNA, 15 bp, Homo sapiens
aagggaaatctaaaa

SEQ ID NO: 204521 - DNA, 15 bp, Homo sapiens
aaagggaaatctaaa

SEQ ID NO: 204522 - DNA, 15 bp, Homo sapiens
aaaagggaaatctaa

SEQ ID NO: 204523 - DNA, 15 bp, Homo sapiens
taaaagggaaatcta

SEQ ID NO: 204524 - DNA, 15 bp, Homo sapiens
ttaaaagggaaatct

SEQ ID NO: 204525 - DNA, 15 bp, Homo sapiens
attaaaagggaaatc

SEQ ID NO: 204526 - DNA, 15 bp, Homo sapiens
aattaaaagggaaat

SEQ ID NO: 204527 - DNA, 15 bp, Homo sapiens
aaattaaaagggaaa

SEQ ID NO: 204528 - DNA, 15 bp, Homo sapiens
taaattaaaagggaa

SEQ ID NO: 204529 - DNA, 15 bp, Homo sapiens
ataaattaaaaggga

SEQ ID NO: 204530 - DNA, 15 bp, Homo sapiens
aataaattaaaaggg

SEQ ID NO: 204531 - DNA, 15 bp, Homo sapiens
aaataaattaaaagg

SEQ ID NO: 204532 - DNA, 15 bp, Homo sapiens
caaataaattaaaag

SEQ ID NO: 204533 - DNA, 15 bp, Homo sapiens
acaaataaattaaaa

SEQ ID NO: 204534 - DNA, 15 bp, Homo sapiens
aacaaataaattaaa

SEQ ID NO: 204535 - DNA, 15 bp, Homo sapiens
caacaaataaattaa

SEQ ID NO: 204536 - DNA, 15 bp, Homo sapiens
tcaacaaataaatta

SEQ ID NO: 204537 - DNA, 15 bp, Homo sapiens
gtcaacaaataaatt

SEQ ID NO: 204538 - DNA, 15 bp, Homo sapiens
ggtcaacaaataaat

SEQ ID NO: 204539 - DNA, 15 bp, Homo sapiens
gggtcaacaaataaa

SEQ ID NO: 204540 - DNA, 15 bp, Homo sapiens
tgggtcaacaaataa

SEQ ID NO: 204541 - DNA, 15 bp, Homo sapiens
atgggtcaacaaata

SEQ ID NO: 204542 - DNA, 15 bp, Homo sapiens
aatgggtcaacaaat

SEQ ID NO: 204543 - DNA, 15 bp, Homo sapiens
caatgggtcaacaaa

SEQ ID NO: 204544 - DNA, 15 bp, Homo sapiens
ccaatgggtcaacaa

SEQ ID NO: 204545 - DNA, 15 bp, Homo sapiens
accaatgggtcaaca

SEQ ID NO: 204546 - DNA, 15 bp, Homo sapiens
aaccaatgggtcaac

SEQ ID NO: 204547 - DNA, 15 bp, Homo sapiens
caaccaatgggtcaa

SEQ ID NO: 204548 - DNA, 15 bp, Homo sapiens
acaaccaatgggtca

SEQ ID NO: 204549 - DNA, 15 bp, Homo sapiens
aacaaccaatgggtc

SEQ ID NO: 204550 - DNA, 15 bp, Homo sapiens
gaacaaccaatgggt

SEQ ID NO: 204551 - DNA, 15 bp, Homo sapiens
tgaacaaccaatggg

SEQ ID NO: 204552 - DNA, 15 bp, Homo sapiens
ctgaacaaccaatgg

SEQ ID NO: 204553 - DNA, 15 bp, Homo sapiens
cctgaacaaccaatg

SEQ ID NO: 204554 - DNA, 15 bp, Homo sapiens
tcctgaacaaccaat

SEQ ID NO: 204555 - DNA, 15 bp, Homo sapiens
ctcctgaacaaccaa

SEQ ID NO: 204556 - DNA, 15 bp, Homo sapiens
gctcctgaacaacca

SEQ ID NO: 204557 - DNA, 15 bp, Homo sapiens
tgctcctgaacaacc

SEQ ID NO: 204558 - DNA, 15 bp, Homo sapiens
atgctcctgaacaac

SEQ ID NO: 204559 - DNA, 15 bp, Homo sapiens
catgctcctgaacaa

SEQ ID NO: 204560 - DNA, 15 bp, Homo sapiens
gcatgctcctgaaca

SEQ ID NO: 204561 - DNA, 15 bp, Homo sapiens
agcatgctcctgaac

SEQ ID NO: 204562 - DNA, 15 bp, Homo sapiens
cagcatgctcctgaa

SEQ ID NO: 204563 - DNA, 15 bp, Homo sapiens
acagcatgctcctga

SEQ ID NO: 204564 - DNA, 15 bp, Homo sapiens
aacagcatgctcctg

SEQ ID NO: 204565 - DNA, 15 bp, Homo sapiens
aaacagcatgctcct

SEQ ID NO: 204566 - DNA, 15 bp, Homo sapiens
taaacagcatgctcc

SEQ ID NO: 204567 - DNA, 15 bp, Homo sapiens
gtaaacagcatgctc

SEQ ID NO: 204568 - DNA, 15 bp, Homo sapiens
ggtaaacagcatgct

SEQ ID NO: 204569 - DNA, 15 bp, Homo sapiens
aggtaaacagcatgc

SEQ ID NO: 204570 - DNA, 15 bp, Homo sapiens
caggtaaacagcatg

SEQ ID NO: 204571 - DNA, 15 bp, Homo sapiens
tcaggtaaacagcat

SEQ ID NO: 204572 - DNA, 15 bp, Homo sapiens
ttcaggtaaacagca

SEQ ID NO: 204573 - DNA, 15 bp, Homo sapiens
tttcaggtaaacagc

SEQ ID NO: 204574 - DNA, 15 bp, Homo sapiens
ttttcaggtaaacag

SEQ ID NO: 204575 - DNA, 15 bp, Homo sapiens
attttcaggtaaaca

SEQ ID NO: 204576 - DNA, 15 bp, Homo sapiens
tattttcaggtaaac

SEQ ID NO: 204577 - DNA, 15 bp, Homo sapiens
ttattttcaggtaaa

SEQ ID NO: 204578 - DNA, 15 bp, Homo sapiens
attattttcaggtaa

SEQ ID NO: 204579 - DNA, 15 bp, Homo sapiens
cattattttcaggta

SEQ ID NO: 204580 - DNA, 15 bp, Homo sapiens
ccattattttcaggt

SEQ ID NO: 204581 - DNA, 15 bp, Homo sapiens
tccattattttcagg

SEQ ID NO: 204582 - DNA, 15 bp, Homo sapiens
ctccattattttcag

SEQ ID NO: 204583 - DNA, 15 bp, Homo sapiens
tctccattattttca

SEQ ID NO: 204584 - DNA, 15 bp, Homo sapiens
atctccattattttc

SEQ ID NO: 204585 - DNA, 15 bp, Homo sapiens
tatctccattatttt

SEQ ID NO: 204586 - DNA, 15 bp, Homo sapiens
atatctccattattt

SEQ ID NO: 204587 - DNA, 15 bp, Homo sapiens
aatatctccattatt

SEQ ID NO: 204588 - DNA, 15 bp, Homo sapiens
taatatctccattat

SEQ ID NO: 204589 - DNA, 15 bp, Homo sapiens
ttaatatctccatta

SEQ ID NO: 204590 - DNA, 15 bp, Homo sapiens
cttaatatctccatt

SEQ ID NO: 204591 - DNA, 15 bp, Homo sapiens
ccttaatatctccat

SEQ ID NO: 204592 - DNA, 15 bp, Homo sapiens
accttaatatctcca

SEQ ID NO: 204593 - DNA, 15 bp, Homo sapiens
taccttaatatctcc

SEQ ID NO: 204594 - DNA, 15 bp, Homo sapiens
ataccttaatatctc

SEQ ID NO: 204595 - DNA, 15 bp, Homo sapiens
aataccttaatatct

SEQ ID NO: 204596 - DNA, 15 bp, Homo sapiens
aaataccttaatatc

SEQ ID NO: 204597 - DNA, 15 bp, Homo sapiens
caaataccttaatat

SEQ ID NO: 204598 - DNA, 15 bp, Homo sapiens
tcaaataccttaata

SEQ ID NO: 204599 - DNA, 15 bp, Homo sapiens
ttcaaataccttaat

SEQ ID NO: 204600 - DNA, 15 bp, Homo sapiens
attcaaataccttaa

SEQ ID NO: 204601 - DNA, 15 bp, Homo sapiens
tattcaaatacctta

SEQ ID NO: 204602 - DNA, 15 bp, Homo sapiens
atattcaaatacctt

SEQ ID NO: 204603 - DNA, 15 bp, Homo sapiens
aatattcaaatacct

SEQ ID NO: 204604 - DNA, 15 bp, Homo sapiens
aaatattcaaatacc

SEQ ID NO: 204605 - DNA, 15 bp, Homo sapiens
taaatattcaaatac

SEQ ID NO: 204606 - DNA, 15 bp, Homo sapiens
ataaatattcaaata

SEQ ID NO: 204607 - DNA, 15 bp, Homo sapiens
gataaatattcaaat

SEQ ID NO: 204608 - DNA, 15 bp, Homo sapiens
agataaatattcaaa

SEQ ID NO: 204609 - DNA, 15 bp, Homo sapiens
aagataaatattcaa

SEQ ID NO: 204610 - DNA, 15 bp, Homo sapiens
gaagataaatattca

SEQ ID NO: 204611 - DNA, 15 bp, Homo sapiens
agaagataaatattc

SEQ ID NO: 204612 - DNA, 15 bp, Homo sapiens
tagaagataaatatt

SEQ ID NO: 204613 - DNA, 15 bp, Homo sapiens
ctagaagataaatat

SEQ ID NO: 204614 - DNA, 15 bp, Homo sapiens
actagaagataaata

SEQ ID NO: 204615 - DNA, 15 bp, Homo sapiens
tactagaagataaat

SEQ ID NO: 204616 - DNA, 15 bp, Homo sapiens
gtactagaagataaa

SEQ ID NO: 204617 - DNA, 15 bp, Homo sapiens
tgtactagaagataa

SEQ ID NO: 204618 - DNA, 15 bp, Homo sapiens
atgtactagaagata

SEQ ID NO: 204619 - DNA, 15 bp, Homo sapiens
aatgtactagaagat

SEQ ID NO: 204620 - DNA, 15 bp, Homo sapiens
caatgtactagaaga

SEQ ID NO: 204621 - DNA, 15 bp, Homo sapiens
tcaatgtactagaag

SEQ ID NO: 204622 - DNA, 15 bp, Homo sapiens
ttcaatgtactagaa

SEQ ID NO: 204623 - DNA, 15 bp, Homo sapiens
tttcaatgtactaga

SEQ ID NO: 204624 - DNA, 15 bp, Homo sapiens
ttttcaatgtactag

SEQ ID NO: 204625 - DNA, 15 bp, Homo sapiens
tttttcaatgtacta

SEQ ID NO: 204626 - DNA, 15 bp, Homo sapiens
gtttttcaatgtact

SEQ ID NO: 204627 - DNA, 15 bp, Homo sapiens
agtttttcaatgtac

SEQ ID NO: 204628 - DNA, 15 bp, Homo sapiens
aagtttttcaatgta

SEQ ID NO: 204629 - DNA, 15 bp, Homo sapiens
aaagtttttcaatgt

SEQ ID NO: 204630 - DNA, 15 bp, Homo sapiens
aaaagtttttcaatg

SEQ ID NO: 204631 - DNA, 15 bp, Homo sapiens
aaaaagtttttcaat

SEQ ID NO: 204632 - DNA, 15 bp, Homo sapiens
caaaaagtttttcaa

SEQ ID NO: 204633 - DNA, 15 bp, Homo sapiens
tcaaaaagtttttca

SEQ ID NO: 204634 - DNA, 15 bp, Homo sapiens
ctcaaaaagtttttc

SEQ ID NO: 204635 - DNA, 15 bp, Homo sapiens
tctcaaaaagttttt

SEQ ID NO: 204636 - DNA, 15 bp, Homo sapiens
ctctcaaaaagtttt

SEQ ID NO: 204637 - DNA, 15 bp, Homo sapiens
actctcaaaaagttt

SEQ ID NO: 204638 - DNA, 15 bp, Homo sapiens
tactctcaaaaagtt

SEQ ID NO: 204639 - DNA, 15 bp, Homo sapiens
ttactctcaaaaagt

SEQ ID NO: 204640 - DNA, 15 bp, Homo sapiens
gttactctcaaaaag

SEQ ID NO: 204641 - DNA, 15 bp, Homo sapiens
ggttactctcaaaaa

SEQ ID NO: 204642 - DNA, 15 bp, Homo sapiens
tggttactctcaaaa

SEQ ID NO: 204643 - DNA, 15 bp, Homo sapiens
ttggttactctcaaa

SEQ ID NO: 204644 - DNA, 15 bp, Homo sapiens
attggttactctcaa

SEQ ID NO: 204645 - DNA, 15 bp, Homo sapiens
tattggttactctca

SEQ ID NO: 204646 - DNA, 15 bp, Homo sapiens
ttattggttactctc

SEQ ID NO: 204647 - DNA, 15 bp, Homo sapiens
attattggttactct

SEQ ID NO: 204648 - DNA, 15 bp, Homo sapiens
tattattggttactc

SEQ ID NO: 204649 - DNA, 15 bp, Homo sapiens
ttattattggttact

SEQ ID NO: 204650 - DNA, 15 bp, Homo sapiens
tttattattggttac

SEQ ID NO: 204651 - DNA, 15 bp, Homo sapiens
atttattattggtta

SEQ ID NO: 204652 - DNA, 15 bp, Homo sapiens
catttattattggtt

SEQ ID NO: 204653 - DNA, 15 bp, Homo sapiens
tcatttattattggt

SEQ ID NO: 204654 - DNA, 15 bp, Homo sapiens
atcatttattattgg

SEQ ID NO: 204655 - DNA, 15 bp, Homo sapiens
catcatttattattg

SEQ ID NO: 204656 - DNA, 15 bp, Homo sapiens
ccatcatttattatt

SEQ ID NO: 204657 - DNA, 15 bp, Homo sapiens
tccatcatttattat

SEQ ID NO: 204658 - DNA, 15 bp, Homo sapiens
ttccatcatttatta

SEQ ID NO: 204659 - DNA, 15 bp, Homo sapiens
attccatcatttatt

SEQ ID NO: 204660 - DNA, 15 bp, Homo sapiens
cattccatcatttat

SEQ ID NO: 204661 - DNA, 15 bp, Homo sapiens
gcattccatcattta

SEQ ID NO: 204662 - DNA, 15 bp, Homo sapiens
agcattccatcattt

SEQ ID NO: 204663 - DNA, 15 bp, Homo sapiens
tagcattccatcatt

SEQ ID NO: 204664 - DNA, 15 bp, Homo sapiens
gtagcattccatcat

SEQ ID NO: 204665 - DNA, 15 bp, Homo sapiens
agtagcattccatca

SEQ ID NO: 204666 - DNA, 15 bp, Homo sapiens
cagtagcattccatc

SEQ ID NO: 204667 - DNA, 15 bp, Homo sapiens
gcagtagcattccat

SEQ ID NO: 204668 - DNA, 15 bp, Homo sapiens
agcagtagcattcca

SEQ ID NO: 204669 - DNA, 15 bp, Homo sapiens
aagcagtagcattcc

SEQ ID NO: 204670 - DNA, 15 bp, Homo sapiens
aaagcagtagcattc

SEQ ID NO: 204671 - DNA, 15 bp, Homo sapiens
aaaagcagtagcatt

SEQ ID NO: 204672 - DNA, 15 bp, Homo sapiens
aaaaagcagtagcat

SEQ ID NO: 204673 - DNA, 15 bp, Homo sapiens
aaaaaagcagtagca

SEQ ID NO: 204674 - DNA, 15 bp, Homo sapiens
aaaaaaagcagtagc

SEQ ID NO: 204675 - DNA, 15 bp, Homo sapiens
aaaaaaaagcagtag

SEQ ID NO: 204676 - DNA, 15 bp, Homo sapiens
aaaaaaaaagcagta

SEQ ID NO: 204677 - DNA, 15 bp, Homo sapiens
aaaaaaaaaagcagt

SEQ ID NO: 204678 - DNA, 15 bp, Homo sapiens
aaaaaaaaaaagcag

SEQ ID NO: 204679 - DNA, 15 bp, Homo sapiens
caaaaaaaaaaagca

SEQ ID NO: 204680 - DNA, 15 bp, Homo sapiens
tcaaaaaaaaaaagc

SEQ ID NO: 204681 - DNA, 15 bp, Homo sapiens
ttcaaaaaaaaaaag

SEQ ID NO: 204682 - DNA, 15 bp, Homo sapiens
cttcaaaaaaaaaaa

SEQ ID NO: 204683 - DNA, 15 bp, Homo sapiens
gcttcaaaaaaaaaa

SEQ ID NO: 204684 - DNA, 15 bp, Homo sapiens
agcttcaaaaaaaaa

SEQ ID NO: 204685 - DNA, 15 bp, Homo sapiens
cagcttcaaaaaaaa

SEQ ID NO: 204686 - DNA, 15 bp, Homo sapiens
gcagcttcaaaaaaa

SEQ ID NO: 204687 - DNA, 15 bp, Homo sapiens
ggcagcttcaaaaaa

SEQ ID NO: 204688 - DNA, 15 bp, Homo sapiens
tggcagcttcaaaaa

SEQ ID NO: 204689 - DNA, 15 bp, Homo sapiens
ctggcagcttcaaaa

SEQ ID NO: 204690 - DNA, 15 bp, Homo sapiens
actggcagcttcaaa

SEQ ID NO: 204691 - DNA, 15 bp, Homo sapiens
aactggcagcttcaa

SEQ ID NO: 204692 - DNA, 15 bp, Homo sapiens
taactggcagcttca

SEQ ID NO: 204693 - DNA, 15 bp, Homo sapiens
ataactggcagcttc

SEQ ID NO: 204694 - DNA, 15 bp, Homo sapiens
aataactggcagctt

SEQ ID NO: 204695 - DNA, 15 bp, Homo sapiens
caataactggcagct

SEQ ID NO: 204696 - DNA, 15 bp, Homo sapiens
acaataactggcagc

SEQ ID NO: 204697 - DNA, 15 bp, Homo sapiens
aacaataactggcag

SEQ ID NO: 204698 - DNA, 15 bp, Homo sapiens
aaacaataactggca

SEQ ID NO: 204699 - DNA, 15 bp, Homo sapiens
taaacaataactggc

SEQ ID NO: 204700 - DNA, 15 bp, Homo sapiens
gtaaacaataactgg

SEQ ID NO: 204701 - DNA, 15 bp, Homo sapiens
agtaaacaataactg

SEQ ID NO: 204702 - DNA, 15 bp, Homo sapiens
aagtaaacaataact

SEQ ID NO: 204703 - DNA, 15 bp, Homo sapiens
taagtaaacaataac

SEQ ID NO: 204704 - DNA, 15 bp, Homo sapiens
gtaagtaaacaataa

SEQ ID NO: 204705 - DNA, 15 bp, Homo sapiens
tgtaagtaaacaata

SEQ ID NO: 204706 - DNA, 15 bp, Homo sapiens
gtgtaagtaaacaat

SEQ ID NO: 204707 - DNA, 15 bp, Homo sapiens
agtgtaagtaaacaa

SEQ ID NO: 204708 - DNA, 15 bp, Homo sapiens
tagtgtaagtaaaca

SEQ ID NO: 204709 - DNA, 15 bp, Homo sapiens
atagtgtaagtaaac

SEQ ID NO: 204710 - DNA, 15 bp, Homo sapiens
catagtgtaagtaaa

SEQ ID NO: 204711 - DNA, 15 bp, Homo sapiens
gcatagtgtaagtaa

SEQ ID NO: 204712 - DNA, 15 bp, Homo sapiens
ggcatagtgtaagta

SEQ ID NO: 204713 - DNA, 15 bp, Homo sapiens
tggcatagtgtaagt

SEQ ID NO: 204714 - DNA, 15 bp, Homo sapiens
ttggcatagtgtaag

SEQ ID NO: 204715 - DNA, 15 bp, Homo sapiens
tttggcatagtgtaa

SEQ ID NO: 204716 - DNA, 15 bp, Homo sapiens
atttggcatagtgta

SEQ ID NO: 204717 - DNA, 15 bp, Homo sapiens
tatttggcatagtgt

SEQ ID NO: 204718 - DNA, 15 bp, Homo sapiens
atatttggcatagtg

SEQ ID NO: 204719 - DNA, 15 bp, Homo sapiens
tatatttggcatagt

SEQ ID NO: 204720 - DNA, 15 bp, Homo sapiens
ttatatttggcatag

SEQ ID NO: 204721 - DNA, 15 bp, Homo sapiens
tttatatttggcata

SEQ ID NO: 204722 - DNA, 15 bp, Homo sapiens
ctttatatttggcat

SEQ ID NO: 204723 - DNA, 15 bp, Homo sapiens
cctttatatttggca

SEQ ID NO: 204724 - DNA, 15 bp, Homo sapiens
gcctttatatttggc

SEQ ID NO: 204725 - DNA, 15 bp, Homo sapiens
tgcctttatatttgg

SEQ ID NO: 204726 - DNA, 15 bp, Homo sapiens
atgcctttatatttg

SEQ ID NO: 204727 - DNA, 15 bp, Homo sapiens
aatgcctttatattt

SEQ ID NO: 204728 - DNA, 15 bp, Homo sapiens
taatgcctttatatt

SEQ ID NO: 204729 - DNA, 15 bp, Homo sapiens
ttaatgcctttatat

SEQ ID NO: 204730 - DNA, 15 bp, Homo sapiens
attaatgcctttata

SEQ ID NO: 204731 - DNA, 15 bp, Homo sapiens
gattaatgcctttat

SEQ ID NO: 204732 - DNA, 15 bp, Homo sapiens
agattaatgccttta

SEQ ID NO: 204733 - DNA, 15 bp, Homo sapiens
gagattaatgccttt

SEQ ID NO: 204734 - DNA, 15 bp, Homo sapiens
tgagattaatgcctt

SEQ ID NO: 204735 - DNA, 15 bp, Homo sapiens
atgagattaatgcct

SEQ ID NO: 204736 - DNA, 15 bp, Homo sapiens
tatgagattaatgcc

SEQ ID NO: 204737 - DNA, 15 bp, Homo sapiens
ttatgagattaatgc

SEQ ID NO: 204738 - DNA, 15 bp, Homo sapiens
tttatgagattaatg

SEQ ID NO: 204739 - DNA, 15 bp, Homo sapiens
ttttatgagattaat

SEQ ID NO: 204740 - DNA, 15 bp, Homo sapiens
cttttatgagattaa

SEQ ID NO: 204741 - DNA, 15 bp, Homo sapiens
acttttatgagatta

SEQ ID NO: 204742 - DNA, 15 bp, Homo sapiens
aacttttatgagatt

SEQ ID NO: 204743 - DNA, 15 bp, Homo sapiens
aaacttttatgagat

SEQ ID NO: 204744 - DNA, 15 bp, Homo sapiens
gaaacttttatgaga

SEQ ID NO: 204745 - DNA, 15 bp, Homo sapiens
tgaaacttttatgag

SEQ ID NO: 204746 - DNA, 15 bp, Homo sapiens
gtgaaacttttatga

SEQ ID NO: 204747 - DNA, 15 bp, Homo sapiens
tgtgaaacttttatg

SEQ ID NO: 204748 - DNA, 15 bp, Homo sapiens
ttgtgaaacttttat

SEQ ID NO: 204749 - DNA, 15 bp, Homo sapiens
gttgtgaaactttta

SEQ ID NO: 204750 - DNA, 15 bp, Homo sapiens
tgttgtgaaactttt

SEQ ID NO: 204751 - DNA, 15 bp, Homo sapiens
ttgttgtgaaacttt

SEQ ID NO: 204752 - DNA, 15 bp, Homo sapiens
attgttgtgaaactt

SEQ ID NO: 204753 - DNA, 15 bp, Homo sapiens
gattgttgtgaaact

SEQ ID NO: 204754 - DNA, 15 bp, Homo sapiens
ggattgttgtgaaac

SEQ ID NO: 204755 - DNA, 15 bp, Homo sapiens
aggattgttgtgaaa

SEQ ID NO: 204756 - DNA, 15 bp, Homo sapiens
caggattgttgtgaa

SEQ ID NO: 204757 - DNA, 15 bp, Homo sapiens
acaggattgttgtga

SEQ ID NO: 204758 - DNA, 15 bp, Homo sapiens
cacaggattgttgtg

SEQ ID NO: 204759 - DNA, 15 bp, Homo sapiens
tcacaggattgttgt

SEQ ID NO: 204760 - DNA, 15 bp, Homo sapiens
ctcacaggattgttg

SEQ ID NO: 204761 - DNA, 15 bp, Homo sapiens
cctcacaggattgtt

SEQ ID NO: 204762 - DNA, 15 bp, Homo sapiens
ccctcacaggattgt

SEQ ID NO: 204763 - DNA, 15 bp, Homo sapiens
tccctcacaggattg

SEQ ID NO: 204764 - DNA, 15 bp, Homo sapiens
ctccctcacaggatt

SEQ ID NO: 204765 - DNA, 15 bp, Homo sapiens
tctccctcacaggat

SEQ ID NO: 204766 - DNA, 15 bp, Homo sapiens
gtctccctcacagga

SEQ ID NO: 204767 - DNA, 15 bp, Homo sapiens
cgtctccctcacagg

SEQ ID NO: 204768 - DNA, 15 bp, Homo sapiens
tcgtctccctcacag

SEQ ID NO: 204769 - DNA, 15 bp, Homo sapiens
atcgtctccctcaca

SEQ ID NO: 204770 - DNA, 15 bp, Homo sapiens
tatcgtctccctcac

SEQ ID NO: 204771 - DNA, 15 bp, Homo sapiens
atatcgtctccctca

SEQ ID NO: 204772 - DNA, 15 bp, Homo sapiens
gatatcgtctccctc

SEQ ID NO: 204773 - DNA, 15 bp, Homo sapiens
ggatatcgtctccct

SEQ ID NO: 204774 - DNA, 15 bp, Homo sapiens
gggatatcgtctccc

SEQ ID NO: 204775 - DNA, 15 bp, Homo sapiens
ggggatatcgtctcc

SEQ ID NO: 204776 - DNA, 15 bp, Homo sapiens
tggggatatcgtctc

SEQ ID NO: 204777 - DNA, 15 bp, Homo sapiens
atggggatatcgtct

SEQ ID NO: 204778 - DNA, 15 bp, Homo sapiens
aatggggatatcgtc

SEQ ID NO: 204779 - DNA, 15 bp, Homo sapiens
aaatggggatatcgt

SEQ ID NO: 204780 - DNA, 15 bp, Homo sapiens
aaaatggggatatcg

SEQ ID NO: 204781 - DNA, 15 bp, Homo sapiens
taaaatggggatatc

SEQ ID NO: 204782 - DNA, 15 bp, Homo sapiens
gtaaaatggggatat

SEQ ID NO: 204783 - DNA, 15 bp, Homo sapiens
tgtaaaatggggata

SEQ ID NO: 204784 - DNA, 15 bp, Homo sapiens
ttgtaaaatggggat

SEQ ID NO: 204785 - DNA, 15 bp, Homo sapiens
tttgtaaaatgggga

SEQ ID NO: 204786 - DNA, 15 bp, Homo sapiens
atttgtaaaatgggg

SEQ ID NO: 204787 - DNA, 15 bp, Homo sapiens
gatttgtaaaatggg

SEQ ID NO: 204788 - DNA, 15 bp, Homo sapiens
tgatttgtaaaatgg

SEQ ID NO: 204789 - DNA, 15 bp, Homo sapiens
ctgatttgtaaaatg

SEQ ID NO: 204790 - DNA, 15 bp, Homo sapiens
cctgatttgtaaaat

SEQ ID NO: 204791 - DNA, 15 bp, Homo sapiens
tcctgatttgtaaaa

SEQ ID NO: 204792 - DNA, 15 bp, Homo sapiens
ttcctgatttgtaaa

SEQ ID NO: 204793 - DNA, 15 bp, Homo sapiens
tttcctgatttgtaa

SEQ ID NO: 204794 - DNA, 15 bp, Homo sapiens
atttcctgatttgta

SEQ ID NO: 204795 - DNA, 15 bp, Homo sapiens
aatttcctgatttgt

SEQ ID NO: 204796 - DNA, 15 bp, Homo sapiens
taatttcctgatttg

SEQ ID NO: 204797 - DNA, 15 bp, Homo sapiens
ttaatttcctgattt

SEQ ID NO: 204798 - DNA, 15 bp, Homo sapiens
cttaatttcctgatt

SEQ ID NO: 204799 - DNA, 15 bp, Homo sapiens
tcttaatttcctgat

SEQ ID NO: 204800 - DNA, 15 bp, Homo sapiens
gtcttaatttcctga

SEQ ID NO: 204801 - DNA, 15 bp, Homo sapiens
agtcttaatttcctg

SEQ ID NO: 204802 - DNA, 15 bp, Homo sapiens
aagtcttaatttcct

SEQ ID NO: 204803 - DNA, 15 bp, Homo sapiens
taagtcttaatttcc

SEQ ID NO: 204804 - DNA, 15 bp, Homo sapiens
ttaagtcttaatttc

SEQ ID NO: 204805 - DNA, 15 bp, Homo sapiens
attaagtcttaattt

SEQ ID NO: 204806 - DNA, 15 bp, Homo sapiens
tattaagtcttaatt

SEQ ID NO: 204807 - DNA, 15 bp, Homo sapiens
ttattaagtcttaat

SEQ ID NO: 204808 - DNA, 15 bp, Homo sapiens
cttattaagtcttaa

SEQ ID NO: 204809 - DNA, 15 bp, Homo sapiens
ccttattaagtctta

SEQ ID NO: 204810 - DNA, 15 bp, Homo sapiens
accttattaagtctt

SEQ ID NO: 204811 - DNA, 15 bp, Homo sapiens
aaccttattaagtct

SEQ ID NO: 204812 - DNA, 15 bp, Homo sapiens
taaccttattaagtc

SEQ ID NO: 204813 - DNA, 15 bp, Homo sapiens
ttaaccttattaagt

SEQ ID NO: 204814 - DNA, 15 bp, Homo sapiens
tttaaccttattaag

SEQ ID NO: 204815 - DNA, 15 bp, Homo sapiens
ttttaaccttattaa

SEQ ID NO: 204816 - DNA, 15 bp, Homo sapiens
cttttaaccttatta

SEQ ID NO: 204817 - DNA, 15 bp, Homo sapiens
tcttttaaccttatt

SEQ ID NO: 204818 - DNA, 15 bp, Homo sapiens
gtcttttaaccttat

SEQ ID NO: 204819 - DNA, 15 bp, Homo sapiens
agtcttttaacctta

SEQ ID NO: 204820 - DNA, 15 bp, Homo sapiens
aagtcttttaacctt

SEQ ID NO: 204821 - DNA, 15 bp, Homo sapiens
caagtcttttaacct

SEQ ID NO: 204822 - DNA, 15 bp, Homo sapiens
gcaagtcttttaacc

SEQ ID NO: 204823 - DNA, 15 bp, Homo sapiens
ggcaagtcttttaac

SEQ ID NO: 204824 - DNA, 15 bp, Homo sapiens
gggcaagtcttttaa

SEQ ID NO: 204825 - DNA, 15 bp, Homo sapiens
tgggcaagtctttta

SEQ ID NO: 204826 - DNA, 15 bp, Homo sapiens
ttgggcaagtctttt

SEQ ID NO: 204827 - DNA, 15 bp, Homo sapiens
tttgggcaagtcttt

SEQ ID NO: 204828 - DNA, 15 bp, Homo sapiens
ctttgggcaagtctt

SEQ ID NO: 204829 - DNA, 15 bp, Homo sapiens
actttgggcaagtct

SEQ ID NO: 204830 - DNA, 15 bp, Homo sapiens
gactttgggcaagtc

SEQ ID NO: 204831 - DNA, 15 bp, Homo sapiens
tgactttgggcaagt

SEQ ID NO: 204832 - DNA, 15 bp, Homo sapiens
gtgactttgggcaag

SEQ ID NO: 204833 - DNA, 15 bp, Homo sapiens
tgtgactttgggcaa

SEQ ID NO: 204834 - DNA, 15 bp, Homo sapiens
ctgtgactttgggca

SEQ ID NO: 204835 - DNA, 15 bp, Homo sapiens
tctgtgactttgggc

SEQ ID NO: 204836 - DNA, 15 bp, Homo sapiens
ttctgtgactttggg

SEQ ID NO: 204837 - DNA, 15 bp, Homo sapiens
gttctgtgactttgg

SEQ ID NO: 204838 - DNA, 15 bp, Homo sapiens
ggttctgtgactttg

SEQ ID NO: 204839 - DNA, 15 bp, Homo sapiens
tggttctgtgacttt

SEQ ID NO: 204840 - DNA, 15 bp, Homo sapiens
ctggttctgtgactt

SEQ ID NO: 204841 - DNA, 15 bp, Homo sapiens
actggttctgtgact

SEQ ID NO: 204842 - DNA, 15 bp, Homo sapiens
tactggttctgtgac

SEQ ID NO: 204843 - DNA, 15 bp, Homo sapiens
ttactggttctgtga

SEQ ID NO: 204844 - DNA, 15 bp, Homo sapiens
cttactggttctgtg

SEQ ID NO: 204845 - DNA, 15 bp, Homo sapiens
acttactggttctgt

SEQ ID NO: 204846 - DNA, 15 bp, Homo sapiens
cacttactggttctg

SEQ ID NO: 204847 - DNA, 15 bp, Homo sapiens
ccacttactggttct

SEQ ID NO: 204848 - DNA, 15 bp, Homo sapiens
accacttactggttc

SEQ ID NO: 204849 - DNA, 15 bp, Homo sapiens
taccacttactggtt

SEQ ID NO: 204850 - DNA, 15 bp, Homo sapiens
ctaccacttactggt

SEQ ID NO: 204851 - DNA, 15 bp, Homo sapiens
tctaccacttactgg

SEQ ID NO: 204852 - DNA, 15 bp, Homo sapiens
ctctaccacttactg

SEQ ID NO: 204853 - DNA, 15 bp, Homo sapiens
gctctaccacttact

SEQ ID NO: 204854 - DNA, 15 bp, Homo sapiens
agctctaccacttac

SEQ ID NO: 204855 - DNA, 15 bp, Homo sapiens
aagctctaccactta

SEQ ID NO: 204856 - DNA, 15 bp, Homo sapiens
caagctctaccactt

SEQ ID NO: 204857 - DNA, 15 bp, Homo sapiens
tcaagctctaccact

SEQ ID NO: 204858 - DNA, 15 bp, Homo sapiens
ttcaagctctaccac

SEQ ID NO: 204859 - DNA, 15 bp, Homo sapiens
attcaagctctacca

SEQ ID NO: 204860 - DNA, 15 bp, Homo sapiens
aattcaagctctacc

SEQ ID NO: 204861 - DNA, 15 bp, Homo sapiens
aaattcaagctctac

SEQ ID NO: 204862 - DNA, 15 bp, Homo sapiens
caaattcaagctcta

SEQ ID NO: 204863 - DNA, 15 bp, Homo sapiens
tcaaattcaagctct

SEQ ID NO: 204864 - DNA, 15 bp, Homo sapiens
ttcaaattcaagctc

SEQ ID NO: 204865 - DNA, 15 bp, Homo sapiens
attcaaattcaagct

SEQ ID NO: 204866 - DNA, 15 bp, Homo sapiens
tattcaaattcaagc

SEQ ID NO: 204867 - DNA, 15 bp, Homo sapiens
gtattcaaattcaag

SEQ ID NO: 204868 - DNA, 15 bp, Homo sapiens
tgtattcaaattcaa

SEQ ID NO: 204869 - DNA, 15 bp, Homo sapiens
ctgaggaggacatta

SEQ ID NO: 204870 - DNA, 15 bp, Homo sapiens
gctgaggaggacatt

SEQ ID NO: 204871 - DNA, 15 bp, Homo sapiens
tgctgaggaggacat

SEQ ID NO: 204872 - DNA, 15 bp, Homo sapiens
atgctgaggaggaca

SEQ ID NO: 204873 - DNA, 15 bp, Homo sapiens
gatgctgaggaggac

SEQ ID NO: 204874 - DNA, 15 bp, Homo sapiens
agatgctgaggagga

SEQ ID NO: 204875 - DNA, 15 bp, Homo sapiens
aagatgctgaggagg

SEQ ID NO: 204876 - DNA, 15 bp, Homo sapiens
aaagatgctgaggag

SEQ ID NO: 204877 - DNA, 15 bp, Homo sapiens
caaagatgctgagga

SEQ ID NO: 204878 - DNA, 15 bp, Homo sapiens
ccaaagatgctgagg

SEQ ID NO: 204879 - DNA, 15 bp, Homo sapiens
tccaaagatgctgag

SEQ ID NO: 204880 - DNA, 15 bp, Homo sapiens
ttccaaagatgctga

SEQ ID NO: 204881 - DNA, 15 bp, Homo sapiens
tttccaaagatgctg

SEQ ID NO: 204882 - DNA, 15 bp, Homo sapiens
ttttccaaagatgct

SEQ ID NO: 204883 - DNA, 15 bp, Homo sapiens
gttttccaaagatgc

SEQ ID NO: 204884 - DNA, 15 bp, Homo sapiens
agttttccaaagatg

SEQ ID NO: 204885 - DNA, 15 bp, Homo sapiens
aagttttccaaagat

SEQ ID NO: 204886 - DNA, 15 bp, Homo sapiens
gaagttttccaaaga

SEQ ID NO: 204887 - DNA, 15 bp, Homo sapiens
tgaagttttccaaag

SEQ ID NO: 204888 - DNA, 15 bp, Homo sapiens
ctgaagttttccaaa

SEQ ID NO: 204889 - DNA, 15 bp, Homo sapiens
tctgaagttttccaa

SEQ ID NO: 204890 - DNA, 15 bp, Homo sapiens
ctctgaagttttcca

SEQ ID NO: 204891 - DNA, 15 bp, Homo sapiens
cctctgaagttttcc

SEQ ID NO: 204892 - DNA, 15 bp, Homo sapiens
tcctctgaagttttc

SEQ ID NO: 204893 - DNA, 15 bp, Homo sapiens
ctcctctgaagtttt

SEQ ID NO: 204894 - DNA, 15 bp, Homo sapiens
tctcctctgaagttt

SEQ ID NO: 204895 - DNA, 15 bp, Homo sapiens
ttctcctctgaagtt

SEQ ID NO: 204896 - DNA, 15 bp, Homo sapiens
tttctcctctgaagt

SEQ ID NO: 204897 - DNA, 15 bp, Homo sapiens
atttctcctctgaag

SEQ ID NO: 204898 - DNA, 15 bp, Homo sapiens
catttctcctctgaa

SEQ ID NO: 204899 - DNA, 15 bp, Homo sapiens
tcatttctcctctga

SEQ ID NO: 204900 - DNA, 15 bp, Homo sapiens
ctcatttctcctctg

SEQ ID NO: 204901 - DNA, 15 bp, Homo sapiens
gctcatttctcctct

SEQ ID NO: 204902 - DNA, 15 bp, Homo sapiens
agctcatttctcctc

SEQ ID NO: 204903 - DNA, 15 bp, Homo sapiens
aagctcatttctcct

SEQ ID NO: 204904 - DNA, 15 bp, Homo sapiens
aaagctcatttctcc

SEQ ID NO: 204905 - DNA, 15 bp, Homo sapiens
caaagctcatttctc

SEQ ID NO: 204906 - DNA, 15 bp, Homo sapiens
gcaaagctcatttct

SEQ ID NO: 204907 - DNA, 15 bp, Homo sapiens
ggcaaagctcatttc

SEQ ID NO: 204908 - DNA, 15 bp, Homo sapiens
gggcaaagctcattt

SEQ ID NO: 204909 - DNA, 15 bp, Homo sapiens
ggggcaaagctcatt

SEQ ID NO: 204910 - DNA, 15 bp, Homo sapiens
aggggcaaagctcat

SEQ ID NO: 204911 - DNA, 15 bp, Homo sapiens
gaggggcaaagctca

SEQ ID NO: 204912 - DNA, 15 bp, Homo sapiens
ggaggggcaaagctc

SEQ ID NO: 204913 - DNA, 15 bp, Homo sapiens
aggaggggcaaagct

SEQ ID NO: 204914 - DNA, 15 bp, Homo sapiens
caggaggggcaaagc

SEQ ID NO: 204915 - DNA, 15 bp, Homo sapiens
acaggaggggcaaag

SEQ ID NO: 204916 - DNA, 15 bp, Homo sapiens
aacaggaggggcaaa

SEQ ID NO: 204917 - DNA, 15 bp, Homo sapiens
gaacaggaggggcaa

SEQ ID NO: 204918 - DNA, 15 bp, Homo sapiens
tgaacaggaggggca

SEQ ID NO: 204919 - DNA, 15 bp, Homo sapiens
atgaacaggaggggc

SEQ ID NO: 204920 - DNA, 15 bp, Homo sapiens
aatgaacaggagggg

SEQ ID NO: 204921 - DNA, 15 bp, Homo sapiens
aaatgaacaggaggg

SEQ ID NO: 204922 - DNA, 15 bp, Homo sapiens
gaaatgaacaggagg

SEQ ID NO: 204923 - DNA, 15 bp, Homo sapiens
tgaaatgaacaggag

SEQ ID NO: 204924 - DNA, 15 bp, Homo sapiens
atgaaatgaacagga

SEQ ID NO: 204925 - DNA, 15 bp, Homo sapiens
tatgaaatgaacagg

SEQ ID NO: 204926 - DNA, 15 bp, Homo sapiens
atatgaaatgaacag

SEQ ID NO: 204927 - DNA, 15 bp, Homo sapiens
tatatgaaatgaaca

SEQ ID NO: 204928 - DNA, 15 bp, Homo sapiens
gtatatgaaatgaac

SEQ ID NO: 204929 - DNA, 15 bp, Homo sapiens
ggtatatgaaatgaa

SEQ ID NO: 204930 - DNA, 15 bp, Homo sapiens
tggtatatgaaatga

SEQ ID NO: 204931 - DNA, 15 bp, Homo sapiens
gtggtatatgaaatg

SEQ ID NO: 204932 - DNA, 15 bp, Homo sapiens
agtggtatatgaaat

SEQ ID NO: 204933 - DNA, 15 bp, Homo sapiens
cagtggtatatgaaa

SEQ ID NO: 204934 - DNA, 15 bp, Homo sapiens
acagtggtatatgaa

SEQ ID NO: 204935 - DNA, 15 bp, Homo sapiens
aacagtggtatatga

SEQ ID NO: 204936 - DNA, 15 bp, Homo sapiens
taacagtggtatatg

SEQ ID NO: 204937 - DNA, 15 bp, Homo sapiens
ctaacagtggtatat

SEQ ID NO: 204938 - DNA, 15 bp, Homo sapiens
taaggctagcccata

SEQ ID NO: 204939 - DNA, 15 bp, Homo sapiens
gtaaggctagcccat

SEQ ID NO: 204940 - DNA, 15 bp, Homo sapiens
agtaaggctagccca

SEQ ID NO: 204941 - DNA, 15 bp, Homo sapiens
aagtaaggctagccc

SEQ ID NO: 204942 - DNA, 15 bp, Homo sapiens
gaagtaaggctagcc

SEQ ID NO: 204943 - DNA, 15 bp, Homo sapiens
tgaagtaaggctagc

SEQ ID NO: 204944 - DNA, 15 bp, Homo sapiens
atgaagtaaggctag

SEQ ID NO: 204945 - DNA, 15 bp, Homo sapiens
aatgaagtaaggcta

SEQ ID NO: 204946 - DNA, 15 bp, Homo sapiens
gaatgaagtaaggct

SEQ ID NO: 204947 - DNA, 15 bp, Homo sapiens
agaatgaagtaaggc

SEQ ID NO: 204948 - DNA, 15 bp, Homo sapiens
cagaatgaagtaagg

SEQ ID NO: 204949 - DNA, 15 bp, Homo sapiens
acagaatgaagtaag

SEQ ID NO: 204950 - DNA, 15 bp, Homo sapiens
tacagaatgaagtaa

SEQ ID NO: 204951 - DNA, 15 bp, Homo sapiens
gtacagaatgaagta

SEQ ID NO: 204952 - DNA, 15 bp, Homo sapiens
agtacagaatgaagt

SEQ ID NO: 204953 - DNA, 15 bp, Homo sapiens
aagtacagaatgaag

SEQ ID NO: 204954 - DNA, 15 bp, Homo sapiens
caagtacagaatgaa

SEQ ID NO: 204955 - DNA, 15 bp, Homo sapiens
ccaagtacagaatga

SEQ ID NO: 204956 - DNA, 15 bp, Homo sapiens
tccaagtacagaatg

SEQ ID NO: 204957 - DNA, 15 bp, Homo sapiens
gtccaagtacagaat

SEQ ID NO: 204958 - DNA, 15 bp, Homo sapiens
ggtccaagtacagaa

SEQ ID NO: 204959 - DNA, 15 bp, Homo sapiens
aggtccaagtacaga

SEQ ID NO: 204960 - DNA, 15 bp, Homo sapiens
caggtccaagtacag

SEQ ID NO: 204961 - DNA, 15 bp, Homo sapiens
acaggtccaagtaca

SEQ ID NO: 204962 - DNA, 15 bp, Homo sapiens
aacaggtccaagtac

SEQ ID NO: 204963 - DNA, 15 bp, Homo sapiens
aaacaggtccaagta

SEQ ID NO: 204964 - DNA, 15 bp, Homo sapiens
taaacaggtccaagt

SEQ ID NO: 204965 - DNA, 15 bp, Homo sapiens
ctaaacaggtccaag

SEQ ID NO: 204966 - DNA, 15 bp, Homo sapiens
cctaaacaggtccaa

SEQ ID NO: 204967 - DNA, 15 bp, Homo sapiens
gcctaaacaggtcca

SEQ ID NO: 204968 - DNA, 15 bp, Homo sapiens
agcctaaacaggtcc

SEQ ID NO: 204969 - DNA, 15 bp, Homo sapiens
aagcctaaacaggtc

SEQ ID NO: 204970 - DNA, 15 bp, Homo sapiens
gaagcctaaacaggt

SEQ ID NO: 204971 - DNA, 15 bp, Homo sapiens
agaagcctaaacagg

SEQ ID NO: 204972 - DNA, 15 bp, Homo sapiens
tagaagcctaaacag

SEQ ID NO: 204973 - DNA, 15 bp, Homo sapiens
ttagaagcctaaaca

SEQ ID NO: 204974 - DNA, 15 bp, Homo sapiens
cttagaagcctaaac

SEQ ID NO: 204975 - DNA, 15 bp, Homo sapiens
tcttagaagcctaaa

SEQ ID NO: 204976 - DNA, 15 bp, Homo sapiens
ctcttagaagcctaa

SEQ ID NO: 204977 - DNA, 15 bp, Homo sapiens
tctcttagaagccta

SEQ ID NO: 204978 - DNA, 15 bp, Homo sapiens
atctcttagaagcct

SEQ ID NO: 204979 - DNA, 15 bp, Homo sapiens
gatctcttagaagcc

SEQ ID NO: 204980 - DNA, 15 bp, Homo sapiens
agatctcttagaagc

SEQ ID NO: 204981 - DNA, 15 bp, Homo sapiens
aagatctcttagaag

SEQ ID NO: 204982 - DNA, 15 bp, Homo sapiens
taagatctcttagaa

SEQ ID NO: 204983 - DNA, 15 bp, Homo sapiens
gtaagatctcttaga

SEQ ID NO: 204984 - DNA, 15 bp, Homo sapiens
ggtaagatctcttag

SEQ ID NO: 204985 - DNA, 15 bp, Homo sapiens
aggtaagatctctta

SEQ ID NO: 204986 - DNA, 15 bp, Homo sapiens
gaggtaagatctctt

SEQ ID NO: 204987 - DNA, 15 bp, Homo sapiens
ggaggtaagatctct

SEQ ID NO: 204988 - DNA, 15 bp, Homo sapiens
tggaggtaagatctc

SEQ ID NO: 204989 - DNA, 15 bp, Homo sapiens
ttggaggtaagatct

SEQ ID NO: 204990 - DNA, 15 bp, Homo sapiens
gttggaggtaagatc

SEQ ID NO: 204991 - DNA, 15 bp, Homo sapiens
tgttggaggtaagat

SEQ ID NO: 204992 - DNA, 15 bp, Homo sapiens
ttgttggaggtaaga

SEQ ID NO: 204993 - DNA, 15 bp, Homo sapiens
attgttggaggtaag

SEQ ID NO: 204994 - DNA, 15 bp, Homo sapiens
tattgttggaggtaa

SEQ ID NO: 204995 - DNA, 15 bp, Homo sapiens
ttattgttggaggta

SEQ ID NO: 204996 - DNA, 15 bp, Homo sapiens
tttattgttggaggt

SEQ ID NO: 204997 - DNA, 15 bp, Homo sapiens
gtttattgttggagg

SEQ ID NO: 204998 - DNA, 15 bp, Homo sapiens
agtttattgttggag

SEQ ID NO: 204999 - DNA, 15 bp, Homo sapiens
cagtttattgttgga

SEQ ID NO: 205000 - DNA, 15 bp, Homo sapiens
gcagtttattgttgg

SEQ ID NO: 205001 - DNA, 15 bp, Homo sapiens
agcagtttattgttg

SEQ ID NO: 205002 - DNA, 15 bp, Homo sapiens
aagcagtttattgtt

SEQ ID NO: 205003 - DNA, 15 bp, Homo sapiens
aaagcagtttattgt

SEQ ID NO: 205004 - DNA, 15 bp, Homo sapiens
caaagcagtttattg

SEQ ID NO: 205005 - DNA, 15 bp, Homo sapiens
tcaaagcagtttatt

SEQ ID NO: 205006 - DNA, 15 bp, Homo sapiens
ctcaaagcagtttat

SEQ ID NO: 205007 - DNA, 15 bp, Homo sapiens
tctcaaagcagttta

SEQ ID NO: 205008 - DNA, 15 bp, Homo sapiens
gtctcaaagcagttt

SEQ ID NO: 205009 - DNA, 15 bp, Homo sapiens
tgtctcaaagcagtt

SEQ ID NO: 205010 - DNA, 15 bp, Homo sapiens
atgtctcaaagcagt

SEQ ID NO: 205011 - DNA, 15 bp, Homo sapiens
catgtctcaaagcag

SEQ ID NO: 205012 - DNA, 15 bp, Homo sapiens
tcatgtctcaaagca

SEQ ID NO: 205013 - DNA, 15 bp, Homo sapiens
ttcatgtctcaaagc

SEQ ID NO: 205014 - DNA, 15 bp, Homo sapiens
tttcatgtctcaaag

SEQ ID NO: 205015 - DNA, 15 bp, Homo sapiens
ttttcatgtctcaaa

SEQ ID NO: 205016 - DNA, 15 bp, Homo sapiens
cttttcatgtctcaa

SEQ ID NO: 205017 - DNA, 15 bp, Homo sapiens
ccttttcatgtctca

SEQ ID NO: 205018 - DNA, 15 bp, Homo sapiens
accttttcatgtctc

SEQ ID NO: 205019 - DNA, 15 bp, Homo sapiens
caccttttcatgtct

SEQ ID NO: 205020 - DNA, 15 bp, Homo sapiens
ccaccttttcatgtc

SEQ ID NO: 205021 - DNA, 15 bp, Homo sapiens
tccaccttttcatgt

SEQ ID NO: 205022 - DNA, 15 bp, Homo sapiens
ttccaccttttcatg

SEQ ID NO: 205023 - DNA, 15 bp, Homo sapiens
cttccaccttttcat

SEQ ID NO: 205024 - DNA, 15 bp, Homo sapiens
gcttccaccttttca

SEQ ID NO: 205025 - DNA, 15 bp, Homo sapiens
agcttccaccttttc

SEQ ID NO: 205026 - DNA, 15 bp, Homo sapiens
aagcttccacctttt

SEQ ID NO: 205027 - DNA, 15 bp, Homo sapiens
aaagcttccaccttt

SEQ ID NO: 205028 - DNA, 15 bp, Homo sapiens
taaagcttccacctt

SEQ ID NO: 205029 - DNA, 15 bp, Homo sapiens
gtaaagcttccacct

SEQ ID NO: 205030 - DNA, 15 bp, Homo sapiens
agtaaagcttccacc

SEQ ID NO: 205031 - DNA, 15 bp, Homo sapiens
aagtaaagcttccac

SEQ ID NO: 205032 - DNA, 15 bp, Homo sapiens
caagtaaagcttcca

SEQ ID NO: 205033 - DNA, 15 bp, Homo sapiens
ccaagtaaagcttcc

SEQ ID NO: 205034 - DNA, 15 bp, Homo sapiens
accaagtaaagcttc

SEQ ID NO: 205035 - DNA, 15 bp, Homo sapiens
aaccaagtaaagctt

SEQ ID NO: 205036 - DNA, 15 bp, Homo sapiens
taaccaagtaaagct

SEQ ID NO: 205037 - DNA, 15 bp, Homo sapiens
ataaccaagtaaagc

SEQ ID NO: 205038 - DNA, 15 bp, Homo sapiens
tataaccaagtaaag

SEQ ID NO: 205039 - DNA, 15 bp, Homo sapiens
ttataaccaagtaaa

SEQ ID NO: 205040 - DNA, 15 bp, Homo sapiens
gttataaccaagtaa

SEQ ID NO: 205041 - DNA, 15 bp, Homo sapiens
agttataaccaagta

SEQ ID NO: 205042 - DNA, 15 bp, Homo sapiens
aagttataaccaagt

SEQ ID NO: 205043 - DNA, 15 bp, Homo sapiens
aaagttataaccaag

SEQ ID NO: 205044 - DNA, 15 bp, Homo sapiens
taaagttataaccaa

SEQ ID NO: 205045 - DNA, 15 bp, Homo sapiens
gtaaagttataacca

SEQ ID NO: 205046 - DNA, 15 bp, Homo sapiens
agtaaagttataacc

SEQ ID NO: 205047 - DNA, 15 bp, Homo sapiens
aagtaaagttataac

SEQ ID NO: 205048 - DNA, 15 bp, Homo sapiens
aaagtaaagttataa

SEQ ID NO: 205049 - DNA, 15 bp, Homo sapiens
aaaagtaaagttata

SEQ ID NO: 205050 - DNA, 15 bp, Homo sapiens
taaaagtaaagttat

SEQ ID NO: 205051 - DNA, 15 bp, Homo sapiens
ttaaaagtaaagtta

SEQ ID NO: 205052 - DNA, 15 bp, Homo sapiens
attaaaagtaaagtt

SEQ ID NO: 205053 - DNA, 15 bp, Homo sapiens
tattaaaagtaaagt

SEQ ID NO: 205054 - DNA, 15 bp, Homo sapiens
gtattaaaagtaaag

SEQ ID NO: 205055 - DNA, 15 bp, Homo sapiens
ggtattaaaagtaaa

SEQ ID NO: 205056 - DNA, 15 bp, Homo sapiens
aggtattaaaagtaa

SEQ ID NO: 205057 - DNA, 15 bp, Homo sapiens
taggtattaaaagta

SEQ ID NO: 205058 - DNA, 15 bp, Homo sapiens
ctaggtattaaaagt

SEQ ID NO: 205059 - DNA, 15 bp, Homo sapiens
tctaggtattaaaag

SEQ ID NO: 205060 - DNA, 15 bp, Homo sapiens
ttctaggtattaaaa

SEQ ID NO: 205061 - DNA, 15 bp, Homo sapiens
gttctaggtattaaa

SEQ ID NO: 205062 - DNA, 15 bp, Homo sapiens
tgttctaggtattaa

SEQ ID NO: 205063 - DNA, 15 bp, Homo sapiens
ctgttctaggtatta

SEQ ID NO: 205064 - DNA, 15 bp, Homo sapiens
actgttctaggtatt

SEQ ID NO: 205065 - DNA, 15 bp, Homo sapiens
cactgttctaggtat

SEQ ID NO: 205066 - DNA, 15 bp, Homo sapiens
tcactgttctaggta

SEQ ID NO: 205067 - DNA, 15 bp, Homo sapiens
ctcactgttctaggt

SEQ ID NO: 205068 - DNA, 15 bp, Homo sapiens
actcactgttctagg

SEQ ID NO: 205069 - DNA, 15 bp, Homo sapiens
gactcactgttctag

SEQ ID NO: 205070 - DNA, 15 bp, Homo sapiens
agactcactgttcta

SEQ ID NO: 205071 - DNA, 15 bp, Homo sapiens
aagactcactgttct

SEQ ID NO: 205072 - DNA, 15 bp, Homo sapiens
gaagactcactgttc

SEQ ID NO: 205073 - DNA, 15 bp, Homo sapiens
tgaagactcactgtt

SEQ ID NO: 205074 - DNA, 15 bp, Homo sapiens
ttgaagactcactgt

SEQ ID NO: 205075 - DNA, 15 bp, Homo sapiens
tttgaagactcactg

SEQ ID NO: 205076 - DNA, 15 bp, Homo sapiens
gtttgaagactcact

SEQ ID NO: 205077 - DNA, 15 bp, Homo sapiens
agtttgaagactcac

SEQ ID NO: 205078 - DNA, 15 bp, Homo sapiens
aagtttgaagactca

SEQ ID NO: 205079 - DNA, 15 bp, Homo sapiens
caagtttgaagactc

SEQ ID NO: 205080 - DNA, 15 bp, Homo sapiens
acaagtttgaagact

SEQ ID NO: 205081 - DNA, 15 bp, Homo sapiens
tacaagtttgaagac

SEQ ID NO: 205082 - DNA, 15 bp, Homo sapiens
atacaagtttgaaga

SEQ ID NO: 205083 - DNA, 15 bp, Homo sapiens
aatacaagtttgaag

SEQ ID NO: 205084 - DNA, 15 bp, Homo sapiens
aaatacaagtttgaa

SEQ ID NO: 205085 - DNA, 15 bp, Homo sapiens
caaatacaagtttga

SEQ ID NO: 205086 - DNA, 15 bp, Homo sapiens
gcaaatacaagtttg

SEQ ID NO: 205087 - DNA, 15 bp, Homo sapiens
tgcaaatacaagttt

SEQ ID NO: 205088 - DNA, 15 bp, Homo sapiens
atgcaaatacaagtt

SEQ ID NO: 205089 - DNA, 15 bp, Homo sapiens
catgcaaatacaagt

SEQ ID NO: 205090 - DNA, 15 bp, Homo sapiens
gcatgcaaatacaag

SEQ ID NO: 205091 - DNA, 15 bp, Homo sapiens
ggcatgcaaatacaa

SEQ ID NO: 205092 - DNA, 15 bp, Homo sapiens
gggcatgcaaataca

SEQ ID NO: 205093 - DNA, 15 bp, Homo sapiens
tgggcatgcaaatac

SEQ ID NO: 205094 - DNA, 15 bp, Homo sapiens
ttgggcatgcaaata

SEQ ID NO: 205095 - DNA, 15 bp, Homo sapiens
attgggcatgcaaat

SEQ ID NO: 205096 - DNA, 15 bp, Homo sapiens
aattgggcatgcaaa

SEQ ID NO: 205097 - DNA, 15 bp, Homo sapiens
aaattgggcatgcaa

SEQ ID NO: 205098 - DNA, 15 bp, Homo sapiens
taaattgggcatgca

SEQ ID NO: 205099 - DNA, 15 bp, Homo sapiens
ataaattgggcatgc

SEQ ID NO: 205100 - DNA, 15 bp, Homo sapiens
tataaattgggcatg

SEQ ID NO: 205101 - DNA, 15 bp, Homo sapiens
ttataaattgggcat

SEQ ID NO: 205102 - DNA, 15 bp, Homo sapiens
tttataaattgggca

SEQ ID NO: 205103 - DNA, 15 bp, Homo sapiens
ttttataaattgggc

SEQ ID NO: 205104 - DNA, 15 bp, Homo sapiens
tttttataaattggg

SEQ ID NO: 205105 - DNA, 15 bp, Homo sapiens
ctttttataaattgg

SEQ ID NO: 205106 - DNA, 15 bp, Homo sapiens
actttttataaattg

SEQ ID NO: 205107 - DNA, 15 bp, Homo sapiens
aactttttataaatt

SEQ ID NO: 205108 - DNA, 15 bp, Homo sapiens
aaactttttataaat

SEQ ID NO: 205109 - DNA, 15 bp, Homo sapiens
gaaactttttataaa

SEQ ID NO: 205110 - DNA, 15 bp, Homo sapiens
ggaaactttttataa

SEQ ID NO: 205111 - DNA, 15 bp, Homo sapiens
aggaaactttttata

SEQ ID NO: 205112 - DNA, 15 bp, Homo sapiens
caggaaactttttat

SEQ ID NO: 205113 - DNA, 15 bp, Homo sapiens
tcaggaaacttttta

SEQ ID NO: 205114 - DNA, 15 bp, Homo sapiens
ctcaggaaacttttt

SEQ ID NO: 205115 - DNA, 15 bp, Homo sapiens
gctcaggaaactttt

SEQ ID NO: 205116 - DNA, 15 bp, Homo sapiens
tgctcaggaaacttt

SEQ ID NO: 205117 - DNA, 15 bp, Homo sapiens
atgctcaggaaactt

SEQ ID NO: 205118 - DNA, 15 bp, Homo sapiens
aatgctcaggaaact

SEQ ID NO: 205119 - DNA, 15 bp, Homo sapiens
aaatgctcaggaaac

SEQ ID NO: 205120 - DNA, 15 bp, Homo sapiens
taaatgctcaggaaa

SEQ ID NO: 205121 - DNA, 15 bp, Homo sapiens
gtaaatgctcaggaa

SEQ ID NO: 205122 - DNA, 15 bp, Homo sapiens
ggtaaatgctcagga

SEQ ID NO: 205123 - DNA, 15 bp, Homo sapiens
gggtaaatgctcagg

SEQ ID NO: 205124 - DNA, 15 bp, Homo sapiens
ggggtaaatgctcag

SEQ ID NO: 205125 - DNA, 15 bp, Homo sapiens
aggggtaaatgctca

SEQ ID NO: 205126 - DNA, 15 bp, Homo sapiens
taggggtaaatgctc

SEQ ID NO: 205127 - DNA, 15 bp, Homo sapiens
ttaggggtaaatgct

SEQ ID NO: 205128 - DNA, 15 bp, Homo sapiens
attaggggtaaatgc

SEQ ID NO: 205129 - DNA, 15 bp, Homo sapiens
tattaggggtaaatg

SEQ ID NO: 205130 - DNA, 15 bp, Homo sapiens
atattaggggtaaat

SEQ ID NO: 205131 - DNA, 15 bp, Homo sapiens
tatattaggggtaaa

SEQ ID NO: 205132 - DNA, 15 bp, Homo sapiens
atatattaggggtaa

SEQ ID NO: 205133 - DNA, 15 bp, Homo sapiens
catatattaggggta

SEQ ID NO: 205134 - DNA, 15 bp, Homo sapiens
gcatatattaggggt

SEQ ID NO: 205135 - DNA, 15 bp, Homo sapiens
tgcatatattagggg

SEQ ID NO: 205136 - DNA, 15 bp, Homo sapiens
atgcatatattaggg

SEQ ID NO: 205137 - DNA, 15 bp, Homo sapiens
aatgcatatattagg

SEQ ID NO: 205138 - DNA, 15 bp, Homo sapiens
aaatgcatatattag

SEQ ID NO: 205139 - DNA, 15 bp, Homo sapiens
aaaatgcatatatta

SEQ ID NO: 205140 - DNA, 15 bp, Homo sapiens
taaaatgcatatatt

SEQ ID NO: 205141 - DNA, 15 bp, Homo sapiens
ttaaaatgcatatat

SEQ ID NO: 205142 - DNA, 15 bp, Homo sapiens
tttaaaatgcatata

SEQ ID NO: 205143 - DNA, 15 bp, Homo sapiens
atttaaaatgcatat

SEQ ID NO: 205144 - DNA, 15 bp, Homo sapiens
aatttaaaatgcata

SEQ ID NO: 205145 - DNA, 15 bp, Homo sapiens
taatttaaaatgcat

SEQ ID NO: 205146 - DNA, 15 bp, Homo sapiens
ataatttaaaatgca

SEQ ID NO: 205147 - DNA, 15 bp, Homo sapiens
tataatttaaaatgc

SEQ ID NO: 205148 - DNA, 15 bp, Homo sapiens
atataatttaaaatg

SEQ ID NO: 205149 - DNA, 15 bp, Homo sapiens
tatataatttaaaat

SEQ ID NO: 205150 - DNA, 15 bp, Homo sapiens
atatataatttaaaa

SEQ ID NO: 205151 - DNA, 15 bp, Homo sapiens
catatataatttaaa

SEQ ID NO: 205152 - DNA, 15 bp, Homo sapiens
tcatatataatttaa

SEQ ID NO: 205153 - DNA, 15 bp, Homo sapiens
atcatatataattta

SEQ ID NO: 205154 - DNA, 15 bp, Homo sapiens
aatcatatataattt

SEQ ID NO: 205155 - DNA, 15 bp, Homo sapiens
aaatcatatataatt

SEQ ID NO: 205156 - DNA, 15 bp, Homo sapiens
taaatcatatataat

SEQ ID NO: 205157 - DNA, 15 bp, Homo sapiens
ataaatcatatataa

SEQ ID NO: 205158 - DNA, 15 bp, Homo sapiens
cataaatcatatata

SEQ ID NO: 205159 - DNA, 15 bp, Homo sapiens
ccataaatcatatat

SEQ ID NO: 205160 - DNA, 15 bp, Homo sapiens
accataaatcatata

SEQ ID NO: 205161 - DNA, 15 bp, Homo sapiens
taccataaatcatat

SEQ ID NO: 205162 - DNA, 15 bp, Homo sapiens
ttaccataaatcata

SEQ ID NO: 205163 - DNA, 15 bp, Homo sapiens
attaccataaatcat

SEQ ID NO: 205164 - DNA, 15 bp, Homo sapiens
tattaccataaatca

SEQ ID NO: 205165 - DNA, 15 bp, Homo sapiens
ttattaccataaatc

SEQ ID NO: 205166 - DNA, 15 bp, Homo sapiens
attattaccataaat

SEQ ID NO: 205167 - DNA, 15 bp, Homo sapiens
tattattaccataaa

SEQ ID NO: 205168 - DNA, 15 bp, Homo sapiens
ttattattaccataa

SEQ ID NO: 205169 - DNA, 15 bp, Homo sapiens
attattattaccata

SEQ ID NO: 205170 - DNA, 15 bp, Homo sapiens
tattattattaccat

SEQ ID NO: 205171 - DNA, 15 bp, Homo sapiens
atattattattacca

SEQ ID NO: 205172 - DNA, 15 bp, Homo sapiens
tatattattattacc

SEQ ID NO: 205173 - DNA, 15 bp, Homo sapiens
atatattattattac

SEQ ID NO: 205174 - DNA, 15 bp, Homo sapiens
tatatattattatta

SEQ ID NO: 205175 - DNA, 15 bp, Homo sapiens
atatatattattatt

SEQ ID NO: 205176 - DNA, 15 bp, Homo sapiens
catatatattattat

SEQ ID NO: 205177 - DNA, 15 bp, Homo sapiens
acatatatattatta

SEQ ID NO: 205178 - DNA, 15 bp, Homo sapiens
aacatatatattatt

SEQ ID NO: 205179 - DNA, 15 bp, Homo sapiens
taacatatatattat

SEQ ID NO: 205180 - DNA, 15 bp, Homo sapiens
gtaacatatatatta

SEQ ID NO: 205181 - DNA, 15 bp, Homo sapiens
tgtaacatatatatt

SEQ ID NO: 205182 - DNA, 15 bp, Homo sapiens
ttgtaacatatatat

SEQ ID NO: 205183 - DNA, 15 bp, Homo sapiens
tttgtaacatatata

SEQ ID NO: 205184 - DNA, 15 bp, Homo sapiens
ttttgtaacatatat

SEQ ID NO: 205185 - DNA, 15 bp, Homo sapiens
attttgtaacatata

SEQ ID NO: 205186 - DNA, 15 bp, Homo sapiens
tattttgtaacatat

SEQ ID NO: 205187 - DNA, 15 bp, Homo sapiens
gtattttgtaacata

SEQ ID NO: 205188 - DNA, 15 bp, Homo sapiens
tgtattttgtaacat

SEQ ID NO: 205189 - DNA, 15 bp, Homo sapiens
atgtattttgtaaca

SEQ ID NO: 205190 - DNA, 15 bp, Homo sapiens
tatgtattttgtaac

SEQ ID NO: 205191 - DNA, 15 bp, Homo sapiens
gtatgtattttgtaa

SEQ ID NO: 205192 - DNA, 15 bp, Homo sapiens
tgtatgtattttgta

SEQ ID NO: 205193 - DNA, 15 bp, Homo sapiens
ttgtatgtattttgt

SEQ ID NO: 205194 - DNA, 15 bp, Homo sapiens
tttgtatgtattttg

SEQ ID NO: 205195 - DNA, 15 bp, Homo sapiens
ttttgtatgtatttt

SEQ ID NO: 205196 - DNA, 15 bp, Homo sapiens
tttttgtatgtattt

SEQ ID NO: 205197 - DNA, 15 bp, Homo sapiens
atttttgtatgtatt

SEQ ID NO: 205198 - DNA, 15 bp, Homo sapiens
tatttttgtatgtat

SEQ ID NO: 205199 - DNA, 15 bp, Homo sapiens
atatttttgtatgta

SEQ ID NO: 205200 - DNA, 15 bp, Homo sapiens
tatatttttgtatgt

SEQ ID NO: 205201 - DNA, 15 bp, Homo sapiens
ctatatttttgtatg

SEQ ID NO: 205202 - DNA, 15 bp, Homo sapiens
tctatatttttgtat

SEQ ID NO: 205203 - DNA, 15 bp, Homo sapiens
atctatatttttgta

SEQ ID NO: 205204 - DNA, 15 bp, Homo sapiens
aatctatatttttgt

SEQ ID NO: 205205 - DNA, 15 bp, Homo sapiens
taatctatatttttg

SEQ ID NO: 205206 - DNA, 15 bp, Homo sapiens
ttaatctatattttt

SEQ ID NO: 205207 - DNA, 15 bp, Homo sapiens
tttaatctatatttt

SEQ ID NO: 205208 - DNA, 15 bp, Homo sapiens
gtttaatctatattt

SEQ ID NO: 205209 - DNA, 15 bp, Homo sapiens
tgtttaatctatatt

SEQ ID NO: 205210 - DNA, 15 bp, Homo sapiens
ttgtttaatctatat

SEQ ID NO: 205211 - DNA, 15 bp, Homo sapiens
cttgtttaatctata

SEQ ID NO: 205212 - DNA, 15 bp, Homo sapiens
ccttgtttaatctat

SEQ ID NO: 205213 - DNA, 15 bp, Homo sapiens
accttgtttaatcta

SEQ ID NO: 205214 - DNA, 15 bp, Homo sapiens
caccttgtttaatct

SEQ ID NO: 205215 - DNA, 15 bp, Homo sapiens
tcaccttgtttaatc

SEQ ID NO: 205216 - DNA, 15 bp, Homo sapiens
ctcaccttgtttaat

SEQ ID NO: 205217 - DNA, 15 bp, Homo sapiens
cctcaccttgtttaa

SEQ ID NO: 205218 - DNA, 15 bp, Homo sapiens
acctcaccttgttta

SEQ ID NO: 205219 - DNA, 15 bp, Homo sapiens
tacctcaccttgttt

SEQ ID NO: 205220 - DNA, 15 bp, Homo sapiens
ttacctcaccttgtt

SEQ ID NO: 205221 - DNA, 15 bp, Homo sapiens
tttacctcaccttgt

SEQ ID NO: 205222 - DNA, 15 bp, Homo sapiens
ttttacctcaccttg

SEQ ID NO: 205223 - DNA, 15 bp, Homo sapiens
tttttacctcacctt

SEQ ID NO: 205224 - DNA, 15 bp, Homo sapiens
ttttttacctcacct

SEQ ID NO: 205225 - DNA, 15 bp, Homo sapiens
attttttacctcacc

SEQ ID NO: 205226 - DNA, 15 bp, Homo sapiens
aattttttacctcac

SEQ ID NO: 205227 - DNA, 15 bp, Homo sapiens
aaattttttacctca

SEQ ID NO: 205228 - DNA, 15 bp, Homo sapiens
taaattttttacctc

SEQ ID NO: 205229 - DNA, 15 bp, Homo sapiens
ttaaattttttacct

SEQ ID NO: 205230 - DNA, 15 bp, Homo sapiens
tttaaattttttacc

SEQ ID NO: 205231 - DNA, 15 bp, Homo sapiens
ttttaaattttttac

SEQ ID NO: 205232 - DNA, 15 bp, Homo sapiens
cttttaaatttttta

SEQ ID NO: 205233 - DNA, 15 bp, Homo sapiens
acttttaaatttttt

SEQ ID NO: 205234 - DNA, 15 bp, Homo sapiens
aacttttaaattttt

SEQ ID NO: 205235 - DNA, 15 bp, Homo sapiens
gaacttttaaatttt

SEQ ID NO: 205236 - DNA, 15 bp, Homo sapiens
agaacttttaaattt

SEQ ID NO: 205237 - DNA, 15 bp, Homo sapiens
tagaacttttaaatt

SEQ ID NO: 205238 - DNA, 15 bp, Homo sapiens
ttagaacttttaaat

SEQ ID NO: 205239 - DNA, 15 bp, Homo sapiens
attagaacttttaaa

SEQ ID NO: 205240 - DNA, 15 bp, Homo sapiens
gattagaacttttaa

SEQ ID NO: 205241 - DNA, 15 bp, Homo sapiens
agattagaactttta

SEQ ID NO: 205242 - DNA, 15 bp, Homo sapiens
aagattagaactttt

SEQ ID NO: 205243 - DNA, 15 bp, Homo sapiens
aaagattagaacttt

SEQ ID NO: 205244 - DNA, 15 bp, Homo sapiens
gaaagattagaactt

SEQ ID NO: 205245 - DNA, 15 bp, Homo sapiens
agaaagattagaact

SEQ ID NO: 205246 - DNA, 15 bp, Homo sapiens
aagaaagattagaac

SEQ ID NO: 205247 - DNA, 15 bp, Homo sapiens
caagaaagattagaa

SEQ ID NO: 205248 - DNA, 15 bp, Homo sapiens
gcaagaaagattaga

SEQ ID NO: 205249 - DNA, 15 bp, Homo sapiens
tgcaagaaagattag

SEQ ID NO: 205250 - DNA, 15 bp, Homo sapiens
ttgcaagaaagatta

SEQ ID NO: 205251 - DNA, 15 bp, Homo sapiens
tttgcaagaaagatt

SEQ ID NO: 205252 - DNA, 15 bp, Homo sapiens
gtttgcaagaaagat

SEQ ID NO: 205253 - DNA, 15 bp, Homo sapiens
ggtttgcaagaaaga

SEQ ID NO: 205254 - DNA, 15 bp, Homo sapiens
tggtttgcaagaaag

SEQ ID NO: 205255 - DNA, 15 bp, Homo sapiens
ctggtttgcaagaaa

SEQ ID NO: 205256 - DNA, 15 bp, Homo sapiens
actggtttgcaagaa

SEQ ID NO: 205257 - DNA, 15 bp, Homo sapiens
cactggtttgcaaga

SEQ ID NO: 205258 - DNA, 15 bp, Homo sapiens
ccactggtttgcaag

SEQ ID NO: 205259 - DNA, 15 bp, Homo sapiens
tccactggtttgcaa

SEQ ID NO: 205260 - DNA, 15 bp, Homo sapiens
atccactggtttgca

SEQ ID NO: 205261 - DNA, 15 bp, Homo sapiens
gatccactggtttgc

SEQ ID NO: 205262 - DNA, 15 bp, Homo sapiens
agatccactggtttg

SEQ ID NO: 205263 - DNA, 15 bp, Homo sapiens
aagatccactggttt

SEQ ID NO: 205264 - DNA, 15 bp, Homo sapiens
aaagatccactggtt

SEQ ID NO: 205265 - DNA, 15 bp, Homo sapiens
aaaagatccactggt

SEQ ID NO: 205266 - DNA, 15 bp, Homo sapiens
caaaagatccactgg

SEQ ID NO: 205267 - DNA, 15 bp, Homo sapiens
acaaaagatccactg

SEQ ID NO: 205268 - DNA, 15 bp, Homo sapiens
cacaaaagatccact

SEQ ID NO: 205269 - DNA, 15 bp, Homo sapiens
gcacaaaagatccac

SEQ ID NO: 205270 - DNA, 15 bp, Homo sapiens
ggcacaaaagatcca

SEQ ID NO: 205271 - DNA, 15 bp, Homo sapiens
aggcacaaaagatcc

SEQ ID NO: 205272 - DNA, 15 bp, Homo sapiens
aaggcacaaaagatc

SEQ ID NO: 205273 - DNA, 15 bp, Homo sapiens
taaggcacaaaagat

SEQ ID NO: 205274 - DNA, 15 bp, Homo sapiens
gtaaggcacaaaaga

SEQ ID NO: 205275 - DNA, 15 bp, Homo sapiens
agtaaggcacaaaag

SEQ ID NO: 205276 - DNA, 15 bp, Homo sapiens
gagtaaggcacaaaa

SEQ ID NO: 205277 - DNA, 15 bp, Homo sapiens
agagtaaggcacaaa

SEQ ID NO: 205278 - DNA, 15 bp, Homo sapiens
cagagtaaggcacaa

SEQ ID NO: 205279 - DNA, 15 bp, Homo sapiens
ccagagtaaggcaca

SEQ ID NO: 205280 - DNA, 15 bp, Homo sapiens
accagagtaaggcac

SEQ ID NO: 205281 - DNA, 15 bp, Homo sapiens
taccagagtaaggca

SEQ ID NO: 205282 - DNA, 15 bp, Homo sapiens
ttaccagagtaaggc

SEQ ID NO: 205283 - DNA, 15 bp, Homo sapiens
tttaccagagtaagg

SEQ ID NO: 205284 - DNA, 15 bp, Homo sapiens
gtttaccagagtaag

SEQ ID NO: 205285 - DNA, 15 bp, Homo sapiens
tgtttaccagagtaa

SEQ ID NO: 205286 - DNA, 15 bp, Homo sapiens
gtgtttaccagagta

SEQ ID NO: 205287 - DNA, 15 bp, Homo sapiens
agtgtttaccagagt

SEQ ID NO: 205288 - DNA, 15 bp, Homo sapiens
cagtgtttaccagag

SEQ ID NO: 205289 - DNA, 15 bp, Homo sapiens
acagtgtttaccaga

SEQ ID NO: 205290 - DNA, 15 bp, Homo sapiens
gacagtgtttaccag

SEQ ID NO: 205291 - DNA, 15 bp, Homo sapiens
agacagtgtttacca

SEQ ID NO: 205292 - DNA, 15 bp, Homo sapiens
aagacagtgtttacc

SEQ ID NO: 205293 - DNA, 15 bp, Homo sapiens
taagacagtgtttac

SEQ ID NO: 205294 - DNA, 15 bp, Homo sapiens
ctaagacagtgttta

SEQ ID NO: 205295 - DNA, 15 bp, Homo sapiens
tctaagacagtgttt

SEQ ID NO: 205296 - DNA, 15 bp, Homo sapiens
ttctaagacagtgtt

SEQ ID NO: 205297 - DNA, 15 bp, Homo sapiens
cttctaagacagtgt

SEQ ID NO: 205298 - DNA, 15 bp, Homo sapiens
tcttctaagacagtg

SEQ ID NO: 205299 - DNA, 15 bp, Homo sapiens
ttcttctaagacagt

SEQ ID NO: 205300 - DNA, 15 bp, Homo sapiens
attcttctaagacag

SEQ ID NO: 205301 - DNA, 15 bp, Homo sapiens
tattcttctaagaca

SEQ ID NO: 205302 - DNA, 15 bp, Homo sapiens
atattcttctaagac

SEQ ID NO: 205303 - DNA, 15 bp, Homo sapiens
tatattcttctaaga

SEQ ID NO: 205304 - DNA, 15 bp, Homo sapiens
atatattcttctaag

SEQ ID NO: 205305 - DNA, 15 bp, Homo sapiens
tatatattcttctaa

SEQ ID NO: 205306 - DNA, 15 bp, Homo sapiens
ctatatattcttcta

SEQ ID NO: 205307 - DNA, 15 bp, Homo sapiens
tctatatattcttct

SEQ ID NO: 205308 - DNA, 15 bp, Homo sapiens
ttctatatattcttc

SEQ ID NO: 205309 - DNA, 15 bp, Homo sapiens
gttctatatattctt

SEQ ID NO: 205310 - DNA, 15 bp, Homo sapiens
tgttctatatattct

SEQ ID NO: 205311 - DNA, 15 bp, Homo sapiens
atgttctatatattc

SEQ ID NO: 205312 - DNA, 15 bp, Homo sapiens
aatgttctatatatt

SEQ ID NO: 205313 - DNA, 15 bp, Homo sapiens
taatgttctatatat

SEQ ID NO: 205314 - DNA, 15 bp, Homo sapiens
ttaatgttctatata

SEQ ID NO: 205315 - DNA, 15 bp, Homo sapiens
tttaatgttctatat

SEQ ID NO: 205316 - DNA, 15 bp, Homo sapiens
ttttaatgttctata

SEQ ID NO: 205317 - DNA, 15 bp, Homo sapiens
attttaatgttctat

SEQ ID NO: 205318 - DNA, 15 bp, Homo sapiens
gattttaatgttcta

SEQ ID NO: 205319 - DNA, 15 bp, Homo sapiens
agattttaatgttct

SEQ ID NO: 205320 - DNA, 15 bp, Homo sapiens
aagattttaatgttc

SEQ ID NO: 205321 - DNA, 15 bp, Homo sapiens
taagattttaatgtt

SEQ ID NO: 205322 - DNA, 15 bp, Homo sapiens
ttaagattttaatgt

SEQ ID NO: 205323 - DNA, 15 bp, Homo sapiens
attaagattttaatg

SEQ ID NO: 205324 - DNA, 15 bp, Homo sapiens
cattaagattttaat

SEQ ID NO: 205325 - DNA, 15 bp, Homo sapiens
gcattaagattttaa

SEQ ID NO: 205326 - DNA, 15 bp, Homo sapiens
agcattaagatttta

SEQ ID NO: 205327 - DNA, 15 bp, Homo sapiens
tagcattaagatttt

SEQ ID NO: 205328 - DNA, 15 bp, Homo sapiens
atagcattaagattt

SEQ ID NO: 205329 - DNA, 15 bp, Homo sapiens
tatagcattaagatt

SEQ ID NO: 205330 - DNA, 15 bp, Homo sapiens
ctatagcattaagat

SEQ ID NO: 205331 - DNA, 15 bp, Homo sapiens
actatagcattaaga

SEQ ID NO: 205332 - DNA, 15 bp, Homo sapiens
aactatagcattaag

SEQ ID NO: 205333 - DNA, 15 bp, Homo sapiens
taactatagcattaa

SEQ ID NO: 205334 - DNA, 15 bp, Homo sapiens
ataactatagcatta

SEQ ID NO: 205335 - DNA, 15 bp, Homo sapiens
tataactatagcatt

SEQ ID NO: 205336 - DNA, 15 bp, Homo sapiens
atataactatagcat

SEQ ID NO: 205337 - DNA, 15 bp, Homo sapiens
catataactatagca

SEQ ID NO: 205338 - DNA, 15 bp, Homo sapiens
tcatataactatagc

SEQ ID NO: 205339 - DNA, 15 bp, Homo sapiens
gtcatataactatag

SEQ ID NO: 205340 - DNA, 15 bp, Homo sapiens
tgtcatataactata

SEQ ID NO: 205341 - DNA, 15 bp, Homo sapiens
ctgtcatataactat

SEQ ID NO: 205342 - DNA, 15 bp, Homo sapiens
tctgtcatataacta

SEQ ID NO: 205343 - DNA, 15 bp, Homo sapiens
ctctgtcatataact

SEQ ID NO: 205344 - DNA, 15 bp, Homo sapiens
actctgtcatataac

SEQ ID NO: 205345 - DNA, 15 bp, Homo sapiens
tactctgtcatataa

SEQ ID NO: 205346 - DNA, 15 bp, Homo sapiens
atactctgtcatata

SEQ ID NO: 205347 - DNA, 15 bp, Homo sapiens
catactctgtcatat

SEQ ID NO: 205348 - DNA, 15 bp, Homo sapiens
tcatactctgtcata

SEQ ID NO: 205349 - DNA, 15 bp, Homo sapiens
atcatactctgtcat

SEQ ID NO: 205350 - DNA, 15 bp, Homo sapiens
catcatactctgtca

SEQ ID NO: 205351 - DNA, 15 bp, Homo sapiens
tcatcatactctgtc

SEQ ID NO: 205352 - DNA, 15 bp, Homo sapiens
ctcatcatactctgt

SEQ ID NO: 205353 - DNA, 15 bp, Homo sapiens
tctcatcatactctg

SEQ ID NO: 205354 - DNA, 15 bp, Homo sapiens
ctctcatcatactct

SEQ ID NO: 205355 - DNA, 15 bp, Homo sapiens
gctctcatcatactc

SEQ ID NO: 205356 - DNA, 15 bp, Homo sapiens
agctctcatcatact

SEQ ID NO: 205357 - DNA, 15 bp, Homo sapiens
tagctctcatcatac

SEQ ID NO: 205358 - DNA, 15 bp, Homo sapiens
gtagctctcatcata

SEQ ID NO: 205359 - DNA, 15 bp, Homo sapiens
tgtagctctcatcat

SEQ ID NO: 205360 - DNA, 15 bp, Homo sapiens
ctgtagctctcatca

SEQ ID NO: 205361 - DNA, 15 bp, Homo sapiens
tctgtagctctcatc

SEQ ID NO: 205362 - DNA, 15 bp, Homo sapiens
atctgtagctctcat

SEQ ID NO: 205363 - DNA, 15 bp, Homo sapiens
tatctgtagctctca

SEQ ID NO: 205364 - DNA, 15 bp, Homo sapiens
ttatctgtagctctc

SEQ ID NO: 205365 - DNA, 15 bp, Homo sapiens
tttatctgtagctct

SEQ ID NO: 205366 - DNA, 15 bp, Homo sapiens
gtttatctgtagctc

SEQ ID NO: 205367 - DNA, 15 bp, Homo sapiens
tgtttatctgtagct

SEQ ID NO: 205368 - DNA, 15 bp, Homo sapiens
ttgtttatctgtagc

SEQ ID NO: 205369 - DNA, 15 bp, Homo sapiens
gttgtttatctgtag

SEQ ID NO: 205370 - DNA, 15 bp, Homo sapiens
tgttgtttatctgta

SEQ ID NO: 205371 - DNA, 15 bp, Homo sapiens
gtgttgtttatctgt

SEQ ID NO: 205372 - DNA, 15 bp, Homo sapiens
tgtgttgtttatctg

SEQ ID NO: 205373 - DNA, 15 bp, Homo sapiens
atgtgttgtttatct

SEQ ID NO: 205374 - DNA, 15 bp, Homo sapiens
gatgtgttgtttatc

SEQ ID NO: 205375 - DNA, 15 bp, Homo sapiens
tgatgtgttgtttat

SEQ ID NO: 205376 - DNA, 15 bp, Homo sapiens
atgatgtgttgttta

SEQ ID NO: 205377 - DNA, 15 bp, Homo sapiens
catgatgtgttgttt

SEQ ID NO: 205378 - DNA, 15 bp, Homo sapiens
tcatgatgtgttgtt

SEQ ID NO: 205379 - DNA, 15 bp, Homo sapiens
ttcatgatgtgttgt

SEQ ID NO: 205380 - DNA, 15 bp, Homo sapiens
attcatgatgtgttg

SEQ ID NO: 205381 - DNA, 15 bp, Homo sapiens
gattcatgatgtgtt

SEQ ID NO: 205382 - DNA, 15 bp, Homo sapiens
agattcatgatgtgt

SEQ ID NO: 205383 - DNA, 15 bp, Homo sapiens
aagattcatgatgtg

SEQ ID NO: 205384 - DNA, 15 bp, Homo sapiens
gaagattcatgatgt

SEQ ID NO: 205385 - DNA, 15 bp, Homo sapiens
agaagattcatgatg

SEQ ID NO: 205386 - DNA, 15 bp, Homo sapiens
aagaagattcatgat

SEQ ID NO: 205387 - DNA, 15 bp, Homo sapiens
caagaagattcatga

SEQ ID NO: 205388 - DNA, 15 bp, Homo sapiens
acaagaagattcatg

SEQ ID NO: 205389 - DNA, 15 bp, Homo sapiens
cacaagaagattcat

SEQ ID NO: 205390 - DNA, 15 bp, Homo sapiens
ccacaagaagattca

SEQ ID NO: 205391 - DNA, 15 bp, Homo sapiens
gccacaagaagattc

SEQ ID NO: 205392 - DNA, 15 bp, Homo sapiens
tgccacaagaagatt

SEQ ID NO: 205393 - DNA, 15 bp, Homo sapiens
ctgccacaagaagat

SEQ ID NO: 205394 - DNA, 15 bp, Homo sapiens
actgccacaagaaga

SEQ ID NO: 205395 - DNA, 15 bp, Homo sapiens
cactgccacaagaag

SEQ ID NO: 205396 - DNA, 15 bp, Homo sapiens
acactgccacaagaa

SEQ ID NO: 205397 - DNA, 15 bp, Homo sapiens
aacactgccacaaga

SEQ ID NO: 205398 - DNA, 15 bp, Homo sapiens
aaacactgccacaag

SEQ ID NO: 205399 - DNA, 15 bp, Homo sapiens
taaacactgccacaa

SEQ ID NO: 205400 - DNA, 15 bp, Homo sapiens
ataaacactgccaca

SEQ ID NO: 205401 - DNA, 15 bp, Homo sapiens
tataaacactgccac

SEQ ID NO: 205402 - DNA, 15 bp, Homo sapiens
ttataaacactgcca

SEQ ID NO: 205403 - DNA, 15 bp, Homo sapiens
gttataaacactgcc

SEQ ID NO: 205404 - DNA, 15 bp, Homo sapiens
ggttataaacactgc

SEQ ID NO: 205405 - DNA, 15 bp, Homo sapiens
tggttataaacactg

SEQ ID NO: 205406 - DNA, 15 bp, Homo sapiens
atggttataaacact

SEQ ID NO: 205407 - DNA, 15 bp, Homo sapiens
aatggttataaacac

SEQ ID NO: 205408 - DNA, 15 bp, Homo sapiens
taatggttataaaca

SEQ ID NO: 205409 - DNA, 15 bp, Homo sapiens
ataatggttataaac

SEQ ID NO: 205410 - DNA, 15 bp, Homo sapiens
cataatggttataaa

SEQ ID NO: 205411 - DNA, 15 bp, Homo sapiens
acataatggttataa

SEQ ID NO: 205412 - DNA, 15 bp, Homo sapiens
cacataatggttata

SEQ ID NO: 205413 - DNA, 15 bp, Homo sapiens
tcacataatggttat

SEQ ID NO: 205414 - DNA, 15 bp, Homo sapiens
ttcacataatggtta

SEQ ID NO: 205415 - DNA, 15 bp, Homo sapiens
tttcacataatggtt

SEQ ID NO: 205416 - DNA, 15 bp, Homo sapiens
atttcacataatggt

SEQ ID NO: 205417 - DNA, 15 bp, Homo sapiens
catttcacataatgg

SEQ ID NO: 205418 - DNA, 15 bp, Homo sapiens
gcatttcacataatg

SEQ ID NO: 205419 - DNA, 15 bp, Homo sapiens
agcatttcacataat

SEQ ID NO: 205420 - DNA, 15 bp, Homo sapiens
cagcatttcacataa

SEQ ID NO: 205421 - DNA, 15 bp, Homo sapiens
gcagcatttcacata

SEQ ID NO: 205422 - DNA, 15 bp, Homo sapiens
ggcagcatttcacat

SEQ ID NO: 205423 - DNA, 15 bp, Homo sapiens
aggcagcatttcaca

SEQ ID NO: 205424 - DNA, 15 bp, Homo sapiens
gaggcagcatttcac

SEQ ID NO: 205425 - DNA, 15 bp, Homo sapiens
tgaggcagcatttca

SEQ ID NO: 205426 - DNA, 15 bp, Homo sapiens
atgaggcagcatttc

SEQ ID NO: 205427 - DNA, 15 bp, Homo sapiens
aatgaggcagcattt

SEQ ID NO: 205428 - DNA, 15 bp, Homo sapiens
gaatgaggcagcatt

SEQ ID NO: 205429 - DNA, 15 bp, Homo sapiens
agaatgaggcagcat

SEQ ID NO: 205430 - DNA, 15 bp, Homo sapiens
aagaatgaggcagca

SEQ ID NO: 205431 - DNA, 15 bp, Homo sapiens
taagaatgaggcagc

SEQ ID NO: 205432 - DNA, 15 bp, Homo sapiens
ataagaatgaggcag

SEQ ID NO: 205433 - DNA, 15 bp, Homo sapiens
tataagaatgaggca

SEQ ID NO: 205434 - DNA, 15 bp, Homo sapiens
ttataagaatgaggc

SEQ ID NO: 205435 - DNA, 15 bp, Homo sapiens
gttataagaatgagg

SEQ ID NO: 205436 - DNA, 15 bp, Homo sapiens
agttataagaatgag

SEQ ID NO: 205437 - DNA, 15 bp, Homo sapiens
tagttataagaatga

SEQ ID NO: 205438 - DNA, 15 bp, Homo sapiens
ctagttataagaatg

SEQ ID NO: 205439 - DNA, 15 bp, Homo sapiens
gctagttataagaat

SEQ ID NO: 205440 - DNA, 15 bp, Homo sapiens
tgctagttataagaa

SEQ ID NO: 205441 - DNA, 15 bp, Homo sapiens
atgctagttataaga

SEQ ID NO: 205442 - DNA, 15 bp, Homo sapiens
tatgctagttataag

SEQ ID NO: 205443 - DNA, 15 bp, Homo sapiens
ttatgctagttataa

SEQ ID NO: 205444 - DNA, 15 bp, Homo sapiens
cttatgctagttata

SEQ ID NO: 205445 - DNA, 15 bp, Homo sapiens
tcttatgctagttat

SEQ ID NO: 205446 - DNA, 15 bp, Homo sapiens
ttcttatgctagtta

SEQ ID NO: 205447 - DNA, 15 bp, Homo sapiens
gttcttatgctagtt

SEQ ID NO: 205448 - DNA, 15 bp, Homo sapiens
tgttcttatgctagt

SEQ ID NO: 205449 - DNA, 15 bp, Homo sapiens
ctgttcttatgctag

SEQ ID NO: 205450 - DNA, 15 bp, Homo sapiens
tctgttcttatgcta

SEQ ID NO: 205451 - DNA, 15 bp, Homo sapiens
atctgttcttatgct

SEQ ID NO: 205452 - DNA, 15 bp, Homo sapiens
tatctgttcttatgc

SEQ ID NO: 205453 - DNA, 15 bp, Homo sapiens
ctatctgttcttatg

SEQ ID NO: 205454 - DNA, 15 bp, Homo sapiens
cctatctgttcttat

SEQ ID NO: 205455 - DNA, 15 bp, Homo sapiens
tcctatctgttctta

SEQ ID NO: 205456 - DNA, 15 bp, Homo sapiens
gtcctatctgttctt

SEQ ID NO: 205457 - DNA, 15 bp, Homo sapiens
agtcctatctgttct

SEQ ID NO: 205458 - DNA, 15 bp, Homo sapiens
aagtcctatctgttc

SEQ ID NO: 205459 - DNA, 15 bp, Homo sapiens
aaagtcctatctgtt

SEQ ID NO: 205460 - DNA, 15 bp, Homo sapiens
gaaagtcctatctgt

SEQ ID NO: 205461 - DNA, 15 bp, Homo sapiens
agaaagtcctatctg

SEQ ID NO: 205462 - DNA, 15 bp, Homo sapiens
gagaaagtcctatct

SEQ ID NO: 205463 - DNA, 15 bp, Homo sapiens
cgagaaagtcctatc

SEQ ID NO: 205464 - DNA, 15 bp, Homo sapiens
tcgagaaagtcctat

SEQ ID NO: 205465 - DNA, 15 bp, Homo sapiens
atcgagaaagtccta

SEQ ID NO: 205466 - DNA, 15 bp, Homo sapiens
aatcgagaaagtcct

SEQ ID NO: 205467 - DNA, 15 bp, Homo sapiens
aaatcgagaaagtcc

SEQ ID NO: 205468 - DNA, 15 bp, Homo sapiens
aaaatcgagaaagtc

SEQ ID NO: 205469 - DNA, 15 bp, Homo sapiens
caaaatcgagaaagt

SEQ ID NO: 205470 - DNA, 15 bp, Homo sapiens
tcaaaatcgagaaag

SEQ ID NO: 205471 - DNA, 15 bp, Homo sapiens
ctcaaaatcgagaaa

SEQ ID NO: 205472 - DNA, 15 bp, Homo sapiens
cctcaaaatcgagaa

SEQ ID NO: 205473 - DNA, 15 bp, Homo sapiens
ccctcaaaatcgaga

SEQ ID NO: 205474 - DNA, 15 bp, Homo sapiens
cccctcaaaatcgag

SEQ ID NO: 205475 - DNA, 15 bp, Homo sapiens
acccctcaaaatcga

SEQ ID NO: 205476 - DNA, 15 bp, Homo sapiens
tacccctcaaaatcg

SEQ ID NO: 205477 - DNA, 15 bp, Homo sapiens
ttacccctcaaaatc

SEQ ID NO: 205478 - DNA, 15 bp, Homo sapiens
attacccctcaaaat

SEQ ID NO: 205479 - DNA, 15 bp, Homo sapiens
aattacccctcaaaa

SEQ ID NO: 205480 - DNA, 15 bp, Homo sapiens
taattacccctcaaa

SEQ ID NO: 205481 - DNA, 15 bp, Homo sapiens
ataattacccctcaa

SEQ ID NO: 205482 - DNA, 15 bp, Homo sapiens
aataattacccctca

SEQ ID NO: 205483 - DNA, 15 bp, Homo sapiens
taataattacccctc

SEQ ID NO: 205484 - DNA, 15 bp, Homo sapiens
ctaataattacccct

SEQ ID NO: 205485 - DNA, 15 bp, Homo sapiens
tctaataattacccc

SEQ ID NO: 205486 - DNA, 15 bp, Homo sapiens
atctaataattaccc

SEQ ID NO: 205487 - DNA, 15 bp, Homo sapiens
catctaataattacc

SEQ ID NO: 205488 - DNA, 15 bp, Homo sapiens
ccatctaataattac

SEQ ID NO: 205489 - DNA, 15 bp, Homo sapiens
accatctaataatta

SEQ ID NO: 205490 - DNA, 15 bp, Homo sapiens
taccatctaataatt

SEQ ID NO: 205491 - DNA, 15 bp, Homo sapiens
ataccatctaataat

SEQ ID NO: 205492 - DNA, 15 bp, Homo sapiens
aataccatctaataa

SEQ ID NO: 205493 - DNA, 15 bp, Homo sapiens
aaataccatctaata

SEQ ID NO: 205494 - DNA, 15 bp, Homo sapiens
aaaataccatctaat

SEQ ID NO: 205495 - DNA, 15 bp, Homo sapiens
gaaaataccatctaa

SEQ ID NO: 205496 - DNA, 15 bp, Homo sapiens
agaaaataccatcta

SEQ ID NO: 205497 - DNA, 15 bp, Homo sapiens
cagaaaataccatct

SEQ ID NO: 205498 - DNA, 15 bp, Homo sapiens
acagaaaataccatc

SEQ ID NO: 205499 - DNA, 15 bp, Homo sapiens
aacagaaaataccat

SEQ ID NO: 205500 - DNA, 15 bp, Homo sapiens
taacagaaaatacca

SEQ ID NO: 205501 - DNA, 15 bp, Homo sapiens
ttaacagaaaatacc

SEQ ID NO: 205502 - DNA, 15 bp, Homo sapiens
cttaacagaaaatac

SEQ ID NO: 205503 - DNA, 15 bp, Homo sapiens
ccttaacagaaaata

SEQ ID NO: 205504 - DNA, 15 bp, Homo sapiens
tccttaacagaaaat

SEQ ID NO: 205505 - DNA, 15 bp, Homo sapiens
gtccttaacagaaaa

SEQ ID NO: 205506 - DNA, 15 bp, Homo sapiens
agtccttaacagaaa

SEQ ID NO: 205507 - DNA, 15 bp, Homo sapiens
gagtccttaacagaa

SEQ ID NO: 205508 - DNA, 15 bp, Homo sapiens
agagtccttaacaga

SEQ ID NO: 205509 - DNA, 15 bp, Homo sapiens
aagagtccttaacag

SEQ ID NO: 205510 - DNA, 15 bp, Homo sapiens
gaagagtccttaaca

SEQ ID NO: 205511 - DNA, 15 bp, Homo sapiens
ggaagagtccttaac

SEQ ID NO: 205512 - DNA, 15 bp, Homo sapiens
tggaagagtccttaa

SEQ ID NO: 205513 - DNA, 15 bp, Homo sapiens
ctggaagagtcctta

SEQ ID NO: 205514 - DNA, 15 bp, Homo sapiens
gctggaagagtcctt

SEQ ID NO: 205515 - DNA, 15 bp, Homo sapiens
agctggaagagtcct

SEQ ID NO: 205516 - DNA, 15 bp, Homo sapiens
tagctggaagagtcc

SEQ ID NO: 205517 - DNA, 15 bp, Homo sapiens
atagctggaagagtc

SEQ ID NO: 205518 - DNA, 15 bp, Homo sapiens
tatagctggaagagt

SEQ ID NO: 205519 - DNA, 15 bp, Homo sapiens
ttatagctggaagag

SEQ ID NO: 205520 - DNA, 15 bp, Homo sapiens
tttatagctggaaga

SEQ ID NO: 205521 - DNA, 15 bp, Homo sapiens
ttttatagctggaag

SEQ ID NO: 205522 - DNA, 15 bp, Homo sapiens
attttatagctggaa

SEQ ID NO: 205523 - DNA, 15 bp, Homo sapiens
aattttatagctgga

SEQ ID NO: 205524 - DNA, 15 bp, Homo sapiens
gaattttatagctgg

SEQ ID NO: 205525 - DNA, 15 bp, Homo sapiens
agaattttatagctg

SEQ ID NO: 205526 - DNA, 15 bp, Homo sapiens
aagaattttatagct

SEQ ID NO: 205527 - DNA, 15 bp, Homo sapiens
taagaattttatagc

SEQ ID NO: 205528 - DNA, 15 bp, Homo sapiens
ttaagaattttatag

SEQ ID NO: 205529 - DNA, 15 bp, Homo sapiens
tttaagaattttata

SEQ ID NO: 205530 - DNA, 15 bp, Homo sapiens
atttaagaattttat

SEQ ID NO: 205531 - DNA, 15 bp, Homo sapiens
catttaagaatttta

SEQ ID NO: 205532 - DNA, 15 bp, Homo sapiens
acatttaagaatttt

SEQ ID NO: 205533 - DNA, 15 bp, Homo sapiens
tacatttaagaattt

SEQ ID NO: 205534 - DNA, 15 bp, Homo sapiens
ctacatttaagaatt

SEQ ID NO: 205535 - DNA, 15 bp, Homo sapiens
tctacatttaagaat

SEQ ID NO: 205536 - DNA, 15 bp, Homo sapiens
ttctacatttaagaa

SEQ ID NO: 205537 - DNA, 15 bp, Homo sapiens
tttctacatttaaga

SEQ ID NO: 205538 - DNA, 15 bp, Homo sapiens
ctttctacatttaag

SEQ ID NO: 205539 - DNA, 15 bp, Homo sapiens
gctttctacatttaa

SEQ ID NO: 205540 - DNA, 15 bp, Homo sapiens
cgctttctacattta

SEQ ID NO: 205541 - DNA, 15 bp, Homo sapiens
tcgctttctacattt

SEQ ID NO: 205542 - DNA, 15 bp, Homo sapiens
ttcgctttctacatt

SEQ ID NO: 205543 - DNA, 15 bp, Homo sapiens
cttcgctttctacat

SEQ ID NO: 205544 - DNA, 15 bp, Homo sapiens
acttcgctttctaca

SEQ ID NO: 205545 - DNA, 15 bp, Homo sapiens
cacttcgctttctac

SEQ ID NO: 205546 - DNA, 15 bp, Homo sapiens
tcacttcgctttcta

SEQ ID NO: 205547 - DNA, 15 bp, Homo sapiens
ctcacttcgctttct

SEQ ID NO: 205548 - DNA, 15 bp, Homo sapiens
cctcacttcgctttc

SEQ ID NO: 205549 - DNA, 15 bp, Homo sapiens
ccctcacttcgcttt

SEQ ID NO: 205550 - DNA, 15 bp, Homo sapiens
accctcacttcgctt

SEQ ID NO: 205551 - DNA, 15 bp, Homo sapiens
aaccctcacttcgct

SEQ ID NO: 205552 - DNA, 15 bp, Homo sapiens
aaaccctcacttcgc

SEQ ID NO: 205553 - DNA, 15 bp, Homo sapiens
taaaccctcacttcg

SEQ ID NO: 205554 - DNA, 15 bp, Homo sapiens
ataaaccctcacttc

SEQ ID NO: 205555 - DNA, 15 bp, Homo sapiens
cataaaccctcactt

SEQ ID NO: 205556 - DNA, 15 bp, Homo sapiens
ccataaaccctcact

SEQ ID NO: 205557 - DNA, 15 bp, Homo sapiens
accataaaccctcac

SEQ ID NO: 205558 - DNA, 15 bp, Homo sapiens
caccataaaccctca

SEQ ID NO: 205559 - DNA, 15 bp, Homo sapiens
tcaccataaaccctc

SEQ ID NO: 205560 - DNA, 15 bp, Homo sapiens
ctcaccataaaccct

SEQ ID NO: 205561 - DNA, 15 bp, Homo sapiens
tctcaccataaaccc

SEQ ID NO: 205562 - DNA, 15 bp, Homo sapiens
ctctcaccataaacc

SEQ ID NO: 205563 - DNA, 15 bp, Homo sapiens
cctctcaccataaac

SEQ ID NO: 205564 - DNA, 15 bp, Homo sapiens
tcctctcaccataaa

SEQ ID NO: 205565 - DNA, 15 bp, Homo sapiens
ttcctctcaccataa

SEQ ID NO: 205566 - DNA, 15 bp, Homo sapiens
cttcctctcaccata

SEQ ID NO: 205567 - DNA, 15 bp, Homo sapiens
gcttcctctcaccat

SEQ ID NO: 205568 - DNA, 15 bp, Homo sapiens
tgcttcctctcacca

SEQ ID NO: 205569 - DNA, 15 bp, Homo sapiens
atgcttcctctcacc

SEQ ID NO: 205570 - DNA, 15 bp, Homo sapiens
aatgcttcctctcac

SEQ ID NO: 205571 - DNA, 15 bp, Homo sapiens
caatgcttcctctca

SEQ ID NO: 205572 - DNA, 15 bp, Homo sapiens
ccaatgcttcctctc

SEQ ID NO: 205573 - DNA, 15 bp, Homo sapiens
accaatgcttcctct

SEQ ID NO: 205574 - DNA, 15 bp, Homo sapiens
taccaatgcttcctc

SEQ ID NO: 205575 - DNA, 15 bp, Homo sapiens
ataccaatgcttcct

SEQ ID NO: 205576 - DNA, 15 bp, Homo sapiens
gataccaatgcttcc

SEQ ID NO: 205577 - DNA, 15 bp, Homo sapiens
tgataccaatgcttc

SEQ ID NO: 205578 - DNA, 15 bp, Homo sapiens
atgataccaatgctt

SEQ ID NO: 205579 - DNA, 15 bp, Homo sapiens
catgataccaatgct

SEQ ID NO: 205580 - DNA, 15 bp, Homo sapiens
acatgataccaatgc

SEQ ID NO: 205581 - DNA, 15 bp, Homo sapiens
aacatgataccaatg

SEQ ID NO: 205582 - DNA, 15 bp, Homo sapiens
aaacatgataccaat

SEQ ID NO: 205583 - DNA, 15 bp, Homo sapiens
aaaacatgataccaa

SEQ ID NO: 205584 - DNA, 15 bp, Homo sapiens
taaaacatgatacca

SEQ ID NO: 205585 - DNA, 15 bp, Homo sapiens
ctaaaacatgatacc

SEQ ID NO: 205586 - DNA, 15 bp, Homo sapiens
actaaaacatgatac

SEQ ID NO: 205587 - DNA, 15 bp, Homo sapiens
cactaaaacatgata

SEQ ID NO: 205588 - DNA, 15 bp, Homo sapiens
acactaaaacatgat

SEQ ID NO: 205589 - DNA, 15 bp, Homo sapiens
tacactaaaacatga

SEQ ID NO: 205590 - DNA, 15 bp, Homo sapiens
ctacactaaaacatg

SEQ ID NO: 205591 - DNA, 15 bp, Homo sapiens
actacactaaaacat

SEQ ID NO: 205592 - DNA, 15 bp, Homo sapiens
gactacactaaaaca

SEQ ID NO: 205593 - DNA, 15 bp, Homo sapiens
ggactacactaaaac

SEQ ID NO: 205594 - DNA, 15 bp, Homo sapiens
tggactacactaaaa

SEQ ID NO: 205595 - DNA, 15 bp, Homo sapiens
ttggactacactaaa

SEQ ID NO: 205596 - DNA, 15 bp, Homo sapiens
cttggactacactaa

SEQ ID NO: 205597 - DNA, 15 bp, Homo sapiens
tcttggactacacta

SEQ ID NO: 205598 - DNA, 15 bp, Homo sapiens
ttcttggactacact

SEQ ID NO: 205599 - DNA, 15 bp, Homo sapiens
attcttggactacac

SEQ ID NO: 205600 - DNA, 15 bp, Homo sapiens
tattcttggactaca

SEQ ID NO: 205601 - DNA, 15 bp, Homo sapiens
atattcttggactac

SEQ ID NO: 205602 - DNA, 15 bp, Homo sapiens
catattcttggacta

SEQ ID NO: 205603 - DNA, 15 bp, Homo sapiens
ccatattcttggact

SEQ ID NO: 205604 - DNA, 15 bp, Homo sapiens
tccatattcttggac

SEQ ID NO: 205605 - DNA, 15 bp, Homo sapiens
gtccatattcttgga

SEQ ID NO: 205606 - DNA, 15 bp, Homo sapiens
tgtccatattcttgg

SEQ ID NO: 205607 - DNA, 15 bp, Homo sapiens
gtgtccatattcttg

SEQ ID NO: 205608 - DNA, 15 bp, Homo sapiens
tgtgtccatattctt

SEQ ID NO: 205609 - DNA, 15 bp, Homo sapiens
atgtgtccatattct

SEQ ID NO: 205610 - DNA, 15 bp, Homo sapiens
gatgtgtccatattc

SEQ ID NO: 205611 - DNA, 15 bp, Homo sapiens
ggatgtgtccatatt

SEQ ID NO: 205612 - DNA, 15 bp, Homo sapiens
tggatgtgtccatat

SEQ ID NO: 205613 - DNA, 15 bp, Homo sapiens
ctggatgtgtccata

SEQ ID NO: 205614 - DNA, 15 bp, Homo sapiens
tctggatgtgtccat

SEQ ID NO: 205615 - DNA, 15 bp, Homo sapiens
ttctggatgtgtcca

SEQ ID NO: 205616 - DNA, 15 bp, Homo sapiens
tttctggatgtgtcc

SEQ ID NO: 205617 - DNA, 15 bp, Homo sapiens
ttttctggatgtgtc

SEQ ID NO: 205618 - DNA, 15 bp, Homo sapiens
attttctggatgtgt

SEQ ID NO: 205619 - DNA, 15 bp, Homo sapiens
cattttctggatgtg

SEQ ID NO: 205620 - DNA, 15 bp, Homo sapiens
gcattttctggatgt

SEQ ID NO: 205621 - DNA, 15 bp, Homo sapiens
tgcattttctggatg

SEQ ID NO: 205622 - DNA, 15 bp, Homo sapiens
ctgcattttctggat

SEQ ID NO: 205623 - DNA, 15 bp, Homo sapiens
tctgcattttctgga

SEQ ID NO: 205624 - DNA, 15 bp, Homo sapiens
atctgcattttctgg

SEQ ID NO: 205625 - DNA, 15 bp, Homo sapiens
gatctgcattttctg

SEQ ID NO: 205626 - DNA, 15 bp, Homo sapiens
tgatctgcattttct

SEQ ID NO: 205627 - DNA, 15 bp, Homo sapiens
ttgatctgcattttc

SEQ ID NO: 205628 - DNA, 15 bp, Homo sapiens
cttgatctgcatttt

SEQ ID NO: 205629 - DNA, 15 bp, Homo sapiens
acttgatctgcattt

SEQ ID NO: 205630 - DNA, 15 bp, Homo sapiens
aacttgatctgcatt

SEQ ID NO: 205631 - DNA, 15 bp, Homo sapiens
aaacttgatctgcat

SEQ ID NO: 205632 - DNA, 15 bp, Homo sapiens
taaacttgatctgca

SEQ ID NO: 205633 - DNA, 15 bp, Homo sapiens
ctaaacttgatctgc

SEQ ID NO: 205634 - DNA, 15 bp, Homo sapiens
gctaaacttgatctg

SEQ ID NO: 205635 - DNA, 15 bp, Homo sapiens
ggctaaacttgatct

SEQ ID NO: 205636 - DNA, 15 bp, Homo sapiens
aggctaaacttgatc

SEQ ID NO: 205637 - DNA, 15 bp, Homo sapiens
taggctaaacttgat

SEQ ID NO: 205638 - DNA, 15 bp, Homo sapiens
ttaggctaaacttga

SEQ ID NO: 205639 - DNA, 15 bp, Homo sapiens
attaggctaaacttg

SEQ ID NO: 205640 - DNA, 15 bp, Homo sapiens
cattaggctaaactt

SEQ ID NO: 205641 - DNA, 15 bp, Homo sapiens
tcattaggctaaact

SEQ ID NO: 205642 - DNA, 15 bp, Homo sapiens
ctcattaggctaaac

SEQ ID NO: 205643 - DNA, 15 bp, Homo sapiens
tctcattaggctaaa

SEQ ID NO: 205644 - DNA, 15 bp, Homo sapiens
ttctcattaggctaa

SEQ ID NO: 205645 - DNA, 15 bp, Homo sapiens
tttctcattaggcta

SEQ ID NO: 205646 - DNA, 15 bp, Homo sapiens
ttttctcattaggct

SEQ ID NO: 205647 - DNA, 15 bp, Homo sapiens
attttctcattaggc

SEQ ID NO: 205648 - DNA, 15 bp, Homo sapiens
tattttctcattagg

SEQ ID NO: 205649 - DNA, 15 bp, Homo sapiens
atattttctcattag

SEQ ID NO: 205650 - DNA, 15 bp, Homo sapiens
tatattttctcatta

SEQ ID NO: 205651 - DNA, 15 bp, Homo sapiens
atatattttctcatt

SEQ ID NO: 205652 - DNA, 15 bp, Homo sapiens
aatatattttctcat

SEQ ID NO: 205653 - DNA, 15 bp, Homo sapiens
aaatatattttctca

SEQ ID NO: 205654 - DNA, 15 bp, Homo sapiens
aaaatatattttctc

SEQ ID NO: 205655 - DNA, 15 bp, Homo sapiens
caaaatatattttct

SEQ ID NO: 205656 - DNA, 15 bp, Homo sapiens
ccaaaatatattttc

SEQ ID NO: 205657 - DNA, 15 bp, Homo sapiens
tccaaaatatatttt

SEQ ID NO: 205658 - DNA, 15 bp, Homo sapiens
ctccaaaatatattt

SEQ ID NO: 205659 - DNA, 15 bp, Homo sapiens
actccaaaatatatt

SEQ ID NO: 205660 - DNA, 15 bp, Homo sapiens
gactccaaaatatat

SEQ ID NO: 205661 - DNA, 15 bp, Homo sapiens
ggactccaaaatata

SEQ ID NO: 205662 - DNA, 15 bp, Homo sapiens
tggactccaaaatat

SEQ ID NO: 205663 - DNA, 15 bp, Homo sapiens
atggactccaaaata

SEQ ID NO: 205664 - DNA, 15 bp, Homo sapiens
tatggactccaaaat

SEQ ID NO: 205665 - DNA, 15 bp, Homo sapiens
atatggactccaaaa

SEQ ID NO: 205666 - DNA, 15 bp, Homo sapiens
catatggactccaaa

SEQ ID NO: 205667 - DNA, 15 bp, Homo sapiens
ccatatggactccaa

SEQ ID NO: 205668 - DNA, 15 bp, Homo sapiens
accatatggactcca

SEQ ID NO: 205669 - DNA, 15 bp, Homo sapiens
taccatatggactcc

SEQ ID NO: 205670 - DNA, 15 bp, Homo sapiens
ttaccatatggactc

SEQ ID NO: 205671 - DNA, 15 bp, Homo sapiens
tttaccatatggact

SEQ ID NO: 205672 - DNA, 15 bp, Homo sapiens
atttaccatatggac

SEQ ID NO: 205673 - DNA, 15 bp, Homo sapiens
aatttaccatatgga

SEQ ID NO: 205674 - DNA, 15 bp, Homo sapiens
taatttaccatatgg

SEQ ID NO: 205675 - DNA, 15 bp, Homo sapiens
ttaatttaccatatg

SEQ ID NO: 205676 - DNA, 15 bp, Homo sapiens
tttaatttaccatat

SEQ ID NO: 205677 - DNA, 15 bp, Homo sapiens
atttaatttaccata

SEQ ID NO: 205678 - DNA, 15 bp, Homo sapiens
aatttaatttaccat

SEQ ID NO: 205679 - DNA, 15 bp, Homo sapiens
taatttaatttacca

SEQ ID NO: 205680 - DNA, 15 bp, Homo sapiens
ataatttaatttacc

SEQ ID NO: 205681 - DNA, 15 bp, Homo sapiens
cataatttaatttac

SEQ ID NO: 205682 - DNA, 15 bp, Homo sapiens
acataatttaattta

SEQ ID NO: 205683 - DNA, 15 bp, Homo sapiens
cacataatttaattt

SEQ ID NO: 205684 - DNA, 15 bp, Homo sapiens
tcacataatttaatt

SEQ ID NO: 205685 - DNA, 15 bp, Homo sapiens
atcacataatttaat

SEQ ID NO: 205686 - DNA, 15 bp, Homo sapiens
aatcacataatttaa

SEQ ID NO: 205687 - DNA, 15 bp, Homo sapiens
aaatcacataattta

SEQ ID NO: 205688 - DNA, 15 bp, Homo sapiens
aaaatcacataattt

SEQ ID NO: 205689 - DNA, 15 bp, Homo sapiens
aaaaatcacataatt

SEQ ID NO: 205690 - DNA, 15 bp, Homo sapiens
caaaaatcacataat

SEQ ID NO: 205691 - DNA, 15 bp, Homo sapiens
tcaaaaatcacataa

SEQ ID NO: 205692 - DNA, 15 bp, Homo sapiens
ctcaaaaatcacata

SEQ ID NO: 205693 - DNA, 15 bp, Homo sapiens
actcaaaaatcacat

SEQ ID NO: 205694 - DNA, 15 bp, Homo sapiens
aactcaaaaatcaca

SEQ ID NO: 205695 - DNA, 15 bp, Homo sapiens
taactcaaaaatcac

SEQ ID NO: 205696 - DNA, 15 bp, Homo sapiens
ataactcaaaaatca

SEQ ID NO: 205697 - DNA, 15 bp, Homo sapiens
aataactcaaaaatc

SEQ ID NO: 205698 - DNA, 15 bp, Homo sapiens
caataactcaaaaat

SEQ ID NO: 205699 - DNA, 15 bp, Homo sapiens
acaataactcaaaaa

SEQ ID NO: 205700 - DNA, 15 bp, Homo sapiens
tacaataactcaaaa

SEQ ID NO: 205701 - DNA, 15 bp, Homo sapiens
gtacaataactcaaa

SEQ ID NO: 205702 - DNA, 15 bp, Homo sapiens
tgtacaataactcaa

SEQ ID NO: 205703 - DNA, 15 bp, Homo sapiens
ttgtacaataactca

SEQ ID NO: 205704 - DNA, 15 bp, Homo sapiens
tttgtacaataactc

SEQ ID NO: 205705 - DNA, 15 bp, Homo sapiens
atttgtacaataact

SEQ ID NO: 205706 - DNA, 15 bp, Homo sapiens
tatttgtacaataac

SEQ ID NO: 205707 - DNA, 15 bp, Homo sapiens
atatttgtacaataa

SEQ ID NO: 205708 - DNA, 15 bp, Homo sapiens
tatatttgtacaata

SEQ ID NO: 205709 - DNA, 15 bp, Homo sapiens
ttatatttgtacaat

SEQ ID NO: 205710 - DNA, 15 bp, Homo sapiens
attatatttgtacaa

SEQ ID NO: 205711 - DNA, 15 bp, Homo sapiens
aattatatttgtaca

SEQ ID NO: 205712 - DNA, 15 bp, Homo sapiens
gaattatatttgtac

SEQ ID NO: 205713 - DNA, 15 bp, Homo sapiens
agaattatatttgta

SEQ ID NO: 205714 - DNA, 15 bp, Homo sapiens
aagaattatatttgt

SEQ ID NO: 205715 - DNA, 15 bp, Homo sapiens
taagaattatatttg

SEQ ID NO: 205716 - DNA, 15 bp, Homo sapiens
ctaagaattatattt

SEQ ID NO: 205717 - DNA, 15 bp, Homo sapiens
tctaagaattatatt

SEQ ID NO: 205718 - DNA, 15 bp, Homo sapiens
ttctaagaattatat

SEQ ID NO: 205719 - DNA, 15 bp, Homo sapiens
attctaagaattata

SEQ ID NO: 205720 - DNA, 15 bp, Homo sapiens
cattctaagaattat

SEQ ID NO: 205721 - DNA, 15 bp, Homo sapiens
acattctaagaatta

SEQ ID NO: 205722 - DNA, 15 bp, Homo sapiens
aacattctaagaatt

SEQ ID NO: 205723 - DNA, 15 bp, Homo sapiens
taacattctaagaat

SEQ ID NO: 205724 - DNA, 15 bp, Homo sapiens
ctaacattctaagaa

SEQ ID NO: 205725 - DNA, 15 bp, Homo sapiens
tctaacattctaaga

SEQ ID NO: 205726 - DNA, 15 bp, Homo sapiens
ctctaacattctaag

SEQ ID NO: 205727 - DNA, 15 bp, Homo sapiens
actctaacattctaa

SEQ ID NO: 205728 - DNA, 15 bp, Homo sapiens
gactctaacattcta

SEQ ID NO: 205729 - DNA, 15 bp, Homo sapiens
tgactctaacattct

SEQ ID NO: 205730 - DNA, 15 bp, Homo sapiens
ctgactctaacattc

SEQ ID NO: 205731 - DNA, 15 bp, Homo sapiens
cctgactctaacatt

SEQ ID NO: 205732 - DNA, 15 bp, Homo sapiens
tcctgactctaacat

SEQ ID NO: 205733 - DNA, 15 bp, Homo sapiens
ctcctgactctaaca

SEQ ID NO: 205734 - DNA, 15 bp, Homo sapiens
tctcctgactctaac

SEQ ID NO: 205735 - DNA, 15 bp, Homo sapiens
gtctcctgactctaa

SEQ ID NO: 205736 - DNA, 15 bp, Homo sapiens
agtctcctgactcta

SEQ ID NO: 205737 - DNA, 15 bp, Homo sapiens
tagtctcctgactct

SEQ ID NO: 205738 - DNA, 15 bp, Homo sapiens
atagtctcctgactc

SEQ ID NO: 205739 - DNA, 15 bp, Homo sapiens
tatagtctcctgact

SEQ ID NO: 205740 - DNA, 15 bp, Homo sapiens
ttatagtctcctgac

SEQ ID NO: 205741 - DNA, 15 bp, Homo sapiens
cttatagtctcctga

SEQ ID NO: 205742 - DNA, 15 bp, Homo sapiens
tcttatagtctcctg

SEQ ID NO: 205743 - DNA, 15 bp, Homo sapiens
ctcttatagtctcct

SEQ ID NO: 205744 - DNA, 15 bp, Homo sapiens
tctcttatagtctcc

SEQ ID NO: 205745 - DNA, 15 bp, Homo sapiens
gtctcttatagtctc

SEQ ID NO: 205746 - DNA, 15 bp, Homo sapiens
ggtctcttatagtct

SEQ ID NO: 205747 - DNA, 15 bp, Homo sapiens
tggtctcttatagtc

SEQ ID NO: 205748 - DNA, 15 bp, Homo sapiens
ttggtctcttatagt

SEQ ID NO: 205749 - DNA, 15 bp, Homo sapiens
gttggtctcttatag

SEQ ID NO: 205750 - DNA, 15 bp, Homo sapiens
agttggtctcttata

SEQ ID NO: 205751 - DNA, 15 bp, Homo sapiens
cagttggtctcttat

SEQ ID NO: 205752 - DNA, 15 bp, Homo sapiens
gcagttggtctctta

SEQ ID NO: 205753 - DNA, 15 bp, Homo sapiens
agcagttggtctctt

SEQ ID NO: 205754 - DNA, 15 bp, Homo sapiens
aagcagttggtctct

SEQ ID NO: 205755 - DNA, 15 bp, Homo sapiens
gaagcagttggtctc

SEQ ID NO: 205756 - DNA, 15 bp, Homo sapiens
tgaagcagttggtct

SEQ ID NO: 205757 - DNA, 15 bp, Homo sapiens
ttgaagcagttggtc

SEQ ID NO: 205758 - DNA, 15 bp, Homo sapiens
cttgaagcagttggt

SEQ ID NO: 205759 - DNA, 15 bp, Homo sapiens
acttgaagcagttgg

SEQ ID NO: 205760 - DNA, 15 bp, Homo sapiens
aacttgaagcagttg

SEQ ID NO: 205761 - DNA, 15 bp, Homo sapiens
aaacttgaagcagtt

SEQ ID NO: 205762 - DNA, 15 bp, Homo sapiens
gaaacttgaagcagt

SEQ ID NO: 205763 - DNA, 15 bp, Homo sapiens
tgaaacttgaagcag

SEQ ID NO: 205764 - DNA, 15 bp, Homo sapiens
atgaaacttgaagca

SEQ ID NO: 205765 - DNA, 15 bp, Homo sapiens
aatgaaacttgaagc

SEQ ID NO: 205766 - DNA, 15 bp, Homo sapiens
aaatgaaacttgaag

SEQ ID NO: 205767 - DNA, 15 bp, Homo sapiens
taaatgaaacttgaa

SEQ ID NO: 205768 - DNA, 15 bp, Homo sapiens
ttaaatgaaacttga

SEQ ID NO: 205769 - DNA, 15 bp, Homo sapiens
gttaaatgaaacttg

SEQ ID NO: 205770 - DNA, 15 bp, Homo sapiens
tgttaaatgaaactt

SEQ ID NO: 205771 - DNA, 15 bp, Homo sapiens
gtgttaaatgaaact

SEQ ID NO: 205772 - DNA, 15 bp, Homo sapiens
tgtgttaaatgaaac

SEQ ID NO: 205773 - DNA, 15 bp, Homo sapiens
atgtgttaaatgaaa

SEQ ID NO: 205774 - DNA, 15 bp, Homo sapiens
catgtgttaaatgaa

SEQ ID NO: 205775 - DNA, 15 bp, Homo sapiens
ccatgtgttaaatga

SEQ ID NO: 205776 - DNA, 15 bp, Homo sapiens
cccatgtgttaaatg

SEQ ID NO: 205777 - DNA, 15 bp, Homo sapiens
tcccatgtgttaaat

SEQ ID NO: 205778 - DNA, 15 bp, Homo sapiens
ttcccatgtgttaaa

SEQ ID NO: 205779 - DNA, 15 bp, Homo sapiens
tttcccatgtgttaa

SEQ ID NO: 205780 - DNA, 15 bp, Homo sapiens
gtttcccatgtgtta

SEQ ID NO: 205781 - DNA, 15 bp, Homo sapiens
agtttcccatgtgtt

SEQ ID NO: 205782 - DNA, 15 bp, Homo sapiens
tagtttcccatgtgt

SEQ ID NO: 205783 - DNA, 15 bp, Homo sapiens
ttagtttcccatgtg

SEQ ID NO: 205784 - DNA, 15 bp, Homo sapiens
cttagtttcccatgt

SEQ ID NO: 205785 - DNA, 15 bp, Homo sapiens
ccttagtttcccatg

SEQ ID NO: 205786 - DNA, 15 bp, Homo sapiens
gccttagtttcccat

SEQ ID NO: 205787 - DNA, 15 bp, Homo sapiens
ggccttagtttccca

SEQ ID NO: 205788 - DNA, 15 bp, Homo sapiens
tggccttagtttccc

SEQ ID NO: 205789 - DNA, 15 bp, Homo sapiens
ctggccttagtttcc

SEQ ID NO: 205790 - DNA, 15 bp, Homo sapiens
tctggccttagtttc

SEQ ID NO: 205791 - DNA, 15 bp, Homo sapiens
ctctggccttagttt

SEQ ID NO: 205792 - DNA, 15 bp, Homo sapiens
tctctggccttagtt

SEQ ID NO: 205793 - DNA, 15 bp, Homo sapiens
ttctctggccttagt

SEQ ID NO: 205794 - DNA, 15 bp, Homo sapiens
tttctctggccttag

SEQ ID NO: 205795 - DNA, 15 bp, Homo sapiens
atttctctggcctta

SEQ ID NO: 205796 - DNA, 15 bp, Homo sapiens
aatttctctggcctt

SEQ ID NO: 205797 - DNA, 15 bp, Homo sapiens
aaatttctctggcct

SEQ ID NO: 205798 - DNA, 15 bp, Homo sapiens
gaaatttctctggcc

SEQ ID NO: 205799 - DNA, 15 bp, Homo sapiens
tgaaatttctctggc

SEQ ID NO: 205800 - DNA, 15 bp, Homo sapiens
ttgaaatttctctgg

SEQ ID NO: 205801 - DNA, 15 bp, Homo sapiens
cttgaaatttctctg

SEQ ID NO: 205802 - DNA, 15 bp, Homo sapiens
tcttgaaatttctct

SEQ ID NO: 205803 - DNA, 15 bp, Homo sapiens
gtcttgaaatttctc

SEQ ID NO: 205804 - DNA, 15 bp, Homo sapiens
agtcttgaaatttct

SEQ ID NO: 205805 - DNA, 15 bp, Homo sapiens
aagtcttgaaatttc

SEQ ID NO: 205806 - DNA, 15 bp, Homo sapiens
caagtcttgaaattt

SEQ ID NO: 205807 - DNA, 15 bp, Homo sapiens
gcaagtcttgaaatt

SEQ ID NO: 205808 - DNA, 15 bp, Homo sapiens
ggcaagtcttgaaat

SEQ ID NO: 205809 - DNA, 15 bp, Homo sapiens
gggcaagtcttgaaa

SEQ ID NO: 205810 - DNA, 15 bp, Homo sapiens
tgggcaagtcttgaa

SEQ ID NO: 205811 - DNA, 15 bp, Homo sapiens
ttgggcaagtcttga

SEQ ID NO: 205812 - DNA, 15 bp, Homo sapiens
cttgggcaagtcttg

SEQ ID NO: 205813 - DNA, 15 bp, Homo sapiens
tcttgggcaagtctt

SEQ ID NO: 205814 - DNA, 15 bp, Homo sapiens
atcttgggcaagtct

SEQ ID NO: 205815 - DNA, 15 bp, Homo sapiens
aatcttgggcaagtc

SEQ ID NO: 205816 - DNA, 15 bp, Homo sapiens
ctaatcttgggcaag

SEQ ID NO: 205817 - DNA, 15 bp, Homo sapiens
tctaatcttgggcaa

SEQ ID NO: 205818 - DNA, 15 bp, Homo sapiens
gtctaatcttgggca

SEQ ID NO: 205819 - DNA, 15 bp, Homo sapiens
ggtctaatcttgggc

SEQ ID NO: 205820 - DNA, 15 bp, Homo sapiens
aggtctaatcttggg

SEQ ID NO: 205821 - DNA, 15 bp, Homo sapiens
gaggtctaatcttgg

SEQ ID NO: 205822 - DNA, 15 bp, Homo sapiens
agaggtctaatcttg

SEQ ID NO: 205823 - DNA, 15 bp, Homo sapiens
aagaggtctaatctt

SEQ ID NO: 205824 - DNA, 15 bp, Homo sapiens
caagaggtctaatct

SEQ ID NO: 205825 - DNA, 15 bp, Homo sapiens
acaagaggtctaatc

SEQ ID NO: 205826 - DNA, 15 bp, Homo sapiens
aacaagaggtctaat

SEQ ID NO: 205827 - DNA, 15 bp, Homo sapiens
taacaagaggtctaa

SEQ ID NO: 205828 - DNA, 15 bp, Homo sapiens
ttaacaagaggtcta

SEQ ID NO: 205829 - DNA, 15 bp, Homo sapiens
cttaacaagaggtct

SEQ ID NO: 205830 - DNA, 15 bp, Homo sapiens
acttaacaagaggtc

SEQ ID NO: 205831 - DNA, 15 bp, Homo sapiens
tacttaacaagaggt

SEQ ID NO: 205832 - DNA, 15 bp, Homo sapiens
ttacttaacaagagg

SEQ ID NO: 205833 - DNA, 15 bp, Homo sapiens
attacttaacaagag

SEQ ID NO: 205834 - DNA, 15 bp, Homo sapiens
cattacttaacaaga

SEQ ID NO: 205835 - DNA, 15 bp, Homo sapiens
tcattacttaacaag

SEQ ID NO: 205836 - DNA, 15 bp, Homo sapiens
ttcattacttaacaa

SEQ ID NO: 205837 - DNA, 15 bp, Homo sapiens
tttcattacttaaca

SEQ ID NO: 205838 - DNA, 15 bp, Homo sapiens
ctttcattacttaac

SEQ ID NO: 205839 - DNA, 15 bp, Homo sapiens
actttcattacttaa

SEQ ID NO: 205840 - DNA, 15 bp, Homo sapiens
cactttcattactta

SEQ ID NO: 205841 - DNA, 15 bp, Homo sapiens
acactttcattactt

SEQ ID NO: 205842 - DNA, 15 bp, Homo sapiens
aacactttcattact

SEQ ID NO: 205843 - DNA, 15 bp, Homo sapiens
aaacactttcattac

SEQ ID NO: 205844 - DNA, 15 bp, Homo sapiens
aaaacactttcatta

SEQ ID NO: 205845 - DNA, 15 bp, Homo sapiens
taaaacactttcatt

SEQ ID NO: 205846 - DNA, 15 bp, Homo sapiens
ttaaaacactttcat

SEQ ID NO: 205847 - DNA, 15 bp, Homo sapiens
tttaaaacactttca

SEQ ID NO: 205848 - DNA, 15 bp, Homo sapiens
ttttaaaacactttc

SEQ ID NO: 205849 - DNA, 15 bp, Homo sapiens
tttttaaaacacttt

SEQ ID NO: 205850 - DNA, 15 bp, Homo sapiens
gtttttaaaacactt

SEQ ID NO: 205851 - DNA, 15 bp, Homo sapiens
tgtttttaaaacact

SEQ ID NO: 205852 - DNA, 15 bp, Homo sapiens
ctgtttttaaaacac

SEQ ID NO: 205853 - DNA, 15 bp, Homo sapiens
cctgtttttaaaaca

SEQ ID NO: 205854 - DNA, 15 bp, Homo sapiens
acctgtttttaaaac

SEQ ID NO: 205855 - DNA, 15 bp, Homo sapiens
cacctgtttttaaaa

SEQ ID NO: 205856 - DNA, 15 bp, Homo sapiens
ccacctgtttttaaa

SEQ ID NO: 205857 - DNA, 15 bp, Homo sapiens
cccacctgtttttaa

SEQ ID NO: 205858 - DNA, 15 bp, Homo sapiens
acccacctgttttta

SEQ ID NO: 205859 - DNA, 15 bp, Homo sapiens
gacccacctgttttt

SEQ ID NO: 205860 - DNA, 15 bp, Homo sapiens
tgacccacctgtttt

SEQ ID NO: 205861 - DNA, 15 bp, Homo sapiens
ttgacccacctgttt

SEQ ID NO: 205862 - DNA, 15 bp, Homo sapiens
tttgacccacctgtt

SEQ ID NO: 205863 - DNA, 15 bp, Homo sapiens
atttgacccacctgt

SEQ ID NO: 205864 - DNA, 15 bp, Homo sapiens
aatttgacccacctg

SEQ ID NO: 205865 - DNA, 15 bp, Homo sapiens
gaatttgacccacct

SEQ ID NO: 205866 - DNA, 15 bp, Homo sapiens
agaatttgacccacc

SEQ ID NO: 205867 - DNA, 15 bp, Homo sapiens
cagaatttgacccac

SEQ ID NO: 205868 - DNA, 15 bp, Homo sapiens
acagaatttgaccca

SEQ ID NO: 205869 - DNA, 15 bp, Homo sapiens
aacagaatttgaccc

SEQ ID NO: 205870 - DNA, 15 bp, Homo sapiens
aaacagaatttgacc

SEQ ID NO: 205871 - DNA, 15 bp, Homo sapiens
aaaacagaatttgac

SEQ ID NO: 205872 - DNA, 15 bp, Homo sapiens
aaaaacagaatttga

SEQ ID NO: 205873 - DNA, 15 bp, Homo sapiens
taaaaacagaatttg

SEQ ID NO: 205874 - DNA, 15 bp, Homo sapiens
ttaaaaacagaattt

SEQ ID NO: 205875 - DNA, 15 bp, Homo sapiens
tttaaaaacagaatt

SEQ ID NO: 205876 - DNA, 15 bp, Homo sapiens
ttttaaaaacagaat

SEQ ID NO: 205877 - DNA, 15 bp, Homo sapiens
attttaaaaacagaa

SEQ ID NO: 205878 - DNA, 15 bp, Homo sapiens
aattttaaaaacaga

SEQ ID NO: 205879 - DNA, 15 bp, Homo sapiens
aaattttaaaaacag

SEQ ID NO: 205880 - DNA, 15 bp, Homo sapiens
gaaattttaaaaaca

SEQ ID NO: 205881 - DNA, 15 bp, Homo sapiens
ggaaattttaaaaac

SEQ ID NO: 205882 - DNA, 15 bp, Homo sapiens
tggaaattttaaaaa

SEQ ID NO: 205883 - DNA, 15 bp, Homo sapiens
atggaaattttaaaa

SEQ ID NO: 205884 - DNA, 15 bp, Homo sapiens
aatggaaattttaaa

SEQ ID NO: 205885 - DNA, 15 bp, Homo sapiens
taatggaaattttaa

SEQ ID NO: 205886 - DNA, 15 bp, Homo sapiens
ataatggaaatttta

SEQ ID NO: 205887 - DNA, 15 bp, Homo sapiens
cataatggaaatttt

SEQ ID NO: 205888 - DNA, 15 bp, Homo sapiens
tcataatggaaattt

SEQ ID NO: 205889 - DNA, 15 bp, Homo sapiens
atcataatggaaatt

SEQ ID NO: 205890 - DNA, 15 bp, Homo sapiens
catcataatggaaat

SEQ ID NO: 205891 - DNA, 15 bp, Homo sapiens
tcatcataatggaaa

SEQ ID NO: 205892 - DNA, 15 bp, Homo sapiens
ttcatcataatggaa

SEQ ID NO: 205893 - DNA, 15 bp, Homo sapiens
tttcatcataatgga

SEQ ID NO: 205894 - DNA, 15 bp, Homo sapiens
ttttcatcataatgg

SEQ ID NO: 205895 - DNA, 15 bp, Homo sapiens
attttcatcataatg

SEQ ID NO: 205896 - DNA, 15 bp, Homo sapiens
aattttcatcataat

SEQ ID NO: 205897 - DNA, 15 bp, Homo sapiens
aaattttcatcataa

SEQ ID NO: 205898 - DNA, 15 bp, Homo sapiens
gaaattttcatcata

SEQ ID NO: 205899 - DNA, 15 bp, Homo sapiens
tgaaattttcatcat

SEQ ID NO: 205900 - DNA, 15 bp, Homo sapiens
ctgaaattttcatca

SEQ ID NO: 205901 - DNA, 15 bp, Homo sapiens
actgaaattttcatc

SEQ ID NO: 205902 - DNA, 15 bp, Homo sapiens
tactgaaattttcat

SEQ ID NO: 205903 - DNA, 15 bp, Homo sapiens
atactgaaattttca

SEQ ID NO: 205904 - DNA, 15 bp, Homo sapiens
aatactgaaattttc

SEQ ID NO: 205905 - DNA, 15 bp, Homo sapiens
taatactgaaatttt

SEQ ID NO: 205906 - DNA, 15 bp, Homo sapiens
gtaatactgaaattt

SEQ ID NO: 205907 - DNA, 15 bp, Homo sapiens
tgtaatactgaaatt

SEQ ID NO: 205908 - DNA, 15 bp, Homo sapiens
ctgtaatactgaaat

SEQ ID NO: 205909 - DNA, 15 bp, Homo sapiens
cctgtaatactgaaa

SEQ ID NO: 205910 - DNA, 15 bp, Homo sapiens
gcctgtaatactgaa

SEQ ID NO: 205911 - DNA, 15 bp, Homo sapiens
agcctgtaatactga

SEQ ID NO: 205912 - DNA, 15 bp, Homo sapiens
aagcctgtaatactg

SEQ ID NO: 205913 - DNA, 15 bp, Homo sapiens
gaagcctgtaatact

SEQ ID NO: 205914 - DNA, 15 bp, Homo sapiens
ggaagcctgtaatac

SEQ ID NO: 205915 - DNA, 15 bp, Homo sapiens
tggaagcctgtaata

SEQ ID NO: 205916 - DNA, 15 bp, Homo sapiens
ttggaagcctgtaat

SEQ ID NO: 205917 - DNA, 15 bp, Homo sapiens
tttggaagcctgtaa

SEQ ID NO: 205918 - DNA, 15 bp, Homo sapiens
atttggaagcctgta

SEQ ID NO: 205919 - DNA, 15 bp, Homo sapiens
gatttggaagcctgt

SEQ ID NO: 205920 - DNA, 15 bp, Homo sapiens
ggatttggaagcctg

SEQ ID NO: 205921 - DNA, 15 bp, Homo sapiens
gggatttggaagcct

SEQ ID NO: 205922 - DNA, 15 bp, Homo sapiens
tgggatttggaagcc

SEQ ID NO: 205923 - DNA, 15 bp, Homo sapiens
ctgggatttggaagc

SEQ ID NO: 205924 - DNA, 15 bp, Homo sapiens
gctgggatttggaag

SEQ ID NO: 205925 - DNA, 15 bp, Homo sapiens
tgctgggatttggaa

SEQ ID NO: 205926 - DNA, 15 bp, Homo sapiens
ctgctgggatttgga

SEQ ID NO: 205927 - DNA, 15 bp, Homo sapiens
tctgctgggatttgg

SEQ ID NO: 205928 - DNA, 15 bp, Homo sapiens
atctgctgggatttg

SEQ ID NO: 205929 - DNA, 15 bp, Homo sapiens
catctgctgggattt

SEQ ID NO: 205930 - DNA, 15 bp, Homo sapiens
ccatctgctgggatt

SEQ ID NO: 205931 - DNA, 15 bp, Homo sapiens
cccatctgctgggat

SEQ ID NO: 205932 - DNA, 15 bp, Homo sapiens
gcccatctgctggga

SEQ ID NO: 205933 - DNA, 15 bp, Homo sapiens
ggcccatctgctggg

SEQ ID NO: 205934 - DNA, 15 bp, Homo sapiens
tggcccatctgctgg

SEQ ID NO: 205935 - DNA, 15 bp, Homo sapiens
gtggcccatctgctg

SEQ ID NO: 205936 - DNA, 15 bp, Homo sapiens
agtggcccatctgct

SEQ ID NO: 205937 - DNA, 15 bp, Homo sapiens
aagtggcccatctgc

SEQ ID NO: 205938 - DNA, 15 bp, Homo sapiens
caagtggcccatctg

SEQ ID NO: 205939 - DNA, 15 bp, Homo sapiens
acaagtggcccatct

SEQ ID NO: 205940 - DNA, 15 bp, Homo sapiens
aacaagtggcccatc

SEQ ID NO: 205941 - DNA, 15 bp, Homo sapiens
aaacaagtggcccat

SEQ ID NO: 205942 - DNA, 15 bp, Homo sapiens
taaacaagtggccca

SEQ ID NO: 205943 - DNA, 15 bp, Homo sapiens
ttaaacaagtggccc

SEQ ID NO: 205944 - DNA, 15 bp, Homo sapiens
tttaaacaagtggcc

SEQ ID NO: 205945 - DNA, 15 bp, Homo sapiens
ctttaaacaagtggc

SEQ ID NO: 205946 - DNA, 15 bp, Homo sapiens
cctttaaacaagtgg

SEQ ID NO: 205947 - DNA, 15 bp, Homo sapiens
tcctttaaacaagtg

SEQ ID NO: 205948 - DNA, 15 bp, Homo sapiens
ctcctttaaacaagt

SEQ ID NO: 205949 - DNA, 15 bp, Homo sapiens
tctcctttaaacaag

SEQ ID NO: 205950 - DNA, 15 bp, Homo sapiens
ctctcctttaaacaa

SEQ ID NO: 205951 - DNA, 15 bp, Homo sapiens
actctcctttaaaca

SEQ ID NO: 205952 - DNA, 15 bp, Homo sapiens
aactctcctttaaac

SEQ ID NO: 205953 - DNA, 15 bp, Homo sapiens
aaactctcctttaaa

SEQ ID NO: 205954 - DNA, 15 bp, Homo sapiens
caaactctcctttaa

SEQ ID NO: 205955 - DNA, 15 bp, Homo sapiens
tcaaactctccttta

SEQ ID NO: 205956 - DNA, 15 bp, Homo sapiens
atcaaactctccttt

SEQ ID NO: 205957 - DNA, 15 bp, Homo sapiens
tatcaaactctcctt

SEQ ID NO: 205958 - DNA, 15 bp, Homo sapiens
atatcaaactctcct

SEQ ID NO: 205959 - DNA, 15 bp, Homo sapiens
tatatcaaactctcc

SEQ ID NO: 205960 - DNA, 15 bp, Homo sapiens
ttatatcaaactctc

SEQ ID NO: 205961 - DNA, 15 bp, Homo sapiens
attatatcaaactct

SEQ ID NO: 205962 - DNA, 15 bp, Homo sapiens
tattatatcaaactc

SEQ ID NO: 205963 - DNA, 15 bp, Homo sapiens
ttattatatcaaact

SEQ ID NO: 205964 - DNA, 15 bp, Homo sapiens
tttattatatcaaac

SEQ ID NO: 205965 - DNA, 15 bp, Homo sapiens
ctttattatatcaaa

SEQ ID NO: 205966 - DNA, 15 bp, Homo sapiens
gctttattatatcaa

SEQ ID NO: 205967 - DNA, 15 bp, Homo sapiens
tgctttattatatca

SEQ ID NO: 205968 - DNA, 15 bp, Homo sapiens
atgctttattatatc

SEQ ID NO: 205969 - DNA, 15 bp, Homo sapiens
gatgctttattatat

SEQ ID NO: 205970 - DNA, 15 bp, Homo sapiens
agatgctttattata

SEQ ID NO: 205971 - DNA, 15 bp, Homo sapiens
tagatgctttattat

SEQ ID NO: 205972 - DNA, 15 bp, Homo sapiens
ttagatgctttatta

SEQ ID NO: 205973 - DNA, 15 bp, Homo sapiens
tttagatgctttatt

SEQ ID NO: 205974 - DNA, 15 bp, Homo sapiens
ttttagatgctttat

SEQ ID NO: 205975 - DNA, 15 bp, Homo sapiens
tttttagatgcttta

SEQ ID NO: 205976 - DNA, 15 bp, Homo sapiens
gtttttagatgcttt

SEQ ID NO: 205977 - DNA, 15 bp, Homo sapiens
tgtttttagatgctt

SEQ ID NO: 205978 - DNA, 15 bp, Homo sapiens
ttgtttttagatgct

SEQ ID NO: 205979 - DNA, 15 bp, Homo sapiens
cttgtttttagatgc

SEQ ID NO: 205980 - DNA, 15 bp, Homo sapiens
tcttgtttttagatg

SEQ ID NO: 205981 - DNA, 15 bp, Homo sapiens
ctcttgtttttagat

SEQ ID NO: 205982 - DNA, 15 bp, Homo sapiens
actcttgtttttaga

SEQ ID NO: 205983 - DNA, 15 bp, Homo sapiens
aactcttgtttttag

SEQ ID NO: 205984 - DNA, 15 bp, Homo sapiens
aaactcttgttttta

SEQ ID NO: 205985 - DNA, 15 bp, Homo sapiens
caaactcttgttttt

SEQ ID NO: 205986 - DNA, 15 bp, Homo sapiens
ccaaactcttgtttt

SEQ ID NO: 205987 - DNA, 15 bp, Homo sapiens
tccaaactcttgttt

SEQ ID NO: 205988 - DNA, 15 bp, Homo sapiens
atccaaactcttgtt

SEQ ID NO: 205989 - DNA, 15 bp, Homo sapiens
tatccaaactcttgt

SEQ ID NO: 205990 - DNA, 15 bp, Homo sapiens
ttatccaaactcttg

SEQ ID NO: 205991 - DNA, 15 bp, Homo sapiens
attatccaaactctt

SEQ ID NO: 205992 - DNA, 15 bp, Homo sapiens
aattatccaaactct

SEQ ID NO: 205993 - DNA, 15 bp, Homo sapiens
gaattatccaaactc

SEQ ID NO: 205994 - DNA, 15 bp, Homo sapiens
ggaattatccaaact

SEQ ID NO: 205995 - DNA, 15 bp, Homo sapiens
aggaattatccaaac

SEQ ID NO: 205996 - DNA, 15 bp, Homo sapiens
aaggaattatccaaa

SEQ ID NO: 205997 - DNA, 15 bp, Homo sapiens
taaggaattatccaa

SEQ ID NO: 205998 - DNA, 15 bp, Homo sapiens
ctaaggaattatcca

SEQ ID NO: 205999 - DNA, 15 bp, Homo sapiens
cctaaggaattatcc

SEQ ID NO: 206000 - DNA, 15 bp, Homo sapiens
ccctaaggaattatc

SEQ ID NO: 206001 - DNA, 15 bp, Homo sapiens
accctaaggaattat

SEQ ID NO: 206002 - DNA, 15 bp, Homo sapiens
aaccctaaggaatta

SEQ ID NO: 206003 - DNA, 15 bp, Homo sapiens
caaccctaaggaatt

SEQ ID NO: 206004 - DNA, 15 bp, Homo sapiens
acaaccctaaggaat

SEQ ID NO: 206005 - DNA, 15 bp, Homo sapiens
aacaaccctaaggaa

SEQ ID NO: 206006 - DNA, 15 bp, Homo sapiens
taacaaccctaagga

SEQ ID NO: 206007 - DNA, 15 bp, Homo sapiens
ataacaaccctaagg

SEQ ID NO: 206008 - DNA, 15 bp, Homo sapiens
cataacaaccctaag

SEQ ID NO: 206009 - DNA, 15 bp, Homo sapiens
tcataacaaccctaa

SEQ ID NO: 206010 - DNA, 15 bp, Homo sapiens
atcataacaacccta

SEQ ID NO: 206011 - DNA, 15 bp, Homo sapiens
catcataacaaccct

SEQ ID NO: 206012 - DNA, 15 bp, Homo sapiens
acatcataacaaccc

SEQ ID NO: 206013 - DNA, 15 bp, Homo sapiens
cacatcataacaacc

SEQ ID NO: 206014 - DNA, 15 bp, Homo sapiens
tcacatcataacaac

SEQ ID NO: 206015 - DNA, 15 bp, Homo sapiens
atcacatcataacaa

SEQ ID NO: 206016 - DNA, 15 bp, Homo sapiens
aatcacatcataaca

SEQ ID NO: 206017 - DNA, 15 bp, Homo sapiens
aaatcacatcataac

SEQ ID NO: 206018 - DNA, 15 bp, Homo sapiens
caaatcacatcataa

SEQ ID NO: 206019 - DNA, 15 bp, Homo sapiens
tcaaatcacatcata

SEQ ID NO: 206020 - DNA, 15 bp, Homo sapiens
gtcaaatcacatcat

SEQ ID NO: 206021 - DNA, 15 bp, Homo sapiens
agtcaaatcacatca

SEQ ID NO: 206022 - DNA, 15 bp, Homo sapiens
aagtcaaatcacatc

SEQ ID NO: 206023 - DNA, 15 bp, Homo sapiens
taagtcaaatcacat

SEQ ID NO: 206024 - DNA, 15 bp, Homo sapiens
ataagtcaaatcaca

SEQ ID NO: 206025 - DNA, 15 bp, Homo sapiens
tataagtcaaatcac

SEQ ID NO: 206026 - DNA, 15 bp, Homo sapiens
ttataagtcaaatca

SEQ ID NO: 206027 - DNA, 15 bp, Homo sapiens
attataagtcaaatc

SEQ ID NO: 206028 - DNA, 15 bp, Homo sapiens
aattataagtcaaat

SEQ ID NO: 206029 - DNA, 15 bp, Homo sapiens
caattataagtcaaa

SEQ ID NO: 206030 - DNA, 15 bp, Homo sapiens
ccaattataagtcaa

SEQ ID NO: 206031 - DNA, 15 bp, Homo sapiens
tccaattataagtca

SEQ ID NO: 206032 - DNA, 15 bp, Homo sapiens
ttccaattataagtc

SEQ ID NO: 206033 - DNA, 15 bp, Homo sapiens
tttccaattataagt

SEQ ID NO: 206034 - DNA, 15 bp, Homo sapiens
atttccaattataag

SEQ ID NO: 206035 - DNA, 15 bp, Homo sapiens
tatttccaattataa

SEQ ID NO: 206036 - DNA, 15 bp, Homo sapiens
gtatttccaattata

SEQ ID NO: 206037 - DNA, 15 bp, Homo sapiens
ggtatttccaattat

SEQ ID NO: 206038 - DNA, 15 bp, Homo sapiens
cggtatttccaatta

SEQ ID NO: 206039 - DNA, 15 bp, Homo sapiens
acggtatttccaatt

SEQ ID NO: 206040 - DNA, 15 bp, Homo sapiens
aacggtatttccaat

SEQ ID NO: 206041 - DNA, 15 bp, Homo sapiens
aaacggtatttccaa

SEQ ID NO: 206042 - DNA, 15 bp, Homo sapiens
aaaacggtatttcca

SEQ ID NO: 206043 - DNA, 15 bp, Homo sapiens
taaaacggtatttcc

SEQ ID NO: 206044 - DNA, 15 bp, Homo sapiens
ataaaacggtatttc

SEQ ID NO: 206045 - DNA, 15 bp, Homo sapiens
aataaaacggtattt

SEQ ID NO: 206046 - DNA, 15 bp, Homo sapiens
gaataaaacggtatt

SEQ ID NO: 206047 - DNA, 15 bp, Homo sapiens
tgaataaaacggtat

SEQ ID NO: 206048 - DNA, 15 bp, Homo sapiens
atgaataaaacggta

SEQ ID NO: 206049 - DNA, 15 bp, Homo sapiens
aatgaataaaacggt

SEQ ID NO: 206050 - DNA, 15 bp, Homo sapiens
caatgaataaaacgg

SEQ ID NO: 206051 - DNA, 15 bp, Homo sapiens
acaatgaataaaacg

SEQ ID NO: 206052 - DNA, 15 bp, Homo sapiens
tacaatgaataaaac

SEQ ID NO: 206053 - DNA, 15 bp, Homo sapiens
gtacaatgaataaaa

SEQ ID NO: 206054 - DNA, 15 bp, Homo sapiens
agtacaatgaataaa

SEQ ID NO: 206055 - DNA, 15 bp, Homo sapiens
cagtacaatgaataa

SEQ ID NO: 206056 - DNA, 15 bp, Homo sapiens
tcagtacaatgaata

SEQ ID NO: 206057 - DNA, 15 bp, Homo sapiens
atcagtacaatgaat

SEQ ID NO: 206058 - DNA, 15 bp, Homo sapiens
aatcagtacaatgaa

SEQ ID NO: 206059 - DNA, 15 bp, Homo sapiens
aaatcagtacaatga

SEQ ID NO: 206060 - DNA, 15 bp, Homo sapiens
aaaatcagtacaatg

SEQ ID NO: 206061 - DNA, 15 bp, Homo sapiens
gaaaatcagtacaat

SEQ ID NO: 206062 - DNA, 15 bp, Homo sapiens
tgaaaatcagtacaa

SEQ ID NO: 206063 - DNA, 15 bp, Homo sapiens
atgaaaatcagtaca

SEQ ID NO: 206064 - DNA, 15 bp, Homo sapiens
aatgaaaatcagtac

SEQ ID NO: 206065 - DNA, 15 bp, Homo sapiens
aaatgaaaatcagta

SEQ ID NO: 206066 - DNA, 15 bp, Homo sapiens
gaaatgaaaatcagt

SEQ ID NO: 206067 - DNA, 15 bp, Homo sapiens
agaaatgaaaatcag

SEQ ID NO: 206068 - DNA, 15 bp, Homo sapiens
gagaaatgaaaatca

SEQ ID NO: 206069 - DNA, 15 bp, Homo sapiens
agagaaatgaaaatc

SEQ ID NO: 206070 - DNA, 15 bp, Homo sapiens
aagagaaatgaaaat

SEQ ID NO: 206071 - DNA, 15 bp, Homo sapiens
aaagagaaatgaaaa

SEQ ID NO: 206072 - DNA, 15 bp, Homo sapiens
aaaagagaaatgaaa

SEQ ID NO: 206073 - DNA, 15 bp, Homo sapiens
aaaaagagaaatgaa

SEQ ID NO: 206074 - DNA, 15 bp, Homo sapiens
gaaaaagagaaatga

SEQ ID NO: 206075 - DNA, 15 bp, Homo sapiens
agaaaaagagaaatg

SEQ ID NO: 206076 - DNA, 15 bp, Homo sapiens
aagaaaaagagaaat

SEQ ID NO: 206077 - DNA, 15 bp, Homo sapiens
gaagaaaaagagaaa

SEQ ID NO: 206078 - DNA, 15 bp, Homo sapiens
agaagaaaaagagaa

SEQ ID NO: 206079 - DNA, 15 bp, Homo sapiens
tagaagaaaaagaga

SEQ ID NO: 206080 - DNA, 15 bp, Homo sapiens
ctagaagaaaaagag

SEQ ID NO: 206081 - DNA, 15 bp, Homo sapiens
tctagaagaaaaaga

SEQ ID NO: 206082 - DNA, 15 bp, Homo sapiens
ttctagaagaaaaag

SEQ ID NO: 206083 - DNA, 15 bp, Homo sapiens
attctagaagaaaaa

SEQ ID NO: 206084 - DNA, 15 bp, Homo sapiens
cattctagaagaaaa

SEQ ID NO: 206085 - DNA, 15 bp, Homo sapiens
acattctagaagaaa

SEQ ID NO: 206086 - DNA, 15 bp, Homo sapiens
gacattctagaagaa

SEQ ID NO: 206087 - DNA, 15 bp, Homo sapiens
agacattctagaaga

SEQ ID NO: 206088 - DNA, 15 bp, Homo sapiens
aagacattctagaag

SEQ ID NO: 206089 - DNA, 15 bp, Homo sapiens
caagacattctagaa

SEQ ID NO: 206090 - DNA, 15 bp, Homo sapiens
tcaagacattctaga

SEQ ID NO: 206091 - DNA, 15 bp, Homo sapiens
atcaagacattctag

SEQ ID NO: 206092 - DNA, 15 bp, Homo sapiens
aatcaagacattcta

SEQ ID NO: 206093 - DNA, 15 bp, Homo sapiens
caatcaagacattct

SEQ ID NO: 206094 - DNA, 15 bp, Homo sapiens
acaatcaagacattc

SEQ ID NO: 206095 - DNA, 15 bp, Homo sapiens
cacaatcaagacatt

SEQ ID NO: 206096 - DNA, 15 bp, Homo sapiens
ccacaatcaagacat

SEQ ID NO: 206097 - DNA, 15 bp, Homo sapiens
tccacaatcaagaca

SEQ ID NO: 206098 - DNA, 15 bp, Homo sapiens
ttccacaatcaagac

SEQ ID NO: 206099 - DNA, 15 bp, Homo sapiens
cttccacaatcaaga

SEQ ID NO: 206100 - DNA, 15 bp, Homo sapiens
acttccacaatcaag

SEQ ID NO: 206101 - DNA, 15 bp, Homo sapiens
tacttccacaatcaa

SEQ ID NO: 206102 - DNA, 15 bp, Homo sapiens
ttacttccacaatca

SEQ ID NO: 206103 - DNA, 15 bp, Homo sapiens
cttacttccacaatc

SEQ ID NO: 206104 - DNA, 15 bp, Homo sapiens
acttacttccacaat

SEQ ID NO: 206105 - DNA, 15 bp, Homo sapiens
aacttacttccacaa

SEQ ID NO: 206106 - DNA, 15 bp, Homo sapiens
gaacttacttccaca

SEQ ID NO: 206107 - DNA, 15 bp, Homo sapiens
tgaacttacttccac

SEQ ID NO: 206108 - DNA, 15 bp, Homo sapiens
gtgaacttacttcca

SEQ ID NO: 206109 - DNA, 15 bp, Homo sapiens
tgtgaacttacttcc

SEQ ID NO: 206110 - DNA, 15 bp, Homo sapiens
atgtgaacttacttc

SEQ ID NO: 206111 - DNA, 15 bp, Homo sapiens
aatgtgaacttactt

SEQ ID NO: 206112 - DNA, 15 bp, Homo sapiens
aaatgtgaacttact

SEQ ID NO: 206113 - DNA, 15 bp, Homo sapiens
taaatgtgaacttac

SEQ ID NO: 206114 - DNA, 15 bp, Homo sapiens
gtaaatgtgaactta

SEQ ID NO: 206115 - DNA, 15 bp, Homo sapiens
agtaaatgtgaactt

SEQ ID NO: 206116 - DNA, 15 bp, Homo sapiens
aagtaaatgtgaact

SEQ ID NO: 206117 - DNA, 15 bp, Homo sapiens
aaagtaaatgtgaac

SEQ ID NO: 206118 - DNA, 15 bp, Homo sapiens
aaaagtaaatgtgaa

SEQ ID NO: 206119 - DNA, 15 bp, Homo sapiens
taaaagtaaatgtga

SEQ ID NO: 206120 - DNA, 15 bp, Homo sapiens
ttaaaagtaaatgtg

SEQ ID NO: 206121 - DNA, 15 bp, Homo sapiens
attaaaagtaaatgt

SEQ ID NO: 206122 - DNA, 15 bp, Homo sapiens
tattaaaagtaaatg

SEQ ID NO: 206123 - DNA, 15 bp, Homo sapiens
atattaaaagtaaat

SEQ ID NO: 206124 - DNA, 15 bp, Homo sapiens
tatattaaaagtaaa

SEQ ID NO: 206125 - DNA, 15 bp, Homo sapiens
ttatattaaaagtaa

SEQ ID NO: 206126 - DNA, 15 bp, Homo sapiens
gttatattaaaagta

SEQ ID NO: 206127 - DNA, 15 bp, Homo sapiens
tgttatattaaaagt

SEQ ID NO: 206128 - DNA, 15 bp, Homo sapiens
atgttatattaaaag

SEQ ID NO: 206129 - DNA, 15 bp, Homo sapiens
aatgttatattaaaa

SEQ ID NO: 206130 - DNA, 15 bp, Homo sapiens
aaatgttatattaaa

SEQ ID NO: 206131 - DNA, 15 bp, Homo sapiens
taaatgttatattaa

SEQ ID NO: 206132 - DNA, 15 bp, Homo sapiens
ataaatgttatatta

SEQ ID NO: 206133 - DNA, 15 bp, Homo sapiens
cataaatgttatatt

SEQ ID NO: 206134 - DNA, 15 bp, Homo sapiens
tcataaatgttatat

SEQ ID NO: 206135 - DNA, 15 bp, Homo sapiens
gtcataaatgttata

SEQ ID NO: 206136 - DNA, 15 bp, Homo sapiens
agtcataaatgttat

SEQ ID NO: 206137 - DNA, 15 bp, Homo sapiens
aagtcataaatgtta

SEQ ID NO: 206138 - DNA, 15 bp, Homo sapiens
aaagtcataaatgtt

SEQ ID NO: 206139 - DNA, 15 bp, Homo sapiens
aaaagtcataaatgt

SEQ ID NO: 206140 - DNA, 15 bp, Homo sapiens
gaaaagtcataaatg

SEQ ID NO: 206141 - DNA, 15 bp, Homo sapiens
agaaaagtcataaat

SEQ ID NO: 206142 - DNA, 15 bp, Homo sapiens
tagaaaagtcataaa

SEQ ID NO: 206143 - DNA, 15 bp, Homo sapiens
ttagaaaagtcataa

SEQ ID NO: 206144 - DNA, 15 bp, Homo sapiens
gttagaaaagtcata

SEQ ID NO: 206145 - DNA, 15 bp, Homo sapiens
agttagaaaagtcat

SEQ ID NO: 206146 - DNA, 15 bp, Homo sapiens
aagttagaaaagtca

SEQ ID NO: 206147 - DNA, 15 bp, Homo sapiens
taagttagaaaagtc

SEQ ID NO: 206148 - DNA, 15 bp, Homo sapiens
ctaagttagaaaagt

SEQ ID NO: 206149 - DNA, 15 bp, Homo sapiens
actaagttagaaaag

SEQ ID NO: 206150 - DNA, 15 bp, Homo sapiens
tactaagttagaaaa

SEQ ID NO: 206151 - DNA, 15 bp, Homo sapiens
atactaagttagaaa

SEQ ID NO: 206152 - DNA, 15 bp, Homo sapiens
catactaagttagaa

SEQ ID NO: 206153 - DNA, 15 bp, Homo sapiens
gcatactaagttaga

SEQ ID NO: 206154 - DNA, 15 bp, Homo sapiens
tgcatactaagttag

SEQ ID NO: 206155 - DNA, 15 bp, Homo sapiens
gtgcatactaagtta

SEQ ID NO: 206156 - DNA, 15 bp, Homo sapiens
ggtgcatactaagtt

SEQ ID NO: 206157 - DNA, 15 bp, Homo sapiens
tggtgcatactaagt

SEQ ID NO: 206158 - DNA, 15 bp, Homo sapiens
atggtgcatactaag

SEQ ID NO: 206159 - DNA, 15 bp, Homo sapiens
gatggtgcatactaa

SEQ ID NO: 206160 - DNA, 15 bp, Homo sapiens
ggatggtgcatacta

SEQ ID NO: 206161 - DNA, 15 bp, Homo sapiens
aggatggtgcatact

SEQ ID NO: 206162 - DNA, 15 bp, Homo sapiens
taggatggtgcatac

SEQ ID NO: 206163 - DNA, 15 bp, Homo sapiens
ttaggatggtgcata

SEQ ID NO: 206164 - DNA, 15 bp, Homo sapiens
tttaggatggtgcat

SEQ ID NO: 206165 - DNA, 15 bp, Homo sapiens
ctttaggatggtgca

SEQ ID NO: 206166 - DNA, 15 bp, Homo sapiens
cctttaggatggtgc

SEQ ID NO: 206167 - DNA, 15 bp, Homo sapiens
acctttaggatggtg

SEQ ID NO: 206168 - DNA, 15 bp, Homo sapiens
tacctttaggatggt

SEQ ID NO: 206169 - DNA, 15 bp, Homo sapiens
ttacctttaggatgg

SEQ ID NO: 206170 - DNA, 15 bp, Homo sapiens
cttacctttaggatg

SEQ ID NO: 206171 - DNA, 15 bp, Homo sapiens
gcttacctttaggat

SEQ ID NO: 206172 - DNA, 15 bp, Homo sapiens
ggcttacctttagga

SEQ ID NO: 206173 - DNA, 15 bp, Homo sapiens
tggcttacctttagg

SEQ ID NO: 206174 - DNA, 15 bp, Homo sapiens
ctggcttacctttag

SEQ ID NO: 206175 - DNA, 15 bp, Homo sapiens
cctggcttaccttta

SEQ ID NO: 206176 - DNA, 15 bp, Homo sapiens
ccctggcttaccttt

SEQ ID NO: 206177 - DNA, 15 bp, Homo sapiens
tccctggcttacctt

SEQ ID NO: 206178 - DNA, 15 bp, Homo sapiens
ctccctggcttacct

SEQ ID NO: 206179 - DNA, 15 bp, Homo sapiens
tctccctggcttacc

SEQ ID NO: 206180 - DNA, 15 bp, Homo sapiens
ctctccctggcttac

SEQ ID NO: 206181 - DNA, 15 bp, Homo sapiens
tctctccctggctta

SEQ ID NO: 206182 - DNA, 15 bp, Homo sapiens
ttctctccctggctt

SEQ ID NO: 206183 - DNA, 15 bp, Homo sapiens
tttctctccctggct

SEQ ID NO: 206184 - DNA, 15 bp, Homo sapiens
atttctctccctggc

SEQ ID NO: 206185 - DNA, 15 bp, Homo sapiens
aatttctctccctgg

SEQ ID NO: 206186 - DNA, 15 bp, Homo sapiens
gaatttctctccctg

SEQ ID NO: 206187 - DNA, 15 bp, Homo sapiens
ggaatttctctccct

SEQ ID NO: 206188 - DNA, 15 bp, Homo sapiens
aggaatttctctccc

SEQ ID NO: 206189 - DNA, 15 bp, Homo sapiens
gaggaatttctctcc

SEQ ID NO: 206190 - DNA, 15 bp, Homo sapiens
agaggaatttctctc

SEQ ID NO: 206191 - DNA, 15 bp, Homo sapiens
cagaggaatttctct

SEQ ID NO: 206192 - DNA, 15 bp, Homo sapiens
gcagaggaatttctc

SEQ ID NO: 206193 - DNA, 15 bp, Homo sapiens
tgcagaggaatttct

SEQ ID NO: 206194 - DNA, 15 bp, Homo sapiens
atgcagaggaatttc

SEQ ID NO: 206195 - DNA, 15 bp, Homo sapiens
gatgcagaggaattt

SEQ ID NO: 206196 - DNA, 15 bp, Homo sapiens
tgatgcagaggaatt

SEQ ID NO: 206197 - DNA, 15 bp, Homo sapiens
ctgatgcagaggaat

SEQ ID NO: 206198 - DNA, 15 bp, Homo sapiens
actgatgcagaggaa

SEQ ID NO: 206199 - DNA, 15 bp, Homo sapiens
aactgatgcagagga

SEQ ID NO: 206200 - DNA, 15 bp, Homo sapiens
aaactgatgcagagg

SEQ ID NO: 206201 - DNA, 15 bp, Homo sapiens
aaaactgatgcagag

SEQ ID NO: 206202 - DNA, 15 bp, Homo sapiens
taaaactgatgcaga

SEQ ID NO: 206203 - DNA, 15 bp, Homo sapiens
ttaaaactgatgcag

SEQ ID NO: 206204 - DNA, 15 bp, Homo sapiens
attaaaactgatgca

SEQ ID NO: 206205 - DNA, 15 bp, Homo sapiens
cattaaaactgatgc

SEQ ID NO: 206206 - DNA, 15 bp, Homo sapiens
ccattaaaactgatg

SEQ ID NO: 206207 - DNA, 15 bp, Homo sapiens
accattaaaactgat

SEQ ID NO: 206208 - DNA, 15 bp, Homo sapiens
caccattaaaactga

SEQ ID NO: 206209 - DNA, 15 bp, Homo sapiens
ccaccattaaaactg

SEQ ID NO: 206210 - DNA, 15 bp, Homo sapiens
cccaccattaaaact

SEQ ID NO: 206211 - DNA, 15 bp, Homo sapiens
gcccaccattaaaac

SEQ ID NO: 206212 - DNA, 15 bp, Homo sapiens
agcccaccattaaaa

SEQ ID NO: 206213 - DNA, 15 bp, Homo sapiens
aagcccaccattaaa

SEQ ID NO: 206214 - DNA, 15 bp, Homo sapiens
caagcccaccattaa

SEQ ID NO: 206215 - DNA, 15 bp, Homo sapiens
acaagcccaccatta

SEQ ID NO: 206216 - DNA, 15 bp, Homo sapiens
cacaagcccaccatt

SEQ ID NO: 206217 - DNA, 15 bp, Homo sapiens
acacaagcccaccat

SEQ ID NO: 206218 - DNA, 15 bp, Homo sapiens
aacacaagcccacca

SEQ ID NO: 206219 - DNA, 15 bp, Homo sapiens
gaacacaagcccacc

SEQ ID NO: 206220 - DNA, 15 bp, Homo sapiens
agaacacaagcccac

SEQ ID NO: 206221 - DNA, 15 bp, Homo sapiens
tagaacacaagccca

SEQ ID NO: 206222 - DNA, 15 bp, Homo sapiens
ttagaacacaagccc

SEQ ID NO: 206223 - DNA, 15 bp, Homo sapiens
tttagaacacaagcc

SEQ ID NO: 206224 - DNA, 15 bp, Homo sapiens
ctttagaacacaagc

SEQ ID NO: 206225 - DNA, 15 bp, Homo sapiens
cctttagaacacaag

SEQ ID NO: 206226 - DNA, 15 bp, Homo sapiens
tcctttagaacacaa

SEQ ID NO: 206227 - DNA, 15 bp, Homo sapiens
ctcctttagaacaca

SEQ ID NO: 206228 - DNA, 15 bp, Homo sapiens
actcctttagaacac

SEQ ID NO: 206229 - DNA, 15 bp, Homo sapiens
cactcctttagaaca

SEQ ID NO: 206230 - DNA, 15 bp, Homo sapiens
tcactcctttagaac

SEQ ID NO: 206231 - DNA, 15 bp, Homo sapiens
ctcactcctttagaa

SEQ ID NO: 206232 - DNA, 15 bp, Homo sapiens
tctcactcctttaga

SEQ ID NO: 206233 - DNA, 15 bp, Homo sapiens
atctcactcctttag

SEQ ID NO: 206234 - DNA, 15 bp, Homo sapiens
aatctcactccttta

SEQ ID NO: 206235 - DNA, 15 bp, Homo sapiens
caatctcactccttt

SEQ ID NO: 206236 - DNA, 15 bp, Homo sapiens
ccaatctcactcctt

SEQ ID NO: 206237 - DNA, 15 bp, Homo sapiens
accaatctcactcct

SEQ ID NO: 206238 - DNA, 15 bp, Homo sapiens
aaccaatctcactcc

SEQ ID NO: 206239 - DNA, 15 bp, Homo sapiens
aaaccaatctcactc

SEQ ID NO: 206240 - DNA, 15 bp, Homo sapiens
aaaaccaatctcact

SEQ ID NO: 206241 - DNA, 15 bp, Homo sapiens
aaaaaccaatctcac

SEQ ID NO: 206242 - DNA, 15 bp, Homo sapiens
aaaaaaccaatctca

SEQ ID NO: 206243 - DNA, 15 bp, Homo sapiens
caaaaaaccaatctc

SEQ ID NO: 206244 - DNA, 15 bp, Homo sapiens
acaaaaaaccaatct

SEQ ID NO: 206245 - DNA, 15 bp, Homo sapiens
tacaaaaaaccaatc

SEQ ID NO: 206246 - DNA, 15 bp, Homo sapiens
ttacaaaaaaccaat

SEQ ID NO: 206247 - DNA, 15 bp, Homo sapiens
tttacaaaaaaccaa

SEQ ID NO: 206248 - DNA, 15 bp, Homo sapiens
ctttacaaaaaacca

SEQ ID NO: 206249 - DNA, 15 bp, Homo sapiens
tctttacaaaaaacc

SEQ ID NO: 206250 - DNA, 15 bp, Homo sapiens
gtctttacaaaaaac

SEQ ID NO: 206251 - DNA, 15 bp, Homo sapiens
agtctttacaaaaaa

SEQ ID NO: 206252 - DNA, 15 bp, Homo sapiens
tagtctttacaaaaa

SEQ ID NO: 206253 - DNA, 15 bp, Homo sapiens
gtagtctttacaaaa

SEQ ID NO: 206254 - DNA, 15 bp, Homo sapiens
agtagtctttacaaa

SEQ ID NO: 206255 - DNA, 15 bp, Homo sapiens
aagtagtctttacaa

SEQ ID NO: 206256 - DNA, 15 bp, Homo sapiens
taagtagtctttaca

SEQ ID NO: 206257 - DNA, 15 bp, Homo sapiens
ctaagtagtctttac

SEQ ID NO: 206258 - DNA, 15 bp, Homo sapiens
actaagtagtcttta

SEQ ID NO: 206259 - DNA, 15 bp, Homo sapiens
tactaagtagtcttt

SEQ ID NO: 206260 - DNA, 15 bp, Homo sapiens
ttactaagtagtctt

SEQ ID NO: 206261 - DNA, 15 bp, Homo sapiens
attactaagtagtct

SEQ ID NO: 206262 - DNA, 15 bp, Homo sapiens
aattactaagtagtc

SEQ ID NO: 206263 - DNA, 15 bp, Homo sapiens
aaattactaagtagt

SEQ ID NO: 206264 - DNA, 15 bp, Homo sapiens
caaattactaagtag

SEQ ID NO: 206265 - DNA, 15 bp, Homo sapiens
acaaattactaagta

SEQ ID NO: 206266 - DNA, 15 bp, Homo sapiens
aacaaattactaagt

SEQ ID NO: 206267 - DNA, 15 bp, Homo sapiens
aaacaaattactaag

SEQ ID NO: 206268 - DNA, 15 bp, Homo sapiens
aaaacaaattactaa

SEQ ID NO: 206269 - DNA, 15 bp, Homo sapiens
aaaaacaaattacta

SEQ ID NO: 206270 - DNA, 15 bp, Homo sapiens
taaaaacaaattact

SEQ ID NO: 206271 - DNA, 15 bp, Homo sapiens
gtaaaaacaaattac

SEQ ID NO: 206272 - DNA, 15 bp, Homo sapiens
ggtaaaaacaaatta

SEQ ID NO: 206273 - DNA, 15 bp, Homo sapiens
tggtaaaaacaaatt

SEQ ID NO: 206274 - DNA, 15 bp, Homo sapiens
ttggtaaaaacaaat

SEQ ID NO: 206275 - DNA, 15 bp, Homo sapiens
attggtaaaaacaaa

SEQ ID NO: 206276 - DNA, 15 bp, Homo sapiens
tattggtaaaaacaa

SEQ ID NO: 206277 - DNA, 15 bp, Homo sapiens
ttattggtaaaaaca

SEQ ID NO: 206278 - DNA, 15 bp, Homo sapiens
attattggtaaaaac

SEQ ID NO: 206279 - DNA, 15 bp, Homo sapiens
cattattggtaaaaa

SEQ ID NO: 206280 - DNA, 15 bp, Homo sapiens
ccattattggtaaaa

SEQ ID NO: 206281 - DNA, 15 bp, Homo sapiens
tccattattggtaaa

SEQ ID NO: 206282 - DNA, 15 bp, Homo sapiens
ttccattattggtaa

SEQ ID NO: 206283 - DNA, 15 bp, Homo sapiens
attccattattggta

SEQ ID NO: 206284 - DNA, 15 bp, Homo sapiens
cattccattattggt

SEQ ID NO: 206285 - DNA, 15 bp, Homo sapiens
ccattccattattgg

SEQ ID NO: 206286 - DNA, 15 bp, Homo sapiens
accattccattattg

SEQ ID NO: 206287 - DNA, 15 bp, Homo sapiens
taccattccattatt

SEQ ID NO: 206288 - DNA, 15 bp, Homo sapiens
ataccattccattat

SEQ ID NO: 206289 - DNA, 15 bp, Homo sapiens
tataccattccatta

SEQ ID NO: 206290 - DNA, 15 bp, Homo sapiens
gtataccattccatt

SEQ ID NO: 206291 - DNA, 15 bp, Homo sapiens
agtataccattccat

SEQ ID NO: 206292 - DNA, 15 bp, Homo sapiens
aagtataccattcca

SEQ ID NO: 206293 - DNA, 15 bp, Homo sapiens
gaagtataccattcc

SEQ ID NO: 206294 - DNA, 15 bp, Homo sapiens
ggaagtataccattc

SEQ ID NO: 206295 - DNA, 15 bp, Homo sapiens
aggaagtataccatt

SEQ ID NO: 206296 - DNA, 15 bp, Homo sapiens
taggaagtataccat

SEQ ID NO: 206297 - DNA, 15 bp, Homo sapiens
gtaggaagtatacca

SEQ ID NO: 206298 - DNA, 15 bp, Homo sapiens
ggtaggaagtatacc

SEQ ID NO: 206299 - DNA, 15 bp, Homo sapiens
aggtaggaagtatac

SEQ ID NO: 206300 - DNA, 15 bp, Homo sapiens
gaggtaggaagtata

SEQ ID NO: 206301 - DNA, 15 bp, Homo sapiens
agaggtaggaagtat

SEQ ID NO: 206302 - DNA, 15 bp, Homo sapiens
gagaggtaggaagta

SEQ ID NO: 206303 - DNA, 15 bp, Homo sapiens
agagaggtaggaagt

SEQ ID NO: 206304 - DNA, 15 bp, Homo sapiens
aagagaggtaggaag

SEQ ID NO: 206305 - DNA, 15 bp, Homo sapiens
aaagagaggtaggaa

SEQ ID NO: 206306 - DNA, 15 bp, Homo sapiens
aaaagagaggtagga

SEQ ID NO: 206307 - DNA, 15 bp, Homo sapiens
aaaaagagaggtagg

SEQ ID NO: 206308 - DNA, 15 bp, Homo sapiens
aaaaaagagaggtag

SEQ ID NO: 206309 - DNA, 15 bp, Homo sapiens
aaaaaaagagaggta

SEQ ID NO: 206310 - DNA, 15 bp, Homo sapiens
taaaaaaagagaggt

SEQ ID NO: 206311 - DNA, 15 bp, Homo sapiens
ctaaaaaaagagagg

SEQ ID NO: 206312 - DNA, 15 bp, Homo sapiens
actaaaaaaagagag

SEQ ID NO: 206313 - DNA, 15 bp, Homo sapiens
aactaaaaaaagaga

SEQ ID NO: 206314 - DNA, 15 bp, Homo sapiens
aaactaaaaaaagag

SEQ ID NO: 206315 - DNA, 15 bp, Homo sapiens
caaactaaaaaaaga

SEQ ID NO: 206316 - DNA, 15 bp, Homo sapiens
tcaaactaaaaaaag

SEQ ID NO: 206317 - DNA, 15 bp, Homo sapiens
ttcaaactaaaaaaa

SEQ ID NO: 206318 - DNA, 15 bp, Homo sapiens
cttcaaactaaaaaa

SEQ ID NO: 206319 - DNA, 15 bp, Homo sapiens
acttcaaactaaaaa

SEQ ID NO: 206320 - DNA, 15 bp, Homo sapiens
tacttcaaactaaaa

SEQ ID NO: 206321 - DNA, 15 bp, Homo sapiens
atacttcaaactaaa

SEQ ID NO: 206322 - DNA, 15 bp, Homo sapiens
aatacttcaaactaa

SEQ ID NO: 206323 - DNA, 15 bp, Homo sapiens
aaatacttcaaacta

SEQ ID NO: 206324 - DNA, 15 bp, Homo sapiens
aaaatacttcaaact

SEQ ID NO: 206325 - DNA, 15 bp, Homo sapiens
gaaaatacttcaaac

SEQ ID NO: 206326 - DNA, 15 bp, Homo sapiens
agaaaatacttcaaa

SEQ ID NO: 206327 - DNA, 15 bp, Homo sapiens
aagaaaatacttcaa

SEQ ID NO: 206328 - DNA, 15 bp, Homo sapiens
aaagaaaatacttca

SEQ ID NO: 206329 - DNA, 15 bp, Homo sapiens
gaaagaaaatacttc

SEQ ID NO: 206330 - DNA, 15 bp, Homo sapiens
agaaagaaaatactt

SEQ ID NO: 206331 - DNA, 15 bp, Homo sapiens
tagaaagaaaatact

SEQ ID NO: 206332 - DNA, 15 bp, Homo sapiens
ttagaaagaaaatac

SEQ ID NO: 206333 - DNA, 15 bp, Homo sapiens
tttagaaagaaaata

SEQ ID NO: 206334 - DNA, 15 bp, Homo sapiens
gtttagaaagaaaat

SEQ ID NO: 206335 - DNA, 15 bp, Homo sapiens
tgtttagaaagaaaa

SEQ ID NO: 206336 - DNA, 15 bp, Homo sapiens
atgtttagaaagaaa

SEQ ID NO: 206337 - DNA, 15 bp, Homo sapiens
tatgtttagaaagaa

SEQ ID NO: 206338 - DNA, 15 bp, Homo sapiens
ttatgtttagaaaga

SEQ ID NO: 206339 - DNA, 15 bp, Homo sapiens
gttatgtttagaaag

SEQ ID NO: 206340 - DNA, 15 bp, Homo sapiens
agttatgtttagaaa

SEQ ID NO: 206341 - DNA, 15 bp, Homo sapiens
gagttatgtttagaa

SEQ ID NO: 206342 - DNA, 15 bp, Homo sapiens
agagttatgtttaga

SEQ ID NO: 206343 - DNA, 15 bp, Homo sapiens
gagagttatgtttag

SEQ ID NO: 206344 - DNA, 15 bp, Homo sapiens
agagagttatgttta

SEQ ID NO: 206345 - DNA, 15 bp, Homo sapiens
gagagagttatgttt

SEQ ID NO: 206346 - DNA, 15 bp, Homo sapiens
agagagagttatgtt

SEQ ID NO: 206347 - DNA, 15 bp, Homo sapiens
gagagagagttatgt

SEQ ID NO: 206348 - DNA, 15 bp, Homo sapiens
agagagagagttatg

SEQ ID NO: 206349 - DNA, 15 bp, Homo sapiens
gagagagagagttat

SEQ ID NO: 206350 - DNA, 15 bp, Homo sapiens
agagagagagagtta

SEQ ID NO: 206351 - DNA, 15 bp, Homo sapiens
tagagagagagagtt

SEQ ID NO: 206352 - DNA, 15 bp, Homo sapiens
atagagagagagagt

SEQ ID NO: 206353 - DNA, 15 bp, Homo sapiens
aatagagagagagag

SEQ ID NO: 206354 - DNA, 15 bp, Homo sapiens
aaatagagagagaga

SEQ ID NO: 206355 - DNA, 15 bp, Homo sapiens
taaatagagagagag

SEQ ID NO: 206356 - DNA, 15 bp, Homo sapiens
ataaatagagagaga

SEQ ID NO: 206357 - DNA, 15 bp, Homo sapiens
gataaatagagagag

SEQ ID NO: 206358 - DNA, 15 bp, Homo sapiens
agataaatagagaga

SEQ ID NO: 206359 - DNA, 15 bp, Homo sapiens
tagataaatagagag

SEQ ID NO: 206360 - DNA, 15 bp, Homo sapiens
atagataaatagaga

SEQ ID NO: 206361 - DNA, 15 bp, Homo sapiens
tatagataaatagag

SEQ ID NO: 206362 - DNA, 15 bp, Homo sapiens
atatagataaataga

SEQ ID NO: 206363 - DNA, 15 bp, Homo sapiens
tatatagataaatag

SEQ ID NO: 206364 - DNA, 15 bp, Homo sapiens
atatatagataaata

SEQ ID NO: 206365 - DNA, 15 bp, Homo sapiens
tatatatagataaat

SEQ ID NO: 206366 - DNA, 15 bp, Homo sapiens
ttatatatagataaa

SEQ ID NO: 206367 - DNA, 15 bp, Homo sapiens
attatatatagataa

SEQ ID NO: 206368 - DNA, 15 bp, Homo sapiens
tattatatatagata

SEQ ID NO: 206369 - DNA, 15 bp, Homo sapiens
atattatatatagat

SEQ ID NO: 206370 - DNA, 15 bp, Homo sapiens
tatattatatataga

SEQ ID NO: 206371 - DNA, 15 bp, Homo sapiens
atatattatatatag

SEQ ID NO: 206372 - DNA, 15 bp, Homo sapiens
tatatattatatata

SEQ ID NO: 206373 - DNA, 15 bp, Homo sapiens
gtatatattatatat

SEQ ID NO: 206374 - DNA, 15 bp, Homo sapiens
tgtatatattatata

SEQ ID NO: 206375 - DNA, 15 bp, Homo sapiens
atgtatatattatat

SEQ ID NO: 206376 - DNA, 15 bp, Homo sapiens
tatgtatatattata

SEQ ID NO: 206377 - DNA, 15 bp, Homo sapiens
atatgtatatattat

SEQ ID NO: 206378 - DNA, 15 bp, Homo sapiens
tatatgtatatatta

SEQ ID NO: 206379 - DNA, 15 bp, Homo sapiens
atatatgtatatatt

SEQ ID NO: 206380 - DNA, 15 bp, Homo sapiens
tatatatgtatatat

SEQ ID NO: 206381 - DNA, 15 bp, Homo sapiens
atatatatgtatata

SEQ ID NO: 206382 - DNA, 15 bp, Homo sapiens
gatatatatgtatat

SEQ ID NO: 206383 - DNA, 15 bp, Homo sapiens
agatatatatgtata

SEQ ID NO: 206384 - DNA, 15 bp, Homo sapiens
aagatatatatgtat

SEQ ID NO: 206385 - DNA, 15 bp, Homo sapiens
taagatatatatgta

SEQ ID NO: 206386 - DNA, 15 bp, Homo sapiens
ataagatatatatgt

SEQ ID NO: 206387 - DNA, 15 bp, Homo sapiens
tataagatatatatg

SEQ ID NO: 206388 - DNA, 15 bp, Homo sapiens
atataagatatatat

SEQ ID NO: 206389 - DNA, 15 bp, Homo sapiens
aatataagatatata

SEQ ID NO: 206390 - DNA, 15 bp, Homo sapiens
aaatataagatatat

SEQ ID NO: 206391 - DNA, 15 bp, Homo sapiens
aaaatataagatata

SEQ ID NO: 206392 - DNA, 15 bp, Homo sapiens
taaaatataagatat

SEQ ID NO: 206393 - DNA, 15 bp, Homo sapiens
ataaaatataagata

SEQ ID NO: 206394 - DNA, 15 bp, Homo sapiens
cataaaatataagat

SEQ ID NO: 206395 - DNA, 15 bp, Homo sapiens
acataaaatataaga

SEQ ID NO: 206396 - DNA, 15 bp, Homo sapiens
tacataaaatataag

SEQ ID NO: 206397 - DNA, 15 bp, Homo sapiens
atacataaaatataa

SEQ ID NO: 206398 - DNA, 15 bp, Homo sapiens
tatacataaaatata

SEQ ID NO: 206399 - DNA, 15 bp, Homo sapiens
atatacataaaatat

SEQ ID NO: 206400 - DNA, 15 bp, Homo sapiens
tatatacataaaata

SEQ ID NO: 206401 - DNA, 15 bp, Homo sapiens
atatatacataaaat

SEQ ID NO: 206402 - DNA, 15 bp, Homo sapiens
tatatatacataaaa

SEQ ID NO: 206403 - DNA, 15 bp, Homo sapiens
atatatatacataaa

SEQ ID NO: 206404 - DNA, 15 bp, Homo sapiens
tatatatatacataa

SEQ ID NO: 206405 - DNA, 15 bp, Homo sapiens
atatatatatacata

SEQ ID NO: 206406 - DNA, 15 bp, Homo sapiens
tatatatatatacat

SEQ ID NO: 206407 - DNA, 15 bp, Homo sapiens
atatatatatataca

SEQ ID NO: 206408 - DNA, 15 bp, Homo sapiens
tatatatatatatac

SEQ ID NO: 206409 - DNA, 15 bp, Homo sapiens
atatatatatatata

SEQ ID NO: 206410 - DNA, 15 bp, Homo sapiens
gatatatatatatat

SEQ ID NO: 206411 - DNA, 15 bp, Homo sapiens
agatatatatatata

SEQ ID NO: 206412 - DNA, 15 bp, Homo sapiens
aagatatatatatat

SEQ ID NO: 206413 - DNA, 15 bp, Homo sapiens
caagatatatatata

SEQ ID NO: 206414 - DNA, 15 bp, Homo sapiens
gcaagatatatatat

SEQ ID NO: 206415 - DNA, 15 bp, Homo sapiens
agcaagatatatata

SEQ ID NO: 206416 - DNA, 15 bp, Homo sapiens
aagcaagatatatat

SEQ ID NO: 206417 - DNA, 15 bp, Homo sapiens
taagcaagatatata

SEQ ID NO: 206418 - DNA, 15 bp, Homo sapiens
ctaagcaagatatat

SEQ ID NO: 206419 - DNA, 15 bp, Homo sapiens
tctaagcaagatata

SEQ ID NO: 206420 - DNA, 15 bp, Homo sapiens
atctaagcaagatat

SEQ ID NO: 206421 - DNA, 15 bp, Homo sapiens
aatctaagcaagata

SEQ ID NO: 206422 - DNA, 15 bp, Homo sapiens
aaatctaagcaagat

SEQ ID NO: 206423 - DNA, 15 bp, Homo sapiens
aaaatctaagcaaga

SEQ ID NO: 206424 - DNA, 15 bp, Homo sapiens
caaaatctaagcaag

SEQ ID NO: 206425 - DNA, 15 bp, Homo sapiens
acaaaatctaagcaa

SEQ ID NO: 206426 - DNA, 15 bp, Homo sapiens
gacaaaatctaagca

SEQ ID NO: 206427 - DNA, 15 bp, Homo sapiens
agacaaaatctaagc

SEQ ID NO: 206428 - DNA, 15 bp, Homo sapiens
aagacaaaatctaag

SEQ ID NO: 206429 - DNA, 15 bp, Homo sapiens
taagacaaaatctaa

SEQ ID NO: 206430 - DNA, 15 bp, Homo sapiens
ataagacaaaatcta

SEQ ID NO: 206431 - DNA, 15 bp, Homo sapiens
cataagacaaaatct

SEQ ID NO: 206432 - DNA, 15 bp, Homo sapiens
acataagacaaaatc

SEQ ID NO: 206433 - DNA, 15 bp, Homo sapiens
tacataagacaaaat

SEQ ID NO: 206434 - DNA, 15 bp, Homo sapiens
ttacataagacaaaa

SEQ ID NO: 206435 - DNA, 15 bp, Homo sapiens
attacataagacaaa

SEQ ID NO: 206436 - DNA, 15 bp, Homo sapiens
tattacataagacaa

SEQ ID NO: 206437 - DNA, 15 bp, Homo sapiens
atattacataagaca

SEQ ID NO: 206438 - DNA, 15 bp, Homo sapiens
aatattacataagac

SEQ ID NO: 206439 - DNA, 15 bp, Homo sapiens
aaatattacataaga

SEQ ID NO: 206440 - DNA, 15 bp, Homo sapiens
caaatattacataag

SEQ ID NO: 206441 - DNA, 15 bp, Homo sapiens
ccaaatattacataa

SEQ ID NO: 206442 - DNA, 15 bp, Homo sapiens
accaaatattacata

SEQ ID NO: 206443 - DNA, 15 bp, Homo sapiens
taccaaatattacat

SEQ ID NO: 206444 - DNA, 15 bp, Homo sapiens
gtaccaaatattaca

SEQ ID NO: 206445 - DNA, 15 bp, Homo sapiens
tgtaccaaatattac

SEQ ID NO: 206446 - DNA, 15 bp, Homo sapiens
atgtaccaaatatta

SEQ ID NO: 206447 - DNA, 15 bp, Homo sapiens
tatgtaccaaatatt

SEQ ID NO: 206448 - DNA, 15 bp, Homo sapiens
ttatgtaccaaatat

SEQ ID NO: 206449 - DNA, 15 bp, Homo sapiens
tttatgtaccaaata

SEQ ID NO: 206450 - DNA, 15 bp, Homo sapiens
ttttatgtaccaaat

SEQ ID NO: 206451 - DNA, 15 bp, Homo sapiens
tttttatgtaccaaa

SEQ ID NO: 206452 - DNA, 15 bp, Homo sapiens
ttttttatgtaccaa

SEQ ID NO: 206453 - DNA, 15 bp, Homo sapiens
attttttatgtacca

SEQ ID NO: 206454 - DNA, 15 bp, Homo sapiens
tattttttatgtacc

SEQ ID NO: 206455 - DNA, 15 bp, Homo sapiens
ttattttttatgtac

SEQ ID NO: 206456 - DNA, 15 bp, Homo sapiens
attattttttatgta

SEQ ID NO: 206457 - DNA, 15 bp, Homo sapiens
tattattttttatgt

SEQ ID NO: 206458 - DNA, 15 bp, Homo sapiens
atattattttttatg

SEQ ID NO: 206459 - DNA, 15 bp, Homo sapiens
aatattattttttat

SEQ ID NO: 206460 - DNA, 15 bp, Homo sapiens
aaatattatttttta

SEQ ID NO: 206461 - DNA, 15 bp, Homo sapiens
taaatattatttttt

SEQ ID NO: 206462 - DNA, 15 bp, Homo sapiens
ataaatattattttt

SEQ ID NO: 206463 - DNA, 15 bp, Homo sapiens
tataaatattatttt

SEQ ID NO: 206464 - DNA, 15 bp, Homo sapiens
ttataaatattattt

SEQ ID NO: 206465 - DNA, 15 bp, Homo sapiens
attataaatattatt

SEQ ID NO: 206466 - DNA, 15 bp, Homo sapiens
aattataaatattat

SEQ ID NO: 206467 - DNA, 15 bp, Homo sapiens
aaattataaatatta

SEQ ID NO: 206468 - DNA, 15 bp, Homo sapiens
taaattataaatatt

SEQ ID NO: 206469 - DNA, 15 bp, Homo sapiens
ataaattataaatat

SEQ ID NO: 206470 - DNA, 15 bp, Homo sapiens
tataaattataaata

SEQ ID NO: 206471 - DNA, 15 bp, Homo sapiens
ctataaattataaat

SEQ ID NO: 206472 - DNA, 15 bp, Homo sapiens
tctataaattataaa

SEQ ID NO: 206473 - DNA, 15 bp, Homo sapiens
gtctataaattataa

SEQ ID NO: 206474 - DNA, 15 bp, Homo sapiens
agtctataaattata

SEQ ID NO: 206475 - DNA, 15 bp, Homo sapiens
tagtctataaattat

SEQ ID NO: 206476 - DNA, 15 bp, Homo sapiens
atagtctataaatta

SEQ ID NO: 206477 - DNA, 15 bp, Homo sapiens
aatagtctataaatt

SEQ ID NO: 206478 - DNA, 15 bp, Homo sapiens
aaatagtctataaat

SEQ ID NO: 206479 - DNA, 15 bp, Homo sapiens
aaaatagtctataaa

SEQ ID NO: 206480 - DNA, 15 bp, Homo sapiens
gaaaatagtctataa

SEQ ID NO: 206481 - DNA, 15 bp, Homo sapiens
ggaaaatagtctata

SEQ ID NO: 206482 - DNA, 15 bp, Homo sapiens
tggaaaatagtctat

SEQ ID NO: 206483 - DNA, 15 bp, Homo sapiens
atggaaaatagtcta

SEQ ID NO: 206484 - DNA, 15 bp, Homo sapiens
catggaaaatagtct

SEQ ID NO: 206485 - DNA, 15 bp, Homo sapiens
acatggaaaatagtc

SEQ ID NO: 206486 - DNA, 15 bp, Homo sapiens
cacatggaaaatagt

SEQ ID NO: 206487 - DNA, 15 bp, Homo sapiens
acacatggaaaatag

SEQ ID NO: 206488 - DNA, 15 bp, Homo sapiens
aacacatggaaaata

SEQ ID NO: 206489 - DNA, 15 bp, Homo sapiens
taacacatggaaaat

SEQ ID NO: 206490 - DNA, 15 bp, Homo sapiens
ataacacatggaaaa

SEQ ID NO: 206491 - DNA, 15 bp, Homo sapiens
aataacacatggaaa

SEQ ID NO: 206492 - DNA, 15 bp, Homo sapiens
taataacacatggaa

SEQ ID NO: 206493 - DNA, 15 bp, Homo sapiens
ataataacacatgga

SEQ ID NO: 206494 - DNA, 15 bp, Homo sapiens
cataataacacatgg

SEQ ID NO: 206495 - DNA, 15 bp, Homo sapiens
acataataacacatg

SEQ ID NO: 206496 - DNA, 15 bp, Homo sapiens
cacataataacacat

SEQ ID NO: 206497 - DNA, 15 bp, Homo sapiens
gcacataataacaca

SEQ ID NO: 206498 - DNA, 15 bp, Homo sapiens
agcacataataacac

SEQ ID NO: 206499 - DNA, 15 bp, Homo sapiens
tagcacataataaca

SEQ ID NO: 206500 - DNA, 15 bp, Homo sapiens
ttagcacataataac

SEQ ID NO: 206501 - DNA, 15 bp, Homo sapiens
tttagcacataataa

SEQ ID NO: 206502 - DNA, 15 bp, Homo sapiens
ctttagcacataata

SEQ ID NO: 206503 - DNA, 15 bp, Homo sapiens
actttagcacataat

SEQ ID NO: 206504 - DNA, 15 bp, Homo sapiens
tactttagcacataa

SEQ ID NO: 206505 - DNA, 15 bp, Homo sapiens
atactttagcacata

SEQ ID NO: 206506 - DNA, 15 bp, Homo sapiens
aatactttagcacat

SEQ ID NO: 206507 - DNA, 15 bp, Homo sapiens
aaatactttagcaca

SEQ ID NO: 206508 - DNA, 15 bp, Homo sapiens
aaaatactttagcac

SEQ ID NO: 206509 - DNA, 15 bp, Homo sapiens
caaaatactttagca

SEQ ID NO: 206510 - DNA, 15 bp, Homo sapiens
acaaaatactttagc

SEQ ID NO: 206511 - DNA, 15 bp, Homo sapiens
tacaaaatactttag

SEQ ID NO: 206512 - DNA, 15 bp, Homo sapiens
atacaaaatacttta

SEQ ID NO: 206513 - DNA, 15 bp, Homo sapiens
gatacaaaatacttt

SEQ ID NO: 206514 - DNA, 15 bp, Homo sapiens
agatacaaaatactt

SEQ ID NO: 206515 - DNA, 15 bp, Homo sapiens
aagatacaaaatact

SEQ ID NO: 206516 - DNA, 15 bp, Homo sapiens
taagatacaaaatac

SEQ ID NO: 206517 - DNA, 15 bp, Homo sapiens
ctaagatacaaaata

SEQ ID NO: 206518 - DNA, 15 bp, Homo sapiens
gctaagatacaaaat

SEQ ID NO: 206519 - DNA, 15 bp, Homo sapiens
tgctaagatacaaaa

SEQ ID NO: 206520 - DNA, 15 bp, Homo sapiens
gtgctaagatacaaa

SEQ ID NO: 206521 - DNA, 15 bp, Homo sapiens
ggtgctaagatacaa

SEQ ID NO: 206522 - DNA, 15 bp, Homo sapiens
cggtgctaagataca

SEQ ID NO: 206523 - DNA, 15 bp, Homo sapiens
tcggtgctaagatac

SEQ ID NO: 206524 - DNA, 15 bp, Homo sapiens
ctcggtgctaagata

SEQ ID NO: 206525 - DNA, 15 bp, Homo sapiens
tctcggtgctaagat

SEQ ID NO: 206526 - DNA, 15 bp, Homo sapiens
ctctcggtgctaaga

SEQ ID NO: 206527 - DNA, 15 bp, Homo sapiens
cctctcggtgctaag

SEQ ID NO: 206528 - DNA, 15 bp, Homo sapiens
gcctctcggtgctaa

SEQ ID NO: 206529 - DNA, 15 bp, Homo sapiens
agcctctcggtgcta

SEQ ID NO: 206530 - DNA, 15 bp, Homo sapiens
tagcctctcggtgct

SEQ ID NO: 206531 - DNA, 15 bp, Homo sapiens
ttagcctctcggtgc

SEQ ID NO: 206532 - DNA, 15 bp, Homo sapiens
cttagcctctcggtg

SEQ ID NO: 206533 - DNA, 15 bp, Homo sapiens
gcttagcctctcggt

SEQ ID NO: 206534 - DNA, 15 bp, Homo sapiens
tgcttagcctctcgg

SEQ ID NO: 206535 - DNA, 15 bp, Homo sapiens
ctgcttagcctctcg

SEQ ID NO: 206536 - DNA, 15 bp, Homo sapiens
actgcttagcctctc

SEQ ID NO: 206537 - DNA, 15 bp, Homo sapiens
aactgcttagcctct

SEQ ID NO: 206538 - DNA, 15 bp, Homo sapiens
aaactgcttagcctc

SEQ ID NO: 206539 - DNA, 15 bp, Homo sapiens
gaaactgcttagcct

SEQ ID NO: 206540 - DNA, 15 bp, Homo sapiens
ggaaactgcttagcc

SEQ ID NO: 206541 - DNA, 15 bp, Homo sapiens
aggaaactgcttagc

SEQ ID NO: 206542 - DNA, 15 bp, Homo sapiens
taggaaactgcttag

SEQ ID NO: 206543 - DNA, 15 bp, Homo sapiens
ctaggaaactgctta

SEQ ID NO: 206544 - DNA, 15 bp, Homo sapiens
cctaggaaactgctt

SEQ ID NO: 206545 - DNA, 15 bp, Homo sapiens
ccctaggaaactgct

SEQ ID NO: 206546 - DNA, 15 bp, Homo sapiens
accctaggaaactgc

SEQ ID NO: 206547 - DNA, 15 bp, Homo sapiens
aaccctaggaaactg

SEQ ID NO: 206548 - DNA, 15 bp, Homo sapiens
taaccctaggaaact

SEQ ID NO: 206549 - DNA, 15 bp, Homo sapiens
gtaaccctaggaaac

SEQ ID NO: 206550 - DNA, 15 bp, Homo sapiens
ggtaaccctaggaaa

SEQ ID NO: 206551 - DNA, 15 bp, Homo sapiens
tggtaaccctaggaa

SEQ ID NO: 206552 - DNA, 15 bp, Homo sapiens
ctggtaaccctagga

SEQ ID NO: 206553 - DNA, 15 bp, Homo sapiens
gctggtaaccctagg

SEQ ID NO: 206554 - DNA, 15 bp, Homo sapiens
agctggtaaccctag

SEQ ID NO: 206555 - DNA, 15 bp, Homo sapiens
tagctggtaacccta

SEQ ID NO: 206556 - DNA, 15 bp, Homo sapiens
ctagctggtaaccct

SEQ ID NO: 206557 - DNA, 15 bp, Homo sapiens
actagctggtaaccc

SEQ ID NO: 206558 - DNA, 15 bp, Homo sapiens
tactagctggtaacc

SEQ ID NO: 206559 - DNA, 15 bp, Homo sapiens
ttactagctggtaac

SEQ ID NO: 206560 - DNA, 15 bp, Homo sapiens
tttactagctggtaa

SEQ ID NO: 206561 - DNA, 15 bp, Homo sapiens
gtttactagctggta

SEQ ID NO: 206562 - DNA, 15 bp, Homo sapiens
agtttactagctggt

SEQ ID NO: 206563 - DNA, 15 bp, Homo sapiens
tagtttactagctgg

SEQ ID NO: 206564 - DNA, 15 bp, Homo sapiens
ttagtttactagctg

SEQ ID NO: 206565 - DNA, 15 bp, Homo sapiens
cttagtttactagct

SEQ ID NO: 206566 - DNA, 15 bp, Homo sapiens
ccttagtttactagc

SEQ ID NO: 206567 - DNA, 15 bp, Homo sapiens
cccttagtttactag

SEQ ID NO: 206568 - DNA, 15 bp, Homo sapiens
tcccttagtttacta

SEQ ID NO: 206569 - DNA, 15 bp, Homo sapiens
ttcccttagtttact

SEQ ID NO: 206570 - DNA, 15 bp, Homo sapiens
tttcccttagtttac

SEQ ID NO: 206571 - DNA, 15 bp, Homo sapiens
gtttcccttagttta

SEQ ID NO: 206572 - DNA, 15 bp, Homo sapiens
ggtttcccttagttt

SEQ ID NO: 206573 - DNA, 15 bp, Homo sapiens
aggtttcccttagtt

SEQ ID NO: 206574 - DNA, 15 bp, Homo sapiens
aaggtttcccttagt

SEQ ID NO: 206575 - DNA, 15 bp, Homo sapiens
aaaggtttcccttag

SEQ ID NO: 206576 - DNA, 15 bp, Homo sapiens
taaaggtttccctta

SEQ ID NO: 206577 - DNA, 15 bp, Homo sapiens
gtaaaggtttccctt

SEQ ID NO: 206578 - DNA, 15 bp, Homo sapiens
agtaaaggtttccct

SEQ ID NO: 206579 - DNA, 15 bp, Homo sapiens
aagtaaaggtttccc

SEQ ID NO: 206580 - DNA, 15 bp, Homo sapiens
gaagtaaaggtttcc

SEQ ID NO: 206581 - DNA, 15 bp, Homo sapiens
ggaagtaaaggtttc

SEQ ID NO: 206582 - DNA, 15 bp, Homo sapiens
aggaagtaaaggttt

SEQ ID NO: 206583 - DNA, 15 bp, Homo sapiens
aaggaagtaaaggtt

SEQ ID NO: 206584 - DNA, 15 bp, Homo sapiens
aaaggaagtaaaggt

SEQ ID NO: 206585 - DNA, 15 bp, Homo sapiens
taaaggaagtaaagg

SEQ ID NO: 206586 - DNA, 15 bp, Homo sapiens
ctaaaggaagtaaag

SEQ ID NO: 206587 - DNA, 15 bp, Homo sapiens
gctaaaggaagtaaa

SEQ ID NO: 206588 - DNA, 15 bp, Homo sapiens
agctaaaggaagtaa

SEQ ID NO: 206589 - DNA, 15 bp, Homo sapiens
gagctaaaggaagta

SEQ ID NO: 206590 - DNA, 15 bp, Homo sapiens
tgagctaaaggaagt

SEQ ID NO: 206591 - DNA, 15 bp, Homo sapiens
ctgagctaaaggaag

SEQ ID NO: 206592 - DNA, 15 bp, Homo sapiens
actgagctaaaggaa

SEQ ID NO: 206593 - DNA, 15 bp, Homo sapiens
cactgagctaaagga

SEQ ID NO: 206594 - DNA, 15 bp, Homo sapiens
ccactgagctaaagg

SEQ ID NO: 206595 - DNA, 15 bp, Homo sapiens
accactgagctaaag

SEQ ID NO: 206596 - DNA, 15 bp, Homo sapiens
aaccactgagctaaa

SEQ ID NO: 206597 - DNA, 15 bp, Homo sapiens
gaaccactgagctaa

SEQ ID NO: 206598 - DNA, 15 bp, Homo sapiens
agaaccactgagcta

SEQ ID NO: 206599 - DNA, 15 bp, Homo sapiens
gagaaccactgagct

SEQ ID NO: 206600 - DNA, 15 bp, Homo sapiens
tgagaaccactgagc

SEQ ID NO: 206601 - DNA, 15 bp, Homo sapiens
ttgagaaccactgag

SEQ ID NO: 206602 - DNA, 15 bp, Homo sapiens
tttgagaaccactga

SEQ ID NO: 206603 - DNA, 15 bp, Homo sapiens
ttttgagaaccactg

SEQ ID NO: 206604 - DNA, 15 bp, Homo sapiens
attttgagaaccact

SEQ ID NO: 206605 - DNA, 15 bp, Homo sapiens
cattttgagaaccac

SEQ ID NO: 206606 - DNA, 15 bp, Homo sapiens
acattttgagaacca

SEQ ID NO: 206607 - DNA, 15 bp, Homo sapiens
cacattttgagaacc

SEQ ID NO: 206608 - DNA, 15 bp, Homo sapiens
ccacattttgagaac

SEQ ID NO: 206609 - DNA, 15 bp, Homo sapiens
accacattttgagaa

SEQ ID NO: 206610 - DNA, 15 bp, Homo sapiens
aaccacattttgaga

SEQ ID NO: 206611 - DNA, 15 bp, Homo sapiens
gaaccacattttgag

SEQ ID NO: 206612 - DNA, 15 bp, Homo sapiens
ggaaccacattttga

SEQ ID NO: 206613 - DNA, 15 bp, Homo sapiens
gggaaccacattttg

SEQ ID NO: 206614 - DNA, 15 bp, Homo sapiens
agggaaccacatttt

SEQ ID NO: 206615 - DNA, 15 bp, Homo sapiens
tagggaaccacattt

SEQ ID NO: 206616 - DNA, 15 bp, Homo sapiens
ctagggaaccacatt

SEQ ID NO: 206617 - DNA, 15 bp, Homo sapiens
tctagggaaccacat

SEQ ID NO: 206618 - DNA, 15 bp, Homo sapiens
gtctagggaaccaca

SEQ ID NO: 206619 - DNA, 15 bp, Homo sapiens
ggtctagggaaccac

SEQ ID NO: 206620 - DNA, 15 bp, Homo sapiens
tggtctagggaacca

SEQ ID NO: 206621 - DNA, 15 bp, Homo sapiens
ttggtctagggaacc

SEQ ID NO: 206622 - DNA, 15 bp, Homo sapiens
tttggtctagggaac

SEQ ID NO: 206623 - DNA, 15 bp, Homo sapiens
ttttggtctagggaa

SEQ ID NO: 206624 - DNA, 15 bp, Homo sapiens
cttttggtctaggga

SEQ ID NO: 206625 - DNA, 15 bp, Homo sapiens
acttttggtctaggg

SEQ ID NO: 206626 - DNA, 15 bp, Homo sapiens
tacttttggtctagg

SEQ ID NO: 206627 - DNA, 15 bp, Homo sapiens
atacttttggtctag

SEQ ID NO: 206628 - DNA, 15 bp, Homo sapiens
aatacttttggtcta

SEQ ID NO: 206629 - DNA, 15 bp, Homo sapiens
taatacttttggtct

SEQ ID NO: 206630 - DNA, 15 bp, Homo sapiens
ttaatacttttggtc

SEQ ID NO: 206631 - DNA, 15 bp, Homo sapiens
attaatacttttggt

SEQ ID NO: 206632 - DNA, 15 bp, Homo sapiens
tattaatacttttgg

SEQ ID NO: 206633 - DNA, 15 bp, Homo sapiens
atattaatacttttg

SEQ ID NO: 206634 - DNA, 15 bp, Homo sapiens
gatattaatactttt

SEQ ID NO: 206635 - DNA, 15 bp, Homo sapiens
tgatattaatacttt

SEQ ID NO: 206636 - DNA, 15 bp, Homo sapiens
ctgatattaatactt

SEQ ID NO: 206637 - DNA, 15 bp, Homo sapiens
tctgatattaatact

SEQ ID NO: 206638 - DNA, 15 bp, Homo sapiens
gtctgatattaatac

SEQ ID NO: 206639 - DNA, 15 bp, Homo sapiens
tgtctgatattaata

SEQ ID NO: 206640 - DNA, 15 bp, Homo sapiens
ttgtctgatattaat

SEQ ID NO: 206641 - DNA, 15 bp, Homo sapiens
cttgtctgatattaa

SEQ ID NO: 206642 - DNA, 15 bp, Homo sapiens
tcttgtctgatatta

SEQ ID NO: 206643 - DNA, 15 bp, Homo sapiens
ttcttgtctgatatt

SEQ ID NO: 206644 - DNA, 15 bp, Homo sapiens
gttcttgtctgatat

SEQ ID NO: 206645 - DNA, 15 bp, Homo sapiens
ggttcttgtctgata

SEQ ID NO: 206646 - DNA, 15 bp, Homo sapiens
aggttcttgtctgat

SEQ ID NO: 206647 - DNA, 15 bp, Homo sapiens
taggttcttgtctga

SEQ ID NO: 206648 - DNA, 15 bp, Homo sapiens
gtaggttcttgtctg

SEQ ID NO: 206649 - DNA, 15 bp, Homo sapiens
ggtaggttcttgtct

SEQ ID NO: 206650 - DNA, 15 bp, Homo sapiens
cggtaggttcttgtc

SEQ ID NO: 206651 - DNA, 15 bp, Homo sapiens
tcggtaggttcttgt

SEQ ID NO: 206652 - DNA, 15 bp, Homo sapiens
ttcggtaggttcttg

SEQ ID NO: 206653 - DNA, 15 bp, Homo sapiens
attcggtaggttctt

SEQ ID NO: 206654 - DNA, 15 bp, Homo sapiens
gattcggtaggttct

SEQ ID NO: 206655 - DNA, 15 bp, Homo sapiens
tgattcggtaggttc

SEQ ID NO: 206656 - DNA, 15 bp, Homo sapiens
ttgattcggtaggtt

SEQ ID NO: 206657 - DNA, 15 bp, Homo sapiens
tttgattcggtaggt

SEQ ID NO: 206658 - DNA, 15 bp, Homo sapiens
ttttgattcggtagg

SEQ ID NO: 206659 - DNA, 15 bp, Homo sapiens
attttgattcggtag

SEQ ID NO: 206660 - DNA, 15 bp, Homo sapiens
tattttgattcggta

SEQ ID NO: 206661 - DNA, 15 bp, Homo sapiens
atattttgattcggt

SEQ ID NO: 206662 - DNA, 15 bp, Homo sapiens
gatattttgattcgg

SEQ ID NO: 206663 - DNA, 15 bp, Homo sapiens
agatattttgattcg

SEQ ID NO: 206664 - DNA, 15 bp, Homo sapiens
cagatattttgattc

SEQ ID NO: 206665 - DNA, 15 bp, Homo sapiens
acagatattttgatt

SEQ ID NO: 206666 - DNA, 15 bp, Homo sapiens
cacagatattttgat

SEQ ID NO: 206667 - DNA, 15 bp, Homo sapiens
tcacagatattttga

SEQ ID NO: 206668 - DNA, 15 bp, Homo sapiens
atcacagatattttg

SEQ ID NO: 206669 - DNA, 15 bp, Homo sapiens
catcacagatatttt

SEQ ID NO: 206670 - DNA, 15 bp, Homo sapiens
tcatcacagatattt

SEQ ID NO: 206671 - DNA, 15 bp, Homo sapiens
ctcatcacagatatt

SEQ ID NO: 206672 - DNA, 15 bp, Homo sapiens
cctcatcacagatat

SEQ ID NO: 206673 - DNA, 15 bp, Homo sapiens
gcctcatcacagata

SEQ ID NO: 206674 - DNA, 15 bp, Homo sapiens
ggcctcatcacagat

SEQ ID NO: 206675 - DNA, 15 bp, Homo sapiens
gggcctcatcacaga

SEQ ID NO: 206676 - DNA, 15 bp, Homo sapiens
tgggcctcatcacag

SEQ ID NO: 206677 - DNA, 15 bp, Homo sapiens
ctgggcctcatcaca

SEQ ID NO: 206678 - DNA, 15 bp, Homo sapiens
gctgggcctcatcac

SEQ ID NO: 206679 - DNA, 15 bp, Homo sapiens
tgctgggcctcatca

SEQ ID NO: 206680 - DNA, 15 bp, Homo sapiens
ttgctgggcctcatc

SEQ ID NO: 206681 - DNA, 15 bp, Homo sapiens
cttgctgggcctcat

SEQ ID NO: 206682 - DNA, 15 bp, Homo sapiens
gcttgctgggcctca

SEQ ID NO: 206683 - DNA, 15 bp, Homo sapiens
agcttgctgggcctc

SEQ ID NO: 206684 - DNA, 15 bp, Homo sapiens
tagcttgctgggcct

SEQ ID NO: 206685 - DNA, 15 bp, Homo sapiens
atagcttgctgggcc

SEQ ID NO: 206686 - DNA, 15 bp, Homo sapiens
catagcttgctgggc

SEQ ID NO: 206687 - DNA, 15 bp, Homo sapiens
gcatagcttgctggg

SEQ ID NO: 206688 - DNA, 15 bp, Homo sapiens
agcatagcttgctgg

SEQ ID NO: 206689 - DNA, 15 bp, Homo sapiens
aagcatagcttgctg

SEQ ID NO: 206690 - DNA, 15 bp, Homo sapiens
aaagcatagcttgct

SEQ ID NO: 206691 - DNA, 15 bp, Homo sapiens
taaagcatagcttgc

SEQ ID NO: 206692 - DNA, 15 bp, Homo sapiens
ttaaagcatagcttg

SEQ ID NO: 206693 - DNA, 15 bp, Homo sapiens
gttaaagcatagctt

SEQ ID NO: 206694 - DNA, 15 bp, Homo sapiens
tgttaaagcatagct

SEQ ID NO: 206695 - DNA, 15 bp, Homo sapiens
ttgttaaagcatagc

SEQ ID NO: 206696 - DNA, 15 bp, Homo sapiens
cttgttaaagcatag

SEQ ID NO: 206697 - DNA, 15 bp, Homo sapiens
acttgttaaagcata

SEQ ID NO: 206698 - DNA, 15 bp, Homo sapiens
aacttgttaaagcat

SEQ ID NO: 206699 - DNA, 15 bp, Homo sapiens
aaacttgttaaagca

SEQ ID NO: 206700 - DNA, 15 bp, Homo sapiens
gaaacttgttaaagc

SEQ ID NO: 206701 - DNA, 15 bp, Homo sapiens
ggaaacttgttaaag

SEQ ID NO: 206702 - DNA, 15 bp, Homo sapiens
cggaaacttgttaaa

SEQ ID NO: 206703 - DNA, 15 bp, Homo sapiens
tcggaaacttgttaa

SEQ ID NO: 206704 - DNA, 15 bp, Homo sapiens
ctcggaaacttgtta

SEQ ID NO: 206705 - DNA, 15 bp, Homo sapiens
actcggaaacttgtt

SEQ ID NO: 206706 - DNA, 15 bp, Homo sapiens
cactcggaaacttgt

SEQ ID NO: 206707 - DNA, 15 bp, Homo sapiens
tcactcggaaacttg

SEQ ID NO: 206708 - DNA, 15 bp, Homo sapiens
atcactcggaaactt

SEQ ID NO: 206709 - DNA, 15 bp, Homo sapiens
aatcactcggaaact

SEQ ID NO: 206710 - DNA, 15 bp, Homo sapiens
gaatcactcggaaac

SEQ ID NO: 206711 - DNA, 15 bp, Homo sapiens
agaatcactcggaaa

SEQ ID NO: 206712 - DNA, 15 bp, Homo sapiens
cagaatcactcggaa

SEQ ID NO: 206713 - DNA, 15 bp, Homo sapiens
tcagaatcactcgga

SEQ ID NO: 206714 - DNA, 15 bp, Homo sapiens
atcagaatcactcgg

SEQ ID NO: 206715 - DNA, 15 bp, Homo sapiens
catcagaatcactcg

SEQ ID NO: 206716 - DNA, 15 bp, Homo sapiens
gcatcagaatcactc

SEQ ID NO: 206717 - DNA, 15 bp, Homo sapiens
tgcatcagaatcact

SEQ ID NO: 206718 - DNA, 15 bp, Homo sapiens
atgcatcagaatcac

SEQ ID NO: 206719 - DNA, 15 bp, Homo sapiens
catgcatcagaatca

SEQ ID NO: 206720 - DNA, 15 bp, Homo sapiens
gcatgcatcagaatc

SEQ ID NO: 206721 - DNA, 15 bp, Homo sapiens
agcatgcatcagaat

SEQ ID NO: 206722 - DNA, 15 bp, Homo sapiens
tagcatgcatcagaa

SEQ ID NO: 206723 - DNA, 15 bp, Homo sapiens
ttagcatgcatcaga

SEQ ID NO: 206724 - DNA, 15 bp, Homo sapiens
cttagcatgcatcag

SEQ ID NO: 206725 - DNA, 15 bp, Homo sapiens
ccttagcatgcatca

SEQ ID NO: 206726 - DNA, 15 bp, Homo sapiens
accttagcatgcatc

SEQ ID NO: 206727 - DNA, 15 bp, Homo sapiens
aaccttagcatgcat

SEQ ID NO: 206728 - DNA, 15 bp, Homo sapiens
aaaccttagcatgca

SEQ ID NO: 206729 - DNA, 15 bp, Homo sapiens
taaaccttagcatgc

SEQ ID NO: 206730 - DNA, 15 bp, Homo sapiens
ctaaaccttagcatg

SEQ ID NO: 206731 - DNA, 15 bp, Homo sapiens
cctaaaccttagcat

SEQ ID NO: 206732 - DNA, 15 bp, Homo sapiens
tcctaaaccttagca

SEQ ID NO: 206733 - DNA, 15 bp, Homo sapiens
atcctaaaccttagc

SEQ ID NO: 206734 - DNA, 15 bp, Homo sapiens
gatcctaaaccttag

SEQ ID NO: 206735 - DNA, 15 bp, Homo sapiens
ggatcctaaacctta

SEQ ID NO: 206736 - DNA, 15 bp, Homo sapiens
gggatcctaaacctt

SEQ ID NO: 206737 - DNA, 15 bp, Homo sapiens
agggatcctaaacct

SEQ ID NO: 206738 - DNA, 15 bp, Homo sapiens
aagggatcctaaacc

SEQ ID NO: 206739 - DNA, 15 bp, Homo sapiens
caagggatcctaaac

SEQ ID NO: 206740 - DNA, 15 bp, Homo sapiens
acaagggatcctaaa

SEQ ID NO: 206741 - DNA, 15 bp, Homo sapiens
aacaagggatcctaa

SEQ ID NO: 206742 - DNA, 15 bp, Homo sapiens
aaacaagggatccta

SEQ ID NO: 206743 - DNA, 15 bp, Homo sapiens
aaaacaagggatcct

SEQ ID NO: 206744 - DNA, 15 bp, Homo sapiens
aaaaacaagggatcc

SEQ ID NO: 206745 - DNA, 15 bp, Homo sapiens
taaaaacaagggatc

SEQ ID NO: 206746 - DNA, 15 bp, Homo sapiens
gtaaaaacaagggat

SEQ ID NO: 206747 - DNA, 15 bp, Homo sapiens
agtaaaaacaaggga

SEQ ID NO: 206748 - DNA, 15 bp, Homo sapiens
gagtaaaaacaaggg

SEQ ID NO: 206749 - DNA, 15 bp, Homo sapiens
tgagtaaaaacaagg

SEQ ID NO: 206750 - DNA, 15 bp, Homo sapiens
atgagtaaaaacaag

SEQ ID NO: 206751 - DNA, 15 bp, Homo sapiens
tatgagtaaaaacaa

SEQ ID NO: 206752 - DNA, 15 bp, Homo sapiens
ttatgagtaaaaaca

SEQ ID NO: 206753 - DNA, 15 bp, Homo sapiens
cttatgagtaaaaac

SEQ ID NO: 206754 - DNA, 15 bp, Homo sapiens
acttatgagtaaaaa

SEQ ID NO: 206755 - DNA, 15 bp, Homo sapiens
gacttatgagtaaaa

SEQ ID NO: 206756 - DNA, 15 bp, Homo sapiens
tgacttatgagtaaa

SEQ ID NO: 206757 - DNA, 15 bp, Homo sapiens
gtgacttatgagtaa

SEQ ID NO: 206758 - DNA, 15 bp, Homo sapiens
agtgacttatgagta

SEQ ID NO: 206759 - DNA, 15 bp, Homo sapiens
aagtgacttatgagt

SEQ ID NO: 206760 - DNA, 15 bp, Homo sapiens
aaagtgacttatgag

SEQ ID NO: 206761 - DNA, 15 bp, Homo sapiens
gaaagtgacttatga

SEQ ID NO: 206762 - DNA, 15 bp, Homo sapiens
agaaagtgacttatg

SEQ ID NO: 206763 - DNA, 15 bp, Homo sapiens
gagaaagtgacttat

SEQ ID NO: 206764 - DNA, 15 bp, Homo sapiens
tgagaaagtgactta

SEQ ID NO: 206765 - DNA, 15 bp, Homo sapiens
atgagaaagtgactt

SEQ ID NO: 206766 - DNA, 15 bp, Homo sapiens
aatgagaaagtgact

SEQ ID NO: 206767 - DNA, 15 bp, Homo sapiens
taatgagaaagtgac

SEQ ID NO: 206768 - DNA, 15 bp, Homo sapiens
ttaatgagaaagtga

SEQ ID NO: 206769 - DNA, 15 bp, Homo sapiens
cttaatgagaaagtg

SEQ ID NO: 206770 - DNA, 15 bp, Homo sapiens
ccttaatgagaaagt

SEQ ID NO: 206771 - DNA, 15 bp, Homo sapiens
gccttaatgagaaag

SEQ ID NO: 206772 - DNA, 15 bp, Homo sapiens
ggccttaatgagaaa

SEQ ID NO: 206773 - DNA, 15 bp, Homo sapiens
aggccttaatgagaa

SEQ ID NO: 206774 - DNA, 15 bp, Homo sapiens
aaggccttaatgaga

SEQ ID NO: 206775 - DNA, 15 bp, Homo sapiens
gaaggccttaatgag

SEQ ID NO: 206776 - DNA, 15 bp, Homo sapiens
ggaaggccttaatga

SEQ ID NO: 206777 - DNA, 15 bp, Homo sapiens
gggaaggccttaatg

SEQ ID NO: 206778 - DNA, 15 bp, Homo sapiens
agggaaggccttaat

SEQ ID NO: 206779 - DNA, 15 bp, Homo sapiens
cagggaaggccttaa

SEQ ID NO: 206780 - DNA, 15 bp, Homo sapiens
ccagggaaggcctta

SEQ ID NO: 206781 - DNA, 15 bp, Homo sapiens
gccagggaaggcctt

SEQ ID NO: 206782 - DNA, 15 bp, Homo sapiens
ggccagggaaggcct

SEQ ID NO: 206783 - DNA, 15 bp, Homo sapiens
tggccagggaaggcc

SEQ ID NO: 206784 - DNA, 15 bp, Homo sapiens
atggccagggaaggc

SEQ ID NO: 206785 - DNA, 15 bp, Homo sapiens
gatggccagggaagg

SEQ ID NO: 206786 - DNA, 15 bp, Homo sapiens
ggatggccagggaag

SEQ ID NO: 206787 - DNA, 15 bp, Homo sapiens
aggatggccagggaa

SEQ ID NO: 206788 - DNA, 15 bp, Homo sapiens
taggatggccaggga

SEQ ID NO: 206789 - DNA, 15 bp, Homo sapiens
ataggatggccaggg

SEQ ID NO: 206790 - DNA, 15 bp, Homo sapiens
tataggatggccagg

SEQ ID NO: 206791 - DNA, 15 bp, Homo sapiens
atataggatggccag

SEQ ID NO: 206792 - DNA, 15 bp, Homo sapiens
tatataggatggcca

SEQ ID NO: 206793 - DNA, 15 bp, Homo sapiens
ttatataggatggcc

SEQ ID NO: 206794 - DNA, 15 bp, Homo sapiens
tttatataggatggc

SEQ ID NO: 206795 - DNA, 15 bp, Homo sapiens
ttttatataggatgg

SEQ ID NO: 206796 - DNA, 15 bp, Homo sapiens
attttatataggatg

SEQ ID NO: 206797 - DNA, 15 bp, Homo sapiens
gattttatataggat

SEQ ID NO: 206798 - DNA, 15 bp, Homo sapiens
agattttatatagga

SEQ ID NO: 206799 - DNA, 15 bp, Homo sapiens
gagattttatatagg

SEQ ID NO: 206800 - DNA, 15 bp, Homo sapiens
tgagattttatatag

SEQ ID NO: 206801 - DNA, 15 bp, Homo sapiens
atgagattttatata

SEQ ID NO: 206802 - DNA, 15 bp, Homo sapiens
catgagattttatat

SEQ ID NO: 206803 - DNA, 15 bp, Homo sapiens
acatgagattttata

SEQ ID NO: 206804 - DNA, 15 bp, Homo sapiens
aacatgagattttat

SEQ ID NO: 206805 - DNA, 15 bp, Homo sapiens
aaacatgagatttta

SEQ ID NO: 206806 - DNA, 15 bp, Homo sapiens
aaaacatgagatttt

SEQ ID NO: 206807 - DNA, 15 bp, Homo sapiens
gaaaacatgagattt

SEQ ID NO: 206808 - DNA, 15 bp, Homo sapiens
tgaaaacatgagatt

SEQ ID NO: 206809 - DNA, 15 bp, Homo sapiens
gtgaaaacatgagat

SEQ ID NO: 206810 - DNA, 15 bp, Homo sapiens
tgtgaaaacatgaga

SEQ ID NO: 206811 - DNA, 15 bp, Homo sapiens
gtgtgaaaacatgag

SEQ ID NO: 206812 - DNA, 15 bp, Homo sapiens
ggtgtgaaaacatga

SEQ ID NO: 206813 - DNA, 15 bp, Homo sapiens
cggtgtgaaaacatg

SEQ ID NO: 206814 - DNA, 15 bp, Homo sapiens
acggtgtgaaaacat

SEQ ID NO: 206815 - DNA, 15 bp, Homo sapiens
gacggtgtgaaaaca

SEQ ID NO: 206816 - DNA, 15 bp, Homo sapiens
tgacggtgtgaaaac

SEQ ID NO: 206817 - DNA, 15 bp, Homo sapiens
ttgacggtgtgaaaa

SEQ ID NO: 206818 - DNA, 15 bp, Homo sapiens
gttgacggtgtgaaa

SEQ ID NO: 206819 - DNA, 15 bp, Homo sapiens
agttgacggtgtgaa

SEQ ID NO: 206820 - DNA, 15 bp, Homo sapiens
aagttgacggtgtga

SEQ ID NO: 206821 - DNA, 15 bp, Homo sapiens
gaagttgacggtgtg

SEQ ID NO: 206822 - DNA, 15 bp, Homo sapiens
cgaagttgacggtgt

SEQ ID NO: 206823 - DNA, 15 bp, Homo sapiens
acgaagttgacggtg

SEQ ID NO: 206824 - DNA, 15 bp, Homo sapiens
tacgaagttgacggt

SEQ ID NO: 206825 - DNA, 15 bp, Homo sapiens
atacgaagttgacgg

SEQ ID NO: 206826 - DNA, 15 bp, Homo sapiens
aatacgaagttgacg

SEQ ID NO: 206827 - DNA, 15 bp, Homo sapiens
gaatacgaagttgac

SEQ ID NO: 206828 - DNA, 15 bp, Homo sapiens
ggaatacgaagttga

SEQ ID NO: 206829 - DNA, 15 bp, Homo sapiens
aggaatacgaagttg

SEQ ID NO: 206830 - DNA, 15 bp, Homo sapiens
gaggaatacgaagtt

SEQ ID NO: 206831 - DNA, 15 bp, Homo sapiens
ggaggaatacgaagt

SEQ ID NO: 206832 - DNA, 15 bp, Homo sapiens
aggaggaatacgaag

SEQ ID NO: 206833 - DNA, 15 bp, Homo sapiens
gaggaggaatacgaa

SEQ ID NO: 206834 - DNA, 15 bp, Homo sapiens
tgaggaggaatacga

SEQ ID NO: 206835 - DNA, 15 bp, Homo sapiens
ttgaggaggaatacg

SEQ ID NO: 206836 - DNA, 15 bp, Homo sapiens
attgaggaggaatac

SEQ ID NO: 206837 - DNA, 15 bp, Homo sapiens
tattgaggaggaata

SEQ ID NO: 206838 - DNA, 15 bp, Homo sapiens
gtattgaggaggaat

SEQ ID NO: 206839 - DNA, 15 bp, Homo sapiens
agtattgaggaggaa

SEQ ID NO: 206840 - DNA, 15 bp, Homo sapiens
aagtattgaggagga

SEQ ID NO: 206841 - DNA, 15 bp, Homo sapiens
aaagtattgaggagg

SEQ ID NO: 206842 - DNA, 15 bp, Homo sapiens
aaaagtattgaggag

SEQ ID NO: 206843 - DNA, 15 bp, Homo sapiens
taaaagtattgagga

SEQ ID NO: 206844 - DNA, 15 bp, Homo sapiens
ataaaagtattgagg

SEQ ID NO: 206845 - DNA, 15 bp, Homo sapiens
aataaaagtattgag

SEQ ID NO: 206846 - DNA, 15 bp, Homo sapiens
aaataaaagtattga

SEQ ID NO: 206847 - DNA, 15 bp, Homo sapiens
aaaataaaagtattg

SEQ ID NO: 206848 - DNA, 15 bp, Homo sapiens
gaaaataaaagtatt

SEQ ID NO: 206849 - DNA, 15 bp, Homo sapiens
ggaaaataaaagtat

SEQ ID NO: 206850 - DNA, 15 bp, Homo sapiens
aggaaaataaaagta

SEQ ID NO: 206851 - DNA, 15 bp, Homo sapiens
caggaaaataaaagt

SEQ ID NO: 206852 - DNA, 15 bp, Homo sapiens
tcaggaaaataaaag

SEQ ID NO: 206853 - DNA, 15 bp, Homo sapiens
atcaggaaaataaaa

SEQ ID NO: 206854 - DNA, 15 bp, Homo sapiens
gatcaggaaaataaa

SEQ ID NO: 206855 - DNA, 15 bp, Homo sapiens
tgatcaggaaaataa

SEQ ID NO: 206856 - DNA, 15 bp, Homo sapiens
gtgatcaggaaaata

SEQ ID NO: 206857 - DNA, 15 bp, Homo sapiens
agtgatcaggaaaat

SEQ ID NO: 206858 - DNA, 15 bp, Homo sapiens
aagtgatcaggaaaa

SEQ ID NO: 206859 - DNA, 15 bp, Homo sapiens
taagtgatcaggaaa

SEQ ID NO: 206860 - DNA, 15 bp, Homo sapiens
ataagtgatcaggaa

SEQ ID NO: 206861 - DNA, 15 bp, Homo sapiens
gataagtgatcagga

SEQ ID NO: 206862 - DNA, 15 bp, Homo sapiens
tgataagtgatcagg

SEQ ID NO: 206863 - DNA, 15 bp, Homo sapiens
gtgataagtgatcag

SEQ ID NO: 206864 - DNA, 15 bp, Homo sapiens
agtgataagtgatca

SEQ ID NO: 206865 - DNA, 15 bp, Homo sapiens
tagtgataagtgatc

SEQ ID NO: 206866 - DNA, 15 bp, Homo sapiens
ttagtgataagtgat

SEQ ID NO: 206867 - DNA, 15 bp, Homo sapiens
gttagtgataagtga

SEQ ID NO: 206868 - DNA, 15 bp, Homo sapiens
tgttagtgataagtg

SEQ ID NO: 206869 - DNA, 15 bp, Homo sapiens
ctgttagtgataagt

SEQ ID NO: 206870 - DNA, 15 bp, Homo sapiens
gctgttagtgataag

SEQ ID NO: 206871 - DNA, 15 bp, Homo sapiens
ggctgttagtgataa

SEQ ID NO: 206872 - DNA, 15 bp, Homo sapiens
aggctgttagtgata

SEQ ID NO: 206873 - DNA, 15 bp, Homo sapiens
gaggctgttagtgat

SEQ ID NO: 206874 - DNA, 15 bp, Homo sapiens
agaggctgttagtga

SEQ ID NO: 206875 - DNA, 15 bp, Homo sapiens
gagaggctgttagtg

SEQ ID NO: 206876 - DNA, 15 bp, Homo sapiens
agagaggctgttagt

SEQ ID NO: 206877 - DNA, 15 bp, Homo sapiens
gagagaggctgttag

SEQ ID NO: 206878 - DNA, 15 bp, Homo sapiens
agagagaggctgtta

SEQ ID NO: 206879 - DNA, 15 bp, Homo sapiens
gagagagaggctgtt

SEQ ID NO: 206880 - DNA, 15 bp, Homo sapiens
agagagagaggctgt

SEQ ID NO: 206881 - DNA, 15 bp, Homo sapiens
gagagagagaggctg

SEQ ID NO: 206882 - DNA, 15 bp, Homo sapiens
agagagagagaggct

SEQ ID NO: 206883 - DNA, 15 bp, Homo sapiens
gagagagagagaggc

SEQ ID NO: 206884 - DNA, 15 bp, Homo sapiens
agagagagagagagg

SEQ ID NO: 206885 - DNA, 15 bp, Homo sapiens
gagagagagagagag

SEQ ID NO: 206886 - DNA, 15 bp, Homo sapiens
tagagagagagagag

SEQ ID NO: 206887 - DNA, 15 bp, Homo sapiens
atagagagagagaga

SEQ ID NO: 206888 - DNA, 15 bp, Homo sapiens
catagagagagagag

SEQ ID NO: 206889 - DNA, 15 bp, Homo sapiens
acatagagagagaga

SEQ ID NO: 206890 - DNA, 15 bp, Homo sapiens
tacatagagagagag

SEQ ID NO: 206891 - DNA, 15 bp, Homo sapiens
atacatagagagaga

SEQ ID NO: 206892 - DNA, 15 bp, Homo sapiens
tatacatagagagag

SEQ ID NO: 206893 - DNA, 15 bp, Homo sapiens
atatacatagagaga

SEQ ID NO: 206894 - DNA, 15 bp, Homo sapiens
tatatacatagagag

SEQ ID NO: 206895 - DNA, 15 bp, Homo sapiens
atatatacatagaga

SEQ ID NO: 206896 - DNA, 15 bp, Homo sapiens
tatatatacatagag

SEQ ID NO: 206897 - DNA, 15 bp, Homo sapiens
atatatatacataga

SEQ ID NO: 206898 - DNA, 15 bp, Homo sapiens
tatatatatacatag

SEQ ID NO: 206899 - DNA, 15 bp, Homo sapiens
tgatatatatatata

SEQ ID NO: 206900 - DNA, 15 bp, Homo sapiens
gtgatatatatatat

SEQ ID NO: 206901 - DNA, 15 bp, Homo sapiens
agtgatatatatata

SEQ ID NO: 206902 - DNA, 15 bp, Homo sapiens
aagtgatatatatat

SEQ ID NO: 206903 - DNA, 15 bp, Homo sapiens
taagtgatatatata

SEQ ID NO: 206904 - DNA, 15 bp, Homo sapiens
ataagtgatatatat

SEQ ID NO: 206905 - DNA, 15 bp, Homo sapiens
gataagtgatatata

SEQ ID NO: 206906 - DNA, 15 bp, Homo sapiens
tgataagtgatatat

SEQ ID NO: 206907 - DNA, 15 bp, Homo sapiens
gtgataagtgatata

SEQ ID NO: 206908 - DNA, 15 bp, Homo sapiens
agtgataagtgatat

SEQ ID NO: 206909 - DNA, 15 bp, Homo sapiens
cagtgataagtgata

SEQ ID NO: 206910 - DNA, 15 bp, Homo sapiens
acagtgataagtgat

SEQ ID NO: 206911 - DNA, 15 bp, Homo sapiens
gacagtgataagtga

SEQ ID NO: 206912 - DNA, 15 bp, Homo sapiens
agacagtgataagtg

SEQ ID NO: 206913 - DNA, 15 bp, Homo sapiens
tagacagtgataagt

SEQ ID NO: 206914 - DNA, 15 bp, Homo sapiens
ttagacagtgataag

SEQ ID NO: 206915 - DNA, 15 bp, Homo sapiens
gttagacagtgataa

SEQ ID NO: 206916 - DNA, 15 bp, Homo sapiens
tgttagacagtgata

SEQ ID NO: 206917 - DNA, 15 bp, Homo sapiens
ctgttagacagtgat

SEQ ID NO: 206918 - DNA, 15 bp, Homo sapiens
gctgttagacagtga

SEQ ID NO: 206919 - DNA, 15 bp, Homo sapiens
ggctgttagacagtg

SEQ ID NO: 206920 - DNA, 15 bp, Homo sapiens
aggctgttagacagt

SEQ ID NO: 206921 - DNA, 15 bp, Homo sapiens
gaggctgttagacag

SEQ ID NO: 206922 - DNA, 15 bp, Homo sapiens
agaggctgttagaca

SEQ ID NO: 206923 - DNA, 15 bp, Homo sapiens
gagaggctgttagac

SEQ ID NO: 206924 - DNA, 15 bp, Homo sapiens
agagaggctgttaga

SEQ ID NO: 206925 - DNA, 15 bp, Homo sapiens
aagagaggctgttag

SEQ ID NO: 206926 - DNA, 15 bp, Homo sapiens
aaagagaggctgtta

SEQ ID NO: 206927 - DNA, 15 bp, Homo sapiens
taaagagaggctgtt

SEQ ID NO: 206928 - DNA, 15 bp, Homo sapiens
ataaagagaggctgt

SEQ ID NO: 206929 - DNA, 15 bp, Homo sapiens
tataaagagaggctg

SEQ ID NO: 206930 - DNA, 15 bp, Homo sapiens
atataaagagaggct

SEQ ID NO: 206931 - DNA, 15 bp, Homo sapiens
tatataaagagaggc

SEQ ID NO: 206932 - DNA, 15 bp, Homo sapiens
atatataaagagagg

SEQ ID NO: 206933 - DNA, 15 bp, Homo sapiens
tatatataaagagag

SEQ ID NO: 206934 - DNA, 15 bp, Homo sapiens
atatatataaagaga

SEQ ID NO: 206935 - DNA, 15 bp, Homo sapiens
tatatatataaagag

SEQ ID NO: 206936 - DNA, 15 bp, Homo sapiens
atatatatataaaga

SEQ ID NO: 206937 - DNA, 15 bp, Homo sapiens
tatatatatataaag

SEQ ID NO: 206938 - DNA, 15 bp, Homo sapiens
ttatatatatataaa

SEQ ID NO: 206939 - DNA, 15 bp, Homo sapiens
attatatatatataa

SEQ ID NO: 206940 - DNA, 15 bp, Homo sapiens
gattatatatatata

SEQ ID NO: 206941 - DNA, 15 bp, Homo sapiens
agattatatatatat

SEQ ID NO: 206942 - DNA, 15 bp, Homo sapiens
tagattatatatata

SEQ ID NO: 206943 - DNA, 15 bp, Homo sapiens
atagattatatatat

SEQ ID NO: 206944 - DNA, 15 bp, Homo sapiens
tatagattatatata

SEQ ID NO: 206945 - DNA, 15 bp, Homo sapiens
ctatagattatatat

SEQ ID NO: 206946 - DNA, 15 bp, Homo sapiens
tctatagattatata

SEQ ID NO: 206947 - DNA, 15 bp, Homo sapiens
atctatagattatat

SEQ ID NO: 206948 - DNA, 15 bp, Homo sapiens
aatctatagattata

SEQ ID NO: 206949 - DNA, 15 bp, Homo sapiens
taatctatagattat

SEQ ID NO: 206950 - DNA, 15 bp, Homo sapiens
ataatctatagatta

SEQ ID NO: 206951 - DNA, 15 bp, Homo sapiens
tataatctatagatt

SEQ ID NO: 206952 - DNA, 15 bp, Homo sapiens
atataatctatagat

SEQ ID NO: 206953 - DNA, 15 bp, Homo sapiens
tatataatctataga

SEQ ID NO: 206954 - DNA, 15 bp, Homo sapiens
atatataatctatag

SEQ ID NO: 206955 - DNA, 15 bp, Homo sapiens
tatatataatctata

SEQ ID NO: 206956 - DNA, 15 bp, Homo sapiens
atatatataatctat

SEQ ID NO: 206957 - DNA, 15 bp, Homo sapiens
tatatatataatcta

SEQ ID NO: 206958 - DNA, 15 bp, Homo sapiens
atatatatataatct

SEQ ID NO: 206959 - DNA, 15 bp, Homo sapiens
catatatatataatc

SEQ ID NO: 206960 - DNA, 15 bp, Homo sapiens
gcatatatatataat

SEQ ID NO: 206961 - DNA, 15 bp, Homo sapiens
tgcatatatatataa

SEQ ID NO: 206962 - DNA, 15 bp, Homo sapiens
ctgcatatatatata

SEQ ID NO: 206963 - DNA, 15 bp, Homo sapiens
gctgcatatatatat

SEQ ID NO: 206964 - DNA, 15 bp, Homo sapiens
tgctgcatatatata

SEQ ID NO: 206965 - DNA, 15 bp, Homo sapiens
atgctgcatatatat

SEQ ID NO: 206966 - DNA, 15 bp, Homo sapiens
aatgctgcatatata

SEQ ID NO: 206967 - DNA, 15 bp, Homo sapiens
caatgctgcatatat

SEQ ID NO: 206968 - DNA, 15 bp, Homo sapiens
acaatgctgcatata

SEQ ID NO: 206969 - DNA, 15 bp, Homo sapiens
cacaatgctgcatat

SEQ ID NO: 206970 - DNA, 15 bp, Homo sapiens
gcacaatgctgcata

SEQ ID NO: 206971 - DNA, 15 bp, Homo sapiens
tgcacaatgctgcat

SEQ ID NO: 206972 - DNA, 15 bp, Homo sapiens
ttgcacaatgctgca

SEQ ID NO: 206973 - DNA, 15 bp, Homo sapiens
attgcacaatgctgc

SEQ ID NO: 206974 - DNA, 15 bp, Homo sapiens
gattgcacaatgctg

SEQ ID NO: 206975 - DNA, 15 bp, Homo sapiens
tgattgcacaatgct

SEQ ID NO: 206976 - DNA, 15 bp, Homo sapiens
atgattgcacaatgc

SEQ ID NO: 206977 - DNA, 15 bp, Homo sapiens
aatgattgcacaatg

SEQ ID NO: 206978 - DNA, 15 bp, Homo sapiens
taatgattgcacaat

SEQ ID NO: 206979 - DNA, 15 bp, Homo sapiens
ataatgattgcacaa

SEQ ID NO: 206980 - DNA, 15 bp, Homo sapiens
gataatgattgcaca

SEQ ID NO: 206981 - DNA, 15 bp, Homo sapiens
tgataatgattgcac

SEQ ID NO: 206982 - DNA, 15 bp, Homo sapiens
gtgataatgattgca

SEQ ID NO: 206983 - DNA, 15 bp, Homo sapiens
cgtgataatgattgc

SEQ ID NO: 206984 - DNA, 15 bp, Homo sapiens
gcgtgataatgattg

SEQ ID NO: 206985 - DNA, 15 bp, Homo sapiens
agcgtgataatgatt

SEQ ID NO: 206986 - DNA, 15 bp, Homo sapiens
gagcgtgataatgat

SEQ ID NO: 206987 - DNA, 15 bp, Homo sapiens
tgagcgtgataatga

SEQ ID NO: 206988 - DNA, 15 bp, Homo sapiens
ttgagcgtgataatg

SEQ ID NO: 206989 - DNA, 15 bp, Homo sapiens
attgagcgtgataat

SEQ ID NO: 206990 - DNA, 15 bp, Homo sapiens
aattgagcgtgataa

SEQ ID NO: 206991 - DNA, 15 bp, Homo sapiens
aaattgagcgtgata

SEQ ID NO: 206992 - DNA, 15 bp, Homo sapiens
aaaattgagcgtgat

SEQ ID NO: 206993 - DNA, 15 bp, Homo sapiens
taaaattgagcgtga

SEQ ID NO: 206994 - DNA, 15 bp, Homo sapiens
ttaaaattgagcgtg

SEQ ID NO: 206995 - DNA, 15 bp, Homo sapiens
tttaaaattgagcgt

SEQ ID NO: 206996 - DNA, 15 bp, Homo sapiens
ttttaaaattgagcg

SEQ ID NO: 206997 - DNA, 15 bp, Homo sapiens
gttttaaaattgagc

SEQ ID NO: 206998 - DNA, 15 bp, Homo sapiens
tgttttaaaattgag

SEQ ID NO: 206999 - DNA, 15 bp, Homo sapiens
atgttttaaaattga

SEQ ID NO: 207000 - DNA, 15 bp, Homo sapiens
aatgttttaaaattg

SEQ ID NO: 207001 - DNA, 15 bp, Homo sapiens
aaatgttttaaaatt

SEQ ID NO: 207002 - DNA, 15 bp, Homo sapiens
aaaatgttttaaaat

SEQ ID NO: 207003 - DNA, 15 bp, Homo sapiens
gaaaatgttttaaaa

SEQ ID NO: 207004 - DNA, 15 bp, Homo sapiens
tgaaaatgttttaaa

SEQ ID NO: 207005 - DNA, 15 bp, Homo sapiens
atgaaaatgttttaa

SEQ ID NO: 207006 - DNA, 15 bp, Homo sapiens
aatgaaaatgtttta

SEQ ID NO: 207007 - DNA, 15 bp, Homo sapiens
caatgaaaatgtttt

SEQ ID NO: 207008 - DNA, 15 bp, Homo sapiens
gcaatgaaaatgttt

SEQ ID NO: 207009 - DNA, 15 bp, Homo sapiens
ggcaatgaaaatgtt

SEQ ID NO: 207010 - DNA, 15 bp, Homo sapiens
gggcaatgaaaatgt

SEQ ID NO: 207011 - DNA, 15 bp, Homo sapiens
ggggcaatgaaaatg

SEQ ID NO: 207012 - DNA, 15 bp, Homo sapiens
tggggcaatgaaaat

SEQ ID NO: 207013 - DNA, 15 bp, Homo sapiens
gtggggcaatgaaaa

SEQ ID NO: 207014 - DNA, 15 bp, Homo sapiens
tgtggggcaatgaaa

SEQ ID NO: 207015 - DNA, 15 bp, Homo sapiens
ttgtggggcaatgaa

SEQ ID NO: 207016 - DNA, 15 bp, Homo sapiens
tttgtggggcaatga

SEQ ID NO: 207017 - DNA, 15 bp, Homo sapiens
ctttgtggggcaatg

SEQ ID NO: 207018 - DNA, 15 bp, Homo sapiens
tctttgtggggcaat

SEQ ID NO: 207019 - DNA, 15 bp, Homo sapiens
ttctttgtggggcaa

SEQ ID NO: 207020 - DNA, 15 bp, Homo sapiens
tttctttgtggggca

SEQ ID NO: 207021 - DNA, 15 bp, Homo sapiens
gtttctttgtggggc

SEQ ID NO: 207022 - DNA, 15 bp, Homo sapiens
ggtttctttgtgggg

SEQ ID NO: 207023 - DNA, 15 bp, Homo sapiens
gggtttctttgtggg

SEQ ID NO: 207024 - DNA, 15 bp, Homo sapiens
tgggtttctttgtgg

SEQ ID NO: 207025 - DNA, 15 bp, Homo sapiens
ttgggtttctttgtg

SEQ ID NO: 207026 - DNA, 15 bp, Homo sapiens
attgggtttctttgt

SEQ ID NO: 207027 - DNA, 15 bp, Homo sapiens
gattgggtttctttg

SEQ ID NO: 207028 - DNA, 15 bp, Homo sapiens
ggattgggtttcttt

SEQ ID NO: 207029 - DNA, 15 bp, Homo sapiens
gggattgggtttctt

SEQ ID NO: 207030 - DNA, 15 bp, Homo sapiens
ggggattgggtttct

SEQ ID NO: 207031 - DNA, 15 bp, Homo sapiens
aggggattgggtttc

SEQ ID NO: 207032 - DNA, 15 bp, Homo sapiens
aaggggattgggttt

SEQ ID NO: 207033 - DNA, 15 bp, Homo sapiens
taaggggattgggtt

SEQ ID NO: 207034 - DNA, 15 bp, Homo sapiens
ctaaggggattgggt

SEQ ID NO: 207035 - DNA, 15 bp, Homo sapiens
gctaaggggattggg

SEQ ID NO: 207036 - DNA, 15 bp, Homo sapiens
ggctaaggggattgg

SEQ ID NO: 207037 - DNA, 15 bp, Homo sapiens
tggctaaggggattg

SEQ ID NO: 207038 - DNA, 15 bp, Homo sapiens
atggctaaggggatt

SEQ ID NO: 207039 - DNA, 15 bp, Homo sapiens
gatggctaaggggat

SEQ ID NO: 207040 - DNA, 15 bp, Homo sapiens
tgatggctaagggga

SEQ ID NO: 207041 - DNA, 15 bp, Homo sapiens
gtgatggctaagggg

SEQ ID NO: 207042 - DNA, 15 bp, Homo sapiens
agtgatggctaaggg

SEQ ID NO: 207043 - DNA, 15 bp, Homo sapiens
gagtgatggctaagg

SEQ ID NO: 207044 - DNA, 15 bp, Homo sapiens
ggagtgatggctaag

SEQ ID NO: 207045 - DNA, 15 bp, Homo sapiens
gggagtgatggctaa

SEQ ID NO: 207046 - DNA, 15 bp, Homo sapiens
ggggagtgatggcta

SEQ ID NO: 207047 - DNA, 15 bp, Homo sapiens
tggggagtgatggct

SEQ ID NO: 207048 - DNA, 15 bp, Homo sapiens
atggggagtgatggc

SEQ ID NO: 207049 - DNA, 15 bp, Homo sapiens
aatggggagtgatgg

SEQ ID NO: 207050 - DNA, 15 bp, Homo sapiens
aaatggggagtgatg

SEQ ID NO: 207051 - DNA, 15 bp, Homo sapiens
gaaatggggagtgat

SEQ ID NO: 207052 - DNA, 15 bp, Homo sapiens
ggaaatggggagtga

SEQ ID NO: 207053 - DNA, 15 bp, Homo sapiens
gggaaatggggagtg

SEQ ID NO: 207054 - DNA, 15 bp, Homo sapiens
ggggaaatggggagt

SEQ ID NO: 207055 - DNA, 15 bp, Homo sapiens
aggggaaatggggag

SEQ ID NO: 207056 - DNA, 15 bp, Homo sapiens
aaggggaaatgggga

SEQ ID NO: 207057 - DNA, 15 bp, Homo sapiens
gaaggggaaatgggg

SEQ ID NO: 207058 - DNA, 15 bp, Homo sapiens
ggaaggggaaatggg

SEQ ID NO: 207059 - DNA, 15 bp, Homo sapiens
gggaaggggaaatgg

SEQ ID NO: 207060 - DNA, 15 bp, Homo sapiens
ggggaaggggaaatg

SEQ ID NO: 207061 - DNA, 15 bp, Homo sapiens
gggggaaggggaaat

SEQ ID NO: 207062 - DNA, 15 bp, Homo sapiens
tgggggaaggggaaa

SEQ ID NO: 207063 - DNA, 15 bp, Homo sapiens
ctgggggaaggggaa

SEQ ID NO: 207064 - DNA, 15 bp, Homo sapiens
gctgggggaagggga

SEQ ID NO: 207065 - DNA, 15 bp, Homo sapiens
tgctgggggaagggg

SEQ ID NO: 207066 - DNA, 15 bp, Homo sapiens
gtgctgggggaaggg

SEQ ID NO: 207067 - DNA, 15 bp, Homo sapiens
ggtgctgggggaagg

SEQ ID NO: 207068 - DNA, 15 bp, Homo sapiens
aggtgctgggggaag

SEQ ID NO: 207069 - DNA, 15 bp, Homo sapiens
taggtgctgggggaa

SEQ ID NO: 207070 - DNA, 15 bp, Homo sapiens
ctaggtgctggggga

SEQ ID NO: 207071 - DNA, 15 bp, Homo sapiens
gctaggtgctggggg

SEQ ID NO: 207072 - DNA, 15 bp, Homo sapiens
tgctaggtgctgggg

SEQ ID NO: 207073 - DNA, 15 bp, Homo sapiens
ttgctaggtgctggg

SEQ ID NO: 207074 - DNA, 15 bp, Homo sapiens
tttgctaggtgctgg

SEQ ID NO: 207075 - DNA, 15 bp, Homo sapiens
gtttgctaggtgctg

SEQ ID NO: 207076 - DNA, 15 bp, Homo sapiens
agtttgctaggtgct

SEQ ID NO: 207077 - DNA, 15 bp, Homo sapiens
cagtttgctaggtgc

SEQ ID NO: 207078 - DNA, 15 bp, Homo sapiens
tcagtttgctaggtg

SEQ ID NO: 207079 - DNA, 15 bp, Homo sapiens
atcagtttgctaggt

SEQ ID NO: 207080 - DNA, 15 bp, Homo sapiens
gatcagtttgctagg

SEQ ID NO: 207081 - DNA, 15 bp, Homo sapiens
tgatcagtttgctag

SEQ ID NO: 207082 - DNA, 15 bp, Homo sapiens
atgatcagtttgcta

SEQ ID NO: 207083 - DNA, 15 bp, Homo sapiens
gatgatcagtttgct

SEQ ID NO: 207084 - DNA, 15 bp, Homo sapiens
agatgatcagtttgc

SEQ ID NO: 207085 - DNA, 15 bp, Homo sapiens
tagatgatcagtttg

SEQ ID NO: 207086 - DNA, 15 bp, Homo sapiens
gtagatgatcagttt

SEQ ID NO: 207087 - DNA, 15 bp, Homo sapiens
ggtagatgatcagtt

SEQ ID NO: 207088 - DNA, 15 bp, Homo sapiens
aggtagatgatcagt

SEQ ID NO: 207089 - DNA, 15 bp, Homo sapiens
taggtagatgatcag

SEQ ID NO: 207090 - DNA, 15 bp, Homo sapiens
gtaggtagatgatca

SEQ ID NO: 207091 - DNA, 15 bp, Homo sapiens
agtaggtagatgatc

SEQ ID NO: 207092 - DNA, 15 bp, Homo sapiens
aagtaggtagatgat

SEQ ID NO: 207093 - DNA, 15 bp, Homo sapiens
caagtaggtagatga

SEQ ID NO: 207094 - DNA, 15 bp, Homo sapiens
gcaagtaggtagatg

SEQ ID NO: 207095 - DNA, 15 bp, Homo sapiens
agcaagtaggtagat

SEQ ID NO: 207096 - DNA, 15 bp, Homo sapiens
cagcaagtaggtaga

SEQ ID NO: 207097 - DNA, 15 bp, Homo sapiens
acagcaagtaggtag

SEQ ID NO: 207098 - DNA, 15 bp, Homo sapiens
gacagcaagtaggta

SEQ ID NO: 207099 - DNA, 15 bp, Homo sapiens
agacagcaagtaggt

SEQ ID NO: 207100 - DNA, 15 bp, Homo sapiens
tagacagcaagtagg

SEQ ID NO: 207101 - DNA, 15 bp, Homo sapiens
atagacagcaagtag

SEQ ID NO: 207102 - DNA, 15 bp, Homo sapiens
tatagacagcaagta

SEQ ID NO: 207103 - DNA, 15 bp, Homo sapiens
ttatagacagcaagt

SEQ ID NO: 207104 - DNA, 15 bp, Homo sapiens
cttatagacagcaag

SEQ ID NO: 207105 - DNA, 15 bp, Homo sapiens
tcttatagacagcaa

SEQ ID NO: 207106 - DNA, 15 bp, Homo sapiens
atcttatagacagca

SEQ ID NO: 207107 - DNA, 15 bp, Homo sapiens
aatcttatagacagc

SEQ ID NO: 207108 - DNA, 15 bp, Homo sapiens
aaatcttatagacag

SEQ ID NO: 207109 - DNA, 15 bp, Homo sapiens
caaatcttatagaca

SEQ ID NO: 207110 - DNA, 15 bp, Homo sapiens
gcaaatcttatagac

SEQ ID NO: 207111 - DNA, 15 bp, Homo sapiens
ggcaaatcttataga

SEQ ID NO: 207112 - DNA, 15 bp, Homo sapiens
aggcaaatcttatag

SEQ ID NO: 207113 - DNA, 15 bp, Homo sapiens
taggcaaatcttata

SEQ ID NO: 207114 - DNA, 15 bp, Homo sapiens
ataggcaaatcttat

SEQ ID NO: 207115 - DNA, 15 bp, Homo sapiens
aataggcaaatctta

SEQ ID NO: 207116 - DNA, 15 bp, Homo sapiens
gaataggcaaatctt

SEQ ID NO: 207117 - DNA, 15 bp, Homo sapiens
agaataggcaaatct

SEQ ID NO: 207118 - DNA, 15 bp, Homo sapiens
cagaataggcaaatc

SEQ ID NO: 207119 - DNA, 15 bp, Homo sapiens
ccagaataggcaaat

SEQ ID NO: 207120 - DNA, 15 bp, Homo sapiens
tccagaataggcaaa

SEQ ID NO: 207121 - DNA, 15 bp, Homo sapiens
gtccagaataggcaa

SEQ ID NO: 207122 - DNA, 15 bp, Homo sapiens
tgtccagaataggca

SEQ ID NO: 207123 - DNA, 15 bp, Homo sapiens
atgtccagaataggc

SEQ ID NO: 207124 - DNA, 15 bp, Homo sapiens
aatgtccagaatagg

SEQ ID NO: 207125 - DNA, 15 bp, Homo sapiens
aaatgtccagaatag

SEQ ID NO: 207126 - DNA, 15 bp, Homo sapiens
aaaatgtccagaata

SEQ ID NO: 207127 - DNA, 15 bp, Homo sapiens
caaaatgtccagaat

SEQ ID NO: 207128 - DNA, 15 bp, Homo sapiens
acaaaatgtccagaa

SEQ ID NO: 207129 - DNA, 15 bp, Homo sapiens
tacaaaatgtccaga

SEQ ID NO: 207130 - DNA, 15 bp, Homo sapiens
atacaaaatgtccag

SEQ ID NO: 207131 - DNA, 15 bp, Homo sapiens
tatacaaaatgtcca

SEQ ID NO: 207132 - DNA, 15 bp, Homo sapiens
ttatacaaaatgtcc

SEQ ID NO: 207133 - DNA, 15 bp, Homo sapiens
tttatacaaaatgtc

SEQ ID NO: 207134 - DNA, 15 bp, Homo sapiens
atttatacaaaatgt

SEQ ID NO: 207135 - DNA, 15 bp, Homo sapiens
tatttatacaaaatg

SEQ ID NO: 207136 - DNA, 15 bp, Homo sapiens
ctatttatacaaaat

SEQ ID NO: 207137 - DNA, 15 bp, Homo sapiens
tctatttatacaaaa

SEQ ID NO: 207138 - DNA, 15 bp, Homo sapiens
ttctatttatacaaa

SEQ ID NO: 207139 - DNA, 15 bp, Homo sapiens
attctatttatacaa

SEQ ID NO: 207140 - DNA, 15 bp, Homo sapiens
gattctatttataca

SEQ ID NO: 207141 - DNA, 15 bp, Homo sapiens
tgattctatttatac

SEQ ID NO: 207142 - DNA, 15 bp, Homo sapiens
atgattctatttata

SEQ ID NO: 207143 - DNA, 15 bp, Homo sapiens
tatgattctatttat

SEQ ID NO: 207144 - DNA, 15 bp, Homo sapiens
gtatgattctattta

SEQ ID NO: 207145 - DNA, 15 bp, Homo sapiens
tgtatgattctattt

SEQ ID NO: 207146 - DNA, 15 bp, Homo sapiens
ttgtatgattctatt

SEQ ID NO: 207147 - DNA, 15 bp, Homo sapiens
attgtatgattctat

SEQ ID NO: 207148 - DNA, 15 bp, Homo sapiens
tattgtatgattcta

SEQ ID NO: 207149 - DNA, 15 bp, Homo sapiens
atattgtatgattct

SEQ ID NO: 207150 - DNA, 15 bp, Homo sapiens
catattgtatgattc

SEQ ID NO: 207151 - DNA, 15 bp, Homo sapiens
acatattgtatgatt

SEQ ID NO: 207152 - DNA, 15 bp, Homo sapiens
cacatattgtatgat

SEQ ID NO: 207153 - DNA, 15 bp, Homo sapiens
ccacatattgtatga

SEQ ID NO: 207154 - DNA, 15 bp, Homo sapiens
gccacatattgtatg

SEQ ID NO: 207155 - DNA, 15 bp, Homo sapiens
ggccacatattgtat

SEQ ID NO: 207156 - DNA, 15 bp, Homo sapiens
aggccacatattgta

SEQ ID NO: 207157 - DNA, 15 bp, Homo sapiens
aaggccacatattgt

SEQ ID NO: 207158 - DNA, 15 bp, Homo sapiens
aaaggccacatattg

SEQ ID NO: 207159 - DNA, 15 bp, Homo sapiens
aaaaggccacatatt

SEQ ID NO: 207160 - DNA, 15 bp, Homo sapiens
caaaaggccacatat

SEQ ID NO: 207161 - DNA, 15 bp, Homo sapiens
acaaaaggccacata

SEQ ID NO: 207162 - DNA, 15 bp, Homo sapiens
tacaaaaggccacat

SEQ ID NO: 207163 - DNA, 15 bp, Homo sapiens
atacaaaaggccaca

SEQ ID NO: 207164 - DNA, 15 bp, Homo sapiens
gatacaaaaggccac

SEQ ID NO: 207165 - DNA, 15 bp, Homo sapiens
agatacaaaaggcca

SEQ ID NO: 207166 - DNA, 15 bp, Homo sapiens
cagatacaaaaggcc

SEQ ID NO: 207167 - DNA, 15 bp, Homo sapiens
ccagatacaaaaggc

SEQ ID NO: 207168 - DNA, 15 bp, Homo sapiens
gccagatacaaaagg

SEQ ID NO: 207169 - DNA, 15 bp, Homo sapiens
agccagatacaaaag

SEQ ID NO: 207170 - DNA, 15 bp, Homo sapiens
aagccagatacaaaa

SEQ ID NO: 207171 - DNA, 15 bp, Homo sapiens
gaagccagatacaaa

SEQ ID NO: 207172 - DNA, 15 bp, Homo sapiens
agaagccagatacaa

SEQ ID NO: 207173 - DNA, 15 bp, Homo sapiens
gagaagccagataca

SEQ ID NO: 207174 - DNA, 15 bp, Homo sapiens
agagaagccagatac

SEQ ID NO: 207175 - DNA, 15 bp, Homo sapiens
gagagaagccagata

SEQ ID NO: 207176 - DNA, 15 bp, Homo sapiens
tgagagaagccagat

SEQ ID NO: 207177 - DNA, 15 bp, Homo sapiens
gtgagagaagccaga

SEQ ID NO: 207178 - DNA, 15 bp, Homo sapiens
agtgagagaagccag

SEQ ID NO: 207179 - DNA, 15 bp, Homo sapiens
aagtgagagaagcca

SEQ ID NO: 207180 - DNA, 15 bp, Homo sapiens
taagtgagagaagcc

SEQ ID NO: 207181 - DNA, 15 bp, Homo sapiens
ttaagtgagagaagc

SEQ ID NO: 207182 - DNA, 15 bp, Homo sapiens
attaagtgagagaag

SEQ ID NO: 207183 - DNA, 15 bp, Homo sapiens
cattaagtgagagaa

SEQ ID NO: 207184 - DNA, 15 bp, Homo sapiens
acattaagtgagaga

SEQ ID NO: 207185 - DNA, 15 bp, Homo sapiens
aacattaagtgagag

SEQ ID NO: 207186 - DNA, 15 bp, Homo sapiens
aaacattaagtgaga

SEQ ID NO: 207187 - DNA, 15 bp, Homo sapiens
aaaacattaagtgag

SEQ ID NO: 207188 - DNA, 15 bp, Homo sapiens
gaaaacattaagtga

SEQ ID NO: 207189 - DNA, 15 bp, Homo sapiens
tgaaaacattaagtg

SEQ ID NO: 207190 - DNA, 15 bp, Homo sapiens
ttgaaaacattaagt

SEQ ID NO: 207191 - DNA, 15 bp, Homo sapiens
cttgaaaacattaag

SEQ ID NO: 207192 - DNA, 15 bp, Homo sapiens
ccttgaaaacattaa

SEQ ID NO: 207193 - DNA, 15 bp, Homo sapiens
accttgaaaacatta

SEQ ID NO: 207194 - DNA, 15 bp, Homo sapiens
aaccttgaaaacatt

SEQ ID NO: 207195 - DNA, 15 bp, Homo sapiens
gaaccttgaaaacat

SEQ ID NO: 207196 - DNA, 15 bp, Homo sapiens
tgaaccttgaaaaca

SEQ ID NO: 207197 - DNA, 15 bp, Homo sapiens
atgaaccttgaaaac

SEQ ID NO: 207198 - DNA, 15 bp, Homo sapiens
aatgaaccttgaaaa

SEQ ID NO: 207199 - DNA, 15 bp, Homo sapiens
gaatgaaccttgaaa

SEQ ID NO: 207200 - DNA, 15 bp, Homo sapiens
tgaatgaaccttgaa

SEQ ID NO: 207201 - DNA, 15 bp, Homo sapiens
atgaatgaaccttga

SEQ ID NO: 207202 - DNA, 15 bp, Homo sapiens
catgaatgaaccttg

SEQ ID NO: 207203 - DNA, 15 bp, Homo sapiens
acatgaatgaacctt

SEQ ID NO: 207204 - DNA, 15 bp, Homo sapiens
aacatgaatgaacct

SEQ ID NO: 207205 - DNA, 15 bp, Homo sapiens
caacatgaatgaacc

SEQ ID NO: 207206 - DNA, 15 bp, Homo sapiens
acaacatgaatgaac

SEQ ID NO: 207207 - DNA, 15 bp, Homo sapiens
cacaacatgaatgaa

SEQ ID NO: 207208 - DNA, 15 bp, Homo sapiens
ccacaacatgaatga

SEQ ID NO: 207209 - DNA, 15 bp, Homo sapiens
tccacaacatgaatg

SEQ ID NO: 207210 - DNA, 15 bp, Homo sapiens
ctccacaacatgaat

SEQ ID NO: 207211 - DNA, 15 bp, Homo sapiens
actccacaacatgaa

SEQ ID NO: 207212 - DNA, 15 bp, Homo sapiens
tactccacaacatga

SEQ ID NO: 207213 - DNA, 15 bp, Homo sapiens
atactccacaacatg

SEQ ID NO: 207214 - DNA, 15 bp, Homo sapiens
tatactccacaacat

SEQ ID NO: 207215 - DNA, 15 bp, Homo sapiens
atatactccacaaca

SEQ ID NO: 207216 - DNA, 15 bp, Homo sapiens
gatatactccacaac

SEQ ID NO: 207217 - DNA, 15 bp, Homo sapiens
agatatactccacaa

SEQ ID NO: 207218 - DNA, 15 bp, Homo sapiens
cagatatactccaca

SEQ ID NO: 207219 - DNA, 15 bp, Homo sapiens
gcagatatactccac

SEQ ID NO: 207220 - DNA, 15 bp, Homo sapiens
tgcagatatactcca

SEQ ID NO: 207221 - DNA, 15 bp, Homo sapiens
gtgcagatatactcc

SEQ ID NO: 207222 - DNA, 15 bp, Homo sapiens
agtgcagatatactc

SEQ ID NO: 207223 - DNA, 15 bp, Homo sapiens
gagtgcagatatact

SEQ ID NO: 207224 - DNA, 15 bp, Homo sapiens
tgagtgcagatatac

SEQ ID NO: 207225 - DNA, 15 bp, Homo sapiens
atgagtgcagatata

SEQ ID NO: 207226 - DNA, 15 bp, Homo sapiens
aatgagtgcagatat

SEQ ID NO: 207227 - DNA, 15 bp, Homo sapiens
aaatgagtgcagata

SEQ ID NO: 207228 - DNA, 15 bp, Homo sapiens
gaaatgagtgcagat

SEQ ID NO: 207229 - DNA, 15 bp, Homo sapiens
ggaaatgagtgcaga

SEQ ID NO: 207230 - DNA, 15 bp, Homo sapiens
aggaaatgagtgcag

SEQ ID NO: 207231 - DNA, 15 bp, Homo sapiens
aaggaaatgagtgca

SEQ ID NO: 207232 - DNA, 15 bp, Homo sapiens
aaaggaaatgagtgc

SEQ ID NO: 207233 - DNA, 15 bp, Homo sapiens
aaaaggaaatgagtg

SEQ ID NO: 207234 - DNA, 15 bp, Homo sapiens
aaaaaggaaatgagt

SEQ ID NO: 207235 - DNA, 15 bp, Homo sapiens
taaaaaggaaatgag

SEQ ID NO: 207236 - DNA, 15 bp, Homo sapiens
ataaaaaggaaatga

SEQ ID NO: 207237 - DNA, 15 bp, Homo sapiens
aataaaaaggaaatg

SEQ ID NO: 207238 - DNA, 15 bp, Homo sapiens
caataaaaaggaaat

SEQ ID NO: 207239 - DNA, 15 bp, Homo sapiens
gcaataaaaaggaaa

SEQ ID NO: 207240 - DNA, 15 bp, Homo sapiens
ggcaataaaaaggaa

SEQ ID NO: 207241 - DNA, 15 bp, Homo sapiens
tggcaataaaaagga

SEQ ID NO: 207242 - DNA, 15 bp, Homo sapiens
ttggcaataaaaagg

SEQ ID NO: 207243 - DNA, 15 bp, Homo sapiens
tttggcaataaaaag

SEQ ID NO: 207244 - DNA, 15 bp, Homo sapiens
atttggcaataaaaa

SEQ ID NO: 207245 - DNA, 15 bp, Homo sapiens
aatttggcaataaaa

SEQ ID NO: 207246 - DNA, 15 bp, Homo sapiens
caatttggcaataaa

SEQ ID NO: 207247 - DNA, 15 bp, Homo sapiens
acaatttggcaataa

SEQ ID NO: 207248 - DNA, 15 bp, Homo sapiens
tacaatttggcaata

SEQ ID NO: 207249 - DNA, 15 bp, Homo sapiens
atacaatttggcaat

SEQ ID NO: 207250 - DNA, 15 bp, Homo sapiens
catacaatttggcaa

SEQ ID NO: 207251 - DNA, 15 bp, Homo sapiens
ccatacaatttggca

SEQ ID NO: 207252 - DNA, 15 bp, Homo sapiens
tccatacaatttggc

SEQ ID NO: 207253 - DNA, 15 bp, Homo sapiens
atccatacaatttgg

SEQ ID NO: 207254 - DNA, 15 bp, Homo sapiens
tatccatacaatttg

SEQ ID NO: 207255 - DNA, 15 bp, Homo sapiens
ctatccatacaattt

SEQ ID NO: 207256 - DNA, 15 bp, Homo sapiens
tctatccatacaatt

SEQ ID NO: 207257 - DNA, 15 bp, Homo sapiens
gtctatccatacaat

SEQ ID NO: 207258 - DNA, 15 bp, Homo sapiens
tgtctatccatacaa

SEQ ID NO: 207259 - DNA, 15 bp, Homo sapiens
ctgtctatccataca

SEQ ID NO: 207260 - DNA, 15 bp, Homo sapiens
cctgtctatccatac

SEQ ID NO: 207261 - DNA, 15 bp, Homo sapiens
acctgtctatccata

SEQ ID NO: 207262 - DNA, 15 bp, Homo sapiens
cacctgtctatccat

SEQ ID NO: 207263 - DNA, 15 bp, Homo sapiens
acacctgtctatcca

SEQ ID NO: 207264 - DNA, 15 bp, Homo sapiens
aacacctgtctatcc

SEQ ID NO: 207265 - DNA, 15 bp, Homo sapiens
gaacacctgtctatc

SEQ ID NO: 207266 - DNA, 15 bp, Homo sapiens
ggaacacctgtctat

SEQ ID NO: 207267 - DNA, 15 bp, Homo sapiens
aggaacacctgtcta

SEQ ID NO: 207268 - DNA, 15 bp, Homo sapiens
gaggaacacctgtct

SEQ ID NO: 207269 - DNA, 15 bp, Homo sapiens
tgaggaacacctgtc

SEQ ID NO: 207270 - DNA, 15 bp, Homo sapiens
ttgaggaacacctgt

SEQ ID NO: 207271 - DNA, 15 bp, Homo sapiens
gttgaggaacacctg

SEQ ID NO: 207272 - DNA, 15 bp, Homo sapiens
agttgaggaacacct

SEQ ID NO: 207273 - DNA, 15 bp, Homo sapiens
cagttgaggaacacc

SEQ ID NO: 207274 - DNA, 15 bp, Homo sapiens
acagttgaggaacac

SEQ ID NO: 207275 - DNA, 15 bp, Homo sapiens
cacagttgaggaaca

SEQ ID NO: 207276 - DNA, 15 bp, Homo sapiens
acacagttgaggaac

SEQ ID NO: 207277 - DNA, 15 bp, Homo sapiens
gacacagttgaggaa

SEQ ID NO: 207278 - DNA, 15 bp, Homo sapiens
ggacacagttgagga

SEQ ID NO: 207279 - DNA, 15 bp, Homo sapiens
aggacacagttgagg

SEQ ID NO: 207280 - DNA, 15 bp, Homo sapiens
caggacacagttgag

SEQ ID NO: 207281 - DNA, 15 bp, Homo sapiens
tcaggacacagttga

SEQ ID NO: 207282 - DNA, 15 bp, Homo sapiens
atcaggacacagttg

SEQ ID NO: 207283 - DNA, 15 bp, Homo sapiens
tatcaggacacagtt

SEQ ID NO: 207284 - DNA, 15 bp, Homo sapiens
ttatcaggacacagt

SEQ ID NO: 207285 - DNA, 15 bp, Homo sapiens
tttatcaggacacag

SEQ ID NO: 207286 - DNA, 15 bp, Homo sapiens
gtttatcaggacaca

SEQ ID NO: 207287 - DNA, 15 bp, Homo sapiens
ggtttatcaggacac

SEQ ID NO: 207288 - DNA, 15 bp, Homo sapiens
gggtttatcaggaca

SEQ ID NO: 207289 - DNA, 15 bp, Homo sapiens
tgggtttatcaggac

SEQ ID NO: 207290 - DNA, 15 bp, Homo sapiens
atgggtttatcagga

SEQ ID NO: 207291 - DNA, 15 bp, Homo sapiens
gatgggtttatcagg

SEQ ID NO: 207292 - DNA, 15 bp, Homo sapiens
agatgggtttatcag

SEQ ID NO: 207293 - DNA, 15 bp, Homo sapiens
cagatgggtttatca

SEQ ID NO: 207294 - DNA, 15 bp, Homo sapiens
tcagatgggtttatc

SEQ ID NO: 207295 - DNA, 15 bp, Homo sapiens
ttcagatgggtttat

SEQ ID NO: 207296 - DNA, 15 bp, Homo sapiens
cttcagatgggttta

SEQ ID NO: 207297 - DNA, 15 bp, Homo sapiens
acttcagatgggttt

SEQ ID NO: 207298 - DNA, 15 bp, Homo sapiens
aacttcagatgggtt

SEQ ID NO: 207299 - DNA, 15 bp, Homo sapiens
caacttcagatgggt

SEQ ID NO: 207300 - DNA, 15 bp, Homo sapiens
tcaacttcagatggg

SEQ ID NO: 207301 - DNA, 15 bp, Homo sapiens
ttcaacttcagatgg

SEQ ID NO: 207302 - DNA, 15 bp, Homo sapiens
tttcaacttcagatg

SEQ ID NO: 207303 - DNA, 15 bp, Homo sapiens
ttttcaacttcagat

SEQ ID NO: 207304 - DNA, 15 bp, Homo sapiens
attttcaacttcaga

SEQ ID NO: 207305 - DNA, 15 bp, Homo sapiens
tattttcaacttcag

SEQ ID NO: 207306 - DNA, 15 bp, Homo sapiens
atattttcaacttca

SEQ ID NO: 207307 - DNA, 15 bp, Homo sapiens
gatattttcaacttc

SEQ ID NO: 207308 - DNA, 15 bp, Homo sapiens
tgatattttcaactt

SEQ ID NO: 207309 - DNA, 15 bp, Homo sapiens
atgatattttcaact

SEQ ID NO: 207310 - DNA, 15 bp, Homo sapiens
tatgatattttcaac

SEQ ID NO: 207311 - DNA, 15 bp, Homo sapiens
ttatgatattttcaa

SEQ ID NO: 207312 - DNA, 15 bp, Homo sapiens
cttatgatattttca

SEQ ID NO: 207313 - DNA, 15 bp, Homo sapiens
acttatgatattttc

SEQ ID NO: 207314 - DNA, 15 bp, Homo sapiens
aacttatgatatttt

SEQ ID NO: 207315 - DNA, 15 bp, Homo sapiens
caacttatgatattt

SEQ ID NO: 207316 - DNA, 15 bp, Homo sapiens
tcaacttatgatatt

SEQ ID NO: 207317 - DNA, 15 bp, Homo sapiens
ttcaacttatgatat

SEQ ID NO: 207318 - DNA, 15 bp, Homo sapiens
tttcaacttatgata

SEQ ID NO: 207319 - DNA, 15 bp, Homo sapiens
ttttcaacttatgat

SEQ ID NO: 207320 - DNA, 15 bp, Homo sapiens
attttcaacttatga

SEQ ID NO: 207321 - DNA, 15 bp, Homo sapiens
cattttcaacttatg

SEQ ID NO: 207322 - DNA, 15 bp, Homo sapiens
ccattttcaacttat

SEQ ID NO: 207323 - DNA, 15 bp, Homo sapiens
tccattttcaactta

SEQ ID NO: 207324 - DNA, 15 bp, Homo sapiens
atccattttcaactt

SEQ ID NO: 207325 - DNA, 15 bp, Homo sapiens
aatccattttcaact

SEQ ID NO: 207326 - DNA, 15 bp, Homo sapiens
aaatccattttcaac

SEQ ID NO: 207327 - DNA, 15 bp, Homo sapiens
taaatccattttcaa

SEQ ID NO: 207328 - DNA, 15 bp, Homo sapiens
gtaaatccattttca

SEQ ID NO: 207329 - DNA, 15 bp, Homo sapiens
agtaaatccattttc

SEQ ID NO: 207330 - DNA, 15 bp, Homo sapiens
tagtaaatccatttt

SEQ ID NO: 207331 - DNA, 15 bp, Homo sapiens
gtagtaaatccattt

SEQ ID NO: 207332 - DNA, 15 bp, Homo sapiens
agtagtaaatccatt

SEQ ID NO: 207333 - DNA, 15 bp, Homo sapiens
aagtagtaaatccat

SEQ ID NO: 207334 - DNA, 15 bp, Homo sapiens
aaagtagtaaatcca

SEQ ID NO: 207335 - DNA, 15 bp, Homo sapiens
caaagtagtaaatcc

SEQ ID NO: 207336 - DNA, 15 bp, Homo sapiens
tcaaagtagtaaatc

SEQ ID NO: 207337 - DNA, 15 bp, Homo sapiens
atcaaagtagtaaat

SEQ ID NO: 207338 - DNA, 15 bp, Homo sapiens
tatcaaagtagtaaa

SEQ ID NO: 207339 - DNA, 15 bp, Homo sapiens
ttatcaaagtagtaa

SEQ ID NO: 207340 - DNA, 15 bp, Homo sapiens
tttatcaaagtagta

SEQ ID NO: 207341 - DNA, 15 bp, Homo sapiens
atttatcaaagtagt

SEQ ID NO: 207342 - DNA, 15 bp, Homo sapiens
gatttatcaaagtag

SEQ ID NO: 207343 - DNA, 15 bp, Homo sapiens
agatttatcaaagta

SEQ ID NO: 207344 - DNA, 15 bp, Homo sapiens
tagatttatcaaagt

SEQ ID NO: 207345 - DNA, 15 bp, Homo sapiens
atagatttatcaaag

SEQ ID NO: 207346 - DNA, 15 bp, Homo sapiens
gatagatttatcaaa

SEQ ID NO: 207347 - DNA, 15 bp, Homo sapiens
ggatagatttatcaa

SEQ ID NO: 207348 - DNA, 15 bp, Homo sapiens
aggatagatttatca

SEQ ID NO: 207349 - DNA, 15 bp, Homo sapiens
taggatagatttatc

SEQ ID NO: 207350 - DNA, 15 bp, Homo sapiens
ttaggatagatttat

SEQ ID NO: 207351 - DNA, 15 bp, Homo sapiens
tttaggatagattta

SEQ ID NO: 207352 - DNA, 15 bp, Homo sapiens
ctttaggatagattt

SEQ ID NO: 207353 - DNA, 15 bp, Homo sapiens
actttaggatagatt

SEQ ID NO: 207354 - DNA, 15 bp, Homo sapiens
gactttaggatagat

SEQ ID NO: 207355 - DNA, 15 bp, Homo sapiens
tgactttaggataga

SEQ ID NO: 207356 - DNA, 15 bp, Homo sapiens
ctgactttaggatag

SEQ ID NO: 207357 - DNA, 15 bp, Homo sapiens
tctgactttaggata

SEQ ID NO: 207358 - DNA, 15 bp, Homo sapiens
ttctgactttaggat

SEQ ID NO: 207359 - DNA, 15 bp, Homo sapiens
tttctgactttagga

SEQ ID NO: 207360 - DNA, 15 bp, Homo sapiens
ttttctgactttagg

SEQ ID NO: 207361 - DNA, 15 bp, Homo sapiens
tttttctgactttag

SEQ ID NO: 207362 - DNA, 15 bp, Homo sapiens
atttttctgacttta

SEQ ID NO: 207363 - DNA, 15 bp, Homo sapiens
gatttttctgacttt

SEQ ID NO: 207364 - DNA, 15 bp, Homo sapiens
agatttttctgactt

SEQ ID NO: 207365 - DNA, 15 bp, Homo sapiens
gagatttttctgact

SEQ ID NO: 207366 - DNA, 15 bp, Homo sapiens
tgagatttttctgac

SEQ ID NO: 207367 - DNA, 15 bp, Homo sapiens
atgagatttttctga

SEQ ID NO: 207368 - DNA, 15 bp, Homo sapiens
catgagatttttctg

SEQ ID NO: 207369 - DNA, 15 bp, Homo sapiens
acatgagatttttct

SEQ ID NO: 207370 - DNA, 15 bp, Homo sapiens
aacatgagatttttc

SEQ ID NO: 207371 - DNA, 15 bp, Homo sapiens
caacatgagattttt

SEQ ID NO: 207372 - DNA, 15 bp, Homo sapiens
tcaacatgagatttt

SEQ ID NO: 207373 - DNA, 15 bp, Homo sapiens
ttcaacatgagattt

SEQ ID NO: 207374 - DNA, 15 bp, Homo sapiens
gttcaacatgagatt

SEQ ID NO: 207375 - DNA, 15 bp, Homo sapiens
ggttcaacatgagat

SEQ ID NO: 207376 - DNA, 15 bp, Homo sapiens
tggttcaacatgaga

SEQ ID NO: 207377 - DNA, 15 bp, Homo sapiens
atggttcaacatgag

SEQ ID NO: 207378 - DNA, 15 bp, Homo sapiens
gatggttcaacatga

SEQ ID NO: 207379 - DNA, 15 bp, Homo sapiens
cgatggttcaacatg

SEQ ID NO: 207380 - DNA, 15 bp, Homo sapiens
acgatggttcaacat

SEQ ID NO: 207381 - DNA, 15 bp, Homo sapiens
tacgatggttcaaca

SEQ ID NO: 207382 - DNA, 15 bp, Homo sapiens
ttacgatggttcaac

SEQ ID NO: 207383 - DNA, 15 bp, Homo sapiens
cttacgatggttcaa

SEQ ID NO: 207384 - DNA, 15 bp, Homo sapiens
acttacgatggttca

SEQ ID NO: 207385 - DNA, 15 bp, Homo sapiens
aacttacgatggttc

SEQ ID NO: 207386 - DNA, 15 bp, Homo sapiens
caacttacgatggtt

SEQ ID NO: 207387 - DNA, 15 bp, Homo sapiens
ccaacttacgatggt

SEQ ID NO: 207388 - DNA, 15 bp, Homo sapiens
tccaacttacgatgg

SEQ ID NO: 207389 - DNA, 15 bp, Homo sapiens
atccaacttacgatg

SEQ ID NO: 207390 - DNA, 15 bp, Homo sapiens
tatccaacttacgat

SEQ ID NO: 207391 - DNA, 15 bp, Homo sapiens
gtatccaacttacga

SEQ ID NO: 207392 - DNA, 15 bp, Homo sapiens
ggtatccaacttacg

SEQ ID NO: 207393 - DNA, 15 bp, Homo sapiens
tggtatccaacttac

SEQ ID NO: 207394 - DNA, 15 bp, Homo sapiens
atggtatccaactta

SEQ ID NO: 207395 - DNA, 15 bp, Homo sapiens
gatggtatccaactt

SEQ ID NO: 207396 - DNA, 15 bp, Homo sapiens
agatggtatccaact

SEQ ID NO: 207397 - DNA, 15 bp, Homo sapiens
cagatggtatccaac

SEQ ID NO: 207398 - DNA, 15 bp, Homo sapiens
tcagatggtatccaa

SEQ ID NO: 207399 - DNA, 15 bp, Homo sapiens
ttcagatggtatcca

SEQ ID NO: 207400 - DNA, 15 bp, Homo sapiens
attcagatggtatcc

SEQ ID NO: 207401 - DNA, 15 bp, Homo sapiens
aattcagatggtatc

SEQ ID NO: 207402 - DNA, 15 bp, Homo sapiens
taattcagatggtat

SEQ ID NO: 207403 - DNA, 15 bp, Homo sapiens
gtaattcagatggta

SEQ ID NO: 207404 - DNA, 15 bp, Homo sapiens
tgtaattcagatggt

SEQ ID NO: 207405 - DNA, 15 bp, Homo sapiens
atgtaattcagatgg

SEQ ID NO: 207406 - DNA, 15 bp, Homo sapiens
aatgtaattcagatg

SEQ ID NO: 207407 - DNA, 15 bp, Homo sapiens
aaatgtaattcagat

SEQ ID NO: 207408 - DNA, 15 bp, Homo sapiens
aaaatgtaattcaga

SEQ ID NO: 207409 - DNA, 15 bp, Homo sapiens
aaaaatgtaattcag

SEQ ID NO: 207410 - DNA, 15 bp, Homo sapiens
caaaaatgtaattca

SEQ ID NO: 207411 - DNA, 15 bp, Homo sapiens
acaaaaatgtaattc

SEQ ID NO: 207412 - DNA, 15 bp, Homo sapiens
aacaaaaatgtaatt

SEQ ID NO: 207413 - DNA, 15 bp, Homo sapiens
taacaaaaatgtaat

SEQ ID NO: 207414 - DNA, 15 bp, Homo sapiens
ataacaaaaatgtaa

SEQ ID NO: 207415 - DNA, 15 bp, Homo sapiens
gataacaaaaatgta

SEQ ID NO: 207416 - DNA, 15 bp, Homo sapiens
ggataacaaaaatgt

SEQ ID NO: 207417 - DNA, 15 bp, Homo sapiens
tggataacaaaaatg

SEQ ID NO: 207418 - DNA, 15 bp, Homo sapiens
atggataacaaaaat

SEQ ID NO: 207419 - DNA, 15 bp, Homo sapiens
aatggataacaaaaa

SEQ ID NO: 207420 - DNA, 15 bp, Homo sapiens
gaatggataacaaaa

SEQ ID NO: 207421 - DNA, 15 bp, Homo sapiens
tgaatggataacaaa

SEQ ID NO: 207422 - DNA, 15 bp, Homo sapiens
gtgaatggataacaa

SEQ ID NO: 207423 - DNA, 15 bp, Homo sapiens
agtgaatggataaca

SEQ ID NO: 207424 - DNA, 15 bp, Homo sapiens
cagtgaatggataac

SEQ ID NO: 207425 - DNA, 15 bp, Homo sapiens
ccagtgaatggataa

SEQ ID NO: 207426 - DNA, 15 bp, Homo sapiens
accagtgaatggata

SEQ ID NO: 207427 - DNA, 15 bp, Homo sapiens
aaccagtgaatggat

SEQ ID NO: 207428 - DNA, 15 bp, Homo sapiens
caaccagtgaatgga

SEQ ID NO: 207429 - DNA, 15 bp, Homo sapiens
tcaaccagtgaatgg

SEQ ID NO: 207430 - DNA, 15 bp, Homo sapiens
gtcaaccagtgaatg

SEQ ID NO: 207431 - DNA, 15 bp, Homo sapiens
tgtcaaccagtgaat

SEQ ID NO: 207432 - DNA, 15 bp, Homo sapiens
ctgtcaaccagtgaa

SEQ ID NO: 207433 - DNA, 15 bp, Homo sapiens
tctgtcaaccagtga

SEQ ID NO: 207434 - DNA, 15 bp, Homo sapiens
gtctgtcaaccagtg

SEQ ID NO: 207435 - DNA, 15 bp, Homo sapiens
cgtctgtcaaccagt

SEQ ID NO: 207436 - DNA, 15 bp, Homo sapiens
acgtctgtcaaccag

SEQ ID NO: 207437 - DNA, 15 bp, Homo sapiens
aacgtctgtcaacca

SEQ ID NO: 207438 - DNA, 15 bp, Homo sapiens
taacgtctgtcaacc

SEQ ID NO: 207439 - DNA, 15 bp, Homo sapiens
ctaacgtctgtcaac

SEQ ID NO: 207440 - DNA, 15 bp, Homo sapiens
cctaacgtctgtcaa

SEQ ID NO: 207441 - DNA, 15 bp, Homo sapiens
acctaacgtctgtca

SEQ ID NO: 207442 - DNA, 15 bp, Homo sapiens
aacctaacgtctgtc

SEQ ID NO: 207443 - DNA, 15 bp, Homo sapiens
caacctaacgtctgt

SEQ ID NO: 207444 - DNA, 15 bp, Homo sapiens
acaacctaacgtctg

SEQ ID NO: 207445 - DNA, 15 bp, Homo sapiens
aacaacctaacgtct

SEQ ID NO: 207446 - DNA, 15 bp, Homo sapiens
aaacaacctaacgtc

SEQ ID NO: 207447 - DNA, 15 bp, Homo sapiens
gaaacaacctaacgt

SEQ ID NO: 207448 - DNA, 15 bp, Homo sapiens
ggaaacaacctaacg

SEQ ID NO: 207449 - DNA, 15 bp, Homo sapiens
tggaaacaacctaac

SEQ ID NO: 207450 - DNA, 15 bp, Homo sapiens
gtggaaacaacctaa

SEQ ID NO: 207451 - DNA, 15 bp, Homo sapiens
agtggaaacaaccta

SEQ ID NO: 207452 - DNA, 15 bp, Homo sapiens
cagtggaaacaacct

SEQ ID NO: 207453 - DNA, 15 bp, Homo sapiens
acagtggaaacaacc

SEQ ID NO: 207454 - DNA, 15 bp, Homo sapiens
aacagtggaaacaac

SEQ ID NO: 207455 - DNA, 15 bp, Homo sapiens
aaacagtggaaacaa

SEQ ID NO: 207456 - DNA, 15 bp, Homo sapiens
caaacagtggaaaca

SEQ ID NO: 207457 - DNA, 15 bp, Homo sapiens
gcaaacagtggaaac

SEQ ID NO: 207458 - DNA, 15 bp, Homo sapiens
agcaaacagtggaaa

SEQ ID NO: 207459 - DNA, 15 bp, Homo sapiens
gagcaaacagtggaa

SEQ ID NO: 207460 - DNA, 15 bp, Homo sapiens
ggagcaaacagtgga

SEQ ID NO: 207461 - DNA, 15 bp, Homo sapiens
aggagcaaacagtgg

SEQ ID NO: 207462 - DNA, 15 bp, Homo sapiens
aaggagcaaacagtg

SEQ ID NO: 207463 - DNA, 15 bp, Homo sapiens
taaggagcaaacagt

SEQ ID NO: 207464 - DNA, 15 bp, Homo sapiens
ataaggagcaaacag

SEQ ID NO: 207465 - DNA, 15 bp, Homo sapiens
aataaggagcaaaca

SEQ ID NO: 207466 - DNA, 15 bp, Homo sapiens
aaataaggagcaaac

SEQ ID NO: 207467 - DNA, 15 bp, Homo sapiens
gaaataaggagcaaa

SEQ ID NO: 207468 - DNA, 15 bp, Homo sapiens
agaaataaggagcaa

SEQ ID NO: 207469 - DNA, 15 bp, Homo sapiens
gagaaataaggagca

SEQ ID NO: 207470 - DNA, 15 bp, Homo sapiens
cgagaaataaggagc

SEQ ID NO: 207471 - DNA, 15 bp, Homo sapiens
acgagaaataaggag

SEQ ID NO: 207472 - DNA, 15 bp, Homo sapiens
tacgagaaataagga

SEQ ID NO: 207473 - DNA, 15 bp, Homo sapiens
gtacgagaaataagg

SEQ ID NO: 207474 - DNA, 15 bp, Homo sapiens
ggtacgagaaataag

SEQ ID NO: 207475 - DNA, 15 bp, Homo sapiens
aggtacgagaaataa

SEQ ID NO: 207476 - DNA, 15 bp, Homo sapiens
caggtacgagaaata

SEQ ID NO: 207477 - DNA, 15 bp, Homo sapiens
tcaggtacgagaaat

SEQ ID NO: 207478 - DNA, 15 bp, Homo sapiens
ttcaggtacgagaaa

SEQ ID NO: 207479 - DNA, 15 bp, Homo sapiens
tttcaggtacgagaa

SEQ ID NO: 207480 - DNA, 15 bp, Homo sapiens
atttcaggtacgaga

SEQ ID NO: 207481 - DNA, 15 bp, Homo sapiens
catttcaggtacgag

SEQ ID NO: 207482 - DNA, 15 bp, Homo sapiens
acatttcaggtacga

SEQ ID NO: 207483 - DNA, 15 bp, Homo sapiens
gacatttcaggtacg

SEQ ID NO: 207484 - DNA, 15 bp, Homo sapiens
ggacatttcaggtac

SEQ ID NO: 207485 - DNA, 15 bp, Homo sapiens
aggacatttcaggta

SEQ ID NO: 207486 - DNA, 15 bp, Homo sapiens
aaggacatttcaggt

SEQ ID NO: 207487 - DNA, 15 bp, Homo sapiens
taaggacatttcagg

SEQ ID NO: 207488 - DNA, 15 bp, Homo sapiens
ataaggacatttcag

SEQ ID NO: 207489 - DNA, 15 bp, Homo sapiens
aataaggacatttca

SEQ ID NO: 207490 - DNA, 15 bp, Homo sapiens
gaataaggacatttc

SEQ ID NO: 207491 - DNA, 15 bp, Homo sapiens
ggaataaggacattt

SEQ ID NO: 207492 - DNA, 15 bp, Homo sapiens
gggaataaggacatt

SEQ ID NO: 207493 - DNA, 15 bp, Homo sapiens
agggaataaggacat

SEQ ID NO: 207494 - DNA, 15 bp, Homo sapiens
gagggaataaggaca

SEQ ID NO: 207495 - DNA, 15 bp, Homo sapiens
ggagggaataaggac

SEQ ID NO: 207496 - DNA, 15 bp, Homo sapiens
gggagggaataagga

SEQ ID NO: 207497 - DNA, 15 bp, Homo sapiens
agggagggaataagg

SEQ ID NO: 207498 - DNA, 15 bp, Homo sapiens
aagggagggaataag

SEQ ID NO: 207499 - DNA, 15 bp, Homo sapiens
gaagggagggaataa

SEQ ID NO: 207500 - DNA, 15 bp, Homo sapiens
agaagggagggaata

SEQ ID NO: 207501 - DNA, 15 bp, Homo sapiens
aagaagggagggaat

SEQ ID NO: 207502 - DNA, 15 bp, Homo sapiens
taagaagggagggaa

SEQ ID NO: 207503 - DNA, 15 bp, Homo sapiens
ataagaagggaggga

SEQ ID NO: 207504 - DNA, 15 bp, Homo sapiens
gataagaagggaggg

SEQ ID NO: 207505 - DNA, 15 bp, Homo sapiens
ggataagaagggagg

SEQ ID NO: 207506 - DNA, 15 bp, Homo sapiens
gggataagaagggag

SEQ ID NO: 207507 - DNA, 15 bp, Homo sapiens
tgggataagaaggga

SEQ ID NO: 207508 - DNA, 15 bp, Homo sapiens
atgggataagaaggg

SEQ ID NO: 207509 - DNA, 15 bp, Homo sapiens
catgggataagaagg

SEQ ID NO: 207510 - DNA, 15 bp, Homo sapiens
acatgggataagaag

SEQ ID NO: 207511 - DNA, 15 bp, Homo sapiens
aacatgggataagaa

SEQ ID NO: 207512 - DNA, 15 bp, Homo sapiens
aaacatgggataaga

SEQ ID NO: 207513 - DNA, 15 bp, Homo sapiens
taaacatgggataag

SEQ ID NO: 207514 - DNA, 15 bp, Homo sapiens
ttaaacatgggataa

SEQ ID NO: 207515 - DNA, 15 bp, Homo sapiens
cttaaacatgggata

SEQ ID NO: 207516 - DNA, 15 bp, Homo sapiens
acttaaacatgggat

SEQ ID NO: 207517 - DNA, 15 bp, Homo sapiens
gacttaaacatggga

SEQ ID NO: 207518 - DNA, 15 bp, Homo sapiens
tgacttaaacatggg

SEQ ID NO: 207519 - DNA, 15 bp, Homo sapiens
atgacttaaacatgg

SEQ ID NO: 207520 - DNA, 15 bp, Homo sapiens
aatgacttaaacatg

SEQ ID NO: 207521 - DNA, 15 bp, Homo sapiens
aaatgacttaaacat

SEQ ID NO: 207522 - DNA, 15 bp, Homo sapiens
taaatgacttaaaca

SEQ ID NO: 207523 - DNA, 15 bp, Homo sapiens
ttaaatgacttaaac

SEQ ID NO: 207524 - DNA, 15 bp, Homo sapiens
cttaaatgacttaaa

SEQ ID NO: 207525 - DNA, 15 bp, Homo sapiens
tcttaaatgacttaa

SEQ ID NO: 207526 - DNA, 15 bp, Homo sapiens
gtcttaaatgactta

SEQ ID NO: 207527 - DNA, 15 bp, Homo sapiens
ggtcttaaatgactt

SEQ ID NO: 207528 - DNA, 15 bp, Homo sapiens
gggtcttaaatgact

SEQ ID NO: 207529 - DNA, 15 bp, Homo sapiens
tgggtcttaaatgac

SEQ ID NO: 207530 - DNA, 15 bp, Homo sapiens
ctgggtcttaaatga

SEQ ID NO: 207531 - DNA, 15 bp, Homo sapiens
gctgggtcttaaatg

SEQ ID NO: 207532 - DNA, 15 bp, Homo sapiens
agctgggtcttaaat

SEQ ID NO: 207533 - DNA, 15 bp, Homo sapiens
gagctgggtcttaaa

SEQ ID NO: 207534 - DNA, 15 bp, Homo sapiens
tgagctgggtcttaa

SEQ ID NO: 207535 - DNA, 15 bp, Homo sapiens
ttgagctgggtctta

SEQ ID NO: 207536 - DNA, 15 bp, Homo sapiens
tttgagctgggtctt

SEQ ID NO: 207537 - DNA, 15 bp, Homo sapiens
gtttgagctgggtct

SEQ ID NO: 207538 - DNA, 15 bp, Homo sapiens
cgtttgagctgggtc

SEQ ID NO: 207539 - DNA, 15 bp, Homo sapiens
acgtttgagctgggt

SEQ ID NO: 207540 - DNA, 15 bp, Homo sapiens
gacgtttgagctggg

SEQ ID NO: 207541 - DNA, 15 bp, Homo sapiens
tgacgtttgagctgg

SEQ ID NO: 207542 - DNA, 15 bp, Homo sapiens
gtgacgtttgagctg

SEQ ID NO: 207543 - DNA, 15 bp, Homo sapiens
ggtgacgtttgagct

SEQ ID NO: 207544 - DNA, 15 bp, Homo sapiens
aggtgacgtttgagc

SEQ ID NO: 207545 - DNA, 15 bp, Homo sapiens
gaggtgacgtttgag

SEQ ID NO: 207546 - DNA, 15 bp, Homo sapiens
ggaggtgacgtttga

SEQ ID NO: 207547 - DNA, 15 bp, Homo sapiens
tggaggtgacgtttg

SEQ ID NO: 207548 - DNA, 15 bp, Homo sapiens
gtggaggtgacgttt

SEQ ID NO: 207549 - DNA, 15 bp, Homo sapiens
tgtggaggtgacgtt

SEQ ID NO: 207550 - DNA, 15 bp, Homo sapiens
ttgtggaggtgacgt

SEQ ID NO: 207551 - DNA, 15 bp, Homo sapiens
tttgtggaggtgacg

SEQ ID NO: 207552 - DNA, 15 bp, Homo sapiens
ttttgtggaggtgac

SEQ ID NO: 207553 - DNA, 15 bp, Homo sapiens
gttttgtggaggtga

SEQ ID NO: 207554 - DNA, 15 bp, Homo sapiens
ggttttgtggaggtg

SEQ ID NO: 207555 - DNA, 15 bp, Homo sapiens
aggttttgtggaggt

SEQ ID NO: 207556 - DNA, 15 bp, Homo sapiens
aaggttttgtggagg

SEQ ID NO: 207557 - DNA, 15 bp, Homo sapiens
gaaggttttgtggag

SEQ ID NO: 207558 - DNA, 15 bp, Homo sapiens
ggaaggttttgtgga

SEQ ID NO: 207559 - DNA, 15 bp, Homo sapiens
aggaaggttttgtgg

SEQ ID NO: 207560 - DNA, 15 bp, Homo sapiens
aaggaaggttttgtg

SEQ ID NO: 207561 - DNA, 15 bp, Homo sapiens
caaggaaggttttgt

SEQ ID NO: 207562 - DNA, 15 bp, Homo sapiens
tcaaggaaggttttg

SEQ ID NO: 207563 - DNA, 15 bp, Homo sapiens
atcaaggaaggtttt

SEQ ID NO: 207564 - DNA, 15 bp, Homo sapiens
tatcaaggaaggttt

SEQ ID NO: 207565 - DNA, 15 bp, Homo sapiens
gtatcaaggaaggtt

SEQ ID NO: 207566 - DNA, 15 bp, Homo sapiens
ggtatcaaggaaggt

SEQ ID NO: 207567 - DNA, 15 bp, Homo sapiens
gggtatcaaggaagg

SEQ ID NO: 207568 - DNA, 15 bp, Homo sapiens
ggggtatcaaggaag

SEQ ID NO: 207569 - DNA, 15 bp, Homo sapiens
aggggtatcaaggaa

SEQ ID NO: 207570 - DNA, 15 bp, Homo sapiens
aaggggtatcaagga

SEQ ID NO: 207571 - DNA, 15 bp, Homo sapiens
aaaggggtatcaagg

SEQ ID NO: 207572 - DNA, 15 bp, Homo sapiens
gaaaggggtatcaag

SEQ ID NO: 207573 - DNA, 15 bp, Homo sapiens
ggaaaggggtatcaa

SEQ ID NO: 207574 - DNA, 15 bp, Homo sapiens
aggaaaggggtatca

SEQ ID NO: 207575 - DNA, 15 bp, Homo sapiens
gaggaaaggggtatc

SEQ ID NO: 207576 - DNA, 15 bp, Homo sapiens
agaggaaaggggtat

SEQ ID NO: 207577 - DNA, 15 bp, Homo sapiens
aagaggaaaggggta

SEQ ID NO: 207578 - DNA, 15 bp, Homo sapiens
gaagaggaaaggggt

SEQ ID NO: 207579 - DNA, 15 bp, Homo sapiens
tgaagaggaaagggg

SEQ ID NO: 207580 - DNA, 15 bp, Homo sapiens
ttgaagaggaaaggg

SEQ ID NO: 207581 - DNA, 15 bp, Homo sapiens
attgaagaggaaagg

SEQ ID NO: 207582 - DNA, 15 bp, Homo sapiens
aattgaagaggaaag

SEQ ID NO: 207583 - DNA, 15 bp, Homo sapiens
gaattgaagaggaaa

SEQ ID NO: 207584 - DNA, 15 bp, Homo sapiens
tgaattgaagaggaa

SEQ ID NO: 207585 - DNA, 15 bp, Homo sapiens
gtgaattgaagagga

SEQ ID NO: 207586 - DNA, 15 bp, Homo sapiens
agtgaattgaagagg

SEQ ID NO: 207587 - DNA, 15 bp, Homo sapiens
aagtgaattgaagag

SEQ ID NO: 207588 - DNA, 15 bp, Homo sapiens
caagtgaattgaaga

SEQ ID NO: 207589 - DNA, 15 bp, Homo sapiens
ccaagtgaattgaag

SEQ ID NO: 207590 - DNA, 15 bp, Homo sapiens
tccaagtgaattgaa

SEQ ID NO: 207591 - DNA, 15 bp, Homo sapiens
gtccaagtgaattga

SEQ ID NO: 207592 - DNA, 15 bp, Homo sapiens
ggtccaagtgaattg

SEQ ID NO: 207593 - DNA, 15 bp, Homo sapiens
aggtccaagtgaatt

SEQ ID NO: 207594 - DNA, 15 bp, Homo sapiens
aaggtccaagtgaat

SEQ ID NO: 207595 - DNA, 15 bp, Homo sapiens
aaaggtccaagtgaa

SEQ ID NO: 207596 - DNA, 15 bp, Homo sapiens
aaaaggtccaagtga

SEQ ID NO: 207597 - DNA, 15 bp, Homo sapiens
caaaaggtccaagtg

SEQ ID NO: 207598 - DNA, 15 bp, Homo sapiens
gcaaaaggtccaagt

SEQ ID NO: 207599 - DNA, 15 bp, Homo sapiens
tgcaaaaggtccaag

SEQ ID NO: 207600 - DNA, 15 bp, Homo sapiens
atgcaaaaggtccaa

SEQ ID NO: 207601 - DNA, 15 bp, Homo sapiens
aatgcaaaaggtcca

SEQ ID NO: 207602 - DNA, 15 bp, Homo sapiens
aaatgcaaaaggtcc

SEQ ID NO: 207603 - DNA, 15 bp, Homo sapiens
taaatgcaaaaggtc

SEQ ID NO: 207604 - DNA, 15 bp, Homo sapiens
ttaaatgcaaaaggt

SEQ ID NO: 207605 - DNA, 15 bp, Homo sapiens
attaaatgcaaaagg

SEQ ID NO: 207606 - DNA, 15 bp, Homo sapiens
aattaaatgcaaaag

SEQ ID NO: 207607 - DNA, 15 bp, Homo sapiens
aaattaaatgcaaaa

SEQ ID NO: 207608 - DNA, 15 bp, Homo sapiens
aaaattaaatgcaaa

SEQ ID NO: 207609 - DNA, 15 bp, Homo sapiens
taaaattaaatgcaa

SEQ ID NO: 207610 - DNA, 15 bp, Homo sapiens
ttaaaattaaatgca

SEQ ID NO: 207611 - DNA, 15 bp, Homo sapiens
attaaaattaaatgc

SEQ ID NO: 207612 - DNA, 15 bp, Homo sapiens
aattaaaattaaatg

SEQ ID NO: 207613 - DNA, 15 bp, Homo sapiens
aaattaaaattaaat

SEQ ID NO: 207614 - DNA, 15 bp, Homo sapiens
aaaattaaaattaaa

SEQ ID NO: 207615 - DNA, 15 bp, Homo sapiens
aaaaattaaaattaa

SEQ ID NO: 207616 - DNA, 15 bp, Homo sapiens
taaaaattaaaatta

SEQ ID NO: 207617 - DNA, 15 bp, Homo sapiens
ataaaaattaaaatt

SEQ ID NO: 207618 - DNA, 15 bp, Homo sapiens
aataaaaattaaaat

SEQ ID NO: 207619 - DNA, 15 bp, Homo sapiens
aaataaaaattaaaa

SEQ ID NO: 207620 - DNA, 15 bp, Homo sapiens
aaaataaaaattaaa

SEQ ID NO: 207621 - DNA, 15 bp, Homo sapiens
aaaaataaaaattaa

SEQ ID NO: 207622 - DNA, 15 bp, Homo sapiens
aaaaaataaaaatta

SEQ ID NO: 207623 - DNA, 15 bp, Homo sapiens
aaaaaaataaaaatt

SEQ ID NO: 207624 - DNA, 15 bp, Homo sapiens
taaaaaaaataaaaa

SEQ ID NO: 207625 - DNA, 15 bp, Homo sapiens
ttaaaaaaaataaaa

SEQ ID NO: 207626 - DNA, 15 bp, Homo sapiens
cttaaaaaaaataaa

SEQ ID NO: 207627 - DNA, 15 bp, Homo sapiens
tcttaaaaaaaataa

SEQ ID NO: 207628 - DNA, 15 bp, Homo sapiens
gtcttaaaaaaaata

SEQ ID NO: 207629 - DNA, 15 bp, Homo sapiens
tgtcttaaaaaaaat

SEQ ID NO: 207630 - DNA, 15 bp, Homo sapiens
ctgtcttaaaaaaaa

SEQ ID NO: 207631 - DNA, 15 bp, Homo sapiens
tctgtcttaaaaaaa

SEQ ID NO: 207632 - DNA, 15 bp, Homo sapiens
ctctgtcttaaaaaa

SEQ ID NO: 207633 - DNA, 15 bp, Homo sapiens
actctgtcttaaaaa

SEQ ID NO: 207634 - DNA, 15 bp, Homo sapiens
gactctgtcttaaaa

SEQ ID NO: 207635 - DNA, 15 bp, Homo sapiens
agactctgtcttaaa

SEQ ID NO: 207636 - DNA, 15 bp, Homo sapiens
gagactctgtcttaa

SEQ ID NO: 207637 - DNA, 15 bp, Homo sapiens
tgagactctgtctta

SEQ ID NO: 207638 - DNA, 15 bp, Homo sapiens
gtgagactctgtctt

SEQ ID NO: 207639 - DNA, 15 bp, Homo sapiens
gacagagtgagactc

SEQ ID NO: 207640 - DNA, 15 bp, Homo sapiens
tgacagagtgagact

SEQ ID NO: 207641 - DNA, 15 bp, Homo sapiens
tggtgacagagtgag

SEQ ID NO: 207642 - DNA, 15 bp, Homo sapiens
ctggtgacagagtga

SEQ ID NO: 207643 - DNA, 15 bp, Homo sapiens
cctggtgacagagtg

SEQ ID NO: 207644 - DNA, 15 bp, Homo sapiens
gcctggtgacagagt

SEQ ID NO: 207645 - DNA, 15 bp, Homo sapiens
agcctggtgacagag

SEQ ID NO: 207646 - DNA, 15 bp, Homo sapiens
cagcctggtgacaga

SEQ ID NO: 207647 - DNA, 15 bp, Homo sapiens
ccagcctggtgacag

SEQ ID NO: 207648 - DNA, 15 bp, Homo sapiens
tccagcctggtgaca

SEQ ID NO: 207649 - DNA, 15 bp, Homo sapiens
ctccagcctggtgac

SEQ ID NO: 207650 - DNA, 15 bp, Homo sapiens
actccagcctggtga

SEQ ID NO: 207651 - DNA, 15 bp, Homo sapiens
cactccagcctggtg

SEQ ID NO: 207652 - DNA, 15 bp, Homo sapiens
gcactccagcctggt

SEQ ID NO: 207653 - DNA, 15 bp, Homo sapiens
taccactgcactcca

SEQ ID NO: 207654 - DNA, 15 bp, Homo sapiens
ataccactgcactcc

SEQ ID NO: 207655 - DNA, 15 bp, Homo sapiens
cataccactgcactc

SEQ ID NO: 207656 - DNA, 15 bp, Homo sapiens
tcataccactgcact

SEQ ID NO: 207657 - DNA, 15 bp, Homo sapiens
atcataccactgcac

SEQ ID NO: 207658 - DNA, 15 bp, Homo sapiens
gatcataccactgca

SEQ ID NO: 207659 - DNA, 15 bp, Homo sapiens
agatcataccactgc

SEQ ID NO: 207660 - DNA, 15 bp, Homo sapiens
gagatcataccactg

SEQ ID NO: 207661 - DNA, 15 bp, Homo sapiens
tgagatcataccact

SEQ ID NO: 207662 - DNA, 15 bp, Homo sapiens
ctgagatcataccac

SEQ ID NO: 207663 - DNA, 15 bp, Homo sapiens
gctgagatcatacca

SEQ ID NO: 207664 - DNA, 15 bp, Homo sapiens
agctgagatcatacc

SEQ ID NO: 207665 - DNA, 15 bp, Homo sapiens
gagctgagatcatac

SEQ ID NO: 207666 - DNA, 15 bp, Homo sapiens
tgagctgagatcata

SEQ ID NO: 207667 - DNA, 15 bp, Homo sapiens
gtgagctgagatcat

SEQ ID NO: 207668 - DNA, 15 bp, Homo sapiens
tagtgagctgagatc

SEQ ID NO: 207669 - DNA, 15 bp, Homo sapiens
ttagtgagctgagat

SEQ ID NO: 207670 - DNA, 15 bp, Homo sapiens
gttagtgagctgaga

SEQ ID NO: 207671 - DNA, 15 bp, Homo sapiens
agttagtgagctgag

SEQ ID NO: 207672 - DNA, 15 bp, Homo sapiens
tagttagtgagctga

SEQ ID NO: 207673 - DNA, 15 bp, Homo sapiens
gtagttagtgagctg

SEQ ID NO: 207674 - DNA, 15 bp, Homo sapiens
agtagttagtgagct

SEQ ID NO: 207675 - DNA, 15 bp, Homo sapiens
gagtagttagtgagc

SEQ ID NO: 207676 - DNA, 15 bp, Homo sapiens
agagtagttagtgag

SEQ ID NO: 207677 - DNA, 15 bp, Homo sapiens
cagagtagttagtga

SEQ ID NO: 207678 - DNA, 15 bp, Homo sapiens
gcagagtagttagtg

SEQ ID NO: 207679 - DNA, 15 bp, Homo sapiens
ggcagagtagttagt

SEQ ID NO: 207680 - DNA, 15 bp, Homo sapiens
aggcagagtagttag

SEQ ID NO: 207681 - DNA, 15 bp, Homo sapiens
gaggcagagtagtta

SEQ ID NO: 207682 - DNA, 15 bp, Homo sapiens
ggaggcagagtagtt

SEQ ID NO: 207683 - DNA, 15 bp, Homo sapiens
gggaggcagagtagt

SEQ ID NO: 207684 - DNA, 15 bp, Homo sapiens
tgggaggcagagtag

SEQ ID NO: 207685 - DNA, 15 bp, Homo sapiens
ctgggaggcagagta

SEQ ID NO: 207686 - DNA, 15 bp, Homo sapiens
cctgggaggcagagt

SEQ ID NO: 207687 - DNA, 15 bp, Homo sapiens
tgcttgaacctggga

SEQ ID NO: 207688 - DNA, 15 bp, Homo sapiens
ttgcttgaacctggg

SEQ ID NO: 207689 - DNA, 15 bp, Homo sapiens
attgcttgaacctgg

SEQ ID NO: 207690 - DNA, 15 bp, Homo sapiens
aattgcttgaacctg

SEQ ID NO: 207691 - DNA, 15 bp, Homo sapiens
gaattgcttgaacct

SEQ ID NO: 207692 - DNA, 15 bp, Homo sapiens
tgagaattgcttgaa

SEQ ID NO: 207693 - DNA, 15 bp, Homo sapiens
atgagaattgcttga

SEQ ID NO: 207694 - DNA, 15 bp, Homo sapiens
catgagaattgcttg

SEQ ID NO: 207695 - DNA, 15 bp, Homo sapiens
acatgagaattgctt

SEQ ID NO: 207696 - DNA, 15 bp, Homo sapiens
gacatgagaattgct

SEQ ID NO: 207697 - DNA, 15 bp, Homo sapiens
agacatgagaattgc

SEQ ID NO: 207698 - DNA, 15 bp, Homo sapiens
gagacatgagaattg

SEQ ID NO: 207699 - DNA, 15 bp, Homo sapiens
tgagacatgagaatt

SEQ ID NO: 207700 - DNA, 15 bp, Homo sapiens
ctgagacatgagaat

SEQ ID NO: 207701 - DNA, 15 bp, Homo sapiens
gctgagacatgagaa

SEQ ID NO: 207702 - DNA, 15 bp, Homo sapiens
ggctgagacatgaga

SEQ ID NO: 207703 - DNA, 15 bp, Homo sapiens
aggctgagacatgag

SEQ ID NO: 207704 - DNA, 15 bp, Homo sapiens
gaggctgagacatga

SEQ ID NO: 207705 - DNA, 15 bp, Homo sapiens
cttgggaggctgaga

SEQ ID NO: 207706 - DNA, 15 bp, Homo sapiens
acacctgtagtccca

SEQ ID NO: 207707 - DNA, 15 bp, Homo sapiens
cacacctgtagtccc

SEQ ID NO: 207708 - DNA, 15 bp, Homo sapiens
gcacacctgtagtcc

SEQ ID NO: 207709 - DNA, 15 bp, Homo sapiens
cgcacacctgtagtc

SEQ ID NO: 207710 - DNA, 15 bp, Homo sapiens
gcgcacacctgtagt

SEQ ID NO: 207711 - DNA, 15 bp, Homo sapiens
ggcgcacacctgtag

SEQ ID NO: 207712 - DNA, 15 bp, Homo sapiens
tggcgcacacctgta

SEQ ID NO: 207713 - DNA, 15 bp, Homo sapiens
gtggcgcacacctgt

SEQ ID NO: 207714 - DNA, 15 bp, Homo sapiens
ggtggcgcacacctg

SEQ ID NO: 207715 - DNA, 15 bp, Homo sapiens
atggtggcgcacacc

SEQ ID NO: 207716 - DNA, 15 bp, Homo sapiens
catggtggcgcacac

SEQ ID NO: 207717 - DNA, 15 bp, Homo sapiens
gcatggtggcgcaca

SEQ ID NO: 207718 - DNA, 15 bp, Homo sapiens
ggcatggtggcgcac

SEQ ID NO: 207719 - DNA, 15 bp, Homo sapiens
aggcatggtggcgca

SEQ ID NO: 207720 - DNA, 15 bp, Homo sapiens
caggcatggtggcgc

SEQ ID NO: 207721 - DNA, 15 bp, Homo sapiens
caattagccaggcat

SEQ ID NO: 207722 - DNA, 15 bp, Homo sapiens
acaattagccaggca

SEQ ID NO: 207723 - DNA, 15 bp, Homo sapiens
cacaattagccaggc

SEQ ID NO: 207724 - DNA, 15 bp, Homo sapiens
acacaattagccagg

SEQ ID NO: 207725 - DNA, 15 bp, Homo sapiens
cacacaattagccag

SEQ ID NO: 207726 - DNA, 15 bp, Homo sapiens
acacacaattagcca

SEQ ID NO: 207727 - DNA, 15 bp, Homo sapiens
cacacacaattagcc

SEQ ID NO: 207728 - DNA, 15 bp, Homo sapiens
acacacacaattagc

SEQ ID NO: 207729 - DNA, 15 bp, Homo sapiens
cacacacacaattag

SEQ ID NO: 207730 - DNA, 15 bp, Homo sapiens
acacacacacaatta

SEQ ID NO: 207731 - DNA, 15 bp, Homo sapiens
cacacacacacaatt

SEQ ID NO: 207732 - DNA, 15 bp, Homo sapiens
acacacacacacaat

SEQ ID NO: 207733 - DNA, 15 bp, Homo sapiens
tacacacacacacac

SEQ ID NO: 207734 - DNA, 15 bp, Homo sapiens
atacacacacacaca

SEQ ID NO: 207735 - DNA, 15 bp, Homo sapiens
catacacacacacac

SEQ ID NO: 207736 - DNA, 15 bp, Homo sapiens
acatacacacacaca

SEQ ID NO: 207737 - DNA, 15 bp, Homo sapiens
tacatacacacacac

SEQ ID NO: 207738 - DNA, 15 bp, Homo sapiens
atacatacacacaca

SEQ ID NO: 207739 - DNA, 15 bp, Homo sapiens
catacatacacacac

SEQ ID NO: 207740 - DNA, 15 bp, Homo sapiens
acatacatacacaca

SEQ ID NO: 207741 - DNA, 15 bp, Homo sapiens
tacatacatacacac

SEQ ID NO: 207742 - DNA, 15 bp, Homo sapiens
atacatacatacaca

SEQ ID NO: 207743 - DNA, 15 bp, Homo sapiens
catacatacatacac

SEQ ID NO: 207744 - DNA, 15 bp, Homo sapiens
acatacatacataca

SEQ ID NO: 207745 - DNA, 15 bp, Homo sapiens
tacatacatacatac

SEQ ID NO: 207746 - DNA, 15 bp, Homo sapiens
atacatacatacata

SEQ ID NO: 207747 - DNA, 15 bp, Homo sapiens
tatacatacatacat

SEQ ID NO: 207748 - DNA, 15 bp, Homo sapiens
atatacatacataca

SEQ ID NO: 207749 - DNA, 15 bp, Homo sapiens
tatatacatacatac

SEQ ID NO: 207750 - DNA, 15 bp, Homo sapiens
atatatacatacata

SEQ ID NO: 207751 - DNA, 15 bp, Homo sapiens
catatatacatacat

SEQ ID NO: 207752 - DNA, 15 bp, Homo sapiens
acatatatacataca

SEQ ID NO: 207753 - DNA, 15 bp, Homo sapiens
cacatatatacatac

SEQ ID NO: 207754 - DNA, 15 bp, Homo sapiens
acacatatatacata

SEQ ID NO: 207755 - DNA, 15 bp, Homo sapiens
cacacatatatacat

SEQ ID NO: 207756 - DNA, 15 bp, Homo sapiens
acacacatatataca

SEQ ID NO: 207757 - DNA, 15 bp, Homo sapiens
cacacacatatatac

SEQ ID NO: 207758 - DNA, 15 bp, Homo sapiens
acacacacatatata

SEQ ID NO: 207759 - DNA, 15 bp, Homo sapiens
cacacacacatatat

SEQ ID NO: 207760 - DNA, 15 bp, Homo sapiens
acacacacacatata

SEQ ID NO: 207761 - DNA, 15 bp, Homo sapiens
cacacacacacatat

SEQ ID NO: 207762 - DNA, 15 bp, Homo sapiens
acacacacacacata

SEQ ID NO: 207763 - DNA, 15 bp, Homo sapiens
tacacacacacacat

SEQ ID NO: 207764 - DNA, 15 bp, Homo sapiens
tatacacacacacac

SEQ ID NO: 207765 - DNA, 15 bp, Homo sapiens
atatacacacacaca

SEQ ID NO: 207766 - DNA, 15 bp, Homo sapiens
tatatacacacacac

SEQ ID NO: 207767 - DNA, 15 bp, Homo sapiens
atatatacacacaca

SEQ ID NO: 207768 - DNA, 15 bp, Homo sapiens
tatatatacacacac

SEQ ID NO: 207769 - DNA, 15 bp, Homo sapiens
atatatatacacaca

SEQ ID NO: 207770 - DNA, 15 bp, Homo sapiens
tatatatatacacac

SEQ ID NO: 207771 - DNA, 15 bp, Homo sapiens
atatatatatacaca

SEQ ID NO: 207772 - DNA, 15 bp, Homo sapiens
tatatatatatacac

SEQ ID NO: 207773 - DNA, 15 bp, Homo sapiens
gtatatatatatata

SEQ ID NO: 207774 - DNA, 15 bp, Homo sapiens
tgtatatatatatat

SEQ ID NO: 207775 - DNA, 15 bp, Homo sapiens
gtgtatatatatata

SEQ ID NO: 207776 - DNA, 15 bp, Homo sapiens
tgtgtatatatatat

SEQ ID NO: 207777 - DNA, 15 bp, Homo sapiens
gtgtgtatatatata

SEQ ID NO: 207778 - DNA, 15 bp, Homo sapiens
tgtgtgtatatatat

SEQ ID NO: 207779 - DNA, 15 bp, Homo sapiens
gtgtgtgtatatata

SEQ ID NO: 207780 - DNA, 15 bp, Homo sapiens
tgtgtgtgtatatat

SEQ ID NO: 207781 - DNA, 15 bp, Homo sapiens
atgtgtgtgtatata

SEQ ID NO: 207782 - DNA, 15 bp, Homo sapiens
tatgtgtgtgtatat

SEQ ID NO: 207783 - DNA, 15 bp, Homo sapiens
atatgtgtgtgtata

SEQ ID NO: 207784 - DNA, 15 bp, Homo sapiens
tatatgtgtgtgtat

SEQ ID NO: 207785 - DNA, 15 bp, Homo sapiens
atatatgtgtgtgta

SEQ ID NO: 207786 - DNA, 15 bp, Homo sapiens
tatatatgtgtgtgt

SEQ ID NO: 207787 - DNA, 15 bp, Homo sapiens
ttatatatgtgtgtg

SEQ ID NO: 207788 - DNA, 15 bp, Homo sapiens
tttatatatgtgtgt

SEQ ID NO: 207789 - DNA, 15 bp, Homo sapiens
atttatatatgtgtg

SEQ ID NO: 207790 - DNA, 15 bp, Homo sapiens
tatttatatatgtgt

SEQ ID NO: 207791 - DNA, 15 bp, Homo sapiens
atatttatatatgtg

SEQ ID NO: 207792 - DNA, 15 bp, Homo sapiens
tatatttatatatgt

SEQ ID NO: 207793 - DNA, 15 bp, Homo sapiens
atatatttatatatg

SEQ ID NO: 207794 - DNA, 15 bp, Homo sapiens
tatatatttatatat

SEQ ID NO: 207795 - DNA, 15 bp, Homo sapiens
atatatatttatata

SEQ ID NO: 207796 - DNA, 15 bp, Homo sapiens
tatatatatttatat

SEQ ID NO: 207797 - DNA, 15 bp, Homo sapiens
gtatatatatttata

SEQ ID NO: 207798 - DNA, 15 bp, Homo sapiens
atgtatatatattta

SEQ ID NO: 207799 - DNA, 15 bp, Homo sapiens
tatgtatatatattt

SEQ ID NO: 207800 - DNA, 15 bp, Homo sapiens
atatgtatatatatt

SEQ ID NO: 207801 - DNA, 15 bp, Homo sapiens
tatatgtatatatat

SEQ ID NO: 207802 - DNA, 15 bp, Homo sapiens
atatatgtatatata

SEQ ID NO: 207803 - DNA, 15 bp, Homo sapiens
tatatatatgtatat

SEQ ID NO: 207804 - DNA, 15 bp, Homo sapiens
atatatatatgtata

SEQ ID NO: 207805 - DNA, 15 bp, Homo sapiens
tatatatatatgtat

SEQ ID NO: 207806 - DNA, 15 bp, Homo sapiens
atatatatatatgta

SEQ ID NO: 207807 - DNA, 15 bp, Homo sapiens
tatatatatatatgt

SEQ ID NO: 207808 - DNA, 15 bp, Homo sapiens
gtatatatatatatg

SEQ ID NO: 207809 - DNA, 15 bp, Homo sapiens
atgtgtgtatatata

SEQ ID NO: 207810 - DNA, 15 bp, Homo sapiens
tatgtgtgtatatat

SEQ ID NO: 207811 - DNA, 15 bp, Homo sapiens
atatgtgtgtatata

SEQ ID NO: 207812 - DNA, 15 bp, Homo sapiens
tatatgtgtgtatat

SEQ ID NO: 207813 - DNA, 15 bp, Homo sapiens
atatatgtgtgtata

SEQ ID NO: 207814 - DNA, 15 bp, Homo sapiens
tatatatgtgtgtat

SEQ ID NO: 207815 - DNA, 15 bp, Homo sapiens
ttatatatgtgtgta

SEQ ID NO: 207816 - DNA, 15 bp, Homo sapiens
gtgtgtgtgtatata

SEQ ID NO: 207817 - DNA, 15 bp, Homo sapiens
tgtgtgtgtgtatat

SEQ ID NO: 207818 - DNA, 15 bp, Homo sapiens
gtgtgtgtgtgtata

SEQ ID NO: 207819 - DNA, 15 bp, Homo sapiens
atgtgtgtgtgtgtg

SEQ ID NO: 207820 - DNA, 15 bp, Homo sapiens
tatgtgtgtgtgtgt

SEQ ID NO: 207821 - DNA, 15 bp, Homo sapiens
atatgtgtgtgtgtg

SEQ ID NO: 207822 - DNA, 15 bp, Homo sapiens
tatatgtgtgtgtgt

SEQ ID NO: 207823 - DNA, 15 bp, Homo sapiens
atatatgtgtgtgtg

SEQ ID NO: 207824 - DNA, 15 bp, Homo sapiens
atatatatgtgtgtg

SEQ ID NO: 207825 - DNA, 15 bp, Homo sapiens
tatatatatgtgtgt

SEQ ID NO: 207826 - DNA, 15 bp, Homo sapiens
atatatatatgtgtg

SEQ ID NO: 207827 - DNA, 15 bp, Homo sapiens
tatatatatatgtgt

SEQ ID NO: 207828 - DNA, 15 bp, Homo sapiens
atatatatatatgtg

SEQ ID NO: 207829 - DNA, 15 bp, Homo sapiens
atatatatatatatg

SEQ ID NO: 207830 - DNA, 15 bp, Homo sapiens
cttaaaaaaaaaaaa

SEQ ID NO: 207831 - DNA, 15 bp, Homo sapiens
acttaaaaaaaaaaa

SEQ ID NO: 207832 - DNA, 15 bp, Homo sapiens
tacttaaaaaaaaaa

SEQ ID NO: 207833 - DNA, 15 bp, Homo sapiens
ctacttaaaaaaaaa

SEQ ID NO: 207834 - DNA, 15 bp, Homo sapiens
tctacttaaaaaaaa

SEQ ID NO: 207835 - DNA, 15 bp, Homo sapiens
ctctacttaaaaaaa

SEQ ID NO: 207836 - DNA, 15 bp, Homo sapiens
tctctacttaaaaaa

SEQ ID NO: 207837 - DNA, 15 bp, Homo sapiens
atctctacttaaaaa

SEQ ID NO: 207838 - DNA, 15 bp, Homo sapiens
catctctacttaaaa

SEQ ID NO: 207839 - DNA, 15 bp, Homo sapiens
ccatctctacttaaa

SEQ ID NO: 207840 - DNA, 15 bp, Homo sapiens
cccatctctacttaa

SEQ ID NO: 207841 - DNA, 15 bp, Homo sapiens
ccccatctctactta

SEQ ID NO: 207842 - DNA, 15 bp, Homo sapiens
accccatctctactt

SEQ ID NO: 207843 - DNA, 15 bp, Homo sapiens
aaaaccccatctcta

SEQ ID NO: 207844 - DNA, 15 bp, Homo sapiens
caaaaccccatctct

SEQ ID NO: 207845 - DNA, 15 bp, Homo sapiens
gcaaaaccccatctc

SEQ ID NO: 207846 - DNA, 15 bp, Homo sapiens
ggcaaaaccccatct

SEQ ID NO: 207847 - DNA, 15 bp, Homo sapiens
tggcaaaaccccatc

SEQ ID NO: 207848 - DNA, 15 bp, Homo sapiens
atggcaaaaccccat

SEQ ID NO: 207849 - DNA, 15 bp, Homo sapiens
catggcaaaacccca

SEQ ID NO: 207850 - DNA, 15 bp, Homo sapiens
acatggcaaaacccc

SEQ ID NO: 207851 - DNA, 15 bp, Homo sapiens
ccaacatggcaaaac

SEQ ID NO: 207852 - DNA, 15 bp, Homo sapiens
gccaacatggcaaaa

SEQ ID NO: 207853 - DNA, 15 bp, Homo sapiens
ggccaacatggcaaa

SEQ ID NO: 207854 - DNA, 15 bp, Homo sapiens
tggccaacatggcaa

SEQ ID NO: 207855 - DNA, 15 bp, Homo sapiens
ctggccaacatggca

SEQ ID NO: 207856 - DNA, 15 bp, Homo sapiens
cagaccagcctggcc

SEQ ID NO: 207857 - DNA, 15 bp, Homo sapiens
ccagaccagcctggc

SEQ ID NO: 207858 - DNA, 15 bp, Homo sapiens
gccagaccagcctgg

SEQ ID NO: 207859 - DNA, 15 bp, Homo sapiens
ggccagaccagcctg

SEQ ID NO: 207860 - DNA, 15 bp, Homo sapiens
aggccagaccagcct

SEQ ID NO: 207861 - DNA, 15 bp, Homo sapiens
gaggccagaccagcc

SEQ ID NO: 207862 - DNA, 15 bp, Homo sapiens
tgaggccagaccagc

SEQ ID NO: 207863 - DNA, 15 bp, Homo sapiens
ttgaggccagaccag

SEQ ID NO: 207864 - DNA, 15 bp, Homo sapiens
cttgaggccagacca

SEQ ID NO: 207865 - DNA, 15 bp, Homo sapiens
gcttgaggccagacc

SEQ ID NO: 207866 - DNA, 15 bp, Homo sapiens
ggcttgaggccagac

SEQ ID NO: 207867 - DNA, 15 bp, Homo sapiens
tggcttgaggccaga

SEQ ID NO: 207868 - DNA, 15 bp, Homo sapiens
atggcttgaggccag

SEQ ID NO: 207869 - DNA, 15 bp, Homo sapiens
gatggcttgaggcca

SEQ ID NO: 207870 - DNA, 15 bp, Homo sapiens
ggatggcttgaggcc

SEQ ID NO: 207871 - DNA, 15 bp, Homo sapiens
aggatggcttgaggc

SEQ ID NO: 207872 - DNA, 15 bp, Homo sapiens
gaggatggcttgagg

SEQ ID NO: 207873 - DNA, 15 bp, Homo sapiens
cgaggtgggaggatg

SEQ ID NO: 207874 - DNA, 15 bp, Homo sapiens
ccgaggtgggaggat

SEQ ID NO: 207875 - DNA, 15 bp, Homo sapiens
gccgaggtgggagga

SEQ ID NO: 207876 - DNA, 15 bp, Homo sapiens
ggccgaggtgggagg

SEQ ID NO: 207877 - DNA, 15 bp, Homo sapiens
aggccgaggtgggag

SEQ ID NO: 207878 - DNA, 15 bp, Homo sapiens
gaggccgaggtggga

SEQ ID NO: 207879 - DNA, 15 bp, Homo sapiens
cgaggccgaggtggg

SEQ ID NO: 207880 - DNA, 15 bp, Homo sapiens
gcgaggccgaggtgg

SEQ ID NO: 207881 - DNA, 15 bp, Homo sapiens
tgcgaggccgaggtg

SEQ ID NO: 207882 - DNA, 15 bp, Homo sapiens
ttgcgaggccgaggt

SEQ ID NO: 207883 - DNA, 15 bp, Homo sapiens
tttgcgaggccgagg

SEQ ID NO: 207884 - DNA, 15 bp, Homo sapiens
ctttgcgaggccgag

SEQ ID NO: 207885 - DNA, 15 bp, Homo sapiens
actttgcgaggccga

SEQ ID NO: 207886 - DNA, 15 bp, Homo sapiens
cactttgcgaggccg

SEQ ID NO: 207887 - DNA, 15 bp, Homo sapiens
gcactttgcgaggcc

SEQ ID NO: 207888 - DNA, 15 bp, Homo sapiens
agcactttgcgaggc

SEQ ID NO: 207889 - DNA, 15 bp, Homo sapiens
cagcactttgcgagg

SEQ ID NO: 207890 - DNA, 15 bp, Homo sapiens
ccagcactttgcgag

SEQ ID NO: 207891 - DNA, 15 bp, Homo sapiens
accagcactttgcga

SEQ ID NO: 207892 - DNA, 15 bp, Homo sapiens
taccagcactttgcg

SEQ ID NO: 207893 - DNA, 15 bp, Homo sapiens
ataccagcactttgc

SEQ ID NO: 207894 - DNA, 15 bp, Homo sapiens
aataccagcactttg

SEQ ID NO: 207895 - DNA, 15 bp, Homo sapiens
taataccagcacttt

SEQ ID NO: 207896 - DNA, 15 bp, Homo sapiens
ataataccagcactt

SEQ ID NO: 207897 - DNA, 15 bp, Homo sapiens
tataataccagcact

SEQ ID NO: 207898 - DNA, 15 bp, Homo sapiens
ctataataccagcac

SEQ ID NO: 207899 - DNA, 15 bp, Homo sapiens
cctataataccagca

SEQ ID NO: 207900 - DNA, 15 bp, Homo sapiens
gcctataataccagc

SEQ ID NO: 207901 - DNA, 15 bp, Homo sapiens
tgcctataataccag

SEQ ID NO: 207902 - DNA, 15 bp, Homo sapiens
atgcctataatacca

SEQ ID NO: 207903 - DNA, 15 bp, Homo sapiens
catgcctataatacc

SEQ ID NO: 207904 - DNA, 15 bp, Homo sapiens
tcatgcctataatac

SEQ ID NO: 207905 - DNA, 15 bp, Homo sapiens
ctcatgcctataata

SEQ ID NO: 207906 - DNA, 15 bp, Homo sapiens
agtggctcatgccta

SEQ ID NO: 207907 - DNA, 15 bp, Homo sapiens
acagtggctcatgcc

SEQ ID NO: 207908 - DNA, 15 bp, Homo sapiens
cacagtggctcatgc

SEQ ID NO: 207909 - DNA, 15 bp, Homo sapiens
gcacagtggctcatg

SEQ ID NO: 207910 - DNA, 15 bp, Homo sapiens
caggccaggcacagt

SEQ ID NO: 207911 - DNA, 15 bp, Homo sapiens
gcaggccaggcacag

SEQ ID NO: 207912 - DNA, 15 bp, Homo sapiens
tgcaggccaggcaca

SEQ ID NO: 207913 - DNA, 15 bp, Homo sapiens
atgcaggccaggcac

SEQ ID NO: 207914 - DNA, 15 bp, Homo sapiens
aatgcaggccaggca

SEQ ID NO: 207915 - DNA, 15 bp, Homo sapiens
aaatgcaggccaggc

SEQ ID NO: 207916 - DNA, 15 bp, Homo sapiens
gaaatgcaggccagg

SEQ ID NO: 207917 - DNA, 15 bp, Homo sapiens
tgaaatgcaggccag

SEQ ID NO: 207918 - DNA, 15 bp, Homo sapiens
atgaaatgcaggcca

SEQ ID NO: 207919 - DNA, 15 bp, Homo sapiens
aatgaaatgcaggcc

SEQ ID NO: 207920 - DNA, 15 bp, Homo sapiens
aaatgaaatgcaggc

SEQ ID NO: 207921 - DNA, 15 bp, Homo sapiens
aaaatgaaatgcagg

SEQ ID NO: 207922 - DNA, 15 bp, Homo sapiens
taaaatgaaatgcag

SEQ ID NO: 207923 - DNA, 15 bp, Homo sapiens
ttaaaatgaaatgca

SEQ ID NO: 207924 - DNA, 15 bp, Homo sapiens
attaaaatgaaatgc

SEQ ID NO: 207925 - DNA, 15 bp, Homo sapiens
aattaaaatgaaatg

SEQ ID NO: 207926 - DNA, 15 bp, Homo sapiens
taattaaaatgaaat

SEQ ID NO: 207927 - DNA, 15 bp, Homo sapiens
ataattaaaatgaaa

SEQ ID NO: 207928 - DNA, 15 bp, Homo sapiens
tataattaaaatgaa

SEQ ID NO: 207929 - DNA, 15 bp, Homo sapiens
ttataattaaaatga

SEQ ID NO: 207930 - DNA, 15 bp, Homo sapiens
tttataattaaaatg

SEQ ID NO: 207931 - DNA, 15 bp, Homo sapiens
ttttataattaaaat

SEQ ID NO: 207932 - DNA, 15 bp, Homo sapiens
attttataattaaaa

SEQ ID NO: 207933 - DNA, 15 bp, Homo sapiens
tattttataattaaa

SEQ ID NO: 207934 - DNA, 15 bp, Homo sapiens
atattttataattaa

SEQ ID NO: 207935 - DNA, 15 bp, Homo sapiens
aatattttataatta

SEQ ID NO: 207936 - DNA, 15 bp, Homo sapiens
aaatattttataatt

SEQ ID NO: 207937 - DNA, 15 bp, Homo sapiens
aaaatattttataat

SEQ ID NO: 207938 - DNA, 15 bp, Homo sapiens
caaaatattttataa

SEQ ID NO: 207939 - DNA, 15 bp, Homo sapiens
tcaaaatattttata

SEQ ID NO: 207940 - DNA, 15 bp, Homo sapiens
ttcaaaatattttat

SEQ ID NO: 207941 - DNA, 15 bp, Homo sapiens
gttcaaaatatttta

SEQ ID NO: 207942 - DNA, 15 bp, Homo sapiens
agttcaaaatatttt

SEQ ID NO: 207943 - DNA, 15 bp, Homo sapiens
gagttcaaaatattt

SEQ ID NO: 207944 - DNA, 15 bp, Homo sapiens
tgagttcaaaatatt

SEQ ID NO: 207945 - DNA, 15 bp, Homo sapiens
ctgagttcaaaatat

SEQ ID NO: 207946 - DNA, 15 bp, Homo sapiens
tctgagttcaaaata

SEQ ID NO: 207947 - DNA, 15 bp, Homo sapiens
ttctgagttcaaaat

SEQ ID NO: 207948 - DNA, 15 bp, Homo sapiens
tttctgagttcaaaa

SEQ ID NO: 207949 - DNA, 15 bp, Homo sapiens
ttttctgagttcaaa

SEQ ID NO: 207950 - DNA, 15 bp, Homo sapiens
tttttctgagttcaa

SEQ ID NO: 207951 - DNA, 15 bp, Homo sapiens
ttttttctgagttca

SEQ ID NO: 207952 - DNA, 15 bp, Homo sapiens
cttttttctgagttc

SEQ ID NO: 207953 - DNA, 15 bp, Homo sapiens
ccttttttctgagtt

SEQ ID NO: 207954 - DNA, 15 bp, Homo sapiens
cccttttttctgagt

SEQ ID NO: 207955 - DNA, 15 bp, Homo sapiens
acccttttttctgag

SEQ ID NO: 207956 - DNA, 15 bp, Homo sapiens
tacccttttttctga

SEQ ID NO: 207957 - DNA, 15 bp, Homo sapiens
atacccttttttctg

SEQ ID NO: 207958 - DNA, 15 bp, Homo sapiens
catacccttttttct

SEQ ID NO: 207959 - DNA, 15 bp, Homo sapiens
gcatacccttttttc

SEQ ID NO: 207960 - DNA, 15 bp, Homo sapiens
agcataccctttttt

SEQ ID NO: 207961 - DNA, 15 bp, Homo sapiens
cagcatacccttttt

SEQ ID NO: 207962 - DNA, 15 bp, Homo sapiens
tcagcataccctttt

SEQ ID NO: 207963 - DNA, 15 bp, Homo sapiens
ttcagcatacccttt

SEQ ID NO: 207964 - DNA, 15 bp, Homo sapiens
attcagcataccctt

SEQ ID NO: 207965 - DNA, 15 bp, Homo sapiens
tattcagcataccct

SEQ ID NO: 207966 - DNA, 15 bp, Homo sapiens
gtattcagcataccc

SEQ ID NO: 207967 - DNA, 15 bp, Homo sapiens
ggtattcagcatacc

SEQ ID NO: 207968 - DNA, 15 bp, Homo sapiens
aggtattcagcatac

SEQ ID NO: 207969 - DNA, 15 bp, Homo sapiens
taggtattcagcata

SEQ ID NO: 207970 - DNA, 15 bp, Homo sapiens
gtaggtattcagcat

SEQ ID NO: 207971 - DNA, 15 bp, Homo sapiens
cgtaggtattcagca

SEQ ID NO: 207972 - DNA, 15 bp, Homo sapiens
acgtaggtattcagc

SEQ ID NO: 207973 - DNA, 15 bp, Homo sapiens
tacgtaggtattcag

SEQ ID NO: 207974 - DNA, 15 bp, Homo sapiens
gtacgtaggtattca

SEQ ID NO: 207975 - DNA, 15 bp, Homo sapiens
ggtacgtaggtattc

SEQ ID NO: 207976 - DNA, 15 bp, Homo sapiens
gggtacgtaggtatt

SEQ ID NO: 207977 - DNA, 15 bp, Homo sapiens
tgggtacgtaggtat

SEQ ID NO: 207978 - DNA, 15 bp, Homo sapiens
gtgggtacgtaggta

SEQ ID NO: 207979 - DNA, 15 bp, Homo sapiens
tgtgggtacgtaggt

SEQ ID NO: 207980 - DNA, 15 bp, Homo sapiens
ttgtgggtacgtagg

SEQ ID NO: 207981 - DNA, 15 bp, Homo sapiens
tttgtgggtacgtag

SEQ ID NO: 207982 - DNA, 15 bp, Homo sapiens
ttttgtgggtacgta

SEQ ID NO: 207983 - DNA, 15 bp, Homo sapiens
cttttgtgggtacgt

SEQ ID NO: 207984 - DNA, 15 bp, Homo sapiens
acttttgtgggtacg

SEQ ID NO: 207985 - DNA, 15 bp, Homo sapiens
tacttttgtgggtac

SEQ ID NO: 207986 - DNA, 15 bp, Homo sapiens
atacttttgtgggta

SEQ ID NO: 207987 - DNA, 15 bp, Homo sapiens
aatacttttgtgggt

SEQ ID NO: 207988 - DNA, 15 bp, Homo sapiens
taatacttttgtggg

SEQ ID NO: 207989 - DNA, 15 bp, Homo sapiens
ttaatacttttgtgg

SEQ ID NO: 207990 - DNA, 15 bp, Homo sapiens
gttaatacttttgtg

SEQ ID NO: 207991 - DNA, 15 bp, Homo sapiens
tgttaatacttttgt

SEQ ID NO: 207992 - DNA, 15 bp, Homo sapiens
atgttaatacttttg

SEQ ID NO: 207993 - DNA, 15 bp, Homo sapiens
aatgttaatactttt

SEQ ID NO: 207994 - DNA, 15 bp, Homo sapiens
aaatgttaatacttt

SEQ ID NO: 207995 - DNA, 15 bp, Homo sapiens
aaaatgttaatactt

SEQ ID NO: 207996 - DNA, 15 bp, Homo sapiens
caaaatgttaatact

SEQ ID NO: 207997 - DNA, 15 bp, Homo sapiens
gcaaaatgttaatac

SEQ ID NO: 207998 - DNA, 15 bp, Homo sapiens
ggcaaaatgttaata

SEQ ID NO: 207999 - DNA, 15 bp, Homo sapiens
tggcaaaatgttaat

SEQ ID NO: 208000 - DNA, 15 bp, Homo sapiens
atggcaaaatgttaa

SEQ ID NO: 208001 - DNA, 15 bp, Homo sapiens
tatggcaaaatgtta

SEQ ID NO: 208002 - DNA, 15 bp, Homo sapiens
atatggcaaaatgtt

SEQ ID NO: 208003 - DNA, 15 bp, Homo sapiens
aatatggcaaaatgt

SEQ ID NO: 208004 - DNA, 15 bp, Homo sapiens
aaatatggcaaaatg

SEQ ID NO: 208005 - DNA, 15 bp, Homo sapiens
caaatatggcaaaat

SEQ ID NO: 208006 - DNA, 15 bp, Homo sapiens
gcaaatatggcaaaa

SEQ ID NO: 208007 - DNA, 15 bp, Homo sapiens
agcaaatatggcaaa

SEQ ID NO: 208008 - DNA, 15 bp, Homo sapiens
aagcaaatatggcaa

SEQ ID NO: 208009 - DNA, 15 bp, Homo sapiens
gaagcaaatatggca

SEQ ID NO: 208010 - DNA, 15 bp, Homo sapiens
agaagcaaatatggc

SEQ ID NO: 208011 - DNA, 15 bp, Homo sapiens
cagaagcaaatatgg

SEQ ID NO: 208012 - DNA, 15 bp, Homo sapiens
tcagaagcaaatatg

SEQ ID NO: 208013 - DNA, 15 bp, Homo sapiens
atcagaagcaaatat

SEQ ID NO: 208014 - DNA, 15 bp, Homo sapiens
gatcagaagcaaata

SEQ ID NO: 208015 - DNA, 15 bp, Homo sapiens
agatcagaagcaaat

SEQ ID NO: 208016 - DNA, 15 bp, Homo sapiens
aagatcagaagcaaa

SEQ ID NO: 208017 - DNA, 15 bp, Homo sapiens
taagatcagaagcaa

SEQ ID NO: 208018 - DNA, 15 bp, Homo sapiens
ataagatcagaagca

SEQ ID NO: 208019 - DNA, 15 bp, Homo sapiens
aataagatcagaagc

SEQ ID NO: 208020 - DNA, 15 bp, Homo sapiens
aaataagatcagaag

SEQ ID NO: 208021 - DNA, 15 bp, Homo sapiens
aaaataagatcagaa

SEQ ID NO: 208022 - DNA, 15 bp, Homo sapiens
aaaaataagatcaga

SEQ ID NO: 208023 - DNA, 15 bp, Homo sapiens
aaaaaataagatcag

SEQ ID NO: 208024 - DNA, 15 bp, Homo sapiens
aaaaaaataagatca

SEQ ID NO: 208025 - DNA, 15 bp, Homo sapiens
aaaaaaaataagatc

SEQ ID NO: 208026 - DNA, 15 bp, Homo sapiens
caaaaaaaataagat

SEQ ID NO: 208027 - DNA, 15 bp, Homo sapiens
tcaaaaaaaataaga

SEQ ID NO: 208028 - DNA, 15 bp, Homo sapiens
ctcaaaaaaaataag

SEQ ID NO: 208029 - DNA, 15 bp, Homo sapiens
tctcaaaaaaaataa

SEQ ID NO: 208030 - DNA, 15 bp, Homo sapiens
ttctcaaaaaaaata

SEQ ID NO: 208031 - DNA, 15 bp, Homo sapiens
tttctcaaaaaaaat

SEQ ID NO: 208032 - DNA, 15 bp, Homo sapiens
atttctcaaaaaaaa

SEQ ID NO: 208033 - DNA, 15 bp, Homo sapiens
aatttctcaaaaaaa

SEQ ID NO: 208034 - DNA, 15 bp, Homo sapiens
taatttctcaaaaaa

SEQ ID NO: 208035 - DNA, 15 bp, Homo sapiens
ttaatttctcaaaaa

SEQ ID NO: 208036 - DNA, 15 bp, Homo sapiens
tttaatttctcaaaa

SEQ ID NO: 208037 - DNA, 15 bp, Homo sapiens
ctttaatttctcaaa

SEQ ID NO: 208038 - DNA, 15 bp, Homo sapiens
tctttaatttctcaa

SEQ ID NO: 208039 - DNA, 15 bp, Homo sapiens
atctttaatttctca

SEQ ID NO: 208040 - DNA, 15 bp, Homo sapiens
gatctttaatttctc

SEQ ID NO: 208041 - DNA, 15 bp, Homo sapiens
tgatctttaatttct

SEQ ID NO: 208042 - DNA, 15 bp, Homo sapiens
atgatctttaatttc

SEQ ID NO: 208043 - DNA, 15 bp, Homo sapiens
tatgatctttaattt

SEQ ID NO: 208044 - DNA, 15 bp, Homo sapiens
ttatgatctttaatt

SEQ ID NO: 208045 - DNA, 15 bp, Homo sapiens
attatgatctttaat

SEQ ID NO: 208046 - DNA, 15 bp, Homo sapiens
tattatgatctttaa

SEQ ID NO: 208047 - DNA, 15 bp, Homo sapiens
gtattatgatcttta

SEQ ID NO: 208048 - DNA, 15 bp, Homo sapiens
tgtattatgatcttt

SEQ ID NO: 208049 - DNA, 15 bp, Homo sapiens
ttgtattatgatctt

SEQ ID NO: 208050 - DNA, 15 bp, Homo sapiens
gttgtattatgatct

SEQ ID NO: 208051 - DNA, 15 bp, Homo sapiens
agttgtattatgatc

SEQ ID NO: 208052 - DNA, 15 bp, Homo sapiens
tagttgtattatgat

SEQ ID NO: 208053 - DNA, 15 bp, Homo sapiens
ttagttgtattatga

SEQ ID NO: 208054 - DNA, 15 bp, Homo sapiens
tttagttgtattatg

SEQ ID NO: 208055 - DNA, 15 bp, Homo sapiens
ctttagttgtattat

SEQ ID NO: 208056 - DNA, 15 bp, Homo sapiens
gctttagttgtatta

SEQ ID NO: 208057 - DNA, 15 bp, Homo sapiens
ggctttagttgtatt

SEQ ID NO: 208058 - DNA, 15 bp, Homo sapiens
gggctttagttgtat

SEQ ID NO: 208059 - DNA, 15 bp, Homo sapiens
ggggctttagttgta

SEQ ID NO: 208060 - DNA, 15 bp, Homo sapiens
tggggctttagttgt

SEQ ID NO: 208061 - DNA, 15 bp, Homo sapiens
atggggctttagttg

SEQ ID NO: 208062 - DNA, 15 bp, Homo sapiens
aatggggctttagtt

SEQ ID NO: 208063 - DNA, 15 bp, Homo sapiens
aaatggggctttagt

SEQ ID NO: 208064 - DNA, 15 bp, Homo sapiens
gaaatggggctttag

SEQ ID NO: 208065 - DNA, 15 bp, Homo sapiens
agaaatggggcttta

SEQ ID NO: 208066 - DNA, 15 bp, Homo sapiens
aagaaatggggcttt

SEQ ID NO: 208067 - DNA, 15 bp, Homo sapiens
aaagaaatggggctt

SEQ ID NO: 208068 - DNA, 15 bp, Homo sapiens
gaaagaaatggggct

SEQ ID NO: 208069 - DNA, 15 bp, Homo sapiens
ggaaagaaatggggc

SEQ ID NO: 208070 - DNA, 15 bp, Homo sapiens
gggaaagaaatgggg

SEQ ID NO: 208071 - DNA, 15 bp, Homo sapiens
agggaaagaaatggg

SEQ ID NO: 208072 - DNA, 15 bp, Homo sapiens
aagggaaagaaatgg

SEQ ID NO: 208073 - DNA, 15 bp, Homo sapiens
gaagggaaagaaatg

SEQ ID NO: 208074 - DNA, 15 bp, Homo sapiens
tgaagggaaagaaat

SEQ ID NO: 208075 - DNA, 15 bp, Homo sapiens
atgaagggaaagaaa

SEQ ID NO: 208076 - DNA, 15 bp, Homo sapiens
aatgaagggaaagaa

SEQ ID NO: 208077 - DNA, 15 bp, Homo sapiens
gaatgaagggaaaga

SEQ ID NO: 208078 - DNA, 15 bp, Homo sapiens
ggaatgaagggaaag

SEQ ID NO: 208079 - DNA, 15 bp, Homo sapiens
gggaatgaagggaaa

SEQ ID NO: 208080 - DNA, 15 bp, Homo sapiens
tgggaatgaagggaa

SEQ ID NO: 208081 - DNA, 15 bp, Homo sapiens
ctgggaatgaaggga

SEQ ID NO: 208082 - DNA, 15 bp, Homo sapiens
tctgggaatgaaggg

SEQ ID NO: 208083 - DNA, 15 bp, Homo sapiens
ttctgggaatgaagg

SEQ ID NO: 208084 - DNA, 15 bp, Homo sapiens
cttctgggaatgaag

SEQ ID NO: 208085 - DNA, 15 bp, Homo sapiens
acttctgggaatgaa

SEQ ID NO: 208086 - DNA, 15 bp, Homo sapiens
tacttctgggaatga

SEQ ID NO: 208087 - DNA, 15 bp, Homo sapiens
atacttctgggaatg

SEQ ID NO: 208088 - DNA, 15 bp, Homo sapiens
catacttctgggaat

SEQ ID NO: 208089 - DNA, 15 bp, Homo sapiens
tcatacttctgggaa

SEQ ID NO: 208090 - DNA, 15 bp, Homo sapiens
gtcatacttctggga

SEQ ID NO: 208091 - DNA, 15 bp, Homo sapiens
tgtcatacttctggg

SEQ ID NO: 208092 - DNA, 15 bp, Homo sapiens
ttgtcatacttctgg

SEQ ID NO: 208093 - DNA, 15 bp, Homo sapiens
attgtcatacttctg

SEQ ID NO: 208094 - DNA, 15 bp, Homo sapiens
aattgtcatacttct

SEQ ID NO: 208095 - DNA, 15 bp, Homo sapiens
taattgtcatacttc

SEQ ID NO: 208096 - DNA, 15 bp, Homo sapiens
ataattgtcatactt

SEQ ID NO: 208097 - DNA, 15 bp, Homo sapiens
gataattgtcatact

SEQ ID NO: 208098 - DNA, 15 bp, Homo sapiens
ggataattgtcatac

SEQ ID NO: 208099 - DNA, 15 bp, Homo sapiens
aggataattgtcata

SEQ ID NO: 208100 - DNA, 15 bp, Homo sapiens
aaggataattgtcat

SEQ ID NO: 208101 - DNA, 15 bp, Homo sapiens
taaggataattgtca

SEQ ID NO: 208102 - DNA, 15 bp, Homo sapiens
ttaaggataattgtc

SEQ ID NO: 208103 - DNA, 15 bp, Homo sapiens
tttaaggataattgt

SEQ ID NO: 208104 - DNA, 15 bp, Homo sapiens
ctttaaggataattg

SEQ ID NO: 208105 - DNA, 15 bp, Homo sapiens
actttaaggataatt

SEQ ID NO: 208106 - DNA, 15 bp, Homo sapiens
aactttaaggataat

SEQ ID NO: 208107 - DNA, 15 bp, Homo sapiens
caactttaaggataa

SEQ ID NO: 208108 - DNA, 15 bp, Homo sapiens
tcaactttaaggata

SEQ ID NO: 208109 - DNA, 15 bp, Homo sapiens
atcaactttaaggat

SEQ ID NO: 208110 - DNA, 15 bp, Homo sapiens
tatcaactttaagga

SEQ ID NO: 208111 - DNA, 15 bp, Homo sapiens
atatcaactttaagg

SEQ ID NO: 208112 - DNA, 15 bp, Homo sapiens
tatatcaactttaag

SEQ ID NO: 208113 - DNA, 15 bp, Homo sapiens
atatatcaactttaa

SEQ ID NO: 208114 - DNA, 15 bp, Homo sapiens
tatatatcaacttta

SEQ ID NO: 208115 - DNA, 15 bp, Homo sapiens
atatatatcaacttt

SEQ ID NO: 208116 - DNA, 15 bp, Homo sapiens
gatatatatcaactt

SEQ ID NO: 208117 - DNA, 15 bp, Homo sapiens
tgatatatatcaact

SEQ ID NO: 208118 - DNA, 15 bp, Homo sapiens
atgatatatatcaac

SEQ ID NO: 208119 - DNA, 15 bp, Homo sapiens
aatgatatatatcaa

SEQ ID NO: 208120 - DNA, 15 bp, Homo sapiens
gaatgatatatatca

SEQ ID NO: 208121 - DNA, 15 bp, Homo sapiens
ggaatgatatatatc

SEQ ID NO: 208122 - DNA, 15 bp, Homo sapiens
gggaatgatatatat

SEQ ID NO: 208123 - DNA, 15 bp, Homo sapiens
tgggaatgatatata

SEQ ID NO: 208124 - DNA, 15 bp, Homo sapiens
atgggaatgatatat

SEQ ID NO: 208125 - DNA, 15 bp, Homo sapiens
catgggaatgatata

SEQ ID NO: 208126 - DNA, 15 bp, Homo sapiens
gcatgggaatgatat

SEQ ID NO: 208127 - DNA, 15 bp, Homo sapiens
tgcatgggaatgata

SEQ ID NO: 208128 - DNA, 15 bp, Homo sapiens
atgcatgggaatgat

SEQ ID NO: 208129 - DNA, 15 bp, Homo sapiens
catgcatgggaatga

SEQ ID NO: 208130 - DNA, 15 bp, Homo sapiens
acatgcatgggaatg

SEQ ID NO: 208131 - DNA, 15 bp, Homo sapiens
aacatgcatgggaat

SEQ ID NO: 208132 - DNA, 15 bp, Homo sapiens
aaacatgcatgggaa

SEQ ID NO: 208133 - DNA, 15 bp, Homo sapiens
aaaacatgcatggga

SEQ ID NO: 208134 - DNA, 15 bp, Homo sapiens
aaaaacatgcatggg

SEQ ID NO: 208135 - DNA, 15 bp, Homo sapiens
aaaaaacatgcatgg

SEQ ID NO: 208136 - DNA, 15 bp, Homo sapiens
taaaaaacatgcatg

SEQ ID NO: 208137 - DNA, 15 bp, Homo sapiens
ataaaaaacatgcat

SEQ ID NO: 208138 - DNA, 15 bp, Homo sapiens
tataaaaaacatgca

SEQ ID NO: 208139 - DNA, 15 bp, Homo sapiens
gtataaaaaacatgc

SEQ ID NO: 208140 - DNA, 15 bp, Homo sapiens
agtataaaaaacatg

SEQ ID NO: 208141 - DNA, 15 bp, Homo sapiens
aagtataaaaaacat

SEQ ID NO: 208142 - DNA, 15 bp, Homo sapiens
gaagtataaaaaaca

SEQ ID NO: 208143 - DNA, 15 bp, Homo sapiens
ggaagtataaaaaac

SEQ ID NO: 208144 - DNA, 15 bp, Homo sapiens
gggaagtataaaaaa

SEQ ID NO: 208145 - DNA, 15 bp, Homo sapiens
agggaagtataaaaa

SEQ ID NO: 208146 - DNA, 15 bp, Homo sapiens
tagggaagtataaaa

SEQ ID NO: 208147 - DNA, 15 bp, Homo sapiens
ctagggaagtataaa

SEQ ID NO: 208148 - DNA, 15 bp, Homo sapiens
actagggaagtataa

SEQ ID NO: 208149 - DNA, 15 bp, Homo sapiens
tactagggaagtata

SEQ ID NO: 208150 - DNA, 15 bp, Homo sapiens
gtactagggaagtat

SEQ ID NO: 208151 - DNA, 15 bp, Homo sapiens
tgtactagggaagta

SEQ ID NO: 208152 - DNA, 15 bp, Homo sapiens
ttgtactagggaagt

SEQ ID NO: 208153 - DNA, 15 bp, Homo sapiens
cttgtactagggaag

SEQ ID NO: 208154 - DNA, 15 bp, Homo sapiens
acttgtactagggaa

SEQ ID NO: 208155 - DNA, 15 bp, Homo sapiens
aacttgtactaggga

SEQ ID NO: 208156 - DNA, 15 bp, Homo sapiens
taacttgtactaggg

SEQ ID NO: 208157 - DNA, 15 bp, Homo sapiens
ctaacttgtactagg

SEQ ID NO: 208158 - DNA, 15 bp, Homo sapiens
gctaacttgtactag

SEQ ID NO: 208159 - DNA, 15 bp, Homo sapiens
agctaacttgtacta

SEQ ID NO: 208160 - DNA, 15 bp, Homo sapiens
cagctaacttgtact

SEQ ID NO: 208161 - DNA, 15 bp, Homo sapiens
acagctaacttgtac

SEQ ID NO: 208162 - DNA, 15 bp, Homo sapiens
tacagctaacttgta

SEQ ID NO: 208163 - DNA, 15 bp, Homo sapiens
atacagctaacttgt

SEQ ID NO: 208164 - DNA, 15 bp, Homo sapiens
gatacagctaacttg

SEQ ID NO: 208165 - DNA, 15 bp, Homo sapiens
ggatacagctaactt

SEQ ID NO: 208166 - DNA, 15 bp, Homo sapiens
aggatacagctaact

SEQ ID NO: 208167 - DNA, 15 bp, Homo sapiens
gaggatacagctaac

SEQ ID NO: 208168 - DNA, 15 bp, Homo sapiens
agaggatacagctaa

SEQ ID NO: 208169 - DNA, 15 bp, Homo sapiens
cagaggatacagcta

SEQ ID NO: 208170 - DNA, 15 bp, Homo sapiens
gcagaggatacagct

SEQ ID NO: 208171 - DNA, 15 bp, Homo sapiens
agcagaggatacagc

SEQ ID NO: 208172 - DNA, 15 bp, Homo sapiens
gagcagaggatacag

SEQ ID NO: 208173 - DNA, 15 bp, Homo sapiens
tgagcagaggataca

SEQ ID NO: 208174 - DNA, 15 bp, Homo sapiens
ctgagcagaggatac

SEQ ID NO: 208175 - DNA, 15 bp, Homo sapiens
cctgagcagaggata

SEQ ID NO: 208176 - DNA, 15 bp, Homo sapiens
ccctgagcagaggat

SEQ ID NO: 208177 - DNA, 15 bp, Homo sapiens
cccctgagcagagga

SEQ ID NO: 208178 - DNA, 15 bp, Homo sapiens
gcccctgagcagagg

SEQ ID NO: 208179 - DNA, 15 bp, Homo sapiens
agcccctgagcagag

SEQ ID NO: 208180 - DNA, 15 bp, Homo sapiens
gagcccctgagcaga

SEQ ID NO: 208181 - DNA, 15 bp, Homo sapiens
tgagcccctgagcag

SEQ ID NO: 208182 - DNA, 15 bp, Homo sapiens
atgagcccctgagca

SEQ ID NO: 208183 - DNA, 15 bp, Homo sapiens
gatgagcccctgagc

SEQ ID NO: 208184 - DNA, 15 bp, Homo sapiens
tgatgagcccctgag

SEQ ID NO: 208185 - DNA, 15 bp, Homo sapiens
ttgatgagcccctga

SEQ ID NO: 208186 - DNA, 15 bp, Homo sapiens
cttgatgagcccctg

SEQ ID NO: 208187 - DNA, 15 bp, Homo sapiens
gcttgatgagcccct

SEQ ID NO: 208188 - DNA, 15 bp, Homo sapiens
agcttgatgagcccc

SEQ ID NO: 208189 - DNA, 15 bp, Homo sapiens
cagcttgatgagccc

SEQ ID NO: 208190 - DNA, 15 bp, Homo sapiens
tcagcttgatgagcc

SEQ ID NO: 208191 - DNA, 15 bp, Homo sapiens
ttcagcttgatgagc

SEQ ID NO: 208192 - DNA, 15 bp, Homo sapiens
attcagcttgatgag

SEQ ID NO: 208193 - DNA, 15 bp, Homo sapiens
gattcagcttgatga

SEQ ID NO: 208194 - DNA, 15 bp, Homo sapiens
tgattcagcttgatg

SEQ ID NO: 208195 - DNA, 15 bp, Homo sapiens
ttgattcagcttgat

SEQ ID NO: 208196 - DNA, 15 bp, Homo sapiens
cttgattcagcttga

SEQ ID NO: 208197 - DNA, 15 bp, Homo sapiens
ccttgattcagcttg

SEQ ID NO: 208198 - DNA, 15 bp, Homo sapiens
cccttgattcagctt

SEQ ID NO: 208199 - DNA, 15 bp, Homo sapiens
tcccttgattcagct

SEQ ID NO: 208200 - DNA, 15 bp, Homo sapiens
gtcccttgattcagc

SEQ ID NO: 208201 - DNA, 15 bp, Homo sapiens
agtcccttgattcag

SEQ ID NO: 208202 - DNA, 15 bp, Homo sapiens
gagtcccttgattca

SEQ ID NO: 208203 - DNA, 15 bp, Homo sapiens
tgagtcccttgattc

SEQ ID NO: 208204 - DNA, 15 bp, Homo sapiens
atgagtcccttgatt

SEQ ID NO: 208205 - DNA, 15 bp, Homo sapiens
catgagtcccttgat

SEQ ID NO: 208206 - DNA, 15 bp, Homo sapiens
tcatgagtcccttga

SEQ ID NO: 208207 - DNA, 15 bp, Homo sapiens
atcatgagtcccttg

SEQ ID NO: 208208 - DNA, 15 bp, Homo sapiens
gatcatgagtccctt

SEQ ID NO: 208209 - DNA, 15 bp, Homo sapiens
ggatcatgagtccct

SEQ ID NO: 208210 - DNA, 15 bp, Homo sapiens
aggatcatgagtccc

SEQ ID NO: 208211 - DNA, 15 bp, Homo sapiens
gaggatcatgagtcc

SEQ ID NO: 208212 - DNA, 15 bp, Homo sapiens
agaggatcatgagtc

SEQ ID NO: 208213 - DNA, 15 bp, Homo sapiens
aagaggatcatgagt

SEQ ID NO: 208214 - DNA, 15 bp, Homo sapiens
gaagaggatcatgag

SEQ ID NO: 208215 - DNA, 15 bp, Homo sapiens
tgaagaggatcatga

SEQ ID NO: 208216 - DNA, 15 bp, Homo sapiens
ttgaagaggatcatg

SEQ ID NO: 208217 - DNA, 15 bp, Homo sapiens
tttgaagaggatcat

SEQ ID NO: 208218 - DNA, 15 bp, Homo sapiens
ctttgaagaggatca

SEQ ID NO: 208219 - DNA, 15 bp, Homo sapiens
actttgaagaggatc

SEQ ID NO: 208220 - DNA, 15 bp, Homo sapiens
aactttgaagaggat

SEQ ID NO: 208221 - DNA, 15 bp, Homo sapiens
gaactttgaagagga

SEQ ID NO: 208222 - DNA, 15 bp, Homo sapiens
ggaactttgaagagg

SEQ ID NO: 208223 - DNA, 15 bp, Homo sapiens
aggaactttgaagag

SEQ ID NO: 208224 - DNA, 15 bp, Homo sapiens
aaggaactttgaaga

SEQ ID NO: 208225 - DNA, 15 bp, Homo sapiens
gaaggaactttgaag

SEQ ID NO: 208226 - DNA, 15 bp, Homo sapiens
tgaaggaactttgaa

SEQ ID NO: 208227 - DNA, 15 bp, Homo sapiens
ctgaaggaactttga

SEQ ID NO: 208228 - DNA, 15 bp, Homo sapiens
cctgaaggaactttg

SEQ ID NO: 208229 - DNA, 15 bp, Homo sapiens
acctgaaggaacttt

SEQ ID NO: 208230 - DNA, 15 bp, Homo sapiens
aacctgaaggaactt

SEQ ID NO: 208231 - DNA, 15 bp, Homo sapiens
caacctgaaggaact

SEQ ID NO: 208232 - DNA, 15 bp, Homo sapiens
acaacctgaaggaac

SEQ ID NO: 208233 - DNA, 15 bp, Homo sapiens
aacaacctgaaggaa

SEQ ID NO: 208234 - DNA, 15 bp, Homo sapiens
caacaacctgaagga

SEQ ID NO: 208235 - DNA, 15 bp, Homo sapiens
ccaacaacctgaagg

SEQ ID NO: 208236 - DNA, 15 bp, Homo sapiens
gccaacaacctgaag

SEQ ID NO: 208237 - DNA, 15 bp, Homo sapiens
tgccaacaacctgaa

SEQ ID NO: 208238 - DNA, 15 bp, Homo sapiens
ctgccaacaacctga

SEQ ID NO: 208239 - DNA, 15 bp, Homo sapiens
tctgccaacaacctg

SEQ ID NO: 208240 - DNA, 15 bp, Homo sapiens
ttctgccaacaacct

SEQ ID NO: 208241 - DNA, 15 bp, Homo sapiens
attctgccaacaacc

SEQ ID NO: 208242 - DNA, 15 bp, Homo sapiens
aattctgccaacaac

SEQ ID NO: 208243 - DNA, 15 bp, Homo sapiens
aaattctgccaacaa

SEQ ID NO: 208244 - DNA, 15 bp, Homo sapiens
taaattctgccaaca

SEQ ID NO: 208245 - DNA, 15 bp, Homo sapiens
ctaaattctgccaac

SEQ ID NO: 208246 - DNA, 15 bp, Homo sapiens
actaaattctgccaa

SEQ ID NO: 208247 - DNA, 15 bp, Homo sapiens
aactaaattctgcca

SEQ ID NO: 208248 - DNA, 15 bp, Homo sapiens
gaactaaattctgcc

SEQ ID NO: 208249 - DNA, 15 bp, Homo sapiens
ggaactaaattctgc

SEQ ID NO: 208250 - DNA, 15 bp, Homo sapiens
aggaactaaattctg

SEQ ID NO: 208251 - DNA, 15 bp, Homo sapiens
aaggaactaaattct

SEQ ID NO: 208252 - DNA, 15 bp, Homo sapiens
caaggaactaaattc

SEQ ID NO: 208253 - DNA, 15 bp, Homo sapiens
acaaggaactaaatt

SEQ ID NO: 208254 - DNA, 15 bp, Homo sapiens
cacaaggaactaaat

SEQ ID NO: 208255 - DNA, 15 bp, Homo sapiens
tcacaaggaactaaa

SEQ ID NO: 208256 - DNA, 15 bp, Homo sapiens
atcacaaggaactaa

SEQ ID NO: 208257 - DNA, 15 bp, Homo sapiens
aatcacaaggaacta

SEQ ID NO: 208258 - DNA, 15 bp, Homo sapiens
caatcacaaggaact

SEQ ID NO: 208259 - DNA, 15 bp, Homo sapiens
acaatcacaaggaac

SEQ ID NO: 208260 - DNA, 15 bp, Homo sapiens
tacaatcacaaggaa

SEQ ID NO: 208261 - DNA, 15 bp, Homo sapiens
ctacaatcacaagga

SEQ ID NO: 208262 - DNA, 15 bp, Homo sapiens
cctacaatcacaagg

SEQ ID NO: 208263 - DNA, 15 bp, Homo sapiens
tcctacaatcacaag

SEQ ID NO: 208264 - DNA, 15 bp, Homo sapiens
gtcctacaatcacaa

SEQ ID NO: 208265 - DNA, 15 bp, Homo sapiens
agtcctacaatcaca

SEQ ID NO: 208266 - DNA, 15 bp, Homo sapiens
cagtcctacaatcac

SEQ ID NO: 208267 - DNA, 15 bp, Homo sapiens
tcagtcctacaatca

SEQ ID NO: 208268 - DNA, 15 bp, Homo sapiens
ctcagtcctacaatc

SEQ ID NO: 208269 - DNA, 15 bp, Homo sapiens
cctcagtcctacaat

SEQ ID NO: 208270 - DNA, 15 bp, Homo sapiens
ccctcagtcctacaa

SEQ ID NO: 208271 - DNA, 15 bp, Homo sapiens
gccctcagtcctaca

SEQ ID NO: 208272 - DNA, 15 bp, Homo sapiens
ggccctcagtcctac

SEQ ID NO: 208273 - DNA, 15 bp, Homo sapiens
gggccctcagtccta

SEQ ID NO: 208274 - DNA, 15 bp, Homo sapiens
cgggccctcagtcct

SEQ ID NO: 208275 - DNA, 15 bp, Homo sapiens
acgggccctcagtcc

SEQ ID NO: 208276 - DNA, 15 bp, Homo sapiens
aacgggccctcagtc

SEQ ID NO: 208277 - DNA, 15 bp, Homo sapiens
aaacgggccctcagt

SEQ ID NO: 208278 - DNA, 15 bp, Homo sapiens
aaaacgggccctcag

SEQ ID NO: 208279 - DNA, 15 bp, Homo sapiens
gaaaacgggccctca

SEQ ID NO: 208280 - DNA, 15 bp, Homo sapiens
agaaaacgggccctc

SEQ ID NO: 208281 - DNA, 15 bp, Homo sapiens
gagaaaacgggccct

SEQ ID NO: 208282 - DNA, 15 bp, Homo sapiens
tgagaaaacgggccc

SEQ ID NO: 208283 - DNA, 15 bp, Homo sapiens
gtgagaaaacgggcc

SEQ ID NO: 208284 - DNA, 15 bp, Homo sapiens
agtgagaaaacgggc

SEQ ID NO: 208285 - DNA, 15 bp, Homo sapiens
cagtgagaaaacggg

SEQ ID NO: 208286 - DNA, 15 bp, Homo sapiens
ccagtgagaaaacgg

SEQ ID NO: 208287 - DNA, 15 bp, Homo sapiens
gccagtgagaaaacg

SEQ ID NO: 208288 - DNA, 15 bp, Homo sapiens
agccagtgagaaaac

SEQ ID NO: 208289 - DNA, 15 bp, Homo sapiens
cagccagtgagaaaa

SEQ ID NO: 208290 - DNA, 15 bp, Homo sapiens
gcagccagtgagaaa

SEQ ID NO: 208291 - DNA, 15 bp, Homo sapiens
agcagccagtgagaa

SEQ ID NO: 208292 - DNA, 15 bp, Homo sapiens
cagcagccagtgaga

SEQ ID NO: 208293 - DNA, 15 bp, Homo sapiens
ccagcagccagtgag

SEQ ID NO: 208294 - DNA, 15 bp, Homo sapiens
gccagcagccagtga

SEQ ID NO: 208295 - DNA, 15 bp, Homo sapiens
ggccagcagccagtg

SEQ ID NO: 208296 - DNA, 15 bp, Homo sapiens
tggccagcagccagt

SEQ ID NO: 208297 - DNA, 15 bp, Homo sapiens
ctggccagcagccag

SEQ ID NO: 208298 - DNA, 15 bp, Homo sapiens
cctggccagcagcca

SEQ ID NO: 208299 - DNA, 15 bp, Homo sapiens
ccctggccagcagcc

SEQ ID NO: 208300 - DNA, 15 bp, Homo sapiens
cccctggccagcagc

SEQ ID NO: 208301 - DNA, 15 bp, Homo sapiens
acccctggccagcag

SEQ ID NO: 208302 - DNA, 15 bp, Homo sapiens
aacccctggccagca

SEQ ID NO: 208303 - DNA, 15 bp, Homo sapiens
caacccctggccagc

SEQ ID NO: 208304 - DNA, 15 bp, Homo sapiens
gcaacccctggccag

SEQ ID NO: 208305 - DNA, 15 bp, Homo sapiens
agcaacccctggcca

SEQ ID NO: 208306 - DNA, 15 bp, Homo sapiens
gagcaacccctggcc

SEQ ID NO: 208307 - DNA, 15 bp, Homo sapiens
ggagcaacccctggc

SEQ ID NO: 208308 - DNA, 15 bp, Homo sapiens
gggagcaacccctgg

SEQ ID NO: 208309 - DNA, 15 bp, Homo sapiens
tgggagcaacccctg

SEQ ID NO: 208310 - DNA, 15 bp, Homo sapiens
ctgggagcaacccct

SEQ ID NO: 208311 - DNA, 15 bp, Homo sapiens
tctgggagcaacccc

SEQ ID NO: 208312 - DNA, 15 bp, Homo sapiens
atctgggagcaaccc

SEQ ID NO: 208313 - DNA, 15 bp, Homo sapiens
tatctgggagcaacc

SEQ ID NO: 208314 - DNA, 15 bp, Homo sapiens
atatctgggagcaac

SEQ ID NO: 208315 - DNA, 15 bp, Homo sapiens
aatatctgggagcaa

SEQ ID NO: 208316 - DNA, 15 bp, Homo sapiens
aaatatctgggagca

SEQ ID NO: 208317 - DNA, 15 bp, Homo sapiens
taaatatctgggagc

SEQ ID NO: 208318 - DNA, 15 bp, Homo sapiens
ttaaatatctgggag

SEQ ID NO: 208319 - DNA, 15 bp, Homo sapiens
tttaaatatctggga

SEQ ID NO: 208320 - DNA, 15 bp, Homo sapiens
ctttaaatatctggg

SEQ ID NO: 208321 - DNA, 15 bp, Homo sapiens
cctttaaatatctgg

SEQ ID NO: 208322 - DNA, 15 bp, Homo sapiens
gcctttaaatatctg

SEQ ID NO: 208323 - DNA, 15 bp, Homo sapiens
agcctttaaatatct

SEQ ID NO: 208324 - DNA, 15 bp, Homo sapiens
gagcctttaaatatc

SEQ ID NO: 208325 - DNA, 15 bp, Homo sapiens
tgagcctttaaatat

SEQ ID NO: 208326 - DNA, 15 bp, Homo sapiens
atgagcctttaaata

SEQ ID NO: 208327 - DNA, 15 bp, Homo sapiens
catgagcctttaaat

SEQ ID NO: 208328 - DNA, 15 bp, Homo sapiens
gcatgagcctttaaa

SEQ ID NO: 208329 - DNA, 15 bp, Homo sapiens
ggcatgagcctttaa

SEQ ID NO: 208330 - DNA, 15 bp, Homo sapiens
gggcatgagccttta

SEQ ID NO: 208331 - DNA, 15 bp, Homo sapiens
agggcatgagccttt

SEQ ID NO: 208332 - DNA, 15 bp, Homo sapiens
tagggcatgagcctt

SEQ ID NO: 208333 - DNA, 15 bp, Homo sapiens
ctagggcatgagcct

SEQ ID NO: 208334 - DNA, 15 bp, Homo sapiens
gctagggcatgagcc

SEQ ID NO: 208335 - DNA, 15 bp, Homo sapiens
ggctagggcatgagc

SEQ ID NO: 208336 - DNA, 15 bp, Homo sapiens
gggctagggcatgag

SEQ ID NO: 208337 - DNA, 15 bp, Homo sapiens
tgggctagggcatga

SEQ ID NO: 208338 - DNA, 15 bp, Homo sapiens
atgggctagggcatg

SEQ ID NO: 208339 - DNA, 15 bp, Homo sapiens
catgggctagggcat

SEQ ID NO: 208340 - DNA, 15 bp, Homo sapiens
tcatgggctagggca

SEQ ID NO: 208341 - DNA, 15 bp, Homo sapiens
gtcatgggctagggc

SEQ ID NO: 208342 - DNA, 15 bp, Homo sapiens
tgtcatgggctaggg

SEQ ID NO: 208343 - DNA, 15 bp, Homo sapiens
ctgtcatgggctagg

SEQ ID NO: 208344 - DNA, 15 bp, Homo sapiens
actgtcatgggctag

SEQ ID NO: 208345 - DNA, 15 bp, Homo sapiens
gactgtcatgggcta

SEQ ID NO: 208346 - DNA, 15 bp, Homo sapiens
agactgtcatgggct

SEQ ID NO: 208347 - DNA, 15 bp, Homo sapiens
gagactgtcatgggc

SEQ ID NO: 208348 - DNA, 15 bp, Homo sapiens
tgagactgtcatggg

SEQ ID NO: 208349 - DNA, 15 bp, Homo sapiens
gtgagactgtcatgg

SEQ ID NO: 208350 - DNA, 15 bp, Homo sapiens
tgtgagactgtcatg

SEQ ID NO: 208351 - DNA, 15 bp, Homo sapiens
ttgtgagactgtcat

SEQ ID NO: 208352 - DNA, 15 bp, Homo sapiens
gttgtgagactgtca

SEQ ID NO: 208353 - DNA, 15 bp, Homo sapiens
tgttgtgagactgtc

SEQ ID NO: 208354 - DNA, 15 bp, Homo sapiens
atgttgtgagactgt

SEQ ID NO: 208355 - DNA, 15 bp, Homo sapiens
catgttgtgagactg

SEQ ID NO: 208356 - DNA, 15 bp, Homo sapiens
ccatgttgtgagact

SEQ ID NO: 208357 - DNA, 15 bp, Homo sapiens
gccatgttgtgagac

SEQ ID NO: 208358 - DNA, 15 bp, Homo sapiens
tgccatgttgtgaga

SEQ ID NO: 208359 - DNA, 15 bp, Homo sapiens
ctgccatgttgtgag

SEQ ID NO: 208360 - DNA, 15 bp, Homo sapiens
gctgccatgttgtga

SEQ ID NO: 208361 - DNA, 15 bp, Homo sapiens
agctgccatgttgtg

SEQ ID NO: 208362 - DNA, 15 bp, Homo sapiens
cagctgccatgttgt

SEQ ID NO: 208363 - DNA, 15 bp, Homo sapiens
tcagctgccatgttg

SEQ ID NO: 208364 - DNA, 15 bp, Homo sapiens
gtcagctgccatgtt

SEQ ID NO: 208365 - DNA, 15 bp, Homo sapiens
agtcagctgccatgt

SEQ ID NO: 208366 - DNA, 15 bp, Homo sapiens
aagtcagctgccatg

SEQ ID NO: 208367 - DNA, 15 bp, Homo sapiens
gaagtcagctgccat

SEQ ID NO: 208368 - DNA, 15 bp, Homo sapiens
agaagtcagctgcca

SEQ ID NO: 208369 - DNA, 15 bp, Homo sapiens
aagaagtcagctgcc

SEQ ID NO: 208370 - DNA, 15 bp, Homo sapiens
gaagaagtcagctgc

SEQ ID NO: 208371 - DNA, 15 bp, Homo sapiens
tgaagaagtcagctg

SEQ ID NO: 208372 - DNA, 15 bp, Homo sapiens
ttgaagaagtcagct

SEQ ID NO: 208373 - DNA, 15 bp, Homo sapiens
tttgaagaagtcagc

SEQ ID NO: 208374 - DNA, 15 bp, Homo sapiens
ttttgaagaagtcag

SEQ ID NO: 208375 - DNA, 15 bp, Homo sapiens
gttttgaagaagtca

SEQ ID NO: 208376 - DNA, 15 bp, Homo sapiens
ggttttgaagaagtc

SEQ ID NO: 208377 - DNA, 15 bp, Homo sapiens
tggttttgaagaagt

SEQ ID NO: 208378 - DNA, 15 bp, Homo sapiens
ctggttttgaagaag

SEQ ID NO: 208379 - DNA, 15 bp, Homo sapiens
gctggttttgaagaa

SEQ ID NO: 208380 - DNA, 15 bp, Homo sapiens
tgctggttttgaaga

SEQ ID NO: 208381 - DNA, 15 bp, Homo sapiens
ctgctggttttgaag

SEQ ID NO: 208382 - DNA, 15 bp, Homo sapiens
cctgctggttttgaa

SEQ ID NO: 208383 - DNA, 15 bp, Homo sapiens
tcctgctggttttga

SEQ ID NO: 208384 - DNA, 15 bp, Homo sapiens
ctcctgctggttttg

SEQ ID NO: 208385 - DNA, 15 bp, Homo sapiens
tctcctgctggtttt

SEQ ID NO: 208386 - DNA, 15 bp, Homo sapiens
ttctcctgctggttt

SEQ ID NO: 208387 - DNA, 15 bp, Homo sapiens
attctcctgctggtt

SEQ ID NO: 208388 - DNA, 15 bp, Homo sapiens
gattctcctgctggt

SEQ ID NO: 208389 - DNA, 15 bp, Homo sapiens
agattctcctgctgg

SEQ ID NO: 208390 - DNA, 15 bp, Homo sapiens
aagattctcctgctg

SEQ ID NO: 208391 - DNA, 15 bp, Homo sapiens
caagattctcctgct

SEQ ID NO: 208392 - DNA, 15 bp, Homo sapiens
gcaagattctcctgc

SEQ ID NO: 208393 - DNA, 15 bp, Homo sapiens
agcaagattctcctg

SEQ ID NO: 208394 - DNA, 15 bp, Homo sapiens
gagcaagattctcct

SEQ ID NO: 208395 - DNA, 15 bp, Homo sapiens
agagcaagattctcc

SEQ ID NO: 208396 - DNA, 15 bp, Homo sapiens
tagagcaagattctc

SEQ ID NO: 208397 - DNA, 15 bp, Homo sapiens
ctagagcaagattct

SEQ ID NO: 208398 - DNA, 15 bp, Homo sapiens
actagagcaagattc

SEQ ID NO: 208399 - DNA, 15 bp, Homo sapiens
gactagagcaagatt

SEQ ID NO: 208400 - DNA, 15 bp, Homo sapiens
agactagagcaagat

SEQ ID NO: 208401 - DNA, 15 bp, Homo sapiens
tagactagagcaaga

SEQ ID NO: 208402 - DNA, 15 bp, Homo sapiens
gtagactagagcaag

SEQ ID NO: 208403 - DNA, 15 bp, Homo sapiens
ggtagactagagcaa

SEQ ID NO: 208404 - DNA, 15 bp, Homo sapiens
tggtagactagagca

SEQ ID NO: 208405 - DNA, 15 bp, Homo sapiens
gtggtagactagagc

SEQ ID NO: 208406 - DNA, 15 bp, Homo sapiens
tgtggtagactagag

SEQ ID NO: 208407 - DNA, 15 bp, Homo sapiens
atgtggtagactaga

SEQ ID NO: 208408 - DNA, 15 bp, Homo sapiens
tatgtggtagactag

SEQ ID NO: 208409 - DNA, 15 bp, Homo sapiens
ttatgtggtagacta

SEQ ID NO: 208410 - DNA, 15 bp, Homo sapiens
gttatgtggtagact

SEQ ID NO: 208411 - DNA, 15 bp, Homo sapiens
ggttatgtggtagac

SEQ ID NO: 208412 - DNA, 15 bp, Homo sapiens
aggttatgtggtaga

SEQ ID NO: 208413 - DNA, 15 bp, Homo sapiens
taggttatgtggtag

SEQ ID NO: 208414 - DNA, 15 bp, Homo sapiens
ttaggttatgtggta

SEQ ID NO: 208415 - DNA, 15 bp, Homo sapiens
attaggttatgtggt

SEQ ID NO: 208416 - DNA, 15 bp, Homo sapiens
gattaggttatgtgg

SEQ ID NO: 208417 - DNA, 15 bp, Homo sapiens
tgattaggttatgtg

SEQ ID NO: 208418 - DNA, 15 bp, Homo sapiens
gtgattaggttatgt

SEQ ID NO: 208419 - DNA, 15 bp, Homo sapiens
tgtgattaggttatg

SEQ ID NO: 208420 - DNA, 15 bp, Homo sapiens
ctgtgattaggttat

SEQ ID NO: 208421 - DNA, 15 bp, Homo sapiens
cctgtgattaggtta

SEQ ID NO: 208422 - DNA, 15 bp, Homo sapiens
tcctgtgattaggtt

SEQ ID NO: 208423 - DNA, 15 bp, Homo sapiens
ctcctgtgattaggt

SEQ ID NO: 208424 - DNA, 15 bp, Homo sapiens
gctcctgtgattagg

SEQ ID NO: 208425 - DNA, 15 bp, Homo sapiens
cgctcctgtgattag

SEQ ID NO: 208426 - DNA, 15 bp, Homo sapiens
ccgctcctgtgatta

SEQ ID NO: 208427 - DNA, 15 bp, Homo sapiens
gccgctcctgtgatt

SEQ ID NO: 208428 - DNA, 15 bp, Homo sapiens
agccgctcctgtgat

SEQ ID NO: 208429 - DNA, 15 bp, Homo sapiens
tagccgctcctgtga

SEQ ID NO: 208430 - DNA, 15 bp, Homo sapiens
atagccgctcctgtg

SEQ ID NO: 208431 - DNA, 15 bp, Homo sapiens
gatagccgctcctgt

SEQ ID NO: 208432 - DNA, 15 bp, Homo sapiens
ggatagccgctcctg

SEQ ID NO: 208433 - DNA, 15 bp, Homo sapiens
gggatagccgctcct

SEQ ID NO: 208434 - DNA, 15 bp, Homo sapiens
cgggatagccgctcc

SEQ ID NO: 208435 - DNA, 15 bp, Homo sapiens
acgggatagccgctc

SEQ ID NO: 208436 - DNA, 15 bp, Homo sapiens
aacgggatagccgct

SEQ ID NO: 208437 - DNA, 15 bp, Homo sapiens
taacgggatagccgc

SEQ ID NO: 208438 - DNA, 15 bp, Homo sapiens
ataacgggatagccg

SEQ ID NO: 208439 - DNA, 15 bp, Homo sapiens
aataacgggatagcc

SEQ ID NO: 208440 - DNA, 15 bp, Homo sapiens
aaataacgggatagc

SEQ ID NO: 208441 - DNA, 15 bp, Homo sapiens
aaaataacgggatag

SEQ ID NO: 208442 - DNA, 15 bp, Homo sapiens
gaaaataacgggata

SEQ ID NO: 208443 - DNA, 15 bp, Homo sapiens
tgaaaataacgggat

SEQ ID NO: 208444 - DNA, 15 bp, Homo sapiens
gtgaaaataacggga

SEQ ID NO: 208445 - DNA, 15 bp, Homo sapiens
tgtgaaaataacggg

SEQ ID NO: 208446 - DNA, 15 bp, Homo sapiens
ctgtgaaaataacgg

SEQ ID NO: 208447 - DNA, 15 bp, Homo sapiens
tctgtgaaaataacg

SEQ ID NO: 208448 - DNA, 15 bp, Homo sapiens
atctgtgaaaataac

SEQ ID NO: 208449 - DNA, 15 bp, Homo sapiens
gatctgtgaaaataa

SEQ ID NO: 208450 - DNA, 15 bp, Homo sapiens
ggatctgtgaaaata

SEQ ID NO: 208451 - DNA, 15 bp, Homo sapiens
aggatctgtgaaaat

SEQ ID NO: 208452 - DNA, 15 bp, Homo sapiens
caggatctgtgaaaa

SEQ ID NO: 208453 - DNA, 15 bp, Homo sapiens
ccaggatctgtgaaa

SEQ ID NO: 208454 - DNA, 15 bp, Homo sapiens
accaggatctgtgaa

SEQ ID NO: 208455 - DNA, 15 bp, Homo sapiens
gaccaggatctgtga

SEQ ID NO: 208456 - DNA, 15 bp, Homo sapiens
tgaccaggatctgtg

SEQ ID NO: 208457 - DNA, 15 bp, Homo sapiens
gtgaccaggatctgt

SEQ ID NO: 208458 - DNA, 15 bp, Homo sapiens
tgtgaccaggatctg

SEQ ID NO: 208459 - DNA, 15 bp, Homo sapiens
atgtgaccaggatct

SEQ ID NO: 208460 - DNA, 15 bp, Homo sapiens
aatgtgaccaggatc

SEQ ID NO: 208461 - DNA, 15 bp, Homo sapiens
gaatgtgaccaggat

SEQ ID NO: 208462 - DNA, 15 bp, Homo sapiens
tgaatgtgaccagga

SEQ ID NO: 208463 - DNA, 15 bp, Homo sapiens
ttgaatgtgaccagg

SEQ ID NO: 208464 - DNA, 15 bp, Homo sapiens
cttgaatgtgaccag

SEQ ID NO: 208465 - DNA, 15 bp, Homo sapiens
ccttgaatgtgacca

SEQ ID NO: 208466 - DNA, 15 bp, Homo sapiens
cccttgaatgtgacc

SEQ ID NO: 208467 - DNA, 15 bp, Homo sapiens
ccccttgaatgtgac

SEQ ID NO: 208468 - DNA, 15 bp, Homo sapiens
tccccttgaatgtga

SEQ ID NO: 208469 - DNA, 15 bp, Homo sapiens
ctccccttgaatgtg

SEQ ID NO: 208470 - DNA, 15 bp, Homo sapiens
cctccccttgaatgt

SEQ ID NO: 208471 - DNA, 15 bp, Homo sapiens
ccctccccttgaatg

SEQ ID NO: 208472 - DNA, 15 bp, Homo sapiens
tccctccccttgaat

SEQ ID NO: 208473 - DNA, 15 bp, Homo sapiens
ttccctccccttgaa

SEQ ID NO: 208474 - DNA, 15 bp, Homo sapiens
gttccctccccttga

SEQ ID NO: 208475 - DNA, 15 bp, Homo sapiens
ggttccctccccttg

SEQ ID NO: 208476 - DNA, 15 bp, Homo sapiens
gggttccctcccctt

SEQ ID NO: 208477 - DNA, 15 bp, Homo sapiens
agggttccctcccct

SEQ ID NO: 208478 - DNA, 15 bp, Homo sapiens
aagggttccctcccc

SEQ ID NO: 208479 - DNA, 15 bp, Homo sapiens
gaagggttccctccc

SEQ ID NO: 208480 - DNA, 15 bp, Homo sapiens
agaagggttccctcc

SEQ ID NO: 208481 - DNA, 15 bp, Homo sapiens
cagaagggttccctc

SEQ ID NO: 208482 - DNA, 15 bp, Homo sapiens
acagaagggttccct

SEQ ID NO: 208483 - DNA, 15 bp, Homo sapiens
cacagaagggttccc

SEQ ID NO: 208484 - DNA, 15 bp, Homo sapiens
acacagaagggttcc

SEQ ID NO: 208485 - DNA, 15 bp, Homo sapiens
cacacagaagggttc

SEQ ID NO: 208486 - DNA, 15 bp, Homo sapiens
acacacagaagggtt

SEQ ID NO: 208487 - DNA, 15 bp, Homo sapiens
cacacacagaagggt

SEQ ID NO: 208488 - DNA, 15 bp, Homo sapiens
acacacacagaaggg

SEQ ID NO: 208489 - DNA, 15 bp, Homo sapiens
tacacacacagaagg

SEQ ID NO: 208490 - DNA, 15 bp, Homo sapiens
gtacacacacagaag

SEQ ID NO: 208491 - DNA, 15 bp, Homo sapiens
tgtacacacacagaa

SEQ ID NO: 208492 - DNA, 15 bp, Homo sapiens
gtgtacacacacaga

SEQ ID NO: 208493 - DNA, 15 bp, Homo sapiens
ggtgtacacacacag

SEQ ID NO: 208494 - DNA, 15 bp, Homo sapiens
tggtgtacacacaca

SEQ ID NO: 208495 - DNA, 15 bp, Homo sapiens
ctggtgtacacacac

SEQ ID NO: 208496 - DNA, 15 bp, Homo sapiens
cctggtgtacacaca

SEQ ID NO: 208497 - DNA, 15 bp, Homo sapiens
tcctggtgtacacac

SEQ ID NO: 208498 - DNA, 15 bp, Homo sapiens
ctcctggtgtacaca

SEQ ID NO: 208499 - DNA, 15 bp, Homo sapiens
cctcctggtgtacac

SEQ ID NO: 208500 - DNA, 15 bp, Homo sapiens
gcctcctggtgtaca

SEQ ID NO: 208501 - DNA, 15 bp, Homo sapiens
tgcctcctggtgtac

SEQ ID NO: 208502 - DNA, 15 bp, Homo sapiens
ctgcctcctggtgta

SEQ ID NO: 208503 - DNA, 15 bp, Homo sapiens
cctgcctcctggtgt

SEQ ID NO: 208504 - DNA, 15 bp, Homo sapiens
tcctgcctcctggtg

SEQ ID NO: 208505 - DNA, 15 bp, Homo sapiens
ttcctgcctcctggt

SEQ ID NO: 208506 - DNA, 15 bp, Homo sapiens
attcctgcctcctgg

SEQ ID NO: 208507 - DNA, 15 bp, Homo sapiens
aattcctgcctcctg

SEQ ID NO: 208508 - DNA, 15 bp, Homo sapiens
aaattcctgcctcct

SEQ ID NO: 208509 - DNA, 15 bp, Homo sapiens
aaaattcctgcctcc

SEQ ID NO: 208510 - DNA, 15 bp, Homo sapiens
aaaaattcctgcctc

SEQ ID NO: 208511 - DNA, 15 bp, Homo sapiens
aaaaaattcctgcct

SEQ ID NO: 208512 - DNA, 15 bp, Homo sapiens
aaaaaaattcctgcc

SEQ ID NO: 208513 - DNA, 15 bp, Homo sapiens
aaaaaaaattcctgc

SEQ ID NO: 208514 - DNA, 15 bp, Homo sapiens
aaaaaaaaattcctg

SEQ ID NO: 208515 - DNA, 15 bp, Homo sapiens
aaaaaaaaaattcct

SEQ ID NO: 208516 - DNA, 15 bp, Homo sapiens
gaaaaaaaaaattcc

SEQ ID NO: 208517 - DNA, 15 bp, Homo sapiens
agaaaaaaaaaattc

SEQ ID NO: 208518 - DNA, 15 bp, Homo sapiens
aagaaaaaaaaaatt

SEQ ID NO: 208519 - DNA, 15 bp, Homo sapiens
aaagaaaaaaaaaat

SEQ ID NO: 208520 - DNA, 15 bp, Homo sapiens
aaaagaaaaaaaaaa

SEQ ID NO: 208521 - DNA, 15 bp, Homo sapiens
aaaaagaaaaaaaaa

SEQ ID NO: 208522 - DNA, 15 bp, Homo sapiens
gaaaaagaaaaaaaa

SEQ ID NO: 208523 - DNA, 15 bp, Homo sapiens
agaaaaagaaaaaaa

SEQ ID NO: 208524 - DNA, 15 bp, Homo sapiens
aagaaaaagaaaaaa

SEQ ID NO: 208525 - DNA, 15 bp, Homo sapiens
aaagaaaaagaaaaa

SEQ ID NO: 208526 - DNA, 15 bp, Homo sapiens
caaaaaagaaaaaga

SEQ ID NO: 208527 - DNA, 15 bp, Homo sapiens
acaaaaaagaaaaag

SEQ ID NO: 208528 - DNA, 15 bp, Homo sapiens
aacaaaaaagaaaaa

SEQ ID NO: 208529 - DNA, 15 bp, Homo sapiens
taacaaaaaagaaaa

SEQ ID NO: 208530 - DNA, 15 bp, Homo sapiens
ttaacaaaaaagaaa

SEQ ID NO: 208531 - DNA, 15 bp, Homo sapiens
tttaacaaaaaagaa

SEQ ID NO: 208532 - DNA, 15 bp, Homo sapiens
ttttaacaaaaaaga

SEQ ID NO: 208533 - DNA, 15 bp, Homo sapiens
tttttaacaaaaaag

SEQ ID NO: 208534 - DNA, 15 bp, Homo sapiens
ctttttaacaaaaaa

SEQ ID NO: 208535 - DNA, 15 bp, Homo sapiens
actttttaacaaaaa

SEQ ID NO: 208536 - DNA, 15 bp, Homo sapiens
gactttttaacaaaa

SEQ ID NO: 208537 - DNA, 15 bp, Homo sapiens
agactttttaacaaa

SEQ ID NO: 208538 - DNA, 15 bp, Homo sapiens
aagactttttaacaa

SEQ ID NO: 208539 - DNA, 15 bp, Homo sapiens
taagactttttaaca

SEQ ID NO: 208540 - DNA, 15 bp, Homo sapiens
ttaagactttttaac

SEQ ID NO: 208541 - DNA, 15 bp, Homo sapiens
tttaagactttttaa

SEQ ID NO: 208542 - DNA, 15 bp, Homo sapiens
ctttaagacttttta

SEQ ID NO: 208543 - DNA, 15 bp, Homo sapiens
actttaagacttttt

SEQ ID NO: 208544 - DNA, 15 bp, Homo sapiens
gactttaagactttt

SEQ ID NO: 208545 - DNA, 15 bp, Homo sapiens
agactttaagacttt

SEQ ID NO: 208546 - DNA, 15 bp, Homo sapiens
aagactttaagactt

SEQ ID NO: 208547 - DNA, 15 bp, Homo sapiens
aaagactttaagact

SEQ ID NO: 208548 - DNA, 15 bp, Homo sapiens
aaaagactttaagac

SEQ ID NO: 208549 - DNA, 15 bp, Homo sapiens
taaaagactttaaga

SEQ ID NO: 208550 - DNA, 15 bp, Homo sapiens
ataaaagactttaag

SEQ ID NO: 208551 - DNA, 15 bp, Homo sapiens
gataaaagactttaa

SEQ ID NO: 208552 - DNA, 15 bp, Homo sapiens
ggataaaagacttta

SEQ ID NO: 208553 - DNA, 15 bp, Homo sapiens
gggataaaagacttt

SEQ ID NO: 208554 - DNA, 15 bp, Homo sapiens
agggataaaagactt

SEQ ID NO: 208555 - DNA, 15 bp, Homo sapiens
tagggataaaagact

SEQ ID NO: 208556 - DNA, 15 bp, Homo sapiens
ttagggataaaagac

SEQ ID NO: 208557 - DNA, 15 bp, Homo sapiens
tttagggataaaaga

SEQ ID NO: 208558 - DNA, 15 bp, Homo sapiens
ctttagggataaaag

SEQ ID NO: 208559 - DNA, 15 bp, Homo sapiens
cctttagggataaaa

SEQ ID NO: 208560 - DNA, 15 bp, Homo sapiens
tcctttagggataaa

SEQ ID NO: 208561 - DNA, 15 bp, Homo sapiens
ctcctttagggataa

SEQ ID NO: 208562 - DNA, 15 bp, Homo sapiens
cctcctttagggata

SEQ ID NO: 208563 - DNA, 15 bp, Homo sapiens
gcctcctttagggat

SEQ ID NO: 208564 - DNA, 15 bp, Homo sapiens
tgcctcctttaggga

SEQ ID NO: 208565 - DNA, 15 bp, Homo sapiens
ctgcctcctttaggg

SEQ ID NO: 208566 - DNA, 15 bp, Homo sapiens
cctgcctcctttagg

SEQ ID NO: 208567 - DNA, 15 bp, Homo sapiens
tcctgcctcctttag

SEQ ID NO: 208568 - DNA, 15 bp, Homo sapiens
ttcctgcctccttta

SEQ ID NO: 208569 - DNA, 15 bp, Homo sapiens
attcctgcctccttt

SEQ ID NO: 208570 - DNA, 15 bp, Homo sapiens
aattcctgcctcctt

SEQ ID NO: 208571 - DNA, 15 bp, Homo sapiens
caaaattcctgcctc

SEQ ID NO: 208572 - DNA, 15 bp, Homo sapiens
tcaaaattcctgcct

SEQ ID NO: 208573 - DNA, 15 bp, Homo sapiens
ctcaaaattcctgcc

SEQ ID NO: 208574 - DNA, 15 bp, Homo sapiens
tctcaaaattcctgc

SEQ ID NO: 208575 - DNA, 15 bp, Homo sapiens
ctctcaaaattcctg

SEQ ID NO: 208576 - DNA, 15 bp, Homo sapiens
gctctcaaaattcct

SEQ ID NO: 208577 - DNA, 15 bp, Homo sapiens
ggctctcaaaattcc

SEQ ID NO: 208578 - DNA, 15 bp, Homo sapiens
tggctctcaaaattc

SEQ ID NO: 208579 - DNA, 15 bp, Homo sapiens
atggctctcaaaatt

SEQ ID NO: 208580 - DNA, 15 bp, Homo sapiens
gatggctctcaaaat

SEQ ID NO: 208581 - DNA, 15 bp, Homo sapiens
tgatggctctcaaaa

SEQ ID NO: 208582 - DNA, 15 bp, Homo sapiens
ctgatggctctcaaa

SEQ ID NO: 208583 - DNA, 15 bp, Homo sapiens
tctgatggctctcaa

SEQ ID NO: 208584 - DNA, 15 bp, Homo sapiens
ttctgatggctctca

SEQ ID NO: 208585 - DNA, 15 bp, Homo sapiens
attctgatggctctc

SEQ ID NO: 208586 - DNA, 15 bp, Homo sapiens
aattctgatggctct

SEQ ID NO: 208587 - DNA, 15 bp, Homo sapiens
gaattctgatggctc

SEQ ID NO: 208588 - DNA, 15 bp, Homo sapiens
agaattctgatggct

SEQ ID NO: 208589 - DNA, 15 bp, Homo sapiens
cagaattctgatggc

SEQ ID NO: 208590 - DNA, 15 bp, Homo sapiens
gcagaattctgatgg

SEQ ID NO: 208591 - DNA, 15 bp, Homo sapiens
ggcagaattctgatg

SEQ ID NO: 208592 - DNA, 15 bp, Homo sapiens
aggcagaattctgat

SEQ ID NO: 208593 - DNA, 15 bp, Homo sapiens
taggcagaattctga

SEQ ID NO: 208594 - DNA, 15 bp, Homo sapiens
gtaggcagaattctg

SEQ ID NO: 208595 - DNA, 15 bp, Homo sapiens
ggtaggcagaattct

SEQ ID NO: 208596 - DNA, 15 bp, Homo sapiens
tggtaggcagaattc

SEQ ID NO: 208597 - DNA, 15 bp, Homo sapiens
gtggtaggcagaatt

SEQ ID NO: 208598 - DNA, 15 bp, Homo sapiens
tgtggtaggcagaat

SEQ ID NO: 208599 - DNA, 15 bp, Homo sapiens
ctgtggtaggcagaa

SEQ ID NO: 208600 - DNA, 15 bp, Homo sapiens
gctgtggtaggcaga

SEQ ID NO: 208601 - DNA, 15 bp, Homo sapiens
ggctgtggtaggcag

SEQ ID NO: 208602 - DNA, 15 bp, Homo sapiens
gggctgtggtaggca

SEQ ID NO: 208603 - DNA, 15 bp, Homo sapiens
tgggctgtggtaggc

SEQ ID NO: 208604 - DNA, 15 bp, Homo sapiens
ctgggctgtggtagg

SEQ ID NO: 208605 - DNA, 15 bp, Homo sapiens
tctgggctgtggtag

SEQ ID NO: 208606 - DNA, 15 bp, Homo sapiens
ttctgggctgtggta

SEQ ID NO: 208607 - DNA, 15 bp, Homo sapiens
tttctgggctgtggt

SEQ ID NO: 208608 - DNA, 15 bp, Homo sapiens
atttctgggctgtgg

SEQ ID NO: 208609 - DNA, 15 bp, Homo sapiens
gatttctgggctgtg

SEQ ID NO: 208610 - DNA, 15 bp, Homo sapiens
agatttctgggctgt

SEQ ID NO: 208611 - DNA, 15 bp, Homo sapiens
cagatttctgggctg

SEQ ID NO: 208612 - DNA, 15 bp, Homo sapiens
gcagatttctgggct

SEQ ID NO: 208613 - DNA, 15 bp, Homo sapiens
tgcagatttctgggc

SEQ ID NO: 208614 - DNA, 15 bp, Homo sapiens
atgcagatttctggg

SEQ ID NO: 208615 - DNA, 15 bp, Homo sapiens
aatgcagatttctgg

SEQ ID NO: 208616 - DNA, 15 bp, Homo sapiens
aaatgcagatttctg

SEQ ID NO: 208617 - DNA, 15 bp, Homo sapiens
aaaatgcagatttct

SEQ ID NO: 208618 - DNA, 15 bp, Homo sapiens
aaaaatgcagatttc

SEQ ID NO: 208619 - DNA, 15 bp, Homo sapiens
gaaaaatgcagattt

SEQ ID NO: 208620 - DNA, 15 bp, Homo sapiens
tgaaaaatgcagatt

SEQ ID NO: 208621 - DNA, 15 bp, Homo sapiens
gtgaaaaatgcagat

SEQ ID NO: 208622 - DNA, 15 bp, Homo sapiens
tgtgaaaaatgcaga

SEQ ID NO: 208623 - DNA, 15 bp, Homo sapiens
ttgtgaaaaatgcag

SEQ ID NO: 208624 - DNA, 15 bp, Homo sapiens
cttgtgaaaaatgca

SEQ ID NO: 208625 - DNA, 15 bp, Homo sapiens
acttgtgaaaaatgc

SEQ ID NO: 208626 - DNA, 15 bp, Homo sapiens
gacttgtgaaaaatg

SEQ ID NO: 208627 - DNA, 15 bp, Homo sapiens
agacttgtgaaaaat

SEQ ID NO: 208628 - DNA, 15 bp, Homo sapiens
gagacttgtgaaaaa

SEQ ID NO: 208629 - DNA, 15 bp, Homo sapiens
ggagacttgtgaaaa

SEQ ID NO: 208630 - DNA, 15 bp, Homo sapiens
tggagacttgtgaaa

SEQ ID NO: 208631 - DNA, 15 bp, Homo sapiens
ctggagacttgtgaa

SEQ ID NO: 208632 - DNA, 15 bp, Homo sapiens
gctggagacttgtga

SEQ ID NO: 208633 - DNA, 15 bp, Homo sapiens
ggctggagacttgtg

SEQ ID NO: 208634 - DNA, 15 bp, Homo sapiens
tggctggagacttgt

SEQ ID NO: 208635 - DNA, 15 bp, Homo sapiens
atggctggagacttg

SEQ ID NO: 208636 - DNA, 15 bp, Homo sapiens
catggctggagactt

SEQ ID NO: 208637 - DNA, 15 bp, Homo sapiens
tcatggctggagact

SEQ ID NO: 208638 - DNA, 15 bp, Homo sapiens
atcatggctggagac

SEQ ID NO: 208639 - DNA, 15 bp, Homo sapiens
catcatggctggaga

SEQ ID NO: 208640 - DNA, 15 bp, Homo sapiens
acatcatggctggag

SEQ ID NO: 208641 - DNA, 15 bp, Homo sapiens
aacatcatggctgga

SEQ ID NO: 208642 - DNA, 15 bp, Homo sapiens
aaacatcatggctgg

SEQ ID NO: 208643 - DNA, 15 bp, Homo sapiens
gaaacatcatggctg

SEQ ID NO: 208644 - DNA, 15 bp, Homo sapiens
agaaacatcatggct

SEQ ID NO: 208645 - DNA, 15 bp, Homo sapiens
cagaaacatcatggc

SEQ ID NO: 208646 - DNA, 15 bp, Homo sapiens
tcagaaacatcatgg

SEQ ID NO: 208647 - DNA, 15 bp, Homo sapiens
atcagaaacatcatg

SEQ ID NO: 208648 - DNA, 15 bp, Homo sapiens
catcagaaacatcat

SEQ ID NO: 208649 - DNA, 15 bp, Homo sapiens
ccatcagaaacatca

SEQ ID NO: 208650 - DNA, 15 bp, Homo sapiens
gccatcagaaacatc

SEQ ID NO: 208651 - DNA, 15 bp, Homo sapiens
agccatcagaaacat

SEQ ID NO: 208652 - DNA, 15 bp, Homo sapiens
gagccatcagaaaca

SEQ ID NO: 208653 - DNA, 15 bp, Homo sapiens
tgagccatcagaaac

SEQ ID NO: 208654 - DNA, 15 bp, Homo sapiens
gtgagccatcagaaa

SEQ ID NO: 208655 - DNA, 15 bp, Homo sapiens
tgtgagccatcagaa

SEQ ID NO: 208656 - DNA, 15 bp, Homo sapiens
gtgtgagccatcaga

SEQ ID NO: 208657 - DNA, 15 bp, Homo sapiens
agtgtgagccatcag

SEQ ID NO: 208658 - DNA, 15 bp, Homo sapiens
cagtgtgagccatca

SEQ ID NO: 208659 - DNA, 15 bp, Homo sapiens
gcagtgtgagccatc

SEQ ID NO: 208660 - DNA, 15 bp, Homo sapiens
agcagtgtgagccat

SEQ ID NO: 208661 - DNA, 15 bp, Homo sapiens
aagcagtgtgagcca

SEQ ID NO: 208662 - DNA, 15 bp, Homo sapiens
aaagcagtgtgagcc

SEQ ID NO: 208663 - DNA, 15 bp, Homo sapiens
taaagcagtgtgagc

SEQ ID NO: 208664 - DNA, 15 bp, Homo sapiens
ataaagcagtgtgag

SEQ ID NO: 208665 - DNA, 15 bp, Homo sapiens
aataaagcagtgtga

SEQ ID NO: 208666 - DNA, 15 bp, Homo sapiens
gaataaagcagtgtg

SEQ ID NO: 208667 - DNA, 15 bp, Homo sapiens
ggaataaagcagtgt

SEQ ID NO: 208668 - DNA, 15 bp, Homo sapiens
tggaataaagcagtg

SEQ ID NO: 208669 - DNA, 15 bp, Homo sapiens
atggaataaagcagt

SEQ ID NO: 208670 - DNA, 15 bp, Homo sapiens
aatggaataaagcag

SEQ ID NO: 208671 - DNA, 15 bp, Homo sapiens
aaatggaataaagca

SEQ ID NO: 208672 - DNA, 15 bp, Homo sapiens
aaaatggaataaagc

SEQ ID NO: 208673 - DNA, 15 bp, Homo sapiens
aaaaatggaataaag

SEQ ID NO: 208674 - DNA, 15 bp, Homo sapiens
taaaaatggaataaa

SEQ ID NO: 208675 - DNA, 15 bp, Homo sapiens
ttaaaaatggaataa

SEQ ID NO: 208676 - DNA, 15 bp, Homo sapiens
tttaaaaatggaata

SEQ ID NO: 208677 - DNA, 15 bp, Homo sapiens
ctttaaaaatggaat

SEQ ID NO: 208678 - DNA, 15 bp, Homo sapiens
tctttaaaaatggaa

SEQ ID NO: 208679 - DNA, 15 bp, Homo sapiens
ctctttaaaaatgga

SEQ ID NO: 208680 - DNA, 15 bp, Homo sapiens
actctttaaaaatgg

SEQ ID NO: 208681 - DNA, 15 bp, Homo sapiens
tactctttaaaaatg

SEQ ID NO: 208682 - DNA, 15 bp, Homo sapiens
atactctttaaaaat

SEQ ID NO: 208683 - DNA, 15 bp, Homo sapiens
aatactctttaaaaa

SEQ ID NO: 208684 - DNA, 15 bp, Homo sapiens
aaatactctttaaaa

SEQ ID NO: 208685 - DNA, 15 bp, Homo sapiens
aaaatactctttaaa

SEQ ID NO: 208686 - DNA, 15 bp, Homo sapiens
aaaaatactctttaa

SEQ ID NO: 208687 - DNA, 15 bp, Homo sapiens
taaaaatactcttta

SEQ ID NO: 208688 - DNA, 15 bp, Homo sapiens
ataaaaatactcttt

SEQ ID NO: 208689 - DNA, 15 bp, Homo sapiens
aataaaaatactctt

SEQ ID NO: 208690 - DNA, 15 bp, Homo sapiens
caataaaaatactct

SEQ ID NO: 208691 - DNA, 15 bp, Homo sapiens
tcaataaaaatactc

SEQ ID NO: 208692 - DNA, 15 bp, Homo sapiens
ttcaataaaaatact

SEQ ID NO: 208693 - DNA, 15 bp, Homo sapiens
tttcaataaaaatac

SEQ ID NO: 208694 - DNA, 15 bp, Homo sapiens
ttttcaataaaaata

SEQ ID NO: 208695 - DNA, 15 bp, Homo sapiens
cttttcaataaaaat

SEQ ID NO: 208696 - DNA, 15 bp, Homo sapiens
gcttttcaataaaaa

SEQ ID NO: 208697 - DNA, 15 bp, Homo sapiens
tgcttttcaataaaa

SEQ ID NO: 208698 - DNA, 15 bp, Homo sapiens
atgcttttcaataaa

SEQ ID NO: 208699 - DNA, 15 bp, Homo sapiens
aatgcttttcaataa

SEQ ID NO: 208700 - DNA, 15 bp, Homo sapiens
taatgcttttcaata

SEQ ID NO: 208701 - DNA, 15 bp, Homo sapiens
ctaatgcttttcaat

SEQ ID NO: 208702 - DNA, 15 bp, Homo sapiens
cctaatgcttttcaa

SEQ ID NO: 208703 - DNA, 15 bp, Homo sapiens
ccctaatgcttttca

SEQ ID NO: 208704 - DNA, 15 bp, Homo sapiens
accctaatgcttttc

SEQ ID NO: 208705 - DNA, 15 bp, Homo sapiens
aaccctaatgctttt

SEQ ID NO: 208706 - DNA, 15 bp, Homo sapiens
taaccctaatgcttt

SEQ ID NO: 208707 - DNA, 15 bp, Homo sapiens
ataaccctaatgctt

SEQ ID NO: 208708 - DNA, 15 bp, Homo sapiens
cataaccctaatgct

SEQ ID NO: 208709 - DNA, 15 bp, Homo sapiens
ccataaccctaatgc

SEQ ID NO: 208710 - DNA, 15 bp, Homo sapiens
accataaccctaatg

SEQ ID NO: 208711 - DNA, 15 bp, Homo sapiens
aaccataaccctaat

SEQ ID NO: 208712 - DNA, 15 bp, Homo sapiens
aaaccataaccctaa

SEQ ID NO: 208713 - DNA, 15 bp, Homo sapiens
taaaccataacccta

SEQ ID NO: 208714 - DNA, 15 bp, Homo sapiens
ttaaaccataaccct

SEQ ID NO: 208715 - DNA, 15 bp, Homo sapiens
tttaaaccataaccc

SEQ ID NO: 208716 - DNA, 15 bp, Homo sapiens
ttttaaaccataacc

SEQ ID NO: 208717 - DNA, 15 bp, Homo sapiens
tttttaaaccataac

SEQ ID NO: 208718 - DNA, 15 bp, Homo sapiens
ttttttaaaccataa

SEQ ID NO: 208719 - DNA, 15 bp, Homo sapiens
attttttaaaccata

SEQ ID NO: 208720 - DNA, 15 bp, Homo sapiens
tattttttaaaccat

SEQ ID NO: 208721 - DNA, 15 bp, Homo sapiens
atattttttaaacca

SEQ ID NO: 208722 - DNA, 15 bp, Homo sapiens
aatattttttaaacc

SEQ ID NO: 208723 - DNA, 15 bp, Homo sapiens
aaatattttttaaac

SEQ ID NO: 208724 - DNA, 15 bp, Homo sapiens
aaaatattttttaaa

SEQ ID NO: 208725 - DNA, 15 bp, Homo sapiens
gaaaatattttttaa

SEQ ID NO: 208726 - DNA, 15 bp, Homo sapiens
ggaaaatatttttta

SEQ ID NO: 208727 - DNA, 15 bp, Homo sapiens
gggaaaatatttttt

SEQ ID NO: 208728 - DNA, 15 bp, Homo sapiens
agggaaaatattttt

SEQ ID NO: 208729 - DNA, 15 bp, Homo sapiens
tagggaaaatatttt

SEQ ID NO: 208730 - DNA, 15 bp, Homo sapiens
ttagggaaaatattt

SEQ ID NO: 208731 - DNA, 15 bp, Homo sapiens
gttagggaaaatatt

SEQ ID NO: 208732 - DNA, 15 bp, Homo sapiens
tgttagggaaaatat

SEQ ID NO: 208733 - DNA, 15 bp, Homo sapiens
ttgttagggaaaata

SEQ ID NO: 208734 - DNA, 15 bp, Homo sapiens
tttgttagggaaaat

SEQ ID NO: 208735 - DNA, 15 bp, Homo sapiens
ctttgttagggaaaa

SEQ ID NO: 208736 - DNA, 15 bp, Homo sapiens
tctttgttagggaaa

SEQ ID NO: 208737 - DNA, 15 bp, Homo sapiens
atctttgttagggaa

SEQ ID NO: 208738 - DNA, 15 bp, Homo sapiens
catctttgttaggga

SEQ ID NO: 208739 - DNA, 15 bp, Homo sapiens
ccatctttgttaggg

SEQ ID NO: 208740 - DNA, 15 bp, Homo sapiens
cccatctttgttagg

SEQ ID NO: 208741 - DNA, 15 bp, Homo sapiens
acccatctttgttag

SEQ ID NO: 208742 - DNA, 15 bp, Homo sapiens
aacccatctttgtta

SEQ ID NO: 208743 - DNA, 15 bp, Homo sapiens
aaacccatctttgtt

SEQ ID NO: 208744 - DNA, 15 bp, Homo sapiens
caaacccatctttgt

SEQ ID NO: 208745 - DNA, 15 bp, Homo sapiens
acaaacccatctttg

SEQ ID NO: 208746 - DNA, 15 bp, Homo sapiens
aacaaacccatcttt

SEQ ID NO: 208747 - DNA, 15 bp, Homo sapiens
aaacaaacccatctt

SEQ ID NO: 208748 - DNA, 15 bp, Homo sapiens
taaacaaacccatct

SEQ ID NO: 208749 - DNA, 15 bp, Homo sapiens
ctaaacaaacccatc

SEQ ID NO: 208750 - DNA, 15 bp, Homo sapiens
tctaaacaaacccat

SEQ ID NO: 208751 - DNA, 15 bp, Homo sapiens
ctctaaacaaaccca

SEQ ID NO: 208752 - DNA, 15 bp, Homo sapiens
actctaaacaaaccc

SEQ ID NO: 208753 - DNA, 15 bp, Homo sapiens
gactctaaacaaacc

SEQ ID NO: 208754 - DNA, 15 bp, Homo sapiens
ggactctaaacaaac

SEQ ID NO: 208755 - DNA, 15 bp, Homo sapiens
aggactctaaacaaa

SEQ ID NO: 208756 - DNA, 15 bp, Homo sapiens
taggactctaaacaa

SEQ ID NO: 208757 - DNA, 15 bp, Homo sapiens
gtaggactctaaaca

SEQ ID NO: 208758 - DNA, 15 bp, Homo sapiens
agtaggactctaaac

SEQ ID NO: 208759 - DNA, 15 bp, Homo sapiens
aagtaggactctaaa

SEQ ID NO: 208760 - DNA, 15 bp, Homo sapiens
aaagtaggactctaa

SEQ ID NO: 208761 - DNA, 15 bp, Homo sapiens
aaaagtaggactcta

SEQ ID NO: 208762 - DNA, 15 bp, Homo sapiens
caaaagtaggactct

SEQ ID NO: 208763 - DNA, 15 bp, Homo sapiens
tcaaaagtaggactc

SEQ ID NO: 208764 - DNA, 15 bp, Homo sapiens
gtcaaaagtaggact

SEQ ID NO: 208765 - DNA, 15 bp, Homo sapiens
agtcaaaagtaggac

SEQ ID NO: 208766 - DNA, 15 bp, Homo sapiens
tagtcaaaagtagga

SEQ ID NO: 208767 - DNA, 15 bp, Homo sapiens
ttagtcaaaagtagg

SEQ ID NO: 208768 - DNA, 15 bp, Homo sapiens
tttagtcaaaagtag

SEQ ID NO: 208769 - DNA, 15 bp, Homo sapiens
atttagtcaaaagta

SEQ ID NO: 208770 - DNA, 15 bp, Homo sapiens
tatttagtcaaaagt

SEQ ID NO: 208771 - DNA, 15 bp, Homo sapiens
ctatttagtcaaaag

SEQ ID NO: 208772 - DNA, 15 bp, Homo sapiens
gctatttagtcaaaa

SEQ ID NO: 208773 - DNA, 15 bp, Homo sapiens
agctatttagtcaaa

SEQ ID NO: 208774 - DNA, 15 bp, Homo sapiens
cagctatttagtcaa

SEQ ID NO: 208775 - DNA, 15 bp, Homo sapiens
tcagctatttagtca

SEQ ID NO: 208776 - DNA, 15 bp, Homo sapiens
ctcagctatttagtc

SEQ ID NO: 208777 - DNA, 15 bp, Homo sapiens
tctcagctatttagt

SEQ ID NO: 208778 - DNA, 15 bp, Homo sapiens
atctcagctatttag

SEQ ID NO: 208779 - DNA, 15 bp, Homo sapiens
aatctcagctattta

SEQ ID NO: 208780 - DNA, 15 bp, Homo sapiens
gaatctcagctattt

SEQ ID NO: 208781 - DNA, 15 bp, Homo sapiens
tgaatctcagctatt

SEQ ID NO: 208782 - DNA, 15 bp, Homo sapiens
gtgaatctcagctat

SEQ ID NO: 208783 - DNA, 15 bp, Homo sapiens
agtgaatctcagcta

SEQ ID NO: 208784 - DNA, 15 bp, Homo sapiens
aagtgaatctcagct

SEQ ID NO: 208785 - DNA, 15 bp, Homo sapiens
aaagtgaatctcagc

SEQ ID NO: 208786 - DNA, 15 bp, Homo sapiens
aaaagtgaatctcag

SEQ ID NO: 208787 - DNA, 15 bp, Homo sapiens
taaaagtgaatctca

SEQ ID NO: 208788 - DNA, 15 bp, Homo sapiens
ataaaagtgaatctc

SEQ ID NO: 208789 - DNA, 15 bp, Homo sapiens
cataaaagtgaatct

SEQ ID NO: 208790 - DNA, 15 bp, Homo sapiens
acataaaagtgaatc

SEQ ID NO: 208791 - DNA, 15 bp, Homo sapiens
tacataaaagtgaat

SEQ ID NO: 208792 - DNA, 15 bp, Homo sapiens
ttacataaaagtgaa

SEQ ID NO: 208793 - DNA, 15 bp, Homo sapiens
tttacataaaagtga

SEQ ID NO: 208794 - DNA, 15 bp, Homo sapiens
ctttacataaaagtg

SEQ ID NO: 208795 - DNA, 15 bp, Homo sapiens
actttacataaaagt

SEQ ID NO: 208796 - DNA, 15 bp, Homo sapiens
gactttacataaaag

SEQ ID NO: 208797 - DNA, 15 bp, Homo sapiens
tgactttacataaaa

SEQ ID NO: 208798 - DNA, 15 bp, Homo sapiens
atgactttacataaa

SEQ ID NO: 208799 - DNA, 15 bp, Homo sapiens
aatgactttacataa

SEQ ID NO: 208800 - DNA, 15 bp, Homo sapiens
aaatgactttacata

SEQ ID NO: 208801 - DNA, 15 bp, Homo sapiens
aaaatgactttacat

SEQ ID NO: 208802 - DNA, 15 bp, Homo sapiens
taaaatgactttaca

SEQ ID NO: 208803 - DNA, 15 bp, Homo sapiens
ataaaatgactttac

SEQ ID NO: 208804 - DNA, 15 bp, Homo sapiens
tataaaatgacttta

SEQ ID NO: 208805 - DNA, 15 bp, Homo sapiens
ctataaaatgacttt

SEQ ID NO: 208806 - DNA, 15 bp, Homo sapiens
gctataaaatgactt

SEQ ID NO: 208807 - DNA, 15 bp, Homo sapiens
cgctataaaatgact

SEQ ID NO: 208808 - DNA, 15 bp, Homo sapiens
acgctataaaatgac

SEQ ID NO: 208809 - DNA, 15 bp, Homo sapiens
aacgctataaaatga

SEQ ID NO: 208810 - DNA, 15 bp, Homo sapiens
taacgctataaaatg

SEQ ID NO: 208811 - DNA, 15 bp, Homo sapiens
ataacgctataaaat

SEQ ID NO: 208812 - DNA, 15 bp, Homo sapiens
aataacgctataaaa

SEQ ID NO: 208813 - DNA, 15 bp, Homo sapiens
taataacgctataaa

SEQ ID NO: 208814 - DNA, 15 bp, Homo sapiens
ttaataacgctataa

SEQ ID NO: 208815 - DNA, 15 bp, Homo sapiens
attaataacgctata

SEQ ID NO: 208816 - DNA, 15 bp, Homo sapiens
aattaataacgctat

SEQ ID NO: 208817 - DNA, 15 bp, Homo sapiens
aaattaataacgcta

SEQ ID NO: 208818 - DNA, 15 bp, Homo sapiens
caaattaataacgct

SEQ ID NO: 208819 - DNA, 15 bp, Homo sapiens
ccaaattaataacgc

SEQ ID NO: 208820 - DNA, 15 bp, Homo sapiens
cccaaattaataacg

SEQ ID NO: 208821 - DNA, 15 bp, Homo sapiens
acccaaattaataac

SEQ ID NO: 208822 - DNA, 15 bp, Homo sapiens
cacccaaattaataa

SEQ ID NO: 208823 - DNA, 15 bp, Homo sapiens
gcacccaaattaata

SEQ ID NO: 208824 - DNA, 15 bp, Homo sapiens
ggcacccaaattaat

SEQ ID NO: 208825 - DNA, 15 bp, Homo sapiens
aggcacccaaattaa

SEQ ID NO: 208826 - DNA, 15 bp, Homo sapiens
aaggcacccaaatta

SEQ ID NO: 208827 - DNA, 15 bp, Homo sapiens
aaaggcacccaaatt

SEQ ID NO: 208828 - DNA, 15 bp, Homo sapiens
taaaggcacccaaat

SEQ ID NO: 208829 - DNA, 15 bp, Homo sapiens
ttaaaggcacccaaa

SEQ ID NO: 208830 - DNA, 15 bp, Homo sapiens
tttaaaggcacccaa

SEQ ID NO: 208831 - DNA, 15 bp, Homo sapiens
ttttaaaggcaccca

SEQ ID NO: 208832 - DNA, 15 bp, Homo sapiens
tttttaaaggcaccc

SEQ ID NO: 208833 - DNA, 15 bp, Homo sapiens
atttttaaaggcacc

SEQ ID NO: 208834 - DNA, 15 bp, Homo sapiens
tatttttaaaggcac

SEQ ID NO: 208835 - DNA, 15 bp, Homo sapiens
ctatttttaaaggca

SEQ ID NO: 208836 - DNA, 15 bp, Homo sapiens
actatttttaaaggc

SEQ ID NO: 208837 - DNA, 15 bp, Homo sapiens
tactatttttaaagg

SEQ ID NO: 208838 - DNA, 15 bp, Homo sapiens
atactatttttaaag

SEQ ID NO: 208839 - DNA, 15 bp, Homo sapiens
tatactatttttaaa

SEQ ID NO: 208840 - DNA, 15 bp, Homo sapiens
ttatactatttttaa

SEQ ID NO: 208841 - DNA, 15 bp, Homo sapiens
tttatactattttta

SEQ ID NO: 208842 - DNA, 15 bp, Homo sapiens
ctttatactattttt

SEQ ID NO: 208843 - DNA, 15 bp, Homo sapiens
gctttatactatttt

SEQ ID NO: 208844 - DNA, 15 bp, Homo sapiens
tgctttatactattt

SEQ ID NO: 208845 - DNA, 15 bp, Homo sapiens
atgctttatactatt

SEQ ID NO: 208846 - DNA, 15 bp, Homo sapiens
catgctttatactat

SEQ ID NO: 208847 - DNA, 15 bp, Homo sapiens
acatgctttatacta

SEQ ID NO: 208848 - DNA, 15 bp, Homo sapiens
aacatgctttatact

SEQ ID NO: 208849 - DNA, 15 bp, Homo sapiens
aaacatgctttatac

SEQ ID NO: 208850 - DNA, 15 bp, Homo sapiens
gaaacatgctttata

SEQ ID NO: 208851 - DNA, 15 bp, Homo sapiens
agaaacatgctttat

SEQ ID NO: 208852 - DNA, 15 bp, Homo sapiens
gagaaacatgcttta

SEQ ID NO: 208853 - DNA, 15 bp, Homo sapiens
cgagaaacatgcttt

SEQ ID NO: 208854 - DNA, 15 bp, Homo sapiens
tcgagaaacatgctt

SEQ ID NO: 208855 - DNA, 15 bp, Homo sapiens
ctcgagaaacatgct

SEQ ID NO: 208856 - DNA, 15 bp, Homo sapiens
actcgagaaacatgc

SEQ ID NO: 208857 - DNA, 15 bp, Homo sapiens
cactcgagaaacatg

SEQ ID NO: 208858 - DNA, 15 bp, Homo sapiens
acactcgagaaacat

SEQ ID NO: 208859 - DNA, 15 bp, Homo sapiens
tacactcgagaaaca

SEQ ID NO: 208860 - DNA, 15 bp, Homo sapiens
ctacactcgagaaac

SEQ ID NO: 208861 - DNA, 15 bp, Homo sapiens
actacactcgagaaa

SEQ ID NO: 208862 - DNA, 15 bp, Homo sapiens
gactacactcgagaa

SEQ ID NO: 208863 - DNA, 15 bp, Homo sapiens
agactacactcgaga

SEQ ID NO: 208864 - DNA, 15 bp, Homo sapiens
cagactacactcgag

SEQ ID NO: 208865 - DNA, 15 bp, Homo sapiens
acagactacactcga

SEQ ID NO: 208866 - DNA, 15 bp, Homo sapiens
aacagactacactcg

SEQ ID NO: 208867 - DNA, 15 bp, Homo sapiens
taacagactacactc

SEQ ID NO: 208868 - DNA, 15 bp, Homo sapiens
ctaacagactacact

SEQ ID NO: 208869 - DNA, 15 bp, Homo sapiens
gctaacagactacac

SEQ ID NO: 208870 - DNA, 15 bp, Homo sapiens
ggctaacagactaca

SEQ ID NO: 208871 - DNA, 15 bp, Homo sapiens
tggctaacagactac

SEQ ID NO: 208872 - DNA, 15 bp, Homo sapiens
gtggctaacagacta

SEQ ID NO: 208873 - DNA, 15 bp, Homo sapiens
ggtggctaacagact

SEQ ID NO: 208874 - DNA, 15 bp, Homo sapiens
aggtggctaacagac

SEQ ID NO: 208875 - DNA, 15 bp, Homo sapiens
taggtggctaacaga

SEQ ID NO: 208876 - DNA, 15 bp, Homo sapiens
ataggtggctaacag

SEQ ID NO: 208877 - DNA, 15 bp, Homo sapiens
tataggtggctaaca

SEQ ID NO: 208878 - DNA, 15 bp, Homo sapiens
atataggtggctaac

SEQ ID NO: 208879 - DNA, 15 bp, Homo sapiens
aatataggtggctaa

SEQ ID NO: 208880 - DNA, 15 bp, Homo sapiens
caatataggtggcta

SEQ ID NO: 208881 - DNA, 15 bp, Homo sapiens
ccaatataggtggct

SEQ ID NO: 208882 - DNA, 15 bp, Homo sapiens
tccaatataggtggc

SEQ ID NO: 208883 - DNA, 15 bp, Homo sapiens
ctccaatataggtgg

SEQ ID NO: 208884 - DNA, 15 bp, Homo sapiens
tctccaatataggtg

SEQ ID NO: 208885 - DNA, 15 bp, Homo sapiens
ctctccaatataggt

SEQ ID NO: 208886 - DNA, 15 bp, Homo sapiens
actctccaatatagg

SEQ ID NO: 208887 - DNA, 15 bp, Homo sapiens
aactctccaatatag

SEQ ID NO: 208888 - DNA, 15 bp, Homo sapiens
caactctccaatata

SEQ ID NO: 208889 - DNA, 15 bp, Homo sapiens
ccaactctccaatat

SEQ ID NO: 208890 - DNA, 15 bp, Homo sapiens
cccaactctccaata

SEQ ID NO: 208891 - DNA, 15 bp, Homo sapiens
tcccaactctccaat

SEQ ID NO: 208892 - DNA, 15 bp, Homo sapiens
ctcccaactctccaa

SEQ ID NO: 208893 - DNA, 15 bp, Homo sapiens
cctcccaactctcca

SEQ ID NO: 208894 - DNA, 15 bp, Homo sapiens
tcctcccaactctcc

SEQ ID NO: 208895 - DNA, 15 bp, Homo sapiens
ctcctcccaactctc

SEQ ID NO: 208896 - DNA, 15 bp, Homo sapiens
tctcctcccaactct

SEQ ID NO: 208897 - DNA, 15 bp, Homo sapiens
ctctcctcccaactc

SEQ ID NO: 208898 - DNA, 15 bp, Homo sapiens
tctctcctcccaact

SEQ ID NO: 208899 - DNA, 15 bp, Homo sapiens
ctctctcctcccaac

SEQ ID NO: 208900 - DNA, 15 bp, Homo sapiens
actctctcctcccaa

SEQ ID NO: 208901 - DNA, 15 bp, Homo sapiens
gactctctcctccca

SEQ ID NO: 208902 - DNA, 15 bp, Homo sapiens
agactctctcctccc

SEQ ID NO: 208903 - DNA, 15 bp, Homo sapiens
gagactctctcctcc

SEQ ID NO: 208904 - DNA, 15 bp, Homo sapiens
agagactctctcctc

SEQ ID NO: 208905 - DNA, 15 bp, Homo sapiens
tagagactctctcct

SEQ ID NO: 208906 - DNA, 15 bp, Homo sapiens
atagagactctctcc

SEQ ID NO: 208907 - DNA, 15 bp, Homo sapiens
gatagagactctctc

SEQ ID NO: 208908 - DNA, 15 bp, Homo sapiens
agatagagactctct

SEQ ID NO: 208909 - DNA, 15 bp, Homo sapiens
aagatagagactctc

SEQ ID NO: 208910 - DNA, 15 bp, Homo sapiens
caagatagagactct

SEQ ID NO: 208911 - DNA, 15 bp, Homo sapiens
tcaagatagagactc

SEQ ID NO: 208912 - DNA, 15 bp, Homo sapiens
ttcaagatagagact

SEQ ID NO: 208913 - DNA, 15 bp, Homo sapiens
attcaagatagagac

SEQ ID NO: 208914 - DNA, 15 bp, Homo sapiens
aattcaagatagaga

SEQ ID NO: 208915 - DNA, 15 bp, Homo sapiens
aaattcaagatagag

SEQ ID NO: 208916 - DNA, 15 bp, Homo sapiens
taaattcaagataga

SEQ ID NO: 208917 - DNA, 15 bp, Homo sapiens
ataaattcaagatag

SEQ ID NO: 208918 - DNA, 15 bp, Homo sapiens
cataaattcaagata

SEQ ID NO: 208919 - DNA, 15 bp, Homo sapiens
ccataaattcaagat

SEQ ID NO: 208920 - DNA, 15 bp, Homo sapiens
cccataaattcaaga

SEQ ID NO: 208921 - DNA, 15 bp, Homo sapiens
tcccataaattcaag

SEQ ID NO: 208922 - DNA, 15 bp, Homo sapiens
ttcccataaattcaa

SEQ ID NO: 208923 - DNA, 15 bp, Homo sapiens
tttcccataaattca

SEQ ID NO: 208924 - DNA, 15 bp, Homo sapiens
ttttcccataaattc

SEQ ID NO: 208925 - DNA, 15 bp, Homo sapiens
tttttcccataaatt

SEQ ID NO: 208926 - DNA, 15 bp, Homo sapiens
atttttcccataaat

SEQ ID NO: 208927 - DNA, 15 bp, Homo sapiens
aatttttcccataaa

SEQ ID NO: 208928 - DNA, 15 bp, Homo sapiens
gaatttttcccataa

SEQ ID NO: 208929 - DNA, 15 bp, Homo sapiens
agaatttttcccata

SEQ ID NO: 208930 - DNA, 15 bp, Homo sapiens
tagaatttttcccat

SEQ ID NO: 208931 - DNA, 15 bp, Homo sapiens
ttagaatttttccca

SEQ ID NO: 208932 - DNA, 15 bp, Homo sapiens
tttagaatttttccc

SEQ ID NO: 208933 - DNA, 15 bp, Homo sapiens
ttttagaatttttcc

SEQ ID NO: 208934 - DNA, 15 bp, Homo sapiens
attttagaatttttc

SEQ ID NO: 208935 - DNA, 15 bp, Homo sapiens
tattttagaattttt

SEQ ID NO: 208936 - DNA, 15 bp, Homo sapiens
gtattttagaatttt

SEQ ID NO: 208937 - DNA, 15 bp, Homo sapiens
agtattttagaattt

SEQ ID NO: 208938 - DNA, 15 bp, Homo sapiens
aagtattttagaatt

SEQ ID NO: 208939 - DNA, 15 bp, Homo sapiens
aaagtattttagaat

SEQ ID NO: 208940 - DNA, 15 bp, Homo sapiens
aaaagtattttagaa

SEQ ID NO: 208941 - DNA, 15 bp, Homo sapiens
aaaaagtattttaga

SEQ ID NO: 208942 - DNA, 15 bp, Homo sapiens
taaaaagtattttag

SEQ ID NO: 208943 - DNA, 15 bp, Homo sapiens
ataaaaagtatttta

SEQ ID NO: 208944 - DNA, 15 bp, Homo sapiens
tataaaaagtatttt

SEQ ID NO: 208945 - DNA, 15 bp, Homo sapiens
ttataaaaagtattt

SEQ ID NO: 208946 - DNA, 15 bp, Homo sapiens
attataaaaagtatt

SEQ ID NO: 208947 - DNA, 15 bp, Homo sapiens
cattataaaaagtat

SEQ ID NO: 208948 - DNA, 15 bp, Homo sapiens
tcattataaaaagta

SEQ ID NO: 208949 - DNA, 15 bp, Homo sapiens
ttcattataaaaagt

SEQ ID NO: 208950 - DNA, 15 bp, Homo sapiens
cttcattataaaaag

SEQ ID NO: 208951 - DNA, 15 bp, Homo sapiens
ccttcattataaaaa

SEQ ID NO: 208952 - DNA, 15 bp, Homo sapiens
tccttcattataaaa

SEQ ID NO: 208953 - DNA, 15 bp, Homo sapiens
gtccttcattataaa

SEQ ID NO: 208954 - DNA, 15 bp, Homo sapiens
tgtccttcattataa

SEQ ID NO: 208955 - DNA, 15 bp, Homo sapiens
ttgtccttcattata

SEQ ID NO: 208956 - DNA, 15 bp, Homo sapiens
gttgtccttcattat

SEQ ID NO: 208957 - DNA, 15 bp, Homo sapiens
tgttgtccttcatta

SEQ ID NO: 208958 - DNA, 15 bp, Homo sapiens
atgttgtccttcatt

SEQ ID NO: 208959 - DNA, 15 bp, Homo sapiens
gatgttgtccttcat

SEQ ID NO: 208960 - DNA, 15 bp, Homo sapiens
tgatgttgtccttca

SEQ ID NO: 208961 - DNA, 15 bp, Homo sapiens
atgatgttgtccttc

SEQ ID NO: 208962 - DNA, 15 bp, Homo sapiens
tatgatgttgtcctt

SEQ ID NO: 208963 - DNA, 15 bp, Homo sapiens
ttatgatgttgtcct

SEQ ID NO: 208964 - DNA, 15 bp, Homo sapiens
gttatgatgttgtcc

SEQ ID NO: 208965 - DNA, 15 bp, Homo sapiens
agttatgatgttgtc

SEQ ID NO: 208966 - DNA, 15 bp, Homo sapiens
gagttatgatgttgt

SEQ ID NO: 208967 - DNA, 15 bp, Homo sapiens
ggagttatgatgttg

SEQ ID NO: 208968 - DNA, 15 bp, Homo sapiens
gggagttatgatgtt

SEQ ID NO: 208969 - DNA, 15 bp, Homo sapiens
agggagttatgatgt

SEQ ID NO: 208970 - DNA, 15 bp, Homo sapiens
tagggagttatgatg

SEQ ID NO: 208971 - DNA, 15 bp, Homo sapiens
ttagggagttatgat

SEQ ID NO: 208972 - DNA, 15 bp, Homo sapiens
attagggagttatga

SEQ ID NO: 208973 - DNA, 15 bp, Homo sapiens
tattagggagttatg

SEQ ID NO: 208974 - DNA, 15 bp, Homo sapiens
ttattagggagttat

SEQ ID NO: 208975 - DNA, 15 bp, Homo sapiens
tttattagggagtta

SEQ ID NO: 208976 - DNA, 15 bp, Homo sapiens
ttttattagggagtt

SEQ ID NO: 208977 - DNA, 15 bp, Homo sapiens
attttattagggagt

SEQ ID NO: 208978 - DNA, 15 bp, Homo sapiens
cattttattagggag

SEQ ID NO: 208979 - DNA, 15 bp, Homo sapiens
acattttattaggga

SEQ ID NO: 208980 - DNA, 15 bp, Homo sapiens
cacattttattaggg

SEQ ID NO: 208981 - DNA, 15 bp, Homo sapiens
gcacattttattagg

SEQ ID NO: 208982 - DNA, 15 bp, Homo sapiens
tgcacattttattag

SEQ ID NO: 208983 - DNA, 15 bp, Homo sapiens
atgcacattttatta

SEQ ID NO: 208984 - DNA, 15 bp, Homo sapiens
catgcacattttatt

SEQ ID NO: 208985 - DNA, 15 bp, Homo sapiens
acatgcacattttat

SEQ ID NO: 208986 - DNA, 15 bp, Homo sapiens
tacatgcacatttta

SEQ ID NO: 208987 - DNA, 15 bp, Homo sapiens
atacatgcacatttt

SEQ ID NO: 208988 - DNA, 15 bp, Homo sapiens
tatacatgcacattt

SEQ ID NO: 208989 - DNA, 15 bp, Homo sapiens
atatacatgcacatt

SEQ ID NO: 208990 - DNA, 15 bp, Homo sapiens
tatatacatgcacat

SEQ ID NO: 208991 - DNA, 15 bp, Homo sapiens
atatatacatgcaca

SEQ ID NO: 208992 - DNA, 15 bp, Homo sapiens
aatatatacatgcac

SEQ ID NO: 208993 - DNA, 15 bp, Homo sapiens
gaatatatacatgca

SEQ ID NO: 208994 - DNA, 15 bp, Homo sapiens
tgaatatatacatgc

SEQ ID NO: 208995 - DNA, 15 bp, Homo sapiens
ttgaatatatacatg

SEQ ID NO: 208996 - DNA, 15 bp, Homo sapiens
tttgaatatatacat

SEQ ID NO: 208997 - DNA, 15 bp, Homo sapiens
atttgaatatataca

SEQ ID NO: 208998 - DNA, 15 bp, Homo sapiens
aatttgaatatatac

SEQ ID NO: 208999 - DNA, 15 bp, Homo sapiens
aaatttgaatatata

SEQ ID NO: 209000 - DNA, 15 bp, Homo sapiens
caaatttgaatatat

SEQ ID NO: 209001 - DNA, 15 bp, Homo sapiens
gcaaatttgaatata

SEQ ID NO: 209002 - DNA, 15 bp, Homo sapiens
agcaaatttgaatat

SEQ ID NO: 209003 - DNA, 15 bp, Homo sapiens
cagcaaatttgaata

SEQ ID NO: 209004 - DNA, 15 bp, Homo sapiens
acagcaaatttgaat

SEQ ID NO: 209005 - DNA, 15 bp, Homo sapiens
gacagcaaatttgaa

SEQ ID NO: 209006 - DNA, 15 bp, Homo sapiens
tgacagcaaatttga

SEQ ID NO: 209007 - DNA, 15 bp, Homo sapiens
atgacagcaaatttg

SEQ ID NO: 209008 - DNA, 15 bp, Homo sapiens
aatgacagcaaattt

SEQ ID NO: 209009 - DNA, 15 bp, Homo sapiens
caatgacagcaaatt

SEQ ID NO: 209010 - DNA, 15 bp, Homo sapiens
tcaatgacagcaaat

SEQ ID NO: 209011 - DNA, 15 bp, Homo sapiens
atcaatgacagcaaa

SEQ ID NO: 209012 - DNA, 15 bp, Homo sapiens
gatcaatgacagcaa

SEQ ID NO: 209013 - DNA, 15 bp, Homo sapiens
ggatcaatgacagca

SEQ ID NO: 209014 - DNA, 15 bp, Homo sapiens
aggatcaatgacagc

SEQ ID NO: 209015 - DNA, 15 bp, Homo sapiens
caggatcaatgacag

SEQ ID NO: 209016 - DNA, 15 bp, Homo sapiens
gcaggatcaatgaca

SEQ ID NO: 209017 - DNA, 15 bp, Homo sapiens
tgcaggatcaatgac

SEQ ID NO: 209018 - DNA, 15 bp, Homo sapiens
gtgcaggatcaatga

SEQ ID NO: 209019 - DNA, 15 bp, Homo sapiens
ggtgcaggatcaatg

SEQ ID NO: 209020 - DNA, 15 bp, Homo sapiens
aggtgcaggatcaat

SEQ ID NO: 209021 - DNA, 15 bp, Homo sapiens
taggtgcaggatcaa

SEQ ID NO: 209022 - DNA, 15 bp, Homo sapiens
gtaggtgcaggatca

SEQ ID NO: 209023 - DNA, 15 bp, Homo sapiens
tgtaggtgcaggatc

SEQ ID NO: 209024 - DNA, 15 bp, Homo sapiens
ttgtaggtgcaggat

SEQ ID NO: 209025 - DNA, 15 bp, Homo sapiens
tttgtaggtgcagga

SEQ ID NO: 209026 - DNA, 15 bp, Homo sapiens
ttttgtaggtgcagg

SEQ ID NO: 209027 - DNA, 15 bp, Homo sapiens
attttgtaggtgcag

SEQ ID NO: 209028 - DNA, 15 bp, Homo sapiens
gattttgtaggtgca

SEQ ID NO: 209029 - DNA, 15 bp, Homo sapiens
ggattttgtaggtgc

SEQ ID NO: 209030 - DNA, 15 bp, Homo sapiens
tggattttgtaggtg

SEQ ID NO: 209031 - DNA, 15 bp, Homo sapiens
ctggattttgtaggt

SEQ ID NO: 209032 - DNA, 15 bp, Homo sapiens
actggattttgtagg

SEQ ID NO: 209033 - DNA, 15 bp, Homo sapiens
gactggattttgtag

SEQ ID NO: 209034 - DNA, 15 bp, Homo sapiens
ggactggattttgta

SEQ ID NO: 209035 - DNA, 15 bp, Homo sapiens
aggactggattttgt

SEQ ID NO: 209036 - DNA, 15 bp, Homo sapiens
caggactggattttg

SEQ ID NO: 209037 - DNA, 15 bp, Homo sapiens
ccaggactggatttt

SEQ ID NO: 209038 - DNA, 15 bp, Homo sapiens
cccaggactggattt

SEQ ID NO: 209039 - DNA, 15 bp, Homo sapiens
ccccaggactggatt

SEQ ID NO: 209040 - DNA, 15 bp, Homo sapiens
cccccaggactggat

SEQ ID NO: 209041 - DNA, 15 bp, Homo sapiens
gcccccaggactgga

SEQ ID NO: 209042 - DNA, 15 bp, Homo sapiens
agcccccaggactgg

SEQ ID NO: 209043 - DNA, 15 bp, Homo sapiens
cagcccccaggactg

SEQ ID NO: 209044 - DNA, 15 bp, Homo sapiens
ccagcccccaggact

SEQ ID NO: 209045 - DNA, 15 bp, Homo sapiens
gccagcccccaggac

SEQ ID NO: 209046 - DNA, 15 bp, Homo sapiens
tgccagcccccagga

SEQ ID NO: 209047 - DNA, 15 bp, Homo sapiens
atgccagcccccagg

SEQ ID NO: 209048 - DNA, 15 bp, Homo sapiens
aatgccagcccccag

SEQ ID NO: 209049 - DNA, 15 bp, Homo sapiens
gaatgccagccccca

SEQ ID NO: 209050 - DNA, 15 bp, Homo sapiens
agaatgccagccccc

SEQ ID NO: 209051 - DNA, 15 bp, Homo sapiens
aagaatgccagcccc

SEQ ID NO: 209052 - DNA, 15 bp, Homo sapiens
taagaatgccagccc

SEQ ID NO: 209053 - DNA, 15 bp, Homo sapiens
gtaagaatgccagcc

SEQ ID NO: 209054 - DNA, 15 bp, Homo sapiens
agtaagaatgccagc

SEQ ID NO: 209055 - DNA, 15 bp, Homo sapiens
cagtaagaatgccag

SEQ ID NO: 209056 - DNA, 15 bp, Homo sapiens
gcagtaagaatgcca

SEQ ID NO: 209057 - DNA, 15 bp, Homo sapiens
agcagtaagaatgcc

SEQ ID NO: 209058 - DNA, 15 bp, Homo sapiens
aagcagtaagaatgc

SEQ ID NO: 209059 - DNA, 15 bp, Homo sapiens
caagcagtaagaatg

SEQ ID NO: 209060 - DNA, 15 bp, Homo sapiens
gcaagcagtaagaat

SEQ ID NO: 209061 - DNA, 15 bp, Homo sapiens
agcaagcagtaagaa

SEQ ID NO: 209062 - DNA, 15 bp, Homo sapiens
cagcaagcagtaaga

SEQ ID NO: 209063 - DNA, 15 bp, Homo sapiens
tcagcaagcagtaag

SEQ ID NO: 209064 - DNA, 15 bp, Homo sapiens
ctcagcaagcagtaa

SEQ ID NO: 209065 - DNA, 15 bp, Homo sapiens
cctcagcaagcagta

SEQ ID NO: 209066 - DNA, 15 bp, Homo sapiens
ccctcagcaagcagt

SEQ ID NO: 209067 - DNA, 15 bp, Homo sapiens
gccctcagcaagcag

SEQ ID NO: 209068 - DNA, 15 bp, Homo sapiens
ggccctcagcaagca

SEQ ID NO: 209069 - DNA, 15 bp, Homo sapiens
tggccctcagcaagc

SEQ ID NO: 209070 - DNA, 15 bp, Homo sapiens
ctggccctcagcaag

SEQ ID NO: 209071 - DNA, 15 bp, Homo sapiens
tctggccctcagcaa

SEQ ID NO: 209072 - DNA, 15 bp, Homo sapiens
atctggccctcagca

SEQ ID NO: 209073 - DNA, 15 bp, Homo sapiens
catctggccctcagc

SEQ ID NO: 209074 - DNA, 15 bp, Homo sapiens
tcatctggccctcag

SEQ ID NO: 209075 - DNA, 15 bp, Homo sapiens
atcatctggccctca

SEQ ID NO: 209076 - DNA, 15 bp, Homo sapiens
tatcatctggccctc

SEQ ID NO: 209077 - DNA, 15 bp, Homo sapiens
atatcatctggccct

SEQ ID NO: 209078 - DNA, 15 bp, Homo sapiens
tatatcatctggccc

SEQ ID NO: 209079 - DNA, 15 bp, Homo sapiens
ctatatcatctggcc

SEQ ID NO: 209080 - DNA, 15 bp, Homo sapiens
tctatatcatctggc

SEQ ID NO: 209081 - DNA, 15 bp, Homo sapiens
atctatatcatctgg

SEQ ID NO: 209082 - DNA, 15 bp, Homo sapiens
aatctatatcatctg

SEQ ID NO: 209083 - DNA, 15 bp, Homo sapiens
gaatctatatcatct

SEQ ID NO: 209084 - DNA, 15 bp, Homo sapiens
ggaatctatatcatc

SEQ ID NO: 209085 - DNA, 15 bp, Homo sapiens
tggaatctatatcat

SEQ ID NO: 209086 - DNA, 15 bp, Homo sapiens
ctggaatctatatca

SEQ ID NO: 209087 - DNA, 15 bp, Homo sapiens
tctggaatctatatc

SEQ ID NO: 209088 - DNA, 15 bp, Homo sapiens
ttctggaatctatat

SEQ ID NO: 209089 - DNA, 15 bp, Homo sapiens
attctggaatctata

SEQ ID NO: 209090 - DNA, 15 bp, Homo sapiens
tattctggaatctat

SEQ ID NO: 209091 - DNA, 15 bp, Homo sapiens
atattctggaatcta

SEQ ID NO: 209092 - DNA, 15 bp, Homo sapiens
gatattctggaatct

SEQ ID NO: 209093 - DNA, 15 bp, Homo sapiens
agatattctggaatc

SEQ ID NO: 209094 - DNA, 15 bp, Homo sapiens
gagatattctggaat

SEQ ID NO: 209095 - DNA, 15 bp, Homo sapiens
ggagatattctggaa

SEQ ID NO: 209096 - DNA, 15 bp, Homo sapiens
tggagatattctgga

SEQ ID NO: 209097 - DNA, 15 bp, Homo sapiens
atggagatattctgg

SEQ ID NO: 209098 - DNA, 15 bp, Homo sapiens
catggagatattctg

SEQ ID NO: 209099 - DNA, 15 bp, Homo sapiens
acatggagatattct

SEQ ID NO: 209100 - DNA, 15 bp, Homo sapiens
tacatggagatattc

SEQ ID NO: 209101 - DNA, 15 bp, Homo sapiens
ctacatggagatatt

SEQ ID NO: 209102 - DNA, 15 bp, Homo sapiens
tctacatggagatat

SEQ ID NO: 209103 - DNA, 15 bp, Homo sapiens
atctacatggagata

SEQ ID NO: 209104 - DNA, 15 bp, Homo sapiens
aatctacatggagat

SEQ ID NO: 209105 - DNA, 15 bp, Homo sapiens
aaatctacatggaga

SEQ ID NO: 209106 - DNA, 15 bp, Homo sapiens
aaaatctacatggag

SEQ ID NO: 209107 - DNA, 15 bp, Homo sapiens
caaaatctacatgga

SEQ ID NO: 209108 - DNA, 15 bp, Homo sapiens
ccaaaatctacatgg

SEQ ID NO: 209109 - DNA, 15 bp, Homo sapiens
accaaaatctacatg

SEQ ID NO: 209110 - DNA, 15 bp, Homo sapiens
caccaaaatctacat

SEQ ID NO: 209111 - DNA, 15 bp, Homo sapiens
tcaccaaaatctaca

SEQ ID NO: 209112 - DNA, 15 bp, Homo sapiens
ctcaccaaaatctac

SEQ ID NO: 209113 - DNA, 15 bp, Homo sapiens
tctcaccaaaatcta

SEQ ID NO: 209114 - DNA, 15 bp, Homo sapiens
ttctcaccaaaatct

SEQ ID NO: 209115 - DNA, 15 bp, Homo sapiens
attctcaccaaaatc

SEQ ID NO: 209116 - DNA, 15 bp, Homo sapiens
aattctcaccaaaat

SEQ ID NO: 209117 - DNA, 15 bp, Homo sapiens
taattctcaccaaaa

SEQ ID NO: 209118 - DNA, 15 bp, Homo sapiens
gtaattctcaccaaa

SEQ ID NO: 209119 - DNA, 15 bp, Homo sapiens
agtaattctcaccaa

SEQ ID NO: 209120 - DNA, 15 bp, Homo sapiens
cagtaattctcacca

SEQ ID NO: 209121 - DNA, 15 bp, Homo sapiens
acagtaattctcacc

SEQ ID NO: 209122 - DNA, 15 bp, Homo sapiens
cacagtaattctcac

SEQ ID NO: 209123 - DNA, 15 bp, Homo sapiens
gcacagtaattctca

SEQ ID NO: 209124 - DNA, 15 bp, Homo sapiens
agcacagtaattctc

SEQ ID NO: 209125 - DNA, 15 bp, Homo sapiens
cagcacagtaattct

SEQ ID NO: 209126 - DNA, 15 bp, Homo sapiens
tcagcacagtaattc

SEQ ID NO: 209127 - DNA, 15 bp, Homo sapiens
ttcagcacagtaatt

SEQ ID NO: 209128 - DNA, 15 bp, Homo sapiens
tttcagcacagtaat

SEQ ID NO: 209129 - DNA, 15 bp, Homo sapiens
ttttcagcacagtaa

SEQ ID NO: 209130 - DNA, 15 bp, Homo sapiens
cttttcagcacagta

SEQ ID NO: 209131 - DNA, 15 bp, Homo sapiens
tcttttcagcacagt

SEQ ID NO: 209132 - DNA, 15 bp, Homo sapiens
ttcttttcagcacag

SEQ ID NO: 209133 - DNA, 15 bp, Homo sapiens
attcttttcagcaca

SEQ ID NO: 209134 - DNA, 15 bp, Homo sapiens
cattcttttcagcac

SEQ ID NO: 209135 - DNA, 15 bp, Homo sapiens
tcattcttttcagca

SEQ ID NO: 209136 - DNA, 15 bp, Homo sapiens
gtcattcttttcagc

SEQ ID NO: 209137 - DNA, 15 bp, Homo sapiens
tgtcattcttttcag

SEQ ID NO: 209138 - DNA, 15 bp, Homo sapiens
ctgtcattcttttca

SEQ ID NO: 209139 - DNA, 15 bp, Homo sapiens
actgtcattcttttc

SEQ ID NO: 209140 - DNA, 15 bp, Homo sapiens
tactgtcattctttt

SEQ ID NO: 209141 - DNA, 15 bp, Homo sapiens
atactgtcattcttt

SEQ ID NO: 209142 - DNA, 15 bp, Homo sapiens
aatactgtcattctt

SEQ ID NO: 209143 - DNA, 15 bp, Homo sapiens
caatactgtcattct

SEQ ID NO: 209144 - DNA, 15 bp, Homo sapiens
gcaatactgtcattc

SEQ ID NO: 209145 - DNA, 15 bp, Homo sapiens
tgcaatactgtcatt

SEQ ID NO: 209146 - DNA, 15 bp, Homo sapiens
ctgcaatactgtcat

SEQ ID NO: 209147 - DNA, 15 bp, Homo sapiens
actgcaatactgtca

SEQ ID NO: 209148 - DNA, 15 bp, Homo sapiens
aactgcaatactgtc

SEQ ID NO: 209149 - DNA, 15 bp, Homo sapiens
taactgcaatactgt

SEQ ID NO: 209150 - DNA, 15 bp, Homo sapiens
ataactgcaatactg

SEQ ID NO: 209151 - DNA, 15 bp, Homo sapiens
tataactgcaatact

SEQ ID NO: 209152 - DNA, 15 bp, Homo sapiens
gtataactgcaatac

SEQ ID NO: 209153 - DNA, 15 bp, Homo sapiens
tgtataactgcaata

SEQ ID NO: 209154 - DNA, 15 bp, Homo sapiens
atgtataactgcaat

SEQ ID NO: 209155 - DNA, 15 bp, Homo sapiens
catgtataactgcaa

SEQ ID NO: 209156 - DNA, 15 bp, Homo sapiens
ccatgtataactgca

SEQ ID NO: 209157 - DNA, 15 bp, Homo sapiens
cccatgtataactgc

SEQ ID NO: 209158 - DNA, 15 bp, Homo sapiens
ccccatgtataactg

SEQ ID NO: 209159 - DNA, 15 bp, Homo sapiens
cccccatgtataact

SEQ ID NO: 209160 - DNA, 15 bp, Homo sapiens
acccccatgtataac

SEQ ID NO: 209161 - DNA, 15 bp, Homo sapiens
aacccccatgtataa

SEQ ID NO: 209162 - DNA, 15 bp, Homo sapiens
aaacccccatgtata

SEQ ID NO: 209163 - DNA, 15 bp, Homo sapiens
aaaacccccatgtat

SEQ ID NO: 209164 - DNA, 15 bp, Homo sapiens
caaaacccccatgta

SEQ ID NO: 209165 - DNA, 15 bp, Homo sapiens
ccaaaacccccatgt

SEQ ID NO: 209166 - DNA, 15 bp, Homo sapiens
accaaaacccccatg

SEQ ID NO: 209167 - DNA, 15 bp, Homo sapiens
taccaaaacccccat

SEQ ID NO: 209168 - DNA, 15 bp, Homo sapiens
gtaccaaaaccccca

SEQ ID NO: 209169 - DNA, 15 bp, Homo sapiens
agtaccaaaaccccc

SEQ ID NO: 209170 - DNA, 15 bp, Homo sapiens
aagtaccaaaacccc

SEQ ID NO: 209171 - DNA, 15 bp, Homo sapiens
aaagtaccaaaaccc

SEQ ID NO: 209172 - DNA, 15 bp, Homo sapiens
taaagtaccaaaacc

SEQ ID NO: 209173 - DNA, 15 bp, Homo sapiens
ataaagtaccaaaac

SEQ ID NO: 209174 - DNA, 15 bp, Homo sapiens
tataaagtaccaaaa

SEQ ID NO: 209175 - DNA, 15 bp, Homo sapiens
atataaagtaccaaa

SEQ ID NO: 209176 - DNA, 15 bp, Homo sapiens
aatataaagtaccaa

SEQ ID NO: 209177 - DNA, 15 bp, Homo sapiens
caatataaagtacca

SEQ ID NO: 209178 - DNA, 15 bp, Homo sapiens
acaatataaagtacc

SEQ ID NO: 209179 - DNA, 15 bp, Homo sapiens
cacaatataaagtac

SEQ ID NO: 209180 - DNA, 15 bp, Homo sapiens
tcacaatataaagta

SEQ ID NO: 209181 - DNA, 15 bp, Homo sapiens
gtcacaatataaagt

SEQ ID NO: 209182 - DNA, 15 bp, Homo sapiens
agtcacaatataaag

SEQ ID NO: 209183 - DNA, 15 bp, Homo sapiens
gagtcacaatataaa

SEQ ID NO: 209184 - DNA, 15 bp, Homo sapiens
agagtcacaatataa

SEQ ID NO: 209185 - DNA, 15 bp, Homo sapiens
cagagtcacaatata

SEQ ID NO: 209186 - DNA, 15 bp, Homo sapiens
tcagagtcacaatat

SEQ ID NO: 209187 - DNA, 15 bp, Homo sapiens
ttcagagtcacaata

SEQ ID NO: 209188 - DNA, 15 bp, Homo sapiens
attcagagtcacaat

SEQ ID NO: 209189 - DNA, 15 bp, Homo sapiens
aattcagagtcacaa

SEQ ID NO: 209190 - DNA, 15 bp, Homo sapiens
aaattcagagtcaca

SEQ ID NO: 209191 - DNA, 15 bp, Homo sapiens
taaattcagagtcac

SEQ ID NO: 209192 - DNA, 15 bp, Homo sapiens
ttaaattcagagtca

SEQ ID NO: 209193 - DNA, 15 bp, Homo sapiens
tttaaattcagagtc

SEQ ID NO: 209194 - DNA, 15 bp, Homo sapiens
ctttaaattcagagt

SEQ ID NO: 209195 - DNA, 15 bp, Homo sapiens
gctttaaattcagag

SEQ ID NO: 209196 - DNA, 15 bp, Homo sapiens
agctttaaattcaga

SEQ ID NO: 209197 - DNA, 15 bp, Homo sapiens
tagctttaaattcag

SEQ ID NO: 209198 - DNA, 15 bp, Homo sapiens
atagctttaaattca

SEQ ID NO: 209199 - DNA, 15 bp, Homo sapiens
catagctttaaattc

SEQ ID NO: 209200 - DNA, 15 bp, Homo sapiens
gcatagctttaaatt

SEQ ID NO: 209201 - DNA, 15 bp, Homo sapiens
tgcatagctttaaat

SEQ ID NO: 209202 - DNA, 15 bp, Homo sapiens
ttgcatagctttaaa

SEQ ID NO: 209203 - DNA, 15 bp, Homo sapiens
attgcatagctttaa

SEQ ID NO: 209204 - DNA, 15 bp, Homo sapiens
cattgcatagcttta

SEQ ID NO: 209205 - DNA, 15 bp, Homo sapiens
acattgcatagcttt

SEQ ID NO: 209206 - DNA, 15 bp, Homo sapiens
gacattgcatagctt

SEQ ID NO: 209207 - DNA, 15 bp, Homo sapiens
agacattgcatagct

SEQ ID NO: 209208 - DNA, 15 bp, Homo sapiens
aagacattgcatagc

SEQ ID NO: 209209 - DNA, 15 bp, Homo sapiens
gaagacattgcatag

SEQ ID NO: 209210 - DNA, 15 bp, Homo sapiens
agaagacattgcata

SEQ ID NO: 209211 - DNA, 15 bp, Homo sapiens
aagaagacattgcat

SEQ ID NO: 209212 - DNA, 15 bp, Homo sapiens
aaagaagacattgca

SEQ ID NO: 209213 - DNA, 15 bp, Homo sapiens
aaaagaagacattgc

SEQ ID NO: 209214 - DNA, 15 bp, Homo sapiens
aaaaagaagacattg

SEQ ID NO: 209215 - DNA, 15 bp, Homo sapiens
aaaaaagaagacatt

SEQ ID NO: 209216 - DNA, 15 bp, Homo sapiens
caaaaaagaagacat

SEQ ID NO: 209217 - DNA, 15 bp, Homo sapiens
tcaaaaaagaagaca

SEQ ID NO: 209218 - DNA, 15 bp, Homo sapiens
ttcaaaaaagaagac

SEQ ID NO: 209219 - DNA, 15 bp, Homo sapiens
tttcaaaaaagaaga

SEQ ID NO: 209220 - DNA, 15 bp, Homo sapiens
ctttcaaaaaagaag

SEQ ID NO: 209221 - DNA, 15 bp, Homo sapiens
cctttcaaaaaagaa

SEQ ID NO: 209222 - DNA, 15 bp, Homo sapiens
tcctttcaaaaaaga

SEQ ID NO: 209223 - DNA, 15 bp, Homo sapiens
atcctttcaaaaaag

SEQ ID NO: 209224 - DNA, 15 bp, Homo sapiens
tatcctttcaaaaaa

SEQ ID NO: 209225 - DNA, 15 bp, Homo sapiens
atatcctttcaaaaa

SEQ ID NO: 209226 - DNA, 15 bp, Homo sapiens
tatatcctttcaaaa

SEQ ID NO: 209227 - DNA, 15 bp, Homo sapiens
ttatatcctttcaaa

SEQ ID NO: 209228 - DNA, 15 bp, Homo sapiens
attatatcctttcaa

SEQ ID NO: 209229 - DNA, 15 bp, Homo sapiens
aattatatcctttca

SEQ ID NO: 209230 - DNA, 15 bp, Homo sapiens
caattatatcctttc

SEQ ID NO: 209231 - DNA, 15 bp, Homo sapiens
tcaattatatccttt

SEQ ID NO: 209232 - DNA, 15 bp, Homo sapiens
gtcaattatatcctt

SEQ ID NO: 209233 - DNA, 15 bp, Homo sapiens
tgtcaattatatcct

SEQ ID NO: 209234 - DNA, 15 bp, Homo sapiens
gtgtcaattatatcc

SEQ ID NO: 209235 - DNA, 15 bp, Homo sapiens
agtgtcaattatatc

SEQ ID NO: 209236 - DNA, 15 bp, Homo sapiens
cagtgtcaattatat

SEQ ID NO: 209237 - DNA, 15 bp, Homo sapiens
ccagtgtcaattata

SEQ ID NO: 209238 - DNA, 15 bp, Homo sapiens
gccagtgtcaattat

SEQ ID NO: 209239 - DNA, 15 bp, Homo sapiens
tgccagtgtcaatta

SEQ ID NO: 209240 - DNA, 15 bp, Homo sapiens
ttgccagtgtcaatt

SEQ ID NO: 209241 - DNA, 15 bp, Homo sapiens
tttgccagtgtcaat

SEQ ID NO: 209242 - DNA, 15 bp, Homo sapiens
ttttgccagtgtcaa

SEQ ID NO: 209243 - DNA, 15 bp, Homo sapiens
gttttgccagtgtca

SEQ ID NO: 209244 - DNA, 15 bp, Homo sapiens
tgttttgccagtgtc

SEQ ID NO: 209245 - DNA, 15 bp, Homo sapiens
ttgttttgccagtgt

SEQ ID NO: 209246 - DNA, 15 bp, Homo sapiens
attgttttgccagtg

SEQ ID NO: 209247 - DNA, 15 bp, Homo sapiens
cattgttttgccagt

SEQ ID NO: 209248 - DNA, 15 bp, Homo sapiens
gcattgttttgccag

SEQ ID NO: 209249 - DNA, 15 bp, Homo sapiens
tgcattgttttgcca

SEQ ID NO: 209250 - DNA, 15 bp, Homo sapiens
ctgcattgttttgcc

SEQ ID NO: 209251 - DNA, 15 bp, Homo sapiens
tctgcattgttttgc

SEQ ID NO: 209252 - DNA, 15 bp, Homo sapiens
gtctgcattgttttg

SEQ ID NO: 209253 - DNA, 15 bp, Homo sapiens
agtctgcattgtttt

SEQ ID NO: 209254 - DNA, 15 bp, Homo sapiens
aagtctgcattgttt

SEQ ID NO: 209255 - DNA, 15 bp, Homo sapiens
aaagtctgcattgtt

SEQ ID NO: 209256 - DNA, 15 bp, Homo sapiens
caaagtctgcattgt

SEQ ID NO: 209257 - DNA, 15 bp, Homo sapiens
gcaaagtctgcattg

SEQ ID NO: 209258 - DNA, 15 bp, Homo sapiens
agcaaagtctgcatt

SEQ ID NO: 209259 - DNA, 15 bp, Homo sapiens
aagcaaagtctgcat

SEQ ID NO: 209260 - DNA, 15 bp, Homo sapiens
aaagcaaagtctgca

SEQ ID NO: 209261 - DNA, 15 bp, Homo sapiens
gaaagcaaagtctgc

SEQ ID NO: 209262 - DNA, 15 bp, Homo sapiens
ggaaagcaaagtctg

SEQ ID NO: 209263 - DNA, 15 bp, Homo sapiens
aggaaagcaaagtct

SEQ ID NO: 209264 - DNA, 15 bp, Homo sapiens
aaggaaagcaaagtc

SEQ ID NO: 209265 - DNA, 15 bp, Homo sapiens
caaggaaagcaaagt

SEQ ID NO: 209266 - DNA, 15 bp, Homo sapiens
ccaaggaaagcaaag

SEQ ID NO: 209267 - DNA, 15 bp, Homo sapiens
accaaggaaagcaaa

SEQ ID NO: 209268 - DNA, 15 bp, Homo sapiens
gaccaaggaaagcaa

SEQ ID NO: 209269 - DNA, 15 bp, Homo sapiens
tgaccaaggaaagca

SEQ ID NO: 209270 - DNA, 15 bp, Homo sapiens
ctgaccaaggaaagc

SEQ ID NO: 209271 - DNA, 15 bp, Homo sapiens
cctgaccaaggaaag

SEQ ID NO: 209272 - DNA, 15 bp, Homo sapiens
gcctgaccaaggaaa

SEQ ID NO: 209273 - DNA, 15 bp, Homo sapiens
tgcctgaccaaggaa

SEQ ID NO: 209274 - DNA, 15 bp, Homo sapiens
ctgcctgaccaagga

SEQ ID NO: 209275 - DNA, 15 bp, Homo sapiens
actgcctgaccaagg

SEQ ID NO: 209276 - DNA, 15 bp, Homo sapiens
tactgcctgaccaag

SEQ ID NO: 209277 - DNA, 15 bp, Homo sapiens
atactgcctgaccaa

SEQ ID NO: 209278 - DNA, 15 bp, Homo sapiens
tatactgcctgacca

SEQ ID NO: 209279 - DNA, 15 bp, Homo sapiens
ttatactgcctgacc

SEQ ID NO: 209280 - DNA, 15 bp, Homo sapiens
attatactgcctgac

SEQ ID NO: 209281 - DNA, 15 bp, Homo sapiens
gattatactgcctga

SEQ ID NO: 209282 - DNA, 15 bp, Homo sapiens
ggattatactgcctg

SEQ ID NO: 209283 - DNA, 15 bp, Homo sapiens
tggattatactgcct

SEQ ID NO: 209284 - DNA, 15 bp, Homo sapiens
ttggattatactgcc

SEQ ID NO: 209285 - DNA, 15 bp, Homo sapiens
tttggattatactgc

SEQ ID NO: 209286 - DNA, 15 bp, Homo sapiens
ctttggattatactg

SEQ ID NO: 209287 - DNA, 15 bp, Homo sapiens
tctttggattatact

SEQ ID NO: 209288 - DNA, 15 bp, Homo sapiens
atctttggattatac

SEQ ID NO: 209289 - DNA, 15 bp, Homo sapiens
catctttggattata

SEQ ID NO: 209290 - DNA, 15 bp, Homo sapiens
ccatctttggattat

SEQ ID NO: 209291 - DNA, 15 bp, Homo sapiens
accatctttggatta

SEQ ID NO: 209292 - DNA, 15 bp, Homo sapiens
gaccatctttggatt

SEQ ID NO: 209293 - DNA, 15 bp, Homo sapiens
tgaccatctttggat

SEQ ID NO: 209294 - DNA, 15 bp, Homo sapiens
ttgaccatctttgga

SEQ ID NO: 209295 - DNA, 15 bp, Homo sapiens
cttgaccatctttgg

SEQ ID NO: 209296 - DNA, 15 bp, Homo sapiens
ccttgaccatctttg

SEQ ID NO: 209297 - DNA, 15 bp, Homo sapiens
accttgaccatcttt

SEQ ID NO: 209298 - DNA, 15 bp, Homo sapiens
gaccttgaccatctt

SEQ ID NO: 209299 - DNA, 15 bp, Homo sapiens
cgaccttgaccatct

SEQ ID NO: 209300 - DNA, 15 bp, Homo sapiens
gcgaccttgaccatc

SEQ ID NO: 209301 - DNA, 15 bp, Homo sapiens
tgcgaccttgaccat

SEQ ID NO: 209302 - DNA, 15 bp, Homo sapiens
ttgcgaccttgacca

SEQ ID NO: 209303 - DNA, 15 bp, Homo sapiens
cttgcgaccttgacc

SEQ ID NO: 209304 - DNA, 15 bp, Homo sapiens
ccttgcgaccttgac

SEQ ID NO: 209305 - DNA, 15 bp, Homo sapiens
accttgcgaccttga

SEQ ID NO: 209306 - DNA, 15 bp, Homo sapiens
taccttgcgaccttg

SEQ ID NO: 209307 - DNA, 15 bp, Homo sapiens
ataccttgcgacctt

SEQ ID NO: 209308 - DNA, 15 bp, Homo sapiens
cataccttgcgacct

SEQ ID NO: 209309 - DNA, 15 bp, Homo sapiens
acataccttgcgacc

SEQ ID NO: 209310 - DNA, 15 bp, Homo sapiens
tacataccttgcgac

SEQ ID NO: 209311 - DNA, 15 bp, Homo sapiens
atacataccttgcga

SEQ ID NO: 209312 - DNA, 15 bp, Homo sapiens
catacataccttgcg

SEQ ID NO: 209313 - DNA, 15 bp, Homo sapiens
tcatacataccttgc

SEQ ID NO: 209314 - DNA, 15 bp, Homo sapiens
gtcatacataccttg

SEQ ID NO: 209315 - DNA, 15 bp, Homo sapiens
tgtcatacatacctt

SEQ ID NO: 209316 - DNA, 15 bp, Homo sapiens
atgtcatacatacct

SEQ ID NO: 209317 - DNA, 15 bp, Homo sapiens
aatgtcatacatacc

SEQ ID NO: 209318 - DNA, 15 bp, Homo sapiens
aaatgtcatacatac

SEQ ID NO: 209319 - DNA, 15 bp, Homo sapiens
aaaatgtcatacata

SEQ ID NO: 209320 - DNA, 15 bp, Homo sapiens
caaaatgtcatacat

SEQ ID NO: 209321 - DNA, 15 bp, Homo sapiens
tcaaaatgtcataca

SEQ ID NO: 209322 - DNA, 15 bp, Homo sapiens
gtcaaaatgtcatac

SEQ ID NO: 209323 - DNA, 15 bp, Homo sapiens
tgtcaaaatgtcata

SEQ ID NO: 209324 - DNA, 15 bp, Homo sapiens
gtgtcaaaatgtcat

SEQ ID NO: 209325 - DNA, 15 bp, Homo sapiens
tgtgtcaaaatgtca

SEQ ID NO: 209326 - DNA, 15 bp, Homo sapiens
ctgtgtcaaaatgtc

SEQ ID NO: 209327 - DNA, 15 bp, Homo sapiens
tctgtgtcaaaatgt

SEQ ID NO: 209328 - DNA, 15 bp, Homo sapiens
ttctgtgtcaaaatg

SEQ ID NO: 209329 - DNA, 15 bp, Homo sapiens
attctgtgtcaaaat

SEQ ID NO: 209330 - DNA, 15 bp, Homo sapiens
tattctgtgtcaaaa

SEQ ID NO: 209331 - DNA, 15 bp, Homo sapiens
atattctgtgtcaaa

SEQ ID NO: 209332 - DNA, 15 bp, Homo sapiens
aatattctgtgtcaa

SEQ ID NO: 209333 - DNA, 15 bp, Homo sapiens
aaatattctgtgtca

SEQ ID NO: 209334 - DNA, 15 bp, Homo sapiens
aaaatattctgtgtc

SEQ ID NO: 209335 - DNA, 15 bp, Homo sapiens
gaaaatattctgtgt

SEQ ID NO: 209336 - DNA, 15 bp, Homo sapiens
ggaaaatattctgtg

SEQ ID NO: 209337 - DNA, 15 bp, Homo sapiens
aggaaaatattctgt

SEQ ID NO: 209338 - DNA, 15 bp, Homo sapiens
gaggaaaatattctg

SEQ ID NO: 209339 - DNA, 15 bp, Homo sapiens
tgaggaaaatattct

SEQ ID NO: 209340 - DNA, 15 bp, Homo sapiens
atgaggaaaatattc

SEQ ID NO: 209341 - DNA, 15 bp, Homo sapiens
aatgaggaaaatatt

SEQ ID NO: 209342 - DNA, 15 bp, Homo sapiens
aaatgaggaaaatat

SEQ ID NO: 209343 - DNA, 15 bp, Homo sapiens
caaatgaggaaaata

SEQ ID NO: 209344 - DNA, 15 bp, Homo sapiens
tcaaatgaggaaaat

SEQ ID NO: 209345 - DNA, 15 bp, Homo sapiens
ttcaaatgaggaaaa

SEQ ID NO: 209346 - DNA, 15 bp, Homo sapiens
cttcaaatgaggaaa

SEQ ID NO: 209347 - DNA, 15 bp, Homo sapiens
ccttcaaatgaggaa

SEQ ID NO: 209348 - DNA, 15 bp, Homo sapiens
cccttcaaatgagga

SEQ ID NO: 209349 - DNA, 15 bp, Homo sapiens
ccccttcaaatgagg

SEQ ID NO: 209350 - DNA, 15 bp, Homo sapiens
cccccttcaaatgag

SEQ ID NO: 209351 - DNA, 15 bp, Homo sapiens
tcccccttcaaatga

SEQ ID NO: 209352 - DNA, 15 bp, Homo sapiens
atcccccttcaaatg

SEQ ID NO: 209353 - DNA, 15 bp, Homo sapiens
aatcccccttcaaat

SEQ ID NO: 209354 - DNA, 15 bp, Homo sapiens
taatcccccttcaaa

SEQ ID NO: 209355 - DNA, 15 bp, Homo sapiens
ttaatcccccttcaa

SEQ ID NO: 209356 - DNA, 15 bp, Homo sapiens
cttaatcccccttca

SEQ ID NO: 209357 - DNA, 15 bp, Homo sapiens
acttaatcccccttc

SEQ ID NO: 209358 - DNA, 15 bp, Homo sapiens
cacttaatccccctt

SEQ ID NO: 209359 - DNA, 15 bp, Homo sapiens
tcacttaatccccct

SEQ ID NO: 209360 - DNA, 15 bp, Homo sapiens
atcacttaatccccc

SEQ ID NO: 209361 - DNA, 15 bp, Homo sapiens
aatcacttaatcccc

SEQ ID NO: 209362 - DNA, 15 bp, Homo sapiens
caatcacttaatccc

SEQ ID NO: 209363 - DNA, 15 bp, Homo sapiens
gcaatcacttaatcc

SEQ ID NO: 209364 - DNA, 15 bp, Homo sapiens
agcaatcacttaatc

SEQ ID NO: 209365 - DNA, 15 bp, Homo sapiens
aagcaatcacttaat

SEQ ID NO: 209366 - DNA, 15 bp, Homo sapiens
gaagcaatcacttaa

SEQ ID NO: 209367 - DNA, 15 bp, Homo sapiens
agaagcaatcactta

SEQ ID NO: 209368 - DNA, 15 bp, Homo sapiens
aagaagcaatcactt

SEQ ID NO: 209369 - DNA, 15 bp, Homo sapiens
aaagaagcaatcact

SEQ ID NO: 209370 - DNA, 15 bp, Homo sapiens
aaaagaagcaatcac

SEQ ID NO: 209371 - DNA, 15 bp, Homo sapiens
aaaaagaagcaatca

SEQ ID NO: 209372 - DNA, 15 bp, Homo sapiens
taaaaagaagcaatc

SEQ ID NO: 209373 - DNA, 15 bp, Homo sapiens
ttaaaaagaagcaat

SEQ ID NO: 209374 - DNA, 15 bp, Homo sapiens
cttaaaaagaagcaa

SEQ ID NO: 209375 - DNA, 15 bp, Homo sapiens
ccttaaaaagaagca

SEQ ID NO: 209376 - DNA, 15 bp, Homo sapiens
tccttaaaaagaagc

SEQ ID NO: 209377 - DNA, 15 bp, Homo sapiens
atccttaaaaagaag

SEQ ID NO: 209378 - DNA, 15 bp, Homo sapiens
tatccttaaaaagaa

SEQ ID NO: 209379 - DNA, 15 bp, Homo sapiens
ttatccttaaaaaga

SEQ ID NO: 209380 - DNA, 15 bp, Homo sapiens
tttatccttaaaaag

SEQ ID NO: 209381 - DNA, 15 bp, Homo sapiens
atttatccttaaaaa

SEQ ID NO: 209382 - DNA, 15 bp, Homo sapiens
catttatccttaaaa

SEQ ID NO: 209383 - DNA, 15 bp, Homo sapiens
acatttatccttaaa

SEQ ID NO: 209384 - DNA, 15 bp, Homo sapiens
aacatttatccttaa

SEQ ID NO: 209385 - DNA, 15 bp, Homo sapiens
aaacatttatcctta

SEQ ID NO: 209386 - DNA, 15 bp, Homo sapiens
aaaacatttatcctt

SEQ ID NO: 209387 - DNA, 15 bp, Homo sapiens
gaaaacatttatcct

SEQ ID NO: 209388 - DNA, 15 bp, Homo sapiens
tgaaaacatttatcc

SEQ ID NO: 209389 - DNA, 15 bp, Homo sapiens
ttgaaaacatttatc

SEQ ID NO: 209390 - DNA, 15 bp, Homo sapiens
gttgaaaacatttat

SEQ ID NO: 209391 - DNA, 15 bp, Homo sapiens
agttgaaaacattta

SEQ ID NO: 209392 - DNA, 15 bp, Homo sapiens
cagttgaaaacattt

SEQ ID NO: 209393 - DNA, 15 bp, Homo sapiens
acagttgaaaacatt

SEQ ID NO: 209394 - DNA, 15 bp, Homo sapiens
gacagttgaaaacat

SEQ ID NO: 209395 - DNA, 15 bp, Homo sapiens
tgacagttgaaaaca

SEQ ID NO: 209396 - DNA, 15 bp, Homo sapiens
atgacagttgaaaac

SEQ ID NO: 209397 - DNA, 15 bp, Homo sapiens
aatgacagttgaaaa

SEQ ID NO: 209398 - DNA, 15 bp, Homo sapiens
aaatgacagttgaaa

SEQ ID NO: 209399 - DNA, 15 bp, Homo sapiens
aaaatgacagttgaa

SEQ ID NO: 209400 - DNA, 15 bp, Homo sapiens
taaaatgacagttga

SEQ ID NO: 209401 - DNA, 15 bp, Homo sapiens
ataaaatgacagttg

SEQ ID NO: 209402 - DNA, 15 bp, Homo sapiens
gataaaatgacagtt

SEQ ID NO: 209403 - DNA, 15 bp, Homo sapiens
agataaaatgacagt

SEQ ID NO: 209404 - DNA, 15 bp, Homo sapiens
aagataaaatgacag

SEQ ID NO: 209405 - DNA, 15 bp, Homo sapiens
gaagataaaatgaca

SEQ ID NO: 209406 - DNA, 15 bp, Homo sapiens
cgaagataaaatgac

SEQ ID NO: 209407 - DNA, 15 bp, Homo sapiens
tcgaagataaaatga

SEQ ID NO: 209408 - DNA, 15 bp, Homo sapiens
ttcgaagataaaatg

SEQ ID NO: 209409 - DNA, 15 bp, Homo sapiens
tttcgaagataaaat

SEQ ID NO: 209410 - DNA, 15 bp, Homo sapiens
ttttcgaagataaaa

SEQ ID NO: 209411 - DNA, 15 bp, Homo sapiens
cttttcgaagataaa

SEQ ID NO: 209412 - DNA, 15 bp, Homo sapiens
acttttcgaagataa

SEQ ID NO: 209413 - DNA, 15 bp, Homo sapiens
tacttttcgaagata

SEQ ID NO: 209414 - DNA, 15 bp, Homo sapiens
ttacttttcgaagat

SEQ ID NO: 209415 - DNA, 15 bp, Homo sapiens
attacttttcgaaga

SEQ ID NO: 209416 - DNA, 15 bp, Homo sapiens
cattacttttcgaag

SEQ ID NO: 209417 - DNA, 15 bp, Homo sapiens
acattacttttcgaa

SEQ ID NO: 209418 - DNA, 15 bp, Homo sapiens
tacattacttttcga

SEQ ID NO: 209419 - DNA, 15 bp, Homo sapiens
ttacattacttttcg

SEQ ID NO: 209420 - DNA, 15 bp, Homo sapiens
attacattacttttc

SEQ ID NO: 209421 - DNA, 15 bp, Homo sapiens
gattacattactttt

SEQ ID NO: 209422 - DNA, 15 bp, Homo sapiens
agattacattacttt

SEQ ID NO: 209423 - DNA, 15 bp, Homo sapiens
gagattacattactt

SEQ ID NO: 209424 - DNA, 15 bp, Homo sapiens
tgagattacattact

SEQ ID NO: 209425 - DNA, 15 bp, Homo sapiens
atgagattacattac

SEQ ID NO: 209426 - DNA, 15 bp, Homo sapiens
tatgagattacatta

SEQ ID NO: 209427 - DNA, 15 bp, Homo sapiens
atatgagattacatt

SEQ ID NO: 209428 - DNA, 15 bp, Homo sapiens
tatatgagattacat

SEQ ID NO: 209429 - DNA, 15 bp, Homo sapiens
ttatatgagattaca

SEQ ID NO: 209430 - DNA, 15 bp, Homo sapiens
cttatatgagattac

SEQ ID NO: 209431 - DNA, 15 bp, Homo sapiens
tcttatatgagatta

SEQ ID NO: 209432 - DNA, 15 bp, Homo sapiens
gtcttatatgagatt

SEQ ID NO: 209433 - DNA, 15 bp, Homo sapiens
agtcttatatgagat

SEQ ID NO: 209434 - DNA, 15 bp, Homo sapiens
aagtcttatatgaga

SEQ ID NO: 209435 - DNA, 15 bp, Homo sapiens
taagtcttatatgag

SEQ ID NO: 209436 - DNA, 15 bp, Homo sapiens
ttaagtcttatatga

SEQ ID NO: 209437 - DNA, 15 bp, Homo sapiens
cttaagtcttatatg

SEQ ID NO: 209438 - DNA, 15 bp, Homo sapiens
tcttaagtcttatat

SEQ ID NO: 209439 - DNA, 15 bp, Homo sapiens
atcttaagtcttata

SEQ ID NO: 209440 - DNA, 15 bp, Homo sapiens
tatcttaagtcttat

SEQ ID NO: 209441 - DNA, 15 bp, Homo sapiens
atatcttaagtctta

SEQ ID NO: 209442 - DNA, 15 bp, Homo sapiens
tatatcttaagtctt

SEQ ID NO: 209443 - DNA, 15 bp, Homo sapiens
ttatatcttaagtct

SEQ ID NO: 209444 - DNA, 15 bp, Homo sapiens
attatatcttaagtc

SEQ ID NO: 209445 - DNA, 15 bp, Homo sapiens
gattatatcttaagt

SEQ ID NO: 209446 - DNA, 15 bp, Homo sapiens
ggattatatcttaag

SEQ ID NO: 209447 - DNA, 15 bp, Homo sapiens
aggattatatcttaa

SEQ ID NO: 209448 - DNA, 15 bp, Homo sapiens
aaggattatatctta

SEQ ID NO: 209449 - DNA, 15 bp, Homo sapiens
aaaggattatatctt

SEQ ID NO: 209450 - DNA, 15 bp, Homo sapiens
aaaaggattatatct

SEQ ID NO: 209451 - DNA, 15 bp, Homo sapiens
taaaaggattatatc

SEQ ID NO: 209452 - DNA, 15 bp, Homo sapiens
ttaaaaggattatat

SEQ ID NO: 209453 - DNA, 15 bp, Homo sapiens
tttaaaaggattata

SEQ ID NO: 209454 - DNA, 15 bp, Homo sapiens
atttaaaaggattat

SEQ ID NO: 209455 - DNA, 15 bp, Homo sapiens
tatttaaaaggatta

SEQ ID NO: 209456 - DNA, 15 bp, Homo sapiens
ttatttaaaaggatt

SEQ ID NO: 209457 - DNA, 15 bp, Homo sapiens
attatttaaaaggat

SEQ ID NO: 209458 - DNA, 15 bp, Homo sapiens
aattatttaaaagga

SEQ ID NO: 209459 - DNA, 15 bp, Homo sapiens
aaattatttaaaagg

SEQ ID NO: 209460 - DNA, 15 bp, Homo sapiens
aaaattatttaaaag

SEQ ID NO: 209461 - DNA, 15 bp, Homo sapiens
caaaattatttaaaa

SEQ ID NO: 209462 - DNA, 15 bp, Homo sapiens
acaaaattatttaaa

SEQ ID NO: 209463 - DNA, 15 bp, Homo sapiens
gacaaaattatttaa

SEQ ID NO: 209464 - DNA, 15 bp, Homo sapiens
tgacaaaattattta

SEQ ID NO: 209465 - DNA, 15 bp, Homo sapiens
atgacaaaattattt

SEQ ID NO: 209466 - DNA, 15 bp, Homo sapiens
catgacaaaattatt

SEQ ID NO: 209467 - DNA, 15 bp, Homo sapiens
acatgacaaaattat

SEQ ID NO: 209468 - DNA, 15 bp, Homo sapiens
cacatgacaaaatta

SEQ ID NO: 209469 - DNA, 15 bp, Homo sapiens
acacatgacaaaatt

SEQ ID NO: 209470 - DNA, 15 bp, Homo sapiens
aacacatgacaaaat

SEQ ID NO: 209471 - DNA, 15 bp, Homo sapiens
taacacatgacaaaa

SEQ ID NO: 209472 - DNA, 15 bp, Homo sapiens
ttaacacatgacaaa

SEQ ID NO: 209473 - DNA, 15 bp, Homo sapiens
attaacacatgacaa

SEQ ID NO: 209474 - DNA, 15 bp, Homo sapiens
tattaacacatgaca

SEQ ID NO: 209475 - DNA, 15 bp, Homo sapiens
ttattaacacatgac

SEQ ID NO: 209476 - DNA, 15 bp, Homo sapiens
tttattaacacatga

SEQ ID NO: 209477 - DNA, 15 bp, Homo sapiens
ctttattaacacatg

SEQ ID NO: 209478 - DNA, 15 bp, Homo sapiens
gctttattaacacat

SEQ ID NO: 209479 - DNA, 15 bp, Homo sapiens
agctttattaacaca

SEQ ID NO: 209480 - DNA, 15 bp, Homo sapiens
gagctttattaacac

SEQ ID NO: 209481 - DNA, 15 bp, Homo sapiens
tgagctttattaaca

SEQ ID NO: 209482 - DNA, 15 bp, Homo sapiens
atgagctttattaac

SEQ ID NO: 209483 - DNA, 15 bp, Homo sapiens
tatgagctttattaa

SEQ ID NO: 209484 - DNA, 15 bp, Homo sapiens
ttatgagctttatta

SEQ ID NO: 209485 - DNA, 15 bp, Homo sapiens
attatgagctttatt

SEQ ID NO: 209486 - DNA, 15 bp, Homo sapiens
aattatgagctttat

SEQ ID NO: 209487 - DNA, 15 bp, Homo sapiens
taattatgagcttta

SEQ ID NO: 209488 - DNA, 15 bp, Homo sapiens
gtaattatgagcttt

SEQ ID NO: 209489 - DNA, 15 bp, Homo sapiens
tgtaattatgagctt

SEQ ID NO: 209490 - DNA, 15 bp, Homo sapiens
ctgtaattatgagct

SEQ ID NO: 209491 - DNA, 15 bp, Homo sapiens
actgtaattatgagc

SEQ ID NO: 209492 - DNA, 15 bp, Homo sapiens
gactgtaattatgag

SEQ ID NO: 209493 - DNA, 15 bp, Homo sapiens
tgactgtaattatga

SEQ ID NO: 209494 - DNA, 15 bp, Homo sapiens
gtgactgtaattatg

SEQ ID NO: 209495 - DNA, 15 bp, Homo sapiens
agtgactgtaattat

SEQ ID NO: 209496 - DNA, 15 bp, Homo sapiens
aagtgactgtaatta

SEQ ID NO: 209497 - DNA, 15 bp, Homo sapiens
gaagtgactgtaatt

SEQ ID NO: 209498 - DNA, 15 bp, Homo sapiens
ggaagtgactgtaat

SEQ ID NO: 209499 - DNA, 15 bp, Homo sapiens
aggaagtgactgtaa

SEQ ID NO: 209500 - DNA, 15 bp, Homo sapiens
aaggaagtgactgta

SEQ ID NO: 209501 - DNA, 15 bp, Homo sapiens
caaggaagtgactgt

SEQ ID NO: 209502 - DNA, 15 bp, Homo sapiens
gcaaggaagtgactg

SEQ ID NO: 209503 - DNA, 15 bp, Homo sapiens
ggcaaggaagtgact

SEQ ID NO: 209504 - DNA, 15 bp, Homo sapiens
aggcaaggaagtgac

SEQ ID NO: 209505 - DNA, 15 bp, Homo sapiens
taggcaaggaagtga

SEQ ID NO: 209506 - DNA, 15 bp, Homo sapiens
ttaggcaaggaagtg

SEQ ID NO: 209507 - DNA, 15 bp, Homo sapiens
attaggcaaggaagt

SEQ ID NO: 209508 - DNA, 15 bp, Homo sapiens
tattaggcaaggaag

SEQ ID NO: 209509 - DNA, 15 bp, Homo sapiens
atattaggcaaggaa

SEQ ID NO: 209510 - DNA, 15 bp, Homo sapiens
aatattaggcaagga

SEQ ID NO: 209511 - DNA, 15 bp, Homo sapiens
taatattaggcaagg

SEQ ID NO: 209512 - DNA, 15 bp, Homo sapiens
ttaatattaggcaag

SEQ ID NO: 209513 - DNA, 15 bp, Homo sapiens
gttaatattaggcaa

SEQ ID NO: 209514 - DNA, 15 bp, Homo sapiens
tgttaatattaggca

SEQ ID NO: 209515 - DNA, 15 bp, Homo sapiens
atgttaatattaggc

SEQ ID NO: 209516 - DNA, 15 bp, Homo sapiens
aatgttaatattagg

SEQ ID NO: 209517 - DNA, 15 bp, Homo sapiens
aaatgttaatattag

SEQ ID NO: 209518 - DNA, 15 bp, Homo sapiens
caaatgttaatatta

SEQ ID NO: 209519 - DNA, 15 bp, Homo sapiens
ccaaatgttaatatt

SEQ ID NO: 209520 - DNA, 15 bp, Homo sapiens
accaaatgttaatat

SEQ ID NO: 209521 - DNA, 15 bp, Homo sapiens
aaccaaatgttaata

SEQ ID NO: 209522 - DNA, 15 bp, Homo sapiens
aaaccaaatgttaat

SEQ ID NO: 209523 - DNA, 15 bp, Homo sapiens
aaaaccaaatgttaa

SEQ ID NO: 209524 - DNA, 15 bp, Homo sapiens
aaaaaccaaatgtta

SEQ ID NO: 209525 - DNA, 15 bp, Homo sapiens
gaaaaaccaaatgtt

SEQ ID NO: 209526 - DNA, 15 bp, Homo sapiens
tgaaaaaccaaatgt

SEQ ID NO: 209527 - DNA, 15 bp, Homo sapiens
ctgaaaaaccaaatg

SEQ ID NO: 209528 - DNA, 15 bp, Homo sapiens
gctgaaaaaccaaat

SEQ ID NO: 209529 - DNA, 15 bp, Homo sapiens
tgctgaaaaaccaaa

SEQ ID NO: 209530 - DNA, 15 bp, Homo sapiens
atgctgaaaaaccaa

SEQ ID NO: 209531 - DNA, 15 bp, Homo sapiens
catgctgaaaaacca

SEQ ID NO: 209532 - DNA, 15 bp, Homo sapiens
gcatgctgaaaaacc

SEQ ID NO: 209533 - DNA, 15 bp, Homo sapiens
agcatgctgaaaaac

SEQ ID NO: 209534 - DNA, 15 bp, Homo sapiens
tagcatgctgaaaaa

SEQ ID NO: 209535 - DNA, 15 bp, Homo sapiens
ttagcatgctgaaaa

SEQ ID NO: 209536 - DNA, 15 bp, Homo sapiens
attagcatgctgaaa

SEQ ID NO: 209537 - DNA, 15 bp, Homo sapiens
aattagcatgctgaa

SEQ ID NO: 209538 - DNA, 15 bp, Homo sapiens
taattagcatgctga

SEQ ID NO: 209539 - DNA, 15 bp, Homo sapiens
ataattagcatgctg

SEQ ID NO: 209540 - DNA, 15 bp, Homo sapiens
tataattagcatgct

SEQ ID NO: 209541 - DNA, 15 bp, Homo sapiens
atataattagcatgc

SEQ ID NO: 209542 - DNA, 15 bp, Homo sapiens
gatataattagcatg

SEQ ID NO: 209543 - DNA, 15 bp, Homo sapiens
tgatataattagcat

SEQ ID NO: 209544 - DNA, 15 bp, Homo sapiens
ctgatataattagca

SEQ ID NO: 209545 - DNA, 15 bp, Homo sapiens
actgatataattagc

SEQ ID NO: 209546 - DNA, 15 bp, Homo sapiens
aactgatataattag

SEQ ID NO: 209547 - DNA, 15 bp, Homo sapiens
aaactgatataatta

SEQ ID NO: 209548 - DNA, 15 bp, Homo sapiens
caaactgatataatt

SEQ ID NO: 209549 - DNA, 15 bp, Homo sapiens
acaaactgatataat

SEQ ID NO: 209550 - DNA, 15 bp, Homo sapiens
gacaaactgatataa

SEQ ID NO: 209551 - DNA, 15 bp, Homo sapiens
ggacaaactgatata

SEQ ID NO: 209552 - DNA, 15 bp, Homo sapiens
aggacaaactgatat

SEQ ID NO: 209553 - DNA, 15 bp, Homo sapiens
caggacaaactgata

SEQ ID NO: 209554 - DNA, 15 bp, Homo sapiens
tcaggacaaactgat

SEQ ID NO: 209555 - DNA, 15 bp, Homo sapiens
ttcaggacaaactga

SEQ ID NO: 209556 - DNA, 15 bp, Homo sapiens
attcaggacaaactg

SEQ ID NO: 209557 - DNA, 15 bp, Homo sapiens
tattcaggacaaact

SEQ ID NO: 209558 - DNA, 15 bp, Homo sapiens
ctattcaggacaaac

SEQ ID NO: 209559 - DNA, 15 bp, Homo sapiens
gctattcaggacaaa

SEQ ID NO: 209560 - DNA, 15 bp, Homo sapiens
tgctattcaggacaa

SEQ ID NO: 209561 - DNA, 15 bp, Homo sapiens
atgctattcaggaca

SEQ ID NO: 209562 - DNA, 15 bp, Homo sapiens
catgctattcaggac

SEQ ID NO: 209563 - DNA, 15 bp, Homo sapiens
ccatgctattcagga

SEQ ID NO: 209564 - DNA, 15 bp, Homo sapiens
gccatgctattcagg

SEQ ID NO: 209565 - DNA, 15 bp, Homo sapiens
tgccatgctattcag

SEQ ID NO: 209566 - DNA, 15 bp, Homo sapiens
ctgccatgctattca

SEQ ID NO: 209567 - DNA, 15 bp, Homo sapiens
tctgccatgctattc

SEQ ID NO: 209568 - DNA, 15 bp, Homo sapiens
ctctgccatgctatt

SEQ ID NO: 209569 - DNA, 15 bp, Homo sapiens
cctctgccatgctat

SEQ ID NO: 209570 - DNA, 15 bp, Homo sapiens
tcctctgccatgcta

SEQ ID NO: 209571 - DNA, 15 bp, Homo sapiens
atcctctgccatgct

SEQ ID NO: 209572 - DNA, 15 bp, Homo sapiens
aatcctctgccatgc

SEQ ID NO: 209573 - DNA, 15 bp, Homo sapiens
aaatcctctgccatg

SEQ ID NO: 209574 - DNA, 15 bp, Homo sapiens
aaaatcctctgccat

SEQ ID NO: 209575 - DNA, 15 bp, Homo sapiens
caaaatcctctgcca

SEQ ID NO: 209576 - DNA, 15 bp, Homo sapiens
ccaaaatcctctgcc

SEQ ID NO: 209577 - DNA, 15 bp, Homo sapiens
cccaaaatcctctgc

SEQ ID NO: 209578 - DNA, 15 bp, Homo sapiens
gcccaaaatcctctg

SEQ ID NO: 209579 - DNA, 15 bp, Homo sapiens
ggcccaaaatcctct

SEQ ID NO: 209580 - DNA, 15 bp, Homo sapiens
gggcccaaaatcctc

SEQ ID NO: 209581 - DNA, 15 bp, Homo sapiens
ggggcccaaaatcct

SEQ ID NO: 209582 - DNA, 15 bp, Homo sapiens
gggggcccaaaatcc

SEQ ID NO: 209583 - DNA, 15 bp, Homo sapiens
agggggcccaaaatc

SEQ ID NO: 209584 - DNA, 15 bp, Homo sapiens
aagggggcccaaaat

SEQ ID NO: 209585 - DNA, 15 bp, Homo sapiens
caagggggcccaaaa

SEQ ID NO: 209586 - DNA, 15 bp, Homo sapiens
gcaagggggcccaaa

SEQ ID NO: 209587 - DNA, 15 bp, Homo sapiens
tgcaagggggcccaa

SEQ ID NO: 209588 - DNA, 15 bp, Homo sapiens
ttgcaagggggccca

SEQ ID NO: 209589 - DNA, 15 bp, Homo sapiens
tttgcaagggggccc

SEQ ID NO: 209590 - DNA, 15 bp, Homo sapiens
ttttgcaagggggcc

SEQ ID NO: 209591 - DNA, 15 bp, Homo sapiens
attttgcaagggggc

SEQ ID NO: 209592 - DNA, 15 bp, Homo sapiens
aattttgcaaggggg

SEQ ID NO: 209593 - DNA, 15 bp, Homo sapiens
taattttgcaagggg

SEQ ID NO: 209594 - DNA, 15 bp, Homo sapiens
ttaattttgcaaggg

SEQ ID NO: 209595 - DNA, 15 bp, Homo sapiens
cttaattttgcaagg

SEQ ID NO: 209596 - DNA, 15 bp, Homo sapiens
tcttaattttgcaag

SEQ ID NO: 209597 - DNA, 15 bp, Homo sapiens
ttcttaattttgcaa

SEQ ID NO: 209598 - DNA, 15 bp, Homo sapiens
attcttaattttgca

SEQ ID NO: 209599 - DNA, 15 bp, Homo sapiens
tattcttaattttgc

SEQ ID NO: 209600 - DNA, 15 bp, Homo sapiens
ttattcttaattttg

SEQ ID NO: 209601 - DNA, 15 bp, Homo sapiens
cttattcttaatttt

SEQ ID NO: 209602 - DNA, 15 bp, Homo sapiens
ccttattcttaattt

SEQ ID NO: 209603 - DNA, 15 bp, Homo sapiens
tccttattcttaatt

SEQ ID NO: 209604 - DNA, 15 bp, Homo sapiens
atccttattcttaat

SEQ ID NO: 209605 - DNA, 15 bp, Homo sapiens
aatccttattcttaa

SEQ ID NO: 209606 - DNA, 15 bp, Homo sapiens
gaatccttattctta

SEQ ID NO: 209607 - DNA, 15 bp, Homo sapiens
ggaatccttattctt

SEQ ID NO: 209608 - DNA, 15 bp, Homo sapiens
tggaatccttattct

SEQ ID NO: 209609 - DNA, 15 bp, Homo sapiens
ttggaatccttattc

SEQ ID NO: 209610 - DNA, 15 bp, Homo sapiens
tttggaatccttatt

SEQ ID NO: 209611 - DNA, 15 bp, Homo sapiens
ctttggaatccttat

SEQ ID NO: 209612 - DNA, 15 bp, Homo sapiens
gctttggaatcctta

SEQ ID NO: 209613 - DNA, 15 bp, Homo sapiens
cgctttggaatcctt

SEQ ID NO: 209614 - DNA, 15 bp, Homo sapiens
ccgctttggaatcct

SEQ ID NO: 209615 - DNA, 15 bp, Homo sapiens
cccgctttggaatcc

SEQ ID NO: 209616 - DNA, 15 bp, Homo sapiens
acccgctttggaatc

SEQ ID NO: 209617 - DNA, 15 bp, Homo sapiens
cacccgctttggaat

SEQ ID NO: 209618 - DNA, 15 bp, Homo sapiens
tcacccgctttggaa

SEQ ID NO: 209619 - DNA, 15 bp, Homo sapiens
ctcacccgctttgga

SEQ ID NO: 209620 - DNA, 15 bp, Homo sapiens
cctcacccgctttgg

SEQ ID NO: 209621 - DNA, 15 bp, Homo sapiens
tcctcacccgctttg

SEQ ID NO: 209622 - DNA, 15 bp, Homo sapiens
ttcctcacccgcttt

SEQ ID NO: 209623 - DNA, 15 bp, Homo sapiens
cttcctcacccgctt

SEQ ID NO: 209624 - DNA, 15 bp, Homo sapiens
acttcctcacccgct

SEQ ID NO: 209625 - DNA, 15 bp, Homo sapiens
cacttcctcacccgc

SEQ ID NO: 209626 - DNA, 15 bp, Homo sapiens
tcacttcctcacccg

SEQ ID NO: 209627 - DNA, 15 bp, Homo sapiens
atcacttcctcaccc

SEQ ID NO: 209628 - DNA, 15 bp, Homo sapiens
tatcacttcctcacc

SEQ ID NO: 209629 - DNA, 15 bp, Homo sapiens
ctatcacttcctcac

SEQ ID NO: 209630 - DNA, 15 bp, Homo sapiens
cctatcacttcctca

SEQ ID NO: 209631 - DNA, 15 bp, Homo sapiens
tcctatcacttcctc

SEQ ID NO: 209632 - DNA, 15 bp, Homo sapiens
ttcctatcacttcct

SEQ ID NO: 209633 - DNA, 15 bp, Homo sapiens
cttcctatcacttcc

SEQ ID NO: 209634 - DNA, 15 bp, Homo sapiens
ccttcctatcacttc

SEQ ID NO: 209635 - DNA, 15 bp, Homo sapiens
cccttcctatcactt

SEQ ID NO: 209636 - DNA, 15 bp, Homo sapiens
ccccttcctatcact

SEQ ID NO: 209637 - DNA, 15 bp, Homo sapiens
accccttcctatcac

SEQ ID NO: 209638 - DNA, 15 bp, Homo sapiens
caccccttcctatca

SEQ ID NO: 209639 - DNA, 15 bp, Homo sapiens
ccaccccttcctatc

SEQ ID NO: 209640 - DNA, 15 bp, Homo sapiens
cccaccccttcctat

SEQ ID NO: 209641 - DNA, 15 bp, Homo sapiens
gcccaccccttccta

SEQ ID NO: 209642 - DNA, 15 bp, Homo sapiens
ggcccaccccttcct

SEQ ID NO: 209643 - DNA, 15 bp, Homo sapiens
gggcccaccccttcc

SEQ ID NO: 209644 - DNA, 15 bp, Homo sapiens
agggcccaccccttc

SEQ ID NO: 209645 - DNA, 15 bp, Homo sapiens
cagggcccacccctt

SEQ ID NO: 209646 - DNA, 15 bp, Homo sapiens
tcagggcccacccct

SEQ ID NO: 209647 - DNA, 15 bp, Homo sapiens
ttcagggcccacccc

SEQ ID NO: 209648 - DNA, 15 bp, Homo sapiens
cttcagggcccaccc

SEQ ID NO: 209649 - DNA, 15 bp, Homo sapiens
tcttcagggcccacc

SEQ ID NO: 209650 - DNA, 15 bp, Homo sapiens
atcttcagggcccac

SEQ ID NO: 209651 - DNA, 15 bp, Homo sapiens
gatcttcagggccca

SEQ ID NO: 209652 - DNA, 15 bp, Homo sapiens
agatcttcagggccc

SEQ ID NO: 209653 - DNA, 15 bp, Homo sapiens
cagatcttcagggcc

SEQ ID NO: 209654 - DNA, 15 bp, Homo sapiens
ccagatcttcagggc

SEQ ID NO: 209655 - DNA, 15 bp, Homo sapiens
tccagatcttcaggg

SEQ ID NO: 209656 - DNA, 15 bp, Homo sapiens
gtccagatcttcagg

SEQ ID NO: 209657 - DNA, 15 bp, Homo sapiens
ggtccagatcttcag

SEQ ID NO: 209658 - DNA, 15 bp, Homo sapiens
aggtccagatcttca

SEQ ID NO: 209659 - DNA, 15 bp, Homo sapiens
gaggtccagatcttc

SEQ ID NO: 209660 - DNA, 15 bp, Homo sapiens
ggaggtccagatctt

SEQ ID NO: 209661 - DNA, 15 bp, Homo sapiens
aggaggtccagatct

SEQ ID NO: 209662 - DNA, 15 bp, Homo sapiens
caggaggtccagatc

SEQ ID NO: 209663 - DNA, 15 bp, Homo sapiens
ccaggaggtccagat

SEQ ID NO: 209664 - DNA, 15 bp, Homo sapiens
tccaggaggtccaga

SEQ ID NO: 209665 - DNA, 15 bp, Homo sapiens
ttccaggaggtccag

SEQ ID NO: 209666 - DNA, 15 bp, Homo sapiens
attccaggaggtcca

SEQ ID NO: 209667 - DNA, 15 bp, Homo sapiens
aattccaggaggtcc

SEQ ID NO: 209668 - DNA, 15 bp, Homo sapiens
caattccaggaggtc

SEQ ID NO: 209669 - DNA, 15 bp, Homo sapiens
tcaattccaggaggt

SEQ ID NO: 209670 - DNA, 15 bp, Homo sapiens
ctcaattccaggagg

SEQ ID NO: 209671 - DNA, 15 bp, Homo sapiens
actcaattccaggag

SEQ ID NO: 209672 - DNA, 15 bp, Homo sapiens
cactcaattccagga

SEQ ID NO: 209673 - DNA, 15 bp, Homo sapiens
tcactcaattccagg

SEQ ID NO: 209674 - DNA, 15 bp, Homo sapiens
atcactcaattccag

SEQ ID NO: 209675 - DNA, 15 bp, Homo sapiens
catcactcaattcca

SEQ ID NO: 209676 - DNA, 15 bp, Homo sapiens
tcatcactcaattcc

SEQ ID NO: 209677 - DNA, 15 bp, Homo sapiens
ttcatcactcaattc

SEQ ID NO: 209678 - DNA, 15 bp, Homo sapiens
attcatcactcaatt

SEQ ID NO: 209679 - DNA, 15 bp, Homo sapiens
cattcatcactcaat

SEQ ID NO: 209680 - DNA, 15 bp, Homo sapiens
gcattcatcactcaa

SEQ ID NO: 209681 - DNA, 15 bp, Homo sapiens
agcattcatcactca

SEQ ID NO: 209682 - DNA, 15 bp, Homo sapiens
cagcattcatcactc

SEQ ID NO: 209683 - DNA, 15 bp, Homo sapiens
gcagcattcatcact

SEQ ID NO: 209684 - DNA, 15 bp, Homo sapiens
tgcagcattcatcac

SEQ ID NO: 209685 - DNA, 15 bp, Homo sapiens
atgcagcattcatca

SEQ ID NO: 209686 - DNA, 15 bp, Homo sapiens
gatgcagcattcatc

SEQ ID NO: 209687 - DNA, 15 bp, Homo sapiens
agatgcagcattcat

SEQ ID NO: 209688 - DNA, 15 bp, Homo sapiens
aagatgcagcattca

SEQ ID NO: 209689 - DNA, 15 bp, Homo sapiens
gaagatgcagcattc

SEQ ID NO: 209690 - DNA, 15 bp, Homo sapiens
agaagatgcagcatt

SEQ ID NO: 209691 - DNA, 15 bp, Homo sapiens
aagaagatgcagcat

SEQ ID NO: 209692 - DNA, 15 bp, Homo sapiens
aaagaagatgcagca

SEQ ID NO: 209693 - DNA, 15 bp, Homo sapiens
caaagaagatgcagc

SEQ ID NO: 209694 - DNA, 15 bp, Homo sapiens
acaaagaagatgcag

SEQ ID NO: 209695 - DNA, 15 bp, Homo sapiens
cacaaagaagatgca

SEQ ID NO: 209696 - DNA, 15 bp, Homo sapiens
acacaaagaagatgc

SEQ ID NO: 209697 - DNA, 15 bp, Homo sapiens
gacacaaagaagatg

SEQ ID NO: 209698 - DNA, 15 bp, Homo sapiens
agacacaaagaagat

SEQ ID NO: 209699 - DNA, 15 bp, Homo sapiens
cagacacaaagaaga

SEQ ID NO: 209700 - DNA, 15 bp, Homo sapiens
acagacacaaagaag

SEQ ID NO: 209701 - DNA, 15 bp, Homo sapiens
tacagacacaaagaa

SEQ ID NO: 209702 - DNA, 15 bp, Homo sapiens
ctacagacacaaaga

SEQ ID NO: 209703 - DNA, 15 bp, Homo sapiens
actacagacacaaag

SEQ ID NO: 209704 - DNA, 15 bp, Homo sapiens
cactacagacacaaa

SEQ ID NO: 209705 - DNA, 15 bp, Homo sapiens
tcactacagacacaa

SEQ ID NO: 209706 - DNA, 15 bp, Homo sapiens
ttcactacagacaca

SEQ ID NO: 209707 - DNA, 15 bp, Homo sapiens
tttcactacagacac

SEQ ID NO: 209708 - DNA, 15 bp, Homo sapiens
atttcactacagaca

SEQ ID NO: 209709 - DNA, 15 bp, Homo sapiens
aatttcactacagac

SEQ ID NO: 209710 - DNA, 15 bp, Homo sapiens
aaatttcactacaga

SEQ ID NO: 209711 - DNA, 15 bp, Homo sapiens
aaaatttcactacag

SEQ ID NO: 209712 - DNA, 15 bp, Homo sapiens
taaaatttcactaca

SEQ ID NO: 209713 - DNA, 15 bp, Homo sapiens
ataaaatttcactac

SEQ ID NO: 209714 - DNA, 15 bp, Homo sapiens
tataaaatttcacta

SEQ ID NO: 209715 - DNA, 15 bp, Homo sapiens
ttataaaatttcact

SEQ ID NO: 209716 - DNA, 15 bp, Homo sapiens
attataaaatttcac

SEQ ID NO: 209717 - DNA, 15 bp, Homo sapiens
cattataaaatttca

SEQ ID NO: 209718 - DNA, 15 bp, Homo sapiens
gcattataaaatttc

SEQ ID NO: 209719 - DNA, 15 bp, Homo sapiens
ggcattataaaattt

SEQ ID NO: 209720 - DNA, 15 bp, Homo sapiens
aggcattataaaatt

SEQ ID NO: 209721 - DNA, 15 bp, Homo sapiens
caggcattataaaat

SEQ ID NO: 209722 - DNA, 15 bp, Homo sapiens
gcaggcattataaaa

SEQ ID NO: 209723 - DNA, 15 bp, Homo sapiens
agcaggcattataaa

SEQ ID NO: 209724 - DNA, 15 bp, Homo sapiens
aagcaggcattataa

SEQ ID NO: 209725 - DNA, 15 bp, Homo sapiens
gaagcaggcattata

SEQ ID NO: 209726 - DNA, 15 bp, Homo sapiens
ggaagcaggcattat

SEQ ID NO: 209727 - DNA, 15 bp, Homo sapiens
aggaagcaggcatta

SEQ ID NO: 209728 - DNA, 15 bp, Homo sapiens
aaggaagcaggcatt

SEQ ID NO: 209729 - DNA, 15 bp, Homo sapiens
aaaggaagcaggcat

SEQ ID NO: 209730 - DNA, 15 bp, Homo sapiens
aaaaggaagcaggca

SEQ ID NO: 209731 - DNA, 15 bp, Homo sapiens
aaaaaggaagcaggc

SEQ ID NO: 209732 - DNA, 15 bp, Homo sapiens
aaaaaaggaagcagg

SEQ ID NO: 209733 - DNA, 15 bp, Homo sapiens
taaaaaaggaagcag

SEQ ID NO: 209734 - DNA, 15 bp, Homo sapiens
ataaaaaaggaagca

SEQ ID NO: 209735 - DNA, 15 bp, Homo sapiens
aataaaaaaggaagc

SEQ ID NO: 209736 - DNA, 15 bp, Homo sapiens
taataaaaaaggaag

SEQ ID NO: 209737 - DNA, 15 bp, Homo sapiens
ttaataaaaaaggaa

SEQ ID NO: 209738 - DNA, 15 bp, Homo sapiens
cttaataaaaaagga

SEQ ID NO: 209739 - DNA, 15 bp, Homo sapiens
acttaataaaaaagg

SEQ ID NO: 209740 - DNA, 15 bp, Homo sapiens
gacttaataaaaaag

SEQ ID NO: 209741 - DNA, 15 bp, Homo sapiens
cgacttaataaaaaa

SEQ ID NO: 209742 - DNA, 15 bp, Homo sapiens
ccgacttaataaaaa

SEQ ID NO: 209743 - DNA, 15 bp, Homo sapiens
gccgacttaataaaa

SEQ ID NO: 209744 - DNA, 15 bp, Homo sapiens
ggccgacttaataaa

SEQ ID NO: 209745 - DNA, 15 bp, Homo sapiens
aggccgacttaataa

SEQ ID NO: 209746 - DNA, 15 bp, Homo sapiens
gaggccgacttaata

SEQ ID NO: 209747 - DNA, 15 bp, Homo sapiens
tgaggccgacttaat

SEQ ID NO: 209748 - DNA, 15 bp, Homo sapiens
gtgaggccgacttaa

SEQ ID NO: 209749 - DNA, 15 bp, Homo sapiens
ggtgaggccgactta

SEQ ID NO: 209750 - DNA, 15 bp, Homo sapiens
aggtgaggccgactt

SEQ ID NO: 209751 - DNA, 15 bp, Homo sapiens
gaggtgaggccgact

SEQ ID NO: 209752 - DNA, 15 bp, Homo sapiens
ggaggtgaggccgac

SEQ ID NO: 209753 - DNA, 15 bp, Homo sapiens
aggaggtgaggccga

SEQ ID NO: 209754 - DNA, 15 bp, Homo sapiens
gaggaggtgaggccg

SEQ ID NO: 209755 - DNA, 15 bp, Homo sapiens
tgaggaggtgaggcc

SEQ ID NO: 209756 - DNA, 15 bp, Homo sapiens
gtgaggaggtgaggc

SEQ ID NO: 209757 - DNA, 15 bp, Homo sapiens
ggtgaggaggtgagg

SEQ ID NO: 209758 - DNA, 15 bp, Homo sapiens
aggtgaggaggtgag

SEQ ID NO: 209759 - DNA, 15 bp, Homo sapiens
aaggtgaggaggtga

SEQ ID NO: 209760 - DNA, 15 bp, Homo sapiens
taaggtgaggaggtg

SEQ ID NO: 209761 - DNA, 15 bp, Homo sapiens
gtaaggtgaggaggt

SEQ ID NO: 209762 - DNA, 15 bp, Homo sapiens
ggtaaggtgaggagg

SEQ ID NO: 209763 - DNA, 15 bp, Homo sapiens
aggtaaggtgaggag

SEQ ID NO: 209764 - DNA, 15 bp, Homo sapiens
taggtaaggtgagga

SEQ ID NO: 209765 - DNA, 15 bp, Homo sapiens
ataggtaaggtgagg

SEQ ID NO: 209766 - DNA, 15 bp, Homo sapiens
cataggtaaggtgag

SEQ ID NO: 209767 - DNA, 15 bp, Homo sapiens
gcataggtaaggtga

SEQ ID NO: 209768 - DNA, 15 bp, Homo sapiens
agcataggtaaggtg

SEQ ID NO: 209769 - DNA, 15 bp, Homo sapiens
cagcataggtaaggt

SEQ ID NO: 209770 - DNA, 15 bp, Homo sapiens
acagcataggtaagg

SEQ ID NO: 209771 - DNA, 15 bp, Homo sapiens
aacagcataggtaag

SEQ ID NO: 209772 - DNA, 15 bp, Homo sapiens
aaacagcataggtaa

SEQ ID NO: 209773 - DNA, 15 bp, Homo sapiens
aaaacagcataggta

SEQ ID NO: 209774 - DNA, 15 bp, Homo sapiens
taaaacagcataggt

SEQ ID NO: 209775 - DNA, 15 bp, Homo sapiens
gtaaaacagcatagg

SEQ ID NO: 209776 - DNA, 15 bp, Homo sapiens
agtaaaacagcatag

SEQ ID NO: 209777 - DNA, 15 bp, Homo sapiens
aagtaaaacagcata

SEQ ID NO: 209778 - DNA, 15 bp, Homo sapiens
aaagtaaaacagcat

SEQ ID NO: 209779 - DNA, 15 bp, Homo sapiens
aaaagtaaaacagca

SEQ ID NO: 209780 - DNA, 15 bp, Homo sapiens
caaaagtaaaacagc

SEQ ID NO: 209781 - DNA, 15 bp, Homo sapiens
gcaaaagtaaaacag

SEQ ID NO: 209782 - DNA, 15 bp, Homo sapiens
agcaaaagtaaaaca

SEQ ID NO: 209783 - DNA, 15 bp, Homo sapiens
aagcaaaagtaaaac

SEQ ID NO: 209784 - DNA, 15 bp, Homo sapiens
aaagcaaaagtaaaa

SEQ ID NO: 209785 - DNA, 15 bp, Homo sapiens
aaaagcaaaagtaaa

SEQ ID NO: 209786 - DNA, 15 bp, Homo sapiens
taaaagcaaaagtaa

SEQ ID NO: 209787 - DNA, 15 bp, Homo sapiens
ataaaagcaaaagta

SEQ ID NO: 209788 - DNA, 15 bp, Homo sapiens
tataaaagcaaaagt

SEQ ID NO: 209789 - DNA, 15 bp, Homo sapiens
ctataaaagcaaaag

SEQ ID NO: 209790 - DNA, 15 bp, Homo sapiens
actataaaagcaaaa

SEQ ID NO: 209791 - DNA, 15 bp, Homo sapiens
aactataaaagcaaa

SEQ ID NO: 209792 - DNA, 15 bp, Homo sapiens
gaactataaaagcaa

SEQ ID NO: 209793 - DNA, 15 bp, Homo sapiens
agaactataaaagca

SEQ ID NO: 209794 - DNA, 15 bp, Homo sapiens
tagaactataaaagc

SEQ ID NO: 209795 - DNA, 15 bp, Homo sapiens
gtagaactataaaag

SEQ ID NO: 209796 - DNA, 15 bp, Homo sapiens
ggtagaactataaaa

SEQ ID NO: 209797 - DNA, 15 bp, Homo sapiens
aggtagaactataaa

SEQ ID NO: 209798 - DNA, 15 bp, Homo sapiens
caggtagaactataa

SEQ ID NO: 209799 - DNA, 15 bp, Homo sapiens
acaggtagaactata

SEQ ID NO: 209800 - DNA, 15 bp, Homo sapiens
cacaggtagaactat

SEQ ID NO: 209801 - DNA, 15 bp, Homo sapiens
acacaggtagaacta

SEQ ID NO: 209802 - DNA, 15 bp, Homo sapiens
aacacaggtagaact

SEQ ID NO: 209803 - DNA, 15 bp, Homo sapiens
aaacacaggtagaac

SEQ ID NO: 209804 - DNA, 15 bp, Homo sapiens
taaacacaggtagaa

SEQ ID NO: 209805 - DNA, 15 bp, Homo sapiens
ataaacacaggtaga

SEQ ID NO: 209806 - DNA, 15 bp, Homo sapiens
aataaacacaggtag

SEQ ID NO: 209807 - DNA, 15 bp, Homo sapiens
aaataaacacaggta

SEQ ID NO: 209808 - DNA, 15 bp, Homo sapiens
gaaataaacacaggt

SEQ ID NO: 209809 - DNA, 15 bp, Homo sapiens
agaaataaacacagg

SEQ ID NO: 209810 - DNA, 15 bp, Homo sapiens
gagaaataaacacag

SEQ ID NO: 209811 - DNA, 15 bp, Homo sapiens
tgagaaataaacaca

SEQ ID NO: 209812 - DNA, 15 bp, Homo sapiens
atgagaaataaacac

SEQ ID NO: 209813 - DNA, 15 bp, Homo sapiens
aatgagaaataaaca

SEQ ID NO: 209814 - DNA, 15 bp, Homo sapiens
aaatgagaaataaac

SEQ ID NO: 209815 - DNA, 15 bp, Homo sapiens
aaaatgagaaataaa

SEQ ID NO: 209816 - DNA, 15 bp, Homo sapiens
gaaaatgagaaataa

SEQ ID NO: 209817 - DNA, 15 bp, Homo sapiens
cgaaaatgagaaata

SEQ ID NO: 209818 - DNA, 15 bp, Homo sapiens
acgaaaatgagaaat

SEQ ID NO: 209819 - DNA, 15 bp, Homo sapiens
aacgaaaatgagaaa

SEQ ID NO: 209820 - DNA, 15 bp, Homo sapiens
aaacgaaaatgagaa

SEQ ID NO: 209821 - DNA, 15 bp, Homo sapiens
gaaacgaaaatgaga

SEQ ID NO: 209822 - DNA, 15 bp, Homo sapiens
tgaaacgaaaatgag

SEQ ID NO: 209823 - DNA, 15 bp, Homo sapiens
atgaaacgaaaatga

SEQ ID NO: 209824 - DNA, 15 bp, Homo sapiens
gatgaaacgaaaatg

SEQ ID NO: 209825 - DNA, 15 bp, Homo sapiens
agatgaaacgaaaat

SEQ ID NO: 209826 - DNA, 15 bp, Homo sapiens
gagatgaaacgaaaa

SEQ ID NO: 209827 - DNA, 15 bp, Homo sapiens
agagatgaaacgaaa

SEQ ID NO: 209828 - DNA, 15 bp, Homo sapiens
gagagatgaaacgaa

SEQ ID NO: 209829 - DNA, 15 bp, Homo sapiens
tgagagatgaaacga

SEQ ID NO: 209830 - DNA, 15 bp, Homo sapiens
ttgagagatgaaacg

SEQ ID NO: 209831 - DNA, 15 bp, Homo sapiens
gttgagagatgaaac

SEQ ID NO: 209832 - DNA, 15 bp, Homo sapiens
tgttgagagatgaaa

SEQ ID NO: 209833 - DNA, 15 bp, Homo sapiens
ttgttgagagatgaa

SEQ ID NO: 209834 - DNA, 15 bp, Homo sapiens
gttgttgagagatga

SEQ ID NO: 209835 - DNA, 15 bp, Homo sapiens
agttgttgagagatg

SEQ ID NO: 209836 - DNA, 15 bp, Homo sapiens
gagttgttgagagat

SEQ ID NO: 209837 - DNA, 15 bp, Homo sapiens
agagttgttgagaga

SEQ ID NO: 209838 - DNA, 15 bp, Homo sapiens
cagagttgttgagag

SEQ ID NO: 209839 - DNA, 15 bp, Homo sapiens
ccagagttgttgaga

SEQ ID NO: 209840 - DNA, 15 bp, Homo sapiens
cccagagttgttgag

SEQ ID NO: 209841 - DNA, 15 bp, Homo sapiens
ccccagagttgttga

SEQ ID NO: 209842 - DNA, 15 bp, Homo sapiens
accccagagttgttg

SEQ ID NO: 209843 - DNA, 15 bp, Homo sapiens
caccccagagttgtt

SEQ ID NO: 209844 - DNA, 15 bp, Homo sapiens
ccaccccagagttgt

SEQ ID NO: 209845 - DNA, 15 bp, Homo sapiens
gccaccccagagttg

SEQ ID NO: 209846 - DNA, 15 bp, Homo sapiens
tgccaccccagagtt

SEQ ID NO: 209847 - DNA, 15 bp, Homo sapiens
atgccaccccagagt

SEQ ID NO: 209848 - DNA, 15 bp, Homo sapiens
aatgccaccccagag

SEQ ID NO: 209849 - DNA, 15 bp, Homo sapiens
taatgccaccccaga

SEQ ID NO: 209850 - DNA, 15 bp, Homo sapiens
ataatgccaccccag

SEQ ID NO: 209851 - DNA, 15 bp, Homo sapiens
aataatgccacccca

SEQ ID NO: 209852 - DNA, 15 bp, Homo sapiens
taataatgccacccc

SEQ ID NO: 209853 - DNA, 15 bp, Homo sapiens
ataataatgccaccc

SEQ ID NO: 209854 - DNA, 15 bp, Homo sapiens
aataataatgccacc

SEQ ID NO: 209855 - DNA, 15 bp, Homo sapiens
gaataataatgccac

SEQ ID NO: 209856 - DNA, 15 bp, Homo sapiens
ggaataataatgcca

SEQ ID NO: 209857 - DNA, 15 bp, Homo sapiens
gggaataataatgcc

SEQ ID NO: 209858 - DNA, 15 bp, Homo sapiens
tgggaataataatgc

SEQ ID NO: 209859 - DNA, 15 bp, Homo sapiens
gtgggaataataatg

SEQ ID NO: 209860 - DNA, 15 bp, Homo sapiens
agtgggaataataat

SEQ ID NO: 209861 - DNA, 15 bp, Homo sapiens
aagtgggaataataa

SEQ ID NO: 209862 - DNA, 15 bp, Homo sapiens
aaagtgggaataata

SEQ ID NO: 209863 - DNA, 15 bp, Homo sapiens
aaaagtgggaataat

SEQ ID NO: 209864 - DNA, 15 bp, Homo sapiens
gaaaagtgggaataa

SEQ ID NO: 209865 - DNA, 15 bp, Homo sapiens
tgaaaagtgggaata

SEQ ID NO: 209866 - DNA, 15 bp, Homo sapiens
ctgaaaagtgggaat

SEQ ID NO: 209867 - DNA, 15 bp, Homo sapiens
tctgaaaagtgggaa

SEQ ID NO: 209868 - DNA, 15 bp, Homo sapiens
atctgaaaagtggga

SEQ ID NO: 209869 - DNA, 15 bp, Homo sapiens
tatctgaaaagtggg

SEQ ID NO: 209870 - DNA, 15 bp, Homo sapiens
ttatctgaaaagtgg

SEQ ID NO: 209871 - DNA, 15 bp, Homo sapiens
cttatctgaaaagtg

SEQ ID NO: 209872 - DNA, 15 bp, Homo sapiens
ccttatctgaaaagt

SEQ ID NO: 209873 - DNA, 15 bp, Homo sapiens
accttatctgaaaag

SEQ ID NO: 209874 - DNA, 15 bp, Homo sapiens
aaccttatctgaaaa

SEQ ID NO: 209875 - DNA, 15 bp, Homo sapiens
taaccttatctgaaa

SEQ ID NO: 209876 - DNA, 15 bp, Homo sapiens
gtaaccttatctgaa

SEQ ID NO: 209877 - DNA, 15 bp, Homo sapiens
agtaaccttatctga

SEQ ID NO: 209878 - DNA, 15 bp, Homo sapiens
cagtaaccttatctg

SEQ ID NO: 209879 - DNA, 15 bp, Homo sapiens
tcagtaaccttatct

SEQ ID NO: 209880 - DNA, 15 bp, Homo sapiens
ctcagtaaccttatc

SEQ ID NO: 209881 - DNA, 15 bp, Homo sapiens
cctcagtaaccttat

SEQ ID NO: 209882 - DNA, 15 bp, Homo sapiens
gcctcagtaacctta

SEQ ID NO: 209883 - DNA, 15 bp, Homo sapiens
tgcctcagtaacctt

SEQ ID NO: 209884 - DNA, 15 bp, Homo sapiens
atgcctcagtaacct

SEQ ID NO: 209885 - DNA, 15 bp, Homo sapiens
tatgcctcagtaacc

SEQ ID NO: 209886 - DNA, 15 bp, Homo sapiens
ctatgcctcagtaac

SEQ ID NO: 209887 - DNA, 15 bp, Homo sapiens
cctatgcctcagtaa

SEQ ID NO: 209888 - DNA, 15 bp, Homo sapiens
ccctatgcctcagta

SEQ ID NO: 209889 - DNA, 15 bp, Homo sapiens
tccctatgcctcagt

SEQ ID NO: 209890 - DNA, 15 bp, Homo sapiens
ttccctatgcctcag

SEQ ID NO: 209891 - DNA, 15 bp, Homo sapiens
attccctatgcctca

SEQ ID NO: 209892 - DNA, 15 bp, Homo sapiens
aattccctatgcctc

SEQ ID NO: 209893 - DNA, 15 bp, Homo sapiens
caattccctatgcct

SEQ ID NO: 209894 - DNA, 15 bp, Homo sapiens
acaattccctatgcc

SEQ ID NO: 209895 - DNA, 15 bp, Homo sapiens
gacaattccctatgc

SEQ ID NO: 209896 - DNA, 15 bp, Homo sapiens
ggacaattccctatg

SEQ ID NO: 209897 - DNA, 15 bp, Homo sapiens
tggacaattccctat

SEQ ID NO: 209898 - DNA, 15 bp, Homo sapiens
ttggacaattcccta

SEQ ID NO: 209899 - DNA, 15 bp, Homo sapiens
tttggacaattccct

SEQ ID NO: 209900 - DNA, 15 bp, Homo sapiens
ctttggacaattccc

SEQ ID NO: 209901 - DNA, 15 bp, Homo sapiens
cctttggacaattcc

SEQ ID NO: 209902 - DNA, 15 bp, Homo sapiens
acctttggacaattc

SEQ ID NO: 209903 - DNA, 15 bp, Homo sapiens
tacctttggacaatt

SEQ ID NO: 209904 - DNA, 15 bp, Homo sapiens
gtacctttggacaat

SEQ ID NO: 209905 - DNA, 15 bp, Homo sapiens
tgtacctttggacaa

SEQ ID NO: 209906 - DNA, 15 bp, Homo sapiens
ctgtacctttggaca

SEQ ID NO: 209907 - DNA, 15 bp, Homo sapiens
tctgtacctttggac

SEQ ID NO: 209908 - DNA, 15 bp, Homo sapiens
ctctgtacctttgga

SEQ ID NO: 209909 - DNA, 15 bp, Homo sapiens
gctctgtacctttgg

SEQ ID NO: 209910 - DNA, 15 bp, Homo sapiens
agctctgtacctttg

SEQ ID NO: 209911 - DNA, 15 bp, Homo sapiens
tagctctgtaccttt

SEQ ID NO: 209912 - DNA, 15 bp, Homo sapiens
ctagctctgtacctt

SEQ ID NO: 209913 - DNA, 15 bp, Homo sapiens
actagctctgtacct

SEQ ID NO: 209914 - DNA, 15 bp, Homo sapiens
gactagctctgtacc

SEQ ID NO: 209915 - DNA, 15 bp, Homo sapiens
ggactagctctgtac

SEQ ID NO: 209916 - DNA, 15 bp, Homo sapiens
cggactagctctgta

SEQ ID NO: 209917 - DNA, 15 bp, Homo sapiens
gcggactagctctgt

SEQ ID NO: 209918 - DNA, 15 bp, Homo sapiens
agcggactagctctg

SEQ ID NO: 209919 - DNA, 15 bp, Homo sapiens
tagcggactagctct

SEQ ID NO: 209920 - DNA, 15 bp, Homo sapiens
atagcggactagctc

SEQ ID NO: 209921 - DNA, 15 bp, Homo sapiens
tatagcggactagct

SEQ ID NO: 209922 - DNA, 15 bp, Homo sapiens
ctatagcggactagc

SEQ ID NO: 209923 - DNA, 15 bp, Homo sapiens
tctatagcggactag

SEQ ID NO: 209924 - DNA, 15 bp, Homo sapiens
ctctatagcggacta

SEQ ID NO: 209925 - DNA, 15 bp, Homo sapiens
tctctatagcggact

SEQ ID NO: 209926 - DNA, 15 bp, Homo sapiens
atctctatagcggac

SEQ ID NO: 209927 - DNA, 15 bp, Homo sapiens
catctctatagcgga

SEQ ID NO: 209928 - DNA, 15 bp, Homo sapiens
tcatctctatagcgg

SEQ ID NO: 209929 - DNA, 15 bp, Homo sapiens
ctcatctctatagcg

SEQ ID NO: 209930 - DNA, 15 bp, Homo sapiens
tctcatctctatagc

SEQ ID NO: 209931 - DNA, 15 bp, Homo sapiens
atctcatctctatag

SEQ ID NO: 209932 - DNA, 15 bp, Homo sapiens
aatctcatctctata

SEQ ID NO: 209933 - DNA, 15 bp, Homo sapiens
aaatctcatctctat

SEQ ID NO: 209934 - DNA, 15 bp, Homo sapiens
caaatctcatctcta

SEQ ID NO: 209935 - DNA, 15 bp, Homo sapiens
tcaaatctcatctct

SEQ ID NO: 209936 - DNA, 15 bp, Homo sapiens
ttcaaatctcatctc

SEQ ID NO: 209937 - DNA, 15 bp, Homo sapiens
gttcaaatctcatct

SEQ ID NO: 209938 - DNA, 15 bp, Homo sapiens
ggttcaaatctcatc

SEQ ID NO: 209939 - DNA, 15 bp, Homo sapiens
gggttcaaatctcat

SEQ ID NO: 209940 - DNA, 15 bp, Homo sapiens
tgggttcaaatctca

SEQ ID NO: 209941 - DNA, 15 bp, Homo sapiens
ctgggttcaaatctc

SEQ ID NO: 209942 - DNA, 15 bp, Homo sapiens
cctgggttcaaatct

SEQ ID NO: 209943 - DNA, 15 bp, Homo sapiens
ccctgggttcaaatc

SEQ ID NO: 209944 - DNA, 15 bp, Homo sapiens
tccctgggttcaaat

SEQ ID NO: 209945 - DNA, 15 bp, Homo sapiens
ttccctgggttcaaa

SEQ ID NO: 209946 - DNA, 15 bp, Homo sapiens
gttccctgggttcaa

SEQ ID NO: 209947 - DNA, 15 bp, Homo sapiens
ggttccctgggttca

SEQ ID NO: 209948 - DNA, 15 bp, Homo sapiens
aggttccctgggttc

SEQ ID NO: 209949 - DNA, 15 bp, Homo sapiens
caggttccctgggtt

SEQ ID NO: 209950 - DNA, 15 bp, Homo sapiens
ccaggttccctgggt

SEQ ID NO: 209951 - DNA, 15 bp, Homo sapiens
gccaggttccctggg

SEQ ID NO: 209952 - DNA, 15 bp, Homo sapiens
agccaggttccctgg

SEQ ID NO: 209953 - DNA, 15 bp, Homo sapiens
gagccaggttccctg

SEQ ID NO: 209954 - DNA, 15 bp, Homo sapiens
tgagccaggttccct

SEQ ID NO: 209955 - DNA, 15 bp, Homo sapiens
gtgagccaggttccc

SEQ ID NO: 209956 - DNA, 15 bp, Homo sapiens
tgtgagccaggttcc

SEQ ID NO: 209957 - DNA, 15 bp, Homo sapiens
ctgtgagccaggttc

SEQ ID NO: 209958 - DNA, 15 bp, Homo sapiens
actgtgagccaggtt

SEQ ID NO: 209959 - DNA, 15 bp, Homo sapiens
aactgtgagccaggt

SEQ ID NO: 209960 - DNA, 15 bp, Homo sapiens
aaactgtgagccagg

SEQ ID NO: 209961 - DNA, 15 bp, Homo sapiens
taaactgtgagccag

SEQ ID NO: 209962 - DNA, 15 bp, Homo sapiens
ataaactgtgagcca

SEQ ID NO: 209963 - DNA, 15 bp, Homo sapiens
cataaactgtgagcc

SEQ ID NO: 209964 - DNA, 15 bp, Homo sapiens
gcataaactgtgagc

SEQ ID NO: 209965 - DNA, 15 bp, Homo sapiens
agcataaactgtgag

SEQ ID NO: 209966 - DNA, 15 bp, Homo sapiens
aagcataaactgtga

SEQ ID NO: 209967 - DNA, 15 bp, Homo sapiens
aaagcataaactgtg

SEQ ID NO: 209968 - DNA, 15 bp, Homo sapiens
aaaagcataaactgt

SEQ ID NO: 209969 - DNA, 15 bp, Homo sapiens
caaaagcataaactg

SEQ ID NO: 209970 - DNA, 15 bp, Homo sapiens
gcaaaagcataaact

SEQ ID NO: 209971 - DNA, 15 bp, Homo sapiens
agcaaaagcataaac

SEQ ID NO: 209972 - DNA, 15 bp, Homo sapiens
tagcaaaagcataaa

SEQ ID NO: 209973 - DNA, 15 bp, Homo sapiens
gtagcaaaagcataa

SEQ ID NO: 209974 - DNA, 15 bp, Homo sapiens
ggtagcaaaagcata

SEQ ID NO: 209975 - DNA, 15 bp, Homo sapiens
aggtagcaaaagcat

SEQ ID NO: 209976 - DNA, 15 bp, Homo sapiens
aaggtagcaaaagca

SEQ ID NO: 209977 - DNA, 15 bp, Homo sapiens
taaggtagcaaaagc

SEQ ID NO: 209978 - DNA, 15 bp, Homo sapiens
ttaaggtagcaaaag

SEQ ID NO: 209979 - DNA, 15 bp, Homo sapiens
cttaaggtagcaaaa

SEQ ID NO: 209980 - DNA, 15 bp, Homo sapiens
acttaaggtagcaaa

SEQ ID NO: 209981 - DNA, 15 bp, Homo sapiens
aacttaaggtagcaa

SEQ ID NO: 209982 - DNA, 15 bp, Homo sapiens
aaacttaaggtagca

SEQ ID NO: 209983 - DNA, 15 bp, Homo sapiens
aaaacttaaggtagc

SEQ ID NO: 209984 - DNA, 15 bp, Homo sapiens
aaaaacttaaggtag

SEQ ID NO: 209985 - DNA, 15 bp, Homo sapiens
taaaaacttaaggta

SEQ ID NO: 209986 - DNA, 15 bp, Homo sapiens
ttaaaaacttaaggt

SEQ ID NO: 209987 - DNA, 15 bp, Homo sapiens
attaaaaacttaagg

SEQ ID NO: 209988 - DNA, 15 bp, Homo sapiens
tattaaaaacttaag

SEQ ID NO: 209989 - DNA, 15 bp, Homo sapiens
ctattaaaaacttaa

SEQ ID NO: 209990 - DNA, 15 bp, Homo sapiens
tctattaaaaactta

SEQ ID NO: 209991 - DNA, 15 bp, Homo sapiens
ctctattaaaaactt

SEQ ID NO: 209992 - DNA, 15 bp, Homo sapiens
actctattaaaaact

SEQ ID NO: 209993 - DNA, 15 bp, Homo sapiens
cactctattaaaaac

SEQ ID NO: 209994 - DNA, 15 bp, Homo sapiens
tcactctattaaaaa

SEQ ID NO: 209995 - DNA, 15 bp, Homo sapiens
gtcactctattaaaa

SEQ ID NO: 209996 - DNA, 15 bp, Homo sapiens
tgtcactctattaaa

SEQ ID NO: 209997 - DNA, 15 bp, Homo sapiens
atgtcactctattaa

SEQ ID NO: 209998 - DNA, 15 bp, Homo sapiens
gatgtcactctatta

SEQ ID NO: 209999 - DNA, 15 bp, Homo sapiens
tgatgtcactctatt

SEQ ID NO: 210000 - DNA, 15 bp, Homo sapiens
ttgatgtcactctat

SEQ ID NO: 210001 - DNA, 15 bp, Homo sapiens
tttgatgtcactcta

SEQ ID NO: 210002 - DNA, 15 bp, Homo sapiens
gtttgatgtcactct

SEQ ID NO: 210003 - DNA, 15 bp, Homo sapiens
tgtttgatgtcactc

SEQ ID NO: 210004 - DNA, 15 bp, Homo sapiens
ttgtttgatgtcact

SEQ ID NO: 210005 - DNA, 15 bp, Homo sapiens
tttgtttgatgtcac

SEQ ID NO: 210006 - DNA, 15 bp, Homo sapiens
gtttgtttgatgtca

SEQ ID NO: 210007 - DNA, 15 bp, Homo sapiens
tgtttgtttgatgtc

SEQ ID NO: 210008 - DNA, 15 bp, Homo sapiens
atgtttgtttgatgt

SEQ ID NO: 210009 - DNA, 15 bp, Homo sapiens
aatgtttgtttgatg

SEQ ID NO: 210010 - DNA, 15 bp, Homo sapiens
aaatgtttgtttgat

SEQ ID NO: 210011 - DNA, 15 bp, Homo sapiens
taaatgtttgtttga

SEQ ID NO: 210012 - DNA, 15 bp, Homo sapiens
ttaaatgtttgtttg

SEQ ID NO: 210013 - DNA, 15 bp, Homo sapiens
cttaaatgtttgttt

SEQ ID NO: 210014 - DNA, 15 bp, Homo sapiens
tcttaaatgtttgtt

SEQ ID NO: 210015 - DNA, 15 bp, Homo sapiens
ttcttaaatgtttgt

SEQ ID NO: 210016 - DNA, 15 bp, Homo sapiens
attcttaaatgtttg

SEQ ID NO: 210017 - DNA, 15 bp, Homo sapiens
tattcttaaatgttt

SEQ ID NO: 210018 - DNA, 15 bp, Homo sapiens
atattcttaaatgtt

SEQ ID NO: 210019 - DNA, 15 bp, Homo sapiens
catattcttaaatgt

SEQ ID NO: 210020 - DNA, 15 bp, Homo sapiens
acatattcttaaatg

SEQ ID NO: 210021 - DNA, 15 bp, Homo sapiens
aacatattcttaaat

SEQ ID NO: 210022 - DNA, 15 bp, Homo sapiens
aaacatattcttaaa

SEQ ID NO: 210023 - DNA, 15 bp, Homo sapiens
aaaacatattcttaa

SEQ ID NO: 210024 - DNA, 15 bp, Homo sapiens
aaaaacatattctta

SEQ ID NO: 210025 - DNA, 15 bp, Homo sapiens
gaaaaacatattctt

SEQ ID NO: 210026 - DNA, 15 bp, Homo sapiens
agaaaaacatattct

SEQ ID NO: 210027 - DNA, 15 bp, Homo sapiens
aagaaaaacatattc

SEQ ID NO: 210028 - DNA, 15 bp, Homo sapiens
aaagaaaaacatatt

SEQ ID NO: 210029 - DNA, 15 bp, Homo sapiens
aaaagaaaaacatat

SEQ ID NO: 210030 - DNA, 15 bp, Homo sapiens
gaaaagaaaaacata

SEQ ID NO: 210031 - DNA, 15 bp, Homo sapiens
ggaaaagaaaaacat

SEQ ID NO: 210032 - DNA, 15 bp, Homo sapiens
aggaaaagaaaaaca

SEQ ID NO: 210033 - DNA, 15 bp, Homo sapiens
aaggaaaagaaaaac

SEQ ID NO: 210034 - DNA, 15 bp, Homo sapiens
aaaggaaaagaaaaa

SEQ ID NO: 210035 - DNA, 15 bp, Homo sapiens
aaaaggaaaagaaaa

SEQ ID NO: 210036 - DNA, 15 bp, Homo sapiens
taaaaggaaaagaaa

SEQ ID NO: 210037 - DNA, 15 bp, Homo sapiens
ataaaaggaaaagaa

SEQ ID NO: 210038 - DNA, 15 bp, Homo sapiens
tataaaaggaaaaga

SEQ ID NO: 210039 - DNA, 15 bp, Homo sapiens
ttataaaaggaaaag

SEQ ID NO: 210040 - DNA, 15 bp, Homo sapiens
attataaaaggaaaa

SEQ ID NO: 210041 - DNA, 15 bp, Homo sapiens
aattataaaaggaaa

SEQ ID NO: 210042 - DNA, 15 bp, Homo sapiens
aaattataaaaggaa

SEQ ID NO: 210043 - DNA, 15 bp, Homo sapiens
gaaattataaaagga

SEQ ID NO: 210044 - DNA, 15 bp, Homo sapiens
tgaaattataaaagg

SEQ ID NO: 210045 - DNA, 15 bp, Homo sapiens
atgaaattataaaag

SEQ ID NO: 210046 - DNA, 15 bp, Homo sapiens
aatgaaattataaaa

SEQ ID NO: 210047 - DNA, 15 bp, Homo sapiens
taatgaaattataaa

SEQ ID NO: 210048 - DNA, 15 bp, Homo sapiens
ttaatgaaattataa

SEQ ID NO: 210049 - DNA, 15 bp, Homo sapiens
tttaatgaaattata

SEQ ID NO: 210050 - DNA, 15 bp, Homo sapiens
ttttaatgaaattat

SEQ ID NO: 210051 - DNA, 15 bp, Homo sapiens
tttttaatgaaatta

SEQ ID NO: 210052 - DNA, 15 bp, Homo sapiens
gtttttaatgaaatt

SEQ ID NO: 210053 - DNA, 15 bp, Homo sapiens
tgtttttaatgaaat

SEQ ID NO: 210054 - DNA, 15 bp, Homo sapiens
atgtttttaatgaaa

SEQ ID NO: 210055 - DNA, 15 bp, Homo sapiens
aatgtttttaatgaa

SEQ ID NO: 210056 - DNA, 15 bp, Homo sapiens
taatgtttttaatga

SEQ ID NO: 210057 - DNA, 15 bp, Homo sapiens
ttaatgtttttaatg

SEQ ID NO: 210058 - DNA, 15 bp, Homo sapiens
cttaatgtttttaat

SEQ ID NO: 210059 - DNA, 15 bp, Homo sapiens
acttaatgtttttaa

SEQ ID NO: 210060 - DNA, 15 bp, Homo sapiens
gacttaatgttttta

SEQ ID NO: 210061 - DNA, 15 bp, Homo sapiens
agacttaatgttttt

SEQ ID NO: 210062 - DNA, 15 bp, Homo sapiens
gagacttaatgtttt

SEQ ID NO: 210063 - DNA, 15 bp, Homo sapiens
agagacttaatgttt

SEQ ID NO: 210064 - DNA, 15 bp, Homo sapiens
cagagacttaatgtt

SEQ ID NO: 210065 - DNA, 15 bp, Homo sapiens
tcagagacttaatgt

SEQ ID NO: 210066 - DNA, 15 bp, Homo sapiens
atcagagacttaatg

SEQ ID NO: 210067 - DNA, 15 bp, Homo sapiens
gatcagagacttaat

SEQ ID NO: 210068 - DNA, 15 bp, Homo sapiens
tgatcagagacttaa

SEQ ID NO: 210069 - DNA, 15 bp, Homo sapiens
ctgatcagagactta

SEQ ID NO: 210070 - DNA, 15 bp, Homo sapiens
actgatcagagactt

SEQ ID NO: 210071 - DNA, 15 bp, Homo sapiens
gactgatcagagact

SEQ ID NO: 210072 - DNA, 15 bp, Homo sapiens
agactgatcagagac

SEQ ID NO: 210073 - DNA, 15 bp, Homo sapiens
cagactgatcagaga

SEQ ID NO: 210074 - DNA, 15 bp, Homo sapiens
gcagactgatcagag

SEQ ID NO: 210075 - DNA, 15 bp, Homo sapiens
tgcagactgatcaga

SEQ ID NO: 210076 - DNA, 15 bp, Homo sapiens
ctgcagactgatcag

SEQ ID NO: 210077 - DNA, 15 bp, Homo sapiens
actgcagactgatca

SEQ ID NO: 210078 - DNA, 15 bp, Homo sapiens
aactgcagactgatc

SEQ ID NO: 210079 - DNA, 15 bp, Homo sapiens
aaactgcagactgat

SEQ ID NO: 210080 - DNA, 15 bp, Homo sapiens
aaaactgcagactga

SEQ ID NO: 210081 - DNA, 15 bp, Homo sapiens
aaaaactgcagactg

SEQ ID NO: 210082 - DNA, 15 bp, Homo sapiens
taaaaactgcagact

SEQ ID NO: 210083 - DNA, 15 bp, Homo sapiens
ataaaaactgcagac

SEQ ID NO: 210084 - DNA, 15 bp, Homo sapiens
cataaaaactgcaga

SEQ ID NO: 210085 - DNA, 15 bp, Homo sapiens
acataaaaactgcag

SEQ ID NO: 210086 - DNA, 15 bp, Homo sapiens
tacataaaaactgca

SEQ ID NO: 210087 - DNA, 15 bp, Homo sapiens
ctacataaaaactgc

SEQ ID NO: 210088 - DNA, 15 bp, Homo sapiens
cctacataaaaactg

SEQ ID NO: 210089 - DNA, 15 bp, Homo sapiens
ccctacataaaaact

SEQ ID NO: 210090 - DNA, 15 bp, Homo sapiens
cccctacataaaaac

SEQ ID NO: 210091 - DNA, 15 bp, Homo sapiens
acccctacataaaaa

SEQ ID NO: 210092 - DNA, 15 bp, Homo sapiens
gacccctacataaaa

SEQ ID NO: 210093 - DNA, 15 bp, Homo sapiens
tgacccctacataaa

SEQ ID NO: 210094 - DNA, 15 bp, Homo sapiens
ctgacccctacataa

SEQ ID NO: 210095 - DNA, 15 bp, Homo sapiens
cctgacccctacata

SEQ ID NO: 210096 - DNA, 15 bp, Homo sapiens
acctgacccctacat

SEQ ID NO: 210097 - DNA, 15 bp, Homo sapiens
tacctgacccctaca

SEQ ID NO: 210098 - DNA, 15 bp, Homo sapiens
ttacctgacccctac

SEQ ID NO: 210099 - DNA, 15 bp, Homo sapiens
attacctgaccccta

SEQ ID NO: 210100 - DNA, 15 bp, Homo sapiens
cattacctgacccct

SEQ ID NO: 210101 - DNA, 15 bp, Homo sapiens
acattacctgacccc

SEQ ID NO: 210102 - DNA, 15 bp, Homo sapiens
aacattacctgaccc

SEQ ID NO: 210103 - DNA, 15 bp, Homo sapiens
gaacattacctgacc

SEQ ID NO: 210104 - DNA, 15 bp, Homo sapiens
agaacattacctgac

SEQ ID NO: 210105 - DNA, 15 bp, Homo sapiens
tagaacattacctga

SEQ ID NO: 210106 - DNA, 15 bp, Homo sapiens
ttagaacattacctg

SEQ ID NO: 210107 - DNA, 15 bp, Homo sapiens
gttagaacattacct

SEQ ID NO: 210108 - DNA, 15 bp, Homo sapiens
agttagaacattacc

SEQ ID NO: 210109 - DNA, 15 bp, Homo sapiens
aagttagaacattac

SEQ ID NO: 210110 - DNA, 15 bp, Homo sapiens
gaagttagaacatta

SEQ ID NO: 210111 - DNA, 15 bp, Homo sapiens
agaagttagaacatt

SEQ ID NO: 210112 - DNA, 15 bp, Homo sapiens
cagaagttagaacat

SEQ ID NO: 210113 - DNA, 15 bp, Homo sapiens
gcagaagttagaaca

SEQ ID NO: 210114 - DNA, 15 bp, Homo sapiens
agcagaagttagaac

SEQ ID NO: 210115 - DNA, 15 bp, Homo sapiens
aagcagaagttagaa

SEQ ID NO: 210116 - DNA, 15 bp, Homo sapiens
aaagcagaagttaga

SEQ ID NO: 210117 - DNA, 15 bp, Homo sapiens
aaaagcagaagttag

SEQ ID NO: 210118 - DNA, 15 bp, Homo sapiens
aaaaagcagaagtta

SEQ ID NO: 210119 - DNA, 15 bp, Homo sapiens
gaaaaagcagaagtt

SEQ ID NO: 210120 - DNA, 15 bp, Homo sapiens
ggaaaaagcagaagt

SEQ ID NO: 210121 - DNA, 15 bp, Homo sapiens
aggaaaaagcagaag

SEQ ID NO: 210122 - DNA, 15 bp, Homo sapiens
taggaaaaagcagaa

SEQ ID NO: 210123 - DNA, 15 bp, Homo sapiens
ttaggaaaaagcaga

SEQ ID NO: 210124 - DNA, 15 bp, Homo sapiens
cttaggaaaaagcag

SEQ ID NO: 210125 - DNA, 15 bp, Homo sapiens
acttaggaaaaagca

SEQ ID NO: 210126 - DNA, 15 bp, Homo sapiens
cacttaggaaaaagc

SEQ ID NO: 210127 - DNA, 15 bp, Homo sapiens
tcacttaggaaaaag

SEQ ID NO: 210128 - DNA, 15 bp, Homo sapiens
atcacttaggaaaaa

SEQ ID NO: 210129 - DNA, 15 bp, Homo sapiens
aatcacttaggaaaa

SEQ ID NO: 210130 - DNA, 15 bp, Homo sapiens
taatcacttaggaaa

SEQ ID NO: 210131 - DNA, 15 bp, Homo sapiens
ttaatcacttaggaa

SEQ ID NO: 210132 - DNA, 15 bp, Homo sapiens
gttaatcacttagga

SEQ ID NO: 210133 - DNA, 15 bp, Homo sapiens
tgttaatcacttagg

SEQ ID NO: 210134 - DNA, 15 bp, Homo sapiens
ctgttaatcacttag

SEQ ID NO: 210135 - DNA, 15 bp, Homo sapiens
cctgttaatcactta

SEQ ID NO: 210136 - DNA, 15 bp, Homo sapiens
acctgttaatcactt

SEQ ID NO: 210137 - DNA, 15 bp, Homo sapiens
aacctgttaatcact

SEQ ID NO: 210138 - DNA, 15 bp, Homo sapiens
aaacctgttaatcac

SEQ ID NO: 210139 - DNA, 15 bp, Homo sapiens
aaaacctgttaatca

SEQ ID NO: 210140 - DNA, 15 bp, Homo sapiens
aaaaacctgttaatc

SEQ ID NO: 210141 - DNA, 15 bp, Homo sapiens
taaaaacctgttaat

SEQ ID NO: 210142 - DNA, 15 bp, Homo sapiens
ataaaaacctgttaa

SEQ ID NO: 210143 - DNA, 15 bp, Homo sapiens
tataaaaacctgtta

SEQ ID NO: 210144 - DNA, 15 bp, Homo sapiens
ttataaaaacctgtt

SEQ ID NO: 210145 - DNA, 15 bp, Homo sapiens
cttataaaaacctgt

SEQ ID NO: 210146 - DNA, 15 bp, Homo sapiens
gcttataaaaacctg

SEQ ID NO: 210147 - DNA, 15 bp, Homo sapiens
ggcttataaaaacct

SEQ ID NO: 210148 - DNA, 15 bp, Homo sapiens
gggcttataaaaacc

SEQ ID NO: 210149 - DNA, 15 bp, Homo sapiens
agggcttataaaaac

SEQ ID NO: 210150 - DNA, 15 bp, Homo sapiens
aagggcttataaaaa

SEQ ID NO: 210151 - DNA, 15 bp, Homo sapiens
aaagggcttataaaa

SEQ ID NO: 210152 - DNA, 15 bp, Homo sapiens
aaaagggcttataaa

SEQ ID NO: 210153 - DNA, 15 bp, Homo sapiens
caaaagggcttataa

SEQ ID NO: 210154 - DNA, 15 bp, Homo sapiens
tcaaaagggcttata

SEQ ID NO: 210155 - DNA, 15 bp, Homo sapiens
ttcaaaagggcttat

SEQ ID NO: 210156 - DNA, 15 bp, Homo sapiens
tttcaaaagggctta

SEQ ID NO: 210157 - DNA, 15 bp, Homo sapiens
ttttcaaaagggctt

SEQ ID NO: 210158 - DNA, 15 bp, Homo sapiens
tttttcaaaagggct

SEQ ID NO: 210159 - DNA, 15 bp, Homo sapiens
ttttttcaaaagggc

SEQ ID NO: 210160 - DNA, 15 bp, Homo sapiens
attttttcaaaaggg

SEQ ID NO: 210161 - DNA, 15 bp, Homo sapiens
gattttttcaaaagg

SEQ ID NO: 210162 - DNA, 15 bp, Homo sapiens
tgattttttcaaaag

SEQ ID NO: 210163 - DNA, 15 bp, Homo sapiens
gtgattttttcaaaa

SEQ ID NO: 210164 - DNA, 15 bp, Homo sapiens
cgtgattttttcaaa

SEQ ID NO: 210165 - DNA, 15 bp, Homo sapiens
ccgtgattttttcaa

SEQ ID NO: 210166 - DNA, 15 bp, Homo sapiens
accgtgattttttca

SEQ ID NO: 210167 - DNA, 15 bp, Homo sapiens
taccgtgattttttc

SEQ ID NO: 210168 - DNA, 15 bp, Homo sapiens
ataccgtgatttttt

SEQ ID NO: 210169 - DNA, 15 bp, Homo sapiens
gataccgtgattttt

SEQ ID NO: 210170 - DNA, 15 bp, Homo sapiens
agataccgtgatttt

SEQ ID NO: 210171 - DNA, 15 bp, Homo sapiens
cagataccgtgattt

SEQ ID NO: 210172 - DNA, 15 bp, Homo sapiens
acagataccgtgatt

SEQ ID NO: 210173 - DNA, 15 bp, Homo sapiens
gacagataccgtgat

SEQ ID NO: 210174 - DNA, 15 bp, Homo sapiens
cgacagataccgtga

SEQ ID NO: 210175 - DNA, 15 bp, Homo sapiens
tcgacagataccgtg

SEQ ID NO: 210176 - DNA, 15 bp, Homo sapiens
ctcgacagataccgt

SEQ ID NO: 210177 - DNA, 15 bp, Homo sapiens
gctcgacagataccg

SEQ ID NO: 210178 - DNA, 15 bp, Homo sapiens
tgctcgacagatacc

SEQ ID NO: 210179 - DNA, 15 bp, Homo sapiens
atgctcgacagatac

SEQ ID NO: 210180 - DNA, 15 bp, Homo sapiens
gatgctcgacagata

SEQ ID NO: 210181 - DNA, 15 bp, Homo sapiens
agatgctcgacagat

SEQ ID NO: 210182 - DNA, 15 bp, Homo sapiens
aagatgctcgacaga

SEQ ID NO: 210183 - DNA, 15 bp, Homo sapiens
aaagatgctcgacag

SEQ ID NO: 210184 - DNA, 15 bp, Homo sapiens
caaagatgctcgaca

SEQ ID NO: 210185 - DNA, 15 bp, Homo sapiens
tcaaagatgctcgac

SEQ ID NO: 210186 - DNA, 15 bp, Homo sapiens
ttcaaagatgctcga

SEQ ID NO: 210187 - DNA, 15 bp, Homo sapiens
attcaaagatgctcg

SEQ ID NO: 210188 - DNA, 15 bp, Homo sapiens
gattcaaagatgctc

SEQ ID NO: 210189 - DNA, 15 bp, Homo sapiens
tgattcaaagatgct

SEQ ID NO: 210190 - DNA, 15 bp, Homo sapiens
ctgattcaaagatgc

SEQ ID NO: 210191 - DNA, 15 bp, Homo sapiens
tctgattcaaagatg

SEQ ID NO: 210192 - DNA, 15 bp, Homo sapiens
ctctgattcaaagat

SEQ ID NO: 210193 - DNA, 15 bp, Homo sapiens
actctgattcaaaga

SEQ ID NO: 210194 - DNA, 15 bp, Homo sapiens
tactctgattcaaag

SEQ ID NO: 210195 - DNA, 15 bp, Homo sapiens
ttactctgattcaaa

SEQ ID NO: 210196 - DNA, 15 bp, Homo sapiens
cttactctgattcaa

SEQ ID NO: 210197 - DNA, 15 bp, Homo sapiens
gcttactctgattca

SEQ ID NO: 210198 - DNA, 15 bp, Homo sapiens
ggcttactctgattc

SEQ ID NO: 210199 - DNA, 15 bp, Homo sapiens
aggcttactctgatt

SEQ ID NO: 210200 - DNA, 15 bp, Homo sapiens
aaggcttactctgat

SEQ ID NO: 210201 - DNA, 15 bp, Homo sapiens
gaaggcttactctga

SEQ ID NO: 210202 - DNA, 15 bp, Homo sapiens
agaaggcttactctg

SEQ ID NO: 210203 - DNA, 15 bp, Homo sapiens
tagaaggcttactct

SEQ ID NO: 210204 - DNA, 15 bp, Homo sapiens
ctagaaggcttactc

SEQ ID NO: 210205 - DNA, 15 bp, Homo sapiens
actagaaggcttact

SEQ ID NO: 210206 - DNA, 15 bp, Homo sapiens
cactagaaggcttac

SEQ ID NO: 210207 - DNA, 15 bp, Homo sapiens
tcactagaaggctta

SEQ ID NO: 210208 - DNA, 15 bp, Homo sapiens
ctcactagaaggctt

SEQ ID NO: 210209 - DNA, 15 bp, Homo sapiens
actcactagaaggct

SEQ ID NO: 210210 - DNA, 15 bp, Homo sapiens
gactcactagaaggc

SEQ ID NO: 210211 - DNA, 15 bp, Homo sapiens
tgactcactagaagg

SEQ ID NO: 210212 - DNA, 15 bp, Homo sapiens
atgactcactagaag

SEQ ID NO: 210213 - DNA, 15 bp, Homo sapiens
tatgactcactagaa

SEQ ID NO: 210214 - DNA, 15 bp, Homo sapiens
atatgactcactaga

SEQ ID NO: 210215 - DNA, 15 bp, Homo sapiens
catatgactcactag

SEQ ID NO: 210216 - DNA, 15 bp, Homo sapiens
acatatgactcacta

SEQ ID NO: 210217 - DNA, 15 bp, Homo sapiens
gacatatgactcact

SEQ ID NO: 210218 - DNA, 15 bp, Homo sapiens
tgacatatgactcac

SEQ ID NO: 210219 - DNA, 15 bp, Homo sapiens
ctgacatatgactca

SEQ ID NO: 210220 - DNA, 15 bp, Homo sapiens
gctgacatatgactc

SEQ ID NO: 210221 - DNA, 15 bp, Homo sapiens
tgctgacatatgact

SEQ ID NO: 210222 - DNA, 15 bp, Homo sapiens
ctgctgacatatgac

SEQ ID NO: 210223 - DNA, 15 bp, Homo sapiens
actgctgacatatga

SEQ ID NO: 210224 - DNA, 15 bp, Homo sapiens
aactgctgacatatg

SEQ ID NO: 210225 - DNA, 15 bp, Homo sapiens
aaactgctgacatat

SEQ ID NO: 210226 - DNA, 15 bp, Homo sapiens
caaactgctgacata

SEQ ID NO: 210227 - DNA, 15 bp, Homo sapiens
tcaaactgctgacat

SEQ ID NO: 210228 - DNA, 15 bp, Homo sapiens
gtcaaactgctgaca

SEQ ID NO: 210229 - DNA, 15 bp, Homo sapiens
agtcaaactgctgac

SEQ ID NO: 210230 - DNA, 15 bp, Homo sapiens
cagtcaaactgctga

SEQ ID NO: 210231 - DNA, 15 bp, Homo sapiens
acagtcaaactgctg

SEQ ID NO: 210232 - DNA, 15 bp, Homo sapiens
tacagtcaaactgct

SEQ ID NO: 210233 - DNA, 15 bp, Homo sapiens
atacagtcaaactgc

SEQ ID NO: 210234 - DNA, 15 bp, Homo sapiens
catacagtcaaactg

SEQ ID NO: 210235 - DNA, 15 bp, Homo sapiens
ccatacagtcaaact

SEQ ID NO: 210236 - DNA, 15 bp, Homo sapiens
cccatacagtcaaac

SEQ ID NO: 210237 - DNA, 15 bp, Homo sapiens
gcccatacagtcaaa

SEQ ID NO: 210238 - DNA, 15 bp, Homo sapiens
agcccatacagtcaa

SEQ ID NO: 210239 - DNA, 15 bp, Homo sapiens
aagcccatacagtca

SEQ ID NO: 210240 - DNA, 15 bp, Homo sapiens
aaagcccatacagtc

SEQ ID NO: 210241 - DNA, 15 bp, Homo sapiens
aaaagcccatacagt

SEQ ID NO: 210242 - DNA, 15 bp, Homo sapiens
gaaaagcccatacag

SEQ ID NO: 210243 - DNA, 15 bp, Homo sapiens
agaaaagcccataca

SEQ ID NO: 210244 - DNA, 15 bp, Homo sapiens
tagaaaagcccatac

SEQ ID NO: 210245 - DNA, 15 bp, Homo sapiens
ttagaaaagcccata

SEQ ID NO: 210246 - DNA, 15 bp, Homo sapiens
attagaaaagcccat

SEQ ID NO: 210247 - DNA, 15 bp, Homo sapiens
tattagaaaagccca

SEQ ID NO: 210248 - DNA, 15 bp, Homo sapiens
atattagaaaagccc

SEQ ID NO: 210249 - DNA, 15 bp, Homo sapiens
gatattagaaaagcc

SEQ ID NO: 210250 - DNA, 15 bp, Homo sapiens
ggatattagaaaagc

SEQ ID NO: 210251 - DNA, 15 bp, Homo sapiens
tggatattagaaaag

SEQ ID NO: 210252 - DNA, 15 bp, Homo sapiens
ctggatattagaaaa

SEQ ID NO: 210253 - DNA, 15 bp, Homo sapiens
actggatattagaaa

SEQ ID NO: 210254 - DNA, 15 bp, Homo sapiens
aactggatattagaa

SEQ ID NO: 210255 - DNA, 15 bp, Homo sapiens
gaactggatattaga

SEQ ID NO: 210256 - DNA, 15 bp, Homo sapiens
tgaactggatattag

SEQ ID NO: 210257 - DNA, 15 bp, Homo sapiens
ttgaactggatatta

SEQ ID NO: 210258 - DNA, 15 bp, Homo sapiens
cttgaactggatatt

SEQ ID NO: 210259 - DNA, 15 bp, Homo sapiens
acttgaactggatat

SEQ ID NO: 210260 - DNA, 15 bp, Homo sapiens
cacttgaactggata

SEQ ID NO: 210261 - DNA, 15 bp, Homo sapiens
acacttgaactggat

SEQ ID NO: 210262 - DNA, 15 bp, Homo sapiens
aacacttgaactgga

SEQ ID NO: 210263 - DNA, 15 bp, Homo sapiens
aaacacttgaactgg

SEQ ID NO: 210264 - DNA, 15 bp, Homo sapiens
taaacacttgaactg

SEQ ID NO: 210265 - DNA, 15 bp, Homo sapiens
ataaacacttgaact

SEQ ID NO: 210266 - DNA, 15 bp, Homo sapiens
gataaacacttgaac

SEQ ID NO: 210267 - DNA, 15 bp, Homo sapiens
tgataaacacttgaa

SEQ ID NO: 210268 - DNA, 15 bp, Homo sapiens
ctgataaacacttga

SEQ ID NO: 210269 - DNA, 15 bp, Homo sapiens
actgataaacacttg

SEQ ID NO: 210270 - DNA, 15 bp, Homo sapiens
cactgataaacactt

SEQ ID NO: 210271 - DNA, 15 bp, Homo sapiens
tcactgataaacact

SEQ ID NO: 210272 - DNA, 15 bp, Homo sapiens
ctcactgataaacac

SEQ ID NO: 210273 - DNA, 15 bp, Homo sapiens
actcactgataaaca

SEQ ID NO: 210274 - DNA, 15 bp, Homo sapiens
aactcactgataaac

SEQ ID NO: 210275 - DNA, 15 bp, Homo sapiens
aaactcactgataaa

SEQ ID NO: 210276 - DNA, 15 bp, Homo sapiens
aaaactcactgataa

SEQ ID NO: 210277 - DNA, 15 bp, Homo sapiens
aaaaactcactgata

SEQ ID NO: 210278 - DNA, 15 bp, Homo sapiens
gaaaaactcactgat

SEQ ID NO: 210279 - DNA, 15 bp, Homo sapiens
agaaaaactcactga

SEQ ID NO: 210280 - DNA, 15 bp, Homo sapiens
aagaaaaactcactg

SEQ ID NO: 210281 - DNA, 15 bp, Homo sapiens
aaagaaaaactcact

SEQ ID NO: 210282 - DNA, 15 bp, Homo sapiens
aaaagaaaaactcac

SEQ ID NO: 210283 - DNA, 15 bp, Homo sapiens
taaaagaaaaactca

SEQ ID NO: 210284 - DNA, 15 bp, Homo sapiens
ttaaaagaaaaactc

SEQ ID NO: 210285 - DNA, 15 bp, Homo sapiens
tttaaaagaaaaact

SEQ ID NO: 210286 - DNA, 15 bp, Homo sapiens
atttaaaagaaaaac

SEQ ID NO: 210287 - DNA, 15 bp, Homo sapiens
tatttaaaagaaaaa

SEQ ID NO: 210288 - DNA, 15 bp, Homo sapiens
ctatttaaaagaaaa

SEQ ID NO: 210289 - DNA, 15 bp, Homo sapiens
tctatttaaaagaaa

SEQ ID NO: 210290 - DNA, 15 bp, Homo sapiens
atctatttaaaagaa

SEQ ID NO: 210291 - DNA, 15 bp, Homo sapiens
aatctatttaaaaga

SEQ ID NO: 210292 - DNA, 15 bp, Homo sapiens
aaatctatttaaaag

SEQ ID NO: 210293 - DNA, 15 bp, Homo sapiens
caaatctatttaaaa

SEQ ID NO: 210294 - DNA, 15 bp, Homo sapiens
ccaaatctatttaaa

SEQ ID NO: 210295 - DNA, 15 bp, Homo sapiens
cccaaatctatttaa

SEQ ID NO: 210296 - DNA, 15 bp, Homo sapiens
tcccaaatctattta

SEQ ID NO: 210297 - DNA, 15 bp, Homo sapiens
gtcccaaatctattt

SEQ ID NO: 210298 - DNA, 15 bp, Homo sapiens
tgtcccaaatctatt

SEQ ID NO: 210299 - DNA, 15 bp, Homo sapiens
ctgtcccaaatctat

SEQ ID NO: 210300 - DNA, 15 bp, Homo sapiens
cctgtcccaaatcta

SEQ ID NO: 210301 - DNA, 15 bp, Homo sapiens
acctgtcccaaatct

SEQ ID NO: 210302 - DNA, 15 bp, Homo sapiens
tacctgtcccaaatc

SEQ ID NO: 210303 - DNA, 15 bp, Homo sapiens
gtacctgtcccaaat

SEQ ID NO: 210304 - DNA, 15 bp, Homo sapiens
agtacctgtcccaaa

SEQ ID NO: 210305 - DNA, 15 bp, Homo sapiens
tagtacctgtcccaa

SEQ ID NO: 210306 - DNA, 15 bp, Homo sapiens
atagtacctgtccca

SEQ ID NO: 210307 - DNA, 15 bp, Homo sapiens
catagtacctgtccc

SEQ ID NO: 210308 - DNA, 15 bp, Homo sapiens
tcatagtacctgtcc

SEQ ID NO: 210309 - DNA, 15 bp, Homo sapiens
ctcatagtacctgtc

SEQ ID NO: 210310 - DNA, 15 bp, Homo sapiens
tctcatagtacctgt

SEQ ID NO: 210311 - DNA, 15 bp, Homo sapiens
ctctcatagtacctg

SEQ ID NO: 210312 - DNA, 15 bp, Homo sapiens
actctcatagtacct

SEQ ID NO: 210313 - DNA, 15 bp, Homo sapiens
tactctcatagtacc

SEQ ID NO: 210314 - DNA, 15 bp, Homo sapiens
atactctcatagtac

SEQ ID NO: 210315 - DNA, 15 bp, Homo sapiens
tatactctcatagta

SEQ ID NO: 210316 - DNA, 15 bp, Homo sapiens
atatactctcatagt

SEQ ID NO: 210317 - DNA, 15 bp, Homo sapiens
tatatactctcatag

SEQ ID NO: 210318 - DNA, 15 bp, Homo sapiens
ttatatactctcata

SEQ ID NO: 210319 - DNA, 15 bp, Homo sapiens
cttatatactctcat

SEQ ID NO: 210320 - DNA, 15 bp, Homo sapiens
acttatatactctca

SEQ ID NO: 210321 - DNA, 15 bp, Homo sapiens
cacttatatactctc

SEQ ID NO: 210322 - DNA, 15 bp, Homo sapiens
tcacttatatactct

SEQ ID NO: 210323 - DNA, 15 bp, Homo sapiens
atcacttatatactc

SEQ ID NO: 210324 - DNA, 15 bp, Homo sapiens
tatcacttatatact

SEQ ID NO: 210325 - DNA, 15 bp, Homo sapiens
gtatcacttatatac

SEQ ID NO: 210326 - DNA, 15 bp, Homo sapiens
cgtatcacttatata

SEQ ID NO: 210327 - DNA, 15 bp, Homo sapiens
acgtatcacttatat

SEQ ID NO: 210328 - DNA, 15 bp, Homo sapiens
aacgtatcacttata

SEQ ID NO: 210329 - DNA, 15 bp, Homo sapiens
taacgtatcacttat

SEQ ID NO: 210330 - DNA, 15 bp, Homo sapiens
ataacgtatcactta

SEQ ID NO: 210331 - DNA, 15 bp, Homo sapiens
tataacgtatcactt

SEQ ID NO: 210332 - DNA, 15 bp, Homo sapiens
ctataacgtatcact

SEQ ID NO: 210333 - DNA, 15 bp, Homo sapiens
cctataacgtatcac

SEQ ID NO: 210334 - DNA, 15 bp, Homo sapiens
tcctataacgtatca

SEQ ID NO: 210335 - DNA, 15 bp, Homo sapiens
gtcctataacgtatc

SEQ ID NO: 210336 - DNA, 15 bp, Homo sapiens
tgtcctataacgtat

SEQ ID NO: 210337 - DNA, 15 bp, Homo sapiens
gtgtcctataacgta

SEQ ID NO: 210338 - DNA, 15 bp, Homo sapiens
agtgtcctataacgt

SEQ ID NO: 210339 - DNA, 15 bp, Homo sapiens
tagtgtcctataacg

SEQ ID NO: 210340 - DNA, 15 bp, Homo sapiens
ttagtgtcctataac

SEQ ID NO: 210341 - DNA, 15 bp, Homo sapiens
gttagtgtcctataa

SEQ ID NO: 210342 - DNA, 15 bp, Homo sapiens
agttagtgtcctata

SEQ ID NO: 210343 - DNA, 15 bp, Homo sapiens
tagttagtgtcctat

SEQ ID NO: 210344 - DNA, 15 bp, Homo sapiens
ctagttagtgtccta

SEQ ID NO: 210345 - DNA, 15 bp, Homo sapiens
actagttagtgtcct

SEQ ID NO: 210346 - DNA, 15 bp, Homo sapiens
tactagttagtgtcc

SEQ ID NO: 210347 - DNA, 15 bp, Homo sapiens
atactagttagtgtc

SEQ ID NO: 210348 - DNA, 15 bp, Homo sapiens
gatactagttagtgt

SEQ ID NO: 210349 - DNA, 15 bp, Homo sapiens
ggatactagttagtg

SEQ ID NO: 210350 - DNA, 15 bp, Homo sapiens
aggatactagttagt

SEQ ID NO: 210351 - DNA, 15 bp, Homo sapiens
taggatactagttag

SEQ ID NO: 210352 - DNA, 15 bp, Homo sapiens
ataggatactagtta

SEQ ID NO: 210353 - DNA, 15 bp, Homo sapiens
cataggatactagtt

SEQ ID NO: 210354 - DNA, 15 bp, Homo sapiens
tcataggatactagt

SEQ ID NO: 210355 - DNA, 15 bp, Homo sapiens
ttcataggatactag

SEQ ID NO: 210356 - DNA, 15 bp, Homo sapiens
tttcataggatacta

SEQ ID NO: 210357 - DNA, 15 bp, Homo sapiens
atttcataggatact

SEQ ID NO: 210358 - DNA, 15 bp, Homo sapiens
catttcataggatac

SEQ ID NO: 210359 - DNA, 15 bp, Homo sapiens
ccatttcataggata

SEQ ID NO: 210360 - DNA, 15 bp, Homo sapiens
gccatttcataggat

SEQ ID NO: 210361 - DNA, 15 bp, Homo sapiens
tgccatttcatagga

SEQ ID NO: 210362 - DNA, 15 bp, Homo sapiens
ttgccatttcatagg

SEQ ID NO: 210363 - DNA, 15 bp, Homo sapiens
tttgccatttcatag

SEQ ID NO: 210364 - DNA, 15 bp, Homo sapiens
ttttgccatttcata

SEQ ID NO: 210365 - DNA, 15 bp, Homo sapiens
tttttgccatttcat

SEQ ID NO: 210366 - DNA, 15 bp, Homo sapiens
gtttttgccatttca

SEQ ID NO: 210367 - DNA, 15 bp, Homo sapiens
agtttttgccatttc

SEQ ID NO: 210368 - DNA, 15 bp, Homo sapiens
cagtttttgccattt

SEQ ID NO: 210369 - DNA, 15 bp, Homo sapiens
gcagtttttgccatt

SEQ ID NO: 210370 - DNA, 15 bp, Homo sapiens
tgcagtttttgccat

SEQ ID NO: 210371 - DNA, 15 bp, Homo sapiens
ttgcagtttttgcca

SEQ ID NO: 210372 - DNA, 15 bp, Homo sapiens
attgcagtttttgcc

SEQ ID NO: 210373 - DNA, 15 bp, Homo sapiens
gattgcagtttttgc

SEQ ID NO: 210374 - DNA, 15 bp, Homo sapiens
tgattgcagtttttg

SEQ ID NO: 210375 - DNA, 15 bp, Homo sapiens
gtgattgcagttttt

SEQ ID NO: 210376 - DNA, 15 bp, Homo sapiens
agtgattgcagtttt

SEQ ID NO: 210377 - DNA, 15 bp, Homo sapiens
aagtgattgcagttt

SEQ ID NO: 210378 - DNA, 15 bp, Homo sapiens
aaagtgattgcagtt

SEQ ID NO: 210379 - DNA, 15 bp, Homo sapiens
aaaagtgattgcagt

SEQ ID NO: 210380 - DNA, 15 bp, Homo sapiens
caaaagtgattgcag

SEQ ID NO: 210381 - DNA, 15 bp, Homo sapiens
gcaaaagtgattgca

SEQ ID NO: 210382 - DNA, 15 bp, Homo sapiens
tgcaaaagtgattgc

SEQ ID NO: 210383 - DNA, 15 bp, Homo sapiens
gtgcaaaagtgattg

SEQ ID NO: 210384 - DNA, 15 bp, Homo sapiens
ggtgcaaaagtgatt

SEQ ID NO: 210385 - DNA, 15 bp, Homo sapiens
tggtgcaaaagtgat

SEQ ID NO: 210386 - DNA, 15 bp, Homo sapiens
ttggtgcaaaagtga

SEQ ID NO: 210387 - DNA, 15 bp, Homo sapiens
gttggtgcaaaagtg

SEQ ID NO: 210388 - DNA, 15 bp, Homo sapiens
ggttggtgcaaaagt

SEQ ID NO: 210389 - DNA, 15 bp, Homo sapiens
tggttggtgcaaaag

SEQ ID NO: 210390 - DNA, 15 bp, Homo sapiens
ttggttggtgcaaaa

SEQ ID NO: 210391 - DNA, 15 bp, Homo sapiens
tttggttggtgcaaa

SEQ ID NO: 210392 - DNA, 15 bp, Homo sapiens
atttggttggtgcaa

SEQ ID NO: 210393 - DNA, 15 bp, Homo sapiens
tatttggttggtgca

SEQ ID NO: 210394 - DNA, 15 bp, Homo sapiens
ctatttggttggtgc

SEQ ID NO: 210395 - DNA, 15 bp, Homo sapiens
tctatttggttggtg

SEQ ID NO: 210396 - DNA, 15 bp, Homo sapiens
ttctatttggttggt

SEQ ID NO: 210397 - DNA, 15 bp, Homo sapiens
tttctatttggttgg

SEQ ID NO: 210398 - DNA, 15 bp, Homo sapiens
gtttctatttggttg

SEQ ID NO: 210399 - DNA, 15 bp, Homo sapiens
agtttctatttggtt

SEQ ID NO: 210400 - DNA, 15 bp, Homo sapiens
tagtttctatttggt

SEQ ID NO: 210401 - DNA, 15 bp, Homo sapiens
ttagtttctatttgg

SEQ ID NO: 210402 - DNA, 15 bp, Homo sapiens
attagtttctatttg

SEQ ID NO: 210403 - DNA, 15 bp, Homo sapiens
gattagtttctattt

SEQ ID NO: 210404 - DNA, 15 bp, Homo sapiens
tgattagtttctatt

SEQ ID NO: 210405 - DNA, 15 bp, Homo sapiens
ctgattagtttctat

SEQ ID NO: 210406 - DNA, 15 bp, Homo sapiens
actgattagtttcta

SEQ ID NO: 210407 - DNA, 15 bp, Homo sapiens
cactgattagtttct

SEQ ID NO: 210408 - DNA, 15 bp, Homo sapiens
gcactgattagtttc

SEQ ID NO: 210409 - DNA, 15 bp, Homo sapiens
tgcactgattagttt

SEQ ID NO: 210410 - DNA, 15 bp, Homo sapiens
gtgcactgattagtt

SEQ ID NO: 210411 - DNA, 15 bp, Homo sapiens
agtgcactgattagt

SEQ ID NO: 210412 - DNA, 15 bp, Homo sapiens
aagtgcactgattag

SEQ ID NO: 210413 - DNA, 15 bp, Homo sapiens
caagtgcactgatta

SEQ ID NO: 210414 - DNA, 15 bp, Homo sapiens
gcaagtgcactgatt

SEQ ID NO: 210415 - DNA, 15 bp, Homo sapiens
agcaagtgcactgat

SEQ ID NO: 210416 - DNA, 15 bp, Homo sapiens
aagcaagtgcactga

SEQ ID NO: 210417 - DNA, 15 bp, Homo sapiens
taagcaagtgcactg

SEQ ID NO: 210418 - DNA, 15 bp, Homo sapiens
ataagcaagtgcact

SEQ ID NO: 210419 - DNA, 15 bp, Homo sapiens
aataagcaagtgcac

SEQ ID NO: 210420 - DNA, 15 bp, Homo sapiens
aaataagcaagtgca

SEQ ID NO: 210421 - DNA, 15 bp, Homo sapiens
aaaataagcaagtgc

SEQ ID NO: 210422 - DNA, 15 bp, Homo sapiens
aaaaataagcaagtg

SEQ ID NO: 210423 - DNA, 15 bp, Homo sapiens
gaaaaataagcaagt

SEQ ID NO: 210424 - DNA, 15 bp, Homo sapiens
agaaaaataagcaag

SEQ ID NO: 210425 - DNA, 15 bp, Homo sapiens
tagaaaaataagcaa

SEQ ID NO: 210426 - DNA, 15 bp, Homo sapiens
gtagaaaaataagca

SEQ ID NO: 210427 - DNA, 15 bp, Homo sapiens
tgtagaaaaataagc

SEQ ID NO: 210428 - DNA, 15 bp, Homo sapiens
atgtagaaaaataag

SEQ ID NO: 210429 - DNA, 15 bp, Homo sapiens
catgtagaaaaataa

SEQ ID NO: 210430 - DNA, 15 bp, Homo sapiens
gcatgtagaaaaata

SEQ ID NO: 210431 - DNA, 15 bp, Homo sapiens
agcatgtagaaaaat

SEQ ID NO: 210432 - DNA, 15 bp, Homo sapiens
gagcatgtagaaaaa

SEQ ID NO: 210433 - DNA, 15 bp, Homo sapiens
agagcatgtagaaaa

SEQ ID NO: 210434 - DNA, 15 bp, Homo sapiens
aagagcatgtagaaa

SEQ ID NO: 210435 - DNA, 15 bp, Homo sapiens
aaagagcatgtagaa

SEQ ID NO: 210436 - DNA, 15 bp, Homo sapiens
taaagagcatgtaga

SEQ ID NO: 210437 - DNA, 15 bp, Homo sapiens
ctaaagagcatgtag

SEQ ID NO: 210438 - DNA, 15 bp, Homo sapiens
cctaaagagcatgta

SEQ ID NO: 210439 - DNA, 15 bp, Homo sapiens
ccctaaagagcatgt

SEQ ID NO: 210440 - DNA, 15 bp, Homo sapiens
accctaaagagcatg

SEQ ID NO: 210441 - DNA, 15 bp, Homo sapiens
aaccctaaagagcat

SEQ ID NO: 210442 - DNA, 15 bp, Homo sapiens
aaaccctaaagagca

SEQ ID NO: 210443 - DNA, 15 bp, Homo sapiens
aaaaccctaaagagc

SEQ ID NO: 210444 - DNA, 15 bp, Homo sapiens
taaaaccctaaagag

SEQ ID NO: 210445 - DNA, 15 bp, Homo sapiens
ttaaaaccctaaaga

SEQ ID NO: 210446 - DNA, 15 bp, Homo sapiens
tttaaaaccctaaag

SEQ ID NO: 210447 - DNA, 15 bp, Homo sapiens
atttaaaaccctaaa

SEQ ID NO: 210448 - DNA, 15 bp, Homo sapiens
catttaaaaccctaa

SEQ ID NO: 210449 - DNA, 15 bp, Homo sapiens
acatttaaaacccta

SEQ ID NO: 210450 - DNA, 15 bp, Homo sapiens
gacatttaaaaccct

SEQ ID NO: 210451 - DNA, 15 bp, Homo sapiens
tgacatttaaaaccc

SEQ ID NO: 210452 - DNA, 15 bp, Homo sapiens
ttgacatttaaaacc

SEQ ID NO: 210453 - DNA, 15 bp, Homo sapiens
gttgacatttaaaac

SEQ ID NO: 210454 - DNA, 15 bp, Homo sapiens
ggttgacatttaaaa

SEQ ID NO: 210455 - DNA, 15 bp, Homo sapiens
aggttgacatttaaa

SEQ ID NO: 210456 - DNA, 15 bp, Homo sapiens
taggttgacatttaa

SEQ ID NO: 210457 - DNA, 15 bp, Homo sapiens
gtaggttgacattta

SEQ ID NO: 210458 - DNA, 15 bp, Homo sapiens
agtaggttgacattt

SEQ ID NO: 210459 - DNA, 15 bp, Homo sapiens
cagtaggttgacatt

SEQ ID NO: 210460 - DNA, 15 bp, Homo sapiens
acagtaggttgacat

SEQ ID NO: 210461 - DNA, 15 bp, Homo sapiens
cacagtaggttgaca

SEQ ID NO: 210462 - DNA, 15 bp, Homo sapiens
ccacagtaggttgac

SEQ ID NO: 210463 - DNA, 15 bp, Homo sapiens
gccacagtaggttga

SEQ ID NO: 210464 - DNA, 15 bp, Homo sapiens
tgccacagtaggttg

SEQ ID NO: 210465 - DNA, 15 bp, Homo sapiens
atgccacagtaggtt

SEQ ID NO: 210466 - DNA, 15 bp, Homo sapiens
tatgccacagtaggt

SEQ ID NO: 210467 - DNA, 15 bp, Homo sapiens
ctatgccacagtagg

SEQ ID NO: 210468 - DNA, 15 bp, Homo sapiens
tctatgccacagtag

SEQ ID NO: 210469 - DNA, 15 bp, Homo sapiens
gtctatgccacagta

SEQ ID NO: 210470 - DNA, 15 bp, Homo sapiens
agtctatgccacagt

SEQ ID NO: 210471 - DNA, 15 bp, Homo sapiens
aagtctatgccacag

SEQ ID NO: 210472 - DNA, 15 bp, Homo sapiens
aaagtctatgccaca

SEQ ID NO: 210473 - DNA, 15 bp, Homo sapiens
taaagtctatgccac

SEQ ID NO: 210474 - DNA, 15 bp, Homo sapiens
ttaaagtctatgcca

SEQ ID NO: 210475 - DNA, 15 bp, Homo sapiens
attaaagtctatgcc

SEQ ID NO: 210476 - DNA, 15 bp, Homo sapiens
gattaaagtctatgc

SEQ ID NO: 210477 - DNA, 15 bp, Homo sapiens
ggattaaagtctatg

SEQ ID NO: 210478 - DNA, 15 bp, Homo sapiens
aggattaaagtctat

SEQ ID NO: 210479 - DNA, 15 bp, Homo sapiens
gaggattaaagtcta

SEQ ID NO: 210480 - DNA, 15 bp, Homo sapiens
agaggattaaagtct

SEQ ID NO: 210481 - DNA, 15 bp, Homo sapiens
cagaggattaaagtc

SEQ ID NO: 210482 - DNA, 15 bp, Homo sapiens
ccagaggattaaagt

SEQ ID NO: 210483 - DNA, 15 bp, Homo sapiens
cccagaggattaaag

SEQ ID NO: 210484 - DNA, 15 bp, Homo sapiens
acccagaggattaaa

SEQ ID NO: 210485 - DNA, 15 bp, Homo sapiens
tacccagaggattaa

SEQ ID NO: 210486 - DNA, 15 bp, Homo sapiens
atacccagaggatta

SEQ ID NO: 210487 - DNA, 15 bp, Homo sapiens
aatacccagaggatt

SEQ ID NO: 210488 - DNA, 15 bp, Homo sapiens
gaatacccagaggat

SEQ ID NO: 210489 - DNA, 15 bp, Homo sapiens
agaatacccagagga

SEQ ID NO: 210490 - DNA, 15 bp, Homo sapiens
aagaatacccagagg

SEQ ID NO: 210491 - DNA, 15 bp, Homo sapiens
aaagaatacccagag

SEQ ID NO: 210492 - DNA, 15 bp, Homo sapiens
aaaagaatacccaga

SEQ ID NO: 210493 - DNA, 15 bp, Homo sapiens
caaaagaatacccag

SEQ ID NO: 210494 - DNA, 15 bp, Homo sapiens
acaaaagaataccca

SEQ ID NO: 210495 - DNA, 15 bp, Homo sapiens
aacaaaagaataccc

SEQ ID NO: 210496 - DNA, 15 bp, Homo sapiens
caacaaaagaatacc

SEQ ID NO: 210497 - DNA, 15 bp, Homo sapiens
acaacaaaagaatac

SEQ ID NO: 210498 - DNA, 15 bp, Homo sapiens
aacaacaaaagaata

SEQ ID NO: 210499 - DNA, 15 bp, Homo sapiens
gaacaacaaaagaat

SEQ ID NO: 210500 - DNA, 15 bp, Homo sapiens
agaacaacaaaagaa

SEQ ID NO: 210501 - DNA, 15 bp, Homo sapiens
aagaacaacaaaaga

SEQ ID NO: 210502 - DNA, 15 bp, Homo sapiens
aaagaacaacaaaag

SEQ ID NO: 210503 - DNA, 15 bp, Homo sapiens
gaaagaacaacaaaa

SEQ ID NO: 210504 - DNA, 15 bp, Homo sapiens
ggaaagaacaacaaa

SEQ ID NO: 210505 - DNA, 15 bp, Homo sapiens
aggaaagaacaacaa

SEQ ID NO: 210506 - DNA, 15 bp, Homo sapiens
caggaaagaacaaca

SEQ ID NO: 210507 - DNA, 15 bp, Homo sapiens
ccaggaaagaacaac

SEQ ID NO: 210508 - DNA, 15 bp, Homo sapiens
accaggaaagaacaa

SEQ ID NO: 210509 - DNA, 15 bp, Homo sapiens
taccaggaaagaaca

SEQ ID NO: 210510 - DNA, 15 bp, Homo sapiens
ataccaggaaagaac

SEQ ID NO: 210511 - DNA, 15 bp, Homo sapiens
tataccaggaaagaa

SEQ ID NO: 210512 - DNA, 15 bp, Homo sapiens
atataccaggaaaga

SEQ ID NO: 210513 - DNA, 15 bp, Homo sapiens
catataccaggaaag

SEQ ID NO: 210514 - DNA, 15 bp, Homo sapiens
gcatataccaggaaa

SEQ ID NO: 210515 - DNA, 15 bp, Homo sapiens
agcatataccaggaa

SEQ ID NO: 210516 - DNA, 15 bp, Homo sapiens
cagcatataccagga

SEQ ID NO: 210517 - DNA, 15 bp, Homo sapiens
acagcatataccagg

SEQ ID NO: 210518 - DNA, 15 bp, Homo sapiens
cacagcatataccag

SEQ ID NO: 210519 - DNA, 15 bp, Homo sapiens
ccacagcatatacca

SEQ ID NO: 210520 - DNA, 15 bp, Homo sapiens
tccacagcatatacc

SEQ ID NO: 210521 - DNA, 15 bp, Homo sapiens
ttccacagcatatac

SEQ ID NO: 210522 - DNA, 15 bp, Homo sapiens
attccacagcatata

SEQ ID NO: 210523 - DNA, 15 bp, Homo sapiens
aattccacagcatat

SEQ ID NO: 210524 - DNA, 15 bp, Homo sapiens
caattccacagcata

SEQ ID NO: 210525 - DNA, 15 bp, Homo sapiens
tcaattccacagcat

SEQ ID NO: 210526 - DNA, 15 bp, Homo sapiens
ctcaattccacagca

SEQ ID NO: 210527 - DNA, 15 bp, Homo sapiens
tctcaattccacagc

SEQ ID NO: 210528 - DNA, 15 bp, Homo sapiens
atctcaattccacag

SEQ ID NO: 210529 - DNA, 15 bp, Homo sapiens
tatctcaattccaca

SEQ ID NO: 210530 - DNA, 15 bp, Homo sapiens
ctatctcaattccac

SEQ ID NO: 210531 - DNA, 15 bp, Homo sapiens
tctatctcaattcca

SEQ ID NO: 210532 - DNA, 15 bp, Homo sapiens
gtctatctcaattcc

SEQ ID NO: 210533 - DNA, 15 bp, Homo sapiens
agtctatctcaattc

SEQ ID NO: 210534 - DNA, 15 bp, Homo sapiens
cagtctatctcaatt

SEQ ID NO: 210535 - DNA, 15 bp, Homo sapiens
ccagtctatctcaat

SEQ ID NO: 210536 - DNA, 15 bp, Homo sapiens
accagtctatctcaa

SEQ ID NO: 210537 - DNA, 15 bp, Homo sapiens
aaccagtctatctca

SEQ ID NO: 210538 - DNA, 15 bp, Homo sapiens
gaaccagtctatctc

SEQ ID NO: 210539 - DNA, 15 bp, Homo sapiens
cgaaccagtctatct

SEQ ID NO: 210540 - DNA, 15 bp, Homo sapiens
acgaaccagtctatc

SEQ ID NO: 210541 - DNA, 15 bp, Homo sapiens
cacgaaccagtctat

SEQ ID NO: 210542 - DNA, 15 bp, Homo sapiens
tcacgaaccagtcta

SEQ ID NO: 210543 - DNA, 15 bp, Homo sapiens
ctcacgaaccagtct

SEQ ID NO: 210544 - DNA, 15 bp, Homo sapiens
gctcacgaaccagtc

SEQ ID NO: 210545 - DNA, 15 bp, Homo sapiens
cgctcacgaaccagt

SEQ ID NO: 210546 - DNA, 15 bp, Homo sapiens
tcgctcacgaaccag

SEQ ID NO: 210547 - DNA, 15 bp, Homo sapiens
ctcgctcacgaacca

SEQ ID NO: 210548 - DNA, 15 bp, Homo sapiens
tctcgctcacgaacc

SEQ ID NO: 210549 - DNA, 15 bp, Homo sapiens
ctctcgctcacgaac

SEQ ID NO: 210550 - DNA, 15 bp, Homo sapiens
tctctcgctcacgaa

SEQ ID NO: 210551 - DNA, 15 bp, Homo sapiens
atctctcgctcacga

SEQ ID NO: 210552 - DNA, 15 bp, Homo sapiens
aatctctcgctcacg

SEQ ID NO: 210553 - DNA, 15 bp, Homo sapiens
aaatctctcgctcac

SEQ ID NO: 210554 - DNA, 15 bp, Homo sapiens
aaaatctctcgctca

SEQ ID NO: 210555 - DNA, 15 bp, Homo sapiens
caaaatctctcgctc

SEQ ID NO: 210556 - DNA, 15 bp, Homo sapiens
acaaaatctctcgct

SEQ ID NO: 210557 - DNA, 15 bp, Homo sapiens
cacaaaatctctcgc

SEQ ID NO: 210558 - DNA, 15 bp, Homo sapiens
acacaaaatctctcg

SEQ ID NO: 210559 - DNA, 15 bp, Homo sapiens
aacacaaaatctctc

SEQ ID NO: 210560 - DNA, 15 bp, Homo sapiens
caacacaaaatctct

SEQ ID NO: 210561 - DNA, 15 bp, Homo sapiens
gcaacacaaaatctc

SEQ ID NO: 210562 - DNA, 15 bp, Homo sapiens
ggcaacacaaaatct

SEQ ID NO: 210563 - DNA, 15 bp, Homo sapiens
tggcaacacaaaatc

SEQ ID NO: 210564 - DNA, 15 bp, Homo sapiens
gtggcaacacaaaat

SEQ ID NO: 210565 - DNA, 15 bp, Homo sapiens
tgtggcaacacaaaa

SEQ ID NO: 210566 - DNA, 15 bp, Homo sapiens
ctgtggcaacacaaa

SEQ ID NO: 210567 - DNA, 15 bp, Homo sapiens
cctgtggcaacacaa

SEQ ID NO: 210568 - DNA, 15 bp, Homo sapiens
acctgtggcaacaca

SEQ ID NO: 210569 - DNA, 15 bp, Homo sapiens
tacctgtggcaacac

SEQ ID NO: 210570 - DNA, 15 bp, Homo sapiens
ctacctgtggcaaca

SEQ ID NO: 210571 - DNA, 15 bp, Homo sapiens
cctacctgtggcaac

SEQ ID NO: 210572 - DNA, 15 bp, Homo sapiens
tcctacctgtggcaa

SEQ ID NO: 210573 - DNA, 15 bp, Homo sapiens
gtcctacctgtggca

SEQ ID NO: 210574 - DNA, 15 bp, Homo sapiens
tgtcctacctgtggc

SEQ ID NO: 210575 - DNA, 15 bp, Homo sapiens
atgtcctacctgtgg

SEQ ID NO: 210576 - DNA, 15 bp, Homo sapiens
catgtcctacctgtg

SEQ ID NO: 210577 - DNA, 15 bp, Homo sapiens
gcatgtcctacctgt

SEQ ID NO: 210578 - DNA, 15 bp, Homo sapiens
agcatgtcctacctg

SEQ ID NO: 210579 - DNA, 15 bp, Homo sapiens
gagcatgtcctacct

SEQ ID NO: 210580 - DNA, 15 bp, Homo sapiens
tgagcatgtcctacc

SEQ ID NO: 210581 - DNA, 15 bp, Homo sapiens
ttgagcatgtcctac

SEQ ID NO: 210582 - DNA, 15 bp, Homo sapiens
tttgagcatgtccta

SEQ ID NO: 210583 - DNA, 15 bp, Homo sapiens
gtttgagcatgtcct

SEQ ID NO: 210584 - DNA, 15 bp, Homo sapiens
tgtttgagcatgtcc

SEQ ID NO: 210585 - DNA, 15 bp, Homo sapiens
ttgtttgagcatgtc

SEQ ID NO: 210586 - DNA, 15 bp, Homo sapiens
attgtttgagcatgt

SEQ ID NO: 210587 - DNA, 15 bp, Homo sapiens
tattgtttgagcatg

SEQ ID NO: 210588 - DNA, 15 bp, Homo sapiens
gtattgtttgagcat

SEQ ID NO: 210589 - DNA, 15 bp, Homo sapiens
agtattgtttgagca

SEQ ID NO: 210590 - DNA, 15 bp, Homo sapiens
aagtattgtttgagc

SEQ ID NO: 210591 - DNA, 15 bp, Homo sapiens
caagtattgtttgag

SEQ ID NO: 210592 - DNA, 15 bp, Homo sapiens
ccaagtattgtttga

SEQ ID NO: 210593 - DNA, 15 bp, Homo sapiens
cccaagtattgtttg

SEQ ID NO: 210594 - DNA, 15 bp, Homo sapiens
acccaagtattgttt

SEQ ID NO: 210595 - DNA, 15 bp, Homo sapiens
gacccaagtattgtt

SEQ ID NO: 210596 - DNA, 15 bp, Homo sapiens
tgacccaagtattgt

SEQ ID NO: 210597 - DNA, 15 bp, Homo sapiens
atgacccaagtattg

SEQ ID NO: 210598 - DNA, 15 bp, Homo sapiens
aatgacccaagtatt

SEQ ID NO: 210599 - DNA, 15 bp, Homo sapiens
aaatgacccaagtat

SEQ ID NO: 210600 - DNA, 15 bp, Homo sapiens
gaaatgacccaagta

SEQ ID NO: 210601 - DNA, 15 bp, Homo sapiens
agaaatgacccaagt

SEQ ID NO: 210602 - DNA, 15 bp, Homo sapiens
aagaaatgacccaag

SEQ ID NO: 210603 - DNA, 15 bp, Homo sapiens
caagaaatgacccaa

SEQ ID NO: 210604 - DNA, 15 bp, Homo sapiens
tcaagaaatgaccca

SEQ ID NO: 210605 - DNA, 15 bp, Homo sapiens
gtcaagaaatgaccc

SEQ ID NO: 210606 - DNA, 15 bp, Homo sapiens
ggtcaagaaatgacc

SEQ ID NO: 210607 - DNA, 15 bp, Homo sapiens
gggtcaagaaatgac

SEQ ID NO: 210608 - DNA, 15 bp, Homo sapiens
tgggtcaagaaatga

SEQ ID NO: 210609 - DNA, 15 bp, Homo sapiens
ttgggtcaagaaatg

SEQ ID NO: 210610 - DNA, 15 bp, Homo sapiens
cttgggtcaagaaat

SEQ ID NO: 210611 - DNA, 15 bp, Homo sapiens
acttgggtcaagaaa

SEQ ID NO: 210612 - DNA, 15 bp, Homo sapiens
gacttgggtcaagaa

SEQ ID NO: 210613 - DNA, 15 bp, Homo sapiens
tgacttgggtcaaga

SEQ ID NO: 210614 - DNA, 15 bp, Homo sapiens
atgacttgggtcaag

SEQ ID NO: 210615 - DNA, 15 bp, Homo sapiens
gatgacttgggtcaa

SEQ ID NO: 210616 - DNA, 15 bp, Homo sapiens
agatgacttgggtca

SEQ ID NO: 210617 - DNA, 15 bp, Homo sapiens
tagatgacttgggtc

SEQ ID NO: 210618 - DNA, 15 bp, Homo sapiens
atagatgacttgggt

SEQ ID NO: 210619 - DNA, 15 bp, Homo sapiens
aatagatgacttggg

SEQ ID NO: 210620 - DNA, 15 bp, Homo sapiens
gaatagatgacttgg

SEQ ID NO: 210621 - DNA, 15 bp, Homo sapiens
tgaatagatgacttg

SEQ ID NO: 210622 - DNA, 15 bp, Homo sapiens
gtgaatagatgactt

SEQ ID NO: 210623 - DNA, 15 bp, Homo sapiens
ggtgaatagatgact

SEQ ID NO: 210624 - DNA, 15 bp, Homo sapiens
tggtgaatagatgac

SEQ ID NO: 210625 - DNA, 15 bp, Homo sapiens
atggtgaatagatga

SEQ ID NO: 210626 - DNA, 15 bp, Homo sapiens
tatggtgaatagatg

SEQ ID NO: 210627 - DNA, 15 bp, Homo sapiens
ctatggtgaatagat

SEQ ID NO: 210628 - DNA, 15 bp, Homo sapiens
actatggtgaataga

SEQ ID NO: 210629 - DNA, 15 bp, Homo sapiens
aactatggtgaatag

SEQ ID NO: 210630 - DNA, 15 bp, Homo sapiens
aaactatggtgaata

SEQ ID NO: 210631 - DNA, 15 bp, Homo sapiens
aaaactatggtgaat

SEQ ID NO: 210632 - DNA, 15 bp, Homo sapiens
caaaactatggtgaa

SEQ ID NO: 210633 - DNA, 15 bp, Homo sapiens
acaaaactatggtga

SEQ ID NO: 210634 - DNA, 15 bp, Homo sapiens
tacaaaactatggtg

SEQ ID NO: 210635 - DNA, 15 bp, Homo sapiens
ctacaaaactatggt

SEQ ID NO: 210636 - DNA, 15 bp, Homo sapiens
gctacaaaactatgg

SEQ ID NO: 210637 - DNA, 15 bp, Homo sapiens
tgctacaaaactatg

SEQ ID NO: 210638 - DNA, 15 bp, Homo sapiens
gtgctacaaaactat

SEQ ID NO: 210639 - DNA, 15 bp, Homo sapiens
ggtgctacaaaacta

SEQ ID NO: 210640 - DNA, 15 bp, Homo sapiens
cggtgctacaaaact

SEQ ID NO: 210641 - DNA, 15 bp, Homo sapiens
tcggtgctacaaaac

SEQ ID NO: 210642 - DNA, 15 bp, Homo sapiens
atcggtgctacaaaa

SEQ ID NO: 210643 - DNA, 15 bp, Homo sapiens
gatcggtgctacaaa

SEQ ID NO: 210644 - DNA, 15 bp, Homo sapiens
agatcggtgctacaa

SEQ ID NO: 210645 - DNA, 15 bp, Homo sapiens
aagatcggtgctaca

SEQ ID NO: 210646 - DNA, 15 bp, Homo sapiens
caagatcggtgctac

SEQ ID NO: 210647 - DNA, 15 bp, Homo sapiens
gcaagatcggtgcta

SEQ ID NO: 210648 - DNA, 15 bp, Homo sapiens
tgcaagatcggtgct

SEQ ID NO: 210649 - DNA, 15 bp, Homo sapiens
atgcaagatcggtgc

SEQ ID NO: 210650 - DNA, 15 bp, Homo sapiens
tatgcaagatcggtg

SEQ ID NO: 210651 - DNA, 15 bp, Homo sapiens
gtatgcaagatcggt

SEQ ID NO: 210652 - DNA, 15 bp, Homo sapiens
tgtatgcaagatcgg

SEQ ID NO: 210653 - DNA, 15 bp, Homo sapiens
atgtatgcaagatcg

SEQ ID NO: 210654 - DNA, 15 bp, Homo sapiens
aatgtatgcaagatc

SEQ ID NO: 210655 - DNA, 15 bp, Homo sapiens
aaatgtatgcaagat

SEQ ID NO: 210656 - DNA, 15 bp, Homo sapiens
gaaatgtatgcaaga

SEQ ID NO: 210657 - DNA, 15 bp, Homo sapiens
tgaaatgtatgcaag

SEQ ID NO: 210658 - DNA, 15 bp, Homo sapiens
atgaaatgtatgcaa

SEQ ID NO: 210659 - DNA, 15 bp, Homo sapiens
catgaaatgtatgca

SEQ ID NO: 210660 - DNA, 15 bp, Homo sapiens
acatgaaatgtatgc

SEQ ID NO: 210661 - DNA, 15 bp, Homo sapiens
tacatgaaatgtatg

SEQ ID NO: 210662 - DNA, 15 bp, Homo sapiens
atacatgaaatgtat

SEQ ID NO: 210663 - DNA, 15 bp, Homo sapiens
gatacatgaaatgta

SEQ ID NO: 210664 - DNA, 15 bp, Homo sapiens
agatacatgaaatgt

SEQ ID NO: 210665 - DNA, 15 bp, Homo sapiens
aagatacatgaaatg

SEQ ID NO: 210666 - DNA, 15 bp, Homo sapiens
gaagatacatgaaat

SEQ ID NO: 210667 - DNA, 15 bp, Homo sapiens
agaagatacatgaaa

SEQ ID NO: 210668 - DNA, 15 bp, Homo sapiens
aagaagatacatgaa

SEQ ID NO: 210669 - DNA, 15 bp, Homo sapiens
aaagaagatacatga

SEQ ID NO: 210670 - DNA, 15 bp, Homo sapiens
caaagaagatacatg

SEQ ID NO: 210671 - DNA, 15 bp, Homo sapiens
tcaaagaagatacat

SEQ ID NO: 210672 - DNA, 15 bp, Homo sapiens
ttcaaagaagataca

SEQ ID NO: 210673 - DNA, 15 bp, Homo sapiens
gttcaaagaagatac

SEQ ID NO: 210674 - DNA, 15 bp, Homo sapiens
ggttcaaagaagata

SEQ ID NO: 210675 - DNA, 15 bp, Homo sapiens
gggttcaaagaagat

SEQ ID NO: 210676 - DNA, 15 bp, Homo sapiens
ggggttcaaagaaga

SEQ ID NO: 210677 - DNA, 15 bp, Homo sapiens
tggggttcaaagaag

SEQ ID NO: 210678 - DNA, 15 bp, Homo sapiens
gtggggttcaaagaa

SEQ ID NO: 210679 - DNA, 15 bp, Homo sapiens
cgtggggttcaaaga

SEQ ID NO: 210680 - DNA, 15 bp, Homo sapiens
acgtggggttcaaag

SEQ ID NO: 210681 - DNA, 15 bp, Homo sapiens
gacgtggggttcaaa

SEQ ID NO: 210682 - DNA, 15 bp, Homo sapiens
tgacgtggggttcaa

SEQ ID NO: 210683 - DNA, 15 bp, Homo sapiens
ctgacgtggggttca

SEQ ID NO: 210684 - DNA, 15 bp, Homo sapiens
actgacgtggggttc

SEQ ID NO: 210685 - DNA, 15 bp, Homo sapiens
cactgacgtggggtt

SEQ ID NO: 210686 - DNA, 15 bp, Homo sapiens
gcactgacgtggggt

SEQ ID NO: 210687 - DNA, 15 bp, Homo sapiens
agcactgacgtgggg

SEQ ID NO: 210688 - DNA, 15 bp, Homo sapiens
cagcactgacgtggg

SEQ ID NO: 210689 - DNA, 15 bp, Homo sapiens
gcagcactgacgtgg

SEQ ID NO: 210690 - DNA, 15 bp, Homo sapiens
agcagcactgacgtg

SEQ ID NO: 210691 - DNA, 15 bp, Homo sapiens
aagcagcactgacgt

SEQ ID NO: 210692 - DNA, 15 bp, Homo sapiens
taagcagcactgacg

SEQ ID NO: 210693 - DNA, 15 bp, Homo sapiens
ataagcagcactgac

SEQ ID NO: 210694 - DNA, 15 bp, Homo sapiens
tataagcagcactga

SEQ ID NO: 210695 - DNA, 15 bp, Homo sapiens
atataagcagcactg

SEQ ID NO: 210696 - DNA, 15 bp, Homo sapiens
catataagcagcact

SEQ ID NO: 210697 - DNA, 15 bp, Homo sapiens
tcatataagcagcac

SEQ ID NO: 210698 - DNA, 15 bp, Homo sapiens
atcatataagcagca

SEQ ID NO: 210699 - DNA, 15 bp, Homo sapiens
tatcatataagcagc

SEQ ID NO: 210700 - DNA, 15 bp, Homo sapiens
gtatcatataagcag

SEQ ID NO: 210701 - DNA, 15 bp, Homo sapiens
agtatcatataagca

SEQ ID NO: 210702 - DNA, 15 bp, Homo sapiens
gagtatcatataagc

SEQ ID NO: 210703 - DNA, 15 bp, Homo sapiens
tgagtatcatataag

SEQ ID NO: 210704 - DNA, 15 bp, Homo sapiens
ctgagtatcatataa

SEQ ID NO: 210705 - DNA, 15 bp, Homo sapiens
tctgagtatcatata

SEQ ID NO: 210706 - DNA, 15 bp, Homo sapiens
ttctgagtatcatat

SEQ ID NO: 210707 - DNA, 15 bp, Homo sapiens
tttctgagtatcata

SEQ ID NO: 210708 - DNA, 15 bp, Homo sapiens
atttctgagtatcat

SEQ ID NO: 210709 - DNA, 15 bp, Homo sapiens
aatttctgagtatca

SEQ ID NO: 210710 - DNA, 15 bp, Homo sapiens
taatttctgagtatc

SEQ ID NO: 210711 - DNA, 15 bp, Homo sapiens
ttaatttctgagtat

SEQ ID NO: 210712 - DNA, 15 bp, Homo sapiens
tttaatttctgagta

SEQ ID NO: 210713 - DNA, 15 bp, Homo sapiens
gtttaatttctgagt

SEQ ID NO: 210714 - DNA, 15 bp, Homo sapiens
tgtttaatttctgag

SEQ ID NO: 210715 - DNA, 15 bp, Homo sapiens
gtgtttaatttctga

SEQ ID NO: 210716 - DNA, 15 bp, Homo sapiens
agtgtttaatttctg

SEQ ID NO: 210717 - DNA, 15 bp, Homo sapiens
tagtgtttaatttct

SEQ ID NO: 210718 - DNA, 15 bp, Homo sapiens
ttagtgtttaatttc

SEQ ID NO: 210719 - DNA, 15 bp, Homo sapiens
cttagtgtttaattt

SEQ ID NO: 210720 - DNA, 15 bp, Homo sapiens
ccttagtgtttaatt

SEQ ID NO: 210721 - DNA, 15 bp, Homo sapiens
tccttagtgtttaat

SEQ ID NO: 210722 - DNA, 15 bp, Homo sapiens
ttccttagtgtttaa

SEQ ID NO: 210723 - DNA, 15 bp, Homo sapiens
attccttagtgttta

SEQ ID NO: 210724 - DNA, 15 bp, Homo sapiens
tattccttagtgttt

SEQ ID NO: 210725 - DNA, 15 bp, Homo sapiens
ttattccttagtgtt

SEQ ID NO: 210726 - DNA, 15 bp, Homo sapiens
cttattccttagtgt

SEQ ID NO: 210727 - DNA, 15 bp, Homo sapiens
tcttattccttagtg

SEQ ID NO: 210728 - DNA, 15 bp, Homo sapiens
atcttattccttagt

SEQ ID NO: 210729 - DNA, 15 bp, Homo sapiens
aatcttattccttag

SEQ ID NO: 210730 - DNA, 15 bp, Homo sapiens
aaatcttattcctta

SEQ ID NO: 210731 - DNA, 15 bp, Homo sapiens
aaaatcttattcctt

SEQ ID NO: 210732 - DNA, 15 bp, Homo sapiens
gaaaatcttattcct

SEQ ID NO: 210733 - DNA, 15 bp, Homo sapiens
tgaaaatcttattcc

SEQ ID NO: 210734 - DNA, 15 bp, Homo sapiens
ctgaaaatcttattc

SEQ ID NO: 210735 - DNA, 15 bp, Homo sapiens
cctgaaaatcttatt

SEQ ID NO: 210736 - DNA, 15 bp, Homo sapiens
acctgaaaatcttat

SEQ ID NO: 210737 - DNA, 15 bp, Homo sapiens
tacctgaaaatctta

SEQ ID NO: 210738 - DNA, 15 bp, Homo sapiens
ctacctgaaaatctt

SEQ ID NO: 210739 - DNA, 15 bp, Homo sapiens
cctacctgaaaatct

SEQ ID NO: 210740 - DNA, 15 bp, Homo sapiens
tcctacctgaaaatc

SEQ ID NO: 210741 - DNA, 15 bp, Homo sapiens
atcctacctgaaaat

SEQ ID NO: 210742 - DNA, 15 bp, Homo sapiens
aatcctacctgaaaa

SEQ ID NO: 210743 - DNA, 15 bp, Homo sapiens
caatcctacctgaaa

SEQ ID NO: 210744 - DNA, 15 bp, Homo sapiens
tcaatcctacctgaa

SEQ ID NO: 210745 - DNA, 15 bp, Homo sapiens
ctcaatcctacctga

SEQ ID NO: 210746 - DNA, 15 bp, Homo sapiens
actcaatcctacctg

SEQ ID NO: 210747 - DNA, 15 bp, Homo sapiens
aactcaatcctacct

SEQ ID NO: 210748 - DNA, 15 bp, Homo sapiens
aaactcaatcctacc

SEQ ID NO: 210749 - DNA, 15 bp, Homo sapiens
aaaactcaatcctac

SEQ ID NO: 210750 - DNA, 15 bp, Homo sapiens
caaaactcaatccta

SEQ ID NO: 210751 - DNA, 15 bp, Homo sapiens
ccaaaactcaatcct

SEQ ID NO: 210752 - DNA, 15 bp, Homo sapiens
tccaaaactcaatcc

SEQ ID NO: 210753 - DNA, 15 bp, Homo sapiens
ctccaaaactcaatc

SEQ ID NO: 210754 - DNA, 15 bp, Homo sapiens
cctccaaaactcaat

SEQ ID NO: 210755 - DNA, 15 bp, Homo sapiens
ccctccaaaactcaa

SEQ ID NO: 210756 - DNA, 15 bp, Homo sapiens
accctccaaaactca

SEQ ID NO: 210757 - DNA, 15 bp, Homo sapiens
gaccctccaaaactc

SEQ ID NO: 210758 - DNA, 15 bp, Homo sapiens
tgaccctccaaaact

SEQ ID NO: 210759 - DNA, 15 bp, Homo sapiens
gtgaccctccaaaac

SEQ ID NO: 210760 - DNA, 15 bp, Homo sapiens
tgtgaccctccaaaa

SEQ ID NO: 210761 - DNA, 15 bp, Homo sapiens
ttgtgaccctccaaa

SEQ ID NO: 210762 - DNA, 15 bp, Homo sapiens
tttgtgaccctccaa

SEQ ID NO: 210763 - DNA, 15 bp, Homo sapiens
atttgtgaccctcca

SEQ ID NO: 210764 - DNA, 15 bp, Homo sapiens
gatttgtgaccctcc

SEQ ID NO: 210765 - DNA, 15 bp, Homo sapiens
agatttgtgaccctc

SEQ ID NO: 210766 - DNA, 15 bp, Homo sapiens
aagatttgtgaccct

SEQ ID NO: 210767 - DNA, 15 bp, Homo sapiens
caagatttgtgaccc

SEQ ID NO: 210768 - DNA, 15 bp, Homo sapiens
acaagatttgtgacc

SEQ ID NO: 210769 - DNA, 15 bp, Homo sapiens
tacaagatttgtgac

SEQ ID NO: 210770 - DNA, 15 bp, Homo sapiens
ttacaagatttgtga

SEQ ID NO: 210771 - DNA, 15 bp, Homo sapiens
attacaagatttgtg

SEQ ID NO: 210772 - DNA, 15 bp, Homo sapiens
cattacaagatttgt

SEQ ID NO: 210773 - DNA, 15 bp, Homo sapiens
acattacaagatttg

SEQ ID NO: 210774 - DNA, 15 bp, Homo sapiens
gacattacaagattt

SEQ ID NO: 210775 - DNA, 15 bp, Homo sapiens
agacattacaagatt

SEQ ID NO: 210776 - DNA, 15 bp, Homo sapiens
tagacattacaagat

SEQ ID NO: 210777 - DNA, 15 bp, Homo sapiens
ttagacattacaaga

SEQ ID NO: 210778 - DNA, 15 bp, Homo sapiens
attagacattacaag

SEQ ID NO: 210779 - DNA, 15 bp, Homo sapiens
tattagacattacaa

SEQ ID NO: 210780 - DNA, 15 bp, Homo sapiens
atattagacattaca

SEQ ID NO: 210781 - DNA, 15 bp, Homo sapiens
aatattagacattac

SEQ ID NO: 210782 - DNA, 15 bp, Homo sapiens
aaatattagacatta

SEQ ID NO: 210783 - DNA, 15 bp, Homo sapiens
gaaatattagacatt

SEQ ID NO: 210784 - DNA, 15 bp, Homo sapiens
ggaaatattagacat

SEQ ID NO: 210785 - DNA, 15 bp, Homo sapiens
tggaaatattagaca

SEQ ID NO: 210786 - DNA, 15 bp, Homo sapiens
gtggaaatattagac

SEQ ID NO: 210787 - DNA, 15 bp, Homo sapiens
agtggaaatattaga

SEQ ID NO: 210788 - DNA, 15 bp, Homo sapiens
gagtggaaatattag

SEQ ID NO: 210789 - DNA, 15 bp, Homo sapiens
agagtggaaatatta

SEQ ID NO: 210790 - DNA, 15 bp, Homo sapiens
gagagtggaaatatt

SEQ ID NO: 210791 - DNA, 15 bp, Homo sapiens
ggagagtggaaatat

SEQ ID NO: 210792 - DNA, 15 bp, Homo sapiens
gggagagtggaaata

SEQ ID NO: 210793 - DNA, 15 bp, Homo sapiens
agggagagtggaaat

SEQ ID NO: 210794 - DNA, 15 bp, Homo sapiens
cagggagagtggaaa

SEQ ID NO: 210795 - DNA, 15 bp, Homo sapiens
gcagggagagtggaa

SEQ ID NO: 210796 - DNA, 15 bp, Homo sapiens
agcagggagagtgga

SEQ ID NO: 210797 - DNA, 15 bp, Homo sapiens
cagcagggagagtgg

SEQ ID NO: 210798 - DNA, 15 bp, Homo sapiens
tcagcagggagagtg

SEQ ID NO: 210799 - DNA, 15 bp, Homo sapiens
ctcagcagggagagt

SEQ ID NO: 210800 - DNA, 15 bp, Homo sapiens
tctcagcagggagag

SEQ ID NO: 210801 - DNA, 15 bp, Homo sapiens
ttctcagcagggaga

SEQ ID NO: 210802 - DNA, 15 bp, Homo sapiens
attctcagcagggag

SEQ ID NO: 210803 - DNA, 15 bp, Homo sapiens
aattctcagcaggga

SEQ ID NO: 210804 - DNA, 15 bp, Homo sapiens
taattctcagcaggg

SEQ ID NO: 210805 - DNA, 15 bp, Homo sapiens
ctaattctcagcagg

SEQ ID NO: 210806 - DNA, 15 bp, Homo sapiens
actaattctcagcag

SEQ ID NO: 210807 - DNA, 15 bp, Homo sapiens
aactaattctcagca

SEQ ID NO: 210808 - DNA, 15 bp, Homo sapiens
aaactaattctcagc

SEQ ID NO: 210809 - DNA, 15 bp, Homo sapiens
aaaactaattctcag

SEQ ID NO: 210810 - DNA, 15 bp, Homo sapiens
caaaactaattctca

SEQ ID NO: 210811 - DNA, 15 bp, Homo sapiens
ccaaaactaattctc

SEQ ID NO: 210812 - DNA, 15 bp, Homo sapiens
gccaaaactaattct

SEQ ID NO: 210813 - DNA, 15 bp, Homo sapiens
agccaaaactaattc

SEQ ID NO: 210814 - DNA, 15 bp, Homo sapiens
aagccaaaactaatt

SEQ ID NO: 210815 - DNA, 15 bp, Homo sapiens
gaagccaaaactaat

SEQ ID NO: 210816 - DNA, 15 bp, Homo sapiens
ggaagccaaaactaa

SEQ ID NO: 210817 - DNA, 15 bp, Homo sapiens
aggaagccaaaacta

SEQ ID NO: 210818 - DNA, 15 bp, Homo sapiens
aaggaagccaaaact

SEQ ID NO: 210819 - DNA, 15 bp, Homo sapiens
caaggaagccaaaac

SEQ ID NO: 210820 - DNA, 15 bp, Homo sapiens
ccaaggaagccaaaa

SEQ ID NO: 210821 - DNA, 15 bp, Homo sapiens
tccaaggaagccaaa

SEQ ID NO: 210822 - DNA, 15 bp, Homo sapiens
ctccaaggaagccaa

SEQ ID NO: 210823 - DNA, 15 bp, Homo sapiens
cctccaaggaagcca

SEQ ID NO: 210824 - DNA, 15 bp, Homo sapiens
acctccaaggaagcc

SEQ ID NO: 210825 - DNA, 15 bp, Homo sapiens
cacctccaaggaagc

SEQ ID NO: 210826 - DNA, 15 bp, Homo sapiens
tcacctccaaggaag

SEQ ID NO: 210827 - DNA, 15 bp, Homo sapiens
atcacctccaaggaa

SEQ ID NO: 210828 - DNA, 15 bp, Homo sapiens
tatcacctccaagga

SEQ ID NO: 210829 - DNA, 15 bp, Homo sapiens
atatcacctccaagg

SEQ ID NO: 210830 - DNA, 15 bp, Homo sapiens
gatatcacctccaag

SEQ ID NO: 210831 - DNA, 15 bp, Homo sapiens
cgatatcacctccaa

SEQ ID NO: 210832 - DNA, 15 bp, Homo sapiens
gcgatatcacctcca

SEQ ID NO: 210833 - DNA, 15 bp, Homo sapiens
ggcgatatcacctcc

SEQ ID NO: 210834 - DNA, 15 bp, Homo sapiens
aggcgatatcacctc

SEQ ID NO: 210835 - DNA, 15 bp, Homo sapiens
gaggcgatatcacct

SEQ ID NO: 210836 - DNA, 15 bp, Homo sapiens
agaggcgatatcacc

SEQ ID NO: 210837 - DNA, 15 bp, Homo sapiens
cagaggcgatatcac

SEQ ID NO: 210838 - DNA, 15 bp, Homo sapiens
acagaggcgatatca

SEQ ID NO: 210839 - DNA, 15 bp, Homo sapiens
aacagaggcgatatc

SEQ ID NO: 210840 - DNA, 15 bp, Homo sapiens
caacagaggcgatat

SEQ ID NO: 210841 - DNA, 15 bp, Homo sapiens
tcaacagaggcgata

SEQ ID NO: 210842 - DNA, 15 bp, Homo sapiens
ctcaacagaggcgat

SEQ ID NO: 210843 - DNA, 15 bp, Homo sapiens
actcaacagaggcga

SEQ ID NO: 210844 - DNA, 15 bp, Homo sapiens
tactcaacagaggcg

SEQ ID NO: 210845 - DNA, 15 bp, Homo sapiens
atactcaacagaggc

SEQ ID NO: 210846 - DNA, 15 bp, Homo sapiens
tatactcaacagagg

SEQ ID NO: 210847 - DNA, 15 bp, Homo sapiens
ttatactcaacagag

SEQ ID NO: 210848 - DNA, 15 bp, Homo sapiens
cttatactcaacaga

SEQ ID NO: 210849 - DNA, 15 bp, Homo sapiens
acttatactcaacag

SEQ ID NO: 210850 - DNA, 15 bp, Homo sapiens
cacttatactcaaca

SEQ ID NO: 210851 - DNA, 15 bp, Homo sapiens
ccacttatactcaac

SEQ ID NO: 210852 - DNA, 15 bp, Homo sapiens
gccacttatactcaa

SEQ ID NO: 210853 - DNA, 15 bp, Homo sapiens
ggccacttatactca

SEQ ID NO: 210854 - DNA, 15 bp, Homo sapiens
aggccacttatactc

SEQ ID NO: 210855 - DNA, 15 bp, Homo sapiens
taggccacttatact

SEQ ID NO: 210856 - DNA, 15 bp, Homo sapiens
gtaggccacttatac

SEQ ID NO: 210857 - DNA, 15 bp, Homo sapiens
agtaggccacttata

SEQ ID NO: 210858 - DNA, 15 bp, Homo sapiens
cagtaggccacttat

SEQ ID NO: 210859 - DNA, 15 bp, Homo sapiens
acagtaggccactta

SEQ ID NO: 210860 - DNA, 15 bp, Homo sapiens
cacagtaggccactt

SEQ ID NO: 210861 - DNA, 15 bp, Homo sapiens
tcacagtaggccact

SEQ ID NO: 210862 - DNA, 15 bp, Homo sapiens
atcacagtaggccac

SEQ ID NO: 210863 - DNA, 15 bp, Homo sapiens
gatcacagtaggcca

SEQ ID NO: 210864 - DNA, 15 bp, Homo sapiens
tgatcacagtaggcc

SEQ ID NO: 210865 - DNA, 15 bp, Homo sapiens
gtgatcacagtaggc

SEQ ID NO: 210866 - DNA, 15 bp, Homo sapiens
tgtgatcacagtagg

SEQ ID NO: 210867 - DNA, 15 bp, Homo sapiens
gtgtgatcacagtag

SEQ ID NO: 210868 - DNA, 15 bp, Homo sapiens
ggtgtgatcacagta

SEQ ID NO: 210869 - DNA, 15 bp, Homo sapiens
tggtgtgatcacagt

SEQ ID NO: 210870 - DNA, 15 bp, Homo sapiens
gtggtgtgatcacag

SEQ ID NO: 210871 - DNA, 15 bp, Homo sapiens
agtggtgtgatcaca

SEQ ID NO: 210872 - DNA, 15 bp, Homo sapiens
cagtggtgtgatcac

SEQ ID NO: 210873 - DNA, 15 bp, Homo sapiens
gcagtggtgtgatca

SEQ ID NO: 210874 - DNA, 15 bp, Homo sapiens
tgcagtggtgtgatc

SEQ ID NO: 210875 - DNA, 15 bp, Homo sapiens
gtgcagtggtgtgat

SEQ ID NO: 210876 - DNA, 15 bp, Homo sapiens
agtgcagtggtgtga

SEQ ID NO: 210877 - DNA, 15 bp, Homo sapiens
gagtgcagtggtgtg

SEQ ID NO: 210878 - DNA, 15 bp, Homo sapiens
ggagtgcagtggtgt

SEQ ID NO: 210879 - DNA, 15 bp, Homo sapiens
tggagtgcagtggtg

SEQ ID NO: 210880 - DNA, 15 bp, Homo sapiens
ctggagtgcagtggt

SEQ ID NO: 210881 - DNA, 15 bp, Homo sapiens
ggtctcactctgtca

SEQ ID NO: 210882 - DNA, 15 bp, Homo sapiens
gggtctcactctgtc

SEQ ID NO: 210883 - DNA, 15 bp, Homo sapiens
agggtctcactctgt

SEQ ID NO: 210884 - DNA, 15 bp, Homo sapiens
cagggtctcactctg

SEQ ID NO: 210885 - DNA, 15 bp, Homo sapiens
acagggtctcactct

SEQ ID NO: 210886 - DNA, 15 bp, Homo sapiens
gacagggtctcactc

SEQ ID NO: 210887 - DNA, 15 bp, Homo sapiens
agacagggtctcact

SEQ ID NO: 210888 - DNA, 15 bp, Homo sapiens
gagacagggtctcac

SEQ ID NO: 210889 - DNA, 15 bp, Homo sapiens
tgagacagggtctca

SEQ ID NO: 210890 - DNA, 15 bp, Homo sapiens
ctgagacagggtctc

SEQ ID NO: 210891 - DNA, 15 bp, Homo sapiens
tctgagacagggtct

SEQ ID NO: 210892 - DNA, 15 bp, Homo sapiens
ttctgagacagggtc

SEQ ID NO: 210893 - DNA, 15 bp, Homo sapiens
tttctgagacagggt

SEQ ID NO: 210894 - DNA, 15 bp, Homo sapiens
ttttctgagacaggg

SEQ ID NO: 210895 - DNA, 15 bp, Homo sapiens
tttttctgagacagg

SEQ ID NO: 210896 - DNA, 15 bp, Homo sapiens
ttttttctgagacag

SEQ ID NO: 210897 - DNA, 15 bp, Homo sapiens
tttttttctgagaca

SEQ ID NO: 210898 - DNA, 15 bp, Homo sapiens
ttttttttctgagac

SEQ ID NO: 210899 - DNA, 15 bp, Homo sapiens
tttttttttctgaga

SEQ ID NO: 210900 - DNA, 15 bp, Homo sapiens
ttttttttttctgag

SEQ ID NO: 210901 - DNA, 15 bp, Homo sapiens
tttttttttttctga

SEQ ID NO: 210902 - DNA, 15 bp, Homo sapiens
ttttttttttttctg

SEQ ID NO: 210903 - DNA, 15 bp, Homo sapiens
ttctttttttttttt

SEQ ID NO: 210904 - DNA, 15 bp, Homo sapiens
attcttttttttttt

SEQ ID NO: 210905 - DNA, 15 bp, Homo sapiens
cattctttttttttt

SEQ ID NO: 210906 - DNA, 15 bp, Homo sapiens
gcattcttttttttt

SEQ ID NO: 210907 - DNA, 15 bp, Homo sapiens
tgcattctttttttt

SEQ ID NO: 210908 - DNA, 15 bp, Homo sapiens
atgcattcttttttt

SEQ ID NO: 210909 - DNA, 15 bp, Homo sapiens
catgcattctttttt

SEQ ID NO: 210910 - DNA, 15 bp, Homo sapiens
ccatgcattcttttt

SEQ ID NO: 210911 - DNA, 15 bp, Homo sapiens
gccatgcattctttt

SEQ ID NO: 210912 - DNA, 15 bp, Homo sapiens
ggccatgcattcttt

SEQ ID NO: 210913 - DNA, 15 bp, Homo sapiens
aggccatgcattctt

SEQ ID NO: 210914 - DNA, 15 bp, Homo sapiens
taggccatgcattct

SEQ ID NO: 210915 - DNA, 15 bp, Homo sapiens
ctaggccatgcattc

SEQ ID NO: 210916 - DNA, 15 bp, Homo sapiens
tctaggccatgcatt

SEQ ID NO: 210917 - DNA, 15 bp, Homo sapiens
atctaggccatgcat

SEQ ID NO: 210918 - DNA, 15 bp, Homo sapiens
catctaggccatgca

SEQ ID NO: 210919 - DNA, 15 bp, Homo sapiens
tcatctaggccatgc

SEQ ID NO: 210920 - DNA, 15 bp, Homo sapiens
gtcatctaggccatg

SEQ ID NO: 210921 - DNA, 15 bp, Homo sapiens
agtcatctaggccat

SEQ ID NO: 210922 - DNA, 15 bp, Homo sapiens
aagtcatctaggcca

SEQ ID NO: 210923 - DNA, 15 bp, Homo sapiens
gaagtcatctaggcc

SEQ ID NO: 210924 - DNA, 15 bp, Homo sapiens
agaagtcatctaggc

SEQ ID NO: 210925 - DNA, 15 bp, Homo sapiens
tagaagtcatctagg

SEQ ID NO: 210926 - DNA, 15 bp, Homo sapiens
ttagaagtcatctag

SEQ ID NO: 210927 - DNA, 15 bp, Homo sapiens
cttagaagtcatcta

SEQ ID NO: 210928 - DNA, 15 bp, Homo sapiens
ccttagaagtcatct

SEQ ID NO: 210929 - DNA, 15 bp, Homo sapiens
accttagaagtcatc

SEQ ID NO: 210930 - DNA, 15 bp, Homo sapiens
aaccttagaagtcat

SEQ ID NO: 210931 - DNA, 15 bp, Homo sapiens
aaaccttagaagtca

SEQ ID NO: 210932 - DNA, 15 bp, Homo sapiens
aaaaccttagaagtc

SEQ ID NO: 210933 - DNA, 15 bp, Homo sapiens
aaaaaccttagaagt

SEQ ID NO: 210934 - DNA, 15 bp, Homo sapiens
gaaaaaccttagaag

SEQ ID NO: 210935 - DNA, 15 bp, Homo sapiens
ggaaaaaccttagaa

SEQ ID NO: 210936 - DNA, 15 bp, Homo sapiens
gggaaaaaccttaga

SEQ ID NO: 210937 - DNA, 15 bp, Homo sapiens
tgggaaaaaccttag

SEQ ID NO: 210938 - DNA, 15 bp, Homo sapiens
gtgggaaaaacctta

SEQ ID NO: 210939 - DNA, 15 bp, Homo sapiens
ggtgggaaaaacctt

SEQ ID NO: 210940 - DNA, 15 bp, Homo sapiens
gggtgggaaaaacct

SEQ ID NO: 210941 - DNA, 15 bp, Homo sapiens
tgggtgggaaaaacc

SEQ ID NO: 210942 - DNA, 15 bp, Homo sapiens
ctgggtgggaaaaac

SEQ ID NO: 210943 - DNA, 15 bp, Homo sapiens
actgggtgggaaaaa

SEQ ID NO: 210944 - DNA, 15 bp, Homo sapiens
aactgggtgggaaaa

SEQ ID NO: 210945 - DNA, 15 bp, Homo sapiens
gaactgggtgggaaa

SEQ ID NO: 210946 - DNA, 15 bp, Homo sapiens
ggaactgggtgggaa

SEQ ID NO: 210947 - DNA, 15 bp, Homo sapiens
tggaactgggtggga

SEQ ID NO: 210948 - DNA, 15 bp, Homo sapiens
ctggaactgggtggg

SEQ ID NO: 210949 - DNA, 15 bp, Homo sapiens
actggaactgggtgg

SEQ ID NO: 210950 - DNA, 15 bp, Homo sapiens
aactggaactgggtg

SEQ ID NO: 210951 - DNA, 15 bp, Homo sapiens
aaactggaactgggt

SEQ ID NO: 210952 - DNA, 15 bp, Homo sapiens
aaaactggaactggg

SEQ ID NO: 210953 - DNA, 15 bp, Homo sapiens
gaaaactggaactgg

SEQ ID NO: 210954 - DNA, 15 bp, Homo sapiens
tgaaaactggaactg

SEQ ID NO: 210955 - DNA, 15 bp, Homo sapiens
atgaaaactggaact

SEQ ID NO: 210956 - DNA, 15 bp, Homo sapiens
catgaaaactggaac

SEQ ID NO: 210957 - DNA, 15 bp, Homo sapiens
acatgaaaactggaa

SEQ ID NO: 210958 - DNA, 15 bp, Homo sapiens
aacatgaaaactgga

SEQ ID NO: 210959 - DNA, 15 bp, Homo sapiens
gaacatgaaaactgg

SEQ ID NO: 210960 - DNA, 15 bp, Homo sapiens
agaacatgaaaactg

SEQ ID NO: 210961 - DNA, 15 bp, Homo sapiens
tagaacatgaaaact

SEQ ID NO: 210962 - DNA, 15 bp, Homo sapiens
ctagaacatgaaaac

SEQ ID NO: 210963 - DNA, 15 bp, Homo sapiens
cctagaacatgaaaa

SEQ ID NO: 210964 - DNA, 15 bp, Homo sapiens
gcctagaacatgaaa

SEQ ID NO: 210965 - DNA, 15 bp, Homo sapiens
tgcctagaacatgaa

SEQ ID NO: 210966 - DNA, 15 bp, Homo sapiens
ctgcctagaacatga

SEQ ID NO: 210967 - DNA, 15 bp, Homo sapiens
tctgcctagaacatg

SEQ ID NO: 210968 - DNA, 15 bp, Homo sapiens
ctctgcctagaacat

SEQ ID NO: 210969 - DNA, 15 bp, Homo sapiens
gctctgcctagaaca

SEQ ID NO: 210970 - DNA, 15 bp, Homo sapiens
tgctctgcctagaac

SEQ ID NO: 210971 - DNA, 15 bp, Homo sapiens
ctgctctgcctagaa

SEQ ID NO: 210972 - DNA, 15 bp, Homo sapiens
actgctctgcctaga

SEQ ID NO: 210973 - DNA, 15 bp, Homo sapiens
tactgctctgcctag

SEQ ID NO: 210974 - DNA, 15 bp, Homo sapiens
ttactgctctgccta

SEQ ID NO: 210975 - DNA, 15 bp, Homo sapiens
tttactgctctgcct

SEQ ID NO: 210976 - DNA, 15 bp, Homo sapiens
ctttactgctctgcc

SEQ ID NO: 210977 - DNA, 15 bp, Homo sapiens
actttactgctctgc

SEQ ID NO: 210978 - DNA, 15 bp, Homo sapiens
cactttactgctctg

SEQ ID NO: 210979 - DNA, 15 bp, Homo sapiens
tcactttactgctct

SEQ ID NO: 210980 - DNA, 15 bp, Homo sapiens
ctcactttactgctc

SEQ ID NO: 210981 - DNA, 15 bp, Homo sapiens
tctcactttactgct

SEQ ID NO: 210982 - DNA, 15 bp, Homo sapiens
ttctcactttactgc

SEQ ID NO: 210983 - DNA, 15 bp, Homo sapiens
tttctcactttactg

SEQ ID NO: 210984 - DNA, 15 bp, Homo sapiens
gtttctcactttact

SEQ ID NO: 210985 - DNA, 15 bp, Homo sapiens
tgtttctcactttac

SEQ ID NO: 210986 - DNA, 15 bp, Homo sapiens
gtgtttctcacttta

SEQ ID NO: 210987 - DNA, 15 bp, Homo sapiens
tgtgtttctcacttt

SEQ ID NO: 210988 - DNA, 15 bp, Homo sapiens
atgtgtttctcactt

SEQ ID NO: 210989 - DNA, 15 bp, Homo sapiens
catgtgtttctcact

SEQ ID NO: 210990 - DNA, 15 bp, Homo sapiens
ccatgtgtttctcac

SEQ ID NO: 210991 - DNA, 15 bp, Homo sapiens
tccatgtgtttctca

SEQ ID NO: 210992 - DNA, 15 bp, Homo sapiens
gtccatgtgtttctc

SEQ ID NO: 210993 - DNA, 15 bp, Homo sapiens
agtccatgtgtttct

SEQ ID NO: 210994 - DNA, 15 bp, Homo sapiens
aagtccatgtgtttc

SEQ ID NO: 210995 - DNA, 15 bp, Homo sapiens
caagtccatgtgttt

SEQ ID NO: 210996 - DNA, 15 bp, Homo sapiens
ccaagtccatgtgtt

SEQ ID NO: 210997 - DNA, 15 bp, Homo sapiens
cccaagtccatgtgt

SEQ ID NO: 210998 - DNA, 15 bp, Homo sapiens
tcccaagtccatgtg

SEQ ID NO: 210999 - DNA, 15 bp, Homo sapiens
ctcccaagtccatgt

SEQ ID NO: 211000 - DNA, 15 bp, Homo sapiens
actcccaagtccatg

SEQ ID NO: 211001 - DNA, 15 bp, Homo sapiens
aactcccaagtccat

SEQ ID NO: 211002 - DNA, 15 bp, Homo sapiens
aaactcccaagtcca

SEQ ID NO: 211003 - DNA, 15 bp, Homo sapiens
taaactcccaagtcc

SEQ ID NO: 211004 - DNA, 15 bp, Homo sapiens
ctaaactcccaagtc

SEQ ID NO: 211005 - DNA, 15 bp, Homo sapiens
actaaactcccaagt

SEQ ID NO: 211006 - DNA, 15 bp, Homo sapiens
gactaaactcccaag

SEQ ID NO: 211007 - DNA, 15 bp, Homo sapiens
agactaaactcccaa

SEQ ID NO: 211008 - DNA, 15 bp, Homo sapiens
gagactaaactccca

SEQ ID NO: 211009 - DNA, 15 bp, Homo sapiens
cgagactaaactccc

SEQ ID NO: 211010 - DNA, 15 bp, Homo sapiens
gcgagactaaactcc

SEQ ID NO: 211011 - DNA, 15 bp, Homo sapiens
tgcgagactaaactc

SEQ ID NO: 211012 - DNA, 15 bp, Homo sapiens
atgcgagactaaact

SEQ ID NO: 211013 - DNA, 15 bp, Homo sapiens
aatgcgagactaaac

SEQ ID NO: 211014 - DNA, 15 bp, Homo sapiens
aaatgcgagactaaa

SEQ ID NO: 211015 - DNA, 15 bp, Homo sapiens
gaaatgcgagactaa

SEQ ID NO: 211016 - DNA, 15 bp, Homo sapiens
tgaaatgcgagacta

SEQ ID NO: 211017 - DNA, 15 bp, Homo sapiens
gtgaaatgcgagact

SEQ ID NO: 211018 - DNA, 15 bp, Homo sapiens
agtgaaatgcgagac

SEQ ID NO: 211019 - DNA, 15 bp, Homo sapiens
cagtgaaatgcgaga

SEQ ID NO: 211020 - DNA, 15 bp, Homo sapiens
gcagtgaaatgcgag

SEQ ID NO: 211021 - DNA, 15 bp, Homo sapiens
ggcagtgaaatgcga

SEQ ID NO: 211022 - DNA, 15 bp, Homo sapiens
tggcagtgaaatgcg

SEQ ID NO: 211023 - DNA, 15 bp, Homo sapiens
gtggcagtgaaatgc

SEQ ID NO: 211024 - DNA, 15 bp, Homo sapiens
agtggcagtgaaatg

SEQ ID NO: 211025 - DNA, 15 bp, Homo sapiens
aagtggcagtgaaat

SEQ ID NO: 211026 - DNA, 15 bp, Homo sapiens
taagtggcagtgaaa

SEQ ID NO: 211027 - DNA, 15 bp, Homo sapiens
ttaagtggcagtgaa

SEQ ID NO: 211028 - DNA, 15 bp, Homo sapiens
attaagtggcagtga

SEQ ID NO: 211029 - DNA, 15 bp, Homo sapiens
gattaagtggcagtg

SEQ ID NO: 211030 - DNA, 15 bp, Homo sapiens
agattaagtggcagt

SEQ ID NO: 211031 - DNA, 15 bp, Homo sapiens
cagattaagtggcag

SEQ ID NO: 211032 - DNA, 15 bp, Homo sapiens
tcagattaagtggca

SEQ ID NO: 211033 - DNA, 15 bp, Homo sapiens
ctcagattaagtggc

SEQ ID NO: 211034 - DNA, 15 bp, Homo sapiens
gctcagattaagtgg

SEQ ID NO: 211035 - DNA, 15 bp, Homo sapiens
cgctcagattaagtg

SEQ ID NO: 211036 - DNA, 15 bp, Homo sapiens
tcgctcagattaagt

SEQ ID NO: 211037 - DNA, 15 bp, Homo sapiens
gtcgctcagattaag

SEQ ID NO: 211038 - DNA, 15 bp, Homo sapiens
agtcgctcagattaa

SEQ ID NO: 211039 - DNA, 15 bp, Homo sapiens
tagtcgctcagatta

SEQ ID NO: 211040 - DNA, 15 bp, Homo sapiens
atagtcgctcagatt

SEQ ID NO: 211041 - DNA, 15 bp, Homo sapiens
aatagtcgctcagat

SEQ ID NO: 211042 - DNA, 15 bp, Homo sapiens
gaatagtcgctcaga

SEQ ID NO: 211043 - DNA, 15 bp, Homo sapiens
ggaatagtcgctcag

SEQ ID NO: 211044 - DNA, 15 bp, Homo sapiens
tggaatagtcgctca

SEQ ID NO: 211045 - DNA, 15 bp, Homo sapiens
atggaatagtcgctc

SEQ ID NO: 211046 - DNA, 15 bp, Homo sapiens
tatggaatagtcgct

SEQ ID NO: 211047 - DNA, 15 bp, Homo sapiens
atatggaatagtcgc

SEQ ID NO: 211048 - DNA, 15 bp, Homo sapiens
aatatggaatagtcg

SEQ ID NO: 211049 - DNA, 15 bp, Homo sapiens
aaatatggaatagtc

SEQ ID NO: 211050 - DNA, 15 bp, Homo sapiens
taaatatggaatagt

SEQ ID NO: 211051 - DNA, 15 bp, Homo sapiens
ttaaatatggaatag

SEQ ID NO: 211052 - DNA, 15 bp, Homo sapiens
attaaatatggaata

SEQ ID NO: 211053 - DNA, 15 bp, Homo sapiens
gattaaatatggaat

SEQ ID NO: 211054 - DNA, 15 bp, Homo sapiens
agattaaatatggaa

SEQ ID NO: 211055 - DNA, 15 bp, Homo sapiens
gagattaaatatgga

SEQ ID NO: 211056 - DNA, 15 bp, Homo sapiens
agagattaaatatgg

SEQ ID NO: 211057 - DNA, 15 bp, Homo sapiens
gagagattaaatatg

SEQ ID NO: 211058 - DNA, 15 bp, Homo sapiens
agagagattaaatat

SEQ ID NO: 211059 - DNA, 15 bp, Homo sapiens
cagagagattaaata

SEQ ID NO: 211060 - DNA, 15 bp, Homo sapiens
tcagagagattaaat

SEQ ID NO: 211061 - DNA, 15 bp, Homo sapiens
ttcagagagattaaa

SEQ ID NO: 211062 - DNA, 15 bp, Homo sapiens
attcagagagattaa

SEQ ID NO: 211063 - DNA, 15 bp, Homo sapiens
cattcagagagatta

SEQ ID NO: 211064 - DNA, 15 bp, Homo sapiens
acattcagagagatt

SEQ ID NO: 211065 - DNA, 15 bp, Homo sapiens
tacattcagagagat

SEQ ID NO: 211066 - DNA, 15 bp, Homo sapiens
atacattcagagaga

SEQ ID NO: 211067 - DNA, 15 bp, Homo sapiens
aatacattcagagag

SEQ ID NO: 211068 - DNA, 15 bp, Homo sapiens
aaatacattcagaga

SEQ ID NO: 211069 - DNA, 15 bp, Homo sapiens
taaatacattcagag

SEQ ID NO: 211070 - DNA, 15 bp, Homo sapiens
gtaaatacattcaga

SEQ ID NO: 211071 - DNA, 15 bp, Homo sapiens
agtaaatacattcag

SEQ ID NO: 211072 - DNA, 15 bp, Homo sapiens
gagtaaatacattca

SEQ ID NO: 211073 - DNA, 15 bp, Homo sapiens
tgagtaaatacattc

SEQ ID NO: 211074 - DNA, 15 bp, Homo sapiens
atgagtaaatacatt

SEQ ID NO: 211075 - DNA, 15 bp, Homo sapiens
gatgagtaaatacat

SEQ ID NO: 211076 - DNA, 15 bp, Homo sapiens
agatgagtaaataca

SEQ ID NO: 211077 - DNA, 15 bp, Homo sapiens
aagatgagtaaatac

SEQ ID NO: 211078 - DNA, 15 bp, Homo sapiens
aaagatgagtaaata

SEQ ID NO: 211079 - DNA, 15 bp, Homo sapiens
taaagatgagtaaat

SEQ ID NO: 211080 - DNA, 15 bp, Homo sapiens
ttaaagatgagtaaa

SEQ ID NO: 211081 - DNA, 15 bp, Homo sapiens
tttaaagatgagtaa

SEQ ID NO: 211082 - DNA, 15 bp, Homo sapiens
ctttaaagatgagta

SEQ ID NO: 211083 - DNA, 15 bp, Homo sapiens
cctttaaagatgagt

SEQ ID NO: 211084 - DNA, 15 bp, Homo sapiens
ccctttaaagatgag

SEQ ID NO: 211085 - DNA, 15 bp, Homo sapiens
cccctttaaagatga

SEQ ID NO: 211086 - DNA, 15 bp, Homo sapiens
tcccctttaaagatg

SEQ ID NO: 211087 - DNA, 15 bp, Homo sapiens
ttcccctttaaagat

SEQ ID NO: 211088 - DNA, 15 bp, Homo sapiens
attcccctttaaaga

SEQ ID NO: 211089 - DNA, 15 bp, Homo sapiens
cattcccctttaaag

SEQ ID NO: 211090 - DNA, 15 bp, Homo sapiens
tcattcccctttaaa

SEQ ID NO: 211091 - DNA, 15 bp, Homo sapiens
atcattcccctttaa

SEQ ID NO: 211092 - DNA, 15 bp, Homo sapiens
aatcattccccttta

SEQ ID NO: 211093 - DNA, 15 bp, Homo sapiens
taatcattccccttt

SEQ ID NO: 211094 - DNA, 15 bp, Homo sapiens
ataatcattcccctt

SEQ ID NO: 211095 - DNA, 15 bp, Homo sapiens
aataatcattcccct

SEQ ID NO: 211096 - DNA, 15 bp, Homo sapiens
taataatcattcccc

SEQ ID NO: 211097 - DNA, 15 bp, Homo sapiens
ttaataatcattccc

SEQ ID NO: 211098 - DNA, 15 bp, Homo sapiens
gttaataatcattcc

SEQ ID NO: 211099 - DNA, 15 bp, Homo sapiens
tgttaataatcattc

SEQ ID NO: 211100 - DNA, 15 bp, Homo sapiens
atgttaataatcatt

SEQ ID NO: 211101 - DNA, 15 bp, Homo sapiens
gatgttaataatcat

SEQ ID NO: 211102 - DNA, 15 bp, Homo sapiens
agatgttaataatca

SEQ ID NO: 211103 - DNA, 15 bp, Homo sapiens
aagatgttaataatc

SEQ ID NO: 211104 - DNA, 15 bp, Homo sapiens
aaagatgttaataat

SEQ ID NO: 211105 - DNA, 15 bp, Homo sapiens
aaaagatgttaataa

SEQ ID NO: 211106 - DNA, 15 bp, Homo sapiens
aaaaagatgttaata

SEQ ID NO: 211107 - DNA, 15 bp, Homo sapiens
gaaaaagatgttaat

SEQ ID NO: 211108 - DNA, 15 bp, Homo sapiens
agaaaaagatgttaa

SEQ ID NO: 211109 - DNA, 15 bp, Homo sapiens
gagaaaaagatgtta

SEQ ID NO: 211110 - DNA, 15 bp, Homo sapiens
tgagaaaaagatgtt

SEQ ID NO: 211111 - DNA, 15 bp, Homo sapiens
ctgagaaaaagatgt

SEQ ID NO: 211112 - DNA, 15 bp, Homo sapiens
cctgagaaaaagatg

SEQ ID NO: 211113 - DNA, 15 bp, Homo sapiens
ccctgagaaaaagat

SEQ ID NO: 211114 - DNA, 15 bp, Homo sapiens
tccctgagaaaaaga

SEQ ID NO: 211115 - DNA, 15 bp, Homo sapiens
ttccctgagaaaaag

SEQ ID NO: 211116 - DNA, 15 bp, Homo sapiens
tttccctgagaaaaa

SEQ ID NO: 211117 - DNA, 15 bp, Homo sapiens
gtttccctgagaaaa

SEQ ID NO: 211118 - DNA, 15 bp, Homo sapiens
agtttccctgagaaa

SEQ ID NO: 211119 - DNA, 15 bp, Homo sapiens
tagtttccctgagaa

SEQ ID NO: 211120 - DNA, 15 bp, Homo sapiens
atagtttccctgaga

SEQ ID NO: 211121 - DNA, 15 bp, Homo sapiens
tatagtttccctgag

SEQ ID NO: 211122 - DNA, 15 bp, Homo sapiens
atatagtttccctga

SEQ ID NO: 211123 - DNA, 15 bp, Homo sapiens
catatagtttccctg

SEQ ID NO: 211124 - DNA, 15 bp, Homo sapiens
tcatatagtttccct

SEQ ID NO: 211125 - DNA, 15 bp, Homo sapiens
ctcatatagtttccc

SEQ ID NO: 211126 - DNA, 15 bp, Homo sapiens
actcatatagtttcc

SEQ ID NO: 211127 - DNA, 15 bp, Homo sapiens
gactcatatagtttc

SEQ ID NO: 211128 - DNA, 15 bp, Homo sapiens
tgactcatatagttt

SEQ ID NO: 211129 - DNA, 15 bp, Homo sapiens
ttgactcatatagtt

SEQ ID NO: 211130 - DNA, 15 bp, Homo sapiens
cttgactcatatagt

SEQ ID NO: 211131 - DNA, 15 bp, Homo sapiens
ccttgactcatatag

SEQ ID NO: 211132 - DNA, 15 bp, Homo sapiens
tccttgactcatata

SEQ ID NO: 211133 - DNA, 15 bp, Homo sapiens
ctccttgactcatat

SEQ ID NO: 211134 - DNA, 15 bp, Homo sapiens
tctccttgactcata

SEQ ID NO: 211135 - DNA, 15 bp, Homo sapiens
atctccttgactcat

SEQ ID NO: 211136 - DNA, 15 bp, Homo sapiens
tatctccttgactca

SEQ ID NO: 211137 - DNA, 15 bp, Homo sapiens
ttatctccttgactc

SEQ ID NO: 211138 - DNA, 15 bp, Homo sapiens
attatctccttgact

SEQ ID NO: 211139 - DNA, 15 bp, Homo sapiens
tattatctccttgac

SEQ ID NO: 211140 - DNA, 15 bp, Homo sapiens
atattatctccttga

SEQ ID NO: 211141 - DNA, 15 bp, Homo sapiens
tatattatctccttg

SEQ ID NO: 211142 - DNA, 15 bp, Homo sapiens
atatattatctcctt

SEQ ID NO: 211143 - DNA, 15 bp, Homo sapiens
aatatattatctcct

SEQ ID NO: 211144 - DNA, 15 bp, Homo sapiens
aaatatattatctcc

SEQ ID NO: 211145 - DNA, 15 bp, Homo sapiens
caaatatattatctc

SEQ ID NO: 211146 - DNA, 15 bp, Homo sapiens
tcaaatatattatct

SEQ ID NO: 211147 - DNA, 15 bp, Homo sapiens
ttcaaatatattatc

SEQ ID NO: 211148 - DNA, 15 bp, Homo sapiens
tttcaaatatattat

SEQ ID NO: 211149 - DNA, 15 bp, Homo sapiens
ttttcaaatatatta

SEQ ID NO: 211150 - DNA, 15 bp, Homo sapiens
attttcaaatatatt

SEQ ID NO: 211151 - DNA, 15 bp, Homo sapiens
gattttcaaatatat

SEQ ID NO: 211152 - DNA, 15 bp, Homo sapiens
agattttcaaatata

SEQ ID NO: 211153 - DNA, 15 bp, Homo sapiens
aagattttcaaatat

SEQ ID NO: 211154 - DNA, 15 bp, Homo sapiens
aaagattttcaaata

SEQ ID NO: 211155 - DNA, 15 bp, Homo sapiens
aaaagattttcaaat

SEQ ID NO: 211156 - DNA, 15 bp, Homo sapiens
aaaaagattttcaaa

SEQ ID NO: 211157 - DNA, 15 bp, Homo sapiens
taaaaagattttcaa

SEQ ID NO: 211158 - DNA, 15 bp, Homo sapiens
ttaaaaagattttca

SEQ ID NO: 211159 - DNA, 15 bp, Homo sapiens
gttaaaaagattttc

SEQ ID NO: 211160 - DNA, 15 bp, Homo sapiens
agttaaaaagatttt

SEQ ID NO: 211161 - DNA, 15 bp, Homo sapiens
cagttaaaaagattt

SEQ ID NO: 211162 - DNA, 15 bp, Homo sapiens
gcagttaaaaagatt

SEQ ID NO: 211163 - DNA, 15 bp, Homo sapiens
tgcagttaaaaagat

SEQ ID NO: 211164 - DNA, 15 bp, Homo sapiens
ttgcagttaaaaaga

SEQ ID NO: 211165 - DNA, 15 bp, Homo sapiens
tttgcagttaaaaag

SEQ ID NO: 211166 - DNA, 15 bp, Homo sapiens
ctttgcagttaaaaa

SEQ ID NO: 211167 - DNA, 15 bp, Homo sapiens
gctttgcagttaaaa

SEQ ID NO: 211168 - DNA, 15 bp, Homo sapiens
cgctttgcagttaaa

SEQ ID NO: 211169 - DNA, 15 bp, Homo sapiens
gcgctttgcagttaa

SEQ ID NO: 211170 - DNA, 15 bp, Homo sapiens
agcgctttgcagtta

SEQ ID NO: 211171 - DNA, 15 bp, Homo sapiens
cagcgctttgcagtt

SEQ ID NO: 211172 - DNA, 15 bp, Homo sapiens
acagcgctttgcagt

SEQ ID NO: 211173 - DNA, 15 bp, Homo sapiens
aacagcgctttgcag

SEQ ID NO: 211174 - DNA, 15 bp, Homo sapiens
aaacagcgctttgca

SEQ ID NO: 211175 - DNA, 15 bp, Homo sapiens
gaaacagcgctttgc

SEQ ID NO: 211176 - DNA, 15 bp, Homo sapiens
tgaaacagcgctttg

SEQ ID NO: 211177 - DNA, 15 bp, Homo sapiens
gtgaaacagcgcttt

SEQ ID NO: 211178 - DNA, 15 bp, Homo sapiens
agtgaaacagcgctt

SEQ ID NO: 211179 - DNA, 15 bp, Homo sapiens
cagtgaaacagcgct

SEQ ID NO: 211180 - DNA, 15 bp, Homo sapiens
acagtgaaacagcgc

SEQ ID NO: 211181 - DNA, 15 bp, Homo sapiens
aacagtgaaacagcg

SEQ ID NO: 211182 - DNA, 15 bp, Homo sapiens
caacagtgaaacagc

SEQ ID NO: 211183 - DNA, 15 bp, Homo sapiens
ccaacagtgaaacag

SEQ ID NO: 211184 - DNA, 15 bp, Homo sapiens
accaacagtgaaaca

SEQ ID NO: 211185 - DNA, 15 bp, Homo sapiens
aaccaacagtgaaac

SEQ ID NO: 211186 - DNA, 15 bp, Homo sapiens
taaccaacagtgaaa

SEQ ID NO: 211187 - DNA, 15 bp, Homo sapiens
ataaccaacagtgaa

SEQ ID NO: 211188 - DNA, 15 bp, Homo sapiens
tataaccaacagtga

SEQ ID NO: 211189 - DNA, 15 bp, Homo sapiens
ttataaccaacagtg

SEQ ID NO: 211190 - DNA, 15 bp, Homo sapiens
attataaccaacagt

SEQ ID NO: 211191 - DNA, 15 bp, Homo sapiens
cattataaccaacag

SEQ ID NO: 211192 - DNA, 15 bp, Homo sapiens
acattataaccaaca

SEQ ID NO: 211193 - DNA, 15 bp, Homo sapiens
cacattataaccaac

SEQ ID NO: 211194 - DNA, 15 bp, Homo sapiens
tcacattataaccaa

SEQ ID NO: 211195 - DNA, 15 bp, Homo sapiens
atcacattataacca

SEQ ID NO: 211196 - DNA, 15 bp, Homo sapiens
aatcacattataacc

SEQ ID NO: 211197 - DNA, 15 bp, Homo sapiens
caatcacattataac

SEQ ID NO: 211198 - DNA, 15 bp, Homo sapiens
tcaatcacattataa

SEQ ID NO: 211199 - DNA, 15 bp, Homo sapiens
atcaatcacattata

SEQ ID NO: 211200 - DNA, 15 bp, Homo sapiens
gatcaatcacattat

SEQ ID NO: 211201 - DNA, 15 bp, Homo sapiens
agatcaatcacatta

SEQ ID NO: 211202 - DNA, 15 bp, Homo sapiens
gagatcaatcacatt

SEQ ID NO: 211203 - DNA, 15 bp, Homo sapiens
tgagatcaatcacat

SEQ ID NO: 211204 - DNA, 15 bp, Homo sapiens
atgagatcaatcaca

SEQ ID NO: 211205 - DNA, 15 bp, Homo sapiens
aatgagatcaatcac

SEQ ID NO: 211206 - DNA, 15 bp, Homo sapiens
caatgagatcaatca

SEQ ID NO: 211207 - DNA, 15 bp, Homo sapiens
acaatgagatcaatc

SEQ ID NO: 211208 - DNA, 15 bp, Homo sapiens
tacaatgagatcaat

SEQ ID NO: 211209 - DNA, 15 bp, Homo sapiens
ctacaatgagatcaa

SEQ ID NO: 211210 - DNA, 15 bp, Homo sapiens
actacaatgagatca

SEQ ID NO: 211211 - DNA, 15 bp, Homo sapiens
cactacaatgagatc

SEQ ID NO: 211212 - DNA, 15 bp, Homo sapiens
tcactacaatgagat

SEQ ID NO: 211213 - DNA, 15 bp, Homo sapiens
ctcactacaatgaga

SEQ ID NO: 211214 - DNA, 15 bp, Homo sapiens
gctcactacaatgag

SEQ ID NO: 211215 - DNA, 15 bp, Homo sapiens
tgctcactacaatga

SEQ ID NO: 211216 - DNA, 15 bp, Homo sapiens
ctgctcactacaatg

SEQ ID NO: 211217 - DNA, 15 bp, Homo sapiens
gctgctcactacaat

SEQ ID NO: 211218 - DNA, 15 bp, Homo sapiens
agctgctcactacaa

SEQ ID NO: 211219 - DNA, 15 bp, Homo sapiens
cagctgctcactaca

SEQ ID NO: 211220 - DNA, 15 bp, Homo sapiens
gcagctgctcactac

SEQ ID NO: 211221 - DNA, 15 bp, Homo sapiens
agcagctgctcacta

SEQ ID NO: 211222 - DNA, 15 bp, Homo sapiens
aagcagctgctcact

SEQ ID NO: 211223 - DNA, 15 bp, Homo sapiens
taagcagctgctcac

SEQ ID NO: 211224 - DNA, 15 bp, Homo sapiens
ttaagcagctgctca

SEQ ID NO: 211225 - DNA, 15 bp, Homo sapiens
attaagcagctgctc

SEQ ID NO: 211226 - DNA, 15 bp, Homo sapiens
aattaagcagctgct

SEQ ID NO: 211227 - DNA, 15 bp, Homo sapiens
caattaagcagctgc

SEQ ID NO: 211228 - DNA, 15 bp, Homo sapiens
gcaattaagcagctg

SEQ ID NO: 211229 - DNA, 15 bp, Homo sapiens
cgcaattaagcagct

SEQ ID NO: 211230 - DNA, 15 bp, Homo sapiens
acgcaattaagcagc

SEQ ID NO: 211231 - DNA, 15 bp, Homo sapiens
aacgcaattaagcag

SEQ ID NO: 211232 - DNA, 15 bp, Homo sapiens
aaacgcaattaagca

SEQ ID NO: 211233 - DNA, 15 bp, Homo sapiens
aaaacgcaattaagc

SEQ ID NO: 211234 - DNA, 15 bp, Homo sapiens
taaaacgcaattaag

SEQ ID NO: 211235 - DNA, 15 bp, Homo sapiens
ctaaaacgcaattaa

SEQ ID NO: 211236 - DNA, 15 bp, Homo sapiens
tctaaaacgcaatta

SEQ ID NO: 211237 - DNA, 15 bp, Homo sapiens
ttctaaaacgcaatt

SEQ ID NO: 211238 - DNA, 15 bp, Homo sapiens
attctaaaacgcaat

SEQ ID NO: 211239 - DNA, 15 bp, Homo sapiens
cattctaaaacgcaa

SEQ ID NO: 211240 - DNA, 15 bp, Homo sapiens
acattctaaaacgca

SEQ ID NO: 211241 - DNA, 15 bp, Homo sapiens
tacattctaaaacgc

SEQ ID NO: 211242 - DNA, 15 bp, Homo sapiens
ctacattctaaaacg

SEQ ID NO: 211243 - DNA, 15 bp, Homo sapiens
cctacattctaaaac

SEQ ID NO: 211244 - DNA, 15 bp, Homo sapiens
ccctacattctaaaa

SEQ ID NO: 211245 - DNA, 15 bp, Homo sapiens
tccctacattctaaa

SEQ ID NO: 211246 - DNA, 15 bp, Homo sapiens
ttccctacattctaa

SEQ ID NO: 211247 - DNA, 15 bp, Homo sapiens
cttccctacattcta

SEQ ID NO: 211248 - DNA, 15 bp, Homo sapiens
tcttccctacattct

SEQ ID NO: 211249 - DNA, 15 bp, Homo sapiens
atcttccctacattc

SEQ ID NO: 211250 - DNA, 15 bp, Homo sapiens
tatcttccctacatt

SEQ ID NO: 211251 - DNA, 15 bp, Homo sapiens
ctatcttccctacat

SEQ ID NO: 211252 - DNA, 15 bp, Homo sapiens
actatcttccctaca

SEQ ID NO: 211253 - DNA, 15 bp, Homo sapiens
tactatcttccctac

SEQ ID NO: 211254 - DNA, 15 bp, Homo sapiens
ttactatcttcccta

SEQ ID NO: 211255 - DNA, 15 bp, Homo sapiens
attactatcttccct

SEQ ID NO: 211256 - DNA, 15 bp, Homo sapiens
tattactatcttccc

SEQ ID NO: 211257 - DNA, 15 bp, Homo sapiens
atattactatcttcc

SEQ ID NO: 211258 - DNA, 15 bp, Homo sapiens
aatattactatcttc

SEQ ID NO: 211259 - DNA, 15 bp, Homo sapiens
aaatattactatctt

SEQ ID NO: 211260 - DNA, 15 bp, Homo sapiens
aaaatattactatct

SEQ ID NO: 211261 - DNA, 15 bp, Homo sapiens
aaaaatattactatc

SEQ ID NO: 211262 - DNA, 15 bp, Homo sapiens
gaaaaatattactat

SEQ ID NO: 211263 - DNA, 15 bp, Homo sapiens
tgaaaaatattacta

SEQ ID NO: 211264 - DNA, 15 bp, Homo sapiens
gtgaaaaatattact

SEQ ID NO: 211265 - DNA, 15 bp, Homo sapiens
tgtgaaaaatattac

SEQ ID NO: 211266 - DNA, 15 bp, Homo sapiens
atgtgaaaaatatta

SEQ ID NO: 211267 - DNA, 15 bp, Homo sapiens
aatgtgaaaaatatt

SEQ ID NO: 211268 - DNA, 15 bp, Homo sapiens
taatgtgaaaaatat

SEQ ID NO: 211269 - DNA, 15 bp, Homo sapiens
ataatgtgaaaaata

SEQ ID NO: 211270 - DNA, 15 bp, Homo sapiens
tataatgtgaaaaat

SEQ ID NO: 211271 - DNA, 15 bp, Homo sapiens
atataatgtgaaaaa

SEQ ID NO: 211272 - DNA, 15 bp, Homo sapiens
tatataatgtgaaaa

SEQ ID NO: 211273 - DNA, 15 bp, Homo sapiens
atatataatgtgaaa

SEQ ID NO: 211274 - DNA, 15 bp, Homo sapiens
catatataatgtgaa

SEQ ID NO: 211275 - DNA, 15 bp, Homo sapiens
acatatataatgtga

SEQ ID NO: 211276 - DNA, 15 bp, Homo sapiens
tacatatataatgtg

SEQ ID NO: 211277 - DNA, 15 bp, Homo sapiens
ctacatatataatgt

SEQ ID NO: 211278 - DNA, 15 bp, Homo sapiens
gctacatatataatg

SEQ ID NO: 211279 - DNA, 15 bp, Homo sapiens
agctacatatataat

SEQ ID NO: 211280 - DNA, 15 bp, Homo sapiens
cagctacatatataa

SEQ ID NO: 211281 - DNA, 15 bp, Homo sapiens
ccagctacatatata

SEQ ID NO: 211282 - DNA, 15 bp, Homo sapiens
accagctacatatat

SEQ ID NO: 211283 - DNA, 15 bp, Homo sapiens
aaccagctacatata

SEQ ID NO: 211284 - DNA, 15 bp, Homo sapiens
gaaccagctacatat

SEQ ID NO: 211285 - DNA, 15 bp, Homo sapiens
agaaccagctacata

SEQ ID NO: 211286 - DNA, 15 bp, Homo sapiens
cagaaccagctacat

SEQ ID NO: 211287 - DNA, 15 bp, Homo sapiens
ccagaaccagctaca

SEQ ID NO: 211288 - DNA, 15 bp, Homo sapiens
tccagaaccagctac

SEQ ID NO: 211289 - DNA, 15 bp, Homo sapiens
ttccagaaccagcta

SEQ ID NO: 211290 - DNA, 15 bp, Homo sapiens
gttccagaaccagct

SEQ ID NO: 211291 - DNA, 15 bp, Homo sapiens
agttccagaaccagc

SEQ ID NO: 211292 - DNA, 15 bp, Homo sapiens
cagttccagaaccag

SEQ ID NO: 211293 - DNA, 15 bp, Homo sapiens
acagttccagaacca

SEQ ID NO: 211294 - DNA, 15 bp, Homo sapiens
tacagttccagaacc

SEQ ID NO: 211295 - DNA, 15 bp, Homo sapiens
ttacagttccagaac

SEQ ID NO: 211296 - DNA, 15 bp, Homo sapiens
tttacagttccagaa

SEQ ID NO: 211297 - DNA, 15 bp, Homo sapiens
gtttacagttccaga

SEQ ID NO: 211298 - DNA, 15 bp, Homo sapiens
tgtttacagttccag

SEQ ID NO: 211299 - DNA, 15 bp, Homo sapiens
atgtttacagttcca

SEQ ID NO: 211300 - DNA, 15 bp, Homo sapiens
tatgtttacagttcc

SEQ ID NO: 211301 - DNA, 15 bp, Homo sapiens
gtatgtttacagttc

SEQ ID NO: 211302 - DNA, 15 bp, Homo sapiens
agtatgtttacagtt

SEQ ID NO: 211303 - DNA, 15 bp, Homo sapiens
gagtatgtttacagt

SEQ ID NO: 211304 - DNA, 15 bp, Homo sapiens
ggagtatgtttacag

SEQ ID NO: 211305 - DNA, 15 bp, Homo sapiens
aggagtatgtttaca

SEQ ID NO: 211306 - DNA, 15 bp, Homo sapiens
aaggagtatgtttac

SEQ ID NO: 211307 - DNA, 15 bp, Homo sapiens
aaaggagtatgttta

SEQ ID NO: 211308 - DNA, 15 bp, Homo sapiens
aaaaggagtatgttt

SEQ ID NO: 211309 - DNA, 15 bp, Homo sapiens
aaaaaggagtatgtt

SEQ ID NO: 211310 - DNA, 15 bp, Homo sapiens
aaaaaaggagtatgt

SEQ ID NO: 211311 - DNA, 15 bp, Homo sapiens
taaaaaaggagtatg

SEQ ID NO: 211312 - DNA, 15 bp, Homo sapiens
ataaaaaaggagtat

SEQ ID NO: 211313 - DNA, 15 bp, Homo sapiens
cataaaaaaggagta

SEQ ID NO: 211314 - DNA, 15 bp, Homo sapiens
ccataaaaaaggagt

SEQ ID NO: 211315 - DNA, 15 bp, Homo sapiens
tccataaaaaaggag

SEQ ID NO: 211316 - DNA, 15 bp, Homo sapiens
ctccataaaaaagga

SEQ ID NO: 211317 - DNA, 15 bp, Homo sapiens
tctccataaaaaagg

SEQ ID NO: 211318 - DNA, 15 bp, Homo sapiens
atctccataaaaaag

SEQ ID NO: 211319 - DNA, 15 bp, Homo sapiens
gatctccataaaaaa

SEQ ID NO: 211320 - DNA, 15 bp, Homo sapiens
agatctccataaaaa

SEQ ID NO: 211321 - DNA, 15 bp, Homo sapiens
cagatctccataaaa

SEQ ID NO: 211322 - DNA, 15 bp, Homo sapiens
tcagatctccataaa

SEQ ID NO: 211323 - DNA, 15 bp, Homo sapiens
ctcagatctccataa

SEQ ID NO: 211324 - DNA, 15 bp, Homo sapiens
actcagatctccata

SEQ ID NO: 211325 - DNA, 15 bp, Homo sapiens
gactcagatctccat

SEQ ID NO: 211326 - DNA, 15 bp, Homo sapiens
tgactcagatctcca

SEQ ID NO: 211327 - DNA, 15 bp, Homo sapiens
gtgactcagatctcc

SEQ ID NO: 211328 - DNA, 15 bp, Homo sapiens
cgtgactcagatctc

SEQ ID NO: 211329 - DNA, 15 bp, Homo sapiens
acgtgactcagatct

SEQ ID NO: 211330 - DNA, 15 bp, Homo sapiens
tacgtgactcagatc

SEQ ID NO: 211331 - DNA, 15 bp, Homo sapiens
gtacgtgactcagat

SEQ ID NO: 211332 - DNA, 15 bp, Homo sapiens
ggtacgtgactcaga

SEQ ID NO: 211333 - DNA, 15 bp, Homo sapiens
tggtacgtgactcag

SEQ ID NO: 211334 - DNA, 15 bp, Homo sapiens
atggtacgtgactca

SEQ ID NO: 211335 - DNA, 15 bp, Homo sapiens
tatggtacgtgactc

SEQ ID NO: 211336 - DNA, 15 bp, Homo sapiens
ttatggtacgtgact

SEQ ID NO: 211337 - DNA, 15 bp, Homo sapiens
tttatggtacgtgac

SEQ ID NO: 211338 - DNA, 15 bp, Homo sapiens
ttttatggtacgtga

SEQ ID NO: 211339 - DNA, 15 bp, Homo sapiens
attttatggtacgtg

SEQ ID NO: 211340 - DNA, 15 bp, Homo sapiens
aattttatggtacgt

SEQ ID NO: 211341 - DNA, 15 bp, Homo sapiens
gaattttatggtacg

SEQ ID NO: 211342 - DNA, 15 bp, Homo sapiens
tgaattttatggtac

SEQ ID NO: 211343 - DNA, 15 bp, Homo sapiens
gtgaattttatggta

SEQ ID NO: 211344 - DNA, 15 bp, Homo sapiens
agtgaattttatggt

SEQ ID NO: 211345 - DNA, 15 bp, Homo sapiens
gagtgaattttatgg

SEQ ID NO: 211346 - DNA, 15 bp, Homo sapiens
agagtgaattttatg

SEQ ID NO: 211347 - DNA, 15 bp, Homo sapiens
aagagtgaattttat

SEQ ID NO: 211348 - DNA, 15 bp, Homo sapiens
aaagagtgaatttta

SEQ ID NO: 211349 - DNA, 15 bp, Homo sapiens
aaaagagtgaatttt

SEQ ID NO: 211350 - DNA, 15 bp, Homo sapiens
taaaagagtgaattt

SEQ ID NO: 211351 - DNA, 15 bp, Homo sapiens
ttaaaagagtgaatt

SEQ ID NO: 211352 - DNA, 15 bp, Homo sapiens
tttaaaagagtgaat

SEQ ID NO: 211353 - DNA, 15 bp, Homo sapiens
ctttaaaagagtgaa

SEQ ID NO: 211354 - DNA, 15 bp, Homo sapiens
actttaaaagagtga

SEQ ID NO: 211355 - DNA, 15 bp, Homo sapiens
aactttaaaagagtg

SEQ ID NO: 211356 - DNA, 15 bp, Homo sapiens
caactttaaaagagt

SEQ ID NO: 211357 - DNA, 15 bp, Homo sapiens
acaactttaaaagag

SEQ ID NO: 211358 - DNA, 15 bp, Homo sapiens
tacaactttaaaaga

SEQ ID NO: 211359 - DNA, 15 bp, Homo sapiens
gtacaactttaaaag

SEQ ID NO: 211360 - DNA, 15 bp, Homo sapiens
tgtacaactttaaaa

SEQ ID NO: 211361 - DNA, 15 bp, Homo sapiens
ttgtacaactttaaa

SEQ ID NO: 211362 - DNA, 15 bp, Homo sapiens
attgtacaactttaa

SEQ ID NO: 211363 - DNA, 15 bp, Homo sapiens
gattgtacaacttta

SEQ ID NO: 211364 - DNA, 15 bp, Homo sapiens
ggattgtacaacttt

SEQ ID NO: 211365 - DNA, 15 bp, Homo sapiens
tggattgtacaactt

SEQ ID NO: 211366 - DNA, 15 bp, Homo sapiens
ctggattgtacaact

SEQ ID NO: 211367 - DNA, 15 bp, Homo sapiens
actggattgtacaac

SEQ ID NO: 211368 - DNA, 15 bp, Homo sapiens
cactggattgtacaa

SEQ ID NO: 211369 - DNA, 15 bp, Homo sapiens
ccactggattgtaca

SEQ ID NO: 211370 - DNA, 15 bp, Homo sapiens
accactggattgtac

SEQ ID NO: 211371 - DNA, 15 bp, Homo sapiens
aaccactggattgta

SEQ ID NO: 211372 - DNA, 15 bp, Homo sapiens
aaaccactggattgt

SEQ ID NO: 211373 - DNA, 15 bp, Homo sapiens
aaaaccactggattg

SEQ ID NO: 211374 - DNA, 15 bp, Homo sapiens
aaaaaccactggatt

SEQ ID NO: 211375 - DNA, 15 bp, Homo sapiens
caaaaaccactggat

SEQ ID NO: 211376 - DNA, 15 bp, Homo sapiens
tcaaaaaccactgga

SEQ ID NO: 211377 - DNA, 15 bp, Homo sapiens
atcaaaaaccactgg

SEQ ID NO: 211378 - DNA, 15 bp, Homo sapiens
tatcaaaaaccactg

SEQ ID NO: 211379 - DNA, 15 bp, Homo sapiens
atatcaaaaaccact

SEQ ID NO: 211380 - DNA, 15 bp, Homo sapiens
tatatcaaaaaccac

SEQ ID NO: 211381 - DNA, 15 bp, Homo sapiens
atatatcaaaaacca

SEQ ID NO: 211382 - DNA, 15 bp, Homo sapiens
aatatatcaaaaacc

SEQ ID NO: 211383 - DNA, 15 bp, Homo sapiens
gaatatatcaaaaac

SEQ ID NO: 211384 - DNA, 15 bp, Homo sapiens
tgaatatatcaaaaa

SEQ ID NO: 211385 - DNA, 15 bp, Homo sapiens
ctgaatatatcaaaa

SEQ ID NO: 211386 - DNA, 15 bp, Homo sapiens
tctgaatatatcaaa

SEQ ID NO: 211387 - DNA, 15 bp, Homo sapiens
ctctgaatatatcaa

SEQ ID NO: 211388 - DNA, 15 bp, Homo sapiens
actctgaatatatca

SEQ ID NO: 211389 - DNA, 15 bp, Homo sapiens
aactctgaatatatc

SEQ ID NO: 211390 - DNA, 15 bp, Homo sapiens
caactctgaatatat

SEQ ID NO: 211391 - DNA, 15 bp, Homo sapiens
acaactctgaatata

SEQ ID NO: 211392 - DNA, 15 bp, Homo sapiens
cacaactctgaatat

SEQ ID NO: 211393 - DNA, 15 bp, Homo sapiens
gcacaactctgaata

SEQ ID NO: 211394 - DNA, 15 bp, Homo sapiens
tgcacaactctgaat

SEQ ID NO: 211395 - DNA, 15 bp, Homo sapiens
atgcacaactctgaa

SEQ ID NO: 211396 - DNA, 15 bp, Homo sapiens
gatgcacaactctga

SEQ ID NO: 211397 - DNA, 15 bp, Homo sapiens
agatgcacaactctg

SEQ ID NO: 211398 - DNA, 15 bp, Homo sapiens
cagatgcacaactct

SEQ ID NO: 211399 - DNA, 15 bp, Homo sapiens
gcagatgcacaactc

SEQ ID NO: 211400 - DNA, 15 bp, Homo sapiens
agcagatgcacaact

SEQ ID NO: 211401 - DNA, 15 bp, Homo sapiens
tagcagatgcacaac

SEQ ID NO: 211402 - DNA, 15 bp, Homo sapiens
gtagcagatgcacaa

SEQ ID NO: 211403 - DNA, 15 bp, Homo sapiens
ggtagcagatgcaca

SEQ ID NO: 211404 - DNA, 15 bp, Homo sapiens
tggtagcagatgcac

SEQ ID NO: 211405 - DNA, 15 bp, Homo sapiens
gtggtagcagatgca

SEQ ID NO: 211406 - DNA, 15 bp, Homo sapiens
agtggtagcagatgc

SEQ ID NO: 211407 - DNA, 15 bp, Homo sapiens
tagtggtagcagatg

SEQ ID NO: 211408 - DNA, 15 bp, Homo sapiens
atagtggtagcagat

SEQ ID NO: 211409 - DNA, 15 bp, Homo sapiens
aatagtggtagcaga

SEQ ID NO: 211410 - DNA, 15 bp, Homo sapiens
aaatagtggtagcag

SEQ ID NO: 211411 - DNA, 15 bp, Homo sapiens
gaaatagtggtagca

SEQ ID NO: 211412 - DNA, 15 bp, Homo sapiens
tgaaatagtggtagc

SEQ ID NO: 211413 - DNA, 15 bp, Homo sapiens
atgaaatagtggtag

SEQ ID NO: 211414 - DNA, 15 bp, Homo sapiens
aatgaaatagtggta

SEQ ID NO: 211415 - DNA, 15 bp, Homo sapiens
aaatgaaatagtggt

SEQ ID NO: 211416 - DNA, 15 bp, Homo sapiens
aaaatgaaatagtgg

SEQ ID NO: 211417 - DNA, 15 bp, Homo sapiens
caaaatgaaatagtg

SEQ ID NO: 211418 - DNA, 15 bp, Homo sapiens
ccaaaatgaaatagt

SEQ ID NO: 211419 - DNA, 15 bp, Homo sapiens
tccaaaatgaaatag

SEQ ID NO: 211420 - DNA, 15 bp, Homo sapiens
ttccaaaatgaaata

SEQ ID NO: 211421 - DNA, 15 bp, Homo sapiens
gttccaaaatgaaat

SEQ ID NO: 211422 - DNA, 15 bp, Homo sapiens
ggttccaaaatgaaa

SEQ ID NO: 211423 - DNA, 15 bp, Homo sapiens
gggttccaaaatgaa

SEQ ID NO: 211424 - DNA, 15 bp, Homo sapiens
tgggttccaaaatga

SEQ ID NO: 211425 - DNA, 15 bp, Homo sapiens
ttgggttccaaaatg

SEQ ID NO: 211426 - DNA, 15 bp, Homo sapiens
tttgggttccaaaat

SEQ ID NO: 211427 - DNA, 15 bp, Homo sapiens
ctttgggttccaaaa

SEQ ID NO: 211428 - DNA, 15 bp, Homo sapiens
tctttgggttccaaa

SEQ ID NO: 211429 - DNA, 15 bp, Homo sapiens
ttctttgggttccaa

SEQ ID NO: 211430 - DNA, 15 bp, Homo sapiens
tttctttgggttcca

SEQ ID NO: 211431 - DNA, 15 bp, Homo sapiens
gtttctttgggttcc

SEQ ID NO: 211432 - DNA, 15 bp, Homo sapiens
ggtttctttgggttc

SEQ ID NO: 211433 - DNA, 15 bp, Homo sapiens
aggtttctttgggtt

SEQ ID NO: 211434 - DNA, 15 bp, Homo sapiens
aaggtttctttgggt

SEQ ID NO: 211435 - DNA, 15 bp, Homo sapiens
caaggtttctttggg

SEQ ID NO: 211436 - DNA, 15 bp, Homo sapiens
acaaggtttctttgg

SEQ ID NO: 211437 - DNA, 15 bp, Homo sapiens
tacaaggtttctttg

SEQ ID NO: 211438 - DNA, 15 bp, Homo sapiens
gtacaaggtttcttt

SEQ ID NO: 211439 - DNA, 15 bp, Homo sapiens
ggtacaaggtttctt

SEQ ID NO: 211440 - DNA, 15 bp, Homo sapiens
gggtacaaggtttct

SEQ ID NO: 211441 - DNA, 15 bp, Homo sapiens
tgggtacaaggtttc

SEQ ID NO: 211442 - DNA, 15 bp, Homo sapiens
atgggtacaaggttt

SEQ ID NO: 211443 - DNA, 15 bp, Homo sapiens
aatgggtacaaggtt

SEQ ID NO: 211444 - DNA, 15 bp, Homo sapiens
taatgggtacaaggt

SEQ ID NO: 211445 - DNA, 15 bp, Homo sapiens
ctaatgggtacaagg

SEQ ID NO: 211446 - DNA, 15 bp, Homo sapiens
gctaatgggtacaag

SEQ ID NO: 211447 - DNA, 15 bp, Homo sapiens
tgctaatgggtacaa

SEQ ID NO: 211448 - DNA, 15 bp, Homo sapiens
ctgctaatgggtaca

SEQ ID NO: 211449 - DNA, 15 bp, Homo sapiens
actgctaatgggtac

SEQ ID NO: 211450 - DNA, 15 bp, Homo sapiens
gactgctaatgggta

SEQ ID NO: 211451 - DNA, 15 bp, Homo sapiens
tgactgctaatgggt

SEQ ID NO: 211452 - DNA, 15 bp, Homo sapiens
atgactgctaatggg

SEQ ID NO: 211453 - DNA, 15 bp, Homo sapiens
aatgactgctaatgg

SEQ ID NO: 211454 - DNA, 15 bp, Homo sapiens
gaatgactgctaatg

SEQ ID NO: 211455 - DNA, 15 bp, Homo sapiens
agaatgactgctaat

SEQ ID NO: 211456 - DNA, 15 bp, Homo sapiens
gagaatgactgctaa

SEQ ID NO: 211457 - DNA, 15 bp, Homo sapiens
ggagaatgactgcta

SEQ ID NO: 211458 - DNA, 15 bp, Homo sapiens
gggagaatgactgct

SEQ ID NO: 211459 - DNA, 15 bp, Homo sapiens
agggagaatgactgc

SEQ ID NO: 211460 - DNA, 15 bp, Homo sapiens
aagggagaatgactg

SEQ ID NO: 211461 - DNA, 15 bp, Homo sapiens
gaagggagaatgact

SEQ ID NO: 211462 - DNA, 15 bp, Homo sapiens
agaagggagaatgac

SEQ ID NO: 211463 - DNA, 15 bp, Homo sapiens
gagaagggagaatga

SEQ ID NO: 211464 - DNA, 15 bp, Homo sapiens
ggagaagggagaatg

SEQ ID NO: 211465 - DNA, 15 bp, Homo sapiens
gggagaagggagaat

SEQ ID NO: 211466 - DNA, 15 bp, Homo sapiens
tgggagaagggagaa

SEQ ID NO: 211467 - DNA, 15 bp, Homo sapiens
ctgggagaagggaga

SEQ ID NO: 211468 - DNA, 15 bp, Homo sapiens
gctgggagaagggag

SEQ ID NO: 211469 - DNA, 15 bp, Homo sapiens
ggctgggagaaggga

SEQ ID NO: 211470 - DNA, 15 bp, Homo sapiens
gggctgggagaaggg

SEQ ID NO: 211471 - DNA, 15 bp, Homo sapiens
ggggctgggagaagg

SEQ ID NO: 211472 - DNA, 15 bp, Homo sapiens
aggggctgggagaag

SEQ ID NO: 211473 - DNA, 15 bp, Homo sapiens
caggggctgggagaa

SEQ ID NO: 211474 - DNA, 15 bp, Homo sapiens
ccaggggctgggaga

SEQ ID NO: 211475 - DNA, 15 bp, Homo sapiens
gccaggggctgggag

SEQ ID NO: 211476 - DNA, 15 bp, Homo sapiens
tgccaggggctggga

SEQ ID NO: 211477 - DNA, 15 bp, Homo sapiens
ttgccaggggctggg

SEQ ID NO: 211478 - DNA, 15 bp, Homo sapiens
gttgccaggggctgg

SEQ ID NO: 211479 - DNA, 15 bp, Homo sapiens
agttgccaggggctg

SEQ ID NO: 211480 - DNA, 15 bp, Homo sapiens
tagttgccaggggct

SEQ ID NO: 211481 - DNA, 15 bp, Homo sapiens
gtagttgccaggggc

SEQ ID NO: 211482 - DNA, 15 bp, Homo sapiens
agtagttgccagggg

SEQ ID NO: 211483 - DNA, 15 bp, Homo sapiens
tagtagttgccaggg

SEQ ID NO: 211484 - DNA, 15 bp, Homo sapiens
ttagtagttgccagg

SEQ ID NO: 211485 - DNA, 15 bp, Homo sapiens
attagtagttgccag

SEQ ID NO: 211486 - DNA, 15 bp, Homo sapiens
gattagtagttgcca

SEQ ID NO: 211487 - DNA, 15 bp, Homo sapiens
agattagtagttgcc

SEQ ID NO: 211488 - DNA, 15 bp, Homo sapiens
tagattagtagttgc

SEQ ID NO: 211489 - DNA, 15 bp, Homo sapiens
gtagattagtagttg

SEQ ID NO: 211490 - DNA, 15 bp, Homo sapiens
agtagattagtagtt

SEQ ID NO: 211491 - DNA, 15 bp, Homo sapiens
aagtagattagtagt

SEQ ID NO: 211492 - DNA, 15 bp, Homo sapiens
aaagtagattagtag

SEQ ID NO: 211493 - DNA, 15 bp, Homo sapiens
gaaagtagattagta

SEQ ID NO: 211494 - DNA, 15 bp, Homo sapiens
agaaagtagattagt

SEQ ID NO: 211495 - DNA, 15 bp, Homo sapiens
tagaaagtagattag

SEQ ID NO: 211496 - DNA, 15 bp, Homo sapiens
gtagaaagtagatta

SEQ ID NO: 211497 - DNA, 15 bp, Homo sapiens
tgtagaaagtagatt

SEQ ID NO: 211498 - DNA, 15 bp, Homo sapiens
ctgtagaaagtagat

SEQ ID NO: 211499 - DNA, 15 bp, Homo sapiens
tctgtagaaagtaga

SEQ ID NO: 211500 - DNA, 15 bp, Homo sapiens
ttctgtagaaagtag

SEQ ID NO: 211501 - DNA, 15 bp, Homo sapiens
tttctgtagaaagta

SEQ ID NO: 211502 - DNA, 15 bp, Homo sapiens
ctttctgtagaaagt

SEQ ID NO: 211503 - DNA, 15 bp, Homo sapiens
actttctgtagaaag

SEQ ID NO: 211504 - DNA, 15 bp, Homo sapiens
gactttctgtagaaa

SEQ ID NO: 211505 - DNA, 15 bp, Homo sapiens
ggactttctgtagaa

SEQ ID NO: 211506 - DNA, 15 bp, Homo sapiens
cggactttctgtaga

SEQ ID NO: 211507 - DNA, 15 bp, Homo sapiens
acggactttctgtag

SEQ ID NO: 211508 - DNA, 15 bp, Homo sapiens
tacggactttctgta

SEQ ID NO: 211509 - DNA, 15 bp, Homo sapiens
gtacggactttctgt

SEQ ID NO: 211510 - DNA, 15 bp, Homo sapiens
tgtacggactttctg

SEQ ID NO: 211511 - DNA, 15 bp, Homo sapiens
ctgtacggactttct

SEQ ID NO: 211512 - DNA, 15 bp, Homo sapiens
tctgtacggactttc

SEQ ID NO: 211513 - DNA, 15 bp, Homo sapiens
atctgtacggacttt

SEQ ID NO: 211514 - DNA, 15 bp, Homo sapiens
aatctgtacggactt

SEQ ID NO: 211515 - DNA, 15 bp, Homo sapiens
aaatctgtacggact

SEQ ID NO: 211516 - DNA, 15 bp, Homo sapiens
caaatctgtacggac

SEQ ID NO: 211517 - DNA, 15 bp, Homo sapiens
acaaatctgtacgga

SEQ ID NO: 211518 - DNA, 15 bp, Homo sapiens
cacaaatctgtacgg

SEQ ID NO: 211519 - DNA, 15 bp, Homo sapiens
acacaaatctgtacg

SEQ ID NO: 211520 - DNA, 15 bp, Homo sapiens
tacacaaatctgtac

SEQ ID NO: 211521 - DNA, 15 bp, Homo sapiens
atacacaaatctgta

SEQ ID NO: 211522 - DNA, 15 bp, Homo sapiens
aatacacaaatctgt

SEQ ID NO: 211523 - DNA, 15 bp, Homo sapiens
taatacacaaatctg

SEQ ID NO: 211524 - DNA, 15 bp, Homo sapiens
ataatacacaaatct

SEQ ID NO: 211525 - DNA, 15 bp, Homo sapiens
cataatacacaaatc

SEQ ID NO: 211526 - DNA, 15 bp, Homo sapiens
ccataatacacaaat

SEQ ID NO: 211527 - DNA, 15 bp, Homo sapiens
tccataatacacaaa

SEQ ID NO: 211528 - DNA, 15 bp, Homo sapiens
gtccataatacacaa

SEQ ID NO: 211529 - DNA, 15 bp, Homo sapiens
tgtccataatacaca

SEQ ID NO: 211530 - DNA, 15 bp, Homo sapiens
atgtccataatacac

SEQ ID NO: 211531 - DNA, 15 bp, Homo sapiens
aatgtccataataca

SEQ ID NO: 211532 - DNA, 15 bp, Homo sapiens
gaatgtccataatac

SEQ ID NO: 211533 - DNA, 15 bp, Homo sapiens
ggaatgtccataata

SEQ ID NO: 211534 - DNA, 15 bp, Homo sapiens
tggaatgtccataat

SEQ ID NO: 211535 - DNA, 15 bp, Homo sapiens
atggaatgtccataa

SEQ ID NO: 211536 - DNA, 15 bp, Homo sapiens
tatggaatgtccata

SEQ ID NO: 211537 - DNA, 15 bp, Homo sapiens
atatggaatgtccat

SEQ ID NO: 211538 - DNA, 15 bp, Homo sapiens
tatatggaatgtcca

SEQ ID NO: 211539 - DNA, 15 bp, Homo sapiens
ttatatggaatgtcc

SEQ ID NO: 211540 - DNA, 15 bp, Homo sapiens
tttatatggaatgtc

SEQ ID NO: 211541 - DNA, 15 bp, Homo sapiens
atttatatggaatgt

SEQ ID NO: 211542 - DNA, 15 bp, Homo sapiens
catttatatggaatg

SEQ ID NO: 211543 - DNA, 15 bp, Homo sapiens
ccatttatatggaat

SEQ ID NO: 211544 - DNA, 15 bp, Homo sapiens
tccatttatatggaa

SEQ ID NO: 211545 - DNA, 15 bp, Homo sapiens
gtccatttatatgga

SEQ ID NO: 211546 - DNA, 15 bp, Homo sapiens
agtccatttatatgg

SEQ ID NO: 211547 - DNA, 15 bp, Homo sapiens
gagtccatttatatg

SEQ ID NO: 211548 - DNA, 15 bp, Homo sapiens
tgagtccatttatat

SEQ ID NO: 211549 - DNA, 15 bp, Homo sapiens
atgagtccatttata

SEQ ID NO: 211550 - DNA, 15 bp, Homo sapiens
catgagtccatttat

SEQ ID NO: 211551 - DNA, 15 bp, Homo sapiens
gcatgagtccattta

SEQ ID NO: 211552 - DNA, 15 bp, Homo sapiens
tgcatgagtccattt

SEQ ID NO: 211553 - DNA, 15 bp, Homo sapiens
ttgcatgagtccatt

SEQ ID NO: 211554 - DNA, 15 bp, Homo sapiens
attgcatgagtccat

SEQ ID NO: 211555 - DNA, 15 bp, Homo sapiens
tattgcatgagtcca

SEQ ID NO: 211556 - DNA, 15 bp, Homo sapiens
atattgcatgagtcc

SEQ ID NO: 211557 - DNA, 15 bp, Homo sapiens
gatattgcatgagtc

SEQ ID NO: 211558 - DNA, 15 bp, Homo sapiens
ggatattgcatgagt

SEQ ID NO: 211559 - DNA, 15 bp, Homo sapiens
aggatattgcatgag

SEQ ID NO: 211560 - DNA, 15 bp, Homo sapiens
caggatattgcatga

SEQ ID NO: 211561 - DNA, 15 bp, Homo sapiens
acaggatattgcatg

SEQ ID NO: 211562 - DNA, 15 bp, Homo sapiens
gacaggatattgcat

SEQ ID NO: 211563 - DNA, 15 bp, Homo sapiens
agacaggatattgca

SEQ ID NO: 211564 - DNA, 15 bp, Homo sapiens
aagacaggatattgc

SEQ ID NO: 211565 - DNA, 15 bp, Homo sapiens
gaagacaggatattg

SEQ ID NO: 211566 - DNA, 15 bp, Homo sapiens
agaagacaggatatt

SEQ ID NO: 211567 - DNA, 15 bp, Homo sapiens
aagaagacaggatat

SEQ ID NO: 211568 - DNA, 15 bp, Homo sapiens
aaagaagacaggata

SEQ ID NO: 211569 - DNA, 15 bp, Homo sapiens
gaaagaagacaggat

SEQ ID NO: 211570 - DNA, 15 bp, Homo sapiens
tgaaagaagacagga

SEQ ID NO: 211571 - DNA, 15 bp, Homo sapiens
gtgaaagaagacagg

SEQ ID NO: 211572 - DNA, 15 bp, Homo sapiens
agtgaaagaagacag

SEQ ID NO: 211573 - DNA, 15 bp, Homo sapiens
aagtgaaagaagaca

SEQ ID NO: 211574 - DNA, 15 bp, Homo sapiens
taagtgaaagaagac

SEQ ID NO: 211575 - DNA, 15 bp, Homo sapiens
ctaagtgaaagaaga

SEQ ID NO: 211576 - DNA, 15 bp, Homo sapiens
gctaagtgaaagaag

SEQ ID NO: 211577 - DNA, 15 bp, Homo sapiens
tgctaagtgaaagaa

SEQ ID NO: 211578 - DNA, 15 bp, Homo sapiens
atgctaagtgaaaga

SEQ ID NO: 211579 - DNA, 15 bp, Homo sapiens
tatgctaagtgaaag

SEQ ID NO: 211580 - DNA, 15 bp, Homo sapiens
ctatgctaagtgaaa

SEQ ID NO: 211581 - DNA, 15 bp, Homo sapiens
actatgctaagtgaa

SEQ ID NO: 211582 - DNA, 15 bp, Homo sapiens
cactatgctaagtga

SEQ ID NO: 211583 - DNA, 15 bp, Homo sapiens
acactatgctaagtg

SEQ ID NO: 211584 - DNA, 15 bp, Homo sapiens
aacactatgctaagt

SEQ ID NO: 211585 - DNA, 15 bp, Homo sapiens
aaacactatgctaag

SEQ ID NO: 211586 - DNA, 15 bp, Homo sapiens
aaaacactatgctaa

SEQ ID NO: 211587 - DNA, 15 bp, Homo sapiens
gaaaacactatgcta

SEQ ID NO: 211588 - DNA, 15 bp, Homo sapiens
tgaaaacactatgct

SEQ ID NO: 211589 - DNA, 15 bp, Homo sapiens
ttgaaaacactatgc

SEQ ID NO: 211590 - DNA, 15 bp, Homo sapiens
cttgaaaacactatg

SEQ ID NO: 211591 - DNA, 15 bp, Homo sapiens
ccttgaaaacactat

SEQ ID NO: 211592 - DNA, 15 bp, Homo sapiens
accttgaaaacacta

SEQ ID NO: 211593 - DNA, 15 bp, Homo sapiens
aaccttgaaaacact

SEQ ID NO: 211594 - DNA, 15 bp, Homo sapiens
gaaccttgaaaacac

SEQ ID NO: 211595 - DNA, 15 bp, Homo sapiens
gatgaaccttgaaaa

SEQ ID NO: 211596 - DNA, 15 bp, Homo sapiens
agatgaaccttgaaa

SEQ ID NO: 211597 - DNA, 15 bp, Homo sapiens
tagatgaaccttgaa

SEQ ID NO: 211598 - DNA, 15 bp, Homo sapiens
ctagatgaaccttga

SEQ ID NO: 211599 - DNA, 15 bp, Homo sapiens
cctagatgaaccttg

SEQ ID NO: 211600 - DNA, 15 bp, Homo sapiens
acctagatgaacctt

SEQ ID NO: 211601 - DNA, 15 bp, Homo sapiens
aacctagatgaacct

SEQ ID NO: 211602 - DNA, 15 bp, Homo sapiens
caacctagatgaacc

SEQ ID NO: 211603 - DNA, 15 bp, Homo sapiens
ccaacctagatgaac

SEQ ID NO: 211604 - DNA, 15 bp, Homo sapiens
cccaacctagatgaa

SEQ ID NO: 211605 - DNA, 15 bp, Homo sapiens
ccccaacctagatga

SEQ ID NO: 211606 - DNA, 15 bp, Homo sapiens
gccccaacctagatg

SEQ ID NO: 211607 - DNA, 15 bp, Homo sapiens
tgccccaacctagat

SEQ ID NO: 211608 - DNA, 15 bp, Homo sapiens
atgccccaacctaga

SEQ ID NO: 211609 - DNA, 15 bp, Homo sapiens
catgccccaacctag

SEQ ID NO: 211610 - DNA, 15 bp, Homo sapiens
acatgccccaaccta

SEQ ID NO: 211611 - DNA, 15 bp, Homo sapiens
tacatgccccaacct

SEQ ID NO: 211612 - DNA, 15 bp, Homo sapiens
atacatgccccaacc

SEQ ID NO: 211613 - DNA, 15 bp, Homo sapiens
gatacatgccccaac

SEQ ID NO: 211614 - DNA, 15 bp, Homo sapiens
tgatacatgccccaa

SEQ ID NO: 211615 - DNA, 15 bp, Homo sapiens
ctgatacatgcccca

SEQ ID NO: 211616 - DNA, 15 bp, Homo sapiens
actgatacatgcccc

SEQ ID NO: 211617 - DNA, 15 bp, Homo sapiens
tactgatacatgccc

SEQ ID NO: 211618 - DNA, 15 bp, Homo sapiens
gtactgatacatgcc

SEQ ID NO: 211619 - DNA, 15 bp, Homo sapiens
agtactgatacatgc

SEQ ID NO: 211620 - DNA, 15 bp, Homo sapiens
aagtactgatacatg

SEQ ID NO: 211621 - DNA, 15 bp, Homo sapiens
gaagtactgatacat

SEQ ID NO: 211622 - DNA, 15 bp, Homo sapiens
tgaagtactgataca

SEQ ID NO: 211623 - DNA, 15 bp, Homo sapiens
atgaagtactgatac

SEQ ID NO: 211624 - DNA, 15 bp, Homo sapiens
gatgaagtactgata

SEQ ID NO: 211625 - DNA, 15 bp, Homo sapiens
ggatgaagtactgat

SEQ ID NO: 211626 - DNA, 15 bp, Homo sapiens
gggatgaagtactga

SEQ ID NO: 211627 - DNA, 15 bp, Homo sapiens
agggatgaagtactg

SEQ ID NO: 211628 - DNA, 15 bp, Homo sapiens
aagggatgaagtact

SEQ ID NO: 211629 - DNA, 15 bp, Homo sapiens
caagggatgaagtac

SEQ ID NO: 211630 - DNA, 15 bp, Homo sapiens
acaagggatgaagta

SEQ ID NO: 211631 - DNA, 15 bp, Homo sapiens
aacaagggatgaagt

SEQ ID NO: 211632 - DNA, 15 bp, Homo sapiens
aaacaagggatgaag

SEQ ID NO: 211633 - DNA, 15 bp, Homo sapiens
aaaacaagggatgaa

SEQ ID NO: 211634 - DNA, 15 bp, Homo sapiens
caaaacaagggatga

SEQ ID NO: 211635 - DNA, 15 bp, Homo sapiens
ccaaaacaagggatg

SEQ ID NO: 211636 - DNA, 15 bp, Homo sapiens
gccaaaacaagggat

SEQ ID NO: 211637 - DNA, 15 bp, Homo sapiens
agccaaaacaaggga

SEQ ID NO: 211638 - DNA, 15 bp, Homo sapiens
cagccaaaacaaggg

SEQ ID NO: 211639 - DNA, 15 bp, Homo sapiens
tcagccaaaacaagg

SEQ ID NO: 211640 - DNA, 15 bp, Homo sapiens
ttcagccaaaacaag

SEQ ID NO: 211641 - DNA, 15 bp, Homo sapiens
attcagccaaaacaa

SEQ ID NO: 211642 - DNA, 15 bp, Homo sapiens
tattcagccaaaaca

SEQ ID NO: 211643 - DNA, 15 bp, Homo sapiens
ttattcagccaaaac

SEQ ID NO: 211644 - DNA, 15 bp, Homo sapiens
attattcagccaaaa

SEQ ID NO: 211645 - DNA, 15 bp, Homo sapiens
tattattcagccaaa

SEQ ID NO: 211646 - DNA, 15 bp, Homo sapiens
atattattcagccaa

SEQ ID NO: 211647 - DNA, 15 bp, Homo sapiens
aatattattcagcca

SEQ ID NO: 211648 - DNA, 15 bp, Homo sapiens
aaatattattcagcc

SEQ ID NO: 211649 - DNA, 15 bp, Homo sapiens
gaaatattattcagc

SEQ ID NO: 211650 - DNA, 15 bp, Homo sapiens
tgaaatattattcag

SEQ ID NO: 211651 - DNA, 15 bp, Homo sapiens
atgaaatattattca

SEQ ID NO: 211652 - DNA, 15 bp, Homo sapiens
aatgaaatattattc

SEQ ID NO: 211653 - DNA, 15 bp, Homo sapiens
caatgaaatattatt

SEQ ID NO: 211654 - DNA, 15 bp, Homo sapiens
acaatgaaatattat

SEQ ID NO: 211655 - DNA, 15 bp, Homo sapiens
tacaatgaaatatta

SEQ ID NO: 211656 - DNA, 15 bp, Homo sapiens
gtacaatgaaatatt

SEQ ID NO: 211657 - DNA, 15 bp, Homo sapiens
tgtacaatgaaatat

SEQ ID NO: 211658 - DNA, 15 bp, Homo sapiens
ttgtacaatgaaata

SEQ ID NO: 211659 - DNA, 15 bp, Homo sapiens
tttgtacaatgaaat

SEQ ID NO: 211660 - DNA, 15 bp, Homo sapiens
atttgtacaatgaaa

SEQ ID NO: 211661 - DNA, 15 bp, Homo sapiens
tatttgtacaatgaa

SEQ ID NO: 211662 - DNA, 15 bp, Homo sapiens
atatttgtacaatga

SEQ ID NO: 211663 - DNA, 15 bp, Homo sapiens
tatatttgtacaatg

SEQ ID NO: 211664 - DNA, 15 bp, Homo sapiens
atatatttgtacaat

SEQ ID NO: 211665 - DNA, 15 bp, Homo sapiens
gatatatttgtacaa

SEQ ID NO: 211666 - DNA, 15 bp, Homo sapiens
tgatatatttgtaca

SEQ ID NO: 211667 - DNA, 15 bp, Homo sapiens
gtgatatatttgtac

SEQ ID NO: 211668 - DNA, 15 bp, Homo sapiens
tgtgatatatttgta

SEQ ID NO: 211669 - DNA, 15 bp, Homo sapiens
atgtgatatatttgt

SEQ ID NO: 211670 - DNA, 15 bp, Homo sapiens
aatgtgatatatttg

SEQ ID NO: 211671 - DNA, 15 bp, Homo sapiens
aaatgtgatatattt

SEQ ID NO: 211672 - DNA, 15 bp, Homo sapiens
aaaatgtgatatatt

SEQ ID NO: 211673 - DNA, 15 bp, Homo sapiens
caaaatgtgatatat

SEQ ID NO: 211674 - DNA, 15 bp, Homo sapiens
gcaaaatgtgatata

SEQ ID NO: 211675 - DNA, 15 bp, Homo sapiens
agcaaaatgtgatat

SEQ ID NO: 211676 - DNA, 15 bp, Homo sapiens
aagcaaaatgtgata

SEQ ID NO: 211677 - DNA, 15 bp, Homo sapiens
taagcaaaatgtgat

SEQ ID NO: 211678 - DNA, 15 bp, Homo sapiens
ataagcaaaatgtga

SEQ ID NO: 211679 - DNA, 15 bp, Homo sapiens
gataagcaaaatgtg

SEQ ID NO: 211680 - DNA, 15 bp, Homo sapiens
ggataagcaaaatgt

SEQ ID NO: 211681 - DNA, 15 bp, Homo sapiens
tggataagcaaaatg

SEQ ID NO: 211682 - DNA, 15 bp, Homo sapiens
atggataagcaaaat

SEQ ID NO: 211683 - DNA, 15 bp, Homo sapiens
gatggataagcaaaa

SEQ ID NO: 211684 - DNA, 15 bp, Homo sapiens
agatggataagcaaa

SEQ ID NO: 211685 - DNA, 15 bp, Homo sapiens
cagatggataagcaa

SEQ ID NO: 211686 - DNA, 15 bp, Homo sapiens
acagatggataagca

SEQ ID NO: 211687 - DNA, 15 bp, Homo sapiens
aacagatggataagc

SEQ ID NO: 211688 - DNA, 15 bp, Homo sapiens
caacagatggataag

SEQ ID NO: 211689 - DNA, 15 bp, Homo sapiens
ccaacagatggataa

SEQ ID NO: 211690 - DNA, 15 bp, Homo sapiens
accaacagatggata

SEQ ID NO: 211691 - DNA, 15 bp, Homo sapiens
caccaacagatggat

SEQ ID NO: 211692 - DNA, 15 bp, Homo sapiens
tcaccaacagatgga

SEQ ID NO: 211693 - DNA, 15 bp, Homo sapiens
ttcaccaacagatgg

SEQ ID NO: 211694 - DNA, 15 bp, Homo sapiens
gttcaccaacagatg

SEQ ID NO: 211695 - DNA, 15 bp, Homo sapiens
tgttcaccaacagat

SEQ ID NO: 211696 - DNA, 15 bp, Homo sapiens
atgttcaccaacaga

SEQ ID NO: 211697 - DNA, 15 bp, Homo sapiens
aatgttcaccaacag

SEQ ID NO: 211698 - DNA, 15 bp, Homo sapiens
aaatgttcaccaaca

SEQ ID NO: 211699 - DNA, 15 bp, Homo sapiens
caaatgttcaccaac

SEQ ID NO: 211700 - DNA, 15 bp, Homo sapiens
tcaaatgttcaccaa

SEQ ID NO: 211701 - DNA, 15 bp, Homo sapiens
ctcaaatgttcacca

SEQ ID NO: 211702 - DNA, 15 bp, Homo sapiens
actcaaatgttcacc

SEQ ID NO: 211703 - DNA, 15 bp, Homo sapiens
aactcaaatgttcac

SEQ ID NO: 211704 - DNA, 15 bp, Homo sapiens
aaactcaaatgttca

SEQ ID NO: 211705 - DNA, 15 bp, Homo sapiens
gaaactcaaatgttc

SEQ ID NO: 211706 - DNA, 15 bp, Homo sapiens
agaaactcaaatgtt

SEQ ID NO: 211707 - DNA, 15 bp, Homo sapiens
tagaaactcaaatgt

SEQ ID NO: 211708 - DNA, 15 bp, Homo sapiens
gtagaaactcaaatg

SEQ ID NO: 211709 - DNA, 15 bp, Homo sapiens
ggtagaaactcaaat

SEQ ID NO: 211710 - DNA, 15 bp, Homo sapiens
aggtagaaactcaaa

SEQ ID NO: 211711 - DNA, 15 bp, Homo sapiens
caggtagaaactcaa

SEQ ID NO: 211712 - DNA, 15 bp, Homo sapiens
acaggtagaaactca

SEQ ID NO: 211713 - DNA, 15 bp, Homo sapiens
aacaggtagaaactc

SEQ ID NO: 211714 - DNA, 15 bp, Homo sapiens
caacaggtagaaact

SEQ ID NO: 211715 - DNA, 15 bp, Homo sapiens
ccaacaggtagaaac

SEQ ID NO: 211716 - DNA, 15 bp, Homo sapiens
gccaacaggtagaaa

SEQ ID NO: 211717 - DNA, 15 bp, Homo sapiens
agccaacaggtagaa

SEQ ID NO: 211718 - DNA, 15 bp, Homo sapiens
aagccaacaggtaga

SEQ ID NO: 211719 - DNA, 15 bp, Homo sapiens
aaagccaacaggtag

SEQ ID NO: 211720 - DNA, 15 bp, Homo sapiens
aaaagccaacaggta

SEQ ID NO: 211721 - DNA, 15 bp, Homo sapiens
taaaagccaacaggt

SEQ ID NO: 211722 - DNA, 15 bp, Homo sapiens
ataaaagccaacagg

SEQ ID NO: 211723 - DNA, 15 bp, Homo sapiens
cataaaagccaacag

SEQ ID NO: 211724 - DNA, 15 bp, Homo sapiens
tcataaaagccaaca

SEQ ID NO: 211725 - DNA, 15 bp, Homo sapiens
ttcataaaagccaac

SEQ ID NO: 211726 - DNA, 15 bp, Homo sapiens
attcataaaagccaa

SEQ ID NO: 211727 - DNA, 15 bp, Homo sapiens
tattcataaaagcca

SEQ ID NO: 211728 - DNA, 15 bp, Homo sapiens
ttattcataaaagcc

SEQ ID NO: 211729 - DNA, 15 bp, Homo sapiens
attattcataaaagc

SEQ ID NO: 211730 - DNA, 15 bp, Homo sapiens
cattattcataaaag

SEQ ID NO: 211731 - DNA, 15 bp, Homo sapiens
acattattcataaaa

SEQ ID NO: 211732 - DNA, 15 bp, Homo sapiens
aacattattcataaa

SEQ ID NO: 211733 - DNA, 15 bp, Homo sapiens
caacattattcataa

SEQ ID NO: 211734 - DNA, 15 bp, Homo sapiens
tcaacattattcata

SEQ ID NO: 211735 - DNA, 15 bp, Homo sapiens
atcaacattattcat

SEQ ID NO: 211736 - DNA, 15 bp, Homo sapiens
aatcaacattattca

SEQ ID NO: 211737 - DNA, 15 bp, Homo sapiens
aaatcaacattattc

SEQ ID NO: 211738 - DNA, 15 bp, Homo sapiens
caaatcaacattatt

SEQ ID NO: 211739 - DNA, 15 bp, Homo sapiens
tcaaatcaacattat

SEQ ID NO: 211740 - DNA, 15 bp, Homo sapiens
ttcaaatcaacatta

SEQ ID NO: 211741 - DNA, 15 bp, Homo sapiens
attcaaatcaacatt

SEQ ID NO: 211742 - DNA, 15 bp, Homo sapiens
cattcaaatcaacat

SEQ ID NO: 211743 - DNA, 15 bp, Homo sapiens
acattcaaatcaaca

SEQ ID NO: 211744 - DNA, 15 bp, Homo sapiens
aacattcaaatcaac

SEQ ID NO: 211745 - DNA, 15 bp, Homo sapiens
aaacattcaaatcaa

SEQ ID NO: 211746 - DNA, 15 bp, Homo sapiens
caaacattcaaatca

SEQ ID NO: 211747 - DNA, 15 bp, Homo sapiens
acaaacattcaaatc

SEQ ID NO: 211748 - DNA, 15 bp, Homo sapiens
cacaaacattcaaat

SEQ ID NO: 211749 - DNA, 15 bp, Homo sapiens
acacaaacattcaaa

SEQ ID NO: 211750 - DNA, 15 bp, Homo sapiens
tacacaaacattcaa

SEQ ID NO: 211751 - DNA, 15 bp, Homo sapiens
gtacacaaacattca

SEQ ID NO: 211752 - DNA, 15 bp, Homo sapiens
tgtacacaaacattc

SEQ ID NO: 211753 - DNA, 15 bp, Homo sapiens
ttgtacacaaacatt

SEQ ID NO: 211754 - DNA, 15 bp, Homo sapiens
cttgtacacaaacat

SEQ ID NO: 211755 - DNA, 15 bp, Homo sapiens
acttgtacacaaaca

SEQ ID NO: 211756 - DNA, 15 bp, Homo sapiens
tacttgtacacaaac

SEQ ID NO: 211757 - DNA, 15 bp, Homo sapiens
atacttgtacacaaa

SEQ ID NO: 211758 - DNA, 15 bp, Homo sapiens
catacttgtacacaa

SEQ ID NO: 211759 - DNA, 15 bp, Homo sapiens
tcatacttgtacaca

SEQ ID NO: 211760 - DNA, 15 bp, Homo sapiens
ttcatacttgtacac

SEQ ID NO: 211761 - DNA, 15 bp, Homo sapiens
attcatacttgtaca

SEQ ID NO: 211762 - DNA, 15 bp, Homo sapiens
tattcatacttgtac

SEQ ID NO: 211763 - DNA, 15 bp, Homo sapiens
gtattcatacttgta

SEQ ID NO: 211764 - DNA, 15 bp, Homo sapiens
ggtattcatacttgt

SEQ ID NO: 211765 - DNA, 15 bp, Homo sapiens
aggtattcatacttg

SEQ ID NO: 211766 - DNA, 15 bp, Homo sapiens
caggtattcatactt

SEQ ID NO: 211767 - DNA, 15 bp, Homo sapiens
acaggtattcatact

SEQ ID NO: 211768 - DNA, 15 bp, Homo sapiens
aacaggtattcatac

SEQ ID NO: 211769 - DNA, 15 bp, Homo sapiens
aaacaggtattcata

SEQ ID NO: 211770 - DNA, 15 bp, Homo sapiens
aaaacaggtattcat

SEQ ID NO: 211771 - DNA, 15 bp, Homo sapiens
gaaaacaggtattca

SEQ ID NO: 211772 - DNA, 15 bp, Homo sapiens
tgaaaacaggtattc

SEQ ID NO: 211773 - DNA, 15 bp, Homo sapiens
ctgaaaacaggtatt

SEQ ID NO: 211774 - DNA, 15 bp, Homo sapiens
cctgaaaacaggtat

SEQ ID NO: 211775 - DNA, 15 bp, Homo sapiens
acctgaaaacaggta

SEQ ID NO: 211776 - DNA, 15 bp, Homo sapiens
gacctgaaaacaggt

SEQ ID NO: 211777 - DNA, 15 bp, Homo sapiens
agacctgaaaacagg

SEQ ID NO: 211778 - DNA, 15 bp, Homo sapiens
gagacctgaaaacag

SEQ ID NO: 211779 - DNA, 15 bp, Homo sapiens
agagacctgaaaaca

SEQ ID NO: 211780 - DNA, 15 bp, Homo sapiens
aagagacctgaaaac

SEQ ID NO: 211781 - DNA, 15 bp, Homo sapiens
caagagacctgaaaa

SEQ ID NO: 211782 - DNA, 15 bp, Homo sapiens
tcaagagacctgaaa

SEQ ID NO: 211783 - DNA, 15 bp, Homo sapiens
ctcaagagacctgaa

SEQ ID NO: 211784 - DNA, 15 bp, Homo sapiens
actcaagagacctga

SEQ ID NO: 211785 - DNA, 15 bp, Homo sapiens
tactcaagagacctg

SEQ ID NO: 211786 - DNA, 15 bp, Homo sapiens
atactcaagagacct

SEQ ID NO: 211787 - DNA, 15 bp, Homo sapiens
tatactcaagagacc

SEQ ID NO: 211788 - DNA, 15 bp, Homo sapiens
atatactcaagagac

SEQ ID NO: 211789 - DNA, 15 bp, Homo sapiens
tatatactcaagaga

SEQ ID NO: 211790 - DNA, 15 bp, Homo sapiens
ctatatactcaagag

SEQ ID NO: 211791 - DNA, 15 bp, Homo sapiens
actatatactcaaga

SEQ ID NO: 211792 - DNA, 15 bp, Homo sapiens
aactatatactcaag

SEQ ID NO: 211793 - DNA, 15 bp, Homo sapiens
caactatatactcaa

SEQ ID NO: 211794 - DNA, 15 bp, Homo sapiens
gcaactatatactca

SEQ ID NO: 211795 - DNA, 15 bp, Homo sapiens
agcaactatatactc

SEQ ID NO: 211796 - DNA, 15 bp, Homo sapiens
tagcaactatatact

SEQ ID NO: 211797 - DNA, 15 bp, Homo sapiens
ctagcaactatatac

SEQ ID NO: 211798 - DNA, 15 bp, Homo sapiens
cctagcaactatata

SEQ ID NO: 211799 - DNA, 15 bp, Homo sapiens
acctagcaactatat

SEQ ID NO: 211800 - DNA, 15 bp, Homo sapiens
gacctagcaactata

SEQ ID NO: 211801 - DNA, 15 bp, Homo sapiens
tgacctagcaactat

SEQ ID NO: 211802 - DNA, 15 bp, Homo sapiens
atgacctagcaacta

SEQ ID NO: 211803 - DNA, 15 bp, Homo sapiens
tatgacctagcaact

SEQ ID NO: 211804 - DNA, 15 bp, Homo sapiens
atatgacctagcaac

SEQ ID NO: 211805 - DNA, 15 bp, Homo sapiens
tatatgacctagcaa

SEQ ID NO: 211806 - DNA, 15 bp, Homo sapiens
ctatatgacctagca

SEQ ID NO: 211807 - DNA, 15 bp, Homo sapiens
actatatgacctagc

SEQ ID NO: 211808 - DNA, 15 bp, Homo sapiens
tactatatgacctag

SEQ ID NO: 211809 - DNA, 15 bp, Homo sapiens
ttactatatgaccta

SEQ ID NO: 211810 - DNA, 15 bp, Homo sapiens
gttactatatgacct

SEQ ID NO: 211811 - DNA, 15 bp, Homo sapiens
agttactatatgacc

SEQ ID NO: 211812 - DNA, 15 bp, Homo sapiens
gagttactatatgac

SEQ ID NO: 211813 - DNA, 15 bp, Homo sapiens
agagttactatatga

SEQ ID NO: 211814 - DNA, 15 bp, Homo sapiens
cagagttactatatg

SEQ ID NO: 211815 - DNA, 15 bp, Homo sapiens
acagagttactatat

SEQ ID NO: 211816 - DNA, 15 bp, Homo sapiens
cacagagttactata

SEQ ID NO: 211817 - DNA, 15 bp, Homo sapiens
acacagagttactat

SEQ ID NO: 211818 - DNA, 15 bp, Homo sapiens
aacacagagttacta

SEQ ID NO: 211819 - DNA, 15 bp, Homo sapiens
aaacacagagttact

SEQ ID NO: 211820 - DNA, 15 bp, Homo sapiens
taaacacagagttac

SEQ ID NO: 211821 - DNA, 15 bp, Homo sapiens
ttaaacacagagtta

SEQ ID NO: 211822 - DNA, 15 bp, Homo sapiens
gttaaacacagagtt

SEQ ID NO: 211823 - DNA, 15 bp, Homo sapiens
tgttaaacacagagt

SEQ ID NO: 211824 - DNA, 15 bp, Homo sapiens
atgttaaacacagag

SEQ ID NO: 211825 - DNA, 15 bp, Homo sapiens
aatgttaaacacaga

SEQ ID NO: 211826 - DNA, 15 bp, Homo sapiens
aaatgttaaacacag

SEQ ID NO: 211827 - DNA, 15 bp, Homo sapiens
aaaatgttaaacaca

SEQ ID NO: 211828 - DNA, 15 bp, Homo sapiens
caaaatgttaaacac

SEQ ID NO: 211829 - DNA, 15 bp, Homo sapiens
tcaaaatgttaaaca

SEQ ID NO: 211830 - DNA, 15 bp, Homo sapiens
ctcaaaatgttaaac

SEQ ID NO: 211831 - DNA, 15 bp, Homo sapiens
cctcaaaatgttaaa

SEQ ID NO: 211832 - DNA, 15 bp, Homo sapiens
tcctcaaaatgttaa

SEQ ID NO: 211833 - DNA, 15 bp, Homo sapiens
ttcctcaaaatgtta

SEQ ID NO: 211834 - DNA, 15 bp, Homo sapiens
attcctcaaaatgtt

SEQ ID NO: 211835 - DNA, 15 bp, Homo sapiens
aattcctcaaaatgt

SEQ ID NO: 211836 - DNA, 15 bp, Homo sapiens
caattcctcaaaatg

SEQ ID NO: 211837 - DNA, 15 bp, Homo sapiens
gcaattcctcaaaat

SEQ ID NO: 211838 - DNA, 15 bp, Homo sapiens
ggcaattcctcaaaa

SEQ ID NO: 211839 - DNA, 15 bp, Homo sapiens
gggcaattcctcaaa

SEQ ID NO: 211840 - DNA, 15 bp, Homo sapiens
cgggcaattcctcaa

SEQ ID NO: 211841 - DNA, 15 bp, Homo sapiens
tcgggcaattcctca

SEQ ID NO: 211842 - DNA, 15 bp, Homo sapiens
gtcgggcaattcctc

SEQ ID NO: 211843 - DNA, 15 bp, Homo sapiens
agtcgggcaattcct

SEQ ID NO: 211844 - DNA, 15 bp, Homo sapiens
tagtcgggcaattcc

SEQ ID NO: 211845 - DNA, 15 bp, Homo sapiens
atagtcgggcaattc

SEQ ID NO: 211846 - DNA, 15 bp, Homo sapiens
aatagtcgggcaatt

SEQ ID NO: 211847 - DNA, 15 bp, Homo sapiens
aaatagtcgggcaat

SEQ ID NO: 211848 - DNA, 15 bp, Homo sapiens
taaatagtcgggcaa

SEQ ID NO: 211849 - DNA, 15 bp, Homo sapiens
ttaaatagtcgggca

SEQ ID NO: 211850 - DNA, 15 bp, Homo sapiens
gttaaatagtcgggc

SEQ ID NO: 211851 - DNA, 15 bp, Homo sapiens
tgttaaatagtcggg

SEQ ID NO: 211852 - DNA, 15 bp, Homo sapiens
ttgttaaatagtcgg

SEQ ID NO: 211853 - DNA, 15 bp, Homo sapiens
cttgttaaatagtcg

SEQ ID NO: 211854 - DNA, 15 bp, Homo sapiens
ccttgttaaatagtc

SEQ ID NO: 211855 - DNA, 15 bp, Homo sapiens
accttgttaaatagt

SEQ ID NO: 211856 - DNA, 15 bp, Homo sapiens
taccttgttaaatag

SEQ ID NO: 211857 - DNA, 15 bp, Homo sapiens
ataccttgttaaata

SEQ ID NO: 211858 - DNA, 15 bp, Homo sapiens
tataccttgttaaat

SEQ ID NO: 211859 - DNA, 15 bp, Homo sapiens
atataccttgttaaa

SEQ ID NO: 211860 - DNA, 15 bp, Homo sapiens
catataccttgttaa

SEQ ID NO: 211861 - DNA, 15 bp, Homo sapiens
acatataccttgtta

SEQ ID NO: 211862 - DNA, 15 bp, Homo sapiens
tacatataccttgtt

SEQ ID NO: 211863 - DNA, 15 bp, Homo sapiens
gtacatataccttgt

SEQ ID NO: 211864 - DNA, 15 bp, Homo sapiens
agtacatataccttg

SEQ ID NO: 211865 - DNA, 15 bp, Homo sapiens
cagtacatatacctt

SEQ ID NO: 211866 - DNA, 15 bp, Homo sapiens
acagtacatatacct

SEQ ID NO: 211867 - DNA, 15 bp, Homo sapiens
aacagtacatatacc

SEQ ID NO: 211868 - DNA, 15 bp, Homo sapiens
aaacagtacatatac

SEQ ID NO: 211869 - DNA, 15 bp, Homo sapiens
aaaacagtacatata

SEQ ID NO: 211870 - DNA, 15 bp, Homo sapiens
taaaacagtacatat

SEQ ID NO: 211871 - DNA, 15 bp, Homo sapiens
gtaaaacagtacata

SEQ ID NO: 211872 - DNA, 15 bp, Homo sapiens
tgtaaaacagtacat

SEQ ID NO: 211873 - DNA, 15 bp, Homo sapiens
gtgtaaaacagtaca

SEQ ID NO: 211874 - DNA, 15 bp, Homo sapiens
ggtgtaaaacagtac

SEQ ID NO: 211875 - DNA, 15 bp, Homo sapiens
tggtgtaaaacagta

SEQ ID NO: 211876 - DNA, 15 bp, Homo sapiens
ctggtgtaaaacagt

SEQ ID NO: 211877 - DNA, 15 bp, Homo sapiens
actggtgtaaaacag

SEQ ID NO: 211878 - DNA, 15 bp, Homo sapiens
tactggtgtaaaaca

SEQ ID NO: 211879 - DNA, 15 bp, Homo sapiens
ttactggtgtaaaac

SEQ ID NO: 211880 - DNA, 15 bp, Homo sapiens
gttactggtgtaaaa

SEQ ID NO: 211881 - DNA, 15 bp, Homo sapiens
tgttactggtgtaaa

SEQ ID NO: 211882 - DNA, 15 bp, Homo sapiens
atgttactggtgtaa

SEQ ID NO: 211883 - DNA, 15 bp, Homo sapiens
tatgttactggtgta

SEQ ID NO: 211884 - DNA, 15 bp, Homo sapiens
atatgttactggtgt

SEQ ID NO: 211885 - DNA, 15 bp, Homo sapiens
catatgttactggtg

SEQ ID NO: 211886 - DNA, 15 bp, Homo sapiens
tcatatgttactggt

SEQ ID NO: 211887 - DNA, 15 bp, Homo sapiens
ctcatatgttactgg

SEQ ID NO: 211888 - DNA, 15 bp, Homo sapiens
cctcatatgttactg

SEQ ID NO: 211889 - DNA, 15 bp, Homo sapiens
ccctcatatgttact

SEQ ID NO: 211890 - DNA, 15 bp, Homo sapiens
accctcatatgttac

SEQ ID NO: 211891 - DNA, 15 bp, Homo sapiens
aaccctcatatgtta

SEQ ID NO: 211892 - DNA, 15 bp, Homo sapiens
gaaccctcatatgtt

SEQ ID NO: 211893 - DNA, 15 bp, Homo sapiens
ggaaccctcatatgt

SEQ ID NO: 211894 - DNA, 15 bp, Homo sapiens
tggaaccctcatatg

SEQ ID NO: 211895 - DNA, 15 bp, Homo sapiens
ttggaaccctcatat

SEQ ID NO: 211896 - DNA, 15 bp, Homo sapiens
attggaaccctcata

SEQ ID NO: 211897 - DNA, 15 bp, Homo sapiens
tattggaaccctcat

SEQ ID NO: 211898 - DNA, 15 bp, Homo sapiens
atattggaaccctca

SEQ ID NO: 211899 - DNA, 15 bp, Homo sapiens
gatattggaaccctc

SEQ ID NO: 211900 - DNA, 15 bp, Homo sapiens
agatattggaaccct

SEQ ID NO: 211901 - DNA, 15 bp, Homo sapiens
gagatattggaaccc

SEQ ID NO: 211902 - DNA, 15 bp, Homo sapiens
ggagatattggaacc

SEQ ID NO: 211903 - DNA, 15 bp, Homo sapiens
tggagatattggaac

SEQ ID NO: 211904 - DNA, 15 bp, Homo sapiens
gtggagatattggaa

SEQ ID NO: 211905 - DNA, 15 bp, Homo sapiens
tgtggagatattgga

SEQ ID NO: 211906 - DNA, 15 bp, Homo sapiens
atgtggagatattgg

SEQ ID NO: 211907 - DNA, 15 bp, Homo sapiens
gatgtggagatattg

SEQ ID NO: 211908 - DNA, 15 bp, Homo sapiens
ggatgtggagatatt

SEQ ID NO: 211909 - DNA, 15 bp, Homo sapiens
aggatgtggagatat

SEQ ID NO: 211910 - DNA, 15 bp, Homo sapiens
aaggatgtggagata

SEQ ID NO: 211911 - DNA, 15 bp, Homo sapiens
caaggatgtggagat

SEQ ID NO: 211912 - DNA, 15 bp, Homo sapiens
tcaaggatgtggaga

SEQ ID NO: 211913 - DNA, 15 bp, Homo sapiens
gtcaaggatgtggag

SEQ ID NO: 211914 - DNA, 15 bp, Homo sapiens
tgtcaaggatgtgga

SEQ ID NO: 211915 - DNA, 15 bp, Homo sapiens
ttgtcaaggatgtgg

SEQ ID NO: 211916 - DNA, 15 bp, Homo sapiens
gttgtcaaggatgtg

SEQ ID NO: 211917 - DNA, 15 bp, Homo sapiens
tgttgtcaaggatgt

SEQ ID NO: 211918 - DNA, 15 bp, Homo sapiens
gtgttgtcaaggatg

SEQ ID NO: 211919 - DNA, 15 bp, Homo sapiens
agtgttgtcaaggat

SEQ ID NO: 211920 - DNA, 15 bp, Homo sapiens
aagtgttgtcaagga

SEQ ID NO: 211921 - DNA, 15 bp, Homo sapiens
caagtgttgtcaagg

SEQ ID NO: 211922 - DNA, 15 bp, Homo sapiens
acaagtgttgtcaag

SEQ ID NO: 211923 - DNA, 15 bp, Homo sapiens
aacaagtgttgtcaa

SEQ ID NO: 211924 - DNA, 15 bp, Homo sapiens
taacaagtgttgtca

SEQ ID NO: 211925 - DNA, 15 bp, Homo sapiens
gtaacaagtgttgtc

SEQ ID NO: 211926 - DNA, 15 bp, Homo sapiens
agtaacaagtgttgt

SEQ ID NO: 211927 - DNA, 15 bp, Homo sapiens
cagtaacaagtgttg

SEQ ID NO: 211928 - DNA, 15 bp, Homo sapiens
acagtaacaagtgtt

SEQ ID NO: 211929 - DNA, 15 bp, Homo sapiens
gacagtaacaagtgt

SEQ ID NO: 211930 - DNA, 15 bp, Homo sapiens
ggacagtaacaagtg

SEQ ID NO: 211931 - DNA, 15 bp, Homo sapiens
aggacagtaacaagt

SEQ ID NO: 211932 - DNA, 15 bp, Homo sapiens
aaggacagtaacaag

SEQ ID NO: 211933 - DNA, 15 bp, Homo sapiens
aaaggacagtaacaa

SEQ ID NO: 211934 - DNA, 15 bp, Homo sapiens
aaaaggacagtaaca

SEQ ID NO: 211935 - DNA, 15 bp, Homo sapiens
aaaaaggacagtaac

SEQ ID NO: 211936 - DNA, 15 bp, Homo sapiens
taaaaaggacagtaa

SEQ ID NO: 211937 - DNA, 15 bp, Homo sapiens
ataaaaaggacagta

SEQ ID NO: 211938 - DNA, 15 bp, Homo sapiens
aataaaaaggacagt

SEQ ID NO: 211939 - DNA, 15 bp, Homo sapiens
caataaaaaggacag

SEQ ID NO: 211940 - DNA, 15 bp, Homo sapiens
acaataaaaaggaca

SEQ ID NO: 211941 - DNA, 15 bp, Homo sapiens
tacaataaaaaggac

SEQ ID NO: 211942 - DNA, 15 bp, Homo sapiens
ctacaataaaaagga

SEQ ID NO: 211943 - DNA, 15 bp, Homo sapiens
gctacaataaaaagg

SEQ ID NO: 211944 - DNA, 15 bp, Homo sapiens
ggctacaataaaaag

SEQ ID NO: 211945 - DNA, 15 bp, Homo sapiens
tggctacaataaaaa

SEQ ID NO: 211946 - DNA, 15 bp, Homo sapiens
atggctacaataaaa

SEQ ID NO: 211947 - DNA, 15 bp, Homo sapiens
gatggctacaataaa

SEQ ID NO: 211948 - DNA, 15 bp, Homo sapiens
ggatggctacaataa

SEQ ID NO: 211949 - DNA, 15 bp, Homo sapiens
aggatggctacaata

SEQ ID NO: 211950 - DNA, 15 bp, Homo sapiens
taggatggctacaat

SEQ ID NO: 211951 - DNA, 15 bp, Homo sapiens
ctaggatggctacaa

SEQ ID NO: 211952 - DNA, 15 bp, Homo sapiens
actaggatggctaca

SEQ ID NO: 211953 - DNA, 15 bp, Homo sapiens
cactaggatggctac

SEQ ID NO: 211954 - DNA, 15 bp, Homo sapiens
ccactaggatggcta

SEQ ID NO: 211955 - DNA, 15 bp, Homo sapiens
gccactaggatggct

SEQ ID NO: 211956 - DNA, 15 bp, Homo sapiens
agccactaggatggc

SEQ ID NO: 211957 - DNA, 15 bp, Homo sapiens
tagccactaggatgg

SEQ ID NO: 211958 - DNA, 15 bp, Homo sapiens
atagccactaggatg

SEQ ID NO: 211959 - DNA, 15 bp, Homo sapiens
catagccactaggat

SEQ ID NO: 211960 - DNA, 15 bp, Homo sapiens
tcatagccactagga

SEQ ID NO: 211961 - DNA, 15 bp, Homo sapiens
atcatagccactagg

SEQ ID NO: 211962 - DNA, 15 bp, Homo sapiens
catcatagccactag

SEQ ID NO: 211963 - DNA, 15 bp, Homo sapiens
acatcatagccacta

SEQ ID NO: 211964 - DNA, 15 bp, Homo sapiens
cacatcatagccact

SEQ ID NO: 211965 - DNA, 15 bp, Homo sapiens
ccacatcatagccac

SEQ ID NO: 211966 - DNA, 15 bp, Homo sapiens
accacatcatagcca

SEQ ID NO: 211967 - DNA, 15 bp, Homo sapiens
taccacatcatagcc

SEQ ID NO: 211968 - DNA, 15 bp, Homo sapiens
ataccacatcatagc

SEQ ID NO: 211969 - DNA, 15 bp, Homo sapiens
gataccacatcatag

SEQ ID NO: 211970 - DNA, 15 bp, Homo sapiens
agataccacatcata

SEQ ID NO: 211971 - DNA, 15 bp, Homo sapiens
gagataccacatcat

SEQ ID NO: 211972 - DNA, 15 bp, Homo sapiens
tgagataccacatca

SEQ ID NO: 211973 - DNA, 15 bp, Homo sapiens
atgagataccacatc

SEQ ID NO: 211974 - DNA, 15 bp, Homo sapiens
aatgagataccacat

SEQ ID NO: 211975 - DNA, 15 bp, Homo sapiens
caatgagataccaca

SEQ ID NO: 211976 - DNA, 15 bp, Homo sapiens
acaatgagataccac

SEQ ID NO: 211977 - DNA, 15 bp, Homo sapiens
cacaatgagatacca

SEQ ID NO: 211978 - DNA, 15 bp, Homo sapiens
ccacaatgagatacc

SEQ ID NO: 211979 - DNA, 15 bp, Homo sapiens
accacaatgagatac

SEQ ID NO: 211980 - DNA, 15 bp, Homo sapiens
aaccacaatgagata

SEQ ID NO: 211981 - DNA, 15 bp, Homo sapiens
aaaccacaatgagat

SEQ ID NO: 211982 - DNA, 15 bp, Homo sapiens
aaaaccacaatgaga

SEQ ID NO: 211983 - DNA, 15 bp, Homo sapiens
caaaaccacaatgag

SEQ ID NO: 211984 - DNA, 15 bp, Homo sapiens
tcaaaaccacaatga

SEQ ID NO: 211985 - DNA, 15 bp, Homo sapiens
atcaaaaccacaatg

SEQ ID NO: 211986 - DNA, 15 bp, Homo sapiens
aatcaaaaccacaat

SEQ ID NO: 211987 - DNA, 15 bp, Homo sapiens
aaatcaaaaccacaa

SEQ ID NO: 211988 - DNA, 15 bp, Homo sapiens
caaatcaaaaccaca

SEQ ID NO: 211989 - DNA, 15 bp, Homo sapiens
acaaatcaaaaccac

SEQ ID NO: 211990 - DNA, 15 bp, Homo sapiens
cacaaatcaaaacca

SEQ ID NO: 211991 - DNA, 15 bp, Homo sapiens
acacaaatcaaaacc

SEQ ID NO: 211992 - DNA, 15 bp, Homo sapiens
aacacaaatcaaaac

SEQ ID NO: 211993 - DNA, 15 bp, Homo sapiens
aaacacaaatcaaaa

SEQ ID NO: 211994 - DNA, 15 bp, Homo sapiens
gaaacacaaatcaaa

SEQ ID NO: 211995 - DNA, 15 bp, Homo sapiens
agaaacacaaatcaa

SEQ ID NO: 211996 - DNA, 15 bp, Homo sapiens
gagaaacacaaatca

SEQ ID NO: 211997 - DNA, 15 bp, Homo sapiens
agagaaacacaaatc

SEQ ID NO: 211998 - DNA, 15 bp, Homo sapiens
cagagaaacacaaat

SEQ ID NO: 211999 - DNA, 15 bp, Homo sapiens
tcagagaaacacaaa

SEQ ID NO: 212000 - DNA, 15 bp, Homo sapiens
atcagagaaacacaa

SEQ ID NO: 212001 - DNA, 15 bp, Homo sapiens
catcagagaaacaca

SEQ ID NO: 212002 - DNA, 15 bp, Homo sapiens
gcatcagagaaacac

SEQ ID NO: 212003 - DNA, 15 bp, Homo sapiens
agcatcagagaaaca

SEQ ID NO: 212004 - DNA, 15 bp, Homo sapiens
cagcatcagagaaac

SEQ ID NO: 212005 - DNA, 15 bp, Homo sapiens
tcagcatcagagaaa

SEQ ID NO: 212006 - DNA, 15 bp, Homo sapiens
atcagcatcagagaa

SEQ ID NO: 212007 - DNA, 15 bp, Homo sapiens
catcagcatcagaga

SEQ ID NO: 212008 - DNA, 15 bp, Homo sapiens
tcatcagcatcagag

SEQ ID NO: 212009 - DNA, 15 bp, Homo sapiens
atcatcagcatcaga

SEQ ID NO: 212010 - DNA, 15 bp, Homo sapiens
catcatcagcatcag

SEQ ID NO: 212011 - DNA, 15 bp, Homo sapiens
acatcatcagcatca

SEQ ID NO: 212012 - DNA, 15 bp, Homo sapiens
aacatcatcagcatc

SEQ ID NO: 212013 - DNA, 15 bp, Homo sapiens
caacatcatcagcat

SEQ ID NO: 212014 - DNA, 15 bp, Homo sapiens
tcaacatcatcagca

SEQ ID NO: 212015 - DNA, 15 bp, Homo sapiens
ttcaacatcatcagc

SEQ ID NO: 212016 - DNA, 15 bp, Homo sapiens
gttcaacatcatcag

SEQ ID NO: 212017 - DNA, 15 bp, Homo sapiens
tgttcaacatcatca

SEQ ID NO: 212018 - DNA, 15 bp, Homo sapiens
atgttcaacatcatc

SEQ ID NO: 212019 - DNA, 15 bp, Homo sapiens
catgttcaacatcat

SEQ ID NO: 212020 - DNA, 15 bp, Homo sapiens
acatgttcaacatca

SEQ ID NO: 212021 - DNA, 15 bp, Homo sapiens
aacatgttcaacatc

SEQ ID NO: 212022 - DNA, 15 bp, Homo sapiens
aaacatgttcaacat

SEQ ID NO: 212023 - DNA, 15 bp, Homo sapiens
aaaacatgttcaaca

SEQ ID NO: 212024 - DNA, 15 bp, Homo sapiens
gaaaacatgttcaac

SEQ ID NO: 212025 - DNA, 15 bp, Homo sapiens
tgaaaacatgttcaa

SEQ ID NO: 212026 - DNA, 15 bp, Homo sapiens
atgaaaacatgttca

SEQ ID NO: 212027 - DNA, 15 bp, Homo sapiens
gatgaaaacatgttc

SEQ ID NO: 212028 - DNA, 15 bp, Homo sapiens
agatgaaaacatgtt

SEQ ID NO: 212029 - DNA, 15 bp, Homo sapiens
cagatgaaaacatgt

SEQ ID NO: 212030 - DNA, 15 bp, Homo sapiens
gcagatgaaaacatg

SEQ ID NO: 212031 - DNA, 15 bp, Homo sapiens
agcagatgaaaacat

SEQ ID NO: 212032 - DNA, 15 bp, Homo sapiens
aagcagatgaaaaca

SEQ ID NO: 212033 - DNA, 15 bp, Homo sapiens
taagcagatgaaaac

SEQ ID NO: 212034 - DNA, 15 bp, Homo sapiens
ataagcagatgaaaa

SEQ ID NO: 212035 - DNA, 15 bp, Homo sapiens
aataagcagatgaaa

SEQ ID NO: 212036 - DNA, 15 bp, Homo sapiens
caataagcagatgaa

SEQ ID NO: 212037 - DNA, 15 bp, Homo sapiens
ccaataagcagatga

SEQ ID NO: 212038 - DNA, 15 bp, Homo sapiens
gccaataagcagatg

SEQ ID NO: 212039 - DNA, 15 bp, Homo sapiens
ggccaataagcagat

SEQ ID NO: 212040 - DNA, 15 bp, Homo sapiens
tggccaataagcaga

SEQ ID NO: 212041 - DNA, 15 bp, Homo sapiens
atggccaataagcag

SEQ ID NO: 212042 - DNA, 15 bp, Homo sapiens
aatggccaataagca

SEQ ID NO: 212043 - DNA, 15 bp, Homo sapiens
aaatggccaataagc

SEQ ID NO: 212044 - DNA, 15 bp, Homo sapiens
taaatggccaataag

SEQ ID NO: 212045 - DNA, 15 bp, Homo sapiens
gtaaatggccaataa

SEQ ID NO: 212046 - DNA, 15 bp, Homo sapiens
tgtaaatggccaata

SEQ ID NO: 212047 - DNA, 15 bp, Homo sapiens
atgtaaatggccaat

SEQ ID NO: 212048 - DNA, 15 bp, Homo sapiens
tatgtaaatggccaa

SEQ ID NO: 212049 - DNA, 15 bp, Homo sapiens
atatgtaaatggcca

SEQ ID NO: 212050 - DNA, 15 bp, Homo sapiens
tatatgtaaatggcc

SEQ ID NO: 212051 - DNA, 15 bp, Homo sapiens
atatatgtaaatggc

SEQ ID NO: 212052 - DNA, 15 bp, Homo sapiens
gatatatgtaaatgg

SEQ ID NO: 212053 - DNA, 15 bp, Homo sapiens
agatatatgtaaatg

SEQ ID NO: 212054 - DNA, 15 bp, Homo sapiens
aagatatatgtaaat

SEQ ID NO: 212055 - DNA, 15 bp, Homo sapiens
gaagatatatgtaaa

SEQ ID NO: 212056 - DNA, 15 bp, Homo sapiens
agaagatatatgtaa

SEQ ID NO: 212057 - DNA, 15 bp, Homo sapiens
aagaagatatatgta

SEQ ID NO: 212058 - DNA, 15 bp, Homo sapiens
taagaagatatatgt

SEQ ID NO: 212059 - DNA, 15 bp, Homo sapiens
ttaagaagatatatg

SEQ ID NO: 212060 - DNA, 15 bp, Homo sapiens
cttaagaagatatat

SEQ ID NO: 212061 - DNA, 15 bp, Homo sapiens
tcttaagaagatata

SEQ ID NO: 212062 - DNA, 15 bp, Homo sapiens
ttcttaagaagatat

SEQ ID NO: 212063 - DNA, 15 bp, Homo sapiens
gttcttaagaagata

SEQ ID NO: 212064 - DNA, 15 bp, Homo sapiens
cgttcttaagaagat

SEQ ID NO: 212065 - DNA, 15 bp, Homo sapiens
ccgttcttaagaaga

SEQ ID NO: 212066 - DNA, 15 bp, Homo sapiens
accgttcttaagaag

SEQ ID NO: 212067 - DNA, 15 bp, Homo sapiens
aaccgttcttaagaa

SEQ ID NO: 212068 - DNA, 15 bp, Homo sapiens
taaccgttcttaaga

SEQ ID NO: 212069 - DNA, 15 bp, Homo sapiens
gtaaccgttcttaag

SEQ ID NO: 212070 - DNA, 15 bp, Homo sapiens
aaccttggaaataca

SEQ ID NO: 212071 - DNA, 15 bp, Homo sapiens
aaaccttggaaatac

SEQ ID NO: 212072 - DNA, 15 bp, Homo sapiens
gaaaccttggaaata

SEQ ID NO: 212073 - DNA, 15 bp, Homo sapiens
agaaaccttggaaat

SEQ ID NO: 212074 - DNA, 15 bp, Homo sapiens
tagaaaccttggaaa

SEQ ID NO: 212075 - DNA, 15 bp, Homo sapiens
ctagaaaccttggaa

SEQ ID NO: 212076 - DNA, 15 bp, Homo sapiens
tctagaaaccttgga

SEQ ID NO: 212077 - DNA, 15 bp, Homo sapiens
gtctagaaaccttgg

SEQ ID NO: 212078 - DNA, 15 bp, Homo sapiens
agtctagaaaccttg

SEQ ID NO: 212079 - DNA, 15 bp, Homo sapiens
cagtctagaaacctt

SEQ ID NO: 212080 - DNA, 15 bp, Homo sapiens
tcagtctagaaacct

SEQ ID NO: 212081 - DNA, 15 bp, Homo sapiens
ctcagtctagaaacc

SEQ ID NO: 212082 - DNA, 15 bp, Homo sapiens
tctcagtctagaaac

SEQ ID NO: 212083 - DNA, 15 bp, Homo sapiens
ctctcagtctagaaa

SEQ ID NO: 212084 - DNA, 15 bp, Homo sapiens
gctctcagtctagaa

SEQ ID NO: 212085 - DNA, 15 bp, Homo sapiens
ggctctcagtctaga

SEQ ID NO: 212086 - DNA, 15 bp, Homo sapiens
gggctctcagtctag

SEQ ID NO: 212087 - DNA, 15 bp, Homo sapiens
agggctctcagtcta

SEQ ID NO: 212088 - DNA, 15 bp, Homo sapiens
aagggctctcagtct

SEQ ID NO: 212089 - DNA, 15 bp, Homo sapiens
aaagggctctcagtc

SEQ ID NO: 212090 - DNA, 15 bp, Homo sapiens
aaaagggctctcagt

SEQ ID NO: 212091 - DNA, 15 bp, Homo sapiens
gaaaagggctctcag

SEQ ID NO: 212092 - DNA, 15 bp, Homo sapiens
tgaaaagggctctca

SEQ ID NO: 212093 - DNA, 15 bp, Homo sapiens
atgaaaagggctctc

SEQ ID NO: 212094 - DNA, 15 bp, Homo sapiens
gatgaaaagggctct

SEQ ID NO: 212095 - DNA, 15 bp, Homo sapiens
agatgaaaagggctc

SEQ ID NO: 212096 - DNA, 15 bp, Homo sapiens
aagatgaaaagggct

SEQ ID NO: 212097 - DNA, 15 bp, Homo sapiens
aaagatgaaaagggc

SEQ ID NO: 212098 - DNA, 15 bp, Homo sapiens
caaagatgaaaaggg

SEQ ID NO: 212099 - DNA, 15 bp, Homo sapiens
gcaaagatgaaaagg

SEQ ID NO: 212100 - DNA, 15 bp, Homo sapiens
agcaaagatgaaaag

SEQ ID NO: 212101 - DNA, 15 bp, Homo sapiens
gagcaaagatgaaaa

SEQ ID NO: 212102 - DNA, 15 bp, Homo sapiens
tgagcaaagatgaaa

SEQ ID NO: 212103 - DNA, 15 bp, Homo sapiens
atgagcaaagatgaa

SEQ ID NO: 212104 - DNA, 15 bp, Homo sapiens
aatgagcaaagatga

SEQ ID NO: 212105 - DNA, 15 bp, Homo sapiens
caatgagcaaagatg

SEQ ID NO: 212106 - DNA, 15 bp, Homo sapiens
tcaatgagcaaagat

SEQ ID NO: 212107 - DNA, 15 bp, Homo sapiens
gtcaatgagcaaaga

SEQ ID NO: 212108 - DNA, 15 bp, Homo sapiens
tgtcaatgagcaaag

SEQ ID NO: 212109 - DNA, 15 bp, Homo sapiens
gtgtcaatgagcaaa

SEQ ID NO: 212110 - DNA, 15 bp, Homo sapiens
agtgtcaatgagcaa

SEQ ID NO: 212111 - DNA, 15 bp, Homo sapiens
gagtgtcaatgagca

SEQ ID NO: 212112 - DNA, 15 bp, Homo sapiens
agagtgtcaatgagc

SEQ ID NO: 212113 - DNA, 15 bp, Homo sapiens
cagagtgtcaatgag

SEQ ID NO: 212114 - DNA, 15 bp, Homo sapiens
acagagtgtcaatga

SEQ ID NO: 212115 - DNA, 15 bp, Homo sapiens
tacagagtgtcaatg

SEQ ID NO: 212116 - DNA, 15 bp, Homo sapiens
gtacagagtgtcaat

SEQ ID NO: 212117 - DNA, 15 bp, Homo sapiens
ggtacagagtgtcaa

SEQ ID NO: 212118 - DNA, 15 bp, Homo sapiens
gggtacagagtgtca

SEQ ID NO: 212119 - DNA, 15 bp, Homo sapiens
tgggtacagagtgtc

SEQ ID NO: 212120 - DNA, 15 bp, Homo sapiens
atgggtacagagtgt

SEQ ID NO: 212121 - DNA, 15 bp, Homo sapiens
aatgggtacagagtg

SEQ ID NO: 212122 - DNA, 15 bp, Homo sapiens
taatgggtacagagt

SEQ ID NO: 212123 - DNA, 15 bp, Homo sapiens
ttaatgggtacagag

SEQ ID NO: 212124 - DNA, 15 bp, Homo sapiens
attaatgggtacaga

SEQ ID NO: 212125 - DNA, 15 bp, Homo sapiens
gattaatgggtacag

SEQ ID NO: 212126 - DNA, 15 bp, Homo sapiens
ggattaatgggtaca

SEQ ID NO: 212127 - DNA, 15 bp, Homo sapiens
aggattaatgggtac

SEQ ID NO: 212128 - DNA, 15 bp, Homo sapiens
gaggattaatgggta

SEQ ID NO: 212129 - DNA, 15 bp, Homo sapiens
ggaggattaatgggt

SEQ ID NO: 212130 - DNA, 15 bp, Homo sapiens
aggaggattaatggg

SEQ ID NO: 212131 - DNA, 15 bp, Homo sapiens
aaggaggattaatgg

SEQ ID NO: 212132 - DNA, 15 bp, Homo sapiens
taaggaggattaatg

SEQ ID NO: 212133 - DNA, 15 bp, Homo sapiens
ataaggaggattaat

SEQ ID NO: 212134 - DNA, 15 bp, Homo sapiens
aataaggaggattaa

SEQ ID NO: 212135 - DNA, 15 bp, Homo sapiens
taataaggaggatta

SEQ ID NO: 212136 - DNA, 15 bp, Homo sapiens
ctaataaggaggatt

SEQ ID NO: 212137 - DNA, 15 bp, Homo sapiens
gctaataaggaggat

SEQ ID NO: 212138 - DNA, 15 bp, Homo sapiens
agctaataaggagga

SEQ ID NO: 212139 - DNA, 15 bp, Homo sapiens
gagctaataaggagg

SEQ ID NO: 212140 - DNA, 15 bp, Homo sapiens
ggagctaataaggag

SEQ ID NO: 212141 - DNA, 15 bp, Homo sapiens
gggagctaataagga

SEQ ID NO: 212142 - DNA, 15 bp, Homo sapiens
ggggagctaataagg

SEQ ID NO: 212143 - DNA, 15 bp, Homo sapiens
aggggagctaataag

SEQ ID NO: 212144 - DNA, 15 bp, Homo sapiens
aaggggagctaataa

SEQ ID NO: 212145 - DNA, 15 bp, Homo sapiens
gaaggggagctaata

SEQ ID NO: 212146 - DNA, 15 bp, Homo sapiens
tgaaggggagctaat

SEQ ID NO: 212147 - DNA, 15 bp, Homo sapiens
ttgaaggggagctaa

SEQ ID NO: 212148 - DNA, 15 bp, Homo sapiens
attgaaggggagcta

SEQ ID NO: 212149 - DNA, 15 bp, Homo sapiens
cattgaaggggagct

SEQ ID NO: 212150 - DNA, 15 bp, Homo sapiens
ccattgaaggggagc

SEQ ID NO: 212151 - DNA, 15 bp, Homo sapiens
tccattgaaggggag

SEQ ID NO: 212152 - DNA, 15 bp, Homo sapiens
gtccattgaagggga

SEQ ID NO: 212153 - DNA, 15 bp, Homo sapiens
tgtccattgaagggg

SEQ ID NO: 212154 - DNA, 15 bp, Homo sapiens
gtgtccattgaaggg

SEQ ID NO: 212155 - DNA, 15 bp, Homo sapiens
tgtgtccattgaagg

SEQ ID NO: 212156 - DNA, 15 bp, Homo sapiens
atgtgtccattgaag

SEQ ID NO: 212157 - DNA, 15 bp, Homo sapiens
catgtgtccattgaa

SEQ ID NO: 212158 - DNA, 15 bp, Homo sapiens
ccatgtgtccattga

SEQ ID NO: 212159 - DNA, 15 bp, Homo sapiens
cccatgtgtccattg

SEQ ID NO: 212160 - DNA, 15 bp, Homo sapiens
acccatgtgtccatt

SEQ ID NO: 212161 - DNA, 15 bp, Homo sapiens
tacccatgtgtccat

SEQ ID NO: 212162 - DNA, 15 bp, Homo sapiens
ctacccatgtgtcca

SEQ ID NO: 212163 - DNA, 15 bp, Homo sapiens
actacccatgtgtcc

SEQ ID NO: 212164 - DNA, 15 bp, Homo sapiens
gactacccatgtgtc

SEQ ID NO: 212165 - DNA, 15 bp, Homo sapiens
tgactacccatgtgt

SEQ ID NO: 212166 - DNA, 15 bp, Homo sapiens
ctgactacccatgtg

SEQ ID NO: 212167 - DNA, 15 bp, Homo sapiens
cctgactacccatgt

SEQ ID NO: 212168 - DNA, 15 bp, Homo sapiens
ccctgactacccatg

SEQ ID NO: 212169 - DNA, 15 bp, Homo sapiens
accctgactacccat

SEQ ID NO: 212170 - DNA, 15 bp, Homo sapiens
caccctgactaccca

SEQ ID NO: 212171 - DNA, 15 bp, Homo sapiens
gcaccctgactaccc

SEQ ID NO: 212172 - DNA, 15 bp, Homo sapiens
tgcaccctgactacc

SEQ ID NO: 212173 - DNA, 15 bp, Homo sapiens
ctgcaccctgactac

SEQ ID NO: 212174 - DNA, 15 bp, Homo sapiens
cctgcaccctgacta

SEQ ID NO: 212175 - DNA, 15 bp, Homo sapiens
acctgcaccctgact

SEQ ID NO: 212176 - DNA, 15 bp, Homo sapiens
gacctgcaccctgac

SEQ ID NO: 212177 - DNA, 15 bp, Homo sapiens
agacctgcaccctga

SEQ ID NO: 212178 - DNA, 15 bp, Homo sapiens
gagacctgcaccctg

SEQ ID NO: 212179 - DNA, 15 bp, Homo sapiens
tgagacctgcaccct

SEQ ID NO: 212180 - DNA, 15 bp, Homo sapiens
ctgagacctgcaccc

SEQ ID NO: 212181 - DNA, 15 bp, Homo sapiens
tctgagacctgcacc

SEQ ID NO: 212182 - DNA, 15 bp, Homo sapiens
ttctgagacctgcac

SEQ ID NO: 212183 - DNA, 15 bp, Homo sapiens
gttctgagacctgca

SEQ ID NO: 212184 - DNA, 15 bp, Homo sapiens
agttctgagacctgc

SEQ ID NO: 212185 - DNA, 15 bp, Homo sapiens
cagttctgagacctg

SEQ ID NO: 212186 - DNA, 15 bp, Homo sapiens
acagttctgagacct

SEQ ID NO: 212187 - DNA, 15 bp, Homo sapiens
gacagttctgagacc

SEQ ID NO: 212188 - DNA, 15 bp, Homo sapiens
ggacagttctgagac

SEQ ID NO: 212189 - DNA, 15 bp, Homo sapiens
aggacagttctgaga

SEQ ID NO: 212190 - DNA, 15 bp, Homo sapiens
aaggacagttctgag

SEQ ID NO: 212191 - DNA, 15 bp, Homo sapiens
gaaggacagttctga

SEQ ID NO: 212192 - DNA, 15 bp, Homo sapiens
tgaaggacagttctg

SEQ ID NO: 212193 - DNA, 15 bp, Homo sapiens
ctgaaggacagttct

SEQ ID NO: 212194 - DNA, 15 bp, Homo sapiens
cctgaaggacagttc

SEQ ID NO: 212195 - DNA, 15 bp, Homo sapiens
acctgaaggacagtt

SEQ ID NO: 212196 - DNA, 15 bp, Homo sapiens
aacctgaaggacagt

SEQ ID NO: 212197 - DNA, 15 bp, Homo sapiens
gaacctgaaggacag

SEQ ID NO: 212198 - DNA, 15 bp, Homo sapiens
ggaacctgaaggaca

SEQ ID NO: 212199 - DNA, 15 bp, Homo sapiens
tggaacctgaaggac

SEQ ID NO: 212200 - DNA, 15 bp, Homo sapiens
ctggaacctgaagga

SEQ ID NO: 212201 - DNA, 15 bp, Homo sapiens
cctggaacctgaagg

SEQ ID NO: 212202 - DNA, 15 bp, Homo sapiens
acctggaacctgaag

SEQ ID NO: 212203 - DNA, 15 bp, Homo sapiens
cacctggaacctgaa

SEQ ID NO: 212204 - DNA, 15 bp, Homo sapiens
tcacctggaacctga

SEQ ID NO: 212205 - DNA, 15 bp, Homo sapiens
atcacctggaacctg

SEQ ID NO: 212206 - DNA, 15 bp, Homo sapiens
gatcacctggaacct

SEQ ID NO: 212207 - DNA, 15 bp, Homo sapiens
tgatcacctggaacc

SEQ ID NO: 212208 - DNA, 15 bp, Homo sapiens
ttgatcacctggaac

SEQ ID NO: 212209 - DNA, 15 bp, Homo sapiens
gttgatcacctggaa

SEQ ID NO: 212210 - DNA, 15 bp, Homo sapiens
ggttgatcacctgga

SEQ ID NO: 212211 - DNA, 15 bp, Homo sapiens
tggttgatcacctgg

SEQ ID NO: 212212 - DNA, 15 bp, Homo sapiens
ttggttgatcacctg

SEQ ID NO: 212213 - DNA, 15 bp, Homo sapiens
cttggttgatcacct

SEQ ID NO: 212214 - DNA, 15 bp, Homo sapiens
acttggttgatcacc

SEQ ID NO: 212215 - DNA, 15 bp, Homo sapiens
cacttggttgatcac

SEQ ID NO: 212216 - DNA, 15 bp, Homo sapiens
gcacttggttgatca

SEQ ID NO: 212217 - DNA, 15 bp, Homo sapiens
ggcacttggttgatc

SEQ ID NO: 212218 - DNA, 15 bp, Homo sapiens
aggcacttggttgat

SEQ ID NO: 212219 - DNA, 15 bp, Homo sapiens
aaggcacttggttga

SEQ ID NO: 212220 - DNA, 15 bp, Homo sapiens
caaggcacttggttg

SEQ ID NO: 212221 - DNA, 15 bp, Homo sapiens
acaaggcacttggtt

SEQ ID NO: 212222 - DNA, 15 bp, Homo sapiens
gacaaggcacttggt

SEQ ID NO: 212223 - DNA, 15 bp, Homo sapiens
agacaaggcacttgg

SEQ ID NO: 212224 - DNA, 15 bp, Homo sapiens
cagacaaggcacttg

SEQ ID NO: 212225 - DNA, 15 bp, Homo sapiens
acagacaaggcactt

SEQ ID NO: 212226 - DNA, 15 bp, Homo sapiens
tacagacaaggcact

SEQ ID NO: 212227 - DNA, 15 bp, Homo sapiens
ctacagacaaggcac

SEQ ID NO: 212228 - DNA, 15 bp, Homo sapiens
actacagacaaggca

SEQ ID NO: 212229 - DNA, 15 bp, Homo sapiens
cactacagacaaggc

SEQ ID NO: 212230 - DNA, 15 bp, Homo sapiens
acactacagacaagg

SEQ ID NO: 212231 - DNA, 15 bp, Homo sapiens
gacactacagacaag

SEQ ID NO: 212232 - DNA, 15 bp, Homo sapiens
tgacactacagacaa

SEQ ID NO: 212233 - DNA, 15 bp, Homo sapiens
ttgacactacagaca

SEQ ID NO: 212234 - DNA, 15 bp, Homo sapiens
gttgacactacagac

SEQ ID NO: 212235 - DNA, 15 bp, Homo sapiens
agttgacactacaga

SEQ ID NO: 212236 - DNA, 15 bp, Homo sapiens
gagttgacactacag

SEQ ID NO: 212237 - DNA, 15 bp, Homo sapiens
tgagttgacactaca

SEQ ID NO: 212238 - DNA, 15 bp, Homo sapiens
atgagttgacactac

SEQ ID NO: 212239 - DNA, 15 bp, Homo sapiens
aatgagttgacacta

SEQ ID NO: 212240 - DNA, 15 bp, Homo sapiens
caatgagttgacact

SEQ ID NO: 212241 - DNA, 15 bp, Homo sapiens
gcaatgagttgacac

SEQ ID NO: 212242 - DNA, 15 bp, Homo sapiens
agcaatgagttgaca

SEQ ID NO: 212243 - DNA, 15 bp, Homo sapiens
cagcaatgagttgac

SEQ ID NO: 212244 - DNA, 15 bp, Homo sapiens
gcagcaatgagttga

SEQ ID NO: 212245 - DNA, 15 bp, Homo sapiens
ggcagcaatgagttg

SEQ ID NO: 212246 - DNA, 15 bp, Homo sapiens
gggcagcaatgagtt

SEQ ID NO: 212247 - DNA, 15 bp, Homo sapiens
ggggcagcaatgagt

SEQ ID NO: 212248 - DNA, 15 bp, Homo sapiens
aggggcagcaatgag

SEQ ID NO: 212249 - DNA, 15 bp, Homo sapiens
aaggggcagcaatga

SEQ ID NO: 212250 - DNA, 15 bp, Homo sapiens
gaaggggcagcaatg

SEQ ID NO: 212251 - DNA, 15 bp, Homo sapiens
ggaaggggcagcaat

SEQ ID NO: 212252 - DNA, 15 bp, Homo sapiens
aggaaggggcagcaa

SEQ ID NO: 212253 - DNA, 15 bp, Homo sapiens
taggaaggggcagca

SEQ ID NO: 212254 - DNA, 15 bp, Homo sapiens
ctaggaaggggcagc

SEQ ID NO: 212255 - DNA, 15 bp, Homo sapiens
actaggaaggggcag

SEQ ID NO: 212256 - DNA, 15 bp, Homo sapiens
tactaggaaggggca

SEQ ID NO: 212257 - DNA, 15 bp, Homo sapiens
ttactaggaaggggc

SEQ ID NO: 212258 - DNA, 15 bp, Homo sapiens
attactaggaagggg

SEQ ID NO: 212259 - DNA, 15 bp, Homo sapiens
gattactaggaaggg

SEQ ID NO: 212260 - DNA, 15 bp, Homo sapiens
ggattactaggaagg

SEQ ID NO: 212261 - DNA, 15 bp, Homo sapiens
gggattactaggaag

SEQ ID NO: 212262 - DNA, 15 bp, Homo sapiens
ggggattactaggaa

SEQ ID NO: 212263 - DNA, 15 bp, Homo sapiens
tggggattactagga

SEQ ID NO: 212264 - DNA, 15 bp, Homo sapiens
atggggattactagg

SEQ ID NO: 212265 - DNA, 15 bp, Homo sapiens
tatggggattactag

SEQ ID NO: 212266 - DNA, 15 bp, Homo sapiens
ttatggggattacta

SEQ ID NO: 212267 - DNA, 15 bp, Homo sapiens
attatggggattact

SEQ ID NO: 212268 - DNA, 15 bp, Homo sapiens
aattatggggattac

SEQ ID NO: 212269 - DNA, 15 bp, Homo sapiens
aaattatggggatta

SEQ ID NO: 212270 - DNA, 15 bp, Homo sapiens
taaattatggggatt

SEQ ID NO: 212271 - DNA, 15 bp, Homo sapiens
ctaaattatggggat

SEQ ID NO: 212272 - DNA, 15 bp, Homo sapiens
gctaaattatgggga

SEQ ID NO: 212273 - DNA, 15 bp, Homo sapiens
agctaaattatgggg

SEQ ID NO: 212274 - DNA, 15 bp, Homo sapiens
gagctaaattatggg

SEQ ID NO: 212275 - DNA, 15 bp, Homo sapiens
agagctaaattatgg

SEQ ID NO: 212276 - DNA, 15 bp, Homo sapiens
gagagctaaattatg

SEQ ID NO: 212277 - DNA, 15 bp, Homo sapiens
ggagagctaaattat

SEQ ID NO: 212278 - DNA, 15 bp, Homo sapiens
tggagagctaaatta

SEQ ID NO: 212279 - DNA, 15 bp, Homo sapiens
atggagagctaaatt

SEQ ID NO: 212280 - DNA, 15 bp, Homo sapiens
aatggagagctaaat

SEQ ID NO: 212281 - DNA, 15 bp, Homo sapiens
aaatggagagctaaa

SEQ ID NO: 212282 - DNA, 15 bp, Homo sapiens
gaaatggagagctaa

SEQ ID NO: 212283 - DNA, 15 bp, Homo sapiens
tgaaatggagagcta

SEQ ID NO: 212284 - DNA, 15 bp, Homo sapiens
atgaaatggagagct

SEQ ID NO: 212285 - DNA, 15 bp, Homo sapiens
tatgaaatggagagc

SEQ ID NO: 212286 - DNA, 15 bp, Homo sapiens
ctatgaaatggagag

SEQ ID NO: 212287 - DNA, 15 bp, Homo sapiens
actatgaaatggaga

SEQ ID NO: 212288 - DNA, 15 bp, Homo sapiens
gactatgaaatggag

SEQ ID NO: 212289 - DNA, 15 bp, Homo sapiens
agactatgaaatgga

SEQ ID NO: 212290 - DNA, 15 bp, Homo sapiens
aagactatgaaatgg

SEQ ID NO: 212291 - DNA, 15 bp, Homo sapiens
aaagactatgaaatg

SEQ ID NO: 212292 - DNA, 15 bp, Homo sapiens
gaaagactatgaaat

SEQ ID NO: 212293 - DNA, 15 bp, Homo sapiens
ggaaagactatgaaa

SEQ ID NO: 212294 - DNA, 15 bp, Homo sapiens
aggaaagactatgaa

SEQ ID NO: 212295 - DNA, 15 bp, Homo sapiens
aaggaaagactatga

SEQ ID NO: 212296 - DNA, 15 bp, Homo sapiens
caaggaaagactatg

SEQ ID NO: 212297 - DNA, 15 bp, Homo sapiens
ccaaggaaagactat

SEQ ID NO: 212298 - DNA, 15 bp, Homo sapiens
cccaaggaaagacta

SEQ ID NO: 212299 - DNA, 15 bp, Homo sapiens
acccaaggaaagact

SEQ ID NO: 212300 - DNA, 15 bp, Homo sapiens
cacccaaggaaagac

SEQ ID NO: 212301 - DNA, 15 bp, Homo sapiens
acacccaaggaaaga

SEQ ID NO: 212302 - DNA, 15 bp, Homo sapiens
cacacccaaggaaag

SEQ ID NO: 212303 - DNA, 15 bp, Homo sapiens
acacacccaaggaaa

SEQ ID NO: 212304 - DNA, 15 bp, Homo sapiens
aacacacccaaggaa

SEQ ID NO: 212305 - DNA, 15 bp, Homo sapiens
taacacacccaagga

SEQ ID NO: 212306 - DNA, 15 bp, Homo sapiens
ttaacacacccaagg

SEQ ID NO: 212307 - DNA, 15 bp, Homo sapiens
tttaacacacccaag

SEQ ID NO: 212308 - DNA, 15 bp, Homo sapiens
ttttaacacacccaa

SEQ ID NO: 212309 - DNA, 15 bp, Homo sapiens
cttttaacacaccca

SEQ ID NO: 212310 - DNA, 15 bp, Homo sapiens
acttttaacacaccc

SEQ ID NO: 212311 - DNA, 15 bp, Homo sapiens
cacttttaacacacc

SEQ ID NO: 212312 - DNA, 15 bp, Homo sapiens
tcacttttaacacac

SEQ ID NO: 212313 - DNA, 15 bp, Homo sapiens
gtcacttttaacaca

SEQ ID NO: 212314 - DNA, 15 bp, Homo sapiens
ggtcacttttaacac

SEQ ID NO: 212315 - DNA, 15 bp, Homo sapiens
tggtcacttttaaca

SEQ ID NO: 212316 - DNA, 15 bp, Homo sapiens
atggtcacttttaac

SEQ ID NO: 212317 - DNA, 15 bp, Homo sapiens
catggtcacttttaa

SEQ ID NO: 212318 - DNA, 15 bp, Homo sapiens
ccatggtcactttta

SEQ ID NO: 212319 - DNA, 15 bp, Homo sapiens
accatggtcactttt

SEQ ID NO: 212320 - DNA, 15 bp, Homo sapiens
taccatggtcacttt

SEQ ID NO: 212321 - DNA, 15 bp, Homo sapiens
gtaccatggtcactt

SEQ ID NO: 212322 - DNA, 15 bp, Homo sapiens
tgtaccatggtcact

SEQ ID NO: 212323 - DNA, 15 bp, Homo sapiens
gtgtaccatggtcac

SEQ ID NO: 212324 - DNA, 15 bp, Homo sapiens
agtgtaccatggtca

SEQ ID NO: 212325 - DNA, 15 bp, Homo sapiens
gagtgtaccatggtc

SEQ ID NO: 212326 - DNA, 15 bp, Homo sapiens
tgagtgtaccatggt

SEQ ID NO: 212327 - DNA, 15 bp, Homo sapiens
ctgagtgtaccatgg

SEQ ID NO: 212328 - DNA, 15 bp, Homo sapiens
gctgagtgtaccatg

SEQ ID NO: 212329 - DNA, 15 bp, Homo sapiens
tgctgagtgtaccat

SEQ ID NO: 212330 - DNA, 15 bp, Homo sapiens
gtgctgagtgtacca

SEQ ID NO: 212331 - DNA, 15 bp, Homo sapiens
cgtgctgagtgtacc

SEQ ID NO: 212332 - DNA, 15 bp, Homo sapiens
ccgtgctgagtgtac

SEQ ID NO: 212333 - DNA, 15 bp, Homo sapiens
tccgtgctgagtgta

SEQ ID NO: 212334 - DNA, 15 bp, Homo sapiens
atccgtgctgagtgt

SEQ ID NO: 212335 - DNA, 15 bp, Homo sapiens
catccgtgctgagtg

SEQ ID NO: 212336 - DNA, 15 bp, Homo sapiens
tcatccgtgctgagt

SEQ ID NO: 212337 - DNA, 15 bp, Homo sapiens
ttcatccgtgctgag

SEQ ID NO: 212338 - DNA, 15 bp, Homo sapiens
tttcatccgtgctga

SEQ ID NO: 212339 - DNA, 15 bp, Homo sapiens
atttcatccgtgctg

SEQ ID NO: 212340 - DNA, 15 bp, Homo sapiens
catttcatccgtgct

SEQ ID NO: 212341 - DNA, 15 bp, Homo sapiens
tcatttcatccgtgc

SEQ ID NO: 212342 - DNA, 15 bp, Homo sapiens
ttcatttcatccgtg

SEQ ID NO: 212343 - DNA, 15 bp, Homo sapiens
tttcatttcatccgt

SEQ ID NO: 212344 - DNA, 15 bp, Homo sapiens
gtttcatttcatccg

SEQ ID NO: 212345 - DNA, 15 bp, Homo sapiens
tgtttcatttcatcc

SEQ ID NO: 212346 - DNA, 15 bp, Homo sapiens
ctgtttcatttcatc

SEQ ID NO: 212347 - DNA, 15 bp, Homo sapiens
actgtttcatttcat

SEQ ID NO: 212348 - DNA, 15 bp, Homo sapiens
cactgtttcatttca

SEQ ID NO: 212349 - DNA, 15 bp, Homo sapiens
acactgtttcatttc

SEQ ID NO: 212350 - DNA, 15 bp, Homo sapiens
aacactgtttcattt

SEQ ID NO: 212351 - DNA, 15 bp, Homo sapiens
aaacactgtttcatt

SEQ ID NO: 212352 - DNA, 15 bp, Homo sapiens
taaacactgtttcat

SEQ ID NO: 212353 - DNA, 15 bp, Homo sapiens
ctaaacactgtttca

SEQ ID NO: 212354 - DNA, 15 bp, Homo sapiens
tctaaacactgtttc

SEQ ID NO: 212355 - DNA, 15 bp, Homo sapiens
ttctaaacactgttt

SEQ ID NO: 212356 - DNA, 15 bp, Homo sapiens
tttctaaacactgtt

SEQ ID NO: 212357 - DNA, 15 bp, Homo sapiens
gtttctaaacactgt

SEQ ID NO: 212358 - DNA, 15 bp, Homo sapiens
cgtttctaaacactg

SEQ ID NO: 212359 - DNA, 15 bp, Homo sapiens
acgtttctaaacact

SEQ ID NO: 212360 - DNA, 15 bp, Homo sapiens
gacgtttctaaacac

SEQ ID NO: 212361 - DNA, 15 bp, Homo sapiens
tgacgtttctaaaca

SEQ ID NO: 212362 - DNA, 15 bp, Homo sapiens
ctgacgtttctaaac

SEQ ID NO: 212363 - DNA, 15 bp, Homo sapiens
actgacgtttctaaa

SEQ ID NO: 212364 - DNA, 15 bp, Homo sapiens
gactgacgtttctaa

SEQ ID NO: 212365 - DNA, 15 bp, Homo sapiens
agactgacgtttcta

SEQ ID NO: 212366 - DNA, 15 bp, Homo sapiens
aagactgacgtttct

SEQ ID NO: 212367 - DNA, 15 bp, Homo sapiens
gaagactgacgtttc

SEQ ID NO: 212368 - DNA, 15 bp, Homo sapiens
agaagactgacgttt

SEQ ID NO: 212369 - DNA, 15 bp, Homo sapiens
gagaagactgacgtt

SEQ ID NO: 212370 - DNA, 15 bp, Homo sapiens
agagaagactgacgt

SEQ ID NO: 212371 - DNA, 15 bp, Homo sapiens
aagagaagactgacg

SEQ ID NO: 212372 - DNA, 15 bp, Homo sapiens
aaagagaagactgac

SEQ ID NO: 212373 - DNA, 15 bp, Homo sapiens
aaaagagaagactga

SEQ ID NO: 212374 - DNA, 15 bp, Homo sapiens
caaaagagaagactg

SEQ ID NO: 212375 - DNA, 15 bp, Homo sapiens
acaaaagagaagact

SEQ ID NO: 212376 - DNA, 15 bp, Homo sapiens
tacaaaagagaagac

SEQ ID NO: 212377 - DNA, 15 bp, Homo sapiens
ttacaaaagagaaga

SEQ ID NO: 212378 - DNA, 15 bp, Homo sapiens
attacaaaagagaag

SEQ ID NO: 212379 - DNA, 15 bp, Homo sapiens
cattacaaaagagaa

SEQ ID NO: 212380 - DNA, 15 bp, Homo sapiens
gcattacaaaagaga

SEQ ID NO: 212381 - DNA, 15 bp, Homo sapiens
ggcattacaaaagag

SEQ ID NO: 212382 - DNA, 15 bp, Homo sapiens
gggcattacaaaaga

SEQ ID NO: 212383 - DNA, 15 bp, Homo sapiens
agggcattacaaaag

SEQ ID NO: 212384 - DNA, 15 bp, Homo sapiens
cagggcattacaaaa

SEQ ID NO: 212385 - DNA, 15 bp, Homo sapiens
acagggcattacaaa

SEQ ID NO: 212386 - DNA, 15 bp, Homo sapiens
tacagggcattacaa

SEQ ID NO: 212387 - DNA, 15 bp, Homo sapiens
ctacagggcattaca

SEQ ID NO: 212388 - DNA, 15 bp, Homo sapiens
actacagggcattac

SEQ ID NO: 212389 - DNA, 15 bp, Homo sapiens
gactacagggcatta

SEQ ID NO: 212390 - DNA, 15 bp, Homo sapiens
agactacagggcatt

SEQ ID NO: 212391 - DNA, 15 bp, Homo sapiens
gagactacagggcat

SEQ ID NO: 212392 - DNA, 15 bp, Homo sapiens
agagactacagggca

SEQ ID NO: 212393 - DNA, 15 bp, Homo sapiens
gagagactacagggc

SEQ ID NO: 212394 - DNA, 15 bp, Homo sapiens
agagagactacaggg

SEQ ID NO: 212395 - DNA, 15 bp, Homo sapiens
cagagagactacagg

SEQ ID NO: 212396 - DNA, 15 bp, Homo sapiens
acagagagactacag

SEQ ID NO: 212397 - DNA, 15 bp, Homo sapiens
tacagagagactaca

SEQ ID NO: 212398 - DNA, 15 bp, Homo sapiens
atacagagagactac

SEQ ID NO: 212399 - DNA, 15 bp, Homo sapiens
catacagagagacta

SEQ ID NO: 212400 - DNA, 15 bp, Homo sapiens
acatacagagagact

SEQ ID NO: 212401 - DNA, 15 bp, Homo sapiens
aacatacagagagac

SEQ ID NO: 212402 - DNA, 15 bp, Homo sapiens
taacatacagagaga

SEQ ID NO: 212403 - DNA, 15 bp, Homo sapiens
ataacatacagagag

SEQ ID NO: 212404 - DNA, 15 bp, Homo sapiens
tataacatacagaga

SEQ ID NO: 212405 - DNA, 15 bp, Homo sapiens
atataacatacagag

SEQ ID NO: 212406 - DNA, 15 bp, Homo sapiens
catataacatacaga

SEQ ID NO: 212407 - DNA, 15 bp, Homo sapiens
acatataacatacag

SEQ ID NO: 212408 - DNA, 15 bp, Homo sapiens
gacatataacataca

SEQ ID NO: 212409 - DNA, 15 bp, Homo sapiens
tgacatataacatac

SEQ ID NO: 212410 - DNA, 15 bp, Homo sapiens
gtgacatataacata

SEQ ID NO: 212411 - DNA, 15 bp, Homo sapiens
tgtgacatataacat

SEQ ID NO: 212412 - DNA, 15 bp, Homo sapiens
atgtgacatataaca

SEQ ID NO: 212413 - DNA, 15 bp, Homo sapiens
aatgtgacatataac

SEQ ID NO: 212414 - DNA, 15 bp, Homo sapiens
aaatgtgacatataa

SEQ ID NO: 212415 - DNA, 15 bp, Homo sapiens
aaaatgtgacatata

SEQ ID NO: 212416 - DNA, 15 bp, Homo sapiens
caaaatgtgacatat

SEQ ID NO: 212417 - DNA, 15 bp, Homo sapiens
acaaaatgtgacata

SEQ ID NO: 212418 - DNA, 15 bp, Homo sapiens
tacaaaatgtgacat

SEQ ID NO: 212419 - DNA, 15 bp, Homo sapiens
ttacaaaatgtgaca

SEQ ID NO: 212420 - DNA, 15 bp, Homo sapiens
attacaaaatgtgac

SEQ ID NO: 212421 - DNA, 15 bp, Homo sapiens
aattacaaaatgtga

SEQ ID NO: 212422 - DNA, 15 bp, Homo sapiens
taattacaaaatgtg

SEQ ID NO: 212423 - DNA, 15 bp, Homo sapiens
ttaattacaaaatgt

SEQ ID NO: 212424 - DNA, 15 bp, Homo sapiens
gttaattacaaaatg

SEQ ID NO: 212425 - DNA, 15 bp, Homo sapiens
tgttaattacaaaat

SEQ ID NO: 212426 - DNA, 15 bp, Homo sapiens
ctgttaattacaaaa

SEQ ID NO: 212427 - DNA, 15 bp, Homo sapiens
gctgttaattacaaa

SEQ ID NO: 212428 - DNA, 15 bp, Homo sapiens
agctgttaattacaa

SEQ ID NO: 212429 - DNA, 15 bp, Homo sapiens
aagctgttaattaca

SEQ ID NO: 212430 - DNA, 15 bp, Homo sapiens
caagctgttaattac

SEQ ID NO: 212431 - DNA, 15 bp, Homo sapiens
gcaagctgttaatta

SEQ ID NO: 212432 - DNA, 15 bp, Homo sapiens
agcaagctgttaatt

SEQ ID NO: 212433 - DNA, 15 bp, Homo sapiens
cagcaagctgttaat

SEQ ID NO: 212434 - DNA, 15 bp, Homo sapiens
ccagcaagctgttaa

SEQ ID NO: 212435 - DNA, 15 bp, Homo sapiens
accagcaagctgtta

SEQ ID NO: 212436 - DNA, 15 bp, Homo sapiens
caccagcaagctgtt

SEQ ID NO: 212437 - DNA, 15 bp, Homo sapiens
tcaccagcaagctgt

SEQ ID NO: 212438 - DNA, 15 bp, Homo sapiens
ttcaccagcaagctg

SEQ ID NO: 212439 - DNA, 15 bp, Homo sapiens
tttcaccagcaagct

SEQ ID NO: 212440 - DNA, 15 bp, Homo sapiens
ttttcaccagcaagc

SEQ ID NO: 212441 - DNA, 15 bp, Homo sapiens
cttttcaccagcaag

SEQ ID NO: 212442 - DNA, 15 bp, Homo sapiens
ccttttcaccagcaa

SEQ ID NO: 212443 - DNA, 15 bp, Homo sapiens
tccttttcaccagca

SEQ ID NO: 212444 - DNA, 15 bp, Homo sapiens
gtccttttcaccagc

SEQ ID NO: 212445 - DNA, 15 bp, Homo sapiens
ggtccttttcaccag

SEQ ID NO: 212446 - DNA, 15 bp, Homo sapiens
gggtccttttcacca

SEQ ID NO: 212447 - DNA, 15 bp, Homo sapiens
ggggtccttttcacc

SEQ ID NO: 212448 - DNA, 15 bp, Homo sapiens
tggggtccttttcac

SEQ ID NO: 212449 - DNA, 15 bp, Homo sapiens
gtggggtccttttca

SEQ ID NO: 212450 - DNA, 15 bp, Homo sapiens
cgtggggtccttttc

SEQ ID NO: 212451 - DNA, 15 bp, Homo sapiens
tcgtggggtcctttt

SEQ ID NO: 212452 - DNA, 15 bp, Homo sapiens
ttcgtggggtccttt

SEQ ID NO: 212453 - DNA, 15 bp, Homo sapiens
cttcgtggggtcctt

SEQ ID NO: 212454 - DNA, 15 bp, Homo sapiens
acttcgtggggtcct

SEQ ID NO: 212455 - DNA, 15 bp, Homo sapiens
cacttcgtggggtcc

SEQ ID NO: 212456 - DNA, 15 bp, Homo sapiens
acacttcgtggggtc

SEQ ID NO: 212457 - DNA, 15 bp, Homo sapiens
aacacttcgtggggt

SEQ ID NO: 212458 - DNA, 15 bp, Homo sapiens
caacacttcgtgggg

SEQ ID NO: 212459 - DNA, 15 bp, Homo sapiens
ccaacacttcgtggg

SEQ ID NO: 212460 - DNA, 15 bp, Homo sapiens
tccaacacttcgtgg

SEQ ID NO: 212461 - DNA, 15 bp, Homo sapiens
atccaacacttcgtg

SEQ ID NO: 212462 - DNA, 15 bp, Homo sapiens
tatccaacacttcgt

SEQ ID NO: 212463 - DNA, 15 bp, Homo sapiens
atatccaacacttcg

SEQ ID NO: 212464 - DNA, 15 bp, Homo sapiens
tatatccaacacttc

SEQ ID NO: 212465 - DNA, 15 bp, Homo sapiens
ttatatccaacactt

SEQ ID NO: 212466 - DNA, 15 bp, Homo sapiens
cttatatccaacact

SEQ ID NO: 212467 - DNA, 15 bp, Homo sapiens
gcttatatccaacac

SEQ ID NO: 212468 - DNA, 15 bp, Homo sapiens
ggcttatatccaaca

SEQ ID NO: 212469 - DNA, 15 bp, Homo sapiens
tggcttatatccaac

SEQ ID NO: 212470 - DNA, 15 bp, Homo sapiens
ctggcttatatccaa

SEQ ID NO: 212471 - DNA, 15 bp, Homo sapiens
tctggcttatatcca

SEQ ID NO: 212472 - DNA, 15 bp, Homo sapiens
gtctggcttatatcc

SEQ ID NO: 212473 - DNA, 15 bp, Homo sapiens
agtctggcttatatc

SEQ ID NO: 212474 - DNA, 15 bp, Homo sapiens
cagtctggcttatat

SEQ ID NO: 212475 - DNA, 15 bp, Homo sapiens
acagtctggcttata

SEQ ID NO: 212476 - DNA, 15 bp, Homo sapiens
tacagtctggcttat

SEQ ID NO: 212477 - DNA, 15 bp, Homo sapiens
ttacagtctggctta

SEQ ID NO: 212478 - DNA, 15 bp, Homo sapiens
cttacagtctggctt

SEQ ID NO: 212479 - DNA, 15 bp, Homo sapiens
acttacagtctggct

SEQ ID NO: 212480 - DNA, 15 bp, Homo sapiens
cacttacagtctggc

SEQ ID NO: 212481 - DNA, 15 bp, Homo sapiens
tcacttacagtctgg

SEQ ID NO: 212482 - DNA, 15 bp, Homo sapiens
ttcacttacagtctg

SEQ ID NO: 212483 - DNA, 15 bp, Homo sapiens
attcacttacagtct

SEQ ID NO: 212484 - DNA, 15 bp, Homo sapiens
aattcacttacagtc

SEQ ID NO: 212485 - DNA, 15 bp, Homo sapiens
taattcacttacagt

SEQ ID NO: 212486 - DNA, 15 bp, Homo sapiens
gtaattcacttacag

SEQ ID NO: 212487 - DNA, 15 bp, Homo sapiens
agtaattcacttaca

SEQ ID NO: 212488 - DNA, 15 bp, Homo sapiens
aagtaattcacttac

SEQ ID NO: 212489 - DNA, 15 bp, Homo sapiens
aaagtaattcactta

SEQ ID NO: 212490 - DNA, 15 bp, Homo sapiens
aaaagtaattcactt

SEQ ID NO: 212491 - DNA, 15 bp, Homo sapiens
aaaaagtaattcact

SEQ ID NO: 212492 - DNA, 15 bp, Homo sapiens
aaaaaagtaattcac

SEQ ID NO: 212493 - DNA, 15 bp, Homo sapiens
aaaaaaagtaattca

SEQ ID NO: 212494 - DNA, 15 bp, Homo sapiens
caaaaaaagtaattc

SEQ ID NO: 212495 - DNA, 15 bp, Homo sapiens
acaaaaaaagtaatt

SEQ ID NO: 212496 - DNA, 15 bp, Homo sapiens
gacaaaaaaagtaat

SEQ ID NO: 212497 - DNA, 15 bp, Homo sapiens
tgacaaaaaaagtaa

SEQ ID NO: 212498 - DNA, 15 bp, Homo sapiens
ttgacaaaaaaagta

SEQ ID NO: 212499 - DNA, 15 bp, Homo sapiens
attgacaaaaaaagt

SEQ ID NO: 212500 - DNA, 15 bp, Homo sapiens
gattgacaaaaaaag

SEQ ID NO: 212501 - DNA, 15 bp, Homo sapiens
tgattgacaaaaaaa

SEQ ID NO: 212502 - DNA, 15 bp, Homo sapiens
atgattgacaaaaaa

SEQ ID NO: 212503 - DNA, 15 bp, Homo sapiens
aatgattgacaaaaa

SEQ ID NO: 212504 - DNA, 15 bp, Homo sapiens
aaatgattgacaaaa

SEQ ID NO: 212505 - DNA, 15 bp, Homo sapiens
taaatgattgacaaa

SEQ ID NO: 212506 - DNA, 15 bp, Homo sapiens
ttaaatgattgacaa

SEQ ID NO: 212507 - DNA, 15 bp, Homo sapiens
gttaaatgattgaca

SEQ ID NO: 212508 - DNA, 15 bp, Homo sapiens
ggttaaatgattgac

SEQ ID NO: 212509 - DNA, 15 bp, Homo sapiens
tggttaaatgattga

SEQ ID NO: 212510 - DNA, 15 bp, Homo sapiens
atggttaaatgattg

SEQ ID NO: 212511 - DNA, 15 bp, Homo sapiens
gatggttaaatgatt

SEQ ID NO: 212512 - DNA, 15 bp, Homo sapiens
agatggttaaatgat

SEQ ID NO: 212513 - DNA, 15 bp, Homo sapiens
aagatggttaaatga

SEQ ID NO: 212514 - DNA, 15 bp, Homo sapiens
aaagatggttaaatg

SEQ ID NO: 212515 - DNA, 15 bp, Homo sapiens
taaagatggttaaat

SEQ ID NO: 212516 - DNA, 15 bp, Homo sapiens
ttaaagatggttaaa

SEQ ID NO: 212517 - DNA, 15 bp, Homo sapiens
gttaaagatggttaa

SEQ ID NO: 212518 - DNA, 15 bp, Homo sapiens
ggttaaagatggtta

SEQ ID NO: 212519 - DNA, 15 bp, Homo sapiens
aggttaaagatggtt

SEQ ID NO: 212520 - DNA, 15 bp, Homo sapiens
taggttaaagatggt

SEQ ID NO: 212521 - DNA, 15 bp, Homo sapiens
ttaggttaaagatgg

SEQ ID NO: 212522 - DNA, 15 bp, Homo sapiens
tttaggttaaagatg

SEQ ID NO: 212523 - DNA, 15 bp, Homo sapiens
ttttaggttaaagat

SEQ ID NO: 212524 - DNA, 15 bp, Homo sapiens
cttttaggttaaaga

SEQ ID NO: 212525 - DNA, 15 bp, Homo sapiens
tcttttaggttaaag

SEQ ID NO: 212526 - DNA, 15 bp, Homo sapiens
ctcttttaggttaaa

SEQ ID NO: 212527 - DNA, 15 bp, Homo sapiens
actcttttaggttaa

SEQ ID NO: 212528 - DNA, 15 bp, Homo sapiens
aactcttttaggtta

SEQ ID NO: 212529 - DNA, 15 bp, Homo sapiens
aaactcttttaggtt

SEQ ID NO: 212530 - DNA, 15 bp, Homo sapiens
aaaactcttttaggt

SEQ ID NO: 212531 - DNA, 15 bp, Homo sapiens
taaaactcttttagg

SEQ ID NO: 212532 - DNA, 15 bp, Homo sapiens
ataaaactcttttag

SEQ ID NO: 212533 - DNA, 15 bp, Homo sapiens
cataaaactctttta

SEQ ID NO: 212534 - DNA, 15 bp, Homo sapiens
acataaaactctttt

SEQ ID NO: 212535 - DNA, 15 bp, Homo sapiens
cacataaaactcttt

SEQ ID NO: 212536 - DNA, 15 bp, Homo sapiens
tcacataaaactctt

SEQ ID NO: 212537 - DNA, 15 bp, Homo sapiens
ttcacataaaactct

SEQ ID NO: 212538 - DNA, 15 bp, Homo sapiens
tttcacataaaactc

SEQ ID NO: 212539 - DNA, 15 bp, Homo sapiens
atttcacataaaact

SEQ ID NO: 212540 - DNA, 15 bp, Homo sapiens
catttcacataaaac

SEQ ID NO: 212541 - DNA, 15 bp, Homo sapiens
ccatttcacataaaa

SEQ ID NO: 212542 - DNA, 15 bp, Homo sapiens
gccatttcacataaa

SEQ ID NO: 212543 - DNA, 15 bp, Homo sapiens
agccatttcacataa

SEQ ID NO: 212544 - DNA, 15 bp, Homo sapiens
aagccatttcacata

SEQ ID NO: 212545 - DNA, 15 bp, Homo sapiens
taagccatttcacat

SEQ ID NO: 212546 - DNA, 15 bp, Homo sapiens
ataagccatttcaca

SEQ ID NO: 212547 - DNA, 15 bp, Homo sapiens
tataagccatttcac

SEQ ID NO: 212548 - DNA, 15 bp, Homo sapiens
ttataagccatttca

SEQ ID NO: 212549 - DNA, 15 bp, Homo sapiens
attataagccatttc

SEQ ID NO: 212550 - DNA, 15 bp, Homo sapiens
aattataagccattt

SEQ ID NO: 212551 - DNA, 15 bp, Homo sapiens
caattataagccatt

SEQ ID NO: 212552 - DNA, 15 bp, Homo sapiens
gcaattataagccat

SEQ ID NO: 212553 - DNA, 15 bp, Homo sapiens
agcaattataagcca

SEQ ID NO: 212554 - DNA, 15 bp, Homo sapiens
aagcaattataagcc

SEQ ID NO: 212555 - DNA, 15 bp, Homo sapiens
taagcaattataagc

SEQ ID NO: 212556 - DNA, 15 bp, Homo sapiens
ctaagcaattataag

SEQ ID NO: 212557 - DNA, 15 bp, Homo sapiens
tctaagcaattataa

SEQ ID NO: 212558 - DNA, 15 bp, Homo sapiens
ctctaagcaattata

SEQ ID NO: 212559 - DNA, 15 bp, Homo sapiens
tctctaagcaattat

SEQ ID NO: 212560 - DNA, 15 bp, Homo sapiens
ttctctaagcaatta

SEQ ID NO: 212561 - DNA, 15 bp, Homo sapiens
attctctaagcaatt

SEQ ID NO: 212562 - DNA, 15 bp, Homo sapiens
tattctctaagcaat

SEQ ID NO: 212563 - DNA, 15 bp, Homo sapiens
atattctctaagcaa

SEQ ID NO: 212564 - DNA, 15 bp, Homo sapiens
aatattctctaagca

SEQ ID NO: 212565 - DNA, 15 bp, Homo sapiens
aaatattctctaagc

SEQ ID NO: 212566 - DNA, 15 bp, Homo sapiens
caaatattctctaag

SEQ ID NO: 212567 - DNA, 15 bp, Homo sapiens
acaaatattctctaa

SEQ ID NO: 212568 - DNA, 15 bp, Homo sapiens
tacaaatattctcta

SEQ ID NO: 212569 - DNA, 15 bp, Homo sapiens
ctacaaatattctct

SEQ ID NO: 212570 - DNA, 15 bp, Homo sapiens
tctacaaatattctc

SEQ ID NO: 212571 - DNA, 15 bp, Homo sapiens
ctctacaaatattct

SEQ ID NO: 212572 - DNA, 15 bp, Homo sapiens
tctctacaaatattc

SEQ ID NO: 212573 - DNA, 15 bp, Homo sapiens
ctctctacaaatatt

SEQ ID NO: 212574 - DNA, 15 bp, Homo sapiens
cctctctacaaatat

SEQ ID NO: 212575 - DNA, 15 bp, Homo sapiens
gcctctctacaaata

SEQ ID NO: 212576 - DNA, 15 bp, Homo sapiens
tgcctctctacaaat

SEQ ID NO: 212577 - DNA, 15 bp, Homo sapiens
gtgcctctctacaaa

SEQ ID NO: 212578 - DNA, 15 bp, Homo sapiens
tgtgcctctctacaa

SEQ ID NO: 212579 - DNA, 15 bp, Homo sapiens
atgtgcctctctaca

SEQ ID NO: 212580 - DNA, 15 bp, Homo sapiens
aatgtgcctctctac

SEQ ID NO: 212581 - DNA, 15 bp, Homo sapiens
aaatgtgcctctcta

SEQ ID NO: 212582 - DNA, 15 bp, Homo sapiens
caaatgtgcctctct

SEQ ID NO: 212583 - DNA, 15 bp, Homo sapiens
gcaaatgtgcctctc

SEQ ID NO: 212584 - DNA, 15 bp, Homo sapiens
ggcaaatgtgcctct

SEQ ID NO: 212585 - DNA, 15 bp, Homo sapiens
tggcaaatgtgcctc

SEQ ID NO: 212586 - DNA, 15 bp, Homo sapiens
ctggcaaatgtgcct

SEQ ID NO: 212587 - DNA, 15 bp, Homo sapiens
actggcaaatgtgcc

SEQ ID NO: 212588 - DNA, 15 bp, Homo sapiens
tactggcaaatgtgc

SEQ ID NO: 212589 - DNA, 15 bp, Homo sapiens
atactggcaaatgtg

SEQ ID NO: 212590 - DNA, 15 bp, Homo sapiens
aatactggcaaatgt

SEQ ID NO: 212591 - DNA, 15 bp, Homo sapiens
taatactggcaaatg

SEQ ID NO: 212592 - DNA, 15 bp, Homo sapiens
ctaatactggcaaat

SEQ ID NO: 212593 - DNA, 15 bp, Homo sapiens
tctaatactggcaaa

SEQ ID NO: 212594 - DNA, 15 bp, Homo sapiens
atctaatactggcaa

SEQ ID NO: 212595 - DNA, 15 bp, Homo sapiens
aatctaatactggca

SEQ ID NO: 212596 - DNA, 15 bp, Homo sapiens
aaatctaatactggc

SEQ ID NO: 212597 - DNA, 15 bp, Homo sapiens
taaatctaatactgg

SEQ ID NO: 212598 - DNA, 15 bp, Homo sapiens
ttaaatctaatactg

SEQ ID NO: 212599 - DNA, 15 bp, Homo sapiens
tttaaatctaatact

SEQ ID NO: 212600 - DNA, 15 bp, Homo sapiens
ttttaaatctaatac

SEQ ID NO: 212601 - DNA, 15 bp, Homo sapiens
cttttaaatctaata

SEQ ID NO: 212602 - DNA, 15 bp, Homo sapiens
acttttaaatctaat

SEQ ID NO: 212603 - DNA, 15 bp, Homo sapiens
cacttttaaatctaa

SEQ ID NO: 212604 - DNA, 15 bp, Homo sapiens
tcacttttaaatcta

SEQ ID NO: 212605 - DNA, 15 bp, Homo sapiens
atcacttttaaatct

SEQ ID NO: 212606 - DNA, 15 bp, Homo sapiens
catcacttttaaatc

SEQ ID NO: 212607 - DNA, 15 bp, Homo sapiens
acatcacttttaaat

SEQ ID NO: 212608 - DNA, 15 bp, Homo sapiens
aacatcacttttaaa

SEQ ID NO: 212609 - DNA, 15 bp, Homo sapiens
aaacatcacttttaa

SEQ ID NO: 212610 - DNA, 15 bp, Homo sapiens
aaaacatcactttta

SEQ ID NO: 212611 - DNA, 15 bp, Homo sapiens
gaaaacatcactttt

SEQ ID NO: 212612 - DNA, 15 bp, Homo sapiens
agaaaacatcacttt

SEQ ID NO: 212613 - DNA, 15 bp, Homo sapiens
aagaaaacatcactt

SEQ ID NO: 212614 - DNA, 15 bp, Homo sapiens
aaagaaaacatcact

SEQ ID NO: 212615 - DNA, 15 bp, Homo sapiens
taaagaaaacatcac

SEQ ID NO: 212616 - DNA, 15 bp, Homo sapiens
ataaagaaaacatca

SEQ ID NO: 212617 - DNA, 15 bp, Homo sapiens
gataaagaaaacatc

SEQ ID NO: 212618 - DNA, 15 bp, Homo sapiens
agataaagaaaacat

SEQ ID NO: 212619 - DNA, 15 bp, Homo sapiens
tagataaagaaaaca

SEQ ID NO: 212620 - DNA, 15 bp, Homo sapiens
ttagataaagaaaac

SEQ ID NO: 212621 - DNA, 15 bp, Homo sapiens
tttagataaagaaaa

SEQ ID NO: 212622 - DNA, 15 bp, Homo sapiens
atttagataaagaaa

SEQ ID NO: 212623 - DNA, 15 bp, Homo sapiens
catttagataaagaa

SEQ ID NO: 212624 - DNA, 15 bp, Homo sapiens
tcatttagataaaga

SEQ ID NO: 212625 - DNA, 15 bp, Homo sapiens
atcatttagataaag

SEQ ID NO: 212626 - DNA, 15 bp, Homo sapiens
catcatttagataaa

SEQ ID NO: 212627 - DNA, 15 bp, Homo sapiens
tcatcatttagataa

SEQ ID NO: 212628 - DNA, 15 bp, Homo sapiens
ttcatcatttagata

SEQ ID NO: 212629 - DNA, 15 bp, Homo sapiens
attcatcatttagat

SEQ ID NO: 212630 - DNA, 15 bp, Homo sapiens
aattcatcatttaga

SEQ ID NO: 212631 - DNA, 15 bp, Homo sapiens
taattcatcatttag

SEQ ID NO: 212632 - DNA, 15 bp, Homo sapiens
ataattcatcattta

SEQ ID NO: 212633 - DNA, 15 bp, Homo sapiens
cataattcatcattt

SEQ ID NO: 212634 - DNA, 15 bp, Homo sapiens
tcataattcatcatt

SEQ ID NO: 212635 - DNA, 15 bp, Homo sapiens
atcataattcatcat

SEQ ID NO: 212636 - DNA, 15 bp, Homo sapiens
aatcataattcatca

SEQ ID NO: 212637 - DNA, 15 bp, Homo sapiens
gaatcataattcatc

SEQ ID NO: 212638 - DNA, 15 bp, Homo sapiens
agaatcataattcat

SEQ ID NO: 212639 - DNA, 15 bp, Homo sapiens
aagaatcataattca

SEQ ID NO: 212640 - DNA, 15 bp, Homo sapiens
aaagaatcataattc

SEQ ID NO: 212641 - DNA, 15 bp, Homo sapiens
aaaagaatcataatt

SEQ ID NO: 212642 - DNA, 15 bp, Homo sapiens
aaaaagaatcataat

SEQ ID NO: 212643 - DNA, 15 bp, Homo sapiens
taaaaagaatcataa

SEQ ID NO: 212644 - DNA, 15 bp, Homo sapiens
aactaaaaagaatca

SEQ ID NO: 212645 - DNA, 15 bp, Homo sapiens
caactaaaaagaatc

SEQ ID NO: 212646 - DNA, 15 bp, Homo sapiens
acaactaaaaagaat

SEQ ID NO: 212647 - DNA, 15 bp, Homo sapiens
aacaactaaaaagaa

SEQ ID NO: 212648 - DNA, 15 bp, Homo sapiens
caacaactaaaaaga

SEQ ID NO: 212649 - DNA, 15 bp, Homo sapiens
ccaacaactaaaaag

SEQ ID NO: 212650 - DNA, 15 bp, Homo sapiens
tccaacaactaaaaa

SEQ ID NO: 212651 - DNA, 15 bp, Homo sapiens
atccaacaactaaaa

SEQ ID NO: 212652 - DNA, 15 bp, Homo sapiens
aatccaacaactaaa

SEQ ID NO: 212653 - DNA, 15 bp, Homo sapiens
aaatccaacaactaa

SEQ ID NO: 212654 - DNA, 15 bp, Homo sapiens
caaatccaacaacta

SEQ ID NO: 212655 - DNA, 15 bp, Homo sapiens
tcaaatccaacaact

SEQ ID NO: 212656 - DNA, 15 bp, Homo sapiens
ttcaaatccaacaac

SEQ ID NO: 212657 - DNA, 15 bp, Homo sapiens
tttcaaatccaacaa

SEQ ID NO: 212658 - DNA, 15 bp, Homo sapiens
atttcaaatccaaca

SEQ ID NO: 212659 - DNA, 15 bp, Homo sapiens
aatttcaaatccaac

SEQ ID NO: 212660 - DNA, 15 bp, Homo sapiens
gaatttcaaatccaa

SEQ ID NO: 212661 - DNA, 15 bp, Homo sapiens
ggaatttcaaatcca

SEQ ID NO: 212662 - DNA, 15 bp, Homo sapiens
tggaatttcaaatcc

SEQ ID NO: 212663 - DNA, 15 bp, Homo sapiens
ctggaatttcaaatc

SEQ ID NO: 212664 - DNA, 15 bp, Homo sapiens
tctggaatttcaaat

SEQ ID NO: 212665 - DNA, 15 bp, Homo sapiens
gtctggaatttcaaa

SEQ ID NO: 212666 - DNA, 15 bp, Homo sapiens
tgtctggaatttcaa

SEQ ID NO: 212667 - DNA, 15 bp, Homo sapiens
ttgtctggaatttca

SEQ ID NO: 212668 - DNA, 15 bp, Homo sapiens
cttgtctggaatttc

SEQ ID NO: 212669 - DNA, 15 bp, Homo sapiens
acttgtctggaattt

SEQ ID NO: 212670 - DNA, 15 bp, Homo sapiens
aacttgtctggaatt

SEQ ID NO: 212671 - DNA, 15 bp, Homo sapiens
aaacttgtctggaat

SEQ ID NO: 212672 - DNA, 15 bp, Homo sapiens
caaacttgtctggaa

SEQ ID NO: 212673 - DNA, 15 bp, Homo sapiens
acaaacttgtctgga

SEQ ID NO: 212674 - DNA, 15 bp, Homo sapiens
aacaaacttgtctgg

SEQ ID NO: 212675 - DNA, 15 bp, Homo sapiens
caacaaacttgtctg

SEQ ID NO: 212676 - DNA, 15 bp, Homo sapiens
acaacaaacttgtct

SEQ ID NO: 212677 - DNA, 15 bp, Homo sapiens
tacaacaaacttgtc

SEQ ID NO: 212678 - DNA, 15 bp, Homo sapiens
ctacaacaaacttgt

SEQ ID NO: 212679 - DNA, 15 bp, Homo sapiens
cctacaacaaacttg

SEQ ID NO: 212680 - DNA, 15 bp, Homo sapiens
tcctacaacaaactt

SEQ ID NO: 212681 - DNA, 15 bp, Homo sapiens
atcctacaacaaact

SEQ ID NO: 212682 - DNA, 15 bp, Homo sapiens
tatcctacaacaaac

SEQ ID NO: 212683 - DNA, 15 bp, Homo sapiens
atatcctacaacaaa

SEQ ID NO: 212684 - DNA, 15 bp, Homo sapiens
catatcctacaacaa

SEQ ID NO: 212685 - DNA, 15 bp, Homo sapiens
gcatatcctacaaca

SEQ ID NO: 212686 - DNA, 15 bp, Homo sapiens
ggcatatcctacaac

SEQ ID NO: 212687 - DNA, 15 bp, Homo sapiens
gggcatatcctacaa

SEQ ID NO: 212688 - DNA, 15 bp, Homo sapiens
agggcatatcctaca

SEQ ID NO: 212689 - DNA, 15 bp, Homo sapiens
aagggcatatcctac

SEQ ID NO: 212690 - DNA, 15 bp, Homo sapiens
caagggcatatccta

SEQ ID NO: 212691 - DNA, 15 bp, Homo sapiens
tcaagggcatatcct

SEQ ID NO: 212692 - DNA, 15 bp, Homo sapiens
gtcaagggcatatcc

SEQ ID NO: 212693 - DNA, 15 bp, Homo sapiens
agtcaagggcatatc

SEQ ID NO: 212694 - DNA, 15 bp, Homo sapiens
tagtcaagggcatat

SEQ ID NO: 212695 - DNA, 15 bp, Homo sapiens
atagtcaagggcata

SEQ ID NO: 212696 - DNA, 15 bp, Homo sapiens
tatagtcaagggcat

SEQ ID NO: 212697 - DNA, 15 bp, Homo sapiens
ttatagtcaagggca

SEQ ID NO: 212698 - DNA, 15 bp, Homo sapiens
attatagtcaagggc

SEQ ID NO: 212699 - DNA, 15 bp, Homo sapiens
cattatagtcaaggg

SEQ ID NO: 212700 - DNA, 15 bp, Homo sapiens
tcattatagtcaagg

SEQ ID NO: 212701 - DNA, 15 bp, Homo sapiens
ttcattatagtcaag

SEQ ID NO: 212702 - DNA, 15 bp, Homo sapiens
attcattatagtcaa

SEQ ID NO: 212703 - DNA, 15 bp, Homo sapiens
tattcattatagtca

SEQ ID NO: 212704 - DNA, 15 bp, Homo sapiens
gtattcattatagtc

SEQ ID NO: 212705 - DNA, 15 bp, Homo sapiens
agtattcattatagt

SEQ ID NO: 212706 - DNA, 15 bp, Homo sapiens
aagtattcattatag

SEQ ID NO: 212707 - DNA, 15 bp, Homo sapiens
gaagtattcattata

SEQ ID NO: 212708 - DNA, 15 bp, Homo sapiens
tgaagtattcattat

SEQ ID NO: 212709 - DNA, 15 bp, Homo sapiens
ctgaagtattcatta

SEQ ID NO: 212710 - DNA, 15 bp, Homo sapiens
cctgaagtattcatt

SEQ ID NO: 212711 - DNA, 15 bp, Homo sapiens
ccctgaagtattcat

SEQ ID NO: 212712 - DNA, 15 bp, Homo sapiens
tccctgaagtattca

SEQ ID NO: 212713 - DNA, 15 bp, Homo sapiens
atccctgaagtattc

SEQ ID NO: 212714 - DNA, 15 bp, Homo sapiens
aatccctgaagtatt

SEQ ID NO: 212715 - DNA, 15 bp, Homo sapiens
aaatccctgaagtat

SEQ ID NO: 212716 - DNA, 15 bp, Homo sapiens
caaatccctgaagta

SEQ ID NO: 212717 - DNA, 15 bp, Homo sapiens
tcaaatccctgaagt

SEQ ID NO: 212718 - DNA, 15 bp, Homo sapiens
ttcaaatccctgaag

SEQ ID NO: 212719 - DNA, 15 bp, Homo sapiens
attcaaatccctgaa

SEQ ID NO: 212720 - DNA, 15 bp, Homo sapiens
cattcaaatccctga

SEQ ID NO: 212721 - DNA, 15 bp, Homo sapiens
acattcaaatccctg

SEQ ID NO: 212722 - DNA, 15 bp, Homo sapiens
tacattcaaatccct

SEQ ID NO: 212723 - DNA, 15 bp, Homo sapiens
ttacattcaaatccc

SEQ ID NO: 212724 - DNA, 15 bp, Homo sapiens
cttacattcaaatcc

SEQ ID NO: 212725 - DNA, 15 bp, Homo sapiens
acttacattcaaatc

SEQ ID NO: 212726 - DNA, 15 bp, Homo sapiens
tacttacattcaaat

SEQ ID NO: 212727 - DNA, 15 bp, Homo sapiens
ttacttacattcaaa

SEQ ID NO: 212728 - DNA, 15 bp, Homo sapiens
attacttacattcaa

SEQ ID NO: 212729 - DNA, 15 bp, Homo sapiens
aattacttacattca

SEQ ID NO: 212730 - DNA, 15 bp, Homo sapiens
caattacttacattc

SEQ ID NO: 212731 - DNA, 15 bp, Homo sapiens
gcaattacttacatt

SEQ ID NO: 212732 - DNA, 15 bp, Homo sapiens
agcaattacttacat

SEQ ID NO: 212733 - DNA, 15 bp, Homo sapiens
aagcaattacttaca

SEQ ID NO: 212734 - DNA, 15 bp, Homo sapiens
gaagcaattacttac

SEQ ID NO: 212735 - DNA, 15 bp, Homo sapiens
agaagcaattactta

SEQ ID NO: 212736 - DNA, 15 bp, Homo sapiens
aagaagcaattactt

SEQ ID NO: 212737 - DNA, 15 bp, Homo sapiens
aaagaagcaattact

SEQ ID NO: 212738 - DNA, 15 bp, Homo sapiens
aaaagaagcaattac

SEQ ID NO: 212739 - DNA, 15 bp, Homo sapiens
aaaaagaagcaatta

SEQ ID NO: 212740 - DNA, 15 bp, Homo sapiens
gaaaaagaagcaatt

SEQ ID NO: 212741 - DNA, 15 bp, Homo sapiens
agaaaaagaagcaat

SEQ ID NO: 212742 - DNA, 15 bp, Homo sapiens
gagaaaaagaagcaa

SEQ ID NO: 212743 - DNA, 15 bp, Homo sapiens
tgagaaaaagaagca

SEQ ID NO: 212744 - DNA, 15 bp, Homo sapiens
gtgagaaaaagaagc

SEQ ID NO: 212745 - DNA, 15 bp, Homo sapiens
agtgagaaaaagaag

SEQ ID NO: 212746 - DNA, 15 bp, Homo sapiens
gagtgagaaaaagaa

SEQ ID NO: 212747 - DNA, 15 bp, Homo sapiens
tgagtgagaaaaaga

SEQ ID NO: 212748 - DNA, 15 bp, Homo sapiens
atgagtgagaaaaag

SEQ ID NO: 212749 - DNA, 15 bp, Homo sapiens
aatgagtgagaaaaa

SEQ ID NO: 212750 - DNA, 15 bp, Homo sapiens
aaatgagtgagaaaa

SEQ ID NO: 212751 - DNA, 15 bp, Homo sapiens
aaaatgagtgagaaa

SEQ ID NO: 212752 - DNA, 15 bp, Homo sapiens
aaaaatgagtgagaa

SEQ ID NO: 212753 - DNA, 15 bp, Homo sapiens
gaaaaatgagtgaga

SEQ ID NO: 212754 - DNA, 15 bp, Homo sapiens
tgaaaaatgagtgag

SEQ ID NO: 212755 - DNA, 15 bp, Homo sapiens
ttgaaaaatgagtga

SEQ ID NO: 212756 - DNA, 15 bp, Homo sapiens
tttgaaaaatgagtg

SEQ ID NO: 212757 - DNA, 15 bp, Homo sapiens
ttttgaaaaatgagt

SEQ ID NO: 212758 - DNA, 15 bp, Homo sapiens
gttttgaaaaatgag

SEQ ID NO: 212759 - DNA, 15 bp, Homo sapiens
tgttttgaaaaatga

SEQ ID NO: 212760 - DNA, 15 bp, Homo sapiens
gtgttttgaaaaatg

SEQ ID NO: 212761 - DNA, 15 bp, Homo sapiens
cgtgttttgaaaaat

SEQ ID NO: 212762 - DNA, 15 bp, Homo sapiens
gcgtgttttgaaaaa

SEQ ID NO: 212763 - DNA, 15 bp, Homo sapiens
tgcgtgttttgaaaa

SEQ ID NO: 212764 - DNA, 15 bp, Homo sapiens
atgcgtgttttgaaa

SEQ ID NO: 212765 - DNA, 15 bp, Homo sapiens
tatgcgtgttttgaa

SEQ ID NO: 212766 - DNA, 15 bp, Homo sapiens
ttatgcgtgttttga

SEQ ID NO: 212767 - DNA, 15 bp, Homo sapiens
tttatgcgtgttttg

SEQ ID NO: 212768 - DNA, 15 bp, Homo sapiens
ttttatgcgtgtttt

SEQ ID NO: 212769 - DNA, 15 bp, Homo sapiens
tttttatgcgtgttt

SEQ ID NO: 212770 - DNA, 15 bp, Homo sapiens
atttttatgcgtgtt

SEQ ID NO: 212771 - DNA, 15 bp, Homo sapiens
aatttttatgcgtgt

SEQ ID NO: 212772 - DNA, 15 bp, Homo sapiens
aaatttttatgcgtg

SEQ ID NO: 212773 - DNA, 15 bp, Homo sapiens
taaatttttatgcgt

SEQ ID NO: 212774 - DNA, 15 bp, Homo sapiens
ctaaatttttatgcg

SEQ ID NO: 212775 - DNA, 15 bp, Homo sapiens
cctaaatttttatgc

SEQ ID NO: 212776 - DNA, 15 bp, Homo sapiens
tcctaaatttttatg

SEQ ID NO: 212777 - DNA, 15 bp, Homo sapiens
ttcctaaatttttat

SEQ ID NO: 212778 - DNA, 15 bp, Homo sapiens
tttcctaaattttta

SEQ ID NO: 212779 - DNA, 15 bp, Homo sapiens
ctttcctaaattttt

SEQ ID NO: 212780 - DNA, 15 bp, Homo sapiens
tctttcctaaatttt

SEQ ID NO: 212781 - DNA, 15 bp, Homo sapiens
ctctttcctaaattt

SEQ ID NO: 212782 - DNA, 15 bp, Homo sapiens
tctctttcctaaatt

SEQ ID NO: 212783 - DNA, 15 bp, Homo sapiens
ttctctttcctaaat

SEQ ID NO: 212784 - DNA, 15 bp, Homo sapiens
attctctttcctaaa

SEQ ID NO: 212785 - DNA, 15 bp, Homo sapiens
aattctctttcctaa

SEQ ID NO: 212786 - DNA, 15 bp, Homo sapiens
caattctctttccta

SEQ ID NO: 212787 - DNA, 15 bp, Homo sapiens
acaattctctttcct

SEQ ID NO: 212788 - DNA, 15 bp, Homo sapiens
aacaattctctttcc

SEQ ID NO: 212789 - DNA, 15 bp, Homo sapiens
aaacaattctctttc

SEQ ID NO: 212790 - DNA, 15 bp, Homo sapiens
aaaacaattctcttt

SEQ ID NO: 212791 - DNA, 15 bp, Homo sapiens
gaaaacaattctctt

SEQ ID NO: 212792 - DNA, 15 bp, Homo sapiens
agaaaacaattctct

SEQ ID NO: 212793 - DNA, 15 bp, Homo sapiens
gagaaaacaattctc

SEQ ID NO: 212794 - DNA, 15 bp, Homo sapiens
ggagaaaacaattct

SEQ ID NO: 212795 - DNA, 15 bp, Homo sapiens
aggagaaaacaattc

SEQ ID NO: 212796 - DNA, 15 bp, Homo sapiens
aaggagaaaacaatt

SEQ ID NO: 212797 - DNA, 15 bp, Homo sapiens
gaaggagaaaacaat

SEQ ID NO: 212798 - DNA, 15 bp, Homo sapiens
ggaaggagaaaacaa

SEQ ID NO: 212799 - DNA, 15 bp, Homo sapiens
tggaaggagaaaaca

SEQ ID NO: 212800 - DNA, 15 bp, Homo sapiens
ctggaaggagaaaac

SEQ ID NO: 212801 - DNA, 15 bp, Homo sapiens
gctggaaggagaaaa

SEQ ID NO: 212802 - DNA, 15 bp, Homo sapiens
tgctggaaggagaaa

SEQ ID NO: 212803 - DNA, 15 bp, Homo sapiens
gtgctggaaggagaa

SEQ ID NO: 212804 - DNA, 15 bp, Homo sapiens
ggtgctggaaggaga

SEQ ID NO: 212805 - DNA, 15 bp, Homo sapiens
aggtgctggaaggag

SEQ ID NO: 212806 - DNA, 15 bp, Homo sapiens
gaggtgctggaagga

SEQ ID NO: 212807 - DNA, 15 bp, Homo sapiens
tgaggtgctggaagg

SEQ ID NO: 212808 - DNA, 15 bp, Homo sapiens
atgaggtgctggaag

SEQ ID NO: 212809 - DNA, 15 bp, Homo sapiens
tatgaggtgctggaa

SEQ ID NO: 212810 - DNA, 15 bp, Homo sapiens
ttatgaggtgctgga

SEQ ID NO: 212811 - DNA, 15 bp, Homo sapiens
attatgaggtgctgg

SEQ ID NO: 212812 - DNA, 15 bp, Homo sapiens
aattatgaggtgctg

SEQ ID NO: 212813 - DNA, 15 bp, Homo sapiens
aaattatgaggtgct

SEQ ID NO: 212814 - DNA, 15 bp, Homo sapiens
caaattatgaggtgc

SEQ ID NO: 212815 - DNA, 15 bp, Homo sapiens
tcaaattatgaggtg

SEQ ID NO: 212816 - DNA, 15 bp, Homo sapiens
ttcaaattatgaggt

SEQ ID NO: 212817 - DNA, 15 bp, Homo sapiens
gttcaaattatgagg

SEQ ID NO: 212818 - DNA, 15 bp, Homo sapiens
tgttcaaattatgag

SEQ ID NO: 212819 - DNA, 15 bp, Homo sapiens
ctgttcaaattatga

SEQ ID NO: 212820 - DNA, 15 bp, Homo sapiens
tctgttcaaattatg

SEQ ID NO: 212821 - DNA, 15 bp, Homo sapiens
gtctgttcaaattat

SEQ ID NO: 212822 - DNA, 15 bp, Homo sapiens
agtctgttcaaatta

SEQ ID NO: 212823 - DNA, 15 bp, Homo sapiens
cagtctgttcaaatt

SEQ ID NO: 212824 - DNA, 15 bp, Homo sapiens
tcagtctgttcaaat

SEQ ID NO: 212825 - DNA, 15 bp, Homo sapiens
atcagtctgttcaaa

SEQ ID NO: 212826 - DNA, 15 bp, Homo sapiens
catcagtctgttcaa

SEQ ID NO: 212827 - DNA, 15 bp, Homo sapiens
ccatcagtctgttca

SEQ ID NO: 212828 - DNA, 15 bp, Homo sapiens
accatcagtctgttc

SEQ ID NO: 212829 - DNA, 15 bp, Homo sapiens
aaccatcagtctgtt

SEQ ID NO: 212830 - DNA, 15 bp, Homo sapiens
gaaccatcagtctgt

SEQ ID NO: 212831 - DNA, 15 bp, Homo sapiens
ggaaccatcagtctg

SEQ ID NO: 212832 - DNA, 15 bp, Homo sapiens
gggaaccatcagtct

SEQ ID NO: 212833 - DNA, 15 bp, Homo sapiens
tgggaaccatcagtc

SEQ ID NO: 212834 - DNA, 15 bp, Homo sapiens
atgggaaccatcagt

SEQ ID NO: 212835 - DNA, 15 bp, Homo sapiens
aatgggaaccatcag

SEQ ID NO: 212836 - DNA, 15 bp, Homo sapiens
taatgggaaccatca

SEQ ID NO: 212837 - DNA, 15 bp, Homo sapiens
ctaatgggaaccatc

SEQ ID NO: 212838 - DNA, 15 bp, Homo sapiens
actaatgggaaccat

SEQ ID NO: 212839 - DNA, 15 bp, Homo sapiens
gactaatgggaacca

SEQ ID NO: 212840 - DNA, 15 bp, Homo sapiens
tgactaatgggaacc

SEQ ID NO: 212841 - DNA, 15 bp, Homo sapiens
gtgactaatgggaac

SEQ ID NO: 212842 - DNA, 15 bp, Homo sapiens
tgtgactaatgggaa

SEQ ID NO: 212843 - DNA, 15 bp, Homo sapiens
atgtgactaatggga

SEQ ID NO: 212844 - DNA, 15 bp, Homo sapiens
tatgtgactaatggg

SEQ ID NO: 212845 - DNA, 15 bp, Homo sapiens
ttatgtgactaatgg

SEQ ID NO: 212846 - DNA, 15 bp, Homo sapiens
tttatgtgactaatg

SEQ ID NO: 212847 - DNA, 15 bp, Homo sapiens
ctttatgtgactaat

SEQ ID NO: 212848 - DNA, 15 bp, Homo sapiens
gctttatgtgactaa

SEQ ID NO: 212849 - DNA, 15 bp, Homo sapiens
agctttatgtgacta

SEQ ID NO: 212850 - DNA, 15 bp, Homo sapiens
cagctttatgtgact

SEQ ID NO: 212851 - DNA, 15 bp, Homo sapiens
acagctttatgtgac

SEQ ID NO: 212852 - DNA, 15 bp, Homo sapiens
tacagctttatgtga

SEQ ID NO: 212853 - DNA, 15 bp, Homo sapiens
ctacagctttatgtg

SEQ ID NO: 212854 - DNA, 15 bp, Homo sapiens
actacagctttatgt

SEQ ID NO: 212855 - DNA, 15 bp, Homo sapiens
gactacagctttatg

SEQ ID NO: 212856 - DNA, 15 bp, Homo sapiens
agactacagctttat

SEQ ID NO: 212857 - DNA, 15 bp, Homo sapiens
tagactacagcttta

SEQ ID NO: 212858 - DNA, 15 bp, Homo sapiens
ctagactacagcttt

SEQ ID NO: 212859 - DNA, 15 bp, Homo sapiens
actagactacagctt

SEQ ID NO: 212860 - DNA, 15 bp, Homo sapiens
tactagactacagct

SEQ ID NO: 212861 - DNA, 15 bp, Homo sapiens
gtactagactacagc

SEQ ID NO: 212862 - DNA, 15 bp, Homo sapiens
tgtactagactacag

SEQ ID NO: 212863 - DNA, 15 bp, Homo sapiens
ctgtactagactaca

SEQ ID NO: 212864 - DNA, 15 bp, Homo sapiens
tctgtactagactac

SEQ ID NO: 212865 - DNA, 15 bp, Homo sapiens
gtctgtactagacta

SEQ ID NO: 212866 - DNA, 15 bp, Homo sapiens
cgtctgtactagact

SEQ ID NO: 212867 - DNA, 15 bp, Homo sapiens
acgtctgtactagac

SEQ ID NO: 212868 - DNA, 15 bp, Homo sapiens
gacgtctgtactaga

SEQ ID NO: 212869 - DNA, 15 bp, Homo sapiens
ggacgtctgtactag

SEQ ID NO: 212870 - DNA, 15 bp, Homo sapiens
aggacgtctgtacta

SEQ ID NO: 212871 - DNA, 15 bp, Homo sapiens
aaggacgtctgtact

SEQ ID NO: 212872 - DNA, 15 bp, Homo sapiens
taaggacgtctgtac

SEQ ID NO: 212873 - DNA, 15 bp, Homo sapiens
ctaaggacgtctgta

SEQ ID NO: 212874 - DNA, 15 bp, Homo sapiens
tctaaggacgtctgt

SEQ ID NO: 212875 - DNA, 15 bp, Homo sapiens
ttctaaggacgtctg

SEQ ID NO: 212876 - DNA, 15 bp, Homo sapiens
gttctaaggacgtct

SEQ ID NO: 212877 - DNA, 15 bp, Homo sapiens
agttctaaggacgtc

SEQ ID NO: 212878 - DNA, 15 bp, Homo sapiens
cagttctaaggacgt

SEQ ID NO: 212879 - DNA, 15 bp, Homo sapiens
ccagttctaaggacg

SEQ ID NO: 212880 - DNA, 15 bp, Homo sapiens
tccagttctaaggac

SEQ ID NO: 212881 - DNA, 15 bp, Homo sapiens
ttccagttctaagga

SEQ ID NO: 212882 - DNA, 15 bp, Homo sapiens
gttccagttctaagg

SEQ ID NO: 212883 - DNA, 15 bp, Homo sapiens
ggttccagttctaag

SEQ ID NO: 212884 - DNA, 15 bp, Homo sapiens
aggttccagttctaa

SEQ ID NO: 212885 - DNA, 15 bp, Homo sapiens
caggttccagttcta

SEQ ID NO: 212886 - DNA, 15 bp, Homo sapiens
ccaggttccagttct

SEQ ID NO: 212887 - DNA, 15 bp, Homo sapiens
gccaggttccagttc

SEQ ID NO: 212888 - DNA, 15 bp, Homo sapiens
ggccaggttccagtt

SEQ ID NO: 212889 - DNA, 15 bp, Homo sapiens
tggccaggttccagt

SEQ ID NO: 212890 - DNA, 15 bp, Homo sapiens
ctggccaggttccag

SEQ ID NO: 212891 - DNA, 15 bp, Homo sapiens
cctggccaggttcca

SEQ ID NO: 212892 - DNA, 15 bp, Homo sapiens
gcctggccaggttcc

SEQ ID NO: 212893 - DNA, 15 bp, Homo sapiens
agcctggccaggttc

SEQ ID NO: 212894 - DNA, 15 bp, Homo sapiens
tagcctggccaggtt

SEQ ID NO: 212895 - DNA, 15 bp, Homo sapiens
ctagcctggccaggt

SEQ ID NO: 212896 - DNA, 15 bp, Homo sapiens
cctagcctggccagg

SEQ ID NO: 212897 - DNA, 15 bp, Homo sapiens
ccctagcctggccag

SEQ ID NO: 212898 - DNA, 15 bp, Homo sapiens
accctagcctggcca

SEQ ID NO: 212899 - DNA, 15 bp, Homo sapiens
caccctagcctggcc

SEQ ID NO: 212900 - DNA, 15 bp, Homo sapiens
tcaccctagcctggc

SEQ ID NO: 212901 - DNA, 15 bp, Homo sapiens
gtcaccctagcctgg

SEQ ID NO: 212902 - DNA, 15 bp, Homo sapiens
tgtcaccctagcctg

SEQ ID NO: 212903 - DNA, 15 bp, Homo sapiens
gtgtcaccctagcct

SEQ ID NO: 212904 - DNA, 15 bp, Homo sapiens
agtgtcaccctagcc

SEQ ID NO: 212905 - DNA, 15 bp, Homo sapiens
aagtgtcaccctagc

SEQ ID NO: 212906 - DNA, 15 bp, Homo sapiens
gaagtgtcaccctag

SEQ ID NO: 212907 - DNA, 15 bp, Homo sapiens
agaagtgtcacccta

SEQ ID NO: 212908 - DNA, 15 bp, Homo sapiens
aagaagtgtcaccct

SEQ ID NO: 212909 - DNA, 15 bp, Homo sapiens
caagaagtgtcaccc

SEQ ID NO: 212910 - DNA, 15 bp, Homo sapiens
acaagaagtgtcacc

SEQ ID NO: 212911 - DNA, 15 bp, Homo sapiens
aacaagaagtgtcac

SEQ ID NO: 212912 - DNA, 15 bp, Homo sapiens
caacaagaagtgtca

SEQ ID NO: 212913 - DNA, 15 bp, Homo sapiens
ccaacaagaagtgtc

SEQ ID NO: 212914 - DNA, 15 bp, Homo sapiens
gccaacaagaagtgt

SEQ ID NO: 212915 - DNA, 15 bp, Homo sapiens
agccaacaagaagtg

SEQ ID NO: 212916 - DNA, 15 bp, Homo sapiens
cagccaacaagaagt

SEQ ID NO: 212917 - DNA, 15 bp, Homo sapiens
tcagccaacaagaag

SEQ ID NO: 212918 - DNA, 15 bp, Homo sapiens
ttcagccaacaagaa

SEQ ID NO: 212919 - DNA, 15 bp, Homo sapiens
tttcagccaacaaga

SEQ ID NO: 212920 - DNA, 15 bp, Homo sapiens
atttcagccaacaag

SEQ ID NO: 212921 - DNA, 15 bp, Homo sapiens
tatttcagccaacaa

SEQ ID NO: 212922 - DNA, 15 bp, Homo sapiens
ctatttcagccaaca

SEQ ID NO: 212923 - DNA, 15 bp, Homo sapiens
actatttcagccaac

SEQ ID NO: 212924 - DNA, 15 bp, Homo sapiens
aactatttcagccaa

SEQ ID NO: 212925 - DNA, 15 bp, Homo sapiens
caactatttcagcca

SEQ ID NO: 212926 - DNA, 15 bp, Homo sapiens
tcaactatttcagcc

SEQ ID NO: 212927 - DNA, 15 bp, Homo sapiens
ttcaactatttcagc

SEQ ID NO: 212928 - DNA, 15 bp, Homo sapiens
gttcaactatttcag

SEQ ID NO: 212929 - DNA, 15 bp, Homo sapiens
tgttcaactatttca

SEQ ID NO: 212930 - DNA, 15 bp, Homo sapiens
ctgttcaactatttc

SEQ ID NO: 212931 - DNA, 15 bp, Homo sapiens
gctgttcaactattt

SEQ ID NO: 212932 - DNA, 15 bp, Homo sapiens
agctgttcaactatt

SEQ ID NO: 212933 - DNA, 15 bp, Homo sapiens
aagctgttcaactat

SEQ ID NO: 212934 - DNA, 15 bp, Homo sapiens
aaagctgttcaacta

SEQ ID NO: 212935 - DNA, 15 bp, Homo sapiens
taaagctgttcaact

SEQ ID NO: 212936 - DNA, 15 bp, Homo sapiens
ttaaagctgttcaac

SEQ ID NO: 212937 - DNA, 15 bp, Homo sapiens
attaaagctgttcaa

SEQ ID NO: 212938 - DNA, 15 bp, Homo sapiens
tattaaagctgttca

SEQ ID NO: 212939 - DNA, 15 bp, Homo sapiens
atattaaagctgttc

SEQ ID NO: 212940 - DNA, 15 bp, Homo sapiens
tatattaaagctgtt

SEQ ID NO: 212941 - DNA, 15 bp, Homo sapiens
gtatattaaagctgt

SEQ ID NO: 212942 - DNA, 15 bp, Homo sapiens
tgtatattaaagctg

SEQ ID NO: 212943 - DNA, 15 bp, Homo sapiens
ttgtatattaaagct

SEQ ID NO: 212944 - DNA, 15 bp, Homo sapiens
attgtatattaaagc

SEQ ID NO: 212945 - DNA, 15 bp, Homo sapiens
tattgtatattaaag

SEQ ID NO: 212946 - DNA, 15 bp, Homo sapiens
ttattgtatattaaa

SEQ ID NO: 212947 - DNA, 15 bp, Homo sapiens
attattgtatattaa

SEQ ID NO: 212948 - DNA, 15 bp, Homo sapiens
aattattgtatatta

SEQ ID NO: 212949 - DNA, 15 bp, Homo sapiens
caattattgtatatt

SEQ ID NO: 212950 - DNA, 15 bp, Homo sapiens
acaattattgtatat

SEQ ID NO: 212951 - DNA, 15 bp, Homo sapiens
aacaattattgtata

SEQ ID NO: 212952 - DNA, 15 bp, Homo sapiens
caacaattattgtat

SEQ ID NO: 212953 - DNA, 15 bp, Homo sapiens
gcaacaattattgta

SEQ ID NO: 212954 - DNA, 15 bp, Homo sapiens
tgcaacaattattgt

SEQ ID NO: 212955 - DNA, 15 bp, Homo sapiens
atgcaacaattattg

SEQ ID NO: 212956 - DNA, 15 bp, Homo sapiens
aatgcaacaattatt

SEQ ID NO: 212957 - DNA, 15 bp, Homo sapiens
taatgcaacaattat

SEQ ID NO: 212958 - DNA, 15 bp, Homo sapiens
ataatgcaacaatta

SEQ ID NO: 212959 - DNA, 15 bp, Homo sapiens
aataatgcaacaatt

SEQ ID NO: 212960 - DNA, 15 bp, Homo sapiens
taataatgcaacaat

SEQ ID NO: 212961 - DNA, 15 bp, Homo sapiens
ataataatgcaacaa

SEQ ID NO: 212962 - DNA, 15 bp, Homo sapiens
aataataatgcaaca

SEQ ID NO: 212963 - DNA, 15 bp, Homo sapiens
aaataataatgcaac

SEQ ID NO: 212964 - DNA, 15 bp, Homo sapiens
gaaataataatgcaa

SEQ ID NO: 212965 - DNA, 15 bp, Homo sapiens
tgaaataataatgca

SEQ ID NO: 212966 - DNA, 15 bp, Homo sapiens
ctgaaataataatgc

SEQ ID NO: 212967 - DNA, 15 bp, Homo sapiens
tctgaaataataatg

SEQ ID NO: 212968 - DNA, 15 bp, Homo sapiens
atctgaaataataat

SEQ ID NO: 212969 - DNA, 15 bp, Homo sapiens
catctgaaataataa

SEQ ID NO: 212970 - DNA, 15 bp, Homo sapiens
tcatctgaaataata

SEQ ID NO: 212971 - DNA, 15 bp, Homo sapiens
atcatctgaaataat

SEQ ID NO: 212972 - DNA, 15 bp, Homo sapiens
tatcatctgaaataa

SEQ ID NO: 212973 - DNA, 15 bp, Homo sapiens
ttatcatctgaaata

SEQ ID NO: 212974 - DNA, 15 bp, Homo sapiens
tttatcatctgaaat

SEQ ID NO: 212975 - DNA, 15 bp, Homo sapiens
atttatcatctgaaa

SEQ ID NO: 212976 - DNA, 15 bp, Homo sapiens
catttatcatctgaa

SEQ ID NO: 212977 - DNA, 15 bp, Homo sapiens
acatttatcatctga

SEQ ID NO: 212978 - DNA, 15 bp, Homo sapiens
cacatttatcatctg

SEQ ID NO: 212979 - DNA, 15 bp, Homo sapiens
ccacatttatcatct

SEQ ID NO: 212980 - DNA, 15 bp, Homo sapiens
accacatttatcatc

SEQ ID NO: 212981 - DNA, 15 bp, Homo sapiens
gaccacatttatcat

SEQ ID NO: 212982 - DNA, 15 bp, Homo sapiens
tgaccacatttatca

SEQ ID NO: 212983 - DNA, 15 bp, Homo sapiens
atgaccacatttatc

SEQ ID NO: 212984 - DNA, 15 bp, Homo sapiens
tatgaccacatttat

SEQ ID NO: 212985 - DNA, 15 bp, Homo sapiens
ttatgaccacattta

SEQ ID NO: 212986 - DNA, 15 bp, Homo sapiens
cttatgaccacattt

SEQ ID NO: 212987 - DNA, 15 bp, Homo sapiens
acttatgaccacatt

SEQ ID NO: 212988 - DNA, 15 bp, Homo sapiens
tacttatgaccacat

SEQ ID NO: 212989 - DNA, 15 bp, Homo sapiens
ttacttatgaccaca

SEQ ID NO: 212990 - DNA, 15 bp, Homo sapiens
cttacttatgaccac

SEQ ID NO: 212991 - DNA, 15 bp, Homo sapiens
tcttacttatgacca

SEQ ID NO: 212992 - DNA, 15 bp, Homo sapiens
ttcttacttatgacc

SEQ ID NO: 212993 - DNA, 15 bp, Homo sapiens
tttcttacttatgac

SEQ ID NO: 212994 - DNA, 15 bp, Homo sapiens
atttcttacttatga

SEQ ID NO: 212995 - DNA, 15 bp, Homo sapiens
tatttcttacttatg

SEQ ID NO: 212996 - DNA, 15 bp, Homo sapiens
ttatttcttacttat

SEQ ID NO: 212997 - DNA, 15 bp, Homo sapiens
tttatttcttactta

SEQ ID NO: 212998 - DNA, 15 bp, Homo sapiens
atttatttcttactt

SEQ ID NO: 212999 - DNA, 15 bp, Homo sapiens
catttatttcttact

SEQ ID NO: 213000 - DNA, 15 bp, Homo sapiens
tcatttatttcttac

SEQ ID NO: 213001 - DNA, 15 bp, Homo sapiens
atcatttatttctta

SEQ ID NO: 213002 - DNA, 15 bp, Homo sapiens
gatcatttatttctt

SEQ ID NO: 213003 - DNA, 15 bp, Homo sapiens
cgatcatttatttct

SEQ ID NO: 213004 - DNA, 15 bp, Homo sapiens
tcgatcatttatttc

SEQ ID NO: 213005 - DNA, 15 bp, Homo sapiens
ctcgatcatttattt

SEQ ID NO: 213006 - DNA, 15 bp, Homo sapiens
actcgatcatttatt

SEQ ID NO: 213007 - DNA, 15 bp, Homo sapiens
aactcgatcatttat

SEQ ID NO: 213008 - DNA, 15 bp, Homo sapiens
aaactcgatcattta

SEQ ID NO: 213009 - DNA, 15 bp, Homo sapiens
taaactcgatcattt

SEQ ID NO: 213010 - DNA, 15 bp, Homo sapiens
ctaaactcgatcatt

SEQ ID NO: 213011 - DNA, 15 bp, Homo sapiens
actaaactcgatcat

SEQ ID NO: 213012 - DNA, 15 bp, Homo sapiens
gactaaactcgatca

SEQ ID NO: 213013 - DNA, 15 bp, Homo sapiens
agactaaactcgatc

SEQ ID NO: 213014 - DNA, 15 bp, Homo sapiens
aagactaaactcgat

SEQ ID NO: 213015 - DNA, 15 bp, Homo sapiens
aaagactaaactcga

SEQ ID NO: 213016 - DNA, 15 bp, Homo sapiens
aaaagactaaactcg

SEQ ID NO: 213017 - DNA, 15 bp, Homo sapiens
taaaagactaaactc

SEQ ID NO: 213018 - DNA, 15 bp, Homo sapiens
ttaaaagactaaact

SEQ ID NO: 213019 - DNA, 15 bp, Homo sapiens
attaaaagactaaac

SEQ ID NO: 213020 - DNA, 15 bp, Homo sapiens
aattaaaagactaaa

SEQ ID NO: 213021 - DNA, 15 bp, Homo sapiens
gaattaaaagactaa

SEQ ID NO: 213022 - DNA, 15 bp, Homo sapiens
tgaattaaaagacta

SEQ ID NO: 213023 - DNA, 15 bp, Homo sapiens
gtgaattaaaagact

SEQ ID NO: 213024 - DNA, 15 bp, Homo sapiens
agtgaattaaaagac

SEQ ID NO: 213025 - DNA, 15 bp, Homo sapiens
cagtgaattaaaaga

SEQ ID NO: 213026 - DNA, 15 bp, Homo sapiens
acagtgaattaaaag

SEQ ID NO: 213027 - DNA, 15 bp, Homo sapiens
gacagtgaattaaaa

SEQ ID NO: 213028 - DNA, 15 bp, Homo sapiens
ggacagtgaattaaa

SEQ ID NO: 213029 - DNA, 15 bp, Homo sapiens
aggacagtgaattaa

SEQ ID NO: 213030 - DNA, 15 bp, Homo sapiens
aaggacagtgaatta

SEQ ID NO: 213031 - DNA, 15 bp, Homo sapiens
aaaggacagtgaatt

SEQ ID NO: 213032 - DNA, 15 bp, Homo sapiens
caaaggacagtgaat

SEQ ID NO: 213033 - DNA, 15 bp, Homo sapiens
tcaaaggacagtgaa

SEQ ID NO: 213034 - DNA, 15 bp, Homo sapiens
ttcaaaggacagtga

SEQ ID NO: 213035 - DNA, 15 bp, Homo sapiens
attcaaaggacagtg

SEQ ID NO: 213036 - DNA, 15 bp, Homo sapiens
tattcaaaggacagt

SEQ ID NO: 213037 - DNA, 15 bp, Homo sapiens
gtattcaaaggacag

SEQ ID NO: 213038 - DNA, 15 bp, Homo sapiens
ggtattcaaaggaca

SEQ ID NO: 213039 - DNA, 15 bp, Homo sapiens
aggtattcaaaggac

SEQ ID NO: 213040 - DNA, 15 bp, Homo sapiens
caggtattcaaagga

SEQ ID NO: 213041 - DNA, 15 bp, Homo sapiens
gcaggtattcaaagg

SEQ ID NO: 213042 - DNA, 15 bp, Homo sapiens
ggcaggtattcaaag

SEQ ID NO: 213043 - DNA, 15 bp, Homo sapiens
aggcaggtattcaaa

SEQ ID NO: 213044 - DNA, 15 bp, Homo sapiens
gaggcaggtattcaa

SEQ ID NO: 213045 - DNA, 15 bp, Homo sapiens
agaggcaggtattca

SEQ ID NO: 213046 - DNA, 15 bp, Homo sapiens
aagaggcaggtattc

SEQ ID NO: 213047 - DNA, 15 bp, Homo sapiens
taagaggcaggtatt

SEQ ID NO: 213048 - DNA, 15 bp, Homo sapiens
gtaagaggcaggtat

SEQ ID NO: 213049 - DNA, 15 bp, Homo sapiens
agtaagaggcaggta

SEQ ID NO: 213050 - DNA, 15 bp, Homo sapiens
gagtaagaggcaggt

SEQ ID NO: 213051 - DNA, 15 bp, Homo sapiens
agagtaagaggcagg

SEQ ID NO: 213052 - DNA, 15 bp, Homo sapiens
cagagtaagaggcag

SEQ ID NO: 213053 - DNA, 15 bp, Homo sapiens
ccagagtaagaggca

SEQ ID NO: 213054 - DNA, 15 bp, Homo sapiens
tccagagtaagaggc

SEQ ID NO: 213055 - DNA, 15 bp, Homo sapiens
ctccagagtaagagg

SEQ ID NO: 213056 - DNA, 15 bp, Homo sapiens
cctccagagtaagag

SEQ ID NO: 213057 - DNA, 15 bp, Homo sapiens
gcctccagagtaaga

SEQ ID NO: 213058 - DNA, 15 bp, Homo sapiens
tgcctccagagtaag

SEQ ID NO: 213059 - DNA, 15 bp, Homo sapiens
ctgcctccagagtaa

SEQ ID NO: 213060 - DNA, 15 bp, Homo sapiens
tctgcctccagagta

SEQ ID NO: 213061 - DNA, 15 bp, Homo sapiens
ttctgcctccagagt

SEQ ID NO: 213062 - DNA, 15 bp, Homo sapiens
cttctgcctccagag

SEQ ID NO: 213063 - DNA, 15 bp, Homo sapiens
acttctgcctccaga

SEQ ID NO: 213064 - DNA, 15 bp, Homo sapiens
gacttctgcctccag

SEQ ID NO: 213065 - DNA, 15 bp, Homo sapiens
ggacttctgcctcca

SEQ ID NO: 213066 - DNA, 15 bp, Homo sapiens
gggacttctgcctcc

SEQ ID NO: 213067 - DNA, 15 bp, Homo sapiens
tgggacttctgcctc

SEQ ID NO: 213068 - DNA, 15 bp, Homo sapiens
atgggacttctgcct

SEQ ID NO: 213069 - DNA, 15 bp, Homo sapiens
catgggacttctgcc

SEQ ID NO: 213070 - DNA, 15 bp, Homo sapiens
ccatgggacttctgc

SEQ ID NO: 213071 - DNA, 15 bp, Homo sapiens
tccatgggacttctg

SEQ ID NO: 213072 - DNA, 15 bp, Homo sapiens
atccatgggacttct

SEQ ID NO: 213073 - DNA, 15 bp, Homo sapiens
catccatgggacttc

SEQ ID NO: 213074 - DNA, 15 bp, Homo sapiens
acatccatgggactt

SEQ ID NO: 213075 - DNA, 15 bp, Homo sapiens
cacatccatgggact

SEQ ID NO: 213076 - DNA, 15 bp, Homo sapiens
acacatccatgggac

SEQ ID NO: 213077 - DNA, 15 bp, Homo sapiens
aacacatccatggga

SEQ ID NO: 213078 - DNA, 15 bp, Homo sapiens
aaacacatccatggg

SEQ ID NO: 213079 - DNA, 15 bp, Homo sapiens
taaacacatccatgg

SEQ ID NO: 213080 - DNA, 15 bp, Homo sapiens
ataaacacatccatg

SEQ ID NO: 213081 - DNA, 15 bp, Homo sapiens
cataaacacatccat

SEQ ID NO: 213082 - DNA, 15 bp, Homo sapiens
tcataaacacatcca

SEQ ID NO: 213083 - DNA, 15 bp, Homo sapiens
ttcataaacacatcc

SEQ ID NO: 213084 - DNA, 15 bp, Homo sapiens
gttcataaacacatc

SEQ ID NO: 213085 - DNA, 15 bp, Homo sapiens
tgttcataaacacat

SEQ ID NO: 213086 - DNA, 15 bp, Homo sapiens
atgttcataaacaca

SEQ ID NO: 213087 - DNA, 15 bp, Homo sapiens
catgttcataaacac

SEQ ID NO: 213088 - DNA, 15 bp, Homo sapiens
ccatgttcataaaca

SEQ ID NO: 213089 - DNA, 15 bp, Homo sapiens
accatgttcataaac

SEQ ID NO: 213090 - DNA, 15 bp, Homo sapiens
aaccatgttcataaa

SEQ ID NO: 213091 - DNA, 15 bp, Homo sapiens
caaccatgttcataa

SEQ ID NO: 213092 - DNA, 15 bp, Homo sapiens
tcaaccatgttcata

SEQ ID NO: 213093 - DNA, 15 bp, Homo sapiens
ctcaaccatgttcat

SEQ ID NO: 213094 - DNA, 15 bp, Homo sapiens
cctcaaccatgttca

SEQ ID NO: 213095 - DNA, 15 bp, Homo sapiens
tcctcaaccatgttc

SEQ ID NO: 213096 - DNA, 15 bp, Homo sapiens
ttcctcaaccatgtt

SEQ ID NO: 213097 - DNA, 15 bp, Homo sapiens
cttcctcaaccatgt

SEQ ID NO: 213098 - DNA, 15 bp, Homo sapiens
tcttcctcaaccatg

SEQ ID NO: 213099 - DNA, 15 bp, Homo sapiens
atcttcctcaaccat

SEQ ID NO: 213100 - DNA, 15 bp, Homo sapiens
aatcttcctcaacca

SEQ ID NO: 213101 - DNA, 15 bp, Homo sapiens
aaatcttcctcaacc

SEQ ID NO: 213102 - DNA, 15 bp, Homo sapiens
taaatcttcctcaac

SEQ ID NO: 213103 - DNA, 15 bp, Homo sapiens
ctaaatcttcctcaa

SEQ ID NO: 213104 - DNA, 15 bp, Homo sapiens
cctaaatcttcctca

SEQ ID NO: 213105 - DNA, 15 bp, Homo sapiens
tcctaaatcttcctc

SEQ ID NO: 213106 - DNA, 15 bp, Homo sapiens
ttcctaaatcttcct

SEQ ID NO: 213107 - DNA, 15 bp, Homo sapiens
cttcctaaatcttcc

SEQ ID NO: 213108 - DNA, 15 bp, Homo sapiens
tcttcctaaatcttc

SEQ ID NO: 213109 - DNA, 15 bp, Homo sapiens
gtcttcctaaatctt

SEQ ID NO: 213110 - DNA, 15 bp, Homo sapiens
agtcttcctaaatct

SEQ ID NO: 213111 - DNA, 15 bp, Homo sapiens
cagtcttcctaaatc

SEQ ID NO: 213112 - DNA, 15 bp, Homo sapiens
gcagtcttcctaaat

SEQ ID NO: 213113 - DNA, 15 bp, Homo sapiens
tgcagtcttcctaaa

SEQ ID NO: 213114 - DNA, 15 bp, Homo sapiens
ttgcagtcttcctaa

SEQ ID NO: 213115 - DNA, 15 bp, Homo sapiens
gttgcagtcttccta

SEQ ID NO: 213116 - DNA, 15 bp, Homo sapiens
tgttgcagtcttcct

SEQ ID NO: 213117 - DNA, 15 bp, Homo sapiens
ctgttgcagtcttcc

SEQ ID NO: 213118 - DNA, 15 bp, Homo sapiens
actgttgcagtcttc

SEQ ID NO: 213119 - DNA, 15 bp, Homo sapiens
tactgttgcagtctt

SEQ ID NO: 213120 - DNA, 15 bp, Homo sapiens
gtactgttgcagtct

SEQ ID NO: 213121 - DNA, 15 bp, Homo sapiens
tgtactgttgcagtc

SEQ ID NO: 213122 - DNA, 15 bp, Homo sapiens
gtgtactgttgcagt

SEQ ID NO: 213123 - DNA, 15 bp, Homo sapiens
agtgtactgttgcag

SEQ ID NO: 213124 - DNA, 15 bp, Homo sapiens
tagtgtactgttgca

SEQ ID NO: 213125 - DNA, 15 bp, Homo sapiens
gtagtgtactgttgc

SEQ ID NO: 213126 - DNA, 15 bp, Homo sapiens
ggtagtgtactgttg

SEQ ID NO: 213127 - DNA, 15 bp, Homo sapiens
aggtagtgtactgtt

SEQ ID NO: 213128 - DNA, 15 bp, Homo sapiens
taggtagtgtactgt

SEQ ID NO: 213129 - DNA, 15 bp, Homo sapiens
ttaggtagtgtactg

SEQ ID NO: 213130 - DNA, 15 bp, Homo sapiens
tttaggtagtgtact

SEQ ID NO: 213131 - DNA, 15 bp, Homo sapiens
ctttaggtagtgtac

SEQ ID NO: 213132 - DNA, 15 bp, Homo sapiens
gctttaggtagtgta

SEQ ID NO: 213133 - DNA, 15 bp, Homo sapiens
tgctttaggtagtgt

SEQ ID NO: 213134 - DNA, 15 bp, Homo sapiens
ctgctttaggtagtg

SEQ ID NO: 213135 - DNA, 15 bp, Homo sapiens
cctgctttaggtagt

SEQ ID NO: 213136 - DNA, 15 bp, Homo sapiens
acctgctttaggtag

SEQ ID NO: 213137 - DNA, 15 bp, Homo sapiens
aacctgctttaggta

SEQ ID NO: 213138 - DNA, 15 bp, Homo sapiens
aaacctgctttaggt

SEQ ID NO: 213139 - DNA, 15 bp, Homo sapiens
aaaacctgctttagg

SEQ ID NO: 213140 - DNA, 15 bp, Homo sapiens
aaaaacctgctttag

SEQ ID NO: 213141 - DNA, 15 bp, Homo sapiens
aaaaaacctgcttta

SEQ ID NO: 213142 - DNA, 15 bp, Homo sapiens
taaaaaacctgcttt

SEQ ID NO: 213143 - DNA, 15 bp, Homo sapiens
gtaaaaaacctgctt

SEQ ID NO: 213144 - DNA, 15 bp, Homo sapiens
agtaaaaaacctgct

SEQ ID NO: 213145 - DNA, 15 bp, Homo sapiens
gagtaaaaaacctgc

SEQ ID NO: 213146 - DNA, 15 bp, Homo sapiens
ggagtaaaaaacctg

SEQ ID NO: 213147 - DNA, 15 bp, Homo sapiens
tggagtaaaaaacct

SEQ ID NO: 213148 - DNA, 15 bp, Homo sapiens
atggagtaaaaaacc

SEQ ID NO: 213149 - DNA, 15 bp, Homo sapiens
gatggagtaaaaaac

SEQ ID NO: 213150 - DNA, 15 bp, Homo sapiens
agatggagtaaaaaa

SEQ ID NO: 213151 - DNA, 15 bp, Homo sapiens
aagatggagtaaaaa

SEQ ID NO: 213152 - DNA, 15 bp, Homo sapiens
aaagatggagtaaaa

SEQ ID NO: 213153 - DNA, 15 bp, Homo sapiens
aaaagatggagtaaa

SEQ ID NO: 213154 - DNA, 15 bp, Homo sapiens
aaaaagatggagtaa

SEQ ID NO: 213155 - DNA, 15 bp, Homo sapiens
aaaaaagatggagta

SEQ ID NO: 213156 - DNA, 15 bp, Homo sapiens
aaaaaaagatggagt

SEQ ID NO: 213157 - DNA, 15 bp, Homo sapiens
caaaaaaagatggag

SEQ ID NO: 213158 - DNA, 15 bp, Homo sapiens
gcaaaaaaagatgga

SEQ ID NO: 213159 - DNA, 15 bp, Homo sapiens
ggcaaaaaaagatgg

SEQ ID NO: 213160 - DNA, 15 bp, Homo sapiens
tggcaaaaaaagatg

SEQ ID NO: 213161 - DNA, 15 bp, Homo sapiens
gtggcaaaaaaagat

SEQ ID NO: 213162 - DNA, 15 bp, Homo sapiens
cgtggcaaaaaaaga

SEQ ID NO: 213163 - DNA, 15 bp, Homo sapiens
acgtggcaaaaaaag

SEQ ID NO: 213164 - DNA, 15 bp, Homo sapiens
tacgtggcaaaaaaa

SEQ ID NO: 213165 - DNA, 15 bp, Homo sapiens
gtacgtggcaaaaaa

SEQ ID NO: 213166 - DNA, 15 bp, Homo sapiens
tgtacgtggcaaaaa

SEQ ID NO: 213167 - DNA, 15 bp, Homo sapiens
gtgtacgtggcaaaa

SEQ ID NO: 213168 - DNA, 15 bp, Homo sapiens
agtgtacgtggcaaa

SEQ ID NO: 213169 - DNA, 15 bp, Homo sapiens
cagtgtacgtggcaa

SEQ ID NO: 213170 - DNA, 15 bp, Homo sapiens
ccagtgtacgtggca

SEQ ID NO: 213171 - DNA, 15 bp, Homo sapiens
gccagtgtacgtggc

SEQ ID NO: 213172 - DNA, 15 bp, Homo sapiens
ggccagtgtacgtgg

SEQ ID NO: 213173 - DNA, 15 bp, Homo sapiens
aggccagtgtacgtg

SEQ ID NO: 213174 - DNA, 15 bp, Homo sapiens
gaggccagtgtacgt

SEQ ID NO: 213175 - DNA, 15 bp, Homo sapiens
ggaggccagtgtacg

SEQ ID NO: 213176 - DNA, 15 bp, Homo sapiens
gggaggccagtgtac

SEQ ID NO: 213177 - DNA, 15 bp, Homo sapiens
tgggaggccagtgta

SEQ ID NO: 213178 - DNA, 15 bp, Homo sapiens
gtgggaggccagtgt

SEQ ID NO: 213179 - DNA, 15 bp, Homo sapiens
agtgggaggccagtg

SEQ ID NO: 213180 - DNA, 15 bp, Homo sapiens
aagtgggaggccagt

SEQ ID NO: 213181 - DNA, 15 bp, Homo sapiens
aaagtgggaggccag

SEQ ID NO: 213182 - DNA, 15 bp, Homo sapiens
caaagtgggaggcca

SEQ ID NO: 213183 - DNA, 15 bp, Homo sapiens
tcaaagtgggaggcc

SEQ ID NO: 213184 - DNA, 15 bp, Homo sapiens
atcaaagtgggaggc

SEQ ID NO: 213185 - DNA, 15 bp, Homo sapiens
tatcaaagtgggagg

SEQ ID NO: 213186 - DNA, 15 bp, Homo sapiens
atatcaaagtgggag

SEQ ID NO: 213187 - DNA, 15 bp, Homo sapiens
catatcaaagtggga

SEQ ID NO: 213188 - DNA, 15 bp, Homo sapiens
gcatatcaaagtggg

SEQ ID NO: 213189 - DNA, 15 bp, Homo sapiens
agcatatcaaagtgg

SEQ ID NO: 213190 - DNA, 15 bp, Homo sapiens
aagcatatcaaagtg

SEQ ID NO: 213191 - DNA, 15 bp, Homo sapiens
caagcatatcaaagt

SEQ ID NO: 213192 - DNA, 15 bp, Homo sapiens
tcaagcatatcaaag

SEQ ID NO: 213193 - DNA, 15 bp, Homo sapiens
ttcaagcatatcaaa

SEQ ID NO: 213194 - DNA, 15 bp, Homo sapiens
tttcaagcatatcaa

SEQ ID NO: 213195 - DNA, 15 bp, Homo sapiens
atttcaagcatatca

SEQ ID NO: 213196 - DNA, 15 bp, Homo sapiens
aatttcaagcatatc

SEQ ID NO: 213197 - DNA, 15 bp, Homo sapiens
taatttcaagcatat

SEQ ID NO: 213198 - DNA, 15 bp, Homo sapiens
ataatttcaagcata

SEQ ID NO: 213199 - DNA, 15 bp, Homo sapiens
gataatttcaagcat

SEQ ID NO: 213200 - DNA, 15 bp, Homo sapiens
agataatttcaagca

SEQ ID NO: 213201 - DNA, 15 bp, Homo sapiens
gagataatttcaagc

SEQ ID NO: 213202 - DNA, 15 bp, Homo sapiens
ggagataatttcaag

SEQ ID NO: 213203 - DNA, 15 bp, Homo sapiens
aggagataatttcaa

SEQ ID NO: 213204 - DNA, 15 bp, Homo sapiens
aaggagataatttca

SEQ ID NO: 213205 - DNA, 15 bp, Homo sapiens
caaggagataatttc

SEQ ID NO: 213206 - DNA, 15 bp, Homo sapiens
tcaaggagataattt

SEQ ID NO: 213207 - DNA, 15 bp, Homo sapiens
atcaaggagataatt

SEQ ID NO: 213208 - DNA, 15 bp, Homo sapiens
aatcaaggagataat

SEQ ID NO: 213209 - DNA, 15 bp, Homo sapiens
aaatcaaggagataa

SEQ ID NO: 213210 - DNA, 15 bp, Homo sapiens
caaatcaaggagata

SEQ ID NO: 213211 - DNA, 15 bp, Homo sapiens
acaaatcaaggagat

SEQ ID NO: 213212 - DNA, 15 bp, Homo sapiens
gacaaatcaaggaga

SEQ ID NO: 213213 - DNA, 15 bp, Homo sapiens
agacaaatcaaggag

SEQ ID NO: 213214 - DNA, 15 bp, Homo sapiens
aagacaaatcaagga

SEQ ID NO: 213215 - DNA, 15 bp, Homo sapiens
aaagacaaatcaagg

SEQ ID NO: 213216 - DNA, 15 bp, Homo sapiens
gaaagacaaatcaag

SEQ ID NO: 213217 - DNA, 15 bp, Homo sapiens
tgaaagacaaatcaa

SEQ ID NO: 213218 - DNA, 15 bp, Homo sapiens
ttgaaagacaaatca

SEQ ID NO: 213219 - DNA, 15 bp, Homo sapiens
tttgaaagacaaatc

SEQ ID NO: 213220 - DNA, 15 bp, Homo sapiens
ttttgaaagacaaat

SEQ ID NO: 213221 - DNA, 15 bp, Homo sapiens
gttttgaaagacaaa

SEQ ID NO: 213222 - DNA, 15 bp, Homo sapiens
agttttgaaagacaa

SEQ ID NO: 213223 - DNA, 15 bp, Homo sapiens
tagttttgaaagaca

SEQ ID NO: 213224 - DNA, 15 bp, Homo sapiens
gtagttttgaaagac

SEQ ID NO: 213225 - DNA, 15 bp, Homo sapiens
tgtagttttgaaaga

SEQ ID NO: 213226 - DNA, 15 bp, Homo sapiens
atgtagttttgaaag

SEQ ID NO: 213227 - DNA, 15 bp, Homo sapiens
tatgtagttttgaaa

SEQ ID NO: 213228 - DNA, 15 bp, Homo sapiens
atatgtagttttgaa

SEQ ID NO: 213229 - DNA, 15 bp, Homo sapiens
aatatgtagttttga

SEQ ID NO: 213230 - DNA, 15 bp, Homo sapiens
caatatgtagttttg

SEQ ID NO: 213231 - DNA, 15 bp, Homo sapiens
tcaatatgtagtttt

SEQ ID NO: 213232 - DNA, 15 bp, Homo sapiens
ctcaatatgtagttt

SEQ ID NO: 213233 - DNA, 15 bp, Homo sapiens
cctcaatatgtagtt

SEQ ID NO: 213234 - DNA, 15 bp, Homo sapiens
gcctcaatatgtagt

SEQ ID NO: 213235 - DNA, 15 bp, Homo sapiens
agcctcaatatgtag

SEQ ID NO: 213236 - DNA, 15 bp, Homo sapiens
cagcctcaatatgta

SEQ ID NO: 213237 - DNA, 15 bp, Homo sapiens
ccagcctcaatatgt

SEQ ID NO: 213238 - DNA, 15 bp, Homo sapiens
accagcctcaatatg

SEQ ID NO: 213239 - DNA, 15 bp, Homo sapiens
aaccagcctcaatat

SEQ ID NO: 213240 - DNA, 15 bp, Homo sapiens
caaccagcctcaata

SEQ ID NO: 213241 - DNA, 15 bp, Homo sapiens
gcaaccagcctcaat

SEQ ID NO: 213242 - DNA, 15 bp, Homo sapiens
cgcaaccagcctcaa

SEQ ID NO: 213243 - DNA, 15 bp, Homo sapiens
ccgcaaccagcctca

SEQ ID NO: 213244 - DNA, 15 bp, Homo sapiens
accgcaaccagcctc

SEQ ID NO: 213245 - DNA, 15 bp, Homo sapiens
caccgcaaccagcct

SEQ ID NO: 213246 - DNA, 15 bp, Homo sapiens
ccaccgcaaccagcc

SEQ ID NO: 213247 - DNA, 15 bp, Homo sapiens
gccaccgcaaccagc

SEQ ID NO: 213248 - DNA, 15 bp, Homo sapiens
agccaccgcaaccag

SEQ ID NO: 213249 - DNA, 15 bp, Homo sapiens
gagccaccgcaacca

SEQ ID NO: 213250 - DNA, 15 bp, Homo sapiens
tgagccaccgcaacc

SEQ ID NO: 213251 - DNA, 15 bp, Homo sapiens
gtgagccaccgcaac

SEQ ID NO: 213252 - DNA, 15 bp, Homo sapiens
tgtgagccaccgcaa

SEQ ID NO: 213253 - DNA, 15 bp, Homo sapiens
gtgtgagccaccgca

SEQ ID NO: 213254 - DNA, 15 bp, Homo sapiens
ggtgtgagccaccgc

SEQ ID NO: 213255 - DNA, 15 bp, Homo sapiens
aggtgtgagccaccg

SEQ ID NO: 213256 - DNA, 15 bp, Homo sapiens
aggattacaggtgtg

SEQ ID NO: 213257 - DNA, 15 bp, Homo sapiens
taggattacaggtgt

SEQ ID NO: 213258 - DNA, 15 bp, Homo sapiens
ctaggattacaggtg

SEQ ID NO: 213259 - DNA, 15 bp, Homo sapiens
gctaggattacaggt

SEQ ID NO: 213260 - DNA, 15 bp, Homo sapiens
tgctaggattacagg

SEQ ID NO: 213261 - DNA, 15 bp, Homo sapiens
gtgctaggattacag

SEQ ID NO: 213262 - DNA, 15 bp, Homo sapiens
agtgctaggattaca

SEQ ID NO: 213263 - DNA, 15 bp, Homo sapiens
aagtgctaggattac

SEQ ID NO: 213264 - DNA, 15 bp, Homo sapiens
aaagtgctaggatta

SEQ ID NO: 213265 - DNA, 15 bp, Homo sapiens
caaagtgctaggatt

SEQ ID NO: 213266 - DNA, 15 bp, Homo sapiens
ccaaagtgctaggat

SEQ ID NO: 213267 - DNA, 15 bp, Homo sapiens
cccaaagtgctagga

SEQ ID NO: 213268 - DNA, 15 bp, Homo sapiens
tcccaaagtgctagg

SEQ ID NO: 213269 - DNA, 15 bp, Homo sapiens
ctcccaaagtgctag

SEQ ID NO: 213270 - DNA, 15 bp, Homo sapiens
cctcccaaagtgcta

SEQ ID NO: 213271 - DNA, 15 bp, Homo sapiens
gcttggcctcccaaa

SEQ ID NO: 213272 - DNA, 15 bp, Homo sapiens
ggcttggcctcccaa

SEQ ID NO: 213273 - DNA, 15 bp, Homo sapiens
cggcttggcctccca

SEQ ID NO: 213274 - DNA, 15 bp, Homo sapiens
ccggcttggcctccc

SEQ ID NO: 213275 - DNA, 15 bp, Homo sapiens
tccggcttggcctcc

SEQ ID NO: 213276 - DNA, 15 bp, Homo sapiens
gtccggcttggcctc

SEQ ID NO: 213277 - DNA, 15 bp, Homo sapiens
tgtccggcttggcct

SEQ ID NO: 213278 - DNA, 15 bp, Homo sapiens
ctgtccggcttggcc

SEQ ID NO: 213279 - DNA, 15 bp, Homo sapiens
tctgtccggcttggc

SEQ ID NO: 213280 - DNA, 15 bp, Homo sapiens
atctgtccggcttgg

SEQ ID NO: 213281 - DNA, 15 bp, Homo sapiens
gatctgtccggcttg

SEQ ID NO: 213282 - DNA, 15 bp, Homo sapiens
tgatctgtccggctt

SEQ ID NO: 213283 - DNA, 15 bp, Homo sapiens
gtgatctgtccggct

SEQ ID NO: 213284 - DNA, 15 bp, Homo sapiens
agtgatctgtccggc

SEQ ID NO: 213285 - DNA, 15 bp, Homo sapiens
aagtgatctgtccgg

SEQ ID NO: 213286 - DNA, 15 bp, Homo sapiens
caagtgatctgtccg

SEQ ID NO: 213287 - DNA, 15 bp, Homo sapiens
tcaagtgatctgtcc

SEQ ID NO: 213288 - DNA, 15 bp, Homo sapiens
ctcaagtgatctgtc

SEQ ID NO: 213289 - DNA, 15 bp, Homo sapiens
cctcaagtgatctgt

SEQ ID NO: 213290 - DNA, 15 bp, Homo sapiens
acctcaagtgatctg

SEQ ID NO: 213291 - DNA, 15 bp, Homo sapiens
gacctcaagtgatct

SEQ ID NO: 213292 - DNA, 15 bp, Homo sapiens
tgacctcaagtgatc

SEQ ID NO: 213293 - DNA, 15 bp, Homo sapiens
ctgacctcaagtgat

SEQ ID NO: 213294 - DNA, 15 bp, Homo sapiens
cctgacctcaagtga

SEQ ID NO: 213295 - DNA, 15 bp, Homo sapiens
tcctgacctcaagtg

SEQ ID NO: 213296 - DNA, 15 bp, Homo sapiens
ctcctgacctcaagt

SEQ ID NO: 213297 - DNA, 15 bp, Homo sapiens
actcctgacctcaag

SEQ ID NO: 213298 - DNA, 15 bp, Homo sapiens
aactcctgacctcaa

SEQ ID NO: 213299 - DNA, 15 bp, Homo sapiens
tgccaggctggtctc

SEQ ID NO: 213300 - DNA, 15 bp, Homo sapiens
ttgccaggctggtct

SEQ ID NO: 213301 - DNA, 15 bp, Homo sapiens
tttgccaggctggtc

SEQ ID NO: 213302 - DNA, 15 bp, Homo sapiens
gtttgccaggctggt

SEQ ID NO: 213303 - DNA, 15 bp, Homo sapiens
tgtttgccaggctgg

SEQ ID NO: 213304 - DNA, 15 bp, Homo sapiens
atgtttgccaggctg

SEQ ID NO: 213305 - DNA, 15 bp, Homo sapiens
catgtttgccaggct

SEQ ID NO: 213306 - DNA, 15 bp, Homo sapiens
tcatgtttgccaggc

SEQ ID NO: 213307 - DNA, 15 bp, Homo sapiens
atcatgtttgccagg

SEQ ID NO: 213308 - DNA, 15 bp, Homo sapiens
catcatgtttgccag

SEQ ID NO: 213309 - DNA, 15 bp, Homo sapiens
tcatcatgtttgcca

SEQ ID NO: 213310 - DNA, 15 bp, Homo sapiens
ttcatcatgtttgcc

SEQ ID NO: 213311 - DNA, 15 bp, Homo sapiens
tttcatcatgtttgc

SEQ ID NO: 213312 - DNA, 15 bp, Homo sapiens
gtttcatcatgtttg

SEQ ID NO: 213313 - DNA, 15 bp, Homo sapiens
ggtttcatcatgttt

SEQ ID NO: 213314 - DNA, 15 bp, Homo sapiens
gggtttcatcatgtt

SEQ ID NO: 213315 - DNA, 15 bp, Homo sapiens
ggggtttcatcatgt

SEQ ID NO: 213316 - DNA, 15 bp, Homo sapiens
tggggtttcatcatg

SEQ ID NO: 213317 - DNA, 15 bp, Homo sapiens
gtggggtttcatcat

SEQ ID NO: 213318 - DNA, 15 bp, Homo sapiens
ggtggggtttcatca

SEQ ID NO: 213319 - DNA, 15 bp, Homo sapiens
aggtggggtttcatc

SEQ ID NO: 213320 - DNA, 15 bp, Homo sapiens
aaggtggggtttcat

SEQ ID NO: 213321 - DNA, 15 bp, Homo sapiens
aaaggtggggtttca

SEQ ID NO: 213322 - DNA, 15 bp, Homo sapiens
taaaggtggggtttc

SEQ ID NO: 213323 - DNA, 15 bp, Homo sapiens
gtaaaggtggggttt

SEQ ID NO: 213324 - DNA, 15 bp, Homo sapiens
agtaaaggtggggtt

SEQ ID NO: 213325 - DNA, 15 bp, Homo sapiens
tagtaaaggtggggt

SEQ ID NO: 213326 - DNA, 15 bp, Homo sapiens
ttagtaaaggtgggg

SEQ ID NO: 213327 - DNA, 15 bp, Homo sapiens
tttagtaaaggtggg

SEQ ID NO: 213328 - DNA, 15 bp, Homo sapiens
ttttagtaaaggtgg

SEQ ID NO: 213329 - DNA, 15 bp, Homo sapiens
tttttagtaaaggtg

SEQ ID NO: 213330 - DNA, 15 bp, Homo sapiens
atttttagtaaaggt

SEQ ID NO: 213331 - DNA, 15 bp, Homo sapiens
tatttttagtaaagg

SEQ ID NO: 213332 - DNA, 15 bp, Homo sapiens
gtatttttagtaaag

SEQ ID NO: 213333 - DNA, 15 bp, Homo sapiens
tgtatttttagtaaa

SEQ ID NO: 213334 - DNA, 15 bp, Homo sapiens
ttgtatttttagtaa

SEQ ID NO: 213335 - DNA, 15 bp, Homo sapiens
tggctaatttttgta

SEQ ID NO: 213336 - DNA, 15 bp, Homo sapiens
ctggctaatttttgt

SEQ ID NO: 213337 - DNA, 15 bp, Homo sapiens
cctggctaatttttg

SEQ ID NO: 213338 - DNA, 15 bp, Homo sapiens
tacgcctggctaatt

SEQ ID NO: 213339 - DNA, 15 bp, Homo sapiens
ctacgcctggctaat

SEQ ID NO: 213340 - DNA, 15 bp, Homo sapiens
actacgcctggctaa

SEQ ID NO: 213341 - DNA, 15 bp, Homo sapiens
cactacgcctggcta

SEQ ID NO: 213342 - DNA, 15 bp, Homo sapiens
ccactacgcctggct

SEQ ID NO: 213343 - DNA, 15 bp, Homo sapiens
accactacgcctggc

SEQ ID NO: 213344 - DNA, 15 bp, Homo sapiens
caccactacgcctgg

SEQ ID NO: 213345 - DNA, 15 bp, Homo sapiens
acaccactacgcctg

SEQ ID NO: 213346 - DNA, 15 bp, Homo sapiens
cacaccactacgcct

SEQ ID NO: 213347 - DNA, 15 bp, Homo sapiens
acacaccactacgcc

SEQ ID NO: 213348 - DNA, 15 bp, Homo sapiens
cacacaccactacgc

SEQ ID NO: 213349 - DNA, 15 bp, Homo sapiens
gcacacaccactacg

SEQ ID NO: 213350 - DNA, 15 bp, Homo sapiens
ggcacacaccactac

SEQ ID NO: 213351 - DNA, 15 bp, Homo sapiens
aggcacacaccacta

SEQ ID NO: 213352 - DNA, 15 bp, Homo sapiens
caggcacacaccact

SEQ ID NO: 213353 - DNA, 15 bp, Homo sapiens
acaggcacacaccac

SEQ ID NO: 213354 - DNA, 15 bp, Homo sapiens
tacaggcacacacca

SEQ ID NO: 213355 - DNA, 15 bp, Homo sapiens
ttacaggcacacacc

SEQ ID NO: 213356 - DNA, 15 bp, Homo sapiens
gttacaggcacacac

SEQ ID NO: 213357 - DNA, 15 bp, Homo sapiens
ggttacaggcacaca

SEQ ID NO: 213358 - DNA, 15 bp, Homo sapiens
gggttacaggcacac

SEQ ID NO: 213359 - DNA, 15 bp, Homo sapiens
tgggttacaggcaca

SEQ ID NO: 213360 - DNA, 15 bp, Homo sapiens
ctgggttacaggcac

SEQ ID NO: 213361 - DNA, 15 bp, Homo sapiens
gctgggttacaggca

SEQ ID NO: 213362 - DNA, 15 bp, Homo sapiens
agctgggttacaggc

SEQ ID NO: 213363 - DNA, 15 bp, Homo sapiens
tagctgggttacagg

SEQ ID NO: 213364 - DNA, 15 bp, Homo sapiens
gtagctgggttacag

SEQ ID NO: 213365 - DNA, 15 bp, Homo sapiens
ggtagctgggttaca

SEQ ID NO: 213366 - DNA, 15 bp, Homo sapiens
aggtagctgggttac

SEQ ID NO: 213367 - DNA, 15 bp, Homo sapiens
caggtagctgggtta

SEQ ID NO: 213368 - DNA, 15 bp, Homo sapiens
ccaggtagctgggtt

SEQ ID NO: 213369 - DNA, 15 bp, Homo sapiens
cccaggtagctgggt

SEQ ID NO: 213370 - DNA, 15 bp, Homo sapiens
tcccaggtagctggg

SEQ ID NO: 213371 - DNA, 15 bp, Homo sapiens
ctcccaggtagctgg

SEQ ID NO: 213372 - DNA, 15 bp, Homo sapiens
cctcccaggtagctg

SEQ ID NO: 213373 - DNA, 15 bp, Homo sapiens
gcctcccaggtagct

SEQ ID NO: 213374 - DNA, 15 bp, Homo sapiens
agcctcccaggtagc

SEQ ID NO: 213375 - DNA, 15 bp, Homo sapiens
cagcctcccaggtag

SEQ ID NO: 213376 - DNA, 15 bp, Homo sapiens
tcagcctcccaggta

SEQ ID NO: 213377 - DNA, 15 bp, Homo sapiens
ctcagcctcccaggt

SEQ ID NO: 213378 - DNA, 15 bp, Homo sapiens
cctcagcctcccagg

SEQ ID NO: 213379 - DNA, 15 bp, Homo sapiens
gcctcagcctcccag

SEQ ID NO: 213380 - DNA, 15 bp, Homo sapiens
tgattctcctgcctc

SEQ ID NO: 213381 - DNA, 15 bp, Homo sapiens
gtgattctcctgcct

SEQ ID NO: 213382 - DNA, 15 bp, Homo sapiens
agtgattctcctgcc

SEQ ID NO: 213383 - DNA, 15 bp, Homo sapiens
cagtgattctcctgc

SEQ ID NO: 213384 - DNA, 15 bp, Homo sapiens
ccagtgattctcctg

SEQ ID NO: 213385 - DNA, 15 bp, Homo sapiens
tccagtgattctcct

SEQ ID NO: 213386 - DNA, 15 bp, Homo sapiens
ttccagtgattctcc

SEQ ID NO: 213387 - DNA, 15 bp, Homo sapiens
gttccagtgattctc

SEQ ID NO: 213388 - DNA, 15 bp, Homo sapiens
ggttccagtgattct

SEQ ID NO: 213389 - DNA, 15 bp, Homo sapiens
gggttccagtgattc

SEQ ID NO: 213390 - DNA, 15 bp, Homo sapiens
cgggttccagtgatt

SEQ ID NO: 213391 - DNA, 15 bp, Homo sapiens
ccgggttccagtgat

SEQ ID NO: 213392 - DNA, 15 bp, Homo sapiens
cccgggttccagtga

SEQ ID NO: 213393 - DNA, 15 bp, Homo sapiens
tcccgggttccagtg

SEQ ID NO: 213394 - DNA, 15 bp, Homo sapiens
ctcccgggttccagt

SEQ ID NO: 213395 - DNA, 15 bp, Homo sapiens
cctcccgggttccag

SEQ ID NO: 213396 - DNA, 15 bp, Homo sapiens
gcctcccgggttcca

SEQ ID NO: 213397 - DNA, 15 bp, Homo sapiens
tgcctcccgggttcc

SEQ ID NO: 213398 - DNA, 15 bp, Homo sapiens
gcctctgcctcccgg

SEQ ID NO: 213399 - DNA, 15 bp, Homo sapiens
agcctctgcctcccg

SEQ ID NO: 213400 - DNA, 15 bp, Homo sapiens
tagcctctgcctccc

SEQ ID NO: 213401 - DNA, 15 bp, Homo sapiens
gtagcctctgcctcc

SEQ ID NO: 213402 - DNA, 15 bp, Homo sapiens
tgtagcctctgcctc

SEQ ID NO: 213403 - DNA, 15 bp, Homo sapiens
ctgtagcctctgcct

SEQ ID NO: 213404 - DNA, 15 bp, Homo sapiens
actgtagcctctgcc

SEQ ID NO: 213405 - DNA, 15 bp, Homo sapiens
cactgtagcctctgc

SEQ ID NO: 213406 - DNA, 15 bp, Homo sapiens
tcactgtagcctctg

SEQ ID NO: 213407 - DNA, 15 bp, Homo sapiens
ctcactgtagcctct

SEQ ID NO: 213408 - DNA, 15 bp, Homo sapiens
gctcactgtagcctc

SEQ ID NO: 213409 - DNA, 15 bp, Homo sapiens
ggctcactgtagcct

SEQ ID NO: 213410 - DNA, 15 bp, Homo sapiens
tggctcactgtagcc

SEQ ID NO: 213411 - DNA, 15 bp, Homo sapiens
ttggctcactgtagc

SEQ ID NO: 213412 - DNA, 15 bp, Homo sapiens
gttggctcactgtag

SEQ ID NO: 213413 - DNA, 15 bp, Homo sapiens
tgttggctcactgta

SEQ ID NO: 213414 - DNA, 15 bp, Homo sapiens
atgttggctcactgt

SEQ ID NO: 213415 - DNA, 15 bp, Homo sapiens
gatgttggctcactg

SEQ ID NO: 213416 - DNA, 15 bp, Homo sapiens
tgatgttggctcact

SEQ ID NO: 213417 - DNA, 15 bp, Homo sapiens
gtgatgttggctcac

SEQ ID NO: 213418 - DNA, 15 bp, Homo sapiens
cgtgatgttggctca

SEQ ID NO: 213419 - DNA, 15 bp, Homo sapiens
gcgtgatgttggctc

SEQ ID NO: 213420 - DNA, 15 bp, Homo sapiens
ggcgtgatgttggct

SEQ ID NO: 213421 - DNA, 15 bp, Homo sapiens
tggcgtgatgttggc

SEQ ID NO: 213422 - DNA, 15 bp, Homo sapiens
gtggcgtgatgttgg

SEQ ID NO: 213423 - DNA, 15 bp, Homo sapiens
agtggcgtgatgttg

SEQ ID NO: 213424 - DNA, 15 bp, Homo sapiens
cagtggcgtgatgtt

SEQ ID NO: 213425 - DNA, 15 bp, Homo sapiens
gcagtggcgtgatgt

SEQ ID NO: 213426 - DNA, 15 bp, Homo sapiens
tgcagtggcgtgatg

SEQ ID NO: 213427 - DNA, 15 bp, Homo sapiens
gtgcagtggcgtgat

SEQ ID NO: 213428 - DNA, 15 bp, Homo sapiens
agtgcagtggcgtga

SEQ ID NO: 213429 - DNA, 15 bp, Homo sapiens
gagtgcagtggcgtg

SEQ ID NO: 213430 - DNA, 15 bp, Homo sapiens
ggagtgcagtggcgt

SEQ ID NO: 213431 - DNA, 15 bp, Homo sapiens
agagtcttgctctgt

SEQ ID NO: 213432 - DNA, 15 bp, Homo sapiens
cagagtcttgctctg

SEQ ID NO: 213433 - DNA, 15 bp, Homo sapiens
acagagtcttgctct

SEQ ID NO: 213434 - DNA, 15 bp, Homo sapiens
gacagagtcttgctc

SEQ ID NO: 213435 - DNA, 15 bp, Homo sapiens
agacagagtcttgct

SEQ ID NO: 213436 - DNA, 15 bp, Homo sapiens
gagacagagtcttgc

SEQ ID NO: 213437 - DNA, 15 bp, Homo sapiens
tgagacagagtcttg

SEQ ID NO: 213438 - DNA, 15 bp, Homo sapiens
ttgagacagagtctt

SEQ ID NO: 213439 - DNA, 15 bp, Homo sapiens
gttttgagacagagt

SEQ ID NO: 213440 - DNA, 15 bp, Homo sapiens
tgttttgagacagag

SEQ ID NO: 213441 - DNA, 15 bp, Homo sapiens
ttgttttgagacaga

SEQ ID NO: 213442 - DNA, 15 bp, Homo sapiens
tttgttttgagacag

SEQ ID NO: 213443 - DNA, 15 bp, Homo sapiens
ttttgttttgagaca

SEQ ID NO: 213444 - DNA, 15 bp, Homo sapiens
gttttgttttgagac

SEQ ID NO: 213445 - DNA, 15 bp, Homo sapiens
tgttttgttttgaga

SEQ ID NO: 213446 - DNA, 15 bp, Homo sapiens
ttgttttgttttgag

SEQ ID NO: 213447 - DNA, 15 bp, Homo sapiens
tttgttttgttttga

SEQ ID NO: 213448 - DNA, 15 bp, Homo sapiens
ttttgttttgttttg

SEQ ID NO: 213449 - DNA, 15 bp, Homo sapiens
tttttgttttgtttt

SEQ ID NO: 213450 - DNA, 15 bp, Homo sapiens
ttttttgttttgttt

SEQ ID NO: 213451 - DNA, 15 bp, Homo sapiens
gttttttgttttgtt

SEQ ID NO: 213452 - DNA, 15 bp, Homo sapiens
tgttttttgttttgt

SEQ ID NO: 213453 - DNA, 15 bp, Homo sapiens
ttgttttttgttttg

SEQ ID NO: 213454 - DNA, 15 bp, Homo sapiens
tttgttttttgtttt

SEQ ID NO: 213455 - DNA, 15 bp, Homo sapiens
ttttgttttttgttt

SEQ ID NO: 213456 - DNA, 15 bp, Homo sapiens
tttttgttttttgtt

SEQ ID NO: 213457 - DNA, 15 bp, Homo sapiens
ttttttgttttttgt

SEQ ID NO: 213458 - DNA, 15 bp, Homo sapiens
gttttttgttttttg

SEQ ID NO: 213459 - DNA, 15 bp, Homo sapiens
agttttttgtttttt

SEQ ID NO: 213460 - DNA, 15 bp, Homo sapiens
tagttttttgttttt

SEQ ID NO: 213461 - DNA, 15 bp, Homo sapiens
gtagttttttgtttt

SEQ ID NO: 213462 - DNA, 15 bp, Homo sapiens
cgtagttttttgttt

SEQ ID NO: 213463 - DNA, 15 bp, Homo sapiens
acgtagttttttgtt

SEQ ID NO: 213464 - DNA, 15 bp, Homo sapiens
tacgtagttttttgt

SEQ ID NO: 213465 - DNA, 15 bp, Homo sapiens
atacgtagttttttg

SEQ ID NO: 213466 - DNA, 15 bp, Homo sapiens
aatacgtagtttttt

SEQ ID NO: 213467 - DNA, 15 bp, Homo sapiens
taatacgtagttttt

SEQ ID NO: 213468 - DNA, 15 bp, Homo sapiens
ttaatacgtagtttt

SEQ ID NO: 213469 - DNA, 15 bp, Homo sapiens
cttaatacgtagttt

SEQ ID NO: 213470 - DNA, 15 bp, Homo sapiens
tcttaatacgtagtt

SEQ ID NO: 213471 - DNA, 15 bp, Homo sapiens
gtcttaatacgtagt

SEQ ID NO: 213472 - DNA, 15 bp, Homo sapiens
tgtcttaatacgtag

SEQ ID NO: 213473 - DNA, 15 bp, Homo sapiens
ttgtcttaatacgta

SEQ ID NO: 213474 - DNA, 15 bp, Homo sapiens
cttgtcttaatacgt

SEQ ID NO: 213475 - DNA, 15 bp, Homo sapiens
tcttgtcttaatacg

SEQ ID NO: 213476 - DNA, 15 bp, Homo sapiens
ttcttgtcttaatac

SEQ ID NO: 213477 - DNA, 15 bp, Homo sapiens
tttcttgtcttaata

SEQ ID NO: 213478 - DNA, 15 bp, Homo sapiens
gtttcttgtcttaat

SEQ ID NO: 213479 - DNA, 15 bp, Homo sapiens
tgtttcttgtcttaa

SEQ ID NO: 213480 - DNA, 15 bp, Homo sapiens
ctgtttcttgtctta

SEQ ID NO: 213481 - DNA, 15 bp, Homo sapiens
tctgtttcttgtctt

SEQ ID NO: 213482 - DNA, 15 bp, Homo sapiens
gtctgtttcttgtct

SEQ ID NO: 213483 - DNA, 15 bp, Homo sapiens
agtctgtttcttgtc

SEQ ID NO: 213484 - DNA, 15 bp, Homo sapiens
cagtctgtttcttgt

SEQ ID NO: 213485 - DNA, 15 bp, Homo sapiens
ccagtctgtttcttg

SEQ ID NO: 213486 - DNA, 15 bp, Homo sapiens
cccagtctgtttctt

SEQ ID NO: 213487 - DNA, 15 bp, Homo sapiens
gcccagtctgtttct

SEQ ID NO: 213488 - DNA, 15 bp, Homo sapiens
cgcccagtctgtttc

SEQ ID NO: 213489 - DNA, 15 bp, Homo sapiens
gcgcccagtctgttt

SEQ ID NO: 213490 - DNA, 15 bp, Homo sapiens
cgcgcccagtctgtt

SEQ ID NO: 213491 - DNA, 15 bp, Homo sapiens
ccgcgcccagtctgt

SEQ ID NO: 213492 - DNA, 15 bp, Homo sapiens
accgcgcccagtctg

SEQ ID NO: 213493 - DNA, 15 bp, Homo sapiens
caccgcgcccagtct

SEQ ID NO: 213494 - DNA, 15 bp, Homo sapiens
ccaccgcgcccagtc

SEQ ID NO: 213495 - DNA, 15 bp, Homo sapiens
gccaccgcgcccagt

SEQ ID NO: 213496 - DNA, 15 bp, Homo sapiens
agccaccgcgcccag

SEQ ID NO: 213497 - DNA, 15 bp, Homo sapiens
gagccaccgcgccca

SEQ ID NO: 213498 - DNA, 15 bp, Homo sapiens
ggcgtgagccaccgc

SEQ ID NO: 213499 - DNA, 15 bp, Homo sapiens
gtgatccgcccgcct

SEQ ID NO: 213500 - DNA, 15 bp, Homo sapiens
tgtgatccgcccgcc

SEQ ID NO: 213501 - DNA, 15 bp, Homo sapiens
ttgtgatccgcccgc

SEQ ID NO: 213502 - DNA, 15 bp, Homo sapiens
cttgtgatccgcccg

SEQ ID NO: 213503 - DNA, 15 bp, Homo sapiens
ccttgtgatccgccc

SEQ ID NO: 213504 - DNA, 15 bp, Homo sapiens
accttgtgatccgcc

SEQ ID NO: 213505 - DNA, 15 bp, Homo sapiens
gaccttgtgatccgc

SEQ ID NO: 213506 - DNA, 15 bp, Homo sapiens
tgaccttgtgatccg

SEQ ID NO: 213507 - DNA, 15 bp, Homo sapiens
ctgaccttgtgatcc

SEQ ID NO: 213508 - DNA, 15 bp, Homo sapiens
cctgaccttgtgatc

SEQ ID NO: 213509 - DNA, 15 bp, Homo sapiens
tcctgaccttgtgat

SEQ ID NO: 213510 - DNA, 15 bp, Homo sapiens
ctcctgaccttgtga

SEQ ID NO: 213511 - DNA, 15 bp, Homo sapiens
tctcctgaccttgtg

SEQ ID NO: 213512 - DNA, 15 bp, Homo sapiens
atctcctgaccttgt

SEQ ID NO: 213513 - DNA, 15 bp, Homo sapiens
gatctcctgaccttg

SEQ ID NO: 213514 - DNA, 15 bp, Homo sapiens
cgtgttagccaggat

SEQ ID NO: 213515 - DNA, 15 bp, Homo sapiens
ccgtgttagccagga

SEQ ID NO: 213516 - DNA, 15 bp, Homo sapiens
accgtgttagccagg

SEQ ID NO: 213517 - DNA, 15 bp, Homo sapiens
ctattttttagtaga

SEQ ID NO: 213518 - DNA, 15 bp, Homo sapiens
tctattttttagtag

SEQ ID NO: 213519 - DNA, 15 bp, Homo sapiens
ttctattttttagta

SEQ ID NO: 213520 - DNA, 15 bp, Homo sapiens
tttctattttttagt

SEQ ID NO: 213521 - DNA, 15 bp, Homo sapiens
ttttctattttttag

SEQ ID NO: 213522 - DNA, 15 bp, Homo sapiens
tttttctatttttta

SEQ ID NO: 213523 - DNA, 15 bp, Homo sapiens
ttttttctatttttt

SEQ ID NO: 213524 - DNA, 15 bp, Homo sapiens
attttttctattttt

SEQ ID NO: 213525 - DNA, 15 bp, Homo sapiens
aattttttctatttt

SEQ ID NO: 213526 - DNA, 15 bp, Homo sapiens
taattttttctattt

SEQ ID NO: 213527 - DNA, 15 bp, Homo sapiens
ctaattttttctatt

SEQ ID NO: 213528 - DNA, 15 bp, Homo sapiens
gctaattttttctat

SEQ ID NO: 213529 - DNA, 15 bp, Homo sapiens
agctaattttttcta

SEQ ID NO: 213530 - DNA, 15 bp, Homo sapiens
cagctaattttttct

SEQ ID NO: 213531 - DNA, 15 bp, Homo sapiens
ccagctaattttttc

SEQ ID NO: 213532 - DNA, 15 bp, Homo sapiens
cccagctaatttttt

SEQ ID NO: 213533 - DNA, 15 bp, Homo sapiens
ccccagctaattttt

SEQ ID NO: 213534 - DNA, 15 bp, Homo sapiens
accccagctaatttt

SEQ ID NO: 213535 - DNA, 15 bp, Homo sapiens
caccccagctaattt

SEQ ID NO: 213536 - DNA, 15 bp, Homo sapiens
ccaccccagctaatt

SEQ ID NO: 213537 - DNA, 15 bp, Homo sapiens
accaccccagctaat

SEQ ID NO: 213538 - DNA, 15 bp, Homo sapiens
caccaccccagctaa

SEQ ID NO: 213539 - DNA, 15 bp, Homo sapiens
ccaccaccccagcta

SEQ ID NO: 213540 - DNA, 15 bp, Homo sapiens
gccaccaccccagct

SEQ ID NO: 213541 - DNA, 15 bp, Homo sapiens
cgccaccaccccagc

SEQ ID NO: 213542 - DNA, 15 bp, Homo sapiens
ccgccaccaccccag

SEQ ID NO: 213543 - DNA, 15 bp, Homo sapiens
cccgccaccacccca

SEQ ID NO: 213544 - DNA, 15 bp, Homo sapiens
gcccgccaccacccc

SEQ ID NO: 213545 - DNA, 15 bp, Homo sapiens
cgcccgccaccaccc

SEQ ID NO: 213546 - DNA, 15 bp, Homo sapiens
gcgcccgccaccacc

SEQ ID NO: 213547 - DNA, 15 bp, Homo sapiens
ggcgcccgccaccac

SEQ ID NO: 213548 - DNA, 15 bp, Homo sapiens
aggcgcccgccacca

SEQ ID NO: 213549 - DNA, 15 bp, Homo sapiens
taggcgcccgccacc

SEQ ID NO: 213550 - DNA, 15 bp, Homo sapiens
ataggcgcccgccac

SEQ ID NO: 213551 - DNA, 15 bp, Homo sapiens
tataggcgcccgcca

SEQ ID NO: 213552 - DNA, 15 bp, Homo sapiens
ctataggcgcccgcc

SEQ ID NO: 213553 - DNA, 15 bp, Homo sapiens
actataggcgcccgc

SEQ ID NO: 213554 - DNA, 15 bp, Homo sapiens
gactataggcgcccg

SEQ ID NO: 213555 - DNA, 15 bp, Homo sapiens
agactataggcgccc

SEQ ID NO: 213556 - DNA, 15 bp, Homo sapiens
gagactataggcgcc

SEQ ID NO: 213557 - DNA, 15 bp, Homo sapiens
tgagactataggcgc

SEQ ID NO: 213558 - DNA, 15 bp, Homo sapiens
ctgagactataggcg

SEQ ID NO: 213559 - DNA, 15 bp, Homo sapiens
gctgagactataggc

SEQ ID NO: 213560 - DNA, 15 bp, Homo sapiens
agctgagactatagg

SEQ ID NO: 213561 - DNA, 15 bp, Homo sapiens
tagctgagactatag

SEQ ID NO: 213562 - DNA, 15 bp, Homo sapiens
gtagctgagactata

SEQ ID NO: 213563 - DNA, 15 bp, Homo sapiens
agtagctgagactat

SEQ ID NO: 213564 - DNA, 15 bp, Homo sapiens
gagtagctgagacta

SEQ ID NO: 213565 - DNA, 15 bp, Homo sapiens
cgagtagctgagact

SEQ ID NO: 213566 - DNA, 15 bp, Homo sapiens
ccgagtagctgagac

SEQ ID NO: 213567 - DNA, 15 bp, Homo sapiens
cccgagtagctgaga

SEQ ID NO: 213568 - DNA, 15 bp, Homo sapiens
tcccgagtagctgag

SEQ ID NO: 213569 - DNA, 15 bp, Homo sapiens
ctcccgagtagctga

SEQ ID NO: 213570 - DNA, 15 bp, Homo sapiens
tgctcactgcaagct

SEQ ID NO: 213571 - DNA, 15 bp, Homo sapiens
ctgctcactgcaagc

SEQ ID NO: 213572 - DNA, 15 bp, Homo sapiens
tctgctcactgcaag

SEQ ID NO: 213573 - DNA, 15 bp, Homo sapiens
ctctgctcactgcaa

SEQ ID NO: 213574 - DNA, 15 bp, Homo sapiens
tctctgctcactgca

SEQ ID NO: 213575 - DNA, 15 bp, Homo sapiens
atctctgctcactgc

SEQ ID NO: 213576 - DNA, 15 bp, Homo sapiens
gatctctgctcactg

SEQ ID NO: 213577 - DNA, 15 bp, Homo sapiens
cgatctctgctcact

SEQ ID NO: 213578 - DNA, 15 bp, Homo sapiens
acgatctctgctcac

SEQ ID NO: 213579 - DNA, 15 bp, Homo sapiens
cacgatctctgctca

SEQ ID NO: 213580 - DNA, 15 bp, Homo sapiens
gcacgatctctgctc

SEQ ID NO: 213581 - DNA, 15 bp, Homo sapiens
ggcacgatctctgct

SEQ ID NO: 213582 - DNA, 15 bp, Homo sapiens
tggcacgatctctgc

SEQ ID NO: 213583 - DNA, 15 bp, Homo sapiens
gtggcacgatctctg

SEQ ID NO: 213584 - DNA, 15 bp, Homo sapiens
agtggcacgatctct

SEQ ID NO: 213585 - DNA, 15 bp, Homo sapiens
cagtggcacgatctc

SEQ ID NO: 213586 - DNA, 15 bp, Homo sapiens
gcagtggcacgatct

SEQ ID NO: 213587 - DNA, 15 bp, Homo sapiens
tgcagtggcacgatc

SEQ ID NO: 213588 - DNA, 15 bp, Homo sapiens
gtgcagtggcacgat

SEQ ID NO: 213589 - DNA, 15 bp, Homo sapiens
agtgcagtggcacga

SEQ ID NO: 213590 - DNA, 15 bp, Homo sapiens
gagtgcagtggcacg

SEQ ID NO: 213591 - DNA, 15 bp, Homo sapiens
ggagtgcagtggcac

SEQ ID NO: 213592 - DNA, 15 bp, Homo sapiens
tggagtgcagtggca

SEQ ID NO: 213593 - DNA, 15 bp, Homo sapiens
actggagtgcagtgg

SEQ ID NO: 213594 - DNA, 15 bp, Homo sapiens
gactggagtgcagtg

SEQ ID NO: 213595 - DNA, 15 bp, Homo sapiens
agactggagtgcagt

SEQ ID NO: 213596 - DNA, 15 bp, Homo sapiens
cagactggagtgcag

SEQ ID NO: 213597 - DNA, 15 bp, Homo sapiens
ccagactggagtgca

SEQ ID NO: 213598 - DNA, 15 bp, Homo sapiens
cccagactggagtgc

SEQ ID NO: 213599 - DNA, 15 bp, Homo sapiens
acccagactggagtg

SEQ ID NO: 213600 - DNA, 15 bp, Homo sapiens
cacccagactggagt

SEQ ID NO: 213601 - DNA, 15 bp, Homo sapiens
tcacccagactggag

SEQ ID NO: 213602 - DNA, 15 bp, Homo sapiens
gtcacccagactgga

SEQ ID NO: 213603 - DNA, 15 bp, Homo sapiens
tgtcacccagactgg

SEQ ID NO: 213604 - DNA, 15 bp, Homo sapiens
ctgtcacccagactg

SEQ ID NO: 213605 - DNA, 15 bp, Homo sapiens
tctgtcacccagact

SEQ ID NO: 213606 - DNA, 15 bp, Homo sapiens
ctctgtcacccagac

SEQ ID NO: 213607 - DNA, 15 bp, Homo sapiens
gctctgtcacccaga

SEQ ID NO: 213608 - DNA, 15 bp, Homo sapiens
cggagtcttgctctg

SEQ ID NO: 213609 - DNA, 15 bp, Homo sapiens
acggagtcttgctct

SEQ ID NO: 213610 - DNA, 15 bp, Homo sapiens
gacggagtcttgctc

SEQ ID NO: 213611 - DNA, 15 bp, Homo sapiens
agacggagtcttgct

SEQ ID NO: 213612 - DNA, 15 bp, Homo sapiens
gagacggagtcttgc

SEQ ID NO: 213613 - DNA, 15 bp, Homo sapiens
tgagacggagtcttg

SEQ ID NO: 213614 - DNA, 15 bp, Homo sapiens
ttgagacggagtctt

SEQ ID NO: 213615 - DNA, 15 bp, Homo sapiens
gtttttttttttgag

SEQ ID NO: 213616 - DNA, 15 bp, Homo sapiens
tgtttttttttttga

SEQ ID NO: 213617 - DNA, 15 bp, Homo sapiens
ttgtttttttttttg

SEQ ID NO: 213618 - DNA, 15 bp, Homo sapiens
ttttgtttttttttt

SEQ ID NO: 213619 - DNA, 15 bp, Homo sapiens
tttttgttttttttt

SEQ ID NO: 213620 - DNA, 15 bp, Homo sapiens
gtttttgtttttttt

SEQ ID NO: 213621 - DNA, 15 bp, Homo sapiens
tgtttttgttttttt

SEQ ID NO: 213622 - DNA, 15 bp, Homo sapiens
ttgtttttgtttttt

SEQ ID NO: 213623 - DNA, 15 bp, Homo sapiens
cttgtttttgttttt

SEQ ID NO: 213624 - DNA, 15 bp, Homo sapiens
tcttgtttttgtttt

SEQ ID NO: 213625 - DNA, 15 bp, Homo sapiens
ttcttgtttttgttt

SEQ ID NO: 213626 - DNA, 15 bp, Homo sapiens
tttcttgtttttgtt

SEQ ID NO: 213627 - DNA, 15 bp, Homo sapiens
gtttcttgtttttgt

SEQ ID NO: 213628 - DNA, 15 bp, Homo sapiens
tgtttcttgtttttg

SEQ ID NO: 213629 - DNA, 15 bp, Homo sapiens
ttgtttcttgttttt

SEQ ID NO: 213630 - DNA, 15 bp, Homo sapiens
tttgtttcttgtttt

SEQ ID NO: 213631 - DNA, 15 bp, Homo sapiens
atttgtttcttgttt

SEQ ID NO: 213632 - DNA, 15 bp, Homo sapiens
aatttgtttcttgtt

SEQ ID NO: 213633 - DNA, 15 bp, Homo sapiens
taatttgtttcttgt

SEQ ID NO: 213634 - DNA, 15 bp, Homo sapiens
ttaatttgtttcttg

SEQ ID NO: 213635 - DNA, 15 bp, Homo sapiens
tttaatttgtttctt

SEQ ID NO: 213636 - DNA, 15 bp, Homo sapiens
gtttaatttgtttct

SEQ ID NO: 213637 - DNA, 15 bp, Homo sapiens
agtttaatttgtttc

SEQ ID NO: 213638 - DNA, 15 bp, Homo sapiens
tagtttaatttgttt

SEQ ID NO: 213639 - DNA, 15 bp, Homo sapiens
ttagtttaatttgtt

SEQ ID NO: 213640 - DNA, 15 bp, Homo sapiens
attagtttaatttgt

SEQ ID NO: 213641 - DNA, 15 bp, Homo sapiens
cattagtttaatttg

SEQ ID NO: 213642 - DNA, 15 bp, Homo sapiens
acattagtttaattt

SEQ ID NO: 213643 - DNA, 15 bp, Homo sapiens
cacattagtttaatt

SEQ ID NO: 213644 - DNA, 15 bp, Homo sapiens
tcacattagtttaat

SEQ ID NO: 213645 - DNA, 15 bp, Homo sapiens
atcacattagtttaa

SEQ ID NO: 213646 - DNA, 15 bp, Homo sapiens
tatcacattagttta

SEQ ID NO: 213647 - DNA, 15 bp, Homo sapiens
ctatcacattagttt

SEQ ID NO: 213648 - DNA, 15 bp, Homo sapiens
tctatcacattagtt

SEQ ID NO: 213649 - DNA, 15 bp, Homo sapiens
gtctatcacattagt

SEQ ID NO: 213650 - DNA, 15 bp, Homo sapiens
agtctatcacattag

SEQ ID NO: 213651 - DNA, 15 bp, Homo sapiens
tagtctatcacatta

SEQ ID NO: 213652 - DNA, 15 bp, Homo sapiens
gtagtctatcacatt

SEQ ID NO: 213653 - DNA, 15 bp, Homo sapiens
agtagtctatcacat

SEQ ID NO: 213654 - DNA, 15 bp, Homo sapiens
cagtagtctatcaca

SEQ ID NO: 213655 - DNA, 15 bp, Homo sapiens
gcagtagtctatcac

SEQ ID NO: 213656 - DNA, 15 bp, Homo sapiens
agcagtagtctatca

SEQ ID NO: 213657 - DNA, 15 bp, Homo sapiens
aagcagtagtctatc

SEQ ID NO: 213658 - DNA, 15 bp, Homo sapiens
aaagcagtagtctat

SEQ ID NO: 213659 - DNA, 15 bp, Homo sapiens
caaagcagtagtcta

SEQ ID NO: 213660 - DNA, 15 bp, Homo sapiens
acaaagcagtagtct

SEQ ID NO: 213661 - DNA, 15 bp, Homo sapiens
aacaaagcagtagtc

SEQ ID NO: 213662 - DNA, 15 bp, Homo sapiens
aaacaaagcagtagt

SEQ ID NO: 213663 - DNA, 15 bp, Homo sapiens
aaaacaaagcagtag

SEQ ID NO: 213664 - DNA, 15 bp, Homo sapiens
gaaaacaaagcagta

SEQ ID NO: 213665 - DNA, 15 bp, Homo sapiens
tgaaaacaaagcagt

SEQ ID NO: 213666 - DNA, 15 bp, Homo sapiens
ttgaaaacaaagcag

SEQ ID NO: 213667 - DNA, 15 bp, Homo sapiens
tttgaaaacaaagca

SEQ ID NO: 213668 - DNA, 15 bp, Homo sapiens
ttttgaaaacaaagc

SEQ ID NO: 213669 - DNA, 15 bp, Homo sapiens
cttttgaaaacaaag

SEQ ID NO: 213670 - DNA, 15 bp, Homo sapiens
tcttttgaaaacaaa

SEQ ID NO: 213671 - DNA, 15 bp, Homo sapiens
atcttttgaaaacaa

SEQ ID NO: 213672 - DNA, 15 bp, Homo sapiens
tatcttttgaaaaca

SEQ ID NO: 213673 - DNA, 15 bp, Homo sapiens
gtatcttttgaaaac

SEQ ID NO: 213674 - DNA, 15 bp, Homo sapiens
tgtatcttttgaaaa

SEQ ID NO: 213675 - DNA, 15 bp, Homo sapiens
gtgtatcttttgaaa

SEQ ID NO: 213676 - DNA, 15 bp, Homo sapiens
agtgtatcttttgaa

SEQ ID NO: 213677 - DNA, 15 bp, Homo sapiens
gagtgtatcttttga

SEQ ID NO: 213678 - DNA, 15 bp, Homo sapiens
ggagtgtatcttttg

SEQ ID NO: 213679 - DNA, 15 bp, Homo sapiens
gggagtgtatctttt

SEQ ID NO: 213680 - DNA, 15 bp, Homo sapiens
ggggagtgtatcttt

SEQ ID NO: 213681 - DNA, 15 bp, Homo sapiens
tggggagtgtatctt

SEQ ID NO: 213682 - DNA, 15 bp, Homo sapiens
ttggggagtgtatct

SEQ ID NO: 213683 - DNA, 15 bp, Homo sapiens
tttggggagtgtatc

SEQ ID NO: 213684 - DNA, 15 bp, Homo sapiens
ttttggggagtgtat

SEQ ID NO: 213685 - DNA, 15 bp, Homo sapiens
cttttggggagtgta

SEQ ID NO: 213686 - DNA, 15 bp, Homo sapiens
acttttggggagtgt

SEQ ID NO: 213687 - DNA, 15 bp, Homo sapiens
aacttttggggagtg

SEQ ID NO: 213688 - DNA, 15 bp, Homo sapiens
taacttttggggagt

SEQ ID NO: 213689 - DNA, 15 bp, Homo sapiens
gtaacttttggggag

SEQ ID NO: 213690 - DNA, 15 bp, Homo sapiens
agtaacttttgggga

SEQ ID NO: 213691 - DNA, 15 bp, Homo sapiens
cagtaacttttgggg

SEQ ID NO: 213692 - DNA, 15 bp, Homo sapiens
tcagtaacttttggg

SEQ ID NO: 213693 - DNA, 15 bp, Homo sapiens
atcagtaacttttgg

SEQ ID NO: 213694 - DNA, 15 bp, Homo sapiens
gatcagtaacttttg

SEQ ID NO: 213695 - DNA, 15 bp, Homo sapiens
agatcagtaactttt

SEQ ID NO: 213696 - DNA, 15 bp, Homo sapiens
tagatcagtaacttt

SEQ ID NO: 213697 - DNA, 15 bp, Homo sapiens
ttagatcagtaactt

SEQ ID NO: 213698 - DNA, 15 bp, Homo sapiens
tttagatcagtaact

SEQ ID NO: 213699 - DNA, 15 bp, Homo sapiens
ttttagatcagtaac

SEQ ID NO: 213700 - DNA, 15 bp, Homo sapiens
attttagatcagtaa

SEQ ID NO: 213701 - DNA, 15 bp, Homo sapiens
tattttagatcagta

SEQ ID NO: 213702 - DNA, 15 bp, Homo sapiens
gtattttagatcagt

SEQ ID NO: 213703 - DNA, 15 bp, Homo sapiens
tgtattttagatcag

SEQ ID NO: 213704 - DNA, 15 bp, Homo sapiens
ctgtattttagatca

SEQ ID NO: 213705 - DNA, 15 bp, Homo sapiens
actgtattttagatc

SEQ ID NO: 213706 - DNA, 15 bp, Homo sapiens
tactgtattttagat

SEQ ID NO: 213707 - DNA, 15 bp, Homo sapiens
ctactgtattttaga

SEQ ID NO: 213708 - DNA, 15 bp, Homo sapiens
actactgtattttag

SEQ ID NO: 213709 - DNA, 15 bp, Homo sapiens
tactactgtatttta

SEQ ID NO: 213710 - DNA, 15 bp, Homo sapiens
gtactactgtatttt

SEQ ID NO: 213711 - DNA, 15 bp, Homo sapiens
agtactactgtattt

SEQ ID NO: 213712 - DNA, 15 bp, Homo sapiens
tagtactactgtatt

SEQ ID NO: 213713 - DNA, 15 bp, Homo sapiens
atagtactactgtat

SEQ ID NO: 213714 - DNA, 15 bp, Homo sapiens
gatagtactactgta

SEQ ID NO: 213715 - DNA, 15 bp, Homo sapiens
agatagtactactgt

SEQ ID NO: 213716 - DNA, 15 bp, Homo sapiens
gagatagtactactg

SEQ ID NO: 213717 - DNA, 15 bp, Homo sapiens
agagatagtactact

SEQ ID NO: 213718 - DNA, 15 bp, Homo sapiens
cagagatagtactac

SEQ ID NO: 213719 - DNA, 15 bp, Homo sapiens
acagagatagtacta

SEQ ID NO: 213720 - DNA, 15 bp, Homo sapiens
aacagagatagtact

SEQ ID NO: 213721 - DNA, 15 bp, Homo sapiens
aaacagagatagtac

SEQ ID NO: 213722 - DNA, 15 bp, Homo sapiens
taaacagagatagta

SEQ ID NO: 213723 - DNA, 15 bp, Homo sapiens
ctaaacagagatagt

SEQ ID NO: 213724 - DNA, 15 bp, Homo sapiens
actaaacagagatag

SEQ ID NO: 213725 - DNA, 15 bp, Homo sapiens
tactaaacagagata

SEQ ID NO: 213726 - DNA, 15 bp, Homo sapiens
ttactaaacagagat

SEQ ID NO: 213727 - DNA, 15 bp, Homo sapiens
cttactaaacagaga

SEQ ID NO: 213728 - DNA, 15 bp, Homo sapiens
tcttactaaacagag

SEQ ID NO: 213729 - DNA, 15 bp, Homo sapiens
ttcttactaaacaga

SEQ ID NO: 213730 - DNA, 15 bp, Homo sapiens
gttcttactaaacag

SEQ ID NO: 213731 - DNA, 15 bp, Homo sapiens
ggttcttactaaaca

SEQ ID NO: 213732 - DNA, 15 bp, Homo sapiens
gggttcttactaaac

SEQ ID NO: 213733 - DNA, 15 bp, Homo sapiens
agggttcttactaaa

SEQ ID NO: 213734 - DNA, 15 bp, Homo sapiens
cagggttcttactaa

SEQ ID NO: 213735 - DNA, 15 bp, Homo sapiens
tcagggttcttacta

SEQ ID NO: 213736 - DNA, 15 bp, Homo sapiens
gtcagggttcttact

SEQ ID NO: 213737 - DNA, 15 bp, Homo sapiens
tgtcagggttcttac

SEQ ID NO: 213738 - DNA, 15 bp, Homo sapiens
ttgtcagggttctta

SEQ ID NO: 213739 - DNA, 15 bp, Homo sapiens
gttgtcagggttctt

SEQ ID NO: 213740 - DNA, 15 bp, Homo sapiens
agttgtcagggttct

SEQ ID NO: 213741 - DNA, 15 bp, Homo sapiens
tagttgtcagggttc

SEQ ID NO: 213742 - DNA, 15 bp, Homo sapiens
ttagttgtcagggtt

SEQ ID NO: 213743 - DNA, 15 bp, Homo sapiens
attagttgtcagggt

SEQ ID NO: 213744 - DNA, 15 bp, Homo sapiens
tattagttgtcaggg

SEQ ID NO: 213745 - DNA, 15 bp, Homo sapiens
ctattagttgtcagg

SEQ ID NO: 213746 - DNA, 15 bp, Homo sapiens
actattagttgtcag

SEQ ID NO: 213747 - DNA, 15 bp, Homo sapiens
cactattagttgtca

SEQ ID NO: 213748 - DNA, 15 bp, Homo sapiens
acactattagttgtc

SEQ ID NO: 213749 - DNA, 15 bp, Homo sapiens
aacactattagttgt

SEQ ID NO: 213750 - DNA, 15 bp, Homo sapiens
gaacactattagttg

SEQ ID NO: 213751 - DNA, 15 bp, Homo sapiens
agaacactattagtt

SEQ ID NO: 213752 - DNA, 15 bp, Homo sapiens
aagaacactattagt

SEQ ID NO: 213753 - DNA, 15 bp, Homo sapiens
taagaacactattag

SEQ ID NO: 213754 - DNA, 15 bp, Homo sapiens
ataagaacactatta

SEQ ID NO: 213755 - DNA, 15 bp, Homo sapiens
tataagaacactatt

SEQ ID NO: 213756 - DNA, 15 bp, Homo sapiens
atataagaacactat

SEQ ID NO: 213757 - DNA, 15 bp, Homo sapiens
catataagaacacta

SEQ ID NO: 213758 - DNA, 15 bp, Homo sapiens
acatataagaacact

SEQ ID NO: 213759 - DNA, 15 bp, Homo sapiens
tacatataagaacac

SEQ ID NO: 213760 - DNA, 15 bp, Homo sapiens
ttacatataagaaca

SEQ ID NO: 213761 - DNA, 15 bp, Homo sapiens
tttacatataagaac

SEQ ID NO: 213762 - DNA, 15 bp, Homo sapiens
ttttacatataagaa

SEQ ID NO: 213763 - DNA, 15 bp, Homo sapiens
attttacatataaga

SEQ ID NO: 213764 - DNA, 15 bp, Homo sapiens
cattttacatataag

SEQ ID NO: 213765 - DNA, 15 bp, Homo sapiens
gcattttacatataa

SEQ ID NO: 213766 - DNA, 15 bp, Homo sapiens
agcattttacatata

SEQ ID NO: 213767 - DNA, 15 bp, Homo sapiens
tagcattttacatat

SEQ ID NO: 213768 - DNA, 15 bp, Homo sapiens
atagcattttacata

SEQ ID NO: 213769 - DNA, 15 bp, Homo sapiens
aatagcattttacat

SEQ ID NO: 213770 - DNA, 15 bp, Homo sapiens
gaatagcattttaca

SEQ ID NO: 213771 - DNA, 15 bp, Homo sapiens
agaatagcattttac

SEQ ID NO: 213772 - DNA, 15 bp, Homo sapiens
aagaatagcatttta

SEQ ID NO: 213773 - DNA, 15 bp, Homo sapiens
caagaatagcatttt

SEQ ID NO: 213774 - DNA, 15 bp, Homo sapiens
gcaagaatagcattt

SEQ ID NO: 213775 - DNA, 15 bp, Homo sapiens
ggcaagaatagcatt

SEQ ID NO: 213776 - DNA, 15 bp, Homo sapiens
aggcaagaatagcat

SEQ ID NO: 213777 - DNA, 15 bp, Homo sapiens
aaggcaagaatagca

SEQ ID NO: 213778 - DNA, 15 bp, Homo sapiens
aaaggcaagaatagc

SEQ ID NO: 213779 - DNA, 15 bp, Homo sapiens
gaaaggcaagaatag

SEQ ID NO: 213780 - DNA, 15 bp, Homo sapiens
tgaaaggcaagaata

SEQ ID NO: 213781 - DNA, 15 bp, Homo sapiens
atgaaaggcaagaat

SEQ ID NO: 213782 - DNA, 15 bp, Homo sapiens
aatgaaaggcaagaa

SEQ ID NO: 213783 - DNA, 15 bp, Homo sapiens
aaatgaaaggcaaga

SEQ ID NO: 213784 - DNA, 15 bp, Homo sapiens
gaaatgaaaggcaag

SEQ ID NO: 213785 - DNA, 15 bp, Homo sapiens
tgaaatgaaaggcaa

SEQ ID NO: 213786 - DNA, 15 bp, Homo sapiens
ctgaaatgaaaggca

SEQ ID NO: 213787 - DNA, 15 bp, Homo sapiens
tctgaaatgaaaggc

SEQ ID NO: 213788 - DNA, 15 bp, Homo sapiens
ttctgaaatgaaagg

SEQ ID NO: 213789 - DNA, 15 bp, Homo sapiens
attctgaaatgaaag

SEQ ID NO: 213790 - DNA, 15 bp, Homo sapiens
tattctgaaatgaaa

SEQ ID NO: 213791 - DNA, 15 bp, Homo sapiens
atattctgaaatgaa

SEQ ID NO: 213792 - DNA, 15 bp, Homo sapiens
tatattctgaaatga

SEQ ID NO: 213793 - DNA, 15 bp, Homo sapiens
gtatattctgaaatg

SEQ ID NO: 213794 - DNA, 15 bp, Homo sapiens
agtatattctgaaat

SEQ ID NO: 213795 - DNA, 15 bp, Homo sapiens
aagtatattctgaaa

SEQ ID NO: 213796 - DNA, 15 bp, Homo sapiens
aaagtatattctgaa

SEQ ID NO: 213797 - DNA, 15 bp, Homo sapiens
aaaagtatattctga

SEQ ID NO: 213798 - DNA, 15 bp, Homo sapiens
aaaaagtatattctg

SEQ ID NO: 213799 - DNA, 15 bp, Homo sapiens
taaaaagtatattct

SEQ ID NO: 213800 - DNA, 15 bp, Homo sapiens
ttaaaaagtatattc

SEQ ID NO: 213801 - DNA, 15 bp, Homo sapiens
tttaaaaagtatatt

SEQ ID NO: 213802 - DNA, 15 bp, Homo sapiens
atttaaaaagtatat

SEQ ID NO: 213803 - DNA, 15 bp, Homo sapiens
catttaaaaagtata

SEQ ID NO: 213804 - DNA, 15 bp, Homo sapiens
acatttaaaaagtat

SEQ ID NO: 213805 - DNA, 15 bp, Homo sapiens
cacatttaaaaagta

SEQ ID NO: 213806 - DNA, 15 bp, Homo sapiens
tcacatttaaaaagt

SEQ ID NO: 213807 - DNA, 15 bp, Homo sapiens
ttcacatttaaaaag

SEQ ID NO: 213808 - DNA, 15 bp, Homo sapiens
attcacatttaaaaa

SEQ ID NO: 213809 - DNA, 15 bp, Homo sapiens
aattcacatttaaaa

SEQ ID NO: 213810 - DNA, 15 bp, Homo sapiens
aaattcacatttaaa

SEQ ID NO: 213811 - DNA, 15 bp, Homo sapiens
gaaattcacatttaa

SEQ ID NO: 213812 - DNA, 15 bp, Homo sapiens
agaaattcacattta

SEQ ID NO: 213813 - DNA, 15 bp, Homo sapiens
cagaaattcacattt

SEQ ID NO: 213814 - DNA, 15 bp, Homo sapiens
ccagaaattcacatt

SEQ ID NO: 213815 - DNA, 15 bp, Homo sapiens
tccagaaattcacat

SEQ ID NO: 213816 - DNA, 15 bp, Homo sapiens
atccagaaattcaca

SEQ ID NO: 213817 - DNA, 15 bp, Homo sapiens
aatccagaaattcac

SEQ ID NO: 213818 - DNA, 15 bp, Homo sapiens
aaatccagaaattca

SEQ ID NO: 213819 - DNA, 15 bp, Homo sapiens
aaaatccagaaattc

SEQ ID NO: 213820 - DNA, 15 bp, Homo sapiens
aaaaatccagaaatt

SEQ ID NO: 213821 - DNA, 15 bp, Homo sapiens
aaaaaatccagaaat

SEQ ID NO: 213822 - DNA, 15 bp, Homo sapiens
aaaaaaatccagaaa

SEQ ID NO: 213823 - DNA, 15 bp, Homo sapiens
aaaaaaaatccagaa

SEQ ID NO: 213824 - DNA, 15 bp, Homo sapiens
aaaaaaaaatccaga

SEQ ID NO: 213825 - DNA, 15 bp, Homo sapiens
taaaaaaaaatccag

SEQ ID NO: 213826 - DNA, 15 bp, Homo sapiens
ataaaaaaaaatcca

SEQ ID NO: 213827 - DNA, 15 bp, Homo sapiens
tataaaaaaaaatcc

SEQ ID NO: 213828 - DNA, 15 bp, Homo sapiens
ctataaaaaaaaatc

SEQ ID NO: 213829 - DNA, 15 bp, Homo sapiens
gctataaaaaaaaat

SEQ ID NO: 213830 - DNA, 15 bp, Homo sapiens
tgctataaaaaaaaa

SEQ ID NO: 213831 - DNA, 15 bp, Homo sapiens
atgctataaaaaaaa

SEQ ID NO: 213832 - DNA, 15 bp, Homo sapiens
catgctataaaaaaa

SEQ ID NO: 213833 - DNA, 15 bp, Homo sapiens
acatgctataaaaaa

SEQ ID NO: 213834 - DNA, 15 bp, Homo sapiens
aacatgctataaaaa

SEQ ID NO: 213835 - DNA, 15 bp, Homo sapiens
aaacatgctataaaa

SEQ ID NO: 213836 - DNA, 15 bp, Homo sapiens
caaacatgctataaa

SEQ ID NO: 213837 - DNA, 15 bp, Homo sapiens
acaaacatgctataa

SEQ ID NO: 213838 - DNA, 15 bp, Homo sapiens
cacaaacatgctata

SEQ ID NO: 213839 - DNA, 15 bp, Homo sapiens
acacaaacatgctat

SEQ ID NO: 213840 - DNA, 15 bp, Homo sapiens
gacacaaacatgcta

SEQ ID NO: 213841 - DNA, 15 bp, Homo sapiens
tgacacaaacatgct

SEQ ID NO: 213842 - DNA, 15 bp, Homo sapiens
atgacacaaacatgc

SEQ ID NO: 213843 - DNA, 15 bp, Homo sapiens
aatgacacaaacatg

SEQ ID NO: 213844 - DNA, 15 bp, Homo sapiens
taatgacacaaacat

SEQ ID NO: 213845 - DNA, 15 bp, Homo sapiens
ctaatgacacaaaca

SEQ ID NO: 213846 - DNA, 15 bp, Homo sapiens
actaatgacacaaac

SEQ ID NO: 213847 - DNA, 15 bp, Homo sapiens
cactaatgacacaaa

SEQ ID NO: 213848 - DNA, 15 bp, Homo sapiens
tcactaatgacacaa

SEQ ID NO: 213849 - DNA, 15 bp, Homo sapiens
ttcactaatgacaca

SEQ ID NO: 213850 - DNA, 15 bp, Homo sapiens
tttcactaatgacac

SEQ ID NO: 213851 - DNA, 15 bp, Homo sapiens
gtttcactaatgaca

SEQ ID NO: 213852 - DNA, 15 bp, Homo sapiens
agtttcactaatgac

SEQ ID NO: 213853 - DNA, 15 bp, Homo sapiens
cagtttcactaatga

SEQ ID NO: 213854 - DNA, 15 bp, Homo sapiens
ccagtttcactaatg

SEQ ID NO: 213855 - DNA, 15 bp, Homo sapiens
tccagtttcactaat

SEQ ID NO: 213856 - DNA, 15 bp, Homo sapiens
ttccagtttcactaa

SEQ ID NO: 213857 - DNA, 15 bp, Homo sapiens
tttccagtttcacta

SEQ ID NO: 213858 - DNA, 15 bp, Homo sapiens
ttttccagtttcact

SEQ ID NO: 213859 - DNA, 15 bp, Homo sapiens
cttttccagtttcac

SEQ ID NO: 213860 - DNA, 15 bp, Homo sapiens
gcttttccagtttca

SEQ ID NO: 213861 - DNA, 15 bp, Homo sapiens
tgcttttccagtttc

SEQ ID NO: 213862 - DNA, 15 bp, Homo sapiens
ttgcttttccagttt

SEQ ID NO: 213863 - DNA, 15 bp, Homo sapiens
tttgcttttccagtt

SEQ ID NO: 213864 - DNA, 15 bp, Homo sapiens
ttttgcttttccagt

SEQ ID NO: 213865 - DNA, 15 bp, Homo sapiens
attttgcttttccag

SEQ ID NO: 213866 - DNA, 15 bp, Homo sapiens
tattttgcttttcca

SEQ ID NO: 213867 - DNA, 15 bp, Homo sapiens
gtattttgcttttcc

SEQ ID NO: 213868 - DNA, 15 bp, Homo sapiens
tgtattttgcttttc

SEQ ID NO: 213869 - DNA, 15 bp, Homo sapiens
ttgtattttgctttt

SEQ ID NO: 213870 - DNA, 15 bp, Homo sapiens
tttgtattttgcttt

SEQ ID NO: 213871 - DNA, 15 bp, Homo sapiens
ctttgtattttgctt

SEQ ID NO: 213872 - DNA, 15 bp, Homo sapiens
gctttgtattttgct

SEQ ID NO: 213873 - DNA, 15 bp, Homo sapiens
ggctttgtattttgc

SEQ ID NO: 213874 - DNA, 15 bp, Homo sapiens
aggctttgtattttg

SEQ ID NO: 213875 - DNA, 15 bp, Homo sapiens
taggctttgtatttt

SEQ ID NO: 213876 - DNA, 15 bp, Homo sapiens
ttaggctttgtattt

SEQ ID NO: 213877 - DNA, 15 bp, Homo sapiens
cttaggctttgtatt

SEQ ID NO: 213878 - DNA, 15 bp, Homo sapiens
tcttaggctttgtat

SEQ ID NO: 213879 - DNA, 15 bp, Homo sapiens
atcttaggctttgta

SEQ ID NO: 213880 - DNA, 15 bp, Homo sapiens
catcttaggctttgt

SEQ ID NO: 213881 - DNA, 15 bp, Homo sapiens
tcatcttaggctttg

SEQ ID NO: 213882 - DNA, 15 bp, Homo sapiens
ctcatcttaggcttt

SEQ ID NO: 213883 - DNA, 15 bp, Homo sapiens
tctcatcttaggctt

SEQ ID NO: 213884 - DNA, 15 bp, Homo sapiens
ctctcatcttaggct

SEQ ID NO: 213885 - DNA, 15 bp, Homo sapiens
actctcatcttaggc

SEQ ID NO: 213886 - DNA, 15 bp, Homo sapiens
aactctcatcttagg

SEQ ID NO: 213887 - DNA, 15 bp, Homo sapiens
gaactctcatcttag

SEQ ID NO: 213888 - DNA, 15 bp, Homo sapiens
tgaactctcatctta

SEQ ID NO: 213889 - DNA, 15 bp, Homo sapiens
ttgaactctcatctt

SEQ ID NO: 213890 - DNA, 15 bp, Homo sapiens
cttgaactctcatct

SEQ ID NO: 213891 - DNA, 15 bp, Homo sapiens
acttgaactctcatc

SEQ ID NO: 213892 - DNA, 15 bp, Homo sapiens
aacttgaactctcat

SEQ ID NO: 213893 - DNA, 15 bp, Homo sapiens
caacttgaactctca

SEQ ID NO: 213894 - DNA, 15 bp, Homo sapiens
tcaacttgaactctc

SEQ ID NO: 213895 - DNA, 15 bp, Homo sapiens
ctcaacttgaactct

SEQ ID NO: 213896 - DNA, 15 bp, Homo sapiens
actcaacttgaactc

SEQ ID NO: 213897 - DNA, 15 bp, Homo sapiens
aactcaacttgaact

SEQ ID NO: 213898 - DNA, 15 bp, Homo sapiens
aaactcaacttgaac

SEQ ID NO: 213899 - DNA, 15 bp, Homo sapiens
caaactcaacttgaa

SEQ ID NO: 213900 - DNA, 15 bp, Homo sapiens
ccaaactcaacttga

SEQ ID NO: 213901 - DNA, 15 bp, Homo sapiens
tccaaactcaacttg

SEQ ID NO: 213902 - DNA, 15 bp, Homo sapiens
ttccaaactcaactt

SEQ ID NO: 213903 - DNA, 15 bp, Homo sapiens
tttccaaactcaact

SEQ ID NO: 213904 - DNA, 15 bp, Homo sapiens
gtttccaaactcaac

SEQ ID NO: 213905 - DNA, 15 bp, Homo sapiens
tgtttccaaactcaa

SEQ ID NO: 213906 - DNA, 15 bp, Homo sapiens
atgtttccaaactca

SEQ ID NO: 213907 - DNA, 15 bp, Homo sapiens
gatgtttccaaactc

SEQ ID NO: 213908 - DNA, 15 bp, Homo sapiens
agatgtttccaaact

SEQ ID NO: 213909 - DNA, 15 bp, Homo sapiens
cagatgtttccaaac

SEQ ID NO: 213910 - DNA, 15 bp, Homo sapiens
ccagatgtttccaaa

SEQ ID NO: 213911 - DNA, 15 bp, Homo sapiens
tccagatgtttccaa

SEQ ID NO: 213912 - DNA, 15 bp, Homo sapiens
ctccagatgtttcca

SEQ ID NO: 213913 - DNA, 15 bp, Homo sapiens
actccagatgtttcc

SEQ ID NO: 213914 - DNA, 15 bp, Homo sapiens
gactccagatgtttc

SEQ ID NO: 213915 - DNA, 15 bp, Homo sapiens
ggactccagatgttt

SEQ ID NO: 213916 - DNA, 15 bp, Homo sapiens
aggactccagatgtt

SEQ ID NO: 213917 - DNA, 15 bp, Homo sapiens
taggactccagatgt

SEQ ID NO: 213918 - DNA, 15 bp, Homo sapiens
ataggactccagatg

SEQ ID NO: 213919 - DNA, 15 bp, Homo sapiens
aataggactccagat

SEQ ID NO: 213920 - DNA, 15 bp, Homo sapiens
caataggactccaga

SEQ ID NO: 213921 - DNA, 15 bp, Homo sapiens
tcaataggactccag

SEQ ID NO: 213922 - DNA, 15 bp, Homo sapiens
gtcaataggactcca

SEQ ID NO: 213923 - DNA, 15 bp, Homo sapiens
tgtcaataggactcc

SEQ ID NO: 213924 - DNA, 15 bp, Homo sapiens
atgtcaataggactc

SEQ ID NO: 213925 - DNA, 15 bp, Homo sapiens
gatgtcaataggact

SEQ ID NO: 213926 - DNA, 15 bp, Homo sapiens
cgatgtcaataggac

SEQ ID NO: 213927 - DNA, 15 bp, Homo sapiens
gcgatgtcaatagga

SEQ ID NO: 213928 - DNA, 15 bp, Homo sapiens
aaaattcttagaaga

SEQ ID NO: 213929 - DNA, 15 bp, Homo sapiens
taaaattcttagaag

SEQ ID NO: 213930 - DNA, 15 bp, Homo sapiens
ataaaattcttagaa

SEQ ID NO: 213931 - DNA, 15 bp, Homo sapiens
gataaaattcttaga

SEQ ID NO: 213932 - DNA, 15 bp, Homo sapiens
agataaaattcttag

SEQ ID NO: 213933 - DNA, 15 bp, Homo sapiens
cagataaaattctta

SEQ ID NO: 213934 - DNA, 15 bp, Homo sapiens
acagataaaattctt

SEQ ID NO: 213935 - DNA, 15 bp, Homo sapiens
aacagataaaattct

SEQ ID NO: 213936 - DNA, 15 bp, Homo sapiens
aaacagataaaattc

SEQ ID NO: 213937 - DNA, 15 bp, Homo sapiens
aaaacagataaaatt

SEQ ID NO: 213938 - DNA, 15 bp, Homo sapiens
caaaacagataaaat

SEQ ID NO: 213939 - DNA, 15 bp, Homo sapiens
acaaaacagataaaa

SEQ ID NO: 213940 - DNA, 15 bp, Homo sapiens
tacaaaacagataaa

SEQ ID NO: 213941 - DNA, 15 bp, Homo sapiens
gtacaaaacagataa

SEQ ID NO: 213942 - DNA, 15 bp, Homo sapiens
agtacaaaacagata

SEQ ID NO: 213943 - DNA, 15 bp, Homo sapiens
aagtacaaaacagat

SEQ ID NO: 213944 - DNA, 15 bp, Homo sapiens
aaagtacaaaacaga

SEQ ID NO: 213945 - DNA, 15 bp, Homo sapiens
taaagtacaaaacag

SEQ ID NO: 213946 - DNA, 15 bp, Homo sapiens
ctaaagtacaaaaca

SEQ ID NO: 213947 - DNA, 15 bp, Homo sapiens
tctaaagtacaaaac

SEQ ID NO: 213948 - DNA, 15 bp, Homo sapiens
ttctaaagtacaaaa

SEQ ID NO: 213949 - DNA, 15 bp, Homo sapiens
tttctaaagtacaaa

SEQ ID NO: 213950 - DNA, 15 bp, Homo sapiens
atttctaaagtacaa

SEQ ID NO: 213951 - DNA, 15 bp, Homo sapiens
catttctaaagtaca

SEQ ID NO: 213952 - DNA, 15 bp, Homo sapiens
acatttctaaagtac

SEQ ID NO: 213953 - DNA, 15 bp, Homo sapiens
gacatttctaaagta

SEQ ID NO: 213954 - DNA, 15 bp, Homo sapiens
tgacatttctaaagt

SEQ ID NO: 213955 - DNA, 15 bp, Homo sapiens
ctgacatttctaaag

SEQ ID NO: 213956 - DNA, 15 bp, Homo sapiens
actgacatttctaaa

SEQ ID NO: 213957 - DNA, 15 bp, Homo sapiens
aactgacatttctaa

SEQ ID NO: 213958 - DNA, 15 bp, Homo sapiens
caactgacatttcta

SEQ ID NO: 213959 - DNA, 15 bp, Homo sapiens
gcaactgacatttct

SEQ ID NO: 213960 - DNA, 15 bp, Homo sapiens
agcaactgacatttc

SEQ ID NO: 213961 - DNA, 15 bp, Homo sapiens
cagcaactgacattt

SEQ ID NO: 213962 - DNA, 15 bp, Homo sapiens
gcagcaactgacatt

SEQ ID NO: 213963 - DNA, 15 bp, Homo sapiens
tgcagcaactgacat

SEQ ID NO: 213964 - DNA, 15 bp, Homo sapiens
atgcagcaactgaca

SEQ ID NO: 213965 - DNA, 15 bp, Homo sapiens
aatgcagcaactgac

SEQ ID NO: 213966 - DNA, 15 bp, Homo sapiens
gaatgcagcaactga

SEQ ID NO: 213967 - DNA, 15 bp, Homo sapiens
ggaatgcagcaactg

SEQ ID NO: 213968 - DNA, 15 bp, Homo sapiens
aggaatgcagcaact

SEQ ID NO: 213969 - DNA, 15 bp, Homo sapiens
taggaatgcagcaac

SEQ ID NO: 213970 - DNA, 15 bp, Homo sapiens
ttaggaatgcagcaa

SEQ ID NO: 213971 - DNA, 15 bp, Homo sapiens
tttaggaatgcagca

SEQ ID NO: 213972 - DNA, 15 bp, Homo sapiens
gtttaggaatgcagc

SEQ ID NO: 213973 - DNA, 15 bp, Homo sapiens
agtttaggaatgcag

SEQ ID NO: 213974 - DNA, 15 bp, Homo sapiens
cagtttaggaatgca

SEQ ID NO: 213975 - DNA, 15 bp, Homo sapiens
acagtttaggaatgc

SEQ ID NO: 213976 - DNA, 15 bp, Homo sapiens
aacagtttaggaatg

SEQ ID NO: 213977 - DNA, 15 bp, Homo sapiens
aaacagtttaggaat

SEQ ID NO: 213978 - DNA, 15 bp, Homo sapiens
taaacagtttaggaa

SEQ ID NO: 213979 - DNA, 15 bp, Homo sapiens
ataaacagtttagga

SEQ ID NO: 213980 - DNA, 15 bp, Homo sapiens
aataaacagtttagg

SEQ ID NO: 213981 - DNA, 15 bp, Homo sapiens
aaataaacagtttag

SEQ ID NO: 213982 - DNA, 15 bp, Homo sapiens
caaataaacagttta

SEQ ID NO: 213983 - DNA, 15 bp, Homo sapiens
gcaaataaacagttt

SEQ ID NO: 213984 - DNA, 15 bp, Homo sapiens
tgcaaataaacagtt

SEQ ID NO: 213985 - DNA, 15 bp, Homo sapiens
gtgcaaataaacagt

SEQ ID NO: 213986 - DNA, 15 bp, Homo sapiens
agtgcaaataaacag

SEQ ID NO: 213987 - DNA, 15 bp, Homo sapiens
tagtgcaaataaaca

SEQ ID NO: 213988 - DNA, 15 bp, Homo sapiens
atagtgcaaataaac

SEQ ID NO: 213989 - DNA, 15 bp, Homo sapiens
catagtgcaaataaa

SEQ ID NO: 213990 - DNA, 15 bp, Homo sapiens
tcatagtgcaaataa

SEQ ID NO: 213991 - DNA, 15 bp, Homo sapiens
ctcatagtgcaaata

SEQ ID NO: 213992 - DNA, 15 bp, Homo sapiens
gctcatagtgcaaat

SEQ ID NO: 213993 - DNA, 15 bp, Homo sapiens
ggctcatagtgcaaa

SEQ ID NO: 213994 - DNA, 15 bp, Homo sapiens
aggctcatagtgcaa

SEQ ID NO: 213995 - DNA, 15 bp, Homo sapiens
taggctcatagtgca

SEQ ID NO: 213996 - DNA, 15 bp, Homo sapiens
ataggctcatagtgc

SEQ ID NO: 213997 - DNA, 15 bp, Homo sapiens
tataggctcatagtg

SEQ ID NO: 213998 - DNA, 15 bp, Homo sapiens
ctataggctcatagt

SEQ ID NO: 213999 - DNA, 15 bp, Homo sapiens
tctataggctcatag

SEQ ID NO: 214000 - DNA, 15 bp, Homo sapiens
gtctataggctcata

SEQ ID NO: 214001 - DNA, 15 bp, Homo sapiens
agtctataggctcat

SEQ ID NO: 214002 - DNA, 15 bp, Homo sapiens
tagtctataggctca

SEQ ID NO: 214003 - DNA, 15 bp, Homo sapiens
atagtctataggctc

SEQ ID NO: 214004 - DNA, 15 bp, Homo sapiens
gatagtctataggct

SEQ ID NO: 214005 - DNA, 15 bp, Homo sapiens
tgatagtctataggc

SEQ ID NO: 214006 - DNA, 15 bp, Homo sapiens
ctgatagtctatagg

SEQ ID NO: 214007 - DNA, 15 bp, Homo sapiens
actgatagtctatag

SEQ ID NO: 214008 - DNA, 15 bp, Homo sapiens
aactgatagtctata

SEQ ID NO: 214009 - DNA, 15 bp, Homo sapiens
gaactgatagtctat

SEQ ID NO: 214010 - DNA, 15 bp, Homo sapiens
ggaactgatagtcta

SEQ ID NO: 214011 - DNA, 15 bp, Homo sapiens
gggaactgatagtct

SEQ ID NO: 214012 - DNA, 15 bp, Homo sapiens
agggaactgatagtc

SEQ ID NO: 214013 - DNA, 15 bp, Homo sapiens
aagggaactgatagt

SEQ ID NO: 214014 - DNA, 15 bp, Homo sapiens
aaagggaactgatag

SEQ ID NO: 214015 - DNA, 15 bp, Homo sapiens
caaagggaactgata

SEQ ID NO: 214016 - DNA, 15 bp, Homo sapiens
ccaaagggaactgat

SEQ ID NO: 214017 - DNA, 15 bp, Homo sapiens
cccaaagggaactga

SEQ ID NO: 214018 - DNA, 15 bp, Homo sapiens
gcccaaagggaactg

SEQ ID NO: 214019 - DNA, 15 bp, Homo sapiens
cgcccaaagggaact

SEQ ID NO: 214020 - DNA, 15 bp, Homo sapiens
ccgcccaaagggaac

SEQ ID NO: 214021 - DNA, 15 bp, Homo sapiens
tccgcccaaagggaa

SEQ ID NO: 214022 - DNA, 15 bp, Homo sapiens
atccgcccaaaggga

SEQ ID NO: 214023 - DNA, 15 bp, Homo sapiens
aatccgcccaaaggg

SEQ ID NO: 214024 - DNA, 15 bp, Homo sapiens
caatccgcccaaagg

SEQ ID NO: 214025 - DNA, 15 bp, Homo sapiens
acaatccgcccaaag

SEQ ID NO: 214026 - DNA, 15 bp, Homo sapiens
aacaatccgcccaaa

SEQ ID NO: 214027 - DNA, 15 bp, Homo sapiens
caacaatccgcccaa

SEQ ID NO: 214028 - DNA, 15 bp, Homo sapiens
acaacaatccgccca

SEQ ID NO: 214029 - DNA, 15 bp, Homo sapiens
aacaacaatccgccc

SEQ ID NO: 214030 - DNA, 15 bp, Homo sapiens
aaacaacaatccgcc

SEQ ID NO: 214031 - DNA, 15 bp, Homo sapiens
taaacaacaatccgc

SEQ ID NO: 214032 - DNA, 15 bp, Homo sapiens
ttaaacaacaatccg

SEQ ID NO: 214033 - DNA, 15 bp, Homo sapiens
gttaaacaacaatcc

SEQ ID NO: 214034 - DNA, 15 bp, Homo sapiens
agttaaacaacaatc

SEQ ID NO: 214035 - DNA, 15 bp, Homo sapiens
aagttaaacaacaat

SEQ ID NO: 214036 - DNA, 15 bp, Homo sapiens
caagttaaacaacaa

SEQ ID NO: 214037 - DNA, 15 bp, Homo sapiens
acaagttaaacaaca

SEQ ID NO: 214038 - DNA, 15 bp, Homo sapiens
tacaagttaaacaac

SEQ ID NO: 214039 - DNA, 15 bp, Homo sapiens
ttacaagttaaacaa

SEQ ID NO: 214040 - DNA, 15 bp, Homo sapiens
tttacaagttaaaca

SEQ ID NO: 214041 - DNA, 15 bp, Homo sapiens
atttacaagttaaac

SEQ ID NO: 214042 - DNA, 15 bp, Homo sapiens
catttacaagttaaa

SEQ ID NO: 214043 - DNA, 15 bp, Homo sapiens
tcatttacaagttaa

SEQ ID NO: 214044 - DNA, 15 bp, Homo sapiens
ttcatttacaagtta

SEQ ID NO: 214045 - DNA, 15 bp, Homo sapiens
tttcatttacaagtt

SEQ ID NO: 214046 - DNA, 15 bp, Homo sapiens
ttttcatttacaagt

SEQ ID NO: 214047 - DNA, 15 bp, Homo sapiens
tttttcatttacaag

SEQ ID NO: 214048 - DNA, 15 bp, Homo sapiens
ttttttcatttacaa

SEQ ID NO: 214049 - DNA, 15 bp, Homo sapiens
attttttcatttaca

SEQ ID NO: 214050 - DNA, 15 bp, Homo sapiens
aattttttcatttac

SEQ ID NO: 214051 - DNA, 15 bp, Homo sapiens
gaattttttcattta

SEQ ID NO: 214052 - DNA, 15 bp, Homo sapiens
agaattttttcattt

SEQ ID NO: 214053 - DNA, 15 bp, Homo sapiens
gagaattttttcatt

SEQ ID NO: 214054 - DNA, 15 bp, Homo sapiens
agagaattttttcat

SEQ ID NO: 214055 - DNA, 15 bp, Homo sapiens
aagagaattttttca

SEQ ID NO: 214056 - DNA, 15 bp, Homo sapiens
taagagaattttttc

SEQ ID NO: 214057 - DNA, 15 bp, Homo sapiens
ttaagagaatttttt

SEQ ID NO: 214058 - DNA, 15 bp, Homo sapiens
tttaagagaattttt

SEQ ID NO: 214059 - DNA, 15 bp, Homo sapiens
gtttaagagaatttt

SEQ ID NO: 214060 - DNA, 15 bp, Homo sapiens
ggtttaagagaattt

SEQ ID NO: 214061 - DNA, 15 bp, Homo sapiens
tggtttaagagaatt

SEQ ID NO: 214062 - DNA, 15 bp, Homo sapiens
gtggtttaagagaat

SEQ ID NO: 214063 - DNA, 15 bp, Homo sapiens
tgtggtttaagagaa

SEQ ID NO: 214064 - DNA, 15 bp, Homo sapiens
ctgtggtttaagaga

SEQ ID NO: 214065 - DNA, 15 bp, Homo sapiens
gctgtggtttaagag

SEQ ID NO: 214066 - DNA, 15 bp, Homo sapiens
tgctgtggtttaaga

SEQ ID NO: 214067 - DNA, 15 bp, Homo sapiens
gtgctgtggtttaag

SEQ ID NO: 214068 - DNA, 15 bp, Homo sapiens
agtgctgtggtttaa

SEQ ID NO: 214069 - DNA, 15 bp, Homo sapiens
tagtgctgtggttta

SEQ ID NO: 214070 - DNA, 15 bp, Homo sapiens
atagtgctgtggttt

SEQ ID NO: 214071 - DNA, 15 bp, Homo sapiens
aatagtgctgtggtt

SEQ ID NO: 214072 - DNA, 15 bp, Homo sapiens
caatagtgctgtggt

SEQ ID NO: 214073 - DNA, 15 bp, Homo sapiens
tcaatagtgctgtgg

SEQ ID NO: 214074 - DNA, 15 bp, Homo sapiens
ctcaatagtgctgtg

SEQ ID NO: 214075 - DNA, 15 bp, Homo sapiens
actcaatagtgctgt

SEQ ID NO: 214076 - DNA, 15 bp, Homo sapiens
cactcaatagtgctg

SEQ ID NO: 214077 - DNA, 15 bp, Homo sapiens
tcactcaatagtgct

SEQ ID NO: 214078 - DNA, 15 bp, Homo sapiens
ttcactcaatagtgc

SEQ ID NO: 214079 - DNA, 15 bp, Homo sapiens
tttcactcaatagtg

SEQ ID NO: 214080 - DNA, 15 bp, Homo sapiens
gtttcactcaatagt

SEQ ID NO: 214081 - DNA, 15 bp, Homo sapiens
tgtttcactcaatag

SEQ ID NO: 214082 - DNA, 15 bp, Homo sapiens
atgtttcactcaata

SEQ ID NO: 214083 - DNA, 15 bp, Homo sapiens
aatgtttcactcaat

SEQ ID NO: 214084 - DNA, 15 bp, Homo sapiens
caatgtttcactcaa

SEQ ID NO: 214085 - DNA, 15 bp, Homo sapiens
tcaatgtttcactca

SEQ ID NO: 214086 - DNA, 15 bp, Homo sapiens
ttcaatgtttcactc

SEQ ID NO: 214087 - DNA, 15 bp, Homo sapiens
gttcaatgtttcact

SEQ ID NO: 214088 - DNA, 15 bp, Homo sapiens
agttcaatgtttcac

SEQ ID NO: 214089 - DNA, 15 bp, Homo sapiens
gagttcaatgtttca

SEQ ID NO: 214090 - DNA, 15 bp, Homo sapiens
tgagttcaatgtttc

SEQ ID NO: 214091 - DNA, 15 bp, Homo sapiens
atgagttcaatgttt

SEQ ID NO: 214092 - DNA, 15 bp, Homo sapiens
tatgagttcaatgtt

SEQ ID NO: 214093 - DNA, 15 bp, Homo sapiens
atatgagttcaatgt

SEQ ID NO: 214094 - DNA, 15 bp, Homo sapiens
gatatgagttcaatg

SEQ ID NO: 214095 - DNA, 15 bp, Homo sapiens
agatatgagttcaat

SEQ ID NO: 214096 - DNA, 15 bp, Homo sapiens
cagatatgagttcaa

SEQ ID NO: 214097 - DNA, 15 bp, Homo sapiens
acagatatgagttca

SEQ ID NO: 214098 - DNA, 15 bp, Homo sapiens
tacagatatgagttc

SEQ ID NO: 214099 - DNA, 15 bp, Homo sapiens
ttacagatatgagtt

SEQ ID NO: 214100 - DNA, 15 bp, Homo sapiens
cttacagatatgagt

SEQ ID NO: 214101 - DNA, 15 bp, Homo sapiens
tcttacagatatgag

SEQ ID NO: 214102 - DNA, 15 bp, Homo sapiens
ttcttacagatatga

SEQ ID NO: 214103 - DNA, 15 bp, Homo sapiens
tttcttacagatatg

SEQ ID NO: 214104 - DNA, 15 bp, Homo sapiens
atttcttacagatat

SEQ ID NO: 214105 - DNA, 15 bp, Homo sapiens
tatttcttacagata

SEQ ID NO: 214106 - DNA, 15 bp, Homo sapiens
ttatttcttacagat

SEQ ID NO: 214107 - DNA, 15 bp, Homo sapiens
tttatttcttacaga

SEQ ID NO: 214108 - DNA, 15 bp, Homo sapiens
ctttatttcttacag

SEQ ID NO: 214109 - DNA, 15 bp, Homo sapiens
tctttatttcttaca

SEQ ID NO: 214110 - DNA, 15 bp, Homo sapiens
ctctttatttcttac

SEQ ID NO: 214111 - DNA, 15 bp, Homo sapiens
tctctttatttctta

SEQ ID NO: 214112 - DNA, 15 bp, Homo sapiens
ttctctttatttctt

SEQ ID NO: 214113 - DNA, 15 bp, Homo sapiens
cttctctttatttct

SEQ ID NO: 214114 - DNA, 15 bp, Homo sapiens
tcttctctttatttc

SEQ ID NO: 214115 - DNA, 15 bp, Homo sapiens
atcttctctttattt

SEQ ID NO: 214116 - DNA, 15 bp, Homo sapiens
tatcttctctttatt

SEQ ID NO: 214117 - DNA, 15 bp, Homo sapiens
atatcttctctttat

SEQ ID NO: 214118 - DNA, 15 bp, Homo sapiens
tatatcttctcttta

SEQ ID NO: 214119 - DNA, 15 bp, Homo sapiens
atatatcttctcttt

SEQ ID NO: 214120 - DNA, 15 bp, Homo sapiens
aatatatcttctctt

SEQ ID NO: 214121 - DNA, 15 bp, Homo sapiens
taatatatcttctct

SEQ ID NO: 214122 - DNA, 15 bp, Homo sapiens
ctaatatatcttctc

SEQ ID NO: 214123 - DNA, 15 bp, Homo sapiens
actaatatatcttct

SEQ ID NO: 214124 - DNA, 15 bp, Homo sapiens
aactaatatatcttc

SEQ ID NO: 214125 - DNA, 15 bp, Homo sapiens
aaactaatatatctt

SEQ ID NO: 214126 - DNA, 15 bp, Homo sapiens
aaaactaatatatct

SEQ ID NO: 214127 - DNA, 15 bp, Homo sapiens
aaaaactaatatatc

SEQ ID NO: 214128 - DNA, 15 bp, Homo sapiens
aaaaaactaatatat

SEQ ID NO: 214129 - DNA, 15 bp, Homo sapiens
taaaaaactaatata

SEQ ID NO: 214130 - DNA, 15 bp, Homo sapiens
ttaaaaaactaatat

SEQ ID NO: 214131 - DNA, 15 bp, Homo sapiens
attaaaaaactaata

SEQ ID NO: 214132 - DNA, 15 bp, Homo sapiens
aattaaaaaactaat

SEQ ID NO: 214133 - DNA, 15 bp, Homo sapiens
caattaaaaaactaa

SEQ ID NO: 214134 - DNA, 15 bp, Homo sapiens
ccaattaaaaaacta

SEQ ID NO: 214135 - DNA, 15 bp, Homo sapiens
accaattaaaaaact

SEQ ID NO: 214136 - DNA, 15 bp, Homo sapiens
taccaattaaaaaac

SEQ ID NO: 214137 - DNA, 15 bp, Homo sapiens
ataccaattaaaaaa

SEQ ID NO: 214138 - DNA, 15 bp, Homo sapiens
aataccaattaaaaa

SEQ ID NO: 214139 - DNA, 15 bp, Homo sapiens
aaataccaattaaaa

SEQ ID NO: 214140 - DNA, 15 bp, Homo sapiens
aaaataccaattaaa

SEQ ID NO: 214141 - DNA, 15 bp, Homo sapiens
taaaataccaattaa

SEQ ID NO: 214142 - DNA, 15 bp, Homo sapiens
ttaaaataccaatta

SEQ ID NO: 214143 - DNA, 15 bp, Homo sapiens
attaaaataccaatt

SEQ ID NO: 214144 - DNA, 15 bp, Homo sapiens
aattaaaataccaat

SEQ ID NO: 214145 - DNA, 15 bp, Homo sapiens
aaattaaaataccaa

SEQ ID NO: 214146 - DNA, 15 bp, Homo sapiens
aaaattaaaatacca

SEQ ID NO: 214147 - DNA, 15 bp, Homo sapiens
aaaaattaaaatacc

SEQ ID NO: 214148 - DNA, 15 bp, Homo sapiens
taaaaattaaaatac

SEQ ID NO: 214149 - DNA, 15 bp, Homo sapiens
ataaaaattaaaata

SEQ ID NO: 214150 - DNA, 15 bp, Homo sapiens
tataaaaattaaaat

SEQ ID NO: 214151 - DNA, 15 bp, Homo sapiens
atataaaaattaaaa

SEQ ID NO: 214152 - DNA, 15 bp, Homo sapiens
tatataaaaattaaa

SEQ ID NO: 214153 - DNA, 15 bp, Homo sapiens
atatataaaaattaa

SEQ ID NO: 214154 - DNA, 15 bp, Homo sapiens
catatataaaaatta

SEQ ID NO: 214155 - DNA, 15 bp, Homo sapiens
gcatatataaaaatt

SEQ ID NO: 214156 - DNA, 15 bp, Homo sapiens
tgcatatataaaaat

SEQ ID NO: 214157 - DNA, 15 bp, Homo sapiens
ctgcatatataaaaa

SEQ ID NO: 214158 - DNA, 15 bp, Homo sapiens
cctgcatatataaaa

SEQ ID NO: 214159 - DNA, 15 bp, Homo sapiens
tcctgcatatataaa

SEQ ID NO: 214160 - DNA, 15 bp, Homo sapiens
ttcctgcatatataa

SEQ ID NO: 214161 - DNA, 15 bp, Homo sapiens
tttcctgcatatata

SEQ ID NO: 214162 - DNA, 15 bp, Homo sapiens
ctttcctgcatatat

SEQ ID NO: 214163 - DNA, 15 bp, Homo sapiens
tctttcctgcatata

SEQ ID NO: 214164 - DNA, 15 bp, Homo sapiens
ttctttcctgcatat

SEQ ID NO: 214165 - DNA, 15 bp, Homo sapiens
attctttcctgcata

SEQ ID NO: 214166 - DNA, 15 bp, Homo sapiens
tattctttcctgcat

SEQ ID NO: 214167 - DNA, 15 bp, Homo sapiens
ctattctttcctgca

SEQ ID NO: 214168 - DNA, 15 bp, Homo sapiens
tctattctttcctgc

SEQ ID NO: 214169 - DNA, 15 bp, Homo sapiens
ttctattctttcctg

SEQ ID NO: 214170 - DNA, 15 bp, Homo sapiens
cttctattctttcct

SEQ ID NO: 214171 - DNA, 15 bp, Homo sapiens
acttctattctttcc

SEQ ID NO: 214172 - DNA, 15 bp, Homo sapiens
cacttctattctttc

SEQ ID NO: 214173 - DNA, 15 bp, Homo sapiens
tcacttctattcttt

SEQ ID NO: 214174 - DNA, 15 bp, Homo sapiens
atcacttctattctt

SEQ ID NO: 214175 - DNA, 15 bp, Homo sapiens
aatcacttctattct

SEQ ID NO: 214176 - DNA, 15 bp, Homo sapiens
caatcacttctattc

SEQ ID NO: 214177 - DNA, 15 bp, Homo sapiens
tcaatcacttctatt

SEQ ID NO: 214178 - DNA, 15 bp, Homo sapiens
ttcaatcacttctat

SEQ ID NO: 214179 - DNA, 15 bp, Homo sapiens
attcaatcacttcta

SEQ ID NO: 214180 - DNA, 15 bp, Homo sapiens
tattcaatcacttct

SEQ ID NO: 214181 - DNA, 15 bp, Homo sapiens
atattcaatcacttc

SEQ ID NO: 214182 - DNA, 15 bp, Homo sapiens
aatattcaatcactt

SEQ ID NO: 214183 - DNA, 15 bp, Homo sapiens
caatattcaatcact

SEQ ID NO: 214184 - DNA, 15 bp, Homo sapiens
acaatattcaatcac

SEQ ID NO: 214185 - DNA, 15 bp, Homo sapiens
aacaatattcaatca

SEQ ID NO: 214186 - DNA, 15 bp, Homo sapiens
taacaatattcaatc

SEQ ID NO: 214187 - DNA, 15 bp, Homo sapiens
ttaacaatattcaat

SEQ ID NO: 214188 - DNA, 15 bp, Homo sapiens
attaacaatattcaa

SEQ ID NO: 214189 - DNA, 15 bp, Homo sapiens
aattaacaatattca

SEQ ID NO: 214190 - DNA, 15 bp, Homo sapiens
taattaacaatattc

SEQ ID NO: 214191 - DNA, 15 bp, Homo sapiens
ataattaacaatatt

SEQ ID NO: 214192 - DNA, 15 bp, Homo sapiens
tataattaacaatat

SEQ ID NO: 214193 - DNA, 15 bp, Homo sapiens
gtataattaacaata

SEQ ID NO: 214194 - DNA, 15 bp, Homo sapiens
ggtataattaacaat

SEQ ID NO: 214195 - DNA, 15 bp, Homo sapiens
tggtataattaacaa

SEQ ID NO: 214196 - DNA, 15 bp, Homo sapiens
gtggtataattaaca

SEQ ID NO: 214197 - DNA, 15 bp, Homo sapiens
ggtggtataattaac

SEQ ID NO: 214198 - DNA, 15 bp, Homo sapiens
cggtggtataattaa

SEQ ID NO: 214199 - DNA, 15 bp, Homo sapiens
acggtggtataatta

SEQ ID NO: 214200 - DNA, 15 bp, Homo sapiens
cacggtggtataatt

SEQ ID NO: 214201 - DNA, 15 bp, Homo sapiens
acacggtggtataat

SEQ ID NO: 214202 - DNA, 15 bp, Homo sapiens
cacacggtggtataa

SEQ ID NO: 214203 - DNA, 15 bp, Homo sapiens
acacacggtggtata

SEQ ID NO: 214204 - DNA, 15 bp, Homo sapiens
aacacacggtggtat

SEQ ID NO: 214205 - DNA, 15 bp, Homo sapiens
taacacacggtggta

SEQ ID NO: 214206 - DNA, 15 bp, Homo sapiens
ctaacacacggtggt

SEQ ID NO: 214207 - DNA, 15 bp, Homo sapiens
tctaacacacggtgg

SEQ ID NO: 214208 - DNA, 15 bp, Homo sapiens
ttctaacacacggtg

SEQ ID NO: 214209 - DNA, 15 bp, Homo sapiens
tttctaacacacggt

SEQ ID NO: 214210 - DNA, 15 bp, Homo sapiens
ttttctaacacacgg

SEQ ID NO: 214211 - DNA, 15 bp, Homo sapiens
cttttctaacacacg

SEQ ID NO: 214212 - DNA, 15 bp, Homo sapiens
acttttctaacacac

SEQ ID NO: 214213 - DNA, 15 bp, Homo sapiens
tacttttctaacaca

SEQ ID NO: 214214 - DNA, 15 bp, Homo sapiens
ttacttttctaacac

SEQ ID NO: 214215 - DNA, 15 bp, Homo sapiens
cttacttttctaaca

SEQ ID NO: 214216 - DNA, 15 bp, Homo sapiens
tcttacttttctaac

SEQ ID NO: 214217 - DNA, 15 bp, Homo sapiens
ttcttacttttctaa

SEQ ID NO: 214218 - DNA, 15 bp, Homo sapiens
cttcttacttttcta

SEQ ID NO: 214219 - DNA, 15 bp, Homo sapiens
gcttcttacttttct

SEQ ID NO: 214220 - DNA, 15 bp, Homo sapiens
tgcttcttacttttc

SEQ ID NO: 214221 - DNA, 15 bp, Homo sapiens
ctgcttcttactttt

SEQ ID NO: 214222 - DNA, 15 bp, Homo sapiens
actgcttcttacttt

SEQ ID NO: 214223 - DNA, 15 bp, Homo sapiens
gactgcttcttactt

SEQ ID NO: 214224 - DNA, 15 bp, Homo sapiens
tgactgcttcttact

SEQ ID NO: 214225 - DNA, 15 bp, Homo sapiens
ttgactgcttcttac

SEQ ID NO: 214226 - DNA, 15 bp, Homo sapiens
attgactgcttctta

SEQ ID NO: 214227 - DNA, 15 bp, Homo sapiens
aattgactgcttctt

SEQ ID NO: 214228 - DNA, 15 bp, Homo sapiens
aaattgactgcttct

SEQ ID NO: 214229 - DNA, 15 bp, Homo sapiens
aaaattgactgcttc

SEQ ID NO: 214230 - DNA, 15 bp, Homo sapiens
gaaaattgactgctt

SEQ ID NO: 214231 - DNA, 15 bp, Homo sapiens
tgaaaattgactgct

SEQ ID NO: 214232 - DNA, 15 bp, Homo sapiens
gtgaaaattgactgc

SEQ ID NO: 214233 - DNA, 15 bp, Homo sapiens
tgtgaaaattgactg

SEQ ID NO: 214234 - DNA, 15 bp, Homo sapiens
atgtgaaaattgact

SEQ ID NO: 214235 - DNA, 15 bp, Homo sapiens
gatgtgaaaattgac

SEQ ID NO: 214236 - DNA, 15 bp, Homo sapiens
tgatgtgaaaattga

SEQ ID NO: 214237 - DNA, 15 bp, Homo sapiens
ttgatgtgaaaattg

SEQ ID NO: 214238 - DNA, 15 bp, Homo sapiens
tttgatgtgaaaatt

SEQ ID NO: 214239 - DNA, 15 bp, Homo sapiens
ctttgatgtgaaaat

SEQ ID NO: 214240 - DNA, 15 bp, Homo sapiens
tctttgatgtgaaaa

SEQ ID NO: 214241 - DNA, 15 bp, Homo sapiens
gtctttgatgtgaaa

SEQ ID NO: 214242 - DNA, 15 bp, Homo sapiens
tgtctttgatgtgaa

SEQ ID NO: 214243 - DNA, 15 bp, Homo sapiens
ctgtctttgatgtga

SEQ ID NO: 214244 - DNA, 15 bp, Homo sapiens
gctgtctttgatgtg

SEQ ID NO: 214245 - DNA, 15 bp, Homo sapiens
tgctgtctttgatgt

SEQ ID NO: 214246 - DNA, 15 bp, Homo sapiens
atgctgtctttgatg

SEQ ID NO: 214247 - DNA, 15 bp, Homo sapiens
gatgctgtctttgat

SEQ ID NO: 214248 - DNA, 15 bp, Homo sapiens
agatgctgtctttga

SEQ ID NO: 214249 - DNA, 15 bp, Homo sapiens
tagatgctgtctttg

SEQ ID NO: 214250 - DNA, 15 bp, Homo sapiens
ttagatgctgtcttt

SEQ ID NO: 214251 - DNA, 15 bp, Homo sapiens
cttagatgctgtctt

SEQ ID NO: 214252 - DNA, 15 bp, Homo sapiens
tcttagatgctgtct

SEQ ID NO: 214253 - DNA, 15 bp, Homo sapiens
ttcttagatgctgtc

SEQ ID NO: 214254 - DNA, 15 bp, Homo sapiens
cttcttagatgctgt

SEQ ID NO: 214255 - DNA, 15 bp, Homo sapiens
acttcttagatgctg

SEQ ID NO: 214256 - DNA, 15 bp, Homo sapiens
aacttcttagatgct

SEQ ID NO: 214257 - DNA, 15 bp, Homo sapiens
aaacttcttagatgc

SEQ ID NO: 214258 - DNA, 15 bp, Homo sapiens
aaaacttcttagatg

SEQ ID NO: 214259 - DNA, 15 bp, Homo sapiens
caaaacttcttagat

SEQ ID NO: 214260 - DNA, 15 bp, Homo sapiens
acaaaacttcttaga

SEQ ID NO: 214261 - DNA, 15 bp, Homo sapiens
aacaaaacttcttag

SEQ ID NO: 214262 - DNA, 15 bp, Homo sapiens
gaacaaaacttctta

SEQ ID NO: 214263 - DNA, 15 bp, Homo sapiens
agaacaaaacttctt

SEQ ID NO: 214264 - DNA, 15 bp, Homo sapiens
cagaacaaaacttct

SEQ ID NO: 214265 - DNA, 15 bp, Homo sapiens
acagaacaaaacttc

SEQ ID NO: 214266 - DNA, 15 bp, Homo sapiens
gacagaacaaaactt

SEQ ID NO: 214267 - DNA, 15 bp, Homo sapiens
ggacagaacaaaact

SEQ ID NO: 214268 - DNA, 15 bp, Homo sapiens
aggacagaacaaaac

SEQ ID NO: 214269 - DNA, 15 bp, Homo sapiens
caggacagaacaaaa

SEQ ID NO: 214270 - DNA, 15 bp, Homo sapiens
ccaggacagaacaaa

SEQ ID NO: 214271 - DNA, 15 bp, Homo sapiens
tccaggacagaacaa

SEQ ID NO: 214272 - DNA, 15 bp, Homo sapiens
ttccaggacagaaca

SEQ ID NO: 214273 - DNA, 15 bp, Homo sapiens
attccaggacagaac

SEQ ID NO: 214274 - DNA, 15 bp, Homo sapiens
aattccaggacagaa

SEQ ID NO: 214275 - DNA, 15 bp, Homo sapiens
taattccaggacaga

SEQ ID NO: 214276 - DNA, 15 bp, Homo sapiens
ataattccaggacag

SEQ ID NO: 214277 - DNA, 15 bp, Homo sapiens
aataattccaggaca

SEQ ID NO: 214278 - DNA, 15 bp, Homo sapiens
aaataattccaggac

SEQ ID NO: 214279 - DNA, 15 bp, Homo sapiens
aaaataattccagga

SEQ ID NO: 214280 - DNA, 15 bp, Homo sapiens
taaaataattccagg

SEQ ID NO: 214281 - DNA, 15 bp, Homo sapiens
ctaaaataattccag

SEQ ID NO: 214282 - DNA, 15 bp, Homo sapiens
actaaaataattcca

SEQ ID NO: 214283 - DNA, 15 bp, Homo sapiens
tactaaaataattcc

SEQ ID NO: 214284 - DNA, 15 bp, Homo sapiens
ctactaaaataattc

SEQ ID NO: 214285 - DNA, 15 bp, Homo sapiens
actactaaaataatt

SEQ ID NO: 214286 - DNA, 15 bp, Homo sapiens
cactactaaaataat

SEQ ID NO: 214287 - DNA, 15 bp, Homo sapiens
acactactaaaataa

SEQ ID NO: 214288 - DNA, 15 bp, Homo sapiens
aacactactaaaata

SEQ ID NO: 214289 - DNA, 15 bp, Homo sapiens
aaacactactaaaat

SEQ ID NO: 214290 - DNA, 15 bp, Homo sapiens
gaaacactactaaaa

SEQ ID NO: 214291 - DNA, 15 bp, Homo sapiens
tgaaacactactaaa

SEQ ID NO: 214292 - DNA, 15 bp, Homo sapiens
ctgaaacactactaa

SEQ ID NO: 214293 - DNA, 15 bp, Homo sapiens
actgaaacactacta

SEQ ID NO: 214294 - DNA, 15 bp, Homo sapiens
tactgaaacactact

SEQ ID NO: 214295 - DNA, 15 bp, Homo sapiens
ttactgaaacactac

SEQ ID NO: 214296 - DNA, 15 bp, Homo sapiens
attactgaaacacta

SEQ ID NO: 214297 - DNA, 15 bp, Homo sapiens
cattactgaaacact

SEQ ID NO: 214298 - DNA, 15 bp, Homo sapiens
acattactgaaacac

SEQ ID NO: 214299 - DNA, 15 bp, Homo sapiens
aacattactgaaaca

SEQ ID NO: 214300 - DNA, 15 bp, Homo sapiens
caacattactgaaac

SEQ ID NO: 214301 - DNA, 15 bp, Homo sapiens
tcaacattactgaaa

SEQ ID NO: 214302 - DNA, 15 bp, Homo sapiens
gtcaacattactgaa

SEQ ID NO: 214303 - DNA, 15 bp, Homo sapiens
agtcaacattactga

SEQ ID NO: 214304 - DNA, 15 bp, Homo sapiens
cagtcaacattactg

SEQ ID NO: 214305 - DNA, 15 bp, Homo sapiens
acagtcaacattact

SEQ ID NO: 214306 - DNA, 15 bp, Homo sapiens
tacagtcaacattac

SEQ ID NO: 214307 - DNA, 15 bp, Homo sapiens
atacagtcaacatta

SEQ ID NO: 214308 - DNA, 15 bp, Homo sapiens
aatacagtcaacatt

SEQ ID NO: 214309 - DNA, 15 bp, Homo sapiens
aaatacagtcaacat

SEQ ID NO: 214310 - DNA, 15 bp, Homo sapiens
aaaatacagtcaaca

SEQ ID NO: 214311 - DNA, 15 bp, Homo sapiens
gaaaatacagtcaac

SEQ ID NO: 214312 - DNA, 15 bp, Homo sapiens
ggaaaatacagtcaa

SEQ ID NO: 214313 - DNA, 15 bp, Homo sapiens
tggaaaatacagtca

SEQ ID NO: 214314 - DNA, 15 bp, Homo sapiens
ttggaaaatacagtc

SEQ ID NO: 214315 - DNA, 15 bp, Homo sapiens
gttggaaaatacagt

SEQ ID NO: 214316 - DNA, 15 bp, Homo sapiens
agttggaaaatacag

SEQ ID NO: 214317 - DNA, 15 bp, Homo sapiens
aagttggaaaataca

SEQ ID NO: 214318 - DNA, 15 bp, Homo sapiens
caagttggaaaatac

SEQ ID NO: 214319 - DNA, 15 bp, Homo sapiens
acaagttggaaaata

SEQ ID NO: 214320 - DNA, 15 bp, Homo sapiens
aacaagttggaaaat

SEQ ID NO: 214321 - DNA, 15 bp, Homo sapiens
gaacaagttggaaaa

SEQ ID NO: 214322 - DNA, 15 bp, Homo sapiens
tgaacaagttggaaa

SEQ ID NO: 214323 - DNA, 15 bp, Homo sapiens
ttgaacaagttggaa

SEQ ID NO: 214324 - DNA, 15 bp, Homo sapiens
tttgaacaagttgga

SEQ ID NO: 214325 - DNA, 15 bp, Homo sapiens
atttgaacaagttgg

SEQ ID NO: 214326 - DNA, 15 bp, Homo sapiens
aatttgaacaagttg

SEQ ID NO: 214327 - DNA, 15 bp, Homo sapiens
taatttgaacaagtt

SEQ ID NO: 214328 - DNA, 15 bp, Homo sapiens
ataatttgaacaagt

SEQ ID NO: 214329 - DNA, 15 bp, Homo sapiens
aataatttgaacaag

SEQ ID NO: 214330 - DNA, 15 bp, Homo sapiens
taataatttgaacaa

SEQ ID NO: 214331 - DNA, 15 bp, Homo sapiens
gtaataatttgaaca

SEQ ID NO: 214332 - DNA, 15 bp, Homo sapiens
ggtaataatttgaac

SEQ ID NO: 214333 - DNA, 15 bp, Homo sapiens
tggtaataatttgaa

SEQ ID NO: 214334 - DNA, 15 bp, Homo sapiens
ctggtaataatttga

SEQ ID NO: 214335 - DNA, 15 bp, Homo sapiens
actggtaataatttg

SEQ ID NO: 214336 - DNA, 15 bp, Homo sapiens
cactggtaataattt

SEQ ID NO: 214337 - DNA, 15 bp, Homo sapiens
tcactggtaataatt

SEQ ID NO: 214338 - DNA, 15 bp, Homo sapiens
ttcactggtaataat

SEQ ID NO: 214339 - DNA, 15 bp, Homo sapiens
attcactggtaataa

SEQ ID NO: 214340 - DNA, 15 bp, Homo sapiens
gattcactggtaata

SEQ ID NO: 214341 - DNA, 15 bp, Homo sapiens
agattcactggtaat

SEQ ID NO: 214342 - DNA, 15 bp, Homo sapiens
aagattcactggtaa

SEQ ID NO: 214343 - DNA, 15 bp, Homo sapiens
aaagattcactggta

SEQ ID NO: 214344 - DNA, 15 bp, Homo sapiens
caaagattcactggt

SEQ ID NO: 214345 - DNA, 15 bp, Homo sapiens
acaaagattcactgg

SEQ ID NO: 214346 - DNA, 15 bp, Homo sapiens
gacaaagattcactg

SEQ ID NO: 214347 - DNA, 15 bp, Homo sapiens
tgacaaagattcact

SEQ ID NO: 214348 - DNA, 15 bp, Homo sapiens
ctgacaaagattcac

SEQ ID NO: 214349 - DNA, 15 bp, Homo sapiens
gctgacaaagattca

SEQ ID NO: 214350 - DNA, 15 bp, Homo sapiens
tgctgacaaagattc

SEQ ID NO: 214351 - DNA, 15 bp, Homo sapiens
ctgctgacaaagatt

SEQ ID NO: 214352 - DNA, 15 bp, Homo sapiens
actgctgacaaagat

SEQ ID NO: 214353 - DNA, 15 bp, Homo sapiens
aactgctgacaaaga

SEQ ID NO: 214354 - DNA, 15 bp, Homo sapiens
gaactgctgacaaag

SEQ ID NO: 214355 - DNA, 15 bp, Homo sapiens
ggaactgctgacaaa

SEQ ID NO: 214356 - DNA, 15 bp, Homo sapiens
gggaactgctgacaa

SEQ ID NO: 214357 - DNA, 15 bp, Homo sapiens
agggaactgctgaca

SEQ ID NO: 214358 - DNA, 15 bp, Homo sapiens
aagggaactgctgac

SEQ ID NO: 214359 - DNA, 15 bp, Homo sapiens
aaagggaactgctga

SEQ ID NO: 214360 - DNA, 15 bp, Homo sapiens
aaaagggaactgctg

SEQ ID NO: 214361 - DNA, 15 bp, Homo sapiens
taaaagggaactgct

SEQ ID NO: 214362 - DNA, 15 bp, Homo sapiens
ttaaaagggaactgc

SEQ ID NO: 214363 - DNA, 15 bp, Homo sapiens
tttaaaagggaactg

SEQ ID NO: 214364 - DNA, 15 bp, Homo sapiens
atttaaaagggaact

SEQ ID NO: 214365 - DNA, 15 bp, Homo sapiens
catttaaaagggaac

SEQ ID NO: 214366 - DNA, 15 bp, Homo sapiens
gcatttaaaagggaa

SEQ ID NO: 214367 - DNA, 15 bp, Homo sapiens
tgcatttaaaaggga

SEQ ID NO: 214368 - DNA, 15 bp, Homo sapiens
ttgcatttaaaaggg

SEQ ID NO: 214369 - DNA, 15 bp, Homo sapiens
tttgcatttaaaagg

SEQ ID NO: 214370 - DNA, 15 bp, Homo sapiens
atttgcatttaaaag

SEQ ID NO: 214371 - DNA, 15 bp, Homo sapiens
gatttgcatttaaaa

SEQ ID NO: 214372 - DNA, 15 bp, Homo sapiens
tgatttgcatttaaa

SEQ ID NO: 214373 - DNA, 15 bp, Homo sapiens
ttgatttgcatttaa

SEQ ID NO: 214374 - DNA, 15 bp, Homo sapiens
attgatttgcattta

SEQ ID NO: 214375 - DNA, 15 bp, Homo sapiens
tattgatttgcattt

SEQ ID NO: 214376 - DNA, 15 bp, Homo sapiens
ttattgatttgcatt

SEQ ID NO: 214377 - DNA, 15 bp, Homo sapiens
tttattgatttgcat

SEQ ID NO: 214378 - DNA, 15 bp, Homo sapiens
atttattgatttgca

SEQ ID NO: 214379 - DNA, 15 bp, Homo sapiens
aatttattgatttgc

SEQ ID NO: 214380 - DNA, 15 bp, Homo sapiens
gaatttattgatttg

SEQ ID NO: 214381 - DNA, 15 bp, Homo sapiens
ggaatttattgattt

SEQ ID NO: 214382 - DNA, 15 bp, Homo sapiens
gggaatttattgatt

SEQ ID NO: 214383 - DNA, 15 bp, Homo sapiens
tgggaatttattgat

SEQ ID NO: 214384 - DNA, 15 bp, Homo sapiens
ttgggaatttattga

SEQ ID NO: 214385 - DNA, 15 bp, Homo sapiens
tttgggaatttattg

SEQ ID NO: 214386 - DNA, 15 bp, Homo sapiens
ttttgggaatttatt

SEQ ID NO: 214387 - DNA, 15 bp, Homo sapiens
tttttgggaatttat

SEQ ID NO: 214388 - DNA, 15 bp, Homo sapiens
atttttgggaattta

SEQ ID NO: 214389 - DNA, 15 bp, Homo sapiens
aatttttgggaattt

SEQ ID NO: 214390 - DNA, 15 bp, Homo sapiens
aaatttttgggaatt

SEQ ID NO: 214391 - DNA, 15 bp, Homo sapiens
taaatttttgggaat

SEQ ID NO: 214392 - DNA, 15 bp, Homo sapiens
ttaaatttttgggaa

SEQ ID NO: 214393 - DNA, 15 bp, Homo sapiens
gttaaatttttggga

SEQ ID NO: 214394 - DNA, 15 bp, Homo sapiens
agttaaatttttggg

SEQ ID NO: 214395 - DNA, 15 bp, Homo sapiens
cagttaaatttttgg

SEQ ID NO: 214396 - DNA, 15 bp, Homo sapiens
gcagttaaatttttg

SEQ ID NO: 214397 - DNA, 15 bp, Homo sapiens
agcagttaaattttt

SEQ ID NO: 214398 - DNA, 15 bp, Homo sapiens
aagcagttaaatttt

SEQ ID NO: 214399 - DNA, 15 bp, Homo sapiens
aaagcagttaaattt

SEQ ID NO: 214400 - DNA, 15 bp, Homo sapiens
taaagcagttaaatt

SEQ ID NO: 214401 - DNA, 15 bp, Homo sapiens
ataaagcagttaaat

SEQ ID NO: 214402 - DNA, 15 bp, Homo sapiens
cataaagcagttaaa

SEQ ID NO: 214403 - DNA, 15 bp, Homo sapiens
tcataaagcagttaa

SEQ ID NO: 214404 - DNA, 15 bp, Homo sapiens
ttcataaagcagtta

SEQ ID NO: 214405 - DNA, 15 bp, Homo sapiens
attcataaagcagtt

SEQ ID NO: 214406 - DNA, 15 bp, Homo sapiens
aattcataaagcagt

SEQ ID NO: 214407 - DNA, 15 bp, Homo sapiens
gaattcataaagcag

SEQ ID NO: 214408 - DNA, 15 bp, Homo sapiens
tgaattcataaagca

SEQ ID NO: 214409 - DNA, 15 bp, Homo sapiens
ttgaattcataaagc

SEQ ID NO: 214410 - DNA, 15 bp, Homo sapiens
attgaattcataaag

SEQ ID NO: 214411 - DNA, 15 bp, Homo sapiens
aattgaattcataaa

SEQ ID NO: 214412 - DNA, 15 bp, Homo sapiens
aaattgaattcataa

SEQ ID NO: 214413 - DNA, 15 bp, Homo sapiens
taaattgaattcata

SEQ ID NO: 214414 - DNA, 15 bp, Homo sapiens
ttaaattgaattcat

SEQ ID NO: 214415 - DNA, 15 bp, Homo sapiens
tttaaattgaattca

SEQ ID NO: 214416 - DNA, 15 bp, Homo sapiens
ttttaaattgaattc

SEQ ID NO: 214417 - DNA, 15 bp, Homo sapiens
tttttaaattgaatt

SEQ ID NO: 214418 - DNA, 15 bp, Homo sapiens
atttttaaattgaat

SEQ ID NO: 214419 - DNA, 15 bp, Homo sapiens
gatttttaaattgaa

SEQ ID NO: 214420 - DNA, 15 bp, Homo sapiens
ggatttttaaattga

SEQ ID NO: 214421 - DNA, 15 bp, Homo sapiens
aggatttttaaattg

SEQ ID NO: 214422 - DNA, 15 bp, Homo sapiens
aaggatttttaaatt

SEQ ID NO: 214423 - DNA, 15 bp, Homo sapiens
taaggatttttaaat

SEQ ID NO: 214424 - DNA, 15 bp, Homo sapiens
ttaaggatttttaaa

SEQ ID NO: 214425 - DNA, 15 bp, Homo sapiens
tttaaggatttttaa

SEQ ID NO: 214426 - DNA, 15 bp, Homo sapiens
ttttaaggattttta

SEQ ID NO: 214427 - DNA, 15 bp, Homo sapiens
attttaaggattttt

SEQ ID NO: 214428 - DNA, 15 bp, Homo sapiens
tattttaaggatttt

SEQ ID NO: 214429 - DNA, 15 bp, Homo sapiens
ttattttaaggattt

SEQ ID NO: 214430 - DNA, 15 bp, Homo sapiens
cttattttaaggatt

SEQ ID NO: 214431 - DNA, 15 bp, Homo sapiens
acttattttaaggat

SEQ ID NO: 214432 - DNA, 15 bp, Homo sapiens
gacttattttaagga

SEQ ID NO: 214433 - DNA, 15 bp, Homo sapiens
ggacttattttaagg

SEQ ID NO: 214434 - DNA, 15 bp, Homo sapiens
aggacttattttaag

SEQ ID NO: 214435 - DNA, 15 bp, Homo sapiens
caggacttattttaa

SEQ ID NO: 214436 - DNA, 15 bp, Homo sapiens
acaggacttatttta

SEQ ID NO: 214437 - DNA, 15 bp, Homo sapiens
gacaggacttatttt

SEQ ID NO: 214438 - DNA, 15 bp, Homo sapiens
agacaggacttattt

SEQ ID NO: 214439 - DNA, 15 bp, Homo sapiens
gagacaggacttatt

SEQ ID NO: 214440 - DNA, 15 bp, Homo sapiens
agagacaggacttat

SEQ ID NO: 214441 - DNA, 15 bp, Homo sapiens
aagagacaggactta

SEQ ID NO: 214442 - DNA, 15 bp, Homo sapiens
aaagagacaggactt

SEQ ID NO: 214443 - DNA, 15 bp, Homo sapiens
taaagagacaggact

SEQ ID NO: 214444 - DNA, 15 bp, Homo sapiens
ttaaagagacaggac

SEQ ID NO: 214445 - DNA, 15 bp, Homo sapiens
tttaaagagacagga

SEQ ID NO: 214446 - DNA, 15 bp, Homo sapiens
ttttaaagagacagg

SEQ ID NO: 214447 - DNA, 15 bp, Homo sapiens
tttttaaagagacag

SEQ ID NO: 214448 - DNA, 15 bp, Homo sapiens
ttttttaaagagaca

SEQ ID NO: 214449 - DNA, 15 bp, Homo sapiens
tttttttaaagagac

SEQ ID NO: 214450 - DNA, 15 bp, Homo sapiens
gtttttttaaagaga

SEQ ID NO: 214451 - DNA, 15 bp, Homo sapiens
ggtttttttaaagag

SEQ ID NO: 214452 - DNA, 15 bp, Homo sapiens
aggtttttttaaaga

SEQ ID NO: 214453 - DNA, 15 bp, Homo sapiens
taggtttttttaaag

SEQ ID NO: 214454 - DNA, 15 bp, Homo sapiens
ataggtttttttaaa

SEQ ID NO: 214455 - DNA, 15 bp, Homo sapiens
cataggtttttttaa

SEQ ID NO: 214456 - DNA, 15 bp, Homo sapiens
gcataggttttttta

SEQ ID NO: 214457 - DNA, 15 bp, Homo sapiens
tgcataggttttttt

SEQ ID NO: 214458 - DNA, 15 bp, Homo sapiens
atgcataggtttttt

SEQ ID NO: 214459 - DNA, 15 bp, Homo sapiens
tatgcataggttttt

SEQ ID NO: 214460 - DNA, 15 bp, Homo sapiens
ctatgcataggtttt

SEQ ID NO: 214461 - DNA, 15 bp, Homo sapiens
actatgcataggttt

SEQ ID NO: 214462 - DNA, 15 bp, Homo sapiens
aactatgcataggtt

SEQ ID NO: 214463 - DNA, 15 bp, Homo sapiens
taactatgcataggt

SEQ ID NO: 214464 - DNA, 15 bp, Homo sapiens
ataactatgcatagg

SEQ ID NO: 214465 - DNA, 15 bp, Homo sapiens
gataactatgcatag

SEQ ID NO: 214466 - DNA, 15 bp, Homo sapiens
tgataactatgcata

SEQ ID NO: 214467 - DNA, 15 bp, Homo sapiens
atgataactatgcat

SEQ ID NO: 214468 - DNA, 15 bp, Homo sapiens
aatgataactatgca

SEQ ID NO: 214469 - DNA, 15 bp, Homo sapiens
aaatgataactatgc

SEQ ID NO: 214470 - DNA, 15 bp, Homo sapiens
gaaatgataactatg

SEQ ID NO: 214471 - DNA, 15 bp, Homo sapiens
agaaatgataactat

SEQ ID NO: 214472 - DNA, 15 bp, Homo sapiens
gagaaatgataacta

SEQ ID NO: 214473 - DNA, 15 bp, Homo sapiens
agagaaatgataact

SEQ ID NO: 214474 - DNA, 15 bp, Homo sapiens
tagagaaatgataac

SEQ ID NO: 214475 - DNA, 15 bp, Homo sapiens
gtagagaaatgataa

SEQ ID NO: 214476 - DNA, 15 bp, Homo sapiens
tgtagagaaatgata

SEQ ID NO: 214477 - DNA, 15 bp, Homo sapiens
ttgtagagaaatgat

SEQ ID NO: 214478 - DNA, 15 bp, Homo sapiens
tttgtagagaaatga

SEQ ID NO: 214479 - DNA, 15 bp, Homo sapiens
atttgtagagaaatg

SEQ ID NO: 214480 - DNA, 15 bp, Homo sapiens
aatttgtagagaaat

SEQ ID NO: 214481 - DNA, 15 bp, Homo sapiens
taatttgtagagaaa

SEQ ID NO: 214482 - DNA, 15 bp, Homo sapiens
ttaatttgtagagaa

SEQ ID NO: 214483 - DNA, 15 bp, Homo sapiens
gttaatttgtagaga

SEQ ID NO: 214484 - DNA, 15 bp, Homo sapiens
ggttaatttgtagag

SEQ ID NO: 214485 - DNA, 15 bp, Homo sapiens
aggttaatttgtaga

SEQ ID NO: 214486 - DNA, 15 bp, Homo sapiens
taggttaatttgtag

SEQ ID NO: 214487 - DNA, 15 bp, Homo sapiens
ctaggttaatttgta

SEQ ID NO: 214488 - DNA, 15 bp, Homo sapiens
actaggttaatttgt

SEQ ID NO: 214489 - DNA, 15 bp, Homo sapiens
aactaggttaatttg

SEQ ID NO: 214490 - DNA, 15 bp, Homo sapiens
aaactaggttaattt

SEQ ID NO: 214491 - DNA, 15 bp, Homo sapiens
taaactaggttaatt

SEQ ID NO: 214492 - DNA, 15 bp, Homo sapiens
ctaaactaggttaat

SEQ ID NO: 214493 - DNA, 15 bp, Homo sapiens
actaaactaggttaa

SEQ ID NO: 214494 - DNA, 15 bp, Homo sapiens
aactaaactaggtta

SEQ ID NO: 214495 - DNA, 15 bp, Homo sapiens
aaactaaactaggtt

SEQ ID NO: 214496 - DNA, 15 bp, Homo sapiens
aaaactaaactaggt

SEQ ID NO: 214497 - DNA, 15 bp, Homo sapiens
gaaaactaaactagg

SEQ ID NO: 214498 - DNA, 15 bp, Homo sapiens
agaaaactaaactag

SEQ ID NO: 214499 - DNA, 15 bp, Homo sapiens
cagaaaactaaacta

SEQ ID NO: 214500 - DNA, 15 bp, Homo sapiens
acagaaaactaaact

SEQ ID NO: 214501 - DNA, 15 bp, Homo sapiens
aacagaaaactaaac

SEQ ID NO: 214502 - DNA, 15 bp, Homo sapiens
caacagaaaactaaa

SEQ ID NO: 214503 - DNA, 15 bp, Homo sapiens
ccaacagaaaactaa

SEQ ID NO: 214504 - DNA, 15 bp, Homo sapiens
accaacagaaaacta

SEQ ID NO: 214505 - DNA, 15 bp, Homo sapiens
aaccaacagaaaact

SEQ ID NO: 214506 - DNA, 15 bp, Homo sapiens
gaaccaacagaaaac

SEQ ID NO: 214507 - DNA, 15 bp, Homo sapiens
ggaaccaacagaaaa

SEQ ID NO: 214508 - DNA, 15 bp, Homo sapiens
tggaaccaacagaaa

SEQ ID NO: 214509 - DNA, 15 bp, Homo sapiens
atggaaccaacagaa

SEQ ID NO: 214510 - DNA, 15 bp, Homo sapiens
aatggaaccaacaga

SEQ ID NO: 214511 - DNA, 15 bp, Homo sapiens
aaatggaaccaacag

SEQ ID NO: 214512 - DNA, 15 bp, Homo sapiens
aaaatggaaccaaca

SEQ ID NO: 214513 - DNA, 15 bp, Homo sapiens
gaaaatggaaccaac

SEQ ID NO: 214514 - DNA, 15 bp, Homo sapiens
ggaaaatggaaccaa

SEQ ID NO: 214515 - DNA, 15 bp, Homo sapiens
aggaaaatggaacca

SEQ ID NO: 214516 - DNA, 15 bp, Homo sapiens
aaggaaaatggaacc

SEQ ID NO: 214517 - DNA, 15 bp, Homo sapiens
caaggaaaatggaac

SEQ ID NO: 214518 - DNA, 15 bp, Homo sapiens
acaaggaaaatggaa

SEQ ID NO: 214519 - DNA, 15 bp, Homo sapiens
aacaaggaaaatgga

SEQ ID NO: 214520 - DNA, 15 bp, Homo sapiens
aaacaaggaaaatgg

SEQ ID NO: 214521 - DNA, 15 bp, Homo sapiens
caaacaaggaaaatg

SEQ ID NO: 214522 - DNA, 15 bp, Homo sapiens
acaaacaaggaaaat

SEQ ID NO: 214523 - DNA, 15 bp, Homo sapiens
aacaaacaaggaaaa

SEQ ID NO: 214524 - DNA, 15 bp, Homo sapiens
taacaaacaaggaaa

SEQ ID NO: 214525 - DNA, 15 bp, Homo sapiens
ttaacaaacaaggaa

SEQ ID NO: 214526 - DNA, 15 bp, Homo sapiens
cttaacaaacaagga

SEQ ID NO: 214527 - DNA, 15 bp, Homo sapiens
acttaacaaacaagg

SEQ ID NO: 214528 - DNA, 15 bp, Homo sapiens
aacttaacaaacaag

SEQ ID NO: 214529 - DNA, 15 bp, Homo sapiens
aaacttaacaaacaa

SEQ ID NO: 214530 - DNA, 15 bp, Homo sapiens
aaaacttaacaaaca

SEQ ID NO: 214531 - DNA, 15 bp, Homo sapiens
taaaacttaacaaac

SEQ ID NO: 214532 - DNA, 15 bp, Homo sapiens
ctaaaacttaacaaa

SEQ ID NO: 214533 - DNA, 15 bp, Homo sapiens
actaaaacttaacaa

SEQ ID NO: 214534 - DNA, 15 bp, Homo sapiens
tactaaaacttaaca

SEQ ID NO: 214535 - DNA, 15 bp, Homo sapiens
ctactaaaacttaac

SEQ ID NO: 214536 - DNA, 15 bp, Homo sapiens
gctactaaaacttaa

SEQ ID NO: 214537 - DNA, 15 bp, Homo sapiens
agctactaaaactta

SEQ ID NO: 214538 - DNA, 15 bp, Homo sapiens
tagctactaaaactt

SEQ ID NO: 214539 - DNA, 15 bp, Homo sapiens
ctagctactaaaact

SEQ ID NO: 214540 - DNA, 15 bp, Homo sapiens
actagctactaaaac

SEQ ID NO: 214541 - DNA, 15 bp, Homo sapiens
aactagctactaaaa

SEQ ID NO: 214542 - DNA, 15 bp, Homo sapiens
aaactagctactaaa

SEQ ID NO: 214543 - DNA, 15 bp, Homo sapiens
taaactagctactaa

SEQ ID NO: 214544 - DNA, 15 bp, Homo sapiens
ttaaactagctacta

SEQ ID NO: 214545 - DNA, 15 bp, Homo sapiens
attaaactagctact

SEQ ID NO: 214546 - DNA, 15 bp, Homo sapiens
aattaaactagctac

SEQ ID NO: 214547 - DNA, 15 bp, Homo sapiens
caattaaactagcta

SEQ ID NO: 214548 - DNA, 15 bp, Homo sapiens
acaattaaactagct

SEQ ID NO: 214549 - DNA, 15 bp, Homo sapiens
tacaattaaactagc

SEQ ID NO: 214550 - DNA, 15 bp, Homo sapiens
ttacaattaaactag

SEQ ID NO: 214551 - DNA, 15 bp, Homo sapiens
attacaattaaacta

SEQ ID NO: 214552 - DNA, 15 bp, Homo sapiens
gattacaattaaact

SEQ ID NO: 214553 - DNA, 15 bp, Homo sapiens
agattacaattaaac

SEQ ID NO: 214554 - DNA, 15 bp, Homo sapiens
gagattacaattaaa

SEQ ID NO: 214555 - DNA, 15 bp, Homo sapiens
tgagattacaattaa

SEQ ID NO: 214556 - DNA, 15 bp, Homo sapiens
ttgagattacaatta

SEQ ID NO: 214557 - DNA, 15 bp, Homo sapiens
attgagattacaatt

SEQ ID NO: 214558 - DNA, 15 bp, Homo sapiens
cattgagattacaat

SEQ ID NO: 214559 - DNA, 15 bp, Homo sapiens
tcattgagattacaa

SEQ ID NO: 214560 - DNA, 15 bp, Homo sapiens
atcattgagattaca

SEQ ID NO: 214561 - DNA, 15 bp, Homo sapiens
aatcattgagattac

SEQ ID NO: 214562 - DNA, 15 bp, Homo sapiens
taatcattgagatta

SEQ ID NO: 214563 - DNA, 15 bp, Homo sapiens
ataatcattgagatt

SEQ ID NO: 214564 - DNA, 15 bp, Homo sapiens
cataatcattgagat

SEQ ID NO: 214565 - DNA, 15 bp, Homo sapiens
acataatcattgaga

SEQ ID NO: 214566 - DNA, 15 bp, Homo sapiens
cacataatcattgag

SEQ ID NO: 214567 - DNA, 15 bp, Homo sapiens
ccacataatcattga

SEQ ID NO: 214568 - DNA, 15 bp, Homo sapiens
accacataatcattg

SEQ ID NO: 214569 - DNA, 15 bp, Homo sapiens
taccacataatcatt

SEQ ID NO: 214570 - DNA, 15 bp, Homo sapiens
ctaccacataatcat

SEQ ID NO: 214571 - DNA, 15 bp, Homo sapiens
tctaccacataatca

SEQ ID NO: 214572 - DNA, 15 bp, Homo sapiens
ttctaccacataatc

SEQ ID NO: 214573 - DNA, 15 bp, Homo sapiens
attctaccacataat

SEQ ID NO: 214574 - DNA, 15 bp, Homo sapiens
cattctaccacataa

SEQ ID NO: 214575 - DNA, 15 bp, Homo sapiens
ccattctaccacata

SEQ ID NO: 214576 - DNA, 15 bp, Homo sapiens
cccattctaccacat

SEQ ID NO: 214577 - DNA, 15 bp, Homo sapiens
acccattctaccaca

SEQ ID NO: 214578 - DNA, 15 bp, Homo sapiens
aacccattctaccac

SEQ ID NO: 214579 - DNA, 15 bp, Homo sapiens
caacccattctacca

SEQ ID NO: 214580 - DNA, 15 bp, Homo sapiens
ccaacccattctacc

SEQ ID NO: 214581 - DNA, 15 bp, Homo sapiens
gccaacccattctac

SEQ ID NO: 214582 - DNA, 15 bp, Homo sapiens
cgccaacccattcta

SEQ ID NO: 214583 - DNA, 15 bp, Homo sapiens
ccgccaacccattct

SEQ ID NO: 214584 - DNA, 15 bp, Homo sapiens
tccgccaacccattc

SEQ ID NO: 214585 - DNA, 15 bp, Homo sapiens
ctccgccaacccatt

SEQ ID NO: 214586 - DNA, 15 bp, Homo sapiens
gctccgccaacccat

SEQ ID NO: 214587 - DNA, 15 bp, Homo sapiens
agctccgccaaccca

SEQ ID NO: 214588 - DNA, 15 bp, Homo sapiens
tagctccgccaaccc

SEQ ID NO: 214589 - DNA, 15 bp, Homo sapiens
gtagctccgccaacc

SEQ ID NO: 214590 - DNA, 15 bp, Homo sapiens
tgtagctccgccaac

SEQ ID NO: 214591 - DNA, 15 bp, Homo sapiens
ttgtagctccgccaa

SEQ ID NO: 214592 - DNA, 15 bp, Homo sapiens
tttgtagctccgcca

SEQ ID NO: 214593 - DNA, 15 bp, Homo sapiens
ttttgtagctccgcc

SEQ ID NO: 214594 - DNA, 15 bp, Homo sapiens
tttttgtagctccgc

SEQ ID NO: 214595 - DNA, 15 bp, Homo sapiens
atttttgtagctccg

SEQ ID NO: 214596 - DNA, 15 bp, Homo sapiens
aatttttgtagctcc

SEQ ID NO: 214597 - DNA, 15 bp, Homo sapiens
gaatttttgtagctc

SEQ ID NO: 214598 - DNA, 15 bp, Homo sapiens
ggaatttttgtagct

SEQ ID NO: 214599 - DNA, 15 bp, Homo sapiens
aggaatttttgtagc

SEQ ID NO: 214600 - DNA, 15 bp, Homo sapiens
taggaatttttgtag

SEQ ID NO: 214601 - DNA, 15 bp, Homo sapiens
ctaggaatttttgta

SEQ ID NO: 214602 - DNA, 15 bp, Homo sapiens
gctaggaatttttgt

SEQ ID NO: 214603 - DNA, 15 bp, Homo sapiens
agctaggaatttttg

SEQ ID NO: 214604 - DNA, 15 bp, Homo sapiens
tagctaggaattttt

SEQ ID NO: 214605 - DNA, 15 bp, Homo sapiens
gtagctaggaatttt

SEQ ID NO: 214606 - DNA, 15 bp, Homo sapiens
agtagctaggaattt

SEQ ID NO: 214607 - DNA, 15 bp, Homo sapiens
aagtagctaggaatt

SEQ ID NO: 214608 - DNA, 15 bp, Homo sapiens
gaagtagctaggaat

SEQ ID NO: 214609 - DNA, 15 bp, Homo sapiens
tgaagtagctaggaa

SEQ ID NO: 214610 - DNA, 15 bp, Homo sapiens
ctgaagtagctagga

SEQ ID NO: 214611 - DNA, 15 bp, Homo sapiens
tctgaagtagctagg

SEQ ID NO: 214612 - DNA, 15 bp, Homo sapiens
ctctgaagtagctag

SEQ ID NO: 214613 - DNA, 15 bp, Homo sapiens
tctctgaagtagcta

SEQ ID NO: 214614 - DNA, 15 bp, Homo sapiens
gtctctgaagtagct

SEQ ID NO: 214615 - DNA, 15 bp, Homo sapiens
tgtctctgaagtagc

SEQ ID NO: 214616 - DNA, 15 bp, Homo sapiens
atgtctctgaagtag

SEQ ID NO: 214617 - DNA, 15 bp, Homo sapiens
aatgtctctgaagta

SEQ ID NO: 214618 - DNA, 15 bp, Homo sapiens
taatgtctctgaagt

SEQ ID NO: 214619 - DNA, 15 bp, Homo sapiens
ttaatgtctctgaag

SEQ ID NO: 214620 - DNA, 15 bp, Homo sapiens
tttaatgtctctgaa

SEQ ID NO: 214621 - DNA, 15 bp, Homo sapiens
atttaatgtctctga

SEQ ID NO: 214622 - DNA, 15 bp, Homo sapiens
aatttaatgtctctg

SEQ ID NO: 214623 - DNA, 15 bp, Homo sapiens
aaatttaatgtctct

SEQ ID NO: 214624 - DNA, 15 bp, Homo sapiens
gaaatttaatgtctc

SEQ ID NO: 214625 - DNA, 15 bp, Homo sapiens
tgaaatttaatgtct

SEQ ID NO: 214626 - DNA, 15 bp, Homo sapiens
ctgaaatttaatgtc

SEQ ID NO: 214627 - DNA, 15 bp, Homo sapiens
tctgaaatttaatgt

SEQ ID NO: 214628 - DNA, 15 bp, Homo sapiens
gtctgaaatttaatg

SEQ ID NO: 214629 - DNA, 15 bp, Homo sapiens
tgtctgaaatttaat

SEQ ID NO: 214630 - DNA, 15 bp, Homo sapiens
gtgtctgaaatttaa

SEQ ID NO: 214631 - DNA, 15 bp, Homo sapiens
tgtgtctgaaattta

SEQ ID NO: 214632 - DNA, 15 bp, Homo sapiens
atgtgtctgaaattt

SEQ ID NO: 214633 - DNA, 15 bp, Homo sapiens
catgtgtctgaaatt

SEQ ID NO: 214634 - DNA, 15 bp, Homo sapiens
ccatgtgtctgaaat

SEQ ID NO: 214635 - DNA, 15 bp, Homo sapiens
accatgtgtctgaaa

SEQ ID NO: 214636 - DNA, 15 bp, Homo sapiens
taccatgtgtctgaa

SEQ ID NO: 214637 - DNA, 15 bp, Homo sapiens
gtaccatgtgtctga

SEQ ID NO: 214638 - DNA, 15 bp, Homo sapiens
tgtaccatgtgtctg

SEQ ID NO: 214639 - DNA, 15 bp, Homo sapiens
gtgtaccatgtgtct

SEQ ID NO: 214640 - DNA, 15 bp, Homo sapiens
agtgtaccatgtgtc

SEQ ID NO: 214641 - DNA, 15 bp, Homo sapiens
aagtgtaccatgtgt

SEQ ID NO: 214642 - DNA, 15 bp, Homo sapiens
aaagtgtaccatgtg

SEQ ID NO: 214643 - DNA, 15 bp, Homo sapiens
taaagtgtaccatgt

SEQ ID NO: 214644 - DNA, 15 bp, Homo sapiens
ataaagtgtaccatg

SEQ ID NO: 214645 - DNA, 15 bp, Homo sapiens
tataaagtgtaccat

SEQ ID NO: 214646 - DNA, 15 bp, Homo sapiens
atataaagtgtacca

SEQ ID NO: 214647 - DNA, 15 bp, Homo sapiens
aatataaagtgtacc

SEQ ID NO: 214648 - DNA, 15 bp, Homo sapiens
taatataaagtgtac

SEQ ID NO: 214649 - DNA, 15 bp, Homo sapiens
gtaatataaagtgta

SEQ ID NO: 214650 - DNA, 15 bp, Homo sapiens
tgtaatataaagtgt

SEQ ID NO: 214651 - DNA, 15 bp, Homo sapiens
atgtaatataaagtg

SEQ ID NO: 214652 - DNA, 15 bp, Homo sapiens
aatgtaatataaagt

SEQ ID NO: 214653 - DNA, 15 bp, Homo sapiens
aaatgtaatataaag

SEQ ID NO: 214654 - DNA, 15 bp, Homo sapiens
aaaatgtaatataaa

SEQ ID NO: 214655 - DNA, 15 bp, Homo sapiens
taaaatgtaatataa

SEQ ID NO: 214656 - DNA, 15 bp, Homo sapiens
gtaaaatgtaatata

SEQ ID NO: 214657 - DNA, 15 bp, Homo sapiens
agtaaaatgtaatat

SEQ ID NO: 214658 - DNA, 15 bp, Homo sapiens
tagtaaaatgtaata

SEQ ID NO: 214659 - DNA, 15 bp, Homo sapiens
atagtaaaatgtaat

SEQ ID NO: 214660 - DNA, 15 bp, Homo sapiens
catagtaaaatgtaa

SEQ ID NO: 214661 - DNA, 15 bp, Homo sapiens
gcatagtaaaatgta

SEQ ID NO: 214662 - DNA, 15 bp, Homo sapiens
agcatagtaaaatgt

SEQ ID NO: 214663 - DNA, 15 bp, Homo sapiens
tagcatagtaaaatg

SEQ ID NO: 214664 - DNA, 15 bp, Homo sapiens
ttagcatagtaaaat

SEQ ID NO: 214665 - DNA, 15 bp, Homo sapiens
tttagcatagtaaaa

SEQ ID NO: 214666 - DNA, 15 bp, Homo sapiens
ttttagcatagtaaa

SEQ ID NO: 214667 - DNA, 15 bp, Homo sapiens
attttagcatagtaa

SEQ ID NO: 214668 - DNA, 15 bp, Homo sapiens
tattttagcatagta

SEQ ID NO: 214669 - DNA, 15 bp, Homo sapiens
ttattttagcatagt

SEQ ID NO: 214670 - DNA, 15 bp, Homo sapiens
gttattttagcatag

SEQ ID NO: 214671 - DNA, 15 bp, Homo sapiens
tgttattttagcata

SEQ ID NO: 214672 - DNA, 15 bp, Homo sapiens
gtgttattttagcat

SEQ ID NO: 214673 - DNA, 15 bp, Homo sapiens
cgtgttattttagca

SEQ ID NO: 214674 - DNA, 15 bp, Homo sapiens
ccgtgttattttagc

SEQ ID NO: 214675 - DNA, 15 bp, Homo sapiens
gccgtgttattttag

SEQ ID NO: 214676 - DNA, 15 bp, Homo sapiens
agccgtgttatttta

SEQ ID NO: 214677 - DNA, 15 bp, Homo sapiens
aagccgtgttatttt

SEQ ID NO: 214678 - DNA, 15 bp, Homo sapiens
aaagccgtgttattt

SEQ ID NO: 214679 - DNA, 15 bp, Homo sapiens
gaaagccgtgttatt

SEQ ID NO: 214680 - DNA, 15 bp, Homo sapiens
agaaagccgtgttat

SEQ ID NO: 214681 - DNA, 15 bp, Homo sapiens
aagaaagccgtgtta

SEQ ID NO: 214682 - DNA, 15 bp, Homo sapiens
aaagaaagccgtgtt

SEQ ID NO: 214683 - DNA, 15 bp, Homo sapiens
aaaagaaagccgtgt

SEQ ID NO: 214684 - DNA, 15 bp, Homo sapiens
caaaagaaagccgtg

SEQ ID NO: 214685 - DNA, 15 bp, Homo sapiens
ccaaaagaaagccgt

SEQ ID NO: 214686 - DNA, 15 bp, Homo sapiens
tccaaaagaaagccg

SEQ ID NO: 214687 - DNA, 15 bp, Homo sapiens
ttccaaaagaaagcc

SEQ ID NO: 214688 - DNA, 15 bp, Homo sapiens
attccaaaagaaagc

SEQ ID NO: 214689 - DNA, 15 bp, Homo sapiens
aattccaaaagaaag

SEQ ID NO: 214690 - DNA, 15 bp, Homo sapiens
gaattccaaaagaaa

SEQ ID NO: 214691 - DNA, 15 bp, Homo sapiens
agaattccaaaagaa

SEQ ID NO: 214692 - DNA, 15 bp, Homo sapiens
cagaattccaaaaga

SEQ ID NO: 214693 - DNA, 15 bp, Homo sapiens
acagaattccaaaag

SEQ ID NO: 214694 - DNA, 15 bp, Homo sapiens
aacagaattccaaaa

SEQ ID NO: 214695 - DNA, 15 bp, Homo sapiens
gaacagaattccaaa

SEQ ID NO: 214696 - DNA, 15 bp, Homo sapiens
tgaacagaattccaa

SEQ ID NO: 214697 - DNA, 15 bp, Homo sapiens
ctgaacagaattcca

SEQ ID NO: 214698 - DNA, 15 bp, Homo sapiens
actgaacagaattcc

SEQ ID NO: 214699 - DNA, 15 bp, Homo sapiens
aactgaacagaattc

SEQ ID NO: 214700 - DNA, 15 bp, Homo sapiens
aaactgaacagaatt

SEQ ID NO: 214701 - DNA, 15 bp, Homo sapiens
aaaactgaacagaat

SEQ ID NO: 214702 - DNA, 15 bp, Homo sapiens
aaaaactgaacagaa

SEQ ID NO: 214703 - DNA, 15 bp, Homo sapiens
gaaaaactgaacaga

SEQ ID NO: 214704 - DNA, 15 bp, Homo sapiens
tgaaaaactgaacag

SEQ ID NO: 214705 - DNA, 15 bp, Homo sapiens
ctgaaaaactgaaca

SEQ ID NO: 214706 - DNA, 15 bp, Homo sapiens
tctgaaaaactgaac

SEQ ID NO: 214707 - DNA, 15 bp, Homo sapiens
atctgaaaaactgaa

SEQ ID NO: 214708 - DNA, 15 bp, Homo sapiens
aatctgaaaaactga

SEQ ID NO: 214709 - DNA, 15 bp, Homo sapiens
caatctgaaaaactg

SEQ ID NO: 214710 - DNA, 15 bp, Homo sapiens
acaatctgaaaaact

SEQ ID NO: 214711 - DNA, 15 bp, Homo sapiens
tacaatctgaaaaac

SEQ ID NO: 214712 - DNA, 15 bp, Homo sapiens
ttacaatctgaaaaa

SEQ ID NO: 214713 - DNA, 15 bp, Homo sapiens
attacaatctgaaaa

SEQ ID NO: 214714 - DNA, 15 bp, Homo sapiens
gattacaatctgaaa

SEQ ID NO: 214715 - DNA, 15 bp, Homo sapiens
agattacaatctgaa

SEQ ID NO: 214716 - DNA, 15 bp, Homo sapiens
gagattacaatctga

SEQ ID NO: 214717 - DNA, 15 bp, Homo sapiens
tgagattacaatctg

SEQ ID NO: 214718 - DNA, 15 bp, Homo sapiens
ctgagattacaatct

SEQ ID NO: 214719 - DNA, 15 bp, Homo sapiens
gctgagattacaatc

SEQ ID NO: 214720 - DNA, 15 bp, Homo sapiens
agctgagattacaat

SEQ ID NO: 214721 - DNA, 15 bp, Homo sapiens
tagctgagattacaa

SEQ ID NO: 214722 - DNA, 15 bp, Homo sapiens
gtagctgagattaca

SEQ ID NO: 214723 - DNA, 15 bp, Homo sapiens
tgtagctgagattac

SEQ ID NO: 214724 - DNA, 15 bp, Homo sapiens
atgtagctgagatta

SEQ ID NO: 214725 - DNA, 15 bp, Homo sapiens
gatgtagctgagatt

SEQ ID NO: 214726 - DNA, 15 bp, Homo sapiens
agatgtagctgagat

SEQ ID NO: 214727 - DNA, 15 bp, Homo sapiens
gagatgtagctgaga

SEQ ID NO: 214728 - DNA, 15 bp, Homo sapiens
tgagatgtagctgag

SEQ ID NO: 214729 - DNA, 15 bp, Homo sapiens
ttgagatgtagctga

SEQ ID NO: 214730 - DNA, 15 bp, Homo sapiens
gttgagatgtagctg

SEQ ID NO: 214731 - DNA, 15 bp, Homo sapiens
tgttgagatgtagct

SEQ ID NO: 214732 - DNA, 15 bp, Homo sapiens
ctgttgagatgtagc

SEQ ID NO: 214733 - DNA, 15 bp, Homo sapiens
tctgttgagatgtag

SEQ ID NO: 214734 - DNA, 15 bp, Homo sapiens
atctgttgagatgta

SEQ ID NO: 214735 - DNA, 15 bp, Homo sapiens
aatctgttgagatgt

SEQ ID NO: 214736 - DNA, 15 bp, Homo sapiens
caatctgttgagatg

SEQ ID NO: 214737 - DNA, 15 bp, Homo sapiens
acaatctgttgagat

SEQ ID NO: 214738 - DNA, 15 bp, Homo sapiens
aacaatctgttgaga

SEQ ID NO: 214739 - DNA, 15 bp, Homo sapiens
gaacaatctgttgag

SEQ ID NO: 214740 - DNA, 15 bp, Homo sapiens
agaacaatctgttga

SEQ ID NO: 214741 - DNA, 15 bp, Homo sapiens
gagaacaatctgttg

SEQ ID NO: 214742 - DNA, 15 bp, Homo sapiens
tgagaacaatctgtt

SEQ ID NO: 214743 - DNA, 15 bp, Homo sapiens
ctgagaacaatctgt

SEQ ID NO: 214744 - DNA, 15 bp, Homo sapiens
tctgagaacaatctg

SEQ ID NO: 214745 - DNA, 15 bp, Homo sapiens
atctgagaacaatct

SEQ ID NO: 214746 - DNA, 15 bp, Homo sapiens
tatctgagaacaatc

SEQ ID NO: 214747 - DNA, 15 bp, Homo sapiens
atatctgagaacaat

SEQ ID NO: 214748 - DNA, 15 bp, Homo sapiens
catatctgagaacaa

SEQ ID NO: 214749 - DNA, 15 bp, Homo sapiens
acatatctgagaaca

SEQ ID NO: 214750 - DNA, 15 bp, Homo sapiens
gacatatctgagaac

SEQ ID NO: 214751 - DNA, 15 bp, Homo sapiens
ggacatatctgagaa

SEQ ID NO: 214752 - DNA, 15 bp, Homo sapiens
aggacatatctgaga

SEQ ID NO: 214753 - DNA, 15 bp, Homo sapiens
taggacatatctgag

SEQ ID NO: 214754 - DNA, 15 bp, Homo sapiens
ataggacatatctga

SEQ ID NO: 214755 - DNA, 15 bp, Homo sapiens
aataggacatatctg

SEQ ID NO: 214756 - DNA, 15 bp, Homo sapiens
taataggacatatct

SEQ ID NO: 214757 - DNA, 15 bp, Homo sapiens
gtaataggacatatc

SEQ ID NO: 214758 - DNA, 15 bp, Homo sapiens
ggtaataggacatat

SEQ ID NO: 214759 - DNA, 15 bp, Homo sapiens
aggtaataggacata

SEQ ID NO: 214760 - DNA, 15 bp, Homo sapiens
aaggtaataggacat

SEQ ID NO: 214761 - DNA, 15 bp, Homo sapiens
gaaggtaataggaca

SEQ ID NO: 214762 - DNA, 15 bp, Homo sapiens
agaaggtaataggac

SEQ ID NO: 214763 - DNA, 15 bp, Homo sapiens
aagaaggtaatagga

SEQ ID NO: 214764 - DNA, 15 bp, Homo sapiens
aaagaaggtaatagg

SEQ ID NO: 214765 - DNA, 15 bp, Homo sapiens
caaagaaggtaatag

SEQ ID NO: 214766 - DNA, 15 bp, Homo sapiens
acaaagaaggtaata

SEQ ID NO: 214767 - DNA, 15 bp, Homo sapiens
cacaaagaaggtaat

SEQ ID NO: 214768 - DNA, 15 bp, Homo sapiens
acacaaagaaggtaa

SEQ ID NO: 214769 - DNA, 15 bp, Homo sapiens
tacacaaagaaggta

SEQ ID NO: 214770 - DNA, 15 bp, Homo sapiens
ctacacaaagaaggt

SEQ ID NO: 214771 - DNA, 15 bp, Homo sapiens
tctacacaaagaagg

SEQ ID NO: 214772 - DNA, 15 bp, Homo sapiens
atctacacaaagaag

SEQ ID NO: 214773 - DNA, 15 bp, Homo sapiens
tatctacacaaagaa

SEQ ID NO: 214774 - DNA, 15 bp, Homo sapiens
ctatctacacaaaga

SEQ ID NO: 214775 - DNA, 15 bp, Homo sapiens
actatctacacaaag

SEQ ID NO: 214776 - DNA, 15 bp, Homo sapiens
cactatctacacaaa

SEQ ID NO: 214777 - DNA, 15 bp, Homo sapiens
gcactatctacacaa

SEQ ID NO: 214778 - DNA, 15 bp, Homo sapiens
agcactatctacaca

SEQ ID NO: 214779 - DNA, 15 bp, Homo sapiens
aagcactatctacac

SEQ ID NO: 214780 - DNA, 15 bp, Homo sapiens
aaagcactatctaca

SEQ ID NO: 214781 - DNA, 15 bp, Homo sapiens
taaagcactatctac

SEQ ID NO: 214782 - DNA, 15 bp, Homo sapiens
ataaagcactatcta

SEQ ID NO: 214783 - DNA, 15 bp, Homo sapiens
aataaagcactatct

SEQ ID NO: 214784 - DNA, 15 bp, Homo sapiens
caataaagcactatc

SEQ ID NO: 214785 - DNA, 15 bp, Homo sapiens
tcaataaagcactat

SEQ ID NO: 214786 - DNA, 15 bp, Homo sapiens
gtcaataaagcacta

SEQ ID NO: 214787 - DNA, 15 bp, Homo sapiens
agtcaataaagcact

SEQ ID NO: 214788 - DNA, 15 bp, Homo sapiens
tagtcaataaagcac

SEQ ID NO: 214789 - DNA, 15 bp, Homo sapiens
ttagtcaataaagca

SEQ ID NO: 214790 - DNA, 15 bp, Homo sapiens
cttagtcaataaagc

SEQ ID NO: 214791 - DNA, 15 bp, Homo sapiens
tcttagtcaataaag

SEQ ID NO: 214792 - DNA, 15 bp, Homo sapiens
ttcttagtcaataaa

SEQ ID NO: 214793 - DNA, 15 bp, Homo sapiens
gttcttagtcaataa

SEQ ID NO: 214794 - DNA, 15 bp, Homo sapiens
tgttcttagtcaata

SEQ ID NO: 214795 - DNA, 15 bp, Homo sapiens
ttgttcttagtcaat

SEQ ID NO: 214796 - DNA, 15 bp, Homo sapiens
attgttcttagtcaa

SEQ ID NO: 214797 - DNA, 15 bp, Homo sapiens
cattgttcttagtca

SEQ ID NO: 214798 - DNA, 15 bp, Homo sapiens
tcattgttcttagtc

SEQ ID NO: 214799 - DNA, 15 bp, Homo sapiens
gtcattgttcttagt

SEQ ID NO: 214800 - DNA, 15 bp, Homo sapiens
tgtcattgttcttag

SEQ ID NO: 214801 - DNA, 15 bp, Homo sapiens
ttgtcattgttctta

SEQ ID NO: 214802 - DNA, 15 bp, Homo sapiens
gttgtcattgttctt

SEQ ID NO: 214803 - DNA, 15 bp, Homo sapiens
tgttgtcattgttct

SEQ ID NO: 214804 - DNA, 15 bp, Homo sapiens
ttgttgtcattgttc

SEQ ID NO: 214805 - DNA, 15 bp, Homo sapiens
gttgttgtcattgtt

SEQ ID NO: 214806 - DNA, 15 bp, Homo sapiens
tgttgttgtcattgt

SEQ ID NO: 214807 - DNA, 15 bp, Homo sapiens
gtgttgttgtcattg

SEQ ID NO: 214808 - DNA, 15 bp, Homo sapiens
ggtgttgttgtcatt

SEQ ID NO: 214809 - DNA, 15 bp, Homo sapiens
aggtgttgttgtcat

SEQ ID NO: 214810 - DNA, 15 bp, Homo sapiens
aaggtgttgttgtca

SEQ ID NO: 214811 - DNA, 15 bp, Homo sapiens
aaaggtgttgttgtc

SEQ ID NO: 214812 - DNA, 15 bp, Homo sapiens
aaaaggtgttgttgt

SEQ ID NO: 214813 - DNA, 15 bp, Homo sapiens
caaaaggtgttgttg

SEQ ID NO: 214814 - DNA, 15 bp, Homo sapiens
acaaaaggtgttgtt

SEQ ID NO: 214815 - DNA, 15 bp, Homo sapiens
aacaaaaggtgttgt

SEQ ID NO: 214816 - DNA, 15 bp, Homo sapiens
aaacaaaaggtgttg

SEQ ID NO: 214817 - DNA, 15 bp, Homo sapiens
aaaacaaaaggtgtt

SEQ ID NO: 214818 - DNA, 15 bp, Homo sapiens
gaaaacaaaaggtgt

SEQ ID NO: 214819 - DNA, 15 bp, Homo sapiens
agaaaacaaaaggtg

SEQ ID NO: 214820 - DNA, 15 bp, Homo sapiens
cagaaaacaaaaggt

SEQ ID NO: 214821 - DNA, 15 bp, Homo sapiens
ccagaaaacaaaagg

SEQ ID NO: 214822 - DNA, 15 bp, Homo sapiens
cccagaaaacaaaag

SEQ ID NO: 214823 - DNA, 15 bp, Homo sapiens
tcccagaaaacaaaa

SEQ ID NO: 214824 - DNA, 15 bp, Homo sapiens
ttcccagaaaacaaa

SEQ ID NO: 214825 - DNA, 15 bp, Homo sapiens
attcccagaaaacaa

SEQ ID NO: 214826 - DNA, 15 bp, Homo sapiens
tattcccagaaaaca

SEQ ID NO: 214827 - DNA, 15 bp, Homo sapiens
ctattcccagaaaac

SEQ ID NO: 214828 - DNA, 15 bp, Homo sapiens
cctattcccagaaaa

SEQ ID NO: 214829 - DNA, 15 bp, Homo sapiens
tcctattcccagaaa

SEQ ID NO: 214830 - DNA, 15 bp, Homo sapiens
ctcctattcccagaa

SEQ ID NO: 214831 - DNA, 15 bp, Homo sapiens
tctcctattcccaga

SEQ ID NO: 214832 - DNA, 15 bp, Homo sapiens
ttctcctattcccag

SEQ ID NO: 214833 - DNA, 15 bp, Homo sapiens
tttctcctattccca

SEQ ID NO: 214834 - DNA, 15 bp, Homo sapiens
ttttctcctattccc

SEQ ID NO: 214835 - DNA, 15 bp, Homo sapiens
cttttctcctattcc

SEQ ID NO: 214836 - DNA, 15 bp, Homo sapiens
acttttctcctattc

SEQ ID NO: 214837 - DNA, 15 bp, Homo sapiens
aacttttctcctatt

SEQ ID NO: 214838 - DNA, 15 bp, Homo sapiens
aaacttttctcctat

SEQ ID NO: 214839 - DNA, 15 bp, Homo sapiens
aaaacttttctccta

SEQ ID NO: 214840 - DNA, 15 bp, Homo sapiens
taaaacttttctcct

SEQ ID NO: 214841 - DNA, 15 bp, Homo sapiens
ttaaaacttttctcc

SEQ ID NO: 214842 - DNA, 15 bp, Homo sapiens
cttaaaacttttctc

SEQ ID NO: 214843 - DNA, 15 bp, Homo sapiens
gcttaaaacttttct

SEQ ID NO: 214844 - DNA, 15 bp, Homo sapiens
ggcttaaaacttttc

SEQ ID NO: 214845 - DNA, 15 bp, Homo sapiens
tggcttaaaactttt

SEQ ID NO: 214846 - DNA, 15 bp, Homo sapiens
ttggcttaaaacttt

SEQ ID NO: 214847 - DNA, 15 bp, Homo sapiens
tttggcttaaaactt

SEQ ID NO: 214848 - DNA, 15 bp, Homo sapiens
ttttggcttaaaact

SEQ ID NO: 214849 - DNA, 15 bp, Homo sapiens
gttttggcttaaaac

SEQ ID NO: 214850 - DNA, 15 bp, Homo sapiens
agttttggcttaaaa

SEQ ID NO: 214851 - DNA, 15 bp, Homo sapiens
gagttttggcttaaa

SEQ ID NO: 214852 - DNA, 15 bp, Homo sapiens
agagttttggcttaa

SEQ ID NO: 214853 - DNA, 15 bp, Homo sapiens
aagagttttggctta

SEQ ID NO: 214854 - DNA, 15 bp, Homo sapiens
taagagttttggctt

SEQ ID NO: 214855 - DNA, 15 bp, Homo sapiens
ttaagagttttggct

SEQ ID NO: 214856 - DNA, 15 bp, Homo sapiens
attaagagttttggc

SEQ ID NO: 214857 - DNA, 15 bp, Homo sapiens
aattaagagttttgg

SEQ ID NO: 214858 - DNA, 15 bp, Homo sapiens
caattaagagttttg

SEQ ID NO: 214859 - DNA, 15 bp, Homo sapiens
gcaattaagagtttt

SEQ ID NO: 214860 - DNA, 15 bp, Homo sapiens
agcaattaagagttt

SEQ ID NO: 214861 - DNA, 15 bp, Homo sapiens
aagcaattaagagtt

SEQ ID NO: 214862 - DNA, 15 bp, Homo sapiens
taagcaattaagagt

SEQ ID NO: 214863 - DNA, 15 bp, Homo sapiens
ataagcaattaagag

SEQ ID NO: 214864 - DNA, 15 bp, Homo sapiens
gataagcaattaaga

SEQ ID NO: 214865 - DNA, 15 bp, Homo sapiens
agataagcaattaag

SEQ ID NO: 214866 - DNA, 15 bp, Homo sapiens
cagataagcaattaa

SEQ ID NO: 214867 - DNA, 15 bp, Homo sapiens
gcagataagcaatta

SEQ ID NO: 214868 - DNA, 15 bp, Homo sapiens
agcagataagcaatt

SEQ ID NO: 214869 - DNA, 15 bp, Homo sapiens
gagcagataagcaat

SEQ ID NO: 214870 - DNA, 15 bp, Homo sapiens
ggagcagataagcaa

SEQ ID NO: 214871 - DNA, 15 bp, Homo sapiens
tggagcagataagca

SEQ ID NO: 214872 - DNA, 15 bp, Homo sapiens
gtggagcagataagc

SEQ ID NO: 214873 - DNA, 15 bp, Homo sapiens
cgtggagcagataag

SEQ ID NO: 214874 - DNA, 15 bp, Homo sapiens
acgtggagcagataa

SEQ ID NO: 214875 - DNA, 15 bp, Homo sapiens
cacgtggagcagata

SEQ ID NO: 214876 - DNA, 15 bp, Homo sapiens
tcacgtggagcagat

SEQ ID NO: 214877 - DNA, 15 bp, Homo sapiens
ctcacgtggagcaga

SEQ ID NO: 214878 - DNA, 15 bp, Homo sapiens
cctcacgtggagcag

SEQ ID NO: 214879 - DNA, 15 bp, Homo sapiens
acctcacgtggagca

SEQ ID NO: 214880 - DNA, 15 bp, Homo sapiens
tacctcacgtggagc

SEQ ID NO: 214881 - DNA, 15 bp, Homo sapiens
atacctcacgtggag

SEQ ID NO: 214882 - DNA, 15 bp, Homo sapiens
catacctcacgtgga

SEQ ID NO: 214883 - DNA, 15 bp, Homo sapiens
tcatacctcacgtgg

SEQ ID NO: 214884 - DNA, 15 bp, Homo sapiens
ttcatacctcacgtg

SEQ ID NO: 214885 - DNA, 15 bp, Homo sapiens
gttcatacctcacgt

SEQ ID NO: 214886 - DNA, 15 bp, Homo sapiens
agttcatacctcacg

SEQ ID NO: 214887 - DNA, 15 bp, Homo sapiens
tagttcatacctcac

SEQ ID NO: 214888 - DNA, 15 bp, Homo sapiens
atagttcatacctca

SEQ ID NO: 214889 - DNA, 15 bp, Homo sapiens
gatagttcatacctc

SEQ ID NO: 214890 - DNA, 15 bp, Homo sapiens
tgatagttcatacct

SEQ ID NO: 214891 - DNA, 15 bp, Homo sapiens
ttgatagttcatacc

SEQ ID NO: 214892 - DNA, 15 bp, Homo sapiens
tttgatagttcatac

SEQ ID NO: 214893 - DNA, 15 bp, Homo sapiens
gtttgatagttcata

SEQ ID NO: 214894 - DNA, 15 bp, Homo sapiens
agtttgatagttcat

SEQ ID NO: 214895 - DNA, 15 bp, Homo sapiens
aagtttgatagttca

SEQ ID NO: 214896 - DNA, 15 bp, Homo sapiens
taagtttgatagttc

SEQ ID NO: 214897 - DNA, 15 bp, Homo sapiens
ctaagtttgatagtt

SEQ ID NO: 214898 - DNA, 15 bp, Homo sapiens
cctaagtttgatagt

SEQ ID NO: 214899 - DNA, 15 bp, Homo sapiens
tcctaagtttgatag

SEQ ID NO: 214900 - DNA, 15 bp, Homo sapiens
ctcctaagtttgata

SEQ ID NO: 214901 - DNA, 15 bp, Homo sapiens
gctcctaagtttgat

SEQ ID NO: 214902 - DNA, 15 bp, Homo sapiens
ggctcctaagtttga

SEQ ID NO: 214903 - DNA, 15 bp, Homo sapiens
tggctcctaagtttg

SEQ ID NO: 214904 - DNA, 15 bp, Homo sapiens
atggctcctaagttt

SEQ ID NO: 214905 - DNA, 15 bp, Homo sapiens
gatggctcctaagtt

SEQ ID NO: 214906 - DNA, 15 bp, Homo sapiens
agatggctcctaagt

SEQ ID NO: 214907 - DNA, 15 bp, Homo sapiens
tagatggctcctaag

SEQ ID NO: 214908 - DNA, 15 bp, Homo sapiens
ctagatggctcctaa

SEQ ID NO: 214909 - DNA, 15 bp, Homo sapiens
gctagatggctccta

SEQ ID NO: 214910 - DNA, 15 bp, Homo sapiens
agctagatggctcct

SEQ ID NO: 214911 - DNA, 15 bp, Homo sapiens
aagctagatggctcc

SEQ ID NO: 214912 - DNA, 15 bp, Homo sapiens
taagctagatggctc

SEQ ID NO: 214913 - DNA, 15 bp, Homo sapiens
gtaagctagatggct

SEQ ID NO: 214914 - DNA, 15 bp, Homo sapiens
tgtaagctagatggc

SEQ ID NO: 214915 - DNA, 15 bp, Homo sapiens
gtgtaagctagatgg

SEQ ID NO: 214916 - DNA, 15 bp, Homo sapiens
cgtgtaagctagatg

SEQ ID NO: 214917 - DNA, 15 bp, Homo sapiens
acgtgtaagctagat

SEQ ID NO: 214918 - DNA, 15 bp, Homo sapiens
cacgtgtaagctaga

SEQ ID NO: 214919 - DNA, 15 bp, Homo sapiens
acacgtgtaagctag

SEQ ID NO: 214920 - DNA, 15 bp, Homo sapiens
aacacgtgtaagcta

SEQ ID NO: 214921 - DNA, 15 bp, Homo sapiens
gaacacgtgtaagct

SEQ ID NO: 214922 - DNA, 15 bp, Homo sapiens
ggaacacgtgtaagc

SEQ ID NO: 214923 - DNA, 15 bp, Homo sapiens
aggaacacgtgtaag

SEQ ID NO: 214924 - DNA, 15 bp, Homo sapiens
aaggaacacgtgtaa

SEQ ID NO: 214925 - DNA, 15 bp, Homo sapiens
taaggaacacgtgta

SEQ ID NO: 214926 - DNA, 15 bp, Homo sapiens
ttaaggaacacgtgt

SEQ ID NO: 214927 - DNA, 15 bp, Homo sapiens
tttaaggaacacgtg

SEQ ID NO: 214928 - DNA, 15 bp, Homo sapiens
ttttaaggaacacgt

SEQ ID NO: 214929 - DNA, 15 bp, Homo sapiens
tttttaaggaacacg

SEQ ID NO: 214930 - DNA, 15 bp, Homo sapiens
ctttttaaggaacac

SEQ ID NO: 214931 - DNA, 15 bp, Homo sapiens
actttttaaggaaca

SEQ ID NO: 214932 - DNA, 15 bp, Homo sapiens
aactttttaaggaac

SEQ ID NO: 214933 - DNA, 15 bp, Homo sapiens
aaactttttaaggaa

SEQ ID NO: 214934 - DNA, 15 bp, Homo sapiens
caaactttttaagga

SEQ ID NO: 214935 - DNA, 15 bp, Homo sapiens
gcaaactttttaagg

SEQ ID NO: 214936 - DNA, 15 bp, Homo sapiens
agcaaactttttaag

SEQ ID NO: 214937 - DNA, 15 bp, Homo sapiens
cagcaaactttttaa

SEQ ID NO: 214938 - DNA, 15 bp, Homo sapiens
acagcaaacttttta

SEQ ID NO: 214939 - DNA, 15 bp, Homo sapiens
tacagcaaacttttt

SEQ ID NO: 214940 - DNA, 15 bp, Homo sapiens
ctacagcaaactttt

SEQ ID NO: 214941 - DNA, 15 bp, Homo sapiens
cctacagcaaacttt

SEQ ID NO: 214942 - DNA, 15 bp, Homo sapiens
gcctacagcaaactt

SEQ ID NO: 214943 - DNA, 15 bp, Homo sapiens
ggcctacagcaaact

SEQ ID NO: 214944 - DNA, 15 bp, Homo sapiens
cggcctacagcaaac

SEQ ID NO: 214945 - DNA, 15 bp, Homo sapiens
ccggcctacagcaaa

SEQ ID NO: 214946 - DNA, 15 bp, Homo sapiens
cccggcctacagcaa

SEQ ID NO: 214947 - DNA, 15 bp, Homo sapiens
gcccggcctacagca

SEQ ID NO: 214948 - DNA, 15 bp, Homo sapiens
tgcccggcctacagc

SEQ ID NO: 214949 - DNA, 15 bp, Homo sapiens
gtgcccggcctacag

SEQ ID NO: 214950 - DNA, 15 bp, Homo sapiens
tgtgcccggcctaca

SEQ ID NO: 214951 - DNA, 15 bp, Homo sapiens
ctgtgcccggcctac

SEQ ID NO: 214952 - DNA, 15 bp, Homo sapiens
actgtgcccggccta

SEQ ID NO: 214953 - DNA, 15 bp, Homo sapiens
cactgtgcccggcct

SEQ ID NO: 214954 - DNA, 15 bp, Homo sapiens
ccactgtgcccggcc

SEQ ID NO: 214955 - DNA, 15 bp, Homo sapiens
gccactgtgcccggc

SEQ ID NO: 214956 - DNA, 15 bp, Homo sapiens
agccactgtgcccgg

SEQ ID NO: 214957 - DNA, 15 bp, Homo sapiens
gagccactgtgcccg

SEQ ID NO: 214958 - DNA, 15 bp, Homo sapiens
cgagccactgtgccc

SEQ ID NO: 214959 - DNA, 15 bp, Homo sapiens
acgagccactgtgcc

SEQ ID NO: 214960 - DNA, 15 bp, Homo sapiens
tacgagccactgtgc

SEQ ID NO: 214961 - DNA, 15 bp, Homo sapiens
gtacgagccactgtg

SEQ ID NO: 214962 - DNA, 15 bp, Homo sapiens
ggtacgagccactgt

SEQ ID NO: 214963 - DNA, 15 bp, Homo sapiens
aggtacgagccactg

SEQ ID NO: 214964 - DNA, 15 bp, Homo sapiens
caggtacgagccact

SEQ ID NO: 214965 - DNA, 15 bp, Homo sapiens
acaggtacgagccac

SEQ ID NO: 214966 - DNA, 15 bp, Homo sapiens
tacaggtacgagcca

SEQ ID NO: 214967 - DNA, 15 bp, Homo sapiens
ctacaggtacgagcc

SEQ ID NO: 214968 - DNA, 15 bp, Homo sapiens
actacaggtacgagc

SEQ ID NO: 214969 - DNA, 15 bp, Homo sapiens
gactacaggtacgag

SEQ ID NO: 214970 - DNA, 15 bp, Homo sapiens
ggactacaggtacga

SEQ ID NO: 214971 - DNA, 15 bp, Homo sapiens
gggactacaggtacg

SEQ ID NO: 214972 - DNA, 15 bp, Homo sapiens
tgggactacaggtac

SEQ ID NO: 214973 - DNA, 15 bp, Homo sapiens
ctgggactacaggta

SEQ ID NO: 214974 - DNA, 15 bp, Homo sapiens
tgctgggactacagg

SEQ ID NO: 214975 - DNA, 15 bp, Homo sapiens
gtgctgggactacag

SEQ ID NO: 214976 - DNA, 15 bp, Homo sapiens
agtgctgggactaca

SEQ ID NO: 214977 - DNA, 15 bp, Homo sapiens
aagtgctgggactac

SEQ ID NO: 214978 - DNA, 15 bp, Homo sapiens
aaagtgctgggacta

SEQ ID NO: 214979 - DNA, 15 bp, Homo sapiens
aaaagtgctgggact

SEQ ID NO: 214980 - DNA, 15 bp, Homo sapiens
caaaagtgctgggac

SEQ ID NO: 214981 - DNA, 15 bp, Homo sapiens
ccaaaagtgctggga

SEQ ID NO: 214982 - DNA, 15 bp, Homo sapiens
cccaaaagtgctggg

SEQ ID NO: 214983 - DNA, 15 bp, Homo sapiens
tcccaaaagtgctgg

SEQ ID NO: 214984 - DNA, 15 bp, Homo sapiens
ctcccaaaagtgctg

SEQ ID NO: 214985 - DNA, 15 bp, Homo sapiens
gctcccaaaagtgct

SEQ ID NO: 214986 - DNA, 15 bp, Homo sapiens
ggctcccaaaagtgc

SEQ ID NO: 214987 - DNA, 15 bp, Homo sapiens
gggctcccaaaagtg

SEQ ID NO: 214988 - DNA, 15 bp, Homo sapiens
tgggctcccaaaagt

SEQ ID NO: 214989 - DNA, 15 bp, Homo sapiens
ctgggctcccaaaag

SEQ ID NO: 214990 - DNA, 15 bp, Homo sapiens
cctgggctcccaaaa

SEQ ID NO: 214991 - DNA, 15 bp, Homo sapiens
ccctgggctcccaaa

SEQ ID NO: 214992 - DNA, 15 bp, Homo sapiens
accctgggctcccaa

SEQ ID NO: 214993 - DNA, 15 bp, Homo sapiens
caccctgggctccca

SEQ ID NO: 214994 - DNA, 15 bp, Homo sapiens
ccaccctgggctccc

SEQ ID NO: 214995 - DNA, 15 bp, Homo sapiens
cccaccctgggctcc

SEQ ID NO: 214996 - DNA, 15 bp, Homo sapiens
ccccaccctgggctc

SEQ ID NO: 214997 - DNA, 15 bp, Homo sapiens
cccccaccctgggct

SEQ ID NO: 214998 - DNA, 15 bp, Homo sapiens
tcccccaccctgggc

SEQ ID NO: 214999 - DNA, 15 bp, Homo sapiens
atcccccaccctggg

SEQ ID NO: 215000 - DNA, 15 bp, Homo sapiens
gatcccccaccctgg

SEQ ID NO: 215001 - DNA, 15 bp, Homo sapiens
tgatcccccaccctg

SEQ ID NO: 215002 - DNA, 15 bp, Homo sapiens
gtgatcccccaccct

SEQ ID NO: 215003 - DNA, 15 bp, Homo sapiens
agtgatcccccaccc

SEQ ID NO: 215004 - DNA, 15 bp, Homo sapiens
aagtgatcccccacc

SEQ ID NO: 215005 - DNA, 15 bp, Homo sapiens
caagtgatcccccac

SEQ ID NO: 215006 - DNA, 15 bp, Homo sapiens
tcaagtgatccccca

SEQ ID NO: 215007 - DNA, 15 bp, Homo sapiens
ctcaagtgatccccc

SEQ ID NO: 215008 - DNA, 15 bp, Homo sapiens
gctcaagtgatcccc

SEQ ID NO: 215009 - DNA, 15 bp, Homo sapiens
agctcaagtgatccc

SEQ ID NO: 215010 - DNA, 15 bp, Homo sapiens
gagctcaagtgatcc

SEQ ID NO: 215011 - DNA, 15 bp, Homo sapiens
tgagctcaagtgatc

SEQ ID NO: 215012 - DNA, 15 bp, Homo sapiens
ctgagctcaagtgat

SEQ ID NO: 215013 - DNA, 15 bp, Homo sapiens
cctgagctcaagtga

SEQ ID NO: 215014 - DNA, 15 bp, Homo sapiens
tcctgagctcaagtg

SEQ ID NO: 215015 - DNA, 15 bp, Homo sapiens
ctcctgagctcaagt

SEQ ID NO: 215016 - DNA, 15 bp, Homo sapiens
actcctgagctcaag

SEQ ID NO: 215017 - DNA, 15 bp, Homo sapiens
aactcctgagctcaa

SEQ ID NO: 215018 - DNA, 15 bp, Homo sapiens
gaactcctgagctca

SEQ ID NO: 215019 - DNA, 15 bp, Homo sapiens
tgaactcctgagctc

SEQ ID NO: 215020 - DNA, 15 bp, Homo sapiens
ttgaactcctgagct

SEQ ID NO: 215021 - DNA, 15 bp, Homo sapiens
cttgaactcctgagc

SEQ ID NO: 215022 - DNA, 15 bp, Homo sapiens
tcttgaactcctgag

SEQ ID NO: 215023 - DNA, 15 bp, Homo sapiens
catgttgcccaggct

SEQ ID NO: 215024 - DNA, 15 bp, Homo sapiens
ccatgttgcccaggc

SEQ ID NO: 215025 - DNA, 15 bp, Homo sapiens
gccatgttgcccagg

SEQ ID NO: 215026 - DNA, 15 bp, Homo sapiens
tgccatgttgcccag

SEQ ID NO: 215027 - DNA, 15 bp, Homo sapiens
ttgccatgttgccca

SEQ ID NO: 215028 - DNA, 15 bp, Homo sapiens
tttgccatgttgccc

SEQ ID NO: 215029 - DNA, 15 bp, Homo sapiens
ttttgccatgttgcc

SEQ ID NO: 215030 - DNA, 15 bp, Homo sapiens
gttttgccatgttgc

SEQ ID NO: 215031 - DNA, 15 bp, Homo sapiens
cgttttgccatgttg

SEQ ID NO: 215032 - DNA, 15 bp, Homo sapiens
gcgttttgccatgtt

SEQ ID NO: 215033 - DNA, 15 bp, Homo sapiens
ggcgttttgccatgt

SEQ ID NO: 215034 - DNA, 15 bp, Homo sapiens
tggcgttttgccatg

SEQ ID NO: 215035 - DNA, 15 bp, Homo sapiens
atggcgttttgccat

SEQ ID NO: 215036 - DNA, 15 bp, Homo sapiens
gatggcgttttgcca

SEQ ID NO: 215037 - DNA, 15 bp, Homo sapiens
agatggcgttttgcc

SEQ ID NO: 215038 - DNA, 15 bp, Homo sapiens
gagatggcgttttgc

SEQ ID NO: 215039 - DNA, 15 bp, Homo sapiens
agagatggcgttttg

SEQ ID NO: 215040 - DNA, 15 bp, Homo sapiens
tagagatggcgtttt

SEQ ID NO: 215041 - DNA, 15 bp, Homo sapiens
gtagagatggcgttt

SEQ ID NO: 215042 - DNA, 15 bp, Homo sapiens
tgtagagatggcgtt

SEQ ID NO: 215043 - DNA, 15 bp, Homo sapiens
ttgtagagatggcgt

SEQ ID NO: 215044 - DNA, 15 bp, Homo sapiens
tttgtagagatggcg

SEQ ID NO: 215045 - DNA, 15 bp, Homo sapiens
ttttgtagagatggc

SEQ ID NO: 215046 - DNA, 15 bp, Homo sapiens
tttttgtagagatgg

SEQ ID NO: 215047 - DNA, 15 bp, Homo sapiens
atttttgtagagatg

SEQ ID NO: 215048 - DNA, 15 bp, Homo sapiens
tatttttgtagagat

SEQ ID NO: 215049 - DNA, 15 bp, Homo sapiens
gtatttttgtagaga

SEQ ID NO: 215050 - DNA, 15 bp, Homo sapiens
tgtatttttgtagag

SEQ ID NO: 215051 - DNA, 15 bp, Homo sapiens
ttgtatttttgtaga

SEQ ID NO: 215052 - DNA, 15 bp, Homo sapiens
tttgtatttttgtag

SEQ ID NO: 215053 - DNA, 15 bp, Homo sapiens
ttttgtatttttgta

SEQ ID NO: 215054 - DNA, 15 bp, Homo sapiens
tttttgtatttttgt

SEQ ID NO: 215055 - DNA, 15 bp, Homo sapiens
ttttttgtatttttg

SEQ ID NO: 215056 - DNA, 15 bp, Homo sapiens
ttttttttttgtatt

SEQ ID NO: 215057 - DNA, 15 bp, Homo sapiens
tttttttttttgtat

SEQ ID NO: 215058 - DNA, 15 bp, Homo sapiens
ttttttttttttgta

SEQ ID NO: 215059 - DNA, 15 bp, Homo sapiens
tttttttttttttgt

SEQ ID NO: 215060 - DNA, 15 bp, Homo sapiens
cgttttttttttttt

SEQ ID NO: 215061 - DNA, 15 bp, Homo sapiens
gcgtttttttttttt

SEQ ID NO: 215062 - DNA, 15 bp, Homo sapiens
agcgttttttttttt

SEQ ID NO: 215063 - DNA, 15 bp, Homo sapiens
cagcgtttttttttt

SEQ ID NO: 215064 - DNA, 15 bp, Homo sapiens
ccagcgttttttttt

SEQ ID NO: 215065 - DNA, 15 bp, Homo sapiens
cccagcgtttttttt

SEQ ID NO: 215066 - DNA, 15 bp, Homo sapiens
acccagcgttttttt

SEQ ID NO: 215067 - DNA, 15 bp, Homo sapiens
cacccagcgtttttt

SEQ ID NO: 215068 - DNA, 15 bp, Homo sapiens
acacccagcgttttt

SEQ ID NO: 215069 - DNA, 15 bp, Homo sapiens
cacacccagcgtttt

SEQ ID NO: 215070 - DNA, 15 bp, Homo sapiens
ccacacccagcgttt

SEQ ID NO: 215071 - DNA, 15 bp, Homo sapiens
accacacccagcgtt

SEQ ID NO: 215072 - DNA, 15 bp, Homo sapiens
caccacacccagcgt

SEQ ID NO: 215073 - DNA, 15 bp, Homo sapiens
ccaccacacccagcg

SEQ ID NO: 215074 - DNA, 15 bp, Homo sapiens
gccaccacacccagc

SEQ ID NO: 215075 - DNA, 15 bp, Homo sapiens
cgccaccacacccag

SEQ ID NO: 215076 - DNA, 15 bp, Homo sapiens
gcgccaccacaccca

SEQ ID NO: 215077 - DNA, 15 bp, Homo sapiens
tgcgccaccacaccc

SEQ ID NO: 215078 - DNA, 15 bp, Homo sapiens
gtgcgccaccacacc

SEQ ID NO: 215079 - DNA, 15 bp, Homo sapiens
tgtgcgccaccacac

SEQ ID NO: 215080 - DNA, 15 bp, Homo sapiens
ttgtgcgccaccaca

SEQ ID NO: 215081 - DNA, 15 bp, Homo sapiens
gttgtgcgccaccac

SEQ ID NO: 215082 - DNA, 15 bp, Homo sapiens
agttgtgcgccacca

SEQ ID NO: 215083 - DNA, 15 bp, Homo sapiens
cagttgtgcgccacc

SEQ ID NO: 215084 - DNA, 15 bp, Homo sapiens
acagttgtgcgccac

SEQ ID NO: 215085 - DNA, 15 bp, Homo sapiens
tacagttgtgcgcca

SEQ ID NO: 215086 - DNA, 15 bp, Homo sapiens
ctacagttgtgcgcc

SEQ ID NO: 215087 - DNA, 15 bp, Homo sapiens
actacagttgtgcgc

SEQ ID NO: 215088 - DNA, 15 bp, Homo sapiens
gactacagttgtgcg

SEQ ID NO: 215089 - DNA, 15 bp, Homo sapiens
ggactacagttgtgc

SEQ ID NO: 215090 - DNA, 15 bp, Homo sapiens
gggactacagttgtg

SEQ ID NO: 215091 - DNA, 15 bp, Homo sapiens
tgggactacagttgt

SEQ ID NO: 215092 - DNA, 15 bp, Homo sapiens
agcctcccaagtagc

SEQ ID NO: 215093 - DNA, 15 bp, Homo sapiens
cagcctcccaagtag

SEQ ID NO: 215094 - DNA, 15 bp, Homo sapiens
tcagcctcccaagta

SEQ ID NO: 215095 - DNA, 15 bp, Homo sapiens
ctcagcctcccaagt

SEQ ID NO: 215096 - DNA, 15 bp, Homo sapiens
acctcagcctcccaa

SEQ ID NO: 215097 - DNA, 15 bp, Homo sapiens
cacctcagcctccca

SEQ ID NO: 215098 - DNA, 15 bp, Homo sapiens
ccacctcagcctccc

SEQ ID NO: 215099 - DNA, 15 bp, Homo sapiens
tcctcccacctcagc

SEQ ID NO: 215100 - DNA, 15 bp, Homo sapiens
atcctcccacctcag

SEQ ID NO: 215101 - DNA, 15 bp, Homo sapiens
aatcctcccacctca

SEQ ID NO: 215102 - DNA, 15 bp, Homo sapiens
caatcctcccacctc

SEQ ID NO: 215103 - DNA, 15 bp, Homo sapiens
gcaatcctcccacct

SEQ ID NO: 215104 - DNA, 15 bp, Homo sapiens
agcaatcctcccacc

SEQ ID NO: 215105 - DNA, 15 bp, Homo sapiens
aagcaatcctcccac

SEQ ID NO: 215106 - DNA, 15 bp, Homo sapiens
caagcaatcctccca

SEQ ID NO: 215107 - DNA, 15 bp, Homo sapiens
tcaagcaatcctccc

SEQ ID NO: 215108 - DNA, 15 bp, Homo sapiens
ctcaagcaatcctcc

SEQ ID NO: 215109 - DNA, 15 bp, Homo sapiens
gctcaagcaatcctc

SEQ ID NO: 215110 - DNA, 15 bp, Homo sapiens
agctcaagcaatcct

SEQ ID NO: 215111 - DNA, 15 bp, Homo sapiens
aagctcaagcaatcc

SEQ ID NO: 215112 - DNA, 15 bp, Homo sapiens
caagctcaagcaatc

SEQ ID NO: 215113 - DNA, 15 bp, Homo sapiens
ccaagctcaagcaat

SEQ ID NO: 215114 - DNA, 15 bp, Homo sapiens
cccaagctcaagcaa

SEQ ID NO: 215115 - DNA, 15 bp, Homo sapiens
tcccaagctcaagca

SEQ ID NO: 215116 - DNA, 15 bp, Homo sapiens
ctcccaagctcaagc

SEQ ID NO: 215117 - DNA, 15 bp, Homo sapiens
cctcccaagctcaag

SEQ ID NO: 215118 - DNA, 15 bp, Homo sapiens
acctcccaagctcaa

SEQ ID NO: 215119 - DNA, 15 bp, Homo sapiens
cacctcccaagctca

SEQ ID NO: 215120 - DNA, 15 bp, Homo sapiens
tcacctcccaagctc

SEQ ID NO: 215121 - DNA, 15 bp, Homo sapiens
ttcacctcccaagct

SEQ ID NO: 215122 - DNA, 15 bp, Homo sapiens
cttcacctcccaagc

SEQ ID NO: 215123 - DNA, 15 bp, Homo sapiens
ccttcacctcccaag

SEQ ID NO: 215124 - DNA, 15 bp, Homo sapiens
gccttcacctcccaa

SEQ ID NO: 215125 - DNA, 15 bp, Homo sapiens
agccttcacctccca

SEQ ID NO: 215126 - DNA, 15 bp, Homo sapiens
cagccttcacctccc

SEQ ID NO: 215127 - DNA, 15 bp, Homo sapiens
gcagccttcacctcc

SEQ ID NO: 215128 - DNA, 15 bp, Homo sapiens
tgcagccttcacctc

SEQ ID NO: 215129 - DNA, 15 bp, Homo sapiens
ctgcagccttcacct

SEQ ID NO: 215130 - DNA, 15 bp, Homo sapiens
actgcagccttcacc

SEQ ID NO: 215131 - DNA, 15 bp, Homo sapiens
cactgcagccttcac

SEQ ID NO: 215132 - DNA, 15 bp, Homo sapiens
tcactgcagccttca

SEQ ID NO: 215133 - DNA, 15 bp, Homo sapiens
ctcactgcagccttc

SEQ ID NO: 215134 - DNA, 15 bp, Homo sapiens
gctcactgcagcctt

SEQ ID NO: 215135 - DNA, 15 bp, Homo sapiens
ggctcactgcagcct

SEQ ID NO: 215136 - DNA, 15 bp, Homo sapiens
aggctcactgcagcc

SEQ ID NO: 215137 - DNA, 15 bp, Homo sapiens
aaggctcactgcagc

SEQ ID NO: 215138 - DNA, 15 bp, Homo sapiens
caaggctcactgcag

SEQ ID NO: 215139 - DNA, 15 bp, Homo sapiens
tcaaggctcactgca

SEQ ID NO: 215140 - DNA, 15 bp, Homo sapiens
gtcaaggctcactgc

SEQ ID NO: 215141 - DNA, 15 bp, Homo sapiens
tgtcaaggctcactg

SEQ ID NO: 215142 - DNA, 15 bp, Homo sapiens
ctgtcaaggctcact

SEQ ID NO: 215143 - DNA, 15 bp, Homo sapiens
actgtcaaggctcac

SEQ ID NO: 215144 - DNA, 15 bp, Homo sapiens
cactgtcaaggctca

SEQ ID NO: 215145 - DNA, 15 bp, Homo sapiens
gcactgtcaaggctc

SEQ ID NO: 215146 - DNA, 15 bp, Homo sapiens
ggcactgtcaaggct

SEQ ID NO: 215147 - DNA, 15 bp, Homo sapiens
tggcactgtcaaggc

SEQ ID NO: 215148 - DNA, 15 bp, Homo sapiens
gtggcactgtcaagg

SEQ ID NO: 215149 - DNA, 15 bp, Homo sapiens
agtggcactgtcaag

SEQ ID NO: 215150 - DNA, 15 bp, Homo sapiens
tagtggcactgtcaa

SEQ ID NO: 215151 - DNA, 15 bp, Homo sapiens
gtagtggcactgtca

SEQ ID NO: 215152 - DNA, 15 bp, Homo sapiens
tgtagtggcactgtc

SEQ ID NO: 215153 - DNA, 15 bp, Homo sapiens
gtgtagtggcactgt

SEQ ID NO: 215154 - DNA, 15 bp, Homo sapiens
agtgtagtggcactg

SEQ ID NO: 215155 - DNA, 15 bp, Homo sapiens
gagtgtagtggcact

SEQ ID NO: 215156 - DNA, 15 bp, Homo sapiens
ggagtgtagtggcac

SEQ ID NO: 215157 - DNA, 15 bp, Homo sapiens
tggagtgtagtggca

SEQ ID NO: 215158 - DNA, 15 bp, Homo sapiens
ctggagtgtagtggc

SEQ ID NO: 215159 - DNA, 15 bp, Homo sapiens
gctggagtgtagtgg

SEQ ID NO: 215160 - DNA, 15 bp, Homo sapiens
ggctggagtgtagtg

SEQ ID NO: 215161 - DNA, 15 bp, Homo sapiens
aggctggagtgtagt

SEQ ID NO: 215162 - DNA, 15 bp, Homo sapiens
caggctggagtgtag

SEQ ID NO: 215163 - DNA, 15 bp, Homo sapiens
ccaggctggagtgta

SEQ ID NO: 215164 - DNA, 15 bp, Homo sapiens
tccaggctggagtgt

SEQ ID NO: 215165 - DNA, 15 bp, Homo sapiens
atccaggctggagtg

SEQ ID NO: 215166 - DNA, 15 bp, Homo sapiens
catccaggctggagt

SEQ ID NO: 215167 - DNA, 15 bp, Homo sapiens
tcatccaggctggag

SEQ ID NO: 215168 - DNA, 15 bp, Homo sapiens
gtcatccaggctgga

SEQ ID NO: 215169 - DNA, 15 bp, Homo sapiens
tgtcatccaggctgg

SEQ ID NO: 215170 - DNA, 15 bp, Homo sapiens
ctgtcatccaggctg

SEQ ID NO: 215171 - DNA, 15 bp, Homo sapiens
tctgtcatccaggct

SEQ ID NO: 215172 - DNA, 15 bp, Homo sapiens
ctctgtcatccaggc

SEQ ID NO: 215173 - DNA, 15 bp, Homo sapiens
actctgtcatccagg

SEQ ID NO: 215174 - DNA, 15 bp, Homo sapiens
cactctgtcatccag

SEQ ID NO: 215175 - DNA, 15 bp, Homo sapiens
tcactctgtcatcca

SEQ ID NO: 215176 - DNA, 15 bp, Homo sapiens
ctcactctgtcatcc

SEQ ID NO: 215177 - DNA, 15 bp, Homo sapiens
tctcactctgtcatc

SEQ ID NO: 215178 - DNA, 15 bp, Homo sapiens
gtctcactctgtcat

SEQ ID NO: 215179 - DNA, 15 bp, Homo sapiens
ttgagacagggtctc

SEQ ID NO: 215180 - DNA, 15 bp, Homo sapiens
tttttgagacagggt

SEQ ID NO: 215181 - DNA, 15 bp, Homo sapiens
ttttttgagacaggg

SEQ ID NO: 215182 - DNA, 15 bp, Homo sapiens
tttttttgagacagg

SEQ ID NO: 215183 - DNA, 15 bp, Homo sapiens
cttttttttgagaca

SEQ ID NO: 215184 - DNA, 15 bp, Homo sapiens
tcttttttttgagac

SEQ ID NO: 215185 - DNA, 15 bp, Homo sapiens
ctcttttttttgaga

SEQ ID NO: 215186 - DNA, 15 bp, Homo sapiens
actcttttttttgag

SEQ ID NO: 215187 - DNA, 15 bp, Homo sapiens
aactcttttttttga

SEQ ID NO: 215188 - DNA, 15 bp, Homo sapiens
aaactcttttttttg

SEQ ID NO: 215189 - DNA, 15 bp, Homo sapiens
caaactctttttttt

SEQ ID NO: 215190 - DNA, 15 bp, Homo sapiens
gcaaactcttttttt

SEQ ID NO: 215191 - DNA, 15 bp, Homo sapiens
agcaaactctttttt

SEQ ID NO: 215192 - DNA, 15 bp, Homo sapiens
cagcaaactcttttt

SEQ ID NO: 215193 - DNA, 15 bp, Homo sapiens
acagcaaactctttt

SEQ ID NO: 215194 - DNA, 15 bp, Homo sapiens
tacagcaaactcttt

SEQ ID NO: 215195 - DNA, 15 bp, Homo sapiens
ttacagcaaactctt

SEQ ID NO: 215196 - DNA, 15 bp, Homo sapiens
attacagcaaactct

SEQ ID NO: 215197 - DNA, 15 bp, Homo sapiens
aattacagcaaactc

SEQ ID NO: 215198 - DNA, 15 bp, Homo sapiens
gaattacagcaaact

SEQ ID NO: 215199 - DNA, 15 bp, Homo sapiens
ggaattacagcaaac

SEQ ID NO: 215200 - DNA, 15 bp, Homo sapiens
gggaattacagcaaa

SEQ ID NO: 215201 - DNA, 15 bp, Homo sapiens
tgggaattacagcaa

SEQ ID NO: 215202 - DNA, 15 bp, Homo sapiens
ctgggaattacagca

SEQ ID NO: 215203 - DNA, 15 bp, Homo sapiens
gctgggaattacagc

SEQ ID NO: 215204 - DNA, 15 bp, Homo sapiens
tgctgggaattacag

SEQ ID NO: 215205 - DNA, 15 bp, Homo sapiens
ttgctgggaattaca

SEQ ID NO: 215206 - DNA, 15 bp, Homo sapiens
gttgctgggaattac

SEQ ID NO: 215207 - DNA, 15 bp, Homo sapiens
tgttgctgggaatta

SEQ ID NO: 215208 - DNA, 15 bp, Homo sapiens
ttgttgctgggaatt

SEQ ID NO: 215209 - DNA, 15 bp, Homo sapiens
tttgttgctgggaat

SEQ ID NO: 215210 - DNA, 15 bp, Homo sapiens
ctttgttgctgggaa

SEQ ID NO: 215211 - DNA, 15 bp, Homo sapiens
actttgttgctggga

SEQ ID NO: 215212 - DNA, 15 bp, Homo sapiens
tactttgttgctggg

SEQ ID NO: 215213 - DNA, 15 bp, Homo sapiens
ctactttgttgctgg

SEQ ID NO: 215214 - DNA, 15 bp, Homo sapiens
cctactttgttgctg

SEQ ID NO: 215215 - DNA, 15 bp, Homo sapiens
tcctactttgttgct

SEQ ID NO: 215216 - DNA, 15 bp, Homo sapiens
ctcctactttgttgc

SEQ ID NO: 215217 - DNA, 15 bp, Homo sapiens
tctcctactttgttg

SEQ ID NO: 215218 - DNA, 15 bp, Homo sapiens
gtctcctactttgtt

SEQ ID NO: 215219 - DNA, 15 bp, Homo sapiens
agtctcctactttgt

SEQ ID NO: 215220 - DNA, 15 bp, Homo sapiens
gagtctcctactttg

SEQ ID NO: 215221 - DNA, 15 bp, Homo sapiens
tgagtctcctacttt

SEQ ID NO: 215222 - DNA, 15 bp, Homo sapiens
ttgagtctcctactt

SEQ ID NO: 215223 - DNA, 15 bp, Homo sapiens
tttgagtctcctact

SEQ ID NO: 215224 - DNA, 15 bp, Homo sapiens
gtttgagtctcctac

SEQ ID NO: 215225 - DNA, 15 bp, Homo sapiens
agtttgagtctccta

SEQ ID NO: 215226 - DNA, 15 bp, Homo sapiens
tagtttgagtctcct

SEQ ID NO: 215227 - DNA, 15 bp, Homo sapiens
ttagtttgagtctcc

SEQ ID NO: 215228 - DNA, 15 bp, Homo sapiens
tttagtttgagtctc

SEQ ID NO: 215229 - DNA, 15 bp, Homo sapiens
atttagtttgagtct

SEQ ID NO: 215230 - DNA, 15 bp, Homo sapiens
tatttagtttgagtc

SEQ ID NO: 215231 - DNA, 15 bp, Homo sapiens
ttatttagtttgagt

SEQ ID NO: 215232 - DNA, 15 bp, Homo sapiens
attatttagtttgag

SEQ ID NO: 215233 - DNA, 15 bp, Homo sapiens
aattatttagtttga

SEQ ID NO: 215234 - DNA, 15 bp, Homo sapiens
aaattatttagtttg

SEQ ID NO: 215235 - DNA, 15 bp, Homo sapiens
aaaattatttagttt

SEQ ID NO: 215236 - DNA, 15 bp, Homo sapiens
gaaaattatttagtt

SEQ ID NO: 215237 - DNA, 15 bp, Homo sapiens
agaaaattatttagt

SEQ ID NO: 215238 - DNA, 15 bp, Homo sapiens
tagaaaattatttag

SEQ ID NO: 215239 - DNA, 15 bp, Homo sapiens
atagaaaattattta

SEQ ID NO: 215240 - DNA, 15 bp, Homo sapiens
tatagaaaattattt

SEQ ID NO: 215241 - DNA, 15 bp, Homo sapiens
ctatagaaaattatt

SEQ ID NO: 215242 - DNA, 15 bp, Homo sapiens
actatagaaaattat

SEQ ID NO: 215243 - DNA, 15 bp, Homo sapiens
gactatagaaaatta

SEQ ID NO: 215244 - DNA, 15 bp, Homo sapiens
ggactatagaaaatt

SEQ ID NO: 215245 - DNA, 15 bp, Homo sapiens
aggactatagaaaat

SEQ ID NO: 215246 - DNA, 15 bp, Homo sapiens
taggactatagaaaa

SEQ ID NO: 215247 - DNA, 15 bp, Homo sapiens
ctaggactatagaaa

SEQ ID NO: 215248 - DNA, 15 bp, Homo sapiens
tctaggactatagaa

SEQ ID NO: 215249 - DNA, 15 bp, Homo sapiens
ttctaggactataga

SEQ ID NO: 215250 - DNA, 15 bp, Homo sapiens
gttctaggactatag

SEQ ID NO: 215251 - DNA, 15 bp, Homo sapiens
agttctaggactata

SEQ ID NO: 215252 - DNA, 15 bp, Homo sapiens
aagttctaggactat

SEQ ID NO: 215253 - DNA, 15 bp, Homo sapiens
gaagttctaggacta

SEQ ID NO: 215254 - DNA, 15 bp, Homo sapiens
agaagttctaggact

SEQ ID NO: 215255 - DNA, 15 bp, Homo sapiens
aagaagttctaggac

SEQ ID NO: 215256 - DNA, 15 bp, Homo sapiens
taagaagttctagga

SEQ ID NO: 215257 - DNA, 15 bp, Homo sapiens
ctaagaagttctagg

SEQ ID NO: 215258 - DNA, 15 bp, Homo sapiens
actaagaagttctag

SEQ ID NO: 215259 - DNA, 15 bp, Homo sapiens
aactaagaagttcta

SEQ ID NO: 215260 - DNA, 15 bp, Homo sapiens
aaactaagaagttct

SEQ ID NO: 215261 - DNA, 15 bp, Homo sapiens
taaactaagaagttc

SEQ ID NO: 215262 - DNA, 15 bp, Homo sapiens
gtaaactaagaagtt

SEQ ID NO: 215263 - DNA, 15 bp, Homo sapiens
tgtaaactaagaagt

SEQ ID NO: 215264 - DNA, 15 bp, Homo sapiens
ttgtaaactaagaag

SEQ ID NO: 215265 - DNA, 15 bp, Homo sapiens
tttgtaaactaagaa

SEQ ID NO: 215266 - DNA, 15 bp, Homo sapiens
ttttgtaaactaaga

SEQ ID NO: 215267 - DNA, 15 bp, Homo sapiens
gttttgtaaactaag

SEQ ID NO: 215268 - DNA, 15 bp, Homo sapiens
tgttttgtaaactaa

SEQ ID NO: 215269 - DNA, 15 bp, Homo sapiens
atgttttgtaaacta

SEQ ID NO: 215270 - DNA, 15 bp, Homo sapiens
aatgttttgtaaact

SEQ ID NO: 215271 - DNA, 15 bp, Homo sapiens
aaatgttttgtaaac

SEQ ID NO: 215272 - DNA, 15 bp, Homo sapiens
aaaatgttttgtaaa

SEQ ID NO: 215273 - DNA, 15 bp, Homo sapiens
aaaaatgttttgtaa

SEQ ID NO: 215274 - DNA, 15 bp, Homo sapiens
taaaaatgttttgta

SEQ ID NO: 215275 - DNA, 15 bp, Homo sapiens
gtaaaaatgttttgt

SEQ ID NO: 215276 - DNA, 15 bp, Homo sapiens
agtaaaaatgttttg

SEQ ID NO: 215277 - DNA, 15 bp, Homo sapiens
aagtaaaaatgtttt

SEQ ID NO: 215278 - DNA, 15 bp, Homo sapiens
gaagtaaaaatgttt

SEQ ID NO: 215279 - DNA, 15 bp, Homo sapiens
agaagtaaaaatgtt

SEQ ID NO: 215280 - DNA, 15 bp, Homo sapiens
cagaagtaaaaatgt

SEQ ID NO: 215281 - DNA, 15 bp, Homo sapiens
acagaagtaaaaatg

SEQ ID NO: 215282 - DNA, 15 bp, Homo sapiens
aacagaagtaaaaat

SEQ ID NO: 215283 - DNA, 15 bp, Homo sapiens
taacagaagtaaaaa

SEQ ID NO: 215284 - DNA, 15 bp, Homo sapiens
ataacagaagtaaaa

SEQ ID NO: 215285 - DNA, 15 bp, Homo sapiens
gataacagaagtaaa

SEQ ID NO: 215286 - DNA, 15 bp, Homo sapiens
agataacagaagtaa

SEQ ID NO: 215287 - DNA, 15 bp, Homo sapiens
gagataacagaagta

SEQ ID NO: 215288 - DNA, 15 bp, Homo sapiens
tgagataacagaagt

SEQ ID NO: 215289 - DNA, 15 bp, Homo sapiens
atgagataacagaag

SEQ ID NO: 215290 - DNA, 15 bp, Homo sapiens
aatgagataacagaa

SEQ ID NO: 215291 - DNA, 15 bp, Homo sapiens
aaatgagataacaga

SEQ ID NO: 215292 - DNA, 15 bp, Homo sapiens
caaatgagataacag

SEQ ID NO: 215293 - DNA, 15 bp, Homo sapiens
tcaaatgagataaca

SEQ ID NO: 215294 - DNA, 15 bp, Homo sapiens
atcaaatgagataac

SEQ ID NO: 215295 - DNA, 15 bp, Homo sapiens
gatcaaatgagataa

SEQ ID NO: 215296 - DNA, 15 bp, Homo sapiens
agatcaaatgagata

SEQ ID NO: 215297 - DNA, 15 bp, Homo sapiens
aagatcaaatgagat

SEQ ID NO: 215298 - DNA, 15 bp, Homo sapiens
gaagatcaaatgaga

SEQ ID NO: 215299 - DNA, 15 bp, Homo sapiens
tgaagatcaaatgag

SEQ ID NO: 215300 - DNA, 15 bp, Homo sapiens
atgaagatcaaatga

SEQ ID NO: 215301 - DNA, 15 bp, Homo sapiens
tatgaagatcaaatg

SEQ ID NO: 215302 - DNA, 15 bp, Homo sapiens
gtatgaagatcaaat

SEQ ID NO: 215303 - DNA, 15 bp, Homo sapiens
ggtatgaagatcaaa

SEQ ID NO: 215304 - DNA, 15 bp, Homo sapiens
gggtatgaagatcaa

SEQ ID NO: 215305 - DNA, 15 bp, Homo sapiens
tgggtatgaagatca

SEQ ID NO: 215306 - DNA, 15 bp, Homo sapiens
atgggtatgaagatc

SEQ ID NO: 215307 - DNA, 15 bp, Homo sapiens
catgggtatgaagat

SEQ ID NO: 215308 - DNA, 15 bp, Homo sapiens
acatgggtatgaaga

SEQ ID NO: 215309 - DNA, 15 bp, Homo sapiens
tacatgggtatgaag

SEQ ID NO: 215310 - DNA, 15 bp, Homo sapiens
ttacatgggtatgaa

SEQ ID NO: 215311 - DNA, 15 bp, Homo sapiens
cttacatgggtatga

SEQ ID NO: 215312 - DNA, 15 bp, Homo sapiens
ccttacatgggtatg

SEQ ID NO: 215313 - DNA, 15 bp, Homo sapiens
accttacatgggtat

SEQ ID NO: 215314 - DNA, 15 bp, Homo sapiens
aaccttacatgggta

SEQ ID NO: 215315 - DNA, 15 bp, Homo sapiens
caaccttacatgggt

SEQ ID NO: 215316 - DNA, 15 bp, Homo sapiens
tcaaccttacatggg

SEQ ID NO: 215317 - DNA, 15 bp, Homo sapiens
ctcaaccttacatgg

SEQ ID NO: 215318 - DNA, 15 bp, Homo sapiens
cctcaaccttacatg

SEQ ID NO: 215319 - DNA, 15 bp, Homo sapiens
acctcaaccttacat

SEQ ID NO: 215320 - DNA, 15 bp, Homo sapiens
tacctcaaccttaca

SEQ ID NO: 215321 - DNA, 15 bp, Homo sapiens
ctacctcaaccttac

SEQ ID NO: 215322 - DNA, 15 bp, Homo sapiens
tctacctcaacctta

SEQ ID NO: 215323 - DNA, 15 bp, Homo sapiens
atctacctcaacctt

SEQ ID NO: 215324 - DNA, 15 bp, Homo sapiens
catctacctcaacct

SEQ ID NO: 215325 - DNA, 15 bp, Homo sapiens
acatctacctcaacc

SEQ ID NO: 215326 - DNA, 15 bp, Homo sapiens
aacatctacctcaac

SEQ ID NO: 215327 - DNA, 15 bp, Homo sapiens
taacatctacctcaa

SEQ ID NO: 215328 - DNA, 15 bp, Homo sapiens
gtaacatctacctca

SEQ ID NO: 215329 - DNA, 15 bp, Homo sapiens
ggtaacatctacctc

SEQ ID NO: 215330 - DNA, 15 bp, Homo sapiens
tggtaacatctacct

SEQ ID NO: 215331 - DNA, 15 bp, Homo sapiens
gtggtaacatctacc

SEQ ID NO: 215332 - DNA, 15 bp, Homo sapiens
tgtggtaacatctac

SEQ ID NO: 215333 - DNA, 15 bp, Homo sapiens
atgtggtaacatcta

SEQ ID NO: 215334 - DNA, 15 bp, Homo sapiens
catgtggtaacatct

SEQ ID NO: 215335 - DNA, 15 bp, Homo sapiens
acatgtggtaacatc

SEQ ID NO: 215336 - DNA, 15 bp, Homo sapiens
cacatgtggtaacat

SEQ ID NO: 215337 - DNA, 15 bp, Homo sapiens
tcacatgtggtaaca

SEQ ID NO: 215338 - DNA, 15 bp, Homo sapiens
ctcacatgtggtaac

SEQ ID NO: 215339 - DNA, 15 bp, Homo sapiens
actcacatgtggtaa

SEQ ID NO: 215340 - DNA, 15 bp, Homo sapiens
cactcacatgtggta

SEQ ID NO: 215341 - DNA, 15 bp, Homo sapiens
gcactcacatgtggt

SEQ ID NO: 215342 - DNA, 15 bp, Homo sapiens
tgcactcacatgtgg

SEQ ID NO: 215343 - DNA, 15 bp, Homo sapiens
ttgcactcacatgtg

SEQ ID NO: 215344 - DNA, 15 bp, Homo sapiens
attgcactcacatgt

SEQ ID NO: 215345 - DNA, 15 bp, Homo sapiens
tattgcactcacatg

SEQ ID NO: 215346 - DNA, 15 bp, Homo sapiens
atattgcactcacat

SEQ ID NO: 215347 - DNA, 15 bp, Homo sapiens
gatattgcactcaca

SEQ ID NO: 215348 - DNA, 15 bp, Homo sapiens
ggatattgcactcac

SEQ ID NO: 215349 - DNA, 15 bp, Homo sapiens
tggatattgcactca

SEQ ID NO: 215350 - DNA, 15 bp, Homo sapiens
ctggatattgcactc

SEQ ID NO: 215351 - DNA, 15 bp, Homo sapiens
tctggatattgcact

SEQ ID NO: 215352 - DNA, 15 bp, Homo sapiens
ttctggatattgcac

SEQ ID NO: 215353 - DNA, 15 bp, Homo sapiens
gttctggatattgca

SEQ ID NO: 215354 - DNA, 15 bp, Homo sapiens
agttctggatattgc

SEQ ID NO: 215355 - DNA, 15 bp, Homo sapiens
gagttctggatattg

SEQ ID NO: 215356 - DNA, 15 bp, Homo sapiens
ggagttctggatatt

SEQ ID NO: 215357 - DNA, 15 bp, Homo sapiens
aggagttctggatat

SEQ ID NO: 215358 - DNA, 15 bp, Homo sapiens
caggagttctggata

SEQ ID NO: 215359 - DNA, 15 bp, Homo sapiens
tcaggagttctggat

SEQ ID NO: 215360 - DNA, 15 bp, Homo sapiens
ttcaggagttctgga

SEQ ID NO: 215361 - DNA, 15 bp, Homo sapiens
attcaggagttctgg

SEQ ID NO: 215362 - DNA, 15 bp, Homo sapiens
gattcaggagttctg

SEQ ID NO: 215363 - DNA, 15 bp, Homo sapiens
ggattcaggagttct

SEQ ID NO: 215364 - DNA, 15 bp, Homo sapiens
gggattcaggagttc

SEQ ID NO: 215365 - DNA, 15 bp, Homo sapiens
ggggattcaggagtt

SEQ ID NO: 215366 - DNA, 15 bp, Homo sapiens
aggggattcaggagt

SEQ ID NO: 215367 - DNA, 15 bp, Homo sapiens
aaggggattcaggag

SEQ ID NO: 215368 - DNA, 15 bp, Homo sapiens
gaaggggattcagga

SEQ ID NO: 215369 - DNA, 15 bp, Homo sapiens
agaaggggattcagg

SEQ ID NO: 215370 - DNA, 15 bp, Homo sapiens
aagaaggggattcag

SEQ ID NO: 215371 - DNA, 15 bp, Homo sapiens
gaagaaggggattca

SEQ ID NO: 215372 - DNA, 15 bp, Homo sapiens
ggaagaaggggattc

SEQ ID NO: 215373 - DNA, 15 bp, Homo sapiens
gggaagaaggggatt

SEQ ID NO: 215374 - DNA, 15 bp, Homo sapiens
ggggaagaaggggat

SEQ ID NO: 215375 - DNA, 15 bp, Homo sapiens
aggggaagaagggga

SEQ ID NO: 215376 - DNA, 15 bp, Homo sapiens
taggggaagaagggg

SEQ ID NO: 215377 - DNA, 15 bp, Homo sapiens
ttaggggaagaaggg

SEQ ID NO: 215378 - DNA, 15 bp, Homo sapiens
tttaggggaagaagg

SEQ ID NO: 215379 - DNA, 15 bp, Homo sapiens
ttttaggggaagaag

SEQ ID NO: 215380 - DNA, 15 bp, Homo sapiens
attttaggggaagaa

SEQ ID NO: 215381 - DNA, 15 bp, Homo sapiens
cattttaggggaaga

SEQ ID NO: 215382 - DNA, 15 bp, Homo sapiens
acattttaggggaag

SEQ ID NO: 215383 - DNA, 15 bp, Homo sapiens
gacattttaggggaa

SEQ ID NO: 215384 - DNA, 15 bp, Homo sapiens
tgacattttagggga

SEQ ID NO: 215385 - DNA, 15 bp, Homo sapiens
ctgacattttagggg

SEQ ID NO: 215386 - DNA, 15 bp, Homo sapiens
gctgacattttaggg

SEQ ID NO: 215387 - DNA, 15 bp, Homo sapiens
ggctgacattttagg

SEQ ID NO: 215388 - DNA, 15 bp, Homo sapiens
gggctgacattttag

SEQ ID NO: 215389 - DNA, 15 bp, Homo sapiens
cgggctgacatttta

SEQ ID NO: 215390 - DNA, 15 bp, Homo sapiens
gcgggctgacatttt

SEQ ID NO: 215391 - DNA, 15 bp, Homo sapiens
agcgggctgacattt

SEQ ID NO: 215392 - DNA, 15 bp, Homo sapiens
cagcgggctgacatt

SEQ ID NO: 215393 - DNA, 15 bp, Homo sapiens
tcagcgggctgacat

SEQ ID NO: 215394 - DNA, 15 bp, Homo sapiens
ctcagcgggctgaca

SEQ ID NO: 215395 - DNA, 15 bp, Homo sapiens
cctcagcgggctgac

SEQ ID NO: 215396 - DNA, 15 bp, Homo sapiens
acctcagcgggctga

SEQ ID NO: 215397 - DNA, 15 bp, Homo sapiens
gacctcagcgggctg

SEQ ID NO: 215398 - DNA, 15 bp, Homo sapiens
ggacctcagcgggct

SEQ ID NO: 215399 - DNA, 15 bp, Homo sapiens
tggacctcagcgggc

SEQ ID NO: 215400 - DNA, 15 bp, Homo sapiens
gtggacctcagcggg

SEQ ID NO: 215401 - DNA, 15 bp, Homo sapiens
agtggacctcagcgg

SEQ ID NO: 215402 - DNA, 15 bp, Homo sapiens
aagtggacctcagcg

SEQ ID NO: 215403 - DNA, 15 bp, Homo sapiens
caagtggacctcagc

SEQ ID NO: 215404 - DNA, 15 bp, Homo sapiens
ccaagtggacctcag

SEQ ID NO: 215405 - DNA, 15 bp, Homo sapiens
gccaagtggacctca

SEQ ID NO: 215406 - DNA, 15 bp, Homo sapiens
agccaagtggacctc

SEQ ID NO: 215407 - DNA, 15 bp, Homo sapiens
tagccaagtggacct

SEQ ID NO: 215408 - DNA, 15 bp, Homo sapiens
gtagccaagtggacc

SEQ ID NO: 215409 - DNA, 15 bp, Homo sapiens
ggtagccaagtggac

SEQ ID NO: 215410 - DNA, 15 bp, Homo sapiens
gggtagccaagtgga

SEQ ID NO: 215411 - DNA, 15 bp, Homo sapiens
agggtagccaagtgg

SEQ ID NO: 215412 - DNA, 15 bp, Homo sapiens
gagggtagccaagtg

SEQ ID NO: 215413 - DNA, 15 bp, Homo sapiens
agagggtagccaagt

SEQ ID NO: 215414 - DNA, 15 bp, Homo sapiens
aagagggtagccaag

SEQ ID NO: 215415 - DNA, 15 bp, Homo sapiens
caagagggtagccaa

SEQ ID NO: 215416 - DNA, 15 bp, Homo sapiens
tcaagagggtagcca

SEQ ID NO: 215417 - DNA, 15 bp, Homo sapiens
ttcaagagggtagcc

SEQ ID NO: 215418 - DNA, 15 bp, Homo sapiens
attcaagagggtagc

SEQ ID NO: 215419 - DNA, 15 bp, Homo sapiens
tattcaagagggtag

SEQ ID NO: 215420 - DNA, 15 bp, Homo sapiens
gtattcaagagggta

SEQ ID NO: 215421 - DNA, 15 bp, Homo sapiens
agtattcaagagggt

SEQ ID NO: 215422 - DNA, 15 bp, Homo sapiens
cagtattcaagaggg

SEQ ID NO: 215423 - DNA, 15 bp, Homo sapiens
gcagtattcaagagg

SEQ ID NO: 215424 - DNA, 15 bp, Homo sapiens
tgcagtattcaagag

SEQ ID NO: 215425 - DNA, 15 bp, Homo sapiens
atgcagtattcaaga

SEQ ID NO: 215426 - DNA, 15 bp, Homo sapiens
gatgcagtattcaag

SEQ ID NO: 215427 - DNA, 15 bp, Homo sapiens
ggatgcagtattcaa

SEQ ID NO: 215428 - DNA, 15 bp, Homo sapiens
tggatgcagtattca

SEQ ID NO: 215429 - DNA, 15 bp, Homo sapiens
ctggatgcagtattc

SEQ ID NO: 215430 - DNA, 15 bp, Homo sapiens
gctggatgcagtatt

SEQ ID NO: 215431 - DNA, 15 bp, Homo sapiens
agctggatgcagtat

SEQ ID NO: 215432 - DNA, 15 bp, Homo sapiens
aagctggatgcagta

SEQ ID NO: 215433 - DNA, 15 bp, Homo sapiens
gaagctggatgcagt

SEQ ID NO: 215434 - DNA, 15 bp, Homo sapiens
ggaagctggatgcag

SEQ ID NO: 215435 - DNA, 15 bp, Homo sapiens
gggaagctggatgca

SEQ ID NO: 215436 - DNA, 15 bp, Homo sapiens
tgggaagctggatgc

SEQ ID NO: 215437 - DNA, 15 bp, Homo sapiens
gtgggaagctggatg

SEQ ID NO: 215438 - DNA, 15 bp, Homo sapiens
agtgggaagctggat

SEQ ID NO: 215439 - DNA, 15 bp, Homo sapiens
cagtgggaagctgga

SEQ ID NO: 215440 - DNA, 15 bp, Homo sapiens
gcagtgggaagctgg

SEQ ID NO: 215441 - DNA, 15 bp, Homo sapiens
agcagtgggaagctg

SEQ ID NO: 215442 - DNA, 15 bp, Homo sapiens
cagcagtgggaagct

SEQ ID NO: 215443 - DNA, 15 bp, Homo sapiens
tcagcagtgggaagc

SEQ ID NO: 215444 - DNA, 15 bp, Homo sapiens
ttcagcagtgggaag

SEQ ID NO: 215445 - DNA, 15 bp, Homo sapiens
gttcagcagtgggaa

SEQ ID NO: 215446 - DNA, 15 bp, Homo sapiens
ggttcagcagtggga

SEQ ID NO: 215447 - DNA, 15 bp, Homo sapiens
aggttcagcagtggg

SEQ ID NO: 215448 - DNA, 15 bp, Homo sapiens
gaggttcagcagtgg

SEQ ID NO: 215449 - DNA, 15 bp, Homo sapiens
agaggttcagcagtg

SEQ ID NO: 215450 - DNA, 15 bp, Homo sapiens
aagaggttcagcagt

SEQ ID NO: 215451 - DNA, 15 bp, Homo sapiens
aaagaggttcagcag

SEQ ID NO: 215452 - DNA, 15 bp, Homo sapiens
taaagaggttcagca

SEQ ID NO: 215453 - DNA, 15 bp, Homo sapiens
gtaaagaggttcagc

SEQ ID NO: 215454 - DNA, 15 bp, Homo sapiens
agtaaagaggttcag

SEQ ID NO: 215455 - DNA, 15 bp, Homo sapiens
gagtaaagaggttca

SEQ ID NO: 215456 - DNA, 15 bp, Homo sapiens
agagtaaagaggttc

SEQ ID NO: 215457 - DNA, 15 bp, Homo sapiens
aagagtaaagaggtt

SEQ ID NO: 215458 - DNA, 15 bp, Homo sapiens
aaagagtaaagaggt

SEQ ID NO: 215459 - DNA, 15 bp, Homo sapiens
aaaagagtaaagagg

SEQ ID NO: 215460 - DNA, 15 bp, Homo sapiens
aaaaagagtaaagag

SEQ ID NO: 215461 - DNA, 15 bp, Homo sapiens
aaaaaagagtaaaga

SEQ ID NO: 215462 - DNA, 15 bp, Homo sapiens
aaaaaaagagtaaag

SEQ ID NO: 215463 - DNA, 15 bp, Homo sapiens
aaaaaaaagagtaaa

SEQ ID NO: 215464 - DNA, 15 bp, Homo sapiens
aaaaaaaaagagtaa

SEQ ID NO: 215465 - DNA, 15 bp, Homo sapiens
gaaaaaaaaagagta

SEQ ID NO: 215466 - DNA, 15 bp, Homo sapiens
tgaaaaaaaaagagt

SEQ ID NO: 215467 - DNA, 15 bp, Homo sapiens
ctgaaaaaaaaagag

SEQ ID NO: 215468 - DNA, 15 bp, Homo sapiens
actgaaaaaaaaaga

SEQ ID NO: 215469 - DNA, 15 bp, Homo sapiens
aactgaaaaaaaaag

SEQ ID NO: 215470 - DNA, 15 bp, Homo sapiens
caactgaaaaaaaaa

SEQ ID NO: 215471 - DNA, 15 bp, Homo sapiens
gcaactgaaaaaaaa

SEQ ID NO: 215472 - DNA, 15 bp, Homo sapiens
tgcaactgaaaaaaa

SEQ ID NO: 215473 - DNA, 15 bp, Homo sapiens
gtgcaactgaaaaaa

SEQ ID NO: 215474 - DNA, 15 bp, Homo sapiens
agtgcaactgaaaaa

SEQ ID NO: 215475 - DNA, 15 bp, Homo sapiens
aagtgcaactgaaaa

SEQ ID NO: 215476 - DNA, 15 bp, Homo sapiens
taagtgcaactgaaa

SEQ ID NO: 215477 - DNA, 15 bp, Homo sapiens
gtaagtgcaactgaa

SEQ ID NO: 215478 - DNA, 15 bp, Homo sapiens
ggtaagtgcaactga

SEQ ID NO: 215479 - DNA, 15 bp, Homo sapiens
tggtaagtgcaactg

SEQ ID NO: 215480 - DNA, 15 bp, Homo sapiens
gtggtaagtgcaact

SEQ ID NO: 215481 - DNA, 15 bp, Homo sapiens
ggtggtaagtgcaac

SEQ ID NO: 215482 - DNA, 15 bp, Homo sapiens
aggtggtaagtgcaa

SEQ ID NO: 215483 - DNA, 15 bp, Homo sapiens
aaggtggtaagtgca

SEQ ID NO: 215484 - DNA, 15 bp, Homo sapiens
gaaggtggtaagtgc

SEQ ID NO: 215485 - DNA, 15 bp, Homo sapiens
agaaggtggtaagtg

SEQ ID NO: 215486 - DNA, 15 bp, Homo sapiens
tagaaggtggtaagt

SEQ ID NO: 215487 - DNA, 15 bp, Homo sapiens
ctagaaggtggtaag

SEQ ID NO: 215488 - DNA, 15 bp, Homo sapiens
actagaaggtggtaa

SEQ ID NO: 215489 - DNA, 15 bp, Homo sapiens
tactagaaggtggta

SEQ ID NO: 215490 - DNA, 15 bp, Homo sapiens
ttactagaaggtggt

SEQ ID NO: 215491 - DNA, 15 bp, Homo sapiens
cttactagaaggtgg

SEQ ID NO: 215492 - DNA, 15 bp, Homo sapiens
acttactagaaggtg

SEQ ID NO: 215493 - DNA, 15 bp, Homo sapiens
aacttactagaaggt

SEQ ID NO: 215494 - DNA, 15 bp, Homo sapiens
caacttactagaagg

SEQ ID NO: 215495 - DNA, 15 bp, Homo sapiens
tcaacttactagaag

SEQ ID NO: 215496 - DNA, 15 bp, Homo sapiens
ttcaacttactagaa

SEQ ID NO: 215497 - DNA, 15 bp, Homo sapiens
gttcaacttactaga

SEQ ID NO: 215498 - DNA, 15 bp, Homo sapiens
ggttcaacttactag

SEQ ID NO: 215499 - DNA, 15 bp, Homo sapiens
tggttcaacttacta

SEQ ID NO: 215500 - DNA, 15 bp, Homo sapiens
atggttcaacttact

SEQ ID NO: 215501 - DNA, 15 bp, Homo sapiens
tatggttcaacttac

SEQ ID NO: 215502 - DNA, 15 bp, Homo sapiens
atatggttcaactta

SEQ ID NO: 215503 - DNA, 15 bp, Homo sapiens
catatggttcaactt

SEQ ID NO: 215504 - DNA, 15 bp, Homo sapiens
tcatatggttcaact

SEQ ID NO: 215505 - DNA, 15 bp, Homo sapiens
ttcatatggttcaac

SEQ ID NO: 215506 - DNA, 15 bp, Homo sapiens
tttcatatggttcaa

SEQ ID NO: 215507 - DNA, 15 bp, Homo sapiens
atttcatatggttca

SEQ ID NO: 215508 - DNA, 15 bp, Homo sapiens
aatttcatatggttc

SEQ ID NO: 215509 - DNA, 15 bp, Homo sapiens
taatttcatatggtt

SEQ ID NO: 215510 - DNA, 15 bp, Homo sapiens
gtaatttcatatggt

SEQ ID NO: 215511 - DNA, 15 bp, Homo sapiens
ggtaatttcatatgg

SEQ ID NO: 215512 - DNA, 15 bp, Homo sapiens
tggtaatttcatatg

SEQ ID NO: 215513 - DNA, 15 bp, Homo sapiens
atggtaatttcatat

SEQ ID NO: 215514 - DNA, 15 bp, Homo sapiens
aatggtaatttcata

SEQ ID NO: 215515 - DNA, 15 bp, Homo sapiens
aaatggtaatttcat

SEQ ID NO: 215516 - DNA, 15 bp, Homo sapiens
aaaatggtaatttca

SEQ ID NO: 215517 - DNA, 15 bp, Homo sapiens
aaaaatggtaatttc

SEQ ID NO: 215518 - DNA, 15 bp, Homo sapiens
caaaaatggtaattt

SEQ ID NO: 215519 - DNA, 15 bp, Homo sapiens
gcaaaaatggtaatt

SEQ ID NO: 215520 - DNA, 15 bp, Homo sapiens
tgcaaaaatggtaat

SEQ ID NO: 215521 - DNA, 15 bp, Homo sapiens
ctgcaaaaatggtaa

SEQ ID NO: 215522 - DNA, 15 bp, Homo sapiens
cctgcaaaaatggta

SEQ ID NO: 215523 - DNA, 15 bp, Homo sapiens
acctgcaaaaatggt

SEQ ID NO: 215524 - DNA, 15 bp, Homo sapiens
tacctgcaaaaatgg

SEQ ID NO: 215525 - DNA, 15 bp, Homo sapiens
ttacctgcaaaaatg

SEQ ID NO: 215526 - DNA, 15 bp, Homo sapiens
tttacctgcaaaaat

SEQ ID NO: 215527 - DNA, 15 bp, Homo sapiens
ttttacctgcaaaaa

SEQ ID NO: 215528 - DNA, 15 bp, Homo sapiens
tttttacctgcaaaa

SEQ ID NO: 215529 - DNA, 15 bp, Homo sapiens
ttttttacctgcaaa

SEQ ID NO: 215530 - DNA, 15 bp, Homo sapiens
attttttacctgcaa

SEQ ID NO: 215531 - DNA, 15 bp, Homo sapiens
cattttttacctgca

SEQ ID NO: 215532 - DNA, 15 bp, Homo sapiens
ccattttttacctgc

SEQ ID NO: 215533 - DNA, 15 bp, Homo sapiens
gccattttttacctg

SEQ ID NO: 215534 - DNA, 15 bp, Homo sapiens
ggccattttttacct

SEQ ID NO: 215535 - DNA, 15 bp, Homo sapiens
cggccattttttacc

SEQ ID NO: 215536 - DNA, 15 bp, Homo sapiens
ccggccattttttac

SEQ ID NO: 215537 - DNA, 15 bp, Homo sapiens
accggccatttttta

SEQ ID NO: 215538 - DNA, 15 bp, Homo sapiens
caccggccatttttt

SEQ ID NO: 215539 - DNA, 15 bp, Homo sapiens
tcaccggccattttt

SEQ ID NO: 215540 - DNA, 15 bp, Homo sapiens
atcaccggccatttt

SEQ ID NO: 215541 - DNA, 15 bp, Homo sapiens
tatcaccggccattt

SEQ ID NO: 215542 - DNA, 15 bp, Homo sapiens
ctatcaccggccatt

SEQ ID NO: 215543 - DNA, 15 bp, Homo sapiens
cctatcaccggccat

SEQ ID NO: 215544 - DNA, 15 bp, Homo sapiens
gcctatcaccggcca

SEQ ID NO: 215545 - DNA, 15 bp, Homo sapiens
tgcctatcaccggcc

SEQ ID NO: 215546 - DNA, 15 bp, Homo sapiens
ctgcctatcaccggc

SEQ ID NO: 215547 - DNA, 15 bp, Homo sapiens
actgcctatcaccgg

SEQ ID NO: 215548 - DNA, 15 bp, Homo sapiens
aactgcctatcaccg

SEQ ID NO: 215549 - DNA, 15 bp, Homo sapiens
aaactgcctatcacc

SEQ ID NO: 215550 - DNA, 15 bp, Homo sapiens
caaactgcctatcac

SEQ ID NO: 215551 - DNA, 15 bp, Homo sapiens
ccaaactgcctatca

SEQ ID NO: 215552 - DNA, 15 bp, Homo sapiens
gccaaactgcctatc

SEQ ID NO: 215553 - DNA, 15 bp, Homo sapiens
cgccaaactgcctat

SEQ ID NO: 215554 - DNA, 15 bp, Homo sapiens
acgccaaactgccta

SEQ ID NO: 215555 - DNA, 15 bp, Homo sapiens
gacgccaaactgcct

SEQ ID NO: 215556 - DNA, 15 bp, Homo sapiens
cgacgccaaactgcc

SEQ ID NO: 215557 - DNA, 15 bp, Homo sapiens
acgacgccaaactgc

SEQ ID NO: 215558 - DNA, 15 bp, Homo sapiens
tacgacgccaaactg

SEQ ID NO: 215559 - DNA, 15 bp, Homo sapiens
atacgacgccaaact

SEQ ID NO: 215560 - DNA, 15 bp, Homo sapiens
tatacgacgccaaac

SEQ ID NO: 215561 - DNA, 15 bp, Homo sapiens
ttatacgacgccaaa

SEQ ID NO: 215562 - DNA, 15 bp, Homo sapiens
gttatacgacgccaa

SEQ ID NO: 215563 - DNA, 15 bp, Homo sapiens
ggttatacgacgcca

SEQ ID NO: 215564 - DNA, 15 bp, Homo sapiens
gggttatacgacgcc

SEQ ID NO: 215565 - DNA, 15 bp, Homo sapiens
tgggttatacgacgc

SEQ ID NO: 215566 - DNA, 15 bp, Homo sapiens
ttgggttatacgacg

SEQ ID NO: 215567 - DNA, 15 bp, Homo sapiens
attgggttatacgac

SEQ ID NO: 215568 - DNA, 15 bp, Homo sapiens
tattgggttatacga

SEQ ID NO: 215569 - DNA, 15 bp, Homo sapiens
ttattgggttatacg

SEQ ID NO: 215570 - DNA, 15 bp, Homo sapiens
gttattgggttatac

SEQ ID NO: 215571 - DNA, 15 bp, Homo sapiens
tgttattgggttata

SEQ ID NO: 215572 - DNA, 15 bp, Homo sapiens
atgttattgggttat

SEQ ID NO: 215573 - DNA, 15 bp, Homo sapiens
catgttattgggtta

SEQ ID NO: 215574 - DNA, 15 bp, Homo sapiens
acatgttattgggtt

SEQ ID NO: 215575 - DNA, 15 bp, Homo sapiens
aacatgttattgggt

SEQ ID NO: 215576 - DNA, 15 bp, Homo sapiens
taacatgttattggg

SEQ ID NO: 215577 - DNA, 15 bp, Homo sapiens
ataacatgttattgg

SEQ ID NO: 215578 - DNA, 15 bp, Homo sapiens
tataacatgttattg

SEQ ID NO: 215579 - DNA, 15 bp, Homo sapiens
atataacatgttatt

SEQ ID NO: 215580 - DNA, 15 bp, Homo sapiens
tatataacatgttat

SEQ ID NO: 215581 - DNA, 15 bp, Homo sapiens
ttatataacatgtta

SEQ ID NO: 215582 - DNA, 15 bp, Homo sapiens
attatataacatgtt

SEQ ID NO: 215583 - DNA, 15 bp, Homo sapiens
aattatataacatgt

SEQ ID NO: 215584 - DNA, 15 bp, Homo sapiens
aaattatataacatg

SEQ ID NO: 215585 - DNA, 15 bp, Homo sapiens
taaattatataacat

SEQ ID NO: 215586 - DNA, 15 bp, Homo sapiens
gtaaattatataaca

SEQ ID NO: 215587 - DNA, 15 bp, Homo sapiens
ggtaaattatataac

SEQ ID NO: 215588 - DNA, 15 bp, Homo sapiens
gggtaaattatataa

SEQ ID NO: 215589 - DNA, 15 bp, Homo sapiens
tgggtaaattatata

SEQ ID NO: 215590 - DNA, 15 bp, Homo sapiens
gtgggtaaattatat

SEQ ID NO: 215591 - DNA, 15 bp, Homo sapiens
tgtgggtaaattata

SEQ ID NO: 215592 - DNA, 15 bp, Homo sapiens
ttgtgggtaaattat

SEQ ID NO: 215593 - DNA, 15 bp, Homo sapiens
cttgtgggtaaatta

SEQ ID NO: 215594 - DNA, 15 bp, Homo sapiens
acttgtgggtaaatt

SEQ ID NO: 215595 - DNA, 15 bp, Homo sapiens
cacttgtgggtaaat

SEQ ID NO: 215596 - DNA, 15 bp, Homo sapiens
ccacttgtgggtaaa

SEQ ID NO: 215597 - DNA, 15 bp, Homo sapiens
accacttgtgggtaa

SEQ ID NO: 215598 - DNA, 15 bp, Homo sapiens
caccacttgtgggta

SEQ ID NO: 215599 - DNA, 15 bp, Homo sapiens
ccaccacttgtgggt

SEQ ID NO: 215600 - DNA, 15 bp, Homo sapiens
cccaccacttgtggg

SEQ ID NO: 215601 - DNA, 15 bp, Homo sapiens
acccaccacttgtgg

SEQ ID NO: 215602 - DNA, 15 bp, Homo sapiens
aacccaccacttgtg

SEQ ID NO: 215603 - DNA, 15 bp, Homo sapiens
caacccaccacttgt

SEQ ID NO: 215604 - DNA, 15 bp, Homo sapiens
gcaacccaccacttg

SEQ ID NO: 215605 - DNA, 15 bp, Homo sapiens
agcaacccaccactt

SEQ ID NO: 215606 - DNA, 15 bp, Homo sapiens
tagcaacccaccact

SEQ ID NO: 215607 - DNA, 15 bp, Homo sapiens
atagcaacccaccac

SEQ ID NO: 215608 - DNA, 15 bp, Homo sapiens
catagcaacccacca

SEQ ID NO: 215609 - DNA, 15 bp, Homo sapiens
acatagcaacccacc

SEQ ID NO: 215610 - DNA, 15 bp, Homo sapiens
gacatagcaacccac

SEQ ID NO: 215611 - DNA, 15 bp, Homo sapiens
ggacatagcaaccca

SEQ ID NO: 215612 - DNA, 15 bp, Homo sapiens
aggacatagcaaccc

SEQ ID NO: 215613 - DNA, 15 bp, Homo sapiens
caggacatagcaacc

SEQ ID NO: 215614 - DNA, 15 bp, Homo sapiens
ccaggacatagcaac

SEQ ID NO: 215615 - DNA, 15 bp, Homo sapiens
tccaggacatagcaa

SEQ ID NO: 215616 - DNA, 15 bp, Homo sapiens
ctccaggacatagca

SEQ ID NO: 215617 - DNA, 15 bp, Homo sapiens
cctccaggacatagc

SEQ ID NO: 215618 - DNA, 15 bp, Homo sapiens
tcctccaggacatag

SEQ ID NO: 215619 - DNA, 15 bp, Homo sapiens
ctcctccaggacata

SEQ ID NO: 215620 - DNA, 15 bp, Homo sapiens
actcctccaggacat

SEQ ID NO: 215621 - DNA, 15 bp, Homo sapiens
gactcctccaggaca

SEQ ID NO: 215622 - DNA, 15 bp, Homo sapiens
tgactcctccaggac

SEQ ID NO: 215623 - DNA, 15 bp, Homo sapiens
ctgactcctccagga

SEQ ID NO: 215624 - DNA, 15 bp, Homo sapiens
gctgactcctccagg

SEQ ID NO: 215625 - DNA, 15 bp, Homo sapiens
agctgactcctccag

SEQ ID NO: 215626 - DNA, 15 bp, Homo sapiens
aagctgactcctcca

SEQ ID NO: 215627 - DNA, 15 bp, Homo sapiens
gaagctgactcctcc

SEQ ID NO: 215628 - DNA, 15 bp, Homo sapiens
tgaagctgactcctc

SEQ ID NO: 215629 - DNA, 15 bp, Homo sapiens
ctgaagctgactcct

SEQ ID NO: 215630 - DNA, 15 bp, Homo sapiens
tctgaagctgactcc

SEQ ID NO: 215631 - DNA, 15 bp, Homo sapiens
gtctgaagctgactc

SEQ ID NO: 215632 - DNA, 15 bp, Homo sapiens
agtctgaagctgact

SEQ ID NO: 215633 - DNA, 15 bp, Homo sapiens
gagtctgaagctgac

SEQ ID NO: 215634 - DNA, 15 bp, Homo sapiens
agagtctgaagctga

SEQ ID NO: 215635 - DNA, 15 bp, Homo sapiens
tagagtctgaagctg

SEQ ID NO: 215636 - DNA, 15 bp, Homo sapiens
ctagagtctgaagct

SEQ ID NO: 215637 - DNA, 15 bp, Homo sapiens
gctagagtctgaagc

SEQ ID NO: 215638 - DNA, 15 bp, Homo sapiens
agctagagtctgaag

SEQ ID NO: 215639 - DNA, 15 bp, Homo sapiens
tagctagagtctgaa

SEQ ID NO: 215640 - DNA, 15 bp, Homo sapiens
ttagctagagtctga

SEQ ID NO: 215641 - DNA, 15 bp, Homo sapiens
tttagctagagtctg

SEQ ID NO: 215642 - DNA, 15 bp, Homo sapiens
atttagctagagtct

SEQ ID NO: 215643 - DNA, 15 bp, Homo sapiens
catttagctagagtc

SEQ ID NO: 215644 - DNA, 15 bp, Homo sapiens
tcatttagctagagt

SEQ ID NO: 215645 - DNA, 15 bp, Homo sapiens
atcatttagctagag

SEQ ID NO: 215646 - DNA, 15 bp, Homo sapiens
aatcatttagctaga

SEQ ID NO: 215647 - DNA, 15 bp, Homo sapiens
caatcatttagctag

SEQ ID NO: 215648 - DNA, 15 bp, Homo sapiens
acaatcatttagcta

SEQ ID NO: 215649 - DNA, 15 bp, Homo sapiens
tacaatcatttagct

SEQ ID NO: 215650 - DNA, 15 bp, Homo sapiens
atacaatcatttagc

SEQ ID NO: 215651 - DNA, 15 bp, Homo sapiens
tatacaatcatttag

SEQ ID NO: 215652 - DNA, 15 bp, Homo sapiens
ttatacaatcattta

SEQ ID NO: 215653 - DNA, 15 bp, Homo sapiens
gttatacaatcattt

SEQ ID NO: 215654 - DNA, 15 bp, Homo sapiens
ggttatacaatcatt

SEQ ID NO: 215655 - DNA, 15 bp, Homo sapiens
aggttatacaatcat

SEQ ID NO: 215656 - DNA, 15 bp, Homo sapiens
aaggttatacaatca

SEQ ID NO: 215657 - DNA, 15 bp, Homo sapiens
caaggttatacaatc

SEQ ID NO: 215658 - DNA, 15 bp, Homo sapiens
gcaaggttatacaat

SEQ ID NO: 215659 - DNA, 15 bp, Homo sapiens
tgcaaggttatacaa

SEQ ID NO: 215660 - DNA, 15 bp, Homo sapiens
ctgcaaggttataca

SEQ ID NO: 215661 - DNA, 15 bp, Homo sapiens
gctgcaaggttatac

SEQ ID NO: 215662 - DNA, 15 bp, Homo sapiens
agctgcaaggttata

SEQ ID NO: 215663 - DNA, 15 bp, Homo sapiens
gagctgcaaggttat

SEQ ID NO: 215664 - DNA, 15 bp, Homo sapiens
agagctgcaaggtta

SEQ ID NO: 215665 - DNA, 15 bp, Homo sapiens
gagagctgcaaggtt

SEQ ID NO: 215666 - DNA, 15 bp, Homo sapiens
ggagagctgcaaggt

SEQ ID NO: 215667 - DNA, 15 bp, Homo sapiens
gggagagctgcaagg

SEQ ID NO: 215668 - DNA, 15 bp, Homo sapiens
ggggagagctgcaag

SEQ ID NO: 215669 - DNA, 15 bp, Homo sapiens
aggggagagctgcaa

SEQ ID NO: 215670 - DNA, 15 bp, Homo sapiens
taggggagagctgca

SEQ ID NO: 215671 - DNA, 15 bp, Homo sapiens
ttaggggagagctgc

SEQ ID NO: 215672 - DNA, 15 bp, Homo sapiens
cttaggggagagctg

SEQ ID NO: 215673 - DNA, 15 bp, Homo sapiens
acttaggggagagct

SEQ ID NO: 215674 - DNA, 15 bp, Homo sapiens
cacttaggggagagc

SEQ ID NO: 215675 - DNA, 15 bp, Homo sapiens
tcacttaggggagag

SEQ ID NO: 215676 - DNA, 15 bp, Homo sapiens
ctcacttaggggaga

SEQ ID NO: 215677 - DNA, 15 bp, Homo sapiens
cctcacttaggggag

SEQ ID NO: 215678 - DNA, 15 bp, Homo sapiens
tcctcacttagggga

SEQ ID NO: 215679 - DNA, 15 bp, Homo sapiens
ctcctcacttagggg

SEQ ID NO: 215680 - DNA, 15 bp, Homo sapiens
cctcctcacttaggg

SEQ ID NO: 215681 - DNA, 15 bp, Homo sapiens
gcctcctcacttagg

SEQ ID NO: 215682 - DNA, 15 bp, Homo sapiens
tgcctcctcacttag

SEQ ID NO: 215683 - DNA, 15 bp, Homo sapiens
ttgcctcctcactta

SEQ ID NO: 215684 - DNA, 15 bp, Homo sapiens
attgcctcctcactt

SEQ ID NO: 215685 - DNA, 15 bp, Homo sapiens
cattgcctcctcact

SEQ ID NO: 215686 - DNA, 15 bp, Homo sapiens
acattgcctcctcac

SEQ ID NO: 215687 - DNA, 15 bp, Homo sapiens
aacattgcctcctca

SEQ ID NO: 215688 - DNA, 15 bp, Homo sapiens
caacattgcctcctc

SEQ ID NO: 215689 - DNA, 15 bp, Homo sapiens
tcaacattgcctcct

SEQ ID NO: 215690 - DNA, 15 bp, Homo sapiens
ttcaacattgcctcc

SEQ ID NO: 215691 - DNA, 15 bp, Homo sapiens
tttcaacattgcctc

SEQ ID NO: 215692 - DNA, 15 bp, Homo sapiens
ctttcaacattgcct

SEQ ID NO: 215693 - DNA, 15 bp, Homo sapiens
actttcaacattgcc

SEQ ID NO: 215694 - DNA, 15 bp, Homo sapiens
gactttcaacattgc

SEQ ID NO: 215695 - DNA, 15 bp, Homo sapiens
ggactttcaacattg

SEQ ID NO: 215696 - DNA, 15 bp, Homo sapiens
gggactttcaacatt

SEQ ID NO: 215697 - DNA, 15 bp, Homo sapiens
tgggactttcaacat

SEQ ID NO: 215698 - DNA, 15 bp, Homo sapiens
atgggactttcaaca

SEQ ID NO: 215699 - DNA, 15 bp, Homo sapiens
catgggactttcaac

SEQ ID NO: 215700 - DNA, 15 bp, Homo sapiens
acatgggactttcaa

SEQ ID NO: 215701 - DNA, 15 bp, Homo sapiens
gacatgggactttca

SEQ ID NO: 215702 - DNA, 15 bp, Homo sapiens
agacatgggactttc

SEQ ID NO: 215703 - DNA, 15 bp, Homo sapiens
aagacatgggacttt

SEQ ID NO: 215704 - DNA, 15 bp, Homo sapiens
taagacatgggactt

SEQ ID NO: 215705 - DNA, 15 bp, Homo sapiens
ataagacatgggact

SEQ ID NO: 215706 - DNA, 15 bp, Homo sapiens
gataagacatgggac

SEQ ID NO: 215707 - DNA, 15 bp, Homo sapiens
tgataagacatggga

SEQ ID NO: 215708 - DNA, 15 bp, Homo sapiens
ctgataagacatggg

SEQ ID NO: 215709 - DNA, 15 bp, Homo sapiens
tctgataagacatgg

SEQ ID NO: 215710 - DNA, 15 bp, Homo sapiens
ttctgataagacatg

SEQ ID NO: 215711 - DNA, 15 bp, Homo sapiens
gttctgataagacat

SEQ ID NO: 215712 - DNA, 15 bp, Homo sapiens
ggttctgataagaca

SEQ ID NO: 215713 - DNA, 15 bp, Homo sapiens
tggttctgataagac

SEQ ID NO: 215714 - DNA, 15 bp, Homo sapiens
ctggttctgataaga

SEQ ID NO: 215715 - DNA, 15 bp, Homo sapiens
cctggttctgataag

SEQ ID NO: 215716 - DNA, 15 bp, Homo sapiens
ccctggttctgataa

SEQ ID NO: 215717 - DNA, 15 bp, Homo sapiens
tccctggttctgata

SEQ ID NO: 215718 - DNA, 15 bp, Homo sapiens
ctccctggttctgat

SEQ ID NO: 215719 - DNA, 15 bp, Homo sapiens
cctccctggttctga

SEQ ID NO: 215720 - DNA, 15 bp, Homo sapiens
gcctccctggttctg

SEQ ID NO: 215721 - DNA, 15 bp, Homo sapiens
tgcctccctggttct

SEQ ID NO: 215722 - DNA, 15 bp, Homo sapiens
ctgcctccctggttc

SEQ ID NO: 215723 - DNA, 15 bp, Homo sapiens
tctgcctccctggtt

SEQ ID NO: 215724 - DNA, 15 bp, Homo sapiens
atctgcctccctggt

SEQ ID NO: 215725 - DNA, 15 bp, Homo sapiens
catctgcctccctgg

SEQ ID NO: 215726 - DNA, 15 bp, Homo sapiens
tcatctgcctccctg

SEQ ID NO: 215727 - DNA, 15 bp, Homo sapiens
ctcatctgcctccct

SEQ ID NO: 215728 - DNA, 15 bp, Homo sapiens
tctcatctgcctccc

SEQ ID NO: 215729 - DNA, 15 bp, Homo sapiens
ttctcatctgcctcc

SEQ ID NO: 215730 - DNA, 15 bp, Homo sapiens
tttctcatctgcctc

SEQ ID NO: 215731 - DNA, 15 bp, Homo sapiens
gtttctcatctgcct

SEQ ID NO: 215732 - DNA, 15 bp, Homo sapiens
agtttctcatctgcc

SEQ ID NO: 215733 - DNA, 15 bp, Homo sapiens
cagtttctcatctgc

SEQ ID NO: 215734 - DNA, 15 bp, Homo sapiens
gcagtttctcatctg

SEQ ID NO: 215735 - DNA, 15 bp, Homo sapiens
ggcagtttctcatct

SEQ ID NO: 215736 - DNA, 15 bp, Homo sapiens
aggcagtttctcatc

SEQ ID NO: 215737 - DNA, 15 bp, Homo sapiens
aaggcagtttctcat

SEQ ID NO: 215738 - DNA, 15 bp, Homo sapiens
taaggcagtttctca

SEQ ID NO: 215739 - DNA, 15 bp, Homo sapiens
ataaggcagtttctc

SEQ ID NO: 215740 - DNA, 15 bp, Homo sapiens
cataaggcagtttct

SEQ ID NO: 215741 - DNA, 15 bp, Homo sapiens
ccataaggcagtttc

SEQ ID NO: 215742 - DNA, 15 bp, Homo sapiens
gccataaggcagttt

SEQ ID NO: 215743 - DNA, 15 bp, Homo sapiens
tgccataaggcagtt

SEQ ID NO: 215744 - DNA, 15 bp, Homo sapiens
ctgccataaggcagt

SEQ ID NO: 215745 - DNA, 15 bp, Homo sapiens
gctgccataaggcag

SEQ ID NO: 215746 - DNA, 15 bp, Homo sapiens
agctgccataaggca

SEQ ID NO: 215747 - DNA, 15 bp, Homo sapiens
gagctgccataaggc

SEQ ID NO: 215748 - DNA, 15 bp, Homo sapiens
ggagctgccataagg

SEQ ID NO: 215749 - DNA, 15 bp, Homo sapiens
gggagctgccataag

SEQ ID NO: 215750 - DNA, 15 bp, Homo sapiens
tgggagctgccataa

SEQ ID NO: 215751 - DNA, 15 bp, Homo sapiens
gtgggagctgccata

SEQ ID NO: 215752 - DNA, 15 bp, Homo sapiens
tgtgggagctgccat

SEQ ID NO: 215753 - DNA, 15 bp, Homo sapiens
ttgtgggagctgcca

SEQ ID NO: 215754 - DNA, 15 bp, Homo sapiens
gttgtgggagctgcc

SEQ ID NO: 215755 - DNA, 15 bp, Homo sapiens
tgttgtgggagctgc

SEQ ID NO: 215756 - DNA, 15 bp, Homo sapiens
atgttgtgggagctg

SEQ ID NO: 215757 - DNA, 15 bp, Homo sapiens
tatgttgtgggagct

SEQ ID NO: 215758 - DNA, 15 bp, Homo sapiens
ctatgttgtgggagc

SEQ ID NO: 215759 - DNA, 15 bp, Homo sapiens
cctatgttgtgggag

SEQ ID NO: 215760 - DNA, 15 bp, Homo sapiens
ccctatgttgtggga

SEQ ID NO: 215761 - DNA, 15 bp, Homo sapiens
tccctatgttgtggg

SEQ ID NO: 215762 - DNA, 15 bp, Homo sapiens
ctccctatgttgtgg

SEQ ID NO: 215763 - DNA, 15 bp, Homo sapiens
cctccctatgttgtg

SEQ ID NO: 215764 - DNA, 15 bp, Homo sapiens
acctccctatgttgt

SEQ ID NO: 215765 - DNA, 15 bp, Homo sapiens
cacctccctatgttg

SEQ ID NO: 215766 - DNA, 15 bp, Homo sapiens
ccacctccctatgtt

SEQ ID NO: 215767 - DNA, 15 bp, Homo sapiens
cccacctccctatgt

SEQ ID NO: 215768 - DNA, 15 bp, Homo sapiens
acccacctccctatg

SEQ ID NO: 215769 - DNA, 15 bp, Homo sapiens
cacccacctccctat

SEQ ID NO: 215770 - DNA, 15 bp, Homo sapiens
tcacccacctcccta

SEQ ID NO: 215771 - DNA, 15 bp, Homo sapiens
gtcacccacctccct

SEQ ID NO: 215772 - DNA, 15 bp, Homo sapiens
tgtcacccacctccc

SEQ ID NO: 215773 - DNA, 15 bp, Homo sapiens
ttgtcacccacctcc

SEQ ID NO: 215774 - DNA, 15 bp, Homo sapiens
tttgtcacccacctc

SEQ ID NO: 215775 - DNA, 15 bp, Homo sapiens
atttgtcacccacct

SEQ ID NO: 215776 - DNA, 15 bp, Homo sapiens
catttgtcacccacc

SEQ ID NO: 215777 - DNA, 15 bp, Homo sapiens
ccatttgtcacccac

SEQ ID NO: 215778 - DNA, 15 bp, Homo sapiens
gccatttgtcaccca

SEQ ID NO: 215779 - DNA, 15 bp, Homo sapiens
ggccatttgtcaccc

SEQ ID NO: 215780 - DNA, 15 bp, Homo sapiens
aggccatttgtcacc

SEQ ID NO: 215781 - DNA, 15 bp, Homo sapiens
aaggccatttgtcac

SEQ ID NO: 215782 - DNA, 15 bp, Homo sapiens
caaggccatttgtca

SEQ ID NO: 215783 - DNA, 15 bp, Homo sapiens
ccaaggccatttgtc

SEQ ID NO: 215784 - DNA, 15 bp, Homo sapiens
cccaaggccatttgt

SEQ ID NO: 215785 - DNA, 15 bp, Homo sapiens
tcccaaggccatttg

SEQ ID NO: 215786 - DNA, 15 bp, Homo sapiens
gtcccaaggccattt

SEQ ID NO: 215787 - DNA, 15 bp, Homo sapiens
tgtcccaaggccatt

SEQ ID NO: 215788 - DNA, 15 bp, Homo sapiens
ctgtcccaaggccat

SEQ ID NO: 215789 - DNA, 15 bp, Homo sapiens
gctgtcccaaggcca

SEQ ID NO: 215790 - DNA, 15 bp, Homo sapiens
agctgtcccaaggcc

SEQ ID NO: 215791 - DNA, 15 bp, Homo sapiens
aagctgtcccaaggc

SEQ ID NO: 215792 - DNA, 15 bp, Homo sapiens
gaagctgtcccaagg

SEQ ID NO: 215793 - DNA, 15 bp, Homo sapiens
agaagctgtcccaag

SEQ ID NO: 215794 - DNA, 15 bp, Homo sapiens
aagaagctgtcccaa

SEQ ID NO: 215795 - DNA, 15 bp, Homo sapiens
gaagaagctgtccca

SEQ ID NO: 215796 - DNA, 15 bp, Homo sapiens
ggaagaagctgtccc

SEQ ID NO: 215797 - DNA, 15 bp, Homo sapiens
gggaagaagctgtcc

SEQ ID NO: 215798 - DNA, 15 bp, Homo sapiens
tgggaagaagctgtc

SEQ ID NO: 215799 - DNA, 15 bp, Homo sapiens
ttgggaagaagctgt

SEQ ID NO: 215800 - DNA, 15 bp, Homo sapiens
cttgggaagaagctg

SEQ ID NO: 215801 - DNA, 15 bp, Homo sapiens
tcttgggaagaagct

SEQ ID NO: 215802 - DNA, 15 bp, Homo sapiens
gtcttgggaagaagc

SEQ ID NO: 215803 - DNA, 15 bp, Homo sapiens
agtcttgggaagaag

SEQ ID NO: 215804 - DNA, 15 bp, Homo sapiens
cagtcttgggaagaa

SEQ ID NO: 215805 - DNA, 15 bp, Homo sapiens
ccagtcttgggaaga

SEQ ID NO: 215806 - DNA, 15 bp, Homo sapiens
accagtcttgggaag

SEQ ID NO: 215807 - DNA, 15 bp, Homo sapiens
aaccagtcttgggaa

SEQ ID NO: 215808 - DNA, 15 bp, Homo sapiens
taaccagtcttggga

SEQ ID NO: 215809 - DNA, 15 bp, Homo sapiens
ataaccagtcttggg

SEQ ID NO: 215810 - DNA, 15 bp, Homo sapiens
cataaccagtcttgg

SEQ ID NO: 215811 - DNA, 15 bp, Homo sapiens
acataaccagtcttg

SEQ ID NO: 215812 - DNA, 15 bp, Homo sapiens
aacataaccagtctt

SEQ ID NO: 215813 - DNA, 15 bp, Homo sapiens
taacataaccagtct

SEQ ID NO: 215814 - DNA, 15 bp, Homo sapiens
gtaacataaccagtc

SEQ ID NO: 215815 - DNA, 15 bp, Homo sapiens
tgtaacataaccagt

SEQ ID NO: 215816 - DNA, 15 bp, Homo sapiens
ctgtaacataaccag

SEQ ID NO: 215817 - DNA, 15 bp, Homo sapiens
actgtaacataacca

SEQ ID NO: 215818 - DNA, 15 bp, Homo sapiens
cactgtaacataacc

SEQ ID NO: 215819 - DNA, 15 bp, Homo sapiens
acactgtaacataac

SEQ ID NO: 215820 - DNA, 15 bp, Homo sapiens
aacactgtaacataa

SEQ ID NO: 215821 - DNA, 15 bp, Homo sapiens
gaacactgtaacata

SEQ ID NO: 215822 - DNA, 15 bp, Homo sapiens
ggaacactgtaacat

SEQ ID NO: 215823 - DNA, 15 bp, Homo sapiens
aggaacactgtaaca

SEQ ID NO: 215824 - DNA, 15 bp, Homo sapiens
caggaacactgtaac

SEQ ID NO: 215825 - DNA, 15 bp, Homo sapiens
ccaggaacactgtaa

SEQ ID NO: 215826 - DNA, 15 bp, Homo sapiens
cccaggaacactgta

SEQ ID NO: 215827 - DNA, 15 bp, Homo sapiens
tcccaggaacactgt

SEQ ID NO: 215828 - DNA, 15 bp, Homo sapiens
ctcccaggaacactg

SEQ ID NO: 215829 - DNA, 15 bp, Homo sapiens
cctcccaggaacact

SEQ ID NO: 215830 - DNA, 15 bp, Homo sapiens
tcctcccaggaacac

SEQ ID NO: 215831 - DNA, 15 bp, Homo sapiens
atcctcccaggaaca

SEQ ID NO: 215832 - DNA, 15 bp, Homo sapiens
gatcctcccaggaac

SEQ ID NO: 215833 - DNA, 15 bp, Homo sapiens
tgatcctcccaggaa

SEQ ID NO: 215834 - DNA, 15 bp, Homo sapiens
gtgatcctcccagga

SEQ ID NO: 215835 - DNA, 15 bp, Homo sapiens
tgtgatcctcccagg

SEQ ID NO: 215836 - DNA, 15 bp, Homo sapiens
atgtgatcctcccag

SEQ ID NO: 215837 - DNA, 15 bp, Homo sapiens
catgtgatcctccca

SEQ ID NO: 215838 - DNA, 15 bp, Homo sapiens
ccatgtgatcctccc

SEQ ID NO: 215839 - DNA, 15 bp, Homo sapiens
gccatgtgatcctcc

SEQ ID NO: 215840 - DNA, 15 bp, Homo sapiens
tgccatgtgatcctc

SEQ ID NO: 215841 - DNA, 15 bp, Homo sapiens
atgccatgtgatcct

SEQ ID NO: 215842 - DNA, 15 bp, Homo sapiens
aatgccatgtgatcc

SEQ ID NO: 215843 - DNA, 15 bp, Homo sapiens
gaatgccatgtgatc

SEQ ID NO: 215844 - DNA, 15 bp, Homo sapiens
ggaatgccatgtgat

SEQ ID NO: 215845 - DNA, 15 bp, Homo sapiens
aggaatgccatgtga

SEQ ID NO: 215846 - DNA, 15 bp, Homo sapiens
gaggaatgccatgtg

SEQ ID NO: 215847 - DNA, 15 bp, Homo sapiens
ggaggaatgccatgt

SEQ ID NO: 215848 - DNA, 15 bp, Homo sapiens
tggaggaatgccatg

SEQ ID NO: 215849 - DNA, 15 bp, Homo sapiens
ttggaggaatgccat

SEQ ID NO: 215850 - DNA, 15 bp, Homo sapiens
cttggaggaatgcca

SEQ ID NO: 215851 - DNA, 15 bp, Homo sapiens
tcttggaggaatgcc

SEQ ID NO: 215852 - DNA, 15 bp, Homo sapiens
atcttggaggaatgc

SEQ ID NO: 215853 - DNA, 15 bp, Homo sapiens
catcttggaggaatg

SEQ ID NO: 215854 - DNA, 15 bp, Homo sapiens
ccatcttggaggaat

SEQ ID NO: 215855 - DNA, 15 bp, Homo sapiens
cccatcttggaggaa

SEQ ID NO: 215856 - DNA, 15 bp, Homo sapiens
acccatcttggagga

SEQ ID NO: 215857 - DNA, 15 bp, Homo sapiens
gacccatcttggagg

SEQ ID NO: 215858 - DNA, 15 bp, Homo sapiens
tgacccatcttggag

SEQ ID NO: 215859 - DNA, 15 bp, Homo sapiens
ctgacccatcttgga

SEQ ID NO: 215860 - DNA, 15 bp, Homo sapiens
tctgacccatcttgg

SEQ ID NO: 215861 - DNA, 15 bp, Homo sapiens
gtctgacccatcttg

SEQ ID NO: 215862 - DNA, 15 bp, Homo sapiens
agtctgacccatctt

SEQ ID NO: 215863 - DNA, 15 bp, Homo sapiens
cagtctgacccatct

SEQ ID NO: 215864 - DNA, 15 bp, Homo sapiens
gcagtctgacccatc

SEQ ID NO: 215865 - DNA, 15 bp, Homo sapiens
agcagtctgacccat

SEQ ID NO: 215866 - DNA, 15 bp, Homo sapiens
cagcagtctgaccca

SEQ ID NO: 215867 - DNA, 15 bp, Homo sapiens
acagcagtctgaccc

SEQ ID NO: 215868 - DNA, 15 bp, Homo sapiens
aacagcagtctgacc

SEQ ID NO: 215869 - DNA, 15 bp, Homo sapiens
caacagcagtctgac

SEQ ID NO: 215870 - DNA, 15 bp, Homo sapiens
ccaacagcagtctga

SEQ ID NO: 215871 - DNA, 15 bp, Homo sapiens
gccaacagcagtctg

SEQ ID NO: 215872 - DNA, 15 bp, Homo sapiens
ggccaacagcagtct

SEQ ID NO: 215873 - DNA, 15 bp, Homo sapiens
aggccaacagcagtc

SEQ ID NO: 215874 - DNA, 15 bp, Homo sapiens
aaggccaacagcagt

SEQ ID NO: 215875 - DNA, 15 bp, Homo sapiens
caaggccaacagcag

SEQ ID NO: 215876 - DNA, 15 bp, Homo sapiens
acaaggccaacagca

SEQ ID NO: 215877 - DNA, 15 bp, Homo sapiens
gacaaggccaacagc

SEQ ID NO: 215878 - DNA, 15 bp, Homo sapiens
agacaaggccaacag

SEQ ID NO: 215879 - DNA, 15 bp, Homo sapiens
cagacaaggccaaca

SEQ ID NO: 215880 - DNA, 15 bp, Homo sapiens
acagacaaggccaac

SEQ ID NO: 215881 - DNA, 15 bp, Homo sapiens
cacagacaaggccaa

SEQ ID NO: 215882 - DNA, 15 bp, Homo sapiens
acacagacaaggcca

SEQ ID NO: 215883 - DNA, 15 bp, Homo sapiens
cacacagacaaggcc

SEQ ID NO: 215884 - DNA, 15 bp, Homo sapiens
ccacacagacaaggc

SEQ ID NO: 215885 - DNA, 15 bp, Homo sapiens
gccacacagacaagg

SEQ ID NO: 215886 - DNA, 15 bp, Homo sapiens
cgccacacagacaag

SEQ ID NO: 215887 - DNA, 15 bp, Homo sapiens
acgccacacagacaa

SEQ ID NO: 215888 - DNA, 15 bp, Homo sapiens
tacgccacacagaca

SEQ ID NO: 215889 - DNA, 15 bp, Homo sapiens
atacgccacacagac

SEQ ID NO: 215890 - DNA, 15 bp, Homo sapiens
catacgccacacaga

SEQ ID NO: 215891 - DNA, 15 bp, Homo sapiens
acatacgccacacag

SEQ ID NO: 215892 - DNA, 15 bp, Homo sapiens
cacatacgccacaca

SEQ ID NO: 215893 - DNA, 15 bp, Homo sapiens
tcacatacgccacac

SEQ ID NO: 215894 - DNA, 15 bp, Homo sapiens
ttcacatacgccaca

SEQ ID NO: 215895 - DNA, 15 bp, Homo sapiens
cttcacatacgccac

SEQ ID NO: 215896 - DNA, 15 bp, Homo sapiens
tcttcacatacgcca

SEQ ID NO: 215897 - DNA, 15 bp, Homo sapiens
gtcttcacatacgcc

SEQ ID NO: 215898 - DNA, 15 bp, Homo sapiens
tgtcttcacatacgc

SEQ ID NO: 215899 - DNA, 15 bp, Homo sapiens
atgtcttcacatacg

SEQ ID NO: 215900 - DNA, 15 bp, Homo sapiens
aatgtcttcacatac

SEQ ID NO: 215901 - DNA, 15 bp, Homo sapiens
gaatgtcttcacata

SEQ ID NO: 215902 - DNA, 15 bp, Homo sapiens
tgaatgtcttcacat

SEQ ID NO: 215903 - DNA, 15 bp, Homo sapiens
atgaatgtcttcaca

SEQ ID NO: 215904 - DNA, 15 bp, Homo sapiens
catgaatgtcttcac

SEQ ID NO: 215905 - DNA, 15 bp, Homo sapiens
ccatgaatgtcttca

SEQ ID NO: 215906 - DNA, 15 bp, Homo sapiens
gccatgaatgtcttc

SEQ ID NO: 215907 - DNA, 15 bp, Homo sapiens
tgccatgaatgtctt

SEQ ID NO: 215908 - DNA, 15 bp, Homo sapiens
ctgccatgaatgtct

SEQ ID NO: 215909 - DNA, 15 bp, Homo sapiens
tctgccatgaatgtc

SEQ ID NO: 215910 - DNA, 15 bp, Homo sapiens
ctctgccatgaatgt

SEQ ID NO: 215911 - DNA, 15 bp, Homo sapiens
gctctgccatgaatg

SEQ ID NO: 215912 - DNA, 15 bp, Homo sapiens
agctctgccatgaat

SEQ ID NO: 215913 - DNA, 15 bp, Homo sapiens
cagctctgccatgaa

SEQ ID NO: 215914 - DNA, 15 bp, Homo sapiens
acagctctgccatga

SEQ ID NO: 215915 - DNA, 15 bp, Homo sapiens
aacagctctgccatg

SEQ ID NO: 215916 - DNA, 15 bp, Homo sapiens
gaacagctctgccat

SEQ ID NO: 215917 - DNA, 15 bp, Homo sapiens
ggaacagctctgcca

SEQ ID NO: 215918 - DNA, 15 bp, Homo sapiens
gggaacagctctgcc

SEQ ID NO: 215919 - DNA, 15 bp, Homo sapiens
agggaacagctctgc

SEQ ID NO: 215920 - DNA, 15 bp, Homo sapiens
aagggaacagctctg

SEQ ID NO: 215921 - DNA, 15 bp, Homo sapiens
taagggaacagctct

SEQ ID NO: 215922 - DNA, 15 bp, Homo sapiens
ctaagggaacagctc

SEQ ID NO: 215923 - DNA, 15 bp, Homo sapiens
tctaagggaacagct

SEQ ID NO: 215924 - DNA, 15 bp, Homo sapiens
ttctaagggaacagc

SEQ ID NO: 215925 - DNA, 15 bp, Homo sapiens
cttctaagggaacag

SEQ ID NO: 215926 - DNA, 15 bp, Homo sapiens
gcttctaagggaaca

SEQ ID NO: 215927 - DNA, 15 bp, Homo sapiens
tgcttctaagggaac

SEQ ID NO: 215928 - DNA, 15 bp, Homo sapiens
atgcttctaagggaa

SEQ ID NO: 215929 - DNA, 15 bp, Homo sapiens
gatgcttctaaggga

SEQ ID NO: 215930 - DNA, 15 bp, Homo sapiens
agatgcttctaaggg

SEQ ID NO: 215931 - DNA, 15 bp, Homo sapiens
tagatgcttctaagg

SEQ ID NO: 215932 - DNA, 15 bp, Homo sapiens
gtagatgcttctaag

SEQ ID NO: 215933 - DNA, 15 bp, Homo sapiens
agtagatgcttctaa

SEQ ID NO: 215934 - DNA, 15 bp, Homo sapiens
tagtagatgcttcta

SEQ ID NO: 215935 - DNA, 15 bp, Homo sapiens
ttagtagatgcttct

SEQ ID NO: 215936 - DNA, 15 bp, Homo sapiens
tttagtagatgcttc

SEQ ID NO: 215937 - DNA, 15 bp, Homo sapiens
atttagtagatgctt

SEQ ID NO: 215938 - DNA, 15 bp, Homo sapiens
aatttagtagatgct

SEQ ID NO: 215939 - DNA, 15 bp, Homo sapiens
caatttagtagatgc

SEQ ID NO: 215940 - DNA, 15 bp, Homo sapiens
tcaatttagtagatg

SEQ ID NO: 215941 - DNA, 15 bp, Homo sapiens
atcaatttagtagat

SEQ ID NO: 215942 - DNA, 15 bp, Homo sapiens
gatcaatttagtaga

SEQ ID NO: 215943 - DNA, 15 bp, Homo sapiens
agatcaatttagtag

SEQ ID NO: 215944 - DNA, 15 bp, Homo sapiens
aagatcaatttagta

SEQ ID NO: 215945 - DNA, 15 bp, Homo sapiens
aaagatcaatttagt

SEQ ID NO: 215946 - DNA, 15 bp, Homo sapiens
aaaagatcaatttag

SEQ ID NO: 215947 - DNA, 15 bp, Homo sapiens
gaaaagatcaattta

SEQ ID NO: 215948 - DNA, 15 bp, Homo sapiens
ggaaaagatcaattt

SEQ ID NO: 215949 - DNA, 15 bp, Homo sapiens
aggaaaagatcaatt

SEQ ID NO: 215950 - DNA, 15 bp, Homo sapiens
aaggaaaagatcaat

SEQ ID NO: 215951 - DNA, 15 bp, Homo sapiens
aaaggaaaagatcaa

SEQ ID NO: 215952 - DNA, 15 bp, Homo sapiens
gaaaggaaaagatca

SEQ ID NO: 215953 - DNA, 15 bp, Homo sapiens
agaaaggaaaagatc

SEQ ID NO: 215954 - DNA, 15 bp, Homo sapiens
aagaaaggaaaagat

SEQ ID NO: 215955 - DNA, 15 bp, Homo sapiens
taagaaaggaaaaga

SEQ ID NO: 215956 - DNA, 15 bp, Homo sapiens
gtaagaaaggaaaag

SEQ ID NO: 215957 - DNA, 15 bp, Homo sapiens
agtaagaaaggaaaa

SEQ ID NO: 215958 - DNA, 15 bp, Homo sapiens
aagtaagaaaggaaa

SEQ ID NO: 215959 - DNA, 15 bp, Homo sapiens
taagtaagaaaggaa

SEQ ID NO: 215960 - DNA, 15 bp, Homo sapiens
gtaagtaagaaagga

SEQ ID NO: 215961 - DNA, 15 bp, Homo sapiens
agtaagtaagaaagg

SEQ ID NO: 215962 - DNA, 15 bp, Homo sapiens
cagtaagtaagaaag

SEQ ID NO: 215963 - DNA, 15 bp, Homo sapiens
acagtaagtaagaaa

SEQ ID NO: 215964 - DNA, 15 bp, Homo sapiens
gacagtaagtaagaa

SEQ ID NO: 215965 - DNA, 15 bp, Homo sapiens
agacagtaagtaaga

SEQ ID NO: 215966 - DNA, 15 bp, Homo sapiens
cagacagtaagtaag

SEQ ID NO: 215967 - DNA, 15 bp, Homo sapiens
acagacagtaagtaa

SEQ ID NO: 215968 - DNA, 15 bp, Homo sapiens
gacagacagtaagta

SEQ ID NO: 215969 - DNA, 15 bp, Homo sapiens
agacagacagtaagt

SEQ ID NO: 215970 - DNA, 15 bp, Homo sapiens
gagacagacagtaag

SEQ ID NO: 215971 - DNA, 15 bp, Homo sapiens
ggagacagacagtaa

SEQ ID NO: 215972 - DNA, 15 bp, Homo sapiens
gggagacagacagta

SEQ ID NO: 215973 - DNA, 15 bp, Homo sapiens
agggagacagacagt

SEQ ID NO: 215974 - DNA, 15 bp, Homo sapiens
aagggagacagacag

SEQ ID NO: 215975 - DNA, 15 bp, Homo sapiens
taagggagacagaca

SEQ ID NO: 215976 - DNA, 15 bp, Homo sapiens
ctaagggagacagac

SEQ ID NO: 215977 - DNA, 15 bp, Homo sapiens
actaagggagacaga

SEQ ID NO: 215978 - DNA, 15 bp, Homo sapiens
tactaagggagacag

SEQ ID NO: 215979 - DNA, 15 bp, Homo sapiens
ctactaagggagaca

SEQ ID NO: 215980 - DNA, 15 bp, Homo sapiens
cctactaagggagac

SEQ ID NO: 215981 - DNA, 15 bp, Homo sapiens
gcctactaagggaga

SEQ ID NO: 215982 - DNA, 15 bp, Homo sapiens
agcctactaagggag

SEQ ID NO: 215983 - DNA, 15 bp, Homo sapiens
cagcctactaaggga

SEQ ID NO: 215984 - DNA, 15 bp, Homo sapiens
acagcctactaaggg

SEQ ID NO: 215985 - DNA, 15 bp, Homo sapiens
gacagcctactaagg

SEQ ID NO: 215986 - DNA, 15 bp, Homo sapiens
tgacagcctactaag

SEQ ID NO: 215987 - DNA, 15 bp, Homo sapiens
ctgacagcctactaa

SEQ ID NO: 215988 - DNA, 15 bp, Homo sapiens
gctgacagcctacta

SEQ ID NO: 215989 - DNA, 15 bp, Homo sapiens
agctgacagcctact

SEQ ID NO: 215990 - DNA, 15 bp, Homo sapiens
gagctgacagcctac

SEQ ID NO: 215991 - DNA, 15 bp, Homo sapiens
ggagctgacagccta

SEQ ID NO: 215992 - DNA, 15 bp, Homo sapiens
cggagctgacagcct

SEQ ID NO: 215993 - DNA, 15 bp, Homo sapiens
acggagctgacagcc

SEQ ID NO: 215994 - DNA, 15 bp, Homo sapiens
cacggagctgacagc

SEQ ID NO: 215995 - DNA, 15 bp, Homo sapiens
tcacggagctgacag

SEQ ID NO: 215996 - DNA, 15 bp, Homo sapiens
ctcacggagctgaca

SEQ ID NO: 215997 - DNA, 15 bp, Homo sapiens
actcacggagctgac

SEQ ID NO: 215998 - DNA, 15 bp, Homo sapiens
cactcacggagctga

SEQ ID NO: 215999 - DNA, 15 bp, Homo sapiens
gcactcacggagctg

SEQ ID NO: 216000 - DNA, 15 bp, Homo sapiens
tgcactcacggagct

SEQ ID NO: 216001 - DNA, 15 bp, Homo sapiens
ctgcactcacggagc

SEQ ID NO: 216002 - DNA, 15 bp, Homo sapiens
cctgcactcacggag

SEQ ID NO: 216003 - DNA, 15 bp, Homo sapiens
tcctgcactcacgga

SEQ ID NO: 216004 - DNA, 15 bp, Homo sapiens
gtcctgcactcacgg

SEQ ID NO: 216005 - DNA, 15 bp, Homo sapiens
ggtcctgcactcacg

SEQ ID NO: 216006 - DNA, 15 bp, Homo sapiens
aggtcctgcactcac

SEQ ID NO: 216007 - DNA, 15 bp, Homo sapiens
aaggtcctgcactca

SEQ ID NO: 216008 - DNA, 15 bp, Homo sapiens
caaggtcctgcactc

SEQ ID NO: 216009 - DNA, 15 bp, Homo sapiens
gcaaggtcctgcact

SEQ ID NO: 216010 - DNA, 15 bp, Homo sapiens
ggcaaggtcctgcac

SEQ ID NO: 216011 - DNA, 15 bp, Homo sapiens
tggcaaggtcctgca

SEQ ID NO: 216012 - DNA, 15 bp, Homo sapiens
ctggcaaggtcctgc

SEQ ID NO: 216013 - DNA, 15 bp, Homo sapiens
actggcaaggtcctg

SEQ ID NO: 216014 - DNA, 15 bp, Homo sapiens
gactggcaaggtcct

SEQ ID NO: 216015 - DNA, 15 bp, Homo sapiens
ggactggcaaggtcc

SEQ ID NO: 216016 - DNA, 15 bp, Homo sapiens
aggactggcaaggtc

SEQ ID NO: 216017 - DNA, 15 bp, Homo sapiens
caggactggcaaggt

SEQ ID NO: 216018 - DNA, 15 bp, Homo sapiens
ccaggactggcaagg

SEQ ID NO: 216019 - DNA, 15 bp, Homo sapiens
accaggactggcaag

SEQ ID NO: 216020 - DNA, 15 bp, Homo sapiens
gaccaggactggcaa

SEQ ID NO: 216021 - DNA, 15 bp, Homo sapiens
tgaccaggactggca

SEQ ID NO: 216022 - DNA, 15 bp, Homo sapiens
gtgaccaggactggc

SEQ ID NO: 216023 - DNA, 15 bp, Homo sapiens
agtgaccaggactgg

SEQ ID NO: 216024 - DNA, 15 bp, Homo sapiens
cagtgaccaggactg

SEQ ID NO: 216025 - DNA, 15 bp, Homo sapiens
gcagtgaccaggact

SEQ ID NO: 216026 - DNA, 15 bp, Homo sapiens
agcagtgaccaggac

SEQ ID NO: 216027 - DNA, 15 bp, Homo sapiens
tagcagtgaccagga

SEQ ID NO: 216028 - DNA, 15 bp, Homo sapiens
atagcagtgaccagg

SEQ ID NO: 216029 - DNA, 15 bp, Homo sapiens
tatagcagtgaccag

SEQ ID NO: 216030 - DNA, 15 bp, Homo sapiens
atatagcagtgacca

SEQ ID NO: 216031 - DNA, 15 bp, Homo sapiens
gatatagcagtgacc

SEQ ID NO: 216032 - DNA, 15 bp, Homo sapiens
ggatatagcagtgac

SEQ ID NO: 216033 - DNA, 15 bp, Homo sapiens
gggatatagcagtga

SEQ ID NO: 216034 - DNA, 15 bp, Homo sapiens
ggggatatagcagtg

SEQ ID NO: 216035 - DNA, 15 bp, Homo sapiens
tggggatatagcagt

SEQ ID NO: 216036 - DNA, 15 bp, Homo sapiens
ctggggatatagcag

SEQ ID NO: 216037 - DNA, 15 bp, Homo sapiens
gctggggatatagca

SEQ ID NO: 216038 - DNA, 15 bp, Homo sapiens
tgctggggatatagc

SEQ ID NO: 216039 - DNA, 15 bp, Homo sapiens
gtgctggggatatag

SEQ ID NO: 216040 - DNA, 15 bp, Homo sapiens
ggtgctggggatata

SEQ ID NO: 216041 - DNA, 15 bp, Homo sapiens
aggtgctggggatat

SEQ ID NO: 216042 - DNA, 15 bp, Homo sapiens
taggtgctggggata

SEQ ID NO: 216043 - DNA, 15 bp, Homo sapiens
gtaggtgctggggat

SEQ ID NO: 216044 - DNA, 15 bp, Homo sapiens
tgtaggtgctgggga

SEQ ID NO: 216045 - DNA, 15 bp, Homo sapiens
ttgtaggtgctgggg

SEQ ID NO: 216046 - DNA, 15 bp, Homo sapiens
cttgtaggtgctggg

SEQ ID NO: 216047 - DNA, 15 bp, Homo sapiens
tcttgtaggtgctgg

SEQ ID NO: 216048 - DNA, 15 bp, Homo sapiens
ctcttgtaggtgctg

SEQ ID NO: 216049 - DNA, 15 bp, Homo sapiens
actcttgtaggtgct

SEQ ID NO: 216050 - DNA, 15 bp, Homo sapiens
cactcttgtaggtgc

SEQ ID NO: 216051 - DNA, 15 bp, Homo sapiens
gcactcttgtaggtg

SEQ ID NO: 216052 - DNA, 15 bp, Homo sapiens
ggcactcttgtaggt

SEQ ID NO: 216053 - DNA, 15 bp, Homo sapiens
aggcactcttgtagg

SEQ ID NO: 216054 - DNA, 15 bp, Homo sapiens
caggcactcttgtag

SEQ ID NO: 216055 - DNA, 15 bp, Homo sapiens
ccaggcactcttgta

SEQ ID NO: 216056 - DNA, 15 bp, Homo sapiens
tccaggcactcttgt

SEQ ID NO: 216057 - DNA, 15 bp, Homo sapiens
ttccaggcactcttg

SEQ ID NO: 216058 - DNA, 15 bp, Homo sapiens
tttccaggcactctt

SEQ ID NO: 216059 - DNA, 15 bp, Homo sapiens
ttttccaggcactct

SEQ ID NO: 216060 - DNA, 15 bp, Homo sapiens
attttccaggcactc

SEQ ID NO: 216061 - DNA, 15 bp, Homo sapiens
aattttccaggcact

SEQ ID NO: 216062 - DNA, 15 bp, Homo sapiens
caattttccaggcac

SEQ ID NO: 216063 - DNA, 15 bp, Homo sapiens
acaattttccaggca

SEQ ID NO: 216064 - DNA, 15 bp, Homo sapiens
tacaattttccaggc

SEQ ID NO: 216065 - DNA, 15 bp, Homo sapiens
ctacaattttccagg

SEQ ID NO: 216066 - DNA, 15 bp, Homo sapiens
actacaattttccag

SEQ ID NO: 216067 - DNA, 15 bp, Homo sapiens
cactacaattttcca

SEQ ID NO: 216068 - DNA, 15 bp, Homo sapiens
gcactacaattttcc

SEQ ID NO: 216069 - DNA, 15 bp, Homo sapiens
agcactacaattttc

SEQ ID NO: 216070 - DNA, 15 bp, Homo sapiens
gagcactacaatttt

SEQ ID NO: 216071 - DNA, 15 bp, Homo sapiens
tgagcactacaattt

SEQ ID NO: 216072 - DNA, 15 bp, Homo sapiens
ttgagcactacaatt

SEQ ID NO: 216073 - DNA, 15 bp, Homo sapiens
attgagcactacaat

SEQ ID NO: 216074 - DNA, 15 bp, Homo sapiens
gaaaaagcttattaa

SEQ ID NO: 216075 - DNA, 15 bp, Homo sapiens
agaaaaagcttatta

SEQ ID NO: 216076 - DNA, 15 bp, Homo sapiens
aagaaaaagcttatt

SEQ ID NO: 216077 - DNA, 15 bp, Homo sapiens
aaagaaaaagcttat

SEQ ID NO: 216078 - DNA, 15 bp, Homo sapiens
aaaagaaaaagctta

SEQ ID NO: 216079 - DNA, 15 bp, Homo sapiens
aaaaagaaaaagctt

SEQ ID NO: 216080 - DNA, 15 bp, Homo sapiens
taaaaagaaaaagct

SEQ ID NO: 216081 - DNA, 15 bp, Homo sapiens
gtaaaaagaaaaagc

SEQ ID NO: 216082 - DNA, 15 bp, Homo sapiens
ggtaaaaagaaaaag

SEQ ID NO: 216083 - DNA, 15 bp, Homo sapiens
aggtaaaaagaaaaa

SEQ ID NO: 216084 - DNA, 15 bp, Homo sapiens
taggtaaaaagaaaa

SEQ ID NO: 216085 - DNA, 15 bp, Homo sapiens
ataggtaaaaagaaa

SEQ ID NO: 216086 - DNA, 15 bp, Homo sapiens
cataggtaaaaagaa

SEQ ID NO: 216087 - DNA, 15 bp, Homo sapiens
acataggtaaaaaga

SEQ ID NO: 216088 - DNA, 15 bp, Homo sapiens
gacataggtaaaaag

SEQ ID NO: 216089 - DNA, 15 bp, Homo sapiens
agacataggtaaaaa

SEQ ID NO: 216090 - DNA, 15 bp, Homo sapiens
aagacataggtaaaa

SEQ ID NO: 216091 - DNA, 15 bp, Homo sapiens
taagacataggtaaa

SEQ ID NO: 216092 - DNA, 15 bp, Homo sapiens
gtaagacataggtaa

SEQ ID NO: 216093 - DNA, 15 bp, Homo sapiens
ggtaagacataggta

SEQ ID NO: 216094 - DNA, 15 bp, Homo sapiens
aggtaagacataggt

SEQ ID NO: 216095 - DNA, 15 bp, Homo sapiens
gaggtaagacatagg

SEQ ID NO: 216096 - DNA, 15 bp, Homo sapiens
agaggtaagacatag

SEQ ID NO: 216097 - DNA, 15 bp, Homo sapiens
cagaggtaagacata

SEQ ID NO: 216098 - DNA, 15 bp, Homo sapiens
tcagaggtaagacat

SEQ ID NO: 216099 - DNA, 15 bp, Homo sapiens
atcagaggtaagaca

SEQ ID NO: 216100 - DNA, 15 bp, Homo sapiens
tatcagaggtaagac

SEQ ID NO: 216101 - DNA, 15 bp, Homo sapiens
ctatcagaggtaaga

SEQ ID NO: 216102 - DNA, 15 bp, Homo sapiens
actatcagaggtaag

SEQ ID NO: 216103 - DNA, 15 bp, Homo sapiens
tactatcagaggtaa

SEQ ID NO: 216104 - DNA, 15 bp, Homo sapiens
ctactatcagaggta

SEQ ID NO: 216105 - DNA, 15 bp, Homo sapiens
gctactatcagaggt

SEQ ID NO: 216106 - DNA, 15 bp, Homo sapiens
tgctactatcagagg

SEQ ID NO: 216107 - DNA, 15 bp, Homo sapiens
atgctactatcagag

SEQ ID NO: 216108 - DNA, 15 bp, Homo sapiens
aatgctactatcaga

SEQ ID NO: 216109 - DNA, 15 bp, Homo sapiens
gaatgctactatcag

SEQ ID NO: 216110 - DNA, 15 bp, Homo sapiens
tgaatgctactatca

SEQ ID NO: 216111 - DNA, 15 bp, Homo sapiens
ttgaatgctactatc

SEQ ID NO: 216112 - DNA, 15 bp, Homo sapiens
attgaatgctactat

SEQ ID NO: 216113 - DNA, 15 bp, Homo sapiens
gattgaatgctacta

SEQ ID NO: 216114 - DNA, 15 bp, Homo sapiens
tgattgaatgctact

SEQ ID NO: 216115 - DNA, 15 bp, Homo sapiens
ttgattgaatgctac

SEQ ID NO: 216116 - DNA, 15 bp, Homo sapiens
tttgattgaatgcta

SEQ ID NO: 216117 - DNA, 15 bp, Homo sapiens
atttgattgaatgct

SEQ ID NO: 216118 - DNA, 15 bp, Homo sapiens
tatttgattgaatgc

SEQ ID NO: 216119 - DNA, 15 bp, Homo sapiens
ctatttgattgaatg

SEQ ID NO: 216120 - DNA, 15 bp, Homo sapiens
gctatttgattgaat

SEQ ID NO: 216121 - DNA, 15 bp, Homo sapiens
tgctatttgattgaa

SEQ ID NO: 216122 - DNA, 15 bp, Homo sapiens
ttgctatttgattga

SEQ ID NO: 216123 - DNA, 15 bp, Homo sapiens
gttgctatttgattg

SEQ ID NO: 216124 - DNA, 15 bp, Homo sapiens
tgttgctatttgatt

SEQ ID NO: 216125 - DNA, 15 bp, Homo sapiens
ttgttgctatttgat

SEQ ID NO: 216126 - DNA, 15 bp, Homo sapiens
gttgttgctatttga

SEQ ID NO: 216127 - DNA, 15 bp, Homo sapiens
agttgttgctatttg

SEQ ID NO: 216128 - DNA, 15 bp, Homo sapiens
gagttgttgctattt

SEQ ID NO: 216129 - DNA, 15 bp, Homo sapiens
tgagttgttgctatt

SEQ ID NO: 216130 - DNA, 15 bp, Homo sapiens
atgagttgttgctat

SEQ ID NO: 216131 - DNA, 15 bp, Homo sapiens
gatgagttgttgcta

SEQ ID NO: 216132 - DNA, 15 bp, Homo sapiens
tgatgagttgttgct

SEQ ID NO: 216133 - DNA, 15 bp, Homo sapiens
atgatgagttgttgc

SEQ ID NO: 216134 - DNA, 15 bp, Homo sapiens
aatgatgagttgttg

SEQ ID NO: 216135 - DNA, 15 bp, Homo sapiens
taatgatgagttgtt

SEQ ID NO: 216136 - DNA, 15 bp, Homo sapiens
ataatgatgagttgt

SEQ ID NO: 216137 - DNA, 15 bp, Homo sapiens
aataatgatgagttg

SEQ ID NO: 216138 - DNA, 15 bp, Homo sapiens
aaataatgatgagtt

SEQ ID NO: 216139 - DNA, 15 bp, Homo sapiens
caaataatgatgagt

SEQ ID NO: 216140 - DNA, 15 bp, Homo sapiens
tcaaataatgatgag

SEQ ID NO: 216141 - DNA, 15 bp, Homo sapiens
atcaaataatgatga

SEQ ID NO: 216142 - DNA, 15 bp, Homo sapiens
catcaaataatgatg

SEQ ID NO: 216143 - DNA, 15 bp, Homo sapiens
acatcaaataatgat

SEQ ID NO: 216144 - DNA, 15 bp, Homo sapiens
aacatcaaataatga

SEQ ID NO: 216145 - DNA, 15 bp, Homo sapiens
taacatcaaataatg

SEQ ID NO: 216146 - DNA, 15 bp, Homo sapiens
ttaacatcaaataat

SEQ ID NO: 216147 - DNA, 15 bp, Homo sapiens
tttaacatcaaataa

SEQ ID NO: 216148 - DNA, 15 bp, Homo sapiens
atttaacatcaaata

SEQ ID NO: 216149 - DNA, 15 bp, Homo sapiens
aatttaacatcaaat

SEQ ID NO: 216150 - DNA, 15 bp, Homo sapiens
caatttaacatcaaa

SEQ ID NO: 216151 - DNA, 15 bp, Homo sapiens
ccaatttaacatcaa

SEQ ID NO: 216152 - DNA, 15 bp, Homo sapiens
accaatttaacatca

SEQ ID NO: 216153 - DNA, 15 bp, Homo sapiens
aaccaatttaacatc

SEQ ID NO: 216154 - DNA, 15 bp, Homo sapiens
aaaccaatttaacat

SEQ ID NO: 216155 - DNA, 15 bp, Homo sapiens
aaaaccaatttaaca

SEQ ID NO: 216156 - DNA, 15 bp, Homo sapiens
gaaaaccaatttaac

SEQ ID NO: 216157 - DNA, 15 bp, Homo sapiens
agaaaaccaatttaa

SEQ ID NO: 216158 - DNA, 15 bp, Homo sapiens
aagaaaaccaattta

SEQ ID NO: 216159 - DNA, 15 bp, Homo sapiens
aaagaaaaccaattt

SEQ ID NO: 216160 - DNA, 15 bp, Homo sapiens
gaaagaaaaccaatt

SEQ ID NO: 216161 - DNA, 15 bp, Homo sapiens
agaaagaaaaccaat

SEQ ID NO: 216162 - DNA, 15 bp, Homo sapiens
gagaaagaaaaccaa

SEQ ID NO: 216163 - DNA, 15 bp, Homo sapiens
agagaaagaaaacca

SEQ ID NO: 216164 - DNA, 15 bp, Homo sapiens
gagagaaagaaaacc

SEQ ID NO: 216165 - DNA, 15 bp, Homo sapiens
agagagaaagaaaac

SEQ ID NO: 216166 - DNA, 15 bp, Homo sapiens
aagagagaaagaaaa

SEQ ID NO: 216167 - DNA, 15 bp, Homo sapiens
gaagagagaaagaaa

SEQ ID NO: 216168 - DNA, 15 bp, Homo sapiens
ggaagagagaaagaa

SEQ ID NO: 216169 - DNA, 15 bp, Homo sapiens
tggaagagagaaaga

SEQ ID NO: 216170 - DNA, 15 bp, Homo sapiens
ttggaagagagaaag

SEQ ID NO: 216171 - DNA, 15 bp, Homo sapiens
attggaagagagaaa

SEQ ID NO: 216172 - DNA, 15 bp, Homo sapiens
aattggaagagagaa

SEQ ID NO: 216173 - DNA, 15 bp, Homo sapiens
caattggaagagaga

SEQ ID NO: 216174 - DNA, 15 bp, Homo sapiens
ccaattggaagagag

SEQ ID NO: 216175 - DNA, 15 bp, Homo sapiens
accaattggaagaga

SEQ ID NO: 216176 - DNA, 15 bp, Homo sapiens
gaccaattggaagag

SEQ ID NO: 216177 - DNA, 15 bp, Homo sapiens
ggaccaattggaaga

SEQ ID NO: 216178 - DNA, 15 bp, Homo sapiens
tggaccaattggaag

SEQ ID NO: 216179 - DNA, 15 bp, Homo sapiens
atggaccaattggaa

SEQ ID NO: 216180 - DNA, 15 bp, Homo sapiens
aatggaccaattgga

SEQ ID NO: 216181 - DNA, 15 bp, Homo sapiens
caatggaccaattgg

SEQ ID NO: 216182 - DNA, 15 bp, Homo sapiens
gcaatggaccaattg

SEQ ID NO: 216183 - DNA, 15 bp, Homo sapiens
agcaatggaccaatt

SEQ ID NO: 216184 - DNA, 15 bp, Homo sapiens
aagcaatggaccaat

SEQ ID NO: 216185 - DNA, 15 bp, Homo sapiens
gaagcaatggaccaa

SEQ ID NO: 216186 - DNA, 15 bp, Homo sapiens
tgaagcaatggacca

SEQ ID NO: 216187 - DNA, 15 bp, Homo sapiens
atgaagcaatggacc

SEQ ID NO: 216188 - DNA, 15 bp, Homo sapiens
catgaagcaatggac

SEQ ID NO: 216189 - DNA, 15 bp, Homo sapiens
ccatgaagcaatgga

SEQ ID NO: 216190 - DNA, 15 bp, Homo sapiens
gccatgaagcaatgg

SEQ ID NO: 216191 - DNA, 15 bp, Homo sapiens
agccatgaagcaatg

SEQ ID NO: 216192 - DNA, 15 bp, Homo sapiens
cagccatgaagcaat

SEQ ID NO: 216193 - DNA, 15 bp, Homo sapiens
gcagccatgaagcaa

SEQ ID NO: 216194 - DNA, 15 bp, Homo sapiens
agcagccatgaagca

SEQ ID NO: 216195 - DNA, 15 bp, Homo sapiens
aagcagccatgaagc

SEQ ID NO: 216196 - DNA, 15 bp, Homo sapiens
aaagcagccatgaag

SEQ ID NO: 216197 - DNA, 15 bp, Homo sapiens
gaaagcagccatgaa

SEQ ID NO: 216198 - DNA, 15 bp, Homo sapiens
tgaaagcagccatga

SEQ ID NO: 216199 - DNA, 15 bp, Homo sapiens
atgaaagcagccatg

SEQ ID NO: 216200 - DNA, 15 bp, Homo sapiens
tatgaaagcagccat

SEQ ID NO: 216201 - DNA, 15 bp, Homo sapiens
ttatgaaagcagcca

SEQ ID NO: 216202 - DNA, 15 bp, Homo sapiens
cttatgaaagcagcc

SEQ ID NO: 216203 - DNA, 15 bp, Homo sapiens
ccttatgaaagcagc

SEQ ID NO: 216204 - DNA, 15 bp, Homo sapiens
gccttatgaaagcag

SEQ ID NO: 216205 - DNA, 15 bp, Homo sapiens
ggccttatgaaagca

SEQ ID NO: 216206 - DNA, 15 bp, Homo sapiens
gggccttatgaaagc

SEQ ID NO: 216207 - DNA, 15 bp, Homo sapiens
ggggccttatgaaag

SEQ ID NO: 216208 - DNA, 15 bp, Homo sapiens
aggggccttatgaaa

SEQ ID NO: 216209 - DNA, 15 bp, Homo sapiens
caggggccttatgaa

SEQ ID NO: 216210 - DNA, 15 bp, Homo sapiens
tcaggggccttatga

SEQ ID NO: 216211 - DNA, 15 bp, Homo sapiens
gtcaggggccttatg

SEQ ID NO: 216212 - DNA, 15 bp, Homo sapiens
agtcaggggccttat

SEQ ID NO: 216213 - DNA, 15 bp, Homo sapiens
aagtcaggggcctta

SEQ ID NO: 216214 - DNA, 15 bp, Homo sapiens
taagtcaggggcctt

SEQ ID NO: 216215 - DNA, 15 bp, Homo sapiens
ataagtcaggggcct

SEQ ID NO: 216216 - DNA, 15 bp, Homo sapiens
cataagtcaggggcc

SEQ ID NO: 216217 - DNA, 15 bp, Homo sapiens
tcataagtcaggggc

SEQ ID NO: 216218 - DNA, 15 bp, Homo sapiens
ctcataagtcagggg

SEQ ID NO: 216219 - DNA, 15 bp, Homo sapiens
actcataagtcaggg

SEQ ID NO: 216220 - DNA, 15 bp, Homo sapiens
tactcataagtcagg

SEQ ID NO: 216221 - DNA, 15 bp, Homo sapiens
ttactcataagtcag

SEQ ID NO: 216222 - DNA, 15 bp, Homo sapiens
cttactcataagtca

SEQ ID NO: 216223 - DNA, 15 bp, Homo sapiens
acttactcataagtc

SEQ ID NO: 216224 - DNA, 15 bp, Homo sapiens
tacttactcataagt

SEQ ID NO: 216225 - DNA, 15 bp, Homo sapiens
atacttactcataag

SEQ ID NO: 216226 - DNA, 15 bp, Homo sapiens
gatacttactcataa

SEQ ID NO: 216227 - DNA, 15 bp, Homo sapiens
agatacttactcata

SEQ ID NO: 216228 - DNA, 15 bp, Homo sapiens
cagatacttactcat

SEQ ID NO: 216229 - DNA, 15 bp, Homo sapiens
tcagatacttactca

SEQ ID NO: 216230 - DNA, 15 bp, Homo sapiens
atcagatacttactc

SEQ ID NO: 216231 - DNA, 15 bp, Homo sapiens
aatcagatacttact

SEQ ID NO: 216232 - DNA, 15 bp, Homo sapiens
gaatcagatacttac

SEQ ID NO: 216233 - DNA, 15 bp, Homo sapiens
agaatcagatactta

SEQ ID NO: 216234 - DNA, 15 bp, Homo sapiens
aagaatcagatactt

SEQ ID NO: 216235 - DNA, 15 bp, Homo sapiens
caagaatcagatact

SEQ ID NO: 216236 - DNA, 15 bp, Homo sapiens
acaagaatcagatac

SEQ ID NO: 216237 - DNA, 15 bp, Homo sapiens
aacaagaatcagata

SEQ ID NO: 216238 - DNA, 15 bp, Homo sapiens
aaacaagaatcagat

SEQ ID NO: 216239 - DNA, 15 bp, Homo sapiens
caaacaagaatcaga

SEQ ID NO: 216240 - DNA, 15 bp, Homo sapiens
tcaaacaagaatcag

SEQ ID NO: 216241 - DNA, 15 bp, Homo sapiens
atcaaacaagaatca

SEQ ID NO: 216242 - DNA, 15 bp, Homo sapiens
aatcaaacaagaatc

SEQ ID NO: 216243 - DNA, 15 bp, Homo sapiens
gaatcaaacaagaat

SEQ ID NO: 216244 - DNA, 15 bp, Homo sapiens
agaatcaaacaagaa

SEQ ID NO: 216245 - DNA, 15 bp, Homo sapiens
tagaatcaaacaaga

SEQ ID NO: 216246 - DNA, 15 bp, Homo sapiens
ttagaatcaaacaag

SEQ ID NO: 216247 - DNA, 15 bp, Homo sapiens
cttagaatcaaacaa

SEQ ID NO: 216248 - DNA, 15 bp, Homo sapiens
tcttagaatcaaaca

SEQ ID NO: 216249 - DNA, 15 bp, Homo sapiens
ttcttagaatcaaac

SEQ ID NO: 216250 - DNA, 15 bp, Homo sapiens
attcttagaatcaaa

SEQ ID NO: 216251 - DNA, 15 bp, Homo sapiens
aattcttagaatcaa

SEQ ID NO: 216252 - DNA, 15 bp, Homo sapiens
taattcttagaatca

SEQ ID NO: 216253 - DNA, 15 bp, Homo sapiens
ataattcttagaatc

SEQ ID NO: 216254 - DNA, 15 bp, Homo sapiens
aataattcttagaat

SEQ ID NO: 216255 - DNA, 15 bp, Homo sapiens
aaataattcttagaa

SEQ ID NO: 216256 - DNA, 15 bp, Homo sapiens
caaataattcttaga

SEQ ID NO: 216257 - DNA, 15 bp, Homo sapiens
acaaataattcttag

SEQ ID NO: 216258 - DNA, 15 bp, Homo sapiens
aacaaataattctta

SEQ ID NO: 216259 - DNA, 15 bp, Homo sapiens
taacaaataattctt

SEQ ID NO: 216260 - DNA, 15 bp, Homo sapiens
gtaacaaataattct

SEQ ID NO: 216261 - DNA, 15 bp, Homo sapiens
agtaacaaataattc

SEQ ID NO: 216262 - DNA, 15 bp, Homo sapiens
aagtaacaaataatt

SEQ ID NO: 216263 - DNA, 15 bp, Homo sapiens
taagtaacaaataat

SEQ ID NO: 216264 - DNA, 15 bp, Homo sapiens
ataagtaacaaataa

SEQ ID NO: 216265 - DNA, 15 bp, Homo sapiens
tataagtaacaaata

SEQ ID NO: 216266 - DNA, 15 bp, Homo sapiens
ctataagtaacaaat

SEQ ID NO: 216267 - DNA, 15 bp, Homo sapiens
actataagtaacaaa

SEQ ID NO: 216268 - DNA, 15 bp, Homo sapiens
aactataagtaacaa

SEQ ID NO: 216269 - DNA, 15 bp, Homo sapiens
caactataagtaaca

SEQ ID NO: 216270 - DNA, 15 bp, Homo sapiens
tcaactataagtaac

SEQ ID NO: 216271 - DNA, 15 bp, Homo sapiens
ttcaactataagtaa

SEQ ID NO: 216272 - DNA, 15 bp, Homo sapiens
attcaactataagta

SEQ ID NO: 216273 - DNA, 15 bp, Homo sapiens
cattcaactataagt

SEQ ID NO: 216274 - DNA, 15 bp, Homo sapiens
acattcaactataag

SEQ ID NO: 216275 - DNA, 15 bp, Homo sapiens
tacattcaactataa

SEQ ID NO: 216276 - DNA, 15 bp, Homo sapiens
ctacattcaactata

SEQ ID NO: 216277 - DNA, 15 bp, Homo sapiens
cctacattcaactat

SEQ ID NO: 216278 - DNA, 15 bp, Homo sapiens
acctacattcaacta

SEQ ID NO: 216279 - DNA, 15 bp, Homo sapiens
aacctacattcaact

SEQ ID NO: 216280 - DNA, 15 bp, Homo sapiens
aaacctacattcaac

SEQ ID NO: 216281 - DNA, 15 bp, Homo sapiens
taaacctacattcaa

SEQ ID NO: 216282 - DNA, 15 bp, Homo sapiens
ataaacctacattca

SEQ ID NO: 216283 - DNA, 15 bp, Homo sapiens
gataaacctacattc

SEQ ID NO: 216284 - DNA, 15 bp, Homo sapiens
tgataaacctacatt

SEQ ID NO: 216285 - DNA, 15 bp, Homo sapiens
ttgataaacctacat

SEQ ID NO: 216286 - DNA, 15 bp, Homo sapiens
attgataaacctaca

SEQ ID NO: 216287 - DNA, 15 bp, Homo sapiens
tattgataaacctac

SEQ ID NO: 216288 - DNA, 15 bp, Homo sapiens
ctattgataaaccta

SEQ ID NO: 216289 - DNA, 15 bp, Homo sapiens
tctattgataaacct

SEQ ID NO: 216290 - DNA, 15 bp, Homo sapiens
gtctattgataaacc

SEQ ID NO: 216291 - DNA, 15 bp, Homo sapiens
agtctattgataaac

SEQ ID NO: 216292 - DNA, 15 bp, Homo sapiens
gagtctattgataaa

SEQ ID NO: 216293 - DNA, 15 bp, Homo sapiens
ggagtctattgataa

SEQ ID NO: 216294 - DNA, 15 bp, Homo sapiens
tggagtctattgata

SEQ ID NO: 216295 - DNA, 15 bp, Homo sapiens
ttggagtctattgat

SEQ ID NO: 216296 - DNA, 15 bp, Homo sapiens
tttggagtctattga

SEQ ID NO: 216297 - DNA, 15 bp, Homo sapiens
atttggagtctattg

SEQ ID NO: 216298 - DNA, 15 bp, Homo sapiens
catttggagtctatt

SEQ ID NO: 216299 - DNA, 15 bp, Homo sapiens
gcatttggagtctat

SEQ ID NO: 216300 - DNA, 15 bp, Homo sapiens
tgcatttggagtcta

SEQ ID NO: 216301 - DNA, 15 bp, Homo sapiens
atgcatttggagtct

SEQ ID NO: 216302 - DNA, 15 bp, Homo sapiens
aatgcatttggagtc

SEQ ID NO: 216303 - DNA, 15 bp, Homo sapiens
aaatgcatttggagt

SEQ ID NO: 216304 - DNA, 15 bp, Homo sapiens
aaaatgcatttggag

SEQ ID NO: 216305 - DNA, 15 bp, Homo sapiens
aaaaatgcatttgga

SEQ ID NO: 216306 - DNA, 15 bp, Homo sapiens
taaaaatgcatttgg

SEQ ID NO: 216307 - DNA, 15 bp, Homo sapiens
ttaaaaatgcatttg

SEQ ID NO: 216308 - DNA, 15 bp, Homo sapiens
tttaaaaatgcattt

SEQ ID NO: 216309 - DNA, 15 bp, Homo sapiens
atttaaaaatgcatt

SEQ ID NO: 216310 - DNA, 15 bp, Homo sapiens
catttaaaaatgcat

SEQ ID NO: 216311 - DNA, 15 bp, Homo sapiens
tcatttaaaaatgca

SEQ ID NO: 216312 - DNA, 15 bp, Homo sapiens
atcatttaaaaatgc

SEQ ID NO: 216313 - DNA, 15 bp, Homo sapiens
aatcatttaaaaatg

SEQ ID NO: 216314 - DNA, 15 bp, Homo sapiens
taatcatttaaaaat

SEQ ID NO: 216315 - DNA, 15 bp, Homo sapiens
ttaatcatttaaaaa

SEQ ID NO: 216316 - DNA, 15 bp, Homo sapiens
attaatcatttaaaa

SEQ ID NO: 216317 - DNA, 15 bp, Homo sapiens
aattaatcatttaaa

SEQ ID NO: 216318 - DNA, 15 bp, Homo sapiens
caattaatcatttaa

SEQ ID NO: 216319 - DNA, 15 bp, Homo sapiens
tcaattaatcattta

SEQ ID NO: 216320 - DNA, 15 bp, Homo sapiens
ttcaattaatcattt

SEQ ID NO: 216321 - DNA, 15 bp, Homo sapiens
attcaattaatcatt

SEQ ID NO: 216322 - DNA, 15 bp, Homo sapiens
aattcaattaatcat

SEQ ID NO: 216323 - DNA, 15 bp, Homo sapiens
gaattcaattaatca

SEQ ID NO: 216324 - DNA, 15 bp, Homo sapiens
tgaattcaattaatc

SEQ ID NO: 216325 - DNA, 15 bp, Homo sapiens
ctgaattcaattaat

SEQ ID NO: 216326 - DNA, 15 bp, Homo sapiens
gctgaattcaattaa

SEQ ID NO: 216327 - DNA, 15 bp, Homo sapiens
ggctgaattcaatta

SEQ ID NO: 216328 - DNA, 15 bp, Homo sapiens
tggctgaattcaatt

SEQ ID NO: 216329 - DNA, 15 bp, Homo sapiens
ttggctgaattcaat

SEQ ID NO: 216330 - DNA, 15 bp, Homo sapiens
tttggctgaattcaa

SEQ ID NO: 216331 - DNA, 15 bp, Homo sapiens
ttttggctgaattca

SEQ ID NO: 216332 - DNA, 15 bp, Homo sapiens
tttttggctgaattc

SEQ ID NO: 216333 - DNA, 15 bp, Homo sapiens
ttttttggctgaatt

SEQ ID NO: 216334 - DNA, 15 bp, Homo sapiens
attttttggctgaat

SEQ ID NO: 216335 - DNA, 15 bp, Homo sapiens
tattttttggctgaa

SEQ ID NO: 216336 - DNA, 15 bp, Homo sapiens
ttattttttggctga

SEQ ID NO: 216337 - DNA, 15 bp, Homo sapiens
attattttttggctg

SEQ ID NO: 216338 - DNA, 15 bp, Homo sapiens
aattattttttggct

SEQ ID NO: 216339 - DNA, 15 bp, Homo sapiens
aaattattttttggc

SEQ ID NO: 216340 - DNA, 15 bp, Homo sapiens
taaattattttttgg

SEQ ID NO: 216341 - DNA, 15 bp, Homo sapiens
ttaaattattttttg

SEQ ID NO: 216342 - DNA, 15 bp, Homo sapiens
cttaaattatttttt

SEQ ID NO: 216343 - DNA, 15 bp, Homo sapiens
acttaaattattttt

SEQ ID NO: 216344 - DNA, 15 bp, Homo sapiens
cacttaaattatttt

SEQ ID NO: 216345 - DNA, 15 bp, Homo sapiens
tcacttaaattattt

SEQ ID NO: 216346 - DNA, 15 bp, Homo sapiens
gtcacttaaattatt

SEQ ID NO: 216347 - DNA, 15 bp, Homo sapiens
agtcacttaaattat

SEQ ID NO: 216348 - DNA, 15 bp, Homo sapiens
tagtcacttaaatta

SEQ ID NO: 216349 - DNA, 15 bp, Homo sapiens
atagtcacttaaatt

SEQ ID NO: 216350 - DNA, 15 bp, Homo sapiens
aatagtcacttaaat

SEQ ID NO: 216351 - DNA, 15 bp, Homo sapiens
aaatagtcacttaaa

SEQ ID NO: 216352 - DNA, 15 bp, Homo sapiens
taaatagtcacttaa

SEQ ID NO: 216353 - DNA, 15 bp, Homo sapiens
ctaaatagtcactta

SEQ ID NO: 216354 - DNA, 15 bp, Homo sapiens
tctaaatagtcactt

SEQ ID NO: 216355 - DNA, 15 bp, Homo sapiens
ctctaaatagtcact

SEQ ID NO: 216356 - DNA, 15 bp, Homo sapiens
tctctaaatagtcac

SEQ ID NO: 216357 - DNA, 15 bp, Homo sapiens
ttctctaaatagtca

SEQ ID NO: 216358 - DNA, 15 bp, Homo sapiens
gttctctaaatagtc

SEQ ID NO: 216359 - DNA, 15 bp, Homo sapiens
tgttctctaaatagt

SEQ ID NO: 216360 - DNA, 15 bp, Homo sapiens
ttgttctctaaatag

SEQ ID NO: 216361 - DNA, 15 bp, Homo sapiens
tttgttctctaaata

SEQ ID NO: 216362 - DNA, 15 bp, Homo sapiens
atttgttctctaaat

SEQ ID NO: 216363 - DNA, 15 bp, Homo sapiens
tatttgttctctaaa

SEQ ID NO: 216364 - DNA, 15 bp, Homo sapiens
ttatttgttctctaa

SEQ ID NO: 216365 - DNA, 15 bp, Homo sapiens
attatttgttctcta

SEQ ID NO: 216366 - DNA, 15 bp, Homo sapiens
gattatttgttctct

SEQ ID NO: 216367 - DNA, 15 bp, Homo sapiens
agattatttgttctc

SEQ ID NO: 216368 - DNA, 15 bp, Homo sapiens
gagattatttgttct

SEQ ID NO: 216369 - DNA, 15 bp, Homo sapiens
tgagattatttgttc

SEQ ID NO: 216370 - DNA, 15 bp, Homo sapiens
ctgagattatttgtt

SEQ ID NO: 216371 - DNA, 15 bp, Homo sapiens
actgagattatttgt

SEQ ID NO: 216372 - DNA, 15 bp, Homo sapiens
gactgagattatttg

SEQ ID NO: 216373 - DNA, 15 bp, Homo sapiens
agactgagattattt

SEQ ID NO: 216374 - DNA, 15 bp, Homo sapiens
aagactgagattatt

SEQ ID NO: 216375 - DNA, 15 bp, Homo sapiens
aaagactgagattat

SEQ ID NO: 216376 - DNA, 15 bp, Homo sapiens
taaagactgagatta

SEQ ID NO: 216377 - DNA, 15 bp, Homo sapiens
ttaaagactgagatt

SEQ ID NO: 216378 - DNA, 15 bp, Homo sapiens
attaaagactgagat

SEQ ID NO: 216379 - DNA, 15 bp, Homo sapiens
aattaaagactgaga

SEQ ID NO: 216380 - DNA, 15 bp, Homo sapiens
caattaaagactgag

SEQ ID NO: 216381 - DNA, 15 bp, Homo sapiens
acaattaaagactga

SEQ ID NO: 216382 - DNA, 15 bp, Homo sapiens
tacaattaaagactg

SEQ ID NO: 216383 - DNA, 15 bp, Homo sapiens
atacaattaaagact

SEQ ID NO: 216384 - DNA, 15 bp, Homo sapiens
gatacaattaaagac

SEQ ID NO: 216385 - DNA, 15 bp, Homo sapiens
agatacaattaaaga

SEQ ID NO: 216386 - DNA, 15 bp, Homo sapiens
tagatacaattaaag

SEQ ID NO: 216387 - DNA, 15 bp, Homo sapiens
atagatacaattaaa

SEQ ID NO: 216388 - DNA, 15 bp, Homo sapiens
catagatacaattaa

SEQ ID NO: 216389 - DNA, 15 bp, Homo sapiens
tcatagatacaatta

SEQ ID NO: 216390 - DNA, 15 bp, Homo sapiens
atcatagatacaatt

SEQ ID NO: 216391 - DNA, 15 bp, Homo sapiens
aatcatagatacaat

SEQ ID NO: 216392 - DNA, 15 bp, Homo sapiens
caatcatagatacaa

SEQ ID NO: 216393 - DNA, 15 bp, Homo sapiens
acaatcatagataca

SEQ ID NO: 216394 - DNA, 15 bp, Homo sapiens
cacaatcatagatac

SEQ ID NO: 216395 - DNA, 15 bp, Homo sapiens
acacaatcatagata

SEQ ID NO: 216396 - DNA, 15 bp, Homo sapiens
aacacaatcatagat

SEQ ID NO: 216397 - DNA, 15 bp, Homo sapiens
taacacaatcataga

SEQ ID NO: 216398 - DNA, 15 bp, Homo sapiens
gtaacacaatcatag

SEQ ID NO: 216399 - DNA, 15 bp, Homo sapiens
tgtaacacaatcata

SEQ ID NO: 216400 - DNA, 15 bp, Homo sapiens
ttgtaacacaatcat

SEQ ID NO: 216401 - DNA, 15 bp, Homo sapiens
gttgtaacacaatca

SEQ ID NO: 216402 - DNA, 15 bp, Homo sapiens
agttgtaacacaatc

SEQ ID NO: 216403 - DNA, 15 bp, Homo sapiens
tagttgtaacacaat

SEQ ID NO: 216404 - DNA, 15 bp, Homo sapiens
atagttgtaacacaa

SEQ ID NO: 216405 - DNA, 15 bp, Homo sapiens
catagttgtaacaca

SEQ ID NO: 216406 - DNA, 15 bp, Homo sapiens
acatagttgtaacac

SEQ ID NO: 216407 - DNA, 15 bp, Homo sapiens
gacatagttgtaaca

SEQ ID NO: 216408 - DNA, 15 bp, Homo sapiens
agacatagttgtaac

SEQ ID NO: 216409 - DNA, 15 bp, Homo sapiens
tagacatagttgtaa

SEQ ID NO: 216410 - DNA, 15 bp, Homo sapiens
atagacatagttgta

SEQ ID NO: 216411 - DNA, 15 bp, Homo sapiens
gatagacatagttgt

SEQ ID NO: 216412 - DNA, 15 bp, Homo sapiens
agatagacatagttg

SEQ ID NO: 216413 - DNA, 15 bp, Homo sapiens
cagatagacatagtt

SEQ ID NO: 216414 - DNA, 15 bp, Homo sapiens
tcagatagacatagt

SEQ ID NO: 216415 - DNA, 15 bp, Homo sapiens
atcagatagacatag

SEQ ID NO: 216416 - DNA, 15 bp, Homo sapiens
tatcagatagacata

SEQ ID NO: 216417 - DNA, 15 bp, Homo sapiens
atatcagatagacat

SEQ ID NO: 216418 - DNA, 15 bp, Homo sapiens
aatatcagatagaca

SEQ ID NO: 216419 - DNA, 15 bp, Homo sapiens
taatatcagatagac

SEQ ID NO: 216420 - DNA, 15 bp, Homo sapiens
ataatatcagataga

SEQ ID NO: 216421 - DNA, 15 bp, Homo sapiens
tataatatcagatag

SEQ ID NO: 216422 - DNA, 15 bp, Homo sapiens
ctataatatcagata

SEQ ID NO: 216423 - DNA, 15 bp, Homo sapiens
gctataatatcagat

SEQ ID NO: 216424 - DNA, 15 bp, Homo sapiens
agctataatatcaga

SEQ ID NO: 216425 - DNA, 15 bp, Homo sapiens
tagctataatatcag

SEQ ID NO: 216426 - DNA, 15 bp, Homo sapiens
atagctataatatca

SEQ ID NO: 216427 - DNA, 15 bp, Homo sapiens
tatagctataatatc

SEQ ID NO: 216428 - DNA, 15 bp, Homo sapiens
ctatagctataatat

SEQ ID NO: 216429 - DNA, 15 bp, Homo sapiens
tctatagctataata

SEQ ID NO: 216430 - DNA, 15 bp, Homo sapiens
atctatagctataat

SEQ ID NO: 216431 - DNA, 15 bp, Homo sapiens
tatctatagctataa

SEQ ID NO: 216432 - DNA, 15 bp, Homo sapiens
atatctatagctata

SEQ ID NO: 216433 - DNA, 15 bp, Homo sapiens
tatatctatagctat

SEQ ID NO: 216434 - DNA, 15 bp, Homo sapiens
atatatctatagcta

SEQ ID NO: 216435 - DNA, 15 bp, Homo sapiens
tatatatctatagct

SEQ ID NO: 216436 - DNA, 15 bp, Homo sapiens
gtatatatctatagc

SEQ ID NO: 216437 - DNA, 15 bp, Homo sapiens
tgtatatatctatag

SEQ ID NO: 216438 - DNA, 15 bp, Homo sapiens
ttgtatatatctata

SEQ ID NO: 216439 - DNA, 15 bp, Homo sapiens
cttgtatatatctat

SEQ ID NO: 216440 - DNA, 15 bp, Homo sapiens
tcttgtatatatcta

SEQ ID NO: 216441 - DNA, 15 bp, Homo sapiens
ttcttgtatatatct

SEQ ID NO: 216442 - DNA, 15 bp, Homo sapiens
attcttgtatatatc

SEQ ID NO: 216443 - DNA, 15 bp, Homo sapiens
tattcttgtatatat

SEQ ID NO: 216444 - DNA, 15 bp, Homo sapiens
gtattcttgtatata

SEQ ID NO: 216445 - DNA, 15 bp, Homo sapiens
agtattcttgtatat

SEQ ID NO: 216446 - DNA, 15 bp, Homo sapiens
tagtattcttgtata

SEQ ID NO: 216447 - DNA, 15 bp, Homo sapiens
gtagtattcttgtat

SEQ ID NO: 216448 - DNA, 15 bp, Homo sapiens
agtagtattcttgta

SEQ ID NO: 216449 - DNA, 15 bp, Homo sapiens
gagtagtattcttgt

SEQ ID NO: 216450 - DNA, 15 bp, Homo sapiens
tgagtagtattcttg

SEQ ID NO: 216451 - DNA, 15 bp, Homo sapiens
ttgagtagtattctt

SEQ ID NO: 216452 - DNA, 15 bp, Homo sapiens
tttgagtagtattct

SEQ ID NO: 216453 - DNA, 15 bp, Homo sapiens
atttgagtagtattc

SEQ ID NO: 216454 - DNA, 15 bp, Homo sapiens
tatttgagtagtatt

SEQ ID NO: 216455 - DNA, 15 bp, Homo sapiens
gtatttgagtagtat

SEQ ID NO: 216456 - DNA, 15 bp, Homo sapiens
tgtatttgagtagta

SEQ ID NO: 216457 - DNA, 15 bp, Homo sapiens
atgtatttgagtagt

SEQ ID NO: 216458 - DNA, 15 bp, Homo sapiens
gatgtatttgagtag

SEQ ID NO: 216459 - DNA, 15 bp, Homo sapiens
agatgtatttgagta

SEQ ID NO: 216460 - DNA, 15 bp, Homo sapiens
cagatgtatttgagt

SEQ ID NO: 216461 - DNA, 15 bp, Homo sapiens
acagatgtatttgag

SEQ ID NO: 216462 - DNA, 15 bp, Homo sapiens
tacagatgtatttga

SEQ ID NO: 216463 - DNA, 15 bp, Homo sapiens
ctacagatgtatttg

SEQ ID NO: 216464 - DNA, 15 bp, Homo sapiens
cctacagatgtattt

SEQ ID NO: 216465 - DNA, 15 bp, Homo sapiens
tcctacagatgtatt

SEQ ID NO: 216466 - DNA, 15 bp, Homo sapiens
ttcctacagatgtat

SEQ ID NO: 216467 - DNA, 15 bp, Homo sapiens
tttcctacagatgta

SEQ ID NO: 216468 - DNA, 15 bp, Homo sapiens
atttcctacagatgt

SEQ ID NO: 216469 - DNA, 15 bp, Homo sapiens
aatttcctacagatg

SEQ ID NO: 216470 - DNA, 15 bp, Homo sapiens
taatttcctacagat

SEQ ID NO: 216471 - DNA, 15 bp, Homo sapiens
ttaatttcctacaga

SEQ ID NO: 216472 - DNA, 15 bp, Homo sapiens
attaatttcctacag

SEQ ID NO: 216473 - DNA, 15 bp, Homo sapiens
tattaatttcctaca

SEQ ID NO: 216474 - DNA, 15 bp, Homo sapiens
atattaatttcctac

SEQ ID NO: 216475 - DNA, 15 bp, Homo sapiens
catattaatttccta

SEQ ID NO: 216476 - DNA, 15 bp, Homo sapiens
gcatattaatttcct

SEQ ID NO: 216477 - DNA, 15 bp, Homo sapiens
tgcatattaatttcc

SEQ ID NO: 216478 - DNA, 15 bp, Homo sapiens
ttgcatattaatttc

SEQ ID NO: 216479 - DNA, 15 bp, Homo sapiens
tttgcatattaattt

SEQ ID NO: 216480 - DNA, 15 bp, Homo sapiens
gtttgcatattaatt

SEQ ID NO: 216481 - DNA, 15 bp, Homo sapiens
tgtttgcatattaat

SEQ ID NO: 216482 - DNA, 15 bp, Homo sapiens
atgtttgcatattaa

SEQ ID NO: 216483 - DNA, 15 bp, Homo sapiens
tatgtttgcatatta

SEQ ID NO: 216484 - DNA, 15 bp, Homo sapiens
gtatgtttgcatatt

SEQ ID NO: 216485 - DNA, 15 bp, Homo sapiens
tgtatgtttgcatat

SEQ ID NO: 216486 - DNA, 15 bp, Homo sapiens
ttgtatgtttgcata

SEQ ID NO: 216487 - DNA, 15 bp, Homo sapiens
tttgtatgtttgcat

SEQ ID NO: 216488 - DNA, 15 bp, Homo sapiens
ttttgtatgtttgca

SEQ ID NO: 216489 - DNA, 15 bp, Homo sapiens
attttgtatgtttgc

SEQ ID NO: 216490 - DNA, 15 bp, Homo sapiens
cattttgtatgtttg

SEQ ID NO: 216491 - DNA, 15 bp, Homo sapiens
gcattttgtatgttt

SEQ ID NO: 216492 - DNA, 15 bp, Homo sapiens
tgcattttgtatgtt

SEQ ID NO: 216493 - DNA, 15 bp, Homo sapiens
gtgcattttgtatgt

SEQ ID NO: 216494 - DNA, 15 bp, Homo sapiens
tgtgcattttgtatg

SEQ ID NO: 216495 - DNA, 15 bp, Homo sapiens
atgtgcattttgtat

SEQ ID NO: 216496 - DNA, 15 bp, Homo sapiens
tatgtgcattttgta

SEQ ID NO: 216497 - DNA, 15 bp, Homo sapiens
gtatgtgcattttgt

SEQ ID NO: 216498 - DNA, 15 bp, Homo sapiens
tgtatgtgcattttg

SEQ ID NO: 216499 - DNA, 15 bp, Homo sapiens
atgtatgtgcatttt

SEQ ID NO: 216500 - DNA, 15 bp, Homo sapiens
gatgtatgtgcattt

SEQ ID NO: 216501 - DNA, 15 bp, Homo sapiens
agatgtatgtgcatt

SEQ ID NO: 216502 - DNA, 15 bp, Homo sapiens
cagatgtatgtgcat

SEQ ID NO: 216503 - DNA, 15 bp, Homo sapiens
acagatgtatgtgca

SEQ ID NO: 216504 - DNA, 15 bp, Homo sapiens
cacagatgtatgtgc

SEQ ID NO: 216505 - DNA, 15 bp, Homo sapiens
acacagatgtatgtg

SEQ ID NO: 216506 - DNA, 15 bp, Homo sapiens
tacacagatgtatgt

SEQ ID NO: 216507 - DNA, 15 bp, Homo sapiens
atacacagatgtatg

SEQ ID NO: 216508 - DNA, 15 bp, Homo sapiens
gatacacagatgtat

SEQ ID NO: 216509 - DNA, 15 bp, Homo sapiens
agatacacagatgta

SEQ ID NO: 216510 - DNA, 15 bp, Homo sapiens
tagatacacagatgt

SEQ ID NO: 216511 - DNA, 15 bp, Homo sapiens
atagatacacagatg

SEQ ID NO: 216512 - DNA, 15 bp, Homo sapiens
catagatacacagat

SEQ ID NO: 216513 - DNA, 15 bp, Homo sapiens
tcatagatacacaga

SEQ ID NO: 216514 - DNA, 15 bp, Homo sapiens
atcatagatacacag

SEQ ID NO: 216515 - DNA, 15 bp, Homo sapiens
aatcatagatacaca

SEQ ID NO: 216516 - DNA, 15 bp, Homo sapiens
aaatcatagatacac

SEQ ID NO: 216517 - DNA, 15 bp, Homo sapiens
taaatcatagataca

SEQ ID NO: 216518 - DNA, 15 bp, Homo sapiens
ttaaatcatagatac

SEQ ID NO: 216519 - DNA, 15 bp, Homo sapiens
attaaatcatagata

SEQ ID NO: 216520 - DNA, 15 bp, Homo sapiens
tattaaatcatagat

SEQ ID NO: 216521 - DNA, 15 bp, Homo sapiens
ttattaaatcataga

SEQ ID NO: 216522 - DNA, 15 bp, Homo sapiens
gttattaaatcatag

SEQ ID NO: 216523 - DNA, 15 bp, Homo sapiens
agttattaaatcata

SEQ ID NO: 216524 - DNA, 15 bp, Homo sapiens
gagttattaaatcat

SEQ ID NO: 216525 - DNA, 15 bp, Homo sapiens
ggagttattaaatca

SEQ ID NO: 216526 - DNA, 15 bp, Homo sapiens
gggagttattaaatc

SEQ ID NO: 216527 - DNA, 15 bp, Homo sapiens
tgggagttattaaat

SEQ ID NO: 216528 - DNA, 15 bp, Homo sapiens
atgggagttattaaa

SEQ ID NO: 216529 - DNA, 15 bp, Homo sapiens
catgggagttattaa

SEQ ID NO: 216530 - DNA, 15 bp, Homo sapiens
acatgggagttatta

SEQ ID NO: 216531 - DNA, 15 bp, Homo sapiens
gacatgggagttatt

SEQ ID NO: 216532 - DNA, 15 bp, Homo sapiens
ggacatgggagttat

SEQ ID NO: 216533 - DNA, 15 bp, Homo sapiens
tggacatgggagtta

SEQ ID NO: 216534 - DNA, 15 bp, Homo sapiens
atggacatgggagtt

SEQ ID NO: 216535 - DNA, 15 bp, Homo sapiens
tatggacatgggagt

SEQ ID NO: 216536 - DNA, 15 bp, Homo sapiens
ttatggacatgggag

SEQ ID NO: 216537 - DNA, 15 bp, Homo sapiens
gttatggacatggga

SEQ ID NO: 216538 - DNA, 15 bp, Homo sapiens
agttatggacatggg

SEQ ID NO: 216539 - DNA, 15 bp, Homo sapiens
tagttatggacatgg

SEQ ID NO: 216540 - DNA, 15 bp, Homo sapiens
ctagttatggacatg

SEQ ID NO: 216541 - DNA, 15 bp, Homo sapiens
actagttatggacat

SEQ ID NO: 216542 - DNA, 15 bp, Homo sapiens
aactagttatggaca

SEQ ID NO: 216543 - DNA, 15 bp, Homo sapiens
taactagttatggac

SEQ ID NO: 216544 - DNA, 15 bp, Homo sapiens
gtaactagttatgga

SEQ ID NO: 216545 - DNA, 15 bp, Homo sapiens
ggtaactagttatgg

SEQ ID NO: 216546 - DNA, 15 bp, Homo sapiens
cggtaactagttatg

SEQ ID NO: 216547 - DNA, 15 bp, Homo sapiens
ccggtaactagttat

SEQ ID NO: 216548 - DNA, 15 bp, Homo sapiens
accggtaactagtta

SEQ ID NO: 216549 - DNA, 15 bp, Homo sapiens
caccggtaactagtt

SEQ ID NO: 216550 - DNA, 15 bp, Homo sapiens
acaccggtaactagt

SEQ ID NO: 216551 - DNA, 15 bp, Homo sapiens
gacaccggtaactag

SEQ ID NO: 216552 - DNA, 15 bp, Homo sapiens
tgacaccggtaacta

SEQ ID NO: 216553 - DNA, 15 bp, Homo sapiens
ttgacaccggtaact

SEQ ID NO: 216554 - DNA, 15 bp, Homo sapiens
attgacaccggtaac

SEQ ID NO: 216555 - DNA, 15 bp, Homo sapiens
tattgacaccggtaa

SEQ ID NO: 216556 - DNA, 15 bp, Homo sapiens
ttattgacaccggta

SEQ ID NO: 216557 - DNA, 15 bp, Homo sapiens
cttattgacaccggt

SEQ ID NO: 216558 - DNA, 15 bp, Homo sapiens
acttattgacaccgg

SEQ ID NO: 216559 - DNA, 15 bp, Homo sapiens
tacttattgacaccg

SEQ ID NO: 216560 - DNA, 15 bp, Homo sapiens
ttacttattgacacc

SEQ ID NO: 216561 - DNA, 15 bp, Homo sapiens
gttacttattgacac

SEQ ID NO: 216562 - DNA, 15 bp, Homo sapiens
ggttacttattgaca

SEQ ID NO: 216563 - DNA, 15 bp, Homo sapiens
tggttacttattgac

SEQ ID NO: 216564 - DNA, 15 bp, Homo sapiens
atggttacttattga

SEQ ID NO: 216565 - DNA, 15 bp, Homo sapiens
tatggttacttattg

SEQ ID NO: 216566 - DNA, 15 bp, Homo sapiens
atatggttacttatt

SEQ ID NO: 216567 - DNA, 15 bp, Homo sapiens
tatatggttacttat

SEQ ID NO: 216568 - DNA, 15 bp, Homo sapiens
gtatatggttactta

SEQ ID NO: 216569 - DNA, 15 bp, Homo sapiens
ggtatatggttactt

SEQ ID NO: 216570 - DNA, 15 bp, Homo sapiens
tggtatatggttact

SEQ ID NO: 216571 - DNA, 15 bp, Homo sapiens
ttggtatatggttac

SEQ ID NO: 216572 - DNA, 15 bp, Homo sapiens
gttggtatatggtta

SEQ ID NO: 216573 - DNA, 15 bp, Homo sapiens
agttggtatatggtt

SEQ ID NO: 216574 - DNA, 15 bp, Homo sapiens
aagttggtatatggt

SEQ ID NO: 216575 - DNA, 15 bp, Homo sapiens
caagttggtatatgg

SEQ ID NO: 216576 - DNA, 15 bp, Homo sapiens
acaagttggtatatg

SEQ ID NO: 216577 - DNA, 15 bp, Homo sapiens
aacaagttggtatat

SEQ ID NO: 216578 - DNA, 15 bp, Homo sapiens
gaacaagttggtata

SEQ ID NO: 216579 - DNA, 15 bp, Homo sapiens
agaacaagttggtat

SEQ ID NO: 216580 - DNA, 15 bp, Homo sapiens
aagaacaagttggta

SEQ ID NO: 216581 - DNA, 15 bp, Homo sapiens
aaagaacaagttggt

SEQ ID NO: 216582 - DNA, 15 bp, Homo sapiens
aaaagaacaagttgg

SEQ ID NO: 216583 - DNA, 15 bp, Homo sapiens
aaaaagaacaagttg

SEQ ID NO: 216584 - DNA, 15 bp, Homo sapiens
caaaaagaacaagtt

SEQ ID NO: 216585 - DNA, 15 bp, Homo sapiens
tcaaaaagaacaagt

SEQ ID NO: 216586 - DNA, 15 bp, Homo sapiens
gtcaaaaagaacaag

SEQ ID NO: 216587 - DNA, 15 bp, Homo sapiens
ggtcaaaaagaacaa

SEQ ID NO: 216588 - DNA, 15 bp, Homo sapiens
gggtcaaaaagaaca

SEQ ID NO: 216589 - DNA, 15 bp, Homo sapiens
tgggtcaaaaagaac

SEQ ID NO: 216590 - DNA, 15 bp, Homo sapiens
ttgggtcaaaaagaa

SEQ ID NO: 216591 - DNA, 15 bp, Homo sapiens
attgggtcaaaaaga

SEQ ID NO: 216592 - DNA, 15 bp, Homo sapiens
gattgggtcaaaaag

SEQ ID NO: 216593 - DNA, 15 bp, Homo sapiens
ggattgggtcaaaaa

SEQ ID NO: 216594 - DNA, 15 bp, Homo sapiens
aggattgggtcaaaa

SEQ ID NO: 216595 - DNA, 15 bp, Homo sapiens
aaggattgggtcaaa

SEQ ID NO: 216596 - DNA, 15 bp, Homo sapiens
taaggattgggtcaa

SEQ ID NO: 216597 - DNA, 15 bp, Homo sapiens
gtaaggattgggtca

SEQ ID NO: 216598 - DNA, 15 bp, Homo sapiens
agtaaggattgggtc

SEQ ID NO: 216599 - DNA, 15 bp, Homo sapiens
tagtaaggattgggt

SEQ ID NO: 216600 - DNA, 15 bp, Homo sapiens
gtagtaaggattggg

SEQ ID NO: 216601 - DNA, 15 bp, Homo sapiens
agtagtaaggattgg

SEQ ID NO: 216602 - DNA, 15 bp, Homo sapiens
aagtagtaaggattg

SEQ ID NO: 216603 - DNA, 15 bp, Homo sapiens
aaagtagtaaggatt

SEQ ID NO: 216604 - DNA, 15 bp, Homo sapiens
aaaagtagtaaggat

SEQ ID NO: 216605 - DNA, 15 bp, Homo sapiens
caaaagtagtaagga

SEQ ID NO: 216606 - DNA, 15 bp, Homo sapiens
tcaaaagtagtaagg

SEQ ID NO: 216607 - DNA, 15 bp, Homo sapiens
gtcaaaagtagtaag

SEQ ID NO: 216608 - DNA, 15 bp, Homo sapiens
ggtcaaaagtagtaa

SEQ ID NO: 216609 - DNA, 15 bp, Homo sapiens
aggtcaaaagtagta

SEQ ID NO: 216610 - DNA, 15 bp, Homo sapiens
taggtcaaaagtagt

SEQ ID NO: 216611 - DNA, 15 bp, Homo sapiens
ataggtcaaaagtag

SEQ ID NO: 216612 - DNA, 15 bp, Homo sapiens
tataggtcaaaagta

SEQ ID NO: 216613 - DNA, 15 bp, Homo sapiens
ttataggtcaaaagt

SEQ ID NO: 216614 - DNA, 15 bp, Homo sapiens
attataggtcaaaag

SEQ ID NO: 216615 - DNA, 15 bp, Homo sapiens
tattataggtcaaaa

SEQ ID NO: 216616 - DNA, 15 bp, Homo sapiens
atattataggtcaaa

SEQ ID NO: 216617 - DNA, 15 bp, Homo sapiens
tatattataggtcaa

SEQ ID NO: 216618 - DNA, 15 bp, Homo sapiens
atatattataggtca

SEQ ID NO: 216619 - DNA, 15 bp, Homo sapiens
tatatattataggtc

SEQ ID NO: 216620 - DNA, 15 bp, Homo sapiens
gtatatattataggt

SEQ ID NO: 216621 - DNA, 15 bp, Homo sapiens
agtatatattatagg

SEQ ID NO: 216622 - DNA, 15 bp, Homo sapiens
tagtatatattatag

SEQ ID NO: 216623 - DNA, 15 bp, Homo sapiens
ttagtatatattata

SEQ ID NO: 216624 - DNA, 15 bp, Homo sapiens
tttagtatatattat

SEQ ID NO: 216625 - DNA, 15 bp, Homo sapiens
gtttagtatatatta

SEQ ID NO: 216626 - DNA, 15 bp, Homo sapiens
tgtttagtatatatt

SEQ ID NO: 216627 - DNA, 15 bp, Homo sapiens
atgtttagtatatat

SEQ ID NO: 216628 - DNA, 15 bp, Homo sapiens
tatgtttagtatata

SEQ ID NO: 216629 - DNA, 15 bp, Homo sapiens
ctatgtttagtatat

SEQ ID NO: 216630 - DNA, 15 bp, Homo sapiens
cctatgtttagtata

SEQ ID NO: 216631 - DNA, 15 bp, Homo sapiens
gcctatgtttagtat

SEQ ID NO: 216632 - DNA, 15 bp, Homo sapiens
agcctatgtttagta

SEQ ID NO: 216633 - DNA, 15 bp, Homo sapiens
tagcctatgtttagt

SEQ ID NO: 216634 - DNA, 15 bp, Homo sapiens
ttagcctatgtttag

SEQ ID NO: 216635 - DNA, 15 bp, Homo sapiens
cttagcctatgttta

SEQ ID NO: 216636 - DNA, 15 bp, Homo sapiens
tcttagcctatgttt

SEQ ID NO: 216637 - DNA, 15 bp, Homo sapiens
ctcttagcctatgtt

SEQ ID NO: 216638 - DNA, 15 bp, Homo sapiens
tctcttagcctatgt

SEQ ID NO: 216639 - DNA, 15 bp, Homo sapiens
atctcttagcctatg

SEQ ID NO: 216640 - DNA, 15 bp, Homo sapiens
catctcttagcctat

SEQ ID NO: 216641 - DNA, 15 bp, Homo sapiens
ccatctcttagccta

SEQ ID NO: 216642 - DNA, 15 bp, Homo sapiens
tccatctcttagcct

SEQ ID NO: 216643 - DNA, 15 bp, Homo sapiens
ttccatctcttagcc

SEQ ID NO: 216644 - DNA, 15 bp, Homo sapiens
tttccatctcttagc

SEQ ID NO: 216645 - DNA, 15 bp, Homo sapiens
ttttccatctcttag

SEQ ID NO: 216646 - DNA, 15 bp, Homo sapiens
gttttccatctctta

SEQ ID NO: 216647 - DNA, 15 bp, Homo sapiens
ggttttccatctctt

SEQ ID NO: 216648 - DNA, 15 bp, Homo sapiens
aggttttccatctct

SEQ ID NO: 216649 - DNA, 15 bp, Homo sapiens
caggttttccatctc

SEQ ID NO: 216650 - DNA, 15 bp, Homo sapiens
ccaggttttccatct

SEQ ID NO: 216651 - DNA, 15 bp, Homo sapiens
cccaggttttccatc

SEQ ID NO: 216652 - DNA, 15 bp, Homo sapiens
gcccaggttttccat

SEQ ID NO: 216653 - DNA, 15 bp, Homo sapiens
agcccaggttttcca

SEQ ID NO: 216654 - DNA, 15 bp, Homo sapiens
cagcccaggttttcc

SEQ ID NO: 216655 - DNA, 15 bp, Homo sapiens
ccagcccaggttttc

SEQ ID NO: 216656 - DNA, 15 bp, Homo sapiens
cccagcccaggtttt

SEQ ID NO: 216657 - DNA, 15 bp, Homo sapiens
acccagcccaggttt

SEQ ID NO: 216658 - DNA, 15 bp, Homo sapiens
cacccagcccaggtt

SEQ ID NO: 216659 - DNA, 15 bp, Homo sapiens
gcacccagcccaggt

SEQ ID NO: 216660 - DNA, 15 bp, Homo sapiens
tgcacccagcccagg

SEQ ID NO: 216661 - DNA, 15 bp, Homo sapiens
atgcacccagcccag

SEQ ID NO: 216662 - DNA, 15 bp, Homo sapiens
catgcacccagccca

SEQ ID NO: 216663 - DNA, 15 bp, Homo sapiens
ccatgcacccagccc

SEQ ID NO: 216664 - DNA, 15 bp, Homo sapiens
gccatgcacccagcc

SEQ ID NO: 216665 - DNA, 15 bp, Homo sapiens
agccatgcacccagc

SEQ ID NO: 216666 - DNA, 15 bp, Homo sapiens
gagccatgcacccag

SEQ ID NO: 216667 - DNA, 15 bp, Homo sapiens
tgagccatgcaccca

SEQ ID NO: 216668 - DNA, 15 bp, Homo sapiens
gtgagccatgcaccc

SEQ ID NO: 216669 - DNA, 15 bp, Homo sapiens
cgtgagccatgcacc

SEQ ID NO: 216670 - DNA, 15 bp, Homo sapiens
gcgtgagccatgcac

SEQ ID NO: 216671 - DNA, 15 bp, Homo sapiens
ggcgtgagccatgca

SEQ ID NO: 216672 - DNA, 15 bp, Homo sapiens
aggcgtgagccatgc

SEQ ID NO: 216673 - DNA, 15 bp, Homo sapiens
caggcgtgagccatg

SEQ ID NO: 216674 - DNA, 15 bp, Homo sapiens
agggattacaggcgt

SEQ ID NO: 216675 - DNA, 15 bp, Homo sapiens
cagggattacaggcg

SEQ ID NO: 216676 - DNA, 15 bp, Homo sapiens
gcagggattacaggc

SEQ ID NO: 216677 - DNA, 15 bp, Homo sapiens
tgcagggattacagg

SEQ ID NO: 216678 - DNA, 15 bp, Homo sapiens
gtgcagggattacag

SEQ ID NO: 216679 - DNA, 15 bp, Homo sapiens
agtgcagggattaca

SEQ ID NO: 216680 - DNA, 15 bp, Homo sapiens
aagtgcagggattac

SEQ ID NO: 216681 - DNA, 15 bp, Homo sapiens
aaagtgcagggatta

SEQ ID NO: 216682 - DNA, 15 bp, Homo sapiens
caaagtgcagggatt

SEQ ID NO: 216683 - DNA, 15 bp, Homo sapiens
ccaaagtgcagggat

SEQ ID NO: 216684 - DNA, 15 bp, Homo sapiens
cccaaagtgcaggga

SEQ ID NO: 216685 - DNA, 15 bp, Homo sapiens
tcccaaagtgcaggg

SEQ ID NO: 216686 - DNA, 15 bp, Homo sapiens
atcccaaagtgcagg

SEQ ID NO: 216687 - DNA, 15 bp, Homo sapiens
catcccaaagtgcag

SEQ ID NO: 216688 - DNA, 15 bp, Homo sapiens
gcatcccaaagtgca

SEQ ID NO: 216689 - DNA, 15 bp, Homo sapiens
ggcatcccaaagtgc

SEQ ID NO: 216690 - DNA, 15 bp, Homo sapiens
cggcatcccaaagtg

SEQ ID NO: 216691 - DNA, 15 bp, Homo sapiens
tcggcatcccaaagt

SEQ ID NO: 216692 - DNA, 15 bp, Homo sapiens
ctcggcatcccaaag

SEQ ID NO: 216693 - DNA, 15 bp, Homo sapiens
cctcggcatcccaaa

SEQ ID NO: 216694 - DNA, 15 bp, Homo sapiens
gcctcggcatcccaa

SEQ ID NO: 216695 - DNA, 15 bp, Homo sapiens
tgcctcggcatccca

SEQ ID NO: 216696 - DNA, 15 bp, Homo sapiens
ctgcctcggcatccc

SEQ ID NO: 216697 - DNA, 15 bp, Homo sapiens
cctgcctcggcatcc

SEQ ID NO: 216698 - DNA, 15 bp, Homo sapiens
acctgcctcggcatc

SEQ ID NO: 216699 - DNA, 15 bp, Homo sapiens
cacctgcctcggcat

SEQ ID NO: 216700 - DNA, 15 bp, Homo sapiens
ccacctgcctcggca

SEQ ID NO: 216701 - DNA, 15 bp, Homo sapiens
tccacctgcctcggc

SEQ ID NO: 216702 - DNA, 15 bp, Homo sapiens
atccacctgcctcgg

SEQ ID NO: 216703 - DNA, 15 bp, Homo sapiens
gatccacctgcctcg

SEQ ID NO: 216704 - DNA, 15 bp, Homo sapiens
tgatccacctgcctc

SEQ ID NO: 216705 - DNA, 15 bp, Homo sapiens
gtgatccacctgcct

SEQ ID NO: 216706 - DNA, 15 bp, Homo sapiens
ggtgatccacctgcc

SEQ ID NO: 216707 - DNA, 15 bp, Homo sapiens
aggtgatccacctgc

SEQ ID NO: 216708 - DNA, 15 bp, Homo sapiens
caggtgatccacctg

SEQ ID NO: 216709 - DNA, 15 bp, Homo sapiens
tcaggtgatccacct

SEQ ID NO: 216710 - DNA, 15 bp, Homo sapiens
ctggtcttgaactcc

SEQ ID NO: 216711 - DNA, 15 bp, Homo sapiens
gctggtcttgaactc

SEQ ID NO: 216712 - DNA, 15 bp, Homo sapiens
ggctggtcttgaact

SEQ ID NO: 216713 - DNA, 15 bp, Homo sapiens
aggctggtcttgaac

SEQ ID NO: 216714 - DNA, 15 bp, Homo sapiens
caggctggtcttgaa

SEQ ID NO: 216715 - DNA, 15 bp, Homo sapiens
ccaggctggtcttga

SEQ ID NO: 216716 - DNA, 15 bp, Homo sapiens
cccaggctggtcttg

SEQ ID NO: 216717 - DNA, 15 bp, Homo sapiens
gcccaggctggtctt

SEQ ID NO: 216718 - DNA, 15 bp, Homo sapiens
tgcccaggctggtct

SEQ ID NO: 216719 - DNA, 15 bp, Homo sapiens
ttgcccaggctggtc

SEQ ID NO: 216720 - DNA, 15 bp, Homo sapiens
gttgcccaggctggt

SEQ ID NO: 216721 - DNA, 15 bp, Homo sapiens
atgttgcccaggctg

SEQ ID NO: 216722 - DNA, 15 bp, Homo sapiens
catgttgcccaggct

SEQ ID NO: 216723 - DNA, 15 bp, Homo sapiens
ccatgttgcccaggc

SEQ ID NO: 216724 - DNA, 15 bp, Homo sapiens
accatgttgcccagg

SEQ ID NO: 216725 - DNA, 15 bp, Homo sapiens
caccatgttgcccag

SEQ ID NO: 216726 - DNA, 15 bp, Homo sapiens
tcaccatgttgccca

SEQ ID NO: 216727 - DNA, 15 bp, Homo sapiens
ttcaccatgttgccc

SEQ ID NO: 216728 - DNA, 15 bp, Homo sapiens
tttcaccatgttgcc

SEQ ID NO: 216729 - DNA, 15 bp, Homo sapiens
gtttcaccatgttgc

SEQ ID NO: 216730 - DNA, 15 bp, Homo sapiens
aggtttcaccatgtt

SEQ ID NO: 216731 - DNA, 15 bp, Homo sapiens
gaggtttcaccatgt

SEQ ID NO: 216732 - DNA, 15 bp, Homo sapiens
cgaggtttcaccatg

SEQ ID NO: 216733 - DNA, 15 bp, Homo sapiens
acgaggtttcaccat

SEQ ID NO: 216734 - DNA, 15 bp, Homo sapiens
gacgaggtttcacca

SEQ ID NO: 216735 - DNA, 15 bp, Homo sapiens
agacgaggtttcacc

SEQ ID NO: 216736 - DNA, 15 bp, Homo sapiens
gagacgaggtttcac

SEQ ID NO: 216737 - DNA, 15 bp, Homo sapiens
agagacgaggtttca

SEQ ID NO: 216738 - DNA, 15 bp, Homo sapiens
tagagacgaggtttc

SEQ ID NO: 216739 - DNA, 15 bp, Homo sapiens
gtagagacgaggttt

SEQ ID NO: 216740 - DNA, 15 bp, Homo sapiens
agtagagacgaggtt

SEQ ID NO: 216741 - DNA, 15 bp, Homo sapiens
tagtagagacgaggt

SEQ ID NO: 216742 - DNA, 15 bp, Homo sapiens
ttagtagagacgagg

SEQ ID NO: 216743 - DNA, 15 bp, Homo sapiens
tttagtagagacgag

SEQ ID NO: 216744 - DNA, 15 bp, Homo sapiens
ttttagtagagacga

SEQ ID NO: 216745 - DNA, 15 bp, Homo sapiens
gcccggctaattttt

SEQ ID NO: 216746 - DNA, 15 bp, Homo sapiens
ggcccggctaatttt

SEQ ID NO: 216747 - DNA, 15 bp, Homo sapiens
aggcccggctaattt

SEQ ID NO: 216748 - DNA, 15 bp, Homo sapiens
caggcccggctaatt

SEQ ID NO: 216749 - DNA, 15 bp, Homo sapiens
ccaggcccggctaat

SEQ ID NO: 216750 - DNA, 15 bp, Homo sapiens
accaggcccggctaa

SEQ ID NO: 216751 - DNA, 15 bp, Homo sapiens
caccaggcccggcta

SEQ ID NO: 216752 - DNA, 15 bp, Homo sapiens
ccaccaggcccggct

SEQ ID NO: 216753 - DNA, 15 bp, Homo sapiens
gccaccaggcccggc

SEQ ID NO: 216754 - DNA, 15 bp, Homo sapiens
cgccaccaggcccgg

SEQ ID NO: 216755 - DNA, 15 bp, Homo sapiens
ccgccaccaggcccg

SEQ ID NO: 216756 - DNA, 15 bp, Homo sapiens
cccgccaccaggccc

SEQ ID NO: 216757 - DNA, 15 bp, Homo sapiens
gcccgccaccaggcc

SEQ ID NO: 216758 - DNA, 15 bp, Homo sapiens
cgcccgccaccaggc

SEQ ID NO: 216759 - DNA, 15 bp, Homo sapiens
gcgcccgccaccagg

SEQ ID NO: 216760 - DNA, 15 bp, Homo sapiens
ggcgcccgccaccag

SEQ ID NO: 216761 - DNA, 15 bp, Homo sapiens
aggcgcccgccacca

SEQ ID NO: 216762 - DNA, 15 bp, Homo sapiens
caggcgcccgccacc

SEQ ID NO: 216763 - DNA, 15 bp, Homo sapiens
acaggcgcccgccac

SEQ ID NO: 216764 - DNA, 15 bp, Homo sapiens
tacaggcgcccgcca

SEQ ID NO: 216765 - DNA, 15 bp, Homo sapiens
ttacaggcgcccgcc

SEQ ID NO: 216766 - DNA, 15 bp, Homo sapiens
attacaggcgcccgc

SEQ ID NO: 216767 - DNA, 15 bp, Homo sapiens
gattacaggcgcccg

SEQ ID NO: 216768 - DNA, 15 bp, Homo sapiens
agattacaggcgccc

SEQ ID NO: 216769 - DNA, 15 bp, Homo sapiens
gagattacaggcgcc

SEQ ID NO: 216770 - DNA, 15 bp, Homo sapiens
tgagattacaggcgc

SEQ ID NO: 216771 - DNA, 15 bp, Homo sapiens
ctgagattacaggcg

SEQ ID NO: 216772 - DNA, 15 bp, Homo sapiens
ttgattctcctgcct

SEQ ID NO: 216773 - DNA, 15 bp, Homo sapiens
attgattctcctgcc

SEQ ID NO: 216774 - DNA, 15 bp, Homo sapiens
aattgattctcctgc

SEQ ID NO: 216775 - DNA, 15 bp, Homo sapiens
caattgattctcctg

SEQ ID NO: 216776 - DNA, 15 bp, Homo sapiens
tcaattgattctcct

SEQ ID NO: 216777 - DNA, 15 bp, Homo sapiens
ttcaattgattctcc

SEQ ID NO: 216778 - DNA, 15 bp, Homo sapiens
gttcaattgattctc

SEQ ID NO: 216779 - DNA, 15 bp, Homo sapiens
ggttcaattgattct

SEQ ID NO: 216780 - DNA, 15 bp, Homo sapiens
gggttcaattgattc

SEQ ID NO: 216781 - DNA, 15 bp, Homo sapiens
tgggttcaattgatt

SEQ ID NO: 216782 - DNA, 15 bp, Homo sapiens
ctgggttcaattgat

SEQ ID NO: 216783 - DNA, 15 bp, Homo sapiens
cctgggttcaattga

SEQ ID NO: 216784 - DNA, 15 bp, Homo sapiens
tcctgggttcaattg

SEQ ID NO: 216785 - DNA, 15 bp, Homo sapiens
ctcctgggttcaatt

SEQ ID NO: 216786 - DNA, 15 bp, Homo sapiens
cctcctgggttcaat

SEQ ID NO: 216787 - DNA, 15 bp, Homo sapiens
cgctcactgcaacct

SEQ ID NO: 216788 - DNA, 15 bp, Homo sapiens
ccgctcactgcaacc

SEQ ID NO: 216789 - DNA, 15 bp, Homo sapiens
tccgctcactgcaac

SEQ ID NO: 216790 - DNA, 15 bp, Homo sapiens
ttccgctcactgcaa

SEQ ID NO: 216791 - DNA, 15 bp, Homo sapiens
tttccgctcactgca

SEQ ID NO: 216792 - DNA, 15 bp, Homo sapiens
atttccgctcactgc

SEQ ID NO: 216793 - DNA, 15 bp, Homo sapiens
gatttccgctcactg

SEQ ID NO: 216794 - DNA, 15 bp, Homo sapiens
tgatttccgctcact

SEQ ID NO: 216795 - DNA, 15 bp, Homo sapiens
gtgatttccgctcac

SEQ ID NO: 216796 - DNA, 15 bp, Homo sapiens
cgtgatttccgctca

SEQ ID NO: 216797 - DNA, 15 bp, Homo sapiens
gcgtgatttccgctc

SEQ ID NO: 216798 - DNA, 15 bp, Homo sapiens
ggcgtgatttccgct

SEQ ID NO: 216799 - DNA, 15 bp, Homo sapiens
tggcgtgatttccgc

SEQ ID NO: 216800 - DNA, 15 bp, Homo sapiens
gtggcgtgatttccg

SEQ ID NO: 216801 - DNA, 15 bp, Homo sapiens
agtggcgtgatttcc

SEQ ID NO: 216802 - DNA, 15 bp, Homo sapiens
cagtggcgtgatttc

SEQ ID NO: 216803 - DNA, 15 bp, Homo sapiens
gcagtggcgtgattt

SEQ ID NO: 216804 - DNA, 15 bp, Homo sapiens
tgcagtggcgtgatt

SEQ ID NO: 216805 - DNA, 15 bp, Homo sapiens
atgcagtggcgtgat

SEQ ID NO: 216806 - DNA, 15 bp, Homo sapiens
aatgcagtggcgtga

SEQ ID NO: 216807 - DNA, 15 bp, Homo sapiens
gaatgcagtggcgtg

SEQ ID NO: 216808 - DNA, 15 bp, Homo sapiens
ggaatgcagtggcgt

SEQ ID NO: 216809 - DNA, 15 bp, Homo sapiens
tggaatgcagtggcg

SEQ ID NO: 216810 - DNA, 15 bp, Homo sapiens
ctggaatgcagtggc

SEQ ID NO: 216811 - DNA, 15 bp, Homo sapiens
gctggaatgcagtgg

SEQ ID NO: 216812 - DNA, 15 bp, Homo sapiens
ggctggaatgcagtg

SEQ ID NO: 216813 - DNA, 15 bp, Homo sapiens
aggctggaatgcagt

SEQ ID NO: 216814 - DNA, 15 bp, Homo sapiens
caggctggaatgcag

SEQ ID NO: 216815 - DNA, 15 bp, Homo sapiens
ccaggctggaatgca

SEQ ID NO: 216816 - DNA, 15 bp, Homo sapiens
cccaggctggaatgc

SEQ ID NO: 216817 - DNA, 15 bp, Homo sapiens
acccaggctggaatg

SEQ ID NO: 216818 - DNA, 15 bp, Homo sapiens
cacccaggctggaat

SEQ ID NO: 216819 - DNA, 15 bp, Homo sapiens
tcacccaggctggaa

SEQ ID NO: 216820 - DNA, 15 bp, Homo sapiens
gttctgtcacccagg

SEQ ID NO: 216821 - DNA, 15 bp, Homo sapiens
tgttctgtcacccag

SEQ ID NO: 216822 - DNA, 15 bp, Homo sapiens
ttgttctgtcaccca

SEQ ID NO: 216823 - DNA, 15 bp, Homo sapiens
cttgttctgtcaccc

SEQ ID NO: 216824 - DNA, 15 bp, Homo sapiens
tcttgttctgtcacc

SEQ ID NO: 216825 - DNA, 15 bp, Homo sapiens
gtcttgttctgtcac

SEQ ID NO: 216826 - DNA, 15 bp, Homo sapiens
agtcttgttctgtca

SEQ ID NO: 216827 - DNA, 15 bp, Homo sapiens
gagtcttgttctgtc

SEQ ID NO: 216828 - DNA, 15 bp, Homo sapiens
ggagtcttgttctgt

SEQ ID NO: 216829 - DNA, 15 bp, Homo sapiens
tggagtcttgttctg

SEQ ID NO: 216830 - DNA, 15 bp, Homo sapiens
atggagtcttgttct

SEQ ID NO: 216831 - DNA, 15 bp, Homo sapiens
gatggagtcttgttc

SEQ ID NO: 216832 - DNA, 15 bp, Homo sapiens
agatggagtcttgtt

SEQ ID NO: 216833 - DNA, 15 bp, Homo sapiens
gagatggagtcttgt

SEQ ID NO: 216834 - DNA, 15 bp, Homo sapiens
atctttttttttttt

SEQ ID NO: 216835 - DNA, 15 bp, Homo sapiens
catcttttttttttt

SEQ ID NO: 216836 - DNA, 15 bp, Homo sapiens
ccatctttttttttt

SEQ ID NO: 216837 - DNA, 15 bp, Homo sapiens
tccatcttttttttt

SEQ ID NO: 216838 - DNA, 15 bp, Homo sapiens
ttccatctttttttt

SEQ ID NO: 216839 - DNA, 15 bp, Homo sapiens
tttccatcttttttt

SEQ ID NO: 216840 - DNA, 15 bp, Homo sapiens
ttttccatctttttt

SEQ ID NO: 216841 - DNA, 15 bp, Homo sapiens
tttttccatcttttt

SEQ ID NO: 216842 - DNA, 15 bp, Homo sapiens
gtttttccatctttt

SEQ ID NO: 216843 - DNA, 15 bp, Homo sapiens
agtttttccatcttt

SEQ ID NO: 216844 - DNA, 15 bp, Homo sapiens
tagtttttccatctt

SEQ ID NO: 216845 - DNA, 15 bp, Homo sapiens
ttagtttttccatct

SEQ ID NO: 216846 - DNA, 15 bp, Homo sapiens
cttagtttttccatc

SEQ ID NO: 216847 - DNA, 15 bp, Homo sapiens
ccttagtttttccat

SEQ ID NO: 216848 - DNA, 15 bp, Homo sapiens
accttagtttttcca

SEQ ID NO: 216849 - DNA, 15 bp, Homo sapiens
taccttagtttttcc

SEQ ID NO: 216850 - DNA, 15 bp, Homo sapiens
ttaccttagtttttc

SEQ ID NO: 216851 - DNA, 15 bp, Homo sapiens
tttaccttagttttt

SEQ ID NO: 216852 - DNA, 15 bp, Homo sapiens
atttaccttagtttt

SEQ ID NO: 216853 - DNA, 15 bp, Homo sapiens
tatttaccttagttt

SEQ ID NO: 216854 - DNA, 15 bp, Homo sapiens
atatttaccttagtt

SEQ ID NO: 216855 - DNA, 15 bp, Homo sapiens
gatatttaccttagt

SEQ ID NO: 216856 - DNA, 15 bp, Homo sapiens
tgatatttaccttag

SEQ ID NO: 216857 - DNA, 15 bp, Homo sapiens
atgatatttacctta

SEQ ID NO: 216858 - DNA, 15 bp, Homo sapiens
gatgatatttacctt

SEQ ID NO: 216859 - DNA, 15 bp, Homo sapiens
tgatgatatttacct

SEQ ID NO: 216860 - DNA, 15 bp, Homo sapiens
ctgatgatatttacc

SEQ ID NO: 216861 - DNA, 15 bp, Homo sapiens
actgatgatatttac

SEQ ID NO: 216862 - DNA, 15 bp, Homo sapiens
tactgatgatattta

SEQ ID NO: 216863 - DNA, 15 bp, Homo sapiens
atactgatgatattt

SEQ ID NO: 216864 - DNA, 15 bp, Homo sapiens
tatactgatgatatt

SEQ ID NO: 216865 - DNA, 15 bp, Homo sapiens
ttatactgatgatat

SEQ ID NO: 216866 - DNA, 15 bp, Homo sapiens
tttatactgatgata

SEQ ID NO: 216867 - DNA, 15 bp, Homo sapiens
gtttatactgatgat

SEQ ID NO: 216868 - DNA, 15 bp, Homo sapiens
ggtttatactgatga

SEQ ID NO: 216869 - DNA, 15 bp, Homo sapiens
gggtttatactgatg

SEQ ID NO: 216870 - DNA, 15 bp, Homo sapiens
tgggtttatactgat

SEQ ID NO: 216871 - DNA, 15 bp, Homo sapiens
gtgggtttatactga

SEQ ID NO: 216872 - DNA, 15 bp, Homo sapiens
ggtgggtttatactg

SEQ ID NO: 216873 - DNA, 15 bp, Homo sapiens
aggtgggtttatact

SEQ ID NO: 216874 - DNA, 15 bp, Homo sapiens
aaggtgggtttatac

SEQ ID NO: 216875 - DNA, 15 bp, Homo sapiens
caaggtgggtttata

SEQ ID NO: 216876 - DNA, 15 bp, Homo sapiens
ccaaggtgggtttat

SEQ ID NO: 216877 - DNA, 15 bp, Homo sapiens
accaaggtgggttta

SEQ ID NO: 216878 - DNA, 15 bp, Homo sapiens
caccaaggtgggttt

SEQ ID NO: 216879 - DNA, 15 bp, Homo sapiens
tcaccaaggtgggtt

SEQ ID NO: 216880 - DNA, 15 bp, Homo sapiens
ttcaccaaggtgggt

SEQ ID NO: 216881 - DNA, 15 bp, Homo sapiens
cttcaccaaggtggg

SEQ ID NO: 216882 - DNA, 15 bp, Homo sapiens
gcttcaccaaggtgg

SEQ ID NO: 216883 - DNA, 15 bp, Homo sapiens
agcttcaccaaggtg

SEQ ID NO: 216884 - DNA, 15 bp, Homo sapiens
tagcttcaccaaggt

SEQ ID NO: 216885 - DNA, 15 bp, Homo sapiens
ctagcttcaccaagg

SEQ ID NO: 216886 - DNA, 15 bp, Homo sapiens
tctagcttcaccaag

SEQ ID NO: 216887 - DNA, 15 bp, Homo sapiens
gtctagcttcaccaa

SEQ ID NO: 216888 - DNA, 15 bp, Homo sapiens
agtctagcttcacca

SEQ ID NO: 216889 - DNA, 15 bp, Homo sapiens
tagtctagcttcacc

SEQ ID NO: 216890 - DNA, 15 bp, Homo sapiens
ttagtctagcttcac

SEQ ID NO: 216891 - DNA, 15 bp, Homo sapiens
attagtctagcttca

SEQ ID NO: 216892 - DNA, 15 bp, Homo sapiens
cattagtctagcttc

SEQ ID NO: 216893 - DNA, 15 bp, Homo sapiens
tcattagtctagctt

SEQ ID NO: 216894 - DNA, 15 bp, Homo sapiens
ttcattagtctagct

SEQ ID NO: 216895 - DNA, 15 bp, Homo sapiens
cttcattagtctagc

SEQ ID NO: 216896 - DNA, 15 bp, Homo sapiens
tcttcattagtctag

SEQ ID NO: 216897 - DNA, 15 bp, Homo sapiens
ctcttcattagtcta

SEQ ID NO: 216898 - DNA, 15 bp, Homo sapiens
cctcttcattagtct

SEQ ID NO: 216899 - DNA, 15 bp, Homo sapiens
tcctcttcattagtc

SEQ ID NO: 216900 - DNA, 15 bp, Homo sapiens
ttcctcttcattagt

SEQ ID NO: 216901 - DNA, 15 bp, Homo sapiens
tttcctcttcattag

SEQ ID NO: 216902 - DNA, 15 bp, Homo sapiens
ctttcctcttcatta

SEQ ID NO: 216903 - DNA, 15 bp, Homo sapiens
cctttcctcttcatt

SEQ ID NO: 216904 - DNA, 15 bp, Homo sapiens
gcctttcctcttcat

SEQ ID NO: 216905 - DNA, 15 bp, Homo sapiens
tgcctttcctcttca

SEQ ID NO: 216906 - DNA, 15 bp, Homo sapiens
ctgcctttcctcttc

SEQ ID NO: 216907 - DNA, 15 bp, Homo sapiens
actgcctttcctctt

SEQ ID NO: 216908 - DNA, 15 bp, Homo sapiens
tactgcctttcctct

SEQ ID NO: 216909 - DNA, 15 bp, Homo sapiens
atactgcctttcctc

SEQ ID NO: 216910 - DNA, 15 bp, Homo sapiens
tatactgcctttcct

SEQ ID NO: 216911 - DNA, 15 bp, Homo sapiens
atatactgcctttcc

SEQ ID NO: 216912 - DNA, 15 bp, Homo sapiens
catatactgcctttc

SEQ ID NO: 216913 - DNA, 15 bp, Homo sapiens
tcatatactgccttt

SEQ ID NO: 216914 - DNA, 15 bp, Homo sapiens
ttcatatactgcctt

SEQ ID NO: 216915 - DNA, 15 bp, Homo sapiens
tttcatatactgcct

SEQ ID NO: 216916 - DNA, 15 bp, Homo sapiens
ttttcatatactgcc

SEQ ID NO: 216917 - DNA, 15 bp, Homo sapiens
attttcatatactgc

SEQ ID NO: 216918 - DNA, 15 bp, Homo sapiens
aattttcatatactg

SEQ ID NO: 216919 - DNA, 15 bp, Homo sapiens
taattttcatatact

SEQ ID NO: 216920 - DNA, 15 bp, Homo sapiens
ataattttcatatac

SEQ ID NO: 216921 - DNA, 15 bp, Homo sapiens
cataattttcatata

SEQ ID NO: 216922 - DNA, 15 bp, Homo sapiens
acataattttcatat

SEQ ID NO: 216923 - DNA, 15 bp, Homo sapiens
tacataattttcata

SEQ ID NO: 216924 - DNA, 15 bp, Homo sapiens
ttacataattttcat

SEQ ID NO: 216925 - DNA, 15 bp, Homo sapiens
tttacataattttca

SEQ ID NO: 216926 - DNA, 15 bp, Homo sapiens
atttacataattttc

SEQ ID NO: 216927 - DNA, 15 bp, Homo sapiens
aatttacataatttt

SEQ ID NO: 216928 - DNA, 15 bp, Homo sapiens
caatttacataattt

SEQ ID NO: 216929 - DNA, 15 bp, Homo sapiens
gcaatttacataatt

SEQ ID NO: 216930 - DNA, 15 bp, Homo sapiens
cgcaatttacataat

SEQ ID NO: 216931 - DNA, 15 bp, Homo sapiens
tcgcaatttacataa

SEQ ID NO: 216932 - DNA, 15 bp, Homo sapiens
atcgcaatttacata

SEQ ID NO: 216933 - DNA, 15 bp, Homo sapiens
tatcgcaatttacat

SEQ ID NO: 216934 - DNA, 15 bp, Homo sapiens
atatcgcaatttaca

SEQ ID NO: 216935 - DNA, 15 bp, Homo sapiens
catatcgcaatttac

SEQ ID NO: 216936 - DNA, 15 bp, Homo sapiens
tcatatcgcaattta

SEQ ID NO: 216937 - DNA, 15 bp, Homo sapiens
atcatatcgcaattt

SEQ ID NO: 216938 - DNA, 15 bp, Homo sapiens
tatcatatcgcaatt

SEQ ID NO: 216939 - DNA, 15 bp, Homo sapiens
ttatcatatcgcaat

SEQ ID NO: 216940 - DNA, 15 bp, Homo sapiens
tttatcatatcgcaa

SEQ ID NO: 216941 - DNA, 15 bp, Homo sapiens
ctttatcatatcgca

SEQ ID NO: 216942 - DNA, 15 bp, Homo sapiens
tctttatcatatcgc

SEQ ID NO: 216943 - DNA, 15 bp, Homo sapiens
atctttatcatatcg

SEQ ID NO: 216944 - DNA, 15 bp, Homo sapiens
tatctttatcatatc

SEQ ID NO: 216945 - DNA, 15 bp, Homo sapiens
ttatctttatcatat

SEQ ID NO: 216946 - DNA, 15 bp, Homo sapiens
cttatctttatcata

SEQ ID NO: 216947 - DNA, 15 bp, Homo sapiens
ccttatctttatcat

SEQ ID NO: 216948 - DNA, 15 bp, Homo sapiens
gccttatctttatca

SEQ ID NO: 216949 - DNA, 15 bp, Homo sapiens
tgccttatctttatc

SEQ ID NO: 216950 - DNA, 15 bp, Homo sapiens
atgccttatctttat

SEQ ID NO: 216951 - DNA, 15 bp, Homo sapiens
tatgccttatcttta

SEQ ID NO: 216952 - DNA, 15 bp, Homo sapiens
ttatgccttatcttt

SEQ ID NO: 216953 - DNA, 15 bp, Homo sapiens
cttatgccttatctt

SEQ ID NO: 216954 - DNA, 15 bp, Homo sapiens
tcttatgccttatct

SEQ ID NO: 216955 - DNA, 15 bp, Homo sapiens
ttcttatgccttatc

SEQ ID NO: 216956 - DNA, 15 bp, Homo sapiens
cttcttatgccttat

SEQ ID NO: 216957 - DNA, 15 bp, Homo sapiens
acttcttatgcctta

SEQ ID NO: 216958 - DNA, 15 bp, Homo sapiens
aacttcttatgcctt

SEQ ID NO: 216959 - DNA, 15 bp, Homo sapiens
taacttcttatgcct

SEQ ID NO: 216960 - DNA, 15 bp, Homo sapiens
ttaacttcttatgcc

SEQ ID NO: 216961 - DNA, 15 bp, Homo sapiens
tttaacttcttatgc

SEQ ID NO: 216962 - DNA, 15 bp, Homo sapiens
ctttaacttcttatg

SEQ ID NO: 216963 - DNA, 15 bp, Homo sapiens
actttaacttcttat

SEQ ID NO: 216964 - DNA, 15 bp, Homo sapiens
tactttaacttctta

SEQ ID NO: 216965 - DNA, 15 bp, Homo sapiens
atactttaacttctt

SEQ ID NO: 216966 - DNA, 15 bp, Homo sapiens
aatactttaacttct

SEQ ID NO: 216967 - DNA, 15 bp, Homo sapiens
caatactttaacttc

SEQ ID NO: 216968 - DNA, 15 bp, Homo sapiens
ccaatactttaactt

SEQ ID NO: 216969 - DNA, 15 bp, Homo sapiens
cccaatactttaact

SEQ ID NO: 216970 - DNA, 15 bp, Homo sapiens
tcccaatactttaac

SEQ ID NO: 216971 - DNA, 15 bp, Homo sapiens
atcccaatactttaa

SEQ ID NO: 216972 - DNA, 15 bp, Homo sapiens
gatcccaatacttta

SEQ ID NO: 216973 - DNA, 15 bp, Homo sapiens
ggatcccaatacttt

SEQ ID NO: 216974 - DNA, 15 bp, Homo sapiens
gggatcccaatactt

SEQ ID NO: 216975 - DNA, 15 bp, Homo sapiens
agggatcccaatact

SEQ ID NO: 216976 - DNA, 15 bp, Homo sapiens
tagggatcccaatac

SEQ ID NO: 216977 - DNA, 15 bp, Homo sapiens
ttagggatcccaata

SEQ ID NO: 216978 - DNA, 15 bp, Homo sapiens
gttagggatcccaat

SEQ ID NO: 216979 - DNA, 15 bp, Homo sapiens
ggttagggatcccaa

SEQ ID NO: 216980 - DNA, 15 bp, Homo sapiens
tggttagggatccca

SEQ ID NO: 216981 - DNA, 15 bp, Homo sapiens
ttggttagggatccc

SEQ ID NO: 216982 - DNA, 15 bp, Homo sapiens
tttggttagggatcc

SEQ ID NO: 216983 - DNA, 15 bp, Homo sapiens
atttggttagggatc

SEQ ID NO: 216984 - DNA, 15 bp, Homo sapiens
tatttggttagggat

SEQ ID NO: 216985 - DNA, 15 bp, Homo sapiens
ttatttggttaggga

SEQ ID NO: 216986 - DNA, 15 bp, Homo sapiens
tttatttggttaggg

SEQ ID NO: 216987 - DNA, 15 bp, Homo sapiens
ttttatttggttagg

SEQ ID NO: 216988 - DNA, 15 bp, Homo sapiens
cttttatttggttag

SEQ ID NO: 216989 - DNA, 15 bp, Homo sapiens
ccttttatttggtta

SEQ ID NO: 216990 - DNA, 15 bp, Homo sapiens
tccttttatttggtt

SEQ ID NO: 216991 - DNA, 15 bp, Homo sapiens
ctccttttatttggt

SEQ ID NO: 216992 - DNA, 15 bp, Homo sapiens
actccttttatttgg

SEQ ID NO: 216993 - DNA, 15 bp, Homo sapiens
cactccttttatttg

SEQ ID NO: 216994 - DNA, 15 bp, Homo sapiens
tcactccttttattt

SEQ ID NO: 216995 - DNA, 15 bp, Homo sapiens
atcactccttttatt

SEQ ID NO: 216996 - DNA, 15 bp, Homo sapiens
catcactccttttat

SEQ ID NO: 216997 - DNA, 15 bp, Homo sapiens
ccatcactcctttta

SEQ ID NO: 216998 - DNA, 15 bp, Homo sapiens
cccatcactcctttt

SEQ ID NO: 216999 - DNA, 15 bp, Homo sapiens
ccccatcactccttt

SEQ ID NO: 217000 - DNA, 15 bp, Homo sapiens
cccccatcactcctt

SEQ ID NO: 217001 - DNA, 15 bp, Homo sapiens
tcccccatcactcct

SEQ ID NO: 217002 - DNA, 15 bp, Homo sapiens
ttcccccatcactcc

SEQ ID NO: 217003 - DNA, 15 bp, Homo sapiens
gttcccccatcactc

SEQ ID NO: 217004 - DNA, 15 bp, Homo sapiens
ggttcccccatcact

SEQ ID NO: 217005 - DNA, 15 bp, Homo sapiens
gggttcccccatcac

SEQ ID NO: 217006 - DNA, 15 bp, Homo sapiens
agggttcccccatca

SEQ ID NO: 217007 - DNA, 15 bp, Homo sapiens
aagggttcccccatc

SEQ ID NO: 217008 - DNA, 15 bp, Homo sapiens
caagggttcccccat

SEQ ID NO: 217009 - DNA, 15 bp, Homo sapiens
tcaagggttccccca

SEQ ID NO: 217010 - DNA, 15 bp, Homo sapiens
ttcaagggttccccc

SEQ ID NO: 217011 - DNA, 15 bp, Homo sapiens
cttcaagggttcccc

SEQ ID NO: 217012 - DNA, 15 bp, Homo sapiens
gcttcaagggttccc

SEQ ID NO: 217013 - DNA, 15 bp, Homo sapiens
tgcttcaagggttcc

SEQ ID NO: 217014 - DNA, 15 bp, Homo sapiens
ttgcttcaagggttc

SEQ ID NO: 217015 - DNA, 15 bp, Homo sapiens
cttgcttcaagggtt

SEQ ID NO: 217016 - DNA, 15 bp, Homo sapiens
acttgcttcaagggt

SEQ ID NO: 217017 - DNA, 15 bp, Homo sapiens
aacttgcttcaaggg

SEQ ID NO: 217018 - DNA, 15 bp, Homo sapiens
taacttgcttcaagg

SEQ ID NO: 217019 - DNA, 15 bp, Homo sapiens
ataacttgcttcaag

SEQ ID NO: 217020 - DNA, 15 bp, Homo sapiens
aataacttgcttcaa

SEQ ID NO: 217021 - DNA, 15 bp, Homo sapiens
aaataacttgcttca

SEQ ID NO: 217022 - DNA, 15 bp, Homo sapiens
caaataacttgcttc

SEQ ID NO: 217023 - DNA, 15 bp, Homo sapiens
tcaaataacttgctt

SEQ ID NO: 217024 - DNA, 15 bp, Homo sapiens
ctcaaataacttgct

SEQ ID NO: 217025 - DNA, 15 bp, Homo sapiens
cctcaaataacttgc

SEQ ID NO: 217026 - DNA, 15 bp, Homo sapiens
tcctcaaataacttg

SEQ ID NO: 217027 - DNA, 15 bp, Homo sapiens
ttcctcaaataactt

SEQ ID NO: 217028 - DNA, 15 bp, Homo sapiens
attcctcaaataact

SEQ ID NO: 217029 - DNA, 15 bp, Homo sapiens
aattcctcaaataac

SEQ ID NO: 217030 - DNA, 15 bp, Homo sapiens
taattcctcaaataa

SEQ ID NO: 217031 - DNA, 15 bp, Homo sapiens
ctaattcctcaaata

SEQ ID NO: 217032 - DNA, 15 bp, Homo sapiens
gctaattcctcaaat

SEQ ID NO: 217033 - DNA, 15 bp, Homo sapiens
agctaattcctcaaa

SEQ ID NO: 217034 - DNA, 15 bp, Homo sapiens
tagctaattcctcaa

SEQ ID NO: 217035 - DNA, 15 bp, Homo sapiens
ctagctaattcctca

SEQ ID NO: 217036 - DNA, 15 bp, Homo sapiens
tctagctaattcctc

SEQ ID NO: 217037 - DNA, 15 bp, Homo sapiens
ctctagctaattcct

SEQ ID NO: 217038 - DNA, 15 bp, Homo sapiens
cctctagctaattcc

SEQ ID NO: 217039 - DNA, 15 bp, Homo sapiens
tcctctagctaattc

SEQ ID NO: 217040 - DNA, 15 bp, Homo sapiens
ttcctctagctaatt

SEQ ID NO: 217041 - DNA, 15 bp, Homo sapiens
tttcctctagctaat

SEQ ID NO: 217042 - DNA, 15 bp, Homo sapiens
ttttcctctagctaa

SEQ ID NO: 217043 - DNA, 15 bp, Homo sapiens
tttttcctctagcta

SEQ ID NO: 217044 - DNA, 15 bp, Homo sapiens
ctttttcctctagct

SEQ ID NO: 217045 - DNA, 15 bp, Homo sapiens
cctttttcctctagc

SEQ ID NO: 217046 - DNA, 15 bp, Homo sapiens
acctttttcctctag

SEQ ID NO: 217047 - DNA, 15 bp, Homo sapiens
tacctttttcctcta

SEQ ID NO: 217048 - DNA, 15 bp, Homo sapiens
ttacctttttcctct

SEQ ID NO: 217049 - DNA, 15 bp, Homo sapiens
cttacctttttcctc

SEQ ID NO: 217050 - DNA, 15 bp, Homo sapiens
tcttacctttttcct

SEQ ID NO: 217051 - DNA, 15 bp, Homo sapiens
ctcttacctttttcc

SEQ ID NO: 217052 - DNA, 15 bp, Homo sapiens
actcttacctttttc

SEQ ID NO: 217053 - DNA, 15 bp, Homo sapiens
tactcttaccttttt

SEQ ID NO: 217054 - DNA, 15 bp, Homo sapiens
atactcttacctttt

SEQ ID NO: 217055 - DNA, 15 bp, Homo sapiens
aatactcttaccttt

SEQ ID NO: 217056 - DNA, 15 bp, Homo sapiens
gaatactcttacctt

SEQ ID NO: 217057 - DNA, 15 bp, Homo sapiens
tgaatactcttacct

SEQ ID NO: 217058 - DNA, 15 bp, Homo sapiens
atgaatactcttacc

SEQ ID NO: 217059 - DNA, 15 bp, Homo sapiens
tatgaatactcttac

SEQ ID NO: 217060 - DNA, 15 bp, Homo sapiens
ctatgaatactctta

SEQ ID NO: 217061 - DNA, 15 bp, Homo sapiens
gctatgaatactctt

SEQ ID NO: 217062 - DNA, 15 bp, Homo sapiens
cgctatgaatactct

SEQ ID NO: 217063 - DNA, 15 bp, Homo sapiens
ccgctatgaatactc

SEQ ID NO: 217064 - DNA, 15 bp, Homo sapiens
tccgctatgaatact

SEQ ID NO: 217065 - DNA, 15 bp, Homo sapiens
ttccgctatgaatac

SEQ ID NO: 217066 - DNA, 15 bp, Homo sapiens
cttccgctatgaata

SEQ ID NO: 217067 - DNA, 15 bp, Homo sapiens
tcttccgctatgaat

SEQ ID NO: 217068 - DNA, 15 bp, Homo sapiens
ttcttccgctatgaa

SEQ ID NO: 217069 - DNA, 15 bp, Homo sapiens
tttcttccgctatga

SEQ ID NO: 217070 - DNA, 15 bp, Homo sapiens
gtttcttccgctatg

SEQ ID NO: 217071 - DNA, 15 bp, Homo sapiens
tgtttcttccgctat

SEQ ID NO: 217072 - DNA, 15 bp, Homo sapiens
ctgtttcttccgcta

SEQ ID NO: 217073 - DNA, 15 bp, Homo sapiens
gctgtttcttccgct

SEQ ID NO: 217074 - DNA, 15 bp, Homo sapiens
tgctgtttcttccgc

SEQ ID NO: 217075 - DNA, 15 bp, Homo sapiens
ttgctgtttcttccg

SEQ ID NO: 217076 - DNA, 15 bp, Homo sapiens
tttgctgtttcttcc

SEQ ID NO: 217077 - DNA, 15 bp, Homo sapiens
ttttgctgtttcttc

SEQ ID NO: 217078 - DNA, 15 bp, Homo sapiens
cttttgctgtttctt

SEQ ID NO: 217079 - DNA, 15 bp, Homo sapiens
acttttgctgtttct

SEQ ID NO: 217080 - DNA, 15 bp, Homo sapiens
cacttttgctgtttc

SEQ ID NO: 217081 - DNA, 15 bp, Homo sapiens
tcacttttgctgttt

SEQ ID NO: 217082 - DNA, 15 bp, Homo sapiens
ctcacttttgctgtt

SEQ ID NO: 217083 - DNA, 15 bp, Homo sapiens
tctcacttttgctgt

SEQ ID NO: 217084 - DNA, 15 bp, Homo sapiens
gtctcacttttgctg

SEQ ID NO: 217085 - DNA, 15 bp, Homo sapiens
ggtctcacttttgct

SEQ ID NO: 217086 - DNA, 15 bp, Homo sapiens
aggtctcacttttgc

SEQ ID NO: 217087 - DNA, 15 bp, Homo sapiens
aaggtctcacttttg

SEQ ID NO: 217088 - DNA, 15 bp, Homo sapiens
caaggtctcactttt

SEQ ID NO: 217089 - DNA, 15 bp, Homo sapiens
tcaaggtctcacttt

SEQ ID NO: 217090 - DNA, 15 bp, Homo sapiens
ttcaaggtctcactt

SEQ ID NO: 217091 - DNA, 15 bp, Homo sapiens
cttcaaggtctcact

SEQ ID NO: 217092 - DNA, 15 bp, Homo sapiens
acttcaaggtctcac

SEQ ID NO: 217093 - DNA, 15 bp, Homo sapiens
cacttcaaggtctca

SEQ ID NO: 217094 - DNA, 15 bp, Homo sapiens
tcacttcaaggtctc

SEQ ID NO: 217095 - DNA, 15 bp, Homo sapiens
gtcacttcaaggtct

SEQ ID NO: 217096 - DNA, 15 bp, Homo sapiens
tgtcacttcaaggtc

SEQ ID NO: 217097 - DNA, 15 bp, Homo sapiens
ttgtcacttcaaggt

SEQ ID NO: 217098 - DNA, 15 bp, Homo sapiens
tttgtcacttcaagg

SEQ ID NO: 217099 - DNA, 15 bp, Homo sapiens
gtttgtcacttcaag

SEQ ID NO: 217100 - DNA, 15 bp, Homo sapiens
tgtttgtcacttcaa

SEQ ID NO: 217101 - DNA, 15 bp, Homo sapiens
atgtttgtcacttca

SEQ ID NO: 217102 - DNA, 15 bp, Homo sapiens
gatgtttgtcacttc

SEQ ID NO: 217103 - DNA, 15 bp, Homo sapiens
agatgtttgtcactt

SEQ ID NO: 217104 - DNA, 15 bp, Homo sapiens
aagatgtttgtcact

SEQ ID NO: 217105 - DNA, 15 bp, Homo sapiens
caagatgtttgtcac

SEQ ID NO: 217106 - DNA, 15 bp, Homo sapiens
ccaagatgtttgtca

SEQ ID NO: 217107 - DNA, 15 bp, Homo sapiens
accaagatgtttgtc

SEQ ID NO: 217108 - DNA, 15 bp, Homo sapiens
caccaagatgtttgt

SEQ ID NO: 217109 - DNA, 15 bp, Homo sapiens
gcaccaagatgtttg

SEQ ID NO: 217110 - DNA, 15 bp, Homo sapiens
cgcaccaagatgttt

SEQ ID NO: 217111 - DNA, 15 bp, Homo sapiens
acgcaccaagatgtt

SEQ ID NO: 217112 - DNA, 15 bp, Homo sapiens
aacgcaccaagatgt

SEQ ID NO: 217113 - DNA, 15 bp, Homo sapiens
taacgcaccaagatg

SEQ ID NO: 217114 - DNA, 15 bp, Homo sapiens
ataacgcaccaagat

SEQ ID NO: 217115 - DNA, 15 bp, Homo sapiens
gataacgcaccaaga

SEQ ID NO: 217116 - DNA, 15 bp, Homo sapiens
tgataacgcaccaag

SEQ ID NO: 217117 - DNA, 15 bp, Homo sapiens
ttgataacgcaccaa

SEQ ID NO: 217118 - DNA, 15 bp, Homo sapiens
tttgataacgcacca

SEQ ID NO: 217119 - DNA, 15 bp, Homo sapiens
ctttgataacgcacc

SEQ ID NO: 217120 - DNA, 15 bp, Homo sapiens
gctttgataacgcac

SEQ ID NO: 217121 - DNA, 15 bp, Homo sapiens
agctttgataacgca

SEQ ID NO: 217122 - DNA, 15 bp, Homo sapiens
cagctttgataacgc

SEQ ID NO: 217123 - DNA, 15 bp, Homo sapiens
tcagctttgataacg

SEQ ID NO: 217124 - DNA, 15 bp, Homo sapiens
ttcagctttgataac

SEQ ID NO: 217125 - DNA, 15 bp, Homo sapiens
cttcagctttgataa

SEQ ID NO: 217126 - DNA, 15 bp, Homo sapiens
ccttcagctttgata

SEQ ID NO: 217127 - DNA, 15 bp, Homo sapiens
tccttcagctttgat

SEQ ID NO: 217128 - DNA, 15 bp, Homo sapiens
atccttcagctttga

SEQ ID NO: 217129 - DNA, 15 bp, Homo sapiens
catccttcagctttg

SEQ ID NO: 217130 - DNA, 15 bp, Homo sapiens
ccatccttcagcttt

SEQ ID NO: 217131 - DNA, 15 bp, Homo sapiens
gccatccttcagctt

SEQ ID NO: 217132 - DNA, 15 bp, Homo sapiens
agccatccttcagct

SEQ ID NO: 217133 - DNA, 15 bp, Homo sapiens
tagccatccttcagc

SEQ ID NO: 217134 - DNA, 15 bp, Homo sapiens
ttagccatccttcag

SEQ ID NO: 217135 - DNA, 15 bp, Homo sapiens
attagccatccttca

SEQ ID NO: 217136 - DNA, 15 bp, Homo sapiens
cattagccatccttc

SEQ ID NO: 217137 - DNA, 15 bp, Homo sapiens
acattagccatcctt

SEQ ID NO: 217138 - DNA, 15 bp, Homo sapiens
gacattagccatcct

SEQ ID NO: 217139 - DNA, 15 bp, Homo sapiens
tgacattagccatcc

SEQ ID NO: 217140 - DNA, 15 bp, Homo sapiens
gtgacattagccatc

SEQ ID NO: 217141 - DNA, 15 bp, Homo sapiens
agtgacattagccat

SEQ ID NO: 217142 - DNA, 15 bp, Homo sapiens
cagtgacattagcca

SEQ ID NO: 217143 - DNA, 15 bp, Homo sapiens
tcagtgacattagcc

SEQ ID NO: 217144 - DNA, 15 bp, Homo sapiens
atcagtgacattagc

SEQ ID NO: 217145 - DNA, 15 bp, Homo sapiens
tatcagtgacattag

SEQ ID NO: 217146 - DNA, 15 bp, Homo sapiens
ttatcagtgacatta

SEQ ID NO: 217147 - DNA, 15 bp, Homo sapiens
attatcagtgacatt

SEQ ID NO: 217148 - DNA, 15 bp, Homo sapiens
tattatcagtgacat

SEQ ID NO: 217149 - DNA, 15 bp, Homo sapiens
ttattatcagtgaca

SEQ ID NO: 217150 - DNA, 15 bp, Homo sapiens
cttattatcagtgac

SEQ ID NO: 217151 - DNA, 15 bp, Homo sapiens
acttattatcagtga

SEQ ID NO: 217152 - DNA, 15 bp, Homo sapiens
cacttattatcagtg

SEQ ID NO: 217153 - DNA, 15 bp, Homo sapiens
tcacttattatcagt

SEQ ID NO: 217154 - DNA, 15 bp, Homo sapiens
atcacttattatcag

SEQ ID NO: 217155 - DNA, 15 bp, Homo sapiens
tatcacttattatca

SEQ ID NO: 217156 - DNA, 15 bp, Homo sapiens
ttatcacttattatc

SEQ ID NO: 217157 - DNA, 15 bp, Homo sapiens
tttatcacttattat

SEQ ID NO: 217158 - DNA, 15 bp, Homo sapiens
ttttatcacttatta

SEQ ID NO: 217159 - DNA, 15 bp, Homo sapiens
tttttatcacttatt

SEQ ID NO: 217160 - DNA, 15 bp, Homo sapiens
atttttatcacttat

SEQ ID NO: 217161 - DNA, 15 bp, Homo sapiens
tatttttatcactta

SEQ ID NO: 217162 - DNA, 15 bp, Homo sapiens
ttatttttatcactt

SEQ ID NO: 217163 - DNA, 15 bp, Homo sapiens
gttatttttatcact

SEQ ID NO: 217164 - DNA, 15 bp, Homo sapiens
tgttatttttatcac

SEQ ID NO: 217165 - DNA, 15 bp, Homo sapiens
ctgttatttttatca

SEQ ID NO: 217166 - DNA, 15 bp, Homo sapiens
actgttatttttatc

SEQ ID NO: 217167 - DNA, 15 bp, Homo sapiens
cactgttatttttat

SEQ ID NO: 217168 - DNA, 15 bp, Homo sapiens
acactgttattttta

SEQ ID NO: 217169 - DNA, 15 bp, Homo sapiens
cacactgttattttt

SEQ ID NO: 217170 - DNA, 15 bp, Homo sapiens
tcacactgttatttt

SEQ ID NO: 217171 - DNA, 15 bp, Homo sapiens
ctcacactgttattt

SEQ ID NO: 217172 - DNA, 15 bp, Homo sapiens
tctcacactgttatt

SEQ ID NO: 217173 - DNA, 15 bp, Homo sapiens
ttctcacactgttat

SEQ ID NO: 217174 - DNA, 15 bp, Homo sapiens
tttctcacactgtta

SEQ ID NO: 217175 - DNA, 15 bp, Homo sapiens
ttttctcacactgtt

SEQ ID NO: 217176 - DNA, 15 bp, Homo sapiens
tttttctcacactgt

SEQ ID NO: 217177 - DNA, 15 bp, Homo sapiens
ctttttctcacactg

SEQ ID NO: 217178 - DNA, 15 bp, Homo sapiens
tctttttctcacact

SEQ ID NO: 217179 - DNA, 15 bp, Homo sapiens
atctttttctcacac

SEQ ID NO: 217180 - DNA, 15 bp, Homo sapiens
aatctttttctcaca

SEQ ID NO: 217181 - DNA, 15 bp, Homo sapiens
taatctttttctcac

SEQ ID NO: 217182 - DNA, 15 bp, Homo sapiens
ttaatctttttctca

SEQ ID NO: 217183 - DNA, 15 bp, Homo sapiens
attaatctttttctc

SEQ ID NO: 217184 - DNA, 15 bp, Homo sapiens
aattaatctttttct

SEQ ID NO: 217185 - DNA, 15 bp, Homo sapiens
aaattaatctttttc

SEQ ID NO: 217186 - DNA, 15 bp, Homo sapiens
aaaattaatcttttt

SEQ ID NO: 217187 - DNA, 15 bp, Homo sapiens
aaaaattaatctttt

SEQ ID NO: 217188 - DNA, 15 bp, Homo sapiens
aaaaaattaatcttt

SEQ ID NO: 217189 - DNA, 15 bp, Homo sapiens
aaaaaaattaatctt

SEQ ID NO: 217190 - DNA, 15 bp, Homo sapiens
aaaaaaaattaatct

SEQ ID NO: 217191 - DNA, 15 bp, Homo sapiens
aaaaaaaaattaatc

SEQ ID NO: 217192 - DNA, 15 bp, Homo sapiens
aaaaaaaaaattaat

SEQ ID NO: 217193 - DNA, 15 bp, Homo sapiens
aaaaaaaaaaattaa

SEQ ID NO: 217194 - DNA, 15 bp, Homo sapiens
taaaaaaaaaaatta

SEQ ID NO: 217195 - DNA, 15 bp, Homo sapiens
ttaaaaaaaaaaatt

SEQ ID NO: 217196 - DNA, 15 bp, Homo sapiens
tttaaaaaaaaaaat

SEQ ID NO: 217197 - DNA, 15 bp, Homo sapiens
ctttaaaaaaaaaaa

SEQ ID NO: 217198 - DNA, 15 bp, Homo sapiens
tctttaaaaaaaaaa

SEQ ID NO: 217199 - DNA, 15 bp, Homo sapiens
atctttaaaaaaaaa

SEQ ID NO: 217200 - DNA, 15 bp, Homo sapiens
gatctttaaaaaaaa

SEQ ID NO: 217201 - DNA, 15 bp, Homo sapiens
cgatctttaaaaaaa

SEQ ID NO: 217202 - DNA, 15 bp, Homo sapiens
gcgatctttaaaaaa

SEQ ID NO: 217203 - DNA, 15 bp, Homo sapiens
agcgatctttaaaaa

SEQ ID NO: 217204 - DNA, 15 bp, Homo sapiens
cagcgatctttaaaa

SEQ ID NO: 217205 - DNA, 15 bp, Homo sapiens
ccagcgatctttaaa

SEQ ID NO: 217206 - DNA, 15 bp, Homo sapiens
cccagcgatctttaa

SEQ ID NO: 217207 - DNA, 15 bp, Homo sapiens
tcccagcgatcttta

SEQ ID NO: 217208 - DNA, 15 bp, Homo sapiens
ttcccagcgatcttt

SEQ ID NO: 217209 - DNA, 15 bp, Homo sapiens
tttcccagcgatctt

SEQ ID NO: 217210 - DNA, 15 bp, Homo sapiens
ttttcccagcgatct

SEQ ID NO: 217211 - DNA, 15 bp, Homo sapiens
cttttcccagcgatc

SEQ ID NO: 217212 - DNA, 15 bp, Homo sapiens
acttttcccagcgat

SEQ ID NO: 217213 - DNA, 15 bp, Homo sapiens
cacttttcccagcga

SEQ ID NO: 217214 - DNA, 15 bp, Homo sapiens
ccacttttcccagcg

SEQ ID NO: 217215 - DNA, 15 bp, Homo sapiens
cccacttttcccagc

SEQ ID NO: 217216 - DNA, 15 bp, Homo sapiens
acccacttttcccag

SEQ ID NO: 217217 - DNA, 15 bp, Homo sapiens
cacccacttttccca

SEQ ID NO: 217218 - DNA, 15 bp, Homo sapiens
tcacccacttttccc

SEQ ID NO: 217219 - DNA, 15 bp, Homo sapiens
ttcacccacttttcc

SEQ ID NO: 217220 - DNA, 15 bp, Homo sapiens
attcacccacttttc

SEQ ID NO: 217221 - DNA, 15 bp, Homo sapiens
gattcacccactttt

SEQ ID NO: 217222 - DNA, 15 bp, Homo sapiens
tgattcacccacttt

SEQ ID NO: 217223 - DNA, 15 bp, Homo sapiens
gtgattcacccactt

SEQ ID NO: 217224 - DNA, 15 bp, Homo sapiens
ggtgattcacccact

SEQ ID NO: 217225 - DNA, 15 bp, Homo sapiens
aggtgattcacccac

SEQ ID NO: 217226 - DNA, 15 bp, Homo sapiens
caggtgattcaccca

SEQ ID NO: 217227 - DNA, 15 bp, Homo sapiens
tcaggtgattcaccc

SEQ ID NO: 217228 - DNA, 15 bp, Homo sapiens
ctcaggtgattcacc

SEQ ID NO: 217229 - DNA, 15 bp, Homo sapiens
cctcaggtgattcac

SEQ ID NO: 217230 - DNA, 15 bp, Homo sapiens
acctcaggtgattca

SEQ ID NO: 217231 - DNA, 15 bp, Homo sapiens
gacctcaggtgattc

SEQ ID NO: 217232 - DNA, 15 bp, Homo sapiens
tgacctcaggtgatt

SEQ ID NO: 217233 - DNA, 15 bp, Homo sapiens
gcctgacctcaggtg

SEQ ID NO: 217234 - DNA, 15 bp, Homo sapiens
tgcctgacctcaggt

SEQ ID NO: 217235 - DNA, 15 bp, Homo sapiens
atgcctgacctcagg

SEQ ID NO: 217236 - DNA, 15 bp, Homo sapiens
aatgcctgacctcag

SEQ ID NO: 217237 - DNA, 15 bp, Homo sapiens
gaatgcctgacctca

SEQ ID NO: 217238 - DNA, 15 bp, Homo sapiens
cgaatgcctgacctc

SEQ ID NO: 217239 - DNA, 15 bp, Homo sapiens
tcgaatgcctgacct

SEQ ID NO: 217240 - DNA, 15 bp, Homo sapiens
ctcgaatgcctgacc

SEQ ID NO: 217241 - DNA, 15 bp, Homo sapiens
tctcgaatgcctgac

SEQ ID NO: 217242 - DNA, 15 bp, Homo sapiens
gtctcgaatgcctga

SEQ ID NO: 217243 - DNA, 15 bp, Homo sapiens
ggtctcgaatgcctg

SEQ ID NO: 217244 - DNA, 15 bp, Homo sapiens
tggtctcgaatgcct

SEQ ID NO: 217245 - DNA, 15 bp, Homo sapiens
ctggtctcgaatgcc

SEQ ID NO: 217246 - DNA, 15 bp, Homo sapiens
gctggtctcgaatgc

SEQ ID NO: 217247 - DNA, 15 bp, Homo sapiens
ggctggtctcgaatg

SEQ ID NO: 217248 - DNA, 15 bp, Homo sapiens
aggctggtctcgaat

SEQ ID NO: 217249 - DNA, 15 bp, Homo sapiens
tatgttggccaggct

SEQ ID NO: 217250 - DNA, 15 bp, Homo sapiens
ctatgttggccaggc

SEQ ID NO: 217251 - DNA, 15 bp, Homo sapiens
actatgttggccagg

SEQ ID NO: 217252 - DNA, 15 bp, Homo sapiens
cactatgttggccag

SEQ ID NO: 217253 - DNA, 15 bp, Homo sapiens
tcactatgttggcca

SEQ ID NO: 217254 - DNA, 15 bp, Homo sapiens
ttcactatgttggcc

SEQ ID NO: 217255 - DNA, 15 bp, Homo sapiens
tttcactatgttggc

SEQ ID NO: 217256 - DNA, 15 bp, Homo sapiens
ttttcactatgttgg

SEQ ID NO: 217257 - DNA, 15 bp, Homo sapiens
gttttcactatgttg

SEQ ID NO: 217258 - DNA, 15 bp, Homo sapiens
ggttttcactatgtt

SEQ ID NO: 217259 - DNA, 15 bp, Homo sapiens
gggttttcactatgt

SEQ ID NO: 217260 - DNA, 15 bp, Homo sapiens
agggttttcactatg

SEQ ID NO: 217261 - DNA, 15 bp, Homo sapiens
gagggttttcactat

SEQ ID NO: 217262 - DNA, 15 bp, Homo sapiens
ggagggttttcacta

SEQ ID NO: 217263 - DNA, 15 bp, Homo sapiens
aggagggttttcact

SEQ ID NO: 217264 - DNA, 15 bp, Homo sapiens
gaggagggttttcac

SEQ ID NO: 217265 - DNA, 15 bp, Homo sapiens
agaggagggttttca

SEQ ID NO: 217266 - DNA, 15 bp, Homo sapiens
aagaggagggttttc

SEQ ID NO: 217267 - DNA, 15 bp, Homo sapiens
gaagaggagggtttt

SEQ ID NO: 217268 - DNA, 15 bp, Homo sapiens
agaagaggagggttt

SEQ ID NO: 217269 - DNA, 15 bp, Homo sapiens
cagaagaggagggtt

SEQ ID NO: 217270 - DNA, 15 bp, Homo sapiens
tcagaagaggagggt

SEQ ID NO: 217271 - DNA, 15 bp, Homo sapiens
ttcagaagaggaggg

SEQ ID NO: 217272 - DNA, 15 bp, Homo sapiens
tttcagaagaggagg

SEQ ID NO: 217273 - DNA, 15 bp, Homo sapiens
ttttcagaagaggag

SEQ ID NO: 217274 - DNA, 15 bp, Homo sapiens
attttcagaagagga

SEQ ID NO: 217275 - DNA, 15 bp, Homo sapiens
cattttcagaagagg

SEQ ID NO: 217276 - DNA, 15 bp, Homo sapiens
gcattttcagaagag

SEQ ID NO: 217277 - DNA, 15 bp, Homo sapiens
tgcattttcagaaga

SEQ ID NO: 217278 - DNA, 15 bp, Homo sapiens
ttgcattttcagaag

SEQ ID NO: 217279 - DNA, 15 bp, Homo sapiens
tttgcattttcagaa

SEQ ID NO: 217280 - DNA, 15 bp, Homo sapiens
ttttgcattttcaga

SEQ ID NO: 217281 - DNA, 15 bp, Homo sapiens
tttttgcattttcag

SEQ ID NO: 217282 - DNA, 15 bp, Homo sapiens
atttttgcattttca

SEQ ID NO: 217283 - DNA, 15 bp, Homo sapiens
aatttttgcattttc

SEQ ID NO: 217284 - DNA, 15 bp, Homo sapiens
taatttttgcatttt

SEQ ID NO: 217285 - DNA, 15 bp, Homo sapiens
ctaatttttgcattt

SEQ ID NO: 217286 - DNA, 15 bp, Homo sapiens
gctaatttttgcatt

SEQ ID NO: 217287 - DNA, 15 bp, Homo sapiens
cgctaatttttgcat

SEQ ID NO: 217288 - DNA, 15 bp, Homo sapiens
ccgctaatttttgca

SEQ ID NO: 217289 - DNA, 15 bp, Homo sapiens
cccgctaatttttgc

SEQ ID NO: 217290 - DNA, 15 bp, Homo sapiens
ccccgctaatttttg

SEQ ID NO: 217291 - DNA, 15 bp, Homo sapiens
gccccgctaattttt

SEQ ID NO: 217292 - DNA, 15 bp, Homo sapiens
tgccccgctaatttt

SEQ ID NO: 217293 - DNA, 15 bp, Homo sapiens
atgccccgctaattt

SEQ ID NO: 217294 - DNA, 15 bp, Homo sapiens
catgccccgctaatt

SEQ ID NO: 217295 - DNA, 15 bp, Homo sapiens
ccatgccccgctaat

SEQ ID NO: 217296 - DNA, 15 bp, Homo sapiens
accatgccccgctaa

SEQ ID NO: 217297 - DNA, 15 bp, Homo sapiens
caccatgccccgcta

SEQ ID NO: 217298 - DNA, 15 bp, Homo sapiens
ccaccatgccccgct

SEQ ID NO: 217299 - DNA, 15 bp, Homo sapiens
gccaccatgccccgc

SEQ ID NO: 217300 - DNA, 15 bp, Homo sapiens
tgccaccatgccccg

SEQ ID NO: 217301 - DNA, 15 bp, Homo sapiens
gtgccaccatgcccc

SEQ ID NO: 217302 - DNA, 15 bp, Homo sapiens
tgtgccaccatgccc

SEQ ID NO: 217303 - DNA, 15 bp, Homo sapiens
atgtgccaccatgcc

SEQ ID NO: 217304 - DNA, 15 bp, Homo sapiens
catgtgccaccatgc

SEQ ID NO: 217305 - DNA, 15 bp, Homo sapiens
gcatgtgccaccatg

SEQ ID NO: 217306 - DNA, 15 bp, Homo sapiens
ggcatgtgccaccat

SEQ ID NO: 217307 - DNA, 15 bp, Homo sapiens
aggcatgtgccacca

SEQ ID NO: 217308 - DNA, 15 bp, Homo sapiens
caggcatgtgccacc

SEQ ID NO: 217309 - DNA, 15 bp, Homo sapiens
acaggcatgtgccac

SEQ ID NO: 217310 - DNA, 15 bp, Homo sapiens
tacaggcatgtgcca

SEQ ID NO: 217311 - DNA, 15 bp, Homo sapiens
ttacaggcatgtgcc

SEQ ID NO: 217312 - DNA, 15 bp, Homo sapiens
attacaggcatgtgc

SEQ ID NO: 217313 - DNA, 15 bp, Homo sapiens
gattacaggcatgtg

SEQ ID NO: 217314 - DNA, 15 bp, Homo sapiens
agattacaggcatgt

SEQ ID NO: 217315 - DNA, 15 bp, Homo sapiens
gagattacaggcatg

SEQ ID NO: 217316 - DNA, 15 bp, Homo sapiens
tgagattacaggcat

SEQ ID NO: 217317 - DNA, 15 bp, Homo sapiens
cgagtagctgagatt

SEQ ID NO: 217318 - DNA, 15 bp, Homo sapiens
ccgagtagctgagat

SEQ ID NO: 217319 - DNA, 15 bp, Homo sapiens
tctcccgagtagctg

SEQ ID NO: 217320 - DNA, 15 bp, Homo sapiens
gtctcccgagtagct

SEQ ID NO: 217321 - DNA, 15 bp, Homo sapiens
agtctcccgagtagc

SEQ ID NO: 217322 - DNA, 15 bp, Homo sapiens
cagtctcccgagtag

SEQ ID NO: 217323 - DNA, 15 bp, Homo sapiens
tcagtctcccgagta

SEQ ID NO: 217324 - DNA, 15 bp, Homo sapiens
ttcagtctcccgagt

SEQ ID NO: 217325 - DNA, 15 bp, Homo sapiens
cttcagtctcccgag

SEQ ID NO: 217326 - DNA, 15 bp, Homo sapiens
gcttcagtctcccga

SEQ ID NO: 217327 - DNA, 15 bp, Homo sapiens
tgcttcagtctcccg

SEQ ID NO: 217328 - DNA, 15 bp, Homo sapiens
ctgcttcagtctccc

SEQ ID NO: 217329 - DNA, 15 bp, Homo sapiens
cctgcttcagtctcc

SEQ ID NO: 217330 - DNA, 15 bp, Homo sapiens
tcctgcttcagtctc

SEQ ID NO: 217331 - DNA, 15 bp, Homo sapiens
ctcctgcttcagtct

SEQ ID NO: 217332 - DNA, 15 bp, Homo sapiens
tctcctgcttcagtc

SEQ ID NO: 217333 - DNA, 15 bp, Homo sapiens
ttctcctgcttcagt

SEQ ID NO: 217334 - DNA, 15 bp, Homo sapiens
attctcctgcttcag

SEQ ID NO: 217335 - DNA, 15 bp, Homo sapiens
tattctcctgcttca

SEQ ID NO: 217336 - DNA, 15 bp, Homo sapiens
ctattctcctgcttc

SEQ ID NO: 217337 - DNA, 15 bp, Homo sapiens
gctattctcctgctt

SEQ ID NO: 217338 - DNA, 15 bp, Homo sapiens
agctattctcctgct

SEQ ID NO: 217339 - DNA, 15 bp, Homo sapiens
aagctattctcctgc

SEQ ID NO: 217340 - DNA, 15 bp, Homo sapiens
caagctattctcctg

SEQ ID NO: 217341 - DNA, 15 bp, Homo sapiens
tcaagctattctcct

SEQ ID NO: 217342 - DNA, 15 bp, Homo sapiens
ttcaagctattctcc

SEQ ID NO: 217343 - DNA, 15 bp, Homo sapiens
gttcaagctattctc

SEQ ID NO: 217344 - DNA, 15 bp, Homo sapiens
ggttcaagctattct

SEQ ID NO: 217345 - DNA, 15 bp, Homo sapiens
gggttcaagctattc

SEQ ID NO: 217346 - DNA, 15 bp, Homo sapiens
tgggttcaagctatt

SEQ ID NO: 217347 - DNA, 15 bp, Homo sapiens
ctgggttcaagctat

SEQ ID NO: 217348 - DNA, 15 bp, Homo sapiens
cctgggttcaagcta

SEQ ID NO: 217349 - DNA, 15 bp, Homo sapiens
tcctgggttcaagct

SEQ ID NO: 217350 - DNA, 15 bp, Homo sapiens
gcctcctgggttcaa

SEQ ID NO: 217351 - DNA, 15 bp, Homo sapiens
tgcctcctgggttca

SEQ ID NO: 217352 - DNA, 15 bp, Homo sapiens
ctgcctcctgggttc

SEQ ID NO: 217353 - DNA, 15 bp, Homo sapiens
tctgcctcctgggtt

SEQ ID NO: 217354 - DNA, 15 bp, Homo sapiens
atctgcctcctgggt

SEQ ID NO: 217355 - DNA, 15 bp, Homo sapiens
catctgcctcctggg

SEQ ID NO: 217356 - DNA, 15 bp, Homo sapiens
acatctgcctcctgg

SEQ ID NO: 217357 - DNA, 15 bp, Homo sapiens
cacatctgcctcctg

SEQ ID NO: 217358 - DNA, 15 bp, Homo sapiens
ccacatctgcctcct

SEQ ID NO: 217359 - DNA, 15 bp, Homo sapiens
gccacatctgcctcc

SEQ ID NO: 217360 - DNA, 15 bp, Homo sapiens
tgccacatctgcctc

SEQ ID NO: 217361 - DNA, 15 bp, Homo sapiens
ctgccacatctgcct

SEQ ID NO: 217362 - DNA, 15 bp, Homo sapiens
actgccacatctgcc

SEQ ID NO: 217363 - DNA, 15 bp, Homo sapiens
cactgccacatctgc

SEQ ID NO: 217364 - DNA, 15 bp, Homo sapiens
tcactgccacatctg

SEQ ID NO: 217365 - DNA, 15 bp, Homo sapiens
ctcactgccacatct

SEQ ID NO: 217366 - DNA, 15 bp, Homo sapiens
tctcactgccacatc

SEQ ID NO: 217367 - DNA, 15 bp, Homo sapiens
gtctcactgccacat

SEQ ID NO: 217368 - DNA, 15 bp, Homo sapiens
cgtctcactgccaca

SEQ ID NO: 217369 - DNA, 15 bp, Homo sapiens
tcgtctcactgccac

SEQ ID NO: 217370 - DNA, 15 bp, Homo sapiens
ctcgtctcactgcca

SEQ ID NO: 217371 - DNA, 15 bp, Homo sapiens
tctcgtctcactgcc

SEQ ID NO: 217372 - DNA, 15 bp, Homo sapiens
atctcgtctcactgc

SEQ ID NO: 217373 - DNA, 15 bp, Homo sapiens
aatctcgtctcactg

SEQ ID NO: 217374 - DNA, 15 bp, Homo sapiens
caatctcgtctcact

SEQ ID NO: 217375 - DNA, 15 bp, Homo sapiens
acaatctcgtctcac

SEQ ID NO: 217376 - DNA, 15 bp, Homo sapiens
cacaatctcgtctca

SEQ ID NO: 217377 - DNA, 15 bp, Homo sapiens
gcacaatctcgtctc

SEQ ID NO: 217378 - DNA, 15 bp, Homo sapiens
ggcacaatctcgtct

SEQ ID NO: 217379 - DNA, 15 bp, Homo sapiens
tggcacaatctcgtc

SEQ ID NO: 217380 - DNA, 15 bp, Homo sapiens
atggcacaatctcgt

SEQ ID NO: 217381 - DNA, 15 bp, Homo sapiens
aatggcacaatctcg

SEQ ID NO: 217382 - DNA, 15 bp, Homo sapiens
caatggcacaatctc

SEQ ID NO: 217383 - DNA, 15 bp, Homo sapiens
gcaatggcacaatct

SEQ ID NO: 217384 - DNA, 15 bp, Homo sapiens
tgcaatggcacaatc

SEQ ID NO: 217385 - DNA, 15 bp, Homo sapiens
gtgcaatggcacaat

SEQ ID NO: 217386 - DNA, 15 bp, Homo sapiens
agtgcaatggcacaa

SEQ ID NO: 217387 - DNA, 15 bp, Homo sapiens
gagtgcaatggcaca

SEQ ID NO: 217388 - DNA, 15 bp, Homo sapiens
ggagtgcaatggcac

SEQ ID NO: 217389 - DNA, 15 bp, Homo sapiens
tctgtcgcccaggct

SEQ ID NO: 217390 - DNA, 15 bp, Homo sapiens
ctctgtcgcccaggc

SEQ ID NO: 217391 - DNA, 15 bp, Homo sapiens
actctgtcgcccagg

SEQ ID NO: 217392 - DNA, 15 bp, Homo sapiens
tactctgtcgcccag

SEQ ID NO: 217393 - DNA, 15 bp, Homo sapiens
ttactctgtcgccca

SEQ ID NO: 217394 - DNA, 15 bp, Homo sapiens
cttactctgtcgccc

SEQ ID NO: 217395 - DNA, 15 bp, Homo sapiens
tcttactctgtcgcc

SEQ ID NO: 217396 - DNA, 15 bp, Homo sapiens
gtcttactctgtcgc

SEQ ID NO: 217397 - DNA, 15 bp, Homo sapiens
ggtcttactctgtcg

SEQ ID NO: 217398 - DNA, 15 bp, Homo sapiens
gggtcttactctgtc

SEQ ID NO: 217399 - DNA, 15 bp, Homo sapiens
ggggtcttactctgt

SEQ ID NO: 217400 - DNA, 15 bp, Homo sapiens
tggggtcttactctg

SEQ ID NO: 217401 - DNA, 15 bp, Homo sapiens
atggggtcttactct

SEQ ID NO: 217402 - DNA, 15 bp, Homo sapiens
gatggggtcttactc

SEQ ID NO: 217403 - DNA, 15 bp, Homo sapiens
agatggggtcttact

SEQ ID NO: 217404 - DNA, 15 bp, Homo sapiens
gagatggggtcttac

SEQ ID NO: 217405 - DNA, 15 bp, Homo sapiens
tgagatggggtctta

SEQ ID NO: 217406 - DNA, 15 bp, Homo sapiens
ttgagatggggtctt

SEQ ID NO: 217407 - DNA, 15 bp, Homo sapiens
tttgagatggggtct

SEQ ID NO: 217408 - DNA, 15 bp, Homo sapiens
ttttgagatggggtc

SEQ ID NO: 217409 - DNA, 15 bp, Homo sapiens
tttttgagatggggt

SEQ ID NO: 217410 - DNA, 15 bp, Homo sapiens
ttttttgagatgggg

SEQ ID NO: 217411 - DNA, 15 bp, Homo sapiens
attttttgagatggg

SEQ ID NO: 217412 - DNA, 15 bp, Homo sapiens
aattttttgagatgg

SEQ ID NO: 217413 - DNA, 15 bp, Homo sapiens
taattttttgagatg

SEQ ID NO: 217414 - DNA, 15 bp, Homo sapiens
ttaattttttgagat

SEQ ID NO: 217415 - DNA, 15 bp, Homo sapiens
tttaattttttgaga

SEQ ID NO: 217416 - DNA, 15 bp, Homo sapiens
ttttaattttttgag

SEQ ID NO: 217417 - DNA, 15 bp, Homo sapiens
attttaattttttga

SEQ ID NO: 217418 - DNA, 15 bp, Homo sapiens
tattttaattttttg

SEQ ID NO: 217419 - DNA, 15 bp, Homo sapiens
ttattttaatttttt

SEQ ID NO: 217420 - DNA, 15 bp, Homo sapiens
tttattttaattttt

SEQ ID NO: 217421 - DNA, 15 bp, Homo sapiens
ttttattttaatttt

SEQ ID NO: 217422 - DNA, 15 bp, Homo sapiens
tttttattttaattt

SEQ ID NO: 217423 - DNA, 15 bp, Homo sapiens
atttttattttaatt

SEQ ID NO: 217424 - DNA, 15 bp, Homo sapiens
tatttttattttaat

SEQ ID NO: 217425 - DNA, 15 bp, Homo sapiens
ttatttttattttaa

SEQ ID NO: 217426 - DNA, 15 bp, Homo sapiens
tttatttttatttta

SEQ ID NO: 217427 - DNA, 15 bp, Homo sapiens
ctttatttattttta

SEQ ID NO: 217428 - DNA, 15 bp, Homo sapiens
taatctttatttatt

SEQ ID NO: 217429 - DNA, 15 bp, Homo sapiens
ataatctttatttat

SEQ ID NO: 217430 - DNA, 15 bp, Homo sapiens
cataatctttattta

SEQ ID NO: 217431 - DNA, 15 bp, Homo sapiens
acataatctttattt

SEQ ID NO: 217432 - DNA, 15 bp, Homo sapiens
tacataatctttatt

SEQ ID NO: 217433 - DNA, 15 bp, Homo sapiens
ctacataatctttat

SEQ ID NO: 217434 - DNA, 15 bp, Homo sapiens
cctacataatcttta

SEQ ID NO: 217435 - DNA, 15 bp, Homo sapiens
tcctacataatcttt

SEQ ID NO: 217436 - DNA, 15 bp, Homo sapiens
atcctacataatctt

SEQ ID NO: 217437 - DNA, 15 bp, Homo sapiens
aatcctacataatct

SEQ ID NO: 217438 - DNA, 15 bp, Homo sapiens
aaatcctacataatc

SEQ ID NO: 217439 - DNA, 15 bp, Homo sapiens
aaaatcctacataat

SEQ ID NO: 217440 - DNA, 15 bp, Homo sapiens
taaaatcctacataa

SEQ ID NO: 217441 - DNA, 15 bp, Homo sapiens
ataaaatcctacata

SEQ ID NO: 217442 - DNA, 15 bp, Homo sapiens
aataaaatcctacat

SEQ ID NO: 217443 - DNA, 15 bp, Homo sapiens
taataaaatcctaca

SEQ ID NO: 217444 - DNA, 15 bp, Homo sapiens
ctaataaaatcctac

SEQ ID NO: 217445 - DNA, 15 bp, Homo sapiens
gctaataaaatccta

SEQ ID NO: 217446 - DNA, 15 bp, Homo sapiens
agctaataaaatcct

SEQ ID NO: 217447 - DNA, 15 bp, Homo sapiens
tagctaataaaatcc

SEQ ID NO: 217448 - DNA, 15 bp, Homo sapiens
atagctaataaaatc

SEQ ID NO: 217449 - DNA, 15 bp, Homo sapiens
catagctaataaaat

SEQ ID NO: 217450 - DNA, 15 bp, Homo sapiens
tcatagctaataaaa

SEQ ID NO: 217451 - DNA, 15 bp, Homo sapiens
atcatagctaataaa

SEQ ID NO: 217452 - DNA, 15 bp, Homo sapiens
tatcatagctaataa

SEQ ID NO: 217453 - DNA, 15 bp, Homo sapiens
ttatcatagctaata

SEQ ID NO: 217454 - DNA, 15 bp, Homo sapiens
cttatcatagctaat

SEQ ID NO: 217455 - DNA, 15 bp, Homo sapiens
ccttatcatagctaa

SEQ ID NO: 217456 - DNA, 15 bp, Homo sapiens
tccttatcatagcta

SEQ ID NO: 217457 - DNA, 15 bp, Homo sapiens
ctccttatcatagct

SEQ ID NO: 217458 - DNA, 15 bp, Homo sapiens
actccttatcatagc

SEQ ID NO: 217459 - DNA, 15 bp, Homo sapiens
aactccttatcatag

SEQ ID NO: 217460 - DNA, 15 bp, Homo sapiens
taactccttatcata

SEQ ID NO: 217461 - DNA, 15 bp, Homo sapiens
ttaactccttatcat

SEQ ID NO: 217462 - DNA, 15 bp, Homo sapiens
tttaactccttatca

SEQ ID NO: 217463 - DNA, 15 bp, Homo sapiens
ttttaactccttatc

SEQ ID NO: 217464 - DNA, 15 bp, Homo sapiens
gttttaactccttat

SEQ ID NO: 217465 - DNA, 15 bp, Homo sapiens
tgttttaactcctta

SEQ ID NO: 217466 - DNA, 15 bp, Homo sapiens
ctgttttaactcctt

SEQ ID NO: 217467 - DNA, 15 bp, Homo sapiens
actgttttaactcct

SEQ ID NO: 217468 - DNA, 15 bp, Homo sapiens
tactgttttaactcc

SEQ ID NO: 217469 - DNA, 15 bp, Homo sapiens
atactgttttaactc

SEQ ID NO: 217470 - DNA, 15 bp, Homo sapiens
gatactgttttaact

SEQ ID NO: 217471 - DNA, 15 bp, Homo sapiens
agatactgttttaac

SEQ ID NO: 217472 - DNA, 15 bp, Homo sapiens
aagatactgttttaa

SEQ ID NO: 217473 - DNA, 15 bp, Homo sapiens
taagatactgtttta

SEQ ID NO: 217474 - DNA, 15 bp, Homo sapiens
ttaagatactgtttt

SEQ ID NO: 217475 - DNA, 15 bp, Homo sapiens
cttaagatactgttt

SEQ ID NO: 217476 - DNA, 15 bp, Homo sapiens
ccttaagatactgtt

SEQ ID NO: 217477 - DNA, 15 bp, Homo sapiens
cccttaagatactgt

SEQ ID NO: 217478 - DNA, 15 bp, Homo sapiens
tcccttaagatactg

SEQ ID NO: 217479 - DNA, 15 bp, Homo sapiens
ctcccttaagatact

SEQ ID NO: 217480 - DNA, 15 bp, Homo sapiens
tctcccttaagatac

SEQ ID NO: 217481 - DNA, 15 bp, Homo sapiens
ttctcccttaagata

SEQ ID NO: 217482 - DNA, 15 bp, Homo sapiens
tttctcccttaagat

SEQ ID NO: 217483 - DNA, 15 bp, Homo sapiens
gtttctcccttaaga

SEQ ID NO: 217484 - DNA, 15 bp, Homo sapiens
agtttctcccttaag

SEQ ID NO: 217485 - DNA, 15 bp, Homo sapiens
cagtttctcccttaa

SEQ ID NO: 217486 - DNA, 15 bp, Homo sapiens
ccagtttctccctta

SEQ ID NO: 217487 - DNA, 15 bp, Homo sapiens
tccagtttctccctt

SEQ ID NO: 217488 - DNA, 15 bp, Homo sapiens
ttccagtttctccct

SEQ ID NO: 217489 - DNA, 15 bp, Homo sapiens
cttccagtttctccc

SEQ ID NO: 217490 - DNA, 15 bp, Homo sapiens
ccttccagtttctcc

SEQ ID NO: 217491 - DNA, 15 bp, Homo sapiens
accttccagtttctc

SEQ ID NO: 217492 - DNA, 15 bp, Homo sapiens
aaccttccagtttct

SEQ ID NO: 217493 - DNA, 15 bp, Homo sapiens
aaaccttccagtttc

SEQ ID NO: 217494 - DNA, 15 bp, Homo sapiens
aaaaccttccagttt

SEQ ID NO: 217495 - DNA, 15 bp, Homo sapiens
aaaaaccttccagtt

SEQ ID NO: 217496 - DNA, 15 bp, Homo sapiens
taaaaaccttccagt

SEQ ID NO: 217497 - DNA, 15 bp, Homo sapiens
ttaaaaaccttccag

SEQ ID NO: 217498 - DNA, 15 bp, Homo sapiens
tttaaaaaccttcca

SEQ ID NO: 217499 - DNA, 15 bp, Homo sapiens
ttttaaaaaccttcc

SEQ ID NO: 217500 - DNA, 15 bp, Homo sapiens
tttttaaaaaccttc

SEQ ID NO: 217501 - DNA, 15 bp, Homo sapiens
gtttttaaaaacctt

SEQ ID NO: 217502 - DNA, 15 bp, Homo sapiens
cgtttttaaaaacct

SEQ ID NO: 217503 - DNA, 15 bp, Homo sapiens
tcgtttttaaaaacc

SEQ ID NO: 217504 - DNA, 15 bp, Homo sapiens
ctcgtttttaaaaac

SEQ ID NO: 217505 - DNA, 15 bp, Homo sapiens
cctcgtttttaaaaa

SEQ ID NO: 217506 - DNA, 15 bp, Homo sapiens
tcctcgtttttaaaa

SEQ ID NO: 217507 - DNA, 15 bp, Homo sapiens
atcctcgtttttaaa

SEQ ID NO: 217508 - DNA, 15 bp, Homo sapiens
catcctcgtttttaa

SEQ ID NO: 217509 - DNA, 15 bp, Homo sapiens
tcatcctcgttttta

SEQ ID NO: 217510 - DNA, 15 bp, Homo sapiens
gtcatcctcgttttt

SEQ ID NO: 217511 - DNA, 15 bp, Homo sapiens
tgtcatcctcgtttt

SEQ ID NO: 217512 - DNA, 15 bp, Homo sapiens
atgtcatcctcgttt

SEQ ID NO: 217513 - DNA, 15 bp, Homo sapiens
gatgtcatcctcgtt

SEQ ID NO: 217514 - DNA, 15 bp, Homo sapiens
tgatgtcatcctcgt

SEQ ID NO: 217515 - DNA, 15 bp, Homo sapiens
ctgatgtcatcctcg

SEQ ID NO: 217516 - DNA, 15 bp, Homo sapiens
gctgatgtcatcctc

SEQ ID NO: 217517 - DNA, 15 bp, Homo sapiens
tgctgatgtcatcct

SEQ ID NO: 217518 - DNA, 15 bp, Homo sapiens
ctgctgatgtcatcc

SEQ ID NO: 217519 - DNA, 15 bp, Homo sapiens
actgctgatgtcatc

SEQ ID NO: 217520 - DNA, 15 bp, Homo sapiens
gactgctgatgtcat

SEQ ID NO: 217521 - DNA, 15 bp, Homo sapiens
tgactgctgatgtca

SEQ ID NO: 217522 - DNA, 15 bp, Homo sapiens
ctgactgctgatgtc

SEQ ID NO: 217523 - DNA, 15 bp, Homo sapiens
actgactgctgatgt

SEQ ID NO: 217524 - DNA, 15 bp, Homo sapiens
gactgactgctgatg

SEQ ID NO: 217525 - DNA, 15 bp, Homo sapiens
agactgactgctgat

SEQ ID NO: 217526 - DNA, 15 bp, Homo sapiens
gagactgactgctga

SEQ ID NO: 217527 - DNA, 15 bp, Homo sapiens
tgagactgactgctg

SEQ ID NO: 217528 - DNA, 15 bp, Homo sapiens
gtgagactgactgct

SEQ ID NO: 217529 - DNA, 15 bp, Homo sapiens
agtgagactgactgc

SEQ ID NO: 217530 - DNA, 15 bp, Homo sapiens
aagtgagactgactg

SEQ ID NO: 217531 - DNA, 15 bp, Homo sapiens
aaagtgagactgact

SEQ ID NO: 217532 - DNA, 15 bp, Homo sapiens
taaagtgagactgac

SEQ ID NO: 217533 - DNA, 15 bp, Homo sapiens
gtaaagtgagactga

SEQ ID NO: 217534 - DNA, 15 bp, Homo sapiens
tgtaaagtgagactg

SEQ ID NO: 217535 - DNA, 15 bp, Homo sapiens
ctgtaaagtgagact

SEQ ID NO: 217536 - DNA, 15 bp, Homo sapiens
tctgtaaagtgagac

SEQ ID NO: 217537 - DNA, 15 bp, Homo sapiens
atctgtaaagtgaga

SEQ ID NO: 217538 - DNA, 15 bp, Homo sapiens
catctgtaaagtgag

SEQ ID NO: 217539 - DNA, 15 bp, Homo sapiens
tcatctgtaaagtga

SEQ ID NO: 217540 - DNA, 15 bp, Homo sapiens
ctcatctgtaaagtg

SEQ ID NO: 217541 - DNA, 15 bp, Homo sapiens
tctcatctgtaaagt

SEQ ID NO: 217542 - DNA, 15 bp, Homo sapiens
ttctcatctgtaaag

SEQ ID NO: 217543 - DNA, 15 bp, Homo sapiens
gttctcatctgtaaa

SEQ ID NO: 217544 - DNA, 15 bp, Homo sapiens
tgttctcatctgtaa

SEQ ID NO: 217545 - DNA, 15 bp, Homo sapiens
gtgttctcatctgta

SEQ ID NO: 217546 - DNA, 15 bp, Homo sapiens
ggtgttctcatctgt

SEQ ID NO: 217547 - DNA, 15 bp, Homo sapiens
tggtgttctcatctg

SEQ ID NO: 217548 - DNA, 15 bp, Homo sapiens
ttggtgttctcatct

SEQ ID NO: 217549 - DNA, 15 bp, Homo sapiens
cttggtgttctcatc

SEQ ID NO: 217550 - DNA, 15 bp, Homo sapiens
ccttggtgttctcat

SEQ ID NO: 217551 - DNA, 15 bp, Homo sapiens
gccttggtgttctca

SEQ ID NO: 217552 - DNA, 15 bp, Homo sapiens
tgccttggtgttctc

SEQ ID NO: 217553 - DNA, 15 bp, Homo sapiens
ctgccttggtgttct

SEQ ID NO: 217554 - DNA, 15 bp, Homo sapiens
tctgccttggtgttc

SEQ ID NO: 217555 - DNA, 15 bp, Homo sapiens
gtctgccttggtgtt

SEQ ID NO: 217556 - DNA, 15 bp, Homo sapiens
cgtctgccttggtgt

SEQ ID NO: 217557 - DNA, 15 bp, Homo sapiens
ccgtctgccttggtg

SEQ ID NO: 217558 - DNA, 15 bp, Homo sapiens
accgtctgccttggt

SEQ ID NO: 217559 - DNA, 15 bp, Homo sapiens
caccgtctgccttgg

SEQ ID NO: 217560 - DNA, 15 bp, Homo sapiens
acaccgtctgccttg

SEQ ID NO: 217561 - DNA, 15 bp, Homo sapiens
gacaccgtctgcctt

SEQ ID NO: 217562 - DNA, 15 bp, Homo sapiens
tgacaccgtctgcct

SEQ ID NO: 217563 - DNA, 15 bp, Homo sapiens
atgacaccgtctgcc

SEQ ID NO: 217564 - DNA, 15 bp, Homo sapiens
tatgacaccgtctgc

SEQ ID NO: 217565 - DNA, 15 bp, Homo sapiens
atatgacaccgtctg

SEQ ID NO: 217566 - DNA, 15 bp, Homo sapiens
gatatgacaccgtct

SEQ ID NO: 217567 - DNA, 15 bp, Homo sapiens
agatatgacaccgtc

SEQ ID NO: 217568 - DNA, 15 bp, Homo sapiens
aagatatgacaccgt

SEQ ID NO: 217569 - DNA, 15 bp, Homo sapiens
caagatatgacaccg

SEQ ID NO: 217570 - DNA, 15 bp, Homo sapiens
gcaagatatgacacc

SEQ ID NO: 217571 - DNA, 15 bp, Homo sapiens
agcaagatatgacac

SEQ ID NO: 217572 - DNA, 15 bp, Homo sapiens
gagcaagatatgaca

SEQ ID NO: 217573 - DNA, 15 bp, Homo sapiens
tgagcaagatatgac

SEQ ID NO: 217574 - DNA, 15 bp, Homo sapiens
ttgagcaagatatga

SEQ ID NO: 217575 - DNA, 15 bp, Homo sapiens
cttgagcaagatatg

SEQ ID NO: 217576 - DNA, 15 bp, Homo sapiens
ccttgagcaagatat

SEQ ID NO: 217577 - DNA, 15 bp, Homo sapiens
accttgagcaagata

SEQ ID NO: 217578 - DNA, 15 bp, Homo sapiens
gaccttgagcaagat

SEQ ID NO: 217579 - DNA, 15 bp, Homo sapiens
tgaccttgagcaaga

SEQ ID NO: 217580 - DNA, 15 bp, Homo sapiens
gtgaccttgagcaag

SEQ ID NO: 217581 - DNA, 15 bp, Homo sapiens
tgtgaccttgagcaa

SEQ ID NO: 217582 - DNA, 15 bp, Homo sapiens
gtgtgaccttgagca

SEQ ID NO: 217583 - DNA, 15 bp, Homo sapiens
tgtgtgaccttgagc

SEQ ID NO: 217584 - DNA, 15 bp, Homo sapiens
ctgtgtgaccttgag

SEQ ID NO: 217585 - DNA, 15 bp, Homo sapiens
gctgtgtgaccttga

SEQ ID NO: 217586 - DNA, 15 bp, Homo sapiens
tgctgtgtgaccttg

SEQ ID NO: 217587 - DNA, 15 bp, Homo sapiens
ttgctgtgtgacctt

SEQ ID NO: 217588 - DNA, 15 bp, Homo sapiens
cttgctgtgtgacct

SEQ ID NO: 217589 - DNA, 15 bp, Homo sapiens
acttgctgtgtgacc

SEQ ID NO: 217590 - DNA, 15 bp, Homo sapiens
tacttgctgtgtgac

SEQ ID NO: 217591 - DNA, 15 bp, Homo sapiens
ttacttgctgtgtga

SEQ ID NO: 217592 - DNA, 15 bp, Homo sapiens
cttacttgctgtgtg

SEQ ID NO: 217593 - DNA, 15 bp, Homo sapiens
acttacttgctgtgt

SEQ ID NO: 217594 - DNA, 15 bp, Homo sapiens
aacttacttgctgtg

SEQ ID NO: 217595 - DNA, 15 bp, Homo sapiens
caacttacttgctgt

SEQ ID NO: 217596 - DNA, 15 bp, Homo sapiens
gcaacttacttgctg

SEQ ID NO: 217597 - DNA, 15 bp, Homo sapiens
tgcaacttacttgct

SEQ ID NO: 217598 - DNA, 15 bp, Homo sapiens
ctgcaacttacttgc

SEQ ID NO: 217599 - DNA, 15 bp, Homo sapiens
tctgcaacttacttg

SEQ ID NO: 217600 - DNA, 15 bp, Homo sapiens
ctctgcaacttactt

SEQ ID NO: 217601 - DNA, 15 bp, Homo sapiens
tctctgcaacttact

SEQ ID NO: 217602 - DNA, 15 bp, Homo sapiens
atctctgcaacttac

SEQ ID NO: 217603 - DNA, 15 bp, Homo sapiens
catctctgcaactta

SEQ ID NO: 217604 - DNA, 15 bp, Homo sapiens
ccatctctgcaactt

SEQ ID NO: 217605 - DNA, 15 bp, Homo sapiens
accatctctgcaact

SEQ ID NO: 217606 - DNA, 15 bp, Homo sapiens
gaccatctctgcaac

SEQ ID NO: 217607 - DNA, 15 bp, Homo sapiens
agaccatctctgcaa

SEQ ID NO: 217608 - DNA, 15 bp, Homo sapiens
cagaccatctctgca

SEQ ID NO: 217609 - DNA, 15 bp, Homo sapiens
ccagaccatctctgc

SEQ ID NO: 217610 - DNA, 15 bp, Homo sapiens
gccagaccatctctg

SEQ ID NO: 217611 - DNA, 15 bp, Homo sapiens
agccagaccatctct

SEQ ID NO: 217612 - DNA, 15 bp, Homo sapiens
aagccagaccatctc

SEQ ID NO: 217613 - DNA, 15 bp, Homo sapiens
gaagccagaccatct

SEQ ID NO: 217614 - DNA, 15 bp, Homo sapiens
tgaagccagaccatc

SEQ ID NO: 217615 - DNA, 15 bp, Homo sapiens
ctgaagccagaccat

SEQ ID NO: 217616 - DNA, 15 bp, Homo sapiens
tctgaagccagacca

SEQ ID NO: 217617 - DNA, 15 bp, Homo sapiens
atctgaagccagacc

SEQ ID NO: 217618 - DNA, 15 bp, Homo sapiens
tatctgaagccagac

SEQ ID NO: 217619 - DNA, 15 bp, Homo sapiens
gtatctgaagccaga

SEQ ID NO: 217620 - DNA, 15 bp, Homo sapiens
ggtatctgaagccag

SEQ ID NO: 217621 - DNA, 15 bp, Homo sapiens
tggtatctgaagcca

SEQ ID NO: 217622 - DNA, 15 bp, Homo sapiens
atggtatctgaagcc

SEQ ID NO: 217623 - DNA, 15 bp, Homo sapiens
catggtatctgaagc

SEQ ID NO: 217624 - DNA, 15 bp, Homo sapiens
tcatggtatctgaag

SEQ ID NO: 217625 - DNA, 15 bp, Homo sapiens
ttcatggtatctgaa

SEQ ID NO: 217626 - DNA, 15 bp, Homo sapiens
attcatggtatctga

SEQ ID NO: 217627 - DNA, 15 bp, Homo sapiens
aattcatggtatctg

SEQ ID NO: 217628 - DNA, 15 bp, Homo sapiens
aaattcatggtatct

SEQ ID NO: 217629 - DNA, 15 bp, Homo sapiens
taaattcatggtatc

SEQ ID NO: 217630 - DNA, 15 bp, Homo sapiens
ttaaattcatggtat

SEQ ID NO: 217631 - DNA, 15 bp, Homo sapiens
gttaaattcatggta

SEQ ID NO: 217632 - DNA, 15 bp, Homo sapiens
ggttaaattcatggt

SEQ ID NO: 217633 - DNA, 15 bp, Homo sapiens
tggttaaattcatgg

SEQ ID NO: 217634 - DNA, 15 bp, Homo sapiens
gtggttaaattcatg

SEQ ID NO: 217635 - DNA, 15 bp, Homo sapiens
ggtggttaaattcat

SEQ ID NO: 217636 - DNA, 15 bp, Homo sapiens
tggtggttaaattca

SEQ ID NO: 217637 - DNA, 15 bp, Homo sapiens
gtggtggttaaattc

SEQ ID NO: 217638 - DNA, 15 bp, Homo sapiens
tgtggtggttaaatt

SEQ ID NO: 217639 - DNA, 15 bp, Homo sapiens
ttgtggtggttaaat

SEQ ID NO: 217640 - DNA, 15 bp, Homo sapiens
tttgtggtggttaaa

SEQ ID NO: 217641 - DNA, 15 bp, Homo sapiens
ttttgtggtggttaa

SEQ ID NO: 217642 - DNA, 15 bp, Homo sapiens
gttttgtggtggtta

SEQ ID NO: 217643 - DNA, 15 bp, Homo sapiens
agttttgtggtggtt

SEQ ID NO: 217644 - DNA, 15 bp, Homo sapiens
gagttttgtggtggt

SEQ ID NO: 217645 - DNA, 15 bp, Homo sapiens
tgagttttgtggtgg

SEQ ID NO: 217646 - DNA, 15 bp, Homo sapiens
atgagttttgtggtg

SEQ ID NO: 217647 - DNA, 15 bp, Homo sapiens
tatgagttttgtggt

SEQ ID NO: 217648 - DNA, 15 bp, Homo sapiens
ctatgagttttgtgg

SEQ ID NO: 217649 - DNA, 15 bp, Homo sapiens
tctatgagttttgtg

SEQ ID NO: 217650 - DNA, 15 bp, Homo sapiens
atctatgagttttgt

SEQ ID NO: 217651 - DNA, 15 bp, Homo sapiens
tatctatgagttttg

SEQ ID NO: 217652 - DNA, 15 bp, Homo sapiens
atatctatgagtttt

SEQ ID NO: 217653 - DNA, 15 bp, Homo sapiens
tatatctatgagttt

SEQ ID NO: 217654 - DNA, 15 bp, Homo sapiens
gtatatctatgagtt

SEQ ID NO: 217655 - DNA, 15 bp, Homo sapiens
tgtatatctatgagt

SEQ ID NO: 217656 - DNA, 15 bp, Homo sapiens
ctgtatatctatgag

SEQ ID NO: 217657 - DNA, 15 bp, Homo sapiens
tctgtatatctatga

SEQ ID NO: 217658 - DNA, 15 bp, Homo sapiens
atctgtatatctatg

SEQ ID NO: 217659 - DNA, 15 bp, Homo sapiens
tatctgtatatctat

SEQ ID NO: 217660 - DNA, 15 bp, Homo sapiens
ctatctgtatatcta

SEQ ID NO: 217661 - DNA, 15 bp, Homo sapiens
actatctgtatatct

SEQ ID NO: 217662 - DNA, 15 bp, Homo sapiens
tactatctgtatatc

SEQ ID NO: 217663 - DNA, 15 bp, Homo sapiens
ttactatctgtatat

SEQ ID NO: 217664 - DNA, 15 bp, Homo sapiens
cttactatctgtata

SEQ ID NO: 217665 - DNA, 15 bp, Homo sapiens
tcttactatctgtat

SEQ ID NO: 217666 - DNA, 15 bp, Homo sapiens
gtcttactatctgta

SEQ ID NO: 217667 - DNA, 15 bp, Homo sapiens
agtcttactatctgt

SEQ ID NO: 217668 - DNA, 15 bp, Homo sapiens
tagtcttactatctg

SEQ ID NO: 217669 - DNA, 15 bp, Homo sapiens
atagtcttactatct

SEQ ID NO: 217670 - DNA, 15 bp, Homo sapiens
catagtcttactatc

SEQ ID NO: 217671 - DNA, 15 bp, Homo sapiens
acatagtcttactat

SEQ ID NO: 217672 - DNA, 15 bp, Homo sapiens
aacatagtcttacta

SEQ ID NO: 217673 - DNA, 15 bp, Homo sapiens
aaacatagtcttact

SEQ ID NO: 217674 - DNA, 15 bp, Homo sapiens
caaacatagtcttac

SEQ ID NO: 217675 - DNA, 15 bp, Homo sapiens
gcaaacatagtctta

SEQ ID NO: 217676 - DNA, 15 bp, Homo sapiens
tgcaaacatagtctt

SEQ ID NO: 217677 - DNA, 15 bp, Homo sapiens
gtgcaaacatagtct

SEQ ID NO: 217678 - DNA, 15 bp, Homo sapiens
ggtgcaaacatagtc

SEQ ID NO: 217679 - DNA, 15 bp, Homo sapiens
tggtgcaaacatagt

SEQ ID NO: 217680 - DNA, 15 bp, Homo sapiens
ttggtgcaaacatag

SEQ ID NO: 217681 - DNA, 15 bp, Homo sapiens
gttggtgcaaacata

SEQ ID NO: 217682 - DNA, 15 bp, Homo sapiens
cgttggtgcaaacat

SEQ ID NO: 217683 - DNA, 15 bp, Homo sapiens
gcgttggtgcaaaca

SEQ ID NO: 217684 - DNA, 15 bp, Homo sapiens
ggcgttggtgcaaac

SEQ ID NO: 217685 - DNA, 15 bp, Homo sapiens
gggcgttggtgcaaa

SEQ ID NO: 217686 - DNA, 15 bp, Homo sapiens
tgggcgttggtgcaa

SEQ ID NO: 217687 - DNA, 15 bp, Homo sapiens
ttgggcgttggtgca

SEQ ID NO: 217688 - DNA, 15 bp, Homo sapiens
tttgggcgttggtgc

SEQ ID NO: 217689 - DNA, 15 bp, Homo sapiens
gtttgggcgttggtg

SEQ ID NO: 217690 - DNA, 15 bp, Homo sapiens
agtttgggcgttggt

SEQ ID NO: 217691 - DNA, 15 bp, Homo sapiens
aagtttgggcgttgg

SEQ ID NO: 217692 - DNA, 15 bp, Homo sapiens
gaagtttgggcgttg

SEQ ID NO: 217693 - DNA, 15 bp, Homo sapiens
tgaagtttgggcgtt

SEQ ID NO: 217694 - DNA, 15 bp, Homo sapiens
ttgaagtttgggcgt

SEQ ID NO: 217695 - DNA, 15 bp, Homo sapiens
attgaagtttgggcg

SEQ ID NO: 217696 - DNA, 15 bp, Homo sapiens
aattgaagtttgggc

SEQ ID NO: 217697 - DNA, 15 bp, Homo sapiens
taattgaagtttggg

SEQ ID NO: 217698 - DNA, 15 bp, Homo sapiens
ttaattgaagtttgg

SEQ ID NO: 217699 - DNA, 15 bp, Homo sapiens
tttaattgaagtttg

SEQ ID NO: 217700 - DNA, 15 bp, Homo sapiens
ttttaattgaagttt

SEQ ID NO: 217701 - DNA, 15 bp, Homo sapiens
tttttaattgaagtt

SEQ ID NO: 217702 - DNA, 15 bp, Homo sapiens
ctttttaattgaagt

SEQ ID NO: 217703 - DNA, 15 bp, Homo sapiens
tctttttaattgaag

SEQ ID NO: 217704 - DNA, 15 bp, Homo sapiens
ttctttttaattgaa

SEQ ID NO: 217705 - DNA, 15 bp, Homo sapiens
tttctttttaattga

SEQ ID NO: 217706 - DNA, 15 bp, Homo sapiens
ttttctttttaattg

SEQ ID NO: 217707 - DNA, 15 bp, Homo sapiens
tttttctttttaatt

SEQ ID NO: 217708 - DNA, 15 bp, Homo sapiens
gtttttctttttaat

SEQ ID NO: 217709 - DNA, 15 bp, Homo sapiens
tgtttttctttttaa

SEQ ID NO: 217710 - DNA, 15 bp, Homo sapiens
ctgtttttcttttta

SEQ ID NO: 217711 - DNA, 15 bp, Homo sapiens
cctgtttttcttttt

SEQ ID NO: 217712 - DNA, 15 bp, Homo sapiens
ccctgtttttctttt

SEQ ID NO: 217713 - DNA, 15 bp, Homo sapiens
accctgtttttcttt

SEQ ID NO: 217714 - DNA, 15 bp, Homo sapiens
gaccctgtttttctt

SEQ ID NO: 217715 - DNA, 15 bp, Homo sapiens
agaccctgtttttct

SEQ ID NO: 217716 - DNA, 15 bp, Homo sapiens
tagaccctgtttttc

SEQ ID NO: 217717 - DNA, 15 bp, Homo sapiens
ttagaccctgttttt

SEQ ID NO: 217718 - DNA, 15 bp, Homo sapiens
attagaccctgtttt

SEQ ID NO: 217719 - DNA, 15 bp, Homo sapiens
gattagaccctgttt

SEQ ID NO: 217720 - DNA, 15 bp, Homo sapiens
tgattagaccctgtt

SEQ ID NO: 217721 - DNA, 15 bp, Homo sapiens
ctgattagaccctgt

SEQ ID NO: 217722 - DNA, 15 bp, Homo sapiens
actgattagaccctg

SEQ ID NO: 217723 - DNA, 15 bp, Homo sapiens
aactgattagaccct

SEQ ID NO: 217724 - DNA, 15 bp, Homo sapiens
taactgattagaccc

SEQ ID NO: 217725 - DNA, 15 bp, Homo sapiens
ataactgattagacc

SEQ ID NO: 217726 - DNA, 15 bp, Homo sapiens
aataactgattagac

SEQ ID NO: 217727 - DNA, 15 bp, Homo sapiens
aaataactgattaga

SEQ ID NO: 217728 - DNA, 15 bp, Homo sapiens
caaataactgattag

SEQ ID NO: 217729 - DNA, 15 bp, Homo sapiens
tcaaataactgatta

SEQ ID NO: 217730 - DNA, 15 bp, Homo sapiens
ttcaaataactgatt

SEQ ID NO: 217731 - DNA, 15 bp, Homo sapiens
attcaaataactgat

SEQ ID NO: 217732 - DNA, 15 bp, Homo sapiens
aattcaaataactga

SEQ ID NO: 217733 - DNA, 15 bp, Homo sapiens
aaattcaaataactg

SEQ ID NO: 217734 - DNA, 15 bp, Homo sapiens
gaaattcaaataact

SEQ ID NO: 217735 - DNA, 15 bp, Homo sapiens
cgaaattcaaataac

SEQ ID NO: 217736 - DNA, 15 bp, Homo sapiens
gcgaaattcaaataa

SEQ ID NO: 217737 - DNA, 15 bp, Homo sapiens
tgcgaaattcaaata

SEQ ID NO: 217738 - DNA, 15 bp, Homo sapiens
ctgcgaaattcaaat

SEQ ID NO: 217739 - DNA, 15 bp, Homo sapiens
actgcgaaattcaaa

SEQ ID NO: 217740 - DNA, 15 bp, Homo sapiens
gactgcgaaattcaa

SEQ ID NO: 217741 - DNA, 15 bp, Homo sapiens
tgactgcgaaattca

SEQ ID NO: 217742 - DNA, 15 bp, Homo sapiens
ttgactgcgaaattc

SEQ ID NO: 217743 - DNA, 15 bp, Homo sapiens
attgactgcgaaatt

SEQ ID NO: 217744 - DNA, 15 bp, Homo sapiens
aattgactgcgaaat

SEQ ID NO: 217745 - DNA, 15 bp, Homo sapiens
gaattgactgcgaaa

SEQ ID NO: 217746 - DNA, 15 bp, Homo sapiens
ggaattgactgcgaa

SEQ ID NO: 217747 - DNA, 15 bp, Homo sapiens
aggaattgactgcga

SEQ ID NO: 217748 - DNA, 15 bp, Homo sapiens
aaggaattgactgcg

SEQ ID NO: 217749 - DNA, 15 bp, Homo sapiens
aaaggaattgactgc

SEQ ID NO: 217750 - DNA, 15 bp, Homo sapiens
caaaggaattgactg

SEQ ID NO: 217751 - DNA, 15 bp, Homo sapiens
acaaaggaattgact

SEQ ID NO: 217752 - DNA, 15 bp, Homo sapiens
tacaaaggaattgac

SEQ ID NO: 217753 - DNA, 15 bp, Homo sapiens
ttacaaaggaattga

SEQ ID NO: 217754 - DNA, 15 bp, Homo sapiens
tttacaaaggaattg

SEQ ID NO: 217755 - DNA, 15 bp, Homo sapiens
ctttacaaaggaatt

SEQ ID NO: 217756 - DNA, 15 bp, Homo sapiens
gctttacaaaggaat

SEQ ID NO: 217757 - DNA, 15 bp, Homo sapiens
tgctttacaaaggaa

SEQ ID NO: 217758 - DNA, 15 bp, Homo sapiens
atgctttacaaagga

SEQ ID NO: 217759 - DNA, 15 bp, Homo sapiens
tatgctttacaaagg

SEQ ID NO: 217760 - DNA, 15 bp, Homo sapiens
atatgctttacaaag

SEQ ID NO: 217761 - DNA, 15 bp, Homo sapiens
tatatgctttacaaa

SEQ ID NO: 217762 - DNA, 15 bp, Homo sapiens
ttatatgctttacaa

SEQ ID NO: 217763 - DNA, 15 bp, Homo sapiens
tttatatgctttaca

SEQ ID NO: 217764 - DNA, 15 bp, Homo sapiens
gtttatatgctttac

SEQ ID NO: 217765 - DNA, 15 bp, Homo sapiens
ggtttatatgcttta

SEQ ID NO: 217766 - DNA, 15 bp, Homo sapiens
tggtttatatgcttt

SEQ ID NO: 217767 - DNA, 15 bp, Homo sapiens
gtggtttatatgctt

SEQ ID NO: 217768 - DNA, 15 bp, Homo sapiens
agtggtttatatgct

SEQ ID NO: 217769 - DNA, 15 bp, Homo sapiens
cagtggtttatatgc

SEQ ID NO: 217770 - DNA, 15 bp, Homo sapiens
tcagtggtttatatg

SEQ ID NO: 217771 - DNA, 15 bp, Homo sapiens
ctcagtggtttatat

SEQ ID NO: 217772 - DNA, 15 bp, Homo sapiens
tctcagtggtttata

SEQ ID NO: 217773 - DNA, 15 bp, Homo sapiens
ttctcagtggtttat

SEQ ID NO: 217774 - DNA, 15 bp, Homo sapiens
tttctcagtggttta

SEQ ID NO: 217775 - DNA, 15 bp, Homo sapiens
atttctcagtggttt

SEQ ID NO: 217776 - DNA, 15 bp, Homo sapiens
aatttctcagtggtt

SEQ ID NO: 217777 - DNA, 15 bp, Homo sapiens
caatttctcagtggt

SEQ ID NO: 217778 - DNA, 15 bp, Homo sapiens
tcaatttctcagtgg

SEQ ID NO: 217779 - DNA, 15 bp, Homo sapiens
ttcaatttctcagtg

SEQ ID NO: 217780 - DNA, 15 bp, Homo sapiens
attcaatttctcagt

SEQ ID NO: 217781 - DNA, 15 bp, Homo sapiens
aattcaatttctcag

SEQ ID NO: 217782 - DNA, 15 bp, Homo sapiens
taattcaatttctca

SEQ ID NO: 217783 - DNA, 15 bp, Homo sapiens
ctaattcaatttctc

SEQ ID NO: 217784 - DNA, 15 bp, Homo sapiens
cctaattcaatttct

SEQ ID NO: 217785 - DNA, 15 bp, Homo sapiens
gcctaattcaatttc

SEQ ID NO: 217786 - DNA, 15 bp, Homo sapiens
agcctaattcaattt

SEQ ID NO: 217787 - DNA, 15 bp, Homo sapiens
gagcctaattcaatt

SEQ ID NO: 217788 - DNA, 15 bp, Homo sapiens
tgagcctaattcaat

SEQ ID NO: 217789 - DNA, 15 bp, Homo sapiens
gtgagcctaattcaa

SEQ ID NO: 217790 - DNA, 15 bp, Homo sapiens
tgtgagcctaattca

SEQ ID NO: 217791 - DNA, 15 bp, Homo sapiens
ttgtgagcctaattc

SEQ ID NO: 217792 - DNA, 15 bp, Homo sapiens
tttgtgagcctaatt

SEQ ID NO: 217793 - DNA, 15 bp, Homo sapiens
atttgtgagcctaat

SEQ ID NO: 217794 - DNA, 15 bp, Homo sapiens
aatttgtgagcctaa

SEQ ID NO: 217795 - DNA, 15 bp, Homo sapiens
taatttgtgagccta

SEQ ID NO: 217796 - DNA, 15 bp, Homo sapiens
ttaatttgtgagcct

SEQ ID NO: 217797 - DNA, 15 bp, Homo sapiens
tttaatttgtgagcc

SEQ ID NO: 217798 - DNA, 15 bp, Homo sapiens
ttttaatttgtgagc

SEQ ID NO: 217799 - DNA, 15 bp, Homo sapiens
attttaatttgtgag

SEQ ID NO: 217800 - DNA, 15 bp, Homo sapiens
cattttaatttgtga

SEQ ID NO: 217801 - DNA, 15 bp, Homo sapiens
acattttaatttgtg

SEQ ID NO: 217802 - DNA, 15 bp, Homo sapiens
cacattttaatttgt

SEQ ID NO: 217803 - DNA, 15 bp, Homo sapiens
tcacattttaatttg

SEQ ID NO: 217804 - DNA, 15 bp, Homo sapiens
ttcacattttaattt

SEQ ID NO: 217805 - DNA, 15 bp, Homo sapiens
attcacattttaatt

SEQ ID NO: 217806 - DNA, 15 bp, Homo sapiens
tattcacattttaat

SEQ ID NO: 217807 - DNA, 15 bp, Homo sapiens
atattcacattttaa

SEQ ID NO: 217808 - DNA, 15 bp, Homo sapiens
catattcacatttta

SEQ ID NO: 217809 - DNA, 15 bp, Homo sapiens
tcatattcacatttt

SEQ ID NO: 217810 - DNA, 15 bp, Homo sapiens
ttcatattcacattt

SEQ ID NO: 217811 - DNA, 15 bp, Homo sapiens
attcatattcacatt

SEQ ID NO: 217812 - DNA, 15 bp, Homo sapiens
tattcatattcacat

SEQ ID NO: 217813 - DNA, 15 bp, Homo sapiens
atattcatattcaca

SEQ ID NO: 217814 - DNA, 15 bp, Homo sapiens
tatattcatattcac

SEQ ID NO: 217815 - DNA, 15 bp, Homo sapiens
ttatattcatattca

SEQ ID NO: 217816 - DNA, 15 bp, Homo sapiens
attatattcatattc

SEQ ID NO: 217817 - DNA, 15 bp, Homo sapiens
aattatattcatatt

SEQ ID NO: 217818 - DNA, 15 bp, Homo sapiens
taattatattcatat

SEQ ID NO: 217819 - DNA, 15 bp, Homo sapiens
ataattatattcata

SEQ ID NO: 217820 - DNA, 15 bp, Homo sapiens
aataattatattcat

SEQ ID NO: 217821 - DNA, 15 bp, Homo sapiens
aaataattatattca

SEQ ID NO: 217822 - DNA, 15 bp, Homo sapiens
taaataattatattc

SEQ ID NO: 217823 - DNA, 15 bp, Homo sapiens
ttaaataattatatt

SEQ ID NO: 217824 - DNA, 15 bp, Homo sapiens
tttaaataattatat

SEQ ID NO: 217825 - DNA, 15 bp, Homo sapiens
gtttaaataattata

SEQ ID NO: 217826 - DNA, 15 bp, Homo sapiens
tgtttaaataattat

SEQ ID NO: 217827 - DNA, 15 bp, Homo sapiens
ttgtttaaataatta

SEQ ID NO: 217828 - DNA, 15 bp, Homo sapiens
tttgtttaaataatt

SEQ ID NO: 217829 - DNA, 15 bp, Homo sapiens
ttttgtttaaataat

SEQ ID NO: 217830 - DNA, 15 bp, Homo sapiens
cttttgtttaaataa

SEQ ID NO: 217831 - DNA, 15 bp, Homo sapiens
tcttttgtttaaata

SEQ ID NO: 217832 - DNA, 15 bp, Homo sapiens
gtcttttgtttaaat

SEQ ID NO: 217833 - DNA, 15 bp, Homo sapiens
agtcttttgtttaaa

SEQ ID NO: 217834 - DNA, 15 bp, Homo sapiens
tagtcttttgtttaa

SEQ ID NO: 217835 - DNA, 15 bp, Homo sapiens
gtagtcttttgttta

SEQ ID NO: 217836 - DNA, 15 bp, Homo sapiens
ggtagtcttttgttt

SEQ ID NO: 217837 - DNA, 15 bp, Homo sapiens
aggtagtcttttgtt

SEQ ID NO: 217838 - DNA, 15 bp, Homo sapiens
gaggtagtcttttgt

SEQ ID NO: 217839 - DNA, 15 bp, Homo sapiens
agaggtagtcttttg

SEQ ID NO: 217840 - DNA, 15 bp, Homo sapiens
aagaggtagtctttt

SEQ ID NO: 217841 - DNA, 15 bp, Homo sapiens
taagaggtagtcttt

SEQ ID NO: 217842 - DNA, 15 bp, Homo sapiens
ttaagaggtagtctt

SEQ ID NO: 217843 - DNA, 15 bp, Homo sapiens
tttaagaggtagtct

SEQ ID NO: 217844 - DNA, 15 bp, Homo sapiens
ttttaagaggtagtc

SEQ ID NO: 217845 - DNA, 15 bp, Homo sapiens
gttttaagaggtagt

SEQ ID NO: 217846 - DNA, 15 bp, Homo sapiens
agttttaagaggtag

SEQ ID NO: 217847 - DNA, 15 bp, Homo sapiens
gagttttaagaggta

SEQ ID NO: 217848 - DNA, 15 bp, Homo sapiens
agagttttaagaggt

SEQ ID NO: 217849 - DNA, 15 bp, Homo sapiens
tagagttttaagagg

SEQ ID NO: 217850 - DNA, 15 bp, Homo sapiens
gtagagttttaagag

SEQ ID NO: 217851 - DNA, 15 bp, Homo sapiens
ggtagagttttaaga

SEQ ID NO: 217852 - DNA, 15 bp, Homo sapiens
aggtagagttttaag

SEQ ID NO: 217853 - DNA, 15 bp, Homo sapiens
gaggtagagttttaa

SEQ ID NO: 217854 - DNA, 15 bp, Homo sapiens
cgaggtagagtttta

SEQ ID NO: 217855 - DNA, 15 bp, Homo sapiens
gcgaggtagagtttt

SEQ ID NO: 217856 - DNA, 15 bp, Homo sapiens
tgcgaggtagagttt

SEQ ID NO: 217857 - DNA, 15 bp, Homo sapiens
ctgcgaggtagagtt

SEQ ID NO: 217858 - DNA, 15 bp, Homo sapiens
tctgcgaggtagagt

SEQ ID NO: 217859 - DNA, 15 bp, Homo sapiens
atctgcgaggtagag

SEQ ID NO: 217860 - DNA, 15 bp, Homo sapiens
tatctgcgaggtaga

SEQ ID NO: 217861 - DNA, 15 bp, Homo sapiens
atatctgcgaggtag

SEQ ID NO: 217862 - DNA, 15 bp, Homo sapiens
gatatctgcgaggta

SEQ ID NO: 217863 - DNA, 15 bp, Homo sapiens
ggatatctgcgaggt

SEQ ID NO: 217864 - DNA, 15 bp, Homo sapiens
aggatatctgcgagg

SEQ ID NO: 217865 - DNA, 15 bp, Homo sapiens
caggatatctgcgag

SEQ ID NO: 217866 - DNA, 15 bp, Homo sapiens
acaggatatctgcga

SEQ ID NO: 217867 - DNA, 15 bp, Homo sapiens
cacaggatatctgcg

SEQ ID NO: 217868 - DNA, 15 bp, Homo sapiens
tcacaggatatctgc

SEQ ID NO: 217869 - DNA, 15 bp, Homo sapiens
ctcacaggatatctg

SEQ ID NO: 217870 - DNA, 15 bp, Homo sapiens
tctcacaggatatct

SEQ ID NO: 217871 - DNA, 15 bp, Homo sapiens
ttctcacaggatatc

SEQ ID NO: 217872 - DNA, 15 bp, Homo sapiens
cttctcacaggatat

SEQ ID NO: 217873 - DNA, 15 bp, Homo sapiens
acttctcacaggata

SEQ ID NO: 217874 - DNA, 15 bp, Homo sapiens
aacttctcacaggat

SEQ ID NO: 217875 - DNA, 15 bp, Homo sapiens
caacttctcacagga

SEQ ID NO: 217876 - DNA, 15 bp, Homo sapiens
tcaacttctcacagg

SEQ ID NO: 217877 - DNA, 15 bp, Homo sapiens
gtcaacttctcacag

SEQ ID NO: 217878 - DNA, 15 bp, Homo sapiens
cgtcaacttctcaca

SEQ ID NO: 217879 - DNA, 15 bp, Homo sapiens
ccgtcaacttctcac

SEQ ID NO: 217880 - DNA, 15 bp, Homo sapiens
cccgtcaacttctca

SEQ ID NO: 217881 - DNA, 15 bp, Homo sapiens
tcccgtcaacttctc

SEQ ID NO: 217882 - DNA, 15 bp, Homo sapiens
atcccgtcaacttct

SEQ ID NO: 217883 - DNA, 15 bp, Homo sapiens
tatcccgtcaacttc

SEQ ID NO: 217884 - DNA, 15 bp, Homo sapiens
ttatcccgtcaactt

SEQ ID NO: 217885 - DNA, 15 bp, Homo sapiens
attatcccgtcaact

SEQ ID NO: 217886 - DNA, 15 bp, Homo sapiens
tattatcccgtcaac

SEQ ID NO: 217887 - DNA, 15 bp, Homo sapiens
ctattatcccgtcaa

SEQ ID NO: 217888 - DNA, 15 bp, Homo sapiens
tctattatcccgtca

SEQ ID NO: 217889 - DNA, 15 bp, Homo sapiens
ttctattatcccgtc

SEQ ID NO: 217890 - DNA, 15 bp, Homo sapiens
tttctattatcccgt

SEQ ID NO: 217891 - DNA, 15 bp, Homo sapiens
gtttctattatcccg

SEQ ID NO: 217892 - DNA, 15 bp, Homo sapiens
tgtttctattatccc

SEQ ID NO: 217893 - DNA, 15 bp, Homo sapiens
ctgtttctattatcc

SEQ ID NO: 217894 - DNA, 15 bp, Homo sapiens
tctgtttctattatc

SEQ ID NO: 217895 - DNA, 15 bp, Homo sapiens
ttctgtttctattat

SEQ ID NO: 217896 - DNA, 15 bp, Homo sapiens
gttctgtttctatta

SEQ ID NO: 217897 - DNA, 15 bp, Homo sapiens
agttctgtttctatt

SEQ ID NO: 217898 - DNA, 15 bp, Homo sapiens
tagttctgtttctat

SEQ ID NO: 217899 - DNA, 15 bp, Homo sapiens
ctagttctgtttcta

SEQ ID NO: 217900 - DNA, 15 bp, Homo sapiens
actagttctgtttct

SEQ ID NO: 217901 - DNA, 15 bp, Homo sapiens
aactagttctgtttc

SEQ ID NO: 217902 - DNA, 15 bp, Homo sapiens
aaactagttctgttt

SEQ ID NO: 217903 - DNA, 15 bp, Homo sapiens
caaactagttctgtt

SEQ ID NO: 217904 - DNA, 15 bp, Homo sapiens
ccaaactagttctgt

SEQ ID NO: 217905 - DNA, 15 bp, Homo sapiens
cccaaactagttctg

SEQ ID NO: 217906 - DNA, 15 bp, Homo sapiens
tcccaaactagttct

SEQ ID NO: 217907 - DNA, 15 bp, Homo sapiens
ttcccaaactagttc

SEQ ID NO: 217908 - DNA, 15 bp, Homo sapiens
attcccaaactagtt

SEQ ID NO: 217909 - DNA, 15 bp, Homo sapiens
aattcccaaactagt

SEQ ID NO: 217910 - DNA, 15 bp, Homo sapiens
aaattcccaaactag

SEQ ID NO: 217911 - DNA, 15 bp, Homo sapiens
gaaattcccaaacta

SEQ ID NO: 217912 - DNA, 15 bp, Homo sapiens
agaaattcccaaact

SEQ ID NO: 217913 - DNA, 15 bp, Homo sapiens
tagaaattcccaaac

SEQ ID NO: 217914 - DNA, 15 bp, Homo sapiens
ttagaaattcccaaa

SEQ ID NO: 217915 - DNA, 15 bp, Homo sapiens
attagaaattcccaa

SEQ ID NO: 217916 - DNA, 15 bp, Homo sapiens
aattagaaattccca

SEQ ID NO: 217917 - DNA, 15 bp, Homo sapiens
gaattagaaattccc

SEQ ID NO: 217918 - DNA, 15 bp, Homo sapiens
agaattagaaattcc

SEQ ID NO: 217919 - DNA, 15 bp, Homo sapiens
cagaattagaaattc

SEQ ID NO: 217920 - DNA, 15 bp, Homo sapiens
tcagaattagaaatt

SEQ ID NO: 217921 - DNA, 15 bp, Homo sapiens
ctcagaattagaaat

SEQ ID NO: 217922 - DNA, 15 bp, Homo sapiens
actcagaattagaaa

SEQ ID NO: 217923 - DNA, 15 bp, Homo sapiens
cactcagaattagaa

SEQ ID NO: 217924 - DNA, 15 bp, Homo sapiens
acactcagaattaga

SEQ ID NO: 217925 - DNA, 15 bp, Homo sapiens
aacactcagaattag

SEQ ID NO: 217926 - DNA, 15 bp, Homo sapiens
aaacactcagaatta

SEQ ID NO: 217927 - DNA, 15 bp, Homo sapiens
aaaacactcagaatt

SEQ ID NO: 217928 - DNA, 15 bp, Homo sapiens
aaaaacactcagaat

SEQ ID NO: 217929 - DNA, 15 bp, Homo sapiens
aaaaaacactcagaa

SEQ ID NO: 217930 - DNA, 15 bp, Homo sapiens
caaaaaacactcaga

SEQ ID NO: 217931 - DNA, 15 bp, Homo sapiens
acaaaaaacactcag

SEQ ID NO: 217932 - DNA, 15 bp, Homo sapiens
aacaaaaaacactca

SEQ ID NO: 217933 - DNA, 15 bp, Homo sapiens
caacaaaaaacactc

SEQ ID NO: 217934 - DNA, 15 bp, Homo sapiens
acaacaaaaaacact

SEQ ID NO: 217935 - DNA, 15 bp, Homo sapiens
aacaacaaaaaacac

SEQ ID NO: 217936 - DNA, 15 bp, Homo sapiens
caacaacaaaaaaca

SEQ ID NO: 217937 - DNA, 15 bp, Homo sapiens
acaacaacaaaaaac

SEQ ID NO: 217938 - DNA, 15 bp, Homo sapiens
aacaacaacaaaaaa

SEQ ID NO: 217939 - DNA, 15 bp, Homo sapiens
caacaacaacaaaaa

SEQ ID NO: 217940 - DNA, 15 bp, Homo sapiens
acaacaacaacaaaa

SEQ ID NO: 217941 - DNA, 15 bp, Homo sapiens
aacaacaacaacaaa

SEQ ID NO: 217942 - DNA, 15 bp, Homo sapiens
aaacaacaacaacaa

SEQ ID NO: 217943 - DNA, 15 bp, Homo sapiens
aaaacaacaacaaca

SEQ ID NO: 217944 - DNA, 15 bp, Homo sapiens
caaaacaacaacaac

SEQ ID NO: 217945 - DNA, 15 bp, Homo sapiens
acaaaacaacaacaa

SEQ ID NO: 217946 - DNA, 15 bp, Homo sapiens
aacaaaacaacaaca

SEQ ID NO: 217947 - DNA, 15 bp, Homo sapiens
aaacaaaacaacaac

SEQ ID NO: 217948 - DNA, 15 bp, Homo sapiens
aaaacaaaacaacaa

SEQ ID NO: 217949 - DNA, 15 bp, Homo sapiens
caaaacaaaacaaca

SEQ ID NO: 217950 - DNA, 15 bp, Homo sapiens
acaaaacaaaacaac

SEQ ID NO: 217951 - DNA, 15 bp, Homo sapiens
taaacaaaacaaaac

SEQ ID NO: 217952 - DNA, 15 bp, Homo sapiens
ataaacaaaacaaaa

SEQ ID NO: 217953 - DNA, 15 bp, Homo sapiens
aataaacaaaacaaa

SEQ ID NO: 217954 - DNA, 15 bp, Homo sapiens
aaataaacaaaacaa

SEQ ID NO: 217955 - DNA, 15 bp, Homo sapiens
caaataaacaaaaca

SEQ ID NO: 217956 - DNA, 15 bp, Homo sapiens
acaaataaacaaaac

SEQ ID NO: 217957 - DNA, 15 bp, Homo sapiens
aacaaataaacaaaa

SEQ ID NO: 217958 - DNA, 15 bp, Homo sapiens
aaacaaataaacaaa

SEQ ID NO: 217959 - DNA, 15 bp, Homo sapiens
aaaacaaataaacaa

SEQ ID NO: 217960 - DNA, 15 bp, Homo sapiens
gaaaacaaataaaca

SEQ ID NO: 217961 - DNA, 15 bp, Homo sapiens
agaaaacaaataaac

SEQ ID NO: 217962 - DNA, 15 bp, Homo sapiens
cagaaaacaaataaa

SEQ ID NO: 217963 - DNA, 15 bp, Homo sapiens
tcagaaaacaaataa

SEQ ID NO: 217964 - DNA, 15 bp, Homo sapiens
ctcagaaaacaaata

SEQ ID NO: 217965 - DNA, 15 bp, Homo sapiens
tctcagaaaacaaat

SEQ ID NO: 217966 - DNA, 15 bp, Homo sapiens
gtctcagaaaacaaa

SEQ ID NO: 217967 - DNA, 15 bp, Homo sapiens
cgtctcagaaaacaa

SEQ ID NO: 217968 - DNA, 15 bp, Homo sapiens
tcgtctcagaaaaca

SEQ ID NO: 217969 - DNA, 15 bp, Homo sapiens
ctcgtctcagaaaac

SEQ ID NO: 217970 - DNA, 15 bp, Homo sapiens
actcgtctcagaaaa

SEQ ID NO: 217971 - DNA, 15 bp, Homo sapiens
gactcgtctcagaaa

SEQ ID NO: 217972 - DNA, 15 bp, Homo sapiens
agactcgtctcagaa

SEQ ID NO: 217973 - DNA, 15 bp, Homo sapiens
gagactcgtctcaga

SEQ ID NO: 217974 - DNA, 15 bp, Homo sapiens
cgagactcgtctcag

SEQ ID NO: 217975 - DNA, 15 bp, Homo sapiens
gcgagactcgtctca

SEQ ID NO: 217976 - DNA, 15 bp, Homo sapiens
agcgagactcgtctc

SEQ ID NO: 217977 - DNA, 15 bp, Homo sapiens
gagcgagactcgtct

SEQ ID NO: 217978 - DNA, 15 bp, Homo sapiens
agagcgagactcgtc

SEQ ID NO: 217979 - DNA, 15 bp, Homo sapiens
aagagcgagactcgt

SEQ ID NO: 217980 - DNA, 15 bp, Homo sapiens
caagagcgagactcg

SEQ ID NO: 217981 - DNA, 15 bp, Homo sapiens
acaagagcgagactc

SEQ ID NO: 217982 - DNA, 15 bp, Homo sapiens
gacaagagcgagact

SEQ ID NO: 217983 - DNA, 15 bp, Homo sapiens
cgacaagagcgagac

SEQ ID NO: 217984 - DNA, 15 bp, Homo sapiens
gcgacaagagcgaga

SEQ ID NO: 217985 - DNA, 15 bp, Homo sapiens
ggcgacaagagcgag

SEQ ID NO: 217986 - DNA, 15 bp, Homo sapiens
gggcgacaagagcga

SEQ ID NO: 217987 - DNA, 15 bp, Homo sapiens
tgggcgacaagagcg

SEQ ID NO: 217988 - DNA, 15 bp, Homo sapiens
ctgggcgacaagagc

SEQ ID NO: 217989 - DNA, 15 bp, Homo sapiens
cctgggcgacaagag

SEQ ID NO: 217990 - DNA, 15 bp, Homo sapiens
gcctgggcgacaaga

SEQ ID NO: 217991 - DNA, 15 bp, Homo sapiens
agcctgggcgacaag

SEQ ID NO: 217992 - DNA, 15 bp, Homo sapiens
cagcctgggcgacaa

SEQ ID NO: 217993 - DNA, 15 bp, Homo sapiens
ccagcctgggcgaca

SEQ ID NO: 217994 - DNA, 15 bp, Homo sapiens
tccagcctgggcgac

SEQ ID NO: 217995 - DNA, 15 bp, Homo sapiens
ctccagcctgggcga

SEQ ID NO: 217996 - DNA, 15 bp, Homo sapiens
actccagcctgggcg

SEQ ID NO: 217997 - DNA, 15 bp, Homo sapiens
tccattgcactccag

SEQ ID NO: 217998 - DNA, 15 bp, Homo sapiens
ctccattgcactcca

SEQ ID NO: 217999 - DNA, 15 bp, Homo sapiens
actccattgcactcc

SEQ ID NO: 218000 - DNA, 15 bp, Homo sapiens
cactccattgcactc

SEQ ID NO: 218001 - DNA, 15 bp, Homo sapiens
tcactccattgcact

SEQ ID NO: 218002 - DNA, 15 bp, Homo sapiens
atcactccattgcac

SEQ ID NO: 218003 - DNA, 15 bp, Homo sapiens
gatcactccattgca

SEQ ID NO: 218004 - DNA, 15 bp, Homo sapiens
agatcactccattgc

SEQ ID NO: 218005 - DNA, 15 bp, Homo sapiens
aagatcactccattg

SEQ ID NO: 218006 - DNA, 15 bp, Homo sapiens
caagatcactccatt

SEQ ID NO: 218007 - DNA, 15 bp, Homo sapiens
ccaagatcactccat

SEQ ID NO: 218008 - DNA, 15 bp, Homo sapiens
gccaagatcactcca

SEQ ID NO: 218009 - DNA, 15 bp, Homo sapiens
agccaagatcactcc

SEQ ID NO: 218010 - DNA, 15 bp, Homo sapiens
gagccaagatcactc

SEQ ID NO: 218011 - DNA, 15 bp, Homo sapiens
tgagccaagatcact

SEQ ID NO: 218012 - DNA, 15 bp, Homo sapiens
gtgagccaagatcac

SEQ ID NO: 218013 - DNA, 15 bp, Homo sapiens
agtgagccaagatca

SEQ ID NO: 218014 - DNA, 15 bp, Homo sapiens
cagtgagccaagatc

SEQ ID NO: 218015 - DNA, 15 bp, Homo sapiens
cggaggttgcagtga

SEQ ID NO: 218016 - DNA, 15 bp, Homo sapiens
gcggaggttgcagtg

SEQ ID NO: 218017 - DNA, 15 bp, Homo sapiens
ggcggaggttgcagt

SEQ ID NO: 218018 - DNA, 15 bp, Homo sapiens
aggcggaggttgcag

SEQ ID NO: 218019 - DNA, 15 bp, Homo sapiens
gaggcggaggttgca

SEQ ID NO: 218020 - DNA, 15 bp, Homo sapiens
ggaggcggaggttgc

SEQ ID NO: 218021 - DNA, 15 bp, Homo sapiens
aggaggcggaggttg

SEQ ID NO: 218022 - DNA, 15 bp, Homo sapiens
caggaggcggaggtt

SEQ ID NO: 218023 - DNA, 15 bp, Homo sapiens
acaggaggcggaggt

SEQ ID NO: 218024 - DNA, 15 bp, Homo sapiens
cacaggaggcggagg

SEQ ID NO: 218025 - DNA, 15 bp, Homo sapiens
acacaggaggcggag

SEQ ID NO: 218026 - DNA, 15 bp, Homo sapiens
aacacaggaggcgga

SEQ ID NO: 218027 - DNA, 15 bp, Homo sapiens
gaacacaggaggcgg

SEQ ID NO: 218028 - DNA, 15 bp, Homo sapiens
tgaacacaggaggcg

SEQ ID NO: 218029 - DNA, 15 bp, Homo sapiens
ttgaacacaggaggc

SEQ ID NO: 218030 - DNA, 15 bp, Homo sapiens
cttgaacacaggagg

SEQ ID NO: 218031 - DNA, 15 bp, Homo sapiens
acttgaacacaggag

SEQ ID NO: 218032 - DNA, 15 bp, Homo sapiens
cacttgaacacagga

SEQ ID NO: 218033 - DNA, 15 bp, Homo sapiens
tcacttgaacacagg

SEQ ID NO: 218034 - DNA, 15 bp, Homo sapiens
atcacttgaacacag

SEQ ID NO: 218035 - DNA, 15 bp, Homo sapiens
aatcacttgaacaca

SEQ ID NO: 218036 - DNA, 15 bp, Homo sapiens
gaatcacttgaacac

SEQ ID NO: 218037 - DNA, 15 bp, Homo sapiens
agaatcacttgaaca

SEQ ID NO: 218038 - DNA, 15 bp, Homo sapiens
gcgcctgtaatccca

SEQ ID NO: 218039 - DNA, 15 bp, Homo sapiens
ggcgcctgtaatccc

SEQ ID NO: 218040 - DNA, 15 bp, Homo sapiens
gggcgcctgtaatcc

SEQ ID NO: 218041 - DNA, 15 bp, Homo sapiens
tgggcgcctgtaatc

SEQ ID NO: 218042 - DNA, 15 bp, Homo sapiens
atgggcgcctgtaat

SEQ ID NO: 218043 - DNA, 15 bp, Homo sapiens
gatgggcgcctgtaa

SEQ ID NO: 218044 - DNA, 15 bp, Homo sapiens
tgatgggcgcctgta

SEQ ID NO: 218045 - DNA, 15 bp, Homo sapiens
gtgatgggcgcctgt

SEQ ID NO: 218046 - DNA, 15 bp, Homo sapiens
ggtgatgggcgcctg

SEQ ID NO: 218047 - DNA, 15 bp, Homo sapiens
tggtgatgggcgcct

SEQ ID NO: 218048 - DNA, 15 bp, Homo sapiens
atggtgatgggcgcc

SEQ ID NO: 218049 - DNA, 15 bp, Homo sapiens
catggtgatgggcgc

SEQ ID NO: 218050 - DNA, 15 bp, Homo sapiens
gcatggtgatgggcg

SEQ ID NO: 218051 - DNA, 15 bp, Homo sapiens
ggcatggtgatgggc

SEQ ID NO: 218052 - DNA, 15 bp, Homo sapiens
gggcatggtgatggg

SEQ ID NO: 218053 - DNA, 15 bp, Homo sapiens
tgggcatggtgatgg

SEQ ID NO: 218054 - DNA, 15 bp, Homo sapiens
gtgggcatggtgatg

SEQ ID NO: 218055 - DNA, 15 bp, Homo sapiens
ggtgggcatggtgat

SEQ ID NO: 218056 - DNA, 15 bp, Homo sapiens
aggtgggcatggtga

SEQ ID NO: 218057 - DNA, 15 bp, Homo sapiens
taggtgggcatggtg

SEQ ID NO: 218058 - DNA, 15 bp, Homo sapiens
ttaggtgggcatggt

SEQ ID NO: 218059 - DNA, 15 bp, Homo sapiens
attaggtgggcatgg

SEQ ID NO: 218060 - DNA, 15 bp, Homo sapiens
aattaggtgggcatg

SEQ ID NO: 218061 - DNA, 15 bp, Homo sapiens
aaattaggtgggcat

SEQ ID NO: 218062 - DNA, 15 bp, Homo sapiens
aaaattaggtgggca

SEQ ID NO: 218063 - DNA, 15 bp, Homo sapiens
aaaaattaggtgggc

SEQ ID NO: 218064 - DNA, 15 bp, Homo sapiens
caaaaattaggtggg

SEQ ID NO: 218065 - DNA, 15 bp, Homo sapiens
acaaaaattaggtgg

SEQ ID NO: 218066 - DNA, 15 bp, Homo sapiens
tacaaaaattaggtg

SEQ ID NO: 218067 - DNA, 15 bp, Homo sapiens
atacaaaaattaggt

SEQ ID NO: 218068 - DNA, 15 bp, Homo sapiens
aatacaaaaattagg

SEQ ID NO: 218069 - DNA, 15 bp, Homo sapiens
gaatacaaaaattag

SEQ ID NO: 218070 - DNA, 15 bp, Homo sapiens
agaatacaaaaatta

SEQ ID NO: 218071 - DNA, 15 bp, Homo sapiens
aagaatacaaaaatt

SEQ ID NO: 218072 - DNA, 15 bp, Homo sapiens
taagaatacaaaaat

SEQ ID NO: 218073 - DNA, 15 bp, Homo sapiens
ctaagaatacaaaaa

SEQ ID NO: 218074 - DNA, 15 bp, Homo sapiens
actaagaatacaaaa

SEQ ID NO: 218075 - DNA, 15 bp, Homo sapiens
tactaagaatacaaa

SEQ ID NO: 218076 - DNA, 15 bp, Homo sapiens
ctactaagaatacaa

SEQ ID NO: 218077 - DNA, 15 bp, Homo sapiens
tctactaagaataca

SEQ ID NO: 218078 - DNA, 15 bp, Homo sapiens
ctctactaagaatac

SEQ ID NO: 218079 - DNA, 15 bp, Homo sapiens
tctctactaagaata

SEQ ID NO: 218080 - DNA, 15 bp, Homo sapiens
gtctctactaagaat

SEQ ID NO: 218081 - DNA, 15 bp, Homo sapiens
cgtctctactaagaa

SEQ ID NO: 218082 - DNA, 15 bp, Homo sapiens
ccgtctctactaaga

SEQ ID NO: 218083 - DNA, 15 bp, Homo sapiens
cccgtctctactaag

SEQ ID NO: 218084 - DNA, 15 bp, Homo sapiens
gtggtgaaaccccgt

SEQ ID NO: 218085 - DNA, 15 bp, Homo sapiens
tgtggtgaaaccccg

SEQ ID NO: 218086 - DNA, 15 bp, Homo sapiens
atgtggtgaaacccc

SEQ ID NO: 218087 - DNA, 15 bp, Homo sapiens
aatgtggtgaaaccc

SEQ ID NO: 218088 - DNA, 15 bp, Homo sapiens
caatgtggtgaaacc

SEQ ID NO: 218089 - DNA, 15 bp, Homo sapiens
ccaatgtggtgaaac

SEQ ID NO: 218090 - DNA, 15 bp, Homo sapiens
gccaatgtggtgaaa

SEQ ID NO: 218091 - DNA, 15 bp, Homo sapiens
ggccaatgtggtgaa

SEQ ID NO: 218092 - DNA, 15 bp, Homo sapiens
tggccaatgtggtga

SEQ ID NO: 218093 - DNA, 15 bp, Homo sapiens
ctggccaatgtggtg

SEQ ID NO: 218094 - DNA, 15 bp, Homo sapiens
cctggccaatgtggt

SEQ ID NO: 218095 - DNA, 15 bp, Homo sapiens
gcctggccaatgtgg

SEQ ID NO: 218096 - DNA, 15 bp, Homo sapiens
agcctggccaatgtg

SEQ ID NO: 218097 - DNA, 15 bp, Homo sapiens
cagcctggccaatgt

SEQ ID NO: 218098 - DNA, 15 bp, Homo sapiens
ccagcctggccaatg

SEQ ID NO: 218099 - DNA, 15 bp, Homo sapiens
accagcctggccaat

SEQ ID NO: 218100 - DNA, 15 bp, Homo sapiens
tgagaccagcctggc

SEQ ID NO: 218101 - DNA, 15 bp, Homo sapiens
ttgagaccagcctgg

SEQ ID NO: 218102 - DNA, 15 bp, Homo sapiens
tttgagaccagcctg

SEQ ID NO: 218103 - DNA, 15 bp, Homo sapiens
gtttgagaccagcct

SEQ ID NO: 218104 - DNA, 15 bp, Homo sapiens
agtttgagaccagcc

SEQ ID NO: 218105 - DNA, 15 bp, Homo sapiens
gagtttgagaccagc

SEQ ID NO: 218106 - DNA, 15 bp, Homo sapiens
ggagtttgagaccag

SEQ ID NO: 218107 - DNA, 15 bp, Homo sapiens
aggagtttgagacca

SEQ ID NO: 218108 - DNA, 15 bp, Homo sapiens
aggtcaggagtttga

SEQ ID NO: 218109 - DNA, 15 bp, Homo sapiens
gaggtcaggagtttg

SEQ ID NO: 218110 - DNA, 15 bp, Homo sapiens
tgaggtcaggagttt

SEQ ID NO: 218111 - DNA, 15 bp, Homo sapiens
gggtggatcacctga

SEQ ID NO: 218112 - DNA, 15 bp, Homo sapiens
cgggtggatcacctg

SEQ ID NO: 218113 - DNA, 15 bp, Homo sapiens
gcgggtggatcacct

SEQ ID NO: 218114 - DNA, 15 bp, Homo sapiens
ggcgggtggatcacc

SEQ ID NO: 218115 - DNA, 15 bp, Homo sapiens
aggcgggtggatcac

SEQ ID NO: 218116 - DNA, 15 bp, Homo sapiens
aaggcgggtggatca

SEQ ID NO: 218117 - DNA, 15 bp, Homo sapiens
caaggcgggtggatc

SEQ ID NO: 218118 - DNA, 15 bp, Homo sapiens
ccaaggcgggtggat

SEQ ID NO: 218119 - DNA, 15 bp, Homo sapiens
gccaaggcgggtgga

SEQ ID NO: 218120 - DNA, 15 bp, Homo sapiens
ggccaaggcgggtgg

SEQ ID NO: 218121 - DNA, 15 bp, Homo sapiens
aggccaaggcgggtg

SEQ ID NO: 218122 - DNA, 15 bp, Homo sapiens
gaggccaaggcgggt

SEQ ID NO: 218123 - DNA, 15 bp, Homo sapiens
ggaggccaaggcggg

SEQ ID NO: 218124 - DNA, 15 bp, Homo sapiens
aggaggccaaggcgg

SEQ ID NO: 218125 - DNA, 15 bp, Homo sapiens
taggaggccaaggcg

SEQ ID NO: 218126 - DNA, 15 bp, Homo sapiens
ttaggaggccaaggc

SEQ ID NO: 218127 - DNA, 15 bp, Homo sapiens
tttaggaggccaagg

SEQ ID NO: 218128 - DNA, 15 bp, Homo sapiens
ctttaggaggccaag

SEQ ID NO: 218129 - DNA, 15 bp, Homo sapiens
actttaggaggccaa

SEQ ID NO: 218130 - DNA, 15 bp, Homo sapiens
cactttaggaggcca

SEQ ID NO: 218131 - DNA, 15 bp, Homo sapiens
gcatgaaatgtgaaa

SEQ ID NO: 218132 - DNA, 15 bp, Homo sapiens
ggcatgaaatgtgaa

SEQ ID NO: 218133 - DNA, 15 bp, Homo sapiens
aggcatgaaatgtga

SEQ ID NO: 218134 - DNA, 15 bp, Homo sapiens
caggcatgaaatgtg

SEQ ID NO: 218135 - DNA, 15 bp, Homo sapiens
acaggcatgaaatgt

SEQ ID NO: 218136 - DNA, 15 bp, Homo sapiens
tacaggcatgaaatg

SEQ ID NO: 218137 - DNA, 15 bp, Homo sapiens
atacaggcatgaaat

SEQ ID NO: 218138 - DNA, 15 bp, Homo sapiens
gatacaggcatgaaa

SEQ ID NO: 218139 - DNA, 15 bp, Homo sapiens
tgatacaggcatgaa

SEQ ID NO: 218140 - DNA, 15 bp, Homo sapiens
ttgatacaggcatga

SEQ ID NO: 218141 - DNA, 15 bp, Homo sapiens
tttgatacaggcatg

SEQ ID NO: 218142 - DNA, 15 bp, Homo sapiens
ttttgatacaggcat

SEQ ID NO: 218143 - DNA, 15 bp, Homo sapiens
attttgatacaggca

SEQ ID NO: 218144 - DNA, 15 bp, Homo sapiens
tattttgatacaggc

SEQ ID NO: 218145 - DNA, 15 bp, Homo sapiens
atattttgatacagg

SEQ ID NO: 218146 - DNA, 15 bp, Homo sapiens
gatattttgatacag

SEQ ID NO: 218147 - DNA, 15 bp, Homo sapiens
agatattttgataca

SEQ ID NO: 218148 - DNA, 15 bp, Homo sapiens
gagatattttgatac

SEQ ID NO: 218149 - DNA, 15 bp, Homo sapiens
tgagatattttgata

SEQ ID NO: 218150 - DNA, 15 bp, Homo sapiens
gtgagatattttgat

SEQ ID NO: 218151 - DNA, 15 bp, Homo sapiens
cgtgagatattttga

SEQ ID NO: 218152 - DNA, 15 bp, Homo sapiens
acgtgagatattttg

SEQ ID NO: 218153 - DNA, 15 bp, Homo sapiens
cacgtgagatatttt

SEQ ID NO: 218154 - DNA, 15 bp, Homo sapiens
acacgtgagatattt

SEQ ID NO: 218155 - DNA, 15 bp, Homo sapiens
gacacgtgagatatt

SEQ ID NO: 218156 - DNA, 15 bp, Homo sapiens
ggacacgtgagatat

SEQ ID NO: 218157 - DNA, 15 bp, Homo sapiens
gggacacgtgagata

SEQ ID NO: 218158 - DNA, 15 bp, Homo sapiens
tgggacacgtgagat

SEQ ID NO: 218159 - DNA, 15 bp, Homo sapiens
atgggacacgtgaga

SEQ ID NO: 218160 - DNA, 15 bp, Homo sapiens
tatgggacacgtgag

SEQ ID NO: 218161 - DNA, 15 bp, Homo sapiens
ttatgggacacgtga

SEQ ID NO: 218162 - DNA, 15 bp, Homo sapiens
tttatgggacacgtg

SEQ ID NO: 218163 - DNA, 15 bp, Homo sapiens
atttatgggacacgt

SEQ ID NO: 218164 - DNA, 15 bp, Homo sapiens
tatttatgggacacg

SEQ ID NO: 218165 - DNA, 15 bp, Homo sapiens
atatttatgggacac

SEQ ID NO: 218166 - DNA, 15 bp, Homo sapiens
tatatttatgggaca

SEQ ID NO: 218167 - DNA, 15 bp, Homo sapiens
atatatttatgggac

SEQ ID NO: 218168 - DNA, 15 bp, Homo sapiens
tatatatttatggga

SEQ ID NO: 218169 - DNA, 15 bp, Homo sapiens
atatatatttatggg

SEQ ID NO: 218170 - DNA, 15 bp, Homo sapiens
tatatatatttatgg

SEQ ID NO: 218171 - DNA, 15 bp, Homo sapiens
gtatatatatttatg

SEQ ID NO: 218172 - DNA, 15 bp, Homo sapiens
ggtatatatatttat

SEQ ID NO: 218173 - DNA, 15 bp, Homo sapiens
aggtatatatattta

SEQ ID NO: 218174 - DNA, 15 bp, Homo sapiens
taggtatatatattt

SEQ ID NO: 218175 - DNA, 15 bp, Homo sapiens
gtaggtatatatatt

SEQ ID NO: 218176 - DNA, 15 bp, Homo sapiens
agtaggtatatatat

SEQ ID NO: 218177 - DNA, 15 bp, Homo sapiens
tagtaggtatatata

SEQ ID NO: 218178 - DNA, 15 bp, Homo sapiens
gtagtaggtatatat

SEQ ID NO: 218179 - DNA, 15 bp, Homo sapiens
tgtagtaggtatata

SEQ ID NO: 218180 - DNA, 15 bp, Homo sapiens
atgtagtaggtatat

SEQ ID NO: 218181 - DNA, 15 bp, Homo sapiens
tatgtagtaggtata

SEQ ID NO: 218182 - DNA, 15 bp, Homo sapiens
gtatgtagtaggtat

SEQ ID NO: 218183 - DNA, 15 bp, Homo sapiens
ggtatgtagtaggta

SEQ ID NO: 218184 - DNA, 15 bp, Homo sapiens
gggtatgtagtaggt

SEQ ID NO: 218185 - DNA, 15 bp, Homo sapiens
tgggtatgtagtagg

SEQ ID NO: 218186 - DNA, 15 bp, Homo sapiens
gtgggtatgtagtag

SEQ ID NO: 218187 - DNA, 15 bp, Homo sapiens
tgtgggtatgtagta

SEQ ID NO: 218188 - DNA, 15 bp, Homo sapiens
ttgtgggtatgtagt

SEQ ID NO: 218189 - DNA, 15 bp, Homo sapiens
tttgtgggtatgtag

SEQ ID NO: 218190 - DNA, 15 bp, Homo sapiens
ttttgtgggtatgta

SEQ ID NO: 218191 - DNA, 15 bp, Homo sapiens
tttttgtgggtatgt

SEQ ID NO: 218192 - DNA, 15 bp, Homo sapiens
atttttgtgggtatg

SEQ ID NO: 218193 - DNA, 15 bp, Homo sapiens
aatttttgtgggtat

SEQ ID NO: 218194 - DNA, 15 bp, Homo sapiens
taatttttgtgggta

SEQ ID NO: 218195 - DNA, 15 bp, Homo sapiens
ttaatttttgtgggt

SEQ ID NO: 218196 - DNA, 15 bp, Homo sapiens
tttaatttttgtggg

SEQ ID NO: 218197 - DNA, 15 bp, Homo sapiens
ttttaatttttgtgg

SEQ ID NO: 218198 - DNA, 15 bp, Homo sapiens
tttttaatttttgtg

SEQ ID NO: 218199 - DNA, 15 bp, Homo sapiens
atttttaatttttgt

SEQ ID NO: 218200 - DNA, 15 bp, Homo sapiens
aatttttaatttttg

SEQ ID NO: 218201 - DNA, 15 bp, Homo sapiens
taatttttaattttt

SEQ ID NO: 218202 - DNA, 15 bp, Homo sapiens
ttaatttttaatttt

SEQ ID NO: 218203 - DNA, 15 bp, Homo sapiens
tttaatttttaattt

SEQ ID NO: 218204 - DNA, 15 bp, Homo sapiens
atttaatttttaatt

SEQ ID NO: 218205 - DNA, 15 bp, Homo sapiens
aatttaatttttaat

SEQ ID NO: 218206 - DNA, 15 bp, Homo sapiens
taatttaatttttaa

SEQ ID NO: 218207 - DNA, 15 bp, Homo sapiens
ttaatttaattttta

SEQ ID NO: 218208 - DNA, 15 bp, Homo sapiens
tttaatttaattttt

SEQ ID NO: 218209 - DNA, 15 bp, Homo sapiens
ttttaatttaatttt

SEQ ID NO: 218210 - DNA, 15 bp, Homo sapiens
tttttaatttaattt

SEQ ID NO: 218211 - DNA, 15 bp, Homo sapiens
ttttttaatttaatt

SEQ ID NO: 218212 - DNA, 15 bp, Homo sapiens
attttttaatttaat

SEQ ID NO: 218213 - DNA, 15 bp, Homo sapiens
tattttttaatttaa

SEQ ID NO: 218214 - DNA, 15 bp, Homo sapiens
ttattttttaattta

SEQ ID NO: 218215 - DNA, 15 bp, Homo sapiens
tttattttttaattt

SEQ ID NO: 218216 - DNA, 15 bp, Homo sapiens
ttttattttttaatt

SEQ ID NO: 218217 - DNA, 15 bp, Homo sapiens
attttattttttaat

SEQ ID NO: 218218 - DNA, 15 bp, Homo sapiens
tattttattttttaa

SEQ ID NO: 218219 - DNA, 15 bp, Homo sapiens
ttattttatttttta

SEQ ID NO: 218220 - DNA, 15 bp, Homo sapiens
tttattttatttttt

SEQ ID NO: 218221 - DNA, 15 bp, Homo sapiens
ctttattttattttt

SEQ ID NO: 218222 - DNA, 15 bp, Homo sapiens
tctttattttatttt

SEQ ID NO: 218223 - DNA, 15 bp, Homo sapiens
ctctttattttattt

SEQ ID NO: 218224 - DNA, 15 bp, Homo sapiens
tctctttattttatt

SEQ ID NO: 218225 - DNA, 15 bp, Homo sapiens
ctctctttattttat

SEQ ID NO: 218226 - DNA, 15 bp, Homo sapiens
tctctctttatttta

SEQ ID NO: 218227 - DNA, 15 bp, Homo sapiens
gtctctctttatttt

SEQ ID NO: 218228 - DNA, 15 bp, Homo sapiens
agtctctctttattt

SEQ ID NO: 218229 - DNA, 15 bp, Homo sapiens
tagtctctctttatt

SEQ ID NO: 218230 - DNA, 15 bp, Homo sapiens
ttagtctctctttat

SEQ ID NO: 218231 - DNA, 15 bp, Homo sapiens
attagtctctcttta

SEQ ID NO: 218232 - DNA, 15 bp, Homo sapiens
cattagtctctcttt

SEQ ID NO: 218233 - DNA, 15 bp, Homo sapiens
tcattagtctctctt

SEQ ID NO: 218234 - DNA, 15 bp, Homo sapiens
ctcattagtctctct

SEQ ID NO: 218235 - DNA, 15 bp, Homo sapiens
actcattagtctctc

SEQ ID NO: 218236 - DNA, 15 bp, Homo sapiens
cactcattagtctct

SEQ ID NO: 218237 - DNA, 15 bp, Homo sapiens
gcactcattagtctc

SEQ ID NO: 218238 - DNA, 15 bp, Homo sapiens
agcactcattagtct

SEQ ID NO: 218239 - DNA, 15 bp, Homo sapiens
tagcactcattagtc

SEQ ID NO: 218240 - DNA, 15 bp, Homo sapiens
ctagcactcattagt

SEQ ID NO: 218241 - DNA, 15 bp, Homo sapiens
cctagcactcattag

SEQ ID NO: 218242 - DNA, 15 bp, Homo sapiens
ccctagcactcatta

SEQ ID NO: 218243 - DNA, 15 bp, Homo sapiens
tccctagcactcatt

SEQ ID NO: 218244 - DNA, 15 bp, Homo sapiens
ttccctagcactcat

SEQ ID NO: 218245 - DNA, 15 bp, Homo sapiens
cttccctagcactca

SEQ ID NO: 218246 - DNA, 15 bp, Homo sapiens
gcttccctagcactc

SEQ ID NO: 218247 - DNA, 15 bp, Homo sapiens
tgcttccctagcact

SEQ ID NO: 218248 - DNA, 15 bp, Homo sapiens
gtgcttccctagcac

SEQ ID NO: 218249 - DNA, 15 bp, Homo sapiens
agtgcttccctagca

SEQ ID NO: 218250 - DNA, 15 bp, Homo sapiens
cagtgcttccctagc

SEQ ID NO: 218251 - DNA, 15 bp, Homo sapiens
tcagtgcttccctag

SEQ ID NO: 218252 - DNA, 15 bp, Homo sapiens
ttcagtgcttcccta

SEQ ID NO: 218253 - DNA, 15 bp, Homo sapiens
cttcagtgcttccct

SEQ ID NO: 218254 - DNA, 15 bp, Homo sapiens
tcttcagtgcttccc

SEQ ID NO: 218255 - DNA, 15 bp, Homo sapiens
gtcttcagtgcttcc

SEQ ID NO: 218256 - DNA, 15 bp, Homo sapiens
tgtcttcagtgcttc

SEQ ID NO: 218257 - DNA, 15 bp, Homo sapiens
ctgtcttcagtgctt

SEQ ID NO: 218258 - DNA, 15 bp, Homo sapiens
tctgtcttcagtgct

SEQ ID NO: 218259 - DNA, 15 bp, Homo sapiens
gtctgtcttcagtgc

SEQ ID NO: 218260 - DNA, 15 bp, Homo sapiens
agtctgtcttcagtg

SEQ ID NO: 218261 - DNA, 15 bp, Homo sapiens
tagtctgtcttcagt

SEQ ID NO: 218262 - DNA, 15 bp, Homo sapiens
ctagtctgtcttcag

SEQ ID NO: 218263 - DNA, 15 bp, Homo sapiens
gctagtctgtcttca

SEQ ID NO: 218264 - DNA, 15 bp, Homo sapiens
cgctagtctgtcttc

SEQ ID NO: 218265 - DNA, 15 bp, Homo sapiens
gcgctagtctgtctt

SEQ ID NO: 218266 - DNA, 15 bp, Homo sapiens
ggcgctagtctgtct

SEQ ID NO: 218267 - DNA, 15 bp, Homo sapiens
tggcgctagtctgtc

SEQ ID NO: 218268 - DNA, 15 bp, Homo sapiens
ttggcgctagtctgt

SEQ ID NO: 218269 - DNA, 15 bp, Homo sapiens
tttggcgctagtctg

SEQ ID NO: 218270 - DNA, 15 bp, Homo sapiens
gtttggcgctagtct

SEQ ID NO: 218271 - DNA, 15 bp, Homo sapiens
agtttggcgctagtc

SEQ ID NO: 218272 - DNA, 15 bp, Homo sapiens
cagtttggcgctagt

SEQ ID NO: 218273 - DNA, 15 bp, Homo sapiens
tcagtttggcgctag

SEQ ID NO: 218274 - DNA, 15 bp, Homo sapiens
ctcagtttggcgcta

SEQ ID NO: 218275 - DNA, 15 bp, Homo sapiens
tctcagtttggcgct

SEQ ID NO: 218276 - DNA, 15 bp, Homo sapiens
gtctcagtttggcgc

SEQ ID NO: 218277 - DNA, 15 bp, Homo sapiens
agtctcagtttggcg

SEQ ID NO: 218278 - DNA, 15 bp, Homo sapiens
aagtctcagtttggc

SEQ ID NO: 218279 - DNA, 15 bp, Homo sapiens
aaagtctcagtttgg

SEQ ID NO: 218280 - DNA, 15 bp, Homo sapiens
gaaagtctcagtttg

SEQ ID NO: 218281 - DNA, 15 bp, Homo sapiens
agaaagtctcagttt

SEQ ID NO: 218282 - DNA, 15 bp, Homo sapiens
gagaaagtctcagtt

SEQ ID NO: 218283 - DNA, 15 bp, Homo sapiens
ggagaaagtctcagt

SEQ ID NO: 218284 - DNA, 15 bp, Homo sapiens
aggagaaagtctcag

SEQ ID NO: 218285 - DNA, 15 bp, Homo sapiens
aaggagaaagtctca

SEQ ID NO: 218286 - DNA, 15 bp, Homo sapiens
aaaggagaaagtctc

SEQ ID NO: 218287 - DNA, 15 bp, Homo sapiens
caaaggagaaagtct

SEQ ID NO: 218288 - DNA, 15 bp, Homo sapiens
ccaaaggagaaagtc

SEQ ID NO: 218289 - DNA, 15 bp, Homo sapiens
tccaaaggagaaagt

SEQ ID NO: 218290 - DNA, 15 bp, Homo sapiens
ctccaaaggagaaag

SEQ ID NO: 218291 - DNA, 15 bp, Homo sapiens
tctccaaaggagaaa

SEQ ID NO: 218292 - DNA, 15 bp, Homo sapiens
atctccaaaggagaa

SEQ ID NO: 218293 - DNA, 15 bp, Homo sapiens
aatctccaaaggaga

SEQ ID NO: 218294 - DNA, 15 bp, Homo sapiens
gaatctccaaaggag

SEQ ID NO: 218295 - DNA, 15 bp, Homo sapiens
tgaatctccaaagga

SEQ ID NO: 218296 - DNA, 15 bp, Homo sapiens
ctgaatctccaaagg

SEQ ID NO: 218297 - DNA, 15 bp, Homo sapiens
cctgaatctccaaag

SEQ ID NO: 218298 - DNA, 15 bp, Homo sapiens
tcctgaatctccaaa

SEQ ID NO: 218299 - DNA, 15 bp, Homo sapiens
atcctgaatctccaa

SEQ ID NO: 218300 - DNA, 15 bp, Homo sapiens
gatcctgaatctcca

SEQ ID NO: 218301 - DNA, 15 bp, Homo sapiens
tgatcctgaatctcc

SEQ ID NO: 218302 - DNA, 15 bp, Homo sapiens
ctgatcctgaatctc

SEQ ID NO: 218303 - DNA, 15 bp, Homo sapiens
tctgatcctgaatct

SEQ ID NO: 218304 - DNA, 15 bp, Homo sapiens
ttctgatcctgaatc

SEQ ID NO: 218305 - DNA, 15 bp, Homo sapiens
tttctgatcctgaat

SEQ ID NO: 218306 - DNA, 15 bp, Homo sapiens
ctttctgatcctgaa

SEQ ID NO: 218307 - DNA, 15 bp, Homo sapiens
cctttctgatcctga

SEQ ID NO: 218308 - DNA, 15 bp, Homo sapiens
ccctttctgatcctg

SEQ ID NO: 218309 - DNA, 15 bp, Homo sapiens
tccctttctgatcct

SEQ ID NO: 218310 - DNA, 15 bp, Homo sapiens
ttccctttctgatcc

SEQ ID NO: 218311 - DNA, 15 bp, Homo sapiens
attccctttctgatc

SEQ ID NO: 218312 - DNA, 15 bp, Homo sapiens
aattccctttctgat

SEQ ID NO: 218313 - DNA, 15 bp, Homo sapiens
caattccctttctga

SEQ ID NO: 218314 - DNA, 15 bp, Homo sapiens
acaattccctttctg

SEQ ID NO: 218315 - DNA, 15 bp, Homo sapiens
tacaattccctttct

SEQ ID NO: 218316 - DNA, 15 bp, Homo sapiens
ttacaattccctttc

SEQ ID NO: 218317 - DNA, 15 bp, Homo sapiens
tttacaattcccttt

SEQ ID NO: 218318 - DNA, 15 bp, Homo sapiens
atttacaattccctt

SEQ ID NO: 218319 - DNA, 15 bp, Homo sapiens
catttacaattccct

SEQ ID NO: 218320 - DNA, 15 bp, Homo sapiens
ccatttacaattccc

SEQ ID NO: 218321 - DNA, 15 bp, Homo sapiens
tccatttacaattcc

SEQ ID NO: 218322 - DNA, 15 bp, Homo sapiens
ttccatttacaattc

SEQ ID NO: 218323 - DNA, 15 bp, Homo sapiens
attccatttacaatt

SEQ ID NO: 218324 - DNA, 15 bp, Homo sapiens
gattccatttacaat

SEQ ID NO: 218325 - DNA, 15 bp, Homo sapiens
tgattccatttacaa

SEQ ID NO: 218326 - DNA, 15 bp, Homo sapiens
atgattccatttaca

SEQ ID NO: 218327 - DNA, 15 bp, Homo sapiens
gatgattccatttac

SEQ ID NO: 218328 - DNA, 15 bp, Homo sapiens
agatgattccattta

SEQ ID NO: 218329 - DNA, 15 bp, Homo sapiens
gagatgattccattt

SEQ ID NO: 218330 - DNA, 15 bp, Homo sapiens
agagatgattccatt

SEQ ID NO: 218331 - DNA, 15 bp, Homo sapiens
tagagatgattccat

SEQ ID NO: 218332 - DNA, 15 bp, Homo sapiens
atagagatgattcca

SEQ ID NO: 218333 - DNA, 15 bp, Homo sapiens
tatagagatgattcc

SEQ ID NO: 218334 - DNA, 15 bp, Homo sapiens
gtatagagatgattc

SEQ ID NO: 218335 - DNA, 15 bp, Homo sapiens
agtatagagatgatt

SEQ ID NO: 218336 - DNA, 15 bp, Homo sapiens
aagtatagagatgat

SEQ ID NO: 218337 - DNA, 15 bp, Homo sapiens
taagtatagagatga

SEQ ID NO: 218338 - DNA, 15 bp, Homo sapiens
ttaagtatagagatg

SEQ ID NO: 218339 - DNA, 15 bp, Homo sapiens
cttaagtatagagat

SEQ ID NO: 218340 - DNA, 15 bp, Homo sapiens
acttaagtatagaga

SEQ ID NO: 218341 - DNA, 15 bp, Homo sapiens
cacttaagtatagag

SEQ ID NO: 218342 - DNA, 15 bp, Homo sapiens
tcacttaagtataga

SEQ ID NO: 218343 - DNA, 15 bp, Homo sapiens
atcacttaagtatag

SEQ ID NO: 218344 - DNA, 15 bp, Homo sapiens
aatcacttaagtata

SEQ ID NO: 218345 - DNA, 15 bp, Homo sapiens
gaatcacttaagtat

SEQ ID NO: 218346 - DNA, 15 bp, Homo sapiens
agaatcacttaagta

SEQ ID NO: 218347 - DNA, 15 bp, Homo sapiens
aagaatcacttaagt

SEQ ID NO: 218348 - DNA, 15 bp, Homo sapiens
aaagaatcacttaag

SEQ ID NO: 218349 - DNA, 15 bp, Homo sapiens
taaagaatcacttaa

SEQ ID NO: 218350 - DNA, 15 bp, Homo sapiens
ttaaagaatcactta

SEQ ID NO: 218351 - DNA, 15 bp, Homo sapiens
gttaaagaatcactt

SEQ ID NO: 218352 - DNA, 15 bp, Homo sapiens
cgttaaagaatcact

SEQ ID NO: 218353 - DNA, 15 bp, Homo sapiens
gcgttaaagaatcac

SEQ ID NO: 218354 - DNA, 15 bp, Homo sapiens
ggcgttaaagaatca

SEQ ID NO: 218355 - DNA, 15 bp, Homo sapiens
tggcgttaaagaatc

SEQ ID NO: 218356 - DNA, 15 bp, Homo sapiens
gtggcgttaaagaat

SEQ ID NO: 218357 - DNA, 15 bp, Homo sapiens
cgtggcgttaaagaa

SEQ ID NO: 218358 - DNA, 15 bp, Homo sapiens
acgtggcgttaaaga

SEQ ID NO: 218359 - DNA, 15 bp, Homo sapiens
gacgtggcgttaaag

SEQ ID NO: 218360 - DNA, 15 bp, Homo sapiens
agacgtggcgttaaa

SEQ ID NO: 218361 - DNA, 15 bp, Homo sapiens
aagacgtggcgttaa

SEQ ID NO: 218362 - DNA, 15 bp, Homo sapiens
aaagacgtggcgtta

SEQ ID NO: 218363 - DNA, 15 bp, Homo sapiens
caaagacgtggcgtt

SEQ ID NO: 218364 - DNA, 15 bp, Homo sapiens
tcaaagacgtggcgt

SEQ ID NO: 218365 - DNA, 15 bp, Homo sapiens
gtcaaagacgtggcg

SEQ ID NO: 218366 - DNA, 15 bp, Homo sapiens
ggtcaaagacgtggc

SEQ ID NO: 218367 - DNA, 15 bp, Homo sapiens
tggtcaaagacgtgg

SEQ ID NO: 218368 - DNA, 15 bp, Homo sapiens
ctggtcaaagacgtg

SEQ ID NO: 218369 - DNA, 15 bp, Homo sapiens
cctggtcaaagacgt

SEQ ID NO: 218370 - DNA, 15 bp, Homo sapiens
ccctggtcaaagacg

SEQ ID NO: 218371 - DNA, 15 bp, Homo sapiens
cccctggtcaaagac

SEQ ID NO: 218372 - DNA, 15 bp, Homo sapiens
acccctggtcaaaga

SEQ ID NO: 218373 - DNA, 15 bp, Homo sapiens
cacccctggtcaaag

SEQ ID NO: 218374 - DNA, 15 bp, Homo sapiens
acacccctggtcaaa

SEQ ID NO: 218375 - DNA, 15 bp, Homo sapiens
aacacccctggtcaa

SEQ ID NO: 218376 - DNA, 15 bp, Homo sapiens
taacacccctggtca

SEQ ID NO: 218377 - DNA, 15 bp, Homo sapiens
ataacacccctggtc

SEQ ID NO: 218378 - DNA, 15 bp, Homo sapiens
tataacacccctggt

SEQ ID NO: 218379 - DNA, 15 bp, Homo sapiens
ttataacacccctgg

SEQ ID NO: 218380 - DNA, 15 bp, Homo sapiens
gttataacacccctg

SEQ ID NO: 218381 - DNA, 15 bp, Homo sapiens
ggttataacacccct

SEQ ID NO: 218382 - DNA, 15 bp, Homo sapiens
gggttataacacccc

SEQ ID NO: 218383 - DNA, 15 bp, Homo sapiens
tgggttataacaccc

SEQ ID NO: 218384 - DNA, 15 bp, Homo sapiens
gtgggttataacacc

SEQ ID NO: 218385 - DNA, 15 bp, Homo sapiens
tgtgggttataacac

SEQ ID NO: 218386 - DNA, 15 bp, Homo sapiens
atgtgggttataaca

SEQ ID NO: 218387 - DNA, 15 bp, Homo sapiens
aatgtgggttataac

SEQ ID NO: 218388 - DNA, 15 bp, Homo sapiens
aaatgtgggttataa

SEQ ID NO: 218389 - DNA, 15 bp, Homo sapiens
aaaatgtgggttata

SEQ ID NO: 218390 - DNA, 15 bp, Homo sapiens
caaaatgtgggttat

SEQ ID NO: 218391 - DNA, 15 bp, Homo sapiens
tcaaaatgtgggtta

SEQ ID NO: 218392 - DNA, 15 bp, Homo sapiens
ttcaaaatgtgggtt

SEQ ID NO: 218393 - DNA, 15 bp, Homo sapiens
tttcaaaatgtgggt

SEQ ID NO: 218394 - DNA, 15 bp, Homo sapiens
ttttcaaaatgtggg

SEQ ID NO: 218395 - DNA, 15 bp, Homo sapiens
gttttcaaaatgtgg

SEQ ID NO: 218396 - DNA, 15 bp, Homo sapiens
agttttcaaaatgtg

SEQ ID NO: 218397 - DNA, 15 bp, Homo sapiens
tagttttcaaaatgt

SEQ ID NO: 218398 - DNA, 15 bp, Homo sapiens
ttagttttcaaaatg

SEQ ID NO: 218399 - DNA, 15 bp, Homo sapiens
gttagttttcaaaat

SEQ ID NO: 218400 - DNA, 15 bp, Homo sapiens
tgttagttttcaaaa

SEQ ID NO: 218401 - DNA, 15 bp, Homo sapiens
atgttagttttcaaa

SEQ ID NO: 218402 - DNA, 15 bp, Homo sapiens
catgttagttttcaa

SEQ ID NO: 218403 - DNA, 15 bp, Homo sapiens
tcatgttagttttca

SEQ ID NO: 218404 - DNA, 15 bp, Homo sapiens
atcatgttagttttc

SEQ ID NO: 218405 - DNA, 15 bp, Homo sapiens
tatcatgttagtttt

SEQ ID NO: 218406 - DNA, 15 bp, Homo sapiens
ctatcatgttagttt

SEQ ID NO: 218407 - DNA, 15 bp, Homo sapiens
tctatcatgttagtt

SEQ ID NO: 218408 - DNA, 15 bp, Homo sapiens
ttctatcatgttagt

SEQ ID NO: 218409 - DNA, 15 bp, Homo sapiens
tttctatcatgttag

SEQ ID NO: 218410 - DNA, 15 bp, Homo sapiens
atttctatcatgtta

SEQ ID NO: 218411 - DNA, 15 bp, Homo sapiens
tatttctatcatgtt

SEQ ID NO: 218412 - DNA, 15 bp, Homo sapiens
gtatttctatcatgt

SEQ ID NO: 218413 - DNA, 15 bp, Homo sapiens
agtatttctatcatg

SEQ ID NO: 218414 - DNA, 15 bp, Homo sapiens
cagtatttctatcat

SEQ ID NO: 218415 - DNA, 15 bp, Homo sapiens
gcagtatttctatca

SEQ ID NO: 218416 - DNA, 15 bp, Homo sapiens
tgcagtatttctatc

SEQ ID NO: 218417 - DNA, 15 bp, Homo sapiens
ctgcagtatttctat

SEQ ID NO: 218418 - DNA, 15 bp, Homo sapiens
tctgcagtatttcta

SEQ ID NO: 218419 - DNA, 15 bp, Homo sapiens
ttctgcagtatttct

SEQ ID NO: 218420 - DNA, 15 bp, Homo sapiens
gttctgcagtatttc

SEQ ID NO: 218421 - DNA, 15 bp, Homo sapiens
tgttctgcagtattt

SEQ ID NO: 218422 - DNA, 15 bp, Homo sapiens
ctgttctgcagtatt

SEQ ID NO: 218423 - DNA, 15 bp, Homo sapiens
tctgttctgcagtat

SEQ ID NO: 218424 - DNA, 15 bp, Homo sapiens
gtctgttctgcagta

SEQ ID NO: 218425 - DNA, 15 bp, Homo sapiens
tgtctgttctgcagt

SEQ ID NO: 218426 - DNA, 15 bp, Homo sapiens
ttgtctgttctgcag

SEQ ID NO: 218427 - DNA, 15 bp, Homo sapiens
cttgtctgttctgca

SEQ ID NO: 218428 - DNA, 15 bp, Homo sapiens
ccttgtctgttctgc

SEQ ID NO: 218429 - DNA, 15 bp, Homo sapiens
tccttgtctgttctg

SEQ ID NO: 218430 - DNA, 15 bp, Homo sapiens
ctccttgtctgttct

SEQ ID NO: 218431 - DNA, 15 bp, Homo sapiens
tctccttgtctgttc

SEQ ID NO: 218432 - DNA, 15 bp, Homo sapiens
gtctccttgtctgtt

SEQ ID NO: 218433 - DNA, 15 bp, Homo sapiens
agtctccttgtctgt

SEQ ID NO: 218434 - DNA, 15 bp, Homo sapiens
cagtctccttgtctg

SEQ ID NO: 218435 - DNA, 15 bp, Homo sapiens
ccagtctccttgtct

SEQ ID NO: 218436 - DNA, 15 bp, Homo sapiens
cccagtctccttgtc

SEQ ID NO: 218437 - DNA, 15 bp, Homo sapiens
acccagtctccttgt

SEQ ID NO: 218438 - DNA, 15 bp, Homo sapiens
aacccagtctccttg

SEQ ID NO: 218439 - DNA, 15 bp, Homo sapiens
aaacccagtctcctt

SEQ ID NO: 218440 - DNA, 15 bp, Homo sapiens
caaacccagtctcct

SEQ ID NO: 218441 - DNA, 15 bp, Homo sapiens
tcaaacccagtctcc

SEQ ID NO: 218442 - DNA, 15 bp, Homo sapiens
ttcaaacccagtctc

SEQ ID NO: 218443 - DNA, 15 bp, Homo sapiens
attcaaacccagtct

SEQ ID NO: 218444 - DNA, 15 bp, Homo sapiens
aattcaaacccagtc

SEQ ID NO: 218445 - DNA, 15 bp, Homo sapiens
gaattcaaacccagt

SEQ ID NO: 218446 - DNA, 15 bp, Homo sapiens
agaattcaaacccag

SEQ ID NO: 218447 - DNA, 15 bp, Homo sapiens
tagaattcaaaccca

SEQ ID NO: 218448 - DNA, 15 bp, Homo sapiens
atagaattcaaaccc

SEQ ID NO: 218449 - DNA, 15 bp, Homo sapiens
aatagaattcaaacc

SEQ ID NO: 218450 - DNA, 15 bp, Homo sapiens
aaatagaattcaaac

SEQ ID NO: 218451 - DNA, 15 bp, Homo sapiens
aaaatagaattcaaa

SEQ ID NO: 218452 - DNA, 15 bp, Homo sapiens
caaaatagaattcaa

SEQ ID NO: 218453 - DNA, 15 bp, Homo sapiens
acaaaatagaattca

SEQ ID NO: 218454 - DNA, 15 bp, Homo sapiens
cacaaaatagaattc

SEQ ID NO: 218455 - DNA, 15 bp, Homo sapiens
tcacaaaatagaatt

SEQ ID NO: 218456 - DNA, 15 bp, Homo sapiens
ctcacaaaatagaat

SEQ ID NO: 218457 - DNA, 15 bp, Homo sapiens
gctcacaaaatagaa

SEQ ID NO: 218458 - DNA, 15 bp, Homo sapiens
tgctcacaaaataga

SEQ ID NO: 218459 - DNA, 15 bp, Homo sapiens
gtgctcacaaaatag

SEQ ID NO: 218460 - DNA, 15 bp, Homo sapiens
ggtgctcacaaaata

SEQ ID NO: 218461 - DNA, 15 bp, Homo sapiens
aggtgctcacaaaat

SEQ ID NO: 218462 - DNA, 15 bp, Homo sapiens
taggtgctcacaaaa

SEQ ID NO: 218463 - DNA, 15 bp, Homo sapiens
ttaggtgctcacaaa

SEQ ID NO: 218464 - DNA, 15 bp, Homo sapiens
tttaggtgctcacaa

SEQ ID NO: 218465 - DNA, 15 bp, Homo sapiens
atttaggtgctcaca

SEQ ID NO: 218466 - DNA, 15 bp, Homo sapiens
aatttaggtgctcac

SEQ ID NO: 218467 - DNA, 15 bp, Homo sapiens
aaatttaggtgctca

SEQ ID NO: 218468 - DNA, 15 bp, Homo sapiens
caaatttaggtgctc

SEQ ID NO: 218469 - DNA, 15 bp, Homo sapiens
acaaatttaggtgct

SEQ ID NO: 218470 - DNA, 15 bp, Homo sapiens
gacaaatttaggtgc

SEQ ID NO: 218471 - DNA, 15 bp, Homo sapiens
agacaaatttaggtg

SEQ ID NO: 218472 - DNA, 15 bp, Homo sapiens
aagacaaatttaggt

SEQ ID NO: 218473 - DNA, 15 bp, Homo sapiens
caagacaaatttagg

SEQ ID NO: 218474 - DNA, 15 bp, Homo sapiens
gcaagacaaatttag

SEQ ID NO: 218475 - DNA, 15 bp, Homo sapiens
agcaagacaaattta

SEQ ID NO: 218476 - DNA, 15 bp, Homo sapiens
aagcaagacaaattt

SEQ ID NO: 218477 - DNA, 15 bp, Homo sapiens
gaagcaagacaaatt

SEQ ID NO: 218478 - DNA, 15 bp, Homo sapiens
agaagcaagacaaat

SEQ ID NO: 218479 - DNA, 15 bp, Homo sapiens
gagaagcaagacaaa

SEQ ID NO: 218480 - DNA, 15 bp, Homo sapiens
cgagaagcaagacaa

SEQ ID NO: 218481 - DNA, 15 bp, Homo sapiens
tcgagaagcaagaca

SEQ ID NO: 218482 - DNA, 15 bp, Homo sapiens
ctcgagaagcaagac

SEQ ID NO: 218483 - DNA, 15 bp, Homo sapiens
tctcgagaagcaaga

SEQ ID NO: 218484 - DNA, 15 bp, Homo sapiens
ttctcgagaagcaag

SEQ ID NO: 218485 - DNA, 15 bp, Homo sapiens
cttctcgagaagcaa

SEQ ID NO: 218486 - DNA, 15 bp, Homo sapiens
acttctcgagaagca

SEQ ID NO: 218487 - DNA, 15 bp, Homo sapiens
gacttctcgagaagc

SEQ ID NO: 218488 - DNA, 15 bp, Homo sapiens
tgacttctcgagaag

SEQ ID NO: 218489 - DNA, 15 bp, Homo sapiens
atgacttctcgagaa

SEQ ID NO: 218490 - DNA, 15 bp, Homo sapiens
aatgacttctcgaga

SEQ ID NO: 218491 - DNA, 15 bp, Homo sapiens
aaatgacttctcgag

SEQ ID NO: 218492 - DNA, 15 bp, Homo sapiens
aaaatgacttctcga

SEQ ID NO: 218493 - DNA, 15 bp, Homo sapiens
aaaaatgacttctcg

SEQ ID NO: 218494 - DNA, 15 bp, Homo sapiens
gaaaaatgacttctc

SEQ ID NO: 218495 - DNA, 15 bp, Homo sapiens
agaaaaatgacttct

SEQ ID NO: 218496 - DNA, 15 bp, Homo sapiens
tagaaaaatgacttc

SEQ ID NO: 218497 - DNA, 15 bp, Homo sapiens
atagaaaaatgactt

SEQ ID NO: 218498 - DNA, 15 bp, Homo sapiens
gatagaaaaatgact

SEQ ID NO: 218499 - DNA, 15 bp, Homo sapiens
ggatagaaaaatgac

SEQ ID NO: 218500 - DNA, 15 bp, Homo sapiens
aggatagaaaaatga

SEQ ID NO: 218501 - DNA, 15 bp, Homo sapiens
gaggatagaaaaatg

SEQ ID NO: 218502 - DNA, 15 bp, Homo sapiens
ggaggatagaaaaat

SEQ ID NO: 218503 - DNA, 15 bp, Homo sapiens
tggaggatagaaaaa

SEQ ID NO: 218504 - DNA, 15 bp, Homo sapiens
ttggaggatagaaaa

SEQ ID NO: 218505 - DNA, 15 bp, Homo sapiens
gttggaggatagaaa

SEQ ID NO: 218506 - DNA, 15 bp, Homo sapiens
tgttggaggatagaa

SEQ ID NO: 218507 - DNA, 15 bp, Homo sapiens
ctgttggaggataga

SEQ ID NO: 218508 - DNA, 15 bp, Homo sapiens
gctgttggaggatag

SEQ ID NO: 218509 - DNA, 15 bp, Homo sapiens
ggctgttggaggata

SEQ ID NO: 218510 - DNA, 15 bp, Homo sapiens
gggctgttggaggat

SEQ ID NO: 218511 - DNA, 15 bp, Homo sapiens
ggggctgttggagga

SEQ ID NO: 218512 - DNA, 15 bp, Homo sapiens
aggggctgttggagg

SEQ ID NO: 218513 - DNA, 15 bp, Homo sapiens
gaggggctgttggag

SEQ ID NO: 218514 - DNA, 15 bp, Homo sapiens
agaggggctgttgga

SEQ ID NO: 218515 - DNA, 15 bp, Homo sapiens
aagaggggctgttgg

SEQ ID NO: 218516 - DNA, 15 bp, Homo sapiens
gaagaggggctgttg

SEQ ID NO: 218517 - DNA, 15 bp, Homo sapiens
ggaagaggggctgtt

SEQ ID NO: 218518 - DNA, 15 bp, Homo sapiens
aggaagaggggctgt

SEQ ID NO: 218519 - DNA, 15 bp, Homo sapiens
caggaagaggggctg

SEQ ID NO: 218520 - DNA, 15 bp, Homo sapiens
ccaggaagaggggct

SEQ ID NO: 218521 - DNA, 15 bp, Homo sapiens
accaggaagaggggc

SEQ ID NO: 218522 - DNA, 15 bp, Homo sapiens
gaccaggaagagggg

SEQ ID NO: 218523 - DNA, 15 bp, Homo sapiens
agaccaggaagaggg

SEQ ID NO: 218524 - DNA, 15 bp, Homo sapiens
aagaccaggaagagg

SEQ ID NO: 218525 - DNA, 15 bp, Homo sapiens
taagaccaggaagag

SEQ ID NO: 218526 - DNA, 15 bp, Homo sapiens
ataagaccaggaaga

SEQ ID NO: 218527 - DNA, 15 bp, Homo sapiens
aataagaccaggaag

SEQ ID NO: 218528 - DNA, 15 bp, Homo sapiens
aaataagaccaggaa

SEQ ID NO: 218529 - DNA, 15 bp, Homo sapiens
aaaataagaccagga

SEQ ID NO: 218530 - DNA, 15 bp, Homo sapiens
aaaaataagaccagg

SEQ ID NO: 218531 - DNA, 15 bp, Homo sapiens
gaaaaataagaccag

SEQ ID NO: 218532 - DNA, 15 bp, Homo sapiens
agaaaaataagacca

SEQ ID NO: 218533 - DNA, 15 bp, Homo sapiens
aagaaaaataagacc

SEQ ID NO: 218534 - DNA, 15 bp, Homo sapiens
taagaaaaataagac

SEQ ID NO: 218535 - DNA, 15 bp, Homo sapiens
ataagaaaaataaga

SEQ ID NO: 218536 - DNA, 15 bp, Homo sapiens
tataagaaaaataag

SEQ ID NO: 218537 - DNA, 15 bp, Homo sapiens
ttataagaaaaataa

SEQ ID NO: 218538 - DNA, 15 bp, Homo sapiens
tttataagaaaaata

SEQ ID NO: 218539 - DNA, 15 bp, Homo sapiens
ttttataagaaaaat

SEQ ID NO: 218540 - DNA, 15 bp, Homo sapiens
attttataagaaaaa

SEQ ID NO: 218541 - DNA, 15 bp, Homo sapiens
cattttataagaaaa

SEQ ID NO: 218542 - DNA, 15 bp, Homo sapiens
tcattttataagaaa

SEQ ID NO: 218543 - DNA, 15 bp, Homo sapiens
ctcattttataagaa

SEQ ID NO: 218544 - DNA, 15 bp, Homo sapiens
cctcattttataaga

SEQ ID NO: 218545 - DNA, 15 bp, Homo sapiens
tcctcattttataag

SEQ ID NO: 218546 - DNA, 15 bp, Homo sapiens
ctcctcattttataa

SEQ ID NO: 218547 - DNA, 15 bp, Homo sapiens
cctcctcattttata

SEQ ID NO: 218548 - DNA, 15 bp, Homo sapiens
acctcctcattttat

SEQ ID NO: 218549 - DNA, 15 bp, Homo sapiens
aacctcctcatttta

SEQ ID NO: 218550 - DNA, 15 bp, Homo sapiens
caacctcctcatttt

SEQ ID NO: 218551 - DNA, 15 bp, Homo sapiens
ccaacctcctcattt

SEQ ID NO: 218552 - DNA, 15 bp, Homo sapiens
accaacctcctcatt

SEQ ID NO: 218553 - DNA, 15 bp, Homo sapiens
aaccaacctcctcat

SEQ ID NO: 218554 - DNA, 15 bp, Homo sapiens
taaccaacctcctca

SEQ ID NO: 218555 - DNA, 15 bp, Homo sapiens
ataaccaacctcctc

SEQ ID NO: 218556 - DNA, 15 bp, Homo sapiens
aataaccaacctcct

SEQ ID NO: 218557 - DNA, 15 bp, Homo sapiens
aaataaccaacctcc

SEQ ID NO: 218558 - DNA, 15 bp, Homo sapiens
aaaataaccaacctc

SEQ ID NO: 218559 - DNA, 15 bp, Homo sapiens
taaaataaccaacct

SEQ ID NO: 218560 - DNA, 15 bp, Homo sapiens
gtaaaataaccaacc

SEQ ID NO: 218561 - DNA, 15 bp, Homo sapiens
agtaaaataaccaac

SEQ ID NO: 218562 - DNA, 15 bp, Homo sapiens
gagtaaaataaccaa

SEQ ID NO: 218563 - DNA, 15 bp, Homo sapiens
agagtaaaataacca

SEQ ID NO: 218564 - DNA, 15 bp, Homo sapiens
aagagtaaaataacc

SEQ ID NO: 218565 - DNA, 15 bp, Homo sapiens
taagagtaaaataac

SEQ ID NO: 218566 - DNA, 15 bp, Homo sapiens
ttaagagtaaaataa

SEQ ID NO: 218567 - DNA, 15 bp, Homo sapiens
tttaagagtaaaata

SEQ ID NO: 218568 - DNA, 15 bp, Homo sapiens
ctttaagagtaaaat

SEQ ID NO: 218569 - DNA, 15 bp, Homo sapiens
tctttaagagtaaaa

SEQ ID NO: 218570 - DNA, 15 bp, Homo sapiens
ctctttaagagtaaa

SEQ ID NO: 218571 - DNA, 15 bp, Homo sapiens
actctttaagagtaa

SEQ ID NO: 218572 - DNA, 15 bp, Homo sapiens
aactctttaagagta

SEQ ID NO: 218573 - DNA, 15 bp, Homo sapiens
aaactctttaagagt

SEQ ID NO: 218574 - DNA, 15 bp, Homo sapiens
caaactctttaagag

SEQ ID NO: 218575 - DNA, 15 bp, Homo sapiens
acaaactctttaaga

SEQ ID NO: 218576 - DNA, 15 bp, Homo sapiens
cacaaactctttaag

SEQ ID NO: 218577 - DNA, 15 bp, Homo sapiens
gcacaaactctttaa

SEQ ID NO: 218578 - DNA, 15 bp, Homo sapiens
tgcacaaactcttta

SEQ ID NO: 218579 - DNA, 15 bp, Homo sapiens
ttgcacaaactcttt

SEQ ID NO: 218580 - DNA, 15 bp, Homo sapiens
attgcacaaactctt

SEQ ID NO: 218581 - DNA, 15 bp, Homo sapiens
aattgcacaaactct

SEQ ID NO: 218582 - DNA, 15 bp, Homo sapiens
aaattgcacaaactc

SEQ ID NO: 218583 - DNA, 15 bp, Homo sapiens
aaaattgcacaaact

SEQ ID NO: 218584 - DNA, 15 bp, Homo sapiens
aaaaattgcacaaac

SEQ ID NO: 218585 - DNA, 15 bp, Homo sapiens
taaaaattgcacaaa

SEQ ID NO: 218586 - DNA, 15 bp, Homo sapiens
ataaaaattgcacaa

SEQ ID NO: 218587 - DNA, 15 bp, Homo sapiens
tataaaaattgcaca

SEQ ID NO: 218588 - DNA, 15 bp, Homo sapiens
atataaaaattgcac

SEQ ID NO: 218589 - DNA, 15 bp, Homo sapiens
aatataaaaattgca

SEQ ID NO: 218590 - DNA, 15 bp, Homo sapiens
aaatataaaaattgc

SEQ ID NO: 218591 - DNA, 15 bp, Homo sapiens
aaaatataaaaattg

SEQ ID NO: 218592 - DNA, 15 bp, Homo sapiens
taaaatataaaaatt

SEQ ID NO: 218593 - DNA, 15 bp, Homo sapiens
gtaaaatataaaaat

SEQ ID NO: 218594 - DNA, 15 bp, Homo sapiens
ggtaaaatataaaaa

SEQ ID NO: 218595 - DNA, 15 bp, Homo sapiens
aggtaaaatataaaa

SEQ ID NO: 218596 - DNA, 15 bp, Homo sapiens
aaggtaaaatataaa

SEQ ID NO: 218597 - DNA, 15 bp, Homo sapiens
aaaggtaaaatataa

SEQ ID NO: 218598 - DNA, 15 bp, Homo sapiens
taaaggtaaaatata

SEQ ID NO: 218599 - DNA, 15 bp, Homo sapiens
ataaaggtaaaatat

SEQ ID NO: 218600 - DNA, 15 bp, Homo sapiens
gataaaggtaaaata

SEQ ID NO: 218601 - DNA, 15 bp, Homo sapiens
tgataaaggtaaaat

SEQ ID NO: 218602 - DNA, 15 bp, Homo sapiens
atgataaaggtaaaa

SEQ ID NO: 218603 - DNA, 15 bp, Homo sapiens
gatgataaaggtaaa

SEQ ID NO: 218604 - DNA, 15 bp, Homo sapiens
tgatgataaaggtaa

SEQ ID NO: 218605 - DNA, 15 bp, Homo sapiens
atgatgataaaggta

SEQ ID NO: 218606 - DNA, 15 bp, Homo sapiens
aatgatgataaaggt

SEQ ID NO: 218607 - DNA, 15 bp, Homo sapiens
aaatgatgataaagg

SEQ ID NO: 218608 - DNA, 15 bp, Homo sapiens
caaatgatgataaag

SEQ ID NO: 218609 - DNA, 15 bp, Homo sapiens
acaaatgatgataaa

SEQ ID NO: 218610 - DNA, 15 bp, Homo sapiens
aacaaatgatgataa

SEQ ID NO: 218611 - DNA, 15 bp, Homo sapiens
aaacaaatgatgata

SEQ ID NO: 218612 - DNA, 15 bp, Homo sapiens
aaaacaaatgatgat

SEQ ID NO: 218613 - DNA, 15 bp, Homo sapiens
gaaaacaaatgatga

SEQ ID NO: 218614 - DNA, 15 bp, Homo sapiens
ggaaaacaaatgatg

SEQ ID NO: 218615 - DNA, 15 bp, Homo sapiens
tggaaaacaaatgat

SEQ ID NO: 218616 - DNA, 15 bp, Homo sapiens
ctggaaaacaaatga

SEQ ID NO: 218617 - DNA, 15 bp, Homo sapiens
tctggaaaacaaatg

SEQ ID NO: 218618 - DNA, 15 bp, Homo sapiens
gtctggaaaacaaat

SEQ ID NO: 218619 - DNA, 15 bp, Homo sapiens
agtctggaaaacaaa

SEQ ID NO: 218620 - DNA, 15 bp, Homo sapiens
aagtctggaaaacaa

SEQ ID NO: 218621 - DNA, 15 bp, Homo sapiens
caagtctggaaaaca

SEQ ID NO: 218622 - DNA, 15 bp, Homo sapiens
gcaagtctggaaaac

SEQ ID NO: 218623 - DNA, 15 bp, Homo sapiens
tgcaagtctggaaaa

SEQ ID NO: 218624 - DNA, 15 bp, Homo sapiens
atgcaagtctggaaa

SEQ ID NO: 218625 - DNA, 15 bp, Homo sapiens
aatgcaagtctggaa

SEQ ID NO: 218626 - DNA, 15 bp, Homo sapiens
gaatgcaagtctgga

SEQ ID NO: 218627 - DNA, 15 bp, Homo sapiens
tgaatgcaagtctgg

SEQ ID NO: 218628 - DNA, 15 bp, Homo sapiens
atgaatgcaagtctg

SEQ ID NO: 218629 - DNA, 15 bp, Homo sapiens
aatgaatgcaagtct

SEQ ID NO: 218630 - DNA, 15 bp, Homo sapiens
gaatgaatgcaagtc

SEQ ID NO: 218631 - DNA, 15 bp, Homo sapiens
tgaatgaatgcaagt

SEQ ID NO: 218632 - DNA, 15 bp, Homo sapiens
ttgaatgaatgcaag

SEQ ID NO: 218633 - DNA, 15 bp, Homo sapiens
gttgaatgaatgcaa

SEQ ID NO: 218634 - DNA, 15 bp, Homo sapiens
tgttgaatgaatgca

SEQ ID NO: 218635 - DNA, 15 bp, Homo sapiens
ttgttgaatgaatgc

SEQ ID NO: 218636 - DNA, 15 bp, Homo sapiens
tttgttgaatgaatg

SEQ ID NO: 218637 - DNA, 15 bp, Homo sapiens
ttttgttgaatgaat

SEQ ID NO: 218638 - DNA, 15 bp, Homo sapiens
attttgttgaatgaa

SEQ ID NO: 218639 - DNA, 15 bp, Homo sapiens
cattttgttgaatga

SEQ ID NO: 218640 - DNA, 15 bp, Homo sapiens
acattttgttgaatg

SEQ ID NO: 218641 - DNA, 15 bp, Homo sapiens
aacattttgttgaat

SEQ ID NO: 218642 - DNA, 15 bp, Homo sapiens
aaacattttgttgaa

SEQ ID NO: 218643 - DNA, 15 bp, Homo sapiens
aaaacattttgttga

SEQ ID NO: 218644 - DNA, 15 bp, Homo sapiens
caaaacattttgttg

SEQ ID NO: 218645 - DNA, 15 bp, Homo sapiens
tcaaaacattttgtt

SEQ ID NO: 218646 - DNA, 15 bp, Homo sapiens
ctcaaaacattttgt

SEQ ID NO: 218647 - DNA, 15 bp, Homo sapiens
gctcaaaacattttg

SEQ ID NO: 218648 - DNA, 15 bp, Homo sapiens
agctcaaaacatttt

SEQ ID NO: 218649 - DNA, 15 bp, Homo sapiens
gagctcaaaacattt

SEQ ID NO: 218650 - DNA, 15 bp, Homo sapiens
tgagctcaaaacatt

SEQ ID NO: 218651 - DNA, 15 bp, Homo sapiens
atgagctcaaaacat

SEQ ID NO: 218652 - DNA, 15 bp, Homo sapiens
catgagctcaaaaca

SEQ ID NO: 218653 - DNA, 15 bp, Homo sapiens
gcatgagctcaaaac

SEQ ID NO: 218654 - DNA, 15 bp, Homo sapiens
tgcatgagctcaaaa

SEQ ID NO: 218655 - DNA, 15 bp, Homo sapiens
gtgcatgagctcaaa

SEQ ID NO: 218656 - DNA, 15 bp, Homo sapiens
ggtgcatgagctcaa

SEQ ID NO: 218657 - DNA, 15 bp, Homo sapiens
gggtgcatgagctca

SEQ ID NO: 218658 - DNA, 15 bp, Homo sapiens
cgggtgcatgagctc

SEQ ID NO: 218659 - DNA, 15 bp, Homo sapiens
ccgggtgcatgagct

SEQ ID NO: 218660 - DNA, 15 bp, Homo sapiens
tccgggtgcatgagc

SEQ ID NO: 218661 - DNA, 15 bp, Homo sapiens
ctccgggtgcatgag

SEQ ID NO: 218662 - DNA, 15 bp, Homo sapiens
actccgggtgcatga

SEQ ID NO: 218663 - DNA, 15 bp, Homo sapiens
aactccgggtgcatg

SEQ ID NO: 218664 - DNA, 15 bp, Homo sapiens
taactccgggtgcat

SEQ ID NO: 218665 - DNA, 15 bp, Homo sapiens
ttaactccgggtgca

SEQ ID NO: 218666 - DNA, 15 bp, Homo sapiens
cttaactccgggtgc

SEQ ID NO: 218667 - DNA, 15 bp, Homo sapiens
acttaactccgggtg

SEQ ID NO: 218668 - DNA, 15 bp, Homo sapiens
cacttaactccgggt

SEQ ID NO: 218669 - DNA, 15 bp, Homo sapiens
gcacttaactccggg

SEQ ID NO: 218670 - DNA, 15 bp, Homo sapiens
agcacttaactccgg

SEQ ID NO: 218671 - DNA, 15 bp, Homo sapiens
cagcacttaactccg

SEQ ID NO: 218672 - DNA, 15 bp, Homo sapiens
ccagcacttaactcc

SEQ ID NO: 218673 - DNA, 15 bp, Homo sapiens
cccagcacttaactc

SEQ ID NO: 218674 - DNA, 15 bp, Homo sapiens
tcccagcacttaact

SEQ ID NO: 218675 - DNA, 15 bp, Homo sapiens
ttcccagcacttaac

SEQ ID NO: 218676 - DNA, 15 bp, Homo sapiens
attcccagcacttaa

SEQ ID NO: 218677 - DNA, 15 bp, Homo sapiens
tattcccagcactta

SEQ ID NO: 218678 - DNA, 15 bp, Homo sapiens
atattcccagcactt

SEQ ID NO: 218679 - DNA, 15 bp, Homo sapiens
catattcccagcact

SEQ ID NO: 218680 - DNA, 15 bp, Homo sapiens
ccatattcccagcac

SEQ ID NO: 218681 - DNA, 15 bp, Homo sapiens
gccatattcccagca

SEQ ID NO: 218682 - DNA, 15 bp, Homo sapiens
ggccatattcccagc

SEQ ID NO: 218683 - DNA, 15 bp, Homo sapiens
tggccatattcccag

SEQ ID NO: 218684 - DNA, 15 bp, Homo sapiens
atggccatattccca

SEQ ID NO: 218685 - DNA, 15 bp, Homo sapiens
catggccatattccc

SEQ ID NO: 218686 - DNA, 15 bp, Homo sapiens
tcatggccatattcc

SEQ ID NO: 218687 - DNA, 15 bp, Homo sapiens
ctcatggccatattc

SEQ ID NO: 218688 - DNA, 15 bp, Homo sapiens
cctcatggccatatt

SEQ ID NO: 218689 - DNA, 15 bp, Homo sapiens
tcctcatggccatat

SEQ ID NO: 218690 - DNA, 15 bp, Homo sapiens
ttcctcatggccata

SEQ ID NO: 218691 - DNA, 15 bp, Homo sapiens
attcctcatggccat

SEQ ID NO: 218692 - DNA, 15 bp, Homo sapiens
gattcctcatggcca

SEQ ID NO: 218693 - DNA, 15 bp, Homo sapiens
ggattcctcatggcc

SEQ ID NO: 218694 - DNA, 15 bp, Homo sapiens
tggattcctcatggc

SEQ ID NO: 218695 - DNA, 15 bp, Homo sapiens
atggattcctcatgg

SEQ ID NO: 218696 - DNA, 15 bp, Homo sapiens
gatggattcctcatg

SEQ ID NO: 218697 - DNA, 15 bp, Homo sapiens
ggatggattcctcat

SEQ ID NO: 218698 - DNA, 15 bp, Homo sapiens
tggatggattcctca

SEQ ID NO: 218699 - DNA, 15 bp, Homo sapiens
atggatggattcctc

SEQ ID NO: 218700 - DNA, 15 bp, Homo sapiens
catggatggattcct

SEQ ID NO: 218701 - DNA, 15 bp, Homo sapiens
gcatggatggattcc

SEQ ID NO: 218702 - DNA, 15 bp, Homo sapiens
ggcatggatggattc

SEQ ID NO: 218703 - DNA, 15 bp, Homo sapiens
gggcatggatggatt

SEQ ID NO: 218704 - DNA, 15 bp, Homo sapiens
agggcatggatggat

SEQ ID NO: 218705 - DNA, 15 bp, Homo sapiens
cagggcatggatgga

SEQ ID NO: 218706 - DNA, 15 bp, Homo sapiens
tcagggcatggatgg

SEQ ID NO: 218707 - DNA, 15 bp, Homo sapiens
atcagggcatggatg

SEQ ID NO: 218708 - DNA, 15 bp, Homo sapiens
catcagggcatggat

SEQ ID NO: 218709 - DNA, 15 bp, Homo sapiens
tcatcagggcatgga

SEQ ID NO: 218710 - DNA, 15 bp, Homo sapiens
ttcatcagggcatgg

SEQ ID NO: 218711 - DNA, 15 bp, Homo sapiens
cttcatcagggcatg

SEQ ID NO: 218712 - DNA, 15 bp, Homo sapiens
acttcatcagggcat

SEQ ID NO: 218713 - DNA, 15 bp, Homo sapiens
aacttcatcagggca

SEQ ID NO: 218714 - DNA, 15 bp, Homo sapiens
aaacttcatcagggc

SEQ ID NO: 218715 - DNA, 15 bp, Homo sapiens
taaacttcatcaggg

SEQ ID NO: 218716 - DNA, 15 bp, Homo sapiens
ataaacttcatcagg

SEQ ID NO: 218717 - DNA, 15 bp, Homo sapiens
cataaacttcatcag

SEQ ID NO: 218718 - DNA, 15 bp, Homo sapiens
tcataaacttcatca

SEQ ID NO: 218719 - DNA, 15 bp, Homo sapiens
atcataaacttcatc

SEQ ID NO: 218720 - DNA, 15 bp, Homo sapiens
gatcataaacttcat

SEQ ID NO: 218721 - DNA, 15 bp, Homo sapiens
agatcataaacttca

SEQ ID NO: 218722 - DNA, 15 bp, Homo sapiens
aagatcataaacttc

SEQ ID NO: 218723 - DNA, 15 bp, Homo sapiens
aaagatcataaactt

SEQ ID NO: 218724 - DNA, 15 bp, Homo sapiens
gaaagatcataaact

SEQ ID NO: 218725 - DNA, 15 bp, Homo sapiens
agaaagatcataaac

SEQ ID NO: 218726 - DNA, 15 bp, Homo sapiens
aagaaagatcataaa

SEQ ID NO: 218727 - DNA, 15 bp, Homo sapiens
aaagaaagatcataa

SEQ ID NO: 218728 - DNA, 15 bp, Homo sapiens
gaaagaaagatcata

SEQ ID NO: 218729 - DNA, 15 bp, Homo sapiens
ggaaagaaagatcat

SEQ ID NO: 218730 - DNA, 15 bp, Homo sapiens
gggaaagaaagatca

SEQ ID NO: 218731 - DNA, 15 bp, Homo sapiens
ggggaaagaaagatc

SEQ ID NO: 218732 - DNA, 15 bp, Homo sapiens
gggggaaagaaagat

SEQ ID NO: 218733 - DNA, 15 bp, Homo sapiens
agggggaaagaaaga

SEQ ID NO: 218734 - DNA, 15 bp, Homo sapiens
aagggggaaagaaag

SEQ ID NO: 218735 - DNA, 15 bp, Homo sapiens
taagggggaaagaaa

SEQ ID NO: 218736 - DNA, 15 bp, Homo sapiens
ataagggggaaagaa

SEQ ID NO: 218737 - DNA, 15 bp, Homo sapiens
gataagggggaaaga

SEQ ID NO: 218738 - DNA, 15 bp, Homo sapiens
tgataagggggaaag

SEQ ID NO: 218739 - DNA, 15 bp, Homo sapiens
ttgataagggggaaa

SEQ ID NO: 218740 - DNA, 15 bp, Homo sapiens
attgataagggggaa

SEQ ID NO: 218741 - DNA, 15 bp, Homo sapiens
gattgataaggggga

SEQ ID NO: 218742 - DNA, 15 bp, Homo sapiens
agattgataaggggg

SEQ ID NO: 218743 - DNA, 15 bp, Homo sapiens
aagattgataagggg

SEQ ID NO: 218744 - DNA, 15 bp, Homo sapiens
gaagattgataaggg

SEQ ID NO: 218745 - DNA, 15 bp, Homo sapiens
ggaagattgataagg

SEQ ID NO: 218746 - DNA, 15 bp, Homo sapiens
gggaagattgataag

SEQ ID NO: 218747 - DNA, 15 bp, Homo sapiens
ggggaagattgataa

SEQ ID NO: 218748 - DNA, 15 bp, Homo sapiens
aggggaagattgata

SEQ ID NO: 218749 - DNA, 15 bp, Homo sapiens
aaggggaagattgat

SEQ ID NO: 218750 - DNA, 15 bp, Homo sapiens
aaaggggaagattga

SEQ ID NO: 218751 - DNA, 15 bp, Homo sapiens
aaaaggggaagattg

SEQ ID NO: 218752 - DNA, 15 bp, Homo sapiens
aaaaaggggaagatt

SEQ ID NO: 218753 - DNA, 15 bp, Homo sapiens
taaaaaggggaagat

SEQ ID NO: 218754 - DNA, 15 bp, Homo sapiens
ttaaaaaggggaaga

SEQ ID NO: 218755 - DNA, 15 bp, Homo sapiens
tttaaaaaggggaag

SEQ ID NO: 218756 - DNA, 15 bp, Homo sapiens
gtttaaaaaggggaa

SEQ ID NO: 218757 - DNA, 15 bp, Homo sapiens
agtttaaaaagggga

SEQ ID NO: 218758 - DNA, 15 bp, Homo sapiens
tagtttaaaaagggg

SEQ ID NO: 218759 - DNA, 15 bp, Homo sapiens
gtagtttaaaaaggg

SEQ ID NO: 218760 - DNA, 15 bp, Homo sapiens
tgtagtttaaaaagg

SEQ ID NO: 218761 - DNA, 15 bp, Homo sapiens
ctgtagtttaaaaag

SEQ ID NO: 218762 - DNA, 15 bp, Homo sapiens
actgtagtttaaaaa

SEQ ID NO: 218763 - DNA, 15 bp, Homo sapiens
cactgtagtttaaaa

SEQ ID NO: 218764 - DNA, 15 bp, Homo sapiens
tcactgtagtttaaa

SEQ ID NO: 218765 - DNA, 15 bp, Homo sapiens
ctcactgtagtttaa

SEQ ID NO: 218766 - DNA, 15 bp, Homo sapiens
actcactgtagttta

SEQ ID NO: 218767 - DNA, 15 bp, Homo sapiens
aactcactgtagttt

SEQ ID NO: 218768 - DNA, 15 bp, Homo sapiens
caactcactgtagtt

SEQ ID NO: 218769 - DNA, 15 bp, Homo sapiens
tcaactcactgtagt

SEQ ID NO: 218770 - DNA, 15 bp, Homo sapiens
ttcaactcactgtag

SEQ ID NO: 218771 - DNA, 15 bp, Homo sapiens
gttcaactcactgta

SEQ ID NO: 218772 - DNA, 15 bp, Homo sapiens
tgttcaactcactgt

SEQ ID NO: 218773 - DNA, 15 bp, Homo sapiens
atgttcaactcactg

SEQ ID NO: 218774 - DNA, 15 bp, Homo sapiens
gatgttcaactcact

SEQ ID NO: 218775 - DNA, 15 bp, Homo sapiens
agatgttcaactcac

SEQ ID NO: 218776 - DNA, 15 bp, Homo sapiens
tagatgttcaactca

SEQ ID NO: 218777 - DNA, 15 bp, Homo sapiens
atagatgttcaactc

SEQ ID NO: 218778 - DNA, 15 bp, Homo sapiens
gatagatgttcaact

SEQ ID NO: 218779 - DNA, 15 bp, Homo sapiens
agatagatgttcaac

SEQ ID NO: 218780 - DNA, 15 bp, Homo sapiens
aagatagatgttcaa

SEQ ID NO: 218781 - DNA, 15 bp, Homo sapiens
taagatagatgttca

SEQ ID NO: 218782 - DNA, 15 bp, Homo sapiens
gtaagatagatgttc

SEQ ID NO: 218783 - DNA, 15 bp, Homo sapiens
agtaagatagatgtt

SEQ ID NO: 218784 - DNA, 15 bp, Homo sapiens
aagtaagatagatgt

SEQ ID NO: 218785 - DNA, 15 bp, Homo sapiens
taagtaagatagatg

SEQ ID NO: 218786 - DNA, 15 bp, Homo sapiens
ataagtaagatagat

SEQ ID NO: 218787 - DNA, 15 bp, Homo sapiens
aataagtaagataga

SEQ ID NO: 218788 - DNA, 15 bp, Homo sapiens
aaataagtaagatag

SEQ ID NO: 218789 - DNA, 15 bp, Homo sapiens
gaaataagtaagata

SEQ ID NO: 218790 - DNA, 15 bp, Homo sapiens
tgaaataagtaagat

SEQ ID NO: 218791 - DNA, 15 bp, Homo sapiens
ttgaaataagtaaga

SEQ ID NO: 218792 - DNA, 15 bp, Homo sapiens
tttgaaataagtaag

SEQ ID NO: 218793 - DNA, 15 bp, Homo sapiens
ttttgaaataagtaa

SEQ ID NO: 218794 - DNA, 15 bp, Homo sapiens
cttttgaaataagta

SEQ ID NO: 218795 - DNA, 15 bp, Homo sapiens
tcttttgaaataagt

SEQ ID NO: 218796 - DNA, 15 bp, Homo sapiens
gtcttttgaaataag

SEQ ID NO: 218797 - DNA, 15 bp, Homo sapiens
agtcttttgaaataa

SEQ ID NO: 218798 - DNA, 15 bp, Homo sapiens
aagtcttttgaaata

SEQ ID NO: 218799 - DNA, 15 bp, Homo sapiens
taagtcttttgaaat

SEQ ID NO: 218800 - DNA, 15 bp, Homo sapiens
ttaagtcttttgaaa

SEQ ID NO: 218801 - DNA, 15 bp, Homo sapiens
attaagtcttttgaa

SEQ ID NO: 218802 - DNA, 15 bp, Homo sapiens
tattaagtcttttga

SEQ ID NO: 218803 - DNA, 15 bp, Homo sapiens
ttattaagtcttttg

SEQ ID NO: 218804 - DNA, 15 bp, Homo sapiens
tttattaagtctttt

SEQ ID NO: 218805 - DNA, 15 bp, Homo sapiens
ttttattaagtcttt

SEQ ID NO: 218806 - DNA, 15 bp, Homo sapiens
gttttattaagtctt

SEQ ID NO: 218807 - DNA, 15 bp, Homo sapiens
agttttattaagtct

SEQ ID NO: 218808 - DNA, 15 bp, Homo sapiens
tagttttattaagtc

SEQ ID NO: 218809 - DNA, 15 bp, Homo sapiens
ttagttttattaagt

SEQ ID NO: 218810 - DNA, 15 bp, Homo sapiens
tttagttttattaag

SEQ ID NO: 218811 - DNA, 15 bp, Homo sapiens
ctttagttttattaa

SEQ ID NO: 218812 - DNA, 15 bp, Homo sapiens
tctttagttttatta

SEQ ID NO: 218813 - DNA, 15 bp, Homo sapiens
atctttagttttatt

SEQ ID NO: 218814 - DNA, 15 bp, Homo sapiens
tatctttagttttat

SEQ ID NO: 218815 - DNA, 15 bp, Homo sapiens
ttatctttagtttta

SEQ ID NO: 218816 - DNA, 15 bp, Homo sapiens
cttatctttagtttt

SEQ ID NO: 218817 - DNA, 15 bp, Homo sapiens
acttatctttagttt

SEQ ID NO: 218818 - DNA, 15 bp, Homo sapiens
cacttatctttagtt

SEQ ID NO: 218819 - DNA, 15 bp, Homo sapiens
acacttatctttagt

SEQ ID NO: 218820 - DNA, 15 bp, Homo sapiens
tacacttatctttag

SEQ ID NO: 218821 - DNA, 15 bp, Homo sapiens
ctacacttatcttta

SEQ ID NO: 218822 - DNA, 15 bp, Homo sapiens
gctacacttatcttt

SEQ ID NO: 218823 - DNA, 15 bp, Homo sapiens
agctacacttatctt

SEQ ID NO: 218824 - DNA, 15 bp, Homo sapiens
aagctacacttatct

SEQ ID NO: 218825 - DNA, 15 bp, Homo sapiens
taagctacacttatc

SEQ ID NO: 218826 - DNA, 15 bp, Homo sapiens
ttaagctacacttat

SEQ ID NO: 218827 - DNA, 15 bp, Homo sapiens
tttaagctacactta

SEQ ID NO: 218828 - DNA, 15 bp, Homo sapiens
ttttaagctacactt

SEQ ID NO: 218829 - DNA, 15 bp, Homo sapiens
attttaagctacact

SEQ ID NO: 218830 - DNA, 15 bp, Homo sapiens
cattttaagctacac

SEQ ID NO: 218831 - DNA, 15 bp, Homo sapiens
acattttaagctaca

SEQ ID NO: 218832 - DNA, 15 bp, Homo sapiens
tacattttaagctac

SEQ ID NO: 218833 - DNA, 15 bp, Homo sapiens
atacattttaagcta

SEQ ID NO: 218834 - DNA, 15 bp, Homo sapiens
aatacattttaagct

SEQ ID NO: 218835 - DNA, 15 bp, Homo sapiens
aaatacattttaagc

SEQ ID NO: 218836 - DNA, 15 bp, Homo sapiens
taaatacattttaag

SEQ ID NO: 218837 - DNA, 15 bp, Homo sapiens
ttaaatacattttaa

SEQ ID NO: 218838 - DNA, 15 bp, Homo sapiens
tttaaatacatttta

SEQ ID NO: 218839 - DNA, 15 bp, Homo sapiens
atttaaatacatttt

SEQ ID NO: 218840 - DNA, 15 bp, Homo sapiens
gatttaaatacattt

SEQ ID NO: 218841 - DNA, 15 bp, Homo sapiens
ggatttaaatacatt

SEQ ID NO: 218842 - DNA, 15 bp, Homo sapiens
tggatttaaatacat

SEQ ID NO: 218843 - DNA, 15 bp, Homo sapiens
ctggatttaaataca

SEQ ID NO: 218844 - DNA, 15 bp, Homo sapiens
tctggatttaaatac

SEQ ID NO: 218845 - DNA, 15 bp, Homo sapiens
ctctggatttaaata

SEQ ID NO: 218846 - DNA, 15 bp, Homo sapiens
gctctggatttaaat

SEQ ID NO: 218847 - DNA, 15 bp, Homo sapiens
agctctggatttaaa

SEQ ID NO: 218848 - DNA, 15 bp, Homo sapiens
aagctctggatttaa

SEQ ID NO: 218849 - DNA, 15 bp, Homo sapiens
aaagctctggattta

SEQ ID NO: 218850 - DNA, 15 bp, Homo sapiens
gaaagctctggattt

SEQ ID NO: 218851 - DNA, 15 bp, Homo sapiens
tgaaagctctggatt

SEQ ID NO: 218852 - DNA, 15 bp, Homo sapiens
ttgaaagctctggat

SEQ ID NO: 218853 - DNA, 15 bp, Homo sapiens
tttgaaagctctgga

SEQ ID NO: 218854 - DNA, 15 bp, Homo sapiens
ttttgaaagctctgg

SEQ ID NO: 218855 - DNA, 15 bp, Homo sapiens
tttttgaaagctctg

SEQ ID NO: 218856 - DNA, 15 bp, Homo sapiens
ttttttgaaagctct

SEQ ID NO: 218857 - DNA, 15 bp, Homo sapiens
tttttttgaaagctc

SEQ ID NO: 218858 - DNA, 15 bp, Homo sapiens
ttttttttgaaagct

SEQ ID NO: 218859 - DNA, 15 bp, Homo sapiens
tttttttttgaaagc

SEQ ID NO: 218860 - DNA, 15 bp, Homo sapiens
ttttttttttgaaag

SEQ ID NO: 218861 - DNA, 15 bp, Homo sapiens
gttttttttttgaaa

SEQ ID NO: 218862 - DNA, 15 bp, Homo sapiens
ggttttttttttgaa

SEQ ID NO: 218863 - DNA, 15 bp, Homo sapiens
gggttttttttttga

SEQ ID NO: 218864 - DNA, 15 bp, Homo sapiens
tgggttttttttttg

SEQ ID NO: 218865 - DNA, 15 bp, Homo sapiens
gtgggtttttttttt

SEQ ID NO: 218866 - DNA, 15 bp, Homo sapiens
gagtgggtttttttt

SEQ ID NO: 218867 - DNA, 15 bp, Homo sapiens
ggagtgggttttttt

SEQ ID NO: 218868 - DNA, 15 bp, Homo sapiens
aggagtgggtttttt

SEQ ID NO: 218869 - DNA, 15 bp, Homo sapiens
caggagtgggttttt

SEQ ID NO: 218870 - DNA, 15 bp, Homo sapiens
gcaggagtgggtttt

SEQ ID NO: 218871 - DNA, 15 bp, Homo sapiens
ggcaggagtgggttt

SEQ ID NO: 218872 - DNA, 15 bp, Homo sapiens
tggcaggagtgggtt

SEQ ID NO: 218873 - DNA, 15 bp, Homo sapiens
ctggcaggagtgggt

SEQ ID NO: 218874 - DNA, 15 bp, Homo sapiens
tctggcaggagtggg

SEQ ID NO: 218875 - DNA, 15 bp, Homo sapiens
ttctggcaggagtgg

SEQ ID NO: 218876 - DNA, 15 bp, Homo sapiens
gttctggcaggagtg

SEQ ID NO: 218877 - DNA, 15 bp, Homo sapiens
cgttctggcaggagt

SEQ ID NO: 218878 - DNA, 15 bp, Homo sapiens
gcgttctggcaggag

SEQ ID NO: 218879 - DNA, 15 bp, Homo sapiens
tgcgttctggcagga

SEQ ID NO: 218880 - DNA, 15 bp, Homo sapiens
atgcgttctggcagg

SEQ ID NO: 218881 - DNA, 15 bp, Homo sapiens
gatgcgttctggcag

SEQ ID NO: 218882 - DNA, 15 bp, Homo sapiens
ggatgcgttctggca

SEQ ID NO: 218883 - DNA, 15 bp, Homo sapiens
tggatgcgttctggc

SEQ ID NO: 218884 - DNA, 15 bp, Homo sapiens
gtggatgcgttctgg

SEQ ID NO: 218885 - DNA, 15 bp, Homo sapiens
cgtggatgcgttctg

SEQ ID NO: 218886 - DNA, 15 bp, Homo sapiens
ccgtggatgcgttct

SEQ ID NO: 218887 - DNA, 15 bp, Homo sapiens
accgtggatgcgttc

SEQ ID NO: 218888 - DNA, 15 bp, Homo sapiens
gaccgtggatgcgtt

SEQ ID NO: 218889 - DNA, 15 bp, Homo sapiens
tgaccgtggatgcgt

SEQ ID NO: 218890 - DNA, 15 bp, Homo sapiens
ttgaccgtggatgcg

SEQ ID NO: 218891 - DNA, 15 bp, Homo sapiens
cttgaccgtggatgc

SEQ ID NO: 218892 - DNA, 15 bp, Homo sapiens
tcttgaccgtggatg

SEQ ID NO: 218893 - DNA, 15 bp, Homo sapiens
ctcttgaccgtggat

SEQ ID NO: 218894 - DNA, 15 bp, Homo sapiens
actcttgaccgtgga

SEQ ID NO: 218895 - DNA, 15 bp, Homo sapiens
cactcttgaccgtgg

SEQ ID NO: 218896 - DNA, 15 bp, Homo sapiens
gcactcttgaccgtg

SEQ ID NO: 218897 - DNA, 15 bp, Homo sapiens
tgcactcttgaccgt

SEQ ID NO: 218898 - DNA, 15 bp, Homo sapiens
ctgcactcttgaccg

SEQ ID NO: 218899 - DNA, 15 bp, Homo sapiens
actgcactcttgacc

SEQ ID NO: 218900 - DNA, 15 bp, Homo sapiens
cactgcactcttgac

SEQ ID NO: 218901 - DNA, 15 bp, Homo sapiens
ccactgcactcttga

SEQ ID NO: 218902 - DNA, 15 bp, Homo sapiens
gccactgcactcttg

SEQ ID NO: 218903 - DNA, 15 bp, Homo sapiens
tgccactgcactctt

SEQ ID NO: 218904 - DNA, 15 bp, Homo sapiens
ctgccactgcactct

SEQ ID NO: 218905 - DNA, 15 bp, Homo sapiens
actgccactgcactc

SEQ ID NO: 218906 - DNA, 15 bp, Homo sapiens
aactgccactgcact

SEQ ID NO: 218907 - DNA, 15 bp, Homo sapiens
aaactgccactgcac

SEQ ID NO: 218908 - DNA, 15 bp, Homo sapiens
gaaactgccactgca

SEQ ID NO: 218909 - DNA, 15 bp, Homo sapiens
agaaactgccactgc

SEQ ID NO: 218910 - DNA, 15 bp, Homo sapiens
gagaaactgccactg

SEQ ID NO: 218911 - DNA, 15 bp, Homo sapiens
tgagaaactgccact

SEQ ID NO: 218912 - DNA, 15 bp, Homo sapiens
ctgagaaactgccac

SEQ ID NO: 218913 - DNA, 15 bp, Homo sapiens
tctgagaaactgcca

SEQ ID NO: 218914 - DNA, 15 bp, Homo sapiens
ttctgagaaactgcc

SEQ ID NO: 218915 - DNA, 15 bp, Homo sapiens
cttctgagaaactgc

SEQ ID NO: 218916 - DNA, 15 bp, Homo sapiens
acttctgagaaactg

SEQ ID NO: 218917 - DNA, 15 bp, Homo sapiens
gacttctgagaaact

SEQ ID NO: 218918 - DNA, 15 bp, Homo sapiens
ggacttctgagaaac

SEQ ID NO: 218919 - DNA, 15 bp, Homo sapiens
tggacttctgagaaa

SEQ ID NO: 218920 - DNA, 15 bp, Homo sapiens
gtggacttctgagaa

SEQ ID NO: 218921 - DNA, 15 bp, Homo sapiens
agtggacttctgaga

SEQ ID NO: 218922 - DNA, 15 bp, Homo sapiens
tagtggacttctgag

SEQ ID NO: 218923 - DNA, 15 bp, Homo sapiens
ctagtggacttctga

SEQ ID NO: 218924 - DNA, 15 bp, Homo sapiens
tctagtggacttctg

SEQ ID NO: 218925 - DNA, 15 bp, Homo sapiens
ctctagtggacttct

SEQ ID NO: 218926 - DNA, 15 bp, Homo sapiens
cctctagtggacttc

SEQ ID NO: 218927 - DNA, 15 bp, Homo sapiens
ccctctagtggactt

SEQ ID NO: 218928 - DNA, 15 bp, Homo sapiens
gccctctagtggact

SEQ ID NO: 218929 - DNA, 15 bp, Homo sapiens
cgccctctagtggac

SEQ ID NO: 218930 - DNA, 15 bp, Homo sapiens
gcgccctctagtgga

SEQ ID NO: 218931 - DNA, 15 bp, Homo sapiens
cgcgccctctagtgg

SEQ ID NO: 218932 - DNA, 15 bp, Homo sapiens
gcgcgccctctagtg

SEQ ID NO: 218933 - DNA, 15 bp, Homo sapiens
tgcgcgccctctagt

SEQ ID NO: 218934 - DNA, 15 bp, Homo sapiens
gtgcgcgccctctag

SEQ ID NO: 218935 - DNA, 15 bp, Homo sapiens
tgtgcgcgccctcta

SEQ ID NO: 218936 - DNA, 15 bp, Homo sapiens
atgtgcgcgccctct

SEQ ID NO: 218937 - DNA, 15 bp, Homo sapiens
aatgtgcgcgccctc

SEQ ID NO: 218938 - DNA, 15 bp, Homo sapiens
aaatgtgcgcgccct

SEQ ID NO: 218939 - DNA, 15 bp, Homo sapiens
aaaatgtgcgcgccc

SEQ ID NO: 218940 - DNA, 15 bp, Homo sapiens
aaaaatgtgcgcgcc

SEQ ID NO: 218941 - DNA, 15 bp, Homo sapiens
aaaaaatgtgcgcgc

SEQ ID NO: 218942 - DNA, 15 bp, Homo sapiens
aaaaaaatgtgcgcg

SEQ ID NO: 218943 - DNA, 15 bp, Homo sapiens
taaaaaaatgtgcgc

SEQ ID NO: 218944 - DNA, 15 bp, Homo sapiens
ataaaaaaatgtgcg

SEQ ID NO: 218945 - DNA, 15 bp, Homo sapiens
aataaaaaaatgtgc

SEQ ID NO: 218946 - DNA, 15 bp, Homo sapiens
gaataaaaaaatgtg

SEQ ID NO: 218947 - DNA, 15 bp, Homo sapiens
ggaataaaaaaatgt

SEQ ID NO: 218948 - DNA, 15 bp, Homo sapiens
gggaataaaaaaatg

SEQ ID NO: 218949 - DNA, 15 bp, Homo sapiens
ggggaataaaaaaat

SEQ ID NO: 218950 - DNA, 15 bp, Homo sapiens
tggggaataaaaaaa

SEQ ID NO: 218951 - DNA, 15 bp, Homo sapiens
ttggggaataaaaaa

SEQ ID NO: 218952 - DNA, 15 bp, Homo sapiens
cttggggaataaaaa

SEQ ID NO: 218953 - DNA, 15 bp, Homo sapiens
tcttggggaataaaa

SEQ ID NO: 218954 - DNA, 15 bp, Homo sapiens
ttcttggggaataaa

SEQ ID NO: 218955 - DNA, 15 bp, Homo sapiens
tttcttggggaataa

SEQ ID NO: 218956 - DNA, 15 bp, Homo sapiens
ctttcttggggaata

SEQ ID NO: 218957 - DNA, 15 bp, Homo sapiens
gctttcttggggaat

SEQ ID NO: 218958 - DNA, 15 bp, Homo sapiens
tgctttcttggggaa

SEQ ID NO: 218959 - DNA, 15 bp, Homo sapiens
atgctttcttgggga

SEQ ID NO: 218960 - DNA, 15 bp, Homo sapiens
aatgctttcttgggg

SEQ ID NO: 218961 - DNA, 15 bp, Homo sapiens
aaatgctttcttggg

SEQ ID NO: 218962 - DNA, 15 bp, Homo sapiens
taaatgctttcttgg

SEQ ID NO: 218963 - DNA, 15 bp, Homo sapiens
ataaatgctttcttg

SEQ ID NO: 218964 - DNA, 15 bp, Homo sapiens
cataaatgctttctt

SEQ ID NO: 218965 - DNA, 15 bp, Homo sapiens
acataaatgctttct

SEQ ID NO: 218966 - DNA, 15 bp, Homo sapiens
cacataaatgctttc

SEQ ID NO: 218967 - DNA, 15 bp, Homo sapiens
ccacataaatgcttt

SEQ ID NO: 218968 - DNA, 15 bp, Homo sapiens
cccacataaatgctt

SEQ ID NO: 218969 - DNA, 15 bp, Homo sapiens
acccacataaatgct

SEQ ID NO: 218970 - DNA, 15 bp, Homo sapiens
gacccacataaatgc

SEQ ID NO: 218971 - DNA, 15 bp, Homo sapiens
ggacccacataaatg

SEQ ID NO: 218972 - DNA, 15 bp, Homo sapiens
aggacccacataaat

SEQ ID NO: 218973 - DNA, 15 bp, Homo sapiens
caggacccacataaa

SEQ ID NO: 218974 - DNA, 15 bp, Homo sapiens
gcaggacccacataa

SEQ ID NO: 218975 - DNA, 15 bp, Homo sapiens
ggcaggacccacata

SEQ ID NO: 218976 - DNA, 15 bp, Homo sapiens
gggcaggacccacat

SEQ ID NO: 218977 - DNA, 15 bp, Homo sapiens
ggggcaggacccaca

SEQ ID NO: 218978 - DNA, 15 bp, Homo sapiens
aggggcaggacccac

SEQ ID NO: 218979 - DNA, 15 bp, Homo sapiens
caggggcaggaccca

SEQ ID NO: 218980 - DNA, 15 bp, Homo sapiens
tcaggggcaggaccc

SEQ ID NO: 218981 - DNA, 15 bp, Homo sapiens
ttcaggggcaggacc

SEQ ID NO: 218982 - DNA, 15 bp, Homo sapiens
cttcaggggcaggac

SEQ ID NO: 218983 - DNA, 15 bp, Homo sapiens
acttcaggggcagga

SEQ ID NO: 218984 - DNA, 15 bp, Homo sapiens
aacttcaggggcagg

SEQ ID NO: 218985 - DNA, 15 bp, Homo sapiens
aaacttcaggggcag

SEQ ID NO: 218986 - DNA, 15 bp, Homo sapiens
caaacttcaggggca

SEQ ID NO: 218987 - DNA, 15 bp, Homo sapiens
ccaaacttcaggggc

SEQ ID NO: 218988 - DNA, 15 bp, Homo sapiens
gccaaacttcagggg

SEQ ID NO: 218989 - DNA, 15 bp, Homo sapiens
cgccaaacttcaggg

SEQ ID NO: 218990 - DNA, 15 bp, Homo sapiens
acgccaaacttcagg

SEQ ID NO: 218991 - DNA, 15 bp, Homo sapiens
aacgccaaacttcag

SEQ ID NO: 218992 - DNA, 15 bp, Homo sapiens
caacgccaaacttca

SEQ ID NO: 218993 - DNA, 15 bp, Homo sapiens
ccaacgccaaacttc

SEQ ID NO: 218994 - DNA, 15 bp, Homo sapiens
accaacgccaaactt

SEQ ID NO: 218995 - DNA, 15 bp, Homo sapiens
caccaacgccaaact

SEQ ID NO: 218996 - DNA, 15 bp, Homo sapiens
acaccaacgccaaac

SEQ ID NO: 218997 - DNA, 15 bp, Homo sapiens
gacaccaacgccaaa

SEQ ID NO: 218998 - DNA, 15 bp, Homo sapiens
agacaccaacgccaa

SEQ ID NO: 218999 - DNA, 15 bp, Homo sapiens
gagacaccaacgcca

SEQ ID NO: 219000 - DNA, 15 bp, Homo sapiens
agagacaccaacgcc

SEQ ID NO: 219001 - DNA, 15 bp, Homo sapiens
aagagacaccaacgc

SEQ ID NO: 219002 - DNA, 15 bp, Homo sapiens
aaagagacaccaacg

SEQ ID NO: 219003 - DNA, 15 bp, Homo sapiens
aaaagagacaccaac

SEQ ID NO: 219004 - DNA, 15 bp, Homo sapiens
gaaaagagacaccaa

SEQ ID NO: 219005 - DNA, 15 bp, Homo sapiens
ggaaaagagacacca

SEQ ID NO: 219006 - DNA, 15 bp, Homo sapiens
gggaaaagagacacc

SEQ ID NO: 219007 - DNA, 15 bp, Homo sapiens
ggggaaaagagacac

SEQ ID NO: 219008 - DNA, 15 bp, Homo sapiens
tggggaaaagagaca

SEQ ID NO: 219009 - DNA, 15 bp, Homo sapiens
gtggggaaaagagac

SEQ ID NO: 219010 - DNA, 15 bp, Homo sapiens
tgtggggaaaagaga

SEQ ID NO: 219011 - DNA, 15 bp, Homo sapiens
atgtggggaaaagag

SEQ ID NO: 219012 - DNA, 15 bp, Homo sapiens
aatgtggggaaaaga

SEQ ID NO: 219013 - DNA, 15 bp, Homo sapiens
aaatgtggggaaaag

SEQ ID NO: 219014 - DNA, 15 bp, Homo sapiens
aaaatgtggggaaaa

SEQ ID NO: 219015 - DNA, 15 bp, Homo sapiens
taaaatgtggggaaa

SEQ ID NO: 219016 - DNA, 15 bp, Homo sapiens
ataaaatgtggggaa

SEQ ID NO: 219017 - DNA, 15 bp, Homo sapiens
cataaaatgtgggga

SEQ ID NO: 219018 - DNA, 15 bp, Homo sapiens
gcataaaatgtgggg

SEQ ID NO: 219019 - DNA, 15 bp, Homo sapiens
tgcataaaatgtggg

SEQ ID NO: 219020 - DNA, 15 bp, Homo sapiens
ttgcataaaatgtgg

SEQ ID NO: 219021 - DNA, 15 bp, Homo sapiens
gttgcataaaatgtg

SEQ ID NO: 219022 - DNA, 15 bp, Homo sapiens
cgttgcataaaatgt

SEQ ID NO: 219023 - DNA, 15 bp, Homo sapiens
acgttgcataaaatg

SEQ ID NO: 219024 - DNA, 15 bp, Homo sapiens
cacgttgcataaaat

SEQ ID NO: 219025 - DNA, 15 bp, Homo sapiens
ccacgttgcataaaa

SEQ ID NO: 219026 - DNA, 15 bp, Homo sapiens
cccacgttgcataaa

SEQ ID NO: 219027 - DNA, 15 bp, Homo sapiens
ccccacgttgcataa

SEQ ID NO: 219028 - DNA, 15 bp, Homo sapiens
gccccacgttgcata

SEQ ID NO: 219029 - DNA, 15 bp, Homo sapiens
tgccccacgttgcat

SEQ ID NO: 219030 - DNA, 15 bp, Homo sapiens
ttgccccacgttgca

SEQ ID NO: 219031 - DNA, 15 bp, Homo sapiens
cttgccccacgttgc

SEQ ID NO: 219032 - DNA, 15 bp, Homo sapiens
gcttgccccacgttg

SEQ ID NO: 219033 - DNA, 15 bp, Homo sapiens
cgcttgccccacgtt

SEQ ID NO: 219034 - DNA, 15 bp, Homo sapiens
acgcttgccccacgt

SEQ ID NO: 219035 - DNA, 15 bp, Homo sapiens
cacgcttgccccacg

SEQ ID NO: 219036 - DNA, 15 bp, Homo sapiens
tcacgcttgccccac

SEQ ID NO: 219037 - DNA, 15 bp, Homo sapiens
gtcacgcttgcccca

SEQ ID NO: 219038 - DNA, 15 bp, Homo sapiens
cgtcacgcttgcccc

SEQ ID NO: 219039 - DNA, 15 bp, Homo sapiens
tcgtcacgcttgccc

SEQ ID NO: 219040 - DNA, 15 bp, Homo sapiens
ctcgtcacgcttgcc

SEQ ID NO: 219041 - DNA, 15 bp, Homo sapiens
actcgtcacgcttgc

SEQ ID NO: 219042 - DNA, 15 bp, Homo sapiens
gactcgtcacgcttg

SEQ ID NO: 219043 - DNA, 15 bp, Homo sapiens
ggactcgtcacgctt

SEQ ID NO: 219044 - DNA, 15 bp, Homo sapiens
aggactcgtcacgct

SEQ ID NO: 219045 - DNA, 15 bp, Homo sapiens
gaggactcgtcacgc

SEQ ID NO: 219046 - DNA, 15 bp, Homo sapiens
tgaggactcgtcacg

SEQ ID NO: 219047 - DNA, 15 bp, Homo sapiens
ttgaggactcgtcac

SEQ ID NO: 219048 - DNA, 15 bp, Homo sapiens
cttgaggactcgtca

SEQ ID NO: 219049 - DNA, 15 bp, Homo sapiens
acttgaggactcgtc

SEQ ID NO: 219050 - DNA, 15 bp, Homo sapiens
aacttgaggactcgt

SEQ ID NO: 219051 - DNA, 15 bp, Homo sapiens
gaacttgaggactcg

SEQ ID NO: 219052 - DNA, 15 bp, Homo sapiens
agaacttgaggactc

SEQ ID NO: 219053 - DNA, 15 bp, Homo sapiens
gagaacttgaggact

SEQ ID NO: 219054 - DNA, 15 bp, Homo sapiens
agagaacttgaggac

SEQ ID NO: 219055 - DNA, 15 bp, Homo sapiens
gagagaacttgagga

SEQ ID NO: 219056 - DNA, 15 bp, Homo sapiens
tgagagaacttgagg

SEQ ID NO: 219057 - DNA, 15 bp, Homo sapiens
gtgagagaacttgag

SEQ ID NO: 219058 - DNA, 15 bp, Homo sapiens
agtgagagaacttga

SEQ ID NO: 219059 - DNA, 15 bp, Homo sapiens
gagtgagagaacttg

SEQ ID NO: 219060 - DNA, 15 bp, Homo sapiens
ggagtgagagaactt

SEQ ID NO: 219061 - DNA, 15 bp, Homo sapiens
tggagtgagagaact

SEQ ID NO: 219062 - DNA, 15 bp, Homo sapiens
gtggagtgagagaac

SEQ ID NO: 219063 - DNA, 15 bp, Homo sapiens
ggtggagtgagagaa

SEQ ID NO: 219064 - DNA, 15 bp, Homo sapiens
tggtggagtgagaga

SEQ ID NO: 219065 - DNA, 15 bp, Homo sapiens
ttggtggagtgagag

SEQ ID NO: 219066 - DNA, 15 bp, Homo sapiens
gttggtggagtgaga

SEQ ID NO: 219067 - DNA, 15 bp, Homo sapiens
ggttggtggagtgag

SEQ ID NO: 219068 - DNA, 15 bp, Homo sapiens
gggttggtggagtga

SEQ ID NO: 219069 - DNA, 15 bp, Homo sapiens
tgggttggtggagtg

SEQ ID NO: 219070 - DNA, 15 bp, Homo sapiens
atgggttggtggagt

SEQ ID NO: 219071 - DNA, 15 bp, Homo sapiens
gatgggttggtggag

SEQ ID NO: 219072 - DNA, 15 bp, Homo sapiens
ggatgggttggtgga

SEQ ID NO: 219073 - DNA, 15 bp, Homo sapiens
aggatgggttggtgg

SEQ ID NO: 219074 - DNA, 15 bp, Homo sapiens
aaggatgggttggtg

SEQ ID NO: 219075 - DNA, 15 bp, Homo sapiens
taaggatgggttggt

SEQ ID NO: 219076 - DNA, 15 bp, Homo sapiens
gtaaggatgggttgg

SEQ ID NO: 219077 - DNA, 15 bp, Homo sapiens
ggtaaggatgggttg

SEQ ID NO: 219078 - DNA, 15 bp, Homo sapiens
gggtaaggatgggtt

SEQ ID NO: 219079 - DNA, 15 bp, Homo sapiens
ggggtaaggatgggt

SEQ ID NO: 219080 - DNA, 15 bp, Homo sapiens
tggggtaaggatggg

SEQ ID NO: 219081 - DNA, 15 bp, Homo sapiens
atggggtaaggatgg

SEQ ID NO: 219082 - DNA, 15 bp, Homo sapiens
catggggtaaggatg

SEQ ID NO: 219083 - DNA, 15 bp, Homo sapiens
gcatggggtaaggat

SEQ ID NO: 219084 - DNA, 15 bp, Homo sapiens
ggcatggggtaagga

SEQ ID NO: 219085 - DNA, 15 bp, Homo sapiens
cggcatggggtaagg

SEQ ID NO: 219086 - DNA, 15 bp, Homo sapiens
acggcatggggtaag

SEQ ID NO: 219087 - DNA, 15 bp, Homo sapiens
cacggcatggggtaa

SEQ ID NO: 219088 - DNA, 15 bp, Homo sapiens
tcacggcatggggta

SEQ ID NO: 219089 - DNA, 15 bp, Homo sapiens
gtcacggcatggggt

SEQ ID NO: 219090 - DNA, 15 bp, Homo sapiens
agtcacggcatgggg

SEQ ID NO: 219091 - DNA, 15 bp, Homo sapiens
aagtcacggcatggg

SEQ ID NO: 219092 - DNA, 15 bp, Homo sapiens
gaagtcacggcatgg

SEQ ID NO: 219093 - DNA, 15 bp, Homo sapiens
agaagtcacggcatg

SEQ ID NO: 219094 - DNA, 15 bp, Homo sapiens
gagaagtcacggcat

SEQ ID NO: 219095 - DNA, 15 bp, Homo sapiens
ggagaagtcacggca

SEQ ID NO: 219096 - DNA, 15 bp, Homo sapiens
aggagaagtcacggc

SEQ ID NO: 219097 - DNA, 15 bp, Homo sapiens
gaggagaagtcacgg

SEQ ID NO: 219098 - DNA, 15 bp, Homo sapiens
agaggagaagtcacg

SEQ ID NO: 219099 - DNA, 15 bp, Homo sapiens
cagaggagaagtcac

SEQ ID NO: 219100 - DNA, 15 bp, Homo sapiens
gcagaggagaagtca

SEQ ID NO: 219101 - DNA, 15 bp, Homo sapiens
ggcagaggagaagtc

SEQ ID NO: 219102 - DNA, 15 bp, Homo sapiens
tggcagaggagaagt

SEQ ID NO: 219103 - DNA, 15 bp, Homo sapiens
atggcagaggagaag

SEQ ID NO: 219104 - DNA, 15 bp, Homo sapiens
tatggcagaggagaa

SEQ ID NO: 219105 - DNA, 15 bp, Homo sapiens
ttatggcagaggaga

SEQ ID NO: 219106 - DNA, 15 bp, Homo sapiens
gttatggcagaggag

SEQ ID NO: 219107 - DNA, 15 bp, Homo sapiens
cgttatggcagagga

SEQ ID NO: 219108 - DNA, 15 bp, Homo sapiens
tcgttatggcagagg

SEQ ID NO: 219109 - DNA, 15 bp, Homo sapiens
ttcgttatggcagag

SEQ ID NO: 219110 - DNA, 15 bp, Homo sapiens
cttcgttatggcaga

SEQ ID NO: 219111 - DNA, 15 bp, Homo sapiens
tcttcgttatggcag

SEQ ID NO: 219112 - DNA, 15 bp, Homo sapiens
ttcttcgttatggca

SEQ ID NO: 219113 - DNA, 15 bp, Homo sapiens
attcttcgttatggc

SEQ ID NO: 219114 - DNA, 15 bp, Homo sapiens
aattcttcgttatgg

SEQ ID NO: 219115 - DNA, 15 bp, Homo sapiens
taattcttcgttatg

SEQ ID NO: 219116 - DNA, 15 bp, Homo sapiens
gtaattcttcgttat

SEQ ID NO: 219117 - DNA, 15 bp, Homo sapiens
agtaattcttcgtta

SEQ ID NO: 219118 - DNA, 15 bp, Homo sapiens
aagtaattcttcgtt

SEQ ID NO: 219119 - DNA, 15 bp, Homo sapiens
aaagtaattcttcgt

SEQ ID NO: 219120 - DNA, 15 bp, Homo sapiens
caaagtaattcttcg

SEQ ID NO: 219121 - DNA, 15 bp, Homo sapiens
gcaaagtaattcttc

SEQ ID NO: 219122 - DNA, 15 bp, Homo sapiens
agcaaagtaattctt

SEQ ID NO: 219123 - DNA, 15 bp, Homo sapiens
gagcaaagtaattct

SEQ ID NO: 219124 - DNA, 15 bp, Homo sapiens
tgagcaaagtaattc

SEQ ID NO: 219125 - DNA, 15 bp, Homo sapiens
gtgagcaaagtaatt

SEQ ID NO: 219126 - DNA, 15 bp, Homo sapiens
tgtgagcaaagtaat

SEQ ID NO: 219127 - DNA, 15 bp, Homo sapiens
gtgtgagcaaagtaa

SEQ ID NO: 219128 - DNA, 15 bp, Homo sapiens
tgtgtgagcaaagta

SEQ ID NO: 219129 - DNA, 15 bp, Homo sapiens
ttgtgtgagcaaagt

SEQ ID NO: 219130 - DNA, 15 bp, Homo sapiens
gttgtgtgagcaaag

SEQ ID NO: 219131 - DNA, 15 bp, Homo sapiens
ggttgtgtgagcaaa

SEQ ID NO: 219132 - DNA, 15 bp, Homo sapiens
tggttgtgtgagcaa

SEQ ID NO: 219133 - DNA, 15 bp, Homo sapiens
gtggttgtgtgagca

SEQ ID NO: 219134 - DNA, 15 bp, Homo sapiens
tgtggttgtgtgagc

SEQ ID NO: 219135 - DNA, 15 bp, Homo sapiens
ttgtggttgtgtgag

SEQ ID NO: 219136 - DNA, 15 bp, Homo sapiens
gttgtggttgtgtga

SEQ ID NO: 219137 - DNA, 15 bp, Homo sapiens
tgttgtggttgtgtg

SEQ ID NO: 219138 - DNA, 15 bp, Homo sapiens
ctgttgtggttgtgt

SEQ ID NO: 219139 - DNA, 15 bp, Homo sapiens
actgttgtggttgtg

SEQ ID NO: 219140 - DNA, 15 bp, Homo sapiens
aactgttgtggttgt

SEQ ID NO: 219141 - DNA, 15 bp, Homo sapiens
aaactgttgtggttg

SEQ ID NO: 219142 - DNA, 15 bp, Homo sapiens
gaaactgttgtggtt

SEQ ID NO: 219143 - DNA, 15 bp, Homo sapiens
cgaaactgttgtggt

SEQ ID NO: 219144 - DNA, 15 bp, Homo sapiens
acgaaactgttgtgg

SEQ ID NO: 219145 - DNA, 15 bp, Homo sapiens
aacgaaactgttgtg

SEQ ID NO: 219146 - DNA, 15 bp, Homo sapiens
aaacgaaactgttgt

SEQ ID NO: 219147 - DNA, 15 bp, Homo sapiens
gaaacgaaactgttg

SEQ ID NO: 219148 - DNA, 15 bp, Homo sapiens
agaaacgaaactgtt

SEQ ID NO: 219149 - DNA, 15 bp, Homo sapiens
cagaaacgaaactgt

SEQ ID NO: 219150 - DNA, 15 bp, Homo sapiens
acagaaacgaaactg

SEQ ID NO: 219151 - DNA, 15 bp, Homo sapiens
aacagaaacgaaact

SEQ ID NO: 219152 - DNA, 15 bp, Homo sapiens
aaacagaaacgaaac

SEQ ID NO: 219153 - DNA, 15 bp, Homo sapiens
gaaacagaaacgaaa

SEQ ID NO: 219154 - DNA, 15 bp, Homo sapiens
ggaaacagaaacgaa

SEQ ID NO: 219155 - DNA, 15 bp, Homo sapiens
tggaaacagaaacga

SEQ ID NO: 219156 - DNA, 15 bp, Homo sapiens
ctggaaacagaaacg

SEQ ID NO: 219157 - DNA, 15 bp, Homo sapiens
actggaaacagaaac

SEQ ID NO: 219158 - DNA, 15 bp, Homo sapiens
tactggaaacagaaa

SEQ ID NO: 219159 - DNA, 15 bp, Homo sapiens
atactggaaacagaa

SEQ ID NO: 219160 - DNA, 15 bp, Homo sapiens
aatactggaaacaga

SEQ ID NO: 219161 - DNA, 15 bp, Homo sapiens
aaatactggaaacag

SEQ ID NO: 219162 - DNA, 15 bp, Homo sapiens
caaatactggaaaca

SEQ ID NO: 219163 - DNA, 15 bp, Homo sapiens
gcaaatactggaaac

SEQ ID NO: 219164 - DNA, 15 bp, Homo sapiens
ggcaaatactggaaa

SEQ ID NO: 219165 - DNA, 15 bp, Homo sapiens
gggcaaatactggaa

SEQ ID NO: 219166 - DNA, 15 bp, Homo sapiens
agggcaaatactgga

SEQ ID NO: 219167 - DNA, 15 bp, Homo sapiens
aagggcaaatactgg

SEQ ID NO: 219168 - DNA, 15 bp, Homo sapiens
aaagggcaaatactg

SEQ ID NO: 219169 - DNA, 15 bp, Homo sapiens
aaaagggcaaatact

SEQ ID NO: 219170 - DNA, 15 bp, Homo sapiens
caaaagggcaaatac

SEQ ID NO: 219171 - DNA, 15 bp, Homo sapiens
tcaaaagggcaaata

SEQ ID NO: 219172 - DNA, 15 bp, Homo sapiens
gtcaaaagggcaaat

SEQ ID NO: 219173 - DNA, 15 bp, Homo sapiens
tgtcaaaagggcaaa

SEQ ID NO: 219174 - DNA, 15 bp, Homo sapiens
atgtcaaaagggcaa

SEQ ID NO: 219175 - DNA, 15 bp, Homo sapiens
aatgtcaaaagggca

SEQ ID NO: 219176 - DNA, 15 bp, Homo sapiens
aaatgtcaaaagggc

SEQ ID NO: 219177 - DNA, 15 bp, Homo sapiens
aaaatgtcaaaaggg

SEQ ID NO: 219178 - DNA, 15 bp, Homo sapiens
taaaatgtcaaaagg

SEQ ID NO: 219179 - DNA, 15 bp, Homo sapiens
ctaaaatgtcaaaag

SEQ ID NO: 219180 - DNA, 15 bp, Homo sapiens
tctaaaatgtcaaaa

SEQ ID NO: 219181 - DNA, 15 bp, Homo sapiens
ttctaaaatgtcaaa

SEQ ID NO: 219182 - DNA, 15 bp, Homo sapiens
cttctaaaatgtcaa

SEQ ID NO: 219183 - DNA, 15 bp, Homo sapiens
tcttctaaaatgtca

SEQ ID NO: 219184 - DNA, 15 bp, Homo sapiens
ttcttctaaaatgtc

SEQ ID NO: 219185 - DNA, 15 bp, Homo sapiens
tttcttctaaaatgt

SEQ ID NO: 219186 - DNA, 15 bp, Homo sapiens
atttcttctaaaatg

SEQ ID NO: 219187 - DNA, 15 bp, Homo sapiens
tatttcttctaaaat

SEQ ID NO: 219188 - DNA, 15 bp, Homo sapiens
ttatttcttctaaaa

SEQ ID NO: 219189 - DNA, 15 bp, Homo sapiens
cttatttcttctaaa

SEQ ID NO: 219190 - DNA, 15 bp, Homo sapiens
tcttatttcttctaa

SEQ ID NO: 219191 - DNA, 15 bp, Homo sapiens
atcttatttcttcta

SEQ ID NO: 219192 - DNA, 15 bp, Homo sapiens
gatcttatttcttct

SEQ ID NO: 219193 - DNA, 15 bp, Homo sapiens
ggatcttatttcttc

SEQ ID NO: 219194 - DNA, 15 bp, Homo sapiens
tggatcttatttctt

SEQ ID NO: 219195 - DNA, 15 bp, Homo sapiens
ttggatcttatttct

SEQ ID NO: 219196 - DNA, 15 bp, Homo sapiens
cttggatcttatttc

SEQ ID NO: 219197 - DNA, 15 bp, Homo sapiens
acttggatcttattt

SEQ ID NO: 219198 - DNA, 15 bp, Homo sapiens
aacttggatcttatt

SEQ ID NO: 219199 - DNA, 15 bp, Homo sapiens
aaacttggatcttat

SEQ ID NO: 219200 - DNA, 15 bp, Homo sapiens
caaacttggatctta

SEQ ID NO: 219201 - DNA, 15 bp, Homo sapiens
tcaaacttggatctt

SEQ ID NO: 219202 - DNA, 15 bp, Homo sapiens
atcaaacttggatct

SEQ ID NO: 219203 - DNA, 15 bp, Homo sapiens
catcaaacttggatc

SEQ ID NO: 219204 - DNA, 15 bp, Homo sapiens
acatcaaacttggat

SEQ ID NO: 219205 - DNA, 15 bp, Homo sapiens
aacatcaaacttgga

SEQ ID NO: 219206 - DNA, 15 bp, Homo sapiens
caacatcaaacttgg

SEQ ID NO: 219207 - DNA, 15 bp, Homo sapiens
tcaacatcaaacttg

SEQ ID NO: 219208 - DNA, 15 bp, Homo sapiens
ttcaacatcaaactt

SEQ ID NO: 219209 - DNA, 15 bp, Homo sapiens
tttcaacatcaaact

SEQ ID NO: 219210 - DNA, 15 bp, Homo sapiens
ttttcaacatcaaac

SEQ ID NO: 219211 - DNA, 15 bp, Homo sapiens
cttttcaacatcaaa

SEQ ID NO: 219212 - DNA, 15 bp, Homo sapiens
tcttttcaacatcaa

SEQ ID NO: 219213 - DNA, 15 bp, Homo sapiens
ttcttttcaacatca

SEQ ID NO: 219214 - DNA, 15 bp, Homo sapiens
tttcttttcaacatc

SEQ ID NO: 219215 - DNA, 15 bp, Homo sapiens
ctttcttttcaacat

SEQ ID NO: 219216 - DNA, 15 bp, Homo sapiens
gctttcttttcaaca

SEQ ID NO: 219217 - DNA, 15 bp, Homo sapiens
tgctttcttttcaac

SEQ ID NO: 219218 - DNA, 15 bp, Homo sapiens
atgctttcttttcaa

SEQ ID NO: 219219 - DNA, 15 bp, Homo sapiens
aatgctttcttttca

SEQ ID NO: 219220 - DNA, 15 bp, Homo sapiens
caatgctttcttttc

SEQ ID NO: 219221 - DNA, 15 bp, Homo sapiens
tcaatgctttctttt

SEQ ID NO: 219222 - DNA, 15 bp, Homo sapiens
atcaatgctttcttt

SEQ ID NO: 219223 - DNA, 15 bp, Homo sapiens
aatcaatgctttctt

SEQ ID NO: 219224 - DNA, 15 bp, Homo sapiens
aaatcaatgctttct

SEQ ID NO: 219225 - DNA, 15 bp, Homo sapiens
gaaatcaatgctttc

SEQ ID NO: 219226 - DNA, 15 bp, Homo sapiens
agaaatcaatgcttt

SEQ ID NO: 219227 - DNA, 15 bp, Homo sapiens
aagaaatcaatgctt

SEQ ID NO: 219228 - DNA, 15 bp, Homo sapiens
aaagaaatcaatgct

SEQ ID NO: 219229 - DNA, 15 bp, Homo sapiens
taaagaaatcaatgc

SEQ ID NO: 219230 - DNA, 15 bp, Homo sapiens
ctaaagaaatcaatg

SEQ ID NO: 219231 - DNA, 15 bp, Homo sapiens
actaaagaaatcaat

SEQ ID NO: 219232 - DNA, 15 bp, Homo sapiens
cactaaagaaatcaa

SEQ ID NO: 219233 - DNA, 15 bp, Homo sapiens
tcactaaagaaatca

SEQ ID NO: 219234 - DNA, 15 bp, Homo sapiens
ctcactaaagaaatc

SEQ ID NO: 219235 - DNA, 15 bp, Homo sapiens
tctcactaaagaaat

SEQ ID NO: 219236 - DNA, 15 bp, Homo sapiens
ctctcactaaagaaa

SEQ ID NO: 219237 - DNA, 15 bp, Homo sapiens
cctctcactaaagaa

SEQ ID NO: 219238 - DNA, 15 bp, Homo sapiens
tcctctcactaaaga

SEQ ID NO: 219239 - DNA, 15 bp, Homo sapiens
atcctctcactaaag

SEQ ID NO: 219240 - DNA, 15 bp, Homo sapiens
aatcctctcactaaa

SEQ ID NO: 219241 - DNA, 15 bp, Homo sapiens
aaatcctctcactaa

SEQ ID NO: 219242 - DNA, 15 bp, Homo sapiens
gaaatcctctcacta

SEQ ID NO: 219243 - DNA, 15 bp, Homo sapiens
agaaatcctctcact

SEQ ID NO: 219244 - DNA, 15 bp, Homo sapiens
gagaaatcctctcac

SEQ ID NO: 219245 - DNA, 15 bp, Homo sapiens
ggagaaatcctctca

SEQ ID NO: 219246 - DNA, 15 bp, Homo sapiens
aggagaaatcctctc

SEQ ID NO: 219247 - DNA, 15 bp, Homo sapiens
gaggagaaatcctct

SEQ ID NO: 219248 - DNA, 15 bp, Homo sapiens
ggaggagaaatcctc

SEQ ID NO: 219249 - DNA, 15 bp, Homo sapiens
gggaggagaaatcct

SEQ ID NO: 219250 - DNA, 15 bp, Homo sapiens
agggaggagaaatcc

SEQ ID NO: 219251 - DNA, 15 bp, Homo sapiens
tagggaggagaaatc

SEQ ID NO: 219252 - DNA, 15 bp, Homo sapiens
atagggaggagaaat

SEQ ID NO: 219253 - DNA, 15 bp, Homo sapiens
aatagggaggagaaa

SEQ ID NO: 219254 - DNA, 15 bp, Homo sapiens
aaatagggaggagaa

SEQ ID NO: 219255 - DNA, 15 bp, Homo sapiens
gaaatagggaggaga

SEQ ID NO: 219256 - DNA, 15 bp, Homo sapiens
agaaatagggaggag

SEQ ID NO: 219257 - DNA, 15 bp, Homo sapiens
cagaaatagggagga

SEQ ID NO: 219258 - DNA, 15 bp, Homo sapiens
acagaaatagggagg

SEQ ID NO: 219259 - DNA, 15 bp, Homo sapiens
aacagaaatagggag

SEQ ID NO: 219260 - DNA, 15 bp, Homo sapiens
aaacagaaataggga

SEQ ID NO: 219261 - DNA, 15 bp, Homo sapiens
aaaacagaaataggg

SEQ ID NO: 219262 - DNA, 15 bp, Homo sapiens
gaaaacagaaatagg

SEQ ID NO: 219263 - DNA, 15 bp, Homo sapiens
ggaaaacagaaatag

SEQ ID NO: 219264 - DNA, 15 bp, Homo sapiens
gggaaaacagaaata

SEQ ID NO: 219265 - DNA, 15 bp, Homo sapiens
agggaaaacagaaat

SEQ ID NO: 219266 - DNA, 15 bp, Homo sapiens
tagggaaaacagaaa

SEQ ID NO: 219267 - DNA, 15 bp, Homo sapiens
ctagggaaaacagaa

SEQ ID NO: 219268 - DNA, 15 bp, Homo sapiens
actagggaaaacaga

SEQ ID NO: 219269 - DNA, 15 bp, Homo sapiens
gactagggaaaacag

SEQ ID NO: 219270 - DNA, 15 bp, Homo sapiens
cgactagggaaaaca

SEQ ID NO: 219271 - DNA, 15 bp, Homo sapiens
acgactagggaaaac

SEQ ID NO: 219272 - DNA, 15 bp, Homo sapiens
cacgactagggaaaa

SEQ ID NO: 219273 - DNA, 15 bp, Homo sapiens
ccacgactagggaaa

SEQ ID NO: 219274 - DNA, 15 bp, Homo sapiens
cccacgactagggaa

SEQ ID NO: 219275 - DNA, 15 bp, Homo sapiens
gcccacgactaggga

SEQ ID NO: 219276 - DNA, 15 bp, Homo sapiens
cgcccacgactaggg

SEQ ID NO: 219277 - DNA, 15 bp, Homo sapiens
tcgcccacgactagg

SEQ ID NO: 219278 - DNA, 15 bp, Homo sapiens
ttcgcccacgactag

SEQ ID NO: 219279 - DNA, 15 bp, Homo sapiens
tttcgcccacgacta

SEQ ID NO: 219280 - DNA, 15 bp, Homo sapiens
gtttcgcccacgact

SEQ ID NO: 219281 - DNA, 15 bp, Homo sapiens
tgtttcgcccacgac

SEQ ID NO: 219282 - DNA, 15 bp, Homo sapiens
gtgtttcgcccacga

SEQ ID NO: 219283 - DNA, 15 bp, Homo sapiens
agtgtttcgcccacg

SEQ ID NO: 219284 - DNA, 15 bp, Homo sapiens
aagtgtttcgcccac

SEQ ID NO: 219285 - DNA, 15 bp, Homo sapiens
gaagtgtttcgccca

SEQ ID NO: 219286 - DNA, 15 bp, Homo sapiens
agaagtgtttcgccc

SEQ ID NO: 219287 - DNA, 15 bp, Homo sapiens
aagaagtgtttcgcc

SEQ ID NO: 219288 - DNA, 15 bp, Homo sapiens
aaagaagtgtttcgc

SEQ ID NO: 219289 - DNA, 15 bp, Homo sapiens
taaagaagtgtttcg

SEQ ID NO: 219290 - DNA, 15 bp, Homo sapiens
ttaaagaagtgtttc

SEQ ID NO: 219291 - DNA, 15 bp, Homo sapiens
cttaaagaagtgttt

SEQ ID NO: 219292 - DNA, 15 bp, Homo sapiens
ccttaaagaagtgtt

SEQ ID NO: 219293 - DNA, 15 bp, Homo sapiens
tccttaaagaagtgt

SEQ ID NO: 219294 - DNA, 15 bp, Homo sapiens
ctccttaaagaagtg

SEQ ID NO: 219295 - DNA, 15 bp, Homo sapiens
actccttaaagaagt

SEQ ID NO: 219296 - DNA, 15 bp, Homo sapiens
aactccttaaagaag

SEQ ID NO: 219297 - DNA, 15 bp, Homo sapiens
taactccttaaagaa

SEQ ID NO: 219298 - DNA, 15 bp, Homo sapiens
ctaactccttaaaga

SEQ ID NO: 219299 - DNA, 15 bp, Homo sapiens
tctaactccttaaag

SEQ ID NO: 219300 - DNA, 15 bp, Homo sapiens
ctctaactccttaaa

SEQ ID NO: 219301 - DNA, 15 bp, Homo sapiens
gctctaactccttaa

SEQ ID NO: 219302 - DNA, 15 bp, Homo sapiens
tgctctaactcctta

SEQ ID NO: 219303 - DNA, 15 bp, Homo sapiens
ctgctctaactcctt

SEQ ID NO: 219304 - DNA, 15 bp, Homo sapiens
gctgctctaactcct

SEQ ID NO: 219305 - DNA, 15 bp, Homo sapiens
agctgctctaactcc

SEQ ID NO: 219306 - DNA, 15 bp, Homo sapiens
gagctgctctaactc

SEQ ID NO: 219307 - DNA, 15 bp, Homo sapiens
ggagctgctctaact

SEQ ID NO: 219308 - DNA, 15 bp, Homo sapiens
aggagctgctctaac

SEQ ID NO: 219309 - DNA, 15 bp, Homo sapiens
aaggagctgctctaa

SEQ ID NO: 219310 - DNA, 15 bp, Homo sapiens
aaaggagctgctcta

SEQ ID NO: 219311 - DNA, 15 bp, Homo sapiens
caaaggagctgctct

SEQ ID NO: 219312 - DNA, 15 bp, Homo sapiens
tcaaaggagctgctc

SEQ ID NO: 219313 - DNA, 15 bp, Homo sapiens
ctcaaaggagctgct

SEQ ID NO: 219314 - DNA, 15 bp, Homo sapiens
gctcaaaggagctgc

SEQ ID NO: 219315 - DNA, 15 bp, Homo sapiens
tgctcaaaggagctg

SEQ ID NO: 219316 - DNA, 15 bp, Homo sapiens
ttgctcaaaggagct

SEQ ID NO: 219317 - DNA, 15 bp, Homo sapiens
tttgctcaaaggagc

SEQ ID NO: 219318 - DNA, 15 bp, Homo sapiens
atttgctcaaaggag

SEQ ID NO: 219319 - DNA, 15 bp, Homo sapiens
gatttgctcaaagga

SEQ ID NO: 219320 - DNA, 15 bp, Homo sapiens
agatttgctcaaagg

SEQ ID NO: 219321 - DNA, 15 bp, Homo sapiens
aagatttgctcaaag

SEQ ID NO: 219322 - DNA, 15 bp, Homo sapiens
gaagatttgctcaaa

SEQ ID NO: 219323 - DNA, 15 bp, Homo sapiens
ggaagatttgctcaa

SEQ ID NO: 219324 - DNA, 15 bp, Homo sapiens
aggaagatttgctca

SEQ ID NO: 219325 - DNA, 15 bp, Homo sapiens
caggaagatttgctc

SEQ ID NO: 219326 - DNA, 15 bp, Homo sapiens
ccaggaagatttgct

SEQ ID NO: 219327 - DNA, 15 bp, Homo sapiens
cccaggaagatttgc

SEQ ID NO: 219328 - DNA, 15 bp, Homo sapiens
ccccaggaagatttg

SEQ ID NO: 219329 - DNA, 15 bp, Homo sapiens
tccccaggaagattt

SEQ ID NO: 219330 - DNA, 15 bp, Homo sapiens
ttccccaggaagatt

SEQ ID NO: 219331 - DNA, 15 bp, Homo sapiens
attccccaggaagat

SEQ ID NO: 219332 - DNA, 15 bp, Homo sapiens
gattccccaggaaga

SEQ ID NO: 219333 - DNA, 15 bp, Homo sapiens
tgattccccaggaag

SEQ ID NO: 219334 - DNA, 15 bp, Homo sapiens
gtgattccccaggaa

SEQ ID NO: 219335 - DNA, 15 bp, Homo sapiens
tgtgattccccagga

SEQ ID NO: 219336 - DNA, 15 bp, Homo sapiens
ctgtgattccccagg

SEQ ID NO: 219337 - DNA, 15 bp, Homo sapiens
cctgtgattccccag

SEQ ID NO: 219338 - DNA, 15 bp, Homo sapiens
tcctgtgattcccca

SEQ ID NO: 219339 - DNA, 15 bp, Homo sapiens
ttcctgtgattcccc

SEQ ID NO: 219340 - DNA, 15 bp, Homo sapiens
attcctgtgattccc

SEQ ID NO: 219341 - DNA, 15 bp, Homo sapiens
gattcctgtgattcc

SEQ ID NO: 219342 - DNA, 15 bp, Homo sapiens
agattcctgtgattc

SEQ ID NO: 219343 - DNA, 15 bp, Homo sapiens
aagattcctgtgatt

SEQ ID NO: 219344 - DNA, 15 bp, Homo sapiens
aaagattcctgtgat

SEQ ID NO: 219345 - DNA, 15 bp, Homo sapiens
gaaagattcctgtga

SEQ ID NO: 219346 - DNA, 15 bp, Homo sapiens
agaaagattcctgtg

SEQ ID NO: 219347 - DNA, 15 bp, Homo sapiens
cagaaagattcctgt

SEQ ID NO: 219348 - DNA, 15 bp, Homo sapiens
tcagaaagattcctg

SEQ ID NO: 219349 - DNA, 15 bp, Homo sapiens
ctcagaaagattcct

SEQ ID NO: 219350 - DNA, 15 bp, Homo sapiens
gctcagaaagattcc

SEQ ID NO: 219351 - DNA, 15 bp, Homo sapiens
tgctcagaaagattc

SEQ ID NO: 219352 - DNA, 15 bp, Homo sapiens
ctgctcagaaagatt

SEQ ID NO: 219353 - DNA, 15 bp, Homo sapiens
tctgctcagaaagat

SEQ ID NO: 219354 - DNA, 15 bp, Homo sapiens
atctgctcagaaaga

SEQ ID NO: 219355 - DNA, 15 bp, Homo sapiens
catctgctcagaaag

SEQ ID NO: 219356 - DNA, 15 bp, Homo sapiens
acatctgctcagaaa

SEQ ID NO: 219357 - DNA, 15 bp, Homo sapiens
aacatctgctcagaa

SEQ ID NO: 219358 - DNA, 15 bp, Homo sapiens
aaacatctgctcaga

SEQ ID NO: 219359 - DNA, 15 bp, Homo sapiens
aaaacatctgctcag

SEQ ID NO: 219360 - DNA, 15 bp, Homo sapiens
caaaacatctgctca

SEQ ID NO: 219361 - DNA, 15 bp, Homo sapiens
ccaaaacatctgctc

SEQ ID NO: 219362 - DNA, 15 bp, Homo sapiens
tccaaaacatctgct

SEQ ID NO: 219363 - DNA, 15 bp, Homo sapiens
ctccaaaacatctgc

SEQ ID NO: 219364 - DNA, 15 bp, Homo sapiens
gctccaaaacatctg

SEQ ID NO: 219365 - DNA, 15 bp, Homo sapiens
agctccaaaacatct

SEQ ID NO: 219366 - DNA, 15 bp, Homo sapiens
cagctccaaaacatc

SEQ ID NO: 219367 - DNA, 15 bp, Homo sapiens
tcagctccaaaacat

SEQ ID NO: 219368 - DNA, 15 bp, Homo sapiens
gtcagctccaaaaca

SEQ ID NO: 219369 - DNA, 15 bp, Homo sapiens
tgtcagctccaaaac

SEQ ID NO: 219370 - DNA, 15 bp, Homo sapiens
atgtcagctccaaaa

SEQ ID NO: 219371 - DNA, 15 bp, Homo sapiens
aatgtcagctccaaa

SEQ ID NO: 219372 - DNA, 15 bp, Homo sapiens
taatgtcagctccaa

SEQ ID NO: 219373 - DNA, 15 bp, Homo sapiens
ctaatgtcagctcca

SEQ ID NO: 219374 - DNA, 15 bp, Homo sapiens
cctaatgtcagctcc

SEQ ID NO: 219375 - DNA, 15 bp, Homo sapiens
gcctaatgtcagctc

SEQ ID NO: 219376 - DNA, 15 bp, Homo sapiens
ggcctaatgtcagct

SEQ ID NO: 219377 - DNA, 15 bp, Homo sapiens
gggcctaatgtcagc

SEQ ID NO: 219378 - DNA, 15 bp, Homo sapiens
ggggcctaatgtcag

SEQ ID NO: 219379 - DNA, 15 bp, Homo sapiens
aggggcctaatgtca

SEQ ID NO: 219380 - DNA, 15 bp, Homo sapiens
aaggggcctaatgtc

SEQ ID NO: 219381 - DNA, 15 bp, Homo sapiens
caaggggcctaatgt

SEQ ID NO: 219382 - DNA, 15 bp, Homo sapiens
gcaaggggcctaatg

SEQ ID NO: 219383 - DNA, 15 bp, Homo sapiens
agcaaggggcctaat

SEQ ID NO: 219384 - DNA, 15 bp, Homo sapiens
gagcaaggggcctaa

SEQ ID NO: 219385 - DNA, 15 bp, Homo sapiens
cgagcaaggggccta

SEQ ID NO: 219386 - DNA, 15 bp, Homo sapiens
ccgagcaaggggcct

SEQ ID NO: 219387 - DNA, 15 bp, Homo sapiens
gccgagcaaggggcc

SEQ ID NO: 219388 - DNA, 15 bp, Homo sapiens
tgccgagcaaggggc

SEQ ID NO: 219389 - DNA, 15 bp, Homo sapiens
ctgccgagcaagggg

SEQ ID NO: 219390 - DNA, 15 bp, Homo sapiens
gctgccgagcaaggg

SEQ ID NO: 219391 - DNA, 15 bp, Homo sapiens
tgctgccgagcaagg

SEQ ID NO: 219392 - DNA, 15 bp, Homo sapiens
atgctgccgagcaag

SEQ ID NO: 219393 - DNA, 15 bp, Homo sapiens
catgctgccgagcaa

SEQ ID NO: 219394 - DNA, 15 bp, Homo sapiens
acatgctgccgagca

SEQ ID NO: 219395 - DNA, 15 bp, Homo sapiens
aacatgctgccgagc

SEQ ID NO: 219396 - DNA, 15 bp, Homo sapiens
caacatgctgccgag

SEQ ID NO: 219397 - DNA, 15 bp, Homo sapiens
tcaacatgctgccga

SEQ ID NO: 219398 - DNA, 15 bp, Homo sapiens
ctcaacatgctgccg

SEQ ID NO: 219399 - DNA, 15 bp, Homo sapiens
actcaacatgctgcc

SEQ ID NO: 219400 - DNA, 15 bp, Homo sapiens
aactcaacatgctgc

SEQ ID NO: 219401 - DNA, 15 bp, Homo sapiens
aaactcaacatgctg

SEQ ID NO: 219402 - DNA, 15 bp, Homo sapiens
aaaactcaacatgct

SEQ ID NO: 219403 - DNA, 15 bp, Homo sapiens
aaaaactcaacatgc

SEQ ID NO: 219404 - DNA, 15 bp, Homo sapiens
caaaaactcaacatg

SEQ ID NO: 219405 - DNA, 15 bp, Homo sapiens
tcaaaaactcaacat

SEQ ID NO: 219406 - DNA, 15 bp, Homo sapiens
ctcaaaaactcaaca

SEQ ID NO: 219407 - DNA, 15 bp, Homo sapiens
cctcaaaaactcaac

SEQ ID NO: 219408 - DNA, 15 bp, Homo sapiens
gcctcaaaaactcaa

SEQ ID NO: 219409 - DNA, 15 bp, Homo sapiens
ggcctcaaaaactca

SEQ ID NO: 219410 - DNA, 15 bp, Homo sapiens
gggcctcaaaaactc

SEQ ID NO: 219411 - DNA, 15 bp, Homo sapiens
agggcctcaaaaact

SEQ ID NO: 219412 - DNA, 15 bp, Homo sapiens
cagggcctcaaaaac

SEQ ID NO: 219413 - DNA, 15 bp, Homo sapiens
acagggcctcaaaaa

SEQ ID NO: 219414 - DNA, 15 bp, Homo sapiens
gacagggcctcaaaa

SEQ ID NO: 219415 - DNA, 15 bp, Homo sapiens
agacagggcctcaaa

SEQ ID NO: 219416 - DNA, 15 bp, Homo sapiens
aagacagggcctcaa

SEQ ID NO: 219417 - DNA, 15 bp, Homo sapiens
aaagacagggcctca

SEQ ID NO: 219418 - DNA, 15 bp, Homo sapiens
gaaagacagggcctc

SEQ ID NO: 219419 - DNA, 15 bp, Homo sapiens
ggaaagacagggcct

SEQ ID NO: 219420 - DNA, 15 bp, Homo sapiens
aggaaagacagggcc

SEQ ID NO: 219421 - DNA, 15 bp, Homo sapiens
gaggaaagacagggc

SEQ ID NO: 219422 - DNA, 15 bp, Homo sapiens
agaggaaagacaggg

SEQ ID NO: 219423 - DNA, 15 bp, Homo sapiens
cagaggaaagacagg

SEQ ID NO: 219424 - DNA, 15 bp, Homo sapiens
tcagaggaaagacag

SEQ ID NO: 219425 - DNA, 15 bp, Homo sapiens
ctcagaggaaagaca

SEQ ID NO: 219426 - DNA, 15 bp, Homo sapiens
actcagaggaaagac

SEQ ID NO: 219427 - DNA, 15 bp, Homo sapiens
aactcagaggaaaga

SEQ ID NO: 219428 - DNA, 15 bp, Homo sapiens
aaactcagaggaaag

SEQ ID NO: 219429 - DNA, 15 bp, Homo sapiens
aaaactcagaggaaa

SEQ ID NO: 219430 - DNA, 15 bp, Homo sapiens
taaaactcagaggaa

SEQ ID NO: 219431 - DNA, 15 bp, Homo sapiens
ataaaactcagagga

SEQ ID NO: 219432 - DNA, 15 bp, Homo sapiens
tataaaactcagagg

SEQ ID NO: 219433 - DNA, 15 bp, Homo sapiens
atataaaactcagag

SEQ ID NO: 219434 - DNA, 15 bp, Homo sapiens
aatataaaactcaga

SEQ ID NO: 219435 - DNA, 15 bp, Homo sapiens
gaatataaaactcag

SEQ ID NO: 219436 - DNA, 15 bp, Homo sapiens
agaatataaaactca

SEQ ID NO: 219437 - DNA, 15 bp, Homo sapiens
cagaatataaaactc

SEQ ID NO: 219438 - DNA, 15 bp, Homo sapiens
tcagaatataaaact

SEQ ID NO: 219439 - DNA, 15 bp, Homo sapiens
ttcagaatataaaac

SEQ ID NO: 219440 - DNA, 15 bp, Homo sapiens
attcagaatataaaa

SEQ ID NO: 219441 - DNA, 15 bp, Homo sapiens
aattcagaatataaa

SEQ ID NO: 219442 - DNA, 15 bp, Homo sapiens
caattcagaatataa

SEQ ID NO: 219443 - DNA, 15 bp, Homo sapiens
tcaattcagaatata

SEQ ID NO: 219444 - DNA, 15 bp, Homo sapiens
gtcaattcagaatat

SEQ ID NO: 219445 - DNA, 15 bp, Homo sapiens
tgtcaattcagaata

SEQ ID NO: 219446 - DNA, 15 bp, Homo sapiens
ttgtcaattcagaat

SEQ ID NO: 219447 - DNA, 15 bp, Homo sapiens
cttgtcaattcagaa

SEQ ID NO: 219448 - DNA, 15 bp, Homo sapiens
acttgtcaattcaga

SEQ ID NO: 219449 - DNA, 15 bp, Homo sapiens
aacttgtcaattcag

SEQ ID NO: 219450 - DNA, 15 bp, Homo sapiens
gaacttgtcaattca

SEQ ID NO: 219451 - DNA, 15 bp, Homo sapiens
agaacttgtcaattc

SEQ ID NO: 219452 - DNA, 15 bp, Homo sapiens
aagaacttgtcaatt

SEQ ID NO: 219453 - DNA, 15 bp, Homo sapiens
caagaacttgtcaat

SEQ ID NO: 219454 - DNA, 15 bp, Homo sapiens
tcaagaacttgtcaa

SEQ ID NO: 219455 - DNA, 15 bp, Homo sapiens
gtcaagaacttgtca

SEQ ID NO: 219456 - DNA, 15 bp, Homo sapiens
ggtcaagaacttgtc

SEQ ID NO: 219457 - DNA, 15 bp, Homo sapiens
aggtcaagaacttgt

SEQ ID NO: 219458 - DNA, 15 bp, Homo sapiens
gaggtcaagaacttg

SEQ ID NO: 219459 - DNA, 15 bp, Homo sapiens
ggaggtcaagaactt

SEQ ID NO: 219460 - DNA, 15 bp, Homo sapiens
tggaggtcaagaact

SEQ ID NO: 219461 - DNA, 15 bp, Homo sapiens
ttggaggtcaagaac

SEQ ID NO: 219462 - DNA, 15 bp, Homo sapiens
gttggaggtcaagaa

SEQ ID NO: 219463 - DNA, 15 bp, Homo sapiens
tgttggaggtcaaga

SEQ ID NO: 219464 - DNA, 15 bp, Homo sapiens
atgttggaggtcaag

SEQ ID NO: 219465 - DNA, 15 bp, Homo sapiens
aatgttggaggtcaa

SEQ ID NO: 219466 - DNA, 15 bp, Homo sapiens
taatgttggaggtca

SEQ ID NO: 219467 - DNA, 15 bp, Homo sapiens
ctaatgttggaggtc

SEQ ID NO: 219468 - DNA, 15 bp, Homo sapiens
actaatgttggaggt

SEQ ID NO: 219469 - DNA, 15 bp, Homo sapiens
aactaatgttggagg

SEQ ID NO: 219470 - DNA, 15 bp, Homo sapiens
aaactaatgttggag

SEQ ID NO: 219471 - DNA, 15 bp, Homo sapiens
caaactaatgttgga

SEQ ID NO: 219472 - DNA, 15 bp, Homo sapiens
tcaaactaatgttgg

SEQ ID NO: 219473 - DNA, 15 bp, Homo sapiens
ctcaaactaatgttg

SEQ ID NO: 219474 - DNA, 15 bp, Homo sapiens
gctcaaactaatgtt

SEQ ID NO: 219475 - DNA, 15 bp, Homo sapiens
tgctcaaactaatgt

SEQ ID NO: 219476 - DNA, 15 bp, Homo sapiens
ttgctcaaactaatg

SEQ ID NO: 219477 - DNA, 15 bp, Homo sapiens
gttgctcaaactaat

SEQ ID NO: 219478 - DNA, 15 bp, Homo sapiens
ggttgctcaaactaa

SEQ ID NO: 219479 - DNA, 15 bp, Homo sapiens
gggttgctcaaacta

SEQ ID NO: 219480 - DNA, 15 bp, Homo sapiens
tgggttgctcaaact

SEQ ID NO: 219481 - DNA, 15 bp, Homo sapiens
atgggttgctcaaac

SEQ ID NO: 219482 - DNA, 15 bp, Homo sapiens
catgggttgctcaaa

SEQ ID NO: 219483 - DNA, 15 bp, Homo sapiens
tcatgggttgctcaa

SEQ ID NO: 219484 - DNA, 15 bp, Homo sapiens
gtcatgggttgctca

SEQ ID NO: 219485 - DNA, 15 bp, Homo sapiens
ggtcatgggttgctc

SEQ ID NO: 219486 - DNA, 15 bp, Homo sapiens
tggtcatgggttgct

SEQ ID NO: 219487 - DNA, 15 bp, Homo sapiens
ttggtcatgggttgc

SEQ ID NO: 219488 - DNA, 15 bp, Homo sapiens
gttggtcatgggttg

SEQ ID NO: 219489 - DNA, 15 bp, Homo sapiens
ggttggtcatgggtt

SEQ ID NO: 219490 - DNA, 15 bp, Homo sapiens
gggttggtcatgggt

SEQ ID NO: 219491 - DNA, 15 bp, Homo sapiens
agggttggtcatggg

SEQ ID NO: 219492 - DNA, 15 bp, Homo sapiens
gagggttggtcatgg

SEQ ID NO: 219493 - DNA, 15 bp, Homo sapiens
ggagggttggtcatg

SEQ ID NO: 219494 - DNA, 15 bp, Homo sapiens
aggagggttggtcat

SEQ ID NO: 219495 - DNA, 15 bp, Homo sapiens
gaggagggttggtca

SEQ ID NO: 219496 - DNA, 15 bp, Homo sapiens
tgaggagggttggtc

SEQ ID NO: 219497 - DNA, 15 bp, Homo sapiens
gtgaggagggttggt

SEQ ID NO: 219498 - DNA, 15 bp, Homo sapiens
tgtgaggagggttgg

SEQ ID NO: 219499 - DNA, 15 bp, Homo sapiens
ttgtgaggagggttg

SEQ ID NO: 219500 - DNA, 15 bp, Homo sapiens
tttgtgaggagggtt

SEQ ID NO: 219501 - DNA, 15 bp, Homo sapiens
gtttgtgaggagggt

SEQ ID NO: 219502 - DNA, 15 bp, Homo sapiens
ggtttgtgaggaggg

SEQ ID NO: 219503 - DNA, 15 bp, Homo sapiens
tggtttgtgaggagg

SEQ ID NO: 219504 - DNA, 15 bp, Homo sapiens
atggtttgtgaggag

SEQ ID NO: 219505 - DNA, 15 bp, Homo sapiens
catggtttgtgagga

SEQ ID NO: 219506 - DNA, 15 bp, Homo sapiens
tcatggtttgtgagg

SEQ ID NO: 219507 - DNA, 15 bp, Homo sapiens
atcatggtttgtgag

SEQ ID NO: 219508 - DNA, 15 bp, Homo sapiens
gatcatggtttgtga

SEQ ID NO: 219509 - DNA, 15 bp, Homo sapiens
ggatcatggtttgtg

SEQ ID NO: 219510 - DNA, 15 bp, Homo sapiens
tggatcatggtttgt

SEQ ID NO: 219511 - DNA, 15 bp, Homo sapiens
ttggatcatggtttg

SEQ ID NO: 219512 - DNA, 15 bp, Homo sapiens
tttggatcatggttt

SEQ ID NO: 219513 - DNA, 15 bp, Homo sapiens
ttttggatcatggtt

SEQ ID NO: 219514 - DNA, 15 bp, Homo sapiens
cttttggatcatggt

SEQ ID NO: 219515 - DNA, 15 bp, Homo sapiens
tcttttggatcatgg

SEQ ID NO: 219516 - DNA, 15 bp, Homo sapiens
ttcttttggatcatg

SEQ ID NO: 219517 - DNA, 15 bp, Homo sapiens
tttcttttggatcat

SEQ ID NO: 219518 - DNA, 15 bp, Homo sapiens
gtttcttttggatca

SEQ ID NO: 219519 - DNA, 15 bp, Homo sapiens
tgtttcttttggatc

SEQ ID NO: 219520 - DNA, 15 bp, Homo sapiens
atgtttcttttggat

SEQ ID NO: 219521 - DNA, 15 bp, Homo sapiens
gatgtttcttttgga

SEQ ID NO: 219522 - DNA, 15 bp, Homo sapiens
ggatgtttcttttgg

SEQ ID NO: 219523 - DNA, 15 bp, Homo sapiens
tggatgtttcttttg

SEQ ID NO: 219524 - DNA, 15 bp, Homo sapiens
ttggatgtttctttt

SEQ ID NO: 219525 - DNA, 15 bp, Homo sapiens
attggatgtttcttt

SEQ ID NO: 219526 - DNA, 15 bp, Homo sapiens
tattggatgtttctt

SEQ ID NO: 219527 - DNA, 15 bp, Homo sapiens
ctattggatgtttct

SEQ ID NO: 219528 - DNA, 15 bp, Homo sapiens
actattggatgtttc

SEQ ID NO: 219529 - DNA, 15 bp, Homo sapiens
aactattggatgttt

SEQ ID NO: 219530 - DNA, 15 bp, Homo sapiens
aaactattggatgtt

SEQ ID NO: 219531 - DNA, 15 bp, Homo sapiens
gaaactattggatgt

SEQ ID NO: 219532 - DNA, 15 bp, Homo sapiens
ggaaactattggatg

SEQ ID NO: 219533 - DNA, 15 bp, Homo sapiens
gggaaactattggat

SEQ ID NO: 219534 - DNA, 15 bp, Homo sapiens
ggggaaactattgga

SEQ ID NO: 219535 - DNA, 15 bp, Homo sapiens
gggggaaactattgg

SEQ ID NO: 219536 - DNA, 15 bp, Homo sapiens
tgggggaaactattg

SEQ ID NO: 219537 - DNA, 15 bp, Homo sapiens
ttgggggaaactatt

SEQ ID NO: 219538 - DNA, 15 bp, Homo sapiens
cttgggggaaactat

SEQ ID NO: 219539 - DNA, 15 bp, Homo sapiens
acttgggggaaacta

SEQ ID NO: 219540 - DNA, 15 bp, Homo sapiens
aacttgggggaaact

SEQ ID NO: 219541 - DNA, 15 bp, Homo sapiens
gaacttgggggaaac

SEQ ID NO: 219542 - DNA, 15 bp, Homo sapiens
agaacttgggggaaa

SEQ ID NO: 219543 - DNA, 15 bp, Homo sapiens
aagaacttgggggaa

SEQ ID NO: 219544 - DNA, 15 bp, Homo sapiens
aaagaacttggggga

SEQ ID NO: 219545 - DNA, 15 bp, Homo sapiens
caaagaacttggggg

SEQ ID NO: 219546 - DNA, 15 bp, Homo sapiens
gcaaagaacttgggg

SEQ ID NO: 219547 - DNA, 15 bp, Homo sapiens
ggcaaagaacttggg

SEQ ID NO: 219548 - DNA, 15 bp, Homo sapiens
aggcaaagaacttgg

SEQ ID NO: 219549 - DNA, 15 bp, Homo sapiens
caggcaaagaacttg

SEQ ID NO: 219550 - DNA, 15 bp, Homo sapiens
ccaggcaaagaactt

SEQ ID NO: 219551 - DNA, 15 bp, Homo sapiens
accaggcaaagaact

SEQ ID NO: 219552 - DNA, 15 bp, Homo sapiens
caccaggcaaagaac

SEQ ID NO: 219553 - DNA, 15 bp, Homo sapiens
ccaccaggcaaagaa

SEQ ID NO: 219554 - DNA, 15 bp, Homo sapiens
accaccaggcaaaga

SEQ ID NO: 219555 - DNA, 15 bp, Homo sapiens
aaccaccaggcaaag

SEQ ID NO: 219556 - DNA, 15 bp, Homo sapiens
caaccaccaggcaaa

SEQ ID NO: 219557 - DNA, 15 bp, Homo sapiens
gcaaccaccaggcaa

SEQ ID NO: 219558 - DNA, 15 bp, Homo sapiens
ggcaaccaccaggca

SEQ ID NO: 219559 - DNA, 15 bp, Homo sapiens
gggcaaccaccaggc

SEQ ID NO: 219560 - DNA, 15 bp, Homo sapiens
agggcaaccaccagg

SEQ ID NO: 219561 - DNA, 15 bp, Homo sapiens
tagggcaaccaccag

SEQ ID NO: 219562 - DNA, 15 bp, Homo sapiens
ctagggcaaccacca

SEQ ID NO: 219563 - DNA, 15 bp, Homo sapiens
tctagggcaaccacc

SEQ ID NO: 219564 - DNA, 15 bp, Homo sapiens
ttctagggcaaccac

SEQ ID NO: 219565 - DNA, 15 bp, Homo sapiens
gttctagggcaacca

SEQ ID NO: 219566 - DNA, 15 bp, Homo sapiens
ggttctagggcaacc

SEQ ID NO: 219567 - DNA, 15 bp, Homo sapiens
aggttctagggcaac

SEQ ID NO: 219568 - DNA, 15 bp, Homo sapiens
aaggttctagggcaa

SEQ ID NO: 219569 - DNA, 15 bp, Homo sapiens
taaggttctagggca

SEQ ID NO: 219570 - DNA, 15 bp, Homo sapiens
ttaaggttctagggc

SEQ ID NO: 219571 - DNA, 15 bp, Homo sapiens
cttaaggttctaggg

SEQ ID NO: 219572 - DNA, 15 bp, Homo sapiens
gcttaaggttctagg

SEQ ID NO: 219573 - DNA, 15 bp, Homo sapiens
ggcttaaggttctag

SEQ ID NO: 219574 - DNA, 15 bp, Homo sapiens
aggcttaaggttcta

SEQ ID NO: 219575 - DNA, 15 bp, Homo sapiens
gaggcttaaggttct

SEQ ID NO: 219576 - DNA, 15 bp, Homo sapiens
tgaggcttaaggttc

SEQ ID NO: 219577 - DNA, 15 bp, Homo sapiens
gtgaggcttaaggtt

SEQ ID NO: 219578 - DNA, 15 bp, Homo sapiens
ggtgaggcttaaggt

SEQ ID NO: 219579 - DNA, 15 bp, Homo sapiens
gggtgaggcttaagg

SEQ ID NO: 219580 - DNA, 15 bp, Homo sapiens
agggtgaggcttaag

SEQ ID NO: 219581 - DNA, 15 bp, Homo sapiens
aagggtgaggcttaa

SEQ ID NO: 219582 - DNA, 15 bp, Homo sapiens
aaagggtgaggctta

SEQ ID NO: 219583 - DNA, 15 bp, Homo sapiens
taaagggtgaggctt

SEQ ID NO: 219584 - DNA, 15 bp, Homo sapiens
ataaagggtgaggct

SEQ ID NO: 219585 - DNA, 15 bp, Homo sapiens
aataaagggtgaggc

SEQ ID NO: 219586 - DNA, 15 bp, Homo sapiens
aaataaagggtgagg

SEQ ID NO: 219587 - DNA, 15 bp, Homo sapiens
caaataaagggtgag

SEQ ID NO: 219588 - DNA, 15 bp, Homo sapiens
tcaaataaagggtga

SEQ ID NO: 219589 - DNA, 15 bp, Homo sapiens
atcaaataaagggtg

SEQ ID NO: 219590 - DNA, 15 bp, Homo sapiens
aatcaaataaagggt

SEQ ID NO: 219591 - DNA, 15 bp, Homo sapiens
gaatcaaataaaggg

SEQ ID NO: 219592 - DNA, 15 bp, Homo sapiens
ggaatcaaataaagg

SEQ ID NO: 219593 - DNA, 15 bp, Homo sapiens
tggaatcaaataaag

SEQ ID NO: 219594 - DNA, 15 bp, Homo sapiens
ttggaatcaaataaa

SEQ ID NO: 219595 - DNA, 15 bp, Homo sapiens
tttggaatcaaataa

SEQ ID NO: 219596 - DNA, 15 bp, Homo sapiens
ttttggaatcaaata

SEQ ID NO: 219597 - DNA, 15 bp, Homo sapiens
attttggaatcaaat

SEQ ID NO: 219598 - DNA, 15 bp, Homo sapiens
aattttggaatcaaa

SEQ ID NO: 219599 - DNA, 15 bp, Homo sapiens
gaattttggaatcaa

SEQ ID NO: 219600 - DNA, 15 bp, Homo sapiens
ggaattttggaatca

SEQ ID NO: 219601 - DNA, 15 bp, Homo sapiens
gggaattttggaatc

SEQ ID NO: 219602 - DNA, 15 bp, Homo sapiens
agggaattttggaat

SEQ ID NO: 219603 - DNA, 15 bp, Homo sapiens
aagggaattttggaa

SEQ ID NO: 219604 - DNA, 15 bp, Homo sapiens
taagggaattttgga

SEQ ID NO: 219605 - DNA, 15 bp, Homo sapiens
gtaagggaattttgg

SEQ ID NO: 219606 - DNA, 15 bp, Homo sapiens
ggtaagggaattttg

SEQ ID NO: 219607 - DNA, 15 bp, Homo sapiens
aggtaagggaatttt

SEQ ID NO: 219608 - DNA, 15 bp, Homo sapiens
gaggtaagggaattt

SEQ ID NO: 219609 - DNA, 15 bp, Homo sapiens
ggaggtaagggaatt

SEQ ID NO: 219610 - DNA, 15 bp, Homo sapiens
tggaggtaagggaat

SEQ ID NO: 219611 - DNA, 15 bp, Homo sapiens
ttggaggtaagggaa

SEQ ID NO: 219612 - DNA, 15 bp, Homo sapiens
tttggaggtaaggga

SEQ ID NO: 219613 - DNA, 15 bp, Homo sapiens
atttggaggtaaggg

SEQ ID NO: 219614 - DNA, 15 bp, Homo sapiens
catttggaggtaagg

SEQ ID NO: 219615 - DNA, 15 bp, Homo sapiens
acatttggaggtaag

SEQ ID NO: 219616 - DNA, 15 bp, Homo sapiens
gacatttggaggtaa

SEQ ID NO: 219617 - DNA, 15 bp, Homo sapiens
ggacatttggaggta

SEQ ID NO: 219618 - DNA, 15 bp, Homo sapiens
tggacatttggaggt

SEQ ID NO: 219619 - DNA, 15 bp, Homo sapiens
atggacatttggagg

SEQ ID NO: 219620 - DNA, 15 bp, Homo sapiens
aatggacatttggag

SEQ ID NO: 219621 - DNA, 15 bp, Homo sapiens
gaatggacatttgga

SEQ ID NO: 219622 - DNA, 15 bp, Homo sapiens
agaatggacatttgg

SEQ ID NO: 219623 - DNA, 15 bp, Homo sapiens
cagaatggacatttg

SEQ ID NO: 219624 - DNA, 15 bp, Homo sapiens
tcagaatggacattt

SEQ ID NO: 219625 - DNA, 15 bp, Homo sapiens
ctcagaatggacatt

SEQ ID NO: 219626 - DNA, 15 bp, Homo sapiens
gctcagaatggacat

SEQ ID NO: 219627 - DNA, 15 bp, Homo sapiens
agctcagaatggaca

SEQ ID NO: 219628 - DNA, 15 bp, Homo sapiens
aagctcagaatggac

SEQ ID NO: 219629 - DNA, 15 bp, Homo sapiens
aaagctcagaatgga

SEQ ID NO: 219630 - DNA, 15 bp, Homo sapiens
gaaagctcagaatgg

SEQ ID NO: 219631 - DNA, 15 bp, Homo sapiens
ggaaagctcagaatg

SEQ ID NO: 219632 - DNA, 15 bp, Homo sapiens
aggaaagctcagaat

SEQ ID NO: 219633 - DNA, 15 bp, Homo sapiens
aaggaaagctcagaa

SEQ ID NO: 219634 - DNA, 15 bp, Homo sapiens
caaggaaagctcaga

SEQ ID NO: 219635 - DNA, 15 bp, Homo sapiens
ccaaggaaagctcag

SEQ ID NO: 219636 - DNA, 15 bp, Homo sapiens
cccaaggaaagctca

SEQ ID NO: 219637 - DNA, 15 bp, Homo sapiens
tcccaaggaaagctc

SEQ ID NO: 219638 - DNA, 15 bp, Homo sapiens
ctcccaaggaaagct

SEQ ID NO: 219639 - DNA, 15 bp, Homo sapiens
actcccaaggaaagc

SEQ ID NO: 219640 - DNA, 15 bp, Homo sapiens
tactcccaaggaaag

SEQ ID NO: 219641 - DNA, 15 bp, Homo sapiens
ttactcccaaggaaa

SEQ ID NO: 219642 - DNA, 15 bp, Homo sapiens
cttactcccaaggaa

SEQ ID NO: 219643 - DNA, 15 bp, Homo sapiens
gcttactcccaagga

SEQ ID NO: 219644 - DNA, 15 bp, Homo sapiens
tgcttactcccaagg

SEQ ID NO: 219645 - DNA, 15 bp, Homo sapiens
ttgcttactcccaag

SEQ ID NO: 219646 - DNA, 15 bp, Homo sapiens
tttgcttactcccaa

SEQ ID NO: 219647 - DNA, 15 bp, Homo sapiens
ctttgcttactccca

SEQ ID NO: 219648 - DNA, 15 bp, Homo sapiens
tctttgcttactccc

SEQ ID NO: 219649 - DNA, 15 bp, Homo sapiens
gtctttgcttactcc

SEQ ID NO: 219650 - DNA, 15 bp, Homo sapiens
tgtctttgcttactc

SEQ ID NO: 219651 - DNA, 15 bp, Homo sapiens
atgtctttgcttact

SEQ ID NO: 219652 - DNA, 15 bp, Homo sapiens
aatgtctttgcttac

SEQ ID NO: 219653 - DNA, 15 bp, Homo sapiens
gaatgtctttgctta

SEQ ID NO: 219654 - DNA, 15 bp, Homo sapiens
tgaatgtctttgctt

SEQ ID NO: 219655 - DNA, 15 bp, Homo sapiens
atgaatgtctttgct

SEQ ID NO: 219656 - DNA, 15 bp, Homo sapiens
catgaatgtctttgc

SEQ ID NO: 219657 - DNA, 15 bp, Homo sapiens
tcatgaatgtctttg

SEQ ID NO: 219658 - DNA, 15 bp, Homo sapiens
ttcatgaatgtcttt

SEQ ID NO: 219659 - DNA, 15 bp, Homo sapiens
tttcatgaatgtctt

SEQ ID NO: 219660 - DNA, 15 bp, Homo sapiens
atttcatgaatgtct

SEQ ID NO: 219661 - DNA, 15 bp, Homo sapiens
tatttcatgaatgtc

SEQ ID NO: 219662 - DNA, 15 bp, Homo sapiens
ttatttcatgaatgt

SEQ ID NO: 219663 - DNA, 15 bp, Homo sapiens
tttatttcatgaatg

SEQ ID NO: 219664 - DNA, 15 bp, Homo sapiens
atttatttcatgaat

SEQ ID NO: 219665 - DNA, 15 bp, Homo sapiens
aatttatttcatgaa

SEQ ID NO: 219666 - DNA, 15 bp, Homo sapiens
caatttatttcatga

SEQ ID NO: 219667 - DNA, 15 bp, Homo sapiens
acaatttatttcatg

SEQ ID NO: 219668 - DNA, 15 bp, Homo sapiens
tacaatttatttcat

SEQ ID NO: 219669 - DNA, 15 bp, Homo sapiens
ttacaatttatttca

SEQ ID NO: 219670 - DNA, 15 bp, Homo sapiens
tttacaatttatttc

SEQ ID NO: 219671 - DNA, 15 bp, Homo sapiens
atttacaatttattt

SEQ ID NO: 219672 - DNA, 15 bp, Homo sapiens
tatttacaatttatt

SEQ ID NO: 219673 - DNA, 15 bp, Homo sapiens
atatttacaatttat

SEQ ID NO: 219674 - DNA, 15 bp, Homo sapiens
catatttacaattta

SEQ ID NO: 219675 - DNA, 15 bp, Homo sapiens
gcatatttacaattt

SEQ ID NO: 219676 - DNA, 15 bp, Homo sapiens
ggcatatttacaatt

SEQ ID NO: 219677 - DNA, 15 bp, Homo sapiens
gggcatatttacaat

SEQ ID NO: 219678 - DNA, 15 bp, Homo sapiens
agggcatatttacaa

SEQ ID NO: 219679 - DNA, 15 bp, Homo sapiens
tagggcatatttaca

SEQ ID NO: 219680 - DNA, 15 bp, Homo sapiens
atagggcatatttac

SEQ ID NO: 219681 - DNA, 15 bp, Homo sapiens
aatagggcatattta

SEQ ID NO: 219682 - DNA, 15 bp, Homo sapiens
caatagggcatattt

SEQ ID NO: 219683 - DNA, 15 bp, Homo sapiens
acaatagggcatatt

SEQ ID NO: 219684 - DNA, 15 bp, Homo sapiens
tacaatagggcatat

SEQ ID NO: 219685 - DNA, 15 bp, Homo sapiens
gtacaatagggcata

SEQ ID NO: 219686 - DNA, 15 bp, Homo sapiens
tgtacaatagggcat

SEQ ID NO: 219687 - DNA, 15 bp, Homo sapiens
atgtacaatagggca

SEQ ID NO: 219688 - DNA, 15 bp, Homo sapiens
catgtacaatagggc

SEQ ID NO: 219689 - DNA, 15 bp, Homo sapiens
ccatgtacaataggg

SEQ ID NO: 219690 - DNA, 15 bp, Homo sapiens
tccatgtacaatagg

SEQ ID NO: 219691 - DNA, 15 bp, Homo sapiens
atccatgtacaatag

SEQ ID NO: 219692 - DNA, 15 bp, Homo sapiens
tatccatgtacaata

SEQ ID NO: 219693 - DNA, 15 bp, Homo sapiens
atatccatgtacaat

SEQ ID NO: 219694 - DNA, 15 bp, Homo sapiens
catatccatgtacaa

SEQ ID NO: 219695 - DNA, 15 bp, Homo sapiens
tcatatccatgtaca

SEQ ID NO: 219696 - DNA, 15 bp, Homo sapiens
ttcatatccatgtac

SEQ ID NO: 219697 - DNA, 15 bp, Homo sapiens
tttcatatccatgta

SEQ ID NO: 219698 - DNA, 15 bp, Homo sapiens
atttcatatccatgt

SEQ ID NO: 219699 - DNA, 15 bp, Homo sapiens
aatttcatatccatg

SEQ ID NO: 219700 - DNA, 15 bp, Homo sapiens
taatttcatatccat

SEQ ID NO: 219701 - DNA, 15 bp, Homo sapiens
gtaatttcatatcca

SEQ ID NO: 219702 - DNA, 15 bp, Homo sapiens
ggtaatttcatatcc

SEQ ID NO: 219703 - DNA, 15 bp, Homo sapiens
aggtaatttcatatc

SEQ ID NO: 219704 - DNA, 15 bp, Homo sapiens
aaggtaatttcatat

SEQ ID NO: 219705 - DNA, 15 bp, Homo sapiens
aaaggtaatttcata

SEQ ID NO: 219706 - DNA, 15 bp, Homo sapiens
aaaaggtaatttcat

SEQ ID NO: 219707 - DNA, 15 bp, Homo sapiens
caaaaggtaatttca

SEQ ID NO: 219708 - DNA, 15 bp, Homo sapiens
ccaaaaggtaatttc

SEQ ID NO: 219709 - DNA, 15 bp, Homo sapiens
tccaaaaggtaattt

SEQ ID NO: 219710 - DNA, 15 bp, Homo sapiens
atccaaaaggtaatt

SEQ ID NO: 219711 - DNA, 15 bp, Homo sapiens
catccaaaaggtaat

SEQ ID NO: 219712 - DNA, 15 bp, Homo sapiens
tcatccaaaaggtaa

SEQ ID NO: 219713 - DNA, 15 bp, Homo sapiens
ttcatccaaaaggta

SEQ ID NO: 219714 - DNA, 15 bp, Homo sapiens
gttcatccaaaaggt

SEQ ID NO: 219715 - DNA, 15 bp, Homo sapiens
cgttcatccaaaagg

SEQ ID NO: 219716 - DNA, 15 bp, Homo sapiens
gcgttcatccaaaag

SEQ ID NO: 219717 - DNA, 15 bp, Homo sapiens
ggcgttcatccaaaa

SEQ ID NO: 219718 - DNA, 15 bp, Homo sapiens
aggcgttcatccaaa

SEQ ID NO: 219719 - DNA, 15 bp, Homo sapiens
gaggcgttcatccaa

SEQ ID NO: 219720 - DNA, 15 bp, Homo sapiens
agaggcgttcatcca

SEQ ID NO: 219721 - DNA, 15 bp, Homo sapiens
gagaggcgttcatcc

SEQ ID NO: 219722 - DNA, 15 bp, Homo sapiens
ggagaggcgttcatc

SEQ ID NO: 219723 - DNA, 15 bp, Homo sapiens
tggagaggcgttcat

SEQ ID NO: 219724 - DNA, 15 bp, Homo sapiens
ctggagaggcgttca

SEQ ID NO: 219725 - DNA, 15 bp, Homo sapiens
actggagaggcgttc

SEQ ID NO: 219726 - DNA, 15 bp, Homo sapiens
aactggagaggcgtt

SEQ ID NO: 219727 - DNA, 15 bp, Homo sapiens
taactggagaggcgt

SEQ ID NO: 219728 - DNA, 15 bp, Homo sapiens
ttaactggagaggcg

SEQ ID NO: 219729 - DNA, 15 bp, Homo sapiens
gttaactggagaggc

SEQ ID NO: 219730 - DNA, 15 bp, Homo sapiens
tgttaactggagagg

SEQ ID NO: 219731 - DNA, 15 bp, Homo sapiens
gtgttaactggagag

SEQ ID NO: 219732 - DNA, 15 bp, Homo sapiens
tgtgttaactggaga

SEQ ID NO: 219733 - DNA, 15 bp, Homo sapiens
ctgtgttaactggag

SEQ ID NO: 219734 - DNA, 15 bp, Homo sapiens
cctgtgttaactgga

SEQ ID NO: 219735 - DNA, 15 bp, Homo sapiens
tcctgtgttaactgg

SEQ ID NO: 219736 - DNA, 15 bp, Homo sapiens
ttcctgtgttaactg

SEQ ID NO: 219737 - DNA, 15 bp, Homo sapiens
tttcctgtgttaact

SEQ ID NO: 219738 - DNA, 15 bp, Homo sapiens
ctttcctgtgttaac

SEQ ID NO: 219739 - DNA, 15 bp, Homo sapiens
tctttcctgtgttaa

SEQ ID NO: 219740 - DNA, 15 bp, Homo sapiens
gtctttcctgtgtta

SEQ ID NO: 219741 - DNA, 15 bp, Homo sapiens
agtctttcctgtgtt

SEQ ID NO: 219742 - DNA, 15 bp, Homo sapiens
cagtctttcctgtgt

SEQ ID NO: 219743 - DNA, 15 bp, Homo sapiens
ccagtctttcctgtg

SEQ ID NO: 219744 - DNA, 15 bp, Homo sapiens
cccagtctttcctgt

SEQ ID NO: 219745 - DNA, 15 bp, Homo sapiens
tcccagtctttcctg

SEQ ID NO: 219746 - DNA, 15 bp, Homo sapiens
ttcccagtctttcct

SEQ ID NO: 219747 - DNA, 15 bp, Homo sapiens
gttcccagtctttcc

SEQ ID NO: 219748 - DNA, 15 bp, Homo sapiens
tgttcccagtctttc

SEQ ID NO: 219749 - DNA, 15 bp, Homo sapiens
atgttcccagtcttt

SEQ ID NO: 219750 - DNA, 15 bp, Homo sapiens
catgttcccagtctt

SEQ ID NO: 219751 - DNA, 15 bp, Homo sapiens
ccatgttcccagtct

SEQ ID NO: 219752 - DNA, 15 bp, Homo sapiens
gccatgttcccagtc

SEQ ID NO: 219753 - DNA, 15 bp, Homo sapiens
agccatgttcccagt

SEQ ID NO: 219754 - DNA, 15 bp, Homo sapiens
aagccatgttcccag

SEQ ID NO: 219755 - DNA, 15 bp, Homo sapiens
caagccatgttccca

SEQ ID NO: 219756 - DNA, 15 bp, Homo sapiens
tcaagccatgttccc

SEQ ID NO: 219757 - DNA, 15 bp, Homo sapiens
ctcaagccatgttcc

SEQ ID NO: 219758 - DNA, 15 bp, Homo sapiens
tctcaagccatgttc

SEQ ID NO: 219759 - DNA, 15 bp, Homo sapiens
ttctcaagccatgtt

SEQ ID NO: 219760 - DNA, 15 bp, Homo sapiens
cttctcaagccatgt

SEQ ID NO: 219761 - DNA, 15 bp, Homo sapiens
tcttctcaagccatg

SEQ ID NO: 219762 - DNA, 15 bp, Homo sapiens
ttcttctcaagccat

SEQ ID NO: 219763 - DNA, 15 bp, Homo sapiens
tttcttctcaagcca

SEQ ID NO: 219764 - DNA, 15 bp, Homo sapiens
ttttcttctcaagcc

SEQ ID NO: 219765 - DNA, 15 bp, Homo sapiens
tttttcttctcaagc

SEQ ID NO: 219766 - DNA, 15 bp, Homo sapiens
ttttttcttctcaag

SEQ ID NO: 219767 - DNA, 15 bp, Homo sapiens
tttttttcttctcaa

SEQ ID NO: 219768 - DNA, 15 bp, Homo sapiens
ttttttttcttctca

SEQ ID NO: 219769 - DNA, 15 bp, Homo sapiens
tttttttttcttctc

SEQ ID NO: 219770 - DNA, 15 bp, Homo sapiens
ctttttttttcttct

SEQ ID NO: 219771 - DNA, 15 bp, Homo sapiens
actttttttttcttc

SEQ ID NO: 219772 - DNA, 15 bp, Homo sapiens
aactttttttttctt

SEQ ID NO: 219773 - DNA, 15 bp, Homo sapiens
caactttttttttct

SEQ ID NO: 219774 - DNA, 15 bp, Homo sapiens
ccaactttttttttc

SEQ ID NO: 219775 - DNA, 15 bp, Homo sapiens
cccaacttttttttt

SEQ ID NO: 219776 - DNA, 15 bp, Homo sapiens
ccccaactttttttt

SEQ ID NO: 219777 - DNA, 15 bp, Homo sapiens
cccccaacttttttt

SEQ ID NO: 219778 - DNA, 15 bp, Homo sapiens
ccccccaactttttt

SEQ ID NO: 219779 - DNA, 15 bp, Homo sapiens
tccccccaacttttt

SEQ ID NO: 219780 - DNA, 15 bp, Homo sapiens
ttccccccaactttt

SEQ ID NO: 219781 - DNA, 15 bp, Homo sapiens
cttccccccaacttt

SEQ ID NO: 219782 - DNA, 15 bp, Homo sapiens
tcttccccccaactt

SEQ ID NO: 219783 - DNA, 15 bp, Homo sapiens
gtcttccccccaact

SEQ ID NO: 219784 - DNA, 15 bp, Homo sapiens
tgtcttccccccaac

SEQ ID NO: 219785 - DNA, 15 bp, Homo sapiens
ctgtcttccccccaa

SEQ ID NO: 219786 - DNA, 15 bp, Homo sapiens
cctgtcttcccccca

SEQ ID NO: 219787 - DNA, 15 bp, Homo sapiens
ccctgtcttcccccc

SEQ ID NO: 219788 - DNA, 15 bp, Homo sapiens
tccctgtcttccccc

SEQ ID NO: 219789 - DNA, 15 bp, Homo sapiens
ctccctgtcttcccc

SEQ ID NO: 219790 - DNA, 15 bp, Homo sapiens
cctccctgtcttccc

SEQ ID NO: 219791 - DNA, 15 bp, Homo sapiens
ccctccctgtcttcc

SEQ ID NO: 219792 - DNA, 15 bp, Homo sapiens
gccctccctgtcttc

SEQ ID NO: 219793 - DNA, 15 bp, Homo sapiens
ggccctccctgtctt

SEQ ID NO: 219794 - DNA, 15 bp, Homo sapiens
aggccctccctgtct

SEQ ID NO: 219795 - DNA, 15 bp, Homo sapiens
gaggccctccctgtc

SEQ ID NO: 219796 - DNA, 15 bp, Homo sapiens
ggaggccctccctgt

SEQ ID NO: 219797 - DNA, 15 bp, Homo sapiens
aggaggccctccctg

SEQ ID NO: 219798 - DNA, 15 bp, Homo sapiens
aaggaggccctccct

SEQ ID NO: 219799 - DNA, 15 bp, Homo sapiens
caaggaggccctccc

SEQ ID NO: 219800 - DNA, 15 bp, Homo sapiens
gcaaggaggccctcc

SEQ ID NO: 219801 - DNA, 15 bp, Homo sapiens
ggcaaggaggccctc

SEQ ID NO: 219802 - DNA, 15 bp, Homo sapiens
gggcaaggaggccct

SEQ ID NO: 219803 - DNA, 15 bp, Homo sapiens
tgggcaaggaggccc

SEQ ID NO: 219804 - DNA, 15 bp, Homo sapiens
gtgggcaaggaggcc

SEQ ID NO: 219805 - DNA, 15 bp, Homo sapiens
ggtgggcaaggaggc

SEQ ID NO: 219806 - DNA, 15 bp, Homo sapiens
gggtgggcaaggagg

SEQ ID NO: 219807 - DNA, 15 bp, Homo sapiens
ggggtgggcaaggag

SEQ ID NO: 219808 - DNA, 15 bp, Homo sapiens
tggggtgggcaagga

SEQ ID NO: 219809 - DNA, 15 bp, Homo sapiens
gtggggtgggcaagg

SEQ ID NO: 219810 - DNA, 15 bp, Homo sapiens
ggtggggtgggcaag

SEQ ID NO: 219811 - DNA, 15 bp, Homo sapiens
gggtggggtgggcaa

SEQ ID NO: 219812 - DNA, 15 bp, Homo sapiens
ggggtggggtgggca

SEQ ID NO: 219813 - DNA, 15 bp, Homo sapiens
aggggtggggtgggc

SEQ ID NO: 219814 - DNA, 15 bp, Homo sapiens
caggggtggggtggg

SEQ ID NO: 219815 - DNA, 15 bp, Homo sapiens
gcaggggtggggtgg

SEQ ID NO: 219816 - DNA, 15 bp, Homo sapiens
agcaggggtggggtg

SEQ ID NO: 219817 - DNA, 15 bp, Homo sapiens
aagcaggggtggggt

SEQ ID NO: 219818 - DNA, 15 bp, Homo sapiens
aaagcaggggtgggg

SEQ ID NO: 219819 - DNA, 15 bp, Homo sapiens
gaaagcaggggtggg

SEQ ID NO: 219820 - DNA, 15 bp, Homo sapiens
agaaagcaggggtgg

SEQ ID NO: 219821 - DNA, 15 bp, Homo sapiens
cagaaagcaggggtg

SEQ ID NO: 219822 - DNA, 15 bp, Homo sapiens
acagaaagcaggggt

SEQ ID NO: 219823 - DNA, 15 bp, Homo sapiens
cacagaaagcagggg

SEQ ID NO: 219824 - DNA, 15 bp, Homo sapiens
acacagaaagcaggg

SEQ ID NO: 219825 - DNA, 15 bp, Homo sapiens
tacacagaaagcagg

SEQ ID NO: 219826 - DNA, 15 bp, Homo sapiens
gtacacagaaagcag

SEQ ID NO: 219827 - DNA, 15 bp, Homo sapiens
ggtacacagaaagca

SEQ ID NO: 219828 - DNA, 15 bp, Homo sapiens
aggtacacagaaagc

SEQ ID NO: 219829 - DNA, 15 bp, Homo sapiens
aaggtacacagaaag

SEQ ID NO: 219830 - DNA, 15 bp, Homo sapiens
taaggtacacagaaa

SEQ ID NO: 219831 - DNA, 15 bp, Homo sapiens
ctaaggtacacagaa

SEQ ID NO: 219832 - DNA, 15 bp, Homo sapiens
gctaaggtacacaga

SEQ ID NO: 219833 - DNA, 15 bp, Homo sapiens
ggctaaggtacacag

SEQ ID NO: 219834 - DNA, 15 bp, Homo sapiens
tggctaaggtacaca

SEQ ID NO: 219835 - DNA, 15 bp, Homo sapiens
ctggctaaggtacac

SEQ ID NO: 219836 - DNA, 15 bp, Homo sapiens
gctggctaaggtaca

SEQ ID NO: 219837 - DNA, 15 bp, Homo sapiens
agctggctaaggtac

SEQ ID NO: 219838 - DNA, 15 bp, Homo sapiens
gagctggctaaggta

SEQ ID NO: 219839 - DNA, 15 bp, Homo sapiens
tgagctggctaaggt

SEQ ID NO: 219840 - DNA, 15 bp, Homo sapiens
gtgagctggctaagg

SEQ ID NO: 219841 - DNA, 15 bp, Homo sapiens
ggtgagctggctaag

SEQ ID NO: 219842 - DNA, 15 bp, Homo sapiens
gggtgagctggctaa

SEQ ID NO: 219843 - DNA, 15 bp, Homo sapiens
agggtgagctggcta

SEQ ID NO: 219844 - DNA, 15 bp, Homo sapiens
aagggtgagctggct

SEQ ID NO: 219845 - DNA, 15 bp, Homo sapiens
aaagggtgagctggc

SEQ ID NO: 219846 - DNA, 15 bp, Homo sapiens
taaagggtgagctgg

SEQ ID NO: 219847 - DNA, 15 bp, Homo sapiens
ttaaagggtgagctg

SEQ ID NO: 219848 - DNA, 15 bp, Homo sapiens
cttaaagggtgagct

SEQ ID NO: 219849 - DNA, 15 bp, Homo sapiens
ccttaaagggtgagc

SEQ ID NO: 219850 - DNA, 15 bp, Homo sapiens
tccttaaagggtgag

SEQ ID NO: 219851 - DNA, 15 bp, Homo sapiens
ttccttaaagggtga

SEQ ID NO: 219852 - DNA, 15 bp, Homo sapiens
tttccttaaagggtg

SEQ ID NO: 219853 - DNA, 15 bp, Homo sapiens
atttccttaaagggt

SEQ ID NO: 219854 - DNA, 15 bp, Homo sapiens
catttccttaaaggg

SEQ ID NO: 219855 - DNA, 15 bp, Homo sapiens
tcatttccttaaagg

SEQ ID NO: 219856 - DNA, 15 bp, Homo sapiens
ttcatttccttaaag

SEQ ID NO: 219857 - DNA, 15 bp, Homo sapiens
gttcatttccttaaa

SEQ ID NO: 219858 - DNA, 15 bp, Homo sapiens
tgttcatttccttaa

SEQ ID NO: 219859 - DNA, 15 bp, Homo sapiens
ttgttcatttcctta

SEQ ID NO: 219860 - DNA, 15 bp, Homo sapiens
attgttcatttcctt

SEQ ID NO: 219861 - DNA, 15 bp, Homo sapiens
aattgttcatttcct

SEQ ID NO: 219862 - DNA, 15 bp, Homo sapiens
aaattgttcatttcc

SEQ ID NO: 219863 - DNA, 15 bp, Homo sapiens
aaaattgttcatttc

SEQ ID NO: 219864 - DNA, 15 bp, Homo sapiens
aaaaattgttcattt

SEQ ID NO: 219865 - DNA, 15 bp, Homo sapiens
aaaaaattgttcatt

SEQ ID NO: 219866 - DNA, 15 bp, Homo sapiens
gaaaaaattgttcat

SEQ ID NO: 219867 - DNA, 15 bp, Homo sapiens
agaaaaaattgttca

SEQ ID NO: 219868 - DNA, 15 bp, Homo sapiens
cagaaaaaattgttc

SEQ ID NO: 219869 - DNA, 15 bp, Homo sapiens
acagaaaaaattgtt

SEQ ID NO: 219870 - DNA, 15 bp, Homo sapiens
cacagaaaaaattgt

SEQ ID NO: 219871 - DNA, 15 bp, Homo sapiens
acacagaaaaaattg

SEQ ID NO: 219872 - DNA, 15 bp, Homo sapiens
cacacagaaaaaatt

SEQ ID NO: 219873 - DNA, 15 bp, Homo sapiens
acacacagaaaaaat

SEQ ID NO: 219874 - DNA, 15 bp, Homo sapiens
cacacacagaaaaaa

SEQ ID NO: 219875 - DNA, 15 bp, Homo sapiens
acacacacagaaaaa

SEQ ID NO: 219876 - DNA, 15 bp, Homo sapiens
cacacacacagaaaa

SEQ ID NO: 219877 - DNA, 15 bp, Homo sapiens
gcacacacacagaaa

SEQ ID NO: 219878 - DNA, 15 bp, Homo sapiens
cgcacacacacagaa

SEQ ID NO: 219879 - DNA, 15 bp, Homo sapiens
tcgcacacacacaga

SEQ ID NO: 219880 - DNA, 15 bp, Homo sapiens
ttcgcacacacacag

SEQ ID NO: 219881 - DNA, 15 bp, Homo sapiens
tttcgcacacacaca

SEQ ID NO: 219882 - DNA, 15 bp, Homo sapiens
ctttcgcacacacac

SEQ ID NO: 219883 - DNA, 15 bp, Homo sapiens
cctttcgcacacaca

SEQ ID NO: 219884 - DNA, 15 bp, Homo sapiens
acctttcgcacacac

SEQ ID NO: 219885 - DNA, 15 bp, Homo sapiens
cacctttcgcacaca

SEQ ID NO: 219886 - DNA, 15 bp, Homo sapiens
acacctttcgcacac

SEQ ID NO: 219887 - DNA, 15 bp, Homo sapiens
gacacctttcgcaca

SEQ ID NO: 219888 - DNA, 15 bp, Homo sapiens
tgacacctttcgcac

SEQ ID NO: 219889 - DNA, 15 bp, Homo sapiens
ctgacacctttcgca

SEQ ID NO: 219890 - DNA, 15 bp, Homo sapiens
tctgacacctttcgc

SEQ ID NO: 219891 - DNA, 15 bp, Homo sapiens
ttctgacacctttcg

SEQ ID NO: 219892 - DNA, 15 bp, Homo sapiens
cttctgacacctttc

SEQ ID NO: 219893 - DNA, 15 bp, Homo sapiens
acttctgacaccttt

SEQ ID NO: 219894 - DNA, 15 bp, Homo sapiens
aacttctgacacctt

SEQ ID NO: 219895 - DNA, 15 bp, Homo sapiens
aaacttctgacacct

SEQ ID NO: 219896 - DNA, 15 bp, Homo sapiens
aaaacttctgacacc

SEQ ID NO: 219897 - DNA, 15 bp, Homo sapiens
gaaaacttctgacac

SEQ ID NO: 219898 - DNA, 15 bp, Homo sapiens
agaaaacttctgaca

SEQ ID NO: 219899 - DNA, 15 bp, Homo sapiens
cagaaaacttctgac

SEQ ID NO: 219900 - DNA, 15 bp, Homo sapiens
tcagaaaacttctga

SEQ ID NO: 219901 - DNA, 15 bp, Homo sapiens
ctcagaaaacttctg

SEQ ID NO: 219902 - DNA, 15 bp, Homo sapiens
cctcagaaaacttct

SEQ ID NO: 219903 - DNA, 15 bp, Homo sapiens
gcctcagaaaacttc

SEQ ID NO: 219904 - DNA, 15 bp, Homo sapiens
agcctcagaaaactt

SEQ ID NO: 219905 - DNA, 15 bp, Homo sapiens
cagcctcagaaaact

SEQ ID NO: 219906 - DNA, 15 bp, Homo sapiens
acagcctcagaaaac

SEQ ID NO: 219907 - DNA, 15 bp, Homo sapiens
tacagcctcagaaaa

SEQ ID NO: 219908 - DNA, 15 bp, Homo sapiens
ctacagcctcagaaa

SEQ ID NO: 219909 - DNA, 15 bp, Homo sapiens
gctacagcctcagaa

SEQ ID NO: 219910 - DNA, 15 bp, Homo sapiens
agctacagcctcaga

SEQ ID NO: 219911 - DNA, 15 bp, Homo sapiens
aagctacagcctcag

SEQ ID NO: 219912 - DNA, 15 bp, Homo sapiens
aaagctacagcctca

SEQ ID NO: 219913 - DNA, 15 bp, Homo sapiens
taaagctacagcctc

SEQ ID NO: 219914 - DNA, 15 bp, Homo sapiens
ataaagctacagcct

SEQ ID NO: 219915 - DNA, 15 bp, Homo sapiens
cataaagctacagcc

SEQ ID NO: 219916 - DNA, 15 bp, Homo sapiens
gcataaagctacagc

SEQ ID NO: 219917 - DNA, 15 bp, Homo sapiens
tgcataaagctacag

SEQ ID NO: 219918 - DNA, 15 bp, Homo sapiens
ttgcataaagctaca

SEQ ID NO: 219919 - DNA, 15 bp, Homo sapiens
tttgcataaagctac

SEQ ID NO: 219920 - DNA, 15 bp, Homo sapiens
atttgcataaagcta

SEQ ID NO: 219921 - DNA, 15 bp, Homo sapiens
tatttgcataaagct

SEQ ID NO: 219922 - DNA, 15 bp, Homo sapiens
atatttgcataaagc

SEQ ID NO: 219923 - DNA, 15 bp, Homo sapiens
catatttgcataaag

SEQ ID NO: 219924 - DNA, 15 bp, Homo sapiens
gcatatttgcataaa

SEQ ID NO: 219925 - DNA, 15 bp, Homo sapiens
agcatatttgcataa

SEQ ID NO: 219926 - DNA, 15 bp, Homo sapiens
tagcatatttgcata

SEQ ID NO: 219927 - DNA, 15 bp, Homo sapiens
gtagcatatttgcat

SEQ ID NO: 219928 - DNA, 15 bp, Homo sapiens
agtagcatatttgca

SEQ ID NO: 219929 - DNA, 15 bp, Homo sapiens
gagtagcatatttgc

SEQ ID NO: 219930 - DNA, 15 bp, Homo sapiens
tgagtagcatatttg

SEQ ID NO: 219931 - DNA, 15 bp, Homo sapiens
ttgagtagcatattt

SEQ ID NO: 219932 - DNA, 15 bp, Homo sapiens
cttgagtagcatatt

SEQ ID NO: 219933 - DNA, 15 bp, Homo sapiens
tcttgagtagcatat

SEQ ID NO: 219934 - DNA, 15 bp, Homo sapiens
ttcttgagtagcata

SEQ ID NO: 219935 - DNA, 15 bp, Homo sapiens
cttcttgagtagcat

SEQ ID NO: 219936 - DNA, 15 bp, Homo sapiens
tcttcttgagtagca

SEQ ID NO: 219937 - DNA, 15 bp, Homo sapiens
ttcttcttgagtagc

SEQ ID NO: 219938 - DNA, 15 bp, Homo sapiens
cttcttcttgagtag

SEQ ID NO: 219939 - DNA, 15 bp, Homo sapiens
ccttcttcttgagta

SEQ ID NO: 219940 - DNA, 15 bp, Homo sapiens
gccttcttcttgagt

SEQ ID NO: 219941 - DNA, 15 bp, Homo sapiens
agccttcttcttgag

SEQ ID NO: 219942 - DNA, 15 bp, Homo sapiens
aagccttcttcttga

SEQ ID NO: 219943 - DNA, 15 bp, Homo sapiens
aaagccttcttcttg

SEQ ID NO: 219944 - DNA, 15 bp, Homo sapiens
taaagccttcttctt

SEQ ID NO: 219945 - DNA, 15 bp, Homo sapiens
ctaaagccttcttct

SEQ ID NO: 219946 - DNA, 15 bp, Homo sapiens
cctaaagccttcttc

SEQ ID NO: 219947 - DNA, 15 bp, Homo sapiens
ccctaaagccttctt

SEQ ID NO: 219948 - DNA, 15 bp, Homo sapiens
cccctaaagccttct

SEQ ID NO: 219949 - DNA, 15 bp, Homo sapiens
tcccctaaagccttc

SEQ ID NO: 219950 - DNA, 15 bp, Homo sapiens
ctcccctaaagcctt

SEQ ID NO: 219951 - DNA, 15 bp, Homo sapiens
tctcccctaaagcct

SEQ ID NO: 219952 - DNA, 15 bp, Homo sapiens
ctctcccctaaagcc

SEQ ID NO: 219953 - DNA, 15 bp, Homo sapiens
actctcccctaaagc

SEQ ID NO: 219954 - DNA, 15 bp, Homo sapiens
aactctcccctaaag

SEQ ID NO: 219955 - DNA, 15 bp, Homo sapiens
taactctcccctaaa

SEQ ID NO: 219956 - DNA, 15 bp, Homo sapiens
ataactctcccctaa

SEQ ID NO: 219957 - DNA, 15 bp, Homo sapiens
aataactctccccta

SEQ ID NO: 219958 - DNA, 15 bp, Homo sapiens
aaataactctcccct

SEQ ID NO: 219959 - DNA, 15 bp, Homo sapiens
taaataactctcccc

SEQ ID NO: 219960 - DNA, 15 bp, Homo sapiens
ataaataactctccc

SEQ ID NO: 219961 - DNA, 15 bp, Homo sapiens
tataaataactctcc

SEQ ID NO: 219962 - DNA, 15 bp, Homo sapiens
atataaataactctc

SEQ ID NO: 219963 - DNA, 15 bp, Homo sapiens
gatataaataactct

SEQ ID NO: 219964 - DNA, 15 bp, Homo sapiens
ggatataaataactc

SEQ ID NO: 219965 - DNA, 15 bp, Homo sapiens
gggatataaataact

SEQ ID NO: 219966 - DNA, 15 bp, Homo sapiens
tgggatataaataac

SEQ ID NO: 219967 - DNA, 15 bp, Homo sapiens
gtgggatataaataa

SEQ ID NO: 219968 - DNA, 15 bp, Homo sapiens
tgtgggatataaata

SEQ ID NO: 219969 - DNA, 15 bp, Homo sapiens
ctgtgggatataaat

SEQ ID NO: 219970 - DNA, 15 bp, Homo sapiens
cctgtgggatataaa

SEQ ID NO: 219971 - DNA, 15 bp, Homo sapiens
gcctgtgggatataa

SEQ ID NO: 219972 - DNA, 15 bp, Homo sapiens
tgcctgtgggatata

SEQ ID NO: 219973 - DNA, 15 bp, Homo sapiens
atgcctgtgggatat

SEQ ID NO: 219974 - DNA, 15 bp, Homo sapiens
aatgcctgtgggata

SEQ ID NO: 219975 - DNA, 15 bp, Homo sapiens
taatgcctgtgggat

SEQ ID NO: 219976 - DNA, 15 bp, Homo sapiens
gtaatgcctgtggga

SEQ ID NO: 219977 - DNA, 15 bp, Homo sapiens
tgtaatgcctgtggg

SEQ ID NO: 219978 - DNA, 15 bp, Homo sapiens
gtgtaatgcctgtgg

SEQ ID NO: 219979 - DNA, 15 bp, Homo sapiens
tgtgtaatgcctgtg

SEQ ID NO: 219980 - DNA, 15 bp, Homo sapiens
atgtgtaatgcctgt

SEQ ID NO: 219981 - DNA, 15 bp, Homo sapiens
catgtgtaatgcctg

SEQ ID NO: 219982 - DNA, 15 bp, Homo sapiens
gcatgtgtaatgcct

SEQ ID NO: 219983 - DNA, 15 bp, Homo sapiens
tgcatgtgtaatgcc

SEQ ID NO: 219984 - DNA, 15 bp, Homo sapiens
ttgcatgtgtaatgc

SEQ ID NO: 219985 - DNA, 15 bp, Homo sapiens
tttgcatgtgtaatg

SEQ ID NO: 219986 - DNA, 15 bp, Homo sapiens
ttttgcatgtgtaat

SEQ ID NO: 219987 - DNA, 15 bp, Homo sapiens
cttttgcatgtgtaa

SEQ ID NO: 219988 - DNA, 15 bp, Homo sapiens
ccttttgcatgtgta

SEQ ID NO: 219989 - DNA, 15 bp, Homo sapiens
accttttgcatgtgt

SEQ ID NO: 219990 - DNA, 15 bp, Homo sapiens
caccttttgcatgtg

SEQ ID NO: 219991 - DNA, 15 bp, Homo sapiens
tcaccttttgcatgt

SEQ ID NO: 219992 - DNA, 15 bp, Homo sapiens
ttcaccttttgcatg

SEQ ID NO: 219993 - DNA, 15 bp, Homo sapiens
tttcaccttttgcat

SEQ ID NO: 219994 - DNA, 15 bp, Homo sapiens
gtttcaccttttgca

SEQ ID NO: 219995 - DNA, 15 bp, Homo sapiens
agtttcaccttttgc

SEQ ID NO: 219996 - DNA, 15 bp, Homo sapiens
cagtttcaccttttg

SEQ ID NO: 219997 - DNA, 15 bp, Homo sapiens
acagtttcacctttt

SEQ ID NO: 219998 - DNA, 15 bp, Homo sapiens
cacagtttcaccttt

SEQ ID NO: 219999 - DNA, 15 bp, Homo sapiens
tcacagtttcacctt

SEQ ID NO: 220000 - DNA, 15 bp, Homo sapiens
ttcacagtttcacct

SEQ ID NO: 220001 - DNA, 15 bp, Homo sapiens
attcacagtttcacc

SEQ ID NO: 220002 - DNA, 15 bp, Homo sapiens
gattcacagtttcac

SEQ ID NO: 220003 - DNA, 15 bp, Homo sapiens
agattcacagtttca

SEQ ID NO: 220004 - DNA, 15 bp, Homo sapiens
gagattcacagtttc

SEQ ID NO: 220005 - DNA, 15 bp, Homo sapiens
agagattcacagttt

SEQ ID NO: 220006 - DNA, 15 bp, Homo sapiens
cagagattcacagtt

SEQ ID NO: 220007 - DNA, 15 bp, Homo sapiens
tcagagattcacagt

SEQ ID NO: 220008 - DNA, 15 bp, Homo sapiens
ttcagagattcacag

SEQ ID NO: 220009 - DNA, 15 bp, Homo sapiens
attcagagattcaca

SEQ ID NO: 220010 - DNA, 15 bp, Homo sapiens
aattcagagattcac

SEQ ID NO: 220011 - DNA, 15 bp, Homo sapiens
aaattcagagattca

SEQ ID NO: 220012 - DNA, 15 bp, Homo sapiens
gaaattcagagattc

SEQ ID NO: 220013 - DNA, 15 bp, Homo sapiens
ggaaattcagagatt

SEQ ID NO: 220014 - DNA, 15 bp, Homo sapiens
tggaaattcagagat

SEQ ID NO: 220015 - DNA, 15 bp, Homo sapiens
ctggaaattcagaga

SEQ ID NO: 220016 - DNA, 15 bp, Homo sapiens
cctggaaattcagag

SEQ ID NO: 220017 - DNA, 15 bp, Homo sapiens
tcctggaaattcaga

SEQ ID NO: 220018 - DNA, 15 bp, Homo sapiens
ctcctggaaattcag

SEQ ID NO: 220019 - DNA, 15 bp, Homo sapiens
actcctggaaattca

SEQ ID NO: 220020 - DNA, 15 bp, Homo sapiens
cactcctggaaattc

SEQ ID NO: 220021 - DNA, 15 bp, Homo sapiens
ccactcctggaaatt

SEQ ID NO: 220022 - DNA, 15 bp, Homo sapiens
tccactcctggaaat

SEQ ID NO: 220023 - DNA, 15 bp, Homo sapiens
atccactcctggaaa

SEQ ID NO: 220024 - DNA, 15 bp, Homo sapiens
catccactcctggaa

SEQ ID NO: 220025 - DNA, 15 bp, Homo sapiens
acatccactcctgga

SEQ ID NO: 220026 - DNA, 15 bp, Homo sapiens
aacatccactcctgg

SEQ ID NO: 220027 - DNA, 15 bp, Homo sapiens
gaacatccactcctg

SEQ ID NO: 220028 - DNA, 15 bp, Homo sapiens
agaacatccactcct

SEQ ID NO: 220029 - DNA, 15 bp, Homo sapiens
aagaacatccactcc

SEQ ID NO: 220030 - DNA, 15 bp, Homo sapiens
taagaacatccactc

SEQ ID NO: 220031 - DNA, 15 bp, Homo sapiens
ataagaacatccact

SEQ ID NO: 220032 - DNA, 15 bp, Homo sapiens
cataagaacatccac

SEQ ID NO: 220033 - DNA, 15 bp, Homo sapiens
tcataagaacatcca

SEQ ID NO: 220034 - DNA, 15 bp, Homo sapiens
atcataagaacatcc

SEQ ID NO: 220035 - DNA, 15 bp, Homo sapiens
tatcataagaacatc

SEQ ID NO: 220036 - DNA, 15 bp, Homo sapiens
ttatcataagaacat

SEQ ID NO: 220037 - DNA, 15 bp, Homo sapiens
cttatcataagaaca

SEQ ID NO: 220038 - DNA, 15 bp, Homo sapiens
gcttatcataagaac

SEQ ID NO: 220039 - DNA, 15 bp, Homo sapiens
tgcttatcataagaa

SEQ ID NO: 220040 - DNA, 15 bp, Homo sapiens
gtgcttatcataaga

SEQ ID NO: 220041 - DNA, 15 bp, Homo sapiens
tgtgcttatcataag

SEQ ID NO: 220042 - DNA, 15 bp, Homo sapiens
atgtgcttatcataa

SEQ ID NO: 220043 - DNA, 15 bp, Homo sapiens
gatgtgcttatcata

SEQ ID NO: 220044 - DNA, 15 bp, Homo sapiens
ggatgtgcttatcat

SEQ ID NO: 220045 - DNA, 15 bp, Homo sapiens
aggatgtgcttatca

SEQ ID NO: 220046 - DNA, 15 bp, Homo sapiens
aaggatgtgcttatc

SEQ ID NO: 220047 - DNA, 15 bp, Homo sapiens
caaggatgtgcttat

SEQ ID NO: 220048 - DNA, 15 bp, Homo sapiens
gcaaggatgtgctta

SEQ ID NO: 220049 - DNA, 15 bp, Homo sapiens
cgcaaggatgtgctt

SEQ ID NO: 220050 - DNA, 15 bp, Homo sapiens
ccgcaaggatgtgct

SEQ ID NO: 220051 - DNA, 15 bp, Homo sapiens
accgcaaggatgtgc

SEQ ID NO: 220052 - DNA, 15 bp, Homo sapiens
aaccgcaaggatgtg

SEQ ID NO: 220053 - DNA, 15 bp, Homo sapiens
taaccgcaaggatgt

SEQ ID NO: 220054 - DNA, 15 bp, Homo sapiens
ctaaccgcaaggatg

SEQ ID NO: 220055 - DNA, 15 bp, Homo sapiens
gctaaccgcaaggat

SEQ ID NO: 220056 - DNA, 15 bp, Homo sapiens
agctaaccgcaagga

SEQ ID NO: 220057 - DNA, 15 bp, Homo sapiens
tagctaaccgcaagg

SEQ ID NO: 220058 - DNA, 15 bp, Homo sapiens
atagctaaccgcaag

SEQ ID NO: 220059 - DNA, 15 bp, Homo sapiens
aatagctaaccgcaa

SEQ ID NO: 220060 - DNA, 15 bp, Homo sapiens
aaatagctaaccgca

SEQ ID NO: 220061 - DNA, 15 bp, Homo sapiens
aaaatagctaaccgc

SEQ ID NO: 220062 - DNA, 15 bp, Homo sapiens
caaaatagctaaccg

SEQ ID NO: 220063 - DNA, 15 bp, Homo sapiens
ccaaaatagctaacc

SEQ ID NO: 220064 - DNA, 15 bp, Homo sapiens
accaaaatagctaac

SEQ ID NO: 220065 - DNA, 15 bp, Homo sapiens
caccaaaatagctaa

SEQ ID NO: 220066 - DNA, 15 bp, Homo sapiens
ccaccaaaatagcta

SEQ ID NO: 220067 - DNA, 15 bp, Homo sapiens
gccaccaaaatagct

SEQ ID NO: 220068 - DNA, 15 bp, Homo sapiens
ggccaccaaaatagc

SEQ ID NO: 220069 - DNA, 15 bp, Homo sapiens
tggccaccaaaatag

SEQ ID NO: 220070 - DNA, 15 bp, Homo sapiens
atggccaccaaaata

SEQ ID NO: 220071 - DNA, 15 bp, Homo sapiens
tatggccaccaaaat

SEQ ID NO: 220072 - DNA, 15 bp, Homo sapiens
atatggccaccaaaa

SEQ ID NO: 220073 - DNA, 15 bp, Homo sapiens
gatatggccaccaaa

SEQ ID NO: 220074 - DNA, 15 bp, Homo sapiens
agatatggccaccaa

SEQ ID NO: 220075 - DNA, 15 bp, Homo sapiens
gagatatggccacca

SEQ ID NO: 220076 - DNA, 15 bp, Homo sapiens
tgagatatggccacc

SEQ ID NO: 220077 - DNA, 15 bp, Homo sapiens
gtgagatatggccac

SEQ ID NO: 220078 - DNA, 15 bp, Homo sapiens
agtgagatatggcca

SEQ ID NO: 220079 - DNA, 15 bp, Homo sapiens
cagtgagatatggcc

SEQ ID NO: 220080 - DNA, 15 bp, Homo sapiens
acagtgagatatggc

SEQ ID NO: 220081 - DNA, 15 bp, Homo sapiens
gacagtgagatatgg

SEQ ID NO: 220082 - DNA, 15 bp, Homo sapiens
tgacagtgagatatg

SEQ ID NO: 220083 - DNA, 15 bp, Homo sapiens
ctgacagtgagatat

SEQ ID NO: 220084 - DNA, 15 bp, Homo sapiens
tctgacagtgagata

SEQ ID NO: 220085 - DNA, 15 bp, Homo sapiens
atctgacagtgagat

SEQ ID NO: 220086 - DNA, 15 bp, Homo sapiens
aatctgacagtgaga

SEQ ID NO: 220087 - DNA, 15 bp, Homo sapiens
aaatctgacagtgag

SEQ ID NO: 220088 - DNA, 15 bp, Homo sapiens
aaaatctgacagtga

SEQ ID NO: 220089 - DNA, 15 bp, Homo sapiens
aaaaatctgacagtg

SEQ ID NO: 220090 - DNA, 15 bp, Homo sapiens
caaaaatctgacagt

SEQ ID NO: 220091 - DNA, 15 bp, Homo sapiens
gcaaaaatctgacag

SEQ ID NO: 220092 - DNA, 15 bp, Homo sapiens
tgcaaaaatctgaca

SEQ ID NO: 220093 - DNA, 15 bp, Homo sapiens
ctgcaaaaatctgac

SEQ ID NO: 220094 - DNA, 15 bp, Homo sapiens
cctgcaaaaatctga

SEQ ID NO: 220095 - DNA, 15 bp, Homo sapiens
gcctgcaaaaatctg

SEQ ID NO: 220096 - DNA, 15 bp, Homo sapiens
tgcctgcaaaaatct

SEQ ID NO: 220097 - DNA, 15 bp, Homo sapiens
ctgcctgcaaaaatc

SEQ ID NO: 220098 - DNA, 15 bp, Homo sapiens
cctgcctgcaaaaat

SEQ ID NO: 220099 - DNA, 15 bp, Homo sapiens
tcctgcctgcaaaaa

SEQ ID NO: 220100 - DNA, 15 bp, Homo sapiens
ctcctgcctgcaaaa

SEQ ID NO: 220101 - DNA, 15 bp, Homo sapiens
tctcctgcctgcaaa

SEQ ID NO: 220102 - DNA, 15 bp, Homo sapiens
gtctcctgcctgcaa

SEQ ID NO: 220103 - DNA, 15 bp, Homo sapiens
agtctcctgcctgca

SEQ ID NO: 220104 - DNA, 15 bp, Homo sapiens
tagtctcctgcctgc

SEQ ID NO: 220105 - DNA, 15 bp, Homo sapiens
gtagtctcctgcctg

SEQ ID NO: 220106 - DNA, 15 bp, Homo sapiens
tgtagtctcctgcct

SEQ ID NO: 220107 - DNA, 15 bp, Homo sapiens
atgtagtctcctgcc

SEQ ID NO: 220108 - DNA, 15 bp, Homo sapiens
tatgtagtctcctgc

SEQ ID NO: 220109 - DNA, 15 bp, Homo sapiens
ttatgtagtctcctg

SEQ ID NO: 220110 - DNA, 15 bp, Homo sapiens
attatgtagtctcct

SEQ ID NO: 220111 - DNA, 15 bp, Homo sapiens
gattatgtagtctcc

SEQ ID NO: 220112 - DNA, 15 bp, Homo sapiens
tgattatgtagtctc

SEQ ID NO: 220113 - DNA, 15 bp, Homo sapiens
atgattatgtagtct

SEQ ID NO: 220114 - DNA, 15 bp, Homo sapiens
aatgattatgtagtc

SEQ ID NO: 220115 - DNA, 15 bp, Homo sapiens
gaatgattatgtagt

SEQ ID NO: 220116 - DNA, 15 bp, Homo sapiens
ggaatgattatgtag

SEQ ID NO: 220117 - DNA, 15 bp, Homo sapiens
tggaatgattatgta

SEQ ID NO: 220118 - DNA, 15 bp, Homo sapiens
atggaatgattatgt

SEQ ID NO: 220119 - DNA, 15 bp, Homo sapiens
tatggaatgattatg

SEQ ID NO: 220120 - DNA, 15 bp, Homo sapiens
gtatggaatgattat

SEQ ID NO: 220121 - DNA, 15 bp, Homo sapiens
agtatggaatgatta

SEQ ID NO: 220122 - DNA, 15 bp, Homo sapiens
aagtatggaatgatt

SEQ ID NO: 220123 - DNA, 15 bp, Homo sapiens
aaagtatggaatgat

SEQ ID NO: 220124 - DNA, 15 bp, Homo sapiens
aaaagtatggaatga

SEQ ID NO: 220125 - DNA, 15 bp, Homo sapiens
taaaagtatggaatg

SEQ ID NO: 220126 - DNA, 15 bp, Homo sapiens
ataaaagtatggaat

SEQ ID NO: 220127 - DNA, 15 bp, Homo sapiens
tataaaagtatggaa

SEQ ID NO: 220128 - DNA, 15 bp, Homo sapiens
ttataaaagtatgga

SEQ ID NO: 220129 - DNA, 15 bp, Homo sapiens
attataaaagtatgg

SEQ ID NO: 220130 - DNA, 15 bp, Homo sapiens
cattataaaagtatg

SEQ ID NO: 220131 - DNA, 15 bp, Homo sapiens
tcattataaaagtat

SEQ ID NO: 220132 - DNA, 15 bp, Homo sapiens
gtcattataaaagta

SEQ ID NO: 220133 - DNA, 15 bp, Homo sapiens
ggtcattataaaagt

SEQ ID NO: 220134 - DNA, 15 bp, Homo sapiens
gggtcattataaaag

SEQ ID NO: 220135 - DNA, 15 bp, Homo sapiens
agggtcattataaaa

SEQ ID NO: 220136 - DNA, 15 bp, Homo sapiens
tagggtcattataaa

SEQ ID NO: 220137 - DNA, 15 bp, Homo sapiens
ctagggtcattataa

SEQ ID NO: 220138 - DNA, 15 bp, Homo sapiens
tctagggtcattata

SEQ ID NO: 220139 - DNA, 15 bp, Homo sapiens
atctagggtcattat

SEQ ID NO: 220140 - DNA, 15 bp, Homo sapiens
catctagggtcatta

SEQ ID NO: 220141 - DNA, 15 bp, Homo sapiens
acatctagggtcatt

SEQ ID NO: 220142 - DNA, 15 bp, Homo sapiens
aacatctagggtcat

SEQ ID NO: 220143 - DNA, 15 bp, Homo sapiens
aaacatctagggtca

SEQ ID NO: 220144 - DNA, 15 bp, Homo sapiens
gaaacatctagggtc

SEQ ID NO: 220145 - DNA, 15 bp, Homo sapiens
agaaacatctagggt

SEQ ID NO: 220146 - DNA, 15 bp, Homo sapiens
gagaaacatctaggg

SEQ ID NO: 220147 - DNA, 15 bp, Homo sapiens
agagaaacatctagg

SEQ ID NO: 220148 - DNA, 15 bp, Homo sapiens
gagagaaacatctag

SEQ ID NO: 220149 - DNA, 15 bp, Homo sapiens
ggagagaaacatcta

SEQ ID NO: 220150 - DNA, 15 bp, Homo sapiens
tggagagaaacatct

SEQ ID NO: 220151 - DNA, 15 bp, Homo sapiens
ttggagagaaacatc

SEQ ID NO: 220152 - DNA, 15 bp, Homo sapiens
attggagagaaacat

SEQ ID NO: 220153 - DNA, 15 bp, Homo sapiens
cattggagagaaaca

SEQ ID NO: 220154 - DNA, 15 bp, Homo sapiens
ccattggagagaaac

SEQ ID NO: 220155 - DNA, 15 bp, Homo sapiens
cccattggagagaaa

SEQ ID NO: 220156 - DNA, 15 bp, Homo sapiens
tcccattggagagaa

SEQ ID NO: 220157 - DNA, 15 bp, Homo sapiens
gtcccattggagaga

SEQ ID NO: 220158 - DNA, 15 bp, Homo sapiens
agtcccattggagag

SEQ ID NO: 220159 - DNA, 15 bp, Homo sapiens
aagtcccattggaga

SEQ ID NO: 220160 - DNA, 15 bp, Homo sapiens
gaagtcccattggag

SEQ ID NO: 220161 - DNA, 15 bp, Homo sapiens
tgaagtcccattgga

SEQ ID NO: 220162 - DNA, 15 bp, Homo sapiens
atgaagtcccattgg

SEQ ID NO: 220163 - DNA, 15 bp, Homo sapiens
tatgaagtcccattg

SEQ ID NO: 220164 - DNA, 15 bp, Homo sapiens
ttatgaagtcccatt

SEQ ID NO: 220165 - DNA, 15 bp, Homo sapiens
gttatgaagtcccat

SEQ ID NO: 220166 - DNA, 15 bp, Homo sapiens
ggttatgaagtccca

SEQ ID NO: 220167 - DNA, 15 bp, Homo sapiens
aggttatgaagtccc

SEQ ID NO: 220168 - DNA, 15 bp, Homo sapiens
caggttatgaagtcc

SEQ ID NO: 220169 - DNA, 15 bp, Homo sapiens
tcaggttatgaagtc

SEQ ID NO: 220170 - DNA, 15 bp, Homo sapiens
ttcaggttatgaagt

SEQ ID NO: 220171 - DNA, 15 bp, Homo sapiens
gttcaggttatgaag

SEQ ID NO: 220172 - DNA, 15 bp, Homo sapiens
agttcaggttatgaa

SEQ ID NO: 220173 - DNA, 15 bp, Homo sapiens
gagttcaggttatga

SEQ ID NO: 220174 - DNA, 15 bp, Homo sapiens
ggagttcaggttatg

SEQ ID NO: 220175 - DNA, 15 bp, Homo sapiens
aggagttcaggttat

SEQ ID NO: 220176 - DNA, 15 bp, Homo sapiens
gaggagttcaggtta

SEQ ID NO: 220177 - DNA, 15 bp, Homo sapiens
agaggagttcaggtt

SEQ ID NO: 220178 - DNA, 15 bp, Homo sapiens
aagaggagttcaggt

SEQ ID NO: 220179 - DNA, 15 bp, Homo sapiens
caagaggagttcagg

SEQ ID NO: 220180 - DNA, 15 bp, Homo sapiens
ccaagaggagttcag

SEQ ID NO: 220181 - DNA, 15 bp, Homo sapiens
cccaagaggagttca

SEQ ID NO: 220182 - DNA, 15 bp, Homo sapiens
gcccaagaggagttc

SEQ ID NO: 220183 - DNA, 15 bp, Homo sapiens
agcccaagaggagtt

SEQ ID NO: 220184 - DNA, 15 bp, Homo sapiens
aagcccaagaggagt

SEQ ID NO: 220185 - DNA, 15 bp, Homo sapiens
aaagcccaagaggag

SEQ ID NO: 220186 - DNA, 15 bp, Homo sapiens
taaagcccaagagga

SEQ ID NO: 220187 - DNA, 15 bp, Homo sapiens
ctaaagcccaagagg

SEQ ID NO: 220188 - DNA, 15 bp, Homo sapiens
tctaaagcccaagag

SEQ ID NO: 220189 - DNA, 15 bp, Homo sapiens
atctaaagcccaaga

SEQ ID NO: 220190 - DNA, 15 bp, Homo sapiens
aatctaaagcccaag

SEQ ID NO: 220191 - DNA, 15 bp, Homo sapiens
aaatctaaagcccaa

SEQ ID NO: 220192 - DNA, 15 bp, Homo sapiens
taaatctaaagccca

SEQ ID NO: 220193 - DNA, 15 bp, Homo sapiens
gtaaatctaaagccc

SEQ ID NO: 220194 - DNA, 15 bp, Homo sapiens
agtaaatctaaagcc

SEQ ID NO: 220195 - DNA, 15 bp, Homo sapiens
tagtaaatctaaagc

SEQ ID NO: 220196 - DNA, 15 bp, Homo sapiens
gtagtaaatctaaag

SEQ ID NO: 220197 - DNA, 15 bp, Homo sapiens
agtagtaaatctaaa

SEQ ID NO: 220198 - DNA, 15 bp, Homo sapiens
tagtagtaaatctaa

SEQ ID NO: 220199 - DNA, 15 bp, Homo sapiens
gtagtagtaaatcta

SEQ ID NO: 220200 - DNA, 15 bp, Homo sapiens
ggtagtagtaaatct

SEQ ID NO: 220201 - DNA, 15 bp, Homo sapiens
aggtagtagtaaatc

SEQ ID NO: 220202 - DNA, 15 bp, Homo sapiens
aaggtagtagtaaat

SEQ ID NO: 220203 - DNA, 15 bp, Homo sapiens
caaggtagtagtaaa

SEQ ID NO: 220204 - DNA, 15 bp, Homo sapiens
ccaaggtagtagtaa

SEQ ID NO: 220205 - DNA, 15 bp, Homo sapiens
tccaaggtagtagta

SEQ ID NO: 220206 - DNA, 15 bp, Homo sapiens
atccaaggtagtagt

SEQ ID NO: 220207 - DNA, 15 bp, Homo sapiens
aatccaaggtagtag

SEQ ID NO: 220208 - DNA, 15 bp, Homo sapiens
aaatccaaggtagta

SEQ ID NO: 220209 - DNA, 15 bp, Homo sapiens
caaatccaaggtagt

SEQ ID NO: 220210 - DNA, 15 bp, Homo sapiens
acaaatccaaggtag

SEQ ID NO: 220211 - DNA, 15 bp, Homo sapiens
tacaaatccaaggta

SEQ ID NO: 220212 - DNA, 15 bp, Homo sapiens
ctacaaatccaaggt

SEQ ID NO: 220213 - DNA, 15 bp, Homo sapiens
actacaaatccaagg

SEQ ID NO: 220214 - DNA, 15 bp, Homo sapiens
tactacaaatccaag

SEQ ID NO: 220215 - DNA, 15 bp, Homo sapiens
ttactacaaatccaa

SEQ ID NO: 220216 - DNA, 15 bp, Homo sapiens
attactacaaatcca

SEQ ID NO: 220217 - DNA, 15 bp, Homo sapiens
tattactacaaatcc

SEQ ID NO: 220218 - DNA, 15 bp, Homo sapiens
ctattactacaaatc

SEQ ID NO: 220219 - DNA, 15 bp, Homo sapiens
cctattactacaaat

SEQ ID NO: 220220 - DNA, 15 bp, Homo sapiens
acctattactacaaa

SEQ ID NO: 220221 - DNA, 15 bp, Homo sapiens
cacctattactacaa

SEQ ID NO: 220222 - DNA, 15 bp, Homo sapiens
gcacctattactaca

SEQ ID NO: 220223 - DNA, 15 bp, Homo sapiens
tgcacctattactac

SEQ ID NO: 220224 - DNA, 15 bp, Homo sapiens
atgcacctattacta

SEQ ID NO: 220225 - DNA, 15 bp, Homo sapiens
aatgcacctattact

SEQ ID NO: 220226 - DNA, 15 bp, Homo sapiens
gaatgcacctattac

SEQ ID NO: 220227 - DNA, 15 bp, Homo sapiens
tgaatgcacctatta

SEQ ID NO: 220228 - DNA, 15 bp, Homo sapiens
atgaatgcacctatt

SEQ ID NO: 220229 - DNA, 15 bp, Homo sapiens
aatgaatgcacctat

SEQ ID NO: 220230 - DNA, 15 bp, Homo sapiens
aaatgaatgcaccta

SEQ ID NO: 220231 - DNA, 15 bp, Homo sapiens
gaaatgaatgcacct

SEQ ID NO: 220232 - DNA, 15 bp, Homo sapiens
agaaatgaatgcacc

SEQ ID NO: 220233 - DNA, 15 bp, Homo sapiens
aagaaatgaatgcac

SEQ ID NO: 220234 - DNA, 15 bp, Homo sapiens
aaagaaatgaatgca

SEQ ID NO: 220235 - DNA, 15 bp, Homo sapiens
aaaagaaatgaatgc

SEQ ID NO: 220236 - DNA, 15 bp, Homo sapiens
taaaagaaatgaatg

SEQ ID NO: 220237 - DNA, 15 bp, Homo sapiens
gtaaaagaaatgaat

SEQ ID NO: 220238 - DNA, 15 bp, Homo sapiens
agtaaaagaaatgaa

SEQ ID NO: 220239 - DNA, 15 bp, Homo sapiens
gagtaaaagaaatga

SEQ ID NO: 220240 - DNA, 15 bp, Homo sapiens
ggagtaaaagaaatg

SEQ ID NO: 220241 - DNA, 15 bp, Homo sapiens
aggagtaaaagaaat

SEQ ID NO: 220242 - DNA, 15 bp, Homo sapiens
taggagtaaaagaaa

SEQ ID NO: 220243 - DNA, 15 bp, Homo sapiens
ttaggagtaaaagaa

SEQ ID NO: 220244 - DNA, 15 bp, Homo sapiens
tttaggagtaaaaga

SEQ ID NO: 220245 - DNA, 15 bp, Homo sapiens
gtttaggagtaaaag

SEQ ID NO: 220246 - DNA, 15 bp, Homo sapiens
tgtttaggagtaaaa

SEQ ID NO: 220247 - DNA, 15 bp, Homo sapiens
ctgtttaggagtaaa

SEQ ID NO: 220248 - DNA, 15 bp, Homo sapiens
cctgtttaggagtaa

SEQ ID NO: 220249 - DNA, 15 bp, Homo sapiens
acctgtttaggagta

SEQ ID NO: 220250 - DNA, 15 bp, Homo sapiens
tacctgtttaggagt

SEQ ID NO: 220251 - DNA, 15 bp, Homo sapiens
gtacctgtttaggag

SEQ ID NO: 220252 - DNA, 15 bp, Homo sapiens
tgtacctgtttagga

SEQ ID NO: 220253 - DNA, 15 bp, Homo sapiens
atgtacctgtttagg

SEQ ID NO: 220254 - DNA, 15 bp, Homo sapiens
gatgtacctgtttag

SEQ ID NO: 220255 - DNA, 15 bp, Homo sapiens
tgatgtacctgttta

SEQ ID NO: 220256 - DNA, 15 bp, Homo sapiens
gtgatgtacctgttt

SEQ ID NO: 220257 - DNA, 15 bp, Homo sapiens
agtgatgtacctgtt

SEQ ID NO: 220258 - DNA, 15 bp, Homo sapiens
aagtgatgtacctgt

SEQ ID NO: 220259 - DNA, 15 bp, Homo sapiens
taagtgatgtacctg

SEQ ID NO: 220260 - DNA, 15 bp, Homo sapiens
ctaagtgatgtacct

SEQ ID NO: 220261 - DNA, 15 bp, Homo sapiens
gctaagtgatgtacc

SEQ ID NO: 220262 - DNA, 15 bp, Homo sapiens
ggctaagtgatgtac

SEQ ID NO: 220263 - DNA, 15 bp, Homo sapiens
tggctaagtgatgta

SEQ ID NO: 220264 - DNA, 15 bp, Homo sapiens
atggctaagtgatgt

SEQ ID NO: 220265 - DNA, 15 bp, Homo sapiens
aatggctaagtgatg

SEQ ID NO: 220266 - DNA, 15 bp, Homo sapiens
taatggctaagtgat

SEQ ID NO: 220267 - DNA, 15 bp, Homo sapiens
ttaatggctaagtga

SEQ ID NO: 220268 - DNA, 15 bp, Homo sapiens
tttaatggctaagtg

SEQ ID NO: 220269 - DNA, 15 bp, Homo sapiens
ttttaatggctaagt

SEQ ID NO: 220270 - DNA, 15 bp, Homo sapiens
tttttaatggctaag

SEQ ID NO: 220271 - DNA, 15 bp, Homo sapiens
ctttttaatggctaa

SEQ ID NO: 220272 - DNA, 15 bp, Homo sapiens
actttttaatggcta

SEQ ID NO: 220273 - DNA, 15 bp, Homo sapiens
tactttttaatggct

SEQ ID NO: 220274 - DNA, 15 bp, Homo sapiens
ttactttttaatggc

SEQ ID NO: 220275 - DNA, 15 bp, Homo sapiens
attactttttaatgg

SEQ ID NO: 220276 - DNA, 15 bp, Homo sapiens
gattactttttaatg

SEQ ID NO: 220277 - DNA, 15 bp, Homo sapiens
agattactttttaat

SEQ ID NO: 220278 - DNA, 15 bp, Homo sapiens
cagattactttttaa

SEQ ID NO: 220279 - DNA, 15 bp, Homo sapiens
ccagattacttttta

SEQ ID NO: 220280 - DNA, 15 bp, Homo sapiens
accagattacttttt

SEQ ID NO: 220281 - DNA, 15 bp, Homo sapiens
caccagattactttt

SEQ ID NO: 220282 - DNA, 15 bp, Homo sapiens
ccaccagattacttt

SEQ ID NO: 220283 - DNA, 15 bp, Homo sapiens
gccaccagattactt

SEQ ID NO: 220284 - DNA, 15 bp, Homo sapiens
tgccaccagattact

SEQ ID NO: 220285 - DNA, 15 bp, Homo sapiens
atgccaccagattac

SEQ ID NO: 220286 - DNA, 15 bp, Homo sapiens
catgccaccagatta

SEQ ID NO: 220287 - DNA, 15 bp, Homo sapiens
acatgccaccagatt

SEQ ID NO: 220288 - DNA, 15 bp, Homo sapiens
aacatgccaccagat

SEQ ID NO: 220289 - DNA, 15 bp, Homo sapiens
aaacatgccaccaga

SEQ ID NO: 220290 - DNA, 15 bp, Homo sapiens
taaacatgccaccag

SEQ ID NO: 220291 - DNA, 15 bp, Homo sapiens
ataaacatgccacca

SEQ ID NO: 220292 - DNA, 15 bp, Homo sapiens
aataaacatgccacc

SEQ ID NO: 220293 - DNA, 15 bp, Homo sapiens
caataaacatgccac

SEQ ID NO: 220294 - DNA, 15 bp, Homo sapiens
gcaataaacatgcca

SEQ ID NO: 220295 - DNA, 15 bp, Homo sapiens
agcaataaacatgcc

SEQ ID NO: 220296 - DNA, 15 bp, Homo sapiens
gagcaataaacatgc

SEQ ID NO: 220297 - DNA, 15 bp, Homo sapiens
agagcaataaacatg

SEQ ID NO: 220298 - DNA, 15 bp, Homo sapiens
aagagcaataaacat

SEQ ID NO: 220299 - DNA, 15 bp, Homo sapiens
aaagagcaataaaca

SEQ ID NO: 220300 - DNA, 15 bp, Homo sapiens
gaaagagcaataaac

SEQ ID NO: 220301 - DNA, 15 bp, Homo sapiens
tgaaagagcaataaa

SEQ ID NO: 220302 - DNA, 15 bp, Homo sapiens
atgaaagagcaataa

SEQ ID NO: 220303 - DNA, 15 bp, Homo sapiens
aatgaaagagcaata

SEQ ID NO: 220304 - DNA, 15 bp, Homo sapiens
aaatgaaagagcaat

SEQ ID NO: 220305 - DNA, 15 bp, Homo sapiens
aaaatgaaagagcaa

SEQ ID NO: 220306 - DNA, 15 bp, Homo sapiens
gaaaatgaaagagca

SEQ ID NO: 220307 - DNA, 15 bp, Homo sapiens
tgaaaatgaaagagc

SEQ ID NO: 220308 - DNA, 15 bp, Homo sapiens
atgaaaatgaaagag

SEQ ID NO: 220309 - DNA, 15 bp, Homo sapiens
tatgaaaatgaaaga

SEQ ID NO: 220310 - DNA, 15 bp, Homo sapiens
atatgaaaatgaaag

SEQ ID NO: 220311 - DNA, 15 bp, Homo sapiens
aatatgaaaatgaaa

SEQ ID NO: 220312 - DNA, 15 bp, Homo sapiens
caatatgaaaatgaa

SEQ ID NO: 220313 - DNA, 15 bp, Homo sapiens
tcaatatgaaaatga

SEQ ID NO: 220314 - DNA, 15 bp, Homo sapiens
gtcaatatgaaaatg

SEQ ID NO: 220315 - DNA, 15 bp, Homo sapiens
agtcaatatgaaaat

SEQ ID NO: 220316 - DNA, 15 bp, Homo sapiens
gagtcaatatgaaaa

SEQ ID NO: 220317 - DNA, 15 bp, Homo sapiens
ggagtcaatatgaaa

SEQ ID NO: 220318 - DNA, 15 bp, Homo sapiens
aggagtcaatatgaa

SEQ ID NO: 220319 - DNA, 15 bp, Homo sapiens
caggagtcaatatga

SEQ ID NO: 220320 - DNA, 15 bp, Homo sapiens
ccaggagtcaatatg

SEQ ID NO: 220321 - DNA, 15 bp, Homo sapiens
tccaggagtcaatat

SEQ ID NO: 220322 - DNA, 15 bp, Homo sapiens
ttccaggagtcaata

SEQ ID NO: 220323 - DNA, 15 bp, Homo sapiens
attccaggagtcaat

SEQ ID NO: 220324 - DNA, 15 bp, Homo sapiens
aattccaggagtcaa

SEQ ID NO: 220325 - DNA, 15 bp, Homo sapiens
taattccaggagtca

SEQ ID NO: 220326 - DNA, 15 bp, Homo sapiens
ctaattccaggagtc

SEQ ID NO: 220327 - DNA, 15 bp, Homo sapiens
gctaattccaggagt

SEQ ID NO: 220328 - DNA, 15 bp, Homo sapiens
ggctaattccaggag

SEQ ID NO: 220329 - DNA, 15 bp, Homo sapiens
tggctaattccagga

SEQ ID NO: 220330 - DNA, 15 bp, Homo sapiens
ttggctaattccagg

SEQ ID NO: 220331 - DNA, 15 bp, Homo sapiens
cttggctaattccag

SEQ ID NO: 220332 - DNA, 15 bp, Homo sapiens
tcttggctaattcca

SEQ ID NO: 220333 - DNA, 15 bp, Homo sapiens
ttcttggctaattcc

SEQ ID NO: 220334 - DNA, 15 bp, Homo sapiens
tttcttggctaattc

SEQ ID NO: 220335 - DNA, 15 bp, Homo sapiens
ttttcttggctaatt

SEQ ID NO: 220336 - DNA, 15 bp, Homo sapiens
attttcttggctaat

SEQ ID NO: 220337 - DNA, 15 bp, Homo sapiens
cattttcttggctaa

SEQ ID NO: 220338 - DNA, 15 bp, Homo sapiens
tcattttcttggcta

SEQ ID NO: 220339 - DNA, 15 bp, Homo sapiens
gtcattttcttggct

SEQ ID NO: 220340 - DNA, 15 bp, Homo sapiens
ggtcattttcttggc

SEQ ID NO: 220341 - DNA, 15 bp, Homo sapiens
aggtcattttcttgg

SEQ ID NO: 220342 - DNA, 15 bp, Homo sapiens
aaggtcattttcttg

SEQ ID NO: 220343 - DNA, 15 bp, Homo sapiens
aaaggtcattttctt

SEQ ID NO: 220344 - DNA, 15 bp, Homo sapiens
aaaaggtcattttct

SEQ ID NO: 220345 - DNA, 15 bp, Homo sapiens
gaaaaggtcattttc

SEQ ID NO: 220346 - DNA, 15 bp, Homo sapiens
agaaaaggtcatttt

SEQ ID NO: 220347 - DNA, 15 bp, Homo sapiens
gagaaaaggtcattt

SEQ ID NO: 220348 - DNA, 15 bp, Homo sapiens
agagaaaaggtcatt

SEQ ID NO: 220349 - DNA, 15 bp, Homo sapiens
tagagaaaaggtcat

SEQ ID NO: 220350 - DNA, 15 bp, Homo sapiens
ctagagaaaaggtca

SEQ ID NO: 220351 - DNA, 15 bp, Homo sapiens
cctagagaaaaggtc

SEQ ID NO: 220352 - DNA, 15 bp, Homo sapiens
tcctagagaaaaggt

SEQ ID NO: 220353 - DNA, 15 bp, Homo sapiens
ttcctagagaaaagg

SEQ ID NO: 220354 - DNA, 15 bp, Homo sapiens
attcctagagaaaag

SEQ ID NO: 220355 - DNA, 15 bp, Homo sapiens
aattcctagagaaaa

SEQ ID NO: 220356 - DNA, 15 bp, Homo sapiens
taattcctagagaaa

SEQ ID NO: 220357 - DNA, 15 bp, Homo sapiens
ataattcctagagaa

SEQ ID NO: 220358 - DNA, 15 bp, Homo sapiens
aataattcctagaga

SEQ ID NO: 220359 - DNA, 15 bp, Homo sapiens
caataattcctagag

SEQ ID NO: 220360 - DNA, 15 bp, Homo sapiens
gcaataattcctaga

SEQ ID NO: 220361 - DNA, 15 bp, Homo sapiens
ggcaataattcctag

SEQ ID NO: 220362 - DNA, 15 bp, Homo sapiens
gggcaataattccta

SEQ ID NO: 220363 - DNA, 15 bp, Homo sapiens
agggcaataattcct

SEQ ID NO: 220364 - DNA, 15 bp, Homo sapiens
cagggcaataattcc

SEQ ID NO: 220365 - DNA, 15 bp, Homo sapiens
tcagggcaataattc

SEQ ID NO: 220366 - DNA, 15 bp, Homo sapiens
atcagggcaataatt

SEQ ID NO: 220367 - DNA, 15 bp, Homo sapiens
gatcagggcaataat

SEQ ID NO: 220368 - DNA, 15 bp, Homo sapiens
ggatcagggcaataa

SEQ ID NO: 220369 - DNA, 15 bp, Homo sapiens
tggatcagggcaata

SEQ ID NO: 220370 - DNA, 15 bp, Homo sapiens
atggatcagggcaat

SEQ ID NO: 220371 - DNA, 15 bp, Homo sapiens
aatggatcagggcaa

SEQ ID NO: 220372 - DNA, 15 bp, Homo sapiens
caatggatcagggca

SEQ ID NO: 220373 - DNA, 15 bp, Homo sapiens
gcaatggatcagggc

SEQ ID NO: 220374 - DNA, 15 bp, Homo sapiens
agcaatggatcaggg

SEQ ID NO: 220375 - DNA, 15 bp, Homo sapiens
cagcaatggatcagg

SEQ ID NO: 220376 - DNA, 15 bp, Homo sapiens
ccagcaatggatcag

SEQ ID NO: 220377 - DNA, 15 bp, Homo sapiens
gccagcaatggatca

SEQ ID NO: 220378 - DNA, 15 bp, Homo sapiens
agccagcaatggatc

SEQ ID NO: 220379 - DNA, 15 bp, Homo sapiens
gagccagcaatggat

SEQ ID NO: 220380 - DNA, 15 bp, Homo sapiens
tgagccagcaatgga

SEQ ID NO: 220381 - DNA, 15 bp, Homo sapiens
gtgagccagcaatgg

SEQ ID NO: 220382 - DNA, 15 bp, Homo sapiens
ggtgagccagcaatg

SEQ ID NO: 220383 - DNA, 15 bp, Homo sapiens
gggtgagccagcaat

SEQ ID NO: 220384 - DNA, 15 bp, Homo sapiens
agggtgagccagcaa

SEQ ID NO: 220385 - DNA, 15 bp, Homo sapiens
cagggtgagccagca

SEQ ID NO: 220386 - DNA, 15 bp, Homo sapiens
acagggtgagccagc

SEQ ID NO: 220387 - DNA, 15 bp, Homo sapiens
gacagggtgagccag

SEQ ID NO: 220388 - DNA, 15 bp, Homo sapiens
ggacagggtgagcca

SEQ ID NO: 220389 - DNA, 15 bp, Homo sapiens
tggacagggtgagcc

SEQ ID NO: 220390 - DNA, 15 bp, Homo sapiens
ttggacagggtgagc

SEQ ID NO: 220391 - DNA, 15 bp, Homo sapiens
tttggacagggtgag

SEQ ID NO: 220392 - DNA, 15 bp, Homo sapiens
ttttggacagggtga

SEQ ID NO: 220393 - DNA, 15 bp, Homo sapiens
tttttggacagggtg

SEQ ID NO: 220394 - DNA, 15 bp, Homo sapiens
atttttggacagggt

SEQ ID NO: 220395 - DNA, 15 bp, Homo sapiens
tatttttggacaggg

SEQ ID NO: 220396 - DNA, 15 bp, Homo sapiens
atatttttggacagg

SEQ ID NO: 220397 - DNA, 15 bp, Homo sapiens
tatatttttggacag

SEQ ID NO: 220398 - DNA, 15 bp, Homo sapiens
ctatatttttggaca

SEQ ID NO: 220399 - DNA, 15 bp, Homo sapiens
tctatatttttggac

SEQ ID NO: 220400 - DNA, 15 bp, Homo sapiens
gtctatatttttgga

SEQ ID NO: 220401 - DNA, 15 bp, Homo sapiens
ggtctatatttttgg

SEQ ID NO: 220402 - DNA, 15 bp, Homo sapiens
tggtctatatttttg

SEQ ID NO: 220403 - DNA, 15 bp, Homo sapiens
atggtctatattttt

SEQ ID NO: 220404 - DNA, 15 bp, Homo sapiens
aatggtctatatttt

SEQ ID NO: 220405 - DNA, 15 bp, Homo sapiens
gaatggtctatattt

SEQ ID NO: 220406 - DNA, 15 bp, Homo sapiens
agaatggtctatatt

SEQ ID NO: 220407 - DNA, 15 bp, Homo sapiens
gagaatggtctatat

SEQ ID NO: 220408 - DNA, 15 bp, Homo sapiens
ggagaatggtctata

SEQ ID NO: 220409 - DNA, 15 bp, Homo sapiens
tggagaatggtctat

SEQ ID NO: 220410 - DNA, 15 bp, Homo sapiens
ttggagaatggtcta

SEQ ID NO: 220411 - DNA, 15 bp, Homo sapiens
tttggagaatggtct

SEQ ID NO: 220412 - DNA, 15 bp, Homo sapiens
atttggagaatggtc

SEQ ID NO: 220413 - DNA, 15 bp, Homo sapiens
aatttggagaatggt

SEQ ID NO: 220414 - DNA, 15 bp, Homo sapiens
caatttggagaatgg

SEQ ID NO: 220415 - DNA, 15 bp, Homo sapiens
tcaatttggagaatg

SEQ ID NO: 220416 - DNA, 15 bp, Homo sapiens
ttcaatttggagaat

SEQ ID NO: 220417 - DNA, 15 bp, Homo sapiens
tttcaatttggagaa

SEQ ID NO: 220418 - DNA, 15 bp, Homo sapiens
atttcaatttggaga

SEQ ID NO: 220419 - DNA, 15 bp, Homo sapiens
tatttcaatttggag

SEQ ID NO: 220420 - DNA, 15 bp, Homo sapiens
atatttcaatttgga

SEQ ID NO: 220421 - DNA, 15 bp, Homo sapiens
tatatttcaatttgg

SEQ ID NO: 220422 - DNA, 15 bp, Homo sapiens
gtatatttcaatttg

SEQ ID NO: 220423 - DNA, 15 bp, Homo sapiens
tgtatatttcaattt

SEQ ID NO: 220424 - DNA, 15 bp, Homo sapiens
atgtatatttcaatt

SEQ ID NO: 220425 - DNA, 15 bp, Homo sapiens
aatgtatatttcaat

SEQ ID NO: 220426 - DNA, 15 bp, Homo sapiens
taatgtatatttcaa

SEQ ID NO: 220427 - DNA, 15 bp, Homo sapiens
ttaatgtatatttca

SEQ ID NO: 220428 - DNA, 15 bp, Homo sapiens
attaatgtatatttc

SEQ ID NO: 220429 - DNA, 15 bp, Homo sapiens
gattaatgtatattt

SEQ ID NO: 220430 - DNA, 15 bp, Homo sapiens
tgattaatgtatatt

SEQ ID NO: 220431 - DNA, 15 bp, Homo sapiens
gtgattaatgtatat

SEQ ID NO: 220432 - DNA, 15 bp, Homo sapiens
ggtgattaatgtata

SEQ ID NO: 220433 - DNA, 15 bp, Homo sapiens
aggtgattaatgtat

SEQ ID NO: 220434 - DNA, 15 bp, Homo sapiens
gaggtgattaatgta

SEQ ID NO: 220435 - DNA, 15 bp, Homo sapiens
tgaggtgattaatgt

SEQ ID NO: 220436 - DNA, 15 bp, Homo sapiens
ctgaggtgattaatg

SEQ ID NO: 220437 - DNA, 15 bp, Homo sapiens
cctgaggtgattaat

SEQ ID NO: 220438 - DNA, 15 bp, Homo sapiens
tcctgaggtgattaa

SEQ ID NO: 220439 - DNA, 15 bp, Homo sapiens
ttcctgaggtgatta

SEQ ID NO: 220440 - DNA, 15 bp, Homo sapiens
tttcctgaggtgatt

SEQ ID NO: 220441 - DNA, 15 bp, Homo sapiens
atttcctgaggtgat

SEQ ID NO: 220442 - DNA, 15 bp, Homo sapiens
aatttcctgaggtga

SEQ ID NO: 220443 - DNA, 15 bp, Homo sapiens
caatttcctgaggtg

SEQ ID NO: 220444 - DNA, 15 bp, Homo sapiens
gcaatttcctgaggt

SEQ ID NO: 220445 - DNA, 15 bp, Homo sapiens
agcaatttcctgagg

SEQ ID NO: 220446 - DNA, 15 bp, Homo sapiens
aagcaatttcctgag

SEQ ID NO: 220447 - DNA, 15 bp, Homo sapiens
gaagcaatttcctga

SEQ ID NO: 220448 - DNA, 15 bp, Homo sapiens
ggaagcaatttcctg

SEQ ID NO: 220449 - DNA, 15 bp, Homo sapiens
gggaagcaatttcct

SEQ ID NO: 220450 - DNA, 15 bp, Homo sapiens
ggggaagcaatttcc

SEQ ID NO: 220451 - DNA, 15 bp, Homo sapiens
gggggaagcaatttc

SEQ ID NO: 220452 - DNA, 15 bp, Homo sapiens
tgggggaagcaattt

SEQ ID NO: 220453 - DNA, 15 bp, Homo sapiens
atgggggaagcaatt

SEQ ID NO: 220454 - DNA, 15 bp, Homo sapiens
aatgggggaagcaat

SEQ ID NO: 220455 - DNA, 15 bp, Homo sapiens
caatgggggaagcaa

SEQ ID NO: 220456 - DNA, 15 bp, Homo sapiens
ccaatgggggaagca

SEQ ID NO: 220457 - DNA, 15 bp, Homo sapiens
tccaatgggggaagc

SEQ ID NO: 220458 - DNA, 15 bp, Homo sapiens
ttccaatgggggaag

SEQ ID NO: 220459 - DNA, 15 bp, Homo sapiens
tttccaatgggggaa

SEQ ID NO: 220460 - DNA, 15 bp, Homo sapiens
gtttccaatggggga

SEQ ID NO: 220461 - DNA, 15 bp, Homo sapiens
agtttccaatggggg

SEQ ID NO: 220462 - DNA, 15 bp, Homo sapiens
cagtttccaatgggg

SEQ ID NO: 220463 - DNA, 15 bp, Homo sapiens
tcagtttccaatggg

SEQ ID NO: 220464 - DNA, 15 bp, Homo sapiens
atcagtttccaatgg

SEQ ID NO: 220465 - DNA, 15 bp, Homo sapiens
tatcagtttccaatg

SEQ ID NO: 220466 - DNA, 15 bp, Homo sapiens
ctatcagtttccaat

SEQ ID NO: 220467 - DNA, 15 bp, Homo sapiens
gctatcagtttccaa

SEQ ID NO: 220468 - DNA, 15 bp, Homo sapiens
agctatcagtttcca

SEQ ID NO: 220469 - DNA, 15 bp, Homo sapiens
gagctatcagtttcc

SEQ ID NO: 220470 - DNA, 15 bp, Homo sapiens
agagctatcagtttc

SEQ ID NO: 220471 - DNA, 15 bp, Homo sapiens
gagagctatcagttt

SEQ ID NO: 220472 - DNA, 15 bp, Homo sapiens
tgagagctatcagtt

SEQ ID NO: 220473 - DNA, 15 bp, Homo sapiens
atgagagctatcagt

SEQ ID NO: 220474 - DNA, 15 bp, Homo sapiens
aatgagagctatcag

SEQ ID NO: 220475 - DNA, 15 bp, Homo sapiens
caatgagagctatca

SEQ ID NO: 220476 - DNA, 15 bp, Homo sapiens
ccaatgagagctatc

SEQ ID NO: 220477 - DNA, 15 bp, Homo sapiens
tccaatgagagctat

SEQ ID NO: 220478 - DNA, 15 bp, Homo sapiens
ttccaatgagagcta

SEQ ID NO: 220479 - DNA, 15 bp, Homo sapiens
attccaatgagagct

SEQ ID NO: 220480 - DNA, 15 bp, Homo sapiens
cattccaatgagagc

SEQ ID NO: 220481 - DNA, 15 bp, Homo sapiens
acattccaatgagag

SEQ ID NO: 220482 - DNA, 15 bp, Homo sapiens
aacattccaatgaga

SEQ ID NO: 220483 - DNA, 15 bp, Homo sapiens
aaacattccaatgag

SEQ ID NO: 220484 - DNA, 15 bp, Homo sapiens
gaaacattccaatga

SEQ ID NO: 220485 - DNA, 15 bp, Homo sapiens
ggaaacattccaatg

SEQ ID NO: 220486 - DNA, 15 bp, Homo sapiens
tggaaacattccaat

SEQ ID NO: 220487 - DNA, 15 bp, Homo sapiens
ttggaaacattccaa

SEQ ID NO: 220488 - DNA, 15 bp, Homo sapiens
tttggaaacattcca

SEQ ID NO: 220489 - DNA, 15 bp, Homo sapiens
ctttggaaacattcc

SEQ ID NO: 220490 - DNA, 15 bp, Homo sapiens
gctttggaaacattc

SEQ ID NO: 220491 - DNA, 15 bp, Homo sapiens
tgctttggaaacatt

SEQ ID NO: 220492 - DNA, 15 bp, Homo sapiens
gtgctttggaaacat

SEQ ID NO: 220493 - DNA, 15 bp, Homo sapiens
tgtgctttggaaaca

SEQ ID NO: 220494 - DNA, 15 bp, Homo sapiens
ctgtgctttggaaac

SEQ ID NO: 220495 - DNA, 15 bp, Homo sapiens
gctgtgctttggaaa

SEQ ID NO: 220496 - DNA, 15 bp, Homo sapiens
agctgtgctttggaa

SEQ ID NO: 220497 - DNA, 15 bp, Homo sapiens
cagctgtgctttgga

SEQ ID NO: 220498 - DNA, 15 bp, Homo sapiens
tcagctgtgctttgg

SEQ ID NO: 220499 - DNA, 15 bp, Homo sapiens
atcagctgtgctttg

SEQ ID NO: 220500 - DNA, 15 bp, Homo sapiens
catcagctgtgcttt

SEQ ID NO: 220501 - DNA, 15 bp, Homo sapiens
tcatcagctgtgctt

SEQ ID NO: 220502 - DNA, 15 bp, Homo sapiens
gtcatcagctgtgct

SEQ ID NO: 220503 - DNA, 15 bp, Homo sapiens
tgtcatcagctgtgc

SEQ ID NO: 220504 - DNA, 15 bp, Homo sapiens
ttgtcatcagctgtg

SEQ ID NO: 220505 - DNA, 15 bp, Homo sapiens
attgtcatcagctgt

SEQ ID NO: 220506 - DNA, 15 bp, Homo sapiens
aattgtcatcagctg

SEQ ID NO: 220507 - DNA, 15 bp, Homo sapiens
taattgtcatcagct

SEQ ID NO: 220508 - DNA, 15 bp, Homo sapiens
gtaattgtcatcagc

SEQ ID NO: 220509 - DNA, 15 bp, Homo sapiens
cgtaattgtcatcag

SEQ ID NO: 220510 - DNA, 15 bp, Homo sapiens
tcgtaattgtcatca

SEQ ID NO: 220511 - DNA, 15 bp, Homo sapiens
gtcgtaattgtcatc

SEQ ID NO: 220512 - DNA, 15 bp, Homo sapiens
agtcgtaattgtcat

SEQ ID NO: 220513 - DNA, 15 bp, Homo sapiens
gagtcgtaattgtca

SEQ ID NO: 220514 - DNA, 15 bp, Homo sapiens
tgagtcgtaattgtc

SEQ ID NO: 220515 - DNA, 15 bp, Homo sapiens
gtgagtcgtaattgt

SEQ ID NO: 220516 - DNA, 15 bp, Homo sapiens
agtgagtcgtaattg

SEQ ID NO: 220517 - DNA, 15 bp, Homo sapiens
cagtgagtcgtaatt

SEQ ID NO: 220518 - DNA, 15 bp, Homo sapiens
tcagtgagtcgtaat

SEQ ID NO: 220519 - DNA, 15 bp, Homo sapiens
ttcagtgagtcgtaa

SEQ ID NO: 220520 - DNA, 15 bp, Homo sapiens
tttcagtgagtcgta

SEQ ID NO: 220521 - DNA, 15 bp, Homo sapiens
atttcagtgagtcgt

SEQ ID NO: 220522 - DNA, 15 bp, Homo sapiens
aatttcagtgagtcg

SEQ ID NO: 220523 - DNA, 15 bp, Homo sapiens
aaatttcagtgagtc

SEQ ID NO: 220524 - DNA, 15 bp, Homo sapiens
gaaatttcagtgagt

SEQ ID NO: 220525 - DNA, 15 bp, Homo sapiens
tgaaatttcagtgag

SEQ ID NO: 220526 - DNA, 15 bp, Homo sapiens
ctgaaatttcagtga

SEQ ID NO: 220527 - DNA, 15 bp, Homo sapiens
actgaaatttcagtg

SEQ ID NO: 220528 - DNA, 15 bp, Homo sapiens
aactgaaatttcagt

SEQ ID NO: 220529 - DNA, 15 bp, Homo sapiens
aaactgaaatttcag

SEQ ID NO: 220530 - DNA, 15 bp, Homo sapiens
aaaactgaaatttca

SEQ ID NO: 220531 - DNA, 15 bp, Homo sapiens
gaaaactgaaatttc

SEQ ID NO: 220532 - DNA, 15 bp, Homo sapiens
agaaaactgaaattt

SEQ ID NO: 220533 - DNA, 15 bp, Homo sapiens
aagaaaactgaaatt

SEQ ID NO: 220534 - DNA, 15 bp, Homo sapiens
aaagaaaactgaaat

SEQ ID NO: 220535 - DNA, 15 bp, Homo sapiens
caaagaaaactgaaa

SEQ ID NO: 220536 - DNA, 15 bp, Homo sapiens
tcaaagaaaactgaa

SEQ ID NO: 220537 - DNA, 15 bp, Homo sapiens
atcaaagaaaactga

SEQ ID NO: 220538 - DNA, 15 bp, Homo sapiens
aatcaaagaaaactg

SEQ ID NO: 220539 - DNA, 15 bp, Homo sapiens
caatcaaagaaaact

SEQ ID NO: 220540 - DNA, 15 bp, Homo sapiens
acaatcaaagaaaac

SEQ ID NO: 220541 - DNA, 15 bp, Homo sapiens
cacaatcaaagaaaa

SEQ ID NO: 220542 - DNA, 15 bp, Homo sapiens
tcacaatcaaagaaa

SEQ ID NO: 220543 - DNA, 15 bp, Homo sapiens
gtcacaatcaaagaa

SEQ ID NO: 220544 - DNA, 15 bp, Homo sapiens
tgtcacaatcaaaga

SEQ ID NO: 220545 - DNA, 15 bp, Homo sapiens
atgtcacaatcaaag

SEQ ID NO: 220546 - DNA, 15 bp, Homo sapiens
tatgtcacaatcaaa

SEQ ID NO: 220547 - DNA, 15 bp, Homo sapiens
ttatgtcacaatcaa

SEQ ID NO: 220548 - DNA, 15 bp, Homo sapiens
tttatgtcacaatca

SEQ ID NO: 220549 - DNA, 15 bp, Homo sapiens
ttttatgtcacaatc

SEQ ID NO: 220550 - DNA, 15 bp, Homo sapiens
tttttatgtcacaat

SEQ ID NO: 220551 - DNA, 15 bp, Homo sapiens
gtttttatgtcacaa

SEQ ID NO: 220552 - DNA, 15 bp, Homo sapiens
agtttttatgtcaca

SEQ ID NO: 220553 - DNA, 15 bp, Homo sapiens
tagtttttatgtcac

SEQ ID NO: 220554 - DNA, 15 bp, Homo sapiens
ctagtttttatgtca

SEQ ID NO: 220555 - DNA, 15 bp, Homo sapiens
cctagtttttatgtc

SEQ ID NO: 220556 - DNA, 15 bp, Homo sapiens
tcctagtttttatgt

SEQ ID NO: 220557 - DNA, 15 bp, Homo sapiens
gtcctagtttttatg

SEQ ID NO: 220558 - DNA, 15 bp, Homo sapiens
tgtcctagtttttat

SEQ ID NO: 220559 - DNA, 15 bp, Homo sapiens
atgtcctagttttta

SEQ ID NO: 220560 - DNA, 15 bp, Homo sapiens
tatgtcctagttttt

SEQ ID NO: 220561 - DNA, 15 bp, Homo sapiens
ttatgtcctagtttt

SEQ ID NO: 220562 - DNA, 15 bp, Homo sapiens
tttatgtcctagttt

SEQ ID NO: 220563 - DNA, 15 bp, Homo sapiens
atttatgtcctagtt

SEQ ID NO: 220564 - DNA, 15 bp, Homo sapiens
aatttatgtcctagt

SEQ ID NO: 220565 - DNA, 15 bp, Homo sapiens
taatttatgtcctag

SEQ ID NO: 220566 - DNA, 15 bp, Homo sapiens
ttaatttatgtccta

SEQ ID NO: 220567 - DNA, 15 bp, Homo sapiens
tttaatttatgtcct

SEQ ID NO: 220568 - DNA, 15 bp, Homo sapiens
ttttaatttatgtcc

SEQ ID NO: 220569 - DNA, 15 bp, Homo sapiens
gttttaatttatgtc

SEQ ID NO: 220570 - DNA, 15 bp, Homo sapiens
ggttttaatttatgt

SEQ ID NO: 220571 - DNA, 15 bp, Homo sapiens
aggttttaatttatg

SEQ ID NO: 220572 - DNA, 15 bp, Homo sapiens
taggttttaatttat

SEQ ID NO: 220573 - DNA, 15 bp, Homo sapiens
ttaggttttaattta

SEQ ID NO: 220574 - DNA, 15 bp, Homo sapiens
attaggttttaattt

SEQ ID NO: 220575 - DNA, 15 bp, Homo sapiens
aattaggttttaatt

SEQ ID NO: 220576 - DNA, 15 bp, Homo sapiens
taattaggttttaat

SEQ ID NO: 220577 - DNA, 15 bp, Homo sapiens
ataattaggttttaa

SEQ ID NO: 220578 - DNA, 15 bp, Homo sapiens
gataattaggtttta

SEQ ID NO: 220579 - DNA, 15 bp, Homo sapiens
ggataattaggtttt

SEQ ID NO: 220580 - DNA, 15 bp, Homo sapiens
aggataattaggttt

SEQ ID NO: 220581 - DNA, 15 bp, Homo sapiens
aaggataattaggtt

SEQ ID NO: 220582 - DNA, 15 bp, Homo sapiens
aaaggataattaggt

SEQ ID NO: 220583 - DNA, 15 bp, Homo sapiens
taaaggataattagg

SEQ ID NO: 220584 - DNA, 15 bp, Homo sapiens
ttaaaggataattag

SEQ ID NO: 220585 - DNA, 15 bp, Homo sapiens
cttaaaggataatta

SEQ ID NO: 220586 - DNA, 15 bp, Homo sapiens
ccttaaaggataatt

SEQ ID NO: 220587 - DNA, 15 bp, Homo sapiens
cccttaaaggataat

SEQ ID NO: 220588 - DNA, 15 bp, Homo sapiens
acccttaaaggataa

SEQ ID NO: 220589 - DNA, 15 bp, Homo sapiens
tacccttaaaggata

SEQ ID NO: 220590 - DNA, 15 bp, Homo sapiens
ttacccttaaaggat

SEQ ID NO: 220591 - DNA, 15 bp, Homo sapiens
attacccttaaagga

SEQ ID NO: 220592 - DNA, 15 bp, Homo sapiens
aattacccttaaagg

SEQ ID NO: 220593 - DNA, 15 bp, Homo sapiens
caattacccttaaag

SEQ ID NO: 220594 - DNA, 15 bp, Homo sapiens
ccaattacccttaaa

SEQ ID NO: 220595 - DNA, 15 bp, Homo sapiens
cccaattacccttaa

SEQ ID NO: 220596 - DNA, 15 bp, Homo sapiens
ccccaattaccctta

SEQ ID NO: 220597 - DNA, 15 bp, Homo sapiens
accccaattaccctt

SEQ ID NO: 220598 - DNA, 15 bp, Homo sapiens
aaccccaattaccct

SEQ ID NO: 220599 - DNA, 15 bp, Homo sapiens
taaccccaattaccc

SEQ ID NO: 220600 - DNA, 15 bp, Homo sapiens
gtaaccccaattacc

SEQ ID NO: 220601 - DNA, 15 bp, Homo sapiens
tgtaaccccaattac

SEQ ID NO: 220602 - DNA, 15 bp, Homo sapiens
ttgtaaccccaatta

SEQ ID NO: 220603 - DNA, 15 bp, Homo sapiens
tttgtaaccccaatt

SEQ ID NO: 220604 - DNA, 15 bp, Homo sapiens
ttttgtaaccccaat

SEQ ID NO: 220605 - DNA, 15 bp, Homo sapiens
gttttgtaaccccaa

SEQ ID NO: 220606 - DNA, 15 bp, Homo sapiens
ggttttgtaacccca

SEQ ID NO: 220607 - DNA, 15 bp, Homo sapiens
cggttttgtaacccc

SEQ ID NO: 220608 - DNA, 15 bp, Homo sapiens
tcggttttgtaaccc

SEQ ID NO: 220609 - DNA, 15 bp, Homo sapiens
ctcggttttgtaacc

SEQ ID NO: 220610 - DNA, 15 bp, Homo sapiens
tctcggttttgtaac

SEQ ID NO: 220611 - DNA, 15 bp, Homo sapiens
ctctcggttttgtaa

SEQ ID NO: 220612 - DNA, 15 bp, Homo sapiens
tctctcggttttgta

SEQ ID NO: 220613 - DNA, 15 bp, Homo sapiens
gtctctcggttttgt

SEQ ID NO: 220614 - DNA, 15 bp, Homo sapiens
agtctctcggttttg

SEQ ID NO: 220615 - DNA, 15 bp, Homo sapiens
cagtctctcggtttt

SEQ ID NO: 220616 - DNA, 15 bp, Homo sapiens
acagtctctcggttt

SEQ ID NO: 220617 - DNA, 15 bp, Homo sapiens
cacagtctctcggtt

SEQ ID NO: 220618 - DNA, 15 bp, Homo sapiens
tcacagtctctcggt

SEQ ID NO: 220619 - DNA, 15 bp, Homo sapiens
ctcacagtctctcgg

SEQ ID NO: 220620 - DNA, 15 bp, Homo sapiens
actcacagtctctcg

SEQ ID NO: 220621 - DNA, 15 bp, Homo sapiens
gactcacagtctctc

SEQ ID NO: 220622 - DNA, 15 bp, Homo sapiens
tgactcacagtctct

SEQ ID NO: 220623 - DNA, 15 bp, Homo sapiens
ctgactcacagtctc

SEQ ID NO: 220624 - DNA, 15 bp, Homo sapiens
actgactcacagtct

SEQ ID NO: 220625 - DNA, 15 bp, Homo sapiens
cactgactcacagtc

SEQ ID NO: 220626 - DNA, 15 bp, Homo sapiens
acactgactcacagt

SEQ ID NO: 220627 - DNA, 15 bp, Homo sapiens
cacactgactcacag

SEQ ID NO: 220628 - DNA, 15 bp, Homo sapiens
acacactgactcaca

SEQ ID NO: 220629 - DNA, 15 bp, Homo sapiens
gacacactgactcac

SEQ ID NO: 220630 - DNA, 15 bp, Homo sapiens
tgacacactgactca

SEQ ID NO: 220631 - DNA, 15 bp, Homo sapiens
ttgacacactgactc

SEQ ID NO: 220632 - DNA, 15 bp, Homo sapiens
attgacacactgact

SEQ ID NO: 220633 - DNA, 15 bp, Homo sapiens
tattgacacactgac

SEQ ID NO: 220634 - DNA, 15 bp, Homo sapiens
atattgacacactga

SEQ ID NO: 220635 - DNA, 15 bp, Homo sapiens
gatattgacacactg

SEQ ID NO: 220636 - DNA, 15 bp, Homo sapiens
cgatattgacacact

SEQ ID NO: 220637 - DNA, 15 bp, Homo sapiens
gcgatattgacacac

SEQ ID NO: 220638 - DNA, 15 bp, Homo sapiens
agcgatattgacaca

SEQ ID NO: 220639 - DNA, 15 bp, Homo sapiens
cagcgatattgacac

SEQ ID NO: 220640 - DNA, 15 bp, Homo sapiens
ccagcgatattgaca

SEQ ID NO: 220641 - DNA, 15 bp, Homo sapiens
tccagcgatattgac

SEQ ID NO: 220642 - DNA, 15 bp, Homo sapiens
ctccagcgatattga

SEQ ID NO: 220643 - DNA, 15 bp, Homo sapiens
actccagcgatattg

SEQ ID NO: 220644 - DNA, 15 bp, Homo sapiens
tactccagcgatatt

SEQ ID NO: 220645 - DNA, 15 bp, Homo sapiens
gtactccagcgatat

SEQ ID NO: 220646 - DNA, 15 bp, Homo sapiens
tgtactccagcgata

SEQ ID NO: 220647 - DNA, 15 bp, Homo sapiens
ctgtactccagcgat

SEQ ID NO: 220648 - DNA, 15 bp, Homo sapiens
gctgtactccagcga

SEQ ID NO: 220649 - DNA, 15 bp, Homo sapiens
tgctgtactccagcg

SEQ ID NO: 220650 - DNA, 15 bp, Homo sapiens
atgctgtactccagc

SEQ ID NO: 220651 - DNA, 15 bp, Homo sapiens
gatgctgtactccag

SEQ ID NO: 220652 - DNA, 15 bp, Homo sapiens
agatgctgtactcca

SEQ ID NO: 220653 - DNA, 15 bp, Homo sapiens
cagatgctgtactcc

SEQ ID NO: 220654 - DNA, 15 bp, Homo sapiens
acagatgctgtactc

SEQ ID NO: 220655 - DNA, 15 bp, Homo sapiens
gacagatgctgtact

SEQ ID NO: 220656 - DNA, 15 bp, Homo sapiens
ggacagatgctgtac

SEQ ID NO: 220657 - DNA, 15 bp, Homo sapiens
gggacagatgctgta

SEQ ID NO: 220658 - DNA, 15 bp, Homo sapiens
ggggacagatgctgt

SEQ ID NO: 220659 - DNA, 15 bp, Homo sapiens
tggggacagatgctg

SEQ ID NO: 220660 - DNA, 15 bp, Homo sapiens
ttggggacagatgct

SEQ ID NO: 220661 - DNA, 15 bp, Homo sapiens
tttggggacagatgc

SEQ ID NO: 220662 - DNA, 15 bp, Homo sapiens
ttttggggacagatg

SEQ ID NO: 220663 - DNA, 15 bp, Homo sapiens
gttttggggacagat

SEQ ID NO: 220664 - DNA, 15 bp, Homo sapiens
tgttttggggacaga

SEQ ID NO: 220665 - DNA, 15 bp, Homo sapiens
ctgttttggggacag

SEQ ID NO: 220666 - DNA, 15 bp, Homo sapiens
gctgttttggggaca

SEQ ID NO: 220667 - DNA, 15 bp, Homo sapiens
ggctgttttggggac

SEQ ID NO: 220668 - DNA, 15 bp, Homo sapiens
aggctgttttgggga

SEQ ID NO: 220669 - DNA, 15 bp, Homo sapiens
aaggctgttttgggg

SEQ ID NO: 220670 - DNA, 15 bp, Homo sapiens
aaaggctgttttggg

SEQ ID NO: 220671 - DNA, 15 bp, Homo sapiens
gaaaggctgttttgg

SEQ ID NO: 220672 - DNA, 15 bp, Homo sapiens
tgaaaggctgttttg

SEQ ID NO: 220673 - DNA, 15 bp, Homo sapiens
atgaaaggctgtttt

SEQ ID NO: 220674 - DNA, 15 bp, Homo sapiens
tatgaaaggctgttt

SEQ ID NO: 220675 - DNA, 15 bp, Homo sapiens
atatgaaaggctgtt

SEQ ID NO: 220676 - DNA, 15 bp, Homo sapiens
catatgaaaggctgt

SEQ ID NO: 220677 - DNA, 15 bp, Homo sapiens
tcatatgaaaggctg

SEQ ID NO: 220678 - DNA, 15 bp, Homo sapiens
ttcatatgaaaggct

SEQ ID NO: 220679 - DNA, 15 bp, Homo sapiens
tttcatatgaaaggc

SEQ ID NO: 220680 - DNA, 15 bp, Homo sapiens
atttcatatgaaagg

SEQ ID NO: 220681 - DNA, 15 bp, Homo sapiens
catttcatatgaaag

SEQ ID NO: 220682 - DNA, 15 bp, Homo sapiens
gcatttcatatgaaa

SEQ ID NO: 220683 - DNA, 15 bp, Homo sapiens
agcatttcatatgaa

SEQ ID NO: 220684 - DNA, 15 bp, Homo sapiens
aagcatttcatatga

SEQ ID NO: 220685 - DNA, 15 bp, Homo sapiens
caagcatttcatatg

SEQ ID NO: 220686 - DNA, 15 bp, Homo sapiens
acaagcatttcatat

SEQ ID NO: 220687 - DNA, 15 bp, Homo sapiens
cacaagcatttcata

SEQ ID NO: 220688 - DNA, 15 bp, Homo sapiens
ccacaagcatttcat

SEQ ID NO: 220689 - DNA, 15 bp, Homo sapiens
tccacaagcatttca

SEQ ID NO: 220690 - DNA, 15 bp, Homo sapiens
atccacaagcatttc

SEQ ID NO: 220691 - DNA, 15 bp, Homo sapiens
tatccacaagcattt

SEQ ID NO: 220692 - DNA, 15 bp, Homo sapiens
ttatccacaagcatt

SEQ ID NO: 220693 - DNA, 15 bp, Homo sapiens
cttatccacaagcat

SEQ ID NO: 220694 - DNA, 15 bp, Homo sapiens
ccttatccacaagca

SEQ ID NO: 220695 - DNA, 15 bp, Homo sapiens
accttatccacaagc

SEQ ID NO: 220696 - DNA, 15 bp, Homo sapiens
aaccttatccacaag

SEQ ID NO: 220697 - DNA, 15 bp, Homo sapiens
taaccttatccacaa

SEQ ID NO: 220698 - DNA, 15 bp, Homo sapiens
ataaccttatccaca

SEQ ID NO: 220699 - DNA, 15 bp, Homo sapiens
tataaccttatccac

SEQ ID NO: 220700 - DNA, 15 bp, Homo sapiens
atataaccttatcca

SEQ ID NO: 220701 - DNA, 15 bp, Homo sapiens
gatataaccttatcc

SEQ ID NO: 220702 - DNA, 15 bp, Homo sapiens
agatataaccttatc

SEQ ID NO: 220703 - DNA, 15 bp, Homo sapiens
cagatataaccttat

SEQ ID NO: 220704 - DNA, 15 bp, Homo sapiens
acagatataacctta

SEQ ID NO: 220705 - DNA, 15 bp, Homo sapiens
cacagatataacctt

SEQ ID NO: 220706 - DNA, 15 bp, Homo sapiens
gcacagatataacct

SEQ ID NO: 220707 - DNA, 15 bp, Homo sapiens
tgcacagatataacc

SEQ ID NO: 220708 - DNA, 15 bp, Homo sapiens
gtgcacagatataac

SEQ ID NO: 220709 - DNA, 15 bp, Homo sapiens
ggtgcacagatataa

SEQ ID NO: 220710 - DNA, 15 bp, Homo sapiens
cggtgcacagatata

SEQ ID NO: 220711 - DNA, 15 bp, Homo sapiens
tcggtgcacagatat

SEQ ID NO: 220712 - DNA, 15 bp, Homo sapiens
ctcggtgcacagata

SEQ ID NO: 220713 - DNA, 15 bp, Homo sapiens
gctcggtgcacagat

SEQ ID NO: 220714 - DNA, 15 bp, Homo sapiens
tgctcggtgcacaga

SEQ ID NO: 220715 - DNA, 15 bp, Homo sapiens
atgctcggtgcacag

SEQ ID NO: 220716 - DNA, 15 bp, Homo sapiens
catgctcggtgcaca

SEQ ID NO: 220717 - DNA, 15 bp, Homo sapiens
gcatgctcggtgcac

SEQ ID NO: 220718 - DNA, 15 bp, Homo sapiens
ggcatgctcggtgca

SEQ ID NO: 220719 - DNA, 15 bp, Homo sapiens
tggcatgctcggtgc

SEQ ID NO: 220720 - DNA, 15 bp, Homo sapiens
ttggcatgctcggtg

SEQ ID NO: 220721 - DNA, 15 bp, Homo sapiens
cttggcatgctcggt

SEQ ID NO: 220722 - DNA, 15 bp, Homo sapiens
tcttggcatgctcgg

SEQ ID NO: 220723 - DNA, 15 bp, Homo sapiens
ctcttggcatgctcg

SEQ ID NO: 220724 - DNA, 15 bp, Homo sapiens
tctcttggcatgctc

SEQ ID NO: 220725 - DNA, 15 bp, Homo sapiens
ctctcttggcatgct

SEQ ID NO: 220726 - DNA, 15 bp, Homo sapiens
tctctcttggcatgc

SEQ ID NO: 220727 - DNA, 15 bp, Homo sapiens
ttctctcttggcatg

SEQ ID NO: 220728 - DNA, 15 bp, Homo sapiens
gttctctcttggcat

SEQ ID NO: 220729 - DNA, 15 bp, Homo sapiens
tgttctctcttggca

SEQ ID NO: 220730 - DNA, 15 bp, Homo sapiens
atgttctctcttggc

SEQ ID NO: 220731 - DNA, 15 bp, Homo sapiens
gatgttctctcttgg

SEQ ID NO: 220732 - DNA, 15 bp, Homo sapiens
tgatgttctctcttg

SEQ ID NO: 220733 - DNA, 15 bp, Homo sapiens
ttgatgttctctctt

SEQ ID NO: 220734 - DNA, 15 bp, Homo sapiens
tttgatgttctctct

SEQ ID NO: 220735 - DNA, 15 bp, Homo sapiens
ttttgatgttctctc

SEQ ID NO: 220736 - DNA, 15 bp, Homo sapiens
attttgatgttctct

SEQ ID NO: 220737 - DNA, 15 bp, Homo sapiens
cattttgatgttctc

SEQ ID NO: 220738 - DNA, 15 bp, Homo sapiens
ccattttgatgttct

SEQ ID NO: 220739 - DNA, 15 bp, Homo sapiens
cccattttgatgttc

SEQ ID NO: 220740 - DNA, 15 bp, Homo sapiens
acccattttgatgtt

SEQ ID NO: 220741 - DNA, 15 bp, Homo sapiens
cacccattttgatgt

SEQ ID NO: 220742 - DNA, 15 bp, Homo sapiens
tcacccattttgatg

SEQ ID NO: 220743 - DNA, 15 bp, Homo sapiens
atcacccattttgat

SEQ ID NO: 220744 - DNA, 15 bp, Homo sapiens
tatcacccattttga

SEQ ID NO: 220745 - DNA, 15 bp, Homo sapiens
ctatcacccattttg

SEQ ID NO: 220746 - DNA, 15 bp, Homo sapiens
tctatcacccatttt

SEQ ID NO: 220747 - DNA, 15 bp, Homo sapiens
gtctatcacccattt

SEQ ID NO: 220748 - DNA, 15 bp, Homo sapiens
agtctatcacccatt

SEQ ID NO: 220749 - DNA, 15 bp, Homo sapiens
aagtctatcacccat

SEQ ID NO: 220750 - DNA, 15 bp, Homo sapiens
caagtctatcaccca

SEQ ID NO: 220751 - DNA, 15 bp, Homo sapiens
ccaagtctatcaccc

SEQ ID NO: 220752 - DNA, 15 bp, Homo sapiens
tccaagtctatcacc

SEQ ID NO: 220753 - DNA, 15 bp, Homo sapiens
ctccaagtctatcac

SEQ ID NO: 220754 - DNA, 15 bp, Homo sapiens
tctccaagtctatca

SEQ ID NO: 220755 - DNA, 15 bp, Homo sapiens
gtctccaagtctatc

SEQ ID NO: 220756 - DNA, 15 bp, Homo sapiens
tgtctccaagtctat

SEQ ID NO: 220757 - DNA, 15 bp, Homo sapiens
atgtctccaagtcta

SEQ ID NO: 220758 - DNA, 15 bp, Homo sapiens
tatgtctccaagtct

SEQ ID NO: 220759 - DNA, 15 bp, Homo sapiens
atatgtctccaagtc

SEQ ID NO: 220760 - DNA, 15 bp, Homo sapiens
tatatgtctccaagt

SEQ ID NO: 220761 - DNA, 15 bp, Homo sapiens
ctatatgtctccaag

SEQ ID NO: 220762 - DNA, 15 bp, Homo sapiens
actatatgtctccaa

SEQ ID NO: 220763 - DNA, 15 bp, Homo sapiens
aactatatgtctcca

SEQ ID NO: 220764 - DNA, 15 bp, Homo sapiens
taactatatgtctcc

SEQ ID NO: 220765 - DNA, 15 bp, Homo sapiens
ctaactatatgtctc

SEQ ID NO: 220766 - DNA, 15 bp, Homo sapiens
gctaactatatgtct

SEQ ID NO: 220767 - DNA, 15 bp, Homo sapiens
agctaactatatgtc

SEQ ID NO: 220768 - DNA, 15 bp, Homo sapiens
aagctaactatatgt

SEQ ID NO: 220769 - DNA, 15 bp, Homo sapiens
gaagctaactatatg

SEQ ID NO: 220770 - DNA, 15 bp, Homo sapiens
agaagctaactatat

SEQ ID NO: 220771 - DNA, 15 bp, Homo sapiens
tagaagctaactata

SEQ ID NO: 220772 - DNA, 15 bp, Homo sapiens
ctagaagctaactat

SEQ ID NO: 220773 - DNA, 15 bp, Homo sapiens
cctagaagctaacta

SEQ ID NO: 220774 - DNA, 15 bp, Homo sapiens
tcctagaagctaact

SEQ ID NO: 220775 - DNA, 15 bp, Homo sapiens
gtcctagaagctaac

SEQ ID NO: 220776 - DNA, 15 bp, Homo sapiens
tgtcctagaagctaa

SEQ ID NO: 220777 - DNA, 15 bp, Homo sapiens
atgtcctagaagcta

SEQ ID NO: 220778 - DNA, 15 bp, Homo sapiens
gatgtcctagaagct

SEQ ID NO: 220779 - DNA, 15 bp, Homo sapiens
agatgtcctagaagc

SEQ ID NO: 220780 - DNA, 15 bp, Homo sapiens
aagatgtcctagaag

SEQ ID NO: 220781 - DNA, 15 bp, Homo sapiens
caagatgtcctagaa

SEQ ID NO: 220782 - DNA, 15 bp, Homo sapiens
ccaagatgtcctaga

SEQ ID NO: 220783 - DNA, 15 bp, Homo sapiens
tccaagatgtcctag

SEQ ID NO: 220784 - DNA, 15 bp, Homo sapiens
ttccaagatgtccta

SEQ ID NO: 220785 - DNA, 15 bp, Homo sapiens
gttccaagatgtcct

SEQ ID NO: 220786 - DNA, 15 bp, Homo sapiens
tgttccaagatgtcc

SEQ ID NO: 220787 - DNA, 15 bp, Homo sapiens
ttgttccaagatgtc

SEQ ID NO: 220788 - DNA, 15 bp, Homo sapiens
attgttccaagatgt

SEQ ID NO: 220789 - DNA, 15 bp, Homo sapiens
aattgttccaagatg

SEQ ID NO: 220790 - DNA, 15 bp, Homo sapiens
taattgttccaagat

SEQ ID NO: 220791 - DNA, 15 bp, Homo sapiens
ttaattgttccaaga

SEQ ID NO: 220792 - DNA, 15 bp, Homo sapiens
tttaattgttccaag

SEQ ID NO: 220793 - DNA, 15 bp, Homo sapiens
ctttaattgttccaa

SEQ ID NO: 220794 - DNA, 15 bp, Homo sapiens
actttaattgttcca

SEQ ID NO: 220795 - DNA, 15 bp, Homo sapiens
tactttaattgttcc

SEQ ID NO: 220796 - DNA, 15 bp, Homo sapiens
atactttaattgttc

SEQ ID NO: 220797 - DNA, 15 bp, Homo sapiens
catactttaattgtt

SEQ ID NO: 220798 - DNA, 15 bp, Homo sapiens
gcatactttaattgt

SEQ ID NO: 220799 - DNA, 15 bp, Homo sapiens
agcatactttaattg

SEQ ID NO: 220800 - DNA, 15 bp, Homo sapiens
tagcatactttaatt

SEQ ID NO: 220801 - DNA, 15 bp, Homo sapiens
ttagcatactttaat

SEQ ID NO: 220802 - DNA, 15 bp, Homo sapiens
tttagcatactttaa

SEQ ID NO: 220803 - DNA, 15 bp, Homo sapiens
ttttagcatacttta

SEQ ID NO: 220804 - DNA, 15 bp, Homo sapiens
gttttagcatacttt

SEQ ID NO: 220805 - DNA, 15 bp, Homo sapiens
agttttagcatactt

SEQ ID NO: 220806 - DNA, 15 bp, Homo sapiens
cagttttagcatact

SEQ ID NO: 220807 - DNA, 15 bp, Homo sapiens
gcagttttagcatac

SEQ ID NO: 220808 - DNA, 15 bp, Homo sapiens
tgcagttttagcata

SEQ ID NO: 220809 - DNA, 15 bp, Homo sapiens
ctgcagttttagcat

SEQ ID NO: 220810 - DNA, 15 bp, Homo sapiens
actgcagttttagca

SEQ ID NO: 220811 - DNA, 15 bp, Homo sapiens
cactgcagttttagc

SEQ ID NO: 220812 - DNA, 15 bp, Homo sapiens
ccactgcagttttag

SEQ ID NO: 220813 - DNA, 15 bp, Homo sapiens
cccactgcagtttta

SEQ ID NO: 220814 - DNA, 15 bp, Homo sapiens
tcccactgcagtttt

SEQ ID NO: 220815 - DNA, 15 bp, Homo sapiens
ttcccactgcagttt

SEQ ID NO: 220816 - DNA, 15 bp, Homo sapiens
cttcccactgcagtt

SEQ ID NO: 220817 - DNA, 15 bp, Homo sapiens
ccttcccactgcagt

SEQ ID NO: 220818 - DNA, 15 bp, Homo sapiens
cccttcccactgcag

SEQ ID NO: 220819 - DNA, 15 bp, Homo sapiens
ccccttcccactgca

SEQ ID NO: 220820 - DNA, 15 bp, Homo sapiens
accccttcccactgc

SEQ ID NO: 220821 - DNA, 15 bp, Homo sapiens
aaccccttcccactg

SEQ ID NO: 220822 - DNA, 15 bp, Homo sapiens
taaccccttcccact

SEQ ID NO: 220823 - DNA, 15 bp, Homo sapiens
ttaaccccttcccac

SEQ ID NO: 220824 - DNA, 15 bp, Homo sapiens
tttaaccccttccca

SEQ ID NO: 220825 - DNA, 15 bp, Homo sapiens
gtttaaccccttccc

SEQ ID NO: 220826 - DNA, 15 bp, Homo sapiens
tgtttaaccccttcc

SEQ ID NO: 220827 - DNA, 15 bp, Homo sapiens
ttgtttaaccccttc

SEQ ID NO: 220828 - DNA, 15 bp, Homo sapiens
tttgtttaacccctt

SEQ ID NO: 220829 - DNA, 15 bp, Homo sapiens
ctttgtttaacccct

SEQ ID NO: 220830 - DNA, 15 bp, Homo sapiens
actttgtttaacccc

SEQ ID NO: 220831 - DNA, 15 bp, Homo sapiens
gactttgtttaaccc

SEQ ID NO: 220832 - DNA, 15 bp, Homo sapiens
ggactttgtttaacc

SEQ ID NO: 220833 - DNA, 15 bp, Homo sapiens
aggactttgtttaac

SEQ ID NO: 220834 - DNA, 15 bp, Homo sapiens
caggactttgtttaa

SEQ ID NO: 220835 - DNA, 15 bp, Homo sapiens
ccaggactttgttta

SEQ ID NO: 220836 - DNA, 15 bp, Homo sapiens
gccaggactttgttt

SEQ ID NO: 220837 - DNA, 15 bp, Homo sapiens
ggccaggactttgtt

SEQ ID NO: 220838 - DNA, 15 bp, Homo sapiens
aggccaggactttgt

SEQ ID NO: 220839 - DNA, 15 bp, Homo sapiens
aaggccaggactttg

SEQ ID NO: 220840 - DNA, 15 bp, Homo sapiens
gaaggccaggacttt

SEQ ID NO: 220841 - DNA, 15 bp, Homo sapiens
tgaaggccaggactt

SEQ ID NO: 220842 - DNA, 15 bp, Homo sapiens
gtgaaggccaggact

SEQ ID NO: 220843 - DNA, 15 bp, Homo sapiens
ggtgaaggccaggac

SEQ ID NO: 220844 - DNA, 15 bp, Homo sapiens
aggtgaaggccagga

SEQ ID NO: 220845 - DNA, 15 bp, Homo sapiens
caggtgaaggccagg

SEQ ID NO: 220846 - DNA, 15 bp, Homo sapiens
acaggtgaaggccag

SEQ ID NO: 220847 - DNA, 15 bp, Homo sapiens
tacaggtgaaggcca

SEQ ID NO: 220848 - DNA, 15 bp, Homo sapiens
ttacaggtgaaggcc

SEQ ID NO: 220849 - DNA, 15 bp, Homo sapiens
attacaggtgaaggc

SEQ ID NO: 220850 - DNA, 15 bp, Homo sapiens
cattacaggtgaagg

SEQ ID NO: 220851 - DNA, 15 bp, Homo sapiens
ccattacaggtgaag

SEQ ID NO: 220852 - DNA, 15 bp, Homo sapiens
accattacaggtgaa

SEQ ID NO: 220853 - DNA, 15 bp, Homo sapiens
caccattacaggtga

SEQ ID NO: 220854 - DNA, 15 bp, Homo sapiens
acaccattacaggtg

SEQ ID NO: 220855 - DNA, 15 bp, Homo sapiens
gacaccattacaggt

SEQ ID NO: 220856 - DNA, 15 bp, Homo sapiens
ggacaccattacagg

SEQ ID NO: 220857 - DNA, 15 bp, Homo sapiens
tggacaccattacag

SEQ ID NO: 220858 - DNA, 15 bp, Homo sapiens
ttggacaccattaca

SEQ ID NO: 220859 - DNA, 15 bp, Homo sapiens
attggacaccattac

SEQ ID NO: 220860 - DNA, 15 bp, Homo sapiens
cattggacaccatta

SEQ ID NO: 220861 - DNA, 15 bp, Homo sapiens
acattggacaccatt

SEQ ID NO: 220862 - DNA, 15 bp, Homo sapiens
aacattggacaccat

SEQ ID NO: 220863 - DNA, 15 bp, Homo sapiens
caacattggacacca

SEQ ID NO: 220864 - DNA, 15 bp, Homo sapiens
ccaacattggacacc

SEQ ID NO: 220865 - DNA, 15 bp, Homo sapiens
tccaacattggacac

SEQ ID NO: 220866 - DNA, 15 bp, Homo sapiens
ttccaacattggaca

SEQ ID NO: 220867 - DNA, 15 bp, Homo sapiens
gttccaacattggac

SEQ ID NO: 220868 - DNA, 15 bp, Homo sapiens
tgttccaacattgga

SEQ ID NO: 220869 - DNA, 15 bp, Homo sapiens
ttgttccaacattgg

SEQ ID NO: 220870 - DNA, 15 bp, Homo sapiens
cttgttccaacattg

SEQ ID NO: 220871 - DNA, 15 bp, Homo sapiens
tcttgttccaacatt

SEQ ID NO: 220872 - DNA, 15 bp, Homo sapiens
ttcttgttccaacat

SEQ ID NO: 220873 - DNA, 15 bp, Homo sapiens
gttcttgttccaaca

SEQ ID NO: 220874 - DNA, 15 bp, Homo sapiens
agttcttgttccaac

SEQ ID NO: 220875 - DNA, 15 bp, Homo sapiens
aagttcttgttccaa

SEQ ID NO: 220876 - DNA, 15 bp, Homo sapiens
taagttcttgttcca

SEQ ID NO: 220877 - DNA, 15 bp, Homo sapiens
ctaagttcttgttcc

SEQ ID NO: 220878 - DNA, 15 bp, Homo sapiens
gctaagttcttgttc

SEQ ID NO: 220879 - DNA, 15 bp, Homo sapiens
tgctaagttcttgtt

SEQ ID NO: 220880 - DNA, 15 bp, Homo sapiens
gtgctaagttcttgt

SEQ ID NO: 220881 - DNA, 15 bp, Homo sapiens
ggtgctaagttcttg

SEQ ID NO: 220882 - DNA, 15 bp, Homo sapiens
tggtgctaagttctt

SEQ ID NO: 220883 - DNA, 15 bp, Homo sapiens
ttggtgctaagttct

SEQ ID NO: 220884 - DNA, 15 bp, Homo sapiens
cttggtgctaagttc

SEQ ID NO: 220885 - DNA, 15 bp, Homo sapiens
tcttggtgctaagtt

SEQ ID NO: 220886 - DNA, 15 bp, Homo sapiens
gtcttggtgctaagt

SEQ ID NO: 220887 - DNA, 15 bp, Homo sapiens
agtcttggtgctaag

SEQ ID NO: 220888 - DNA, 15 bp, Homo sapiens
gagtcttggtgctaa

SEQ ID NO: 220889 - DNA, 15 bp, Homo sapiens
ggagtcttggtgcta

SEQ ID NO: 220890 - DNA, 15 bp, Homo sapiens
tggagtcttggtgct

SEQ ID NO: 220891 - DNA, 15 bp, Homo sapiens
ctggagtcttggtgc

SEQ ID NO: 220892 - DNA, 15 bp, Homo sapiens
gctggagtcttggtg

SEQ ID NO: 220893 - DNA, 15 bp, Homo sapiens
ggctggagtcttggt

SEQ ID NO: 220894 - DNA, 15 bp, Homo sapiens
tggctggagtcttgg

SEQ ID NO: 220895 - DNA, 15 bp, Homo sapiens
ctggctggagtcttg

SEQ ID NO: 220896 - DNA, 15 bp, Homo sapiens
actggctggagtctt

SEQ ID NO: 220897 - DNA, 15 bp, Homo sapiens
tactggctggagtct

SEQ ID NO: 220898 - DNA, 15 bp, Homo sapiens
atactggctggagtc

SEQ ID NO: 220899 - DNA, 15 bp, Homo sapiens
gatactggctggagt

SEQ ID NO: 220900 - DNA, 15 bp, Homo sapiens
agatactggctggag

SEQ ID NO: 220901 - DNA, 15 bp, Homo sapiens
cagatactggctgga

SEQ ID NO: 220902 - DNA, 15 bp, Homo sapiens
tcagatactggctgg

SEQ ID NO: 220903 - DNA, 15 bp, Homo sapiens
gtcagatactggctg

SEQ ID NO: 220904 - DNA, 15 bp, Homo sapiens
agtcagatactggct

SEQ ID NO: 220905 - DNA, 15 bp, Homo sapiens
gagtcagatactggc

SEQ ID NO: 220906 - DNA, 15 bp, Homo sapiens
agagtcagatactgg

SEQ ID NO: 220907 - DNA, 15 bp, Homo sapiens
gagagtcagatactg

SEQ ID NO: 220908 - DNA, 15 bp, Homo sapiens
ggagagtcagatact

SEQ ID NO: 220909 - DNA, 15 bp, Homo sapiens
tggagagtcagatac

SEQ ID NO: 220910 - DNA, 15 bp, Homo sapiens
ttggagagtcagata

SEQ ID NO: 220911 - DNA, 15 bp, Homo sapiens
tttggagagtcagat

SEQ ID NO: 220912 - DNA, 15 bp, Homo sapiens
gtttggagagtcaga

SEQ ID NO: 220913 - DNA, 15 bp, Homo sapiens
agtttggagagtcag

SEQ ID NO: 220914 - DNA, 15 bp, Homo sapiens
aagtttggagagtca

SEQ ID NO: 220915 - DNA, 15 bp, Homo sapiens
caagtttggagagtc

SEQ ID NO: 220916 - DNA, 15 bp, Homo sapiens
ccaagtttggagagt

SEQ ID NO: 220917 - DNA, 15 bp, Homo sapiens
accaagtttggagag

SEQ ID NO: 220918 - DNA, 15 bp, Homo sapiens
aaccaagtttggaga

SEQ ID NO: 220919 - DNA, 15 bp, Homo sapiens
taaccaagtttggag

SEQ ID NO: 220920 - DNA, 15 bp, Homo sapiens
ttaaccaagtttgga

SEQ ID NO: 220921 - DNA, 15 bp, Homo sapiens
tttaaccaagtttgg

SEQ ID NO: 220922 - DNA, 15 bp, Homo sapiens
ctttaaccaagtttg

SEQ ID NO: 220923 - DNA, 15 bp, Homo sapiens
tctttaaccaagttt

SEQ ID NO: 220924 - DNA, 15 bp, Homo sapiens
ctctttaaccaagtt

SEQ ID NO: 220925 - DNA, 15 bp, Homo sapiens
cctctttaaccaagt

SEQ ID NO: 220926 - DNA, 15 bp, Homo sapiens
acctctttaaccaag

SEQ ID NO: 220927 - DNA, 15 bp, Homo sapiens
aacctctttaaccaa

SEQ ID NO: 220928 - DNA, 15 bp, Homo sapiens
aaacctctttaacca

SEQ ID NO: 220929 - DNA, 15 bp, Homo sapiens
aaaacctctttaacc

SEQ ID NO: 220930 - DNA, 15 bp, Homo sapiens
aaaaacctctttaac

SEQ ID NO: 220931 - DNA, 15 bp, Homo sapiens
aaaaaacctctttaa

SEQ ID NO: 220932 - DNA, 15 bp, Homo sapiens
gaaaaaacctcttta

SEQ ID NO: 220933 - DNA, 15 bp, Homo sapiens
agaaaaaacctcttt

SEQ ID NO: 220934 - DNA, 15 bp, Homo sapiens
gagaaaaaacctctt

SEQ ID NO: 220935 - DNA, 15 bp, Homo sapiens
tgagaaaaaacctct

SEQ ID NO: 220936 - DNA, 15 bp, Homo sapiens
atgagaaaaaacctc

SEQ ID NO: 220937 - DNA, 15 bp, Homo sapiens
gatgagaaaaaacct

SEQ ID NO: 220938 - DNA, 15 bp, Homo sapiens
agatgagaaaaaacc

SEQ ID NO: 220939 - DNA, 15 bp, Homo sapiens
cagatgagaaaaaac

SEQ ID NO: 220940 - DNA, 15 bp, Homo sapiens
ccagatgagaaaaaa

SEQ ID NO: 220941 - DNA, 15 bp, Homo sapiens
tccagatgagaaaaa

SEQ ID NO: 220942 - DNA, 15 bp, Homo sapiens
ttccagatgagaaaa

SEQ ID NO: 220943 - DNA, 15 bp, Homo sapiens
cttccagatgagaaa

SEQ ID NO: 220944 - DNA, 15 bp, Homo sapiens
tcttccagatgagaa

SEQ ID NO: 220945 - DNA, 15 bp, Homo sapiens
gtcttccagatgaga

SEQ ID NO: 220946 - DNA, 15 bp, Homo sapiens
tgtcttccagatgag

SEQ ID NO: 220947 - DNA, 15 bp, Homo sapiens
ctgtcttccagatga

SEQ ID NO: 220948 - DNA, 15 bp, Homo sapiens
cctgtcttccagatg

SEQ ID NO: 220949 - DNA, 15 bp, Homo sapiens
acctgtcttccagat

SEQ ID NO: 220950 - DNA, 15 bp, Homo sapiens
cacctgtcttccaga

SEQ ID NO: 220951 - DNA, 15 bp, Homo sapiens
tcacctgtcttccag

SEQ ID NO: 220952 - DNA, 15 bp, Homo sapiens
ctcacctgtcttcca

SEQ ID NO: 220953 - DNA, 15 bp, Homo sapiens
tctcacctgtcttcc

SEQ ID NO: 220954 - DNA, 15 bp, Homo sapiens
atctcacctgtcttc

SEQ ID NO: 220955 - DNA, 15 bp, Homo sapiens
gatctcacctgtctt

SEQ ID NO: 220956 - DNA, 15 bp, Homo sapiens
tgatctcacctgtct

SEQ ID NO: 220957 - DNA, 15 bp, Homo sapiens
ctgatctcacctgtc

SEQ ID NO: 220958 - DNA, 15 bp, Homo sapiens
gctgatctcacctgt

SEQ ID NO: 220959 - DNA, 15 bp, Homo sapiens
agctgatctcacctg

SEQ ID NO: 220960 - DNA, 15 bp, Homo sapiens
gagctgatctcacct

SEQ ID NO: 220961 - DNA, 15 bp, Homo sapiens
agagctgatctcacc

SEQ ID NO: 220962 - DNA, 15 bp, Homo sapiens
tagagctgatctcac

SEQ ID NO: 220963 - DNA, 15 bp, Homo sapiens
atagagctgatctca

SEQ ID NO: 220964 - DNA, 15 bp, Homo sapiens
aatagagctgatctc

SEQ ID NO: 220965 - DNA, 15 bp, Homo sapiens
caatagagctgatct

SEQ ID NO: 220966 - DNA, 15 bp, Homo sapiens
acaatagagctgatc

SEQ ID NO: 220967 - DNA, 15 bp, Homo sapiens
aacaatagagctgat

SEQ ID NO: 220968 - DNA, 15 bp, Homo sapiens
aaacaatagagctga

SEQ ID NO: 220969 - DNA, 15 bp, Homo sapiens
aaaacaatagagctg

SEQ ID NO: 220970 - DNA, 15 bp, Homo sapiens
taaaacaatagagct

SEQ ID NO: 220971 - DNA, 15 bp, Homo sapiens
ataaaacaatagagc

SEQ ID NO: 220972 - DNA, 15 bp, Homo sapiens
tataaaacaatagag

SEQ ID NO: 220973 - DNA, 15 bp, Homo sapiens
gtataaaacaataga

SEQ ID NO: 220974 - DNA, 15 bp, Homo sapiens
tgtataaaacaatag

SEQ ID NO: 220975 - DNA, 15 bp, Homo sapiens
ttgtataaaacaata

SEQ ID NO: 220976 - DNA, 15 bp, Homo sapiens
attgtataaaacaat

SEQ ID NO: 220977 - DNA, 15 bp, Homo sapiens
gattgtataaaacaa

SEQ ID NO: 220978 - DNA, 15 bp, Homo sapiens
agattgtataaaaca

SEQ ID NO: 220979 - DNA, 15 bp, Homo sapiens
tagattgtataaaac

SEQ ID NO: 220980 - DNA, 15 bp, Homo sapiens
gtagattgtataaaa

SEQ ID NO: 220981 - DNA, 15 bp, Homo sapiens
tgtagattgtataaa

SEQ ID NO: 220982 - DNA, 15 bp, Homo sapiens
atgtagattgtataa

SEQ ID NO: 220983 - DNA, 15 bp, Homo sapiens
gatgtagattgtata

SEQ ID NO: 220984 - DNA, 15 bp, Homo sapiens
ggatgtagattgtat

SEQ ID NO: 220985 - DNA, 15 bp, Homo sapiens
aggatgtagattgta

SEQ ID NO: 220986 - DNA, 15 bp, Homo sapiens
gaggatgtagattgt

SEQ ID NO: 220987 - DNA, 15 bp, Homo sapiens
tgaggatgtagattg

SEQ ID NO: 220988 - DNA, 15 bp, Homo sapiens
ttgaggatgtagatt

SEQ ID NO: 220989 - DNA, 15 bp, Homo sapiens
tttgaggatgtagat

SEQ ID NO: 220990 - DNA, 15 bp, Homo sapiens
ctttgaggatgtaga

SEQ ID NO: 220991 - DNA, 15 bp, Homo sapiens
actttgaggatgtag

SEQ ID NO: 220992 - DNA, 15 bp, Homo sapiens
gactttgaggatgta

SEQ ID NO: 220993 - DNA, 15 bp, Homo sapiens
agactttgaggatgt

SEQ ID NO: 220994 - DNA, 15 bp, Homo sapiens
cagactttgaggatg

SEQ ID NO: 220995 - DNA, 15 bp, Homo sapiens
acagactttgaggat

SEQ ID NO: 220996 - DNA, 15 bp, Homo sapiens
tacagactttgagga

SEQ ID NO: 220997 - DNA, 15 bp, Homo sapiens
ttacagactttgagg

SEQ ID NO: 220998 - DNA, 15 bp, Homo sapiens
cttacagactttgag

SEQ ID NO: 220999 - DNA, 15 bp, Homo sapiens
tcttacagactttga

SEQ ID NO: 221000 - DNA, 15 bp, Homo sapiens
ctcttacagactttg

SEQ ID NO: 221001 - DNA, 15 bp, Homo sapiens
tctcttacagacttt

SEQ ID NO: 221002 - DNA, 15 bp, Homo sapiens
ttctcttacagactt

SEQ ID NO: 221003 - DNA, 15 bp, Homo sapiens
attctcttacagact

SEQ ID NO: 221004 - DNA, 15 bp, Homo sapiens
tattctcttacagac

SEQ ID NO: 221005 - DNA, 15 bp, Homo sapiens
ctattctcttacaga

SEQ ID NO: 221006 - DNA, 15 bp, Homo sapiens
tctattctcttacag

SEQ ID NO: 221007 - DNA, 15 bp, Homo sapiens
gtctattctcttaca

SEQ ID NO: 221008 - DNA, 15 bp, Homo sapiens
tgtctattctcttac

SEQ ID NO: 221009 - DNA, 15 bp, Homo sapiens
atgtctattctctta

SEQ ID NO: 221010 - DNA, 15 bp, Homo sapiens
aatgtctattctctt

SEQ ID NO: 221011 - DNA, 15 bp, Homo sapiens
aaatgtctattctct

SEQ ID NO: 221012 - DNA, 15 bp, Homo sapiens
aaaatgtctattctc

SEQ ID NO: 221013 - DNA, 15 bp, Homo sapiens
aaaaatgtctattct

SEQ ID NO: 221014 - DNA, 15 bp, Homo sapiens
gaaaaatgtctattc

SEQ ID NO: 221015 - DNA, 15 bp, Homo sapiens
tgaaaaatgtctatt

SEQ ID NO: 221016 - DNA, 15 bp, Homo sapiens
ctgaaaaatgtctat

SEQ ID NO: 221017 - DNA, 15 bp, Homo sapiens
tctgaaaaatgtcta

SEQ ID NO: 221018 - DNA, 15 bp, Homo sapiens
ttctgaaaaatgtct

SEQ ID NO: 221019 - DNA, 15 bp, Homo sapiens
tttctgaaaaatgtc

SEQ ID NO: 221020 - DNA, 15 bp, Homo sapiens
ctttctgaaaaatgt

SEQ ID NO: 221021 - DNA, 15 bp, Homo sapiens
cctttctgaaaaatg

SEQ ID NO: 221022 - DNA, 15 bp, Homo sapiens
ccctttctgaaaaat

SEQ ID NO: 221023 - DNA, 15 bp, Homo sapiens
accctttctgaaaaa

SEQ ID NO: 221024 - DNA, 15 bp, Homo sapiens
caccctttctgaaaa

SEQ ID NO: 221025 - DNA, 15 bp, Homo sapiens
acaccctttctgaaa

SEQ ID NO: 221026 - DNA, 15 bp, Homo sapiens
cacaccctttctgaa

SEQ ID NO: 221027 - DNA, 15 bp, Homo sapiens
tcacaccctttctga

SEQ ID NO: 221028 - DNA, 15 bp, Homo sapiens
atcacaccctttctg

SEQ ID NO: 221029 - DNA, 15 bp, Homo sapiens
gatcacaccctttct

SEQ ID NO: 221030 - DNA, 15 bp, Homo sapiens
ggatcacaccctttc

SEQ ID NO: 221031 - DNA, 15 bp, Homo sapiens
tggatcacacccttt

SEQ ID NO: 221032 - DNA, 15 bp, Homo sapiens
gtggatcacaccctt

SEQ ID NO: 221033 - DNA, 15 bp, Homo sapiens
tgtggatcacaccct

SEQ ID NO: 221034 - DNA, 15 bp, Homo sapiens
ttgtggatcacaccc

SEQ ID NO: 221035 - DNA, 15 bp, Homo sapiens
tttgtggatcacacc

SEQ ID NO: 221036 - DNA, 15 bp, Homo sapiens
ttttgtggatcacac

SEQ ID NO: 221037 - DNA, 15 bp, Homo sapiens
tttttgtggatcaca

SEQ ID NO: 221038 - DNA, 15 bp, Homo sapiens
gtttttgtggatcac

SEQ ID NO: 221039 - DNA, 15 bp, Homo sapiens
agtttttgtggatca

SEQ ID NO: 221040 - DNA, 15 bp, Homo sapiens
cagtttttgtggatc

SEQ ID NO: 221041 - DNA, 15 bp, Homo sapiens
gcagtttttgtggat

SEQ ID NO: 221042 - DNA, 15 bp, Homo sapiens
tgcagtttttgtgga

SEQ ID NO: 221043 - DNA, 15 bp, Homo sapiens
ctgcagtttttgtgg

SEQ ID NO: 221044 - DNA, 15 bp, Homo sapiens
tctgcagtttttgtg

SEQ ID NO: 221045 - DNA, 15 bp, Homo sapiens
ttctgcagtttttgt

SEQ ID NO: 221046 - DNA, 15 bp, Homo sapiens
tttctgcagtttttg

SEQ ID NO: 221047 - DNA, 15 bp, Homo sapiens
ttttctgcagttttt

SEQ ID NO: 221048 - DNA, 15 bp, Homo sapiens
cttttctgcagtttt

SEQ ID NO: 221049 - DNA, 15 bp, Homo sapiens
tcttttctgcagttt

SEQ ID NO: 221050 - DNA, 15 bp, Homo sapiens
ttcttttctgcagtt

SEQ ID NO: 221051 - DNA, 15 bp, Homo sapiens
tttcttttctgcagt

SEQ ID NO: 221052 - DNA, 15 bp, Homo sapiens
ttttcttttctgcag

SEQ ID NO: 221053 - DNA, 15 bp, Homo sapiens
tttttcttttctgca

SEQ ID NO: 221054 - DNA, 15 bp, Homo sapiens
ctttttcttttctgc

SEQ ID NO: 221055 - DNA, 15 bp, Homo sapiens
tctttttcttttctg

SEQ ID NO: 221056 - DNA, 15 bp, Homo sapiens
atctttttcttttct

SEQ ID NO: 221057 - DNA, 15 bp, Homo sapiens
aatctttttcttttc

SEQ ID NO: 221058 - DNA, 15 bp, Homo sapiens
aaatctttttctttt

SEQ ID NO: 221059 - DNA, 15 bp, Homo sapiens
caaatctttttcttt

SEQ ID NO: 221060 - DNA, 15 bp, Homo sapiens
acaaatctttttctt

SEQ ID NO: 221061 - DNA, 15 bp, Homo sapiens
gacaaatctttttct

SEQ ID NO: 221062 - DNA, 15 bp, Homo sapiens
tgacaaatctttttc

SEQ ID NO: 221063 - DNA, 15 bp, Homo sapiens
gtgacaaatcttttt

SEQ ID NO: 221064 - DNA, 15 bp, Homo sapiens
tgtgacaaatctttt

SEQ ID NO: 221065 - DNA, 15 bp, Homo sapiens
ttgtgacaaatcttt

SEQ ID NO: 221066 - DNA, 15 bp, Homo sapiens
tttgtgacaaatctt

SEQ ID NO: 221067 - DNA, 15 bp, Homo sapiens
atttgtgacaaatct

SEQ ID NO: 221068 - DNA, 15 bp, Homo sapiens
gatttgtgacaaatc

SEQ ID NO: 221069 - DNA, 15 bp, Homo sapiens
tgatttgtgacaaat

SEQ ID NO: 221070 - DNA, 15 bp, Homo sapiens
ttgatttgtgacaaa

SEQ ID NO: 221071 - DNA, 15 bp, Homo sapiens
cttgatttgtgacaa

SEQ ID NO: 221072 - DNA, 15 bp, Homo sapiens
acttgatttgtgaca

SEQ ID NO: 221073 - DNA, 15 bp, Homo sapiens
cacttgatttgtgac

SEQ ID NO: 221074 - DNA, 15 bp, Homo sapiens
acacttgatttgtga

SEQ ID NO: 221075 - DNA, 15 bp, Homo sapiens
tacacttgatttgtg

SEQ ID NO: 221076 - DNA, 15 bp, Homo sapiens
gtacacttgatttgt

SEQ ID NO: 221077 - DNA, 15 bp, Homo sapiens
tgtacacttgatttg

SEQ ID NO: 221078 - DNA, 15 bp, Homo sapiens
ttgtacacttgattt

SEQ ID NO: 221079 - DNA, 15 bp, Homo sapiens
tttgtacacttgatt

SEQ ID NO: 221080 - DNA, 15 bp, Homo sapiens
ctttgtacacttgat

SEQ ID NO: 221081 - DNA, 15 bp, Homo sapiens
tctttgtacacttga

SEQ ID NO: 221082 - DNA, 15 bp, Homo sapiens
ctctttgtacacttg

SEQ ID NO: 221083 - DNA, 15 bp, Homo sapiens
tctctttgtacactt

SEQ ID NO: 221084 - DNA, 15 bp, Homo sapiens
ctctctttgtacact

SEQ ID NO: 221085 - DNA, 15 bp, Homo sapiens
gctctctttgtacac

SEQ ID NO: 221086 - DNA, 15 bp, Homo sapiens
agctctctttgtaca

SEQ ID NO: 221087 - DNA, 15 bp, Homo sapiens
aagctctctttgtac

SEQ ID NO: 221088 - DNA, 15 bp, Homo sapiens
taagctctctttgta

SEQ ID NO: 221089 - DNA, 15 bp, Homo sapiens
ataagctctctttgt

SEQ ID NO: 221090 - DNA, 15 bp, Homo sapiens
aataagctctctttg

SEQ ID NO: 221091 - DNA, 15 bp, Homo sapiens
taataagctctcttt

SEQ ID NO: 221092 - DNA, 15 bp, Homo sapiens
ttaataagctctctt

SEQ ID NO: 221093 - DNA, 15 bp, Homo sapiens
tttaataagctctct

SEQ ID NO: 221094 - DNA, 15 bp, Homo sapiens
ctttaataagctctc

SEQ ID NO: 221095 - DNA, 15 bp, Homo sapiens
cctttaataagctct

SEQ ID NO: 221096 - DNA, 15 bp, Homo sapiens
tcctttaataagctc

SEQ ID NO: 221097 - DNA, 15 bp, Homo sapiens
ttcctttaataagct

SEQ ID NO: 221098 - DNA, 15 bp, Homo sapiens
cttcctttaataagc

SEQ ID NO: 221099 - DNA, 15 bp, Homo sapiens
gcttcctttaataag

SEQ ID NO: 221100 - DNA, 15 bp, Homo sapiens
ggcttcctttaataa

SEQ ID NO: 221101 - DNA, 15 bp, Homo sapiens
tggcttcctttaata

SEQ ID NO: 221102 - DNA, 15 bp, Homo sapiens
gtggcttcctttaat

SEQ ID NO: 221103 - DNA, 15 bp, Homo sapiens
cgtggcttcctttaa

SEQ ID NO: 221104 - DNA, 15 bp, Homo sapiens
ccgtggcttccttta

SEQ ID NO: 221105 - DNA, 15 bp, Homo sapiens
tccgtggcttccttt

SEQ ID NO: 221106 - DNA, 15 bp, Homo sapiens
atccgtggcttcctt

SEQ ID NO: 221107 - DNA, 15 bp, Homo sapiens
aatccgtggcttcct

SEQ ID NO: 221108 - DNA, 15 bp, Homo sapiens
taatccgtggcttcc

SEQ ID NO: 221109 - DNA, 15 bp, Homo sapiens
ataatccgtggcttc

SEQ ID NO: 221110 - DNA, 15 bp, Homo sapiens
aataatccgtggctt

SEQ ID NO: 221111 - DNA, 15 bp, Homo sapiens
taataatccgtggct

SEQ ID NO: 221112 - DNA, 15 bp, Homo sapiens
ataataatccgtggc

SEQ ID NO: 221113 - DNA, 15 bp, Homo sapiens
aataataatccgtgg

SEQ ID NO: 221114 - DNA, 15 bp, Homo sapiens
taataataatccgtg

SEQ ID NO: 221115 - DNA, 15 bp, Homo sapiens
ttaataataatccgt

SEQ ID NO: 221116 - DNA, 15 bp, Homo sapiens
tttaataataatccg

SEQ ID NO: 221117 - DNA, 15 bp, Homo sapiens
atttaataataatcc

SEQ ID NO: 221118 - DNA, 15 bp, Homo sapiens
catttaataataatc

SEQ ID NO: 221119 - DNA, 15 bp, Homo sapiens
gcatttaataataat

SEQ ID NO: 221120 - DNA, 15 bp, Homo sapiens
tgcatttaataataa

SEQ ID NO: 221121 - DNA, 15 bp, Homo sapiens
ctgcatttaataata

SEQ ID NO: 221122 - DNA, 15 bp, Homo sapiens
cctgcatttaataat

SEQ ID NO: 221123 - DNA, 15 bp, Homo sapiens
ccctgcatttaataa

SEQ ID NO: 221124 - DNA, 15 bp, Homo sapiens
tccctgcatttaata

SEQ ID NO: 221125 - DNA, 15 bp, Homo sapiens
atccctgcatttaat

SEQ ID NO: 221126 - DNA, 15 bp, Homo sapiens
aatccctgcatttaa

SEQ ID NO: 221127 - DNA, 15 bp, Homo sapiens
taatccctgcattta

SEQ ID NO: 221128 - DNA, 15 bp, Homo sapiens
gtaatccctgcattt

SEQ ID NO: 221129 - DNA, 15 bp, Homo sapiens
agtaatccctgcatt

SEQ ID NO: 221130 - DNA, 15 bp, Homo sapiens
gagtaatccctgcat

SEQ ID NO: 221131 - DNA, 15 bp, Homo sapiens
tgagtaatccctgca

SEQ ID NO: 221132 - DNA, 15 bp, Homo sapiens
gtgagtaatccctgc

SEQ ID NO: 221133 - DNA, 15 bp, Homo sapiens
tgtgagtaatccctg

SEQ ID NO: 221134 - DNA, 15 bp, Homo sapiens
gtgtgagtaatccct

SEQ ID NO: 221135 - DNA, 15 bp, Homo sapiens
tgtgtgagtaatccc

SEQ ID NO: 221136 - DNA, 15 bp, Homo sapiens
atgtgtgagtaatcc

SEQ ID NO: 221137 - DNA, 15 bp, Homo sapiens
gatgtgtgagtaatc

SEQ ID NO: 221138 - DNA, 15 bp, Homo sapiens
agatgtgtgagtaat

SEQ ID NO: 221139 - DNA, 15 bp, Homo sapiens
cagatgtgtgagtaa

SEQ ID NO: 221140 - DNA, 15 bp, Homo sapiens
gcagatgtgtgagta

SEQ ID NO: 221141 - DNA, 15 bp, Homo sapiens
tgcagatgtgtgagt

SEQ ID NO: 221142 - DNA, 15 bp, Homo sapiens
gtgcagatgtgtgag

SEQ ID NO: 221143 - DNA, 15 bp, Homo sapiens
tgtgcagatgtgtga

SEQ ID NO: 221144 - DNA, 15 bp, Homo sapiens
atgtgcagatgtgtg

SEQ ID NO: 221145 - DNA, 15 bp, Homo sapiens
catgtgcagatgtgt

SEQ ID NO: 221146 - DNA, 15 bp, Homo sapiens
acatgtgcagatgtg

SEQ ID NO: 221147 - DNA, 15 bp, Homo sapiens
cacatgtgcagatgt

SEQ ID NO: 221148 - DNA, 15 bp, Homo sapiens
ccacatgtgcagatg

SEQ ID NO: 221149 - DNA, 15 bp, Homo sapiens
tccacatgtgcagat

SEQ ID NO: 221150 - DNA, 15 bp, Homo sapiens
atccacatgtgcaga

SEQ ID NO: 221151 - DNA, 15 bp, Homo sapiens
tatccacatgtgcag

SEQ ID NO: 221152 - DNA, 15 bp, Homo sapiens
ttatccacatgtgca

SEQ ID NO: 221153 - DNA, 15 bp, Homo sapiens
attatccacatgtgc

SEQ ID NO: 221154 - DNA, 15 bp, Homo sapiens
gattatccacatgtg

SEQ ID NO: 221155 - DNA, 15 bp, Homo sapiens
ggattatccacatgt

SEQ ID NO: 221156 - DNA, 15 bp, Homo sapiens
gggattatccacatg

SEQ ID NO: 221157 - DNA, 15 bp, Homo sapiens
agggattatccacat

SEQ ID NO: 221158 - DNA, 15 bp, Homo sapiens
cagggattatccaca

SEQ ID NO: 221159 - DNA, 15 bp, Homo sapiens
gcagggattatccac

SEQ ID NO: 221160 - DNA, 15 bp, Homo sapiens
tgcagggattatcca

SEQ ID NO: 221161 - DNA, 15 bp, Homo sapiens
atgcagggattatcc

SEQ ID NO: 221162 - DNA, 15 bp, Homo sapiens
aatgcagggattatc

SEQ ID NO: 221163 - DNA, 15 bp, Homo sapiens
taatgcagggattat

SEQ ID NO: 221164 - DNA, 15 bp, Homo sapiens
ttaatgcagggatta

SEQ ID NO: 221165 - DNA, 15 bp, Homo sapiens
cttaatgcagggatt

SEQ ID NO: 221166 - DNA, 15 bp, Homo sapiens
tcttaatgcagggat

SEQ ID NO: 221167 - DNA, 15 bp, Homo sapiens
ttcttaatgcaggga

SEQ ID NO: 221168 - DNA, 15 bp, Homo sapiens
attcttaatgcaggg

SEQ ID NO: 221169 - DNA, 15 bp, Homo sapiens
tattcttaatgcagg

SEQ ID NO: 221170 - DNA, 15 bp, Homo sapiens
ttattcttaatgcag

SEQ ID NO: 221171 - DNA, 15 bp, Homo sapiens
attattcttaatgca

SEQ ID NO: 221172 - DNA, 15 bp, Homo sapiens
gattattcttaatgc

SEQ ID NO: 221173 - DNA, 15 bp, Homo sapiens
ggattattcttaatg

SEQ ID NO: 221174 - DNA, 15 bp, Homo sapiens
tggattattcttaat

SEQ ID NO: 221175 - DNA, 15 bp, Homo sapiens
ctggattattcttaa

SEQ ID NO: 221176 - DNA, 15 bp, Homo sapiens
cctggattattctta

SEQ ID NO: 221177 - DNA, 15 bp, Homo sapiens
ccctggattattctt

SEQ ID NO: 221178 - DNA, 15 bp, Homo sapiens
gccctggattattct

SEQ ID NO: 221179 - DNA, 15 bp, Homo sapiens
ggccctggattattc

SEQ ID NO: 221180 - DNA, 15 bp, Homo sapiens
tggccctggattatt

SEQ ID NO: 221181 - DNA, 15 bp, Homo sapiens
gtggccctggattat

SEQ ID NO: 221182 - DNA, 15 bp, Homo sapiens
ggtggccctggatta

SEQ ID NO: 221183 - DNA, 15 bp, Homo sapiens
aggtggccctggatt

SEQ ID NO: 221184 - DNA, 15 bp, Homo sapiens
taggtggccctggat

SEQ ID NO: 221185 - DNA, 15 bp, Homo sapiens
gtaggtggccctgga

SEQ ID NO: 221186 - DNA, 15 bp, Homo sapiens
agtaggtggccctgg

SEQ ID NO: 221187 - DNA, 15 bp, Homo sapiens
tagtaggtggccctg

SEQ ID NO: 221188 - DNA, 15 bp, Homo sapiens
ctagtaggtggccct

SEQ ID NO: 221189 - DNA, 15 bp, Homo sapiens
cctagtaggtggccc

SEQ ID NO: 221190 - DNA, 15 bp, Homo sapiens
gcctagtaggtggcc

SEQ ID NO: 221191 - DNA, 15 bp, Homo sapiens
ggcctagtaggtggc

SEQ ID NO: 221192 - DNA, 15 bp, Homo sapiens
tggcctagtaggtgg

SEQ ID NO: 221193 - DNA, 15 bp, Homo sapiens
gtggcctagtaggtg

SEQ ID NO: 221194 - DNA, 15 bp, Homo sapiens
ggtggcctagtaggt

SEQ ID NO: 221195 - DNA, 15 bp, Homo sapiens
aggtggcctagtagg

SEQ ID NO: 221196 - DNA, 15 bp, Homo sapiens
gaggtggcctagtag

SEQ ID NO: 221197 - DNA, 15 bp, Homo sapiens
agaggtggcctagta

SEQ ID NO: 221198 - DNA, 15 bp, Homo sapiens
aagaggtggcctagt

SEQ ID NO: 221199 - DNA, 15 bp, Homo sapiens
caagaggtggcctag

SEQ ID NO: 221200 - DNA, 15 bp, Homo sapiens
tcaagaggtggccta

SEQ ID NO: 221201 - DNA, 15 bp, Homo sapiens
atcaagaggtggcct

SEQ ID NO: 221202 - DNA, 15 bp, Homo sapiens
catcaagaggtggcc

SEQ ID NO: 221203 - DNA, 15 bp, Homo sapiens
tcatcaagaggtggc

SEQ ID NO: 221204 - DNA, 15 bp, Homo sapiens
atcatcaagaggtgg

SEQ ID NO: 221205 - DNA, 15 bp, Homo sapiens
tatcatcaagaggtg

SEQ ID NO: 221206 - DNA, 15 bp, Homo sapiens
gtatcatcaagaggt

SEQ ID NO: 221207 - DNA, 15 bp, Homo sapiens
ggtatcatcaagagg

SEQ ID NO: 221208 - DNA, 15 bp, Homo sapiens
aggtatcatcaagag

SEQ ID NO: 221209 - DNA, 15 bp, Homo sapiens
gaggtatcatcaaga

SEQ ID NO: 221210 - DNA, 15 bp, Homo sapiens
agaggtatcatcaag

SEQ ID NO: 221211 - DNA, 15 bp, Homo sapiens
aagaggtatcatcaa

SEQ ID NO: 221212 - DNA, 15 bp, Homo sapiens
taagaggtatcatca

SEQ ID NO: 221213 - DNA, 15 bp, Homo sapiens
ctaagaggtatcatc

SEQ ID NO: 221214 - DNA, 15 bp, Homo sapiens
actaagaggtatcat

SEQ ID NO: 221215 - DNA, 15 bp, Homo sapiens
cactaagaggtatca

SEQ ID NO: 221216 - DNA, 15 bp, Homo sapiens
acactaagaggtatc

SEQ ID NO: 221217 - DNA, 15 bp, Homo sapiens
cacactaagaggtat

SEQ ID NO: 221218 - DNA, 15 bp, Homo sapiens
gcacactaagaggta

SEQ ID NO: 221219 - DNA, 15 bp, Homo sapiens
agcacactaagaggt

SEQ ID NO: 221220 - DNA, 15 bp, Homo sapiens
gagcacactaagagg

SEQ ID NO: 221221 - DNA, 15 bp, Homo sapiens
agagcacactaagag

SEQ ID NO: 221222 - DNA, 15 bp, Homo sapiens
aagagcacactaaga

SEQ ID NO: 221223 - DNA, 15 bp, Homo sapiens
aaagagcacactaag

SEQ ID NO: 221224 - DNA, 15 bp, Homo sapiens
caaagagcacactaa

SEQ ID NO: 221225 - DNA, 15 bp, Homo sapiens
ccaaagagcacacta

SEQ ID NO: 221226 - DNA, 15 bp, Homo sapiens
cccaaagagcacact

SEQ ID NO: 221227 - DNA, 15 bp, Homo sapiens
acccaaagagcacac

SEQ ID NO: 221228 - DNA, 15 bp, Homo sapiens
gacccaaagagcaca

SEQ ID NO: 221229 - DNA, 15 bp, Homo sapiens
tgacccaaagagcac

SEQ ID NO: 221230 - DNA, 15 bp, Homo sapiens
ttgacccaaagagca

SEQ ID NO: 221231 - DNA, 15 bp, Homo sapiens
tttgacccaaagagc

SEQ ID NO: 221232 - DNA, 15 bp, Homo sapiens
atttgacccaaagag

SEQ ID NO: 221233 - DNA, 15 bp, Homo sapiens
gatttgacccaaaga

SEQ ID NO: 221234 - DNA, 15 bp, Homo sapiens
ggatttgacccaaag

SEQ ID NO: 221235 - DNA, 15 bp, Homo sapiens
gggatttgacccaaa

SEQ ID NO: 221236 - DNA, 15 bp, Homo sapiens
tgggatttgacccaa

SEQ ID NO: 221237 - DNA, 15 bp, Homo sapiens
gtgggatttgaccca

SEQ ID NO: 221238 - DNA, 15 bp, Homo sapiens
ggtgggatttgaccc

SEQ ID NO: 221239 - DNA, 15 bp, Homo sapiens
gggtgggatttgacc

SEQ ID NO: 221240 - DNA, 15 bp, Homo sapiens
tgggtgggatttgac

SEQ ID NO: 221241 - DNA, 15 bp, Homo sapiens
gtgggtgggatttga

SEQ ID NO: 221242 - DNA, 15 bp, Homo sapiens
agtgggtgggatttg

SEQ ID NO: 221243 - DNA, 15 bp, Homo sapiens
cagtgggtgggattt

SEQ ID NO: 221244 - DNA, 15 bp, Homo sapiens
tcagtgggtgggatt

SEQ ID NO: 221245 - DNA, 15 bp, Homo sapiens
ttcagtgggtgggat

SEQ ID NO: 221246 - DNA, 15 bp, Homo sapiens
tttcagtgggtggga

SEQ ID NO: 221247 - DNA, 15 bp, Homo sapiens
atttcagtgggtggg

SEQ ID NO: 221248 - DNA, 15 bp, Homo sapiens
aatttcagtgggtgg

SEQ ID NO: 221249 - DNA, 15 bp, Homo sapiens
aaatttcagtgggtg

SEQ ID NO: 221250 - DNA, 15 bp, Homo sapiens
gaaatttcagtgggt

SEQ ID NO: 221251 - DNA, 15 bp, Homo sapiens
ggaaatttcagtggg

SEQ ID NO: 221252 - DNA, 15 bp, Homo sapiens
gggaaatttcagtgg

SEQ ID NO: 221253 - DNA, 15 bp, Homo sapiens
tgggaaatttcagtg

SEQ ID NO: 221254 - DNA, 15 bp, Homo sapiens
ttgggaaatttcagt

SEQ ID NO: 221255 - DNA, 15 bp, Homo sapiens
gttgggaaatttcag

SEQ ID NO: 221256 - DNA, 15 bp, Homo sapiens
tgttgggaaatttca

SEQ ID NO: 221257 - DNA, 15 bp, Homo sapiens
atgttgggaaatttc

SEQ ID NO: 221258 - DNA, 15 bp, Homo sapiens
catgttgggaaattt

SEQ ID NO: 221259 - DNA, 15 bp, Homo sapiens
ccatgttgggaaatt

SEQ ID NO: 221260 - DNA, 15 bp, Homo sapiens
accatgttgggaaat

SEQ ID NO: 221261 - DNA, 15 bp, Homo sapiens
taccatgttgggaaa

SEQ ID NO: 221262 - DNA, 15 bp, Homo sapiens
gtaccatgttgggaa

SEQ ID NO: 221263 - DNA, 15 bp, Homo sapiens
ggtaccatgttggga

SEQ ID NO: 221264 - DNA, 15 bp, Homo sapiens
gggtaccatgttggg

SEQ ID NO: 221265 - DNA, 15 bp, Homo sapiens
ggggtaccatgttgg

SEQ ID NO: 221266 - DNA, 15 bp, Homo sapiens
tggggtaccatgttg

SEQ ID NO: 221267 - DNA, 15 bp, Homo sapiens
ttggggtaccatgtt

SEQ ID NO: 221268 - DNA, 15 bp, Homo sapiens
tttggggtaccatgt

SEQ ID NO: 221269 - DNA, 15 bp, Homo sapiens
ctttggggtaccatg

SEQ ID NO: 221270 - DNA, 15 bp, Homo sapiens
gctttggggtaccat

SEQ ID NO: 221271 - DNA, 15 bp, Homo sapiens
ggctttggggtacca

SEQ ID NO: 221272 - DNA, 15 bp, Homo sapiens
aggctttggggtacc

SEQ ID NO: 221273 - DNA, 15 bp, Homo sapiens
gaggctttggggtac

SEQ ID NO: 221274 - DNA, 15 bp, Homo sapiens
agaggctttggggta

SEQ ID NO: 221275 - DNA, 15 bp, Homo sapiens
gagaggctttggggt

SEQ ID NO: 221276 - DNA, 15 bp, Homo sapiens
tgagaggctttgggg

SEQ ID NO: 221277 - DNA, 15 bp, Homo sapiens
atgagaggctttggg

SEQ ID NO: 221278 - DNA, 15 bp, Homo sapiens
catgagaggctttgg

SEQ ID NO: 221279 - DNA, 15 bp, Homo sapiens
tcatgagaggctttg

SEQ ID NO: 221280 - DNA, 15 bp, Homo sapiens
gtcatgagaggcttt

SEQ ID NO: 221281 - DNA, 15 bp, Homo sapiens
tgtcatgagaggctt

SEQ ID NO: 221282 - DNA, 15 bp, Homo sapiens
gtgtcatgagaggct

SEQ ID NO: 221283 - DNA, 15 bp, Homo sapiens
tgtgtcatgagaggc

SEQ ID NO: 221284 - DNA, 15 bp, Homo sapiens
ttgtgtcatgagagg

SEQ ID NO: 221285 - DNA, 15 bp, Homo sapiens
attgtgtcatgagag

SEQ ID NO: 221286 - DNA, 15 bp, Homo sapiens
gattgtgtcatgaga

SEQ ID NO: 221287 - DNA, 15 bp, Homo sapiens
agattgtgtcatgag

SEQ ID NO: 221288 - DNA, 15 bp, Homo sapiens
cagattgtgtcatga

SEQ ID NO: 221289 - DNA, 15 bp, Homo sapiens
gcagattgtgtcatg

SEQ ID NO: 221290 - DNA, 15 bp, Homo sapiens
ggcagattgtgtcat

SEQ ID NO: 221291 - DNA, 15 bp, Homo sapiens
aggcagattgtgtca

SEQ ID NO: 221292 - DNA, 15 bp, Homo sapiens
gaggcagattgtgtc

SEQ ID NO: 221293 - DNA, 15 bp, Homo sapiens
ggaggcagattgtgt

SEQ ID NO: 221294 - DNA, 15 bp, Homo sapiens
gggaggcagattgtg

SEQ ID NO: 221295 - DNA, 15 bp, Homo sapiens
agggaggcagattgt

SEQ ID NO: 221296 - DNA, 15 bp, Homo sapiens
gagggaggcagattg

SEQ ID NO: 221297 - DNA, 15 bp, Homo sapiens
tgagggaggcagatt

SEQ ID NO: 221298 - DNA, 15 bp, Homo sapiens
atgagggaggcagat

SEQ ID NO: 221299 - DNA, 15 bp, Homo sapiens
aatgagggaggcaga

SEQ ID NO: 221300 - DNA, 15 bp, Homo sapiens
aaatgagggaggcag

SEQ ID NO: 221301 - DNA, 15 bp, Homo sapiens
aaaatgagggaggca

SEQ ID NO: 221302 - DNA, 15 bp, Homo sapiens
caaaatgagggaggc

SEQ ID NO: 221303 - DNA, 15 bp, Homo sapiens
ccaaaatgagggagg

SEQ ID NO: 221304 - DNA, 15 bp, Homo sapiens
tccaaaatgagggag

SEQ ID NO: 221305 - DNA, 15 bp, Homo sapiens
atccaaaatgaggga

SEQ ID NO: 221306 - DNA, 15 bp, Homo sapiens
aatccaaaatgaggg

SEQ ID NO: 221307 - DNA, 15 bp, Homo sapiens
aaatccaaaatgagg

SEQ ID NO: 221308 - DNA, 15 bp, Homo sapiens
aaaatccaaaatgag

SEQ ID NO: 221309 - DNA, 15 bp, Homo sapiens
gaaaatccaaaatga

SEQ ID NO: 221310 - DNA, 15 bp, Homo sapiens
ggaaaatccaaaatg

SEQ ID NO: 221311 - DNA, 15 bp, Homo sapiens
tggaaaatccaaaat

SEQ ID NO: 221312 - DNA, 15 bp, Homo sapiens
ttggaaaatccaaaa

SEQ ID NO: 221313 - DNA, 15 bp, Homo sapiens
tttggaaaatccaaa

SEQ ID NO: 221314 - DNA, 15 bp, Homo sapiens
ttttggaaaatccaa

SEQ ID NO: 221315 - DNA, 15 bp, Homo sapiens
cttttggaaaatcca

SEQ ID NO: 221316 - DNA, 15 bp, Homo sapiens
tcttttggaaaatcc

SEQ ID NO: 221317 - DNA, 15 bp, Homo sapiens
atcttttggaaaatc

SEQ ID NO: 221318 - DNA, 15 bp, Homo sapiens
aatcttttggaaaat

SEQ ID NO: 221319 - DNA, 15 bp, Homo sapiens
aaatcttttggaaaa

SEQ ID NO: 221320 - DNA, 15 bp, Homo sapiens
aaaatcttttggaaa

SEQ ID NO: 221321 - DNA, 15 bp, Homo sapiens
taaaatcttttggaa

SEQ ID NO: 221322 - DNA, 15 bp, Homo sapiens
gtaaaatcttttgga

SEQ ID NO: 221323 - DNA, 15 bp, Homo sapiens
agtaaaatcttttgg

SEQ ID NO: 221324 - DNA, 15 bp, Homo sapiens
gagtaaaatcttttg

SEQ ID NO: 221325 - DNA, 15 bp, Homo sapiens
ggagtaaaatctttt

SEQ ID NO: 221326 - DNA, 15 bp, Homo sapiens
gggagtaaaatcttt

SEQ ID NO: 221327 - DNA, 15 bp, Homo sapiens
ggggagtaaaatctt

SEQ ID NO: 221328 - DNA, 15 bp, Homo sapiens
aggggagtaaaatct

SEQ ID NO: 221329 - DNA, 15 bp, Homo sapiens
caggggagtaaaatc

SEQ ID NO: 221330 - DNA, 15 bp, Homo sapiens
acaggggagtaaaat

SEQ ID NO: 221331 - DNA, 15 bp, Homo sapiens
gacaggggagtaaaa

SEQ ID NO: 221332 - DNA, 15 bp, Homo sapiens
agacaggggagtaaa

SEQ ID NO: 221333 - DNA, 15 bp, Homo sapiens
aagacaggggagtaa

SEQ ID NO: 221334 - DNA, 15 bp, Homo sapiens
gaagacaggggagta

SEQ ID NO: 221335 - DNA, 15 bp, Homo sapiens
ggaagacaggggagt

SEQ ID NO: 221336 - DNA, 15 bp, Homo sapiens
gggaagacaggggag

SEQ ID NO: 221337 - DNA, 15 bp, Homo sapiens
tgggaagacagggga

SEQ ID NO: 221338 - DNA, 15 bp, Homo sapiens
ctgggaagacagggg

SEQ ID NO: 221339 - DNA, 15 bp, Homo sapiens
tctgggaagacaggg

SEQ ID NO: 221340 - DNA, 15 bp, Homo sapiens
ctctgggaagacagg

SEQ ID NO: 221341 - DNA, 15 bp, Homo sapiens
tctctgggaagacag

SEQ ID NO: 221342 - DNA, 15 bp, Homo sapiens
ttctctgggaagaca

SEQ ID NO: 221343 - DNA, 15 bp, Homo sapiens
attctctgggaagac

SEQ ID NO: 221344 - DNA, 15 bp, Homo sapiens
cattctctgggaaga

SEQ ID NO: 221345 - DNA, 15 bp, Homo sapiens
acattctctgggaag

SEQ ID NO: 221346 - DNA, 15 bp, Homo sapiens
cacattctctgggaa

SEQ ID NO: 221347 - DNA, 15 bp, Homo sapiens
acacattctctggga

SEQ ID NO: 221348 - DNA, 15 bp, Homo sapiens
gacacattctctggg

SEQ ID NO: 221349 - DNA, 15 bp, Homo sapiens
tgacacattctctgg

SEQ ID NO: 221350 - DNA, 15 bp, Homo sapiens
gtgacacattctctg

SEQ ID NO: 221351 - DNA, 15 bp, Homo sapiens
agtgacacattctct

SEQ ID NO: 221352 - DNA, 15 bp, Homo sapiens
gagtgacacattctc

SEQ ID NO: 221353 - DNA, 15 bp, Homo sapiens
ggagtgacacattct

SEQ ID NO: 221354 - DNA, 15 bp, Homo sapiens
gggagtgacacattc

SEQ ID NO: 221355 - DNA, 15 bp, Homo sapiens
agggagtgacacatt

SEQ ID NO: 221356 - DNA, 15 bp, Homo sapiens
gagggagtgacacat

SEQ ID NO: 221357 - DNA, 15 bp, Homo sapiens
agagggagtgacaca

SEQ ID NO: 221358 - DNA, 15 bp, Homo sapiens
gagagggagtgacac

SEQ ID NO: 221359 - DNA, 15 bp, Homo sapiens
tgagagggagtgaca

SEQ ID NO: 221360 - DNA, 15 bp, Homo sapiens
atgagagggagtgac

SEQ ID NO: 221361 - DNA, 15 bp, Homo sapiens
aatgagagggagtga

SEQ ID NO: 221362 - DNA, 15 bp, Homo sapiens
caatgagagggagtg

SEQ ID NO: 221363 - DNA, 15 bp, Homo sapiens
acaatgagagggagt

SEQ ID NO: 221364 - DNA, 15 bp, Homo sapiens
cacaatgagagggag

SEQ ID NO: 221365 - DNA, 15 bp, Homo sapiens
gcacaatgagaggga

SEQ ID NO: 221366 - DNA, 15 bp, Homo sapiens
tgcacaatgagaggg

SEQ ID NO: 221367 - DNA, 15 bp, Homo sapiens
gtgcacaatgagagg

SEQ ID NO: 221368 - DNA, 15 bp, Homo sapiens
agtgcacaatgagag

SEQ ID NO: 221369 - DNA, 15 bp, Homo sapiens
cagtgcacaatgaga

SEQ ID NO: 221370 - DNA, 15 bp, Homo sapiens
acagtgcacaatgag

SEQ ID NO: 221371 - DNA, 15 bp, Homo sapiens
aacagtgcacaatga

SEQ ID NO: 221372 - DNA, 15 bp, Homo sapiens
gaacagtgcacaatg

SEQ ID NO: 221373 - DNA, 15 bp, Homo sapiens
tgaacagtgcacaat

SEQ ID NO: 221374 - DNA, 15 bp, Homo sapiens
atgaacagtgcacaa

SEQ ID NO: 221375 - DNA, 15 bp, Homo sapiens
catgaacagtgcaca

SEQ ID NO: 221376 - DNA, 15 bp, Homo sapiens
acatgaacagtgcac

SEQ ID NO: 221377 - DNA, 15 bp, Homo sapiens
aacatgaacagtgca

SEQ ID NO: 221378 - DNA, 15 bp, Homo sapiens
aaacatgaacagtgc

SEQ ID NO: 221379 - DNA, 15 bp, Homo sapiens
aaaacatgaacagtg

SEQ ID NO: 221380 - DNA, 15 bp, Homo sapiens
aaaaacatgaacagt

SEQ ID NO: 221381 - DNA, 15 bp, Homo sapiens
taaaaacatgaacag

SEQ ID NO: 221382 - DNA, 15 bp, Homo sapiens
ttaaaaacatgaaca

SEQ ID NO: 221383 - DNA, 15 bp, Homo sapiens
tttaaaaacatgaac

SEQ ID NO: 221384 - DNA, 15 bp, Homo sapiens
ttttaaaaacatgaa

SEQ ID NO: 221385 - DNA, 15 bp, Homo sapiens
cttttaaaaacatga

SEQ ID NO: 221386 - DNA, 15 bp, Homo sapiens
tcttttaaaaacatg

SEQ ID NO: 221387 - DNA, 15 bp, Homo sapiens
ctcttttaaaaacat

SEQ ID NO: 221388 - DNA, 15 bp, Homo sapiens
gctcttttaaaaaca

SEQ ID NO: 221389 - DNA, 15 bp, Homo sapiens
tgctcttttaaaaac

SEQ ID NO: 221390 - DNA, 15 bp, Homo sapiens
gtgctcttttaaaaa

SEQ ID NO: 221391 - DNA, 15 bp, Homo sapiens
tgtgctcttttaaaa

SEQ ID NO: 221392 - DNA, 15 bp, Homo sapiens
atgtgctcttttaaa

SEQ ID NO: 221393 - DNA, 15 bp, Homo sapiens
catgtgctcttttaa

SEQ ID NO: 221394 - DNA, 15 bp, Homo sapiens
gcatgtgctctttta

SEQ ID NO: 221395 - DNA, 15 bp, Homo sapiens
ggcatgtgctctttt

SEQ ID NO: 221396 - DNA, 15 bp, Homo sapiens
gggcatgtgctcttt

SEQ ID NO: 221397 - DNA, 15 bp, Homo sapiens
tgggcatgtgctctt

SEQ ID NO: 221398 - DNA, 15 bp, Homo sapiens
atgggcatgtgctct

SEQ ID NO: 221399 - DNA, 15 bp, Homo sapiens
gatgggcatgtgctc

SEQ ID NO: 221400 - DNA, 15 bp, Homo sapiens
tgatgggcatgtgct

SEQ ID NO: 221401 - DNA, 15 bp, Homo sapiens
atgatgggcatgtgc

SEQ ID NO: 221402 - DNA, 15 bp, Homo sapiens
tatgatgggcatgtg

SEQ ID NO: 221403 - DNA, 15 bp, Homo sapiens
atatgatgggcatgt

SEQ ID NO: 221404 - DNA, 15 bp, Homo sapiens
catatgatgggcatg

SEQ ID NO: 221405 - DNA, 15 bp, Homo sapiens
tcatatgatgggcat

SEQ ID NO: 221406 - DNA, 15 bp, Homo sapiens
gtcatatgatgggca

SEQ ID NO: 221407 - DNA, 15 bp, Homo sapiens
agtcatatgatgggc

SEQ ID NO: 221408 - DNA, 15 bp, Homo sapiens
cagtcatatgatggg

SEQ ID NO: 221409 - DNA, 15 bp, Homo sapiens
acagtcatatgatgg

SEQ ID NO: 221410 - DNA, 15 bp, Homo sapiens
cacagtcatatgatg

SEQ ID NO: 221411 - DNA, 15 bp, Homo sapiens
tcacagtcatatgat

SEQ ID NO: 221412 - DNA, 15 bp, Homo sapiens
ttcacagtcatatga

SEQ ID NO: 221413 - DNA, 15 bp, Homo sapiens
cttcacagtcatatg

SEQ ID NO: 221414 - DNA, 15 bp, Homo sapiens
acttcacagtcatat

SEQ ID NO: 221415 - DNA, 15 bp, Homo sapiens
aacttcacagtcata

SEQ ID NO: 221416 - DNA, 15 bp, Homo sapiens
aaacttcacagtcat

SEQ ID NO: 221417 - DNA, 15 bp, Homo sapiens
aaaacttcacagtca

SEQ ID NO: 221418 - DNA, 15 bp, Homo sapiens
gaaaacttcacagtc

SEQ ID NO: 221419 - DNA, 15 bp, Homo sapiens
ggaaaacttcacagt

SEQ ID NO: 221420 - DNA, 15 bp, Homo sapiens
aggaaaacttcacag

SEQ ID NO: 221421 - DNA, 15 bp, Homo sapiens
gaggaaaacttcaca

SEQ ID NO: 221422 - DNA, 15 bp, Homo sapiens
agaggaaaacttcac

SEQ ID NO: 221423 - DNA, 15 bp, Homo sapiens
aagaggaaaacttca

SEQ ID NO: 221424 - DNA, 15 bp, Homo sapiens
aaagaggaaaacttc

SEQ ID NO: 221425 - DNA, 15 bp, Homo sapiens
caaagaggaaaactt

SEQ ID NO: 221426 - DNA, 15 bp, Homo sapiens
acaaagaggaaaact

SEQ ID NO: 221427 - DNA, 15 bp, Homo sapiens
gacaaagaggaaaac

SEQ ID NO: 221428 - DNA, 15 bp, Homo sapiens
agacaaagaggaaaa

SEQ ID NO: 221429 - DNA, 15 bp, Homo sapiens
gagacaaagaggaaa

SEQ ID NO: 221430 - DNA, 15 bp, Homo sapiens
agagacaaagaggaa

SEQ ID NO: 221431 - DNA, 15 bp, Homo sapiens
cagagacaaagagga

SEQ ID NO: 221432 - DNA, 15 bp, Homo sapiens
tcagagacaaagagg

SEQ ID NO: 221433 - DNA, 15 bp, Homo sapiens
gtcagagacaaagag

SEQ ID NO: 221434 - DNA, 15 bp, Homo sapiens
tgtcagagacaaaga

SEQ ID NO: 221435 - DNA, 15 bp, Homo sapiens
atgtcagagacaaag

SEQ ID NO: 221436 - DNA, 15 bp, Homo sapiens
aatgtcagagacaaa

SEQ ID NO: 221437 - DNA, 15 bp, Homo sapiens
gaatgtcagagacaa

SEQ ID NO: 221438 - DNA, 15 bp, Homo sapiens
tgaatgtcagagaca

SEQ ID NO: 221439 - DNA, 15 bp, Homo sapiens
ctgaatgtcagagac

SEQ ID NO: 221440 - DNA, 15 bp, Homo sapiens
gctgaatgtcagaga

SEQ ID NO: 221441 - DNA, 15 bp, Homo sapiens
agctgaatgtcagag

SEQ ID NO: 221442 - DNA, 15 bp, Homo sapiens
cagctgaatgtcaga

SEQ ID NO: 221443 - DNA, 15 bp, Homo sapiens
tcagctgaatgtcag

SEQ ID NO: 221444 - DNA, 15 bp, Homo sapiens
ttcagctgaatgtca

SEQ ID NO: 221445 - DNA, 15 bp, Homo sapiens
tttcagctgaatgtc

SEQ ID NO: 221446 - DNA, 15 bp, Homo sapiens
ctttcagctgaatgt

SEQ ID NO: 221447 - DNA, 15 bp, Homo sapiens
gctttcagctgaatg

SEQ ID NO: 221448 - DNA, 15 bp, Homo sapiens
ggctttcagctgaat

SEQ ID NO: 221449 - DNA, 15 bp, Homo sapiens
gggctttcagctgaa

SEQ ID NO: 221450 - DNA, 15 bp, Homo sapiens
ggggctttcagctga

SEQ ID NO: 221451 - DNA, 15 bp, Homo sapiens
aggggctttcagctg

SEQ ID NO: 221452 - DNA, 15 bp, Homo sapiens
caggggctttcagct

SEQ ID NO: 221453 - DNA, 15 bp, Homo sapiens
tcaggggctttcagc

SEQ ID NO: 221454 - DNA, 15 bp, Homo sapiens
ttcaggggctttcag

SEQ ID NO: 221455 - DNA, 15 bp, Homo sapiens
cttcaggggctttca

SEQ ID NO: 221456 - DNA, 15 bp, Homo sapiens
ccttcaggggctttc

SEQ ID NO: 221457 - DNA, 15 bp, Homo sapiens
cccttcaggggcttt

SEQ ID NO: 221458 - DNA, 15 bp, Homo sapiens
tcccttcaggggctt

SEQ ID NO: 221459 - DNA, 15 bp, Homo sapiens
gtcccttcaggggct

SEQ ID NO: 221460 - DNA, 15 bp, Homo sapiens
agtcccttcaggggc

SEQ ID NO: 221461 - DNA, 15 bp, Homo sapiens
aagtcccttcagggg

SEQ ID NO: 221462 - DNA, 15 bp, Homo sapiens
caagtcccttcaggg

SEQ ID NO: 221463 - DNA, 15 bp, Homo sapiens
tcaagtcccttcagg

SEQ ID NO: 221464 - DNA, 15 bp, Homo sapiens
gtcaagtcccttcag

SEQ ID NO: 221465 - DNA, 15 bp, Homo sapiens
ggtcaagtcccttca

SEQ ID NO: 221466 - DNA, 15 bp, Homo sapiens
tggtcaagtcccttc

SEQ ID NO: 221467 - DNA, 15 bp, Homo sapiens
atggtcaagtccctt

SEQ ID NO: 221468 - DNA, 15 bp, Homo sapiens
tatggtcaagtccct

SEQ ID NO: 221469 - DNA, 15 bp, Homo sapiens
atatggtcaagtccc

SEQ ID NO: 221470 - DNA, 15 bp, Homo sapiens
gatatggtcaagtcc

SEQ ID NO: 221471 - DNA, 15 bp, Homo sapiens
agatatggtcaagtc

SEQ ID NO: 221472 - DNA, 15 bp, Homo sapiens
aagatatggtcaagt

SEQ ID NO: 221473 - DNA, 15 bp, Homo sapiens
taagatatggtcaag

SEQ ID NO: 221474 - DNA, 15 bp, Homo sapiens
ataagatatggtcaa

SEQ ID NO: 221475 - DNA, 15 bp, Homo sapiens
aataagatatggtca

SEQ ID NO: 221476 - DNA, 15 bp, Homo sapiens
gaataagatatggtc

SEQ ID NO: 221477 - DNA, 15 bp, Homo sapiens
ggaataagatatggt

SEQ ID NO: 221478 - DNA, 15 bp, Homo sapiens
aggaataagatatgg

SEQ ID NO: 221479 - DNA, 15 bp, Homo sapiens
gaggaataagatatg

SEQ ID NO: 221480 - DNA, 15 bp, Homo sapiens
agaggaataagatat

SEQ ID NO: 221481 - DNA, 15 bp, Homo sapiens
aagaggaataagata

SEQ ID NO: 221482 - DNA, 15 bp, Homo sapiens
aaagaggaataagat

SEQ ID NO: 221483 - DNA, 15 bp, Homo sapiens
caaagaggaataaga

SEQ ID NO: 221484 - DNA, 15 bp, Homo sapiens
acaaagaggaataag

SEQ ID NO: 221485 - DNA, 15 bp, Homo sapiens
aacaaagaggaataa

SEQ ID NO: 221486 - DNA, 15 bp, Homo sapiens
aaacaaagaggaata

SEQ ID NO: 221487 - DNA, 15 bp, Homo sapiens
aaaacaaagaggaat

SEQ ID NO: 221488 - DNA, 15 bp, Homo sapiens
gaaaacaaagaggaa

SEQ ID NO: 221489 - DNA, 15 bp, Homo sapiens
ggaaaacaaagagga

SEQ ID NO: 221490 - DNA, 15 bp, Homo sapiens
aggaaaacaaagagg

SEQ ID NO: 221491 - DNA, 15 bp, Homo sapiens
taggaaaacaaagag

SEQ ID NO: 221492 - DNA, 15 bp, Homo sapiens
ctaggaaaacaaaga

SEQ ID NO: 221493 - DNA, 15 bp, Homo sapiens
cctaggaaaacaaag

SEQ ID NO: 221494 - DNA, 15 bp, Homo sapiens
ccctaggaaaacaaa

SEQ ID NO: 221495 - DNA, 15 bp, Homo sapiens
tccctaggaaaacaa

SEQ ID NO: 221496 - DNA, 15 bp, Homo sapiens
atccctaggaaaaca

SEQ ID NO: 221497 - DNA, 15 bp, Homo sapiens
catccctaggaaaac

SEQ ID NO: 221498 - DNA, 15 bp, Homo sapiens
acatccctaggaaaa

SEQ ID NO: 221499 - DNA, 15 bp, Homo sapiens
aacatccctaggaaa

SEQ ID NO: 221500 - DNA, 15 bp, Homo sapiens
caacatccctaggaa

SEQ ID NO: 221501 - DNA, 15 bp, Homo sapiens
acaacatccctagga

SEQ ID NO: 221502 - DNA, 15 bp, Homo sapiens
tacaacatccctagg

SEQ ID NO: 221503 - DNA, 15 bp, Homo sapiens
ctacaacatccctag

SEQ ID NO: 221504 - DNA, 15 bp, Homo sapiens
actacaacatcccta

SEQ ID NO: 221505 - DNA, 15 bp, Homo sapiens
aactacaacatccct

SEQ ID NO: 221506 - DNA, 15 bp, Homo sapiens
caactacaacatccc

SEQ ID NO: 221507 - DNA, 15 bp, Homo sapiens
ccaactacaacatcc

SEQ ID NO: 221508 - DNA, 15 bp, Homo sapiens
cccaactacaacatc

SEQ ID NO: 221509 - DNA, 15 bp, Homo sapiens
gcccaactacaacat

SEQ ID NO: 221510 - DNA, 15 bp, Homo sapiens
tgcccaactacaaca

SEQ ID NO: 221511 - DNA, 15 bp, Homo sapiens
gtgcccaactacaac

SEQ ID NO: 221512 - DNA, 15 bp, Homo sapiens
tgtgcccaactacaa

SEQ ID NO: 221513 - DNA, 15 bp, Homo sapiens
atgtgcccaactaca

SEQ ID NO: 221514 - DNA, 15 bp, Homo sapiens
tatgtgcccaactac

SEQ ID NO: 221515 - DNA, 15 bp, Homo sapiens
ctatgtgcccaacta

SEQ ID NO: 221516 - DNA, 15 bp, Homo sapiens
actatgtgcccaact

SEQ ID NO: 221517 - DNA, 15 bp, Homo sapiens
tactatgtgcccaac

SEQ ID NO: 221518 - DNA, 15 bp, Homo sapiens
ctactatgtgcccaa

SEQ ID NO: 221519 - DNA, 15 bp, Homo sapiens
tctactatgtgccca

SEQ ID NO: 221520 - DNA, 15 bp, Homo sapiens
ctctactatgtgccc

SEQ ID NO: 221521 - DNA, 15 bp, Homo sapiens
gctctactatgtgcc

SEQ ID NO: 221522 - DNA, 15 bp, Homo sapiens
agctctactatgtgc

SEQ ID NO: 221523 - DNA, 15 bp, Homo sapiens
gagctctactatgtg

SEQ ID NO: 221524 - DNA, 15 bp, Homo sapiens
tgagctctactatgt

SEQ ID NO: 221525 - DNA, 15 bp, Homo sapiens
gtgagctctactatg

SEQ ID NO: 221526 - DNA, 15 bp, Homo sapiens
tgtgagctctactat

SEQ ID NO: 221527 - DNA, 15 bp, Homo sapiens
ttgtgagctctacta

SEQ ID NO: 221528 - DNA, 15 bp, Homo sapiens
tttgtgagctctact

SEQ ID NO: 221529 - DNA, 15 bp, Homo sapiens
ttttgtgagctctac

SEQ ID NO: 221530 - DNA, 15 bp, Homo sapiens
attttgtgagctcta

SEQ ID NO: 221531 - DNA, 15 bp, Homo sapiens
cattttgtgagctct

SEQ ID NO: 221532 - DNA, 15 bp, Homo sapiens
acattttgtgagctc

SEQ ID NO: 221533 - DNA, 15 bp, Homo sapiens
aacattttgtgagct

SEQ ID NO: 221534 - DNA, 15 bp, Homo sapiens
caacattttgtgagc

SEQ ID NO: 221535 - DNA, 15 bp, Homo sapiens
gcaacattttgtgag

SEQ ID NO: 221536 - DNA, 15 bp, Homo sapiens
agcaacattttgtga

SEQ ID NO: 221537 - DNA, 15 bp, Homo sapiens
cagcaacattttgtg

SEQ ID NO: 221538 - DNA, 15 bp, Homo sapiens
tcagcaacattttgt

SEQ ID NO: 221539 - DNA, 15 bp, Homo sapiens
ttcagcaacattttg

SEQ ID NO: 221540 - DNA, 15 bp, Homo sapiens
gttcagcaacatttt

SEQ ID NO: 221541 - DNA, 15 bp, Homo sapiens
tgttcagcaacattt

SEQ ID NO: 221542 - DNA, 15 bp, Homo sapiens
atgttcagcaacatt

SEQ ID NO: 221543 - DNA, 15 bp, Homo sapiens
tatgttcagcaacat

SEQ ID NO: 221544 - DNA, 15 bp, Homo sapiens
ctatgttcagcaaca

SEQ ID NO: 221545 - DNA, 15 bp, Homo sapiens
actatgttcagcaac

SEQ ID NO: 221546 - DNA, 15 bp, Homo sapiens
cactatgttcagcaa

SEQ ID NO: 221547 - DNA, 15 bp, Homo sapiens
gcactatgttcagca

SEQ ID NO: 221548 - DNA, 15 bp, Homo sapiens
tgcactatgttcagc

SEQ ID NO: 221549 - DNA, 15 bp, Homo sapiens
gtgcactatgttcag

SEQ ID NO: 221550 - DNA, 15 bp, Homo sapiens
ggtgcactatgttca

SEQ ID NO: 221551 - DNA, 15 bp, Homo sapiens
tggtgcactatgttc

SEQ ID NO: 221552 - DNA, 15 bp, Homo sapiens
atggtgcactatgtt

SEQ ID NO: 221553 - DNA, 15 bp, Homo sapiens
aatggtgcactatgt

SEQ ID NO: 221554 - DNA, 15 bp, Homo sapiens
caatggtgcactatg

SEQ ID NO: 221555 - DNA, 15 bp, Homo sapiens
tcaatggtgcactat

SEQ ID NO: 221556 - DNA, 15 bp, Homo sapiens
gtcaatggtgcacta

SEQ ID NO: 221557 - DNA, 15 bp, Homo sapiens
tgtcaatggtgcact

SEQ ID NO: 221558 - DNA, 15 bp, Homo sapiens
gtgtcaatggtgcac

SEQ ID NO: 221559 - DNA, 15 bp, Homo sapiens
tgtgtcaatggtgca

SEQ ID NO: 221560 - DNA, 15 bp, Homo sapiens
ttgtgtcaatggtgc

SEQ ID NO: 221561 - DNA, 15 bp, Homo sapiens
gttgtgtcaatggtg

SEQ ID NO: 221562 - DNA, 15 bp, Homo sapiens
tgttgtgtcaatggt

SEQ ID NO: 221563 - DNA, 15 bp, Homo sapiens
atgttgtgtcaatgg

SEQ ID NO: 221564 - DNA, 15 bp, Homo sapiens
tatgttgtgtcaatg

SEQ ID NO: 221565 - DNA, 15 bp, Homo sapiens
ttatgttgtgtcaat

SEQ ID NO: 221566 - DNA, 15 bp, Homo sapiens
attatgttgtgtcaa

SEQ ID NO: 221567 - DNA, 15 bp, Homo sapiens
aattatgttgtgtca

SEQ ID NO: 221568 - DNA, 15 bp, Homo sapiens
gaattatgttgtgtc

SEQ ID NO: 221569 - DNA, 15 bp, Homo sapiens
ggaattatgttgtgt

SEQ ID NO: 221570 - DNA, 15 bp, Homo sapiens
tggaattatgttgtg

SEQ ID NO: 221571 - DNA, 15 bp, Homo sapiens
ctggaattatgttgt

SEQ ID NO: 221572 - DNA, 15 bp, Homo sapiens
tctggaattatgttg

SEQ ID NO: 221573 - DNA, 15 bp, Homo sapiens
atctggaattatgtt

SEQ ID NO: 221574 - DNA, 15 bp, Homo sapiens
aatctggaattatgt

SEQ ID NO: 221575 - DNA, 15 bp, Homo sapiens
aaatctggaattatg

SEQ ID NO: 221576 - DNA, 15 bp, Homo sapiens
gaaatctggaattat

SEQ ID NO: 221577 - DNA, 15 bp, Homo sapiens
agaaatctggaatta

SEQ ID NO: 221578 - DNA, 15 bp, Homo sapiens
tagaaatctggaatt

SEQ ID NO: 221579 - DNA, 15 bp, Homo sapiens
ttagaaatctggaat

SEQ ID NO: 221580 - DNA, 15 bp, Homo sapiens
gttagaaatctggaa

SEQ ID NO: 221581 - DNA, 15 bp, Homo sapiens
agttagaaatctgga

SEQ ID NO: 221582 - DNA, 15 bp, Homo sapiens
aagttagaaatctgg

SEQ ID NO: 221583 - DNA, 15 bp, Homo sapiens
aaagttagaaatctg

SEQ ID NO: 221584 - DNA, 15 bp, Homo sapiens
caaagttagaaatct

SEQ ID NO: 221585 - DNA, 15 bp, Homo sapiens
tcaaagttagaaatc

SEQ ID NO: 221586 - DNA, 15 bp, Homo sapiens
atcaaagttagaaat

SEQ ID NO: 221587 - DNA, 15 bp, Homo sapiens
aatcaaagttagaaa

SEQ ID NO: 221588 - DNA, 15 bp, Homo sapiens
aaatcaaagttagaa

SEQ ID NO: 221589 - DNA, 15 bp, Homo sapiens
gaaatcaaagttaga

SEQ ID NO: 221590 - DNA, 15 bp, Homo sapiens
agaaatcaaagttag

SEQ ID NO: 221591 - DNA, 15 bp, Homo sapiens
cagaaatcaaagtta

SEQ ID NO: 221592 - DNA, 15 bp, Homo sapiens
tcagaaatcaaagtt

SEQ ID NO: 221593 - DNA, 15 bp, Homo sapiens
ttcagaaatcaaagt

SEQ ID NO: 221594 - DNA, 15 bp, Homo sapiens
tttcagaaatcaaag

SEQ ID NO: 221595 - DNA, 15 bp, Homo sapiens
ctttcagaaatcaaa

SEQ ID NO: 221596 - DNA, 15 bp, Homo sapiens
cctttcagaaatcaa

SEQ ID NO: 221597 - DNA, 15 bp, Homo sapiens
acctttcagaaatca

SEQ ID NO: 221598 - DNA, 15 bp, Homo sapiens
tacctttcagaaatc

SEQ ID NO: 221599 - DNA, 15 bp, Homo sapiens
ttacctttcagaaat

SEQ ID NO: 221600 - DNA, 15 bp, Homo sapiens
tttacctttcagaaa

SEQ ID NO: 221601 - DNA, 15 bp, Homo sapiens
gtttacctttcagaa

SEQ ID NO: 221602 - DNA, 15 bp, Homo sapiens
tgtttacctttcaga

SEQ ID NO: 221603 - DNA, 15 bp, Homo sapiens
atgtttacctttcag

SEQ ID NO: 221604 - DNA, 15 bp, Homo sapiens
aatgtttacctttca

SEQ ID NO: 221605 - DNA, 15 bp, Homo sapiens
caatgtttacctttc

SEQ ID NO: 221606 - DNA, 15 bp, Homo sapiens
gcaatgtttaccttt

SEQ ID NO: 221607 - DNA, 15 bp, Homo sapiens
agcaatgtttacctt

SEQ ID NO: 221608 - DNA, 15 bp, Homo sapiens
tagcaatgtttacct

SEQ ID NO: 221609 - DNA, 15 bp, Homo sapiens
gtagcaatgtttacc

SEQ ID NO: 221610 - DNA, 15 bp, Homo sapiens
tgtagcaatgtttac

SEQ ID NO: 221611 - DNA, 15 bp, Homo sapiens
ttgtagcaatgttta

SEQ ID NO: 221612 - DNA, 15 bp, Homo sapiens
attgtagcaatgttt

SEQ ID NO: 221613 - DNA, 15 bp, Homo sapiens
cattgtagcaatgtt

SEQ ID NO: 221614 - DNA, 15 bp, Homo sapiens
acattgtagcaatgt

SEQ ID NO: 221615 - DNA, 15 bp, Homo sapiens
tacattgtagcaatg

SEQ ID NO: 221616 - DNA, 15 bp, Homo sapiens
atacattgtagcaat

SEQ ID NO: 221617 - DNA, 15 bp, Homo sapiens
aatacattgtagcaa

SEQ ID NO: 221618 - DNA, 15 bp, Homo sapiens
taatacattgtagca

SEQ ID NO: 221619 - DNA, 15 bp, Homo sapiens
ttaatacattgtagc

SEQ ID NO: 221620 - DNA, 15 bp, Homo sapiens
gttaatacattgtag

SEQ ID NO: 221621 - DNA, 15 bp, Homo sapiens
ggttaatacattgta

SEQ ID NO: 221622 - DNA, 15 bp, Homo sapiens
tggttaatacattgt

SEQ ID NO: 221623 - DNA, 15 bp, Homo sapiens
gtggttaatacattg

SEQ ID NO: 221624 - DNA, 15 bp, Homo sapiens
tgtggttaatacatt

SEQ ID NO: 221625 - DNA, 15 bp, Homo sapiens
gtgtggttaatacat

SEQ ID NO: 221626 - DNA, 15 bp, Homo sapiens
tgtgtggttaataca

SEQ ID NO: 221627 - DNA, 15 bp, Homo sapiens
ctgtgtggttaatac

SEQ ID NO: 221628 - DNA, 15 bp, Homo sapiens
tctgtgtggttaata

SEQ ID NO: 221629 - DNA, 15 bp, Homo sapiens
ttctgtgtggttaat

SEQ ID NO: 221630 - DNA, 15 bp, Homo sapiens
cttctgtgtggttaa

SEQ ID NO: 221631 - DNA, 15 bp, Homo sapiens
tcttctgtgtggtta

SEQ ID NO: 221632 - DNA, 15 bp, Homo sapiens
gtcttctgtgtggtt

SEQ ID NO: 221633 - DNA, 15 bp, Homo sapiens
agtcttctgtgtggt

SEQ ID NO: 221634 - DNA, 15 bp, Homo sapiens
gagtcttctgtgtgg

SEQ ID NO: 221635 - DNA, 15 bp, Homo sapiens
tgagtcttctgtgtg

SEQ ID NO: 221636 - DNA, 15 bp, Homo sapiens
ttgagtcttctgtgt

SEQ ID NO: 221637 - DNA, 15 bp, Homo sapiens
tttgagtcttctgtg

SEQ ID NO: 221638 - DNA, 15 bp, Homo sapiens
gtttgagtcttctgt

SEQ ID NO: 221639 - DNA, 15 bp, Homo sapiens
tgtttgagtcttctg

SEQ ID NO: 221640 - DNA, 15 bp, Homo sapiens
ttgtttgagtcttct

SEQ ID NO: 221641 - DNA, 15 bp, Homo sapiens
tttgtttgagtcttc

SEQ ID NO: 221642 - DNA, 15 bp, Homo sapiens
gtttgtttgagtctt

SEQ ID NO: 221643 - DNA, 15 bp, Homo sapiens
ggtttgtttgagtct

SEQ ID NO: 221644 - DNA, 15 bp, Homo sapiens
gggtttgtttgagtc

SEQ ID NO: 221645 - DNA, 15 bp, Homo sapiens
tgggtttgtttgagt

SEQ ID NO: 221646 - DNA, 15 bp, Homo sapiens
ttgggtttgtttgag

SEQ ID NO: 221647 - DNA, 15 bp, Homo sapiens
gttgggtttgtttga

SEQ ID NO: 221648 - DNA, 15 bp, Homo sapiens
ggttgggtttgtttg

SEQ ID NO: 221649 - DNA, 15 bp, Homo sapiens
gggttgggtttgttt

SEQ ID NO: 221650 - DNA, 15 bp, Homo sapiens
ggggttgggtttgtt

SEQ ID NO: 221651 - DNA, 15 bp, Homo sapiens
gggggttgggtttgt

SEQ ID NO: 221652 - DNA, 15 bp, Homo sapiens
agggggttgggtttg

SEQ ID NO: 221653 - DNA, 15 bp, Homo sapiens
aagggggttgggttt

SEQ ID NO: 221654 - DNA, 15 bp, Homo sapiens
gaagggggttgggtt

SEQ ID NO: 221655 - DNA, 15 bp, Homo sapiens
ggaagggggttgggt

SEQ ID NO: 221656 - DNA, 15 bp, Homo sapiens
tggaagggggttggg

SEQ ID NO: 221657 - DNA, 15 bp, Homo sapiens
ttggaagggggttgg

SEQ ID NO: 221658 - DNA, 15 bp, Homo sapiens
tttggaagggggttg

SEQ ID NO: 221659 - DNA, 15 bp, Homo sapiens
gtttggaagggggtt

SEQ ID NO: 221660 - DNA, 15 bp, Homo sapiens
tgtttggaagggggt

SEQ ID NO: 221661 - DNA, 15 bp, Homo sapiens
ttgtttggaaggggg

SEQ ID NO: 221662 - DNA, 15 bp, Homo sapiens
tttgtttggaagggg

SEQ ID NO: 221663 - DNA, 15 bp, Homo sapiens
ctttgtttggaaggg

SEQ ID NO: 221664 - DNA, 15 bp, Homo sapiens
gctttgtttggaagg

SEQ ID NO: 221665 - DNA, 15 bp, Homo sapiens
tgctttgtttggaag

SEQ ID NO: 221666 - DNA, 15 bp, Homo sapiens
ctgctttgtttggaa

SEQ ID NO: 221667 - DNA, 15 bp, Homo sapiens
cctgctttgtttgga

SEQ ID NO: 221668 - DNA, 15 bp, Homo sapiens
acctgctttgtttgg

SEQ ID NO: 221669 - DNA, 15 bp, Homo sapiens
aacctgctttgtttg

SEQ ID NO: 221670 - DNA, 15 bp, Homo sapiens
aaacctgctttgttt

SEQ ID NO: 221671 - DNA, 15 bp, Homo sapiens
caaacctgctttgtt

SEQ ID NO: 221672 - DNA, 15 bp, Homo sapiens
acaaacctgctttgt

SEQ ID NO: 221673 - DNA, 15 bp, Homo sapiens
aacaaacctgctttg

SEQ ID NO: 221674 - DNA, 15 bp, Homo sapiens
aaacaaacctgcttt

SEQ ID NO: 221675 - DNA, 15 bp, Homo sapiens
caaacaaacctgctt

SEQ ID NO: 221676 - DNA, 15 bp, Homo sapiens
acaaacaaacctgct

SEQ ID NO: 221677 - DNA, 15 bp, Homo sapiens
aacaaacaaacctgc

SEQ ID NO: 221678 - DNA, 15 bp, Homo sapiens
aaacaaacaaacctg

SEQ ID NO: 221679 - DNA, 15 bp, Homo sapiens
aaaacaaacaaacct

SEQ ID NO: 221680 - DNA, 15 bp, Homo sapiens
aaaaacaaacaaacc

SEQ ID NO: 221681 - DNA, 15 bp, Homo sapiens
aaaaaacaaacaaac

SEQ ID NO: 221682 - DNA, 15 bp, Homo sapiens
caaaaaacaaacaaa

SEQ ID NO: 221683 - DNA, 15 bp, Homo sapiens
acaaaaaacaaacaa

SEQ ID NO: 221684 - DNA, 15 bp, Homo sapiens
aacaaaaaacaaaca

SEQ ID NO: 221685 - DNA, 15 bp, Homo sapiens
taacaaaaaacaaac

SEQ ID NO: 221686 - DNA, 15 bp, Homo sapiens
ctaacaaaaaacaaa

SEQ ID NO: 221687 - DNA, 15 bp, Homo sapiens
cctaacaaaaaacaa

SEQ ID NO: 221688 - DNA, 15 bp, Homo sapiens
ccctaacaaaaaaca

SEQ ID NO: 221689 - DNA, 15 bp, Homo sapiens
gccctaacaaaaaac

SEQ ID NO: 221690 - DNA, 15 bp, Homo sapiens
tgccctaacaaaaaa

SEQ ID NO: 221691 - DNA, 15 bp, Homo sapiens
gtgccctaacaaaaa

SEQ ID NO: 221692 - DNA, 15 bp, Homo sapiens
ggtgccctaacaaaa

SEQ ID NO: 221693 - DNA, 15 bp, Homo sapiens
gggtgccctaacaaa

SEQ ID NO: 221694 - DNA, 15 bp, Homo sapiens
tgggtgccctaacaa

SEQ ID NO: 221695 - DNA, 15 bp, Homo sapiens
gtgggtgccctaaca

SEQ ID NO: 221696 - DNA, 15 bp, Homo sapiens
agtgggtgccctaac

SEQ ID NO: 221697 - DNA, 15 bp, Homo sapiens
aagtgggtgccctaa

SEQ ID NO: 221698 - DNA, 15 bp, Homo sapiens
gaagtgggtgcccta

SEQ ID NO: 221699 - DNA, 15 bp, Homo sapiens
agaagtgggtgccct

SEQ ID NO: 221700 - DNA, 15 bp, Homo sapiens
tagaagtgggtgccc

SEQ ID NO: 221701 - DNA, 15 bp, Homo sapiens
gtagaagtgggtgcc
